United States Patent Application Publication US 2015/0232836 A1 - sequence listing, part 32

SEQ ID NO: 1221700 - DNA, 15 bp, Homo sapiens
gctcagagaggccct

SEQ ID NO: 1221701 - DNA, 15 bp, Homo sapiens
ggctcagagaggccc

SEQ ID NO: 1221702 - DNA, 15 bp, Homo sapiens
gggctcagagaggcc

SEQ ID NO: 1221703 - DNA, 15 bp, Homo sapiens
ggggctcagagaggc

SEQ ID NO: 1221704 - DNA, 15 bp, Homo sapiens
cggggctcagagagg

SEQ ID NO: 1221705 - DNA, 15 bp, Homo sapiens
ccggggctcagagag

SEQ ID NO: 1221706 - DNA, 15 bp, Homo sapiens
gccggggctcagaga

SEQ ID NO: 1221707 - DNA, 15 bp, Homo sapiens
tgccggggctcagag

SEQ ID NO: 1221708 - DNA, 15 bp, Homo sapiens
gtgccggggctcaga

SEQ ID NO: 1221709 - DNA, 15 bp, Homo sapiens
tgtgccggggctcag

SEQ ID NO: 1221710 - DNA, 15 bp, Homo sapiens
ctgtgccggggctca

SEQ ID NO: 1221711 - DNA, 15 bp, Homo sapiens
cctgtgccggggctc

SEQ ID NO: 1221712 - DNA, 15 bp, Homo sapiens
gcctgtgccggggct

SEQ ID NO: 1221713 - DNA, 15 bp, Homo sapiens
ggcctgtgccggggc

SEQ ID NO: 1221714 - DNA, 15 bp, Homo sapiens
cggcctgtgccgggg

SEQ ID NO: 1221715 - DNA, 15 bp, Homo sapiens
gcggcctgtgccggg

SEQ ID NO: 1221716 - DNA, 15 bp, Homo sapiens
ggcggcctgtgccgg

SEQ ID NO: 1221717 - DNA, 15 bp, Homo sapiens
aggcggcctgtgccg

SEQ ID NO: 1221718 - DNA, 15 bp, Homo sapiens
caggcggcctgtgcc

SEQ ID NO: 1221719 - DNA, 15 bp, Homo sapiens
tcaggcggcctgtgc

SEQ ID NO: 1221720 - DNA, 15 bp, Homo sapiens
atcaggcggcctgtg

SEQ ID NO: 1221721 - DNA, 15 bp, Homo sapiens
catcaggcggcctgt

SEQ ID NO: 1221722 - DNA, 15 bp, Homo sapiens
ccatcaggcggcctg

SEQ ID NO: 1221723 - DNA, 15 bp, Homo sapiens
cccatcaggcggcct

SEQ ID NO: 1221724 - DNA, 15 bp, Homo sapiens
tcccatcaggcggcc

SEQ ID NO: 1221725 - DNA, 15 bp, Homo sapiens
gtcccatcaggcggc

SEQ ID NO: 1221726 - DNA, 15 bp, Homo sapiens
ggtcccatcaggcgg

SEQ ID NO: 1221727 - DNA, 15 bp, Homo sapiens
cggtcccatcaggcg

SEQ ID NO: 1221728 - DNA, 15 bp, Homo sapiens
acggtcccatcaggc

SEQ ID NO: 1221729 - DNA, 15 bp, Homo sapiens
gacggtcccatcagg

SEQ ID NO: 1221730 - DNA, 15 bp, Homo sapiens
agacggtcccatcag

SEQ ID NO: 1221731 - DNA, 15 bp, Homo sapiens
gagacggtcccatca

SEQ ID NO: 1221732 - DNA, 15 bp, Homo sapiens
agagacggtcccatc

SEQ ID NO: 1221733 - DNA, 15 bp, Homo sapiens
aagagacggtcccat

SEQ ID NO: 1221734 - DNA, 15 bp, Homo sapiens
gaagagacggtccca

SEQ ID NO: 1221735 - DNA, 15 bp, Homo sapiens
ggaagagacggtccc

SEQ ID NO: 1221736 - DNA, 15 bp, Homo sapiens
aggaagagacggtcc

SEQ ID NO: 1221737 - DNA, 15 bp, Homo sapiens
aaggaagagacggtc

SEQ ID NO: 1221738 - DNA, 15 bp, Homo sapiens
caaggaagagacggt

SEQ ID NO: 1221739 - DNA, 15 bp, Homo sapiens
ccaaggaagagacgg

SEQ ID NO: 1221740 - DNA, 15 bp, Homo sapiens
cccaaggaagagacg

SEQ ID NO: 1221741 - DNA, 15 bp, Homo sapiens
ccccaaggaagagac

SEQ ID NO: 1221742 - DNA, 15 bp, Homo sapiens
tccccaaggaagaga

SEQ ID NO: 1221743 - DNA, 15 bp, Homo sapiens
ttccccaaggaagag

SEQ ID NO: 1221744 - DNA, 15 bp, Homo sapiens
tttccccaaggaaga

SEQ ID NO: 1221745 - DNA, 15 bp, Homo sapiens
gtttccccaaggaag

SEQ ID NO: 1221746 - DNA, 15 bp, Homo sapiens
agtttccccaaggaa

SEQ ID NO: 1221747 - DNA, 15 bp, Homo sapiens
cagtttccccaagga

SEQ ID NO: 1221748 - DNA, 15 bp, Homo sapiens
tcagtttccccaagg

SEQ ID NO: 1221749 - DNA, 15 bp, Homo sapiens
ctcagtttccccaag

SEQ ID NO: 1221750 - DNA, 15 bp, Homo sapiens
cctcagtttccccaa

SEQ ID NO: 1221751 - DNA, 15 bp, Homo sapiens
cctgggcctcagttt

SEQ ID NO: 1221752 - DNA, 15 bp, Homo sapiens
acctgggcctcagtt

SEQ ID NO: 1221753 - DNA, 15 bp, Homo sapiens
aacctgggcctcagt

SEQ ID NO: 1221754 - DNA, 15 bp, Homo sapiens
caacctgggcctcag

SEQ ID NO: 1221755 - DNA, 15 bp, Homo sapiens
gcaacctgggcctca

SEQ ID NO: 1221756 - DNA, 15 bp, Homo sapiens
agcaacctgggcctc

SEQ ID NO: 1221757 - DNA, 15 bp, Homo sapiens
cagcaacctgggcct

SEQ ID NO: 1221758 - DNA, 15 bp, Homo sapiens
ccagcaacctgggcc

SEQ ID NO: 1221759 - DNA, 15 bp, Homo sapiens
cccagcaacctgggc

SEQ ID NO: 1221760 - DNA, 15 bp, Homo sapiens
ccccagcaacctggg

SEQ ID NO: 1221761 - DNA, 15 bp, Homo sapiens
accccagcaacctgg

SEQ ID NO: 1221762 - DNA, 15 bp, Homo sapiens
caccccagcaacctg

SEQ ID NO: 1221763 - DNA, 15 bp, Homo sapiens
ccaccccagcaacct

SEQ ID NO: 1221764 - DNA, 15 bp, Homo sapiens
tccaccccagcaacc

SEQ ID NO: 1221765 - DNA, 15 bp, Homo sapiens
ctccaccccagcaac

SEQ ID NO: 1221766 - DNA, 15 bp, Homo sapiens
cctccaccccagcaa

SEQ ID NO: 1221767 - DNA, 15 bp, Homo sapiens
ccctccaccccagca

SEQ ID NO: 1221768 - DNA, 15 bp, Homo sapiens
cccctccaccccagc

SEQ ID NO: 1221769 - DNA, 15 bp, Homo sapiens
tcccctccaccccag

SEQ ID NO: 1221770 - DNA, 15 bp, Homo sapiens
atcccctccacccca

SEQ ID NO: 1221771 - DNA, 15 bp, Homo sapiens
catcccctccacccc

SEQ ID NO: 1221772 - DNA, 15 bp, Homo sapiens
acatcccctccaccc

SEQ ID NO: 1221773 - DNA, 15 bp, Homo sapiens
cacatcccctccacc

SEQ ID NO: 1221774 - DNA, 15 bp, Homo sapiens
ccacatcccctccac

SEQ ID NO: 1221775 - DNA, 15 bp, Homo sapiens
tccacatcccctcca

SEQ ID NO: 1221776 - DNA, 15 bp, Homo sapiens
ctccacatcccctcc

SEQ ID NO: 1221777 - DNA, 15 bp, Homo sapiens
actccacatcccctc

SEQ ID NO: 1221778 - DNA, 15 bp, Homo sapiens
cactccacatcccct

SEQ ID NO: 1221779 - DNA, 15 bp, Homo sapiens
tcactccacatcccc

SEQ ID NO: 1221780 - DNA, 15 bp, Homo sapiens
gtcactccacatccc

SEQ ID NO: 1221781 - DNA, 15 bp, Homo sapiens
tgtcactccacatcc

SEQ ID NO: 1221782 - DNA, 15 bp, Homo sapiens
ctgtcactccacatc

SEQ ID NO: 1221783 - DNA, 15 bp, Homo sapiens
cctgtcactccacat

SEQ ID NO: 1221784 - DNA, 15 bp, Homo sapiens
ccctgtcactccaca

SEQ ID NO: 1221785 - DNA, 15 bp, Homo sapiens
gccctgtcactccac

SEQ ID NO: 1221786 - DNA, 15 bp, Homo sapiens
tgccctgtcactcca

SEQ ID NO: 1221787 - DNA, 15 bp, Homo sapiens
ctgccctgtcactcc

SEQ ID NO: 1221788 - DNA, 15 bp, Homo sapiens
cctgccctgtcactc

SEQ ID NO: 1221789 - DNA, 15 bp, Homo sapiens
ccctgccctgtcact

SEQ ID NO: 1221790 - DNA, 15 bp, Homo sapiens
gccctgccctgtcac

SEQ ID NO: 1221791 - DNA, 15 bp, Homo sapiens
tgccctgccctgtca

SEQ ID NO: 1221792 - DNA, 15 bp, Homo sapiens
ttgccctgccctgtc

SEQ ID NO: 1221793 - DNA, 15 bp, Homo sapiens
attgccctgccctgt

SEQ ID NO: 1221794 - DNA, 15 bp, Homo sapiens
cattgccctgccctg

SEQ ID NO: 1221795 - DNA, 15 bp, Homo sapiens
ccattgccctgccct

SEQ ID NO: 1221796 - DNA, 15 bp, Homo sapiens
gccattgccctgccc

SEQ ID NO: 1221797 - DNA, 15 bp, Homo sapiens
agccattgccctgcc

SEQ ID NO: 1221798 - DNA, 15 bp, Homo sapiens
gagccattgccctgc

SEQ ID NO: 1221799 - DNA, 15 bp, Homo sapiens
ggagccattgccctg

SEQ ID NO: 1221800 - DNA, 15 bp, Homo sapiens
aggagccattgccct

SEQ ID NO: 1221801 - DNA, 15 bp, Homo sapiens
gaggagccattgccc

SEQ ID NO: 1221802 - DNA, 15 bp, Homo sapiens
cgaggagccattgcc

SEQ ID NO: 1221803 - DNA, 15 bp, Homo sapiens
ccgaggagccattgc

SEQ ID NO: 1221804 - DNA, 15 bp, Homo sapiens
gccgaggagccattg

SEQ ID NO: 1221805 - DNA, 15 bp, Homo sapiens
ggccgaggagccatt

SEQ ID NO: 1221806 - DNA, 15 bp, Homo sapiens
gggccgaggagccat

SEQ ID NO: 1221807 - DNA, 15 bp, Homo sapiens
ggggccgaggagcca

SEQ ID NO: 1221808 - DNA, 15 bp, Homo sapiens
gggggccgaggagcc

SEQ ID NO: 1221809 - DNA, 15 bp, Homo sapiens
agggggccgaggagc

SEQ ID NO: 1221810 - DNA, 15 bp, Homo sapiens
gagggggccgaggag

SEQ ID NO: 1221811 - DNA, 15 bp, Homo sapiens
ggagggggccgagga

SEQ ID NO: 1221812 - DNA, 15 bp, Homo sapiens
cggagggggccgagg

SEQ ID NO: 1221813 - DNA, 15 bp, Homo sapiens
ccggagggggccgag

SEQ ID NO: 1221814 - DNA, 15 bp, Homo sapiens
cccggagggggccga

SEQ ID NO: 1221815 - DNA, 15 bp, Homo sapiens
tcccggagggggccg

SEQ ID NO: 1221816 - DNA, 15 bp, Homo sapiens
ttcccggagggggcc

SEQ ID NO: 1221817 - DNA, 15 bp, Homo sapiens
gttcccggagggggc

SEQ ID NO: 1221818 - DNA, 15 bp, Homo sapiens
tgttcccggaggggg

SEQ ID NO: 1221819 - DNA, 15 bp, Homo sapiens
ttgttcccggagggg

SEQ ID NO: 1221820 - DNA, 15 bp, Homo sapiens
tttgttcccggaggg

SEQ ID NO: 1221821 - DNA, 15 bp, Homo sapiens
ctttgttcccggagg

SEQ ID NO: 1221822 - DNA, 15 bp, Homo sapiens
gctttgttcccggag

SEQ ID NO: 1221823 - DNA, 15 bp, Homo sapiens
ggctttgttcccgga

SEQ ID NO: 1221824 - DNA, 15 bp, Homo sapiens
tggctttgttcccgg

SEQ ID NO: 1221825 - DNA, 15 bp, Homo sapiens
ctggctttgttcccg

SEQ ID NO: 1221826 - DNA, 15 bp, Homo sapiens
cctggctttgttccc

SEQ ID NO: 1221827 - DNA, 15 bp, Homo sapiens
acctggctttgttcc

SEQ ID NO: 1221828 - DNA, 15 bp, Homo sapiens
gacctggctttgttc

SEQ ID NO: 1221829 - DNA, 15 bp, Homo sapiens
tgacctggctttgtt

SEQ ID NO: 1221830 - DNA, 15 bp, Homo sapiens
atgacctggctttgt

SEQ ID NO: 1221831 - DNA, 15 bp, Homo sapiens
aatgacctggctttg

SEQ ID NO: 1221832 - DNA, 15 bp, Homo sapiens
gaatgacctggcttt

SEQ ID NO: 1221833 - DNA, 15 bp, Homo sapiens
ggaatgacctggctt

SEQ ID NO: 1221834 - DNA, 15 bp, Homo sapiens
aggaatgacctggct

SEQ ID NO: 1221835 - DNA, 15 bp, Homo sapiens
caggaatgacctggc

SEQ ID NO: 1221836 - DNA, 15 bp, Homo sapiens
acaggaatgacctgg

SEQ ID NO: 1221837 - DNA, 15 bp, Homo sapiens
cacaggaatgacctg

SEQ ID NO: 1221838 - DNA, 15 bp, Homo sapiens
ccacaggaatgacct

SEQ ID NO: 1221839 - DNA, 15 bp, Homo sapiens
cccacaggaatgacc

SEQ ID NO: 1221840 - DNA, 15 bp, Homo sapiens
ccccacaggaatgac

SEQ ID NO: 1221841 - DNA, 15 bp, Homo sapiens
tccccacaggaatga

SEQ ID NO: 1221842 - DNA, 15 bp, Homo sapiens
ctccccacaggaatg

SEQ ID NO: 1221843 - DNA, 15 bp, Homo sapiens
cctccccacaggaat

SEQ ID NO: 1221844 - DNA, 15 bp, Homo sapiens
ccctccccacaggaa

SEQ ID NO: 1221845 - DNA, 15 bp, Homo sapiens
tccctccccacagga

SEQ ID NO: 1221846 - DNA, 15 bp, Homo sapiens
ctccctccccacagg

SEQ ID NO: 1221847 - DNA, 15 bp, Homo sapiens
gctccctccccacag

SEQ ID NO: 1221848 - DNA, 15 bp, Homo sapiens
cgctccctccccaca

SEQ ID NO: 1221849 - DNA, 15 bp, Homo sapiens
gcgctccctccccac

SEQ ID NO: 1221850 - DNA, 15 bp, Homo sapiens
ggcgctccctcccca

SEQ ID NO: 1221851 - DNA, 15 bp, Homo sapiens
tggcgctccctcccc

SEQ ID NO: 1221852 - DNA, 15 bp, Homo sapiens
ttggcgctccctccc

SEQ ID NO: 1221853 - DNA, 15 bp, Homo sapiens
gttggcgctccctcc

SEQ ID NO: 1221854 - DNA, 15 bp, Homo sapiens
ggttggcgctccctc

SEQ ID NO: 1221855 - DNA, 15 bp, Homo sapiens
gggttggcgctccct

SEQ ID NO: 1221856 - DNA, 15 bp, Homo sapiens
ggggttggcgctccc

SEQ ID NO: 1221857 - DNA, 15 bp, Homo sapiens
tggggttggcgctcc

SEQ ID NO: 1221858 - DNA, 15 bp, Homo sapiens
ctggggttggcgctc

SEQ ID NO: 1221859 - DNA, 15 bp, Homo sapiens
cctggggttggcgct

SEQ ID NO: 1221860 - DNA, 15 bp, Homo sapiens
ccctggggttggcgc

SEQ ID NO: 1221861 - DNA, 15 bp, Homo sapiens
accctggggttggcg

SEQ ID NO: 1221862 - DNA, 15 bp, Homo sapiens
aaccctggggttggc

SEQ ID NO: 1221863 - DNA, 15 bp, Homo sapiens
caaccctggggttgg

SEQ ID NO: 1221864 - DNA, 15 bp, Homo sapiens
ccaaccctggggttg

SEQ ID NO: 1221865 - DNA, 15 bp, Homo sapiens
cccaaccctggggtt

SEQ ID NO: 1221866 - DNA, 15 bp, Homo sapiens
ccccaaccctggggt

SEQ ID NO: 1221867 - DNA, 15 bp, Homo sapiens
cccccaaccctgggg

SEQ ID NO: 1221868 - DNA, 15 bp, Homo sapiens
ccccccaaccctggg

SEQ ID NO: 1221869 - DNA, 15 bp, Homo sapiens
cccccccaaccctgg

SEQ ID NO: 1221870 - DNA, 15 bp, Homo sapiens
ccccccccaaccctg

SEQ ID NO: 1221871 - DNA, 15 bp, Homo sapiens
gccccccccaaccct

SEQ ID NO: 1221872 - DNA, 15 bp, Homo sapiens
tgccccccccaaccc

SEQ ID NO: 1221873 - DNA, 15 bp, Homo sapiens
gtgccccccccaacc

SEQ ID NO: 1221874 - DNA, 15 bp, Homo sapiens
cgtgccccccccaac

SEQ ID NO: 1221875 - DNA, 15 bp, Homo sapiens
ccgtgccccccccaa

SEQ ID NO: 1221876 - DNA, 15 bp, Homo sapiens
cccgtgcccccccca

SEQ ID NO: 1221877 - DNA, 15 bp, Homo sapiens
gcccgtgcccccccc

SEQ ID NO: 1221878 - DNA, 15 bp, Homo sapiens
ggcccgtgccccccc

SEQ ID NO: 1221879 - DNA, 15 bp, Homo sapiens
gggcccgtgcccccc

SEQ ID NO: 1221880 - DNA, 15 bp, Homo sapiens
agggcccgtgccccc

SEQ ID NO: 1221881 - DNA, 15 bp, Homo sapiens
cagggcccgtgcccc

SEQ ID NO: 1221882 - DNA, 15 bp, Homo sapiens
ccagggcccgtgccc

SEQ ID NO: 1221883 - DNA, 15 bp, Homo sapiens
cccagggcccgtgcc

SEQ ID NO: 1221884 - DNA, 15 bp, Homo sapiens
acccagggcccgtgc

SEQ ID NO: 1221885 - DNA, 15 bp, Homo sapiens
gacccagggcccgtg

SEQ ID NO: 1221886 - DNA, 15 bp, Homo sapiens
tgacccagggcccgt

SEQ ID NO: 1221887 - DNA, 15 bp, Homo sapiens
ctgacccagggcccg

SEQ ID NO: 1221888 - DNA, 15 bp, Homo sapiens
cctgacccagggccc

SEQ ID NO: 1221889 - DNA, 15 bp, Homo sapiens
ccctgacccagggcc

SEQ ID NO: 1221890 - DNA, 15 bp, Homo sapiens
cccctgacccagggc

SEQ ID NO: 1221891 - DNA, 15 bp, Homo sapiens
acccctgacccaggg

SEQ ID NO: 1221892 - DNA, 15 bp, Homo sapiens
tacccctgacccagg

SEQ ID NO: 1221893 - DNA, 15 bp, Homo sapiens
gtacccctgacccag

SEQ ID NO: 1221894 - DNA, 15 bp, Homo sapiens
tgtacccctgaccca

SEQ ID NO: 1221895 - DNA, 15 bp, Homo sapiens
ctgtacccctgaccc

SEQ ID NO: 1221896 - DNA, 15 bp, Homo sapiens
tctgtacccctgacc

SEQ ID NO: 1221897 - DNA, 15 bp, Homo sapiens
atctgtacccctgac

SEQ ID NO: 1221898 - DNA, 15 bp, Homo sapiens
tatctgtacccctga

SEQ ID NO: 1221899 - DNA, 15 bp, Homo sapiens
ttatctgtacccctg

SEQ ID NO: 1221900 - DNA, 15 bp, Homo sapiens
cttatctgtacccct

SEQ ID NO: 1221901 - DNA, 15 bp, Homo sapiens
gcttatctgtacccc

SEQ ID NO: 1221902 - DNA, 15 bp, Homo sapiens
ggcttatctgtaccc

SEQ ID NO: 1221903 - DNA, 15 bp, Homo sapiens
aggcttatctgtacc

SEQ ID NO: 1221904 - DNA, 15 bp, Homo sapiens
caggcttatctgtac

SEQ ID NO: 1221905 - DNA, 15 bp, Homo sapiens
ccaggcttatctgta

SEQ ID NO: 1221906 - DNA, 15 bp, Homo sapiens
cccaggcttatctgt

SEQ ID NO: 1221907 - DNA, 15 bp, Homo sapiens
gcccaggcttatctg

SEQ ID NO: 1221908 - DNA, 15 bp, Homo sapiens
agcccaggcttatct

SEQ ID NO: 1221909 - DNA, 15 bp, Homo sapiens
gagcccaggcttatc

SEQ ID NO: 1221910 - DNA, 15 bp, Homo sapiens
ggagcccaggcttat

SEQ ID NO: 1221911 - DNA, 15 bp, Homo sapiens
gggagcccaggctta

SEQ ID NO: 1221912 - DNA, 15 bp, Homo sapiens
tgggagcccaggctt

SEQ ID NO: 1221913 - DNA, 15 bp, Homo sapiens
ctgggagcccaggct

SEQ ID NO: 1221914 - DNA, 15 bp, Homo sapiens
tctgggagcccaggc

SEQ ID NO: 1221915 - DNA, 15 bp, Homo sapiens
ttctgggagcccagg

SEQ ID NO: 1221916 - DNA, 15 bp, Homo sapiens
gttctgggagcccag

SEQ ID NO: 1221917 - DNA, 15 bp, Homo sapiens
ggttctgggagccca

SEQ ID NO: 1221918 - DNA, 15 bp, Homo sapiens
gggttctgggagccc

SEQ ID NO: 1221919 - DNA, 15 bp, Homo sapiens
agggttctgggagcc

SEQ ID NO: 1221920 - DNA, 15 bp, Homo sapiens
aagggttctgggagc

SEQ ID NO: 1221921 - DNA, 15 bp, Homo sapiens
caagggttctgggag

SEQ ID NO: 1221922 - DNA, 15 bp, Homo sapiens
acaagggttctggga

SEQ ID NO: 1221923 - DNA, 15 bp, Homo sapiens
gacaagggttctggg

SEQ ID NO: 1221924 - DNA, 15 bp, Homo sapiens
tgacaagggttctgg

SEQ ID NO: 1221925 - DNA, 15 bp, Homo sapiens
gtgacaagggttctg

SEQ ID NO: 1221926 - DNA, 15 bp, Homo sapiens
tgtgacaagggttct

SEQ ID NO: 1221927 - DNA, 15 bp, Homo sapiens
ctgtgacaagggttc

SEQ ID NO: 1221928 - DNA, 15 bp, Homo sapiens
gctgtgacaagggtt

SEQ ID NO: 1221929 - DNA, 15 bp, Homo sapiens
cgctgtgacaagggt

SEQ ID NO: 1221930 - DNA, 15 bp, Homo sapiens
ccgctgtgacaaggg

SEQ ID NO: 1221931 - DNA, 15 bp, Homo sapiens
gccgctgtgacaagg

SEQ ID NO: 1221932 - DNA, 15 bp, Homo sapiens
tgccgctgtgacaag

SEQ ID NO: 1221933 - DNA, 15 bp, Homo sapiens
gtgccgctgtgacaa

SEQ ID NO: 1221934 - DNA, 15 bp, Homo sapiens
ggtgccgctgtgaca

SEQ ID NO: 1221935 - DNA, 15 bp, Homo sapiens
gggtgccgctgtgac

SEQ ID NO: 1221936 - DNA, 15 bp, Homo sapiens
ggggtgccgctgtga

SEQ ID NO: 1221937 - DNA, 15 bp, Homo sapiens
aggggtgccgctgtg

SEQ ID NO: 1221938 - DNA, 15 bp, Homo sapiens
caggggtgccgctgt

SEQ ID NO: 1221939 - DNA, 15 bp, Homo sapiens
gcaggggtgccgctg

SEQ ID NO: 1221940 - DNA, 15 bp, Homo sapiens
ggcaggggtgccgct

SEQ ID NO: 1221941 - DNA, 15 bp, Homo sapiens
gggcaggggtgccgc

SEQ ID NO: 1221942 - DNA, 15 bp, Homo sapiens
ggggcaggggtgccg

SEQ ID NO: 1221943 - DNA, 15 bp, Homo sapiens
tggggcaggggtgcc

SEQ ID NO: 1221944 - DNA, 15 bp, Homo sapiens
atggggcaggggtgc

SEQ ID NO: 1221945 - DNA, 15 bp, Homo sapiens
catggggcaggggtg

SEQ ID NO: 1221946 - DNA, 15 bp, Homo sapiens
gcatggggcaggggt

SEQ ID NO: 1221947 - DNA, 15 bp, Homo sapiens
ggcatggggcagggg

SEQ ID NO: 1221948 - DNA, 15 bp, Homo sapiens
caggcatggggcagg

SEQ ID NO: 1221949 - DNA, 15 bp, Homo sapiens
gcaggcatggggcag

SEQ ID NO: 1221950 - DNA, 15 bp, Homo sapiens
agcaggcatggggca

SEQ ID NO: 1221951 - DNA, 15 bp, Homo sapiens
aagcaggcatggggc

SEQ ID NO: 1221952 - DNA, 15 bp, Homo sapiens
aaagcaggcatgggg

SEQ ID NO: 1221953 - DNA, 15 bp, Homo sapiens
gaaagcaggcatggg

SEQ ID NO: 1221954 - DNA, 15 bp, Homo sapiens
agaaagcaggcatgg

SEQ ID NO: 1221955 - DNA, 15 bp, Homo sapiens
gagaaagcaggcatg

SEQ ID NO: 1221956 - DNA, 15 bp, Homo sapiens
agagaaagcaggcat

SEQ ID NO: 1221957 - DNA, 15 bp, Homo sapiens
gagagaaagcaggca

SEQ ID NO: 1221958 - DNA, 15 bp, Homo sapiens
ggagagaaagcaggc

SEQ ID NO: 1221959 - DNA, 15 bp, Homo sapiens
tggagagaaagcagg

SEQ ID NO: 1221960 - DNA, 15 bp, Homo sapiens
ctggagagaaagcag

SEQ ID NO: 1221961 - DNA, 15 bp, Homo sapiens
cctggagagaaagca

SEQ ID NO: 1221962 - DNA, 15 bp, Homo sapiens
ccctggagagaaagc

SEQ ID NO: 1221963 - DNA, 15 bp, Homo sapiens
gccctggagagaaag

SEQ ID NO: 1221964 - DNA, 15 bp, Homo sapiens
tgccctggagagaaa

SEQ ID NO: 1221965 - DNA, 15 bp, Homo sapiens
gtgccctggagagaa

SEQ ID NO: 1221966 - DNA, 15 bp, Homo sapiens
agtgccctggagaga

SEQ ID NO: 1221967 - DNA, 15 bp, Homo sapiens
gagtgccctggagag

SEQ ID NO: 1221968 - DNA, 15 bp, Homo sapiens
tgagtgccctggaga

SEQ ID NO: 1221969 - DNA, 15 bp, Homo sapiens
ctgagtgccctggag

SEQ ID NO: 1221970 - DNA, 15 bp, Homo sapiens
tctgagtgccctgga

SEQ ID NO: 1221971 - DNA, 15 bp, Homo sapiens
ctctgagtgccctgg

SEQ ID NO: 1221972 - DNA, 15 bp, Homo sapiens
gctctgagtgccctg

SEQ ID NO: 1221973 - DNA, 15 bp, Homo sapiens
agctctgagtgccct

SEQ ID NO: 1221974 - DNA, 15 bp, Homo sapiens
cagctctgagtgccc

SEQ ID NO: 1221975 - DNA, 15 bp, Homo sapiens
gcagctctgagtgcc

SEQ ID NO: 1221976 - DNA, 15 bp, Homo sapiens
tgcagctctgagtgc

SEQ ID NO: 1221977 - DNA, 15 bp, Homo sapiens
ctgcagctctgagtg

SEQ ID NO: 1221978 - DNA, 15 bp, Homo sapiens
actgcagctctgagt

SEQ ID NO: 1221979 - DNA, 15 bp, Homo sapiens
aactgcagctctgag

SEQ ID NO: 1221980 - DNA, 15 bp, Homo sapiens
aaactgcagctctga

SEQ ID NO: 1221981 - DNA, 15 bp, Homo sapiens
caaactgcagctctg

SEQ ID NO: 1221982 - DNA, 15 bp, Homo sapiens
gcaaactgcagctct

SEQ ID NO: 1221983 - DNA, 15 bp, Homo sapiens
tgcaaactgcagctc

SEQ ID NO: 1221984 - DNA, 15 bp, Homo sapiens
ctgcaaactgcagct

SEQ ID NO: 1221985 - DNA, 15 bp, Homo sapiens
cctgcaaactgcagc

SEQ ID NO: 1221986 - DNA, 15 bp, Homo sapiens
tcctgcaaactgcag

SEQ ID NO: 1221987 - DNA, 15 bp, Homo sapiens
gtcctgcaaactgca

SEQ ID NO: 1221988 - DNA, 15 bp, Homo sapiens
cgtcctgcaaactgc

SEQ ID NO: 1221989 - DNA, 15 bp, Homo sapiens
tcgtcctgcaaactg

SEQ ID NO: 1221990 - DNA, 15 bp, Homo sapiens
ctcgtcctgcaaact

SEQ ID NO: 1221991 - DNA, 15 bp, Homo sapiens
tctcgtcctgcaaac

SEQ ID NO: 1221992 - DNA, 15 bp, Homo sapiens
ctctcgtcctgcaaa

SEQ ID NO: 1221993 - DNA, 15 bp, Homo sapiens
cctctcgtcctgcaa

SEQ ID NO: 1221994 - DNA, 15 bp, Homo sapiens
ccctctcgtcctgca

SEQ ID NO: 1221995 - DNA, 15 bp, Homo sapiens
tccctctcgtcctgc

SEQ ID NO: 1221996 - DNA, 15 bp, Homo sapiens
ctccctctcgtcctg

SEQ ID NO: 1221997 - DNA, 15 bp, Homo sapiens
tctccctctcgtcct

SEQ ID NO: 1221998 - DNA, 15 bp, Homo sapiens
gtctccctctcgtcc

SEQ ID NO: 1221999 - DNA, 15 bp, Homo sapiens
cgtctccctctcgtc

SEQ ID NO: 1222000 - DNA, 15 bp, Homo sapiens
acgtctccctctcgt

SEQ ID NO: 1222001 - DNA, 15 bp, Homo sapiens
cacgtctccctctcg

SEQ ID NO: 1222002 - DNA, 15 bp, Homo sapiens
gcacgtctccctctc

SEQ ID NO: 1222003 - DNA, 15 bp, Homo sapiens
ggcacgtctccctct

SEQ ID NO: 1222004 - DNA, 15 bp, Homo sapiens
gggcacgtctccctc

SEQ ID NO: 1222005 - DNA, 15 bp, Homo sapiens
tgggcacgtctccct

SEQ ID NO: 1222006 - DNA, 15 bp, Homo sapiens
ttgggcacgtctccc

SEQ ID NO: 1222007 - DNA, 15 bp, Homo sapiens
attgggcacgtctcc

SEQ ID NO: 1222008 - DNA, 15 bp, Homo sapiens
gattgggcacgtctc

SEQ ID NO: 1222009 - DNA, 15 bp, Homo sapiens
ggattgggcacgtct

SEQ ID NO: 1222010 - DNA, 15 bp, Homo sapiens
gggattgggcacgtc

SEQ ID NO: 1222011 - DNA, 15 bp, Homo sapiens
ggggattgggcacgt

SEQ ID NO: 1222012 - DNA, 15 bp, Homo sapiens
gggggattgggcacg

SEQ ID NO: 1222013 - DNA, 15 bp, Homo sapiens
ggggggattgggcac

SEQ ID NO: 1222014 - DNA, 15 bp, Homo sapiens
tggggggattgggca

SEQ ID NO: 1222015 - DNA, 15 bp, Homo sapiens
atggggggattgggc

SEQ ID NO: 1222016 - DNA, 15 bp, Homo sapiens
gatggggggattggg

SEQ ID NO: 1222017 - DNA, 15 bp, Homo sapiens
ggatggggggattgg

SEQ ID NO: 1222018 - DNA, 15 bp, Homo sapiens
gggatggggggattg

SEQ ID NO: 1222019 - DNA, 15 bp, Homo sapiens
tgggatggggggatt

SEQ ID NO: 1222020 - DNA, 15 bp, Homo sapiens
ctgggatggggggat

SEQ ID NO: 1222021 - DNA, 15 bp, Homo sapiens
cctgggatgggggga

SEQ ID NO: 1222022 - DNA, 15 bp, Homo sapiens
tcctgggatgggggg

SEQ ID NO: 1222023 - DNA, 15 bp, Homo sapiens
gtcctgggatggggg

SEQ ID NO: 1222024 - DNA, 15 bp, Homo sapiens
cgtcctgggatgggg

SEQ ID NO: 1222025 - DNA, 15 bp, Homo sapiens
gcgtcctgggatggg

SEQ ID NO: 1222026 - DNA, 15 bp, Homo sapiens
agcgtcctgggatgg

SEQ ID NO: 1222027 - DNA, 15 bp, Homo sapiens
gagcgtcctgggatg

SEQ ID NO: 1222028 - DNA, 15 bp, Homo sapiens
tgagcgtcctgggat

SEQ ID NO: 1222029 - DNA, 15 bp, Homo sapiens
ctgagcgtcctggga

SEQ ID NO: 1222030 - DNA, 15 bp, Homo sapiens
gctgagcgtcctggg

SEQ ID NO: 1222031 - DNA, 15 bp, Homo sapiens
ggctgagcgtcctgg

SEQ ID NO: 1222032 - DNA, 15 bp, Homo sapiens
cggctgagcgtcctg

SEQ ID NO: 1222033 - DNA, 15 bp, Homo sapiens
acggctgagcgtcct

SEQ ID NO: 1222034 - DNA, 15 bp, Homo sapiens
cacggctgagcgtcc

SEQ ID NO: 1222035 - DNA, 15 bp, Homo sapiens
gcacggctgagcgtc

SEQ ID NO: 1222036 - DNA, 15 bp, Homo sapiens
cgcacggctgagcgt

SEQ ID NO: 1222037 - DNA, 15 bp, Homo sapiens
acgcacggctgagcg

SEQ ID NO: 1222038 - DNA, 15 bp, Homo sapiens
cacgcacggctgagc

SEQ ID NO: 1222039 - DNA, 15 bp, Homo sapiens
ccacgcacggctgag

SEQ ID NO: 1222040 - DNA, 15 bp, Homo sapiens
cccacgcacggctga

SEQ ID NO: 1222041 - DNA, 15 bp, Homo sapiens
gcccacgcacggctg

SEQ ID NO: 1222042 - DNA, 15 bp, Homo sapiens
agcccacgcacggct

SEQ ID NO: 1222043 - DNA, 15 bp, Homo sapiens
cagcccacgcacggc

SEQ ID NO: 1222044 - DNA, 15 bp, Homo sapiens
ccagcccacgcacgg

SEQ ID NO: 1222045 - DNA, 15 bp, Homo sapiens
cccagcccacgcacg

SEQ ID NO: 1222046 - DNA, 15 bp, Homo sapiens
gcccagcccacgcac

SEQ ID NO: 1222047 - DNA, 15 bp, Homo sapiens
ggcccagcccacgca

SEQ ID NO: 1222048 - DNA, 15 bp, Homo sapiens
gggcccagcccacgc

SEQ ID NO: 1222049 - DNA, 15 bp, Homo sapiens
tgggcccagcccacg

SEQ ID NO: 1222050 - DNA, 15 bp, Homo sapiens
gtgggcccagcccac

SEQ ID NO: 1222051 - DNA, 15 bp, Homo sapiens
agtgggcccagccca

SEQ ID NO: 1222052 - DNA, 15 bp, Homo sapiens
gagtgggcccagccc

SEQ ID NO: 1222053 - DNA, 15 bp, Homo sapiens
ggagtgggcccagcc

SEQ ID NO: 1222054 - DNA, 15 bp, Homo sapiens
tggagtgggcccagc

SEQ ID NO: 1222055 - DNA, 15 bp, Homo sapiens
gtggagtgggcccag

SEQ ID NO: 1222056 - DNA, 15 bp, Homo sapiens
agtggagtgggccca

SEQ ID NO: 1222057 - DNA, 15 bp, Homo sapiens
gagtggagtgggccc

SEQ ID NO: 1222058 - DNA, 15 bp, Homo sapiens
ggagtggagtgggcc

SEQ ID NO: 1222059 - DNA, 15 bp, Homo sapiens
gggagtggagtgggc

SEQ ID NO: 1222060 - DNA, 15 bp, Homo sapiens
cgggagtggagtggg

SEQ ID NO: 1222061 - DNA, 15 bp, Homo sapiens
ccgggagtggagtgg

SEQ ID NO: 1222062 - DNA, 15 bp, Homo sapiens
gccgggagtggagtg

SEQ ID NO: 1222063 - DNA, 15 bp, Homo sapiens
cgccgggagtggagt

SEQ ID NO: 1222064 - DNA, 15 bp, Homo sapiens
gcgccgggagtggag

SEQ ID NO: 1222065 - DNA, 15 bp, Homo sapiens
ggcgccgggagtgga

SEQ ID NO: 1222066 - DNA, 15 bp, Homo sapiens
gggcgccgggagtgg

SEQ ID NO: 1222067 - DNA, 15 bp, Homo sapiens
tgggcgccgggagtg

SEQ ID NO: 1222068 - DNA, 15 bp, Homo sapiens
gtgggcgccgggagt

SEQ ID NO: 1222069 - DNA, 15 bp, Homo sapiens
tgtgggcgccgggag

SEQ ID NO: 1222070 - DNA, 15 bp, Homo sapiens
ctgtgggcgccggga

SEQ ID NO: 1222071 - DNA, 15 bp, Homo sapiens
actgtgggcgccggg

SEQ ID NO: 1222072 - DNA, 15 bp, Homo sapiens
aactgtgggcgccgg

SEQ ID NO: 1222073 - DNA, 15 bp, Homo sapiens
caactgtgggcgccg

SEQ ID NO: 1222074 - DNA, 15 bp, Homo sapiens
gcaactgtgggcgcc

SEQ ID NO: 1222075 - DNA, 15 bp, Homo sapiens
ggcaactgtgggcgc

SEQ ID NO: 1222076 - DNA, 15 bp, Homo sapiens
gggcaactgtgggcg

SEQ ID NO: 1222077 - DNA, 15 bp, Homo sapiens
ggggcaactgtgggc

SEQ ID NO: 1222078 - DNA, 15 bp, Homo sapiens
tggggcaactgtggg

SEQ ID NO: 1222079 - DNA, 15 bp, Homo sapiens
ctggggcaactgtgg

SEQ ID NO: 1222080 - DNA, 15 bp, Homo sapiens
actggggcaactgtg

SEQ ID NO: 1222081 - DNA, 15 bp, Homo sapiens
cactggggcaactgt

SEQ ID NO: 1222082 - DNA, 15 bp, Homo sapiens
tcactggggcaactg

SEQ ID NO: 1222083 - DNA, 15 bp, Homo sapiens
ttcactggggcaact

SEQ ID NO: 1222084 - DNA, 15 bp, Homo sapiens
gttcactggggcaac

SEQ ID NO: 1222085 - DNA, 15 bp, Homo sapiens
ggttcactggggcaa

SEQ ID NO: 1222086 - DNA, 15 bp, Homo sapiens
cggttcactggggca

SEQ ID NO: 1222087 - DNA, 15 bp, Homo sapiens
ccggttcactggggc

SEQ ID NO: 1222088 - DNA, 15 bp, Homo sapiens
gccggttcactgggg

SEQ ID NO: 1222089 - DNA, 15 bp, Homo sapiens
ggccggttcactggg

SEQ ID NO: 1222090 - DNA, 15 bp, Homo sapiens
tggccggttcactgg

SEQ ID NO: 1222091 - DNA, 15 bp, Homo sapiens
ctggccggttcactg

SEQ ID NO: 1222092 - DNA, 15 bp, Homo sapiens
actggccggttcact

SEQ ID NO: 1222093 - DNA, 15 bp, Homo sapiens
cactggccggttcac

SEQ ID NO: 1222094 - DNA, 15 bp, Homo sapiens
ccactggccggttca

SEQ ID NO: 1222095 - DNA, 15 bp, Homo sapiens
tccactggccggttc

SEQ ID NO: 1222096 - DNA, 15 bp, Homo sapiens
ctccactggccggtt

SEQ ID NO: 1222097 - DNA, 15 bp, Homo sapiens
cctccactggccggt

SEQ ID NO: 1222098 - DNA, 15 bp, Homo sapiens
gcctccactggccgg

SEQ ID NO: 1222099 - DNA, 15 bp, Homo sapiens
tgcctccactggccg

SEQ ID NO: 1222100 - DNA, 15 bp, Homo sapiens
atgcctccactggcc

SEQ ID NO: 1222101 - DNA, 15 bp, Homo sapiens
gatgcctccactggc

SEQ ID NO: 1222102 - DNA, 15 bp, Homo sapiens
ggatgcctccactgg

SEQ ID NO: 1222103 - DNA, 15 bp, Homo sapiens
aggatgcctccactg

SEQ ID NO: 1222104 - DNA, 15 bp, Homo sapiens
caggatgcctccact

SEQ ID NO: 1222105 - DNA, 15 bp, Homo sapiens
acaggatgcctccac

SEQ ID NO: 1222106 - DNA, 15 bp, Homo sapiens
gacaggatgcctcca

SEQ ID NO: 1222107 - DNA, 15 bp, Homo sapiens
ggacaggatgcctcc

SEQ ID NO: 1222108 - DNA, 15 bp, Homo sapiens
gggacaggatgcctc

SEQ ID NO: 1222109 - DNA, 15 bp, Homo sapiens
cgggacaggatgcct

SEQ ID NO: 1222110 - DNA, 15 bp, Homo sapiens
acgggacaggatgcc

SEQ ID NO: 1222111 - DNA, 15 bp, Homo sapiens
cacgggacaggatgc

SEQ ID NO: 1222112 - DNA, 15 bp, Homo sapiens
acacgggacaggatg

SEQ ID NO: 1222113 - DNA, 15 bp, Homo sapiens
cacacgggacaggat

SEQ ID NO: 1222114 - DNA, 15 bp, Homo sapiens
gcacacgggacagga

SEQ ID NO: 1222115 - DNA, 15 bp, Homo sapiens
cgcacacgggacagg

SEQ ID NO: 1222116 - DNA, 15 bp, Homo sapiens
ccgcacacgggacag

SEQ ID NO: 1222117 - DNA, 15 bp, Homo sapiens
cccgcacacgggaca

SEQ ID NO: 1222118 - DNA, 15 bp, Homo sapiens
tcccgcacacgggac

SEQ ID NO: 1222119 - DNA, 15 bp, Homo sapiens
ttcccgcacacggga

SEQ ID NO: 1222120 - DNA, 15 bp, Homo sapiens
tttcccgcacacggg

SEQ ID NO: 1222121 - DNA, 15 bp, Homo sapiens
ctttcccgcacacgg

SEQ ID NO: 1222122 - DNA, 15 bp, Homo sapiens
cctttcccgcacacg

SEQ ID NO: 1222123 - DNA, 15 bp, Homo sapiens
tcctttcccgcacac

SEQ ID NO: 1222124 - DNA, 15 bp, Homo sapiens
ttcctttcccgcaca

SEQ ID NO: 1222125 - DNA, 15 bp, Homo sapiens
attcctttcccgcac

SEQ ID NO: 1222126 - DNA, 15 bp, Homo sapiens
cattcctttcccgca

SEQ ID NO: 1222127 - DNA, 15 bp, Homo sapiens
tcattcctttcccgc

SEQ ID NO: 1222128 - DNA, 15 bp, Homo sapiens
gtcattcctttcccg

SEQ ID NO: 1222129 - DNA, 15 bp, Homo sapiens
ggtcattcctttccc

SEQ ID NO: 1222130 - DNA, 15 bp, Homo sapiens
cggtcattcctttcc

SEQ ID NO: 1222131 - DNA, 15 bp, Homo sapiens
gcggtcattcctttc

SEQ ID NO: 1222132 - DNA, 15 bp, Homo sapiens
ggcggtcattccttt

SEQ ID NO: 1222133 - DNA, 15 bp, Homo sapiens
tggcggtcattcctt

SEQ ID NO: 1222134 - DNA, 15 bp, Homo sapiens
ttggcggtcattcct

SEQ ID NO: 1222135 - DNA, 15 bp, Homo sapiens
cttggcggtcattcc

SEQ ID NO: 1222136 - DNA, 15 bp, Homo sapiens
ccttggcggtcattc

SEQ ID NO: 1222137 - DNA, 15 bp, Homo sapiens
accttggcggtcatt

SEQ ID NO: 1222138 - DNA, 15 bp, Homo sapiens
caccttggcggtcat

SEQ ID NO: 1222139 - DNA, 15 bp, Homo sapiens
tcaccttggcggtca

SEQ ID NO: 1222140 - DNA, 15 bp, Homo sapiens
gtcaccttggcggtc

SEQ ID NO: 1222141 - DNA, 15 bp, Homo sapiens
tgtcaccttggcggt

SEQ ID NO: 1222142 - DNA, 15 bp, Homo sapiens
ctgtcaccttggcgg

SEQ ID NO: 1222143 - DNA, 15 bp, Homo sapiens
gctgtcaccttggcg

SEQ ID NO: 1222144 - DNA, 15 bp, Homo sapiens
tgctgtcaccttggc

SEQ ID NO: 1222145 - DNA, 15 bp, Homo sapiens
ctgctgtcaccttgg

SEQ ID NO: 1222146 - DNA, 15 bp, Homo sapiens
gctgctgtcaccttg

SEQ ID NO: 1222147 - DNA, 15 bp, Homo sapiens
cgctgctgtcacctt

SEQ ID NO: 1222148 - DNA, 15 bp, Homo sapiens
gcgctgctgtcacct

SEQ ID NO: 1222149 - DNA, 15 bp, Homo sapiens
agcgctgctgtcacc

SEQ ID NO: 1222150 - DNA, 15 bp, Homo sapiens
aagcgctgctgtcac

SEQ ID NO: 1222151 - DNA, 15 bp, Homo sapiens
taagcgctgctgtca

SEQ ID NO: 1222152 - DNA, 15 bp, Homo sapiens
ctaagcgctgctgtc

SEQ ID NO: 1222153 - DNA, 15 bp, Homo sapiens
gctaagcgctgctgt

SEQ ID NO: 1222154 - DNA, 15 bp, Homo sapiens
ggctaagcgctgctg

SEQ ID NO: 1222155 - DNA, 15 bp, Homo sapiens
tggctaagcgctgct

SEQ ID NO: 1222156 - DNA, 15 bp, Homo sapiens
ttggctaagcgctgc

SEQ ID NO: 1222157 - DNA, 15 bp, Homo sapiens
gttggctaagcgctg

SEQ ID NO: 1222158 - DNA, 15 bp, Homo sapiens
ggttggctaagcgct

SEQ ID NO: 1222159 - DNA, 15 bp, Homo sapiens
gggttggctaagcgc

SEQ ID NO: 1222160 - DNA, 15 bp, Homo sapiens
agggttggctaagcg

SEQ ID NO: 1222161 - DNA, 15 bp, Homo sapiens
cagggttggctaagc

SEQ ID NO: 1222162 - DNA, 15 bp, Homo sapiens
ccagggttggctaag

SEQ ID NO: 1222163 - DNA, 15 bp, Homo sapiens
gccagggttggctaa

SEQ ID NO: 1222164 - DNA, 15 bp, Homo sapiens
cgccagggttggcta

SEQ ID NO: 1222165 - DNA, 15 bp, Homo sapiens
gcgccagggttggct

SEQ ID NO: 1222166 - DNA, 15 bp, Homo sapiens
agcgccagggttggc

SEQ ID NO: 1222167 - DNA, 15 bp, Homo sapiens
cagcgccagggttgg

SEQ ID NO: 1222168 - DNA, 15 bp, Homo sapiens
tcagcgccagggttg

SEQ ID NO: 1222169 - DNA, 15 bp, Homo sapiens
gtcagcgccagggtt

SEQ ID NO: 1222170 - DNA, 15 bp, Homo sapiens
tgtcagcgccagggt

SEQ ID NO: 1222171 - DNA, 15 bp, Homo sapiens
gtgtcagcgccaggg

SEQ ID NO: 1222172 - DNA, 15 bp, Homo sapiens
ggtgtcagcgccagg

SEQ ID NO: 1222173 - DNA, 15 bp, Homo sapiens
aggtgtcagcgccag

SEQ ID NO: 1222174 - DNA, 15 bp, Homo sapiens
caggtgtcagcgcca

SEQ ID NO: 1222175 - DNA, 15 bp, Homo sapiens
tcaggtgtcagcgcc

SEQ ID NO: 1222176 - DNA, 15 bp, Homo sapiens
gtcaggtgtcagcgc

SEQ ID NO: 1222177 - DNA, 15 bp, Homo sapiens
agtcaggtgtcagcg

SEQ ID NO: 1222178 - DNA, 15 bp, Homo sapiens
aagtcaggtgtcagc

SEQ ID NO: 1222179 - DNA, 15 bp, Homo sapiens
caagtcaggtgtcag

SEQ ID NO: 1222180 - DNA, 15 bp, Homo sapiens
gcaagtcaggtgtca

SEQ ID NO: 1222181 - DNA, 15 bp, Homo sapiens
tgcaagtcaggtgtc

SEQ ID NO: 1222182 - DNA, 15 bp, Homo sapiens
ttgcaagtcaggtgt

SEQ ID NO: 1222183 - DNA, 15 bp, Homo sapiens
tttgcaagtcaggtg

SEQ ID NO: 1222184 - DNA, 15 bp, Homo sapiens
gtttgcaagtcaggt

SEQ ID NO: 1222185 - DNA, 15 bp, Homo sapiens
agtttgcaagtcagg

SEQ ID NO: 1222186 - DNA, 15 bp, Homo sapiens
cagtttgcaagtcag

SEQ ID NO: 1222187 - DNA, 15 bp, Homo sapiens
gcagtttgcaagtca

SEQ ID NO: 1222188 - DNA, 15 bp, Homo sapiens
agcagtttgcaagtc

SEQ ID NO: 1222189 - DNA, 15 bp, Homo sapiens
gagcagtttgcaagt

SEQ ID NO: 1222190 - DNA, 15 bp, Homo sapiens
ggagcagtttgcaag

SEQ ID NO: 1222191 - DNA, 15 bp, Homo sapiens
gggagcagtttgcaa

SEQ ID NO: 1222192 - DNA, 15 bp, Homo sapiens
agggagcagtttgca

SEQ ID NO: 1222193 - DNA, 15 bp, Homo sapiens
cagggagcagtttgc

SEQ ID NO: 1222194 - DNA, 15 bp, Homo sapiens
gcagggagcagtttg

SEQ ID NO: 1222195 - DNA, 15 bp, Homo sapiens
ggcagggagcagttt

SEQ ID NO: 1222196 - DNA, 15 bp, Homo sapiens
aggcagggagcagtt

SEQ ID NO: 1222197 - DNA, 15 bp, Homo sapiens
caggcagggagcagt

SEQ ID NO: 1222198 - DNA, 15 bp, Homo sapiens
tcaggcagggagcag

SEQ ID NO: 1222199 - DNA, 15 bp, Homo sapiens
ctcaggcagggagca

SEQ ID NO: 1222200 - DNA, 15 bp, Homo sapiens
cctcaggcagggagc

SEQ ID NO: 1222201 - DNA, 15 bp, Homo sapiens
gcctcaggcagggag

SEQ ID NO: 1222202 - DNA, 15 bp, Homo sapiens
agcctcaggcaggga

SEQ ID NO: 1222203 - DNA, 15 bp, Homo sapiens
aagcctcaggcaggg

SEQ ID NO: 1222204 - DNA, 15 bp, Homo sapiens
gaagcctcaggcagg

SEQ ID NO: 1222205 - DNA, 15 bp, Homo sapiens
tgaagcctcaggcag

SEQ ID NO: 1222206 - DNA, 15 bp, Homo sapiens
ttgaagcctcaggca

SEQ ID NO: 1222207 - DNA, 15 bp, Homo sapiens
cttgaagcctcaggc

SEQ ID NO: 1222208 - DNA, 15 bp, Homo sapiens
ccttgaagcctcagg

SEQ ID NO: 1222209 - DNA, 15 bp, Homo sapiens
gccttgaagcctcag

SEQ ID NO: 1222210 - DNA, 15 bp, Homo sapiens
tgccttgaagcctca

SEQ ID NO: 1222211 - DNA, 15 bp, Homo sapiens
ctgccttgaagcctc

SEQ ID NO: 1222212 - DNA, 15 bp, Homo sapiens
cctgccttgaagcct

SEQ ID NO: 1222213 - DNA, 15 bp, Homo sapiens
gcctgccttgaagcc

SEQ ID NO: 1222214 - DNA, 15 bp, Homo sapiens
cgcctgccttgaagc

SEQ ID NO: 1222215 - DNA, 15 bp, Homo sapiens
tcgcctgccttgaag

SEQ ID NO: 1222216 - DNA, 15 bp, Homo sapiens
ctcgcctgccttgaa

SEQ ID NO: 1222217 - DNA, 15 bp, Homo sapiens
tctcgcctgccttga

SEQ ID NO: 1222218 - DNA, 15 bp, Homo sapiens
ctctcgcctgccttg

SEQ ID NO: 1222219 - DNA, 15 bp, Homo sapiens
cctctcgcctgcctt

SEQ ID NO: 1222220 - DNA, 15 bp, Homo sapiens
gcctctcgcctgcct

SEQ ID NO: 1222221 - DNA, 15 bp, Homo sapiens
agcctctcgcctgcc

SEQ ID NO: 1222222 - DNA, 15 bp, Homo sapiens
aagcctctcgcctgc

SEQ ID NO: 1222223 - DNA, 15 bp, Homo sapiens
aaagcctctcgcctg

SEQ ID NO: 1222224 - DNA, 15 bp, Homo sapiens
caaagcctctcgcct

SEQ ID NO: 1222225 - DNA, 15 bp, Homo sapiens
acaaagcctctcgcc

SEQ ID NO: 1222226 - DNA, 15 bp, Homo sapiens
cacaaagcctctcgc

SEQ ID NO: 1222227 - DNA, 15 bp, Homo sapiens
acacaaagcctctcg

SEQ ID NO: 1222228 - DNA, 15 bp, Homo sapiens
cacacaaagcctctc

SEQ ID NO: 1222229 - DNA, 15 bp, Homo sapiens
acacacaaagcctct

SEQ ID NO: 1222230 - DNA, 15 bp, Homo sapiens
cacacacaaagcctc

SEQ ID NO: 1222231 - DNA, 15 bp, Homo sapiens
acacacacaaagcct

SEQ ID NO: 1222232 - DNA, 15 bp, Homo sapiens
cacacacacaaagcc

SEQ ID NO: 1222233 - DNA, 15 bp, Homo sapiens
tcacacacacaaagc

SEQ ID NO: 1222234 - DNA, 15 bp, Homo sapiens
gtcacacacacaaag

SEQ ID NO: 1222235 - DNA, 15 bp, Homo sapiens
agtcacacacacaaa

SEQ ID NO: 1222236 - DNA, 15 bp, Homo sapiens
aagtcacacacacaa

SEQ ID NO: 1222237 - DNA, 15 bp, Homo sapiens
gaagtcacacacaca

SEQ ID NO: 1222238 - DNA, 15 bp, Homo sapiens
ggaagtcacacacac

SEQ ID NO: 1222239 - DNA, 15 bp, Homo sapiens
aggaagtcacacaca

SEQ ID NO: 1222240 - DNA, 15 bp, Homo sapiens
gaggaagtcacacac

SEQ ID NO: 1222241 - DNA, 15 bp, Homo sapiens
ggaggaagtcacaca

SEQ ID NO: 1222242 - DNA, 15 bp, Homo sapiens
gggaggaagtcacac

SEQ ID NO: 1222243 - DNA, 15 bp, Homo sapiens
ggggaggaagtcaca

SEQ ID NO: 1222244 - DNA, 15 bp, Homo sapiens
cggggaggaagtcac

SEQ ID NO: 1222245 - DNA, 15 bp, Homo sapiens
tcggggaggaagtca

SEQ ID NO: 1222246 - DNA, 15 bp, Homo sapiens
ttcggggaggaagtc

SEQ ID NO: 1222247 - DNA, 15 bp, Homo sapiens
cttcggggaggaagt

SEQ ID NO: 1222248 - DNA, 15 bp, Homo sapiens
ccttcggggaggaag

SEQ ID NO: 1222249 - DNA, 15 bp, Homo sapiens
cccttcggggaggaa

SEQ ID NO: 1222250 - DNA, 15 bp, Homo sapiens
tcccttcggggagga

SEQ ID NO: 1222251 - DNA, 15 bp, Homo sapiens
tgtcccttcggggag

SEQ ID NO: 1222252 - DNA, 15 bp, Homo sapiens
gtgtcccttcgggga

SEQ ID NO: 1222253 - DNA, 15 bp, Homo sapiens
agtgtcccttcgggg

SEQ ID NO: 1222254 - DNA, 15 bp, Homo sapiens
cagtgtcccttcggg

SEQ ID NO: 1222255 - DNA, 15 bp, Homo sapiens
ccagtgtcccttcgg

SEQ ID NO: 1222256 - DNA, 15 bp, Homo sapiens
gccagtgtcccttcg

SEQ ID NO: 1222257 - DNA, 15 bp, Homo sapiens
tgccagtgtcccttc

SEQ ID NO: 1222258 - DNA, 15 bp, Homo sapiens
ttgccagtgtccctt

SEQ ID NO: 1222259 - DNA, 15 bp, Homo sapiens
gttgccagtgtccct

SEQ ID NO: 1222260 - DNA, 15 bp, Homo sapiens
tgttgccagtgtccc

SEQ ID NO: 1222261 - DNA, 15 bp, Homo sapiens
ctgttgccagtgtcc

SEQ ID NO: 1222262 - DNA, 15 bp, Homo sapiens
gctgttgccagtgtc

SEQ ID NO: 1222263 - DNA, 15 bp, Homo sapiens
agctgttgccagtgt

SEQ ID NO: 1222264 - DNA, 15 bp, Homo sapiens
cagctgttgccagtg

SEQ ID NO: 1222265 - DNA, 15 bp, Homo sapiens
ccagctgttgccagt

SEQ ID NO: 1222266 - DNA, 15 bp, Homo sapiens
tccagctgttgccag

SEQ ID NO: 1222267 - DNA, 15 bp, Homo sapiens
ctccagctgttgcca

SEQ ID NO: 1222268 - DNA, 15 bp, Homo sapiens
tctccagctgttgcc

SEQ ID NO: 1222269 - DNA, 15 bp, Homo sapiens
gtctccagctgttgc

SEQ ID NO: 1222270 - DNA, 15 bp, Homo sapiens
tgtctccagctgttg

SEQ ID NO: 1222271 - DNA, 15 bp, Homo sapiens
atgtctccagctgtt

SEQ ID NO: 1222272 - DNA, 15 bp, Homo sapiens
aatgtctccagctgt

SEQ ID NO: 1222273 - DNA, 15 bp, Homo sapiens
aaatgtctccagctg

SEQ ID NO: 1222274 - DNA, 15 bp, Homo sapiens
gaaatgtctccagct

SEQ ID NO: 1222275 - DNA, 15 bp, Homo sapiens
ggaaatgtctccagc

SEQ ID NO: 1222276 - DNA, 15 bp, Homo sapiens
aggaaatgtctccag

SEQ ID NO: 1222277 - DNA, 15 bp, Homo sapiens
caggaaatgtctcca

SEQ ID NO: 1222278 - DNA, 15 bp, Homo sapiens
acaggaaatgtctcc

SEQ ID NO: 1222279 - DNA, 15 bp, Homo sapiens
aacaggaaatgtctc

SEQ ID NO: 1222280 - DNA, 15 bp, Homo sapiens
caacaggaaatgtct

SEQ ID NO: 1222281 - DNA, 15 bp, Homo sapiens
acaacaggaaatgtc

SEQ ID NO: 1222282 - DNA, 15 bp, Homo sapiens
aacaacaggaaatgt

SEQ ID NO: 1222283 - DNA, 15 bp, Homo sapiens
taacaacaggaaatg

SEQ ID NO: 1222284 - DNA, 15 bp, Homo sapiens
ttaacaacaggaaat

SEQ ID NO: 1222285 - DNA, 15 bp, Homo sapiens
cttaacaacaggaaa

SEQ ID NO: 1222286 - DNA, 15 bp, Homo sapiens
ccttaacaacaggaa

SEQ ID NO: 1222287 - DNA, 15 bp, Homo sapiens
gccttaacaacagga

SEQ ID NO: 1222288 - DNA, 15 bp, Homo sapiens
agccttaacaacagg

SEQ ID NO: 1222289 - DNA, 15 bp, Homo sapiens
cagccttaacaacag

SEQ ID NO: 1222290 - DNA, 15 bp, Homo sapiens
tcagccttaacaaca

SEQ ID NO: 1222291 - DNA, 15 bp, Homo sapiens
ctcagccttaacaac

SEQ ID NO: 1222292 - DNA, 15 bp, Homo sapiens
cctcagccttaacaa

SEQ ID NO: 1222293 - DNA, 15 bp, Homo sapiens
ccctcagccttaaca

SEQ ID NO: 1222294 - DNA, 15 bp, Homo sapiens
cccctcagccttaac

SEQ ID NO: 1222295 - DNA, 15 bp, Homo sapiens
ccccctcagccttaa

SEQ ID NO: 1222296 - DNA, 15 bp, Homo sapiens
tccccctcagcctta

SEQ ID NO: 1222297 - DNA, 15 bp, Homo sapiens
ctccccctcagcctt

SEQ ID NO: 1222298 - DNA, 15 bp, Homo sapiens
gctccccctcagcct

SEQ ID NO: 1222299 - DNA, 15 bp, Homo sapiens
agctccccctcagcc

SEQ ID NO: 1222300 - DNA, 15 bp, Homo sapiens
cagctccccctcagc

SEQ ID NO: 1222301 - DNA, 15 bp, Homo sapiens
gcagctccccctcag

SEQ ID NO: 1222302 - DNA, 15 bp, Homo sapiens
agcagctccccctca

SEQ ID NO: 1222303 - DNA, 15 bp, Homo sapiens
cagcagctccccctc

SEQ ID NO: 1222304 - DNA, 15 bp, Homo sapiens
ccagcagctccccct

SEQ ID NO: 1222305 - DNA, 15 bp, Homo sapiens
gccagcagctccccc

SEQ ID NO: 1222306 - DNA, 15 bp, Homo sapiens
tgccagcagctcccc

SEQ ID NO: 1222307 - DNA, 15 bp, Homo sapiens
atgccagcagctccc

SEQ ID NO: 1222308 - DNA, 15 bp, Homo sapiens
aatgccagcagctcc

SEQ ID NO: 1222309 - DNA, 15 bp, Homo sapiens
aaatgccagcagctc

SEQ ID NO: 1222310 - DNA, 15 bp, Homo sapiens
caaatgccagcagct

SEQ ID NO: 1222311 - DNA, 15 bp, Homo sapiens
ccaaatgccagcagc

SEQ ID NO: 1222312 - DNA, 15 bp, Homo sapiens
accaaatgccagcag

SEQ ID NO: 1222313 - DNA, 15 bp, Homo sapiens
caccaaatgccagca

SEQ ID NO: 1222314 - DNA, 15 bp, Homo sapiens
ccaccaaatgccagc

SEQ ID NO: 1222315 - DNA, 15 bp, Homo sapiens
cccaccaaatgccag

SEQ ID NO: 1222316 - DNA, 15 bp, Homo sapiens
acccaccaaatgcca

SEQ ID NO: 1222317 - DNA, 15 bp, Homo sapiens
cacccaccaaatgcc

SEQ ID NO: 1222318 - DNA, 15 bp, Homo sapiens
ccacccaccaaatgc

SEQ ID NO: 1222319 - DNA, 15 bp, Homo sapiens
tccacccaccaaatg

SEQ ID NO: 1222320 - DNA, 15 bp, Homo sapiens
ctccacccaccaaat

SEQ ID NO: 1222321 - DNA, 15 bp, Homo sapiens
cctccacccaccaaa

SEQ ID NO: 1222322 - DNA, 15 bp, Homo sapiens
gcctccacccaccaa

SEQ ID NO: 1222323 - DNA, 15 bp, Homo sapiens
ggcctccacccacca

SEQ ID NO: 1222324 - DNA, 15 bp, Homo sapiens
tggcctccacccacc

SEQ ID NO: 1222325 - DNA, 15 bp, Homo sapiens
ctggcctccacccac

SEQ ID NO: 1222326 - DNA, 15 bp, Homo sapiens
cctggcctccaccca

SEQ ID NO: 1222327 - DNA, 15 bp, Homo sapiens
ccctggcctccaccc

SEQ ID NO: 1222328 - DNA, 15 bp, Homo sapiens
tccctggcctccacc

SEQ ID NO: 1222329 - DNA, 15 bp, Homo sapiens
atccctggcctccac

SEQ ID NO: 1222330 - DNA, 15 bp, Homo sapiens
catccctggcctcca

SEQ ID NO: 1222331 - DNA, 15 bp, Homo sapiens
tcatccctggcctcc

SEQ ID NO: 1222332 - DNA, 15 bp, Homo sapiens
gtcatccctggcctc

SEQ ID NO: 1222333 - DNA, 15 bp, Homo sapiens
cgtcatccctggcct

SEQ ID NO: 1222334 - DNA, 15 bp, Homo sapiens
acgtcatccctggcc

SEQ ID NO: 1222335 - DNA, 15 bp, Homo sapiens
aacgtcatccctggc

SEQ ID NO: 1222336 - DNA, 15 bp, Homo sapiens
taacgtcatccctgg

SEQ ID NO: 1222337 - DNA, 15 bp, Homo sapiens
ttaacgtcatccctg

SEQ ID NO: 1222338 - DNA, 15 bp, Homo sapiens
gttaacgtcatccct

SEQ ID NO: 1222339 - DNA, 15 bp, Homo sapiens
agttaacgtcatccc

SEQ ID NO: 1222340 - DNA, 15 bp, Homo sapiens
cagttaacgtcatcc

SEQ ID NO: 1222341 - DNA, 15 bp, Homo sapiens
acagttaacgtcatc

SEQ ID NO: 1222342 - DNA, 15 bp, Homo sapiens
aacagttaacgtcat

SEQ ID NO: 1222343 - DNA, 15 bp, Homo sapiens
gaacagttaacgtca

SEQ ID NO: 1222344 - DNA, 15 bp, Homo sapiens
agaacagttaacgtc

SEQ ID NO: 1222345 - DNA, 15 bp, Homo sapiens
tagaacagttaacgt

SEQ ID NO: 1222346 - DNA, 15 bp, Homo sapiens
gtagaacagttaacg

SEQ ID NO: 1222347 - DNA, 15 bp, Homo sapiens
agtagaacagttaac

SEQ ID NO: 1222348 - DNA, 15 bp, Homo sapiens
tagtagaacagttaa

SEQ ID NO: 1222349 - DNA, 15 bp, Homo sapiens
gtagtagaacagtta

SEQ ID NO: 1222350 - DNA, 15 bp, Homo sapiens
cgtagtagaacagtt

SEQ ID NO: 1222351 - DNA, 15 bp, Homo sapiens
gcgtagtagaacagt

SEQ ID NO: 1222352 - DNA, 15 bp, Homo sapiens
ggcgtagtagaacag

SEQ ID NO: 1222353 - DNA, 15 bp, Homo sapiens
gggcgtagtagaaca

SEQ ID NO: 1222354 - DNA, 15 bp, Homo sapiens
tgggcgtagtagaac

SEQ ID NO: 1222355 - DNA, 15 bp, Homo sapiens
ctgggcgtagtagaa

SEQ ID NO: 1222356 - DNA, 15 bp, Homo sapiens
cctgggcgtagtaga

SEQ ID NO: 1222357 - DNA, 15 bp, Homo sapiens
tcctgggcgtagtag

SEQ ID NO: 1222358 - DNA, 15 bp, Homo sapiens
gtcctgggcgtagta

SEQ ID NO: 1222359 - DNA, 15 bp, Homo sapiens
tgtcctgggcgtagt

SEQ ID NO: 1222360 - DNA, 15 bp, Homo sapiens
ctgtcctgggcgtag

SEQ ID NO: 1222361 - DNA, 15 bp, Homo sapiens
gctgtcctgggcgta

SEQ ID NO: 1222362 - DNA, 15 bp, Homo sapiens
ggctgtcctgggcgt

SEQ ID NO: 1222363 - DNA, 15 bp, Homo sapiens
gggctgtcctgggcg

SEQ ID NO: 1222364 - DNA, 15 bp, Homo sapiens
ggggctgtcctgggc

SEQ ID NO: 1222365 - DNA, 15 bp, Homo sapiens
gggggctgtcctggg

SEQ ID NO: 1222366 - DNA, 15 bp, Homo sapiens
tgggggctgtcctgg

SEQ ID NO: 1222367 - DNA, 15 bp, Homo sapiens
ttgggggctgtcctg

SEQ ID NO: 1222368 - DNA, 15 bp, Homo sapiens
gttgggggctgtcct

SEQ ID NO: 1222369 - DNA, 15 bp, Homo sapiens
tgttgggggctgtcc

SEQ ID NO: 1222370 - DNA, 15 bp, Homo sapiens
gtgttgggggctgtc

SEQ ID NO: 1222371 - DNA, 15 bp, Homo sapiens
tgtgttgggggctgt

SEQ ID NO: 1222372 - DNA, 15 bp, Homo sapiens
gtgtgttgggggctg

SEQ ID NO: 1222373 - DNA, 15 bp, Homo sapiens
tgtgtgttgggggct

SEQ ID NO: 1222374 - DNA, 15 bp, Homo sapiens
gtgtgtgttgggggc

SEQ ID NO: 1222375 - DNA, 15 bp, Homo sapiens
tgtgtgtgttggggg

SEQ ID NO: 1222376 - DNA, 15 bp, Homo sapiens
ttgtgtgtgttgggg

SEQ ID NO: 1222377 - DNA, 15 bp, Homo sapiens
gttgtgtgtgttggg

SEQ ID NO: 1222378 - DNA, 15 bp, Homo sapiens
tgttgtgtgtgttgg

SEQ ID NO: 1222379 - DNA, 15 bp, Homo sapiens
ctgttgtgtgtgttg

SEQ ID NO: 1222380 - DNA, 15 bp, Homo sapiens
gctgttgtgtgtgtt

SEQ ID NO: 1222381 - DNA, 15 bp, Homo sapiens
ggctgttgtgtgtgt

SEQ ID NO: 1222382 - DNA, 15 bp, Homo sapiens
aggctgttgtgtgtg

SEQ ID NO: 1222383 - DNA, 15 bp, Homo sapiens
caggctgttgtgtgt

SEQ ID NO: 1222384 - DNA, 15 bp, Homo sapiens
ccaggctgttgtgtg

SEQ ID NO: 1222385 - DNA, 15 bp, Homo sapiens
gccaggctgttgtgt

SEQ ID NO: 1222386 - DNA, 15 bp, Homo sapiens
tgggccaggctgttg

SEQ ID NO: 1222387 - DNA, 15 bp, Homo sapiens
ttgggccaggctgtt

SEQ ID NO: 1222388 - DNA, 15 bp, Homo sapiens
attgggccaggctgt

SEQ ID NO: 1222389 - DNA, 15 bp, Homo sapiens
cattgggccaggctg

SEQ ID NO: 1222390 - DNA, 15 bp, Homo sapiens
acattgggccaggct

SEQ ID NO: 1222391 - DNA, 15 bp, Homo sapiens
gacattgggccaggc

SEQ ID NO: 1222392 - DNA, 15 bp, Homo sapiens
tgacattgggccagg

SEQ ID NO: 1222393 - DNA, 15 bp, Homo sapiens
gtgacattgggccag

SEQ ID NO: 1222394 - DNA, 15 bp, Homo sapiens
cgtgacattgggcca

SEQ ID NO: 1222395 - DNA, 15 bp, Homo sapiens
tcgtgacattgggcc

SEQ ID NO: 1222396 - DNA, 15 bp, Homo sapiens
ctcgtgacattgggc

SEQ ID NO: 1222397 - DNA, 15 bp, Homo sapiens
tctcgtgacattggg

SEQ ID NO: 1222398 - DNA, 15 bp, Homo sapiens
ctctcgtgacattgg

SEQ ID NO: 1222399 - DNA, 15 bp, Homo sapiens
gctctcgtgacattg

SEQ ID NO: 1222400 - DNA, 15 bp, Homo sapiens
agctctcgtgacatt

SEQ ID NO: 1222401 - DNA, 15 bp, Homo sapiens
cagctctcgtgacat

SEQ ID NO: 1222402 - DNA, 15 bp, Homo sapiens
tcagctctcgtgaca

SEQ ID NO: 1222403 - DNA, 15 bp, Homo sapiens
ctcagctctcgtgac

SEQ ID NO: 1222404 - DNA, 15 bp, Homo sapiens
cctcagctctcgtga

SEQ ID NO: 1222405 - DNA, 15 bp, Homo sapiens
acctcagctctcgtg

SEQ ID NO: 1222406 - DNA, 15 bp, Homo sapiens
cacctcagctctcgt

SEQ ID NO: 1222407 - DNA, 15 bp, Homo sapiens
ccacctcagctctcg

SEQ ID NO: 1222408 - DNA, 15 bp, Homo sapiens
tccacctcagctctc

SEQ ID NO: 1222409 - DNA, 15 bp, Homo sapiens
ttccacctcagctct

SEQ ID NO: 1222410 - DNA, 15 bp, Homo sapiens
gttccacctcagctc

SEQ ID NO: 1222411 - DNA, 15 bp, Homo sapiens
tgttccacctcagct

SEQ ID NO: 1222412 - DNA, 15 bp, Homo sapiens
ctgttccacctcagc

SEQ ID NO: 1222413 - DNA, 15 bp, Homo sapiens
gctgttccacctcag

SEQ ID NO: 1222414 - DNA, 15 bp, Homo sapiens
ggctgttccacctca

SEQ ID NO: 1222415 - DNA, 15 bp, Homo sapiens
gggctgttccacctc

SEQ ID NO: 1222416 - DNA, 15 bp, Homo sapiens
agggctgttccacct

SEQ ID NO: 1222417 - DNA, 15 bp, Homo sapiens
cagggctgttccacc

SEQ ID NO: 1222418 - DNA, 15 bp, Homo sapiens
acagggctgttccac

SEQ ID NO: 1222419 - DNA, 15 bp, Homo sapiens
aacagggctgttcca

SEQ ID NO: 1222420 - DNA, 15 bp, Homo sapiens
gaacagggctgttcc

SEQ ID NO: 1222421 - DNA, 15 bp, Homo sapiens
agaacagggctgttc

SEQ ID NO: 1222422 - DNA, 15 bp, Homo sapiens
cagaacagggctgtt

SEQ ID NO: 1222423 - DNA, 15 bp, Homo sapiens
gcagaacagggctgt

SEQ ID NO: 1222424 - DNA, 15 bp, Homo sapiens
agcagaacagggctg

SEQ ID NO: 1222425 - DNA, 15 bp, Homo sapiens
aagcagaacagggct

SEQ ID NO: 1222426 - DNA, 15 bp, Homo sapiens
gaagcagaacagggc

SEQ ID NO: 1222427 - DNA, 15 bp, Homo sapiens
tgaagcagaacaggg

SEQ ID NO: 1222428 - DNA, 15 bp, Homo sapiens
ctgaagcagaacagg

SEQ ID NO: 1222429 - DNA, 15 bp, Homo sapiens
cctgaagcagaacag

SEQ ID NO: 1222430 - DNA, 15 bp, Homo sapiens
acctgaagcagaaca

SEQ ID NO: 1222431 - DNA, 15 bp, Homo sapiens
gacctgaagcagaac

SEQ ID NO: 1222432 - DNA, 15 bp, Homo sapiens
agacctgaagcagaa

SEQ ID NO: 1222433 - DNA, 15 bp, Homo sapiens
aagacctgaagcaga

SEQ ID NO: 1222434 - DNA, 15 bp, Homo sapiens
gaagacctgaagcag

SEQ ID NO: 1222435 - DNA, 15 bp, Homo sapiens
tgaagacctgaagca

SEQ ID NO: 1222436 - DNA, 15 bp, Homo sapiens
ctgaagacctgaagc

SEQ ID NO: 1222437 - DNA, 15 bp, Homo sapiens
cctgaagacctgaag

SEQ ID NO: 1222438 - DNA, 15 bp, Homo sapiens
acctgaagacctgaa

SEQ ID NO: 1222439 - DNA, 15 bp, Homo sapiens
gacctgaagacctga

SEQ ID NO: 1222440 - DNA, 15 bp, Homo sapiens
agacctgaagacctg

SEQ ID NO: 1222441 - DNA, 15 bp, Homo sapiens
aagacctgaagacct

SEQ ID NO: 1222442 - DNA, 15 bp, Homo sapiens
aaagacctgaagacc

SEQ ID NO: 1222443 - DNA, 15 bp, Homo sapiens
caaagacctgaagac

SEQ ID NO: 1222444 - DNA, 15 bp, Homo sapiens
ccaaagacctgaaga

SEQ ID NO: 1222445 - DNA, 15 bp, Homo sapiens
cccaaagacctgaag

SEQ ID NO: 1222446 - DNA, 15 bp, Homo sapiens
ccccaaagacctgaa

SEQ ID NO: 1222447 - DNA, 15 bp, Homo sapiens
cccccaaagacctga

SEQ ID NO: 1222448 - DNA, 15 bp, Homo sapiens
acccccaaagacctg

SEQ ID NO: 1222449 - DNA, 15 bp, Homo sapiens
gacccccaaagacct

SEQ ID NO: 1222450 - DNA, 15 bp, Homo sapiens
tgacccccaaagacc

SEQ ID NO: 1222451 - DNA, 15 bp, Homo sapiens
ttgacccccaaagac

SEQ ID NO: 1222452 - DNA, 15 bp, Homo sapiens
cttgacccccaaaga

SEQ ID NO: 1222453 - DNA, 15 bp, Homo sapiens
ccttgacccccaaag

SEQ ID NO: 1222454 - DNA, 15 bp, Homo sapiens
tccttgacccccaaa

SEQ ID NO: 1222455 - DNA, 15 bp, Homo sapiens
atccttgacccccaa

SEQ ID NO: 1222456 - DNA, 15 bp, Homo sapiens
catccttgaccccca

SEQ ID NO: 1222457 - DNA, 15 bp, Homo sapiens
gcatccttgaccccc

SEQ ID NO: 1222458 - DNA, 15 bp, Homo sapiens
tgcatccttgacccc

SEQ ID NO: 1222459 - DNA, 15 bp, Homo sapiens
ttgcatccttgaccc

SEQ ID NO: 1222460 - DNA, 15 bp, Homo sapiens
tttgcatccttgacc

SEQ ID NO: 1222461 - DNA, 15 bp, Homo sapiens
atttgcatccttgac

SEQ ID NO: 1222462 - DNA, 15 bp, Homo sapiens
tatttgcatccttga

SEQ ID NO: 1222463 - DNA, 15 bp, Homo sapiens
ctatttgcatccttg

SEQ ID NO: 1222464 - DNA, 15 bp, Homo sapiens
tctatttgcatcctt

SEQ ID NO: 1222465 - DNA, 15 bp, Homo sapiens
ctctatttgcatcct

SEQ ID NO: 1222466 - DNA, 15 bp, Homo sapiens
cctctatttgcatcc

SEQ ID NO: 1222467 - DNA, 15 bp, Homo sapiens
tcctctatttgcatc

SEQ ID NO: 1222468 - DNA, 15 bp, Homo sapiens
gtcctctatttgcat

SEQ ID NO: 1222469 - DNA, 15 bp, Homo sapiens
agtcctctatttgca

SEQ ID NO: 1222470 - DNA, 15 bp, Homo sapiens
gagtcctctatttgc

SEQ ID NO: 1222471 - DNA, 15 bp, Homo sapiens
agagtcctctatttg

SEQ ID NO: 1222472 - DNA, 15 bp, Homo sapiens
cagagtcctctattt

SEQ ID NO: 1222473 - DNA, 15 bp, Homo sapiens
gcagagtcctctatt

SEQ ID NO: 1222474 - DNA, 15 bp, Homo sapiens
agcagagtcctctat

SEQ ID NO: 1222475 - DNA, 15 bp, Homo sapiens
gagcagagtcctcta

SEQ ID NO: 1222476 - DNA, 15 bp, Homo sapiens
ggagcagagtcctct

SEQ ID NO: 1222477 - DNA, 15 bp, Homo sapiens
gggagcagagtcctc

SEQ ID NO: 1222478 - DNA, 15 bp, Homo sapiens
tgggagcagagtcct

SEQ ID NO: 1222479 - DNA, 15 bp, Homo sapiens
ttgggagcagagtcc

SEQ ID NO: 1222480 - DNA, 15 bp, Homo sapiens
attgggagcagagtc

SEQ ID NO: 1222481 - DNA, 15 bp, Homo sapiens
aattgggagcagagt

SEQ ID NO: 1222482 - DNA, 15 bp, Homo sapiens
gaattgggagcagag

SEQ ID NO: 1222483 - DNA, 15 bp, Homo sapiens
tgaattgggagcaga

SEQ ID NO: 1222484 - DNA, 15 bp, Homo sapiens
ctgaattgggagcag

SEQ ID NO: 1222485 - DNA, 15 bp, Homo sapiens
gctgaattgggagca

SEQ ID NO: 1222486 - DNA, 15 bp, Homo sapiens
agctgaattgggagc

SEQ ID NO: 1222487 - DNA, 15 bp, Homo sapiens
gagctgaattgggag

SEQ ID NO: 1222488 - DNA, 15 bp, Homo sapiens
tgagctgaattggga

SEQ ID NO: 1222489 - DNA, 15 bp, Homo sapiens
gtgagctgaattggg

SEQ ID NO: 1222490 - DNA, 15 bp, Homo sapiens
tgtgagctgaattgg

SEQ ID NO: 1222491 - DNA, 15 bp, Homo sapiens
atgtgagctgaattg

SEQ ID NO: 1222492 - DNA, 15 bp, Homo sapiens
tatgtgagctgaatt

SEQ ID NO: 1222493 - DNA, 15 bp, Homo sapiens
ttatgtgagctgaat

SEQ ID NO: 1222494 - DNA, 15 bp, Homo sapiens
tttatgtgagctgaa

SEQ ID NO: 1222495 - DNA, 15 bp, Homo sapiens
ttttatgtgagctga

SEQ ID NO: 1222496 - DNA, 15 bp, Homo sapiens
cttttatgtgagctg

SEQ ID NO: 1222497 - DNA, 15 bp, Homo sapiens
tcttttatgtgagct

SEQ ID NO: 1222498 - DNA, 15 bp, Homo sapiens
ttcttttatgtgagc

SEQ ID NO: 1222499 - DNA, 15 bp, Homo sapiens
gttcttttatgtgag

SEQ ID NO: 1222500 - DNA, 15 bp, Homo sapiens
ggttcttttatgtga

SEQ ID NO: 1222501 - DNA, 15 bp, Homo sapiens
cggttcttttatgtg

SEQ ID NO: 1222502 - DNA, 15 bp, Homo sapiens
ccggttcttttatgt

SEQ ID NO: 1222503 - DNA, 15 bp, Homo sapiens
gccggttcttttatg

SEQ ID NO: 1222504 - DNA, 15 bp, Homo sapiens
ggccggttcttttat

SEQ ID NO: 1222505 - DNA, 15 bp, Homo sapiens
cggccggttctttta

SEQ ID NO: 1222506 - DNA, 15 bp, Homo sapiens
ccggccggttctttt

SEQ ID NO: 1222507 - DNA, 15 bp, Homo sapiens
cccggccggttcttt

SEQ ID NO: 1222508 - DNA, 15 bp, Homo sapiens
gcccggccggttctt

SEQ ID NO: 1222509 - DNA, 15 bp, Homo sapiens
cgcccggccggttct

SEQ ID NO: 1222510 - DNA, 15 bp, Homo sapiens
gcgcccggccggttc

SEQ ID NO: 1222511 - DNA, 15 bp, Homo sapiens
agcgcccggccggtt

SEQ ID NO: 1222512 - DNA, 15 bp, Homo sapiens
cagcgcccggccggt

SEQ ID NO: 1222513 - DNA, 15 bp, Homo sapiens
acagcgcccggccgg

SEQ ID NO: 1222514 - DNA, 15 bp, Homo sapiens
gacagcgcccggccg

SEQ ID NO: 1222515 - DNA, 15 bp, Homo sapiens
cgacagcgcccggcc

SEQ ID NO: 1222516 - DNA, 15 bp, Homo sapiens
gcgacagcgcccggc

SEQ ID NO: 1222517 - DNA, 15 bp, Homo sapiens
agcgacagcgcccgg

SEQ ID NO: 1222518 - DNA, 15 bp, Homo sapiens
gagcgacagcgcccg

SEQ ID NO: 1222519 - DNA, 15 bp, Homo sapiens
tgagcgacagcgccc

SEQ ID NO: 1222520 - DNA, 15 bp, Homo sapiens
atgagcgacagcgcc

SEQ ID NO: 1222521 - DNA, 15 bp, Homo sapiens
catgagcgacagcgc

SEQ ID NO: 1222522 - DNA, 15 bp, Homo sapiens
gcatgagcgacagcg

SEQ ID NO: 1222523 - DNA, 15 bp, Homo sapiens
ggcatgagcgacagc

SEQ ID NO: 1222524 - DNA, 15 bp, Homo sapiens
aggcatgagcgacag

SEQ ID NO: 1222525 - DNA, 15 bp, Homo sapiens
taggcatgagcgaca

SEQ ID NO: 1222526 - DNA, 15 bp, Homo sapiens
ataggcatgagcgac

SEQ ID NO: 1222527 - DNA, 15 bp, Homo sapiens
tataggcatgagcga

SEQ ID NO: 1222528 - DNA, 15 bp, Homo sapiens
ttataggcatgagcg

SEQ ID NO: 1222529 - DNA, 15 bp, Homo sapiens
cggcctcccaaagcg

SEQ ID NO: 1222530 - DNA, 15 bp, Homo sapiens
tcggcctcccaaagc

SEQ ID NO: 1222531 - DNA, 15 bp, Homo sapiens
ttcggcctcccaaag

SEQ ID NO: 1222532 - DNA, 15 bp, Homo sapiens
cttcggcctcccaaa

SEQ ID NO: 1222533 - DNA, 15 bp, Homo sapiens
acttcggcctcccaa

SEQ ID NO: 1222534 - DNA, 15 bp, Homo sapiens
cacttcggcctccca

SEQ ID NO: 1222535 - DNA, 15 bp, Homo sapiens
ccacttcggcctccc

SEQ ID NO: 1222536 - DNA, 15 bp, Homo sapiens
cccacttcggcctcc

SEQ ID NO: 1222537 - DNA, 15 bp, Homo sapiens
tcccacttcggcctc

SEQ ID NO: 1222538 - DNA, 15 bp, Homo sapiens
ctcccacttcggcct

SEQ ID NO: 1222539 - DNA, 15 bp, Homo sapiens
cctcccacttcggcc

SEQ ID NO: 1222540 - DNA, 15 bp, Homo sapiens
tcctcccacttcggc

SEQ ID NO: 1222541 - DNA, 15 bp, Homo sapiens
atcctcccacttcgg

SEQ ID NO: 1222542 - DNA, 15 bp, Homo sapiens
gatcctcccacttcg

SEQ ID NO: 1222543 - DNA, 15 bp, Homo sapiens
cgatcctcccacttc

SEQ ID NO: 1222544 - DNA, 15 bp, Homo sapiens
gcgatcctcccactt

SEQ ID NO: 1222545 - DNA, 15 bp, Homo sapiens
agcgatcctcccact

SEQ ID NO: 1222546 - DNA, 15 bp, Homo sapiens
acccaggctggtctc

SEQ ID NO: 1222547 - DNA, 15 bp, Homo sapiens
tacccaggctggtct

SEQ ID NO: 1222548 - DNA, 15 bp, Homo sapiens
ttacccaggctggtc

SEQ ID NO: 1222549 - DNA, 15 bp, Homo sapiens
gttacccaggctggt

SEQ ID NO: 1222550 - DNA, 15 bp, Homo sapiens
atgttacccaggctg

SEQ ID NO: 1222551 - DNA, 15 bp, Homo sapiens
tatgttacccaggct

SEQ ID NO: 1222552 - DNA, 15 bp, Homo sapiens
ctatgttacccaggc

SEQ ID NO: 1222553 - DNA, 15 bp, Homo sapiens
gctatgttacccagg

SEQ ID NO: 1222554 - DNA, 15 bp, Homo sapiens
tgctatgttacccag

SEQ ID NO: 1222555 - DNA, 15 bp, Homo sapiens
ttgctatgttaccca

SEQ ID NO: 1222556 - DNA, 15 bp, Homo sapiens
cttgctatgttaccc

SEQ ID NO: 1222557 - DNA, 15 bp, Homo sapiens
tcttgctatgttacc

SEQ ID NO: 1222558 - DNA, 15 bp, Homo sapiens
atcttgctatgttac

SEQ ID NO: 1222559 - DNA, 15 bp, Homo sapiens
gatcttgctatgtta

SEQ ID NO: 1222560 - DNA, 15 bp, Homo sapiens
tgggatcttgctatg

SEQ ID NO: 1222561 - DNA, 15 bp, Homo sapiens
atgggatcttgctat

SEQ ID NO: 1222562 - DNA, 15 bp, Homo sapiens
aatgggatcttgcta

SEQ ID NO: 1222563 - DNA, 15 bp, Homo sapiens
aaatgggatcttgct

SEQ ID NO: 1222564 - DNA, 15 bp, Homo sapiens
gaaatgggatcttgc

SEQ ID NO: 1222565 - DNA, 15 bp, Homo sapiens
agaaatgggatcttg

SEQ ID NO: 1222566 - DNA, 15 bp, Homo sapiens
tagaaatgggatctt

SEQ ID NO: 1222567 - DNA, 15 bp, Homo sapiens
gtagaaatgggatct

SEQ ID NO: 1222568 - DNA, 15 bp, Homo sapiens
cgtagaaatgggatc

SEQ ID NO: 1222569 - DNA, 15 bp, Homo sapiens
tcgtagaaatgggat

SEQ ID NO: 1222570 - DNA, 15 bp, Homo sapiens
ttcgtagaaatggga

SEQ ID NO: 1222571 - DNA, 15 bp, Homo sapiens
tttcgtagaaatggg

SEQ ID NO: 1222572 - DNA, 15 bp, Homo sapiens
ctttcgtagaaatgg

SEQ ID NO: 1222573 - DNA, 15 bp, Homo sapiens
actttcgtagaaatg

SEQ ID NO: 1222574 - DNA, 15 bp, Homo sapiens
tactttcgtagaaat

SEQ ID NO: 1222575 - DNA, 15 bp, Homo sapiens
gtactttcgtagaaa

SEQ ID NO: 1222576 - DNA, 15 bp, Homo sapiens
tgtactttcgtagaa

SEQ ID NO: 1222577 - DNA, 15 bp, Homo sapiens
ttgtactttcgtaga

SEQ ID NO: 1222578 - DNA, 15 bp, Homo sapiens
tttgtactttcgtag

SEQ ID NO: 1222579 - DNA, 15 bp, Homo sapiens
ttttgtactttcgta

SEQ ID NO: 1222580 - DNA, 15 bp, Homo sapiens
tttttgtactttcgt

SEQ ID NO: 1222581 - DNA, 15 bp, Homo sapiens
atttttgtactttcg

SEQ ID NO: 1222582 - DNA, 15 bp, Homo sapiens
gtaatttttgtactt

SEQ ID NO: 1222583 - DNA, 15 bp, Homo sapiens
ggtaatttttgtact

SEQ ID NO: 1222584 - DNA, 15 bp, Homo sapiens
aggtaatttttgtac

SEQ ID NO: 1222585 - DNA, 15 bp, Homo sapiens
cgtgcccaggtaatt

SEQ ID NO: 1222586 - DNA, 15 bp, Homo sapiens
ccgtgcccaggtaat

SEQ ID NO: 1222587 - DNA, 15 bp, Homo sapiens
accgtgcccaggtaa

SEQ ID NO: 1222588 - DNA, 15 bp, Homo sapiens
caccgtgcccaggta

SEQ ID NO: 1222589 - DNA, 15 bp, Homo sapiens
ccaccgtgcccaggt

SEQ ID NO: 1222590 - DNA, 15 bp, Homo sapiens
gccaccgtgcccagg

SEQ ID NO: 1222591 - DNA, 15 bp, Homo sapiens
tgccaccgtgcccag

SEQ ID NO: 1222592 - DNA, 15 bp, Homo sapiens
atgccaccgtgccca

SEQ ID NO: 1222593 - DNA, 15 bp, Homo sapiens
catgccaccgtgccc

SEQ ID NO: 1222594 - DNA, 15 bp, Homo sapiens
gcatgccaccgtgcc

SEQ ID NO: 1222595 - DNA, 15 bp, Homo sapiens
tgcatgccaccgtgc

SEQ ID NO: 1222596 - DNA, 15 bp, Homo sapiens
gtgcatgccaccgtg

SEQ ID NO: 1222597 - DNA, 15 bp, Homo sapiens
ggtgcatgccaccgt

SEQ ID NO: 1222598 - DNA, 15 bp, Homo sapiens
aggtgcatgccaccg

SEQ ID NO: 1222599 - DNA, 15 bp, Homo sapiens
caggtgcatgccacc

SEQ ID NO: 1222600 - DNA, 15 bp, Homo sapiens
ccgctgggactacag

SEQ ID NO: 1222601 - DNA, 15 bp, Homo sapiens
gccgctgggactaca

SEQ ID NO: 1222602 - DNA, 15 bp, Homo sapiens
agccgctgggactac

SEQ ID NO: 1222603 - DNA, 15 bp, Homo sapiens
aagccgctgggacta

SEQ ID NO: 1222604 - DNA, 15 bp, Homo sapiens
caagccgctgggact

SEQ ID NO: 1222605 - DNA, 15 bp, Homo sapiens
ccaagccgctgggac

SEQ ID NO: 1222606 - DNA, 15 bp, Homo sapiens
cccaagccgctggga

SEQ ID NO: 1222607 - DNA, 15 bp, Homo sapiens
tcccaagccgctggg

SEQ ID NO: 1222608 - DNA, 15 bp, Homo sapiens
ctcccaagccgctgg

SEQ ID NO: 1222609 - DNA, 15 bp, Homo sapiens
cctcccaagccgctg

SEQ ID NO: 1222610 - DNA, 15 bp, Homo sapiens
gcctcccaagccgct

SEQ ID NO: 1222611 - DNA, 15 bp, Homo sapiens
agcctcccaagccgc

SEQ ID NO: 1222612 - DNA, 15 bp, Homo sapiens
cagcctcccaagccg

SEQ ID NO: 1222613 - DNA, 15 bp, Homo sapiens
tcagcctcccaagcc

SEQ ID NO: 1222614 - DNA, 15 bp, Homo sapiens
acttcccacctcagc

SEQ ID NO: 1222615 - DNA, 15 bp, Homo sapiens
aacttcccacctcag

SEQ ID NO: 1222616 - DNA, 15 bp, Homo sapiens
aaacttcccacctca

SEQ ID NO: 1222617 - DNA, 15 bp, Homo sapiens
caaacttcccacctc

SEQ ID NO: 1222618 - DNA, 15 bp, Homo sapiens
gcaaacttcccacct

SEQ ID NO: 1222619 - DNA, 15 bp, Homo sapiens
agcaaacttcccacc

SEQ ID NO: 1222620 - DNA, 15 bp, Homo sapiens
aagcaaacttcccac

SEQ ID NO: 1222621 - DNA, 15 bp, Homo sapiens
caagcaaacttccca

SEQ ID NO: 1222622 - DNA, 15 bp, Homo sapiens
tcaagcaaacttccc

SEQ ID NO: 1222623 - DNA, 15 bp, Homo sapiens
ctcaagcaaacttcc

SEQ ID NO: 1222624 - DNA, 15 bp, Homo sapiens
gctcaagcaaacttc

SEQ ID NO: 1222625 - DNA, 15 bp, Homo sapiens
ggctcaagcaaactt

SEQ ID NO: 1222626 - DNA, 15 bp, Homo sapiens
gggctcaagcaaact

SEQ ID NO: 1222627 - DNA, 15 bp, Homo sapiens
tgggctcaagcaaac

SEQ ID NO: 1222628 - DNA, 15 bp, Homo sapiens
ctgggctcaagcaaa

SEQ ID NO: 1222629 - DNA, 15 bp, Homo sapiens
ctggcatgatctcgg

SEQ ID NO: 1222630 - DNA, 15 bp, Homo sapiens
actggcatgatctcg

SEQ ID NO: 1222631 - DNA, 15 bp, Homo sapiens
cactggcatgatctc

SEQ ID NO: 1222632 - DNA, 15 bp, Homo sapiens
gcactggcatgatct

SEQ ID NO: 1222633 - DNA, 15 bp, Homo sapiens
tgcactggcatgatc

SEQ ID NO: 1222634 - DNA, 15 bp, Homo sapiens
gtgcactggcatgat

SEQ ID NO: 1222635 - DNA, 15 bp, Homo sapiens
agtgcactggcatga

SEQ ID NO: 1222636 - DNA, 15 bp, Homo sapiens
gagtgcactggcatg

SEQ ID NO: 1222637 - DNA, 15 bp, Homo sapiens
ggagtgcactggcat

SEQ ID NO: 1222638 - DNA, 15 bp, Homo sapiens
tggagtgcactggca

SEQ ID NO: 1222639 - DNA, 15 bp, Homo sapiens
ctggagtgcactggc

SEQ ID NO: 1222640 - DNA, 15 bp, Homo sapiens
gctggagtgcactgg

SEQ ID NO: 1222641 - DNA, 15 bp, Homo sapiens
ggctggagtgcactg

SEQ ID NO: 1222642 - DNA, 15 bp, Homo sapiens
aggctggagtgcact

SEQ ID NO: 1222643 - DNA, 15 bp, Homo sapiens
gaggctggagtgcac

SEQ ID NO: 1222644 - DNA, 15 bp, Homo sapiens
cgaggctggagtgca

SEQ ID NO: 1222645 - DNA, 15 bp, Homo sapiens
ccgaggctggagtgc

SEQ ID NO: 1222646 - DNA, 15 bp, Homo sapiens
gccgaggctggagtg

SEQ ID NO: 1222647 - DNA, 15 bp, Homo sapiens
cgccgaggctggagt

SEQ ID NO: 1222648 - DNA, 15 bp, Homo sapiens
tcgccgaggctggag

SEQ ID NO: 1222649 - DNA, 15 bp, Homo sapiens
gtcgccgaggctgga

SEQ ID NO: 1222650 - DNA, 15 bp, Homo sapiens
tgtcgccgaggctgg

SEQ ID NO: 1222651 - DNA, 15 bp, Homo sapiens
ctgtcgccgaggctg

SEQ ID NO: 1222652 - DNA, 15 bp, Homo sapiens
actctgtcgccgagg

SEQ ID NO: 1222653 - DNA, 15 bp, Homo sapiens
aactctgtcgccgag

SEQ ID NO: 1222654 - DNA, 15 bp, Homo sapiens
taactctgtcgccga

SEQ ID NO: 1222655 - DNA, 15 bp, Homo sapiens
ctaactctgtcgccg

SEQ ID NO: 1222656 - DNA, 15 bp, Homo sapiens
tctaactctgtcgcc

SEQ ID NO: 1222657 - DNA, 15 bp, Homo sapiens
gtctaactctgtcgc

SEQ ID NO: 1222658 - DNA, 15 bp, Homo sapiens
agtctaactctgtcg

SEQ ID NO: 1222659 - DNA, 15 bp, Homo sapiens
gagtctaactctgtc

SEQ ID NO: 1222660 - DNA, 15 bp, Homo sapiens
agagtctaactctgt

SEQ ID NO: 1222661 - DNA, 15 bp, Homo sapiens
tagagtctaactctg

SEQ ID NO: 1222662 - DNA, 15 bp, Homo sapiens
atagagtctaactct

SEQ ID NO: 1222663 - DNA, 15 bp, Homo sapiens
gatagagtctaactc

SEQ ID NO: 1222664 - DNA, 15 bp, Homo sapiens
agatagagtctaact

SEQ ID NO: 1222665 - DNA, 15 bp, Homo sapiens
gagatagagtctaac

SEQ ID NO: 1222666 - DNA, 15 bp, Homo sapiens
tgagatagagtctaa

SEQ ID NO: 1222667 - DNA, 15 bp, Homo sapiens
ttgagatagagtcta

SEQ ID NO: 1222668 - DNA, 15 bp, Homo sapiens
cttttttgagataga

SEQ ID NO: 1222669 - DNA, 15 bp, Homo sapiens
tcttttttgagatag

SEQ ID NO: 1222670 - DNA, 15 bp, Homo sapiens
ttcttttttgagata

SEQ ID NO: 1222671 - DNA, 15 bp, Homo sapiens
tttcttttttgagat

SEQ ID NO: 1222672 - DNA, 15 bp, Homo sapiens
ttttttcttttttga

SEQ ID NO: 1222673 - DNA, 15 bp, Homo sapiens
cttttttcttttttg

SEQ ID NO: 1222674 - DNA, 15 bp, Homo sapiens
ctctcttttttcttt

SEQ ID NO: 1222675 - DNA, 15 bp, Homo sapiens
tctctcttttttctt

SEQ ID NO: 1222676 - DNA, 15 bp, Homo sapiens
ttctctcttttttct

SEQ ID NO: 1222677 - DNA, 15 bp, Homo sapiens
tttctctcttttttc

SEQ ID NO: 1222678 - DNA, 15 bp, Homo sapiens
ttttctctctttttt

SEQ ID NO: 1222679 - DNA, 15 bp, Homo sapiens
gttttctctcttttt

SEQ ID NO: 1222680 - DNA, 15 bp, Homo sapiens
ggttttctctctttt

SEQ ID NO: 1222681 - DNA, 15 bp, Homo sapiens
gggttttctctcttt

SEQ ID NO: 1222682 - DNA, 15 bp, Homo sapiens
tgggttttctctctt

SEQ ID NO: 1222683 - DNA, 15 bp, Homo sapiens
gtgggttttctctct

SEQ ID NO: 1222684 - DNA, 15 bp, Homo sapiens
ggtgggttttctctc

SEQ ID NO: 1222685 - DNA, 15 bp, Homo sapiens
tggtgggttttctct

SEQ ID NO: 1222686 - DNA, 15 bp, Homo sapiens
ttggtgggttttctc

SEQ ID NO: 1222687 - DNA, 15 bp, Homo sapiens
gttggtgggttttct

SEQ ID NO: 1222688 - DNA, 15 bp, Homo sapiens
agttggtgggttttc

SEQ ID NO: 1222689 - DNA, 15 bp, Homo sapiens
aagttggtgggtttt

SEQ ID NO: 1222690 - DNA, 15 bp, Homo sapiens
caagttggtgggttt

SEQ ID NO: 1222691 - DNA, 15 bp, Homo sapiens
ccaagttggtgggtt

SEQ ID NO: 1222692 - DNA, 15 bp, Homo sapiens
tccaagttggtgggt

SEQ ID NO: 1222693 - DNA, 15 bp, Homo sapiens
ttccaagttggtggg

SEQ ID NO: 1222694 - DNA, 15 bp, Homo sapiens
tttccaagttggtgg

SEQ ID NO: 1222695 - DNA, 15 bp, Homo sapiens
ttttccaagttggtg

SEQ ID NO: 1222696 - DNA, 15 bp, Homo sapiens
attttccaagttggt

SEQ ID NO: 1222697 - DNA, 15 bp, Homo sapiens
aattttccaagttgg

SEQ ID NO: 1222698 - DNA, 15 bp, Homo sapiens
taattttccaagttg

SEQ ID NO: 1222699 - DNA, 15 bp, Homo sapiens
ttaattttccaagtt

SEQ ID NO: 1222700 - DNA, 15 bp, Homo sapiens
tttaattttccaagt

SEQ ID NO: 1222701 - DNA, 15 bp, Homo sapiens
ttttaattttccaag

SEQ ID NO: 1222702 - DNA, 15 bp, Homo sapiens
gttttaattttccaa

SEQ ID NO: 1222703 - DNA, 15 bp, Homo sapiens
tgttttaattttcca

SEQ ID NO: 1222704 - DNA, 15 bp, Homo sapiens
ctgttttaattttcc

SEQ ID NO: 1222705 - DNA, 15 bp, Homo sapiens
gctgttttaattttc

SEQ ID NO: 1222706 - DNA, 15 bp, Homo sapiens
ggctgttttaatttt

SEQ ID NO: 1222707 - DNA, 15 bp, Homo sapiens
gggctgttttaattt

SEQ ID NO: 1222708 - DNA, 15 bp, Homo sapiens
ggggctgttttaatt

SEQ ID NO: 1222709 - DNA, 15 bp, Homo sapiens
tggggctgttttaat

SEQ ID NO: 1222710 - DNA, 15 bp, Homo sapiens
ttggggctgttttaa

SEQ ID NO: 1222711 - DNA, 15 bp, Homo sapiens
cttggggctgtttta

SEQ ID NO: 1222712 - DNA, 15 bp, Homo sapiens
ccttggggctgtttt

SEQ ID NO: 1222713 - DNA, 15 bp, Homo sapiens
cccttggggctgttt

SEQ ID NO: 1222714 - DNA, 15 bp, Homo sapiens
gcccttggggctgtt

SEQ ID NO: 1222715 - DNA, 15 bp, Homo sapiens
tgcccttggggctgt

SEQ ID NO: 1222716 - DNA, 15 bp, Homo sapiens
atgcccttggggctg

SEQ ID NO: 1222717 - DNA, 15 bp, Homo sapiens
gatgcccttggggct

SEQ ID NO: 1222718 - DNA, 15 bp, Homo sapiens
agatgcccttggggc

SEQ ID NO: 1222719 - DNA, 15 bp, Homo sapiens
tagatgcccttgggg

SEQ ID NO: 1222720 - DNA, 15 bp, Homo sapiens
ctagatgcccttggg

SEQ ID NO: 1222721 - DNA, 15 bp, Homo sapiens
cctagatgcccttgg

SEQ ID NO: 1222722 - DNA, 15 bp, Homo sapiens
tcctagatgcccttg

SEQ ID NO: 1222723 - DNA, 15 bp, Homo sapiens
ttcctagatgccctt

SEQ ID NO: 1222724 - DNA, 15 bp, Homo sapiens
gttcctagatgccct

SEQ ID NO: 1222725 - DNA, 15 bp, Homo sapiens
tgttcctagatgccc

SEQ ID NO: 1222726 - DNA, 15 bp, Homo sapiens
ctgttcctagatgcc

SEQ ID NO: 1222727 - DNA, 15 bp, Homo sapiens
actgttcctagatgc

SEQ ID NO: 1222728 - DNA, 15 bp, Homo sapiens
aactgttcctagatg

SEQ ID NO: 1222729 - DNA, 15 bp, Homo sapiens
taactgttcctagat

SEQ ID NO: 1222730 - DNA, 15 bp, Homo sapiens
ttaactgttcctaga

SEQ ID NO: 1222731 - DNA, 15 bp, Homo sapiens
gttaactgttcctag

SEQ ID NO: 1222732 - DNA, 15 bp, Homo sapiens
agttaactgttccta

SEQ ID NO: 1222733 - DNA, 15 bp, Homo sapiens
cagttaactgttcct

SEQ ID NO: 1222734 - DNA, 15 bp, Homo sapiens
gcagttaactgttcc

SEQ ID NO: 1222735 - DNA, 15 bp, Homo sapiens
tgcagttaactgttc

SEQ ID NO: 1222736 - DNA, 15 bp, Homo sapiens
gtgcagttaactgtt

SEQ ID NO: 1222737 - DNA, 15 bp, Homo sapiens
tgtgcagttaactgt

SEQ ID NO: 1222738 - DNA, 15 bp, Homo sapiens
atgtgcagttaactg

SEQ ID NO: 1222739 - DNA, 15 bp, Homo sapiens
gatgtgcagttaact

SEQ ID NO: 1222740 - DNA, 15 bp, Homo sapiens
agatgtgcagttaac

SEQ ID NO: 1222741 - DNA, 15 bp, Homo sapiens
tagatgtgcagttaa

SEQ ID NO: 1222742 - DNA, 15 bp, Homo sapiens
ttagatgtgcagtta

SEQ ID NO: 1222743 - DNA, 15 bp, Homo sapiens
tttagatgtgcagtt

SEQ ID NO: 1222744 - DNA, 15 bp, Homo sapiens
gtttagatgtgcagt

SEQ ID NO: 1222745 - DNA, 15 bp, Homo sapiens
ggtttagatgtgcag

SEQ ID NO: 1222746 - DNA, 15 bp, Homo sapiens
gggtttagatgtgca

SEQ ID NO: 1222747 - DNA, 15 bp, Homo sapiens
tgggtttagatgtgc

SEQ ID NO: 1222748 - DNA, 15 bp, Homo sapiens
ctgggtttagatgtg

SEQ ID NO: 1222749 - DNA, 15 bp, Homo sapiens
cctgggtttagatgt

SEQ ID NO: 1222750 - DNA, 15 bp, Homo sapiens
gcctgggtttagatg

SEQ ID NO: 1222751 - DNA, 15 bp, Homo sapiens
ggcctgggtttagat

SEQ ID NO: 1222752 - DNA, 15 bp, Homo sapiens
gggcctgggtttaga

SEQ ID NO: 1222753 - DNA, 15 bp, Homo sapiens
cgggcctgggtttag

SEQ ID NO: 1222754 - DNA, 15 bp, Homo sapiens
gcgggcctgggttta

SEQ ID NO: 1222755 - DNA, 15 bp, Homo sapiens
ggcgggcctgggttt

SEQ ID NO: 1222756 - DNA, 15 bp, Homo sapiens
cggcgggcctgggtt

SEQ ID NO: 1222757 - DNA, 15 bp, Homo sapiens
acggcgggcctgggt

SEQ ID NO: 1222758 - DNA, 15 bp, Homo sapiens
aacggcgggcctggg

SEQ ID NO: 1222759 - DNA, 15 bp, Homo sapiens
gaacggcgggcctgg

SEQ ID NO: 1222760 - DNA, 15 bp, Homo sapiens
agaacggcgggcctg

SEQ ID NO: 1222761 - DNA, 15 bp, Homo sapiens
aagaacggcgggcct

SEQ ID NO: 1222762 - DNA, 15 bp, Homo sapiens
taagaacggcgggcc

SEQ ID NO: 1222763 - DNA, 15 bp, Homo sapiens
ctaagaacggcgggc

SEQ ID NO: 1222764 - DNA, 15 bp, Homo sapiens
tctaagaacggcggg

SEQ ID NO: 1222765 - DNA, 15 bp, Homo sapiens
ttctaagaacggcgg

SEQ ID NO: 1222766 - DNA, 15 bp, Homo sapiens
cttctaagaacggcg

SEQ ID NO: 1222767 - DNA, 15 bp, Homo sapiens
gcttctaagaacggc

SEQ ID NO: 1222768 - DNA, 15 bp, Homo sapiens
agcttctaagaacgg

SEQ ID NO: 1222769 - DNA, 15 bp, Homo sapiens
gagcttctaagaacg

SEQ ID NO: 1222770 - DNA, 15 bp, Homo sapiens
agagcttctaagaac

SEQ ID NO: 1222771 - DNA, 15 bp, Homo sapiens
cagagcttctaagaa

SEQ ID NO: 1222772 - DNA, 15 bp, Homo sapiens
gcagagcttctaaga

SEQ ID NO: 1222773 - DNA, 15 bp, Homo sapiens
tgcagagcttctaag

SEQ ID NO: 1222774 - DNA, 15 bp, Homo sapiens
ttgcagagcttctaa

SEQ ID NO: 1222775 - DNA, 15 bp, Homo sapiens
cttgcagagcttcta

SEQ ID NO: 1222776 - DNA, 15 bp, Homo sapiens
gcttgcagagcttct

SEQ ID NO: 1222777 - DNA, 15 bp, Homo sapiens
agcttgcagagcttc

SEQ ID NO: 1222778 - DNA, 15 bp, Homo sapiens
cagcttgcagagctt

SEQ ID NO: 1222779 - DNA, 15 bp, Homo sapiens
gcagcttgcagagct

SEQ ID NO: 1222780 - DNA, 15 bp, Homo sapiens
tgcagcttgcagagc

SEQ ID NO: 1222781 - DNA, 15 bp, Homo sapiens
atgcagcttgcagag

SEQ ID NO: 1222782 - DNA, 15 bp, Homo sapiens
catgcagcttgcaga

SEQ ID NO: 1222783 - DNA, 15 bp, Homo sapiens
ccatgcagcttgcag

SEQ ID NO: 1222784 - DNA, 15 bp, Homo sapiens
tccatgcagcttgca

SEQ ID NO: 1222785 - DNA, 15 bp, Homo sapiens
gtccatgcagcttgc

SEQ ID NO: 1222786 - DNA, 15 bp, Homo sapiens
agtccatgcagcttg

SEQ ID NO: 1222787 - DNA, 15 bp, Homo sapiens
cagtccatgcagctt

SEQ ID NO: 1222788 - DNA, 15 bp, Homo sapiens
tcagtccatgcagct

SEQ ID NO: 1222789 - DNA, 15 bp, Homo sapiens
gtcagtccatgcagc

SEQ ID NO: 1222790 - DNA, 15 bp, Homo sapiens
agtcagtccatgcag

SEQ ID NO: 1222791 - DNA, 15 bp, Homo sapiens
gagtcagtccatgca

SEQ ID NO: 1222792 - DNA, 15 bp, Homo sapiens
ggagtcagtccatgc

SEQ ID NO: 1222793 - DNA, 15 bp, Homo sapiens
aggagtcagtccatg

SEQ ID NO: 1222794 - DNA, 15 bp, Homo sapiens
caggagtcagtccat

SEQ ID NO: 1222795 - DNA, 15 bp, Homo sapiens
tcaggagtcagtcca

SEQ ID NO: 1222796 - DNA, 15 bp, Homo sapiens
gtcaggagtcagtcc

SEQ ID NO: 1222797 - DNA, 15 bp, Homo sapiens
tgtcaggagtcagtc

SEQ ID NO: 1222798 - DNA, 15 bp, Homo sapiens
atgtcaggagtcagt

SEQ ID NO: 1222799 - DNA, 15 bp, Homo sapiens
aatgtcaggagtcag

SEQ ID NO: 1222800 - DNA, 15 bp, Homo sapiens
aaatgtcaggagtca

SEQ ID NO: 1222801 - DNA, 15 bp, Homo sapiens
gaaatgtcaggagtc

SEQ ID NO: 1222802 - DNA, 15 bp, Homo sapiens
tgaaatgtcaggagt

SEQ ID NO: 1222803 - DNA, 15 bp, Homo sapiens
ctgaaatgtcaggag

SEQ ID NO: 1222804 - DNA, 15 bp, Homo sapiens
cctgaaatgtcagga

SEQ ID NO: 1222805 - DNA, 15 bp, Homo sapiens
ccctgaaatgtcagg

SEQ ID NO: 1222806 - DNA, 15 bp, Homo sapiens
gccctgaaatgtcag

SEQ ID NO: 1222807 - DNA, 15 bp, Homo sapiens
agccctgaaatgtca

SEQ ID NO: 1222808 - DNA, 15 bp, Homo sapiens
tagccctgaaatgtc

SEQ ID NO: 1222809 - DNA, 15 bp, Homo sapiens
ctagccctgaaatgt

SEQ ID NO: 1222810 - DNA, 15 bp, Homo sapiens
tctagccctgaaatg

SEQ ID NO: 1222811 - DNA, 15 bp, Homo sapiens
gtctagccctgaaat

SEQ ID NO: 1222812 - DNA, 15 bp, Homo sapiens
agtctagccctgaaa

SEQ ID NO: 1222813 - DNA, 15 bp, Homo sapiens
gagtctagccctgaa

SEQ ID NO: 1222814 - DNA, 15 bp, Homo sapiens
tgagtctagccctga

SEQ ID NO: 1222815 - DNA, 15 bp, Homo sapiens
ttgagtctagccctg

SEQ ID NO: 1222816 - DNA, 15 bp, Homo sapiens
tttgagtctagccct

SEQ ID NO: 1222817 - DNA, 15 bp, Homo sapiens
ttttgagtctagccc

SEQ ID NO: 1222818 - DNA, 15 bp, Homo sapiens
tttttgagtctagcc

SEQ ID NO: 1222819 - DNA, 15 bp, Homo sapiens
atttttgagtctagc

SEQ ID NO: 1222820 - DNA, 15 bp, Homo sapiens
gatttttgagtctag

SEQ ID NO: 1222821 - DNA, 15 bp, Homo sapiens
ggatttttgagtcta

SEQ ID NO: 1222822 - DNA, 15 bp, Homo sapiens
gggatttttgagtct

SEQ ID NO: 1222823 - DNA, 15 bp, Homo sapiens
agggatttttgagtc

SEQ ID NO: 1222824 - DNA, 15 bp, Homo sapiens
aagggatttttgagt

SEQ ID NO: 1222825 - DNA, 15 bp, Homo sapiens
aaagggatttttgag

SEQ ID NO: 1222826 - DNA, 15 bp, Homo sapiens
taaagggatttttga

SEQ ID NO: 1222827 - DNA, 15 bp, Homo sapiens
ttaaagggatttttg

SEQ ID NO: 1222828 - DNA, 15 bp, Homo sapiens
tttaaagggattttt

SEQ ID NO: 1222829 - DNA, 15 bp, Homo sapiens
ttttaaagggatttt

SEQ ID NO: 1222830 - DNA, 15 bp, Homo sapiens
tttttaaagggattt

SEQ ID NO: 1222831 - DNA, 15 bp, Homo sapiens
ttttttaaagggatt

SEQ ID NO: 1222832 - DNA, 15 bp, Homo sapiens
tttttttaaagggat

SEQ ID NO: 1222833 - DNA, 15 bp, Homo sapiens
atttttttaaaggga

SEQ ID NO: 1222834 - DNA, 15 bp, Homo sapiens
aatttttttaaaggg

SEQ ID NO: 1222835 - DNA, 15 bp, Homo sapiens
aaatttttttaaagg

SEQ ID NO: 1222836 - DNA, 15 bp, Homo sapiens
aaaatttttttaaag

SEQ ID NO: 1222837 - DNA, 15 bp, Homo sapiens
caaaatttttttaaa

SEQ ID NO: 1222838 - DNA, 15 bp, Homo sapiens
acaaaatttttttaa

SEQ ID NO: 1222839 - DNA, 15 bp, Homo sapiens
aacaaaattttttta

SEQ ID NO: 1222840 - DNA, 15 bp, Homo sapiens
aaacaaaattttttt

SEQ ID NO: 1222841 - DNA, 15 bp, Homo sapiens
gaaacaaaatttttt

SEQ ID NO: 1222842 - DNA, 15 bp, Homo sapiens
agaaacaaaattttt

SEQ ID NO: 1222843 - DNA, 15 bp, Homo sapiens
cagaaacaaaatttt

SEQ ID NO: 1222844 - DNA, 15 bp, Homo sapiens
tcagaaacaaaattt

SEQ ID NO: 1222845 - DNA, 15 bp, Homo sapiens
ctcagaaacaaaatt

SEQ ID NO: 1222846 - DNA, 15 bp, Homo sapiens
tctcagaaacaaaat

SEQ ID NO: 1222847 - DNA, 15 bp, Homo sapiens
gtctcagaaacaaaa

SEQ ID NO: 1222848 - DNA, 15 bp, Homo sapiens
cgtctcagaaacaaa

SEQ ID NO: 1222849 - DNA, 15 bp, Homo sapiens
ccgtctcagaaacaa

SEQ ID NO: 1222850 - DNA, 15 bp, Homo sapiens
tccgtctcagaaaca

SEQ ID NO: 1222851 - DNA, 15 bp, Homo sapiens
ctccgtctcagaaac

SEQ ID NO: 1222852 - DNA, 15 bp, Homo sapiens
actccgtctcagaaa

SEQ ID NO: 1222853 - DNA, 15 bp, Homo sapiens
aactccgtctcagaa

SEQ ID NO: 1222854 - DNA, 15 bp, Homo sapiens
aaactccgtctcaga

SEQ ID NO: 1222855 - DNA, 15 bp, Homo sapiens
gaaactccgtctcag

SEQ ID NO: 1222856 - DNA, 15 bp, Homo sapiens
gacaagagtgaaact

SEQ ID NO: 1222857 - DNA, 15 bp, Homo sapiens
ggacaagagtgaaac

SEQ ID NO: 1222858 - DNA, 15 bp, Homo sapiens
tggacaagagtgaaa

SEQ ID NO: 1222859 - DNA, 15 bp, Homo sapiens
ttggacaagagtgaa

SEQ ID NO: 1222860 - DNA, 15 bp, Homo sapiens
cttggacaagagtga

SEQ ID NO: 1222861 - DNA, 15 bp, Homo sapiens
gcttggacaagagtg

SEQ ID NO: 1222862 - DNA, 15 bp, Homo sapiens
agcttggacaagagt

SEQ ID NO: 1222863 - DNA, 15 bp, Homo sapiens
cagcttggacaagag

SEQ ID NO: 1222864 - DNA, 15 bp, Homo sapiens
ccagcttggacaaga

SEQ ID NO: 1222865 - DNA, 15 bp, Homo sapiens
tccagcttggacaag

SEQ ID NO: 1222866 - DNA, 15 bp, Homo sapiens
ctccagcttggacaa

SEQ ID NO: 1222867 - DNA, 15 bp, Homo sapiens
actccagcttggaca

SEQ ID NO: 1222868 - DNA, 15 bp, Homo sapiens
cactccagcttggac

SEQ ID NO: 1222869 - DNA, 15 bp, Homo sapiens
ccactccagcttgga

SEQ ID NO: 1222870 - DNA, 15 bp, Homo sapiens
tccactccagcttgg

SEQ ID NO: 1222871 - DNA, 15 bp, Homo sapiens
ttccactccagcttg

SEQ ID NO: 1222872 - DNA, 15 bp, Homo sapiens
attccactccagctt

SEQ ID NO: 1222873 - DNA, 15 bp, Homo sapiens
cattccactccagct

SEQ ID NO: 1222874 - DNA, 15 bp, Homo sapiens
ccattccactccagc

SEQ ID NO: 1222875 - DNA, 15 bp, Homo sapiens
gccattccactccag

SEQ ID NO: 1222876 - DNA, 15 bp, Homo sapiens
tgccattccactcca

SEQ ID NO: 1222877 - DNA, 15 bp, Homo sapiens
gtgccattccactcc

SEQ ID NO: 1222878 - DNA, 15 bp, Homo sapiens
cgtgccattccactc

SEQ ID NO: 1222879 - DNA, 15 bp, Homo sapiens
tcgtgccattccact

SEQ ID NO: 1222880 - DNA, 15 bp, Homo sapiens
atcgtgccattccac

SEQ ID NO: 1222881 - DNA, 15 bp, Homo sapiens
gatcgtgccattcca

SEQ ID NO: 1222882 - DNA, 15 bp, Homo sapiens
agatcgtgccattcc

SEQ ID NO: 1222883 - DNA, 15 bp, Homo sapiens
gagatcgtgccattc

SEQ ID NO: 1222884 - DNA, 15 bp, Homo sapiens
cgagatcgtgccatt

SEQ ID NO: 1222885 - DNA, 15 bp, Homo sapiens
ccgagatcgtgccat

SEQ ID NO: 1222886 - DNA, 15 bp, Homo sapiens
tacttgaacccagga

SEQ ID NO: 1222887 - DNA, 15 bp, Homo sapiens
ttacttgaacccagg

SEQ ID NO: 1222888 - DNA, 15 bp, Homo sapiens
cttacttgaacccag

SEQ ID NO: 1222889 - DNA, 15 bp, Homo sapiens
acttacttgaaccca

SEQ ID NO: 1222890 - DNA, 15 bp, Homo sapiens
gacttacttgaaccc

SEQ ID NO: 1222891 - DNA, 15 bp, Homo sapiens
agacttacttgaacc

SEQ ID NO: 1222892 - DNA, 15 bp, Homo sapiens
gagacttacttgaac

SEQ ID NO: 1222893 - DNA, 15 bp, Homo sapiens
ggagacttacttgaa

SEQ ID NO: 1222894 - DNA, 15 bp, Homo sapiens
aggagacttacttga

SEQ ID NO: 1222895 - DNA, 15 bp, Homo sapiens
caggagacttacttg

SEQ ID NO: 1222896 - DNA, 15 bp, Homo sapiens
gcaggagacttactt

SEQ ID NO: 1222897 - DNA, 15 bp, Homo sapiens
ggcaggagacttact

SEQ ID NO: 1222898 - DNA, 15 bp, Homo sapiens
tggcaggagacttac

SEQ ID NO: 1222899 - DNA, 15 bp, Homo sapiens
gtggcaggagactta

SEQ ID NO: 1222900 - DNA, 15 bp, Homo sapiens
tgtggcaggagactt

SEQ ID NO: 1222901 - DNA, 15 bp, Homo sapiens
ctgtggcaggagact

SEQ ID NO: 1222902 - DNA, 15 bp, Homo sapiens
gctgtggcaggagac

SEQ ID NO: 1222903 - DNA, 15 bp, Homo sapiens
ggctgtggcaggaga

SEQ ID NO: 1222904 - DNA, 15 bp, Homo sapiens
aggctgtggcaggag

SEQ ID NO: 1222905 - DNA, 15 bp, Homo sapiens
gaggctgtggcagga

SEQ ID NO: 1222906 - DNA, 15 bp, Homo sapiens
ggaggctgtggcagg

SEQ ID NO: 1222907 - DNA, 15 bp, Homo sapiens
tggaggctgtggcag

SEQ ID NO: 1222908 - DNA, 15 bp, Homo sapiens
ctggaggctgtggca

SEQ ID NO: 1222909 - DNA, 15 bp, Homo sapiens
tctggaggctgtggc

SEQ ID NO: 1222910 - DNA, 15 bp, Homo sapiens
ctctggaggctgtgg

SEQ ID NO: 1222911 - DNA, 15 bp, Homo sapiens
actctggaggctgtg

SEQ ID NO: 1222912 - DNA, 15 bp, Homo sapiens
tactctggaggctgt

SEQ ID NO: 1222913 - DNA, 15 bp, Homo sapiens
gcgggcacctgtaat

SEQ ID NO: 1222914 - DNA, 15 bp, Homo sapiens
ggcgggcacctgtaa

SEQ ID NO: 1222915 - DNA, 15 bp, Homo sapiens
atggtggcgggcacc

SEQ ID NO: 1222916 - DNA, 15 bp, Homo sapiens
catggtggcgggcac

SEQ ID NO: 1222917 - DNA, 15 bp, Homo sapiens
gcatggtggcgggca

SEQ ID NO: 1222918 - DNA, 15 bp, Homo sapiens
gttagccaggcatgg

SEQ ID NO: 1222919 - DNA, 15 bp, Homo sapiens
agttagccaggcatg

SEQ ID NO: 1222920 - DNA, 15 bp, Homo sapiens
aagttagccaggcat

SEQ ID NO: 1222921 - DNA, 15 bp, Homo sapiens
caagttagccaggca

SEQ ID NO: 1222922 - DNA, 15 bp, Homo sapiens
acaagttagccaggc

SEQ ID NO: 1222923 - DNA, 15 bp, Homo sapiens
tacaagttagccagg

SEQ ID NO: 1222924 - DNA, 15 bp, Homo sapiens
atacaagttagccag

SEQ ID NO: 1222925 - DNA, 15 bp, Homo sapiens
aatacaagttagcca

SEQ ID NO: 1222926 - DNA, 15 bp, Homo sapiens
aaatacaagttagcc

SEQ ID NO: 1222927 - DNA, 15 bp, Homo sapiens
aaaatacaagttagc

SEQ ID NO: 1222928 - DNA, 15 bp, Homo sapiens
aaaaatacaagttag

SEQ ID NO: 1222929 - DNA, 15 bp, Homo sapiens
taaaaatacaagtta

SEQ ID NO: 1222930 - DNA, 15 bp, Homo sapiens
ctaaaaatacaagtt

SEQ ID NO: 1222931 - DNA, 15 bp, Homo sapiens
aagaccagtctggcc

SEQ ID NO: 1222932 - DNA, 15 bp, Homo sapiens
caagaccagtctggc

SEQ ID NO: 1222933 - DNA, 15 bp, Homo sapiens
tcaagaccagtctgg

SEQ ID NO: 1222934 - DNA, 15 bp, Homo sapiens
ttcaagaccagtctg

SEQ ID NO: 1222935 - DNA, 15 bp, Homo sapiens
gttcaagaccagtct

SEQ ID NO: 1222936 - DNA, 15 bp, Homo sapiens
agttcaagaccagtc

SEQ ID NO: 1222937 - DNA, 15 bp, Homo sapiens
gagttcaagaccagt

SEQ ID NO: 1222938 - DNA, 15 bp, Homo sapiens
catcaggagttcaag

SEQ ID NO: 1222939 - DNA, 15 bp, Homo sapiens
acatcaggagttcaa

SEQ ID NO: 1222940 - DNA, 15 bp, Homo sapiens
gacatcaggagttca

SEQ ID NO: 1222941 - DNA, 15 bp, Homo sapiens
tgacatcaggagttc

SEQ ID NO: 1222942 - DNA, 15 bp, Homo sapiens
ctgacatcaggagtt

SEQ ID NO: 1222943 - DNA, 15 bp, Homo sapiens
cctgacatcaggagt

SEQ ID NO: 1222944 - DNA, 15 bp, Homo sapiens
acctgacatcaggag

SEQ ID NO: 1222945 - DNA, 15 bp, Homo sapiens
cacctgacatcagga

SEQ ID NO: 1222946 - DNA, 15 bp, Homo sapiens
tcacctgacatcagg

SEQ ID NO: 1222947 - DNA, 15 bp, Homo sapiens
gtcacctgacatcag

SEQ ID NO: 1222948 - DNA, 15 bp, Homo sapiens
ggtcacctgacatca

SEQ ID NO: 1222949 - DNA, 15 bp, Homo sapiens
gggtcacctgacatc

SEQ ID NO: 1222950 - DNA, 15 bp, Homo sapiens
tgggtcacctgacat

SEQ ID NO: 1222951 - DNA, 15 bp, Homo sapiens
gtgggtcacctgaca

SEQ ID NO: 1222952 - DNA, 15 bp, Homo sapiens
ggtgggtcacctgac

SEQ ID NO: 1222953 - DNA, 15 bp, Homo sapiens
aggtgggtcacctga

SEQ ID NO: 1222954 - DNA, 15 bp, Homo sapiens
caggtgggtcacctg

SEQ ID NO: 1222955 - DNA, 15 bp, Homo sapiens
gcaggtgggtcacct

SEQ ID NO: 1222956 - DNA, 15 bp, Homo sapiens
ggcaggtgggtcacc

SEQ ID NO: 1222957 - DNA, 15 bp, Homo sapiens
aggcaggtgggtcac

SEQ ID NO: 1222958 - DNA, 15 bp, Homo sapiens
aaggcaggtgggtca

SEQ ID NO: 1222959 - DNA, 15 bp, Homo sapiens
caaggcaggtgggtc

SEQ ID NO: 1222960 - DNA, 15 bp, Homo sapiens
ccaaggcaggtgggt

SEQ ID NO: 1222961 - DNA, 15 bp, Homo sapiens
gccaaggcaggtggg

SEQ ID NO: 1222962 - DNA, 15 bp, Homo sapiens
attgggaggccaagg

SEQ ID NO: 1222963 - DNA, 15 bp, Homo sapiens
cattgggaggccaag

SEQ ID NO: 1222964 - DNA, 15 bp, Homo sapiens
acattgggaggccaa

SEQ ID NO: 1222965 - DNA, 15 bp, Homo sapiens
aacattgggaggcca

SEQ ID NO: 1222966 - DNA, 15 bp, Homo sapiens
caacattgggaggcc

SEQ ID NO: 1222967 - DNA, 15 bp, Homo sapiens
gcaacattgggaggc

SEQ ID NO: 1222968 - DNA, 15 bp, Homo sapiens
agcaacattgggagg

SEQ ID NO: 1222969 - DNA, 15 bp, Homo sapiens
cagcaacattgggag

SEQ ID NO: 1222970 - DNA, 15 bp, Homo sapiens
ccagcaacattggga

SEQ ID NO: 1222971 - DNA, 15 bp, Homo sapiens
accagcaacattggg

SEQ ID NO: 1222972 - DNA, 15 bp, Homo sapiens
taccagcaacattgg

SEQ ID NO: 1222973 - DNA, 15 bp, Homo sapiens
gtaccagcaacattg

SEQ ID NO: 1222974 - DNA, 15 bp, Homo sapiens
agtaccagcaacatt

SEQ ID NO: 1222975 - DNA, 15 bp, Homo sapiens
tagtaccagcaacat

SEQ ID NO: 1222976 - DNA, 15 bp, Homo sapiens
gtagtaccagcaaca

SEQ ID NO: 1222977 - DNA, 15 bp, Homo sapiens
tgtagtaccagcaac

SEQ ID NO: 1222978 - DNA, 15 bp, Homo sapiens
ctgtagtaccagcaa

SEQ ID NO: 1222979 - DNA, 15 bp, Homo sapiens
tctgtagtaccagca

SEQ ID NO: 1222980 - DNA, 15 bp, Homo sapiens
gtctgtagtaccagc

SEQ ID NO: 1222981 - DNA, 15 bp, Homo sapiens
tgtctgtagtaccag

SEQ ID NO: 1222982 - DNA, 15 bp, Homo sapiens
atgtctgtagtacca

SEQ ID NO: 1222983 - DNA, 15 bp, Homo sapiens
catgtctgtagtacc

SEQ ID NO: 1222984 - DNA, 15 bp, Homo sapiens
tcatgtctgtagtac

SEQ ID NO: 1222985 - DNA, 15 bp, Homo sapiens
ctcatgtctgtagta

SEQ ID NO: 1222986 - DNA, 15 bp, Homo sapiens
gctcatgtctgtagt

SEQ ID NO: 1222987 - DNA, 15 bp, Homo sapiens
ggctcatgtctgtag

SEQ ID NO: 1222988 - DNA, 15 bp, Homo sapiens
tggtggctcatgtct

SEQ ID NO: 1222989 - DNA, 15 bp, Homo sapiens
atggtggctcatgtc

SEQ ID NO: 1222990 - DNA, 15 bp, Homo sapiens
catggtggctcatgt

SEQ ID NO: 1222991 - DNA, 15 bp, Homo sapiens
gaccaggcatggtgg

SEQ ID NO: 1222992 - DNA, 15 bp, Homo sapiens
agaccaggcatggtg

SEQ ID NO: 1222993 - DNA, 15 bp, Homo sapiens
gagaccaggcatggt

SEQ ID NO: 1222994 - DNA, 15 bp, Homo sapiens
agagaccaggcatgg

SEQ ID NO: 1222995 - DNA, 15 bp, Homo sapiens
aagagaccaggcatg

SEQ ID NO: 1222996 - DNA, 15 bp, Homo sapiens
gaagagaccaggcat

SEQ ID NO: 1222997 - DNA, 15 bp, Homo sapiens
agaagagaccaggca

SEQ ID NO: 1222998 - DNA, 15 bp, Homo sapiens
aagaagagaccaggc

SEQ ID NO: 1222999 - DNA, 15 bp, Homo sapiens
aaagaagagaccagg

SEQ ID NO: 1223000 - DNA, 15 bp, Homo sapiens
aaaagaagagaccag

SEQ ID NO: 1223001 - DNA, 15 bp, Homo sapiens
aaaaagaagagacca

SEQ ID NO: 1223002 - DNA, 15 bp, Homo sapiens
aaaaaagaagagacc

SEQ ID NO: 1223003 - DNA, 15 bp, Homo sapiens
aaaaaaagaagagac

SEQ ID NO: 1223004 - DNA, 15 bp, Homo sapiens
aaaaaaaagaagaga

SEQ ID NO: 1223005 - DNA, 15 bp, Homo sapiens
aaaaaaaaagaagag

SEQ ID NO: 1223006 - DNA, 15 bp, Homo sapiens
agccactgcactcca

SEQ ID NO: 1223007 - DNA, 15 bp, Homo sapiens
gagccactgcactcc

SEQ ID NO: 1223008 - DNA, 15 bp, Homo sapiens
cgagccactgcactc

SEQ ID NO: 1223009 - DNA, 15 bp, Homo sapiens
tcgagccactgcact

SEQ ID NO: 1223010 - DNA, 15 bp, Homo sapiens
atcgagccactgcac

SEQ ID NO: 1223011 - DNA, 15 bp, Homo sapiens
gatcgagccactgca

SEQ ID NO: 1223012 - DNA, 15 bp, Homo sapiens
agatcgagccactgc

SEQ ID NO: 1223013 - DNA, 15 bp, Homo sapiens
gagatcgagccactg

SEQ ID NO: 1223014 - DNA, 15 bp, Homo sapiens
cgagatcgagccact

SEQ ID NO: 1223015 - DNA, 15 bp, Homo sapiens
ccgagatcgagccac

SEQ ID NO: 1223016 - DNA, 15 bp, Homo sapiens
gccgagatcgagcca

SEQ ID NO: 1223017 - DNA, 15 bp, Homo sapiens
agccgagatcgagcc

SEQ ID NO: 1223018 - DNA, 15 bp, Homo sapiens
gagccgagatcgagc

SEQ ID NO: 1223019 - DNA, 15 bp, Homo sapiens
tgagccgagatcgag

SEQ ID NO: 1223020 - DNA, 15 bp, Homo sapiens
gtgagccgagatcga

SEQ ID NO: 1223021 - DNA, 15 bp, Homo sapiens
cgcagtgagccgaga

SEQ ID NO: 1223022 - DNA, 15 bp, Homo sapiens
tcgcagtgagccgag

SEQ ID NO: 1223023 - DNA, 15 bp, Homo sapiens
ttcgcagtgagccga

SEQ ID NO: 1223024 - DNA, 15 bp, Homo sapiens
gttcgcagtgagccg

SEQ ID NO: 1223025 - DNA, 15 bp, Homo sapiens
agttcgcagtgagcc

SEQ ID NO: 1223026 - DNA, 15 bp, Homo sapiens
gagttcgcagtgagc

SEQ ID NO: 1223027 - DNA, 15 bp, Homo sapiens
agagttcgcagtgag

SEQ ID NO: 1223028 - DNA, 15 bp, Homo sapiens
cagagttcgcagtga

SEQ ID NO: 1223029 - DNA, 15 bp, Homo sapiens
gcagagttcgcagtg

SEQ ID NO: 1223030 - DNA, 15 bp, Homo sapiens
ggcagagttcgcagt

SEQ ID NO: 1223031 - DNA, 15 bp, Homo sapiens
cggcagagttcgcag

SEQ ID NO: 1223032 - DNA, 15 bp, Homo sapiens
gcggcagagttcgca

SEQ ID NO: 1223033 - DNA, 15 bp, Homo sapiens
ggcggcagagttcgc

SEQ ID NO: 1223034 - DNA, 15 bp, Homo sapiens
aggcggcagagttcg

SEQ ID NO: 1223035 - DNA, 15 bp, Homo sapiens
caggcggcagagttc

SEQ ID NO: 1223036 - DNA, 15 bp, Homo sapiens
gcaggcggcagagtt

SEQ ID NO: 1223037 - DNA, 15 bp, Homo sapiens
cgcaggcggcagagt

SEQ ID NO: 1223038 - DNA, 15 bp, Homo sapiens
acgcaggcggcagag

SEQ ID NO: 1223039 - DNA, 15 bp, Homo sapiens
aacgcaggcggcaga

SEQ ID NO: 1223040 - DNA, 15 bp, Homo sapiens
gaacgcaggcggcag

SEQ ID NO: 1223041 - DNA, 15 bp, Homo sapiens
tgaacgcaggcggca

SEQ ID NO: 1223042 - DNA, 15 bp, Homo sapiens
gtgaacgcaggcggc

SEQ ID NO: 1223043 - DNA, 15 bp, Homo sapiens
cgtgaacgcaggcgg

SEQ ID NO: 1223044 - DNA, 15 bp, Homo sapiens
gcgtgaacgcaggcg

SEQ ID NO: 1223045 - DNA, 15 bp, Homo sapiens
ggcgtgaacgcaggc

SEQ ID NO: 1223046 - DNA, 15 bp, Homo sapiens
tggcgtgaacgcagg

SEQ ID NO: 1223047 - DNA, 15 bp, Homo sapiens
atggcgtgaacgcag

SEQ ID NO: 1223048 - DNA, 15 bp, Homo sapiens
aatggcgtgaacgca

SEQ ID NO: 1223049 - DNA, 15 bp, Homo sapiens
gaatggcgtgaacgc

SEQ ID NO: 1223050 - DNA, 15 bp, Homo sapiens
agaatggcgtgaacg

SEQ ID NO: 1223051 - DNA, 15 bp, Homo sapiens
tgagtgaggcaggag

SEQ ID NO: 1223052 - DNA, 15 bp, Homo sapiens
ctgagtgaggcagga

SEQ ID NO: 1223053 - DNA, 15 bp, Homo sapiens
gctgagtgaggcagg

SEQ ID NO: 1223054 - DNA, 15 bp, Homo sapiens
ggctgagtgaggcag

SEQ ID NO: 1223055 - DNA, 15 bp, Homo sapiens
aggctgagtgaggca

SEQ ID NO: 1223056 - DNA, 15 bp, Homo sapiens
gaggctgagtgaggc

SEQ ID NO: 1223057 - DNA, 15 bp, Homo sapiens
ggaggctgagtgagg

SEQ ID NO: 1223058 - DNA, 15 bp, Homo sapiens
aggaggctgagtgag

SEQ ID NO: 1223059 - DNA, 15 bp, Homo sapiens
caggaggctgagtga

SEQ ID NO: 1223060 - DNA, 15 bp, Homo sapiens
tcaggaggctgagtg

SEQ ID NO: 1223061 - DNA, 15 bp, Homo sapiens
ctcaggaggctgagt

SEQ ID NO: 1223062 - DNA, 15 bp, Homo sapiens
atggtgggcacctgt

SEQ ID NO: 1223063 - DNA, 15 bp, Homo sapiens
gatggtgggcacctg

SEQ ID NO: 1223064 - DNA, 15 bp, Homo sapiens
tgatggtgggcacct

SEQ ID NO: 1223065 - DNA, 15 bp, Homo sapiens
atgatggtgggcacc

SEQ ID NO: 1223066 - DNA, 15 bp, Homo sapiens
catgatggtgggcac

SEQ ID NO: 1223067 - DNA, 15 bp, Homo sapiens
gcatgatggtgggca

SEQ ID NO: 1223068 - DNA, 15 bp, Homo sapiens
ggcatgatggtgggc

SEQ ID NO: 1223069 - DNA, 15 bp, Homo sapiens
gggcatgatggtggg

SEQ ID NO: 1223070 - DNA, 15 bp, Homo sapiens
cgggcatgatggtgg

SEQ ID NO: 1223071 - DNA, 15 bp, Homo sapiens
ccgggcatgatggtg

SEQ ID NO: 1223072 - DNA, 15 bp, Homo sapiens
gccgggcatgatggt

SEQ ID NO: 1223073 - DNA, 15 bp, Homo sapiens
agccgggcatgatgg

SEQ ID NO: 1223074 - DNA, 15 bp, Homo sapiens
tagccgggcatgatg

SEQ ID NO: 1223075 - DNA, 15 bp, Homo sapiens
ttagccgggcatgat

SEQ ID NO: 1223076 - DNA, 15 bp, Homo sapiens
gttagccgggcatga

SEQ ID NO: 1223077 - DNA, 15 bp, Homo sapiens
agttagccgggcatg

SEQ ID NO: 1223078 - DNA, 15 bp, Homo sapiens
aagttagccgggcat

SEQ ID NO: 1223079 - DNA, 15 bp, Homo sapiens
aaagttagccgggca

SEQ ID NO: 1223080 - DNA, 15 bp, Homo sapiens
aaaagttagccgggc

SEQ ID NO: 1223081 - DNA, 15 bp, Homo sapiens
aaaaagttagccggg

SEQ ID NO: 1223082 - DNA, 15 bp, Homo sapiens
caaaaagttagccgg

SEQ ID NO: 1223083 - DNA, 15 bp, Homo sapiens
acaaaaagttagccg

SEQ ID NO: 1223084 - DNA, 15 bp, Homo sapiens
tacaaaaagttagcc

SEQ ID NO: 1223085 - DNA, 15 bp, Homo sapiens
atacaaaaagttagc

SEQ ID NO: 1223086 - DNA, 15 bp, Homo sapiens
aatacaaaaagttag

SEQ ID NO: 1223087 - DNA, 15 bp, Homo sapiens
aaatacaaaaagtta

SEQ ID NO: 1223088 - DNA, 15 bp, Homo sapiens
aaaatacaaaaagtt

SEQ ID NO: 1223089 - DNA, 15 bp, Homo sapiens
aggctaacacggtga

SEQ ID NO: 1223090 - DNA, 15 bp, Homo sapiens
caggctaacacggtg

SEQ ID NO: 1223091 - DNA, 15 bp, Homo sapiens
ccaggctaacacggt

SEQ ID NO: 1223092 - DNA, 15 bp, Homo sapiens
accaggctaacacgg

SEQ ID NO: 1223093 - DNA, 15 bp, Homo sapiens
gaccaggctaacacg

SEQ ID NO: 1223094 - DNA, 15 bp, Homo sapiens
agaccaggctaacac

SEQ ID NO: 1223095 - DNA, 15 bp, Homo sapiens
gagaccaggctaaca

SEQ ID NO: 1223096 - DNA, 15 bp, Homo sapiens
cgagaccaggctaac

SEQ ID NO: 1223097 - DNA, 15 bp, Homo sapiens
tcgagaccaggctaa

SEQ ID NO: 1223098 - DNA, 15 bp, Homo sapiens
atcgagaccaggcta

SEQ ID NO: 1223099 - DNA, 15 bp, Homo sapiens
gatcgagaccaggct

SEQ ID NO: 1223100 - DNA, 15 bp, Homo sapiens
agatcgagaccaggc

SEQ ID NO: 1223101 - DNA, 15 bp, Homo sapiens
gagatcgagaccagg

SEQ ID NO: 1223102 - DNA, 15 bp, Homo sapiens
ggagatcgagaccag

SEQ ID NO: 1223103 - DNA, 15 bp, Homo sapiens
tggagatcgagacca

SEQ ID NO: 1223104 - DNA, 15 bp, Homo sapiens
ctggagatcgagacc

SEQ ID NO: 1223105 - DNA, 15 bp, Homo sapiens
tctggagatcgagac

SEQ ID NO: 1223106 - DNA, 15 bp, Homo sapiens
gtctggagatcgaga

SEQ ID NO: 1223107 - DNA, 15 bp, Homo sapiens
ggtctggagatcgag

SEQ ID NO: 1223108 - DNA, 15 bp, Homo sapiens
aggtctggagatcga

SEQ ID NO: 1223109 - DNA, 15 bp, Homo sapiens
aaggtctggagatcg

SEQ ID NO: 1223110 - DNA, 15 bp, Homo sapiens
caaggtctggagatc

SEQ ID NO: 1223111 - DNA, 15 bp, Homo sapiens
acaaggtctggagat

SEQ ID NO: 1223112 - DNA, 15 bp, Homo sapiens
cacaaggtctggaga

SEQ ID NO: 1223113 - DNA, 15 bp, Homo sapiens
tcacaaggtctggag

SEQ ID NO: 1223114 - DNA, 15 bp, Homo sapiens
atcacaaggtctgga

SEQ ID NO: 1223115 - DNA, 15 bp, Homo sapiens
gatcacaaggtctgg

SEQ ID NO: 1223116 - DNA, 15 bp, Homo sapiens
ggatcacaaggtctg

SEQ ID NO: 1223117 - DNA, 15 bp, Homo sapiens
cggatcacaaggtct

SEQ ID NO: 1223118 - DNA, 15 bp, Homo sapiens
agggaggccgaggtg

SEQ ID NO: 1223119 - DNA, 15 bp, Homo sapiens
tagggaggccgaggt

SEQ ID NO: 1223120 - DNA, 15 bp, Homo sapiens
acacttagggaggcc

SEQ ID NO: 1223121 - DNA, 15 bp, Homo sapiens
aacacttagggaggc

SEQ ID NO: 1223122 - DNA, 15 bp, Homo sapiens
caacacttagggagg

SEQ ID NO: 1223123 - DNA, 15 bp, Homo sapiens
ccaacacttagggag

SEQ ID NO: 1223124 - DNA, 15 bp, Homo sapiens
cccaacacttaggga

SEQ ID NO: 1223125 - DNA, 15 bp, Homo sapiens
tcccaacacttaggg

SEQ ID NO: 1223126 - DNA, 15 bp, Homo sapiens
atcccaacacttagg

SEQ ID NO: 1223127 - DNA, 15 bp, Homo sapiens
aatcccaacacttag

SEQ ID NO: 1223128 - DNA, 15 bp, Homo sapiens
taatcccaacactta

SEQ ID NO: 1223129 - DNA, 15 bp, Homo sapiens
ggggccgggcgcggt

SEQ ID NO: 1223130 - DNA, 15 bp, Homo sapiens
gggggccgggcgcgg

SEQ ID NO: 1223131 - DNA, 15 bp, Homo sapiens
agggggccgggcgcg

SEQ ID NO: 1223132 - DNA, 15 bp, Homo sapiens
aagggggccgggcgc

SEQ ID NO: 1223133 - DNA, 15 bp, Homo sapiens
aaaaaagggggccgg

SEQ ID NO: 1223134 - DNA, 15 bp, Homo sapiens
aaaaaaagggggccg

SEQ ID NO: 1223135 - DNA, 15 bp, Homo sapiens
aaaaaaaagggggcc

SEQ ID NO: 1223136 - DNA, 15 bp, Homo sapiens
caaaaaaaaaggggg

SEQ ID NO: 1223137 - DNA, 15 bp, Homo sapiens
acaaaaaaaaagggg

SEQ ID NO: 1223138 - DNA, 15 bp, Homo sapiens
aacaaaaaaaaaggg

SEQ ID NO: 1223139 - DNA, 15 bp, Homo sapiens
caacaaaaaaaaagg

SEQ ID NO: 1223140 - DNA, 15 bp, Homo sapiens
acaacaaaaaaaaag

SEQ ID NO: 1223141 - DNA, 15 bp, Homo sapiens
aacaacaaaaaaaaa

SEQ ID NO: 1223142 - DNA, 15 bp, Homo sapiens
caacaacaaaaaaaa

SEQ ID NO: 1223143 - DNA, 15 bp, Homo sapiens
tcaacaacaaaaaaa

SEQ ID NO: 1223144 - DNA, 15 bp, Homo sapiens
gtcaacaacaaaaaa

SEQ ID NO: 1223145 - DNA, 15 bp, Homo sapiens
tgtcaacaacaaaaa

SEQ ID NO: 1223146 - DNA, 15 bp, Homo sapiens
gtgtcaacaacaaaa

SEQ ID NO: 1223147 - DNA, 15 bp, Homo sapiens
tgtgtcaacaacaaa

SEQ ID NO: 1223148 - DNA, 15 bp, Homo sapiens
ctgtgtcaacaacaa

SEQ ID NO: 1223149 - DNA, 15 bp, Homo sapiens
cctgtgtcaacaaca

SEQ ID NO: 1223150 - DNA, 15 bp, Homo sapiens
ccctgtgtcaacaac

SEQ ID NO: 1223151 - DNA, 15 bp, Homo sapiens
accctgtgtcaacaa

SEQ ID NO: 1223152 - DNA, 15 bp, Homo sapiens
gaccctgtgtcaaca

SEQ ID NO: 1223153 - DNA, 15 bp, Homo sapiens
agaccctgtgtcaac

SEQ ID NO: 1223154 - DNA, 15 bp, Homo sapiens
tgagaccctgtgtca

SEQ ID NO: 1223155 - DNA, 15 bp, Homo sapiens
gtgagaccctgtgtc

SEQ ID NO: 1223156 - DNA, 15 bp, Homo sapiens
agtgagaccctgtgt

SEQ ID NO: 1223157 - DNA, 15 bp, Homo sapiens
aagtgagaccctgtg

SEQ ID NO: 1223158 - DNA, 15 bp, Homo sapiens
cgaagtgagaccctg

SEQ ID NO: 1223159 - DNA, 15 bp, Homo sapiens
acgaagtgagaccct

SEQ ID NO: 1223160 - DNA, 15 bp, Homo sapiens
gacgaagtgagaccc

SEQ ID NO: 1223161 - DNA, 15 bp, Homo sapiens
ggacgaagtgagacc

SEQ ID NO: 1223162 - DNA, 15 bp, Homo sapiens
gggacgaagtgagac

SEQ ID NO: 1223163 - DNA, 15 bp, Homo sapiens
ggggacgaagtgaga

SEQ ID NO: 1223164 - DNA, 15 bp, Homo sapiens
aggggacgaagtgag

SEQ ID NO: 1223165 - DNA, 15 bp, Homo sapiens
taggggacgaagtga

SEQ ID NO: 1223166 - DNA, 15 bp, Homo sapiens
ctaggggacgaagtg

SEQ ID NO: 1223167 - DNA, 15 bp, Homo sapiens
cctaggggacgaagt

SEQ ID NO: 1223168 - DNA, 15 bp, Homo sapiens
gcctaggggacgaag

SEQ ID NO: 1223169 - DNA, 15 bp, Homo sapiens
agcctaggggacgaa

SEQ ID NO: 1223170 - DNA, 15 bp, Homo sapiens
cagcctaggggacga

SEQ ID NO: 1223171 - DNA, 15 bp, Homo sapiens
ccagcctaggggacg

SEQ ID NO: 1223172 - DNA, 15 bp, Homo sapiens
tccagcctaggggac

SEQ ID NO: 1223173 - DNA, 15 bp, Homo sapiens
ctccagcctagggga

SEQ ID NO: 1223174 - DNA, 15 bp, Homo sapiens
actccagcctagggg

SEQ ID NO: 1223175 - DNA, 15 bp, Homo sapiens
cactccagcctaggg

SEQ ID NO: 1223176 - DNA, 15 bp, Homo sapiens
tcactccagcctagg

SEQ ID NO: 1223177 - DNA, 15 bp, Homo sapiens
atcactccagcctag

SEQ ID NO: 1223178 - DNA, 15 bp, Homo sapiens
catcactccagccta

SEQ ID NO: 1223179 - DNA, 15 bp, Homo sapiens
acatcactccagcct

SEQ ID NO: 1223180 - DNA, 15 bp, Homo sapiens
cacatcactccagcc

SEQ ID NO: 1223181 - DNA, 15 bp, Homo sapiens
ccacatcactccagc

SEQ ID NO: 1223182 - DNA, 15 bp, Homo sapiens
gccacatcactccag

SEQ ID NO: 1223183 - DNA, 15 bp, Homo sapiens
cgccacatcactcca

SEQ ID NO: 1223184 - DNA, 15 bp, Homo sapiens
gcgccacatcactcc

SEQ ID NO: 1223185 - DNA, 15 bp, Homo sapiens
tgcgccacatcactc

SEQ ID NO: 1223186 - DNA, 15 bp, Homo sapiens
ctgcgccacatcact

SEQ ID NO: 1223187 - DNA, 15 bp, Homo sapiens
actgcgccacatcac

SEQ ID NO: 1223188 - DNA, 15 bp, Homo sapiens
gactgcgccacatca

SEQ ID NO: 1223189 - DNA, 15 bp, Homo sapiens
cgactgcgccacatc

SEQ ID NO: 1223190 - DNA, 15 bp, Homo sapiens
acgactgcgccacat

SEQ ID NO: 1223191 - DNA, 15 bp, Homo sapiens
tacgactgcgccaca

SEQ ID NO: 1223192 - DNA, 15 bp, Homo sapiens
ctacgactgcgccac

SEQ ID NO: 1223193 - DNA, 15 bp, Homo sapiens
gctacgactgcgcca

SEQ ID NO: 1223194 - DNA, 15 bp, Homo sapiens
agctacgactgcgcc

SEQ ID NO: 1223195 - DNA, 15 bp, Homo sapiens
gagctacgactgcgc

SEQ ID NO: 1223196 - DNA, 15 bp, Homo sapiens
tgagctacgactgcg

SEQ ID NO: 1223197 - DNA, 15 bp, Homo sapiens
gtgagctacgactgc

SEQ ID NO: 1223198 - DNA, 15 bp, Homo sapiens
ggtgagctacgactg

SEQ ID NO: 1223199 - DNA, 15 bp, Homo sapiens
tggtgagctacgact

SEQ ID NO: 1223200 - DNA, 15 bp, Homo sapiens
gtggtgagctacgac

SEQ ID NO: 1223201 - DNA, 15 bp, Homo sapiens
cgtggtgagctacga

SEQ ID NO: 1223202 - DNA, 15 bp, Homo sapiens
ccgtggtgagctacg

SEQ ID NO: 1223203 - DNA, 15 bp, Homo sapiens
gccgtggtgagctac

SEQ ID NO: 1223204 - DNA, 15 bp, Homo sapiens
tgccgtggtgagcta

SEQ ID NO: 1223205 - DNA, 15 bp, Homo sapiens
ttgccgtggtgagct

SEQ ID NO: 1223206 - DNA, 15 bp, Homo sapiens
gttgccgtggtgagc

SEQ ID NO: 1223207 - DNA, 15 bp, Homo sapiens
agttgccgtggtgag

SEQ ID NO: 1223208 - DNA, 15 bp, Homo sapiens
aagttgccgtggtga

SEQ ID NO: 1223209 - DNA, 15 bp, Homo sapiens
gaagttgccgtggtg

SEQ ID NO: 1223210 - DNA, 15 bp, Homo sapiens
ggaagttgccgtggt

SEQ ID NO: 1223211 - DNA, 15 bp, Homo sapiens
aggaagttgccgtgg

SEQ ID NO: 1223212 - DNA, 15 bp, Homo sapiens
caggaagttgccgtg

SEQ ID NO: 1223213 - DNA, 15 bp, Homo sapiens
ccaggaagttgccgt

SEQ ID NO: 1223214 - DNA, 15 bp, Homo sapiens
cccaggaagttgccg

SEQ ID NO: 1223215 - DNA, 15 bp, Homo sapiens
gcccaggaagttgcc

SEQ ID NO: 1223216 - DNA, 15 bp, Homo sapiens
agcccaggaagttgc

SEQ ID NO: 1223217 - DNA, 15 bp, Homo sapiens
agtgggaggatcgct

SEQ ID NO: 1223218 - DNA, 15 bp, Homo sapiens
aagtgggaggatcgc

SEQ ID NO: 1223219 - DNA, 15 bp, Homo sapiens
gaagtgggaggatcg

SEQ ID NO: 1223220 - DNA, 15 bp, Homo sapiens
cctgaagtgggagga

SEQ ID NO: 1223221 - DNA, 15 bp, Homo sapiens
gcctgaagtgggagg

SEQ ID NO: 1223222 - DNA, 15 bp, Homo sapiens
ggcctgaagtgggag

SEQ ID NO: 1223223 - DNA, 15 bp, Homo sapiens
gggcctgaagtggga

SEQ ID NO: 1223224 - DNA, 15 bp, Homo sapiens
ggggcctgaagtggg

SEQ ID NO: 1223225 - DNA, 15 bp, Homo sapiens
cggggcctgaagtgg

SEQ ID NO: 1223226 - DNA, 15 bp, Homo sapiens
tcggggcctgaagtg

SEQ ID NO: 1223227 - DNA, 15 bp, Homo sapiens
ttcggggcctgaagt

SEQ ID NO: 1223228 - DNA, 15 bp, Homo sapiens
cttcggggcctgaag

SEQ ID NO: 1223229 - DNA, 15 bp, Homo sapiens
acttcggggcctgaa

SEQ ID NO: 1223230 - DNA, 15 bp, Homo sapiens
tacttcggggcctga

SEQ ID NO: 1223231 - DNA, 15 bp, Homo sapiens
ctacttcggggcctg

SEQ ID NO: 1223232 - DNA, 15 bp, Homo sapiens
gctacttcggggcct

SEQ ID NO: 1223233 - DNA, 15 bp, Homo sapiens
cgctacttcggggcc

SEQ ID NO: 1223234 - DNA, 15 bp, Homo sapiens
ccgctacttcggggc

SEQ ID NO: 1223235 - DNA, 15 bp, Homo sapiens
cccgctacttcgggg

SEQ ID NO: 1223236 - DNA, 15 bp, Homo sapiens
ccccgctacttcggg

SEQ ID NO: 1223237 - DNA, 15 bp, Homo sapiens
cccccgctacttcgg

SEQ ID NO: 1223238 - DNA, 15 bp, Homo sapiens
tcccccgctacttcg

SEQ ID NO: 1223239 - DNA, 15 bp, Homo sapiens
atcccccgctacttc

SEQ ID NO: 1223240 - DNA, 15 bp, Homo sapiens
tatcccccgctactt

SEQ ID NO: 1223241 - DNA, 15 bp, Homo sapiens
gtatcccccgctact

SEQ ID NO: 1223242 - DNA, 15 bp, Homo sapiens
tgtatcccccgctac

SEQ ID NO: 1223243 - DNA, 15 bp, Homo sapiens
ctgtatcccccgcta

SEQ ID NO: 1223244 - DNA, 15 bp, Homo sapiens
cctgtatcccccgct

SEQ ID NO: 1223245 - DNA, 15 bp, Homo sapiens
gcctgtatcccccgc

SEQ ID NO: 1223246 - DNA, 15 bp, Homo sapiens
tgcctgtatcccccg

SEQ ID NO: 1223247 - DNA, 15 bp, Homo sapiens
ctgcctgtatccccc

SEQ ID NO: 1223248 - DNA, 15 bp, Homo sapiens
cctgcctgtatcccc

SEQ ID NO: 1223249 - DNA, 15 bp, Homo sapiens
gcctgcctgtatccc

SEQ ID NO: 1223250 - DNA, 15 bp, Homo sapiens
tgcctgcctgtatcc

SEQ ID NO: 1223251 - DNA, 15 bp, Homo sapiens
gtgcctgcctgtatc

SEQ ID NO: 1223252 - DNA, 15 bp, Homo sapiens
ggtgcctgcctgtat

SEQ ID NO: 1223253 - DNA, 15 bp, Homo sapiens
atggtggtgcctgcc

SEQ ID NO: 1223254 - DNA, 15 bp, Homo sapiens
catggtggtgcctgc

SEQ ID NO: 1223255 - DNA, 15 bp, Homo sapiens
gcatggtggtgcctg

SEQ ID NO: 1223256 - DNA, 15 bp, Homo sapiens
ggcatggtggtgcct

SEQ ID NO: 1223257 - DNA, 15 bp, Homo sapiens
gggcatggtggtgcc

SEQ ID NO: 1223258 - DNA, 15 bp, Homo sapiens
cgggcatggtggtgc

SEQ ID NO: 1223259 - DNA, 15 bp, Homo sapiens
taaattagccgggca

SEQ ID NO: 1223260 - DNA, 15 bp, Homo sapiens
ataaattagccgggc

SEQ ID NO: 1223261 - DNA, 15 bp, Homo sapiens
aataaattagccggg

SEQ ID NO: 1223262 - DNA, 15 bp, Homo sapiens
aaataaattagccgg

SEQ ID NO: 1223263 - DNA, 15 bp, Homo sapiens
aaaataaattagccg

SEQ ID NO: 1223264 - DNA, 15 bp, Homo sapiens
aaaaataaattagcc

SEQ ID NO: 1223265 - DNA, 15 bp, Homo sapiens
aaaaaataaattagc

SEQ ID NO: 1223266 - DNA, 15 bp, Homo sapiens
aaaaaaataaattag

SEQ ID NO: 1223267 - DNA, 15 bp, Homo sapiens
gaaaaaaataaatta

SEQ ID NO: 1223268 - DNA, 15 bp, Homo sapiens
agaaaaaaataaatt

SEQ ID NO: 1223269 - DNA, 15 bp, Homo sapiens
aagaaaaaaataaat

SEQ ID NO: 1223270 - DNA, 15 bp, Homo sapiens
taagaaaaaaataaa

SEQ ID NO: 1223271 - DNA, 15 bp, Homo sapiens
ctaagaaaaaaataa

SEQ ID NO: 1223272 - DNA, 15 bp, Homo sapiens
actaagaaaaaaata

SEQ ID NO: 1223273 - DNA, 15 bp, Homo sapiens
tactaagaaaaaaat

SEQ ID NO: 1223274 - DNA, 15 bp, Homo sapiens
ctactaagaaaaaaa

SEQ ID NO: 1223275 - DNA, 15 bp, Homo sapiens
tctactaagaaaaaa

SEQ ID NO: 1223276 - DNA, 15 bp, Homo sapiens
ctctactaagaaaaa

SEQ ID NO: 1223277 - DNA, 15 bp, Homo sapiens
cctctactaagaaaa

SEQ ID NO: 1223278 - DNA, 15 bp, Homo sapiens
acctctactaagaaa

SEQ ID NO: 1223279 - DNA, 15 bp, Homo sapiens
cacctctactaagaa

SEQ ID NO: 1223280 - DNA, 15 bp, Homo sapiens
ccacctctactaaga

SEQ ID NO: 1223281 - DNA, 15 bp, Homo sapiens
cccacctctactaag

SEQ ID NO: 1223282 - DNA, 15 bp, Homo sapiens
cgaaaccccacctct

SEQ ID NO: 1223283 - DNA, 15 bp, Homo sapiens
gcgaaaccccacctc

SEQ ID NO: 1223284 - DNA, 15 bp, Homo sapiens
tgcgaaaccccacct

SEQ ID NO: 1223285 - DNA, 15 bp, Homo sapiens
ttgcgaaaccccacc

SEQ ID NO: 1223286 - DNA, 15 bp, Homo sapiens
attgcgaaaccccac

SEQ ID NO: 1223287 - DNA, 15 bp, Homo sapiens
cattgcgaaacccca

SEQ ID NO: 1223288 - DNA, 15 bp, Homo sapiens
acattgcgaaacccc

SEQ ID NO: 1223289 - DNA, 15 bp, Homo sapiens
aacattgcgaaaccc

SEQ ID NO: 1223290 - DNA, 15 bp, Homo sapiens
caacattgcgaaacc

SEQ ID NO: 1223291 - DNA, 15 bp, Homo sapiens
gcaacattgcgaaac

SEQ ID NO: 1223292 - DNA, 15 bp, Homo sapiens
ggcaacattgcgaaa

SEQ ID NO: 1223293 - DNA, 15 bp, Homo sapiens
gggcaacattgcgaa

SEQ ID NO: 1223294 - DNA, 15 bp, Homo sapiens
tgggcaacattgcga

SEQ ID NO: 1223295 - DNA, 15 bp, Homo sapiens
ctgggcaacattgcg

SEQ ID NO: 1223296 - DNA, 15 bp, Homo sapiens
cctgggcaacattgc

SEQ ID NO: 1223297 - DNA, 15 bp, Homo sapiens
gcctgggcaacattg

SEQ ID NO: 1223298 - DNA, 15 bp, Homo sapiens
agcctgggcaacatt

SEQ ID NO: 1223299 - DNA, 15 bp, Homo sapiens
taggaatttgagacc

SEQ ID NO: 1223300 - DNA, 15 bp, Homo sapiens
ctaggaatttgagac

SEQ ID NO: 1223301 - DNA, 15 bp, Homo sapiens
tctaggaatttgaga

SEQ ID NO: 1223302 - DNA, 15 bp, Homo sapiens
gtctaggaatttgag

SEQ ID NO: 1223303 - DNA, 15 bp, Homo sapiens
agtctaggaatttga

SEQ ID NO: 1223304 - DNA, 15 bp, Homo sapiens
gagtctaggaatttg

SEQ ID NO: 1223305 - DNA, 15 bp, Homo sapiens
tgagtctaggaattt

SEQ ID NO: 1223306 - DNA, 15 bp, Homo sapiens
ttgagtctaggaatt

SEQ ID NO: 1223307 - DNA, 15 bp, Homo sapiens
cttgagtctaggaat

SEQ ID NO: 1223308 - DNA, 15 bp, Homo sapiens
acttgagtctaggaa

SEQ ID NO: 1223309 - DNA, 15 bp, Homo sapiens
aatcacttgagtcta

SEQ ID NO: 1223310 - DNA, 15 bp, Homo sapiens
aaatcacttgagtct

SEQ ID NO: 1223311 - DNA, 15 bp, Homo sapiens
caaatcacttgagtc

SEQ ID NO: 1223312 - DNA, 15 bp, Homo sapiens
gcaaatcacttgagt

SEQ ID NO: 1223313 - DNA, 15 bp, Homo sapiens
ggcaaatcacttgag

SEQ ID NO: 1223314 - DNA, 15 bp, Homo sapiens
gggcaaatcacttga

SEQ ID NO: 1223315 - DNA, 15 bp, Homo sapiens
cgggcaaatcacttg

SEQ ID NO: 1223316 - DNA, 15 bp, Homo sapiens
gcgggcaaatcactt

SEQ ID NO: 1223317 - DNA, 15 bp, Homo sapiens
ggcgggcaaatcact

SEQ ID NO: 1223318 - DNA, 15 bp, Homo sapiens
aggcgggcaaatcac

SEQ ID NO: 1223319 - DNA, 15 bp, Homo sapiens
taggcgggcaaatca

SEQ ID NO: 1223320 - DNA, 15 bp, Homo sapiens
ctaggcgggcaaatc

SEQ ID NO: 1223321 - DNA, 15 bp, Homo sapiens
cctaggcgggcaaat

SEQ ID NO: 1223322 - DNA, 15 bp, Homo sapiens
gcctaggcgggcaaa

SEQ ID NO: 1223323 - DNA, 15 bp, Homo sapiens
ggcctaggcgggcaa

SEQ ID NO: 1223324 - DNA, 15 bp, Homo sapiens
aggcctaggcgggca

SEQ ID NO: 1223325 - DNA, 15 bp, Homo sapiens
gaggcctaggcgggc

SEQ ID NO: 1223326 - DNA, 15 bp, Homo sapiens
ggaggcctaggcggg

SEQ ID NO: 1223327 - DNA, 15 bp, Homo sapiens
gggaggcctaggcgg

SEQ ID NO: 1223328 - DNA, 15 bp, Homo sapiens
tgggaggcctaggcg

SEQ ID NO: 1223329 - DNA, 15 bp, Homo sapiens
ttgggaggcctaggc

SEQ ID NO: 1223330 - DNA, 15 bp, Homo sapiens
tttgggaggcctagg

SEQ ID NO: 1223331 - DNA, 15 bp, Homo sapiens
ctttgggaggcctag

SEQ ID NO: 1223332 - DNA, 15 bp, Homo sapiens
actttgggaggccta

SEQ ID NO: 1223333 - DNA, 15 bp, Homo sapiens
cactttgggaggcct

SEQ ID NO: 1223334 - DNA, 15 bp, Homo sapiens
ttgtggctcatgcct

SEQ ID NO: 1223335 - DNA, 15 bp, Homo sapiens
gttgtggctcatgcc

SEQ ID NO: 1223336 - DNA, 15 bp, Homo sapiens
tgttgtggctcatgc

SEQ ID NO: 1223337 - DNA, 15 bp, Homo sapiens
ctgttgtggctcatg

SEQ ID NO: 1223338 - DNA, 15 bp, Homo sapiens
gctgttgtggctcat

SEQ ID NO: 1223339 - DNA, 15 bp, Homo sapiens
agctgttgtggctca

SEQ ID NO: 1223340 - DNA, 15 bp, Homo sapiens
cagctgttgtggctc

SEQ ID NO: 1223341 - DNA, 15 bp, Homo sapiens
ccagctgttgtggct

SEQ ID NO: 1223342 - DNA, 15 bp, Homo sapiens
gccagctgttgtggc

SEQ ID NO: 1223343 - DNA, 15 bp, Homo sapiens
ggccagctgttgtgg

SEQ ID NO: 1223344 - DNA, 15 bp, Homo sapiens
gggccagctgttgtg

SEQ ID NO: 1223345 - DNA, 15 bp, Homo sapiens
ggggccagctgttgt

SEQ ID NO: 1223346 - DNA, 15 bp, Homo sapiens
aggggccagctgttg

SEQ ID NO: 1223347 - DNA, 15 bp, Homo sapiens
aaggggccagctgtt

SEQ ID NO: 1223348 - DNA, 15 bp, Homo sapiens
aaaggggccagctgt

SEQ ID NO: 1223349 - DNA, 15 bp, Homo sapiens
gaaaggggccagctg

SEQ ID NO: 1223350 - DNA, 15 bp, Homo sapiens
agaaaggggccagct

SEQ ID NO: 1223351 - DNA, 15 bp, Homo sapiens
tagaaaggggccagc

SEQ ID NO: 1223352 - DNA, 15 bp, Homo sapiens
ttagaaaggggccag

SEQ ID NO: 1223353 - DNA, 15 bp, Homo sapiens
cttagaaaggggcca

SEQ ID NO: 1223354 - DNA, 15 bp, Homo sapiens
tcttagaaaggggcc

SEQ ID NO: 1223355 - DNA, 15 bp, Homo sapiens
gtcttagaaaggggc

SEQ ID NO: 1223356 - DNA, 15 bp, Homo sapiens
tgtcttagaaagggg

SEQ ID NO: 1223357 - DNA, 15 bp, Homo sapiens
ctgtcttagaaaggg

SEQ ID NO: 1223358 - DNA, 15 bp, Homo sapiens
cctgtcttagaaagg

SEQ ID NO: 1223359 - DNA, 15 bp, Homo sapiens
ccctgtcttagaaag

SEQ ID NO: 1223360 - DNA, 15 bp, Homo sapiens
accctgtcttagaaa

SEQ ID NO: 1223361 - DNA, 15 bp, Homo sapiens
gaccctgtcttagaa

SEQ ID NO: 1223362 - DNA, 15 bp, Homo sapiens
agaccctgtcttaga

SEQ ID NO: 1223363 - DNA, 15 bp, Homo sapiens
gagaccctgtcttag

SEQ ID NO: 1223364 - DNA, 15 bp, Homo sapiens
atgagaccctgtctt

SEQ ID NO: 1223365 - DNA, 15 bp, Homo sapiens
gtgtcactgcactcc

SEQ ID NO: 1223366 - DNA, 15 bp, Homo sapiens
agtgtcactgcactc

SEQ ID NO: 1223367 - DNA, 15 bp, Homo sapiens
tagtgtcactgcact

SEQ ID NO: 1223368 - DNA, 15 bp, Homo sapiens
gtagtgtcactgcac

SEQ ID NO: 1223369 - DNA, 15 bp, Homo sapiens
ggtagtgtcactgca

SEQ ID NO: 1223370 - DNA, 15 bp, Homo sapiens
tggtagtgtcactgc

SEQ ID NO: 1223371 - DNA, 15 bp, Homo sapiens
atggtagtgtcactg

SEQ ID NO: 1223372 - DNA, 15 bp, Homo sapiens
catggtagtgtcact

SEQ ID NO: 1223373 - DNA, 15 bp, Homo sapiens
ccatggtagtgtcac

SEQ ID NO: 1223374 - DNA, 15 bp, Homo sapiens
gccatggtagtgtca

SEQ ID NO: 1223375 - DNA, 15 bp, Homo sapiens
agccatggtagtgtc

SEQ ID NO: 1223376 - DNA, 15 bp, Homo sapiens
gagccatggtagtgt

SEQ ID NO: 1223377 - DNA, 15 bp, Homo sapiens
tgagccatggtagtg

SEQ ID NO: 1223378 - DNA, 15 bp, Homo sapiens
gtgagccatggtagt

SEQ ID NO: 1223379 - DNA, 15 bp, Homo sapiens
agtgagccatggtag

SEQ ID NO: 1223380 - DNA, 15 bp, Homo sapiens
cagtgagccatggta

SEQ ID NO: 1223381 - DNA, 15 bp, Homo sapiens
acagtgagccatggt

SEQ ID NO: 1223382 - DNA, 15 bp, Homo sapiens
tacagtgagccatgg

SEQ ID NO: 1223383 - DNA, 15 bp, Homo sapiens
ctacagtgagccatg

SEQ ID NO: 1223384 - DNA, 15 bp, Homo sapiens
gctacagtgagccat

SEQ ID NO: 1223385 - DNA, 15 bp, Homo sapiens
ggctacagtgagcca

SEQ ID NO: 1223386 - DNA, 15 bp, Homo sapiens
aggctacagtgagcc

SEQ ID NO: 1223387 - DNA, 15 bp, Homo sapiens
ggttgaggctacagt

SEQ ID NO: 1223388 - DNA, 15 bp, Homo sapiens
aggttgaggctacag

SEQ ID NO: 1223389 - DNA, 15 bp, Homo sapiens
gaggttgaggctaca

SEQ ID NO: 1223390 - DNA, 15 bp, Homo sapiens
ggaggttgaggctac

SEQ ID NO: 1223391 - DNA, 15 bp, Homo sapiens
gggaggttgaggcta

SEQ ID NO: 1223392 - DNA, 15 bp, Homo sapiens
tgggaggttgaggct

SEQ ID NO: 1223393 - DNA, 15 bp, Homo sapiens
ctgggaggttgaggc

SEQ ID NO: 1223394 - DNA, 15 bp, Homo sapiens
cctgggaggttgagg

SEQ ID NO: 1223395 - DNA, 15 bp, Homo sapiens
gcctgggaggttgag

SEQ ID NO: 1223396 - DNA, 15 bp, Homo sapiens
agcctgggaggttga

SEQ ID NO: 1223397 - DNA, 15 bp, Homo sapiens
gagcctgggaggttg

SEQ ID NO: 1223398 - DNA, 15 bp, Homo sapiens
tgagcctgggaggtt

SEQ ID NO: 1223399 - DNA, 15 bp, Homo sapiens
cggctgaggcaggag

SEQ ID NO: 1223400 - DNA, 15 bp, Homo sapiens
gcggctgaggcagga

SEQ ID NO: 1223401 - DNA, 15 bp, Homo sapiens
ggcggctgaggcagg

SEQ ID NO: 1223402 - DNA, 15 bp, Homo sapiens
gggcggctgaggcag

SEQ ID NO: 1223403 - DNA, 15 bp, Homo sapiens
cgggcggctgaggca

SEQ ID NO: 1223404 - DNA, 15 bp, Homo sapiens
tcgggcggctgaggc

SEQ ID NO: 1223405 - DNA, 15 bp, Homo sapiens
ctcgggcggctgagg

SEQ ID NO: 1223406 - DNA, 15 bp, Homo sapiens
actcgggcggctgag

SEQ ID NO: 1223407 - DNA, 15 bp, Homo sapiens
tactcgggcggctga

SEQ ID NO: 1223408 - DNA, 15 bp, Homo sapiens
ctactcgggcggctg

SEQ ID NO: 1223409 - DNA, 15 bp, Homo sapiens
gctactcgggcggct

SEQ ID NO: 1223410 - DNA, 15 bp, Homo sapiens
agctactcgggcggc

SEQ ID NO: 1223411 - DNA, 15 bp, Homo sapiens
cagctactcgggcgg

SEQ ID NO: 1223412 - DNA, 15 bp, Homo sapiens
ccagctactcgggcg

SEQ ID NO: 1223413 - DNA, 15 bp, Homo sapiens
cccagctactcgggc

SEQ ID NO: 1223414 - DNA, 15 bp, Homo sapiens
ttgcctgtagtccca

SEQ ID NO: 1223415 - DNA, 15 bp, Homo sapiens
cttgcctgtagtccc

SEQ ID NO: 1223416 - DNA, 15 bp, Homo sapiens
gcttgcctgtagtcc

SEQ ID NO: 1223417 - DNA, 15 bp, Homo sapiens
tgcttgcctgtagtc

SEQ ID NO: 1223418 - DNA, 15 bp, Homo sapiens
gtgcttgcctgtagt

SEQ ID NO: 1223419 - DNA, 15 bp, Homo sapiens
ggtgcttgcctgtag

SEQ ID NO: 1223420 - DNA, 15 bp, Homo sapiens
tggtgcttgcctgta

SEQ ID NO: 1223421 - DNA, 15 bp, Homo sapiens
gtggtgcttgcctgt

SEQ ID NO: 1223422 - DNA, 15 bp, Homo sapiens
ggtggtgcttgcctg

SEQ ID NO: 1223423 - DNA, 15 bp, Homo sapiens
tggtggtgcttgcct

SEQ ID NO: 1223424 - DNA, 15 bp, Homo sapiens
ctggtggtgcttgcc

SEQ ID NO: 1223425 - DNA, 15 bp, Homo sapiens
tctggtggtgcttgc

SEQ ID NO: 1223426 - DNA, 15 bp, Homo sapiens
gtctggtggtgcttg

SEQ ID NO: 1223427 - DNA, 15 bp, Homo sapiens
cgtctggtggtgctt

SEQ ID NO: 1223428 - DNA, 15 bp, Homo sapiens
gcgtctggtggtgct

SEQ ID NO: 1223429 - DNA, 15 bp, Homo sapiens
agcgtctggtggtgc

SEQ ID NO: 1223430 - DNA, 15 bp, Homo sapiens
cagcgtctggtggtg

SEQ ID NO: 1223431 - DNA, 15 bp, Homo sapiens
acagcgtctggtggt

SEQ ID NO: 1223432 - DNA, 15 bp, Homo sapiens
aacagcgtctggtgg

SEQ ID NO: 1223433 - DNA, 15 bp, Homo sapiens
taacagcgtctggtg

SEQ ID NO: 1223434 - DNA, 15 bp, Homo sapiens
ttaacagcgtctggt

SEQ ID NO: 1223435 - DNA, 15 bp, Homo sapiens
tttaacagcgtctgg

SEQ ID NO: 1223436 - DNA, 15 bp, Homo sapiens
ctttaacagcgtctg

SEQ ID NO: 1223437 - DNA, 15 bp, Homo sapiens
gctttaacagcgtct

SEQ ID NO: 1223438 - DNA, 15 bp, Homo sapiens
agctttaacagcgtc

SEQ ID NO: 1223439 - DNA, 15 bp, Homo sapiens
aagctttaacagcgt

SEQ ID NO: 1223440 - DNA, 15 bp, Homo sapiens
taagctttaacagcg

SEQ ID NO: 1223441 - DNA, 15 bp, Homo sapiens
gtaagctttaacagc

SEQ ID NO: 1223442 - DNA, 15 bp, Homo sapiens
agtaagctttaacag

SEQ ID NO: 1223443 - DNA, 15 bp, Homo sapiens
cagtaagctttaaca

SEQ ID NO: 1223444 - DNA, 15 bp, Homo sapiens
acagtaagctttaac

SEQ ID NO: 1223445 - DNA, 15 bp, Homo sapiens
aacagtaagctttaa

SEQ ID NO: 1223446 - DNA, 15 bp, Homo sapiens
gaacagtaagcttta

SEQ ID NO: 1223447 - DNA, 15 bp, Homo sapiens
ggaacagtaagcttt

SEQ ID NO: 1223448 - DNA, 15 bp, Homo sapiens
gggaacagtaagctt

SEQ ID NO: 1223449 - DNA, 15 bp, Homo sapiens
agggaacagtaagct

SEQ ID NO: 1223450 - DNA, 15 bp, Homo sapiens
gagggaacagtaagc

SEQ ID NO: 1223451 - DNA, 15 bp, Homo sapiens
agagggaacagtaag

SEQ ID NO: 1223452 - DNA, 15 bp, Homo sapiens
cagagggaacagtaa

SEQ ID NO: 1223453 - DNA, 15 bp, Homo sapiens
gcagagggaacagta

SEQ ID NO: 1223454 - DNA, 15 bp, Homo sapiens
ggcagagggaacagt

SEQ ID NO: 1223455 - DNA, 15 bp, Homo sapiens
aggcagagggaacag

SEQ ID NO: 1223456 - DNA, 15 bp, Homo sapiens
taggcagagggaaca

SEQ ID NO: 1223457 - DNA, 15 bp, Homo sapiens
ttaggcagagggaac

SEQ ID NO: 1223458 - DNA, 15 bp, Homo sapiens
tttaggcagagggaa

SEQ ID NO: 1223459 - DNA, 15 bp, Homo sapiens
ttttaggcagaggga

SEQ ID NO: 1223460 - DNA, 15 bp, Homo sapiens
tttttaggcagaggg

SEQ ID NO: 1223461 - DNA, 15 bp, Homo sapiens
gtttttaggcagagg

SEQ ID NO: 1223462 - DNA, 15 bp, Homo sapiens
cgtttttaggcagag

SEQ ID NO: 1223463 - DNA, 15 bp, Homo sapiens
gcgtttttaggcaga

SEQ ID NO: 1223464 - DNA, 15 bp, Homo sapiens
ggcgtttttaggcag

SEQ ID NO: 1223465 - DNA, 15 bp, Homo sapiens
gggcgtttttaggca

SEQ ID NO: 1223466 - DNA, 15 bp, Homo sapiens
ggggcgtttttaggc

SEQ ID NO: 1223467 - DNA, 15 bp, Homo sapiens
aggggcgtttttagg

SEQ ID NO: 1223468 - DNA, 15 bp, Homo sapiens
gaggggcgtttttag

SEQ ID NO: 1223469 - DNA, 15 bp, Homo sapiens
agaggggcgttttta

SEQ ID NO: 1223470 - DNA, 15 bp, Homo sapiens
gagaggggcgttttt

SEQ ID NO: 1223471 - DNA, 15 bp, Homo sapiens
agagaggggcgtttt

SEQ ID NO: 1223472 - DNA, 15 bp, Homo sapiens
cagagaggggcgttt

SEQ ID NO: 1223473 - DNA, 15 bp, Homo sapiens
tcagagaggggcgtt

SEQ ID NO: 1223474 - DNA, 15 bp, Homo sapiens
atcagagaggggcgt

SEQ ID NO: 1223475 - DNA, 15 bp, Homo sapiens
aatcagagaggggcg

SEQ ID NO: 1223476 - DNA, 15 bp, Homo sapiens
taatcagagaggggc

SEQ ID NO: 1223477 - DNA, 15 bp, Homo sapiens
ttaatcagagagggg

SEQ ID NO: 1223478 - DNA, 15 bp, Homo sapiens
cttaatcagagaggg

SEQ ID NO: 1223479 - DNA, 15 bp, Homo sapiens
tcttaatcagagagg

SEQ ID NO: 1223480 - DNA, 15 bp, Homo sapiens
ttcttaatcagagag

SEQ ID NO: 1223481 - DNA, 15 bp, Homo sapiens
gttcttaatcagaga

SEQ ID NO: 1223482 - DNA, 15 bp, Homo sapiens
agttcttaatcagag

SEQ ID NO: 1223483 - DNA, 15 bp, Homo sapiens
cagttcttaatcaga

SEQ ID NO: 1223484 - DNA, 15 bp, Homo sapiens
gcagttcttaatcag

SEQ ID NO: 1223485 - DNA, 15 bp, Homo sapiens
tgcagttcttaatca

SEQ ID NO: 1223486 - DNA, 15 bp, Homo sapiens
gtgcagttcttaatc

SEQ ID NO: 1223487 - DNA, 15 bp, Homo sapiens
agtgcagttcttaat

SEQ ID NO: 1223488 - DNA, 15 bp, Homo sapiens
aagtgcagttcttaa

SEQ ID NO: 1223489 - DNA, 15 bp, Homo sapiens
taagtgcagttctta

SEQ ID NO: 1223490 - DNA, 15 bp, Homo sapiens
ttaagtgcagttctt

SEQ ID NO: 1223491 - DNA, 15 bp, Homo sapiens
cttaagtgcagttct

SEQ ID NO: 1223492 - DNA, 15 bp, Homo sapiens
acttaagtgcagttc

SEQ ID NO: 1223493 - DNA, 15 bp, Homo sapiens
aacttaagtgcagtt

SEQ ID NO: 1223494 - DNA, 15 bp, Homo sapiens
gaacttaagtgcagt

SEQ ID NO: 1223495 - DNA, 15 bp, Homo sapiens
tgaacttaagtgcag

SEQ ID NO: 1223496 - DNA, 15 bp, Homo sapiens
ctgaacttaagtgca

SEQ ID NO: 1223497 - DNA, 15 bp, Homo sapiens
actgaacttaagtgc

SEQ ID NO: 1223498 - DNA, 15 bp, Homo sapiens
gactgaacttaagtg

SEQ ID NO: 1223499 - DNA, 15 bp, Homo sapiens
cgactgaacttaagt

SEQ ID NO: 1223500 - DNA, 15 bp, Homo sapiens
acgactgaacttaag

SEQ ID NO: 1223501 - DNA, 15 bp, Homo sapiens
cacgactgaacttaa

SEQ ID NO: 1223502 - DNA, 15 bp, Homo sapiens
ccacgactgaactta

SEQ ID NO: 1223503 - DNA, 15 bp, Homo sapiens
tccacgactgaactt

SEQ ID NO: 1223504 - DNA, 15 bp, Homo sapiens
ttccacgactgaact

SEQ ID NO: 1223505 - DNA, 15 bp, Homo sapiens
tttccacgactgaac

SEQ ID NO: 1223506 - DNA, 15 bp, Homo sapiens
ctttccacgactgaa

SEQ ID NO: 1223507 - DNA, 15 bp, Homo sapiens
cctttccacgactga

SEQ ID NO: 1223508 - DNA, 15 bp, Homo sapiens
ccctttccacgactg

SEQ ID NO: 1223509 - DNA, 15 bp, Homo sapiens
tccctttccacgact

SEQ ID NO: 1223510 - DNA, 15 bp, Homo sapiens
gtccctttccacgac

SEQ ID NO: 1223511 - DNA, 15 bp, Homo sapiens
tgtccctttccacga

SEQ ID NO: 1223512 - DNA, 15 bp, Homo sapiens
atgtccctttccacg

SEQ ID NO: 1223513 - DNA, 15 bp, Homo sapiens
catgtccctttccac

SEQ ID NO: 1223514 - DNA, 15 bp, Homo sapiens
tcatgtccctttcca

SEQ ID NO: 1223515 - DNA, 15 bp, Homo sapiens
atcatgtccctttcc

SEQ ID NO: 1223516 - DNA, 15 bp, Homo sapiens
catcatgtccctttc

SEQ ID NO: 1223517 - DNA, 15 bp, Homo sapiens
tcatcatgtcccttt

SEQ ID NO: 1223518 - DNA, 15 bp, Homo sapiens
ttcatcatgtccctt

SEQ ID NO: 1223519 - DNA, 15 bp, Homo sapiens
tttcatcatgtccct

SEQ ID NO: 1223520 - DNA, 15 bp, Homo sapiens
gtttcatcatgtccc

SEQ ID NO: 1223521 - DNA, 15 bp, Homo sapiens
ggtttcatcatgtcc

SEQ ID NO: 1223522 - DNA, 15 bp, Homo sapiens
gggtttcatcatgtc

SEQ ID NO: 1223523 - DNA, 15 bp, Homo sapiens
ttgggtttcatcatg

SEQ ID NO: 1223524 - DNA, 15 bp, Homo sapiens
cttgggtttcatcat

SEQ ID NO: 1223525 - DNA, 15 bp, Homo sapiens
gcttgggtttcatca

SEQ ID NO: 1223526 - DNA, 15 bp, Homo sapiens
ggcttgggtttcatc

SEQ ID NO: 1223527 - DNA, 15 bp, Homo sapiens
gggcttgggtttcat

SEQ ID NO: 1223528 - DNA, 15 bp, Homo sapiens
tgggcttgggtttca

SEQ ID NO: 1223529 - DNA, 15 bp, Homo sapiens
ttgggcttgggtttc

SEQ ID NO: 1223530 - DNA, 15 bp, Homo sapiens
cttgggcttgggttt

SEQ ID NO: 1223531 - DNA, 15 bp, Homo sapiens
acttgggcttgggtt

SEQ ID NO: 1223532 - DNA, 15 bp, Homo sapiens
aacttgggcttgggt

SEQ ID NO: 1223533 - DNA, 15 bp, Homo sapiens
gaacttgggcttggg

SEQ ID NO: 1223534 - DNA, 15 bp, Homo sapiens
tgaacttgggcttgg

SEQ ID NO: 1223535 - DNA, 15 bp, Homo sapiens
gtgaacttgggcttg

SEQ ID NO: 1223536 - DNA, 15 bp, Homo sapiens
cgtgaacttgggctt

SEQ ID NO: 1223537 - DNA, 15 bp, Homo sapiens
ccgtgaacttgggct

SEQ ID NO: 1223538 - DNA, 15 bp, Homo sapiens
tccgtgaacttgggc

SEQ ID NO: 1223539 - DNA, 15 bp, Homo sapiens
ttccgtgaacttggg

SEQ ID NO: 1223540 - DNA, 15 bp, Homo sapiens
gttccgtgaacttgg

SEQ ID NO: 1223541 - DNA, 15 bp, Homo sapiens
agttccgtgaacttg

SEQ ID NO: 1223542 - DNA, 15 bp, Homo sapiens
tagttccgtgaactt

SEQ ID NO: 1223543 - DNA, 15 bp, Homo sapiens
ttagttccgtgaact

SEQ ID NO: 1223544 - DNA, 15 bp, Homo sapiens
gttagttccgtgaac

SEQ ID NO: 1223545 - DNA, 15 bp, Homo sapiens
tgttagttccgtgaa

SEQ ID NO: 1223546 - DNA, 15 bp, Homo sapiens
gtgttagttccgtga

SEQ ID NO: 1223547 - DNA, 15 bp, Homo sapiens
tgtgttagttccgtg

SEQ ID NO: 1223548 - DNA, 15 bp, Homo sapiens
atgtgttagttccgt

SEQ ID NO: 1223549 - DNA, 15 bp, Homo sapiens
aatgtgttagttccg

SEQ ID NO: 1223550 - DNA, 15 bp, Homo sapiens
gaatgtgttagttcc

SEQ ID NO: 1223551 - DNA, 15 bp, Homo sapiens
tgaatgtgttagttc

SEQ ID NO: 1223552 - DNA, 15 bp, Homo sapiens
ttgaatgtgttagtt

SEQ ID NO: 1223553 - DNA, 15 bp, Homo sapiens
cttgaatgtgttagt

SEQ ID NO: 1223554 - DNA, 15 bp, Homo sapiens
ccttgaatgtgttag

SEQ ID NO: 1223555 - DNA, 15 bp, Homo sapiens
cccttgaatgtgtta

SEQ ID NO: 1223556 - DNA, 15 bp, Homo sapiens
gcccttgaatgtgtt

SEQ ID NO: 1223557 - DNA, 15 bp, Homo sapiens
tgcccttgaatgtgt

SEQ ID NO: 1223558 - DNA, 15 bp, Homo sapiens
ttgcccttgaatgtg

SEQ ID NO: 1223559 - DNA, 15 bp, Homo sapiens
tttgcccttgaatgt

SEQ ID NO: 1223560 - DNA, 15 bp, Homo sapiens
ctttgcccttgaatg

SEQ ID NO: 1223561 - DNA, 15 bp, Homo sapiens
gctttgcccttgaat

SEQ ID NO: 1223562 - DNA, 15 bp, Homo sapiens
agctttgcccttgaa

SEQ ID NO: 1223563 - DNA, 15 bp, Homo sapiens
cagctttgcccttga

SEQ ID NO: 1223564 - DNA, 15 bp, Homo sapiens
acagctttgcccttg

SEQ ID NO: 1223565 - DNA, 15 bp, Homo sapiens
tacagctttgccctt

SEQ ID NO: 1223566 - DNA, 15 bp, Homo sapiens
atacagctttgccct

SEQ ID NO: 1223567 - DNA, 15 bp, Homo sapiens
gatacagctttgccc

SEQ ID NO: 1223568 - DNA, 15 bp, Homo sapiens
agatacagctttgcc

SEQ ID NO: 1223569 - DNA, 15 bp, Homo sapiens
cagatacagctttgc

SEQ ID NO: 1223570 - DNA, 15 bp, Homo sapiens
ccagatacagctttg

SEQ ID NO: 1223571 - DNA, 15 bp, Homo sapiens
cccagatacagcttt

SEQ ID NO: 1223572 - DNA, 15 bp, Homo sapiens
ccccagatacagctt

SEQ ID NO: 1223573 - DNA, 15 bp, Homo sapiens
tccccagatacagct

SEQ ID NO: 1223574 - DNA, 15 bp, Homo sapiens
gtccccagatacagc

SEQ ID NO: 1223575 - DNA, 15 bp, Homo sapiens
tgtccccagatacag

SEQ ID NO: 1223576 - DNA, 15 bp, Homo sapiens
ttgtccccagataca

SEQ ID NO: 1223577 - DNA, 15 bp, Homo sapiens
gttgtccccagatac

SEQ ID NO: 1223578 - DNA, 15 bp, Homo sapiens
agttgtccccagata

SEQ ID NO: 1223579 - DNA, 15 bp, Homo sapiens
cagttgtccccagat

SEQ ID NO: 1223580 - DNA, 15 bp, Homo sapiens
acagttgtccccaga

SEQ ID NO: 1223581 - DNA, 15 bp, Homo sapiens
gacagttgtccccag

SEQ ID NO: 1223582 - DNA, 15 bp, Homo sapiens
tgacagttgtcccca

SEQ ID NO: 1223583 - DNA, 15 bp, Homo sapiens
ctgacagttgtcccc

SEQ ID NO: 1223584 - DNA, 15 bp, Homo sapiens
actgacagttgtccc

SEQ ID NO: 1223585 - DNA, 15 bp, Homo sapiens
cactgacagttgtcc

SEQ ID NO: 1223586 - DNA, 15 bp, Homo sapiens
ccactgacagttgtc

SEQ ID NO: 1223587 - DNA, 15 bp, Homo sapiens
cccactgacagttgt

SEQ ID NO: 1223588 - DNA, 15 bp, Homo sapiens
tcccactgacagttg

SEQ ID NO: 1223589 - DNA, 15 bp, Homo sapiens
gtcccactgacagtt

SEQ ID NO: 1223590 - DNA, 15 bp, Homo sapiens
ggtcccactgacagt

SEQ ID NO: 1223591 - DNA, 15 bp, Homo sapiens
gggtcccactgacag

SEQ ID NO: 1223592 - DNA, 15 bp, Homo sapiens
tgggtcccactgaca

SEQ ID NO: 1223593 - DNA, 15 bp, Homo sapiens
ttgggtcccactgac

SEQ ID NO: 1223594 - DNA, 15 bp, Homo sapiens
gttgggtcccactga

SEQ ID NO: 1223595 - DNA, 15 bp, Homo sapiens
ggttgggtcccactg

SEQ ID NO: 1223596 - DNA, 15 bp, Homo sapiens
aggttgggtcccact

SEQ ID NO: 1223597 - DNA, 15 bp, Homo sapiens
gaggttgggtcccac

SEQ ID NO: 1223598 - DNA, 15 bp, Homo sapiens
ggaggttgggtccca

SEQ ID NO: 1223599 - DNA, 15 bp, Homo sapiens
gggaggttgggtccc

SEQ ID NO: 1223600 - DNA, 15 bp, Homo sapiens
agggaggttgggtcc

SEQ ID NO: 1223601 - DNA, 15 bp, Homo sapiens
gagggaggttgggtc

SEQ ID NO: 1223602 - DNA, 15 bp, Homo sapiens
agagggaggttgggt

SEQ ID NO: 1223603 - DNA, 15 bp, Homo sapiens
gagagggaggttggg

SEQ ID NO: 1223604 - DNA, 15 bp, Homo sapiens
agagagggaggttgg

SEQ ID NO: 1223605 - DNA, 15 bp, Homo sapiens
gagagagggaggttg

SEQ ID NO: 1223606 - DNA, 15 bp, Homo sapiens
ggagagagggaggtt

SEQ ID NO: 1223607 - DNA, 15 bp, Homo sapiens
aggagagagggaggt

SEQ ID NO: 1223608 - DNA, 15 bp, Homo sapiens
gaggagagagggagg

SEQ ID NO: 1223609 - DNA, 15 bp, Homo sapiens
ggaggagagagggag

SEQ ID NO: 1223610 - DNA, 15 bp, Homo sapiens
gggaggagagaggga

SEQ ID NO: 1223611 - DNA, 15 bp, Homo sapiens
agggaggagagaggg

SEQ ID NO: 1223612 - DNA, 15 bp, Homo sapiens
gagggaggagagagg

SEQ ID NO: 1223613 - DNA, 15 bp, Homo sapiens
tgagggaggagagag

SEQ ID NO: 1223614 - DNA, 15 bp, Homo sapiens
ctgagggaggagaga

SEQ ID NO: 1223615 - DNA, 15 bp, Homo sapiens
cctgagggaggagag

SEQ ID NO: 1223616 - DNA, 15 bp, Homo sapiens
gcctgagggaggaga

SEQ ID NO: 1223617 - DNA, 15 bp, Homo sapiens
tgcctgagggaggag

SEQ ID NO: 1223618 - DNA, 15 bp, Homo sapiens
ctgcctgagggagga

SEQ ID NO: 1223619 - DNA, 15 bp, Homo sapiens
cctgcctgagggagg

SEQ ID NO: 1223620 - DNA, 15 bp, Homo sapiens
gcctgcctgagggag

SEQ ID NO: 1223621 - DNA, 15 bp, Homo sapiens
tgcctgcctgaggga

SEQ ID NO: 1223622 - DNA, 15 bp, Homo sapiens
ctgcctgcctgaggg

SEQ ID NO: 1223623 - DNA, 15 bp, Homo sapiens
cctgcctgcctgagg

SEQ ID NO: 1223624 - DNA, 15 bp, Homo sapiens
acctgcctgcctgag

SEQ ID NO: 1223625 - DNA, 15 bp, Homo sapiens
cacctgcctgcctga

SEQ ID NO: 1223626 - DNA, 15 bp, Homo sapiens
ccacctgcctgcctg

SEQ ID NO: 1223627 - DNA, 15 bp, Homo sapiens
accacctgcctgcct

SEQ ID NO: 1223628 - DNA, 15 bp, Homo sapiens
caccacctgcctgcc

SEQ ID NO: 1223629 - DNA, 15 bp, Homo sapiens
acaccacctgcctgc

SEQ ID NO: 1223630 - DNA, 15 bp, Homo sapiens
cacaccacctgcctg

SEQ ID NO: 1223631 - DNA, 15 bp, Homo sapiens
gcacaccacctgcct

SEQ ID NO: 1223632 - DNA, 15 bp, Homo sapiens
tgcacaccacctgcc

SEQ ID NO: 1223633 - DNA, 15 bp, Homo sapiens
gtgcacaccacctgc

SEQ ID NO: 1223634 - DNA, 15 bp, Homo sapiens
cgtgcacaccacctg

SEQ ID NO: 1223635 - DNA, 15 bp, Homo sapiens
gcgtgcacaccacct

SEQ ID NO: 1223636 - DNA, 15 bp, Homo sapiens
ggcgtgcacaccacc

SEQ ID NO: 1223637 - DNA, 15 bp, Homo sapiens
aggcgtgcacaccac

SEQ ID NO: 1223638 - DNA, 15 bp, Homo sapiens
gaggcgtgcacacca

SEQ ID NO: 1223639 - DNA, 15 bp, Homo sapiens
ggaggcgtgcacacc

SEQ ID NO: 1223640 - DNA, 15 bp, Homo sapiens
aggaggcgtgcacac

SEQ ID NO: 1223641 - DNA, 15 bp, Homo sapiens
aaggaggcgtgcaca

SEQ ID NO: 1223642 - DNA, 15 bp, Homo sapiens
aaaggaggcgtgcac

SEQ ID NO: 1223643 - DNA, 15 bp, Homo sapiens
gaaaggaggcgtgca

SEQ ID NO: 1223644 - DNA, 15 bp, Homo sapiens
ggaaaggaggcgtgc

SEQ ID NO: 1223645 - DNA, 15 bp, Homo sapiens
aggaaaggaggcgtg

SEQ ID NO: 1223646 - DNA, 15 bp, Homo sapiens
aaggaaaggaggcgt

SEQ ID NO: 1223647 - DNA, 15 bp, Homo sapiens
taaggaaaggaggcg

SEQ ID NO: 1223648 - DNA, 15 bp, Homo sapiens
ctaaggaaaggaggc

SEQ ID NO: 1223649 - DNA, 15 bp, Homo sapiens
gctaaggaaaggagg

SEQ ID NO: 1223650 - DNA, 15 bp, Homo sapiens
cgctaaggaaaggag

SEQ ID NO: 1223651 - DNA, 15 bp, Homo sapiens
ccgctaaggaaagga

SEQ ID NO: 1223652 - DNA, 15 bp, Homo sapiens
accgctaaggaaagg

SEQ ID NO: 1223653 - DNA, 15 bp, Homo sapiens
taccgctaaggaaag

SEQ ID NO: 1223654 - DNA, 15 bp, Homo sapiens
gtaccgctaaggaaa

SEQ ID NO: 1223655 - DNA, 15 bp, Homo sapiens
ggtaccgctaaggaa

SEQ ID NO: 1223656 - DNA, 15 bp, Homo sapiens
gggtaccgctaagga

SEQ ID NO: 1223657 - DNA, 15 bp, Homo sapiens
tgggtaccgctaagg

SEQ ID NO: 1223658 - DNA, 15 bp, Homo sapiens
ttgggtaccgctaag

SEQ ID NO: 1223659 - DNA, 15 bp, Homo sapiens
tttgggtaccgctaa

SEQ ID NO: 1223660 - DNA, 15 bp, Homo sapiens
ttttgggtaccgcta

SEQ ID NO: 1223661 - DNA, 15 bp, Homo sapiens
gttttgggtaccgct

SEQ ID NO: 1223662 - DNA, 15 bp, Homo sapiens
tgttttgggtaccgc

SEQ ID NO: 1223663 - DNA, 15 bp, Homo sapiens
gtgttttgggtaccg

SEQ ID NO: 1223664 - DNA, 15 bp, Homo sapiens
ggtgttttgggtacc

SEQ ID NO: 1223665 - DNA, 15 bp, Homo sapiens
cggtgttttgggtac

SEQ ID NO: 1223666 - DNA, 15 bp, Homo sapiens
tcggtgttttgggta

SEQ ID NO: 1223667 - DNA, 15 bp, Homo sapiens
ctcggtgttttgggt

SEQ ID NO: 1223668 - DNA, 15 bp, Homo sapiens
cctcggtgttttggg

SEQ ID NO: 1223669 - DNA, 15 bp, Homo sapiens
tcctcggtgttttgg

SEQ ID NO: 1223670 - DNA, 15 bp, Homo sapiens
atcctcggtgttttg

SEQ ID NO: 1223671 - DNA, 15 bp, Homo sapiens
catcctcggtgtttt

SEQ ID NO: 1223672 - DNA, 15 bp, Homo sapiens
ccatcctcggtgttt

SEQ ID NO: 1223673 - DNA, 15 bp, Homo sapiens
cccatcctcggtgtt

SEQ ID NO: 1223674 - DNA, 15 bp, Homo sapiens
tcccatcctcggtgt

SEQ ID NO: 1223675 - DNA, 15 bp, Homo sapiens
ctcccatcctcggtg

SEQ ID NO: 1223676 - DNA, 15 bp, Homo sapiens
tctcccatcctcggt

SEQ ID NO: 1223677 - DNA, 15 bp, Homo sapiens
ctctcccatcctcgg

SEQ ID NO: 1223678 - DNA, 15 bp, Homo sapiens
actctcccatcctcg

SEQ ID NO: 1223679 - DNA, 15 bp, Homo sapiens
cactctcccatcctc

SEQ ID NO: 1223680 - DNA, 15 bp, Homo sapiens
tcactctcccatcct

SEQ ID NO: 1223681 - DNA, 15 bp, Homo sapiens
atcactctcccatcc

SEQ ID NO: 1223682 - DNA, 15 bp, Homo sapiens
catcactctcccatc

SEQ ID NO: 1223683 - DNA, 15 bp, Homo sapiens
tcatcactctcccat

SEQ ID NO: 1223684 - DNA, 15 bp, Homo sapiens
ttcatcactctccca

SEQ ID NO: 1223685 - DNA, 15 bp, Homo sapiens
gttcatcactctccc

SEQ ID NO: 1223686 - DNA, 15 bp, Homo sapiens
tgttcatcactctcc

SEQ ID NO: 1223687 - DNA, 15 bp, Homo sapiens
gtgttcatcactctc

SEQ ID NO: 1223688 - DNA, 15 bp, Homo sapiens
tgtgttcatcactct

SEQ ID NO: 1223689 - DNA, 15 bp, Homo sapiens
atgtgttcatcactc

SEQ ID NO: 1223690 - DNA, 15 bp, Homo sapiens
aatgtgttcatcact

SEQ ID NO: 1223691 - DNA, 15 bp, Homo sapiens
caatgtgttcatcac

SEQ ID NO: 1223692 - DNA, 15 bp, Homo sapiens
tcaatgtgttcatca

SEQ ID NO: 1223693 - DNA, 15 bp, Homo sapiens
atcaatgtgttcatc

SEQ ID NO: 1223694 - DNA, 15 bp, Homo sapiens
aatcaatgtgttcat

SEQ ID NO: 1223695 - DNA, 15 bp, Homo sapiens
caatcaatgtgttca

SEQ ID NO: 1223696 - DNA, 15 bp, Homo sapiens
ccaatcaatgtgttc

SEQ ID NO: 1223697 - DNA, 15 bp, Homo sapiens
gccaatcaatgtgtt

SEQ ID NO: 1223698 - DNA, 15 bp, Homo sapiens
ggccaatcaatgtgt

SEQ ID NO: 1223699 - DNA, 15 bp, Homo sapiens
cggccaatcaatgtg

SEQ ID NO: 1223700 - DNA, 15 bp, Homo sapiens
ccggccaatcaatgt

SEQ ID NO: 1223701 - DNA, 15 bp, Homo sapiens
gccggccaatcaatg

SEQ ID NO: 1223702 - DNA, 15 bp, Homo sapiens
ggccggccaatcaat

SEQ ID NO: 1223703 - DNA, 15 bp, Homo sapiens
gggccggccaatcaa

SEQ ID NO: 1223704 - DNA, 15 bp, Homo sapiens
agggccggccaatca

SEQ ID NO: 1223705 - DNA, 15 bp, Homo sapiens
cagggccggccaatc

SEQ ID NO: 1223706 - DNA, 15 bp, Homo sapiens
ccagggccggccaat

SEQ ID NO: 1223707 - DNA, 15 bp, Homo sapiens
tccagggccggccaa

SEQ ID NO: 1223708 - DNA, 15 bp, Homo sapiens
gtccagggccggcca

SEQ ID NO: 1223709 - DNA, 15 bp, Homo sapiens
agtccagggccggcc

SEQ ID NO: 1223710 - DNA, 15 bp, Homo sapiens
cagtccagggccggc

SEQ ID NO: 1223711 - DNA, 15 bp, Homo sapiens
ccagtccagggccgg

SEQ ID NO: 1223712 - DNA, 15 bp, Homo sapiens
tccagtccagggccg

SEQ ID NO: 1223713 - DNA, 15 bp, Homo sapiens
ctccagtccagggcc

SEQ ID NO: 1223714 - DNA, 15 bp, Homo sapiens
actccagtccagggc

SEQ ID NO: 1223715 - DNA, 15 bp, Homo sapiens
tactccagtccaggg

SEQ ID NO: 1223716 - DNA, 15 bp, Homo sapiens
gtactccagtccagg

SEQ ID NO: 1223717 - DNA, 15 bp, Homo sapiens
tgtactccagtccag

SEQ ID NO: 1223718 - DNA, 15 bp, Homo sapiens
atgtactccagtcca

SEQ ID NO: 1223719 - DNA, 15 bp, Homo sapiens
catgtactccagtcc

SEQ ID NO: 1223720 - DNA, 15 bp, Homo sapiens
acatgtactccagtc

SEQ ID NO: 1223721 - DNA, 15 bp, Homo sapiens
aacatgtactccagt

SEQ ID NO: 1223722 - DNA, 15 bp, Homo sapiens
gaacatgtactccag

SEQ ID NO: 1223723 - DNA, 15 bp, Homo sapiens
tgaacatgtactcca

SEQ ID NO: 1223724 - DNA, 15 bp, Homo sapiens
ctgaacatgtactcc

SEQ ID NO: 1223725 - DNA, 15 bp, Homo sapiens
actgaacatgtactc

SEQ ID NO: 1223726 - DNA, 15 bp, Homo sapiens
aactgaacatgtact

SEQ ID NO: 1223727 - DNA, 15 bp, Homo sapiens
taactgaacatgtac

SEQ ID NO: 1223728 - DNA, 15 bp, Homo sapiens
ctaactgaacatgta

SEQ ID NO: 1223729 - DNA, 15 bp, Homo sapiens
cctaactgaacatgt

SEQ ID NO: 1223730 - DNA, 15 bp, Homo sapiens
ccctaactgaacatg

SEQ ID NO: 1223731 - DNA, 15 bp, Homo sapiens
accctaactgaacat

SEQ ID NO: 1223732 - DNA, 15 bp, Homo sapiens
aaccctaactgaaca

SEQ ID NO: 1223733 - DNA, 15 bp, Homo sapiens
aaaccctaactgaac

SEQ ID NO: 1223734 - DNA, 15 bp, Homo sapiens
taaaccctaactgaa

SEQ ID NO: 1223735 - DNA, 15 bp, Homo sapiens
ataaaccctaactga

SEQ ID NO: 1223736 - DNA, 15 bp, Homo sapiens
aataaaccctaactg

SEQ ID NO: 1223737 - DNA, 15 bp, Homo sapiens
aaataaaccctaact

SEQ ID NO: 1223738 - DNA, 15 bp, Homo sapiens
aaaataaaccctaac

SEQ ID NO: 1223739 - DNA, 15 bp, Homo sapiens
caaaataaaccctaa

SEQ ID NO: 1223740 - DNA, 15 bp, Homo sapiens
ccaaaataaacccta

SEQ ID NO: 1223741 - DNA, 15 bp, Homo sapiens
accaaaataaaccct

SEQ ID NO: 1223742 - DNA, 15 bp, Homo sapiens
taccaaaataaaccc

SEQ ID NO: 1223743 - DNA, 15 bp, Homo sapiens
ataccaaaataaacc

SEQ ID NO: 1223744 - DNA, 15 bp, Homo sapiens
gataccaaaataaac

SEQ ID NO: 1223745 - DNA, 15 bp, Homo sapiens
agataccaaaataaa

SEQ ID NO: 1223746 - DNA, 15 bp, Homo sapiens
cagataccaaaataa

SEQ ID NO: 1223747 - DNA, 15 bp, Homo sapiens
acagataccaaaata

SEQ ID NO: 1223748 - DNA, 15 bp, Homo sapiens
gacagataccaaaat

SEQ ID NO: 1223749 - DNA, 15 bp, Homo sapiens
tgacagataccaaaa

SEQ ID NO: 1223750 - DNA, 15 bp, Homo sapiens
atgacagataccaaa

SEQ ID NO: 1223751 - DNA, 15 bp, Homo sapiens
tatgacagataccaa

SEQ ID NO: 1223752 - DNA, 15 bp, Homo sapiens
ctatgacagatacca

SEQ ID NO: 1223753 - DNA, 15 bp, Homo sapiens
tctatgacagatacc

SEQ ID NO: 1223754 - DNA, 15 bp, Homo sapiens
ttctatgacagatac

SEQ ID NO: 1223755 - DNA, 15 bp, Homo sapiens
tttctatgacagata

SEQ ID NO: 1223756 - DNA, 15 bp, Homo sapiens
ttttctatgacagat

SEQ ID NO: 1223757 - DNA, 15 bp, Homo sapiens
gttttctatgacaga

SEQ ID NO: 1223758 - DNA, 15 bp, Homo sapiens
ggttttctatgacag

SEQ ID NO: 1223759 - DNA, 15 bp, Homo sapiens
gggttttctatgaca

SEQ ID NO: 1223760 - DNA, 15 bp, Homo sapiens
ggggttttctatgac

SEQ ID NO: 1223761 - DNA, 15 bp, Homo sapiens
gggggttttctatga

SEQ ID NO: 1223762 - DNA, 15 bp, Homo sapiens
tgggggttttctatg

SEQ ID NO: 1223763 - DNA, 15 bp, Homo sapiens
ttgggggttttctat

SEQ ID NO: 1223764 - DNA, 15 bp, Homo sapiens
tttgggggttttcta

SEQ ID NO: 1223765 - DNA, 15 bp, Homo sapiens
ttttgggggttttct

SEQ ID NO: 1223766 - DNA, 15 bp, Homo sapiens
gttttgggggttttc

SEQ ID NO: 1223767 - DNA, 15 bp, Homo sapiens
ggttttgggggtttt

SEQ ID NO: 1223768 - DNA, 15 bp, Homo sapiens
tggttttgggggttt

SEQ ID NO: 1223769 - DNA, 15 bp, Homo sapiens
ctggttttgggggtt

SEQ ID NO: 1223770 - DNA, 15 bp, Homo sapiens
gctggttttgggggt

SEQ ID NO: 1223771 - DNA, 15 bp, Homo sapiens
tgctggttttggggg

SEQ ID NO: 1223772 - DNA, 15 bp, Homo sapiens
ctgctggttttgggg

SEQ ID NO: 1223773 - DNA, 15 bp, Homo sapiens
gctgctggttttggg

SEQ ID NO: 1223774 - DNA, 15 bp, Homo sapiens
agctgctggttttgg

SEQ ID NO: 1223775 - DNA, 15 bp, Homo sapiens
aagctgctggttttg

SEQ ID NO: 1223776 - DNA, 15 bp, Homo sapiens
taagctgctggtttt

SEQ ID NO: 1223777 - DNA, 15 bp, Homo sapiens
gtaagctgctggttt

SEQ ID NO: 1223778 - DNA, 15 bp, Homo sapiens
tgtaagctgctggtt

SEQ ID NO: 1223779 - DNA, 15 bp, Homo sapiens
gtgtaagctgctggt

SEQ ID NO: 1223780 - DNA, 15 bp, Homo sapiens
tgtgtaagctgctgg

SEQ ID NO: 1223781 - DNA, 15 bp, Homo sapiens
ttgtgtaagctgctg

SEQ ID NO: 1223782 - DNA, 15 bp, Homo sapiens
cttgtgtaagctgct

SEQ ID NO: 1223783 - DNA, 15 bp, Homo sapiens
ccttgtgtaagctgc

SEQ ID NO: 1223784 - DNA, 15 bp, Homo sapiens
accttgtgtaagctg

SEQ ID NO: 1223785 - DNA, 15 bp, Homo sapiens
taccttgtgtaagct

SEQ ID NO: 1223786 - DNA, 15 bp, Homo sapiens
ctaccttgtgtaagc

SEQ ID NO: 1223787 - DNA, 15 bp, Homo sapiens
tctaccttgtgtaag

SEQ ID NO: 1223788 - DNA, 15 bp, Homo sapiens
ttctaccttgtgtaa

SEQ ID NO: 1223789 - DNA, 15 bp, Homo sapiens
cttctaccttgtgta

SEQ ID NO: 1223790 - DNA, 15 bp, Homo sapiens
acttctaccttgtgt

SEQ ID NO: 1223791 - DNA, 15 bp, Homo sapiens
aacttctaccttgtg

SEQ ID NO: 1223792 - DNA, 15 bp, Homo sapiens
caacttctaccttgt

SEQ ID NO: 1223793 - DNA, 15 bp, Homo sapiens
tcaacttctaccttg

SEQ ID NO: 1223794 - DNA, 15 bp, Homo sapiens
ctcaacttctacctt

SEQ ID NO: 1223795 - DNA, 15 bp, Homo sapiens
tctcaacttctacct

SEQ ID NO: 1223796 - DNA, 15 bp, Homo sapiens
atctcaacttctacc

SEQ ID NO: 1223797 - DNA, 15 bp, Homo sapiens
aatctcaacttctac

SEQ ID NO: 1223798 - DNA, 15 bp, Homo sapiens
caatctcaacttcta

SEQ ID NO: 1223799 - DNA, 15 bp, Homo sapiens
ccaatctcaacttct

SEQ ID NO: 1223800 - DNA, 15 bp, Homo sapiens
accaatctcaacttc

SEQ ID NO: 1223801 - DNA, 15 bp, Homo sapiens
aaccaatctcaactt

SEQ ID NO: 1223802 - DNA, 15 bp, Homo sapiens
gaaccaatctcaact

SEQ ID NO: 1223803 - DNA, 15 bp, Homo sapiens
agaaccaatctcaac

SEQ ID NO: 1223804 - DNA, 15 bp, Homo sapiens
gagaaccaatctcaa

SEQ ID NO: 1223805 - DNA, 15 bp, Homo sapiens
ggagaaccaatctca

SEQ ID NO: 1223806 - DNA, 15 bp, Homo sapiens
gggagaaccaatctc

SEQ ID NO: 1223807 - DNA, 15 bp, Homo sapiens
ggggagaaccaatct

SEQ ID NO: 1223808 - DNA, 15 bp, Homo sapiens
aggggagaaccaatc

SEQ ID NO: 1223809 - DNA, 15 bp, Homo sapiens
aaggggagaaccaat

SEQ ID NO: 1223810 - DNA, 15 bp, Homo sapiens
gaaggggagaaccaa

SEQ ID NO: 1223811 - DNA, 15 bp, Homo sapiens
agaaggggagaacca

SEQ ID NO: 1223812 - DNA, 15 bp, Homo sapiens
gagaaggggagaacc

SEQ ID NO: 1223813 - DNA, 15 bp, Homo sapiens
agagaaggggagaac

SEQ ID NO: 1223814 - DNA, 15 bp, Homo sapiens
gagagaaggggagaa

SEQ ID NO: 1223815 - DNA, 15 bp, Homo sapiens
agagagaaggggaga

SEQ ID NO: 1223816 - DNA, 15 bp, Homo sapiens
gagagagaaggggag

SEQ ID NO: 1223817 - DNA, 15 bp, Homo sapiens
ggagagagaagggga

SEQ ID NO: 1223818 - DNA, 15 bp, Homo sapiens
gggagagagaagggg

SEQ ID NO: 1223819 - DNA, 15 bp, Homo sapiens
tgggagagagaaggg

SEQ ID NO: 1223820 - DNA, 15 bp, Homo sapiens
atgggagagagaagg

SEQ ID NO: 1223821 - DNA, 15 bp, Homo sapiens
aatgggagagagaag

SEQ ID NO: 1223822 - DNA, 15 bp, Homo sapiens
aaatgggagagagaa

SEQ ID NO: 1223823 - DNA, 15 bp, Homo sapiens
taaatgggagagaga

SEQ ID NO: 1223824 - DNA, 15 bp, Homo sapiens
ttaaatgggagagag

SEQ ID NO: 1223825 - DNA, 15 bp, Homo sapiens
tttaaatgggagaga

SEQ ID NO: 1223826 - DNA, 15 bp, Homo sapiens
atttaaatgggagag

SEQ ID NO: 1223827 - DNA, 15 bp, Homo sapiens
tatttaaatgggaga

SEQ ID NO: 1223828 - DNA, 15 bp, Homo sapiens
ttatttaaatgggag

SEQ ID NO: 1223829 - DNA, 15 bp, Homo sapiens
cttatttaaatggga

SEQ ID NO: 1223830 - DNA, 15 bp, Homo sapiens
acttatttaaatggg

SEQ ID NO: 1223831 - DNA, 15 bp, Homo sapiens
aacttatttaaatgg

SEQ ID NO: 1223832 - DNA, 15 bp, Homo sapiens
aaacttatttaaatg

SEQ ID NO: 1223833 - DNA, 15 bp, Homo sapiens
caaacttatttaaat

SEQ ID NO: 1223834 - DNA, 15 bp, Homo sapiens
acaaacttatttaaa

SEQ ID NO: 1223835 - DNA, 15 bp, Homo sapiens
cacaaacttatttaa

SEQ ID NO: 1223836 - DNA, 15 bp, Homo sapiens
gcacaaacttattta

SEQ ID NO: 1223837 - DNA, 15 bp, Homo sapiens
agcacaaacttattt

SEQ ID NO: 1223838 - DNA, 15 bp, Homo sapiens
cagcacaaacttatt

SEQ ID NO: 1223839 - DNA, 15 bp, Homo sapiens
tcagcacaaacttat

SEQ ID NO: 1223840 - DNA, 15 bp, Homo sapiens
atcagcacaaactta

SEQ ID NO: 1223841 - DNA, 15 bp, Homo sapiens
tatcagcacaaactt

SEQ ID NO: 1223842 - DNA, 15 bp, Homo sapiens
atatcagcacaaact

SEQ ID NO: 1223843 - DNA, 15 bp, Homo sapiens
gatatcagcacaaac

SEQ ID NO: 1223844 - DNA, 15 bp, Homo sapiens
agatatcagcacaaa

SEQ ID NO: 1223845 - DNA, 15 bp, Homo sapiens
cagatatcagcacaa

SEQ ID NO: 1223846 - DNA, 15 bp, Homo sapiens
ccagatatcagcaca

SEQ ID NO: 1223847 - DNA, 15 bp, Homo sapiens
gccagatatcagcac

SEQ ID NO: 1223848 - DNA, 15 bp, Homo sapiens
agccagatatcagca

SEQ ID NO: 1223849 - DNA, 15 bp, Homo sapiens
gagccagatatcagc

SEQ ID NO: 1223850 - DNA, 15 bp, Homo sapiens
agagccagatatcag

SEQ ID NO: 1223851 - DNA, 15 bp, Homo sapiens
cagagccagatatca

SEQ ID NO: 1223852 - DNA, 15 bp, Homo sapiens
gcagagccagatatc

SEQ ID NO: 1223853 - DNA, 15 bp, Homo sapiens
ggcagagccagatat

SEQ ID NO: 1223854 - DNA, 15 bp, Homo sapiens
tggcagagccagata

SEQ ID NO: 1223855 - DNA, 15 bp, Homo sapiens
atggcagagccagat

SEQ ID NO: 1223856 - DNA, 15 bp, Homo sapiens
gatggcagagccaga

SEQ ID NO: 1223857 - DNA, 15 bp, Homo sapiens
tgatggcagagccag

SEQ ID NO: 1223858 - DNA, 15 bp, Homo sapiens
atgatggcagagcca

SEQ ID NO: 1223859 - DNA, 15 bp, Homo sapiens
gatgatggcagagcc

SEQ ID NO: 1223860 - DNA, 15 bp, Homo sapiens
tgatgatggcagagc

SEQ ID NO: 1223861 - DNA, 15 bp, Homo sapiens
ctgatgatggcagag

SEQ ID NO: 1223862 - DNA, 15 bp, Homo sapiens
cctgatgatggcaga

SEQ ID NO: 1223863 - DNA, 15 bp, Homo sapiens
ccctgatgatggcag

SEQ ID NO: 1223864 - DNA, 15 bp, Homo sapiens
tccctgatgatggca

SEQ ID NO: 1223865 - DNA, 15 bp, Homo sapiens
ttccctgatgatggc

SEQ ID NO: 1223866 - DNA, 15 bp, Homo sapiens
gttccctgatgatgg

SEQ ID NO: 1223867 - DNA, 15 bp, Homo sapiens
ggttccctgatgatg

SEQ ID NO: 1223868 - DNA, 15 bp, Homo sapiens
tggttccctgatgat

SEQ ID NO: 1223869 - DNA, 15 bp, Homo sapiens
ctggttccctgatga

SEQ ID NO: 1223870 - DNA, 15 bp, Homo sapiens
cctggttccctgatg

SEQ ID NO: 1223871 - DNA, 15 bp, Homo sapiens
gcctggttccctgat

SEQ ID NO: 1223872 - DNA, 15 bp, Homo sapiens
agcctggttccctga

SEQ ID NO: 1223873 - DNA, 15 bp, Homo sapiens
gagcctggttccctg

SEQ ID NO: 1223874 - DNA, 15 bp, Homo sapiens
ggagcctggttccct

SEQ ID NO: 1223875 - DNA, 15 bp, Homo sapiens
aggagcctggttccc

SEQ ID NO: 1223876 - DNA, 15 bp, Homo sapiens
caggagcctggttcc

SEQ ID NO: 1223877 - DNA, 15 bp, Homo sapiens
acaggagcctggttc

SEQ ID NO: 1223878 - DNA, 15 bp, Homo sapiens
gacaggagcctggtt

SEQ ID NO: 1223879 - DNA, 15 bp, Homo sapiens
tgacaggagcctggt

SEQ ID NO: 1223880 - DNA, 15 bp, Homo sapiens
atgacaggagcctgg

SEQ ID NO: 1223881 - DNA, 15 bp, Homo sapiens
gatgacaggagcctg

SEQ ID NO: 1223882 - DNA, 15 bp, Homo sapiens
ggatgacaggagcct

SEQ ID NO: 1223883 - DNA, 15 bp, Homo sapiens
gggatgacaggagcc

SEQ ID NO: 1223884 - DNA, 15 bp, Homo sapiens
agggatgacaggagc

SEQ ID NO: 1223885 - DNA, 15 bp, Homo sapiens
tagggatgacaggag

SEQ ID NO: 1223886 - DNA, 15 bp, Homo sapiens
ttagggatgacagga

SEQ ID NO: 1223887 - DNA, 15 bp, Homo sapiens
tttagggatgacagg

SEQ ID NO: 1223888 - DNA, 15 bp, Homo sapiens
tcctttagggatgac

SEQ ID NO: 1223889 - DNA, 15 bp, Homo sapiens
gtcctttagggatga

SEQ ID NO: 1223890 - DNA, 15 bp, Homo sapiens
cgtcctttagggatg

SEQ ID NO: 1223891 - DNA, 15 bp, Homo sapiens
ccgtcctttagggat

SEQ ID NO: 1223892 - DNA, 15 bp, Homo sapiens
gccgtcctttaggga

SEQ ID NO: 1223893 - DNA, 15 bp, Homo sapiens
tgccgtcctttaggg

SEQ ID NO: 1223894 - DNA, 15 bp, Homo sapiens
gtgccgtcctttagg

SEQ ID NO: 1223895 - DNA, 15 bp, Homo sapiens
agtgccgtcctttag

SEQ ID NO: 1223896 - DNA, 15 bp, Homo sapiens
gagtgccgtccttta

SEQ ID NO: 1223897 - DNA, 15 bp, Homo sapiens
cgagtgccgtccttt

SEQ ID NO: 1223898 - DNA, 15 bp, Homo sapiens
acgagtgccgtcctt

SEQ ID NO: 1223899 - DNA, 15 bp, Homo sapiens
gacgagtgccgtcct

SEQ ID NO: 1223900 - DNA, 15 bp, Homo sapiens
agacgagtgccgtcc

SEQ ID NO: 1223901 - DNA, 15 bp, Homo sapiens
cagacgagtgccgtc

SEQ ID NO: 1223902 - DNA, 15 bp, Homo sapiens
acagacgagtgccgt

SEQ ID NO: 1223903 - DNA, 15 bp, Homo sapiens
tacagacgagtgccg

SEQ ID NO: 1223904 - DNA, 15 bp, Homo sapiens
gtacagacgagtgcc

SEQ ID NO: 1223905 - DNA, 15 bp, Homo sapiens
tgtacagacgagtgc

SEQ ID NO: 1223906 - DNA, 15 bp, Homo sapiens
gtgtacagacgagtg

SEQ ID NO: 1223907 - DNA, 15 bp, Homo sapiens
cgtgtacagacgagt

SEQ ID NO: 1223908 - DNA, 15 bp, Homo sapiens
acgtgtacagacgag

SEQ ID NO: 1223909 - DNA, 15 bp, Homo sapiens
cacgtgtacagacga

SEQ ID NO: 1223910 - DNA, 15 bp, Homo sapiens
ccacgtgtacagacg

SEQ ID NO: 1223911 - DNA, 15 bp, Homo sapiens
gccacgtgtacagac

SEQ ID NO: 1223912 - DNA, 15 bp, Homo sapiens
tgccacgtgtacaga

SEQ ID NO: 1223913 - DNA, 15 bp, Homo sapiens
ctgccacgtgtacag

SEQ ID NO: 1223914 - DNA, 15 bp, Homo sapiens
actgccacgtgtaca

SEQ ID NO: 1223915 - DNA, 15 bp, Homo sapiens
tactgccacgtgtac

SEQ ID NO: 1223916 - DNA, 15 bp, Homo sapiens
atactgccacgtgta

SEQ ID NO: 1223917 - DNA, 15 bp, Homo sapiens
catactgccacgtgt

SEQ ID NO: 1223918 - DNA, 15 bp, Homo sapiens
ccatactgccacgtg

SEQ ID NO: 1223919 - DNA, 15 bp, Homo sapiens
gccatactgccacgt

SEQ ID NO: 1223920 - DNA, 15 bp, Homo sapiens
agccatactgccacg

SEQ ID NO: 1223921 - DNA, 15 bp, Homo sapiens
cagccatactgccac

SEQ ID NO: 1223922 - DNA, 15 bp, Homo sapiens
gcagccatactgcca

SEQ ID NO: 1223923 - DNA, 15 bp, Homo sapiens
ggcagccatactgcc

SEQ ID NO: 1223924 - DNA, 15 bp, Homo sapiens
tggcagccatactgc

SEQ ID NO: 1223925 - DNA, 15 bp, Homo sapiens
ctggcagccatactg

SEQ ID NO: 1223926 - DNA, 15 bp, Homo sapiens
cctggcagccatact

SEQ ID NO: 1223927 - DNA, 15 bp, Homo sapiens
ccctggcagccatac

SEQ ID NO: 1223928 - DNA, 15 bp, Homo sapiens
gccctggcagccata

SEQ ID NO: 1223929 - DNA, 15 bp, Homo sapiens
agccctggcagccat

SEQ ID NO: 1223930 - DNA, 15 bp, Homo sapiens
gagccctggcagcca

SEQ ID NO: 1223931 - DNA, 15 bp, Homo sapiens
ggagccctggcagcc

SEQ ID NO: 1223932 - DNA, 15 bp, Homo sapiens
tggagccctggcagc

SEQ ID NO: 1223933 - DNA, 15 bp, Homo sapiens
ctggagccctggcag

SEQ ID NO: 1223934 - DNA, 15 bp, Homo sapiens
gctggagccctggca

SEQ ID NO: 1223935 - DNA, 15 bp, Homo sapiens
ggctggagccctggc

SEQ ID NO: 1223936 - DNA, 15 bp, Homo sapiens
tggctggagccctgg

SEQ ID NO: 1223937 - DNA, 15 bp, Homo sapiens
atggctggagccctg

SEQ ID NO: 1223938 - DNA, 15 bp, Homo sapiens
gatggctggagccct

SEQ ID NO: 1223939 - DNA, 15 bp, Homo sapiens
tgatggctggagccc

SEQ ID NO: 1223940 - DNA, 15 bp, Homo sapiens
gtgatggctggagcc

SEQ ID NO: 1223941 - DNA, 15 bp, Homo sapiens
tgtgatggctggagc

SEQ ID NO: 1223942 - DNA, 15 bp, Homo sapiens
gtgtgatggctggag

SEQ ID NO: 1223943 - DNA, 15 bp, Homo sapiens
ggtgtgatggctgga

SEQ ID NO: 1223944 - DNA, 15 bp, Homo sapiens
gggtgtgatggctgg

SEQ ID NO: 1223945 - DNA, 15 bp, Homo sapiens
tgggtgtgatggctg

SEQ ID NO: 1223946 - DNA, 15 bp, Homo sapiens
gtgggtgtgatggct

SEQ ID NO: 1223947 - DNA, 15 bp, Homo sapiens
tgtgggtgtgatggc

SEQ ID NO: 1223948 - DNA, 15 bp, Homo sapiens
atgtgggtgtgatgg

SEQ ID NO: 1223949 - DNA, 15 bp, Homo sapiens
aatgtgggtgtgatg

SEQ ID NO: 1223950 - DNA, 15 bp, Homo sapiens
gaatgtgggtgtgat

SEQ ID NO: 1223951 - DNA, 15 bp, Homo sapiens
ggaatgtgggtgtga

SEQ ID NO: 1223952 - DNA, 15 bp, Homo sapiens
tggaatgtgggtgtg

SEQ ID NO: 1223953 - DNA, 15 bp, Homo sapiens
ctggaatgtgggtgt

SEQ ID NO: 1223954 - DNA, 15 bp, Homo sapiens
cctggaatgtgggtg

SEQ ID NO: 1223955 - DNA, 15 bp, Homo sapiens
tcctggaatgtgggt

SEQ ID NO: 1223956 - DNA, 15 bp, Homo sapiens
ttcctggaatgtggg

SEQ ID NO: 1223957 - DNA, 15 bp, Homo sapiens
tttcctggaatgtgg

SEQ ID NO: 1223958 - DNA, 15 bp, Homo sapiens
atttcctggaatgtg

SEQ ID NO: 1223959 - DNA, 15 bp, Homo sapiens
tatttcctggaatgt

SEQ ID NO: 1223960 - DNA, 15 bp, Homo sapiens
ctatttcctggaatg

SEQ ID NO: 1223961 - DNA, 15 bp, Homo sapiens
cctatttcctggaat

SEQ ID NO: 1223962 - DNA, 15 bp, Homo sapiens
tcctatttcctggaa

SEQ ID NO: 1223963 - DNA, 15 bp, Homo sapiens
ttcctatttcctgga

SEQ ID NO: 1223964 - DNA, 15 bp, Homo sapiens
cttcctatttcctgg

SEQ ID NO: 1223965 - DNA, 15 bp, Homo sapiens
ccttcctatttcctg

SEQ ID NO: 1223966 - DNA, 15 bp, Homo sapiens
cccttcctatttcct

SEQ ID NO: 1223967 - DNA, 15 bp, Homo sapiens
ccccttcctatttcc

SEQ ID NO: 1223968 - DNA, 15 bp, Homo sapiens
cccccttcctatttc

SEQ ID NO: 1223969 - DNA, 15 bp, Homo sapiens
tcccccttcctattt

SEQ ID NO: 1223970 - DNA, 15 bp, Homo sapiens
ttcccccttcctatt

SEQ ID NO: 1223971 - DNA, 15 bp, Homo sapiens
cttcccccttcctat

SEQ ID NO: 1223972 - DNA, 15 bp, Homo sapiens
tcttcccccttccta

SEQ ID NO: 1223973 - DNA, 15 bp, Homo sapiens
ttcttcccccttcct

SEQ ID NO: 1223974 - DNA, 15 bp, Homo sapiens
tttcttcccccttcc

SEQ ID NO: 1223975 - DNA, 15 bp, Homo sapiens
ctttcttcccccttc

SEQ ID NO: 1223976 - DNA, 15 bp, Homo sapiens
cctttcttccccctt

SEQ ID NO: 1223977 - DNA, 15 bp, Homo sapiens
ccctttcttccccct

SEQ ID NO: 1223978 - DNA, 15 bp, Homo sapiens
accctttcttccccc

SEQ ID NO: 1223979 - DNA, 15 bp, Homo sapiens
caccctttcttcccc

SEQ ID NO: 1223980 - DNA, 15 bp, Homo sapiens
acaccctttcttccc

SEQ ID NO: 1223981 - DNA, 15 bp, Homo sapiens
tacaccctttcttcc

SEQ ID NO: 1223982 - DNA, 15 bp, Homo sapiens
atacaccctttcttc

SEQ ID NO: 1223983 - DNA, 15 bp, Homo sapiens
aatacaccctttctt

SEQ ID NO: 1223984 - DNA, 15 bp, Homo sapiens
aaatacaccctttct

SEQ ID NO: 1223985 - DNA, 15 bp, Homo sapiens
caaatacaccctttc

SEQ ID NO: 1223986 - DNA, 15 bp, Homo sapiens
acaaatacacccttt

SEQ ID NO: 1223987 - DNA, 15 bp, Homo sapiens
gacaaatacaccctt

SEQ ID NO: 1223988 - DNA, 15 bp, Homo sapiens
agacaaatacaccct

SEQ ID NO: 1223989 - DNA, 15 bp, Homo sapiens
aagacaaatacaccc

SEQ ID NO: 1223990 - DNA, 15 bp, Homo sapiens
aaagacaaatacacc

SEQ ID NO: 1223991 - DNA, 15 bp, Homo sapiens
aaaagacaaatacac

SEQ ID NO: 1223992 - DNA, 15 bp, Homo sapiens
taaaagacaaataca

SEQ ID NO: 1223993 - DNA, 15 bp, Homo sapiens
ttaaaagacaaatac

SEQ ID NO: 1223994 - DNA, 15 bp, Homo sapiens
cttaaaagacaaata

SEQ ID NO: 1223995 - DNA, 15 bp, Homo sapiens
tcttaaaagacaaat

SEQ ID NO: 1223996 - DNA, 15 bp, Homo sapiens
ttcttaaaagacaaa

SEQ ID NO: 1223997 - DNA, 15 bp, Homo sapiens
attcttaaaagacaa

SEQ ID NO: 1223998 - DNA, 15 bp, Homo sapiens
gattcttaaaagaca

SEQ ID NO: 1223999 - DNA, 15 bp, Homo sapiens
ggattcttaaaagac

SEQ ID NO: 1224000 - DNA, 15 bp, Homo sapiens
aggattcttaaaaga

SEQ ID NO: 1224001 - DNA, 15 bp, Homo sapiens
aaggattcttaaaag

SEQ ID NO: 1224002 - DNA, 15 bp, Homo sapiens
gaaggattcttaaaa

SEQ ID NO: 1224003 - DNA, 15 bp, Homo sapiens
agaaggattcttaaa

SEQ ID NO: 1224004 - DNA, 15 bp, Homo sapiens
tagaaggattcttaa

SEQ ID NO: 1224005 - DNA, 15 bp, Homo sapiens
ctagaaggattctta

SEQ ID NO: 1224006 - DNA, 15 bp, Homo sapiens
tctagaaggattctt

SEQ ID NO: 1224007 - DNA, 15 bp, Homo sapiens
ttctagaaggattct

SEQ ID NO: 1224008 - DNA, 15 bp, Homo sapiens
cttctagaaggattc

SEQ ID NO: 1224009 - DNA, 15 bp, Homo sapiens
acttctagaaggatt

SEQ ID NO: 1224010 - DNA, 15 bp, Homo sapiens
cacttctagaaggat

SEQ ID NO: 1224011 - DNA, 15 bp, Homo sapiens
acacttctagaagga

SEQ ID NO: 1224012 - DNA, 15 bp, Homo sapiens
gacacttctagaagg

SEQ ID NO: 1224013 - DNA, 15 bp, Homo sapiens
tgacacttctagaag

SEQ ID NO: 1224014 - DNA, 15 bp, Homo sapiens
atgacacttctagaa

SEQ ID NO: 1224015 - DNA, 15 bp, Homo sapiens
catgacacttctaga

SEQ ID NO: 1224016 - DNA, 15 bp, Homo sapiens
acatgacacttctag

SEQ ID NO: 1224017 - DNA, 15 bp, Homo sapiens
tacatgacacttcta

SEQ ID NO: 1224018 - DNA, 15 bp, Homo sapiens
ttacatgacacttct

SEQ ID NO: 1224019 - DNA, 15 bp, Homo sapiens
gttacatgacacttc

SEQ ID NO: 1224020 - DNA, 15 bp, Homo sapiens
tgttacatgacactt

SEQ ID NO: 1224021 - DNA, 15 bp, Homo sapiens
atgttacatgacact

SEQ ID NO: 1224022 - DNA, 15 bp, Homo sapiens
aatgttacatgacac

SEQ ID NO: 1224023 - DNA, 15 bp, Homo sapiens
aaatgttacatgaca

SEQ ID NO: 1224024 - DNA, 15 bp, Homo sapiens
gaaatgttacatgac

SEQ ID NO: 1224025 - DNA, 15 bp, Homo sapiens
ggaaatgttacatga

SEQ ID NO: 1224026 - DNA, 15 bp, Homo sapiens
tggaaatgttacatg

SEQ ID NO: 1224027 - DNA, 15 bp, Homo sapiens
gtggaaatgttacat

SEQ ID NO: 1224028 - DNA, 15 bp, Homo sapiens
tgtggaaatgttaca

SEQ ID NO: 1224029 - DNA, 15 bp, Homo sapiens
atgtggaaatgttac

SEQ ID NO: 1224030 - DNA, 15 bp, Homo sapiens
tatgtggaaatgtta

SEQ ID NO: 1224031 - DNA, 15 bp, Homo sapiens
gtatgtggaaatgtt

SEQ ID NO: 1224032 - DNA, 15 bp, Homo sapiens
tgtatgtggaaatgt

SEQ ID NO: 1224033 - DNA, 15 bp, Homo sapiens
atgtatgtggaaatg

SEQ ID NO: 1224034 - DNA, 15 bp, Homo sapiens
aatgtatgtggaaat

SEQ ID NO: 1224035 - DNA, 15 bp, Homo sapiens
aaatgtatgtggaaa

SEQ ID NO: 1224036 - DNA, 15 bp, Homo sapiens
gaaatgtatgtggaa

SEQ ID NO: 1224037 - DNA, 15 bp, Homo sapiens
tgaaatgtatgtgga

SEQ ID NO: 1224038 - DNA, 15 bp, Homo sapiens
gtgaaatgtatgtgg

SEQ ID NO: 1224039 - DNA, 15 bp, Homo sapiens
agtgaaatgtatgtg

SEQ ID NO: 1224040 - DNA, 15 bp, Homo sapiens
cagtgaaatgtatgt

SEQ ID NO: 1224041 - DNA, 15 bp, Homo sapiens
ccagtgaaatgtatg

SEQ ID NO: 1224042 - DNA, 15 bp, Homo sapiens
gccagtgaaatgtat

SEQ ID NO: 1224043 - DNA, 15 bp, Homo sapiens
ggccagtgaaatgta

SEQ ID NO: 1224044 - DNA, 15 bp, Homo sapiens
aaaaataactaaatt

SEQ ID NO: 1224045 - DNA, 15 bp, Homo sapiens
taaaaataactaaat

SEQ ID NO: 1224046 - DNA, 15 bp, Homo sapiens
ctaaaaataactaaa

SEQ ID NO: 1224047 - DNA, 15 bp, Homo sapiens
actaaaaataactaa

SEQ ID NO: 1224048 - DNA, 15 bp, Homo sapiens
tactaaaaataacta

SEQ ID NO: 1224049 - DNA, 15 bp, Homo sapiens
ctactaaaaataact

SEQ ID NO: 1224050 - DNA, 15 bp, Homo sapiens
tctactaaaaataac

SEQ ID NO: 1224051 - DNA, 15 bp, Homo sapiens
aaaacccatctctac

SEQ ID NO: 1224052 - DNA, 15 bp, Homo sapiens
gaaaacccatctcta

SEQ ID NO: 1224053 - DNA, 15 bp, Homo sapiens
agaaaacccatctct

SEQ ID NO: 1224054 - DNA, 15 bp, Homo sapiens
gagaaaacccatctc

SEQ ID NO: 1224055 - DNA, 15 bp, Homo sapiens
ggagaaaacccatct

SEQ ID NO: 1224056 - DNA, 15 bp, Homo sapiens
tggagaaaacccatc

SEQ ID NO: 1224057 - DNA, 15 bp, Homo sapiens
atggagaaaacccat

SEQ ID NO: 1224058 - DNA, 15 bp, Homo sapiens
catggagaaaaccca

SEQ ID NO: 1224059 - DNA, 15 bp, Homo sapiens
acatggagaaaaccc

SEQ ID NO: 1224060 - DNA, 15 bp, Homo sapiens
aacatggagaaaacc

SEQ ID NO: 1224061 - DNA, 15 bp, Homo sapiens
caacatggagaaaac

SEQ ID NO: 1224062 - DNA, 15 bp, Homo sapiens
ccaacatggagaaaa

SEQ ID NO: 1224063 - DNA, 15 bp, Homo sapiens
ggagaccagcctgac

SEQ ID NO: 1224064 - DNA, 15 bp, Homo sapiens
tggagaccagcctga

SEQ ID NO: 1224065 - DNA, 15 bp, Homo sapiens
ttggagaccagcctg

SEQ ID NO: 1224066 - DNA, 15 bp, Homo sapiens
ggggtggatcacctg

SEQ ID NO: 1224067 - DNA, 15 bp, Homo sapiens
gggggtggatcacct

SEQ ID NO: 1224068 - DNA, 15 bp, Homo sapiens
ggggggtggatcacc

SEQ ID NO: 1224069 - DNA, 15 bp, Homo sapiens
aggggggtggatcac

SEQ ID NO: 1224070 - DNA, 15 bp, Homo sapiens
gaggggggtggatca

SEQ ID NO: 1224071 - DNA, 15 bp, Homo sapiens
cgaggggggtggatc

SEQ ID NO: 1224072 - DNA, 15 bp, Homo sapiens
ccgaggggggtggat

SEQ ID NO: 1224073 - DNA, 15 bp, Homo sapiens
gccgaggggggtgga

SEQ ID NO: 1224074 - DNA, 15 bp, Homo sapiens
ggccgaggggggtgg

SEQ ID NO: 1224075 - DNA, 15 bp, Homo sapiens
aggccgaggggggtg

SEQ ID NO: 1224076 - DNA, 15 bp, Homo sapiens
gaggccgaggggggt

SEQ ID NO: 1224077 - DNA, 15 bp, Homo sapiens
ggaggccgagggggg

SEQ ID NO: 1224078 - DNA, 15 bp, Homo sapiens
gggaggccgaggggg

SEQ ID NO: 1224079 - DNA, 15 bp, Homo sapiens
tgggaggccgagggg

SEQ ID NO: 1224080 - DNA, 15 bp, Homo sapiens
tatcccaacactttg

SEQ ID NO: 1224081 - DNA, 15 bp, Homo sapiens
ttatcccaacacttt

SEQ ID NO: 1224082 - DNA, 15 bp, Homo sapiens
gttatcccaacactt

SEQ ID NO: 1224083 - DNA, 15 bp, Homo sapiens
tgttatcccaacact

SEQ ID NO: 1224084 - DNA, 15 bp, Homo sapiens
ctgttatcccaacac

SEQ ID NO: 1224085 - DNA, 15 bp, Homo sapiens
cctgttatcccaaca

SEQ ID NO: 1224086 - DNA, 15 bp, Homo sapiens
gcctgttatcccaac

SEQ ID NO: 1224087 - DNA, 15 bp, Homo sapiens
cgcctgttatcccaa

SEQ ID NO: 1224088 - DNA, 15 bp, Homo sapiens
acgcctgttatccca

SEQ ID NO: 1224089 - DNA, 15 bp, Homo sapiens
cacgcctgttatccc

SEQ ID NO: 1224090 - DNA, 15 bp, Homo sapiens
tcacgcctgttatcc

SEQ ID NO: 1224091 - DNA, 15 bp, Homo sapiens
ctcacgcctgttatc

SEQ ID NO: 1224092 - DNA, 15 bp, Homo sapiens
gctcacgcctgttat

SEQ ID NO: 1224093 - DNA, 15 bp, Homo sapiens
ggctcacgcctgtta

SEQ ID NO: 1224094 - DNA, 15 bp, Homo sapiens
tggctcacgcctgtt

SEQ ID NO: 1224095 - DNA, 15 bp, Homo sapiens
ccggccaggcgcagt

SEQ ID NO: 1224096 - DNA, 15 bp, Homo sapiens
gccggccaggcgcag

SEQ ID NO: 1224097 - DNA, 15 bp, Homo sapiens
gagccggccaggcgc

SEQ ID NO: 1224098 - DNA, 15 bp, Homo sapiens
tgagccggccaggcg

SEQ ID NO: 1224099 - DNA, 15 bp, Homo sapiens
atgagccggccaggc

SEQ ID NO: 1224100 - DNA, 15 bp, Homo sapiens
aatgagccggccagg

SEQ ID NO: 1224101 - DNA, 15 bp, Homo sapiens
aaatgagccggccag

SEQ ID NO: 1224102 - DNA, 15 bp, Homo sapiens
gaaatgagccggcca

SEQ ID NO: 1224103 - DNA, 15 bp, Homo sapiens
agaaatgagccggcc

SEQ ID NO: 1224104 - DNA, 15 bp, Homo sapiens
aagaaatgagccggc

SEQ ID NO: 1224105 - DNA, 15 bp, Homo sapiens
aaagaaatgagccgg

SEQ ID NO: 1224106 - DNA, 15 bp, Homo sapiens
aaaagaaatgagccg

SEQ ID NO: 1224107 - DNA, 15 bp, Homo sapiens
caaaagaaatgagcc

SEQ ID NO: 1224108 - DNA, 15 bp, Homo sapiens
tcaaaagaaatgagc

SEQ ID NO: 1224109 - DNA, 15 bp, Homo sapiens
atcaaaagaaatgag

SEQ ID NO: 1224110 - DNA, 15 bp, Homo sapiens
gatcaaaagaaatga

SEQ ID NO: 1224111 - DNA, 15 bp, Homo sapiens
tgatcaaaagaaatg

SEQ ID NO: 1224112 - DNA, 15 bp, Homo sapiens
gtgatcaaaagaaat

SEQ ID NO: 1224113 - DNA, 15 bp, Homo sapiens
agtgatcaaaagaaa

SEQ ID NO: 1224114 - DNA, 15 bp, Homo sapiens
aagtgatcaaaagaa

SEQ ID NO: 1224115 - DNA, 15 bp, Homo sapiens
taagtgatcaaaaga

SEQ ID NO: 1224116 - DNA, 15 bp, Homo sapiens
gtaagtgatcaaaag

SEQ ID NO: 1224117 - DNA, 15 bp, Homo sapiens
agtaagtgatcaaaa

SEQ ID NO: 1224118 - DNA, 15 bp, Homo sapiens
tagtaagtgatcaaa

SEQ ID NO: 1224119 - DNA, 15 bp, Homo sapiens
ttagtaagtgatcaa

SEQ ID NO: 1224120 - DNA, 15 bp, Homo sapiens
attagtaagtgatca

SEQ ID NO: 1224121 - DNA, 15 bp, Homo sapiens
tattagtaagtgatc

SEQ ID NO: 1224122 - DNA, 15 bp, Homo sapiens
atattagtaagtgat

SEQ ID NO: 1224123 - DNA, 15 bp, Homo sapiens
aatattagtaagtga

SEQ ID NO: 1224124 - DNA, 15 bp, Homo sapiens
aaatattagtaagtg

SEQ ID NO: 1224125 - DNA, 15 bp, Homo sapiens
gaaatattagtaagt

SEQ ID NO: 1224126 - DNA, 15 bp, Homo sapiens
tgaaatattagtaag

SEQ ID NO: 1224127 - DNA, 15 bp, Homo sapiens
atgaaatattagtaa

SEQ ID NO: 1224128 - DNA, 15 bp, Homo sapiens
aatgaaatattagta

SEQ ID NO: 1224129 - DNA, 15 bp, Homo sapiens
caatgaaatattagt

SEQ ID NO: 1224130 - DNA, 15 bp, Homo sapiens
acaatgaaatattag

SEQ ID NO: 1224131 - DNA, 15 bp, Homo sapiens
cacaatgaaatatta

SEQ ID NO: 1224132 - DNA, 15 bp, Homo sapiens
acacaatgaaatatt

SEQ ID NO: 1224133 - DNA, 15 bp, Homo sapiens
tacacaatgaaatat

SEQ ID NO: 1224134 - DNA, 15 bp, Homo sapiens
ctacacaatgaaata

SEQ ID NO: 1224135 - DNA, 15 bp, Homo sapiens
tctacacaatgaaat

SEQ ID NO: 1224136 - DNA, 15 bp, Homo sapiens
atctacacaatgaaa

SEQ ID NO: 1224137 - DNA, 15 bp, Homo sapiens
catctacacaatgaa

SEQ ID NO: 1224138 - DNA, 15 bp, Homo sapiens
ccatctacacaatga

SEQ ID NO: 1224139 - DNA, 15 bp, Homo sapiens
tccatctacacaatg

SEQ ID NO: 1224140 - DNA, 15 bp, Homo sapiens
gtccatctacacaat

SEQ ID NO: 1224141 - DNA, 15 bp, Homo sapiens
ggtccatctacacaa

SEQ ID NO: 1224142 - DNA, 15 bp, Homo sapiens
tggtccatctacaca

SEQ ID NO: 1224143 - DNA, 15 bp, Homo sapiens
gtggtccatctacac

SEQ ID NO: 1224144 - DNA, 15 bp, Homo sapiens
tgtggtccatctaca

SEQ ID NO: 1224145 - DNA, 15 bp, Homo sapiens
ctgtggtccatctac

SEQ ID NO: 1224146 - DNA, 15 bp, Homo sapiens
actgtggtccatcta

SEQ ID NO: 1224147 - DNA, 15 bp, Homo sapiens
aactgtggtccatct

SEQ ID NO: 1224148 - DNA, 15 bp, Homo sapiens
aaactgtggtccatc

SEQ ID NO: 1224149 - DNA, 15 bp, Homo sapiens
taaactgtggtccat

SEQ ID NO: 1224150 - DNA, 15 bp, Homo sapiens
ataaactgtggtcca

SEQ ID NO: 1224151 - DNA, 15 bp, Homo sapiens
gataaactgtggtcc

SEQ ID NO: 1224152 - DNA, 15 bp, Homo sapiens
ggataaactgtggtc

SEQ ID NO: 1224153 - DNA, 15 bp, Homo sapiens
gggtgaatggataaa

SEQ ID NO: 1224154 - DNA, 15 bp, Homo sapiens
agggtgaatggataa

SEQ ID NO: 1224155 - DNA, 15 bp, Homo sapiens
tagggtgaatggata

SEQ ID NO: 1224156 - DNA, 15 bp, Homo sapiens
gtagggtgaatggat

SEQ ID NO: 1224157 - DNA, 15 bp, Homo sapiens
agtagggtgaatgga

SEQ ID NO: 1224158 - DNA, 15 bp, Homo sapiens
cagtagggtgaatgg

SEQ ID NO: 1224159 - DNA, 15 bp, Homo sapiens
tcagtagggtgaatg

SEQ ID NO: 1224160 - DNA, 15 bp, Homo sapiens
ttcagtagggtgaat

SEQ ID NO: 1224161 - DNA, 15 bp, Homo sapiens
cttcagtagggtgaa

SEQ ID NO: 1224162 - DNA, 15 bp, Homo sapiens
ccttcagtagggtga

SEQ ID NO: 1224163 - DNA, 15 bp, Homo sapiens
tccttcagtagggtg

SEQ ID NO: 1224164 - DNA, 15 bp, Homo sapiens
gtccttcagtagggt

SEQ ID NO: 1224165 - DNA, 15 bp, Homo sapiens
tgtccttcagtaggg

SEQ ID NO: 1224166 - DNA, 15 bp, Homo sapiens
atgtccttcagtagg

SEQ ID NO: 1224167 - DNA, 15 bp, Homo sapiens
gatgtccttcagtag

SEQ ID NO: 1224168 - DNA, 15 bp, Homo sapiens
agatgtccttcagta

SEQ ID NO: 1224169 - DNA, 15 bp, Homo sapiens
aagatgtccttcagt

SEQ ID NO: 1224170 - DNA, 15 bp, Homo sapiens
taccaagatgtcctt

SEQ ID NO: 1224171 - DNA, 15 bp, Homo sapiens
ttaccaagatgtcct

SEQ ID NO: 1224172 - DNA, 15 bp, Homo sapiens
tttaccaagatgtcc

SEQ ID NO: 1224173 - DNA, 15 bp, Homo sapiens
atttaccaagatgtc

SEQ ID NO: 1224174 - DNA, 15 bp, Homo sapiens
aatttaccaagatgt

SEQ ID NO: 1224175 - DNA, 15 bp, Homo sapiens
aaatttaccaagatg

SEQ ID NO: 1224176 - DNA, 15 bp, Homo sapiens
aaaatttaccaagat

SEQ ID NO: 1224177 - DNA, 15 bp, Homo sapiens
taaaatttaccaaga

SEQ ID NO: 1224178 - DNA, 15 bp, Homo sapiens
ctaaaatttaccaag

SEQ ID NO: 1224179 - DNA, 15 bp, Homo sapiens
gctaaaatttaccaa

SEQ ID NO: 1224180 - DNA, 15 bp, Homo sapiens
tgctaaaatttacca

SEQ ID NO: 1224181 - DNA, 15 bp, Homo sapiens
ttgctaaaatttacc

SEQ ID NO: 1224182 - DNA, 15 bp, Homo sapiens
gttgctaaaatttac

SEQ ID NO: 1224183 - DNA, 15 bp, Homo sapiens
cagttgctaaaattt

SEQ ID NO: 1224184 - DNA, 15 bp, Homo sapiens
acagttgctaaaatt

SEQ ID NO: 1224185 - DNA, 15 bp, Homo sapiens
cacagttgctaaaat

SEQ ID NO: 1224186 - DNA, 15 bp, Homo sapiens
tcacagttgctaaaa

SEQ ID NO: 1224187 - DNA, 15 bp, Homo sapiens
ttcacagttgctaaa

SEQ ID NO: 1224188 - DNA, 15 bp, Homo sapiens
attcacagttgctaa

SEQ ID NO: 1224189 - DNA, 15 bp, Homo sapiens
tattcacagttgcta

SEQ ID NO: 1224190 - DNA, 15 bp, Homo sapiens
ttattcacagttgct

SEQ ID NO: 1224191 - DNA, 15 bp, Homo sapiens
tttattcacagttgc

SEQ ID NO: 1224192 - DNA, 15 bp, Homo sapiens
ttttattcacagttg

SEQ ID NO: 1224193 - DNA, 15 bp, Homo sapiens
gttttattcacagtt

SEQ ID NO: 1224194 - DNA, 15 bp, Homo sapiens
ggttttattcacagt

SEQ ID NO: 1224195 - DNA, 15 bp, Homo sapiens
cggttttattcacag

SEQ ID NO: 1224196 - DNA, 15 bp, Homo sapiens
gcggttttattcaca

SEQ ID NO: 1224197 - DNA, 15 bp, Homo sapiens
agcggttttattcac

SEQ ID NO: 1224198 - DNA, 15 bp, Homo sapiens
gagcggttttattca

SEQ ID NO: 1224199 - DNA, 15 bp, Homo sapiens
ggagcggttttattc

SEQ ID NO: 1224200 - DNA, 15 bp, Homo sapiens
tggagcggttttatt

SEQ ID NO: 1224201 - DNA, 15 bp, Homo sapiens
ctggagcggttttat

SEQ ID NO: 1224202 - DNA, 15 bp, Homo sapiens
gctggagcggtttta

SEQ ID NO: 1224203 - DNA, 15 bp, Homo sapiens
ggctggagcggtttt

SEQ ID NO: 1224204 - DNA, 15 bp, Homo sapiens
cggctggagcggttt

SEQ ID NO: 1224205 - DNA, 15 bp, Homo sapiens
ccggctggagcggtt

SEQ ID NO: 1224206 - DNA, 15 bp, Homo sapiens
cccggctggagcggt

SEQ ID NO: 1224207 - DNA, 15 bp, Homo sapiens
gcccggctggagcgg

SEQ ID NO: 1224208 - DNA, 15 bp, Homo sapiens
tgcccggctggagcg

SEQ ID NO: 1224209 - DNA, 15 bp, Homo sapiens
gtgcccggctggagc

SEQ ID NO: 1224210 - DNA, 15 bp, Homo sapiens
cgtgcccggctggag

SEQ ID NO: 1224211 - DNA, 15 bp, Homo sapiens
tcgtgcccggctgga

SEQ ID NO: 1224212 - DNA, 15 bp, Homo sapiens
atcgtgcccggctgg

SEQ ID NO: 1224213 - DNA, 15 bp, Homo sapiens
catcgtgcccggctg

SEQ ID NO: 1224214 - DNA, 15 bp, Homo sapiens
ccatcgtgcccggct

SEQ ID NO: 1224215 - DNA, 15 bp, Homo sapiens
gccatcgtgcccggc

SEQ ID NO: 1224216 - DNA, 15 bp, Homo sapiens
agccatcgtgcccgg

SEQ ID NO: 1224217 - DNA, 15 bp, Homo sapiens
gagccatcgtgcccg

SEQ ID NO: 1224218 - DNA, 15 bp, Homo sapiens
tgagccatcgtgccc

SEQ ID NO: 1224219 - DNA, 15 bp, Homo sapiens
gtgagccatcgtgcc

SEQ ID NO: 1224220 - DNA, 15 bp, Homo sapiens
cgtgagccatcgtgc

SEQ ID NO: 1224221 - DNA, 15 bp, Homo sapiens
ccgtgagccatcgtg

SEQ ID NO: 1224222 - DNA, 15 bp, Homo sapiens
gccgtgagccatcgt

SEQ ID NO: 1224223 - DNA, 15 bp, Homo sapiens
agccgtgagccatcg

SEQ ID NO: 1224224 - DNA, 15 bp, Homo sapiens
cagccgtgagccatc

SEQ ID NO: 1224225 - DNA, 15 bp, Homo sapiens
acagccgtgagccat

SEQ ID NO: 1224226 - DNA, 15 bp, Homo sapiens
tacagccgtgagcca

SEQ ID NO: 1224227 - DNA, 15 bp, Homo sapiens
ttacagccgtgagcc

SEQ ID NO: 1224228 - DNA, 15 bp, Homo sapiens
attacagccgtgagc

SEQ ID NO: 1224229 - DNA, 15 bp, Homo sapiens
gattacagccgtgag

SEQ ID NO: 1224230 - DNA, 15 bp, Homo sapiens
ggattacagccgtga

SEQ ID NO: 1224231 - DNA, 15 bp, Homo sapiens
gggattacagccgtg

SEQ ID NO: 1224232 - DNA, 15 bp, Homo sapiens
tgggattacagccgt

SEQ ID NO: 1224233 - DNA, 15 bp, Homo sapiens
gtgggattacagccg

SEQ ID NO: 1224234 - DNA, 15 bp, Homo sapiens
ggtgggattacagcc

SEQ ID NO: 1224235 - DNA, 15 bp, Homo sapiens
tggtgggattacagc

SEQ ID NO: 1224236 - DNA, 15 bp, Homo sapiens
gtggtgggattacag

SEQ ID NO: 1224237 - DNA, 15 bp, Homo sapiens
agtggtgggattaca

SEQ ID NO: 1224238 - DNA, 15 bp, Homo sapiens
aagtggtgggattac

SEQ ID NO: 1224239 - DNA, 15 bp, Homo sapiens
taagtggtgggatta

SEQ ID NO: 1224240 - DNA, 15 bp, Homo sapiens
ctaagtggtgggatt

SEQ ID NO: 1224241 - DNA, 15 bp, Homo sapiens
cctaagtggtgggat

SEQ ID NO: 1224242 - DNA, 15 bp, Homo sapiens
ccctaagtggtggga

SEQ ID NO: 1224243 - DNA, 15 bp, Homo sapiens
tccctaagtggtggg

SEQ ID NO: 1224244 - DNA, 15 bp, Homo sapiens
ctccctaagtggtgg

SEQ ID NO: 1224245 - DNA, 15 bp, Homo sapiens
cctccctaagtggtg

SEQ ID NO: 1224246 - DNA, 15 bp, Homo sapiens
gcctccctaagtggt

SEQ ID NO: 1224247 - DNA, 15 bp, Homo sapiens
ggcctccctaagtgg

SEQ ID NO: 1224248 - DNA, 15 bp, Homo sapiens
cggcctccctaagtg

SEQ ID NO: 1224249 - DNA, 15 bp, Homo sapiens
tcggcctccctaagt

SEQ ID NO: 1224250 - DNA, 15 bp, Homo sapiens
ctcggcctccctaag

SEQ ID NO: 1224251 - DNA, 15 bp, Homo sapiens
cctcggcctccctaa

SEQ ID NO: 1224252 - DNA, 15 bp, Homo sapiens
acctcggcctcccta

SEQ ID NO: 1224253 - DNA, 15 bp, Homo sapiens
tacctcggcctccct

SEQ ID NO: 1224254 - DNA, 15 bp, Homo sapiens
tctacctcggcctcc

SEQ ID NO: 1224255 - DNA, 15 bp, Homo sapiens
atctacctcggcctc

SEQ ID NO: 1224256 - DNA, 15 bp, Homo sapiens
catctacctcggcct

SEQ ID NO: 1224257 - DNA, 15 bp, Homo sapiens
ccatctacctcggcc

SEQ ID NO: 1224258 - DNA, 15 bp, Homo sapiens
tccatctacctcggc

SEQ ID NO: 1224259 - DNA, 15 bp, Homo sapiens
atccatctacctcgg

SEQ ID NO: 1224260 - DNA, 15 bp, Homo sapiens
gatccatctacctcg

SEQ ID NO: 1224261 - DNA, 15 bp, Homo sapiens
ggatccatctacctc

SEQ ID NO: 1224262 - DNA, 15 bp, Homo sapiens
gggatccatctacct

SEQ ID NO: 1224263 - DNA, 15 bp, Homo sapiens
ggggatccatctacc

SEQ ID NO: 1224264 - DNA, 15 bp, Homo sapiens
cggggatccatctac

SEQ ID NO: 1224265 - DNA, 15 bp, Homo sapiens
tcggggatccatcta

SEQ ID NO: 1224266 - DNA, 15 bp, Homo sapiens
ctcggggatccatct

SEQ ID NO: 1224267 - DNA, 15 bp, Homo sapiens
cctcggggatccatc

SEQ ID NO: 1224268 - DNA, 15 bp, Homo sapiens
acctcggggatccat

SEQ ID NO: 1224269 - DNA, 15 bp, Homo sapiens
gacctcggggatcca

SEQ ID NO: 1224270 - DNA, 15 bp, Homo sapiens
tgacctcggggatcc

SEQ ID NO: 1224271 - DNA, 15 bp, Homo sapiens
ctgacctcggggatc

SEQ ID NO: 1224272 - DNA, 15 bp, Homo sapiens
cctgacctcggggat

SEQ ID NO: 1224273 - DNA, 15 bp, Homo sapiens
tcctgacctcgggga

SEQ ID NO: 1224274 - DNA, 15 bp, Homo sapiens
ctcctgacctcgggg

SEQ ID NO: 1224275 - DNA, 15 bp, Homo sapiens
actcctgacctcggg

SEQ ID NO: 1224276 - DNA, 15 bp, Homo sapiens
tactcctgacctcgg

SEQ ID NO: 1224277 - DNA, 15 bp, Homo sapiens
ttactcctgacctcg

SEQ ID NO: 1224278 - DNA, 15 bp, Homo sapiens
cttactcctgacctc

SEQ ID NO: 1224279 - DNA, 15 bp, Homo sapiens
tcttactcctgacct

SEQ ID NO: 1224280 - DNA, 15 bp, Homo sapiens
ctcttactcctgacc

SEQ ID NO: 1224281 - DNA, 15 bp, Homo sapiens
tctcttactcctgac

SEQ ID NO: 1224282 - DNA, 15 bp, Homo sapiens
gtctcttactcctga

SEQ ID NO: 1224283 - DNA, 15 bp, Homo sapiens
ggtctcttactcctg

SEQ ID NO: 1224284 - DNA, 15 bp, Homo sapiens
tggtctcttactcct

SEQ ID NO: 1224285 - DNA, 15 bp, Homo sapiens
ctggtctcttactcc

SEQ ID NO: 1224286 - DNA, 15 bp, Homo sapiens
gctggtctcttactc

SEQ ID NO: 1224287 - DNA, 15 bp, Homo sapiens
ggctggtctcttact

SEQ ID NO: 1224288 - DNA, 15 bp, Homo sapiens
aggctggtctcttac

SEQ ID NO: 1224289 - DNA, 15 bp, Homo sapiens
caggctggtctctta

SEQ ID NO: 1224290 - DNA, 15 bp, Homo sapiens
ccaggctggtctctt

SEQ ID NO: 1224291 - DNA, 15 bp, Homo sapiens
ttagagacagggttt

SEQ ID NO: 1224292 - DNA, 15 bp, Homo sapiens
attagagacagggtt

SEQ ID NO: 1224293 - DNA, 15 bp, Homo sapiens
tattagagacagggt

SEQ ID NO: 1224294 - DNA, 15 bp, Homo sapiens
ttattagagacaggg

SEQ ID NO: 1224295 - DNA, 15 bp, Homo sapiens
tttattagagacagg

SEQ ID NO: 1224296 - DNA, 15 bp, Homo sapiens
gtttattagagacag

SEQ ID NO: 1224297 - DNA, 15 bp, Homo sapiens
tgtttattagagaca

SEQ ID NO: 1224298 - DNA, 15 bp, Homo sapiens
atgtttattagagac

SEQ ID NO: 1224299 - DNA, 15 bp, Homo sapiens
tatgtttattagaga

SEQ ID NO: 1224300 - DNA, 15 bp, Homo sapiens
gtatgtttattagag

SEQ ID NO: 1224301 - DNA, 15 bp, Homo sapiens
tgtatgtttattaga

SEQ ID NO: 1224302 - DNA, 15 bp, Homo sapiens
ttgtatgtttattag

SEQ ID NO: 1224303 - DNA, 15 bp, Homo sapiens
tttgtatgtttatta

SEQ ID NO: 1224304 - DNA, 15 bp, Homo sapiens
ttttgtatgtttatt

SEQ ID NO: 1224305 - DNA, 15 bp, Homo sapiens
tttttgtatgtttat

SEQ ID NO: 1224306 - DNA, 15 bp, Homo sapiens
atttttgtatgttta

SEQ ID NO: 1224307 - DNA, 15 bp, Homo sapiens
aatttttgtatgttt

SEQ ID NO: 1224308 - DNA, 15 bp, Homo sapiens
taatttttgtatgtt

SEQ ID NO: 1224309 - DNA, 15 bp, Homo sapiens
ctaatttttgtatgt

SEQ ID NO: 1224310 - DNA, 15 bp, Homo sapiens
gctaatttttgtatg

SEQ ID NO: 1224311 - DNA, 15 bp, Homo sapiens
acccggctaattttt

SEQ ID NO: 1224312 - DNA, 15 bp, Homo sapiens
cacccggctaatttt

SEQ ID NO: 1224313 - DNA, 15 bp, Homo sapiens
acacccggctaattt

SEQ ID NO: 1224314 - DNA, 15 bp, Homo sapiens
cacacccggctaatt

SEQ ID NO: 1224315 - DNA, 15 bp, Homo sapiens
ccacacccggctaat

SEQ ID NO: 1224316 - DNA, 15 bp, Homo sapiens
accacacccggctaa

SEQ ID NO: 1224317 - DNA, 15 bp, Homo sapiens
caccacacccggcta

SEQ ID NO: 1224318 - DNA, 15 bp, Homo sapiens
cgccaccacacccgg

SEQ ID NO: 1224319 - DNA, 15 bp, Homo sapiens
cccgccaccacaccc

SEQ ID NO: 1224320 - DNA, 15 bp, Homo sapiens
tcccgccaccacacc

SEQ ID NO: 1224321 - DNA, 15 bp, Homo sapiens
ctcccgccaccacac

SEQ ID NO: 1224322 - DNA, 15 bp, Homo sapiens
gctcccgccaccaca

SEQ ID NO: 1224323 - DNA, 15 bp, Homo sapiens
ggctcccgccaccac

SEQ ID NO: 1224324 - DNA, 15 bp, Homo sapiens
aggctcccgccacca

SEQ ID NO: 1224325 - DNA, 15 bp, Homo sapiens
caggctcccgccacc

SEQ ID NO: 1224326 - DNA, 15 bp, Homo sapiens
acaggctcccgccac

SEQ ID NO: 1224327 - DNA, 15 bp, Homo sapiens
tacaggctcccgcca

SEQ ID NO: 1224328 - DNA, 15 bp, Homo sapiens
ttacaggctcccgcc

SEQ ID NO: 1224329 - DNA, 15 bp, Homo sapiens
attacaggctcccgc

SEQ ID NO: 1224330 - DNA, 15 bp, Homo sapiens
cattacaggctcccg

SEQ ID NO: 1224331 - DNA, 15 bp, Homo sapiens
gcattacaggctccc

SEQ ID NO: 1224332 - DNA, 15 bp, Homo sapiens
ggcattacaggctcc

SEQ ID NO: 1224333 - DNA, 15 bp, Homo sapiens
tggcattacaggctc

SEQ ID NO: 1224334 - DNA, 15 bp, Homo sapiens
ctggcattacaggct

SEQ ID NO: 1224335 - DNA, 15 bp, Homo sapiens
gagtagctggcatta

SEQ ID NO: 1224336 - DNA, 15 bp, Homo sapiens
ggagtagctggcatt

SEQ ID NO: 1224337 - DNA, 15 bp, Homo sapiens
tggagtagctggcat

SEQ ID NO: 1224338 - DNA, 15 bp, Homo sapiens
ctggagtagctggca

SEQ ID NO: 1224339 - DNA, 15 bp, Homo sapiens
tctggagtagctggc

SEQ ID NO: 1224340 - DNA, 15 bp, Homo sapiens
ctcctcagcctctgg

SEQ ID NO: 1224341 - DNA, 15 bp, Homo sapiens
cctcctcagcctctg

SEQ ID NO: 1224342 - DNA, 15 bp, Homo sapiens
tcctcctcagcctct

SEQ ID NO: 1224343 - DNA, 15 bp, Homo sapiens
ctcctcctcagcctc

SEQ ID NO: 1224344 - DNA, 15 bp, Homo sapiens
tctcctcctcagcct

SEQ ID NO: 1224345 - DNA, 15 bp, Homo sapiens
ttctcctcctcagcc

SEQ ID NO: 1224346 - DNA, 15 bp, Homo sapiens
attctcctcctcagc

SEQ ID NO: 1224347 - DNA, 15 bp, Homo sapiens
cattctcctcctcag

SEQ ID NO: 1224348 - DNA, 15 bp, Homo sapiens
ccattctcctcctca

SEQ ID NO: 1224349 - DNA, 15 bp, Homo sapiens
gccattctcctcctc

SEQ ID NO: 1224350 - DNA, 15 bp, Homo sapiens
agccattctcctcct

SEQ ID NO: 1224351 - DNA, 15 bp, Homo sapiens
aagccattctcctcc

SEQ ID NO: 1224352 - DNA, 15 bp, Homo sapiens
caagccattctcctc

SEQ ID NO: 1224353 - DNA, 15 bp, Homo sapiens
tcaagccattctcct

SEQ ID NO: 1224354 - DNA, 15 bp, Homo sapiens
ttcaagccattctcc

SEQ ID NO: 1224355 - DNA, 15 bp, Homo sapiens
gttcaagccattctc

SEQ ID NO: 1224356 - DNA, 15 bp, Homo sapiens
tgggttcaagccatt

SEQ ID NO: 1224357 - DNA, 15 bp, Homo sapiens
ctgggttcaagccat

SEQ ID NO: 1224358 - DNA, 15 bp, Homo sapiens
cctgggttcaagcca

SEQ ID NO: 1224359 - DNA, 15 bp, Homo sapiens
tcctgggttcaagcc

SEQ ID NO: 1224360 - DNA, 15 bp, Homo sapiens
cgcttcctgggttca

SEQ ID NO: 1224361 - DNA, 15 bp, Homo sapiens
ccgcttcctgggttc

SEQ ID NO: 1224362 - DNA, 15 bp, Homo sapiens
tccgcttcctgggtt

SEQ ID NO: 1224363 - DNA, 15 bp, Homo sapiens
ctccgcttcctgggt

SEQ ID NO: 1224364 - DNA, 15 bp, Homo sapiens
cctccgcttcctggg

SEQ ID NO: 1224365 - DNA, 15 bp, Homo sapiens
acctccgcttcctgg

SEQ ID NO: 1224366 - DNA, 15 bp, Homo sapiens
aacctccgcttcctg

SEQ ID NO: 1224367 - DNA, 15 bp, Homo sapiens
caacctccgcttcct

SEQ ID NO: 1224368 - DNA, 15 bp, Homo sapiens
tcgatcttggctcac

SEQ ID NO: 1224369 - DNA, 15 bp, Homo sapiens
ctcgatcttggctca

SEQ ID NO: 1224370 - DNA, 15 bp, Homo sapiens
gctcgatcttggctc

SEQ ID NO: 1224371 - DNA, 15 bp, Homo sapiens
ggctcgatcttggct

SEQ ID NO: 1224372 - DNA, 15 bp, Homo sapiens
tggctcgatcttggc

SEQ ID NO: 1224373 - DNA, 15 bp, Homo sapiens
gtggctcgatcttgg

SEQ ID NO: 1224374 - DNA, 15 bp, Homo sapiens
agtggctcgatcttg

SEQ ID NO: 1224375 - DNA, 15 bp, Homo sapiens
cagtggctcgatctt

SEQ ID NO: 1224376 - DNA, 15 bp, Homo sapiens
gcagtggctcgatct

SEQ ID NO: 1224377 - DNA, 15 bp, Homo sapiens
tccaaactggagtgc

SEQ ID NO: 1224378 - DNA, 15 bp, Homo sapiens
gtccaaactggagtg

SEQ ID NO: 1224379 - DNA, 15 bp, Homo sapiens
cgtccaaactggagt

SEQ ID NO: 1224380 - DNA, 15 bp, Homo sapiens
tcgtccaaactggag

SEQ ID NO: 1224381 - DNA, 15 bp, Homo sapiens
gtcgtccaaactgga

SEQ ID NO: 1224382 - DNA, 15 bp, Homo sapiens
tgtcgtccaaactgg

SEQ ID NO: 1224383 - DNA, 15 bp, Homo sapiens
ctgtcgtccaaactg

SEQ ID NO: 1224384 - DNA, 15 bp, Homo sapiens
tctgtcgtccaaact

SEQ ID NO: 1224385 - DNA, 15 bp, Homo sapiens
ctctgtcgtccaaac

SEQ ID NO: 1224386 - DNA, 15 bp, Homo sapiens
gctctgtcgtccaaa

SEQ ID NO: 1224387 - DNA, 15 bp, Homo sapiens
agctctgtcgtccaa

SEQ ID NO: 1224388 - DNA, 15 bp, Homo sapiens
tagctctgtcgtcca

SEQ ID NO: 1224389 - DNA, 15 bp, Homo sapiens
ctagctctgtcgtcc

SEQ ID NO: 1224390 - DNA, 15 bp, Homo sapiens
tctagctctgtcgtc

SEQ ID NO: 1224391 - DNA, 15 bp, Homo sapiens
gtctagctctgtcgt

SEQ ID NO: 1224392 - DNA, 15 bp, Homo sapiens
agtctagctctgtcg

SEQ ID NO: 1224393 - DNA, 15 bp, Homo sapiens
gagtctagctctgtc

SEQ ID NO: 1224394 - DNA, 15 bp, Homo sapiens
ggagtctagctctgt

SEQ ID NO: 1224395 - DNA, 15 bp, Homo sapiens
tggagtctagctctg

SEQ ID NO: 1224396 - DNA, 15 bp, Homo sapiens
atggagtctagctct

SEQ ID NO: 1224397 - DNA, 15 bp, Homo sapiens
gatggagtctagctc

SEQ ID NO: 1224398 - DNA, 15 bp, Homo sapiens
agatggagtctagct

SEQ ID NO: 1224399 - DNA, 15 bp, Homo sapiens
tagatggagtctagc

SEQ ID NO: 1224400 - DNA, 15 bp, Homo sapiens
ttagatggagtctag

SEQ ID NO: 1224401 - DNA, 15 bp, Homo sapiens
tttagatggagtcta

SEQ ID NO: 1224402 - DNA, 15 bp, Homo sapiens
ttttagatggagtct

SEQ ID NO: 1224403 - DNA, 15 bp, Homo sapiens
tttttagatggagtc

SEQ ID NO: 1224404 - DNA, 15 bp, Homo sapiens
atttttttttagatg

SEQ ID NO: 1224405 - DNA, 15 bp, Homo sapiens
aatttttttttagat

SEQ ID NO: 1224406 - DNA, 15 bp, Homo sapiens
aaatttttttttaga

SEQ ID NO: 1224407 - DNA, 15 bp, Homo sapiens
gaaatttttttttag

SEQ ID NO: 1224408 - DNA, 15 bp, Homo sapiens
ggaaattttttttta

SEQ ID NO: 1224409 - DNA, 15 bp, Homo sapiens
aggaaattttttttt

SEQ ID NO: 1224410 - DNA, 15 bp, Homo sapiens
taggaaatttttttt

SEQ ID NO: 1224411 - DNA, 15 bp, Homo sapiens
ttaggaaattttttt

SEQ ID NO: 1224412 - DNA, 15 bp, Homo sapiens
gttaggaaatttttt

SEQ ID NO: 1224413 - DNA, 15 bp, Homo sapiens
ggttaggaaattttt

SEQ ID NO: 1224414 - DNA, 15 bp, Homo sapiens
gggttaggaaatttt

SEQ ID NO: 1224415 - DNA, 15 bp, Homo sapiens
ggggttaggaaattt

SEQ ID NO: 1224416 - DNA, 15 bp, Homo sapiens
gggggttaggaaatt

SEQ ID NO: 1224417 - DNA, 15 bp, Homo sapiens
tgggggttaggaaat

SEQ ID NO: 1224418 - DNA, 15 bp, Homo sapiens
atgggggttaggaaa

SEQ ID NO: 1224419 - DNA, 15 bp, Homo sapiens
aatgggggttaggaa

SEQ ID NO: 1224420 - DNA, 15 bp, Homo sapiens
caatgggggttagga

SEQ ID NO: 1224421 - DNA, 15 bp, Homo sapiens
acaatgggggttagg

SEQ ID NO: 1224422 - DNA, 15 bp, Homo sapiens
cacaatgggggttag

SEQ ID NO: 1224423 - DNA, 15 bp, Homo sapiens
tcacaatgggggtta

SEQ ID NO: 1224424 - DNA, 15 bp, Homo sapiens
atcacaatgggggtt

SEQ ID NO: 1224425 - DNA, 15 bp, Homo sapiens
catcacaatgggggt

SEQ ID NO: 1224426 - DNA, 15 bp, Homo sapiens
tcatcacaatggggg

SEQ ID NO: 1224427 - DNA, 15 bp, Homo sapiens
atcatcacaatgggg

SEQ ID NO: 1224428 - DNA, 15 bp, Homo sapiens
tatcatcacaatggg

SEQ ID NO: 1224429 - DNA, 15 bp, Homo sapiens
ttatcatcacaatgg

SEQ ID NO: 1224430 - DNA, 15 bp, Homo sapiens
attatcatcacaatg

SEQ ID NO: 1224431 - DNA, 15 bp, Homo sapiens
tattatcatcacaat

SEQ ID NO: 1224432 - DNA, 15 bp, Homo sapiens
ctattatcatcacaa

SEQ ID NO: 1224433 - DNA, 15 bp, Homo sapiens
cctattatcatcaca

SEQ ID NO: 1224434 - DNA, 15 bp, Homo sapiens
tcctattatcatcac

SEQ ID NO: 1224435 - DNA, 15 bp, Homo sapiens
ctcctattatcatca

SEQ ID NO: 1224436 - DNA, 15 bp, Homo sapiens
tctcctattatcatc

SEQ ID NO: 1224437 - DNA, 15 bp, Homo sapiens
atctcctattatcat

SEQ ID NO: 1224438 - DNA, 15 bp, Homo sapiens
tatctcctattatca

SEQ ID NO: 1224439 - DNA, 15 bp, Homo sapiens
ctatctcctattatc

SEQ ID NO: 1224440 - DNA, 15 bp, Homo sapiens
cctatctcctattat

SEQ ID NO: 1224441 - DNA, 15 bp, Homo sapiens
ccctatctcctatta

SEQ ID NO: 1224442 - DNA, 15 bp, Homo sapiens
gccctatctcctatt

SEQ ID NO: 1224443 - DNA, 15 bp, Homo sapiens
ggccctatctcctat

SEQ ID NO: 1224444 - DNA, 15 bp, Homo sapiens
aggccctatctccta

SEQ ID NO: 1224445 - DNA, 15 bp, Homo sapiens
aaggccctatctcct

SEQ ID NO: 1224446 - DNA, 15 bp, Homo sapiens
aaaggccctatctcc

SEQ ID NO: 1224447 - DNA, 15 bp, Homo sapiens
caaaggccctatctc

SEQ ID NO: 1224448 - DNA, 15 bp, Homo sapiens
ccaaaggccctatct

SEQ ID NO: 1224449 - DNA, 15 bp, Homo sapiens
cccaaaggccctatc

SEQ ID NO: 1224450 - DNA, 15 bp, Homo sapiens
tcccaaaggccctat

SEQ ID NO: 1224451 - DNA, 15 bp, Homo sapiens
ctcccaaaggcccta

SEQ ID NO: 1224452 - DNA, 15 bp, Homo sapiens
cctcccaaaggccct

SEQ ID NO: 1224453 - DNA, 15 bp, Homo sapiens
taatcacctcccaaa

SEQ ID NO: 1224454 - DNA, 15 bp, Homo sapiens
ctaatcacctcccaa

SEQ ID NO: 1224455 - DNA, 15 bp, Homo sapiens
cctaatcacctccca

SEQ ID NO: 1224456 - DNA, 15 bp, Homo sapiens
gcctaatcacctccc

SEQ ID NO: 1224457 - DNA, 15 bp, Homo sapiens
tgcctaatcacctcc

SEQ ID NO: 1224458 - DNA, 15 bp, Homo sapiens
ctgcctaatcacctc

SEQ ID NO: 1224459 - DNA, 15 bp, Homo sapiens
actgcctaatcacct

SEQ ID NO: 1224460 - DNA, 15 bp, Homo sapiens
tactgcctaatcacc

SEQ ID NO: 1224461 - DNA, 15 bp, Homo sapiens
ttactgcctaatcac

SEQ ID NO: 1224462 - DNA, 15 bp, Homo sapiens
cttactgcctaatca

SEQ ID NO: 1224463 - DNA, 15 bp, Homo sapiens
tcttactgcctaatc

SEQ ID NO: 1224464 - DNA, 15 bp, Homo sapiens
ctcttactgcctaat

SEQ ID NO: 1224465 - DNA, 15 bp, Homo sapiens
actcttactgcctaa

SEQ ID NO: 1224466 - DNA, 15 bp, Homo sapiens
cactcttactgccta

SEQ ID NO: 1224467 - DNA, 15 bp, Homo sapiens
gccactcttactgcc

SEQ ID NO: 1224468 - DNA, 15 bp, Homo sapiens
tgccactcttactgc

SEQ ID NO: 1224469 - DNA, 15 bp, Homo sapiens
atgccactcttactg

SEQ ID NO: 1224470 - DNA, 15 bp, Homo sapiens
gatgccactcttact

SEQ ID NO: 1224471 - DNA, 15 bp, Homo sapiens
agatgccactcttac

SEQ ID NO: 1224472 - DNA, 15 bp, Homo sapiens
aagatgccactctta

SEQ ID NO: 1224473 - DNA, 15 bp, Homo sapiens
taagatgccactctt

SEQ ID NO: 1224474 - DNA, 15 bp, Homo sapiens
ataagatgccactct

SEQ ID NO: 1224475 - DNA, 15 bp, Homo sapiens
tataagatgccactc

SEQ ID NO: 1224476 - DNA, 15 bp, Homo sapiens
ttataagatgccact

SEQ ID NO: 1224477 - DNA, 15 bp, Homo sapiens
tttataagatgccac

SEQ ID NO: 1224478 - DNA, 15 bp, Homo sapiens
atttataagatgcca

SEQ ID NO: 1224479 - DNA, 15 bp, Homo sapiens
catttataagatgcc

SEQ ID NO: 1224480 - DNA, 15 bp, Homo sapiens
tcatttataagatgc

SEQ ID NO: 1224481 - DNA, 15 bp, Homo sapiens
ctcatttataagatg

SEQ ID NO: 1224482 - DNA, 15 bp, Homo sapiens
tctcatttataagat

SEQ ID NO: 1224483 - DNA, 15 bp, Homo sapiens
atctcatttataaga

SEQ ID NO: 1224484 - DNA, 15 bp, Homo sapiens
aatctcatttataag

SEQ ID NO: 1224485 - DNA, 15 bp, Homo sapiens
taatctcatttataa

SEQ ID NO: 1224486 - DNA, 15 bp, Homo sapiens
ctaatctcatttata

SEQ ID NO: 1224487 - DNA, 15 bp, Homo sapiens
actaatctcatttat

SEQ ID NO: 1224488 - DNA, 15 bp, Homo sapiens
cactaatctcattta

SEQ ID NO: 1224489 - DNA, 15 bp, Homo sapiens
acactaatctcattt

SEQ ID NO: 1224490 - DNA, 15 bp, Homo sapiens
tacactaatctcatt

SEQ ID NO: 1224491 - DNA, 15 bp, Homo sapiens
gtacactaatctcat

SEQ ID NO: 1224492 - DNA, 15 bp, Homo sapiens
agtacactaatctca

SEQ ID NO: 1224493 - DNA, 15 bp, Homo sapiens
aagtacactaatctc

SEQ ID NO: 1224494 - DNA, 15 bp, Homo sapiens
taagtacactaatct

SEQ ID NO: 1224495 - DNA, 15 bp, Homo sapiens
ataagtacactaatc

SEQ ID NO: 1224496 - DNA, 15 bp, Homo sapiens
tataagtacactaat

SEQ ID NO: 1224497 - DNA, 15 bp, Homo sapiens
ttataagtacactaa

SEQ ID NO: 1224498 - DNA, 15 bp, Homo sapiens
tttataagtacacta

SEQ ID NO: 1224499 - DNA, 15 bp, Homo sapiens
ttttataagtacact

SEQ ID NO: 1224500 - DNA, 15 bp, Homo sapiens
cttttataagtacac

SEQ ID NO: 1224501 - DNA, 15 bp, Homo sapiens
tcttttataagtaca

SEQ ID NO: 1224502 - DNA, 15 bp, Homo sapiens
ctcttttataagtac

SEQ ID NO: 1224503 - DNA, 15 bp, Homo sapiens
tctcttttataagta

SEQ ID NO: 1224504 - DNA, 15 bp, Homo sapiens
gtctcttttataagt

SEQ ID NO: 1224505 - DNA, 15 bp, Homo sapiens
tgtctcttttataag

SEQ ID NO: 1224506 - DNA, 15 bp, Homo sapiens
ctgtctcttttataa

SEQ ID NO: 1224507 - DNA, 15 bp, Homo sapiens
actgtctcttttata

SEQ ID NO: 1224508 - DNA, 15 bp, Homo sapiens
cactgtctcttttat

SEQ ID NO: 1224509 - DNA, 15 bp, Homo sapiens
acactgtctctttta

SEQ ID NO: 1224510 - DNA, 15 bp, Homo sapiens
tacactgtctctttt

SEQ ID NO: 1224511 - DNA, 15 bp, Homo sapiens
ctacactgtctcttt

SEQ ID NO: 1224512 - DNA, 15 bp, Homo sapiens
tctacactgtctctt

SEQ ID NO: 1224513 - DNA, 15 bp, Homo sapiens
ctctacactgtctct

SEQ ID NO: 1224514 - DNA, 15 bp, Homo sapiens
gctctacactgtctc

SEQ ID NO: 1224515 - DNA, 15 bp, Homo sapiens
agctctacactgtct

SEQ ID NO: 1224516 - DNA, 15 bp, Homo sapiens
gagctctacactgtc

SEQ ID NO: 1224517 - DNA, 15 bp, Homo sapiens
agagctctacactgt

SEQ ID NO: 1224518 - DNA, 15 bp, Homo sapiens
gagagctctacactg

SEQ ID NO: 1224519 - DNA, 15 bp, Homo sapiens
agagagctctacact

SEQ ID NO: 1224520 - DNA, 15 bp, Homo sapiens
gagagagctctacac

SEQ ID NO: 1224521 - DNA, 15 bp, Homo sapiens
ggagagagctctaca

SEQ ID NO: 1224522 - DNA, 15 bp, Homo sapiens
gggagagagctctac

SEQ ID NO: 1224523 - DNA, 15 bp, Homo sapiens
ggggagagagctcta

SEQ ID NO: 1224524 - DNA, 15 bp, Homo sapiens
cggggagagagctct

SEQ ID NO: 1224525 - DNA, 15 bp, Homo sapiens
tcggggagagagctc

SEQ ID NO: 1224526 - DNA, 15 bp, Homo sapiens
atcggggagagagct

SEQ ID NO: 1224527 - DNA, 15 bp, Homo sapiens
aatcggggagagagc

SEQ ID NO: 1224528 - DNA, 15 bp, Homo sapiens
aaatcggggagagag

SEQ ID NO: 1224529 - DNA, 15 bp, Homo sapiens
aaaatcggggagaga

SEQ ID NO: 1224530 - DNA, 15 bp, Homo sapiens
taaaatcggggagag

SEQ ID NO: 1224531 - DNA, 15 bp, Homo sapiens
ctaaaatcggggaga

SEQ ID NO: 1224532 - DNA, 15 bp, Homo sapiens
actaaaatcggggag

SEQ ID NO: 1224533 - DNA, 15 bp, Homo sapiens
gactaaaatcgggga

SEQ ID NO: 1224534 - DNA, 15 bp, Homo sapiens
tgactaaaatcgggg

SEQ ID NO: 1224535 - DNA, 15 bp, Homo sapiens
gtgactaaaatcggg

SEQ ID NO: 1224536 - DNA, 15 bp, Homo sapiens
ggtgactaaaatcgg

SEQ ID NO: 1224537 - DNA, 15 bp, Homo sapiens
aggtgactaaaatcg

SEQ ID NO: 1224538 - DNA, 15 bp, Homo sapiens
caggtgactaaaatc

SEQ ID NO: 1224539 - DNA, 15 bp, Homo sapiens
acaggtgactaaaat

SEQ ID NO: 1224540 - DNA, 15 bp, Homo sapiens
cacaggtgactaaaa

SEQ ID NO: 1224541 - DNA, 15 bp, Homo sapiens
tcacaggtgactaaa

SEQ ID NO: 1224542 - DNA, 15 bp, Homo sapiens
ttcacaggtgactaa

SEQ ID NO: 1224543 - DNA, 15 bp, Homo sapiens
gttcacaggtgacta

SEQ ID NO: 1224544 - DNA, 15 bp, Homo sapiens
ggttcacaggtgact

SEQ ID NO: 1224545 - DNA, 15 bp, Homo sapiens
tggttcacaggtgac

SEQ ID NO: 1224546 - DNA, 15 bp, Homo sapiens
ctggttcacaggtga

SEQ ID NO: 1224547 - DNA, 15 bp, Homo sapiens
cctggttcacaggtg

SEQ ID NO: 1224548 - DNA, 15 bp, Homo sapiens
tcctggttcacaggt

SEQ ID NO: 1224549 - DNA, 15 bp, Homo sapiens
ttcctggttcacagg

SEQ ID NO: 1224550 - DNA, 15 bp, Homo sapiens
cttcctggttcacag

SEQ ID NO: 1224551 - DNA, 15 bp, Homo sapiens
gcttcctggttcaca

SEQ ID NO: 1224552 - DNA, 15 bp, Homo sapiens
tgcttcctggttcac

SEQ ID NO: 1224553 - DNA, 15 bp, Homo sapiens
atgcttcctggttca

SEQ ID NO: 1224554 - DNA, 15 bp, Homo sapiens
catgcttcctggttc

SEQ ID NO: 1224555 - DNA, 15 bp, Homo sapiens
gcatgcttcctggtt

SEQ ID NO: 1224556 - DNA, 15 bp, Homo sapiens
ggcatgcttcctggt

SEQ ID NO: 1224557 - DNA, 15 bp, Homo sapiens
gggcatgcttcctgg

SEQ ID NO: 1224558 - DNA, 15 bp, Homo sapiens
agggcatgcttcctg

SEQ ID NO: 1224559 - DNA, 15 bp, Homo sapiens
gagggcatgcttcct

SEQ ID NO: 1224560 - DNA, 15 bp, Homo sapiens
ggagggcatgcttcc

SEQ ID NO: 1224561 - DNA, 15 bp, Homo sapiens
gggagggcatgcttc

SEQ ID NO: 1224562 - DNA, 15 bp, Homo sapiens
ggggagggcatgctt

SEQ ID NO: 1224563 - DNA, 15 bp, Homo sapiens
tggggagggcatgct

SEQ ID NO: 1224564 - DNA, 15 bp, Homo sapiens
ctggggagggcatgc

SEQ ID NO: 1224565 - DNA, 15 bp, Homo sapiens
tctggggagggcatg

SEQ ID NO: 1224566 - DNA, 15 bp, Homo sapiens
gtctggggagggcat

SEQ ID NO: 1224567 - DNA, 15 bp, Homo sapiens
tgtctggggagggca

SEQ ID NO: 1224568 - DNA, 15 bp, Homo sapiens
ctgtctggggagggc

SEQ ID NO: 1224569 - DNA, 15 bp, Homo sapiens
actgtctggggaggg

SEQ ID NO: 1224570 - DNA, 15 bp, Homo sapiens
cactgtctggggagg

SEQ ID NO: 1224571 - DNA, 15 bp, Homo sapiens
tcactgtctggggag

SEQ ID NO: 1224572 - DNA, 15 bp, Homo sapiens
ttcactgtctgggga

SEQ ID NO: 1224573 - DNA, 15 bp, Homo sapiens
attcactgtctgggg

SEQ ID NO: 1224574 - DNA, 15 bp, Homo sapiens
aattcactgtctggg

SEQ ID NO: 1224575 - DNA, 15 bp, Homo sapiens
aaattcactgtctgg

SEQ ID NO: 1224576 - DNA, 15 bp, Homo sapiens
caaattcactgtctg

SEQ ID NO: 1224577 - DNA, 15 bp, Homo sapiens
gcaaattcactgtct

SEQ ID NO: 1224578 - DNA, 15 bp, Homo sapiens
agcaaattcactgtc

SEQ ID NO: 1224579 - DNA, 15 bp, Homo sapiens
cagcaaattcactgt

SEQ ID NO: 1224580 - DNA, 15 bp, Homo sapiens
ccagcaaattcactg

SEQ ID NO: 1224581 - DNA, 15 bp, Homo sapiens
tccagcaaattcact

SEQ ID NO: 1224582 - DNA, 15 bp, Homo sapiens
ctccagcaaattcac

SEQ ID NO: 1224583 - DNA, 15 bp, Homo sapiens
gctccagcaaattca

SEQ ID NO: 1224584 - DNA, 15 bp, Homo sapiens
ggctccagcaaattc

SEQ ID NO: 1224585 - DNA, 15 bp, Homo sapiens
aggctccagcaaatt

SEQ ID NO: 1224586 - DNA, 15 bp, Homo sapiens
aaggctccagcaaat

SEQ ID NO: 1224587 - DNA, 15 bp, Homo sapiens
caaggctccagcaaa

SEQ ID NO: 1224588 - DNA, 15 bp, Homo sapiens
tcaaggctccagcaa

SEQ ID NO: 1224589 - DNA, 15 bp, Homo sapiens
atcaaggctccagca

SEQ ID NO: 1224590 - DNA, 15 bp, Homo sapiens
gatcaaggctccagc

SEQ ID NO: 1224591 - DNA, 15 bp, Homo sapiens
agatcaaggctccag

SEQ ID NO: 1224592 - DNA, 15 bp, Homo sapiens
aagatcaaggctcca

SEQ ID NO: 1224593 - DNA, 15 bp, Homo sapiens
caagatcaaggctcc

SEQ ID NO: 1224594 - DNA, 15 bp, Homo sapiens
ccaagatcaaggctc

SEQ ID NO: 1224595 - DNA, 15 bp, Homo sapiens
tccaagatcaaggct

SEQ ID NO: 1224596 - DNA, 15 bp, Homo sapiens
gtccaagatcaaggc

SEQ ID NO: 1224597 - DNA, 15 bp, Homo sapiens
agtccaagatcaagg

SEQ ID NO: 1224598 - DNA, 15 bp, Homo sapiens
aagtccaagatcaag

SEQ ID NO: 1224599 - DNA, 15 bp, Homo sapiens
gaagtccaagatcaa

SEQ ID NO: 1224600 - DNA, 15 bp, Homo sapiens
ggaagtccaagatca

SEQ ID NO: 1224601 - DNA, 15 bp, Homo sapiens
gggaagtccaagatc

SEQ ID NO: 1224602 - DNA, 15 bp, Homo sapiens
tgggaagtccaagat

SEQ ID NO: 1224603 - DNA, 15 bp, Homo sapiens
ctgggaagtccaaga

SEQ ID NO: 1224604 - DNA, 15 bp, Homo sapiens
actgggaagtccaag

SEQ ID NO: 1224605 - DNA, 15 bp, Homo sapiens
gactgggaagtccaa

SEQ ID NO: 1224606 - DNA, 15 bp, Homo sapiens
tgactgggaagtcca

SEQ ID NO: 1224607 - DNA, 15 bp, Homo sapiens
gtgactgggaagtcc

SEQ ID NO: 1224608 - DNA, 15 bp, Homo sapiens
ggtgactgggaagtc

SEQ ID NO: 1224609 - DNA, 15 bp, Homo sapiens
gggtgactgggaagt

SEQ ID NO: 1224610 - DNA, 15 bp, Homo sapiens
tgggtgactgggaag

SEQ ID NO: 1224611 - DNA, 15 bp, Homo sapiens
ctgggtgactgggaa

SEQ ID NO: 1224612 - DNA, 15 bp, Homo sapiens
tctgggtgactggga

SEQ ID NO: 1224613 - DNA, 15 bp, Homo sapiens
ttctgggtgactggg

SEQ ID NO: 1224614 - DNA, 15 bp, Homo sapiens
gttctgggtgactgg

SEQ ID NO: 1224615 - DNA, 15 bp, Homo sapiens
tgttctgggtgactg

SEQ ID NO: 1224616 - DNA, 15 bp, Homo sapiens
gtgttctgggtgact

SEQ ID NO: 1224617 - DNA, 15 bp, Homo sapiens
cgtgttctgggtgac

SEQ ID NO: 1224618 - DNA, 15 bp, Homo sapiens
acgtgttctgggtga

SEQ ID NO: 1224619 - DNA, 15 bp, Homo sapiens
cacgtgttctgggtg

SEQ ID NO: 1224620 - DNA, 15 bp, Homo sapiens
acacgtgttctgggt

SEQ ID NO: 1224621 - DNA, 15 bp, Homo sapiens
aacacgtgttctggg

SEQ ID NO: 1224622 - DNA, 15 bp, Homo sapiens
caacacgtgttctgg

SEQ ID NO: 1224623 - DNA, 15 bp, Homo sapiens
ccaacacgtgttctg

SEQ ID NO: 1224624 - DNA, 15 bp, Homo sapiens
accaacacgtgttct

SEQ ID NO: 1224625 - DNA, 15 bp, Homo sapiens
caccaacacgtgttc

SEQ ID NO: 1224626 - DNA, 15 bp, Homo sapiens
tcaccaacacgtgtt

SEQ ID NO: 1224627 - DNA, 15 bp, Homo sapiens
ctcaccaacacgtgt

SEQ ID NO: 1224628 - DNA, 15 bp, Homo sapiens
cctcaccaacacgtg

SEQ ID NO: 1224629 - DNA, 15 bp, Homo sapiens
tcctcaccaacacgt

SEQ ID NO: 1224630 - DNA, 15 bp, Homo sapiens
atcctcaccaacacg

SEQ ID NO: 1224631 - DNA, 15 bp, Homo sapiens
catcctcaccaacac

SEQ ID NO: 1224632 - DNA, 15 bp, Homo sapiens
acatcctcaccaaca

SEQ ID NO: 1224633 - DNA, 15 bp, Homo sapiens
cacatcctcaccaac

SEQ ID NO: 1224634 - DNA, 15 bp, Homo sapiens
ccacatcctcaccaa

SEQ ID NO: 1224635 - DNA, 15 bp, Homo sapiens
tccacatcctcacca

SEQ ID NO: 1224636 - DNA, 15 bp, Homo sapiens
ctccacatcctcacc

SEQ ID NO: 1224637 - DNA, 15 bp, Homo sapiens
tctccacatcctcac

SEQ ID NO: 1224638 - DNA, 15 bp, Homo sapiens
ttctccacatcctca

SEQ ID NO: 1224639 - DNA, 15 bp, Homo sapiens
tttctccacatcctc

SEQ ID NO: 1224640 - DNA, 15 bp, Homo sapiens
ttttctccacatcct

SEQ ID NO: 1224641 - DNA, 15 bp, Homo sapiens
cttttctccacatcc

SEQ ID NO: 1224642 - DNA, 15 bp, Homo sapiens
tcttttctccacatc

SEQ ID NO: 1224643 - DNA, 15 bp, Homo sapiens
ctcttttctccacat

SEQ ID NO: 1224644 - DNA, 15 bp, Homo sapiens
tctcttttctccaca

SEQ ID NO: 1224645 - DNA, 15 bp, Homo sapiens
ttctcttttctccac

SEQ ID NO: 1224646 - DNA, 15 bp, Homo sapiens
tttctcttttctcca

SEQ ID NO: 1224647 - DNA, 15 bp, Homo sapiens
ctttctcttttctcc

SEQ ID NO: 1224648 - DNA, 15 bp, Homo sapiens
actttctcttttctc

SEQ ID NO: 1224649 - DNA, 15 bp, Homo sapiens
aactttctcttttct

SEQ ID NO: 1224650 - DNA, 15 bp, Homo sapiens
aaactttctcttttc

SEQ ID NO: 1224651 - DNA, 15 bp, Homo sapiens
aaaactttctctttt

SEQ ID NO: 1224652 - DNA, 15 bp, Homo sapiens
aaaaactttctcttt

SEQ ID NO: 1224653 - DNA, 15 bp, Homo sapiens
taaaaactttctctt

SEQ ID NO: 1224654 - DNA, 15 bp, Homo sapiens
gtaaaaactttctct

SEQ ID NO: 1224655 - DNA, 15 bp, Homo sapiens
tgtaaaaactttctc

SEQ ID NO: 1224656 - DNA, 15 bp, Homo sapiens
atgtaaaaactttct

SEQ ID NO: 1224657 - DNA, 15 bp, Homo sapiens
aatgtaaaaactttc

SEQ ID NO: 1224658 - DNA, 15 bp, Homo sapiens
caatgtaaaaacttt

SEQ ID NO: 1224659 - DNA, 15 bp, Homo sapiens
tcaatgtaaaaactt

SEQ ID NO: 1224660 - DNA, 15 bp, Homo sapiens
atcaatgtaaaaact

SEQ ID NO: 1224661 - DNA, 15 bp, Homo sapiens
catcaatgtaaaaac

SEQ ID NO: 1224662 - DNA, 15 bp, Homo sapiens
ccatcaatgtaaaaa

SEQ ID NO: 1224663 - DNA, 15 bp, Homo sapiens
cccatcaatgtaaaa

SEQ ID NO: 1224664 - DNA, 15 bp, Homo sapiens
tcccatcaatgtaaa

SEQ ID NO: 1224665 - DNA, 15 bp, Homo sapiens
ttcccatcaatgtaa

SEQ ID NO: 1224666 - DNA, 15 bp, Homo sapiens
cttcccatcaatgta

SEQ ID NO: 1224667 - DNA, 15 bp, Homo sapiens
gcttcccatcaatgt

SEQ ID NO: 1224668 - DNA, 15 bp, Homo sapiens
agcttcccatcaatg

SEQ ID NO: 1224669 - DNA, 15 bp, Homo sapiens
tagcttcccatcaat

SEQ ID NO: 1224670 - DNA, 15 bp, Homo sapiens
ttagcttcccatcaa

SEQ ID NO: 1224671 - DNA, 15 bp, Homo sapiens
cttagcttcccatca

SEQ ID NO: 1224672 - DNA, 15 bp, Homo sapiens
acttagcttcccatc

SEQ ID NO: 1224673 - DNA, 15 bp, Homo sapiens
aacttagcttcccat

SEQ ID NO: 1224674 - DNA, 15 bp, Homo sapiens
caacttagcttccca

SEQ ID NO: 1224675 - DNA, 15 bp, Homo sapiens
ccaacttagcttccc

SEQ ID NO: 1224676 - DNA, 15 bp, Homo sapiens
accaacttagcttcc

SEQ ID NO: 1224677 - DNA, 15 bp, Homo sapiens
caccaacttagcttc

SEQ ID NO: 1224678 - DNA, 15 bp, Homo sapiens
gcaccaacttagctt

SEQ ID NO: 1224679 - DNA, 15 bp, Homo sapiens
tgcaccaacttagct

SEQ ID NO: 1224680 - DNA, 15 bp, Homo sapiens
ctgcaccaacttagc

SEQ ID NO: 1224681 - DNA, 15 bp, Homo sapiens
actgcaccaacttag

SEQ ID NO: 1224682 - DNA, 15 bp, Homo sapiens
gactgcaccaactta

SEQ ID NO: 1224683 - DNA, 15 bp, Homo sapiens
tgactgcaccaactt

SEQ ID NO: 1224684 - DNA, 15 bp, Homo sapiens
atgactgcaccaact

SEQ ID NO: 1224685 - DNA, 15 bp, Homo sapiens
aatgactgcaccaac

SEQ ID NO: 1224686 - DNA, 15 bp, Homo sapiens
taatgactgcaccaa

SEQ ID NO: 1224687 - DNA, 15 bp, Homo sapiens
ataatgactgcacca

SEQ ID NO: 1224688 - DNA, 15 bp, Homo sapiens
cataatgactgcacc

SEQ ID NO: 1224689 - DNA, 15 bp, Homo sapiens
ccataatgactgcac

SEQ ID NO: 1224690 - DNA, 15 bp, Homo sapiens
tccataatgactgca

SEQ ID NO: 1224691 - DNA, 15 bp, Homo sapiens
ttccataatgactgc

SEQ ID NO: 1224692 - DNA, 15 bp, Homo sapiens
tttccataatgactg

SEQ ID NO: 1224693 - DNA, 15 bp, Homo sapiens
ctttccataatgact

SEQ ID NO: 1224694 - DNA, 15 bp, Homo sapiens
gctttccataatgac

SEQ ID NO: 1224695 - DNA, 15 bp, Homo sapiens
tgctttccataatga

SEQ ID NO: 1224696 - DNA, 15 bp, Homo sapiens
ctgctttccataatg

SEQ ID NO: 1224697 - DNA, 15 bp, Homo sapiens
actgctttccataat

SEQ ID NO: 1224698 - DNA, 15 bp, Homo sapiens
tactgctttccataa

SEQ ID NO: 1224699 - DNA, 15 bp, Homo sapiens
atactgctttccata

SEQ ID NO: 1224700 - DNA, 15 bp, Homo sapiens
catactgctttccat

SEQ ID NO: 1224701 - DNA, 15 bp, Homo sapiens
ccatactgctttcca

SEQ ID NO: 1224702 - DNA, 15 bp, Homo sapiens
tccatactgctttcc

SEQ ID NO: 1224703 - DNA, 15 bp, Homo sapiens
ctccatactgctttc

SEQ ID NO: 1224704 - DNA, 15 bp, Homo sapiens
tctccatactgcttt

SEQ ID NO: 1224705 - DNA, 15 bp, Homo sapiens
atctccatactgctt

SEQ ID NO: 1224706 - DNA, 15 bp, Homo sapiens
aatctccatactgct

SEQ ID NO: 1224707 - DNA, 15 bp, Homo sapiens
gaatctccatactgc

SEQ ID NO: 1224708 - DNA, 15 bp, Homo sapiens
ggaatctccatactg

SEQ ID NO: 1224709 - DNA, 15 bp, Homo sapiens
aggaatctccatact

SEQ ID NO: 1224710 - DNA, 15 bp, Homo sapiens
gaggaatctccatac

SEQ ID NO: 1224711 - DNA, 15 bp, Homo sapiens
tgaggaatctccata

SEQ ID NO: 1224712 - DNA, 15 bp, Homo sapiens
ttgaggaatctccat

SEQ ID NO: 1224713 - DNA, 15 bp, Homo sapiens
tttgaggaatctcca

SEQ ID NO: 1224714 - DNA, 15 bp, Homo sapiens
ttttgaggaatctcc

SEQ ID NO: 1224715 - DNA, 15 bp, Homo sapiens
tttttgaggaatctc

SEQ ID NO: 1224716 - DNA, 15 bp, Homo sapiens
ttttttgaggaatct

SEQ ID NO: 1224717 - DNA, 15 bp, Homo sapiens
attttttgaggaatc

SEQ ID NO: 1224718 - DNA, 15 bp, Homo sapiens
aattttttgaggaat

SEQ ID NO: 1224719 - DNA, 15 bp, Homo sapiens
taattttttgaggaa

SEQ ID NO: 1224720 - DNA, 15 bp, Homo sapiens
ttaattttttgagga

SEQ ID NO: 1224721 - DNA, 15 bp, Homo sapiens
tttaattttttgagg

SEQ ID NO: 1224722 - DNA, 15 bp, Homo sapiens
tttttaattttttga

SEQ ID NO: 1224723 - DNA, 15 bp, Homo sapiens
tgtttttaatttttt

SEQ ID NO: 1224724 - DNA, 15 bp, Homo sapiens
ctgtttttaattttt

SEQ ID NO: 1224725 - DNA, 15 bp, Homo sapiens
gttctgtttttaatt

SEQ ID NO: 1224726 - DNA, 15 bp, Homo sapiens
agttctgtttttaat

SEQ ID NO: 1224727 - DNA, 15 bp, Homo sapiens
tagttctgtttttaa

SEQ ID NO: 1224728 - DNA, 15 bp, Homo sapiens
gtagttctgttttta

SEQ ID NO: 1224729 - DNA, 15 bp, Homo sapiens
agtagttctgttttt

SEQ ID NO: 1224730 - DNA, 15 bp, Homo sapiens
cagtagttctgtttt

SEQ ID NO: 1224731 - DNA, 15 bp, Homo sapiens
acagtagttctgttt

SEQ ID NO: 1224732 - DNA, 15 bp, Homo sapiens
tacagtagttctgtt

SEQ ID NO: 1224733 - DNA, 15 bp, Homo sapiens
atacagtagttctgt

SEQ ID NO: 1224734 - DNA, 15 bp, Homo sapiens
tatacagtagttctg

SEQ ID NO: 1224735 - DNA, 15 bp, Homo sapiens
ttatacagtagttct

SEQ ID NO: 1224736 - DNA, 15 bp, Homo sapiens
attatacagtagttc

SEQ ID NO: 1224737 - DNA, 15 bp, Homo sapiens
gattatacagtagtt

SEQ ID NO: 1224738 - DNA, 15 bp, Homo sapiens
ggattatacagtagt

SEQ ID NO: 1224739 - DNA, 15 bp, Homo sapiens
tggattatacagtag

SEQ ID NO: 1224740 - DNA, 15 bp, Homo sapiens
ctggattatacagta

SEQ ID NO: 1224741 - DNA, 15 bp, Homo sapiens
gctggattatacagt

SEQ ID NO: 1224742 - DNA, 15 bp, Homo sapiens
tgctggattatacag

SEQ ID NO: 1224743 - DNA, 15 bp, Homo sapiens
ttgctggattataca

SEQ ID NO: 1224744 - DNA, 15 bp, Homo sapiens
attgctggattatac

SEQ ID NO: 1224745 - DNA, 15 bp, Homo sapiens
aattgctggattata

SEQ ID NO: 1224746 - DNA, 15 bp, Homo sapiens
gaattgctggattat

SEQ ID NO: 1224747 - DNA, 15 bp, Homo sapiens
ggaattgctggatta

SEQ ID NO: 1224748 - DNA, 15 bp, Homo sapiens
tggaattgctggatt

SEQ ID NO: 1224749 - DNA, 15 bp, Homo sapiens
ttggaattgctggat

SEQ ID NO: 1224750 - DNA, 15 bp, Homo sapiens
attggaattgctgga

SEQ ID NO: 1224751 - DNA, 15 bp, Homo sapiens
aattggaattgctgg

SEQ ID NO: 1224752 - DNA, 15 bp, Homo sapiens
gaattggaattgctg

SEQ ID NO: 1224753 - DNA, 15 bp, Homo sapiens
agaattggaattgct

SEQ ID NO: 1224754 - DNA, 15 bp, Homo sapiens
cagaattggaattgc

SEQ ID NO: 1224755 - DNA, 15 bp, Homo sapiens
ccagaattggaattg

SEQ ID NO: 1224756 - DNA, 15 bp, Homo sapiens
cccagaattggaatt

SEQ ID NO: 1224757 - DNA, 15 bp, Homo sapiens
acccagaattggaat

SEQ ID NO: 1224758 - DNA, 15 bp, Homo sapiens
tacccagaattggaa

SEQ ID NO: 1224759 - DNA, 15 bp, Homo sapiens
atacccagaattgga

SEQ ID NO: 1224760 - DNA, 15 bp, Homo sapiens
tatacccagaattgg

SEQ ID NO: 1224761 - DNA, 15 bp, Homo sapiens
atatacccagaattg

SEQ ID NO: 1224762 - DNA, 15 bp, Homo sapiens
tatatacccagaatt

SEQ ID NO: 1224763 - DNA, 15 bp, Homo sapiens
gtatatacccagaat

SEQ ID NO: 1224764 - DNA, 15 bp, Homo sapiens
ttcctttgggtatat

SEQ ID NO: 1224765 - DNA, 15 bp, Homo sapiens
tttcctttgggtata

SEQ ID NO: 1224766 - DNA, 15 bp, Homo sapiens
atttcctttgggtat

SEQ ID NO: 1224767 - DNA, 15 bp, Homo sapiens
catttcctttgggta

SEQ ID NO: 1224768 - DNA, 15 bp, Homo sapiens
tcatttcctttgggt

SEQ ID NO: 1224769 - DNA, 15 bp, Homo sapiens
ttcatttcctttggg

SEQ ID NO: 1224770 - DNA, 15 bp, Homo sapiens
cttcatttcctttgg

SEQ ID NO: 1224771 - DNA, 15 bp, Homo sapiens
gcttcatttcctttg

SEQ ID NO: 1224772 - DNA, 15 bp, Homo sapiens
ggcttcatttccttt

SEQ ID NO: 1224773 - DNA, 15 bp, Homo sapiens
tggcttcatttcctt

SEQ ID NO: 1224774 - DNA, 15 bp, Homo sapiens
ctggcttcatttcct

SEQ ID NO: 1224775 - DNA, 15 bp, Homo sapiens
gctggcttcatttcc

SEQ ID NO: 1224776 - DNA, 15 bp, Homo sapiens
ggctggcttcatttc

SEQ ID NO: 1224777 - DNA, 15 bp, Homo sapiens
gggctggcttcattt

SEQ ID NO: 1224778 - DNA, 15 bp, Homo sapiens
ggggctggcttcatt

SEQ ID NO: 1224779 - DNA, 15 bp, Homo sapiens
aggggctggcttcat

SEQ ID NO: 1224780 - DNA, 15 bp, Homo sapiens
aaggggctggcttca

SEQ ID NO: 1224781 - DNA, 15 bp, Homo sapiens
caaggggctggcttc

SEQ ID NO: 1224782 - DNA, 15 bp, Homo sapiens
acaaggggctggctt

SEQ ID NO: 1224783 - DNA, 15 bp, Homo sapiens
tacaaggggctggct

SEQ ID NO: 1224784 - DNA, 15 bp, Homo sapiens
ttacaaggggctggc

SEQ ID NO: 1224785 - DNA, 15 bp, Homo sapiens
tttacaaggggctgg

SEQ ID NO: 1224786 - DNA, 15 bp, Homo sapiens
ttttacaaggggctg

SEQ ID NO: 1224787 - DNA, 15 bp, Homo sapiens
tttttacaaggggct

SEQ ID NO: 1224788 - DNA, 15 bp, Homo sapiens
atttttacaaggggc

SEQ ID NO: 1224789 - DNA, 15 bp, Homo sapiens
tatttttacaagggg

SEQ ID NO: 1224790 - DNA, 15 bp, Homo sapiens
ttatttttacaaggg

SEQ ID NO: 1224791 - DNA, 15 bp, Homo sapiens
gttatttttacaagg

SEQ ID NO: 1224792 - DNA, 15 bp, Homo sapiens
agttatttttacaag

SEQ ID NO: 1224793 - DNA, 15 bp, Homo sapiens
cagttatttttacaa

SEQ ID NO: 1224794 - DNA, 15 bp, Homo sapiens
gcagttatttttaca

SEQ ID NO: 1224795 - DNA, 15 bp, Homo sapiens
tgcagttatttttac

SEQ ID NO: 1224796 - DNA, 15 bp, Homo sapiens
atgcagttattttta

SEQ ID NO: 1224797 - DNA, 15 bp, Homo sapiens
gatgcagttattttt

SEQ ID NO: 1224798 - DNA, 15 bp, Homo sapiens
ggatgcagttatttt

SEQ ID NO: 1224799 - DNA, 15 bp, Homo sapiens
aggatgcagttattt

SEQ ID NO: 1224800 - DNA, 15 bp, Homo sapiens
caggatgcagttatt

SEQ ID NO: 1224801 - DNA, 15 bp, Homo sapiens
ccaggatgcagttat

SEQ ID NO: 1224802 - DNA, 15 bp, Homo sapiens
gccaggatgcagtta

SEQ ID NO: 1224803 - DNA, 15 bp, Homo sapiens
agccaggatgcagtt

SEQ ID NO: 1224804 - DNA, 15 bp, Homo sapiens
cagccaggatgcagt

SEQ ID NO: 1224805 - DNA, 15 bp, Homo sapiens
ccagccaggatgcag

SEQ ID NO: 1224806 - DNA, 15 bp, Homo sapiens
cccagccaggatgca

SEQ ID NO: 1224807 - DNA, 15 bp, Homo sapiens
acccagccaggatgc

SEQ ID NO: 1224808 - DNA, 15 bp, Homo sapiens
cacccagccaggatg

SEQ ID NO: 1224809 - DNA, 15 bp, Homo sapiens
acacccagccaggat

SEQ ID NO: 1224810 - DNA, 15 bp, Homo sapiens
cacacccagccagga

SEQ ID NO: 1224811 - DNA, 15 bp, Homo sapiens
acacacccagccagg

SEQ ID NO: 1224812 - DNA, 15 bp, Homo sapiens
aacacacccagccag

SEQ ID NO: 1224813 - DNA, 15 bp, Homo sapiens
caacacacccagcca

SEQ ID NO: 1224814 - DNA, 15 bp, Homo sapiens
cccaacacacccagc

SEQ ID NO: 1224815 - DNA, 15 bp, Homo sapiens
tcccaacacacccag

SEQ ID NO: 1224816 - DNA, 15 bp, Homo sapiens
ctcccaacacaccca

SEQ ID NO: 1224817 - DNA, 15 bp, Homo sapiens
actcccaacacaccc

SEQ ID NO: 1224818 - DNA, 15 bp, Homo sapiens
gactcccaacacacc

SEQ ID NO: 1224819 - DNA, 15 bp, Homo sapiens
ggactcccaacacac

SEQ ID NO: 1224820 - DNA, 15 bp, Homo sapiens
tggactcccaacaca

SEQ ID NO: 1224821 - DNA, 15 bp, Homo sapiens
ttggactcccaacac

SEQ ID NO: 1224822 - DNA, 15 bp, Homo sapiens
cttggactcccaaca

SEQ ID NO: 1224823 - DNA, 15 bp, Homo sapiens
ccttggactcccaac

SEQ ID NO: 1224824 - DNA, 15 bp, Homo sapiens
accttggactcccaa

SEQ ID NO: 1224825 - DNA, 15 bp, Homo sapiens
caccttggactccca

SEQ ID NO: 1224826 - DNA, 15 bp, Homo sapiens
ccaccttggactccc

SEQ ID NO: 1224827 - DNA, 15 bp, Homo sapiens
cccaccttggactcc

SEQ ID NO: 1224828 - DNA, 15 bp, Homo sapiens
acccaccttggactc

SEQ ID NO: 1224829 - DNA, 15 bp, Homo sapiens
cacccaccttggact

SEQ ID NO: 1224830 - DNA, 15 bp, Homo sapiens
ccacccaccttggac

SEQ ID NO: 1224831 - DNA, 15 bp, Homo sapiens
tccacccaccttgga

SEQ ID NO: 1224832 - DNA, 15 bp, Homo sapiens
agatgatccacccac

SEQ ID NO: 1224833 - DNA, 15 bp, Homo sapiens
cagatgatccaccca

SEQ ID NO: 1224834 - DNA, 15 bp, Homo sapiens
tcagatgatccaccc

SEQ ID NO: 1224835 - DNA, 15 bp, Homo sapiens
ctcagatgatccacc

SEQ ID NO: 1224836 - DNA, 15 bp, Homo sapiens
cctcagatgatccac

SEQ ID NO: 1224837 - DNA, 15 bp, Homo sapiens
acctcagatgatcca

SEQ ID NO: 1224838 - DNA, 15 bp, Homo sapiens
gacctcagatgatcc

SEQ ID NO: 1224839 - DNA, 15 bp, Homo sapiens
tgacctcagatgatc

SEQ ID NO: 1224840 - DNA, 15 bp, Homo sapiens
ctgacctcagatgat

SEQ ID NO: 1224841 - DNA, 15 bp, Homo sapiens
cctgacctcagatga

SEQ ID NO: 1224842 - DNA, 15 bp, Homo sapiens
tcctgacctcagatg

SEQ ID NO: 1224843 - DNA, 15 bp, Homo sapiens
ctcctgacctcagat

SEQ ID NO: 1224844 - DNA, 15 bp, Homo sapiens
actcctgacctcaga

SEQ ID NO: 1224845 - DNA, 15 bp, Homo sapiens
tccaggctggtctcc

SEQ ID NO: 1224846 - DNA, 15 bp, Homo sapiens
gtccaggctggtctc

SEQ ID NO: 1224847 - DNA, 15 bp, Homo sapiens
atgtccaggctggtc

SEQ ID NO: 1224848 - DNA, 15 bp, Homo sapiens
gatgtccaggctggt

SEQ ID NO: 1224849 - DNA, 15 bp, Homo sapiens
tgatgtccaggctgg

SEQ ID NO: 1224850 - DNA, 15 bp, Homo sapiens
atgatgtccaggctg

SEQ ID NO: 1224851 - DNA, 15 bp, Homo sapiens
catgatgtccaggct

SEQ ID NO: 1224852 - DNA, 15 bp, Homo sapiens
ccatgatgtccaggc

SEQ ID NO: 1224853 - DNA, 15 bp, Homo sapiens
accatgatgtccagg

SEQ ID NO: 1224854 - DNA, 15 bp, Homo sapiens
taccatgatgtccag

SEQ ID NO: 1224855 - DNA, 15 bp, Homo sapiens
ttaccatgatgtcca

SEQ ID NO: 1224856 - DNA, 15 bp, Homo sapiens
tttaccatgatgtcc

SEQ ID NO: 1224857 - DNA, 15 bp, Homo sapiens
ttttaccatgatgtc

SEQ ID NO: 1224858 - DNA, 15 bp, Homo sapiens
gttttaccatgatgt

SEQ ID NO: 1224859 - DNA, 15 bp, Homo sapiens
ggttttaccatgatg

SEQ ID NO: 1224860 - DNA, 15 bp, Homo sapiens
gggttttaccatgat

SEQ ID NO: 1224861 - DNA, 15 bp, Homo sapiens
agggttttaccatga

SEQ ID NO: 1224862 - DNA, 15 bp, Homo sapiens
cagggttttaccatg

SEQ ID NO: 1224863 - DNA, 15 bp, Homo sapiens
acagggttttaccat

SEQ ID NO: 1224864 - DNA, 15 bp, Homo sapiens
gacagggttttacca

SEQ ID NO: 1224865 - DNA, 15 bp, Homo sapiens
agacagggttttacc

SEQ ID NO: 1224866 - DNA, 15 bp, Homo sapiens
gagacagggttttac

SEQ ID NO: 1224867 - DNA, 15 bp, Homo sapiens
agagacagggtttta

SEQ ID NO: 1224868 - DNA, 15 bp, Homo sapiens
caatttttttgtatt

SEQ ID NO: 1224869 - DNA, 15 bp, Homo sapiens
ccaatttttttgtat

SEQ ID NO: 1224870 - DNA, 15 bp, Homo sapiens
gccaatttttttgta

SEQ ID NO: 1224871 - DNA, 15 bp, Homo sapiens
agccaatttttttgt

SEQ ID NO: 1224872 - DNA, 15 bp, Homo sapiens
cagccaatttttttg

SEQ ID NO: 1224873 - DNA, 15 bp, Homo sapiens
ccagccaattttttt

SEQ ID NO: 1224874 - DNA, 15 bp, Homo sapiens
cccagccaatttttt

SEQ ID NO: 1224875 - DNA, 15 bp, Homo sapiens
acccagccaattttt

SEQ ID NO: 1224876 - DNA, 15 bp, Homo sapiens
cacccagccaatttt

SEQ ID NO: 1224877 - DNA, 15 bp, Homo sapiens
gcacccagccaattt

SEQ ID NO: 1224878 - DNA, 15 bp, Homo sapiens
cgcacccagccaatt

SEQ ID NO: 1224879 - DNA, 15 bp, Homo sapiens
ccgcacccagccaat

SEQ ID NO: 1224880 - DNA, 15 bp, Homo sapiens
accgcacccagccaa

SEQ ID NO: 1224881 - DNA, 15 bp, Homo sapiens
aagccaccgcaccca

SEQ ID NO: 1224882 - DNA, 15 bp, Homo sapiens
taagccaccgcaccc

SEQ ID NO: 1224883 - DNA, 15 bp, Homo sapiens
ataagccaccgcacc

SEQ ID NO: 1224884 - DNA, 15 bp, Homo sapiens
cataagccaccgcac

SEQ ID NO: 1224885 - DNA, 15 bp, Homo sapiens
gcataagccaccgca

SEQ ID NO: 1224886 - DNA, 15 bp, Homo sapiens
ggcataagccaccgc

SEQ ID NO: 1224887 - DNA, 15 bp, Homo sapiens
aggcataagccaccg

SEQ ID NO: 1224888 - DNA, 15 bp, Homo sapiens
taggcataagccacc

SEQ ID NO: 1224889 - DNA, 15 bp, Homo sapiens
agattataggcataa

SEQ ID NO: 1224890 - DNA, 15 bp, Homo sapiens
gagattataggcata

SEQ ID NO: 1224891 - DNA, 15 bp, Homo sapiens
ttgagattataggca

SEQ ID NO: 1224892 - DNA, 15 bp, Homo sapiens
gttgagattataggc

SEQ ID NO: 1224893 - DNA, 15 bp, Homo sapiens
tgttgagattatagg

SEQ ID NO: 1224894 - DNA, 15 bp, Homo sapiens
ttgttgagattatag

SEQ ID NO: 1224895 - DNA, 15 bp, Homo sapiens
attgttgagattata

SEQ ID NO: 1224896 - DNA, 15 bp, Homo sapiens
aattgttgagattat

SEQ ID NO: 1224897 - DNA, 15 bp, Homo sapiens
aaattgttgagatta

SEQ ID NO: 1224898 - DNA, 15 bp, Homo sapiens
caaattgttgagatt

SEQ ID NO: 1224899 - DNA, 15 bp, Homo sapiens
ccaaattgttgagat

SEQ ID NO: 1224900 - DNA, 15 bp, Homo sapiens
cccaaattgttgaga

SEQ ID NO: 1224901 - DNA, 15 bp, Homo sapiens
tcccaaattgttgag

SEQ ID NO: 1224902 - DNA, 15 bp, Homo sapiens
ctcccaaattgttga

SEQ ID NO: 1224903 - DNA, 15 bp, Homo sapiens
cctcccaaattgttg

SEQ ID NO: 1224904 - DNA, 15 bp, Homo sapiens
gcctcccaaattgtt

SEQ ID NO: 1224905 - DNA, 15 bp, Homo sapiens
agcctcccaaattgt

SEQ ID NO: 1224906 - DNA, 15 bp, Homo sapiens
cagcctcccaaattg

SEQ ID NO: 1224907 - DNA, 15 bp, Homo sapiens
tcagcctcccaaatt

SEQ ID NO: 1224908 - DNA, 15 bp, Homo sapiens
tcacctcagcctccc

SEQ ID NO: 1224909 - DNA, 15 bp, Homo sapiens
ctcacctcagcctcc

SEQ ID NO: 1224910 - DNA, 15 bp, Homo sapiens
tctcacctcagcctc

SEQ ID NO: 1224911 - DNA, 15 bp, Homo sapiens
ctctcacctcagcct

SEQ ID NO: 1224912 - DNA, 15 bp, Homo sapiens
cctctcacctcagcc

SEQ ID NO: 1224913 - DNA, 15 bp, Homo sapiens
tcctctcacctcagc

SEQ ID NO: 1224914 - DNA, 15 bp, Homo sapiens
atcctctcacctcag

SEQ ID NO: 1224915 - DNA, 15 bp, Homo sapiens
gatcctctcacctca

SEQ ID NO: 1224916 - DNA, 15 bp, Homo sapiens
tgatcctctcacctc

SEQ ID NO: 1224917 - DNA, 15 bp, Homo sapiens
ctgatcctctcacct

SEQ ID NO: 1224918 - DNA, 15 bp, Homo sapiens
gctgatcctctcacc

SEQ ID NO: 1224919 - DNA, 15 bp, Homo sapiens
agctgatcctctcac

SEQ ID NO: 1224920 - DNA, 15 bp, Homo sapiens
cagctgatcctctca

SEQ ID NO: 1224921 - DNA, 15 bp, Homo sapiens
tcagctgatcctctc

SEQ ID NO: 1224922 - DNA, 15 bp, Homo sapiens
ctcagctgatcctct

SEQ ID NO: 1224923 - DNA, 15 bp, Homo sapiens
cctcagctgatcctc

SEQ ID NO: 1224924 - DNA, 15 bp, Homo sapiens
acctcagctgatcct

SEQ ID NO: 1224925 - DNA, 15 bp, Homo sapiens
gacctcagctgatcc

SEQ ID NO: 1224926 - DNA, 15 bp, Homo sapiens
tgacctcagctgatc

SEQ ID NO: 1224927 - DNA, 15 bp, Homo sapiens
ctgacctcagctgat

SEQ ID NO: 1224928 - DNA, 15 bp, Homo sapiens
cctgacctcagctga

SEQ ID NO: 1224929 - DNA, 15 bp, Homo sapiens
tcctgacctcagctg

SEQ ID NO: 1224930 - DNA, 15 bp, Homo sapiens
ctcctgacctcagct

SEQ ID NO: 1224931 - DNA, 15 bp, Homo sapiens
actcctgacctcagc

SEQ ID NO: 1224932 - DNA, 15 bp, Homo sapiens
agttttcaccatgtt

SEQ ID NO: 1224933 - DNA, 15 bp, Homo sapiens
gagttttcaccatgt

SEQ ID NO: 1224934 - DNA, 15 bp, Homo sapiens
ggagttttcaccatg

SEQ ID NO: 1224935 - DNA, 15 bp, Homo sapiens
tggagttttcaccat

SEQ ID NO: 1224936 - DNA, 15 bp, Homo sapiens
atggagttttcacca

SEQ ID NO: 1224937 - DNA, 15 bp, Homo sapiens
gatggagttttcacc

SEQ ID NO: 1224938 - DNA, 15 bp, Homo sapiens
agatggagttttcac

SEQ ID NO: 1224939 - DNA, 15 bp, Homo sapiens
gagatggagttttca

SEQ ID NO: 1224940 - DNA, 15 bp, Homo sapiens
agagatggagttttc

SEQ ID NO: 1224941 - DNA, 15 bp, Homo sapiens
tagagatggagtttt

SEQ ID NO: 1224942 - DNA, 15 bp, Homo sapiens
attagtagagatgga

SEQ ID NO: 1224943 - DNA, 15 bp, Homo sapiens
tattagtagagatgg

SEQ ID NO: 1224944 - DNA, 15 bp, Homo sapiens
ttattagtagagatg

SEQ ID NO: 1224945 - DNA, 15 bp, Homo sapiens
attattagtagagat

SEQ ID NO: 1224946 - DNA, 15 bp, Homo sapiens
tattattagtagaga

SEQ ID NO: 1224947 - DNA, 15 bp, Homo sapiens
gtattattagtagag

SEQ ID NO: 1224948 - DNA, 15 bp, Homo sapiens
tgtattattagtaga

SEQ ID NO: 1224949 - DNA, 15 bp, Homo sapiens
ttgtattattagtag

SEQ ID NO: 1224950 - DNA, 15 bp, Homo sapiens
tttgtattattagta

SEQ ID NO: 1224951 - DNA, 15 bp, Homo sapiens
ttttgtattattagt

SEQ ID NO: 1224952 - DNA, 15 bp, Homo sapiens
tttttgtattattag

SEQ ID NO: 1224953 - DNA, 15 bp, Homo sapiens
tatttttgtattatt

SEQ ID NO: 1224954 - DNA, 15 bp, Homo sapiens
ttatttttgtattat

SEQ ID NO: 1224955 - DNA, 15 bp, Homo sapiens
cttatttttgtatta

SEQ ID NO: 1224956 - DNA, 15 bp, Homo sapiens
gcttatttttgtatt

SEQ ID NO: 1224957 - DNA, 15 bp, Homo sapiens
ggcttatttttgtat

SEQ ID NO: 1224958 - DNA, 15 bp, Homo sapiens
cggcttatttttgta

SEQ ID NO: 1224959 - DNA, 15 bp, Homo sapiens
ccggcttatttttgt

SEQ ID NO: 1224960 - DNA, 15 bp, Homo sapiens
cccggcttatttttg

SEQ ID NO: 1224961 - DNA, 15 bp, Homo sapiens
gcccggcttattttt

SEQ ID NO: 1224962 - DNA, 15 bp, Homo sapiens
cgcccggcttatttt

SEQ ID NO: 1224963 - DNA, 15 bp, Homo sapiens
acgcccggcttattt

SEQ ID NO: 1224964 - DNA, 15 bp, Homo sapiens
cacgcccggcttatt

SEQ ID NO: 1224965 - DNA, 15 bp, Homo sapiens
ccacgcccggcttat

SEQ ID NO: 1224966 - DNA, 15 bp, Homo sapiens
accacgcccggctta

SEQ ID NO: 1224967 - DNA, 15 bp, Homo sapiens
caccacgcccggctt

SEQ ID NO: 1224968 - DNA, 15 bp, Homo sapiens
tgtgcaccaccacgc

SEQ ID NO: 1224969 - DNA, 15 bp, Homo sapiens
atgtgcaccaccacg

SEQ ID NO: 1224970 - DNA, 15 bp, Homo sapiens
gatgtgcaccaccac

SEQ ID NO: 1224971 - DNA, 15 bp, Homo sapiens
agatgtgcaccacca

SEQ ID NO: 1224972 - DNA, 15 bp, Homo sapiens
cagatgtgcaccacc

SEQ ID NO: 1224973 - DNA, 15 bp, Homo sapiens
acagatgtgcaccac

SEQ ID NO: 1224974 - DNA, 15 bp, Homo sapiens
tacagatgtgcacca

SEQ ID NO: 1224975 - DNA, 15 bp, Homo sapiens
ttacagatgtgcacc

SEQ ID NO: 1224976 - DNA, 15 bp, Homo sapiens
attacagatgtgcac

SEQ ID NO: 1224977 - DNA, 15 bp, Homo sapiens
gattacagatgtgca

SEQ ID NO: 1224978 - DNA, 15 bp, Homo sapiens
ggattacagatgtgc

SEQ ID NO: 1224979 - DNA, 15 bp, Homo sapiens
agctgggattacaga

SEQ ID NO: 1224980 - DNA, 15 bp, Homo sapiens
cggagtagctgggat

SEQ ID NO: 1224981 - DNA, 15 bp, Homo sapiens
ccggagtagctggga

SEQ ID NO: 1224982 - DNA, 15 bp, Homo sapiens
tccggagtagctggg

SEQ ID NO: 1224983 - DNA, 15 bp, Homo sapiens
ctccggagtagctgg

SEQ ID NO: 1224984 - DNA, 15 bp, Homo sapiens
cctccggagtagctg

SEQ ID NO: 1224985 - DNA, 15 bp, Homo sapiens
gcctccggagtagct

SEQ ID NO: 1224986 - DNA, 15 bp, Homo sapiens
agcctccggagtagc

SEQ ID NO: 1224987 - DNA, 15 bp, Homo sapiens
cagcctccggagtag

SEQ ID NO: 1224988 - DNA, 15 bp, Homo sapiens
tcagcctccggagta

SEQ ID NO: 1224989 - DNA, 15 bp, Homo sapiens
ctcagcctccggagt

SEQ ID NO: 1224990 - DNA, 15 bp, Homo sapiens
tctcagcctccggag

SEQ ID NO: 1224991 - DNA, 15 bp, Homo sapiens
gtctcagcctccgga

SEQ ID NO: 1224992 - DNA, 15 bp, Homo sapiens
tgtctcagcctccgg

SEQ ID NO: 1224993 - DNA, 15 bp, Homo sapiens
ctgtctcagcctccg

SEQ ID NO: 1224994 - DNA, 15 bp, Homo sapiens
tacctccgcctcctg

SEQ ID NO: 1224995 - DNA, 15 bp, Homo sapiens
ctacctccgcctcct

SEQ ID NO: 1224996 - DNA, 15 bp, Homo sapiens
gctacctccgcctcc

SEQ ID NO: 1224997 - DNA, 15 bp, Homo sapiens
tgctacctccgcctc

SEQ ID NO: 1224998 - DNA, 15 bp, Homo sapiens
ctgctacctccgcct

SEQ ID NO: 1224999 - DNA, 15 bp, Homo sapiens
actgctacctccgcc

SEQ ID NO: 1225000 - DNA, 15 bp, Homo sapiens
cactgctacctccgc

SEQ ID NO: 1225001 - DNA, 15 bp, Homo sapiens
tcactgctacctccg

SEQ ID NO: 1225002 - DNA, 15 bp, Homo sapiens
ctcactgctacctcc

SEQ ID NO: 1225003 - DNA, 15 bp, Homo sapiens
agctcactgctacct

SEQ ID NO: 1225004 - DNA, 15 bp, Homo sapiens
cagctcactgctacc

SEQ ID NO: 1225005 - DNA, 15 bp, Homo sapiens
tcagctcactgctac

SEQ ID NO: 1225006 - DNA, 15 bp, Homo sapiens
ctcagctcactgcta

SEQ ID NO: 1225007 - DNA, 15 bp, Homo sapiens
actcagctcactgct

SEQ ID NO: 1225008 - DNA, 15 bp, Homo sapiens
aactcagctcactgc

SEQ ID NO: 1225009 - DNA, 15 bp, Homo sapiens
gaactcagctcactg

SEQ ID NO: 1225010 - DNA, 15 bp, Homo sapiens
tgaactcagctcact

SEQ ID NO: 1225011 - DNA, 15 bp, Homo sapiens
ctgaactcagctcac

SEQ ID NO: 1225012 - DNA, 15 bp, Homo sapiens
cctgaactcagctca

SEQ ID NO: 1225013 - DNA, 15 bp, Homo sapiens
gcctgaactcagctc

SEQ ID NO: 1225014 - DNA, 15 bp, Homo sapiens
ggcctgaactcagct

SEQ ID NO: 1225015 - DNA, 15 bp, Homo sapiens
tggcctgaactcagc

SEQ ID NO: 1225016 - DNA, 15 bp, Homo sapiens
gtggcctgaactcag

SEQ ID NO: 1225017 - DNA, 15 bp, Homo sapiens
agtggcctgaactca

SEQ ID NO: 1225018 - DNA, 15 bp, Homo sapiens
cagtggcctgaactc

SEQ ID NO: 1225019 - DNA, 15 bp, Homo sapiens
gcagtggcctgaact

SEQ ID NO: 1225020 - DNA, 15 bp, Homo sapiens
tgcagtggcctgaac

SEQ ID NO: 1225021 - DNA, 15 bp, Homo sapiens
gtgcagtggcctgaa

SEQ ID NO: 1225022 - DNA, 15 bp, Homo sapiens
cctcactctgttgcc

SEQ ID NO: 1225023 - DNA, 15 bp, Homo sapiens
gcctcactctgttgc

SEQ ID NO: 1225024 - DNA, 15 bp, Homo sapiens
agcctcactctgttg

SEQ ID NO: 1225025 - DNA, 15 bp, Homo sapiens
gagcctcactctgtt

SEQ ID NO: 1225026 - DNA, 15 bp, Homo sapiens
agagcctcactctgt

SEQ ID NO: 1225027 - DNA, 15 bp, Homo sapiens
cagagcctcactctg

SEQ ID NO: 1225028 - DNA, 15 bp, Homo sapiens
acagagcctcactct

SEQ ID NO: 1225029 - DNA, 15 bp, Homo sapiens
gacagagcctcactc

SEQ ID NO: 1225030 - DNA, 15 bp, Homo sapiens
agacagagcctcact

SEQ ID NO: 1225031 - DNA, 15 bp, Homo sapiens
gagacagagcctcac

SEQ ID NO: 1225032 - DNA, 15 bp, Homo sapiens
ggagacagagcctca

SEQ ID NO: 1225033 - DNA, 15 bp, Homo sapiens
tggagacagagcctc

SEQ ID NO: 1225034 - DNA, 15 bp, Homo sapiens
ttggagacagagcct

SEQ ID NO: 1225035 - DNA, 15 bp, Homo sapiens
tttggagacagagcc

SEQ ID NO: 1225036 - DNA, 15 bp, Homo sapiens
ttttggagacagagc

SEQ ID NO: 1225037 - DNA, 15 bp, Homo sapiens
cttttggagacagag

SEQ ID NO: 1225038 - DNA, 15 bp, Homo sapiens
tcttttggagacaga

SEQ ID NO: 1225039 - DNA, 15 bp, Homo sapiens
ttcttttggagacag

SEQ ID NO: 1225040 - DNA, 15 bp, Homo sapiens
tttcttttggagaca

SEQ ID NO: 1225041 - DNA, 15 bp, Homo sapiens
ttttcttttggagac

SEQ ID NO: 1225042 - DNA, 15 bp, Homo sapiens
tttttcttttggaga

SEQ ID NO: 1225043 - DNA, 15 bp, Homo sapiens
ttttttcttttggag

SEQ ID NO: 1225044 - DNA, 15 bp, Homo sapiens
tttttttcttttgga

SEQ ID NO: 1225045 - DNA, 15 bp, Homo sapiens
atttttttcttttgg

SEQ ID NO: 1225046 - DNA, 15 bp, Homo sapiens
gtatttttttctttt

SEQ ID NO: 1225047 - DNA, 15 bp, Homo sapiens
tgtatttttttcttt

SEQ ID NO: 1225048 - DNA, 15 bp, Homo sapiens
ttgtatttttttctt

SEQ ID NO: 1225049 - DNA, 15 bp, Homo sapiens
tttgtatttttttct

SEQ ID NO: 1225050 - DNA, 15 bp, Homo sapiens
ttttgtatttttttc

SEQ ID NO: 1225051 - DNA, 15 bp, Homo sapiens
tttttgtattttttt

SEQ ID NO: 1225052 - DNA, 15 bp, Homo sapiens
agtaatttttttgta

SEQ ID NO: 1225053 - DNA, 15 bp, Homo sapiens
gagtaatttttttgt

SEQ ID NO: 1225054 - DNA, 15 bp, Homo sapiens
cgagtaatttttttg

SEQ ID NO: 1225055 - DNA, 15 bp, Homo sapiens
tcgagtaattttttt

SEQ ID NO: 1225056 - DNA, 15 bp, Homo sapiens
ctcgagtaatttttt

SEQ ID NO: 1225057 - DNA, 15 bp, Homo sapiens
gctcgagtaattttt

SEQ ID NO: 1225058 - DNA, 15 bp, Homo sapiens
cgctcgagtaatttt

SEQ ID NO: 1225059 - DNA, 15 bp, Homo sapiens
acgctcgagtaattt

SEQ ID NO: 1225060 - DNA, 15 bp, Homo sapiens
cacgctcgagtaatt

SEQ ID NO: 1225061 - DNA, 15 bp, Homo sapiens
ccacgctcgagtaat

SEQ ID NO: 1225062 - DNA, 15 bp, Homo sapiens
accacgctcgagtaa

SEQ ID NO: 1225063 - DNA, 15 bp, Homo sapiens
caccacgctcgagta

SEQ ID NO: 1225064 - DNA, 15 bp, Homo sapiens
ccaccacgctcgagt

SEQ ID NO: 1225065 - DNA, 15 bp, Homo sapiens
gccaccacgctcgag

SEQ ID NO: 1225066 - DNA, 15 bp, Homo sapiens
cgccaccacgctcga

SEQ ID NO: 1225067 - DNA, 15 bp, Homo sapiens
ccgccaccacgctcg

SEQ ID NO: 1225068 - DNA, 15 bp, Homo sapiens
cccgccaccacgctc

SEQ ID NO: 1225069 - DNA, 15 bp, Homo sapiens
gcccgccaccacgct

SEQ ID NO: 1225070 - DNA, 15 bp, Homo sapiens
tagtagctgggatta

SEQ ID NO: 1225071 - DNA, 15 bp, Homo sapiens
gtagtagctgggatt

SEQ ID NO: 1225072 - DNA, 15 bp, Homo sapiens
cgtagtagctgggat

SEQ ID NO: 1225073 - DNA, 15 bp, Homo sapiens
ccgtagtagctggga

SEQ ID NO: 1225074 - DNA, 15 bp, Homo sapiens
tccgtagtagctggg

SEQ ID NO: 1225075 - DNA, 15 bp, Homo sapiens
ctccgtagtagctgg

SEQ ID NO: 1225076 - DNA, 15 bp, Homo sapiens
tctccgtagtagctg

SEQ ID NO: 1225077 - DNA, 15 bp, Homo sapiens
gtctccgtagtagct

SEQ ID NO: 1225078 - DNA, 15 bp, Homo sapiens
agtctccgtagtagc

SEQ ID NO: 1225079 - DNA, 15 bp, Homo sapiens
cagtctccgtagtag

SEQ ID NO: 1225080 - DNA, 15 bp, Homo sapiens
tcagtctccgtagta

SEQ ID NO: 1225081 - DNA, 15 bp, Homo sapiens
ctcagtctccgtagt

SEQ ID NO: 1225082 - DNA, 15 bp, Homo sapiens
cctcagtctccgtag

SEQ ID NO: 1225083 - DNA, 15 bp, Homo sapiens
gcctcagtctccgta

SEQ ID NO: 1225084 - DNA, 15 bp, Homo sapiens
tgcctcagtctccgt

SEQ ID NO: 1225085 - DNA, 15 bp, Homo sapiens
ctgcctcagtctccg

SEQ ID NO: 1225086 - DNA, 15 bp, Homo sapiens
aagttcaagcgattc

SEQ ID NO: 1225087 - DNA, 15 bp, Homo sapiens
caagttcaagcgatt

SEQ ID NO: 1225088 - DNA, 15 bp, Homo sapiens
ccaagttcaagcgat

SEQ ID NO: 1225089 - DNA, 15 bp, Homo sapiens
cccaagttcaagcga

SEQ ID NO: 1225090 - DNA, 15 bp, Homo sapiens
tcccaagttcaagcg

SEQ ID NO: 1225091 - DNA, 15 bp, Homo sapiens
ctcccaagttcaagc

SEQ ID NO: 1225092 - DNA, 15 bp, Homo sapiens
acctcccaagttcaa

SEQ ID NO: 1225093 - DNA, 15 bp, Homo sapiens
cacctcccaagttca

SEQ ID NO: 1225094 - DNA, 15 bp, Homo sapiens
ccacctcccaagttc

SEQ ID NO: 1225095 - DNA, 15 bp, Homo sapiens
tccacctcccaagtt

SEQ ID NO: 1225096 - DNA, 15 bp, Homo sapiens
ctccacctcccaagt

SEQ ID NO: 1225097 - DNA, 15 bp, Homo sapiens
cctccacctcccaag

SEQ ID NO: 1225098 - DNA, 15 bp, Homo sapiens
acctccacctcccaa

SEQ ID NO: 1225099 - DNA, 15 bp, Homo sapiens
ttcagctcactgcaa

SEQ ID NO: 1225100 - DNA, 15 bp, Homo sapiens
tttcagctcactgca

SEQ ID NO: 1225101 - DNA, 15 bp, Homo sapiens
atttcagctcactgc

SEQ ID NO: 1225102 - DNA, 15 bp, Homo sapiens
gatttcagctcactg

SEQ ID NO: 1225103 - DNA, 15 bp, Homo sapiens
tgatttcagctcact

SEQ ID NO: 1225104 - DNA, 15 bp, Homo sapiens
gtgatttcagctcac

SEQ ID NO: 1225105 - DNA, 15 bp, Homo sapiens
tgtgatttcagctca

SEQ ID NO: 1225106 - DNA, 15 bp, Homo sapiens
gtgtgatttcagctc

SEQ ID NO: 1225107 - DNA, 15 bp, Homo sapiens
ggtgtgatttcagct

SEQ ID NO: 1225108 - DNA, 15 bp, Homo sapiens
tggtgtgatttcagc

SEQ ID NO: 1225109 - DNA, 15 bp, Homo sapiens
atggtgtgatttcag

SEQ ID NO: 1225110 - DNA, 15 bp, Homo sapiens
aatggtgtgatttca

SEQ ID NO: 1225111 - DNA, 15 bp, Homo sapiens
caatggtgtgatttc

SEQ ID NO: 1225112 - DNA, 15 bp, Homo sapiens
gcaatggtgtgattt

SEQ ID NO: 1225113 - DNA, 15 bp, Homo sapiens
tgcaatggtgtgatt

SEQ ID NO: 1225114 - DNA, 15 bp, Homo sapiens
ttgtgttgcccaggc

SEQ ID NO: 1225115 - DNA, 15 bp, Homo sapiens
cttgtgttgcccagg

SEQ ID NO: 1225116 - DNA, 15 bp, Homo sapiens
gcttgtgttgcccag

SEQ ID NO: 1225117 - DNA, 15 bp, Homo sapiens
tgcttgtgttgccca

SEQ ID NO: 1225118 - DNA, 15 bp, Homo sapiens
ttgcttgtgttgccc

SEQ ID NO: 1225119 - DNA, 15 bp, Homo sapiens
gttgcttgtgttgcc

SEQ ID NO: 1225120 - DNA, 15 bp, Homo sapiens
ggttgcttgtgttgc

SEQ ID NO: 1225121 - DNA, 15 bp, Homo sapiens
gggttgcttgtgttg

SEQ ID NO: 1225122 - DNA, 15 bp, Homo sapiens
agggttgcttgtgtt

SEQ ID NO: 1225123 - DNA, 15 bp, Homo sapiens
tagggttgcttgtgt

SEQ ID NO: 1225124 - DNA, 15 bp, Homo sapiens
ttagggttgcttgtg

SEQ ID NO: 1225125 - DNA, 15 bp, Homo sapiens
gttagggttgcttgt

SEQ ID NO: 1225126 - DNA, 15 bp, Homo sapiens
agttagggttgcttg

SEQ ID NO: 1225127 - DNA, 15 bp, Homo sapiens
cagttagggttgctt

SEQ ID NO: 1225128 - DNA, 15 bp, Homo sapiens
gcagttagggttgct

SEQ ID NO: 1225129 - DNA, 15 bp, Homo sapiens
agcagttagggttgc

SEQ ID NO: 1225130 - DNA, 15 bp, Homo sapiens
aagcagttagggttg

SEQ ID NO: 1225131 - DNA, 15 bp, Homo sapiens
gaagcagttagggtt

SEQ ID NO: 1225132 - DNA, 15 bp, Homo sapiens
agaagcagttagggt

SEQ ID NO: 1225133 - DNA, 15 bp, Homo sapiens
tagaagcagttaggg

SEQ ID NO: 1225134 - DNA, 15 bp, Homo sapiens
gtagaagcagttagg

SEQ ID NO: 1225135 - DNA, 15 bp, Homo sapiens
tgtagaagcagttag

SEQ ID NO: 1225136 - DNA, 15 bp, Homo sapiens
atgtagaagcagtta

SEQ ID NO: 1225137 - DNA, 15 bp, Homo sapiens
gatgtagaagcagtt

SEQ ID NO: 1225138 - DNA, 15 bp, Homo sapiens
ggatgtagaagcagt

SEQ ID NO: 1225139 - DNA, 15 bp, Homo sapiens
gggatgtagaagcag

SEQ ID NO: 1225140 - DNA, 15 bp, Homo sapiens
tgggatgtagaagca

SEQ ID NO: 1225141 - DNA, 15 bp, Homo sapiens
atgggatgtagaagc

SEQ ID NO: 1225142 - DNA, 15 bp, Homo sapiens
tatgggatgtagaag

SEQ ID NO: 1225143 - DNA, 15 bp, Homo sapiens
atatgggatgtagaa

SEQ ID NO: 1225144 - DNA, 15 bp, Homo sapiens
tatatgggatgtaga

SEQ ID NO: 1225145 - DNA, 15 bp, Homo sapiens
atatatgggatgtag

SEQ ID NO: 1225146 - DNA, 15 bp, Homo sapiens
tatatatgggatgta

SEQ ID NO: 1225147 - DNA, 15 bp, Homo sapiens
ttatatatgggatgt

SEQ ID NO: 1225148 - DNA, 15 bp, Homo sapiens
cttatatatgggatg

SEQ ID NO: 1225149 - DNA, 15 bp, Homo sapiens
tcttatatatgggat

SEQ ID NO: 1225150 - DNA, 15 bp, Homo sapiens
ctcttatatatggga

SEQ ID NO: 1225151 - DNA, 15 bp, Homo sapiens
tctcttatatatggg

SEQ ID NO: 1225152 - DNA, 15 bp, Homo sapiens
ctctcttatatatgg

SEQ ID NO: 1225153 - DNA, 15 bp, Homo sapiens
tctctcttatatatg

SEQ ID NO: 1225154 - DNA, 15 bp, Homo sapiens
atctctcttatatat

SEQ ID NO: 1225155 - DNA, 15 bp, Homo sapiens
gatctctcttatata

SEQ ID NO: 1225156 - DNA, 15 bp, Homo sapiens
tgatctctcttatat

SEQ ID NO: 1225157 - DNA, 15 bp, Homo sapiens
ctgatctctcttata

SEQ ID NO: 1225158 - DNA, 15 bp, Homo sapiens
gctgatctctcttat

SEQ ID NO: 1225159 - DNA, 15 bp, Homo sapiens
ggctgatctctctta

SEQ ID NO: 1225160 - DNA, 15 bp, Homo sapiens
tggctgatctctctt

SEQ ID NO: 1225161 - DNA, 15 bp, Homo sapiens
ctggctgatctctct

SEQ ID NO: 1225162 - DNA, 15 bp, Homo sapiens
cctggctgatctctc

SEQ ID NO: 1225163 - DNA, 15 bp, Homo sapiens
acctggctgatctct

SEQ ID NO: 1225164 - DNA, 15 bp, Homo sapiens
cacctggctgatctc

SEQ ID NO: 1225165 - DNA, 15 bp, Homo sapiens
gcacctggctgatct

SEQ ID NO: 1225166 - DNA, 15 bp, Homo sapiens
tgcacctggctgatc

SEQ ID NO: 1225167 - DNA, 15 bp, Homo sapiens
ctgcacctggctgat

SEQ ID NO: 1225168 - DNA, 15 bp, Homo sapiens
actgcacctggctga

SEQ ID NO: 1225169 - DNA, 15 bp, Homo sapiens
cactgcacctggctg

SEQ ID NO: 1225170 - DNA, 15 bp, Homo sapiens
accactgcacctggc

SEQ ID NO: 1225171 - DNA, 15 bp, Homo sapiens
aaccactgcacctgg

SEQ ID NO: 1225172 - DNA, 15 bp, Homo sapiens
gaaccactgcacctg

SEQ ID NO: 1225173 - DNA, 15 bp, Homo sapiens
tgaaccactgcacct

SEQ ID NO: 1225174 - DNA, 15 bp, Homo sapiens
atgaaccactgcacc

SEQ ID NO: 1225175 - DNA, 15 bp, Homo sapiens
catgaaccactgcac

SEQ ID NO: 1225176 - DNA, 15 bp, Homo sapiens
gcatgaaccactgca

SEQ ID NO: 1225177 - DNA, 15 bp, Homo sapiens
ggcatgaaccactgc

SEQ ID NO: 1225178 - DNA, 15 bp, Homo sapiens
aggcatgaaccactg

SEQ ID NO: 1225179 - DNA, 15 bp, Homo sapiens
caggcatgaaccact

SEQ ID NO: 1225180 - DNA, 15 bp, Homo sapiens
ttcctgccttggcct

SEQ ID NO: 1225181 - DNA, 15 bp, Homo sapiens
cttcctgccttggcc

SEQ ID NO: 1225182 - DNA, 15 bp, Homo sapiens
tcttcctgccttggc

SEQ ID NO: 1225183 - DNA, 15 bp, Homo sapiens
atcttcctgccttgg

SEQ ID NO: 1225184 - DNA, 15 bp, Homo sapiens
gatcttcctgccttg

SEQ ID NO: 1225185 - DNA, 15 bp, Homo sapiens
tgatcttcctgcctt

SEQ ID NO: 1225186 - DNA, 15 bp, Homo sapiens
gtgatcttcctgcct

SEQ ID NO: 1225187 - DNA, 15 bp, Homo sapiens
ggtgatcttcctgcc

SEQ ID NO: 1225188 - DNA, 15 bp, Homo sapiens
aggtgatcttcctgc

SEQ ID NO: 1225189 - DNA, 15 bp, Homo sapiens
tcaggtgatcttcct

SEQ ID NO: 1225190 - DNA, 15 bp, Homo sapiens
ttcaggtgatcttcc

SEQ ID NO: 1225191 - DNA, 15 bp, Homo sapiens
cttcaggtgatcttc

SEQ ID NO: 1225192 - DNA, 15 bp, Homo sapiens
acttcaggtgatctt

SEQ ID NO: 1225193 - DNA, 15 bp, Homo sapiens
gacttcaggtgatct

SEQ ID NO: 1225194 - DNA, 15 bp, Homo sapiens
atctcaaactcctga

SEQ ID NO: 1225195 - DNA, 15 bp, Homo sapiens
gatctcaaactcctg

SEQ ID NO: 1225196 - DNA, 15 bp, Homo sapiens
tgatctcaaactcct

SEQ ID NO: 1225197 - DNA, 15 bp, Homo sapiens
ctgatctcaaactcc

SEQ ID NO: 1225198 - DNA, 15 bp, Homo sapiens
gctgatctcaaactc

SEQ ID NO: 1225199 - DNA, 15 bp, Homo sapiens
ggctgatctcaaact

SEQ ID NO: 1225200 - DNA, 15 bp, Homo sapiens
aggctgatctcaaac

SEQ ID NO: 1225201 - DNA, 15 bp, Homo sapiens
caggctgatctcaaa

SEQ ID NO: 1225202 - DNA, 15 bp, Homo sapiens
tcaggctgatctcaa

SEQ ID NO: 1225203 - DNA, 15 bp, Homo sapiens
gtcaggctgatctca

SEQ ID NO: 1225204 - DNA, 15 bp, Homo sapiens
tgtcaggctgatctc

SEQ ID NO: 1225205 - DNA, 15 bp, Homo sapiens
ttgtcaggctgatct

SEQ ID NO: 1225206 - DNA, 15 bp, Homo sapiens
tttgtcaggctgatc

SEQ ID NO: 1225207 - DNA, 15 bp, Homo sapiens
atttgtcaggctgat

SEQ ID NO: 1225208 - DNA, 15 bp, Homo sapiens
catttgtcaggctga

SEQ ID NO: 1225209 - DNA, 15 bp, Homo sapiens
tcatttgtcaggctg

SEQ ID NO: 1225210 - DNA, 15 bp, Homo sapiens
ttcatttgtcaggct

SEQ ID NO: 1225211 - DNA, 15 bp, Homo sapiens
cttcatttgtcaggc

SEQ ID NO: 1225212 - DNA, 15 bp, Homo sapiens
tcttcatttgtcagg

SEQ ID NO: 1225213 - DNA, 15 bp, Homo sapiens
ttcttcatttgtcag

SEQ ID NO: 1225214 - DNA, 15 bp, Homo sapiens
tttcttcatttgtca

SEQ ID NO: 1225215 - DNA, 15 bp, Homo sapiens
gtttcttcatttgtc

SEQ ID NO: 1225216 - DNA, 15 bp, Homo sapiens
ggtttcttcatttgt

SEQ ID NO: 1225217 - DNA, 15 bp, Homo sapiens
aggtttcttcatttg

SEQ ID NO: 1225218 - DNA, 15 bp, Homo sapiens
gaggtttcttcattt

SEQ ID NO: 1225219 - DNA, 15 bp, Homo sapiens
tgaggtttcttcatt

SEQ ID NO: 1225220 - DNA, 15 bp, Homo sapiens
atgaggtttcttcat

SEQ ID NO: 1225221 - DNA, 15 bp, Homo sapiens
gatgaggtttcttca

SEQ ID NO: 1225222 - DNA, 15 bp, Homo sapiens
agatgaggtttcttc

SEQ ID NO: 1225223 - DNA, 15 bp, Homo sapiens
gagatgaggtttctt

SEQ ID NO: 1225224 - DNA, 15 bp, Homo sapiens
agagatgaggtttct

SEQ ID NO: 1225225 - DNA, 15 bp, Homo sapiens
tttttttttttagta

SEQ ID NO: 1225226 - DNA, 15 bp, Homo sapiens
ttttttttttttagt

SEQ ID NO: 1225227 - DNA, 15 bp, Homo sapiens
gtatttttttttttt

SEQ ID NO: 1225228 - DNA, 15 bp, Homo sapiens
ttgtatttttttttt

SEQ ID NO: 1225229 - DNA, 15 bp, Homo sapiens
tttgtattttttttt

SEQ ID NO: 1225230 - DNA, 15 bp, Homo sapiens
ttttgtatttttttt

SEQ ID NO: 1225231 - DNA, 15 bp, Homo sapiens
attttgtattttttt

SEQ ID NO: 1225232 - DNA, 15 bp, Homo sapiens
aattttgtatttttt

SEQ ID NO: 1225233 - DNA, 15 bp, Homo sapiens
gcccagctaattttg

SEQ ID NO: 1225234 - DNA, 15 bp, Homo sapiens
accaccacgcccagc

SEQ ID NO: 1225235 - DNA, 15 bp, Homo sapiens
acacccaccaccacg

SEQ ID NO: 1225236 - DNA, 15 bp, Homo sapiens
gacacccaccaccac

SEQ ID NO: 1225237 - DNA, 15 bp, Homo sapiens
agacacccaccacca

SEQ ID NO: 1225238 - DNA, 15 bp, Homo sapiens
cagacacccaccacc

SEQ ID NO: 1225239 - DNA, 15 bp, Homo sapiens
acagacacccaccac

SEQ ID NO: 1225240 - DNA, 15 bp, Homo sapiens
tacagacacccacca

SEQ ID NO: 1225241 - DNA, 15 bp, Homo sapiens
ttacagacacccacc

SEQ ID NO: 1225242 - DNA, 15 bp, Homo sapiens
attacagacacccac

SEQ ID NO: 1225243 - DNA, 15 bp, Homo sapiens
gattacagacaccca

SEQ ID NO: 1225244 - DNA, 15 bp, Homo sapiens
agattacagacaccc

SEQ ID NO: 1225245 - DNA, 15 bp, Homo sapiens
gagattacagacacc

SEQ ID NO: 1225246 - DNA, 15 bp, Homo sapiens
tgagattacagacac

SEQ ID NO: 1225247 - DNA, 15 bp, Homo sapiens
ctgagattacagaca

SEQ ID NO: 1225248 - DNA, 15 bp, Homo sapiens
gctgagattacagac

SEQ ID NO: 1225249 - DNA, 15 bp, Homo sapiens
agctgagattacaga

SEQ ID NO: 1225250 - DNA, 15 bp, Homo sapiens
tccgcctcagcctcc

SEQ ID NO: 1225251 - DNA, 15 bp, Homo sapiens
ttccgcctcagcctc

SEQ ID NO: 1225252 - DNA, 15 bp, Homo sapiens
cttccgcctcagcct

SEQ ID NO: 1225253 - DNA, 15 bp, Homo sapiens
tcttccgcctcagcc

SEQ ID NO: 1225254 - DNA, 15 bp, Homo sapiens
ttcttccgcctcagc

SEQ ID NO: 1225255 - DNA, 15 bp, Homo sapiens
attcttccgcctcag

SEQ ID NO: 1225256 - DNA, 15 bp, Homo sapiens
gattcttccgcctca

SEQ ID NO: 1225257 - DNA, 15 bp, Homo sapiens
tgattcttccgcctc

SEQ ID NO: 1225258 - DNA, 15 bp, Homo sapiens
gtgattcttccgcct

SEQ ID NO: 1225259 - DNA, 15 bp, Homo sapiens
agtgattcttccgcc

SEQ ID NO: 1225260 - DNA, 15 bp, Homo sapiens
aagtgattcttccgc

SEQ ID NO: 1225261 - DNA, 15 bp, Homo sapiens
caagtgattcttccg

SEQ ID NO: 1225262 - DNA, 15 bp, Homo sapiens
tcaagtgattcttcc

SEQ ID NO: 1225263 - DNA, 15 bp, Homo sapiens
ttcccaggttcaagt

SEQ ID NO: 1225264 - DNA, 15 bp, Homo sapiens
cttcccaggttcaag

SEQ ID NO: 1225265 - DNA, 15 bp, Homo sapiens
gcttcccaggttcaa

SEQ ID NO: 1225266 - DNA, 15 bp, Homo sapiens
tgcttcccaggttca

SEQ ID NO: 1225267 - DNA, 15 bp, Homo sapiens
ctgcttcccaggttc

SEQ ID NO: 1225268 - DNA, 15 bp, Homo sapiens
tctgcttcccaggtt

SEQ ID NO: 1225269 - DNA, 15 bp, Homo sapiens
ctctgcttcccaggt

SEQ ID NO: 1225270 - DNA, 15 bp, Homo sapiens
cctctgcttcccagg

SEQ ID NO: 1225271 - DNA, 15 bp, Homo sapiens
acctctgcttcccag

SEQ ID NO: 1225272 - DNA, 15 bp, Homo sapiens
aacctctgcttccca

SEQ ID NO: 1225273 - DNA, 15 bp, Homo sapiens
caacctctgcttccc

SEQ ID NO: 1225274 - DNA, 15 bp, Homo sapiens
gctcggctcactgca

SEQ ID NO: 1225275 - DNA, 15 bp, Homo sapiens
agctcggctcactgc

SEQ ID NO: 1225276 - DNA, 15 bp, Homo sapiens
gagctcggctcactg

SEQ ID NO: 1225277 - DNA, 15 bp, Homo sapiens
cgagctcggctcact

SEQ ID NO: 1225278 - DNA, 15 bp, Homo sapiens
gcgagctcggctcac

SEQ ID NO: 1225279 - DNA, 15 bp, Homo sapiens
cgcgagctcggctca

SEQ ID NO: 1225280 - DNA, 15 bp, Homo sapiens
gcgcgagctcggctc

SEQ ID NO: 1225281 - DNA, 15 bp, Homo sapiens
ggcgcgagctcggct

SEQ ID NO: 1225282 - DNA, 15 bp, Homo sapiens
tggcgcgagctcggc

SEQ ID NO: 1225283 - DNA, 15 bp, Homo sapiens
atggcgcgagctcgg

SEQ ID NO: 1225284 - DNA, 15 bp, Homo sapiens
aatggcgcgagctcg

SEQ ID NO: 1225285 - DNA, 15 bp, Homo sapiens
caatggcgcgagctc

SEQ ID NO: 1225286 - DNA, 15 bp, Homo sapiens
gcaatggcgcgagct

SEQ ID NO: 1225287 - DNA, 15 bp, Homo sapiens
tgcaatggcgcgagc

SEQ ID NO: 1225288 - DNA, 15 bp, Homo sapiens
gtgcaatggcgcgag

SEQ ID NO: 1225289 - DNA, 15 bp, Homo sapiens
gtttgttttgagacg

SEQ ID NO: 1225290 - DNA, 15 bp, Homo sapiens
atttgtttgtttgtt

SEQ ID NO: 1225291 - DNA, 15 bp, Homo sapiens
tatttgtttgtttgt

SEQ ID NO: 1225292 - DNA, 15 bp, Homo sapiens
gtatttgtttgtttg

SEQ ID NO: 1225293 - DNA, 15 bp, Homo sapiens
tgtatttgtttgttt

SEQ ID NO: 1225294 - DNA, 15 bp, Homo sapiens
ttgtatttgtttgtt

SEQ ID NO: 1225295 - DNA, 15 bp, Homo sapiens
tttgtatttgtttgt

SEQ ID NO: 1225296 - DNA, 15 bp, Homo sapiens
gtttgtatttgtttg

SEQ ID NO: 1225297 - DNA, 15 bp, Homo sapiens
tgtttgtatttgttt

SEQ ID NO: 1225298 - DNA, 15 bp, Homo sapiens
ttgtttgtatttgtt

SEQ ID NO: 1225299 - DNA, 15 bp, Homo sapiens
tttgtttgtatttgt

SEQ ID NO: 1225300 - DNA, 15 bp, Homo sapiens
ttttgtttgtatttg

SEQ ID NO: 1225301 - DNA, 15 bp, Homo sapiens
tttttgtttgtattt

SEQ ID NO: 1225302 - DNA, 15 bp, Homo sapiens
ttttttgtttgtatt

SEQ ID NO: 1225303 - DNA, 15 bp, Homo sapiens
gttttttgtttgtat

SEQ ID NO: 1225304 - DNA, 15 bp, Homo sapiens
tgttttttgtttgta

SEQ ID NO: 1225305 - DNA, 15 bp, Homo sapiens
aatgttttttgtttg

SEQ ID NO: 1225306 - DNA, 15 bp, Homo sapiens
taatgttttttgttt

SEQ ID NO: 1225307 - DNA, 15 bp, Homo sapiens
ataatgttttttgtt

SEQ ID NO: 1225308 - DNA, 15 bp, Homo sapiens
cataatgttttttgt

SEQ ID NO: 1225309 - DNA, 15 bp, Homo sapiens
acataatgttttttg

SEQ ID NO: 1225310 - DNA, 15 bp, Homo sapiens
aacataatgtttttt

SEQ ID NO: 1225311 - DNA, 15 bp, Homo sapiens
caacataatgttttt

SEQ ID NO: 1225312 - DNA, 15 bp, Homo sapiens
acaacataatgtttt

SEQ ID NO: 1225313 - DNA, 15 bp, Homo sapiens
tacaacataatgttt

SEQ ID NO: 1225314 - DNA, 15 bp, Homo sapiens
atacaacataatgtt

SEQ ID NO: 1225315 - DNA, 15 bp, Homo sapiens
tatacaacataatgt

SEQ ID NO: 1225316 - DNA, 15 bp, Homo sapiens
gtatacaacataatg

SEQ ID NO: 1225317 - DNA, 15 bp, Homo sapiens
ggtatacaacataat

SEQ ID NO: 1225318 - DNA, 15 bp, Homo sapiens
aggtatacaacataa

SEQ ID NO: 1225319 - DNA, 15 bp, Homo sapiens
aaggtatacaacata

SEQ ID NO: 1225320 - DNA, 15 bp, Homo sapiens
taaggtatacaacat

SEQ ID NO: 1225321 - DNA, 15 bp, Homo sapiens
ttaaggtatacaaca

SEQ ID NO: 1225322 - DNA, 15 bp, Homo sapiens
tttaaggtatacaac

SEQ ID NO: 1225323 - DNA, 15 bp, Homo sapiens
atttaaggtatacaa

SEQ ID NO: 1225324 - DNA, 15 bp, Homo sapiens
aatttaaggtataca

SEQ ID NO: 1225325 - DNA, 15 bp, Homo sapiens
aaatttaaggtatac

SEQ ID NO: 1225326 - DNA, 15 bp, Homo sapiens
taaatttaaggtata

SEQ ID NO: 1225327 - DNA, 15 bp, Homo sapiens
ttaaatttaaggtat

SEQ ID NO: 1225328 - DNA, 15 bp, Homo sapiens
tttaaatttaaggta

SEQ ID NO: 1225329 - DNA, 15 bp, Homo sapiens
gtttaaatttaaggt

SEQ ID NO: 1225330 - DNA, 15 bp, Homo sapiens
tgtttaaatttaagg

SEQ ID NO: 1225331 - DNA, 15 bp, Homo sapiens
ttgtttaaatttaag

SEQ ID NO: 1225332 - DNA, 15 bp, Homo sapiens
attgtttaaatttaa

SEQ ID NO: 1225333 - DNA, 15 bp, Homo sapiens
tattgtttaaattta

SEQ ID NO: 1225334 - DNA, 15 bp, Homo sapiens
ttattgtttaaattt

SEQ ID NO: 1225335 - DNA, 15 bp, Homo sapiens
attattgtttaaatt

SEQ ID NO: 1225336 - DNA, 15 bp, Homo sapiens
aattattgtttaaat

SEQ ID NO: 1225337 - DNA, 15 bp, Homo sapiens
taattattgtttaaa

SEQ ID NO: 1225338 - DNA, 15 bp, Homo sapiens
ttaattattgtttaa

SEQ ID NO: 1225339 - DNA, 15 bp, Homo sapiens
tttaattattgttta

SEQ ID NO: 1225340 - DNA, 15 bp, Homo sapiens
ttttaattattgttt

SEQ ID NO: 1225341 - DNA, 15 bp, Homo sapiens
gttttaattattgtt

SEQ ID NO: 1225342 - DNA, 15 bp, Homo sapiens
tgttttaattattgt

SEQ ID NO: 1225343 - DNA, 15 bp, Homo sapiens
ttgttttaattattg

SEQ ID NO: 1225344 - DNA, 15 bp, Homo sapiens
attgttttaattatt

SEQ ID NO: 1225345 - DNA, 15 bp, Homo sapiens
aattgttttaattat

SEQ ID NO: 1225346 - DNA, 15 bp, Homo sapiens
aaattgttttaatta

SEQ ID NO: 1225347 - DNA, 15 bp, Homo sapiens
aaaattgttttaatt

SEQ ID NO: 1225348 - DNA, 15 bp, Homo sapiens
aaaaattgttttaat

SEQ ID NO: 1225349 - DNA, 15 bp, Homo sapiens
aaaaaattgttttaa

SEQ ID NO: 1225350 - DNA, 15 bp, Homo sapiens
taaaaaattgtttta

SEQ ID NO: 1225351 - DNA, 15 bp, Homo sapiens
ttaaaaaattgtttt

SEQ ID NO: 1225352 - DNA, 15 bp, Homo sapiens
attaaaaaattgttt

SEQ ID NO: 1225353 - DNA, 15 bp, Homo sapiens
aattaaaaaattgtt

SEQ ID NO: 1225354 - DNA, 15 bp, Homo sapiens
aaattaaaaaattgt

SEQ ID NO: 1225355 - DNA, 15 bp, Homo sapiens
caaattaaaaaattg

SEQ ID NO: 1225356 - DNA, 15 bp, Homo sapiens
ccaaattaaaaaatt

SEQ ID NO: 1225357 - DNA, 15 bp, Homo sapiens
tccaaattaaaaaat

SEQ ID NO: 1225358 - DNA, 15 bp, Homo sapiens
ttccaaattaaaaaa

SEQ ID NO: 1225359 - DNA, 15 bp, Homo sapiens
gttccaaattaaaaa

SEQ ID NO: 1225360 - DNA, 15 bp, Homo sapiens
tgttccaaattaaaa

SEQ ID NO: 1225361 - DNA, 15 bp, Homo sapiens
ttgttccaaattaaa

SEQ ID NO: 1225362 - DNA, 15 bp, Homo sapiens
tttgttccaaattaa

SEQ ID NO: 1225363 - DNA, 15 bp, Homo sapiens
atttgttccaaatta

SEQ ID NO: 1225364 - DNA, 15 bp, Homo sapiens
tatttgttccaaatt

SEQ ID NO: 1225365 - DNA, 15 bp, Homo sapiens
gtatttgttccaaat

SEQ ID NO: 1225366 - DNA, 15 bp, Homo sapiens
agtatttgttccaaa

SEQ ID NO: 1225367 - DNA, 15 bp, Homo sapiens
tagtatttgttccaa

SEQ ID NO: 1225368 - DNA, 15 bp, Homo sapiens
ctagtatttgttcca

SEQ ID NO: 1225369 - DNA, 15 bp, Homo sapiens
tctagtatttgttcc

SEQ ID NO: 1225370 - DNA, 15 bp, Homo sapiens
ttctagtatttgttc

SEQ ID NO: 1225371 - DNA, 15 bp, Homo sapiens
tttctagtatttgtt

SEQ ID NO: 1225372 - DNA, 15 bp, Homo sapiens
ttttctagtatttgt

SEQ ID NO: 1225373 - DNA, 15 bp, Homo sapiens
tttttctagtatttg

SEQ ID NO: 1225374 - DNA, 15 bp, Homo sapiens
ttttttctagtattt

SEQ ID NO: 1225375 - DNA, 15 bp, Homo sapiens
attttttctagtatt

SEQ ID NO: 1225376 - DNA, 15 bp, Homo sapiens
tattttttctagtat

SEQ ID NO: 1225377 - DNA, 15 bp, Homo sapiens
ctattttttctagta

SEQ ID NO: 1225378 - DNA, 15 bp, Homo sapiens
actattttttctagt

SEQ ID NO: 1225379 - DNA, 15 bp, Homo sapiens
cactattttttctag

SEQ ID NO: 1225380 - DNA, 15 bp, Homo sapiens
tcactattttttcta

SEQ ID NO: 1225381 - DNA, 15 bp, Homo sapiens
atcactattttttct

SEQ ID NO: 1225382 - DNA, 15 bp, Homo sapiens
catcactattttttc

SEQ ID NO: 1225383 - DNA, 15 bp, Homo sapiens
acatcactatttttt

SEQ ID NO: 1225384 - DNA, 15 bp, Homo sapiens
tacatcactattttt

SEQ ID NO: 1225385 - DNA, 15 bp, Homo sapiens
ttacatcactatttt

SEQ ID NO: 1225386 - DNA, 15 bp, Homo sapiens
cttacatcactattt

SEQ ID NO: 1225387 - DNA, 15 bp, Homo sapiens
tcttacatcactatt

SEQ ID NO: 1225388 - DNA, 15 bp, Homo sapiens
gtcttacatcactat

SEQ ID NO: 1225389 - DNA, 15 bp, Homo sapiens
agtcttacatcacta

SEQ ID NO: 1225390 - DNA, 15 bp, Homo sapiens
cagtcttacatcact

SEQ ID NO: 1225391 - DNA, 15 bp, Homo sapiens
acagtcttacatcac

SEQ ID NO: 1225392 - DNA, 15 bp, Homo sapiens
aacagtcttacatca

SEQ ID NO: 1225393 - DNA, 15 bp, Homo sapiens
gaacagtcttacatc

SEQ ID NO: 1225394 - DNA, 15 bp, Homo sapiens
ggaacagtcttacat

SEQ ID NO: 1225395 - DNA, 15 bp, Homo sapiens
aggaacagtcttaca

SEQ ID NO: 1225396 - DNA, 15 bp, Homo sapiens
aaggaacagtcttac

SEQ ID NO: 1225397 - DNA, 15 bp, Homo sapiens
taaggaacagtctta

SEQ ID NO: 1225398 - DNA, 15 bp, Homo sapiens
ataaggaacagtctt

SEQ ID NO: 1225399 - DNA, 15 bp, Homo sapiens
aataaggaacagtct

SEQ ID NO: 1225400 - DNA, 15 bp, Homo sapiens
aaataaggaacagtc

SEQ ID NO: 1225401 - DNA, 15 bp, Homo sapiens
aaaataaggaacagt

SEQ ID NO: 1225402 - DNA, 15 bp, Homo sapiens
aaaaataaggaacag

SEQ ID NO: 1225403 - DNA, 15 bp, Homo sapiens
taaaaataaggaaca

SEQ ID NO: 1225404 - DNA, 15 bp, Homo sapiens
ataaaaataaggaac

SEQ ID NO: 1225405 - DNA, 15 bp, Homo sapiens
aataaaaataaggaa

SEQ ID NO: 1225406 - DNA, 15 bp, Homo sapiens
aaataaaaataagga

SEQ ID NO: 1225407 - DNA, 15 bp, Homo sapiens
aaaataaaaataagg

SEQ ID NO: 1225408 - DNA, 15 bp, Homo sapiens
gaaaataaaaataag

SEQ ID NO: 1225409 - DNA, 15 bp, Homo sapiens
agaaaataaaaataa

SEQ ID NO: 1225410 - DNA, 15 bp, Homo sapiens
aagaaaataaaaata

SEQ ID NO: 1225411 - DNA, 15 bp, Homo sapiens
aaagaaaataaaaat

SEQ ID NO: 1225412 - DNA, 15 bp, Homo sapiens
ataaagaaaataaaa

SEQ ID NO: 1225413 - DNA, 15 bp, Homo sapiens
gataaagaaaataaa

SEQ ID NO: 1225414 - DNA, 15 bp, Homo sapiens
agataaagaaaataa

SEQ ID NO: 1225415 - DNA, 15 bp, Homo sapiens
tagataaagaaaata

SEQ ID NO: 1225416 - DNA, 15 bp, Homo sapiens
atagataaagaaaat

SEQ ID NO: 1225417 - DNA, 15 bp, Homo sapiens
aatagataaagaaaa

SEQ ID NO: 1225418 - DNA, 15 bp, Homo sapiens
aaatagataaagaaa

SEQ ID NO: 1225419 - DNA, 15 bp, Homo sapiens
taaatagataaagaa

SEQ ID NO: 1225420 - DNA, 15 bp, Homo sapiens
ataaatagataaaga

SEQ ID NO: 1225421 - DNA, 15 bp, Homo sapiens
aataaatagataaag

SEQ ID NO: 1225422 - DNA, 15 bp, Homo sapiens
aaaataaatagataa

SEQ ID NO: 1225423 - DNA, 15 bp, Homo sapiens
aaaaataaatagata

SEQ ID NO: 1225424 - DNA, 15 bp, Homo sapiens
tcaaaaataaataga

SEQ ID NO: 1225425 - DNA, 15 bp, Homo sapiens
ctcaaaaataaatag

SEQ ID NO: 1225426 - DNA, 15 bp, Homo sapiens
tgagaccttgtctca

SEQ ID NO: 1225427 - DNA, 15 bp, Homo sapiens
gtgagaccttgtctc

SEQ ID NO: 1225428 - DNA, 15 bp, Homo sapiens
agtgagaccttgtct

SEQ ID NO: 1225429 - DNA, 15 bp, Homo sapiens
gagtgagaccttgtc

SEQ ID NO: 1225430 - DNA, 15 bp, Homo sapiens
agagtgagaccttgt

SEQ ID NO: 1225431 - DNA, 15 bp, Homo sapiens
cagagtgagaccttg

SEQ ID NO: 1225432 - DNA, 15 bp, Homo sapiens
acagagtgagacctt

SEQ ID NO: 1225433 - DNA, 15 bp, Homo sapiens
taacagagtgagacc

SEQ ID NO: 1225434 - DNA, 15 bp, Homo sapiens
gtaacagagtgagac

SEQ ID NO: 1225435 - DNA, 15 bp, Homo sapiens
ggtaacagagtgaga

SEQ ID NO: 1225436 - DNA, 15 bp, Homo sapiens
gggtaacagagtgag

SEQ ID NO: 1225437 - DNA, 15 bp, Homo sapiens
tgggtaacagagtga

SEQ ID NO: 1225438 - DNA, 15 bp, Homo sapiens
ctgggtaacagagtg

SEQ ID NO: 1225439 - DNA, 15 bp, Homo sapiens
tcagcctgggtaaca

SEQ ID NO: 1225440 - DNA, 15 bp, Homo sapiens
ttcagcctgggtaac

SEQ ID NO: 1225441 - DNA, 15 bp, Homo sapiens
cttcagcctgggtaa

SEQ ID NO: 1225442 - DNA, 15 bp, Homo sapiens
acttcagcctgggta

SEQ ID NO: 1225443 - DNA, 15 bp, Homo sapiens
cacttcagcctgggt

SEQ ID NO: 1225444 - DNA, 15 bp, Homo sapiens
gccactgcacttcag

SEQ ID NO: 1225445 - DNA, 15 bp, Homo sapiens
ggccactgcacttca

SEQ ID NO: 1225446 - DNA, 15 bp, Homo sapiens
aggccactgcacttc

SEQ ID NO: 1225447 - DNA, 15 bp, Homo sapiens
gaggccactgcactt

SEQ ID NO: 1225448 - DNA, 15 bp, Homo sapiens
tgaggccactgcact

SEQ ID NO: 1225449 - DNA, 15 bp, Homo sapiens
atgaggccactgcac

SEQ ID NO: 1225450 - DNA, 15 bp, Homo sapiens
gatgaggccactgca

SEQ ID NO: 1225451 - DNA, 15 bp, Homo sapiens
agatgaggccactgc

SEQ ID NO: 1225452 - DNA, 15 bp, Homo sapiens
aagatgaggccactg

SEQ ID NO: 1225453 - DNA, 15 bp, Homo sapiens
caagatgaggccact

SEQ ID NO: 1225454 - DNA, 15 bp, Homo sapiens
ccaagatgaggccac

SEQ ID NO: 1225455 - DNA, 15 bp, Homo sapiens
gccaagatgaggcca

SEQ ID NO: 1225456 - DNA, 15 bp, Homo sapiens
agccaagatgaggcc

SEQ ID NO: 1225457 - DNA, 15 bp, Homo sapiens
gagccaagatgaggc

SEQ ID NO: 1225458 - DNA, 15 bp, Homo sapiens
tgagccaagatgagg

SEQ ID NO: 1225459 - DNA, 15 bp, Homo sapiens
gtgagccaagatgag

SEQ ID NO: 1225460 - DNA, 15 bp, Homo sapiens
agtgagccaagatga

SEQ ID NO: 1225461 - DNA, 15 bp, Homo sapiens
cagtgagccaagatg

SEQ ID NO: 1225462 - DNA, 15 bp, Homo sapiens
ttggaggttgcagtg

SEQ ID NO: 1225463 - DNA, 15 bp, Homo sapiens
gttggaggttgcagt

SEQ ID NO: 1225464 - DNA, 15 bp, Homo sapiens
agttggaggttgcag

SEQ ID NO: 1225465 - DNA, 15 bp, Homo sapiens
gagttggaggttgca

SEQ ID NO: 1225466 - DNA, 15 bp, Homo sapiens
ggagttggaggttgc

SEQ ID NO: 1225467 - DNA, 15 bp, Homo sapiens
gggagttggaggttg

SEQ ID NO: 1225468 - DNA, 15 bp, Homo sapiens
tgggagttggaggtt

SEQ ID NO: 1225469 - DNA, 15 bp, Homo sapiens
ctgggagttggaggt

SEQ ID NO: 1225470 - DNA, 15 bp, Homo sapiens
cctgggagttggagg

SEQ ID NO: 1225471 - DNA, 15 bp, Homo sapiens
acctgggagttggag

SEQ ID NO: 1225472 - DNA, 15 bp, Homo sapiens
aacctgggagttgga

SEQ ID NO: 1225473 - DNA, 15 bp, Homo sapiens
gaacctgggagttgg

SEQ ID NO: 1225474 - DNA, 15 bp, Homo sapiens
tgaacctgggagttg

SEQ ID NO: 1225475 - DNA, 15 bp, Homo sapiens
ttgaacctgggagtt

SEQ ID NO: 1225476 - DNA, 15 bp, Homo sapiens
ttacttgggaggctg

SEQ ID NO: 1225477 - DNA, 15 bp, Homo sapiens
gttacttgggaggct

SEQ ID NO: 1225478 - DNA, 15 bp, Homo sapiens
agttacttgggaggc

SEQ ID NO: 1225479 - DNA, 15 bp, Homo sapiens
cagttacttgggagg

SEQ ID NO: 1225480 - DNA, 15 bp, Homo sapiens
ccagttacttgggag

SEQ ID NO: 1225481 - DNA, 15 bp, Homo sapiens
cccagttacttggga

SEQ ID NO: 1225482 - DNA, 15 bp, Homo sapiens
tcccagttacttggg

SEQ ID NO: 1225483 - DNA, 15 bp, Homo sapiens
atcccagttacttgg

SEQ ID NO: 1225484 - DNA, 15 bp, Homo sapiens
aatcccagttacttg

SEQ ID NO: 1225485 - DNA, 15 bp, Homo sapiens
taatcccagttactt

SEQ ID NO: 1225486 - DNA, 15 bp, Homo sapiens
agcgcctgtaatccc

SEQ ID NO: 1225487 - DNA, 15 bp, Homo sapiens
gagcgcctgtaatcc

SEQ ID NO: 1225488 - DNA, 15 bp, Homo sapiens
tgagcgcctgtaatc

SEQ ID NO: 1225489 - DNA, 15 bp, Homo sapiens
atgagcgcctgtaat

SEQ ID NO: 1225490 - DNA, 15 bp, Homo sapiens
gatgagcgcctgtaa

SEQ ID NO: 1225491 - DNA, 15 bp, Homo sapiens
tgatgagcgcctgta

SEQ ID NO: 1225492 - DNA, 15 bp, Homo sapiens
ttgatgagcgcctgt

SEQ ID NO: 1225493 - DNA, 15 bp, Homo sapiens
gttgatgagcgcctg

SEQ ID NO: 1225494 - DNA, 15 bp, Homo sapiens
tgttgatgagcgcct

SEQ ID NO: 1225495 - DNA, 15 bp, Homo sapiens
gtgttgatgagcgcc

SEQ ID NO: 1225496 - DNA, 15 bp, Homo sapiens
cgtgttgatgagcgc

SEQ ID NO: 1225497 - DNA, 15 bp, Homo sapiens
gcgtgttgatgagcg

SEQ ID NO: 1225498 - DNA, 15 bp, Homo sapiens
ggcgtgttgatgagc

SEQ ID NO: 1225499 - DNA, 15 bp, Homo sapiens
gggcgtgttgatgag

SEQ ID NO: 1225500 - DNA, 15 bp, Homo sapiens
tgggcgtgttgatga

SEQ ID NO: 1225501 - DNA, 15 bp, Homo sapiens
ctgggcgtgttgatg

SEQ ID NO: 1225502 - DNA, 15 bp, Homo sapiens
gctgggcgtgttgat

SEQ ID NO: 1225503 - DNA, 15 bp, Homo sapiens
agctgggcgtgttga

SEQ ID NO: 1225504 - DNA, 15 bp, Homo sapiens
tagctgggcgtgttg

SEQ ID NO: 1225505 - DNA, 15 bp, Homo sapiens
ttagctgggcgtgtt

SEQ ID NO: 1225506 - DNA, 15 bp, Homo sapiens
attagctgggcgtgt

SEQ ID NO: 1225507 - DNA, 15 bp, Homo sapiens
caaaacattagctgg

SEQ ID NO: 1225508 - DNA, 15 bp, Homo sapiens
ccaaaacattagctg

SEQ ID NO: 1225509 - DNA, 15 bp, Homo sapiens
tccaaaacattagct

SEQ ID NO: 1225510 - DNA, 15 bp, Homo sapiens
ttccaaaacattagc

SEQ ID NO: 1225511 - DNA, 15 bp, Homo sapiens
attccaaaacattag

SEQ ID NO: 1225512 - DNA, 15 bp, Homo sapiens
aattccaaaacatta

SEQ ID NO: 1225513 - DNA, 15 bp, Homo sapiens
aaattccaaaacatt

SEQ ID NO: 1225514 - DNA, 15 bp, Homo sapiens
aaaattccaaaacat

SEQ ID NO: 1225515 - DNA, 15 bp, Homo sapiens
taaaattccaaaaca

SEQ ID NO: 1225516 - DNA, 15 bp, Homo sapiens
ctaaaattccaaaac

SEQ ID NO: 1225517 - DNA, 15 bp, Homo sapiens
actaaaattccaaaa

SEQ ID NO: 1225518 - DNA, 15 bp, Homo sapiens
tactaaaattccaaa

SEQ ID NO: 1225519 - DNA, 15 bp, Homo sapiens
ctactaaaattccaa

SEQ ID NO: 1225520 - DNA, 15 bp, Homo sapiens
tctactaaaattcca

SEQ ID NO: 1225521 - DNA, 15 bp, Homo sapiens
ctctactaaaattcc

SEQ ID NO: 1225522 - DNA, 15 bp, Homo sapiens
tctctactaaaattc

SEQ ID NO: 1225523 - DNA, 15 bp, Homo sapiens
gtctctactaaaatt

SEQ ID NO: 1225524 - DNA, 15 bp, Homo sapiens
cgtctctactaaaat

SEQ ID NO: 1225525 - DNA, 15 bp, Homo sapiens
gagttcgaaaccagc

SEQ ID NO: 1225526 - DNA, 15 bp, Homo sapiens
ggagttcgaaaccag

SEQ ID NO: 1225527 - DNA, 15 bp, Homo sapiens
aggagttcgaaacca

SEQ ID NO: 1225528 - DNA, 15 bp, Homo sapiens
caggagttcgaaacc

SEQ ID NO: 1225529 - DNA, 15 bp, Homo sapiens
tcaggagttcgaaac

SEQ ID NO: 1225530 - DNA, 15 bp, Homo sapiens
gtcaggagttcgaaa

SEQ ID NO: 1225531 - DNA, 15 bp, Homo sapiens
ggtcaggagttcgaa

SEQ ID NO: 1225532 - DNA, 15 bp, Homo sapiens
aatcacttgaggtca

SEQ ID NO: 1225533 - DNA, 15 bp, Homo sapiens
aaatcacttgaggtc

SEQ ID NO: 1225534 - DNA, 15 bp, Homo sapiens
caaatcacttgaggt

SEQ ID NO: 1225535 - DNA, 15 bp, Homo sapiens
gcaaatcacttgagg

SEQ ID NO: 1225536 - DNA, 15 bp, Homo sapiens
agcaaatcacttgag

SEQ ID NO: 1225537 - DNA, 15 bp, Homo sapiens
gagcaaatcacttga

SEQ ID NO: 1225538 - DNA, 15 bp, Homo sapiens
agagcaaatcacttg

SEQ ID NO: 1225539 - DNA, 15 bp, Homo sapiens
gagagcaaatcactt

SEQ ID NO: 1225540 - DNA, 15 bp, Homo sapiens
ggagagcaaatcact

SEQ ID NO: 1225541 - DNA, 15 bp, Homo sapiens
aggagagcaaatcac

SEQ ID NO: 1225542 - DNA, 15 bp, Homo sapiens
taggagagcaaatca

SEQ ID NO: 1225543 - DNA, 15 bp, Homo sapiens
ctaggagagcaaatc

SEQ ID NO: 1225544 - DNA, 15 bp, Homo sapiens
cctaggagagcaaat

SEQ ID NO: 1225545 - DNA, 15 bp, Homo sapiens
gcctaggagagcaaa

SEQ ID NO: 1225546 - DNA, 15 bp, Homo sapiens
ggcctaggagagcaa

SEQ ID NO: 1225547 - DNA, 15 bp, Homo sapiens
aggcctaggagagca

SEQ ID NO: 1225548 - DNA, 15 bp, Homo sapiens
gaggcctaggagagc

SEQ ID NO: 1225549 - DNA, 15 bp, Homo sapiens
ggaggcctaggagag

SEQ ID NO: 1225550 - DNA, 15 bp, Homo sapiens
gggaggcctaggaga

SEQ ID NO: 1225551 - DNA, 15 bp, Homo sapiens
tgggaggcctaggag

SEQ ID NO: 1225552 - DNA, 15 bp, Homo sapiens
ttgggaggcctagga

SEQ ID NO: 1225553 - DNA, 15 bp, Homo sapiens
tttgggaggcctagg

SEQ ID NO: 1225554 - DNA, 15 bp, Homo sapiens
ctttgggaggcctag

SEQ ID NO: 1225555 - DNA, 15 bp, Homo sapiens
actttgggaggccta

SEQ ID NO: 1225556 - DNA, 15 bp, Homo sapiens
cactttgggaggcct

SEQ ID NO: 1225557 - DNA, 15 bp, Homo sapiens
actataatcccagca

SEQ ID NO: 1225558 - DNA, 15 bp, Homo sapiens
gactataatcccagc

SEQ ID NO: 1225559 - DNA, 15 bp, Homo sapiens
cgactataatcccag

SEQ ID NO: 1225560 - DNA, 15 bp, Homo sapiens
acgactataatccca

SEQ ID NO: 1225561 - DNA, 15 bp, Homo sapiens
cacgactataatccc

SEQ ID NO: 1225562 - DNA, 15 bp, Homo sapiens
tcacgactataatcc

SEQ ID NO: 1225563 - DNA, 15 bp, Homo sapiens
ctcacgactataatc

SEQ ID NO: 1225564 - DNA, 15 bp, Homo sapiens
gctcacgactataat

SEQ ID NO: 1225565 - DNA, 15 bp, Homo sapiens
ggctcacgactataa

SEQ ID NO: 1225566 - DNA, 15 bp, Homo sapiens
tggctcacgactata

SEQ ID NO: 1225567 - DNA, 15 bp, Homo sapiens
gtggctcacgactat

SEQ ID NO: 1225568 - DNA, 15 bp, Homo sapiens
cgtggctcacgacta

SEQ ID NO: 1225569 - DNA, 15 bp, Homo sapiens
ccgtggctcacgact

SEQ ID NO: 1225570 - DNA, 15 bp, Homo sapiens
accgtggctcacgac

SEQ ID NO: 1225571 - DNA, 15 bp, Homo sapiens
aaccgtggctcacga

SEQ ID NO: 1225572 - DNA, 15 bp, Homo sapiens
gaaccgtggctcacg

SEQ ID NO: 1225573 - DNA, 15 bp, Homo sapiens
ggaaccgtggctcac

SEQ ID NO: 1225574 - DNA, 15 bp, Homo sapiens
gggaaccgtggctca

SEQ ID NO: 1225575 - DNA, 15 bp, Homo sapiens
tgggaaccgtggctc

SEQ ID NO: 1225576 - DNA, 15 bp, Homo sapiens
ctgggaaccgtggct

SEQ ID NO: 1225577 - DNA, 15 bp, Homo sapiens
gctgggaaccgtggc

SEQ ID NO: 1225578 - DNA, 15 bp, Homo sapiens
agctgggaaccgtgg

SEQ ID NO: 1225579 - DNA, 15 bp, Homo sapiens
tagctgggaaccgtg

SEQ ID NO: 1225580 - DNA, 15 bp, Homo sapiens
ctagctgggaaccgt

SEQ ID NO: 1225581 - DNA, 15 bp, Homo sapiens
actagctgggaaccg

SEQ ID NO: 1225582 - DNA, 15 bp, Homo sapiens
aactagctgggaacc

SEQ ID NO: 1225583 - DNA, 15 bp, Homo sapiens
aaactagctgggaac

SEQ ID NO: 1225584 - DNA, 15 bp, Homo sapiens
aaaactagctgggaa

SEQ ID NO: 1225585 - DNA, 15 bp, Homo sapiens
taaaactagctggga

SEQ ID NO: 1225586 - DNA, 15 bp, Homo sapiens
ttaaaactagctggg

SEQ ID NO: 1225587 - DNA, 15 bp, Homo sapiens
tttaaaactagctgg

SEQ ID NO: 1225588 - DNA, 15 bp, Homo sapiens
ctttaaaactagctg

SEQ ID NO: 1225589 - DNA, 15 bp, Homo sapiens
tctttaaaactagct

SEQ ID NO: 1225590 - DNA, 15 bp, Homo sapiens
atctttaaaactagc

SEQ ID NO: 1225591 - DNA, 15 bp, Homo sapiens
aatctttaaaactag

SEQ ID NO: 1225592 - DNA, 15 bp, Homo sapiens
aaatctttaaaacta

SEQ ID NO: 1225593 - DNA, 15 bp, Homo sapiens
aaaatctttaaaact

SEQ ID NO: 1225594 - DNA, 15 bp, Homo sapiens
aaaaatctttaaaac

SEQ ID NO: 1225595 - DNA, 15 bp, Homo sapiens
ctaaaaatctttaaa

SEQ ID NO: 1225596 - DNA, 15 bp, Homo sapiens
tctaaaaatctttaa

SEQ ID NO: 1225597 - DNA, 15 bp, Homo sapiens
atctaaaaatcttta

SEQ ID NO: 1225598 - DNA, 15 bp, Homo sapiens
catctaaaaatcttt

SEQ ID NO: 1225599 - DNA, 15 bp, Homo sapiens
ccatctaaaaatctt

SEQ ID NO: 1225600 - DNA, 15 bp, Homo sapiens
accatctaaaaatct

SEQ ID NO: 1225601 - DNA, 15 bp, Homo sapiens
aaccatctaaaaatc

SEQ ID NO: 1225602 - DNA, 15 bp, Homo sapiens
taaccatctaaaaat

SEQ ID NO: 1225603 - DNA, 15 bp, Homo sapiens
ttaaccatctaaaaa

SEQ ID NO: 1225604 - DNA, 15 bp, Homo sapiens
cttaaccatctaaaa

SEQ ID NO: 1225605 - DNA, 15 bp, Homo sapiens
ccttaaccatctaaa

SEQ ID NO: 1225606 - DNA, 15 bp, Homo sapiens
cccttaaccatctaa

SEQ ID NO: 1225607 - DNA, 15 bp, Homo sapiens
gcccttaaccatcta

SEQ ID NO: 1225608 - DNA, 15 bp, Homo sapiens
ggcccttaaccatct

SEQ ID NO: 1225609 - DNA, 15 bp, Homo sapiens
tggcccttaaccatc

SEQ ID NO: 1225610 - DNA, 15 bp, Homo sapiens
ctggcccttaaccat

SEQ ID NO: 1225611 - DNA, 15 bp, Homo sapiens
cctggcccttaacca

SEQ ID NO: 1225612 - DNA, 15 bp, Homo sapiens
gcctggcccttaacc

SEQ ID NO: 1225613 - DNA, 15 bp, Homo sapiens
cgcctggcccttaac

SEQ ID NO: 1225614 - DNA, 15 bp, Homo sapiens
gcgcctggcccttaa

SEQ ID NO: 1225615 - DNA, 15 bp, Homo sapiens
ggcgcctggccctta

SEQ ID NO: 1225616 - DNA, 15 bp, Homo sapiens
cggcgcctggccctt

SEQ ID NO: 1225617 - DNA, 15 bp, Homo sapiens
acggcgcctggccct

SEQ ID NO: 1225618 - DNA, 15 bp, Homo sapiens
cacggcgcctggccc

SEQ ID NO: 1225619 - DNA, 15 bp, Homo sapiens
ccacggcgcctggcc

SEQ ID NO: 1225620 - DNA, 15 bp, Homo sapiens
gccacggcgcctggc

SEQ ID NO: 1225621 - DNA, 15 bp, Homo sapiens
agccacggcgcctgg

SEQ ID NO: 1225622 - DNA, 15 bp, Homo sapiens
gagccacggcgcctg

SEQ ID NO: 1225623 - DNA, 15 bp, Homo sapiens
tgagccacggcgcct

SEQ ID NO: 1225624 - DNA, 15 bp, Homo sapiens
cgtgagccacggcgc

SEQ ID NO: 1225625 - DNA, 15 bp, Homo sapiens
gcgtgagccacggcg

SEQ ID NO: 1225626 - DNA, 15 bp, Homo sapiens
tgatccgcctgcttt

SEQ ID NO: 1225627 - DNA, 15 bp, Homo sapiens
gtgatccgcctgctt

SEQ ID NO: 1225628 - DNA, 15 bp, Homo sapiens
cgtgatccgcctgct

SEQ ID NO: 1225629 - DNA, 15 bp, Homo sapiens
cggtttcaccatgtt

SEQ ID NO: 1225630 - DNA, 15 bp, Homo sapiens
gcggtttcaccatgt

SEQ ID NO: 1225631 - DNA, 15 bp, Homo sapiens
cgcggtttcaccatg

SEQ ID NO: 1225632 - DNA, 15 bp, Homo sapiens
acgcggtttcaccat

SEQ ID NO: 1225633 - DNA, 15 bp, Homo sapiens
gacgcggtttcacca

SEQ ID NO: 1225634 - DNA, 15 bp, Homo sapiens
agacgcggtttcacc

SEQ ID NO: 1225635 - DNA, 15 bp, Homo sapiens
tagacgcggtttcac

SEQ ID NO: 1225636 - DNA, 15 bp, Homo sapiens
gtagacgcggtttca

SEQ ID NO: 1225637 - DNA, 15 bp, Homo sapiens
ggtagacgcggtttc

SEQ ID NO: 1225638 - DNA, 15 bp, Homo sapiens
tggtagacgcggttt

SEQ ID NO: 1225639 - DNA, 15 bp, Homo sapiens
ttggtagacgcggtt

SEQ ID NO: 1225640 - DNA, 15 bp, Homo sapiens
tttggtagacgcggt

SEQ ID NO: 1225641 - DNA, 15 bp, Homo sapiens
ttttggtagacgcgg

SEQ ID NO: 1225642 - DNA, 15 bp, Homo sapiens
tttttggtagacgcg

SEQ ID NO: 1225643 - DNA, 15 bp, Homo sapiens
ttttttggtagacgc

SEQ ID NO: 1225644 - DNA, 15 bp, Homo sapiens
gttttttggtagacg

SEQ ID NO: 1225645 - DNA, 15 bp, Homo sapiens
tgttttttggtagac

SEQ ID NO: 1225646 - DNA, 15 bp, Homo sapiens
ttgttttttggtaga

SEQ ID NO: 1225647 - DNA, 15 bp, Homo sapiens
tttgttttttggtag

SEQ ID NO: 1225648 - DNA, 15 bp, Homo sapiens
ttttgttttttggta

SEQ ID NO: 1225649 - DNA, 15 bp, Homo sapiens
tttttgttttttggt

SEQ ID NO: 1225650 - DNA, 15 bp, Homo sapiens
ttttttgttttttgg

SEQ ID NO: 1225651 - DNA, 15 bp, Homo sapiens
attttttgttttttg

SEQ ID NO: 1225652 - DNA, 15 bp, Homo sapiens
aattttttgtttttt

SEQ ID NO: 1225653 - DNA, 15 bp, Homo sapiens
taattttttgttttt

SEQ ID NO: 1225654 - DNA, 15 bp, Homo sapiens
ctaattttttgtttt

SEQ ID NO: 1225655 - DNA, 15 bp, Homo sapiens
gctaattttttgttt

SEQ ID NO: 1225656 - DNA, 15 bp, Homo sapiens
ggctaattttttgtt

SEQ ID NO: 1225657 - DNA, 15 bp, Homo sapiens
gccctggctaatttt

SEQ ID NO: 1225658 - DNA, 15 bp, Homo sapiens
agccctggctaattt

SEQ ID NO: 1225659 - DNA, 15 bp, Homo sapiens
cagccctggctaatt

SEQ ID NO: 1225660 - DNA, 15 bp, Homo sapiens
ccagccctggctaat

SEQ ID NO: 1225661 - DNA, 15 bp, Homo sapiens
accagccctggctaa

SEQ ID NO: 1225662 - DNA, 15 bp, Homo sapiens
caccagccctggcta

SEQ ID NO: 1225663 - DNA, 15 bp, Homo sapiens
ccaccagccctggct

SEQ ID NO: 1225664 - DNA, 15 bp, Homo sapiens
gccaccagccctggc

SEQ ID NO: 1225665 - DNA, 15 bp, Homo sapiens
tgccaccagccctgg

SEQ ID NO: 1225666 - DNA, 15 bp, Homo sapiens
gtgccaccagccctg

SEQ ID NO: 1225667 - DNA, 15 bp, Homo sapiens
cgtgccaccagccct

SEQ ID NO: 1225668 - DNA, 15 bp, Homo sapiens
gcgtgccaccagccc

SEQ ID NO: 1225669 - DNA, 15 bp, Homo sapiens
tgcgtgccaccagcc

SEQ ID NO: 1225670 - DNA, 15 bp, Homo sapiens
gtgcgtgccaccagc

SEQ ID NO: 1225671 - DNA, 15 bp, Homo sapiens
ggtgcgtgccaccag

SEQ ID NO: 1225672 - DNA, 15 bp, Homo sapiens
gctcagcctcccgag

SEQ ID NO: 1225673 - DNA, 15 bp, Homo sapiens
ggctcagcctcccga

SEQ ID NO: 1225674 - DNA, 15 bp, Homo sapiens
tggctcagcctcccg

SEQ ID NO: 1225675 - DNA, 15 bp, Homo sapiens
ctggctcagcctccc

SEQ ID NO: 1225676 - DNA, 15 bp, Homo sapiens
gattctcctggctca

SEQ ID NO: 1225677 - DNA, 15 bp, Homo sapiens
ggattctcctggctc

SEQ ID NO: 1225678 - DNA, 15 bp, Homo sapiens
gggattctcctggct

SEQ ID NO: 1225679 - DNA, 15 bp, Homo sapiens
agggattctcctggc

SEQ ID NO: 1225680 - DNA, 15 bp, Homo sapiens
aagggattctcctgg

SEQ ID NO: 1225681 - DNA, 15 bp, Homo sapiens
aggttcaagggattc

SEQ ID NO: 1225682 - DNA, 15 bp, Homo sapiens
caggttcaagggatt

SEQ ID NO: 1225683 - DNA, 15 bp, Homo sapiens
ccaggttcaagggat

SEQ ID NO: 1225684 - DNA, 15 bp, Homo sapiens
cccaggttcaaggga

SEQ ID NO: 1225685 - DNA, 15 bp, Homo sapiens
tcccaggttcaaggg

SEQ ID NO: 1225686 - DNA, 15 bp, Homo sapiens
cgtgatctcagctca

SEQ ID NO: 1225687 - DNA, 15 bp, Homo sapiens
gcgtgatctcagctc

SEQ ID NO: 1225688 - DNA, 15 bp, Homo sapiens
ggcgtgatctcagct

SEQ ID NO: 1225689 - DNA, 15 bp, Homo sapiens
tggcgtgatctcagc

SEQ ID NO: 1225690 - DNA, 15 bp, Homo sapiens
gtggcgtgatctcag

SEQ ID NO: 1225691 - DNA, 15 bp, Homo sapiens
agtggcgtgatctca

SEQ ID NO: 1225692 - DNA, 15 bp, Homo sapiens
tgcccaggctggaat

SEQ ID NO: 1225693 - DNA, 15 bp, Homo sapiens
attttgagacagagt

SEQ ID NO: 1225694 - DNA, 15 bp, Homo sapiens
tattttgagacagag

SEQ ID NO: 1225695 - DNA, 15 bp, Homo sapiens
ttattttgagacaga

SEQ ID NO: 1225696 - DNA, 15 bp, Homo sapiens
tttattttgagacag

SEQ ID NO: 1225697 - DNA, 15 bp, Homo sapiens
atttattttgagaca

SEQ ID NO: 1225698 - DNA, 15 bp, Homo sapiens
tatttattttgagac

SEQ ID NO: 1225699 - DNA, 15 bp, Homo sapiens
ttatttattttgaga

SEQ ID NO: 1225700 - DNA, 15 bp, Homo sapiens
tttatttattttgag

SEQ ID NO: 1225701 - DNA, 15 bp, Homo sapiens
atttatttattttga

SEQ ID NO: 1225702 - DNA, 15 bp, Homo sapiens
tatttatttattttg

SEQ ID NO: 1225703 - DNA, 15 bp, Homo sapiens
atatttttatttatt

SEQ ID NO: 1225704 - DNA, 15 bp, Homo sapiens
aatatttttatttat

SEQ ID NO: 1225705 - DNA, 15 bp, Homo sapiens
aaatatttttattta

SEQ ID NO: 1225706 - DNA, 15 bp, Homo sapiens
taaatatttttattt

SEQ ID NO: 1225707 - DNA, 15 bp, Homo sapiens
ataaatatttttatt

SEQ ID NO: 1225708 - DNA, 15 bp, Homo sapiens
tataaatatttttat

SEQ ID NO: 1225709 - DNA, 15 bp, Homo sapiens
gtataaatattttta

SEQ ID NO: 1225710 - DNA, 15 bp, Homo sapiens
tgtataaatattttt

SEQ ID NO: 1225711 - DNA, 15 bp, Homo sapiens
atgtataaatatttt

SEQ ID NO: 1225712 - DNA, 15 bp, Homo sapiens
catgtataaatattt

SEQ ID NO: 1225713 - DNA, 15 bp, Homo sapiens
ccatgtataaatatt

SEQ ID NO: 1225714 - DNA, 15 bp, Homo sapiens
accatgtataaatat

SEQ ID NO: 1225715 - DNA, 15 bp, Homo sapiens
aaccatgtataaata

SEQ ID NO: 1225716 - DNA, 15 bp, Homo sapiens
taaccatgtataaat

SEQ ID NO: 1225717 - DNA, 15 bp, Homo sapiens
ttaaccatgtataaa

SEQ ID NO: 1225718 - DNA, 15 bp, Homo sapiens
tttaaccatgtataa

SEQ ID NO: 1225719 - DNA, 15 bp, Homo sapiens
ctttaaccatgtata

SEQ ID NO: 1225720 - DNA, 15 bp, Homo sapiens
actttaaccatgtat

SEQ ID NO: 1225721 - DNA, 15 bp, Homo sapiens
tactttaaccatgta

SEQ ID NO: 1225722 - DNA, 15 bp, Homo sapiens
atactttaaccatgt

SEQ ID NO: 1225723 - DNA, 15 bp, Homo sapiens
catactttaaccatg

SEQ ID NO: 1225724 - DNA, 15 bp, Homo sapiens
acatactttaaccat

SEQ ID NO: 1225725 - DNA, 15 bp, Homo sapiens
tacatactttaacca

SEQ ID NO: 1225726 - DNA, 15 bp, Homo sapiens
atacatactttaacc

SEQ ID NO: 1225727 - DNA, 15 bp, Homo sapiens
aatacatactttaac

SEQ ID NO: 1225728 - DNA, 15 bp, Homo sapiens
caatacatactttaa

SEQ ID NO: 1225729 - DNA, 15 bp, Homo sapiens
acaatacatacttta

SEQ ID NO: 1225730 - DNA, 15 bp, Homo sapiens
cacaatacatacttt

SEQ ID NO: 1225731 - DNA, 15 bp, Homo sapiens
ccacaatacatactt

SEQ ID NO: 1225732 - DNA, 15 bp, Homo sapiens
cccacaatacatact

SEQ ID NO: 1225733 - DNA, 15 bp, Homo sapiens
acccacaatacatac

SEQ ID NO: 1225734 - DNA, 15 bp, Homo sapiens
cacccacaatacata

SEQ ID NO: 1225735 - DNA, 15 bp, Homo sapiens
acacccacaatacat

SEQ ID NO: 1225736 - DNA, 15 bp, Homo sapiens
tacacccacaataca

SEQ ID NO: 1225737 - DNA, 15 bp, Homo sapiens
atacacccacaatac

SEQ ID NO: 1225738 - DNA, 15 bp, Homo sapiens
tatacacccacaata

SEQ ID NO: 1225739 - DNA, 15 bp, Homo sapiens
atatacacccacaat

SEQ ID NO: 1225740 - DNA, 15 bp, Homo sapiens
aatatacacccacaa

SEQ ID NO: 1225741 - DNA, 15 bp, Homo sapiens
aaatatacacccaca

SEQ ID NO: 1225742 - DNA, 15 bp, Homo sapiens
aaaatatacacccac

SEQ ID NO: 1225743 - DNA, 15 bp, Homo sapiens
aaaaatatacaccca

SEQ ID NO: 1225744 - DNA, 15 bp, Homo sapiens
taaaaatatacaccc

SEQ ID NO: 1225745 - DNA, 15 bp, Homo sapiens
ataaaaatatacacc

SEQ ID NO: 1225746 - DNA, 15 bp, Homo sapiens
aataaaaatatacac

SEQ ID NO: 1225747 - DNA, 15 bp, Homo sapiens
gaataaaaatataca

SEQ ID NO: 1225748 - DNA, 15 bp, Homo sapiens
agaataaaaatatac

SEQ ID NO: 1225749 - DNA, 15 bp, Homo sapiens
aagaataaaaatata

SEQ ID NO: 1225750 - DNA, 15 bp, Homo sapiens
caagaataaaaatat

SEQ ID NO: 1225751 - DNA, 15 bp, Homo sapiens
gcaagaataaaaata

SEQ ID NO: 1225752 - DNA, 15 bp, Homo sapiens
agcaagaataaaaat

SEQ ID NO: 1225753 - DNA, 15 bp, Homo sapiens
tagcaagaataaaaa

SEQ ID NO: 1225754 - DNA, 15 bp, Homo sapiens
ttagcaagaataaaa

SEQ ID NO: 1225755 - DNA, 15 bp, Homo sapiens
gttagcaagaataaa

SEQ ID NO: 1225756 - DNA, 15 bp, Homo sapiens
tgttagcaagaataa

SEQ ID NO: 1225757 - DNA, 15 bp, Homo sapiens
atgttagcaagaata

SEQ ID NO: 1225758 - DNA, 15 bp, Homo sapiens
aatgttagcaagaat

SEQ ID NO: 1225759 - DNA, 15 bp, Homo sapiens
aaatgttagcaagaa

SEQ ID NO: 1225760 - DNA, 15 bp, Homo sapiens
aaaatgttagcaaga

SEQ ID NO: 1225761 - DNA, 15 bp, Homo sapiens
taaaatgttagcaag

SEQ ID NO: 1225762 - DNA, 15 bp, Homo sapiens
gtaaaatgttagcaa

SEQ ID NO: 1225763 - DNA, 15 bp, Homo sapiens
ggtaaaatgttagca

SEQ ID NO: 1225764 - DNA, 15 bp, Homo sapiens
tggtaaaatgttagc

SEQ ID NO: 1225765 - DNA, 15 bp, Homo sapiens
ctggtaaaatgttag

SEQ ID NO: 1225766 - DNA, 15 bp, Homo sapiens
tctggtaaaatgtta

SEQ ID NO: 1225767 - DNA, 15 bp, Homo sapiens
ttctggtaaaatgtt

SEQ ID NO: 1225768 - DNA, 15 bp, Homo sapiens
tttctggtaaaatgt

SEQ ID NO: 1225769 - DNA, 15 bp, Homo sapiens
atttctggtaaaatg

SEQ ID NO: 1225770 - DNA, 15 bp, Homo sapiens
tatttctggtaaaat

SEQ ID NO: 1225771 - DNA, 15 bp, Homo sapiens
ttatttctggtaaaa

SEQ ID NO: 1225772 - DNA, 15 bp, Homo sapiens
tttatttctggtaaa

SEQ ID NO: 1225773 - DNA, 15 bp, Homo sapiens
atttatttctggtaa

SEQ ID NO: 1225774 - DNA, 15 bp, Homo sapiens
aatttatttctggta

SEQ ID NO: 1225775 - DNA, 15 bp, Homo sapiens
taatttatttctggt

SEQ ID NO: 1225776 - DNA, 15 bp, Homo sapiens
ttaatttatttctgg

SEQ ID NO: 1225777 - DNA, 15 bp, Homo sapiens
tttaatttatttctg

SEQ ID NO: 1225778 - DNA, 15 bp, Homo sapiens
ttttaatttatttct

SEQ ID NO: 1225779 - DNA, 15 bp, Homo sapiens
gttttaatttatttc

SEQ ID NO: 1225780 - DNA, 15 bp, Homo sapiens
tgttttaatttattt

SEQ ID NO: 1225781 - DNA, 15 bp, Homo sapiens
atgttttaatttatt

SEQ ID NO: 1225782 - DNA, 15 bp, Homo sapiens
tatgttttaatttat

SEQ ID NO: 1225783 - DNA, 15 bp, Homo sapiens
ctatgttttaattta

SEQ ID NO: 1225784 - DNA, 15 bp, Homo sapiens
actatgttttaattt

SEQ ID NO: 1225785 - DNA, 15 bp, Homo sapiens
aactatgttttaatt

SEQ ID NO: 1225786 - DNA, 15 bp, Homo sapiens
taactatgttttaat

SEQ ID NO: 1225787 - DNA, 15 bp, Homo sapiens
ttaactatgttttaa

SEQ ID NO: 1225788 - DNA, 15 bp, Homo sapiens
attaactatgtttta

SEQ ID NO: 1225789 - DNA, 15 bp, Homo sapiens
aattaactatgtttt

SEQ ID NO: 1225790 - DNA, 15 bp, Homo sapiens
taattaactatgttt

SEQ ID NO: 1225791 - DNA, 15 bp, Homo sapiens
ataattaactatgtt

SEQ ID NO: 1225792 - DNA, 15 bp, Homo sapiens
gataattaactatgt

SEQ ID NO: 1225793 - DNA, 15 bp, Homo sapiens
agataattaactatg

SEQ ID NO: 1225794 - DNA, 15 bp, Homo sapiens
aagataattaactat

SEQ ID NO: 1225795 - DNA, 15 bp, Homo sapiens
aaagataattaacta

SEQ ID NO: 1225796 - DNA, 15 bp, Homo sapiens
gaaagataattaact

SEQ ID NO: 1225797 - DNA, 15 bp, Homo sapiens
agaaagataattaac

SEQ ID NO: 1225798 - DNA, 15 bp, Homo sapiens
aagaaagataattaa

SEQ ID NO: 1225799 - DNA, 15 bp, Homo sapiens
taagaaagataatta

SEQ ID NO: 1225800 - DNA, 15 bp, Homo sapiens
ttaagaaagataatt

SEQ ID NO: 1225801 - DNA, 15 bp, Homo sapiens
cttaagaaagataat

SEQ ID NO: 1225802 - DNA, 15 bp, Homo sapiens
acttaagaaagataa

SEQ ID NO: 1225803 - DNA, 15 bp, Homo sapiens
tacttaagaaagata

SEQ ID NO: 1225804 - DNA, 15 bp, Homo sapiens
ttacttaagaaagat

SEQ ID NO: 1225805 - DNA, 15 bp, Homo sapiens
tttacttaagaaaga

SEQ ID NO: 1225806 - DNA, 15 bp, Homo sapiens
atttacttaagaaag

SEQ ID NO: 1225807 - DNA, 15 bp, Homo sapiens
aatttacttaagaaa

SEQ ID NO: 1225808 - DNA, 15 bp, Homo sapiens
caatttacttaagaa

SEQ ID NO: 1225809 - DNA, 15 bp, Homo sapiens
tcaatttacttaaga

SEQ ID NO: 1225810 - DNA, 15 bp, Homo sapiens
ttcaatttacttaag

SEQ ID NO: 1225811 - DNA, 15 bp, Homo sapiens
attcaatttacttaa

SEQ ID NO: 1225812 - DNA, 15 bp, Homo sapiens
cattcaatttactta

SEQ ID NO: 1225813 - DNA, 15 bp, Homo sapiens
acattcaatttactt

SEQ ID NO: 1225814 - DNA, 15 bp, Homo sapiens
tacattcaatttact

SEQ ID NO: 1225815 - DNA, 15 bp, Homo sapiens
atacattcaatttac

SEQ ID NO: 1225816 - DNA, 15 bp, Homo sapiens
aatacattcaattta

SEQ ID NO: 1225817 - DNA, 15 bp, Homo sapiens
taatacattcaattt

SEQ ID NO: 1225818 - DNA, 15 bp, Homo sapiens
ttaatacattcaatt

SEQ ID NO: 1225819 - DNA, 15 bp, Homo sapiens
attaatacattcaat

SEQ ID NO: 1225820 - DNA, 15 bp, Homo sapiens
tattaatacattcaa

SEQ ID NO: 1225821 - DNA, 15 bp, Homo sapiens
atattaatacattca

SEQ ID NO: 1225822 - DNA, 15 bp, Homo sapiens
catattaatacattc

SEQ ID NO: 1225823 - DNA, 15 bp, Homo sapiens
ccatattaatacatt

SEQ ID NO: 1225824 - DNA, 15 bp, Homo sapiens
tccatattaatacat

SEQ ID NO: 1225825 - DNA, 15 bp, Homo sapiens
ttccatattaataca

SEQ ID NO: 1225826 - DNA, 15 bp, Homo sapiens
tttccatattaatac

SEQ ID NO: 1225827 - DNA, 15 bp, Homo sapiens
atttccatattaata

SEQ ID NO: 1225828 - DNA, 15 bp, Homo sapiens
aatttccatattaat

SEQ ID NO: 1225829 - DNA, 15 bp, Homo sapiens
caatttccatattaa

SEQ ID NO: 1225830 - DNA, 15 bp, Homo sapiens
ccaatttccatatta

SEQ ID NO: 1225831 - DNA, 15 bp, Homo sapiens
tccaatttccatatt

SEQ ID NO: 1225832 - DNA, 15 bp, Homo sapiens
atccaatttccatat

SEQ ID NO: 1225833 - DNA, 15 bp, Homo sapiens
gatccaatttccata

SEQ ID NO: 1225834 - DNA, 15 bp, Homo sapiens
tgatccaatttccat

SEQ ID NO: 1225835 - DNA, 15 bp, Homo sapiens
ctgatccaatttcca

SEQ ID NO: 1225836 - DNA, 15 bp, Homo sapiens
cctgatccaatttcc

SEQ ID NO: 1225837 - DNA, 15 bp, Homo sapiens
tcctgatccaatttc

SEQ ID NO: 1225838 - DNA, 15 bp, Homo sapiens
ttcctgatccaattt

SEQ ID NO: 1225839 - DNA, 15 bp, Homo sapiens
tttcctgatccaatt

SEQ ID NO: 1225840 - DNA, 15 bp, Homo sapiens
ttttcctgatccaat

SEQ ID NO: 1225841 - DNA, 15 bp, Homo sapiens
tttttcctgatccaa

SEQ ID NO: 1225842 - DNA, 15 bp, Homo sapiens
ttttttcctgatcca

SEQ ID NO: 1225843 - DNA, 15 bp, Homo sapiens
tttttttcctgatcc

SEQ ID NO: 1225844 - DNA, 15 bp, Homo sapiens
ttttttttcctgatc

SEQ ID NO: 1225845 - DNA, 15 bp, Homo sapiens
attttttttcctgat

SEQ ID NO: 1225846 - DNA, 15 bp, Homo sapiens
gattttttttcctga

SEQ ID NO: 1225847 - DNA, 15 bp, Homo sapiens
tgattttttttcctg

SEQ ID NO: 1225848 - DNA, 15 bp, Homo sapiens
ttgattttttttcct

SEQ ID NO: 1225849 - DNA, 15 bp, Homo sapiens
attgattttttttcc

SEQ ID NO: 1225850 - DNA, 15 bp, Homo sapiens
aattgattttttttc

SEQ ID NO: 1225851 - DNA, 15 bp, Homo sapiens
gaattgatttttttt

SEQ ID NO: 1225852 - DNA, 15 bp, Homo sapiens
ggaattgattttttt

SEQ ID NO: 1225853 - DNA, 15 bp, Homo sapiens
gggaattgatttttt

SEQ ID NO: 1225854 - DNA, 15 bp, Homo sapiens
tgggaattgattttt

SEQ ID NO: 1225855 - DNA, 15 bp, Homo sapiens
ttgggaattgatttt

SEQ ID NO: 1225856 - DNA, 15 bp, Homo sapiens
attgggaattgattt

SEQ ID NO: 1225857 - DNA, 15 bp, Homo sapiens
tattgggaattgatt

SEQ ID NO: 1225858 - DNA, 15 bp, Homo sapiens
gtattgggaattgat

SEQ ID NO: 1225859 - DNA, 15 bp, Homo sapiens
ggtattgggaattga

SEQ ID NO: 1225860 - DNA, 15 bp, Homo sapiens
aggtattgggaattg

SEQ ID NO: 1225861 - DNA, 15 bp, Homo sapiens
aaggtattgggaatt

SEQ ID NO: 1225862 - DNA, 15 bp, Homo sapiens
taaggtattgggaat

SEQ ID NO: 1225863 - DNA, 15 bp, Homo sapiens
gtaaggtattgggaa

SEQ ID NO: 1225864 - DNA, 15 bp, Homo sapiens
tgtaaggtattggga

SEQ ID NO: 1225865 - DNA, 15 bp, Homo sapiens
ctgtaaggtattggg

SEQ ID NO: 1225866 - DNA, 15 bp, Homo sapiens
actgtaaggtattgg

SEQ ID NO: 1225867 - DNA, 15 bp, Homo sapiens
aactgtaaggtattg

SEQ ID NO: 1225868 - DNA, 15 bp, Homo sapiens
gaactgtaaggtatt

SEQ ID NO: 1225869 - DNA, 15 bp, Homo sapiens
ggaactgtaaggtat

SEQ ID NO: 1225870 - DNA, 15 bp, Homo sapiens
gggaactgtaaggta

SEQ ID NO: 1225871 - DNA, 15 bp, Homo sapiens
tgggaactgtaaggt

SEQ ID NO: 1225872 - DNA, 15 bp, Homo sapiens
ctgggaactgtaagg

SEQ ID NO: 1225873 - DNA, 15 bp, Homo sapiens
actgggaactgtaag

SEQ ID NO: 1225874 - DNA, 15 bp, Homo sapiens
tactgggaactgtaa

SEQ ID NO: 1225875 - DNA, 15 bp, Homo sapiens
ttactgggaactgta

SEQ ID NO: 1225876 - DNA, 15 bp, Homo sapiens
attactgggaactgt

SEQ ID NO: 1225877 - DNA, 15 bp, Homo sapiens
tattactgggaactg

SEQ ID NO: 1225878 - DNA, 15 bp, Homo sapiens
gtattactgggaact

SEQ ID NO: 1225879 - DNA, 15 bp, Homo sapiens
agtattactgggaac

SEQ ID NO: 1225880 - DNA, 15 bp, Homo sapiens
gagtattactgggaa

SEQ ID NO: 1225881 - DNA, 15 bp, Homo sapiens
cgagtattactggga

SEQ ID NO: 1225882 - DNA, 15 bp, Homo sapiens
ccgagtattactggg

SEQ ID NO: 1225883 - DNA, 15 bp, Homo sapiens
accgagtattactgg

SEQ ID NO: 1225884 - DNA, 15 bp, Homo sapiens
taccgagtattactg

SEQ ID NO: 1225885 - DNA, 15 bp, Homo sapiens
ataccgagtattact

SEQ ID NO: 1225886 - DNA, 15 bp, Homo sapiens
cataccgagtattac

SEQ ID NO: 1225887 - DNA, 15 bp, Homo sapiens
tcataccgagtatta

SEQ ID NO: 1225888 - DNA, 15 bp, Homo sapiens
ttcataccgagtatt

SEQ ID NO: 1225889 - DNA, 15 bp, Homo sapiens
attcataccgagtat

SEQ ID NO: 1225890 - DNA, 15 bp, Homo sapiens
tattcataccgagta

SEQ ID NO: 1225891 - DNA, 15 bp, Homo sapiens
ttattcataccgagt

SEQ ID NO: 1225892 - DNA, 15 bp, Homo sapiens
tttattcataccgag

SEQ ID NO: 1225893 - DNA, 15 bp, Homo sapiens
ctttattcataccga

SEQ ID NO: 1225894 - DNA, 15 bp, Homo sapiens
tctttattcataccg

SEQ ID NO: 1225895 - DNA, 15 bp, Homo sapiens
gtctttattcatacc

SEQ ID NO: 1225896 - DNA, 15 bp, Homo sapiens
tgtctttattcatac

SEQ ID NO: 1225897 - DNA, 15 bp, Homo sapiens
ctgtctttattcata

SEQ ID NO: 1225898 - DNA, 15 bp, Homo sapiens
tctgtctttattcat

SEQ ID NO: 1225899 - DNA, 15 bp, Homo sapiens
atctgtctttattca

SEQ ID NO: 1225900 - DNA, 15 bp, Homo sapiens
aatctgtctttattc

SEQ ID NO: 1225901 - DNA, 15 bp, Homo sapiens
taatctgtctttatt

SEQ ID NO: 1225902 - DNA, 15 bp, Homo sapiens
ctaatctgtctttat

SEQ ID NO: 1225903 - DNA, 15 bp, Homo sapiens
tctaatctgtcttta

SEQ ID NO: 1225904 - DNA, 15 bp, Homo sapiens
ctctaatctgtcttt

SEQ ID NO: 1225905 - DNA, 15 bp, Homo sapiens
gctctaatctgtctt

SEQ ID NO: 1225906 - DNA, 15 bp, Homo sapiens
tgctctaatctgtct

SEQ ID NO: 1225907 - DNA, 15 bp, Homo sapiens
gtgctctaatctgtc

SEQ ID NO: 1225908 - DNA, 15 bp, Homo sapiens
tgtgctctaatctgt

SEQ ID NO: 1225909 - DNA, 15 bp, Homo sapiens
ctgtgctctaatctg

SEQ ID NO: 1225910 - DNA, 15 bp, Homo sapiens
cctgtgctctaatct

SEQ ID NO: 1225911 - DNA, 15 bp, Homo sapiens
tcctgtgctctaatc

SEQ ID NO: 1225912 - DNA, 15 bp, Homo sapiens
gtcctgtgctctaat

SEQ ID NO: 1225913 - DNA, 15 bp, Homo sapiens
tgtcctgtgctctaa

SEQ ID NO: 1225914 - DNA, 15 bp, Homo sapiens
atgtcctgtgctcta

SEQ ID NO: 1225915 - DNA, 15 bp, Homo sapiens
aatgtcctgtgctct

SEQ ID NO: 1225916 - DNA, 15 bp, Homo sapiens
aaatgtcctgtgctc

SEQ ID NO: 1225917 - DNA, 15 bp, Homo sapiens
caaatgtcctgtgct

SEQ ID NO: 1225918 - DNA, 15 bp, Homo sapiens
tcaaatgtcctgtgc

SEQ ID NO: 1225919 - DNA, 15 bp, Homo sapiens
ctcaaatgtcctgtg

SEQ ID NO: 1225920 - DNA, 15 bp, Homo sapiens
cctcaaatgtcctgt

SEQ ID NO: 1225921 - DNA, 15 bp, Homo sapiens
tcctcaaatgtcctg

SEQ ID NO: 1225922 - DNA, 15 bp, Homo sapiens
atcctcaaatgtcct

SEQ ID NO: 1225923 - DNA, 15 bp, Homo sapiens
aatcctcaaatgtcc

SEQ ID NO: 1225924 - DNA, 15 bp, Homo sapiens
aaatcctcaaatgtc

SEQ ID NO: 1225925 - DNA, 15 bp, Homo sapiens
caaatcctcaaatgt

SEQ ID NO: 1225926 - DNA, 15 bp, Homo sapiens
ccaaatcctcaaatg

SEQ ID NO: 1225927 - DNA, 15 bp, Homo sapiens
accaaatcctcaaat

SEQ ID NO: 1225928 - DNA, 15 bp, Homo sapiens
taccaaatcctcaaa

SEQ ID NO: 1225929 - DNA, 15 bp, Homo sapiens
ttaccaaatcctcaa

SEQ ID NO: 1225930 - DNA, 15 bp, Homo sapiens
attaccaaatcctca

SEQ ID NO: 1225931 - DNA, 15 bp, Homo sapiens
aattaccaaatcctc

SEQ ID NO: 1225932 - DNA, 15 bp, Homo sapiens
aaattaccaaatcct

SEQ ID NO: 1225933 - DNA, 15 bp, Homo sapiens
taaattaccaaatcc

SEQ ID NO: 1225934 - DNA, 15 bp, Homo sapiens
gtaaattaccaaatc

SEQ ID NO: 1225935 - DNA, 15 bp, Homo sapiens
agtaaattaccaaat

SEQ ID NO: 1225936 - DNA, 15 bp, Homo sapiens
aagtaaattaccaaa

SEQ ID NO: 1225937 - DNA, 15 bp, Homo sapiens
caagtaaattaccaa

SEQ ID NO: 1225938 - DNA, 15 bp, Homo sapiens
ccaagtaaattacca

SEQ ID NO: 1225939 - DNA, 15 bp, Homo sapiens
cccaagtaaattacc

SEQ ID NO: 1225940 - DNA, 15 bp, Homo sapiens
tcccaagtaaattac

SEQ ID NO: 1225941 - DNA, 15 bp, Homo sapiens
ttcccaagtaaatta

SEQ ID NO: 1225942 - DNA, 15 bp, Homo sapiens
attcccaagtaaatt

SEQ ID NO: 1225943 - DNA, 15 bp, Homo sapiens
aattcccaagtaaat

SEQ ID NO: 1225944 - DNA, 15 bp, Homo sapiens
aaattcccaagtaaa

SEQ ID NO: 1225945 - DNA, 15 bp, Homo sapiens
taaattcccaagtaa

SEQ ID NO: 1225946 - DNA, 15 bp, Homo sapiens
gtaaattcccaagta

SEQ ID NO: 1225947 - DNA, 15 bp, Homo sapiens
agtaaattcccaagt

SEQ ID NO: 1225948 - DNA, 15 bp, Homo sapiens
gagtaaattcccaag

SEQ ID NO: 1225949 - DNA, 15 bp, Homo sapiens
tgagtaaattcccaa

SEQ ID NO: 1225950 - DNA, 15 bp, Homo sapiens
ctgagtaaattccca

SEQ ID NO: 1225951 - DNA, 15 bp, Homo sapiens
tctgagtaaattccc

SEQ ID NO: 1225952 - DNA, 15 bp, Homo sapiens
ttctgagtaaattcc

SEQ ID NO: 1225953 - DNA, 15 bp, Homo sapiens
gttctgagtaaattc

SEQ ID NO: 1225954 - DNA, 15 bp, Homo sapiens
ggttctgagtaaatt

SEQ ID NO: 1225955 - DNA, 15 bp, Homo sapiens
tggttctgagtaaat

SEQ ID NO: 1225956 - DNA, 15 bp, Homo sapiens
atggttctgagtaaa

SEQ ID NO: 1225957 - DNA, 15 bp, Homo sapiens
catggttctgagtaa

SEQ ID NO: 1225958 - DNA, 15 bp, Homo sapiens
acatggttctgagta

SEQ ID NO: 1225959 - DNA, 15 bp, Homo sapiens
tacatggttctgagt

SEQ ID NO: 1225960 - DNA, 15 bp, Homo sapiens
atacatggttctgag

SEQ ID NO: 1225961 - DNA, 15 bp, Homo sapiens
aatacatggttctga

SEQ ID NO: 1225962 - DNA, 15 bp, Homo sapiens
aaatacatggttctg

SEQ ID NO: 1225963 - DNA, 15 bp, Homo sapiens
aaaatacatggttct

SEQ ID NO: 1225964 - DNA, 15 bp, Homo sapiens
taaaatacatggttc

SEQ ID NO: 1225965 - DNA, 15 bp, Homo sapiens
ttaaaatacatggtt

SEQ ID NO: 1225966 - DNA, 15 bp, Homo sapiens
tttaaaatacatggt

SEQ ID NO: 1225967 - DNA, 15 bp, Homo sapiens
gtttaaaatacatgg

SEQ ID NO: 1225968 - DNA, 15 bp, Homo sapiens
cgtttaaaatacatg

SEQ ID NO: 1225969 - DNA, 15 bp, Homo sapiens
acgtttaaaatacat

SEQ ID NO: 1225970 - DNA, 15 bp, Homo sapiens
gacgtttaaaataca

SEQ ID NO: 1225971 - DNA, 15 bp, Homo sapiens
agacgtttaaaatac

SEQ ID NO: 1225972 - DNA, 15 bp, Homo sapiens
gagacgtttaaaata

SEQ ID NO: 1225973 - DNA, 15 bp, Homo sapiens
agagacgtttaaaat

SEQ ID NO: 1225974 - DNA, 15 bp, Homo sapiens
tagagacgtttaaaa

SEQ ID NO: 1225975 - DNA, 15 bp, Homo sapiens
ttagagacgtttaaa

SEQ ID NO: 1225976 - DNA, 15 bp, Homo sapiens
cttagagacgtttaa

SEQ ID NO: 1225977 - DNA, 15 bp, Homo sapiens
acttagagacgttta

SEQ ID NO: 1225978 - DNA, 15 bp, Homo sapiens
gacttagagacgttt

SEQ ID NO: 1225979 - DNA, 15 bp, Homo sapiens
ggacttagagacgtt

SEQ ID NO: 1225980 - DNA, 15 bp, Homo sapiens
tggacttagagacgt

SEQ ID NO: 1225981 - DNA, 15 bp, Homo sapiens
ctggacttagagacg

SEQ ID NO: 1225982 - DNA, 15 bp, Homo sapiens
cctggacttagagac

SEQ ID NO: 1225983 - DNA, 15 bp, Homo sapiens
gcctggacttagaga

SEQ ID NO: 1225984 - DNA, 15 bp, Homo sapiens
tgcctggacttagag

SEQ ID NO: 1225985 - DNA, 15 bp, Homo sapiens
atgcctggacttaga

SEQ ID NO: 1225986 - DNA, 15 bp, Homo sapiens
catgcctggacttag

SEQ ID NO: 1225987 - DNA, 15 bp, Homo sapiens
ccatgcctggactta

SEQ ID NO: 1225988 - DNA, 15 bp, Homo sapiens
accatgcctggactt

SEQ ID NO: 1225989 - DNA, 15 bp, Homo sapiens
caccatgcctggact

SEQ ID NO: 1225990 - DNA, 15 bp, Homo sapiens
ccaccatgcctggac

SEQ ID NO: 1225991 - DNA, 15 bp, Homo sapiens
tgattacagatgtga

SEQ ID NO: 1225992 - DNA, 15 bp, Homo sapiens
gtgattacagatgtg

SEQ ID NO: 1225993 - DNA, 15 bp, Homo sapiens
tgtgattacagatgt

SEQ ID NO: 1225994 - DNA, 15 bp, Homo sapiens
ttgtgattacagatg

SEQ ID NO: 1225995 - DNA, 15 bp, Homo sapiens
gttgtgattacagat

SEQ ID NO: 1225996 - DNA, 15 bp, Homo sapiens
tgttgtgattacaga

SEQ ID NO: 1225997 - DNA, 15 bp, Homo sapiens
aagtgttgtgattac

SEQ ID NO: 1225998 - DNA, 15 bp, Homo sapiens
tcctgggcctcccaa

SEQ ID NO: 1225999 - DNA, 15 bp, Homo sapiens
ctcctgggcctccca

SEQ ID NO: 1226000 - DNA, 15 bp, Homo sapiens
cctcctgggcctccc

SEQ ID NO: 1226001 - DNA, 15 bp, Homo sapiens
ccctcctgggcctcc

SEQ ID NO: 1226002 - DNA, 15 bp, Homo sapiens
tccctcctgggcctc

SEQ ID NO: 1226003 - DNA, 15 bp, Homo sapiens
ctccctcctgggcct

SEQ ID NO: 1226004 - DNA, 15 bp, Homo sapiens
tcctccctcctgggc

SEQ ID NO: 1226005 - DNA, 15 bp, Homo sapiens
atcctccctcctggg

SEQ ID NO: 1226006 - DNA, 15 bp, Homo sapiens
gatcctccctcctgg

SEQ ID NO: 1226007 - DNA, 15 bp, Homo sapiens
cgatcctccctcctg

SEQ ID NO: 1226008 - DNA, 15 bp, Homo sapiens
gcgatcctccctcct

SEQ ID NO: 1226009 - DNA, 15 bp, Homo sapiens
agcgatcctccctcc

SEQ ID NO: 1226010 - DNA, 15 bp, Homo sapiens
aagcgatcctccctc

SEQ ID NO: 1226011 - DNA, 15 bp, Homo sapiens
caagcgatcctccct

SEQ ID NO: 1226012 - DNA, 15 bp, Homo sapiens
ttcaagcgatcctcc

SEQ ID NO: 1226013 - DNA, 15 bp, Homo sapiens
cttcaagcgatcctc

SEQ ID NO: 1226014 - DNA, 15 bp, Homo sapiens
gcttcaagcgatcct

SEQ ID NO: 1226015 - DNA, 15 bp, Homo sapiens
ggcttcaagcgatcc

SEQ ID NO: 1226016 - DNA, 15 bp, Homo sapiens
tggcttcaagcgatc

SEQ ID NO: 1226017 - DNA, 15 bp, Homo sapiens
ctggcttcaagcgat

SEQ ID NO: 1226018 - DNA, 15 bp, Homo sapiens
cctggcttcaagcga

SEQ ID NO: 1226019 - DNA, 15 bp, Homo sapiens
tcctggcttcaagcg

SEQ ID NO: 1226020 - DNA, 15 bp, Homo sapiens
ctcctggcttcaagc

SEQ ID NO: 1226021 - DNA, 15 bp, Homo sapiens
ggaactcctggcttc

SEQ ID NO: 1226022 - DNA, 15 bp, Homo sapiens
tggaactcctggctt

SEQ ID NO: 1226023 - DNA, 15 bp, Homo sapiens
ctggaactcctggct

SEQ ID NO: 1226024 - DNA, 15 bp, Homo sapiens
tctggaactcctggc

SEQ ID NO: 1226025 - DNA, 15 bp, Homo sapiens
gtctggaactcctgg

SEQ ID NO: 1226026 - DNA, 15 bp, Homo sapiens
atggtctggaactcc

SEQ ID NO: 1226027 - DNA, 15 bp, Homo sapiens
gatggtctggaactc

SEQ ID NO: 1226028 - DNA, 15 bp, Homo sapiens
ggatggtctggaact

SEQ ID NO: 1226029 - DNA, 15 bp, Homo sapiens
aggatggtctggaac

SEQ ID NO: 1226030 - DNA, 15 bp, Homo sapiens
caggatggtctggaa

SEQ ID NO: 1226031 - DNA, 15 bp, Homo sapiens
tccaggatggtctgg

SEQ ID NO: 1226032 - DNA, 15 bp, Homo sapiens
ttccaggatggtctg

SEQ ID NO: 1226033 - DNA, 15 bp, Homo sapiens
tttccaggatggtct

SEQ ID NO: 1226034 - DNA, 15 bp, Homo sapiens
ttttccaggatggtc

SEQ ID NO: 1226035 - DNA, 15 bp, Homo sapiens
gttttccaggatggt

SEQ ID NO: 1226036 - DNA, 15 bp, Homo sapiens
ggttttccaggatgg

SEQ ID NO: 1226037 - DNA, 15 bp, Homo sapiens
aggttttccaggatg

SEQ ID NO: 1226038 - DNA, 15 bp, Homo sapiens
taggttttccaggat

SEQ ID NO: 1226039 - DNA, 15 bp, Homo sapiens
ctaggttttccagga

SEQ ID NO: 1226040 - DNA, 15 bp, Homo sapiens
gctaggttttccagg

SEQ ID NO: 1226041 - DNA, 15 bp, Homo sapiens
tgctaggttttccag

SEQ ID NO: 1226042 - DNA, 15 bp, Homo sapiens
ttgctaggttttcca

SEQ ID NO: 1226043 - DNA, 15 bp, Homo sapiens
attgctaggttttcc

SEQ ID NO: 1226044 - DNA, 15 bp, Homo sapiens
tattgctaggttttc

SEQ ID NO: 1226045 - DNA, 15 bp, Homo sapiens
gtattgctaggtttt

SEQ ID NO: 1226046 - DNA, 15 bp, Homo sapiens
ggtattgctaggttt

SEQ ID NO: 1226047 - DNA, 15 bp, Homo sapiens
aggtattgctaggtt

SEQ ID NO: 1226048 - DNA, 15 bp, Homo sapiens
gaggtattgctaggt

SEQ ID NO: 1226049 - DNA, 15 bp, Homo sapiens
tgaggtattgctagg

SEQ ID NO: 1226050 - DNA, 15 bp, Homo sapiens
atgaggtattgctag

SEQ ID NO: 1226051 - DNA, 15 bp, Homo sapiens
gatgaggtattgcta

SEQ ID NO: 1226052 - DNA, 15 bp, Homo sapiens
agatgaggtattgct

SEQ ID NO: 1226053 - DNA, 15 bp, Homo sapiens
gagatgaggtattgc

SEQ ID NO: 1226054 - DNA, 15 bp, Homo sapiens
agagatgaggtattg

SEQ ID NO: 1226055 - DNA, 15 bp, Homo sapiens
tagagatgaggtatt

SEQ ID NO: 1226056 - DNA, 15 bp, Homo sapiens
gtagagatgaggtat

SEQ ID NO: 1226057 - DNA, 15 bp, Homo sapiens
tgtagagatgaggta

SEQ ID NO: 1226058 - DNA, 15 bp, Homo sapiens
ctgtagagatgaggt

SEQ ID NO: 1226059 - DNA, 15 bp, Homo sapiens
tctgtagagatgagg

SEQ ID NO: 1226060 - DNA, 15 bp, Homo sapiens
ttctgtagagatgag

SEQ ID NO: 1226061 - DNA, 15 bp, Homo sapiens
tttctgtagagatga

SEQ ID NO: 1226062 - DNA, 15 bp, Homo sapiens
ttttctgtagagatg

SEQ ID NO: 1226063 - DNA, 15 bp, Homo sapiens
tttttctgtagagat

SEQ ID NO: 1226064 - DNA, 15 bp, Homo sapiens
ttttttctgtagaga

SEQ ID NO: 1226065 - DNA, 15 bp, Homo sapiens
tttttttctgtagag

SEQ ID NO: 1226066 - DNA, 15 bp, Homo sapiens
ttttttttctgtaga

SEQ ID NO: 1226067 - DNA, 15 bp, Homo sapiens
tttttttttctgtag

SEQ ID NO: 1226068 - DNA, 15 bp, Homo sapiens
ttttttttttctgta

SEQ ID NO: 1226069 - DNA, 15 bp, Homo sapiens
cttttttttttctgt

SEQ ID NO: 1226070 - DNA, 15 bp, Homo sapiens
acttttttttttctg

SEQ ID NO: 1226071 - DNA, 15 bp, Homo sapiens
aacttttttttttct

SEQ ID NO: 1226072 - DNA, 15 bp, Homo sapiens
caacttttttttttc

SEQ ID NO: 1226073 - DNA, 15 bp, Homo sapiens
gcaactttttttttt

SEQ ID NO: 1226074 - DNA, 15 bp, Homo sapiens
tgcaacttttttttt

SEQ ID NO: 1226075 - DNA, 15 bp, Homo sapiens
gtgcaactttttttt

SEQ ID NO: 1226076 - DNA, 15 bp, Homo sapiens
agtgcaacttttttt

SEQ ID NO: 1226077 - DNA, 15 bp, Homo sapiens
gagtgcaactttttt

SEQ ID NO: 1226078 - DNA, 15 bp, Homo sapiens
ggagtgcaacttttt

SEQ ID NO: 1226079 - DNA, 15 bp, Homo sapiens
tggagtgcaactttt

SEQ ID NO: 1226080 - DNA, 15 bp, Homo sapiens
ctggagtgcaacttt

SEQ ID NO: 1226081 - DNA, 15 bp, Homo sapiens
tctggagtgcaactt

SEQ ID NO: 1226082 - DNA, 15 bp, Homo sapiens
gtctggagtgcaact

SEQ ID NO: 1226083 - DNA, 15 bp, Homo sapiens
agtctggagtgcaac

SEQ ID NO: 1226084 - DNA, 15 bp, Homo sapiens
cagtctggagtgcaa

SEQ ID NO: 1226085 - DNA, 15 bp, Homo sapiens
tcagtctggagtgca

SEQ ID NO: 1226086 - DNA, 15 bp, Homo sapiens
ttcagtctggagtgc

SEQ ID NO: 1226087 - DNA, 15 bp, Homo sapiens
attcagtctggagtg

SEQ ID NO: 1226088 - DNA, 15 bp, Homo sapiens
cattcagtctggagt

SEQ ID NO: 1226089 - DNA, 15 bp, Homo sapiens
tcattcagtctggag

SEQ ID NO: 1226090 - DNA, 15 bp, Homo sapiens
gtcattcagtctgga

SEQ ID NO: 1226091 - DNA, 15 bp, Homo sapiens
tgtcattcagtctgg

SEQ ID NO: 1226092 - DNA, 15 bp, Homo sapiens
ctgtcattcagtctg

SEQ ID NO: 1226093 - DNA, 15 bp, Homo sapiens
tctgtcattcagtct

SEQ ID NO: 1226094 - DNA, 15 bp, Homo sapiens
ctctgtcattcagtc

SEQ ID NO: 1226095 - DNA, 15 bp, Homo sapiens
gctctgtcattcagt

SEQ ID NO: 1226096 - DNA, 15 bp, Homo sapiens
tgctctgtcattcag

SEQ ID NO: 1226097 - DNA, 15 bp, Homo sapiens
ttgctctgtcattca

SEQ ID NO: 1226098 - DNA, 15 bp, Homo sapiens
cttgctctgtcattc

SEQ ID NO: 1226099 - DNA, 15 bp, Homo sapiens
ccttgctctgtcatt

SEQ ID NO: 1226100 - DNA, 15 bp, Homo sapiens
gccttgctctgtcat

SEQ ID NO: 1226101 - DNA, 15 bp, Homo sapiens
ggccttgctctgtca

SEQ ID NO: 1226102 - DNA, 15 bp, Homo sapiens
caggccttgctctgt

SEQ ID NO: 1226103 - DNA, 15 bp, Homo sapiens
acaggccttgctctg

SEQ ID NO: 1226104 - DNA, 15 bp, Homo sapiens
gacaggccttgctct

SEQ ID NO: 1226105 - DNA, 15 bp, Homo sapiens
agacaggccttgctc

SEQ ID NO: 1226106 - DNA, 15 bp, Homo sapiens
gagacaggccttgct

SEQ ID NO: 1226107 - DNA, 15 bp, Homo sapiens
tgagacaggccttgc

SEQ ID NO: 1226108 - DNA, 15 bp, Homo sapiens
ttgagacaggccttg

SEQ ID NO: 1226109 - DNA, 15 bp, Homo sapiens
tttgagacaggcctt

SEQ ID NO: 1226110 - DNA, 15 bp, Homo sapiens
ttttgagacaggcct

SEQ ID NO: 1226111 - DNA, 15 bp, Homo sapiens
tttttgagacaggcc

SEQ ID NO: 1226112 - DNA, 15 bp, Homo sapiens
gtttttgagacaggc

SEQ ID NO: 1226113 - DNA, 15 bp, Homo sapiens
tgtttttgagacagg

SEQ ID NO: 1226114 - DNA, 15 bp, Homo sapiens
cattttttgtttttg

SEQ ID NO: 1226115 - DNA, 15 bp, Homo sapiens
tcattttttgttttt

SEQ ID NO: 1226116 - DNA, 15 bp, Homo sapiens
ttcattttttgtttt

SEQ ID NO: 1226117 - DNA, 15 bp, Homo sapiens
tttcattttttgttt

SEQ ID NO: 1226118 - DNA, 15 bp, Homo sapiens
ttttcattttttgtt

SEQ ID NO: 1226119 - DNA, 15 bp, Homo sapiens
tttttcattttttgt

SEQ ID NO: 1226120 - DNA, 15 bp, Homo sapiens
gtttttcattttttg

SEQ ID NO: 1226121 - DNA, 15 bp, Homo sapiens
tgtttttcatttttt

SEQ ID NO: 1226122 - DNA, 15 bp, Homo sapiens
ttgtttttcattttt

SEQ ID NO: 1226123 - DNA, 15 bp, Homo sapiens
tttgtttttcatttt

SEQ ID NO: 1226124 - DNA, 15 bp, Homo sapiens
ttttgtttttcattt

SEQ ID NO: 1226125 - DNA, 15 bp, Homo sapiens
attttgtttttcatt

SEQ ID NO: 1226126 - DNA, 15 bp, Homo sapiens
tattttgtttttcat

SEQ ID NO: 1226127 - DNA, 15 bp, Homo sapiens
ttattttgtttttca

SEQ ID NO: 1226128 - DNA, 15 bp, Homo sapiens
tttattttgtttttc

SEQ ID NO: 1226129 - DNA, 15 bp, Homo sapiens
ctttattttgttttt

SEQ ID NO: 1226130 - DNA, 15 bp, Homo sapiens
tctttattttgtttt

SEQ ID NO: 1226131 - DNA, 15 bp, Homo sapiens
ttctttattttgttt

SEQ ID NO: 1226132 - DNA, 15 bp, Homo sapiens
tttctttattttgtt

SEQ ID NO: 1226133 - DNA, 15 bp, Homo sapiens
ttttctttattttgt

SEQ ID NO: 1226134 - DNA, 15 bp, Homo sapiens
gttttctttattttg

SEQ ID NO: 1226135 - DNA, 15 bp, Homo sapiens
ggttttctttatttt

SEQ ID NO: 1226136 - DNA, 15 bp, Homo sapiens
gggttttctttattt

SEQ ID NO: 1226137 - DNA, 15 bp, Homo sapiens
agggttttctttatt

SEQ ID NO: 1226138 - DNA, 15 bp, Homo sapiens
gagggttttctttat

SEQ ID NO: 1226139 - DNA, 15 bp, Homo sapiens
tgagggttttcttta

SEQ ID NO: 1226140 - DNA, 15 bp, Homo sapiens
gtgagggttttcttt

SEQ ID NO: 1226141 - DNA, 15 bp, Homo sapiens
tgtgagggttttctt

SEQ ID NO: 1226142 - DNA, 15 bp, Homo sapiens
atgtgagggttttct

SEQ ID NO: 1226143 - DNA, 15 bp, Homo sapiens
gatgtgagggttttc

SEQ ID NO: 1226144 - DNA, 15 bp, Homo sapiens
tgatgtgagggtttt

SEQ ID NO: 1226145 - DNA, 15 bp, Homo sapiens
ttgatgtgagggttt

SEQ ID NO: 1226146 - DNA, 15 bp, Homo sapiens
gttgatgtgagggtt

SEQ ID NO: 1226147 - DNA, 15 bp, Homo sapiens
ggttgatgtgagggt

SEQ ID NO: 1226148 - DNA, 15 bp, Homo sapiens
tggttgatgtgaggg

SEQ ID NO: 1226149 - DNA, 15 bp, Homo sapiens
gtggttgatgtgagg

SEQ ID NO: 1226150 - DNA, 15 bp, Homo sapiens
cgtggttgatgtgag

SEQ ID NO: 1226151 - DNA, 15 bp, Homo sapiens
acgtggttgatgtga

SEQ ID NO: 1226152 - DNA, 15 bp, Homo sapiens
aacgtggttgatgtg

SEQ ID NO: 1226153 - DNA, 15 bp, Homo sapiens
caacgtggttgatgt

SEQ ID NO: 1226154 - DNA, 15 bp, Homo sapiens
ccaacgtggttgatg

SEQ ID NO: 1226155 - DNA, 15 bp, Homo sapiens
tccaacgtggttgat

SEQ ID NO: 1226156 - DNA, 15 bp, Homo sapiens
atccaacgtggttga

SEQ ID NO: 1226157 - DNA, 15 bp, Homo sapiens
tatccaacgtggttg

SEQ ID NO: 1226158 - DNA, 15 bp, Homo sapiens
ctatccaacgtggtt

SEQ ID NO: 1226159 - DNA, 15 bp, Homo sapiens
actatccaacgtggt

SEQ ID NO: 1226160 - DNA, 15 bp, Homo sapiens
tactatccaacgtgg

SEQ ID NO: 1226161 - DNA, 15 bp, Homo sapiens
ttactatccaacgtg

SEQ ID NO: 1226162 - DNA, 15 bp, Homo sapiens
attactatccaacgt

SEQ ID NO: 1226163 - DNA, 15 bp, Homo sapiens
tattactatccaacg

SEQ ID NO: 1226164 - DNA, 15 bp, Homo sapiens
atattactatccaac

SEQ ID NO: 1226165 - DNA, 15 bp, Homo sapiens
tatattactatccaa

SEQ ID NO: 1226166 - DNA, 15 bp, Homo sapiens
ctatattactatcca

SEQ ID NO: 1226167 - DNA, 15 bp, Homo sapiens
gctatattactatcc

SEQ ID NO: 1226168 - DNA, 15 bp, Homo sapiens
agctatattactatc

SEQ ID NO: 1226169 - DNA, 15 bp, Homo sapiens
cagctatattactat

SEQ ID NO: 1226170 - DNA, 15 bp, Homo sapiens
acagctatattacta

SEQ ID NO: 1226171 - DNA, 15 bp, Homo sapiens
aacagctatattact

SEQ ID NO: 1226172 - DNA, 15 bp, Homo sapiens
gaacagctatattac

SEQ ID NO: 1226173 - DNA, 15 bp, Homo sapiens
tgaacagctatatta

SEQ ID NO: 1226174 - DNA, 15 bp, Homo sapiens
ttgaacagctatatt

SEQ ID NO: 1226175 - DNA, 15 bp, Homo sapiens
gttgaacagctatat

SEQ ID NO: 1226176 - DNA, 15 bp, Homo sapiens
tgttgaacagctata

SEQ ID NO: 1226177 - DNA, 15 bp, Homo sapiens
ctgttgaacagctat

SEQ ID NO: 1226178 - DNA, 15 bp, Homo sapiens
tctgttgaacagcta

SEQ ID NO: 1226179 - DNA, 15 bp, Homo sapiens
atctgttgaacagct

SEQ ID NO: 1226180 - DNA, 15 bp, Homo sapiens
tatctgttgaacagc

SEQ ID NO: 1226181 - DNA, 15 bp, Homo sapiens
ttatctgttgaacag

SEQ ID NO: 1226182 - DNA, 15 bp, Homo sapiens
attatctgttgaaca

SEQ ID NO: 1226183 - DNA, 15 bp, Homo sapiens
cattatctgttgaac

SEQ ID NO: 1226184 - DNA, 15 bp, Homo sapiens
ccattatctgttgaa

SEQ ID NO: 1226185 - DNA, 15 bp, Homo sapiens
tccattatctgttga

SEQ ID NO: 1226186 - DNA, 15 bp, Homo sapiens
ttccattatctgttg

SEQ ID NO: 1226187 - DNA, 15 bp, Homo sapiens
gttccattatctgtt

SEQ ID NO: 1226188 - DNA, 15 bp, Homo sapiens
agttccattatctgt

SEQ ID NO: 1226189 - DNA, 15 bp, Homo sapiens
tagttccattatctg

SEQ ID NO: 1226190 - DNA, 15 bp, Homo sapiens
ttagttccattatct

SEQ ID NO: 1226191 - DNA, 15 bp, Homo sapiens
cttagttccattatc

SEQ ID NO: 1226192 - DNA, 15 bp, Homo sapiens
tcttagttccattat

SEQ ID NO: 1226193 - DNA, 15 bp, Homo sapiens
ttcttagttccatta

SEQ ID NO: 1226194 - DNA, 15 bp, Homo sapiens
tttcttagttccatt

SEQ ID NO: 1226195 - DNA, 15 bp, Homo sapiens
ttttcttagttccat

SEQ ID NO: 1226196 - DNA, 15 bp, Homo sapiens
attttcttagttcca

SEQ ID NO: 1226197 - DNA, 15 bp, Homo sapiens
aattttcttagttcc

SEQ ID NO: 1226198 - DNA, 15 bp, Homo sapiens
taattttcttagttc

SEQ ID NO: 1226199 - DNA, 15 bp, Homo sapiens
ctaattttcttagtt

SEQ ID NO: 1226200 - DNA, 15 bp, Homo sapiens
tctaattttcttagt

SEQ ID NO: 1226201 - DNA, 15 bp, Homo sapiens
gtctaattttcttag

SEQ ID NO: 1226202 - DNA, 15 bp, Homo sapiens
tgtctaattttctta

SEQ ID NO: 1226203 - DNA, 15 bp, Homo sapiens
ttgtctaattttctt

SEQ ID NO: 1226204 - DNA, 15 bp, Homo sapiens
cttgtctaattttct

SEQ ID NO: 1226205 - DNA, 15 bp, Homo sapiens
acttgtctaattttc

SEQ ID NO: 1226206 - DNA, 15 bp, Homo sapiens
aacttgtctaatttt

SEQ ID NO: 1226207 - DNA, 15 bp, Homo sapiens
taacttgtctaattt

SEQ ID NO: 1226208 - DNA, 15 bp, Homo sapiens
ttaacttgtctaatt

SEQ ID NO: 1226209 - DNA, 15 bp, Homo sapiens
tttaacttgtctaat

SEQ ID NO: 1226210 - DNA, 15 bp, Homo sapiens
atttaacttgtctaa

SEQ ID NO: 1226211 - DNA, 15 bp, Homo sapiens
aatttaacttgtcta

SEQ ID NO: 1226212 - DNA, 15 bp, Homo sapiens
taatttaacttgtct

SEQ ID NO: 1226213 - DNA, 15 bp, Homo sapiens
ttaatttaacttgtc

SEQ ID NO: 1226214 - DNA, 15 bp, Homo sapiens
attaatttaacttgt

SEQ ID NO: 1226215 - DNA, 15 bp, Homo sapiens
aattaatttaacttg

SEQ ID NO: 1226216 - DNA, 15 bp, Homo sapiens
gaattaatttaactt

SEQ ID NO: 1226217 - DNA, 15 bp, Homo sapiens
tgaattaatttaact

SEQ ID NO: 1226218 - DNA, 15 bp, Homo sapiens
gtgaattaatttaac

SEQ ID NO: 1226219 - DNA, 15 bp, Homo sapiens
ggtgaattaatttaa

SEQ ID NO: 1226220 - DNA, 15 bp, Homo sapiens
gggtgaattaattta

SEQ ID NO: 1226221 - DNA, 15 bp, Homo sapiens
tgggtgaattaattt

SEQ ID NO: 1226222 - DNA, 15 bp, Homo sapiens
ttgggtgaattaatt

SEQ ID NO: 1226223 - DNA, 15 bp, Homo sapiens
cttgggtgaattaat

SEQ ID NO: 1226224 - DNA, 15 bp, Homo sapiens
tcttgggtgaattaa

SEQ ID NO: 1226225 - DNA, 15 bp, Homo sapiens
atcttgggtgaatta

SEQ ID NO: 1226226 - DNA, 15 bp, Homo sapiens
aatcttgggtgaatt

SEQ ID NO: 1226227 - DNA, 15 bp, Homo sapiens
gaatcttgggtgaat

SEQ ID NO: 1226228 - DNA, 15 bp, Homo sapiens
tgaatcttgggtgaa

SEQ ID NO: 1226229 - DNA, 15 bp, Homo sapiens
ttgaatcttgggtga

SEQ ID NO: 1226230 - DNA, 15 bp, Homo sapiens
cttgaatcttgggtg

SEQ ID NO: 1226231 - DNA, 15 bp, Homo sapiens
acttgaatcttgggt

SEQ ID NO: 1226232 - DNA, 15 bp, Homo sapiens
tacttgaatcttggg

SEQ ID NO: 1226233 - DNA, 15 bp, Homo sapiens
ctacttgaatcttgg

SEQ ID NO: 1226234 - DNA, 15 bp, Homo sapiens
actacttgaatcttg

SEQ ID NO: 1226235 - DNA, 15 bp, Homo sapiens
aactacttgaatctt

SEQ ID NO: 1226236 - DNA, 15 bp, Homo sapiens
caactacttgaatct

SEQ ID NO: 1226237 - DNA, 15 bp, Homo sapiens
ccaactacttgaatc

SEQ ID NO: 1226238 - DNA, 15 bp, Homo sapiens
tccaactacttgaat

SEQ ID NO: 1226239 - DNA, 15 bp, Homo sapiens
atccaactacttgaa

SEQ ID NO: 1226240 - DNA, 15 bp, Homo sapiens
aatccaactacttga

SEQ ID NO: 1226241 - DNA, 15 bp, Homo sapiens
taatccaactacttg

SEQ ID NO: 1226242 - DNA, 15 bp, Homo sapiens
ttaatccaactactt

SEQ ID NO: 1226243 - DNA, 15 bp, Homo sapiens
attaatccaactact

SEQ ID NO: 1226244 - DNA, 15 bp, Homo sapiens
cattaatccaactac

SEQ ID NO: 1226245 - DNA, 15 bp, Homo sapiens
ccattaatccaacta

SEQ ID NO: 1226246 - DNA, 15 bp, Homo sapiens
accattaatccaact

SEQ ID NO: 1226247 - DNA, 15 bp, Homo sapiens
taccattaatccaac

SEQ ID NO: 1226248 - DNA, 15 bp, Homo sapiens
ttaccattaatccaa

SEQ ID NO: 1226249 - DNA, 15 bp, Homo sapiens
tttaccattaatcca

SEQ ID NO: 1226250 - DNA, 15 bp, Homo sapiens
atttaccattaatcc

SEQ ID NO: 1226251 - DNA, 15 bp, Homo sapiens
gatttaccattaatc

SEQ ID NO: 1226252 - DNA, 15 bp, Homo sapiens
agatttaccattaat

SEQ ID NO: 1226253 - DNA, 15 bp, Homo sapiens
cagatttaccattaa

SEQ ID NO: 1226254 - DNA, 15 bp, Homo sapiens
ccagatttaccatta

SEQ ID NO: 1226255 - DNA, 15 bp, Homo sapiens
tccagatttaccatt

SEQ ID NO: 1226256 - DNA, 15 bp, Homo sapiens
ttccagatttaccat

SEQ ID NO: 1226257 - DNA, 15 bp, Homo sapiens
attccagatttacca

SEQ ID NO: 1226258 - DNA, 15 bp, Homo sapiens
aattccagatttacc

SEQ ID NO: 1226259 - DNA, 15 bp, Homo sapiens
aaattccagatttac

SEQ ID NO: 1226260 - DNA, 15 bp, Homo sapiens
taaattccagattta

SEQ ID NO: 1226261 - DNA, 15 bp, Homo sapiens
ttaaattccagattt

SEQ ID NO: 1226262 - DNA, 15 bp, Homo sapiens
tttaaattccagatt

SEQ ID NO: 1226263 - DNA, 15 bp, Homo sapiens
gtttaaattccagat

SEQ ID NO: 1226264 - DNA, 15 bp, Homo sapiens
ggtttaaattccaga

SEQ ID NO: 1226265 - DNA, 15 bp, Homo sapiens
gggtttaaattccag

SEQ ID NO: 1226266 - DNA, 15 bp, Homo sapiens
tgggtttaaattcca

SEQ ID NO: 1226267 - DNA, 15 bp, Homo sapiens
ctgggtttaaattcc

SEQ ID NO: 1226268 - DNA, 15 bp, Homo sapiens
cctgggtttaaattc

SEQ ID NO: 1226269 - DNA, 15 bp, Homo sapiens
acctgggtttaaatt

SEQ ID NO: 1226270 - DNA, 15 bp, Homo sapiens
gacctgggtttaaat

SEQ ID NO: 1226271 - DNA, 15 bp, Homo sapiens
agacctgggtttaaa

SEQ ID NO: 1226272 - DNA, 15 bp, Homo sapiens
cagacctgggtttaa

SEQ ID NO: 1226273 - DNA, 15 bp, Homo sapiens
tcagacctgggttta

SEQ ID NO: 1226274 - DNA, 15 bp, Homo sapiens
gtcagacctgggttt

SEQ ID NO: 1226275 - DNA, 15 bp, Homo sapiens
agtcagacctgggtt

SEQ ID NO: 1226276 - DNA, 15 bp, Homo sapiens
tagtcagacctgggt

SEQ ID NO: 1226277 - DNA, 15 bp, Homo sapiens
ttagtcagacctggg

SEQ ID NO: 1226278 - DNA, 15 bp, Homo sapiens
gttagtcagacctgg

SEQ ID NO: 1226279 - DNA, 15 bp, Homo sapiens
ggttagtcagacctg

SEQ ID NO: 1226280 - DNA, 15 bp, Homo sapiens
aggttagtcagacct

SEQ ID NO: 1226281 - DNA, 15 bp, Homo sapiens
aaggttagtcagacc

SEQ ID NO: 1226282 - DNA, 15 bp, Homo sapiens
taaggttagtcagac

SEQ ID NO: 1226283 - DNA, 15 bp, Homo sapiens
ataaggttagtcaga

SEQ ID NO: 1226284 - DNA, 15 bp, Homo sapiens
gataaggttagtcag

SEQ ID NO: 1226285 - DNA, 15 bp, Homo sapiens
tgataaggttagtca

SEQ ID NO: 1226286 - DNA, 15 bp, Homo sapiens
gtgataaggttagtc

SEQ ID NO: 1226287 - DNA, 15 bp, Homo sapiens
agtgataaggttagt

SEQ ID NO: 1226288 - DNA, 15 bp, Homo sapiens
tagtgataaggttag

SEQ ID NO: 1226289 - DNA, 15 bp, Homo sapiens
ctagtgataaggtta

SEQ ID NO: 1226290 - DNA, 15 bp, Homo sapiens
tctagtgataaggtt

SEQ ID NO: 1226291 - DNA, 15 bp, Homo sapiens
ctctagtgataaggt

SEQ ID NO: 1226292 - DNA, 15 bp, Homo sapiens
cctctagtgataagg

SEQ ID NO: 1226293 - DNA, 15 bp, Homo sapiens
gcctctagtgataag

SEQ ID NO: 1226294 - DNA, 15 bp, Homo sapiens
agcctctagtgataa

SEQ ID NO: 1226295 - DNA, 15 bp, Homo sapiens
cagcctctagtgata

SEQ ID NO: 1226296 - DNA, 15 bp, Homo sapiens
gcagcctctagtgat

SEQ ID NO: 1226297 - DNA, 15 bp, Homo sapiens
ggcagcctctagtga

SEQ ID NO: 1226298 - DNA, 15 bp, Homo sapiens
aggcagcctctagtg

SEQ ID NO: 1226299 - DNA, 15 bp, Homo sapiens
aaggcagcctctagt

SEQ ID NO: 1226300 - DNA, 15 bp, Homo sapiens
aaaggcagcctctag

SEQ ID NO: 1226301 - DNA, 15 bp, Homo sapiens
aaaaggcagcctcta

SEQ ID NO: 1226302 - DNA, 15 bp, Homo sapiens
gaaaaggcagcctct

SEQ ID NO: 1226303 - DNA, 15 bp, Homo sapiens
tgaaaaggcagcctc

SEQ ID NO: 1226304 - DNA, 15 bp, Homo sapiens
ctgaaaaggcagcct

SEQ ID NO: 1226305 - DNA, 15 bp, Homo sapiens
tctgaaaaggcagcc

SEQ ID NO: 1226306 - DNA, 15 bp, Homo sapiens
atctgaaaaggcagc

SEQ ID NO: 1226307 - DNA, 15 bp, Homo sapiens
aatctgaaaaggcag

SEQ ID NO: 1226308 - DNA, 15 bp, Homo sapiens
gaatctgaaaaggca

SEQ ID NO: 1226309 - DNA, 15 bp, Homo sapiens
ggaatctgaaaaggc

SEQ ID NO: 1226310 - DNA, 15 bp, Homo sapiens
gggaatctgaaaagg

SEQ ID NO: 1226311 - DNA, 15 bp, Homo sapiens
ggggaatctgaaaag

SEQ ID NO: 1226312 - DNA, 15 bp, Homo sapiens
tggggaatctgaaaa

SEQ ID NO: 1226313 - DNA, 15 bp, Homo sapiens
ttggggaatctgaaa

SEQ ID NO: 1226314 - DNA, 15 bp, Homo sapiens
tttggggaatctgaa

SEQ ID NO: 1226315 - DNA, 15 bp, Homo sapiens
ttttggggaatctga

SEQ ID NO: 1226316 - DNA, 15 bp, Homo sapiens
gttttggggaatctg

SEQ ID NO: 1226317 - DNA, 15 bp, Homo sapiens
ggttttggggaatct

SEQ ID NO: 1226318 - DNA, 15 bp, Homo sapiens
tggttttggggaatc

SEQ ID NO: 1226319 - DNA, 15 bp, Homo sapiens
atggttttggggaat

SEQ ID NO: 1226320 - DNA, 15 bp, Homo sapiens
tatggttttggggaa

SEQ ID NO: 1226321 - DNA, 15 bp, Homo sapiens
atatggttttgggga

SEQ ID NO: 1226322 - DNA, 15 bp, Homo sapiens
gatatggttttgggg

SEQ ID NO: 1226323 - DNA, 15 bp, Homo sapiens
tgatatggttttggg

SEQ ID NO: 1226324 - DNA, 15 bp, Homo sapiens
atgatatggttttgg

SEQ ID NO: 1226325 - DNA, 15 bp, Homo sapiens
gatgatatggttttg

SEQ ID NO: 1226326 - DNA, 15 bp, Homo sapiens
ggatgatatggtttt

SEQ ID NO: 1226327 - DNA, 15 bp, Homo sapiens
aggatgatatggttt

SEQ ID NO: 1226328 - DNA, 15 bp, Homo sapiens
taggatgatatggtt

SEQ ID NO: 1226329 - DNA, 15 bp, Homo sapiens
ataggatgatatggt

SEQ ID NO: 1226330 - DNA, 15 bp, Homo sapiens
aataggatgatatgg

SEQ ID NO: 1226331 - DNA, 15 bp, Homo sapiens
aaataggatgatatg

SEQ ID NO: 1226332 - DNA, 15 bp, Homo sapiens
taaataggatgatat

SEQ ID NO: 1226333 - DNA, 15 bp, Homo sapiens
ataaataggatgata

SEQ ID NO: 1226334 - DNA, 15 bp, Homo sapiens
tataaataggatgat

SEQ ID NO: 1226335 - DNA, 15 bp, Homo sapiens
ttataaataggatga

SEQ ID NO: 1226336 - DNA, 15 bp, Homo sapiens
attataaataggatg

SEQ ID NO: 1226337 - DNA, 15 bp, Homo sapiens
aattataaataggat

SEQ ID NO: 1226338 - DNA, 15 bp, Homo sapiens
aaattataaatagga

SEQ ID NO: 1226339 - DNA, 15 bp, Homo sapiens
caaattataaatagg

SEQ ID NO: 1226340 - DNA, 15 bp, Homo sapiens
acaaattataaatag

SEQ ID NO: 1226341 - DNA, 15 bp, Homo sapiens
tacaaattataaata

SEQ ID NO: 1226342 - DNA, 15 bp, Homo sapiens
ttacaaattataaat

SEQ ID NO: 1226343 - DNA, 15 bp, Homo sapiens
cttacaaattataaa

SEQ ID NO: 1226344 - DNA, 15 bp, Homo sapiens
gcttacaaattataa

SEQ ID NO: 1226345 - DNA, 15 bp, Homo sapiens
cgcttacaaattata

SEQ ID NO: 1226346 - DNA, 15 bp, Homo sapiens
gcgcttacaaattat

SEQ ID NO: 1226347 - DNA, 15 bp, Homo sapiens
agcgcttacaaatta

SEQ ID NO: 1226348 - DNA, 15 bp, Homo sapiens
tagcgcttacaaatt

SEQ ID NO: 1226349 - DNA, 15 bp, Homo sapiens
gtagcgcttacaaat

SEQ ID NO: 1226350 - DNA, 15 bp, Homo sapiens
tgtagcgcttacaaa

SEQ ID NO: 1226351 - DNA, 15 bp, Homo sapiens
ctgtagcgcttacaa

SEQ ID NO: 1226352 - DNA, 15 bp, Homo sapiens
actgtagcgcttaca

SEQ ID NO: 1226353 - DNA, 15 bp, Homo sapiens
tactgtagcgcttac

SEQ ID NO: 1226354 - DNA, 15 bp, Homo sapiens
ctactgtagcgctta

SEQ ID NO: 1226355 - DNA, 15 bp, Homo sapiens
tctactgtagcgctt

SEQ ID NO: 1226356 - DNA, 15 bp, Homo sapiens
ttctactgtagcgct

SEQ ID NO: 1226357 - DNA, 15 bp, Homo sapiens
cttctactgtagcgc

SEQ ID NO: 1226358 - DNA, 15 bp, Homo sapiens
tcttctactgtagcg

SEQ ID NO: 1226359 - DNA, 15 bp, Homo sapiens
ttcttctactgtagc

SEQ ID NO: 1226360 - DNA, 15 bp, Homo sapiens
attcttctactgtag

SEQ ID NO: 1226361 - DNA, 15 bp, Homo sapiens
cattcttctactgta

SEQ ID NO: 1226362 - DNA, 15 bp, Homo sapiens
ccattcttctactgt

SEQ ID NO: 1226363 - DNA, 15 bp, Homo sapiens
cccattcttctactg

SEQ ID NO: 1226364 - DNA, 15 bp, Homo sapiens
tcccattcttctact

SEQ ID NO: 1226365 - DNA, 15 bp, Homo sapiens
atcccattcttctac

SEQ ID NO: 1226366 - DNA, 15 bp, Homo sapiens
aatcccattcttcta

SEQ ID NO: 1226367 - DNA, 15 bp, Homo sapiens
taatcccattcttct

SEQ ID NO: 1226368 - DNA, 15 bp, Homo sapiens
ttaatcccattcttc

SEQ ID NO: 1226369 - DNA, 15 bp, Homo sapiens
attaatcccattctt

SEQ ID NO: 1226370 - DNA, 15 bp, Homo sapiens
gattaatcccattct

SEQ ID NO: 1226371 - DNA, 15 bp, Homo sapiens
agattaatcccattc

SEQ ID NO: 1226372 - DNA, 15 bp, Homo sapiens
cagattaatcccatt

SEQ ID NO: 1226373 - DNA, 15 bp, Homo sapiens
tcagattaatcccat

SEQ ID NO: 1226374 - DNA, 15 bp, Homo sapiens
ctcagattaatccca

SEQ ID NO: 1226375 - DNA, 15 bp, Homo sapiens
tctcagattaatccc

SEQ ID NO: 1226376 - DNA, 15 bp, Homo sapiens
ctctcagattaatcc

SEQ ID NO: 1226377 - DNA, 15 bp, Homo sapiens
tctctcagattaatc

SEQ ID NO: 1226378 - DNA, 15 bp, Homo sapiens
ttctctcagattaat

SEQ ID NO: 1226379 - DNA, 15 bp, Homo sapiens
attctctcagattaa

SEQ ID NO: 1226380 - DNA, 15 bp, Homo sapiens
aattctctcagatta

SEQ ID NO: 1226381 - DNA, 15 bp, Homo sapiens
aaattctctcagatt

SEQ ID NO: 1226382 - DNA, 15 bp, Homo sapiens
aaaattctctcagat

SEQ ID NO: 1226383 - DNA, 15 bp, Homo sapiens
caaaattctctcaga

SEQ ID NO: 1226384 - DNA, 15 bp, Homo sapiens
gcaaaattctctcag

SEQ ID NO: 1226385 - DNA, 15 bp, Homo sapiens
tgcaaaattctctca

SEQ ID NO: 1226386 - DNA, 15 bp, Homo sapiens
ctgcaaaattctctc

SEQ ID NO: 1226387 - DNA, 15 bp, Homo sapiens
cctgcaaaattctct

SEQ ID NO: 1226388 - DNA, 15 bp, Homo sapiens
tcctgcaaaattctc

SEQ ID NO: 1226389 - DNA, 15 bp, Homo sapiens
ctcctgcaaaattct

SEQ ID NO: 1226390 - DNA, 15 bp, Homo sapiens
cctcctgcaaaattc

SEQ ID NO: 1226391 - DNA, 15 bp, Homo sapiens
tcctcctgcaaaatt

SEQ ID NO: 1226392 - DNA, 15 bp, Homo sapiens
ttcctcctgcaaaat

SEQ ID NO: 1226393 - DNA, 15 bp, Homo sapiens
tttcctcctgcaaaa

SEQ ID NO: 1226394 - DNA, 15 bp, Homo sapiens
ttttcctcctgcaaa

SEQ ID NO: 1226395 - DNA, 15 bp, Homo sapiens
attttcctcctgcaa

SEQ ID NO: 1226396 - DNA, 15 bp, Homo sapiens
tattttcctcctgca

SEQ ID NO: 1226397 - DNA, 15 bp, Homo sapiens
ctattttcctcctgc

SEQ ID NO: 1226398 - DNA, 15 bp, Homo sapiens
tctattttcctcctg

SEQ ID NO: 1226399 - DNA, 15 bp, Homo sapiens
ttctattttcctcct

SEQ ID NO: 1226400 - DNA, 15 bp, Homo sapiens
attctattttcctcc

SEQ ID NO: 1226401 - DNA, 15 bp, Homo sapiens
tattctattttcctc

SEQ ID NO: 1226402 - DNA, 15 bp, Homo sapiens
gtattctattttcct

SEQ ID NO: 1226403 - DNA, 15 bp, Homo sapiens
tgtattctattttcc

SEQ ID NO: 1226404 - DNA, 15 bp, Homo sapiens
ttgtattctattttc

SEQ ID NO: 1226405 - DNA, 15 bp, Homo sapiens
tttgtattctatttt

SEQ ID NO: 1226406 - DNA, 15 bp, Homo sapiens
ttttgtattctattt

SEQ ID NO: 1226407 - DNA, 15 bp, Homo sapiens
tttttgtattctatt

SEQ ID NO: 1226408 - DNA, 15 bp, Homo sapiens
ttttttgtattctat

SEQ ID NO: 1226409 - DNA, 15 bp, Homo sapiens
attttttgtattcta

SEQ ID NO: 1226410 - DNA, 15 bp, Homo sapiens
aattttttgtattct

SEQ ID NO: 1226411 - DNA, 15 bp, Homo sapiens
gaattttttgtattc

SEQ ID NO: 1226412 - DNA, 15 bp, Homo sapiens
ggaattttttgtatt

SEQ ID NO: 1226413 - DNA, 15 bp, Homo sapiens
tggaattttttgtat

SEQ ID NO: 1226414 - DNA, 15 bp, Homo sapiens
atggaattttttgta

SEQ ID NO: 1226415 - DNA, 15 bp, Homo sapiens
gatggaattttttgt

SEQ ID NO: 1226416 - DNA, 15 bp, Homo sapiens
agatggaattttttg

SEQ ID NO: 1226417 - DNA, 15 bp, Homo sapiens
tagatggaatttttt

SEQ ID NO: 1226418 - DNA, 15 bp, Homo sapiens
gtagatggaattttt

SEQ ID NO: 1226419 - DNA, 15 bp, Homo sapiens
agtagatggaatttt

SEQ ID NO: 1226420 - DNA, 15 bp, Homo sapiens
gagtagatggaattt

SEQ ID NO: 1226421 - DNA, 15 bp, Homo sapiens
agagtagatggaatt

SEQ ID NO: 1226422 - DNA, 15 bp, Homo sapiens
cagagtagatggaat

SEQ ID NO: 1226423 - DNA, 15 bp, Homo sapiens
tcagagtagatggaa

SEQ ID NO: 1226424 - DNA, 15 bp, Homo sapiens
gtcagagtagatgga

SEQ ID NO: 1226425 - DNA, 15 bp, Homo sapiens
ggtcagagtagatgg

SEQ ID NO: 1226426 - DNA, 15 bp, Homo sapiens
aggtcagagtagatg

SEQ ID NO: 1226427 - DNA, 15 bp, Homo sapiens
aaggtcagagtagat

SEQ ID NO: 1226428 - DNA, 15 bp, Homo sapiens
taaggtcagagtaga

SEQ ID NO: 1226429 - DNA, 15 bp, Homo sapiens
ctaaggtcagagtag

SEQ ID NO: 1226430 - DNA, 15 bp, Homo sapiens
tctaaggtcagagta

SEQ ID NO: 1226431 - DNA, 15 bp, Homo sapiens
ttctaaggtcagagt

SEQ ID NO: 1226432 - DNA, 15 bp, Homo sapiens
attctaaggtcagag

SEQ ID NO: 1226433 - DNA, 15 bp, Homo sapiens
aattctaaggtcaga

SEQ ID NO: 1226434 - DNA, 15 bp, Homo sapiens
gaattctaaggtcag

SEQ ID NO: 1226435 - DNA, 15 bp, Homo sapiens
agaattctaaggtca

SEQ ID NO: 1226436 - DNA, 15 bp, Homo sapiens
gagaattctaaggtc

SEQ ID NO: 1226437 - DNA, 15 bp, Homo sapiens
tgagaattctaaggt

SEQ ID NO: 1226438 - DNA, 15 bp, Homo sapiens
gtgagaattctaagg

SEQ ID NO: 1226439 - DNA, 15 bp, Homo sapiens
agtgagaattctaag

SEQ ID NO: 1226440 - DNA, 15 bp, Homo sapiens
aagtgagaattctaa

SEQ ID NO: 1226441 - DNA, 15 bp, Homo sapiens
aaagtgagaattcta

SEQ ID NO: 1226442 - DNA, 15 bp, Homo sapiens
aaaagtgagaattct

SEQ ID NO: 1226443 - DNA, 15 bp, Homo sapiens
gaaaagtgagaattc

SEQ ID NO: 1226444 - DNA, 15 bp, Homo sapiens
agaaaagtgagaatt

SEQ ID NO: 1226445 - DNA, 15 bp, Homo sapiens
aagaaaagtgagaat

SEQ ID NO: 1226446 - DNA, 15 bp, Homo sapiens
taagaaaagtgagaa

SEQ ID NO: 1226447 - DNA, 15 bp, Homo sapiens
ctaagaaaagtgaga

SEQ ID NO: 1226448 - DNA, 15 bp, Homo sapiens
actaagaaaagtgag

SEQ ID NO: 1226449 - DNA, 15 bp, Homo sapiens
aactaagaaaagtga

SEQ ID NO: 1226450 - DNA, 15 bp, Homo sapiens
taactaagaaaagtg

SEQ ID NO: 1226451 - DNA, 15 bp, Homo sapiens
ataactaagaaaagt

SEQ ID NO: 1226452 - DNA, 15 bp, Homo sapiens
tataactaagaaaag

SEQ ID NO: 1226453 - DNA, 15 bp, Homo sapiens
ttataactaagaaaa

SEQ ID NO: 1226454 - DNA, 15 bp, Homo sapiens
tttataactaagaaa

SEQ ID NO: 1226455 - DNA, 15 bp, Homo sapiens
ttttataactaagaa

SEQ ID NO: 1226456 - DNA, 15 bp, Homo sapiens
tttttataactaaga

SEQ ID NO: 1226457 - DNA, 15 bp, Homo sapiens
ttttttataactaag

SEQ ID NO: 1226458 - DNA, 15 bp, Homo sapiens
tttttttataactaa

SEQ ID NO: 1226459 - DNA, 15 bp, Homo sapiens
ttttttttataacta

SEQ ID NO: 1226460 - DNA, 15 bp, Homo sapiens
gttttttttataact

SEQ ID NO: 1226461 - DNA, 15 bp, Homo sapiens
tgttttttttataac

SEQ ID NO: 1226462 - DNA, 15 bp, Homo sapiens
ttgttttttttataa

SEQ ID NO: 1226463 - DNA, 15 bp, Homo sapiens
tttgttttttttata

SEQ ID NO: 1226464 - DNA, 15 bp, Homo sapiens
ctttgttttttttat

SEQ ID NO: 1226465 - DNA, 15 bp, Homo sapiens
tctttgtttttttta

SEQ ID NO: 1226466 - DNA, 15 bp, Homo sapiens
atctttgtttttttt

SEQ ID NO: 1226467 - DNA, 15 bp, Homo sapiens
gatctttgttttttt

SEQ ID NO: 1226468 - DNA, 15 bp, Homo sapiens
agatctttgtttttt

SEQ ID NO: 1226469 - DNA, 15 bp, Homo sapiens
aagatctttgttttt

SEQ ID NO: 1226470 - DNA, 15 bp, Homo sapiens
taagatctttgtttt

SEQ ID NO: 1226471 - DNA, 15 bp, Homo sapiens
ttaagatctttgttt

SEQ ID NO: 1226472 - DNA, 15 bp, Homo sapiens
cttaagatctttgtt

SEQ ID NO: 1226473 - DNA, 15 bp, Homo sapiens
ccttaagatctttgt

SEQ ID NO: 1226474 - DNA, 15 bp, Homo sapiens
tccttaagatctttg

SEQ ID NO: 1226475 - DNA, 15 bp, Homo sapiens
ttccttaagatcttt

SEQ ID NO: 1226476 - DNA, 15 bp, Homo sapiens
tttccttaagatctt

SEQ ID NO: 1226477 - DNA, 15 bp, Homo sapiens
ctttccttaagatct

SEQ ID NO: 1226478 - DNA, 15 bp, Homo sapiens
tctttccttaagatc

SEQ ID NO: 1226479 - DNA, 15 bp, Homo sapiens
gtctttccttaagat

SEQ ID NO: 1226480 - DNA, 15 bp, Homo sapiens
tgtctttccttaaga

SEQ ID NO: 1226481 - DNA, 15 bp, Homo sapiens
ttgtctttccttaag

SEQ ID NO: 1226482 - DNA, 15 bp, Homo sapiens
attgtctttccttaa

SEQ ID NO: 1226483 - DNA, 15 bp, Homo sapiens
tattgtctttcctta

SEQ ID NO: 1226484 - DNA, 15 bp, Homo sapiens
ttattgtctttcctt

SEQ ID NO: 1226485 - DNA, 15 bp, Homo sapiens
attattgtctttcct

SEQ ID NO: 1226486 - DNA, 15 bp, Homo sapiens
cattattgtctttcc

SEQ ID NO: 1226487 - DNA, 15 bp, Homo sapiens
gcattattgtctttc

SEQ ID NO: 1226488 - DNA, 15 bp, Homo sapiens
agcattattgtcttt

SEQ ID NO: 1226489 - DNA, 15 bp, Homo sapiens
aagcattattgtctt

SEQ ID NO: 1226490 - DNA, 15 bp, Homo sapiens
aaagcattattgtct

SEQ ID NO: 1226491 - DNA, 15 bp, Homo sapiens
aaaagcattattgtc

SEQ ID NO: 1226492 - DNA, 15 bp, Homo sapiens
taaaagcattattgt

SEQ ID NO: 1226493 - DNA, 15 bp, Homo sapiens
ttaaaagcattattg

SEQ ID NO: 1226494 - DNA, 15 bp, Homo sapiens
tttaaaagcattatt

SEQ ID NO: 1226495 - DNA, 15 bp, Homo sapiens
ttttaaaagcattat

SEQ ID NO: 1226496 - DNA, 15 bp, Homo sapiens
cttttaaaagcatta

SEQ ID NO: 1226497 - DNA, 15 bp, Homo sapiens
gcttttaaaagcatt

SEQ ID NO: 1226498 - DNA, 15 bp, Homo sapiens
tgcttttaaaagcat

SEQ ID NO: 1226499 - DNA, 15 bp, Homo sapiens
ctgcttttaaaagca

SEQ ID NO: 1226500 - DNA, 15 bp, Homo sapiens
actgcttttaaaagc

SEQ ID NO: 1226501 - DNA, 15 bp, Homo sapiens
cactgcttttaaaag

SEQ ID NO: 1226502 - DNA, 15 bp, Homo sapiens
ccactgcttttaaaa

SEQ ID NO: 1226503 - DNA, 15 bp, Homo sapiens
cccactgcttttaaa

SEQ ID NO: 1226504 - DNA, 15 bp, Homo sapiens
acccactgcttttaa

SEQ ID NO: 1226505 - DNA, 15 bp, Homo sapiens
tacccactgctttta

SEQ ID NO: 1226506 - DNA, 15 bp, Homo sapiens
atacccactgctttt

SEQ ID NO: 1226507 - DNA, 15 bp, Homo sapiens
catacccactgcttt

SEQ ID NO: 1226508 - DNA, 15 bp, Homo sapiens
tcatacccactgctt

SEQ ID NO: 1226509 - DNA, 15 bp, Homo sapiens
ttcatacccactgct

SEQ ID NO: 1226510 - DNA, 15 bp, Homo sapiens
tttcatacccactgc

SEQ ID NO: 1226511 - DNA, 15 bp, Homo sapiens
gtttcatacccactg

SEQ ID NO: 1226512 - DNA, 15 bp, Homo sapiens
tgtttcatacccact

SEQ ID NO: 1226513 - DNA, 15 bp, Homo sapiens
ttgtttcatacccac

SEQ ID NO: 1226514 - DNA, 15 bp, Homo sapiens
tttgtttcataccca

SEQ ID NO: 1226515 - DNA, 15 bp, Homo sapiens
atttgtttcataccc

SEQ ID NO: 1226516 - DNA, 15 bp, Homo sapiens
aatttgtttcatacc

SEQ ID NO: 1226517 - DNA, 15 bp, Homo sapiens
taatttgtttcatac

SEQ ID NO: 1226518 - DNA, 15 bp, Homo sapiens
ataatttgtttcata

SEQ ID NO: 1226519 - DNA, 15 bp, Homo sapiens
cataatttgtttcat

SEQ ID NO: 1226520 - DNA, 15 bp, Homo sapiens
acataatttgtttca

SEQ ID NO: 1226521 - DNA, 15 bp, Homo sapiens
gacataatttgtttc

SEQ ID NO: 1226522 - DNA, 15 bp, Homo sapiens
agacataatttgttt

SEQ ID NO: 1226523 - DNA, 15 bp, Homo sapiens
aagacataatttgtt

SEQ ID NO: 1226524 - DNA, 15 bp, Homo sapiens
gaagacataatttgt

SEQ ID NO: 1226525 - DNA, 15 bp, Homo sapiens
tgaagacataatttg

SEQ ID NO: 1226526 - DNA, 15 bp, Homo sapiens
ctgaagacataattt

SEQ ID NO: 1226527 - DNA, 15 bp, Homo sapiens
tctgaagacataatt

SEQ ID NO: 1226528 - DNA, 15 bp, Homo sapiens
ctctgaagacataat

SEQ ID NO: 1226529 - DNA, 15 bp, Homo sapiens
cctctgaagacataa

SEQ ID NO: 1226530 - DNA, 15 bp, Homo sapiens
ccctctgaagacata

SEQ ID NO: 1226531 - DNA, 15 bp, Homo sapiens
accctctgaagacat

SEQ ID NO: 1226532 - DNA, 15 bp, Homo sapiens
taccctctgaagaca

SEQ ID NO: 1226533 - DNA, 15 bp, Homo sapiens
ctaccctctgaagac

SEQ ID NO: 1226534 - DNA, 15 bp, Homo sapiens
cctaccctctgaaga

SEQ ID NO: 1226535 - DNA, 15 bp, Homo sapiens
gcctaccctctgaag

SEQ ID NO: 1226536 - DNA, 15 bp, Homo sapiens
tgcctaccctctgaa

SEQ ID NO: 1226537 - DNA, 15 bp, Homo sapiens
ttgcctaccctctga

SEQ ID NO: 1226538 - DNA, 15 bp, Homo sapiens
attgcctaccctctg

SEQ ID NO: 1226539 - DNA, 15 bp, Homo sapiens
tattgcctaccctct

SEQ ID NO: 1226540 - DNA, 15 bp, Homo sapiens
ttattgcctaccctc

SEQ ID NO: 1226541 - DNA, 15 bp, Homo sapiens
cttattgcctaccct

SEQ ID NO: 1226542 - DNA, 15 bp, Homo sapiens
acttattgcctaccc

SEQ ID NO: 1226543 - DNA, 15 bp, Homo sapiens
tacttattgcctacc

SEQ ID NO: 1226544 - DNA, 15 bp, Homo sapiens
gtacttattgcctac

SEQ ID NO: 1226545 - DNA, 15 bp, Homo sapiens
tgtacttattgccta

SEQ ID NO: 1226546 - DNA, 15 bp, Homo sapiens
ctgtacttattgcct

SEQ ID NO: 1226547 - DNA, 15 bp, Homo sapiens
tctgtacttattgcc

SEQ ID NO: 1226548 - DNA, 15 bp, Homo sapiens
atctgtacttattgc

SEQ ID NO: 1226549 - DNA, 15 bp, Homo sapiens
tatctgtacttattg

SEQ ID NO: 1226550 - DNA, 15 bp, Homo sapiens
ctatctgtacttatt

SEQ ID NO: 1226551 - DNA, 15 bp, Homo sapiens
tctatctgtacttat

SEQ ID NO: 1226552 - DNA, 15 bp, Homo sapiens
ctctatctgtactta

SEQ ID NO: 1226553 - DNA, 15 bp, Homo sapiens
cctctatctgtactt

SEQ ID NO: 1226554 - DNA, 15 bp, Homo sapiens
tcctctatctgtact

SEQ ID NO: 1226555 - DNA, 15 bp, Homo sapiens
ttcctctatctgtac

SEQ ID NO: 1226556 - DNA, 15 bp, Homo sapiens
tttcctctatctgta

SEQ ID NO: 1226557 - DNA, 15 bp, Homo sapiens
ttttcctctatctgt

SEQ ID NO: 1226558 - DNA, 15 bp, Homo sapiens
cttttcctctatctg

SEQ ID NO: 1226559 - DNA, 15 bp, Homo sapiens
ccttttcctctatct

SEQ ID NO: 1226560 - DNA, 15 bp, Homo sapiens
cccttttcctctatc

SEQ ID NO: 1226561 - DNA, 15 bp, Homo sapiens
tcccttttcctctat

SEQ ID NO: 1226562 - DNA, 15 bp, Homo sapiens
ttcccttttcctcta

SEQ ID NO: 1226563 - DNA, 15 bp, Homo sapiens
gttcccttttcctct

SEQ ID NO: 1226564 - DNA, 15 bp, Homo sapiens
tgttcccttttcctc

SEQ ID NO: 1226565 - DNA, 15 bp, Homo sapiens
ttgttcccttttcct

SEQ ID NO: 1226566 - DNA, 15 bp, Homo sapiens
tttgttcccttttcc

SEQ ID NO: 1226567 - DNA, 15 bp, Homo sapiens
atttgttcccttttc

SEQ ID NO: 1226568 - DNA, 15 bp, Homo sapiens
tatttgttccctttt

SEQ ID NO: 1226569 - DNA, 15 bp, Homo sapiens
ctatttgttcccttt

SEQ ID NO: 1226570 - DNA, 15 bp, Homo sapiens
cctatttgttccctt

SEQ ID NO: 1226571 - DNA, 15 bp, Homo sapiens
tcctatttgttccct

SEQ ID NO: 1226572 - DNA, 15 bp, Homo sapiens
ctcctatttgttccc

SEQ ID NO: 1226573 - DNA, 15 bp, Homo sapiens
tctcctatttgttcc

SEQ ID NO: 1226574 - DNA, 15 bp, Homo sapiens
gtctcctatttgttc

SEQ ID NO: 1226575 - DNA, 15 bp, Homo sapiens
ggtctcctatttgtt

SEQ ID NO: 1226576 - DNA, 15 bp, Homo sapiens
tggtctcctatttgt

SEQ ID NO: 1226577 - DNA, 15 bp, Homo sapiens
ttggtctcctatttg

SEQ ID NO: 1226578 - DNA, 15 bp, Homo sapiens
tttggtctcctattt

SEQ ID NO: 1226579 - DNA, 15 bp, Homo sapiens
gtttggtctcctatt

SEQ ID NO: 1226580 - DNA, 15 bp, Homo sapiens
cgtttggtctcctat

SEQ ID NO: 1226581 - DNA, 15 bp, Homo sapiens
gcgtttggtctccta

SEQ ID NO: 1226582 - DNA, 15 bp, Homo sapiens
cgcgtttggtctcct

SEQ ID NO: 1226583 - DNA, 15 bp, Homo sapiens
tcgcgtttggtctcc

SEQ ID NO: 1226584 - DNA, 15 bp, Homo sapiens
ctcgcgtttggtctc

SEQ ID NO: 1226585 - DNA, 15 bp, Homo sapiens
tctcgcgtttggtct

SEQ ID NO: 1226586 - DNA, 15 bp, Homo sapiens
ttctcgcgtttggtc

SEQ ID NO: 1226587 - DNA, 15 bp, Homo sapiens
attctcgcgtttggt

SEQ ID NO: 1226588 - DNA, 15 bp, Homo sapiens
tattctcgcgtttgg

SEQ ID NO: 1226589 - DNA, 15 bp, Homo sapiens
ctattctcgcgtttg

SEQ ID NO: 1226590 - DNA, 15 bp, Homo sapiens
cctattctcgcgttt

SEQ ID NO: 1226591 - DNA, 15 bp, Homo sapiens
acctattctcgcgtt

SEQ ID NO: 1226592 - DNA, 15 bp, Homo sapiens
cacctattctcgcgt

SEQ ID NO: 1226593 - DNA, 15 bp, Homo sapiens
tcacctattctcgcg

SEQ ID NO: 1226594 - DNA, 15 bp, Homo sapiens
ctcacctattctcgc

SEQ ID NO: 1226595 - DNA, 15 bp, Homo sapiens
cctcacctattctcg

SEQ ID NO: 1226596 - DNA, 15 bp, Homo sapiens
gcctcacctattctc

SEQ ID NO: 1226597 - DNA, 15 bp, Homo sapiens
ggcctcacctattct

SEQ ID NO: 1226598 - DNA, 15 bp, Homo sapiens
cggcctcacctattc

SEQ ID NO: 1226599 - DNA, 15 bp, Homo sapiens
acggcctcacctatt

SEQ ID NO: 1226600 - DNA, 15 bp, Homo sapiens
cacggcctcacctat

SEQ ID NO: 1226601 - DNA, 15 bp, Homo sapiens
ccacggcctcaccta

SEQ ID NO: 1226602 - DNA, 15 bp, Homo sapiens
cccacggcctcacct

SEQ ID NO: 1226603 - DNA, 15 bp, Homo sapiens
acccacggcctcacc

SEQ ID NO: 1226604 - DNA, 15 bp, Homo sapiens
cacccacggcctcac

SEQ ID NO: 1226605 - DNA, 15 bp, Homo sapiens
tcacccacggcctca

SEQ ID NO: 1226606 - DNA, 15 bp, Homo sapiens
ttcacccacggcctc

SEQ ID NO: 1226607 - DNA, 15 bp, Homo sapiens
tttcacccacggcct

SEQ ID NO: 1226608 - DNA, 15 bp, Homo sapiens
atttcacccacggcc

SEQ ID NO: 1226609 - DNA, 15 bp, Homo sapiens
catttcacccacggc

SEQ ID NO: 1226610 - DNA, 15 bp, Homo sapiens
ccatttcacccacgg

SEQ ID NO: 1226611 - DNA, 15 bp, Homo sapiens
cccatttcacccacg

SEQ ID NO: 1226612 - DNA, 15 bp, Homo sapiens
tcccatttcacccac

SEQ ID NO: 1226613 - DNA, 15 bp, Homo sapiens
ctcccatttcaccca

SEQ ID NO: 1226614 - DNA, 15 bp, Homo sapiens
actcccatttcaccc

SEQ ID NO: 1226615 - DNA, 15 bp, Homo sapiens
aactcccatttcacc

SEQ ID NO: 1226616 - DNA, 15 bp, Homo sapiens
gaactcccatttcac

SEQ ID NO: 1226617 - DNA, 15 bp, Homo sapiens
agaactcccatttca

SEQ ID NO: 1226618 - DNA, 15 bp, Homo sapiens
aagaactcccatttc

SEQ ID NO: 1226619 - DNA, 15 bp, Homo sapiens
taagaactcccattt

SEQ ID NO: 1226620 - DNA, 15 bp, Homo sapiens
gtaagaactcccatt

SEQ ID NO: 1226621 - DNA, 15 bp, Homo sapiens
cgtaagaactcccat

SEQ ID NO: 1226622 - DNA, 15 bp, Homo sapiens
tcgtaagaactccca

SEQ ID NO: 1226623 - DNA, 15 bp, Homo sapiens
atcgtaagaactccc

SEQ ID NO: 1226624 - DNA, 15 bp, Homo sapiens
tatcgtaagaactcc

SEQ ID NO: 1226625 - DNA, 15 bp, Homo sapiens
gtatcgtaagaactc

SEQ ID NO: 1226626 - DNA, 15 bp, Homo sapiens
tgtatcgtaagaact

SEQ ID NO: 1226627 - DNA, 15 bp, Homo sapiens
ctgtatcgtaagaac

SEQ ID NO: 1226628 - DNA, 15 bp, Homo sapiens
actgtatcgtaagaa

SEQ ID NO: 1226629 - DNA, 15 bp, Homo sapiens
tactgtatcgtaaga

SEQ ID NO: 1226630 - DNA, 15 bp, Homo sapiens
ctactgtatcgtaag

SEQ ID NO: 1226631 - DNA, 15 bp, Homo sapiens
tctactgtatcgtaa

SEQ ID NO: 1226632 - DNA, 15 bp, Homo sapiens
ctctactgtatcgta

SEQ ID NO: 1226633 - DNA, 15 bp, Homo sapiens
gctctactgtatcgt

SEQ ID NO: 1226634 - DNA, 15 bp, Homo sapiens
tgctctactgtatcg

SEQ ID NO: 1226635 - DNA, 15 bp, Homo sapiens
ttgctctactgtatc

SEQ ID NO: 1226636 - DNA, 15 bp, Homo sapiens
gttgctctactgtat

SEQ ID NO: 1226637 - DNA, 15 bp, Homo sapiens
ggttgctctactgta

SEQ ID NO: 1226638 - DNA, 15 bp, Homo sapiens
cggttgctctactgt

SEQ ID NO: 1226639 - DNA, 15 bp, Homo sapiens
acggttgctctactg

SEQ ID NO: 1226640 - DNA, 15 bp, Homo sapiens
gacggttgctctact

SEQ ID NO: 1226641 - DNA, 15 bp, Homo sapiens
tgacggttgctctac

SEQ ID NO: 1226642 - DNA, 15 bp, Homo sapiens
atgacggttgctcta

SEQ ID NO: 1226643 - DNA, 15 bp, Homo sapiens
tatgacggttgctct

SEQ ID NO: 1226644 - DNA, 15 bp, Homo sapiens
ctatgacggttgctc

SEQ ID NO: 1226645 - DNA, 15 bp, Homo sapiens
gctatgacggttgct

SEQ ID NO: 1226646 - DNA, 15 bp, Homo sapiens
ggctatgacggttgc

SEQ ID NO: 1226647 - DNA, 15 bp, Homo sapiens
cggctatgacggttg

SEQ ID NO: 1226648 - DNA, 15 bp, Homo sapiens
tcggctatgacggtt

SEQ ID NO: 1226649 - DNA, 15 bp, Homo sapiens
ctcggctatgacggt

SEQ ID NO: 1226650 - DNA, 15 bp, Homo sapiens
tctcggctatgacgg

SEQ ID NO: 1226651 - DNA, 15 bp, Homo sapiens
ctctcggctatgacg

SEQ ID NO: 1226652 - DNA, 15 bp, Homo sapiens
cctctcggctatgac

SEQ ID NO: 1226653 - DNA, 15 bp, Homo sapiens
tcctctcggctatga

SEQ ID NO: 1226654 - DNA, 15 bp, Homo sapiens
ctcctctcggctatg

SEQ ID NO: 1226655 - DNA, 15 bp, Homo sapiens
gctcctctcggctat

SEQ ID NO: 1226656 - DNA, 15 bp, Homo sapiens
ggctcctctcggcta

SEQ ID NO: 1226657 - DNA, 15 bp, Homo sapiens
tggctcctctcggct

SEQ ID NO: 1226658 - DNA, 15 bp, Homo sapiens
ttggctcctctcggc

SEQ ID NO: 1226659 - DNA, 15 bp, Homo sapiens
tttggctcctctcgg

SEQ ID NO: 1226660 - DNA, 15 bp, Homo sapiens
ctttggctcctctcg

SEQ ID NO: 1226661 - DNA, 15 bp, Homo sapiens
cctttggctcctctc

SEQ ID NO: 1226662 - DNA, 15 bp, Homo sapiens
tcctttggctcctct

SEQ ID NO: 1226663 - DNA, 15 bp, Homo sapiens
ctcctttggctcctc

SEQ ID NO: 1226664 - DNA, 15 bp, Homo sapiens
tctcctttggctcct

SEQ ID NO: 1226665 - DNA, 15 bp, Homo sapiens
gtctcctttggctcc

SEQ ID NO: 1226666 - DNA, 15 bp, Homo sapiens
tgtctcctttggctc

SEQ ID NO: 1226667 - DNA, 15 bp, Homo sapiens
atgtctcctttggct

SEQ ID NO: 1226668 - DNA, 15 bp, Homo sapiens
tatgtctcctttggc

SEQ ID NO: 1226669 - DNA, 15 bp, Homo sapiens
ttatgtctcctttgg

SEQ ID NO: 1226670 - DNA, 15 bp, Homo sapiens
attatgtctcctttg

SEQ ID NO: 1226671 - DNA, 15 bp, Homo sapiens
cattatgtctccttt

SEQ ID NO: 1226672 - DNA, 15 bp, Homo sapiens
tcattatgtctcctt

SEQ ID NO: 1226673 - DNA, 15 bp, Homo sapiens
ctcattatgtctcct

SEQ ID NO: 1226674 - DNA, 15 bp, Homo sapiens
actcattatgtctcc

SEQ ID NO: 1226675 - DNA, 15 bp, Homo sapiens
tactcattatgtctc

SEQ ID NO: 1226676 - DNA, 15 bp, Homo sapiens
ttactcattatgtct

SEQ ID NO: 1226677 - DNA, 15 bp, Homo sapiens
tttactcattatgtc

SEQ ID NO: 1226678 - DNA, 15 bp, Homo sapiens
atttactcattatgt

SEQ ID NO: 1226679 - DNA, 15 bp, Homo sapiens
tatttactcattatg

SEQ ID NO: 1226680 - DNA, 15 bp, Homo sapiens
ctatttactcattat

SEQ ID NO: 1226681 - DNA, 15 bp, Homo sapiens
tctatttactcatta

SEQ ID NO: 1226682 - DNA, 15 bp, Homo sapiens
ttctatttactcatt

SEQ ID NO: 1226683 - DNA, 15 bp, Homo sapiens
cttctatttactcat

SEQ ID NO: 1226684 - DNA, 15 bp, Homo sapiens
tcttctatttactca

SEQ ID NO: 1226685 - DNA, 15 bp, Homo sapiens
atcttctatttactc

SEQ ID NO: 1226686 - DNA, 15 bp, Homo sapiens
tatcttctatttact

SEQ ID NO: 1226687 - DNA, 15 bp, Homo sapiens
atatcttctatttac

SEQ ID NO: 1226688 - DNA, 15 bp, Homo sapiens
gatatcttctattta

SEQ ID NO: 1226689 - DNA, 15 bp, Homo sapiens
ggatatcttctattt

SEQ ID NO: 1226690 - DNA, 15 bp, Homo sapiens
aggatatcttctatt

SEQ ID NO: 1226691 - DNA, 15 bp, Homo sapiens
caggatatcttctat

SEQ ID NO: 1226692 - DNA, 15 bp, Homo sapiens
ccaggatatcttcta

SEQ ID NO: 1226693 - DNA, 15 bp, Homo sapiens
tccaggatatcttct

SEQ ID NO: 1226694 - DNA, 15 bp, Homo sapiens
gtccaggatatcttc

SEQ ID NO: 1226695 - DNA, 15 bp, Homo sapiens
cgtccaggatatctt

SEQ ID NO: 1226696 - DNA, 15 bp, Homo sapiens
gcgtccaggatatct

SEQ ID NO: 1226697 - DNA, 15 bp, Homo sapiens
cgcgtccaggatatc

SEQ ID NO: 1226698 - DNA, 15 bp, Homo sapiens
tcgcgtccaggatat

SEQ ID NO: 1226699 - DNA, 15 bp, Homo sapiens
atcgcgtccaggata

SEQ ID NO: 1226700 - DNA, 15 bp, Homo sapiens
aatcgcgtccaggat

SEQ ID NO: 1226701 - DNA, 15 bp, Homo sapiens
gaatcgcgtccagga

SEQ ID NO: 1226702 - DNA, 15 bp, Homo sapiens
agaatcgcgtccagg

SEQ ID NO: 1226703 - DNA, 15 bp, Homo sapiens
tagaatcgcgtccag

SEQ ID NO: 1226704 - DNA, 15 bp, Homo sapiens
ctagaatcgcgtcca

SEQ ID NO: 1226705 - DNA, 15 bp, Homo sapiens
tctagaatcgcgtcc

SEQ ID NO: 1226706 - DNA, 15 bp, Homo sapiens
ttctagaatcgcgtc

SEQ ID NO: 1226707 - DNA, 15 bp, Homo sapiens
gttctagaatcgcgt

SEQ ID NO: 1226708 - DNA, 15 bp, Homo sapiens
tgttctagaatcgcg

SEQ ID NO: 1226709 - DNA, 15 bp, Homo sapiens
atgttctagaatcgc

SEQ ID NO: 1226710 - DNA, 15 bp, Homo sapiens
tatgttctagaatcg

SEQ ID NO: 1226711 - DNA, 15 bp, Homo sapiens
ttatgttctagaatc

SEQ ID NO: 1226712 - DNA, 15 bp, Homo sapiens
tttatgttctagaat

SEQ ID NO: 1226713 - DNA, 15 bp, Homo sapiens
ttttatgttctagaa

SEQ ID NO: 1226714 - DNA, 15 bp, Homo sapiens
tttttatgttctaga

SEQ ID NO: 1226715 - DNA, 15 bp, Homo sapiens
ctttttatgttctag

SEQ ID NO: 1226716 - DNA, 15 bp, Homo sapiens
tctttttatgttcta

SEQ ID NO: 1226717 - DNA, 15 bp, Homo sapiens
ttctttttatgttct

SEQ ID NO: 1226718 - DNA, 15 bp, Homo sapiens
gttctttttatgttc

SEQ ID NO: 1226719 - DNA, 15 bp, Homo sapiens
tgttctttttatgtt

SEQ ID NO: 1226720 - DNA, 15 bp, Homo sapiens
ttgttctttttatgt

SEQ ID NO: 1226721 - DNA, 15 bp, Homo sapiens
cttgttctttttatg

SEQ ID NO: 1226722 - DNA, 15 bp, Homo sapiens
acttgttctttttat

SEQ ID NO: 1226723 - DNA, 15 bp, Homo sapiens
aacttgttcttttta

SEQ ID NO: 1226724 - DNA, 15 bp, Homo sapiens
aaacttgttcttttt

SEQ ID NO: 1226725 - DNA, 15 bp, Homo sapiens
aaaacttgttctttt

SEQ ID NO: 1226726 - DNA, 15 bp, Homo sapiens
aaaaacttgttcttt

SEQ ID NO: 1226727 - DNA, 15 bp, Homo sapiens
taaaaacttgttctt

SEQ ID NO: 1226728 - DNA, 15 bp, Homo sapiens
ctaaaaacttgttct

SEQ ID NO: 1226729 - DNA, 15 bp, Homo sapiens
cctaaaaacttgttc

SEQ ID NO: 1226730 - DNA, 15 bp, Homo sapiens
gcctaaaaacttgtt

SEQ ID NO: 1226731 - DNA, 15 bp, Homo sapiens
ggcctaaaaacttgt

SEQ ID NO: 1226732 - DNA, 15 bp, Homo sapiens
cggcctaaaaacttg

SEQ ID NO: 1226733 - DNA, 15 bp, Homo sapiens
ccggcctaaaaactt

SEQ ID NO: 1226734 - DNA, 15 bp, Homo sapiens
cccggcctaaaaact

SEQ ID NO: 1226735 - DNA, 15 bp, Homo sapiens
gcccggcctaaaaac

SEQ ID NO: 1226736 - DNA, 15 bp, Homo sapiens
tgcccggcctaaaaa

SEQ ID NO: 1226737 - DNA, 15 bp, Homo sapiens
gtgcccggcctaaaa

SEQ ID NO: 1226738 - DNA, 15 bp, Homo sapiens
tgtgcccggcctaaa

SEQ ID NO: 1226739 - DNA, 15 bp, Homo sapiens
ctgtgcccggcctaa

SEQ ID NO: 1226740 - DNA, 15 bp, Homo sapiens
gccctcccaaagtgc

SEQ ID NO: 1226741 - DNA, 15 bp, Homo sapiens
tgccctcccaaagtg

SEQ ID NO: 1226742 - DNA, 15 bp, Homo sapiens
ttgccctcccaaagt

SEQ ID NO: 1226743 - DNA, 15 bp, Homo sapiens
cttgccctcccaaag

SEQ ID NO: 1226744 - DNA, 15 bp, Homo sapiens
ccttgccctcccaaa

SEQ ID NO: 1226745 - DNA, 15 bp, Homo sapiens
tccttgccctcccaa

SEQ ID NO: 1226746 - DNA, 15 bp, Homo sapiens
ctccttgccctccca

SEQ ID NO: 1226747 - DNA, 15 bp, Homo sapiens
cctccttgccctccc

SEQ ID NO: 1226748 - DNA, 15 bp, Homo sapiens
ccctccttgccctcc

SEQ ID NO: 1226749 - DNA, 15 bp, Homo sapiens
tccctccttgccctc

SEQ ID NO: 1226750 - DNA, 15 bp, Homo sapiens
ctccctccttgccct

SEQ ID NO: 1226751 - DNA, 15 bp, Homo sapiens
cctccctccttgccc

SEQ ID NO: 1226752 - DNA, 15 bp, Homo sapiens
tcctccctccttgcc

SEQ ID NO: 1226753 - DNA, 15 bp, Homo sapiens
atcctccctccttgc

SEQ ID NO: 1226754 - DNA, 15 bp, Homo sapiens
gatcctccctccttg

SEQ ID NO: 1226755 - DNA, 15 bp, Homo sapiens
tgatcctccctcctt

SEQ ID NO: 1226756 - DNA, 15 bp, Homo sapiens
caagtgatcctccct

SEQ ID NO: 1226757 - DNA, 15 bp, Homo sapiens
tagggtttcaccatg

SEQ ID NO: 1226758 - DNA, 15 bp, Homo sapiens
ctagggtttcaccat

SEQ ID NO: 1226759 - DNA, 15 bp, Homo sapiens
gctagggtttcacca

SEQ ID NO: 1226760 - DNA, 15 bp, Homo sapiens
agctagggtttcacc

SEQ ID NO: 1226761 - DNA, 15 bp, Homo sapiens
gagctagggtttcac

SEQ ID NO: 1226762 - DNA, 15 bp, Homo sapiens
agagctagggtttca

SEQ ID NO: 1226763 - DNA, 15 bp, Homo sapiens
tagagctagggtttc

SEQ ID NO: 1226764 - DNA, 15 bp, Homo sapiens
gtagagctagggttt

SEQ ID NO: 1226765 - DNA, 15 bp, Homo sapiens
agtagagctagggtt

SEQ ID NO: 1226766 - DNA, 15 bp, Homo sapiens
tagtagagctagggt

SEQ ID NO: 1226767 - DNA, 15 bp, Homo sapiens
ttagtagagctaggg

SEQ ID NO: 1226768 - DNA, 15 bp, Homo sapiens
tttagtagagctagg

SEQ ID NO: 1226769 - DNA, 15 bp, Homo sapiens
ttttagtagagctag

SEQ ID NO: 1226770 - DNA, 15 bp, Homo sapiens
tttttagtagagcta

SEQ ID NO: 1226771 - DNA, 15 bp, Homo sapiens
atttttagtagagct

SEQ ID NO: 1226772 - DNA, 15 bp, Homo sapiens
tatttttagtagagc

SEQ ID NO: 1226773 - DNA, 15 bp, Homo sapiens
cgccaggctaatttt

SEQ ID NO: 1226774 - DNA, 15 bp, Homo sapiens
acgccaggctaattt

SEQ ID NO: 1226775 - DNA, 15 bp, Homo sapiens
cacgccaggctaatt

SEQ ID NO: 1226776 - DNA, 15 bp, Homo sapiens
ccacgccaggctaat

SEQ ID NO: 1226777 - DNA, 15 bp, Homo sapiens
accacgccaggctaa

SEQ ID NO: 1226778 - DNA, 15 bp, Homo sapiens
caccacgccaggcta

SEQ ID NO: 1226779 - DNA, 15 bp, Homo sapiens
ccaccacgccaggct

SEQ ID NO: 1226780 - DNA, 15 bp, Homo sapiens
gccaccacgccaggc

SEQ ID NO: 1226781 - DNA, 15 bp, Homo sapiens
agccaccacgccagg

SEQ ID NO: 1226782 - DNA, 15 bp, Homo sapiens
gagccaccacgccag

SEQ ID NO: 1226783 - DNA, 15 bp, Homo sapiens
cgagccaccacgcca

SEQ ID NO: 1226784 - DNA, 15 bp, Homo sapiens
acgagccaccacgcc

SEQ ID NO: 1226785 - DNA, 15 bp, Homo sapiens
cacgagccaccacgc

SEQ ID NO: 1226786 - DNA, 15 bp, Homo sapiens
gcacgagccaccacg

SEQ ID NO: 1226787 - DNA, 15 bp, Homo sapiens
caggcacgagccacc

SEQ ID NO: 1226788 - DNA, 15 bp, Homo sapiens
acaggcacgagccac

SEQ ID NO: 1226789 - DNA, 15 bp, Homo sapiens
tacaggcacgagcca

SEQ ID NO: 1226790 - DNA, 15 bp, Homo sapiens
ttacaggcacgagcc

SEQ ID NO: 1226791 - DNA, 15 bp, Homo sapiens
attacaggcacgagc

SEQ ID NO: 1226792 - DNA, 15 bp, Homo sapiens
gattacaggcacgag

SEQ ID NO: 1226793 - DNA, 15 bp, Homo sapiens
ggattacaggcacga

SEQ ID NO: 1226794 - DNA, 15 bp, Homo sapiens
tctcccgagcagctg

SEQ ID NO: 1226795 - DNA, 15 bp, Homo sapiens
gtctcccgagcagct

SEQ ID NO: 1226796 - DNA, 15 bp, Homo sapiens
agtctcccgagcagc

SEQ ID NO: 1226797 - DNA, 15 bp, Homo sapiens
cagtctcccgagcag

SEQ ID NO: 1226798 - DNA, 15 bp, Homo sapiens
tcagtctcccgagca

SEQ ID NO: 1226799 - DNA, 15 bp, Homo sapiens
ctcagtctcccgagc

SEQ ID NO: 1226800 - DNA, 15 bp, Homo sapiens
attcaagagattctc

SEQ ID NO: 1226801 - DNA, 15 bp, Homo sapiens
gattcaagagattct

SEQ ID NO: 1226802 - DNA, 15 bp, Homo sapiens
agattcaagagattc

SEQ ID NO: 1226803 - DNA, 15 bp, Homo sapiens
cagattcaagagatt

SEQ ID NO: 1226804 - DNA, 15 bp, Homo sapiens
ccagattcaagagat

SEQ ID NO: 1226805 - DNA, 15 bp, Homo sapiens
cccagattcaagaga

SEQ ID NO: 1226806 - DNA, 15 bp, Homo sapiens
tcccagattcaagag

SEQ ID NO: 1226807 - DNA, 15 bp, Homo sapiens
ctcccagattcaaga

SEQ ID NO: 1226808 - DNA, 15 bp, Homo sapiens
acctcccagattcaa

SEQ ID NO: 1226809 - DNA, 15 bp, Homo sapiens
cacctcccagattca

SEQ ID NO: 1226810 - DNA, 15 bp, Homo sapiens
ccacctcccagattc

SEQ ID NO: 1226811 - DNA, 15 bp, Homo sapiens
tccacctcccagatt

SEQ ID NO: 1226812 - DNA, 15 bp, Homo sapiens
ctccacctcccagat

SEQ ID NO: 1226813 - DNA, 15 bp, Homo sapiens
cctccacctcccaga

SEQ ID NO: 1226814 - DNA, 15 bp, Homo sapiens
cacctccacctccca

SEQ ID NO: 1226815 - DNA, 15 bp, Homo sapiens
ccacctccacctccc

SEQ ID NO: 1226816 - DNA, 15 bp, Homo sapiens
gccacctccacctcc

SEQ ID NO: 1226817 - DNA, 15 bp, Homo sapiens
tgccacctccacctc

SEQ ID NO: 1226818 - DNA, 15 bp, Homo sapiens
ctgccacctccacct

SEQ ID NO: 1226819 - DNA, 15 bp, Homo sapiens
cactgccacctccac

SEQ ID NO: 1226820 - DNA, 15 bp, Homo sapiens
tcactgccacctcca

SEQ ID NO: 1226821 - DNA, 15 bp, Homo sapiens
ctcactgccacctcc

SEQ ID NO: 1226822 - DNA, 15 bp, Homo sapiens
ggctcactgccacct

SEQ ID NO: 1226823 - DNA, 15 bp, Homo sapiens
cggctcactgccacc

SEQ ID NO: 1226824 - DNA, 15 bp, Homo sapiens
tcggctcactgccac

SEQ ID NO: 1226825 - DNA, 15 bp, Homo sapiens
ctcggctcactgcca

SEQ ID NO: 1226826 - DNA, 15 bp, Homo sapiens
tctcggctcactgcc

SEQ ID NO: 1226827 - DNA, 15 bp, Homo sapiens
atggtgcgatctcgg

SEQ ID NO: 1226828 - DNA, 15 bp, Homo sapiens
aatggtgcgatctcg

SEQ ID NO: 1226829 - DNA, 15 bp, Homo sapiens
caatggtgcgatctc

SEQ ID NO: 1226830 - DNA, 15 bp, Homo sapiens
gcaatggtgcgatct

SEQ ID NO: 1226831 - DNA, 15 bp, Homo sapiens
tgcaatggtgcgatc

SEQ ID NO: 1226832 - DNA, 15 bp, Homo sapiens
gtgcaatggtgcgat

SEQ ID NO: 1226833 - DNA, 15 bp, Homo sapiens
agtgcaatggtgcga

SEQ ID NO: 1226834 - DNA, 15 bp, Homo sapiens
gagtgcaatggtgcg

SEQ ID NO: 1226835 - DNA, 15 bp, Homo sapiens
gctaggctggagtgc

SEQ ID NO: 1226836 - DNA, 15 bp, Homo sapiens
agctaggctggagtg

SEQ ID NO: 1226837 - DNA, 15 bp, Homo sapiens
tagctaggctggagt

SEQ ID NO: 1226838 - DNA, 15 bp, Homo sapiens
gtagctaggctggag

SEQ ID NO: 1226839 - DNA, 15 bp, Homo sapiens
tgtagctaggctgga

SEQ ID NO: 1226840 - DNA, 15 bp, Homo sapiens
ctgtagctaggctgg

SEQ ID NO: 1226841 - DNA, 15 bp, Homo sapiens
tctgtagctaggctg

SEQ ID NO: 1226842 - DNA, 15 bp, Homo sapiens
ctctgtagctaggct

SEQ ID NO: 1226843 - DNA, 15 bp, Homo sapiens
actctgtagctaggc

SEQ ID NO: 1226844 - DNA, 15 bp, Homo sapiens
cactctgtagctagg

SEQ ID NO: 1226845 - DNA, 15 bp, Homo sapiens
tcactctgtagctag

SEQ ID NO: 1226846 - DNA, 15 bp, Homo sapiens
gtcactctgtagcta

SEQ ID NO: 1226847 - DNA, 15 bp, Homo sapiens
ggtcactctgtagct

SEQ ID NO: 1226848 - DNA, 15 bp, Homo sapiens
aggtcactctgtagc

SEQ ID NO: 1226849 - DNA, 15 bp, Homo sapiens
gaggtcactctgtag

SEQ ID NO: 1226850 - DNA, 15 bp, Homo sapiens
agaggtcactctgta

SEQ ID NO: 1226851 - DNA, 15 bp, Homo sapiens
gagaggtcactctgt

SEQ ID NO: 1226852 - DNA, 15 bp, Homo sapiens
tgagaggtcactctg

SEQ ID NO: 1226853 - DNA, 15 bp, Homo sapiens
ttgagaggtcactct

SEQ ID NO: 1226854 - DNA, 15 bp, Homo sapiens
tttgagaggtcactc

SEQ ID NO: 1226855 - DNA, 15 bp, Homo sapiens
ttttgagaggtcact

SEQ ID NO: 1226856 - DNA, 15 bp, Homo sapiens
tttttgagaggtcac

SEQ ID NO: 1226857 - DNA, 15 bp, Homo sapiens
ttttttgagaggtca

SEQ ID NO: 1226858 - DNA, 15 bp, Homo sapiens
tttttttgagaggtc

SEQ ID NO: 1226859 - DNA, 15 bp, Homo sapiens
ttttttttgagaggt

SEQ ID NO: 1226860 - DNA, 15 bp, Homo sapiens
tttttttttgagagg

SEQ ID NO: 1226861 - DNA, 15 bp, Homo sapiens
tgtgctttttttttt

SEQ ID NO: 1226862 - DNA, 15 bp, Homo sapiens
gtgtgcttttttttt

SEQ ID NO: 1226863 - DNA, 15 bp, Homo sapiens
tgtgtgctttttttt

SEQ ID NO: 1226864 - DNA, 15 bp, Homo sapiens
atgtgtgcttttttt

SEQ ID NO: 1226865 - DNA, 15 bp, Homo sapiens
aatgtgtgctttttt

SEQ ID NO: 1226866 - DNA, 15 bp, Homo sapiens
taatgtgtgcttttt

SEQ ID NO: 1226867 - DNA, 15 bp, Homo sapiens
ttaatgtgtgctttt

SEQ ID NO: 1226868 - DNA, 15 bp, Homo sapiens
tttaatgtgtgcttt

SEQ ID NO: 1226869 - DNA, 15 bp, Homo sapiens
ttttaatgtgtgctt

SEQ ID NO: 1226870 - DNA, 15 bp, Homo sapiens
tttttaatgtgtgct

SEQ ID NO: 1226871 - DNA, 15 bp, Homo sapiens
ttttttaatgtgtgc

SEQ ID NO: 1226872 - DNA, 15 bp, Homo sapiens
tttttttaatgtgtg

SEQ ID NO: 1226873 - DNA, 15 bp, Homo sapiens
gtttttttaatgtgt

SEQ ID NO: 1226874 - DNA, 15 bp, Homo sapiens
tgtttttttaatgtg

SEQ ID NO: 1226875 - DNA, 15 bp, Homo sapiens
ttgtttttttaatgt

SEQ ID NO: 1226876 - DNA, 15 bp, Homo sapiens
cttgtttttttaatg

SEQ ID NO: 1226877 - DNA, 15 bp, Homo sapiens
acttgtttttttaat

SEQ ID NO: 1226878 - DNA, 15 bp, Homo sapiens
aacttgtttttttaa

SEQ ID NO: 1226879 - DNA, 15 bp, Homo sapiens
aaacttgttttttta

SEQ ID NO: 1226880 - DNA, 15 bp, Homo sapiens
aaaacttgttttttt

SEQ ID NO: 1226881 - DNA, 15 bp, Homo sapiens
aaaaacttgtttttt

SEQ ID NO: 1226882 - DNA, 15 bp, Homo sapiens
taaaaacttgttttt

SEQ ID NO: 1226883 - DNA, 15 bp, Homo sapiens
ttaaaaacttgtttt

SEQ ID NO: 1226884 - DNA, 15 bp, Homo sapiens
attaaaaacttgttt

SEQ ID NO: 1226885 - DNA, 15 bp, Homo sapiens
gattaaaaacttgtt

SEQ ID NO: 1226886 - DNA, 15 bp, Homo sapiens
agattaaaaacttgt

SEQ ID NO: 1226887 - DNA, 15 bp, Homo sapiens
tagattaaaaacttg

SEQ ID NO: 1226888 - DNA, 15 bp, Homo sapiens
atagattaaaaactt

SEQ ID NO: 1226889 - DNA, 15 bp, Homo sapiens
catagattaaaaact

SEQ ID NO: 1226890 - DNA, 15 bp, Homo sapiens
ccatagattaaaaac

SEQ ID NO: 1226891 - DNA, 15 bp, Homo sapiens
accatagattaaaaa

SEQ ID NO: 1226892 - DNA, 15 bp, Homo sapiens
gaccatagattaaaa

SEQ ID NO: 1226893 - DNA, 15 bp, Homo sapiens
agaccatagattaaa

SEQ ID NO: 1226894 - DNA, 15 bp, Homo sapiens
aagaccatagattaa

SEQ ID NO: 1226895 - DNA, 15 bp, Homo sapiens
aaagaccatagatta

SEQ ID NO: 1226896 - DNA, 15 bp, Homo sapiens
aaaagaccatagatt

SEQ ID NO: 1226897 - DNA, 15 bp, Homo sapiens
aaaaagaccatagat

SEQ ID NO: 1226898 - DNA, 15 bp, Homo sapiens
taaaaagaccataga

SEQ ID NO: 1226899 - DNA, 15 bp, Homo sapiens
ataaaaagaccatag

SEQ ID NO: 1226900 - DNA, 15 bp, Homo sapiens
cataaaaagaccata

SEQ ID NO: 1226901 - DNA, 15 bp, Homo sapiens
acataaaaagaccat

SEQ ID NO: 1226902 - DNA, 15 bp, Homo sapiens
aacataaaaagacca

SEQ ID NO: 1226903 - DNA, 15 bp, Homo sapiens
gaacataaaaagacc

SEQ ID NO: 1226904 - DNA, 15 bp, Homo sapiens
ggaacataaaaagac

SEQ ID NO: 1226905 - DNA, 15 bp, Homo sapiens
tggaacataaaaaga

SEQ ID NO: 1226906 - DNA, 15 bp, Homo sapiens
ctggaacataaaaag

SEQ ID NO: 1226907 - DNA, 15 bp, Homo sapiens
tctggaacataaaaa

SEQ ID NO: 1226908 - DNA, 15 bp, Homo sapiens
ttctggaacataaaa

SEQ ID NO: 1226909 - DNA, 15 bp, Homo sapiens
attctggaacataaa

SEQ ID NO: 1226910 - DNA, 15 bp, Homo sapiens
gattctggaacataa

SEQ ID NO: 1226911 - DNA, 15 bp, Homo sapiens
ggattctggaacata

SEQ ID NO: 1226912 - DNA, 15 bp, Homo sapiens
aggattctggaacat

SEQ ID NO: 1226913 - DNA, 15 bp, Homo sapiens
taggattctggaaca

SEQ ID NO: 1226914 - DNA, 15 bp, Homo sapiens
ttaggattctggaac

SEQ ID NO: 1226915 - DNA, 15 bp, Homo sapiens
tttaggattctggaa

SEQ ID NO: 1226916 - DNA, 15 bp, Homo sapiens
gtttaggattctgga

SEQ ID NO: 1226917 - DNA, 15 bp, Homo sapiens
tgtttaggattctgg

SEQ ID NO: 1226918 - DNA, 15 bp, Homo sapiens
atgtttaggattctg

SEQ ID NO: 1226919 - DNA, 15 bp, Homo sapiens
aatgtttaggattct

SEQ ID NO: 1226920 - DNA, 15 bp, Homo sapiens
taatgtttaggattc

SEQ ID NO: 1226921 - DNA, 15 bp, Homo sapiens
ttaatgtttaggatt

SEQ ID NO: 1226922 - DNA, 15 bp, Homo sapiens
attaatgtttaggat

SEQ ID NO: 1226923 - DNA, 15 bp, Homo sapiens
gattaatgtttagga

SEQ ID NO: 1226924 - DNA, 15 bp, Homo sapiens
tgattaatgtttagg

SEQ ID NO: 1226925 - DNA, 15 bp, Homo sapiens
ttgattaatgtttag

SEQ ID NO: 1226926 - DNA, 15 bp, Homo sapiens
attgattaatgttta

SEQ ID NO: 1226927 - DNA, 15 bp, Homo sapiens
tattgattaatgttt

SEQ ID NO: 1226928 - DNA, 15 bp, Homo sapiens
atattgattaatgtt

SEQ ID NO: 1226929 - DNA, 15 bp, Homo sapiens
aatattgattaatgt

SEQ ID NO: 1226930 - DNA, 15 bp, Homo sapiens
taatattgattaatg

SEQ ID NO: 1226931 - DNA, 15 bp, Homo sapiens
ttaatattgattaat

SEQ ID NO: 1226932 - DNA, 15 bp, Homo sapiens
attaatattgattaa

SEQ ID NO: 1226933 - DNA, 15 bp, Homo sapiens
tattaatattgatta

SEQ ID NO: 1226934 - DNA, 15 bp, Homo sapiens
ttattaatattgatt

SEQ ID NO: 1226935 - DNA, 15 bp, Homo sapiens
gttattaatattgat

SEQ ID NO: 1226936 - DNA, 15 bp, Homo sapiens
tgttattaatattga

SEQ ID NO: 1226937 - DNA, 15 bp, Homo sapiens
ctgttattaatattg

SEQ ID NO: 1226938 - DNA, 15 bp, Homo sapiens
cctgttattaatatt

SEQ ID NO: 1226939 - DNA, 15 bp, Homo sapiens
tcctgttattaatat

SEQ ID NO: 1226940 - DNA, 15 bp, Homo sapiens
atcctgttattaata

SEQ ID NO: 1226941 - DNA, 15 bp, Homo sapiens
aatcctgttattaat

SEQ ID NO: 1226942 - DNA, 15 bp, Homo sapiens
gaatcctgttattaa

SEQ ID NO: 1226943 - DNA, 15 bp, Homo sapiens
ggaatcctgttatta

SEQ ID NO: 1226944 - DNA, 15 bp, Homo sapiens
tggaatcctgttatt

SEQ ID NO: 1226945 - DNA, 15 bp, Homo sapiens
atggaatcctgttat

SEQ ID NO: 1226946 - DNA, 15 bp, Homo sapiens
gatggaatcctgtta

SEQ ID NO: 1226947 - DNA, 15 bp, Homo sapiens
tgatggaatcctgtt

SEQ ID NO: 1226948 - DNA, 15 bp, Homo sapiens
ttgatggaatcctgt

SEQ ID NO: 1226949 - DNA, 15 bp, Homo sapiens
cttgatggaatcctg

SEQ ID NO: 1226950 - DNA, 15 bp, Homo sapiens
tcttgatggaatcct

SEQ ID NO: 1226951 - DNA, 15 bp, Homo sapiens
atcttgatggaatcc

SEQ ID NO: 1226952 - DNA, 15 bp, Homo sapiens
aatcttgatggaatc

SEQ ID NO: 1226953 - DNA, 15 bp, Homo sapiens
taatcttgatggaat

SEQ ID NO: 1226954 - DNA, 15 bp, Homo sapiens
ttaatcttgatggaa

SEQ ID NO: 1226955 - DNA, 15 bp, Homo sapiens
attaatcttgatgga

SEQ ID NO: 1226956 - DNA, 15 bp, Homo sapiens
tattaatcttgatgg

SEQ ID NO: 1226957 - DNA, 15 bp, Homo sapiens
atattaatcttgatg

SEQ ID NO: 1226958 - DNA, 15 bp, Homo sapiens
aatattaatcttgat

SEQ ID NO: 1226959 - DNA, 15 bp, Homo sapiens
caatattaatcttga

SEQ ID NO: 1226960 - DNA, 15 bp, Homo sapiens
tcaatattaatcttg

SEQ ID NO: 1226961 - DNA, 15 bp, Homo sapiens
atcaatattaatctt

SEQ ID NO: 1226962 - DNA, 15 bp, Homo sapiens
aatcaatattaatct

SEQ ID NO: 1226963 - DNA, 15 bp, Homo sapiens
taatcaatattaatc

SEQ ID NO: 1226964 - DNA, 15 bp, Homo sapiens
ttaatcaatattaat

SEQ ID NO: 1226965 - DNA, 15 bp, Homo sapiens
attaatcaatattaa

SEQ ID NO: 1226966 - DNA, 15 bp, Homo sapiens
gattaatcaatatta

SEQ ID NO: 1226967 - DNA, 15 bp, Homo sapiens
tgattaatcaatatt

SEQ ID NO: 1226968 - DNA, 15 bp, Homo sapiens
ttgattaatcaatat

SEQ ID NO: 1226969 - DNA, 15 bp, Homo sapiens
tttgattaatcaata

SEQ ID NO: 1226970 - DNA, 15 bp, Homo sapiens
ttttgattaatcaat

SEQ ID NO: 1226971 - DNA, 15 bp, Homo sapiens
attttgattaatcaa

SEQ ID NO: 1226972 - DNA, 15 bp, Homo sapiens
aattttgattaatca

SEQ ID NO: 1226973 - DNA, 15 bp, Homo sapiens
taattttgattaatc

SEQ ID NO: 1226974 - DNA, 15 bp, Homo sapiens
ttaattttgattaat

SEQ ID NO: 1226975 - DNA, 15 bp, Homo sapiens
attaattttgattaa

SEQ ID NO: 1226976 - DNA, 15 bp, Homo sapiens
gattaattttgatta

SEQ ID NO: 1226977 - DNA, 15 bp, Homo sapiens
tgattaattttgatt

SEQ ID NO: 1226978 - DNA, 15 bp, Homo sapiens
ttgattaattttgat

SEQ ID NO: 1226979 - DNA, 15 bp, Homo sapiens
attgattaattttga

SEQ ID NO: 1226980 - DNA, 15 bp, Homo sapiens
tattgattaattttg

SEQ ID NO: 1226981 - DNA, 15 bp, Homo sapiens
atattgattaatttt

SEQ ID NO: 1226982 - DNA, 15 bp, Homo sapiens
aatattgattaattt

SEQ ID NO: 1226983 - DNA, 15 bp, Homo sapiens
caatattgattaatt

SEQ ID NO: 1226984 - DNA, 15 bp, Homo sapiens
tcaatattgattaat

SEQ ID NO: 1226985 - DNA, 15 bp, Homo sapiens
atcaatattgattaa

SEQ ID NO: 1226986 - DNA, 15 bp, Homo sapiens
aatcaatattgatta

SEQ ID NO: 1226987 - DNA, 15 bp, Homo sapiens
taatcaatattgatt

SEQ ID NO: 1226988 - DNA, 15 bp, Homo sapiens
gtaatcaatattgat

SEQ ID NO: 1226989 - DNA, 15 bp, Homo sapiens
ggtaatcaatattga

SEQ ID NO: 1226990 - DNA, 15 bp, Homo sapiens
gggtaatcaatattg

SEQ ID NO: 1226991 - DNA, 15 bp, Homo sapiens
tgggtaatcaatatt

SEQ ID NO: 1226992 - DNA, 15 bp, Homo sapiens
ttgggtaatcaatat

SEQ ID NO: 1226993 - DNA, 15 bp, Homo sapiens
attgggtaatcaata

SEQ ID NO: 1226994 - DNA, 15 bp, Homo sapiens
tattgggtaatcaat

SEQ ID NO: 1226995 - DNA, 15 bp, Homo sapiens
atattgggtaatcaa

SEQ ID NO: 1226996 - DNA, 15 bp, Homo sapiens
aatattgggtaatca

SEQ ID NO: 1226997 - DNA, 15 bp, Homo sapiens
caatattgggtaatc

SEQ ID NO: 1226998 - DNA, 15 bp, Homo sapiens
tcaatattgggtaat

SEQ ID NO: 1226999 - DNA, 15 bp, Homo sapiens
atcaatattgggtaa

SEQ ID NO: 1227000 - DNA, 15 bp, Homo sapiens
aatcaatattgggta

SEQ ID NO: 1227001 - DNA, 15 bp, Homo sapiens
taatcaatattgggt

SEQ ID NO: 1227002 - DNA, 15 bp, Homo sapiens
ttaatcaatattggg

SEQ ID NO: 1227003 - DNA, 15 bp, Homo sapiens
attaatcaatattgg

SEQ ID NO: 1227004 - DNA, 15 bp, Homo sapiens
aattaatcaatattg

SEQ ID NO: 1227005 - DNA, 15 bp, Homo sapiens
taattaatcaatatt

SEQ ID NO: 1227006 - DNA, 15 bp, Homo sapiens
ttaattaatcaatat

SEQ ID NO: 1227007 - DNA, 15 bp, Homo sapiens
attaattaatcaata

SEQ ID NO: 1227008 - DNA, 15 bp, Homo sapiens
aattaattaatcaat

SEQ ID NO: 1227009 - DNA, 15 bp, Homo sapiens
caattaattaatcaa

SEQ ID NO: 1227010 - DNA, 15 bp, Homo sapiens
acaattaattaatca

SEQ ID NO: 1227011 - DNA, 15 bp, Homo sapiens
cacaattaattaatc

SEQ ID NO: 1227012 - DNA, 15 bp, Homo sapiens
tcacaattaattaat

SEQ ID NO: 1227013 - DNA, 15 bp, Homo sapiens
gtcacaattaattaa

SEQ ID NO: 1227014 - DNA, 15 bp, Homo sapiens
tgtcacaattaatta

SEQ ID NO: 1227015 - DNA, 15 bp, Homo sapiens
ttgtcacaattaatt

SEQ ID NO: 1227016 - DNA, 15 bp, Homo sapiens
tttgtcacaattaat

SEQ ID NO: 1227017 - DNA, 15 bp, Homo sapiens
atttgtcacaattaa

SEQ ID NO: 1227018 - DNA, 15 bp, Homo sapiens
catttgtcacaatta

SEQ ID NO: 1227019 - DNA, 15 bp, Homo sapiens
acatttgtcacaatt

SEQ ID NO: 1227020 - DNA, 15 bp, Homo sapiens
tacatttgtcacaat

SEQ ID NO: 1227021 - DNA, 15 bp, Homo sapiens
gtacatttgtcacaa

SEQ ID NO: 1227022 - DNA, 15 bp, Homo sapiens
ggtacatttgtcaca

SEQ ID NO: 1227023 - DNA, 15 bp, Homo sapiens
tggtacatttgtcac

SEQ ID NO: 1227024 - DNA, 15 bp, Homo sapiens
atggtacatttgtca

SEQ ID NO: 1227025 - DNA, 15 bp, Homo sapiens
catggtacatttgtc

SEQ ID NO: 1227026 - DNA, 15 bp, Homo sapiens
gcatggtacatttgt

SEQ ID NO: 1227027 - DNA, 15 bp, Homo sapiens
ggcatggtacatttg

SEQ ID NO: 1227028 - DNA, 15 bp, Homo sapiens
aggcatggtacattt

SEQ ID NO: 1227029 - DNA, 15 bp, Homo sapiens
taggcatggtacatt

SEQ ID NO: 1227030 - DNA, 15 bp, Homo sapiens
ctaggcatggtacat

SEQ ID NO: 1227031 - DNA, 15 bp, Homo sapiens
cctaggcatggtaca

SEQ ID NO: 1227032 - DNA, 15 bp, Homo sapiens
acctaggcatggtac

SEQ ID NO: 1227033 - DNA, 15 bp, Homo sapiens
tacctaggcatggta

SEQ ID NO: 1227034 - DNA, 15 bp, Homo sapiens
ttacctaggcatggt

SEQ ID NO: 1227035 - DNA, 15 bp, Homo sapiens
tttacctaggcatgg

SEQ ID NO: 1227036 - DNA, 15 bp, Homo sapiens
atttacctaggcatg

SEQ ID NO: 1227037 - DNA, 15 bp, Homo sapiens
catttacctaggcat

SEQ ID NO: 1227038 - DNA, 15 bp, Homo sapiens
acatttacctaggca

SEQ ID NO: 1227039 - DNA, 15 bp, Homo sapiens
aacatttacctaggc

SEQ ID NO: 1227040 - DNA, 15 bp, Homo sapiens
taacatttacctagg

SEQ ID NO: 1227041 - DNA, 15 bp, Homo sapiens
ttaacatttacctag

SEQ ID NO: 1227042 - DNA, 15 bp, Homo sapiens
attaacatttaccta

SEQ ID NO: 1227043 - DNA, 15 bp, Homo sapiens
tattaacatttacct

SEQ ID NO: 1227044 - DNA, 15 bp, Homo sapiens
ttattaacatttacc

SEQ ID NO: 1227045 - DNA, 15 bp, Homo sapiens
attattaacatttac

SEQ ID NO: 1227046 - DNA, 15 bp, Homo sapiens
cattattaacattta

SEQ ID NO: 1227047 - DNA, 15 bp, Homo sapiens
ccattattaacattt

SEQ ID NO: 1227048 - DNA, 15 bp, Homo sapiens
gccattattaacatt

SEQ ID NO: 1227049 - DNA, 15 bp, Homo sapiens
tgccattattaacat

SEQ ID NO: 1227050 - DNA, 15 bp, Homo sapiens
ctgccattattaaca

SEQ ID NO: 1227051 - DNA, 15 bp, Homo sapiens
tctgccattattaac

SEQ ID NO: 1227052 - DNA, 15 bp, Homo sapiens
ttctgccattattaa

SEQ ID NO: 1227053 - DNA, 15 bp, Homo sapiens
gttctgccattatta

SEQ ID NO: 1227054 - DNA, 15 bp, Homo sapiens
agttctgccattatt

SEQ ID NO: 1227055 - DNA, 15 bp, Homo sapiens
aagttctgccattat

SEQ ID NO: 1227056 - DNA, 15 bp, Homo sapiens
caagttctgccatta

SEQ ID NO: 1227057 - DNA, 15 bp, Homo sapiens
ccaagttctgccatt

SEQ ID NO: 1227058 - DNA, 15 bp, Homo sapiens
gccaagttctgccat

SEQ ID NO: 1227059 - DNA, 15 bp, Homo sapiens
ggccaagttctgcca

SEQ ID NO: 1227060 - DNA, 15 bp, Homo sapiens
tggccaagttctgcc

SEQ ID NO: 1227061 - DNA, 15 bp, Homo sapiens
ctggccaagttctgc

SEQ ID NO: 1227062 - DNA, 15 bp, Homo sapiens
cctggccaagttctg

SEQ ID NO: 1227063 - DNA, 15 bp, Homo sapiens
gcctggccaagttct

SEQ ID NO: 1227064 - DNA, 15 bp, Homo sapiens
tgcctggccaagttc

SEQ ID NO: 1227065 - DNA, 15 bp, Homo sapiens
atgcctggccaagtt

SEQ ID NO: 1227066 - DNA, 15 bp, Homo sapiens
catgcctggccaagt

SEQ ID NO: 1227067 - DNA, 15 bp, Homo sapiens
ccaccatgcctggcc

SEQ ID NO: 1227068 - DNA, 15 bp, Homo sapiens
cgagccaccatgcct

SEQ ID NO: 1227069 - DNA, 15 bp, Homo sapiens
gcgagccaccatgcc

SEQ ID NO: 1227070 - DNA, 15 bp, Homo sapiens
tgcgagccaccatgc

SEQ ID NO: 1227071 - DNA, 15 bp, Homo sapiens
gtgcgagccaccatg

SEQ ID NO: 1227072 - DNA, 15 bp, Homo sapiens
ggtgcgagccaccat

SEQ ID NO: 1227073 - DNA, 15 bp, Homo sapiens
aggtgcgagccacca

SEQ ID NO: 1227074 - DNA, 15 bp, Homo sapiens
caggtgcgagccacc

SEQ ID NO: 1227075 - DNA, 15 bp, Homo sapiens
acaggtgcgagccac

SEQ ID NO: 1227076 - DNA, 15 bp, Homo sapiens
tacaggtgcgagcca

SEQ ID NO: 1227077 - DNA, 15 bp, Homo sapiens
ttacaggtgcgagcc

SEQ ID NO: 1227078 - DNA, 15 bp, Homo sapiens
attacaggtgcgagc

SEQ ID NO: 1227079 - DNA, 15 bp, Homo sapiens
gattacaggtgcgag

SEQ ID NO: 1227080 - DNA, 15 bp, Homo sapiens
ggattacaggtgcga

SEQ ID NO: 1227081 - DNA, 15 bp, Homo sapiens
caaatgctgggatta

SEQ ID NO: 1227082 - DNA, 15 bp, Homo sapiens
ccaaatgctgggatt

SEQ ID NO: 1227083 - DNA, 15 bp, Homo sapiens
cccaaatgctgggat

SEQ ID NO: 1227084 - DNA, 15 bp, Homo sapiens
tcccaaatgctggga

SEQ ID NO: 1227085 - DNA, 15 bp, Homo sapiens
ctcccaaatgctggg

SEQ ID NO: 1227086 - DNA, 15 bp, Homo sapiens
cctcccaaatgctgg

SEQ ID NO: 1227087 - DNA, 15 bp, Homo sapiens
gcctcccaaatgctg

SEQ ID NO: 1227088 - DNA, 15 bp, Homo sapiens
ggcctcccaaatgct

SEQ ID NO: 1227089 - DNA, 15 bp, Homo sapiens
tggcctcccaaatgc

SEQ ID NO: 1227090 - DNA, 15 bp, Homo sapiens
ttggcctcccaaatg

SEQ ID NO: 1227091 - DNA, 15 bp, Homo sapiens
actgaccttgtgatc

SEQ ID NO: 1227092 - DNA, 15 bp, Homo sapiens
tactgaccttgtgat

SEQ ID NO: 1227093 - DNA, 15 bp, Homo sapiens
ctactgaccttgtga

SEQ ID NO: 1227094 - DNA, 15 bp, Homo sapiens
tctactgaccttgtg

SEQ ID NO: 1227095 - DNA, 15 bp, Homo sapiens
atctactgaccttgt

SEQ ID NO: 1227096 - DNA, 15 bp, Homo sapiens
gatctactgaccttg

SEQ ID NO: 1227097 - DNA, 15 bp, Homo sapiens
tgatctactgacctt

SEQ ID NO: 1227098 - DNA, 15 bp, Homo sapiens
ttgatctactgacct

SEQ ID NO: 1227099 - DNA, 15 bp, Homo sapiens
cttgatctactgacc

SEQ ID NO: 1227100 - DNA, 15 bp, Homo sapiens
tcttgatctactgac

SEQ ID NO: 1227101 - DNA, 15 bp, Homo sapiens
gtcttgatctactga

SEQ ID NO: 1227102 - DNA, 15 bp, Homo sapiens
ggtcttgatctactg

SEQ ID NO: 1227103 - DNA, 15 bp, Homo sapiens
tggtcttgatctact

SEQ ID NO: 1227104 - DNA, 15 bp, Homo sapiens
atggtcttgatctac

SEQ ID NO: 1227105 - DNA, 15 bp, Homo sapiens
gatggtcttgatcta

SEQ ID NO: 1227106 - DNA, 15 bp, Homo sapiens
ggatggtcttgatct

SEQ ID NO: 1227107 - DNA, 15 bp, Homo sapiens
aggatggtcttgatc

SEQ ID NO: 1227108 - DNA, 15 bp, Homo sapiens
caggatggtcttgat

SEQ ID NO: 1227109 - DNA, 15 bp, Homo sapiens
ccaggatggtcttga

SEQ ID NO: 1227110 - DNA, 15 bp, Homo sapiens
cccaggatggtcttg

SEQ ID NO: 1227111 - DNA, 15 bp, Homo sapiens
gcccaggatggtctt

SEQ ID NO: 1227112 - DNA, 15 bp, Homo sapiens
ggcctcccaagtagc

SEQ ID NO: 1227113 - DNA, 15 bp, Homo sapiens
aggcctcccaagtag

SEQ ID NO: 1227114 - DNA, 15 bp, Homo sapiens
caggcctcccaagta

SEQ ID NO: 1227115 - DNA, 15 bp, Homo sapiens
tcaggcctcccaagt

SEQ ID NO: 1227116 - DNA, 15 bp, Homo sapiens
ctcaggcctcccaag

SEQ ID NO: 1227117 - DNA, 15 bp, Homo sapiens
tctcaggcctcccaa

SEQ ID NO: 1227118 - DNA, 15 bp, Homo sapiens
ttctcaggcctccca

SEQ ID NO: 1227119 - DNA, 15 bp, Homo sapiens
attctcaggcctccc

SEQ ID NO: 1227120 - DNA, 15 bp, Homo sapiens
aattctcaggcctcc

SEQ ID NO: 1227121 - DNA, 15 bp, Homo sapiens
caattctcaggcctc

SEQ ID NO: 1227122 - DNA, 15 bp, Homo sapiens
gcaattctcaggcct

SEQ ID NO: 1227123 - DNA, 15 bp, Homo sapiens
ggcaattctcaggcc

SEQ ID NO: 1227124 - DNA, 15 bp, Homo sapiens
aggcaattctcaggc

SEQ ID NO: 1227125 - DNA, 15 bp, Homo sapiens
caggcaattctcagg

SEQ ID NO: 1227126 - DNA, 15 bp, Homo sapiens
tcaggcaattctcag

SEQ ID NO: 1227127 - DNA, 15 bp, Homo sapiens
ttcaggcaattctca

SEQ ID NO: 1227128 - DNA, 15 bp, Homo sapiens
gttcaggcaattctc

SEQ ID NO: 1227129 - DNA, 15 bp, Homo sapiens
ggttcaggcaattct

SEQ ID NO: 1227130 - DNA, 15 bp, Homo sapiens
gggttcaggcaattc

SEQ ID NO: 1227131 - DNA, 15 bp, Homo sapiens
cgggttcaggcaatt

SEQ ID NO: 1227132 - DNA, 15 bp, Homo sapiens
ccgggttcaggcaat

SEQ ID NO: 1227133 - DNA, 15 bp, Homo sapiens
cccgggttcaggcaa

SEQ ID NO: 1227134 - DNA, 15 bp, Homo sapiens
tcccgggttcaggca

SEQ ID NO: 1227135 - DNA, 15 bp, Homo sapiens
gactgcaacctccac

SEQ ID NO: 1227136 - DNA, 15 bp, Homo sapiens
tgactgcaacctcca

SEQ ID NO: 1227137 - DNA, 15 bp, Homo sapiens
ctgactgcaacctcc

SEQ ID NO: 1227138 - DNA, 15 bp, Homo sapiens
tgctgactgcaacct

SEQ ID NO: 1227139 - DNA, 15 bp, Homo sapiens
ctgctgactgcaacc

SEQ ID NO: 1227140 - DNA, 15 bp, Homo sapiens
tctgctgactgcaac

SEQ ID NO: 1227141 - DNA, 15 bp, Homo sapiens
ctctgctgactgcaa

SEQ ID NO: 1227142 - DNA, 15 bp, Homo sapiens
tctctgctgactgca

SEQ ID NO: 1227143 - DNA, 15 bp, Homo sapiens
atctctgctgactgc

SEQ ID NO: 1227144 - DNA, 15 bp, Homo sapiens
gatctctgctgactg

SEQ ID NO: 1227145 - DNA, 15 bp, Homo sapiens
tgatctctgctgact

SEQ ID NO: 1227146 - DNA, 15 bp, Homo sapiens
gtgatctctgctgac

SEQ ID NO: 1227147 - DNA, 15 bp, Homo sapiens
cgtgatctctgctga

SEQ ID NO: 1227148 - DNA, 15 bp, Homo sapiens
gcgtgatctctgctg

SEQ ID NO: 1227149 - DNA, 15 bp, Homo sapiens
ggcgtgatctctgct

SEQ ID NO: 1227150 - DNA, 15 bp, Homo sapiens
tggcgtgatctctgc

SEQ ID NO: 1227151 - DNA, 15 bp, Homo sapiens
gtggcgtgatctctg

SEQ ID NO: 1227152 - DNA, 15 bp, Homo sapiens
agtggcgtgatctct

SEQ ID NO: 1227153 - DNA, 15 bp, Homo sapiens
cggagtgcagtggcg

SEQ ID NO: 1227154 - DNA, 15 bp, Homo sapiens
ccggagtgcagtggc

SEQ ID NO: 1227155 - DNA, 15 bp, Homo sapiens
gccggagtgcagtgg

SEQ ID NO: 1227156 - DNA, 15 bp, Homo sapiens
ggccggagtgcagtg

SEQ ID NO: 1227157 - DNA, 15 bp, Homo sapiens
aggccggagtgcagt

SEQ ID NO: 1227158 - DNA, 15 bp, Homo sapiens
caggccggagtgcag

SEQ ID NO: 1227159 - DNA, 15 bp, Homo sapiens
ccaggccggagtgca

SEQ ID NO: 1227160 - DNA, 15 bp, Homo sapiens
gccaggccggagtgc

SEQ ID NO: 1227161 - DNA, 15 bp, Homo sapiens
tgccaggccggagtg

SEQ ID NO: 1227162 - DNA, 15 bp, Homo sapiens
ttgccaggccggagt

SEQ ID NO: 1227163 - DNA, 15 bp, Homo sapiens
gttgccaggccggag

SEQ ID NO: 1227164 - DNA, 15 bp, Homo sapiens
tgttgccaggccgga

SEQ ID NO: 1227165 - DNA, 15 bp, Homo sapiens
ctgttgccaggccgg

SEQ ID NO: 1227166 - DNA, 15 bp, Homo sapiens
tctgttgccaggccg

SEQ ID NO: 1227167 - DNA, 15 bp, Homo sapiens
ctctgttgccaggcc

SEQ ID NO: 1227168 - DNA, 15 bp, Homo sapiens
aagtctcgctctgtt

SEQ ID NO: 1227169 - DNA, 15 bp, Homo sapiens
attttttgagacaaa

SEQ ID NO: 1227170 - DNA, 15 bp, Homo sapiens
tattttttgagacaa

SEQ ID NO: 1227171 - DNA, 15 bp, Homo sapiens
attattttttgagac

SEQ ID NO: 1227172 - DNA, 15 bp, Homo sapiens
tattattttttgaga

SEQ ID NO: 1227173 - DNA, 15 bp, Homo sapiens
ttattattttttgag

SEQ ID NO: 1227174 - DNA, 15 bp, Homo sapiens
attattattttttga

SEQ ID NO: 1227175 - DNA, 15 bp, Homo sapiens
tattattattttttg

SEQ ID NO: 1227176 - DNA, 15 bp, Homo sapiens
cattattattattat

SEQ ID NO: 1227177 - DNA, 15 bp, Homo sapiens
ccattattattatta

SEQ ID NO: 1227178 - DNA, 15 bp, Homo sapiens
gccattattattatt

SEQ ID NO: 1227179 - DNA, 15 bp, Homo sapiens
tgccattattattat

SEQ ID NO: 1227180 - DNA, 15 bp, Homo sapiens
ctgccattattatta

SEQ ID NO: 1227181 - DNA, 15 bp, Homo sapiens
tctgccattattatt

SEQ ID NO: 1227182 - DNA, 15 bp, Homo sapiens
ttctgccattattat

SEQ ID NO: 1227183 - DNA, 15 bp, Homo sapiens
tagttctgccattat

SEQ ID NO: 1227184 - DNA, 15 bp, Homo sapiens
ctagttctgccatta

SEQ ID NO: 1227185 - DNA, 15 bp, Homo sapiens
cctagttctgccatt

SEQ ID NO: 1227186 - DNA, 15 bp, Homo sapiens
gcctagttctgccat

SEQ ID NO: 1227187 - DNA, 15 bp, Homo sapiens
ggcctagttctgcca

SEQ ID NO: 1227188 - DNA, 15 bp, Homo sapiens
tggcctagttctgcc

SEQ ID NO: 1227189 - DNA, 15 bp, Homo sapiens
ctggcctagttctgc

SEQ ID NO: 1227190 - DNA, 15 bp, Homo sapiens
cctggcctagttctg

SEQ ID NO: 1227191 - DNA, 15 bp, Homo sapiens
gcctggcctagttct

SEQ ID NO: 1227192 - DNA, 15 bp, Homo sapiens
cgcctggcctagttc

SEQ ID NO: 1227193 - DNA, 15 bp, Homo sapiens
gcgcctggcctagtt

SEQ ID NO: 1227194 - DNA, 15 bp, Homo sapiens
cgcgcctggcctagt

SEQ ID NO: 1227195 - DNA, 15 bp, Homo sapiens
ccgcgcctggcctag

SEQ ID NO: 1227196 - DNA, 15 bp, Homo sapiens
accgcgcctggccta

SEQ ID NO: 1227197 - DNA, 15 bp, Homo sapiens
caccgcgcctggcct

SEQ ID NO: 1227198 - DNA, 15 bp, Homo sapiens
accaccgcgcctggc

SEQ ID NO: 1227199 - DNA, 15 bp, Homo sapiens
aaccaccgcgcctgg

SEQ ID NO: 1227200 - DNA, 15 bp, Homo sapiens
gaaccaccgcgcctg

SEQ ID NO: 1227201 - DNA, 15 bp, Homo sapiens
tgaaccaccgcgcct

SEQ ID NO: 1227202 - DNA, 15 bp, Homo sapiens
gtgaaccaccgcgcc

SEQ ID NO: 1227203 - DNA, 15 bp, Homo sapiens
tgtgaaccaccgcgc

SEQ ID NO: 1227204 - DNA, 15 bp, Homo sapiens
gtgtgaaccaccgcg

SEQ ID NO: 1227205 - DNA, 15 bp, Homo sapiens
ggtgtgaaccaccgc

SEQ ID NO: 1227206 - DNA, 15 bp, Homo sapiens
ggggattacaggtgt

SEQ ID NO: 1227207 - DNA, 15 bp, Homo sapiens
tggggattacaggtg

SEQ ID NO: 1227208 - DNA, 15 bp, Homo sapiens
atggggattacaggt

SEQ ID NO: 1227209 - DNA, 15 bp, Homo sapiens
gatggggattacagg

SEQ ID NO: 1227210 - DNA, 15 bp, Homo sapiens
tgatggggattacag

SEQ ID NO: 1227211 - DNA, 15 bp, Homo sapiens
gtgatggggattaca

SEQ ID NO: 1227212 - DNA, 15 bp, Homo sapiens
agtgatggggattac

SEQ ID NO: 1227213 - DNA, 15 bp, Homo sapiens
aagtgatggggatta

SEQ ID NO: 1227214 - DNA, 15 bp, Homo sapiens
aaagtgatggggatt

SEQ ID NO: 1227215 - DNA, 15 bp, Homo sapiens
caaagtgatggggat

SEQ ID NO: 1227216 - DNA, 15 bp, Homo sapiens
ccaaagtgatgggga

SEQ ID NO: 1227217 - DNA, 15 bp, Homo sapiens
cccaaagtgatgggg

SEQ ID NO: 1227218 - DNA, 15 bp, Homo sapiens
acccaaagtgatggg

SEQ ID NO: 1227219 - DNA, 15 bp, Homo sapiens
cacccaaagtgatgg

SEQ ID NO: 1227220 - DNA, 15 bp, Homo sapiens
ccacccaaagtgatg

SEQ ID NO: 1227221 - DNA, 15 bp, Homo sapiens
gccacccaaagtgat

SEQ ID NO: 1227222 - DNA, 15 bp, Homo sapiens
ggccacccaaagtga

SEQ ID NO: 1227223 - DNA, 15 bp, Homo sapiens
cggccacccaaagtg

SEQ ID NO: 1227224 - DNA, 15 bp, Homo sapiens
tcggccacccaaagt

SEQ ID NO: 1227225 - DNA, 15 bp, Homo sapiens
ctcggccacccaaag

SEQ ID NO: 1227226 - DNA, 15 bp, Homo sapiens
cctcggccacccaaa

SEQ ID NO: 1227227 - DNA, 15 bp, Homo sapiens
acctcggccacccaa

SEQ ID NO: 1227228 - DNA, 15 bp, Homo sapiens
gacctcggccaccca

SEQ ID NO: 1227229 - DNA, 15 bp, Homo sapiens
cgacctcggccaccc

SEQ ID NO: 1227230 - DNA, 15 bp, Homo sapiens
ccgacctcggccacc

SEQ ID NO: 1227231 - DNA, 15 bp, Homo sapiens
accgacctcggccac

SEQ ID NO: 1227232 - DNA, 15 bp, Homo sapiens
caccgacctcggcca

SEQ ID NO: 1227233 - DNA, 15 bp, Homo sapiens
ccaccgacctcggcc

SEQ ID NO: 1227234 - DNA, 15 bp, Homo sapiens
tccaccgacctcggc

SEQ ID NO: 1227235 - DNA, 15 bp, Homo sapiens
atccaccgacctcgg

SEQ ID NO: 1227236 - DNA, 15 bp, Homo sapiens
gatccaccgacctcg

SEQ ID NO: 1227237 - DNA, 15 bp, Homo sapiens
tgatccaccgacctc

SEQ ID NO: 1227238 - DNA, 15 bp, Homo sapiens
gtgatccaccgacct

SEQ ID NO: 1227239 - DNA, 15 bp, Homo sapiens
agtgatccaccgacc

SEQ ID NO: 1227240 - DNA, 15 bp, Homo sapiens
aagtgatccaccgac

SEQ ID NO: 1227241 - DNA, 15 bp, Homo sapiens
caagtgatccaccga

SEQ ID NO: 1227242 - DNA, 15 bp, Homo sapiens
tcaagtgatccaccg

SEQ ID NO: 1227243 - DNA, 15 bp, Homo sapiens
ccctgacctcaagtg

SEQ ID NO: 1227244 - DNA, 15 bp, Homo sapiens
cccctgacctcaagt

SEQ ID NO: 1227245 - DNA, 15 bp, Homo sapiens
acccctgacctcaag

SEQ ID NO: 1227246 - DNA, 15 bp, Homo sapiens
aacccctgacctcaa

SEQ ID NO: 1227247 - DNA, 15 bp, Homo sapiens
gaacccctgacctca

SEQ ID NO: 1227248 - DNA, 15 bp, Homo sapiens
cgaacccctgacctc

SEQ ID NO: 1227249 - DNA, 15 bp, Homo sapiens
tcgaacccctgacct

SEQ ID NO: 1227250 - DNA, 15 bp, Homo sapiens
ctcgaacccctgacc

SEQ ID NO: 1227251 - DNA, 15 bp, Homo sapiens
ctggtctcgaacccc

SEQ ID NO: 1227252 - DNA, 15 bp, Homo sapiens
gctggtctcgaaccc

SEQ ID NO: 1227253 - DNA, 15 bp, Homo sapiens
ggctggtctcgaacc

SEQ ID NO: 1227254 - DNA, 15 bp, Homo sapiens
atagagacggggttt

SEQ ID NO: 1227255 - DNA, 15 bp, Homo sapiens
aatagagacggggtt

SEQ ID NO: 1227256 - DNA, 15 bp, Homo sapiens
taatagagacggggt

SEQ ID NO: 1227257 - DNA, 15 bp, Homo sapiens
ttaatagagacgggg

SEQ ID NO: 1227258 - DNA, 15 bp, Homo sapiens
tttaatagagacggg

SEQ ID NO: 1227259 - DNA, 15 bp, Homo sapiens
ttttaatagagacgg

SEQ ID NO: 1227260 - DNA, 15 bp, Homo sapiens
taaatttttgtattt

SEQ ID NO: 1227261 - DNA, 15 bp, Homo sapiens
ctaaatttttgtatt

SEQ ID NO: 1227262 - DNA, 15 bp, Homo sapiens
gctaaatttttgtat

SEQ ID NO: 1227263 - DNA, 15 bp, Homo sapiens
gcccagctaaatttt

SEQ ID NO: 1227264 - DNA, 15 bp, Homo sapiens
cgcccagctaaattt

SEQ ID NO: 1227265 - DNA, 15 bp, Homo sapiens
acgcccagctaaatt

SEQ ID NO: 1227266 - DNA, 15 bp, Homo sapiens
cacgcccagctaaat

SEQ ID NO: 1227267 - DNA, 15 bp, Homo sapiens
ccacgcccagctaaa

SEQ ID NO: 1227268 - DNA, 15 bp, Homo sapiens
acacctgccaccacg

SEQ ID NO: 1227269 - DNA, 15 bp, Homo sapiens
gacacctgccaccac

SEQ ID NO: 1227270 - DNA, 15 bp, Homo sapiens
agacacctgccacca

SEQ ID NO: 1227271 - DNA, 15 bp, Homo sapiens
cagacacctgccacc

SEQ ID NO: 1227272 - DNA, 15 bp, Homo sapiens
acagacacctgccac

SEQ ID NO: 1227273 - DNA, 15 bp, Homo sapiens
tacagacacctgcca

SEQ ID NO: 1227274 - DNA, 15 bp, Homo sapiens
ctacagacacctgcc

SEQ ID NO: 1227275 - DNA, 15 bp, Homo sapiens
actacagacacctgc

SEQ ID NO: 1227276 - DNA, 15 bp, Homo sapiens
gactacagacacctg

SEQ ID NO: 1227277 - DNA, 15 bp, Homo sapiens
ggactacagacacct

SEQ ID NO: 1227278 - DNA, 15 bp, Homo sapiens
gggactacagacacc

SEQ ID NO: 1227279 - DNA, 15 bp, Homo sapiens
tgctgggactacaga

SEQ ID NO: 1227280 - DNA, 15 bp, Homo sapiens
ttgctgggactacag

SEQ ID NO: 1227281 - DNA, 15 bp, Homo sapiens
gttgctgggactaca

SEQ ID NO: 1227282 - DNA, 15 bp, Homo sapiens
agttgctgggactac

SEQ ID NO: 1227283 - DNA, 15 bp, Homo sapiens
gagttgctgggacta

SEQ ID NO: 1227284 - DNA, 15 bp, Homo sapiens
tgagttgctgggact

SEQ ID NO: 1227285 - DNA, 15 bp, Homo sapiens
ctgagttgctgggac

SEQ ID NO: 1227286 - DNA, 15 bp, Homo sapiens
cctgagttgctggga

SEQ ID NO: 1227287 - DNA, 15 bp, Homo sapiens
tcctgagttgctggg

SEQ ID NO: 1227288 - DNA, 15 bp, Homo sapiens
ctcctgagttgctgg

SEQ ID NO: 1227289 - DNA, 15 bp, Homo sapiens
cctcctgagttgctg

SEQ ID NO: 1227290 - DNA, 15 bp, Homo sapiens
gcctcctgagttgct

SEQ ID NO: 1227291 - DNA, 15 bp, Homo sapiens
agcctcctgagttgc

SEQ ID NO: 1227292 - DNA, 15 bp, Homo sapiens
tagcctcctgagttg

SEQ ID NO: 1227293 - DNA, 15 bp, Homo sapiens
ttagcctcctgagtt

SEQ ID NO: 1227294 - DNA, 15 bp, Homo sapiens
tttagcctcctgagt

SEQ ID NO: 1227295 - DNA, 15 bp, Homo sapiens
ctttagcctcctgag

SEQ ID NO: 1227296 - DNA, 15 bp, Homo sapiens
gctttagcctcctga

SEQ ID NO: 1227297 - DNA, 15 bp, Homo sapiens
tgctttagcctcctg

SEQ ID NO: 1227298 - DNA, 15 bp, Homo sapiens
ctgctttagcctcct

SEQ ID NO: 1227299 - DNA, 15 bp, Homo sapiens
aattctcctgcttta

SEQ ID NO: 1227300 - DNA, 15 bp, Homo sapiens
caattctcctgcttt

SEQ ID NO: 1227301 - DNA, 15 bp, Homo sapiens
gcaattctcctgctt

SEQ ID NO: 1227302 - DNA, 15 bp, Homo sapiens
agcaattctcctgct

SEQ ID NO: 1227303 - DNA, 15 bp, Homo sapiens
tccatctcccaggtt

SEQ ID NO: 1227304 - DNA, 15 bp, Homo sapiens
ttccatctcccaggt

SEQ ID NO: 1227305 - DNA, 15 bp, Homo sapiens
cttccatctcccagg

SEQ ID NO: 1227306 - DNA, 15 bp, Homo sapiens
acttccatctcccag

SEQ ID NO: 1227307 - DNA, 15 bp, Homo sapiens
aacttccatctccca

SEQ ID NO: 1227308 - DNA, 15 bp, Homo sapiens
caacttccatctccc

SEQ ID NO: 1227309 - DNA, 15 bp, Homo sapiens
gcaacttccatctcc

SEQ ID NO: 1227310 - DNA, 15 bp, Homo sapiens
tgcaacttccatctc

SEQ ID NO: 1227311 - DNA, 15 bp, Homo sapiens
ctgcaacttccatct

SEQ ID NO: 1227312 - DNA, 15 bp, Homo sapiens
actgcaacttccatc

SEQ ID NO: 1227313 - DNA, 15 bp, Homo sapiens
atgtgatctgggctc

SEQ ID NO: 1227314 - DNA, 15 bp, Homo sapiens
gatgtgatctgggct

SEQ ID NO: 1227315 - DNA, 15 bp, Homo sapiens
tgatgtgatctgggc

SEQ ID NO: 1227316 - DNA, 15 bp, Homo sapiens
gtgatgtgatctggg

SEQ ID NO: 1227317 - DNA, 15 bp, Homo sapiens
agtgatgtgatctgg

SEQ ID NO: 1227318 - DNA, 15 bp, Homo sapiens
cagtgatgtgatctg

SEQ ID NO: 1227319 - DNA, 15 bp, Homo sapiens
gcagtgatgtgatct

SEQ ID NO: 1227320 - DNA, 15 bp, Homo sapiens
tgcagtgatgtgatc

SEQ ID NO: 1227321 - DNA, 15 bp, Homo sapiens
gtgcagtgatgtgat

SEQ ID NO: 1227322 - DNA, 15 bp, Homo sapiens
agtgcagtgatgtga

SEQ ID NO: 1227323 - DNA, 15 bp, Homo sapiens
gagtgcagtgatgtg

SEQ ID NO: 1227324 - DNA, 15 bp, Homo sapiens
ggagtgcagtgatgt

SEQ ID NO: 1227325 - DNA, 15 bp, Homo sapiens
ttaaagacagagttt

SEQ ID NO: 1227326 - DNA, 15 bp, Homo sapiens
tttaaagacagagtt

SEQ ID NO: 1227327 - DNA, 15 bp, Homo sapiens
ttttaaagacagagt

SEQ ID NO: 1227328 - DNA, 15 bp, Homo sapiens
tttttaaagacagag

SEQ ID NO: 1227329 - DNA, 15 bp, Homo sapiens
ttttttaaagacaga

SEQ ID NO: 1227330 - DNA, 15 bp, Homo sapiens
tttttttaaagacag

SEQ ID NO: 1227331 - DNA, 15 bp, Homo sapiens
ttttttttaaagaca

SEQ ID NO: 1227332 - DNA, 15 bp, Homo sapiens
tttttttttaaagac

SEQ ID NO: 1227333 - DNA, 15 bp, Homo sapiens
atttttttttttaaa

SEQ ID NO: 1227334 - DNA, 15 bp, Homo sapiens
taattttttttttta

SEQ ID NO: 1227335 - DNA, 15 bp, Homo sapiens
ataattttttttttt

SEQ ID NO: 1227336 - DNA, 15 bp, Homo sapiens
gataatttttttttt

SEQ ID NO: 1227337 - DNA, 15 bp, Homo sapiens
tgataattttttttt

SEQ ID NO: 1227338 - DNA, 15 bp, Homo sapiens
ttgataatttttttt

SEQ ID NO: 1227339 - DNA, 15 bp, Homo sapiens
gttgataattttttt

SEQ ID NO: 1227340 - DNA, 15 bp, Homo sapiens
agttgataatttttt

SEQ ID NO: 1227341 - DNA, 15 bp, Homo sapiens
cagttgataattttt

SEQ ID NO: 1227342 - DNA, 15 bp, Homo sapiens
ccagttgataatttt

SEQ ID NO: 1227343 - DNA, 15 bp, Homo sapiens
cccagttgataattt

SEQ ID NO: 1227344 - DNA, 15 bp, Homo sapiens
acccagttgataatt

SEQ ID NO: 1227345 - DNA, 15 bp, Homo sapiens
tacccagttgataat

SEQ ID NO: 1227346 - DNA, 15 bp, Homo sapiens
gtacccagttgataa

SEQ ID NO: 1227347 - DNA, 15 bp, Homo sapiens
tgtacccagttgata

SEQ ID NO: 1227348 - DNA, 15 bp, Homo sapiens
ctgtacccagttgat

SEQ ID NO: 1227349 - DNA, 15 bp, Homo sapiens
actgtacccagttga

SEQ ID NO: 1227350 - DNA, 15 bp, Homo sapiens
cactgtacccagttg

SEQ ID NO: 1227351 - DNA, 15 bp, Homo sapiens
ccactgtacccagtt

SEQ ID NO: 1227352 - DNA, 15 bp, Homo sapiens
cccactgtacccagt

SEQ ID NO: 1227353 - DNA, 15 bp, Homo sapiens
acccactgtacccag

SEQ ID NO: 1227354 - DNA, 15 bp, Homo sapiens
gacccactgtaccca

SEQ ID NO: 1227355 - DNA, 15 bp, Homo sapiens
tgacccactgtaccc

SEQ ID NO: 1227356 - DNA, 15 bp, Homo sapiens
atgacccactgtacc

SEQ ID NO: 1227357 - DNA, 15 bp, Homo sapiens
catgacccactgtac

SEQ ID NO: 1227358 - DNA, 15 bp, Homo sapiens
gcatgacccactgta

SEQ ID NO: 1227359 - DNA, 15 bp, Homo sapiens
ggcatgacccactgt

SEQ ID NO: 1227360 - DNA, 15 bp, Homo sapiens
aggcatgacccactg

SEQ ID NO: 1227361 - DNA, 15 bp, Homo sapiens
caggcatgacccact

SEQ ID NO: 1227362 - DNA, 15 bp, Homo sapiens
acaggcatgacccac

SEQ ID NO: 1227363 - DNA, 15 bp, Homo sapiens
tacaggcatgaccca

SEQ ID NO: 1227364 - DNA, 15 bp, Homo sapiens
ttacaggcatgaccc

SEQ ID NO: 1227365 - DNA, 15 bp, Homo sapiens
attacaggcatgacc

SEQ ID NO: 1227366 - DNA, 15 bp, Homo sapiens
gattacaggcatgac

SEQ ID NO: 1227367 - DNA, 15 bp, Homo sapiens
gaaagtgttgggatt

SEQ ID NO: 1227368 - DNA, 15 bp, Homo sapiens
cgaaagtgttgggat

SEQ ID NO: 1227369 - DNA, 15 bp, Homo sapiens
ccgaaagtgttggga

SEQ ID NO: 1227370 - DNA, 15 bp, Homo sapiens
tccgaaagtgttggg

SEQ ID NO: 1227371 - DNA, 15 bp, Homo sapiens
ctccgaaagtgttgg

SEQ ID NO: 1227372 - DNA, 15 bp, Homo sapiens
cctccgaaagtgttg

SEQ ID NO: 1227373 - DNA, 15 bp, Homo sapiens
gcctccgaaagtgtt

SEQ ID NO: 1227374 - DNA, 15 bp, Homo sapiens
ggcctccgaaagtgt

SEQ ID NO: 1227375 - DNA, 15 bp, Homo sapiens
tggcctccgaaagtg

SEQ ID NO: 1227376 - DNA, 15 bp, Homo sapiens
ttggcctccgaaagt

SEQ ID NO: 1227377 - DNA, 15 bp, Homo sapiens
cttggcctccgaaag

SEQ ID NO: 1227378 - DNA, 15 bp, Homo sapiens
ccttggcctccgaaa

SEQ ID NO: 1227379 - DNA, 15 bp, Homo sapiens
accttggcctccgaa

SEQ ID NO: 1227380 - DNA, 15 bp, Homo sapiens
caccttggcctccga

SEQ ID NO: 1227381 - DNA, 15 bp, Homo sapiens
ccaccttggcctccg

SEQ ID NO: 1227382 - DNA, 15 bp, Homo sapiens
cgatcctcccacctt

SEQ ID NO: 1227383 - DNA, 15 bp, Homo sapiens
gttcaagcgatcctc

SEQ ID NO: 1227384 - DNA, 15 bp, Homo sapiens
ggttcaagcgatcct

SEQ ID NO: 1227385 - DNA, 15 bp, Homo sapiens
gggttcaagcgatcc

SEQ ID NO: 1227386 - DNA, 15 bp, Homo sapiens
tgggttcaagcgatc

SEQ ID NO: 1227387 - DNA, 15 bp, Homo sapiens
ttcaaactcctgggt

SEQ ID NO: 1227388 - DNA, 15 bp, Homo sapiens
tttcaaactcctggg

SEQ ID NO: 1227389 - DNA, 15 bp, Homo sapiens
agcccaggctggttt

SEQ ID NO: 1227390 - DNA, 15 bp, Homo sapiens
cagcccaggctggtt

SEQ ID NO: 1227391 - DNA, 15 bp, Homo sapiens
ccagcccaggctggt

SEQ ID NO: 1227392 - DNA, 15 bp, Homo sapiens
cccagcccaggctgg

SEQ ID NO: 1227393 - DNA, 15 bp, Homo sapiens
gcccagcccaggctg

SEQ ID NO: 1227394 - DNA, 15 bp, Homo sapiens
tgcccagcccaggct

SEQ ID NO: 1227395 - DNA, 15 bp, Homo sapiens
ttgcccagcccaggc

SEQ ID NO: 1227396 - DNA, 15 bp, Homo sapiens
gttgcccagcccagg

SEQ ID NO: 1227397 - DNA, 15 bp, Homo sapiens
tgttgcccagcccag

SEQ ID NO: 1227398 - DNA, 15 bp, Homo sapiens
atgttgcccagccca

SEQ ID NO: 1227399 - DNA, 15 bp, Homo sapiens
tatgttgcccagccc

SEQ ID NO: 1227400 - DNA, 15 bp, Homo sapiens
ctatgttgcccagcc

SEQ ID NO: 1227401 - DNA, 15 bp, Homo sapiens
gctatgttgcccagc

SEQ ID NO: 1227402 - DNA, 15 bp, Homo sapiens
aagatggggtcttgc

SEQ ID NO: 1227403 - DNA, 15 bp, Homo sapiens
aaagatggggtcttg

SEQ ID NO: 1227404 - DNA, 15 bp, Homo sapiens
taaagatggggtctt

SEQ ID NO: 1227405 - DNA, 15 bp, Homo sapiens
gtaaagatggggtct

SEQ ID NO: 1227406 - DNA, 15 bp, Homo sapiens
tgtaaagatggggtc

SEQ ID NO: 1227407 - DNA, 15 bp, Homo sapiens
ttgtaaagatggggt

SEQ ID NO: 1227408 - DNA, 15 bp, Homo sapiens
tttgtaaagatgggg

SEQ ID NO: 1227409 - DNA, 15 bp, Homo sapiens
ttttgtaaagatggg

SEQ ID NO: 1227410 - DNA, 15 bp, Homo sapiens
gttttgtaaagatgg

SEQ ID NO: 1227411 - DNA, 15 bp, Homo sapiens
tgttttgtaaagatg

SEQ ID NO: 1227412 - DNA, 15 bp, Homo sapiens
atgttttgtaaagat

SEQ ID NO: 1227413 - DNA, 15 bp, Homo sapiens
tatgttttgtaaaga

SEQ ID NO: 1227414 - DNA, 15 bp, Homo sapiens
ttatgttttgtaaag

SEQ ID NO: 1227415 - DNA, 15 bp, Homo sapiens
tttatgttttgtaaa

SEQ ID NO: 1227416 - DNA, 15 bp, Homo sapiens
ttttatgttttgtaa

SEQ ID NO: 1227417 - DNA, 15 bp, Homo sapiens
tttttatgttttgta

SEQ ID NO: 1227418 - DNA, 15 bp, Homo sapiens
ttttttatgttttgt

SEQ ID NO: 1227419 - DNA, 15 bp, Homo sapiens
tttttttatgttttg

SEQ ID NO: 1227420 - DNA, 15 bp, Homo sapiens
tgccctggctaattt

SEQ ID NO: 1227421 - DNA, 15 bp, Homo sapiens
gtgccctggctaatt

SEQ ID NO: 1227422 - DNA, 15 bp, Homo sapiens
cgtgccctggctaat

SEQ ID NO: 1227423 - DNA, 15 bp, Homo sapiens
acgtgccctggctaa

SEQ ID NO: 1227424 - DNA, 15 bp, Homo sapiens
cacgtgccctggcta

SEQ ID NO: 1227425 - DNA, 15 bp, Homo sapiens
gcacgtgccctggct

SEQ ID NO: 1227426 - DNA, 15 bp, Homo sapiens
ggcacgtgccctggc

SEQ ID NO: 1227427 - DNA, 15 bp, Homo sapiens
aggcacgtgccctgg

SEQ ID NO: 1227428 - DNA, 15 bp, Homo sapiens
caggcacgtgccctg

SEQ ID NO: 1227429 - DNA, 15 bp, Homo sapiens
acaggcacgtgccct

SEQ ID NO: 1227430 - DNA, 15 bp, Homo sapiens
cacaggcacgtgccc

SEQ ID NO: 1227431 - DNA, 15 bp, Homo sapiens
ccacaggcacgtgcc

SEQ ID NO: 1227432 - DNA, 15 bp, Homo sapiens
accacaggcacgtgc

SEQ ID NO: 1227433 - DNA, 15 bp, Homo sapiens
gaccacaggcacgtg

SEQ ID NO: 1227434 - DNA, 15 bp, Homo sapiens
gtgggaccacaggca

SEQ ID NO: 1227435 - DNA, 15 bp, Homo sapiens
ggtgggaccacaggc

SEQ ID NO: 1227436 - DNA, 15 bp, Homo sapiens
cggtgggaccacagg

SEQ ID NO: 1227437 - DNA, 15 bp, Homo sapiens
gcggtgggaccacag

SEQ ID NO: 1227438 - DNA, 15 bp, Homo sapiens
tgcggtgggaccaca

SEQ ID NO: 1227439 - DNA, 15 bp, Homo sapiens
gtgcggtgggaccac

SEQ ID NO: 1227440 - DNA, 15 bp, Homo sapiens
agtgcggtgggacca

SEQ ID NO: 1227441 - DNA, 15 bp, Homo sapiens
gagtgcggtgggacc

SEQ ID NO: 1227442 - DNA, 15 bp, Homo sapiens
ggagtgcggtgggac

SEQ ID NO: 1227443 - DNA, 15 bp, Homo sapiens
tggagtgcggtggga

SEQ ID NO: 1227444 - DNA, 15 bp, Homo sapiens
ctggagtgcggtggg

SEQ ID NO: 1227445 - DNA, 15 bp, Homo sapiens
atcttgctctgtcgc

SEQ ID NO: 1227446 - DNA, 15 bp, Homo sapiens
aatcttgctctgtcg

SEQ ID NO: 1227447 - DNA, 15 bp, Homo sapiens
gaatcttgctctgtc

SEQ ID NO: 1227448 - DNA, 15 bp, Homo sapiens
ggaatcttgctctgt

SEQ ID NO: 1227449 - DNA, 15 bp, Homo sapiens
tggaatcttgctctg

SEQ ID NO: 1227450 - DNA, 15 bp, Homo sapiens
atggaatcttgctct

SEQ ID NO: 1227451 - DNA, 15 bp, Homo sapiens
gatggaatcttgctc

SEQ ID NO: 1227452 - DNA, 15 bp, Homo sapiens
agatggaatcttgct

SEQ ID NO: 1227453 - DNA, 15 bp, Homo sapiens
aagatggaatcttgc

SEQ ID NO: 1227454 - DNA, 15 bp, Homo sapiens
taagatggaatcttg

SEQ ID NO: 1227455 - DNA, 15 bp, Homo sapiens
ttaagatggaatctt

SEQ ID NO: 1227456 - DNA, 15 bp, Homo sapiens
tttaagatggaatct

SEQ ID NO: 1227457 - DNA, 15 bp, Homo sapiens
ttttaagatggaatc

SEQ ID NO: 1227458 - DNA, 15 bp, Homo sapiens
tttttaagatggaat

SEQ ID NO: 1227459 - DNA, 15 bp, Homo sapiens
ttttttaagatggaa

SEQ ID NO: 1227460 - DNA, 15 bp, Homo sapiens
tttttttaagatgga

SEQ ID NO: 1227461 - DNA, 15 bp, Homo sapiens
gtttttttaagatgg

SEQ ID NO: 1227462 - DNA, 15 bp, Homo sapiens
tgtttttttaagatg

SEQ ID NO: 1227463 - DNA, 15 bp, Homo sapiens
ttgtttttttaagat

SEQ ID NO: 1227464 - DNA, 15 bp, Homo sapiens
gttgtttttttaaga

SEQ ID NO: 1227465 - DNA, 15 bp, Homo sapiens
tgttgtttttttaag

SEQ ID NO: 1227466 - DNA, 15 bp, Homo sapiens
ttgttgtttttttaa

SEQ ID NO: 1227467 - DNA, 15 bp, Homo sapiens
tttgttgttttttta

SEQ ID NO: 1227468 - DNA, 15 bp, Homo sapiens
ttttgttgttttttt

SEQ ID NO: 1227469 - DNA, 15 bp, Homo sapiens
ctttttttgttgttt

SEQ ID NO: 1227470 - DNA, 15 bp, Homo sapiens
tctttttttgttgtt

SEQ ID NO: 1227471 - DNA, 15 bp, Homo sapiens
gtctttttttgttgt

SEQ ID NO: 1227472 - DNA, 15 bp, Homo sapiens
agtctttttttgttg

SEQ ID NO: 1227473 - DNA, 15 bp, Homo sapiens
gagtctttttttgtt

SEQ ID NO: 1227474 - DNA, 15 bp, Homo sapiens
tgagtctttttttgt

SEQ ID NO: 1227475 - DNA, 15 bp, Homo sapiens
atgagtctttttttg

SEQ ID NO: 1227476 - DNA, 15 bp, Homo sapiens
gatgagtcttttttt

SEQ ID NO: 1227477 - DNA, 15 bp, Homo sapiens
tgatgagtctttttt

SEQ ID NO: 1227478 - DNA, 15 bp, Homo sapiens
gtgatgagtcttttt

SEQ ID NO: 1227479 - DNA, 15 bp, Homo sapiens
agtgatgagtctttt

SEQ ID NO: 1227480 - DNA, 15 bp, Homo sapiens
aagtgatgagtcttt

SEQ ID NO: 1227481 - DNA, 15 bp, Homo sapiens
aaagtgatgagtctt

SEQ ID NO: 1227482 - DNA, 15 bp, Homo sapiens
aaaagtgatgagtct

SEQ ID NO: 1227483 - DNA, 15 bp, Homo sapiens
caaaagtgatgagtc

SEQ ID NO: 1227484 - DNA, 15 bp, Homo sapiens
acaaaagtgatgagt

SEQ ID NO: 1227485 - DNA, 15 bp, Homo sapiens
cacaaaagtgatgag

SEQ ID NO: 1227486 - DNA, 15 bp, Homo sapiens
acacaaaagtgatga

SEQ ID NO: 1227487 - DNA, 15 bp, Homo sapiens
tacacaaaagtgatg

SEQ ID NO: 1227488 - DNA, 15 bp, Homo sapiens
ctacacaaaagtgat

SEQ ID NO: 1227489 - DNA, 15 bp, Homo sapiens
gctacacaaaagtga

SEQ ID NO: 1227490 - DNA, 15 bp, Homo sapiens
tgctacacaaaagtg

SEQ ID NO: 1227491 - DNA, 15 bp, Homo sapiens
gtgctacacaaaagt

SEQ ID NO: 1227492 - DNA, 15 bp, Homo sapiens
ggtgctacacaaaag

SEQ ID NO: 1227493 - DNA, 15 bp, Homo sapiens
tggtgctacacaaaa

SEQ ID NO: 1227494 - DNA, 15 bp, Homo sapiens
ctggtgctacacaaa

SEQ ID NO: 1227495 - DNA, 15 bp, Homo sapiens
cctggtgctacacaa

SEQ ID NO: 1227496 - DNA, 15 bp, Homo sapiens
ccctggtgctacaca

SEQ ID NO: 1227497 - DNA, 15 bp, Homo sapiens
accctggtgctacac

SEQ ID NO: 1227498 - DNA, 15 bp, Homo sapiens
gaccctggtgctaca

SEQ ID NO: 1227499 - DNA, 15 bp, Homo sapiens
tgaccctggtgctac

SEQ ID NO: 1227500 - DNA, 15 bp, Homo sapiens
ctgaccctggtgcta

SEQ ID NO: 1227501 - DNA, 15 bp, Homo sapiens
gctgaccctggtgct

SEQ ID NO: 1227502 - DNA, 15 bp, Homo sapiens
tgctgaccctggtgc

SEQ ID NO: 1227503 - DNA, 15 bp, Homo sapiens
ttgctgaccctggtg

SEQ ID NO: 1227504 - DNA, 15 bp, Homo sapiens
tttgctgaccctggt

SEQ ID NO: 1227505 - DNA, 15 bp, Homo sapiens
gtttgctgaccctgg

SEQ ID NO: 1227506 - DNA, 15 bp, Homo sapiens
agtttgctgaccctg

SEQ ID NO: 1227507 - DNA, 15 bp, Homo sapiens
tagtttgctgaccct

SEQ ID NO: 1227508 - DNA, 15 bp, Homo sapiens
atagtttgctgaccc

SEQ ID NO: 1227509 - DNA, 15 bp, Homo sapiens
gatagtttgctgacc

SEQ ID NO: 1227510 - DNA, 15 bp, Homo sapiens
agatagtttgctgac

SEQ ID NO: 1227511 - DNA, 15 bp, Homo sapiens
gagatagtttgctga

SEQ ID NO: 1227512 - DNA, 15 bp, Homo sapiens
ggagatagtttgctg

SEQ ID NO: 1227513 - DNA, 15 bp, Homo sapiens
tggagatagtttgct

SEQ ID NO: 1227514 - DNA, 15 bp, Homo sapiens
ttggagatagtttgc

SEQ ID NO: 1227515 - DNA, 15 bp, Homo sapiens
tttggagatagtttg

SEQ ID NO: 1227516 - DNA, 15 bp, Homo sapiens
ctttggagatagttt

SEQ ID NO: 1227517 - DNA, 15 bp, Homo sapiens
cctttggagatagtt

SEQ ID NO: 1227518 - DNA, 15 bp, Homo sapiens
ccctttggagatagt

SEQ ID NO: 1227519 - DNA, 15 bp, Homo sapiens
gccctttggagatag

SEQ ID NO: 1227520 - DNA, 15 bp, Homo sapiens
ggccctttggagata

SEQ ID NO: 1227521 - DNA, 15 bp, Homo sapiens
tggccctttggagat

SEQ ID NO: 1227522 - DNA, 15 bp, Homo sapiens
ttggccctttggaga

SEQ ID NO: 1227523 - DNA, 15 bp, Homo sapiens
cttggccctttggag

SEQ ID NO: 1227524 - DNA, 15 bp, Homo sapiens
acttggccctttgga

SEQ ID NO: 1227525 - DNA, 15 bp, Homo sapiens
tacttggccctttgg

SEQ ID NO: 1227526 - DNA, 15 bp, Homo sapiens
ctacttggccctttg

SEQ ID NO: 1227527 - DNA, 15 bp, Homo sapiens
actacttggcccttt

SEQ ID NO: 1227528 - DNA, 15 bp, Homo sapiens
gactacttggccctt

SEQ ID NO: 1227529 - DNA, 15 bp, Homo sapiens
tgactacttggccct

SEQ ID NO: 1227530 - DNA, 15 bp, Homo sapiens
ttgactacttggccc

SEQ ID NO: 1227531 - DNA, 15 bp, Homo sapiens
gttgactacttggcc

SEQ ID NO: 1227532 - DNA, 15 bp, Homo sapiens
tgttgactacttggc

SEQ ID NO: 1227533 - DNA, 15 bp, Homo sapiens
gtgttgactacttgg

SEQ ID NO: 1227534 - DNA, 15 bp, Homo sapiens
tgtgttgactacttg

SEQ ID NO: 1227535 - DNA, 15 bp, Homo sapiens
atgtgttgactactt

SEQ ID NO: 1227536 - DNA, 15 bp, Homo sapiens
tatgtgttgactact

SEQ ID NO: 1227537 - DNA, 15 bp, Homo sapiens
ttatgtgttgactac

SEQ ID NO: 1227538 - DNA, 15 bp, Homo sapiens
attatgtgttgacta

SEQ ID NO: 1227539 - DNA, 15 bp, Homo sapiens
tattatgtgttgact

SEQ ID NO: 1227540 - DNA, 15 bp, Homo sapiens
ttattatgtgttgac

SEQ ID NO: 1227541 - DNA, 15 bp, Homo sapiens
attattatgtgttga

SEQ ID NO: 1227542 - DNA, 15 bp, Homo sapiens
aattattatgtgttg

SEQ ID NO: 1227543 - DNA, 15 bp, Homo sapiens
aaattattatgtgtt

SEQ ID NO: 1227544 - DNA, 15 bp, Homo sapiens
caaattattatgtgt

SEQ ID NO: 1227545 - DNA, 15 bp, Homo sapiens
gcaaattattatgtg

SEQ ID NO: 1227546 - DNA, 15 bp, Homo sapiens
tgcaaattattatgt

SEQ ID NO: 1227547 - DNA, 15 bp, Homo sapiens
ctgcaaattattatg

SEQ ID NO: 1227548 - DNA, 15 bp, Homo sapiens
cctgcaaattattat

SEQ ID NO: 1227549 - DNA, 15 bp, Homo sapiens
gcctgcaaattatta

SEQ ID NO: 1227550 - DNA, 15 bp, Homo sapiens
ggcctgcaaattatt

SEQ ID NO: 1227551 - DNA, 15 bp, Homo sapiens
tggcctgcaaattat

SEQ ID NO: 1227552 - DNA, 15 bp, Homo sapiens
ctggcctgcaaatta

SEQ ID NO: 1227553 - DNA, 15 bp, Homo sapiens
cctggcctgcaaatt

SEQ ID NO: 1227554 - DNA, 15 bp, Homo sapiens
gcctggcctgcaaat

SEQ ID NO: 1227555 - DNA, 15 bp, Homo sapiens
tgcctggcctgcaaa

SEQ ID NO: 1227556 - DNA, 15 bp, Homo sapiens
gtgcctggcctgcaa

SEQ ID NO: 1227557 - DNA, 15 bp, Homo sapiens
cgtgcctggcctgca

SEQ ID NO: 1227558 - DNA, 15 bp, Homo sapiens
ccgtgcctggcctgc

SEQ ID NO: 1227559 - DNA, 15 bp, Homo sapiens
accgtgcctggcctg

SEQ ID NO: 1227560 - DNA, 15 bp, Homo sapiens
gtgagccaccgtgcc

SEQ ID NO: 1227561 - DNA, 15 bp, Homo sapiens
cacaggcgtgagcca

SEQ ID NO: 1227562 - DNA, 15 bp, Homo sapiens
tcacaggcgtgagcc

SEQ ID NO: 1227563 - DNA, 15 bp, Homo sapiens
atcacaggcgtgagc

SEQ ID NO: 1227564 - DNA, 15 bp, Homo sapiens
gatcacaggcgtgag

SEQ ID NO: 1227565 - DNA, 15 bp, Homo sapiens
ggatcacaggcgtga

SEQ ID NO: 1227566 - DNA, 15 bp, Homo sapiens
gggatcacaggcgtg

SEQ ID NO: 1227567 - DNA, 15 bp, Homo sapiens
tgggatcacaggcgt

SEQ ID NO: 1227568 - DNA, 15 bp, Homo sapiens
ttgggatcacaggcg

SEQ ID NO: 1227569 - DNA, 15 bp, Homo sapiens
gttgggatcacaggc

SEQ ID NO: 1227570 - DNA, 15 bp, Homo sapiens
tgttgggatcacagg

SEQ ID NO: 1227571 - DNA, 15 bp, Homo sapiens
atgttgggatcacag

SEQ ID NO: 1227572 - DNA, 15 bp, Homo sapiens
aatgttgggatcaca

SEQ ID NO: 1227573 - DNA, 15 bp, Homo sapiens
aaatgttgggatcac

SEQ ID NO: 1227574 - DNA, 15 bp, Homo sapiens
aaaatgttgggatca

SEQ ID NO: 1227575 - DNA, 15 bp, Homo sapiens
caaaatgttgggatc

SEQ ID NO: 1227576 - DNA, 15 bp, Homo sapiens
ccaaaatgttgggat

SEQ ID NO: 1227577 - DNA, 15 bp, Homo sapiens
tccaaaatgttggga

SEQ ID NO: 1227578 - DNA, 15 bp, Homo sapiens
atccaaaatgttggg

SEQ ID NO: 1227579 - DNA, 15 bp, Homo sapiens
tatccaaaatgttgg

SEQ ID NO: 1227580 - DNA, 15 bp, Homo sapiens
ttatccaaaatgttg

SEQ ID NO: 1227581 - DNA, 15 bp, Homo sapiens
gttatccaaaatgtt

SEQ ID NO: 1227582 - DNA, 15 bp, Homo sapiens
tgttatccaaaatgt

SEQ ID NO: 1227583 - DNA, 15 bp, Homo sapiens
atgttatccaaaatg

SEQ ID NO: 1227584 - DNA, 15 bp, Homo sapiens
tatgttatccaaaat

SEQ ID NO: 1227585 - DNA, 15 bp, Homo sapiens
ctatgttatccaaaa

SEQ ID NO: 1227586 - DNA, 15 bp, Homo sapiens
actatgttatccaaa

SEQ ID NO: 1227587 - DNA, 15 bp, Homo sapiens
cactatgttatccaa

SEQ ID NO: 1227588 - DNA, 15 bp, Homo sapiens
tcactatgttatcca

SEQ ID NO: 1227589 - DNA, 15 bp, Homo sapiens
ctcactatgttatcc

SEQ ID NO: 1227590 - DNA, 15 bp, Homo sapiens
tctcactatgttatc

SEQ ID NO: 1227591 - DNA, 15 bp, Homo sapiens
gtctcactatgttat

SEQ ID NO: 1227592 - DNA, 15 bp, Homo sapiens
ggtctcactatgtta

SEQ ID NO: 1227593 - DNA, 15 bp, Homo sapiens
tgggtctcactatgt

SEQ ID NO: 1227594 - DNA, 15 bp, Homo sapiens
atgggtctcactatg

SEQ ID NO: 1227595 - DNA, 15 bp, Homo sapiens
aatgggtctcactat

SEQ ID NO: 1227596 - DNA, 15 bp, Homo sapiens
gaatgggtctcacta

SEQ ID NO: 1227597 - DNA, 15 bp, Homo sapiens
agaatgggtctcact

SEQ ID NO: 1227598 - DNA, 15 bp, Homo sapiens
gagaatgggtctcac

SEQ ID NO: 1227599 - DNA, 15 bp, Homo sapiens
agagaatgggtctca

SEQ ID NO: 1227600 - DNA, 15 bp, Homo sapiens
tagagaatgggtctc

SEQ ID NO: 1227601 - DNA, 15 bp, Homo sapiens
gtagagaatgggtct

SEQ ID NO: 1227602 - DNA, 15 bp, Homo sapiens
tgtagagaatgggtc

SEQ ID NO: 1227603 - DNA, 15 bp, Homo sapiens
ttgtagagaatgggt

SEQ ID NO: 1227604 - DNA, 15 bp, Homo sapiens
cttgtagagaatggg

SEQ ID NO: 1227605 - DNA, 15 bp, Homo sapiens
acttgtagagaatgg

SEQ ID NO: 1227606 - DNA, 15 bp, Homo sapiens
cacttgtagagaatg

SEQ ID NO: 1227607 - DNA, 15 bp, Homo sapiens
acacttgtagagaat

SEQ ID NO: 1227608 - DNA, 15 bp, Homo sapiens
aacacttgtagagaa

SEQ ID NO: 1227609 - DNA, 15 bp, Homo sapiens
aaacacttgtagaga

SEQ ID NO: 1227610 - DNA, 15 bp, Homo sapiens
aaaacacttgtagag

SEQ ID NO: 1227611 - DNA, 15 bp, Homo sapiens
aaaaacacttgtaga

SEQ ID NO: 1227612 - DNA, 15 bp, Homo sapiens
aaaaaacacttgtag

SEQ ID NO: 1227613 - DNA, 15 bp, Homo sapiens
aaaaaaacacttgta

SEQ ID NO: 1227614 - DNA, 15 bp, Homo sapiens
caaaaaaacacttgt

SEQ ID NO: 1227615 - DNA, 15 bp, Homo sapiens
acaaaaaaacacttg

SEQ ID NO: 1227616 - DNA, 15 bp, Homo sapiens
aacaaaaaaacactt

SEQ ID NO: 1227617 - DNA, 15 bp, Homo sapiens
aaacaaaaaaacact

SEQ ID NO: 1227618 - DNA, 15 bp, Homo sapiens
aaaacaaaaaaacac

SEQ ID NO: 1227619 - DNA, 15 bp, Homo sapiens
aaaaacaaaaaaaca

SEQ ID NO: 1227620 - DNA, 15 bp, Homo sapiens
caaaaacaaaaaaac

SEQ ID NO: 1227621 - DNA, 15 bp, Homo sapiens
attaaaaaacaaaaa

SEQ ID NO: 1227622 - DNA, 15 bp, Homo sapiens
aattaaaaaacaaaa

SEQ ID NO: 1227623 - DNA, 15 bp, Homo sapiens
taattaaaaaacaaa

SEQ ID NO: 1227624 - DNA, 15 bp, Homo sapiens
ctaattaaaaaacaa

SEQ ID NO: 1227625 - DNA, 15 bp, Homo sapiens
gctaattaaaaaaca

SEQ ID NO: 1227626 - DNA, 15 bp, Homo sapiens
ggctaattaaaaaac

SEQ ID NO: 1227627 - DNA, 15 bp, Homo sapiens
tggctaattaaaaaa

SEQ ID NO: 1227628 - DNA, 15 bp, Homo sapiens
ctggctaattaaaaa

SEQ ID NO: 1227629 - DNA, 15 bp, Homo sapiens
cctggctaattaaaa

SEQ ID NO: 1227630 - DNA, 15 bp, Homo sapiens
ccctggctaattaaa

SEQ ID NO: 1227631 - DNA, 15 bp, Homo sapiens
cccctggctaattaa

SEQ ID NO: 1227632 - DNA, 15 bp, Homo sapiens
acccctggctaatta

SEQ ID NO: 1227633 - DNA, 15 bp, Homo sapiens
gccaccacccctggc

SEQ ID NO: 1227634 - DNA, 15 bp, Homo sapiens
tgccaccacccctgg

SEQ ID NO: 1227635 - DNA, 15 bp, Homo sapiens
gtgccaccacccctg

SEQ ID NO: 1227636 - DNA, 15 bp, Homo sapiens
tgtgccaccacccct

SEQ ID NO: 1227637 - DNA, 15 bp, Homo sapiens
gtgtgccaccacccc

SEQ ID NO: 1227638 - DNA, 15 bp, Homo sapiens
tgtgtgccaccaccc

SEQ ID NO: 1227639 - DNA, 15 bp, Homo sapiens
gtgtgtgccaccacc

SEQ ID NO: 1227640 - DNA, 15 bp, Homo sapiens
ggtgtgtgccaccac

SEQ ID NO: 1227641 - DNA, 15 bp, Homo sapiens
aggtgtgtgccacca

SEQ ID NO: 1227642 - DNA, 15 bp, Homo sapiens
caggtgtgtgccacc

SEQ ID NO: 1227643 - DNA, 15 bp, Homo sapiens
acaggtgtgtgccac

SEQ ID NO: 1227644 - DNA, 15 bp, Homo sapiens
tacaggtgtgtgcca

SEQ ID NO: 1227645 - DNA, 15 bp, Homo sapiens
ctacaggtgtgtgcc

SEQ ID NO: 1227646 - DNA, 15 bp, Homo sapiens
gctacaggtgtgtgc

SEQ ID NO: 1227647 - DNA, 15 bp, Homo sapiens
ggctacaggtgtgtg

SEQ ID NO: 1227648 - DNA, 15 bp, Homo sapiens
gggctacaggtgtgt

SEQ ID NO: 1227649 - DNA, 15 bp, Homo sapiens
agggctacaggtgtg

SEQ ID NO: 1227650 - DNA, 15 bp, Homo sapiens
tagggctacaggtgt

SEQ ID NO: 1227651 - DNA, 15 bp, Homo sapiens
ctagggctacaggtg

SEQ ID NO: 1227652 - DNA, 15 bp, Homo sapiens
cctagggctacaggt

SEQ ID NO: 1227653 - DNA, 15 bp, Homo sapiens
ccctagggctacagg

SEQ ID NO: 1227654 - DNA, 15 bp, Homo sapiens
tccctagggctacag

SEQ ID NO: 1227655 - DNA, 15 bp, Homo sapiens
gtccctagggctaca

SEQ ID NO: 1227656 - DNA, 15 bp, Homo sapiens
agtccctagggctac

SEQ ID NO: 1227657 - DNA, 15 bp, Homo sapiens
tagtccctagggcta

SEQ ID NO: 1227658 - DNA, 15 bp, Homo sapiens
ctagtccctagggct

SEQ ID NO: 1227659 - DNA, 15 bp, Homo sapiens
cctagtccctagggc

SEQ ID NO: 1227660 - DNA, 15 bp, Homo sapiens
ccctagtccctaggg

SEQ ID NO: 1227661 - DNA, 15 bp, Homo sapiens
tccctagtccctagg

SEQ ID NO: 1227662 - DNA, 15 bp, Homo sapiens
ctccctagtccctag

SEQ ID NO: 1227663 - DNA, 15 bp, Homo sapiens
cctccctagtcccta

SEQ ID NO: 1227664 - DNA, 15 bp, Homo sapiens
gcctccctagtccct

SEQ ID NO: 1227665 - DNA, 15 bp, Homo sapiens
agcctccctagtccc

SEQ ID NO: 1227666 - DNA, 15 bp, Homo sapiens
cagcctccctagtcc

SEQ ID NO: 1227667 - DNA, 15 bp, Homo sapiens
ccagcctccctagtc

SEQ ID NO: 1227668 - DNA, 15 bp, Homo sapiens
cccagcctccctagt

SEQ ID NO: 1227669 - DNA, 15 bp, Homo sapiens
ccccagcctccctag

SEQ ID NO: 1227670 - DNA, 15 bp, Homo sapiens
gccccagcctcccta

SEQ ID NO: 1227671 - DNA, 15 bp, Homo sapiens
tgccccagcctccct

SEQ ID NO: 1227672 - DNA, 15 bp, Homo sapiens
aattctcctgcccca

SEQ ID NO: 1227673 - DNA, 15 bp, Homo sapiens
caattctcctgcccc

SEQ ID NO: 1227674 - DNA, 15 bp, Homo sapiens
gcaattctcctgccc

SEQ ID NO: 1227675 - DNA, 15 bp, Homo sapiens
gaagcaattctcctg

SEQ ID NO: 1227676 - DNA, 15 bp, Homo sapiens
tgaagcaattctcct

SEQ ID NO: 1227677 - DNA, 15 bp, Homo sapiens
ctgaagcaattctcc

SEQ ID NO: 1227678 - DNA, 15 bp, Homo sapiens
tctgaagcaattctc

SEQ ID NO: 1227679 - DNA, 15 bp, Homo sapiens
gtctgaagcaattct

SEQ ID NO: 1227680 - DNA, 15 bp, Homo sapiens
ggtctgaagcaattc

SEQ ID NO: 1227681 - DNA, 15 bp, Homo sapiens
tggtctgaagcaatt

SEQ ID NO: 1227682 - DNA, 15 bp, Homo sapiens
ctggtctgaagcaat

SEQ ID NO: 1227683 - DNA, 15 bp, Homo sapiens
cctggtctgaagcaa

SEQ ID NO: 1227684 - DNA, 15 bp, Homo sapiens
tcctggtctgaagca

SEQ ID NO: 1227685 - DNA, 15 bp, Homo sapiens
ctcctggtctgaagc

SEQ ID NO: 1227686 - DNA, 15 bp, Homo sapiens
actcctggtctgaag

SEQ ID NO: 1227687 - DNA, 15 bp, Homo sapiens
aactcctggtctgaa

SEQ ID NO: 1227688 - DNA, 15 bp, Homo sapiens
aaactcctggtctga

SEQ ID NO: 1227689 - DNA, 15 bp, Homo sapiens
caaactcctggtctg

SEQ ID NO: 1227690 - DNA, 15 bp, Homo sapiens
gtcactgcagtctca

SEQ ID NO: 1227691 - DNA, 15 bp, Homo sapiens
agtcactgcagtctc

SEQ ID NO: 1227692 - DNA, 15 bp, Homo sapiens
aagtcactgcagtct

SEQ ID NO: 1227693 - DNA, 15 bp, Homo sapiens
taagtcactgcagtc

SEQ ID NO: 1227694 - DNA, 15 bp, Homo sapiens
ataagtcactgcagt

SEQ ID NO: 1227695 - DNA, 15 bp, Homo sapiens
cataagtcactgcag

SEQ ID NO: 1227696 - DNA, 15 bp, Homo sapiens
tcataagtcactgca

SEQ ID NO: 1227697 - DNA, 15 bp, Homo sapiens
gtcataagtcactgc

SEQ ID NO: 1227698 - DNA, 15 bp, Homo sapiens
tgtcataagtcactg

SEQ ID NO: 1227699 - DNA, 15 bp, Homo sapiens
ctgtcataagtcact

SEQ ID NO: 1227700 - DNA, 15 bp, Homo sapiens
gctgtcataagtcac

SEQ ID NO: 1227701 - DNA, 15 bp, Homo sapiens
tgctgtcataagtca

SEQ ID NO: 1227702 - DNA, 15 bp, Homo sapiens
atgctgtcataagtc

SEQ ID NO: 1227703 - DNA, 15 bp, Homo sapiens
gatgctgtcataagt

SEQ ID NO: 1227704 - DNA, 15 bp, Homo sapiens
tgatgctgtcataag

SEQ ID NO: 1227705 - DNA, 15 bp, Homo sapiens
gtgatgctgtcataa

SEQ ID NO: 1227706 - DNA, 15 bp, Homo sapiens
agtgatgctgtcata

SEQ ID NO: 1227707 - DNA, 15 bp, Homo sapiens
cagtgatgctgtcat

SEQ ID NO: 1227708 - DNA, 15 bp, Homo sapiens
gcagtgatgctgtca

SEQ ID NO: 1227709 - DNA, 15 bp, Homo sapiens
tgcagtgatgctgtc

SEQ ID NO: 1227710 - DNA, 15 bp, Homo sapiens
gtgcagtgatgctgt

SEQ ID NO: 1227711 - DNA, 15 bp, Homo sapiens
agtgcagtgatgctg

SEQ ID NO: 1227712 - DNA, 15 bp, Homo sapiens
gagtgcagtgatgct

SEQ ID NO: 1227713 - DNA, 15 bp, Homo sapiens
tgagtgcagtgatgc

SEQ ID NO: 1227714 - DNA, 15 bp, Homo sapiens
ttgagtgcagtgatg

SEQ ID NO: 1227715 - DNA, 15 bp, Homo sapiens
cttgagtgcagtgat

SEQ ID NO: 1227716 - DNA, 15 bp, Homo sapiens
gcttgagtgcagtga

SEQ ID NO: 1227717 - DNA, 15 bp, Homo sapiens
ggcttgagtgcagtg

SEQ ID NO: 1227718 - DNA, 15 bp, Homo sapiens
aggcttgagtgcagt

SEQ ID NO: 1227719 - DNA, 15 bp, Homo sapiens
caggcttgagtgcag

SEQ ID NO: 1227720 - DNA, 15 bp, Homo sapiens
ccaggcttgagtgca

SEQ ID NO: 1227721 - DNA, 15 bp, Homo sapiens
cccaggcttgagtgc

SEQ ID NO: 1227722 - DNA, 15 bp, Homo sapiens
acccaggcttgagtg

SEQ ID NO: 1227723 - DNA, 15 bp, Homo sapiens
cacccaggcttgagt

SEQ ID NO: 1227724 - DNA, 15 bp, Homo sapiens
tcacccaggcttgag

SEQ ID NO: 1227725 - DNA, 15 bp, Homo sapiens
gtcacccaggcttga

SEQ ID NO: 1227726 - DNA, 15 bp, Homo sapiens
tgtcacccaggcttg

SEQ ID NO: 1227727 - DNA, 15 bp, Homo sapiens
ctgtcacccaggctt

SEQ ID NO: 1227728 - DNA, 15 bp, Homo sapiens
ggttttgctctgtca

SEQ ID NO: 1227729 - DNA, 15 bp, Homo sapiens
gggttttgctctgtc

SEQ ID NO: 1227730 - DNA, 15 bp, Homo sapiens
agggttttgctctgt

SEQ ID NO: 1227731 - DNA, 15 bp, Homo sapiens
cagggttttgctctg

SEQ ID NO: 1227732 - DNA, 15 bp, Homo sapiens
acagggttttgctct

SEQ ID NO: 1227733 - DNA, 15 bp, Homo sapiens
aacagggttttgctc

SEQ ID NO: 1227734 - DNA, 15 bp, Homo sapiens
aaacagggttttgct

SEQ ID NO: 1227735 - DNA, 15 bp, Homo sapiens
gaaacagggttttgc

SEQ ID NO: 1227736 - DNA, 15 bp, Homo sapiens
agaaacagggttttg

SEQ ID NO: 1227737 - DNA, 15 bp, Homo sapiens
aagaaacagggtttt

SEQ ID NO: 1227738 - DNA, 15 bp, Homo sapiens
aaagaaacagggttt

SEQ ID NO: 1227739 - DNA, 15 bp, Homo sapiens
aaaagaaacagggtt

SEQ ID NO: 1227740 - DNA, 15 bp, Homo sapiens
aaaaagaaacagggt

SEQ ID NO: 1227741 - DNA, 15 bp, Homo sapiens
aaaaaagaaacaggg

SEQ ID NO: 1227742 - DNA, 15 bp, Homo sapiens
aaaaaaagaaacagg

SEQ ID NO: 1227743 - DNA, 15 bp, Homo sapiens
aaaaaaaagaaacag

SEQ ID NO: 1227744 - DNA, 15 bp, Homo sapiens
gaagactccgtctca

SEQ ID NO: 1227745 - DNA, 15 bp, Homo sapiens
ggaagactccgtctc

SEQ ID NO: 1227746 - DNA, 15 bp, Homo sapiens
aggaagactccgtct

SEQ ID NO: 1227747 - DNA, 15 bp, Homo sapiens
gaggaagactccgtc

SEQ ID NO: 1227748 - DNA, 15 bp, Homo sapiens
agaggaagactccgt

SEQ ID NO: 1227749 - DNA, 15 bp, Homo sapiens
cagaggaagactccg

SEQ ID NO: 1227750 - DNA, 15 bp, Homo sapiens
acagaggaagactcc

SEQ ID NO: 1227751 - DNA, 15 bp, Homo sapiens
gacagaggaagactc

SEQ ID NO: 1227752 - DNA, 15 bp, Homo sapiens
cgacagaggaagact

SEQ ID NO: 1227753 - DNA, 15 bp, Homo sapiens
gcgacagaggaagac

SEQ ID NO: 1227754 - DNA, 15 bp, Homo sapiens
ggcgacagaggaaga

SEQ ID NO: 1227755 - DNA, 15 bp, Homo sapiens
gggcgacagaggaag

SEQ ID NO: 1227756 - DNA, 15 bp, Homo sapiens
tgggcgacagaggaa

SEQ ID NO: 1227757 - DNA, 15 bp, Homo sapiens
ctgggcgacagagga

SEQ ID NO: 1227758 - DNA, 15 bp, Homo sapiens
cctgggcgacagagg

SEQ ID NO: 1227759 - DNA, 15 bp, Homo sapiens
ggcctgggcgacaga

SEQ ID NO: 1227760 - DNA, 15 bp, Homo sapiens
cggcctgggcgacag

SEQ ID NO: 1227761 - DNA, 15 bp, Homo sapiens
ccggcctgggcgaca

SEQ ID NO: 1227762 - DNA, 15 bp, Homo sapiens
tccggcctgggcgac

SEQ ID NO: 1227763 - DNA, 15 bp, Homo sapiens
ctccggcctgggcga

SEQ ID NO: 1227764 - DNA, 15 bp, Homo sapiens
actccggcctgggcg

SEQ ID NO: 1227765 - DNA, 15 bp, Homo sapiens
cactccggcctgggc

SEQ ID NO: 1227766 - DNA, 15 bp, Homo sapiens
gcactccggcctggg

SEQ ID NO: 1227767 - DNA, 15 bp, Homo sapiens
tgcactccggcctgg

SEQ ID NO: 1227768 - DNA, 15 bp, Homo sapiens
ctgcactccggcctg

SEQ ID NO: 1227769 - DNA, 15 bp, Homo sapiens
actgcactccggcct

SEQ ID NO: 1227770 - DNA, 15 bp, Homo sapiens
cactgcactccggcc

SEQ ID NO: 1227771 - DNA, 15 bp, Homo sapiens
ccactgcactccggc

SEQ ID NO: 1227772 - DNA, 15 bp, Homo sapiens
gccactgcactccgg

SEQ ID NO: 1227773 - DNA, 15 bp, Homo sapiens
tgccactgcactccg

SEQ ID NO: 1227774 - DNA, 15 bp, Homo sapiens
aagatggtgccactg

SEQ ID NO: 1227775 - DNA, 15 bp, Homo sapiens
caagatggtgccact

SEQ ID NO: 1227776 - DNA, 15 bp, Homo sapiens
ccaagatggtgccac

SEQ ID NO: 1227777 - DNA, 15 bp, Homo sapiens
gccaagatggtgcca

SEQ ID NO: 1227778 - DNA, 15 bp, Homo sapiens
agccaagatggtgcc

SEQ ID NO: 1227779 - DNA, 15 bp, Homo sapiens
gagccaagatggtgc

SEQ ID NO: 1227780 - DNA, 15 bp, Homo sapiens
tgagccaagatggtg

SEQ ID NO: 1227781 - DNA, 15 bp, Homo sapiens
gtgagccaagatggt

SEQ ID NO: 1227782 - DNA, 15 bp, Homo sapiens
atgcagtgagccaag

SEQ ID NO: 1227783 - DNA, 15 bp, Homo sapiens
gatgcagtgagccaa

SEQ ID NO: 1227784 - DNA, 15 bp, Homo sapiens
tgatgcagtgagcca

SEQ ID NO: 1227785 - DNA, 15 bp, Homo sapiens
atgatgcagtgagcc

SEQ ID NO: 1227786 - DNA, 15 bp, Homo sapiens
gatgatgcagtgagc

SEQ ID NO: 1227787 - DNA, 15 bp, Homo sapiens
ggatgatgcagtgag

SEQ ID NO: 1227788 - DNA, 15 bp, Homo sapiens
cggatgatgcagtga

SEQ ID NO: 1227789 - DNA, 15 bp, Homo sapiens
gcggatgatgcagtg

SEQ ID NO: 1227790 - DNA, 15 bp, Homo sapiens
ggcggatgatgcagt

SEQ ID NO: 1227791 - DNA, 15 bp, Homo sapiens
aggcggatgatgcag

SEQ ID NO: 1227792 - DNA, 15 bp, Homo sapiens
gaggcggatgatgca

SEQ ID NO: 1227793 - DNA, 15 bp, Homo sapiens
ggaggcggatgatgc

SEQ ID NO: 1227794 - DNA, 15 bp, Homo sapiens
gggaggcggatgatg

SEQ ID NO: 1227795 - DNA, 15 bp, Homo sapiens
tgggaggcggatgat

SEQ ID NO: 1227796 - DNA, 15 bp, Homo sapiens
ctgggaggcggatga

SEQ ID NO: 1227797 - DNA, 15 bp, Homo sapiens
cctgggaggcggatg

SEQ ID NO: 1227798 - DNA, 15 bp, Homo sapiens
acctgggaggcggat

SEQ ID NO: 1227799 - DNA, 15 bp, Homo sapiens
ctgaacctgggaggc

SEQ ID NO: 1227800 - DNA, 15 bp, Homo sapiens
tctgaacctgggagg

SEQ ID NO: 1227801 - DNA, 15 bp, Homo sapiens
ctctgaacctgggag

SEQ ID NO: 1227802 - DNA, 15 bp, Homo sapiens
tctctgaacctggga

SEQ ID NO: 1227803 - DNA, 15 bp, Homo sapiens
atctctgaacctggg

SEQ ID NO: 1227804 - DNA, 15 bp, Homo sapiens
aatctctgaacctgg

SEQ ID NO: 1227805 - DNA, 15 bp, Homo sapiens
gaatctctgaacctg

SEQ ID NO: 1227806 - DNA, 15 bp, Homo sapiens
agaatctctgaacct

SEQ ID NO: 1227807 - DNA, 15 bp, Homo sapiens
gagaatctctgaacc

SEQ ID NO: 1227808 - DNA, 15 bp, Homo sapiens
tgagaatctctgaac

SEQ ID NO: 1227809 - DNA, 15 bp, Homo sapiens
atgagaatctctgaa

SEQ ID NO: 1227810 - DNA, 15 bp, Homo sapiens
catgagaatctctga

SEQ ID NO: 1227811 - DNA, 15 bp, Homo sapiens
gcatgagaatctctg

SEQ ID NO: 1227812 - DNA, 15 bp, Homo sapiens
ggcatgagaatctct

SEQ ID NO: 1227813 - DNA, 15 bp, Homo sapiens
aggcatgagaatctc

SEQ ID NO: 1227814 - DNA, 15 bp, Homo sapiens
gaggcatgagaatct

SEQ ID NO: 1227815 - DNA, 15 bp, Homo sapiens
ctgaggcatgagaat

SEQ ID NO: 1227816 - DNA, 15 bp, Homo sapiens
gctgaggcatgagaa

SEQ ID NO: 1227817 - DNA, 15 bp, Homo sapiens
ggctgaggcatgaga

SEQ ID NO: 1227818 - DNA, 15 bp, Homo sapiens
aggctgaggcatgag

SEQ ID NO: 1227819 - DNA, 15 bp, Homo sapiens
gaggctgaggcatga

SEQ ID NO: 1227820 - DNA, 15 bp, Homo sapiens
agaggctgaggcatg

SEQ ID NO: 1227821 - DNA, 15 bp, Homo sapiens
tagaggctgaggcat

SEQ ID NO: 1227822 - DNA, 15 bp, Homo sapiens
ctagaggctgaggca

SEQ ID NO: 1227823 - DNA, 15 bp, Homo sapiens
tctagaggctgaggc

SEQ ID NO: 1227824 - DNA, 15 bp, Homo sapiens
ctctagaggctgagg

SEQ ID NO: 1227825 - DNA, 15 bp, Homo sapiens
gctctagaggctgag

SEQ ID NO: 1227826 - DNA, 15 bp, Homo sapiens
tgctctagaggctga

SEQ ID NO: 1227827 - DNA, 15 bp, Homo sapiens
ctgctctagaggctg

SEQ ID NO: 1227828 - DNA, 15 bp, Homo sapiens
cctgctctagaggct

SEQ ID NO: 1227829 - DNA, 15 bp, Homo sapiens
acctgctctagaggc

SEQ ID NO: 1227830 - DNA, 15 bp, Homo sapiens
cacctgctctagagg

SEQ ID NO: 1227831 - DNA, 15 bp, Homo sapiens
ccacctgctctagag

SEQ ID NO: 1227832 - DNA, 15 bp, Homo sapiens
cccacctgctctaga

SEQ ID NO: 1227833 - DNA, 15 bp, Homo sapiens
tcccacctgctctag

SEQ ID NO: 1227834 - DNA, 15 bp, Homo sapiens
atcccacctgctcta

SEQ ID NO: 1227835 - DNA, 15 bp, Homo sapiens
aatcccacctgctct

SEQ ID NO: 1227836 - DNA, 15 bp, Homo sapiens
taatcccacctgctc

SEQ ID NO: 1227837 - DNA, 15 bp, Homo sapiens
ataatcccacctgct

SEQ ID NO: 1227838 - DNA, 15 bp, Homo sapiens
tataatcccacctgc

SEQ ID NO: 1227839 - DNA, 15 bp, Homo sapiens
ctataatcccacctg

SEQ ID NO: 1227840 - DNA, 15 bp, Homo sapiens
cctataatcccacct

SEQ ID NO: 1227841 - DNA, 15 bp, Homo sapiens
acctataatcccacc

SEQ ID NO: 1227842 - DNA, 15 bp, Homo sapiens
cacctataatcccac

SEQ ID NO: 1227843 - DNA, 15 bp, Homo sapiens
ctacacctataatcc

SEQ ID NO: 1227844 - DNA, 15 bp, Homo sapiens
cctacacctataatc

SEQ ID NO: 1227845 - DNA, 15 bp, Homo sapiens
gcctacacctataat

SEQ ID NO: 1227846 - DNA, 15 bp, Homo sapiens
ggcctacacctataa

SEQ ID NO: 1227847 - DNA, 15 bp, Homo sapiens
tggcctacacctata

SEQ ID NO: 1227848 - DNA, 15 bp, Homo sapiens
gtggcctacacctat

SEQ ID NO: 1227849 - DNA, 15 bp, Homo sapiens
ggtggcctacaccta

SEQ ID NO: 1227850 - DNA, 15 bp, Homo sapiens
tggtggcctacacct

SEQ ID NO: 1227851 - DNA, 15 bp, Homo sapiens
atggtggcctacacc

SEQ ID NO: 1227852 - DNA, 15 bp, Homo sapiens
catggtggcctacac

SEQ ID NO: 1227853 - DNA, 15 bp, Homo sapiens
gcatggtggcctaca

SEQ ID NO: 1227854 - DNA, 15 bp, Homo sapiens
ggcatggtggcctac

SEQ ID NO: 1227855 - DNA, 15 bp, Homo sapiens
gggcatggtggccta

SEQ ID NO: 1227856 - DNA, 15 bp, Homo sapiens
ctgggcatggtggcc

SEQ ID NO: 1227857 - DNA, 15 bp, Homo sapiens
ctatctctactaaaa

SEQ ID NO: 1227858 - DNA, 15 bp, Homo sapiens
tctatctctactaaa

SEQ ID NO: 1227859 - DNA, 15 bp, Homo sapiens
ctctatctctactaa

SEQ ID NO: 1227860 - DNA, 15 bp, Homo sapiens
actctatctctacta

SEQ ID NO: 1227861 - DNA, 15 bp, Homo sapiens
aactctatctctact

SEQ ID NO: 1227862 - DNA, 15 bp, Homo sapiens
aaactctatctctac

SEQ ID NO: 1227863 - DNA, 15 bp, Homo sapiens
gaaactctatctcta

SEQ ID NO: 1227864 - DNA, 15 bp, Homo sapiens
tgaaactctatctct

SEQ ID NO: 1227865 - DNA, 15 bp, Homo sapiens
gtgaaactctatctc

SEQ ID NO: 1227866 - DNA, 15 bp, Homo sapiens
ggtgaaactctatct

SEQ ID NO: 1227867 - DNA, 15 bp, Homo sapiens
tggtgaaactctatc

SEQ ID NO: 1227868 - DNA, 15 bp, Homo sapiens
atggtgaaactctat

SEQ ID NO: 1227869 - DNA, 15 bp, Homo sapiens
gaagaccagcctggc

SEQ ID NO: 1227870 - DNA, 15 bp, Homo sapiens
tgaagaccagcctgg

SEQ ID NO: 1227871 - DNA, 15 bp, Homo sapiens
ttgaagaccagcctg

SEQ ID NO: 1227872 - DNA, 15 bp, Homo sapiens
gttgaagaccagcct

SEQ ID NO: 1227873 - DNA, 15 bp, Homo sapiens
agttgaagaccagcc

SEQ ID NO: 1227874 - DNA, 15 bp, Homo sapiens
gagttgaagaccagc

SEQ ID NO: 1227875 - DNA, 15 bp, Homo sapiens
ggagttgaagaccag

SEQ ID NO: 1227876 - DNA, 15 bp, Homo sapiens
caggagttgaagacc

SEQ ID NO: 1227877 - DNA, 15 bp, Homo sapiens
tcaggagttgaagac

SEQ ID NO: 1227878 - DNA, 15 bp, Homo sapiens
gtcaggagttgaaga

SEQ ID NO: 1227879 - DNA, 15 bp, Homo sapiens
ggtcaggagttgaag

SEQ ID NO: 1227880 - DNA, 15 bp, Homo sapiens
aggtcaggagttgaa

SEQ ID NO: 1227881 - DNA, 15 bp, Homo sapiens
gaggtcaggagttga

SEQ ID NO: 1227882 - DNA, 15 bp, Homo sapiens
aggaggatcacctga

SEQ ID NO: 1227883 - DNA, 15 bp, Homo sapiens
taggaggatcacctg

SEQ ID NO: 1227884 - DNA, 15 bp, Homo sapiens
gtaggaggatcacct

SEQ ID NO: 1227885 - DNA, 15 bp, Homo sapiens
ggtaggaggatcacc

SEQ ID NO: 1227886 - DNA, 15 bp, Homo sapiens
aggtaggaggatcac

SEQ ID NO: 1227887 - DNA, 15 bp, Homo sapiens
gaggtaggaggatca

SEQ ID NO: 1227888 - DNA, 15 bp, Homo sapiens
ggctgaggtaggagg

SEQ ID NO: 1227889 - DNA, 15 bp, Homo sapiens
aggctgaggtaggag

SEQ ID NO: 1227890 - DNA, 15 bp, Homo sapiens
gaggctgaggtagga

SEQ ID NO: 1227891 - DNA, 15 bp, Homo sapiens
ggaggctgaggtagg

SEQ ID NO: 1227892 - DNA, 15 bp, Homo sapiens
aatttgggaggctga

SEQ ID NO: 1227893 - DNA, 15 bp, Homo sapiens
caatttgggaggctg

SEQ ID NO: 1227894 - DNA, 15 bp, Homo sapiens
gcaatttgggaggct

SEQ ID NO: 1227895 - DNA, 15 bp, Homo sapiens
agcaatttgggaggc

SEQ ID NO: 1227896 - DNA, 15 bp, Homo sapiens
cagcaatttgggagg

SEQ ID NO: 1227897 - DNA, 15 bp, Homo sapiens
ccagcaatttgggag

SEQ ID NO: 1227898 - DNA, 15 bp, Homo sapiens
cccagcaatttggga

SEQ ID NO: 1227899 - DNA, 15 bp, Homo sapiens
tcccagcaatttggg

SEQ ID NO: 1227900 - DNA, 15 bp, Homo sapiens
atcccagcaatttgg

SEQ ID NO: 1227901 - DNA, 15 bp, Homo sapiens
aatcccagcaatttg

SEQ ID NO: 1227902 - DNA, 15 bp, Homo sapiens
taatcccagcaattt

SEQ ID NO: 1227903 - DNA, 15 bp, Homo sapiens
gtaatcccagcaatt

SEQ ID NO: 1227904 - DNA, 15 bp, Homo sapiens
tgtaatcccagcaat

SEQ ID NO: 1227905 - DNA, 15 bp, Homo sapiens
ctgtaatcccagcaa

SEQ ID NO: 1227906 - DNA, 15 bp, Homo sapiens
ccgcctgtaatccca

SEQ ID NO: 1227907 - DNA, 15 bp, Homo sapiens
cccgcctgtaatccc

SEQ ID NO: 1227908 - DNA, 15 bp, Homo sapiens
tcccgcctgtaatcc

SEQ ID NO: 1227909 - DNA, 15 bp, Homo sapiens
ctcccgcctgtaatc

SEQ ID NO: 1227910 - DNA, 15 bp, Homo sapiens
tctcccgcctgtaat

SEQ ID NO: 1227911 - DNA, 15 bp, Homo sapiens
gtctcccgcctgtaa

SEQ ID NO: 1227912 - DNA, 15 bp, Homo sapiens
tgtctcccgcctgta

SEQ ID NO: 1227913 - DNA, 15 bp, Homo sapiens
gtgtctcccgcctgt

SEQ ID NO: 1227914 - DNA, 15 bp, Homo sapiens
ggtgtctcccgcctg

SEQ ID NO: 1227915 - DNA, 15 bp, Homo sapiens
aggtgtctcccgcct

SEQ ID NO: 1227916 - DNA, 15 bp, Homo sapiens
aaggtgtctcccgcc

SEQ ID NO: 1227917 - DNA, 15 bp, Homo sapiens
caaggtgtctcccgc

SEQ ID NO: 1227918 - DNA, 15 bp, Homo sapiens
gcaaggtgtctcccg

SEQ ID NO: 1227919 - DNA, 15 bp, Homo sapiens
ggcaaggtgtctccc

SEQ ID NO: 1227920 - DNA, 15 bp, Homo sapiens
aggcaaggtgtctcc

SEQ ID NO: 1227921 - DNA, 15 bp, Homo sapiens
caggcaaggtgtctc

SEQ ID NO: 1227922 - DNA, 15 bp, Homo sapiens
ccaggcaaggtgtct

SEQ ID NO: 1227923 - DNA, 15 bp, Homo sapiens
gccaggcaaggtgtc

SEQ ID NO: 1227924 - DNA, 15 bp, Homo sapiens
ggccaggcaaggtgt

SEQ ID NO: 1227925 - DNA, 15 bp, Homo sapiens
tttggccaggcaagg

SEQ ID NO: 1227926 - DNA, 15 bp, Homo sapiens
ttttggccaggcaag

SEQ ID NO: 1227927 - DNA, 15 bp, Homo sapiens
gttttggccaggcaa

SEQ ID NO: 1227928 - DNA, 15 bp, Homo sapiens
ggttttggccaggca

SEQ ID NO: 1227929 - DNA, 15 bp, Homo sapiens
gggttttggccaggc

SEQ ID NO: 1227930 - DNA, 15 bp, Homo sapiens
agggttttggccagg

SEQ ID NO: 1227931 - DNA, 15 bp, Homo sapiens
cagggttttggccag

SEQ ID NO: 1227932 - DNA, 15 bp, Homo sapiens
acagggttttggcca

SEQ ID NO: 1227933 - DNA, 15 bp, Homo sapiens
aacagggttttggcc

SEQ ID NO: 1227934 - DNA, 15 bp, Homo sapiens
aaacagggttttggc

SEQ ID NO: 1227935 - DNA, 15 bp, Homo sapiens
gaaacagggttttgg

SEQ ID NO: 1227936 - DNA, 15 bp, Homo sapiens
ggaaacagggttttg

SEQ ID NO: 1227937 - DNA, 15 bp, Homo sapiens
aggaaacagggtttt

SEQ ID NO: 1227938 - DNA, 15 bp, Homo sapiens
aaggaaacagggttt

SEQ ID NO: 1227939 - DNA, 15 bp, Homo sapiens
taaggaaacagggtt

SEQ ID NO: 1227940 - DNA, 15 bp, Homo sapiens
ttaaggaaacagggt

SEQ ID NO: 1227941 - DNA, 15 bp, Homo sapiens
tttaaggaaacaggg

SEQ ID NO: 1227942 - DNA, 15 bp, Homo sapiens
ttttaaggaaacagg

SEQ ID NO: 1227943 - DNA, 15 bp, Homo sapiens
cttttaaggaaacag

SEQ ID NO: 1227944 - DNA, 15 bp, Homo sapiens
tcttttaaggaaaca

SEQ ID NO: 1227945 - DNA, 15 bp, Homo sapiens
ttcttttaaggaaac

SEQ ID NO: 1227946 - DNA, 15 bp, Homo sapiens
tttcttttaaggaaa

SEQ ID NO: 1227947 - DNA, 15 bp, Homo sapiens
ttttcttttaaggaa

SEQ ID NO: 1227948 - DNA, 15 bp, Homo sapiens
cttttcttttaagga

SEQ ID NO: 1227949 - DNA, 15 bp, Homo sapiens
tcttttcttttaagg

SEQ ID NO: 1227950 - DNA, 15 bp, Homo sapiens
ttcttttcttttaag

SEQ ID NO: 1227951 - DNA, 15 bp, Homo sapiens
tttcttttcttttaa

SEQ ID NO: 1227952 - DNA, 15 bp, Homo sapiens
ttttcttttctttta

SEQ ID NO: 1227953 - DNA, 15 bp, Homo sapiens
ttgttttttttttct

SEQ ID NO: 1227954 - DNA, 15 bp, Homo sapiens
tttgttttttttttc

SEQ ID NO: 1227955 - DNA, 15 bp, Homo sapiens
tgtcttttttgtttt

SEQ ID NO: 1227956 - DNA, 15 bp, Homo sapiens
gtgtcttttttgttt

SEQ ID NO: 1227957 - DNA, 15 bp, Homo sapiens
tgtgtcttttttgtt

SEQ ID NO: 1227958 - DNA, 15 bp, Homo sapiens
ctgtgtcttttttgt

SEQ ID NO: 1227959 - DNA, 15 bp, Homo sapiens
tctgtgtcttttttg

SEQ ID NO: 1227960 - DNA, 15 bp, Homo sapiens
ttctgtgtctttttt

SEQ ID NO: 1227961 - DNA, 15 bp, Homo sapiens
tttctgtgtcttttt

SEQ ID NO: 1227962 - DNA, 15 bp, Homo sapiens
atttctgtgtctttt

SEQ ID NO: 1227963 - DNA, 15 bp, Homo sapiens
aatttctgtgtcttt

SEQ ID NO: 1227964 - DNA, 15 bp, Homo sapiens
aaatttctgtgtctt

SEQ ID NO: 1227965 - DNA, 15 bp, Homo sapiens
caaatttctgtgtct

SEQ ID NO: 1227966 - DNA, 15 bp, Homo sapiens
tcaaatttctgtgtc

SEQ ID NO: 1227967 - DNA, 15 bp, Homo sapiens
ttcaaatttctgtgt

SEQ ID NO: 1227968 - DNA, 15 bp, Homo sapiens
attcaaatttctgtg

SEQ ID NO: 1227969 - DNA, 15 bp, Homo sapiens
aattcaaatttctgt

SEQ ID NO: 1227970 - DNA, 15 bp, Homo sapiens
aaattcaaatttctg

SEQ ID NO: 1227971 - DNA, 15 bp, Homo sapiens
aaaattcaaatttct

SEQ ID NO: 1227972 - DNA, 15 bp, Homo sapiens
caaaattcaaatttc

SEQ ID NO: 1227973 - DNA, 15 bp, Homo sapiens
acaaaattcaaattt

SEQ ID NO: 1227974 - DNA, 15 bp, Homo sapiens
tacaaaattcaaatt

SEQ ID NO: 1227975 - DNA, 15 bp, Homo sapiens
atacaaaattcaaat

SEQ ID NO: 1227976 - DNA, 15 bp, Homo sapiens
tatacaaaattcaaa

SEQ ID NO: 1227977 - DNA, 15 bp, Homo sapiens
gtatacaaaattcaa

SEQ ID NO: 1227978 - DNA, 15 bp, Homo sapiens
agtatacaaaattca

SEQ ID NO: 1227979 - DNA, 15 bp, Homo sapiens
aagtatacaaaattc

SEQ ID NO: 1227980 - DNA, 15 bp, Homo sapiens
aaagtatacaaaatt

SEQ ID NO: 1227981 - DNA, 15 bp, Homo sapiens
aaaagtatacaaaat

SEQ ID NO: 1227982 - DNA, 15 bp, Homo sapiens
gaaaagtatacaaaa

SEQ ID NO: 1227983 - DNA, 15 bp, Homo sapiens
tgaaaagtatacaaa

SEQ ID NO: 1227984 - DNA, 15 bp, Homo sapiens
gtgaaaagtatacaa

SEQ ID NO: 1227985 - DNA, 15 bp, Homo sapiens
tgtgaaaagtataca

SEQ ID NO: 1227986 - DNA, 15 bp, Homo sapiens
ttgtgaaaagtatac

SEQ ID NO: 1227987 - DNA, 15 bp, Homo sapiens
cttgtgaaaagtata

SEQ ID NO: 1227988 - DNA, 15 bp, Homo sapiens
acttgtgaaaagtat

SEQ ID NO: 1227989 - DNA, 15 bp, Homo sapiens
aacttgtgaaaagta

SEQ ID NO: 1227990 - DNA, 15 bp, Homo sapiens
taacttgtgaaaagt

SEQ ID NO: 1227991 - DNA, 15 bp, Homo sapiens
ataacttgtgaaaag

SEQ ID NO: 1227992 - DNA, 15 bp, Homo sapiens
tataacttgtgaaaa

SEQ ID NO: 1227993 - DNA, 15 bp, Homo sapiens
ttataacttgtgaaa

SEQ ID NO: 1227994 - DNA, 15 bp, Homo sapiens
tttataacttgtgaa

SEQ ID NO: 1227995 - DNA, 15 bp, Homo sapiens
ttttataacttgtga

SEQ ID NO: 1227996 - DNA, 15 bp, Homo sapiens
attttataacttgtg

SEQ ID NO: 1227997 - DNA, 15 bp, Homo sapiens
tattttataacttgt

SEQ ID NO: 1227998 - DNA, 15 bp, Homo sapiens
atattttataacttg

SEQ ID NO: 1227999 - DNA, 15 bp, Homo sapiens
aatattttataactt

SEQ ID NO: 1228000 - DNA, 15 bp, Homo sapiens
taatattttataact

SEQ ID NO: 1228001 - DNA, 15 bp, Homo sapiens
ataatattttataac

SEQ ID NO: 1228002 - DNA, 15 bp, Homo sapiens
aataatattttataa

SEQ ID NO: 1228003 - DNA, 15 bp, Homo sapiens
aaataatattttata

SEQ ID NO: 1228004 - DNA, 15 bp, Homo sapiens
aaaataatattttat

SEQ ID NO: 1228005 - DNA, 15 bp, Homo sapiens
caaaataatatttta

SEQ ID NO: 1228006 - DNA, 15 bp, Homo sapiens
tcaaaataatatttt

SEQ ID NO: 1228007 - DNA, 15 bp, Homo sapiens
atcaaaataatattt

SEQ ID NO: 1228008 - DNA, 15 bp, Homo sapiens
aatcaaaataatatt

SEQ ID NO: 1228009 - DNA, 15 bp, Homo sapiens
aaatcaaaataatat

SEQ ID NO: 1228010 - DNA, 15 bp, Homo sapiens
aaaatcaaaataata

SEQ ID NO: 1228011 - DNA, 15 bp, Homo sapiens
aaaaatcaaaataat

SEQ ID NO: 1228012 - DNA, 15 bp, Homo sapiens
gaaaaatcaaaataa

SEQ ID NO: 1228013 - DNA, 15 bp, Homo sapiens
ggaaaaatcaaaata

SEQ ID NO: 1228014 - DNA, 15 bp, Homo sapiens
gggaaaaatcaaaat

SEQ ID NO: 1228015 - DNA, 15 bp, Homo sapiens
ggggaaaaatcaaaa

SEQ ID NO: 1228016 - DNA, 15 bp, Homo sapiens
aggggaaaaatcaaa

SEQ ID NO: 1228017 - DNA, 15 bp, Homo sapiens
taggggaaaaatcaa

SEQ ID NO: 1228018 - DNA, 15 bp, Homo sapiens
ttaggggaaaaatca

SEQ ID NO: 1228019 - DNA, 15 bp, Homo sapiens
attaggggaaaaatc

SEQ ID NO: 1228020 - DNA, 15 bp, Homo sapiens
gattaggggaaaaat

SEQ ID NO: 1228021 - DNA, 15 bp, Homo sapiens
tgattaggggaaaaa

SEQ ID NO: 1228022 - DNA, 15 bp, Homo sapiens
atgattaggggaaaa

SEQ ID NO: 1228023 - DNA, 15 bp, Homo sapiens
aatgattaggggaaa

SEQ ID NO: 1228024 - DNA, 15 bp, Homo sapiens
aaatgattaggggaa

SEQ ID NO: 1228025 - DNA, 15 bp, Homo sapiens
taaatgattagggga

SEQ ID NO: 1228026 - DNA, 15 bp, Homo sapiens
ttaaatgattagggg

SEQ ID NO: 1228027 - DNA, 15 bp, Homo sapiens
tttaaatgattaggg

SEQ ID NO: 1228028 - DNA, 15 bp, Homo sapiens
ctttaaatgattagg

SEQ ID NO: 1228029 - DNA, 15 bp, Homo sapiens
tctttaaatgattag

SEQ ID NO: 1228030 - DNA, 15 bp, Homo sapiens
atctttaaatgatta

SEQ ID NO: 1228031 - DNA, 15 bp, Homo sapiens
catctttaaatgatt

SEQ ID NO: 1228032 - DNA, 15 bp, Homo sapiens
acatctttaaatgat

SEQ ID NO: 1228033 - DNA, 15 bp, Homo sapiens
cacatctttaaatga

SEQ ID NO: 1228034 - DNA, 15 bp, Homo sapiens
tcacatctttaaatg

SEQ ID NO: 1228035 - DNA, 15 bp, Homo sapiens
ttcacatctttaaat

SEQ ID NO: 1228036 - DNA, 15 bp, Homo sapiens
tttcacatctttaaa

SEQ ID NO: 1228037 - DNA, 15 bp, Homo sapiens
ttttcacatctttaa

SEQ ID NO: 1228038 - DNA, 15 bp, Homo sapiens
attttcacatcttta

SEQ ID NO: 1228039 - DNA, 15 bp, Homo sapiens
gattttcacatcttt

SEQ ID NO: 1228040 - DNA, 15 bp, Homo sapiens
tgattttcacatctt

SEQ ID NO: 1228041 - DNA, 15 bp, Homo sapiens
atgattttcacatct

SEQ ID NO: 1228042 - DNA, 15 bp, Homo sapiens
gatgattttcacatc

SEQ ID NO: 1228043 - DNA, 15 bp, Homo sapiens
ggatgattttcacat

SEQ ID NO: 1228044 - DNA, 15 bp, Homo sapiens
aggatgattttcaca

SEQ ID NO: 1228045 - DNA, 15 bp, Homo sapiens
aaggatgattttcac

SEQ ID NO: 1228046 - DNA, 15 bp, Homo sapiens
taaggatgattttca

SEQ ID NO: 1228047 - DNA, 15 bp, Homo sapiens
ctaaggatgattttc

SEQ ID NO: 1228048 - DNA, 15 bp, Homo sapiens
actaaggatgatttt

SEQ ID NO: 1228049 - DNA, 15 bp, Homo sapiens
aactaaggatgattt

SEQ ID NO: 1228050 - DNA, 15 bp, Homo sapiens
caactaaggatgatt

SEQ ID NO: 1228051 - DNA, 15 bp, Homo sapiens
ccaactaaggatgat

SEQ ID NO: 1228052 - DNA, 15 bp, Homo sapiens
gccaactaaggatga

SEQ ID NO: 1228053 - DNA, 15 bp, Homo sapiens
agccaactaaggatg

SEQ ID NO: 1228054 - DNA, 15 bp, Homo sapiens
cagccaactaaggat

SEQ ID NO: 1228055 - DNA, 15 bp, Homo sapiens
ccagccaactaagga

SEQ ID NO: 1228056 - DNA, 15 bp, Homo sapiens
cccagccaactaagg

SEQ ID NO: 1228057 - DNA, 15 bp, Homo sapiens
gcccagccaactaag

SEQ ID NO: 1228058 - DNA, 15 bp, Homo sapiens
cgcccagccaactaa

SEQ ID NO: 1228059 - DNA, 15 bp, Homo sapiens
acgcccagccaacta

SEQ ID NO: 1228060 - DNA, 15 bp, Homo sapiens
cacgcccagccaact

SEQ ID NO: 1228061 - DNA, 15 bp, Homo sapiens
ccacgcccagccaac

SEQ ID NO: 1228062 - DNA, 15 bp, Homo sapiens
tcttgaactcccgac

SEQ ID NO: 1228063 - DNA, 15 bp, Homo sapiens
atcttgaactcccga

SEQ ID NO: 1228064 - DNA, 15 bp, Homo sapiens
gatcttgaactcccg

SEQ ID NO: 1228065 - DNA, 15 bp, Homo sapiens
tgatcttgaactccc

SEQ ID NO: 1228066 - DNA, 15 bp, Homo sapiens
ctgatcttgaactcc

SEQ ID NO: 1228067 - DNA, 15 bp, Homo sapiens
gctgatcttgaactc

SEQ ID NO: 1228068 - DNA, 15 bp, Homo sapiens
ggctgatcttgaact

SEQ ID NO: 1228069 - DNA, 15 bp, Homo sapiens
aggctgatcttgaac

SEQ ID NO: 1228070 - DNA, 15 bp, Homo sapiens
caggctgatcttgaa

SEQ ID NO: 1228071 - DNA, 15 bp, Homo sapiens
tcaggctgatcttga

SEQ ID NO: 1228072 - DNA, 15 bp, Homo sapiens
gtcaggctgatcttg

SEQ ID NO: 1228073 - DNA, 15 bp, Homo sapiens
ggtcaggctgatctt

SEQ ID NO: 1228074 - DNA, 15 bp, Homo sapiens
tggtcaggctgatct

SEQ ID NO: 1228075 - DNA, 15 bp, Homo sapiens
ttggtcaggctgatc

SEQ ID NO: 1228076 - DNA, 15 bp, Homo sapiens
gttggtcaggctgat

SEQ ID NO: 1228077 - DNA, 15 bp, Homo sapiens
tgttggtcaggctga

SEQ ID NO: 1228078 - DNA, 15 bp, Homo sapiens
cgacggggtttctcc

SEQ ID NO: 1228079 - DNA, 15 bp, Homo sapiens
gcgacggggtttctc

SEQ ID NO: 1228080 - DNA, 15 bp, Homo sapiens
agcgacggggtttct

SEQ ID NO: 1228081 - DNA, 15 bp, Homo sapiens
tagcgacggggtttc

SEQ ID NO: 1228082 - DNA, 15 bp, Homo sapiens
gtagcgacggggttt

SEQ ID NO: 1228083 - DNA, 15 bp, Homo sapiens
agtagcgacggggtt

SEQ ID NO: 1228084 - DNA, 15 bp, Homo sapiens
tagtagcgacggggt

SEQ ID NO: 1228085 - DNA, 15 bp, Homo sapiens
ttagtagcgacgggg

SEQ ID NO: 1228086 - DNA, 15 bp, Homo sapiens
tttagtagcgacggg

SEQ ID NO: 1228087 - DNA, 15 bp, Homo sapiens
ttttagtagcgacgg

SEQ ID NO: 1228088 - DNA, 15 bp, Homo sapiens
tttttagtagcgacg

SEQ ID NO: 1228089 - DNA, 15 bp, Homo sapiens
atttttagtagcgac

SEQ ID NO: 1228090 - DNA, 15 bp, Homo sapiens
tatttttagtagcga

SEQ ID NO: 1228091 - DNA, 15 bp, Homo sapiens
gtatttttagtagcg

SEQ ID NO: 1228092 - DNA, 15 bp, Homo sapiens
tgtatttttagtagc

SEQ ID NO: 1228093 - DNA, 15 bp, Homo sapiens
ccccggctaattttg

SEQ ID NO: 1228094 - DNA, 15 bp, Homo sapiens
accccggctaatttt

SEQ ID NO: 1228095 - DNA, 15 bp, Homo sapiens
caccccggctaattt

SEQ ID NO: 1228096 - DNA, 15 bp, Homo sapiens
ccaccccggctaatt

SEQ ID NO: 1228097 - DNA, 15 bp, Homo sapiens
accaccccggctaat

SEQ ID NO: 1228098 - DNA, 15 bp, Homo sapiens
caccaccccggctaa

SEQ ID NO: 1228099 - DNA, 15 bp, Homo sapiens
ccaccaccccggcta

SEQ ID NO: 1228100 - DNA, 15 bp, Homo sapiens
gccaccaccccggct

SEQ ID NO: 1228101 - DNA, 15 bp, Homo sapiens
cgccaccaccccggc

SEQ ID NO: 1228102 - DNA, 15 bp, Homo sapiens
gcgccaccaccccgg

SEQ ID NO: 1228103 - DNA, 15 bp, Homo sapiens
tgcgccaccaccccg

SEQ ID NO: 1228104 - DNA, 15 bp, Homo sapiens
atgcgccaccacccc

SEQ ID NO: 1228105 - DNA, 15 bp, Homo sapiens
catgcgccaccaccc

SEQ ID NO: 1228106 - DNA, 15 bp, Homo sapiens
gcatgcgccaccacc

SEQ ID NO: 1228107 - DNA, 15 bp, Homo sapiens
ctccgtctcccaggt

SEQ ID NO: 1228108 - DNA, 15 bp, Homo sapiens
cctccgtctcccagg

SEQ ID NO: 1228109 - DNA, 15 bp, Homo sapiens
acctccgtctcccag

SEQ ID NO: 1228110 - DNA, 15 bp, Homo sapiens
aacctccgtctccca

SEQ ID NO: 1228111 - DNA, 15 bp, Homo sapiens
gcctgggctggagtg

SEQ ID NO: 1228112 - DNA, 15 bp, Homo sapiens
cgcctgggctggagt

SEQ ID NO: 1228113 - DNA, 15 bp, Homo sapiens
tcgcctgggctggag

SEQ ID NO: 1228114 - DNA, 15 bp, Homo sapiens
gtcgcctgggctgga

SEQ ID NO: 1228115 - DNA, 15 bp, Homo sapiens
tgtcgcctgggctgg

SEQ ID NO: 1228116 - DNA, 15 bp, Homo sapiens
ctgtcgcctgggctg

SEQ ID NO: 1228117 - DNA, 15 bp, Homo sapiens
tctgtcgcctgggct

SEQ ID NO: 1228118 - DNA, 15 bp, Homo sapiens
atctgtcgcctgggc

SEQ ID NO: 1228119 - DNA, 15 bp, Homo sapiens
gatctgtcgcctggg

SEQ ID NO: 1228120 - DNA, 15 bp, Homo sapiens
cgatctgtcgcctgg

SEQ ID NO: 1228121 - DNA, 15 bp, Homo sapiens
tcgatctgtcgcctg

SEQ ID NO: 1228122 - DNA, 15 bp, Homo sapiens
ctcgatctgtcgcct

SEQ ID NO: 1228123 - DNA, 15 bp, Homo sapiens
tctcgatctgtcgcc

SEQ ID NO: 1228124 - DNA, 15 bp, Homo sapiens
gtctcgatctgtcgc

SEQ ID NO: 1228125 - DNA, 15 bp, Homo sapiens
agtctcgatctgtcg

SEQ ID NO: 1228126 - DNA, 15 bp, Homo sapiens
gagtctcgatctgtc

SEQ ID NO: 1228127 - DNA, 15 bp, Homo sapiens
agagtctcgatctgt

SEQ ID NO: 1228128 - DNA, 15 bp, Homo sapiens
cagagtctcgatctg

SEQ ID NO: 1228129 - DNA, 15 bp, Homo sapiens
acagagtctcgatct

SEQ ID NO: 1228130 - DNA, 15 bp, Homo sapiens
gacagagtctcgatc

SEQ ID NO: 1228131 - DNA, 15 bp, Homo sapiens
agacagagtctcgat

SEQ ID NO: 1228132 - DNA, 15 bp, Homo sapiens
gagacagagtctcga

SEQ ID NO: 1228133 - DNA, 15 bp, Homo sapiens
atttttctttctttc

SEQ ID NO: 1228134 - DNA, 15 bp, Homo sapiens
acatttttctttctt

SEQ ID NO: 1228135 - DNA, 15 bp, Homo sapiens
cacatttttctttct

SEQ ID NO: 1228136 - DNA, 15 bp, Homo sapiens
ccacatttttctttc

SEQ ID NO: 1228137 - DNA, 15 bp, Homo sapiens
accacatttttcttt

SEQ ID NO: 1228138 - DNA, 15 bp, Homo sapiens
taccacatttttctt

SEQ ID NO: 1228139 - DNA, 15 bp, Homo sapiens
gtaccacatttttct

SEQ ID NO: 1228140 - DNA, 15 bp, Homo sapiens
agtaccacatttttc

SEQ ID NO: 1228141 - DNA, 15 bp, Homo sapiens
aagtaccacattttt

SEQ ID NO: 1228142 - DNA, 15 bp, Homo sapiens
ttaagtaccacattt

SEQ ID NO: 1228143 - DNA, 15 bp, Homo sapiens
tttaagtaccacatt

SEQ ID NO: 1228144 - DNA, 15 bp, Homo sapiens
atttaagtaccacat

SEQ ID NO: 1228145 - DNA, 15 bp, Homo sapiens
aatttaagtaccaca

SEQ ID NO: 1228146 - DNA, 15 bp, Homo sapiens
gaatttaagtaccac

SEQ ID NO: 1228147 - DNA, 15 bp, Homo sapiens
tgaatttaagtacca

SEQ ID NO: 1228148 - DNA, 15 bp, Homo sapiens
ctgaatttaagtacc

SEQ ID NO: 1228149 - DNA, 15 bp, Homo sapiens
gctgaatttaagtac

SEQ ID NO: 1228150 - DNA, 15 bp, Homo sapiens
ggctgaatttaagta

SEQ ID NO: 1228151 - DNA, 15 bp, Homo sapiens
aggctgaatttaagt

SEQ ID NO: 1228152 - DNA, 15 bp, Homo sapiens
aaggctgaatttaag

SEQ ID NO: 1228153 - DNA, 15 bp, Homo sapiens
taaggctgaatttaa

SEQ ID NO: 1228154 - DNA, 15 bp, Homo sapiens
ttaaggctgaattta

SEQ ID NO: 1228155 - DNA, 15 bp, Homo sapiens
tttaaggctgaattt

SEQ ID NO: 1228156 - DNA, 15 bp, Homo sapiens
ttttaaggctgaatt

SEQ ID NO: 1228157 - DNA, 15 bp, Homo sapiens
cttttaaggctgaat

SEQ ID NO: 1228158 - DNA, 15 bp, Homo sapiens
tcttttaaggctgaa

SEQ ID NO: 1228159 - DNA, 15 bp, Homo sapiens
atcttttaaggctga

SEQ ID NO: 1228160 - DNA, 15 bp, Homo sapiens
catcttttaaggctg

SEQ ID NO: 1228161 - DNA, 15 bp, Homo sapiens
tcatcttttaaggct

SEQ ID NO: 1228162 - DNA, 15 bp, Homo sapiens
ctcatcttttaaggc

SEQ ID NO: 1228163 - DNA, 15 bp, Homo sapiens
gctcatcttttaagg

SEQ ID NO: 1228164 - DNA, 15 bp, Homo sapiens
tgctcatcttttaag

SEQ ID NO: 1228165 - DNA, 15 bp, Homo sapiens
ctgctcatcttttaa

SEQ ID NO: 1228166 - DNA, 15 bp, Homo sapiens
tctgctcatctttta

SEQ ID NO: 1228167 - DNA, 15 bp, Homo sapiens
ctctgctcatctttt

SEQ ID NO: 1228168 - DNA, 15 bp, Homo sapiens
cctctgctcatcttt

SEQ ID NO: 1228169 - DNA, 15 bp, Homo sapiens
gcctctgctcatctt

SEQ ID NO: 1228170 - DNA, 15 bp, Homo sapiens
ggcctctgctcatct

SEQ ID NO: 1228171 - DNA, 15 bp, Homo sapiens
cggcctctgctcatc

SEQ ID NO: 1228172 - DNA, 15 bp, Homo sapiens
ccggcctctgctcat

SEQ ID NO: 1228173 - DNA, 15 bp, Homo sapiens
cccggcctctgctca

SEQ ID NO: 1228174 - DNA, 15 bp, Homo sapiens
gcccggcctctgctc

SEQ ID NO: 1228175 - DNA, 15 bp, Homo sapiens
agcccggcctctgct

SEQ ID NO: 1228176 - DNA, 15 bp, Homo sapiens
gagcccggcctctgc

SEQ ID NO: 1228177 - DNA, 15 bp, Homo sapiens
ggagcccggcctctg

SEQ ID NO: 1228178 - DNA, 15 bp, Homo sapiens
cggagcccggcctct

SEQ ID NO: 1228179 - DNA, 15 bp, Homo sapiens
acggagcccggcctc

SEQ ID NO: 1228180 - DNA, 15 bp, Homo sapiens
cacggagcccggcct

SEQ ID NO: 1228181 - DNA, 15 bp, Homo sapiens
ccacggagcccggcc

SEQ ID NO: 1228182 - DNA, 15 bp, Homo sapiens
gccacggagcccggc

SEQ ID NO: 1228183 - DNA, 15 bp, Homo sapiens
agccacggagcccgg

SEQ ID NO: 1228184 - DNA, 15 bp, Homo sapiens
gagccacggagcccg

SEQ ID NO: 1228185 - DNA, 15 bp, Homo sapiens
tgagccacggagccc

SEQ ID NO: 1228186 - DNA, 15 bp, Homo sapiens
atgagccacggagcc

SEQ ID NO: 1228187 - DNA, 15 bp, Homo sapiens
catgagccacggagc

SEQ ID NO: 1228188 - DNA, 15 bp, Homo sapiens
ccatgagccacggag

SEQ ID NO: 1228189 - DNA, 15 bp, Homo sapiens
cccatgagccacgga

SEQ ID NO: 1228190 - DNA, 15 bp, Homo sapiens
gcccatgagccacgg

SEQ ID NO: 1228191 - DNA, 15 bp, Homo sapiens
ggcccatgagccacg

SEQ ID NO: 1228192 - DNA, 15 bp, Homo sapiens
gggcccatgagccac

SEQ ID NO: 1228193 - DNA, 15 bp, Homo sapiens
cgggcccatgagcca

SEQ ID NO: 1228194 - DNA, 15 bp, Homo sapiens
ccgggcccatgagcc

SEQ ID NO: 1228195 - DNA, 15 bp, Homo sapiens
gccgggcccatgagc

SEQ ID NO: 1228196 - DNA, 15 bp, Homo sapiens
ggccgggcccatgag

SEQ ID NO: 1228197 - DNA, 15 bp, Homo sapiens
aggccgggcccatga

SEQ ID NO: 1228198 - DNA, 15 bp, Homo sapiens
aaggccgggcccatg

SEQ ID NO: 1228199 - DNA, 15 bp, Homo sapiens
aaaggccgggcccat

SEQ ID NO: 1228200 - DNA, 15 bp, Homo sapiens
gaaaggccgggccca

SEQ ID NO: 1228201 - DNA, 15 bp, Homo sapiens
ggaaaggccgggccc

SEQ ID NO: 1228202 - DNA, 15 bp, Homo sapiens
aggaaaggccgggcc

SEQ ID NO: 1228203 - DNA, 15 bp, Homo sapiens
aaggaaaggccgggc

SEQ ID NO: 1228204 - DNA, 15 bp, Homo sapiens
gaaggaaaggccggg

SEQ ID NO: 1228205 - DNA, 15 bp, Homo sapiens
ggaaggaaaggccgg

SEQ ID NO: 1228206 - DNA, 15 bp, Homo sapiens
aggaaggaaaggccg

SEQ ID NO: 1228207 - DNA, 15 bp, Homo sapiens
aaggaaggaaaggcc

SEQ ID NO: 1228208 - DNA, 15 bp, Homo sapiens
gaaggaaggaaaggc

SEQ ID NO: 1228209 - DNA, 15 bp, Homo sapiens
gagaaggaaggaagg

SEQ ID NO: 1228210 - DNA, 15 bp, Homo sapiens
agagaaggaaggaag

SEQ ID NO: 1228211 - DNA, 15 bp, Homo sapiens
gagagaaggaaggaa

SEQ ID NO: 1228212 - DNA, 15 bp, Homo sapiens
agagagaaggaagga

SEQ ID NO: 1228213 - DNA, 15 bp, Homo sapiens
gagagagaaggaagg

SEQ ID NO: 1228214 - DNA, 15 bp, Homo sapiens
ggagagagaaggaag

SEQ ID NO: 1228215 - DNA, 15 bp, Homo sapiens
gggagagagaaggaa

SEQ ID NO: 1228216 - DNA, 15 bp, Homo sapiens
agggagagagaagga

SEQ ID NO: 1228217 - DNA, 15 bp, Homo sapiens
gagggagagagaagg

SEQ ID NO: 1228218 - DNA, 15 bp, Homo sapiens
agagggagagagaag

SEQ ID NO: 1228219 - DNA, 15 bp, Homo sapiens
gagagggagagagaa

SEQ ID NO: 1228220 - DNA, 15 bp, Homo sapiens
agagagggagagaga

SEQ ID NO: 1228221 - DNA, 15 bp, Homo sapiens
aagagagggagagag

SEQ ID NO: 1228222 - DNA, 15 bp, Homo sapiens
aaagagagggagaga

SEQ ID NO: 1228223 - DNA, 15 bp, Homo sapiens
gaaagagagggagag

SEQ ID NO: 1228224 - DNA, 15 bp, Homo sapiens
agaaagagagggaga

SEQ ID NO: 1228225 - DNA, 15 bp, Homo sapiens
aagaaagagagggag

SEQ ID NO: 1228226 - DNA, 15 bp, Homo sapiens
aaagaaagagaggga

SEQ ID NO: 1228227 - DNA, 15 bp, Homo sapiens
gaaagaaagagaggg

SEQ ID NO: 1228228 - DNA, 15 bp, Homo sapiens
agaaagaaagagagg

SEQ ID NO: 1228229 - DNA, 15 bp, Homo sapiens
aagaaagaaagagag

SEQ ID NO: 1228230 - DNA, 15 bp, Homo sapiens
aaagaaagaaagaga

SEQ ID NO: 1228231 - DNA, 15 bp, Homo sapiens
gaaagaaagaaagag

SEQ ID NO: 1228232 - DNA, 15 bp, Homo sapiens
ggaagaaagaaagaa

SEQ ID NO: 1228233 - DNA, 15 bp, Homo sapiens
aggaagaaagaaaga

SEQ ID NO: 1228234 - DNA, 15 bp, Homo sapiens
aaaggaaggaaggaa

SEQ ID NO: 1228235 - DNA, 15 bp, Homo sapiens
gaaaggaaggaagga

SEQ ID NO: 1228236 - DNA, 15 bp, Homo sapiens
agaaaggaaggaagg

SEQ ID NO: 1228237 - DNA, 15 bp, Homo sapiens
aagaaaggaaggaag

SEQ ID NO: 1228238 - DNA, 15 bp, Homo sapiens
aaagaaaggaaggaa

SEQ ID NO: 1228239 - DNA, 15 bp, Homo sapiens
aaaagaaaggaagga

SEQ ID NO: 1228240 - DNA, 15 bp, Homo sapiens
gaaaagaaaggaagg

SEQ ID NO: 1228241 - DNA, 15 bp, Homo sapiens
agaaaagaaaggaag

SEQ ID NO: 1228242 - DNA, 15 bp, Homo sapiens
aagaaaagaaaggaa

SEQ ID NO: 1228243 - DNA, 15 bp, Homo sapiens
aaagaaaagaaagga

SEQ ID NO: 1228244 - DNA, 15 bp, Homo sapiens
gaaagaaaagaaagg

SEQ ID NO: 1228245 - DNA, 15 bp, Homo sapiens
agaaagaaaagaaag

SEQ ID NO: 1228246 - DNA, 15 bp, Homo sapiens
gaaggaaagaaagaa

SEQ ID NO: 1228247 - DNA, 15 bp, Homo sapiens
agaaggaaagaaaga

SEQ ID NO: 1228248 - DNA, 15 bp, Homo sapiens
aagaaggaaagaaag

SEQ ID NO: 1228249 - DNA, 15 bp, Homo sapiens
aaagaaggaaagaaa

SEQ ID NO: 1228250 - DNA, 15 bp, Homo sapiens
agaaagaaagaagga

SEQ ID NO: 1228251 - DNA, 15 bp, Homo sapiens
aagaaagaaagaagg

SEQ ID NO: 1228252 - DNA, 15 bp, Homo sapiens
gagaaagaaagaaag

SEQ ID NO: 1228253 - DNA, 15 bp, Homo sapiens
agagaaagaaagaaa

SEQ ID NO: 1228254 - DNA, 15 bp, Homo sapiens
aagagaaagaaagaa

SEQ ID NO: 1228255 - DNA, 15 bp, Homo sapiens
aaagagaaagaaaga

SEQ ID NO: 1228256 - DNA, 15 bp, Homo sapiens
gaaagagaaagaaag

SEQ ID NO: 1228257 - DNA, 15 bp, Homo sapiens
agaaagagaaagaaa

SEQ ID NO: 1228258 - DNA, 15 bp, Homo sapiens
aagaaagagaaagaa

SEQ ID NO: 1228259 - DNA, 15 bp, Homo sapiens
gaagaaagagaaaga

SEQ ID NO: 1228260 - DNA, 15 bp, Homo sapiens
agaagaaagagaaag

SEQ ID NO: 1228261 - DNA, 15 bp, Homo sapiens
aagaagaaagagaaa

SEQ ID NO: 1228262 - DNA, 15 bp, Homo sapiens
aaagaagaaagagaa

SEQ ID NO: 1228263 - DNA, 15 bp, Homo sapiens
gaaagaagaaagaga

SEQ ID NO: 1228264 - DNA, 15 bp, Homo sapiens
agaaagaagaaagag

SEQ ID NO: 1228265 - DNA, 15 bp, Homo sapiens
gagaaagaagaaaga

SEQ ID NO: 1228266 - DNA, 15 bp, Homo sapiens
agagaaagaagaaag

SEQ ID NO: 1228267 - DNA, 15 bp, Homo sapiens
gagagaaagaagaaa

SEQ ID NO: 1228268 - DNA, 15 bp, Homo sapiens
agagagaaagaagaa

SEQ ID NO: 1228269 - DNA, 15 bp, Homo sapiens
gagagagaaagaaga

SEQ ID NO: 1228270 - DNA, 15 bp, Homo sapiens
agagagagaaagaag

SEQ ID NO: 1228271 - DNA, 15 bp, Homo sapiens
gagagagagaaagaa

SEQ ID NO: 1228272 - DNA, 15 bp, Homo sapiens
aagagagagagaaag

SEQ ID NO: 1228273 - DNA, 15 bp, Homo sapiens
gaaagagagagagaa

SEQ ID NO: 1228274 - DNA, 15 bp, Homo sapiens
aagaaagagagagag

SEQ ID NO: 1228275 - DNA, 15 bp, Homo sapiens
gaagaaagagagaga

SEQ ID NO: 1228276 - DNA, 15 bp, Homo sapiens
agaagaaagagagag

SEQ ID NO: 1228277 - DNA, 15 bp, Homo sapiens
aagaagaaagagaga

SEQ ID NO: 1228278 - DNA, 15 bp, Homo sapiens
aaagaagaaagagag

SEQ ID NO: 1228279 - DNA, 15 bp, Homo sapiens
aagaaagaagaaaga

SEQ ID NO: 1228280 - DNA, 15 bp, Homo sapiens
aaagaaagaagaaag

SEQ ID NO: 1228281 - DNA, 15 bp, Homo sapiens
gaaagaaagaagaaa

SEQ ID NO: 1228282 - DNA, 15 bp, Homo sapiens
agaaagaaagaagaa

SEQ ID NO: 1228283 - DNA, 15 bp, Homo sapiens
gaaagaaaagaaaga

SEQ ID NO: 1228284 - DNA, 15 bp, Homo sapiens
ggaaagaaaagaaag

SEQ ID NO: 1228285 - DNA, 15 bp, Homo sapiens
aggaaagaaaagaaa

SEQ ID NO: 1228286 - DNA, 15 bp, Homo sapiens
aaggaaagaaaagaa

SEQ ID NO: 1228287 - DNA, 15 bp, Homo sapiens
aaaggaaagaaaaga

SEQ ID NO: 1228288 - DNA, 15 bp, Homo sapiens
aaagaaagaaaggaa

SEQ ID NO: 1228289 - DNA, 15 bp, Homo sapiens
gaaagaaagaaagga

SEQ ID NO: 1228290 - DNA, 15 bp, Homo sapiens
agaaagaaagaaagg

SEQ ID NO: 1228291 - DNA, 15 bp, Homo sapiens
cgaaagaaagaaaga

SEQ ID NO: 1228292 - DNA, 15 bp, Homo sapiens
tcgaaagaaagaaag

SEQ ID NO: 1228293 - DNA, 15 bp, Homo sapiens
atcgaaagaaagaaa

SEQ ID NO: 1228294 - DNA, 15 bp, Homo sapiens
catcgaaagaaagaa

SEQ ID NO: 1228295 - DNA, 15 bp, Homo sapiens
ccatcgaaagaaaga

SEQ ID NO: 1228296 - DNA, 15 bp, Homo sapiens
tccatcgaaagaaag

SEQ ID NO: 1228297 - DNA, 15 bp, Homo sapiens
ctccatcgaaagaaa

SEQ ID NO: 1228298 - DNA, 15 bp, Homo sapiens
actccatcgaaagaa

SEQ ID NO: 1228299 - DNA, 15 bp, Homo sapiens
gactccatcgaaaga

SEQ ID NO: 1228300 - DNA, 15 bp, Homo sapiens
agactccatcgaaag

SEQ ID NO: 1228301 - DNA, 15 bp, Homo sapiens
gagactccatcgaaa

SEQ ID NO: 1228302 - DNA, 15 bp, Homo sapiens
cgagactccatcgaa

SEQ ID NO: 1228303 - DNA, 15 bp, Homo sapiens
gcgagactccatcga

SEQ ID NO: 1228304 - DNA, 15 bp, Homo sapiens
agcgagactccatcg

SEQ ID NO: 1228305 - DNA, 15 bp, Homo sapiens
gtgtgacagagcgag

SEQ ID NO: 1228306 - DNA, 15 bp, Homo sapiens
tgtgtgacagagcga

SEQ ID NO: 1228307 - DNA, 15 bp, Homo sapiens
cctgtgtgacagagc

SEQ ID NO: 1228308 - DNA, 15 bp, Homo sapiens
gcctgtgtgacagag

SEQ ID NO: 1228309 - DNA, 15 bp, Homo sapiens
agcctgtgtgacaga

SEQ ID NO: 1228310 - DNA, 15 bp, Homo sapiens
cagcctgtgtgacag

SEQ ID NO: 1228311 - DNA, 15 bp, Homo sapiens
ccagcctgtgtgaca

SEQ ID NO: 1228312 - DNA, 15 bp, Homo sapiens
tccagcctgtgtgac

SEQ ID NO: 1228313 - DNA, 15 bp, Homo sapiens
ctccagcctgtgtga

SEQ ID NO: 1228314 - DNA, 15 bp, Homo sapiens
actccagcctgtgtg

SEQ ID NO: 1228315 - DNA, 15 bp, Homo sapiens
cactccagcctgtgt

SEQ ID NO: 1228316 - DNA, 15 bp, Homo sapiens
tggtgagctgagatc

SEQ ID NO: 1228317 - DNA, 15 bp, Homo sapiens
gtggtgagctgagat

SEQ ID NO: 1228318 - DNA, 15 bp, Homo sapiens
tgtggtgagctgaga

SEQ ID NO: 1228319 - DNA, 15 bp, Homo sapiens
ttgtggtgagctgag

SEQ ID NO: 1228320 - DNA, 15 bp, Homo sapiens
gttgtggtgagctga

SEQ ID NO: 1228321 - DNA, 15 bp, Homo sapiens
ggttgtggtgagctg

SEQ ID NO: 1228322 - DNA, 15 bp, Homo sapiens
aggttgtggtgagct

SEQ ID NO: 1228323 - DNA, 15 bp, Homo sapiens
actgggaggcggagg

SEQ ID NO: 1228324 - DNA, 15 bp, Homo sapiens
aactgggaggcggag

SEQ ID NO: 1228325 - DNA, 15 bp, Homo sapiens
aaactgggaggcgga

SEQ ID NO: 1228326 - DNA, 15 bp, Homo sapiens
gaaactgggaggcgg

SEQ ID NO: 1228327 - DNA, 15 bp, Homo sapiens
tgaaactgggaggcg

SEQ ID NO: 1228328 - DNA, 15 bp, Homo sapiens
ttgaaactgggaggc

SEQ ID NO: 1228329 - DNA, 15 bp, Homo sapiens
gttcagctacttggg

SEQ ID NO: 1228330 - DNA, 15 bp, Homo sapiens
agttcagctacttgg

SEQ ID NO: 1228331 - DNA, 15 bp, Homo sapiens
tagttcagctacttg

SEQ ID NO: 1228332 - DNA, 15 bp, Homo sapiens
gtagttcagctactt

SEQ ID NO: 1228333 - DNA, 15 bp, Homo sapiens
tgtagttcagctact

SEQ ID NO: 1228334 - DNA, 15 bp, Homo sapiens
ctgtagttcagctac

SEQ ID NO: 1228335 - DNA, 15 bp, Homo sapiens
cctgtagttcagcta

SEQ ID NO: 1228336 - DNA, 15 bp, Homo sapiens
acctgtagttcagct

SEQ ID NO: 1228337 - DNA, 15 bp, Homo sapiens
cacctgtagttcagc

SEQ ID NO: 1228338 - DNA, 15 bp, Homo sapiens
gcacctgtagttcag

SEQ ID NO: 1228339 - DNA, 15 bp, Homo sapiens
ggcacctgtagttca

SEQ ID NO: 1228340 - DNA, 15 bp, Homo sapiens
tggcacctgtagttc

SEQ ID NO: 1228341 - DNA, 15 bp, Homo sapiens
gtggcacctgtagtt

SEQ ID NO: 1228342 - DNA, 15 bp, Homo sapiens
ggtggcacctgtagt

SEQ ID NO: 1228343 - DNA, 15 bp, Homo sapiens
tggtggcacctgtag

SEQ ID NO: 1228344 - DNA, 15 bp, Homo sapiens
atggtggcacctgta

SEQ ID NO: 1228345 - DNA, 15 bp, Homo sapiens
catggtggcacctgt

SEQ ID NO: 1228346 - DNA, 15 bp, Homo sapiens
gggcatggtggcacc

SEQ ID NO: 1228347 - DNA, 15 bp, Homo sapiens
taattagccgggcat

SEQ ID NO: 1228348 - DNA, 15 bp, Homo sapiens
ataattagccgggca

SEQ ID NO: 1228349 - DNA, 15 bp, Homo sapiens
aataattagccgggc

SEQ ID NO: 1228350 - DNA, 15 bp, Homo sapiens
caataattagccggg

SEQ ID NO: 1228351 - DNA, 15 bp, Homo sapiens
acaataattagccgg

SEQ ID NO: 1228352 - DNA, 15 bp, Homo sapiens
tacaataattagccg

SEQ ID NO: 1228353 - DNA, 15 bp, Homo sapiens
atacaataattagcc

SEQ ID NO: 1228354 - DNA, 15 bp, Homo sapiens
aatacaataattagc

SEQ ID NO: 1228355 - DNA, 15 bp, Homo sapiens
aaatacaataattag

SEQ ID NO: 1228356 - DNA, 15 bp, Homo sapiens
aaaatacaataatta

SEQ ID NO: 1228357 - DNA, 15 bp, Homo sapiens
aaaaatacaataatt

SEQ ID NO: 1228358 - DNA, 15 bp, Homo sapiens
caaaaatacaataat

SEQ ID NO: 1228359 - DNA, 15 bp, Homo sapiens
ccaaaaatacaataa

SEQ ID NO: 1228360 - DNA, 15 bp, Homo sapiens
accaaaaatacaata

SEQ ID NO: 1228361 - DNA, 15 bp, Homo sapiens
taccaaaaatacaat

SEQ ID NO: 1228362 - DNA, 15 bp, Homo sapiens
acagcatggtgaaac

SEQ ID NO: 1228363 - DNA, 15 bp, Homo sapiens
gacagcatggtgaaa

SEQ ID NO: 1228364 - DNA, 15 bp, Homo sapiens
ggacagcatggtgaa

SEQ ID NO: 1228365 - DNA, 15 bp, Homo sapiens
tggacagcatggtga

SEQ ID NO: 1228366 - DNA, 15 bp, Homo sapiens
ctggacagcatggtg

SEQ ID NO: 1228367 - DNA, 15 bp, Homo sapiens
cctggacagcatggt

SEQ ID NO: 1228368 - DNA, 15 bp, Homo sapiens
gcctggacagcatgg

SEQ ID NO: 1228369 - DNA, 15 bp, Homo sapiens
agcctggacagcatg

SEQ ID NO: 1228370 - DNA, 15 bp, Homo sapiens
cagcctggacagcat

SEQ ID NO: 1228371 - DNA, 15 bp, Homo sapiens
ccagcctggacagca

SEQ ID NO: 1228372 - DNA, 15 bp, Homo sapiens
accagcctggacagc

SEQ ID NO: 1228373 - DNA, 15 bp, Homo sapiens
aaccagcctggacag

SEQ ID NO: 1228374 - DNA, 15 bp, Homo sapiens
aaaccagcctggaca

SEQ ID NO: 1228375 - DNA, 15 bp, Homo sapiens
gaaaccagcctggac

SEQ ID NO: 1228376 - DNA, 15 bp, Homo sapiens
tgaaaccagcctgga

SEQ ID NO: 1228377 - DNA, 15 bp, Homo sapiens
ttgaaaccagcctgg

SEQ ID NO: 1228378 - DNA, 15 bp, Homo sapiens
tttgaaaccagcctg

SEQ ID NO: 1228379 - DNA, 15 bp, Homo sapiens
gtttgaaaccagcct

SEQ ID NO: 1228380 - DNA, 15 bp, Homo sapiens
agtttgaaaccagcc

SEQ ID NO: 1228381 - DNA, 15 bp, Homo sapiens
gagtttgaaaccagc

SEQ ID NO: 1228382 - DNA, 15 bp, Homo sapiens
ggagtttgaaaccag

SEQ ID NO: 1228383 - DNA, 15 bp, Homo sapiens
aggagtttgaaacca

SEQ ID NO: 1228384 - DNA, 15 bp, Homo sapiens
caggagtttgaaacc

SEQ ID NO: 1228385 - DNA, 15 bp, Homo sapiens
tcaggagtttgaaac

SEQ ID NO: 1228386 - DNA, 15 bp, Homo sapiens
gtcaggagtttgaaa

SEQ ID NO: 1228387 - DNA, 15 bp, Homo sapiens
ggtcaggagtttgaa

SEQ ID NO: 1228388 - DNA, 15 bp, Homo sapiens
agaggtcaggagttt

SEQ ID NO: 1228389 - DNA, 15 bp, Homo sapiens
gagaggtcaggagtt

SEQ ID NO: 1228390 - DNA, 15 bp, Homo sapiens
cgagaggtcaggagt

SEQ ID NO: 1228391 - DNA, 15 bp, Homo sapiens
tcgagaggtcaggag

SEQ ID NO: 1228392 - DNA, 15 bp, Homo sapiens
atcgagaggtcagga

SEQ ID NO: 1228393 - DNA, 15 bp, Homo sapiens
gatcgagaggtcagg

SEQ ID NO: 1228394 - DNA, 15 bp, Homo sapiens
ggatcgagaggtcag

SEQ ID NO: 1228395 - DNA, 15 bp, Homo sapiens
aggatcgagaggtca

SEQ ID NO: 1228396 - DNA, 15 bp, Homo sapiens
gaggatcgagaggtc

SEQ ID NO: 1228397 - DNA, 15 bp, Homo sapiens
ggaggatcgagaggt

SEQ ID NO: 1228398 - DNA, 15 bp, Homo sapiens
gggaggatcgagagg

SEQ ID NO: 1228399 - DNA, 15 bp, Homo sapiens
cgggaggatcgagag

SEQ ID NO: 1228400 - DNA, 15 bp, Homo sapiens
gcgggaggatcgaga

SEQ ID NO: 1228401 - DNA, 15 bp, Homo sapiens
ggcgggaggatcgag

SEQ ID NO: 1228402 - DNA, 15 bp, Homo sapiens
aggcgggaggatcga

SEQ ID NO: 1228403 - DNA, 15 bp, Homo sapiens
gaggcgggaggatcg

SEQ ID NO: 1228404 - DNA, 15 bp, Homo sapiens
ggaggcgggaggatc

SEQ ID NO: 1228405 - DNA, 15 bp, Homo sapiens
cggaggcgggaggat

SEQ ID NO: 1228406 - DNA, 15 bp, Homo sapiens
gcggaggcgggagga

SEQ ID NO: 1228407 - DNA, 15 bp, Homo sapiens
ggcggaggcgggagg

SEQ ID NO: 1228408 - DNA, 15 bp, Homo sapiens
aggcggaggcgggag

SEQ ID NO: 1228409 - DNA, 15 bp, Homo sapiens
gaggcggaggcggga

SEQ ID NO: 1228410 - DNA, 15 bp, Homo sapiens
ggaggcggaggcggg

SEQ ID NO: 1228411 - DNA, 15 bp, Homo sapiens
gggaggcggaggcgg

SEQ ID NO: 1228412 - DNA, 15 bp, Homo sapiens
tgggaggcggaggcg

SEQ ID NO: 1228413 - DNA, 15 bp, Homo sapiens
tactttgggaggcgg

SEQ ID NO: 1228414 - DNA, 15 bp, Homo sapiens
gtactttgggaggcg

SEQ ID NO: 1228415 - DNA, 15 bp, Homo sapiens
cagtactttgggagg

SEQ ID NO: 1228416 - DNA, 15 bp, Homo sapiens
ccagtactttgggag

SEQ ID NO: 1228417 - DNA, 15 bp, Homo sapiens
cccagtactttggga

SEQ ID NO: 1228418 - DNA, 15 bp, Homo sapiens
tcccagtactttggg

SEQ ID NO: 1228419 - DNA, 15 bp, Homo sapiens
atcccagtactttgg

SEQ ID NO: 1228420 - DNA, 15 bp, Homo sapiens
aatcccagtactttg

SEQ ID NO: 1228421 - DNA, 15 bp, Homo sapiens
taatcccagtacttt

SEQ ID NO: 1228422 - DNA, 15 bp, Homo sapiens
ataatcccagtactt

SEQ ID NO: 1228423 - DNA, 15 bp, Homo sapiens
tataatcccagtact

SEQ ID NO: 1228424 - DNA, 15 bp, Homo sapiens
atataatcccagtac

SEQ ID NO: 1228425 - DNA, 15 bp, Homo sapiens
catataatcccagta

SEQ ID NO: 1228426 - DNA, 15 bp, Homo sapiens
gcatataatcccagt

SEQ ID NO: 1228427 - DNA, 15 bp, Homo sapiens
cgcatataatcccag

SEQ ID NO: 1228428 - DNA, 15 bp, Homo sapiens
acgcatataatccca

SEQ ID NO: 1228429 - DNA, 15 bp, Homo sapiens
cacgcatataatccc

SEQ ID NO: 1228430 - DNA, 15 bp, Homo sapiens
tcacgcatataatcc

SEQ ID NO: 1228431 - DNA, 15 bp, Homo sapiens
ctcacgcatataatc

SEQ ID NO: 1228432 - DNA, 15 bp, Homo sapiens
actcacgcatataat

SEQ ID NO: 1228433 - DNA, 15 bp, Homo sapiens
gactcacgcatataa

SEQ ID NO: 1228434 - DNA, 15 bp, Homo sapiens
tgactcacgcatata

SEQ ID NO: 1228435 - DNA, 15 bp, Homo sapiens
gtgactcacgcatat

SEQ ID NO: 1228436 - DNA, 15 bp, Homo sapiens
agtgactcacgcata

SEQ ID NO: 1228437 - DNA, 15 bp, Homo sapiens
cagtgactcacgcat

SEQ ID NO: 1228438 - DNA, 15 bp, Homo sapiens
gcagtgactcacgca

SEQ ID NO: 1228439 - DNA, 15 bp, Homo sapiens
cgcagtgactcacgc

SEQ ID NO: 1228440 - DNA, 15 bp, Homo sapiens
gcgcagtgactcacg

SEQ ID NO: 1228441 - DNA, 15 bp, Homo sapiens
ggcgcagtgactcac

SEQ ID NO: 1228442 - DNA, 15 bp, Homo sapiens
aggcgcagtgactca

SEQ ID NO: 1228443 - DNA, 15 bp, Homo sapiens
caggcgcagtgactc

SEQ ID NO: 1228444 - DNA, 15 bp, Homo sapiens
ccaggcgcagtgact

SEQ ID NO: 1228445 - DNA, 15 bp, Homo sapiens
gccaggcgcagtgac

SEQ ID NO: 1228446 - DNA, 15 bp, Homo sapiens
ggccaggcgcagtga

SEQ ID NO: 1228447 - DNA, 15 bp, Homo sapiens
accggccaggcgcag

SEQ ID NO: 1228448 - DNA, 15 bp, Homo sapiens
caccggccaggcgca

SEQ ID NO: 1228449 - DNA, 15 bp, Homo sapiens
tcaccggccaggcgc

SEQ ID NO: 1228450 - DNA, 15 bp, Homo sapiens
atcaccggccaggcg

SEQ ID NO: 1228451 - DNA, 15 bp, Homo sapiens
tatcaccggccaggc

SEQ ID NO: 1228452 - DNA, 15 bp, Homo sapiens
atatcaccggccagg

SEQ ID NO: 1228453 - DNA, 15 bp, Homo sapiens
tatatcaccggccag

SEQ ID NO: 1228454 - DNA, 15 bp, Homo sapiens
ttatatcaccggcca

SEQ ID NO: 1228455 - DNA, 15 bp, Homo sapiens
attatatcaccggcc

SEQ ID NO: 1228456 - DNA, 15 bp, Homo sapiens
aattatatcaccggc

SEQ ID NO: 1228457 - DNA, 15 bp, Homo sapiens
taattatatcaccgg

SEQ ID NO: 1228458 - DNA, 15 bp, Homo sapiens
ttaattatatcaccg

SEQ ID NO: 1228459 - DNA, 15 bp, Homo sapiens
attaattatatcacc

SEQ ID NO: 1228460 - DNA, 15 bp, Homo sapiens
aattaattatatcac

SEQ ID NO: 1228461 - DNA, 15 bp, Homo sapiens
aaattaattatatca

SEQ ID NO: 1228462 - DNA, 15 bp, Homo sapiens
aaaattaattatatc

SEQ ID NO: 1228463 - DNA, 15 bp, Homo sapiens
aaaaattaattatat

SEQ ID NO: 1228464 - DNA, 15 bp, Homo sapiens
aaaaaattaattata

SEQ ID NO: 1228465 - DNA, 15 bp, Homo sapiens
aaaaaaattaattat

SEQ ID NO: 1228466 - DNA, 15 bp, Homo sapiens
gaaaaaaattaatta

SEQ ID NO: 1228467 - DNA, 15 bp, Homo sapiens
ggaaaaaaattaatt

SEQ ID NO: 1228468 - DNA, 15 bp, Homo sapiens
aggaaaaaaattaat

SEQ ID NO: 1228469 - DNA, 15 bp, Homo sapiens
taggaaaaaaattaa

SEQ ID NO: 1228470 - DNA, 15 bp, Homo sapiens
ctaggaaaaaaatta

SEQ ID NO: 1228471 - DNA, 15 bp, Homo sapiens
gctaggaaaaaaatt

SEQ ID NO: 1228472 - DNA, 15 bp, Homo sapiens
agctaggaaaaaaat

SEQ ID NO: 1228473 - DNA, 15 bp, Homo sapiens
cagctaggaaaaaaa

SEQ ID NO: 1228474 - DNA, 15 bp, Homo sapiens
tcagctaggaaaaaa

SEQ ID NO: 1228475 - DNA, 15 bp, Homo sapiens
ttcagctaggaaaaa

SEQ ID NO: 1228476 - DNA, 15 bp, Homo sapiens
attcagctaggaaaa

SEQ ID NO: 1228477 - DNA, 15 bp, Homo sapiens
tattcagctaggaaa

SEQ ID NO: 1228478 - DNA, 15 bp, Homo sapiens
ctattcagctaggaa

SEQ ID NO: 1228479 - DNA, 15 bp, Homo sapiens
gctattcagctagga

SEQ ID NO: 1228480 - DNA, 15 bp, Homo sapiens
tgctattcagctagg

SEQ ID NO: 1228481 - DNA, 15 bp, Homo sapiens
ttgctattcagctag

SEQ ID NO: 1228482 - DNA, 15 bp, Homo sapiens
attgctattcagcta

SEQ ID NO: 1228483 - DNA, 15 bp, Homo sapiens
gattgctattcagct

SEQ ID NO: 1228484 - DNA, 15 bp, Homo sapiens
agattgctattcagc

SEQ ID NO: 1228485 - DNA, 15 bp, Homo sapiens
gagattgctattcag

SEQ ID NO: 1228486 - DNA, 15 bp, Homo sapiens
agagattgctattca

SEQ ID NO: 1228487 - DNA, 15 bp, Homo sapiens
cagagattgctattc

SEQ ID NO: 1228488 - DNA, 15 bp, Homo sapiens
gcagagattgctatt

SEQ ID NO: 1228489 - DNA, 15 bp, Homo sapiens
agcagagattgctat

SEQ ID NO: 1228490 - DNA, 15 bp, Homo sapiens
gagcagagattgcta

SEQ ID NO: 1228491 - DNA, 15 bp, Homo sapiens
tgagcagagattgct

SEQ ID NO: 1228492 - DNA, 15 bp, Homo sapiens
gtgagcagagattgc

SEQ ID NO: 1228493 - DNA, 15 bp, Homo sapiens
tgaggcagaggttgc

SEQ ID NO: 1228494 - DNA, 15 bp, Homo sapiens
gtgaggcagaggttg

SEQ ID NO: 1228495 - DNA, 15 bp, Homo sapiens
cgtgaggcagaggtt

SEQ ID NO: 1228496 - DNA, 15 bp, Homo sapiens
ccgtgaggcagaggt

SEQ ID NO: 1228497 - DNA, 15 bp, Homo sapiens
cccgtgaggcagagg

SEQ ID NO: 1228498 - DNA, 15 bp, Homo sapiens
acccgtgaggcagag

SEQ ID NO: 1228499 - DNA, 15 bp, Homo sapiens
aacccgtgaggcaga

SEQ ID NO: 1228500 - DNA, 15 bp, Homo sapiens
aaacccgtgaggcag

SEQ ID NO: 1228501 - DNA, 15 bp, Homo sapiens
gaaacccgtgaggca

SEQ ID NO: 1228502 - DNA, 15 bp, Homo sapiens
tgaaacccgtgaggc

SEQ ID NO: 1228503 - DNA, 15 bp, Homo sapiens
ttgaaacccgtgagg

SEQ ID NO: 1228504 - DNA, 15 bp, Homo sapiens
cttgaaacccgtgag

SEQ ID NO: 1228505 - DNA, 15 bp, Homo sapiens
gcttgaaacccgtga

SEQ ID NO: 1228506 - DNA, 15 bp, Homo sapiens
tgcttgaaacccgtg

SEQ ID NO: 1228507 - DNA, 15 bp, Homo sapiens
ttgcttgaaacccgt

SEQ ID NO: 1228508 - DNA, 15 bp, Homo sapiens
attgcttgaaacccg

SEQ ID NO: 1228509 - DNA, 15 bp, Homo sapiens
aattgcttgaaaccc

SEQ ID NO: 1228510 - DNA, 15 bp, Homo sapiens
gaattgcttgaaacc

SEQ ID NO: 1228511 - DNA, 15 bp, Homo sapiens
agaattgcttgaaac

SEQ ID NO: 1228512 - DNA, 15 bp, Homo sapiens
gagaattgcttgaaa

SEQ ID NO: 1228513 - DNA, 15 bp, Homo sapiens
gcttgcctgtaatcc

SEQ ID NO: 1228514 - DNA, 15 bp, Homo sapiens
cgcttgcctgtaatc

SEQ ID NO: 1228515 - DNA, 15 bp, Homo sapiens
gcgcttgcctgtaat

SEQ ID NO: 1228516 - DNA, 15 bp, Homo sapiens
ggcgcttgcctgtaa

SEQ ID NO: 1228517 - DNA, 15 bp, Homo sapiens
tggcgcttgcctgta

SEQ ID NO: 1228518 - DNA, 15 bp, Homo sapiens
gtggcgcttgcctgt

SEQ ID NO: 1228519 - DNA, 15 bp, Homo sapiens
ggtggcgcttgcctg

SEQ ID NO: 1228520 - DNA, 15 bp, Homo sapiens
tggtggcgcttgcct

SEQ ID NO: 1228521 - DNA, 15 bp, Homo sapiens
atggtggcgcttgcc

SEQ ID NO: 1228522 - DNA, 15 bp, Homo sapiens
catggtggcgcttgc

SEQ ID NO: 1228523 - DNA, 15 bp, Homo sapiens
gcatggtggcgcttg

SEQ ID NO: 1228524 - DNA, 15 bp, Homo sapiens
ggcatggtggcgctt

SEQ ID NO: 1228525 - DNA, 15 bp, Homo sapiens
aggcatggtggcgct

SEQ ID NO: 1228526 - DNA, 15 bp, Homo sapiens
gctaaaaaaaaaaaa

SEQ ID NO: 1228527 - DNA, 15 bp, Homo sapiens
tgctaaaaaaaaaaa

SEQ ID NO: 1228528 - DNA, 15 bp, Homo sapiens
ctgctaaaaaaaaaa

SEQ ID NO: 1228529 - DNA, 15 bp, Homo sapiens
tctctgctaaaaaaa

SEQ ID NO: 1228530 - DNA, 15 bp, Homo sapiens
gtctctgctaaaaaa

SEQ ID NO: 1228531 - DNA, 15 bp, Homo sapiens
tctagcctgaccaac

SEQ ID NO: 1228532 - DNA, 15 bp, Homo sapiens
gtctagcctgaccaa

SEQ ID NO: 1228533 - DNA, 15 bp, Homo sapiens
agtctagcctgacca

SEQ ID NO: 1228534 - DNA, 15 bp, Homo sapiens
gagtctagcctgacc

SEQ ID NO: 1228535 - DNA, 15 bp, Homo sapiens
cgagtctagcctgac

SEQ ID NO: 1228536 - DNA, 15 bp, Homo sapiens
tcgagtctagcctga

SEQ ID NO: 1228537 - DNA, 15 bp, Homo sapiens
ttcgagtctagcctg

SEQ ID NO: 1228538 - DNA, 15 bp, Homo sapiens
gttcgagtctagcct

SEQ ID NO: 1228539 - DNA, 15 bp, Homo sapiens
agttcgagtctagcc

SEQ ID NO: 1228540 - DNA, 15 bp, Homo sapiens
gagttcgagtctagc

SEQ ID NO: 1228541 - DNA, 15 bp, Homo sapiens
ggagttcgagtctag

SEQ ID NO: 1228542 - DNA, 15 bp, Homo sapiens
aggagttcgagtcta

SEQ ID NO: 1228543 - DNA, 15 bp, Homo sapiens
taggagttcgagtct

SEQ ID NO: 1228544 - DNA, 15 bp, Homo sapiens
ttaggagttcgagtc

SEQ ID NO: 1228545 - DNA, 15 bp, Homo sapiens
gttaggagttcgagt

SEQ ID NO: 1228546 - DNA, 15 bp, Homo sapiens
cgaggttaggagttc

SEQ ID NO: 1228547 - DNA, 15 bp, Homo sapiens
acgaggttaggagtt

SEQ ID NO: 1228548 - DNA, 15 bp, Homo sapiens
cacgaggttaggagt

SEQ ID NO: 1228549 - DNA, 15 bp, Homo sapiens
tcacgaggttaggag

SEQ ID NO: 1228550 - DNA, 15 bp, Homo sapiens
atcacgaggttagga

SEQ ID NO: 1228551 - DNA, 15 bp, Homo sapiens
gatcacgaggttagg

SEQ ID NO: 1228552 - DNA, 15 bp, Homo sapiens
ggatcacgaggttag

SEQ ID NO: 1228553 - DNA, 15 bp, Homo sapiens
tggatcacgaggtta

SEQ ID NO: 1228554 - DNA, 15 bp, Homo sapiens
gtggatcacgaggtt

SEQ ID NO: 1228555 - DNA, 15 bp, Homo sapiens
tgggtggatcacgag

SEQ ID NO: 1228556 - DNA, 15 bp, Homo sapiens
gtgggtggatcacga

SEQ ID NO: 1228557 - DNA, 15 bp, Homo sapiens
ggtgggtggatcacg

SEQ ID NO: 1228558 - DNA, 15 bp, Homo sapiens
tcctgcctgtaatcc

SEQ ID NO: 1228559 - DNA, 15 bp, Homo sapiens
ctcctgcctgtaatc

SEQ ID NO: 1228560 - DNA, 15 bp, Homo sapiens
gctcctgcctgtaat

SEQ ID NO: 1228561 - DNA, 15 bp, Homo sapiens
ggctcctgcctgtaa

SEQ ID NO: 1228562 - DNA, 15 bp, Homo sapiens
tggctcctgcctgta

SEQ ID NO: 1228563 - DNA, 15 bp, Homo sapiens
gtggctcctgcctgt

SEQ ID NO: 1228564 - DNA, 15 bp, Homo sapiens
tgtggctcctgcctg

SEQ ID NO: 1228565 - DNA, 15 bp, Homo sapiens
ctgtggctcctgcct

SEQ ID NO: 1228566 - DNA, 15 bp, Homo sapiens
gctgtggctcctgcc

SEQ ID NO: 1228567 - DNA, 15 bp, Homo sapiens
tgctgtggctcctgc

SEQ ID NO: 1228568 - DNA, 15 bp, Homo sapiens
gtgctgtggctcctg

SEQ ID NO: 1228569 - DNA, 15 bp, Homo sapiens
ggtgctgtggctcct

SEQ ID NO: 1228570 - DNA, 15 bp, Homo sapiens
aggtgctgtggctcc

SEQ ID NO: 1228571 - DNA, 15 bp, Homo sapiens
cagccaggtgctgtg

SEQ ID NO: 1228572 - DNA, 15 bp, Homo sapiens
tcagccaggtgctgt

SEQ ID NO: 1228573 - DNA, 15 bp, Homo sapiens
ttcagccaggtgctg

SEQ ID NO: 1228574 - DNA, 15 bp, Homo sapiens
gttcagccaggtgct

SEQ ID NO: 1228575 - DNA, 15 bp, Homo sapiens
agttcagccaggtgc

SEQ ID NO: 1228576 - DNA, 15 bp, Homo sapiens
gagttcagccaggtg

SEQ ID NO: 1228577 - DNA, 15 bp, Homo sapiens
agagttcagccaggt

SEQ ID NO: 1228578 - DNA, 15 bp, Homo sapiens
aagagttcagccagg

SEQ ID NO: 1228579 - DNA, 15 bp, Homo sapiens
aaagagttcagccag

SEQ ID NO: 1228580 - DNA, 15 bp, Homo sapiens
gaaagagttcagcca

SEQ ID NO: 1228581 - DNA, 15 bp, Homo sapiens
agaaagagttcagcc

SEQ ID NO: 1228582 - DNA, 15 bp, Homo sapiens
aagaaagagttcagc

SEQ ID NO: 1228583 - DNA, 15 bp, Homo sapiens
aaagaaagagttcag

SEQ ID NO: 1228584 - DNA, 15 bp, Homo sapiens
aaaagaaagagttca

SEQ ID NO: 1228585 - DNA, 15 bp, Homo sapiens
taaaagaaagagttc

SEQ ID NO: 1228586 - DNA, 15 bp, Homo sapiens
gtaaaagaaagagtt

SEQ ID NO: 1228587 - DNA, 15 bp, Homo sapiens
tgtaaaagaaagagt

SEQ ID NO: 1228588 - DNA, 15 bp, Homo sapiens
atgtaaaagaaagag

SEQ ID NO: 1228589 - DNA, 15 bp, Homo sapiens
tatgtaaaagaaaga

SEQ ID NO: 1228590 - DNA, 15 bp, Homo sapiens
ttatgtaaaagaaag

SEQ ID NO: 1228591 - DNA, 15 bp, Homo sapiens
attatgtaaaagaaa

SEQ ID NO: 1228592 - DNA, 15 bp, Homo sapiens
aattatgtaaaagaa

SEQ ID NO: 1228593 - DNA, 15 bp, Homo sapiens
taattatgtaaaaga

SEQ ID NO: 1228594 - DNA, 15 bp, Homo sapiens
ttaattatgtaaaag

SEQ ID NO: 1228595 - DNA, 15 bp, Homo sapiens
tttaattatgtaaaa

SEQ ID NO: 1228596 - DNA, 15 bp, Homo sapiens
gtttaattatgtaaa

SEQ ID NO: 1228597 - DNA, 15 bp, Homo sapiens
agtttaattatgtaa

SEQ ID NO: 1228598 - DNA, 15 bp, Homo sapiens
aagtttaattatgta

SEQ ID NO: 1228599 - DNA, 15 bp, Homo sapiens
taagtttaattatgt

SEQ ID NO: 1228600 - DNA, 15 bp, Homo sapiens
ataagtttaattatg

SEQ ID NO: 1228601 - DNA, 15 bp, Homo sapiens
aataagtttaattat

SEQ ID NO: 1228602 - DNA, 15 bp, Homo sapiens
aaataagtttaatta

SEQ ID NO: 1228603 - DNA, 15 bp, Homo sapiens
caaataagtttaatt

SEQ ID NO: 1228604 - DNA, 15 bp, Homo sapiens
gcaaataagtttaat

SEQ ID NO: 1228605 - DNA, 15 bp, Homo sapiens
agcaaataagtttaa

SEQ ID NO: 1228606 - DNA, 15 bp, Homo sapiens
gagcaaataagttta

SEQ ID NO: 1228607 - DNA, 15 bp, Homo sapiens
ggagcaaataagttt

SEQ ID NO: 1228608 - DNA, 15 bp, Homo sapiens
aggagcaaataagtt

SEQ ID NO: 1228609 - DNA, 15 bp, Homo sapiens
caggagcaaataagt

SEQ ID NO: 1228610 - DNA, 15 bp, Homo sapiens
ccaggagcaaataag

SEQ ID NO: 1228611 - DNA, 15 bp, Homo sapiens
accaggagcaaataa

SEQ ID NO: 1228612 - DNA, 15 bp, Homo sapiens
caccaggagcaaata

SEQ ID NO: 1228613 - DNA, 15 bp, Homo sapiens
ccaccaggagcaaat

SEQ ID NO: 1228614 - DNA, 15 bp, Homo sapiens
gccaccaggagcaaa

SEQ ID NO: 1228615 - DNA, 15 bp, Homo sapiens
tgccaccaggagcaa

SEQ ID NO: 1228616 - DNA, 15 bp, Homo sapiens
ctgccaccaggagca

SEQ ID NO: 1228617 - DNA, 15 bp, Homo sapiens
cctgccaccaggagc

SEQ ID NO: 1228618 - DNA, 15 bp, Homo sapiens
ccctgccaccaggag

SEQ ID NO: 1228619 - DNA, 15 bp, Homo sapiens
tccctgccaccagga

SEQ ID NO: 1228620 - DNA, 15 bp, Homo sapiens
gtccctgccaccagg

SEQ ID NO: 1228621 - DNA, 15 bp, Homo sapiens
ggtccctgccaccag

SEQ ID NO: 1228622 - DNA, 15 bp, Homo sapiens
aggtccctgccacca

SEQ ID NO: 1228623 - DNA, 15 bp, Homo sapiens
gaggtccctgccacc

SEQ ID NO: 1228624 - DNA, 15 bp, Homo sapiens
agaggtccctgccac

SEQ ID NO: 1228625 - DNA, 15 bp, Homo sapiens
aagaggtccctgcca

SEQ ID NO: 1228626 - DNA, 15 bp, Homo sapiens
caagaggtccctgcc

SEQ ID NO: 1228627 - DNA, 15 bp, Homo sapiens
gcaagaggtccctgc

SEQ ID NO: 1228628 - DNA, 15 bp, Homo sapiens
ggcaagaggtccctg

SEQ ID NO: 1228629 - DNA, 15 bp, Homo sapiens
gggcaagaggtccct

SEQ ID NO: 1228630 - DNA, 15 bp, Homo sapiens
ggggcaagaggtccc

SEQ ID NO: 1228631 - DNA, 15 bp, Homo sapiens
gggggcaagaggtcc

SEQ ID NO: 1228632 - DNA, 15 bp, Homo sapiens
agggggcaagaggtc

SEQ ID NO: 1228633 - DNA, 15 bp, Homo sapiens
gagggggcaagaggt

SEQ ID NO: 1228634 - DNA, 15 bp, Homo sapiens
agagggggcaagagg

SEQ ID NO: 1228635 - DNA, 15 bp, Homo sapiens
aagagggggcaagag

SEQ ID NO: 1228636 - DNA, 15 bp, Homo sapiens
gaagagggggcaaga

SEQ ID NO: 1228637 - DNA, 15 bp, Homo sapiens
ggaagagggggcaag

SEQ ID NO: 1228638 - DNA, 15 bp, Homo sapiens
aggaagagggggcaa

SEQ ID NO: 1228639 - DNA, 15 bp, Homo sapiens
gaggaagagggggca

SEQ ID NO: 1228640 - DNA, 15 bp, Homo sapiens
ggaggaagagggggc

SEQ ID NO: 1228641 - DNA, 15 bp, Homo sapiens
tggaggaagaggggg

SEQ ID NO: 1228642 - DNA, 15 bp, Homo sapiens
ttggaggaagagggg

SEQ ID NO: 1228643 - DNA, 15 bp, Homo sapiens
gttggaggaagaggg

SEQ ID NO: 1228644 - DNA, 15 bp, Homo sapiens
ggttggaggaagagg

SEQ ID NO: 1228645 - DNA, 15 bp, Homo sapiens
gggttggaggaagag

SEQ ID NO: 1228646 - DNA, 15 bp, Homo sapiens
ggggttggaggaaga

SEQ ID NO: 1228647 - DNA, 15 bp, Homo sapiens
aggggttggaggaag

SEQ ID NO: 1228648 - DNA, 15 bp, Homo sapiens
aaggggttggaggaa

SEQ ID NO: 1228649 - DNA, 15 bp, Homo sapiens
aaaggggttggagga

SEQ ID NO: 1228650 - DNA, 15 bp, Homo sapiens
taaaggggttggagg

SEQ ID NO: 1228651 - DNA, 15 bp, Homo sapiens
gtaaaggggttggag

SEQ ID NO: 1228652 - DNA, 15 bp, Homo sapiens
tgtaaaggggttgga

SEQ ID NO: 1228653 - DNA, 15 bp, Homo sapiens
ttgtaaaggggttgg

SEQ ID NO: 1228654 - DNA, 15 bp, Homo sapiens
attgtaaaggggttg

SEQ ID NO: 1228655 - DNA, 15 bp, Homo sapiens
tattgtaaaggggtt

SEQ ID NO: 1228656 - DNA, 15 bp, Homo sapiens
ttattgtaaaggggt

SEQ ID NO: 1228657 - DNA, 15 bp, Homo sapiens
gttattgtaaagggg

SEQ ID NO: 1228658 - DNA, 15 bp, Homo sapiens
agttattgtaaaggg

SEQ ID NO: 1228659 - DNA, 15 bp, Homo sapiens
cagttattgtaaagg

SEQ ID NO: 1228660 - DNA, 15 bp, Homo sapiens
tcagttattgtaaag

SEQ ID NO: 1228661 - DNA, 15 bp, Homo sapiens
ttcagttattgtaaa

SEQ ID NO: 1228662 - DNA, 15 bp, Homo sapiens
tttcagttattgtaa

SEQ ID NO: 1228663 - DNA, 15 bp, Homo sapiens
atttcagttattgta

SEQ ID NO: 1228664 - DNA, 15 bp, Homo sapiens
tatttcagttattgt

SEQ ID NO: 1228665 - DNA, 15 bp, Homo sapiens
gtatttcagttattg

SEQ ID NO: 1228666 - DNA, 15 bp, Homo sapiens
agtatttcagttatt

SEQ ID NO: 1228667 - DNA, 15 bp, Homo sapiens
gagtatttcagttat

SEQ ID NO: 1228668 - DNA, 15 bp, Homo sapiens
agagtatttcagtta

SEQ ID NO: 1228669 - DNA, 15 bp, Homo sapiens
cagagtatttcagtt

SEQ ID NO: 1228670 - DNA, 15 bp, Homo sapiens
tcagagtatttcagt

SEQ ID NO: 1228671 - DNA, 15 bp, Homo sapiens
atcagagtatttcag

SEQ ID NO: 1228672 - DNA, 15 bp, Homo sapiens
catcagagtatttca

SEQ ID NO: 1228673 - DNA, 15 bp, Homo sapiens
acatcagagtatttc

SEQ ID NO: 1228674 - DNA, 15 bp, Homo sapiens
gacatcagagtattt

SEQ ID NO: 1228675 - DNA, 15 bp, Homo sapiens
ggacatcagagtatt

SEQ ID NO: 1228676 - DNA, 15 bp, Homo sapiens
aggacatcagagtat

SEQ ID NO: 1228677 - DNA, 15 bp, Homo sapiens
caggacatcagagta

SEQ ID NO: 1228678 - DNA, 15 bp, Homo sapiens
gcaggacatcagagt

SEQ ID NO: 1228679 - DNA, 15 bp, Homo sapiens
tgcaggacatcagag

SEQ ID NO: 1228680 - DNA, 15 bp, Homo sapiens
ttgcaggacatcaga

SEQ ID NO: 1228681 - DNA, 15 bp, Homo sapiens
attgcaggacatcag

SEQ ID NO: 1228682 - DNA, 15 bp, Homo sapiens
tattgcaggacatca

SEQ ID NO: 1228683 - DNA, 15 bp, Homo sapiens
atattgcaggacatc

SEQ ID NO: 1228684 - DNA, 15 bp, Homo sapiens
aatattgcaggacat

SEQ ID NO: 1228685 - DNA, 15 bp, Homo sapiens
gaatattgcaggaca

SEQ ID NO: 1228686 - DNA, 15 bp, Homo sapiens
agaatattgcaggac

SEQ ID NO: 1228687 - DNA, 15 bp, Homo sapiens
aagaatattgcagga

SEQ ID NO: 1228688 - DNA, 15 bp, Homo sapiens
taagaatattgcagg

SEQ ID NO: 1228689 - DNA, 15 bp, Homo sapiens
gtaagaatattgcag

SEQ ID NO: 1228690 - DNA, 15 bp, Homo sapiens
agtaagaatattgca

SEQ ID NO: 1228691 - DNA, 15 bp, Homo sapiens
tagtaagaatattgc

SEQ ID NO: 1228692 - DNA, 15 bp, Homo sapiens
atagtaagaatattg

SEQ ID NO: 1228693 - DNA, 15 bp, Homo sapiens
aatagtaagaatatt

SEQ ID NO: 1228694 - DNA, 15 bp, Homo sapiens
aaatagtaagaatat

SEQ ID NO: 1228695 - DNA, 15 bp, Homo sapiens
taaatagtaagaata

SEQ ID NO: 1228696 - DNA, 15 bp, Homo sapiens
ataaatagtaagaat

SEQ ID NO: 1228697 - DNA, 15 bp, Homo sapiens
aataaatagtaagaa

SEQ ID NO: 1228698 - DNA, 15 bp, Homo sapiens
aaataaatagtaaga

SEQ ID NO: 1228699 - DNA, 15 bp, Homo sapiens
taaataaatagtaag

SEQ ID NO: 1228700 - DNA, 15 bp, Homo sapiens
ataaataaatagtaa

SEQ ID NO: 1228701 - DNA, 15 bp, Homo sapiens
aataaataaatagta

SEQ ID NO: 1228702 - DNA, 15 bp, Homo sapiens
aaataaataaatagt

SEQ ID NO: 1228703 - DNA, 15 bp, Homo sapiens
aaaataaataaatag

SEQ ID NO: 1228704 - DNA, 15 bp, Homo sapiens
acaaaaaataaataa

SEQ ID NO: 1228705 - DNA, 15 bp, Homo sapiens
tacaaaaaataaata

SEQ ID NO: 1228706 - DNA, 15 bp, Homo sapiens
ttacaaaaaataaat

SEQ ID NO: 1228707 - DNA, 15 bp, Homo sapiens
tttacaaaaaataaa

SEQ ID NO: 1228708 - DNA, 15 bp, Homo sapiens
ttttacaaaaaataa

SEQ ID NO: 1228709 - DNA, 15 bp, Homo sapiens
tttttacaaaaaata

SEQ ID NO: 1228710 - DNA, 15 bp, Homo sapiens
ctttttacaaaaaat

SEQ ID NO: 1228711 - DNA, 15 bp, Homo sapiens
gctttttacaaaaaa

SEQ ID NO: 1228712 - DNA, 15 bp, Homo sapiens
agctttttacaaaaa

SEQ ID NO: 1228713 - DNA, 15 bp, Homo sapiens
aagctttttacaaaa

SEQ ID NO: 1228714 - DNA, 15 bp, Homo sapiens
aaagctttttacaaa

SEQ ID NO: 1228715 - DNA, 15 bp, Homo sapiens
aaaagctttttacaa

SEQ ID NO: 1228716 - DNA, 15 bp, Homo sapiens
taaaagctttttaca

SEQ ID NO: 1228717 - DNA, 15 bp, Homo sapiens
ttaaaagctttttac

SEQ ID NO: 1228718 - DNA, 15 bp, Homo sapiens
attaaaagcttttta

SEQ ID NO: 1228719 - DNA, 15 bp, Homo sapiens
tattaaaagcttttt

SEQ ID NO: 1228720 - DNA, 15 bp, Homo sapiens
gtattaaaagctttt

SEQ ID NO: 1228721 - DNA, 15 bp, Homo sapiens
agtattaaaagcttt

SEQ ID NO: 1228722 - DNA, 15 bp, Homo sapiens
tagtattaaaagctt

SEQ ID NO: 1228723 - DNA, 15 bp, Homo sapiens
gtagtattaaaagct

SEQ ID NO: 1228724 - DNA, 15 bp, Homo sapiens
agtagtattaaaagc

SEQ ID NO: 1228725 - DNA, 15 bp, Homo sapiens
gagtagtattaaaag

SEQ ID NO: 1228726 - DNA, 15 bp, Homo sapiens
tgagtagtattaaaa

SEQ ID NO: 1228727 - DNA, 15 bp, Homo sapiens
ttgagtagtattaaa

SEQ ID NO: 1228728 - DNA, 15 bp, Homo sapiens
gttgagtagtattaa

SEQ ID NO: 1228729 - DNA, 15 bp, Homo sapiens
agttgagtagtatta

SEQ ID NO: 1228730 - DNA, 15 bp, Homo sapiens
cagttgagtagtatt

SEQ ID NO: 1228731 - DNA, 15 bp, Homo sapiens
gcagttgagtagtat

SEQ ID NO: 1228732 - DNA, 15 bp, Homo sapiens
tgcagttgagtagta

SEQ ID NO: 1228733 - DNA, 15 bp, Homo sapiens
ctgcagttgagtagt

SEQ ID NO: 1228734 - DNA, 15 bp, Homo sapiens
actgcagttgagtag

SEQ ID NO: 1228735 - DNA, 15 bp, Homo sapiens
tactgcagttgagta

SEQ ID NO: 1228736 - DNA, 15 bp, Homo sapiens
ctactgcagttgagt

SEQ ID NO: 1228737 - DNA, 15 bp, Homo sapiens
actactgcagttgag

SEQ ID NO: 1228738 - DNA, 15 bp, Homo sapiens
cactactgcagttga

SEQ ID NO: 1228739 - DNA, 15 bp, Homo sapiens
tcactactgcagttg

SEQ ID NO: 1228740 - DNA, 15 bp, Homo sapiens
ctcactactgcagtt

SEQ ID NO: 1228741 - DNA, 15 bp, Homo sapiens
cctcactactgcagt

SEQ ID NO: 1228742 - DNA, 15 bp, Homo sapiens
ccctcactactgcag

SEQ ID NO: 1228743 - DNA, 15 bp, Homo sapiens
cccctcactactgca

SEQ ID NO: 1228744 - DNA, 15 bp, Homo sapiens
ccccctcactactgc

SEQ ID NO: 1228745 - DNA, 15 bp, Homo sapiens
cccccctcactactg

SEQ ID NO: 1228746 - DNA, 15 bp, Homo sapiens
ccccccctcactact

SEQ ID NO: 1228747 - DNA, 15 bp, Homo sapiens
cccccccctcactac

SEQ ID NO: 1228748 - DNA, 15 bp, Homo sapiens
ccccccccctcacta

SEQ ID NO: 1228749 - DNA, 15 bp, Homo sapiens
cccccccccctcact

SEQ ID NO: 1228750 - DNA, 15 bp, Homo sapiens
ccccccccccctcac

SEQ ID NO: 1228751 - DNA, 15 bp, Homo sapiens
tccccccccccctca

SEQ ID NO: 1228752 - DNA, 15 bp, Homo sapiens
ttccccccccccctc

SEQ ID NO: 1228753 - DNA, 15 bp, Homo sapiens
cttccccccccccct

SEQ ID NO: 1228754 - DNA, 15 bp, Homo sapiens
acttccccccccccc

SEQ ID NO: 1228755 - DNA, 15 bp, Homo sapiens
tacttcccccccccc

SEQ ID NO: 1228756 - DNA, 15 bp, Homo sapiens
ctacttccccccccc

SEQ ID NO: 1228757 - DNA, 15 bp, Homo sapiens
tctacttcccccccc

SEQ ID NO: 1228758 - DNA, 15 bp, Homo sapiens
ctctacttccccccc

SEQ ID NO: 1228759 - DNA, 15 bp, Homo sapiens
gctctacttcccccc

SEQ ID NO: 1228760 - DNA, 15 bp, Homo sapiens
tgctctacttccccc

SEQ ID NO: 1228761 - DNA, 15 bp, Homo sapiens
ttgctctacttcccc

SEQ ID NO: 1228762 - DNA, 15 bp, Homo sapiens
cttgctctacttccc

SEQ ID NO: 1228763 - DNA, 15 bp, Homo sapiens
ccttgctctacttcc

SEQ ID NO: 1228764 - DNA, 15 bp, Homo sapiens
tccttgctctacttc

SEQ ID NO: 1228765 - DNA, 15 bp, Homo sapiens
ctccttgctctactt

SEQ ID NO: 1228766 - DNA, 15 bp, Homo sapiens
actccttgctctact

SEQ ID NO: 1228767 - DNA, 15 bp, Homo sapiens
tactccttgctctac

SEQ ID NO: 1228768 - DNA, 15 bp, Homo sapiens
atactccttgctcta

SEQ ID NO: 1228769 - DNA, 15 bp, Homo sapiens
catactccttgctct

SEQ ID NO: 1228770 - DNA, 15 bp, Homo sapiens
tcatactccttgctc

SEQ ID NO: 1228771 - DNA, 15 bp, Homo sapiens
atcatactccttgct

SEQ ID NO: 1228772 - DNA, 15 bp, Homo sapiens
gatcatactccttgc

SEQ ID NO: 1228773 - DNA, 15 bp, Homo sapiens
agatcatactccttg

SEQ ID NO: 1228774 - DNA, 15 bp, Homo sapiens
cagatcatactcctt

SEQ ID NO: 1228775 - DNA, 15 bp, Homo sapiens
acagatcatactcct

SEQ ID NO: 1228776 - DNA, 15 bp, Homo sapiens
tacagatcatactcc

SEQ ID NO: 1228777 - DNA, 15 bp, Homo sapiens
ttacagatcatactc

SEQ ID NO: 1228778 - DNA, 15 bp, Homo sapiens
gttacagatcatact

SEQ ID NO: 1228779 - DNA, 15 bp, Homo sapiens
agttacagatcatac

SEQ ID NO: 1228780 - DNA, 15 bp, Homo sapiens
cagttacagatcata

SEQ ID NO: 1228781 - DNA, 15 bp, Homo sapiens
tcagttacagatcat

SEQ ID NO: 1228782 - DNA, 15 bp, Homo sapiens
atcagttacagatca

SEQ ID NO: 1228783 - DNA, 15 bp, Homo sapiens
gatcagttacagatc

SEQ ID NO: 1228784 - DNA, 15 bp, Homo sapiens
ggatcagttacagat

SEQ ID NO: 1228785 - DNA, 15 bp, Homo sapiens
aggatcagttacaga

SEQ ID NO: 1228786 - DNA, 15 bp, Homo sapiens
caggatcagttacag

SEQ ID NO: 1228787 - DNA, 15 bp, Homo sapiens
tcaggatcagttaca

SEQ ID NO: 1228788 - DNA, 15 bp, Homo sapiens
ttcaggatcagttac

SEQ ID NO: 1228789 - DNA, 15 bp, Homo sapiens
gttcaggatcagtta

SEQ ID NO: 1228790 - DNA, 15 bp, Homo sapiens
tgttcaggatcagtt

SEQ ID NO: 1228791 - DNA, 15 bp, Homo sapiens
ttgttcaggatcagt

SEQ ID NO: 1228792 - DNA, 15 bp, Homo sapiens
attgttcaggatcag

SEQ ID NO: 1228793 - DNA, 15 bp, Homo sapiens
gattgttcaggatca

SEQ ID NO: 1228794 - DNA, 15 bp, Homo sapiens
tgattgttcaggatc

SEQ ID NO: 1228795 - DNA, 15 bp, Homo sapiens
ttgattgttcaggat

SEQ ID NO: 1228796 - DNA, 15 bp, Homo sapiens
attgattgttcagga

SEQ ID NO: 1228797 - DNA, 15 bp, Homo sapiens
aattgattgttcagg

SEQ ID NO: 1228798 - DNA, 15 bp, Homo sapiens
caattgattgttcag

SEQ ID NO: 1228799 - DNA, 15 bp, Homo sapiens
ccaattgattgttca

SEQ ID NO: 1228800 - DNA, 15 bp, Homo sapiens
cccaattgattgttc

SEQ ID NO: 1228801 - DNA, 15 bp, Homo sapiens
tcccaattgattgtt

SEQ ID NO: 1228802 - DNA, 15 bp, Homo sapiens
atcccaattgattgt

SEQ ID NO: 1228803 - DNA, 15 bp, Homo sapiens
tatcccaattgattg

SEQ ID NO: 1228804 - DNA, 15 bp, Homo sapiens
ttatcccaattgatt

SEQ ID NO: 1228805 - DNA, 15 bp, Homo sapiens
gttatcccaattgat

SEQ ID NO: 1228806 - DNA, 15 bp, Homo sapiens
agttatcccaattga

SEQ ID NO: 1228807 - DNA, 15 bp, Homo sapiens
gagttatcccaattg

SEQ ID NO: 1228808 - DNA, 15 bp, Homo sapiens
tgagttatcccaatt

SEQ ID NO: 1228809 - DNA, 15 bp, Homo sapiens
gtgagttatcccaat

SEQ ID NO: 1228810 - DNA, 15 bp, Homo sapiens
agtgagttatcccaa

SEQ ID NO: 1228811 - DNA, 15 bp, Homo sapiens
cagtgagttatccca

SEQ ID NO: 1228812 - DNA, 15 bp, Homo sapiens
gcagtgagttatccc

SEQ ID NO: 1228813 - DNA, 15 bp, Homo sapiens
ggcagtgagttatcc

SEQ ID NO: 1228814 - DNA, 15 bp, Homo sapiens
aggcagtgagttatc

SEQ ID NO: 1228815 - DNA, 15 bp, Homo sapiens
taggcagtgagttat

SEQ ID NO: 1228816 - DNA, 15 bp, Homo sapiens
ctaggcagtgagtta

SEQ ID NO: 1228817 - DNA, 15 bp, Homo sapiens
tctaggcagtgagtt

SEQ ID NO: 1228818 - DNA, 15 bp, Homo sapiens
atctaggcagtgagt

SEQ ID NO: 1228819 - DNA, 15 bp, Homo sapiens
tatctaggcagtgag

SEQ ID NO: 1228820 - DNA, 15 bp, Homo sapiens
ttatctaggcagtga

SEQ ID NO: 1228821 - DNA, 15 bp, Homo sapiens
attatctaggcagtg

SEQ ID NO: 1228822 - DNA, 15 bp, Homo sapiens
aattatctaggcagt

SEQ ID NO: 1228823 - DNA, 15 bp, Homo sapiens
gaattatctaggcag

SEQ ID NO: 1228824 - DNA, 15 bp, Homo sapiens
tgaattatctaggca

SEQ ID NO: 1228825 - DNA, 15 bp, Homo sapiens
gtgaattatctaggc

SEQ ID NO: 1228826 - DNA, 15 bp, Homo sapiens
agtgaattatctagg

SEQ ID NO: 1228827 - DNA, 15 bp, Homo sapiens
tagtgaattatctag

SEQ ID NO: 1228828 - DNA, 15 bp, Homo sapiens
atagtgaattatcta

SEQ ID NO: 1228829 - DNA, 15 bp, Homo sapiens
aatagtgaattatct

SEQ ID NO: 1228830 - DNA, 15 bp, Homo sapiens
aaatagtgaattatc

SEQ ID NO: 1228831 - DNA, 15 bp, Homo sapiens
taaatagtgaattat

SEQ ID NO: 1228832 - DNA, 15 bp, Homo sapiens
ctaaatagtgaatta

SEQ ID NO: 1228833 - DNA, 15 bp, Homo sapiens
tctaaatagtgaatt

SEQ ID NO: 1228834 - DNA, 15 bp, Homo sapiens
atctaaatagtgaat

SEQ ID NO: 1228835 - DNA, 15 bp, Homo sapiens
catctaaatagtgaa

SEQ ID NO: 1228836 - DNA, 15 bp, Homo sapiens
gcatctaaatagtga

SEQ ID NO: 1228837 - DNA, 15 bp, Homo sapiens
agcatctaaatagtg

SEQ ID NO: 1228838 - DNA, 15 bp, Homo sapiens
cagcatctaaatagt

SEQ ID NO: 1228839 - DNA, 15 bp, Homo sapiens
acagcatctaaatag

SEQ ID NO: 1228840 - DNA, 15 bp, Homo sapiens
tacagcatctaaata

SEQ ID NO: 1228841 - DNA, 15 bp, Homo sapiens
atacagcatctaaat

SEQ ID NO: 1228842 - DNA, 15 bp, Homo sapiens
aatacagcatctaaa

SEQ ID NO: 1228843 - DNA, 15 bp, Homo sapiens
taatacagcatctaa

SEQ ID NO: 1228844 - DNA, 15 bp, Homo sapiens
ataatacagcatcta

SEQ ID NO: 1228845 - DNA, 15 bp, Homo sapiens
aataatacagcatct

SEQ ID NO: 1228846 - DNA, 15 bp, Homo sapiens
taataatacagcatc

SEQ ID NO: 1228847 - DNA, 15 bp, Homo sapiens
ctaataatacagcat

SEQ ID NO: 1228848 - DNA, 15 bp, Homo sapiens
cctaataatacagca

SEQ ID NO: 1228849 - DNA, 15 bp, Homo sapiens
ccctaataatacagc

SEQ ID NO: 1228850 - DNA, 15 bp, Homo sapiens
accctaataatacag

SEQ ID NO: 1228851 - DNA, 15 bp, Homo sapiens
gaccctaataataca

SEQ ID NO: 1228852 - DNA, 15 bp, Homo sapiens
tgaccctaataatac

SEQ ID NO: 1228853 - DNA, 15 bp, Homo sapiens
ttgaccctaataata

SEQ ID NO: 1228854 - DNA, 15 bp, Homo sapiens
gttgaccctaataat

SEQ ID NO: 1228855 - DNA, 15 bp, Homo sapiens
tgttgaccctaataa

SEQ ID NO: 1228856 - DNA, 15 bp, Homo sapiens
ctgttgaccctaata

SEQ ID NO: 1228857 - DNA, 15 bp, Homo sapiens
gctgttgaccctaat

SEQ ID NO: 1228858 - DNA, 15 bp, Homo sapiens
agctgttgaccctaa

SEQ ID NO: 1228859 - DNA, 15 bp, Homo sapiens
tagctgttgacccta

SEQ ID NO: 1228860 - DNA, 15 bp, Homo sapiens
ttagctgttgaccct

SEQ ID NO: 1228861 - DNA, 15 bp, Homo sapiens
gttagctgttgaccc

SEQ ID NO: 1228862 - DNA, 15 bp, Homo sapiens
agttagctgttgacc

SEQ ID NO: 1228863 - DNA, 15 bp, Homo sapiens
cagttagctgttgac

SEQ ID NO: 1228864 - DNA, 15 bp, Homo sapiens
ccagttagctgttga

SEQ ID NO: 1228865 - DNA, 15 bp, Homo sapiens
tccagttagctgttg

SEQ ID NO: 1228866 - DNA, 15 bp, Homo sapiens
ctccagttagctgtt

SEQ ID NO: 1228867 - DNA, 15 bp, Homo sapiens
gctccagttagctgt

SEQ ID NO: 1228868 - DNA, 15 bp, Homo sapiens
tgctccagttagctg

SEQ ID NO: 1228869 - DNA, 15 bp, Homo sapiens
ttgctccagttagct

SEQ ID NO: 1228870 - DNA, 15 bp, Homo sapiens
gttgctccagttagc

SEQ ID NO: 1228871 - DNA, 15 bp, Homo sapiens
tgttgctccagttag

SEQ ID NO: 1228872 - DNA, 15 bp, Homo sapiens
ctgttgctccagtta

SEQ ID NO: 1228873 - DNA, 15 bp, Homo sapiens
gctgttgctccagtt

SEQ ID NO: 1228874 - DNA, 15 bp, Homo sapiens
agctgttgctccagt

SEQ ID NO: 1228875 - DNA, 15 bp, Homo sapiens
tagctgttgctccag

SEQ ID NO: 1228876 - DNA, 15 bp, Homo sapiens
ttagctgttgctcca

SEQ ID NO: 1228877 - DNA, 15 bp, Homo sapiens
tttagctgttgctcc

SEQ ID NO: 1228878 - DNA, 15 bp, Homo sapiens
ctttagctgttgctc

SEQ ID NO: 1228879 - DNA, 15 bp, Homo sapiens
actttagctgttgct

SEQ ID NO: 1228880 - DNA, 15 bp, Homo sapiens
gactttagctgttgc

SEQ ID NO: 1228881 - DNA, 15 bp, Homo sapiens
tgactttagctgttg

SEQ ID NO: 1228882 - DNA, 15 bp, Homo sapiens
ttgactttagctgtt

SEQ ID NO: 1228883 - DNA, 15 bp, Homo sapiens
cttgactttagctgt

SEQ ID NO: 1228884 - DNA, 15 bp, Homo sapiens
tcttgactttagctg

SEQ ID NO: 1228885 - DNA, 15 bp, Homo sapiens
atcttgactttagct

SEQ ID NO: 1228886 - DNA, 15 bp, Homo sapiens
tatcttgactttagc

SEQ ID NO: 1228887 - DNA, 15 bp, Homo sapiens
ttatcttgactttag

SEQ ID NO: 1228888 - DNA, 15 bp, Homo sapiens
cttatcttgacttta

SEQ ID NO: 1228889 - DNA, 15 bp, Homo sapiens
tcttatcttgacttt

SEQ ID NO: 1228890 - DNA, 15 bp, Homo sapiens
ctcttatcttgactt

SEQ ID NO: 1228891 - DNA, 15 bp, Homo sapiens
tctcttatcttgact

SEQ ID NO: 1228892 - DNA, 15 bp, Homo sapiens
ttctcttatcttgac

SEQ ID NO: 1228893 - DNA, 15 bp, Homo sapiens
attctcttatcttga

SEQ ID NO: 1228894 - DNA, 15 bp, Homo sapiens
aattctcttatcttg

SEQ ID NO: 1228895 - DNA, 15 bp, Homo sapiens
caattctcttatctt

SEQ ID NO: 1228896 - DNA, 15 bp, Homo sapiens
acaattctcttatct

SEQ ID NO: 1228897 - DNA, 15 bp, Homo sapiens
gacaattctcttatc

SEQ ID NO: 1228898 - DNA, 15 bp, Homo sapiens
tgacaattctcttat

SEQ ID NO: 1228899 - DNA, 15 bp, Homo sapiens
atgacaattctctta

SEQ ID NO: 1228900 - DNA, 15 bp, Homo sapiens
tatgacaattctctt

SEQ ID NO: 1228901 - DNA, 15 bp, Homo sapiens
ctatgacaattctct

SEQ ID NO: 1228902 - DNA, 15 bp, Homo sapiens
cctatgacaattctc

SEQ ID NO: 1228903 - DNA, 15 bp, Homo sapiens
acctatgacaattct

SEQ ID NO: 1228904 - DNA, 15 bp, Homo sapiens
cacctatgacaattc

SEQ ID NO: 1228905 - DNA, 15 bp, Homo sapiens
gcacctatgacaatt

SEQ ID NO: 1228906 - DNA, 15 bp, Homo sapiens
agcacctatgacaat

SEQ ID NO: 1228907 - DNA, 15 bp, Homo sapiens
cagcacctatgacaa

SEQ ID NO: 1228908 - DNA, 15 bp, Homo sapiens
ccagcacctatgaca

SEQ ID NO: 1228909 - DNA, 15 bp, Homo sapiens
tccagcacctatgac

SEQ ID NO: 1228910 - DNA, 15 bp, Homo sapiens
gtccagcacctatga

SEQ ID NO: 1228911 - DNA, 15 bp, Homo sapiens
agtccagcacctatg

SEQ ID NO: 1228912 - DNA, 15 bp, Homo sapiens
aagtccagcacctat

SEQ ID NO: 1228913 - DNA, 15 bp, Homo sapiens
aaagtccagcaccta

SEQ ID NO: 1228914 - DNA, 15 bp, Homo sapiens
aaaagtccagcacct

SEQ ID NO: 1228915 - DNA, 15 bp, Homo sapiens
gaaaagtccagcacc

SEQ ID NO: 1228916 - DNA, 15 bp, Homo sapiens
agaaaagtccagcac

SEQ ID NO: 1228917 - DNA, 15 bp, Homo sapiens
gagaaaagtccagca

SEQ ID NO: 1228918 - DNA, 15 bp, Homo sapiens
agagaaaagtccagc

SEQ ID NO: 1228919 - DNA, 15 bp, Homo sapiens
gagagaaaagtccag

SEQ ID NO: 1228920 - DNA, 15 bp, Homo sapiens
ggagagaaaagtcca

SEQ ID NO: 1228921 - DNA, 15 bp, Homo sapiens
aggagagaaaagtcc

SEQ ID NO: 1228922 - DNA, 15 bp, Homo sapiens
gaggagagaaaagtc

SEQ ID NO: 1228923 - DNA, 15 bp, Homo sapiens
tgaggagagaaaagt

SEQ ID NO: 1228924 - DNA, 15 bp, Homo sapiens
ttgaggagagaaaag

SEQ ID NO: 1228925 - DNA, 15 bp, Homo sapiens
gttgaggagagaaaa

SEQ ID NO: 1228926 - DNA, 15 bp, Homo sapiens
tgttgaggagagaaa

SEQ ID NO: 1228927 - DNA, 15 bp, Homo sapiens
atgttgaggagagaa

SEQ ID NO: 1228928 - DNA, 15 bp, Homo sapiens
gatgttgaggagaga

SEQ ID NO: 1228929 - DNA, 15 bp, Homo sapiens
tgatgttgaggagag

SEQ ID NO: 1228930 - DNA, 15 bp, Homo sapiens
atgatgttgaggaga

SEQ ID NO: 1228931 - DNA, 15 bp, Homo sapiens
gatgatgttgaggag

SEQ ID NO: 1228932 - DNA, 15 bp, Homo sapiens
tgatgatgttgagga

SEQ ID NO: 1228933 - DNA, 15 bp, Homo sapiens
gtgatgatgttgagg

SEQ ID NO: 1228934 - DNA, 15 bp, Homo sapiens
agtgatgatgttgag

SEQ ID NO: 1228935 - DNA, 15 bp, Homo sapiens
aagtgatgatgttga

SEQ ID NO: 1228936 - DNA, 15 bp, Homo sapiens
gaagtgatgatgttg

SEQ ID NO: 1228937 - DNA, 15 bp, Homo sapiens
tgaagtgatgatgtt

SEQ ID NO: 1228938 - DNA, 15 bp, Homo sapiens
gtgaagtgatgatgt

SEQ ID NO: 1228939 - DNA, 15 bp, Homo sapiens
ggtgaagtgatgatg

SEQ ID NO: 1228940 - DNA, 15 bp, Homo sapiens
aggtgaagtgatgat

SEQ ID NO: 1228941 - DNA, 15 bp, Homo sapiens
aaggtgaagtgatga

SEQ ID NO: 1228942 - DNA, 15 bp, Homo sapiens
gaaggtgaagtgatg

SEQ ID NO: 1228943 - DNA, 15 bp, Homo sapiens
ggaaggtgaagtgat

SEQ ID NO: 1228944 - DNA, 15 bp, Homo sapiens
aggaaggtgaagtga

SEQ ID NO: 1228945 - DNA, 15 bp, Homo sapiens
caggaaggtgaagtg

SEQ ID NO: 1228946 - DNA, 15 bp, Homo sapiens
tcaggaaggtgaagt

SEQ ID NO: 1228947 - DNA, 15 bp, Homo sapiens
ttcaggaaggtgaag

SEQ ID NO: 1228948 - DNA, 15 bp, Homo sapiens
gttcaggaaggtgaa

SEQ ID NO: 1228949 - DNA, 15 bp, Homo sapiens
agttcaggaaggtga

SEQ ID NO: 1228950 - DNA, 15 bp, Homo sapiens
gagttcaggaaggtg

SEQ ID NO: 1228951 - DNA, 15 bp, Homo sapiens
ggagttcaggaaggt

SEQ ID NO: 1228952 - DNA, 15 bp, Homo sapiens
cggagttcaggaagg

SEQ ID NO: 1228953 - DNA, 15 bp, Homo sapiens
gcggagttcaggaag

SEQ ID NO: 1228954 - DNA, 15 bp, Homo sapiens
ggcggagttcaggaa

SEQ ID NO: 1228955 - DNA, 15 bp, Homo sapiens
gggcggagttcagga

SEQ ID NO: 1228956 - DNA, 15 bp, Homo sapiens
tgggcggagttcagg

SEQ ID NO: 1228957 - DNA, 15 bp, Homo sapiens
gtgggcggagttcag

SEQ ID NO: 1228958 - DNA, 15 bp, Homo sapiens
tgtgggcggagttca

SEQ ID NO: 1228959 - DNA, 15 bp, Homo sapiens
atgtgggcggagttc

SEQ ID NO: 1228960 - DNA, 15 bp, Homo sapiens
catgtgggcggagtt

SEQ ID NO: 1228961 - DNA, 15 bp, Homo sapiens
acatgtgggcggagt

SEQ ID NO: 1228962 - DNA, 15 bp, Homo sapiens
aacatgtgggcggag

SEQ ID NO: 1228963 - DNA, 15 bp, Homo sapiens
gaacatgtgggcgga

SEQ ID NO: 1228964 - DNA, 15 bp, Homo sapiens
agaacatgtgggcgg

SEQ ID NO: 1228965 - DNA, 15 bp, Homo sapiens
aagaacatgtgggcg

SEQ ID NO: 1228966 - DNA, 15 bp, Homo sapiens
gaagaacatgtgggc

SEQ ID NO: 1228967 - DNA, 15 bp, Homo sapiens
agaagaacatgtggg

SEQ ID NO: 1228968 - DNA, 15 bp, Homo sapiens
aagaagaacatgtgg

SEQ ID NO: 1228969 - DNA, 15 bp, Homo sapiens
gaagaagaacatgtg

SEQ ID NO: 1228970 - DNA, 15 bp, Homo sapiens
ggaagaagaacatgt

SEQ ID NO: 1228971 - DNA, 15 bp, Homo sapiens
aggaagaagaacatg

SEQ ID NO: 1228972 - DNA, 15 bp, Homo sapiens
gaggaagaagaacat

SEQ ID NO: 1228973 - DNA, 15 bp, Homo sapiens
ggaggaagaagaaca

SEQ ID NO: 1228974 - DNA, 15 bp, Homo sapiens
aggaggaagaagaac

SEQ ID NO: 1228975 - DNA, 15 bp, Homo sapiens
aaggaggaagaagaa

SEQ ID NO: 1228976 - DNA, 15 bp, Homo sapiens
gaaggaggaagaaga

SEQ ID NO: 1228977 - DNA, 15 bp, Homo sapiens
agaaggaggaagaag

SEQ ID NO: 1228978 - DNA, 15 bp, Homo sapiens
gagaaggaggaagaa

SEQ ID NO: 1228979 - DNA, 15 bp, Homo sapiens
agagaaggaggaaga

SEQ ID NO: 1228980 - DNA, 15 bp, Homo sapiens
ggtgttagagaagga

SEQ ID NO: 1228981 - DNA, 15 bp, Homo sapiens
aggtgttagagaagg

SEQ ID NO: 1228982 - DNA, 15 bp, Homo sapiens
taggtgttagagaag

SEQ ID NO: 1228983 - DNA, 15 bp, Homo sapiens
gtaggtgttagagaa

SEQ ID NO: 1228984 - DNA, 15 bp, Homo sapiens
agtaggtgttagaga

SEQ ID NO: 1228985 - DNA, 15 bp, Homo sapiens
cagtaggtgttagag

SEQ ID NO: 1228986 - DNA, 15 bp, Homo sapiens
tcagtaggtgttaga

SEQ ID NO: 1228987 - DNA, 15 bp, Homo sapiens
ctcagtaggtgttag

SEQ ID NO: 1228988 - DNA, 15 bp, Homo sapiens
tctcagtaggtgtta

SEQ ID NO: 1228989 - DNA, 15 bp, Homo sapiens
ttctcagtaggtgtt

SEQ ID NO: 1228990 - DNA, 15 bp, Homo sapiens
tttctcagtaggtgt

SEQ ID NO: 1228991 - DNA, 15 bp, Homo sapiens
atttctcagtaggtg

SEQ ID NO: 1228992 - DNA, 15 bp, Homo sapiens
aatttctcagtaggt

SEQ ID NO: 1228993 - DNA, 15 bp, Homo sapiens
caatttctcagtagg

SEQ ID NO: 1228994 - DNA, 15 bp, Homo sapiens
tcaatttctcagtag

SEQ ID NO: 1228995 - DNA, 15 bp, Homo sapiens
ctcaatttctcagta

SEQ ID NO: 1228996 - DNA, 15 bp, Homo sapiens
tctcaatttctcagt

SEQ ID NO: 1228997 - DNA, 15 bp, Homo sapiens
ttctcaatttctcag

SEQ ID NO: 1228998 - DNA, 15 bp, Homo sapiens
cttctcaatttctca

SEQ ID NO: 1228999 - DNA, 15 bp, Homo sapiens
ccttctcaatttctc

SEQ ID NO: 1229000 - DNA, 15 bp, Homo sapiens
gccttctcaatttct

SEQ ID NO: 1229001 - DNA, 15 bp, Homo sapiens
cgccttctcaatttc

SEQ ID NO: 1229002 - DNA, 15 bp, Homo sapiens
tcgccttctcaattt

SEQ ID NO: 1229003 - DNA, 15 bp, Homo sapiens
atcgccttctcaatt

SEQ ID NO: 1229004 - DNA, 15 bp, Homo sapiens
aatcgccttctcaat

SEQ ID NO: 1229005 - DNA, 15 bp, Homo sapiens
gaatcgccttctcaa

SEQ ID NO: 1229006 - DNA, 15 bp, Homo sapiens
agaatcgccttctca

SEQ ID NO: 1229007 - DNA, 15 bp, Homo sapiens
gagaatcgccttctc

SEQ ID NO: 1229008 - DNA, 15 bp, Homo sapiens
agagaatcgccttct

SEQ ID NO: 1229009 - DNA, 15 bp, Homo sapiens
aagagaatcgccttc

SEQ ID NO: 1229010 - DNA, 15 bp, Homo sapiens
gaagagaatcgcctt

SEQ ID NO: 1229011 - DNA, 15 bp, Homo sapiens
agaagagaatcgcct

SEQ ID NO: 1229012 - DNA, 15 bp, Homo sapiens
cagaagagaatcgcc

SEQ ID NO: 1229013 - DNA, 15 bp, Homo sapiens
ccagaagagaatcgc

SEQ ID NO: 1229014 - DNA, 15 bp, Homo sapiens
gccagaagagaatcg

SEQ ID NO: 1229015 - DNA, 15 bp, Homo sapiens
ggccagaagagaatc

SEQ ID NO: 1229016 - DNA, 15 bp, Homo sapiens
tggccagaagagaat

SEQ ID NO: 1229017 - DNA, 15 bp, Homo sapiens
ttggccagaagagaa

SEQ ID NO: 1229018 - DNA, 15 bp, Homo sapiens
attggccagaagaga

SEQ ID NO: 1229019 - DNA, 15 bp, Homo sapiens
tattggccagaagag

SEQ ID NO: 1229020 - DNA, 15 bp, Homo sapiens
ttattggccagaaga

SEQ ID NO: 1229021 - DNA, 15 bp, Homo sapiens
attattggccagaag

SEQ ID NO: 1229022 - DNA, 15 bp, Homo sapiens
tattattggccagaa

SEQ ID NO: 1229023 - DNA, 15 bp, Homo sapiens
atattattggccaga

SEQ ID NO: 1229024 - DNA, 15 bp, Homo sapiens
aatattattggccag

SEQ ID NO: 1229025 - DNA, 15 bp, Homo sapiens
taatattattggcca

SEQ ID NO: 1229026 - DNA, 15 bp, Homo sapiens
ataatattattggcc

SEQ ID NO: 1229027 - DNA, 15 bp, Homo sapiens
tataatattattggc

SEQ ID NO: 1229028 - DNA, 15 bp, Homo sapiens
gtataatattattgg

SEQ ID NO: 1229029 - DNA, 15 bp, Homo sapiens
agtataatattattg

SEQ ID NO: 1229030 - DNA, 15 bp, Homo sapiens
tagtataatattatt

SEQ ID NO: 1229031 - DNA, 15 bp, Homo sapiens
atagtataatattat

SEQ ID NO: 1229032 - DNA, 15 bp, Homo sapiens
aatagtataatatta

SEQ ID NO: 1229033 - DNA, 15 bp, Homo sapiens
aaatagtataatatt

SEQ ID NO: 1229034 - DNA, 15 bp, Homo sapiens
gaaatagtataatat

SEQ ID NO: 1229035 - DNA, 15 bp, Homo sapiens
tgaaatagtataata

SEQ ID NO: 1229036 - DNA, 15 bp, Homo sapiens
ctgaaatagtataat

SEQ ID NO: 1229037 - DNA, 15 bp, Homo sapiens
tctgaaatagtataa

SEQ ID NO: 1229038 - DNA, 15 bp, Homo sapiens
ctctgaaatagtata

SEQ ID NO: 1229039 - DNA, 15 bp, Homo sapiens
gctctgaaatagtat

SEQ ID NO: 1229040 - DNA, 15 bp, Homo sapiens
tgctctgaaatagta

SEQ ID NO: 1229041 - DNA, 15 bp, Homo sapiens
ttgctctgaaatagt

SEQ ID NO: 1229042 - DNA, 15 bp, Homo sapiens
cttgctctgaaatag

SEQ ID NO: 1229043 - DNA, 15 bp, Homo sapiens
ccttgctctgaaata

SEQ ID NO: 1229044 - DNA, 15 bp, Homo sapiens
accttgctctgaaat

SEQ ID NO: 1229045 - DNA, 15 bp, Homo sapiens
aaccttgctctgaaa

SEQ ID NO: 1229046 - DNA, 15 bp, Homo sapiens
gaaccttgctctgaa

SEQ ID NO: 1229047 - DNA, 15 bp, Homo sapiens
agaaccttgctctga

SEQ ID NO: 1229048 - DNA, 15 bp, Homo sapiens
tagaaccttgctctg

SEQ ID NO: 1229049 - DNA, 15 bp, Homo sapiens
atagaaccttgctct

SEQ ID NO: 1229050 - DNA, 15 bp, Homo sapiens
tatagaaccttgctc

SEQ ID NO: 1229051 - DNA, 15 bp, Homo sapiens
atatagaaccttgct

SEQ ID NO: 1229052 - DNA, 15 bp, Homo sapiens
catatagaaccttgc

SEQ ID NO: 1229053 - DNA, 15 bp, Homo sapiens
gcatatagaaccttg

SEQ ID NO: 1229054 - DNA, 15 bp, Homo sapiens
agcatatagaacctt

SEQ ID NO: 1229055 - DNA, 15 bp, Homo sapiens
tagcatatagaacct

SEQ ID NO: 1229056 - DNA, 15 bp, Homo sapiens
ttagcatatagaacc

SEQ ID NO: 1229057 - DNA, 15 bp, Homo sapiens
tttagcatatagaac

SEQ ID NO: 1229058 - DNA, 15 bp, Homo sapiens
gtttagcatatagaa

SEQ ID NO: 1229059 - DNA, 15 bp, Homo sapiens
agtttagcatataga

SEQ ID NO: 1229060 - DNA, 15 bp, Homo sapiens
aagtttagcatatag

SEQ ID NO: 1229061 - DNA, 15 bp, Homo sapiens
aaagtttagcatata

SEQ ID NO: 1229062 - DNA, 15 bp, Homo sapiens
caaagtttagcatat

SEQ ID NO: 1229063 - DNA, 15 bp, Homo sapiens
ccaaagtttagcata

SEQ ID NO: 1229064 - DNA, 15 bp, Homo sapiens
tccaaagtttagcat

SEQ ID NO: 1229065 - DNA, 15 bp, Homo sapiens
ttccaaagtttagca

SEQ ID NO: 1229066 - DNA, 15 bp, Homo sapiens
cttccaaagtttagc

SEQ ID NO: 1229067 - DNA, 15 bp, Homo sapiens
ccttccaaagtttag

SEQ ID NO: 1229068 - DNA, 15 bp, Homo sapiens
gccttccaaagttta

SEQ ID NO: 1229069 - DNA, 15 bp, Homo sapiens
tgccttccaaagttt

SEQ ID NO: 1229070 - DNA, 15 bp, Homo sapiens
atgccttccaaagtt

SEQ ID NO: 1229071 - DNA, 15 bp, Homo sapiens
aatgccttccaaagt

SEQ ID NO: 1229072 - DNA, 15 bp, Homo sapiens
gaatgccttccaaag

SEQ ID NO: 1229073 - DNA, 15 bp, Homo sapiens
agaatgccttccaaa

SEQ ID NO: 1229074 - DNA, 15 bp, Homo sapiens
aagaatgccttccaa

SEQ ID NO: 1229075 - DNA, 15 bp, Homo sapiens
taagaatgccttcca

SEQ ID NO: 1229076 - DNA, 15 bp, Homo sapiens
ctaagaatgccttcc

SEQ ID NO: 1229077 - DNA, 15 bp, Homo sapiens
tctaagaatgccttc

SEQ ID NO: 1229078 - DNA, 15 bp, Homo sapiens
atctaagaatgcctt

SEQ ID NO: 1229079 - DNA, 15 bp, Homo sapiens
tatctaagaatgcct

SEQ ID NO: 1229080 - DNA, 15 bp, Homo sapiens
atatctaagaatgcc

SEQ ID NO: 1229081 - DNA, 15 bp, Homo sapiens
aatatctaagaatgc

SEQ ID NO: 1229082 - DNA, 15 bp, Homo sapiens
gaatatctaagaatg

SEQ ID NO: 1229083 - DNA, 15 bp, Homo sapiens
ggaatatctaagaat

SEQ ID NO: 1229084 - DNA, 15 bp, Homo sapiens
aggaatatctaagaa

SEQ ID NO: 1229085 - DNA, 15 bp, Homo sapiens
gaggaatatctaaga

SEQ ID NO: 1229086 - DNA, 15 bp, Homo sapiens
ggaggaatatctaag

SEQ ID NO: 1229087 - DNA, 15 bp, Homo sapiens
aggaggaatatctaa

SEQ ID NO: 1229088 - DNA, 15 bp, Homo sapiens
gaggaggaatatcta

SEQ ID NO: 1229089 - DNA, 15 bp, Homo sapiens
ggaggaggaatatct

SEQ ID NO: 1229090 - DNA, 15 bp, Homo sapiens
gggaggaggaatatc

SEQ ID NO: 1229091 - DNA, 15 bp, Homo sapiens
agggaggaggaatat

SEQ ID NO: 1229092 - DNA, 15 bp, Homo sapiens
cagggaggaggaata

SEQ ID NO: 1229093 - DNA, 15 bp, Homo sapiens
gcagggaggaggaat

SEQ ID NO: 1229094 - DNA, 15 bp, Homo sapiens
cgcagggaggaggaa

SEQ ID NO: 1229095 - DNA, 15 bp, Homo sapiens
ccgcagggaggagga

SEQ ID NO: 1229096 - DNA, 15 bp, Homo sapiens
cccgcagggaggagg

SEQ ID NO: 1229097 - DNA, 15 bp, Homo sapiens
gcccgcagggaggag

SEQ ID NO: 1229098 - DNA, 15 bp, Homo sapiens
agcccgcagggagga

SEQ ID NO: 1229099 - DNA, 15 bp, Homo sapiens
tagcccgcagggagg

SEQ ID NO: 1229100 - DNA, 15 bp, Homo sapiens
ctagcccgcagggag

SEQ ID NO: 1229101 - DNA, 15 bp, Homo sapiens
tctagcccgcaggga

SEQ ID NO: 1229102 - DNA, 15 bp, Homo sapiens
gtctagcccgcaggg

SEQ ID NO: 1229103 - DNA, 15 bp, Homo sapiens
agtctagcccgcagg

SEQ ID NO: 1229104 - DNA, 15 bp, Homo sapiens
aagtctagcccgcag

SEQ ID NO: 1229105 - DNA, 15 bp, Homo sapiens
taagtctagcccgca

SEQ ID NO: 1229106 - DNA, 15 bp, Homo sapiens
gtaagtctagcccgc

SEQ ID NO: 1229107 - DNA, 15 bp, Homo sapiens
agtaagtctagcccg

SEQ ID NO: 1229108 - DNA, 15 bp, Homo sapiens
tagtaagtctagccc

SEQ ID NO: 1229109 - DNA, 15 bp, Homo sapiens
ctagtaagtctagcc

SEQ ID NO: 1229110 - DNA, 15 bp, Homo sapiens
cctagtaagtctagc

SEQ ID NO: 1229111 - DNA, 15 bp, Homo sapiens
ccctagtaagtctag

SEQ ID NO: 1229112 - DNA, 15 bp, Homo sapiens
cccctagtaagtcta

SEQ ID NO: 1229113 - DNA, 15 bp, Homo sapiens
acccctagtaagtct

SEQ ID NO: 1229114 - DNA, 15 bp, Homo sapiens
aacccctagtaagtc

SEQ ID NO: 1229115 - DNA, 15 bp, Homo sapiens
taacccctagtaagt

SEQ ID NO: 1229116 - DNA, 15 bp, Homo sapiens
ttaacccctagtaag

SEQ ID NO: 1229117 - DNA, 15 bp, Homo sapiens
tttaacccctagtaa

SEQ ID NO: 1229118 - DNA, 15 bp, Homo sapiens
ttttaacccctagta

SEQ ID NO: 1229119 - DNA, 15 bp, Homo sapiens
tttttaacccctagt

SEQ ID NO: 1229120 - DNA, 15 bp, Homo sapiens
ctttttaacccctag

SEQ ID NO: 1229121 - DNA, 15 bp, Homo sapiens
tctttttaaccccta

SEQ ID NO: 1229122 - DNA, 15 bp, Homo sapiens
ttctttttaacccct

SEQ ID NO: 1229123 - DNA, 15 bp, Homo sapiens
tttctttttaacccc

SEQ ID NO: 1229124 - DNA, 15 bp, Homo sapiens
atttctttttaaccc

SEQ ID NO: 1229125 - DNA, 15 bp, Homo sapiens
gatttctttttaacc

SEQ ID NO: 1229126 - DNA, 15 bp, Homo sapiens
ggatttctttttaac

SEQ ID NO: 1229127 - DNA, 15 bp, Homo sapiens
gggatttctttttaa

SEQ ID NO: 1229128 - DNA, 15 bp, Homo sapiens
agggatttcttttta

SEQ ID NO: 1229129 - DNA, 15 bp, Homo sapiens
aagggatttcttttt

SEQ ID NO: 1229130 - DNA, 15 bp, Homo sapiens
aaagggatttctttt

SEQ ID NO: 1229131 - DNA, 15 bp, Homo sapiens
aaaagggatttcttt

SEQ ID NO: 1229132 - DNA, 15 bp, Homo sapiens
aaaaagggatttctt

SEQ ID NO: 1229133 - DNA, 15 bp, Homo sapiens
taaaaagggatttct

SEQ ID NO: 1229134 - DNA, 15 bp, Homo sapiens
gtaaaaagggatttc

SEQ ID NO: 1229135 - DNA, 15 bp, Homo sapiens
tgtaaaaagggattt

SEQ ID NO: 1229136 - DNA, 15 bp, Homo sapiens
atgtaaaaagggatt

SEQ ID NO: 1229137 - DNA, 15 bp, Homo sapiens
aatgtaaaaagggat

SEQ ID NO: 1229138 - DNA, 15 bp, Homo sapiens
caatgtaaaaaggga

SEQ ID NO: 1229139 - DNA, 15 bp, Homo sapiens
ccaatgtaaaaaggg

SEQ ID NO: 1229140 - DNA, 15 bp, Homo sapiens
cccaatgtaaaaagg

SEQ ID NO: 1229141 - DNA, 15 bp, Homo sapiens
acccaatgtaaaaag

SEQ ID NO: 1229142 - DNA, 15 bp, Homo sapiens
gacccaatgtaaaaa

SEQ ID NO: 1229143 - DNA, 15 bp, Homo sapiens
tgacccaatgtaaaa

SEQ ID NO: 1229144 - DNA, 15 bp, Homo sapiens
ttgacccaatgtaaa

SEQ ID NO: 1229145 - DNA, 15 bp, Homo sapiens
tttgacccaatgtaa

SEQ ID NO: 1229146 - DNA, 15 bp, Homo sapiens
ctttgacccaatgta

SEQ ID NO: 1229147 - DNA, 15 bp, Homo sapiens
cctttgacccaatgt

SEQ ID NO: 1229148 - DNA, 15 bp, Homo sapiens
acctttgacccaatg

SEQ ID NO: 1229149 - DNA, 15 bp, Homo sapiens
gacctttgacccaat

SEQ ID NO: 1229150 - DNA, 15 bp, Homo sapiens
ggacctttgacccaa

SEQ ID NO: 1229151 - DNA, 15 bp, Homo sapiens
gggacctttgaccca

SEQ ID NO: 1229152 - DNA, 15 bp, Homo sapiens
ggggacctttgaccc

SEQ ID NO: 1229153 - DNA, 15 bp, Homo sapiens
aggggacctttgacc

SEQ ID NO: 1229154 - DNA, 15 bp, Homo sapiens
caggggacctttgac

SEQ ID NO: 1229155 - DNA, 15 bp, Homo sapiens
tcaggggacctttga

SEQ ID NO: 1229156 - DNA, 15 bp, Homo sapiens
ctcaggggacctttg

SEQ ID NO: 1229157 - DNA, 15 bp, Homo sapiens
cctcaggggaccttt

SEQ ID NO: 1229158 - DNA, 15 bp, Homo sapiens
ccctcaggggacctt

SEQ ID NO: 1229159 - DNA, 15 bp, Homo sapiens
accctcaggggacct

SEQ ID NO: 1229160 - DNA, 15 bp, Homo sapiens
taccctcaggggacc

SEQ ID NO: 1229161 - DNA, 15 bp, Homo sapiens
ctaccctcaggggac

SEQ ID NO: 1229162 - DNA, 15 bp, Homo sapiens
cctaccctcagggga

SEQ ID NO: 1229163 - DNA, 15 bp, Homo sapiens
ccctaccctcagggg

SEQ ID NO: 1229164 - DNA, 15 bp, Homo sapiens
accctaccctcaggg

SEQ ID NO: 1229165 - DNA, 15 bp, Homo sapiens
caccctaccctcagg

SEQ ID NO: 1229166 - DNA, 15 bp, Homo sapiens
ccaccctaccctcag

SEQ ID NO: 1229167 - DNA, 15 bp, Homo sapiens
cccaccctaccctca

SEQ ID NO: 1229168 - DNA, 15 bp, Homo sapiens
tcccaccctaccctc

SEQ ID NO: 1229169 - DNA, 15 bp, Homo sapiens
ttcccaccctaccct

SEQ ID NO: 1229170 - DNA, 15 bp, Homo sapiens
cttcccaccctaccc

SEQ ID NO: 1229171 - DNA, 15 bp, Homo sapiens
ccttcccaccctacc

SEQ ID NO: 1229172 - DNA, 15 bp, Homo sapiens
tccttcccaccctac

SEQ ID NO: 1229173 - DNA, 15 bp, Homo sapiens
ctccttcccacccta

SEQ ID NO: 1229174 - DNA, 15 bp, Homo sapiens
cctccttcccaccct

SEQ ID NO: 1229175 - DNA, 15 bp, Homo sapiens
tcctccttcccaccc

SEQ ID NO: 1229176 - DNA, 15 bp, Homo sapiens
ttcctccttcccacc

SEQ ID NO: 1229177 - DNA, 15 bp, Homo sapiens
cttcctccttcccac

SEQ ID NO: 1229178 - DNA, 15 bp, Homo sapiens
acttcctccttccca

SEQ ID NO: 1229179 - DNA, 15 bp, Homo sapiens
gacttcctccttccc

SEQ ID NO: 1229180 - DNA, 15 bp, Homo sapiens
tgacttcctccttcc

SEQ ID NO: 1229181 - DNA, 15 bp, Homo sapiens
atgacttcctccttc

SEQ ID NO: 1229182 - DNA, 15 bp, Homo sapiens
tatgacttcctcctt

SEQ ID NO: 1229183 - DNA, 15 bp, Homo sapiens
ttatgacttcctcct

SEQ ID NO: 1229184 - DNA, 15 bp, Homo sapiens
tttatgacttcctcc

SEQ ID NO: 1229185 - DNA, 15 bp, Homo sapiens
atttatgacttcctc

SEQ ID NO: 1229186 - DNA, 15 bp, Homo sapiens
tatttatgacttcct

SEQ ID NO: 1229187 - DNA, 15 bp, Homo sapiens
gtatttatgacttcc

SEQ ID NO: 1229188 - DNA, 15 bp, Homo sapiens
ggtatttatgacttc

SEQ ID NO: 1229189 - DNA, 15 bp, Homo sapiens
gggtatttatgactt

SEQ ID NO: 1229190 - DNA, 15 bp, Homo sapiens
agggtatttatgact

SEQ ID NO: 1229191 - DNA, 15 bp, Homo sapiens
cagggtatttatgac

SEQ ID NO: 1229192 - DNA, 15 bp, Homo sapiens
ccagggtatttatga

SEQ ID NO: 1229193 - DNA, 15 bp, Homo sapiens
gccagggtatttatg

SEQ ID NO: 1229194 - DNA, 15 bp, Homo sapiens
tgccagggtatttat

SEQ ID NO: 1229195 - DNA, 15 bp, Homo sapiens
ttgccagggtattta

SEQ ID NO: 1229196 - DNA, 15 bp, Homo sapiens
gttgccagggtattt

SEQ ID NO: 1229197 - DNA, 15 bp, Homo sapiens
tgttgccagggtatt

SEQ ID NO: 1229198 - DNA, 15 bp, Homo sapiens
ttgttgccagggtat

SEQ ID NO: 1229199 - DNA, 15 bp, Homo sapiens
attgttgccagggta

SEQ ID NO: 1229200 - DNA, 15 bp, Homo sapiens
tattgttgccagggt

SEQ ID NO: 1229201 - DNA, 15 bp, Homo sapiens
ctattgttgccaggg

SEQ ID NO: 1229202 - DNA, 15 bp, Homo sapiens
actattgttgccagg

SEQ ID NO: 1229203 - DNA, 15 bp, Homo sapiens
cactattgttgccag

SEQ ID NO: 1229204 - DNA, 15 bp, Homo sapiens
acactattgttgcca

SEQ ID NO: 1229205 - DNA, 15 bp, Homo sapiens
aacactattgttgcc

SEQ ID NO: 1229206 - DNA, 15 bp, Homo sapiens
caacactattgttgc

SEQ ID NO: 1229207 - DNA, 15 bp, Homo sapiens
ccaacactattgttg

SEQ ID NO: 1229208 - DNA, 15 bp, Homo sapiens
accaacactattgtt

SEQ ID NO: 1229209 - DNA, 15 bp, Homo sapiens
gaccaacactattgt

SEQ ID NO: 1229210 - DNA, 15 bp, Homo sapiens
tgaccaacactattg

SEQ ID NO: 1229211 - DNA, 15 bp, Homo sapiens
ttgaccaacactatt

SEQ ID NO: 1229212 - DNA, 15 bp, Homo sapiens
cttgaccaacactat

SEQ ID NO: 1229213 - DNA, 15 bp, Homo sapiens
ccttgaccaacacta

SEQ ID NO: 1229214 - DNA, 15 bp, Homo sapiens
accttgaccaacact

SEQ ID NO: 1229215 - DNA, 15 bp, Homo sapiens
gaccttgaccaacac

SEQ ID NO: 1229216 - DNA, 15 bp, Homo sapiens
tgaccttgaccaaca

SEQ ID NO: 1229217 - DNA, 15 bp, Homo sapiens
ctgaccttgaccaac

SEQ ID NO: 1229218 - DNA, 15 bp, Homo sapiens
cctgaccttgaccaa

SEQ ID NO: 1229219 - DNA, 15 bp, Homo sapiens
tcctgaccttgacca

SEQ ID NO: 1229220 - DNA, 15 bp, Homo sapiens
gtcctgaccttgacc

SEQ ID NO: 1229221 - DNA, 15 bp, Homo sapiens
ggtcctgaccttgac

SEQ ID NO: 1229222 - DNA, 15 bp, Homo sapiens
tggtcctgaccttga

SEQ ID NO: 1229223 - DNA, 15 bp, Homo sapiens
atggtcctgaccttg

SEQ ID NO: 1229224 - DNA, 15 bp, Homo sapiens
aatggtcctgacctt

SEQ ID NO: 1229225 - DNA, 15 bp, Homo sapiens
aaatggtcctgacct

SEQ ID NO: 1229226 - DNA, 15 bp, Homo sapiens
aaaatggtcctgacc

SEQ ID NO: 1229227 - DNA, 15 bp, Homo sapiens
aaaaatggtcctgac

SEQ ID NO: 1229228 - DNA, 15 bp, Homo sapiens
aaaaaatggtcctga

SEQ ID NO: 1229229 - DNA, 15 bp, Homo sapiens
aaaaaaatggtcctg

SEQ ID NO: 1229230 - DNA, 15 bp, Homo sapiens
aaaaaaaatggtcct

SEQ ID NO: 1229231 - DNA, 15 bp, Homo sapiens
aaaaaaaaatggtcc

SEQ ID NO: 1229232 - DNA, 15 bp, Homo sapiens
gaaaaaaaaatggtc

SEQ ID NO: 1229233 - DNA, 15 bp, Homo sapiens
ggaaaaaaaaatggt

SEQ ID NO: 1229234 - DNA, 15 bp, Homo sapiens
aggaaaaaaaaatgg

SEQ ID NO: 1229235 - DNA, 15 bp, Homo sapiens
gaggaaaaaaaaatg

SEQ ID NO: 1229236 - DNA, 15 bp, Homo sapiens
ggaggaaaaaaaaat

SEQ ID NO: 1229237 - DNA, 15 bp, Homo sapiens
taggaggaaaaaaaa

SEQ ID NO: 1229238 - DNA, 15 bp, Homo sapiens
ataggaggaaaaaaa

SEQ ID NO: 1229239 - DNA, 15 bp, Homo sapiens
aataggaggaaaaaa

SEQ ID NO: 1229240 - DNA, 15 bp, Homo sapiens
aaataggaggaaaaa

SEQ ID NO: 1229241 - DNA, 15 bp, Homo sapiens
aaaaataggaggaaa

SEQ ID NO: 1229242 - DNA, 15 bp, Homo sapiens
gaaaaataggaggaa

SEQ ID NO: 1229243 - DNA, 15 bp, Homo sapiens
tgaaaaataggagga

SEQ ID NO: 1229244 - DNA, 15 bp, Homo sapiens
ctgaaaaataggagg

SEQ ID NO: 1229245 - DNA, 15 bp, Homo sapiens
cctgaaaaataggag

SEQ ID NO: 1229246 - DNA, 15 bp, Homo sapiens
tcctgaaaaatagga

SEQ ID NO: 1229247 - DNA, 15 bp, Homo sapiens
ttcctgaaaaatagg

SEQ ID NO: 1229248 - DNA, 15 bp, Homo sapiens
gttcctgaaaaatag

SEQ ID NO: 1229249 - DNA, 15 bp, Homo sapiens
ggttcctgaaaaata

SEQ ID NO: 1229250 - DNA, 15 bp, Homo sapiens
tggttcctgaaaaat

SEQ ID NO: 1229251 - DNA, 15 bp, Homo sapiens
ttggttcctgaaaaa

SEQ ID NO: 1229252 - DNA, 15 bp, Homo sapiens
tttggttcctgaaaa

SEQ ID NO: 1229253 - DNA, 15 bp, Homo sapiens
ttttggttcctgaaa

SEQ ID NO: 1229254 - DNA, 15 bp, Homo sapiens
tttttggttcctgaa

SEQ ID NO: 1229255 - DNA, 15 bp, Homo sapiens
ttttttggttcctga

SEQ ID NO: 1229256 - DNA, 15 bp, Homo sapiens
attttttggttcctg

SEQ ID NO: 1229257 - DNA, 15 bp, Homo sapiens
cattttttggttcct

SEQ ID NO: 1229258 - DNA, 15 bp, Homo sapiens
ccattttttggttcc

SEQ ID NO: 1229259 - DNA, 15 bp, Homo sapiens
accattttttggttc

SEQ ID NO: 1229260 - DNA, 15 bp, Homo sapiens
gaccattttttggtt

SEQ ID NO: 1229261 - DNA, 15 bp, Homo sapiens
tgaccattttttggt

SEQ ID NO: 1229262 - DNA, 15 bp, Homo sapiens
ctgaccattttttgg

SEQ ID NO: 1229263 - DNA, 15 bp, Homo sapiens
cctgaccattttttg

SEQ ID NO: 1229264 - DNA, 15 bp, Homo sapiens
tcctgaccatttttt

SEQ ID NO: 1229265 - DNA, 15 bp, Homo sapiens
gtcctgaccattttt

SEQ ID NO: 1229266 - DNA, 15 bp, Homo sapiens
agtcctgaccatttt

SEQ ID NO: 1229267 - DNA, 15 bp, Homo sapiens
tagtcctgaccattt

SEQ ID NO: 1229268 - DNA, 15 bp, Homo sapiens
atagtcctgaccatt

SEQ ID NO: 1229269 - DNA, 15 bp, Homo sapiens
aatagtcctgaccat

SEQ ID NO: 1229270 - DNA, 15 bp, Homo sapiens
aaatagtcctgacca

SEQ ID NO: 1229271 - DNA, 15 bp, Homo sapiens
aaaatagtcctgacc

SEQ ID NO: 1229272 - DNA, 15 bp, Homo sapiens
aaaaatagtcctgac

SEQ ID NO: 1229273 - DNA, 15 bp, Homo sapiens
caaaaatagtcctga

SEQ ID NO: 1229274 - DNA, 15 bp, Homo sapiens
tcaaaaatagtcctg

SEQ ID NO: 1229275 - DNA, 15 bp, Homo sapiens
gtcaaaaatagtcct

SEQ ID NO: 1229276 - DNA, 15 bp, Homo sapiens
tgtcaaaaatagtcc

SEQ ID NO: 1229277 - DNA, 15 bp, Homo sapiens
ttgtcaaaaatagtc

SEQ ID NO: 1229278 - DNA, 15 bp, Homo sapiens
attgtcaaaaatagt

SEQ ID NO: 1229279 - DNA, 15 bp, Homo sapiens
aattgtcaaaaatag

SEQ ID NO: 1229280 - DNA, 15 bp, Homo sapiens
gaattgtcaaaaata

SEQ ID NO: 1229281 - DNA, 15 bp, Homo sapiens
cgaattgtcaaaaat

SEQ ID NO: 1229282 - DNA, 15 bp, Homo sapiens
ccgaattgtcaaaaa

SEQ ID NO: 1229283 - DNA, 15 bp, Homo sapiens
gccgaattgtcaaaa

SEQ ID NO: 1229284 - DNA, 15 bp, Homo sapiens
agccgaattgtcaaa

SEQ ID NO: 1229285 - DNA, 15 bp, Homo sapiens
aagccgaattgtcaa

SEQ ID NO: 1229286 - DNA, 15 bp, Homo sapiens
caagccgaattgtca

SEQ ID NO: 1229287 - DNA, 15 bp, Homo sapiens
tcaagccgaattgtc

SEQ ID NO: 1229288 - DNA, 15 bp, Homo sapiens
atcaagccgaattgt

SEQ ID NO: 1229289 - DNA, 15 bp, Homo sapiens
catcaagccgaattg

SEQ ID NO: 1229290 - DNA, 15 bp, Homo sapiens
ccatcaagccgaatt

SEQ ID NO: 1229291 - DNA, 15 bp, Homo sapiens
accatcaagccgaat

SEQ ID NO: 1229292 - DNA, 15 bp, Homo sapiens
aaccatcaagccgaa

SEQ ID NO: 1229293 - DNA, 15 bp, Homo sapiens
aaaccatcaagccga

SEQ ID NO: 1229294 - DNA, 15 bp, Homo sapiens
taaaccatcaagccg

SEQ ID NO: 1229295 - DNA, 15 bp, Homo sapiens
ctaaaccatcaagcc

SEQ ID NO: 1229296 - DNA, 15 bp, Homo sapiens
actaaaccatcaagc

SEQ ID NO: 1229297 - DNA, 15 bp, Homo sapiens
gactaaaccatcaag

SEQ ID NO: 1229298 - DNA, 15 bp, Homo sapiens
agactaaaccatcaa

SEQ ID NO: 1229299 - DNA, 15 bp, Homo sapiens
aagactaaaccatca

SEQ ID NO: 1229300 - DNA, 15 bp, Homo sapiens
gaagactaaaccatc

SEQ ID NO: 1229301 - DNA, 15 bp, Homo sapiens
agaagactaaaccat

SEQ ID NO: 1229302 - DNA, 15 bp, Homo sapiens
cagaagactaaacca

SEQ ID NO: 1229303 - DNA, 15 bp, Homo sapiens
tcagaagactaaacc

SEQ ID NO: 1229304 - DNA, 15 bp, Homo sapiens
ttcagaagactaaac

SEQ ID NO: 1229305 - DNA, 15 bp, Homo sapiens
gttcagaagactaaa

SEQ ID NO: 1229306 - DNA, 15 bp, Homo sapiens
agttcagaagactaa

SEQ ID NO: 1229307 - DNA, 15 bp, Homo sapiens
gagttcagaagacta

SEQ ID NO: 1229308 - DNA, 15 bp, Homo sapiens
agagttcagaagact

SEQ ID NO: 1229309 - DNA, 15 bp, Homo sapiens
gagagttcagaagac

SEQ ID NO: 1229310 - DNA, 15 bp, Homo sapiens
ggagagttcagaaga

SEQ ID NO: 1229311 - DNA, 15 bp, Homo sapiens
tggagagttcagaag

SEQ ID NO: 1229312 - DNA, 15 bp, Homo sapiens
ctggagagttcagaa

SEQ ID NO: 1229313 - DNA, 15 bp, Homo sapiens
actggagagttcaga

SEQ ID NO: 1229314 - DNA, 15 bp, Homo sapiens
tactggagagttcag

SEQ ID NO: 1229315 - DNA, 15 bp, Homo sapiens
ctactggagagttca

SEQ ID NO: 1229316 - DNA, 15 bp, Homo sapiens
tctactggagagttc

SEQ ID NO: 1229317 - DNA, 15 bp, Homo sapiens
gtctactggagagtt

SEQ ID NO: 1229318 - DNA, 15 bp, Homo sapiens
ggtctactggagagt

SEQ ID NO: 1229319 - DNA, 15 bp, Homo sapiens
aggtctactggagag

SEQ ID NO: 1229320 - DNA, 15 bp, Homo sapiens
aaggtctactggaga

SEQ ID NO: 1229321 - DNA, 15 bp, Homo sapiens
taaggtctactggag

SEQ ID NO: 1229322 - DNA, 15 bp, Homo sapiens
ctaaggtctactgga

SEQ ID NO: 1229323 - DNA, 15 bp, Homo sapiens
tctaaggtctactgg

SEQ ID NO: 1229324 - DNA, 15 bp, Homo sapiens
ttctaaggtctactg

SEQ ID NO: 1229325 - DNA, 15 bp, Homo sapiens
gttctaaggtctact

SEQ ID NO: 1229326 - DNA, 15 bp, Homo sapiens
agttctaaggtctac

SEQ ID NO: 1229327 - DNA, 15 bp, Homo sapiens
aagttctaaggtcta

SEQ ID NO: 1229328 - DNA, 15 bp, Homo sapiens
caagttctaaggtct

SEQ ID NO: 1229329 - DNA, 15 bp, Homo sapiens
ccaagttctaaggtc

SEQ ID NO: 1229330 - DNA, 15 bp, Homo sapiens
accaagttctaaggt

SEQ ID NO: 1229331 - DNA, 15 bp, Homo sapiens
taccaagttctaagg

SEQ ID NO: 1229332 - DNA, 15 bp, Homo sapiens
ataccaagttctaag

SEQ ID NO: 1229333 - DNA, 15 bp, Homo sapiens
tataccaagttctaa

SEQ ID NO: 1229334 - DNA, 15 bp, Homo sapiens
gtataccaagttcta

SEQ ID NO: 1229335 - DNA, 15 bp, Homo sapiens
tgtataccaagttct

SEQ ID NO: 1229336 - DNA, 15 bp, Homo sapiens
atgtataccaagttc

SEQ ID NO: 1229337 - DNA, 15 bp, Homo sapiens
tatgtataccaagtt

SEQ ID NO: 1229338 - DNA, 15 bp, Homo sapiens
ctatgtataccaagt

SEQ ID NO: 1229339 - DNA, 15 bp, Homo sapiens
actatgtataccaag

SEQ ID NO: 1229340 - DNA, 15 bp, Homo sapiens
tactatgtataccaa

SEQ ID NO: 1229341 - DNA, 15 bp, Homo sapiens
ttactatgtatacca

SEQ ID NO: 1229342 - DNA, 15 bp, Homo sapiens
attactatgtatacc

SEQ ID NO: 1229343 - DNA, 15 bp, Homo sapiens
aattactatgtatac

SEQ ID NO: 1229344 - DNA, 15 bp, Homo sapiens
gaattactatgtata

SEQ ID NO: 1229345 - DNA, 15 bp, Homo sapiens
tgaattactatgtat

SEQ ID NO: 1229346 - DNA, 15 bp, Homo sapiens
ctgaattactatgta

SEQ ID NO: 1229347 - DNA, 15 bp, Homo sapiens
actgaattactatgt

SEQ ID NO: 1229348 - DNA, 15 bp, Homo sapiens
gactgaattactatg

SEQ ID NO: 1229349 - DNA, 15 bp, Homo sapiens
ggactgaattactat

SEQ ID NO: 1229350 - DNA, 15 bp, Homo sapiens
aggactgaattacta

SEQ ID NO: 1229351 - DNA, 15 bp, Homo sapiens
aaggactgaattact

SEQ ID NO: 1229352 - DNA, 15 bp, Homo sapiens
caaggactgaattac

SEQ ID NO: 1229353 - DNA, 15 bp, Homo sapiens
tcaaggactgaatta

SEQ ID NO: 1229354 - DNA, 15 bp, Homo sapiens
ttcaaggactgaatt

SEQ ID NO: 1229355 - DNA, 15 bp, Homo sapiens
attcaaggactgaat

SEQ ID NO: 1229356 - DNA, 15 bp, Homo sapiens
tattcaaggactgaa

SEQ ID NO: 1229357 - DNA, 15 bp, Homo sapiens
atattcaaggactga

SEQ ID NO: 1229358 - DNA, 15 bp, Homo sapiens
aatattcaaggactg

SEQ ID NO: 1229359 - DNA, 15 bp, Homo sapiens
taatattcaaggact

SEQ ID NO: 1229360 - DNA, 15 bp, Homo sapiens
ttaatattcaaggac

SEQ ID NO: 1229361 - DNA, 15 bp, Homo sapiens
tttaatattcaagga

SEQ ID NO: 1229362 - DNA, 15 bp, Homo sapiens
ttttaatattcaagg

SEQ ID NO: 1229363 - DNA, 15 bp, Homo sapiens
cttttaatattcaag

SEQ ID NO: 1229364 - DNA, 15 bp, Homo sapiens
gcttttaatattcaa

SEQ ID NO: 1229365 - DNA, 15 bp, Homo sapiens
ggcttttaatattca

SEQ ID NO: 1229366 - DNA, 15 bp, Homo sapiens
aggcttttaatattc

SEQ ID NO: 1229367 - DNA, 15 bp, Homo sapiens
aaggcttttaatatt

SEQ ID NO: 1229368 - DNA, 15 bp, Homo sapiens
aaaggcttttaatat

SEQ ID NO: 1229369 - DNA, 15 bp, Homo sapiens
taaaggcttttaata

SEQ ID NO: 1229370 - DNA, 15 bp, Homo sapiens
ctaaaggcttttaat

SEQ ID NO: 1229371 - DNA, 15 bp, Homo sapiens
actaaaggcttttaa

SEQ ID NO: 1229372 - DNA, 15 bp, Homo sapiens
aactaaaggctttta

SEQ ID NO: 1229373 - DNA, 15 bp, Homo sapiens
taactaaaggctttt

SEQ ID NO: 1229374 - DNA, 15 bp, Homo sapiens
ctaactaaaggcttt

SEQ ID NO: 1229375 - DNA, 15 bp, Homo sapiens
tctaactaaaggctt

SEQ ID NO: 1229376 - DNA, 15 bp, Homo sapiens
ctctaactaaaggct

SEQ ID NO: 1229377 - DNA, 15 bp, Homo sapiens
actctaactaaaggc

SEQ ID NO: 1229378 - DNA, 15 bp, Homo sapiens
tactctaactaaagg

SEQ ID NO: 1229379 - DNA, 15 bp, Homo sapiens
ttactctaactaaag

SEQ ID NO: 1229380 - DNA, 15 bp, Homo sapiens
cttactctaactaaa

SEQ ID NO: 1229381 - DNA, 15 bp, Homo sapiens
tcttactctaactaa

SEQ ID NO: 1229382 - DNA, 15 bp, Homo sapiens
atcttactctaacta

SEQ ID NO: 1229383 - DNA, 15 bp, Homo sapiens
gatcttactctaact

SEQ ID NO: 1229384 - DNA, 15 bp, Homo sapiens
agatcttactctaac

SEQ ID NO: 1229385 - DNA, 15 bp, Homo sapiens
cagatcttactctaa

SEQ ID NO: 1229386 - DNA, 15 bp, Homo sapiens
tcagatcttactcta

SEQ ID NO: 1229387 - DNA, 15 bp, Homo sapiens
gtcagatcttactct

SEQ ID NO: 1229388 - DNA, 15 bp, Homo sapiens
tgtcagatcttactc

SEQ ID NO: 1229389 - DNA, 15 bp, Homo sapiens
ttgtcagatcttact

SEQ ID NO: 1229390 - DNA, 15 bp, Homo sapiens
tttgtcagatcttac

SEQ ID NO: 1229391 - DNA, 15 bp, Homo sapiens
atttgtcagatctta

SEQ ID NO: 1229392 - DNA, 15 bp, Homo sapiens
aatttgtcagatctt

SEQ ID NO: 1229393 - DNA, 15 bp, Homo sapiens
gaatttgtcagatct

SEQ ID NO: 1229394 - DNA, 15 bp, Homo sapiens
tgaatttgtcagatc

SEQ ID NO: 1229395 - DNA, 15 bp, Homo sapiens
ttgaatttgtcagat

SEQ ID NO: 1229396 - DNA, 15 bp, Homo sapiens
tttgaatttgtcaga

SEQ ID NO: 1229397 - DNA, 15 bp, Homo sapiens
ctttgaatttgtcag

SEQ ID NO: 1229398 - DNA, 15 bp, Homo sapiens
gctttgaatttgtca

SEQ ID NO: 1229399 - DNA, 15 bp, Homo sapiens
agctttgaatttgtc

SEQ ID NO: 1229400 - DNA, 15 bp, Homo sapiens
cagctttgaatttgt

SEQ ID NO: 1229401 - DNA, 15 bp, Homo sapiens
tcagctttgaatttg

SEQ ID NO: 1229402 - DNA, 15 bp, Homo sapiens
ctcagctttgaattt

SEQ ID NO: 1229403 - DNA, 15 bp, Homo sapiens
gctcagctttgaatt

SEQ ID NO: 1229404 - DNA, 15 bp, Homo sapiens
ggctcagctttgaat

SEQ ID NO: 1229405 - DNA, 15 bp, Homo sapiens
cggctcagctttgaa

SEQ ID NO: 1229406 - DNA, 15 bp, Homo sapiens
acggctcagctttga

SEQ ID NO: 1229407 - DNA, 15 bp, Homo sapiens
cacggctcagctttg

SEQ ID NO: 1229408 - DNA, 15 bp, Homo sapiens
tcacggctcagcttt

SEQ ID NO: 1229409 - DNA, 15 bp, Homo sapiens
ctcacggctcagctt

SEQ ID NO: 1229410 - DNA, 15 bp, Homo sapiens
actcacggctcagct

SEQ ID NO: 1229411 - DNA, 15 bp, Homo sapiens
gactcacggctcagc

SEQ ID NO: 1229412 - DNA, 15 bp, Homo sapiens
tgactcacggctcag

SEQ ID NO: 1229413 - DNA, 15 bp, Homo sapiens
ctgactcacggctca

SEQ ID NO: 1229414 - DNA, 15 bp, Homo sapiens
tctgactcacggctc

SEQ ID NO: 1229415 - DNA, 15 bp, Homo sapiens
ttctgactcacggct

SEQ ID NO: 1229416 - DNA, 15 bp, Homo sapiens
tttctgactcacggc

SEQ ID NO: 1229417 - DNA, 15 bp, Homo sapiens
atttctgactcacgg

SEQ ID NO: 1229418 - DNA, 15 bp, Homo sapiens
aatttctgactcacg

SEQ ID NO: 1229419 - DNA, 15 bp, Homo sapiens
aaatttctgactcac

SEQ ID NO: 1229420 - DNA, 15 bp, Homo sapiens
aaaatttctgactca

SEQ ID NO: 1229421 - DNA, 15 bp, Homo sapiens
aaaaatttctgactc

SEQ ID NO: 1229422 - DNA, 15 bp, Homo sapiens
aaaaaatttctgact

SEQ ID NO: 1229423 - DNA, 15 bp, Homo sapiens
aaaaaaatttctgac

SEQ ID NO: 1229424 - DNA, 15 bp, Homo sapiens
gaaaaaaatttctga

SEQ ID NO: 1229425 - DNA, 15 bp, Homo sapiens
agaaaaaaatttctg

SEQ ID NO: 1229426 - DNA, 15 bp, Homo sapiens
gagaaaaaaatttct

SEQ ID NO: 1229427 - DNA, 15 bp, Homo sapiens
tgagaaaaaaatttc

SEQ ID NO: 1229428 - DNA, 15 bp, Homo sapiens
ctgagaaaaaaattt

SEQ ID NO: 1229429 - DNA, 15 bp, Homo sapiens
gctgagaaaaaaatt

SEQ ID NO: 1229430 - DNA, 15 bp, Homo sapiens
tgctgagaaaaaaat

SEQ ID NO: 1229431 - DNA, 15 bp, Homo sapiens
gtgctgagaaaaaaa

SEQ ID NO: 1229432 - DNA, 15 bp, Homo sapiens
ggtgctgagaaaaaa

SEQ ID NO: 1229433 - DNA, 15 bp, Homo sapiens
tggtgctgagaaaaa

SEQ ID NO: 1229434 - DNA, 15 bp, Homo sapiens
atggtgctgagaaaa

SEQ ID NO: 1229435 - DNA, 15 bp, Homo sapiens
tatggtgctgagaaa

SEQ ID NO: 1229436 - DNA, 15 bp, Homo sapiens
ctatggtgctgagaa

SEQ ID NO: 1229437 - DNA, 15 bp, Homo sapiens
cctatggtgctgaga

SEQ ID NO: 1229438 - DNA, 15 bp, Homo sapiens
tcctatggtgctgag

SEQ ID NO: 1229439 - DNA, 15 bp, Homo sapiens
ttcctatggtgctga

SEQ ID NO: 1229440 - DNA, 15 bp, Homo sapiens
tttcctatggtgctg

SEQ ID NO: 1229441 - DNA, 15 bp, Homo sapiens
ttttcctatggtgct

SEQ ID NO: 1229442 - DNA, 15 bp, Homo sapiens
tttttcctatggtgc

SEQ ID NO: 1229443 - DNA, 15 bp, Homo sapiens
ttttttcctatggtg

SEQ ID NO: 1229444 - DNA, 15 bp, Homo sapiens
tttttttcctatggt

SEQ ID NO: 1229445 - DNA, 15 bp, Homo sapiens
atttttttcctatgg

SEQ ID NO: 1229446 - DNA, 15 bp, Homo sapiens
gatttttttcctatg

SEQ ID NO: 1229447 - DNA, 15 bp, Homo sapiens
tgatttttttcctat

SEQ ID NO: 1229448 - DNA, 15 bp, Homo sapiens
atgatttttttccta

SEQ ID NO: 1229449 - DNA, 15 bp, Homo sapiens
tatgatttttttcct

SEQ ID NO: 1229450 - DNA, 15 bp, Homo sapiens
ttatgatttttttcc

SEQ ID NO: 1229451 - DNA, 15 bp, Homo sapiens
attatgatttttttc

SEQ ID NO: 1229452 - DNA, 15 bp, Homo sapiens
tattatgattttttt

SEQ ID NO: 1229453 - DNA, 15 bp, Homo sapiens
ttattatgatttttt

SEQ ID NO: 1229454 - DNA, 15 bp, Homo sapiens
tttattatgattttt

SEQ ID NO: 1229455 - DNA, 15 bp, Homo sapiens
ttttattatgatttt

SEQ ID NO: 1229456 - DNA, 15 bp, Homo sapiens
tttttattatgattt

SEQ ID NO: 1229457 - DNA, 15 bp, Homo sapiens
ttttttattatgatt

SEQ ID NO: 1229458 - DNA, 15 bp, Homo sapiens
tttttttattatgat

SEQ ID NO: 1229459 - DNA, 15 bp, Homo sapiens
atttttttattatga

SEQ ID NO: 1229460 - DNA, 15 bp, Homo sapiens
aatttttttattatg

SEQ ID NO: 1229461 - DNA, 15 bp, Homo sapiens
taatttttttattat

SEQ ID NO: 1229462 - DNA, 15 bp, Homo sapiens
ttaatttttttatta

SEQ ID NO: 1229463 - DNA, 15 bp, Homo sapiens
cttaatttttttatt

SEQ ID NO: 1229464 - DNA, 15 bp, Homo sapiens
tcttaatttttttat

SEQ ID NO: 1229465 - DNA, 15 bp, Homo sapiens
ctcttaattttttta

SEQ ID NO: 1229466 - DNA, 15 bp, Homo sapiens
tctcttaattttttt

SEQ ID NO: 1229467 - DNA, 15 bp, Homo sapiens
ttctcttaatttttt

SEQ ID NO: 1229468 - DNA, 15 bp, Homo sapiens
cttctcttaattttt

SEQ ID NO: 1229469 - DNA, 15 bp, Homo sapiens
tcttctcttaatttt

SEQ ID NO: 1229470 - DNA, 15 bp, Homo sapiens
ttcttctcttaattt

SEQ ID NO: 1229471 - DNA, 15 bp, Homo sapiens
tttcttctcttaatt

SEQ ID NO: 1229472 - DNA, 15 bp, Homo sapiens
atttcttctcttaat

SEQ ID NO: 1229473 - DNA, 15 bp, Homo sapiens
catttcttctcttaa

SEQ ID NO: 1229474 - DNA, 15 bp, Homo sapiens
acatttcttctctta

SEQ ID NO: 1229475 - DNA, 15 bp, Homo sapiens
cacatttcttctctt

SEQ ID NO: 1229476 - DNA, 15 bp, Homo sapiens
acacatttcttctct

SEQ ID NO: 1229477 - DNA, 15 bp, Homo sapiens
aacacatttcttctc

SEQ ID NO: 1229478 - DNA, 15 bp, Homo sapiens
caacacatttcttct

SEQ ID NO: 1229479 - DNA, 15 bp, Homo sapiens
acaacacatttcttc

SEQ ID NO: 1229480 - DNA, 15 bp, Homo sapiens
aacaacacatttctt

SEQ ID NO: 1229481 - DNA, 15 bp, Homo sapiens
aaacaacacatttct

SEQ ID NO: 1229482 - DNA, 15 bp, Homo sapiens
aaaacaacacatttc

SEQ ID NO: 1229483 - DNA, 15 bp, Homo sapiens
caaaacaacacattt

SEQ ID NO: 1229484 - DNA, 15 bp, Homo sapiens
acaaaacaacacatt

SEQ ID NO: 1229485 - DNA, 15 bp, Homo sapiens
aacaaaacaacacat

SEQ ID NO: 1229486 - DNA, 15 bp, Homo sapiens
aaacaaaacaacaca

SEQ ID NO: 1229487 - DNA, 15 bp, Homo sapiens
aaaacaaaacaacac

SEQ ID NO: 1229488 - DNA, 15 bp, Homo sapiens
ccaaaacaaaacaac

SEQ ID NO: 1229489 - DNA, 15 bp, Homo sapiens
cccaaaacaaaacaa

SEQ ID NO: 1229490 - DNA, 15 bp, Homo sapiens
acccaaaacaaaaca

SEQ ID NO: 1229491 - DNA, 15 bp, Homo sapiens
aacccaaaacaaaac

SEQ ID NO: 1229492 - DNA, 15 bp, Homo sapiens
ataacccaaaacaaa

SEQ ID NO: 1229493 - DNA, 15 bp, Homo sapiens
aataacccaaaacaa

SEQ ID NO: 1229494 - DNA, 15 bp, Homo sapiens
aaataacccaaaaca

SEQ ID NO: 1229495 - DNA, 15 bp, Homo sapiens
aaaataacccaaaac

SEQ ID NO: 1229496 - DNA, 15 bp, Homo sapiens
aaaaataacccaaaa

SEQ ID NO: 1229497 - DNA, 15 bp, Homo sapiens
aaaaaataacccaaa

SEQ ID NO: 1229498 - DNA, 15 bp, Homo sapiens
aaaaaaataacccaa

SEQ ID NO: 1229499 - DNA, 15 bp, Homo sapiens
caaaaaaataaccca

SEQ ID NO: 1229500 - DNA, 15 bp, Homo sapiens
tcaaaaaaataaccc

SEQ ID NO: 1229501 - DNA, 15 bp, Homo sapiens
ctcaaaaaaataacc

SEQ ID NO: 1229502 - DNA, 15 bp, Homo sapiens
tctcaaaaaaataac

SEQ ID NO: 1229503 - DNA, 15 bp, Homo sapiens
ttccgtctcaaaaaa

SEQ ID NO: 1229504 - DNA, 15 bp, Homo sapiens
attccgtctcaaaaa

SEQ ID NO: 1229505 - DNA, 15 bp, Homo sapiens
aattccgtctcaaaa

SEQ ID NO: 1229506 - DNA, 15 bp, Homo sapiens
aaattccgtctcaaa

SEQ ID NO: 1229507 - DNA, 15 bp, Homo sapiens
gaaattccgtctcaa

SEQ ID NO: 1229508 - DNA, 15 bp, Homo sapiens
cgaaattccgtctca

SEQ ID NO: 1229509 - DNA, 15 bp, Homo sapiens
gcgaaattccgtctc

SEQ ID NO: 1229510 - DNA, 15 bp, Homo sapiens
agcgaaattccgtct

SEQ ID NO: 1229511 - DNA, 15 bp, Homo sapiens
gagcgaaattccgtc

SEQ ID NO: 1229512 - DNA, 15 bp, Homo sapiens
agagcgaaattccgt

SEQ ID NO: 1229513 - DNA, 15 bp, Homo sapiens
aagagcgaaattccg

SEQ ID NO: 1229514 - DNA, 15 bp, Homo sapiens
caagagcgaaattcc

SEQ ID NO: 1229515 - DNA, 15 bp, Homo sapiens
acaagagcgaaattc

SEQ ID NO: 1229516 - DNA, 15 bp, Homo sapiens
aacaagagcgaaatt

SEQ ID NO: 1229517 - DNA, 15 bp, Homo sapiens
caacaagagcgaaat

SEQ ID NO: 1229518 - DNA, 15 bp, Homo sapiens
ctgggcaacaagagc

SEQ ID NO: 1229519 - DNA, 15 bp, Homo sapiens
cctccagcctgggca

SEQ ID NO: 1229520 - DNA, 15 bp, Homo sapiens
ccctccagcctgggc

SEQ ID NO: 1229521 - DNA, 15 bp, Homo sapiens
gccctccagcctggg

SEQ ID NO: 1229522 - DNA, 15 bp, Homo sapiens
tgccctccagcctgg

SEQ ID NO: 1229523 - DNA, 15 bp, Homo sapiens
ttgccctccagcctg

SEQ ID NO: 1229524 - DNA, 15 bp, Homo sapiens
attgccctccagcct

SEQ ID NO: 1229525 - DNA, 15 bp, Homo sapiens
cattgccctccagcc

SEQ ID NO: 1229526 - DNA, 15 bp, Homo sapiens
ccattgccctccagc

SEQ ID NO: 1229527 - DNA, 15 bp, Homo sapiens
gccattgccctccag

SEQ ID NO: 1229528 - DNA, 15 bp, Homo sapiens
cgccattgccctcca

SEQ ID NO: 1229529 - DNA, 15 bp, Homo sapiens
acgccattgccctcc

SEQ ID NO: 1229530 - DNA, 15 bp, Homo sapiens
cacgccattgccctc

SEQ ID NO: 1229531 - DNA, 15 bp, Homo sapiens
tcacgccattgccct

SEQ ID NO: 1229532 - DNA, 15 bp, Homo sapiens
atcacgccattgccc

SEQ ID NO: 1229533 - DNA, 15 bp, Homo sapiens
gatcacgccattgcc

SEQ ID NO: 1229534 - DNA, 15 bp, Homo sapiens
aagatcacgccattg

SEQ ID NO: 1229535 - DNA, 15 bp, Homo sapiens
caagatcacgccatt

SEQ ID NO: 1229536 - DNA, 15 bp, Homo sapiens
ccaagatcacgccat

SEQ ID NO: 1229537 - DNA, 15 bp, Homo sapiens
cggtgagccaagatc

SEQ ID NO: 1229538 - DNA, 15 bp, Homo sapiens
gcggtgagccaagat

SEQ ID NO: 1229539 - DNA, 15 bp, Homo sapiens
tgcggtgagccaaga

SEQ ID NO: 1229540 - DNA, 15 bp, Homo sapiens
ttgcggtgagccaag

SEQ ID NO: 1229541 - DNA, 15 bp, Homo sapiens
gttgcggtgagccaa

SEQ ID NO: 1229542 - DNA, 15 bp, Homo sapiens
ggttgcggtgagcca

SEQ ID NO: 1229543 - DNA, 15 bp, Homo sapiens
ttgtaattccagcta

SEQ ID NO: 1229544 - DNA, 15 bp, Homo sapiens
tttgtaattccagct

SEQ ID NO: 1229545 - DNA, 15 bp, Homo sapiens
gtttgtaattccagc

SEQ ID NO: 1229546 - DNA, 15 bp, Homo sapiens
tgtttgtaattccag

SEQ ID NO: 1229547 - DNA, 15 bp, Homo sapiens
gtgtttgtaattcca

SEQ ID NO: 1229548 - DNA, 15 bp, Homo sapiens
tgtgtttgtaattcc

SEQ ID NO: 1229549 - DNA, 15 bp, Homo sapiens
atgtgtttgtaattc

SEQ ID NO: 1229550 - DNA, 15 bp, Homo sapiens
catgtgtttgtaatt

SEQ ID NO: 1229551 - DNA, 15 bp, Homo sapiens
gcatgtgtttgtaat

SEQ ID NO: 1229552 - DNA, 15 bp, Homo sapiens
ggcatgtgtttgtaa

SEQ ID NO: 1229553 - DNA, 15 bp, Homo sapiens
tggcatgtgtttgta

SEQ ID NO: 1229554 - DNA, 15 bp, Homo sapiens
gtggcatgtgtttgt

SEQ ID NO: 1229555 - DNA, 15 bp, Homo sapiens
ggtggcatgtgtttg

SEQ ID NO: 1229556 - DNA, 15 bp, Homo sapiens
tggtggcatgtgttt

SEQ ID NO: 1229557 - DNA, 15 bp, Homo sapiens
atggtggcatgtgtt

SEQ ID NO: 1229558 - DNA, 15 bp, Homo sapiens
gatggtggcatgtgt

SEQ ID NO: 1229559 - DNA, 15 bp, Homo sapiens
ggatggtggcatgtg

SEQ ID NO: 1229560 - DNA, 15 bp, Homo sapiens
aggatggtggcatgt

SEQ ID NO: 1229561 - DNA, 15 bp, Homo sapiens
aaggatggtggcatg

SEQ ID NO: 1229562 - DNA, 15 bp, Homo sapiens
caaggatggtggcat

SEQ ID NO: 1229563 - DNA, 15 bp, Homo sapiens
ccaaggatggtggca

SEQ ID NO: 1229564 - DNA, 15 bp, Homo sapiens
gccaaggatggtggc

SEQ ID NO: 1229565 - DNA, 15 bp, Homo sapiens
agccaaggatggtgg

SEQ ID NO: 1229566 - DNA, 15 bp, Homo sapiens
tagccaaggatggtg

SEQ ID NO: 1229567 - DNA, 15 bp, Homo sapiens
ttagccaaggatggt

SEQ ID NO: 1229568 - DNA, 15 bp, Homo sapiens
attagccaaggatgg

SEQ ID NO: 1229569 - DNA, 15 bp, Homo sapiens
aattagccaaggatg

SEQ ID NO: 1229570 - DNA, 15 bp, Homo sapiens
aaattagccaaggat

SEQ ID NO: 1229571 - DNA, 15 bp, Homo sapiens
aaaattagccaagga

SEQ ID NO: 1229572 - DNA, 15 bp, Homo sapiens
aaaaattagccaagg

SEQ ID NO: 1229573 - DNA, 15 bp, Homo sapiens
caaaaattagccaag

SEQ ID NO: 1229574 - DNA, 15 bp, Homo sapiens
acaaaaattagccaa

SEQ ID NO: 1229575 - DNA, 15 bp, Homo sapiens
aaaatcctgtctcta

SEQ ID NO: 1229576 - DNA, 15 bp, Homo sapiens
taaaatcctgtctct

SEQ ID NO: 1229577 - DNA, 15 bp, Homo sapiens
gtaaaatcctgtctc

SEQ ID NO: 1229578 - DNA, 15 bp, Homo sapiens
ggtaaaatcctgtct

SEQ ID NO: 1229579 - DNA, 15 bp, Homo sapiens
tggtaaaatcctgtc

SEQ ID NO: 1229580 - DNA, 15 bp, Homo sapiens
atggtaaaatcctgt

SEQ ID NO: 1229581 - DNA, 15 bp, Homo sapiens
catggtaaaatcctg

SEQ ID NO: 1229582 - DNA, 15 bp, Homo sapiens
acatggtaaaatcct

SEQ ID NO: 1229583 - DNA, 15 bp, Homo sapiens
aacatggtaaaatcc

SEQ ID NO: 1229584 - DNA, 15 bp, Homo sapiens
caacatggtaaaatc

SEQ ID NO: 1229585 - DNA, 15 bp, Homo sapiens
ccaacatggtaaaat

SEQ ID NO: 1229586 - DNA, 15 bp, Homo sapiens
accaacatggtaaaa

SEQ ID NO: 1229587 - DNA, 15 bp, Homo sapiens
gaccaacatggtaaa

SEQ ID NO: 1229588 - DNA, 15 bp, Homo sapiens
tgaccaacatggtaa

SEQ ID NO: 1229589 - DNA, 15 bp, Homo sapiens
ctgaccaacatggta

SEQ ID NO: 1229590 - DNA, 15 bp, Homo sapiens
taggtgcagtggctc

SEQ ID NO: 1229591 - DNA, 15 bp, Homo sapiens
ctaggtgcagtggct

SEQ ID NO: 1229592 - DNA, 15 bp, Homo sapiens
gctaggtgcagtggc

SEQ ID NO: 1229593 - DNA, 15 bp, Homo sapiens
agctaggtgcagtgg

SEQ ID NO: 1229594 - DNA, 15 bp, Homo sapiens
cagctaggtgcagtg

SEQ ID NO: 1229595 - DNA, 15 bp, Homo sapiens
gcagctaggtgcagt

SEQ ID NO: 1229596 - DNA, 15 bp, Homo sapiens
agcagctaggtgcag

SEQ ID NO: 1229597 - DNA, 15 bp, Homo sapiens
aagcagctaggtgca

SEQ ID NO: 1229598 - DNA, 15 bp, Homo sapiens
caagcagctaggtgc

SEQ ID NO: 1229599 - DNA, 15 bp, Homo sapiens
acaagcagctaggtg

SEQ ID NO: 1229600 - DNA, 15 bp, Homo sapiens
cacaagcagctaggt

SEQ ID NO: 1229601 - DNA, 15 bp, Homo sapiens
acacaagcagctagg

SEQ ID NO: 1229602 - DNA, 15 bp, Homo sapiens
aacacaagcagctag

SEQ ID NO: 1229603 - DNA, 15 bp, Homo sapiens
aaacacaagcagcta

SEQ ID NO: 1229604 - DNA, 15 bp, Homo sapiens
aaaacacaagcagct

SEQ ID NO: 1229605 - DNA, 15 bp, Homo sapiens
aaaaacacaagcagc

SEQ ID NO: 1229606 - DNA, 15 bp, Homo sapiens
taaaaacacaagcag

SEQ ID NO: 1229607 - DNA, 15 bp, Homo sapiens
ataaaaacacaagca

SEQ ID NO: 1229608 - DNA, 15 bp, Homo sapiens
tataaaaacacaagc

SEQ ID NO: 1229609 - DNA, 15 bp, Homo sapiens
ctataaaaacacaag

SEQ ID NO: 1229610 - DNA, 15 bp, Homo sapiens
cctataaaaacacaa

SEQ ID NO: 1229611 - DNA, 15 bp, Homo sapiens
acctataaaaacaca

SEQ ID NO: 1229612 - DNA, 15 bp, Homo sapiens
tacctataaaaacac

SEQ ID NO: 1229613 - DNA, 15 bp, Homo sapiens
atacctataaaaaca

SEQ ID NO: 1229614 - DNA, 15 bp, Homo sapiens
tatacctataaaaac

SEQ ID NO: 1229615 - DNA, 15 bp, Homo sapiens
ttatacctataaaaa

SEQ ID NO: 1229616 - DNA, 15 bp, Homo sapiens
gttatacctataaaa

SEQ ID NO: 1229617 - DNA, 15 bp, Homo sapiens
tgttatacctataaa

SEQ ID NO: 1229618 - DNA, 15 bp, Homo sapiens
ctgttatacctataa

SEQ ID NO: 1229619 - DNA, 15 bp, Homo sapiens
cctgttatacctata

SEQ ID NO: 1229620 - DNA, 15 bp, Homo sapiens
gcctgttatacctat

SEQ ID NO: 1229621 - DNA, 15 bp, Homo sapiens
tgcctgttataccta

SEQ ID NO: 1229622 - DNA, 15 bp, Homo sapiens
ttgcctgttatacct

SEQ ID NO: 1229623 - DNA, 15 bp, Homo sapiens
tttgcctgttatacc

SEQ ID NO: 1229624 - DNA, 15 bp, Homo sapiens
ttttgcctgttatac

SEQ ID NO: 1229625 - DNA, 15 bp, Homo sapiens
attttgcctgttata

SEQ ID NO: 1229626 - DNA, 15 bp, Homo sapiens
tattttgcctgttat

SEQ ID NO: 1229627 - DNA, 15 bp, Homo sapiens
ttattttgcctgtta

SEQ ID NO: 1229628 - DNA, 15 bp, Homo sapiens
cttattttgcctgtt

SEQ ID NO: 1229629 - DNA, 15 bp, Homo sapiens
acttattttgcctgt

SEQ ID NO: 1229630 - DNA, 15 bp, Homo sapiens
cacttattttgcctg

SEQ ID NO: 1229631 - DNA, 15 bp, Homo sapiens
tcacttattttgcct

SEQ ID NO: 1229632 - DNA, 15 bp, Homo sapiens
ttcacttattttgcc

SEQ ID NO: 1229633 - DNA, 15 bp, Homo sapiens
cttcacttattttgc

SEQ ID NO: 1229634 - DNA, 15 bp, Homo sapiens
tcttcacttattttg

SEQ ID NO: 1229635 - DNA, 15 bp, Homo sapiens
ttcttcacttatttt

SEQ ID NO: 1229636 - DNA, 15 bp, Homo sapiens
attcttcacttattt

SEQ ID NO: 1229637 - DNA, 15 bp, Homo sapiens
tattcttcacttatt

SEQ ID NO: 1229638 - DNA, 15 bp, Homo sapiens
atattcttcacttat

SEQ ID NO: 1229639 - DNA, 15 bp, Homo sapiens
catattcttcactta

SEQ ID NO: 1229640 - DNA, 15 bp, Homo sapiens
gcatattcttcactt

SEQ ID NO: 1229641 - DNA, 15 bp, Homo sapiens
agcatattcttcact

SEQ ID NO: 1229642 - DNA, 15 bp, Homo sapiens
cagcatattcttcac

SEQ ID NO: 1229643 - DNA, 15 bp, Homo sapiens
acagcatattcttca

SEQ ID NO: 1229644 - DNA, 15 bp, Homo sapiens
tacagcatattcttc

SEQ ID NO: 1229645 - DNA, 15 bp, Homo sapiens
atacagcatattctt

SEQ ID NO: 1229646 - DNA, 15 bp, Homo sapiens
tatacagcatattct

SEQ ID NO: 1229647 - DNA, 15 bp, Homo sapiens
ttatacagcatattc

SEQ ID NO: 1229648 - DNA, 15 bp, Homo sapiens
attatacagcatatt

SEQ ID NO: 1229649 - DNA, 15 bp, Homo sapiens
aattatacagcatat

SEQ ID NO: 1229650 - DNA, 15 bp, Homo sapiens
gaattatacagcata

SEQ ID NO: 1229651 - DNA, 15 bp, Homo sapiens
ggaattatacagcat

SEQ ID NO: 1229652 - DNA, 15 bp, Homo sapiens
tggaattatacagca

SEQ ID NO: 1229653 - DNA, 15 bp, Homo sapiens
atggaattatacagc

SEQ ID NO: 1229654 - DNA, 15 bp, Homo sapiens
gatggaattatacag

SEQ ID NO: 1229655 - DNA, 15 bp, Homo sapiens
agatggaattataca

SEQ ID NO: 1229656 - DNA, 15 bp, Homo sapiens
cagatggaattatac

SEQ ID NO: 1229657 - DNA, 15 bp, Homo sapiens
acagatggaattata

SEQ ID NO: 1229658 - DNA, 15 bp, Homo sapiens
tacagatggaattat

SEQ ID NO: 1229659 - DNA, 15 bp, Homo sapiens
ttacagatggaatta

SEQ ID NO: 1229660 - DNA, 15 bp, Homo sapiens
attacagatggaatt

SEQ ID NO: 1229661 - DNA, 15 bp, Homo sapiens
gattacagatggaat

SEQ ID NO: 1229662 - DNA, 15 bp, Homo sapiens
agattacagatggaa

SEQ ID NO: 1229663 - DNA, 15 bp, Homo sapiens
aagattacagatgga

SEQ ID NO: 1229664 - DNA, 15 bp, Homo sapiens
gaagattacagatgg

SEQ ID NO: 1229665 - DNA, 15 bp, Homo sapiens
tgaagattacagatg

SEQ ID NO: 1229666 - DNA, 15 bp, Homo sapiens
ttgaagattacagat

SEQ ID NO: 1229667 - DNA, 15 bp, Homo sapiens
tttgaagattacaga

SEQ ID NO: 1229668 - DNA, 15 bp, Homo sapiens
gtttgaagattacag

SEQ ID NO: 1229669 - DNA, 15 bp, Homo sapiens
agtttgaagattaca

SEQ ID NO: 1229670 - DNA, 15 bp, Homo sapiens
tagtttgaagattac

SEQ ID NO: 1229671 - DNA, 15 bp, Homo sapiens
ctagtttgaagatta

SEQ ID NO: 1229672 - DNA, 15 bp, Homo sapiens
gctagtttgaagatt

SEQ ID NO: 1229673 - DNA, 15 bp, Homo sapiens
tgctagtttgaagat

SEQ ID NO: 1229674 - DNA, 15 bp, Homo sapiens
ctgctagtttgaaga

SEQ ID NO: 1229675 - DNA, 15 bp, Homo sapiens
actgctagtttgaag

SEQ ID NO: 1229676 - DNA, 15 bp, Homo sapiens
aactgctagtttgaa

SEQ ID NO: 1229677 - DNA, 15 bp, Homo sapiens
aaactgctagtttga

SEQ ID NO: 1229678 - DNA, 15 bp, Homo sapiens
gaaactgctagtttg

SEQ ID NO: 1229679 - DNA, 15 bp, Homo sapiens
ggaaactgctagttt

SEQ ID NO: 1229680 - DNA, 15 bp, Homo sapiens
cggaaactgctagtt

SEQ ID NO: 1229681 - DNA, 15 bp, Homo sapiens
acggaaactgctagt

SEQ ID NO: 1229682 - DNA, 15 bp, Homo sapiens
tacggaaactgctag

SEQ ID NO: 1229683 - DNA, 15 bp, Homo sapiens
ctacggaaactgcta

SEQ ID NO: 1229684 - DNA, 15 bp, Homo sapiens
gctacggaaactgct

SEQ ID NO: 1229685 - DNA, 15 bp, Homo sapiens
agctacggaaactgc

SEQ ID NO: 1229686 - DNA, 15 bp, Homo sapiens
cagctacggaaactg

SEQ ID NO: 1229687 - DNA, 15 bp, Homo sapiens
acagctacggaaact

SEQ ID NO: 1229688 - DNA, 15 bp, Homo sapiens
cacagctacggaaac

SEQ ID NO: 1229689 - DNA, 15 bp, Homo sapiens
ccacagctacggaaa

SEQ ID NO: 1229690 - DNA, 15 bp, Homo sapiens
accacagctacggaa

SEQ ID NO: 1229691 - DNA, 15 bp, Homo sapiens
caccacagctacgga

SEQ ID NO: 1229692 - DNA, 15 bp, Homo sapiens
acaccacagctacgg

SEQ ID NO: 1229693 - DNA, 15 bp, Homo sapiens
aacaccacagctacg

SEQ ID NO: 1229694 - DNA, 15 bp, Homo sapiens
gaacaccacagctac

SEQ ID NO: 1229695 - DNA, 15 bp, Homo sapiens
tgaacaccacagcta

SEQ ID NO: 1229696 - DNA, 15 bp, Homo sapiens
atgaacaccacagct

SEQ ID NO: 1229697 - DNA, 15 bp, Homo sapiens
gatgaacaccacagc

SEQ ID NO: 1229698 - DNA, 15 bp, Homo sapiens
agatgaacaccacag

SEQ ID NO: 1229699 - DNA, 15 bp, Homo sapiens
aagatgaacaccaca

SEQ ID NO: 1229700 - DNA, 15 bp, Homo sapiens
gaagatgaacaccac

SEQ ID NO: 1229701 - DNA, 15 bp, Homo sapiens
ggaagatgaacacca

SEQ ID NO: 1229702 - DNA, 15 bp, Homo sapiens
gggaagatgaacacc

SEQ ID NO: 1229703 - DNA, 15 bp, Homo sapiens
tgggaagatgaacac

SEQ ID NO: 1229704 - DNA, 15 bp, Homo sapiens
atgggaagatgaaca

SEQ ID NO: 1229705 - DNA, 15 bp, Homo sapiens
gatgggaagatgaac

SEQ ID NO: 1229706 - DNA, 15 bp, Homo sapiens
tgatgggaagatgaa

SEQ ID NO: 1229707 - DNA, 15 bp, Homo sapiens
atgatgggaagatga

SEQ ID NO: 1229708 - DNA, 15 bp, Homo sapiens
aatgatgggaagatg

SEQ ID NO: 1229709 - DNA, 15 bp, Homo sapiens
caatgatgggaagat

SEQ ID NO: 1229710 - DNA, 15 bp, Homo sapiens
ccaatgatgggaaga

SEQ ID NO: 1229711 - DNA, 15 bp, Homo sapiens
accaatgatgggaag

SEQ ID NO: 1229712 - DNA, 15 bp, Homo sapiens
taccaatgatgggaa

SEQ ID NO: 1229713 - DNA, 15 bp, Homo sapiens
ttaccaatgatggga

SEQ ID NO: 1229714 - DNA, 15 bp, Homo sapiens
attaccaatgatggg

SEQ ID NO: 1229715 - DNA, 15 bp, Homo sapiens
aattaccaatgatgg

SEQ ID NO: 1229716 - DNA, 15 bp, Homo sapiens
caattaccaatgatg

SEQ ID NO: 1229717 - DNA, 15 bp, Homo sapiens
ccaattaccaatgat

SEQ ID NO: 1229718 - DNA, 15 bp, Homo sapiens
tccaattaccaatga

SEQ ID NO: 1229719 - DNA, 15 bp, Homo sapiens
ctccaattaccaatg

SEQ ID NO: 1229720 - DNA, 15 bp, Homo sapiens
tctccaattaccaat

SEQ ID NO: 1229721 - DNA, 15 bp, Homo sapiens
ctctccaattaccaa

SEQ ID NO: 1229722 - DNA, 15 bp, Homo sapiens
actctccaattacca

SEQ ID NO: 1229723 - DNA, 15 bp, Homo sapiens
tactctccaattacc

SEQ ID NO: 1229724 - DNA, 15 bp, Homo sapiens
ttactctccaattac

SEQ ID NO: 1229725 - DNA, 15 bp, Homo sapiens
gttactctccaatta

SEQ ID NO: 1229726 - DNA, 15 bp, Homo sapiens
agttactctccaatt

SEQ ID NO: 1229727 - DNA, 15 bp, Homo sapiens
gagttactctccaat

SEQ ID NO: 1229728 - DNA, 15 bp, Homo sapiens
agagttactctccaa

SEQ ID NO: 1229729 - DNA, 15 bp, Homo sapiens
tagagttactctcca

SEQ ID NO: 1229730 - DNA, 15 bp, Homo sapiens
gtagagttactctcc

SEQ ID NO: 1229731 - DNA, 15 bp, Homo sapiens
ggtagagttactctc

SEQ ID NO: 1229732 - DNA, 15 bp, Homo sapiens
aggtagagttactct

SEQ ID NO: 1229733 - DNA, 15 bp, Homo sapiens
gaggtagagttactc

SEQ ID NO: 1229734 - DNA, 15 bp, Homo sapiens
ggaggtagagttact

SEQ ID NO: 1229735 - DNA, 15 bp, Homo sapiens
gggaggtagagttac

SEQ ID NO: 1229736 - DNA, 15 bp, Homo sapiens
tgggaggtagagtta

SEQ ID NO: 1229737 - DNA, 15 bp, Homo sapiens
ctgggaggtagagtt

SEQ ID NO: 1229738 - DNA, 15 bp, Homo sapiens
tctgggaggtagagt

SEQ ID NO: 1229739 - DNA, 15 bp, Homo sapiens
ctctgggaggtagag

SEQ ID NO: 1229740 - DNA, 15 bp, Homo sapiens
cctctgggaggtaga

SEQ ID NO: 1229741 - DNA, 15 bp, Homo sapiens
tcctctgggaggtag

SEQ ID NO: 1229742 - DNA, 15 bp, Homo sapiens
ttcctctgggaggta

SEQ ID NO: 1229743 - DNA, 15 bp, Homo sapiens
cttcctctgggaggt

SEQ ID NO: 1229744 - DNA, 15 bp, Homo sapiens
ccttcctctgggagg

SEQ ID NO: 1229745 - DNA, 15 bp, Homo sapiens
tccttcctctgggag

SEQ ID NO: 1229746 - DNA, 15 bp, Homo sapiens
ctccttcctctggga

SEQ ID NO: 1229747 - DNA, 15 bp, Homo sapiens
cctccttcctctggg

SEQ ID NO: 1229748 - DNA, 15 bp, Homo sapiens
tcctccttcctctgg

SEQ ID NO: 1229749 - DNA, 15 bp, Homo sapiens
gtcctccttcctctg

SEQ ID NO: 1229750 - DNA, 15 bp, Homo sapiens
agtcctccttcctct

SEQ ID NO: 1229751 - DNA, 15 bp, Homo sapiens
cagtcctccttcctc

SEQ ID NO: 1229752 - DNA, 15 bp, Homo sapiens
acagtcctccttcct

SEQ ID NO: 1229753 - DNA, 15 bp, Homo sapiens
aacagtcctccttcc

SEQ ID NO: 1229754 - DNA, 15 bp, Homo sapiens
caacagtcctccttc

SEQ ID NO: 1229755 - DNA, 15 bp, Homo sapiens
acaacagtcctcctt

SEQ ID NO: 1229756 - DNA, 15 bp, Homo sapiens
tacaacagtcctcct

SEQ ID NO: 1229757 - DNA, 15 bp, Homo sapiens
ttacaacagtcctcc

SEQ ID NO: 1229758 - DNA, 15 bp, Homo sapiens
tttacaacagtcctc

SEQ ID NO: 1229759 - DNA, 15 bp, Homo sapiens
atttacaacagtcct

SEQ ID NO: 1229760 - DNA, 15 bp, Homo sapiens
aatttacaacagtcc

SEQ ID NO: 1229761 - DNA, 15 bp, Homo sapiens
taatttacaacagtc

SEQ ID NO: 1229762 - DNA, 15 bp, Homo sapiens
ttaatttacaacagt

SEQ ID NO: 1229763 - DNA, 15 bp, Homo sapiens
tttaatttacaacag

SEQ ID NO: 1229764 - DNA, 15 bp, Homo sapiens
ctttaatttacaaca

SEQ ID NO: 1229765 - DNA, 15 bp, Homo sapiens
cctttaatttacaac

SEQ ID NO: 1229766 - DNA, 15 bp, Homo sapiens
gcctttaatttacaa

SEQ ID NO: 1229767 - DNA, 15 bp, Homo sapiens
agcctttaatttaca

SEQ ID NO: 1229768 - DNA, 15 bp, Homo sapiens
gagcctttaatttac

SEQ ID NO: 1229769 - DNA, 15 bp, Homo sapiens
tgagcctttaattta

SEQ ID NO: 1229770 - DNA, 15 bp, Homo sapiens
atgagcctttaattt

SEQ ID NO: 1229771 - DNA, 15 bp, Homo sapiens
aatgagcctttaatt

SEQ ID NO: 1229772 - DNA, 15 bp, Homo sapiens
caatgagcctttaat

SEQ ID NO: 1229773 - DNA, 15 bp, Homo sapiens
acaatgagcctttaa

SEQ ID NO: 1229774 - DNA, 15 bp, Homo sapiens
aacaatgagccttta

SEQ ID NO: 1229775 - DNA, 15 bp, Homo sapiens
gaacaatgagccttt

SEQ ID NO: 1229776 - DNA, 15 bp, Homo sapiens
tgaacaatgagcctt

SEQ ID NO: 1229777 - DNA, 15 bp, Homo sapiens
ttgaacaatgagcct

SEQ ID NO: 1229778 - DNA, 15 bp, Homo sapiens
cttgaacaatgagcc

SEQ ID NO: 1229779 - DNA, 15 bp, Homo sapiens
gcttgaacaatgagc

SEQ ID NO: 1229780 - DNA, 15 bp, Homo sapiens
ggcttgaacaatgag

SEQ ID NO: 1229781 - DNA, 15 bp, Homo sapiens
aggcttgaacaatga

SEQ ID NO: 1229782 - DNA, 15 bp, Homo sapiens
gaggcttgaacaatg

SEQ ID NO: 1229783 - DNA, 15 bp, Homo sapiens
tgaggcttgaacaat

SEQ ID NO: 1229784 - DNA, 15 bp, Homo sapiens
atgaggcttgaacaa

SEQ ID NO: 1229785 - DNA, 15 bp, Homo sapiens
aatgaggcttgaaca

SEQ ID NO: 1229786 - DNA, 15 bp, Homo sapiens
caatgaggcttgaac

SEQ ID NO: 1229787 - DNA, 15 bp, Homo sapiens
tcaatgaggcttgaa

SEQ ID NO: 1229788 - DNA, 15 bp, Homo sapiens
ttcaatgaggcttga

SEQ ID NO: 1229789 - DNA, 15 bp, Homo sapiens
attcaatgaggcttg

SEQ ID NO: 1229790 - DNA, 15 bp, Homo sapiens
aattcaatgaggctt

SEQ ID NO: 1229791 - DNA, 15 bp, Homo sapiens
caattcaatgaggct

SEQ ID NO: 1229792 - DNA, 15 bp, Homo sapiens
acaattcaatgaggc

SEQ ID NO: 1229793 - DNA, 15 bp, Homo sapiens
gacaattcaatgagg

SEQ ID NO: 1229794 - DNA, 15 bp, Homo sapiens
tgacaattcaatgag

SEQ ID NO: 1229795 - DNA, 15 bp, Homo sapiens
ctgacaattcaatga

SEQ ID NO: 1229796 - DNA, 15 bp, Homo sapiens
actgacaattcaatg

SEQ ID NO: 1229797 - DNA, 15 bp, Homo sapiens
cactgacaattcaat

SEQ ID NO: 1229798 - DNA, 15 bp, Homo sapiens
acactgacaattcaa

SEQ ID NO: 1229799 - DNA, 15 bp, Homo sapiens
tacactgacaattca

SEQ ID NO: 1229800 - DNA, 15 bp, Homo sapiens
ctacactgacaattc

SEQ ID NO: 1229801 - DNA, 15 bp, Homo sapiens
cctacactgacaatt

SEQ ID NO: 1229802 - DNA, 15 bp, Homo sapiens
ccctacactgacaat

SEQ ID NO: 1229803 - DNA, 15 bp, Homo sapiens
cccctacactgacaa

SEQ ID NO: 1229804 - DNA, 15 bp, Homo sapiens
tcccctacactgaca

SEQ ID NO: 1229805 - DNA, 15 bp, Homo sapiens
gtcccctacactgac

SEQ ID NO: 1229806 - DNA, 15 bp, Homo sapiens
ggtcccctacactga

SEQ ID NO: 1229807 - DNA, 15 bp, Homo sapiens
aggtcccctacactg

SEQ ID NO: 1229808 - DNA, 15 bp, Homo sapiens
caggtcccctacact

SEQ ID NO: 1229809 - DNA, 15 bp, Homo sapiens
tcaggtcccctacac

SEQ ID NO: 1229810 - DNA, 15 bp, Homo sapiens
ctcaggtcccctaca

SEQ ID NO: 1229811 - DNA, 15 bp, Homo sapiens
cctcaggtcccctac

SEQ ID NO: 1229812 - DNA, 15 bp, Homo sapiens
gcctcaggtccccta

SEQ ID NO: 1229813 - DNA, 15 bp, Homo sapiens
tgcctcaggtcccct

SEQ ID NO: 1229814 - DNA, 15 bp, Homo sapiens
ttgcctcaggtcccc

SEQ ID NO: 1229815 - DNA, 15 bp, Homo sapiens
tttgcctcaggtccc

SEQ ID NO: 1229816 - DNA, 15 bp, Homo sapiens
ctttgcctcaggtcc

SEQ ID NO: 1229817 - DNA, 15 bp, Homo sapiens
tctttgcctcaggtc

SEQ ID NO: 1229818 - DNA, 15 bp, Homo sapiens
ctctttgcctcaggt

SEQ ID NO: 1229819 - DNA, 15 bp, Homo sapiens
gctctttgcctcagg

SEQ ID NO: 1229820 - DNA, 15 bp, Homo sapiens
tgctctttgcctcag

SEQ ID NO: 1229821 - DNA, 15 bp, Homo sapiens
atgctctttgcctca

SEQ ID NO: 1229822 - DNA, 15 bp, Homo sapiens
aatgctctttgcctc

SEQ ID NO: 1229823 - DNA, 15 bp, Homo sapiens
caatgctctttgcct

SEQ ID NO: 1229824 - DNA, 15 bp, Homo sapiens
acaatgctctttgcc

SEQ ID NO: 1229825 - DNA, 15 bp, Homo sapiens
aacaatgctctttgc

SEQ ID NO: 1229826 - DNA, 15 bp, Homo sapiens
caacaatgctctttg

SEQ ID NO: 1229827 - DNA, 15 bp, Homo sapiens
acaacaatgctcttt

SEQ ID NO: 1229828 - DNA, 15 bp, Homo sapiens
aacaacaatgctctt

SEQ ID NO: 1229829 - DNA, 15 bp, Homo sapiens
aaacaacaatgctct

SEQ ID NO: 1229830 - DNA, 15 bp, Homo sapiens
aaaacaacaatgctc

SEQ ID NO: 1229831 - DNA, 15 bp, Homo sapiens
gaaaacaacaatgct

SEQ ID NO: 1229832 - DNA, 15 bp, Homo sapiens
tgaaaacaacaatgc

SEQ ID NO: 1229833 - DNA, 15 bp, Homo sapiens
ttgaaaacaacaatg

SEQ ID NO: 1229834 - DNA, 15 bp, Homo sapiens
cttgaaaacaacaat

SEQ ID NO: 1229835 - DNA, 15 bp, Homo sapiens
tcttgaaaacaacaa

SEQ ID NO: 1229836 - DNA, 15 bp, Homo sapiens
ctcttgaaaacaaca

SEQ ID NO: 1229837 - DNA, 15 bp, Homo sapiens
actcttgaaaacaac

SEQ ID NO: 1229838 - DNA, 15 bp, Homo sapiens
aactcttgaaaacaa

SEQ ID NO: 1229839 - DNA, 15 bp, Homo sapiens
taactcttgaaaaca

SEQ ID NO: 1229840 - DNA, 15 bp, Homo sapiens
ataactcttgaaaac

SEQ ID NO: 1229841 - DNA, 15 bp, Homo sapiens
aataactcttgaaaa

SEQ ID NO: 1229842 - DNA, 15 bp, Homo sapiens
gaataactcttgaaa

SEQ ID NO: 1229843 - DNA, 15 bp, Homo sapiens
agaataactcttgaa

SEQ ID NO: 1229844 - DNA, 15 bp, Homo sapiens
cagaataactcttga

SEQ ID NO: 1229845 - DNA, 15 bp, Homo sapiens
acagaataactcttg

SEQ ID NO: 1229846 - DNA, 15 bp, Homo sapiens
tacagaataactctt

SEQ ID NO: 1229847 - DNA, 15 bp, Homo sapiens
atacagaataactct

SEQ ID NO: 1229848 - DNA, 15 bp, Homo sapiens
tatacagaataactc

SEQ ID NO: 1229849 - DNA, 15 bp, Homo sapiens
atatacagaataact

SEQ ID NO: 1229850 - DNA, 15 bp, Homo sapiens
gatatacagaataac

SEQ ID NO: 1229851 - DNA, 15 bp, Homo sapiens
tgatatacagaataa

SEQ ID NO: 1229852 - DNA, 15 bp, Homo sapiens
gtgatatacagaata

SEQ ID NO: 1229853 - DNA, 15 bp, Homo sapiens
tgtgatatacagaat

SEQ ID NO: 1229854 - DNA, 15 bp, Homo sapiens
atgtgatatacagaa

SEQ ID NO: 1229855 - DNA, 15 bp, Homo sapiens
aatgtgatatacaga

SEQ ID NO: 1229856 - DNA, 15 bp, Homo sapiens
caatgtgatatacag

SEQ ID NO: 1229857 - DNA, 15 bp, Homo sapiens
tcaatgtgatataca

SEQ ID NO: 1229858 - DNA, 15 bp, Homo sapiens
atcaatgtgatatac

SEQ ID NO: 1229859 - DNA, 15 bp, Homo sapiens
catcaatgtgatata

SEQ ID NO: 1229860 - DNA, 15 bp, Homo sapiens
acatcaatgtgatat

SEQ ID NO: 1229861 - DNA, 15 bp, Homo sapiens
cacatcaatgtgata

SEQ ID NO: 1229862 - DNA, 15 bp, Homo sapiens
gcacatcaatgtgat

SEQ ID NO: 1229863 - DNA, 15 bp, Homo sapiens
tgcacatcaatgtga

SEQ ID NO: 1229864 - DNA, 15 bp, Homo sapiens
ctgcacatcaatgtg

SEQ ID NO: 1229865 - DNA, 15 bp, Homo sapiens
actgcacatcaatgt

SEQ ID NO: 1229866 - DNA, 15 bp, Homo sapiens
aactgcacatcaatg

SEQ ID NO: 1229867 - DNA, 15 bp, Homo sapiens
gaactgcacatcaat

SEQ ID NO: 1229868 - DNA, 15 bp, Homo sapiens
tgaactgcacatcaa

SEQ ID NO: 1229869 - DNA, 15 bp, Homo sapiens
ttgaactgcacatca

SEQ ID NO: 1229870 - DNA, 15 bp, Homo sapiens
attgaactgcacatc

SEQ ID NO: 1229871 - DNA, 15 bp, Homo sapiens
tattgaactgcacat

SEQ ID NO: 1229872 - DNA, 15 bp, Homo sapiens
atattgaactgcaca

SEQ ID NO: 1229873 - DNA, 15 bp, Homo sapiens
aatattgaactgcac

SEQ ID NO: 1229874 - DNA, 15 bp, Homo sapiens
aaatattgaactgca

SEQ ID NO: 1229875 - DNA, 15 bp, Homo sapiens
taaatattgaactgc

SEQ ID NO: 1229876 - DNA, 15 bp, Homo sapiens
ttaaatattgaactg

SEQ ID NO: 1229877 - DNA, 15 bp, Homo sapiens
tttaaatattgaact

SEQ ID NO: 1229878 - DNA, 15 bp, Homo sapiens
atttaaatattgaac

SEQ ID NO: 1229879 - DNA, 15 bp, Homo sapiens
catttaaatattgaa

SEQ ID NO: 1229880 - DNA, 15 bp, Homo sapiens
acatttaaatattga

SEQ ID NO: 1229881 - DNA, 15 bp, Homo sapiens
tacatttaaatattg

SEQ ID NO: 1229882 - DNA, 15 bp, Homo sapiens
ttacatttaaatatt

SEQ ID NO: 1229883 - DNA, 15 bp, Homo sapiens
cttacatttaaatat

SEQ ID NO: 1229884 - DNA, 15 bp, Homo sapiens
ccttacatttaaata

SEQ ID NO: 1229885 - DNA, 15 bp, Homo sapiens
tccttacatttaaat

SEQ ID NO: 1229886 - DNA, 15 bp, Homo sapiens
ttccttacatttaaa

SEQ ID NO: 1229887 - DNA, 15 bp, Homo sapiens
tttccttacatttaa

SEQ ID NO: 1229888 - DNA, 15 bp, Homo sapiens
atttccttacattta

SEQ ID NO: 1229889 - DNA, 15 bp, Homo sapiens
catttccttacattt

SEQ ID NO: 1229890 - DNA, 15 bp, Homo sapiens
tcatttccttacatt

SEQ ID NO: 1229891 - DNA, 15 bp, Homo sapiens
gtcatttccttacat

SEQ ID NO: 1229892 - DNA, 15 bp, Homo sapiens
agtcatttccttaca

SEQ ID NO: 1229893 - DNA, 15 bp, Homo sapiens
gagtcatttccttac

SEQ ID NO: 1229894 - DNA, 15 bp, Homo sapiens
ggagtcatttcctta

SEQ ID NO: 1229895 - DNA, 15 bp, Homo sapiens
aggagtcatttcctt

SEQ ID NO: 1229896 - DNA, 15 bp, Homo sapiens
taggagtcatttcct

SEQ ID NO: 1229897 - DNA, 15 bp, Homo sapiens
gtaggagtcatttcc

SEQ ID NO: 1229898 - DNA, 15 bp, Homo sapiens
agtaggagtcatttc

SEQ ID NO: 1229899 - DNA, 15 bp, Homo sapiens
gagtaggagtcattt

SEQ ID NO: 1229900 - DNA, 15 bp, Homo sapiens
agagtaggagtcatt

SEQ ID NO: 1229901 - DNA, 15 bp, Homo sapiens
gagagtaggagtcat

SEQ ID NO: 1229902 - DNA, 15 bp, Homo sapiens
agagagtaggagtca

SEQ ID NO: 1229903 - DNA, 15 bp, Homo sapiens
tagagagtaggagtc

SEQ ID NO: 1229904 - DNA, 15 bp, Homo sapiens
atagagagtaggagt

SEQ ID NO: 1229905 - DNA, 15 bp, Homo sapiens
aatagagagtaggag

SEQ ID NO: 1229906 - DNA, 15 bp, Homo sapiens
aaatagagagtagga

SEQ ID NO: 1229907 - DNA, 15 bp, Homo sapiens
caaatagagagtagg

SEQ ID NO: 1229908 - DNA, 15 bp, Homo sapiens
acaaatagagagtag

SEQ ID NO: 1229909 - DNA, 15 bp, Homo sapiens
aacaaatagagagta

SEQ ID NO: 1229910 - DNA, 15 bp, Homo sapiens
aaacaaatagagagt

SEQ ID NO: 1229911 - DNA, 15 bp, Homo sapiens
taaacaaatagagag

SEQ ID NO: 1229912 - DNA, 15 bp, Homo sapiens
gtaaacaaatagaga

SEQ ID NO: 1229913 - DNA, 15 bp, Homo sapiens
tgtaaacaaatagag

SEQ ID NO: 1229914 - DNA, 15 bp, Homo sapiens
ttgtaaacaaataga

SEQ ID NO: 1229915 - DNA, 15 bp, Homo sapiens
tttgtaaacaaatag

SEQ ID NO: 1229916 - DNA, 15 bp, Homo sapiens
ttttgtaaacaaata

SEQ ID NO: 1229917 - DNA, 15 bp, Homo sapiens
gttttgtaaacaaat

SEQ ID NO: 1229918 - DNA, 15 bp, Homo sapiens
ggttttgtaaacaaa

SEQ ID NO: 1229919 - DNA, 15 bp, Homo sapiens
gggttttgtaaacaa

SEQ ID NO: 1229920 - DNA, 15 bp, Homo sapiens
agggttttgtaaaca

SEQ ID NO: 1229921 - DNA, 15 bp, Homo sapiens
tagggttttgtaaac

SEQ ID NO: 1229922 - DNA, 15 bp, Homo sapiens
ctagggttttgtaaa

SEQ ID NO: 1229923 - DNA, 15 bp, Homo sapiens
actagggttttgtaa

SEQ ID NO: 1229924 - DNA, 15 bp, Homo sapiens
aactagggttttgta

SEQ ID NO: 1229925 - DNA, 15 bp, Homo sapiens
gaactagggttttgt

SEQ ID NO: 1229926 - DNA, 15 bp, Homo sapiens
agaactagggttttg

SEQ ID NO: 1229927 - DNA, 15 bp, Homo sapiens
gagaactagggtttt

SEQ ID NO: 1229928 - DNA, 15 bp, Homo sapiens
tgagaactagggttt

SEQ ID NO: 1229929 - DNA, 15 bp, Homo sapiens
atgagaactagggtt

SEQ ID NO: 1229930 - DNA, 15 bp, Homo sapiens
aatgagaactagggt

SEQ ID NO: 1229931 - DNA, 15 bp, Homo sapiens
aaatgagaactaggg

SEQ ID NO: 1229932 - DNA, 15 bp, Homo sapiens
taaatgagaactagg

SEQ ID NO: 1229933 - DNA, 15 bp, Homo sapiens
ataaatgagaactag

SEQ ID NO: 1229934 - DNA, 15 bp, Homo sapiens
cataaatgagaacta

SEQ ID NO: 1229935 - DNA, 15 bp, Homo sapiens
gcataaatgagaact

SEQ ID NO: 1229936 - DNA, 15 bp, Homo sapiens
ggcataaatgagaac

SEQ ID NO: 1229937 - DNA, 15 bp, Homo sapiens
gggcataaatgagaa

SEQ ID NO: 1229938 - DNA, 15 bp, Homo sapiens
tgggcataaatgaga

SEQ ID NO: 1229939 - DNA, 15 bp, Homo sapiens
atgggcataaatgag

SEQ ID NO: 1229940 - DNA, 15 bp, Homo sapiens
aatgggcataaatga

SEQ ID NO: 1229941 - DNA, 15 bp, Homo sapiens
gaatgggcataaatg

SEQ ID NO: 1229942 - DNA, 15 bp, Homo sapiens
ggaatgggcataaat

SEQ ID NO: 1229943 - DNA, 15 bp, Homo sapiens
aggaatgggcataaa

SEQ ID NO: 1229944 - DNA, 15 bp, Homo sapiens
aaggaatgggcataa

SEQ ID NO: 1229945 - DNA, 15 bp, Homo sapiens
gaaggaatgggcata

SEQ ID NO: 1229946 - DNA, 15 bp, Homo sapiens
tgaaggaatgggcat

SEQ ID NO: 1229947 - DNA, 15 bp, Homo sapiens
atgaaggaatgggca

SEQ ID NO: 1229948 - DNA, 15 bp, Homo sapiens
gatgaaggaatgggc

SEQ ID NO: 1229949 - DNA, 15 bp, Homo sapiens
tgatgaaggaatggg

SEQ ID NO: 1229950 - DNA, 15 bp, Homo sapiens
ttgatgaaggaatgg

SEQ ID NO: 1229951 - DNA, 15 bp, Homo sapiens
gttgatgaaggaatg

SEQ ID NO: 1229952 - DNA, 15 bp, Homo sapiens
tgttgatgaaggaat

SEQ ID NO: 1229953 - DNA, 15 bp, Homo sapiens
ttgttgatgaaggaa

SEQ ID NO: 1229954 - DNA, 15 bp, Homo sapiens
tttgttgatgaagga

SEQ ID NO: 1229955 - DNA, 15 bp, Homo sapiens
atttgttgatgaagg

SEQ ID NO: 1229956 - DNA, 15 bp, Homo sapiens
tatttgttgatgaag

SEQ ID NO: 1229957 - DNA, 15 bp, Homo sapiens
ttatttgttgatgaa

SEQ ID NO: 1229958 - DNA, 15 bp, Homo sapiens
attatttgttgatga

SEQ ID NO: 1229959 - DNA, 15 bp, Homo sapiens
cattatttgttgatg

SEQ ID NO: 1229960 - DNA, 15 bp, Homo sapiens
tcattatttgttgat

SEQ ID NO: 1229961 - DNA, 15 bp, Homo sapiens
atcattatttgttga

SEQ ID NO: 1229962 - DNA, 15 bp, Homo sapiens
aatcattatttgttg

SEQ ID NO: 1229963 - DNA, 15 bp, Homo sapiens
aaatcattatttgtt

SEQ ID NO: 1229964 - DNA, 15 bp, Homo sapiens
aaaatcattatttgt

SEQ ID NO: 1229965 - DNA, 15 bp, Homo sapiens
gaaaatcattatttg

SEQ ID NO: 1229966 - DNA, 15 bp, Homo sapiens
agaaaatcattattt

SEQ ID NO: 1229967 - DNA, 15 bp, Homo sapiens
tagaaaatcattatt

SEQ ID NO: 1229968 - DNA, 15 bp, Homo sapiens
gtagaaaatcattat

SEQ ID NO: 1229969 - DNA, 15 bp, Homo sapiens
agtagaaaatcatta

SEQ ID NO: 1229970 - DNA, 15 bp, Homo sapiens
aagtagaaaatcatt

SEQ ID NO: 1229971 - DNA, 15 bp, Homo sapiens
aaagtagaaaatcat

SEQ ID NO: 1229972 - DNA, 15 bp, Homo sapiens
aaaagtagaaaatca

SEQ ID NO: 1229973 - DNA, 15 bp, Homo sapiens
aaaaagtagaaaatc

SEQ ID NO: 1229974 - DNA, 15 bp, Homo sapiens
caaaaagtagaaaat

SEQ ID NO: 1229975 - DNA, 15 bp, Homo sapiens
gcaaaaagtagaaaa

SEQ ID NO: 1229976 - DNA, 15 bp, Homo sapiens
ggcaaaaagtagaaa

SEQ ID NO: 1229977 - DNA, 15 bp, Homo sapiens
aggcaaaaagtagaa

SEQ ID NO: 1229978 - DNA, 15 bp, Homo sapiens
caggcaaaaagtaga

SEQ ID NO: 1229979 - DNA, 15 bp, Homo sapiens
ccaggcaaaaagtag

SEQ ID NO: 1229980 - DNA, 15 bp, Homo sapiens
accaggcaaaaagta

SEQ ID NO: 1229981 - DNA, 15 bp, Homo sapiens
aaccaggcaaaaagt

SEQ ID NO: 1229982 - DNA, 15 bp, Homo sapiens
gaaccaggcaaaaag

SEQ ID NO: 1229983 - DNA, 15 bp, Homo sapiens
agaaccaggcaaaaa

SEQ ID NO: 1229984 - DNA, 15 bp, Homo sapiens
gagaaccaggcaaaa

SEQ ID NO: 1229985 - DNA, 15 bp, Homo sapiens
agagaaccaggcaaa

SEQ ID NO: 1229986 - DNA, 15 bp, Homo sapiens
gagagaaccaggcaa

SEQ ID NO: 1229987 - DNA, 15 bp, Homo sapiens
agagagaaccaggca

SEQ ID NO: 1229988 - DNA, 15 bp, Homo sapiens
tagagagaaccaggc

SEQ ID NO: 1229989 - DNA, 15 bp, Homo sapiens
ctagagagaaccagg

SEQ ID NO: 1229990 - DNA, 15 bp, Homo sapiens
tctagagagaaccag

SEQ ID NO: 1229991 - DNA, 15 bp, Homo sapiens
ttctagagagaacca

SEQ ID NO: 1229992 - DNA, 15 bp, Homo sapiens
cttctagagagaacc

SEQ ID NO: 1229993 - DNA, 15 bp, Homo sapiens
tcttctagagagaac

SEQ ID NO: 1229994 - DNA, 15 bp, Homo sapiens
ctcttctagagagaa

SEQ ID NO: 1229995 - DNA, 15 bp, Homo sapiens
actcttctagagaga

SEQ ID NO: 1229996 - DNA, 15 bp, Homo sapiens
tactcttctagagag

SEQ ID NO: 1229997 - DNA, 15 bp, Homo sapiens
ctactcttctagaga

SEQ ID NO: 1229998 - DNA, 15 bp, Homo sapiens
actactcttctagag

SEQ ID NO: 1229999 - DNA, 15 bp, Homo sapiens
aactactcttctaga

SEQ ID NO: 1230000 - DNA, 15 bp, Homo sapiens
gaactactcttctag

SEQ ID NO: 1230001 - DNA, 15 bp, Homo sapiens
agaactactcttcta

SEQ ID NO: 1230002 - DNA, 15 bp, Homo sapiens
aagaactactcttct

SEQ ID NO: 1230003 - DNA, 15 bp, Homo sapiens
taagaactactcttc

SEQ ID NO: 1230004 - DNA, 15 bp, Homo sapiens
ttaagaactactctt

SEQ ID NO: 1230005 - DNA, 15 bp, Homo sapiens
tttaagaactactct

SEQ ID NO: 1230006 - DNA, 15 bp, Homo sapiens
gtttaagaactactc

SEQ ID NO: 1230007 - DNA, 15 bp, Homo sapiens
tgtttaagaactact

SEQ ID NO: 1230008 - DNA, 15 bp, Homo sapiens
ttgtttaagaactac

SEQ ID NO: 1230009 - DNA, 15 bp, Homo sapiens
attgtttaagaacta

SEQ ID NO: 1230010 - DNA, 15 bp, Homo sapiens
tattgtttaagaact

SEQ ID NO: 1230011 - DNA, 15 bp, Homo sapiens
ctattgtttaagaac

SEQ ID NO: 1230012 - DNA, 15 bp, Homo sapiens
gctattgtttaagaa

SEQ ID NO: 1230013 - DNA, 15 bp, Homo sapiens
tgctattgtttaaga

SEQ ID NO: 1230014 - DNA, 15 bp, Homo sapiens
atgctattgtttaag

SEQ ID NO: 1230015 - DNA, 15 bp, Homo sapiens
aatgctattgtttaa

SEQ ID NO: 1230016 - DNA, 15 bp, Homo sapiens
gaatgctattgttta

SEQ ID NO: 1230017 - DNA, 15 bp, Homo sapiens
tgaatgctattgttt

SEQ ID NO: 1230018 - DNA, 15 bp, Homo sapiens
ctgaatgctattgtt

SEQ ID NO: 1230019 - DNA, 15 bp, Homo sapiens
tctgaatgctattgt

SEQ ID NO: 1230020 - DNA, 15 bp, Homo sapiens
ttctgaatgctattg

SEQ ID NO: 1230021 - DNA, 15 bp, Homo sapiens
tttctgaatgctatt

SEQ ID NO: 1230022 - DNA, 15 bp, Homo sapiens
ttttctgaatgctat

SEQ ID NO: 1230023 - DNA, 15 bp, Homo sapiens
tttttctgaatgcta

SEQ ID NO: 1230024 - DNA, 15 bp, Homo sapiens
atttttctgaatgct

SEQ ID NO: 1230025 - DNA, 15 bp, Homo sapiens
gatttttctgaatgc

SEQ ID NO: 1230026 - DNA, 15 bp, Homo sapiens
tgatttttctgaatg

SEQ ID NO: 1230027 - DNA, 15 bp, Homo sapiens
gtgatttttctgaat

SEQ ID NO: 1230028 - DNA, 15 bp, Homo sapiens
ggtgatttttctgaa

SEQ ID NO: 1230029 - DNA, 15 bp, Homo sapiens
aggtgatttttctga

SEQ ID NO: 1230030 - DNA, 15 bp, Homo sapiens
caggtgatttttctg

SEQ ID NO: 1230031 - DNA, 15 bp, Homo sapiens
ccaggtgatttttct

SEQ ID NO: 1230032 - DNA, 15 bp, Homo sapiens
accaggtgatttttc

SEQ ID NO: 1230033 - DNA, 15 bp, Homo sapiens
aaccaggtgattttt

SEQ ID NO: 1230034 - DNA, 15 bp, Homo sapiens
aaaccaggtgatttt

SEQ ID NO: 1230035 - DNA, 15 bp, Homo sapiens
gaaaccaggtgattt

SEQ ID NO: 1230036 - DNA, 15 bp, Homo sapiens
tgaaaccaggtgatt

SEQ ID NO: 1230037 - DNA, 15 bp, Homo sapiens
ttgaaaccaggtgat

SEQ ID NO: 1230038 - DNA, 15 bp, Homo sapiens
attgaaaccaggtga

SEQ ID NO: 1230039 - DNA, 15 bp, Homo sapiens
cattgaaaccaggtg

SEQ ID NO: 1230040 - DNA, 15 bp, Homo sapiens
ccattgaaaccaggt

SEQ ID NO: 1230041 - DNA, 15 bp, Homo sapiens
accattgaaaccagg

SEQ ID NO: 1230042 - DNA, 15 bp, Homo sapiens
taccattgaaaccag

SEQ ID NO: 1230043 - DNA, 15 bp, Homo sapiens
ctaccattgaaacca

SEQ ID NO: 1230044 - DNA, 15 bp, Homo sapiens
cctaccattgaaacc

SEQ ID NO: 1230045 - DNA, 15 bp, Homo sapiens
gcctaccattgaaac

SEQ ID NO: 1230046 - DNA, 15 bp, Homo sapiens
agcctaccattgaaa

SEQ ID NO: 1230047 - DNA, 15 bp, Homo sapiens
cagcctaccattgaa

SEQ ID NO: 1230048 - DNA, 15 bp, Homo sapiens
acagcctaccattga

SEQ ID NO: 1230049 - DNA, 15 bp, Homo sapiens
gacagcctaccattg

SEQ ID NO: 1230050 - DNA, 15 bp, Homo sapiens
tgacagcctaccatt

SEQ ID NO: 1230051 - DNA, 15 bp, Homo sapiens
atgacagcctaccat

SEQ ID NO: 1230052 - DNA, 15 bp, Homo sapiens
catgacagcctacca

SEQ ID NO: 1230053 - DNA, 15 bp, Homo sapiens
tcatgacagcctacc

SEQ ID NO: 1230054 - DNA, 15 bp, Homo sapiens
ttcatgacagcctac

SEQ ID NO: 1230055 - DNA, 15 bp, Homo sapiens
tttcatgacagccta

SEQ ID NO: 1230056 - DNA, 15 bp, Homo sapiens
ttttcatgacagcct

SEQ ID NO: 1230057 - DNA, 15 bp, Homo sapiens
tttttcatgacagcc

SEQ ID NO: 1230058 - DNA, 15 bp, Homo sapiens
ttttttcatgacagc

SEQ ID NO: 1230059 - DNA, 15 bp, Homo sapiens
tttttttcatgacag

SEQ ID NO: 1230060 - DNA, 15 bp, Homo sapiens
ttttttttcatgaca

SEQ ID NO: 1230061 - DNA, 15 bp, Homo sapiens
tttttttttcatgac

SEQ ID NO: 1230062 - DNA, 15 bp, Homo sapiens
ttttttttttcatga

SEQ ID NO: 1230063 - DNA, 15 bp, Homo sapiens
tttttttttttcatg

SEQ ID NO: 1230064 - DNA, 15 bp, Homo sapiens
ttttttttttttcat

SEQ ID NO: 1230065 - DNA, 15 bp, Homo sapiens
tttttttttttttca

SEQ ID NO: 1230066 - DNA, 15 bp, Homo sapiens
tgtgatttttttttt

SEQ ID NO: 1230067 - DNA, 15 bp, Homo sapiens
ctgtgattttttttt

SEQ ID NO: 1230068 - DNA, 15 bp, Homo sapiens
ccctgtgattttttt

SEQ ID NO: 1230069 - DNA, 15 bp, Homo sapiens
tccctgtgatttttt

SEQ ID NO: 1230070 - DNA, 15 bp, Homo sapiens
ctccctgtgattttt

SEQ ID NO: 1230071 - DNA, 15 bp, Homo sapiens
tctccctgtgatttt

SEQ ID NO: 1230072 - DNA, 15 bp, Homo sapiens
ttctccctgtgattt

SEQ ID NO: 1230073 - DNA, 15 bp, Homo sapiens
attctccctgtgatt

SEQ ID NO: 1230074 - DNA, 15 bp, Homo sapiens
aattctccctgtgat

SEQ ID NO: 1230075 - DNA, 15 bp, Homo sapiens
aaattctccctgtga

SEQ ID NO: 1230076 - DNA, 15 bp, Homo sapiens
aaaattctccctgtg

SEQ ID NO: 1230077 - DNA, 15 bp, Homo sapiens
taaaattctccctgt

SEQ ID NO: 1230078 - DNA, 15 bp, Homo sapiens
ttaaaattctccctg

SEQ ID NO: 1230079 - DNA, 15 bp, Homo sapiens
tttaaaattctccct

SEQ ID NO: 1230080 - DNA, 15 bp, Homo sapiens
ttttaaaattctccc

SEQ ID NO: 1230081 - DNA, 15 bp, Homo sapiens
gttttaaaattctcc

SEQ ID NO: 1230082 - DNA, 15 bp, Homo sapiens
tgttttaaaattctc

SEQ ID NO: 1230083 - DNA, 15 bp, Homo sapiens
gtgttttaaaattct

SEQ ID NO: 1230084 - DNA, 15 bp, Homo sapiens
tgtgttttaaaattc

SEQ ID NO: 1230085 - DNA, 15 bp, Homo sapiens
ctgtgttttaaaatt

SEQ ID NO: 1230086 - DNA, 15 bp, Homo sapiens
tctgtgttttaaaat

SEQ ID NO: 1230087 - DNA, 15 bp, Homo sapiens
atctgtgttttaaaa

SEQ ID NO: 1230088 - DNA, 15 bp, Homo sapiens
aatctgtgttttaaa

SEQ ID NO: 1230089 - DNA, 15 bp, Homo sapiens
gaatctgtgttttaa

SEQ ID NO: 1230090 - DNA, 15 bp, Homo sapiens
ggaatctgtgtttta

SEQ ID NO: 1230091 - DNA, 15 bp, Homo sapiens
aggaatctgtgtttt

SEQ ID NO: 1230092 - DNA, 15 bp, Homo sapiens
caggaatctgtgttt

SEQ ID NO: 1230093 - DNA, 15 bp, Homo sapiens
ccaggaatctgtgtt

SEQ ID NO: 1230094 - DNA, 15 bp, Homo sapiens
accaggaatctgtgt

SEQ ID NO: 1230095 - DNA, 15 bp, Homo sapiens
gaccaggaatctgtg

SEQ ID NO: 1230096 - DNA, 15 bp, Homo sapiens
ggaccaggaatctgt

SEQ ID NO: 1230097 - DNA, 15 bp, Homo sapiens
gggaccaggaatctg

SEQ ID NO: 1230098 - DNA, 15 bp, Homo sapiens
tgggaccaggaatct

SEQ ID NO: 1230099 - DNA, 15 bp, Homo sapiens
ttgggaccaggaatc

SEQ ID NO: 1230100 - DNA, 15 bp, Homo sapiens
gttgggaccaggaat

SEQ ID NO: 1230101 - DNA, 15 bp, Homo sapiens
ggttgggaccaggaa

SEQ ID NO: 1230102 - DNA, 15 bp, Homo sapiens
tggttgggaccagga

SEQ ID NO: 1230103 - DNA, 15 bp, Homo sapiens
gtggttgggaccagg

SEQ ID NO: 1230104 - DNA, 15 bp, Homo sapiens
ggtggttgggaccag

SEQ ID NO: 1230105 - DNA, 15 bp, Homo sapiens
tggtggttgggacca

SEQ ID NO: 1230106 - DNA, 15 bp, Homo sapiens
ttggtggttgggacc

SEQ ID NO: 1230107 - DNA, 15 bp, Homo sapiens
tttggtggttgggac

SEQ ID NO: 1230108 - DNA, 15 bp, Homo sapiens
ctttggtggttggga

SEQ ID NO: 1230109 - DNA, 15 bp, Homo sapiens
tctttggtggttggg

SEQ ID NO: 1230110 - DNA, 15 bp, Homo sapiens
atctttggtggttgg

SEQ ID NO: 1230111 - DNA, 15 bp, Homo sapiens
aatctttggtggttg

SEQ ID NO: 1230112 - DNA, 15 bp, Homo sapiens
gaatctttggtggtt

SEQ ID NO: 1230113 - DNA, 15 bp, Homo sapiens
ggaatctttggtggt

SEQ ID NO: 1230114 - DNA, 15 bp, Homo sapiens
aggaatctttggtgg

SEQ ID NO: 1230115 - DNA, 15 bp, Homo sapiens
taggaatctttggtg

SEQ ID NO: 1230116 - DNA, 15 bp, Homo sapiens
ataggaatctttggt

SEQ ID NO: 1230117 - DNA, 15 bp, Homo sapiens
aataggaatctttgg

SEQ ID NO: 1230118 - DNA, 15 bp, Homo sapiens
gaataggaatctttg

SEQ ID NO: 1230119 - DNA, 15 bp, Homo sapiens
tgaataggaatcttt

SEQ ID NO: 1230120 - DNA, 15 bp, Homo sapiens
ctgaataggaatctt

SEQ ID NO: 1230121 - DNA, 15 bp, Homo sapiens
actgaataggaatct

SEQ ID NO: 1230122 - DNA, 15 bp, Homo sapiens
cactgaataggaatc

SEQ ID NO: 1230123 - DNA, 15 bp, Homo sapiens
ccactgaataggaat

SEQ ID NO: 1230124 - DNA, 15 bp, Homo sapiens
accactgaataggaa

SEQ ID NO: 1230125 - DNA, 15 bp, Homo sapiens
caccactgaatagga

SEQ ID NO: 1230126 - DNA, 15 bp, Homo sapiens
tcaccactgaatagg

SEQ ID NO: 1230127 - DNA, 15 bp, Homo sapiens
ttcaccactgaatag

SEQ ID NO: 1230128 - DNA, 15 bp, Homo sapiens
cttcaccactgaata

SEQ ID NO: 1230129 - DNA, 15 bp, Homo sapiens
gcttcaccactgaat

SEQ ID NO: 1230130 - DNA, 15 bp, Homo sapiens
ggcttcaccactgaa

SEQ ID NO: 1230131 - DNA, 15 bp, Homo sapiens
gggcttcaccactga

SEQ ID NO: 1230132 - DNA, 15 bp, Homo sapiens
tgggcttcaccactg

SEQ ID NO: 1230133 - DNA, 15 bp, Homo sapiens
atgggcttcaccact

SEQ ID NO: 1230134 - DNA, 15 bp, Homo sapiens
gatgggcttcaccac

SEQ ID NO: 1230135 - DNA, 15 bp, Homo sapiens
tgatgggcttcacca

SEQ ID NO: 1230136 - DNA, 15 bp, Homo sapiens
ttgatgggcttcacc

SEQ ID NO: 1230137 - DNA, 15 bp, Homo sapiens
attgatgggcttcac

SEQ ID NO: 1230138 - DNA, 15 bp, Homo sapiens
gattgatgggcttca

SEQ ID NO: 1230139 - DNA, 15 bp, Homo sapiens
tgattgatgggcttc

SEQ ID NO: 1230140 - DNA, 15 bp, Homo sapiens
ctgattgatgggctt

SEQ ID NO: 1230141 - DNA, 15 bp, Homo sapiens
gctgattgatgggct

SEQ ID NO: 1230142 - DNA, 15 bp, Homo sapiens
tgctgattgatgggc

SEQ ID NO: 1230143 - DNA, 15 bp, Homo sapiens
atgctgattgatggg

SEQ ID NO: 1230144 - DNA, 15 bp, Homo sapiens
gatgctgattgatgg

SEQ ID NO: 1230145 - DNA, 15 bp, Homo sapiens
agatgctgattgatg

SEQ ID NO: 1230146 - DNA, 15 bp, Homo sapiens
gagatgctgattgat

SEQ ID NO: 1230147 - DNA, 15 bp, Homo sapiens
agagatgctgattga

SEQ ID NO: 1230148 - DNA, 15 bp, Homo sapiens
tagagatgctgattg

SEQ ID NO: 1230149 - DNA, 15 bp, Homo sapiens
ttagagatgctgatt

SEQ ID NO: 1230150 - DNA, 15 bp, Homo sapiens
gttagagatgctgat

SEQ ID NO: 1230151 - DNA, 15 bp, Homo sapiens
tgttagagatgctga

SEQ ID NO: 1230152 - DNA, 15 bp, Homo sapiens
ttgttagagatgctg

SEQ ID NO: 1230153 - DNA, 15 bp, Homo sapiens
cttgttagagatgct

SEQ ID NO: 1230154 - DNA, 15 bp, Homo sapiens
gcttgttagagatgc

SEQ ID NO: 1230155 - DNA, 15 bp, Homo sapiens
agcttgttagagatg

SEQ ID NO: 1230156 - DNA, 15 bp, Homo sapiens
aagcttgttagagat

SEQ ID NO: 1230157 - DNA, 15 bp, Homo sapiens
gaagcttgttagaga

SEQ ID NO: 1230158 - DNA, 15 bp, Homo sapiens
ggaagcttgttagag

SEQ ID NO: 1230159 - DNA, 15 bp, Homo sapiens
tggaagcttgttaga

SEQ ID NO: 1230160 - DNA, 15 bp, Homo sapiens
ttggaagcttgttag

SEQ ID NO: 1230161 - DNA, 15 bp, Homo sapiens
cttggaagcttgtta

SEQ ID NO: 1230162 - DNA, 15 bp, Homo sapiens
acttggaagcttgtt

SEQ ID NO: 1230163 - DNA, 15 bp, Homo sapiens
cacttggaagcttgt

SEQ ID NO: 1230164 - DNA, 15 bp, Homo sapiens
ccacttggaagcttg

SEQ ID NO: 1230165 - DNA, 15 bp, Homo sapiens
accacttggaagctt

SEQ ID NO: 1230166 - DNA, 15 bp, Homo sapiens
caccacttggaagct

SEQ ID NO: 1230167 - DNA, 15 bp, Homo sapiens
gcaccacttggaagc

SEQ ID NO: 1230168 - DNA, 15 bp, Homo sapiens
agcaccacttggaag

SEQ ID NO: 1230169 - DNA, 15 bp, Homo sapiens
cagcaccacttggaa

SEQ ID NO: 1230170 - DNA, 15 bp, Homo sapiens
tcagcaccacttgga

SEQ ID NO: 1230171 - DNA, 15 bp, Homo sapiens
ctcagcaccacttgg

SEQ ID NO: 1230172 - DNA, 15 bp, Homo sapiens
cctcagcaccacttg

SEQ ID NO: 1230173 - DNA, 15 bp, Homo sapiens
tcctcagcaccactt

SEQ ID NO: 1230174 - DNA, 15 bp, Homo sapiens
atcctcagcaccact

SEQ ID NO: 1230175 - DNA, 15 bp, Homo sapiens
catcctcagcaccac

SEQ ID NO: 1230176 - DNA, 15 bp, Homo sapiens
gcatcctcagcacca

SEQ ID NO: 1230177 - DNA, 15 bp, Homo sapiens
agcatcctcagcacc

SEQ ID NO: 1230178 - DNA, 15 bp, Homo sapiens
cagcatcctcagcac

SEQ ID NO: 1230179 - DNA, 15 bp, Homo sapiens
ccagcatcctcagca

SEQ ID NO: 1230180 - DNA, 15 bp, Homo sapiens
accagcatcctcagc

SEQ ID NO: 1230181 - DNA, 15 bp, Homo sapiens
caccagcatcctcag

SEQ ID NO: 1230182 - DNA, 15 bp, Homo sapiens
tcaccagcatcctca

SEQ ID NO: 1230183 - DNA, 15 bp, Homo sapiens
ttcaccagcatcctc

SEQ ID NO: 1230184 - DNA, 15 bp, Homo sapiens
attcaccagcatcct

SEQ ID NO: 1230185 - DNA, 15 bp, Homo sapiens
cattcaccagcatcc

SEQ ID NO: 1230186 - DNA, 15 bp, Homo sapiens
tcattcaccagcatc

SEQ ID NO: 1230187 - DNA, 15 bp, Homo sapiens
atcattcaccagcat

SEQ ID NO: 1230188 - DNA, 15 bp, Homo sapiens
gatcattcaccagca

SEQ ID NO: 1230189 - DNA, 15 bp, Homo sapiens
ggatcattcaccagc

SEQ ID NO: 1230190 - DNA, 15 bp, Homo sapiens
tggatcattcaccag

SEQ ID NO: 1230191 - DNA, 15 bp, Homo sapiens
atggatcattcacca

SEQ ID NO: 1230192 - DNA, 15 bp, Homo sapiens
aatggatcattcacc

SEQ ID NO: 1230193 - DNA, 15 bp, Homo sapiens
gaatggatcattcac

SEQ ID NO: 1230194 - DNA, 15 bp, Homo sapiens
tgaatggatcattca

SEQ ID NO: 1230195 - DNA, 15 bp, Homo sapiens
atgaatggatcattc

SEQ ID NO: 1230196 - DNA, 15 bp, Homo sapiens
tatgaatggatcatt

SEQ ID NO: 1230197 - DNA, 15 bp, Homo sapiens
gtatgaatggatcat

SEQ ID NO: 1230198 - DNA, 15 bp, Homo sapiens
agtatgaatggatca

SEQ ID NO: 1230199 - DNA, 15 bp, Homo sapiens
gagtatgaatggatc

SEQ ID NO: 1230200 - DNA, 15 bp, Homo sapiens
agagtatgaatggat

SEQ ID NO: 1230201 - DNA, 15 bp, Homo sapiens
aagagtatgaatgga

SEQ ID NO: 1230202 - DNA, 15 bp, Homo sapiens
gaagagtatgaatgg

SEQ ID NO: 1230203 - DNA, 15 bp, Homo sapiens
agaagagtatgaatg

SEQ ID NO: 1230204 - DNA, 15 bp, Homo sapiens
tagaagagtatgaat

SEQ ID NO: 1230205 - DNA, 15 bp, Homo sapiens
ctagaagagtatgaa

SEQ ID NO: 1230206 - DNA, 15 bp, Homo sapiens
cctagaagagtatga

SEQ ID NO: 1230207 - DNA, 15 bp, Homo sapiens
ccctagaagagtatg

SEQ ID NO: 1230208 - DNA, 15 bp, Homo sapiens
gccctagaagagtat

SEQ ID NO: 1230209 - DNA, 15 bp, Homo sapiens
agccctagaagagta

SEQ ID NO: 1230210 - DNA, 15 bp, Homo sapiens
cagccctagaagagt

SEQ ID NO: 1230211 - DNA, 15 bp, Homo sapiens
acagccctagaagag

SEQ ID NO: 1230212 - DNA, 15 bp, Homo sapiens
tacagccctagaaga

SEQ ID NO: 1230213 - DNA, 15 bp, Homo sapiens
ctacagccctagaag

SEQ ID NO: 1230214 - DNA, 15 bp, Homo sapiens
tctacagccctagaa

SEQ ID NO: 1230215 - DNA, 15 bp, Homo sapiens
atctacagccctaga

SEQ ID NO: 1230216 - DNA, 15 bp, Homo sapiens
tatctacagccctag

SEQ ID NO: 1230217 - DNA, 15 bp, Homo sapiens
ttatctacagcccta

SEQ ID NO: 1230218 - DNA, 15 bp, Homo sapiens
attatctacagccct

SEQ ID NO: 1230219 - DNA, 15 bp, Homo sapiens
tattatctacagccc

SEQ ID NO: 1230220 - DNA, 15 bp, Homo sapiens
ttattatctacagcc

SEQ ID NO: 1230221 - DNA, 15 bp, Homo sapiens
tttattatctacagc

SEQ ID NO: 1230222 - DNA, 15 bp, Homo sapiens
atttattatctacag

SEQ ID NO: 1230223 - DNA, 15 bp, Homo sapiens
aatttattatctaca

SEQ ID NO: 1230224 - DNA, 15 bp, Homo sapiens
taatttattatctac

SEQ ID NO: 1230225 - DNA, 15 bp, Homo sapiens
ttaatttattatcta

SEQ ID NO: 1230226 - DNA, 15 bp, Homo sapiens
tttaatttattatct

SEQ ID NO: 1230227 - DNA, 15 bp, Homo sapiens
gtttaatttattatc

SEQ ID NO: 1230228 - DNA, 15 bp, Homo sapiens
tgtttaatttattat

SEQ ID NO: 1230229 - DNA, 15 bp, Homo sapiens
ctgtttaatttatta

SEQ ID NO: 1230230 - DNA, 15 bp, Homo sapiens
cctgtttaatttatt

SEQ ID NO: 1230231 - DNA, 15 bp, Homo sapiens
gcctgtttaatttat

SEQ ID NO: 1230232 - DNA, 15 bp, Homo sapiens
tgcctgtttaattta

SEQ ID NO: 1230233 - DNA, 15 bp, Homo sapiens
ttgcctgtttaattt

SEQ ID NO: 1230234 - DNA, 15 bp, Homo sapiens
tttgcctgtttaatt

SEQ ID NO: 1230235 - DNA, 15 bp, Homo sapiens
ttttgcctgtttaat

SEQ ID NO: 1230236 - DNA, 15 bp, Homo sapiens
tttttgcctgtttaa

SEQ ID NO: 1230237 - DNA, 15 bp, Homo sapiens
atttttgcctgttta

SEQ ID NO: 1230238 - DNA, 15 bp, Homo sapiens
tatttttgcctgttt

SEQ ID NO: 1230239 - DNA, 15 bp, Homo sapiens
ttatttttgcctgtt

SEQ ID NO: 1230240 - DNA, 15 bp, Homo sapiens
tttatttttgcctgt

SEQ ID NO: 1230241 - DNA, 15 bp, Homo sapiens
ttttatttttgcctg

SEQ ID NO: 1230242 - DNA, 15 bp, Homo sapiens
tttttatttttgcct

SEQ ID NO: 1230243 - DNA, 15 bp, Homo sapiens
atttttatttttgcc

SEQ ID NO: 1230244 - DNA, 15 bp, Homo sapiens
tatttttatttttgc

SEQ ID NO: 1230245 - DNA, 15 bp, Homo sapiens
ctatttttatttttg

SEQ ID NO: 1230246 - DNA, 15 bp, Homo sapiens
cctatttttattttt

SEQ ID NO: 1230247 - DNA, 15 bp, Homo sapiens
gcctatttttatttt

SEQ ID NO: 1230248 - DNA, 15 bp, Homo sapiens
agcctatttttattt

SEQ ID NO: 1230249 - DNA, 15 bp, Homo sapiens
cagcctatttttatt

SEQ ID NO: 1230250 - DNA, 15 bp, Homo sapiens
ccagcctatttttat

SEQ ID NO: 1230251 - DNA, 15 bp, Homo sapiens
gccagcctattttta

SEQ ID NO: 1230252 - DNA, 15 bp, Homo sapiens
cgccagcctattttt

SEQ ID NO: 1230253 - DNA, 15 bp, Homo sapiens
gcgccagcctatttt

SEQ ID NO: 1230254 - DNA, 15 bp, Homo sapiens
cgcgccagcctattt

SEQ ID NO: 1230255 - DNA, 15 bp, Homo sapiens
ccgcgccagcctatt

SEQ ID NO: 1230256 - DNA, 15 bp, Homo sapiens
accgcgccagcctat

SEQ ID NO: 1230257 - DNA, 15 bp, Homo sapiens
caccgcgccagccta

SEQ ID NO: 1230258 - DNA, 15 bp, Homo sapiens
ccaccgcgccagcct

SEQ ID NO: 1230259 - DNA, 15 bp, Homo sapiens
gccaccgcgccagcc

SEQ ID NO: 1230260 - DNA, 15 bp, Homo sapiens
agccaccgcgccagc

SEQ ID NO: 1230261 - DNA, 15 bp, Homo sapiens
aagccaccgcgccag

SEQ ID NO: 1230262 - DNA, 15 bp, Homo sapiens
taagccaccgcgcca

SEQ ID NO: 1230263 - DNA, 15 bp, Homo sapiens
gtccacccaccttgg

SEQ ID NO: 1230264 - DNA, 15 bp, Homo sapiens
ggtccacccaccttg

SEQ ID NO: 1230265 - DNA, 15 bp, Homo sapiens
tggtccacccacctt

SEQ ID NO: 1230266 - DNA, 15 bp, Homo sapiens
gtggtccacccacct

SEQ ID NO: 1230267 - DNA, 15 bp, Homo sapiens
ggtggtccacccacc

SEQ ID NO: 1230268 - DNA, 15 bp, Homo sapiens
aggtggtccacccac

SEQ ID NO: 1230269 - DNA, 15 bp, Homo sapiens
caggtggtccaccca

SEQ ID NO: 1230270 - DNA, 15 bp, Homo sapiens
tcaggtggtccaccc

SEQ ID NO: 1230271 - DNA, 15 bp, Homo sapiens
ctcaggtggtccacc

SEQ ID NO: 1230272 - DNA, 15 bp, Homo sapiens
cctcaggtggtccac

SEQ ID NO: 1230273 - DNA, 15 bp, Homo sapiens
acctcaggtggtcca

SEQ ID NO: 1230274 - DNA, 15 bp, Homo sapiens
gttcaccatgttggc

SEQ ID NO: 1230275 - DNA, 15 bp, Homo sapiens
ggttcaccatgttgg

SEQ ID NO: 1230276 - DNA, 15 bp, Homo sapiens
gggttcaccatgttg

SEQ ID NO: 1230277 - DNA, 15 bp, Homo sapiens
ggggttcaccatgtt

SEQ ID NO: 1230278 - DNA, 15 bp, Homo sapiens
cggggttcaccatgt

SEQ ID NO: 1230279 - DNA, 15 bp, Homo sapiens
acggggttcaccatg

SEQ ID NO: 1230280 - DNA, 15 bp, Homo sapiens
gacggggttcaccat

SEQ ID NO: 1230281 - DNA, 15 bp, Homo sapiens
agacggggttcacca

SEQ ID NO: 1230282 - DNA, 15 bp, Homo sapiens
gagacggggttcacc

SEQ ID NO: 1230283 - DNA, 15 bp, Homo sapiens
agagacggggttcac

SEQ ID NO: 1230284 - DNA, 15 bp, Homo sapiens
tagagacggggttca

SEQ ID NO: 1230285 - DNA, 15 bp, Homo sapiens
gtagagacggggttc

SEQ ID NO: 1230286 - DNA, 15 bp, Homo sapiens
tagctaatttttttg

SEQ ID NO: 1230287 - DNA, 15 bp, Homo sapiens
accaccatgcctagc

SEQ ID NO: 1230288 - DNA, 15 bp, Homo sapiens
caccaccatgcctag

SEQ ID NO: 1230289 - DNA, 15 bp, Homo sapiens
acaccaccatgccta

SEQ ID NO: 1230290 - DNA, 15 bp, Homo sapiens
cacaccaccatgcct

SEQ ID NO: 1230291 - DNA, 15 bp, Homo sapiens
cgattcttctgcctc

SEQ ID NO: 1230292 - DNA, 15 bp, Homo sapiens
gcgattcttctgcct

SEQ ID NO: 1230293 - DNA, 15 bp, Homo sapiens
agcgattcttctgcc

SEQ ID NO: 1230294 - DNA, 15 bp, Homo sapiens
aagcgattcttctgc

SEQ ID NO: 1230295 - DNA, 15 bp, Homo sapiens
caagcgattcttctg

SEQ ID NO: 1230296 - DNA, 15 bp, Homo sapiens
tctgggttcaagcga

SEQ ID NO: 1230297 - DNA, 15 bp, Homo sapiens
ttctgggttcaagcg

SEQ ID NO: 1230298 - DNA, 15 bp, Homo sapiens
cgcaacctccgcctt

SEQ ID NO: 1230299 - DNA, 15 bp, Homo sapiens
ggctcaccgcaacct

SEQ ID NO: 1230300 - DNA, 15 bp, Homo sapiens
cgcaatctcggctca

SEQ ID NO: 1230301 - DNA, 15 bp, Homo sapiens
gcgcaatctcggctc

SEQ ID NO: 1230302 - DNA, 15 bp, Homo sapiens
ggcgcaatctcggct

SEQ ID NO: 1230303 - DNA, 15 bp, Homo sapiens
tggcgcaatctcggc

SEQ ID NO: 1230304 - DNA, 15 bp, Homo sapiens
atggcgcaatctcgg

SEQ ID NO: 1230305 - DNA, 15 bp, Homo sapiens
aatggcgcaatctcg

SEQ ID NO: 1230306 - DNA, 15 bp, Homo sapiens
taatggcgcaatctc

SEQ ID NO: 1230307 - DNA, 15 bp, Homo sapiens
gtaatggcgcaatct

SEQ ID NO: 1230308 - DNA, 15 bp, Homo sapiens
tgtaatggcgcaatc

SEQ ID NO: 1230309 - DNA, 15 bp, Homo sapiens
gtgtaatggcgcaat

SEQ ID NO: 1230310 - DNA, 15 bp, Homo sapiens
agtgtaatggcgcaa

SEQ ID NO: 1230311 - DNA, 15 bp, Homo sapiens
cagtgtaatggcgca

SEQ ID NO: 1230312 - DNA, 15 bp, Homo sapiens
acagtgtaatggcgc

SEQ ID NO: 1230313 - DNA, 15 bp, Homo sapiens
tacagtgtaatggcg

SEQ ID NO: 1230314 - DNA, 15 bp, Homo sapiens
ctacagtgtaatggc

SEQ ID NO: 1230315 - DNA, 15 bp, Homo sapiens
gctacagtgtaatgg

SEQ ID NO: 1230316 - DNA, 15 bp, Homo sapiens
ggctacagtgtaatg

SEQ ID NO: 1230317 - DNA, 15 bp, Homo sapiens
aggctacagtgtaat

SEQ ID NO: 1230318 - DNA, 15 bp, Homo sapiens
caggctacagtgtaa

SEQ ID NO: 1230319 - DNA, 15 bp, Homo sapiens
ccaggctacagtgta

SEQ ID NO: 1230320 - DNA, 15 bp, Homo sapiens
cccaggctacagtgt

SEQ ID NO: 1230321 - DNA, 15 bp, Homo sapiens
gcccaggctacagtg

SEQ ID NO: 1230322 - DNA, 15 bp, Homo sapiens
tgcccaggctacagt

SEQ ID NO: 1230323 - DNA, 15 bp, Homo sapiens
ttgcccaggctacag

SEQ ID NO: 1230324 - DNA, 15 bp, Homo sapiens
gttgcccaggctaca

SEQ ID NO: 1230325 - DNA, 15 bp, Homo sapiens
tgttgcccaggctac

SEQ ID NO: 1230326 - DNA, 15 bp, Homo sapiens
cctcttgttgcccag

SEQ ID NO: 1230327 - DNA, 15 bp, Homo sapiens
ccctcttgttgccca

SEQ ID NO: 1230328 - DNA, 15 bp, Homo sapiens
tttccctcttgttgc

SEQ ID NO: 1230329 - DNA, 15 bp, Homo sapiens
gtttccctcttgttg

SEQ ID NO: 1230330 - DNA, 15 bp, Homo sapiens
agtttccctcttgtt

SEQ ID NO: 1230331 - DNA, 15 bp, Homo sapiens
gagtttccctcttgt

SEQ ID NO: 1230332 - DNA, 15 bp, Homo sapiens
ggagtttccctcttg

SEQ ID NO: 1230333 - DNA, 15 bp, Homo sapiens
tggagtttccctctt

SEQ ID NO: 1230334 - DNA, 15 bp, Homo sapiens
atggagtttccctct

SEQ ID NO: 1230335 - DNA, 15 bp, Homo sapiens
gatggagtttccctc

SEQ ID NO: 1230336 - DNA, 15 bp, Homo sapiens
agatggagtttccct

SEQ ID NO: 1230337 - DNA, 15 bp, Homo sapiens
tgagatggagtttcc

SEQ ID NO: 1230338 - DNA, 15 bp, Homo sapiens
gcaattttttttttt

SEQ ID NO: 1230339 - DNA, 15 bp, Homo sapiens
ggcaatttttttttt

SEQ ID NO: 1230340 - DNA, 15 bp, Homo sapiens
gggcaattttttttt

SEQ ID NO: 1230341 - DNA, 15 bp, Homo sapiens
agggcaatttttttt

SEQ ID NO: 1230342 - DNA, 15 bp, Homo sapiens
gagggcaattttttt

SEQ ID NO: 1230343 - DNA, 15 bp, Homo sapiens
tgagggcaatttttt

SEQ ID NO: 1230344 - DNA, 15 bp, Homo sapiens
gtgagggcaattttt

SEQ ID NO: 1230345 - DNA, 15 bp, Homo sapiens
tgtgagggcaatttt

SEQ ID NO: 1230346 - DNA, 15 bp, Homo sapiens
ctgtgagggcaattt

SEQ ID NO: 1230347 - DNA, 15 bp, Homo sapiens
tctgtgagggcaatt

SEQ ID NO: 1230348 - DNA, 15 bp, Homo sapiens
ctctgtgagggcaat

SEQ ID NO: 1230349 - DNA, 15 bp, Homo sapiens
gctctgtgagggcaa

SEQ ID NO: 1230350 - DNA, 15 bp, Homo sapiens
agctctgtgagggca

SEQ ID NO: 1230351 - DNA, 15 bp, Homo sapiens
aagctctgtgagggc

SEQ ID NO: 1230352 - DNA, 15 bp, Homo sapiens
taagctctgtgaggg

SEQ ID NO: 1230353 - DNA, 15 bp, Homo sapiens
ataagctctgtgagg

SEQ ID NO: 1230354 - DNA, 15 bp, Homo sapiens
tataagctctgtgag

SEQ ID NO: 1230355 - DNA, 15 bp, Homo sapiens
atataagctctgtga

SEQ ID NO: 1230356 - DNA, 15 bp, Homo sapiens
aatataagctctgtg

SEQ ID NO: 1230357 - DNA, 15 bp, Homo sapiens
gaatataagctctgt

SEQ ID NO: 1230358 - DNA, 15 bp, Homo sapiens
agaatataagctctg

SEQ ID NO: 1230359 - DNA, 15 bp, Homo sapiens
tagaatataagctct

SEQ ID NO: 1230360 - DNA, 15 bp, Homo sapiens
ctagaatataagctc

SEQ ID NO: 1230361 - DNA, 15 bp, Homo sapiens
actagaatataagct

SEQ ID NO: 1230362 - DNA, 15 bp, Homo sapiens
cactagaatataagc

SEQ ID NO: 1230363 - DNA, 15 bp, Homo sapiens
ccactagaatataag

SEQ ID NO: 1230364 - DNA, 15 bp, Homo sapiens
accactagaatataa

SEQ ID NO: 1230365 - DNA, 15 bp, Homo sapiens
taccactagaatata

SEQ ID NO: 1230366 - DNA, 15 bp, Homo sapiens
ctaccactagaatat

SEQ ID NO: 1230367 - DNA, 15 bp, Homo sapiens
actaccactagaata

SEQ ID NO: 1230368 - DNA, 15 bp, Homo sapiens
tactaccactagaat

SEQ ID NO: 1230369 - DNA, 15 bp, Homo sapiens
ctactaccactagaa

SEQ ID NO: 1230370 - DNA, 15 bp, Homo sapiens
cctactaccactaga

SEQ ID NO: 1230371 - DNA, 15 bp, Homo sapiens
ccctactaccactag

SEQ ID NO: 1230372 - DNA, 15 bp, Homo sapiens
cccctactaccacta

SEQ ID NO: 1230373 - DNA, 15 bp, Homo sapiens
ccccctactaccact

SEQ ID NO: 1230374 - DNA, 15 bp, Homo sapiens
tccccctactaccac

SEQ ID NO: 1230375 - DNA, 15 bp, Homo sapiens
atccccctactacca

SEQ ID NO: 1230376 - DNA, 15 bp, Homo sapiens
tatccccctactacc

SEQ ID NO: 1230377 - DNA, 15 bp, Homo sapiens
ttatccccctactac

SEQ ID NO: 1230378 - DNA, 15 bp, Homo sapiens
tttatccccctacta

SEQ ID NO: 1230379 - DNA, 15 bp, Homo sapiens
atttatccccctact

SEQ ID NO: 1230380 - DNA, 15 bp, Homo sapiens
gatttatccccctac

SEQ ID NO: 1230381 - DNA, 15 bp, Homo sapiens
tgatttatcccccta

SEQ ID NO: 1230382 - DNA, 15 bp, Homo sapiens
ctgatttatccccct

SEQ ID NO: 1230383 - DNA, 15 bp, Homo sapiens
tctgatttatccccc

SEQ ID NO: 1230384 - DNA, 15 bp, Homo sapiens
atctgatttatcccc

SEQ ID NO: 1230385 - DNA, 15 bp, Homo sapiens
tatctgatttatccc

SEQ ID NO: 1230386 - DNA, 15 bp, Homo sapiens
ctatctgatttatcc

SEQ ID NO: 1230387 - DNA, 15 bp, Homo sapiens
cctatctgatttatc

SEQ ID NO: 1230388 - DNA, 15 bp, Homo sapiens
acctatctgatttat

SEQ ID NO: 1230389 - DNA, 15 bp, Homo sapiens
tacctatctgattta

SEQ ID NO: 1230390 - DNA, 15 bp, Homo sapiens
ctacctatctgattt

SEQ ID NO: 1230391 - DNA, 15 bp, Homo sapiens
gctacctatctgatt

SEQ ID NO: 1230392 - DNA, 15 bp, Homo sapiens
agctacctatctgat

SEQ ID NO: 1230393 - DNA, 15 bp, Homo sapiens
tagctacctatctga

SEQ ID NO: 1230394 - DNA, 15 bp, Homo sapiens
ctagctacctatctg

SEQ ID NO: 1230395 - DNA, 15 bp, Homo sapiens
gctagctacctatct

SEQ ID NO: 1230396 - DNA, 15 bp, Homo sapiens
agctagctacctatc

SEQ ID NO: 1230397 - DNA, 15 bp, Homo sapiens
tagctagctacctat

SEQ ID NO: 1230398 - DNA, 15 bp, Homo sapiens
ctagctagctaccta

SEQ ID NO: 1230399 - DNA, 15 bp, Homo sapiens
gctagctagctacct

SEQ ID NO: 1230400 - DNA, 15 bp, Homo sapiens
agctagctagctacc

SEQ ID NO: 1230401 - DNA, 15 bp, Homo sapiens
tagctagctagctac

SEQ ID NO: 1230402 - DNA, 15 bp, Homo sapiens
ctagctagctagcta

SEQ ID NO: 1230403 - DNA, 15 bp, Homo sapiens
gctagctagctagct

SEQ ID NO: 1230404 - DNA, 15 bp, Homo sapiens
agctagctagctagc

SEQ ID NO: 1230405 - DNA, 15 bp, Homo sapiens
tagctagctagctag

SEQ ID NO: 1230406 - DNA, 15 bp, Homo sapiens
tctagctagctagct

SEQ ID NO: 1230407 - DNA, 15 bp, Homo sapiens
gaggtggactggaaa

SEQ ID NO: 1230408 - DNA, 15 bp, Homo sapiens
agaggtggactggaa

SEQ ID NO: 1230409 - DNA, 15 bp, Homo sapiens
aagaggtggactgga

SEQ ID NO: 1230410 - DNA, 15 bp, Homo sapiens
taagaggtggactgg

SEQ ID NO: 1230411 - DNA, 15 bp, Homo sapiens
ttaagaggtggactg

SEQ ID NO: 1230412 - DNA, 15 bp, Homo sapiens
tttaagaggtggact

SEQ ID NO: 1230413 - DNA, 15 bp, Homo sapiens
atttaagaggtggac

SEQ ID NO: 1230414 - DNA, 15 bp, Homo sapiens
aatttaagaggtgga

SEQ ID NO: 1230415 - DNA, 15 bp, Homo sapiens
aaatttaagaggtgg

SEQ ID NO: 1230416 - DNA, 15 bp, Homo sapiens
aaaatttaagaggtg

SEQ ID NO: 1230417 - DNA, 15 bp, Homo sapiens
aaaaatttaagaggt

SEQ ID NO: 1230418 - DNA, 15 bp, Homo sapiens
aaaaaatttaagagg

SEQ ID NO: 1230419 - DNA, 15 bp, Homo sapiens
gaaaaaatttaagag

SEQ ID NO: 1230420 - DNA, 15 bp, Homo sapiens
ggaaaaaatttaaga

SEQ ID NO: 1230421 - DNA, 15 bp, Homo sapiens
aggaaaaaatttaag

SEQ ID NO: 1230422 - DNA, 15 bp, Homo sapiens
gaggaaaaaatttaa

SEQ ID NO: 1230423 - DNA, 15 bp, Homo sapiens
ggaggaaaaaattta

SEQ ID NO: 1230424 - DNA, 15 bp, Homo sapiens
aggaggaaaaaattt

SEQ ID NO: 1230425 - DNA, 15 bp, Homo sapiens
gaggaggaaaaaatt

SEQ ID NO: 1230426 - DNA, 15 bp, Homo sapiens
agaggaggaaaaaat

SEQ ID NO: 1230427 - DNA, 15 bp, Homo sapiens
gaagaggaggaaaaa

SEQ ID NO: 1230428 - DNA, 15 bp, Homo sapiens
ggaagaggaggaaaa

SEQ ID NO: 1230429 - DNA, 15 bp, Homo sapiens
aggaagaggaggaaa

SEQ ID NO: 1230430 - DNA, 15 bp, Homo sapiens
gaggaagaggaggaa

SEQ ID NO: 1230431 - DNA, 15 bp, Homo sapiens
agaggaagaggagga

SEQ ID NO: 1230432 - DNA, 15 bp, Homo sapiens
tagaggaagaggagg

SEQ ID NO: 1230433 - DNA, 15 bp, Homo sapiens
atagaggaagaggag

SEQ ID NO: 1230434 - DNA, 15 bp, Homo sapiens
tatagaggaagagga

SEQ ID NO: 1230435 - DNA, 15 bp, Homo sapiens
gtatagaggaagagg

SEQ ID NO: 1230436 - DNA, 15 bp, Homo sapiens
agtatagaggaagag

SEQ ID NO: 1230437 - DNA, 15 bp, Homo sapiens
tagtatagaggaaga

SEQ ID NO: 1230438 - DNA, 15 bp, Homo sapiens
ttagtatagaggaag

SEQ ID NO: 1230439 - DNA, 15 bp, Homo sapiens
gttagtatagaggaa

SEQ ID NO: 1230440 - DNA, 15 bp, Homo sapiens
tgttagtatagagga

SEQ ID NO: 1230441 - DNA, 15 bp, Homo sapiens
atgttagtatagagg

SEQ ID NO: 1230442 - DNA, 15 bp, Homo sapiens
catgttagtatagag

SEQ ID NO: 1230443 - DNA, 15 bp, Homo sapiens
tcatgttagtataga

SEQ ID NO: 1230444 - DNA, 15 bp, Homo sapiens
ctcatgttagtatag

SEQ ID NO: 1230445 - DNA, 15 bp, Homo sapiens
actcatgttagtata

SEQ ID NO: 1230446 - DNA, 15 bp, Homo sapiens
cactcatgttagtat

SEQ ID NO: 1230447 - DNA, 15 bp, Homo sapiens
acactcatgttagta

SEQ ID NO: 1230448 - DNA, 15 bp, Homo sapiens
cacactcatgttagt

SEQ ID NO: 1230449 - DNA, 15 bp, Homo sapiens
ccacactcatgttag

SEQ ID NO: 1230450 - DNA, 15 bp, Homo sapiens
tccacactcatgtta

SEQ ID NO: 1230451 - DNA, 15 bp, Homo sapiens
atccacactcatgtt

SEQ ID NO: 1230452 - DNA, 15 bp, Homo sapiens
gatccacactcatgt

SEQ ID NO: 1230453 - DNA, 15 bp, Homo sapiens
ggatccacactcatg

SEQ ID NO: 1230454 - DNA, 15 bp, Homo sapiens
tggatccacactcat

SEQ ID NO: 1230455 - DNA, 15 bp, Homo sapiens
ctggatccacactca

SEQ ID NO: 1230456 - DNA, 15 bp, Homo sapiens
gctggatccacactc

SEQ ID NO: 1230457 - DNA, 15 bp, Homo sapiens
agctggatccacact

SEQ ID NO: 1230458 - DNA, 15 bp, Homo sapiens
aagctggatccacac

SEQ ID NO: 1230459 - DNA, 15 bp, Homo sapiens
caagctggatccaca

SEQ ID NO: 1230460 - DNA, 15 bp, Homo sapiens
acaagctggatccac

SEQ ID NO: 1230461 - DNA, 15 bp, Homo sapiens
gacaagctggatcca

SEQ ID NO: 1230462 - DNA, 15 bp, Homo sapiens
ggacaagctggatcc

SEQ ID NO: 1230463 - DNA, 15 bp, Homo sapiens
gggacaagctggatc

SEQ ID NO: 1230464 - DNA, 15 bp, Homo sapiens
ggggacaagctggat

SEQ ID NO: 1230465 - DNA, 15 bp, Homo sapiens
tggggacaagctgga

SEQ ID NO: 1230466 - DNA, 15 bp, Homo sapiens
ttggggacaagctgg

SEQ ID NO: 1230467 - DNA, 15 bp, Homo sapiens
tttggggacaagctg

SEQ ID NO: 1230468 - DNA, 15 bp, Homo sapiens
ctttggggacaagct

SEQ ID NO: 1230469 - DNA, 15 bp, Homo sapiens
gctttggggacaagc

SEQ ID NO: 1230470 - DNA, 15 bp, Homo sapiens
agctttggggacaag

SEQ ID NO: 1230471 - DNA, 15 bp, Homo sapiens
aagctttggggacaa

SEQ ID NO: 1230472 - DNA, 15 bp, Homo sapiens
caagctttggggaca

SEQ ID NO: 1230473 - DNA, 15 bp, Homo sapiens
gcaagctttggggac

SEQ ID NO: 1230474 - DNA, 15 bp, Homo sapiens
ggcaagctttgggga

SEQ ID NO: 1230475 - DNA, 15 bp, Homo sapiens
aggcaagctttgggg

SEQ ID NO: 1230476 - DNA, 15 bp, Homo sapiens
aaggcaagctttggg

SEQ ID NO: 1230477 - DNA, 15 bp, Homo sapiens
caaggcaagctttgg

SEQ ID NO: 1230478 - DNA, 15 bp, Homo sapiens
gcaaggcaagctttg

SEQ ID NO: 1230479 - DNA, 15 bp, Homo sapiens
agcaaggcaagcttt

SEQ ID NO: 1230480 - DNA, 15 bp, Homo sapiens
aagcaaggcaagctt

SEQ ID NO: 1230481 - DNA, 15 bp, Homo sapiens
aaagcaaggcaagct

SEQ ID NO: 1230482 - DNA, 15 bp, Homo sapiens
caaagcaaggcaagc

SEQ ID NO: 1230483 - DNA, 15 bp, Homo sapiens
tcaaagcaaggcaag

SEQ ID NO: 1230484 - DNA, 15 bp, Homo sapiens
ttcaaagcaaggcaa

SEQ ID NO: 1230485 - DNA, 15 bp, Homo sapiens
cttcaaagcaaggca

SEQ ID NO: 1230486 - DNA, 15 bp, Homo sapiens
gcttcaaagcaaggc

SEQ ID NO: 1230487 - DNA, 15 bp, Homo sapiens
ccacaaatcacaggc

SEQ ID NO: 1230488 - DNA, 15 bp, Homo sapiens
cccacaaatcacagg

SEQ ID NO: 1230489 - DNA, 15 bp, Homo sapiens
gcccacaaatcacag

SEQ ID NO: 1230490 - DNA, 15 bp, Homo sapiens
ggcccacaaatcaca

SEQ ID NO: 1230491 - DNA, 15 bp, Homo sapiens
aggcccacaaatcac

SEQ ID NO: 1230492 - DNA, 15 bp, Homo sapiens
caggcccacaaatca

SEQ ID NO: 1230493 - DNA, 15 bp, Homo sapiens
tcaggcccacaaatc

SEQ ID NO: 1230494 - DNA, 15 bp, Homo sapiens
ttcaggcccacaaat

SEQ ID NO: 1230495 - DNA, 15 bp, Homo sapiens
cttcaggcccacaaa

SEQ ID NO: 1230496 - DNA, 15 bp, Homo sapiens
tcttcaggcccacaa

SEQ ID NO: 1230497 - DNA, 15 bp, Homo sapiens
ttcttcaggcccaca

SEQ ID NO: 1230498 - DNA, 15 bp, Homo sapiens
tttcttcaggcccac

SEQ ID NO: 1230499 - DNA, 15 bp, Homo sapiens
ttttcttcaggccca

SEQ ID NO: 1230500 - DNA, 15 bp, Homo sapiens
gttttcttcaggccc

SEQ ID NO: 1230501 - DNA, 15 bp, Homo sapiens
agttttcttcaggcc

SEQ ID NO: 1230502 - DNA, 15 bp, Homo sapiens
tagttttcttcaggc

SEQ ID NO: 1230503 - DNA, 15 bp, Homo sapiens
atagttttcttcagg

SEQ ID NO: 1230504 - DNA, 15 bp, Homo sapiens
gatagttttcttcag

SEQ ID NO: 1230505 - DNA, 15 bp, Homo sapiens
ggatagttttcttca

SEQ ID NO: 1230506 - DNA, 15 bp, Homo sapiens
tggatagttttcttc

SEQ ID NO: 1230507 - DNA, 15 bp, Homo sapiens
atggatagttttctt

SEQ ID NO: 1230508 - DNA, 15 bp, Homo sapiens
gatggatagttttct

SEQ ID NO: 1230509 - DNA, 15 bp, Homo sapiens
ggatggatagttttc

SEQ ID NO: 1230510 - DNA, 15 bp, Homo sapiens
aggatggatagtttt

SEQ ID NO: 1230511 - DNA, 15 bp, Homo sapiens
aaggatggatagttt

SEQ ID NO: 1230512 - DNA, 15 bp, Homo sapiens
caaggatggatagtt

SEQ ID NO: 1230513 - DNA, 15 bp, Homo sapiens
gcaaggatggatagt

SEQ ID NO: 1230514 - DNA, 15 bp, Homo sapiens
tgcaaggatggatag

SEQ ID NO: 1230515 - DNA, 15 bp, Homo sapiens
ttgcaaggatggata

SEQ ID NO: 1230516 - DNA, 15 bp, Homo sapiens
tttgcaaggatggat

SEQ ID NO: 1230517 - DNA, 15 bp, Homo sapiens
atttgcaaggatgga

SEQ ID NO: 1230518 - DNA, 15 bp, Homo sapiens
catttgcaaggatgg

SEQ ID NO: 1230519 - DNA, 15 bp, Homo sapiens
acatttgcaaggatg

SEQ ID NO: 1230520 - DNA, 15 bp, Homo sapiens
gacatttgcaaggat

SEQ ID NO: 1230521 - DNA, 15 bp, Homo sapiens
agacatttgcaagga

SEQ ID NO: 1230522 - DNA, 15 bp, Homo sapiens
aagacatttgcaagg

SEQ ID NO: 1230523 - DNA, 15 bp, Homo sapiens
gaagacatttgcaag

SEQ ID NO: 1230524 - DNA, 15 bp, Homo sapiens
agaagacatttgcaa

SEQ ID NO: 1230525 - DNA, 15 bp, Homo sapiens
cagaagacatttgca

SEQ ID NO: 1230526 - DNA, 15 bp, Homo sapiens
gcagaagacatttgc

SEQ ID NO: 1230527 - DNA, 15 bp, Homo sapiens
agcagaagacatttg

SEQ ID NO: 1230528 - DNA, 15 bp, Homo sapiens
cagcagaagacattt

SEQ ID NO: 1230529 - DNA, 15 bp, Homo sapiens
tcagcagaagacatt

SEQ ID NO: 1230530 - DNA, 15 bp, Homo sapiens
ctcagcagaagacat

SEQ ID NO: 1230531 - DNA, 15 bp, Homo sapiens
tctcagcagaagaca

SEQ ID NO: 1230532 - DNA, 15 bp, Homo sapiens
atctcagcagaagac

SEQ ID NO: 1230533 - DNA, 15 bp, Homo sapiens
catctcagcagaaga

SEQ ID NO: 1230534 - DNA, 15 bp, Homo sapiens
gcatctcagcagaag

SEQ ID NO: 1230535 - DNA, 15 bp, Homo sapiens
ggcatctcagcagaa

SEQ ID NO: 1230536 - DNA, 15 bp, Homo sapiens
aggcatctcagcaga

SEQ ID NO: 1230537 - DNA, 15 bp, Homo sapiens
gaggcatctcagcag

SEQ ID NO: 1230538 - DNA, 15 bp, Homo sapiens
tgaggcatctcagca

SEQ ID NO: 1230539 - DNA, 15 bp, Homo sapiens
gtgaggcatctcagc

SEQ ID NO: 1230540 - DNA, 15 bp, Homo sapiens
tgtgaggcatctcag

SEQ ID NO: 1230541 - DNA, 15 bp, Homo sapiens
gtgtgaggcatctca

SEQ ID NO: 1230542 - DNA, 15 bp, Homo sapiens
cgtgtgaggcatctc

SEQ ID NO: 1230543 - DNA, 15 bp, Homo sapiens
ccgtgtgaggcatct

SEQ ID NO: 1230544 - DNA, 15 bp, Homo sapiens
tccgtgtgaggcatc

SEQ ID NO: 1230545 - DNA, 15 bp, Homo sapiens
ctccgtgtgaggcat

SEQ ID NO: 1230546 - DNA, 15 bp, Homo sapiens
tctccgtgtgaggca

SEQ ID NO: 1230547 - DNA, 15 bp, Homo sapiens
gtctccgtgtgaggc

SEQ ID NO: 1230548 - DNA, 15 bp, Homo sapiens
agtctccgtgtgagg

SEQ ID NO: 1230549 - DNA, 15 bp, Homo sapiens
cagtctccgtgtgag

SEQ ID NO: 1230550 - DNA, 15 bp, Homo sapiens
ccagtctccgtgtga

SEQ ID NO: 1230551 - DNA, 15 bp, Homo sapiens
accagtctccgtgtg

SEQ ID NO: 1230552 - DNA, 15 bp, Homo sapiens
taccagtctccgtgt

SEQ ID NO: 1230553 - DNA, 15 bp, Homo sapiens
ttaccagtctccgtg

SEQ ID NO: 1230554 - DNA, 15 bp, Homo sapiens
cttaccagtctccgt

SEQ ID NO: 1230555 - DNA, 15 bp, Homo sapiens
tcttaccagtctccg

SEQ ID NO: 1230556 - DNA, 15 bp, Homo sapiens
ttcttaccagtctcc

SEQ ID NO: 1230557 - DNA, 15 bp, Homo sapiens
tttcttaccagtctc

SEQ ID NO: 1230558 - DNA, 15 bp, Homo sapiens
ctttcttaccagtct

SEQ ID NO: 1230559 - DNA, 15 bp, Homo sapiens
tctttcttaccagtc

SEQ ID NO: 1230560 - DNA, 15 bp, Homo sapiens
ttctttcttaccagt

SEQ ID NO: 1230561 - DNA, 15 bp, Homo sapiens
tttctttcttaccag

SEQ ID NO: 1230562 - DNA, 15 bp, Homo sapiens
atttctttcttacca

SEQ ID NO: 1230563 - DNA, 15 bp, Homo sapiens
aatttctttcttacc

SEQ ID NO: 1230564 - DNA, 15 bp, Homo sapiens
aaatttctttcttac

SEQ ID NO: 1230565 - DNA, 15 bp, Homo sapiens
taaatttctttctta

SEQ ID NO: 1230566 - DNA, 15 bp, Homo sapiens
ataaatttctttctt

SEQ ID NO: 1230567 - DNA, 15 bp, Homo sapiens
gataaatttctttct

SEQ ID NO: 1230568 - DNA, 15 bp, Homo sapiens
ggataaatttctttc

SEQ ID NO: 1230569 - DNA, 15 bp, Homo sapiens
aggataaatttcttt

SEQ ID NO: 1230570 - DNA, 15 bp, Homo sapiens
aaggataaatttctt

SEQ ID NO: 1230571 - DNA, 15 bp, Homo sapiens
caaggataaatttct

SEQ ID NO: 1230572 - DNA, 15 bp, Homo sapiens
tcaaggataaatttc

SEQ ID NO: 1230573 - DNA, 15 bp, Homo sapiens
ttcaaggataaattt

SEQ ID NO: 1230574 - DNA, 15 bp, Homo sapiens
tttcaaggataaatt

SEQ ID NO: 1230575 - DNA, 15 bp, Homo sapiens
ctttcaaggataaat

SEQ ID NO: 1230576 - DNA, 15 bp, Homo sapiens
cctttcaaggataaa

SEQ ID NO: 1230577 - DNA, 15 bp, Homo sapiens
gcctttcaaggataa

SEQ ID NO: 1230578 - DNA, 15 bp, Homo sapiens
ggcctttcaaggata

SEQ ID NO: 1230579 - DNA, 15 bp, Homo sapiens
tggcctttcaaggat

SEQ ID NO: 1230580 - DNA, 15 bp, Homo sapiens
ttggcctttcaagga

SEQ ID NO: 1230581 - DNA, 15 bp, Homo sapiens
cttggcctttcaagg

SEQ ID NO: 1230582 - DNA, 15 bp, Homo sapiens
acttggcctttcaag

SEQ ID NO: 1230583 - DNA, 15 bp, Homo sapiens
aacttggcctttcaa

SEQ ID NO: 1230584 - DNA, 15 bp, Homo sapiens
gaacttggcctttca

SEQ ID NO: 1230585 - DNA, 15 bp, Homo sapiens
ggaacttggcctttc

SEQ ID NO: 1230586 - DNA, 15 bp, Homo sapiens
aggaacttggccttt

SEQ ID NO: 1230587 - DNA, 15 bp, Homo sapiens
aaggaacttggcctt

SEQ ID NO: 1230588 - DNA, 15 bp, Homo sapiens
taaggaacttggcct

SEQ ID NO: 1230589 - DNA, 15 bp, Homo sapiens
ttaaggaacttggcc

SEQ ID NO: 1230590 - DNA, 15 bp, Homo sapiens
cttaaggaacttggc

SEQ ID NO: 1230591 - DNA, 15 bp, Homo sapiens
ccttaaggaacttgg

SEQ ID NO: 1230592 - DNA, 15 bp, Homo sapiens
cccttaaggaacttg

SEQ ID NO: 1230593 - DNA, 15 bp, Homo sapiens
tcccttaaggaactt

SEQ ID NO: 1230594 - DNA, 15 bp, Homo sapiens
ttcccttaaggaact

SEQ ID NO: 1230595 - DNA, 15 bp, Homo sapiens
tttcccttaaggaac

SEQ ID NO: 1230596 - DNA, 15 bp, Homo sapiens
ttttcccttaaggaa

SEQ ID NO: 1230597 - DNA, 15 bp, Homo sapiens
cttttcccttaagga

SEQ ID NO: 1230598 - DNA, 15 bp, Homo sapiens
tcttttcccttaagg

SEQ ID NO: 1230599 - DNA, 15 bp, Homo sapiens
ctcttttcccttaag

SEQ ID NO: 1230600 - DNA, 15 bp, Homo sapiens
tctcttttcccttaa

SEQ ID NO: 1230601 - DNA, 15 bp, Homo sapiens
ctctcttttccctta

SEQ ID NO: 1230602 - DNA, 15 bp, Homo sapiens
tctctcttttccctt

SEQ ID NO: 1230603 - DNA, 15 bp, Homo sapiens
ttctctcttttccct

SEQ ID NO: 1230604 - DNA, 15 bp, Homo sapiens
cttctctcttttccc

SEQ ID NO: 1230605 - DNA, 15 bp, Homo sapiens
ccttctctcttttcc

SEQ ID NO: 1230606 - DNA, 15 bp, Homo sapiens
tccttctctcttttc

SEQ ID NO: 1230607 - DNA, 15 bp, Homo sapiens
ctccttctctctttt

SEQ ID NO: 1230608 - DNA, 15 bp, Homo sapiens
tctccttctctcttt

SEQ ID NO: 1230609 - DNA, 15 bp, Homo sapiens
ctctccttctctctt

SEQ ID NO: 1230610 - DNA, 15 bp, Homo sapiens
tctctccttctctct

SEQ ID NO: 1230611 - DNA, 15 bp, Homo sapiens
ctctctccttctctc

SEQ ID NO: 1230612 - DNA, 15 bp, Homo sapiens
cctctctccttctct

SEQ ID NO: 1230613 - DNA, 15 bp, Homo sapiens
ccctctctccttctc

SEQ ID NO: 1230614 - DNA, 15 bp, Homo sapiens
accctctctccttct

SEQ ID NO: 1230615 - DNA, 15 bp, Homo sapiens
aaccctctctccttc

SEQ ID NO: 1230616 - DNA, 15 bp, Homo sapiens
taaccctctctcctt

SEQ ID NO: 1230617 - DNA, 15 bp, Homo sapiens
ttaaccctctctcct

SEQ ID NO: 1230618 - DNA, 15 bp, Homo sapiens
cttaaccctctctcc

SEQ ID NO: 1230619 - DNA, 15 bp, Homo sapiens
ccttaaccctctctc

SEQ ID NO: 1230620 - DNA, 15 bp, Homo sapiens
cccttaaccctctct

SEQ ID NO: 1230621 - DNA, 15 bp, Homo sapiens
tcccttaaccctctc

SEQ ID NO: 1230622 - DNA, 15 bp, Homo sapiens
atcccttaaccctct

SEQ ID NO: 1230623 - DNA, 15 bp, Homo sapiens
gatcccttaaccctc

SEQ ID NO: 1230624 - DNA, 15 bp, Homo sapiens
tgatcccttaaccct

SEQ ID NO: 1230625 - DNA, 15 bp, Homo sapiens
atgatcccttaaccc

SEQ ID NO: 1230626 - DNA, 15 bp, Homo sapiens
aatgatcccttaacc

SEQ ID NO: 1230627 - DNA, 15 bp, Homo sapiens
aaatgatcccttaac

SEQ ID NO: 1230628 - DNA, 15 bp, Homo sapiens
gaaatgatcccttaa

SEQ ID NO: 1230629 - DNA, 15 bp, Homo sapiens
ggaaatgatccctta

SEQ ID NO: 1230630 - DNA, 15 bp, Homo sapiens
gggaaatgatccctt

SEQ ID NO: 1230631 - DNA, 15 bp, Homo sapiens
agggaaatgatccct

SEQ ID NO: 1230632 - DNA, 15 bp, Homo sapiens
gagggaaatgatccc

SEQ ID NO: 1230633 - DNA, 15 bp, Homo sapiens
agagggaaatgatcc

SEQ ID NO: 1230634 - DNA, 15 bp, Homo sapiens
aagagggaaatgatc

SEQ ID NO: 1230635 - DNA, 15 bp, Homo sapiens
caagagggaaatgat

SEQ ID NO: 1230636 - DNA, 15 bp, Homo sapiens
tcaagagggaaatga

SEQ ID NO: 1230637 - DNA, 15 bp, Homo sapiens
ctcaagagggaaatg

SEQ ID NO: 1230638 - DNA, 15 bp, Homo sapiens
gctcaagagggaaat

SEQ ID NO: 1230639 - DNA, 15 bp, Homo sapiens
tgctcaagagggaaa

SEQ ID NO: 1230640 - DNA, 15 bp, Homo sapiens
ttgctcaagagggaa

SEQ ID NO: 1230641 - DNA, 15 bp, Homo sapiens
attgctcaagaggga

SEQ ID NO: 1230642 - DNA, 15 bp, Homo sapiens
cattgctcaagaggg

SEQ ID NO: 1230643 - DNA, 15 bp, Homo sapiens
tcattgctcaagagg

SEQ ID NO: 1230644 - DNA, 15 bp, Homo sapiens
atcattgctcaagag

SEQ ID NO: 1230645 - DNA, 15 bp, Homo sapiens
catcattgctcaaga

SEQ ID NO: 1230646 - DNA, 15 bp, Homo sapiens
ccatcattgctcaag

SEQ ID NO: 1230647 - DNA, 15 bp, Homo sapiens
tccatcattgctcaa

SEQ ID NO: 1230648 - DNA, 15 bp, Homo sapiens
gtccatcattgctca

SEQ ID NO: 1230649 - DNA, 15 bp, Homo sapiens
ggtccatcattgctc

SEQ ID NO: 1230650 - DNA, 15 bp, Homo sapiens
tggtccatcattgct

SEQ ID NO: 1230651 - DNA, 15 bp, Homo sapiens
atggtccatcattgc

SEQ ID NO: 1230652 - DNA, 15 bp, Homo sapiens
aatggtccatcattg

SEQ ID NO: 1230653 - DNA, 15 bp, Homo sapiens
taatggtccatcatt

SEQ ID NO: 1230654 - DNA, 15 bp, Homo sapiens
gtaatggtccatcat

SEQ ID NO: 1230655 - DNA, 15 bp, Homo sapiens
agtaatggtccatca

SEQ ID NO: 1230656 - DNA, 15 bp, Homo sapiens
tagtaatggtccatc

SEQ ID NO: 1230657 - DNA, 15 bp, Homo sapiens
atagtaatggtccat

SEQ ID NO: 1230658 - DNA, 15 bp, Homo sapiens
tatagtaatggtcca

SEQ ID NO: 1230659 - DNA, 15 bp, Homo sapiens
ttatagtaatggtcc

SEQ ID NO: 1230660 - DNA, 15 bp, Homo sapiens
tttatagtaatggtc

SEQ ID NO: 1230661 - DNA, 15 bp, Homo sapiens
ctttatagtaatggt

SEQ ID NO: 1230662 - DNA, 15 bp, Homo sapiens
tctttatagtaatgg

SEQ ID NO: 1230663 - DNA, 15 bp, Homo sapiens
ttctttatagtaatg

SEQ ID NO: 1230664 - DNA, 15 bp, Homo sapiens
cttctttatagtaat

SEQ ID NO: 1230665 - DNA, 15 bp, Homo sapiens
acttctttatagtaa

SEQ ID NO: 1230666 - DNA, 15 bp, Homo sapiens
cacttctttatagta

SEQ ID NO: 1230667 - DNA, 15 bp, Homo sapiens
acacttctttatagt

SEQ ID NO: 1230668 - DNA, 15 bp, Homo sapiens
aacacttctttatag

SEQ ID NO: 1230669 - DNA, 15 bp, Homo sapiens
taacacttctttata

SEQ ID NO: 1230670 - DNA, 15 bp, Homo sapiens
ataacacttctttat

SEQ ID NO: 1230671 - DNA, 15 bp, Homo sapiens
aataacacttcttta

SEQ ID NO: 1230672 - DNA, 15 bp, Homo sapiens
taataacacttcttt

SEQ ID NO: 1230673 - DNA, 15 bp, Homo sapiens
ataataacacttctt

SEQ ID NO: 1230674 - DNA, 15 bp, Homo sapiens
gataataacacttct

SEQ ID NO: 1230675 - DNA, 15 bp, Homo sapiens
tgataataacacttc

SEQ ID NO: 1230676 - DNA, 15 bp, Homo sapiens
ttgataataacactt

SEQ ID NO: 1230677 - DNA, 15 bp, Homo sapiens
gttgataataacact

SEQ ID NO: 1230678 - DNA, 15 bp, Homo sapiens
agttgataataacac

SEQ ID NO: 1230679 - DNA, 15 bp, Homo sapiens
tagttgataataaca

SEQ ID NO: 1230680 - DNA, 15 bp, Homo sapiens
ttagttgataataac

SEQ ID NO: 1230681 - DNA, 15 bp, Homo sapiens
attagttgataataa

SEQ ID NO: 1230682 - DNA, 15 bp, Homo sapiens
gattagttgataata

SEQ ID NO: 1230683 - DNA, 15 bp, Homo sapiens
ggattagttgataat

SEQ ID NO: 1230684 - DNA, 15 bp, Homo sapiens
aggattagttgataa

SEQ ID NO: 1230685 - DNA, 15 bp, Homo sapiens
gaggattagttgata

SEQ ID NO: 1230686 - DNA, 15 bp, Homo sapiens
agaggattagttgat

SEQ ID NO: 1230687 - DNA, 15 bp, Homo sapiens
cagaggattagttga

SEQ ID NO: 1230688 - DNA, 15 bp, Homo sapiens
ccagaggattagttg

SEQ ID NO: 1230689 - DNA, 15 bp, Homo sapiens
tccagaggattagtt

SEQ ID NO: 1230690 - DNA, 15 bp, Homo sapiens
ttccagaggattagt

SEQ ID NO: 1230691 - DNA, 15 bp, Homo sapiens
tttccagaggattag

SEQ ID NO: 1230692 - DNA, 15 bp, Homo sapiens
gtttccagaggatta

SEQ ID NO: 1230693 - DNA, 15 bp, Homo sapiens
ggtttccagaggatt

SEQ ID NO: 1230694 - DNA, 15 bp, Homo sapiens
gggtttccagaggat

SEQ ID NO: 1230695 - DNA, 15 bp, Homo sapiens
ggggtttccagagga

SEQ ID NO: 1230696 - DNA, 15 bp, Homo sapiens
aggggtttccagagg

SEQ ID NO: 1230697 - DNA, 15 bp, Homo sapiens
aaggggtttccagag

SEQ ID NO: 1230698 - DNA, 15 bp, Homo sapiens
aaaggggtttccaga

SEQ ID NO: 1230699 - DNA, 15 bp, Homo sapiens
aaaaggggtttccag

SEQ ID NO: 1230700 - DNA, 15 bp, Homo sapiens
aaaaaggggtttcca

SEQ ID NO: 1230701 - DNA, 15 bp, Homo sapiens
gaaaaaggggtttcc

SEQ ID NO: 1230702 - DNA, 15 bp, Homo sapiens
ggaaaaaggggtttc

SEQ ID NO: 1230703 - DNA, 15 bp, Homo sapiens
tggaaaaaggggttt

SEQ ID NO: 1230704 - DNA, 15 bp, Homo sapiens
atggaaaaaggggtt

SEQ ID NO: 1230705 - DNA, 15 bp, Homo sapiens
aatggaaaaaggggt

SEQ ID NO: 1230706 - DNA, 15 bp, Homo sapiens
taatggaaaaagggg

SEQ ID NO: 1230707 - DNA, 15 bp, Homo sapiens
ataatggaaaaaggg

SEQ ID NO: 1230708 - DNA, 15 bp, Homo sapiens
ttataatggaaaaag

SEQ ID NO: 1230709 - DNA, 15 bp, Homo sapiens
gttataatggaaaaa

SEQ ID NO: 1230710 - DNA, 15 bp, Homo sapiens
agttataatggaaaa

SEQ ID NO: 1230711 - DNA, 15 bp, Homo sapiens
aagttataatggaaa

SEQ ID NO: 1230712 - DNA, 15 bp, Homo sapiens
caagttataatggaa

SEQ ID NO: 1230713 - DNA, 15 bp, Homo sapiens
ccaagttataatgga

SEQ ID NO: 1230714 - DNA, 15 bp, Homo sapiens
accaagttataatgg

SEQ ID NO: 1230715 - DNA, 15 bp, Homo sapiens
caccaagttataatg

SEQ ID NO: 1230716 - DNA, 15 bp, Homo sapiens
ccaccaagttataat

SEQ ID NO: 1230717 - DNA, 15 bp, Homo sapiens
gccaccaagttataa

SEQ ID NO: 1230718 - DNA, 15 bp, Homo sapiens
tgccaccaagttata

SEQ ID NO: 1230719 - DNA, 15 bp, Homo sapiens
gtgccaccaagttat

SEQ ID NO: 1230720 - DNA, 15 bp, Homo sapiens
ggtgccaccaagtta

SEQ ID NO: 1230721 - DNA, 15 bp, Homo sapiens
caggtgccaccaagt

SEQ ID NO: 1230722 - DNA, 15 bp, Homo sapiens
gcaggtgccaccaag

SEQ ID NO: 1230723 - DNA, 15 bp, Homo sapiens
ggcaggtgccaccaa

SEQ ID NO: 1230724 - DNA, 15 bp, Homo sapiens
gggcaggtgccacca

SEQ ID NO: 1230725 - DNA, 15 bp, Homo sapiens
agggcaggtgccacc

SEQ ID NO: 1230726 - DNA, 15 bp, Homo sapiens
aagggcaggtgccac

SEQ ID NO: 1230727 - DNA, 15 bp, Homo sapiens
aaagggcaggtgcca

SEQ ID NO: 1230728 - DNA, 15 bp, Homo sapiens
caaagggcaggtgcc

SEQ ID NO: 1230729 - DNA, 15 bp, Homo sapiens
tcaaagggcaggtgc

SEQ ID NO: 1230730 - DNA, 15 bp, Homo sapiens
ttcaaagggcaggtg

SEQ ID NO: 1230731 - DNA, 15 bp, Homo sapiens
gttcaaagggcaggt

SEQ ID NO: 1230732 - DNA, 15 bp, Homo sapiens
agttcaaagggcagg

SEQ ID NO: 1230733 - DNA, 15 bp, Homo sapiens
tagttcaaagggcag

SEQ ID NO: 1230734 - DNA, 15 bp, Homo sapiens
atagttcaaagggca

SEQ ID NO: 1230735 - DNA, 15 bp, Homo sapiens
catagttcaaagggc

SEQ ID NO: 1230736 - DNA, 15 bp, Homo sapiens
acatagttcaaaggg

SEQ ID NO: 1230737 - DNA, 15 bp, Homo sapiens
gacatagttcaaagg

SEQ ID NO: 1230738 - DNA, 15 bp, Homo sapiens
ggacatagttcaaag

SEQ ID NO: 1230739 - DNA, 15 bp, Homo sapiens
gggacatagttcaaa

SEQ ID NO: 1230740 - DNA, 15 bp, Homo sapiens
tgggacatagttcaa

SEQ ID NO: 1230741 - DNA, 15 bp, Homo sapiens
ctgggacatagttca

SEQ ID NO: 1230742 - DNA, 15 bp, Homo sapiens
cctgggacatagttc

SEQ ID NO: 1230743 - DNA, 15 bp, Homo sapiens
acctgggacatagtt

SEQ ID NO: 1230744 - DNA, 15 bp, Homo sapiens
gacctgggacatagt

SEQ ID NO: 1230745 - DNA, 15 bp, Homo sapiens
agacctgggacatag

SEQ ID NO: 1230746 - DNA, 15 bp, Homo sapiens
gagacctgggacata

SEQ ID NO: 1230747 - DNA, 15 bp, Homo sapiens
tgagacctgggacat

SEQ ID NO: 1230748 - DNA, 15 bp, Homo sapiens
ctgagacctgggaca

SEQ ID NO: 1230749 - DNA, 15 bp, Homo sapiens
cctgagacctgggac

SEQ ID NO: 1230750 - DNA, 15 bp, Homo sapiens
tcctgagacctggga

SEQ ID NO: 1230751 - DNA, 15 bp, Homo sapiens
ctcctgagacctggg

SEQ ID NO: 1230752 - DNA, 15 bp, Homo sapiens
actcctgagacctgg

SEQ ID NO: 1230753 - DNA, 15 bp, Homo sapiens
cactcctgagacctg

SEQ ID NO: 1230754 - DNA, 15 bp, Homo sapiens
cacactcctgagacc

SEQ ID NO: 1230755 - DNA, 15 bp, Homo sapiens
gcacactcctgagac

SEQ ID NO: 1230756 - DNA, 15 bp, Homo sapiens
tgcacactcctgaga

SEQ ID NO: 1230757 - DNA, 15 bp, Homo sapiens
atgcacactcctgag

SEQ ID NO: 1230758 - DNA, 15 bp, Homo sapiens
aatgcacactcctga

SEQ ID NO: 1230759 - DNA, 15 bp, Homo sapiens
caatgcacactcctg

SEQ ID NO: 1230760 - DNA, 15 bp, Homo sapiens
tcaatgcacactcct

SEQ ID NO: 1230761 - DNA, 15 bp, Homo sapiens
ctcaatgcacactcc

SEQ ID NO: 1230762 - DNA, 15 bp, Homo sapiens
actcaatgcacactc

SEQ ID NO: 1230763 - DNA, 15 bp, Homo sapiens
aactcaatgcacact

SEQ ID NO: 1230764 - DNA, 15 bp, Homo sapiens
caactcaatgcacac

SEQ ID NO: 1230765 - DNA, 15 bp, Homo sapiens
tcaactcaatgcaca

SEQ ID NO: 1230766 - DNA, 15 bp, Homo sapiens
ttcaactcaatgcac

SEQ ID NO: 1230767 - DNA, 15 bp, Homo sapiens
cttcaactcaatgca

SEQ ID NO: 1230768 - DNA, 15 bp, Homo sapiens
ccttcaactcaatgc

SEQ ID NO: 1230769 - DNA, 15 bp, Homo sapiens
tccttcaactcaatg

SEQ ID NO: 1230770 - DNA, 15 bp, Homo sapiens
gtccttcaactcaat

SEQ ID NO: 1230771 - DNA, 15 bp, Homo sapiens
tgtccttcaactcaa

SEQ ID NO: 1230772 - DNA, 15 bp, Homo sapiens
gtgtccttcaactca

SEQ ID NO: 1230773 - DNA, 15 bp, Homo sapiens
tgtgtccttcaactc

SEQ ID NO: 1230774 - DNA, 15 bp, Homo sapiens
ctgtgtccttcaact

SEQ ID NO: 1230775 - DNA, 15 bp, Homo sapiens
tctgtgtccttcaac

SEQ ID NO: 1230776 - DNA, 15 bp, Homo sapiens
ttctgtgtccttcaa

SEQ ID NO: 1230777 - DNA, 15 bp, Homo sapiens
attctgtgtccttca

SEQ ID NO: 1230778 - DNA, 15 bp, Homo sapiens
aattctgtgtccttc

SEQ ID NO: 1230779 - DNA, 15 bp, Homo sapiens
gaattctgtgtcctt

SEQ ID NO: 1230780 - DNA, 15 bp, Homo sapiens
cgaattctgtgtcct

SEQ ID NO: 1230781 - DNA, 15 bp, Homo sapiens
ccgaattctgtgtcc

SEQ ID NO: 1230782 - DNA, 15 bp, Homo sapiens
gccgaattctgtgtc

SEQ ID NO: 1230783 - DNA, 15 bp, Homo sapiens
tgccgaattctgtgt

SEQ ID NO: 1230784 - DNA, 15 bp, Homo sapiens
ctgccgaattctgtg

SEQ ID NO: 1230785 - DNA, 15 bp, Homo sapiens
actgccgaattctgt

SEQ ID NO: 1230786 - DNA, 15 bp, Homo sapiens
aactgccgaattctg

SEQ ID NO: 1230787 - DNA, 15 bp, Homo sapiens
caactgccgaattct

SEQ ID NO: 1230788 - DNA, 15 bp, Homo sapiens
tcaactgccgaattc

SEQ ID NO: 1230789 - DNA, 15 bp, Homo sapiens
ttcaactgccgaatt

SEQ ID NO: 1230790 - DNA, 15 bp, Homo sapiens
gttcaactgccgaat

SEQ ID NO: 1230791 - DNA, 15 bp, Homo sapiens
tgttcaactgccgaa

SEQ ID NO: 1230792 - DNA, 15 bp, Homo sapiens
ctgttcaactgccga

SEQ ID NO: 1230793 - DNA, 15 bp, Homo sapiens
actgttcaactgccg

SEQ ID NO: 1230794 - DNA, 15 bp, Homo sapiens
cactgttcaactgcc

SEQ ID NO: 1230795 - DNA, 15 bp, Homo sapiens
acactgttcaactgc

SEQ ID NO: 1230796 - DNA, 15 bp, Homo sapiens
cacactgttcaactg

SEQ ID NO: 1230797 - DNA, 15 bp, Homo sapiens
gcacactgttcaact

SEQ ID NO: 1230798 - DNA, 15 bp, Homo sapiens
tgcacactgttcaac

SEQ ID NO: 1230799 - DNA, 15 bp, Homo sapiens
ctgcacactgttcaa

SEQ ID NO: 1230800 - DNA, 15 bp, Homo sapiens
actgcacactgttca

SEQ ID NO: 1230801 - DNA, 15 bp, Homo sapiens
tactgcacactgttc

SEQ ID NO: 1230802 - DNA, 15 bp, Homo sapiens
ttactgcacactgtt

SEQ ID NO: 1230803 - DNA, 15 bp, Homo sapiens
cttactgcacactgt

SEQ ID NO: 1230804 - DNA, 15 bp, Homo sapiens
acttactgcacactg

SEQ ID NO: 1230805 - DNA, 15 bp, Homo sapiens
aacttactgcacact

SEQ ID NO: 1230806 - DNA, 15 bp, Homo sapiens
aaacttactgcacac

SEQ ID NO: 1230807 - DNA, 15 bp, Homo sapiens
caaacttactgcaca

SEQ ID NO: 1230808 - DNA, 15 bp, Homo sapiens
tcaaacttactgcac

SEQ ID NO: 1230809 - DNA, 15 bp, Homo sapiens
ctcaaacttactgca

SEQ ID NO: 1230810 - DNA, 15 bp, Homo sapiens
tctcaaacttactgc

SEQ ID NO: 1230811 - DNA, 15 bp, Homo sapiens
ttctcaaacttactg

SEQ ID NO: 1230812 - DNA, 15 bp, Homo sapiens
gttctcaaacttact

SEQ ID NO: 1230813 - DNA, 15 bp, Homo sapiens
ggttctcaaacttac

SEQ ID NO: 1230814 - DNA, 15 bp, Homo sapiens
aggttctcaaactta

SEQ ID NO: 1230815 - DNA, 15 bp, Homo sapiens
taggttctcaaactt

SEQ ID NO: 1230816 - DNA, 15 bp, Homo sapiens
ataggttctcaaact

SEQ ID NO: 1230817 - DNA, 15 bp, Homo sapiens
cataggttctcaaac

SEQ ID NO: 1230818 - DNA, 15 bp, Homo sapiens
ccataggttctcaaa

SEQ ID NO: 1230819 - DNA, 15 bp, Homo sapiens
cccataggttctcaa

SEQ ID NO: 1230820 - DNA, 15 bp, Homo sapiens
gcccataggttctca

SEQ ID NO: 1230821 - DNA, 15 bp, Homo sapiens
agcccataggttctc

SEQ ID NO: 1230822 - DNA, 15 bp, Homo sapiens
aagcccataggttct

SEQ ID NO: 1230823 - DNA, 15 bp, Homo sapiens
taagcccataggttc

SEQ ID NO: 1230824 - DNA, 15 bp, Homo sapiens
ctaagcccataggtt

SEQ ID NO: 1230825 - DNA, 15 bp, Homo sapiens
cctaagcccataggt

SEQ ID NO: 1230826 - DNA, 15 bp, Homo sapiens
gcctaagcccatagg

SEQ ID NO: 1230827 - DNA, 15 bp, Homo sapiens
tgcctaagcccatag

SEQ ID NO: 1230828 - DNA, 15 bp, Homo sapiens
atgcctaagcccata

SEQ ID NO: 1230829 - DNA, 15 bp, Homo sapiens
catgcctaagcccat

SEQ ID NO: 1230830 - DNA, 15 bp, Homo sapiens
ccatgcctaagccca

SEQ ID NO: 1230831 - DNA, 15 bp, Homo sapiens
accatgcctaagccc

SEQ ID NO: 1230832 - DNA, 15 bp, Homo sapiens
caccatgcctaagcc

SEQ ID NO: 1230833 - DNA, 15 bp, Homo sapiens
ccaccatgcctaagc

SEQ ID NO: 1230834 - DNA, 15 bp, Homo sapiens
tccaccatgcctaag

SEQ ID NO: 1230835 - DNA, 15 bp, Homo sapiens
ttccaccatgcctaa

SEQ ID NO: 1230836 - DNA, 15 bp, Homo sapiens
tttccaccatgccta

SEQ ID NO: 1230837 - DNA, 15 bp, Homo sapiens
gtttccaccatgcct

SEQ ID NO: 1230838 - DNA, 15 bp, Homo sapiens
tgtttccaccatgcc

SEQ ID NO: 1230839 - DNA, 15 bp, Homo sapiens
ttgtttccaccatgc

SEQ ID NO: 1230840 - DNA, 15 bp, Homo sapiens
tttgtttccaccatg

SEQ ID NO: 1230841 - DNA, 15 bp, Homo sapiens
ttttgtttccaccat

SEQ ID NO: 1230842 - DNA, 15 bp, Homo sapiens
tttttgtttccacca

SEQ ID NO: 1230843 - DNA, 15 bp, Homo sapiens
atttttgtttccacc

SEQ ID NO: 1230844 - DNA, 15 bp, Homo sapiens
catttttgtttccac

SEQ ID NO: 1230845 - DNA, 15 bp, Homo sapiens
acatttttgtttcca

SEQ ID NO: 1230846 - DNA, 15 bp, Homo sapiens
tacatttttgtttcc

SEQ ID NO: 1230847 - DNA, 15 bp, Homo sapiens
atacatttttgtttc

SEQ ID NO: 1230848 - DNA, 15 bp, Homo sapiens
gatacatttttgttt

SEQ ID NO: 1230849 - DNA, 15 bp, Homo sapiens
cgatacatttttgtt

SEQ ID NO: 1230850 - DNA, 15 bp, Homo sapiens
acgatacatttttgt

SEQ ID NO: 1230851 - DNA, 15 bp, Homo sapiens
aacgatacatttttg

SEQ ID NO: 1230852 - DNA, 15 bp, Homo sapiens
taacgatacattttt

SEQ ID NO: 1230853 - DNA, 15 bp, Homo sapiens
ataacgatacatttt

SEQ ID NO: 1230854 - DNA, 15 bp, Homo sapiens
tataacgatacattt

SEQ ID NO: 1230855 - DNA, 15 bp, Homo sapiens
ctataacgatacatt

SEQ ID NO: 1230856 - DNA, 15 bp, Homo sapiens
actataacgatacat

SEQ ID NO: 1230857 - DNA, 15 bp, Homo sapiens
aactataacgataca

SEQ ID NO: 1230858 - DNA, 15 bp, Homo sapiens
taactataacgatac

SEQ ID NO: 1230859 - DNA, 15 bp, Homo sapiens
ttaactataacgata

SEQ ID NO: 1230860 - DNA, 15 bp, Homo sapiens
tttaactataacgat

SEQ ID NO: 1230861 - DNA, 15 bp, Homo sapiens
atttaactataacga

SEQ ID NO: 1230862 - DNA, 15 bp, Homo sapiens
catttaactataacg

SEQ ID NO: 1230863 - DNA, 15 bp, Homo sapiens
tcatttaactataac

SEQ ID NO: 1230864 - DNA, 15 bp, Homo sapiens
ttcatttaactataa

SEQ ID NO: 1230865 - DNA, 15 bp, Homo sapiens
cttcatttaactata

SEQ ID NO: 1230866 - DNA, 15 bp, Homo sapiens
ccttcatttaactat

SEQ ID NO: 1230867 - DNA, 15 bp, Homo sapiens
accttcatttaacta

SEQ ID NO: 1230868 - DNA, 15 bp, Homo sapiens
caccttcatttaact

SEQ ID NO: 1230869 - DNA, 15 bp, Homo sapiens
tcaccttcatttaac

SEQ ID NO: 1230870 - DNA, 15 bp, Homo sapiens
atcaccttcatttaa

SEQ ID NO: 1230871 - DNA, 15 bp, Homo sapiens
catcaccttcattta

SEQ ID NO: 1230872 - DNA, 15 bp, Homo sapiens
acatcaccttcattt

SEQ ID NO: 1230873 - DNA, 15 bp, Homo sapiens
cacatcaccttcatt

SEQ ID NO: 1230874 - DNA, 15 bp, Homo sapiens
acacatcaccttcat

SEQ ID NO: 1230875 - DNA, 15 bp, Homo sapiens
tacacatcaccttca

SEQ ID NO: 1230876 - DNA, 15 bp, Homo sapiens
gtacacatcaccttc

SEQ ID NO: 1230877 - DNA, 15 bp, Homo sapiens
tgtacacatcacctt

SEQ ID NO: 1230878 - DNA, 15 bp, Homo sapiens
atgtacacatcacct

SEQ ID NO: 1230879 - DNA, 15 bp, Homo sapiens
gatgtacacatcacc

SEQ ID NO: 1230880 - DNA, 15 bp, Homo sapiens
agatgtacacatcac

SEQ ID NO: 1230881 - DNA, 15 bp, Homo sapiens
aagatgtacacatca

SEQ ID NO: 1230882 - DNA, 15 bp, Homo sapiens
gaagatgtacacatc

SEQ ID NO: 1230883 - DNA, 15 bp, Homo sapiens
tgaagatgtacacat

SEQ ID NO: 1230884 - DNA, 15 bp, Homo sapiens
gtgaagatgtacaca

SEQ ID NO: 1230885 - DNA, 15 bp, Homo sapiens
tgtgaagatgtacac

SEQ ID NO: 1230886 - DNA, 15 bp, Homo sapiens
atgtgaagatgtaca

SEQ ID NO: 1230887 - DNA, 15 bp, Homo sapiens
tatgtgaagatgtac

SEQ ID NO: 1230888 - DNA, 15 bp, Homo sapiens
ctatgtgaagatgta

SEQ ID NO: 1230889 - DNA, 15 bp, Homo sapiens
actatgtgaagatgt

SEQ ID NO: 1230890 - DNA, 15 bp, Homo sapiens
cactatgtgaagatg

SEQ ID NO: 1230891 - DNA, 15 bp, Homo sapiens
gcactatgtgaagat

SEQ ID NO: 1230892 - DNA, 15 bp, Homo sapiens
agcactatgtgaaga

SEQ ID NO: 1230893 - DNA, 15 bp, Homo sapiens
cagcactatgtgaag

SEQ ID NO: 1230894 - DNA, 15 bp, Homo sapiens
ccagcactatgtgaa

SEQ ID NO: 1230895 - DNA, 15 bp, Homo sapiens
tccagcactatgtga

SEQ ID NO: 1230896 - DNA, 15 bp, Homo sapiens
gtccagcactatgtg

SEQ ID NO: 1230897 - DNA, 15 bp, Homo sapiens
tgtccagcactatgt

SEQ ID NO: 1230898 - DNA, 15 bp, Homo sapiens
gtgtccagcactatg

SEQ ID NO: 1230899 - DNA, 15 bp, Homo sapiens
tgtgtccagcactat

SEQ ID NO: 1230900 - DNA, 15 bp, Homo sapiens
atgtgtccagcacta

SEQ ID NO: 1230901 - DNA, 15 bp, Homo sapiens
catgtgtccagcact

SEQ ID NO: 1230902 - DNA, 15 bp, Homo sapiens
acatgtgtccagcac

SEQ ID NO: 1230903 - DNA, 15 bp, Homo sapiens
cacatgtgtccagca

SEQ ID NO: 1230904 - DNA, 15 bp, Homo sapiens
tcacatgtgtccagc

SEQ ID NO: 1230905 - DNA, 15 bp, Homo sapiens
ttcacatgtgtccag

SEQ ID NO: 1230906 - DNA, 15 bp, Homo sapiens
attcacatgtgtcca

SEQ ID NO: 1230907 - DNA, 15 bp, Homo sapiens
tattcacatgtgtcc

SEQ ID NO: 1230908 - DNA, 15 bp, Homo sapiens
ttattcacatgtgtc

SEQ ID NO: 1230909 - DNA, 15 bp, Homo sapiens
tttattcacatgtgt

SEQ ID NO: 1230910 - DNA, 15 bp, Homo sapiens
atttattcacatgtg

SEQ ID NO: 1230911 - DNA, 15 bp, Homo sapiens
tatttattcacatgt

SEQ ID NO: 1230912 - DNA, 15 bp, Homo sapiens
ctatttattcacatg

SEQ ID NO: 1230913 - DNA, 15 bp, Homo sapiens
gctatttattcacat

SEQ ID NO: 1230914 - DNA, 15 bp, Homo sapiens
tgctatttattcaca

SEQ ID NO: 1230915 - DNA, 15 bp, Homo sapiens
ctgctatttattcac

SEQ ID NO: 1230916 - DNA, 15 bp, Homo sapiens
tctgctatttattca

SEQ ID NO: 1230917 - DNA, 15 bp, Homo sapiens
atctgctatttattc

SEQ ID NO: 1230918 - DNA, 15 bp, Homo sapiens
aatctgctatttatt

SEQ ID NO: 1230919 - DNA, 15 bp, Homo sapiens
aaatctgctatttat

SEQ ID NO: 1230920 - DNA, 15 bp, Homo sapiens
taaatctgctattta

SEQ ID NO: 1230921 - DNA, 15 bp, Homo sapiens
ataaatctgctattt

SEQ ID NO: 1230922 - DNA, 15 bp, Homo sapiens
aataaatctgctatt

SEQ ID NO: 1230923 - DNA, 15 bp, Homo sapiens
caataaatctgctat

SEQ ID NO: 1230924 - DNA, 15 bp, Homo sapiens
gcaataaatctgcta

SEQ ID NO: 1230925 - DNA, 15 bp, Homo sapiens
agcaataaatctgct

SEQ ID NO: 1230926 - DNA, 15 bp, Homo sapiens
tagcaataaatctgc

SEQ ID NO: 1230927 - DNA, 15 bp, Homo sapiens
ttagcaataaatctg

SEQ ID NO: 1230928 - DNA, 15 bp, Homo sapiens
attagcaataaatct

SEQ ID NO: 1230929 - DNA, 15 bp, Homo sapiens
aattagcaataaatc

SEQ ID NO: 1230930 - DNA, 15 bp, Homo sapiens
ctaattagcaataaa

SEQ ID NO: 1230931 - DNA, 15 bp, Homo sapiens
gctaattagcaataa

SEQ ID NO: 1230932 - DNA, 15 bp, Homo sapiens
ggctaattagcaata

SEQ ID NO: 1230933 - DNA, 15 bp, Homo sapiens
tggctaattagcaat

SEQ ID NO: 1230934 - DNA, 15 bp, Homo sapiens
ctggctaattagcaa

SEQ ID NO: 1230935 - DNA, 15 bp, Homo sapiens
tctggctaattagca

SEQ ID NO: 1230936 - DNA, 15 bp, Homo sapiens
ttctggctaattagc

SEQ ID NO: 1230937 - DNA, 15 bp, Homo sapiens
cttctggctaattag

SEQ ID NO: 1230938 - DNA, 15 bp, Homo sapiens
tcttctggctaatta

SEQ ID NO: 1230939 - DNA, 15 bp, Homo sapiens
gtcttctggctaatt

SEQ ID NO: 1230940 - DNA, 15 bp, Homo sapiens
ggtcttctggctaat

SEQ ID NO: 1230941 - DNA, 15 bp, Homo sapiens
aggtcttctggctaa

SEQ ID NO: 1230942 - DNA, 15 bp, Homo sapiens
taggtcttctggcta

SEQ ID NO: 1230943 - DNA, 15 bp, Homo sapiens
gttaggtcttctggc

SEQ ID NO: 1230944 - DNA, 15 bp, Homo sapiens
cgttaggtcttctgg

SEQ ID NO: 1230945 - DNA, 15 bp, Homo sapiens
acgttaggtcttctg

SEQ ID NO: 1230946 - DNA, 15 bp, Homo sapiens
gacgttaggtcttct

SEQ ID NO: 1230947 - DNA, 15 bp, Homo sapiens
tgacgttaggtcttc

SEQ ID NO: 1230948 - DNA, 15 bp, Homo sapiens
atgacgttaggtctt

SEQ ID NO: 1230949 - DNA, 15 bp, Homo sapiens
tatgacgttaggtct

SEQ ID NO: 1230950 - DNA, 15 bp, Homo sapiens
ctatgacgttaggtc

SEQ ID NO: 1230951 - DNA, 15 bp, Homo sapiens
gctatgacgttaggt

SEQ ID NO: 1230952 - DNA, 15 bp, Homo sapiens
agctatgacgttagg

SEQ ID NO: 1230953 - DNA, 15 bp, Homo sapiens
gagctatgacgttag

SEQ ID NO: 1230954 - DNA, 15 bp, Homo sapiens
tgagctatgacgtta

SEQ ID NO: 1230955 - DNA, 15 bp, Homo sapiens
ctgagctatgacgtt

SEQ ID NO: 1230956 - DNA, 15 bp, Homo sapiens
cctgagctatgacgt

SEQ ID NO: 1230957 - DNA, 15 bp, Homo sapiens
ccctgagctatgacg

SEQ ID NO: 1230958 - DNA, 15 bp, Homo sapiens
tccctgagctatgac

SEQ ID NO: 1230959 - DNA, 15 bp, Homo sapiens
atccctgagctatga

SEQ ID NO: 1230960 - DNA, 15 bp, Homo sapiens
catccctgagctatg

SEQ ID NO: 1230961 - DNA, 15 bp, Homo sapiens
tcatccctgagctat

SEQ ID NO: 1230962 - DNA, 15 bp, Homo sapiens
ctcatccctgagcta

SEQ ID NO: 1230963 - DNA, 15 bp, Homo sapiens
gctcatccctgagct

SEQ ID NO: 1230964 - DNA, 15 bp, Homo sapiens
tgctcatccctgagc

SEQ ID NO: 1230965 - DNA, 15 bp, Homo sapiens
atgctcatccctgag

SEQ ID NO: 1230966 - DNA, 15 bp, Homo sapiens
catgctcatccctga

SEQ ID NO: 1230967 - DNA, 15 bp, Homo sapiens
tcatgctcatccctg

SEQ ID NO: 1230968 - DNA, 15 bp, Homo sapiens
atcatgctcatccct

SEQ ID NO: 1230969 - DNA, 15 bp, Homo sapiens
aatcatgctcatccc

SEQ ID NO: 1230970 - DNA, 15 bp, Homo sapiens
aaaatcatgctcatc

SEQ ID NO: 1230971 - DNA, 15 bp, Homo sapiens
caaaatcatgctcat

SEQ ID NO: 1230972 - DNA, 15 bp, Homo sapiens
acaaaatcatgctca

SEQ ID NO: 1230973 - DNA, 15 bp, Homo sapiens
aacaaaatcatgctc

SEQ ID NO: 1230974 - DNA, 15 bp, Homo sapiens
aaacaaaatcatgct

SEQ ID NO: 1230975 - DNA, 15 bp, Homo sapiens
aaaacaaaatcatgc

SEQ ID NO: 1230976 - DNA, 15 bp, Homo sapiens
caaaacaaaatcatg

SEQ ID NO: 1230977 - DNA, 15 bp, Homo sapiens
gcaaaacaaaatcat

SEQ ID NO: 1230978 - DNA, 15 bp, Homo sapiens
ggcaaaacaaaatca

SEQ ID NO: 1230979 - DNA, 15 bp, Homo sapiens
tggcaaaacaaaatc

SEQ ID NO: 1230980 - DNA, 15 bp, Homo sapiens
ttggcaaaacaaaat

SEQ ID NO: 1230981 - DNA, 15 bp, Homo sapiens
tttggcaaaacaaaa

SEQ ID NO: 1230982 - DNA, 15 bp, Homo sapiens
ttttggcaaaacaaa

SEQ ID NO: 1230983 - DNA, 15 bp, Homo sapiens
tttttggcaaaacaa

SEQ ID NO: 1230984 - DNA, 15 bp, Homo sapiens
atttttggcaaaaca

SEQ ID NO: 1230985 - DNA, 15 bp, Homo sapiens
catttttggcaaaac

SEQ ID NO: 1230986 - DNA, 15 bp, Homo sapiens
ccatttttggcaaaa

SEQ ID NO: 1230987 - DNA, 15 bp, Homo sapiens
gccatttttggcaaa

SEQ ID NO: 1230988 - DNA, 15 bp, Homo sapiens
tgccatttttggcaa

SEQ ID NO: 1230989 - DNA, 15 bp, Homo sapiens
atgccatttttggca

SEQ ID NO: 1230990 - DNA, 15 bp, Homo sapiens
catgccatttttggc

SEQ ID NO: 1230991 - DNA, 15 bp, Homo sapiens
ccatgccatttttgg

SEQ ID NO: 1230992 - DNA, 15 bp, Homo sapiens
gccatgccatttttg

SEQ ID NO: 1230993 - DNA, 15 bp, Homo sapiens
tgccatgccattttt

SEQ ID NO: 1230994 - DNA, 15 bp, Homo sapiens
ttgccatgccatttt

SEQ ID NO: 1230995 - DNA, 15 bp, Homo sapiens
atttgccatgccatt

SEQ ID NO: 1230996 - DNA, 15 bp, Homo sapiens
gatttgccatgccat

SEQ ID NO: 1230997 - DNA, 15 bp, Homo sapiens
tgatttgccatgcca

SEQ ID NO: 1230998 - DNA, 15 bp, Homo sapiens
gtgatttgccatgcc

SEQ ID NO: 1230999 - DNA, 15 bp, Homo sapiens
cgtgatttgccatgc

SEQ ID NO: 1231000 - DNA, 15 bp, Homo sapiens
tcgtgatttgccatg

SEQ ID NO: 1231001 - DNA, 15 bp, Homo sapiens
atcgtgatttgccat

SEQ ID NO: 1231002 - DNA, 15 bp, Homo sapiens
catcgtgatttgcca

SEQ ID NO: 1231003 - DNA, 15 bp, Homo sapiens
tcatcgtgatttgcc

SEQ ID NO: 1231004 - DNA, 15 bp, Homo sapiens
ctcatcgtgatttgc

SEQ ID NO: 1231005 - DNA, 15 bp, Homo sapiens
tctcatcgtgatttg

SEQ ID NO: 1231006 - DNA, 15 bp, Homo sapiens
atctcatcgtgattt

SEQ ID NO: 1231007 - DNA, 15 bp, Homo sapiens
aatctcatcgtgatt

SEQ ID NO: 1231008 - DNA, 15 bp, Homo sapiens
aaatctcatcgtgat

SEQ ID NO: 1231009 - DNA, 15 bp, Homo sapiens
gaaatctcatcgtga

SEQ ID NO: 1231010 - DNA, 15 bp, Homo sapiens
agaaatctcatcgtg

SEQ ID NO: 1231011 - DNA, 15 bp, Homo sapiens
cagaaatctcatcgt

SEQ ID NO: 1231012 - DNA, 15 bp, Homo sapiens
acagaaatctcatcg

SEQ ID NO: 1231013 - DNA, 15 bp, Homo sapiens
tacagaaatctcatc

SEQ ID NO: 1231014 - DNA, 15 bp, Homo sapiens
ttacagaaatctcat

SEQ ID NO: 1231015 - DNA, 15 bp, Homo sapiens
attacagaaatctca

SEQ ID NO: 1231016 - DNA, 15 bp, Homo sapiens
tattacagaaatctc

SEQ ID NO: 1231017 - DNA, 15 bp, Homo sapiens
gtattacagaaatct

SEQ ID NO: 1231018 - DNA, 15 bp, Homo sapiens
tgtattacagaaatc

SEQ ID NO: 1231019 - DNA, 15 bp, Homo sapiens
atgtattacagaaat

SEQ ID NO: 1231020 - DNA, 15 bp, Homo sapiens
tatgtattacagaaa

SEQ ID NO: 1231021 - DNA, 15 bp, Homo sapiens
ttatgtattacagaa

SEQ ID NO: 1231022 - DNA, 15 bp, Homo sapiens
attatgtattacaga

SEQ ID NO: 1231023 - DNA, 15 bp, Homo sapiens
aattatgtattacag

SEQ ID NO: 1231024 - DNA, 15 bp, Homo sapiens
aaattatgtattaca

SEQ ID NO: 1231025 - DNA, 15 bp, Homo sapiens
caaattatgtattac

SEQ ID NO: 1231026 - DNA, 15 bp, Homo sapiens
ccaaattatgtatta

SEQ ID NO: 1231027 - DNA, 15 bp, Homo sapiens
cccaaattatgtatt

SEQ ID NO: 1231028 - DNA, 15 bp, Homo sapiens
acccaaattatgtat

SEQ ID NO: 1231029 - DNA, 15 bp, Homo sapiens
tacccaaattatgta

SEQ ID NO: 1231030 - DNA, 15 bp, Homo sapiens
ttacccaaattatgt

SEQ ID NO: 1231031 - DNA, 15 bp, Homo sapiens
attacccaaattatg

SEQ ID NO: 1231032 - DNA, 15 bp, Homo sapiens
aattacccaaattat

SEQ ID NO: 1231033 - DNA, 15 bp, Homo sapiens
gaattacccaaatta

SEQ ID NO: 1231034 - DNA, 15 bp, Homo sapiens
agaattacccaaatt

SEQ ID NO: 1231035 - DNA, 15 bp, Homo sapiens
aagaattacccaaat

SEQ ID NO: 1231036 - DNA, 15 bp, Homo sapiens
aaagaattacccaaa

SEQ ID NO: 1231037 - DNA, 15 bp, Homo sapiens
gaaagaattacccaa

SEQ ID NO: 1231038 - DNA, 15 bp, Homo sapiens
agaaagaattaccca

SEQ ID NO: 1231039 - DNA, 15 bp, Homo sapiens
tagaaagaattaccc

SEQ ID NO: 1231040 - DNA, 15 bp, Homo sapiens
atagaaagaattacc

SEQ ID NO: 1231041 - DNA, 15 bp, Homo sapiens
catagaaagaattac

SEQ ID NO: 1231042 - DNA, 15 bp, Homo sapiens
acatagaaagaatta

SEQ ID NO: 1231043 - DNA, 15 bp, Homo sapiens
gacatagaaagaatt

SEQ ID NO: 1231044 - DNA, 15 bp, Homo sapiens
tgacatagaaagaat

SEQ ID NO: 1231045 - DNA, 15 bp, Homo sapiens
ctgacatagaaagaa

SEQ ID NO: 1231046 - DNA, 15 bp, Homo sapiens
actgacatagaaaga

SEQ ID NO: 1231047 - DNA, 15 bp, Homo sapiens
tactgacatagaaag

SEQ ID NO: 1231048 - DNA, 15 bp, Homo sapiens
ttactgacatagaaa

SEQ ID NO: 1231049 - DNA, 15 bp, Homo sapiens
gttactgacatagaa

SEQ ID NO: 1231050 - DNA, 15 bp, Homo sapiens
cgttactgacataga

SEQ ID NO: 1231051 - DNA, 15 bp, Homo sapiens
ccgttactgacatag

SEQ ID NO: 1231052 - DNA, 15 bp, Homo sapiens
gccgttactgacata

SEQ ID NO: 1231053 - DNA, 15 bp, Homo sapiens
agccgttactgacat

SEQ ID NO: 1231054 - DNA, 15 bp, Homo sapiens
cagccgttactgaca

SEQ ID NO: 1231055 - DNA, 15 bp, Homo sapiens
acagccgttactgac

SEQ ID NO: 1231056 - DNA, 15 bp, Homo sapiens
gacagccgttactga

SEQ ID NO: 1231057 - DNA, 15 bp, Homo sapiens
agacagccgttactg

SEQ ID NO: 1231058 - DNA, 15 bp, Homo sapiens
gagacagccgttact

SEQ ID NO: 1231059 - DNA, 15 bp, Homo sapiens
agagacagccgttac

SEQ ID NO: 1231060 - DNA, 15 bp, Homo sapiens
aagagacagccgtta

SEQ ID NO: 1231061 - DNA, 15 bp, Homo sapiens
gaagagacagccgtt

SEQ ID NO: 1231062 - DNA, 15 bp, Homo sapiens
agaagagacagccgt

SEQ ID NO: 1231063 - DNA, 15 bp, Homo sapiens
gagaagagacagccg

SEQ ID NO: 1231064 - DNA, 15 bp, Homo sapiens
ggagaagagacagcc

SEQ ID NO: 1231065 - DNA, 15 bp, Homo sapiens
tggagaagagacagc

SEQ ID NO: 1231066 - DNA, 15 bp, Homo sapiens
atggagaagagacag

SEQ ID NO: 1231067 - DNA, 15 bp, Homo sapiens
aatggagaagagaca

SEQ ID NO: 1231068 - DNA, 15 bp, Homo sapiens
gaatggagaagagac

SEQ ID NO: 1231069 - DNA, 15 bp, Homo sapiens
agaatggagaagaga

SEQ ID NO: 1231070 - DNA, 15 bp, Homo sapiens
gagaatggagaagag

SEQ ID NO: 1231071 - DNA, 15 bp, Homo sapiens
agagaatggagaaga

SEQ ID NO: 1231072 - DNA, 15 bp, Homo sapiens
cagagaatggagaag

SEQ ID NO: 1231073 - DNA, 15 bp, Homo sapiens
ccagagaatggagaa

SEQ ID NO: 1231074 - DNA, 15 bp, Homo sapiens
cccagagaatggaga

SEQ ID NO: 1231075 - DNA, 15 bp, Homo sapiens
acccagagaatggag

SEQ ID NO: 1231076 - DNA, 15 bp, Homo sapiens
aacccagagaatgga

SEQ ID NO: 1231077 - DNA, 15 bp, Homo sapiens
aaacccagagaatgg

SEQ ID NO: 1231078 - DNA, 15 bp, Homo sapiens
caaacccagagaatg

SEQ ID NO: 1231079 - DNA, 15 bp, Homo sapiens
acaaacccagagaat

SEQ ID NO: 1231080 - DNA, 15 bp, Homo sapiens
cacaaacccagagaa

SEQ ID NO: 1231081 - DNA, 15 bp, Homo sapiens
ccacaaacccagaga

SEQ ID NO: 1231082 - DNA, 15 bp, Homo sapiens
tccacaaacccagag

SEQ ID NO: 1231083 - DNA, 15 bp, Homo sapiens
atccacaaacccaga

SEQ ID NO: 1231084 - DNA, 15 bp, Homo sapiens
catccacaaacccag

SEQ ID NO: 1231085 - DNA, 15 bp, Homo sapiens
acatccacaaaccca

SEQ ID NO: 1231086 - DNA, 15 bp, Homo sapiens
aacatccacaaaccc

SEQ ID NO: 1231087 - DNA, 15 bp, Homo sapiens
taacatccacaaacc

SEQ ID NO: 1231088 - DNA, 15 bp, Homo sapiens
gtaacatccacaaac

SEQ ID NO: 1231089 - DNA, 15 bp, Homo sapiens
agtaacatccacaaa

SEQ ID NO: 1231090 - DNA, 15 bp, Homo sapiens
cagtaacatccacaa

SEQ ID NO: 1231091 - DNA, 15 bp, Homo sapiens
ccagtaacatccaca

SEQ ID NO: 1231092 - DNA, 15 bp, Homo sapiens
cccagtaacatccac

SEQ ID NO: 1231093 - DNA, 15 bp, Homo sapiens
gcccagtaacatcca

SEQ ID NO: 1231094 - DNA, 15 bp, Homo sapiens
tgcccagtaacatcc

SEQ ID NO: 1231095 - DNA, 15 bp, Homo sapiens
ctgcccagtaacatc

SEQ ID NO: 1231096 - DNA, 15 bp, Homo sapiens
gctgcccagtaacat

SEQ ID NO: 1231097 - DNA, 15 bp, Homo sapiens
agctgcccagtaaca

SEQ ID NO: 1231098 - DNA, 15 bp, Homo sapiens
gagctgcccagtaac

SEQ ID NO: 1231099 - DNA, 15 bp, Homo sapiens
agagctgcccagtaa

SEQ ID NO: 1231100 - DNA, 15 bp, Homo sapiens
cagagctgcccagta

SEQ ID NO: 1231101 - DNA, 15 bp, Homo sapiens
tcagagctgcccagt

SEQ ID NO: 1231102 - DNA, 15 bp, Homo sapiens
ctcagagctgcccag

SEQ ID NO: 1231103 - DNA, 15 bp, Homo sapiens
actcagagctgccca

SEQ ID NO: 1231104 - DNA, 15 bp, Homo sapiens
aactcagagctgccc

SEQ ID NO: 1231105 - DNA, 15 bp, Homo sapiens
aaactcagagctgcc

SEQ ID NO: 1231106 - DNA, 15 bp, Homo sapiens
caaactcagagctgc

SEQ ID NO: 1231107 - DNA, 15 bp, Homo sapiens
ccaaactcagagctg

SEQ ID NO: 1231108 - DNA, 15 bp, Homo sapiens
cccaaactcagagct

SEQ ID NO: 1231109 - DNA, 15 bp, Homo sapiens
tcccaaactcagagc

SEQ ID NO: 1231110 - DNA, 15 bp, Homo sapiens
ctcccaaactcagag

SEQ ID NO: 1231111 - DNA, 15 bp, Homo sapiens
gctcccaaactcaga

SEQ ID NO: 1231112 - DNA, 15 bp, Homo sapiens
tgctcccaaactcag

SEQ ID NO: 1231113 - DNA, 15 bp, Homo sapiens
gtgctcccaaactca

SEQ ID NO: 1231114 - DNA, 15 bp, Homo sapiens
ggtgctcccaaactc

SEQ ID NO: 1231115 - DNA, 15 bp, Homo sapiens
aggtgctcccaaact

SEQ ID NO: 1231116 - DNA, 15 bp, Homo sapiens
gaggtgctcccaaac

SEQ ID NO: 1231117 - DNA, 15 bp, Homo sapiens
ggaggtgctcccaaa

SEQ ID NO: 1231118 - DNA, 15 bp, Homo sapiens
gggaggtgctcccaa

SEQ ID NO: 1231119 - DNA, 15 bp, Homo sapiens
tgggaggtgctccca

SEQ ID NO: 1231120 - DNA, 15 bp, Homo sapiens
atgggaggtgctccc

SEQ ID NO: 1231121 - DNA, 15 bp, Homo sapiens
catgggaggtgctcc

SEQ ID NO: 1231122 - DNA, 15 bp, Homo sapiens
acatgggaggtgctc

SEQ ID NO: 1231123 - DNA, 15 bp, Homo sapiens
gacatgggaggtgct

SEQ ID NO: 1231124 - DNA, 15 bp, Homo sapiens
agacatgggaggtgc

SEQ ID NO: 1231125 - DNA, 15 bp, Homo sapiens
tagacatgggaggtg

SEQ ID NO: 1231126 - DNA, 15 bp, Homo sapiens
ttagacatgggaggt

SEQ ID NO: 1231127 - DNA, 15 bp, Homo sapiens
attagacatgggagg

SEQ ID NO: 1231128 - DNA, 15 bp, Homo sapiens
aattagacatgggag

SEQ ID NO: 1231129 - DNA, 15 bp, Homo sapiens
gaattagacatggga

SEQ ID NO: 1231130 - DNA, 15 bp, Homo sapiens
agaattagacatggg

SEQ ID NO: 1231131 - DNA, 15 bp, Homo sapiens
gagaattagacatgg

SEQ ID NO: 1231132 - DNA, 15 bp, Homo sapiens
ggagaattagacatg

SEQ ID NO: 1231133 - DNA, 15 bp, Homo sapiens
aggagaattagacat

SEQ ID NO: 1231134 - DNA, 15 bp, Homo sapiens
taggagaattagaca

SEQ ID NO: 1231135 - DNA, 15 bp, Homo sapiens
ttaggagaattagac

SEQ ID NO: 1231136 - DNA, 15 bp, Homo sapiens
cttaggagaattaga

SEQ ID NO: 1231137 - DNA, 15 bp, Homo sapiens
acttaggagaattag

SEQ ID NO: 1231138 - DNA, 15 bp, Homo sapiens
gacttaggagaatta

SEQ ID NO: 1231139 - DNA, 15 bp, Homo sapiens
ggacttaggagaatt

SEQ ID NO: 1231140 - DNA, 15 bp, Homo sapiens
aggacttaggagaat

SEQ ID NO: 1231141 - DNA, 15 bp, Homo sapiens
caggacttaggagaa

SEQ ID NO: 1231142 - DNA, 15 bp, Homo sapiens
ccaggacttaggaga

SEQ ID NO: 1231143 - DNA, 15 bp, Homo sapiens
cccaggacttaggag

SEQ ID NO: 1231144 - DNA, 15 bp, Homo sapiens
tcccaggacttagga

SEQ ID NO: 1231145 - DNA, 15 bp, Homo sapiens
ttcccaggacttagg

SEQ ID NO: 1231146 - DNA, 15 bp, Homo sapiens
cttcccaggacttag

SEQ ID NO: 1231147 - DNA, 15 bp, Homo sapiens
gcttcccaggactta

SEQ ID NO: 1231148 - DNA, 15 bp, Homo sapiens
cgcttcccaggactt

SEQ ID NO: 1231149 - DNA, 15 bp, Homo sapiens
acgcttcccaggact

SEQ ID NO: 1231150 - DNA, 15 bp, Homo sapiens
aacgcttcccaggac

SEQ ID NO: 1231151 - DNA, 15 bp, Homo sapiens
caacgcttcccagga

SEQ ID NO: 1231152 - DNA, 15 bp, Homo sapiens
tcaacgcttcccagg

SEQ ID NO: 1231153 - DNA, 15 bp, Homo sapiens
gtcaacgcttcccag

SEQ ID NO: 1231154 - DNA, 15 bp, Homo sapiens
ggtcaacgcttccca

SEQ ID NO: 1231155 - DNA, 15 bp, Homo sapiens
gggtcaacgcttccc

SEQ ID NO: 1231156 - DNA, 15 bp, Homo sapiens
tgggtcaacgcttcc

SEQ ID NO: 1231157 - DNA, 15 bp, Homo sapiens
ttgggtcaacgcttc

SEQ ID NO: 1231158 - DNA, 15 bp, Homo sapiens
gttgggtcaacgctt

SEQ ID NO: 1231159 - DNA, 15 bp, Homo sapiens
agttgggtcaacgct

SEQ ID NO: 1231160 - DNA, 15 bp, Homo sapiens
aagttgggtcaacgc

SEQ ID NO: 1231161 - DNA, 15 bp, Homo sapiens
aaagttgggtcaacg

SEQ ID NO: 1231162 - DNA, 15 bp, Homo sapiens
taaagttgggtcaac

SEQ ID NO: 1231163 - DNA, 15 bp, Homo sapiens
ataaagttgggtcaa

SEQ ID NO: 1231164 - DNA, 15 bp, Homo sapiens
cataaagttgggtca

SEQ ID NO: 1231165 - DNA, 15 bp, Homo sapiens
ccataaagttgggtc

SEQ ID NO: 1231166 - DNA, 15 bp, Homo sapiens
accataaagttgggt

SEQ ID NO: 1231167 - DNA, 15 bp, Homo sapiens
taccataaagttggg

SEQ ID NO: 1231168 - DNA, 15 bp, Homo sapiens
ttaccataaagttgg

SEQ ID NO: 1231169 - DNA, 15 bp, Homo sapiens
tttaccataaagttg

SEQ ID NO: 1231170 - DNA, 15 bp, Homo sapiens
ctttaccataaagtt

SEQ ID NO: 1231171 - DNA, 15 bp, Homo sapiens
tctttaccataaagt

SEQ ID NO: 1231172 - DNA, 15 bp, Homo sapiens
atctttaccataaag

SEQ ID NO: 1231173 - DNA, 15 bp, Homo sapiens
tatctttaccataaa

SEQ ID NO: 1231174 - DNA, 15 bp, Homo sapiens
ttatctttaccataa

SEQ ID NO: 1231175 - DNA, 15 bp, Homo sapiens
attatctttaccata

SEQ ID NO: 1231176 - DNA, 15 bp, Homo sapiens
aattatctttaccat

SEQ ID NO: 1231177 - DNA, 15 bp, Homo sapiens
gaattatctttacca

SEQ ID NO: 1231178 - DNA, 15 bp, Homo sapiens
ggaattatctttacc

SEQ ID NO: 1231179 - DNA, 15 bp, Homo sapiens
tggaattatctttac

SEQ ID NO: 1231180 - DNA, 15 bp, Homo sapiens
ctggaattatcttta

SEQ ID NO: 1231181 - DNA, 15 bp, Homo sapiens
tctggaattatcttt

SEQ ID NO: 1231182 - DNA, 15 bp, Homo sapiens
ttctggaattatctt

SEQ ID NO: 1231183 - DNA, 15 bp, Homo sapiens
tttctggaattatct

SEQ ID NO: 1231184 - DNA, 15 bp, Homo sapiens
ctttctggaattatc

SEQ ID NO: 1231185 - DNA, 15 bp, Homo sapiens
actttctggaattat

SEQ ID NO: 1231186 - DNA, 15 bp, Homo sapiens
aactttctggaatta

SEQ ID NO: 1231187 - DNA, 15 bp, Homo sapiens
aaactttctggaatt

SEQ ID NO: 1231188 - DNA, 15 bp, Homo sapiens
taaactttctggaat

SEQ ID NO: 1231189 - DNA, 15 bp, Homo sapiens
ttaaactttctggaa

SEQ ID NO: 1231190 - DNA, 15 bp, Homo sapiens
attaaactttctgga

SEQ ID NO: 1231191 - DNA, 15 bp, Homo sapiens
gattaaactttctgg

SEQ ID NO: 1231192 - DNA, 15 bp, Homo sapiens
agattaaactttctg

SEQ ID NO: 1231193 - DNA, 15 bp, Homo sapiens
tagattaaactttct

SEQ ID NO: 1231194 - DNA, 15 bp, Homo sapiens
gtagattaaactttc

SEQ ID NO: 1231195 - DNA, 15 bp, Homo sapiens
agtagattaaacttt

SEQ ID NO: 1231196 - DNA, 15 bp, Homo sapiens
cagtagattaaactt

SEQ ID NO: 1231197 - DNA, 15 bp, Homo sapiens
tcagtagattaaact

SEQ ID NO: 1231198 - DNA, 15 bp, Homo sapiens
gtcagtagattaaac

SEQ ID NO: 1231199 - DNA, 15 bp, Homo sapiens
tgtcagtagattaaa

SEQ ID NO: 1231200 - DNA, 15 bp, Homo sapiens
ctgtcagtagattaa

SEQ ID NO: 1231201 - DNA, 15 bp, Homo sapiens
actgtcagtagatta

SEQ ID NO: 1231202 - DNA, 15 bp, Homo sapiens
gactgtcagtagatt

SEQ ID NO: 1231203 - DNA, 15 bp, Homo sapiens
tgactgtcagtagat

SEQ ID NO: 1231204 - DNA, 15 bp, Homo sapiens
ttgactgtcagtaga

SEQ ID NO: 1231205 - DNA, 15 bp, Homo sapiens
tttgactgtcagtag

SEQ ID NO: 1231206 - DNA, 15 bp, Homo sapiens
gtttgactgtcagta

SEQ ID NO: 1231207 - DNA, 15 bp, Homo sapiens
tgtttgactgtcagt

SEQ ID NO: 1231208 - DNA, 15 bp, Homo sapiens
ctgtttgactgtcag

SEQ ID NO: 1231209 - DNA, 15 bp, Homo sapiens
tctgtttgactgtca

SEQ ID NO: 1231210 - DNA, 15 bp, Homo sapiens
ttctgtttgactgtc

SEQ ID NO: 1231211 - DNA, 15 bp, Homo sapiens
attctgtttgactgt

SEQ ID NO: 1231212 - DNA, 15 bp, Homo sapiens
cattctgtttgactg

SEQ ID NO: 1231213 - DNA, 15 bp, Homo sapiens
acattctgtttgact

SEQ ID NO: 1231214 - DNA, 15 bp, Homo sapiens
tacattctgtttgac

SEQ ID NO: 1231215 - DNA, 15 bp, Homo sapiens
ctacattctgtttga

SEQ ID NO: 1231216 - DNA, 15 bp, Homo sapiens
gctacattctgtttg

SEQ ID NO: 1231217 - DNA, 15 bp, Homo sapiens
agctacattctgttt

SEQ ID NO: 1231218 - DNA, 15 bp, Homo sapiens
tagctacattctgtt

SEQ ID NO: 1231219 - DNA, 15 bp, Homo sapiens
ctagctacattctgt

SEQ ID NO: 1231220 - DNA, 15 bp, Homo sapiens
tctagctacattctg

SEQ ID NO: 1231221 - DNA, 15 bp, Homo sapiens
ttctagctacattct

SEQ ID NO: 1231222 - DNA, 15 bp, Homo sapiens
cttctagctacattc

SEQ ID NO: 1231223 - DNA, 15 bp, Homo sapiens
acttctagctacatt

SEQ ID NO: 1231224 - DNA, 15 bp, Homo sapiens
gacttctagctacat

SEQ ID NO: 1231225 - DNA, 15 bp, Homo sapiens
ggacttctagctaca

SEQ ID NO: 1231226 - DNA, 15 bp, Homo sapiens
tggacttctagctac

SEQ ID NO: 1231227 - DNA, 15 bp, Homo sapiens
ctggacttctagcta

SEQ ID NO: 1231228 - DNA, 15 bp, Homo sapiens
actggacttctagct

SEQ ID NO: 1231229 - DNA, 15 bp, Homo sapiens
aactggacttctagc

SEQ ID NO: 1231230 - DNA, 15 bp, Homo sapiens
aaactggacttctag

SEQ ID NO: 1231231 - DNA, 15 bp, Homo sapiens
caaactggacttcta

SEQ ID NO: 1231232 - DNA, 15 bp, Homo sapiens
ccaaactggacttct

SEQ ID NO: 1231233 - DNA, 15 bp, Homo sapiens
gccaaactggacttc

SEQ ID NO: 1231234 - DNA, 15 bp, Homo sapiens
agccaaactggactt

SEQ ID NO: 1231235 - DNA, 15 bp, Homo sapiens
aagccaaactggact

SEQ ID NO: 1231236 - DNA, 15 bp, Homo sapiens
gaagccaaactggac

SEQ ID NO: 1231237 - DNA, 15 bp, Homo sapiens
tgaagccaaactgga

SEQ ID NO: 1231238 - DNA, 15 bp, Homo sapiens
ttgaagccaaactgg

SEQ ID NO: 1231239 - DNA, 15 bp, Homo sapiens
tttgaagccaaactg

SEQ ID NO: 1231240 - DNA, 15 bp, Homo sapiens
ttttgaagccaaact

SEQ ID NO: 1231241 - DNA, 15 bp, Homo sapiens
gttttgaagccaaac

SEQ ID NO: 1231242 - DNA, 15 bp, Homo sapiens
ggttttgaagccaaa

SEQ ID NO: 1231243 - DNA, 15 bp, Homo sapiens
aggttttgaagccaa

SEQ ID NO: 1231244 - DNA, 15 bp, Homo sapiens
caggttttgaagcca

SEQ ID NO: 1231245 - DNA, 15 bp, Homo sapiens
acaggttttgaagcc

SEQ ID NO: 1231246 - DNA, 15 bp, Homo sapiens
cacaggttttgaagc

SEQ ID NO: 1231247 - DNA, 15 bp, Homo sapiens
gcacaggttttgaag

SEQ ID NO: 1231248 - DNA, 15 bp, Homo sapiens
agcacaggttttgaa

SEQ ID NO: 1231249 - DNA, 15 bp, Homo sapiens
tagcacaggttttga

SEQ ID NO: 1231250 - DNA, 15 bp, Homo sapiens
ctagcacaggttttg

SEQ ID NO: 1231251 - DNA, 15 bp, Homo sapiens
actagcacaggtttt

SEQ ID NO: 1231252 - DNA, 15 bp, Homo sapiens
tactagcacaggttt

SEQ ID NO: 1231253 - DNA, 15 bp, Homo sapiens
gtactagcacaggtt

SEQ ID NO: 1231254 - DNA, 15 bp, Homo sapiens
agtactagcacaggt

SEQ ID NO: 1231255 - DNA, 15 bp, Homo sapiens
gagtactagcacagg

SEQ ID NO: 1231256 - DNA, 15 bp, Homo sapiens
tgagtactagcacag

SEQ ID NO: 1231257 - DNA, 15 bp, Homo sapiens
atgagtactagcaca

SEQ ID NO: 1231258 - DNA, 15 bp, Homo sapiens
catgagtactagcac

SEQ ID NO: 1231259 - DNA, 15 bp, Homo sapiens
gcatgagtactagca

SEQ ID NO: 1231260 - DNA, 15 bp, Homo sapiens
agcatgagtactagc

SEQ ID NO: 1231261 - DNA, 15 bp, Homo sapiens
aagcatgagtactag

SEQ ID NO: 1231262 - DNA, 15 bp, Homo sapiens
gaagcatgagtacta

SEQ ID NO: 1231263 - DNA, 15 bp, Homo sapiens
agaagcatgagtact

SEQ ID NO: 1231264 - DNA, 15 bp, Homo sapiens
cagaagcatgagtac

SEQ ID NO: 1231265 - DNA, 15 bp, Homo sapiens
tcagaagcatgagta

SEQ ID NO: 1231266 - DNA, 15 bp, Homo sapiens
gtcagaagcatgagt

SEQ ID NO: 1231267 - DNA, 15 bp, Homo sapiens
agtcagaagcatgag

SEQ ID NO: 1231268 - DNA, 15 bp, Homo sapiens
cagtcagaagcatga

SEQ ID NO: 1231269 - DNA, 15 bp, Homo sapiens
ccagtcagaagcatg

SEQ ID NO: 1231270 - DNA, 15 bp, Homo sapiens
accagtcagaagcat

SEQ ID NO: 1231271 - DNA, 15 bp, Homo sapiens
taccagtcagaagca

SEQ ID NO: 1231272 - DNA, 15 bp, Homo sapiens
ctaccagtcagaagc

SEQ ID NO: 1231273 - DNA, 15 bp, Homo sapiens
gctaccagtcagaag

SEQ ID NO: 1231274 - DNA, 15 bp, Homo sapiens
agctaccagtcagaa

SEQ ID NO: 1231275 - DNA, 15 bp, Homo sapiens
cagctaccagtcaga

SEQ ID NO: 1231276 - DNA, 15 bp, Homo sapiens
gcagctaccagtcag

SEQ ID NO: 1231277 - DNA, 15 bp, Homo sapiens
tgcagctaccagtca

SEQ ID NO: 1231278 - DNA, 15 bp, Homo sapiens
ttgcagctaccagtc

SEQ ID NO: 1231279 - DNA, 15 bp, Homo sapiens
cttgcagctaccagt

SEQ ID NO: 1231280 - DNA, 15 bp, Homo sapiens
ccttgcagctaccag

SEQ ID NO: 1231281 - DNA, 15 bp, Homo sapiens
cccttgcagctacca

SEQ ID NO: 1231282 - DNA, 15 bp, Homo sapiens
ccccttgcagctacc

SEQ ID NO: 1231283 - DNA, 15 bp, Homo sapiens
accccttgcagctac

SEQ ID NO: 1231284 - DNA, 15 bp, Homo sapiens
caccccttgcagcta

SEQ ID NO: 1231285 - DNA, 15 bp, Homo sapiens
ccaccccttgcagct

SEQ ID NO: 1231286 - DNA, 15 bp, Homo sapiens
cccaccccttgcagc

SEQ ID NO: 1231287 - DNA, 15 bp, Homo sapiens
ccccaccccttgcag

SEQ ID NO: 1231288 - DNA, 15 bp, Homo sapiens
cccccaccccttgca

SEQ ID NO: 1231289 - DNA, 15 bp, Homo sapiens
tcccccaccccttgc

SEQ ID NO: 1231290 - DNA, 15 bp, Homo sapiens
atcccccaccccttg

SEQ ID NO: 1231291 - DNA, 15 bp, Homo sapiens
tatcccccacccctt

SEQ ID NO: 1231292 - DNA, 15 bp, Homo sapiens
gtatcccccacccct

SEQ ID NO: 1231293 - DNA, 15 bp, Homo sapiens
agtatcccccacccc

SEQ ID NO: 1231294 - DNA, 15 bp, Homo sapiens
gagtatcccccaccc

SEQ ID NO: 1231295 - DNA, 15 bp, Homo sapiens
cgagtatcccccacc

SEQ ID NO: 1231296 - DNA, 15 bp, Homo sapiens
ccgagtatcccccac

SEQ ID NO: 1231297 - DNA, 15 bp, Homo sapiens
cccgagtatccccca

SEQ ID NO: 1231298 - DNA, 15 bp, Homo sapiens
tcccgagtatccccc

SEQ ID NO: 1231299 - DNA, 15 bp, Homo sapiens
atcccgagtatcccc

SEQ ID NO: 1231300 - DNA, 15 bp, Homo sapiens
tatcccgagtatccc

SEQ ID NO: 1231301 - DNA, 15 bp, Homo sapiens
gtatcccgagtatcc

SEQ ID NO: 1231302 - DNA, 15 bp, Homo sapiens
agtatcccgagtatc

SEQ ID NO: 1231303 - DNA, 15 bp, Homo sapiens
gagtatcccgagtat

SEQ ID NO: 1231304 - DNA, 15 bp, Homo sapiens
tgagtatcccgagta

SEQ ID NO: 1231305 - DNA, 15 bp, Homo sapiens
atgagtatcccgagt

SEQ ID NO: 1231306 - DNA, 15 bp, Homo sapiens
tatgagtatcccgag

SEQ ID NO: 1231307 - DNA, 15 bp, Homo sapiens
ttatgagtatcccga

SEQ ID NO: 1231308 - DNA, 15 bp, Homo sapiens
tttatgagtatcccg

SEQ ID NO: 1231309 - DNA, 15 bp, Homo sapiens
ctttatgagtatccc

SEQ ID NO: 1231310 - DNA, 15 bp, Homo sapiens
gctttatgagtatcc

SEQ ID NO: 1231311 - DNA, 15 bp, Homo sapiens
ggctttatgagtatc

SEQ ID NO: 1231312 - DNA, 15 bp, Homo sapiens
cggctttatgagtat

SEQ ID NO: 1231313 - DNA, 15 bp, Homo sapiens
gcggctttatgagta

SEQ ID NO: 1231314 - DNA, 15 bp, Homo sapiens
agcggctttatgagt

SEQ ID NO: 1231315 - DNA, 15 bp, Homo sapiens
tagcggctttatgag

SEQ ID NO: 1231316 - DNA, 15 bp, Homo sapiens
gtagcggctttatga

SEQ ID NO: 1231317 - DNA, 15 bp, Homo sapiens
ggtagcggctttatg

SEQ ID NO: 1231318 - DNA, 15 bp, Homo sapiens
tggtagcggctttat

SEQ ID NO: 1231319 - DNA, 15 bp, Homo sapiens
gtggtagcggcttta

SEQ ID NO: 1231320 - DNA, 15 bp, Homo sapiens
agtggtagcggcttt

SEQ ID NO: 1231321 - DNA, 15 bp, Homo sapiens
aagtggtagcggctt

SEQ ID NO: 1231322 - DNA, 15 bp, Homo sapiens
aaagtggtagcggct

SEQ ID NO: 1231323 - DNA, 15 bp, Homo sapiens
aaaagtggtagcggc

SEQ ID NO: 1231324 - DNA, 15 bp, Homo sapiens
aaaaagtggtagcgg

SEQ ID NO: 1231325 - DNA, 15 bp, Homo sapiens
aaaaaagtggtagcg

SEQ ID NO: 1231326 - DNA, 15 bp, Homo sapiens
caaaaaagtggtagc

SEQ ID NO: 1231327 - DNA, 15 bp, Homo sapiens
tcaaaaaagtggtag

SEQ ID NO: 1231328 - DNA, 15 bp, Homo sapiens
ttcaaaaaagtggta

SEQ ID NO: 1231329 - DNA, 15 bp, Homo sapiens
tttcaaaaaagtggt

SEQ ID NO: 1231330 - DNA, 15 bp, Homo sapiens
ttttcaaaaaagtgg

SEQ ID NO: 1231331 - DNA, 15 bp, Homo sapiens
attttcaaaaaagtg

SEQ ID NO: 1231332 - DNA, 15 bp, Homo sapiens
gattttcaaaaaagt

SEQ ID NO: 1231333 - DNA, 15 bp, Homo sapiens
tgattttcaaaaaag

SEQ ID NO: 1231334 - DNA, 15 bp, Homo sapiens
ttgattttcaaaaaa

SEQ ID NO: 1231335 - DNA, 15 bp, Homo sapiens
attgattttcaaaaa

SEQ ID NO: 1231336 - DNA, 15 bp, Homo sapiens
aattgattttcaaaa

SEQ ID NO: 1231337 - DNA, 15 bp, Homo sapiens
aaattgattttcaaa

SEQ ID NO: 1231338 - DNA, 15 bp, Homo sapiens
aaaattgattttcaa

SEQ ID NO: 1231339 - DNA, 15 bp, Homo sapiens
aaaaattgattttca

SEQ ID NO: 1231340 - DNA, 15 bp, Homo sapiens
gaaaaattgattttc

SEQ ID NO: 1231341 - DNA, 15 bp, Homo sapiens
tgaaaaattgatttt

SEQ ID NO: 1231342 - DNA, 15 bp, Homo sapiens
ctgaaaaattgattt

SEQ ID NO: 1231343 - DNA, 15 bp, Homo sapiens
actgaaaaattgatt

SEQ ID NO: 1231344 - DNA, 15 bp, Homo sapiens
tactgaaaaattgat

SEQ ID NO: 1231345 - DNA, 15 bp, Homo sapiens
ctactgaaaaattga

SEQ ID NO: 1231346 - DNA, 15 bp, Homo sapiens
actactgaaaaattg

SEQ ID NO: 1231347 - DNA, 15 bp, Homo sapiens
aactactgaaaaatt

SEQ ID NO: 1231348 - DNA, 15 bp, Homo sapiens
aaactactgaaaaat

SEQ ID NO: 1231349 - DNA, 15 bp, Homo sapiens
aaaactactgaaaaa

SEQ ID NO: 1231350 - DNA, 15 bp, Homo sapiens
gaaaactactgaaaa

SEQ ID NO: 1231351 - DNA, 15 bp, Homo sapiens
tgaaaactactgaaa

SEQ ID NO: 1231352 - DNA, 15 bp, Homo sapiens
tttgaaaactactga

SEQ ID NO: 1231353 - DNA, 15 bp, Homo sapiens
ttttgaaaactactg

SEQ ID NO: 1231354 - DNA, 15 bp, Homo sapiens
tttttgaaaactact

SEQ ID NO: 1231355 - DNA, 15 bp, Homo sapiens
gtttttgaaaactac

SEQ ID NO: 1231356 - DNA, 15 bp, Homo sapiens
agtttttgaaaacta

SEQ ID NO: 1231357 - DNA, 15 bp, Homo sapiens
aagtttttgaaaact

SEQ ID NO: 1231358 - DNA, 15 bp, Homo sapiens
caagtttttgaaaac

SEQ ID NO: 1231359 - DNA, 15 bp, Homo sapiens
tcaagtttttgaaaa

SEQ ID NO: 1231360 - DNA, 15 bp, Homo sapiens
ctcaagtttttgaaa

SEQ ID NO: 1231361 - DNA, 15 bp, Homo sapiens
tctcaagtttttgaa

SEQ ID NO: 1231362 - DNA, 15 bp, Homo sapiens
ttctcaagtttttga

SEQ ID NO: 1231363 - DNA, 15 bp, Homo sapiens
attctcaagtttttg

SEQ ID NO: 1231364 - DNA, 15 bp, Homo sapiens
cattctcaagttttt

SEQ ID NO: 1231365 - DNA, 15 bp, Homo sapiens
tcattctcaagtttt

SEQ ID NO: 1231366 - DNA, 15 bp, Homo sapiens
ttcattctcaagttt

SEQ ID NO: 1231367 - DNA, 15 bp, Homo sapiens
gttcattctcaagtt

SEQ ID NO: 1231368 - DNA, 15 bp, Homo sapiens
ggttcattctcaagt

SEQ ID NO: 1231369 - DNA, 15 bp, Homo sapiens
tggttcattctcaag

SEQ ID NO: 1231370 - DNA, 15 bp, Homo sapiens
ttggttcattctcaa

SEQ ID NO: 1231371 - DNA, 15 bp, Homo sapiens
gttggttcattctca

SEQ ID NO: 1231372 - DNA, 15 bp, Homo sapiens
agttggttcattctc

SEQ ID NO: 1231373 - DNA, 15 bp, Homo sapiens
aagttggttcattct

SEQ ID NO: 1231374 - DNA, 15 bp, Homo sapiens
aaagttggttcattc

SEQ ID NO: 1231375 - DNA, 15 bp, Homo sapiens
taaagttggttcatt

SEQ ID NO: 1231376 - DNA, 15 bp, Homo sapiens
gtaaagttggttcat

SEQ ID NO: 1231377 - DNA, 15 bp, Homo sapiens
ggtaaagttggttca

SEQ ID NO: 1231378 - DNA, 15 bp, Homo sapiens
tggtaaagttggttc

SEQ ID NO: 1231379 - DNA, 15 bp, Homo sapiens
ttggtaaagttggtt

SEQ ID NO: 1231380 - DNA, 15 bp, Homo sapiens
cttggtaaagttggt

SEQ ID NO: 1231381 - DNA, 15 bp, Homo sapiens
tcttggtaaagttgg

SEQ ID NO: 1231382 - DNA, 15 bp, Homo sapiens
ttcttggtaaagttg

SEQ ID NO: 1231383 - DNA, 15 bp, Homo sapiens
cattcttggtaaagt

SEQ ID NO: 1231384 - DNA, 15 bp, Homo sapiens
gcattcttggtaaag

SEQ ID NO: 1231385 - DNA, 15 bp, Homo sapiens
ggcattcttggtaaa

SEQ ID NO: 1231386 - DNA, 15 bp, Homo sapiens
tggcattcttggtaa

SEQ ID NO: 1231387 - DNA, 15 bp, Homo sapiens
atggcattcttggta

SEQ ID NO: 1231388 - DNA, 15 bp, Homo sapiens
aatggcattcttggt

SEQ ID NO: 1231389 - DNA, 15 bp, Homo sapiens
caatggcattcttgg

SEQ ID NO: 1231390 - DNA, 15 bp, Homo sapiens
ccaatggcattcttg

SEQ ID NO: 1231391 - DNA, 15 bp, Homo sapiens
accaatggcattctt

SEQ ID NO: 1231392 - DNA, 15 bp, Homo sapiens
taccaatggcattct

SEQ ID NO: 1231393 - DNA, 15 bp, Homo sapiens
ttaccaatggcattc

SEQ ID NO: 1231394 - DNA, 15 bp, Homo sapiens
gttaccaatggcatt

SEQ ID NO: 1231395 - DNA, 15 bp, Homo sapiens
tgttaccaatggcat

SEQ ID NO: 1231396 - DNA, 15 bp, Homo sapiens
gtgttaccaatggca

SEQ ID NO: 1231397 - DNA, 15 bp, Homo sapiens
agtgttaccaatggc

SEQ ID NO: 1231398 - DNA, 15 bp, Homo sapiens
cagtgttaccaatgg

SEQ ID NO: 1231399 - DNA, 15 bp, Homo sapiens
tcagtgttaccaatg

SEQ ID NO: 1231400 - DNA, 15 bp, Homo sapiens
ttcagtgttaccaat

SEQ ID NO: 1231401 - DNA, 15 bp, Homo sapiens
gttcagtgttaccaa

SEQ ID NO: 1231402 - DNA, 15 bp, Homo sapiens
cgttcagtgttacca

SEQ ID NO: 1231403 - DNA, 15 bp, Homo sapiens
gcgttcagtgttacc

SEQ ID NO: 1231404 - DNA, 15 bp, Homo sapiens
agcgttcagtgttac

SEQ ID NO: 1231405 - DNA, 15 bp, Homo sapiens
cagcgttcagtgtta

SEQ ID NO: 1231406 - DNA, 15 bp, Homo sapiens
acagcgttcagtgtt

SEQ ID NO: 1231407 - DNA, 15 bp, Homo sapiens
tacagcgttcagtgt

SEQ ID NO: 1231408 - DNA, 15 bp, Homo sapiens
ttacagcgttcagtg

SEQ ID NO: 1231409 - DNA, 15 bp, Homo sapiens
tttacagcgttcagt

SEQ ID NO: 1231410 - DNA, 15 bp, Homo sapiens
ttttacagcgttcag

SEQ ID NO: 1231411 - DNA, 15 bp, Homo sapiens
attttacagcgttca

SEQ ID NO: 1231412 - DNA, 15 bp, Homo sapiens
tattttacagcgttc

SEQ ID NO: 1231413 - DNA, 15 bp, Homo sapiens
ctattttacagcgtt

SEQ ID NO: 1231414 - DNA, 15 bp, Homo sapiens
gctattttacagcgt

SEQ ID NO: 1231415 - DNA, 15 bp, Homo sapiens
agctattttacagcg

SEQ ID NO: 1231416 - DNA, 15 bp, Homo sapiens
aagctattttacagc

SEQ ID NO: 1231417 - DNA, 15 bp, Homo sapiens
taagctattttacag

SEQ ID NO: 1231418 - DNA, 15 bp, Homo sapiens
ttaagctattttaca

SEQ ID NO: 1231419 - DNA, 15 bp, Homo sapiens
tttaagctattttac

SEQ ID NO: 1231420 - DNA, 15 bp, Homo sapiens
tttttaagctatttt

SEQ ID NO: 1231421 - DNA, 15 bp, Homo sapiens
ctttttaagctattt

SEQ ID NO: 1231422 - DNA, 15 bp, Homo sapiens
gctttttaagctatt

SEQ ID NO: 1231423 - DNA, 15 bp, Homo sapiens
cgctttttaagctat

SEQ ID NO: 1231424 - DNA, 15 bp, Homo sapiens
gcgctttttaagcta

SEQ ID NO: 1231425 - DNA, 15 bp, Homo sapiens
tgcgctttttaagct

SEQ ID NO: 1231426 - DNA, 15 bp, Homo sapiens
atgcgctttttaagc

SEQ ID NO: 1231427 - DNA, 15 bp, Homo sapiens
aatgcgctttttaag

SEQ ID NO: 1231428 - DNA, 15 bp, Homo sapiens
aaatgcgctttttaa

SEQ ID NO: 1231429 - DNA, 15 bp, Homo sapiens
taaatgcgcttttta

SEQ ID NO: 1231430 - DNA, 15 bp, Homo sapiens
gtaaatgcgcttttt

SEQ ID NO: 1231431 - DNA, 15 bp, Homo sapiens
tgtaaatgcgctttt

SEQ ID NO: 1231432 - DNA, 15 bp, Homo sapiens
atgtaaatgcgcttt

SEQ ID NO: 1231433 - DNA, 15 bp, Homo sapiens
aatgtaaatgcgctt

SEQ ID NO: 1231434 - DNA, 15 bp, Homo sapiens
taatgtaaatgcgct

SEQ ID NO: 1231435 - DNA, 15 bp, Homo sapiens
ataatgtaaatgcgc

SEQ ID NO: 1231436 - DNA, 15 bp, Homo sapiens
cataatgtaaatgcg

SEQ ID NO: 1231437 - DNA, 15 bp, Homo sapiens
tcataatgtaaatgc

SEQ ID NO: 1231438 - DNA, 15 bp, Homo sapiens
gtcataatgtaaatg

SEQ ID NO: 1231439 - DNA, 15 bp, Homo sapiens
agtcataatgtaaat

SEQ ID NO: 1231440 - DNA, 15 bp, Homo sapiens
tagtcataatgtaaa

SEQ ID NO: 1231441 - DNA, 15 bp, Homo sapiens
gtagtcataatgtaa

SEQ ID NO: 1231442 - DNA, 15 bp, Homo sapiens
tgtagtcataatgta

SEQ ID NO: 1231443 - DNA, 15 bp, Homo sapiens
ctgtagtcataatgt

SEQ ID NO: 1231444 - DNA, 15 bp, Homo sapiens
actgtagtcataatg

SEQ ID NO: 1231445 - DNA, 15 bp, Homo sapiens
aactgtagtcataat

SEQ ID NO: 1231446 - DNA, 15 bp, Homo sapiens
caactgtagtcataa

SEQ ID NO: 1231447 - DNA, 15 bp, Homo sapiens
acaactgtagtcata

SEQ ID NO: 1231448 - DNA, 15 bp, Homo sapiens
tacaactgtagtcat

SEQ ID NO: 1231449 - DNA, 15 bp, Homo sapiens
ttacaactgtagtca

SEQ ID NO: 1231450 - DNA, 15 bp, Homo sapiens
tttacaactgtagtc

SEQ ID NO: 1231451 - DNA, 15 bp, Homo sapiens
ctttacaactgtagt

SEQ ID NO: 1231452 - DNA, 15 bp, Homo sapiens
tctttacaactgtag

SEQ ID NO: 1231453 - DNA, 15 bp, Homo sapiens
ctctttacaactgta

SEQ ID NO: 1231454 - DNA, 15 bp, Homo sapiens
actctttacaactgt

SEQ ID NO: 1231455 - DNA, 15 bp, Homo sapiens
tactctttacaactg

SEQ ID NO: 1231456 - DNA, 15 bp, Homo sapiens
ctactctttacaact

SEQ ID NO: 1231457 - DNA, 15 bp, Homo sapiens
cctactctttacaac

SEQ ID NO: 1231458 - DNA, 15 bp, Homo sapiens
acctactctttacaa

SEQ ID NO: 1231459 - DNA, 15 bp, Homo sapiens
aacctactctttaca

SEQ ID NO: 1231460 - DNA, 15 bp, Homo sapiens
caacctactctttac

SEQ ID NO: 1231461 - DNA, 15 bp, Homo sapiens
acaacctactcttta

SEQ ID NO: 1231462 - DNA, 15 bp, Homo sapiens
cacaacctactcttt

SEQ ID NO: 1231463 - DNA, 15 bp, Homo sapiens
ccacaacctactctt

SEQ ID NO: 1231464 - DNA, 15 bp, Homo sapiens
tccacaacctactct

SEQ ID NO: 1231465 - DNA, 15 bp, Homo sapiens
ttccacaacctactc

SEQ ID NO: 1231466 - DNA, 15 bp, Homo sapiens
tttccacaacctact

SEQ ID NO: 1231467 - DNA, 15 bp, Homo sapiens
ttttccacaacctac

SEQ ID NO: 1231468 - DNA, 15 bp, Homo sapiens
cttttccacaaccta

SEQ ID NO: 1231469 - DNA, 15 bp, Homo sapiens
ccttttccacaacct

SEQ ID NO: 1231470 - DNA, 15 bp, Homo sapiens
tccttttccacaacc

SEQ ID NO: 1231471 - DNA, 15 bp, Homo sapiens
ttccttttccacaac

SEQ ID NO: 1231472 - DNA, 15 bp, Homo sapiens
attccttttccacaa

SEQ ID NO: 1231473 - DNA, 15 bp, Homo sapiens
tattccttttccaca

SEQ ID NO: 1231474 - DNA, 15 bp, Homo sapiens
ttattccttttccac

SEQ ID NO: 1231475 - DNA, 15 bp, Homo sapiens
cttattccttttcca

SEQ ID NO: 1231476 - DNA, 15 bp, Homo sapiens
acttattccttttcc

SEQ ID NO: 1231477 - DNA, 15 bp, Homo sapiens
tacttattccttttc

SEQ ID NO: 1231478 - DNA, 15 bp, Homo sapiens
ttacttattcctttt

SEQ ID NO: 1231479 - DNA, 15 bp, Homo sapiens
tttacttattccttt

SEQ ID NO: 1231480 - DNA, 15 bp, Homo sapiens
gtttacttattcctt

SEQ ID NO: 1231481 - DNA, 15 bp, Homo sapiens
tgtttacttattcct

SEQ ID NO: 1231482 - DNA, 15 bp, Homo sapiens
atgtttacttattcc

SEQ ID NO: 1231483 - DNA, 15 bp, Homo sapiens
catgtttacttattc

SEQ ID NO: 1231484 - DNA, 15 bp, Homo sapiens
tcatgtttacttatt

SEQ ID NO: 1231485 - DNA, 15 bp, Homo sapiens
atcatgtttacttat

SEQ ID NO: 1231486 - DNA, 15 bp, Homo sapiens
aatcatgtttactta

SEQ ID NO: 1231487 - DNA, 15 bp, Homo sapiens
caatcatgtttactt

SEQ ID NO: 1231488 - DNA, 15 bp, Homo sapiens
gcaatcatgtttact

SEQ ID NO: 1231489 - DNA, 15 bp, Homo sapiens
agcaatcatgtttac

SEQ ID NO: 1231490 - DNA, 15 bp, Homo sapiens
tagcaatcatgttta

SEQ ID NO: 1231491 - DNA, 15 bp, Homo sapiens
atagcaatcatgttt

SEQ ID NO: 1231492 - DNA, 15 bp, Homo sapiens
tatagcaatcatgtt

SEQ ID NO: 1231493 - DNA, 15 bp, Homo sapiens
atatagcaatcatgt

SEQ ID NO: 1231494 - DNA, 15 bp, Homo sapiens
aatatagcaatcatg

SEQ ID NO: 1231495 - DNA, 15 bp, Homo sapiens
aaatatagcaatcat

SEQ ID NO: 1231496 - DNA, 15 bp, Homo sapiens
caaatatagcaatca

SEQ ID NO: 1231497 - DNA, 15 bp, Homo sapiens
ctcaaatatagcaat

SEQ ID NO: 1231498 - DNA, 15 bp, Homo sapiens
gctcaaatatagcaa

SEQ ID NO: 1231499 - DNA, 15 bp, Homo sapiens
ggctcaaatatagca

SEQ ID NO: 1231500 - DNA, 15 bp, Homo sapiens
aggctcaaatatagc

SEQ ID NO: 1231501 - DNA, 15 bp, Homo sapiens
gaggctcaaatatag

SEQ ID NO: 1231502 - DNA, 15 bp, Homo sapiens
tgaggctcaaatata

SEQ ID NO: 1231503 - DNA, 15 bp, Homo sapiens
ctgaggctcaaatat

SEQ ID NO: 1231504 - DNA, 15 bp, Homo sapiens
tctgaggctcaaata

SEQ ID NO: 1231505 - DNA, 15 bp, Homo sapiens
atctgaggctcaaat

SEQ ID NO: 1231506 - DNA, 15 bp, Homo sapiens
aatctgaggctcaaa

SEQ ID NO: 1231507 - DNA, 15 bp, Homo sapiens
aaatctgaggctcaa

SEQ ID NO: 1231508 - DNA, 15 bp, Homo sapiens
caaatctgaggctca

SEQ ID NO: 1231509 - DNA, 15 bp, Homo sapiens
tcaaatctgaggctc

SEQ ID NO: 1231510 - DNA, 15 bp, Homo sapiens
ttcaaatctgaggct

SEQ ID NO: 1231511 - DNA, 15 bp, Homo sapiens
attcaaatctgaggc

SEQ ID NO: 1231512 - DNA, 15 bp, Homo sapiens
cattcaaatctgagg

SEQ ID NO: 1231513 - DNA, 15 bp, Homo sapiens
acattcaaatctgag

SEQ ID NO: 1231514 - DNA, 15 bp, Homo sapiens
gacattcaaatctga

SEQ ID NO: 1231515 - DNA, 15 bp, Homo sapiens
tgacattcaaatctg

SEQ ID NO: 1231516 - DNA, 15 bp, Homo sapiens
gtgacattcaaatct

SEQ ID NO: 1231517 - DNA, 15 bp, Homo sapiens
ggtgacattcaaatc

SEQ ID NO: 1231518 - DNA, 15 bp, Homo sapiens
gggtgacattcaaat

SEQ ID NO: 1231519 - DNA, 15 bp, Homo sapiens
agggtgacattcaaa

SEQ ID NO: 1231520 - DNA, 15 bp, Homo sapiens
cagggtgacattcaa

SEQ ID NO: 1231521 - DNA, 15 bp, Homo sapiens
gcagggtgacattca

SEQ ID NO: 1231522 - DNA, 15 bp, Homo sapiens
agcagggtgacattc

SEQ ID NO: 1231523 - DNA, 15 bp, Homo sapiens
aagcagggtgacatt

SEQ ID NO: 1231524 - DNA, 15 bp, Homo sapiens
aaagcagggtgacat

SEQ ID NO: 1231525 - DNA, 15 bp, Homo sapiens
aaaagcagggtgaca

SEQ ID NO: 1231526 - DNA, 15 bp, Homo sapiens
gaaaagcagggtgac

SEQ ID NO: 1231527 - DNA, 15 bp, Homo sapiens
ggaaaagcagggtga

SEQ ID NO: 1231528 - DNA, 15 bp, Homo sapiens
aggaaaagcagggtg

SEQ ID NO: 1231529 - DNA, 15 bp, Homo sapiens
gaggaaaagcagggt

SEQ ID NO: 1231530 - DNA, 15 bp, Homo sapiens
agaggaaaagcaggg

SEQ ID NO: 1231531 - DNA, 15 bp, Homo sapiens
aagaggaaaagcagg

SEQ ID NO: 1231532 - DNA, 15 bp, Homo sapiens
aaagaggaaaagcag

SEQ ID NO: 1231533 - DNA, 15 bp, Homo sapiens
aaaagaggaaaagca

SEQ ID NO: 1231534 - DNA, 15 bp, Homo sapiens
aaaaagaggaaaagc

SEQ ID NO: 1231535 - DNA, 15 bp, Homo sapiens
aaaaaagaggaaaag

SEQ ID NO: 1231536 - DNA, 15 bp, Homo sapiens
taaaaaagaggaaaa

SEQ ID NO: 1231537 - DNA, 15 bp, Homo sapiens
ctaaaaaagaggaaa

SEQ ID NO: 1231538 - DNA, 15 bp, Homo sapiens
tctaaaaaagaggaa

SEQ ID NO: 1231539 - DNA, 15 bp, Homo sapiens
ttctaaaaaagagga

SEQ ID NO: 1231540 - DNA, 15 bp, Homo sapiens
attctaaaaaagagg

SEQ ID NO: 1231541 - DNA, 15 bp, Homo sapiens
gattctaaaaaagag

SEQ ID NO: 1231542 - DNA, 15 bp, Homo sapiens
tgattctaaaaaaga

SEQ ID NO: 1231543 - DNA, 15 bp, Homo sapiens
ctgattctaaaaaag

SEQ ID NO: 1231544 - DNA, 15 bp, Homo sapiens
cctgattctaaaaaa

SEQ ID NO: 1231545 - DNA, 15 bp, Homo sapiens
ccctgattctaaaaa

SEQ ID NO: 1231546 - DNA, 15 bp, Homo sapiens
tccctgattctaaaa

SEQ ID NO: 1231547 - DNA, 15 bp, Homo sapiens
gtccctgattctaaa

SEQ ID NO: 1231548 - DNA, 15 bp, Homo sapiens
agtccctgattctaa

SEQ ID NO: 1231549 - DNA, 15 bp, Homo sapiens
gagtccctgattcta

SEQ ID NO: 1231550 - DNA, 15 bp, Homo sapiens
tgagtccctgattct

SEQ ID NO: 1231551 - DNA, 15 bp, Homo sapiens
gtgagtccctgattc

SEQ ID NO: 1231552 - DNA, 15 bp, Homo sapiens
agtgagtccctgatt

SEQ ID NO: 1231553 - DNA, 15 bp, Homo sapiens
aagtgagtccctgat

SEQ ID NO: 1231554 - DNA, 15 bp, Homo sapiens
aaagtgagtccctga

SEQ ID NO: 1231555 - DNA, 15 bp, Homo sapiens
caaagtgagtccctg

SEQ ID NO: 1231556 - DNA, 15 bp, Homo sapiens
acaaagtgagtccct

SEQ ID NO: 1231557 - DNA, 15 bp, Homo sapiens
gacaaagtgagtccc

SEQ ID NO: 1231558 - DNA, 15 bp, Homo sapiens
tgacaaagtgagtcc

SEQ ID NO: 1231559 - DNA, 15 bp, Homo sapiens
gtgacaaagtgagtc

SEQ ID NO: 1231560 - DNA, 15 bp, Homo sapiens
tgtgacaaagtgagt

SEQ ID NO: 1231561 - DNA, 15 bp, Homo sapiens
atgtgacaaagtgag

SEQ ID NO: 1231562 - DNA, 15 bp, Homo sapiens
tatgtgacaaagtga

SEQ ID NO: 1231563 - DNA, 15 bp, Homo sapiens
ctatgtgacaaagtg

SEQ ID NO: 1231564 - DNA, 15 bp, Homo sapiens
cctatgtgacaaagt

SEQ ID NO: 1231565 - DNA, 15 bp, Homo sapiens
gcctatgtgacaaag

SEQ ID NO: 1231566 - DNA, 15 bp, Homo sapiens
agcctatgtgacaaa

SEQ ID NO: 1231567 - DNA, 15 bp, Homo sapiens
cagcctatgtgacaa

SEQ ID NO: 1231568 - DNA, 15 bp, Homo sapiens
ccagcctatgtgaca

SEQ ID NO: 1231569 - DNA, 15 bp, Homo sapiens
tccagcctatgtgac

SEQ ID NO: 1231570 - DNA, 15 bp, Homo sapiens
ctccagcctatgtga

SEQ ID NO: 1231571 - DNA, 15 bp, Homo sapiens
actccagcctatgtg

SEQ ID NO: 1231572 - DNA, 15 bp, Homo sapiens
cactccagcctatgt

SEQ ID NO: 1231573 - DNA, 15 bp, Homo sapiens
gcactccagcctatg

SEQ ID NO: 1231574 - DNA, 15 bp, Homo sapiens
tgcactccagcctat

SEQ ID NO: 1231575 - DNA, 15 bp, Homo sapiens
tgatcacaccattgc

SEQ ID NO: 1231576 - DNA, 15 bp, Homo sapiens
atgatcacaccattg

SEQ ID NO: 1231577 - DNA, 15 bp, Homo sapiens
catgatcacaccatt

SEQ ID NO: 1231578 - DNA, 15 bp, Homo sapiens
ccatgatcacaccat

SEQ ID NO: 1231579 - DNA, 15 bp, Homo sapiens
tccatgatcacacca

SEQ ID NO: 1231580 - DNA, 15 bp, Homo sapiens
atccatgatcacacc

SEQ ID NO: 1231581 - DNA, 15 bp, Homo sapiens
gatccatgatcacac

SEQ ID NO: 1231582 - DNA, 15 bp, Homo sapiens
tgatccatgatcaca

SEQ ID NO: 1231583 - DNA, 15 bp, Homo sapiens
gtgatccatgatcac

SEQ ID NO: 1231584 - DNA, 15 bp, Homo sapiens
ggtgatccatgatca

SEQ ID NO: 1231585 - DNA, 15 bp, Homo sapiens
cggtgatccatgatc

SEQ ID NO: 1231586 - DNA, 15 bp, Homo sapiens
gcggtgatccatgat

SEQ ID NO: 1231587 - DNA, 15 bp, Homo sapiens
tgcggtgatccatga

SEQ ID NO: 1231588 - DNA, 15 bp, Homo sapiens
ctgcggtgatccatg

SEQ ID NO: 1231589 - DNA, 15 bp, Homo sapiens
gctgcggtgatccat

SEQ ID NO: 1231590 - DNA, 15 bp, Homo sapiens
ggctgcggtgatcca

SEQ ID NO: 1231591 - DNA, 15 bp, Homo sapiens
aggctgcggtgatcc

SEQ ID NO: 1231592 - DNA, 15 bp, Homo sapiens
gaggctgcggtgatc

SEQ ID NO: 1231593 - DNA, 15 bp, Homo sapiens
tgaggctgcggtgat

SEQ ID NO: 1231594 - DNA, 15 bp, Homo sapiens
ttgaggctgcggtga

SEQ ID NO: 1231595 - DNA, 15 bp, Homo sapiens
gttgaggctgcggtg

SEQ ID NO: 1231596 - DNA, 15 bp, Homo sapiens
ggttgaggctgcggt

SEQ ID NO: 1231597 - DNA, 15 bp, Homo sapiens
gggttgaggctgcgg

SEQ ID NO: 1231598 - DNA, 15 bp, Homo sapiens
agggttgaggctgcg

SEQ ID NO: 1231599 - DNA, 15 bp, Homo sapiens
cagggttgaggctgc

SEQ ID NO: 1231600 - DNA, 15 bp, Homo sapiens
tcagggttgaggctg

SEQ ID NO: 1231601 - DNA, 15 bp, Homo sapiens
ctcagggttgaggct

SEQ ID NO: 1231602 - DNA, 15 bp, Homo sapiens
tctcagggttgaggc

SEQ ID NO: 1231603 - DNA, 15 bp, Homo sapiens
atctcagggttgagg

SEQ ID NO: 1231604 - DNA, 15 bp, Homo sapiens
gatctcagggttgag

SEQ ID NO: 1231605 - DNA, 15 bp, Homo sapiens
tgatctcagggttga

SEQ ID NO: 1231606 - DNA, 15 bp, Homo sapiens
ttgatctcagggttg

SEQ ID NO: 1231607 - DNA, 15 bp, Homo sapiens
cttgatctcagggtt

SEQ ID NO: 1231608 - DNA, 15 bp, Homo sapiens
cacttgatctcaggg

SEQ ID NO: 1231609 - DNA, 15 bp, Homo sapiens
tcacttgatctcagg

SEQ ID NO: 1231610 - DNA, 15 bp, Homo sapiens
atcacttgatctcag

SEQ ID NO: 1231611 - DNA, 15 bp, Homo sapiens
gatcacttgatctca

SEQ ID NO: 1231612 - DNA, 15 bp, Homo sapiens
ggatcacttgatctc

SEQ ID NO: 1231613 - DNA, 15 bp, Homo sapiens
aggatcacttgatct

SEQ ID NO: 1231614 - DNA, 15 bp, Homo sapiens
gaggatcacttgatc

SEQ ID NO: 1231615 - DNA, 15 bp, Homo sapiens
agaggatcacttgat

SEQ ID NO: 1231616 - DNA, 15 bp, Homo sapiens
gttgggaggctgagg

SEQ ID NO: 1231617 - DNA, 15 bp, Homo sapiens
agttgggaggctgag

SEQ ID NO: 1231618 - DNA, 15 bp, Homo sapiens
tagttgggaggctga

SEQ ID NO: 1231619 - DNA, 15 bp, Homo sapiens
gtagttgggaggctg

SEQ ID NO: 1231620 - DNA, 15 bp, Homo sapiens
tagtagttgggaggc

SEQ ID NO: 1231621 - DNA, 15 bp, Homo sapiens
ctagtagttgggagg

SEQ ID NO: 1231622 - DNA, 15 bp, Homo sapiens
cctagtagttgggag

SEQ ID NO: 1231623 - DNA, 15 bp, Homo sapiens
tcctagtagttggga

SEQ ID NO: 1231624 - DNA, 15 bp, Homo sapiens
gtcctagtagttggg

SEQ ID NO: 1231625 - DNA, 15 bp, Homo sapiens
tgtcctagtagttgg

SEQ ID NO: 1231626 - DNA, 15 bp, Homo sapiens
ttgtcctagtagttg

SEQ ID NO: 1231627 - DNA, 15 bp, Homo sapiens
cttgtcctagtagtt

SEQ ID NO: 1231628 - DNA, 15 bp, Homo sapiens
tcttgtcctagtagt

SEQ ID NO: 1231629 - DNA, 15 bp, Homo sapiens
ctcttgtcctagtag

SEQ ID NO: 1231630 - DNA, 15 bp, Homo sapiens
cctcttgtcctagta

SEQ ID NO: 1231631 - DNA, 15 bp, Homo sapiens
gcctcttgtcctagt

SEQ ID NO: 1231632 - DNA, 15 bp, Homo sapiens
cgcctcttgtcctag

SEQ ID NO: 1231633 - DNA, 15 bp, Homo sapiens
acgcctcttgtccta

SEQ ID NO: 1231634 - DNA, 15 bp, Homo sapiens
cacgcctcttgtcct

SEQ ID NO: 1231635 - DNA, 15 bp, Homo sapiens
acacgcctcttgtcc

SEQ ID NO: 1231636 - DNA, 15 bp, Homo sapiens
cacacgcctcttgtc

SEQ ID NO: 1231637 - DNA, 15 bp, Homo sapiens
acacacgcctcttgt

SEQ ID NO: 1231638 - DNA, 15 bp, Homo sapiens
gacacacgcctcttg

SEQ ID NO: 1231639 - DNA, 15 bp, Homo sapiens
tgacacacgcctctt

SEQ ID NO: 1231640 - DNA, 15 bp, Homo sapiens
gtgacacacgcctct

SEQ ID NO: 1231641 - DNA, 15 bp, Homo sapiens
agtgacacacgcctc

SEQ ID NO: 1231642 - DNA, 15 bp, Homo sapiens
tagtgacacacgcct

SEQ ID NO: 1231643 - DNA, 15 bp, Homo sapiens
atagtgacacacgcc

SEQ ID NO: 1231644 - DNA, 15 bp, Homo sapiens
catagtgacacacgc

SEQ ID NO: 1231645 - DNA, 15 bp, Homo sapiens
gcatagtgacacacg

SEQ ID NO: 1231646 - DNA, 15 bp, Homo sapiens
ggcatagtgacacac

SEQ ID NO: 1231647 - DNA, 15 bp, Homo sapiens
tgggcatagtgacac

SEQ ID NO: 1231648 - DNA, 15 bp, Homo sapiens
ctgggcatagtgaca

SEQ ID NO: 1231649 - DNA, 15 bp, Homo sapiens
gctgggcatagtgac

SEQ ID NO: 1231650 - DNA, 15 bp, Homo sapiens
agctgggcatagtga

SEQ ID NO: 1231651 - DNA, 15 bp, Homo sapiens
tagctgggcatagtg

SEQ ID NO: 1231652 - DNA, 15 bp, Homo sapiens
ttagctgggcatagt

SEQ ID NO: 1231653 - DNA, 15 bp, Homo sapiens
attagctgggcatag

SEQ ID NO: 1231654 - DNA, 15 bp, Homo sapiens
aattagctgggcata

SEQ ID NO: 1231655 - DNA, 15 bp, Homo sapiens
taattagctgggcat

SEQ ID NO: 1231656 - DNA, 15 bp, Homo sapiens
ttaattagctgggca

SEQ ID NO: 1231657 - DNA, 15 bp, Homo sapiens
attttttaattagct

SEQ ID NO: 1231658 - DNA, 15 bp, Homo sapiens
aattttttaattagc

SEQ ID NO: 1231659 - DNA, 15 bp, Homo sapiens
caaaaataatttttt

SEQ ID NO: 1231660 - DNA, 15 bp, Homo sapiens
acaaaaataattttt

SEQ ID NO: 1231661 - DNA, 15 bp, Homo sapiens
tacaaaaataatttt

SEQ ID NO: 1231662 - DNA, 15 bp, Homo sapiens
ctacaaaaataattt

SEQ ID NO: 1231663 - DNA, 15 bp, Homo sapiens
tctacaaaaataatt

SEQ ID NO: 1231664 - DNA, 15 bp, Homo sapiens
ctctacaaaaataat

SEQ ID NO: 1231665 - DNA, 15 bp, Homo sapiens
tctctacaaaaataa

SEQ ID NO: 1231666 - DNA, 15 bp, Homo sapiens
aaagtgagaccctgt

SEQ ID NO: 1231667 - DNA, 15 bp, Homo sapiens
caaagtgagaccctg

SEQ ID NO: 1231668 - DNA, 15 bp, Homo sapiens
gcaaagtgagaccct

SEQ ID NO: 1231669 - DNA, 15 bp, Homo sapiens
tgcaaagtgagaccc

SEQ ID NO: 1231670 - DNA, 15 bp, Homo sapiens
ctgcaaagtgagacc

SEQ ID NO: 1231671 - DNA, 15 bp, Homo sapiens
gctgcaaagtgagac

SEQ ID NO: 1231672 - DNA, 15 bp, Homo sapiens
agctgcaaagtgaga

SEQ ID NO: 1231673 - DNA, 15 bp, Homo sapiens
gagctgcaaagtgag

SEQ ID NO: 1231674 - DNA, 15 bp, Homo sapiens
cgagctgcaaagtga

SEQ ID NO: 1231675 - DNA, 15 bp, Homo sapiens
ccgagctgcaaagtg

SEQ ID NO: 1231676 - DNA, 15 bp, Homo sapiens
cccgagctgcaaagt

SEQ ID NO: 1231677 - DNA, 15 bp, Homo sapiens
gcccgagctgcaaag

SEQ ID NO: 1231678 - DNA, 15 bp, Homo sapiens
agcccgagctgcaaa

SEQ ID NO: 1231679 - DNA, 15 bp, Homo sapiens
cagcccgagctgcaa

SEQ ID NO: 1231680 - DNA, 15 bp, Homo sapiens
ccagcccgagctgca

SEQ ID NO: 1231681 - DNA, 15 bp, Homo sapiens
accagcccgagctgc

SEQ ID NO: 1231682 - DNA, 15 bp, Homo sapiens
gaccagcccgagctg

SEQ ID NO: 1231683 - DNA, 15 bp, Homo sapiens
agaccagcccgagct

SEQ ID NO: 1231684 - DNA, 15 bp, Homo sapiens
aagaccagcccgagc

SEQ ID NO: 1231685 - DNA, 15 bp, Homo sapiens
caagaccagcccgag

SEQ ID NO: 1231686 - DNA, 15 bp, Homo sapiens
tcaagaccagcccga

SEQ ID NO: 1231687 - DNA, 15 bp, Homo sapiens
ttcaagaccagcccg

SEQ ID NO: 1231688 - DNA, 15 bp, Homo sapiens
gttcaagaccagccc

SEQ ID NO: 1231689 - DNA, 15 bp, Homo sapiens
gtggaggatcacttg

SEQ ID NO: 1231690 - DNA, 15 bp, Homo sapiens
ggtggaggatcactt

SEQ ID NO: 1231691 - DNA, 15 bp, Homo sapiens
gggtggaggatcact

SEQ ID NO: 1231692 - DNA, 15 bp, Homo sapiens
agggtggaggatcac

SEQ ID NO: 1231693 - DNA, 15 bp, Homo sapiens
gagggtggaggatca

SEQ ID NO: 1231694 - DNA, 15 bp, Homo sapiens
tgagggtggaggatc

SEQ ID NO: 1231695 - DNA, 15 bp, Homo sapiens
ctgagggtggaggat

SEQ ID NO: 1231696 - DNA, 15 bp, Homo sapiens
gctgagggtggagga

SEQ ID NO: 1231697 - DNA, 15 bp, Homo sapiens
agctgagggtggagg

SEQ ID NO: 1231698 - DNA, 15 bp, Homo sapiens
aagctgagggtggag

SEQ ID NO: 1231699 - DNA, 15 bp, Homo sapiens
gaagctgagggtgga

SEQ ID NO: 1231700 - DNA, 15 bp, Homo sapiens
ggaagctgagggtgg

SEQ ID NO: 1231701 - DNA, 15 bp, Homo sapiens
gggaagctgagggtg

SEQ ID NO: 1231702 - DNA, 15 bp, Homo sapiens
tgggaagctgagggt

SEQ ID NO: 1231703 - DNA, 15 bp, Homo sapiens
ttgggaagctgaggg

SEQ ID NO: 1231704 - DNA, 15 bp, Homo sapiens
acttgggaagctgag

SEQ ID NO: 1231705 - DNA, 15 bp, Homo sapiens
gacttgggaagctga

SEQ ID NO: 1231706 - DNA, 15 bp, Homo sapiens
cgacttgggaagctg

SEQ ID NO: 1231707 - DNA, 15 bp, Homo sapiens
gcgacttgggaagct

SEQ ID NO: 1231708 - DNA, 15 bp, Homo sapiens
agcgacttgggaagc

SEQ ID NO: 1231709 - DNA, 15 bp, Homo sapiens
cagcgacttgggaag

SEQ ID NO: 1231710 - DNA, 15 bp, Homo sapiens
ccagcgacttgggaa

SEQ ID NO: 1231711 - DNA, 15 bp, Homo sapiens
cccagcgacttggga

SEQ ID NO: 1231712 - DNA, 15 bp, Homo sapiens
tcccagcgacttggg

SEQ ID NO: 1231713 - DNA, 15 bp, Homo sapiens
atcccagcgacttgg

SEQ ID NO: 1231714 - DNA, 15 bp, Homo sapiens
aatcccagcgacttg

SEQ ID NO: 1231715 - DNA, 15 bp, Homo sapiens
taatcccagcgactt

SEQ ID NO: 1231716 - DNA, 15 bp, Homo sapiens
gtaatcccagcgact

SEQ ID NO: 1231717 - DNA, 15 bp, Homo sapiens
tgtaatcccagcgac

SEQ ID NO: 1231718 - DNA, 15 bp, Homo sapiens
ctgtaatcccagcga

SEQ ID NO: 1231719 - DNA, 15 bp, Homo sapiens
cctgtaatcccagcg

SEQ ID NO: 1231720 - DNA, 15 bp, Homo sapiens
cagcgcctgtaatcc

SEQ ID NO: 1231721 - DNA, 15 bp, Homo sapiens
tcagcgcctgtaatc

SEQ ID NO: 1231722 - DNA, 15 bp, Homo sapiens
gtcagcgcctgtaat

SEQ ID NO: 1231723 - DNA, 15 bp, Homo sapiens
ggtcagcgcctgtaa

SEQ ID NO: 1231724 - DNA, 15 bp, Homo sapiens
gggtcagcgcctgta

SEQ ID NO: 1231725 - DNA, 15 bp, Homo sapiens
tgggtcagcgcctgt

SEQ ID NO: 1231726 - DNA, 15 bp, Homo sapiens
gtgggtcagcgcctg

SEQ ID NO: 1231727 - DNA, 15 bp, Homo sapiens
agtgggtcagcgcct

SEQ ID NO: 1231728 - DNA, 15 bp, Homo sapiens
gagtgggtcagcgcc

SEQ ID NO: 1231729 - DNA, 15 bp, Homo sapiens
agagtgggtcagcgc

SEQ ID NO: 1231730 - DNA, 15 bp, Homo sapiens
cagagtgggtcagcg

SEQ ID NO: 1231731 - DNA, 15 bp, Homo sapiens
gcagagtgggtcagc

SEQ ID NO: 1231732 - DNA, 15 bp, Homo sapiens
tgcagagtgggtcag

SEQ ID NO: 1231733 - DNA, 15 bp, Homo sapiens
atgcagagtgggtca

SEQ ID NO: 1231734 - DNA, 15 bp, Homo sapiens
catgcagagtgggtc

SEQ ID NO: 1231735 - DNA, 15 bp, Homo sapiens
ccatgcagagtgggt

SEQ ID NO: 1231736 - DNA, 15 bp, Homo sapiens
gccatgcagagtggg

SEQ ID NO: 1231737 - DNA, 15 bp, Homo sapiens
agccatgcagagtgg

SEQ ID NO: 1231738 - DNA, 15 bp, Homo sapiens
tagccatgcagagtg

SEQ ID NO: 1231739 - DNA, 15 bp, Homo sapiens
atagccatgcagagt

SEQ ID NO: 1231740 - DNA, 15 bp, Homo sapiens
aatagccatgcagag

SEQ ID NO: 1231741 - DNA, 15 bp, Homo sapiens
gaatagccatgcaga

SEQ ID NO: 1231742 - DNA, 15 bp, Homo sapiens
tgaatagccatgcag

SEQ ID NO: 1231743 - DNA, 15 bp, Homo sapiens
gtgaatagccatgca

SEQ ID NO: 1231744 - DNA, 15 bp, Homo sapiens
ggtgaatagccatgc

SEQ ID NO: 1231745 - DNA, 15 bp, Homo sapiens
gggtgaatagccatg

SEQ ID NO: 1231746 - DNA, 15 bp, Homo sapiens
tgggtgaatagccat

SEQ ID NO: 1231747 - DNA, 15 bp, Homo sapiens
ctgggtgaatagcca

SEQ ID NO: 1231748 - DNA, 15 bp, Homo sapiens
actgggtgaatagcc

SEQ ID NO: 1231749 - DNA, 15 bp, Homo sapiens
aactgggtgaatagc

SEQ ID NO: 1231750 - DNA, 15 bp, Homo sapiens
aaactgggtgaatag

SEQ ID NO: 1231751 - DNA, 15 bp, Homo sapiens
aaaactgggtgaata

SEQ ID NO: 1231752 - DNA, 15 bp, Homo sapiens
aaaaactgggtgaat

SEQ ID NO: 1231753 - DNA, 15 bp, Homo sapiens
gaaaaactgggtgaa

SEQ ID NO: 1231754 - DNA, 15 bp, Homo sapiens
agaaaaactgggtga

SEQ ID NO: 1231755 - DNA, 15 bp, Homo sapiens
tagaaaaactgggtg

SEQ ID NO: 1231756 - DNA, 15 bp, Homo sapiens
ttagaaaaactgggt

SEQ ID NO: 1231757 - DNA, 15 bp, Homo sapiens
tttagaaaaactggg

SEQ ID NO: 1231758 - DNA, 15 bp, Homo sapiens
gtttagaaaaactgg

SEQ ID NO: 1231759 - DNA, 15 bp, Homo sapiens
agtttagaaaaactg

SEQ ID NO: 1231760 - DNA, 15 bp, Homo sapiens
tagtttagaaaaact

SEQ ID NO: 1231761 - DNA, 15 bp, Homo sapiens
atagtttagaaaaac

SEQ ID NO: 1231762 - DNA, 15 bp, Homo sapiens
catagtttagaaaaa

SEQ ID NO: 1231763 - DNA, 15 bp, Homo sapiens
gcatagtttagaaaa

SEQ ID NO: 1231764 - DNA, 15 bp, Homo sapiens
tgcatagtttagaaa

SEQ ID NO: 1231765 - DNA, 15 bp, Homo sapiens
atgcatagtttagaa

SEQ ID NO: 1231766 - DNA, 15 bp, Homo sapiens
aatgcatagtttaga

SEQ ID NO: 1231767 - DNA, 15 bp, Homo sapiens
taatgcatagtttag

SEQ ID NO: 1231768 - DNA, 15 bp, Homo sapiens
ttaatgcatagttta

SEQ ID NO: 1231769 - DNA, 15 bp, Homo sapiens
attaatgcatagttt

SEQ ID NO: 1231770 - DNA, 15 bp, Homo sapiens
cattaatgcatagtt

SEQ ID NO: 1231771 - DNA, 15 bp, Homo sapiens
acattaatgcatagt

SEQ ID NO: 1231772 - DNA, 15 bp, Homo sapiens
aacattaatgcatag

SEQ ID NO: 1231773 - DNA, 15 bp, Homo sapiens
gaacattaatgcata

SEQ ID NO: 1231774 - DNA, 15 bp, Homo sapiens
agaacattaatgcat

SEQ ID NO: 1231775 - DNA, 15 bp, Homo sapiens
aagaacattaatgca

SEQ ID NO: 1231776 - DNA, 15 bp, Homo sapiens
caagaacattaatgc

SEQ ID NO: 1231777 - DNA, 15 bp, Homo sapiens
gcaagaacattaatg

SEQ ID NO: 1231778 - DNA, 15 bp, Homo sapiens
ggcaagaacattaat

SEQ ID NO: 1231779 - DNA, 15 bp, Homo sapiens
aggcaagaacattaa

SEQ ID NO: 1231780 - DNA, 15 bp, Homo sapiens
aaggcaagaacatta

SEQ ID NO: 1231781 - DNA, 15 bp, Homo sapiens
aaaggcaagaacatt

SEQ ID NO: 1231782 - DNA, 15 bp, Homo sapiens
taaaggcaagaacat

SEQ ID NO: 1231783 - DNA, 15 bp, Homo sapiens
ataaaggcaagaaca

SEQ ID NO: 1231784 - DNA, 15 bp, Homo sapiens
tataaaggcaagaac

SEQ ID NO: 1231785 - DNA, 15 bp, Homo sapiens
ttataaaggcaagaa

SEQ ID NO: 1231786 - DNA, 15 bp, Homo sapiens
attataaaggcaaga

SEQ ID NO: 1231787 - DNA, 15 bp, Homo sapiens
aattataaaggcaag

SEQ ID NO: 1231788 - DNA, 15 bp, Homo sapiens
aaattataaaggcaa

SEQ ID NO: 1231789 - DNA, 15 bp, Homo sapiens
gaaattataaaggca

SEQ ID NO: 1231790 - DNA, 15 bp, Homo sapiens
agaaattataaaggc

SEQ ID NO: 1231791 - DNA, 15 bp, Homo sapiens
aagaaattataaagg

SEQ ID NO: 1231792 - DNA, 15 bp, Homo sapiens
aaagaaattataaag

SEQ ID NO: 1231793 - DNA, 15 bp, Homo sapiens
gaaagaaattataaa

SEQ ID NO: 1231794 - DNA, 15 bp, Homo sapiens
agaaagaaattataa

SEQ ID NO: 1231795 - DNA, 15 bp, Homo sapiens
aagaaagaaattata

SEQ ID NO: 1231796 - DNA, 15 bp, Homo sapiens
aaagaaagaaattat

SEQ ID NO: 1231797 - DNA, 15 bp, Homo sapiens
gaaagaaagaaatta

SEQ ID NO: 1231798 - DNA, 15 bp, Homo sapiens
agaaagaaagaaatt

SEQ ID NO: 1231799 - DNA, 15 bp, Homo sapiens
aagaaagaaagaaat

SEQ ID NO: 1231800 - DNA, 15 bp, Homo sapiens
caaaaaaaaaaaaag

SEQ ID NO: 1231801 - DNA, 15 bp, Homo sapiens
aacagaatgagaccc

SEQ ID NO: 1231802 - DNA, 15 bp, Homo sapiens
caacagaatgagacc

SEQ ID NO: 1231803 - DNA, 15 bp, Homo sapiens
gtgggcaacagaatg

SEQ ID NO: 1231804 - DNA, 15 bp, Homo sapiens
cgtgggcaacagaat

SEQ ID NO: 1231805 - DNA, 15 bp, Homo sapiens
gcgtgggcaacagaa

SEQ ID NO: 1231806 - DNA, 15 bp, Homo sapiens
cgcgtgggcaacaga

SEQ ID NO: 1231807 - DNA, 15 bp, Homo sapiens
ccgcgtgggcaacag

SEQ ID NO: 1231808 - DNA, 15 bp, Homo sapiens
cccgcgtgggcaaca

SEQ ID NO: 1231809 - DNA, 15 bp, Homo sapiens
tcccgcgtgggcaac

SEQ ID NO: 1231810 - DNA, 15 bp, Homo sapiens
ctcccgcgtgggcaa

SEQ ID NO: 1231811 - DNA, 15 bp, Homo sapiens
actcccgcgtgggca

SEQ ID NO: 1231812 - DNA, 15 bp, Homo sapiens
cactcccgcgtgggc

SEQ ID NO: 1231813 - DNA, 15 bp, Homo sapiens
gcactcccgcgtggg

SEQ ID NO: 1231814 - DNA, 15 bp, Homo sapiens
tgcactcccgcgtgg

SEQ ID NO: 1231815 - DNA, 15 bp, Homo sapiens
ctgcactcccgcgtg

SEQ ID NO: 1231816 - DNA, 15 bp, Homo sapiens
actgcactcccgcgt

SEQ ID NO: 1231817 - DNA, 15 bp, Homo sapiens
cactgcactcccgcg

SEQ ID NO: 1231818 - DNA, 15 bp, Homo sapiens
ccactgcactcccgc

SEQ ID NO: 1231819 - DNA, 15 bp, Homo sapiens
gccactgcactcccg

SEQ ID NO: 1231820 - DNA, 15 bp, Homo sapiens
cgccactgcactccc

SEQ ID NO: 1231821 - DNA, 15 bp, Homo sapiens
taggaggcggaggtt

SEQ ID NO: 1231822 - DNA, 15 bp, Homo sapiens
ctaggaggcggaggt

SEQ ID NO: 1231823 - DNA, 15 bp, Homo sapiens
cctaggaggcggagg

SEQ ID NO: 1231824 - DNA, 15 bp, Homo sapiens
acctaggaggcggag

SEQ ID NO: 1231825 - DNA, 15 bp, Homo sapiens
aacctaggaggcgga

SEQ ID NO: 1231826 - DNA, 15 bp, Homo sapiens
gaacctaggaggcgg

SEQ ID NO: 1231827 - DNA, 15 bp, Homo sapiens
tgaacctaggaggcg

SEQ ID NO: 1231828 - DNA, 15 bp, Homo sapiens
ctgaacctaggaggc

SEQ ID NO: 1231829 - DNA, 15 bp, Homo sapiens
cctgaacctaggagg

SEQ ID NO: 1231830 - DNA, 15 bp, Homo sapiens
acctgaacctaggag

SEQ ID NO: 1231831 - DNA, 15 bp, Homo sapiens
cacctgaacctagga

SEQ ID NO: 1231832 - DNA, 15 bp, Homo sapiens
tcacctgaacctagg

SEQ ID NO: 1231833 - DNA, 15 bp, Homo sapiens
atcacctgaacctag

SEQ ID NO: 1231834 - DNA, 15 bp, Homo sapiens
aatcacctgaaccta

SEQ ID NO: 1231835 - DNA, 15 bp, Homo sapiens
aaatcacctgaacct

SEQ ID NO: 1231836 - DNA, 15 bp, Homo sapiens
gaaatcacctgaacc

SEQ ID NO: 1231837 - DNA, 15 bp, Homo sapiens
agaaatcacctgaac

SEQ ID NO: 1231838 - DNA, 15 bp, Homo sapiens
gagaaatcacctgaa

SEQ ID NO: 1231839 - DNA, 15 bp, Homo sapiens
ggagaaatcacctga

SEQ ID NO: 1231840 - DNA, 15 bp, Homo sapiens
aggagaaatcacctg

SEQ ID NO: 1231841 - DNA, 15 bp, Homo sapiens
caggagaaatcacct

SEQ ID NO: 1231842 - DNA, 15 bp, Homo sapiens
acaggagaaatcacc

SEQ ID NO: 1231843 - DNA, 15 bp, Homo sapiens
gacaggagaaatcac

SEQ ID NO: 1231844 - DNA, 15 bp, Homo sapiens
agacaggagaaatca

SEQ ID NO: 1231845 - DNA, 15 bp, Homo sapiens
gagacaggagaaatc

SEQ ID NO: 1231846 - DNA, 15 bp, Homo sapiens
tgagacaggagaaat

SEQ ID NO: 1231847 - DNA, 15 bp, Homo sapiens
ctgagacaggagaaa

SEQ ID NO: 1231848 - DNA, 15 bp, Homo sapiens
actgagacaggagaa

SEQ ID NO: 1231849 - DNA, 15 bp, Homo sapiens
gactgagacaggaga

SEQ ID NO: 1231850 - DNA, 15 bp, Homo sapiens
agactgagacaggag

SEQ ID NO: 1231851 - DNA, 15 bp, Homo sapiens
gagactgagacagga

SEQ ID NO: 1231852 - DNA, 15 bp, Homo sapiens
agagactgagacagg

SEQ ID NO: 1231853 - DNA, 15 bp, Homo sapiens
gagagactgagacag

SEQ ID NO: 1231854 - DNA, 15 bp, Homo sapiens
cgagagactgagaca

SEQ ID NO: 1231855 - DNA, 15 bp, Homo sapiens
tcgagagactgagac

SEQ ID NO: 1231856 - DNA, 15 bp, Homo sapiens
ctcgagagactgaga

SEQ ID NO: 1231857 - DNA, 15 bp, Homo sapiens
actcgagagactgag

SEQ ID NO: 1231858 - DNA, 15 bp, Homo sapiens
tactcgagagactga

SEQ ID NO: 1231859 - DNA, 15 bp, Homo sapiens
ctactcgagagactg

SEQ ID NO: 1231860 - DNA, 15 bp, Homo sapiens
gctactcgagagact

SEQ ID NO: 1231861 - DNA, 15 bp, Homo sapiens
tgctactcgagagac

SEQ ID NO: 1231862 - DNA, 15 bp, Homo sapiens
ctgctactcgagaga

SEQ ID NO: 1231863 - DNA, 15 bp, Homo sapiens
cctgctactcgagag

SEQ ID NO: 1231864 - DNA, 15 bp, Homo sapiens
acctgctactcgaga

SEQ ID NO: 1231865 - DNA, 15 bp, Homo sapiens
tacctgctactcgag

SEQ ID NO: 1231866 - DNA, 15 bp, Homo sapiens
atacctgctactcga

SEQ ID NO: 1231867 - DNA, 15 bp, Homo sapiens
aatacctgctactcg

SEQ ID NO: 1231868 - DNA, 15 bp, Homo sapiens
taatacctgctactc

SEQ ID NO: 1231869 - DNA, 15 bp, Homo sapiens
gtaatacctgctact

SEQ ID NO: 1231870 - DNA, 15 bp, Homo sapiens
tgtaatacctgctac

SEQ ID NO: 1231871 - DNA, 15 bp, Homo sapiens
ctgtaatacctgcta

SEQ ID NO: 1231872 - DNA, 15 bp, Homo sapiens
tctgtaatacctgct

SEQ ID NO: 1231873 - DNA, 15 bp, Homo sapiens
atctgtaatacctgc

SEQ ID NO: 1231874 - DNA, 15 bp, Homo sapiens
catctgtaatacctg

SEQ ID NO: 1231875 - DNA, 15 bp, Homo sapiens
acatctgtaatacct

SEQ ID NO: 1231876 - DNA, 15 bp, Homo sapiens
tacatctgtaatacc

SEQ ID NO: 1231877 - DNA, 15 bp, Homo sapiens
atacatctgtaatac

SEQ ID NO: 1231878 - DNA, 15 bp, Homo sapiens
catacatctgtaata

SEQ ID NO: 1231879 - DNA, 15 bp, Homo sapiens
ggcatacatctgtaa

SEQ ID NO: 1231880 - DNA, 15 bp, Homo sapiens
tggcatacatctgta

SEQ ID NO: 1231881 - DNA, 15 bp, Homo sapiens
gtggcatacatctgt

SEQ ID NO: 1231882 - DNA, 15 bp, Homo sapiens
ggtggcatacatctg

SEQ ID NO: 1231883 - DNA, 15 bp, Homo sapiens
tggtggcatacatct

SEQ ID NO: 1231884 - DNA, 15 bp, Homo sapiens
gtggtggcatacatc

SEQ ID NO: 1231885 - DNA, 15 bp, Homo sapiens
cgtggtggcatacat

SEQ ID NO: 1231886 - DNA, 15 bp, Homo sapiens
gcgtggtggcataca

SEQ ID NO: 1231887 - DNA, 15 bp, Homo sapiens
ggcgtggtggcatac

SEQ ID NO: 1231888 - DNA, 15 bp, Homo sapiens
aggcgtggtggcata

SEQ ID NO: 1231889 - DNA, 15 bp, Homo sapiens
taggcgtggtggcat

SEQ ID NO: 1231890 - DNA, 15 bp, Homo sapiens
ctaggcgtggtggca

SEQ ID NO: 1231891 - DNA, 15 bp, Homo sapiens
gctaggcgtggtggc

SEQ ID NO: 1231892 - DNA, 15 bp, Homo sapiens
agctaggcgtggtgg

SEQ ID NO: 1231893 - DNA, 15 bp, Homo sapiens
tagctaggcgtggtg

SEQ ID NO: 1231894 - DNA, 15 bp, Homo sapiens
ttagctaggcgtggt

SEQ ID NO: 1231895 - DNA, 15 bp, Homo sapiens
attagctaggcgtgg

SEQ ID NO: 1231896 - DNA, 15 bp, Homo sapiens
aattagctaggcgtg

SEQ ID NO: 1231897 - DNA, 15 bp, Homo sapiens
aaattagctaggcgt

SEQ ID NO: 1231898 - DNA, 15 bp, Homo sapiens
aaaattagctaggcg

SEQ ID NO: 1231899 - DNA, 15 bp, Homo sapiens
caaaaattagctagg

SEQ ID NO: 1231900 - DNA, 15 bp, Homo sapiens
acaaaaattagctag

SEQ ID NO: 1231901 - DNA, 15 bp, Homo sapiens
tacaaaaattagcta

SEQ ID NO: 1231902 - DNA, 15 bp, Homo sapiens
gaactacaaaaatta

SEQ ID NO: 1231903 - DNA, 15 bp, Homo sapiens
agaactacaaaaatt

SEQ ID NO: 1231904 - DNA, 15 bp, Homo sapiens
aagaactacaaaaat

SEQ ID NO: 1231905 - DNA, 15 bp, Homo sapiens
taagaactacaaaaa

SEQ ID NO: 1231906 - DNA, 15 bp, Homo sapiens
ctaagaactacaaaa

SEQ ID NO: 1231907 - DNA, 15 bp, Homo sapiens
actaagaactacaaa

SEQ ID NO: 1231908 - DNA, 15 bp, Homo sapiens
tactaagaactacaa

SEQ ID NO: 1231909 - DNA, 15 bp, Homo sapiens
ctactaagaactaca

SEQ ID NO: 1231910 - DNA, 15 bp, Homo sapiens
tctactaagaactac

SEQ ID NO: 1231911 - DNA, 15 bp, Homo sapiens
ctctactaagaacta

SEQ ID NO: 1231912 - DNA, 15 bp, Homo sapiens
tctctactaagaact

SEQ ID NO: 1231913 - DNA, 15 bp, Homo sapiens
ttctctactaagaac

SEQ ID NO: 1231914 - DNA, 15 bp, Homo sapiens
cttctctactaagaa

SEQ ID NO: 1231915 - DNA, 15 bp, Homo sapiens
ccttctctactaaga

SEQ ID NO: 1231916 - DNA, 15 bp, Homo sapiens
cccttctctactaag

SEQ ID NO: 1231917 - DNA, 15 bp, Homo sapiens
ccccttctctactaa

SEQ ID NO: 1231918 - DNA, 15 bp, Homo sapiens
accccttctctacta

SEQ ID NO: 1231919 - DNA, 15 bp, Homo sapiens
aaccccttctctact

SEQ ID NO: 1231920 - DNA, 15 bp, Homo sapiens
aaaccccttctctac

SEQ ID NO: 1231921 - DNA, 15 bp, Homo sapiens
gaaaccccttctcta

SEQ ID NO: 1231922 - DNA, 15 bp, Homo sapiens
cgaaaccccttctct

SEQ ID NO: 1231923 - DNA, 15 bp, Homo sapiens
ccgaaaccccttctc

SEQ ID NO: 1231924 - DNA, 15 bp, Homo sapiens
accgaaaccccttct

SEQ ID NO: 1231925 - DNA, 15 bp, Homo sapiens
caccgaaaccccttc

SEQ ID NO: 1231926 - DNA, 15 bp, Homo sapiens
acaccgaaacccctt

SEQ ID NO: 1231927 - DNA, 15 bp, Homo sapiens
cacaccgaaacccct

SEQ ID NO: 1231928 - DNA, 15 bp, Homo sapiens
acacaccgaaacccc

SEQ ID NO: 1231929 - DNA, 15 bp, Homo sapiens
aacacaccgaaaccc

SEQ ID NO: 1231930 - DNA, 15 bp, Homo sapiens
caacacaccgaaacc

SEQ ID NO: 1231931 - DNA, 15 bp, Homo sapiens
ccaacacaccgaaac

SEQ ID NO: 1231932 - DNA, 15 bp, Homo sapiens
gccaacacaccgaaa

SEQ ID NO: 1231933 - DNA, 15 bp, Homo sapiens
ggccaacacaccgaa

SEQ ID NO: 1231934 - DNA, 15 bp, Homo sapiens
tggccaacacaccga

SEQ ID NO: 1231935 - DNA, 15 bp, Homo sapiens
ctggccaacacaccg

SEQ ID NO: 1231936 - DNA, 15 bp, Homo sapiens
cctggccaacacacc

SEQ ID NO: 1231937 - DNA, 15 bp, Homo sapiens
gcctggccaacacac

SEQ ID NO: 1231938 - DNA, 15 bp, Homo sapiens
tgaatcacttgaggt

SEQ ID NO: 1231939 - DNA, 15 bp, Homo sapiens
gtgaatcacttgagg

SEQ ID NO: 1231940 - DNA, 15 bp, Homo sapiens
ggtgaatcacttgag

SEQ ID NO: 1231941 - DNA, 15 bp, Homo sapiens
aggtgaatcacttga

SEQ ID NO: 1231942 - DNA, 15 bp, Homo sapiens
caggtgaatcacttg

SEQ ID NO: 1231943 - DNA, 15 bp, Homo sapiens
gcaggtgaatcactt

SEQ ID NO: 1231944 - DNA, 15 bp, Homo sapiens
ggcaggtgaatcact

SEQ ID NO: 1231945 - DNA, 15 bp, Homo sapiens
aggcaggtgaatcac

SEQ ID NO: 1231946 - DNA, 15 bp, Homo sapiens
aaggcaggtgaatca

SEQ ID NO: 1231947 - DNA, 15 bp, Homo sapiens
caaggcaggtgaatc

SEQ ID NO: 1231948 - DNA, 15 bp, Homo sapiens
ccaaggcaggtgaat

SEQ ID NO: 1231949 - DNA, 15 bp, Homo sapiens
gccaaggcaggtgaa

SEQ ID NO: 1231950 - DNA, 15 bp, Homo sapiens
agccaaggcaggtga

SEQ ID NO: 1231951 - DNA, 15 bp, Homo sapiens
cagccaaggcaggtg

SEQ ID NO: 1231952 - DNA, 15 bp, Homo sapiens
ccagccaaggcaggt

SEQ ID NO: 1231953 - DNA, 15 bp, Homo sapiens
cccagccaaggcagg

SEQ ID NO: 1231954 - DNA, 15 bp, Homo sapiens
gcccagccaaggcag

SEQ ID NO: 1231955 - DNA, 15 bp, Homo sapiens
tgcccagccaaggca

SEQ ID NO: 1231956 - DNA, 15 bp, Homo sapiens
gtgcccagccaaggc

SEQ ID NO: 1231957 - DNA, 15 bp, Homo sapiens
ggtgcccagccaagg

SEQ ID NO: 1231958 - DNA, 15 bp, Homo sapiens
cggtgcccagccaag

SEQ ID NO: 1231959 - DNA, 15 bp, Homo sapiens
gcggtgcccagccaa

SEQ ID NO: 1231960 - DNA, 15 bp, Homo sapiens
cgcggtgcccagcca

SEQ ID NO: 1231961 - DNA, 15 bp, Homo sapiens
gcgcggtgcccagcc

SEQ ID NO: 1231962 - DNA, 15 bp, Homo sapiens
ggcgcggtgcccagc

SEQ ID NO: 1231963 - DNA, 15 bp, Homo sapiens
aggcgcggtgcccag

SEQ ID NO: 1231964 - DNA, 15 bp, Homo sapiens
caggcgcggtgccca

SEQ ID NO: 1231965 - DNA, 15 bp, Homo sapiens
ccaggcgcggtgccc

SEQ ID NO: 1231966 - DNA, 15 bp, Homo sapiens
gccaggcgcggtgcc

SEQ ID NO: 1231967 - DNA, 15 bp, Homo sapiens
ggccaggcgcggtgc

SEQ ID NO: 1231968 - DNA, 15 bp, Homo sapiens
gtggccaggcgcggt

SEQ ID NO: 1231969 - DNA, 15 bp, Homo sapiens
ggtggccaggcgcgg

SEQ ID NO: 1231970 - DNA, 15 bp, Homo sapiens
aggtggccaggcgcg

SEQ ID NO: 1231971 - DNA, 15 bp, Homo sapiens
aaggtggccaggcgc

SEQ ID NO: 1231972 - DNA, 15 bp, Homo sapiens
aaaggtggccaggcg

SEQ ID NO: 1231973 - DNA, 15 bp, Homo sapiens
taaaggtggccaggc

SEQ ID NO: 1231974 - DNA, 15 bp, Homo sapiens
ataaaggtggccagg

SEQ ID NO: 1231975 - DNA, 15 bp, Homo sapiens
tataaaggtggccag

SEQ ID NO: 1231976 - DNA, 15 bp, Homo sapiens
ttataaaggtggcca

SEQ ID NO: 1231977 - DNA, 15 bp, Homo sapiens
attataaaggtggcc

SEQ ID NO: 1231978 - DNA, 15 bp, Homo sapiens
aattataaaggtggc

SEQ ID NO: 1231979 - DNA, 15 bp, Homo sapiens
aaattataaaggtgg

SEQ ID NO: 1231980 - DNA, 15 bp, Homo sapiens
gaaattataaaggtg

SEQ ID NO: 1231981 - DNA, 15 bp, Homo sapiens
tgaaattataaaggt

SEQ ID NO: 1231982 - DNA, 15 bp, Homo sapiens
ttgaaattataaagg

SEQ ID NO: 1231983 - DNA, 15 bp, Homo sapiens
tttgaaattataaag

SEQ ID NO: 1231984 - DNA, 15 bp, Homo sapiens
atttgaaattataaa

SEQ ID NO: 1231985 - DNA, 15 bp, Homo sapiens
catttgaaattataa

SEQ ID NO: 1231986 - DNA, 15 bp, Homo sapiens
acatttgaaattata

SEQ ID NO: 1231987 - DNA, 15 bp, Homo sapiens
aacatttgaaattat

SEQ ID NO: 1231988 - DNA, 15 bp, Homo sapiens
taacatttgaaatta

SEQ ID NO: 1231989 - DNA, 15 bp, Homo sapiens
ttaacatttgaaatt

SEQ ID NO: 1231990 - DNA, 15 bp, Homo sapiens
tttaacatttgaaat

SEQ ID NO: 1231991 - DNA, 15 bp, Homo sapiens
ttttaacatttgaaa

SEQ ID NO: 1231992 - DNA, 15 bp, Homo sapiens
tttttaacatttgaa

SEQ ID NO: 1231993 - DNA, 15 bp, Homo sapiens
atttttaacatttga

SEQ ID NO: 1231994 - DNA, 15 bp, Homo sapiens
tatttttaacatttg

SEQ ID NO: 1231995 - DNA, 15 bp, Homo sapiens
gtatttttaacattt

SEQ ID NO: 1231996 - DNA, 15 bp, Homo sapiens
tgtatttttaacatt

SEQ ID NO: 1231997 - DNA, 15 bp, Homo sapiens
atgtatttttaacat

SEQ ID NO: 1231998 - DNA, 15 bp, Homo sapiens
aatgtatttttaaca

SEQ ID NO: 1231999 - DNA, 15 bp, Homo sapiens
caatgtatttttaac

SEQ ID NO: 1232000 - DNA, 15 bp, Homo sapiens
gcaatgtatttttaa

SEQ ID NO: 1232001 - DNA, 15 bp, Homo sapiens
agcaatgtattttta

SEQ ID NO: 1232002 - DNA, 15 bp, Homo sapiens
cagcaatgtattttt

SEQ ID NO: 1232003 - DNA, 15 bp, Homo sapiens
ccagcaatgtatttt

SEQ ID NO: 1232004 - DNA, 15 bp, Homo sapiens
cccagcaatgtattt

SEQ ID NO: 1232005 - DNA, 15 bp, Homo sapiens
acccagcaatgtatt

SEQ ID NO: 1232006 - DNA, 15 bp, Homo sapiens
aacccagcaatgtat

SEQ ID NO: 1232007 - DNA, 15 bp, Homo sapiens
aaacccagcaatgta

SEQ ID NO: 1232008 - DNA, 15 bp, Homo sapiens
caaacccagcaatgt

SEQ ID NO: 1232009 - DNA, 15 bp, Homo sapiens
ccaaacccagcaatg

SEQ ID NO: 1232010 - DNA, 15 bp, Homo sapiens
cccaaacccagcaat

SEQ ID NO: 1232011 - DNA, 15 bp, Homo sapiens
tcccaaacccagcaa

SEQ ID NO: 1232012 - DNA, 15 bp, Homo sapiens
ttcccaaacccagca

SEQ ID NO: 1232013 - DNA, 15 bp, Homo sapiens
attcccaaacccagc

SEQ ID NO: 1232014 - DNA, 15 bp, Homo sapiens
cattcccaaacccag

SEQ ID NO: 1232015 - DNA, 15 bp, Homo sapiens
tcattcccaaaccca

SEQ ID NO: 1232016 - DNA, 15 bp, Homo sapiens
ctcattcccaaaccc

SEQ ID NO: 1232017 - DNA, 15 bp, Homo sapiens
gctcattcccaaacc

SEQ ID NO: 1232018 - DNA, 15 bp, Homo sapiens
tgctcattcccaaac

SEQ ID NO: 1232019 - DNA, 15 bp, Homo sapiens
ttgctcattcccaaa

SEQ ID NO: 1232020 - DNA, 15 bp, Homo sapiens
cttgctcattcccaa

SEQ ID NO: 1232021 - DNA, 15 bp, Homo sapiens
acttgctcattccca

SEQ ID NO: 1232022 - DNA, 15 bp, Homo sapiens
cacttgctcattccc

SEQ ID NO: 1232023 - DNA, 15 bp, Homo sapiens
ccacttgctcattcc

SEQ ID NO: 1232024 - DNA, 15 bp, Homo sapiens
cccacttgctcattc

SEQ ID NO: 1232025 - DNA, 15 bp, Homo sapiens
ccccacttgctcatt

SEQ ID NO: 1232026 - DNA, 15 bp, Homo sapiens
tccccacttgctcat

SEQ ID NO: 1232027 - DNA, 15 bp, Homo sapiens
atccccacttgctca

SEQ ID NO: 1232028 - DNA, 15 bp, Homo sapiens
catccccacttgctc

SEQ ID NO: 1232029 - DNA, 15 bp, Homo sapiens
acatccccacttgct

SEQ ID NO: 1232030 - DNA, 15 bp, Homo sapiens
cacatccccacttgc

SEQ ID NO: 1232031 - DNA, 15 bp, Homo sapiens
acacatccccacttg

SEQ ID NO: 1232032 - DNA, 15 bp, Homo sapiens
aacacatccccactt

SEQ ID NO: 1232033 - DNA, 15 bp, Homo sapiens
aaacacatccccact

SEQ ID NO: 1232034 - DNA, 15 bp, Homo sapiens
aaaacacatccccac

SEQ ID NO: 1232035 - DNA, 15 bp, Homo sapiens
gaaaacacatcccca

SEQ ID NO: 1232036 - DNA, 15 bp, Homo sapiens
agaaaacacatcccc

SEQ ID NO: 1232037 - DNA, 15 bp, Homo sapiens
aagaaaacacatccc

SEQ ID NO: 1232038 - DNA, 15 bp, Homo sapiens
aaagaaaacacatcc

SEQ ID NO: 1232039 - DNA, 15 bp, Homo sapiens
taaagaaaacacatc

SEQ ID NO: 1232040 - DNA, 15 bp, Homo sapiens
ctaaagaaaacacat

SEQ ID NO: 1232041 - DNA, 15 bp, Homo sapiens
gctaaagaaaacaca

SEQ ID NO: 1232042 - DNA, 15 bp, Homo sapiens
tgctaaagaaaacac

SEQ ID NO: 1232043 - DNA, 15 bp, Homo sapiens
gtgctaaagaaaaca

SEQ ID NO: 1232044 - DNA, 15 bp, Homo sapiens
tgtgctaaagaaaac

SEQ ID NO: 1232045 - DNA, 15 bp, Homo sapiens
gtgtgctaaagaaaa

SEQ ID NO: 1232046 - DNA, 15 bp, Homo sapiens
tgtgtgctaaagaaa

SEQ ID NO: 1232047 - DNA, 15 bp, Homo sapiens
atgtgtgctaaagaa

SEQ ID NO: 1232048 - DNA, 15 bp, Homo sapiens
gatgtgtgctaaaga

SEQ ID NO: 1232049 - DNA, 15 bp, Homo sapiens
tgatgtgtgctaaag

SEQ ID NO: 1232050 - DNA, 15 bp, Homo sapiens
ttgatgtgtgctaaa

SEQ ID NO: 1232051 - DNA, 15 bp, Homo sapiens
cttgatgtgtgctaa

SEQ ID NO: 1232052 - DNA, 15 bp, Homo sapiens
acttgatgtgtgcta

SEQ ID NO: 1232053 - DNA, 15 bp, Homo sapiens
cacttgatgtgtgct

SEQ ID NO: 1232054 - DNA, 15 bp, Homo sapiens
tcacttgatgtgtgc

SEQ ID NO: 1232055 - DNA, 15 bp, Homo sapiens
gtcacttgatgtgtg

SEQ ID NO: 1232056 - DNA, 15 bp, Homo sapiens
tgtcacttgatgtgt

SEQ ID NO: 1232057 - DNA, 15 bp, Homo sapiens
ctgtcacttgatgtg

SEQ ID NO: 1232058 - DNA, 15 bp, Homo sapiens
actgtcacttgatgt

SEQ ID NO: 1232059 - DNA, 15 bp, Homo sapiens
aactgtcacttgatg

SEQ ID NO: 1232060 - DNA, 15 bp, Homo sapiens
aaactgtcacttgat

SEQ ID NO: 1232061 - DNA, 15 bp, Homo sapiens
taaactgtcacttga

SEQ ID NO: 1232062 - DNA, 15 bp, Homo sapiens
ataaactgtcacttg

SEQ ID NO: 1232063 - DNA, 15 bp, Homo sapiens
tataaactgtcactt

SEQ ID NO: 1232064 - DNA, 15 bp, Homo sapiens
atataaactgtcact

SEQ ID NO: 1232065 - DNA, 15 bp, Homo sapiens
tatataaactgtcac

SEQ ID NO: 1232066 - DNA, 15 bp, Homo sapiens
ctatataaactgtca

SEQ ID NO: 1232067 - DNA, 15 bp, Homo sapiens
cctatataaactgtc

SEQ ID NO: 1232068 - DNA, 15 bp, Homo sapiens
acctatataaactgt

SEQ ID NO: 1232069 - DNA, 15 bp, Homo sapiens
tacctatataaactg

SEQ ID NO: 1232070 - DNA, 15 bp, Homo sapiens
ctacctatataaact

SEQ ID NO: 1232071 - DNA, 15 bp, Homo sapiens
gctacctatataaac

SEQ ID NO: 1232072 - DNA, 15 bp, Homo sapiens
agctacctatataaa

SEQ ID NO: 1232073 - DNA, 15 bp, Homo sapiens
tagctacctatataa

SEQ ID NO: 1232074 - DNA, 15 bp, Homo sapiens
ttagctacctatata

SEQ ID NO: 1232075 - DNA, 15 bp, Homo sapiens
attagctacctatat

SEQ ID NO: 1232076 - DNA, 15 bp, Homo sapiens
tattagctacctata

SEQ ID NO: 1232077 - DNA, 15 bp, Homo sapiens
atattagctacctat

SEQ ID NO: 1232078 - DNA, 15 bp, Homo sapiens
aatattagctaccta

SEQ ID NO: 1232079 - DNA, 15 bp, Homo sapiens
aaatattagctacct

SEQ ID NO: 1232080 - DNA, 15 bp, Homo sapiens
taaatattagctacc

SEQ ID NO: 1232081 - DNA, 15 bp, Homo sapiens
ctaaatattagctac

SEQ ID NO: 1232082 - DNA, 15 bp, Homo sapiens
cctaaatattagcta

SEQ ID NO: 1232083 - DNA, 15 bp, Homo sapiens
tcctaaatattagct

SEQ ID NO: 1232084 - DNA, 15 bp, Homo sapiens
atcctaaatattagc

SEQ ID NO: 1232085 - DNA, 15 bp, Homo sapiens
aatcctaaatattag

SEQ ID NO: 1232086 - DNA, 15 bp, Homo sapiens
aaatcctaaatatta

SEQ ID NO: 1232087 - DNA, 15 bp, Homo sapiens
aaaatcctaaatatt

SEQ ID NO: 1232088 - DNA, 15 bp, Homo sapiens
gaaaatcctaaatat

SEQ ID NO: 1232089 - DNA, 15 bp, Homo sapiens
ggaaaatcctaaata

SEQ ID NO: 1232090 - DNA, 15 bp, Homo sapiens
gggaaaatcctaaat

SEQ ID NO: 1232091 - DNA, 15 bp, Homo sapiens
ggggaaaatcctaaa

SEQ ID NO: 1232092 - DNA, 15 bp, Homo sapiens
tggggaaaatcctaa

SEQ ID NO: 1232093 - DNA, 15 bp, Homo sapiens
ttggggaaaatccta

SEQ ID NO: 1232094 - DNA, 15 bp, Homo sapiens
attggggaaaatcct

SEQ ID NO: 1232095 - DNA, 15 bp, Homo sapiens
aattggggaaaatcc

SEQ ID NO: 1232096 - DNA, 15 bp, Homo sapiens
gaattggggaaaatc

SEQ ID NO: 1232097 - DNA, 15 bp, Homo sapiens
agaattggggaaaat

SEQ ID NO: 1232098 - DNA, 15 bp, Homo sapiens
tagaattggggaaaa

SEQ ID NO: 1232099 - DNA, 15 bp, Homo sapiens
ttagaattggggaaa

SEQ ID NO: 1232100 - DNA, 15 bp, Homo sapiens
attagaattggggaa

SEQ ID NO: 1232101 - DNA, 15 bp, Homo sapiens
gattagaattgggga

SEQ ID NO: 1232102 - DNA, 15 bp, Homo sapiens
tgattagaattgggg

SEQ ID NO: 1232103 - DNA, 15 bp, Homo sapiens
atgattagaattggg

SEQ ID NO: 1232104 - DNA, 15 bp, Homo sapiens
aatgattagaattgg

SEQ ID NO: 1232105 - DNA, 15 bp, Homo sapiens
taatgattagaattg

SEQ ID NO: 1232106 - DNA, 15 bp, Homo sapiens
ctaatgattagaatt

SEQ ID NO: 1232107 - DNA, 15 bp, Homo sapiens
actaatgattagaat

SEQ ID NO: 1232108 - DNA, 15 bp, Homo sapiens
aactaatgattagaa

SEQ ID NO: 1232109 - DNA, 15 bp, Homo sapiens
caactaatgattaga

SEQ ID NO: 1232110 - DNA, 15 bp, Homo sapiens
tcaactaatgattag

SEQ ID NO: 1232111 - DNA, 15 bp, Homo sapiens
ttcaactaatgatta

SEQ ID NO: 1232112 - DNA, 15 bp, Homo sapiens
tttcaactaatgatt

SEQ ID NO: 1232113 - DNA, 15 bp, Homo sapiens
ctttcaactaatgat

SEQ ID NO: 1232114 - DNA, 15 bp, Homo sapiens
cctttcaactaatga

SEQ ID NO: 1232115 - DNA, 15 bp, Homo sapiens
gcctttcaactaatg

SEQ ID NO: 1232116 - DNA, 15 bp, Homo sapiens
agcctttcaactaat

SEQ ID NO: 1232117 - DNA, 15 bp, Homo sapiens
aagcctttcaactaa

SEQ ID NO: 1232118 - DNA, 15 bp, Homo sapiens
gaagcctttcaacta

SEQ ID NO: 1232119 - DNA, 15 bp, Homo sapiens
ggaagcctttcaact

SEQ ID NO: 1232120 - DNA, 15 bp, Homo sapiens
aggaagcctttcaac

SEQ ID NO: 1232121 - DNA, 15 bp, Homo sapiens
gaggaagcctttcaa

SEQ ID NO: 1232122 - DNA, 15 bp, Homo sapiens
agaggaagcctttca

SEQ ID NO: 1232123 - DNA, 15 bp, Homo sapiens
cagaggaagcctttc

SEQ ID NO: 1232124 - DNA, 15 bp, Homo sapiens
gcagaggaagccttt

SEQ ID NO: 1232125 - DNA, 15 bp, Homo sapiens
agcagaggaagcctt

SEQ ID NO: 1232126 - DNA, 15 bp, Homo sapiens
aagcagaggaagcct

SEQ ID NO: 1232127 - DNA, 15 bp, Homo sapiens
aaagcagaggaagcc

SEQ ID NO: 1232128 - DNA, 15 bp, Homo sapiens
aaaagcagaggaagc

SEQ ID NO: 1232129 - DNA, 15 bp, Homo sapiens
gaaaagcagaggaag

SEQ ID NO: 1232130 - DNA, 15 bp, Homo sapiens
tgaaaagcagaggaa

SEQ ID NO: 1232131 - DNA, 15 bp, Homo sapiens
ctgaaaagcagagga

SEQ ID NO: 1232132 - DNA, 15 bp, Homo sapiens
tctgaaaagcagagg

SEQ ID NO: 1232133 - DNA, 15 bp, Homo sapiens
atctgaaaagcagag

SEQ ID NO: 1232134 - DNA, 15 bp, Homo sapiens
gatctgaaaagcaga

SEQ ID NO: 1232135 - DNA, 15 bp, Homo sapiens
agatctgaaaagcag

SEQ ID NO: 1232136 - DNA, 15 bp, Homo sapiens
tagatctgaaaagca

SEQ ID NO: 1232137 - DNA, 15 bp, Homo sapiens
gtagatctgaaaagc

SEQ ID NO: 1232138 - DNA, 15 bp, Homo sapiens
agtagatctgaaaag

SEQ ID NO: 1232139 - DNA, 15 bp, Homo sapiens
aagtagatctgaaaa

SEQ ID NO: 1232140 - DNA, 15 bp, Homo sapiens
caagtagatctgaaa

SEQ ID NO: 1232141 - DNA, 15 bp, Homo sapiens
gcaagtagatctgaa

SEQ ID NO: 1232142 - DNA, 15 bp, Homo sapiens
tgcaagtagatctga

SEQ ID NO: 1232143 - DNA, 15 bp, Homo sapiens
ttgcaagtagatctg

SEQ ID NO: 1232144 - DNA, 15 bp, Homo sapiens
cttgcaagtagatct

SEQ ID NO: 1232145 - DNA, 15 bp, Homo sapiens
tcttgcaagtagatc

SEQ ID NO: 1232146 - DNA, 15 bp, Homo sapiens
ctcttgcaagtagat

SEQ ID NO: 1232147 - DNA, 15 bp, Homo sapiens
tctcttgcaagtaga

SEQ ID NO: 1232148 - DNA, 15 bp, Homo sapiens
ctctcttgcaagtag

SEQ ID NO: 1232149 - DNA, 15 bp, Homo sapiens
tctctcttgcaagta

SEQ ID NO: 1232150 - DNA, 15 bp, Homo sapiens
ttctctcttgcaagt

SEQ ID NO: 1232151 - DNA, 15 bp, Homo sapiens
cttctctcttgcaag

SEQ ID NO: 1232152 - DNA, 15 bp, Homo sapiens
tcttctctcttgcaa

SEQ ID NO: 1232153 - DNA, 15 bp, Homo sapiens
ctcttctctcttgca

SEQ ID NO: 1232154 - DNA, 15 bp, Homo sapiens
tctcttctctcttgc

SEQ ID NO: 1232155 - DNA, 15 bp, Homo sapiens
atctcttctctcttg

SEQ ID NO: 1232156 - DNA, 15 bp, Homo sapiens
aatctcttctctctt

SEQ ID NO: 1232157 - DNA, 15 bp, Homo sapiens
caatctcttctctct

SEQ ID NO: 1232158 - DNA, 15 bp, Homo sapiens
acaatctcttctctc

SEQ ID NO: 1232159 - DNA, 15 bp, Homo sapiens
aacaatctcttctct

SEQ ID NO: 1232160 - DNA, 15 bp, Homo sapiens
taacaatctcttctc

SEQ ID NO: 1232161 - DNA, 15 bp, Homo sapiens
ttaacaatctcttct

SEQ ID NO: 1232162 - DNA, 15 bp, Homo sapiens
attaacaatctcttc

SEQ ID NO: 1232163 - DNA, 15 bp, Homo sapiens
aattaacaatctctt

SEQ ID NO: 1232164 - DNA, 15 bp, Homo sapiens
aaattaacaatctct

SEQ ID NO: 1232165 - DNA, 15 bp, Homo sapiens
aaaattaacaatctc

SEQ ID NO: 1232166 - DNA, 15 bp, Homo sapiens
aaaaattaacaatct

SEQ ID NO: 1232167 - DNA, 15 bp, Homo sapiens
caaaaattaacaatc

SEQ ID NO: 1232168 - DNA, 15 bp, Homo sapiens
gcaaaaattaacaat

SEQ ID NO: 1232169 - DNA, 15 bp, Homo sapiens
agcaaaaattaacaa

SEQ ID NO: 1232170 - DNA, 15 bp, Homo sapiens
cagcaaaaattaaca

SEQ ID NO: 1232171 - DNA, 15 bp, Homo sapiens
acagcaaaaattaac

SEQ ID NO: 1232172 - DNA, 15 bp, Homo sapiens
aacagcaaaaattaa

SEQ ID NO: 1232173 - DNA, 15 bp, Homo sapiens
aaacagcaaaaatta

SEQ ID NO: 1232174 - DNA, 15 bp, Homo sapiens
aaaacagcaaaaatt

SEQ ID NO: 1232175 - DNA, 15 bp, Homo sapiens
taaaacagcaaaaat

SEQ ID NO: 1232176 - DNA, 15 bp, Homo sapiens
ctaaaacagcaaaaa

SEQ ID NO: 1232177 - DNA, 15 bp, Homo sapiens
tctaaaacagcaaaa

SEQ ID NO: 1232178 - DNA, 15 bp, Homo sapiens
ctctaaaacagcaaa

SEQ ID NO: 1232179 - DNA, 15 bp, Homo sapiens
gctctaaaacagcaa

SEQ ID NO: 1232180 - DNA, 15 bp, Homo sapiens
ggctctaaaacagca

SEQ ID NO: 1232181 - DNA, 15 bp, Homo sapiens
aggctctaaaacagc

SEQ ID NO: 1232182 - DNA, 15 bp, Homo sapiens
caggctctaaaacag

SEQ ID NO: 1232183 - DNA, 15 bp, Homo sapiens
acaggctctaaaaca

SEQ ID NO: 1232184 - DNA, 15 bp, Homo sapiens
gacaggctctaaaac

SEQ ID NO: 1232185 - DNA, 15 bp, Homo sapiens
ggacaggctctaaaa

SEQ ID NO: 1232186 - DNA, 15 bp, Homo sapiens
gggacaggctctaaa

SEQ ID NO: 1232187 - DNA, 15 bp, Homo sapiens
agggacaggctctaa

SEQ ID NO: 1232188 - DNA, 15 bp, Homo sapiens
aagggacaggctcta

SEQ ID NO: 1232189 - DNA, 15 bp, Homo sapiens
aaagggacaggctct

SEQ ID NO: 1232190 - DNA, 15 bp, Homo sapiens
caaagggacaggctc

SEQ ID NO: 1232191 - DNA, 15 bp, Homo sapiens
acaaagggacaggct

SEQ ID NO: 1232192 - DNA, 15 bp, Homo sapiens
aacaaagggacaggc

SEQ ID NO: 1232193 - DNA, 15 bp, Homo sapiens
taacaaagggacagg

SEQ ID NO: 1232194 - DNA, 15 bp, Homo sapiens
ataacaaagggacag

SEQ ID NO: 1232195 - DNA, 15 bp, Homo sapiens
cataacaaagggaca

SEQ ID NO: 1232196 - DNA, 15 bp, Homo sapiens
acataacaaagggac

SEQ ID NO: 1232197 - DNA, 15 bp, Homo sapiens
cacataacaaaggga

SEQ ID NO: 1232198 - DNA, 15 bp, Homo sapiens
tcacataacaaaggg

SEQ ID NO: 1232199 - DNA, 15 bp, Homo sapiens
gtcacataacaaagg

SEQ ID NO: 1232200 - DNA, 15 bp, Homo sapiens
agtcacataacaaag

SEQ ID NO: 1232201 - DNA, 15 bp, Homo sapiens
cagtcacataacaaa

SEQ ID NO: 1232202 - DNA, 15 bp, Homo sapiens
gcagtcacataacaa

SEQ ID NO: 1232203 - DNA, 15 bp, Homo sapiens
tgcagtcacataaca

SEQ ID NO: 1232204 - DNA, 15 bp, Homo sapiens
ctgcagtcacataac

SEQ ID NO: 1232205 - DNA, 15 bp, Homo sapiens
cctgcagtcacataa

SEQ ID NO: 1232206 - DNA, 15 bp, Homo sapiens
ccctgcagtcacata

SEQ ID NO: 1232207 - DNA, 15 bp, Homo sapiens
cccctgcagtcacat

SEQ ID NO: 1232208 - DNA, 15 bp, Homo sapiens
acccctgcagtcaca

SEQ ID NO: 1232209 - DNA, 15 bp, Homo sapiens
tacccctgcagtcac

SEQ ID NO: 1232210 - DNA, 15 bp, Homo sapiens
ctacccctgcagtca

SEQ ID NO: 1232211 - DNA, 15 bp, Homo sapiens
tctacccctgcagtc

SEQ ID NO: 1232212 - DNA, 15 bp, Homo sapiens
ttctacccctgcagt

SEQ ID NO: 1232213 - DNA, 15 bp, Homo sapiens
attctacccctgcag

SEQ ID NO: 1232214 - DNA, 15 bp, Homo sapiens
aattctacccctgca

SEQ ID NO: 1232215 - DNA, 15 bp, Homo sapiens
caattctacccctgc

SEQ ID NO: 1232216 - DNA, 15 bp, Homo sapiens
tcaattctacccctg

SEQ ID NO: 1232217 - DNA, 15 bp, Homo sapiens
ctcaattctacccct

SEQ ID NO: 1232218 - DNA, 15 bp, Homo sapiens
tctcaattctacccc

SEQ ID NO: 1232219 - DNA, 15 bp, Homo sapiens
ctctcaattctaccc

SEQ ID NO: 1232220 - DNA, 15 bp, Homo sapiens
actctcaattctacc

SEQ ID NO: 1232221 - DNA, 15 bp, Homo sapiens
aactctcaattctac

SEQ ID NO: 1232222 - DNA, 15 bp, Homo sapiens
caactctcaattcta

SEQ ID NO: 1232223 - DNA, 15 bp, Homo sapiens
tcaactctcaattct

SEQ ID NO: 1232224 - DNA, 15 bp, Homo sapiens
ttcaactctcaattc

SEQ ID NO: 1232225 - DNA, 15 bp, Homo sapiens
gttcaactctcaatt

SEQ ID NO: 1232226 - DNA, 15 bp, Homo sapiens
tgttcaactctcaat

SEQ ID NO: 1232227 - DNA, 15 bp, Homo sapiens
gtgttcaactctcaa

SEQ ID NO: 1232228 - DNA, 15 bp, Homo sapiens
agtgttcaactctca

SEQ ID NO: 1232229 - DNA, 15 bp, Homo sapiens
cagtgttcaactctc

SEQ ID NO: 1232230 - DNA, 15 bp, Homo sapiens
ccagtgttcaactct

SEQ ID NO: 1232231 - DNA, 15 bp, Homo sapiens
cccagtgttcaactc

SEQ ID NO: 1232232 - DNA, 15 bp, Homo sapiens
tcccagtgttcaact

SEQ ID NO: 1232233 - DNA, 15 bp, Homo sapiens
ttcccagtgttcaac

SEQ ID NO: 1232234 - DNA, 15 bp, Homo sapiens
tttcccagtgttcaa

SEQ ID NO: 1232235 - DNA, 15 bp, Homo sapiens
ttttcccagtgttca

SEQ ID NO: 1232236 - DNA, 15 bp, Homo sapiens
gttttcccagtgttc

SEQ ID NO: 1232237 - DNA, 15 bp, Homo sapiens
ggttttcccagtgtt

SEQ ID NO: 1232238 - DNA, 15 bp, Homo sapiens
cggttttcccagtgt

SEQ ID NO: 1232239 - DNA, 15 bp, Homo sapiens
gcggttttcccagtg

SEQ ID NO: 1232240 - DNA, 15 bp, Homo sapiens
tgcggttttcccagt

SEQ ID NO: 1232241 - DNA, 15 bp, Homo sapiens
ctgcggttttcccag

SEQ ID NO: 1232242 - DNA, 15 bp, Homo sapiens
tctgcggttttccca

SEQ ID NO: 1232243 - DNA, 15 bp, Homo sapiens
ctctgcggttttccc

SEQ ID NO: 1232244 - DNA, 15 bp, Homo sapiens
gctctgcggttttcc

SEQ ID NO: 1232245 - DNA, 15 bp, Homo sapiens
tgctctgcggttttc

SEQ ID NO: 1232246 - DNA, 15 bp, Homo sapiens
ttgctctgcggtttt

SEQ ID NO: 1232247 - DNA, 15 bp, Homo sapiens
attgctctgcggttt

SEQ ID NO: 1232248 - DNA, 15 bp, Homo sapiens
aattgctctgcggtt

SEQ ID NO: 1232249 - DNA, 15 bp, Homo sapiens
taattgctctgcggt

SEQ ID NO: 1232250 - DNA, 15 bp, Homo sapiens
ctaattgctctgcgg

SEQ ID NO: 1232251 - DNA, 15 bp, Homo sapiens
cctaattgctctgcg

SEQ ID NO: 1232252 - DNA, 15 bp, Homo sapiens
acctaattgctctgc

SEQ ID NO: 1232253 - DNA, 15 bp, Homo sapiens
tacctaattgctctg

SEQ ID NO: 1232254 - DNA, 15 bp, Homo sapiens
atacctaattgctct

SEQ ID NO: 1232255 - DNA, 15 bp, Homo sapiens
tatacctaattgctc

SEQ ID NO: 1232256 - DNA, 15 bp, Homo sapiens
atatacctaattgct

SEQ ID NO: 1232257 - DNA, 15 bp, Homo sapiens
tatatacctaattgc

SEQ ID NO: 1232258 - DNA, 15 bp, Homo sapiens
ttatatacctaattg

SEQ ID NO: 1232259 - DNA, 15 bp, Homo sapiens
cttatatacctaatt

SEQ ID NO: 1232260 - DNA, 15 bp, Homo sapiens
acttatatacctaat

SEQ ID NO: 1232261 - DNA, 15 bp, Homo sapiens
cacttatatacctaa

SEQ ID NO: 1232262 - DNA, 15 bp, Homo sapiens
tcacttatataccta

SEQ ID NO: 1232263 - DNA, 15 bp, Homo sapiens
atcacttatatacct

SEQ ID NO: 1232264 - DNA, 15 bp, Homo sapiens
catcacttatatacc

SEQ ID NO: 1232265 - DNA, 15 bp, Homo sapiens
tcatcacttatatac

SEQ ID NO: 1232266 - DNA, 15 bp, Homo sapiens
gtcatcacttatata

SEQ ID NO: 1232267 - DNA, 15 bp, Homo sapiens
agtcatcacttatat

SEQ ID NO: 1232268 - DNA, 15 bp, Homo sapiens
tagtcatcacttata

SEQ ID NO: 1232269 - DNA, 15 bp, Homo sapiens
ttagtcatcacttat

SEQ ID NO: 1232270 - DNA, 15 bp, Homo sapiens
tttagtcatcactta

SEQ ID NO: 1232271 - DNA, 15 bp, Homo sapiens
atttagtcatcactt

SEQ ID NO: 1232272 - DNA, 15 bp, Homo sapiens
gatttagtcatcact

SEQ ID NO: 1232273 - DNA, 15 bp, Homo sapiens
agatttagtcatcac

SEQ ID NO: 1232274 - DNA, 15 bp, Homo sapiens
tagatttagtcatca

SEQ ID NO: 1232275 - DNA, 15 bp, Homo sapiens
ctagatttagtcatc

SEQ ID NO: 1232276 - DNA, 15 bp, Homo sapiens
tctagatttagtcat

SEQ ID NO: 1232277 - DNA, 15 bp, Homo sapiens
atctagatttagtca

SEQ ID NO: 1232278 - DNA, 15 bp, Homo sapiens
tatctagatttagtc

SEQ ID NO: 1232279 - DNA, 15 bp, Homo sapiens
atatctagatttagt

SEQ ID NO: 1232280 - DNA, 15 bp, Homo sapiens
aatatctagatttag

SEQ ID NO: 1232281 - DNA, 15 bp, Homo sapiens
gaatatctagattta

SEQ ID NO: 1232282 - DNA, 15 bp, Homo sapiens
tgaatatctagattt

SEQ ID NO: 1232283 - DNA, 15 bp, Homo sapiens
atgaatatctagatt

SEQ ID NO: 1232284 - DNA, 15 bp, Homo sapiens
aatgaatatctagat

SEQ ID NO: 1232285 - DNA, 15 bp, Homo sapiens
aaatgaatatctaga

SEQ ID NO: 1232286 - DNA, 15 bp, Homo sapiens
gaaatgaatatctag

SEQ ID NO: 1232287 - DNA, 15 bp, Homo sapiens
agaaatgaatatcta

SEQ ID NO: 1232288 - DNA, 15 bp, Homo sapiens
tagaaatgaatatct

SEQ ID NO: 1232289 - DNA, 15 bp, Homo sapiens
ctagaaatgaatatc

SEQ ID NO: 1232290 - DNA, 15 bp, Homo sapiens
actagaaatgaatat

SEQ ID NO: 1232291 - DNA, 15 bp, Homo sapiens
aactagaaatgaata

SEQ ID NO: 1232292 - DNA, 15 bp, Homo sapiens
taactagaaatgaat

SEQ ID NO: 1232293 - DNA, 15 bp, Homo sapiens
gtaactagaaatgaa

SEQ ID NO: 1232294 - DNA, 15 bp, Homo sapiens
tgtaactagaaatga

SEQ ID NO: 1232295 - DNA, 15 bp, Homo sapiens
ttgtaactagaaatg

SEQ ID NO: 1232296 - DNA, 15 bp, Homo sapiens
tttgtaactagaaat

SEQ ID NO: 1232297 - DNA, 15 bp, Homo sapiens
ttttgtaactagaaa

SEQ ID NO: 1232298 - DNA, 15 bp, Homo sapiens
attttgtaactagaa

SEQ ID NO: 1232299 - DNA, 15 bp, Homo sapiens
gattttgtaactaga

SEQ ID NO: 1232300 - DNA, 15 bp, Homo sapiens
aaggagagactcacc

SEQ ID NO: 1232301 - DNA, 15 bp, Homo sapiens
taaggagagactcac

SEQ ID NO: 1232302 - DNA, 15 bp, Homo sapiens
ttaaggagagactca

SEQ ID NO: 1232303 - DNA, 15 bp, Homo sapiens
cttaaggagagactc

SEQ ID NO: 1232304 - DNA, 15 bp, Homo sapiens
gcttaaggagagact

SEQ ID NO: 1232305 - DNA, 15 bp, Homo sapiens
agcttaaggagagac

SEQ ID NO: 1232306 - DNA, 15 bp, Homo sapiens
tagcttaaggagaga

SEQ ID NO: 1232307 - DNA, 15 bp, Homo sapiens
atagcttaaggagag

SEQ ID NO: 1232308 - DNA, 15 bp, Homo sapiens
aatagcttaaggaga

SEQ ID NO: 1232309 - DNA, 15 bp, Homo sapiens
gaatagcttaaggag

SEQ ID NO: 1232310 - DNA, 15 bp, Homo sapiens
ggaatagcttaagga

SEQ ID NO: 1232311 - DNA, 15 bp, Homo sapiens
aggaatagcttaagg

SEQ ID NO: 1232312 - DNA, 15 bp, Homo sapiens
caggaatagcttaag

SEQ ID NO: 1232313 - DNA, 15 bp, Homo sapiens
ccaggaatagcttaa

SEQ ID NO: 1232314 - DNA, 15 bp, Homo sapiens
gccaggaatagctta

SEQ ID NO: 1232315 - DNA, 15 bp, Homo sapiens
agccaggaatagctt

SEQ ID NO: 1232316 - DNA, 15 bp, Homo sapiens
aagccaggaatagct

SEQ ID NO: 1232317 - DNA, 15 bp, Homo sapiens
gaagccaggaatagc

SEQ ID NO: 1232318 - DNA, 15 bp, Homo sapiens
agaagccaggaatag

SEQ ID NO: 1232319 - DNA, 15 bp, Homo sapiens
cagaagccaggaata

SEQ ID NO: 1232320 - DNA, 15 bp, Homo sapiens
ccagaagccaggaat

SEQ ID NO: 1232321 - DNA, 15 bp, Homo sapiens
cccagaagccaggaa

SEQ ID NO: 1232322 - DNA, 15 bp, Homo sapiens
acccagaagccagga

SEQ ID NO: 1232323 - DNA, 15 bp, Homo sapiens
tacccagaagccagg

SEQ ID NO: 1232324 - DNA, 15 bp, Homo sapiens
ctacccagaagccag

SEQ ID NO: 1232325 - DNA, 15 bp, Homo sapiens
actacccagaagcca

SEQ ID NO: 1232326 - DNA, 15 bp, Homo sapiens
aactacccagaagcc

SEQ ID NO: 1232327 - DNA, 15 bp, Homo sapiens
caactacccagaagc

SEQ ID NO: 1232328 - DNA, 15 bp, Homo sapiens
ccaactacccagaag

SEQ ID NO: 1232329 - DNA, 15 bp, Homo sapiens
accaactacccagaa

SEQ ID NO: 1232330 - DNA, 15 bp, Homo sapiens
caccaactacccaga

SEQ ID NO: 1232331 - DNA, 15 bp, Homo sapiens
acaccaactacccag

SEQ ID NO: 1232332 - DNA, 15 bp, Homo sapiens
tacaccaactaccca

SEQ ID NO: 1232333 - DNA, 15 bp, Homo sapiens
ttacaccaactaccc

SEQ ID NO: 1232334 - DNA, 15 bp, Homo sapiens
tttacaccaactacc

SEQ ID NO: 1232335 - DNA, 15 bp, Homo sapiens
gtttacaccaactac

SEQ ID NO: 1232336 - DNA, 15 bp, Homo sapiens
agtttacaccaacta

SEQ ID NO: 1232337 - DNA, 15 bp, Homo sapiens
gagtttacaccaact

SEQ ID NO: 1232338 - DNA, 15 bp, Homo sapiens
agagtttacaccaac

SEQ ID NO: 1232339 - DNA, 15 bp, Homo sapiens
cagagtttacaccaa

SEQ ID NO: 1232340 - DNA, 15 bp, Homo sapiens
acagagtttacacca

SEQ ID NO: 1232341 - DNA, 15 bp, Homo sapiens
cacagagtttacacc

SEQ ID NO: 1232342 - DNA, 15 bp, Homo sapiens
ccacagagtttacac

SEQ ID NO: 1232343 - DNA, 15 bp, Homo sapiens
accacagagtttaca

SEQ ID NO: 1232344 - DNA, 15 bp, Homo sapiens
gaccacagagtttac

SEQ ID NO: 1232345 - DNA, 15 bp, Homo sapiens
ggaccacagagttta

SEQ ID NO: 1232346 - DNA, 15 bp, Homo sapiens
aggaccacagagttt

SEQ ID NO: 1232347 - DNA, 15 bp, Homo sapiens
aaggaccacagagtt

SEQ ID NO: 1232348 - DNA, 15 bp, Homo sapiens
caaggaccacagagt

SEQ ID NO: 1232349 - DNA, 15 bp, Homo sapiens
tcaaggaccacagag

SEQ ID NO: 1232350 - DNA, 15 bp, Homo sapiens
ttcaaggaccacaga

SEQ ID NO: 1232351 - DNA, 15 bp, Homo sapiens
attcaaggaccacag

SEQ ID NO: 1232352 - DNA, 15 bp, Homo sapiens
tattcaaggaccaca

SEQ ID NO: 1232353 - DNA, 15 bp, Homo sapiens
ttattcaaggaccac

SEQ ID NO: 1232354 - DNA, 15 bp, Homo sapiens
tttattcaaggacca

SEQ ID NO: 1232355 - DNA, 15 bp, Homo sapiens
ctttattcaaggacc

SEQ ID NO: 1232356 - DNA, 15 bp, Homo sapiens
actttattcaaggac

SEQ ID NO: 1232357 - DNA, 15 bp, Homo sapiens
cactttattcaagga

SEQ ID NO: 1232358 - DNA, 15 bp, Homo sapiens
acactttattcaagg

SEQ ID NO: 1232359 - DNA, 15 bp, Homo sapiens
cacactttattcaag

SEQ ID NO: 1232360 - DNA, 15 bp, Homo sapiens
gcacactttattcaa

SEQ ID NO: 1232361 - DNA, 15 bp, Homo sapiens
agcacactttattca

SEQ ID NO: 1232362 - DNA, 15 bp, Homo sapiens
aagcacactttattc

SEQ ID NO: 1232363 - DNA, 15 bp, Homo sapiens
caagcacactttatt

SEQ ID NO: 1232364 - DNA, 15 bp, Homo sapiens
tcaagcacactttat

SEQ ID NO: 1232365 - DNA, 15 bp, Homo sapiens
ctcaagcacacttta

SEQ ID NO: 1232366 - DNA, 15 bp, Homo sapiens
tctcaagcacacttt

SEQ ID NO: 1232367 - DNA, 15 bp, Homo sapiens
ttctcaagcacactt

SEQ ID NO: 1232368 - DNA, 15 bp, Homo sapiens
attctcaagcacact

SEQ ID NO: 1232369 - DNA, 15 bp, Homo sapiens
aattctcaagcacac

SEQ ID NO: 1232370 - DNA, 15 bp, Homo sapiens
aaattctcaagcaca

SEQ ID NO: 1232371 - DNA, 15 bp, Homo sapiens
aaaattctcaagcac

SEQ ID NO: 1232372 - DNA, 15 bp, Homo sapiens
taaaattctcaagca

SEQ ID NO: 1232373 - DNA, 15 bp, Homo sapiens
ctaaaattctcaagc

SEQ ID NO: 1232374 - DNA, 15 bp, Homo sapiens
tctaaaattctcaag

SEQ ID NO: 1232375 - DNA, 15 bp, Homo sapiens
ttctaaaattctcaa

SEQ ID NO: 1232376 - DNA, 15 bp, Homo sapiens
cttctaaaattctca

SEQ ID NO: 1232377 - DNA, 15 bp, Homo sapiens
ccttctaaaattctc

SEQ ID NO: 1232378 - DNA, 15 bp, Homo sapiens
accttctaaaattct

SEQ ID NO: 1232379 - DNA, 15 bp, Homo sapiens
aaccttctaaaattc

SEQ ID NO: 1232380 - DNA, 15 bp, Homo sapiens
taaccttctaaaatt

SEQ ID NO: 1232381 - DNA, 15 bp, Homo sapiens
ttaaccttctaaaat

SEQ ID NO: 1232382 - DNA, 15 bp, Homo sapiens
cttaaccttctaaaa

SEQ ID NO: 1232383 - DNA, 15 bp, Homo sapiens
gcttaaccttctaaa

SEQ ID NO: 1232384 - DNA, 15 bp, Homo sapiens
tgcttaaccttctaa

SEQ ID NO: 1232385 - DNA, 15 bp, Homo sapiens
atgcttaaccttcta

SEQ ID NO: 1232386 - DNA, 15 bp, Homo sapiens
gatgcttaaccttct

SEQ ID NO: 1232387 - DNA, 15 bp, Homo sapiens
agatgcttaaccttc

SEQ ID NO: 1232388 - DNA, 15 bp, Homo sapiens
cagatgcttaacctt

SEQ ID NO: 1232389 - DNA, 15 bp, Homo sapiens
tcagatgcttaacct

SEQ ID NO: 1232390 - DNA, 15 bp, Homo sapiens
ctcagatgcttaacc

SEQ ID NO: 1232391 - DNA, 15 bp, Homo sapiens
tctcagatgcttaac

SEQ ID NO: 1232392 - DNA, 15 bp, Homo sapiens
ttctcagatgcttaa

SEQ ID NO: 1232393 - DNA, 15 bp, Homo sapiens
tttctcagatgctta

SEQ ID NO: 1232394 - DNA, 15 bp, Homo sapiens
atttctcagatgctt

SEQ ID NO: 1232395 - DNA, 15 bp, Homo sapiens
aatttctcagatgct

SEQ ID NO: 1232396 - DNA, 15 bp, Homo sapiens
taatttctcagatgc

SEQ ID NO: 1232397 - DNA, 15 bp, Homo sapiens
gtaatttctcagatg

SEQ ID NO: 1232398 - DNA, 15 bp, Homo sapiens
agtaatttctcagat

SEQ ID NO: 1232399 - DNA, 15 bp, Homo sapiens
aagtaatttctcaga

SEQ ID NO: 1232400 - DNA, 15 bp, Homo sapiens
gaagtaatttctcag

SEQ ID NO: 1232401 - DNA, 15 bp, Homo sapiens
tgaagtaatttctca

SEQ ID NO: 1232402 - DNA, 15 bp, Homo sapiens
ttgaagtaatttctc

SEQ ID NO: 1232403 - DNA, 15 bp, Homo sapiens
attgaagtaatttct

SEQ ID NO: 1232404 - DNA, 15 bp, Homo sapiens
cattgaagtaatttc

SEQ ID NO: 1232405 - DNA, 15 bp, Homo sapiens
gcattgaagtaattt

SEQ ID NO: 1232406 - DNA, 15 bp, Homo sapiens
tgcattgaagtaatt

SEQ ID NO: 1232407 - DNA, 15 bp, Homo sapiens
ctgcattgaagtaat

SEQ ID NO: 1232408 - DNA, 15 bp, Homo sapiens
actgcattgaagtaa

SEQ ID NO: 1232409 - DNA, 15 bp, Homo sapiens
cactgcattgaagta

SEQ ID NO: 1232410 - DNA, 15 bp, Homo sapiens
ccactgcattgaagt

SEQ ID NO: 1232411 - DNA, 15 bp, Homo sapiens
accactgcattgaag

SEQ ID NO: 1232412 - DNA, 15 bp, Homo sapiens
taccactgcattgaa

SEQ ID NO: 1232413 - DNA, 15 bp, Homo sapiens
ctaccactgcattga

SEQ ID NO: 1232414 - DNA, 15 bp, Homo sapiens
gctaccactgcattg

SEQ ID NO: 1232415 - DNA, 15 bp, Homo sapiens
tgctaccactgcatt

SEQ ID NO: 1232416 - DNA, 15 bp, Homo sapiens
gtgctaccactgcat

SEQ ID NO: 1232417 - DNA, 15 bp, Homo sapiens
agtgctaccactgca

SEQ ID NO: 1232418 - DNA, 15 bp, Homo sapiens
tagtgctaccactgc

SEQ ID NO: 1232419 - DNA, 15 bp, Homo sapiens
gtagtgctaccactg

SEQ ID NO: 1232420 - DNA, 15 bp, Homo sapiens
ggtagtgctaccact

SEQ ID NO: 1232421 - DNA, 15 bp, Homo sapiens
aggtagtgctaccac

SEQ ID NO: 1232422 - DNA, 15 bp, Homo sapiens
gaggtagtgctacca

SEQ ID NO: 1232423 - DNA, 15 bp, Homo sapiens
agaggtagtgctacc

SEQ ID NO: 1232424 - DNA, 15 bp, Homo sapiens
cagaggtagtgctac

SEQ ID NO: 1232425 - DNA, 15 bp, Homo sapiens
tcagaggtagtgcta

SEQ ID NO: 1232426 - DNA, 15 bp, Homo sapiens
atcagaggtagtgct

SEQ ID NO: 1232427 - DNA, 15 bp, Homo sapiens
catcagaggtagtgc

SEQ ID NO: 1232428 - DNA, 15 bp, Homo sapiens
tcatcagaggtagtg

SEQ ID NO: 1232429 - DNA, 15 bp, Homo sapiens
atcatcagaggtagt

SEQ ID NO: 1232430 - DNA, 15 bp, Homo sapiens
tatcatcagaggtag

SEQ ID NO: 1232431 - DNA, 15 bp, Homo sapiens
gtatcatcagaggta

SEQ ID NO: 1232432 - DNA, 15 bp, Homo sapiens
agtatcatcagaggt

SEQ ID NO: 1232433 - DNA, 15 bp, Homo sapiens
tagtatcatcagagg

SEQ ID NO: 1232434 - DNA, 15 bp, Homo sapiens
gtagtatcatcagag

SEQ ID NO: 1232435 - DNA, 15 bp, Homo sapiens
ggtagtatcatcaga

SEQ ID NO: 1232436 - DNA, 15 bp, Homo sapiens
tggtagtatcatcag

SEQ ID NO: 1232437 - DNA, 15 bp, Homo sapiens
ttggtagtatcatca

SEQ ID NO: 1232438 - DNA, 15 bp, Homo sapiens
cttggtagtatcatc

SEQ ID NO: 1232439 - DNA, 15 bp, Homo sapiens
gcttggtagtatcat

SEQ ID NO: 1232440 - DNA, 15 bp, Homo sapiens
tgcttggtagtatca

SEQ ID NO: 1232441 - DNA, 15 bp, Homo sapiens
ttgcttggtagtatc

SEQ ID NO: 1232442 - DNA, 15 bp, Homo sapiens
tttgcttggtagtat

SEQ ID NO: 1232443 - DNA, 15 bp, Homo sapiens
gtttgcttggtagta

SEQ ID NO: 1232444 - DNA, 15 bp, Homo sapiens
agtttgcttggtagt

SEQ ID NO: 1232445 - DNA, 15 bp, Homo sapiens
tagtttgcttggtag

SEQ ID NO: 1232446 - DNA, 15 bp, Homo sapiens
atagtttgcttggta

SEQ ID NO: 1232447 - DNA, 15 bp, Homo sapiens
aatagtttgcttggt

SEQ ID NO: 1232448 - DNA, 15 bp, Homo sapiens
taatagtttgcttgg

SEQ ID NO: 1232449 - DNA, 15 bp, Homo sapiens
ttaatagtttgcttg

SEQ ID NO: 1232450 - DNA, 15 bp, Homo sapiens
cttaatagtttgctt

SEQ ID NO: 1232451 - DNA, 15 bp, Homo sapiens
tcttaatagtttgct

SEQ ID NO: 1232452 - DNA, 15 bp, Homo sapiens
ttcttaatagtttgc

SEQ ID NO: 1232453 - DNA, 15 bp, Homo sapiens
tttcttaatagtttg

SEQ ID NO: 1232454 - DNA, 15 bp, Homo sapiens
gtttcttaatagttt

SEQ ID NO: 1232455 - DNA, 15 bp, Homo sapiens
tgtttcttaatagtt

SEQ ID NO: 1232456 - DNA, 15 bp, Homo sapiens
ctgtttcttaatagt

SEQ ID NO: 1232457 - DNA, 15 bp, Homo sapiens
tctgtttcttaatag

SEQ ID NO: 1232458 - DNA, 15 bp, Homo sapiens
ttctgtttcttaata

SEQ ID NO: 1232459 - DNA, 15 bp, Homo sapiens
tttctgtttcttaat

SEQ ID NO: 1232460 - DNA, 15 bp, Homo sapiens
ttttctgtttcttaa

SEQ ID NO: 1232461 - DNA, 15 bp, Homo sapiens
cttttctgtttctta

SEQ ID NO: 1232462 - DNA, 15 bp, Homo sapiens
gcttttctgtttctt

SEQ ID NO: 1232463 - DNA, 15 bp, Homo sapiens
agcttttctgtttct

SEQ ID NO: 1232464 - DNA, 15 bp, Homo sapiens
gagcttttctgtttc

SEQ ID NO: 1232465 - DNA, 15 bp, Homo sapiens
tgagcttttctgttt

SEQ ID NO: 1232466 - DNA, 15 bp, Homo sapiens
gtgagcttttctgtt

SEQ ID NO: 1232467 - DNA, 15 bp, Homo sapiens
tgtgagcttttctgt

SEQ ID NO: 1232468 - DNA, 15 bp, Homo sapiens
ctgtgagcttttctg

SEQ ID NO: 1232469 - DNA, 15 bp, Homo sapiens
tctgtgagcttttct

SEQ ID NO: 1232470 - DNA, 15 bp, Homo sapiens
atctgtgagcttttc

SEQ ID NO: 1232471 - DNA, 15 bp, Homo sapiens
gatctgtgagctttt

SEQ ID NO: 1232472 - DNA, 15 bp, Homo sapiens
tgatctgtgagcttt

SEQ ID NO: 1232473 - DNA, 15 bp, Homo sapiens
ttgatctgtgagctt

SEQ ID NO: 1232474 - DNA, 15 bp, Homo sapiens
tttgatctgtgagct

SEQ ID NO: 1232475 - DNA, 15 bp, Homo sapiens
atttgatctgtgagc

SEQ ID NO: 1232476 - DNA, 15 bp, Homo sapiens
aatttgatctgtgag

SEQ ID NO: 1232477 - DNA, 15 bp, Homo sapiens
taatttgatctgtga

SEQ ID NO: 1232478 - DNA, 15 bp, Homo sapiens
ttaatttgatctgtg

SEQ ID NO: 1232479 - DNA, 15 bp, Homo sapiens
cttaatttgatctgt

SEQ ID NO: 1232480 - DNA, 15 bp, Homo sapiens
tcttaatttgatctg

SEQ ID NO: 1232481 - DNA, 15 bp, Homo sapiens
atcttaatttgatct

SEQ ID NO: 1232482 - DNA, 15 bp, Homo sapiens
catcttaatttgatc

SEQ ID NO: 1232483 - DNA, 15 bp, Homo sapiens
gcatcttaatttgat

SEQ ID NO: 1232484 - DNA, 15 bp, Homo sapiens
agcatcttaatttga

SEQ ID NO: 1232485 - DNA, 15 bp, Homo sapiens
tagcatcttaatttg

SEQ ID NO: 1232486 - DNA, 15 bp, Homo sapiens
ctagcatcttaattt

SEQ ID NO: 1232487 - DNA, 15 bp, Homo sapiens
tctagcatcttaatt

SEQ ID NO: 1232488 - DNA, 15 bp, Homo sapiens
ttctagcatcttaat

SEQ ID NO: 1232489 - DNA, 15 bp, Homo sapiens
attctagcatcttaa

SEQ ID NO: 1232490 - DNA, 15 bp, Homo sapiens
gattctagcatctta

SEQ ID NO: 1232491 - DNA, 15 bp, Homo sapiens
cgattctagcatctt

SEQ ID NO: 1232492 - DNA, 15 bp, Homo sapiens
acgattctagcatct

SEQ ID NO: 1232493 - DNA, 15 bp, Homo sapiens
tacgattctagcatc

SEQ ID NO: 1232494 - DNA, 15 bp, Homo sapiens
atacgattctagcat

SEQ ID NO: 1232495 - DNA, 15 bp, Homo sapiens
aatacgattctagca

SEQ ID NO: 1232496 - DNA, 15 bp, Homo sapiens
taatacgattctagc

SEQ ID NO: 1232497 - DNA, 15 bp, Homo sapiens
ttaatacgattctag

SEQ ID NO: 1232498 - DNA, 15 bp, Homo sapiens
tttaatacgattcta

SEQ ID NO: 1232499 - DNA, 15 bp, Homo sapiens
atttaatacgattct

SEQ ID NO: 1232500 - DNA, 15 bp, Homo sapiens
gatttaatacgattc

SEQ ID NO: 1232501 - DNA, 15 bp, Homo sapiens
tgatttaatacgatt

SEQ ID NO: 1232502 - DNA, 15 bp, Homo sapiens
ttgatttaatacgat

SEQ ID NO: 1232503 - DNA, 15 bp, Homo sapiens
attgatttaatacga

SEQ ID NO: 1232504 - DNA, 15 bp, Homo sapiens
aattgatttaatacg

SEQ ID NO: 1232505 - DNA, 15 bp, Homo sapiens
taattgatttaatac

SEQ ID NO: 1232506 - DNA, 15 bp, Homo sapiens
ttaattgatttaata

SEQ ID NO: 1232507 - DNA, 15 bp, Homo sapiens
tttaattgatttaat

SEQ ID NO: 1232508 - DNA, 15 bp, Homo sapiens
atttaattgatttaa

SEQ ID NO: 1232509 - DNA, 15 bp, Homo sapiens
tatttaattgattta

SEQ ID NO: 1232510 - DNA, 15 bp, Homo sapiens
gtatttaattgattt

SEQ ID NO: 1232511 - DNA, 15 bp, Homo sapiens
tgtatttaattgatt

SEQ ID NO: 1232512 - DNA, 15 bp, Homo sapiens
atgtatttaattgat

SEQ ID NO: 1232513 - DNA, 15 bp, Homo sapiens
catgtatttaattga

SEQ ID NO: 1232514 - DNA, 15 bp, Homo sapiens
ccatgtatttaattg

SEQ ID NO: 1232515 - DNA, 15 bp, Homo sapiens
tccatgtatttaatt

SEQ ID NO: 1232516 - DNA, 15 bp, Homo sapiens
ttccatgtatttaat

SEQ ID NO: 1232517 - DNA, 15 bp, Homo sapiens
gttccatgtatttaa

SEQ ID NO: 1232518 - DNA, 15 bp, Homo sapiens
tgttccatgtattta

SEQ ID NO: 1232519 - DNA, 15 bp, Homo sapiens
ttgttccatgtattt

SEQ ID NO: 1232520 - DNA, 15 bp, Homo sapiens
tttgttccatgtatt

SEQ ID NO: 1232521 - DNA, 15 bp, Homo sapiens
ttttgttccatgtat

SEQ ID NO: 1232522 - DNA, 15 bp, Homo sapiens
gttttgttccatgta

SEQ ID NO: 1232523 - DNA, 15 bp, Homo sapiens
tgttttgttccatgt

SEQ ID NO: 1232524 - DNA, 15 bp, Homo sapiens
ctgttttgttccatg

SEQ ID NO: 1232525 - DNA, 15 bp, Homo sapiens
cctgttttgttccat

SEQ ID NO: 1232526 - DNA, 15 bp, Homo sapiens
gcctgttttgttcca

SEQ ID NO: 1232527 - DNA, 15 bp, Homo sapiens
tgcctgttttgttcc

SEQ ID NO: 1232528 - DNA, 15 bp, Homo sapiens
ttgcctgttttgttc

SEQ ID NO: 1232529 - DNA, 15 bp, Homo sapiens
tttgcctgttttgtt

SEQ ID NO: 1232530 - DNA, 15 bp, Homo sapiens
ttttgcctgttttgt

SEQ ID NO: 1232531 - DNA, 15 bp, Homo sapiens
tttttgcctgttttg

SEQ ID NO: 1232532 - DNA, 15 bp, Homo sapiens
ctttttgcctgtttt

SEQ ID NO: 1232533 - DNA, 15 bp, Homo sapiens
tctttttgcctgttt

SEQ ID NO: 1232534 - DNA, 15 bp, Homo sapiens
atctttttgcctgtt

SEQ ID NO: 1232535 - DNA, 15 bp, Homo sapiens
catctttttgcctgt

SEQ ID NO: 1232536 - DNA, 15 bp, Homo sapiens
ccatctttttgcctg

SEQ ID NO: 1232537 - DNA, 15 bp, Homo sapiens
cccatctttttgcct

SEQ ID NO: 1232538 - DNA, 15 bp, Homo sapiens
tcccatctttttgcc

SEQ ID NO: 1232539 - DNA, 15 bp, Homo sapiens
atcccatctttttgc

SEQ ID NO: 1232540 - DNA, 15 bp, Homo sapiens
tatcccatctttttg

SEQ ID NO: 1232541 - DNA, 15 bp, Homo sapiens
gtatcccatcttttt

SEQ ID NO: 1232542 - DNA, 15 bp, Homo sapiens
tgtatcccatctttt

SEQ ID NO: 1232543 - DNA, 15 bp, Homo sapiens
atgtatcccatcttt

SEQ ID NO: 1232544 - DNA, 15 bp, Homo sapiens
aatgtatcccatctt

SEQ ID NO: 1232545 - DNA, 15 bp, Homo sapiens
taatgtatcccatct

SEQ ID NO: 1232546 - DNA, 15 bp, Homo sapiens
ttaatgtatcccatc

SEQ ID NO: 1232547 - DNA, 15 bp, Homo sapiens
attaatgtatcccat

SEQ ID NO: 1232548 - DNA, 15 bp, Homo sapiens
gattaatgtatccca

SEQ ID NO: 1232549 - DNA, 15 bp, Homo sapiens
ggattaatgtatccc

SEQ ID NO: 1232550 - DNA, 15 bp, Homo sapiens
tggattaatgtatcc

SEQ ID NO: 1232551 - DNA, 15 bp, Homo sapiens
atggattaatgtatc

SEQ ID NO: 1232552 - DNA, 15 bp, Homo sapiens
aatggattaatgtat

SEQ ID NO: 1232553 - DNA, 15 bp, Homo sapiens
aaatggattaatgta

SEQ ID NO: 1232554 - DNA, 15 bp, Homo sapiens
taaatggattaatgt

SEQ ID NO: 1232555 - DNA, 15 bp, Homo sapiens
ctaaatggattaatg

SEQ ID NO: 1232556 - DNA, 15 bp, Homo sapiens
cctaaatggattaat

SEQ ID NO: 1232557 - DNA, 15 bp, Homo sapiens
tcctaaatggattaa

SEQ ID NO: 1232558 - DNA, 15 bp, Homo sapiens
atcctaaatggatta

SEQ ID NO: 1232559 - DNA, 15 bp, Homo sapiens
tatcctaaatggatt

SEQ ID NO: 1232560 - DNA, 15 bp, Homo sapiens
ttatcctaaatggat

SEQ ID NO: 1232561 - DNA, 15 bp, Homo sapiens
cttatcctaaatgga

SEQ ID NO: 1232562 - DNA, 15 bp, Homo sapiens
ccttatcctaaatgg

SEQ ID NO: 1232563 - DNA, 15 bp, Homo sapiens
accttatcctaaatg

SEQ ID NO: 1232564 - DNA, 15 bp, Homo sapiens
caccttatcctaaat

SEQ ID NO: 1232565 - DNA, 15 bp, Homo sapiens
gcaccttatcctaaa

SEQ ID NO: 1232566 - DNA, 15 bp, Homo sapiens
tgcaccttatcctaa

SEQ ID NO: 1232567 - DNA, 15 bp, Homo sapiens
atgcaccttatccta

SEQ ID NO: 1232568 - DNA, 15 bp, Homo sapiens
catgcaccttatcct

SEQ ID NO: 1232569 - DNA, 15 bp, Homo sapiens
acatgcaccttatcc

SEQ ID NO: 1232570 - DNA, 15 bp, Homo sapiens
cacatgcaccttatc

SEQ ID NO: 1232571 - DNA, 15 bp, Homo sapiens
ccacatgcaccttat

SEQ ID NO: 1232572 - DNA, 15 bp, Homo sapiens
tccacatgcacctta

SEQ ID NO: 1232573 - DNA, 15 bp, Homo sapiens
ctccacatgcacctt

SEQ ID NO: 1232574 - DNA, 15 bp, Homo sapiens
actccacatgcacct

SEQ ID NO: 1232575 - DNA, 15 bp, Homo sapiens
tactccacatgcacc

SEQ ID NO: 1232576 - DNA, 15 bp, Homo sapiens
ctactccacatgcac

SEQ ID NO: 1232577 - DNA, 15 bp, Homo sapiens
tctactccacatgca

SEQ ID NO: 1232578 - DNA, 15 bp, Homo sapiens
ttctactccacatgc

SEQ ID NO: 1232579 - DNA, 15 bp, Homo sapiens
tttctactccacatg

SEQ ID NO: 1232580 - DNA, 15 bp, Homo sapiens
ctttctactccacat

SEQ ID NO: 1232581 - DNA, 15 bp, Homo sapiens
cctttctactccaca

SEQ ID NO: 1232582 - DNA, 15 bp, Homo sapiens
ccctttctactccac

SEQ ID NO: 1232583 - DNA, 15 bp, Homo sapiens
accctttctactcca

SEQ ID NO: 1232584 - DNA, 15 bp, Homo sapiens
taccctttctactcc

SEQ ID NO: 1232585 - DNA, 15 bp, Homo sapiens
ctaccctttctactc

SEQ ID NO: 1232586 - DNA, 15 bp, Homo sapiens
gctaccctttctact

SEQ ID NO: 1232587 - DNA, 15 bp, Homo sapiens
tgctaccctttctac

SEQ ID NO: 1232588 - DNA, 15 bp, Homo sapiens
ctgctaccctttcta

SEQ ID NO: 1232589 - DNA, 15 bp, Homo sapiens
actgctaccctttct

SEQ ID NO: 1232590 - DNA, 15 bp, Homo sapiens
cactgctaccctttc

SEQ ID NO: 1232591 - DNA, 15 bp, Homo sapiens
acactgctacccttt

SEQ ID NO: 1232592 - DNA, 15 bp, Homo sapiens
aacactgctaccctt

SEQ ID NO: 1232593 - DNA, 15 bp, Homo sapiens
aaacactgctaccct

SEQ ID NO: 1232594 - DNA, 15 bp, Homo sapiens
taaacactgctaccc

SEQ ID NO: 1232595 - DNA, 15 bp, Homo sapiens
gtaaacactgctacc

SEQ ID NO: 1232596 - DNA, 15 bp, Homo sapiens
tgtaaacactgctac

SEQ ID NO: 1232597 - DNA, 15 bp, Homo sapiens
atgtaaacactgcta

SEQ ID NO: 1232598 - DNA, 15 bp, Homo sapiens
catgtaaacactgct

SEQ ID NO: 1232599 - DNA, 15 bp, Homo sapiens
acatgtaaacactgc

SEQ ID NO: 1232600 - DNA, 15 bp, Homo sapiens
gacatgtaaacactg

SEQ ID NO: 1232601 - DNA, 15 bp, Homo sapiens
ggacatgtaaacact

SEQ ID NO: 1232602 - DNA, 15 bp, Homo sapiens
aggacatgtaaacac

SEQ ID NO: 1232603 - DNA, 15 bp, Homo sapiens
gaggacatgtaaaca

SEQ ID NO: 1232604 - DNA, 15 bp, Homo sapiens
agaggacatgtaaac

SEQ ID NO: 1232605 - DNA, 15 bp, Homo sapiens
cagaggacatgtaaa

SEQ ID NO: 1232606 - DNA, 15 bp, Homo sapiens
tcagaggacatgtaa

SEQ ID NO: 1232607 - DNA, 15 bp, Homo sapiens
atcagaggacatgta

SEQ ID NO: 1232608 - DNA, 15 bp, Homo sapiens
tatcagaggacatgt

SEQ ID NO: 1232609 - DNA, 15 bp, Homo sapiens
ttatcagaggacatg

SEQ ID NO: 1232610 - DNA, 15 bp, Homo sapiens
gttatcagaggacat

SEQ ID NO: 1232611 - DNA, 15 bp, Homo sapiens
tgttatcagaggaca

SEQ ID NO: 1232612 - DNA, 15 bp, Homo sapiens
gtgttatcagaggac

SEQ ID NO: 1232613 - DNA, 15 bp, Homo sapiens
agtgttatcagagga

SEQ ID NO: 1232614 - DNA, 15 bp, Homo sapiens
cagtgttatcagagg

SEQ ID NO: 1232615 - DNA, 15 bp, Homo sapiens
ccagtgttatcagag

SEQ ID NO: 1232616 - DNA, 15 bp, Homo sapiens
gccagtgttatcaga

SEQ ID NO: 1232617 - DNA, 15 bp, Homo sapiens
cgccagtgttatcag

SEQ ID NO: 1232618 - DNA, 15 bp, Homo sapiens
acgccagtgttatca

SEQ ID NO: 1232619 - DNA, 15 bp, Homo sapiens
tacgccagtgttatc

SEQ ID NO: 1232620 - DNA, 15 bp, Homo sapiens
ctacgccagtgttat

SEQ ID NO: 1232621 - DNA, 15 bp, Homo sapiens
actacgccagtgtta

SEQ ID NO: 1232622 - DNA, 15 bp, Homo sapiens
gactacgccagtgtt

SEQ ID NO: 1232623 - DNA, 15 bp, Homo sapiens
tgactacgccagtgt

SEQ ID NO: 1232624 - DNA, 15 bp, Homo sapiens
gtgactacgccagtg

SEQ ID NO: 1232625 - DNA, 15 bp, Homo sapiens
tgtgactacgccagt

SEQ ID NO: 1232626 - DNA, 15 bp, Homo sapiens
ttgtgactacgccag

SEQ ID NO: 1232627 - DNA, 15 bp, Homo sapiens
cttgtgactacgcca

SEQ ID NO: 1232628 - DNA, 15 bp, Homo sapiens
tcttgtgactacgcc

SEQ ID NO: 1232629 - DNA, 15 bp, Homo sapiens
ctcttgtgactacgc

SEQ ID NO: 1232630 - DNA, 15 bp, Homo sapiens
gctcttgtgactacg

SEQ ID NO: 1232631 - DNA, 15 bp, Homo sapiens
agctcttgtgactac

SEQ ID NO: 1232632 - DNA, 15 bp, Homo sapiens
tagctcttgtgacta

SEQ ID NO: 1232633 - DNA, 15 bp, Homo sapiens
ttagctcttgtgact

SEQ ID NO: 1232634 - DNA, 15 bp, Homo sapiens
cttagctcttgtgac

SEQ ID NO: 1232635 - DNA, 15 bp, Homo sapiens
ccttagctcttgtga

SEQ ID NO: 1232636 - DNA, 15 bp, Homo sapiens
tccttagctcttgtg

SEQ ID NO: 1232637 - DNA, 15 bp, Homo sapiens
gtccttagctcttgt

SEQ ID NO: 1232638 - DNA, 15 bp, Homo sapiens
tgtccttagctcttg

SEQ ID NO: 1232639 - DNA, 15 bp, Homo sapiens
ttgtccttagctctt

SEQ ID NO: 1232640 - DNA, 15 bp, Homo sapiens
cttgtccttagctct

SEQ ID NO: 1232641 - DNA, 15 bp, Homo sapiens
tcttgtccttagctc

SEQ ID NO: 1232642 - DNA, 15 bp, Homo sapiens
ttcttgtccttagct

SEQ ID NO: 1232643 - DNA, 15 bp, Homo sapiens
gttcttgtccttagc

SEQ ID NO: 1232644 - DNA, 15 bp, Homo sapiens
ggttcttgtccttag

SEQ ID NO: 1232645 - DNA, 15 bp, Homo sapiens
tggttcttgtcctta

SEQ ID NO: 1232646 - DNA, 15 bp, Homo sapiens
ttggttcttgtcctt

SEQ ID NO: 1232647 - DNA, 15 bp, Homo sapiens
cttggttcttgtcct

SEQ ID NO: 1232648 - DNA, 15 bp, Homo sapiens
ccttggttcttgtcc

SEQ ID NO: 1232649 - DNA, 15 bp, Homo sapiens
cccttggttcttgtc

SEQ ID NO: 1232650 - DNA, 15 bp, Homo sapiens
acccttggttcttgt

SEQ ID NO: 1232651 - DNA, 15 bp, Homo sapiens
cacccttggttcttg

SEQ ID NO: 1232652 - DNA, 15 bp, Homo sapiens
tcacccttggttctt

SEQ ID NO: 1232653 - DNA, 15 bp, Homo sapiens
ctcacccttggttct

SEQ ID NO: 1232654 - DNA, 15 bp, Homo sapiens
tctcacccttggttc

SEQ ID NO: 1232655 - DNA, 15 bp, Homo sapiens
ttctcacccttggtt

SEQ ID NO: 1232656 - DNA, 15 bp, Homo sapiens
attctcacccttggt

SEQ ID NO: 1232657 - DNA, 15 bp, Homo sapiens
aattctcacccttgg

SEQ ID NO: 1232658 - DNA, 15 bp, Homo sapiens
aaattctcacccttg

SEQ ID NO: 1232659 - DNA, 15 bp, Homo sapiens
caaattctcaccctt

SEQ ID NO: 1232660 - DNA, 15 bp, Homo sapiens
tcaaattctcaccct

SEQ ID NO: 1232661 - DNA, 15 bp, Homo sapiens
ctcaaattctcaccc

SEQ ID NO: 1232662 - DNA, 15 bp, Homo sapiens
tctcaaattctcacc

SEQ ID NO: 1232663 - DNA, 15 bp, Homo sapiens
atctcaaattctcac

SEQ ID NO: 1232664 - DNA, 15 bp, Homo sapiens
aatctcaaattctca

SEQ ID NO: 1232665 - DNA, 15 bp, Homo sapiens
gaatctcaaattctc

SEQ ID NO: 1232666 - DNA, 15 bp, Homo sapiens
tgaatctcaaattct

SEQ ID NO: 1232667 - DNA, 15 bp, Homo sapiens
ttgaatctcaaattc

SEQ ID NO: 1232668 - DNA, 15 bp, Homo sapiens
attgaatctcaaatt

SEQ ID NO: 1232669 - DNA, 15 bp, Homo sapiens
aattgaatctcaaat

SEQ ID NO: 1232670 - DNA, 15 bp, Homo sapiens
taattgaatctcaaa

SEQ ID NO: 1232671 - DNA, 15 bp, Homo sapiens
ctaattgaatctcaa

SEQ ID NO: 1232672 - DNA, 15 bp, Homo sapiens
cctaattgaatctca

SEQ ID NO: 1232673 - DNA, 15 bp, Homo sapiens
ccctaattgaatctc

SEQ ID NO: 1232674 - DNA, 15 bp, Homo sapiens
gccctaattgaatct

SEQ ID NO: 1232675 - DNA, 15 bp, Homo sapiens
ggccctaattgaatc

SEQ ID NO: 1232676 - DNA, 15 bp, Homo sapiens
tggccctaattgaat

SEQ ID NO: 1232677 - DNA, 15 bp, Homo sapiens
ctggccctaattgaa

SEQ ID NO: 1232678 - DNA, 15 bp, Homo sapiens
cctggccctaattga

SEQ ID NO: 1232679 - DNA, 15 bp, Homo sapiens
ccctggccctaattg

SEQ ID NO: 1232680 - DNA, 15 bp, Homo sapiens
tccctggccctaatt

SEQ ID NO: 1232681 - DNA, 15 bp, Homo sapiens
atccctggccctaat

SEQ ID NO: 1232682 - DNA, 15 bp, Homo sapiens
gatccctggccctaa

SEQ ID NO: 1232683 - DNA, 15 bp, Homo sapiens
agatccctggcccta

SEQ ID NO: 1232684 - DNA, 15 bp, Homo sapiens
cagatccctggccct

SEQ ID NO: 1232685 - DNA, 15 bp, Homo sapiens
gcagatccctggccc

SEQ ID NO: 1232686 - DNA, 15 bp, Homo sapiens
tgcagatccctggcc

SEQ ID NO: 1232687 - DNA, 15 bp, Homo sapiens
ctgcagatccctggc

SEQ ID NO: 1232688 - DNA, 15 bp, Homo sapiens
tctgcagatccctgg

SEQ ID NO: 1232689 - DNA, 15 bp, Homo sapiens
ttctgcagatccctg

SEQ ID NO: 1232690 - DNA, 15 bp, Homo sapiens
gttctgcagatccct

SEQ ID NO: 1232691 - DNA, 15 bp, Homo sapiens
tgttctgcagatccc

SEQ ID NO: 1232692 - DNA, 15 bp, Homo sapiens
ctgttctgcagatcc

SEQ ID NO: 1232693 - DNA, 15 bp, Homo sapiens
tctgttctgcagatc

SEQ ID NO: 1232694 - DNA, 15 bp, Homo sapiens
atctgttctgcagat

SEQ ID NO: 1232695 - DNA, 15 bp, Homo sapiens
catctgttctgcaga

SEQ ID NO: 1232696 - DNA, 15 bp, Homo sapiens
acatctgttctgcag

SEQ ID NO: 1232697 - DNA, 15 bp, Homo sapiens
tacatctgttctgca

SEQ ID NO: 1232698 - DNA, 15 bp, Homo sapiens
gtacatctgttctgc

SEQ ID NO: 1232699 - DNA, 15 bp, Homo sapiens
ggtacatctgttctg

SEQ ID NO: 1232700 - DNA, 15 bp, Homo sapiens
aggtacatctgttct

SEQ ID NO: 1232701 - DNA, 15 bp, Homo sapiens
caggtacatctgttc

SEQ ID NO: 1232702 - DNA, 15 bp, Homo sapiens
ccaggtacatctgtt

SEQ ID NO: 1232703 - DNA, 15 bp, Homo sapiens
tccaggtacatctgt

SEQ ID NO: 1232704 - DNA, 15 bp, Homo sapiens
ttccaggtacatctg

SEQ ID NO: 1232705 - DNA, 15 bp, Homo sapiens
gttccaggtacatct

SEQ ID NO: 1232706 - DNA, 15 bp, Homo sapiens
tgttccaggtacatc

SEQ ID NO: 1232707 - DNA, 15 bp, Homo sapiens
atgttccaggtacat

SEQ ID NO: 1232708 - DNA, 15 bp, Homo sapiens
catgttccaggtaca

SEQ ID NO: 1232709 - DNA, 15 bp, Homo sapiens
ccatgttccaggtac

SEQ ID NO: 1232710 - DNA, 15 bp, Homo sapiens
cccatgttccaggta

SEQ ID NO: 1232711 - DNA, 15 bp, Homo sapiens
acccatgttccaggt

SEQ ID NO: 1232712 - DNA, 15 bp, Homo sapiens
cacccatgttccagg

SEQ ID NO: 1232713 - DNA, 15 bp, Homo sapiens
acacccatgttccag

SEQ ID NO: 1232714 - DNA, 15 bp, Homo sapiens
gacacccatgttcca

SEQ ID NO: 1232715 - DNA, 15 bp, Homo sapiens
tgacacccatgttcc

SEQ ID NO: 1232716 - DNA, 15 bp, Homo sapiens
ttgacacccatgttc

SEQ ID NO: 1232717 - DNA, 15 bp, Homo sapiens
attgacacccatgtt

SEQ ID NO: 1232718 - DNA, 15 bp, Homo sapiens
cattgacacccatgt

SEQ ID NO: 1232719 - DNA, 15 bp, Homo sapiens
acattgacacccatg

SEQ ID NO: 1232720 - DNA, 15 bp, Homo sapiens
cacattgacacccat

SEQ ID NO: 1232721 - DNA, 15 bp, Homo sapiens
gcacattgacaccca

SEQ ID NO: 1232722 - DNA, 15 bp, Homo sapiens
agcacattgacaccc

SEQ ID NO: 1232723 - DNA, 15 bp, Homo sapiens
gagcacattgacacc

SEQ ID NO: 1232724 - DNA, 15 bp, Homo sapiens
agagcacattgacac

SEQ ID NO: 1232725 - DNA, 15 bp, Homo sapiens
aagagcacattgaca

SEQ ID NO: 1232726 - DNA, 15 bp, Homo sapiens
taagagcacattgac

SEQ ID NO: 1232727 - DNA, 15 bp, Homo sapiens
ataagagcacattga

SEQ ID NO: 1232728 - DNA, 15 bp, Homo sapiens
gataagagcacattg

SEQ ID NO: 1232729 - DNA, 15 bp, Homo sapiens
tgataagagcacatt

SEQ ID NO: 1232730 - DNA, 15 bp, Homo sapiens
ctgataagagcacat

SEQ ID NO: 1232731 - DNA, 15 bp, Homo sapiens
tctgataagagcaca

SEQ ID NO: 1232732 - DNA, 15 bp, Homo sapiens
ctctgataagagcac

SEQ ID NO: 1232733 - DNA, 15 bp, Homo sapiens
tctctgataagagca

SEQ ID NO: 1232734 - DNA, 15 bp, Homo sapiens
ctctctgataagagc

SEQ ID NO: 1232735 - DNA, 15 bp, Homo sapiens
tctctctgataagag

SEQ ID NO: 1232736 - DNA, 15 bp, Homo sapiens
gtctctctgataaga

SEQ ID NO: 1232737 - DNA, 15 bp, Homo sapiens
tgtctctctgataag

SEQ ID NO: 1232738 - DNA, 15 bp, Homo sapiens
ttgtctctctgataa

SEQ ID NO: 1232739 - DNA, 15 bp, Homo sapiens
tttgtctctctgata

SEQ ID NO: 1232740 - DNA, 15 bp, Homo sapiens
ctttgtctctctgat

SEQ ID NO: 1232741 - DNA, 15 bp, Homo sapiens
cctttgtctctctga

SEQ ID NO: 1232742 - DNA, 15 bp, Homo sapiens
ccctttgtctctctg

SEQ ID NO: 1232743 - DNA, 15 bp, Homo sapiens
cccctttgtctctct

SEQ ID NO: 1232744 - DNA, 15 bp, Homo sapiens
gcccctttgtctctc

SEQ ID NO: 1232745 - DNA, 15 bp, Homo sapiens
tgcccctttgtctct

SEQ ID NO: 1232746 - DNA, 15 bp, Homo sapiens
ctgcccctttgtctc

SEQ ID NO: 1232747 - DNA, 15 bp, Homo sapiens
actgcccctttgtct

SEQ ID NO: 1232748 - DNA, 15 bp, Homo sapiens
aactgcccctttgtc

SEQ ID NO: 1232749 - DNA, 15 bp, Homo sapiens
taactgcccctttgt

SEQ ID NO: 1232750 - DNA, 15 bp, Homo sapiens
ataactgcccctttg

SEQ ID NO: 1232751 - DNA, 15 bp, Homo sapiens
aataactgccccttt

SEQ ID NO: 1232752 - DNA, 15 bp, Homo sapiens
gaataactgcccctt

SEQ ID NO: 1232753 - DNA, 15 bp, Homo sapiens
ggaataactgcccct

SEQ ID NO: 1232754 - DNA, 15 bp, Homo sapiens
aggaataactgcccc

SEQ ID NO: 1232755 - DNA, 15 bp, Homo sapiens
caggaataactgccc

SEQ ID NO: 1232756 - DNA, 15 bp, Homo sapiens
ccaggaataactgcc

SEQ ID NO: 1232757 - DNA, 15 bp, Homo sapiens
gccaggaataactgc

SEQ ID NO: 1232758 - DNA, 15 bp, Homo sapiens
ggccaggaataactg

SEQ ID NO: 1232759 - DNA, 15 bp, Homo sapiens
tggccaggaataact

SEQ ID NO: 1232760 - DNA, 15 bp, Homo sapiens
gtggccaggaataac

SEQ ID NO: 1232761 - DNA, 15 bp, Homo sapiens
cgtggccaggaataa

SEQ ID NO: 1232762 - DNA, 15 bp, Homo sapiens
tcgtggccaggaata

SEQ ID NO: 1232763 - DNA, 15 bp, Homo sapiens
ttcgtggccaggaat

SEQ ID NO: 1232764 - DNA, 15 bp, Homo sapiens
tttcgtggccaggaa

SEQ ID NO: 1232765 - DNA, 15 bp, Homo sapiens
ctttcgtggccagga

SEQ ID NO: 1232766 - DNA, 15 bp, Homo sapiens
actttcgtggccagg

SEQ ID NO: 1232767 - DNA, 15 bp, Homo sapiens
tactttcgtggccag

SEQ ID NO: 1232768 - DNA, 15 bp, Homo sapiens
ctactttcgtggcca

SEQ ID NO: 1232769 - DNA, 15 bp, Homo sapiens
actactttcgtggcc

SEQ ID NO: 1232770 - DNA, 15 bp, Homo sapiens
aactactttcgtggc

SEQ ID NO: 1232771 - DNA, 15 bp, Homo sapiens
gaactactttcgtgg

SEQ ID NO: 1232772 - DNA, 15 bp, Homo sapiens
agaactactttcgtg

SEQ ID NO: 1232773 - DNA, 15 bp, Homo sapiens
aagaactactttcgt

SEQ ID NO: 1232774 - DNA, 15 bp, Homo sapiens
caagaactactttcg

SEQ ID NO: 1232775 - DNA, 15 bp, Homo sapiens
ccaagaactactttc

SEQ ID NO: 1232776 - DNA, 15 bp, Homo sapiens
gccaagaactacttt

SEQ ID NO: 1232777 - DNA, 15 bp, Homo sapiens
agccaagaactactt

SEQ ID NO: 1232778 - DNA, 15 bp, Homo sapiens
gagccaagaactact

SEQ ID NO: 1232779 - DNA, 15 bp, Homo sapiens
tgagccaagaactac

SEQ ID NO: 1232780 - DNA, 15 bp, Homo sapiens
atgagccaagaacta

SEQ ID NO: 1232781 - DNA, 15 bp, Homo sapiens
aatgagccaagaact

SEQ ID NO: 1232782 - DNA, 15 bp, Homo sapiens
caatgagccaagaac

SEQ ID NO: 1232783 - DNA, 15 bp, Homo sapiens
tcaatgagccaagaa

SEQ ID NO: 1232784 - DNA, 15 bp, Homo sapiens
ctcaatgagccaaga

SEQ ID NO: 1232785 - DNA, 15 bp, Homo sapiens
gctcaatgagccaag

SEQ ID NO: 1232786 - DNA, 15 bp, Homo sapiens
tgctcaatgagccaa

SEQ ID NO: 1232787 - DNA, 15 bp, Homo sapiens
ctgctcaatgagcca

SEQ ID NO: 1232788 - DNA, 15 bp, Homo sapiens
gctgctcaatgagcc

SEQ ID NO: 1232789 - DNA, 15 bp, Homo sapiens
agctgctcaatgagc

SEQ ID NO: 1232790 - DNA, 15 bp, Homo sapiens
tagctgctcaatgag

SEQ ID NO: 1232791 - DNA, 15 bp, Homo sapiens
atagctgctcaatga

SEQ ID NO: 1232792 - DNA, 15 bp, Homo sapiens
catagctgctcaatg

SEQ ID NO: 1232793 - DNA, 15 bp, Homo sapiens
tcatagctgctcaat

SEQ ID NO: 1232794 - DNA, 15 bp, Homo sapiens
ttcatagctgctcaa

SEQ ID NO: 1232795 - DNA, 15 bp, Homo sapiens
tttcatagctgctca

SEQ ID NO: 1232796 - DNA, 15 bp, Homo sapiens
atttcatagctgctc

SEQ ID NO: 1232797 - DNA, 15 bp, Homo sapiens
gatttcatagctgct

SEQ ID NO: 1232798 - DNA, 15 bp, Homo sapiens
agatttcatagctgc

SEQ ID NO: 1232799 - DNA, 15 bp, Homo sapiens
tagatttcatagctg

SEQ ID NO: 1232800 - DNA, 15 bp, Homo sapiens
atagatttcatagct

SEQ ID NO: 1232801 - DNA, 15 bp, Homo sapiens
aatagatttcatagc

SEQ ID NO: 1232802 - DNA, 15 bp, Homo sapiens
aaatagatttcatag

SEQ ID NO: 1232803 - DNA, 15 bp, Homo sapiens
caaatagatttcata

SEQ ID NO: 1232804 - DNA, 15 bp, Homo sapiens
gcaaatagatttcat

SEQ ID NO: 1232805 - DNA, 15 bp, Homo sapiens
tgcaaatagatttca

SEQ ID NO: 1232806 - DNA, 15 bp, Homo sapiens
ctgcaaatagatttc

SEQ ID NO: 1232807 - DNA, 15 bp, Homo sapiens
cctgcaaatagattt

SEQ ID NO: 1232808 - DNA, 15 bp, Homo sapiens
gcctgcaaatagatt

SEQ ID NO: 1232809 - DNA, 15 bp, Homo sapiens
ggcctgcaaatagat

SEQ ID NO: 1232810 - DNA, 15 bp, Homo sapiens
tggcctgcaaataga

SEQ ID NO: 1232811 - DNA, 15 bp, Homo sapiens
ctggcctgcaaatag

SEQ ID NO: 1232812 - DNA, 15 bp, Homo sapiens
cctggcctgcaaata

SEQ ID NO: 1232813 - DNA, 15 bp, Homo sapiens
atgcctggcctgcaa

SEQ ID NO: 1232814 - DNA, 15 bp, Homo sapiens
catgcctggcctgca

SEQ ID NO: 1232815 - DNA, 15 bp, Homo sapiens
ccatgcctggcctgc

SEQ ID NO: 1232816 - DNA, 15 bp, Homo sapiens
acaccatgcctggcc

SEQ ID NO: 1232817 - DNA, 15 bp, Homo sapiens
gacaccatgcctggc

SEQ ID NO: 1232818 - DNA, 15 bp, Homo sapiens
agacaccatgcctgg

SEQ ID NO: 1232819 - DNA, 15 bp, Homo sapiens
gagacaccatgcctg

SEQ ID NO: 1232820 - DNA, 15 bp, Homo sapiens
tgagacaccatgcct

SEQ ID NO: 1232821 - DNA, 15 bp, Homo sapiens
ttgagacaccatgcc

SEQ ID NO: 1232822 - DNA, 15 bp, Homo sapiens
cttgagacaccatgc

SEQ ID NO: 1232823 - DNA, 15 bp, Homo sapiens
gcttgagacaccatg

SEQ ID NO: 1232824 - DNA, 15 bp, Homo sapiens
agcttgagacaccat

SEQ ID NO: 1232825 - DNA, 15 bp, Homo sapiens
aagcttgagacacca

SEQ ID NO: 1232826 - DNA, 15 bp, Homo sapiens
taagcttgagacacc

SEQ ID NO: 1232827 - DNA, 15 bp, Homo sapiens
ataagcttgagacac

SEQ ID NO: 1232828 - DNA, 15 bp, Homo sapiens
tataagcttgagaca

SEQ ID NO: 1232829 - DNA, 15 bp, Homo sapiens
ttataagcttgagac

SEQ ID NO: 1232830 - DNA, 15 bp, Homo sapiens
attataagcttgaga

SEQ ID NO: 1232831 - DNA, 15 bp, Homo sapiens
gattataagcttgag

SEQ ID NO: 1232832 - DNA, 15 bp, Homo sapiens
agattataagcttga

SEQ ID NO: 1232833 - DNA, 15 bp, Homo sapiens
aagattataagcttg

SEQ ID NO: 1232834 - DNA, 15 bp, Homo sapiens
taagattataagctt

SEQ ID NO: 1232835 - DNA, 15 bp, Homo sapiens
ttaagattataagct

SEQ ID NO: 1232836 - DNA, 15 bp, Homo sapiens
gttaagattataagc

SEQ ID NO: 1232837 - DNA, 15 bp, Homo sapiens
tgttaagattataag

SEQ ID NO: 1232838 - DNA, 15 bp, Homo sapiens
gtgttaagattataa

SEQ ID NO: 1232839 - DNA, 15 bp, Homo sapiens
agtgttaagattata

SEQ ID NO: 1232840 - DNA, 15 bp, Homo sapiens
aagtgttaagattat

SEQ ID NO: 1232841 - DNA, 15 bp, Homo sapiens
aaagtgttaagatta

SEQ ID NO: 1232842 - DNA, 15 bp, Homo sapiens
caaagtgttaagatt

SEQ ID NO: 1232843 - DNA, 15 bp, Homo sapiens
ccaaagtgttaagat

SEQ ID NO: 1232844 - DNA, 15 bp, Homo sapiens
cccaaagtgttaaga

SEQ ID NO: 1232845 - DNA, 15 bp, Homo sapiens
tcccaaagtgttaag

SEQ ID NO: 1232846 - DNA, 15 bp, Homo sapiens
ctcccaaagtgttaa

SEQ ID NO: 1232847 - DNA, 15 bp, Homo sapiens
cctcccaaagtgtta

SEQ ID NO: 1232848 - DNA, 15 bp, Homo sapiens
tcctcaggtgatcca

SEQ ID NO: 1232849 - DNA, 15 bp, Homo sapiens
tgaactcctgtcctc

SEQ ID NO: 1232850 - DNA, 15 bp, Homo sapiens
ttgaactcctgtcct

SEQ ID NO: 1232851 - DNA, 15 bp, Homo sapiens
cttgaactcctgtcc

SEQ ID NO: 1232852 - DNA, 15 bp, Homo sapiens
tcttgaactcctgtc

SEQ ID NO: 1232853 - DNA, 15 bp, Homo sapiens
gtcttgaactcctgt

SEQ ID NO: 1232854 - DNA, 15 bp, Homo sapiens
ggggtttcgccacgt

SEQ ID NO: 1232855 - DNA, 15 bp, Homo sapiens
cggggtttcgccacg

SEQ ID NO: 1232856 - DNA, 15 bp, Homo sapiens
ggagacggggtttcg

SEQ ID NO: 1232857 - DNA, 15 bp, Homo sapiens
aggagacggggtttc

SEQ ID NO: 1232858 - DNA, 15 bp, Homo sapiens
taggagacggggttt

SEQ ID NO: 1232859 - DNA, 15 bp, Homo sapiens
ttaggagacggggtt

SEQ ID NO: 1232860 - DNA, 15 bp, Homo sapiens
tttaggagacggggt

SEQ ID NO: 1232861 - DNA, 15 bp, Homo sapiens
atttaggagacgggg

SEQ ID NO: 1232862 - DNA, 15 bp, Homo sapiens
tatttaggagacggg

SEQ ID NO: 1232863 - DNA, 15 bp, Homo sapiens
ttatttaggagacgg

SEQ ID NO: 1232864 - DNA, 15 bp, Homo sapiens
tttatttaggagacg

SEQ ID NO: 1232865 - DNA, 15 bp, Homo sapiens
ttttatttaggagac

SEQ ID NO: 1232866 - DNA, 15 bp, Homo sapiens
tttttatttaggaga

SEQ ID NO: 1232867 - DNA, 15 bp, Homo sapiens
ctttttatttaggag

SEQ ID NO: 1232868 - DNA, 15 bp, Homo sapiens
actttttatttagga

SEQ ID NO: 1232869 - DNA, 15 bp, Homo sapiens
tactttttatttagg

SEQ ID NO: 1232870 - DNA, 15 bp, Homo sapiens
ctactttttatttag

SEQ ID NO: 1232871 - DNA, 15 bp, Homo sapiens
gctactttttattta

SEQ ID NO: 1232872 - DNA, 15 bp, Homo sapiens
ggctactttttattt

SEQ ID NO: 1232873 - DNA, 15 bp, Homo sapiens
cggctactttttatt

SEQ ID NO: 1232874 - DNA, 15 bp, Homo sapiens
ccggctactttttat

SEQ ID NO: 1232875 - DNA, 15 bp, Homo sapiens
cccggctacttttta

SEQ ID NO: 1232876 - DNA, 15 bp, Homo sapiens
tgcccggctactttt

SEQ ID NO: 1232877 - DNA, 15 bp, Homo sapiens
atgcccggctacttt

SEQ ID NO: 1232878 - DNA, 15 bp, Homo sapiens
catgcccggctactt

SEQ ID NO: 1232879 - DNA, 15 bp, Homo sapiens
tcatgcccggctact

SEQ ID NO: 1232880 - DNA, 15 bp, Homo sapiens
atcatgcccggctac

SEQ ID NO: 1232881 - DNA, 15 bp, Homo sapiens
tgccatcatgcccgg

SEQ ID NO: 1232882 - DNA, 15 bp, Homo sapiens
ctgccatcatgcccg

SEQ ID NO: 1232883 - DNA, 15 bp, Homo sapiens
cctgccatcatgccc

SEQ ID NO: 1232884 - DNA, 15 bp, Homo sapiens
ccctgccatcatgcc

SEQ ID NO: 1232885 - DNA, 15 bp, Homo sapiens
cccctgccatcatgc

SEQ ID NO: 1232886 - DNA, 15 bp, Homo sapiens
gcccctgccatcatg

SEQ ID NO: 1232887 - DNA, 15 bp, Homo sapiens
ggcccctgccatcat

SEQ ID NO: 1232888 - DNA, 15 bp, Homo sapiens
aggcccctgccatca

SEQ ID NO: 1232889 - DNA, 15 bp, Homo sapiens
taggcccctgccatc

SEQ ID NO: 1232890 - DNA, 15 bp, Homo sapiens
ataggcccctgccat

SEQ ID NO: 1232891 - DNA, 15 bp, Homo sapiens
tataggcccctgcca

SEQ ID NO: 1232892 - DNA, 15 bp, Homo sapiens
ttataggcccctgcc

SEQ ID NO: 1232893 - DNA, 15 bp, Homo sapiens
attataggcccctgc

SEQ ID NO: 1232894 - DNA, 15 bp, Homo sapiens
gattataggcccctg

SEQ ID NO: 1232895 - DNA, 15 bp, Homo sapiens
ggattataggcccct

SEQ ID NO: 1232896 - DNA, 15 bp, Homo sapiens
gggattataggcccc

SEQ ID NO: 1232897 - DNA, 15 bp, Homo sapiens
cgggattataggccc

SEQ ID NO: 1232898 - DNA, 15 bp, Homo sapiens
ccgggattataggcc

SEQ ID NO: 1232899 - DNA, 15 bp, Homo sapiens
gccgggattataggc

SEQ ID NO: 1232900 - DNA, 15 bp, Homo sapiens
agccgggattatagg

SEQ ID NO: 1232901 - DNA, 15 bp, Homo sapiens
tagccgggattatag

SEQ ID NO: 1232902 - DNA, 15 bp, Homo sapiens
gtagccgggattata

SEQ ID NO: 1232903 - DNA, 15 bp, Homo sapiens
agtagccgggattat

SEQ ID NO: 1232904 - DNA, 15 bp, Homo sapiens
gagtagccgggatta

SEQ ID NO: 1232905 - DNA, 15 bp, Homo sapiens
tgagtagccgggatt

SEQ ID NO: 1232906 - DNA, 15 bp, Homo sapiens
ctgagtagccgggat

SEQ ID NO: 1232907 - DNA, 15 bp, Homo sapiens
cctgagtagccggga

SEQ ID NO: 1232908 - DNA, 15 bp, Homo sapiens
tcctgagtagccggg

SEQ ID NO: 1232909 - DNA, 15 bp, Homo sapiens
ctcctgagtagccgg

SEQ ID NO: 1232910 - DNA, 15 bp, Homo sapiens
cctcctgagtagccg

SEQ ID NO: 1232911 - DNA, 15 bp, Homo sapiens
gcctcctgagtagcc

SEQ ID NO: 1232912 - DNA, 15 bp, Homo sapiens
attctgcctcagcct

SEQ ID NO: 1232913 - DNA, 15 bp, Homo sapiens
aattctgcctcagcc

SEQ ID NO: 1232914 - DNA, 15 bp, Homo sapiens
caattctgcctcagc

SEQ ID NO: 1232915 - DNA, 15 bp, Homo sapiens
gcaattctgcctcag

SEQ ID NO: 1232916 - DNA, 15 bp, Homo sapiens
agcaattctgcctca

SEQ ID NO: 1232917 - DNA, 15 bp, Homo sapiens
aagcaattctgcctc

SEQ ID NO: 1232918 - DNA, 15 bp, Homo sapiens
caagcaattctgcct

SEQ ID NO: 1232919 - DNA, 15 bp, Homo sapiens
tcaagcaattctgcc

SEQ ID NO: 1232920 - DNA, 15 bp, Homo sapiens
tactgcaacctccgc

SEQ ID NO: 1232921 - DNA, 15 bp, Homo sapiens
ttactgcaacctccg

SEQ ID NO: 1232922 - DNA, 15 bp, Homo sapiens
cttactgcaacctcc

SEQ ID NO: 1232923 - DNA, 15 bp, Homo sapiens
gcttactgcaacctc

SEQ ID NO: 1232924 - DNA, 15 bp, Homo sapiens
cggcttactgcaacc

SEQ ID NO: 1232925 - DNA, 15 bp, Homo sapiens
tcggcttactgcaac

SEQ ID NO: 1232926 - DNA, 15 bp, Homo sapiens
ctcggcttactgcaa

SEQ ID NO: 1232927 - DNA, 15 bp, Homo sapiens
tctcggcttactgca

SEQ ID NO: 1232928 - DNA, 15 bp, Homo sapiens
atctcggcttactgc

SEQ ID NO: 1232929 - DNA, 15 bp, Homo sapiens
gatctcggcttactg

SEQ ID NO: 1232930 - DNA, 15 bp, Homo sapiens
cgatctcggcttact

SEQ ID NO: 1232931 - DNA, 15 bp, Homo sapiens
gcgatctcggcttac

SEQ ID NO: 1232932 - DNA, 15 bp, Homo sapiens
tgcgatctcggctta

SEQ ID NO: 1232933 - DNA, 15 bp, Homo sapiens
gtgcgatctcggctt

SEQ ID NO: 1232934 - DNA, 15 bp, Homo sapiens
ctctgtctcacaggc

SEQ ID NO: 1232935 - DNA, 15 bp, Homo sapiens
gctctgtctcacagg

SEQ ID NO: 1232936 - DNA, 15 bp, Homo sapiens
tgctctgtctcacag

SEQ ID NO: 1232937 - DNA, 15 bp, Homo sapiens
ttgctctgtctcaca

SEQ ID NO: 1232938 - DNA, 15 bp, Homo sapiens
cttgctctgtctcac

SEQ ID NO: 1232939 - DNA, 15 bp, Homo sapiens
tcttgctctgtctca

SEQ ID NO: 1232940 - DNA, 15 bp, Homo sapiens
ggtcttgctctgtct

SEQ ID NO: 1232941 - DNA, 15 bp, Homo sapiens
ggggtcttgctctgt

SEQ ID NO: 1232942 - DNA, 15 bp, Homo sapiens
cggggtcttgctctg

SEQ ID NO: 1232943 - DNA, 15 bp, Homo sapiens
acggggtcttgctct

SEQ ID NO: 1232944 - DNA, 15 bp, Homo sapiens
gacggggtcttgctc

SEQ ID NO: 1232945 - DNA, 15 bp, Homo sapiens
agacggggtcttgct

SEQ ID NO: 1232946 - DNA, 15 bp, Homo sapiens
gagacggggtcttgc

SEQ ID NO: 1232947 - DNA, 15 bp, Homo sapiens
ggagacggggtcttg

SEQ ID NO: 1232948 - DNA, 15 bp, Homo sapiens
tggagacggggtctt

SEQ ID NO: 1232949 - DNA, 15 bp, Homo sapiens
ttggagacggggtct

SEQ ID NO: 1232950 - DNA, 15 bp, Homo sapiens
tttggagacggggtc

SEQ ID NO: 1232951 - DNA, 15 bp, Homo sapiens
ttttggagacggggt

SEQ ID NO: 1232952 - DNA, 15 bp, Homo sapiens
tttttggagacgggg

SEQ ID NO: 1232953 - DNA, 15 bp, Homo sapiens
ttttttggagacggg

SEQ ID NO: 1232954 - DNA, 15 bp, Homo sapiens
tttttttggagacgg

SEQ ID NO: 1232955 - DNA, 15 bp, Homo sapiens
gtttttttttttgga

SEQ ID NO: 1232956 - DNA, 15 bp, Homo sapiens
ggtttttttttttgg

SEQ ID NO: 1232957 - DNA, 15 bp, Homo sapiens
tggtttttttttttg

SEQ ID NO: 1232958 - DNA, 15 bp, Homo sapiens
gtttttttggttttt

SEQ ID NO: 1232959 - DNA, 15 bp, Homo sapiens
tgtttttttggtttt

SEQ ID NO: 1232960 - DNA, 15 bp, Homo sapiens
ttgtttttttggttt

SEQ ID NO: 1232961 - DNA, 15 bp, Homo sapiens
agtttttttgttttt

SEQ ID NO: 1232962 - DNA, 15 bp, Homo sapiens
cagtttttttgtttt

SEQ ID NO: 1232963 - DNA, 15 bp, Homo sapiens
tcagtttttttgttt

SEQ ID NO: 1232964 - DNA, 15 bp, Homo sapiens
ttcagtttttttgtt

SEQ ID NO: 1232965 - DNA, 15 bp, Homo sapiens
tttcagtttttttgt

SEQ ID NO: 1232966 - DNA, 15 bp, Homo sapiens
atttcagtttttttg

SEQ ID NO: 1232967 - DNA, 15 bp, Homo sapiens
aatttcagttttttt

SEQ ID NO: 1232968 - DNA, 15 bp, Homo sapiens
taatttcagtttttt

SEQ ID NO: 1232969 - DNA, 15 bp, Homo sapiens
ttaatttcagttttt

SEQ ID NO: 1232970 - DNA, 15 bp, Homo sapiens
tttaatttcagtttt

SEQ ID NO: 1232971 - DNA, 15 bp, Homo sapiens
ttttaatttcagttt

SEQ ID NO: 1232972 - DNA, 15 bp, Homo sapiens
attttaatttcagtt

SEQ ID NO: 1232973 - DNA, 15 bp, Homo sapiens
cattttaatttcagt

SEQ ID NO: 1232974 - DNA, 15 bp, Homo sapiens
tcattttaatttcag

SEQ ID NO: 1232975 - DNA, 15 bp, Homo sapiens
ctcattttaatttca

SEQ ID NO: 1232976 - DNA, 15 bp, Homo sapiens
actcattttaatttc

SEQ ID NO: 1232977 - DNA, 15 bp, Homo sapiens
aactcattttaattt

SEQ ID NO: 1232978 - DNA, 15 bp, Homo sapiens
gaactcattttaatt

SEQ ID NO: 1232979 - DNA, 15 bp, Homo sapiens
ggaactcattttaat

SEQ ID NO: 1232980 - DNA, 15 bp, Homo sapiens
cggaactcattttaa

SEQ ID NO: 1232981 - DNA, 15 bp, Homo sapiens
acggaactcatttta

SEQ ID NO: 1232982 - DNA, 15 bp, Homo sapiens
aacggaactcatttt

SEQ ID NO: 1232983 - DNA, 15 bp, Homo sapiens
aaacggaactcattt

SEQ ID NO: 1232984 - DNA, 15 bp, Homo sapiens
caaacggaactcatt

SEQ ID NO: 1232985 - DNA, 15 bp, Homo sapiens
ccaaacggaactcat

SEQ ID NO: 1232986 - DNA, 15 bp, Homo sapiens
tccaaacggaactca

SEQ ID NO: 1232987 - DNA, 15 bp, Homo sapiens
ctccaaacggaactc

SEQ ID NO: 1232988 - DNA, 15 bp, Homo sapiens
cctccaaacggaact

SEQ ID NO: 1232989 - DNA, 15 bp, Homo sapiens
acctccaaacggaac

SEQ ID NO: 1232990 - DNA, 15 bp, Homo sapiens
tacctccaaacggaa

SEQ ID NO: 1232991 - DNA, 15 bp, Homo sapiens
ttacctccaaacgga

SEQ ID NO: 1232992 - DNA, 15 bp, Homo sapiens
tttacctccaaacgg

SEQ ID NO: 1232993 - DNA, 15 bp, Homo sapiens
atttacctccaaacg

SEQ ID NO: 1232994 - DNA, 15 bp, Homo sapiens
tatttacctccaaac

SEQ ID NO: 1232995 - DNA, 15 bp, Homo sapiens
gtatttacctccaaa

SEQ ID NO: 1232996 - DNA, 15 bp, Homo sapiens
ggtatttacctccaa

SEQ ID NO: 1232997 - DNA, 15 bp, Homo sapiens
aggtatttacctcca

SEQ ID NO: 1232998 - DNA, 15 bp, Homo sapiens
aaggtatttacctcc

SEQ ID NO: 1232999 - DNA, 15 bp, Homo sapiens
aaaggtatttacctc

SEQ ID NO: 1233000 - DNA, 15 bp, Homo sapiens
taaaggtatttacct

SEQ ID NO: 1233001 - DNA, 15 bp, Homo sapiens
ttaaaggtatttacc

SEQ ID NO: 1233002 - DNA, 15 bp, Homo sapiens
cttaaaggtatttac

SEQ ID NO: 1233003 - DNA, 15 bp, Homo sapiens
tcttaaaggtattta

SEQ ID NO: 1233004 - DNA, 15 bp, Homo sapiens
ctcttaaaggtattt

SEQ ID NO: 1233005 - DNA, 15 bp, Homo sapiens
actcttaaaggtatt

SEQ ID NO: 1233006 - DNA, 15 bp, Homo sapiens
tactcttaaaggtat

SEQ ID NO: 1233007 - DNA, 15 bp, Homo sapiens
gtactcttaaaggta

SEQ ID NO: 1233008 - DNA, 15 bp, Homo sapiens
agtactcttaaaggt

SEQ ID NO: 1233009 - DNA, 15 bp, Homo sapiens
aagtactcttaaagg

SEQ ID NO: 1233010 - DNA, 15 bp, Homo sapiens
aaagtactcttaaag

SEQ ID NO: 1233011 - DNA, 15 bp, Homo sapiens
taaagtactcttaaa

SEQ ID NO: 1233012 - DNA, 15 bp, Homo sapiens
ctaaagtactcttaa

SEQ ID NO: 1233013 - DNA, 15 bp, Homo sapiens
tctaaagtactctta

SEQ ID NO: 1233014 - DNA, 15 bp, Homo sapiens
atctaaagtactctt

SEQ ID NO: 1233015 - DNA, 15 bp, Homo sapiens
aatctaaagtactct

SEQ ID NO: 1233016 - DNA, 15 bp, Homo sapiens
aaatctaaagtactc

SEQ ID NO: 1233017 - DNA, 15 bp, Homo sapiens
taaatctaaagtact

SEQ ID NO: 1233018 - DNA, 15 bp, Homo sapiens
gtaaatctaaagtac

SEQ ID NO: 1233019 - DNA, 15 bp, Homo sapiens
tgtaaatctaaagta

SEQ ID NO: 1233020 - DNA, 15 bp, Homo sapiens
atgtaaatctaaagt

SEQ ID NO: 1233021 - DNA, 15 bp, Homo sapiens
tatgtaaatctaaag

SEQ ID NO: 1233022 - DNA, 15 bp, Homo sapiens
ctatgtaaatctaaa

SEQ ID NO: 1233023 - DNA, 15 bp, Homo sapiens
gctatgtaaatctaa

SEQ ID NO: 1233024 - DNA, 15 bp, Homo sapiens
tgctatgtaaatcta

SEQ ID NO: 1233025 - DNA, 15 bp, Homo sapiens
gtgctatgtaaatct

SEQ ID NO: 1233026 - DNA, 15 bp, Homo sapiens
agtgctatgtaaatc

SEQ ID NO: 1233027 - DNA, 15 bp, Homo sapiens
cagtgctatgtaaat

SEQ ID NO: 1233028 - DNA, 15 bp, Homo sapiens
ccagtgctatgtaaa

SEQ ID NO: 1233029 - DNA, 15 bp, Homo sapiens
cccagtgctatgtaa

SEQ ID NO: 1233030 - DNA, 15 bp, Homo sapiens
gcccagtgctatgta

SEQ ID NO: 1233031 - DNA, 15 bp, Homo sapiens
agcccagtgctatgt

SEQ ID NO: 1233032 - DNA, 15 bp, Homo sapiens
cagcccagtgctatg

SEQ ID NO: 1233033 - DNA, 15 bp, Homo sapiens
ccagcccagtgctat

SEQ ID NO: 1233034 - DNA, 15 bp, Homo sapiens
cccagcccagtgcta

SEQ ID NO: 1233035 - DNA, 15 bp, Homo sapiens
gcccagcccagtgct

SEQ ID NO: 1233036 - DNA, 15 bp, Homo sapiens
tgcccagcccagtgc

SEQ ID NO: 1233037 - DNA, 15 bp, Homo sapiens
gtgcccagcccagtg

SEQ ID NO: 1233038 - DNA, 15 bp, Homo sapiens
cgtgcccagcccagt

SEQ ID NO: 1233039 - DNA, 15 bp, Homo sapiens
ccgtgcccagcccag

SEQ ID NO: 1233040 - DNA, 15 bp, Homo sapiens
accgtgcccagccca

SEQ ID NO: 1233041 - DNA, 15 bp, Homo sapiens
caccgtgcccagccc

SEQ ID NO: 1233042 - DNA, 15 bp, Homo sapiens
ccaccgtgcccagcc

SEQ ID NO: 1233043 - DNA, 15 bp, Homo sapiens
gccaccgtgcccagc

SEQ ID NO: 1233044 - DNA, 15 bp, Homo sapiens
agccaccgtgcccag

SEQ ID NO: 1233045 - DNA, 15 bp, Homo sapiens
gagccaccgtgccca

SEQ ID NO: 1233046 - DNA, 15 bp, Homo sapiens
tgagccaccgtgccc

SEQ ID NO: 1233047 - DNA, 15 bp, Homo sapiens
accagcctcagcctc

SEQ ID NO: 1233048 - DNA, 15 bp, Homo sapiens
caccagcctcagcct

SEQ ID NO: 1233049 - DNA, 15 bp, Homo sapiens
ccaccagcctcagcc

SEQ ID NO: 1233050 - DNA, 15 bp, Homo sapiens
tccaccagcctcagc

SEQ ID NO: 1233051 - DNA, 15 bp, Homo sapiens
atccaccagcctcag

SEQ ID NO: 1233052 - DNA, 15 bp, Homo sapiens
gatccaccagcctca

SEQ ID NO: 1233053 - DNA, 15 bp, Homo sapiens
tgatccaccagcctc

SEQ ID NO: 1233054 - DNA, 15 bp, Homo sapiens
gtgatccaccagcct

SEQ ID NO: 1233055 - DNA, 15 bp, Homo sapiens
tgtgatccaccagcc

SEQ ID NO: 1233056 - DNA, 15 bp, Homo sapiens
ttgtgatccaccagc

SEQ ID NO: 1233057 - DNA, 15 bp, Homo sapiens
cttgtgatccaccag

SEQ ID NO: 1233058 - DNA, 15 bp, Homo sapiens
gcttgtgatccacca

SEQ ID NO: 1233059 - DNA, 15 bp, Homo sapiens
ccctgagcttgtgat

SEQ ID NO: 1233060 - DNA, 15 bp, Homo sapiens
cccctgagcttgtga

SEQ ID NO: 1233061 - DNA, 15 bp, Homo sapiens
acccctgagcttgtg

SEQ ID NO: 1233062 - DNA, 15 bp, Homo sapiens
aacccctgagcttgt

SEQ ID NO: 1233063 - DNA, 15 bp, Homo sapiens
aaacccctgagcttg

SEQ ID NO: 1233064 - DNA, 15 bp, Homo sapiens
caaacccctgagctt

SEQ ID NO: 1233065 - DNA, 15 bp, Homo sapiens
tcaaacccctgagct

SEQ ID NO: 1233066 - DNA, 15 bp, Homo sapiens
ctcaaacccctgagc

SEQ ID NO: 1233067 - DNA, 15 bp, Homo sapiens
tctcaaacccctgag

SEQ ID NO: 1233068 - DNA, 15 bp, Homo sapiens
atctcaaacccctga

SEQ ID NO: 1233069 - DNA, 15 bp, Homo sapiens
gatctcaaacccctg

SEQ ID NO: 1233070 - DNA, 15 bp, Homo sapiens
tgatctcaaacccct

SEQ ID NO: 1233071 - DNA, 15 bp, Homo sapiens
ctgatctcaaacccc

SEQ ID NO: 1233072 - DNA, 15 bp, Homo sapiens
gctgatctcaaaccc

SEQ ID NO: 1233073 - DNA, 15 bp, Homo sapiens
ggctgatctcaaacc

SEQ ID NO: 1233074 - DNA, 15 bp, Homo sapiens
ggtcaggctgatctc

SEQ ID NO: 1233075 - DNA, 15 bp, Homo sapiens
atcatgttggtcagg

SEQ ID NO: 1233076 - DNA, 15 bp, Homo sapiens
tatcatgttggtcag

SEQ ID NO: 1233077 - DNA, 15 bp, Homo sapiens
ttatcatgttggtca

SEQ ID NO: 1233078 - DNA, 15 bp, Homo sapiens
tttatcatgttggtc

SEQ ID NO: 1233079 - DNA, 15 bp, Homo sapiens
ttttatcatgttggt

SEQ ID NO: 1233080 - DNA, 15 bp, Homo sapiens
aggttttatcatgtt

SEQ ID NO: 1233081 - DNA, 15 bp, Homo sapiens
aaggttttatcatgt

SEQ ID NO: 1233082 - DNA, 15 bp, Homo sapiens
caaggttttatcatg

SEQ ID NO: 1233083 - DNA, 15 bp, Homo sapiens
acaaggttttatcat

SEQ ID NO: 1233084 - DNA, 15 bp, Homo sapiens
gacaaggttttatca

SEQ ID NO: 1233085 - DNA, 15 bp, Homo sapiens
agacaaggttttatc

SEQ ID NO: 1233086 - DNA, 15 bp, Homo sapiens
gagacaaggttttat

SEQ ID NO: 1233087 - DNA, 15 bp, Homo sapiens
ggagacaaggtttta

SEQ ID NO: 1233088 - DNA, 15 bp, Homo sapiens
tggagacaaggtttt

SEQ ID NO: 1233089 - DNA, 15 bp, Homo sapiens
gtggagacaaggttt

SEQ ID NO: 1233090 - DNA, 15 bp, Homo sapiens
agtggagacaaggtt

SEQ ID NO: 1233091 - DNA, 15 bp, Homo sapiens
tagtggagacaaggt

SEQ ID NO: 1233092 - DNA, 15 bp, Homo sapiens
ttagtggagacaagg

SEQ ID NO: 1233093 - DNA, 15 bp, Homo sapiens
tttagtggagacaag

SEQ ID NO: 1233094 - DNA, 15 bp, Homo sapiens
ttttagtggagacaa

SEQ ID NO: 1233095 - DNA, 15 bp, Homo sapiens
tttttagtggagaca

SEQ ID NO: 1233096 - DNA, 15 bp, Homo sapiens
atttttagtggagac

SEQ ID NO: 1233097 - DNA, 15 bp, Homo sapiens
atatttttagtggag

SEQ ID NO: 1233098 - DNA, 15 bp, Homo sapiens
tatatttttagtgga

SEQ ID NO: 1233099 - DNA, 15 bp, Homo sapiens
ttatatttttagtgg

SEQ ID NO: 1233100 - DNA, 15 bp, Homo sapiens
tttatatttttagtg

SEQ ID NO: 1233101 - DNA, 15 bp, Homo sapiens
aagattacaggcatg

SEQ ID NO: 1233102 - DNA, 15 bp, Homo sapiens
taagattacaggcat

SEQ ID NO: 1233103 - DNA, 15 bp, Homo sapiens
ttaagattacaggca

SEQ ID NO: 1233104 - DNA, 15 bp, Homo sapiens
gttaagattacaggc

SEQ ID NO: 1233105 - DNA, 15 bp, Homo sapiens
agttaagattacagg

SEQ ID NO: 1233106 - DNA, 15 bp, Homo sapiens
tagttaagattacag

SEQ ID NO: 1233107 - DNA, 15 bp, Homo sapiens
gtagttaagattaca

SEQ ID NO: 1233108 - DNA, 15 bp, Homo sapiens
agtagttaagattac

SEQ ID NO: 1233109 - DNA, 15 bp, Homo sapiens
gagtagttaagatta

SEQ ID NO: 1233110 - DNA, 15 bp, Homo sapiens
tgagtagttaagatt

SEQ ID NO: 1233111 - DNA, 15 bp, Homo sapiens
ctgagtagttaagat

SEQ ID NO: 1233112 - DNA, 15 bp, Homo sapiens
tctgagtagttaaga

SEQ ID NO: 1233113 - DNA, 15 bp, Homo sapiens
ttctgagtagttaag

SEQ ID NO: 1233114 - DNA, 15 bp, Homo sapiens
cttctgagtagttaa

SEQ ID NO: 1233115 - DNA, 15 bp, Homo sapiens
acttctgagtagtta

SEQ ID NO: 1233116 - DNA, 15 bp, Homo sapiens
gacttctgagtagtt

SEQ ID NO: 1233117 - DNA, 15 bp, Homo sapiens
agacttctgagtagt

SEQ ID NO: 1233118 - DNA, 15 bp, Homo sapiens
cagacttctgagtag

SEQ ID NO: 1233119 - DNA, 15 bp, Homo sapiens
tcagacttctgagta

SEQ ID NO: 1233120 - DNA, 15 bp, Homo sapiens
ctcagacttctgagt

SEQ ID NO: 1233121 - DNA, 15 bp, Homo sapiens
cctcagacttctgag

SEQ ID NO: 1233122 - DNA, 15 bp, Homo sapiens
gcctcagacttctga

SEQ ID NO: 1233123 - DNA, 15 bp, Homo sapiens
tgcctcagacttctg

SEQ ID NO: 1233124 - DNA, 15 bp, Homo sapiens
ctgcctcagacttct

SEQ ID NO: 1233125 - DNA, 15 bp, Homo sapiens
cctgcctcagacttc

SEQ ID NO: 1233126 - DNA, 15 bp, Homo sapiens
tcctgcctcagactt

SEQ ID NO: 1233127 - DNA, 15 bp, Homo sapiens
acgggttcaagtgat

SEQ ID NO: 1233128 - DNA, 15 bp, Homo sapiens
tacgggttcaagtga

SEQ ID NO: 1233129 - DNA, 15 bp, Homo sapiens
ctacgggttcaagtg

SEQ ID NO: 1233130 - DNA, 15 bp, Homo sapiens
cctacgggttcaagt

SEQ ID NO: 1233131 - DNA, 15 bp, Homo sapiens
acctacgggttcaag

SEQ ID NO: 1233132 - DNA, 15 bp, Homo sapiens
cacctacgggttcaa

SEQ ID NO: 1233133 - DNA, 15 bp, Homo sapiens
ccacctacgggttca

SEQ ID NO: 1233134 - DNA, 15 bp, Homo sapiens
tccacctacgggttc

SEQ ID NO: 1233135 - DNA, 15 bp, Homo sapiens
ctccacctacgggtt

SEQ ID NO: 1233136 - DNA, 15 bp, Homo sapiens
cctccacctacgggt

SEQ ID NO: 1233137 - DNA, 15 bp, Homo sapiens
acctccacctacggg

SEQ ID NO: 1233138 - DNA, 15 bp, Homo sapiens
aacctccacctacgg

SEQ ID NO: 1233139 - DNA, 15 bp, Homo sapiens
caacctccacctacg

SEQ ID NO: 1233140 - DNA, 15 bp, Homo sapiens
gcaacctccacctac

SEQ ID NO: 1233141 - DNA, 15 bp, Homo sapiens
tgcaacctccaccta

SEQ ID NO: 1233142 - DNA, 15 bp, Homo sapiens
ctctcggctcactgc

SEQ ID NO: 1233143 - DNA, 15 bp, Homo sapiens
gctctcggctcactg

SEQ ID NO: 1233144 - DNA, 15 bp, Homo sapiens
cgctctcggctcact

SEQ ID NO: 1233145 - DNA, 15 bp, Homo sapiens
gcgctctcggctcac

SEQ ID NO: 1233146 - DNA, 15 bp, Homo sapiens
ggcgctctcggctca

SEQ ID NO: 1233147 - DNA, 15 bp, Homo sapiens
tggcgctctcggctc

SEQ ID NO: 1233148 - DNA, 15 bp, Homo sapiens
gtggcgctctcggct

SEQ ID NO: 1233149 - DNA, 15 bp, Homo sapiens
agtggcgctctcggc

SEQ ID NO: 1233150 - DNA, 15 bp, Homo sapiens
cagtggcgctctcgg

SEQ ID NO: 1233151 - DNA, 15 bp, Homo sapiens
gcagtggcgctctcg

SEQ ID NO: 1233152 - DNA, 15 bp, Homo sapiens
tgcagtggcgctctc

SEQ ID NO: 1233153 - DNA, 15 bp, Homo sapiens
gtgcagtggcgctct

SEQ ID NO: 1233154 - DNA, 15 bp, Homo sapiens
agtgcagtggcgctc

SEQ ID NO: 1233155 - DNA, 15 bp, Homo sapiens
gagtgcagtggcgct

SEQ ID NO: 1233156 - DNA, 15 bp, Homo sapiens
ggcgggagtgcagtg

SEQ ID NO: 1233157 - DNA, 15 bp, Homo sapiens
aggcgggagtgcagt

SEQ ID NO: 1233158 - DNA, 15 bp, Homo sapiens
caggcgggagtgcag

SEQ ID NO: 1233159 - DNA, 15 bp, Homo sapiens
ccaggcgggagtgca

SEQ ID NO: 1233160 - DNA, 15 bp, Homo sapiens
cccaggcgggagtgc

SEQ ID NO: 1233161 - DNA, 15 bp, Homo sapiens
gcccaggcgggagtg

SEQ ID NO: 1233162 - DNA, 15 bp, Homo sapiens
tgcccaggcgggagt

SEQ ID NO: 1233163 - DNA, 15 bp, Homo sapiens
ttgcccaggcgggag

SEQ ID NO: 1233164 - DNA, 15 bp, Homo sapiens
gttgcccaggcggga

SEQ ID NO: 1233165 - DNA, 15 bp, Homo sapiens
tgttgcccaggcggg

SEQ ID NO: 1233166 - DNA, 15 bp, Homo sapiens
ctgttgcccaggcgg

SEQ ID NO: 1233167 - DNA, 15 bp, Homo sapiens
tctgttgcccaggcg

SEQ ID NO: 1233168 - DNA, 15 bp, Homo sapiens
taaatcttttttttt

SEQ ID NO: 1233169 - DNA, 15 bp, Homo sapiens
gtaaatctttttttt

SEQ ID NO: 1233170 - DNA, 15 bp, Homo sapiens
tgtaaatcttttttt

SEQ ID NO: 1233171 - DNA, 15 bp, Homo sapiens
gtgtaaatctttttt

SEQ ID NO: 1233172 - DNA, 15 bp, Homo sapiens
tgtgtaaatcttttt

SEQ ID NO: 1233173 - DNA, 15 bp, Homo sapiens
ctgtgtaaatctttt

SEQ ID NO: 1233174 - DNA, 15 bp, Homo sapiens
gctgtgtaaatcttt

SEQ ID NO: 1233175 - DNA, 15 bp, Homo sapiens
tgctgtgtaaatctt

SEQ ID NO: 1233176 - DNA, 15 bp, Homo sapiens
gtgctgtgtaaatct

SEQ ID NO: 1233177 - DNA, 15 bp, Homo sapiens
agtgctgtgtaaatc

SEQ ID NO: 1233178 - DNA, 15 bp, Homo sapiens
gagtgctgtgtaaat

SEQ ID NO: 1233179 - DNA, 15 bp, Homo sapiens
tgagtgctgtgtaaa

SEQ ID NO: 1233180 - DNA, 15 bp, Homo sapiens
ttgagtgctgtgtaa

SEQ ID NO: 1233181 - DNA, 15 bp, Homo sapiens
gttgagtgctgtgta

SEQ ID NO: 1233182 - DNA, 15 bp, Homo sapiens
tgttgagtgctgtgt

SEQ ID NO: 1233183 - DNA, 15 bp, Homo sapiens
ttgttgagtgctgtg

SEQ ID NO: 1233184 - DNA, 15 bp, Homo sapiens
gttgttgagtgctgt

SEQ ID NO: 1233185 - DNA, 15 bp, Homo sapiens
tgttgttgagtgctg

SEQ ID NO: 1233186 - DNA, 15 bp, Homo sapiens
atgttgttgagtgct

SEQ ID NO: 1233187 - DNA, 15 bp, Homo sapiens
tatgttgttgagtgc

SEQ ID NO: 1233188 - DNA, 15 bp, Homo sapiens
ctatgttgttgagtg

SEQ ID NO: 1233189 - DNA, 15 bp, Homo sapiens
cctatgttgttgagt

SEQ ID NO: 1233190 - DNA, 15 bp, Homo sapiens
tcctatgttgttgag

SEQ ID NO: 1233191 - DNA, 15 bp, Homo sapiens
ttcctatgttgttga

SEQ ID NO: 1233192 - DNA, 15 bp, Homo sapiens
tttcctatgttgttg

SEQ ID NO: 1233193 - DNA, 15 bp, Homo sapiens
ttttcctatgttgtt

SEQ ID NO: 1233194 - DNA, 15 bp, Homo sapiens
attttcctatgttgt

SEQ ID NO: 1233195 - DNA, 15 bp, Homo sapiens
tattttcctatgttg

SEQ ID NO: 1233196 - DNA, 15 bp, Homo sapiens
atattttcctatgtt

SEQ ID NO: 1233197 - DNA, 15 bp, Homo sapiens
aatattttcctatgt

SEQ ID NO: 1233198 - DNA, 15 bp, Homo sapiens
aaatattttcctatg

SEQ ID NO: 1233199 - DNA, 15 bp, Homo sapiens
taaatattttcctat

SEQ ID NO: 1233200 - DNA, 15 bp, Homo sapiens
ataaatattttccta

SEQ ID NO: 1233201 - DNA, 15 bp, Homo sapiens
tataaatattttcct

SEQ ID NO: 1233202 - DNA, 15 bp, Homo sapiens
ttataaatattttcc

SEQ ID NO: 1233203 - DNA, 15 bp, Homo sapiens
tttataaatattttc

SEQ ID NO: 1233204 - DNA, 15 bp, Homo sapiens
gtttataaatatttt

SEQ ID NO: 1233205 - DNA, 15 bp, Homo sapiens
agtttataaatattt

SEQ ID NO: 1233206 - DNA, 15 bp, Homo sapiens
cagtttataaatatt

SEQ ID NO: 1233207 - DNA, 15 bp, Homo sapiens
acagtttataaatat

SEQ ID NO: 1233208 - DNA, 15 bp, Homo sapiens
tacagtttataaata

SEQ ID NO: 1233209 - DNA, 15 bp, Homo sapiens
atacagtttataaat

SEQ ID NO: 1233210 - DNA, 15 bp, Homo sapiens
aatacagtttataaa

SEQ ID NO: 1233211 - DNA, 15 bp, Homo sapiens
taatacagtttataa

SEQ ID NO: 1233212 - DNA, 15 bp, Homo sapiens
gtaatacagtttata

SEQ ID NO: 1233213 - DNA, 15 bp, Homo sapiens
tgtaatacagtttat

SEQ ID NO: 1233214 - DNA, 15 bp, Homo sapiens
gtgtaatacagttta

SEQ ID NO: 1233215 - DNA, 15 bp, Homo sapiens
agtgtaatacagttt

SEQ ID NO: 1233216 - DNA, 15 bp, Homo sapiens
aagtgtaatacagtt

SEQ ID NO: 1233217 - DNA, 15 bp, Homo sapiens
caagtgtaatacagt

SEQ ID NO: 1233218 - DNA, 15 bp, Homo sapiens
tcaagtgtaatacag

SEQ ID NO: 1233219 - DNA, 15 bp, Homo sapiens
ttcaagtgtaataca

SEQ ID NO: 1233220 - DNA, 15 bp, Homo sapiens
gttcaagtgtaatac

SEQ ID NO: 1233221 - DNA, 15 bp, Homo sapiens
ggttcaagtgtaata

SEQ ID NO: 1233222 - DNA, 15 bp, Homo sapiens
aggttcaagtgtaat

SEQ ID NO: 1233223 - DNA, 15 bp, Homo sapiens
aaggttcaagtgtaa

SEQ ID NO: 1233224 - DNA, 15 bp, Homo sapiens
taaggttcaagtgta

SEQ ID NO: 1233225 - DNA, 15 bp, Homo sapiens
ttaaggttcaagtgt

SEQ ID NO: 1233226 - DNA, 15 bp, Homo sapiens
cttaaggttcaagtg

SEQ ID NO: 1233227 - DNA, 15 bp, Homo sapiens
gcttaaggttcaagt

SEQ ID NO: 1233228 - DNA, 15 bp, Homo sapiens
agcttaaggttcaag

SEQ ID NO: 1233229 - DNA, 15 bp, Homo sapiens
tagcttaaggttcaa

SEQ ID NO: 1233230 - DNA, 15 bp, Homo sapiens
atagcttaaggttca

SEQ ID NO: 1233231 - DNA, 15 bp, Homo sapiens
tatagcttaaggttc

SEQ ID NO: 1233232 - DNA, 15 bp, Homo sapiens
gtatagcttaaggtt

SEQ ID NO: 1233233 - DNA, 15 bp, Homo sapiens
agtatagcttaaggt

SEQ ID NO: 1233234 - DNA, 15 bp, Homo sapiens
gagtatagcttaagg

SEQ ID NO: 1233235 - DNA, 15 bp, Homo sapiens
agagtatagcttaag

SEQ ID NO: 1233236 - DNA, 15 bp, Homo sapiens
cagagtatagcttaa

SEQ ID NO: 1233237 - DNA, 15 bp, Homo sapiens
tcagagtatagctta

SEQ ID NO: 1233238 - DNA, 15 bp, Homo sapiens
ctcagagtatagctt

SEQ ID NO: 1233239 - DNA, 15 bp, Homo sapiens
cctcagagtatagct

SEQ ID NO: 1233240 - DNA, 15 bp, Homo sapiens
acctcagagtatagc

SEQ ID NO: 1233241 - DNA, 15 bp, Homo sapiens
aacctcagagtatag

SEQ ID NO: 1233242 - DNA, 15 bp, Homo sapiens
taacctcagagtata

SEQ ID NO: 1233243 - DNA, 15 bp, Homo sapiens
ttaacctcagagtat

SEQ ID NO: 1233244 - DNA, 15 bp, Homo sapiens
gttaacctcagagta

SEQ ID NO: 1233245 - DNA, 15 bp, Homo sapiens
agttaacctcagagt

SEQ ID NO: 1233246 - DNA, 15 bp, Homo sapiens
tagttaacctcagag

SEQ ID NO: 1233247 - DNA, 15 bp, Homo sapiens
gtagttaacctcaga

SEQ ID NO: 1233248 - DNA, 15 bp, Homo sapiens
ggtagttaacctcag

SEQ ID NO: 1233249 - DNA, 15 bp, Homo sapiens
tggtagttaacctca

SEQ ID NO: 1233250 - DNA, 15 bp, Homo sapiens
atggtagttaacctc

SEQ ID NO: 1233251 - DNA, 15 bp, Homo sapiens
aatggtagttaacct

SEQ ID NO: 1233252 - DNA, 15 bp, Homo sapiens
aaatggtagttaacc

SEQ ID NO: 1233253 - DNA, 15 bp, Homo sapiens
caaatggtagttaac

SEQ ID NO: 1233254 - DNA, 15 bp, Homo sapiens
acaaatggtagttaa

SEQ ID NO: 1233255 - DNA, 15 bp, Homo sapiens
cacaaatggtagtta

SEQ ID NO: 1233256 - DNA, 15 bp, Homo sapiens
ccacaaatggtagtt

SEQ ID NO: 1233257 - DNA, 15 bp, Homo sapiens
cccacaaatggtagt

SEQ ID NO: 1233258 - DNA, 15 bp, Homo sapiens
acccacaaatggtag

SEQ ID NO: 1233259 - DNA, 15 bp, Homo sapiens
aacccacaaatggta

SEQ ID NO: 1233260 - DNA, 15 bp, Homo sapiens
taacccacaaatggt

SEQ ID NO: 1233261 - DNA, 15 bp, Homo sapiens
ttaacccacaaatgg

SEQ ID NO: 1233262 - DNA, 15 bp, Homo sapiens
cttaacccacaaatg

SEQ ID NO: 1233263 - DNA, 15 bp, Homo sapiens
tcttaacccacaaat

SEQ ID NO: 1233264 - DNA, 15 bp, Homo sapiens
ttcttaacccacaaa

SEQ ID NO: 1233265 - DNA, 15 bp, Homo sapiens
cttcttaacccacaa

SEQ ID NO: 1233266 - DNA, 15 bp, Homo sapiens
gcttcttaacccaca

SEQ ID NO: 1233267 - DNA, 15 bp, Homo sapiens
agcttcttaacccac

SEQ ID NO: 1233268 - DNA, 15 bp, Homo sapiens
tagcttcttaaccca

SEQ ID NO: 1233269 - DNA, 15 bp, Homo sapiens
ttagcttcttaaccc

SEQ ID NO: 1233270 - DNA, 15 bp, Homo sapiens
tttagcttcttaacc

SEQ ID NO: 1233271 - DNA, 15 bp, Homo sapiens
ctttagcttcttaac

SEQ ID NO: 1233272 - DNA, 15 bp, Homo sapiens
gctttagcttcttaa

SEQ ID NO: 1233273 - DNA, 15 bp, Homo sapiens
agctttagcttctta

SEQ ID NO: 1233274 - DNA, 15 bp, Homo sapiens
gagctttagcttctt

SEQ ID NO: 1233275 - DNA, 15 bp, Homo sapiens
agagctttagcttct

SEQ ID NO: 1233276 - DNA, 15 bp, Homo sapiens
cagagctttagcttc

SEQ ID NO: 1233277 - DNA, 15 bp, Homo sapiens
acagagctttagctt

SEQ ID NO: 1233278 - DNA, 15 bp, Homo sapiens
aacagagctttagct

SEQ ID NO: 1233279 - DNA, 15 bp, Homo sapiens
aaacagagctttagc

SEQ ID NO: 1233280 - DNA, 15 bp, Homo sapiens
aaaacagagctttag

SEQ ID NO: 1233281 - DNA, 15 bp, Homo sapiens
aaaaacagagcttta

SEQ ID NO: 1233282 - DNA, 15 bp, Homo sapiens
gaaaaacagagcttt

SEQ ID NO: 1233283 - DNA, 15 bp, Homo sapiens
agaaaaacagagctt

SEQ ID NO: 1233284 - DNA, 15 bp, Homo sapiens
aagaaaaacagagct

SEQ ID NO: 1233285 - DNA, 15 bp, Homo sapiens
aaagaaaaacagagc

SEQ ID NO: 1233286 - DNA, 15 bp, Homo sapiens
taaagaaaaacagag

SEQ ID NO: 1233287 - DNA, 15 bp, Homo sapiens
ttaaagaaaaacaga

SEQ ID NO: 1233288 - DNA, 15 bp, Homo sapiens
cttaaagaaaaacag

SEQ ID NO: 1233289 - DNA, 15 bp, Homo sapiens
tcttaaagaaaaaca

SEQ ID NO: 1233290 - DNA, 15 bp, Homo sapiens
gtcttaaagaaaaac

SEQ ID NO: 1233291 - DNA, 15 bp, Homo sapiens
tgtcttaaagaaaaa

SEQ ID NO: 1233292 - DNA, 15 bp, Homo sapiens
ttgtcttaaagaaaa

SEQ ID NO: 1233293 - DNA, 15 bp, Homo sapiens
cttgtcttaaagaaa

SEQ ID NO: 1233294 - DNA, 15 bp, Homo sapiens
acttgtcttaaagaa

SEQ ID NO: 1233295 - DNA, 15 bp, Homo sapiens
cacttgtcttaaaga

SEQ ID NO: 1233296 - DNA, 15 bp, Homo sapiens
gcacttgtcttaaag

SEQ ID NO: 1233297 - DNA, 15 bp, Homo sapiens
tgcacttgtcttaaa

SEQ ID NO: 1233298 - DNA, 15 bp, Homo sapiens
ctgcacttgtcttaa

SEQ ID NO: 1233299 - DNA, 15 bp, Homo sapiens
actgcacttgtctta

SEQ ID NO: 1233300 - DNA, 15 bp, Homo sapiens
tactgcacttgtctt

SEQ ID NO: 1233301 - DNA, 15 bp, Homo sapiens
ctactgcacttgtct

SEQ ID NO: 1233302 - DNA, 15 bp, Homo sapiens
actactgcacttgtc

SEQ ID NO: 1233303 - DNA, 15 bp, Homo sapiens
cactactgcacttgt

SEQ ID NO: 1233304 - DNA, 15 bp, Homo sapiens
tcactactgcacttg

SEQ ID NO: 1233305 - DNA, 15 bp, Homo sapiens
ctcactactgcactt

SEQ ID NO: 1233306 - DNA, 15 bp, Homo sapiens
tctcactactgcact

SEQ ID NO: 1233307 - DNA, 15 bp, Homo sapiens
ttctcactactgcac

SEQ ID NO: 1233308 - DNA, 15 bp, Homo sapiens
cttctcactactgca

SEQ ID NO: 1233309 - DNA, 15 bp, Homo sapiens
acttctcactactgc

SEQ ID NO: 1233310 - DNA, 15 bp, Homo sapiens
cacttctcactactg

SEQ ID NO: 1233311 - DNA, 15 bp, Homo sapiens
ccacttctcactact

SEQ ID NO: 1233312 - DNA, 15 bp, Homo sapiens
cccacttctcactac

SEQ ID NO: 1233313 - DNA, 15 bp, Homo sapiens
ccccacttctcacta

SEQ ID NO: 1233314 - DNA, 15 bp, Homo sapiens
tccccacttctcact

SEQ ID NO: 1233315 - DNA, 15 bp, Homo sapiens
ttccccacttctcac

SEQ ID NO: 1233316 - DNA, 15 bp, Homo sapiens
cttccccacttctca

SEQ ID NO: 1233317 - DNA, 15 bp, Homo sapiens
tcttccccacttctc

SEQ ID NO: 1233318 - DNA, 15 bp, Homo sapiens
ctcttccccacttct

SEQ ID NO: 1233319 - DNA, 15 bp, Homo sapiens
actcttccccacttc

SEQ ID NO: 1233320 - DNA, 15 bp, Homo sapiens
tactcttccccactt

SEQ ID NO: 1233321 - DNA, 15 bp, Homo sapiens
ctactcttccccact

SEQ ID NO: 1233322 - DNA, 15 bp, Homo sapiens
tctactcttccccac

SEQ ID NO: 1233323 - DNA, 15 bp, Homo sapiens
ttctactcttcccca

SEQ ID NO: 1233324 - DNA, 15 bp, Homo sapiens
gttctactcttcccc

SEQ ID NO: 1233325 - DNA, 15 bp, Homo sapiens
tgttctactcttccc

SEQ ID NO: 1233326 - DNA, 15 bp, Homo sapiens
ttgttctactcttcc

SEQ ID NO: 1233327 - DNA, 15 bp, Homo sapiens
cttgttctactcttc

SEQ ID NO: 1233328 - DNA, 15 bp, Homo sapiens
ccttgttctactctt

SEQ ID NO: 1233329 - DNA, 15 bp, Homo sapiens
tccttgttctactct

SEQ ID NO: 1233330 - DNA, 15 bp, Homo sapiens
ctccttgttctactc

SEQ ID NO: 1233331 - DNA, 15 bp, Homo sapiens
actccttgttctact

SEQ ID NO: 1233332 - DNA, 15 bp, Homo sapiens
aactccttgttctac

SEQ ID NO: 1233333 - DNA, 15 bp, Homo sapiens
gaactccttgttcta

SEQ ID NO: 1233334 - DNA, 15 bp, Homo sapiens
cgaactccttgttct

SEQ ID NO: 1233335 - DNA, 15 bp, Homo sapiens
tcgaactccttgttc

SEQ ID NO: 1233336 - DNA, 15 bp, Homo sapiens
atcgaactccttgtt

SEQ ID NO: 1233337 - DNA, 15 bp, Homo sapiens
gatcgaactccttgt

SEQ ID NO: 1233338 - DNA, 15 bp, Homo sapiens
agatcgaactccttg

SEQ ID NO: 1233339 - DNA, 15 bp, Homo sapiens
cagatcgaactcctt

SEQ ID NO: 1233340 - DNA, 15 bp, Homo sapiens
acagatcgaactcct

SEQ ID NO: 1233341 - DNA, 15 bp, Homo sapiens
tacagatcgaactcc

SEQ ID NO: 1233342 - DNA, 15 bp, Homo sapiens
ttacagatcgaactc

SEQ ID NO: 1233343 - DNA, 15 bp, Homo sapiens
attacagatcgaact

SEQ ID NO: 1233344 - DNA, 15 bp, Homo sapiens
aattacagatcgaac

SEQ ID NO: 1233345 - DNA, 15 bp, Homo sapiens
gaattacagatcgaa

SEQ ID NO: 1233346 - DNA, 15 bp, Homo sapiens
tgaattacagatcga

SEQ ID NO: 1233347 - DNA, 15 bp, Homo sapiens
gtgaattacagatcg

SEQ ID NO: 1233348 - DNA, 15 bp, Homo sapiens
agtgaattacagatc

SEQ ID NO: 1233349 - DNA, 15 bp, Homo sapiens
cagtgaattacagat

SEQ ID NO: 1233350 - DNA, 15 bp, Homo sapiens
acagtgaattacaga

SEQ ID NO: 1233351 - DNA, 15 bp, Homo sapiens
cacagtgaattacag

SEQ ID NO: 1233352 - DNA, 15 bp, Homo sapiens
tcacagtgaattaca

SEQ ID NO: 1233353 - DNA, 15 bp, Homo sapiens
ttcacagtgaattac

SEQ ID NO: 1233354 - DNA, 15 bp, Homo sapiens
gttcacagtgaatta

SEQ ID NO: 1233355 - DNA, 15 bp, Homo sapiens
tgttcacagtgaatt

SEQ ID NO: 1233356 - DNA, 15 bp, Homo sapiens
ttgttcacagtgaat

SEQ ID NO: 1233357 - DNA, 15 bp, Homo sapiens
tttgttcacagtgaa

SEQ ID NO: 1233358 - DNA, 15 bp, Homo sapiens
gtttgttcacagtga

SEQ ID NO: 1233359 - DNA, 15 bp, Homo sapiens
tgtttgttcacagtg

SEQ ID NO: 1233360 - DNA, 15 bp, Homo sapiens
ttgtttgttcacagt

SEQ ID NO: 1233361 - DNA, 15 bp, Homo sapiens
attgtttgttcacag

SEQ ID NO: 1233362 - DNA, 15 bp, Homo sapiens
aattgtttgttcaca

SEQ ID NO: 1233363 - DNA, 15 bp, Homo sapiens
caattgtttgttcac

SEQ ID NO: 1233364 - DNA, 15 bp, Homo sapiens
tcaattgtttgttca

SEQ ID NO: 1233365 - DNA, 15 bp, Homo sapiens
ctcaattgtttgttc

SEQ ID NO: 1233366 - DNA, 15 bp, Homo sapiens
cctcaattgtttgtt

SEQ ID NO: 1233367 - DNA, 15 bp, Homo sapiens
acctcaattgtttgt

SEQ ID NO: 1233368 - DNA, 15 bp, Homo sapiens
tacctcaattgtttg

SEQ ID NO: 1233369 - DNA, 15 bp, Homo sapiens
ttacctcaattgttt

SEQ ID NO: 1233370 - DNA, 15 bp, Homo sapiens
gttacctcaattgtt

SEQ ID NO: 1233371 - DNA, 15 bp, Homo sapiens
agttacctcaattgt

SEQ ID NO: 1233372 - DNA, 15 bp, Homo sapiens
cagttacctcaattg

SEQ ID NO: 1233373 - DNA, 15 bp, Homo sapiens
tcagttacctcaatt

SEQ ID NO: 1233374 - DNA, 15 bp, Homo sapiens
gtcagttacctcaat

SEQ ID NO: 1233375 - DNA, 15 bp, Homo sapiens
agtcagttacctcaa

SEQ ID NO: 1233376 - DNA, 15 bp, Homo sapiens
tagtcagttacctca

SEQ ID NO: 1233377 - DNA, 15 bp, Homo sapiens
gtagtcagttacctc

SEQ ID NO: 1233378 - DNA, 15 bp, Homo sapiens
ggtagtcagttacct

SEQ ID NO: 1233379 - DNA, 15 bp, Homo sapiens
aggtagtcagttacc

SEQ ID NO: 1233380 - DNA, 15 bp, Homo sapiens
aaggtagtcagttac

SEQ ID NO: 1233381 - DNA, 15 bp, Homo sapiens
gaaggtagtcagtta

SEQ ID NO: 1233382 - DNA, 15 bp, Homo sapiens
tgaaggtagtcagtt

SEQ ID NO: 1233383 - DNA, 15 bp, Homo sapiens
ctgaaggtagtcagt

SEQ ID NO: 1233384 - DNA, 15 bp, Homo sapiens
tctgaaggtagtcag

SEQ ID NO: 1233385 - DNA, 15 bp, Homo sapiens
gtctgaaggtagtca

SEQ ID NO: 1233386 - DNA, 15 bp, Homo sapiens
cgtctgaaggtagtc

SEQ ID NO: 1233387 - DNA, 15 bp, Homo sapiens
tcgtctgaaggtagt

SEQ ID NO: 1233388 - DNA, 15 bp, Homo sapiens
ctcgtctgaaggtag

SEQ ID NO: 1233389 - DNA, 15 bp, Homo sapiens
cctcgtctgaaggta

SEQ ID NO: 1233390 - DNA, 15 bp, Homo sapiens
gcctcgtctgaaggt

SEQ ID NO: 1233391 - DNA, 15 bp, Homo sapiens
agcctcgtctgaagg

SEQ ID NO: 1233392 - DNA, 15 bp, Homo sapiens
cagcctcgtctgaag

SEQ ID NO: 1233393 - DNA, 15 bp, Homo sapiens
ccagcctcgtctgaa

SEQ ID NO: 1233394 - DNA, 15 bp, Homo sapiens
tccagcctcgtctga

SEQ ID NO: 1233395 - DNA, 15 bp, Homo sapiens
ttccagcctcgtctg

SEQ ID NO: 1233396 - DNA, 15 bp, Homo sapiens
cttccagcctcgtct

SEQ ID NO: 1233397 - DNA, 15 bp, Homo sapiens
acttccagcctcgtc

SEQ ID NO: 1233398 - DNA, 15 bp, Homo sapiens
aacttccagcctcgt

SEQ ID NO: 1233399 - DNA, 15 bp, Homo sapiens
aaacttccagcctcg

SEQ ID NO: 1233400 - DNA, 15 bp, Homo sapiens
aaaacttccagcctc

SEQ ID NO: 1233401 - DNA, 15 bp, Homo sapiens
aaaaacttccagcct

SEQ ID NO: 1233402 - DNA, 15 bp, Homo sapiens
taaaaacttccagcc

SEQ ID NO: 1233403 - DNA, 15 bp, Homo sapiens
ataaaaacttccagc

SEQ ID NO: 1233404 - DNA, 15 bp, Homo sapiens
aataaaaacttccag

SEQ ID NO: 1233405 - DNA, 15 bp, Homo sapiens
aaataaaaacttcca

SEQ ID NO: 1233406 - DNA, 15 bp, Homo sapiens
taaataaaaacttcc

SEQ ID NO: 1233407 - DNA, 15 bp, Homo sapiens
ataaataaaaacttc

SEQ ID NO: 1233408 - DNA, 15 bp, Homo sapiens
aataaataaaaactt

SEQ ID NO: 1233409 - DNA, 15 bp, Homo sapiens
ctaaataaataaaaa

SEQ ID NO: 1233410 - DNA, 15 bp, Homo sapiens
actaaataaataaaa

SEQ ID NO: 1233411 - DNA, 15 bp, Homo sapiens
cactaaataaataaa

SEQ ID NO: 1233412 - DNA, 15 bp, Homo sapiens
tcactaaataaataa

SEQ ID NO: 1233413 - DNA, 15 bp, Homo sapiens
gtcactaaataaata

SEQ ID NO: 1233414 - DNA, 15 bp, Homo sapiens
ggtcactaaataaat

SEQ ID NO: 1233415 - DNA, 15 bp, Homo sapiens
cggtcactaaataaa

SEQ ID NO: 1233416 - DNA, 15 bp, Homo sapiens
tcggtcactaaataa

SEQ ID NO: 1233417 - DNA, 15 bp, Homo sapiens
gtcggtcactaaata

SEQ ID NO: 1233418 - DNA, 15 bp, Homo sapiens
agtcggtcactaaat

SEQ ID NO: 1233419 - DNA, 15 bp, Homo sapiens
aagtcggtcactaaa

SEQ ID NO: 1233420 - DNA, 15 bp, Homo sapiens
aaagtcggtcactaa

SEQ ID NO: 1233421 - DNA, 15 bp, Homo sapiens
aaaagtcggtcacta

SEQ ID NO: 1233422 - DNA, 15 bp, Homo sapiens
caaaagtcggtcact

SEQ ID NO: 1233423 - DNA, 15 bp, Homo sapiens
ccaaaagtcggtcac

SEQ ID NO: 1233424 - DNA, 15 bp, Homo sapiens
accaaaagtcggtca

SEQ ID NO: 1233425 - DNA, 15 bp, Homo sapiens
gaccaaaagtcggtc

SEQ ID NO: 1233426 - DNA, 15 bp, Homo sapiens
agaccaaaagtcggt

SEQ ID NO: 1233427 - DNA, 15 bp, Homo sapiens
aagaccaaaagtcgg

SEQ ID NO: 1233428 - DNA, 15 bp, Homo sapiens
caagaccaaaagtcg

SEQ ID NO: 1233429 - DNA, 15 bp, Homo sapiens
acaagaccaaaagtc

SEQ ID NO: 1233430 - DNA, 15 bp, Homo sapiens
aacaagaccaaaagt

SEQ ID NO: 1233431 - DNA, 15 bp, Homo sapiens
aaacaagaccaaaag

SEQ ID NO: 1233432 - DNA, 15 bp, Homo sapiens
gaaacaagaccaaaa

SEQ ID NO: 1233433 - DNA, 15 bp, Homo sapiens
ggaaacaagaccaaa

SEQ ID NO: 1233434 - DNA, 15 bp, Homo sapiens
gggaaacaagaccaa

SEQ ID NO: 1233435 - DNA, 15 bp, Homo sapiens
tgggaaacaagacca

SEQ ID NO: 1233436 - DNA, 15 bp, Homo sapiens
ctgggaaacaagacc

SEQ ID NO: 1233437 - DNA, 15 bp, Homo sapiens
cctgggaaacaagac

SEQ ID NO: 1233438 - DNA, 15 bp, Homo sapiens
acctgggaaacaaga

SEQ ID NO: 1233439 - DNA, 15 bp, Homo sapiens
aacctgggaaacaag

SEQ ID NO: 1233440 - DNA, 15 bp, Homo sapiens
caacctgggaaacaa

SEQ ID NO: 1233441 - DNA, 15 bp, Homo sapiens
ccaacctgggaaaca

SEQ ID NO: 1233442 - DNA, 15 bp, Homo sapiens
tccaacctgggaaac

SEQ ID NO: 1233443 - DNA, 15 bp, Homo sapiens
ctccaacctgggaaa

SEQ ID NO: 1233444 - DNA, 15 bp, Homo sapiens
actccaacctgggaa

SEQ ID NO: 1233445 - DNA, 15 bp, Homo sapiens
cactccaacctggga

SEQ ID NO: 1233446 - DNA, 15 bp, Homo sapiens
ttgcactccaacctg

SEQ ID NO: 1233447 - DNA, 15 bp, Homo sapiens
attgcactccaacct

SEQ ID NO: 1233448 - DNA, 15 bp, Homo sapiens
cattgcactccaacc

SEQ ID NO: 1233449 - DNA, 15 bp, Homo sapiens
ccattgcactccaac

SEQ ID NO: 1233450 - DNA, 15 bp, Homo sapiens
gccattgcactccaa

SEQ ID NO: 1233451 - DNA, 15 bp, Homo sapiens
gaaggtggaggttgc

SEQ ID NO: 1233452 - DNA, 15 bp, Homo sapiens
ggaaggtggaggttg

SEQ ID NO: 1233453 - DNA, 15 bp, Homo sapiens
cggaaggtggaggtt

SEQ ID NO: 1233454 - DNA, 15 bp, Homo sapiens
ccggaaggtggaggt

SEQ ID NO: 1233455 - DNA, 15 bp, Homo sapiens
cccggaaggtggagg

SEQ ID NO: 1233456 - DNA, 15 bp, Homo sapiens
acccggaaggtggag

SEQ ID NO: 1233457 - DNA, 15 bp, Homo sapiens
aacccggaaggtgga

SEQ ID NO: 1233458 - DNA, 15 bp, Homo sapiens
gaacccggaaggtgg

SEQ ID NO: 1233459 - DNA, 15 bp, Homo sapiens
tgaacccggaaggtg

SEQ ID NO: 1233460 - DNA, 15 bp, Homo sapiens
ttgaacccggaaggt

SEQ ID NO: 1233461 - DNA, 15 bp, Homo sapiens
gaagagaatcacttg

SEQ ID NO: 1233462 - DNA, 15 bp, Homo sapiens
ggaagagaatcactt

SEQ ID NO: 1233463 - DNA, 15 bp, Homo sapiens
gggaagagaatcact

SEQ ID NO: 1233464 - DNA, 15 bp, Homo sapiens
agggaagagaatcac

SEQ ID NO: 1233465 - DNA, 15 bp, Homo sapiens
gagggaagagaatca

SEQ ID NO: 1233466 - DNA, 15 bp, Homo sapiens
tgagggaagagaatc

SEQ ID NO: 1233467 - DNA, 15 bp, Homo sapiens
ctgagggaagagaat

SEQ ID NO: 1233468 - DNA, 15 bp, Homo sapiens
gctgagggaagagaa

SEQ ID NO: 1233469 - DNA, 15 bp, Homo sapiens
ggctgagggaagaga

SEQ ID NO: 1233470 - DNA, 15 bp, Homo sapiens
aggctgagggaagag

SEQ ID NO: 1233471 - DNA, 15 bp, Homo sapiens
gaggctgagggaaga

SEQ ID NO: 1233472 - DNA, 15 bp, Homo sapiens
ggaggctgagggaag

SEQ ID NO: 1233473 - DNA, 15 bp, Homo sapiens
aggaggctgagggaa

SEQ ID NO: 1233474 - DNA, 15 bp, Homo sapiens
caggaggctgaggga

SEQ ID NO: 1233475 - DNA, 15 bp, Homo sapiens
tcaggaggctgaggg

SEQ ID NO: 1233476 - DNA, 15 bp, Homo sapiens
tgcctgtagttccag

SEQ ID NO: 1233477 - DNA, 15 bp, Homo sapiens
gtgcctgtagttcca

SEQ ID NO: 1233478 - DNA, 15 bp, Homo sapiens
ggtgcctgtagttcc

SEQ ID NO: 1233479 - DNA, 15 bp, Homo sapiens
gggtgcctgtagttc

SEQ ID NO: 1233480 - DNA, 15 bp, Homo sapiens
tgggtgcctgtagtt

SEQ ID NO: 1233481 - DNA, 15 bp, Homo sapiens
gtgggtgcctgtagt

SEQ ID NO: 1233482 - DNA, 15 bp, Homo sapiens
ggtgggtgcctgtag

SEQ ID NO: 1233483 - DNA, 15 bp, Homo sapiens
tggtgggtgcctgta

SEQ ID NO: 1233484 - DNA, 15 bp, Homo sapiens
ctggtgggtgcctgt

SEQ ID NO: 1233485 - DNA, 15 bp, Homo sapiens
gctggtgggtgcctg

SEQ ID NO: 1233486 - DNA, 15 bp, Homo sapiens
tgctggtgggtgcct

SEQ ID NO: 1233487 - DNA, 15 bp, Homo sapiens
atgctggtgggtgcc

SEQ ID NO: 1233488 - DNA, 15 bp, Homo sapiens
catgctggtgggtgc

SEQ ID NO: 1233489 - DNA, 15 bp, Homo sapiens
gcatgctggtgggtg

SEQ ID NO: 1233490 - DNA, 15 bp, Homo sapiens
ggcatgctggtgggt

SEQ ID NO: 1233491 - DNA, 15 bp, Homo sapiens
gggcatgctggtggg

SEQ ID NO: 1233492 - DNA, 15 bp, Homo sapiens
cgggcatgctggtgg

SEQ ID NO: 1233493 - DNA, 15 bp, Homo sapiens
ccgggcatgctggtg

SEQ ID NO: 1233494 - DNA, 15 bp, Homo sapiens
gccgggcatgctggt

SEQ ID NO: 1233495 - DNA, 15 bp, Homo sapiens
agccgggcatgctgg

SEQ ID NO: 1233496 - DNA, 15 bp, Homo sapiens
tagccgggcatgctg

SEQ ID NO: 1233497 - DNA, 15 bp, Homo sapiens
ttagccgggcatgct

SEQ ID NO: 1233498 - DNA, 15 bp, Homo sapiens
attagccgggcatgc

SEQ ID NO: 1233499 - DNA, 15 bp, Homo sapiens
ccatggtgaaacacc

SEQ ID NO: 1233500 - DNA, 15 bp, Homo sapiens
accatggtgaaacac

SEQ ID NO: 1233501 - DNA, 15 bp, Homo sapiens
caccatggtgaaaca

SEQ ID NO: 1233502 - DNA, 15 bp, Homo sapiens
ccaccatggtgaaac

SEQ ID NO: 1233503 - DNA, 15 bp, Homo sapiens
gccaccatggtgaaa

SEQ ID NO: 1233504 - DNA, 15 bp, Homo sapiens
ggccaccatggtgaa

SEQ ID NO: 1233505 - DNA, 15 bp, Homo sapiens
tggccaccatggtga

SEQ ID NO: 1233506 - DNA, 15 bp, Homo sapiens
ctggccaccatggtg

SEQ ID NO: 1233507 - DNA, 15 bp, Homo sapiens
cctggccaccatggt

SEQ ID NO: 1233508 - DNA, 15 bp, Homo sapiens
gcctggccaccatgg

SEQ ID NO: 1233509 - DNA, 15 bp, Homo sapiens
agcctggccaccatg

SEQ ID NO: 1233510 - DNA, 15 bp, Homo sapiens
cagcctggccaccat

SEQ ID NO: 1233511 - DNA, 15 bp, Homo sapiens
ccagcctggccacca

SEQ ID NO: 1233512 - DNA, 15 bp, Homo sapiens
accagcctggccacc

SEQ ID NO: 1233513 - DNA, 15 bp, Homo sapiens
gaccagcctggccac

SEQ ID NO: 1233514 - DNA, 15 bp, Homo sapiens
gaggagttccagacc

SEQ ID NO: 1233515 - DNA, 15 bp, Homo sapiens
ggaggagttccagac

SEQ ID NO: 1233516 - DNA, 15 bp, Homo sapiens
aggaggagttccaga

SEQ ID NO: 1233517 - DNA, 15 bp, Homo sapiens
caggaggagttccag

SEQ ID NO: 1233518 - DNA, 15 bp, Homo sapiens
tcaggaggagttcca

SEQ ID NO: 1233519 - DNA, 15 bp, Homo sapiens
gtcaggaggagttcc

SEQ ID NO: 1233520 - DNA, 15 bp, Homo sapiens
ggtcaggaggagttc

SEQ ID NO: 1233521 - DNA, 15 bp, Homo sapiens
tggtcaggaggagtt

SEQ ID NO: 1233522 - DNA, 15 bp, Homo sapiens
gtggtcaggaggagt

SEQ ID NO: 1233523 - DNA, 15 bp, Homo sapiens
tgtggtcaggaggag

SEQ ID NO: 1233524 - DNA, 15 bp, Homo sapiens
ctgtggtcaggagga

SEQ ID NO: 1233525 - DNA, 15 bp, Homo sapiens
cctgtggtcaggagg

SEQ ID NO: 1233526 - DNA, 15 bp, Homo sapiens
acctgtggtcaggag

SEQ ID NO: 1233527 - DNA, 15 bp, Homo sapiens
cacctgtggtcagga

SEQ ID NO: 1233528 - DNA, 15 bp, Homo sapiens
tcacctgtggtcagg

SEQ ID NO: 1233529 - DNA, 15 bp, Homo sapiens
atcacctgtggtcag

SEQ ID NO: 1233530 - DNA, 15 bp, Homo sapiens
gatcacctgtggtca

SEQ ID NO: 1233531 - DNA, 15 bp, Homo sapiens
ggatcacctgtggtc

SEQ ID NO: 1233532 - DNA, 15 bp, Homo sapiens
tggatcacctgtggt

SEQ ID NO: 1233533 - DNA, 15 bp, Homo sapiens
gtggatcacctgtgg

SEQ ID NO: 1233534 - DNA, 15 bp, Homo sapiens
cgtggatcacctgtg

SEQ ID NO: 1233535 - DNA, 15 bp, Homo sapiens
acgtggatcacctgt

SEQ ID NO: 1233536 - DNA, 15 bp, Homo sapiens
cacgtggatcacctg

SEQ ID NO: 1233537 - DNA, 15 bp, Homo sapiens
gcacgtggatcacct

SEQ ID NO: 1233538 - DNA, 15 bp, Homo sapiens
ggcacgtggatcacc

SEQ ID NO: 1233539 - DNA, 15 bp, Homo sapiens
cgaggcacgtggatc

SEQ ID NO: 1233540 - DNA, 15 bp, Homo sapiens
ccgaggcacgtggat

SEQ ID NO: 1233541 - DNA, 15 bp, Homo sapiens
gccgaggcacgtgga

SEQ ID NO: 1233542 - DNA, 15 bp, Homo sapiens
ggccgaggcacgtgg

SEQ ID NO: 1233543 - DNA, 15 bp, Homo sapiens
aggccgaggcacgtg

SEQ ID NO: 1233544 - DNA, 15 bp, Homo sapiens
gaggccgaggcacgt

SEQ ID NO: 1233545 - DNA, 15 bp, Homo sapiens
agaggccgaggcacg

SEQ ID NO: 1233546 - DNA, 15 bp, Homo sapiens
cagaggccgaggcac

SEQ ID NO: 1233547 - DNA, 15 bp, Homo sapiens
tcagaggccgaggca

SEQ ID NO: 1233548 - DNA, 15 bp, Homo sapiens
ttcagaggccgaggc

SEQ ID NO: 1233549 - DNA, 15 bp, Homo sapiens
tttcagaggccgagg

SEQ ID NO: 1233550 - DNA, 15 bp, Homo sapiens
ctttcagaggccgag

SEQ ID NO: 1233551 - DNA, 15 bp, Homo sapiens
actttcagaggccga

SEQ ID NO: 1233552 - DNA, 15 bp, Homo sapiens
cactttcagaggccg

SEQ ID NO: 1233553 - DNA, 15 bp, Homo sapiens
acactttcagaggcc

SEQ ID NO: 1233554 - DNA, 15 bp, Homo sapiens
aacactttcagaggc

SEQ ID NO: 1233555 - DNA, 15 bp, Homo sapiens
caacactttcagagg

SEQ ID NO: 1233556 - DNA, 15 bp, Homo sapiens
ccaacactttcagag

SEQ ID NO: 1233557 - DNA, 15 bp, Homo sapiens
tccaacactttcaga

SEQ ID NO: 1233558 - DNA, 15 bp, Homo sapiens
ctccaacactttcag

SEQ ID NO: 1233559 - DNA, 15 bp, Homo sapiens
actccaacactttca

SEQ ID NO: 1233560 - DNA, 15 bp, Homo sapiens
aactccaacactttc

SEQ ID NO: 1233561 - DNA, 15 bp, Homo sapiens
taactccaacacttt

SEQ ID NO: 1233562 - DNA, 15 bp, Homo sapiens
gtaactccaacactt

SEQ ID NO: 1233563 - DNA, 15 bp, Homo sapiens
tgtaactccaacact

SEQ ID NO: 1233564 - DNA, 15 bp, Homo sapiens
ctgtaactccaacac

SEQ ID NO: 1233565 - DNA, 15 bp, Homo sapiens
cctgtaactccaaca

SEQ ID NO: 1233566 - DNA, 15 bp, Homo sapiens
gcctgtaactccaac

SEQ ID NO: 1233567 - DNA, 15 bp, Homo sapiens
tgcctgtaactccaa

SEQ ID NO: 1233568 - DNA, 15 bp, Homo sapiens
atgcctgtaactcca

SEQ ID NO: 1233569 - DNA, 15 bp, Homo sapiens
catgcctgtaactcc

SEQ ID NO: 1233570 - DNA, 15 bp, Homo sapiens
tcatgcctgtaactc

SEQ ID NO: 1233571 - DNA, 15 bp, Homo sapiens
ctcatgcctgtaact

SEQ ID NO: 1233572 - DNA, 15 bp, Homo sapiens
gctcatgcctgtaac

SEQ ID NO: 1233573 - DNA, 15 bp, Homo sapiens
gggtggctcatgcct

SEQ ID NO: 1233574 - DNA, 15 bp, Homo sapiens
ggggtggctcatgcc

SEQ ID NO: 1233575 - DNA, 15 bp, Homo sapiens
tggggtggctcatgc

SEQ ID NO: 1233576 - DNA, 15 bp, Homo sapiens
gtggggtggctcatg

SEQ ID NO: 1233577 - DNA, 15 bp, Homo sapiens
ggtggggtggctcat

SEQ ID NO: 1233578 - DNA, 15 bp, Homo sapiens
ggctgggtggggtgg

SEQ ID NO: 1233579 - DNA, 15 bp, Homo sapiens
tggctgggtggggtg

SEQ ID NO: 1233580 - DNA, 15 bp, Homo sapiens
gtggctgggtggggt

SEQ ID NO: 1233581 - DNA, 15 bp, Homo sapiens
tgtggctgggtgggg

SEQ ID NO: 1233582 - DNA, 15 bp, Homo sapiens
atgtggctgggtggg

SEQ ID NO: 1233583 - DNA, 15 bp, Homo sapiens
aatgtggctgggtgg

SEQ ID NO: 1233584 - DNA, 15 bp, Homo sapiens
taatgtggctgggtg

SEQ ID NO: 1233585 - DNA, 15 bp, Homo sapiens
ataatgtggctgggt

SEQ ID NO: 1233586 - DNA, 15 bp, Homo sapiens
tataatgtggctggg

SEQ ID NO: 1233587 - DNA, 15 bp, Homo sapiens
atataatgtggctgg

SEQ ID NO: 1233588 - DNA, 15 bp, Homo sapiens
catataatgtggctg

SEQ ID NO: 1233589 - DNA, 15 bp, Homo sapiens
acatataatgtggct

SEQ ID NO: 1233590 - DNA, 15 bp, Homo sapiens
aacatataatgtggc

SEQ ID NO: 1233591 - DNA, 15 bp, Homo sapiens
aaacatataatgtgg

SEQ ID NO: 1233592 - DNA, 15 bp, Homo sapiens
taaacatataatgtg

SEQ ID NO: 1233593 - DNA, 15 bp, Homo sapiens
ttaaacatataatgt

SEQ ID NO: 1233594 - DNA, 15 bp, Homo sapiens
tttaaacatataatg

SEQ ID NO: 1233595 - DNA, 15 bp, Homo sapiens
atttaaacatataat

SEQ ID NO: 1233596 - DNA, 15 bp, Homo sapiens
aatttaaacatataa

SEQ ID NO: 1233597 - DNA, 15 bp, Homo sapiens
aaatttaaacatata

SEQ ID NO: 1233598 - DNA, 15 bp, Homo sapiens
aaaatttaaacatat

SEQ ID NO: 1233599 - DNA, 15 bp, Homo sapiens
caaaatttaaacata

SEQ ID NO: 1233600 - DNA, 15 bp, Homo sapiens
tcaaaatttaaacat

SEQ ID NO: 1233601 - DNA, 15 bp, Homo sapiens
atcaaaatttaaaca

SEQ ID NO: 1233602 - DNA, 15 bp, Homo sapiens
aatcaaaatttaaac

SEQ ID NO: 1233603 - DNA, 15 bp, Homo sapiens
aaatcaaaatttaaa

SEQ ID NO: 1233604 - DNA, 15 bp, Homo sapiens
taaatcaaaatttaa

SEQ ID NO: 1233605 - DNA, 15 bp, Homo sapiens
ttaaatcaaaattta

SEQ ID NO: 1233606 - DNA, 15 bp, Homo sapiens
tttaaatcaaaattt

SEQ ID NO: 1233607 - DNA, 15 bp, Homo sapiens
atttaaatcaaaatt

SEQ ID NO: 1233608 - DNA, 15 bp, Homo sapiens
aatttaaatcaaaat

SEQ ID NO: 1233609 - DNA, 15 bp, Homo sapiens
aaatttaaatcaaaa

SEQ ID NO: 1233610 - DNA, 15 bp, Homo sapiens
taaatttaaatcaaa

SEQ ID NO: 1233611 - DNA, 15 bp, Homo sapiens
ttaaatttaaatcaa

SEQ ID NO: 1233612 - DNA, 15 bp, Homo sapiens
tttaaatttaaatca

SEQ ID NO: 1233613 - DNA, 15 bp, Homo sapiens
ttttaaatttaaatc

SEQ ID NO: 1233614 - DNA, 15 bp, Homo sapiens
attttaaatttaaat

SEQ ID NO: 1233615 - DNA, 15 bp, Homo sapiens
aattttaaatttaaa

SEQ ID NO: 1233616 - DNA, 15 bp, Homo sapiens
aaattttaaatttaa

SEQ ID NO: 1233617 - DNA, 15 bp, Homo sapiens
caaattttaaattta

SEQ ID NO: 1233618 - DNA, 15 bp, Homo sapiens
tcaaattttaaattt

SEQ ID NO: 1233619 - DNA, 15 bp, Homo sapiens
ttcaaattttaaatt

SEQ ID NO: 1233620 - DNA, 15 bp, Homo sapiens
attcaaattttaaat

SEQ ID NO: 1233621 - DNA, 15 bp, Homo sapiens
aattcaaattttaaa

SEQ ID NO: 1233622 - DNA, 15 bp, Homo sapiens
aaattcaaattttaa

SEQ ID NO: 1233623 - DNA, 15 bp, Homo sapiens
aaaattcaaatttta

SEQ ID NO: 1233624 - DNA, 15 bp, Homo sapiens
taaaattcaaatttt

SEQ ID NO: 1233625 - DNA, 15 bp, Homo sapiens
ttaaaattcaaattt

SEQ ID NO: 1233626 - DNA, 15 bp, Homo sapiens
gttaaaattcaaatt

SEQ ID NO: 1233627 - DNA, 15 bp, Homo sapiens
agttaaaattcaaat

SEQ ID NO: 1233628 - DNA, 15 bp, Homo sapiens
aagttaaaattcaaa

SEQ ID NO: 1233629 - DNA, 15 bp, Homo sapiens
aaagttaaaattcaa

SEQ ID NO: 1233630 - DNA, 15 bp, Homo sapiens
aaaagttaaaattca

SEQ ID NO: 1233631 - DNA, 15 bp, Homo sapiens
taaaagttaaaattc

SEQ ID NO: 1233632 - DNA, 15 bp, Homo sapiens
ttaaaagttaaaatt

SEQ ID NO: 1233633 - DNA, 15 bp, Homo sapiens
tttaaaagttaaaat

SEQ ID NO: 1233634 - DNA, 15 bp, Homo sapiens
gtttaaaagttaaaa

SEQ ID NO: 1233635 - DNA, 15 bp, Homo sapiens
agtttaaaagttaaa

SEQ ID NO: 1233636 - DNA, 15 bp, Homo sapiens
tagtttaaaagttaa

SEQ ID NO: 1233637 - DNA, 15 bp, Homo sapiens
ttagtttaaaagtta

SEQ ID NO: 1233638 - DNA, 15 bp, Homo sapiens
tttagtttaaaagtt

SEQ ID NO: 1233639 - DNA, 15 bp, Homo sapiens
ttttagtttaaaagt

SEQ ID NO: 1233640 - DNA, 15 bp, Homo sapiens
attttagtttaaaag

SEQ ID NO: 1233641 - DNA, 15 bp, Homo sapiens
aattttagtttaaaa

SEQ ID NO: 1233642 - DNA, 15 bp, Homo sapiens
aaattttagtttaaa

SEQ ID NO: 1233643 - DNA, 15 bp, Homo sapiens
taaattttagtttaa

SEQ ID NO: 1233644 - DNA, 15 bp, Homo sapiens
ttaaattttagttta

SEQ ID NO: 1233645 - DNA, 15 bp, Homo sapiens
tttaaattttagttt

SEQ ID NO: 1233646 - DNA, 15 bp, Homo sapiens
atttaaattttagtt

SEQ ID NO: 1233647 - DNA, 15 bp, Homo sapiens
aatttaaattttagt

SEQ ID NO: 1233648 - DNA, 15 bp, Homo sapiens
taatttaaattttag

SEQ ID NO: 1233649 - DNA, 15 bp, Homo sapiens
ttaatttaaatttta

SEQ ID NO: 1233650 - DNA, 15 bp, Homo sapiens
tttaatttaaatttt

SEQ ID NO: 1233651 - DNA, 15 bp, Homo sapiens
ttttaatttaaattt

SEQ ID NO: 1233652 - DNA, 15 bp, Homo sapiens
atttttaatttaaat

SEQ ID NO: 1233653 - DNA, 15 bp, Homo sapiens
aatttttaatttaaa

SEQ ID NO: 1233654 - DNA, 15 bp, Homo sapiens
taatttttaatttaa

SEQ ID NO: 1233655 - DNA, 15 bp, Homo sapiens
ttaatttttaattta

SEQ ID NO: 1233656 - DNA, 15 bp, Homo sapiens
aaatttaatttttaa

SEQ ID NO: 1233657 - DNA, 15 bp, Homo sapiens
aaaatttaattttta

SEQ ID NO: 1233658 - DNA, 15 bp, Homo sapiens
taaaatttaattttt

SEQ ID NO: 1233659 - DNA, 15 bp, Homo sapiens
ttaaaatttaatttt

SEQ ID NO: 1233660 - DNA, 15 bp, Homo sapiens
tttaaaatttaattt

SEQ ID NO: 1233661 - DNA, 15 bp, Homo sapiens
atttaaaatttaatt

SEQ ID NO: 1233662 - DNA, 15 bp, Homo sapiens
aatttaaaatttaat

SEQ ID NO: 1233663 - DNA, 15 bp, Homo sapiens
aaatttaaaatttaa

SEQ ID NO: 1233664 - DNA, 15 bp, Homo sapiens
taaatttaaaattta

SEQ ID NO: 1233665 - DNA, 15 bp, Homo sapiens
ttaaatttaaaattt

SEQ ID NO: 1233666 - DNA, 15 bp, Homo sapiens
tttaaatttaaaatt

SEQ ID NO: 1233667 - DNA, 15 bp, Homo sapiens
atttaaatttaaaat

SEQ ID NO: 1233668 - DNA, 15 bp, Homo sapiens
aatttaaatttaaaa

SEQ ID NO: 1233669 - DNA, 15 bp, Homo sapiens
taatttaaatttaaa

SEQ ID NO: 1233670 - DNA, 15 bp, Homo sapiens
ttaatttaaatttaa

SEQ ID NO: 1233671 - DNA, 15 bp, Homo sapiens
tttaatttaaattta

SEQ ID NO: 1233672 - DNA, 15 bp, Homo sapiens
atttttttaatttaa

SEQ ID NO: 1233673 - DNA, 15 bp, Homo sapiens
aatttttttaattta

SEQ ID NO: 1233674 - DNA, 15 bp, Homo sapiens
taatttttttaattt

SEQ ID NO: 1233675 - DNA, 15 bp, Homo sapiens
ttaatttttttaatt

SEQ ID NO: 1233676 - DNA, 15 bp, Homo sapiens
tttaatttttttaat

SEQ ID NO: 1233677 - DNA, 15 bp, Homo sapiens
ttttaatttttttaa

SEQ ID NO: 1233678 - DNA, 15 bp, Homo sapiens
tttttaattttttta

SEQ ID NO: 1233679 - DNA, 15 bp, Homo sapiens
gtttttaattttttt

SEQ ID NO: 1233680 - DNA, 15 bp, Homo sapiens
acagggtttttaatt

SEQ ID NO: 1233681 - DNA, 15 bp, Homo sapiens
aacagggtttttaat

SEQ ID NO: 1233682 - DNA, 15 bp, Homo sapiens
taacagggtttttaa

SEQ ID NO: 1233683 - DNA, 15 bp, Homo sapiens
gtaacagggttttta

SEQ ID NO: 1233684 - DNA, 15 bp, Homo sapiens
ggtaacagggttttt

SEQ ID NO: 1233685 - DNA, 15 bp, Homo sapiens
gggtaacagggtttt

SEQ ID NO: 1233686 - DNA, 15 bp, Homo sapiens
tgggtaacagggttt

SEQ ID NO: 1233687 - DNA, 15 bp, Homo sapiens
ctgggtaacagggtt

SEQ ID NO: 1233688 - DNA, 15 bp, Homo sapiens
tctgggtaacagggt

SEQ ID NO: 1233689 - DNA, 15 bp, Homo sapiens
gtctgggtaacaggg

SEQ ID NO: 1233690 - DNA, 15 bp, Homo sapiens
agtctgggtaacagg

SEQ ID NO: 1233691 - DNA, 15 bp, Homo sapiens
cagtctgggtaacag

SEQ ID NO: 1233692 - DNA, 15 bp, Homo sapiens
ccagtctgggtaaca

SEQ ID NO: 1233693 - DNA, 15 bp, Homo sapiens
tccagtctgggtaac

SEQ ID NO: 1233694 - DNA, 15 bp, Homo sapiens
ctccagtctgggtaa

SEQ ID NO: 1233695 - DNA, 15 bp, Homo sapiens
actccagtctgggta

SEQ ID NO: 1233696 - DNA, 15 bp, Homo sapiens
cactccagtctgggt

SEQ ID NO: 1233697 - DNA, 15 bp, Homo sapiens
atgcaccactgcact

SEQ ID NO: 1233698 - DNA, 15 bp, Homo sapiens
aatgcaccactgcac

SEQ ID NO: 1233699 - DNA, 15 bp, Homo sapiens
gaatgcaccactgca

SEQ ID NO: 1233700 - DNA, 15 bp, Homo sapiens
tgaatgcaccactgc

SEQ ID NO: 1233701 - DNA, 15 bp, Homo sapiens
atgaatgcaccactg

SEQ ID NO: 1233702 - DNA, 15 bp, Homo sapiens
catgaatgcaccact

SEQ ID NO: 1233703 - DNA, 15 bp, Homo sapiens
ccatgaatgcaccac

SEQ ID NO: 1233704 - DNA, 15 bp, Homo sapiens
gccatgaatgcacca

SEQ ID NO: 1233705 - DNA, 15 bp, Homo sapiens
agccatgaatgcacc

SEQ ID NO: 1233706 - DNA, 15 bp, Homo sapiens
gagccatgaatgcac

SEQ ID NO: 1233707 - DNA, 15 bp, Homo sapiens
tgagccatgaatgca

SEQ ID NO: 1233708 - DNA, 15 bp, Homo sapiens
gtgagccatgaatgc

SEQ ID NO: 1233709 - DNA, 15 bp, Homo sapiens
agtgagccatgaatg

SEQ ID NO: 1233710 - DNA, 15 bp, Homo sapiens
cagtgagccatgaat

SEQ ID NO: 1233711 - DNA, 15 bp, Homo sapiens
gcagtgagccatgaa

SEQ ID NO: 1233712 - DNA, 15 bp, Homo sapiens
attgaggctgcagtg

SEQ ID NO: 1233713 - DNA, 15 bp, Homo sapiens
gattgaggctgcagt

SEQ ID NO: 1233714 - DNA, 15 bp, Homo sapiens
agattgaggctgcag

SEQ ID NO: 1233715 - DNA, 15 bp, Homo sapiens
gagattgaggctgca

SEQ ID NO: 1233716 - DNA, 15 bp, Homo sapiens
ggagattgaggctgc

SEQ ID NO: 1233717 - DNA, 15 bp, Homo sapiens
aggagattgaggctg

SEQ ID NO: 1233718 - DNA, 15 bp, Homo sapiens
taggagattgaggct

SEQ ID NO: 1233719 - DNA, 15 bp, Homo sapiens
ctaggagattgaggc

SEQ ID NO: 1233720 - DNA, 15 bp, Homo sapiens
cctaggagattgagg

SEQ ID NO: 1233721 - DNA, 15 bp, Homo sapiens
gcctaggagattgag

SEQ ID NO: 1233722 - DNA, 15 bp, Homo sapiens
agcctaggagattga

SEQ ID NO: 1233723 - DNA, 15 bp, Homo sapiens
gagcctaggagattg

SEQ ID NO: 1233724 - DNA, 15 bp, Homo sapiens
tgagcctaggagatt

SEQ ID NO: 1233725 - DNA, 15 bp, Homo sapiens
tttgagcctaggaga

SEQ ID NO: 1233726 - DNA, 15 bp, Homo sapiens
atttgagcctaggag

SEQ ID NO: 1233727 - DNA, 15 bp, Homo sapiens
catttgagcctagga

SEQ ID NO: 1233728 - DNA, 15 bp, Homo sapiens
tcatttgagcctagg

SEQ ID NO: 1233729 - DNA, 15 bp, Homo sapiens
atcatttgagcctag

SEQ ID NO: 1233730 - DNA, 15 bp, Homo sapiens
gatcatttgagccta

SEQ ID NO: 1233731 - DNA, 15 bp, Homo sapiens
ggatcatttgagcct

SEQ ID NO: 1233732 - DNA, 15 bp, Homo sapiens
aaggatcatttgagc

SEQ ID NO: 1233733 - DNA, 15 bp, Homo sapiens
gaaggatcatttgag

SEQ ID NO: 1233734 - DNA, 15 bp, Homo sapiens
ggaaggatcatttga

SEQ ID NO: 1233735 - DNA, 15 bp, Homo sapiens
cggaaggatcatttg

SEQ ID NO: 1233736 - DNA, 15 bp, Homo sapiens
gcggaaggatcattt

SEQ ID NO: 1233737 - DNA, 15 bp, Homo sapiens
ggcggaaggatcatt

SEQ ID NO: 1233738 - DNA, 15 bp, Homo sapiens
aggcggaaggatcat

SEQ ID NO: 1233739 - DNA, 15 bp, Homo sapiens
gaggcggaaggatca

SEQ ID NO: 1233740 - DNA, 15 bp, Homo sapiens
tgaggcggaaggatc

SEQ ID NO: 1233741 - DNA, 15 bp, Homo sapiens
ttgaggcggaaggat

SEQ ID NO: 1233742 - DNA, 15 bp, Homo sapiens
gttgaggcggaagga

SEQ ID NO: 1233743 - DNA, 15 bp, Homo sapiens
ggttgaggcggaagg

SEQ ID NO: 1233744 - DNA, 15 bp, Homo sapiens
aggttgaggcggaag

SEQ ID NO: 1233745 - DNA, 15 bp, Homo sapiens
gaggttgaggcggaa

SEQ ID NO: 1233746 - DNA, 15 bp, Homo sapiens
ggaggttgaggcgga

SEQ ID NO: 1233747 - DNA, 15 bp, Homo sapiens
aggaggttgaggcgg

SEQ ID NO: 1233748 - DNA, 15 bp, Homo sapiens
gaggaggttgaggcg

SEQ ID NO: 1233749 - DNA, 15 bp, Homo sapiens
tgaggaggttgaggc

SEQ ID NO: 1233750 - DNA, 15 bp, Homo sapiens
ctgaggaggttgagg

SEQ ID NO: 1233751 - DNA, 15 bp, Homo sapiens
actgaggaggttgag

SEQ ID NO: 1233752 - DNA, 15 bp, Homo sapiens
tactgaggaggttga

SEQ ID NO: 1233753 - DNA, 15 bp, Homo sapiens
ctactgaggaggttg

SEQ ID NO: 1233754 - DNA, 15 bp, Homo sapiens
gctactgaggaggtt

SEQ ID NO: 1233755 - DNA, 15 bp, Homo sapiens
agctactgaggaggt

SEQ ID NO: 1233756 - DNA, 15 bp, Homo sapiens
cagctactgaggagg

SEQ ID NO: 1233757 - DNA, 15 bp, Homo sapiens
ccagctactgaggag

SEQ ID NO: 1233758 - DNA, 15 bp, Homo sapiens
cccagctactgagga

SEQ ID NO: 1233759 - DNA, 15 bp, Homo sapiens
ccccagctactgagg

SEQ ID NO: 1233760 - DNA, 15 bp, Homo sapiens
gccccagctactgag

SEQ ID NO: 1233761 - DNA, 15 bp, Homo sapiens
agccccagctactga

SEQ ID NO: 1233762 - DNA, 15 bp, Homo sapiens
tagccccagctactg

SEQ ID NO: 1233763 - DNA, 15 bp, Homo sapiens
gcacctatagcccca

SEQ ID NO: 1233764 - DNA, 15 bp, Homo sapiens
tgcacctatagcccc

SEQ ID NO: 1233765 - DNA, 15 bp, Homo sapiens
gtgcacctatagccc

SEQ ID NO: 1233766 - DNA, 15 bp, Homo sapiens
tgtgcacctatagcc

SEQ ID NO: 1233767 - DNA, 15 bp, Homo sapiens
gtgtgcacctatagc

SEQ ID NO: 1233768 - DNA, 15 bp, Homo sapiens
agtgtgcacctatag

SEQ ID NO: 1233769 - DNA, 15 bp, Homo sapiens
cagtgtgcacctata

SEQ ID NO: 1233770 - DNA, 15 bp, Homo sapiens
gcagtgtgcacctat

SEQ ID NO: 1233771 - DNA, 15 bp, Homo sapiens
ggcagtgtgcaccta

SEQ ID NO: 1233772 - DNA, 15 bp, Homo sapiens
tggcagtgtgcacct

SEQ ID NO: 1233773 - DNA, 15 bp, Homo sapiens
gtggcagtgtgcacc

SEQ ID NO: 1233774 - DNA, 15 bp, Homo sapiens
tgtggcagtgtgcac

SEQ ID NO: 1233775 - DNA, 15 bp, Homo sapiens
gtgtggcagtgtgca

SEQ ID NO: 1233776 - DNA, 15 bp, Homo sapiens
agtgtggcagtgtgc

SEQ ID NO: 1233777 - DNA, 15 bp, Homo sapiens
gagtgtggcagtgtg

SEQ ID NO: 1233778 - DNA, 15 bp, Homo sapiens
tgagtgtggcagtgt

SEQ ID NO: 1233779 - DNA, 15 bp, Homo sapiens
ctgagtgtggcagtg

SEQ ID NO: 1233780 - DNA, 15 bp, Homo sapiens
gctgagtgtggcagt

SEQ ID NO: 1233781 - DNA, 15 bp, Homo sapiens
ggctgagtgtggcag

SEQ ID NO: 1233782 - DNA, 15 bp, Homo sapiens
tggctgagtgtggca

SEQ ID NO: 1233783 - DNA, 15 bp, Homo sapiens
ttggctgagtgtggc

SEQ ID NO: 1233784 - DNA, 15 bp, Homo sapiens
attggctgagtgtgg

SEQ ID NO: 1233785 - DNA, 15 bp, Homo sapiens
aattggctgagtgtg

SEQ ID NO: 1233786 - DNA, 15 bp, Homo sapiens
aaattggctgagtgt

SEQ ID NO: 1233787 - DNA, 15 bp, Homo sapiens
aaaattggctgagtg

SEQ ID NO: 1233788 - DNA, 15 bp, Homo sapiens
aaaaattggctgagt

SEQ ID NO: 1233789 - DNA, 15 bp, Homo sapiens
taaaaattggctgag

SEQ ID NO: 1233790 - DNA, 15 bp, Homo sapiens
ttaaaaattggctga

SEQ ID NO: 1233791 - DNA, 15 bp, Homo sapiens
tttaaaaattggctg

SEQ ID NO: 1233792 - DNA, 15 bp, Homo sapiens
ttttaaaaattggct

SEQ ID NO: 1233793 - DNA, 15 bp, Homo sapiens
attttaaaaattggc

SEQ ID NO: 1233794 - DNA, 15 bp, Homo sapiens
gattttaaaaattgg

SEQ ID NO: 1233795 - DNA, 15 bp, Homo sapiens
agattttaaaaattg

SEQ ID NO: 1233796 - DNA, 15 bp, Homo sapiens
aagattttaaaaatt

SEQ ID NO: 1233797 - DNA, 15 bp, Homo sapiens
aaagattttaaaaat

SEQ ID NO: 1233798 - DNA, 15 bp, Homo sapiens
aaaagattttaaaaa

SEQ ID NO: 1233799 - DNA, 15 bp, Homo sapiens
aaaaagattttaaaa

SEQ ID NO: 1233800 - DNA, 15 bp, Homo sapiens
aaaaaagattttaaa

SEQ ID NO: 1233801 - DNA, 15 bp, Homo sapiens
caaaaaagattttaa

SEQ ID NO: 1233802 - DNA, 15 bp, Homo sapiens
acaaaaaagatttta

SEQ ID NO: 1233803 - DNA, 15 bp, Homo sapiens
tacaaaaaagatttt

SEQ ID NO: 1233804 - DNA, 15 bp, Homo sapiens
ctacaaaaaagattt

SEQ ID NO: 1233805 - DNA, 15 bp, Homo sapiens
tctacaaaaaagatt

SEQ ID NO: 1233806 - DNA, 15 bp, Homo sapiens
ctctacaaaaaagat

SEQ ID NO: 1233807 - DNA, 15 bp, Homo sapiens
tctctacaaaaaaga

SEQ ID NO: 1233808 - DNA, 15 bp, Homo sapiens
gtctctacaaaaaag

SEQ ID NO: 1233809 - DNA, 15 bp, Homo sapiens
gccctgtctctacaa

SEQ ID NO: 1233810 - DNA, 15 bp, Homo sapiens
agccctgtctctaca

SEQ ID NO: 1233811 - DNA, 15 bp, Homo sapiens
gagccctgtctctac

SEQ ID NO: 1233812 - DNA, 15 bp, Homo sapiens
agagccctgtctcta

SEQ ID NO: 1233813 - DNA, 15 bp, Homo sapiens
aagagccctgtctct

SEQ ID NO: 1233814 - DNA, 15 bp, Homo sapiens
caagagccctgtctc

SEQ ID NO: 1233815 - DNA, 15 bp, Homo sapiens
gcaagagccctgtct

SEQ ID NO: 1233816 - DNA, 15 bp, Homo sapiens
agcaagagccctgtc

SEQ ID NO: 1233817 - DNA, 15 bp, Homo sapiens
tagcaagagccctgt

SEQ ID NO: 1233818 - DNA, 15 bp, Homo sapiens
atagcaagagccctg

SEQ ID NO: 1233819 - DNA, 15 bp, Homo sapiens
catagcaagagccct

SEQ ID NO: 1233820 - DNA, 15 bp, Homo sapiens
acatagcaagagccc

SEQ ID NO: 1233821 - DNA, 15 bp, Homo sapiens
aacatagcaagagcc

SEQ ID NO: 1233822 - DNA, 15 bp, Homo sapiens
caacatagcaagagc

SEQ ID NO: 1233823 - DNA, 15 bp, Homo sapiens
gcaacatagcaagag

SEQ ID NO: 1233824 - DNA, 15 bp, Homo sapiens
tagcctgggcaacat

SEQ ID NO: 1233825 - DNA, 15 bp, Homo sapiens
attcaagactagcct

SEQ ID NO: 1233826 - DNA, 15 bp, Homo sapiens
aattcaagactagcc

SEQ ID NO: 1233827 - DNA, 15 bp, Homo sapiens
gaattcaagactagc

SEQ ID NO: 1233828 - DNA, 15 bp, Homo sapiens
ggaattcaagactag

SEQ ID NO: 1233829 - DNA, 15 bp, Homo sapiens
aggaattcaagacta

SEQ ID NO: 1233830 - DNA, 15 bp, Homo sapiens
caggaattcaagact

SEQ ID NO: 1233831 - DNA, 15 bp, Homo sapiens
gtcacttgagcccag

SEQ ID NO: 1233832 - DNA, 15 bp, Homo sapiens
ggtcacttgagccca

SEQ ID NO: 1233833 - DNA, 15 bp, Homo sapiens
gggtcacttgagccc

SEQ ID NO: 1233834 - DNA, 15 bp, Homo sapiens
agggtcacttgagcc

SEQ ID NO: 1233835 - DNA, 15 bp, Homo sapiens
gagggtcacttgagc

SEQ ID NO: 1233836 - DNA, 15 bp, Homo sapiens
agagggtcacttgag

SEQ ID NO: 1233837 - DNA, 15 bp, Homo sapiens
gagagggtcacttga

SEQ ID NO: 1233838 - DNA, 15 bp, Homo sapiens
cgagagggtcacttg

SEQ ID NO: 1233839 - DNA, 15 bp, Homo sapiens
gcgagagggtcactt

SEQ ID NO: 1233840 - DNA, 15 bp, Homo sapiens
ggcgagagggtcact

SEQ ID NO: 1233841 - DNA, 15 bp, Homo sapiens
aggcgagagggtcac

SEQ ID NO: 1233842 - DNA, 15 bp, Homo sapiens
caggcgagagggtca

SEQ ID NO: 1233843 - DNA, 15 bp, Homo sapiens
ccaggcgagagggtc

SEQ ID NO: 1233844 - DNA, 15 bp, Homo sapiens
cccaggcgagagggt

SEQ ID NO: 1233845 - DNA, 15 bp, Homo sapiens
gcccaggcgagaggg

SEQ ID NO: 1233846 - DNA, 15 bp, Homo sapiens
ggcccaggcgagagg

SEQ ID NO: 1233847 - DNA, 15 bp, Homo sapiens
aggcccaggcgagag

SEQ ID NO: 1233848 - DNA, 15 bp, Homo sapiens
gaggcccaggcgaga

SEQ ID NO: 1233849 - DNA, 15 bp, Homo sapiens
agaggcccaggcgag

SEQ ID NO: 1233850 - DNA, 15 bp, Homo sapiens
gagaggcccaggcga

SEQ ID NO: 1233851 - DNA, 15 bp, Homo sapiens
tgagaggcccaggcg

SEQ ID NO: 1233852 - DNA, 15 bp, Homo sapiens
ttgagaggcccaggc

SEQ ID NO: 1233853 - DNA, 15 bp, Homo sapiens
tttgagaggcccagg

SEQ ID NO: 1233854 - DNA, 15 bp, Homo sapiens
ctttgagaggcccag

SEQ ID NO: 1233855 - DNA, 15 bp, Homo sapiens
actttgagaggccca

SEQ ID NO: 1233856 - DNA, 15 bp, Homo sapiens
cactttgagaggccc

SEQ ID NO: 1233857 - DNA, 15 bp, Homo sapiens
gcttgtaatctcagc

SEQ ID NO: 1233858 - DNA, 15 bp, Homo sapiens
tgcttgtaatctcag

SEQ ID NO: 1233859 - DNA, 15 bp, Homo sapiens
atgcttgtaatctca

SEQ ID NO: 1233860 - DNA, 15 bp, Homo sapiens
catgcttgtaatctc

SEQ ID NO: 1233861 - DNA, 15 bp, Homo sapiens
tcatgcttgtaatct

SEQ ID NO: 1233862 - DNA, 15 bp, Homo sapiens
agtggctcatgcttg

SEQ ID NO: 1233863 - DNA, 15 bp, Homo sapiens
cagtggctcatgctt

SEQ ID NO: 1233864 - DNA, 15 bp, Homo sapiens
gcagtggctcatgct

SEQ ID NO: 1233865 - DNA, 15 bp, Homo sapiens
atgcagtggctcatg

SEQ ID NO: 1233866 - DNA, 15 bp, Homo sapiens
gatgcagtggctcat

SEQ ID NO: 1233867 - DNA, 15 bp, Homo sapiens
ggccagatgcagtgg

SEQ ID NO: 1233868 - DNA, 15 bp, Homo sapiens
aggccagatgcagtg

SEQ ID NO: 1233869 - DNA, 15 bp, Homo sapiens
gaggccagatgcagt

SEQ ID NO: 1233870 - DNA, 15 bp, Homo sapiens
cgaggccagatgcag

SEQ ID NO: 1233871 - DNA, 15 bp, Homo sapiens
ccgaggccagatgca

SEQ ID NO: 1233872 - DNA, 15 bp, Homo sapiens
accgaggccagatgc

SEQ ID NO: 1233873 - DNA, 15 bp, Homo sapiens
taccgaggccagatg

SEQ ID NO: 1233874 - DNA, 15 bp, Homo sapiens
ttaccgaggccagat

SEQ ID NO: 1233875 - DNA, 15 bp, Homo sapiens
attaccgaggccaga

SEQ ID NO: 1233876 - DNA, 15 bp, Homo sapiens
tattaccgaggccag

SEQ ID NO: 1233877 - DNA, 15 bp, Homo sapiens
ttattaccgaggcca

SEQ ID NO: 1233878 - DNA, 15 bp, Homo sapiens
attattaccgaggcc

SEQ ID NO: 1233879 - DNA, 15 bp, Homo sapiens
aattattaccgaggc

SEQ ID NO: 1233880 - DNA, 15 bp, Homo sapiens
aaattattaccgagg

SEQ ID NO: 1233881 - DNA, 15 bp, Homo sapiens
aaaattattaccgag

SEQ ID NO: 1233882 - DNA, 15 bp, Homo sapiens
aaaaattattaccga

SEQ ID NO: 1233883 - DNA, 15 bp, Homo sapiens
taaaaattattaccg

SEQ ID NO: 1233884 - DNA, 15 bp, Homo sapiens
ataaaaattattacc

SEQ ID NO: 1233885 - DNA, 15 bp, Homo sapiens
tataaaaattattac

SEQ ID NO: 1233886 - DNA, 15 bp, Homo sapiens
ctataaaaattatta

SEQ ID NO: 1233887 - DNA, 15 bp, Homo sapiens
tctataaaaattatt

SEQ ID NO: 1233888 - DNA, 15 bp, Homo sapiens
ttctataaaaattat

SEQ ID NO: 1233889 - DNA, 15 bp, Homo sapiens
cttctataaaaatta

SEQ ID NO: 1233890 - DNA, 15 bp, Homo sapiens
tcttctataaaaatt

SEQ ID NO: 1233891 - DNA, 15 bp, Homo sapiens
ttcttctataaaaat

SEQ ID NO: 1233892 - DNA, 15 bp, Homo sapiens
tttcttctataaaaa

SEQ ID NO: 1233893 - DNA, 15 bp, Homo sapiens
ttttcttctataaaa

SEQ ID NO: 1233894 - DNA, 15 bp, Homo sapiens
tttttcttctataaa

SEQ ID NO: 1233895 - DNA, 15 bp, Homo sapiens
ttttttcttctataa

SEQ ID NO: 1233896 - DNA, 15 bp, Homo sapiens
cttttttcttctata

SEQ ID NO: 1233897 - DNA, 15 bp, Homo sapiens
gcttttttcttctat

SEQ ID NO: 1233898 - DNA, 15 bp, Homo sapiens
agcttttttcttcta

SEQ ID NO: 1233899 - DNA, 15 bp, Homo sapiens
tagcttttttcttct

SEQ ID NO: 1233900 - DNA, 15 bp, Homo sapiens
ttagcttttttcttc

SEQ ID NO: 1233901 - DNA, 15 bp, Homo sapiens
tttagcttttttctt

SEQ ID NO: 1233902 - DNA, 15 bp, Homo sapiens
ttttagcttttttct

SEQ ID NO: 1233903 - DNA, 15 bp, Homo sapiens
cttttagcttttttc

SEQ ID NO: 1233904 - DNA, 15 bp, Homo sapiens
gcttttagctttttt

SEQ ID NO: 1233905 - DNA, 15 bp, Homo sapiens
agcttttagcttttt

SEQ ID NO: 1233906 - DNA, 15 bp, Homo sapiens
aagcttttagctttt

SEQ ID NO: 1233907 - DNA, 15 bp, Homo sapiens
taagcttttagcttt

SEQ ID NO: 1233908 - DNA, 15 bp, Homo sapiens
ttaagcttttagctt

SEQ ID NO: 1233909 - DNA, 15 bp, Homo sapiens
cttaagcttttagct

SEQ ID NO: 1233910 - DNA, 15 bp, Homo sapiens
gcttaagcttttagc

SEQ ID NO: 1233911 - DNA, 15 bp, Homo sapiens
tgcttaagcttttag

SEQ ID NO: 1233912 - DNA, 15 bp, Homo sapiens
ttgcttaagctttta

SEQ ID NO: 1233913 - DNA, 15 bp, Homo sapiens
gttgcttaagctttt

SEQ ID NO: 1233914 - DNA, 15 bp, Homo sapiens
tgttgcttaagcttt

SEQ ID NO: 1233915 - DNA, 15 bp, Homo sapiens
atgttgcttaagctt

SEQ ID NO: 1233916 - DNA, 15 bp, Homo sapiens
catgttgcttaagct

SEQ ID NO: 1233917 - DNA, 15 bp, Homo sapiens
gcatgttgcttaagc

SEQ ID NO: 1233918 - DNA, 15 bp, Homo sapiens
ggcatgttgcttaag

SEQ ID NO: 1233919 - DNA, 15 bp, Homo sapiens
tggcatgttgcttaa

SEQ ID NO: 1233920 - DNA, 15 bp, Homo sapiens
ttggcatgttgctta

SEQ ID NO: 1233921 - DNA, 15 bp, Homo sapiens
tttggcatgttgctt

SEQ ID NO: 1233922 - DNA, 15 bp, Homo sapiens
ctttggcatgttgct

SEQ ID NO: 1233923 - DNA, 15 bp, Homo sapiens
cctttggcatgttgc

SEQ ID NO: 1233924 - DNA, 15 bp, Homo sapiens
acctttggcatgttg

SEQ ID NO: 1233925 - DNA, 15 bp, Homo sapiens
cacctttggcatgtt

SEQ ID NO: 1233926 - DNA, 15 bp, Homo sapiens
ccacctttggcatgt

SEQ ID NO: 1233927 - DNA, 15 bp, Homo sapiens
accacctttggcatg

SEQ ID NO: 1233928 - DNA, 15 bp, Homo sapiens
taccacctttggcat

SEQ ID NO: 1233929 - DNA, 15 bp, Homo sapiens
gtaccacctttggca

SEQ ID NO: 1233930 - DNA, 15 bp, Homo sapiens
agtaccacctttggc

SEQ ID NO: 1233931 - DNA, 15 bp, Homo sapiens
cagtaccacctttgg

SEQ ID NO: 1233932 - DNA, 15 bp, Homo sapiens
ccagtaccacctttg

SEQ ID NO: 1233933 - DNA, 15 bp, Homo sapiens
accagtaccaccttt

SEQ ID NO: 1233934 - DNA, 15 bp, Homo sapiens
aaccagtaccacctt

SEQ ID NO: 1233935 - DNA, 15 bp, Homo sapiens
caaccagtaccacct

SEQ ID NO: 1233936 - DNA, 15 bp, Homo sapiens
acaaccagtaccacc

SEQ ID NO: 1233937 - DNA, 15 bp, Homo sapiens
tacaaccagtaccac

SEQ ID NO: 1233938 - DNA, 15 bp, Homo sapiens
atacaaccagtacca

SEQ ID NO: 1233939 - DNA, 15 bp, Homo sapiens
catacaaccagtacc

SEQ ID NO: 1233940 - DNA, 15 bp, Homo sapiens
acatacaaccagtac

SEQ ID NO: 1233941 - DNA, 15 bp, Homo sapiens
cacatacaaccagta

SEQ ID NO: 1233942 - DNA, 15 bp, Homo sapiens
ccacatacaaccagt

SEQ ID NO: 1233943 - DNA, 15 bp, Homo sapiens
accacatacaaccag

SEQ ID NO: 1233944 - DNA, 15 bp, Homo sapiens
taccacatacaacca

SEQ ID NO: 1233945 - DNA, 15 bp, Homo sapiens
ttaccacatacaacc

SEQ ID NO: 1233946 - DNA, 15 bp, Homo sapiens
tttaccacatacaac

SEQ ID NO: 1233947 - DNA, 15 bp, Homo sapiens
ttttaccacatacaa

SEQ ID NO: 1233948 - DNA, 15 bp, Homo sapiens
attttaccacataca

SEQ ID NO: 1233949 - DNA, 15 bp, Homo sapiens
gattttaccacatac

SEQ ID NO: 1233950 - DNA, 15 bp, Homo sapiens
agattttaccacata

SEQ ID NO: 1233951 - DNA, 15 bp, Homo sapiens
cagattttaccacat

SEQ ID NO: 1233952 - DNA, 15 bp, Homo sapiens
ccagattttaccaca

SEQ ID NO: 1233953 - DNA, 15 bp, Homo sapiens
tccagattttaccac

SEQ ID NO: 1233954 - DNA, 15 bp, Homo sapiens
atccagattttacca

SEQ ID NO: 1233955 - DNA, 15 bp, Homo sapiens
aatccagattttacc

SEQ ID NO: 1233956 - DNA, 15 bp, Homo sapiens
gaatccagattttac

SEQ ID NO: 1233957 - DNA, 15 bp, Homo sapiens
tgaatccagatttta

SEQ ID NO: 1233958 - DNA, 15 bp, Homo sapiens
ttgaatccagatttt

SEQ ID NO: 1233959 - DNA, 15 bp, Homo sapiens
cttgaatccagattt

SEQ ID NO: 1233960 - DNA, 15 bp, Homo sapiens
gcttgaatccagatt

SEQ ID NO: 1233961 - DNA, 15 bp, Homo sapiens
ggcttgaatccagat

SEQ ID NO: 1233962 - DNA, 15 bp, Homo sapiens
gggcttgaatccaga

SEQ ID NO: 1233963 - DNA, 15 bp, Homo sapiens
agggcttgaatccag

SEQ ID NO: 1233964 - DNA, 15 bp, Homo sapiens
aagggcttgaatcca

SEQ ID NO: 1233965 - DNA, 15 bp, Homo sapiens
taagggcttgaatcc

SEQ ID NO: 1233966 - DNA, 15 bp, Homo sapiens
ttaagggcttgaatc

SEQ ID NO: 1233967 - DNA, 15 bp, Homo sapiens
attaagggcttgaat

SEQ ID NO: 1233968 - DNA, 15 bp, Homo sapiens
aattaagggcttgaa

SEQ ID NO: 1233969 - DNA, 15 bp, Homo sapiens
caattaagggcttga

SEQ ID NO: 1233970 - DNA, 15 bp, Homo sapiens
gcaattaagggcttg

SEQ ID NO: 1233971 - DNA, 15 bp, Homo sapiens
agcaattaagggctt

SEQ ID NO: 1233972 - DNA, 15 bp, Homo sapiens
aagcaattaagggct

SEQ ID NO: 1233973 - DNA, 15 bp, Homo sapiens
caagcaattaagggc

SEQ ID NO: 1233974 - DNA, 15 bp, Homo sapiens
tcaagcaattaaggg

SEQ ID NO: 1233975 - DNA, 15 bp, Homo sapiens
gtcaagcaattaagg

SEQ ID NO: 1233976 - DNA, 15 bp, Homo sapiens
agtcaagcaattaag

SEQ ID NO: 1233977 - DNA, 15 bp, Homo sapiens
gagtcaagcaattaa

SEQ ID NO: 1233978 - DNA, 15 bp, Homo sapiens
ggagtcaagcaatta

SEQ ID NO: 1233979 - DNA, 15 bp, Homo sapiens
tggagtcaagcaatt

SEQ ID NO: 1233980 - DNA, 15 bp, Homo sapiens
ttggagtcaagcaat

SEQ ID NO: 1233981 - DNA, 15 bp, Homo sapiens
tttggagtcaagcaa

SEQ ID NO: 1233982 - DNA, 15 bp, Homo sapiens
ctttggagtcaagca

SEQ ID NO: 1233983 - DNA, 15 bp, Homo sapiens
gctttggagtcaagc

SEQ ID NO: 1233984 - DNA, 15 bp, Homo sapiens
ggctttggagtcaag

SEQ ID NO: 1233985 - DNA, 15 bp, Homo sapiens
gggctttggagtcaa

SEQ ID NO: 1233986 - DNA, 15 bp, Homo sapiens
ggggctttggagtca

SEQ ID NO: 1233987 - DNA, 15 bp, Homo sapiens
tggggctttggagtc

SEQ ID NO: 1233988 - DNA, 15 bp, Homo sapiens
ctggggctttggagt

SEQ ID NO: 1233989 - DNA, 15 bp, Homo sapiens
tctggggctttggag

SEQ ID NO: 1233990 - DNA, 15 bp, Homo sapiens
atctggggctttgga

SEQ ID NO: 1233991 - DNA, 15 bp, Homo sapiens
catctggggctttgg

SEQ ID NO: 1233992 - DNA, 15 bp, Homo sapiens
acatctggggctttg

SEQ ID NO: 1233993 - DNA, 15 bp, Homo sapiens
aacatctggggcttt

SEQ ID NO: 1233994 - DNA, 15 bp, Homo sapiens
caacatctggggctt

SEQ ID NO: 1233995 - DNA, 15 bp, Homo sapiens
gcaacatctggggct

SEQ ID NO: 1233996 - DNA, 15 bp, Homo sapiens
agcaacatctggggc

SEQ ID NO: 1233997 - DNA, 15 bp, Homo sapiens
gagcaacatctgggg

SEQ ID NO: 1233998 - DNA, 15 bp, Homo sapiens
agagcaacatctggg

SEQ ID NO: 1233999 - DNA, 15 bp, Homo sapiens
gagagcaacatctgg

SEQ ID NO: 1234000 - DNA, 15 bp, Homo sapiens
agagagcaacatctg

SEQ ID NO: 1234001 - DNA, 15 bp, Homo sapiens
cagagagcaacatct

SEQ ID NO: 1234002 - DNA, 15 bp, Homo sapiens
acagagagcaacatc

SEQ ID NO: 1234003 - DNA, 15 bp, Homo sapiens
aacagagagcaacat

SEQ ID NO: 1234004 - DNA, 15 bp, Homo sapiens
caacagagagcaaca

SEQ ID NO: 1234005 - DNA, 15 bp, Homo sapiens
gcaacagagagcaac

SEQ ID NO: 1234006 - DNA, 15 bp, Homo sapiens
tgcaacagagagcaa

SEQ ID NO: 1234007 - DNA, 15 bp, Homo sapiens
atgcaacagagagca

SEQ ID NO: 1234008 - DNA, 15 bp, Homo sapiens
aatgcaacagagagc

SEQ ID NO: 1234009 - DNA, 15 bp, Homo sapiens
taatgcaacagagag

SEQ ID NO: 1234010 - DNA, 15 bp, Homo sapiens
ataatgcaacagaga

SEQ ID NO: 1234011 - DNA, 15 bp, Homo sapiens
cataatgcaacagag

SEQ ID NO: 1234012 - DNA, 15 bp, Homo sapiens
acataatgcaacaga

SEQ ID NO: 1234013 - DNA, 15 bp, Homo sapiens
aacataatgcaacag

SEQ ID NO: 1234014 - DNA, 15 bp, Homo sapiens
taacataatgcaaca

SEQ ID NO: 1234015 - DNA, 15 bp, Homo sapiens
ataacataatgcaac

SEQ ID NO: 1234016 - DNA, 15 bp, Homo sapiens
tataacataatgcaa

SEQ ID NO: 1234017 - DNA, 15 bp, Homo sapiens
atataacataatgca

SEQ ID NO: 1234018 - DNA, 15 bp, Homo sapiens
tatataacataatgc

SEQ ID NO: 1234019 - DNA, 15 bp, Homo sapiens
ctatataacataatg

SEQ ID NO: 1234020 - DNA, 15 bp, Homo sapiens
gctatataacataat

SEQ ID NO: 1234021 - DNA, 15 bp, Homo sapiens
agctatataacataa

SEQ ID NO: 1234022 - DNA, 15 bp, Homo sapiens
aagctatataacata

SEQ ID NO: 1234023 - DNA, 15 bp, Homo sapiens
aaagctatataacat

SEQ ID NO: 1234024 - DNA, 15 bp, Homo sapiens
caaagctatataaca

SEQ ID NO: 1234025 - DNA, 15 bp, Homo sapiens
gcaaagctatataac

SEQ ID NO: 1234026 - DNA, 15 bp, Homo sapiens
tgcaaagctatataa

SEQ ID NO: 1234027 - DNA, 15 bp, Homo sapiens
ttgcaaagctatata

SEQ ID NO: 1234028 - DNA, 15 bp, Homo sapiens
attgcaaagctatat

SEQ ID NO: 1234029 - DNA, 15 bp, Homo sapiens
tattgcaaagctata

SEQ ID NO: 1234030 - DNA, 15 bp, Homo sapiens
ttattgcaaagctat

SEQ ID NO: 1234031 - DNA, 15 bp, Homo sapiens
gttattgcaaagcta

SEQ ID NO: 1234032 - DNA, 15 bp, Homo sapiens
ggttattgcaaagct

SEQ ID NO: 1234033 - DNA, 15 bp, Homo sapiens
gggttattgcaaagc

SEQ ID NO: 1234034 - DNA, 15 bp, Homo sapiens
ggggttattgcaaag

SEQ ID NO: 1234035 - DNA, 15 bp, Homo sapiens
tggggttattgcaaa

SEQ ID NO: 1234036 - DNA, 15 bp, Homo sapiens
ctggggttattgcaa

SEQ ID NO: 1234037 - DNA, 15 bp, Homo sapiens
tctggggttattgca

SEQ ID NO: 1234038 - DNA, 15 bp, Homo sapiens
ttctggggttattgc

SEQ ID NO: 1234039 - DNA, 15 bp, Homo sapiens
tttctggggttattg

SEQ ID NO: 1234040 - DNA, 15 bp, Homo sapiens
ctttctggggttatt

SEQ ID NO: 1234041 - DNA, 15 bp, Homo sapiens
actttctggggttat

SEQ ID NO: 1234042 - DNA, 15 bp, Homo sapiens
aactttctggggtta

SEQ ID NO: 1234043 - DNA, 15 bp, Homo sapiens
taactttctggggtt

SEQ ID NO: 1234044 - DNA, 15 bp, Homo sapiens
gtaactttctggggt

SEQ ID NO: 1234045 - DNA, 15 bp, Homo sapiens
tgtaactttctgggg

SEQ ID NO: 1234046 - DNA, 15 bp, Homo sapiens
atgtaactttctggg

SEQ ID NO: 1234047 - DNA, 15 bp, Homo sapiens
tatgtaactttctgg

SEQ ID NO: 1234048 - DNA, 15 bp, Homo sapiens
ctatgtaactttctg

SEQ ID NO: 1234049 - DNA, 15 bp, Homo sapiens
actatgtaactttct

SEQ ID NO: 1234050 - DNA, 15 bp, Homo sapiens
aactatgtaactttc

SEQ ID NO: 1234051 - DNA, 15 bp, Homo sapiens
aaactatgtaacttt

SEQ ID NO: 1234052 - DNA, 15 bp, Homo sapiens
tcaaactatgtaact

SEQ ID NO: 1234053 - DNA, 15 bp, Homo sapiens
atcaaactatgtaac

SEQ ID NO: 1234054 - DNA, 15 bp, Homo sapiens
catcaaactatgtaa

SEQ ID NO: 1234055 - DNA, 15 bp, Homo sapiens
acatcaaactatgta

SEQ ID NO: 1234056 - DNA, 15 bp, Homo sapiens
cacatcaaactatgt

SEQ ID NO: 1234057 - DNA, 15 bp, Homo sapiens
ccacatcaaactatg

SEQ ID NO: 1234058 - DNA, 15 bp, Homo sapiens
tccacatcaaactat

SEQ ID NO: 1234059 - DNA, 15 bp, Homo sapiens
ttccacatcaaacta

SEQ ID NO: 1234060 - DNA, 15 bp, Homo sapiens
attccacatcaaact

SEQ ID NO: 1234061 - DNA, 15 bp, Homo sapiens
cattccacatcaaac

SEQ ID NO: 1234062 - DNA, 15 bp, Homo sapiens
tcattccacatcaaa

SEQ ID NO: 1234063 - DNA, 15 bp, Homo sapiens
ttcattccacatcaa

SEQ ID NO: 1234064 - DNA, 15 bp, Homo sapiens
gttcattccacatca

SEQ ID NO: 1234065 - DNA, 15 bp, Homo sapiens
agttcattccacatc

SEQ ID NO: 1234066 - DNA, 15 bp, Homo sapiens
gagttcattccacat

SEQ ID NO: 1234067 - DNA, 15 bp, Homo sapiens
ggagttcattccaca

SEQ ID NO: 1234068 - DNA, 15 bp, Homo sapiens
gggagttcattccac

SEQ ID NO: 1234069 - DNA, 15 bp, Homo sapiens
ggggagttcattcca

SEQ ID NO: 1234070 - DNA, 15 bp, Homo sapiens
aggggagttcattcc

SEQ ID NO: 1234071 - DNA, 15 bp, Homo sapiens
gaggggagttcattc

SEQ ID NO: 1234072 - DNA, 15 bp, Homo sapiens
agaggggagttcatt

SEQ ID NO: 1234073 - DNA, 15 bp, Homo sapiens
aagaggggagttcat

SEQ ID NO: 1234074 - DNA, 15 bp, Homo sapiens
gaagaggggagttca

SEQ ID NO: 1234075 - DNA, 15 bp, Homo sapiens
ggaagaggggagttc

SEQ ID NO: 1234076 - DNA, 15 bp, Homo sapiens
aggaagaggggagtt

SEQ ID NO: 1234077 - DNA, 15 bp, Homo sapiens
aaggaagaggggagt

SEQ ID NO: 1234078 - DNA, 15 bp, Homo sapiens
gaaggaagaggggag

SEQ ID NO: 1234079 - DNA, 15 bp, Homo sapiens
cgaaggaagagggga

SEQ ID NO: 1234080 - DNA, 15 bp, Homo sapiens
tcgaaggaagagggg

SEQ ID NO: 1234081 - DNA, 15 bp, Homo sapiens
ctcgaaggaagaggg

SEQ ID NO: 1234082 - DNA, 15 bp, Homo sapiens
actcgaaggaagagg

SEQ ID NO: 1234083 - DNA, 15 bp, Homo sapiens
gactcgaaggaagag

SEQ ID NO: 1234084 - DNA, 15 bp, Homo sapiens
agactcgaaggaaga

SEQ ID NO: 1234085 - DNA, 15 bp, Homo sapiens
cagactcgaaggaag

SEQ ID NO: 1234086 - DNA, 15 bp, Homo sapiens
tcagactcgaaggaa

SEQ ID NO: 1234087 - DNA, 15 bp, Homo sapiens
atcagactcgaagga

SEQ ID NO: 1234088 - DNA, 15 bp, Homo sapiens
catcagactcgaagg

SEQ ID NO: 1234089 - DNA, 15 bp, Homo sapiens
acatcagactcgaag

SEQ ID NO: 1234090 - DNA, 15 bp, Homo sapiens
gacatcagactcgaa

SEQ ID NO: 1234091 - DNA, 15 bp, Homo sapiens
agacatcagactcga

SEQ ID NO: 1234092 - DNA, 15 bp, Homo sapiens
aagacatcagactcg

SEQ ID NO: 1234093 - DNA, 15 bp, Homo sapiens
taagacatcagactc

SEQ ID NO: 1234094 - DNA, 15 bp, Homo sapiens
ataagacatcagact

SEQ ID NO: 1234095 - DNA, 15 bp, Homo sapiens
gataagacatcagac

SEQ ID NO: 1234096 - DNA, 15 bp, Homo sapiens
tgataagacatcaga

SEQ ID NO: 1234097 - DNA, 15 bp, Homo sapiens
ctgataagacatcag

SEQ ID NO: 1234098 - DNA, 15 bp, Homo sapiens
tctgataagacatca

SEQ ID NO: 1234099 - DNA, 15 bp, Homo sapiens
gtctgataagacatc

SEQ ID NO: 1234100 - DNA, 15 bp, Homo sapiens
tgtctgataagacat

SEQ ID NO: 1234101 - DNA, 15 bp, Homo sapiens
gtgtctgataagaca

SEQ ID NO: 1234102 - DNA, 15 bp, Homo sapiens
ggtgtctgataagac

SEQ ID NO: 1234103 - DNA, 15 bp, Homo sapiens
tggtgtctgataaga

SEQ ID NO: 1234104 - DNA, 15 bp, Homo sapiens
atggtgtctgataag

SEQ ID NO: 1234105 - DNA, 15 bp, Homo sapiens
tatggtgtctgataa

SEQ ID NO: 1234106 - DNA, 15 bp, Homo sapiens
atatggtgtctgata

SEQ ID NO: 1234107 - DNA, 15 bp, Homo sapiens
catatggtgtctgat

SEQ ID NO: 1234108 - DNA, 15 bp, Homo sapiens
acatatggtgtctga

SEQ ID NO: 1234109 - DNA, 15 bp, Homo sapiens
cacatatggtgtctg

SEQ ID NO: 1234110 - DNA, 15 bp, Homo sapiens
tcacatatggtgtct

SEQ ID NO: 1234111 - DNA, 15 bp, Homo sapiens
ctcacatatggtgtc

SEQ ID NO: 1234112 - DNA, 15 bp, Homo sapiens
tctcacatatggtgt

SEQ ID NO: 1234113 - DNA, 15 bp, Homo sapiens
ttctcacatatggtg

SEQ ID NO: 1234114 - DNA, 15 bp, Homo sapiens
gttctcacatatggt

SEQ ID NO: 1234115 - DNA, 15 bp, Homo sapiens
agttctcacatatgg

SEQ ID NO: 1234116 - DNA, 15 bp, Homo sapiens
aagttctcacatatg

SEQ ID NO: 1234117 - DNA, 15 bp, Homo sapiens
caagttctcacatat

SEQ ID NO: 1234118 - DNA, 15 bp, Homo sapiens
ccaagttctcacata

SEQ ID NO: 1234119 - DNA, 15 bp, Homo sapiens
cccaagttctcacat

SEQ ID NO: 1234120 - DNA, 15 bp, Homo sapiens
tcccaagttctcaca

SEQ ID NO: 1234121 - DNA, 15 bp, Homo sapiens
ctcccaagttctcac

SEQ ID NO: 1234122 - DNA, 15 bp, Homo sapiens
actcccaagttctca

SEQ ID NO: 1234123 - DNA, 15 bp, Homo sapiens
cactcccaagttctc

SEQ ID NO: 1234124 - DNA, 15 bp, Homo sapiens
tcactcccaagttct

SEQ ID NO: 1234125 - DNA, 15 bp, Homo sapiens
ttcactcccaagttc

SEQ ID NO: 1234126 - DNA, 15 bp, Homo sapiens
gttcactcccaagtt

SEQ ID NO: 1234127 - DNA, 15 bp, Homo sapiens
agttcactcccaagt

SEQ ID NO: 1234128 - DNA, 15 bp, Homo sapiens
gagttcactcccaag

SEQ ID NO: 1234129 - DNA, 15 bp, Homo sapiens
tgagttcactcccaa

SEQ ID NO: 1234130 - DNA, 15 bp, Homo sapiens
ttgagttcactccca

SEQ ID NO: 1234131 - DNA, 15 bp, Homo sapiens
cttgagttcactccc

SEQ ID NO: 1234132 - DNA, 15 bp, Homo sapiens
gcttgagttcactcc

SEQ ID NO: 1234133 - DNA, 15 bp, Homo sapiens
agcttgagttcactc

SEQ ID NO: 1234134 - DNA, 15 bp, Homo sapiens
aagcttgagttcact

SEQ ID NO: 1234135 - DNA, 15 bp, Homo sapiens
gaagcttgagttcac

SEQ ID NO: 1234136 - DNA, 15 bp, Homo sapiens
ggaagcttgagttca

SEQ ID NO: 1234137 - DNA, 15 bp, Homo sapiens
gggaagcttgagttc

SEQ ID NO: 1234138 - DNA, 15 bp, Homo sapiens
agggaagcttgagtt

SEQ ID NO: 1234139 - DNA, 15 bp, Homo sapiens
gagggaagcttgagt

SEQ ID NO: 1234140 - DNA, 15 bp, Homo sapiens
tgagggaagcttgag

SEQ ID NO: 1234141 - DNA, 15 bp, Homo sapiens
ttgagggaagcttga

SEQ ID NO: 1234142 - DNA, 15 bp, Homo sapiens
cttgagggaagcttg

SEQ ID NO: 1234143 - DNA, 15 bp, Homo sapiens
tcttgagggaagctt

SEQ ID NO: 1234144 - DNA, 15 bp, Homo sapiens
ttcttgagggaagct

SEQ ID NO: 1234145 - DNA, 15 bp, Homo sapiens
attcttgagggaagc

SEQ ID NO: 1234146 - DNA, 15 bp, Homo sapiens
cattcttgagggaag

SEQ ID NO: 1234147 - DNA, 15 bp, Homo sapiens
acattcttgagggaa

SEQ ID NO: 1234148 - DNA, 15 bp, Homo sapiens
aacattcttgaggga

SEQ ID NO: 1234149 - DNA, 15 bp, Homo sapiens
taacattcttgaggg

SEQ ID NO: 1234150 - DNA, 15 bp, Homo sapiens
ttaacattcttgagg

SEQ ID NO: 1234151 - DNA, 15 bp, Homo sapiens
gttaacattcttgag

SEQ ID NO: 1234152 - DNA, 15 bp, Homo sapiens
tgttaacattcttga

SEQ ID NO: 1234153 - DNA, 15 bp, Homo sapiens
atgttaacattcttg

SEQ ID NO: 1234154 - DNA, 15 bp, Homo sapiens
gatgttaacattctt

SEQ ID NO: 1234155 - DNA, 15 bp, Homo sapiens
tgatgttaacattct

SEQ ID NO: 1234156 - DNA, 15 bp, Homo sapiens
ttgatgttaacattc

SEQ ID NO: 1234157 - DNA, 15 bp, Homo sapiens
tttgatgttaacatt

SEQ ID NO: 1234158 - DNA, 15 bp, Homo sapiens
atttgatgttaacat

SEQ ID NO: 1234159 - DNA, 15 bp, Homo sapiens
aatttgatgttaaca

SEQ ID NO: 1234160 - DNA, 15 bp, Homo sapiens
gaatttgatgttaac

SEQ ID NO: 1234161 - DNA, 15 bp, Homo sapiens
cgaatttgatgttaa

SEQ ID NO: 1234162 - DNA, 15 bp, Homo sapiens
tcgaatttgatgtta

SEQ ID NO: 1234163 - DNA, 15 bp, Homo sapiens
atcgaatttgatgtt

SEQ ID NO: 1234164 - DNA, 15 bp, Homo sapiens
gatcgaatttgatgt

SEQ ID NO: 1234165 - DNA, 15 bp, Homo sapiens
tgatcgaatttgatg

SEQ ID NO: 1234166 - DNA, 15 bp, Homo sapiens
ctgatcgaatttgat

SEQ ID NO: 1234167 - DNA, 15 bp, Homo sapiens
tctgatcgaatttga

SEQ ID NO: 1234168 - DNA, 15 bp, Homo sapiens
atctgatcgaatttg

SEQ ID NO: 1234169 - DNA, 15 bp, Homo sapiens
gatctgatcgaattt

SEQ ID NO: 1234170 - DNA, 15 bp, Homo sapiens
ggatctgatcgaatt

SEQ ID NO: 1234171 - DNA, 15 bp, Homo sapiens
tggatctgatcgaat

SEQ ID NO: 1234172 - DNA, 15 bp, Homo sapiens
ttggatctgatcgaa

SEQ ID NO: 1234173 - DNA, 15 bp, Homo sapiens
gttggatctgatcga

SEQ ID NO: 1234174 - DNA, 15 bp, Homo sapiens
ggttggatctgatcg

SEQ ID NO: 1234175 - DNA, 15 bp, Homo sapiens
gggttggatctgatc

SEQ ID NO: 1234176 - DNA, 15 bp, Homo sapiens
ggggttggatctgat

SEQ ID NO: 1234177 - DNA, 15 bp, Homo sapiens
tggggttggatctga

SEQ ID NO: 1234178 - DNA, 15 bp, Homo sapiens
ttggggttggatctg

SEQ ID NO: 1234179 - DNA, 15 bp, Homo sapiens
tttggggttggatct

SEQ ID NO: 1234180 - DNA, 15 bp, Homo sapiens
ctttggggttggatc

SEQ ID NO: 1234181 - DNA, 15 bp, Homo sapiens
cctttggggttggat

SEQ ID NO: 1234182 - DNA, 15 bp, Homo sapiens
acctttggggttgga

SEQ ID NO: 1234183 - DNA, 15 bp, Homo sapiens
cacctttggggttgg

SEQ ID NO: 1234184 - DNA, 15 bp, Homo sapiens
ccacctttggggttg

SEQ ID NO: 1234185 - DNA, 15 bp, Homo sapiens
cccacctttggggtt

SEQ ID NO: 1234186 - DNA, 15 bp, Homo sapiens
acccacctttggggt

SEQ ID NO: 1234187 - DNA, 15 bp, Homo sapiens
cacccacctttgggg

SEQ ID NO: 1234188 - DNA, 15 bp, Homo sapiens
acacccacctttggg

SEQ ID NO: 1234189 - DNA, 15 bp, Homo sapiens
aacacccacctttgg

SEQ ID NO: 1234190 - DNA, 15 bp, Homo sapiens
aaacacccacctttg

SEQ ID NO: 1234191 - DNA, 15 bp, Homo sapiens
aaaacacccaccttt

SEQ ID NO: 1234192 - DNA, 15 bp, Homo sapiens
caaaacacccacctt

SEQ ID NO: 1234193 - DNA, 15 bp, Homo sapiens
tcaaaacacccacct

SEQ ID NO: 1234194 - DNA, 15 bp, Homo sapiens
gtcaaaacacccacc

SEQ ID NO: 1234195 - DNA, 15 bp, Homo sapiens
ggtcaaaacacccac

SEQ ID NO: 1234196 - DNA, 15 bp, Homo sapiens
aggtcaaaacaccca

SEQ ID NO: 1234197 - DNA, 15 bp, Homo sapiens
gaggtcaaaacaccc

SEQ ID NO: 1234198 - DNA, 15 bp, Homo sapiens
tgaggtcaaaacacc

SEQ ID NO: 1234199 - DNA, 15 bp, Homo sapiens
ttgaggtcaaaacac

SEQ ID NO: 1234200 - DNA, 15 bp, Homo sapiens
gttgaggtcaaaaca

SEQ ID NO: 1234201 - DNA, 15 bp, Homo sapiens
agttgaggtcaaaac

SEQ ID NO: 1234202 - DNA, 15 bp, Homo sapiens
tagttgaggtcaaaa

SEQ ID NO: 1234203 - DNA, 15 bp, Homo sapiens
gtagttgaggtcaaa

SEQ ID NO: 1234204 - DNA, 15 bp, Homo sapiens
agtagttgaggtcaa

SEQ ID NO: 1234205 - DNA, 15 bp, Homo sapiens
cagtagttgaggtca

SEQ ID NO: 1234206 - DNA, 15 bp, Homo sapiens
tcagtagttgaggtc

SEQ ID NO: 1234207 - DNA, 15 bp, Homo sapiens
ttcagtagttgaggt

SEQ ID NO: 1234208 - DNA, 15 bp, Homo sapiens
gttcagtagttgagg

SEQ ID NO: 1234209 - DNA, 15 bp, Homo sapiens
agttcagtagttgag

SEQ ID NO: 1234210 - DNA, 15 bp, Homo sapiens
aagttcagtagttga

SEQ ID NO: 1234211 - DNA, 15 bp, Homo sapiens
gaagttcagtagttg

SEQ ID NO: 1234212 - DNA, 15 bp, Homo sapiens
tgaagttcagtagtt

SEQ ID NO: 1234213 - DNA, 15 bp, Homo sapiens
ttgaagttcagtagt

SEQ ID NO: 1234214 - DNA, 15 bp, Homo sapiens
tttgaagttcagtag

SEQ ID NO: 1234215 - DNA, 15 bp, Homo sapiens
ttttgaagttcagta

SEQ ID NO: 1234216 - DNA, 15 bp, Homo sapiens
tttttgaagttcagt

SEQ ID NO: 1234217 - DNA, 15 bp, Homo sapiens
atttttgaagttcag

SEQ ID NO: 1234218 - DNA, 15 bp, Homo sapiens
tatttttgaagttca

SEQ ID NO: 1234219 - DNA, 15 bp, Homo sapiens
gtatttttgaagttc

SEQ ID NO: 1234220 - DNA, 15 bp, Homo sapiens
tgtatttttgaagtt

SEQ ID NO: 1234221 - DNA, 15 bp, Homo sapiens
atgtatttttgaagt

SEQ ID NO: 1234222 - DNA, 15 bp, Homo sapiens
tatgtatttttgaag

SEQ ID NO: 1234223 - DNA, 15 bp, Homo sapiens
atatgtatttttgaa

SEQ ID NO: 1234224 - DNA, 15 bp, Homo sapiens
tatatgtatttttga

SEQ ID NO: 1234225 - DNA, 15 bp, Homo sapiens
ttatatgtatttttg

SEQ ID NO: 1234226 - DNA, 15 bp, Homo sapiens
tttatatgtattttt

SEQ ID NO: 1234227 - DNA, 15 bp, Homo sapiens
gtttatatgtatttt

SEQ ID NO: 1234228 - DNA, 15 bp, Homo sapiens
agtttatatgtattt

SEQ ID NO: 1234229 - DNA, 15 bp, Homo sapiens
gagtttatatgtatt

SEQ ID NO: 1234230 - DNA, 15 bp, Homo sapiens
tgagtttatatgtat

SEQ ID NO: 1234231 - DNA, 15 bp, Homo sapiens
ttgagtttatatgta

SEQ ID NO: 1234232 - DNA, 15 bp, Homo sapiens
cttgagtttatatgt

SEQ ID NO: 1234233 - DNA, 15 bp, Homo sapiens
tcttgagtttatatg

SEQ ID NO: 1234234 - DNA, 15 bp, Homo sapiens
ctcttgagtttatat

SEQ ID NO: 1234235 - DNA, 15 bp, Homo sapiens
actcttgagtttata

SEQ ID NO: 1234236 - DNA, 15 bp, Homo sapiens
aactcttgagtttat

SEQ ID NO: 1234237 - DNA, 15 bp, Homo sapiens
aaactcttgagttta

SEQ ID NO: 1234238 - DNA, 15 bp, Homo sapiens
caaactcttgagttt

SEQ ID NO: 1234239 - DNA, 15 bp, Homo sapiens
tcaaactcttgagtt

SEQ ID NO: 1234240 - DNA, 15 bp, Homo sapiens
gtcaaactcttgagt

SEQ ID NO: 1234241 - DNA, 15 bp, Homo sapiens
tgtcaaactcttgag

SEQ ID NO: 1234242 - DNA, 15 bp, Homo sapiens
ctgtcaaactcttga

SEQ ID NO: 1234243 - DNA, 15 bp, Homo sapiens
tctgtcaaactcttg

SEQ ID NO: 1234244 - DNA, 15 bp, Homo sapiens
gtctgtcaaactctt

SEQ ID NO: 1234245 - DNA, 15 bp, Homo sapiens
tgtctgtcaaactct

SEQ ID NO: 1234246 - DNA, 15 bp, Homo sapiens
gtgtctgtcaaactc

SEQ ID NO: 1234247 - DNA, 15 bp, Homo sapiens
agtgtctgtcaaact

SEQ ID NO: 1234248 - DNA, 15 bp, Homo sapiens
aagtgtctgtcaaac

SEQ ID NO: 1234249 - DNA, 15 bp, Homo sapiens
aaagtgtctgtcaaa

SEQ ID NO: 1234250 - DNA, 15 bp, Homo sapiens
caaagtgtctgtcaa

SEQ ID NO: 1234251 - DNA, 15 bp, Homo sapiens
tcaaagtgtctgtca

SEQ ID NO: 1234252 - DNA, 15 bp, Homo sapiens
ctcaaagtgtctgtc

SEQ ID NO: 1234253 - DNA, 15 bp, Homo sapiens
tctcaaagtgtctgt

SEQ ID NO: 1234254 - DNA, 15 bp, Homo sapiens
ctctcaaagtgtctg

SEQ ID NO: 1234255 - DNA, 15 bp, Homo sapiens
gctctcaaagtgtct

SEQ ID NO: 1234256 - DNA, 15 bp, Homo sapiens
agctctcaaagtgtc

SEQ ID NO: 1234257 - DNA, 15 bp, Homo sapiens
aagctctcaaagtgt

SEQ ID NO: 1234258 - DNA, 15 bp, Homo sapiens
taagctctcaaagtg

SEQ ID NO: 1234259 - DNA, 15 bp, Homo sapiens
ctaagctctcaaagt

SEQ ID NO: 1234260 - DNA, 15 bp, Homo sapiens
cctaagctctcaaag

SEQ ID NO: 1234261 - DNA, 15 bp, Homo sapiens
gcctaagctctcaaa

SEQ ID NO: 1234262 - DNA, 15 bp, Homo sapiens
tgcctaagctctcaa

SEQ ID NO: 1234263 - DNA, 15 bp, Homo sapiens
ctgcctaagctctca

SEQ ID NO: 1234264 - DNA, 15 bp, Homo sapiens
actgcctaagctctc

SEQ ID NO: 1234265 - DNA, 15 bp, Homo sapiens
tactgcctaagctct

SEQ ID NO: 1234266 - DNA, 15 bp, Homo sapiens
ctactgcctaagctc

SEQ ID NO: 1234267 - DNA, 15 bp, Homo sapiens
gctactgcctaagct

SEQ ID NO: 1234268 - DNA, 15 bp, Homo sapiens
tgctactgcctaagc

SEQ ID NO: 1234269 - DNA, 15 bp, Homo sapiens
ctgctactgcctaag

SEQ ID NO: 1234270 - DNA, 15 bp, Homo sapiens
cctgctactgcctaa

SEQ ID NO: 1234271 - DNA, 15 bp, Homo sapiens
ccctgctactgccta

SEQ ID NO: 1234272 - DNA, 15 bp, Homo sapiens
accctgctactgcct

SEQ ID NO: 1234273 - DNA, 15 bp, Homo sapiens
aaccctgctactgcc

SEQ ID NO: 1234274 - DNA, 15 bp, Homo sapiens
taaccctgctactgc

SEQ ID NO: 1234275 - DNA, 15 bp, Homo sapiens
ttaaccctgctactg

SEQ ID NO: 1234276 - DNA, 15 bp, Homo sapiens
tttaaccctgctact

SEQ ID NO: 1234277 - DNA, 15 bp, Homo sapiens
gtttaaccctgctac

SEQ ID NO: 1234278 - DNA, 15 bp, Homo sapiens
agtttaaccctgcta

SEQ ID NO: 1234279 - DNA, 15 bp, Homo sapiens
aagtttaaccctgct

SEQ ID NO: 1234280 - DNA, 15 bp, Homo sapiens
aaagtttaaccctgc

SEQ ID NO: 1234281 - DNA, 15 bp, Homo sapiens
caaagtttaaccctg

SEQ ID NO: 1234282 - DNA, 15 bp, Homo sapiens
acaaagtttaaccct

SEQ ID NO: 1234283 - DNA, 15 bp, Homo sapiens
aacaaagtttaaccc

SEQ ID NO: 1234284 - DNA, 15 bp, Homo sapiens
caacaaagtttaacc

SEQ ID NO: 1234285 - DNA, 15 bp, Homo sapiens
tcaacaaagtttaac

SEQ ID NO: 1234286 - DNA, 15 bp, Homo sapiens
atcaacaaagtttaa

SEQ ID NO: 1234287 - DNA, 15 bp, Homo sapiens
gatcaacaaagttta

SEQ ID NO: 1234288 - DNA, 15 bp, Homo sapiens
cgatcaacaaagttt

SEQ ID NO: 1234289 - DNA, 15 bp, Homo sapiens
acgatcaacaaagtt

SEQ ID NO: 1234290 - DNA, 15 bp, Homo sapiens
aacgatcaacaaagt

SEQ ID NO: 1234291 - DNA, 15 bp, Homo sapiens
aaacgatcaacaaag

SEQ ID NO: 1234292 - DNA, 15 bp, Homo sapiens
gaaacgatcaacaaa

SEQ ID NO: 1234293 - DNA, 15 bp, Homo sapiens
agaaacgatcaacaa

SEQ ID NO: 1234294 - DNA, 15 bp, Homo sapiens
gagaaacgatcaaca

SEQ ID NO: 1234295 - DNA, 15 bp, Homo sapiens
tgagaaacgatcaac

SEQ ID NO: 1234296 - DNA, 15 bp, Homo sapiens
ctgagaaacgatcaa

SEQ ID NO: 1234297 - DNA, 15 bp, Homo sapiens
tctgagaaacgatca

SEQ ID NO: 1234298 - DNA, 15 bp, Homo sapiens
ttctgagaaacgatc

SEQ ID NO: 1234299 - DNA, 15 bp, Homo sapiens
tttctgagaaacgat

SEQ ID NO: 1234300 - DNA, 15 bp, Homo sapiens
ttttctgagaaacga

SEQ ID NO: 1234301 - DNA, 15 bp, Homo sapiens
attttctgagaaacg

SEQ ID NO: 1234302 - DNA, 15 bp, Homo sapiens
gattttctgagaaac

SEQ ID NO: 1234303 - DNA, 15 bp, Homo sapiens
tgattttctgagaaa

SEQ ID NO: 1234304 - DNA, 15 bp, Homo sapiens
ttgattttctgagaa

SEQ ID NO: 1234305 - DNA, 15 bp, Homo sapiens
cttgattttctgaga

SEQ ID NO: 1234306 - DNA, 15 bp, Homo sapiens
tcttgattttctgag

SEQ ID NO: 1234307 - DNA, 15 bp, Homo sapiens
ctcttgattttctga

SEQ ID NO: 1234308 - DNA, 15 bp, Homo sapiens
actcttgattttctg

SEQ ID NO: 1234309 - DNA, 15 bp, Homo sapiens
cactcttgattttct

SEQ ID NO: 1234310 - DNA, 15 bp, Homo sapiens
gcactcttgattttc

SEQ ID NO: 1234311 - DNA, 15 bp, Homo sapiens
tgcactcttgatttt

SEQ ID NO: 1234312 - DNA, 15 bp, Homo sapiens
atgcactcttgattt

SEQ ID NO: 1234313 - DNA, 15 bp, Homo sapiens
catgcactcttgatt

SEQ ID NO: 1234314 - DNA, 15 bp, Homo sapiens
gcatgcactcttgat

SEQ ID NO: 1234315 - DNA, 15 bp, Homo sapiens
agcatgcactcttga

SEQ ID NO: 1234316 - DNA, 15 bp, Homo sapiens
tagcatgcactcttg

SEQ ID NO: 1234317 - DNA, 15 bp, Homo sapiens
atagcatgcactctt

SEQ ID NO: 1234318 - DNA, 15 bp, Homo sapiens
tatagcatgcactct

SEQ ID NO: 1234319 - DNA, 15 bp, Homo sapiens
ctatagcatgcactc

SEQ ID NO: 1234320 - DNA, 15 bp, Homo sapiens
cctatagcatgcact

SEQ ID NO: 1234321 - DNA, 15 bp, Homo sapiens
gcctatagcatgcac

SEQ ID NO: 1234322 - DNA, 15 bp, Homo sapiens
cgcctatagcatgca

SEQ ID NO: 1234323 - DNA, 15 bp, Homo sapiens
ccgcctatagcatgc

SEQ ID NO: 1234324 - DNA, 15 bp, Homo sapiens
cccgcctatagcatg

SEQ ID NO: 1234325 - DNA, 15 bp, Homo sapiens
ccccgcctatagcat

SEQ ID NO: 1234326 - DNA, 15 bp, Homo sapiens
accccgcctatagca

SEQ ID NO: 1234327 - DNA, 15 bp, Homo sapiens
caccccgcctatagc

SEQ ID NO: 1234328 - DNA, 15 bp, Homo sapiens
acaccccgcctatag

SEQ ID NO: 1234329 - DNA, 15 bp, Homo sapiens
cacaccccgcctata

SEQ ID NO: 1234330 - DNA, 15 bp, Homo sapiens
ccacaccccgcctat

SEQ ID NO: 1234331 - DNA, 15 bp, Homo sapiens
gccacaccccgccta

SEQ ID NO: 1234332 - DNA, 15 bp, Homo sapiens
tgccacaccccgcct

SEQ ID NO: 1234333 - DNA, 15 bp, Homo sapiens
ctgccacaccccgcc

SEQ ID NO: 1234334 - DNA, 15 bp, Homo sapiens
gctgccacaccccgc

SEQ ID NO: 1234335 - DNA, 15 bp, Homo sapiens
agctgccacaccccg

SEQ ID NO: 1234336 - DNA, 15 bp, Homo sapiens
gagctgccacacccc

SEQ ID NO: 1234337 - DNA, 15 bp, Homo sapiens
cgagctgccacaccc

SEQ ID NO: 1234338 - DNA, 15 bp, Homo sapiens
gcgagctgccacacc

SEQ ID NO: 1234339 - DNA, 15 bp, Homo sapiens
tgcgagctgccacac

SEQ ID NO: 1234340 - DNA, 15 bp, Homo sapiens
gtgcgagctgccaca

SEQ ID NO: 1234341 - DNA, 15 bp, Homo sapiens
ggtgcgagctgccac

SEQ ID NO: 1234342 - DNA, 15 bp, Homo sapiens
aggtgcgagctgcca

SEQ ID NO: 1234343 - DNA, 15 bp, Homo sapiens
caggtgcgagctgcc

SEQ ID NO: 1234344 - DNA, 15 bp, Homo sapiens
acaggtgcgagctgc

SEQ ID NO: 1234345 - DNA, 15 bp, Homo sapiens
tacaggtgcgagctg

SEQ ID NO: 1234346 - DNA, 15 bp, Homo sapiens
ttacaggtgcgagct

SEQ ID NO: 1234347 - DNA, 15 bp, Homo sapiens
ttcccaaagtgttgg

SEQ ID NO: 1234348 - DNA, 15 bp, Homo sapiens
cttcccaaagtgttg

SEQ ID NO: 1234349 - DNA, 15 bp, Homo sapiens
gcttcccaaagtgtt

SEQ ID NO: 1234350 - DNA, 15 bp, Homo sapiens
agcttcccaaagtgt

SEQ ID NO: 1234351 - DNA, 15 bp, Homo sapiens
tctcagcttcccaaa

SEQ ID NO: 1234352 - DNA, 15 bp, Homo sapiens
cctgtctcagcttcc

SEQ ID NO: 1234353 - DNA, 15 bp, Homo sapiens
acctgtctcagcttc

SEQ ID NO: 1234354 - DNA, 15 bp, Homo sapiens
cacctgtctcagctt

SEQ ID NO: 1234355 - DNA, 15 bp, Homo sapiens
ccacctgtctcagct

SEQ ID NO: 1234356 - DNA, 15 bp, Homo sapiens
tccacctgtctcagc

SEQ ID NO: 1234357 - DNA, 15 bp, Homo sapiens
atccacctgtctcag

SEQ ID NO: 1234358 - DNA, 15 bp, Homo sapiens
aatccacctgtctca

SEQ ID NO: 1234359 - DNA, 15 bp, Homo sapiens
caatccacctgtctc

SEQ ID NO: 1234360 - DNA, 15 bp, Homo sapiens
gcaatccacctgtct

SEQ ID NO: 1234361 - DNA, 15 bp, Homo sapiens
agcaatccacctgtc

SEQ ID NO: 1234362 - DNA, 15 bp, Homo sapiens
aagcaatccacctgt

SEQ ID NO: 1234363 - DNA, 15 bp, Homo sapiens
caagcaatccacctg

SEQ ID NO: 1234364 - DNA, 15 bp, Homo sapiens
tcaagcaatccacct

SEQ ID NO: 1234365 - DNA, 15 bp, Homo sapiens
ctcaagcaatccacc

SEQ ID NO: 1234366 - DNA, 15 bp, Homo sapiens
gctcaagcaatccac

SEQ ID NO: 1234367 - DNA, 15 bp, Homo sapiens
ggctcaagcaatcca

SEQ ID NO: 1234368 - DNA, 15 bp, Homo sapiens
ctgcccaggctggtc

SEQ ID NO: 1234369 - DNA, 15 bp, Homo sapiens
gctgcccaggctggt

SEQ ID NO: 1234370 - DNA, 15 bp, Homo sapiens
atgctgcccaggctg

SEQ ID NO: 1234371 - DNA, 15 bp, Homo sapiens
tatgctgcccaggct

SEQ ID NO: 1234372 - DNA, 15 bp, Homo sapiens
ctatgctgcccaggc

SEQ ID NO: 1234373 - DNA, 15 bp, Homo sapiens
actatgctgcccagg

SEQ ID NO: 1234374 - DNA, 15 bp, Homo sapiens
cactatgctgcccag

SEQ ID NO: 1234375 - DNA, 15 bp, Homo sapiens
tcactatgctgccca

SEQ ID NO: 1234376 - DNA, 15 bp, Homo sapiens
ctcactatgctgccc

SEQ ID NO: 1234377 - DNA, 15 bp, Homo sapiens
tctcactatgctgcc

SEQ ID NO: 1234378 - DNA, 15 bp, Homo sapiens
gtctcactatgctgc

SEQ ID NO: 1234379 - DNA, 15 bp, Homo sapiens
ggtctcactatgctg

SEQ ID NO: 1234380 - DNA, 15 bp, Homo sapiens
gggtctcactatgct

SEQ ID NO: 1234381 - DNA, 15 bp, Homo sapiens
ggggtctcactatgc

SEQ ID NO: 1234382 - DNA, 15 bp, Homo sapiens
ctggggtctcactat

SEQ ID NO: 1234383 - DNA, 15 bp, Homo sapiens
gctggggtctcacta

SEQ ID NO: 1234384 - DNA, 15 bp, Homo sapiens
agctggggtctcact

SEQ ID NO: 1234385 - DNA, 15 bp, Homo sapiens
gagctggggtctcac

SEQ ID NO: 1234386 - DNA, 15 bp, Homo sapiens
agagctggggtctca

SEQ ID NO: 1234387 - DNA, 15 bp, Homo sapiens
tagagctggggtctc

SEQ ID NO: 1234388 - DNA, 15 bp, Homo sapiens
ctagagctggggtct

SEQ ID NO: 1234389 - DNA, 15 bp, Homo sapiens
tctagagctggggtc

SEQ ID NO: 1234390 - DNA, 15 bp, Homo sapiens
ttctagagctggggt

SEQ ID NO: 1234391 - DNA, 15 bp, Homo sapiens
tttctagagctgggg

SEQ ID NO: 1234392 - DNA, 15 bp, Homo sapiens
ttttctagagctggg

SEQ ID NO: 1234393 - DNA, 15 bp, Homo sapiens
tttttctagagctgg

SEQ ID NO: 1234394 - DNA, 15 bp, Homo sapiens
ttttttctagagctg

SEQ ID NO: 1234395 - DNA, 15 bp, Homo sapiens
attttttctagagct

SEQ ID NO: 1234396 - DNA, 15 bp, Homo sapiens
tattttttctagagc

SEQ ID NO: 1234397 - DNA, 15 bp, Homo sapiens
gtattttttctagag

SEQ ID NO: 1234398 - DNA, 15 bp, Homo sapiens
tgtattttttctaga

SEQ ID NO: 1234399 - DNA, 15 bp, Homo sapiens
ttgtattttttctag

SEQ ID NO: 1234400 - DNA, 15 bp, Homo sapiens
tttgtattttttcta

SEQ ID NO: 1234401 - DNA, 15 bp, Homo sapiens
ttttgtattttttct

SEQ ID NO: 1234402 - DNA, 15 bp, Homo sapiens
tttttgtattttttc

SEQ ID NO: 1234403 - DNA, 15 bp, Homo sapiens
tttttttttgtattt

SEQ ID NO: 1234404 - DNA, 15 bp, Homo sapiens
ggctacttttttttt

SEQ ID NO: 1234405 - DNA, 15 bp, Homo sapiens
tggctactttttttt

SEQ ID NO: 1234406 - DNA, 15 bp, Homo sapiens
ctggctacttttttt

SEQ ID NO: 1234407 - DNA, 15 bp, Homo sapiens
actggctactttttt

SEQ ID NO: 1234408 - DNA, 15 bp, Homo sapiens
aactggctacttttt

SEQ ID NO: 1234409 - DNA, 15 bp, Homo sapiens
taactggctactttt

SEQ ID NO: 1234410 - DNA, 15 bp, Homo sapiens
ataactggctacttt

SEQ ID NO: 1234411 - DNA, 15 bp, Homo sapiens
cataactggctactt

SEQ ID NO: 1234412 - DNA, 15 bp, Homo sapiens
gcataactggctact

SEQ ID NO: 1234413 - DNA, 15 bp, Homo sapiens
agcataactggctac

SEQ ID NO: 1234414 - DNA, 15 bp, Homo sapiens
gagcataactggcta

SEQ ID NO: 1234415 - DNA, 15 bp, Homo sapiens
cgagcataactggct

SEQ ID NO: 1234416 - DNA, 15 bp, Homo sapiens
acgagcataactggc

SEQ ID NO: 1234417 - DNA, 15 bp, Homo sapiens
cacgagcataactgg

SEQ ID NO: 1234418 - DNA, 15 bp, Homo sapiens
gcacgagcataactg

SEQ ID NO: 1234419 - DNA, 15 bp, Homo sapiens
tgcacgagcataact

SEQ ID NO: 1234420 - DNA, 15 bp, Homo sapiens
gtgcacgagcataac

SEQ ID NO: 1234421 - DNA, 15 bp, Homo sapiens
tgtgcacgagcataa

SEQ ID NO: 1234422 - DNA, 15 bp, Homo sapiens
gtgtgcacgagcata

SEQ ID NO: 1234423 - DNA, 15 bp, Homo sapiens
caggtgtgcacgagc

SEQ ID NO: 1234424 - DNA, 15 bp, Homo sapiens
acaggtgtgcacgag

SEQ ID NO: 1234425 - DNA, 15 bp, Homo sapiens
tacaggtgtgcacga

SEQ ID NO: 1234426 - DNA, 15 bp, Homo sapiens
ctacaggtgtgcacg

SEQ ID NO: 1234427 - DNA, 15 bp, Homo sapiens
aactacaggtgtgca

SEQ ID NO: 1234428 - DNA, 15 bp, Homo sapiens
gaactacaggtgtgc

SEQ ID NO: 1234429 - DNA, 15 bp, Homo sapiens
agaactacaggtgtg

SEQ ID NO: 1234430 - DNA, 15 bp, Homo sapiens
tagaactacaggtgt

SEQ ID NO: 1234431 - DNA, 15 bp, Homo sapiens
ctagaactacaggtg

SEQ ID NO: 1234432 - DNA, 15 bp, Homo sapiens
gctagaactacaggt

SEQ ID NO: 1234433 - DNA, 15 bp, Homo sapiens
agctagaactacagg

SEQ ID NO: 1234434 - DNA, 15 bp, Homo sapiens
tagctagaactacag

SEQ ID NO: 1234435 - DNA, 15 bp, Homo sapiens
gtagctagaactaca

SEQ ID NO: 1234436 - DNA, 15 bp, Homo sapiens
agtagctagaactac

SEQ ID NO: 1234437 - DNA, 15 bp, Homo sapiens
aagtagctagaacta

SEQ ID NO: 1234438 - DNA, 15 bp, Homo sapiens
aaagtagctagaact

SEQ ID NO: 1234439 - DNA, 15 bp, Homo sapiens
caaagtagctagaac

SEQ ID NO: 1234440 - DNA, 15 bp, Homo sapiens
ccaaagtagctagaa

SEQ ID NO: 1234441 - DNA, 15 bp, Homo sapiens
tccaaagtagctaga

SEQ ID NO: 1234442 - DNA, 15 bp, Homo sapiens
ctccaaagtagctag

SEQ ID NO: 1234443 - DNA, 15 bp, Homo sapiens
cctccaaagtagcta

SEQ ID NO: 1234444 - DNA, 15 bp, Homo sapiens
gcctccaaagtagct

SEQ ID NO: 1234445 - DNA, 15 bp, Homo sapiens
agcctccaaagtagc

SEQ ID NO: 1234446 - DNA, 15 bp, Homo sapiens
cagcctccaaagtag

SEQ ID NO: 1234447 - DNA, 15 bp, Homo sapiens
tcagcctccaaagta

SEQ ID NO: 1234448 - DNA, 15 bp, Homo sapiens
ctcagcctccaaagt

SEQ ID NO: 1234449 - DNA, 15 bp, Homo sapiens
cctcagcctccaaag

SEQ ID NO: 1234450 - DNA, 15 bp, Homo sapiens
gcctcagcctccaaa

SEQ ID NO: 1234451 - DNA, 15 bp, Homo sapiens
tgcctcagcctccaa

SEQ ID NO: 1234452 - DNA, 15 bp, Homo sapiens
accctgcctcagcct

SEQ ID NO: 1234453 - DNA, 15 bp, Homo sapiens
caccctgcctcagcc

SEQ ID NO: 1234454 - DNA, 15 bp, Homo sapiens
tcaccctgcctcagc

SEQ ID NO: 1234455 - DNA, 15 bp, Homo sapiens
atcaccctgcctcag

SEQ ID NO: 1234456 - DNA, 15 bp, Homo sapiens
gatcaccctgcctca

SEQ ID NO: 1234457 - DNA, 15 bp, Homo sapiens
ggatcaccctgcctc

SEQ ID NO: 1234458 - DNA, 15 bp, Homo sapiens
gggatcaccctgcct

SEQ ID NO: 1234459 - DNA, 15 bp, Homo sapiens
agggatcaccctgcc

SEQ ID NO: 1234460 - DNA, 15 bp, Homo sapiens
aagggatcaccctgc

SEQ ID NO: 1234461 - DNA, 15 bp, Homo sapiens
caagggatcaccctg

SEQ ID NO: 1234462 - DNA, 15 bp, Homo sapiens
tcaagggatcaccct

SEQ ID NO: 1234463 - DNA, 15 bp, Homo sapiens
ctcaagggatcaccc

SEQ ID NO: 1234464 - DNA, 15 bp, Homo sapiens
gctcaagggatcacc

SEQ ID NO: 1234465 - DNA, 15 bp, Homo sapiens
ggctcaagggatcac

SEQ ID NO: 1234466 - DNA, 15 bp, Homo sapiens
gggctcaagggatca

SEQ ID NO: 1234467 - DNA, 15 bp, Homo sapiens
atgggctcaagggat

SEQ ID NO: 1234468 - DNA, 15 bp, Homo sapiens
catgggctcaaggga

SEQ ID NO: 1234469 - DNA, 15 bp, Homo sapiens
tcatgggctcaaggg

SEQ ID NO: 1234470 - DNA, 15 bp, Homo sapiens
atcatgggctcaagg

SEQ ID NO: 1234471 - DNA, 15 bp, Homo sapiens
aatcatgggctcaag

SEQ ID NO: 1234472 - DNA, 15 bp, Homo sapiens
aaatcatgggctcaa

SEQ ID NO: 1234473 - DNA, 15 bp, Homo sapiens
aaaatcatgggctca

SEQ ID NO: 1234474 - DNA, 15 bp, Homo sapiens
caaaatcatgggctc

SEQ ID NO: 1234475 - DNA, 15 bp, Homo sapiens
tcaaaatcatgggct

SEQ ID NO: 1234476 - DNA, 15 bp, Homo sapiens
ctcaaaatcatgggc

SEQ ID NO: 1234477 - DNA, 15 bp, Homo sapiens
tctcaaaatcatggg

SEQ ID NO: 1234478 - DNA, 15 bp, Homo sapiens
gtctcaaaatcatgg

SEQ ID NO: 1234479 - DNA, 15 bp, Homo sapiens
agtctcaaaatcatg

SEQ ID NO: 1234480 - DNA, 15 bp, Homo sapiens
cagtctcaaaatcat

SEQ ID NO: 1234481 - DNA, 15 bp, Homo sapiens
gcagtctcaaaatca

SEQ ID NO: 1234482 - DNA, 15 bp, Homo sapiens
tgcagtctcaaaatc

SEQ ID NO: 1234483 - DNA, 15 bp, Homo sapiens
ctgcagtctcaaaat

SEQ ID NO: 1234484 - DNA, 15 bp, Homo sapiens
actgcagtctcaaaa

SEQ ID NO: 1234485 - DNA, 15 bp, Homo sapiens
aggctcactgcagtc

SEQ ID NO: 1234486 - DNA, 15 bp, Homo sapiens
caggctcactgcagt

SEQ ID NO: 1234487 - DNA, 15 bp, Homo sapiens
acaggctcactgcag

SEQ ID NO: 1234488 - DNA, 15 bp, Homo sapiens
cacaggctcactgca

SEQ ID NO: 1234489 - DNA, 15 bp, Homo sapiens
acacaggctcactgc

SEQ ID NO: 1234490 - DNA, 15 bp, Homo sapiens
cacacaggctcactg

SEQ ID NO: 1234491 - DNA, 15 bp, Homo sapiens
tcacacaggctcact

SEQ ID NO: 1234492 - DNA, 15 bp, Homo sapiens
gtcacacaggctcac

SEQ ID NO: 1234493 - DNA, 15 bp, Homo sapiens
tgtcacacaggctca

SEQ ID NO: 1234494 - DNA, 15 bp, Homo sapiens
ctgtcacacaggctc

SEQ ID NO: 1234495 - DNA, 15 bp, Homo sapiens
tctgtcacacaggct

SEQ ID NO: 1234496 - DNA, 15 bp, Homo sapiens
atctgtcacacaggc

SEQ ID NO: 1234497 - DNA, 15 bp, Homo sapiens
catctgtcacacagg

SEQ ID NO: 1234498 - DNA, 15 bp, Homo sapiens
tcatctgtcacacag

SEQ ID NO: 1234499 - DNA, 15 bp, Homo sapiens
ttcatctgtcacaca

SEQ ID NO: 1234500 - DNA, 15 bp, Homo sapiens
cttcatctgtcacac

SEQ ID NO: 1234501 - DNA, 15 bp, Homo sapiens
tcttcatctgtcaca

SEQ ID NO: 1234502 - DNA, 15 bp, Homo sapiens
gtcttcatctgtcac

SEQ ID NO: 1234503 - DNA, 15 bp, Homo sapiens
agtcttcatctgtca

SEQ ID NO: 1234504 - DNA, 15 bp, Homo sapiens
gagtcttcatctgtc

SEQ ID NO: 1234505 - DNA, 15 bp, Homo sapiens
agagtcttcatctgt

SEQ ID NO: 1234506 - DNA, 15 bp, Homo sapiens
aagagtcttcatctg

SEQ ID NO: 1234507 - DNA, 15 bp, Homo sapiens
caagagtcttcatct

SEQ ID NO: 1234508 - DNA, 15 bp, Homo sapiens
acaagagtcttcatc

SEQ ID NO: 1234509 - DNA, 15 bp, Homo sapiens
aacaagagtcttcat

SEQ ID NO: 1234510 - DNA, 15 bp, Homo sapiens
aaacaagagtcttca

SEQ ID NO: 1234511 - DNA, 15 bp, Homo sapiens
caaacaagagtcttc

SEQ ID NO: 1234512 - DNA, 15 bp, Homo sapiens
acaaacaagagtctt

SEQ ID NO: 1234513 - DNA, 15 bp, Homo sapiens
aacaaacaagagtct

SEQ ID NO: 1234514 - DNA, 15 bp, Homo sapiens
aaacaaacaagagtc

SEQ ID NO: 1234515 - DNA, 15 bp, Homo sapiens
caaacaaacaagagt

SEQ ID NO: 1234516 - DNA, 15 bp, Homo sapiens
acaaacaaacaagag

SEQ ID NO: 1234517 - DNA, 15 bp, Homo sapiens
aacaaacaaacaaga

SEQ ID NO: 1234518 - DNA, 15 bp, Homo sapiens
aaacaaacaaacaag

SEQ ID NO: 1234519 - DNA, 15 bp, Homo sapiens
gaacaaaaaacaaac

SEQ ID NO: 1234520 - DNA, 15 bp, Homo sapiens
agaacaaaaaacaaa

SEQ ID NO: 1234521 - DNA, 15 bp, Homo sapiens
aagaacaaaaaacaa

SEQ ID NO: 1234522 - DNA, 15 bp, Homo sapiens
aaagaacaaaaaaca

SEQ ID NO: 1234523 - DNA, 15 bp, Homo sapiens
aaaagaacaaaaaac

SEQ ID NO: 1234524 - DNA, 15 bp, Homo sapiens
caaaagaacaaaaaa

SEQ ID NO: 1234525 - DNA, 15 bp, Homo sapiens
acaaaagaacaaaaa

SEQ ID NO: 1234526 - DNA, 15 bp, Homo sapiens
aacaaaagaacaaaa

SEQ ID NO: 1234527 - DNA, 15 bp, Homo sapiens
aaacaaaagaacaaa

SEQ ID NO: 1234528 - DNA, 15 bp, Homo sapiens
aaaacaaaagaacaa

SEQ ID NO: 1234529 - DNA, 15 bp, Homo sapiens
aaaaacaaaagaaca

SEQ ID NO: 1234530 - DNA, 15 bp, Homo sapiens
caaaaacaaaagaac

SEQ ID NO: 1234531 - DNA, 15 bp, Homo sapiens
agaaaacaaaaacaa

SEQ ID NO: 1234532 - DNA, 15 bp, Homo sapiens
aagaaaacaaaaaca

SEQ ID NO: 1234533 - DNA, 15 bp, Homo sapiens
taagaaaacaaaaac

SEQ ID NO: 1234534 - DNA, 15 bp, Homo sapiens
ttaagaaaacaaaaa

SEQ ID NO: 1234535 - DNA, 15 bp, Homo sapiens
attaagaaaacaaaa

SEQ ID NO: 1234536 - DNA, 15 bp, Homo sapiens
cattaagaaaacaaa

SEQ ID NO: 1234537 - DNA, 15 bp, Homo sapiens
tcattaagaaaacaa

SEQ ID NO: 1234538 - DNA, 15 bp, Homo sapiens
ctcattaagaaaaca

SEQ ID NO: 1234539 - DNA, 15 bp, Homo sapiens
actcattaagaaaac

SEQ ID NO: 1234540 - DNA, 15 bp, Homo sapiens
cactcattaagaaaa

SEQ ID NO: 1234541 - DNA, 15 bp, Homo sapiens
acactcattaagaaa

SEQ ID NO: 1234542 - DNA, 15 bp, Homo sapiens
cacactcattaagaa

SEQ ID NO: 1234543 - DNA, 15 bp, Homo sapiens
gcacactcattaaga

SEQ ID NO: 1234544 - DNA, 15 bp, Homo sapiens
agcacactcattaag

SEQ ID NO: 1234545 - DNA, 15 bp, Homo sapiens
gagcacactcattaa

SEQ ID NO: 1234546 - DNA, 15 bp, Homo sapiens
agagcacactcatta

SEQ ID NO: 1234547 - DNA, 15 bp, Homo sapiens
gagagcacactcatt

SEQ ID NO: 1234548 - DNA, 15 bp, Homo sapiens
agagagcacactcat

SEQ ID NO: 1234549 - DNA, 15 bp, Homo sapiens
tagagagcacactca

SEQ ID NO: 1234550 - DNA, 15 bp, Homo sapiens
ttagagagcacactc

SEQ ID NO: 1234551 - DNA, 15 bp, Homo sapiens
attagagagcacact

SEQ ID NO: 1234552 - DNA, 15 bp, Homo sapiens
tattagagagcacac

SEQ ID NO: 1234553 - DNA, 15 bp, Homo sapiens
atattagagagcaca

SEQ ID NO: 1234554 - DNA, 15 bp, Homo sapiens
catattagagagcac

SEQ ID NO: 1234555 - DNA, 15 bp, Homo sapiens
gcatattagagagca

SEQ ID NO: 1234556 - DNA, 15 bp, Homo sapiens
agcatattagagagc

SEQ ID NO: 1234557 - DNA, 15 bp, Homo sapiens
cagcatattagagag

SEQ ID NO: 1234558 - DNA, 15 bp, Homo sapiens
gcagcatattagaga

SEQ ID NO: 1234559 - DNA, 15 bp, Homo sapiens
tgcagcatattagag

SEQ ID NO: 1234560 - DNA, 15 bp, Homo sapiens
gtgcagcatattaga

SEQ ID NO: 1234561 - DNA, 15 bp, Homo sapiens
agtgcagcatattag

SEQ ID NO: 1234562 - DNA, 15 bp, Homo sapiens
gagtgcagcatatta

SEQ ID NO: 1234563 - DNA, 15 bp, Homo sapiens
agagtgcagcatatt

SEQ ID NO: 1234564 - DNA, 15 bp, Homo sapiens
cagagtgcagcatat

SEQ ID NO: 1234565 - DNA, 15 bp, Homo sapiens
gcagagtgcagcata

SEQ ID NO: 1234566 - DNA, 15 bp, Homo sapiens
tgcagagtgcagcat

SEQ ID NO: 1234567 - DNA, 15 bp, Homo sapiens
gtgcagagtgcagca

SEQ ID NO: 1234568 - DNA, 15 bp, Homo sapiens
agtgcagagtgcagc

SEQ ID NO: 1234569 - DNA, 15 bp, Homo sapiens
gagtgcagagtgcag

SEQ ID NO: 1234570 - DNA, 15 bp, Homo sapiens
tgagtgcagagtgca

SEQ ID NO: 1234571 - DNA, 15 bp, Homo sapiens
ttgagtgcagagtgc

SEQ ID NO: 1234572 - DNA, 15 bp, Homo sapiens
cttgagtgcagagtg

SEQ ID NO: 1234573 - DNA, 15 bp, Homo sapiens
gcttgagtgcagagt

SEQ ID NO: 1234574 - DNA, 15 bp, Homo sapiens
ggcttgagtgcagag

SEQ ID NO: 1234575 - DNA, 15 bp, Homo sapiens
gggcttgagtgcaga

SEQ ID NO: 1234576 - DNA, 15 bp, Homo sapiens
agggcttgagtgcag

SEQ ID NO: 1234577 - DNA, 15 bp, Homo sapiens
gagggcttgagtgca

SEQ ID NO: 1234578 - DNA, 15 bp, Homo sapiens
agagggcttgagtgc

SEQ ID NO: 1234579 - DNA, 15 bp, Homo sapiens
aagagggcttgagtg

SEQ ID NO: 1234580 - DNA, 15 bp, Homo sapiens
gaagagggcttgagt

SEQ ID NO: 1234581 - DNA, 15 bp, Homo sapiens
agaagagggcttgag

SEQ ID NO: 1234582 - DNA, 15 bp, Homo sapiens
tagaagagggcttga

SEQ ID NO: 1234583 - DNA, 15 bp, Homo sapiens
ctagaagagggcttg

SEQ ID NO: 1234584 - DNA, 15 bp, Homo sapiens
gctagaagagggctt

SEQ ID NO: 1234585 - DNA, 15 bp, Homo sapiens
agctagaagagggct

SEQ ID NO: 1234586 - DNA, 15 bp, Homo sapiens
aagctagaagagggc

SEQ ID NO: 1234587 - DNA, 15 bp, Homo sapiens
gaagctagaagaggg

SEQ ID NO: 1234588 - DNA, 15 bp, Homo sapiens
agaagctagaagagg

SEQ ID NO: 1234589 - DNA, 15 bp, Homo sapiens
cagaagctagaagag

SEQ ID NO: 1234590 - DNA, 15 bp, Homo sapiens
tcagaagctagaaga

SEQ ID NO: 1234591 - DNA, 15 bp, Homo sapiens
ctcagaagctagaag

SEQ ID NO: 1234592 - DNA, 15 bp, Homo sapiens
tctcagaagctagaa

SEQ ID NO: 1234593 - DNA, 15 bp, Homo sapiens
ctctcagaagctaga

SEQ ID NO: 1234594 - DNA, 15 bp, Homo sapiens
gctctcagaagctag

SEQ ID NO: 1234595 - DNA, 15 bp, Homo sapiens
agctctcagaagcta

SEQ ID NO: 1234596 - DNA, 15 bp, Homo sapiens
gagctctcagaagct

SEQ ID NO: 1234597 - DNA, 15 bp, Homo sapiens
tgagctctcagaagc

SEQ ID NO: 1234598 - DNA, 15 bp, Homo sapiens
ctgagctctcagaag

SEQ ID NO: 1234599 - DNA, 15 bp, Homo sapiens
cctgagctctcagaa

SEQ ID NO: 1234600 - DNA, 15 bp, Homo sapiens
gcctgagctctcaga

SEQ ID NO: 1234601 - DNA, 15 bp, Homo sapiens
agcctgagctctcag

SEQ ID NO: 1234602 - DNA, 15 bp, Homo sapiens
tagcctgagctctca

SEQ ID NO: 1234603 - DNA, 15 bp, Homo sapiens
gtagcctgagctctc

SEQ ID NO: 1234604 - DNA, 15 bp, Homo sapiens
tgtagcctgagctct

SEQ ID NO: 1234605 - DNA, 15 bp, Homo sapiens
ttgtagcctgagctc

SEQ ID NO: 1234606 - DNA, 15 bp, Homo sapiens
attgtagcctgagct

SEQ ID NO: 1234607 - DNA, 15 bp, Homo sapiens
tattgtagcctgagc

SEQ ID NO: 1234608 - DNA, 15 bp, Homo sapiens
ctattgtagcctgag

SEQ ID NO: 1234609 - DNA, 15 bp, Homo sapiens
cctattgtagcctga

SEQ ID NO: 1234610 - DNA, 15 bp, Homo sapiens
tcctattgtagcctg

SEQ ID NO: 1234611 - DNA, 15 bp, Homo sapiens
ttcctattgtagcct

SEQ ID NO: 1234612 - DNA, 15 bp, Homo sapiens
cttcctattgtagcc

SEQ ID NO: 1234613 - DNA, 15 bp, Homo sapiens
tcttcctattgtagc

SEQ ID NO: 1234614 - DNA, 15 bp, Homo sapiens
atcttcctattgtag

SEQ ID NO: 1234615 - DNA, 15 bp, Homo sapiens
tatcttcctattgta

SEQ ID NO: 1234616 - DNA, 15 bp, Homo sapiens
gtatcttcctattgt

SEQ ID NO: 1234617 - DNA, 15 bp, Homo sapiens
agtatcttcctattg

SEQ ID NO: 1234618 - DNA, 15 bp, Homo sapiens
gagtatcttcctatt

SEQ ID NO: 1234619 - DNA, 15 bp, Homo sapiens
agagtatcttcctat

SEQ ID NO: 1234620 - DNA, 15 bp, Homo sapiens
cagagtatcttccta

SEQ ID NO: 1234621 - DNA, 15 bp, Homo sapiens
acagagtatcttcct

SEQ ID NO: 1234622 - DNA, 15 bp, Homo sapiens
aacagagtatcttcc

SEQ ID NO: 1234623 - DNA, 15 bp, Homo sapiens
taacagagtatcttc

SEQ ID NO: 1234624 - DNA, 15 bp, Homo sapiens
ctaacagagtatctt

SEQ ID NO: 1234625 - DNA, 15 bp, Homo sapiens
gctaacagagtatct

SEQ ID NO: 1234626 - DNA, 15 bp, Homo sapiens
ggctaacagagtatc

SEQ ID NO: 1234627 - DNA, 15 bp, Homo sapiens
aggctaacagagtat

SEQ ID NO: 1234628 - DNA, 15 bp, Homo sapiens
aaggctaacagagta

SEQ ID NO: 1234629 - DNA, 15 bp, Homo sapiens
caaggctaacagagt

SEQ ID NO: 1234630 - DNA, 15 bp, Homo sapiens
tcaaggctaacagag

SEQ ID NO: 1234631 - DNA, 15 bp, Homo sapiens
ttcaaggctaacaga

SEQ ID NO: 1234632 - DNA, 15 bp, Homo sapiens
cttcaaggctaacag

SEQ ID NO: 1234633 - DNA, 15 bp, Homo sapiens
gcttcaaggctaaca

SEQ ID NO: 1234634 - DNA, 15 bp, Homo sapiens
agcttcaaggctaac

SEQ ID NO: 1234635 - DNA, 15 bp, Homo sapiens
tagcttcaaggctaa

SEQ ID NO: 1234636 - DNA, 15 bp, Homo sapiens
ttagcttcaaggcta

SEQ ID NO: 1234637 - DNA, 15 bp, Homo sapiens
attagcttcaaggct

SEQ ID NO: 1234638 - DNA, 15 bp, Homo sapiens
gattagcttcaaggc

SEQ ID NO: 1234639 - DNA, 15 bp, Homo sapiens
agattagcttcaagg

SEQ ID NO: 1234640 - DNA, 15 bp, Homo sapiens
aagattagcttcaag

SEQ ID NO: 1234641 - DNA, 15 bp, Homo sapiens
aaagattagcttcaa

SEQ ID NO: 1234642 - DNA, 15 bp, Homo sapiens
taaagattagcttca

SEQ ID NO: 1234643 - DNA, 15 bp, Homo sapiens
ataaagattagcttc

SEQ ID NO: 1234644 - DNA, 15 bp, Homo sapiens
aataaagattagctt

SEQ ID NO: 1234645 - DNA, 15 bp, Homo sapiens
aaataaagattagct

SEQ ID NO: 1234646 - DNA, 15 bp, Homo sapiens
aaaataaagattagc

SEQ ID NO: 1234647 - DNA, 15 bp, Homo sapiens
aaaaataaagattag

SEQ ID NO: 1234648 - DNA, 15 bp, Homo sapiens
gaaaaataaagatta

SEQ ID NO: 1234649 - DNA, 15 bp, Homo sapiens
agaaaaataaagatt

SEQ ID NO: 1234650 - DNA, 15 bp, Homo sapiens
aagaaaaataaagat

SEQ ID NO: 1234651 - DNA, 15 bp, Homo sapiens
aaagaaaaataaaga

SEQ ID NO: 1234652 - DNA, 15 bp, Homo sapiens
ataaagaaaaataaa

SEQ ID NO: 1234653 - DNA, 15 bp, Homo sapiens
aataaagaaaaataa

SEQ ID NO: 1234654 - DNA, 15 bp, Homo sapiens
aaataaagaaaaata

SEQ ID NO: 1234655 - DNA, 15 bp, Homo sapiens
aaaataaagaaaaat

SEQ ID NO: 1234656 - DNA, 15 bp, Homo sapiens
taaaataaagaaaaa

SEQ ID NO: 1234657 - DNA, 15 bp, Homo sapiens
ataaaataaagaaaa

SEQ ID NO: 1234658 - DNA, 15 bp, Homo sapiens
aataaaataaagaaa

SEQ ID NO: 1234659 - DNA, 15 bp, Homo sapiens
aaataaaataaagaa

SEQ ID NO: 1234660 - DNA, 15 bp, Homo sapiens
aaaataaaataaaga

SEQ ID NO: 1234661 - DNA, 15 bp, Homo sapiens
taaaataaaataaag

SEQ ID NO: 1234662 - DNA, 15 bp, Homo sapiens
caaaaaataaaataa

SEQ ID NO: 1234663 - DNA, 15 bp, Homo sapiens
tcaaaaaataaaata

SEQ ID NO: 1234664 - DNA, 15 bp, Homo sapiens
ctcaaaaaataaaat

SEQ ID NO: 1234665 - DNA, 15 bp, Homo sapiens
cagcgagactctgtc

SEQ ID NO: 1234666 - DNA, 15 bp, Homo sapiens
acagcgagactctgt

SEQ ID NO: 1234667 - DNA, 15 bp, Homo sapiens
cacagcgagactctg

SEQ ID NO: 1234668 - DNA, 15 bp, Homo sapiens
acacagcgagactct

SEQ ID NO: 1234669 - DNA, 15 bp, Homo sapiens
gacacagcgagactc

SEQ ID NO: 1234670 - DNA, 15 bp, Homo sapiens
tgacacagcgagact

SEQ ID NO: 1234671 - DNA, 15 bp, Homo sapiens
gtgacacagcgagac

SEQ ID NO: 1234672 - DNA, 15 bp, Homo sapiens
ggtgacacagcgaga

SEQ ID NO: 1234673 - DNA, 15 bp, Homo sapiens
gggtgacacagcgag

SEQ ID NO: 1234674 - DNA, 15 bp, Homo sapiens
tgggtgacacagcga

SEQ ID NO: 1234675 - DNA, 15 bp, Homo sapiens
ctgggtgacacagcg

SEQ ID NO: 1234676 - DNA, 15 bp, Homo sapiens
cctgggtgacacagc

SEQ ID NO: 1234677 - DNA, 15 bp, Homo sapiens
cagcctgggtgacac

SEQ ID NO: 1234678 - DNA, 15 bp, Homo sapiens
cagaattgcttgaac

SEQ ID NO: 1234679 - DNA, 15 bp, Homo sapiens
gcagaattgcttgaa

SEQ ID NO: 1234680 - DNA, 15 bp, Homo sapiens
ggcagaattgcttga

SEQ ID NO: 1234681 - DNA, 15 bp, Homo sapiens
aggcagaattgcttg

SEQ ID NO: 1234682 - DNA, 15 bp, Homo sapiens
gaggcagaattgctt

SEQ ID NO: 1234683 - DNA, 15 bp, Homo sapiens
tgaggcagaattgct

SEQ ID NO: 1234684 - DNA, 15 bp, Homo sapiens
ctgaggcagaattgc

SEQ ID NO: 1234685 - DNA, 15 bp, Homo sapiens
tctgaggcagaattg

SEQ ID NO: 1234686 - DNA, 15 bp, Homo sapiens
gtctgaggcagaatt

SEQ ID NO: 1234687 - DNA, 15 bp, Homo sapiens
agtctgaggcagaat

SEQ ID NO: 1234688 - DNA, 15 bp, Homo sapiens
gagtctgaggcagaa

SEQ ID NO: 1234689 - DNA, 15 bp, Homo sapiens
ggagtctgaggcaga

SEQ ID NO: 1234690 - DNA, 15 bp, Homo sapiens
tgtgcctgtagtccc

SEQ ID NO: 1234691 - DNA, 15 bp, Homo sapiens
cgtgtgcctgtagtc

SEQ ID NO: 1234692 - DNA, 15 bp, Homo sapiens
gcgtgtgcctgtagt

SEQ ID NO: 1234693 - DNA, 15 bp, Homo sapiens
ggcgtgtgcctgtag

SEQ ID NO: 1234694 - DNA, 15 bp, Homo sapiens
caggcatggtggcgt

SEQ ID NO: 1234695 - DNA, 15 bp, Homo sapiens
cctctactgaaaata

SEQ ID NO: 1234696 - DNA, 15 bp, Homo sapiens
gcctctactgaaaat

SEQ ID NO: 1234697 - DNA, 15 bp, Homo sapiens
tgcctctactgaaaa

SEQ ID NO: 1234698 - DNA, 15 bp, Homo sapiens
ctgcctctactgaaa

SEQ ID NO: 1234699 - DNA, 15 bp, Homo sapiens
cctgcctctactgaa

SEQ ID NO: 1234700 - DNA, 15 bp, Homo sapiens
ccctgcctctactga

SEQ ID NO: 1234701 - DNA, 15 bp, Homo sapiens
accctgcctctactg

SEQ ID NO: 1234702 - DNA, 15 bp, Homo sapiens
aaccctgcctctact

SEQ ID NO: 1234703 - DNA, 15 bp, Homo sapiens
aaaccctgcctctac

SEQ ID NO: 1234704 - DNA, 15 bp, Homo sapiens
gaaaccctgcctcta

SEQ ID NO: 1234705 - DNA, 15 bp, Homo sapiens
tgaaaccctgcctct

SEQ ID NO: 1234706 - DNA, 15 bp, Homo sapiens
gtgaaaccctgcctc

SEQ ID NO: 1234707 - DNA, 15 bp, Homo sapiens
cggtgaaaccctgcc

SEQ ID NO: 1234708 - DNA, 15 bp, Homo sapiens
acggtgaaaccctgc

SEQ ID NO: 1234709 - DNA, 15 bp, Homo sapiens
accaacacggtgaaa

SEQ ID NO: 1234710 - DNA, 15 bp, Homo sapiens
gaccaacacggtgaa

SEQ ID NO: 1234711 - DNA, 15 bp, Homo sapiens
tgaccaacacggtga

SEQ ID NO: 1234712 - DNA, 15 bp, Homo sapiens
ctgaccaacacggtg

SEQ ID NO: 1234713 - DNA, 15 bp, Homo sapiens
cctgaccaacacggt

SEQ ID NO: 1234714 - DNA, 15 bp, Homo sapiens
gcctgaccaacacgg

SEQ ID NO: 1234715 - DNA, 15 bp, Homo sapiens
agcctgaccaacacg

SEQ ID NO: 1234716 - DNA, 15 bp, Homo sapiens
atcaggagttggaga

SEQ ID NO: 1234717 - DNA, 15 bp, Homo sapiens
aatcaggagttggag

SEQ ID NO: 1234718 - DNA, 15 bp, Homo sapiens
aaatcaggagttgga

SEQ ID NO: 1234719 - DNA, 15 bp, Homo sapiens
gaaatcaggagttgg

SEQ ID NO: 1234720 - DNA, 15 bp, Homo sapiens
cgaaatcaggagttg

SEQ ID NO: 1234721 - DNA, 15 bp, Homo sapiens
acgaaatcaggagtt

SEQ ID NO: 1234722 - DNA, 15 bp, Homo sapiens
cacgaaatcaggagt

SEQ ID NO: 1234723 - DNA, 15 bp, Homo sapiens
tcacgaaatcaggag

SEQ ID NO: 1234724 - DNA, 15 bp, Homo sapiens
atcacgaaatcagga

SEQ ID NO: 1234725 - DNA, 15 bp, Homo sapiens
gatcacgaaatcagg

SEQ ID NO: 1234726 - DNA, 15 bp, Homo sapiens
agatcacgaaatcag

SEQ ID NO: 1234727 - DNA, 15 bp, Homo sapiens
cagatcacgaaatca

SEQ ID NO: 1234728 - DNA, 15 bp, Homo sapiens
gcagatcacgaaatc

SEQ ID NO: 1234729 - DNA, 15 bp, Homo sapiens
ggcagatcacgaaat

SEQ ID NO: 1234730 - DNA, 15 bp, Homo sapiens
aggcagatcacgaaa

SEQ ID NO: 1234731 - DNA, 15 bp, Homo sapiens
caggcagatcacgaa

SEQ ID NO: 1234732 - DNA, 15 bp, Homo sapiens
gcaggcagatcacga

SEQ ID NO: 1234733 - DNA, 15 bp, Homo sapiens
ggcaggcagatcacg

SEQ ID NO: 1234734 - DNA, 15 bp, Homo sapiens
tgaggcaggcagatc

SEQ ID NO: 1234735 - DNA, 15 bp, Homo sapiens
tcctgcaatcccagc

SEQ ID NO: 1234736 - DNA, 15 bp, Homo sapiens
ttcctgcaatcccag

SEQ ID NO: 1234737 - DNA, 15 bp, Homo sapiens
attcctgcaatccca

SEQ ID NO: 1234738 - DNA, 15 bp, Homo sapiens
cattcctgcaatccc

SEQ ID NO: 1234739 - DNA, 15 bp, Homo sapiens
tcattcctgcaatcc

SEQ ID NO: 1234740 - DNA, 15 bp, Homo sapiens
ctcattcctgcaatc

SEQ ID NO: 1234741 - DNA, 15 bp, Homo sapiens
gctcattcctgcaat

SEQ ID NO: 1234742 - DNA, 15 bp, Homo sapiens
ggctcattcctgcaa

SEQ ID NO: 1234743 - DNA, 15 bp, Homo sapiens
tggctcattcctgca

SEQ ID NO: 1234744 - DNA, 15 bp, Homo sapiens
gtggctcattcctgc

SEQ ID NO: 1234745 - DNA, 15 bp, Homo sapiens
ggtggctcattcctg

SEQ ID NO: 1234746 - DNA, 15 bp, Homo sapiens
tggtggctcattcct

SEQ ID NO: 1234747 - DNA, 15 bp, Homo sapiens
atggtggctcattcc

SEQ ID NO: 1234748 - DNA, 15 bp, Homo sapiens
catggtggctcattc

SEQ ID NO: 1234749 - DNA, 15 bp, Homo sapiens
gcatggtggctcatt

SEQ ID NO: 1234750 - DNA, 15 bp, Homo sapiens
aagctgggcatggtg

SEQ ID NO: 1234751 - DNA, 15 bp, Homo sapiens
aaagctgggcatggt

SEQ ID NO: 1234752 - DNA, 15 bp, Homo sapiens
aaaagctgggcatgg

SEQ ID NO: 1234753 - DNA, 15 bp, Homo sapiens
aaaaagctgggcatg

SEQ ID NO: 1234754 - DNA, 15 bp, Homo sapiens
aaaaaagctgggcat

SEQ ID NO: 1234755 - DNA, 15 bp, Homo sapiens
aaaaaaagctgggca

SEQ ID NO: 1234756 - DNA, 15 bp, Homo sapiens
aaaaaaaagctgggc

SEQ ID NO: 1234757 - DNA, 15 bp, Homo sapiens
aaaaaaaaagctggg

SEQ ID NO: 1234758 - DNA, 15 bp, Homo sapiens
gtccatctcaaaaaa

SEQ ID NO: 1234759 - DNA, 15 bp, Homo sapiens
agtccatctcaaaaa

SEQ ID NO: 1234760 - DNA, 15 bp, Homo sapiens
gagtccatctcaaaa

SEQ ID NO: 1234761 - DNA, 15 bp, Homo sapiens
agagtccatctcaaa

SEQ ID NO: 1234762 - DNA, 15 bp, Homo sapiens
aagagtccatctcaa

SEQ ID NO: 1234763 - DNA, 15 bp, Homo sapiens
aaagagtccatctca

SEQ ID NO: 1234764 - DNA, 15 bp, Homo sapiens
aaaagagtccatctc

SEQ ID NO: 1234765 - DNA, 15 bp, Homo sapiens
aaaaagagtccatct

SEQ ID NO: 1234766 - DNA, 15 bp, Homo sapiens
gaaaaagagtccatc

SEQ ID NO: 1234767 - DNA, 15 bp, Homo sapiens
agaaaaagagtccat

SEQ ID NO: 1234768 - DNA, 15 bp, Homo sapiens
cagaaaaagagtcca

SEQ ID NO: 1234769 - DNA, 15 bp, Homo sapiens
acagaaaaagagtcc

SEQ ID NO: 1234770 - DNA, 15 bp, Homo sapiens
gacagaaaaagagtc

SEQ ID NO: 1234771 - DNA, 15 bp, Homo sapiens
agacagaaaaagagt

SEQ ID NO: 1234772 - DNA, 15 bp, Homo sapiens
gagacagaaaaagag

SEQ ID NO: 1234773 - DNA, 15 bp, Homo sapiens
agagacagaaaaaga

SEQ ID NO: 1234774 - DNA, 15 bp, Homo sapiens
gagagacagaaaaag

SEQ ID NO: 1234775 - DNA, 15 bp, Homo sapiens
tgagagacagaaaaa

SEQ ID NO: 1234776 - DNA, 15 bp, Homo sapiens
ctgagagacagaaaa

SEQ ID NO: 1234777 - DNA, 15 bp, Homo sapiens
cctgagagacagaaa

SEQ ID NO: 1234778 - DNA, 15 bp, Homo sapiens
gcctgagagacagaa

SEQ ID NO: 1234779 - DNA, 15 bp, Homo sapiens
agcctgagagacaga

SEQ ID NO: 1234780 - DNA, 15 bp, Homo sapiens
cagcctgagagacag

SEQ ID NO: 1234781 - DNA, 15 bp, Homo sapiens
ccagcctgagagaca

SEQ ID NO: 1234782 - DNA, 15 bp, Homo sapiens
tccagcctgagagac

SEQ ID NO: 1234783 - DNA, 15 bp, Homo sapiens
ctccagcctgagaga

SEQ ID NO: 1234784 - DNA, 15 bp, Homo sapiens
actccagcctgagag

SEQ ID NO: 1234785 - DNA, 15 bp, Homo sapiens
cactccagcctgaga

SEQ ID NO: 1234786 - DNA, 15 bp, Homo sapiens
acactccagcctgag

SEQ ID NO: 1234787 - DNA, 15 bp, Homo sapiens
tacactccagcctga

SEQ ID NO: 1234788 - DNA, 15 bp, Homo sapiens
gccactacactccag

SEQ ID NO: 1234789 - DNA, 15 bp, Homo sapiens
agccactacactcca

SEQ ID NO: 1234790 - DNA, 15 bp, Homo sapiens
gagccactacactcc

SEQ ID NO: 1234791 - DNA, 15 bp, Homo sapiens
tgagccactacactc

SEQ ID NO: 1234792 - DNA, 15 bp, Homo sapiens
gtgagccactacact

SEQ ID NO: 1234793 - DNA, 15 bp, Homo sapiens
agtgagccactacac

SEQ ID NO: 1234794 - DNA, 15 bp, Homo sapiens
cagtgagccactaca

SEQ ID NO: 1234795 - DNA, 15 bp, Homo sapiens
gcagtgagccactac

SEQ ID NO: 1234796 - DNA, 15 bp, Homo sapiens
tgcagtgagccacta

SEQ ID NO: 1234797 - DNA, 15 bp, Homo sapiens
ttgcagtgagccact

SEQ ID NO: 1234798 - DNA, 15 bp, Homo sapiens
tagaattgcttgaac

SEQ ID NO: 1234799 - DNA, 15 bp, Homo sapiens
gtagaattgcttgaa

SEQ ID NO: 1234800 - DNA, 15 bp, Homo sapiens
ggtagaattgcttga

SEQ ID NO: 1234801 - DNA, 15 bp, Homo sapiens
aggtagaattgcttg

SEQ ID NO: 1234802 - DNA, 15 bp, Homo sapiens
gaggtagaattgctt

SEQ ID NO: 1234803 - DNA, 15 bp, Homo sapiens
tgaggtagaattgct

SEQ ID NO: 1234804 - DNA, 15 bp, Homo sapiens
ctgaggtagaattgc

SEQ ID NO: 1234805 - DNA, 15 bp, Homo sapiens
gctgaggtagaattg

SEQ ID NO: 1234806 - DNA, 15 bp, Homo sapiens
ggctgaggtagaatt

SEQ ID NO: 1234807 - DNA, 15 bp, Homo sapiens
aggctgaggtagaat

SEQ ID NO: 1234808 - DNA, 15 bp, Homo sapiens
gaggctgaggtagaa

SEQ ID NO: 1234809 - DNA, 15 bp, Homo sapiens
ggaggctgaggtaga

SEQ ID NO: 1234810 - DNA, 15 bp, Homo sapiens
cgggaggctgaggta

SEQ ID NO: 1234811 - DNA, 15 bp, Homo sapiens
acatacctgtaatcc

SEQ ID NO: 1234812 - DNA, 15 bp, Homo sapiens
cacatacctgtaatc

SEQ ID NO: 1234813 - DNA, 15 bp, Homo sapiens
gcacatacctgtaat

SEQ ID NO: 1234814 - DNA, 15 bp, Homo sapiens
ggcacatacctgtaa

SEQ ID NO: 1234815 - DNA, 15 bp, Homo sapiens
tggcacatacctgta

SEQ ID NO: 1234816 - DNA, 15 bp, Homo sapiens
gtggcacatacctgt

SEQ ID NO: 1234817 - DNA, 15 bp, Homo sapiens
ggtggcacatacctg

SEQ ID NO: 1234818 - DNA, 15 bp, Homo sapiens
tggtggcacatacct

SEQ ID NO: 1234819 - DNA, 15 bp, Homo sapiens
gtggtggcacatacc

SEQ ID NO: 1234820 - DNA, 15 bp, Homo sapiens
tgtggtggcacatac

SEQ ID NO: 1234821 - DNA, 15 bp, Homo sapiens
gaccccatctctact

SEQ ID NO: 1234822 - DNA, 15 bp, Homo sapiens
ttgagaccccatctc

SEQ ID NO: 1234823 - DNA, 15 bp, Homo sapiens
tttgagaccccatct

SEQ ID NO: 1234824 - DNA, 15 bp, Homo sapiens
ttttgagaccccatc

SEQ ID NO: 1234825 - DNA, 15 bp, Homo sapiens
tttttgagaccccat

SEQ ID NO: 1234826 - DNA, 15 bp, Homo sapiens
ttttttgagacccca

SEQ ID NO: 1234827 - DNA, 15 bp, Homo sapiens
tttttttgagacccc

SEQ ID NO: 1234828 - DNA, 15 bp, Homo sapiens
ttttttttgagaccc

SEQ ID NO: 1234829 - DNA, 15 bp, Homo sapiens
tttttttttgagacc

SEQ ID NO: 1234830 - DNA, 15 bp, Homo sapiens
cctttttttttttga

SEQ ID NO: 1234831 - DNA, 15 bp, Homo sapiens
ccctttttttttttg

SEQ ID NO: 1234832 - DNA, 15 bp, Homo sapiens
tcccttttttttttt

SEQ ID NO: 1234833 - DNA, 15 bp, Homo sapiens
ctccctttttttttt

SEQ ID NO: 1234834 - DNA, 15 bp, Homo sapiens
ttctccctttttttt

SEQ ID NO: 1234835 - DNA, 15 bp, Homo sapiens
tttctcccttttttt

SEQ ID NO: 1234836 - DNA, 15 bp, Homo sapiens
ctttctccctttttt

SEQ ID NO: 1234837 - DNA, 15 bp, Homo sapiens
cctttctcccttttt

SEQ ID NO: 1234838 - DNA, 15 bp, Homo sapiens
tcctttctccctttt

SEQ ID NO: 1234839 - DNA, 15 bp, Homo sapiens
atcctttctcccttt

SEQ ID NO: 1234840 - DNA, 15 bp, Homo sapiens
catcctttctccctt

SEQ ID NO: 1234841 - DNA, 15 bp, Homo sapiens
ccatcctttctccct

SEQ ID NO: 1234842 - DNA, 15 bp, Homo sapiens
accatcctttctccc

SEQ ID NO: 1234843 - DNA, 15 bp, Homo sapiens
taccatcctttctcc

SEQ ID NO: 1234844 - DNA, 15 bp, Homo sapiens
ctaccatcctttctc

SEQ ID NO: 1234845 - DNA, 15 bp, Homo sapiens
gctaccatcctttct

SEQ ID NO: 1234846 - DNA, 15 bp, Homo sapiens
tgctaccatcctttc

SEQ ID NO: 1234847 - DNA, 15 bp, Homo sapiens
atgctaccatccttt

SEQ ID NO: 1234848 - DNA, 15 bp, Homo sapiens
tatgctaccatcctt

SEQ ID NO: 1234849 - DNA, 15 bp, Homo sapiens
ttatgctaccatcct

SEQ ID NO: 1234850 - DNA, 15 bp, Homo sapiens
cttatgctaccatcc

SEQ ID NO: 1234851 - DNA, 15 bp, Homo sapiens
tcttatgctaccatc

SEQ ID NO: 1234852 - DNA, 15 bp, Homo sapiens
gtcttatgctaccat

SEQ ID NO: 1234853 - DNA, 15 bp, Homo sapiens
cgtcttatgctacca

SEQ ID NO: 1234854 - DNA, 15 bp, Homo sapiens
ccgtcttatgctacc

SEQ ID NO: 1234855 - DNA, 15 bp, Homo sapiens
accgtcttatgctac

SEQ ID NO: 1234856 - DNA, 15 bp, Homo sapiens
taccgtcttatgcta

SEQ ID NO: 1234857 - DNA, 15 bp, Homo sapiens
ataccgtcttatgct

SEQ ID NO: 1234858 - DNA, 15 bp, Homo sapiens
tataccgtcttatgc

SEQ ID NO: 1234859 - DNA, 15 bp, Homo sapiens
gtataccgtcttatg

SEQ ID NO: 1234860 - DNA, 15 bp, Homo sapiens
agtataccgtcttat

SEQ ID NO: 1234861 - DNA, 15 bp, Homo sapiens
tagtataccgtctta

SEQ ID NO: 1234862 - DNA, 15 bp, Homo sapiens
ctagtataccgtctt

SEQ ID NO: 1234863 - DNA, 15 bp, Homo sapiens
tctagtataccgtct

SEQ ID NO: 1234864 - DNA, 15 bp, Homo sapiens
ctctagtataccgtc

SEQ ID NO: 1234865 - DNA, 15 bp, Homo sapiens
tctctagtataccgt

SEQ ID NO: 1234866 - DNA, 15 bp, Homo sapiens
ttctctagtataccg

SEQ ID NO: 1234867 - DNA, 15 bp, Homo sapiens
tttctctagtatacc

SEQ ID NO: 1234868 - DNA, 15 bp, Homo sapiens
gtttctctagtatac

SEQ ID NO: 1234869 - DNA, 15 bp, Homo sapiens
tgtttctctagtata

SEQ ID NO: 1234870 - DNA, 15 bp, Homo sapiens
gtgtttctctagtat

SEQ ID NO: 1234871 - DNA, 15 bp, Homo sapiens
agtgtttctctagta

SEQ ID NO: 1234872 - DNA, 15 bp, Homo sapiens
tagtgtttctctagt

SEQ ID NO: 1234873 - DNA, 15 bp, Homo sapiens
ttagtgtttctctag

SEQ ID NO: 1234874 - DNA, 15 bp, Homo sapiens
tttagtgtttctcta

SEQ ID NO: 1234875 - DNA, 15 bp, Homo sapiens
ttttagtgtttctct

SEQ ID NO: 1234876 - DNA, 15 bp, Homo sapiens
attttagtgtttctc

SEQ ID NO: 1234877 - DNA, 15 bp, Homo sapiens
tattttagtgtttct

SEQ ID NO: 1234878 - DNA, 15 bp, Homo sapiens
ctattttagtgtttc

SEQ ID NO: 1234879 - DNA, 15 bp, Homo sapiens
cctattttagtgttt

SEQ ID NO: 1234880 - DNA, 15 bp, Homo sapiens
tcctattttagtgtt

SEQ ID NO: 1234881 - DNA, 15 bp, Homo sapiens
atcctattttagtgt

SEQ ID NO: 1234882 - DNA, 15 bp, Homo sapiens
tatcctattttagtg

SEQ ID NO: 1234883 - DNA, 15 bp, Homo sapiens
ctatcctattttagt

SEQ ID NO: 1234884 - DNA, 15 bp, Homo sapiens
cctatcctattttag

SEQ ID NO: 1234885 - DNA, 15 bp, Homo sapiens
gcctatcctatttta

SEQ ID NO: 1234886 - DNA, 15 bp, Homo sapiens
tgcctatcctatttt

SEQ ID NO: 1234887 - DNA, 15 bp, Homo sapiens
ttgcctatcctattt

SEQ ID NO: 1234888 - DNA, 15 bp, Homo sapiens
tttgcctatcctatt

SEQ ID NO: 1234889 - DNA, 15 bp, Homo sapiens
ttttgcctatcctat

SEQ ID NO: 1234890 - DNA, 15 bp, Homo sapiens
attttgcctatccta

SEQ ID NO: 1234891 - DNA, 15 bp, Homo sapiens
tattttgcctatcct

SEQ ID NO: 1234892 - DNA, 15 bp, Homo sapiens
atattttgcctatcc

SEQ ID NO: 1234893 - DNA, 15 bp, Homo sapiens
catattttgcctatc

SEQ ID NO: 1234894 - DNA, 15 bp, Homo sapiens
tcatattttgcctat

SEQ ID NO: 1234895 - DNA, 15 bp, Homo sapiens
ctcatattttgccta

SEQ ID NO: 1234896 - DNA, 15 bp, Homo sapiens
gctcatattttgcct

SEQ ID NO: 1234897 - DNA, 15 bp, Homo sapiens
ggctcatattttgcc

SEQ ID NO: 1234898 - DNA, 15 bp, Homo sapiens
aggctcatattttgc

SEQ ID NO: 1234899 - DNA, 15 bp, Homo sapiens
aaggctcatattttg

SEQ ID NO: 1234900 - DNA, 15 bp, Homo sapiens
aaaggctcatatttt

SEQ ID NO: 1234901 - DNA, 15 bp, Homo sapiens
taaaggctcatattt

SEQ ID NO: 1234902 - DNA, 15 bp, Homo sapiens
ttaaaggctcatatt

SEQ ID NO: 1234903 - DNA, 15 bp, Homo sapiens
tttaaaggctcatat

SEQ ID NO: 1234904 - DNA, 15 bp, Homo sapiens
ttttaaaggctcata

SEQ ID NO: 1234905 - DNA, 15 bp, Homo sapiens
cttttaaaggctcat

SEQ ID NO: 1234906 - DNA, 15 bp, Homo sapiens
gcttttaaaggctca

SEQ ID NO: 1234907 - DNA, 15 bp, Homo sapiens
agcttttaaaggctc

SEQ ID NO: 1234908 - DNA, 15 bp, Homo sapiens
aagcttttaaaggct

SEQ ID NO: 1234909 - DNA, 15 bp, Homo sapiens
aaagcttttaaaggc

SEQ ID NO: 1234910 - DNA, 15 bp, Homo sapiens
taaagcttttaaagg

SEQ ID NO: 1234911 - DNA, 15 bp, Homo sapiens
ttaaagcttttaaag

SEQ ID NO: 1234912 - DNA, 15 bp, Homo sapiens
cttaaagcttttaaa

SEQ ID NO: 1234913 - DNA, 15 bp, Homo sapiens
ccttaaagcttttaa

SEQ ID NO: 1234914 - DNA, 15 bp, Homo sapiens
tccttaaagctttta

SEQ ID NO: 1234915 - DNA, 15 bp, Homo sapiens
ctccttaaagctttt

SEQ ID NO: 1234916 - DNA, 15 bp, Homo sapiens
actccttaaagcttt

SEQ ID NO: 1234917 - DNA, 15 bp, Homo sapiens
tactccttaaagctt

SEQ ID NO: 1234918 - DNA, 15 bp, Homo sapiens
ttactccttaaagct

SEQ ID NO: 1234919 - DNA, 15 bp, Homo sapiens
gttactccttaaagc

SEQ ID NO: 1234920 - DNA, 15 bp, Homo sapiens
tgttactccttaaag

SEQ ID NO: 1234921 - DNA, 15 bp, Homo sapiens
atgttactccttaaa

SEQ ID NO: 1234922 - DNA, 15 bp, Homo sapiens
tatgttactccttaa

SEQ ID NO: 1234923 - DNA, 15 bp, Homo sapiens
gtatgttactcctta

SEQ ID NO: 1234924 - DNA, 15 bp, Homo sapiens
agtatgttactcctt

SEQ ID NO: 1234925 - DNA, 15 bp, Homo sapiens
aagtatgttactcct

SEQ ID NO: 1234926 - DNA, 15 bp, Homo sapiens
taagtatgttactcc

SEQ ID NO: 1234927 - DNA, 15 bp, Homo sapiens
ctaagtatgttactc

SEQ ID NO: 1234928 - DNA, 15 bp, Homo sapiens
tctaagtatgttact

SEQ ID NO: 1234929 - DNA, 15 bp, Homo sapiens
atctaagtatgttac

SEQ ID NO: 1234930 - DNA, 15 bp, Homo sapiens
aatctaagtatgtta

SEQ ID NO: 1234931 - DNA, 15 bp, Homo sapiens
aaatctaagtatgtt

SEQ ID NO: 1234932 - DNA, 15 bp, Homo sapiens
caaatctaagtatgt

SEQ ID NO: 1234933 - DNA, 15 bp, Homo sapiens
gcaaatctaagtatg

SEQ ID NO: 1234934 - DNA, 15 bp, Homo sapiens
tgcaaatctaagtat

SEQ ID NO: 1234935 - DNA, 15 bp, Homo sapiens
atgcaaatctaagta

SEQ ID NO: 1234936 - DNA, 15 bp, Homo sapiens
aatgcaaatctaagt

SEQ ID NO: 1234937 - DNA, 15 bp, Homo sapiens
aaatgcaaatctaag

SEQ ID NO: 1234938 - DNA, 15 bp, Homo sapiens
aaaatgcaaatctaa

SEQ ID NO: 1234939 - DNA, 15 bp, Homo sapiens
taaaatgcaaatcta

SEQ ID NO: 1234940 - DNA, 15 bp, Homo sapiens
ctaaaatgcaaatct

SEQ ID NO: 1234941 - DNA, 15 bp, Homo sapiens
tctaaaatgcaaatc

SEQ ID NO: 1234942 - DNA, 15 bp, Homo sapiens
atctaaaatgcaaat

SEQ ID NO: 1234943 - DNA, 15 bp, Homo sapiens
aatctaaaatgcaaa

SEQ ID NO: 1234944 - DNA, 15 bp, Homo sapiens
caatctaaaatgcaa

SEQ ID NO: 1234945 - DNA, 15 bp, Homo sapiens
acaatctaaaatgca

SEQ ID NO: 1234946 - DNA, 15 bp, Homo sapiens
aacaatctaaaatgc

SEQ ID NO: 1234947 - DNA, 15 bp, Homo sapiens
gaacaatctaaaatg

SEQ ID NO: 1234948 - DNA, 15 bp, Homo sapiens
agaacaatctaaaat

SEQ ID NO: 1234949 - DNA, 15 bp, Homo sapiens
gagaacaatctaaaa

SEQ ID NO: 1234950 - DNA, 15 bp, Homo sapiens
ggagaacaatctaaa

SEQ ID NO: 1234951 - DNA, 15 bp, Homo sapiens
gggagaacaatctaa

SEQ ID NO: 1234952 - DNA, 15 bp, Homo sapiens
agggagaacaatcta

SEQ ID NO: 1234953 - DNA, 15 bp, Homo sapiens
cagggagaacaatct

SEQ ID NO: 1234954 - DNA, 15 bp, Homo sapiens
acagggagaacaatc

SEQ ID NO: 1234955 - DNA, 15 bp, Homo sapiens
tacagggagaacaat

SEQ ID NO: 1234956 - DNA, 15 bp, Homo sapiens
gtacagggagaacaa

SEQ ID NO: 1234957 - DNA, 15 bp, Homo sapiens
agtacagggagaaca

SEQ ID NO: 1234958 - DNA, 15 bp, Homo sapiens
tagtacagggagaac

SEQ ID NO: 1234959 - DNA, 15 bp, Homo sapiens
gtagtacagggagaa

SEQ ID NO: 1234960 - DNA, 15 bp, Homo sapiens
cgtagtacagggaga

SEQ ID NO: 1234961 - DNA, 15 bp, Homo sapiens
ccgtagtacagggag

SEQ ID NO: 1234962 - DNA, 15 bp, Homo sapiens
cccgtagtacaggga

SEQ ID NO: 1234963 - DNA, 15 bp, Homo sapiens
tcccgtagtacaggg

SEQ ID NO: 1234964 - DNA, 15 bp, Homo sapiens
ttcccgtagtacagg

SEQ ID NO: 1234965 - DNA, 15 bp, Homo sapiens
cttcccgtagtacag

SEQ ID NO: 1234966 - DNA, 15 bp, Homo sapiens
ccttcccgtagtaca

SEQ ID NO: 1234967 - DNA, 15 bp, Homo sapiens
accttcccgtagtac

SEQ ID NO: 1234968 - DNA, 15 bp, Homo sapiens
taccttcccgtagta

SEQ ID NO: 1234969 - DNA, 15 bp, Homo sapiens
ataccttcccgtagt

SEQ ID NO: 1234970 - DNA, 15 bp, Homo sapiens
aataccttcccgtag

SEQ ID NO: 1234971 - DNA, 15 bp, Homo sapiens
caataccttcccgta

SEQ ID NO: 1234972 - DNA, 15 bp, Homo sapiens
ccaataccttcccgt

SEQ ID NO: 1234973 - DNA, 15 bp, Homo sapiens
tccaataccttcccg

SEQ ID NO: 1234974 - DNA, 15 bp, Homo sapiens
ttccaataccttccc

SEQ ID NO: 1234975 - DNA, 15 bp, Homo sapiens
cttccaataccttcc

SEQ ID NO: 1234976 - DNA, 15 bp, Homo sapiens
ccttccaataccttc

SEQ ID NO: 1234977 - DNA, 15 bp, Homo sapiens
cccttccaatacctt

SEQ ID NO: 1234978 - DNA, 15 bp, Homo sapiens
tcccttccaatacct

SEQ ID NO: 1234979 - DNA, 15 bp, Homo sapiens
ctcccttccaatacc

SEQ ID NO: 1234980 - DNA, 15 bp, Homo sapiens
gctcccttccaatac

SEQ ID NO: 1234981 - DNA, 15 bp, Homo sapiens
tgctcccttccaata

SEQ ID NO: 1234982 - DNA, 15 bp, Homo sapiens
ttgctcccttccaat

SEQ ID NO: 1234983 - DNA, 15 bp, Homo sapiens
cttgctcccttccaa

SEQ ID NO: 1234984 - DNA, 15 bp, Homo sapiens
tcttgctcccttcca

SEQ ID NO: 1234985 - DNA, 15 bp, Homo sapiens
gtcttgctcccttcc

SEQ ID NO: 1234986 - DNA, 15 bp, Homo sapiens
ggtcttgctcccttc

SEQ ID NO: 1234987 - DNA, 15 bp, Homo sapiens
tggtcttgctccctt

SEQ ID NO: 1234988 - DNA, 15 bp, Homo sapiens
ctggtcttgctccct

SEQ ID NO: 1234989 - DNA, 15 bp, Homo sapiens
tctggtcttgctccc

SEQ ID NO: 1234990 - DNA, 15 bp, Homo sapiens
ctctggtcttgctcc

SEQ ID NO: 1234991 - DNA, 15 bp, Homo sapiens
tctctggtcttgctc

SEQ ID NO: 1234992 - DNA, 15 bp, Homo sapiens
atctctggtcttgct

SEQ ID NO: 1234993 - DNA, 15 bp, Homo sapiens
aatctctggtcttgc

SEQ ID NO: 1234994 - DNA, 15 bp, Homo sapiens
taatctctggtcttg

SEQ ID NO: 1234995 - DNA, 15 bp, Homo sapiens
ctaatctctggtctt

SEQ ID NO: 1234996 - DNA, 15 bp, Homo sapiens
actaatctctggtct

SEQ ID NO: 1234997 - DNA, 15 bp, Homo sapiens
gactaatctctggtc

SEQ ID NO: 1234998 - DNA, 15 bp, Homo sapiens
agactaatctctggt

SEQ ID NO: 1234999 - DNA, 15 bp, Homo sapiens
tagactaatctctgg

SEQ ID NO: 1235000 - DNA, 15 bp, Homo sapiens
atagactaatctctg

SEQ ID NO: 1235001 - DNA, 15 bp, Homo sapiens
aatagactaatctct

SEQ ID NO: 1235002 - DNA, 15 bp, Homo sapiens
aaatagactaatctc

SEQ ID NO: 1235003 - DNA, 15 bp, Homo sapiens
aaaatagactaatct

SEQ ID NO: 1235004 - DNA, 15 bp, Homo sapiens
taaaatagactaatc

SEQ ID NO: 1235005 - DNA, 15 bp, Homo sapiens
ttaaaatagactaat

SEQ ID NO: 1235006 - DNA, 15 bp, Homo sapiens
attaaaatagactaa

SEQ ID NO: 1235007 - DNA, 15 bp, Homo sapiens
cattaaaatagacta

SEQ ID NO: 1235008 - DNA, 15 bp, Homo sapiens
tcattaaaatagact

SEQ ID NO: 1235009 - DNA, 15 bp, Homo sapiens
atcattaaaatagac

SEQ ID NO: 1235010 - DNA, 15 bp, Homo sapiens
aatcattaaaataga

SEQ ID NO: 1235011 - DNA, 15 bp, Homo sapiens
taatcattaaaatag

SEQ ID NO: 1235012 - DNA, 15 bp, Homo sapiens
ataatcattaaaata

SEQ ID NO: 1235013 - DNA, 15 bp, Homo sapiens
cataatcattaaaat

SEQ ID NO: 1235014 - DNA, 15 bp, Homo sapiens
gcataatcattaaaa

SEQ ID NO: 1235015 - DNA, 15 bp, Homo sapiens
ggcataatcattaaa

SEQ ID NO: 1235016 - DNA, 15 bp, Homo sapiens
aggcataatcattaa

SEQ ID NO: 1235017 - DNA, 15 bp, Homo sapiens
taggcataatcatta

SEQ ID NO: 1235018 - DNA, 15 bp, Homo sapiens
ataggcataatcatt

SEQ ID NO: 1235019 - DNA, 15 bp, Homo sapiens
aataggcataatcat

SEQ ID NO: 1235020 - DNA, 15 bp, Homo sapiens
aaataggcataatca

SEQ ID NO: 1235021 - DNA, 15 bp, Homo sapiens
taaataggcataatc

SEQ ID NO: 1235022 - DNA, 15 bp, Homo sapiens
ataaataggcataat

SEQ ID NO: 1235023 - DNA, 15 bp, Homo sapiens
tataaataggcataa

SEQ ID NO: 1235024 - DNA, 15 bp, Homo sapiens
ttataaataggcata

SEQ ID NO: 1235025 - DNA, 15 bp, Homo sapiens
cttataaataggcat

SEQ ID NO: 1235026 - DNA, 15 bp, Homo sapiens
ccttataaataggca

SEQ ID NO: 1235027 - DNA, 15 bp, Homo sapiens
cccttataaataggc

SEQ ID NO: 1235028 - DNA, 15 bp, Homo sapiens
gcccttataaatagg

SEQ ID NO: 1235029 - DNA, 15 bp, Homo sapiens
ggcccttataaatag

SEQ ID NO: 1235030 - DNA, 15 bp, Homo sapiens
aggcccttataaata

SEQ ID NO: 1235031 - DNA, 15 bp, Homo sapiens
taggcccttataaat

SEQ ID NO: 1235032 - DNA, 15 bp, Homo sapiens
ctaggcccttataaa

SEQ ID NO: 1235033 - DNA, 15 bp, Homo sapiens
tctaggcccttataa

SEQ ID NO: 1235034 - DNA, 15 bp, Homo sapiens
atctaggcccttata

SEQ ID NO: 1235035 - DNA, 15 bp, Homo sapiens
aatctaggcccttat

SEQ ID NO: 1235036 - DNA, 15 bp, Homo sapiens
taatctaggccctta

SEQ ID NO: 1235037 - DNA, 15 bp, Homo sapiens
ctaatctaggccctt

SEQ ID NO: 1235038 - DNA, 15 bp, Homo sapiens
cctaatctaggccct

SEQ ID NO: 1235039 - DNA, 15 bp, Homo sapiens
tcctaatctaggccc

SEQ ID NO: 1235040 - DNA, 15 bp, Homo sapiens
atcctaatctaggcc

SEQ ID NO: 1235041 - DNA, 15 bp, Homo sapiens
aatcctaatctaggc

SEQ ID NO: 1235042 - DNA, 15 bp, Homo sapiens
gaatcctaatctagg

SEQ ID NO: 1235043 - DNA, 15 bp, Homo sapiens
tgaatcctaatctag

SEQ ID NO: 1235044 - DNA, 15 bp, Homo sapiens
atgaatcctaatcta

SEQ ID NO: 1235045 - DNA, 15 bp, Homo sapiens
aatgaatcctaatct

SEQ ID NO: 1235046 - DNA, 15 bp, Homo sapiens
caatgaatcctaatc

SEQ ID NO: 1235047 - DNA, 15 bp, Homo sapiens
ccaatgaatcctaat

SEQ ID NO: 1235048 - DNA, 15 bp, Homo sapiens
cccaatgaatcctaa

SEQ ID NO: 1235049 - DNA, 15 bp, Homo sapiens
tcccaatgaatccta

SEQ ID NO: 1235050 - DNA, 15 bp, Homo sapiens
ttcccaatgaatcct

SEQ ID NO: 1235051 - DNA, 15 bp, Homo sapiens
tttcccaatgaatcc

SEQ ID NO: 1235052 - DNA, 15 bp, Homo sapiens
gtttcccaatgaatc

SEQ ID NO: 1235053 - DNA, 15 bp, Homo sapiens
tgtttcccaatgaat

SEQ ID NO: 1235054 - DNA, 15 bp, Homo sapiens
ctgtttcccaatgaa

SEQ ID NO: 1235055 - DNA, 15 bp, Homo sapiens
actgtttcccaatga

SEQ ID NO: 1235056 - DNA, 15 bp, Homo sapiens
cactgtttcccaatg

SEQ ID NO: 1235057 - DNA, 15 bp, Homo sapiens
acactgtttcccaat

SEQ ID NO: 1235058 - DNA, 15 bp, Homo sapiens
cacactgtttcccaa

SEQ ID NO: 1235059 - DNA, 15 bp, Homo sapiens
acacactgtttccca

SEQ ID NO: 1235060 - DNA, 15 bp, Homo sapiens
aacacactgtttccc

SEQ ID NO: 1235061 - DNA, 15 bp, Homo sapiens
taacacactgtttcc

SEQ ID NO: 1235062 - DNA, 15 bp, Homo sapiens
gtaacacactgtttc

SEQ ID NO: 1235063 - DNA, 15 bp, Homo sapiens
tgtaacacactgttt

SEQ ID NO: 1235064 - DNA, 15 bp, Homo sapiens
atgtaacacactgtt

SEQ ID NO: 1235065 - DNA, 15 bp, Homo sapiens
tatgtaacacactgt

SEQ ID NO: 1235066 - DNA, 15 bp, Homo sapiens
atatgtaacacactg

SEQ ID NO: 1235067 - DNA, 15 bp, Homo sapiens
catatgtaacacact

SEQ ID NO: 1235068 - DNA, 15 bp, Homo sapiens
tcatatgtaacacac

SEQ ID NO: 1235069 - DNA, 15 bp, Homo sapiens
gtcatatgtaacaca

SEQ ID NO: 1235070 - DNA, 15 bp, Homo sapiens
tgtcatatgtaacac

SEQ ID NO: 1235071 - DNA, 15 bp, Homo sapiens
ctgtcatatgtaaca

SEQ ID NO: 1235072 - DNA, 15 bp, Homo sapiens
tctgtcatatgtaac

SEQ ID NO: 1235073 - DNA, 15 bp, Homo sapiens
ttctgtcatatgtaa

SEQ ID NO: 1235074 - DNA, 15 bp, Homo sapiens
cttctgtcatatgta

SEQ ID NO: 1235075 - DNA, 15 bp, Homo sapiens
acttctgtcatatgt

SEQ ID NO: 1235076 - DNA, 15 bp, Homo sapiens
tacttctgtcatatg

SEQ ID NO: 1235077 - DNA, 15 bp, Homo sapiens
ttacttctgtcatat

SEQ ID NO: 1235078 - DNA, 15 bp, Homo sapiens
cttacttctgtcata

SEQ ID NO: 1235079 - DNA, 15 bp, Homo sapiens
ccttacttctgtcat

SEQ ID NO: 1235080 - DNA, 15 bp, Homo sapiens
tccttacttctgtca

SEQ ID NO: 1235081 - DNA, 15 bp, Homo sapiens
ctccttacttctgtc

SEQ ID NO: 1235082 - DNA, 15 bp, Homo sapiens
tctccttacttctgt

SEQ ID NO: 1235083 - DNA, 15 bp, Homo sapiens
atctccttacttctg

SEQ ID NO: 1235084 - DNA, 15 bp, Homo sapiens
catctccttacttct

SEQ ID NO: 1235085 - DNA, 15 bp, Homo sapiens
tcatctccttacttc

SEQ ID NO: 1235086 - DNA, 15 bp, Homo sapiens
atcatctccttactt

SEQ ID NO: 1235087 - DNA, 15 bp, Homo sapiens
gatcatctccttact

SEQ ID NO: 1235088 - DNA, 15 bp, Homo sapiens
tgatcatctccttac

SEQ ID NO: 1235089 - DNA, 15 bp, Homo sapiens
ttgatcatctcctta

SEQ ID NO: 1235090 - DNA, 15 bp, Homo sapiens
tttgatcatctcctt

SEQ ID NO: 1235091 - DNA, 15 bp, Homo sapiens
ctttgatcatctcct

SEQ ID NO: 1235092 - DNA, 15 bp, Homo sapiens
tctttgatcatctcc

SEQ ID NO: 1235093 - DNA, 15 bp, Homo sapiens
ttctttgatcatctc

SEQ ID NO: 1235094 - DNA, 15 bp, Homo sapiens
attctttgatcatct

SEQ ID NO: 1235095 - DNA, 15 bp, Homo sapiens
cattctttgatcatc

SEQ ID NO: 1235096 - DNA, 15 bp, Homo sapiens
tcattctttgatcat

SEQ ID NO: 1235097 - DNA, 15 bp, Homo sapiens
atcattctttgatca

SEQ ID NO: 1235098 - DNA, 15 bp, Homo sapiens
aatcattctttgatc

SEQ ID NO: 1235099 - DNA, 15 bp, Homo sapiens
aaatcattctttgat

SEQ ID NO: 1235100 - DNA, 15 bp, Homo sapiens
gaaatcattctttga

SEQ ID NO: 1235101 - DNA, 15 bp, Homo sapiens
tgaaatcattctttg

SEQ ID NO: 1235102 - DNA, 15 bp, Homo sapiens
atgaaatcattcttt

SEQ ID NO: 1235103 - DNA, 15 bp, Homo sapiens
tatgaaatcattctt

SEQ ID NO: 1235104 - DNA, 15 bp, Homo sapiens
ctatgaaatcattct

SEQ ID NO: 1235105 - DNA, 15 bp, Homo sapiens
gctatgaaatcattc

SEQ ID NO: 1235106 - DNA, 15 bp, Homo sapiens
ggctatgaaatcatt

SEQ ID NO: 1235107 - DNA, 15 bp, Homo sapiens
cggctatgaaatcat

SEQ ID NO: 1235108 - DNA, 15 bp, Homo sapiens
ccggctatgaaatca

SEQ ID NO: 1235109 - DNA, 15 bp, Homo sapiens
tccggctatgaaatc

SEQ ID NO: 1235110 - DNA, 15 bp, Homo sapiens
atccggctatgaaat

SEQ ID NO: 1235111 - DNA, 15 bp, Homo sapiens
catccggctatgaaa

SEQ ID NO: 1235112 - DNA, 15 bp, Homo sapiens
acatccggctatgaa

SEQ ID NO: 1235113 - DNA, 15 bp, Homo sapiens
cacatccggctatga

SEQ ID NO: 1235114 - DNA, 15 bp, Homo sapiens
ccacatccggctatg

SEQ ID NO: 1235115 - DNA, 15 bp, Homo sapiens
accacatccggctat

SEQ ID NO: 1235116 - DNA, 15 bp, Homo sapiens
caccacatccggcta

SEQ ID NO: 1235117 - DNA, 15 bp, Homo sapiens
ccaccacatccggct

SEQ ID NO: 1235118 - DNA, 15 bp, Homo sapiens
gccaccacatccggc

SEQ ID NO: 1235119 - DNA, 15 bp, Homo sapiens
agccaccacatccgg

SEQ ID NO: 1235120 - DNA, 15 bp, Homo sapiens
gagccaccacatccg

SEQ ID NO: 1235121 - DNA, 15 bp, Homo sapiens
tgagccaccacatcc

SEQ ID NO: 1235122 - DNA, 15 bp, Homo sapiens
atgagccaccacatc

SEQ ID NO: 1235123 - DNA, 15 bp, Homo sapiens
catgagccaccacat

SEQ ID NO: 1235124 - DNA, 15 bp, Homo sapiens
acatgagccaccaca

SEQ ID NO: 1235125 - DNA, 15 bp, Homo sapiens
gacatgagccaccac

SEQ ID NO: 1235126 - DNA, 15 bp, Homo sapiens
aggattacagacatg

SEQ ID NO: 1235127 - DNA, 15 bp, Homo sapiens
taggattacagacat

SEQ ID NO: 1235128 - DNA, 15 bp, Homo sapiens
ctaggattacagaca

SEQ ID NO: 1235129 - DNA, 15 bp, Homo sapiens
tctaggattacagac

SEQ ID NO: 1235130 - DNA, 15 bp, Homo sapiens
ttctaggattacaga

SEQ ID NO: 1235131 - DNA, 15 bp, Homo sapiens
gttctaggattacag

SEQ ID NO: 1235132 - DNA, 15 bp, Homo sapiens
agttctaggattaca

SEQ ID NO: 1235133 - DNA, 15 bp, Homo sapiens
aagttctaggattac

SEQ ID NO: 1235134 - DNA, 15 bp, Homo sapiens
aaagttctaggatta

SEQ ID NO: 1235135 - DNA, 15 bp, Homo sapiens
caaagttctaggatt

SEQ ID NO: 1235136 - DNA, 15 bp, Homo sapiens
ccaaagttctaggat

SEQ ID NO: 1235137 - DNA, 15 bp, Homo sapiens
cccaaagttctagga

SEQ ID NO: 1235138 - DNA, 15 bp, Homo sapiens
tcccaaagttctagg

SEQ ID NO: 1235139 - DNA, 15 bp, Homo sapiens
ctcccaaagttctag

SEQ ID NO: 1235140 - DNA, 15 bp, Homo sapiens
cctcccaaagttcta

SEQ ID NO: 1235141 - DNA, 15 bp, Homo sapiens
acctcccaaagttct

SEQ ID NO: 1235142 - DNA, 15 bp, Homo sapiens
gacctcccaaagttc

SEQ ID NO: 1235143 - DNA, 15 bp, Homo sapiens
tgacctcccaaagtt

SEQ ID NO: 1235144 - DNA, 15 bp, Homo sapiens
accttgacctcccaa

SEQ ID NO: 1235145 - DNA, 15 bp, Homo sapiens
caccttgacctccca

SEQ ID NO: 1235146 - DNA, 15 bp, Homo sapiens
ccaccttgacctccc

SEQ ID NO: 1235147 - DNA, 15 bp, Homo sapiens
acccaccttgacctc

SEQ ID NO: 1235148 - DNA, 15 bp, Homo sapiens
cacccaccttgacct

SEQ ID NO: 1235149 - DNA, 15 bp, Homo sapiens
ccacccaccttgacc

SEQ ID NO: 1235150 - DNA, 15 bp, Homo sapiens
tccacccaccttgac

SEQ ID NO: 1235151 - DNA, 15 bp, Homo sapiens
atccacccaccttga

SEQ ID NO: 1235152 - DNA, 15 bp, Homo sapiens
tccctgacctcaagt

SEQ ID NO: 1235153 - DNA, 15 bp, Homo sapiens
ctccctgacctcaag

SEQ ID NO: 1235154 - DNA, 15 bp, Homo sapiens
actccctgacctcaa

SEQ ID NO: 1235155 - DNA, 15 bp, Homo sapiens
gactccctgacctca

SEQ ID NO: 1235156 - DNA, 15 bp, Homo sapiens
ggactccctgacctc

SEQ ID NO: 1235157 - DNA, 15 bp, Homo sapiens
tggactccctgacct

SEQ ID NO: 1235158 - DNA, 15 bp, Homo sapiens
ctggactccctgacc

SEQ ID NO: 1235159 - DNA, 15 bp, Homo sapiens
cctggactccctgac

SEQ ID NO: 1235160 - DNA, 15 bp, Homo sapiens
tcctggactccctga

SEQ ID NO: 1235161 - DNA, 15 bp, Homo sapiens
gtcctggactccctg

SEQ ID NO: 1235162 - DNA, 15 bp, Homo sapiens
ggtcctggactccct

SEQ ID NO: 1235163 - DNA, 15 bp, Homo sapiens
tggtcctggactccc

SEQ ID NO: 1235164 - DNA, 15 bp, Homo sapiens
ttggtcctggactcc

SEQ ID NO: 1235165 - DNA, 15 bp, Homo sapiens
gttggtcctggactc

SEQ ID NO: 1235166 - DNA, 15 bp, Homo sapiens
ggttggtcctggact

SEQ ID NO: 1235167 - DNA, 15 bp, Homo sapiens
aggttggtcctggac

SEQ ID NO: 1235168 - DNA, 15 bp, Homo sapiens
caggttggtcctgga

SEQ ID NO: 1235169 - DNA, 15 bp, Homo sapiens
ccaggttggtcctgg

SEQ ID NO: 1235170 - DNA, 15 bp, Homo sapiens
gccaggttggtcctg

SEQ ID NO: 1235171 - DNA, 15 bp, Homo sapiens
ggccaggttggtcct

SEQ ID NO: 1235172 - DNA, 15 bp, Homo sapiens
aggccaggttggtcc

SEQ ID NO: 1235173 - DNA, 15 bp, Homo sapiens
taggccaggttggtc

SEQ ID NO: 1235174 - DNA, 15 bp, Homo sapiens
ataggccaggttggt

SEQ ID NO: 1235175 - DNA, 15 bp, Homo sapiens
cataggccaggttgg

SEQ ID NO: 1235176 - DNA, 15 bp, Homo sapiens
acataggccaggttg

SEQ ID NO: 1235177 - DNA, 15 bp, Homo sapiens
cacataggccaggtt

SEQ ID NO: 1235178 - DNA, 15 bp, Homo sapiens
ccacataggccaggt

SEQ ID NO: 1235179 - DNA, 15 bp, Homo sapiens
accacataggccagg

SEQ ID NO: 1235180 - DNA, 15 bp, Homo sapiens
caccacataggccag

SEQ ID NO: 1235181 - DNA, 15 bp, Homo sapiens
tcaccacataggcca

SEQ ID NO: 1235182 - DNA, 15 bp, Homo sapiens
ttcaccacataggcc

SEQ ID NO: 1235183 - DNA, 15 bp, Homo sapiens
tttcaccacataggc

SEQ ID NO: 1235184 - DNA, 15 bp, Homo sapiens
gtttcaccacatagg

SEQ ID NO: 1235185 - DNA, 15 bp, Homo sapiens
ggtttcaccacatag

SEQ ID NO: 1235186 - DNA, 15 bp, Homo sapiens
gggtttcaccacata

SEQ ID NO: 1235187 - DNA, 15 bp, Homo sapiens
aggggtttcaccaca

SEQ ID NO: 1235188 - DNA, 15 bp, Homo sapiens
aaggggtttcaccac

SEQ ID NO: 1235189 - DNA, 15 bp, Homo sapiens
gaaggggtttcacca

SEQ ID NO: 1235190 - DNA, 15 bp, Homo sapiens
agaaggggtttcacc

SEQ ID NO: 1235191 - DNA, 15 bp, Homo sapiens
gagaaggggtttcac

SEQ ID NO: 1235192 - DNA, 15 bp, Homo sapiens
gtttttagtagagaa

SEQ ID NO: 1235193 - DNA, 15 bp, Homo sapiens
gctaatttttttgtg

SEQ ID NO: 1235194 - DNA, 15 bp, Homo sapiens
ccagctgggattaca

SEQ ID NO: 1235195 - DNA, 15 bp, Homo sapiens
gccagctgggattac

SEQ ID NO: 1235196 - DNA, 15 bp, Homo sapiens
agccagctgggatta

SEQ ID NO: 1235197 - DNA, 15 bp, Homo sapiens
aagccagctgggatt

SEQ ID NO: 1235198 - DNA, 15 bp, Homo sapiens
gaagccagctgggat

SEQ ID NO: 1235199 - DNA, 15 bp, Homo sapiens
tgaagccagctggga

SEQ ID NO: 1235200 - DNA, 15 bp, Homo sapiens
ttgaagccagctggg

SEQ ID NO: 1235201 - DNA, 15 bp, Homo sapiens
cttgaagccagctgg

SEQ ID NO: 1235202 - DNA, 15 bp, Homo sapiens
gcttgaagccagctg

SEQ ID NO: 1235203 - DNA, 15 bp, Homo sapiens
tgcttgaagccagct

SEQ ID NO: 1235204 - DNA, 15 bp, Homo sapiens
ttgcttgaagccagc

SEQ ID NO: 1235205 - DNA, 15 bp, Homo sapiens
tggattgcttgaagc

SEQ ID NO: 1235206 - DNA, 15 bp, Homo sapiens
gtggattgcttgaag

SEQ ID NO: 1235207 - DNA, 15 bp, Homo sapiens
ggtggattgcttgaa

SEQ ID NO: 1235208 - DNA, 15 bp, Homo sapiens
aggtggattgcttga

SEQ ID NO: 1235209 - DNA, 15 bp, Homo sapiens
caggtggattgcttg

SEQ ID NO: 1235210 - DNA, 15 bp, Homo sapiens
gcaggtggattgctt

SEQ ID NO: 1235211 - DNA, 15 bp, Homo sapiens
ggcaggtggattgct

SEQ ID NO: 1235212 - DNA, 15 bp, Homo sapiens
aggcaggtggattgc

SEQ ID NO: 1235213 - DNA, 15 bp, Homo sapiens
aaggcaggtggattg

SEQ ID NO: 1235214 - DNA, 15 bp, Homo sapiens
caaggcaggtggatt

SEQ ID NO: 1235215 - DNA, 15 bp, Homo sapiens
aaactttgggaggcc

SEQ ID NO: 1235216 - DNA, 15 bp, Homo sapiens
aaaactttgggaggc

SEQ ID NO: 1235217 - DNA, 15 bp, Homo sapiens
caaaactttgggagg

SEQ ID NO: 1235218 - DNA, 15 bp, Homo sapiens
tcaaaactttgggag

SEQ ID NO: 1235219 - DNA, 15 bp, Homo sapiens
ctcaaaactttggga

SEQ ID NO: 1235220 - DNA, 15 bp, Homo sapiens
tctcaaaactttggg

SEQ ID NO: 1235221 - DNA, 15 bp, Homo sapiens
atctcaaaactttgg

SEQ ID NO: 1235222 - DNA, 15 bp, Homo sapiens
aatctcaaaactttg

SEQ ID NO: 1235223 - DNA, 15 bp, Homo sapiens
taatctcaaaacttt

SEQ ID NO: 1235224 - DNA, 15 bp, Homo sapiens
gtaatctcaaaactt

SEQ ID NO: 1235225 - DNA, 15 bp, Homo sapiens
tgtaatctcaaaact

SEQ ID NO: 1235226 - DNA, 15 bp, Homo sapiens
ctgtaatctcaaaac

SEQ ID NO: 1235227 - DNA, 15 bp, Homo sapiens
tctgtaatctcaaaa

SEQ ID NO: 1235228 - DNA, 15 bp, Homo sapiens
gtctgtaatctcaaa

SEQ ID NO: 1235229 - DNA, 15 bp, Homo sapiens
tgtctgtaatctcaa

SEQ ID NO: 1235230 - DNA, 15 bp, Homo sapiens
atgtctgtaatctca

SEQ ID NO: 1235231 - DNA, 15 bp, Homo sapiens
tatgtctgtaatctc

SEQ ID NO: 1235232 - DNA, 15 bp, Homo sapiens
ttatgtctgtaatct

SEQ ID NO: 1235233 - DNA, 15 bp, Homo sapiens
cttatgtctgtaatc

SEQ ID NO: 1235234 - DNA, 15 bp, Homo sapiens
gcttatgtctgtaat

SEQ ID NO: 1235235 - DNA, 15 bp, Homo sapiens
ggcttatgtctgtaa

SEQ ID NO: 1235236 - DNA, 15 bp, Homo sapiens
tggcttatgtctgta

SEQ ID NO: 1235237 - DNA, 15 bp, Homo sapiens
gtggcttatgtctgt

SEQ ID NO: 1235238 - DNA, 15 bp, Homo sapiens
agtggcttatgtctg

SEQ ID NO: 1235239 - DNA, 15 bp, Homo sapiens
cagtggcttatgtct

SEQ ID NO: 1235240 - DNA, 15 bp, Homo sapiens
acagtggcttatgtc

SEQ ID NO: 1235241 - DNA, 15 bp, Homo sapiens
aacagtggcttatgt

SEQ ID NO: 1235242 - DNA, 15 bp, Homo sapiens
gaacagtggcttatg

SEQ ID NO: 1235243 - DNA, 15 bp, Homo sapiens
ggaacagtggcttat

SEQ ID NO: 1235244 - DNA, 15 bp, Homo sapiens
aggaacagtggctta

SEQ ID NO: 1235245 - DNA, 15 bp, Homo sapiens
caggaacagtggctt

SEQ ID NO: 1235246 - DNA, 15 bp, Homo sapiens
ccaggaacagtggct

SEQ ID NO: 1235247 - DNA, 15 bp, Homo sapiens
gccaggaacagtggc

SEQ ID NO: 1235248 - DNA, 15 bp, Homo sapiens
agccaggaacagtgg

SEQ ID NO: 1235249 - DNA, 15 bp, Homo sapiens
gagccaggaacagtg

SEQ ID NO: 1235250 - DNA, 15 bp, Homo sapiens
tgagccaggaacagt

SEQ ID NO: 1235251 - DNA, 15 bp, Homo sapiens
ttgagccaggaacag

SEQ ID NO: 1235252 - DNA, 15 bp, Homo sapiens
cttgagccaggaaca

SEQ ID NO: 1235253 - DNA, 15 bp, Homo sapiens
acttgagccaggaac

SEQ ID NO: 1235254 - DNA, 15 bp, Homo sapiens
tacttgagccaggaa

SEQ ID NO: 1235255 - DNA, 15 bp, Homo sapiens
atacttgagccagga

SEQ ID NO: 1235256 - DNA, 15 bp, Homo sapiens
tatacttgagccagg

SEQ ID NO: 1235257 - DNA, 15 bp, Homo sapiens
gtatacttgagccag

SEQ ID NO: 1235258 - DNA, 15 bp, Homo sapiens
ggtatacttgagcca

SEQ ID NO: 1235259 - DNA, 15 bp, Homo sapiens
tggtatacttgagcc

SEQ ID NO: 1235260 - DNA, 15 bp, Homo sapiens
gtggtatacttgagc

SEQ ID NO: 1235261 - DNA, 15 bp, Homo sapiens
ggtggtatacttgag

SEQ ID NO: 1235262 - DNA, 15 bp, Homo sapiens
gggtggtatacttga

SEQ ID NO: 1235263 - DNA, 15 bp, Homo sapiens
agggtggtatacttg

SEQ ID NO: 1235264 - DNA, 15 bp, Homo sapiens
tagggtggtatactt

SEQ ID NO: 1235265 - DNA, 15 bp, Homo sapiens
ttagggtggtatact

SEQ ID NO: 1235266 - DNA, 15 bp, Homo sapiens
attagggtggtatac

SEQ ID NO: 1235267 - DNA, 15 bp, Homo sapiens
gattagggtggtata

SEQ ID NO: 1235268 - DNA, 15 bp, Homo sapiens
tgattagggtggtat

SEQ ID NO: 1235269 - DNA, 15 bp, Homo sapiens
ttgattagggtggta

SEQ ID NO: 1235270 - DNA, 15 bp, Homo sapiens
tttgattagggtggt

SEQ ID NO: 1235271 - DNA, 15 bp, Homo sapiens
ttttgattagggtgg

SEQ ID NO: 1235272 - DNA, 15 bp, Homo sapiens
attttgattagggtg

SEQ ID NO: 1235273 - DNA, 15 bp, Homo sapiens
aattttgattagggt

SEQ ID NO: 1235274 - DNA, 15 bp, Homo sapiens
taattttgattaggg

SEQ ID NO: 1235275 - DNA, 15 bp, Homo sapiens
ataattttgattagg

SEQ ID NO: 1235276 - DNA, 15 bp, Homo sapiens
aataattttgattag

SEQ ID NO: 1235277 - DNA, 15 bp, Homo sapiens
aaataattttgatta

SEQ ID NO: 1235278 - DNA, 15 bp, Homo sapiens
aaaataattttgatt

SEQ ID NO: 1235279 - DNA, 15 bp, Homo sapiens
aaaaataattttgat

SEQ ID NO: 1235280 - DNA, 15 bp, Homo sapiens
caaaaataattttga

SEQ ID NO: 1235281 - DNA, 15 bp, Homo sapiens
ccaaaaataattttg

SEQ ID NO: 1235282 - DNA, 15 bp, Homo sapiens
tccaaaaataatttt

SEQ ID NO: 1235283 - DNA, 15 bp, Homo sapiens
ctccaaaaataattt

SEQ ID NO: 1235284 - DNA, 15 bp, Homo sapiens
actccaaaaataatt

SEQ ID NO: 1235285 - DNA, 15 bp, Homo sapiens
aactccaaaaataat

SEQ ID NO: 1235286 - DNA, 15 bp, Homo sapiens
aaactccaaaaataa

SEQ ID NO: 1235287 - DNA, 15 bp, Homo sapiens
aaaactccaaaaata

SEQ ID NO: 1235288 - DNA, 15 bp, Homo sapiens
aaaaactccaaaaat

SEQ ID NO: 1235289 - DNA, 15 bp, Homo sapiens
aaaaaactccaaaaa

SEQ ID NO: 1235290 - DNA, 15 bp, Homo sapiens
aaaaaaactccaaaa

SEQ ID NO: 1235291 - DNA, 15 bp, Homo sapiens
aaaaaaaactccaaa

SEQ ID NO: 1235292 - DNA, 15 bp, Homo sapiens
aaaaaaaaactccaa

SEQ ID NO: 1235293 - DNA, 15 bp, Homo sapiens
gaaaaaaaaactcca

SEQ ID NO: 1235294 - DNA, 15 bp, Homo sapiens
ggaaaaaaaaactcc

SEQ ID NO: 1235295 - DNA, 15 bp, Homo sapiens
aggaaaaaaaaactc

SEQ ID NO: 1235296 - DNA, 15 bp, Homo sapiens
aaggaaaaaaaaact

SEQ ID NO: 1235297 - DNA, 15 bp, Homo sapiens
gaaggaaaaaaaaac

SEQ ID NO: 1235298 - DNA, 15 bp, Homo sapiens
aagaaggaaaaaaaa

SEQ ID NO: 1235299 - DNA, 15 bp, Homo sapiens
gaagaaggaaaaaaa

SEQ ID NO: 1235300 - DNA, 15 bp, Homo sapiens
tgaagaaggaaaaaa

SEQ ID NO: 1235301 - DNA, 15 bp, Homo sapiens
ttgaagaaggaaaaa

SEQ ID NO: 1235302 - DNA, 15 bp, Homo sapiens
gttgaagaaggaaaa

SEQ ID NO: 1235303 - DNA, 15 bp, Homo sapiens
tgttgaagaaggaaa

SEQ ID NO: 1235304 - DNA, 15 bp, Homo sapiens
ctgttgaagaaggaa

SEQ ID NO: 1235305 - DNA, 15 bp, Homo sapiens
actgttgaagaagga

SEQ ID NO: 1235306 - DNA, 15 bp, Homo sapiens
aactgttgaagaagg

SEQ ID NO: 1235307 - DNA, 15 bp, Homo sapiens
taactgttgaagaag

SEQ ID NO: 1235308 - DNA, 15 bp, Homo sapiens
ataactgttgaagaa

SEQ ID NO: 1235309 - DNA, 15 bp, Homo sapiens
cataactgttgaaga

SEQ ID NO: 1235310 - DNA, 15 bp, Homo sapiens
acataactgttgaag

SEQ ID NO: 1235311 - DNA, 15 bp, Homo sapiens
aacataactgttgaa

SEQ ID NO: 1235312 - DNA, 15 bp, Homo sapiens
taacataactgttga

SEQ ID NO: 1235313 - DNA, 15 bp, Homo sapiens
ctaacataactgttg

SEQ ID NO: 1235314 - DNA, 15 bp, Homo sapiens
tctaacataactgtt

SEQ ID NO: 1235315 - DNA, 15 bp, Homo sapiens
ctctaacataactgt

SEQ ID NO: 1235316 - DNA, 15 bp, Homo sapiens
tctctaacataactg

SEQ ID NO: 1235317 - DNA, 15 bp, Homo sapiens
atctctaacataact

SEQ ID NO: 1235318 - DNA, 15 bp, Homo sapiens
aatctctaacataac

SEQ ID NO: 1235319 - DNA, 15 bp, Homo sapiens
taatctctaacataa

SEQ ID NO: 1235320 - DNA, 15 bp, Homo sapiens
ataatctctaacata

SEQ ID NO: 1235321 - DNA, 15 bp, Homo sapiens
cataatctctaacat

SEQ ID NO: 1235322 - DNA, 15 bp, Homo sapiens
ccataatctctaaca

SEQ ID NO: 1235323 - DNA, 15 bp, Homo sapiens
tccataatctctaac

SEQ ID NO: 1235324 - DNA, 15 bp, Homo sapiens
atccataatctctaa

SEQ ID NO: 1235325 - DNA, 15 bp, Homo sapiens
aatccataatctcta

SEQ ID NO: 1235326 - DNA, 15 bp, Homo sapiens
aaatccataatctct

SEQ ID NO: 1235327 - DNA, 15 bp, Homo sapiens
aaaatccataatctc

SEQ ID NO: 1235328 - DNA, 15 bp, Homo sapiens
aaaaatccataatct

SEQ ID NO: 1235329 - DNA, 15 bp, Homo sapiens
aaaaaatccataatc

SEQ ID NO: 1235330 - DNA, 15 bp, Homo sapiens
aaaaaaatccataat

SEQ ID NO: 1235331 - DNA, 15 bp, Homo sapiens
caaaaaaatccataa

SEQ ID NO: 1235332 - DNA, 15 bp, Homo sapiens
acaaaaaaatccata

SEQ ID NO: 1235333 - DNA, 15 bp, Homo sapiens
aacaaaaaaatccat

SEQ ID NO: 1235334 - DNA, 15 bp, Homo sapiens
aaacaaaaaaatcca

SEQ ID NO: 1235335 - DNA, 15 bp, Homo sapiens
caaacaaaaaaatcc

SEQ ID NO: 1235336 - DNA, 15 bp, Homo sapiens
gcaaacaaaaaaatc

SEQ ID NO: 1235337 - DNA, 15 bp, Homo sapiens
agcaaacaaaaaaat

SEQ ID NO: 1235338 - DNA, 15 bp, Homo sapiens
aaagcaaacaaaaaa

SEQ ID NO: 1235339 - DNA, 15 bp, Homo sapiens
aaaagcaaacaaaaa

SEQ ID NO: 1235340 - DNA, 15 bp, Homo sapiens
caaaagcaaacaaaa

SEQ ID NO: 1235341 - DNA, 15 bp, Homo sapiens
acaaaagcaaacaaa

SEQ ID NO: 1235342 - DNA, 15 bp, Homo sapiens
aacaaaagcaaacaa

SEQ ID NO: 1235343 - DNA, 15 bp, Homo sapiens
aaacaaaagcaaaca

SEQ ID NO: 1235344 - DNA, 15 bp, Homo sapiens
caaacaaaagcaaac

SEQ ID NO: 1235345 - DNA, 15 bp, Homo sapiens
acaaacaaaagcaaa

SEQ ID NO: 1235346 - DNA, 15 bp, Homo sapiens
aacaaacaaaagcaa

SEQ ID NO: 1235347 - DNA, 15 bp, Homo sapiens
aaacaaacaaaagca

SEQ ID NO: 1235348 - DNA, 15 bp, Homo sapiens
aggtggctccattag

SEQ ID NO: 1235349 - DNA, 15 bp, Homo sapiens
gaggtggctccatta

SEQ ID NO: 1235350 - DNA, 15 bp, Homo sapiens
agaggtggctccatt

SEQ ID NO: 1235351 - DNA, 15 bp, Homo sapiens
cagaggtggctccat

SEQ ID NO: 1235352 - DNA, 15 bp, Homo sapiens
tcagaggtggctcca

SEQ ID NO: 1235353 - DNA, 15 bp, Homo sapiens
atcagaggtggctcc

SEQ ID NO: 1235354 - DNA, 15 bp, Homo sapiens
aatcagaggtggctc

SEQ ID NO: 1235355 - DNA, 15 bp, Homo sapiens
taatcagaggtggct

SEQ ID NO: 1235356 - DNA, 15 bp, Homo sapiens
gtaatcagaggtggc

SEQ ID NO: 1235357 - DNA, 15 bp, Homo sapiens
tgtaatcagaggtgg

SEQ ID NO: 1235358 - DNA, 15 bp, Homo sapiens
gtgtaatcagaggtg

SEQ ID NO: 1235359 - DNA, 15 bp, Homo sapiens
tgtgtaatcagaggt

SEQ ID NO: 1235360 - DNA, 15 bp, Homo sapiens
gtgtgtaatcagagg

SEQ ID NO: 1235361 - DNA, 15 bp, Homo sapiens
agtgtgtaatcagag

SEQ ID NO: 1235362 - DNA, 15 bp, Homo sapiens
aagtgtgtaatcaga

SEQ ID NO: 1235363 - DNA, 15 bp, Homo sapiens
gaagtgtgtaatcag

SEQ ID NO: 1235364 - DNA, 15 bp, Homo sapiens
tgaagtgtgtaatca

SEQ ID NO: 1235365 - DNA, 15 bp, Homo sapiens
ttgaagtgtgtaatc

SEQ ID NO: 1235366 - DNA, 15 bp, Homo sapiens
cttgaagtgtgtaat

SEQ ID NO: 1235367 - DNA, 15 bp, Homo sapiens
ccttgaagtgtgtaa

SEQ ID NO: 1235368 - DNA, 15 bp, Homo sapiens
cccttgaagtgtgta

SEQ ID NO: 1235369 - DNA, 15 bp, Homo sapiens
gcccttgaagtgtgt

SEQ ID NO: 1235370 - DNA, 15 bp, Homo sapiens
tgcccttgaagtgtg

SEQ ID NO: 1235371 - DNA, 15 bp, Homo sapiens
gtgcccttgaagtgt

SEQ ID NO: 1235372 - DNA, 15 bp, Homo sapiens
agtgcccttgaagtg

SEQ ID NO: 1235373 - DNA, 15 bp, Homo sapiens
gagtgcccttgaagt

SEQ ID NO: 1235374 - DNA, 15 bp, Homo sapiens
ggagtgcccttgaag

SEQ ID NO: 1235375 - DNA, 15 bp, Homo sapiens
tggagtgcccttgaa

SEQ ID NO: 1235376 - DNA, 15 bp, Homo sapiens
gtggagtgcccttga

SEQ ID NO: 1235377 - DNA, 15 bp, Homo sapiens
ggtggagtgcccttg

SEQ ID NO: 1235378 - DNA, 15 bp, Homo sapiens
aggtggagtgccctt

SEQ ID NO: 1235379 - DNA, 15 bp, Homo sapiens
gaggtggagtgccct

SEQ ID NO: 1235380 - DNA, 15 bp, Homo sapiens
agaggtggagtgccc

SEQ ID NO: 1235381 - DNA, 15 bp, Homo sapiens
gagaggtggagtgcc

SEQ ID NO: 1235382 - DNA, 15 bp, Homo sapiens
tgagaggtggagtgc

SEQ ID NO: 1235383 - DNA, 15 bp, Homo sapiens
ctgagaggtggagtg

SEQ ID NO: 1235384 - DNA, 15 bp, Homo sapiens
cctgagaggtggagt

SEQ ID NO: 1235385 - DNA, 15 bp, Homo sapiens
tcctgagaggtggag

SEQ ID NO: 1235386 - DNA, 15 bp, Homo sapiens
atcctgagaggtgga

SEQ ID NO: 1235387 - DNA, 15 bp, Homo sapiens
tatcctgagaggtgg

SEQ ID NO: 1235388 - DNA, 15 bp, Homo sapiens
ttatcctgagaggtg

SEQ ID NO: 1235389 - DNA, 15 bp, Homo sapiens
tttatcctgagaggt

SEQ ID NO: 1235390 - DNA, 15 bp, Homo sapiens
ctttatcctgagagg

SEQ ID NO: 1235391 - DNA, 15 bp, Homo sapiens
tctttatcctgagag

SEQ ID NO: 1235392 - DNA, 15 bp, Homo sapiens
atctttatcctgaga

SEQ ID NO: 1235393 - DNA, 15 bp, Homo sapiens
tatctttatcctgag

SEQ ID NO: 1235394 - DNA, 15 bp, Homo sapiens
ttatctttatcctga

SEQ ID NO: 1235395 - DNA, 15 bp, Homo sapiens
tttatctttatcctg

SEQ ID NO: 1235396 - DNA, 15 bp, Homo sapiens
ttttatctttatcct

SEQ ID NO: 1235397 - DNA, 15 bp, Homo sapiens
cttttatctttatcc

SEQ ID NO: 1235398 - DNA, 15 bp, Homo sapiens
acttttatctttatc

SEQ ID NO: 1235399 - DNA, 15 bp, Homo sapiens
aacttttatctttat

SEQ ID NO: 1235400 - DNA, 15 bp, Homo sapiens
gaacttttatcttta

SEQ ID NO: 1235401 - DNA, 15 bp, Homo sapiens
ggaacttttatcttt

SEQ ID NO: 1235402 - DNA, 15 bp, Homo sapiens
aggaacttttatctt

SEQ ID NO: 1235403 - DNA, 15 bp, Homo sapiens
aaggaacttttatct

SEQ ID NO: 1235404 - DNA, 15 bp, Homo sapiens
caaggaacttttatc

SEQ ID NO: 1235405 - DNA, 15 bp, Homo sapiens
gcaaggaacttttat

SEQ ID NO: 1235406 - DNA, 15 bp, Homo sapiens
ggcaaggaactttta

SEQ ID NO: 1235407 - DNA, 15 bp, Homo sapiens
tggcaaggaactttt

SEQ ID NO: 1235408 - DNA, 15 bp, Homo sapiens
atggcaaggaacttt

SEQ ID NO: 1235409 - DNA, 15 bp, Homo sapiens
catggcaaggaactt

SEQ ID NO: 1235410 - DNA, 15 bp, Homo sapiens
ccatggcaaggaact

SEQ ID NO: 1235411 - DNA, 15 bp, Homo sapiens
accatggcaaggaac

SEQ ID NO: 1235412 - DNA, 15 bp, Homo sapiens
aaccatggcaaggaa

SEQ ID NO: 1235413 - DNA, 15 bp, Homo sapiens
caaccatggcaagga

SEQ ID NO: 1235414 - DNA, 15 bp, Homo sapiens
tcaaccatggcaagg

SEQ ID NO: 1235415 - DNA, 15 bp, Homo sapiens
gtcaaccatggcaag

SEQ ID NO: 1235416 - DNA, 15 bp, Homo sapiens
tgtcaaccatggcaa

SEQ ID NO: 1235417 - DNA, 15 bp, Homo sapiens
atgtcaaccatggca

SEQ ID NO: 1235418 - DNA, 15 bp, Homo sapiens
catgtcaaccatggc

SEQ ID NO: 1235419 - DNA, 15 bp, Homo sapiens
ccatgtcaaccatgg

SEQ ID NO: 1235420 - DNA, 15 bp, Homo sapiens
accatgtcaaccatg

SEQ ID NO: 1235421 - DNA, 15 bp, Homo sapiens
gaccatgtcaaccat

SEQ ID NO: 1235422 - DNA, 15 bp, Homo sapiens
agaccatgtcaacca

SEQ ID NO: 1235423 - DNA, 15 bp, Homo sapiens
tagaccatgtcaacc

SEQ ID NO: 1235424 - DNA, 15 bp, Homo sapiens
gtagaccatgtcaac

SEQ ID NO: 1235425 - DNA, 15 bp, Homo sapiens
ggtagaccatgtcaa

SEQ ID NO: 1235426 - DNA, 15 bp, Homo sapiens
gggtagaccatgtca

SEQ ID NO: 1235427 - DNA, 15 bp, Homo sapiens
ggggtagaccatgtc

SEQ ID NO: 1235428 - DNA, 15 bp, Homo sapiens
tggggtagaccatgt

SEQ ID NO: 1235429 - DNA, 15 bp, Homo sapiens
ttggggtagaccatg

SEQ ID NO: 1235430 - DNA, 15 bp, Homo sapiens
cttggggtagaccat

SEQ ID NO: 1235431 - DNA, 15 bp, Homo sapiens
ccttggggtagacca

SEQ ID NO: 1235432 - DNA, 15 bp, Homo sapiens
tccttggggtagacc

SEQ ID NO: 1235433 - DNA, 15 bp, Homo sapiens
ctccttggggtagac

SEQ ID NO: 1235434 - DNA, 15 bp, Homo sapiens
gctccttggggtaga

SEQ ID NO: 1235435 - DNA, 15 bp, Homo sapiens
agctccttggggtag

SEQ ID NO: 1235436 - DNA, 15 bp, Homo sapiens
aagctccttggggta

SEQ ID NO: 1235437 - DNA, 15 bp, Homo sapiens
aaagctccttggggt

SEQ ID NO: 1235438 - DNA, 15 bp, Homo sapiens
gaaagctccttgggg

SEQ ID NO: 1235439 - DNA, 15 bp, Homo sapiens
ggaaagctccttggg

SEQ ID NO: 1235440 - DNA, 15 bp, Homo sapiens
tggaaagctccttgg

SEQ ID NO: 1235441 - DNA, 15 bp, Homo sapiens
gtggaaagctccttg

SEQ ID NO: 1235442 - DNA, 15 bp, Homo sapiens
agtggaaagctcctt

SEQ ID NO: 1235443 - DNA, 15 bp, Homo sapiens
gagtggaaagctcct

SEQ ID NO: 1235444 - DNA, 15 bp, Homo sapiens
cgagtggaaagctcc

SEQ ID NO: 1235445 - DNA, 15 bp, Homo sapiens
gcgagtggaaagctc

SEQ ID NO: 1235446 - DNA, 15 bp, Homo sapiens
tgcgagtggaaagct

SEQ ID NO: 1235447 - DNA, 15 bp, Homo sapiens
atgcgagtggaaagc

SEQ ID NO: 1235448 - DNA, 15 bp, Homo sapiens
gatgcgagtggaaag

SEQ ID NO: 1235449 - DNA, 15 bp, Homo sapiens
agatgcgagtggaaa

SEQ ID NO: 1235450 - DNA, 15 bp, Homo sapiens
aagatgcgagtggaa

SEQ ID NO: 1235451 - DNA, 15 bp, Homo sapiens
gaagatgcgagtgga

SEQ ID NO: 1235452 - DNA, 15 bp, Homo sapiens
tgaagatgcgagtgg

SEQ ID NO: 1235453 - DNA, 15 bp, Homo sapiens
ttgaagatgcgagtg

SEQ ID NO: 1235454 - DNA, 15 bp, Homo sapiens
gttgaagatgcgagt

SEQ ID NO: 1235455 - DNA, 15 bp, Homo sapiens
ggttgaagatgcgag

SEQ ID NO: 1235456 - DNA, 15 bp, Homo sapiens
tggttgaagatgcga

SEQ ID NO: 1235457 - DNA, 15 bp, Homo sapiens
ttggttgaagatgcg

SEQ ID NO: 1235458 - DNA, 15 bp, Homo sapiens
cttggttgaagatgc

SEQ ID NO: 1235459 - DNA, 15 bp, Homo sapiens
acttggttgaagatg

SEQ ID NO: 1235460 - DNA, 15 bp, Homo sapiens
aacttggttgaagat

SEQ ID NO: 1235461 - DNA, 15 bp, Homo sapiens
gaacttggttgaaga

SEQ ID NO: 1235462 - DNA, 15 bp, Homo sapiens
ggaacttggttgaag

SEQ ID NO: 1235463 - DNA, 15 bp, Homo sapiens
gggaacttggttgaa

SEQ ID NO: 1235464 - DNA, 15 bp, Homo sapiens
ggggaacttggttga

SEQ ID NO: 1235465 - DNA, 15 bp, Homo sapiens
tggggaacttggttg

SEQ ID NO: 1235466 - DNA, 15 bp, Homo sapiens
atggggaacttggtt

SEQ ID NO: 1235467 - DNA, 15 bp, Homo sapiens
aatggggaacttggt

SEQ ID NO: 1235468 - DNA, 15 bp, Homo sapiens
caatggggaacttgg

SEQ ID NO: 1235469 - DNA, 15 bp, Homo sapiens
acaatggggaacttg

SEQ ID NO: 1235470 - DNA, 15 bp, Homo sapiens
aacaatggggaactt

SEQ ID NO: 1235471 - DNA, 15 bp, Homo sapiens
aaacaatggggaact

SEQ ID NO: 1235472 - DNA, 15 bp, Homo sapiens
gaaacaatggggaac

SEQ ID NO: 1235473 - DNA, 15 bp, Homo sapiens
agaaacaatggggaa

SEQ ID NO: 1235474 - DNA, 15 bp, Homo sapiens
cagaaacaatgggga

SEQ ID NO: 1235475 - DNA, 15 bp, Homo sapiens
gcagaaacaatgggg

SEQ ID NO: 1235476 - DNA, 15 bp, Homo sapiens
tgcagaaacaatggg

SEQ ID NO: 1235477 - DNA, 15 bp, Homo sapiens
ttgcagaaacaatgg

SEQ ID NO: 1235478 - DNA, 15 bp, Homo sapiens
attgcagaaacaatg

SEQ ID NO: 1235479 - DNA, 15 bp, Homo sapiens
tattgcagaaacaat

SEQ ID NO: 1235480 - DNA, 15 bp, Homo sapiens
atattgcagaaacaa

SEQ ID NO: 1235481 - DNA, 15 bp, Homo sapiens
catattgcagaaaca

SEQ ID NO: 1235482 - DNA, 15 bp, Homo sapiens
tcatattgcagaaac

SEQ ID NO: 1235483 - DNA, 15 bp, Homo sapiens
gtcatattgcagaaa

SEQ ID NO: 1235484 - DNA, 15 bp, Homo sapiens
ggtcatattgcagaa

SEQ ID NO: 1235485 - DNA, 15 bp, Homo sapiens
aggtcatattgcaga

SEQ ID NO: 1235486 - DNA, 15 bp, Homo sapiens
aaggtcatattgcag

SEQ ID NO: 1235487 - DNA, 15 bp, Homo sapiens
aaaggtcatattgca

SEQ ID NO: 1235488 - DNA, 15 bp, Homo sapiens
caaaggtcatattgc

SEQ ID NO: 1235489 - DNA, 15 bp, Homo sapiens
gcaaaggtcatattg

SEQ ID NO: 1235490 - DNA, 15 bp, Homo sapiens
agcaaaggtcatatt

SEQ ID NO: 1235491 - DNA, 15 bp, Homo sapiens
gagcaaaggtcatat

SEQ ID NO: 1235492 - DNA, 15 bp, Homo sapiens
tgagcaaaggtcata

SEQ ID NO: 1235493 - DNA, 15 bp, Homo sapiens
atgagcaaaggtcat

SEQ ID NO: 1235494 - DNA, 15 bp, Homo sapiens
catgagcaaaggtca

SEQ ID NO: 1235495 - DNA, 15 bp, Homo sapiens
gcatgagcaaaggtc

SEQ ID NO: 1235496 - DNA, 15 bp, Homo sapiens
agcatgagcaaaggt

SEQ ID NO: 1235497 - DNA, 15 bp, Homo sapiens
tagcatgagcaaagg

SEQ ID NO: 1235498 - DNA, 15 bp, Homo sapiens
atagcatgagcaaag

SEQ ID NO: 1235499 - DNA, 15 bp, Homo sapiens
aatagcatgagcaaa

SEQ ID NO: 1235500 - DNA, 15 bp, Homo sapiens
gaatagcatgagcaa

SEQ ID NO: 1235501 - DNA, 15 bp, Homo sapiens
ggaatagcatgagca

SEQ ID NO: 1235502 - DNA, 15 bp, Homo sapiens
aggaatagcatgagc

SEQ ID NO: 1235503 - DNA, 15 bp, Homo sapiens
aaggaatagcatgag

SEQ ID NO: 1235504 - DNA, 15 bp, Homo sapiens
gaaggaatagcatga

SEQ ID NO: 1235505 - DNA, 15 bp, Homo sapiens
agaaggaatagcatg

SEQ ID NO: 1235506 - DNA, 15 bp, Homo sapiens
cagaaggaatagcat

SEQ ID NO: 1235507 - DNA, 15 bp, Homo sapiens
gcagaaggaatagca

SEQ ID NO: 1235508 - DNA, 15 bp, Homo sapiens
ggcagaaggaatagc

SEQ ID NO: 1235509 - DNA, 15 bp, Homo sapiens
aggcagaaggaatag

SEQ ID NO: 1235510 - DNA, 15 bp, Homo sapiens
caggcagaaggaata

SEQ ID NO: 1235511 - DNA, 15 bp, Homo sapiens
ccaggcagaaggaat

SEQ ID NO: 1235512 - DNA, 15 bp, Homo sapiens
cttccaggcagaagg

SEQ ID NO: 1235513 - DNA, 15 bp, Homo sapiens
ccttccaggcagaag

SEQ ID NO: 1235514 - DNA, 15 bp, Homo sapiens
accttccaggcagaa

SEQ ID NO: 1235515 - DNA, 15 bp, Homo sapiens
aaccttccaggcaga

SEQ ID NO: 1235516 - DNA, 15 bp, Homo sapiens
gaaccttccaggcag

SEQ ID NO: 1235517 - DNA, 15 bp, Homo sapiens
agaaccttccaggca

SEQ ID NO: 1235518 - DNA, 15 bp, Homo sapiens
cagaaccttccaggc

SEQ ID NO: 1235519 - DNA, 15 bp, Homo sapiens
ccagaaccttccagg

SEQ ID NO: 1235520 - DNA, 15 bp, Homo sapiens
tccagaaccttccag

SEQ ID NO: 1235521 - DNA, 15 bp, Homo sapiens
ttccagaaccttcca

SEQ ID NO: 1235522 - DNA, 15 bp, Homo sapiens
cttccagaaccttcc

SEQ ID NO: 1235523 - DNA, 15 bp, Homo sapiens
ccttccagaaccttc

SEQ ID NO: 1235524 - DNA, 15 bp, Homo sapiens
accttccagaacctt

SEQ ID NO: 1235525 - DNA, 15 bp, Homo sapiens
aaccttccagaacct

SEQ ID NO: 1235526 - DNA, 15 bp, Homo sapiens
gaaccttccagaacc

SEQ ID NO: 1235527 - DNA, 15 bp, Homo sapiens
ggaaccttccagaac

SEQ ID NO: 1235528 - DNA, 15 bp, Homo sapiens
tggaaccttccagaa

SEQ ID NO: 1235529 - DNA, 15 bp, Homo sapiens
ctggaaccttccaga

SEQ ID NO: 1235530 - DNA, 15 bp, Homo sapiens
cctggaaccttccag

SEQ ID NO: 1235531 - DNA, 15 bp, Homo sapiens
acctggaaccttcca

SEQ ID NO: 1235532 - DNA, 15 bp, Homo sapiens
aacctggaaccttcc

SEQ ID NO: 1235533 - DNA, 15 bp, Homo sapiens
gaacctggaaccttc

SEQ ID NO: 1235534 - DNA, 15 bp, Homo sapiens
agaacctggaacctt

SEQ ID NO: 1235535 - DNA, 15 bp, Homo sapiens
aagaacctggaacct

SEQ ID NO: 1235536 - DNA, 15 bp, Homo sapiens
gaagaacctggaacc

SEQ ID NO: 1235537 - DNA, 15 bp, Homo sapiens
ggaagaacctggaac

SEQ ID NO: 1235538 - DNA, 15 bp, Homo sapiens
gggaagaacctggaa

SEQ ID NO: 1235539 - DNA, 15 bp, Homo sapiens
agggaagaacctgga

SEQ ID NO: 1235540 - DNA, 15 bp, Homo sapiens
aagggaagaacctgg

SEQ ID NO: 1235541 - DNA, 15 bp, Homo sapiens
gaagggaagaacctg

SEQ ID NO: 1235542 - DNA, 15 bp, Homo sapiens
ggaagggaagaacct

SEQ ID NO: 1235543 - DNA, 15 bp, Homo sapiens
gggaagggaagaacc

SEQ ID NO: 1235544 - DNA, 15 bp, Homo sapiens
agggaagggaagaac

SEQ ID NO: 1235545 - DNA, 15 bp, Homo sapiens
aagggaagggaagaa

SEQ ID NO: 1235546 - DNA, 15 bp, Homo sapiens
aaagggaagggaaga

SEQ ID NO: 1235547 - DNA, 15 bp, Homo sapiens
aaaagggaagggaag

SEQ ID NO: 1235548 - DNA, 15 bp, Homo sapiens
gaaaagggaagggaa

SEQ ID NO: 1235549 - DNA, 15 bp, Homo sapiens
tgaaaagggaaggga

SEQ ID NO: 1235550 - DNA, 15 bp, Homo sapiens
atgaaaagggaaggg

SEQ ID NO: 1235551 - DNA, 15 bp, Homo sapiens
gatgaaaagggaagg

SEQ ID NO: 1235552 - DNA, 15 bp, Homo sapiens
agatgaaaagggaag

SEQ ID NO: 1235553 - DNA, 15 bp, Homo sapiens
tagatgaaaagggaa

SEQ ID NO: 1235554 - DNA, 15 bp, Homo sapiens
ctagatgaaaaggga

SEQ ID NO: 1235555 - DNA, 15 bp, Homo sapiens
tctagatgaaaaggg

SEQ ID NO: 1235556 - DNA, 15 bp, Homo sapiens
atctagatgaaaagg

SEQ ID NO: 1235557 - DNA, 15 bp, Homo sapiens
tatctagatgaaaag

SEQ ID NO: 1235558 - DNA, 15 bp, Homo sapiens
atatctagatgaaaa

SEQ ID NO: 1235559 - DNA, 15 bp, Homo sapiens
aatatctagatgaaa

SEQ ID NO: 1235560 - DNA, 15 bp, Homo sapiens
aaatatctagatgaa

SEQ ID NO: 1235561 - DNA, 15 bp, Homo sapiens
gaaatatctagatga

SEQ ID NO: 1235562 - DNA, 15 bp, Homo sapiens
agaaatatctagatg

SEQ ID NO: 1235563 - DNA, 15 bp, Homo sapiens
tagaaatatctagat

SEQ ID NO: 1235564 - DNA, 15 bp, Homo sapiens
gtagaaatatctaga

SEQ ID NO: 1235565 - DNA, 15 bp, Homo sapiens
agtagaaatatctag

SEQ ID NO: 1235566 - DNA, 15 bp, Homo sapiens
aagtagaaatatcta

SEQ ID NO: 1235567 - DNA, 15 bp, Homo sapiens
aaagtagaaatatct

SEQ ID NO: 1235568 - DNA, 15 bp, Homo sapiens
caaagtagaaatatc

SEQ ID NO: 1235569 - DNA, 15 bp, Homo sapiens
gcaaagtagaaatat

SEQ ID NO: 1235570 - DNA, 15 bp, Homo sapiens
agcaaagtagaaata

SEQ ID NO: 1235571 - DNA, 15 bp, Homo sapiens
gagcaaagtagaaat

SEQ ID NO: 1235572 - DNA, 15 bp, Homo sapiens
agagcaaagtagaaa

SEQ ID NO: 1235573 - DNA, 15 bp, Homo sapiens
gagagcaaagtagaa

SEQ ID NO: 1235574 - DNA, 15 bp, Homo sapiens
agagagcaaagtaga

SEQ ID NO: 1235575 - DNA, 15 bp, Homo sapiens
cagagagcaaagtag

SEQ ID NO: 1235576 - DNA, 15 bp, Homo sapiens
tcagagagcaaagta

SEQ ID NO: 1235577 - DNA, 15 bp, Homo sapiens
ctcagagagcaaagt

SEQ ID NO: 1235578 - DNA, 15 bp, Homo sapiens
tctcagagagcaaag

SEQ ID NO: 1235579 - DNA, 15 bp, Homo sapiens
atctcagagagcaaa

SEQ ID NO: 1235580 - DNA, 15 bp, Homo sapiens
aatctcagagagcaa

SEQ ID NO: 1235581 - DNA, 15 bp, Homo sapiens
caatctcagagagca

SEQ ID NO: 1235582 - DNA, 15 bp, Homo sapiens
gcaatctcagagagc

SEQ ID NO: 1235583 - DNA, 15 bp, Homo sapiens
tgcaatctcagagag

SEQ ID NO: 1235584 - DNA, 15 bp, Homo sapiens
ttgcaatctcagaga

SEQ ID NO: 1235585 - DNA, 15 bp, Homo sapiens
tttgcaatctcagag

SEQ ID NO: 1235586 - DNA, 15 bp, Homo sapiens
ttttgcaatctcaga

SEQ ID NO: 1235587 - DNA, 15 bp, Homo sapiens
tttttgcaatctcag

SEQ ID NO: 1235588 - DNA, 15 bp, Homo sapiens
gtttttgcaatctca

SEQ ID NO: 1235589 - DNA, 15 bp, Homo sapiens
agtttttgcaatctc

SEQ ID NO: 1235590 - DNA, 15 bp, Homo sapiens
aagtttttgcaatct

SEQ ID NO: 1235591 - DNA, 15 bp, Homo sapiens
gaagtttttgcaatc

SEQ ID NO: 1235592 - DNA, 15 bp, Homo sapiens
ggaagtttttgcaat

SEQ ID NO: 1235593 - DNA, 15 bp, Homo sapiens
aggaagtttttgcaa

SEQ ID NO: 1235594 - DNA, 15 bp, Homo sapiens
taggaagtttttgca

SEQ ID NO: 1235595 - DNA, 15 bp, Homo sapiens
ctaggaagtttttgc

SEQ ID NO: 1235596 - DNA, 15 bp, Homo sapiens
cctaggaagtttttg

SEQ ID NO: 1235597 - DNA, 15 bp, Homo sapiens
ccctaggaagttttt

SEQ ID NO: 1235598 - DNA, 15 bp, Homo sapiens
tccctaggaagtttt

SEQ ID NO: 1235599 - DNA, 15 bp, Homo sapiens
ttccctaggaagttt

SEQ ID NO: 1235600 - DNA, 15 bp, Homo sapiens
tttccctaggaagtt

SEQ ID NO: 1235601 - DNA, 15 bp, Homo sapiens
ttttccctaggaagt

SEQ ID NO: 1235602 - DNA, 15 bp, Homo sapiens
cttttccctaggaag

SEQ ID NO: 1235603 - DNA, 15 bp, Homo sapiens
acttttccctaggaa

SEQ ID NO: 1235604 - DNA, 15 bp, Homo sapiens
aacttttccctagga

SEQ ID NO: 1235605 - DNA, 15 bp, Homo sapiens
gaacttttccctagg

SEQ ID NO: 1235606 - DNA, 15 bp, Homo sapiens
agaacttttccctag

SEQ ID NO: 1235607 - DNA, 15 bp, Homo sapiens
gagaacttttcccta

SEQ ID NO: 1235608 - DNA, 15 bp, Homo sapiens
tgagaacttttccct

SEQ ID NO: 1235609 - DNA, 15 bp, Homo sapiens
gtgagaacttttccc

SEQ ID NO: 1235610 - DNA, 15 bp, Homo sapiens
tgtgagaacttttcc

SEQ ID NO: 1235611 - DNA, 15 bp, Homo sapiens
ctgtgagaacttttc

SEQ ID NO: 1235612 - DNA, 15 bp, Homo sapiens
gctgtgagaactttt

SEQ ID NO: 1235613 - DNA, 15 bp, Homo sapiens
tgctgtgagaacttt

SEQ ID NO: 1235614 - DNA, 15 bp, Homo sapiens
atgctgtgagaactt

SEQ ID NO: 1235615 - DNA, 15 bp, Homo sapiens
aatgctgtgagaact

SEQ ID NO: 1235616 - DNA, 15 bp, Homo sapiens
taatgctgtgagaac

SEQ ID NO: 1235617 - DNA, 15 bp, Homo sapiens
ataatgctgtgagaa

SEQ ID NO: 1235618 - DNA, 15 bp, Homo sapiens
cataatgctgtgaga

SEQ ID NO: 1235619 - DNA, 15 bp, Homo sapiens
acataatgctgtgag

SEQ ID NO: 1235620 - DNA, 15 bp, Homo sapiens
tacataatgctgtga

SEQ ID NO: 1235621 - DNA, 15 bp, Homo sapiens
gtacataatgctgtg

SEQ ID NO: 1235622 - DNA, 15 bp, Homo sapiens
tgtacataatgctgt

SEQ ID NO: 1235623 - DNA, 15 bp, Homo sapiens
atgtacataatgctg

SEQ ID NO: 1235624 - DNA, 15 bp, Homo sapiens
gatgtacataatgct

SEQ ID NO: 1235625 - DNA, 15 bp, Homo sapiens
agatgtacataatgc

SEQ ID NO: 1235626 - DNA, 15 bp, Homo sapiens
gagatgtacataatg

SEQ ID NO: 1235627 - DNA, 15 bp, Homo sapiens
ggagatgtacataat

SEQ ID NO: 1235628 - DNA, 15 bp, Homo sapiens
aggagatgtacataa

SEQ ID NO: 1235629 - DNA, 15 bp, Homo sapiens
aaggagatgtacata

SEQ ID NO: 1235630 - DNA, 15 bp, Homo sapiens
gaaggagatgtacat

SEQ ID NO: 1235631 - DNA, 15 bp, Homo sapiens
tgaaggagatgtaca

SEQ ID NO: 1235632 - DNA, 15 bp, Homo sapiens
atgaaggagatgtac

SEQ ID NO: 1235633 - DNA, 15 bp, Homo sapiens
catgaaggagatgta

SEQ ID NO: 1235634 - DNA, 15 bp, Homo sapiens
tcatgaaggagatgt

SEQ ID NO: 1235635 - DNA, 15 bp, Homo sapiens
gtcatgaaggagatg

SEQ ID NO: 1235636 - DNA, 15 bp, Homo sapiens
tgtcatgaaggagat

SEQ ID NO: 1235637 - DNA, 15 bp, Homo sapiens
gtgtcatgaaggaga

SEQ ID NO: 1235638 - DNA, 15 bp, Homo sapiens
agtgtcatgaaggag

SEQ ID NO: 1235639 - DNA, 15 bp, Homo sapiens
aagtgtcatgaagga

SEQ ID NO: 1235640 - DNA, 15 bp, Homo sapiens
caagtgtcatgaagg

SEQ ID NO: 1235641 - DNA, 15 bp, Homo sapiens
acaagtgtcatgaag

SEQ ID NO: 1235642 - DNA, 15 bp, Homo sapiens
aacaagtgtcatgaa

SEQ ID NO: 1235643 - DNA, 15 bp, Homo sapiens
taacaagtgtcatga

SEQ ID NO: 1235644 - DNA, 15 bp, Homo sapiens
ttaacaagtgtcatg

SEQ ID NO: 1235645 - DNA, 15 bp, Homo sapiens
cttaacaagtgtcat

SEQ ID NO: 1235646 - DNA, 15 bp, Homo sapiens
tcttaacaagtgtca

SEQ ID NO: 1235647 - DNA, 15 bp, Homo sapiens
atcttaacaagtgtc

SEQ ID NO: 1235648 - DNA, 15 bp, Homo sapiens
aatcttaacaagtgt

SEQ ID NO: 1235649 - DNA, 15 bp, Homo sapiens
taatcttaacaagtg

SEQ ID NO: 1235650 - DNA, 15 bp, Homo sapiens
gtaatcttaacaagt

SEQ ID NO: 1235651 - DNA, 15 bp, Homo sapiens
tgtaatcttaacaag

SEQ ID NO: 1235652 - DNA, 15 bp, Homo sapiens
ttgtaatcttaacaa

SEQ ID NO: 1235653 - DNA, 15 bp, Homo sapiens
tttgtaatcttaaca

SEQ ID NO: 1235654 - DNA, 15 bp, Homo sapiens
atttgtaatcttaac

SEQ ID NO: 1235655 - DNA, 15 bp, Homo sapiens
aatttgtaatcttaa

SEQ ID NO: 1235656 - DNA, 15 bp, Homo sapiens
aaatttgtaatctta

SEQ ID NO: 1235657 - DNA, 15 bp, Homo sapiens
caaatttgtaatctt

SEQ ID NO: 1235658 - DNA, 15 bp, Homo sapiens
tcaaatttgtaatct

SEQ ID NO: 1235659 - DNA, 15 bp, Homo sapiens
ttcaaatttgtaatc

SEQ ID NO: 1235660 - DNA, 15 bp, Homo sapiens
attcaaatttgtaat

SEQ ID NO: 1235661 - DNA, 15 bp, Homo sapiens
aattcaaatttgtaa

SEQ ID NO: 1235662 - DNA, 15 bp, Homo sapiens
aaattcaaatttgta

SEQ ID NO: 1235663 - DNA, 15 bp, Homo sapiens
taaattcaaatttgt

SEQ ID NO: 1235664 - DNA, 15 bp, Homo sapiens
ataaattcaaatttg

SEQ ID NO: 1235665 - DNA, 15 bp, Homo sapiens
aataaattcaaattt

SEQ ID NO: 1235666 - DNA, 15 bp, Homo sapiens
gaataaattcaaatt

SEQ ID NO: 1235667 - DNA, 15 bp, Homo sapiens
ggaataaattcaaat

SEQ ID NO: 1235668 - DNA, 15 bp, Homo sapiens
aggaataaattcaaa

SEQ ID NO: 1235669 - DNA, 15 bp, Homo sapiens
caggaataaattcaa

SEQ ID NO: 1235670 - DNA, 15 bp, Homo sapiens
acaggaataaattca

SEQ ID NO: 1235671 - DNA, 15 bp, Homo sapiens
cacaggaataaattc

SEQ ID NO: 1235672 - DNA, 15 bp, Homo sapiens
tcacaggaataaatt

SEQ ID NO: 1235673 - DNA, 15 bp, Homo sapiens
atcacaggaataaat

SEQ ID NO: 1235674 - DNA, 15 bp, Homo sapiens
aatcacaggaataaa

SEQ ID NO: 1235675 - DNA, 15 bp, Homo sapiens
aaatcacaggaataa

SEQ ID NO: 1235676 - DNA, 15 bp, Homo sapiens
caaatcacaggaata

SEQ ID NO: 1235677 - DNA, 15 bp, Homo sapiens
tcaaatcacaggaat

SEQ ID NO: 1235678 - DNA, 15 bp, Homo sapiens
gtcaaatcacaggaa

SEQ ID NO: 1235679 - DNA, 15 bp, Homo sapiens
agtcaaatcacagga

SEQ ID NO: 1235680 - DNA, 15 bp, Homo sapiens
tagtcaaatcacagg

SEQ ID NO: 1235681 - DNA, 15 bp, Homo sapiens
ttagtcaaatcacag

SEQ ID NO: 1235682 - DNA, 15 bp, Homo sapiens
attagtcaaatcaca

SEQ ID NO: 1235683 - DNA, 15 bp, Homo sapiens
cattagtcaaatcac

SEQ ID NO: 1235684 - DNA, 15 bp, Homo sapiens
acattagtcaaatca

SEQ ID NO: 1235685 - DNA, 15 bp, Homo sapiens
gacattagtcaaatc

SEQ ID NO: 1235686 - DNA, 15 bp, Homo sapiens
agacattagtcaaat

SEQ ID NO: 1235687 - DNA, 15 bp, Homo sapiens
cagacattagtcaaa

SEQ ID NO: 1235688 - DNA, 15 bp, Homo sapiens
acagacattagtcaa

SEQ ID NO: 1235689 - DNA, 15 bp, Homo sapiens
tacagacattagtca

SEQ ID NO: 1235690 - DNA, 15 bp, Homo sapiens
atacagacattagtc

SEQ ID NO: 1235691 - DNA, 15 bp, Homo sapiens
aatacagacattagt

SEQ ID NO: 1235692 - DNA, 15 bp, Homo sapiens
taatacagacattag

SEQ ID NO: 1235693 - DNA, 15 bp, Homo sapiens
ctaatacagacatta

SEQ ID NO: 1235694 - DNA, 15 bp, Homo sapiens
actaatacagacatt

SEQ ID NO: 1235695 - DNA, 15 bp, Homo sapiens
gactaatacagacat

SEQ ID NO: 1235696 - DNA, 15 bp, Homo sapiens
agactaatacagaca

SEQ ID NO: 1235697 - DNA, 15 bp, Homo sapiens
tagactaatacagac

SEQ ID NO: 1235698 - DNA, 15 bp, Homo sapiens
atagactaatacaga

SEQ ID NO: 1235699 - DNA, 15 bp, Homo sapiens
aatagactaatacag

SEQ ID NO: 1235700 - DNA, 15 bp, Homo sapiens
gaatagactaataca

SEQ ID NO: 1235701 - DNA, 15 bp, Homo sapiens
agaatagactaatac

SEQ ID NO: 1235702 - DNA, 15 bp, Homo sapiens
gagaatagactaata

SEQ ID NO: 1235703 - DNA, 15 bp, Homo sapiens
tgagaatagactaat

SEQ ID NO: 1235704 - DNA, 15 bp, Homo sapiens
atgagaatagactaa

SEQ ID NO: 1235705 - DNA, 15 bp, Homo sapiens
catgagaatagacta

SEQ ID NO: 1235706 - DNA, 15 bp, Homo sapiens
gcatgagaatagact

SEQ ID NO: 1235707 - DNA, 15 bp, Homo sapiens
agcatgagaatagac

SEQ ID NO: 1235708 - DNA, 15 bp, Homo sapiens
cagcatgagaataga

SEQ ID NO: 1235709 - DNA, 15 bp, Homo sapiens
gcagcatgagaatag

SEQ ID NO: 1235710 - DNA, 15 bp, Homo sapiens
agcagcatgagaata

SEQ ID NO: 1235711 - DNA, 15 bp, Homo sapiens
tagcagcatgagaat

SEQ ID NO: 1235712 - DNA, 15 bp, Homo sapiens
ttagcagcatgagaa

SEQ ID NO: 1235713 - DNA, 15 bp, Homo sapiens
attagcagcatgaga

SEQ ID NO: 1235714 - DNA, 15 bp, Homo sapiens
tattagcagcatgag

SEQ ID NO: 1235715 - DNA, 15 bp, Homo sapiens
ttattagcagcatga

SEQ ID NO: 1235716 - DNA, 15 bp, Homo sapiens
tttattagcagcatg

SEQ ID NO: 1235717 - DNA, 15 bp, Homo sapiens
ctttattagcagcat

SEQ ID NO: 1235718 - DNA, 15 bp, Homo sapiens
tctttattagcagca

SEQ ID NO: 1235719 - DNA, 15 bp, Homo sapiens
gtctttattagcagc

SEQ ID NO: 1235720 - DNA, 15 bp, Homo sapiens
tgtctttattagcag

SEQ ID NO: 1235721 - DNA, 15 bp, Homo sapiens
atgtctttattagca

SEQ ID NO: 1235722 - DNA, 15 bp, Homo sapiens
tatgtctttattagc

SEQ ID NO: 1235723 - DNA, 15 bp, Homo sapiens
gtatgtctttattag

SEQ ID NO: 1235724 - DNA, 15 bp, Homo sapiens
ggtatgtctttatta

SEQ ID NO: 1235725 - DNA, 15 bp, Homo sapiens
gggtatgtctttatt

SEQ ID NO: 1235726 - DNA, 15 bp, Homo sapiens
tgggtatgtctttat

SEQ ID NO: 1235727 - DNA, 15 bp, Homo sapiens
ttgggtatgtcttta

SEQ ID NO: 1235728 - DNA, 15 bp, Homo sapiens
cttgggtatgtcttt

SEQ ID NO: 1235729 - DNA, 15 bp, Homo sapiens
tcttgggtatgtctt

SEQ ID NO: 1235730 - DNA, 15 bp, Homo sapiens
gtcttgggtatgtct

SEQ ID NO: 1235731 - DNA, 15 bp, Homo sapiens
ggtcttgggtatgtc

SEQ ID NO: 1235732 - DNA, 15 bp, Homo sapiens
cggtcttgggtatgt

SEQ ID NO: 1235733 - DNA, 15 bp, Homo sapiens
ccggtcttgggtatg

SEQ ID NO: 1235734 - DNA, 15 bp, Homo sapiens
cccggtcttgggtat

SEQ ID NO: 1235735 - DNA, 15 bp, Homo sapiens
acccggtcttgggta

SEQ ID NO: 1235736 - DNA, 15 bp, Homo sapiens
tacccggtcttgggt

SEQ ID NO: 1235737 - DNA, 15 bp, Homo sapiens
ttacccggtcttggg

SEQ ID NO: 1235738 - DNA, 15 bp, Homo sapiens
attacccggtcttgg

SEQ ID NO: 1235739 - DNA, 15 bp, Homo sapiens
aattacccggtcttg

SEQ ID NO: 1235740 - DNA, 15 bp, Homo sapiens
taattacccggtctt

SEQ ID NO: 1235741 - DNA, 15 bp, Homo sapiens
ttaattacccggtct

SEQ ID NO: 1235742 - DNA, 15 bp, Homo sapiens
attaattacccggtc

SEQ ID NO: 1235743 - DNA, 15 bp, Homo sapiens
tattaattacccggt

SEQ ID NO: 1235744 - DNA, 15 bp, Homo sapiens
ttattaattacccgg

SEQ ID NO: 1235745 - DNA, 15 bp, Homo sapiens
tttattaattacccg

SEQ ID NO: 1235746 - DNA, 15 bp, Homo sapiens
ctttattaattaccc

SEQ ID NO: 1235747 - DNA, 15 bp, Homo sapiens
cctttattaattacc

SEQ ID NO: 1235748 - DNA, 15 bp, Homo sapiens
tcctttattaattac

SEQ ID NO: 1235749 - DNA, 15 bp, Homo sapiens
ttcctttattaatta

SEQ ID NO: 1235750 - DNA, 15 bp, Homo sapiens
tttcctttattaatt

SEQ ID NO: 1235751 - DNA, 15 bp, Homo sapiens
ctttcctttattaat

SEQ ID NO: 1235752 - DNA, 15 bp, Homo sapiens
tctttcctttattaa

SEQ ID NO: 1235753 - DNA, 15 bp, Homo sapiens
ctctttcctttatta

SEQ ID NO: 1235754 - DNA, 15 bp, Homo sapiens
cctctttcctttatt

SEQ ID NO: 1235755 - DNA, 15 bp, Homo sapiens
acctctttcctttat

SEQ ID NO: 1235756 - DNA, 15 bp, Homo sapiens
aacctctttccttta

SEQ ID NO: 1235757 - DNA, 15 bp, Homo sapiens
aaacctctttccttt

SEQ ID NO: 1235758 - DNA, 15 bp, Homo sapiens
taaacctctttcctt

SEQ ID NO: 1235759 - DNA, 15 bp, Homo sapiens
ttaaacctctttcct

SEQ ID NO: 1235760 - DNA, 15 bp, Homo sapiens
attaaacctctttcc

SEQ ID NO: 1235761 - DNA, 15 bp, Homo sapiens
aattaaacctctttc

SEQ ID NO: 1235762 - DNA, 15 bp, Homo sapiens
ggtcaattaaacctc

SEQ ID NO: 1235763 - DNA, 15 bp, Homo sapiens
gggtcaattaaacct

SEQ ID NO: 1235764 - DNA, 15 bp, Homo sapiens
tgggtcaattaaacc

SEQ ID NO: 1235765 - DNA, 15 bp, Homo sapiens
gtgggtcaattaaac

SEQ ID NO: 1235766 - DNA, 15 bp, Homo sapiens
ggtgggtcaattaaa

SEQ ID NO: 1235767 - DNA, 15 bp, Homo sapiens
tggtgggtcaattaa

SEQ ID NO: 1235768 - DNA, 15 bp, Homo sapiens
atggtgggtcaatta

SEQ ID NO: 1235769 - DNA, 15 bp, Homo sapiens
aatggtgggtcaatt

SEQ ID NO: 1235770 - DNA, 15 bp, Homo sapiens
gaatggtgggtcaat

SEQ ID NO: 1235771 - DNA, 15 bp, Homo sapiens
agaatggtgggtcaa

SEQ ID NO: 1235772 - DNA, 15 bp, Homo sapiens
cagaatggtgggtca

SEQ ID NO: 1235773 - DNA, 15 bp, Homo sapiens
gcagaatggtgggtc

SEQ ID NO: 1235774 - DNA, 15 bp, Homo sapiens
tgcagaatggtgggt

SEQ ID NO: 1235775 - DNA, 15 bp, Homo sapiens
ctgcagaatggtggg

SEQ ID NO: 1235776 - DNA, 15 bp, Homo sapiens
cctgcagaatggtgg

SEQ ID NO: 1235777 - DNA, 15 bp, Homo sapiens
ccctgcagaatggtg

SEQ ID NO: 1235778 - DNA, 15 bp, Homo sapiens
gccctgcagaatggt

SEQ ID NO: 1235779 - DNA, 15 bp, Homo sapiens
agccctgcagaatgg

SEQ ID NO: 1235780 - DNA, 15 bp, Homo sapiens
cagccctgcagaatg

SEQ ID NO: 1235781 - DNA, 15 bp, Homo sapiens
tcagccctgcagaat

SEQ ID NO: 1235782 - DNA, 15 bp, Homo sapiens
ctcagccctgcagaa

SEQ ID NO: 1235783 - DNA, 15 bp, Homo sapiens
cctcagccctgcaga

SEQ ID NO: 1235784 - DNA, 15 bp, Homo sapiens
tcctcagccctgcag

SEQ ID NO: 1235785 - DNA, 15 bp, Homo sapiens
ctcctcagccctgca

SEQ ID NO: 1235786 - DNA, 15 bp, Homo sapiens
cctcctcagccctgc

SEQ ID NO: 1235787 - DNA, 15 bp, Homo sapiens
gcctcctcagccctg

SEQ ID NO: 1235788 - DNA, 15 bp, Homo sapiens
ggcctcctcagccct

SEQ ID NO: 1235789 - DNA, 15 bp, Homo sapiens
aggcctcctcagccc

SEQ ID NO: 1235790 - DNA, 15 bp, Homo sapiens
gaggcctcctcagcc

SEQ ID NO: 1235791 - DNA, 15 bp, Homo sapiens
tgaggcctcctcagc

SEQ ID NO: 1235792 - DNA, 15 bp, Homo sapiens
tttcctgaggcctcc

SEQ ID NO: 1235793 - DNA, 15 bp, Homo sapiens
gtttcctgaggcctc

SEQ ID NO: 1235794 - DNA, 15 bp, Homo sapiens
agtttcctgaggcct

SEQ ID NO: 1235795 - DNA, 15 bp, Homo sapiens
cagtttcctgaggcc

SEQ ID NO: 1235796 - DNA, 15 bp, Homo sapiens
tcagtttcctgaggc

SEQ ID NO: 1235797 - DNA, 15 bp, Homo sapiens
gtcagtttcctgagg

SEQ ID NO: 1235798 - DNA, 15 bp, Homo sapiens
tgtcagtttcctgag

SEQ ID NO: 1235799 - DNA, 15 bp, Homo sapiens
ttgtcagtttcctga

SEQ ID NO: 1235800 - DNA, 15 bp, Homo sapiens
attgtcagtttcctg

SEQ ID NO: 1235801 - DNA, 15 bp, Homo sapiens
gattgtcagtttcct

SEQ ID NO: 1235802 - DNA, 15 bp, Homo sapiens
tgattgtcagtttcc

SEQ ID NO: 1235803 - DNA, 15 bp, Homo sapiens
atgattgtcagtttc

SEQ ID NO: 1235804 - DNA, 15 bp, Homo sapiens
catgattgtcagttt

SEQ ID NO: 1235805 - DNA, 15 bp, Homo sapiens
ccatgattgtcagtt

SEQ ID NO: 1235806 - DNA, 15 bp, Homo sapiens
accatgattgtcagt

SEQ ID NO: 1235807 - DNA, 15 bp, Homo sapiens
caccatgattgtcag

SEQ ID NO: 1235808 - DNA, 15 bp, Homo sapiens
ccaccatgattgtca

SEQ ID NO: 1235809 - DNA, 15 bp, Homo sapiens
tccaccatgattgtc

SEQ ID NO: 1235810 - DNA, 15 bp, Homo sapiens
cccttccaccatgat

SEQ ID NO: 1235811 - DNA, 15 bp, Homo sapiens
ccccttccaccatga

SEQ ID NO: 1235812 - DNA, 15 bp, Homo sapiens
tccccttccaccatg

SEQ ID NO: 1235813 - DNA, 15 bp, Homo sapiens
ttccccttccaccat

SEQ ID NO: 1235814 - DNA, 15 bp, Homo sapiens
cttccccttccacca

SEQ ID NO: 1235815 - DNA, 15 bp, Homo sapiens
gcttccccttccacc

SEQ ID NO: 1235816 - DNA, 15 bp, Homo sapiens
tgcttccccttccac

SEQ ID NO: 1235817 - DNA, 15 bp, Homo sapiens
ttgcttccccttcca

SEQ ID NO: 1235818 - DNA, 15 bp, Homo sapiens
tttgcttccccttcc

SEQ ID NO: 1235819 - DNA, 15 bp, Homo sapiens
gtttgcttccccttc

SEQ ID NO: 1235820 - DNA, 15 bp, Homo sapiens
tgtttgcttcccctt

SEQ ID NO: 1235821 - DNA, 15 bp, Homo sapiens
gtgtttgcttcccct

SEQ ID NO: 1235822 - DNA, 15 bp, Homo sapiens
tgtgtttgcttcccc

SEQ ID NO: 1235823 - DNA, 15 bp, Homo sapiens
atgtgtttgcttccc

SEQ ID NO: 1235824 - DNA, 15 bp, Homo sapiens
gatgtgtttgcttcc

SEQ ID NO: 1235825 - DNA, 15 bp, Homo sapiens
ggatgtgtttgcttc

SEQ ID NO: 1235826 - DNA, 15 bp, Homo sapiens
aggatgtgtttgctt

SEQ ID NO: 1235827 - DNA, 15 bp, Homo sapiens
aaggatgtgtttgct

SEQ ID NO: 1235828 - DNA, 15 bp, Homo sapiens
aaaggatgtgtttgc

SEQ ID NO: 1235829 - DNA, 15 bp, Homo sapiens
aaaaggatgtgtttg

SEQ ID NO: 1235830 - DNA, 15 bp, Homo sapiens
aaaaaggatgtgttt

SEQ ID NO: 1235831 - DNA, 15 bp, Homo sapiens
gaaaaaggatgtgtt

SEQ ID NO: 1235832 - DNA, 15 bp, Homo sapiens
tgaaaaaggatgtgt

SEQ ID NO: 1235833 - DNA, 15 bp, Homo sapiens
gtgaaaaaggatgtg

SEQ ID NO: 1235834 - DNA, 15 bp, Homo sapiens
tgtgaaaaaggatgt

SEQ ID NO: 1235835 - DNA, 15 bp, Homo sapiens
atgtgaaaaaggatg

SEQ ID NO: 1235836 - DNA, 15 bp, Homo sapiens
catgtgaaaaaggat

SEQ ID NO: 1235837 - DNA, 15 bp, Homo sapiens
ccatgtgaaaaagga

SEQ ID NO: 1235838 - DNA, 15 bp, Homo sapiens
accatgtgaaaaagg

SEQ ID NO: 1235839 - DNA, 15 bp, Homo sapiens
caccatgtgaaaaag

SEQ ID NO: 1235840 - DNA, 15 bp, Homo sapiens
ccaccatgtgaaaaa

SEQ ID NO: 1235841 - DNA, 15 bp, Homo sapiens
gccaccatgtgaaaa

SEQ ID NO: 1235842 - DNA, 15 bp, Homo sapiens
tgccaccatgtgaaa

SEQ ID NO: 1235843 - DNA, 15 bp, Homo sapiens
ctgccaccatgtgaa

SEQ ID NO: 1235844 - DNA, 15 bp, Homo sapiens
cctgccaccatgtga

SEQ ID NO: 1235845 - DNA, 15 bp, Homo sapiens
tcctgccaccatgtg

SEQ ID NO: 1235846 - DNA, 15 bp, Homo sapiens
ttcctgccaccatgt

SEQ ID NO: 1235847 - DNA, 15 bp, Homo sapiens
cttcctgccaccatg

SEQ ID NO: 1235848 - DNA, 15 bp, Homo sapiens
ccttcctgccaccat

SEQ ID NO: 1235849 - DNA, 15 bp, Homo sapiens
tccttcctgccacca

SEQ ID NO: 1235850 - DNA, 15 bp, Homo sapiens
ttccttcctgccacc

SEQ ID NO: 1235851 - DNA, 15 bp, Homo sapiens
tttccttcctgccac

SEQ ID NO: 1235852 - DNA, 15 bp, Homo sapiens
ttttccttcctgcca

SEQ ID NO: 1235853 - DNA, 15 bp, Homo sapiens
cttttccttcctgcc

SEQ ID NO: 1235854 - DNA, 15 bp, Homo sapiens
acttttccttcctgc

SEQ ID NO: 1235855 - DNA, 15 bp, Homo sapiens
cacttttccttcctg

SEQ ID NO: 1235856 - DNA, 15 bp, Homo sapiens
gcacttttccttcct

SEQ ID NO: 1235857 - DNA, 15 bp, Homo sapiens
ggcacttttccttcc

SEQ ID NO: 1235858 - DNA, 15 bp, Homo sapiens
cggcacttttccttc

SEQ ID NO: 1235859 - DNA, 15 bp, Homo sapiens
tcggcacttttcctt

SEQ ID NO: 1235860 - DNA, 15 bp, Homo sapiens
ctcggcacttttcct

SEQ ID NO: 1235861 - DNA, 15 bp, Homo sapiens
gctcggcacttttcc

SEQ ID NO: 1235862 - DNA, 15 bp, Homo sapiens
tgctcggcacttttc

SEQ ID NO: 1235863 - DNA, 15 bp, Homo sapiens
ttgctcggcactttt

SEQ ID NO: 1235864 - DNA, 15 bp, Homo sapiens
tttgctcggcacttt

SEQ ID NO: 1235865 - DNA, 15 bp, Homo sapiens
ttttgctcggcactt

SEQ ID NO: 1235866 - DNA, 15 bp, Homo sapiens
cttttgctcggcact

SEQ ID NO: 1235867 - DNA, 15 bp, Homo sapiens
tcttttgctcggcac

SEQ ID NO: 1235868 - DNA, 15 bp, Homo sapiens
ctcttttgctcggca

SEQ ID NO: 1235869 - DNA, 15 bp, Homo sapiens
tctcttttgctcggc

SEQ ID NO: 1235870 - DNA, 15 bp, Homo sapiens
ttctcttttgctcgg

SEQ ID NO: 1235871 - DNA, 15 bp, Homo sapiens
tttctcttttgctcg

SEQ ID NO: 1235872 - DNA, 15 bp, Homo sapiens
ttttctcttttgctc

SEQ ID NO: 1235873 - DNA, 15 bp, Homo sapiens
tttttctcttttgct

SEQ ID NO: 1235874 - DNA, 15 bp, Homo sapiens
ttttttctcttttgc

SEQ ID NO: 1235875 - DNA, 15 bp, Homo sapiens
cttttttctcttttg

SEQ ID NO: 1235876 - DNA, 15 bp, Homo sapiens
gcttttttctctttt

SEQ ID NO: 1235877 - DNA, 15 bp, Homo sapiens
ggcttttttctcttt

SEQ ID NO: 1235878 - DNA, 15 bp, Homo sapiens
aggcttttttctctt

SEQ ID NO: 1235879 - DNA, 15 bp, Homo sapiens
aaggcttttttctct

SEQ ID NO: 1235880 - DNA, 15 bp, Homo sapiens
aaaggcttttttctc

SEQ ID NO: 1235881 - DNA, 15 bp, Homo sapiens
taaaaggcttttttc

SEQ ID NO: 1235882 - DNA, 15 bp, Homo sapiens
ataaaaggctttttt

SEQ ID NO: 1235883 - DNA, 15 bp, Homo sapiens
tataaaaggcttttt

SEQ ID NO: 1235884 - DNA, 15 bp, Homo sapiens
ttataaaaggctttt

SEQ ID NO: 1235885 - DNA, 15 bp, Homo sapiens
tttataaaaggcttt

SEQ ID NO: 1235886 - DNA, 15 bp, Homo sapiens
ttttataaaaggctt

SEQ ID NO: 1235887 - DNA, 15 bp, Homo sapiens
gttttataaaaggct

SEQ ID NO: 1235888 - DNA, 15 bp, Homo sapiens
ggttttataaaaggc

SEQ ID NO: 1235889 - DNA, 15 bp, Homo sapiens
tggttttataaaagg

SEQ ID NO: 1235890 - DNA, 15 bp, Homo sapiens
atggttttataaaag

SEQ ID NO: 1235891 - DNA, 15 bp, Homo sapiens
gatggttttataaaa

SEQ ID NO: 1235892 - DNA, 15 bp, Homo sapiens
tgatggttttataaa

SEQ ID NO: 1235893 - DNA, 15 bp, Homo sapiens
ctgatggttttataa

SEQ ID NO: 1235894 - DNA, 15 bp, Homo sapiens
tctgatggttttata

SEQ ID NO: 1235895 - DNA, 15 bp, Homo sapiens
atctgatggttttat

SEQ ID NO: 1235896 - DNA, 15 bp, Homo sapiens
tatctgatggtttta

SEQ ID NO: 1235897 - DNA, 15 bp, Homo sapiens
atatctgatggtttt

SEQ ID NO: 1235898 - DNA, 15 bp, Homo sapiens
gatatctgatggttt

SEQ ID NO: 1235899 - DNA, 15 bp, Homo sapiens
ggatatctgatggtt

SEQ ID NO: 1235900 - DNA, 15 bp, Homo sapiens
aggatatctgatggt

SEQ ID NO: 1235901 - DNA, 15 bp, Homo sapiens
caggatatctgatgg

SEQ ID NO: 1235902 - DNA, 15 bp, Homo sapiens
tcaggatatctgatg

SEQ ID NO: 1235903 - DNA, 15 bp, Homo sapiens
ttcaggatatctgat

SEQ ID NO: 1235904 - DNA, 15 bp, Homo sapiens
tttcaggatatctga

SEQ ID NO: 1235905 - DNA, 15 bp, Homo sapiens
ttttcaggatatctg

SEQ ID NO: 1235906 - DNA, 15 bp, Homo sapiens
gttttcaggatatct

SEQ ID NO: 1235907 - DNA, 15 bp, Homo sapiens
agttttcaggatatc

SEQ ID NO: 1235908 - DNA, 15 bp, Homo sapiens
gagttttcaggatat

SEQ ID NO: 1235909 - DNA, 15 bp, Homo sapiens
tgagttttcaggata

SEQ ID NO: 1235910 - DNA, 15 bp, Homo sapiens
atgagttttcaggat

SEQ ID NO: 1235911 - DNA, 15 bp, Homo sapiens
aatgagttttcagga

SEQ ID NO: 1235912 - DNA, 15 bp, Homo sapiens
aaatgagttttcagg

SEQ ID NO: 1235913 - DNA, 15 bp, Homo sapiens
taaatgagttttcag

SEQ ID NO: 1235914 - DNA, 15 bp, Homo sapiens
ataaatgagttttca

SEQ ID NO: 1235915 - DNA, 15 bp, Homo sapiens
aataaatgagttttc

SEQ ID NO: 1235916 - DNA, 15 bp, Homo sapiens
taataaatgagtttt

SEQ ID NO: 1235917 - DNA, 15 bp, Homo sapiens
gtaataaatgagttt

SEQ ID NO: 1235918 - DNA, 15 bp, Homo sapiens
ggtaataaatgagtt

SEQ ID NO: 1235919 - DNA, 15 bp, Homo sapiens
tggtaataaatgagt

SEQ ID NO: 1235920 - DNA, 15 bp, Homo sapiens
atggtaataaatgag

SEQ ID NO: 1235921 - DNA, 15 bp, Homo sapiens
catggtaataaatga

SEQ ID NO: 1235922 - DNA, 15 bp, Homo sapiens
tcatggtaataaatg

SEQ ID NO: 1235923 - DNA, 15 bp, Homo sapiens
ctcatggtaataaat

SEQ ID NO: 1235924 - DNA, 15 bp, Homo sapiens
tctcatggtaataaa

SEQ ID NO: 1235925 - DNA, 15 bp, Homo sapiens
ttctcatggtaataa

SEQ ID NO: 1235926 - DNA, 15 bp, Homo sapiens
gttctcatggtaata

SEQ ID NO: 1235927 - DNA, 15 bp, Homo sapiens
tgttctcatggtaat

SEQ ID NO: 1235928 - DNA, 15 bp, Homo sapiens
ctgttctcatggtaa

SEQ ID NO: 1235929 - DNA, 15 bp, Homo sapiens
gctgttctcatggta

SEQ ID NO: 1235930 - DNA, 15 bp, Homo sapiens
tgctgttctcatggt

SEQ ID NO: 1235931 - DNA, 15 bp, Homo sapiens
ctgctgttctcatgg

SEQ ID NO: 1235932 - DNA, 15 bp, Homo sapiens
gctgctgttctcatg

SEQ ID NO: 1235933 - DNA, 15 bp, Homo sapiens
tgctgctgttctcat

SEQ ID NO: 1235934 - DNA, 15 bp, Homo sapiens
atgctgctgttctca

SEQ ID NO: 1235935 - DNA, 15 bp, Homo sapiens
catgctgctgttctc

SEQ ID NO: 1235936 - DNA, 15 bp, Homo sapiens
ccatgctgctgttct

SEQ ID NO: 1235937 - DNA, 15 bp, Homo sapiens
cccatgctgctgttc

SEQ ID NO: 1235938 - DNA, 15 bp, Homo sapiens
ccccatgctgctgtt

SEQ ID NO: 1235939 - DNA, 15 bp, Homo sapiens
cccccatgctgctgt

SEQ ID NO: 1235940 - DNA, 15 bp, Homo sapiens
gcccccatgctgctg

SEQ ID NO: 1235941 - DNA, 15 bp, Homo sapiens
tgcccccatgctgct

SEQ ID NO: 1235942 - DNA, 15 bp, Homo sapiens
atgcccccatgctgc

SEQ ID NO: 1235943 - DNA, 15 bp, Homo sapiens
catgcccccatgctg

SEQ ID NO: 1235944 - DNA, 15 bp, Homo sapiens
tcatgcccccatgct

SEQ ID NO: 1235945 - DNA, 15 bp, Homo sapiens
ctcatgcccccatgc

SEQ ID NO: 1235946 - DNA, 15 bp, Homo sapiens
tctcatgcccccatg

SEQ ID NO: 1235947 - DNA, 15 bp, Homo sapiens
ttctcatgcccccat

SEQ ID NO: 1235948 - DNA, 15 bp, Homo sapiens
gttctcatgccccca

SEQ ID NO: 1235949 - DNA, 15 bp, Homo sapiens
cgttctcatgccccc

SEQ ID NO: 1235950 - DNA, 15 bp, Homo sapiens
gcgttctcatgcccc

SEQ ID NO: 1235951 - DNA, 15 bp, Homo sapiens
ggcgttctcatgccc

SEQ ID NO: 1235952 - DNA, 15 bp, Homo sapiens
gggcgttctcatgcc

SEQ ID NO: 1235953 - DNA, 15 bp, Homo sapiens
ggggcgttctcatgc

SEQ ID NO: 1235954 - DNA, 15 bp, Homo sapiens
tggggcgttctcatg

SEQ ID NO: 1235955 - DNA, 15 bp, Homo sapiens
ttggggcgttctcat

SEQ ID NO: 1235956 - DNA, 15 bp, Homo sapiens
attggggcgttctca

SEQ ID NO: 1235957 - DNA, 15 bp, Homo sapiens
aattggggcgttctc

SEQ ID NO: 1235958 - DNA, 15 bp, Homo sapiens
aaattggggcgttct

SEQ ID NO: 1235959 - DNA, 15 bp, Homo sapiens
caaattggggcgttc

SEQ ID NO: 1235960 - DNA, 15 bp, Homo sapiens
ccaaattggggcgtt

SEQ ID NO: 1235961 - DNA, 15 bp, Homo sapiens
cccaaattggggcgt

SEQ ID NO: 1235962 - DNA, 15 bp, Homo sapiens
acccaaattggggcg

SEQ ID NO: 1235963 - DNA, 15 bp, Homo sapiens
cacccaaattggggc

SEQ ID NO: 1235964 - DNA, 15 bp, Homo sapiens
ccacccaaattgggg

SEQ ID NO: 1235965 - DNA, 15 bp, Homo sapiens
accacccaaattggg

SEQ ID NO: 1235966 - DNA, 15 bp, Homo sapiens
caccacccaaattgg

SEQ ID NO: 1235967 - DNA, 15 bp, Homo sapiens
ccaccacccaaattg

SEQ ID NO: 1235968 - DNA, 15 bp, Homo sapiens
gccaccacccaaatt

SEQ ID NO: 1235969 - DNA, 15 bp, Homo sapiens
tgccaccacccaaat

SEQ ID NO: 1235970 - DNA, 15 bp, Homo sapiens
gtgccaccacccaaa

SEQ ID NO: 1235971 - DNA, 15 bp, Homo sapiens
tgtgccaccacccaa

SEQ ID NO: 1235972 - DNA, 15 bp, Homo sapiens
ctgtgccaccaccca

SEQ ID NO: 1235973 - DNA, 15 bp, Homo sapiens
gctgtgccaccaccc

SEQ ID NO: 1235974 - DNA, 15 bp, Homo sapiens
ggctgtgccaccacc

SEQ ID NO: 1235975 - DNA, 15 bp, Homo sapiens
tggctgtgccaccac

SEQ ID NO: 1235976 - DNA, 15 bp, Homo sapiens
ttggctgtgccacca

SEQ ID NO: 1235977 - DNA, 15 bp, Homo sapiens
tttggctgtgccacc

SEQ ID NO: 1235978 - DNA, 15 bp, Homo sapiens
gtttggctgtgccac

SEQ ID NO: 1235979 - DNA, 15 bp, Homo sapiens
ggtttggctgtgcca

SEQ ID NO: 1235980 - DNA, 15 bp, Homo sapiens
tggtttggctgtgcc

SEQ ID NO: 1235981 - DNA, 15 bp, Homo sapiens
atggtttggctgtgc

SEQ ID NO: 1235982 - DNA, 15 bp, Homo sapiens
tatggtttggctgtg

SEQ ID NO: 1235983 - DNA, 15 bp, Homo sapiens
atatggtttggctgt

SEQ ID NO: 1235984 - DNA, 15 bp, Homo sapiens
tatatggtttggctg

SEQ ID NO: 1235985 - DNA, 15 bp, Homo sapiens
ttatatggtttggct

SEQ ID NO: 1235986 - DNA, 15 bp, Homo sapiens
tttatatggtttggc

SEQ ID NO: 1235987 - DNA, 15 bp, Homo sapiens
atttatatggtttgg

SEQ ID NO: 1235988 - DNA, 15 bp, Homo sapiens
gatttatatggtttg

SEQ ID NO: 1235989 - DNA, 15 bp, Homo sapiens
agatttatatggttt

SEQ ID NO: 1235990 - DNA, 15 bp, Homo sapiens
gagatttatatggtt

SEQ ID NO: 1235991 - DNA, 15 bp, Homo sapiens
ggagatttatatggt

SEQ ID NO: 1235992 - DNA, 15 bp, Homo sapiens
tggagatttatatgg

SEQ ID NO: 1235993 - DNA, 15 bp, Homo sapiens
atggagatttatatg

SEQ ID NO: 1235994 - DNA, 15 bp, Homo sapiens
aatggagatttatat

SEQ ID NO: 1235995 - DNA, 15 bp, Homo sapiens
aaatggagatttata

SEQ ID NO: 1235996 - DNA, 15 bp, Homo sapiens
caaatggagatttat

SEQ ID NO: 1235997 - DNA, 15 bp, Homo sapiens
gcaaatggagattta

SEQ ID NO: 1235998 - DNA, 15 bp, Homo sapiens
agcaaatggagattt

SEQ ID NO: 1235999 - DNA, 15 bp, Homo sapiens
tagcaaatggagatt

SEQ ID NO: 1236000 - DNA, 15 bp, Homo sapiens
ttagcaaatggagat

SEQ ID NO: 1236001 - DNA, 15 bp, Homo sapiens
tttagcaaatggaga

SEQ ID NO: 1236002 - DNA, 15 bp, Homo sapiens
ttttagcaaatggag

SEQ ID NO: 1236003 - DNA, 15 bp, Homo sapiens
cttttagcaaatgga

SEQ ID NO: 1236004 - DNA, 15 bp, Homo sapiens
tcttttagcaaatgg

SEQ ID NO: 1236005 - DNA, 15 bp, Homo sapiens
ttcttttagcaaatg

SEQ ID NO: 1236006 - DNA, 15 bp, Homo sapiens
tttcttttagcaaat

SEQ ID NO: 1236007 - DNA, 15 bp, Homo sapiens
gtttcttttagcaaa

SEQ ID NO: 1236008 - DNA, 15 bp, Homo sapiens
tgtttcttttagcaa

SEQ ID NO: 1236009 - DNA, 15 bp, Homo sapiens
atgtttcttttagca

SEQ ID NO: 1236010 - DNA, 15 bp, Homo sapiens
tatgtttcttttagc

SEQ ID NO: 1236011 - DNA, 15 bp, Homo sapiens
ttatgtttcttttag

SEQ ID NO: 1236012 - DNA, 15 bp, Homo sapiens
tttatgtttctttta

SEQ ID NO: 1236013 - DNA, 15 bp, Homo sapiens
gtttatgtttctttt

SEQ ID NO: 1236014 - DNA, 15 bp, Homo sapiens
agtttatgtttcttt

SEQ ID NO: 1236015 - DNA, 15 bp, Homo sapiens
gagtttatgtttctt

SEQ ID NO: 1236016 - DNA, 15 bp, Homo sapiens
tgagtttatgtttct

SEQ ID NO: 1236017 - DNA, 15 bp, Homo sapiens
ctgagtttatgtttc

SEQ ID NO: 1236018 - DNA, 15 bp, Homo sapiens
cctgagtttatgttt

SEQ ID NO: 1236019 - DNA, 15 bp, Homo sapiens
tcctgagtttatgtt

SEQ ID NO: 1236020 - DNA, 15 bp, Homo sapiens
ttcctgagtttatgt

SEQ ID NO: 1236021 - DNA, 15 bp, Homo sapiens
cttcctgagtttatg

SEQ ID NO: 1236022 - DNA, 15 bp, Homo sapiens
ccttcctgagtttat

SEQ ID NO: 1236023 - DNA, 15 bp, Homo sapiens
gccttcctgagttta

SEQ ID NO: 1236024 - DNA, 15 bp, Homo sapiens
tgccttcctgagttt

SEQ ID NO: 1236025 - DNA, 15 bp, Homo sapiens
ctgccttcctgagtt

SEQ ID NO: 1236026 - DNA, 15 bp, Homo sapiens
actgccttcctgagt

SEQ ID NO: 1236027 - DNA, 15 bp, Homo sapiens
aactgccttcctgag

SEQ ID NO: 1236028 - DNA, 15 bp, Homo sapiens
taactgccttcctga

SEQ ID NO: 1236029 - DNA, 15 bp, Homo sapiens
ataactgccttcctg

SEQ ID NO: 1236030 - DNA, 15 bp, Homo sapiens
tataactgccttcct

SEQ ID NO: 1236031 - DNA, 15 bp, Homo sapiens
ttataactgccttcc

SEQ ID NO: 1236032 - DNA, 15 bp, Homo sapiens
attataactgccttc

SEQ ID NO: 1236033 - DNA, 15 bp, Homo sapiens
gattataactgcctt

SEQ ID NO: 1236034 - DNA, 15 bp, Homo sapiens
tgattataactgcct

SEQ ID NO: 1236035 - DNA, 15 bp, Homo sapiens
atgattataactgcc

SEQ ID NO: 1236036 - DNA, 15 bp, Homo sapiens
tatgattataactgc

SEQ ID NO: 1236037 - DNA, 15 bp, Homo sapiens
ctatgattataactg

SEQ ID NO: 1236038 - DNA, 15 bp, Homo sapiens
tctatgattataact

SEQ ID NO: 1236039 - DNA, 15 bp, Homo sapiens
ttctatgattataac

SEQ ID NO: 1236040 - DNA, 15 bp, Homo sapiens
gttctatgattataa

SEQ ID NO: 1236041 - DNA, 15 bp, Homo sapiens
ggttctatgattata

SEQ ID NO: 1236042 - DNA, 15 bp, Homo sapiens
aggttctatgattat

SEQ ID NO: 1236043 - DNA, 15 bp, Homo sapiens
taggttctatgatta

SEQ ID NO: 1236044 - DNA, 15 bp, Homo sapiens
ctaggttctatgatt

SEQ ID NO: 1236045 - DNA, 15 bp, Homo sapiens
tctaggttctatgat

SEQ ID NO: 1236046 - DNA, 15 bp, Homo sapiens
ttctaggttctatga

SEQ ID NO: 1236047 - DNA, 15 bp, Homo sapiens
tttctaggttctatg

SEQ ID NO: 1236048 - DNA, 15 bp, Homo sapiens
ttttctaggttctat

SEQ ID NO: 1236049 - DNA, 15 bp, Homo sapiens
cttttctaggttcta

SEQ ID NO: 1236050 - DNA, 15 bp, Homo sapiens
acttttctaggttct

SEQ ID NO: 1236051 - DNA, 15 bp, Homo sapiens
cacttttctaggttc

SEQ ID NO: 1236052 - DNA, 15 bp, Homo sapiens
ccacttttctaggtt

SEQ ID NO: 1236053 - DNA, 15 bp, Homo sapiens
gccacttttctaggt

SEQ ID NO: 1236054 - DNA, 15 bp, Homo sapiens
agccacttttctagg

SEQ ID NO: 1236055 - DNA, 15 bp, Homo sapiens
gagccacttttctag

SEQ ID NO: 1236056 - DNA, 15 bp, Homo sapiens
agagccacttttcta

SEQ ID NO: 1236057 - DNA, 15 bp, Homo sapiens
gagagccacttttct

SEQ ID NO: 1236058 - DNA, 15 bp, Homo sapiens
agagagccacttttc

SEQ ID NO: 1236059 - DNA, 15 bp, Homo sapiens
aagagagccactttt

SEQ ID NO: 1236060 - DNA, 15 bp, Homo sapiens
caagagagccacttt

SEQ ID NO: 1236061 - DNA, 15 bp, Homo sapiens
gcaagagagccactt

SEQ ID NO: 1236062 - DNA, 15 bp, Homo sapiens
tgcaagagagccact

SEQ ID NO: 1236063 - DNA, 15 bp, Homo sapiens
ctgcaagagagccac

SEQ ID NO: 1236064 - DNA, 15 bp, Homo sapiens
gctgcaagagagcca

SEQ ID NO: 1236065 - DNA, 15 bp, Homo sapiens
tgctgcaagagagcc

SEQ ID NO: 1236066 - DNA, 15 bp, Homo sapiens
ttgctgcaagagagc

SEQ ID NO: 1236067 - DNA, 15 bp, Homo sapiens
tttgctgcaagagag

SEQ ID NO: 1236068 - DNA, 15 bp, Homo sapiens
ttttgctgcaagaga

SEQ ID NO: 1236069 - DNA, 15 bp, Homo sapiens
cttttgctgcaagag

SEQ ID NO: 1236070 - DNA, 15 bp, Homo sapiens
gcttttgctgcaaga

SEQ ID NO: 1236071 - DNA, 15 bp, Homo sapiens
agcttttgctgcaag

SEQ ID NO: 1236072 - DNA, 15 bp, Homo sapiens
cagcttttgctgcaa

SEQ ID NO: 1236073 - DNA, 15 bp, Homo sapiens
tcagcttttgctgca

SEQ ID NO: 1236074 - DNA, 15 bp, Homo sapiens
ttcagcttttgctgc

SEQ ID NO: 1236075 - DNA, 15 bp, Homo sapiens
gttcagcttttgctg

SEQ ID NO: 1236076 - DNA, 15 bp, Homo sapiens
tgttcagcttttgct

SEQ ID NO: 1236077 - DNA, 15 bp, Homo sapiens
ttgttcagcttttgc

SEQ ID NO: 1236078 - DNA, 15 bp, Homo sapiens
tttgttcagcttttg

SEQ ID NO: 1236079 - DNA, 15 bp, Homo sapiens
atttgttcagctttt

SEQ ID NO: 1236080 - DNA, 15 bp, Homo sapiens
tatttgttcagcttt

SEQ ID NO: 1236081 - DNA, 15 bp, Homo sapiens
atatttgttcagctt

SEQ ID NO: 1236082 - DNA, 15 bp, Homo sapiens
aatatttgttcagct

SEQ ID NO: 1236083 - DNA, 15 bp, Homo sapiens
aaatatttgttcagc

SEQ ID NO: 1236084 - DNA, 15 bp, Homo sapiens
aaaatatttgttcag

SEQ ID NO: 1236085 - DNA, 15 bp, Homo sapiens
aaaaatatttgttca

SEQ ID NO: 1236086 - DNA, 15 bp, Homo sapiens
taaaaatatttgttc

SEQ ID NO: 1236087 - DNA, 15 bp, Homo sapiens
ctaaaaatatttgtt

SEQ ID NO: 1236088 - DNA, 15 bp, Homo sapiens
tctaaaaatatttgt

SEQ ID NO: 1236089 - DNA, 15 bp, Homo sapiens
atctaaaaatatttg

SEQ ID NO: 1236090 - DNA, 15 bp, Homo sapiens
aatctaaaaatattt

SEQ ID NO: 1236091 - DNA, 15 bp, Homo sapiens
caatctaaaaatatt

SEQ ID NO: 1236092 - DNA, 15 bp, Homo sapiens
ccaatctaaaaatat

SEQ ID NO: 1236093 - DNA, 15 bp, Homo sapiens
cccaatctaaaaata

SEQ ID NO: 1236094 - DNA, 15 bp, Homo sapiens
acccaatctaaaaat

SEQ ID NO: 1236095 - DNA, 15 bp, Homo sapiens
cacccaatctaaaaa

SEQ ID NO: 1236096 - DNA, 15 bp, Homo sapiens
ccacccaatctaaaa

SEQ ID NO: 1236097 - DNA, 15 bp, Homo sapiens
cccacccaatctaaa

SEQ ID NO: 1236098 - DNA, 15 bp, Homo sapiens
acccacccaatctaa

SEQ ID NO: 1236099 - DNA, 15 bp, Homo sapiens
cacccacccaatcta

SEQ ID NO: 1236100 - DNA, 15 bp, Homo sapiens
ccacccacccaatct

SEQ ID NO: 1236101 - DNA, 15 bp, Homo sapiens
tccacccacccaatc

SEQ ID NO: 1236102 - DNA, 15 bp, Homo sapiens
atccacccacccaat

SEQ ID NO: 1236103 - DNA, 15 bp, Homo sapiens
gatccacccacccaa

SEQ ID NO: 1236104 - DNA, 15 bp, Homo sapiens
agatccacccaccca

SEQ ID NO: 1236105 - DNA, 15 bp, Homo sapiens
gagatccacccaccc

SEQ ID NO: 1236106 - DNA, 15 bp, Homo sapiens
tgagatccacccacc

SEQ ID NO: 1236107 - DNA, 15 bp, Homo sapiens
atgagatccacccac

SEQ ID NO: 1236108 - DNA, 15 bp, Homo sapiens
catgagatccaccca

SEQ ID NO: 1236109 - DNA, 15 bp, Homo sapiens
acatgagatccaccc

SEQ ID NO: 1236110 - DNA, 15 bp, Homo sapiens
gacatgagatccacc

SEQ ID NO: 1236111 - DNA, 15 bp, Homo sapiens
agacatgagatccac

SEQ ID NO: 1236112 - DNA, 15 bp, Homo sapiens
tagacatgagatcca

SEQ ID NO: 1236113 - DNA, 15 bp, Homo sapiens
ctagacatgagatcc

SEQ ID NO: 1236114 - DNA, 15 bp, Homo sapiens
actagacatgagatc

SEQ ID NO: 1236115 - DNA, 15 bp, Homo sapiens
gactagacatgagat

SEQ ID NO: 1236116 - DNA, 15 bp, Homo sapiens
ggactagacatgaga

SEQ ID NO: 1236117 - DNA, 15 bp, Homo sapiens
gggactagacatgag

SEQ ID NO: 1236118 - DNA, 15 bp, Homo sapiens
ggggactagacatga

SEQ ID NO: 1236119 - DNA, 15 bp, Homo sapiens
gggggactagacatg

SEQ ID NO: 1236120 - DNA, 15 bp, Homo sapiens
tgggggactagacat

SEQ ID NO: 1236121 - DNA, 15 bp, Homo sapiens
ttgggggactagaca

SEQ ID NO: 1236122 - DNA, 15 bp, Homo sapiens
cttgggggactagac

SEQ ID NO: 1236123 - DNA, 15 bp, Homo sapiens
acttgggggactaga

SEQ ID NO: 1236124 - DNA, 15 bp, Homo sapiens
cacttgggggactag

SEQ ID NO: 1236125 - DNA, 15 bp, Homo sapiens
acacttgggggacta

SEQ ID NO: 1236126 - DNA, 15 bp, Homo sapiens
gacacttgggggact

SEQ ID NO: 1236127 - DNA, 15 bp, Homo sapiens
agacacttgggggac

SEQ ID NO: 1236128 - DNA, 15 bp, Homo sapiens
gagacacttggggga

SEQ ID NO: 1236129 - DNA, 15 bp, Homo sapiens
ggagacacttggggg

SEQ ID NO: 1236130 - DNA, 15 bp, Homo sapiens
aggagacacttgggg

SEQ ID NO: 1236131 - DNA, 15 bp, Homo sapiens
aaggagacacttggg

SEQ ID NO: 1236132 - DNA, 15 bp, Homo sapiens
taaggagacacttgg

SEQ ID NO: 1236133 - DNA, 15 bp, Homo sapiens
ctaaggagacacttg

SEQ ID NO: 1236134 - DNA, 15 bp, Homo sapiens
gctaaggagacactt

SEQ ID NO: 1236135 - DNA, 15 bp, Homo sapiens
ggctaaggagacact

SEQ ID NO: 1236136 - DNA, 15 bp, Homo sapiens
gggctaaggagacac

SEQ ID NO: 1236137 - DNA, 15 bp, Homo sapiens
agggctaaggagaca

SEQ ID NO: 1236138 - DNA, 15 bp, Homo sapiens
tagggctaaggagac

SEQ ID NO: 1236139 - DNA, 15 bp, Homo sapiens
ctagggctaaggaga

SEQ ID NO: 1236140 - DNA, 15 bp, Homo sapiens
tctagggctaaggag

SEQ ID NO: 1236141 - DNA, 15 bp, Homo sapiens
gtctagggctaagga

SEQ ID NO: 1236142 - DNA, 15 bp, Homo sapiens
ggtctagggctaagg

SEQ ID NO: 1236143 - DNA, 15 bp, Homo sapiens
aggtctagggctaag

SEQ ID NO: 1236144 - DNA, 15 bp, Homo sapiens
gaggtctagggctaa

SEQ ID NO: 1236145 - DNA, 15 bp, Homo sapiens
tgaggtctagggcta

SEQ ID NO: 1236146 - DNA, 15 bp, Homo sapiens
ctgaggtctagggct

SEQ ID NO: 1236147 - DNA, 15 bp, Homo sapiens
gctgaggtctagggc

SEQ ID NO: 1236148 - DNA, 15 bp, Homo sapiens
ggctgaggtctaggg

SEQ ID NO: 1236149 - DNA, 15 bp, Homo sapiens
tggctgaggtctagg

SEQ ID NO: 1236150 - DNA, 15 bp, Homo sapiens
gtggctgaggtctag

SEQ ID NO: 1236151 - DNA, 15 bp, Homo sapiens
ggtggctgaggtcta

SEQ ID NO: 1236152 - DNA, 15 bp, Homo sapiens
aggtggctgaggtct

SEQ ID NO: 1236153 - DNA, 15 bp, Homo sapiens
aaggtggctgaggtc

SEQ ID NO: 1236154 - DNA, 15 bp, Homo sapiens
aaaggtggctgaggt

SEQ ID NO: 1236155 - DNA, 15 bp, Homo sapiens
aaaaggtggctgagg

SEQ ID NO: 1236156 - DNA, 15 bp, Homo sapiens
aaaaaggtggctgag

SEQ ID NO: 1236157 - DNA, 15 bp, Homo sapiens
gaaaaaggtggctga

SEQ ID NO: 1236158 - DNA, 15 bp, Homo sapiens
ggaaaaaggtggctg

SEQ ID NO: 1236159 - DNA, 15 bp, Homo sapiens
gggaaaaaggtggct

SEQ ID NO: 1236160 - DNA, 15 bp, Homo sapiens
agggaaaaaggtggc

SEQ ID NO: 1236161 - DNA, 15 bp, Homo sapiens
cagggaaaaaggtgg

SEQ ID NO: 1236162 - DNA, 15 bp, Homo sapiens
ccagggaaaaaggtg

SEQ ID NO: 1236163 - DNA, 15 bp, Homo sapiens
accagggaaaaaggt

SEQ ID NO: 1236164 - DNA, 15 bp, Homo sapiens
caccagggaaaaagg

SEQ ID NO: 1236165 - DNA, 15 bp, Homo sapiens
tcaccagggaaaaag

SEQ ID NO: 1236166 - DNA, 15 bp, Homo sapiens
ctcaccagggaaaaa

SEQ ID NO: 1236167 - DNA, 15 bp, Homo sapiens
tctcaccagggaaaa

SEQ ID NO: 1236168 - DNA, 15 bp, Homo sapiens
gtctcaccagggaaa

SEQ ID NO: 1236169 - DNA, 15 bp, Homo sapiens
tgtctcaccagggaa

SEQ ID NO: 1236170 - DNA, 15 bp, Homo sapiens
ctgtctcaccaggga

SEQ ID NO: 1236171 - DNA, 15 bp, Homo sapiens
tctgtctcaccaggg

SEQ ID NO: 1236172 - DNA, 15 bp, Homo sapiens
gtctgtctcaccagg

SEQ ID NO: 1236173 - DNA, 15 bp, Homo sapiens
tgtctgtctcaccag

SEQ ID NO: 1236174 - DNA, 15 bp, Homo sapiens
gtgtctgtctcacca

SEQ ID NO: 1236175 - DNA, 15 bp, Homo sapiens
tgtgtctgtctcacc

SEQ ID NO: 1236176 - DNA, 15 bp, Homo sapiens
ctgtgtctgtctcac

SEQ ID NO: 1236177 - DNA, 15 bp, Homo sapiens
tctgtgtctgtctca

SEQ ID NO: 1236178 - DNA, 15 bp, Homo sapiens
ctctgtgtctgtctc

SEQ ID NO: 1236179 - DNA, 15 bp, Homo sapiens
cctctgtgtctgtct

SEQ ID NO: 1236180 - DNA, 15 bp, Homo sapiens
tcctctgtgtctgtc

SEQ ID NO: 1236181 - DNA, 15 bp, Homo sapiens
ttcctctgtgtctgt

SEQ ID NO: 1236182 - DNA, 15 bp, Homo sapiens
attcctctgtgtctg

SEQ ID NO: 1236183 - DNA, 15 bp, Homo sapiens
aattcctctgtgtct

SEQ ID NO: 1236184 - DNA, 15 bp, Homo sapiens
taattcctctgtgtc

SEQ ID NO: 1236185 - DNA, 15 bp, Homo sapiens
ctaattcctctgtgt

SEQ ID NO: 1236186 - DNA, 15 bp, Homo sapiens
gctaattcctctgtg

SEQ ID NO: 1236187 - DNA, 15 bp, Homo sapiens
tgctaattcctctgt

SEQ ID NO: 1236188 - DNA, 15 bp, Homo sapiens
ttgctaattcctctg

SEQ ID NO: 1236189 - DNA, 15 bp, Homo sapiens
tttgctaattcctct

SEQ ID NO: 1236190 - DNA, 15 bp, Homo sapiens
ttttgctaattcctc

SEQ ID NO: 1236191 - DNA, 15 bp, Homo sapiens
cttttgctaattcct

SEQ ID NO: 1236192 - DNA, 15 bp, Homo sapiens
tcttttgctaattcc

SEQ ID NO: 1236193 - DNA, 15 bp, Homo sapiens
ttcttttgctaattc

SEQ ID NO: 1236194 - DNA, 15 bp, Homo sapiens
attcttttgctaatt

SEQ ID NO: 1236195 - DNA, 15 bp, Homo sapiens
aattcttttgctaat

SEQ ID NO: 1236196 - DNA, 15 bp, Homo sapiens
aaattcttttgctaa

SEQ ID NO: 1236197 - DNA, 15 bp, Homo sapiens
taaattcttttgcta

SEQ ID NO: 1236198 - DNA, 15 bp, Homo sapiens
ataaattcttttgct

SEQ ID NO: 1236199 - DNA, 15 bp, Homo sapiens
tataaattcttttgc

SEQ ID NO: 1236200 - DNA, 15 bp, Homo sapiens
atataaattcttttg

SEQ ID NO: 1236201 - DNA, 15 bp, Homo sapiens
gatataaattctttt

SEQ ID NO: 1236202 - DNA, 15 bp, Homo sapiens
ggatataaattcttt

SEQ ID NO: 1236203 - DNA, 15 bp, Homo sapiens
tggatataaattctt

SEQ ID NO: 1236204 - DNA, 15 bp, Homo sapiens
gtggatataaattct

SEQ ID NO: 1236205 - DNA, 15 bp, Homo sapiens
tgtggatataaattc

SEQ ID NO: 1236206 - DNA, 15 bp, Homo sapiens
ttgtggatataaatt

SEQ ID NO: 1236207 - DNA, 15 bp, Homo sapiens
attgtggatataaat

SEQ ID NO: 1236208 - DNA, 15 bp, Homo sapiens
gattgtggatataaa

SEQ ID NO: 1236209 - DNA, 15 bp, Homo sapiens
tgattgtggatataa

SEQ ID NO: 1236210 - DNA, 15 bp, Homo sapiens
ctgattgtggatata

SEQ ID NO: 1236211 - DNA, 15 bp, Homo sapiens
cctgattgtggatat

SEQ ID NO: 1236212 - DNA, 15 bp, Homo sapiens
acctgattgtggata

SEQ ID NO: 1236213 - DNA, 15 bp, Homo sapiens
gacctgattgtggat

SEQ ID NO: 1236214 - DNA, 15 bp, Homo sapiens
agacctgattgtgga

SEQ ID NO: 1236215 - DNA, 15 bp, Homo sapiens
cagacctgattgtgg

SEQ ID NO: 1236216 - DNA, 15 bp, Homo sapiens
acagacctgattgtg

SEQ ID NO: 1236217 - DNA, 15 bp, Homo sapiens
cacagacctgattgt

SEQ ID NO: 1236218 - DNA, 15 bp, Homo sapiens
acacagacctgattg

SEQ ID NO: 1236219 - DNA, 15 bp, Homo sapiens
gacacagacctgatt

SEQ ID NO: 1236220 - DNA, 15 bp, Homo sapiens
agacacagacctgat

SEQ ID NO: 1236221 - DNA, 15 bp, Homo sapiens
aagacacagacctga

SEQ ID NO: 1236222 - DNA, 15 bp, Homo sapiens
taagacacagacctg

SEQ ID NO: 1236223 - DNA, 15 bp, Homo sapiens
ataagacacagacct

SEQ ID NO: 1236224 - DNA, 15 bp, Homo sapiens
gataagacacagacc

SEQ ID NO: 1236225 - DNA, 15 bp, Homo sapiens
tgataagacacagac

SEQ ID NO: 1236226 - DNA, 15 bp, Homo sapiens
ctgataagacacaga

SEQ ID NO: 1236227 - DNA, 15 bp, Homo sapiens
cctgataagacacag

SEQ ID NO: 1236228 - DNA, 15 bp, Homo sapiens
tcctgataagacaca

SEQ ID NO: 1236229 - DNA, 15 bp, Homo sapiens
ttcctgataagacac

SEQ ID NO: 1236230 - DNA, 15 bp, Homo sapiens
tttcctgataagaca

SEQ ID NO: 1236231 - DNA, 15 bp, Homo sapiens
gtttcctgataagac

SEQ ID NO: 1236232 - DNA, 15 bp, Homo sapiens
agtttcctgataaga

SEQ ID NO: 1236233 - DNA, 15 bp, Homo sapiens
cagtttcctgataag

SEQ ID NO: 1236234 - DNA, 15 bp, Homo sapiens
tcagtttcctgataa

SEQ ID NO: 1236235 - DNA, 15 bp, Homo sapiens
ctcagtttcctgata

SEQ ID NO: 1236236 - DNA, 15 bp, Homo sapiens
gctcagtttcctgat

SEQ ID NO: 1236237 - DNA, 15 bp, Homo sapiens
tgctcagtttcctga

SEQ ID NO: 1236238 - DNA, 15 bp, Homo sapiens
gtgctcagtttcctg

SEQ ID NO: 1236239 - DNA, 15 bp, Homo sapiens
ggtgctcagtttcct

SEQ ID NO: 1236240 - DNA, 15 bp, Homo sapiens
gggtgctcagtttcc

SEQ ID NO: 1236241 - DNA, 15 bp, Homo sapiens
ggggtgctcagtttc

SEQ ID NO: 1236242 - DNA, 15 bp, Homo sapiens
tggggtgctcagttt

SEQ ID NO: 1236243 - DNA, 15 bp, Homo sapiens
atggggtgctcagtt

SEQ ID NO: 1236244 - DNA, 15 bp, Homo sapiens
catggggtgctcagt

SEQ ID NO: 1236245 - DNA, 15 bp, Homo sapiens
ccatggggtgctcag

SEQ ID NO: 1236246 - DNA, 15 bp, Homo sapiens
gccatggggtgctca

SEQ ID NO: 1236247 - DNA, 15 bp, Homo sapiens
ggccatggggtgctc

SEQ ID NO: 1236248 - DNA, 15 bp, Homo sapiens
aggccatggggtgct

SEQ ID NO: 1236249 - DNA, 15 bp, Homo sapiens
caggccatggggtgc

SEQ ID NO: 1236250 - DNA, 15 bp, Homo sapiens
tcaggccatggggtg

SEQ ID NO: 1236251 - DNA, 15 bp, Homo sapiens
atcaggccatggggt

SEQ ID NO: 1236252 - DNA, 15 bp, Homo sapiens
catcaggccatgggg

SEQ ID NO: 1236253 - DNA, 15 bp, Homo sapiens
ccatcaggccatggg

SEQ ID NO: 1236254 - DNA, 15 bp, Homo sapiens
tccatcaggccatgg

SEQ ID NO: 1236255 - DNA, 15 bp, Homo sapiens
gtccatcaggccatg

SEQ ID NO: 1236256 - DNA, 15 bp, Homo sapiens
agtccatcaggccat

SEQ ID NO: 1236257 - DNA, 15 bp, Homo sapiens
cagtccatcaggcca

SEQ ID NO: 1236258 - DNA, 15 bp, Homo sapiens
acagtccatcaggcc

SEQ ID NO: 1236259 - DNA, 15 bp, Homo sapiens
cacagtccatcaggc

SEQ ID NO: 1236260 - DNA, 15 bp, Homo sapiens
acacagtccatcagg

SEQ ID NO: 1236261 - DNA, 15 bp, Homo sapiens
tacacagtccatcag

SEQ ID NO: 1236262 - DNA, 15 bp, Homo sapiens
gtacacagtccatca

SEQ ID NO: 1236263 - DNA, 15 bp, Homo sapiens
ggtacacagtccatc

SEQ ID NO: 1236264 - DNA, 15 bp, Homo sapiens
aggtacacagtccat

SEQ ID NO: 1236265 - DNA, 15 bp, Homo sapiens
gaggtacacagtcca

SEQ ID NO: 1236266 - DNA, 15 bp, Homo sapiens
tgaggtacacagtcc

SEQ ID NO: 1236267 - DNA, 15 bp, Homo sapiens
ctgaggtacacagtc

SEQ ID NO: 1236268 - DNA, 15 bp, Homo sapiens
tctgaggtacacagt

SEQ ID NO: 1236269 - DNA, 15 bp, Homo sapiens
ttctgaggtacacag

SEQ ID NO: 1236270 - DNA, 15 bp, Homo sapiens
attctgaggtacaca

SEQ ID NO: 1236271 - DNA, 15 bp, Homo sapiens
tattctgaggtacac

SEQ ID NO: 1236272 - DNA, 15 bp, Homo sapiens
atattctgaggtaca

SEQ ID NO: 1236273 - DNA, 15 bp, Homo sapiens
catattctgaggtac

SEQ ID NO: 1236274 - DNA, 15 bp, Homo sapiens
acatattctgaggta

SEQ ID NO: 1236275 - DNA, 15 bp, Homo sapiens
cacatattctgaggt

SEQ ID NO: 1236276 - DNA, 15 bp, Homo sapiens
gcacatattctgagg

SEQ ID NO: 1236277 - DNA, 15 bp, Homo sapiens
ggcacatattctgag

SEQ ID NO: 1236278 - DNA, 15 bp, Homo sapiens
aggcacatattctga

SEQ ID NO: 1236279 - DNA, 15 bp, Homo sapiens
gaggcacatattctg

SEQ ID NO: 1236280 - DNA, 15 bp, Homo sapiens
ggaggcacatattct

SEQ ID NO: 1236281 - DNA, 15 bp, Homo sapiens
tggaggcacatattc

SEQ ID NO: 1236282 - DNA, 15 bp, Homo sapiens
ttggaggcacatatt

SEQ ID NO: 1236283 - DNA, 15 bp, Homo sapiens
tttggaggcacatat

SEQ ID NO: 1236284 - DNA, 15 bp, Homo sapiens
ttttggaggcacata

SEQ ID NO: 1236285 - DNA, 15 bp, Homo sapiens
attttggaggcacat

SEQ ID NO: 1236286 - DNA, 15 bp, Homo sapiens
aattttggaggcaca

SEQ ID NO: 1236287 - DNA, 15 bp, Homo sapiens
aaattttggaggcac

SEQ ID NO: 1236288 - DNA, 15 bp, Homo sapiens
aaaattttggaggca

SEQ ID NO: 1236289 - DNA, 15 bp, Homo sapiens
aaaaattttggaggc

SEQ ID NO: 1236290 - DNA, 15 bp, Homo sapiens
aaaaaattttggagg

SEQ ID NO: 1236291 - DNA, 15 bp, Homo sapiens
taaaaaattttggag

SEQ ID NO: 1236292 - DNA, 15 bp, Homo sapiens
ataaaaaattttgga

SEQ ID NO: 1236293 - DNA, 15 bp, Homo sapiens
aataaaaaattttgg

SEQ ID NO: 1236294 - DNA, 15 bp, Homo sapiens
taataaaaaattttg

SEQ ID NO: 1236295 - DNA, 15 bp, Homo sapiens
ctaataaaaaatttt

SEQ ID NO: 1236296 - DNA, 15 bp, Homo sapiens
tctaataaaaaattt

SEQ ID NO: 1236297 - DNA, 15 bp, Homo sapiens
atctaataaaaaatt

SEQ ID NO: 1236298 - DNA, 15 bp, Homo sapiens
catctaataaaaaat

SEQ ID NO: 1236299 - DNA, 15 bp, Homo sapiens
tcatctaataaaaaa

SEQ ID NO: 1236300 - DNA, 15 bp, Homo sapiens
ctcatctaataaaaa

SEQ ID NO: 1236301 - DNA, 15 bp, Homo sapiens
actcatctaataaaa

SEQ ID NO: 1236302 - DNA, 15 bp, Homo sapiens
tactcatctaataaa

SEQ ID NO: 1236303 - DNA, 15 bp, Homo sapiens
ctactcatctaataa

SEQ ID NO: 1236304 - DNA, 15 bp, Homo sapiens
actactcatctaata

SEQ ID NO: 1236305 - DNA, 15 bp, Homo sapiens
cactactcatctaat

SEQ ID NO: 1236306 - DNA, 15 bp, Homo sapiens
tcactactcatctaa

SEQ ID NO: 1236307 - DNA, 15 bp, Homo sapiens
gtcactactcatcta

SEQ ID NO: 1236308 - DNA, 15 bp, Homo sapiens
agtcactactcatct

SEQ ID NO: 1236309 - DNA, 15 bp, Homo sapiens
cagtcactactcatc

SEQ ID NO: 1236310 - DNA, 15 bp, Homo sapiens
gcagtcactactcat

SEQ ID NO: 1236311 - DNA, 15 bp, Homo sapiens
tgcagtcactactca

SEQ ID NO: 1236312 - DNA, 15 bp, Homo sapiens
ctgcagtcactactc

SEQ ID NO: 1236313 - DNA, 15 bp, Homo sapiens
actgcagtcactact

SEQ ID NO: 1236314 - DNA, 15 bp, Homo sapiens
gactgcagtcactac

SEQ ID NO: 1236315 - DNA, 15 bp, Homo sapiens
agactgcagtcacta

SEQ ID NO: 1236316 - DNA, 15 bp, Homo sapiens
gagactgcagtcact

SEQ ID NO: 1236317 - DNA, 15 bp, Homo sapiens
ggagactgcagtcac

SEQ ID NO: 1236318 - DNA, 15 bp, Homo sapiens
tggagactgcagtca

SEQ ID NO: 1236319 - DNA, 15 bp, Homo sapiens
ttggagactgcagtc

SEQ ID NO: 1236320 - DNA, 15 bp, Homo sapiens
tttggagactgcagt

SEQ ID NO: 1236321 - DNA, 15 bp, Homo sapiens
ttttggagactgcag

SEQ ID NO: 1236322 - DNA, 15 bp, Homo sapiens
gttttggagactgca

SEQ ID NO: 1236323 - DNA, 15 bp, Homo sapiens
agttttggagactgc

SEQ ID NO: 1236324 - DNA, 15 bp, Homo sapiens
gagttttggagactg

SEQ ID NO: 1236325 - DNA, 15 bp, Homo sapiens
tgagttttggagact

SEQ ID NO: 1236326 - DNA, 15 bp, Homo sapiens
atgagttttggagac

SEQ ID NO: 1236327 - DNA, 15 bp, Homo sapiens
catgagttttggaga

SEQ ID NO: 1236328 - DNA, 15 bp, Homo sapiens
gcatgagttttggag

SEQ ID NO: 1236329 - DNA, 15 bp, Homo sapiens
agcatgagttttgga

SEQ ID NO: 1236330 - DNA, 15 bp, Homo sapiens
aagcatgagttttgg

SEQ ID NO: 1236331 - DNA, 15 bp, Homo sapiens
aaagcatgagttttg

SEQ ID NO: 1236332 - DNA, 15 bp, Homo sapiens
gaaagcatgagtttt

SEQ ID NO: 1236333 - DNA, 15 bp, Homo sapiens
tgaaagcatgagttt

SEQ ID NO: 1236334 - DNA, 15 bp, Homo sapiens
ttgaaagcatgagtt

SEQ ID NO: 1236335 - DNA, 15 bp, Homo sapiens
tttgaaagcatgagt

SEQ ID NO: 1236336 - DNA, 15 bp, Homo sapiens
atttgaaagcatgag

SEQ ID NO: 1236337 - DNA, 15 bp, Homo sapiens
catttgaaagcatga

SEQ ID NO: 1236338 - DNA, 15 bp, Homo sapiens
ccatttgaaagcatg

SEQ ID NO: 1236339 - DNA, 15 bp, Homo sapiens
accatttgaaagcat

SEQ ID NO: 1236340 - DNA, 15 bp, Homo sapiens
gaccatttgaaagca

SEQ ID NO: 1236341 - DNA, 15 bp, Homo sapiens
tgaccatttgaaagc

SEQ ID NO: 1236342 - DNA, 15 bp, Homo sapiens
ttgaccatttgaaag

SEQ ID NO: 1236343 - DNA, 15 bp, Homo sapiens
tttgaccatttgaaa

SEQ ID NO: 1236344 - DNA, 15 bp, Homo sapiens
gtttgaccatttgaa

SEQ ID NO: 1236345 - DNA, 15 bp, Homo sapiens
ggtttgaccatttga

SEQ ID NO: 1236346 - DNA, 15 bp, Homo sapiens
aggtttgaccatttg

SEQ ID NO: 1236347 - DNA, 15 bp, Homo sapiens
taggtttgaccattt

SEQ ID NO: 1236348 - DNA, 15 bp, Homo sapiens
gtaggtttgaccatt

SEQ ID NO: 1236349 - DNA, 15 bp, Homo sapiens
ggtaggtttgaccat

SEQ ID NO: 1236350 - DNA, 15 bp, Homo sapiens
tggtaggtttgacca

SEQ ID NO: 1236351 - DNA, 15 bp, Homo sapiens
ttggtaggtttgacc

SEQ ID NO: 1236352 - DNA, 15 bp, Homo sapiens
cttggtaggtttgac

SEQ ID NO: 1236353 - DNA, 15 bp, Homo sapiens
acttggtaggtttga

SEQ ID NO: 1236354 - DNA, 15 bp, Homo sapiens
gacttggtaggtttg

SEQ ID NO: 1236355 - DNA, 15 bp, Homo sapiens
ggacttggtaggttt

SEQ ID NO: 1236356 - DNA, 15 bp, Homo sapiens
gggacttggtaggtt

SEQ ID NO: 1236357 - DNA, 15 bp, Homo sapiens
agggacttggtaggt

SEQ ID NO: 1236358 - DNA, 15 bp, Homo sapiens
cagggacttggtagg

SEQ ID NO: 1236359 - DNA, 15 bp, Homo sapiens
gcagggacttggtag

SEQ ID NO: 1236360 - DNA, 15 bp, Homo sapiens
tgcagggacttggta

SEQ ID NO: 1236361 - DNA, 15 bp, Homo sapiens
ttgcagggacttggt

SEQ ID NO: 1236362 - DNA, 15 bp, Homo sapiens
cttgcagggacttgg

SEQ ID NO: 1236363 - DNA, 15 bp, Homo sapiens
ccttgcagggacttg

SEQ ID NO: 1236364 - DNA, 15 bp, Homo sapiens
cccttgcagggactt

SEQ ID NO: 1236365 - DNA, 15 bp, Homo sapiens
acccttgcagggact

SEQ ID NO: 1236366 - DNA, 15 bp, Homo sapiens
gacccttgcagggac

SEQ ID NO: 1236367 - DNA, 15 bp, Homo sapiens
tgacccttgcaggga

SEQ ID NO: 1236368 - DNA, 15 bp, Homo sapiens
ctgacccttgcaggg

SEQ ID NO: 1236369 - DNA, 15 bp, Homo sapiens
cctgacccttgcagg

SEQ ID NO: 1236370 - DNA, 15 bp, Homo sapiens
ccctgacccttgcag

SEQ ID NO: 1236371 - DNA, 15 bp, Homo sapiens
cccctgacccttgca

SEQ ID NO: 1236372 - DNA, 15 bp, Homo sapiens
acccctgacccttgc

SEQ ID NO: 1236373 - DNA, 15 bp, Homo sapiens
gacccctgacccttg

SEQ ID NO: 1236374 - DNA, 15 bp, Homo sapiens
agacccctgaccctt

SEQ ID NO: 1236375 - DNA, 15 bp, Homo sapiens
gagacccctgaccct

SEQ ID NO: 1236376 - DNA, 15 bp, Homo sapiens
agagacccctgaccc

SEQ ID NO: 1236377 - DNA, 15 bp, Homo sapiens
tagagacccctgacc

SEQ ID NO: 1236378 - DNA, 15 bp, Homo sapiens
ttagagacccctgac

SEQ ID NO: 1236379 - DNA, 15 bp, Homo sapiens
cttagagacccctga

SEQ ID NO: 1236380 - DNA, 15 bp, Homo sapiens
acttagagacccctg

SEQ ID NO: 1236381 - DNA, 15 bp, Homo sapiens
cacttagagacccct

SEQ ID NO: 1236382 - DNA, 15 bp, Homo sapiens
ccacttagagacccc

SEQ ID NO: 1236383 - DNA, 15 bp, Homo sapiens
tccacttagagaccc

SEQ ID NO: 1236384 - DNA, 15 bp, Homo sapiens
atccacttagagacc

SEQ ID NO: 1236385 - DNA, 15 bp, Homo sapiens
tatccacttagagac

SEQ ID NO: 1236386 - DNA, 15 bp, Homo sapiens
ctatccacttagaga

SEQ ID NO: 1236387 - DNA, 15 bp, Homo sapiens
cctatccacttagag

SEQ ID NO: 1236388 - DNA, 15 bp, Homo sapiens
ccctatccacttaga

SEQ ID NO: 1236389 - DNA, 15 bp, Homo sapiens
cccctatccacttag

SEQ ID NO: 1236390 - DNA, 15 bp, Homo sapiens
acccctatccactta

SEQ ID NO: 1236391 - DNA, 15 bp, Homo sapiens
cacccctatccactt

SEQ ID NO: 1236392 - DNA, 15 bp, Homo sapiens
acacccctatccact

SEQ ID NO: 1236393 - DNA, 15 bp, Homo sapiens
aacacccctatccac

SEQ ID NO: 1236394 - DNA, 15 bp, Homo sapiens
aaacacccctatcca

SEQ ID NO: 1236395 - DNA, 15 bp, Homo sapiens
taaacacccctatcc

SEQ ID NO: 1236396 - DNA, 15 bp, Homo sapiens
ctaaacacccctatc

SEQ ID NO: 1236397 - DNA, 15 bp, Homo sapiens
tctaaacacccctat

SEQ ID NO: 1236398 - DNA, 15 bp, Homo sapiens
gtctaaacaccccta

SEQ ID NO: 1236399 - DNA, 15 bp, Homo sapiens
ggtctaaacacccct

SEQ ID NO: 1236400 - DNA, 15 bp, Homo sapiens
tggtctaaacacccc

SEQ ID NO: 1236401 - DNA, 15 bp, Homo sapiens
gtggtctaaacaccc

SEQ ID NO: 1236402 - DNA, 15 bp, Homo sapiens
cgtggtctaaacacc

SEQ ID NO: 1236403 - DNA, 15 bp, Homo sapiens
gcgtggtctaaacac

SEQ ID NO: 1236404 - DNA, 15 bp, Homo sapiens
ggcgtggtctaaaca

SEQ ID NO: 1236405 - DNA, 15 bp, Homo sapiens
gggcgtggtctaaac

SEQ ID NO: 1236406 - DNA, 15 bp, Homo sapiens
ggggcgtggtctaaa

SEQ ID NO: 1236407 - DNA, 15 bp, Homo sapiens
aggggcgtggtctaa

SEQ ID NO: 1236408 - DNA, 15 bp, Homo sapiens
aaggggcgtggtcta

SEQ ID NO: 1236409 - DNA, 15 bp, Homo sapiens
gaaggggcgtggtct

SEQ ID NO: 1236410 - DNA, 15 bp, Homo sapiens
ggaaggggcgtggtc

SEQ ID NO: 1236411 - DNA, 15 bp, Homo sapiens
tggaaggggcgtggt

SEQ ID NO: 1236412 - DNA, 15 bp, Homo sapiens
gtggaaggggcgtgg

SEQ ID NO: 1236413 - DNA, 15 bp, Homo sapiens
agtggaaggggcgtg

SEQ ID NO: 1236414 - DNA, 15 bp, Homo sapiens
tagtggaaggggcgt

SEQ ID NO: 1236415 - DNA, 15 bp, Homo sapiens
ttagtggaaggggcg

SEQ ID NO: 1236416 - DNA, 15 bp, Homo sapiens
tttagtggaaggggc

SEQ ID NO: 1236417 - DNA, 15 bp, Homo sapiens
gtttagtggaagggg

SEQ ID NO: 1236418 - DNA, 15 bp, Homo sapiens
tgtttagtggaaggg

SEQ ID NO: 1236419 - DNA, 15 bp, Homo sapiens
atgtttagtggaagg

SEQ ID NO: 1236420 - DNA, 15 bp, Homo sapiens
aatgtttagtggaag

SEQ ID NO: 1236421 - DNA, 15 bp, Homo sapiens
aaatgtttagtggaa

SEQ ID NO: 1236422 - DNA, 15 bp, Homo sapiens
aaaatgtttagtgga

SEQ ID NO: 1236423 - DNA, 15 bp, Homo sapiens
caaaatgtttagtgg

SEQ ID NO: 1236424 - DNA, 15 bp, Homo sapiens
gcaaaatgtttagtg

SEQ ID NO: 1236425 - DNA, 15 bp, Homo sapiens
agcaaaatgtttagt

SEQ ID NO: 1236426 - DNA, 15 bp, Homo sapiens
aagcaaaatgtttag

SEQ ID NO: 1236427 - DNA, 15 bp, Homo sapiens
gaagcaaaatgttta

SEQ ID NO: 1236428 - DNA, 15 bp, Homo sapiens
ggaagcaaaatgttt

SEQ ID NO: 1236429 - DNA, 15 bp, Homo sapiens
gggaagcaaaatgtt

SEQ ID NO: 1236430 - DNA, 15 bp, Homo sapiens
agggaagcaaaatgt

SEQ ID NO: 1236431 - DNA, 15 bp, Homo sapiens
aagggaagcaaaatg

SEQ ID NO: 1236432 - DNA, 15 bp, Homo sapiens
caagggaagcaaaat

SEQ ID NO: 1236433 - DNA, 15 bp, Homo sapiens
tcaagggaagcaaaa

SEQ ID NO: 1236434 - DNA, 15 bp, Homo sapiens
ctcaagggaagcaaa

SEQ ID NO: 1236435 - DNA, 15 bp, Homo sapiens
tctcaagggaagcaa

SEQ ID NO: 1236436 - DNA, 15 bp, Homo sapiens
ttctcaagggaagca

SEQ ID NO: 1236437 - DNA, 15 bp, Homo sapiens
gttctcaagggaagc

SEQ ID NO: 1236438 - DNA, 15 bp, Homo sapiens
ggttctcaagggaag

SEQ ID NO: 1236439 - DNA, 15 bp, Homo sapiens
tggttctcaagggaa

SEQ ID NO: 1236440 - DNA, 15 bp, Homo sapiens
ctggttctcaaggga

SEQ ID NO: 1236441 - DNA, 15 bp, Homo sapiens
tctggttctcaaggg

SEQ ID NO: 1236442 - DNA, 15 bp, Homo sapiens
ctctggttctcaagg

SEQ ID NO: 1236443 - DNA, 15 bp, Homo sapiens
cctctggttctcaag

SEQ ID NO: 1236444 - DNA, 15 bp, Homo sapiens
ccctctggttctcaa

SEQ ID NO: 1236445 - DNA, 15 bp, Homo sapiens
tccctctggttctca

SEQ ID NO: 1236446 - DNA, 15 bp, Homo sapiens
ttccctctggttctc

SEQ ID NO: 1236447 - DNA, 15 bp, Homo sapiens
tttccctctggttct

SEQ ID NO: 1236448 - DNA, 15 bp, Homo sapiens
ttttccctctggttc

SEQ ID NO: 1236449 - DNA, 15 bp, Homo sapiens
cttttccctctggtt

SEQ ID NO: 1236450 - DNA, 15 bp, Homo sapiens
tcttttccctctggt

SEQ ID NO: 1236451 - DNA, 15 bp, Homo sapiens
atcttttccctctgg

SEQ ID NO: 1236452 - DNA, 15 bp, Homo sapiens
tatcttttccctctg

SEQ ID NO: 1236453 - DNA, 15 bp, Homo sapiens
ttatcttttccctct

SEQ ID NO: 1236454 - DNA, 15 bp, Homo sapiens
attatcttttccctc

SEQ ID NO: 1236455 - DNA, 15 bp, Homo sapiens
cattatcttttccct

SEQ ID NO: 1236456 - DNA, 15 bp, Homo sapiens
ccattatcttttccc

SEQ ID NO: 1236457 - DNA, 15 bp, Homo sapiens
cccattatcttttcc

SEQ ID NO: 1236458 - DNA, 15 bp, Homo sapiens
ccccattatcttttc

SEQ ID NO: 1236459 - DNA, 15 bp, Homo sapiens
tccccattatctttt

SEQ ID NO: 1236460 - DNA, 15 bp, Homo sapiens
gtccccattatcttt

SEQ ID NO: 1236461 - DNA, 15 bp, Homo sapiens
agtccccattatctt

SEQ ID NO: 1236462 - DNA, 15 bp, Homo sapiens
aagtccccattatct

SEQ ID NO: 1236463 - DNA, 15 bp, Homo sapiens
aaagtccccattatc

SEQ ID NO: 1236464 - DNA, 15 bp, Homo sapiens
gaaagtccccattat

SEQ ID NO: 1236465 - DNA, 15 bp, Homo sapiens
agaaagtccccatta

SEQ ID NO: 1236466 - DNA, 15 bp, Homo sapiens
gagaaagtccccatt

SEQ ID NO: 1236467 - DNA, 15 bp, Homo sapiens
ggagaaagtccccat

SEQ ID NO: 1236468 - DNA, 15 bp, Homo sapiens
tggagaaagtcccca

SEQ ID NO: 1236469 - DNA, 15 bp, Homo sapiens
ctggagaaagtcccc

SEQ ID NO: 1236470 - DNA, 15 bp, Homo sapiens
gctggagaaagtccc

SEQ ID NO: 1236471 - DNA, 15 bp, Homo sapiens
ggctggagaaagtcc

SEQ ID NO: 1236472 - DNA, 15 bp, Homo sapiens
gggctggagaaagtc

SEQ ID NO: 1236473 - DNA, 15 bp, Homo sapiens
agggctggagaaagt

SEQ ID NO: 1236474 - DNA, 15 bp, Homo sapiens
cagggctggagaaag

SEQ ID NO: 1236475 - DNA, 15 bp, Homo sapiens
tcagggctggagaaa

SEQ ID NO: 1236476 - DNA, 15 bp, Homo sapiens
gtcagggctggagaa

SEQ ID NO: 1236477 - DNA, 15 bp, Homo sapiens
tgtcagggctggaga

SEQ ID NO: 1236478 - DNA, 15 bp, Homo sapiens
atgtcagggctggag

SEQ ID NO: 1236479 - DNA, 15 bp, Homo sapiens
gatgtcagggctgga

SEQ ID NO: 1236480 - DNA, 15 bp, Homo sapiens
tgatgtcagggctgg

SEQ ID NO: 1236481 - DNA, 15 bp, Homo sapiens
gtgatgtcagggctg

SEQ ID NO: 1236482 - DNA, 15 bp, Homo sapiens
ggtgatgtcagggct

SEQ ID NO: 1236483 - DNA, 15 bp, Homo sapiens
tggtgatgtcagggc

SEQ ID NO: 1236484 - DNA, 15 bp, Homo sapiens
atggtgatgtcaggg

SEQ ID NO: 1236485 - DNA, 15 bp, Homo sapiens
tatggtgatgtcagg

SEQ ID NO: 1236486 - DNA, 15 bp, Homo sapiens
gtatggtgatgtcag

SEQ ID NO: 1236487 - DNA, 15 bp, Homo sapiens
ggtatggtgatgtca

SEQ ID NO: 1236488 - DNA, 15 bp, Homo sapiens
aggtatggtgatgtc

SEQ ID NO: 1236489 - DNA, 15 bp, Homo sapiens
caggtatggtgatgt

SEQ ID NO: 1236490 - DNA, 15 bp, Homo sapiens
tcaggtatggtgatg

SEQ ID NO: 1236491 - DNA, 15 bp, Homo sapiens
atcaggtatggtgat

SEQ ID NO: 1236492 - DNA, 15 bp, Homo sapiens
tatcaggtatggtga

SEQ ID NO: 1236493 - DNA, 15 bp, Homo sapiens
atatcaggtatggtg

SEQ ID NO: 1236494 - DNA, 15 bp, Homo sapiens
aatatcaggtatggt

SEQ ID NO: 1236495 - DNA, 15 bp, Homo sapiens
aaatatcaggtatgg

SEQ ID NO: 1236496 - DNA, 15 bp, Homo sapiens
aaaatatcaggtatg

SEQ ID NO: 1236497 - DNA, 15 bp, Homo sapiens
caaaatatcaggtat

SEQ ID NO: 1236498 - DNA, 15 bp, Homo sapiens
gcaaaatatcaggta

SEQ ID NO: 1236499 - DNA, 15 bp, Homo sapiens
agcaaaatatcaggt

SEQ ID NO: 1236500 - DNA, 15 bp, Homo sapiens
aagcaaaatatcagg

SEQ ID NO: 1236501 - DNA, 15 bp, Homo sapiens
aaagcaaaatatcag

SEQ ID NO: 1236502 - DNA, 15 bp, Homo sapiens
agaaagcaaaatatc

SEQ ID NO: 1236503 - DNA, 15 bp, Homo sapiens
tagaaagcaaaatat

SEQ ID NO: 1236504 - DNA, 15 bp, Homo sapiens
atagaaagcaaaata

SEQ ID NO: 1236505 - DNA, 15 bp, Homo sapiens
gatagaaagcaaaat

SEQ ID NO: 1236506 - DNA, 15 bp, Homo sapiens
ggatagaaagcaaaa

SEQ ID NO: 1236507 - DNA, 15 bp, Homo sapiens
gggatagaaagcaaa

SEQ ID NO: 1236508 - DNA, 15 bp, Homo sapiens
tgggatagaaagcaa

SEQ ID NO: 1236509 - DNA, 15 bp, Homo sapiens
ctgggatagaaagca

SEQ ID NO: 1236510 - DNA, 15 bp, Homo sapiens
tctgggatagaaagc

SEQ ID NO: 1236511 - DNA, 15 bp, Homo sapiens
ttctgggatagaaag

SEQ ID NO: 1236512 - DNA, 15 bp, Homo sapiens
cttctgggatagaaa

SEQ ID NO: 1236513 - DNA, 15 bp, Homo sapiens
tcttctgggatagaa

SEQ ID NO: 1236514 - DNA, 15 bp, Homo sapiens
gtcttctgggataga

SEQ ID NO: 1236515 - DNA, 15 bp, Homo sapiens
agtcttctgggatag

SEQ ID NO: 1236516 - DNA, 15 bp, Homo sapiens
tagtcttctgggata

SEQ ID NO: 1236517 - DNA, 15 bp, Homo sapiens
gtagtcttctgggat

SEQ ID NO: 1236518 - DNA, 15 bp, Homo sapiens
tgtagtcttctggga

SEQ ID NO: 1236519 - DNA, 15 bp, Homo sapiens
ttgtagtcttctggg

SEQ ID NO: 1236520 - DNA, 15 bp, Homo sapiens
attgtagtcttctgg

SEQ ID NO: 1236521 - DNA, 15 bp, Homo sapiens
tattgtagtcttctg

SEQ ID NO: 1236522 - DNA, 15 bp, Homo sapiens
atattgtagtcttct

SEQ ID NO: 1236523 - DNA, 15 bp, Homo sapiens
gatattgtagtcttc

SEQ ID NO: 1236524 - DNA, 15 bp, Homo sapiens
agatattgtagtctt

SEQ ID NO: 1236525 - DNA, 15 bp, Homo sapiens
gagatattgtagtct

SEQ ID NO: 1236526 - DNA, 15 bp, Homo sapiens
tgagatattgtagtc

SEQ ID NO: 1236527 - DNA, 15 bp, Homo sapiens
ctgagatattgtagt

SEQ ID NO: 1236528 - DNA, 15 bp, Homo sapiens
tctgagatattgtag

SEQ ID NO: 1236529 - DNA, 15 bp, Homo sapiens
gtctgagatattgta

SEQ ID NO: 1236530 - DNA, 15 bp, Homo sapiens
agtctgagatattgt

SEQ ID NO: 1236531 - DNA, 15 bp, Homo sapiens
aagtctgagatattg

SEQ ID NO: 1236532 - DNA, 15 bp, Homo sapiens
gaagtctgagatatt

SEQ ID NO: 1236533 - DNA, 15 bp, Homo sapiens
agaagtctgagatat

SEQ ID NO: 1236534 - DNA, 15 bp, Homo sapiens
gagaagtctgagata

SEQ ID NO: 1236535 - DNA, 15 bp, Homo sapiens
tgagaagtctgagat

SEQ ID NO: 1236536 - DNA, 15 bp, Homo sapiens
atgagaagtctgaga

SEQ ID NO: 1236537 - DNA, 15 bp, Homo sapiens
gatgagaagtctgag

SEQ ID NO: 1236538 - DNA, 15 bp, Homo sapiens
ggatgagaagtctga

SEQ ID NO: 1236539 - DNA, 15 bp, Homo sapiens
tggatgagaagtctg

SEQ ID NO: 1236540 - DNA, 15 bp, Homo sapiens
gtggatgagaagtct

SEQ ID NO: 1236541 - DNA, 15 bp, Homo sapiens
tgtggatgagaagtc

SEQ ID NO: 1236542 - DNA, 15 bp, Homo sapiens
gtgtggatgagaagt

SEQ ID NO: 1236543 - DNA, 15 bp, Homo sapiens
tgtgtggatgagaag

SEQ ID NO: 1236544 - DNA, 15 bp, Homo sapiens
ttgtgtggatgagaa

SEQ ID NO: 1236545 - DNA, 15 bp, Homo sapiens
attgtgtggatgaga

SEQ ID NO: 1236546 - DNA, 15 bp, Homo sapiens
cattgtgtggatgag

SEQ ID NO: 1236547 - DNA, 15 bp, Homo sapiens
tcattgtgtggatga

SEQ ID NO: 1236548 - DNA, 15 bp, Homo sapiens
ctcattgtgtggatg

SEQ ID NO: 1236549 - DNA, 15 bp, Homo sapiens
tctcattgtgtggat

SEQ ID NO: 1236550 - DNA, 15 bp, Homo sapiens
ttctcattgtgtgga

SEQ ID NO: 1236551 - DNA, 15 bp, Homo sapiens
attctcattgtgtgg

SEQ ID NO: 1236552 - DNA, 15 bp, Homo sapiens
tattctcattgtgtg

SEQ ID NO: 1236553 - DNA, 15 bp, Homo sapiens
gtattctcattgtgt

SEQ ID NO: 1236554 - DNA, 15 bp, Homo sapiens
agtattctcattgtg

SEQ ID NO: 1236555 - DNA, 15 bp, Homo sapiens
tagtattctcattgt

SEQ ID NO: 1236556 - DNA, 15 bp, Homo sapiens
ttagtattctcattg

SEQ ID NO: 1236557 - DNA, 15 bp, Homo sapiens
tttagtattctcatt

SEQ ID NO: 1236558 - DNA, 15 bp, Homo sapiens
ttttagtattctcat

SEQ ID NO: 1236559 - DNA, 15 bp, Homo sapiens
tttttagtattctca

SEQ ID NO: 1236560 - DNA, 15 bp, Homo sapiens
gtttttagtattctc

SEQ ID NO: 1236561 - DNA, 15 bp, Homo sapiens
ggtttttagtattct

SEQ ID NO: 1236562 - DNA, 15 bp, Homo sapiens
aggtttttagtattc

SEQ ID NO: 1236563 - DNA, 15 bp, Homo sapiens
taggtttttagtatt

SEQ ID NO: 1236564 - DNA, 15 bp, Homo sapiens
ataggtttttagtat

SEQ ID NO: 1236565 - DNA, 15 bp, Homo sapiens
gataggtttttagta

SEQ ID NO: 1236566 - DNA, 15 bp, Homo sapiens
tgataggtttttagt

SEQ ID NO: 1236567 - DNA, 15 bp, Homo sapiens
ctgataggtttttag

SEQ ID NO: 1236568 - DNA, 15 bp, Homo sapiens
actgataggttttta

SEQ ID NO: 1236569 - DNA, 15 bp, Homo sapiens
gactgataggttttt

SEQ ID NO: 1236570 - DNA, 15 bp, Homo sapiens
tgactgataggtttt

SEQ ID NO: 1236571 - DNA, 15 bp, Homo sapiens
ttgactgataggttt

SEQ ID NO: 1236572 - DNA, 15 bp, Homo sapiens
gttgactgataggtt

SEQ ID NO: 1236573 - DNA, 15 bp, Homo sapiens
tgttgactgataggt

SEQ ID NO: 1236574 - DNA, 15 bp, Homo sapiens
ctgttgactgatagg

SEQ ID NO: 1236575 - DNA, 15 bp, Homo sapiens
actgttgactgatag

SEQ ID NO: 1236576 - DNA, 15 bp, Homo sapiens
tactgttgactgata

SEQ ID NO: 1236577 - DNA, 15 bp, Homo sapiens
ttactgttgactgat

SEQ ID NO: 1236578 - DNA, 15 bp, Homo sapiens
attactgttgactga

SEQ ID NO: 1236579 - DNA, 15 bp, Homo sapiens
aattactgttgactg

SEQ ID NO: 1236580 - DNA, 15 bp, Homo sapiens
aaattactgttgact

SEQ ID NO: 1236581 - DNA, 15 bp, Homo sapiens
taaattactgttgac

SEQ ID NO: 1236582 - DNA, 15 bp, Homo sapiens
ataaattactgttga

SEQ ID NO: 1236583 - DNA, 15 bp, Homo sapiens
aataaattactgttg

SEQ ID NO: 1236584 - DNA, 15 bp, Homo sapiens
caataaattactgtt

SEQ ID NO: 1236585 - DNA, 15 bp, Homo sapiens
acaataaattactgt

SEQ ID NO: 1236586 - DNA, 15 bp, Homo sapiens
tacaataaattactg

SEQ ID NO: 1236587 - DNA, 15 bp, Homo sapiens
gtacaataaattact

SEQ ID NO: 1236588 - DNA, 15 bp, Homo sapiens
tgtacaataaattac

SEQ ID NO: 1236589 - DNA, 15 bp, Homo sapiens
atgtacaataaatta

SEQ ID NO: 1236590 - DNA, 15 bp, Homo sapiens
aatgtacaataaatt

SEQ ID NO: 1236591 - DNA, 15 bp, Homo sapiens
aaatgtacaataaat

SEQ ID NO: 1236592 - DNA, 15 bp, Homo sapiens
taaatgtacaataaa

SEQ ID NO: 1236593 - DNA, 15 bp, Homo sapiens
ttaaatgtacaataa

SEQ ID NO: 1236594 - DNA, 15 bp, Homo sapiens
tttaaatgtacaata

SEQ ID NO: 1236595 - DNA, 15 bp, Homo sapiens
ttttaaatgtacaat

SEQ ID NO: 1236596 - DNA, 15 bp, Homo sapiens
tttttaaatgtacaa

SEQ ID NO: 1236597 - DNA, 15 bp, Homo sapiens
atttttaaatgtaca

SEQ ID NO: 1236598 - DNA, 15 bp, Homo sapiens
tatttttaaatgtac

SEQ ID NO: 1236599 - DNA, 15 bp, Homo sapiens
ttatttttaaatgta

SEQ ID NO: 1236600 - DNA, 15 bp, Homo sapiens
gttatttttaaatgt

SEQ ID NO: 1236601 - DNA, 15 bp, Homo sapiens
agttatttttaaatg

SEQ ID NO: 1236602 - DNA, 15 bp, Homo sapiens
tagttatttttaaat

SEQ ID NO: 1236603 - DNA, 15 bp, Homo sapiens
ttagttatttttaaa

SEQ ID NO: 1236604 - DNA, 15 bp, Homo sapiens
tttagttatttttaa

SEQ ID NO: 1236605 - DNA, 15 bp, Homo sapiens
ttttagttattttta

SEQ ID NO: 1236606 - DNA, 15 bp, Homo sapiens
cttttagttattttt

SEQ ID NO: 1236607 - DNA, 15 bp, Homo sapiens
acttttagttatttt

SEQ ID NO: 1236608 - DNA, 15 bp, Homo sapiens
tacttttagttattt

SEQ ID NO: 1236609 - DNA, 15 bp, Homo sapiens
atacttttagttatt

SEQ ID NO: 1236610 - DNA, 15 bp, Homo sapiens
tatacttttagttat

SEQ ID NO: 1236611 - DNA, 15 bp, Homo sapiens
ttatacttttagtta

SEQ ID NO: 1236612 - DNA, 15 bp, Homo sapiens
attatacttttagtt

SEQ ID NO: 1236613 - DNA, 15 bp, Homo sapiens
aattatacttttagt

SEQ ID NO: 1236614 - DNA, 15 bp, Homo sapiens
caattatacttttag

SEQ ID NO: 1236615 - DNA, 15 bp, Homo sapiens
ccaattatactttta

SEQ ID NO: 1236616 - DNA, 15 bp, Homo sapiens
tccaattatactttt

SEQ ID NO: 1236617 - DNA, 15 bp, Homo sapiens
atccaattatacttt

SEQ ID NO: 1236618 - DNA, 15 bp, Homo sapiens
aatccaattatactt

SEQ ID NO: 1236619 - DNA, 15 bp, Homo sapiens
caatccaattatact

SEQ ID NO: 1236620 - DNA, 15 bp, Homo sapiens
acaatccaattatac

SEQ ID NO: 1236621 - DNA, 15 bp, Homo sapiens
aacaatccaattata

SEQ ID NO: 1236622 - DNA, 15 bp, Homo sapiens
aaacaatccaattat

SEQ ID NO: 1236623 - DNA, 15 bp, Homo sapiens
caaacaatccaatta

SEQ ID NO: 1236624 - DNA, 15 bp, Homo sapiens
acaaacaatccaatt

SEQ ID NO: 1236625 - DNA, 15 bp, Homo sapiens
tacaaacaatccaat

SEQ ID NO: 1236626 - DNA, 15 bp, Homo sapiens
ttacaaacaatccaa

SEQ ID NO: 1236627 - DNA, 15 bp, Homo sapiens
gttacaaacaatcca

SEQ ID NO: 1236628 - DNA, 15 bp, Homo sapiens
tgttacaaacaatcc

SEQ ID NO: 1236629 - DNA, 15 bp, Homo sapiens
gtgttacaaacaatc

SEQ ID NO: 1236630 - DNA, 15 bp, Homo sapiens
tgtgttacaaacaat

SEQ ID NO: 1236631 - DNA, 15 bp, Homo sapiens
ttgtgttacaaacaa

SEQ ID NO: 1236632 - DNA, 15 bp, Homo sapiens
tttgtgttacaaaca

SEQ ID NO: 1236633 - DNA, 15 bp, Homo sapiens
ctttgtgttacaaac

SEQ ID NO: 1236634 - DNA, 15 bp, Homo sapiens
tctttgtgttacaaa

SEQ ID NO: 1236635 - DNA, 15 bp, Homo sapiens
ttctttgtgttacaa

SEQ ID NO: 1236636 - DNA, 15 bp, Homo sapiens
tttctttgtgttaca

SEQ ID NO: 1236637 - DNA, 15 bp, Homo sapiens
ctttctttgtgttac

SEQ ID NO: 1236638 - DNA, 15 bp, Homo sapiens
cctttctttgtgtta

SEQ ID NO: 1236639 - DNA, 15 bp, Homo sapiens
tcctttctttgtgtt

SEQ ID NO: 1236640 - DNA, 15 bp, Homo sapiens
atcctttctttgtgt

SEQ ID NO: 1236641 - DNA, 15 bp, Homo sapiens
tatcctttctttgtg

SEQ ID NO: 1236642 - DNA, 15 bp, Homo sapiens
ttatcctttctttgt

SEQ ID NO: 1236643 - DNA, 15 bp, Homo sapiens
tttatcctttctttg

SEQ ID NO: 1236644 - DNA, 15 bp, Homo sapiens
atttatcctttcttt

SEQ ID NO: 1236645 - DNA, 15 bp, Homo sapiens
catttatcctttctt

SEQ ID NO: 1236646 - DNA, 15 bp, Homo sapiens
gcatttatcctttct

SEQ ID NO: 1236647 - DNA, 15 bp, Homo sapiens
agcatttatcctttc

SEQ ID NO: 1236648 - DNA, 15 bp, Homo sapiens
aagcatttatccttt

SEQ ID NO: 1236649 - DNA, 15 bp, Homo sapiens
caagcatttatcctt

SEQ ID NO: 1236650 - DNA, 15 bp, Homo sapiens
tcaagcatttatcct

SEQ ID NO: 1236651 - DNA, 15 bp, Homo sapiens
ctcaagcatttatcc

SEQ ID NO: 1236652 - DNA, 15 bp, Homo sapiens
cctcaagcatttatc

SEQ ID NO: 1236653 - DNA, 15 bp, Homo sapiens
acctcaagcatttat

SEQ ID NO: 1236654 - DNA, 15 bp, Homo sapiens
cacctcaagcattta

SEQ ID NO: 1236655 - DNA, 15 bp, Homo sapiens
tcacctcaagcattt

SEQ ID NO: 1236656 - DNA, 15 bp, Homo sapiens
gtcacctcaagcatt

SEQ ID NO: 1236657 - DNA, 15 bp, Homo sapiens
tgtcacctcaagcat

SEQ ID NO: 1236658 - DNA, 15 bp, Homo sapiens
ctgtcacctcaagca

SEQ ID NO: 1236659 - DNA, 15 bp, Homo sapiens
tctgtcacctcaagc

SEQ ID NO: 1236660 - DNA, 15 bp, Homo sapiens
atctgtcacctcaag

SEQ ID NO: 1236661 - DNA, 15 bp, Homo sapiens
tatctgtcacctcaa

SEQ ID NO: 1236662 - DNA, 15 bp, Homo sapiens
gtatctgtcacctca

SEQ ID NO: 1236663 - DNA, 15 bp, Homo sapiens
ggtatctgtcacctc

SEQ ID NO: 1236664 - DNA, 15 bp, Homo sapiens
gggtatctgtcacct

SEQ ID NO: 1236665 - DNA, 15 bp, Homo sapiens
ggggtatctgtcacc

SEQ ID NO: 1236666 - DNA, 15 bp, Homo sapiens
tggggtatctgtcac

SEQ ID NO: 1236667 - DNA, 15 bp, Homo sapiens
atggggtatctgtca

SEQ ID NO: 1236668 - DNA, 15 bp, Homo sapiens
aatggggtatctgtc

SEQ ID NO: 1236669 - DNA, 15 bp, Homo sapiens
aaatggggtatctgt

SEQ ID NO: 1236670 - DNA, 15 bp, Homo sapiens
taaatggggtatctg

SEQ ID NO: 1236671 - DNA, 15 bp, Homo sapiens
gtaaatggggtatct

SEQ ID NO: 1236672 - DNA, 15 bp, Homo sapiens
ggtaaatggggtatc

SEQ ID NO: 1236673 - DNA, 15 bp, Homo sapiens
gggtaaatggggtat

SEQ ID NO: 1236674 - DNA, 15 bp, Homo sapiens
agggtaaatggggta

SEQ ID NO: 1236675 - DNA, 15 bp, Homo sapiens
cagggtaaatggggt

SEQ ID NO: 1236676 - DNA, 15 bp, Homo sapiens
tcagggtaaatgggg

SEQ ID NO: 1236677 - DNA, 15 bp, Homo sapiens
atcagggtaaatggg

SEQ ID NO: 1236678 - DNA, 15 bp, Homo sapiens
catcagggtaaatgg

SEQ ID NO: 1236679 - DNA, 15 bp, Homo sapiens
acatcagggtaaatg

SEQ ID NO: 1236680 - DNA, 15 bp, Homo sapiens
cacatcagggtaaat

SEQ ID NO: 1236681 - DNA, 15 bp, Homo sapiens
tcacatcagggtaaa

SEQ ID NO: 1236682 - DNA, 15 bp, Homo sapiens
atcacatcagggtaa

SEQ ID NO: 1236683 - DNA, 15 bp, Homo sapiens
aatcacatcagggta

SEQ ID NO: 1236684 - DNA, 15 bp, Homo sapiens
taatcacatcagggt

SEQ ID NO: 1236685 - DNA, 15 bp, Homo sapiens
ataatcacatcaggg

SEQ ID NO: 1236686 - DNA, 15 bp, Homo sapiens
cataatcacatcagg

SEQ ID NO: 1236687 - DNA, 15 bp, Homo sapiens
tcataatcacatcag

SEQ ID NO: 1236688 - DNA, 15 bp, Homo sapiens
gtcataatcacatca

SEQ ID NO: 1236689 - DNA, 15 bp, Homo sapiens
agtcataatcacatc

SEQ ID NO: 1236690 - DNA, 15 bp, Homo sapiens
gagtcataatcacat

SEQ ID NO: 1236691 - DNA, 15 bp, Homo sapiens
tgagtcataatcaca

SEQ ID NO: 1236692 - DNA, 15 bp, Homo sapiens
atgagtcataatcac

SEQ ID NO: 1236693 - DNA, 15 bp, Homo sapiens
aatgagtcataatca

SEQ ID NO: 1236694 - DNA, 15 bp, Homo sapiens
caatgagtcataatc

SEQ ID NO: 1236695 - DNA, 15 bp, Homo sapiens
acaatgagtcataat

SEQ ID NO: 1236696 - DNA, 15 bp, Homo sapiens
tacaatgagtcataa

SEQ ID NO: 1236697 - DNA, 15 bp, Homo sapiens
atacaatgagtcata

SEQ ID NO: 1236698 - DNA, 15 bp, Homo sapiens
catacaatgagtcat

SEQ ID NO: 1236699 - DNA, 15 bp, Homo sapiens
tcatacaatgagtca

SEQ ID NO: 1236700 - DNA, 15 bp, Homo sapiens
atcatacaatgagtc

SEQ ID NO: 1236701 - DNA, 15 bp, Homo sapiens
aatcatacaatgagt

SEQ ID NO: 1236702 - DNA, 15 bp, Homo sapiens
caatcatacaatgag

SEQ ID NO: 1236703 - DNA, 15 bp, Homo sapiens
acaatcatacaatga

SEQ ID NO: 1236704 - DNA, 15 bp, Homo sapiens
tacaatcatacaatg

SEQ ID NO: 1236705 - DNA, 15 bp, Homo sapiens
atacaatcatacaat

SEQ ID NO: 1236706 - DNA, 15 bp, Homo sapiens
gatacaatcatacaa

SEQ ID NO: 1236707 - DNA, 15 bp, Homo sapiens
tgatacaatcataca

SEQ ID NO: 1236708 - DNA, 15 bp, Homo sapiens
ttgatacaatcatac

SEQ ID NO: 1236709 - DNA, 15 bp, Homo sapiens
tttgatacaatcata

SEQ ID NO: 1236710 - DNA, 15 bp, Homo sapiens
ttttgatacaatcat

SEQ ID NO: 1236711 - DNA, 15 bp, Homo sapiens
attttgatacaatca

SEQ ID NO: 1236712 - DNA, 15 bp, Homo sapiens
tattttgatacaatc

SEQ ID NO: 1236713 - DNA, 15 bp, Homo sapiens
atattttgatacaat

SEQ ID NO: 1236714 - DNA, 15 bp, Homo sapiens
gatattttgatacaa

SEQ ID NO: 1236715 - DNA, 15 bp, Homo sapiens
atgagatattttgat

SEQ ID NO: 1236716 - DNA, 15 bp, Homo sapiens
catgagatattttga

SEQ ID NO: 1236717 - DNA, 15 bp, Homo sapiens
acatgagatattttg

SEQ ID NO: 1236718 - DNA, 15 bp, Homo sapiens
tacatgagatatttt

SEQ ID NO: 1236719 - DNA, 15 bp, Homo sapiens
gtacatgagatattt

SEQ ID NO: 1236720 - DNA, 15 bp, Homo sapiens
ggtacatgagatatt

SEQ ID NO: 1236721 - DNA, 15 bp, Homo sapiens
gggtacatgagatat

SEQ ID NO: 1236722 - DNA, 15 bp, Homo sapiens
ggggtacatgagata

SEQ ID NO: 1236723 - DNA, 15 bp, Homo sapiens
tggggtacatgagat

SEQ ID NO: 1236724 - DNA, 15 bp, Homo sapiens
gtggggtacatgaga

SEQ ID NO: 1236725 - DNA, 15 bp, Homo sapiens
tgtggggtacatgag

SEQ ID NO: 1236726 - DNA, 15 bp, Homo sapiens
ttgtggggtacatga

SEQ ID NO: 1236727 - DNA, 15 bp, Homo sapiens
tttgtggggtacatg

SEQ ID NO: 1236728 - DNA, 15 bp, Homo sapiens
atttgtggggtacat

SEQ ID NO: 1236729 - DNA, 15 bp, Homo sapiens
tatttgtggggtaca

SEQ ID NO: 1236730 - DNA, 15 bp, Homo sapiens
atatttgtggggtac

SEQ ID NO: 1236731 - DNA, 15 bp, Homo sapiens
tatatttgtggggta

SEQ ID NO: 1236732 - DNA, 15 bp, Homo sapiens
atatatttgtggggt

SEQ ID NO: 1236733 - DNA, 15 bp, Homo sapiens
tatatatttgtgggg

SEQ ID NO: 1236734 - DNA, 15 bp, Homo sapiens
gtatatatttgtggg

SEQ ID NO: 1236735 - DNA, 15 bp, Homo sapiens
tgtatatatttgtgg

SEQ ID NO: 1236736 - DNA, 15 bp, Homo sapiens
ttgtatatatttgtg

SEQ ID NO: 1236737 - DNA, 15 bp, Homo sapiens
gttgtatatatttgt

SEQ ID NO: 1236738 - DNA, 15 bp, Homo sapiens
agttgtatatatttg

SEQ ID NO: 1236739 - DNA, 15 bp, Homo sapiens
tagttgtatatattt

SEQ ID NO: 1236740 - DNA, 15 bp, Homo sapiens
gtagttgtatatatt

SEQ ID NO: 1236741 - DNA, 15 bp, Homo sapiens
agtagttgtatatat

SEQ ID NO: 1236742 - DNA, 15 bp, Homo sapiens
tagtagttgtatata

SEQ ID NO: 1236743 - DNA, 15 bp, Homo sapiens
atagtagttgtatat

SEQ ID NO: 1236744 - DNA, 15 bp, Homo sapiens
catagtagttgtata

SEQ ID NO: 1236745 - DNA, 15 bp, Homo sapiens
acatagtagttgtat

SEQ ID NO: 1236746 - DNA, 15 bp, Homo sapiens
tacatagtagttgta

SEQ ID NO: 1236747 - DNA, 15 bp, Homo sapiens
gtacatagtagttgt

SEQ ID NO: 1236748 - DNA, 15 bp, Homo sapiens
ggtacatagtagttg

SEQ ID NO: 1236749 - DNA, 15 bp, Homo sapiens
gggtacatagtagtt

SEQ ID NO: 1236750 - DNA, 15 bp, Homo sapiens
tgggtacatagtagt

SEQ ID NO: 1236751 - DNA, 15 bp, Homo sapiens
atgtgggtacatagt

SEQ ID NO: 1236752 - DNA, 15 bp, Homo sapiens
tatgtgggtacatag

SEQ ID NO: 1236753 - DNA, 15 bp, Homo sapiens
atatgtgggtacata

SEQ ID NO: 1236754 - DNA, 15 bp, Homo sapiens
tatatgtgggtacat

SEQ ID NO: 1236755 - DNA, 15 bp, Homo sapiens
atatatgtgggtaca

SEQ ID NO: 1236756 - DNA, 15 bp, Homo sapiens
aatatatgtgggtac

SEQ ID NO: 1236757 - DNA, 15 bp, Homo sapiens
taatatatgtgggta

SEQ ID NO: 1236758 - DNA, 15 bp, Homo sapiens
ttaatatatgtgggt

SEQ ID NO: 1236759 - DNA, 15 bp, Homo sapiens
tttaatatatgtggg

SEQ ID NO: 1236760 - DNA, 15 bp, Homo sapiens
gtttaatatatgtgg

SEQ ID NO: 1236761 - DNA, 15 bp, Homo sapiens
tgtttaatatatgtg

SEQ ID NO: 1236762 - DNA, 15 bp, Homo sapiens
atgtttaatatatgt

SEQ ID NO: 1236763 - DNA, 15 bp, Homo sapiens
aatgtttaatatatg

SEQ ID NO: 1236764 - DNA, 15 bp, Homo sapiens
taatgtttaatatat

SEQ ID NO: 1236765 - DNA, 15 bp, Homo sapiens
ttaatgtttaatata

SEQ ID NO: 1236766 - DNA, 15 bp, Homo sapiens
tttaatgtttaatat

SEQ ID NO: 1236767 - DNA, 15 bp, Homo sapiens
ttttaatgtttaata

SEQ ID NO: 1236768 - DNA, 15 bp, Homo sapiens
tttttaatgtttaat

SEQ ID NO: 1236769 - DNA, 15 bp, Homo sapiens
ttttttaatgtttaa

SEQ ID NO: 1236770 - DNA, 15 bp, Homo sapiens
attttttaatgttta

SEQ ID NO: 1236771 - DNA, 15 bp, Homo sapiens
attttaaaatttttt

SEQ ID NO: 1236772 - DNA, 15 bp, Homo sapiens
tattttaaaattttt

SEQ ID NO: 1236773 - DNA, 15 bp, Homo sapiens
ttattttaaaatttt

SEQ ID NO: 1236774 - DNA, 15 bp, Homo sapiens
tttattttaaaattt

SEQ ID NO: 1236775 - DNA, 15 bp, Homo sapiens
cttttattttaaaat

SEQ ID NO: 1236776 - DNA, 15 bp, Homo sapiens
gcttttattttaaaa

SEQ ID NO: 1236777 - DNA, 15 bp, Homo sapiens
cgcttttattttaaa

SEQ ID NO: 1236778 - DNA, 15 bp, Homo sapiens
acgcttttattttaa

SEQ ID NO: 1236779 - DNA, 15 bp, Homo sapiens
tacgcttttatttta

SEQ ID NO: 1236780 - DNA, 15 bp, Homo sapiens
atacgcttttatttt

SEQ ID NO: 1236781 - DNA, 15 bp, Homo sapiens
gatacgcttttattt

SEQ ID NO: 1236782 - DNA, 15 bp, Homo sapiens
agatacgcttttatt

SEQ ID NO: 1236783 - DNA, 15 bp, Homo sapiens
gagatacgcttttat

SEQ ID NO: 1236784 - DNA, 15 bp, Homo sapiens
tgagatacgctttta

SEQ ID NO: 1236785 - DNA, 15 bp, Homo sapiens
atgagatacgctttt

SEQ ID NO: 1236786 - DNA, 15 bp, Homo sapiens
aatgagatacgcttt

SEQ ID NO: 1236787 - DNA, 15 bp, Homo sapiens
caatgagatacgctt

SEQ ID NO: 1236788 - DNA, 15 bp, Homo sapiens
ccaatgagatacgct

SEQ ID NO: 1236789 - DNA, 15 bp, Homo sapiens
tccaatgagatacgc

SEQ ID NO: 1236790 - DNA, 15 bp, Homo sapiens
gtccaatgagatacg

SEQ ID NO: 1236791 - DNA, 15 bp, Homo sapiens
agtccaatgagatac

SEQ ID NO: 1236792 - DNA, 15 bp, Homo sapiens
cagtccaatgagata

SEQ ID NO: 1236793 - DNA, 15 bp, Homo sapiens
acagtccaatgagat

SEQ ID NO: 1236794 - DNA, 15 bp, Homo sapiens
tacagtccaatgaga

SEQ ID NO: 1236795 - DNA, 15 bp, Homo sapiens
ctacagtccaatgag

SEQ ID NO: 1236796 - DNA, 15 bp, Homo sapiens
tctacagtccaatga

SEQ ID NO: 1236797 - DNA, 15 bp, Homo sapiens
ttctacagtccaatg

SEQ ID NO: 1236798 - DNA, 15 bp, Homo sapiens
tttctacagtccaat

SEQ ID NO: 1236799 - DNA, 15 bp, Homo sapiens
ctttctacagtccaa

SEQ ID NO: 1236800 - DNA, 15 bp, Homo sapiens
actttctacagtcca

SEQ ID NO: 1236801 - DNA, 15 bp, Homo sapiens
tactttctacagtcc

SEQ ID NO: 1236802 - DNA, 15 bp, Homo sapiens
atactttctacagtc

SEQ ID NO: 1236803 - DNA, 15 bp, Homo sapiens
gatactttctacagt

SEQ ID NO: 1236804 - DNA, 15 bp, Homo sapiens
tgatactttctacag

SEQ ID NO: 1236805 - DNA, 15 bp, Homo sapiens
ttgatactttctaca

SEQ ID NO: 1236806 - DNA, 15 bp, Homo sapiens
cttgatactttctac

SEQ ID NO: 1236807 - DNA, 15 bp, Homo sapiens
acttgatactttcta

SEQ ID NO: 1236808 - DNA, 15 bp, Homo sapiens
cacttgatactttct

SEQ ID NO: 1236809 - DNA, 15 bp, Homo sapiens
tcacttgatactttc

SEQ ID NO: 1236810 - DNA, 15 bp, Homo sapiens
ctcacttgatacttt

SEQ ID NO: 1236811 - DNA, 15 bp, Homo sapiens
tctcacttgatactt

SEQ ID NO: 1236812 - DNA, 15 bp, Homo sapiens
atctcacttgatact

SEQ ID NO: 1236813 - DNA, 15 bp, Homo sapiens
tatctcacttgatac

SEQ ID NO: 1236814 - DNA, 15 bp, Homo sapiens
ttatctcacttgata

SEQ ID NO: 1236815 - DNA, 15 bp, Homo sapiens
gttatctcacttgat

SEQ ID NO: 1236816 - DNA, 15 bp, Homo sapiens
ggttatctcacttga

SEQ ID NO: 1236817 - DNA, 15 bp, Homo sapiens
aggttatctcacttg

SEQ ID NO: 1236818 - DNA, 15 bp, Homo sapiens
aaggttatctcactt

SEQ ID NO: 1236819 - DNA, 15 bp, Homo sapiens
aaaggttatctcact

SEQ ID NO: 1236820 - DNA, 15 bp, Homo sapiens
gaaaggttatctcac

SEQ ID NO: 1236821 - DNA, 15 bp, Homo sapiens
ggaaaggttatctca

SEQ ID NO: 1236822 - DNA, 15 bp, Homo sapiens
cggaaaggttatctc

SEQ ID NO: 1236823 - DNA, 15 bp, Homo sapiens
tcggaaaggttatct

SEQ ID NO: 1236824 - DNA, 15 bp, Homo sapiens
atcggaaaggttatc

SEQ ID NO: 1236825 - DNA, 15 bp, Homo sapiens
catcggaaaggttat

SEQ ID NO: 1236826 - DNA, 15 bp, Homo sapiens
acatcggaaaggtta

SEQ ID NO: 1236827 - DNA, 15 bp, Homo sapiens
cacatcggaaaggtt

SEQ ID NO: 1236828 - DNA, 15 bp, Homo sapiens
gcacatcggaaaggt

SEQ ID NO: 1236829 - DNA, 15 bp, Homo sapiens
ggcacatcggaaagg

SEQ ID NO: 1236830 - DNA, 15 bp, Homo sapiens
aggcacatcggaaag

SEQ ID NO: 1236831 - DNA, 15 bp, Homo sapiens
caggcacatcggaaa

SEQ ID NO: 1236832 - DNA, 15 bp, Homo sapiens
ccaggcacatcggaa

SEQ ID NO: 1236833 - DNA, 15 bp, Homo sapiens
accaggcacatcgga

SEQ ID NO: 1236834 - DNA, 15 bp, Homo sapiens
taccaggcacatcgg

SEQ ID NO: 1236835 - DNA, 15 bp, Homo sapiens
gtaccaggcacatcg

SEQ ID NO: 1236836 - DNA, 15 bp, Homo sapiens
agtaccaggcacatc

SEQ ID NO: 1236837 - DNA, 15 bp, Homo sapiens
cagtaccaggcacat

SEQ ID NO: 1236838 - DNA, 15 bp, Homo sapiens
tcagtaccaggcaca

SEQ ID NO: 1236839 - DNA, 15 bp, Homo sapiens
ttcagtaccaggcac

SEQ ID NO: 1236840 - DNA, 15 bp, Homo sapiens
attcagtaccaggca

SEQ ID NO: 1236841 - DNA, 15 bp, Homo sapiens
tattcagtaccaggc

SEQ ID NO: 1236842 - DNA, 15 bp, Homo sapiens
ttattcagtaccagg

SEQ ID NO: 1236843 - DNA, 15 bp, Homo sapiens
gttattcagtaccag

SEQ ID NO: 1236844 - DNA, 15 bp, Homo sapiens
agttattcagtacca

SEQ ID NO: 1236845 - DNA, 15 bp, Homo sapiens
tagttattcagtacc

SEQ ID NO: 1236846 - DNA, 15 bp, Homo sapiens
ttagttattcagtac

SEQ ID NO: 1236847 - DNA, 15 bp, Homo sapiens
cttagttattcagta

SEQ ID NO: 1236848 - DNA, 15 bp, Homo sapiens
acttagttattcagt

SEQ ID NO: 1236849 - DNA, 15 bp, Homo sapiens
cacttagttattcag

SEQ ID NO: 1236850 - DNA, 15 bp, Homo sapiens
gcacttagttattca

SEQ ID NO: 1236851 - DNA, 15 bp, Homo sapiens
agcacttagttattc

SEQ ID NO: 1236852 - DNA, 15 bp, Homo sapiens
cagcacttagttatt

SEQ ID NO: 1236853 - DNA, 15 bp, Homo sapiens
tcagcacttagttat

SEQ ID NO: 1236854 - DNA, 15 bp, Homo sapiens
ttcagcacttagtta

SEQ ID NO: 1236855 - DNA, 15 bp, Homo sapiens
attcagcacttagtt

SEQ ID NO: 1236856 - DNA, 15 bp, Homo sapiens
aattcagcacttagt

SEQ ID NO: 1236857 - DNA, 15 bp, Homo sapiens
taattcagcacttag

SEQ ID NO: 1236858 - DNA, 15 bp, Homo sapiens
ttaattcagcactta

SEQ ID NO: 1236859 - DNA, 15 bp, Homo sapiens
attaattcagcactt

SEQ ID NO: 1236860 - DNA, 15 bp, Homo sapiens
aattaattcagcact

SEQ ID NO: 1236861 - DNA, 15 bp, Homo sapiens
aaattaattcagcac

SEQ ID NO: 1236862 - DNA, 15 bp, Homo sapiens
aaaattaattcagca

SEQ ID NO: 1236863 - DNA, 15 bp, Homo sapiens
aaaaattaattcagc

SEQ ID NO: 1236864 - DNA, 15 bp, Homo sapiens
caaaaattaattcag

SEQ ID NO: 1236865 - DNA, 15 bp, Homo sapiens
acaaaaattaattca

SEQ ID NO: 1236866 - DNA, 15 bp, Homo sapiens
aacaaaaattaattc

SEQ ID NO: 1236867 - DNA, 15 bp, Homo sapiens
aaacaaaaattaatt

SEQ ID NO: 1236868 - DNA, 15 bp, Homo sapiens
gaaacaaaaattaat

SEQ ID NO: 1236869 - DNA, 15 bp, Homo sapiens
agaaacaaaaattaa

SEQ ID NO: 1236870 - DNA, 15 bp, Homo sapiens
gagaaacaaaaatta

SEQ ID NO: 1236871 - DNA, 15 bp, Homo sapiens
agagaaacaaaaatt

SEQ ID NO: 1236872 - DNA, 15 bp, Homo sapiens
gagagaaacaaaaat

SEQ ID NO: 1236873 - DNA, 15 bp, Homo sapiens
agagagaaacaaaaa

SEQ ID NO: 1236874 - DNA, 15 bp, Homo sapiens
gagagagaaacaaaa

SEQ ID NO: 1236875 - DNA, 15 bp, Homo sapiens
agagagagaaacaaa

SEQ ID NO: 1236876 - DNA, 15 bp, Homo sapiens
aagagagagaaacaa

SEQ ID NO: 1236877 - DNA, 15 bp, Homo sapiens
aaagagagagaaaca

SEQ ID NO: 1236878 - DNA, 15 bp, Homo sapiens
gaaagagagagaaac

SEQ ID NO: 1236879 - DNA, 15 bp, Homo sapiens
ggaaagagagagaaa

SEQ ID NO: 1236880 - DNA, 15 bp, Homo sapiens
tggaaagagagagaa

SEQ ID NO: 1236881 - DNA, 15 bp, Homo sapiens
ctggaaagagagaga

SEQ ID NO: 1236882 - DNA, 15 bp, Homo sapiens
tctggaaagagagag

SEQ ID NO: 1236883 - DNA, 15 bp, Homo sapiens
ttctggaaagagaga

SEQ ID NO: 1236884 - DNA, 15 bp, Homo sapiens
cttctggaaagagag

SEQ ID NO: 1236885 - DNA, 15 bp, Homo sapiens
ccttctggaaagaga

SEQ ID NO: 1236886 - DNA, 15 bp, Homo sapiens
tccttctggaaagag

SEQ ID NO: 1236887 - DNA, 15 bp, Homo sapiens
ttccttctggaaaga

SEQ ID NO: 1236888 - DNA, 15 bp, Homo sapiens
attccttctggaaag

SEQ ID NO: 1236889 - DNA, 15 bp, Homo sapiens
cattccttctggaaa

SEQ ID NO: 1236890 - DNA, 15 bp, Homo sapiens
tcattccttctggaa

SEQ ID NO: 1236891 - DNA, 15 bp, Homo sapiens
ttcattccttctgga

SEQ ID NO: 1236892 - DNA, 15 bp, Homo sapiens
tttcattccttctgg

SEQ ID NO: 1236893 - DNA, 15 bp, Homo sapiens
atttcattccttctg

SEQ ID NO: 1236894 - DNA, 15 bp, Homo sapiens
tatttcattccttct

SEQ ID NO: 1236895 - DNA, 15 bp, Homo sapiens
ctatttcattccttc

SEQ ID NO: 1236896 - DNA, 15 bp, Homo sapiens
tctatttcattcctt

SEQ ID NO: 1236897 - DNA, 15 bp, Homo sapiens
ttctatttcattcct

SEQ ID NO: 1236898 - DNA, 15 bp, Homo sapiens
tttctatttcattcc

SEQ ID NO: 1236899 - DNA, 15 bp, Homo sapiens
ctttctatttcattc

SEQ ID NO: 1236900 - DNA, 15 bp, Homo sapiens
tctttctatttcatt

SEQ ID NO: 1236901 - DNA, 15 bp, Homo sapiens
ttctttctatttcat

SEQ ID NO: 1236902 - DNA, 15 bp, Homo sapiens
attctttctatttca

SEQ ID NO: 1236903 - DNA, 15 bp, Homo sapiens
tattctttctatttc

SEQ ID NO: 1236904 - DNA, 15 bp, Homo sapiens
ttattctttctattt

SEQ ID NO: 1236905 - DNA, 15 bp, Homo sapiens
tttattctttctatt

SEQ ID NO: 1236906 - DNA, 15 bp, Homo sapiens
ctttattctttctat

SEQ ID NO: 1236907 - DNA, 15 bp, Homo sapiens
gctttattctttcta

SEQ ID NO: 1236908 - DNA, 15 bp, Homo sapiens
agctttattctttct

SEQ ID NO: 1236909 - DNA, 15 bp, Homo sapiens
cagctttattctttc

SEQ ID NO: 1236910 - DNA, 15 bp, Homo sapiens
tcagctttattcttt

SEQ ID NO: 1236911 - DNA, 15 bp, Homo sapiens
ttcagctttattctt

SEQ ID NO: 1236912 - DNA, 15 bp, Homo sapiens
cttcagctttattct

SEQ ID NO: 1236913 - DNA, 15 bp, Homo sapiens
ccttcagctttattc

SEQ ID NO: 1236914 - DNA, 15 bp, Homo sapiens
tccttcagctttatt

SEQ ID NO: 1236915 - DNA, 15 bp, Homo sapiens
gtccttcagctttat

SEQ ID NO: 1236916 - DNA, 15 bp, Homo sapiens
tgtccttcagcttta

SEQ ID NO: 1236917 - DNA, 15 bp, Homo sapiens
atgtccttcagcttt

SEQ ID NO: 1236918 - DNA, 15 bp, Homo sapiens
aatgtccttcagctt

SEQ ID NO: 1236919 - DNA, 15 bp, Homo sapiens
aaatgtccttcagct

SEQ ID NO: 1236920 - DNA, 15 bp, Homo sapiens
gaaatgtccttcagc

SEQ ID NO: 1236921 - DNA, 15 bp, Homo sapiens
tgaaatgtccttcag

SEQ ID NO: 1236922 - DNA, 15 bp, Homo sapiens
atgaaatgtccttca

SEQ ID NO: 1236923 - DNA, 15 bp, Homo sapiens
aatgaaatgtccttc

SEQ ID NO: 1236924 - DNA, 15 bp, Homo sapiens
aaatgaaatgtcctt

SEQ ID NO: 1236925 - DNA, 15 bp, Homo sapiens
taaatgaaatgtcct

SEQ ID NO: 1236926 - DNA, 15 bp, Homo sapiens
ataaatgaaatgtcc

SEQ ID NO: 1236927 - DNA, 15 bp, Homo sapiens
cataaatgaaatgtc

SEQ ID NO: 1236928 - DNA, 15 bp, Homo sapiens
acataaatgaaatgt

SEQ ID NO: 1236929 - DNA, 15 bp, Homo sapiens
aacataaatgaaatg

SEQ ID NO: 1236930 - DNA, 15 bp, Homo sapiens
gaacataaatgaaat

SEQ ID NO: 1236931 - DNA, 15 bp, Homo sapiens
tgaacataaatgaaa

SEQ ID NO: 1236932 - DNA, 15 bp, Homo sapiens
ttgaacataaatgaa

SEQ ID NO: 1236933 - DNA, 15 bp, Homo sapiens
gttgaacataaatga

SEQ ID NO: 1236934 - DNA, 15 bp, Homo sapiens
agttgaacataaatg

SEQ ID NO: 1236935 - DNA, 15 bp, Homo sapiens
tagttgaacataaat

SEQ ID NO: 1236936 - DNA, 15 bp, Homo sapiens
ctagttgaacataaa

SEQ ID NO: 1236937 - DNA, 15 bp, Homo sapiens
tctagttgaacataa

SEQ ID NO: 1236938 - DNA, 15 bp, Homo sapiens
ttctagttgaacata

SEQ ID NO: 1236939 - DNA, 15 bp, Homo sapiens
tttctagttgaacat

SEQ ID NO: 1236940 - DNA, 15 bp, Homo sapiens
atttctagttgaaca

SEQ ID NO: 1236941 - DNA, 15 bp, Homo sapiens
gatttctagttgaac

SEQ ID NO: 1236942 - DNA, 15 bp, Homo sapiens
ggatttctagttgaa

SEQ ID NO: 1236943 - DNA, 15 bp, Homo sapiens
tggatttctagttga

SEQ ID NO: 1236944 - DNA, 15 bp, Homo sapiens
ttggatttctagttg

SEQ ID NO: 1236945 - DNA, 15 bp, Homo sapiens
attggatttctagtt

SEQ ID NO: 1236946 - DNA, 15 bp, Homo sapiens
tattggatttctagt

SEQ ID NO: 1236947 - DNA, 15 bp, Homo sapiens
atattggatttctag

SEQ ID NO: 1236948 - DNA, 15 bp, Homo sapiens
tatattggatttcta

SEQ ID NO: 1236949 - DNA, 15 bp, Homo sapiens
ctatattggatttct

SEQ ID NO: 1236950 - DNA, 15 bp, Homo sapiens
actatattggatttc

SEQ ID NO: 1236951 - DNA, 15 bp, Homo sapiens
aactatattggattt

SEQ ID NO: 1236952 - DNA, 15 bp, Homo sapiens
aaactatattggatt

SEQ ID NO: 1236953 - DNA, 15 bp, Homo sapiens
aaaactatattggat

SEQ ID NO: 1236954 - DNA, 15 bp, Homo sapiens
taaaactatattgga

SEQ ID NO: 1236955 - DNA, 15 bp, Homo sapiens
ctaaaactatattgg

SEQ ID NO: 1236956 - DNA, 15 bp, Homo sapiens
cctaaaactatattg

SEQ ID NO: 1236957 - DNA, 15 bp, Homo sapiens
gcctaaaactatatt

SEQ ID NO: 1236958 - DNA, 15 bp, Homo sapiens
tgcctaaaactatat

SEQ ID NO: 1236959 - DNA, 15 bp, Homo sapiens
ttgcctaaaactata

SEQ ID NO: 1236960 - DNA, 15 bp, Homo sapiens
tttgcctaaaactat

SEQ ID NO: 1236961 - DNA, 15 bp, Homo sapiens
gtttgcctaaaacta

SEQ ID NO: 1236962 - DNA, 15 bp, Homo sapiens
agtttgcctaaaact

SEQ ID NO: 1236963 - DNA, 15 bp, Homo sapiens
tagtttgcctaaaac

SEQ ID NO: 1236964 - DNA, 15 bp, Homo sapiens
atagtttgcctaaaa

SEQ ID NO: 1236965 - DNA, 15 bp, Homo sapiens
tatagtttgcctaaa

SEQ ID NO: 1236966 - DNA, 15 bp, Homo sapiens
atatagtttgcctaa

SEQ ID NO: 1236967 - DNA, 15 bp, Homo sapiens
aatatagtttgccta

SEQ ID NO: 1236968 - DNA, 15 bp, Homo sapiens
aaatatagtttgcct

SEQ ID NO: 1236969 - DNA, 15 bp, Homo sapiens
aaaatatagtttgcc

SEQ ID NO: 1236970 - DNA, 15 bp, Homo sapiens
gaaaatatagtttgc

SEQ ID NO: 1236971 - DNA, 15 bp, Homo sapiens
ggaaaatatagtttg

SEQ ID NO: 1236972 - DNA, 15 bp, Homo sapiens
gggaaaatatagttt

SEQ ID NO: 1236973 - DNA, 15 bp, Homo sapiens
agggaaaatatagtt

SEQ ID NO: 1236974 - DNA, 15 bp, Homo sapiens
aagggaaaatatagt

SEQ ID NO: 1236975 - DNA, 15 bp, Homo sapiens
caagggaaaatatag

SEQ ID NO: 1236976 - DNA, 15 bp, Homo sapiens
gcaagggaaaatata

SEQ ID NO: 1236977 - DNA, 15 bp, Homo sapiens
tgcaagggaaaatat

SEQ ID NO: 1236978 - DNA, 15 bp, Homo sapiens
ttgcaagggaaaata

SEQ ID NO: 1236979 - DNA, 15 bp, Homo sapiens
gttgcaagggaaaat

SEQ ID NO: 1236980 - DNA, 15 bp, Homo sapiens
agttgcaagggaaaa

SEQ ID NO: 1236981 - DNA, 15 bp, Homo sapiens
cagttgcaagggaaa

SEQ ID NO: 1236982 - DNA, 15 bp, Homo sapiens
acagttgcaagggaa

SEQ ID NO: 1236983 - DNA, 15 bp, Homo sapiens
tacagttgcaaggga

SEQ ID NO: 1236984 - DNA, 15 bp, Homo sapiens
gtacagttgcaaggg

SEQ ID NO: 1236985 - DNA, 15 bp, Homo sapiens
agtacagttgcaagg

SEQ ID NO: 1236986 - DNA, 15 bp, Homo sapiens
gagtacagttgcaag

SEQ ID NO: 1236987 - DNA, 15 bp, Homo sapiens
ggagtacagttgcaa

SEQ ID NO: 1236988 - DNA, 15 bp, Homo sapiens
gggagtacagttgca

SEQ ID NO: 1236989 - DNA, 15 bp, Homo sapiens
agggagtacagttgc

SEQ ID NO: 1236990 - DNA, 15 bp, Homo sapiens
aagggagtacagttg

SEQ ID NO: 1236991 - DNA, 15 bp, Homo sapiens
taagggagtacagtt

SEQ ID NO: 1236992 - DNA, 15 bp, Homo sapiens
gtaagggagtacagt

SEQ ID NO: 1236993 - DNA, 15 bp, Homo sapiens
tgtaagggagtacag

SEQ ID NO: 1236994 - DNA, 15 bp, Homo sapiens
atgtaagggagtaca

SEQ ID NO: 1236995 - DNA, 15 bp, Homo sapiens
tatgtaagggagtac

SEQ ID NO: 1236996 - DNA, 15 bp, Homo sapiens
gtatgtaagggagta

SEQ ID NO: 1236997 - DNA, 15 bp, Homo sapiens
tgtatgtaagggagt

SEQ ID NO: 1236998 - DNA, 15 bp, Homo sapiens
atgtatgtaagggag

SEQ ID NO: 1236999 - DNA, 15 bp, Homo sapiens
catgtatgtaaggga

SEQ ID NO: 1237000 - DNA, 15 bp, Homo sapiens
acatgtatgtaaggg

SEQ ID NO: 1237001 - DNA, 15 bp, Homo sapiens
tacatgtatgtaagg

SEQ ID NO: 1237002 - DNA, 15 bp, Homo sapiens
ttacatgtatgtaag

SEQ ID NO: 1237003 - DNA, 15 bp, Homo sapiens
cttacatgtatgtaa

SEQ ID NO: 1237004 - DNA, 15 bp, Homo sapiens
acttacatgtatgta

SEQ ID NO: 1237005 - DNA, 15 bp, Homo sapiens
cacttacatgtatgt

SEQ ID NO: 1237006 - DNA, 15 bp, Homo sapiens
ccacttacatgtatg

SEQ ID NO: 1237007 - DNA, 15 bp, Homo sapiens
cccacttacatgtat

SEQ ID NO: 1237008 - DNA, 15 bp, Homo sapiens
tcccacttacatgta

SEQ ID NO: 1237009 - DNA, 15 bp, Homo sapiens
ttcccacttacatgt

SEQ ID NO: 1237010 - DNA, 15 bp, Homo sapiens
tttcccacttacatg

SEQ ID NO: 1237011 - DNA, 15 bp, Homo sapiens
ctttcccacttacat

SEQ ID NO: 1237012 - DNA, 15 bp, Homo sapiens
tctttcccacttaca

SEQ ID NO: 1237013 - DNA, 15 bp, Homo sapiens
ttctttcccacttac

SEQ ID NO: 1237014 - DNA, 15 bp, Homo sapiens
attctttcccactta

SEQ ID NO: 1237015 - DNA, 15 bp, Homo sapiens
tattctttcccactt

SEQ ID NO: 1237016 - DNA, 15 bp, Homo sapiens
ttattctttcccact

SEQ ID NO: 1237017 - DNA, 15 bp, Homo sapiens
tttattctttcccac

SEQ ID NO: 1237018 - DNA, 15 bp, Homo sapiens
atttattctttccca

SEQ ID NO: 1237019 - DNA, 15 bp, Homo sapiens
catttattctttccc

SEQ ID NO: 1237020 - DNA, 15 bp, Homo sapiens
acatttattctttcc

SEQ ID NO: 1237021 - DNA, 15 bp, Homo sapiens
cacatttattctttc

SEQ ID NO: 1237022 - DNA, 15 bp, Homo sapiens
tcacatttattcttt

SEQ ID NO: 1237023 - DNA, 15 bp, Homo sapiens
gtcacatttattctt

SEQ ID NO: 1237024 - DNA, 15 bp, Homo sapiens
tgtcacatttattct

SEQ ID NO: 1237025 - DNA, 15 bp, Homo sapiens
ttgtcacatttattc

SEQ ID NO: 1237026 - DNA, 15 bp, Homo sapiens
tttgtcacatttatt

SEQ ID NO: 1237027 - DNA, 15 bp, Homo sapiens
gtttgtcacatttat

SEQ ID NO: 1237028 - DNA, 15 bp, Homo sapiens
tgtttgtcacattta

SEQ ID NO: 1237029 - DNA, 15 bp, Homo sapiens
ttgtttgtcacattt

SEQ ID NO: 1237030 - DNA, 15 bp, Homo sapiens
tttgtttgtcacatt

SEQ ID NO: 1237031 - DNA, 15 bp, Homo sapiens
ttttgtttgtcacat

SEQ ID NO: 1237032 - DNA, 15 bp, Homo sapiens
attttgtttgtcaca

SEQ ID NO: 1237033 - DNA, 15 bp, Homo sapiens
tattttgtttgtcac

SEQ ID NO: 1237034 - DNA, 15 bp, Homo sapiens
atattttgtttgtca

SEQ ID NO: 1237035 - DNA, 15 bp, Homo sapiens
gatattttgtttgtc

SEQ ID NO: 1237036 - DNA, 15 bp, Homo sapiens
tgatattttgtttgt

SEQ ID NO: 1237037 - DNA, 15 bp, Homo sapiens
gtgatattttgtttg

SEQ ID NO: 1237038 - DNA, 15 bp, Homo sapiens
agtgatattttgttt

SEQ ID NO: 1237039 - DNA, 15 bp, Homo sapiens
gagtgatattttgtt

SEQ ID NO: 1237040 - DNA, 15 bp, Homo sapiens
ggagtgatattttgt

SEQ ID NO: 1237041 - DNA, 15 bp, Homo sapiens
aggagtgatattttg

SEQ ID NO: 1237042 - DNA, 15 bp, Homo sapiens
caggagtgatatttt

SEQ ID NO: 1237043 - DNA, 15 bp, Homo sapiens
tcaggagtgatattt

SEQ ID NO: 1237044 - DNA, 15 bp, Homo sapiens
atcaggagtgatatt

SEQ ID NO: 1237045 - DNA, 15 bp, Homo sapiens
aatcaggagtgatat

SEQ ID NO: 1237046 - DNA, 15 bp, Homo sapiens
gaatcaggagtgata

SEQ ID NO: 1237047 - DNA, 15 bp, Homo sapiens
ggaatcaggagtgat

SEQ ID NO: 1237048 - DNA, 15 bp, Homo sapiens
tggaatcaggagtga

SEQ ID NO: 1237049 - DNA, 15 bp, Homo sapiens
gtggaatcaggagtg

SEQ ID NO: 1237050 - DNA, 15 bp, Homo sapiens
tgtggaatcaggagt

SEQ ID NO: 1237051 - DNA, 15 bp, Homo sapiens
ttgtggaatcaggag

SEQ ID NO: 1237052 - DNA, 15 bp, Homo sapiens
attgtggaatcagga

SEQ ID NO: 1237053 - DNA, 15 bp, Homo sapiens
gattgtggaatcagg

SEQ ID NO: 1237054 - DNA, 15 bp, Homo sapiens
agattgtggaatcag

SEQ ID NO: 1237055 - DNA, 15 bp, Homo sapiens
tagattgtggaatca

SEQ ID NO: 1237056 - DNA, 15 bp, Homo sapiens
ttagattgtggaatc

SEQ ID NO: 1237057 - DNA, 15 bp, Homo sapiens
tttagattgtggaat

SEQ ID NO: 1237058 - DNA, 15 bp, Homo sapiens
gtttagattgtggaa

SEQ ID NO: 1237059 - DNA, 15 bp, Homo sapiens
tgtttagattgtgga

SEQ ID NO: 1237060 - DNA, 15 bp, Homo sapiens
ttgtttagattgtgg

SEQ ID NO: 1237061 - DNA, 15 bp, Homo sapiens
tttgtttagattgtg

SEQ ID NO: 1237062 - DNA, 15 bp, Homo sapiens
ttttgtttagattgt

SEQ ID NO: 1237063 - DNA, 15 bp, Homo sapiens
gttttgtttagattg

SEQ ID NO: 1237064 - DNA, 15 bp, Homo sapiens
tgttttgtttagatt

SEQ ID NO: 1237065 - DNA, 15 bp, Homo sapiens
gtgttttgtttagat

SEQ ID NO: 1237066 - DNA, 15 bp, Homo sapiens
agtgttttgtttaga

SEQ ID NO: 1237067 - DNA, 15 bp, Homo sapiens
cagtgttttgtttag

SEQ ID NO: 1237068 - DNA, 15 bp, Homo sapiens
gcagtgttttgttta

SEQ ID NO: 1237069 - DNA, 15 bp, Homo sapiens
ggcagtgttttgttt

SEQ ID NO: 1237070 - DNA, 15 bp, Homo sapiens
aggcagtgttttgtt

SEQ ID NO: 1237071 - DNA, 15 bp, Homo sapiens
gaggcagtgttttgt

SEQ ID NO: 1237072 - DNA, 15 bp, Homo sapiens
agaggcagtgttttg

SEQ ID NO: 1237073 - DNA, 15 bp, Homo sapiens
aagaggcagtgtttt

SEQ ID NO: 1237074 - DNA, 15 bp, Homo sapiens
aaagaggcagtgttt

SEQ ID NO: 1237075 - DNA, 15 bp, Homo sapiens
gaaagaggcagtgtt

SEQ ID NO: 1237076 - DNA, 15 bp, Homo sapiens
agaaagaggcagtgt

SEQ ID NO: 1237077 - DNA, 15 bp, Homo sapiens
tagaaagaggcagtg

SEQ ID NO: 1237078 - DNA, 15 bp, Homo sapiens
ctagaaagaggcagt

SEQ ID NO: 1237079 - DNA, 15 bp, Homo sapiens
cctagaaagaggcag

SEQ ID NO: 1237080 - DNA, 15 bp, Homo sapiens
acctagaaagaggca

SEQ ID NO: 1237081 - DNA, 15 bp, Homo sapiens
aacctagaaagaggc

SEQ ID NO: 1237082 - DNA, 15 bp, Homo sapiens
aaacctagaaagagg

SEQ ID NO: 1237083 - DNA, 15 bp, Homo sapiens
aaaacctagaaagag

SEQ ID NO: 1237084 - DNA, 15 bp, Homo sapiens
caaaacctagaaaga

SEQ ID NO: 1237085 - DNA, 15 bp, Homo sapiens
acaaaacctagaaag

SEQ ID NO: 1237086 - DNA, 15 bp, Homo sapiens
aacaaaacctagaaa

SEQ ID NO: 1237087 - DNA, 15 bp, Homo sapiens
aaacaaaacctagaa

SEQ ID NO: 1237088 - DNA, 15 bp, Homo sapiens
aaaacaaaacctaga

SEQ ID NO: 1237089 - DNA, 15 bp, Homo sapiens
aaaaacaaaacctag

SEQ ID NO: 1237090 - DNA, 15 bp, Homo sapiens
aaaaaacaaaaccta

SEQ ID NO: 1237091 - DNA, 15 bp, Homo sapiens
caaaaaacaaaacct

SEQ ID NO: 1237092 - DNA, 15 bp, Homo sapiens
ccaaaaaacaaaacc

SEQ ID NO: 1237093 - DNA, 15 bp, Homo sapiens
accaaaaaacaaaac

SEQ ID NO: 1237094 - DNA, 15 bp, Homo sapiens
aaccaaaaaacaaaa

SEQ ID NO: 1237095 - DNA, 15 bp, Homo sapiens
aaaccaaaaaacaaa

SEQ ID NO: 1237096 - DNA, 15 bp, Homo sapiens
aaaaccaaaaaacaa

SEQ ID NO: 1237097 - DNA, 15 bp, Homo sapiens
aaaaaccaaaaaaca

SEQ ID NO: 1237098 - DNA, 15 bp, Homo sapiens
caaaaaccaaaaaac

SEQ ID NO: 1237099 - DNA, 15 bp, Homo sapiens
acaaaaaccaaaaaa

SEQ ID NO: 1237100 - DNA, 15 bp, Homo sapiens
aacaaaaaccaaaaa

SEQ ID NO: 1237101 - DNA, 15 bp, Homo sapiens
aaacaaaaaccaaaa

SEQ ID NO: 1237102 - DNA, 15 bp, Homo sapiens
caaacaaaaaccaaa

SEQ ID NO: 1237103 - DNA, 15 bp, Homo sapiens
acaaacaaaaaccaa

SEQ ID NO: 1237104 - DNA, 15 bp, Homo sapiens
aacaaacaaaaacca

SEQ ID NO: 1237105 - DNA, 15 bp, Homo sapiens
aaacaaacaaaaacc

SEQ ID NO: 1237106 - DNA, 15 bp, Homo sapiens
caaacaaacaaaaac

SEQ ID NO: 1237107 - DNA, 15 bp, Homo sapiens
ccaaaaaacaaacaa

SEQ ID NO: 1237108 - DNA, 15 bp, Homo sapiens
gccaaaaaacaaaca

SEQ ID NO: 1237109 - DNA, 15 bp, Homo sapiens
tgccaaaaaacaaac

SEQ ID NO: 1237110 - DNA, 15 bp, Homo sapiens
atgccaaaaaacaaa

SEQ ID NO: 1237111 - DNA, 15 bp, Homo sapiens
tatgccaaaaaacaa

SEQ ID NO: 1237112 - DNA, 15 bp, Homo sapiens
ctatgccaaaaaaca

SEQ ID NO: 1237113 - DNA, 15 bp, Homo sapiens
cctatgccaaaaaac

SEQ ID NO: 1237114 - DNA, 15 bp, Homo sapiens
ccctatgccaaaaaa

SEQ ID NO: 1237115 - DNA, 15 bp, Homo sapiens
accctatgccaaaaa

SEQ ID NO: 1237116 - DNA, 15 bp, Homo sapiens
aaccctatgccaaaa

SEQ ID NO: 1237117 - DNA, 15 bp, Homo sapiens
caaccctatgccaaa

SEQ ID NO: 1237118 - DNA, 15 bp, Homo sapiens
ccaaccctatgccaa

SEQ ID NO: 1237119 - DNA, 15 bp, Homo sapiens
cccaaccctatgcca

SEQ ID NO: 1237120 - DNA, 15 bp, Homo sapiens
ccccaaccctatgcc

SEQ ID NO: 1237121 - DNA, 15 bp, Homo sapiens
accccaaccctatgc

SEQ ID NO: 1237122 - DNA, 15 bp, Homo sapiens
caccccaaccctatg

SEQ ID NO: 1237123 - DNA, 15 bp, Homo sapiens
acaccccaaccctat

SEQ ID NO: 1237124 - DNA, 15 bp, Homo sapiens
tacaccccaacccta

SEQ ID NO: 1237125 - DNA, 15 bp, Homo sapiens
atacaccccaaccct

SEQ ID NO: 1237126 - DNA, 15 bp, Homo sapiens
catacaccccaaccc

SEQ ID NO: 1237127 - DNA, 15 bp, Homo sapiens
gcatacaccccaacc

SEQ ID NO: 1237128 - DNA, 15 bp, Homo sapiens
agcatacaccccaac

SEQ ID NO: 1237129 - DNA, 15 bp, Homo sapiens
aagcatacaccccaa

SEQ ID NO: 1237130 - DNA, 15 bp, Homo sapiens
gaagcatacacccca

SEQ ID NO: 1237131 - DNA, 15 bp, Homo sapiens
agaagcatacacccc

SEQ ID NO: 1237132 - DNA, 15 bp, Homo sapiens
aagaagcatacaccc

SEQ ID NO: 1237133 - DNA, 15 bp, Homo sapiens
caagaagcatacacc

SEQ ID NO: 1237134 - DNA, 15 bp, Homo sapiens
tcaagaagcatacac

SEQ ID NO: 1237135 - DNA, 15 bp, Homo sapiens
gtcaagaagcataca

SEQ ID NO: 1237136 - DNA, 15 bp, Homo sapiens
cgtcaagaagcatac

SEQ ID NO: 1237137 - DNA, 15 bp, Homo sapiens
acgtcaagaagcata

SEQ ID NO: 1237138 - DNA, 15 bp, Homo sapiens
tacgtcaagaagcat

SEQ ID NO: 1237139 - DNA, 15 bp, Homo sapiens
gtacgtcaagaagca

SEQ ID NO: 1237140 - DNA, 15 bp, Homo sapiens
ggtacgtcaagaagc

SEQ ID NO: 1237141 - DNA, 15 bp, Homo sapiens
aggtacgtcaagaag

SEQ ID NO: 1237142 - DNA, 15 bp, Homo sapiens
taggtacgtcaagaa

SEQ ID NO: 1237143 - DNA, 15 bp, Homo sapiens
gtaggtacgtcaaga

SEQ ID NO: 1237144 - DNA, 15 bp, Homo sapiens
tgtaggtacgtcaag

SEQ ID NO: 1237145 - DNA, 15 bp, Homo sapiens
atgtaggtacgtcaa

SEQ ID NO: 1237146 - DNA, 15 bp, Homo sapiens
tatgtaggtacgtca

SEQ ID NO: 1237147 - DNA, 15 bp, Homo sapiens
ttatgtaggtacgtc

SEQ ID NO: 1237148 - DNA, 15 bp, Homo sapiens
attatgtaggtacgt

SEQ ID NO: 1237149 - DNA, 15 bp, Homo sapiens
cattatgtaggtacg

SEQ ID NO: 1237150 - DNA, 15 bp, Homo sapiens
tcattatgtaggtac

SEQ ID NO: 1237151 - DNA, 15 bp, Homo sapiens
ctcattatgtaggta

SEQ ID NO: 1237152 - DNA, 15 bp, Homo sapiens
cctcattatgtaggt

SEQ ID NO: 1237153 - DNA, 15 bp, Homo sapiens
tcctcattatgtagg

SEQ ID NO: 1237154 - DNA, 15 bp, Homo sapiens
ttcctcattatgtag

SEQ ID NO: 1237155 - DNA, 15 bp, Homo sapiens
attcctcattatgta

SEQ ID NO: 1237156 - DNA, 15 bp, Homo sapiens
tattcctcattatgt

SEQ ID NO: 1237157 - DNA, 15 bp, Homo sapiens
gtattcctcattatg

SEQ ID NO: 1237158 - DNA, 15 bp, Homo sapiens
tgtattcctcattat

SEQ ID NO: 1237159 - DNA, 15 bp, Homo sapiens
ttgtattcctcatta

SEQ ID NO: 1237160 - DNA, 15 bp, Homo sapiens
cttgtattcctcatt

SEQ ID NO: 1237161 - DNA, 15 bp, Homo sapiens
ccttgtattcctcat

SEQ ID NO: 1237162 - DNA, 15 bp, Homo sapiens
gccttgtattcctca

SEQ ID NO: 1237163 - DNA, 15 bp, Homo sapiens
agccttgtattcctc

SEQ ID NO: 1237164 - DNA, 15 bp, Homo sapiens
aagccttgtattcct

SEQ ID NO: 1237165 - DNA, 15 bp, Homo sapiens
aaagccttgtattcc

SEQ ID NO: 1237166 - DNA, 15 bp, Homo sapiens
caaagccttgtattc

SEQ ID NO: 1237167 - DNA, 15 bp, Homo sapiens
acaaagccttgtatt

SEQ ID NO: 1237168 - DNA, 15 bp, Homo sapiens
tacaaagccttgtat

SEQ ID NO: 1237169 - DNA, 15 bp, Homo sapiens
atacaaagccttgta

SEQ ID NO: 1237170 - DNA, 15 bp, Homo sapiens
gatacaaagccttgt

SEQ ID NO: 1237171 - DNA, 15 bp, Homo sapiens
agatacaaagccttg

SEQ ID NO: 1237172 - DNA, 15 bp, Homo sapiens
aagatacaaagcctt

SEQ ID NO: 1237173 - DNA, 15 bp, Homo sapiens
aaagatacaaagcct

SEQ ID NO: 1237174 - DNA, 15 bp, Homo sapiens
aaaagatacaaagcc

SEQ ID NO: 1237175 - DNA, 15 bp, Homo sapiens
taaaagatacaaagc

SEQ ID NO: 1237176 - DNA, 15 bp, Homo sapiens
ataaaagatacaaag

SEQ ID NO: 1237177 - DNA, 15 bp, Homo sapiens
gataaaagatacaaa

SEQ ID NO: 1237178 - DNA, 15 bp, Homo sapiens
tgataaaagatacaa

SEQ ID NO: 1237179 - DNA, 15 bp, Homo sapiens
ctgataaaagataca

SEQ ID NO: 1237180 - DNA, 15 bp, Homo sapiens
actgataaaagatac

SEQ ID NO: 1237181 - DNA, 15 bp, Homo sapiens
tactgataaaagata

SEQ ID NO: 1237182 - DNA, 15 bp, Homo sapiens
ttactgataaaagat

SEQ ID NO: 1237183 - DNA, 15 bp, Homo sapiens
attactgataaaaga

SEQ ID NO: 1237184 - DNA, 15 bp, Homo sapiens
aattactgataaaag

SEQ ID NO: 1237185 - DNA, 15 bp, Homo sapiens
taattactgataaaa

SEQ ID NO: 1237186 - DNA, 15 bp, Homo sapiens
ataattactgataaa

SEQ ID NO: 1237187 - DNA, 15 bp, Homo sapiens
aataattactgataa

SEQ ID NO: 1237188 - DNA, 15 bp, Homo sapiens
gaataattactgata

SEQ ID NO: 1237189 - DNA, 15 bp, Homo sapiens
tgaataattactgat

SEQ ID NO: 1237190 - DNA, 15 bp, Homo sapiens
atgaataattactga

SEQ ID NO: 1237191 - DNA, 15 bp, Homo sapiens
tatgaataattactg

SEQ ID NO: 1237192 - DNA, 15 bp, Homo sapiens
ctatgaataattact

SEQ ID NO: 1237193 - DNA, 15 bp, Homo sapiens
gctatgaataattac

SEQ ID NO: 1237194 - DNA, 15 bp, Homo sapiens
agctatgaataatta

SEQ ID NO: 1237195 - DNA, 15 bp, Homo sapiens
aagctatgaataatt

SEQ ID NO: 1237196 - DNA, 15 bp, Homo sapiens
taagctatgaataat

SEQ ID NO: 1237197 - DNA, 15 bp, Homo sapiens
ttaagctatgaataa

SEQ ID NO: 1237198 - DNA, 15 bp, Homo sapiens
attaagctatgaata

SEQ ID NO: 1237199 - DNA, 15 bp, Homo sapiens
aattaagctatgaat

SEQ ID NO: 1237200 - DNA, 15 bp, Homo sapiens
caattaagctatgaa

SEQ ID NO: 1237201 - DNA, 15 bp, Homo sapiens
acaattaagctatga

SEQ ID NO: 1237202 - DNA, 15 bp, Homo sapiens
cacaattaagctatg

SEQ ID NO: 1237203 - DNA, 15 bp, Homo sapiens
acacaattaagctat

SEQ ID NO: 1237204 - DNA, 15 bp, Homo sapiens
tacacaattaagcta

SEQ ID NO: 1237205 - DNA, 15 bp, Homo sapiens
ttacacaattaagct

SEQ ID NO: 1237206 - DNA, 15 bp, Homo sapiens
tttacacaattaagc

SEQ ID NO: 1237207 - DNA, 15 bp, Homo sapiens
atttacacaattaag

SEQ ID NO: 1237208 - DNA, 15 bp, Homo sapiens
aatttacacaattaa

SEQ ID NO: 1237209 - DNA, 15 bp, Homo sapiens
caatttacacaatta

SEQ ID NO: 1237210 - DNA, 15 bp, Homo sapiens
acaatttacacaatt

SEQ ID NO: 1237211 - DNA, 15 bp, Homo sapiens
tacaatttacacaat

SEQ ID NO: 1237212 - DNA, 15 bp, Homo sapiens
ttacaatttacacaa

SEQ ID NO: 1237213 - DNA, 15 bp, Homo sapiens
tttacaatttacaca

SEQ ID NO: 1237214 - DNA, 15 bp, Homo sapiens
ttttacaatttacac

SEQ ID NO: 1237215 - DNA, 15 bp, Homo sapiens
attttacaatttaca

SEQ ID NO: 1237216 - DNA, 15 bp, Homo sapiens
tattttacaatttac

SEQ ID NO: 1237217 - DNA, 15 bp, Homo sapiens
atattttacaattta

SEQ ID NO: 1237218 - DNA, 15 bp, Homo sapiens
gatattttacaattt

SEQ ID NO: 1237219 - DNA, 15 bp, Homo sapiens
tgatattttacaatt

SEQ ID NO: 1237220 - DNA, 15 bp, Homo sapiens
gtgatattttacaat

SEQ ID NO: 1237221 - DNA, 15 bp, Homo sapiens
tgtgatattttacaa

SEQ ID NO: 1237222 - DNA, 15 bp, Homo sapiens
gtgtgatattttaca

SEQ ID NO: 1237223 - DNA, 15 bp, Homo sapiens
agtgtgatattttac

SEQ ID NO: 1237224 - DNA, 15 bp, Homo sapiens
aagtgtgatatttta

SEQ ID NO: 1237225 - DNA, 15 bp, Homo sapiens
aaagtgtgatatttt

SEQ ID NO: 1237226 - DNA, 15 bp, Homo sapiens
aaaagtgtgatattt

SEQ ID NO: 1237227 - DNA, 15 bp, Homo sapiens
taaaagtgtgatatt

SEQ ID NO: 1237228 - DNA, 15 bp, Homo sapiens
ataaaagtgtgatat

SEQ ID NO: 1237229 - DNA, 15 bp, Homo sapiens
tataaaagtgtgata

SEQ ID NO: 1237230 - DNA, 15 bp, Homo sapiens
ttataaaagtgtgat

SEQ ID NO: 1237231 - DNA, 15 bp, Homo sapiens
attataaaagtgtga

SEQ ID NO: 1237232 - DNA, 15 bp, Homo sapiens
gattataaaagtgtg

SEQ ID NO: 1237233 - DNA, 15 bp, Homo sapiens
agattataaaagtgt

SEQ ID NO: 1237234 - DNA, 15 bp, Homo sapiens
aagattataaaagtg

SEQ ID NO: 1237235 - DNA, 15 bp, Homo sapiens
taagattataaaagt

SEQ ID NO: 1237236 - DNA, 15 bp, Homo sapiens
ttaagattataaaag

SEQ ID NO: 1237237 - DNA, 15 bp, Homo sapiens
attaagattataaaa

SEQ ID NO: 1237238 - DNA, 15 bp, Homo sapiens
aattaagattataaa

SEQ ID NO: 1237239 - DNA, 15 bp, Homo sapiens
aaattaagattataa

SEQ ID NO: 1237240 - DNA, 15 bp, Homo sapiens
aaaattaagattata

SEQ ID NO: 1237241 - DNA, 15 bp, Homo sapiens
aaaaattaagattat

SEQ ID NO: 1237242 - DNA, 15 bp, Homo sapiens
aaaaaattaagatta

SEQ ID NO: 1237243 - DNA, 15 bp, Homo sapiens
aaaaaaattaagatt

SEQ ID NO: 1237244 - DNA, 15 bp, Homo sapiens
caaaaaaaaattaag

SEQ ID NO: 1237245 - DNA, 15 bp, Homo sapiens
acaaaaaaaaattaa

SEQ ID NO: 1237246 - DNA, 15 bp, Homo sapiens
cacaaaaaaaaatta

SEQ ID NO: 1237247 - DNA, 15 bp, Homo sapiens
ccacaaaaaaaaatt

SEQ ID NO: 1237248 - DNA, 15 bp, Homo sapiens
gccacaaaaaaaaat

SEQ ID NO: 1237249 - DNA, 15 bp, Homo sapiens
agccacaaaaaaaaa

SEQ ID NO: 1237250 - DNA, 15 bp, Homo sapiens
cagccacaaaaaaaa

SEQ ID NO: 1237251 - DNA, 15 bp, Homo sapiens
gcagccacaaaaaaa

SEQ ID NO: 1237252 - DNA, 15 bp, Homo sapiens
tgcagccacaaaaaa

SEQ ID NO: 1237253 - DNA, 15 bp, Homo sapiens
ctgcagccacaaaaa

SEQ ID NO: 1237254 - DNA, 15 bp, Homo sapiens
gctgcagccacaaaa

SEQ ID NO: 1237255 - DNA, 15 bp, Homo sapiens
agctgcagccacaaa

SEQ ID NO: 1237256 - DNA, 15 bp, Homo sapiens
tagctgcagccacaa

SEQ ID NO: 1237257 - DNA, 15 bp, Homo sapiens
atagctgcagccaca

SEQ ID NO: 1237258 - DNA, 15 bp, Homo sapiens
aatagctgcagccac

SEQ ID NO: 1237259 - DNA, 15 bp, Homo sapiens
taatagctgcagcca

SEQ ID NO: 1237260 - DNA, 15 bp, Homo sapiens
ataatagctgcagcc

SEQ ID NO: 1237261 - DNA, 15 bp, Homo sapiens
aataatagctgcagc

SEQ ID NO: 1237262 - DNA, 15 bp, Homo sapiens
aaataatagctgcag

SEQ ID NO: 1237263 - DNA, 15 bp, Homo sapiens
caaataatagctgca

SEQ ID NO: 1237264 - DNA, 15 bp, Homo sapiens
tcaaataatagctgc

SEQ ID NO: 1237265 - DNA, 15 bp, Homo sapiens
ttcaaataatagctg

SEQ ID NO: 1237266 - DNA, 15 bp, Homo sapiens
attcaaataatagct

SEQ ID NO: 1237267 - DNA, 15 bp, Homo sapiens
tattcaaataatagc

SEQ ID NO: 1237268 - DNA, 15 bp, Homo sapiens
ttattcaaataatag

SEQ ID NO: 1237269 - DNA, 15 bp, Homo sapiens
tttattcaaataata

SEQ ID NO: 1237270 - DNA, 15 bp, Homo sapiens
gtttattcaaataat

SEQ ID NO: 1237271 - DNA, 15 bp, Homo sapiens
agtttattcaaataa

SEQ ID NO: 1237272 - DNA, 15 bp, Homo sapiens
cagtttattcaaata

SEQ ID NO: 1237273 - DNA, 15 bp, Homo sapiens
acagtttattcaaat

SEQ ID NO: 1237274 - DNA, 15 bp, Homo sapiens
tacagtttattcaaa

SEQ ID NO: 1237275 - DNA, 15 bp, Homo sapiens
ttacagtttattcaa

SEQ ID NO: 1237276 - DNA, 15 bp, Homo sapiens
attacagtttattca

SEQ ID NO: 1237277 - DNA, 15 bp, Homo sapiens
aattacagtttattc

SEQ ID NO: 1237278 - DNA, 15 bp, Homo sapiens
taattacagtttatt

SEQ ID NO: 1237279 - DNA, 15 bp, Homo sapiens
ttaattacagtttat

SEQ ID NO: 1237280 - DNA, 15 bp, Homo sapiens
attaattacagttta

SEQ ID NO: 1237281 - DNA, 15 bp, Homo sapiens
aattaattacagttt

SEQ ID NO: 1237282 - DNA, 15 bp, Homo sapiens
taattaattacagtt

SEQ ID NO: 1237283 - DNA, 15 bp, Homo sapiens
ataattaattacagt

SEQ ID NO: 1237284 - DNA, 15 bp, Homo sapiens
aataattaattacag

SEQ ID NO: 1237285 - DNA, 15 bp, Homo sapiens
aaataattaattaca

SEQ ID NO: 1237286 - DNA, 15 bp, Homo sapiens
aaaataattaattac

SEQ ID NO: 1237287 - DNA, 15 bp, Homo sapiens
gaaaataattaatta

SEQ ID NO: 1237288 - DNA, 15 bp, Homo sapiens
ggaaaataattaatt

SEQ ID NO: 1237289 - DNA, 15 bp, Homo sapiens
gggaaaataattaat

SEQ ID NO: 1237290 - DNA, 15 bp, Homo sapiens
agggaaaataattaa

SEQ ID NO: 1237291 - DNA, 15 bp, Homo sapiens
cagggaaaataatta

SEQ ID NO: 1237292 - DNA, 15 bp, Homo sapiens
ctcagggaaaataat

SEQ ID NO: 1237293 - DNA, 15 bp, Homo sapiens
gctcagggaaaataa

SEQ ID NO: 1237294 - DNA, 15 bp, Homo sapiens
agctcagggaaaata

SEQ ID NO: 1237295 - DNA, 15 bp, Homo sapiens
cagctcagggaaaat

SEQ ID NO: 1237296 - DNA, 15 bp, Homo sapiens
tcagctcagggaaaa

SEQ ID NO: 1237297 - DNA, 15 bp, Homo sapiens
ttcagctcagggaaa

SEQ ID NO: 1237298 - DNA, 15 bp, Homo sapiens
cttcagctcagggaa

SEQ ID NO: 1237299 - DNA, 15 bp, Homo sapiens
tcttcagctcaggga

SEQ ID NO: 1237300 - DNA, 15 bp, Homo sapiens
atcttcagctcaggg

SEQ ID NO: 1237301 - DNA, 15 bp, Homo sapiens
aatcttcagctcagg

SEQ ID NO: 1237302 - DNA, 15 bp, Homo sapiens
aaatcttcagctcag

SEQ ID NO: 1237303 - DNA, 15 bp, Homo sapiens
gaaatcttcagctca

SEQ ID NO: 1237304 - DNA, 15 bp, Homo sapiens
tgaaatcttcagctc

SEQ ID NO: 1237305 - DNA, 15 bp, Homo sapiens
atgaaatcttcagct

SEQ ID NO: 1237306 - DNA, 15 bp, Homo sapiens
aatgaaatcttcagc

SEQ ID NO: 1237307 - DNA, 15 bp, Homo sapiens
aaatgaaatcttcag

SEQ ID NO: 1237308 - DNA, 15 bp, Homo sapiens
gaaatgaaatcttca

SEQ ID NO: 1237309 - DNA, 15 bp, Homo sapiens
agaaatgaaatcttc

SEQ ID NO: 1237310 - DNA, 15 bp, Homo sapiens
gagaaatgaaatctt

SEQ ID NO: 1237311 - DNA, 15 bp, Homo sapiens
ggagaaatgaaatct

SEQ ID NO: 1237312 - DNA, 15 bp, Homo sapiens
gggagaaatgaaatc

SEQ ID NO: 1237313 - DNA, 15 bp, Homo sapiens
ggggagaaatgaaat

SEQ ID NO: 1237314 - DNA, 15 bp, Homo sapiens
tggggagaaatgaaa

SEQ ID NO: 1237315 - DNA, 15 bp, Homo sapiens
gtggggagaaatgaa

SEQ ID NO: 1237316 - DNA, 15 bp, Homo sapiens
tgtggggagaaatga

SEQ ID NO: 1237317 - DNA, 15 bp, Homo sapiens
gtgtggggagaaatg

SEQ ID NO: 1237318 - DNA, 15 bp, Homo sapiens
agtgtggggagaaat

SEQ ID NO: 1237319 - DNA, 15 bp, Homo sapiens
tagtgtggggagaaa

SEQ ID NO: 1237320 - DNA, 15 bp, Homo sapiens
atagtgtggggagaa

SEQ ID NO: 1237321 - DNA, 15 bp, Homo sapiens
gatagtgtggggaga

SEQ ID NO: 1237322 - DNA, 15 bp, Homo sapiens
agatagtgtggggag

SEQ ID NO: 1237323 - DNA, 15 bp, Homo sapiens
cagatagtgtgggga

SEQ ID NO: 1237324 - DNA, 15 bp, Homo sapiens
ccagatagtgtgggg

SEQ ID NO: 1237325 - DNA, 15 bp, Homo sapiens
tccagatagtgtggg

SEQ ID NO: 1237326 - DNA, 15 bp, Homo sapiens
ttccagatagtgtgg

SEQ ID NO: 1237327 - DNA, 15 bp, Homo sapiens
attccagatagtgtg

SEQ ID NO: 1237328 - DNA, 15 bp, Homo sapiens
gattccagatagtgt

SEQ ID NO: 1237329 - DNA, 15 bp, Homo sapiens
tgattccagatagtg

SEQ ID NO: 1237330 - DNA, 15 bp, Homo sapiens
atgattccagatagt

SEQ ID NO: 1237331 - DNA, 15 bp, Homo sapiens
catgattccagatag

SEQ ID NO: 1237332 - DNA, 15 bp, Homo sapiens
acatgattccagata

SEQ ID NO: 1237333 - DNA, 15 bp, Homo sapiens
aacatgattccagat

SEQ ID NO: 1237334 - DNA, 15 bp, Homo sapiens
caacatgattccaga

SEQ ID NO: 1237335 - DNA, 15 bp, Homo sapiens
gcaacatgattccag

SEQ ID NO: 1237336 - DNA, 15 bp, Homo sapiens
ggcaacatgattcca

SEQ ID NO: 1237337 - DNA, 15 bp, Homo sapiens
gggcaacatgattcc

SEQ ID NO: 1237338 - DNA, 15 bp, Homo sapiens
agggcaacatgattc

SEQ ID NO: 1237339 - DNA, 15 bp, Homo sapiens
cagggcaacatgatt

SEQ ID NO: 1237340 - DNA, 15 bp, Homo sapiens
tcagggcaacatgat

SEQ ID NO: 1237341 - DNA, 15 bp, Homo sapiens
ttcagggcaacatga

SEQ ID NO: 1237342 - DNA, 15 bp, Homo sapiens
gttcagggcaacatg

SEQ ID NO: 1237343 - DNA, 15 bp, Homo sapiens
tgttcagggcaacat

SEQ ID NO: 1237344 - DNA, 15 bp, Homo sapiens
atgttcagggcaaca

SEQ ID NO: 1237345 - DNA, 15 bp, Homo sapiens
tatgttcagggcaac

SEQ ID NO: 1237346 - DNA, 15 bp, Homo sapiens
gtatgttcagggcaa

SEQ ID NO: 1237347 - DNA, 15 bp, Homo sapiens
agtatgttcagggca

SEQ ID NO: 1237348 - DNA, 15 bp, Homo sapiens
aagtatgttcagggc

SEQ ID NO: 1237349 - DNA, 15 bp, Homo sapiens
caagtatgttcaggg

SEQ ID NO: 1237350 - DNA, 15 bp, Homo sapiens
acaagtatgttcagg

SEQ ID NO: 1237351 - DNA, 15 bp, Homo sapiens
cacaagtatgttcag

SEQ ID NO: 1237352 - DNA, 15 bp, Homo sapiens
gcacaagtatgttca

SEQ ID NO: 1237353 - DNA, 15 bp, Homo sapiens
tgcacaagtatgttc

SEQ ID NO: 1237354 - DNA, 15 bp, Homo sapiens
atgcacaagtatgtt

SEQ ID NO: 1237355 - DNA, 15 bp, Homo sapiens
tatgcacaagtatgt

SEQ ID NO: 1237356 - DNA, 15 bp, Homo sapiens
atatgcacaagtatg

SEQ ID NO: 1237357 - DNA, 15 bp, Homo sapiens
aatatgcacaagtat

SEQ ID NO: 1237358 - DNA, 15 bp, Homo sapiens
aaatatgcacaagta

SEQ ID NO: 1237359 - DNA, 15 bp, Homo sapiens
aaaatatgcacaagt

SEQ ID NO: 1237360 - DNA, 15 bp, Homo sapiens
aaaaatatgcacaag

SEQ ID NO: 1237361 - DNA, 15 bp, Homo sapiens
gaaaaatatgcacaa

SEQ ID NO: 1237362 - DNA, 15 bp, Homo sapiens
agaaaaatatgcaca

SEQ ID NO: 1237363 - DNA, 15 bp, Homo sapiens
tagaaaaatatgcac

SEQ ID NO: 1237364 - DNA, 15 bp, Homo sapiens
gtagaaaaatatgca

SEQ ID NO: 1237365 - DNA, 15 bp, Homo sapiens
tgtagaaaaatatgc

SEQ ID NO: 1237366 - DNA, 15 bp, Homo sapiens
atgtagaaaaatatg

SEQ ID NO: 1237367 - DNA, 15 bp, Homo sapiens
aatgtagaaaaatat

SEQ ID NO: 1237368 - DNA, 15 bp, Homo sapiens
aaatgtagaaaaata

SEQ ID NO: 1237369 - DNA, 15 bp, Homo sapiens
gaaatgtagaaaaat

SEQ ID NO: 1237370 - DNA, 15 bp, Homo sapiens
agaaatgtagaaaaa

SEQ ID NO: 1237371 - DNA, 15 bp, Homo sapiens
cagaaatgtagaaaa

SEQ ID NO: 1237372 - DNA, 15 bp, Homo sapiens
tcagaaatgtagaaa

SEQ ID NO: 1237373 - DNA, 15 bp, Homo sapiens
atcagaaatgtagaa

SEQ ID NO: 1237374 - DNA, 15 bp, Homo sapiens
aatcagaaatgtaga

SEQ ID NO: 1237375 - DNA, 15 bp, Homo sapiens
taatcagaaatgtag

SEQ ID NO: 1237376 - DNA, 15 bp, Homo sapiens
ataatcagaaatgta

SEQ ID NO: 1237377 - DNA, 15 bp, Homo sapiens
tataatcagaaatgt

SEQ ID NO: 1237378 - DNA, 15 bp, Homo sapiens
gtataatcagaaatg

SEQ ID NO: 1237379 - DNA, 15 bp, Homo sapiens
agtataatcagaaat

SEQ ID NO: 1237380 - DNA, 15 bp, Homo sapiens
tagtataatcagaaa

SEQ ID NO: 1237381 - DNA, 15 bp, Homo sapiens
ctagtataatcagaa

SEQ ID NO: 1237382 - DNA, 15 bp, Homo sapiens
actagtataatcaga

SEQ ID NO: 1237383 - DNA, 15 bp, Homo sapiens
tactagtataatcag

SEQ ID NO: 1237384 - DNA, 15 bp, Homo sapiens
ttactagtataatca

SEQ ID NO: 1237385 - DNA, 15 bp, Homo sapiens
cttactagtataatc

SEQ ID NO: 1237386 - DNA, 15 bp, Homo sapiens
gcttactagtataat

SEQ ID NO: 1237387 - DNA, 15 bp, Homo sapiens
tgcttactagtataa

SEQ ID NO: 1237388 - DNA, 15 bp, Homo sapiens
atgcttactagtata

SEQ ID NO: 1237389 - DNA, 15 bp, Homo sapiens
aatgcttactagtat

SEQ ID NO: 1237390 - DNA, 15 bp, Homo sapiens
caatgcttactagta

SEQ ID NO: 1237391 - DNA, 15 bp, Homo sapiens
tcaatgcttactagt

SEQ ID NO: 1237392 - DNA, 15 bp, Homo sapiens
ttcaatgcttactag

SEQ ID NO: 1237393 - DNA, 15 bp, Homo sapiens
gttcaatgcttacta

SEQ ID NO: 1237394 - DNA, 15 bp, Homo sapiens
tgttcaatgcttact

SEQ ID NO: 1237395 - DNA, 15 bp, Homo sapiens
gtgttcaatgcttac

SEQ ID NO: 1237396 - DNA, 15 bp, Homo sapiens
tgtgttcaatgctta

SEQ ID NO: 1237397 - DNA, 15 bp, Homo sapiens
atgtgttcaatgctt

SEQ ID NO: 1237398 - DNA, 15 bp, Homo sapiens
tatgtgttcaatgct

SEQ ID NO: 1237399 - DNA, 15 bp, Homo sapiens
ttatgtgttcaatgc

SEQ ID NO: 1237400 - DNA, 15 bp, Homo sapiens
attatgtgttcaatg

SEQ ID NO: 1237401 - DNA, 15 bp, Homo sapiens
cattatgtgttcaat

SEQ ID NO: 1237402 - DNA, 15 bp, Homo sapiens
acattatgtgttcaa

SEQ ID NO: 1237403 - DNA, 15 bp, Homo sapiens
cacattatgtgttca

SEQ ID NO: 1237404 - DNA, 15 bp, Homo sapiens
gcacattatgtgttc

SEQ ID NO: 1237405 - DNA, 15 bp, Homo sapiens
tgcacattatgtgtt

SEQ ID NO: 1237406 - DNA, 15 bp, Homo sapiens
atgcacattatgtgt

SEQ ID NO: 1237407 - DNA, 15 bp, Homo sapiens
gatgcacattatgtg

SEQ ID NO: 1237408 - DNA, 15 bp, Homo sapiens
tgatgcacattatgt

SEQ ID NO: 1237409 - DNA, 15 bp, Homo sapiens
ctgatgcacattatg

SEQ ID NO: 1237410 - DNA, 15 bp, Homo sapiens
cctgatgcacattat

SEQ ID NO: 1237411 - DNA, 15 bp, Homo sapiens
gcctgatgcacatta

SEQ ID NO: 1237412 - DNA, 15 bp, Homo sapiens
tgcctgatgcacatt

SEQ ID NO: 1237413 - DNA, 15 bp, Homo sapiens
gtgcctgatgcacat

SEQ ID NO: 1237414 - DNA, 15 bp, Homo sapiens
ggtgcctgatgcaca

SEQ ID NO: 1237415 - DNA, 15 bp, Homo sapiens
tggtgcctgatgcac

SEQ ID NO: 1237416 - DNA, 15 bp, Homo sapiens
atggtgcctgatgca

SEQ ID NO: 1237417 - DNA, 15 bp, Homo sapiens
catggtgcctgatgc

SEQ ID NO: 1237418 - DNA, 15 bp, Homo sapiens
gcatggtgcctgatg

SEQ ID NO: 1237419 - DNA, 15 bp, Homo sapiens
agcatggtgcctgat

SEQ ID NO: 1237420 - DNA, 15 bp, Homo sapiens
aagcatggtgcctga

SEQ ID NO: 1237421 - DNA, 15 bp, Homo sapiens
taagcatggtgcctg

SEQ ID NO: 1237422 - DNA, 15 bp, Homo sapiens
ctaagcatggtgcct

SEQ ID NO: 1237423 - DNA, 15 bp, Homo sapiens
actaagcatggtgcc

SEQ ID NO: 1237424 - DNA, 15 bp, Homo sapiens
gactaagcatggtgc

SEQ ID NO: 1237425 - DNA, 15 bp, Homo sapiens
ggactaagcatggtg

SEQ ID NO: 1237426 - DNA, 15 bp, Homo sapiens
aggactaagcatggt

SEQ ID NO: 1237427 - DNA, 15 bp, Homo sapiens
caggactaagcatgg

SEQ ID NO: 1237428 - DNA, 15 bp, Homo sapiens
tcaggactaagcatg

SEQ ID NO: 1237429 - DNA, 15 bp, Homo sapiens
ctcaggactaagcat

SEQ ID NO: 1237430 - DNA, 15 bp, Homo sapiens
cctcaggactaagca

SEQ ID NO: 1237431 - DNA, 15 bp, Homo sapiens
tcctcaggactaagc

SEQ ID NO: 1237432 - DNA, 15 bp, Homo sapiens
atcctcaggactaag

SEQ ID NO: 1237433 - DNA, 15 bp, Homo sapiens
aatcctcaggactaa

SEQ ID NO: 1237434 - DNA, 15 bp, Homo sapiens
aaatcctcaggacta

SEQ ID NO: 1237435 - DNA, 15 bp, Homo sapiens
taaatcctcaggact

SEQ ID NO: 1237436 - DNA, 15 bp, Homo sapiens
ctaaatcctcaggac

SEQ ID NO: 1237437 - DNA, 15 bp, Homo sapiens
tctaaatcctcagga

SEQ ID NO: 1237438 - DNA, 15 bp, Homo sapiens
ttctaaatcctcagg

SEQ ID NO: 1237439 - DNA, 15 bp, Homo sapiens
tttctaaatcctcag

SEQ ID NO: 1237440 - DNA, 15 bp, Homo sapiens
atttctaaatcctca

SEQ ID NO: 1237441 - DNA, 15 bp, Homo sapiens
tatttctaaatcctc

SEQ ID NO: 1237442 - DNA, 15 bp, Homo sapiens
gtatttctaaatcct

SEQ ID NO: 1237443 - DNA, 15 bp, Homo sapiens
agtatttctaaatcc

SEQ ID NO: 1237444 - DNA, 15 bp, Homo sapiens
cagtatttctaaatc

SEQ ID NO: 1237445 - DNA, 15 bp, Homo sapiens
tcagtatttctaaat

SEQ ID NO: 1237446 - DNA, 15 bp, Homo sapiens
atcagtatttctaaa

SEQ ID NO: 1237447 - DNA, 15 bp, Homo sapiens
tatcagtatttctaa

SEQ ID NO: 1237448 - DNA, 15 bp, Homo sapiens
atatcagtatttcta

SEQ ID NO: 1237449 - DNA, 15 bp, Homo sapiens
aatatcagtatttct

SEQ ID NO: 1237450 - DNA, 15 bp, Homo sapiens
aaatatcagtatttc

SEQ ID NO: 1237451 - DNA, 15 bp, Homo sapiens
caaatatcagtattt

SEQ ID NO: 1237452 - DNA, 15 bp, Homo sapiens
tcaaatatcagtatt

SEQ ID NO: 1237453 - DNA, 15 bp, Homo sapiens
atcaaatatcagtat

SEQ ID NO: 1237454 - DNA, 15 bp, Homo sapiens
gatcaaatatcagta

SEQ ID NO: 1237455 - DNA, 15 bp, Homo sapiens
agatcaaatatcagt

SEQ ID NO: 1237456 - DNA, 15 bp, Homo sapiens
gagatcaaatatcag

SEQ ID NO: 1237457 - DNA, 15 bp, Homo sapiens
agagatcaaatatca

SEQ ID NO: 1237458 - DNA, 15 bp, Homo sapiens
cagagatcaaatatc

SEQ ID NO: 1237459 - DNA, 15 bp, Homo sapiens
acagagatcaaatat

SEQ ID NO: 1237460 - DNA, 15 bp, Homo sapiens
gacagagatcaaata

SEQ ID NO: 1237461 - DNA, 15 bp, Homo sapiens
ggacagagatcaaat

SEQ ID NO: 1237462 - DNA, 15 bp, Homo sapiens
aggacagagatcaaa

SEQ ID NO: 1237463 - DNA, 15 bp, Homo sapiens
caggacagagatcaa

SEQ ID NO: 1237464 - DNA, 15 bp, Homo sapiens
tcaggacagagatca

SEQ ID NO: 1237465 - DNA, 15 bp, Homo sapiens
ctcaggacagagatc

SEQ ID NO: 1237466 - DNA, 15 bp, Homo sapiens
tctcaggacagagat

SEQ ID NO: 1237467 - DNA, 15 bp, Homo sapiens
ctctcaggacagaga

SEQ ID NO: 1237468 - DNA, 15 bp, Homo sapiens
actctcaggacagag

SEQ ID NO: 1237469 - DNA, 15 bp, Homo sapiens
aactctcaggacaga

SEQ ID NO: 1237470 - DNA, 15 bp, Homo sapiens
gaactctcaggacag

SEQ ID NO: 1237471 - DNA, 15 bp, Homo sapiens
agaactctcaggaca

SEQ ID NO: 1237472 - DNA, 15 bp, Homo sapiens
aagaactctcaggac

SEQ ID NO: 1237473 - DNA, 15 bp, Homo sapiens
taagaactctcagga

SEQ ID NO: 1237474 - DNA, 15 bp, Homo sapiens
ctaagaactctcagg

SEQ ID NO: 1237475 - DNA, 15 bp, Homo sapiens
actaagaactctcag

SEQ ID NO: 1237476 - DNA, 15 bp, Homo sapiens
gactaagaactctca

SEQ ID NO: 1237477 - DNA, 15 bp, Homo sapiens
ggactaagaactctc

SEQ ID NO: 1237478 - DNA, 15 bp, Homo sapiens
tggactaagaactct

SEQ ID NO: 1237479 - DNA, 15 bp, Homo sapiens
ctggactaagaactc

SEQ ID NO: 1237480 - DNA, 15 bp, Homo sapiens
cctggactaagaact

SEQ ID NO: 1237481 - DNA, 15 bp, Homo sapiens
tcctggactaagaac

SEQ ID NO: 1237482 - DNA, 15 bp, Homo sapiens
ctcctggactaagaa

SEQ ID NO: 1237483 - DNA, 15 bp, Homo sapiens
tctcctggactaaga

SEQ ID NO: 1237484 - DNA, 15 bp, Homo sapiens
ctctcctggactaag

SEQ ID NO: 1237485 - DNA, 15 bp, Homo sapiens
cctctcctggactaa

SEQ ID NO: 1237486 - DNA, 15 bp, Homo sapiens
tcctctcctggacta

SEQ ID NO: 1237487 - DNA, 15 bp, Homo sapiens
ctcctctcctggact

SEQ ID NO: 1237488 - DNA, 15 bp, Homo sapiens
tctcctctcctggac

SEQ ID NO: 1237489 - DNA, 15 bp, Homo sapiens
gtctcctctcctgga

SEQ ID NO: 1237490 - DNA, 15 bp, Homo sapiens
tgtctcctctcctgg

SEQ ID NO: 1237491 - DNA, 15 bp, Homo sapiens
ctgtctcctctcctg

SEQ ID NO: 1237492 - DNA, 15 bp, Homo sapiens
tctgtctcctctcct

SEQ ID NO: 1237493 - DNA, 15 bp, Homo sapiens
ttctgtctcctctcc

SEQ ID NO: 1237494 - DNA, 15 bp, Homo sapiens
cttctgtctcctctc

SEQ ID NO: 1237495 - DNA, 15 bp, Homo sapiens
tcttctgtctcctct

SEQ ID NO: 1237496 - DNA, 15 bp, Homo sapiens
actcttctgtctcct

SEQ ID NO: 1237497 - DNA, 15 bp, Homo sapiens
cactcttctgtctcc

SEQ ID NO: 1237498 - DNA, 15 bp, Homo sapiens
ccactcttctgtctc

SEQ ID NO: 1237499 - DNA, 15 bp, Homo sapiens
tccactcttctgtct

SEQ ID NO: 1237500 - DNA, 15 bp, Homo sapiens
ttccactcttctgtc

SEQ ID NO: 1237501 - DNA, 15 bp, Homo sapiens
tttccactcttctgt

SEQ ID NO: 1237502 - DNA, 15 bp, Homo sapiens
gtttccactcttctg

SEQ ID NO: 1237503 - DNA, 15 bp, Homo sapiens
tgtttccactcttct

SEQ ID NO: 1237504 - DNA, 15 bp, Homo sapiens
ttgtttccactcttc

SEQ ID NO: 1237505 - DNA, 15 bp, Homo sapiens
tttgtttccactctt

SEQ ID NO: 1237506 - DNA, 15 bp, Homo sapiens
ttttgtttccactct

SEQ ID NO: 1237507 - DNA, 15 bp, Homo sapiens
attttgtttccactc

SEQ ID NO: 1237508 - DNA, 15 bp, Homo sapiens
gattttgtttccact

SEQ ID NO: 1237509 - DNA, 15 bp, Homo sapiens
tgattttgtttccac

SEQ ID NO: 1237510 - DNA, 15 bp, Homo sapiens
gtgattttgtttcca

SEQ ID NO: 1237511 - DNA, 15 bp, Homo sapiens
tgtgattttgtttcc

SEQ ID NO: 1237512 - DNA, 15 bp, Homo sapiens
ttgtgattttgtttc

SEQ ID NO: 1237513 - DNA, 15 bp, Homo sapiens
cttgtgattttgttt

SEQ ID NO: 1237514 - DNA, 15 bp, Homo sapiens
tctcttgtgattttg

SEQ ID NO: 1237515 - DNA, 15 bp, Homo sapiens
ctctcttgtgatttt

SEQ ID NO: 1237516 - DNA, 15 bp, Homo sapiens
actctcttgtgattt

SEQ ID NO: 1237517 - DNA, 15 bp, Homo sapiens
cactctcttgtgatt

SEQ ID NO: 1237518 - DNA, 15 bp, Homo sapiens
acactctcttgtgat

SEQ ID NO: 1237519 - DNA, 15 bp, Homo sapiens
cacactctcttgtga

SEQ ID NO: 1237520 - DNA, 15 bp, Homo sapiens
acacactctcttgtg

SEQ ID NO: 1237521 - DNA, 15 bp, Homo sapiens
cacacactctcttgt

SEQ ID NO: 1237522 - DNA, 15 bp, Homo sapiens
tcacacactctcttg

SEQ ID NO: 1237523 - DNA, 15 bp, Homo sapiens
ctcacacactctctt

SEQ ID NO: 1237524 - DNA, 15 bp, Homo sapiens
actcacacactctct

SEQ ID NO: 1237525 - DNA, 15 bp, Homo sapiens
aactcacacactctc

SEQ ID NO: 1237526 - DNA, 15 bp, Homo sapiens
aaactcacacactct

SEQ ID NO: 1237527 - DNA, 15 bp, Homo sapiens
caaactcacacactc

SEQ ID NO: 1237528 - DNA, 15 bp, Homo sapiens
gcaaactcacacact

SEQ ID NO: 1237529 - DNA, 15 bp, Homo sapiens
tgcaaactcacacac

SEQ ID NO: 1237530 - DNA, 15 bp, Homo sapiens
ctgcaaactcacaca

SEQ ID NO: 1237531 - DNA, 15 bp, Homo sapiens
tctgcaaactcacac

SEQ ID NO: 1237532 - DNA, 15 bp, Homo sapiens
ctctgcaaactcaca

SEQ ID NO: 1237533 - DNA, 15 bp, Homo sapiens
tctctgcaaactcac

SEQ ID NO: 1237534 - DNA, 15 bp, Homo sapiens
ttctctgcaaactca

SEQ ID NO: 1237535 - DNA, 15 bp, Homo sapiens
tttctctgcaaactc

SEQ ID NO: 1237536 - DNA, 15 bp, Homo sapiens
ttttctctgcaaact

SEQ ID NO: 1237537 - DNA, 15 bp, Homo sapiens
gttttctctgcaaac

SEQ ID NO: 1237538 - DNA, 15 bp, Homo sapiens
agttttctctgcaaa

SEQ ID NO: 1237539 - DNA, 15 bp, Homo sapiens
cagttttctctgcaa

SEQ ID NO: 1237540 - DNA, 15 bp, Homo sapiens
gcagttttctctgca

SEQ ID NO: 1237541 - DNA, 15 bp, Homo sapiens
ggcagttttctctgc

SEQ ID NO: 1237542 - DNA, 15 bp, Homo sapiens
tggcagttttctctg

SEQ ID NO: 1237543 - DNA, 15 bp, Homo sapiens
ctggcagttttctct

SEQ ID NO: 1237544 - DNA, 15 bp, Homo sapiens
cctggcagttttctc

SEQ ID NO: 1237545 - DNA, 15 bp, Homo sapiens
gcctggcagttttct

SEQ ID NO: 1237546 - DNA, 15 bp, Homo sapiens
tgcctggcagttttc

SEQ ID NO: 1237547 - DNA, 15 bp, Homo sapiens
ctgcctggcagtttt

SEQ ID NO: 1237548 - DNA, 15 bp, Homo sapiens
actgcctggcagttt

SEQ ID NO: 1237549 - DNA, 15 bp, Homo sapiens
tactgcctggcagtt

SEQ ID NO: 1237550 - DNA, 15 bp, Homo sapiens
atactgcctggcagt

SEQ ID NO: 1237551 - DNA, 15 bp, Homo sapiens
gatactgcctggcag

SEQ ID NO: 1237552 - DNA, 15 bp, Homo sapiens
agatactgcctggca

SEQ ID NO: 1237553 - DNA, 15 bp, Homo sapiens
cagatactgcctggc

SEQ ID NO: 1237554 - DNA, 15 bp, Homo sapiens
ccagatactgcctgg

SEQ ID NO: 1237555 - DNA, 15 bp, Homo sapiens
cccagatactgcctg

SEQ ID NO: 1237556 - DNA, 15 bp, Homo sapiens
gcccagatactgcct

SEQ ID NO: 1237557 - DNA, 15 bp, Homo sapiens
ggcccagatactgcc

SEQ ID NO: 1237558 - DNA, 15 bp, Homo sapiens
tggcccagatactgc

SEQ ID NO: 1237559 - DNA, 15 bp, Homo sapiens
ttggcccagatactg

SEQ ID NO: 1237560 - DNA, 15 bp, Homo sapiens
cttggcccagatact

SEQ ID NO: 1237561 - DNA, 15 bp, Homo sapiens
ccttggcccagatac

SEQ ID NO: 1237562 - DNA, 15 bp, Homo sapiens
tccttggcccagata

SEQ ID NO: 1237563 - DNA, 15 bp, Homo sapiens
ttccttggcccagat

SEQ ID NO: 1237564 - DNA, 15 bp, Homo sapiens
cttccttggcccaga

SEQ ID NO: 1237565 - DNA, 15 bp, Homo sapiens
ccttccttggcccag

SEQ ID NO: 1237566 - DNA, 15 bp, Homo sapiens
tccttccttggccca

SEQ ID NO: 1237567 - DNA, 15 bp, Homo sapiens
atccttccttggccc

SEQ ID NO: 1237568 - DNA, 15 bp, Homo sapiens
catccttccttggcc

SEQ ID NO: 1237569 - DNA, 15 bp, Homo sapiens
gcatccttccttggc

SEQ ID NO: 1237570 - DNA, 15 bp, Homo sapiens
ggcatccttccttgg

SEQ ID NO: 1237571 - DNA, 15 bp, Homo sapiens
gggcatccttccttg

SEQ ID NO: 1237572 - DNA, 15 bp, Homo sapiens
tgggcatccttcctt

SEQ ID NO: 1237573 - DNA, 15 bp, Homo sapiens
gtgggcatccttcct

SEQ ID NO: 1237574 - DNA, 15 bp, Homo sapiens
ggtgggcatccttcc

SEQ ID NO: 1237575 - DNA, 15 bp, Homo sapiens
aggtgggcatccttc

SEQ ID NO: 1237576 - DNA, 15 bp, Homo sapiens
gaggtgggcatcctt

SEQ ID NO: 1237577 - DNA, 15 bp, Homo sapiens
agaggtgggcatcct

SEQ ID NO: 1237578 - DNA, 15 bp, Homo sapiens
cagaggtgggcatcc

SEQ ID NO: 1237579 - DNA, 15 bp, Homo sapiens
tcagaggtgggcatc

SEQ ID NO: 1237580 - DNA, 15 bp, Homo sapiens
gtcagaggtgggcat

SEQ ID NO: 1237581 - DNA, 15 bp, Homo sapiens
agtcagaggtgggca

SEQ ID NO: 1237582 - DNA, 15 bp, Homo sapiens
tagtcagaggtgggc

SEQ ID NO: 1237583 - DNA, 15 bp, Homo sapiens
ctagtcagaggtggg

SEQ ID NO: 1237584 - DNA, 15 bp, Homo sapiens
cctagtcagaggtgg

SEQ ID NO: 1237585 - DNA, 15 bp, Homo sapiens
tcctagtcagaggtg

SEQ ID NO: 1237586 - DNA, 15 bp, Homo sapiens
ctcctagtcagaggt

SEQ ID NO: 1237587 - DNA, 15 bp, Homo sapiens
gctcctagtcagagg

SEQ ID NO: 1237588 - DNA, 15 bp, Homo sapiens
tgctcctagtcagag

SEQ ID NO: 1237589 - DNA, 15 bp, Homo sapiens
ttgctcctagtcaga

SEQ ID NO: 1237590 - DNA, 15 bp, Homo sapiens
attgctcctagtcag

SEQ ID NO: 1237591 - DNA, 15 bp, Homo sapiens
cattgctcctagtca

SEQ ID NO: 1237592 - DNA, 15 bp, Homo sapiens
tcattgctcctagtc

SEQ ID NO: 1237593 - DNA, 15 bp, Homo sapiens
ctcattgctcctagt

SEQ ID NO: 1237594 - DNA, 15 bp, Homo sapiens
actcattgctcctag

SEQ ID NO: 1237595 - DNA, 15 bp, Homo sapiens
gactcattgctccta

SEQ ID NO: 1237596 - DNA, 15 bp, Homo sapiens
tgactcattgctcct

SEQ ID NO: 1237597 - DNA, 15 bp, Homo sapiens
ctgactcattgctcc

SEQ ID NO: 1237598 - DNA, 15 bp, Homo sapiens
tctgactcattgctc

SEQ ID NO: 1237599 - DNA, 15 bp, Homo sapiens
ttctgactcattgct

SEQ ID NO: 1237600 - DNA, 15 bp, Homo sapiens
tttctgactcattgc

SEQ ID NO: 1237601 - DNA, 15 bp, Homo sapiens
ttttctgactcattg

SEQ ID NO: 1237602 - DNA, 15 bp, Homo sapiens
tttttctgactcatt

SEQ ID NO: 1237603 - DNA, 15 bp, Homo sapiens
ttttttctgactcat

SEQ ID NO: 1237604 - DNA, 15 bp, Homo sapiens
tttttttctgactca

SEQ ID NO: 1237605 - DNA, 15 bp, Homo sapiens
ttttttttctgactc

SEQ ID NO: 1237606 - DNA, 15 bp, Homo sapiens
tttttttttctgact

SEQ ID NO: 1237607 - DNA, 15 bp, Homo sapiens
ttttttttttctgac

SEQ ID NO: 1237608 - DNA, 15 bp, Homo sapiens
aagtttttttttttt

SEQ ID NO: 1237609 - DNA, 15 bp, Homo sapiens
aaagttttttttttt

SEQ ID NO: 1237610 - DNA, 15 bp, Homo sapiens
caaaaaagttttttt

SEQ ID NO: 1237611 - DNA, 15 bp, Homo sapiens
tcaaaaaagtttttt

SEQ ID NO: 1237612 - DNA, 15 bp, Homo sapiens
ttcaaaaaagttttt

SEQ ID NO: 1237613 - DNA, 15 bp, Homo sapiens
cttcaaaaaagtttt

SEQ ID NO: 1237614 - DNA, 15 bp, Homo sapiens
tcttcaaaaaagttt

SEQ ID NO: 1237615 - DNA, 15 bp, Homo sapiens
atcttcaaaaaagtt

SEQ ID NO: 1237616 - DNA, 15 bp, Homo sapiens
catcttcaaaaaagt

SEQ ID NO: 1237617 - DNA, 15 bp, Homo sapiens
acatcttcaaaaaag

SEQ ID NO: 1237618 - DNA, 15 bp, Homo sapiens
tacatcttcaaaaaa

SEQ ID NO: 1237619 - DNA, 15 bp, Homo sapiens
ctacatcttcaaaaa

SEQ ID NO: 1237620 - DNA, 15 bp, Homo sapiens
actacatcttcaaaa

SEQ ID NO: 1237621 - DNA, 15 bp, Homo sapiens
cactacatcttcaaa

SEQ ID NO: 1237622 - DNA, 15 bp, Homo sapiens
acactacatcttcaa

SEQ ID NO: 1237623 - DNA, 15 bp, Homo sapiens
tacactacatcttca

SEQ ID NO: 1237624 - DNA, 15 bp, Homo sapiens
atacactacatcttc

SEQ ID NO: 1237625 - DNA, 15 bp, Homo sapiens
catacactacatctt

SEQ ID NO: 1237626 - DNA, 15 bp, Homo sapiens
tcatacactacatct

SEQ ID NO: 1237627 - DNA, 15 bp, Homo sapiens
ttcatacactacatc

SEQ ID NO: 1237628 - DNA, 15 bp, Homo sapiens
attcatacactacat

SEQ ID NO: 1237629 - DNA, 15 bp, Homo sapiens
aattcatacactaca

SEQ ID NO: 1237630 - DNA, 15 bp, Homo sapiens
caattcatacactac

SEQ ID NO: 1237631 - DNA, 15 bp, Homo sapiens
tcaattcatacacta

SEQ ID NO: 1237632 - DNA, 15 bp, Homo sapiens
gtcaattcatacact

SEQ ID NO: 1237633 - DNA, 15 bp, Homo sapiens
ggtcaattcatacac

SEQ ID NO: 1237634 - DNA, 15 bp, Homo sapiens
aggtcaattcataca

SEQ ID NO: 1237635 - DNA, 15 bp, Homo sapiens
caggtcaattcatac

SEQ ID NO: 1237636 - DNA, 15 bp, Homo sapiens
ccaggtcaattcata

SEQ ID NO: 1237637 - DNA, 15 bp, Homo sapiens
accaggtcaattcat

SEQ ID NO: 1237638 - DNA, 15 bp, Homo sapiens
caccaggtcaattca

SEQ ID NO: 1237639 - DNA, 15 bp, Homo sapiens
tcaccaggtcaattc

SEQ ID NO: 1237640 - DNA, 15 bp, Homo sapiens
ctcaccaggtcaatt

SEQ ID NO: 1237641 - DNA, 15 bp, Homo sapiens
actcaccaggtcaat

SEQ ID NO: 1237642 - DNA, 15 bp, Homo sapiens
cactcaccaggtcaa

SEQ ID NO: 1237643 - DNA, 15 bp, Homo sapiens
acactcaccaggtca

SEQ ID NO: 1237644 - DNA, 15 bp, Homo sapiens
aacactcaccaggtc

SEQ ID NO: 1237645 - DNA, 15 bp, Homo sapiens
caacactcaccaggt

SEQ ID NO: 1237646 - DNA, 15 bp, Homo sapiens
tcaacactcaccagg

SEQ ID NO: 1237647 - DNA, 15 bp, Homo sapiens
atcaacactcaccag

SEQ ID NO: 1237648 - DNA, 15 bp, Homo sapiens
gatcaacactcacca

SEQ ID NO: 1237649 - DNA, 15 bp, Homo sapiens
ggatcaacactcacc

SEQ ID NO: 1237650 - DNA, 15 bp, Homo sapiens
aggatcaacactcac

SEQ ID NO: 1237651 - DNA, 15 bp, Homo sapiens
aaggatcaacactca

SEQ ID NO: 1237652 - DNA, 15 bp, Homo sapiens
taaggatcaacactc

SEQ ID NO: 1237653 - DNA, 15 bp, Homo sapiens
gtaaggatcaacact

SEQ ID NO: 1237654 - DNA, 15 bp, Homo sapiens
agtaaggatcaacac

SEQ ID NO: 1237655 - DNA, 15 bp, Homo sapiens
gagtaaggatcaaca

SEQ ID NO: 1237656 - DNA, 15 bp, Homo sapiens
ggagtaaggatcaac

SEQ ID NO: 1237657 - DNA, 15 bp, Homo sapiens
aggagtaaggatcaa

SEQ ID NO: 1237658 - DNA, 15 bp, Homo sapiens
taggagtaaggatca

SEQ ID NO: 1237659 - DNA, 15 bp, Homo sapiens
ttaggagtaaggatc

SEQ ID NO: 1237660 - DNA, 15 bp, Homo sapiens
cttaggagtaaggat

SEQ ID NO: 1237661 - DNA, 15 bp, Homo sapiens
gcttaggagtaagga

SEQ ID NO: 1237662 - DNA, 15 bp, Homo sapiens
ggcttaggagtaagg

SEQ ID NO: 1237663 - DNA, 15 bp, Homo sapiens
aggcttaggagtaag

SEQ ID NO: 1237664 - DNA, 15 bp, Homo sapiens
aaggcttaggagtaa

SEQ ID NO: 1237665 - DNA, 15 bp, Homo sapiens
gaaggcttaggagta

SEQ ID NO: 1237666 - DNA, 15 bp, Homo sapiens
ggaaggcttaggagt

SEQ ID NO: 1237667 - DNA, 15 bp, Homo sapiens
tggaaggcttaggag

SEQ ID NO: 1237668 - DNA, 15 bp, Homo sapiens
atggaaggcttagga

SEQ ID NO: 1237669 - DNA, 15 bp, Homo sapiens
aatggaaggcttagg

SEQ ID NO: 1237670 - DNA, 15 bp, Homo sapiens
aaatggaaggcttag

SEQ ID NO: 1237671 - DNA, 15 bp, Homo sapiens
aaaatggaaggctta

SEQ ID NO: 1237672 - DNA, 15 bp, Homo sapiens
caaaatggaaggctt

SEQ ID NO: 1237673 - DNA, 15 bp, Homo sapiens
ccaaaatggaaggct

SEQ ID NO: 1237674 - DNA, 15 bp, Homo sapiens
gccaaaatggaaggc

SEQ ID NO: 1237675 - DNA, 15 bp, Homo sapiens
tgccaaaatggaagg

SEQ ID NO: 1237676 - DNA, 15 bp, Homo sapiens
ctgccaaaatggaag

SEQ ID NO: 1237677 - DNA, 15 bp, Homo sapiens
gctgccaaaatggaa

SEQ ID NO: 1237678 - DNA, 15 bp, Homo sapiens
ggctgccaaaatgga

SEQ ID NO: 1237679 - DNA, 15 bp, Homo sapiens
aggctgccaaaatgg

SEQ ID NO: 1237680 - DNA, 15 bp, Homo sapiens
gaggctgccaaaatg

SEQ ID NO: 1237681 - DNA, 15 bp, Homo sapiens
ggaggctgccaaaat

SEQ ID NO: 1237682 - DNA, 15 bp, Homo sapiens
gggaggctgccaaaa

SEQ ID NO: 1237683 - DNA, 15 bp, Homo sapiens
ggggaggctgccaaa

SEQ ID NO: 1237684 - DNA, 15 bp, Homo sapiens
aggggaggctgccaa

SEQ ID NO: 1237685 - DNA, 15 bp, Homo sapiens
taggggaggctgcca

SEQ ID NO: 1237686 - DNA, 15 bp, Homo sapiens
ctaggggaggctgcc

SEQ ID NO: 1237687 - DNA, 15 bp, Homo sapiens
gctaggggaggctgc

SEQ ID NO: 1237688 - DNA, 15 bp, Homo sapiens
agctaggggaggctg

SEQ ID NO: 1237689 - DNA, 15 bp, Homo sapiens
aagctaggggaggct

SEQ ID NO: 1237690 - DNA, 15 bp, Homo sapiens
aaagctaggggaggc

SEQ ID NO: 1237691 - DNA, 15 bp, Homo sapiens
gaaagctaggggagg

SEQ ID NO: 1237692 - DNA, 15 bp, Homo sapiens
tgaaagctaggggag

SEQ ID NO: 1237693 - DNA, 15 bp, Homo sapiens
gtgaaagctagggga

SEQ ID NO: 1237694 - DNA, 15 bp, Homo sapiens
ggtgaaagctagggg

SEQ ID NO: 1237695 - DNA, 15 bp, Homo sapiens
aggtgaaagctaggg

SEQ ID NO: 1237696 - DNA, 15 bp, Homo sapiens
aaggtgaaagctagg

SEQ ID NO: 1237697 - DNA, 15 bp, Homo sapiens
caaggtgaaagctag

SEQ ID NO: 1237698 - DNA, 15 bp, Homo sapiens
tcaaggtgaaagcta

SEQ ID NO: 1237699 - DNA, 15 bp, Homo sapiens
ttcaaggtgaaagct

SEQ ID NO: 1237700 - DNA, 15 bp, Homo sapiens
attcaaggtgaaagc

SEQ ID NO: 1237701 - DNA, 15 bp, Homo sapiens
aattcaaggtgaaag

SEQ ID NO: 1237702 - DNA, 15 bp, Homo sapiens
aaattcaaggtgaaa

SEQ ID NO: 1237703 - DNA, 15 bp, Homo sapiens
aaaattcaaggtgaa

SEQ ID NO: 1237704 - DNA, 15 bp, Homo sapiens
aaaaattcaaggtga

SEQ ID NO: 1237705 - DNA, 15 bp, Homo sapiens
gaaaaattcaaggtg

SEQ ID NO: 1237706 - DNA, 15 bp, Homo sapiens
agaaaaattcaaggt

SEQ ID NO: 1237707 - DNA, 15 bp, Homo sapiens
aagaaaaattcaagg

SEQ ID NO: 1237708 - DNA, 15 bp, Homo sapiens
gaagaaaaattcaag

SEQ ID NO: 1237709 - DNA, 15 bp, Homo sapiens
tgaagaaaaattcaa

SEQ ID NO: 1237710 - DNA, 15 bp, Homo sapiens
ctgaagaaaaattca

SEQ ID NO: 1237711 - DNA, 15 bp, Homo sapiens
tctgaagaaaaattc

SEQ ID NO: 1237712 - DNA, 15 bp, Homo sapiens
gtctgaagaaaaatt

SEQ ID NO: 1237713 - DNA, 15 bp, Homo sapiens
ggtctgaagaaaaat

SEQ ID NO: 1237714 - DNA, 15 bp, Homo sapiens
tggtctgaagaaaaa

SEQ ID NO: 1237715 - DNA, 15 bp, Homo sapiens
ttggtctgaagaaaa

SEQ ID NO: 1237716 - DNA, 15 bp, Homo sapiens
cttggtctgaagaaa

SEQ ID NO: 1237717 - DNA, 15 bp, Homo sapiens
gcttggtctgaagaa

SEQ ID NO: 1237718 - DNA, 15 bp, Homo sapiens
tgcttggtctgaaga

SEQ ID NO: 1237719 - DNA, 15 bp, Homo sapiens
atgcttggtctgaag

SEQ ID NO: 1237720 - DNA, 15 bp, Homo sapiens
tatgcttggtctgaa

SEQ ID NO: 1237721 - DNA, 15 bp, Homo sapiens
gtatgcttggtctga

SEQ ID NO: 1237722 - DNA, 15 bp, Homo sapiens
ggtatgcttggtctg

SEQ ID NO: 1237723 - DNA, 15 bp, Homo sapiens
gggtatgcttggtct

SEQ ID NO: 1237724 - DNA, 15 bp, Homo sapiens
agggtatgcttggtc

SEQ ID NO: 1237725 - DNA, 15 bp, Homo sapiens
cagggtatgcttggt

SEQ ID NO: 1237726 - DNA, 15 bp, Homo sapiens
tcagggtatgcttgg

SEQ ID NO: 1237727 - DNA, 15 bp, Homo sapiens
atcagggtatgcttg

SEQ ID NO: 1237728 - DNA, 15 bp, Homo sapiens
tatcagggtatgctt

SEQ ID NO: 1237729 - DNA, 15 bp, Homo sapiens
ttatcagggtatgct

SEQ ID NO: 1237730 - DNA, 15 bp, Homo sapiens
gttatcagggtatgc

SEQ ID NO: 1237731 - DNA, 15 bp, Homo sapiens
agttatcagggtatg

SEQ ID NO: 1237732 - DNA, 15 bp, Homo sapiens
aagttatcagggtat

SEQ ID NO: 1237733 - DNA, 15 bp, Homo sapiens
aaagttatcagggta

SEQ ID NO: 1237734 - DNA, 15 bp, Homo sapiens
caaagttatcagggt

SEQ ID NO: 1237735 - DNA, 15 bp, Homo sapiens
ccaaagttatcaggg

SEQ ID NO: 1237736 - DNA, 15 bp, Homo sapiens
tccaaagttatcagg

SEQ ID NO: 1237737 - DNA, 15 bp, Homo sapiens
atccaaagttatcag

SEQ ID NO: 1237738 - DNA, 15 bp, Homo sapiens
aatccaaagttatca

SEQ ID NO: 1237739 - DNA, 15 bp, Homo sapiens
aaatccaaagttatc

SEQ ID NO: 1237740 - DNA, 15 bp, Homo sapiens
caaatccaaagttat

SEQ ID NO: 1237741 - DNA, 15 bp, Homo sapiens
tcaaatccaaagtta

SEQ ID NO: 1237742 - DNA, 15 bp, Homo sapiens
atcaaatccaaagtt

SEQ ID NO: 1237743 - DNA, 15 bp, Homo sapiens
catcaaatccaaagt

SEQ ID NO: 1237744 - DNA, 15 bp, Homo sapiens
acatcaaatccaaag

SEQ ID NO: 1237745 - DNA, 15 bp, Homo sapiens
gacatcaaatccaaa

SEQ ID NO: 1237746 - DNA, 15 bp, Homo sapiens
ggacatcaaatccaa

SEQ ID NO: 1237747 - DNA, 15 bp, Homo sapiens
gggacatcaaatcca

SEQ ID NO: 1237748 - DNA, 15 bp, Homo sapiens
agggacatcaaatcc

SEQ ID NO: 1237749 - DNA, 15 bp, Homo sapiens
aagggacatcaaatc

SEQ ID NO: 1237750 - DNA, 15 bp, Homo sapiens
aaagggacatcaaat

SEQ ID NO: 1237751 - DNA, 15 bp, Homo sapiens
gaaagggacatcaaa

SEQ ID NO: 1237752 - DNA, 15 bp, Homo sapiens
agaaagggacatcaa

SEQ ID NO: 1237753 - DNA, 15 bp, Homo sapiens
gagaaagggacatca

SEQ ID NO: 1237754 - DNA, 15 bp, Homo sapiens
agagaaagggacatc

SEQ ID NO: 1237755 - DNA, 15 bp, Homo sapiens
cagagaaagggacat

SEQ ID NO: 1237756 - DNA, 15 bp, Homo sapiens
acagagaaagggaca

SEQ ID NO: 1237757 - DNA, 15 bp, Homo sapiens
aacagagaaagggac

SEQ ID NO: 1237758 - DNA, 15 bp, Homo sapiens
taacagagaaaggga

SEQ ID NO: 1237759 - DNA, 15 bp, Homo sapiens
ataacagagaaaggg

SEQ ID NO: 1237760 - DNA, 15 bp, Homo sapiens
gataacagagaaagg

SEQ ID NO: 1237761 - DNA, 15 bp, Homo sapiens
tgataacagagaaag

SEQ ID NO: 1237762 - DNA, 15 bp, Homo sapiens
ttgataacagagaaa

SEQ ID NO: 1237763 - DNA, 15 bp, Homo sapiens
attgataacagagaa

SEQ ID NO: 1237764 - DNA, 15 bp, Homo sapiens
cattgataacagaga

SEQ ID NO: 1237765 - DNA, 15 bp, Homo sapiens
ccattgataacagag

SEQ ID NO: 1237766 - DNA, 15 bp, Homo sapiens
gccattgataacaga

SEQ ID NO: 1237767 - DNA, 15 bp, Homo sapiens
agccattgataacag

SEQ ID NO: 1237768 - DNA, 15 bp, Homo sapiens
cagccattgataaca

SEQ ID NO: 1237769 - DNA, 15 bp, Homo sapiens
tcagccattgataac

SEQ ID NO: 1237770 - DNA, 15 bp, Homo sapiens
ctcagccattgataa

SEQ ID NO: 1237771 - DNA, 15 bp, Homo sapiens
gctcagccattgata

SEQ ID NO: 1237772 - DNA, 15 bp, Homo sapiens
ggctcagccattgat

SEQ ID NO: 1237773 - DNA, 15 bp, Homo sapiens
aggctcagccattga

SEQ ID NO: 1237774 - DNA, 15 bp, Homo sapiens
aaggctcagccattg

SEQ ID NO: 1237775 - DNA, 15 bp, Homo sapiens
gaaggctcagccatt

SEQ ID NO: 1237776 - DNA, 15 bp, Homo sapiens
agaaggctcagccat

SEQ ID NO: 1237777 - DNA, 15 bp, Homo sapiens
gagaaggctcagcca

SEQ ID NO: 1237778 - DNA, 15 bp, Homo sapiens
agagaaggctcagcc

SEQ ID NO: 1237779 - DNA, 15 bp, Homo sapiens
cagagaaggctcagc

SEQ ID NO: 1237780 - DNA, 15 bp, Homo sapiens
gcagagaaggctcag

SEQ ID NO: 1237781 - DNA, 15 bp, Homo sapiens
ggcagagaaggctca

SEQ ID NO: 1237782 - DNA, 15 bp, Homo sapiens
gggcagagaaggctc

SEQ ID NO: 1237783 - DNA, 15 bp, Homo sapiens
ggggcagagaaggct

SEQ ID NO: 1237784 - DNA, 15 bp, Homo sapiens
aggggcagagaaggc

SEQ ID NO: 1237785 - DNA, 15 bp, Homo sapiens
taggggcagagaagg

SEQ ID NO: 1237786 - DNA, 15 bp, Homo sapiens
ttaggggcagagaag

SEQ ID NO: 1237787 - DNA, 15 bp, Homo sapiens
cttaggggcagagaa

SEQ ID NO: 1237788 - DNA, 15 bp, Homo sapiens
acttaggggcagaga

SEQ ID NO: 1237789 - DNA, 15 bp, Homo sapiens
cacttaggggcagag

SEQ ID NO: 1237790 - DNA, 15 bp, Homo sapiens
acacttaggggcaga

SEQ ID NO: 1237791 - DNA, 15 bp, Homo sapiens
gacacttaggggcag

SEQ ID NO: 1237792 - DNA, 15 bp, Homo sapiens
agacacttaggggca

SEQ ID NO: 1237793 - DNA, 15 bp, Homo sapiens
aagacacttaggggc

SEQ ID NO: 1237794 - DNA, 15 bp, Homo sapiens
gaagacacttagggg

SEQ ID NO: 1237795 - DNA, 15 bp, Homo sapiens
agaagacacttaggg

SEQ ID NO: 1237796 - DNA, 15 bp, Homo sapiens
tagaagacacttagg

SEQ ID NO: 1237797 - DNA, 15 bp, Homo sapiens
atagaagacacttag

SEQ ID NO: 1237798 - DNA, 15 bp, Homo sapiens
aatagaagacactta

SEQ ID NO: 1237799 - DNA, 15 bp, Homo sapiens
gaatagaagacactt

SEQ ID NO: 1237800 - DNA, 15 bp, Homo sapiens
ggaatagaagacact

SEQ ID NO: 1237801 - DNA, 15 bp, Homo sapiens
aggaatagaagacac

SEQ ID NO: 1237802 - DNA, 15 bp, Homo sapiens
taggaatagaagaca

SEQ ID NO: 1237803 - DNA, 15 bp, Homo sapiens
ttaggaatagaagac

SEQ ID NO: 1237804 - DNA, 15 bp, Homo sapiens
attaggaatagaaga

SEQ ID NO: 1237805 - DNA, 15 bp, Homo sapiens
cattaggaatagaag

SEQ ID NO: 1237806 - DNA, 15 bp, Homo sapiens
tcattaggaatagaa

SEQ ID NO: 1237807 - DNA, 15 bp, Homo sapiens
gtcattaggaataga

SEQ ID NO: 1237808 - DNA, 15 bp, Homo sapiens
tgtcattaggaatag

SEQ ID NO: 1237809 - DNA, 15 bp, Homo sapiens
atgtcattaggaata

SEQ ID NO: 1237810 - DNA, 15 bp, Homo sapiens
aatgtcattaggaat

SEQ ID NO: 1237811 - DNA, 15 bp, Homo sapiens
caatgtcattaggaa

SEQ ID NO: 1237812 - DNA, 15 bp, Homo sapiens
acaatgtcattagga

SEQ ID NO: 1237813 - DNA, 15 bp, Homo sapiens
aacaatgtcattagg

SEQ ID NO: 1237814 - DNA, 15 bp, Homo sapiens
caacaatgtcattag

SEQ ID NO: 1237815 - DNA, 15 bp, Homo sapiens
gcaacaatgtcatta

SEQ ID NO: 1237816 - DNA, 15 bp, Homo sapiens
agcaacaatgtcatt

SEQ ID NO: 1237817 - DNA, 15 bp, Homo sapiens
gagcaacaatgtcat

SEQ ID NO: 1237818 - DNA, 15 bp, Homo sapiens
agagcaacaatgtca

SEQ ID NO: 1237819 - DNA, 15 bp, Homo sapiens
cagagcaacaatgtc

SEQ ID NO: 1237820 - DNA, 15 bp, Homo sapiens
acagagcaacaatgt

SEQ ID NO: 1237821 - DNA, 15 bp, Homo sapiens
gacagagcaacaatg

SEQ ID NO: 1237822 - DNA, 15 bp, Homo sapiens
ggacagagcaacaat

SEQ ID NO: 1237823 - DNA, 15 bp, Homo sapiens
aggacagagcaacaa

SEQ ID NO: 1237824 - DNA, 15 bp, Homo sapiens
gaggacagagcaaca

SEQ ID NO: 1237825 - DNA, 15 bp, Homo sapiens
agaggacagagcaac

SEQ ID NO: 1237826 - DNA, 15 bp, Homo sapiens
cagaggacagagcaa

SEQ ID NO: 1237827 - DNA, 15 bp, Homo sapiens
tcagaggacagagca

SEQ ID NO: 1237828 - DNA, 15 bp, Homo sapiens
ctcagaggacagagc

SEQ ID NO: 1237829 - DNA, 15 bp, Homo sapiens
gctcagaggacagag

SEQ ID NO: 1237830 - DNA, 15 bp, Homo sapiens
ggctcagaggacaga

SEQ ID NO: 1237831 - DNA, 15 bp, Homo sapiens
tggctcagaggacag

SEQ ID NO: 1237832 - DNA, 15 bp, Homo sapiens
atggctcagaggaca

SEQ ID NO: 1237833 - DNA, 15 bp, Homo sapiens
gatggctcagaggac

SEQ ID NO: 1237834 - DNA, 15 bp, Homo sapiens
tgatggctcagagga

SEQ ID NO: 1237835 - DNA, 15 bp, Homo sapiens
ctgatggctcagagg

SEQ ID NO: 1237836 - DNA, 15 bp, Homo sapiens
tctgatggctcagag

SEQ ID NO: 1237837 - DNA, 15 bp, Homo sapiens
gtctgatggctcaga

SEQ ID NO: 1237838 - DNA, 15 bp, Homo sapiens
agtctgatggctcag

SEQ ID NO: 1237839 - DNA, 15 bp, Homo sapiens
aagtctgatggctca

SEQ ID NO: 1237840 - DNA, 15 bp, Homo sapiens
gaagtctgatggctc

SEQ ID NO: 1237841 - DNA, 15 bp, Homo sapiens
tgaagtctgatggct

SEQ ID NO: 1237842 - DNA, 15 bp, Homo sapiens
ttgaagtctgatggc

SEQ ID NO: 1237843 - DNA, 15 bp, Homo sapiens
attgaagtctgatgg

SEQ ID NO: 1237844 - DNA, 15 bp, Homo sapiens
gattgaagtctgatg

SEQ ID NO: 1237845 - DNA, 15 bp, Homo sapiens
ggattgaagtctgat

SEQ ID NO: 1237846 - DNA, 15 bp, Homo sapiens
tggattgaagtctga

SEQ ID NO: 1237847 - DNA, 15 bp, Homo sapiens
ctggattgaagtctg

SEQ ID NO: 1237848 - DNA, 15 bp, Homo sapiens
actggattgaagtct

SEQ ID NO: 1237849 - DNA, 15 bp, Homo sapiens
gactggattgaagtc

SEQ ID NO: 1237850 - DNA, 15 bp, Homo sapiens
ggactggattgaagt

SEQ ID NO: 1237851 - DNA, 15 bp, Homo sapiens
aggactggattgaag

SEQ ID NO: 1237852 - DNA, 15 bp, Homo sapiens
taggactggattgaa

SEQ ID NO: 1237853 - DNA, 15 bp, Homo sapiens
ataggactggattga

SEQ ID NO: 1237854 - DNA, 15 bp, Homo sapiens
aataggactggattg

SEQ ID NO: 1237855 - DNA, 15 bp, Homo sapiens
aaataggactggatt

SEQ ID NO: 1237856 - DNA, 15 bp, Homo sapiens
caaataggactggat

SEQ ID NO: 1237857 - DNA, 15 bp, Homo sapiens
acaaataggactgga

SEQ ID NO: 1237858 - DNA, 15 bp, Homo sapiens
cacaaataggactgg

SEQ ID NO: 1237859 - DNA, 15 bp, Homo sapiens
tcacaaataggactg

SEQ ID NO: 1237860 - DNA, 15 bp, Homo sapiens
gtcacaaataggact

SEQ ID NO: 1237861 - DNA, 15 bp, Homo sapiens
agtcacaaataggac

SEQ ID NO: 1237862 - DNA, 15 bp, Homo sapiens
aagtcacaaatagga

SEQ ID NO: 1237863 - DNA, 15 bp, Homo sapiens
aaagtcacaaatagg

SEQ ID NO: 1237864 - DNA, 15 bp, Homo sapiens
caaagtcacaaatag

SEQ ID NO: 1237865 - DNA, 15 bp, Homo sapiens
gcaaagtcacaaata

SEQ ID NO: 1237866 - DNA, 15 bp, Homo sapiens
agcaaagtcacaaat

SEQ ID NO: 1237867 - DNA, 15 bp, Homo sapiens
tagcaaagtcacaaa

SEQ ID NO: 1237868 - DNA, 15 bp, Homo sapiens
gtagcaaagtcacaa

SEQ ID NO: 1237869 - DNA, 15 bp, Homo sapiens
ggtagcaaagtcaca

SEQ ID NO: 1237870 - DNA, 15 bp, Homo sapiens
tggtagcaaagtcac

SEQ ID NO: 1237871 - DNA, 15 bp, Homo sapiens
atggtagcaaagtca

SEQ ID NO: 1237872 - DNA, 15 bp, Homo sapiens
tatggtagcaaagtc

SEQ ID NO: 1237873 - DNA, 15 bp, Homo sapiens
ctatggtagcaaagt

SEQ ID NO: 1237874 - DNA, 15 bp, Homo sapiens
actatggtagcaaag

SEQ ID NO: 1237875 - DNA, 15 bp, Homo sapiens
tactatggtagcaaa

SEQ ID NO: 1237876 - DNA, 15 bp, Homo sapiens
ttactatggtagcaa

SEQ ID NO: 1237877 - DNA, 15 bp, Homo sapiens
attactatggtagca

SEQ ID NO: 1237878 - DNA, 15 bp, Homo sapiens
tattactatggtagc

SEQ ID NO: 1237879 - DNA, 15 bp, Homo sapiens
ctattactatggtag

SEQ ID NO: 1237880 - DNA, 15 bp, Homo sapiens
actattactatggta

SEQ ID NO: 1237881 - DNA, 15 bp, Homo sapiens
gactattactatggt

SEQ ID NO: 1237882 - DNA, 15 bp, Homo sapiens
tgactattactatgg

SEQ ID NO: 1237883 - DNA, 15 bp, Homo sapiens
ctgactattactatg

SEQ ID NO: 1237884 - DNA, 15 bp, Homo sapiens
actgactattactat

SEQ ID NO: 1237885 - DNA, 15 bp, Homo sapiens
cactgactattacta

SEQ ID NO: 1237886 - DNA, 15 bp, Homo sapiens
ccactgactattact

SEQ ID NO: 1237887 - DNA, 15 bp, Homo sapiens
accccactgactatt

SEQ ID NO: 1237888 - DNA, 15 bp, Homo sapiens
aaccccactgactat

SEQ ID NO: 1237889 - DNA, 15 bp, Homo sapiens
caaccccactgacta

SEQ ID NO: 1237890 - DNA, 15 bp, Homo sapiens
gcaaccccactgact

SEQ ID NO: 1237891 - DNA, 15 bp, Homo sapiens
cgcaaccccactgac

SEQ ID NO: 1237892 - DNA, 15 bp, Homo sapiens
ccgcaaccccactga

SEQ ID NO: 1237893 - DNA, 15 bp, Homo sapiens
accgcaaccccactg

SEQ ID NO: 1237894 - DNA, 15 bp, Homo sapiens
taccgcaaccccact

SEQ ID NO: 1237895 - DNA, 15 bp, Homo sapiens
ttaccgcaaccccac

SEQ ID NO: 1237896 - DNA, 15 bp, Homo sapiens
tttaccgcaacccca

SEQ ID NO: 1237897 - DNA, 15 bp, Homo sapiens
atttaccgcaacccc

SEQ ID NO: 1237898 - DNA, 15 bp, Homo sapiens
catttaccgcaaccc

SEQ ID NO: 1237899 - DNA, 15 bp, Homo sapiens
acatttaccgcaacc

SEQ ID NO: 1237900 - DNA, 15 bp, Homo sapiens
aacatttaccgcaac

SEQ ID NO: 1237901 - DNA, 15 bp, Homo sapiens
aaacatttaccgcaa

SEQ ID NO: 1237902 - DNA, 15 bp, Homo sapiens
taaacatttaccgca

SEQ ID NO: 1237903 - DNA, 15 bp, Homo sapiens
ctaaacatttaccgc

SEQ ID NO: 1237904 - DNA, 15 bp, Homo sapiens
gctaaacatttaccg

SEQ ID NO: 1237905 - DNA, 15 bp, Homo sapiens
tgctaaacatttacc

SEQ ID NO: 1237906 - DNA, 15 bp, Homo sapiens
ttgctaaacatttac

SEQ ID NO: 1237907 - DNA, 15 bp, Homo sapiens
gttgctaaacattta

SEQ ID NO: 1237908 - DNA, 15 bp, Homo sapiens
ggttgctaaacattt

SEQ ID NO: 1237909 - DNA, 15 bp, Homo sapiens
gggttgctaaacatt

SEQ ID NO: 1237910 - DNA, 15 bp, Homo sapiens
tgggttgctaaacat

SEQ ID NO: 1237911 - DNA, 15 bp, Homo sapiens
gtgggttgctaaaca

SEQ ID NO: 1237912 - DNA, 15 bp, Homo sapiens
ggtgggttgctaaac

SEQ ID NO: 1237913 - DNA, 15 bp, Homo sapiens
gggtgggttgctaaa

SEQ ID NO: 1237914 - DNA, 15 bp, Homo sapiens
tgggtgggttgctaa

SEQ ID NO: 1237915 - DNA, 15 bp, Homo sapiens
gtgggtgggttgcta

SEQ ID NO: 1237916 - DNA, 15 bp, Homo sapiens
ggtgggtgggttgct

SEQ ID NO: 1237917 - DNA, 15 bp, Homo sapiens
gggtgggtgggttgc

SEQ ID NO: 1237918 - DNA, 15 bp, Homo sapiens
tgggtgggtgggttg

SEQ ID NO: 1237919 - DNA, 15 bp, Homo sapiens
ttgggtgggtgggtt

SEQ ID NO: 1237920 - DNA, 15 bp, Homo sapiens
tttgggtgggtgggt

SEQ ID NO: 1237921 - DNA, 15 bp, Homo sapiens
gtttgggtgggtggg

SEQ ID NO: 1237922 - DNA, 15 bp, Homo sapiens
tgtttgggtgggtgg

SEQ ID NO: 1237923 - DNA, 15 bp, Homo sapiens
ttgtttgggtgggtg

SEQ ID NO: 1237924 - DNA, 15 bp, Homo sapiens
tttgtttgggtgggt

SEQ ID NO: 1237925 - DNA, 15 bp, Homo sapiens
gtttgtttgggtggg

SEQ ID NO: 1237926 - DNA, 15 bp, Homo sapiens
tgtttgtttgggtgg

SEQ ID NO: 1237927 - DNA, 15 bp, Homo sapiens
ctgtttgtttgggtg

SEQ ID NO: 1237928 - DNA, 15 bp, Homo sapiens
actgtttgtttgggt

SEQ ID NO: 1237929 - DNA, 15 bp, Homo sapiens
cactgtttgtttggg

SEQ ID NO: 1237930 - DNA, 15 bp, Homo sapiens
gcactgtttgtttgg

SEQ ID NO: 1237931 - DNA, 15 bp, Homo sapiens
agcactgtttgtttg

SEQ ID NO: 1237932 - DNA, 15 bp, Homo sapiens
aagcactgtttgttt

SEQ ID NO: 1237933 - DNA, 15 bp, Homo sapiens
caagcactgtttgtt

SEQ ID NO: 1237934 - DNA, 15 bp, Homo sapiens
gcaagcactgtttgt

SEQ ID NO: 1237935 - DNA, 15 bp, Homo sapiens
agcaagcactgtttg

SEQ ID NO: 1237936 - DNA, 15 bp, Homo sapiens
tagcaagcactgttt

SEQ ID NO: 1237937 - DNA, 15 bp, Homo sapiens
ttagcaagcactgtt

SEQ ID NO: 1237938 - DNA, 15 bp, Homo sapiens
attagcaagcactgt

SEQ ID NO: 1237939 - DNA, 15 bp, Homo sapiens
aattagcaagcactg

SEQ ID NO: 1237940 - DNA, 15 bp, Homo sapiens
taattagcaagcact

SEQ ID NO: 1237941 - DNA, 15 bp, Homo sapiens
ataattagcaagcac

SEQ ID NO: 1237942 - DNA, 15 bp, Homo sapiens
gataattagcaagca

SEQ ID NO: 1237943 - DNA, 15 bp, Homo sapiens
tgataattagcaagc

SEQ ID NO: 1237944 - DNA, 15 bp, Homo sapiens
atgataattagcaag

SEQ ID NO: 1237945 - DNA, 15 bp, Homo sapiens
catgataattagcaa

SEQ ID NO: 1237946 - DNA, 15 bp, Homo sapiens
ccatgataattagca

SEQ ID NO: 1237947 - DNA, 15 bp, Homo sapiens
accatgataattagc

SEQ ID NO: 1237948 - DNA, 15 bp, Homo sapiens
caccatgataattag

SEQ ID NO: 1237949 - DNA, 15 bp, Homo sapiens
acaccatgataatta

SEQ ID NO: 1237950 - DNA, 15 bp, Homo sapiens
tacaccatgataatt

SEQ ID NO: 1237951 - DNA, 15 bp, Homo sapiens
ttacaccatgataat

SEQ ID NO: 1237952 - DNA, 15 bp, Homo sapiens
tttacaccatgataa

SEQ ID NO: 1237953 - DNA, 15 bp, Homo sapiens
ctttacaccatgata

SEQ ID NO: 1237954 - DNA, 15 bp, Homo sapiens
tctttacaccatgat

SEQ ID NO: 1237955 - DNA, 15 bp, Homo sapiens
gtctttacaccatga

SEQ ID NO: 1237956 - DNA, 15 bp, Homo sapiens
agtctttacaccatg

SEQ ID NO: 1237957 - DNA, 15 bp, Homo sapiens
gagtctttacaccat

SEQ ID NO: 1237958 - DNA, 15 bp, Homo sapiens
tgagtctttacacca

SEQ ID NO: 1237959 - DNA, 15 bp, Homo sapiens
gtgagtctttacacc

SEQ ID NO: 1237960 - DNA, 15 bp, Homo sapiens
agtgagtctttacac

SEQ ID NO: 1237961 - DNA, 15 bp, Homo sapiens
gagtgagtctttaca

SEQ ID NO: 1237962 - DNA, 15 bp, Homo sapiens
agagtgagtctttac

SEQ ID NO: 1237963 - DNA, 15 bp, Homo sapiens
tagagtgagtcttta

SEQ ID NO: 1237964 - DNA, 15 bp, Homo sapiens
atagagtgagtcttt

SEQ ID NO: 1237965 - DNA, 15 bp, Homo sapiens
catagagtgagtctt

SEQ ID NO: 1237966 - DNA, 15 bp, Homo sapiens
tcatagagtgagtct

SEQ ID NO: 1237967 - DNA, 15 bp, Homo sapiens
gtcatagagtgagtc

SEQ ID NO: 1237968 - DNA, 15 bp, Homo sapiens
agtcatagagtgagt

SEQ ID NO: 1237969 - DNA, 15 bp, Homo sapiens
cagtcatagagtgag

SEQ ID NO: 1237970 - DNA, 15 bp, Homo sapiens
tcagtcatagagtga

SEQ ID NO: 1237971 - DNA, 15 bp, Homo sapiens
gtcagtcatagagtg

SEQ ID NO: 1237972 - DNA, 15 bp, Homo sapiens
agtcagtcatagagt

SEQ ID NO: 1237973 - DNA, 15 bp, Homo sapiens
aagtcagtcatagag

SEQ ID NO: 1237974 - DNA, 15 bp, Homo sapiens
gaagtcagtcataga

SEQ ID NO: 1237975 - DNA, 15 bp, Homo sapiens
tgaagtcagtcatag

SEQ ID NO: 1237976 - DNA, 15 bp, Homo sapiens
ttgaagtcagtcata

SEQ ID NO: 1237977 - DNA, 15 bp, Homo sapiens
cttgaagtcagtcat

SEQ ID NO: 1237978 - DNA, 15 bp, Homo sapiens
gcttgaagtcagtca

SEQ ID NO: 1237979 - DNA, 15 bp, Homo sapiens
agcttgaagtcagtc

SEQ ID NO: 1237980 - DNA, 15 bp, Homo sapiens
tagcttgaagtcagt

SEQ ID NO: 1237981 - DNA, 15 bp, Homo sapiens
gtagcttgaagtcag

SEQ ID NO: 1237982 - DNA, 15 bp, Homo sapiens
ggtagcttgaagtca

SEQ ID NO: 1237983 - DNA, 15 bp, Homo sapiens
tggtagcttgaagtc

SEQ ID NO: 1237984 - DNA, 15 bp, Homo sapiens
ttggtagcttgaagt

SEQ ID NO: 1237985 - DNA, 15 bp, Homo sapiens
gttggtagcttgaag

SEQ ID NO: 1237986 - DNA, 15 bp, Homo sapiens
tgttggtagcttgaa

SEQ ID NO: 1237987 - DNA, 15 bp, Homo sapiens
atgttggtagcttga

SEQ ID NO: 1237988 - DNA, 15 bp, Homo sapiens
gatgttggtagcttg

SEQ ID NO: 1237989 - DNA, 15 bp, Homo sapiens
tgatgttggtagctt

SEQ ID NO: 1237990 - DNA, 15 bp, Homo sapiens
atgatgttggtagct

SEQ ID NO: 1237991 - DNA, 15 bp, Homo sapiens
catgatgttggtagc

SEQ ID NO: 1237992 - DNA, 15 bp, Homo sapiens
acatgatgttggtag

SEQ ID NO: 1237993 - DNA, 15 bp, Homo sapiens
gacatgatgttggta

SEQ ID NO: 1237994 - DNA, 15 bp, Homo sapiens
tgacatgatgttggt

SEQ ID NO: 1237995 - DNA, 15 bp, Homo sapiens
gtgacatgatgttgg

SEQ ID NO: 1237996 - DNA, 15 bp, Homo sapiens
agtgacatgatgttg

SEQ ID NO: 1237997 - DNA, 15 bp, Homo sapiens
cagtgacatgatgtt

SEQ ID NO: 1237998 - DNA, 15 bp, Homo sapiens
tcagtgacatgatgt

SEQ ID NO: 1237999 - DNA, 15 bp, Homo sapiens
ttcagtgacatgatg

SEQ ID NO: 1238000 - DNA, 15 bp, Homo sapiens
gttcagtgacatgat

SEQ ID NO: 1238001 - DNA, 15 bp, Homo sapiens
tgttcagtgacatga

SEQ ID NO: 1238002 - DNA, 15 bp, Homo sapiens
gtgttcagtgacatg

SEQ ID NO: 1238003 - DNA, 15 bp, Homo sapiens
tgtgttcagtgacat

SEQ ID NO: 1238004 - DNA, 15 bp, Homo sapiens
ctgtgttcagtgaca

SEQ ID NO: 1238005 - DNA, 15 bp, Homo sapiens
tctgtgttcagtgac

SEQ ID NO: 1238006 - DNA, 15 bp, Homo sapiens
ttctgtgttcagtga

SEQ ID NO: 1238007 - DNA, 15 bp, Homo sapiens
attctgtgttcagtg

SEQ ID NO: 1238008 - DNA, 15 bp, Homo sapiens
aattctgtgttcagt

SEQ ID NO: 1238009 - DNA, 15 bp, Homo sapiens
caattctgtgttcag

SEQ ID NO: 1238010 - DNA, 15 bp, Homo sapiens
ccaattctgtgttca

SEQ ID NO: 1238011 - DNA, 15 bp, Homo sapiens
cccaattctgtgttc

SEQ ID NO: 1238012 - DNA, 15 bp, Homo sapiens
tcccaattctgtgtt

SEQ ID NO: 1238013 - DNA, 15 bp, Homo sapiens
ttcccaattctgtgt

SEQ ID NO: 1238014 - DNA, 15 bp, Homo sapiens
cttcccaattctgtg

SEQ ID NO: 1238015 - DNA, 15 bp, Homo sapiens
tcttcccaattctgt

SEQ ID NO: 1238016 - DNA, 15 bp, Homo sapiens
ctcttcccaattctg

SEQ ID NO: 1238017 - DNA, 15 bp, Homo sapiens
tctcttcccaattct

SEQ ID NO: 1238018 - DNA, 15 bp, Homo sapiens
ctctcttcccaattc

SEQ ID NO: 1238019 - DNA, 15 bp, Homo sapiens
cctctcttcccaatt

SEQ ID NO: 1238020 - DNA, 15 bp, Homo sapiens
acctctcttcccaat

SEQ ID NO: 1238021 - DNA, 15 bp, Homo sapiens
tacctctcttcccaa

SEQ ID NO: 1238022 - DNA, 15 bp, Homo sapiens
gtacctctcttccca

SEQ ID NO: 1238023 - DNA, 15 bp, Homo sapiens
tgtacctctcttccc

SEQ ID NO: 1238024 - DNA, 15 bp, Homo sapiens
ctgtacctctcttcc

SEQ ID NO: 1238025 - DNA, 15 bp, Homo sapiens
actgtacctctcttc

SEQ ID NO: 1238026 - DNA, 15 bp, Homo sapiens
tactgtacctctctt

SEQ ID NO: 1238027 - DNA, 15 bp, Homo sapiens
ctactgtacctctct

SEQ ID NO: 1238028 - DNA, 15 bp, Homo sapiens
gctactgtacctctc

SEQ ID NO: 1238029 - DNA, 15 bp, Homo sapiens
tgctactgtacctct

SEQ ID NO: 1238030 - DNA, 15 bp, Homo sapiens
atgctactgtacctc

SEQ ID NO: 1238031 - DNA, 15 bp, Homo sapiens
tatgctactgtacct

SEQ ID NO: 1238032 - DNA, 15 bp, Homo sapiens
atatgctactgtacc

SEQ ID NO: 1238033 - DNA, 15 bp, Homo sapiens
aatatgctactgtac

SEQ ID NO: 1238034 - DNA, 15 bp, Homo sapiens
taatatgctactgta

SEQ ID NO: 1238035 - DNA, 15 bp, Homo sapiens
ataatatgctactgt

SEQ ID NO: 1238036 - DNA, 15 bp, Homo sapiens
cataatatgctactg

SEQ ID NO: 1238037 - DNA, 15 bp, Homo sapiens
acataatatgctact

SEQ ID NO: 1238038 - DNA, 15 bp, Homo sapiens
gacataatatgctac

SEQ ID NO: 1238039 - DNA, 15 bp, Homo sapiens
tgacataatatgcta

SEQ ID NO: 1238040 - DNA, 15 bp, Homo sapiens
atgacataatatgct

SEQ ID NO: 1238041 - DNA, 15 bp, Homo sapiens
tatgacataatatgc

SEQ ID NO: 1238042 - DNA, 15 bp, Homo sapiens
atatgacataatatg

SEQ ID NO: 1238043 - DNA, 15 bp, Homo sapiens
aatatgacataatat

SEQ ID NO: 1238044 - DNA, 15 bp, Homo sapiens
aaatatgacataata

SEQ ID NO: 1238045 - DNA, 15 bp, Homo sapiens
gaaatatgacataat

SEQ ID NO: 1238046 - DNA, 15 bp, Homo sapiens
agaaatatgacataa

SEQ ID NO: 1238047 - DNA, 15 bp, Homo sapiens
tagaaatatgacata

SEQ ID NO: 1238048 - DNA, 15 bp, Homo sapiens
gtagaaatatgacat

SEQ ID NO: 1238049 - DNA, 15 bp, Homo sapiens
ggtagaaatatgaca

SEQ ID NO: 1238050 - DNA, 15 bp, Homo sapiens
tggtagaaatatgac

SEQ ID NO: 1238051 - DNA, 15 bp, Homo sapiens
gtggtagaaatatga

SEQ ID NO: 1238052 - DNA, 15 bp, Homo sapiens
tgtggtagaaatatg

SEQ ID NO: 1238053 - DNA, 15 bp, Homo sapiens
atgtggtagaaatat

SEQ ID NO: 1238054 - DNA, 15 bp, Homo sapiens
tatgtggtagaaata

SEQ ID NO: 1238055 - DNA, 15 bp, Homo sapiens
ctatgtggtagaaat

SEQ ID NO: 1238056 - DNA, 15 bp, Homo sapiens
tctatgtggtagaaa

SEQ ID NO: 1238057 - DNA, 15 bp, Homo sapiens
atctatgtggtagaa

SEQ ID NO: 1238058 - DNA, 15 bp, Homo sapiens
tatctatgtggtaga

SEQ ID NO: 1238059 - DNA, 15 bp, Homo sapiens
gtatctatgtggtag

SEQ ID NO: 1238060 - DNA, 15 bp, Homo sapiens
tgtatctatgtggta

SEQ ID NO: 1238061 - DNA, 15 bp, Homo sapiens
ttgtatctatgtggt

SEQ ID NO: 1238062 - DNA, 15 bp, Homo sapiens
attgtatctatgtgg

SEQ ID NO: 1238063 - DNA, 15 bp, Homo sapiens
cattgtatctatgtg

SEQ ID NO: 1238064 - DNA, 15 bp, Homo sapiens
ccattgtatctatgt

SEQ ID NO: 1238065 - DNA, 15 bp, Homo sapiens
tccattgtatctatg

SEQ ID NO: 1238066 - DNA, 15 bp, Homo sapiens
gtccattgtatctat

SEQ ID NO: 1238067 - DNA, 15 bp, Homo sapiens
tgtccattgtatcta

SEQ ID NO: 1238068 - DNA, 15 bp, Homo sapiens
atgtccattgtatct

SEQ ID NO: 1238069 - DNA, 15 bp, Homo sapiens
tatgtccattgtatc

SEQ ID NO: 1238070 - DNA, 15 bp, Homo sapiens
ttatgtccattgtat

SEQ ID NO: 1238071 - DNA, 15 bp, Homo sapiens
tttatgtccattgta

SEQ ID NO: 1238072 - DNA, 15 bp, Homo sapiens
ttttatgtccattgt

SEQ ID NO: 1238073 - DNA, 15 bp, Homo sapiens
attttatgtccattg

SEQ ID NO: 1238074 - DNA, 15 bp, Homo sapiens
ttattttatgtccat

SEQ ID NO: 1238075 - DNA, 15 bp, Homo sapiens
gttattttatgtcca

SEQ ID NO: 1238076 - DNA, 15 bp, Homo sapiens
tgttattttatgtcc

SEQ ID NO: 1238077 - DNA, 15 bp, Homo sapiens
atgttattttatgtc

SEQ ID NO: 1238078 - DNA, 15 bp, Homo sapiens
aatgttattttatgt

SEQ ID NO: 1238079 - DNA, 15 bp, Homo sapiens
taatgttattttatg

SEQ ID NO: 1238080 - DNA, 15 bp, Homo sapiens
ttaatgttattttat

SEQ ID NO: 1238081 - DNA, 15 bp, Homo sapiens
tttaatgttatttta

SEQ ID NO: 1238082 - DNA, 15 bp, Homo sapiens
ttttaatgttatttt

SEQ ID NO: 1238083 - DNA, 15 bp, Homo sapiens
cttttaatgttattt

SEQ ID NO: 1238084 - DNA, 15 bp, Homo sapiens
gcttttaatgttatt

SEQ ID NO: 1238085 - DNA, 15 bp, Homo sapiens
tgcttttaatgttat

SEQ ID NO: 1238086 - DNA, 15 bp, Homo sapiens
atgcttttaatgtta

SEQ ID NO: 1238087 - DNA, 15 bp, Homo sapiens
tatgcttttaatgtt

SEQ ID NO: 1238088 - DNA, 15 bp, Homo sapiens
ctatgcttttaatgt

SEQ ID NO: 1238089 - DNA, 15 bp, Homo sapiens
cctatgcttttaatg

SEQ ID NO: 1238090 - DNA, 15 bp, Homo sapiens
acctatgcttttaat

SEQ ID NO: 1238091 - DNA, 15 bp, Homo sapiens
tacctatgcttttaa

SEQ ID NO: 1238092 - DNA, 15 bp, Homo sapiens
ctacctatgctttta

SEQ ID NO: 1238093 - DNA, 15 bp, Homo sapiens
actacctatgctttt

SEQ ID NO: 1238094 - DNA, 15 bp, Homo sapiens
tactacctatgcttt

SEQ ID NO: 1238095 - DNA, 15 bp, Homo sapiens
ttactacctatgctt

SEQ ID NO: 1238096 - DNA, 15 bp, Homo sapiens
attactacctatgct

SEQ ID NO: 1238097 - DNA, 15 bp, Homo sapiens
tattactacctatgc

SEQ ID NO: 1238098 - DNA, 15 bp, Homo sapiens
ttattactacctatg

SEQ ID NO: 1238099 - DNA, 15 bp, Homo sapiens
tttattactacctat

SEQ ID NO: 1238100 - DNA, 15 bp, Homo sapiens
ttttattactaccta

SEQ ID NO: 1238101 - DNA, 15 bp, Homo sapiens
attttattactacct

SEQ ID NO: 1238102 - DNA, 15 bp, Homo sapiens
cattttattactacc

SEQ ID NO: 1238103 - DNA, 15 bp, Homo sapiens
gcattttattactac

SEQ ID NO: 1238104 - DNA, 15 bp, Homo sapiens
tgcattttattacta

SEQ ID NO: 1238105 - DNA, 15 bp, Homo sapiens
ctgcattttattact

SEQ ID NO: 1238106 - DNA, 15 bp, Homo sapiens
actgcattttattac

SEQ ID NO: 1238107 - DNA, 15 bp, Homo sapiens
tactgcattttatta

SEQ ID NO: 1238108 - DNA, 15 bp, Homo sapiens
ttactgcattttatt

SEQ ID NO: 1238109 - DNA, 15 bp, Homo sapiens
tttactgcattttat

SEQ ID NO: 1238110 - DNA, 15 bp, Homo sapiens
ctttactgcatttta

SEQ ID NO: 1238111 - DNA, 15 bp, Homo sapiens
actttactgcatttt

SEQ ID NO: 1238112 - DNA, 15 bp, Homo sapiens
tactttactgcattt

SEQ ID NO: 1238113 - DNA, 15 bp, Homo sapiens
ttactttactgcatt

SEQ ID NO: 1238114 - DNA, 15 bp, Homo sapiens
attactttactgcat

SEQ ID NO: 1238115 - DNA, 15 bp, Homo sapiens
aattactttactgca

SEQ ID NO: 1238116 - DNA, 15 bp, Homo sapiens
taattactttactgc

SEQ ID NO: 1238117 - DNA, 15 bp, Homo sapiens
ctaattactttactg

SEQ ID NO: 1238118 - DNA, 15 bp, Homo sapiens
tctaattactttact

SEQ ID NO: 1238119 - DNA, 15 bp, Homo sapiens
ttctaattactttac

SEQ ID NO: 1238120 - DNA, 15 bp, Homo sapiens
cttctaattacttta

SEQ ID NO: 1238121 - DNA, 15 bp, Homo sapiens
acttctaattacttt

SEQ ID NO: 1238122 - DNA, 15 bp, Homo sapiens
tacttctaattactt

SEQ ID NO: 1238123 - DNA, 15 bp, Homo sapiens
ttacttctaattact

SEQ ID NO: 1238124 - DNA, 15 bp, Homo sapiens
attacttctaattac

SEQ ID NO: 1238125 - DNA, 15 bp, Homo sapiens
gattacttctaatta

SEQ ID NO: 1238126 - DNA, 15 bp, Homo sapiens
agattacttctaatt

SEQ ID NO: 1238127 - DNA, 15 bp, Homo sapiens
aagattacttctaat

SEQ ID NO: 1238128 - DNA, 15 bp, Homo sapiens
gaagattacttctaa

SEQ ID NO: 1238129 - DNA, 15 bp, Homo sapiens
agaagattacttcta

SEQ ID NO: 1238130 - DNA, 15 bp, Homo sapiens
aagaagattacttct

SEQ ID NO: 1238131 - DNA, 15 bp, Homo sapiens
caagaagattacttc

SEQ ID NO: 1238132 - DNA, 15 bp, Homo sapiens
ccaagaagattactt

SEQ ID NO: 1238133 - DNA, 15 bp, Homo sapiens
tccaagaagattact

SEQ ID NO: 1238134 - DNA, 15 bp, Homo sapiens
ctccaagaagattac

SEQ ID NO: 1238135 - DNA, 15 bp, Homo sapiens
actccaagaagatta

SEQ ID NO: 1238136 - DNA, 15 bp, Homo sapiens
tactccaagaagatt

SEQ ID NO: 1238137 - DNA, 15 bp, Homo sapiens
atactccaagaagat

SEQ ID NO: 1238138 - DNA, 15 bp, Homo sapiens
aatactccaagaaga

SEQ ID NO: 1238139 - DNA, 15 bp, Homo sapiens
aaatactccaagaag

SEQ ID NO: 1238140 - DNA, 15 bp, Homo sapiens
taaatactccaagaa

SEQ ID NO: 1238141 - DNA, 15 bp, Homo sapiens
ataaatactccaaga

SEQ ID NO: 1238142 - DNA, 15 bp, Homo sapiens
aataaatactccaag

SEQ ID NO: 1238143 - DNA, 15 bp, Homo sapiens
taataaatactccaa

SEQ ID NO: 1238144 - DNA, 15 bp, Homo sapiens
gtaataaatactcca

SEQ ID NO: 1238145 - DNA, 15 bp, Homo sapiens
ggtaataaatactcc

SEQ ID NO: 1238146 - DNA, 15 bp, Homo sapiens
aggtaataaatactc

SEQ ID NO: 1238147 - DNA, 15 bp, Homo sapiens
aaggtaataaatact

SEQ ID NO: 1238148 - DNA, 15 bp, Homo sapiens
aaaggtaataaatac

SEQ ID NO: 1238149 - DNA, 15 bp, Homo sapiens
caaaggtaataaata

SEQ ID NO: 1238150 - DNA, 15 bp, Homo sapiens
acaaaggtaataaat

SEQ ID NO: 1238151 - DNA, 15 bp, Homo sapiens
aacaaaggtaataaa

SEQ ID NO: 1238152 - DNA, 15 bp, Homo sapiens
aaacaaaggtaataa

SEQ ID NO: 1238153 - DNA, 15 bp, Homo sapiens
aaaacaaaggtaata

SEQ ID NO: 1238154 - DNA, 15 bp, Homo sapiens
aaaaacaaaggtaat

SEQ ID NO: 1238155 - DNA, 15 bp, Homo sapiens
taaaaacaaaggtaa

SEQ ID NO: 1238156 - DNA, 15 bp, Homo sapiens
ttaaaaacaaaggta

SEQ ID NO: 1238157 - DNA, 15 bp, Homo sapiens
attaaaaacaaaggt

SEQ ID NO: 1238158 - DNA, 15 bp, Homo sapiens
tattaaaaacaaagg

SEQ ID NO: 1238159 - DNA, 15 bp, Homo sapiens
atattaaaaacaaag

SEQ ID NO: 1238160 - DNA, 15 bp, Homo sapiens
tatattaaaaacaaa

SEQ ID NO: 1238161 - DNA, 15 bp, Homo sapiens
ttatattaaaaacaa

SEQ ID NO: 1238162 - DNA, 15 bp, Homo sapiens
attatattaaaaaca

SEQ ID NO: 1238163 - DNA, 15 bp, Homo sapiens
aattatattaaaaac

SEQ ID NO: 1238164 - DNA, 15 bp, Homo sapiens
caattatattaaaaa

SEQ ID NO: 1238165 - DNA, 15 bp, Homo sapiens
tcaattatattaaaa

SEQ ID NO: 1238166 - DNA, 15 bp, Homo sapiens
atcaattatattaaa

SEQ ID NO: 1238167 - DNA, 15 bp, Homo sapiens
aatcaattatattaa

SEQ ID NO: 1238168 - DNA, 15 bp, Homo sapiens
gaatcaattatatta

SEQ ID NO: 1238169 - DNA, 15 bp, Homo sapiens
tgaatcaattatatt

SEQ ID NO: 1238170 - DNA, 15 bp, Homo sapiens
ttgaatcaattatat

SEQ ID NO: 1238171 - DNA, 15 bp, Homo sapiens
attgaatcaattata

SEQ ID NO: 1238172 - DNA, 15 bp, Homo sapiens
gattgaatcaattat

SEQ ID NO: 1238173 - DNA, 15 bp, Homo sapiens
tgattgaatcaatta

SEQ ID NO: 1238174 - DNA, 15 bp, Homo sapiens
gtgattgaatcaatt

SEQ ID NO: 1238175 - DNA, 15 bp, Homo sapiens
tgtgattgaatcaat

SEQ ID NO: 1238176 - DNA, 15 bp, Homo sapiens
ttgtgattgaatcaa

SEQ ID NO: 1238177 - DNA, 15 bp, Homo sapiens
tttgtgattgaatca

SEQ ID NO: 1238178 - DNA, 15 bp, Homo sapiens
atttgtgattgaatc

SEQ ID NO: 1238179 - DNA, 15 bp, Homo sapiens
aatttgtgattgaat

SEQ ID NO: 1238180 - DNA, 15 bp, Homo sapiens
aaatttgtgattgaa

SEQ ID NO: 1238181 - DNA, 15 bp, Homo sapiens
taaatttgtgattga

SEQ ID NO: 1238182 - DNA, 15 bp, Homo sapiens
gtaaatttgtgattg

SEQ ID NO: 1238183 - DNA, 15 bp, Homo sapiens
tgtaaatttgtgatt

SEQ ID NO: 1238184 - DNA, 15 bp, Homo sapiens
atgtaaatttgtgat

SEQ ID NO: 1238185 - DNA, 15 bp, Homo sapiens
tatgtaaatttgtga

SEQ ID NO: 1238186 - DNA, 15 bp, Homo sapiens
ttatgtaaatttgtg

SEQ ID NO: 1238187 - DNA, 15 bp, Homo sapiens
attatgtaaatttgt

SEQ ID NO: 1238188 - DNA, 15 bp, Homo sapiens
aattatgtaaatttg

SEQ ID NO: 1238189 - DNA, 15 bp, Homo sapiens
aaattatgtaaattt

SEQ ID NO: 1238190 - DNA, 15 bp, Homo sapiens
aaaattatgtaaatt

SEQ ID NO: 1238191 - DNA, 15 bp, Homo sapiens
caaaattatgtaaat

SEQ ID NO: 1238192 - DNA, 15 bp, Homo sapiens
acaaaattatgtaaa

SEQ ID NO: 1238193 - DNA, 15 bp, Homo sapiens
aacaaaattatgtaa

SEQ ID NO: 1238194 - DNA, 15 bp, Homo sapiens
aaacaaaattatgta

SEQ ID NO: 1238195 - DNA, 15 bp, Homo sapiens
aaaacaaaattatgt

SEQ ID NO: 1238196 - DNA, 15 bp, Homo sapiens
aaaaacaaaattatg

SEQ ID NO: 1238197 - DNA, 15 bp, Homo sapiens
taaaaacaaaattat

SEQ ID NO: 1238198 - DNA, 15 bp, Homo sapiens
ttaaaaacaaaatta

SEQ ID NO: 1238199 - DNA, 15 bp, Homo sapiens
attaaaaacaaaatt

SEQ ID NO: 1238200 - DNA, 15 bp, Homo sapiens
aattaaaaacaaaat

SEQ ID NO: 1238201 - DNA, 15 bp, Homo sapiens
caattaaaaacaaaa

SEQ ID NO: 1238202 - DNA, 15 bp, Homo sapiens
acaattaaaaacaaa

SEQ ID NO: 1238203 - DNA, 15 bp, Homo sapiens
cacaattaaaaacaa

SEQ ID NO: 1238204 - DNA, 15 bp, Homo sapiens
ccacaattaaaaaca

SEQ ID NO: 1238205 - DNA, 15 bp, Homo sapiens
accacaattaaaaac

SEQ ID NO: 1238206 - DNA, 15 bp, Homo sapiens
aaccacaattaaaaa

SEQ ID NO: 1238207 - DNA, 15 bp, Homo sapiens
gaaccacaattaaaa

SEQ ID NO: 1238208 - DNA, 15 bp, Homo sapiens
agaaccacaattaaa

SEQ ID NO: 1238209 - DNA, 15 bp, Homo sapiens
cagaaccacaattaa

SEQ ID NO: 1238210 - DNA, 15 bp, Homo sapiens
acagaaccacaatta

SEQ ID NO: 1238211 - DNA, 15 bp, Homo sapiens
aacagaaccacaatt

SEQ ID NO: 1238212 - DNA, 15 bp, Homo sapiens
aaacagaaccacaat

SEQ ID NO: 1238213 - DNA, 15 bp, Homo sapiens
taaacagaaccacaa

SEQ ID NO: 1238214 - DNA, 15 bp, Homo sapiens
ctaaacagaaccaca

SEQ ID NO: 1238215 - DNA, 15 bp, Homo sapiens
tctaaacagaaccac

SEQ ID NO: 1238216 - DNA, 15 bp, Homo sapiens
ttctaaacagaacca

SEQ ID NO: 1238217 - DNA, 15 bp, Homo sapiens
tttctaaacagaacc

SEQ ID NO: 1238218 - DNA, 15 bp, Homo sapiens
atttctaaacagaac

SEQ ID NO: 1238219 - DNA, 15 bp, Homo sapiens
tatttctaaacagaa

SEQ ID NO: 1238220 - DNA, 15 bp, Homo sapiens
atatttctaaacaga

SEQ ID NO: 1238221 - DNA, 15 bp, Homo sapiens
catatttctaaacag

SEQ ID NO: 1238222 - DNA, 15 bp, Homo sapiens
gcatatttctaaaca

SEQ ID NO: 1238223 - DNA, 15 bp, Homo sapiens
agcatatttctaaac

SEQ ID NO: 1238224 - DNA, 15 bp, Homo sapiens
gagcatatttctaaa

SEQ ID NO: 1238225 - DNA, 15 bp, Homo sapiens
tgagcatatttctaa

SEQ ID NO: 1238226 - DNA, 15 bp, Homo sapiens
gtgagcatatttcta

SEQ ID NO: 1238227 - DNA, 15 bp, Homo sapiens
tgtgagcatatttct

SEQ ID NO: 1238228 - DNA, 15 bp, Homo sapiens
ttgtgagcatatttc

SEQ ID NO: 1238229 - DNA, 15 bp, Homo sapiens
tttgtgagcatattt

SEQ ID NO: 1238230 - DNA, 15 bp, Homo sapiens
ttttgtgagcatatt

SEQ ID NO: 1238231 - DNA, 15 bp, Homo sapiens
attttgtgagcatat

SEQ ID NO: 1238232 - DNA, 15 bp, Homo sapiens
aattttgtgagcata

SEQ ID NO: 1238233 - DNA, 15 bp, Homo sapiens
taattttgtgagcat

SEQ ID NO: 1238234 - DNA, 15 bp, Homo sapiens
ataattttgtgagca

SEQ ID NO: 1238235 - DNA, 15 bp, Homo sapiens
aataattttgtgagc

SEQ ID NO: 1238236 - DNA, 15 bp, Homo sapiens
caataattttgtgag

SEQ ID NO: 1238237 - DNA, 15 bp, Homo sapiens
tcaataattttgtga

SEQ ID NO: 1238238 - DNA, 15 bp, Homo sapiens
atcaataattttgtg

SEQ ID NO: 1238239 - DNA, 15 bp, Homo sapiens
tatcaataattttgt

SEQ ID NO: 1238240 - DNA, 15 bp, Homo sapiens
ttatcaataattttg

SEQ ID NO: 1238241 - DNA, 15 bp, Homo sapiens
cttatcaataatttt

SEQ ID NO: 1238242 - DNA, 15 bp, Homo sapiens
acttatcaataattt

SEQ ID NO: 1238243 - DNA, 15 bp, Homo sapiens
aacttatcaataatt

SEQ ID NO: 1238244 - DNA, 15 bp, Homo sapiens
gaacttatcaataat

SEQ ID NO: 1238245 - DNA, 15 bp, Homo sapiens
agaacttatcaataa

SEQ ID NO: 1238246 - DNA, 15 bp, Homo sapiens
aagaacttatcaata

SEQ ID NO: 1238247 - DNA, 15 bp, Homo sapiens
caagaacttatcaat

SEQ ID NO: 1238248 - DNA, 15 bp, Homo sapiens
tcaagaacttatcaa

SEQ ID NO: 1238249 - DNA, 15 bp, Homo sapiens
ttcaagaacttatca

SEQ ID NO: 1238250 - DNA, 15 bp, Homo sapiens
tttcaagaacttatc

SEQ ID NO: 1238251 - DNA, 15 bp, Homo sapiens
ttttcaagaacttat

SEQ ID NO: 1238252 - DNA, 15 bp, Homo sapiens
tttttcaagaactta

SEQ ID NO: 1238253 - DNA, 15 bp, Homo sapiens
atttttcaagaactt

SEQ ID NO: 1238254 - DNA, 15 bp, Homo sapiens
tatttttcaagaact

SEQ ID NO: 1238255 - DNA, 15 bp, Homo sapiens
ctatttttcaagaac

SEQ ID NO: 1238256 - DNA, 15 bp, Homo sapiens
actatttttcaagaa

SEQ ID NO: 1238257 - DNA, 15 bp, Homo sapiens
gactatttttcaaga

SEQ ID NO: 1238258 - DNA, 15 bp, Homo sapiens
agactatttttcaag

SEQ ID NO: 1238259 - DNA, 15 bp, Homo sapiens
gagactatttttcaa

SEQ ID NO: 1238260 - DNA, 15 bp, Homo sapiens
agagactatttttca

SEQ ID NO: 1238261 - DNA, 15 bp, Homo sapiens
cagagactatttttc

SEQ ID NO: 1238262 - DNA, 15 bp, Homo sapiens
ccagagactattttt

SEQ ID NO: 1238263 - DNA, 15 bp, Homo sapiens
tccagagactatttt

SEQ ID NO: 1238264 - DNA, 15 bp, Homo sapiens
ttccagagactattt

SEQ ID NO: 1238265 - DNA, 15 bp, Homo sapiens
attccagagactatt

SEQ ID NO: 1238266 - DNA, 15 bp, Homo sapiens
cattccagagactat

SEQ ID NO: 1238267 - DNA, 15 bp, Homo sapiens
acattccagagacta

SEQ ID NO: 1238268 - DNA, 15 bp, Homo sapiens
gacattccagagact

SEQ ID NO: 1238269 - DNA, 15 bp, Homo sapiens
agacattccagagac

SEQ ID NO: 1238270 - DNA, 15 bp, Homo sapiens
tagacattccagaga

SEQ ID NO: 1238271 - DNA, 15 bp, Homo sapiens
atagacattccagag

SEQ ID NO: 1238272 - DNA, 15 bp, Homo sapiens
catagacattccaga

SEQ ID NO: 1238273 - DNA, 15 bp, Homo sapiens
acatagacattccag

SEQ ID NO: 1238274 - DNA, 15 bp, Homo sapiens
cacatagacattcca

SEQ ID NO: 1238275 - DNA, 15 bp, Homo sapiens
tcacatagacattcc

SEQ ID NO: 1238276 - DNA, 15 bp, Homo sapiens
ttcacatagacattc

SEQ ID NO: 1238277 - DNA, 15 bp, Homo sapiens
gttcacatagacatt

SEQ ID NO: 1238278 - DNA, 15 bp, Homo sapiens
agttcacatagacat

SEQ ID NO: 1238279 - DNA, 15 bp, Homo sapiens
tagttcacatagaca

SEQ ID NO: 1238280 - DNA, 15 bp, Homo sapiens
atagttcacatagac

SEQ ID NO: 1238281 - DNA, 15 bp, Homo sapiens
gatagttcacataga

SEQ ID NO: 1238282 - DNA, 15 bp, Homo sapiens
tgatagttcacatag

SEQ ID NO: 1238283 - DNA, 15 bp, Homo sapiens
ctgatagttcacata

SEQ ID NO: 1238284 - DNA, 15 bp, Homo sapiens
cctgatagttcacat

SEQ ID NO: 1238285 - DNA, 15 bp, Homo sapiens
acctgatagttcaca

SEQ ID NO: 1238286 - DNA, 15 bp, Homo sapiens
aacctgatagttcac

SEQ ID NO: 1238287 - DNA, 15 bp, Homo sapiens
caacctgatagttca

SEQ ID NO: 1238288 - DNA, 15 bp, Homo sapiens
ccaacctgatagttc

SEQ ID NO: 1238289 - DNA, 15 bp, Homo sapiens
accaacctgatagtt

SEQ ID NO: 1238290 - DNA, 15 bp, Homo sapiens
caccaacctgatagt

SEQ ID NO: 1238291 - DNA, 15 bp, Homo sapiens
gcaccaacctgatag

SEQ ID NO: 1238292 - DNA, 15 bp, Homo sapiens
tgcaccaacctgata

SEQ ID NO: 1238293 - DNA, 15 bp, Homo sapiens
ttgcaccaacctgat

SEQ ID NO: 1238294 - DNA, 15 bp, Homo sapiens
tttgcaccaacctga

SEQ ID NO: 1238295 - DNA, 15 bp, Homo sapiens
ttttgcaccaacctg

SEQ ID NO: 1238296 - DNA, 15 bp, Homo sapiens
cttttgcaccaacct

SEQ ID NO: 1238297 - DNA, 15 bp, Homo sapiens
acttttgcaccaacc

SEQ ID NO: 1238298 - DNA, 15 bp, Homo sapiens
tacttttgcaccaac

SEQ ID NO: 1238299 - DNA, 15 bp, Homo sapiens
ttacttttgcaccaa

SEQ ID NO: 1238300 - DNA, 15 bp, Homo sapiens
attacttttgcacca

SEQ ID NO: 1238301 - DNA, 15 bp, Homo sapiens
aattacttttgcacc

SEQ ID NO: 1238302 - DNA, 15 bp, Homo sapiens
caattacttttgcac

SEQ ID NO: 1238303 - DNA, 15 bp, Homo sapiens
acaattacttttgca

SEQ ID NO: 1238304 - DNA, 15 bp, Homo sapiens
cacaattacttttgc

SEQ ID NO: 1238305 - DNA, 15 bp, Homo sapiens
ccacaattacttttg

SEQ ID NO: 1238306 - DNA, 15 bp, Homo sapiens
accacaattactttt

SEQ ID NO: 1238307 - DNA, 15 bp, Homo sapiens
aaccacaattacttt

SEQ ID NO: 1238308 - DNA, 15 bp, Homo sapiens
aaaccacaattactt

SEQ ID NO: 1238309 - DNA, 15 bp, Homo sapiens
aaaaccacaattact

SEQ ID NO: 1238310 - DNA, 15 bp, Homo sapiens
aaaaaccacaattac

SEQ ID NO: 1238311 - DNA, 15 bp, Homo sapiens
caaaaaccacaatta

SEQ ID NO: 1238312 - DNA, 15 bp, Homo sapiens
gcaaaaaccacaatt

SEQ ID NO: 1238313 - DNA, 15 bp, Homo sapiens
tgcaaaaaccacaat

SEQ ID NO: 1238314 - DNA, 15 bp, Homo sapiens
atgcaaaaaccacaa

SEQ ID NO: 1238315 - DNA, 15 bp, Homo sapiens
aatgcaaaaaccaca

SEQ ID NO: 1238316 - DNA, 15 bp, Homo sapiens
aaatgcaaaaaccac

SEQ ID NO: 1238317 - DNA, 15 bp, Homo sapiens
aaaatgcaaaaacca

SEQ ID NO: 1238318 - DNA, 15 bp, Homo sapiens
aaaaatgcaaaaacc

SEQ ID NO: 1238319 - DNA, 15 bp, Homo sapiens
aaaaaatgcaaaaac

SEQ ID NO: 1238320 - DNA, 15 bp, Homo sapiens
aaaaaaatgcaaaaa

SEQ ID NO: 1238321 - DNA, 15 bp, Homo sapiens
taaaaaaatgcaaaa

SEQ ID NO: 1238322 - DNA, 15 bp, Homo sapiens
ttaaaaaaatgcaaa

SEQ ID NO: 1238323 - DNA, 15 bp, Homo sapiens
attaaaaaaatgcaa

SEQ ID NO: 1238324 - DNA, 15 bp, Homo sapiens
cattaaaaaaatgca

SEQ ID NO: 1238325 - DNA, 15 bp, Homo sapiens
ccattaaaaaaatgc

SEQ ID NO: 1238326 - DNA, 15 bp, Homo sapiens
gccattaaaaaaatg

SEQ ID NO: 1238327 - DNA, 15 bp, Homo sapiens
tgccattaaaaaaat

SEQ ID NO: 1238328 - DNA, 15 bp, Homo sapiens
ttgccattaaaaaaa

SEQ ID NO: 1238329 - DNA, 15 bp, Homo sapiens
tttgccattaaaaaa

SEQ ID NO: 1238330 - DNA, 15 bp, Homo sapiens
ttttgccattaaaaa

SEQ ID NO: 1238331 - DNA, 15 bp, Homo sapiens
tttttgccattaaaa

SEQ ID NO: 1238332 - DNA, 15 bp, Homo sapiens
gtttttgccattaaa

SEQ ID NO: 1238333 - DNA, 15 bp, Homo sapiens
agtttttgccattaa

SEQ ID NO: 1238334 - DNA, 15 bp, Homo sapiens
cagtttttgccatta

SEQ ID NO: 1238335 - DNA, 15 bp, Homo sapiens
aattgcagtttttgc

SEQ ID NO: 1238336 - DNA, 15 bp, Homo sapiens
taattgcagtttttg

SEQ ID NO: 1238337 - DNA, 15 bp, Homo sapiens
gtaattgcagttttt

SEQ ID NO: 1238338 - DNA, 15 bp, Homo sapiens
agtaattgcagtttt

SEQ ID NO: 1238339 - DNA, 15 bp, Homo sapiens
aagtaattgcagttt

SEQ ID NO: 1238340 - DNA, 15 bp, Homo sapiens
aaagtaattgcagtt

SEQ ID NO: 1238341 - DNA, 15 bp, Homo sapiens
aaaagtaattgcagt

SEQ ID NO: 1238342 - DNA, 15 bp, Homo sapiens
caaaagtaattgcag

SEQ ID NO: 1238343 - DNA, 15 bp, Homo sapiens
gcaaaagtaattgca

SEQ ID NO: 1238344 - DNA, 15 bp, Homo sapiens
tgcaaaagtaattgc

SEQ ID NO: 1238345 - DNA, 15 bp, Homo sapiens
gtgcaaaagtaattg

SEQ ID NO: 1238346 - DNA, 15 bp, Homo sapiens
ggtgcaaaagtaatt

SEQ ID NO: 1238347 - DNA, 15 bp, Homo sapiens
tggtgcaaaagtaat

SEQ ID NO: 1238348 - DNA, 15 bp, Homo sapiens
ctggtgcaaaagtaa

SEQ ID NO: 1238349 - DNA, 15 bp, Homo sapiens
actggtgcaaaagta

SEQ ID NO: 1238350 - DNA, 15 bp, Homo sapiens
gactggtgcaaaagt

SEQ ID NO: 1238351 - DNA, 15 bp, Homo sapiens
agactggtgcaaaag

SEQ ID NO: 1238352 - DNA, 15 bp, Homo sapiens
tagactggtgcaaaa

SEQ ID NO: 1238353 - DNA, 15 bp, Homo sapiens
ttagactggtgcaaa

SEQ ID NO: 1238354 - DNA, 15 bp, Homo sapiens
attagactggtgcaa

SEQ ID NO: 1238355 - DNA, 15 bp, Homo sapiens
tattagactggtgca

SEQ ID NO: 1238356 - DNA, 15 bp, Homo sapiens
gtattagactggtgc

SEQ ID NO: 1238357 - DNA, 15 bp, Homo sapiens
agtattagactggtg

SEQ ID NO: 1238358 - DNA, 15 bp, Homo sapiens
aagtattagactggt

SEQ ID NO: 1238359 - DNA, 15 bp, Homo sapiens
aaagtattagactgg

SEQ ID NO: 1238360 - DNA, 15 bp, Homo sapiens
aaaagtattagactg

SEQ ID NO: 1238361 - DNA, 15 bp, Homo sapiens
taaaagtattagact

SEQ ID NO: 1238362 - DNA, 15 bp, Homo sapiens
ctaaaagtattagac

SEQ ID NO: 1238363 - DNA, 15 bp, Homo sapiens
gctaaaagtattaga

SEQ ID NO: 1238364 - DNA, 15 bp, Homo sapiens
agctaaaagtattag

SEQ ID NO: 1238365 - DNA, 15 bp, Homo sapiens
gagctaaaagtatta

SEQ ID NO: 1238366 - DNA, 15 bp, Homo sapiens
tgagctaaaagtatt

SEQ ID NO: 1238367 - DNA, 15 bp, Homo sapiens
gtgagctaaaagtat

SEQ ID NO: 1238368 - DNA, 15 bp, Homo sapiens
tgtgagctaaaagta

SEQ ID NO: 1238369 - DNA, 15 bp, Homo sapiens
ttgtgagctaaaagt

SEQ ID NO: 1238370 - DNA, 15 bp, Homo sapiens
gttgtgagctaaaag

SEQ ID NO: 1238371 - DNA, 15 bp, Homo sapiens
agttgtgagctaaaa

SEQ ID NO: 1238372 - DNA, 15 bp, Homo sapiens
cagttgtgagctaaa

SEQ ID NO: 1238373 - DNA, 15 bp, Homo sapiens
ccagttgtgagctaa

SEQ ID NO: 1238374 - DNA, 15 bp, Homo sapiens
gccagttgtgagcta

SEQ ID NO: 1238375 - DNA, 15 bp, Homo sapiens
agccagttgtgagct

SEQ ID NO: 1238376 - DNA, 15 bp, Homo sapiens
tagccagttgtgagc

SEQ ID NO: 1238377 - DNA, 15 bp, Homo sapiens
atagccagttgtgag

SEQ ID NO: 1238378 - DNA, 15 bp, Homo sapiens
catagccagttgtga

SEQ ID NO: 1238379 - DNA, 15 bp, Homo sapiens
tcatagccagttgtg

SEQ ID NO: 1238380 - DNA, 15 bp, Homo sapiens
ttcatagccagttgt

SEQ ID NO: 1238381 - DNA, 15 bp, Homo sapiens
gttcatagccagttg

SEQ ID NO: 1238382 - DNA, 15 bp, Homo sapiens
ggttcatagccagtt

SEQ ID NO: 1238383 - DNA, 15 bp, Homo sapiens
tggttcatagccagt

SEQ ID NO: 1238384 - DNA, 15 bp, Homo sapiens
ctggttcatagccag

SEQ ID NO: 1238385 - DNA, 15 bp, Homo sapiens
actggttcatagcca

SEQ ID NO: 1238386 - DNA, 15 bp, Homo sapiens
aactggttcatagcc

SEQ ID NO: 1238387 - DNA, 15 bp, Homo sapiens
taactggttcatagc

SEQ ID NO: 1238388 - DNA, 15 bp, Homo sapiens
gtaactggttcatag

SEQ ID NO: 1238389 - DNA, 15 bp, Homo sapiens
tgtaactggttcata

SEQ ID NO: 1238390 - DNA, 15 bp, Homo sapiens
atgtaactggttcat

SEQ ID NO: 1238391 - DNA, 15 bp, Homo sapiens
catgtaactggttca

SEQ ID NO: 1238392 - DNA, 15 bp, Homo sapiens
tcatgtaactggttc

SEQ ID NO: 1238393 - DNA, 15 bp, Homo sapiens
ttcatgtaactggtt

SEQ ID NO: 1238394 - DNA, 15 bp, Homo sapiens
attcatgtaactggt

SEQ ID NO: 1238395 - DNA, 15 bp, Homo sapiens
aattcatgtaactgg

SEQ ID NO: 1238396 - DNA, 15 bp, Homo sapiens
aaattcatgtaactg

SEQ ID NO: 1238397 - DNA, 15 bp, Homo sapiens
caaattcatgtaact

SEQ ID NO: 1238398 - DNA, 15 bp, Homo sapiens
acaaattcatgtaac

SEQ ID NO: 1238399 - DNA, 15 bp, Homo sapiens
gacaaattcatgtaa

SEQ ID NO: 1238400 - DNA, 15 bp, Homo sapiens
cgacaaattcatgta

SEQ ID NO: 1238401 - DNA, 15 bp, Homo sapiens
acgacaaattcatgt

SEQ ID NO: 1238402 - DNA, 15 bp, Homo sapiens
cacgacaaattcatg

SEQ ID NO: 1238403 - DNA, 15 bp, Homo sapiens
gcacgacaaattcat

SEQ ID NO: 1238404 - DNA, 15 bp, Homo sapiens
ggcacgacaaattca

SEQ ID NO: 1238405 - DNA, 15 bp, Homo sapiens
aggcacgacaaattc

SEQ ID NO: 1238406 - DNA, 15 bp, Homo sapiens
taggcacgacaaatt

SEQ ID NO: 1238407 - DNA, 15 bp, Homo sapiens
gtaggcacgacaaat

SEQ ID NO: 1238408 - DNA, 15 bp, Homo sapiens
agtaggcacgacaaa

SEQ ID NO: 1238409 - DNA, 15 bp, Homo sapiens
aagtaggcacgacaa

SEQ ID NO: 1238410 - DNA, 15 bp, Homo sapiens
gaagtaggcacgaca

SEQ ID NO: 1238411 - DNA, 15 bp, Homo sapiens
agaagtaggcacgac

SEQ ID NO: 1238412 - DNA, 15 bp, Homo sapiens
gagaagtaggcacga

SEQ ID NO: 1238413 - DNA, 15 bp, Homo sapiens
ggagaagtaggcacg

SEQ ID NO: 1238414 - DNA, 15 bp, Homo sapiens
tggagaagtaggcac

SEQ ID NO: 1238415 - DNA, 15 bp, Homo sapiens
ctggagaagtaggca

SEQ ID NO: 1238416 - DNA, 15 bp, Homo sapiens
tctggagaagtaggc

SEQ ID NO: 1238417 - DNA, 15 bp, Homo sapiens
gtctggagaagtagg

SEQ ID NO: 1238418 - DNA, 15 bp, Homo sapiens
agtctggagaagtag

SEQ ID NO: 1238419 - DNA, 15 bp, Homo sapiens
gagtctggagaagta

SEQ ID NO: 1238420 - DNA, 15 bp, Homo sapiens
tgagtctggagaagt

SEQ ID NO: 1238421 - DNA, 15 bp, Homo sapiens
ctgagtctggagaag

SEQ ID NO: 1238422 - DNA, 15 bp, Homo sapiens
gctgagtctggagaa

SEQ ID NO: 1238423 - DNA, 15 bp, Homo sapiens
agctgagtctggaga

SEQ ID NO: 1238424 - DNA, 15 bp, Homo sapiens
aagctgagtctggag

SEQ ID NO: 1238425 - DNA, 15 bp, Homo sapiens
taagctgagtctgga

SEQ ID NO: 1238426 - DNA, 15 bp, Homo sapiens
gtaagctgagtctgg

SEQ ID NO: 1238427 - DNA, 15 bp, Homo sapiens
tgtaagctgagtctg

SEQ ID NO: 1238428 - DNA, 15 bp, Homo sapiens
gtgtaagctgagtct

SEQ ID NO: 1238429 - DNA, 15 bp, Homo sapiens
ggtgtaagctgagtc

SEQ ID NO: 1238430 - DNA, 15 bp, Homo sapiens
aggtgtaagctgagt

SEQ ID NO: 1238431 - DNA, 15 bp, Homo sapiens
gaggtgtaagctgag

SEQ ID NO: 1238432 - DNA, 15 bp, Homo sapiens
agaggtgtaagctga

SEQ ID NO: 1238433 - DNA, 15 bp, Homo sapiens
gagaggtgtaagctg

SEQ ID NO: 1238434 - DNA, 15 bp, Homo sapiens
agagaggtgtaagct

SEQ ID NO: 1238435 - DNA, 15 bp, Homo sapiens
gagagaggtgtaagc

SEQ ID NO: 1238436 - DNA, 15 bp, Homo sapiens
ggagagaggtgtaag

SEQ ID NO: 1238437 - DNA, 15 bp, Homo sapiens
aggagagaggtgtaa

SEQ ID NO: 1238438 - DNA, 15 bp, Homo sapiens
aaggagagaggtgta

SEQ ID NO: 1238439 - DNA, 15 bp, Homo sapiens
gaaaaggagagaggt

SEQ ID NO: 1238440 - DNA, 15 bp, Homo sapiens
tgaaaaggagagagg

SEQ ID NO: 1238441 - DNA, 15 bp, Homo sapiens
gtgaaaaggagagag

SEQ ID NO: 1238442 - DNA, 15 bp, Homo sapiens
agtgaaaaggagaga

SEQ ID NO: 1238443 - DNA, 15 bp, Homo sapiens
gagtgaaaaggagag

SEQ ID NO: 1238444 - DNA, 15 bp, Homo sapiens
agagtgaaaaggaga

SEQ ID NO: 1238445 - DNA, 15 bp, Homo sapiens
gagagtgaaaaggag

SEQ ID NO: 1238446 - DNA, 15 bp, Homo sapiens
agagagtgaaaagga

SEQ ID NO: 1238447 - DNA, 15 bp, Homo sapiens
aagagagtgaaaagg

SEQ ID NO: 1238448 - DNA, 15 bp, Homo sapiens
aaagagagtgaaaag

SEQ ID NO: 1238449 - DNA, 15 bp, Homo sapiens
taaagagagtgaaaa

SEQ ID NO: 1238450 - DNA, 15 bp, Homo sapiens
gtaaagagagtgaaa

SEQ ID NO: 1238451 - DNA, 15 bp, Homo sapiens
ggtaaagagagtgaa

SEQ ID NO: 1238452 - DNA, 15 bp, Homo sapiens
gggtaaagagagtga

SEQ ID NO: 1238453 - DNA, 15 bp, Homo sapiens
cgggtaaagagagtg

SEQ ID NO: 1238454 - DNA, 15 bp, Homo sapiens
gcgggtaaagagagt

SEQ ID NO: 1238455 - DNA, 15 bp, Homo sapiens
ggcgggtaaagagag

SEQ ID NO: 1238456 - DNA, 15 bp, Homo sapiens
gggcgggtaaagaga

SEQ ID NO: 1238457 - DNA, 15 bp, Homo sapiens
ggggcgggtaaagag

SEQ ID NO: 1238458 - DNA, 15 bp, Homo sapiens
gggggcgggtaaaga

SEQ ID NO: 1238459 - DNA, 15 bp, Homo sapiens
ggggggcgggtaaag

SEQ ID NO: 1238460 - DNA, 15 bp, Homo sapiens
gggggggcgggtaaa

SEQ ID NO: 1238461 - DNA, 15 bp, Homo sapiens
tgggggggcgggtaa

SEQ ID NO: 1238462 - DNA, 15 bp, Homo sapiens
ttgggggggcgggta

SEQ ID NO: 1238463 - DNA, 15 bp, Homo sapiens
gttgggggggcgggt

SEQ ID NO: 1238464 - DNA, 15 bp, Homo sapiens
tgttgggggggcggg

SEQ ID NO: 1238465 - DNA, 15 bp, Homo sapiens
ttgttgggggggcgg

SEQ ID NO: 1238466 - DNA, 15 bp, Homo sapiens
gttgttgggggggcg

SEQ ID NO: 1238467 - DNA, 15 bp, Homo sapiens
agttgttgggggggc

SEQ ID NO: 1238468 - DNA, 15 bp, Homo sapiens
cagttgttggggggg

SEQ ID NO: 1238469 - DNA, 15 bp, Homo sapiens
ccagttgttgggggg

SEQ ID NO: 1238470 - DNA, 15 bp, Homo sapiens
gccagttgttggggg

SEQ ID NO: 1238471 - DNA, 15 bp, Homo sapiens
agccagttgttgggg

SEQ ID NO: 1238472 - DNA, 15 bp, Homo sapiens
aagccagttgttggg

SEQ ID NO: 1238473 - DNA, 15 bp, Homo sapiens
taagccagttgttgg

SEQ ID NO: 1238474 - DNA, 15 bp, Homo sapiens
ataagccagttgttg

SEQ ID NO: 1238475 - DNA, 15 bp, Homo sapiens
cataagccagttgtt

SEQ ID NO: 1238476 - DNA, 15 bp, Homo sapiens
acataagccagttgt

SEQ ID NO: 1238477 - DNA, 15 bp, Homo sapiens
tacataagccagttg

SEQ ID NO: 1238478 - DNA, 15 bp, Homo sapiens
atacataagccagtt

SEQ ID NO: 1238479 - DNA, 15 bp, Homo sapiens
catacataagccagt

SEQ ID NO: 1238480 - DNA, 15 bp, Homo sapiens
gcatacataagccag

SEQ ID NO: 1238481 - DNA, 15 bp, Homo sapiens
agcatacataagcca

SEQ ID NO: 1238482 - DNA, 15 bp, Homo sapiens
gagcatacataagcc

SEQ ID NO: 1238483 - DNA, 15 bp, Homo sapiens
ggagcatacataagc

SEQ ID NO: 1238484 - DNA, 15 bp, Homo sapiens
aggagcatacataag

SEQ ID NO: 1238485 - DNA, 15 bp, Homo sapiens
gaggagcatacataa

SEQ ID NO: 1238486 - DNA, 15 bp, Homo sapiens
tgaggagcatacata

SEQ ID NO: 1238487 - DNA, 15 bp, Homo sapiens
ctgaggagcatacat

SEQ ID NO: 1238488 - DNA, 15 bp, Homo sapiens
tctgaggagcataca

SEQ ID NO: 1238489 - DNA, 15 bp, Homo sapiens
ttctgaggagcatac

SEQ ID NO: 1238490 - DNA, 15 bp, Homo sapiens
tttctgaggagcata

SEQ ID NO: 1238491 - DNA, 15 bp, Homo sapiens
ttttctgaggagcat

SEQ ID NO: 1238492 - DNA, 15 bp, Homo sapiens
cttttctgaggagca

SEQ ID NO: 1238493 - DNA, 15 bp, Homo sapiens
acttttctgaggagc

SEQ ID NO: 1238494 - DNA, 15 bp, Homo sapiens
gacttttctgaggag

SEQ ID NO: 1238495 - DNA, 15 bp, Homo sapiens
ggacttttctgagga

SEQ ID NO: 1238496 - DNA, 15 bp, Homo sapiens
gggacttttctgagg

SEQ ID NO: 1238497 - DNA, 15 bp, Homo sapiens
tgggacttttctgag

SEQ ID NO: 1238498 - DNA, 15 bp, Homo sapiens
atgggacttttctga

SEQ ID NO: 1238499 - DNA, 15 bp, Homo sapiens
aatgggacttttctg

SEQ ID NO: 1238500 - DNA, 15 bp, Homo sapiens
aaatgggacttttct

SEQ ID NO: 1238501 - DNA, 15 bp, Homo sapiens
taaatgggacttttc

SEQ ID NO: 1238502 - DNA, 15 bp, Homo sapiens
gtaaatgggactttt

SEQ ID NO: 1238503 - DNA, 15 bp, Homo sapiens
agtaaatgggacttt

SEQ ID NO: 1238504 - DNA, 15 bp, Homo sapiens
gagtaaatgggactt

SEQ ID NO: 1238505 - DNA, 15 bp, Homo sapiens
tgagtaaatgggact

SEQ ID NO: 1238506 - DNA, 15 bp, Homo sapiens
atgagtaaatgggac

SEQ ID NO: 1238507 - DNA, 15 bp, Homo sapiens
tatgagtaaatggga

SEQ ID NO: 1238508 - DNA, 15 bp, Homo sapiens
atatgagtaaatggg

SEQ ID NO: 1238509 - DNA, 15 bp, Homo sapiens
acttttgccccctca

SEQ ID NO: 1238510 - DNA, 15 bp, Homo sapiens
tacttttgccccctc

SEQ ID NO: 1238511 - DNA, 15 bp, Homo sapiens
gtacttttgccccct

SEQ ID NO: 1238512 - DNA, 15 bp, Homo sapiens
ggtacttttgccccc

SEQ ID NO: 1238513 - DNA, 15 bp, Homo sapiens
aggtacttttgcccc

SEQ ID NO: 1238514 - DNA, 15 bp, Homo sapiens
caggtacttttgccc

SEQ ID NO: 1238515 - DNA, 15 bp, Homo sapiens
acaggtacttttgcc

SEQ ID NO: 1238516 - DNA, 15 bp, Homo sapiens
gacaggtacttttgc

SEQ ID NO: 1238517 - DNA, 15 bp, Homo sapiens
agacaggtacttttg

SEQ ID NO: 1238518 - DNA, 15 bp, Homo sapiens
gagacaggtactttt

SEQ ID NO: 1238519 - DNA, 15 bp, Homo sapiens
agagacaggtacttt

SEQ ID NO: 1238520 - DNA, 15 bp, Homo sapiens
cagagacaggtactt

SEQ ID NO: 1238521 - DNA, 15 bp, Homo sapiens
ccagagacaggtact

SEQ ID NO: 1238522 - DNA, 15 bp, Homo sapiens
cccagagacaggtac

SEQ ID NO: 1238523 - DNA, 15 bp, Homo sapiens
acccagagacaggta

SEQ ID NO: 1238524 - DNA, 15 bp, Homo sapiens
tacccagagacaggt

SEQ ID NO: 1238525 - DNA, 15 bp, Homo sapiens
atacccagagacagg

SEQ ID NO: 1238526 - DNA, 15 bp, Homo sapiens
aatacccagagacag

SEQ ID NO: 1238527 - DNA, 15 bp, Homo sapiens
aaatacccagagaca

SEQ ID NO: 1238528 - DNA, 15 bp, Homo sapiens
aaaatacccagagac

SEQ ID NO: 1238529 - DNA, 15 bp, Homo sapiens
aaaaatacccagaga

SEQ ID NO: 1238530 - DNA, 15 bp, Homo sapiens
aaaaaatacccagag

SEQ ID NO: 1238531 - DNA, 15 bp, Homo sapiens
gaaaaaatacccaga

SEQ ID NO: 1238532 - DNA, 15 bp, Homo sapiens
agaaaaaatacccag

SEQ ID NO: 1238533 - DNA, 15 bp, Homo sapiens
aagaaaaaataccca

SEQ ID NO: 1238534 - DNA, 15 bp, Homo sapiens
aaagaaaaaataccc

SEQ ID NO: 1238535 - DNA, 15 bp, Homo sapiens
gaaagaaaaaatacc

SEQ ID NO: 1238536 - DNA, 15 bp, Homo sapiens
tgaaagaaaaaatac

SEQ ID NO: 1238537 - DNA, 15 bp, Homo sapiens
atgaaagaaaaaata

SEQ ID NO: 1238538 - DNA, 15 bp, Homo sapiens
tatgaaagaaaaaat

SEQ ID NO: 1238539 - DNA, 15 bp, Homo sapiens
atatgaaagaaaaaa

SEQ ID NO: 1238540 - DNA, 15 bp, Homo sapiens
aatatgaaagaaaaa

SEQ ID NO: 1238541 - DNA, 15 bp, Homo sapiens
caatatgaaagaaaa

SEQ ID NO: 1238542 - DNA, 15 bp, Homo sapiens
tcaatatgaaagaaa

SEQ ID NO: 1238543 - DNA, 15 bp, Homo sapiens
ttcaatatgaaagaa

SEQ ID NO: 1238544 - DNA, 15 bp, Homo sapiens
tttcaatatgaaaga

SEQ ID NO: 1238545 - DNA, 15 bp, Homo sapiens
ttttcaatatgaaag

SEQ ID NO: 1238546 - DNA, 15 bp, Homo sapiens
tttttcaatatgaaa

SEQ ID NO: 1238547 - DNA, 15 bp, Homo sapiens
atttttcaatatgaa

SEQ ID NO: 1238548 - DNA, 15 bp, Homo sapiens
catttttcaatatga

SEQ ID NO: 1238549 - DNA, 15 bp, Homo sapiens
gcatttttcaatatg

SEQ ID NO: 1238550 - DNA, 15 bp, Homo sapiens
tgcatttttcaatat

SEQ ID NO: 1238551 - DNA, 15 bp, Homo sapiens
atgcatttttcaata

SEQ ID NO: 1238552 - DNA, 15 bp, Homo sapiens
aatgcatttttcaat

SEQ ID NO: 1238553 - DNA, 15 bp, Homo sapiens
aaatgcatttttcaa

SEQ ID NO: 1238554 - DNA, 15 bp, Homo sapiens
taaatgcatttttca

SEQ ID NO: 1238555 - DNA, 15 bp, Homo sapiens
ttaaatgcatttttc

SEQ ID NO: 1238556 - DNA, 15 bp, Homo sapiens
tttaaatgcattttt

SEQ ID NO: 1238557 - DNA, 15 bp, Homo sapiens
atttaaatgcatttt

SEQ ID NO: 1238558 - DNA, 15 bp, Homo sapiens
catttaaatgcattt

SEQ ID NO: 1238559 - DNA, 15 bp, Homo sapiens
gcatttaaatgcatt

SEQ ID NO: 1238560 - DNA, 15 bp, Homo sapiens
tgcatttaaatgcat

SEQ ID NO: 1238561 - DNA, 15 bp, Homo sapiens
ttgcatttaaatgca

SEQ ID NO: 1238562 - DNA, 15 bp, Homo sapiens
cttgcatttaaatgc

SEQ ID NO: 1238563 - DNA, 15 bp, Homo sapiens
tcttgcatttaaatg

SEQ ID NO: 1238564 - DNA, 15 bp, Homo sapiens
gtcttgcatttaaat

SEQ ID NO: 1238565 - DNA, 15 bp, Homo sapiens
tgtcttgcatttaaa

SEQ ID NO: 1238566 - DNA, 15 bp, Homo sapiens
ttgtcttgcatttaa

SEQ ID NO: 1238567 - DNA, 15 bp, Homo sapiens
attgtcttgcattta

SEQ ID NO: 1238568 - DNA, 15 bp, Homo sapiens
aattgtcttgcattt

SEQ ID NO: 1238569 - DNA, 15 bp, Homo sapiens
taattgtcttgcatt

SEQ ID NO: 1238570 - DNA, 15 bp, Homo sapiens
ttaattgtcttgcat

SEQ ID NO: 1238571 - DNA, 15 bp, Homo sapiens
gttaattgtcttgca

SEQ ID NO: 1238572 - DNA, 15 bp, Homo sapiens
agttaattgtcttgc

SEQ ID NO: 1238573 - DNA, 15 bp, Homo sapiens
tagttaattgtcttg

SEQ ID NO: 1238574 - DNA, 15 bp, Homo sapiens
gtagttaattgtctt

SEQ ID NO: 1238575 - DNA, 15 bp, Homo sapiens
agtagttaattgtct

SEQ ID NO: 1238576 - DNA, 15 bp, Homo sapiens
tagtagttaattgtc

SEQ ID NO: 1238577 - DNA, 15 bp, Homo sapiens
ttagtagttaattgt

SEQ ID NO: 1238578 - DNA, 15 bp, Homo sapiens
attagtagttaattg

SEQ ID NO: 1238579 - DNA, 15 bp, Homo sapiens
tattagtagttaatt

SEQ ID NO: 1238580 - DNA, 15 bp, Homo sapiens
atattagtagttaat

SEQ ID NO: 1238581 - DNA, 15 bp, Homo sapiens
aatattagtagttaa

SEQ ID NO: 1238582 - DNA, 15 bp, Homo sapiens
gaatattagtagtta

SEQ ID NO: 1238583 - DNA, 15 bp, Homo sapiens
ggaatattagtagtt

SEQ ID NO: 1238584 - DNA, 15 bp, Homo sapiens
aggaatattagtagt

SEQ ID NO: 1238585 - DNA, 15 bp, Homo sapiens
aaggaatattagtag

SEQ ID NO: 1238586 - DNA, 15 bp, Homo sapiens
gaaggaatattagta

SEQ ID NO: 1238587 - DNA, 15 bp, Homo sapiens
ggaaggaatattagt

SEQ ID NO: 1238588 - DNA, 15 bp, Homo sapiens
tggaaggaatattag

SEQ ID NO: 1238589 - DNA, 15 bp, Homo sapiens
atggaaggaatatta

SEQ ID NO: 1238590 - DNA, 15 bp, Homo sapiens
gatggaaggaatatt

SEQ ID NO: 1238591 - DNA, 15 bp, Homo sapiens
agatggaaggaatat

SEQ ID NO: 1238592 - DNA, 15 bp, Homo sapiens
tagatggaaggaata

SEQ ID NO: 1238593 - DNA, 15 bp, Homo sapiens
atagatggaaggaat

SEQ ID NO: 1238594 - DNA, 15 bp, Homo sapiens
aatagatggaaggaa

SEQ ID NO: 1238595 - DNA, 15 bp, Homo sapiens
taatagatggaagga

SEQ ID NO: 1238596 - DNA, 15 bp, Homo sapiens
ataatagatggaagg

SEQ ID NO: 1238597 - DNA, 15 bp, Homo sapiens
gataatagatggaag

SEQ ID NO: 1238598 - DNA, 15 bp, Homo sapiens
tgataatagatggaa

SEQ ID NO: 1238599 - DNA, 15 bp, Homo sapiens
ttgataatagatgga

SEQ ID NO: 1238600 - DNA, 15 bp, Homo sapiens
gttgataatagatgg

SEQ ID NO: 1238601 - DNA, 15 bp, Homo sapiens
ggttgataatagatg

SEQ ID NO: 1238602 - DNA, 15 bp, Homo sapiens
cggttgataatagat

SEQ ID NO: 1238603 - DNA, 15 bp, Homo sapiens
gcggttgataataga

SEQ ID NO: 1238604 - DNA, 15 bp, Homo sapiens
agcggttgataatag

SEQ ID NO: 1238605 - DNA, 15 bp, Homo sapiens
cagcggttgataata

SEQ ID NO: 1238606 - DNA, 15 bp, Homo sapiens
acagcggttgataat

SEQ ID NO: 1238607 - DNA, 15 bp, Homo sapiens
aacagcggttgataa

SEQ ID NO: 1238608 - DNA, 15 bp, Homo sapiens
taacagcggttgata

SEQ ID NO: 1238609 - DNA, 15 bp, Homo sapiens
ttaacagcggttgat

SEQ ID NO: 1238610 - DNA, 15 bp, Homo sapiens
gttaacagcggttga

SEQ ID NO: 1238611 - DNA, 15 bp, Homo sapiens
tgttaacagcggttg

SEQ ID NO: 1238612 - DNA, 15 bp, Homo sapiens
atgttaacagcggtt

SEQ ID NO: 1238613 - DNA, 15 bp, Homo sapiens
aatgttaacagcggt

SEQ ID NO: 1238614 - DNA, 15 bp, Homo sapiens
aaatgttaacagcgg

SEQ ID NO: 1238615 - DNA, 15 bp, Homo sapiens
caaatgttaacagcg

SEQ ID NO: 1238616 - DNA, 15 bp, Homo sapiens
ccaaatgttaacagc

SEQ ID NO: 1238617 - DNA, 15 bp, Homo sapiens
tccaaatgttaacag

SEQ ID NO: 1238618 - DNA, 15 bp, Homo sapiens
gtccaaatgttaaca

SEQ ID NO: 1238619 - DNA, 15 bp, Homo sapiens
tgtccaaatgttaac

SEQ ID NO: 1238620 - DNA, 15 bp, Homo sapiens
atgtccaaatgttaa

SEQ ID NO: 1238621 - DNA, 15 bp, Homo sapiens
tatgtccaaatgtta

SEQ ID NO: 1238622 - DNA, 15 bp, Homo sapiens
atatgtccaaatgtt

SEQ ID NO: 1238623 - DNA, 15 bp, Homo sapiens
gatatgtccaaatgt

SEQ ID NO: 1238624 - DNA, 15 bp, Homo sapiens
tgatatgtccaaatg

SEQ ID NO: 1238625 - DNA, 15 bp, Homo sapiens
gtgatatgtccaaat

SEQ ID NO: 1238626 - DNA, 15 bp, Homo sapiens
agtgatatgtccaaa

SEQ ID NO: 1238627 - DNA, 15 bp, Homo sapiens
aagtgatatgtccaa

SEQ ID NO: 1238628 - DNA, 15 bp, Homo sapiens
aaagtgatatgtcca

SEQ ID NO: 1238629 - DNA, 15 bp, Homo sapiens
gaaagtgatatgtcc

SEQ ID NO: 1238630 - DNA, 15 bp, Homo sapiens
tgaaagtgatatgtc

SEQ ID NO: 1238631 - DNA, 15 bp, Homo sapiens
atgaaagtgatatgt

SEQ ID NO: 1238632 - DNA, 15 bp, Homo sapiens
aatgaaagtgatatg

SEQ ID NO: 1238633 - DNA, 15 bp, Homo sapiens
aaatgaaagtgatat

SEQ ID NO: 1238634 - DNA, 15 bp, Homo sapiens
aaaatgaaagtgata

SEQ ID NO: 1238635 - DNA, 15 bp, Homo sapiens
aaaaatgaaagtgat

SEQ ID NO: 1238636 - DNA, 15 bp, Homo sapiens
aaaaaatgaaagtga

SEQ ID NO: 1238637 - DNA, 15 bp, Homo sapiens
gaaaaaatgaaagtg

SEQ ID NO: 1238638 - DNA, 15 bp, Homo sapiens
ggaaaaaatgaaagt

SEQ ID NO: 1238639 - DNA, 15 bp, Homo sapiens
aggaaaaaatgaaag

SEQ ID NO: 1238640 - DNA, 15 bp, Homo sapiens
caggaaaaaatgaaa

SEQ ID NO: 1238641 - DNA, 15 bp, Homo sapiens
acaggaaaaaatgaa

SEQ ID NO: 1238642 - DNA, 15 bp, Homo sapiens
cacaggaaaaaatga

SEQ ID NO: 1238643 - DNA, 15 bp, Homo sapiens
acacaggaaaaaatg

SEQ ID NO: 1238644 - DNA, 15 bp, Homo sapiens
gacacaggaaaaaat

SEQ ID NO: 1238645 - DNA, 15 bp, Homo sapiens
tgacacaggaaaaaa

SEQ ID NO: 1238646 - DNA, 15 bp, Homo sapiens
atgacacaggaaaaa

SEQ ID NO: 1238647 - DNA, 15 bp, Homo sapiens
aatgacacaggaaaa

SEQ ID NO: 1238648 - DNA, 15 bp, Homo sapiens
caatgacacaggaaa

SEQ ID NO: 1238649 - DNA, 15 bp, Homo sapiens
gcaatgacacaggaa

SEQ ID NO: 1238650 - DNA, 15 bp, Homo sapiens
tgcaatgacacagga

SEQ ID NO: 1238651 - DNA, 15 bp, Homo sapiens
ctgcaatgacacagg

SEQ ID NO: 1238652 - DNA, 15 bp, Homo sapiens
actgcaatgacacag

SEQ ID NO: 1238653 - DNA, 15 bp, Homo sapiens
aactgcaatgacaca

SEQ ID NO: 1238654 - DNA, 15 bp, Homo sapiens
aaactgcaatgacac

SEQ ID NO: 1238655 - DNA, 15 bp, Homo sapiens
gaaactgcaatgaca

SEQ ID NO: 1238656 - DNA, 15 bp, Homo sapiens
tgaaactgcaatgac

SEQ ID NO: 1238657 - DNA, 15 bp, Homo sapiens
ttgaaactgcaatga

SEQ ID NO: 1238658 - DNA, 15 bp, Homo sapiens
tttgaaactgcaatg

SEQ ID NO: 1238659 - DNA, 15 bp, Homo sapiens
atttgaaactgcaat

SEQ ID NO: 1238660 - DNA, 15 bp, Homo sapiens
tatttgaaactgcaa

SEQ ID NO: 1238661 - DNA, 15 bp, Homo sapiens
atatttgaaactgca

SEQ ID NO: 1238662 - DNA, 15 bp, Homo sapiens
aatatttgaaactgc

SEQ ID NO: 1238663 - DNA, 15 bp, Homo sapiens
taatatttgaaactg

SEQ ID NO: 1238664 - DNA, 15 bp, Homo sapiens
gtaatatttgaaact

SEQ ID NO: 1238665 - DNA, 15 bp, Homo sapiens
tgtaatatttgaaac

SEQ ID NO: 1238666 - DNA, 15 bp, Homo sapiens
ttgtaatatttgaaa

SEQ ID NO: 1238667 - DNA, 15 bp, Homo sapiens
tttgtaatatttgaa

SEQ ID NO: 1238668 - DNA, 15 bp, Homo sapiens
atttgtaatatttga

SEQ ID NO: 1238669 - DNA, 15 bp, Homo sapiens
aatttgtaatatttg

SEQ ID NO: 1238670 - DNA, 15 bp, Homo sapiens
taatttgtaatattt

SEQ ID NO: 1238671 - DNA, 15 bp, Homo sapiens
ttaatttgtaatatt

SEQ ID NO: 1238672 - DNA, 15 bp, Homo sapiens
gttaatttgtaatat

SEQ ID NO: 1238673 - DNA, 15 bp, Homo sapiens
tgttaatttgtaata

SEQ ID NO: 1238674 - DNA, 15 bp, Homo sapiens
atgttaatttgtaat

SEQ ID NO: 1238675 - DNA, 15 bp, Homo sapiens
tatgttaatttgtaa

SEQ ID NO: 1238676 - DNA, 15 bp, Homo sapiens
atatgttaatttgta

SEQ ID NO: 1238677 - DNA, 15 bp, Homo sapiens
gatatgttaatttgt

SEQ ID NO: 1238678 - DNA, 15 bp, Homo sapiens
tgatatgttaatttg

SEQ ID NO: 1238679 - DNA, 15 bp, Homo sapiens
atgatatgttaattt

SEQ ID NO: 1238680 - DNA, 15 bp, Homo sapiens
aatgatatgttaatt

SEQ ID NO: 1238681 - DNA, 15 bp, Homo sapiens
aaatgatatgttaat

SEQ ID NO: 1238682 - DNA, 15 bp, Homo sapiens
gaaatgatatgttaa

SEQ ID NO: 1238683 - DNA, 15 bp, Homo sapiens
agaaatgatatgtta

SEQ ID NO: 1238684 - DNA, 15 bp, Homo sapiens
aagaaatgatatgtt

SEQ ID NO: 1238685 - DNA, 15 bp, Homo sapiens
taagaaatgatatgt

SEQ ID NO: 1238686 - DNA, 15 bp, Homo sapiens
ttaagaaatgatatg

SEQ ID NO: 1238687 - DNA, 15 bp, Homo sapiens
cttaagaaatgatat

SEQ ID NO: 1238688 - DNA, 15 bp, Homo sapiens
tcttaagaaatgata

SEQ ID NO: 1238689 - DNA, 15 bp, Homo sapiens
ttcttaagaaatgat

SEQ ID NO: 1238690 - DNA, 15 bp, Homo sapiens
tttcttaagaaatga

SEQ ID NO: 1238691 - DNA, 15 bp, Homo sapiens
ttttcttaagaaatg

SEQ ID NO: 1238692 - DNA, 15 bp, Homo sapiens
tttttcttaagaaat

SEQ ID NO: 1238693 - DNA, 15 bp, Homo sapiens
ttttttcttaagaaa

SEQ ID NO: 1238694 - DNA, 15 bp, Homo sapiens
tttttttcttaagaa

SEQ ID NO: 1238695 - DNA, 15 bp, Homo sapiens
atttttttcttaaga

SEQ ID NO: 1238696 - DNA, 15 bp, Homo sapiens
aatttttttcttaag

SEQ ID NO: 1238697 - DNA, 15 bp, Homo sapiens
taatttttttcttaa

SEQ ID NO: 1238698 - DNA, 15 bp, Homo sapiens
ctaatttttttctta

SEQ ID NO: 1238699 - DNA, 15 bp, Homo sapiens
tctaatttttttctt

SEQ ID NO: 1238700 - DNA, 15 bp, Homo sapiens
ttctaatttttttct

SEQ ID NO: 1238701 - DNA, 15 bp, Homo sapiens
cttctaatttttttc

SEQ ID NO: 1238702 - DNA, 15 bp, Homo sapiens
tcttctaattttttt

SEQ ID NO: 1238703 - DNA, 15 bp, Homo sapiens
atcttctaatttttt

SEQ ID NO: 1238704 - DNA, 15 bp, Homo sapiens
tatcttctaattttt

SEQ ID NO: 1238705 - DNA, 15 bp, Homo sapiens
ttatcttctaatttt

SEQ ID NO: 1238706 - DNA, 15 bp, Homo sapiens
tttatcttctaattt

SEQ ID NO: 1238707 - DNA, 15 bp, Homo sapiens
ctttatcttctaatt

SEQ ID NO: 1238708 - DNA, 15 bp, Homo sapiens
gctttatcttctaat

SEQ ID NO: 1238709 - DNA, 15 bp, Homo sapiens
agctttatcttctaa

SEQ ID NO: 1238710 - DNA, 15 bp, Homo sapiens
tagctttatcttcta

SEQ ID NO: 1238711 - DNA, 15 bp, Homo sapiens
gtagctttatcttct

SEQ ID NO: 1238712 - DNA, 15 bp, Homo sapiens
tgtagctttatcttc

SEQ ID NO: 1238713 - DNA, 15 bp, Homo sapiens
ctgtagctttatctt

SEQ ID NO: 1238714 - DNA, 15 bp, Homo sapiens
actgtagctttatct

SEQ ID NO: 1238715 - DNA, 15 bp, Homo sapiens
gactgtagctttatc

SEQ ID NO: 1238716 - DNA, 15 bp, Homo sapiens
agactgtagctttat

SEQ ID NO: 1238717 - DNA, 15 bp, Homo sapiens
aagactgtagcttta

SEQ ID NO: 1238718 - DNA, 15 bp, Homo sapiens
aaagactgtagcttt

SEQ ID NO: 1238719 - DNA, 15 bp, Homo sapiens
aaaagactgtagctt

SEQ ID NO: 1238720 - DNA, 15 bp, Homo sapiens
gaaaagactgtagct

SEQ ID NO: 1238721 - DNA, 15 bp, Homo sapiens
agaaaagactgtagc

SEQ ID NO: 1238722 - DNA, 15 bp, Homo sapiens
gagaaaagactgtag

SEQ ID NO: 1238723 - DNA, 15 bp, Homo sapiens
tgagaaaagactgta

SEQ ID NO: 1238724 - DNA, 15 bp, Homo sapiens
atgagaaaagactgt

SEQ ID NO: 1238725 - DNA, 15 bp, Homo sapiens
gatgagaaaagactg

SEQ ID NO: 1238726 - DNA, 15 bp, Homo sapiens
agatgagaaaagact

SEQ ID NO: 1238727 - DNA, 15 bp, Homo sapiens
gagatgagaaaagac

SEQ ID NO: 1238728 - DNA, 15 bp, Homo sapiens
agagatgagaaaaga

SEQ ID NO: 1238729 - DNA, 15 bp, Homo sapiens
gagagatgagaaaag

SEQ ID NO: 1238730 - DNA, 15 bp, Homo sapiens
ggagagatgagaaaa

SEQ ID NO: 1238731 - DNA, 15 bp, Homo sapiens
aggagagatgagaaa

SEQ ID NO: 1238732 - DNA, 15 bp, Homo sapiens
gaggagagatgagaa

SEQ ID NO: 1238733 - DNA, 15 bp, Homo sapiens
agaggagagatgaga

SEQ ID NO: 1238734 - DNA, 15 bp, Homo sapiens
tagaggagagatgag

SEQ ID NO: 1238735 - DNA, 15 bp, Homo sapiens
atagaggagagatga

SEQ ID NO: 1238736 - DNA, 15 bp, Homo sapiens
gatagaggagagatg

SEQ ID NO: 1238737 - DNA, 15 bp, Homo sapiens
ggatagaggagagat

SEQ ID NO: 1238738 - DNA, 15 bp, Homo sapiens
aggatagaggagaga

SEQ ID NO: 1238739 - DNA, 15 bp, Homo sapiens
caggatagaggagag

SEQ ID NO: 1238740 - DNA, 15 bp, Homo sapiens
tcaggatagaggaga

SEQ ID NO: 1238741 - DNA, 15 bp, Homo sapiens
atcaggatagaggag

SEQ ID NO: 1238742 - DNA, 15 bp, Homo sapiens
gatcaggatagagga

SEQ ID NO: 1238743 - DNA, 15 bp, Homo sapiens
tgatcaggatagagg

SEQ ID NO: 1238744 - DNA, 15 bp, Homo sapiens
atgatcaggatagag

SEQ ID NO: 1238745 - DNA, 15 bp, Homo sapiens
aatgatcaggataga

SEQ ID NO: 1238746 - DNA, 15 bp, Homo sapiens
gaatgatcaggatag

SEQ ID NO: 1238747 - DNA, 15 bp, Homo sapiens
agaatgatcaggata

SEQ ID NO: 1238748 - DNA, 15 bp, Homo sapiens
tagaatgatcaggat

SEQ ID NO: 1238749 - DNA, 15 bp, Homo sapiens
ttagaatgatcagga

SEQ ID NO: 1238750 - DNA, 15 bp, Homo sapiens
attagaatgatcagg

SEQ ID NO: 1238751 - DNA, 15 bp, Homo sapiens
aattagaatgatcag

SEQ ID NO: 1238752 - DNA, 15 bp, Homo sapiens
gaattagaatgatca

SEQ ID NO: 1238753 - DNA, 15 bp, Homo sapiens
agaattagaatgatc

SEQ ID NO: 1238754 - DNA, 15 bp, Homo sapiens
tagaattagaatgat

SEQ ID NO: 1238755 - DNA, 15 bp, Homo sapiens
gtagaattagaatga

SEQ ID NO: 1238756 - DNA, 15 bp, Homo sapiens
tgtagaattagaatg

SEQ ID NO: 1238757 - DNA, 15 bp, Homo sapiens
ttgtagaattagaat

SEQ ID NO: 1238758 - DNA, 15 bp, Homo sapiens
tttgtagaattagaa

SEQ ID NO: 1238759 - DNA, 15 bp, Homo sapiens
gtttgtagaattaga

SEQ ID NO: 1238760 - DNA, 15 bp, Homo sapiens
agtttgtagaattag

SEQ ID NO: 1238761 - DNA, 15 bp, Homo sapiens
aagtttgtagaatta

SEQ ID NO: 1238762 - DNA, 15 bp, Homo sapiens
aaagtttgtagaatt

SEQ ID NO: 1238763 - DNA, 15 bp, Homo sapiens
gaaagtttgtagaat

SEQ ID NO: 1238764 - DNA, 15 bp, Homo sapiens
agaaagtttgtagaa

SEQ ID NO: 1238765 - DNA, 15 bp, Homo sapiens
tagaaagtttgtaga

SEQ ID NO: 1238766 - DNA, 15 bp, Homo sapiens
ctagaaagtttgtag

SEQ ID NO: 1238767 - DNA, 15 bp, Homo sapiens
gctagaaagtttgta

SEQ ID NO: 1238768 - DNA, 15 bp, Homo sapiens
ggctagaaagtttgt

SEQ ID NO: 1238769 - DNA, 15 bp, Homo sapiens
tggctagaaagtttg

SEQ ID NO: 1238770 - DNA, 15 bp, Homo sapiens
ttggctagaaagttt

SEQ ID NO: 1238771 - DNA, 15 bp, Homo sapiens
cttggctagaaagtt

SEQ ID NO: 1238772 - DNA, 15 bp, Homo sapiens
tcttggctagaaagt

SEQ ID NO: 1238773 - DNA, 15 bp, Homo sapiens
gtcttggctagaaag

SEQ ID NO: 1238774 - DNA, 15 bp, Homo sapiens
tgtcttggctagaaa

SEQ ID NO: 1238775 - DNA, 15 bp, Homo sapiens
ctgtcttggctagaa

SEQ ID NO: 1238776 - DNA, 15 bp, Homo sapiens
gctgtcttggctaga

SEQ ID NO: 1238777 - DNA, 15 bp, Homo sapiens
tgctgtcttggctag

SEQ ID NO: 1238778 - DNA, 15 bp, Homo sapiens
atgctgtcttggcta

SEQ ID NO: 1238779 - DNA, 15 bp, Homo sapiens
gatgctgtcttggct

SEQ ID NO: 1238780 - DNA, 15 bp, Homo sapiens
tgatgctgtcttggc

SEQ ID NO: 1238781 - DNA, 15 bp, Homo sapiens
atgatgctgtcttgg

SEQ ID NO: 1238782 - DNA, 15 bp, Homo sapiens
aatgatgctgtcttg

SEQ ID NO: 1238783 - DNA, 15 bp, Homo sapiens
taatgatgctgtctt

SEQ ID NO: 1238784 - DNA, 15 bp, Homo sapiens
ataatgatgctgtct

SEQ ID NO: 1238785 - DNA, 15 bp, Homo sapiens
cataatgatgctgtc

SEQ ID NO: 1238786 - DNA, 15 bp, Homo sapiens
tcataatgatgctgt

SEQ ID NO: 1238787 - DNA, 15 bp, Homo sapiens
ctcataatgatgctg

SEQ ID NO: 1238788 - DNA, 15 bp, Homo sapiens
actcataatgatgct

SEQ ID NO: 1238789 - DNA, 15 bp, Homo sapiens
aactcataatgatgc

SEQ ID NO: 1238790 - DNA, 15 bp, Homo sapiens
aaactcataatgatg

SEQ ID NO: 1238791 - DNA, 15 bp, Homo sapiens
taaactcataatgat

SEQ ID NO: 1238792 - DNA, 15 bp, Homo sapiens
ctaaactcataatga

SEQ ID NO: 1238793 - DNA, 15 bp, Homo sapiens
gctaaactcataatg

SEQ ID NO: 1238794 - DNA, 15 bp, Homo sapiens
tgctaaactcataat

SEQ ID NO: 1238795 - DNA, 15 bp, Homo sapiens
atgctaaactcataa

SEQ ID NO: 1238796 - DNA, 15 bp, Homo sapiens
tatgctaaactcata

SEQ ID NO: 1238797 - DNA, 15 bp, Homo sapiens
atatgctaaactcat

SEQ ID NO: 1238798 - DNA, 15 bp, Homo sapiens
aatatgctaaactca

SEQ ID NO: 1238799 - DNA, 15 bp, Homo sapiens
aaatatgctaaactc

SEQ ID NO: 1238800 - DNA, 15 bp, Homo sapiens
gaaatatgctaaact

SEQ ID NO: 1238801 - DNA, 15 bp, Homo sapiens
ggaaatatgctaaac

SEQ ID NO: 1238802 - DNA, 15 bp, Homo sapiens
aggaaatatgctaaa

SEQ ID NO: 1238803 - DNA, 15 bp, Homo sapiens
aaggaaatatgctaa

SEQ ID NO: 1238804 - DNA, 15 bp, Homo sapiens
ggaaggaaatatgct

SEQ ID NO: 1238805 - DNA, 15 bp, Homo sapiens
tggaaggaaatatgc

SEQ ID NO: 1238806 - DNA, 15 bp, Homo sapiens
ctggaaggaaatatg

SEQ ID NO: 1238807 - DNA, 15 bp, Homo sapiens
actggaaggaaatat

SEQ ID NO: 1238808 - DNA, 15 bp, Homo sapiens
gactggaaggaaata

SEQ ID NO: 1238809 - DNA, 15 bp, Homo sapiens
ggactggaaggaaat

SEQ ID NO: 1238810 - DNA, 15 bp, Homo sapiens
aggactggaaggaaa

SEQ ID NO: 1238811 - DNA, 15 bp, Homo sapiens
aaggactggaaggaa

SEQ ID NO: 1238812 - DNA, 15 bp, Homo sapiens
aaaggactggaagga

SEQ ID NO: 1238813 - DNA, 15 bp, Homo sapiens
caaaggactggaagg

SEQ ID NO: 1238814 - DNA, 15 bp, Homo sapiens
ccaaaggactggaag

SEQ ID NO: 1238815 - DNA, 15 bp, Homo sapiens
tccaaaggactggaa

SEQ ID NO: 1238816 - DNA, 15 bp, Homo sapiens
ttccaaaggactgga

SEQ ID NO: 1238817 - DNA, 15 bp, Homo sapiens
tttccaaaggactgg

SEQ ID NO: 1238818 - DNA, 15 bp, Homo sapiens
ttttccaaaggactg

SEQ ID NO: 1238819 - DNA, 15 bp, Homo sapiens
cttttccaaaggact

SEQ ID NO: 1238820 - DNA, 15 bp, Homo sapiens
acttttccaaaggac

SEQ ID NO: 1238821 - DNA, 15 bp, Homo sapiens
tacttttccaaagga

SEQ ID NO: 1238822 - DNA, 15 bp, Homo sapiens
atacttttccaaagg

SEQ ID NO: 1238823 - DNA, 15 bp, Homo sapiens
catacttttccaaag

SEQ ID NO: 1238824 - DNA, 15 bp, Homo sapiens
acatacttttccaaa

SEQ ID NO: 1238825 - DNA, 15 bp, Homo sapiens
aacatacttttccaa

SEQ ID NO: 1238826 - DNA, 15 bp, Homo sapiens
caacatacttttcca

SEQ ID NO: 1238827 - DNA, 15 bp, Homo sapiens
tcaacatacttttcc

SEQ ID NO: 1238828 - DNA, 15 bp, Homo sapiens
atcaacatacttttc

SEQ ID NO: 1238829 - DNA, 15 bp, Homo sapiens
tatcaacatactttt

SEQ ID NO: 1238830 - DNA, 15 bp, Homo sapiens
atatcaacatacttt

SEQ ID NO: 1238831 - DNA, 15 bp, Homo sapiens
aatatcaacatactt

SEQ ID NO: 1238832 - DNA, 15 bp, Homo sapiens
caatatcaacatact

SEQ ID NO: 1238833 - DNA, 15 bp, Homo sapiens
tcaatatcaacatac

SEQ ID NO: 1238834 - DNA, 15 bp, Homo sapiens
gtcaatatcaacata

SEQ ID NO: 1238835 - DNA, 15 bp, Homo sapiens
tgtcaatatcaacat

SEQ ID NO: 1238836 - DNA, 15 bp, Homo sapiens
ttgtcaatatcaaca

SEQ ID NO: 1238837 - DNA, 15 bp, Homo sapiens
cttgtcaatatcaac

SEQ ID NO: 1238838 - DNA, 15 bp, Homo sapiens
acttgtcaatatcaa

SEQ ID NO: 1238839 - DNA, 15 bp, Homo sapiens
cacttgtcaatatca

SEQ ID NO: 1238840 - DNA, 15 bp, Homo sapiens
acacttgtcaatatc

SEQ ID NO: 1238841 - DNA, 15 bp, Homo sapiens
gacacttgtcaatat

SEQ ID NO: 1238842 - DNA, 15 bp, Homo sapiens
tgacacttgtcaata

SEQ ID NO: 1238843 - DNA, 15 bp, Homo sapiens
atgacacttgtcaat

SEQ ID NO: 1238844 - DNA, 15 bp, Homo sapiens
catgacacttgtcaa

SEQ ID NO: 1238845 - DNA, 15 bp, Homo sapiens
gcatgacacttgtca

SEQ ID NO: 1238846 - DNA, 15 bp, Homo sapiens
agcatgacacttgtc

SEQ ID NO: 1238847 - DNA, 15 bp, Homo sapiens
tagcatgacacttgt

SEQ ID NO: 1238848 - DNA, 15 bp, Homo sapiens
atagcatgacacttg

SEQ ID NO: 1238849 - DNA, 15 bp, Homo sapiens
catagcatgacactt

SEQ ID NO: 1238850 - DNA, 15 bp, Homo sapiens
gcatagcatgacact

SEQ ID NO: 1238851 - DNA, 15 bp, Homo sapiens
tgcatagcatgacac

SEQ ID NO: 1238852 - DNA, 15 bp, Homo sapiens
gtgcatagcatgaca

SEQ ID NO: 1238853 - DNA, 15 bp, Homo sapiens
tgtgcatagcatgac

SEQ ID NO: 1238854 - DNA, 15 bp, Homo sapiens
atgtgcatagcatga

SEQ ID NO: 1238855 - DNA, 15 bp, Homo sapiens
aatgtgcatagcatg

SEQ ID NO: 1238856 - DNA, 15 bp, Homo sapiens
caatgtgcatagcat

SEQ ID NO: 1238857 - DNA, 15 bp, Homo sapiens
ccaatgtgcatagca

SEQ ID NO: 1238858 - DNA, 15 bp, Homo sapiens
accaatgtgcatagc

SEQ ID NO: 1238859 - DNA, 15 bp, Homo sapiens
gaccaatgtgcatag

SEQ ID NO: 1238860 - DNA, 15 bp, Homo sapiens
agaccaatgtgcata

SEQ ID NO: 1238861 - DNA, 15 bp, Homo sapiens
cagaccaatgtgcat

SEQ ID NO: 1238862 - DNA, 15 bp, Homo sapiens
gcagaccaatgtgca

SEQ ID NO: 1238863 - DNA, 15 bp, Homo sapiens
tgcagaccaatgtgc

SEQ ID NO: 1238864 - DNA, 15 bp, Homo sapiens
ctgcagaccaatgtg

SEQ ID NO: 1238865 - DNA, 15 bp, Homo sapiens
gctgcagaccaatgt

SEQ ID NO: 1238866 - DNA, 15 bp, Homo sapiens
ggctgcagaccaatg

SEQ ID NO: 1238867 - DNA, 15 bp, Homo sapiens
aggctgcagaccaat

SEQ ID NO: 1238868 - DNA, 15 bp, Homo sapiens
gaggctgcagaccaa

SEQ ID NO: 1238869 - DNA, 15 bp, Homo sapiens
agaggctgcagacca

SEQ ID NO: 1238870 - DNA, 15 bp, Homo sapiens
aagaggctgcagacc

SEQ ID NO: 1238871 - DNA, 15 bp, Homo sapiens
aaagaggctgcagac

SEQ ID NO: 1238872 - DNA, 15 bp, Homo sapiens
gaaagaggctgcaga

SEQ ID NO: 1238873 - DNA, 15 bp, Homo sapiens
tgaaagaggctgcag

SEQ ID NO: 1238874 - DNA, 15 bp, Homo sapiens
ctgaaagaggctgca

SEQ ID NO: 1238875 - DNA, 15 bp, Homo sapiens
actgaaagaggctgc

SEQ ID NO: 1238876 - DNA, 15 bp, Homo sapiens
tactgaaagaggctg

SEQ ID NO: 1238877 - DNA, 15 bp, Homo sapiens
ttactgaaagaggct

SEQ ID NO: 1238878 - DNA, 15 bp, Homo sapiens
cttactgaaagaggc

SEQ ID NO: 1238879 - DNA, 15 bp, Homo sapiens
gcttactgaaagagg

SEQ ID NO: 1238880 - DNA, 15 bp, Homo sapiens
tgcttactgaaagag

SEQ ID NO: 1238881 - DNA, 15 bp, Homo sapiens
gtgcttactgaaaga

SEQ ID NO: 1238882 - DNA, 15 bp, Homo sapiens
tgtgcttactgaaag

SEQ ID NO: 1238883 - DNA, 15 bp, Homo sapiens
ttgtgcttactgaaa

SEQ ID NO: 1238884 - DNA, 15 bp, Homo sapiens
attgtgcttactgaa

SEQ ID NO: 1238885 - DNA, 15 bp, Homo sapiens
cattgtgcttactga

SEQ ID NO: 1238886 - DNA, 15 bp, Homo sapiens
ccattgtgcttactg

SEQ ID NO: 1238887 - DNA, 15 bp, Homo sapiens
tccattgtgcttact

SEQ ID NO: 1238888 - DNA, 15 bp, Homo sapiens
ctccattgtgcttac

SEQ ID NO: 1238889 - DNA, 15 bp, Homo sapiens
actccattgtgctta

SEQ ID NO: 1238890 - DNA, 15 bp, Homo sapiens
cactccattgtgctt

SEQ ID NO: 1238891 - DNA, 15 bp, Homo sapiens
ccactccattgtgct

SEQ ID NO: 1238892 - DNA, 15 bp, Homo sapiens
gccactccattgtgc

SEQ ID NO: 1238893 - DNA, 15 bp, Homo sapiens
ggccactccattgtg

SEQ ID NO: 1238894 - DNA, 15 bp, Homo sapiens
tggccactccattgt

SEQ ID NO: 1238895 - DNA, 15 bp, Homo sapiens
ttggccactccattg

SEQ ID NO: 1238896 - DNA, 15 bp, Homo sapiens
cttggccactccatt

SEQ ID NO: 1238897 - DNA, 15 bp, Homo sapiens
tcttggccactccat

SEQ ID NO: 1238898 - DNA, 15 bp, Homo sapiens
ctcttggccactcca

SEQ ID NO: 1238899 - DNA, 15 bp, Homo sapiens
cctcttggccactcc

SEQ ID NO: 1238900 - DNA, 15 bp, Homo sapiens
tcctcttggccactc

SEQ ID NO: 1238901 - DNA, 15 bp, Homo sapiens
atcctcttggccact

SEQ ID NO: 1238902 - DNA, 15 bp, Homo sapiens
catcctcttggccac

SEQ ID NO: 1238903 - DNA, 15 bp, Homo sapiens
ccatcctcttggcca

SEQ ID NO: 1238904 - DNA, 15 bp, Homo sapiens
tccatcctcttggcc

SEQ ID NO: 1238905 - DNA, 15 bp, Homo sapiens
gtccatcctcttggc

SEQ ID NO: 1238906 - DNA, 15 bp, Homo sapiens
agtccatcctcttgg

SEQ ID NO: 1238907 - DNA, 15 bp, Homo sapiens
gagtccatcctcttg

SEQ ID NO: 1238908 - DNA, 15 bp, Homo sapiens
ggagtccatcctctt

SEQ ID NO: 1238909 - DNA, 15 bp, Homo sapiens
tggagtccatcctct

SEQ ID NO: 1238910 - DNA, 15 bp, Homo sapiens
atggagtccatcctc

SEQ ID NO: 1238911 - DNA, 15 bp, Homo sapiens
catggagtccatcct

SEQ ID NO: 1238912 - DNA, 15 bp, Homo sapiens
ccatggagtccatcc

SEQ ID NO: 1238913 - DNA, 15 bp, Homo sapiens
tccatggagtccatc

SEQ ID NO: 1238914 - DNA, 15 bp, Homo sapiens
atccatggagtccat

SEQ ID NO: 1238915 - DNA, 15 bp, Homo sapiens
catccatggagtcca

SEQ ID NO: 1238916 - DNA, 15 bp, Homo sapiens
gcatccatggagtcc

SEQ ID NO: 1238917 - DNA, 15 bp, Homo sapiens
tgcatccatggagtc

SEQ ID NO: 1238918 - DNA, 15 bp, Homo sapiens
ctgcatccatggagt

SEQ ID NO: 1238919 - DNA, 15 bp, Homo sapiens
cctgcatccatggag

SEQ ID NO: 1238920 - DNA, 15 bp, Homo sapiens
ccctgcatccatgga

SEQ ID NO: 1238921 - DNA, 15 bp, Homo sapiens
gccctgcatccatgg

SEQ ID NO: 1238922 - DNA, 15 bp, Homo sapiens
agccctgcatccatg

SEQ ID NO: 1238923 - DNA, 15 bp, Homo sapiens
cagccctgcatccat

SEQ ID NO: 1238924 - DNA, 15 bp, Homo sapiens
acagccctgcatcca

SEQ ID NO: 1238925 - DNA, 15 bp, Homo sapiens
cacagccctgcatcc

SEQ ID NO: 1238926 - DNA, 15 bp, Homo sapiens
ccacagccctgcatc

SEQ ID NO: 1238927 - DNA, 15 bp, Homo sapiens
gccacagccctgcat

SEQ ID NO: 1238928 - DNA, 15 bp, Homo sapiens
agccacagccctgca

SEQ ID NO: 1238929 - DNA, 15 bp, Homo sapiens
aagccacagccctgc

SEQ ID NO: 1238930 - DNA, 15 bp, Homo sapiens
taagccacagccctg

SEQ ID NO: 1238931 - DNA, 15 bp, Homo sapiens
ctaagccacagccct

SEQ ID NO: 1238932 - DNA, 15 bp, Homo sapiens
tctaagccacagccc

SEQ ID NO: 1238933 - DNA, 15 bp, Homo sapiens
ctctaagccacagcc

SEQ ID NO: 1238934 - DNA, 15 bp, Homo sapiens
tctctaagccacagc

SEQ ID NO: 1238935 - DNA, 15 bp, Homo sapiens
ctctctaagccacag

SEQ ID NO: 1238936 - DNA, 15 bp, Homo sapiens
cctctctaagccaca

SEQ ID NO: 1238937 - DNA, 15 bp, Homo sapiens
ccctctctaagccac

SEQ ID NO: 1238938 - DNA, 15 bp, Homo sapiens
accctctctaagcca

SEQ ID NO: 1238939 - DNA, 15 bp, Homo sapiens
caccctctctaagcc

SEQ ID NO: 1238940 - DNA, 15 bp, Homo sapiens
tcaccctctctaagc

SEQ ID NO: 1238941 - DNA, 15 bp, Homo sapiens
gtcaccctctctaag

SEQ ID NO: 1238942 - DNA, 15 bp, Homo sapiens
agtcaccctctctaa

SEQ ID NO: 1238943 - DNA, 15 bp, Homo sapiens
aagtcaccctctcta

SEQ ID NO: 1238944 - DNA, 15 bp, Homo sapiens
caagtcaccctctct

SEQ ID NO: 1238945 - DNA, 15 bp, Homo sapiens
tcaagtcaccctctc

SEQ ID NO: 1238946 - DNA, 15 bp, Homo sapiens
gtcaagtcaccctct

SEQ ID NO: 1238947 - DNA, 15 bp, Homo sapiens
agtcaagtcaccctc

SEQ ID NO: 1238948 - DNA, 15 bp, Homo sapiens
aagtcaagtcaccct

SEQ ID NO: 1238949 - DNA, 15 bp, Homo sapiens
gaagtcaagtcaccc

SEQ ID NO: 1238950 - DNA, 15 bp, Homo sapiens
agaagtcaagtcacc

SEQ ID NO: 1238951 - DNA, 15 bp, Homo sapiens
agagaagtcaagtca

SEQ ID NO: 1238952 - DNA, 15 bp, Homo sapiens
cagagaagtcaagtc

SEQ ID NO: 1238953 - DNA, 15 bp, Homo sapiens
acagagaagtcaagt

SEQ ID NO: 1238954 - DNA, 15 bp, Homo sapiens
cacagagaagtcaag

SEQ ID NO: 1238955 - DNA, 15 bp, Homo sapiens
gcacagagaagtcaa

SEQ ID NO: 1238956 - DNA, 15 bp, Homo sapiens
ggcacagagaagtca

SEQ ID NO: 1238957 - DNA, 15 bp, Homo sapiens
aggcacagagaagtc

SEQ ID NO: 1238958 - DNA, 15 bp, Homo sapiens
gaggcacagagaagt

SEQ ID NO: 1238959 - DNA, 15 bp, Homo sapiens
tgaggcacagagaag

SEQ ID NO: 1238960 - DNA, 15 bp, Homo sapiens
ctgaggcacagagaa

SEQ ID NO: 1238961 - DNA, 15 bp, Homo sapiens
gaactgaggcacaga

SEQ ID NO: 1238962 - DNA, 15 bp, Homo sapiens
ggaactgaggcacag

SEQ ID NO: 1238963 - DNA, 15 bp, Homo sapiens
aggaactgaggcaca

SEQ ID NO: 1238964 - DNA, 15 bp, Homo sapiens
gaggaactgaggcac

SEQ ID NO: 1238965 - DNA, 15 bp, Homo sapiens
tgaggaactgaggca

SEQ ID NO: 1238966 - DNA, 15 bp, Homo sapiens
atgaggaactgaggc

SEQ ID NO: 1238967 - DNA, 15 bp, Homo sapiens
gatgaggaactgagg

SEQ ID NO: 1238968 - DNA, 15 bp, Homo sapiens
agatgaggaactgag

SEQ ID NO: 1238969 - DNA, 15 bp, Homo sapiens
cagatgaggaactga

SEQ ID NO: 1238970 - DNA, 15 bp, Homo sapiens
acagatgaggaactg

SEQ ID NO: 1238971 - DNA, 15 bp, Homo sapiens
tacagatgaggaact

SEQ ID NO: 1238972 - DNA, 15 bp, Homo sapiens
tccattttacagatg

SEQ ID NO: 1238973 - DNA, 15 bp, Homo sapiens
ttccattttacagat

SEQ ID NO: 1238974 - DNA, 15 bp, Homo sapiens
tttccattttacaga

SEQ ID NO: 1238975 - DNA, 15 bp, Homo sapiens
atttccattttacag

SEQ ID NO: 1238976 - DNA, 15 bp, Homo sapiens
tatttccattttaca

SEQ ID NO: 1238977 - DNA, 15 bp, Homo sapiens
ctatttccattttac

SEQ ID NO: 1238978 - DNA, 15 bp, Homo sapiens
actatttccatttta

SEQ ID NO: 1238979 - DNA, 15 bp, Homo sapiens
tactatttccatttt

SEQ ID NO: 1238980 - DNA, 15 bp, Homo sapiens
ttactatttccattt

SEQ ID NO: 1238981 - DNA, 15 bp, Homo sapiens
attactatttccatt

SEQ ID NO: 1238982 - DNA, 15 bp, Homo sapiens
gattactatttccat

SEQ ID NO: 1238983 - DNA, 15 bp, Homo sapiens
cgattactatttcca

SEQ ID NO: 1238984 - DNA, 15 bp, Homo sapiens
acgattactatttcc

SEQ ID NO: 1238985 - DNA, 15 bp, Homo sapiens
tacgattactatttc

SEQ ID NO: 1238986 - DNA, 15 bp, Homo sapiens
atacgattactattt

SEQ ID NO: 1238987 - DNA, 15 bp, Homo sapiens
gatacgattactatt

SEQ ID NO: 1238988 - DNA, 15 bp, Homo sapiens
agatacgattactat

SEQ ID NO: 1238989 - DNA, 15 bp, Homo sapiens
cagatacgattacta

SEQ ID NO: 1238990 - DNA, 15 bp, Homo sapiens
gcagatacgattact

SEQ ID NO: 1238991 - DNA, 15 bp, Homo sapiens
agcagatacgattac

SEQ ID NO: 1238992 - DNA, 15 bp, Homo sapiens
aagcagatacgatta

SEQ ID NO: 1238993 - DNA, 15 bp, Homo sapiens
gaagcagatacgatt

SEQ ID NO: 1238994 - DNA, 15 bp, Homo sapiens
tgaagcagatacgat

SEQ ID NO: 1238995 - DNA, 15 bp, Homo sapiens
atgaagcagatacga

SEQ ID NO: 1238996 - DNA, 15 bp, Homo sapiens
tatgaagcagatacg

SEQ ID NO: 1238997 - DNA, 15 bp, Homo sapiens
ctatgaagcagatac

SEQ ID NO: 1238998 - DNA, 15 bp, Homo sapiens
cctatgaagcagata

SEQ ID NO: 1238999 - DNA, 15 bp, Homo sapiens
ccctatgaagcagat

SEQ ID NO: 1239000 - DNA, 15 bp, Homo sapiens
accctatgaagcaga

SEQ ID NO: 1239001 - DNA, 15 bp, Homo sapiens
taccctatgaagcag

SEQ ID NO: 1239002 - DNA, 15 bp, Homo sapiens
ctaccctatgaagca

SEQ ID NO: 1239003 - DNA, 15 bp, Homo sapiens
actaccctatgaagc

SEQ ID NO: 1239004 - DNA, 15 bp, Homo sapiens
tagaactaccctatg

SEQ ID NO: 1239005 - DNA, 15 bp, Homo sapiens
ttagaactaccctat

SEQ ID NO: 1239006 - DNA, 15 bp, Homo sapiens
tttagaactacccta

SEQ ID NO: 1239007 - DNA, 15 bp, Homo sapiens
ctttagaactaccct

SEQ ID NO: 1239008 - DNA, 15 bp, Homo sapiens
tctttagaactaccc

SEQ ID NO: 1239009 - DNA, 15 bp, Homo sapiens
atctttagaactacc

SEQ ID NO: 1239010 - DNA, 15 bp, Homo sapiens
aatctttagaactac

SEQ ID NO: 1239011 - DNA, 15 bp, Homo sapiens
taatctttagaacta

SEQ ID NO: 1239012 - DNA, 15 bp, Homo sapiens
ttaatctttagaact

SEQ ID NO: 1239013 - DNA, 15 bp, Homo sapiens
tttaatctttagaac

SEQ ID NO: 1239014 - DNA, 15 bp, Homo sapiens
atttaatctttagaa

SEQ ID NO: 1239015 - DNA, 15 bp, Homo sapiens
gatttaatctttaga

SEQ ID NO: 1239016 - DNA, 15 bp, Homo sapiens
tgatttaatctttag

SEQ ID NO: 1239017 - DNA, 15 bp, Homo sapiens
gtgatttaatcttta

SEQ ID NO: 1239018 - DNA, 15 bp, Homo sapiens
agtgatttaatcttt

SEQ ID NO: 1239019 - DNA, 15 bp, Homo sapiens
aagtgatttaatctt

SEQ ID NO: 1239020 - DNA, 15 bp, Homo sapiens
taagtgatttaatct

SEQ ID NO: 1239021 - DNA, 15 bp, Homo sapiens
ttaagtgatttaatc

SEQ ID NO: 1239022 - DNA, 15 bp, Homo sapiens
attaagtgatttaat

SEQ ID NO: 1239023 - DNA, 15 bp, Homo sapiens
cattaagtgatttaa

SEQ ID NO: 1239024 - DNA, 15 bp, Homo sapiens
gcattaagtgattta

SEQ ID NO: 1239025 - DNA, 15 bp, Homo sapiens
tgcattaagtgattt

SEQ ID NO: 1239026 - DNA, 15 bp, Homo sapiens
atgcattaagtgatt

SEQ ID NO: 1239027 - DNA, 15 bp, Homo sapiens
catgcattaagtgat

SEQ ID NO: 1239028 - DNA, 15 bp, Homo sapiens
acatgcattaagtga

SEQ ID NO: 1239029 - DNA, 15 bp, Homo sapiens
cacatgcattaagtg

SEQ ID NO: 1239030 - DNA, 15 bp, Homo sapiens
tcacatgcattaagt

SEQ ID NO: 1239031 - DNA, 15 bp, Homo sapiens
atcacatgcattaag

SEQ ID NO: 1239032 - DNA, 15 bp, Homo sapiens
gatcacatgcattaa

SEQ ID NO: 1239033 - DNA, 15 bp, Homo sapiens
agatcacatgcatta

SEQ ID NO: 1239034 - DNA, 15 bp, Homo sapiens
tagatcacatgcatt

SEQ ID NO: 1239035 - DNA, 15 bp, Homo sapiens
ttagatcacatgcat

SEQ ID NO: 1239036 - DNA, 15 bp, Homo sapiens
tttagatcacatgca

SEQ ID NO: 1239037 - DNA, 15 bp, Homo sapiens
ctttagatcacatgc

SEQ ID NO: 1239038 - DNA, 15 bp, Homo sapiens
tctttagatcacatg

SEQ ID NO: 1239039 - DNA, 15 bp, Homo sapiens
atctttagatcacat

SEQ ID NO: 1239040 - DNA, 15 bp, Homo sapiens
aatctttagatcaca

SEQ ID NO: 1239041 - DNA, 15 bp, Homo sapiens
taatctttagatcac

SEQ ID NO: 1239042 - DNA, 15 bp, Homo sapiens
ttaatctttagatca

SEQ ID NO: 1239043 - DNA, 15 bp, Homo sapiens
tttaatctttagatc

SEQ ID NO: 1239044 - DNA, 15 bp, Homo sapiens
atttaatctttagat

SEQ ID NO: 1239045 - DNA, 15 bp, Homo sapiens
acattaagtgattta

SEQ ID NO: 1239046 - DNA, 15 bp, Homo sapiens
cacattaagtgattt

SEQ ID NO: 1239047 - DNA, 15 bp, Homo sapiens
gcacattaagtgatt

SEQ ID NO: 1239048 - DNA, 15 bp, Homo sapiens
ggcacattaagtgat

SEQ ID NO: 1239049 - DNA, 15 bp, Homo sapiens
gggcacattaagtga

SEQ ID NO: 1239050 - DNA, 15 bp, Homo sapiens
agggcacattaagtg

SEQ ID NO: 1239051 - DNA, 15 bp, Homo sapiens
gagggcacattaagt

SEQ ID NO: 1239052 - DNA, 15 bp, Homo sapiens
tgagggcacattaag

SEQ ID NO: 1239053 - DNA, 15 bp, Homo sapiens
ctgagggcacattaa

SEQ ID NO: 1239054 - DNA, 15 bp, Homo sapiens
tctgagggcacatta

SEQ ID NO: 1239055 - DNA, 15 bp, Homo sapiens
ttctgagggcacatt

SEQ ID NO: 1239056 - DNA, 15 bp, Homo sapiens
attctgagggcacat

SEQ ID NO: 1239057 - DNA, 15 bp, Homo sapiens
tattctgagggcaca

SEQ ID NO: 1239058 - DNA, 15 bp, Homo sapiens
atattctgagggcac

SEQ ID NO: 1239059 - DNA, 15 bp, Homo sapiens
aatattctgagggca

SEQ ID NO: 1239060 - DNA, 15 bp, Homo sapiens
aaatattctgagggc

SEQ ID NO: 1239061 - DNA, 15 bp, Homo sapiens
taaatattctgaggg

SEQ ID NO: 1239062 - DNA, 15 bp, Homo sapiens
ataaatattctgagg

SEQ ID NO: 1239063 - DNA, 15 bp, Homo sapiens
aataaatattctgag

SEQ ID NO: 1239064 - DNA, 15 bp, Homo sapiens
taataaatattctga

SEQ ID NO: 1239065 - DNA, 15 bp, Homo sapiens
ttaataaatattctg

SEQ ID NO: 1239066 - DNA, 15 bp, Homo sapiens
gttaataaatattct

SEQ ID NO: 1239067 - DNA, 15 bp, Homo sapiens
agttaataaatattc

SEQ ID NO: 1239068 - DNA, 15 bp, Homo sapiens
cagttaataaatatt

SEQ ID NO: 1239069 - DNA, 15 bp, Homo sapiens
acagttaataaatat

SEQ ID NO: 1239070 - DNA, 15 bp, Homo sapiens
aacagttaataaata

SEQ ID NO: 1239071 - DNA, 15 bp, Homo sapiens
taacagttaataaat

SEQ ID NO: 1239072 - DNA, 15 bp, Homo sapiens
ttaacagttaataaa

SEQ ID NO: 1239073 - DNA, 15 bp, Homo sapiens
cttaacagttaataa

SEQ ID NO: 1239074 - DNA, 15 bp, Homo sapiens
acttaacagttaata

SEQ ID NO: 1239075 - DNA, 15 bp, Homo sapiens
tacttaacagttaat

SEQ ID NO: 1239076 - DNA, 15 bp, Homo sapiens
ttacttaacagttaa

SEQ ID NO: 1239077 - DNA, 15 bp, Homo sapiens
cttacttaacagtta

SEQ ID NO: 1239078 - DNA, 15 bp, Homo sapiens
tcttacttaacagtt

SEQ ID NO: 1239079 - DNA, 15 bp, Homo sapiens
ttcttacttaacagt

SEQ ID NO: 1239080 - DNA, 15 bp, Homo sapiens
attcttacttaacag

SEQ ID NO: 1239081 - DNA, 15 bp, Homo sapiens
aattcttacttaaca

SEQ ID NO: 1239082 - DNA, 15 bp, Homo sapiens
taattcttacttaac

SEQ ID NO: 1239083 - DNA, 15 bp, Homo sapiens
gtaattcttacttaa

SEQ ID NO: 1239084 - DNA, 15 bp, Homo sapiens
agtaattcttactta

SEQ ID NO: 1239085 - DNA, 15 bp, Homo sapiens
tagtaattcttactt

SEQ ID NO: 1239086 - DNA, 15 bp, Homo sapiens
atagtaattcttact

SEQ ID NO: 1239087 - DNA, 15 bp, Homo sapiens
tatagtaattcttac

SEQ ID NO: 1239088 - DNA, 15 bp, Homo sapiens
atatagtaattctta

SEQ ID NO: 1239089 - DNA, 15 bp, Homo sapiens
tatatagtaattctt

SEQ ID NO: 1239090 - DNA, 15 bp, Homo sapiens
atatatagtaattct

SEQ ID NO: 1239091 - DNA, 15 bp, Homo sapiens
tatatatagtaattc

SEQ ID NO: 1239092 - DNA, 15 bp, Homo sapiens
atatatatagtaatt

SEQ ID NO: 1239093 - DNA, 15 bp, Homo sapiens
tatatatatagtaat

SEQ ID NO: 1239094 - DNA, 15 bp, Homo sapiens
atatatatatagtaa

SEQ ID NO: 1239095 - DNA, 15 bp, Homo sapiens
aatatatatatagta

SEQ ID NO: 1239096 - DNA, 15 bp, Homo sapiens
aaatatatatatagt

SEQ ID NO: 1239097 - DNA, 15 bp, Homo sapiens
aaaatatatatatag

SEQ ID NO: 1239098 - DNA, 15 bp, Homo sapiens
caaaatatatatata

SEQ ID NO: 1239099 - DNA, 15 bp, Homo sapiens
acaaaatatatatat

SEQ ID NO: 1239100 - DNA, 15 bp, Homo sapiens
cacaaaatatatata

SEQ ID NO: 1239101 - DNA, 15 bp, Homo sapiens
tcacaaaatatatat

SEQ ID NO: 1239102 - DNA, 15 bp, Homo sapiens
ttcacaaaatatata

SEQ ID NO: 1239103 - DNA, 15 bp, Homo sapiens
attcacaaaatatat

SEQ ID NO: 1239104 - DNA, 15 bp, Homo sapiens
cattcacaaaatata

SEQ ID NO: 1239105 - DNA, 15 bp, Homo sapiens
gcattcacaaaatat

SEQ ID NO: 1239106 - DNA, 15 bp, Homo sapiens
tgcattcacaaaata

SEQ ID NO: 1239107 - DNA, 15 bp, Homo sapiens
ttgcattcacaaaat

SEQ ID NO: 1239108 - DNA, 15 bp, Homo sapiens
gttgcattcacaaaa

SEQ ID NO: 1239109 - DNA, 15 bp, Homo sapiens
tgttgcattcacaaa

SEQ ID NO: 1239110 - DNA, 15 bp, Homo sapiens
atgttgcattcacaa

SEQ ID NO: 1239111 - DNA, 15 bp, Homo sapiens
aatgttgcattcaca

SEQ ID NO: 1239112 - DNA, 15 bp, Homo sapiens
aaatgttgcattcac

SEQ ID NO: 1239113 - DNA, 15 bp, Homo sapiens
taaatgttgcattca

SEQ ID NO: 1239114 - DNA, 15 bp, Homo sapiens
ttaaatgttgcattc

SEQ ID NO: 1239115 - DNA, 15 bp, Homo sapiens
tttaaatgttgcatt

SEQ ID NO: 1239116 - DNA, 15 bp, Homo sapiens
ttttaaatgttgcat

SEQ ID NO: 1239117 - DNA, 15 bp, Homo sapiens
tttttaaatgttgca

SEQ ID NO: 1239118 - DNA, 15 bp, Homo sapiens
ttttttaaatgttgc

SEQ ID NO: 1239119 - DNA, 15 bp, Homo sapiens
attttttaaatgttg

SEQ ID NO: 1239120 - DNA, 15 bp, Homo sapiens
cattttttaaatgtt

SEQ ID NO: 1239121 - DNA, 15 bp, Homo sapiens
acattttttaaatgt

SEQ ID NO: 1239122 - DNA, 15 bp, Homo sapiens
tacattttttaaatg

SEQ ID NO: 1239123 - DNA, 15 bp, Homo sapiens
atacattttttaaat

SEQ ID NO: 1239124 - DNA, 15 bp, Homo sapiens
tatacattttttaaa

SEQ ID NO: 1239125 - DNA, 15 bp, Homo sapiens
gtatacattttttaa

SEQ ID NO: 1239126 - DNA, 15 bp, Homo sapiens
tgtatacatttttta

SEQ ID NO: 1239127 - DNA, 15 bp, Homo sapiens
atgtatacatttttt

SEQ ID NO: 1239128 - DNA, 15 bp, Homo sapiens
catgtatacattttt

SEQ ID NO: 1239129 - DNA, 15 bp, Homo sapiens
gcatgtatacatttt

SEQ ID NO: 1239130 - DNA, 15 bp, Homo sapiens
agcatgtatacattt

SEQ ID NO: 1239131 - DNA, 15 bp, Homo sapiens
cagcatgtatacatt

SEQ ID NO: 1239132 - DNA, 15 bp, Homo sapiens
tcagcatgtatacat

SEQ ID NO: 1239133 - DNA, 15 bp, Homo sapiens
atcagcatgtataca

SEQ ID NO: 1239134 - DNA, 15 bp, Homo sapiens
tatcagcatgtatac

SEQ ID NO: 1239135 - DNA, 15 bp, Homo sapiens
gtatcagcatgtata

SEQ ID NO: 1239136 - DNA, 15 bp, Homo sapiens
tgtatcagcatgtat

SEQ ID NO: 1239137 - DNA, 15 bp, Homo sapiens
atgtatcagcatgta

SEQ ID NO: 1239138 - DNA, 15 bp, Homo sapiens
tatgtatcagcatgt

SEQ ID NO: 1239139 - DNA, 15 bp, Homo sapiens
atatgtatcagcatg

SEQ ID NO: 1239140 - DNA, 15 bp, Homo sapiens
tatatgtatcagcat

SEQ ID NO: 1239141 - DNA, 15 bp, Homo sapiens
ctatatgtatcagca

SEQ ID NO: 1239142 - DNA, 15 bp, Homo sapiens
tctatatgtatcagc

SEQ ID NO: 1239143 - DNA, 15 bp, Homo sapiens
atctatatgtatcag

SEQ ID NO: 1239144 - DNA, 15 bp, Homo sapiens
gatctatatgtatca

SEQ ID NO: 1239145 - DNA, 15 bp, Homo sapiens
tgatctatatgtatc

SEQ ID NO: 1239146 - DNA, 15 bp, Homo sapiens
ctgatctatatgtat

SEQ ID NO: 1239147 - DNA, 15 bp, Homo sapiens
cctgatctatatgta

SEQ ID NO: 1239148 - DNA, 15 bp, Homo sapiens
acctgatctatatgt

SEQ ID NO: 1239149 - DNA, 15 bp, Homo sapiens
aacctgatctatatg

SEQ ID NO: 1239150 - DNA, 15 bp, Homo sapiens
gaacctgatctatat

SEQ ID NO: 1239151 - DNA, 15 bp, Homo sapiens
tgaacctgatctata

SEQ ID NO: 1239152 - DNA, 15 bp, Homo sapiens
atgaacctgatctat

SEQ ID NO: 1239153 - DNA, 15 bp, Homo sapiens
tatgaacctgatcta

SEQ ID NO: 1239154 - DNA, 15 bp, Homo sapiens
ttatgaacctgatct

SEQ ID NO: 1239155 - DNA, 15 bp, Homo sapiens
gttatgaacctgatc

SEQ ID NO: 1239156 - DNA, 15 bp, Homo sapiens
agttatgaacctgat

SEQ ID NO: 1239157 - DNA, 15 bp, Homo sapiens
aagttatgaacctga

SEQ ID NO: 1239158 - DNA, 15 bp, Homo sapiens
aaagttatgaacctg

SEQ ID NO: 1239159 - DNA, 15 bp, Homo sapiens
aaaagttatgaacct

SEQ ID NO: 1239160 - DNA, 15 bp, Homo sapiens
taaaagttatgaacc

SEQ ID NO: 1239161 - DNA, 15 bp, Homo sapiens
ttaaaagttatgaac

SEQ ID NO: 1239162 - DNA, 15 bp, Homo sapiens
gttaaaagttatgaa

SEQ ID NO: 1239163 - DNA, 15 bp, Homo sapiens
ggttaaaagttatga

SEQ ID NO: 1239164 - DNA, 15 bp, Homo sapiens
aggttaaaagttatg

SEQ ID NO: 1239165 - DNA, 15 bp, Homo sapiens
gaggttaaaagttat

SEQ ID NO: 1239166 - DNA, 15 bp, Homo sapiens
agaggttaaaagtta

SEQ ID NO: 1239167 - DNA, 15 bp, Homo sapiens
cagaggttaaaagtt

SEQ ID NO: 1239168 - DNA, 15 bp, Homo sapiens
tcagaggttaaaagt

SEQ ID NO: 1239169 - DNA, 15 bp, Homo sapiens
ttcagaggttaaaag

SEQ ID NO: 1239170 - DNA, 15 bp, Homo sapiens
cttcagaggttaaaa

SEQ ID NO: 1239171 - DNA, 15 bp, Homo sapiens
acttcagaggttaaa

SEQ ID NO: 1239172 - DNA, 15 bp, Homo sapiens
tacttcagaggttaa

SEQ ID NO: 1239173 - DNA, 15 bp, Homo sapiens
atacttcagaggtta

SEQ ID NO: 1239174 - DNA, 15 bp, Homo sapiens
tatacttcagaggtt

SEQ ID NO: 1239175 - DNA, 15 bp, Homo sapiens
ctatacttcagaggt

SEQ ID NO: 1239176 - DNA, 15 bp, Homo sapiens
actatacttcagagg

SEQ ID NO: 1239177 - DNA, 15 bp, Homo sapiens
aactatacttcagag

SEQ ID NO: 1239178 - DNA, 15 bp, Homo sapiens
gaactatacttcaga

SEQ ID NO: 1239179 - DNA, 15 bp, Homo sapiens
agaactatacttcag

SEQ ID NO: 1239180 - DNA, 15 bp, Homo sapiens
aagaactatacttca

SEQ ID NO: 1239181 - DNA, 15 bp, Homo sapiens
taagaactatacttc

SEQ ID NO: 1239182 - DNA, 15 bp, Homo sapiens
ttaagaactatactt

SEQ ID NO: 1239183 - DNA, 15 bp, Homo sapiens
attaagaactatact

SEQ ID NO: 1239184 - DNA, 15 bp, Homo sapiens
tattaagaactatac

SEQ ID NO: 1239185 - DNA, 15 bp, Homo sapiens
atattaagaactata

SEQ ID NO: 1239186 - DNA, 15 bp, Homo sapiens
gatattaagaactat

SEQ ID NO: 1239187 - DNA, 15 bp, Homo sapiens
agatattaagaacta

SEQ ID NO: 1239188 - DNA, 15 bp, Homo sapiens
cagatattaagaact

SEQ ID NO: 1239189 - DNA, 15 bp, Homo sapiens
acagatattaagaac

SEQ ID NO: 1239190 - DNA, 15 bp, Homo sapiens
cacagatattaagaa

SEQ ID NO: 1239191 - DNA, 15 bp, Homo sapiens
acacagatattaaga

SEQ ID NO: 1239192 - DNA, 15 bp, Homo sapiens
tacacagatattaag

SEQ ID NO: 1239193 - DNA, 15 bp, Homo sapiens
atacacagatattaa

SEQ ID NO: 1239194 - DNA, 15 bp, Homo sapiens
gatacacagatatta

SEQ ID NO: 1239195 - DNA, 15 bp, Homo sapiens
tgatacacagatatt

SEQ ID NO: 1239196 - DNA, 15 bp, Homo sapiens
atgatacacagatat

SEQ ID NO: 1239197 - DNA, 15 bp, Homo sapiens
tatgatacacagata

SEQ ID NO: 1239198 - DNA, 15 bp, Homo sapiens
atatgatacacagat

SEQ ID NO: 1239199 - DNA, 15 bp, Homo sapiens
aatatgatacacaga

SEQ ID NO: 1239200 - DNA, 15 bp, Homo sapiens
aaatatgatacacag

SEQ ID NO: 1239201 - DNA, 15 bp, Homo sapiens
aaaatatgatacaca

SEQ ID NO: 1239202 - DNA, 15 bp, Homo sapiens
taaaatatgatacac

SEQ ID NO: 1239203 - DNA, 15 bp, Homo sapiens
ataaaatatgataca

SEQ ID NO: 1239204 - DNA, 15 bp, Homo sapiens
aataaaatatgatac

SEQ ID NO: 1239205 - DNA, 15 bp, Homo sapiens
aaataaaatatgata

SEQ ID NO: 1239206 - DNA, 15 bp, Homo sapiens
taaataaaatatgat

SEQ ID NO: 1239207 - DNA, 15 bp, Homo sapiens
ataaataaaatatga

SEQ ID NO: 1239208 - DNA, 15 bp, Homo sapiens
gataaataaaatatg

SEQ ID NO: 1239209 - DNA, 15 bp, Homo sapiens
tgataaataaaatat

SEQ ID NO: 1239210 - DNA, 15 bp, Homo sapiens
atgataaataaaata

SEQ ID NO: 1239211 - DNA, 15 bp, Homo sapiens
gatgataaataaaat

SEQ ID NO: 1239212 - DNA, 15 bp, Homo sapiens
ggatgataaataaaa

SEQ ID NO: 1239213 - DNA, 15 bp, Homo sapiens
gggatgataaataaa

SEQ ID NO: 1239214 - DNA, 15 bp, Homo sapiens
agggatgataaataa

SEQ ID NO: 1239215 - DNA, 15 bp, Homo sapiens
gagggatgataaata

SEQ ID NO: 1239216 - DNA, 15 bp, Homo sapiens
agagggatgataaat

SEQ ID NO: 1239217 - DNA, 15 bp, Homo sapiens
tagagggatgataaa

SEQ ID NO: 1239218 - DNA, 15 bp, Homo sapiens
atagagggatgataa

SEQ ID NO: 1239219 - DNA, 15 bp, Homo sapiens
aatagagggatgata

SEQ ID NO: 1239220 - DNA, 15 bp, Homo sapiens
aaatagagggatgat

SEQ ID NO: 1239221 - DNA, 15 bp, Homo sapiens
aaaatagagggatga

SEQ ID NO: 1239222 - DNA, 15 bp, Homo sapiens
aaaaatagagggatg

SEQ ID NO: 1239223 - DNA, 15 bp, Homo sapiens
caaaaatagagggat

SEQ ID NO: 1239224 - DNA, 15 bp, Homo sapiens
ccaaaaatagaggga

SEQ ID NO: 1239225 - DNA, 15 bp, Homo sapiens
gccaaaaatagaggg

SEQ ID NO: 1239226 - DNA, 15 bp, Homo sapiens
tgccaaaaatagagg

SEQ ID NO: 1239227 - DNA, 15 bp, Homo sapiens
atgccaaaaatagag

SEQ ID NO: 1239228 - DNA, 15 bp, Homo sapiens
gatgccaaaaataga

SEQ ID NO: 1239229 - DNA, 15 bp, Homo sapiens
ggatgccaaaaatag

SEQ ID NO: 1239230 - DNA, 15 bp, Homo sapiens
tggatgccaaaaata

SEQ ID NO: 1239231 - DNA, 15 bp, Homo sapiens
atggatgccaaaaat

SEQ ID NO: 1239232 - DNA, 15 bp, Homo sapiens
catggatgccaaaaa

SEQ ID NO: 1239233 - DNA, 15 bp, Homo sapiens
ccatggatgccaaaa

SEQ ID NO: 1239234 - DNA, 15 bp, Homo sapiens
accatggatgccaaa

SEQ ID NO: 1239235 - DNA, 15 bp, Homo sapiens
caccatggatgccaa

SEQ ID NO: 1239236 - DNA, 15 bp, Homo sapiens
acaccatggatgcca

SEQ ID NO: 1239237 - DNA, 15 bp, Homo sapiens
aacaccatggatgcc

SEQ ID NO: 1239238 - DNA, 15 bp, Homo sapiens
aaacaccatggatgc

SEQ ID NO: 1239239 - DNA, 15 bp, Homo sapiens
aaaacaccatggatg

SEQ ID NO: 1239240 - DNA, 15 bp, Homo sapiens
gaaaacaccatggat

SEQ ID NO: 1239241 - DNA, 15 bp, Homo sapiens
agaaaacaccatgga

SEQ ID NO: 1239242 - DNA, 15 bp, Homo sapiens
tagaaaacaccatgg

SEQ ID NO: 1239243 - DNA, 15 bp, Homo sapiens
ctagaaaacaccatg

SEQ ID NO: 1239244 - DNA, 15 bp, Homo sapiens
actagaaaacaccat

SEQ ID NO: 1239245 - DNA, 15 bp, Homo sapiens
aactagaaaacacca

SEQ ID NO: 1239246 - DNA, 15 bp, Homo sapiens
aaactagaaaacacc

SEQ ID NO: 1239247 - DNA, 15 bp, Homo sapiens
gaaactagaaaacac

SEQ ID NO: 1239248 - DNA, 15 bp, Homo sapiens
agaaactagaaaaca

SEQ ID NO: 1239249 - DNA, 15 bp, Homo sapiens
tagaaactagaaaac

SEQ ID NO: 1239250 - DNA, 15 bp, Homo sapiens
atagaaactagaaaa

SEQ ID NO: 1239251 - DNA, 15 bp, Homo sapiens
tatagaaactagaaa

SEQ ID NO: 1239252 - DNA, 15 bp, Homo sapiens
ctatagaaactagaa

SEQ ID NO: 1239253 - DNA, 15 bp, Homo sapiens
actatagaaactaga

SEQ ID NO: 1239254 - DNA, 15 bp, Homo sapiens
gactatagaaactag

SEQ ID NO: 1239255 - DNA, 15 bp, Homo sapiens
tgactatagaaacta

SEQ ID NO: 1239256 - DNA, 15 bp, Homo sapiens
gtgactatagaaact

SEQ ID NO: 1239257 - DNA, 15 bp, Homo sapiens
tctgtgactatagaa

SEQ ID NO: 1239258 - DNA, 15 bp, Homo sapiens
gtctgtgactataga

SEQ ID NO: 1239259 - DNA, 15 bp, Homo sapiens
tgtctgtgactatag

SEQ ID NO: 1239260 - DNA, 15 bp, Homo sapiens
ttgtctgtgactata

SEQ ID NO: 1239261 - DNA, 15 bp, Homo sapiens
attgtctgtgactat

SEQ ID NO: 1239262 - DNA, 15 bp, Homo sapiens
aattgtctgtgacta

SEQ ID NO: 1239263 - DNA, 15 bp, Homo sapiens
gaattgtctgtgact

SEQ ID NO: 1239264 - DNA, 15 bp, Homo sapiens
agaattgtctgtgac

SEQ ID NO: 1239265 - DNA, 15 bp, Homo sapiens
cagaattgtctgtga

SEQ ID NO: 1239266 - DNA, 15 bp, Homo sapiens
gcagaattgtctgtg

SEQ ID NO: 1239267 - DNA, 15 bp, Homo sapiens
tgcagaattgtctgt

SEQ ID NO: 1239268 - DNA, 15 bp, Homo sapiens
ctgcagaattgtctg

SEQ ID NO: 1239269 - DNA, 15 bp, Homo sapiens
actgcagaattgtct

SEQ ID NO: 1239270 - DNA, 15 bp, Homo sapiens
tactgcagaattgtc

SEQ ID NO: 1239271 - DNA, 15 bp, Homo sapiens
atactgcagaattgt

SEQ ID NO: 1239272 - DNA, 15 bp, Homo sapiens
aatactgcagaattg

SEQ ID NO: 1239273 - DNA, 15 bp, Homo sapiens
aaatactgcagaatt

SEQ ID NO: 1239274 - DNA, 15 bp, Homo sapiens
aaaatactgcagaat

SEQ ID NO: 1239275 - DNA, 15 bp, Homo sapiens
caaaatactgcagaa

SEQ ID NO: 1239276 - DNA, 15 bp, Homo sapiens
acaaaatactgcaga

SEQ ID NO: 1239277 - DNA, 15 bp, Homo sapiens
aacaaaatactgcag

SEQ ID NO: 1239278 - DNA, 15 bp, Homo sapiens
gaacaaaatactgca

SEQ ID NO: 1239279 - DNA, 15 bp, Homo sapiens
tgaacaaaatactgc

SEQ ID NO: 1239280 - DNA, 15 bp, Homo sapiens
ttgaacaaaatactg

SEQ ID NO: 1239281 - DNA, 15 bp, Homo sapiens
attgaacaaaatact

SEQ ID NO: 1239282 - DNA, 15 bp, Homo sapiens
aattgaacaaaatac

SEQ ID NO: 1239283 - DNA, 15 bp, Homo sapiens
aaattgaacaaaata

SEQ ID NO: 1239284 - DNA, 15 bp, Homo sapiens
aaaattgaacaaaat

SEQ ID NO: 1239285 - DNA, 15 bp, Homo sapiens
aaaaattgaacaaaa

SEQ ID NO: 1239286 - DNA, 15 bp, Homo sapiens
aaaaaattgaacaaa

SEQ ID NO: 1239287 - DNA, 15 bp, Homo sapiens
aaaaaaattgaacaa

SEQ ID NO: 1239288 - DNA, 15 bp, Homo sapiens
caaaaaaattgaaca

SEQ ID NO: 1239289 - DNA, 15 bp, Homo sapiens
ccaaaaaaattgaac

SEQ ID NO: 1239290 - DNA, 15 bp, Homo sapiens
accaaaaaaattgaa

SEQ ID NO: 1239291 - DNA, 15 bp, Homo sapiens
taccaaaaaaattga

SEQ ID NO: 1239292 - DNA, 15 bp, Homo sapiens
ttaccaaaaaaattg

SEQ ID NO: 1239293 - DNA, 15 bp, Homo sapiens
cttaccaaaaaaatt

SEQ ID NO: 1239294 - DNA, 15 bp, Homo sapiens
acttaccaaaaaaat

SEQ ID NO: 1239295 - DNA, 15 bp, Homo sapiens
tacttaccaaaaaaa

SEQ ID NO: 1239296 - DNA, 15 bp, Homo sapiens
ttacttaccaaaaaa

SEQ ID NO: 1239297 - DNA, 15 bp, Homo sapiens
attacttaccaaaaa

SEQ ID NO: 1239298 - DNA, 15 bp, Homo sapiens
tattacttaccaaaa

SEQ ID NO: 1239299 - DNA, 15 bp, Homo sapiens
atattacttaccaaa

SEQ ID NO: 1239300 - DNA, 15 bp, Homo sapiens
catattacttaccaa

SEQ ID NO: 1239301 - DNA, 15 bp, Homo sapiens
gcatattacttacca

SEQ ID NO: 1239302 - DNA, 15 bp, Homo sapiens
tgcatattacttacc

SEQ ID NO: 1239303 - DNA, 15 bp, Homo sapiens
ttgcatattacttac

SEQ ID NO: 1239304 - DNA, 15 bp, Homo sapiens
tttgcatattactta

SEQ ID NO: 1239305 - DNA, 15 bp, Homo sapiens
ttttgcatattactt

SEQ ID NO: 1239306 - DNA, 15 bp, Homo sapiens
tttttgcatattact

SEQ ID NO: 1239307 - DNA, 15 bp, Homo sapiens
atttttgcatattac

SEQ ID NO: 1239308 - DNA, 15 bp, Homo sapiens
aatttttgcatatta

SEQ ID NO: 1239309 - DNA, 15 bp, Homo sapiens
aaatttttgcatatt

SEQ ID NO: 1239310 - DNA, 15 bp, Homo sapiens
gaaatttttgcatat

SEQ ID NO: 1239311 - DNA, 15 bp, Homo sapiens
agaaatttttgcata

SEQ ID NO: 1239312 - DNA, 15 bp, Homo sapiens
aagaaatttttgcat

SEQ ID NO: 1239313 - DNA, 15 bp, Homo sapiens
aaagaaatttttgca

SEQ ID NO: 1239314 - DNA, 15 bp, Homo sapiens
taaagaaatttttgc

SEQ ID NO: 1239315 - DNA, 15 bp, Homo sapiens
ctaaagaaatttttg

SEQ ID NO: 1239316 - DNA, 15 bp, Homo sapiens
cctaaagaaattttt

SEQ ID NO: 1239317 - DNA, 15 bp, Homo sapiens
ccctaaagaaatttt

SEQ ID NO: 1239318 - DNA, 15 bp, Homo sapiens
accctaaagaaattt

SEQ ID NO: 1239319 - DNA, 15 bp, Homo sapiens
taccctaaagaaatt

SEQ ID NO: 1239320 - DNA, 15 bp, Homo sapiens
ctaccctaaagaaat

SEQ ID NO: 1239321 - DNA, 15 bp, Homo sapiens
tctaccctaaagaaa

SEQ ID NO: 1239322 - DNA, 15 bp, Homo sapiens
atctaccctaaagaa

SEQ ID NO: 1239323 - DNA, 15 bp, Homo sapiens
tatctaccctaaaga

SEQ ID NO: 1239324 - DNA, 15 bp, Homo sapiens
gtatctaccctaaag

SEQ ID NO: 1239325 - DNA, 15 bp, Homo sapiens
ggtatctaccctaaa

SEQ ID NO: 1239326 - DNA, 15 bp, Homo sapiens
aggtatctaccctaa

SEQ ID NO: 1239327 - DNA, 15 bp, Homo sapiens
taggtatctacccta

SEQ ID NO: 1239328 - DNA, 15 bp, Homo sapiens
ctaggtatctaccct

SEQ ID NO: 1239329 - DNA, 15 bp, Homo sapiens
tctaggtatctaccc

SEQ ID NO: 1239330 - DNA, 15 bp, Homo sapiens
ttctaggtatctacc

SEQ ID NO: 1239331 - DNA, 15 bp, Homo sapiens
cttctaggtatctac

SEQ ID NO: 1239332 - DNA, 15 bp, Homo sapiens
acttctaggtatcta

SEQ ID NO: 1239333 - DNA, 15 bp, Homo sapiens
cacttctaggtatct

SEQ ID NO: 1239334 - DNA, 15 bp, Homo sapiens
ccacttctaggtatc

SEQ ID NO: 1239335 - DNA, 15 bp, Homo sapiens
tccacttctaggtat

SEQ ID NO: 1239336 - DNA, 15 bp, Homo sapiens
ttccacttctaggta

SEQ ID NO: 1239337 - DNA, 15 bp, Homo sapiens
attccacttctaggt

SEQ ID NO: 1239338 - DNA, 15 bp, Homo sapiens
gattccacttctagg

SEQ ID NO: 1239339 - DNA, 15 bp, Homo sapiens
agattccacttctag

SEQ ID NO: 1239340 - DNA, 15 bp, Homo sapiens
cagattccacttcta

SEQ ID NO: 1239341 - DNA, 15 bp, Homo sapiens
ccagattccacttct

SEQ ID NO: 1239342 - DNA, 15 bp, Homo sapiens
accagattccacttc

SEQ ID NO: 1239343 - DNA, 15 bp, Homo sapiens
gaccagattccactt

SEQ ID NO: 1239344 - DNA, 15 bp, Homo sapiens
cgaccagattccact

SEQ ID NO: 1239345 - DNA, 15 bp, Homo sapiens
acgaccagattccac

SEQ ID NO: 1239346 - DNA, 15 bp, Homo sapiens
tacgaccagattcca

SEQ ID NO: 1239347 - DNA, 15 bp, Homo sapiens
ctacgaccagattcc

SEQ ID NO: 1239348 - DNA, 15 bp, Homo sapiens
cctacgaccagattc

SEQ ID NO: 1239349 - DNA, 15 bp, Homo sapiens
tcctacgaccagatt

SEQ ID NO: 1239350 - DNA, 15 bp, Homo sapiens
atcctacgaccagat

SEQ ID NO: 1239351 - DNA, 15 bp, Homo sapiens
tatcctacgaccaga

SEQ ID NO: 1239352 - DNA, 15 bp, Homo sapiens
atatcctacgaccag

SEQ ID NO: 1239353 - DNA, 15 bp, Homo sapiens
catatcctacgacca

SEQ ID NO: 1239354 - DNA, 15 bp, Homo sapiens
ccatatcctacgacc

SEQ ID NO: 1239355 - DNA, 15 bp, Homo sapiens
tccatatcctacgac

SEQ ID NO: 1239356 - DNA, 15 bp, Homo sapiens
gtccatatcctacga

SEQ ID NO: 1239357 - DNA, 15 bp, Homo sapiens
tgtccatatcctacg

SEQ ID NO: 1239358 - DNA, 15 bp, Homo sapiens
atgtccatatcctac

SEQ ID NO: 1239359 - DNA, 15 bp, Homo sapiens
aatgtccatatccta

SEQ ID NO: 1239360 - DNA, 15 bp, Homo sapiens
aaatgtccatatcct

SEQ ID NO: 1239361 - DNA, 15 bp, Homo sapiens
aaaatgtccatatcc

SEQ ID NO: 1239362 - DNA, 15 bp, Homo sapiens
aaaaatgtccatatc

SEQ ID NO: 1239363 - DNA, 15 bp, Homo sapiens
taaaaatgtccatat

SEQ ID NO: 1239364 - DNA, 15 bp, Homo sapiens
ctaaaaatgtccata

SEQ ID NO: 1239365 - DNA, 15 bp, Homo sapiens
actaaaaatgtccat

SEQ ID NO: 1239366 - DNA, 15 bp, Homo sapiens
aactaaaaatgtcca

SEQ ID NO: 1239367 - DNA, 15 bp, Homo sapiens
aaactaaaaatgtcc

SEQ ID NO: 1239368 - DNA, 15 bp, Homo sapiens
aaaactaaaaatgtc

SEQ ID NO: 1239369 - DNA, 15 bp, Homo sapiens
taaaactaaaaatgt

SEQ ID NO: 1239370 - DNA, 15 bp, Homo sapiens
ttaaaactaaaaatg

SEQ ID NO: 1239371 - DNA, 15 bp, Homo sapiens
attaaaactaaaaat

SEQ ID NO: 1239372 - DNA, 15 bp, Homo sapiens
gattaaaactaaaaa

SEQ ID NO: 1239373 - DNA, 15 bp, Homo sapiens
tgattaaaactaaaa

SEQ ID NO: 1239374 - DNA, 15 bp, Homo sapiens
ctgattaaaactaaa

SEQ ID NO: 1239375 - DNA, 15 bp, Homo sapiens
tctgattaaaactaa

SEQ ID NO: 1239376 - DNA, 15 bp, Homo sapiens
ttctgattaaaacta

SEQ ID NO: 1239377 - DNA, 15 bp, Homo sapiens
gttctgattaaaact

SEQ ID NO: 1239378 - DNA, 15 bp, Homo sapiens
agttctgattaaaac

SEQ ID NO: 1239379 - DNA, 15 bp, Homo sapiens
tagttctgattaaaa

SEQ ID NO: 1239380 - DNA, 15 bp, Homo sapiens
gtagttctgattaaa

SEQ ID NO: 1239381 - DNA, 15 bp, Homo sapiens
tgtagttctgattaa

SEQ ID NO: 1239382 - DNA, 15 bp, Homo sapiens
ttgtagttctgatta

SEQ ID NO: 1239383 - DNA, 15 bp, Homo sapiens
tttgtagttctgatt

SEQ ID NO: 1239384 - DNA, 15 bp, Homo sapiens
ctttgtagttctgat

SEQ ID NO: 1239385 - DNA, 15 bp, Homo sapiens
actttgtagttctga

SEQ ID NO: 1239386 - DNA, 15 bp, Homo sapiens
aactttgtagttctg

SEQ ID NO: 1239387 - DNA, 15 bp, Homo sapiens
aaactttgtagttct

SEQ ID NO: 1239388 - DNA, 15 bp, Homo sapiens
aaaactttgtagttc

SEQ ID NO: 1239389 - DNA, 15 bp, Homo sapiens
aaaaactttgtagtt

SEQ ID NO: 1239390 - DNA, 15 bp, Homo sapiens
gaaaaactttgtagt

SEQ ID NO: 1239391 - DNA, 15 bp, Homo sapiens
agaaaaactttgtag

SEQ ID NO: 1239392 - DNA, 15 bp, Homo sapiens
gagaaaaactttgta

SEQ ID NO: 1239393 - DNA, 15 bp, Homo sapiens
ggagaaaaactttgt

SEQ ID NO: 1239394 - DNA, 15 bp, Homo sapiens
tggagaaaaactttg

SEQ ID NO: 1239395 - DNA, 15 bp, Homo sapiens
ttggagaaaaacttt

SEQ ID NO: 1239396 - DNA, 15 bp, Homo sapiens
tttggagaaaaactt

SEQ ID NO: 1239397 - DNA, 15 bp, Homo sapiens
atttggagaaaaact

SEQ ID NO: 1239398 - DNA, 15 bp, Homo sapiens
catttggagaaaaac

SEQ ID NO: 1239399 - DNA, 15 bp, Homo sapiens
acatttggagaaaaa

SEQ ID NO: 1239400 - DNA, 15 bp, Homo sapiens
gacatttggagaaaa

SEQ ID NO: 1239401 - DNA, 15 bp, Homo sapiens
ggacatttggagaaa

SEQ ID NO: 1239402 - DNA, 15 bp, Homo sapiens
aggacatttggagaa

SEQ ID NO: 1239403 - DNA, 15 bp, Homo sapiens
caggacatttggaga

SEQ ID NO: 1239404 - DNA, 15 bp, Homo sapiens
acaggacatttggag

SEQ ID NO: 1239405 - DNA, 15 bp, Homo sapiens
tacaggacatttgga

SEQ ID NO: 1239406 - DNA, 15 bp, Homo sapiens
ttacaggacatttgg

SEQ ID NO: 1239407 - DNA, 15 bp, Homo sapiens
cttacaggacatttg

SEQ ID NO: 1239408 - DNA, 15 bp, Homo sapiens
tcttacaggacattt

SEQ ID NO: 1239409 - DNA, 15 bp, Homo sapiens
ttcttacaggacatt

SEQ ID NO: 1239410 - DNA, 15 bp, Homo sapiens
attcttacaggacat

SEQ ID NO: 1239411 - DNA, 15 bp, Homo sapiens
aattcttacaggaca

SEQ ID NO: 1239412 - DNA, 15 bp, Homo sapiens
aaattcttacaggac

SEQ ID NO: 1239413 - DNA, 15 bp, Homo sapiens
taaattcttacagga

SEQ ID NO: 1239414 - DNA, 15 bp, Homo sapiens
ataaattcttacagg

SEQ ID NO: 1239415 - DNA, 15 bp, Homo sapiens
tataaattcttacag

SEQ ID NO: 1239416 - DNA, 15 bp, Homo sapiens
gtataaattcttaca

SEQ ID NO: 1239417 - DNA, 15 bp, Homo sapiens
agtataaattcttac

SEQ ID NO: 1239418 - DNA, 15 bp, Homo sapiens
gagtataaattctta

SEQ ID NO: 1239419 - DNA, 15 bp, Homo sapiens
ggagtataaattctt

SEQ ID NO: 1239420 - DNA, 15 bp, Homo sapiens
gggagtataaattct

SEQ ID NO: 1239421 - DNA, 15 bp, Homo sapiens
tgggagtataaattc

SEQ ID NO: 1239422 - DNA, 15 bp, Homo sapiens
gtgggagtataaatt

SEQ ID NO: 1239423 - DNA, 15 bp, Homo sapiens
agtgggagtataaat

SEQ ID NO: 1239424 - DNA, 15 bp, Homo sapiens
cagtgggagtataaa

SEQ ID NO: 1239425 - DNA, 15 bp, Homo sapiens
ccagtgggagtataa

SEQ ID NO: 1239426 - DNA, 15 bp, Homo sapiens
accagtgggagtata

SEQ ID NO: 1239427 - DNA, 15 bp, Homo sapiens
aaccagtgggagtat

SEQ ID NO: 1239428 - DNA, 15 bp, Homo sapiens
gaaccagtgggagta

SEQ ID NO: 1239429 - DNA, 15 bp, Homo sapiens
tgaaccagtgggagt

SEQ ID NO: 1239430 - DNA, 15 bp, Homo sapiens
ttgaaccagtgggag

SEQ ID NO: 1239431 - DNA, 15 bp, Homo sapiens
gttgaaccagtggga

SEQ ID NO: 1239432 - DNA, 15 bp, Homo sapiens
tgttgaaccagtggg

SEQ ID NO: 1239433 - DNA, 15 bp, Homo sapiens
atgttgaaccagtgg

SEQ ID NO: 1239434 - DNA, 15 bp, Homo sapiens
catgttgaaccagtg

SEQ ID NO: 1239435 - DNA, 15 bp, Homo sapiens
tcatgttgaaccagt

SEQ ID NO: 1239436 - DNA, 15 bp, Homo sapiens
ctcatgttgaaccag

SEQ ID NO: 1239437 - DNA, 15 bp, Homo sapiens
tctcatgttgaacca

SEQ ID NO: 1239438 - DNA, 15 bp, Homo sapiens
ttctcatgttgaacc

SEQ ID NO: 1239439 - DNA, 15 bp, Homo sapiens
attctcatgttgaac

SEQ ID NO: 1239440 - DNA, 15 bp, Homo sapiens
tattctcatgttgaa

SEQ ID NO: 1239441 - DNA, 15 bp, Homo sapiens
gtattctcatgttga

SEQ ID NO: 1239442 - DNA, 15 bp, Homo sapiens
agtattctcatgttg

SEQ ID NO: 1239443 - DNA, 15 bp, Homo sapiens
gagtattctcatgtt

SEQ ID NO: 1239444 - DNA, 15 bp, Homo sapiens
tgagtattctcatgt

SEQ ID NO: 1239445 - DNA, 15 bp, Homo sapiens
atgagtattctcatg

SEQ ID NO: 1239446 - DNA, 15 bp, Homo sapiens
aatgagtattctcat

SEQ ID NO: 1239447 - DNA, 15 bp, Homo sapiens
aaatgagtattctca

SEQ ID NO: 1239448 - DNA, 15 bp, Homo sapiens
gaaatgagtattctc

SEQ ID NO: 1239449 - DNA, 15 bp, Homo sapiens
agaaatgagtattct

SEQ ID NO: 1239450 - DNA, 15 bp, Homo sapiens
gagaaatgagtattc

SEQ ID NO: 1239451 - DNA, 15 bp, Homo sapiens
agagaaatgagtatt

SEQ ID NO: 1239452 - DNA, 15 bp, Homo sapiens
tagagaaatgagtat

SEQ ID NO: 1239453 - DNA, 15 bp, Homo sapiens
atagagaaatgagta

SEQ ID NO: 1239454 - DNA, 15 bp, Homo sapiens
tatagagaaatgagt

SEQ ID NO: 1239455 - DNA, 15 bp, Homo sapiens
gtatagagaaatgag

SEQ ID NO: 1239456 - DNA, 15 bp, Homo sapiens
tgtatagagaaatga

SEQ ID NO: 1239457 - DNA, 15 bp, Homo sapiens
atgtatagagaaatg

SEQ ID NO: 1239458 - DNA, 15 bp, Homo sapiens
aatgtatagagaaat

SEQ ID NO: 1239459 - DNA, 15 bp, Homo sapiens
aaatgtatagagaaa

SEQ ID NO: 1239460 - DNA, 15 bp, Homo sapiens
taaatgtatagagaa

SEQ ID NO: 1239461 - DNA, 15 bp, Homo sapiens
ttaaatgtatagaga

SEQ ID NO: 1239462 - DNA, 15 bp, Homo sapiens
cttaaatgtatagag

SEQ ID NO: 1239463 - DNA, 15 bp, Homo sapiens
tcttaaatgtataga

SEQ ID NO: 1239464 - DNA, 15 bp, Homo sapiens
ttcttaaatgtatag

SEQ ID NO: 1239465 - DNA, 15 bp, Homo sapiens
attcttaaatgtata

SEQ ID NO: 1239466 - DNA, 15 bp, Homo sapiens
tattcttaaatgtat

SEQ ID NO: 1239467 - DNA, 15 bp, Homo sapiens
atattcttaaatgta

SEQ ID NO: 1239468 - DNA, 15 bp, Homo sapiens
tatattcttaaatgt

SEQ ID NO: 1239469 - DNA, 15 bp, Homo sapiens
atatattcttaaatg

SEQ ID NO: 1239470 - DNA, 15 bp, Homo sapiens
catatattcttaaat

SEQ ID NO: 1239471 - DNA, 15 bp, Homo sapiens
gcatatattcttaaa

SEQ ID NO: 1239472 - DNA, 15 bp, Homo sapiens
agcatatattcttaa

SEQ ID NO: 1239473 - DNA, 15 bp, Homo sapiens
aagcatatattctta

SEQ ID NO: 1239474 - DNA, 15 bp, Homo sapiens
taagcatatattctt

SEQ ID NO: 1239475 - DNA, 15 bp, Homo sapiens
ataagcatatattct

SEQ ID NO: 1239476 - DNA, 15 bp, Homo sapiens
aataagcatatattc

SEQ ID NO: 1239477 - DNA, 15 bp, Homo sapiens
taataagcatatatt

SEQ ID NO: 1239478 - DNA, 15 bp, Homo sapiens
ataataagcatatat

SEQ ID NO: 1239479 - DNA, 15 bp, Homo sapiens
aataataagcatata

SEQ ID NO: 1239480 - DNA, 15 bp, Homo sapiens
caataataagcatat

SEQ ID NO: 1239481 - DNA, 15 bp, Homo sapiens
gcaataataagcata

SEQ ID NO: 1239482 - DNA, 15 bp, Homo sapiens
ggcaataataagcat

SEQ ID NO: 1239483 - DNA, 15 bp, Homo sapiens
aggcaataataagca

SEQ ID NO: 1239484 - DNA, 15 bp, Homo sapiens
aaggcaataataagc

SEQ ID NO: 1239485 - DNA, 15 bp, Homo sapiens
aaaggcaataataag

SEQ ID NO: 1239486 - DNA, 15 bp, Homo sapiens
taaaggcaataataa

SEQ ID NO: 1239487 - DNA, 15 bp, Homo sapiens
ttaaaggcaataata

SEQ ID NO: 1239488 - DNA, 15 bp, Homo sapiens
attaaaggcaataat

SEQ ID NO: 1239489 - DNA, 15 bp, Homo sapiens
gattaaaggcaataa

SEQ ID NO: 1239490 - DNA, 15 bp, Homo sapiens
agattaaaggcaata

SEQ ID NO: 1239491 - DNA, 15 bp, Homo sapiens
aagattaaaggcaat

SEQ ID NO: 1239492 - DNA, 15 bp, Homo sapiens
caagattaaaggcaa

SEQ ID NO: 1239493 - DNA, 15 bp, Homo sapiens
tcaagattaaaggca

SEQ ID NO: 1239494 - DNA, 15 bp, Homo sapiens
ttcaagattaaaggc

SEQ ID NO: 1239495 - DNA, 15 bp, Homo sapiens
gttcaagattaaagg

SEQ ID NO: 1239496 - DNA, 15 bp, Homo sapiens
tgttcaagattaaag

SEQ ID NO: 1239497 - DNA, 15 bp, Homo sapiens
ttgttcaagattaaa

SEQ ID NO: 1239498 - DNA, 15 bp, Homo sapiens
attgttcaagattaa

SEQ ID NO: 1239499 - DNA, 15 bp, Homo sapiens
tattgttcaagatta

SEQ ID NO: 1239500 - DNA, 15 bp, Homo sapiens
atattgttcaagatt

SEQ ID NO: 1239501 - DNA, 15 bp, Homo sapiens
tatattgttcaagat

SEQ ID NO: 1239502 - DNA, 15 bp, Homo sapiens
ttatattgttcaaga

SEQ ID NO: 1239503 - DNA, 15 bp, Homo sapiens
attatattgttcaag

SEQ ID NO: 1239504 - DNA, 15 bp, Homo sapiens
cattatattgttcaa

SEQ ID NO: 1239505 - DNA, 15 bp, Homo sapiens
tcattatattgttca

SEQ ID NO: 1239506 - DNA, 15 bp, Homo sapiens
ctcattatattgttc

SEQ ID NO: 1239507 - DNA, 15 bp, Homo sapiens
actcattatattgtt

SEQ ID NO: 1239508 - DNA, 15 bp, Homo sapiens
cactcattatattgt

SEQ ID NO: 1239509 - DNA, 15 bp, Homo sapiens
tcactcattatattg

SEQ ID NO: 1239510 - DNA, 15 bp, Homo sapiens
ttcactcattatatt

SEQ ID NO: 1239511 - DNA, 15 bp, Homo sapiens
tttcactcattatat

SEQ ID NO: 1239512 - DNA, 15 bp, Homo sapiens
atttcactcattata

SEQ ID NO: 1239513 - DNA, 15 bp, Homo sapiens
tatttcactcattat

SEQ ID NO: 1239514 - DNA, 15 bp, Homo sapiens
atatttcactcatta

SEQ ID NO: 1239515 - DNA, 15 bp, Homo sapiens
catatttcactcatt

SEQ ID NO: 1239516 - DNA, 15 bp, Homo sapiens
ccatatttcactcat

SEQ ID NO: 1239517 - DNA, 15 bp, Homo sapiens
accatatttcactca

SEQ ID NO: 1239518 - DNA, 15 bp, Homo sapiens
taccatatttcactc

SEQ ID NO: 1239519 - DNA, 15 bp, Homo sapiens
ttaccatatttcact

SEQ ID NO: 1239520 - DNA, 15 bp, Homo sapiens
attaccatatttcac

SEQ ID NO: 1239521 - DNA, 15 bp, Homo sapiens
aattaccatatttca

SEQ ID NO: 1239522 - DNA, 15 bp, Homo sapiens
aaattaccatatttc

SEQ ID NO: 1239523 - DNA, 15 bp, Homo sapiens
caaattaccatattt

SEQ ID NO: 1239524 - DNA, 15 bp, Homo sapiens
acaaattaccatatt

SEQ ID NO: 1239525 - DNA, 15 bp, Homo sapiens
aacaaattaccatat

SEQ ID NO: 1239526 - DNA, 15 bp, Homo sapiens
caacaaattaccata

SEQ ID NO: 1239527 - DNA, 15 bp, Homo sapiens
tcaacaaattaccat

SEQ ID NO: 1239528 - DNA, 15 bp, Homo sapiens
atcaacaaattacca

SEQ ID NO: 1239529 - DNA, 15 bp, Homo sapiens
aatcaacaaattacc

SEQ ID NO: 1239530 - DNA, 15 bp, Homo sapiens
aaatcaacaaattac

SEQ ID NO: 1239531 - DNA, 15 bp, Homo sapiens
taaatcaacaaatta

SEQ ID NO: 1239532 - DNA, 15 bp, Homo sapiens
ttaaatcaacaaatt

SEQ ID NO: 1239533 - DNA, 15 bp, Homo sapiens
attaaatcaacaaat

SEQ ID NO: 1239534 - DNA, 15 bp, Homo sapiens
cattaaatcaacaaa

SEQ ID NO: 1239535 - DNA, 15 bp, Homo sapiens
acattaaatcaacaa

SEQ ID NO: 1239536 - DNA, 15 bp, Homo sapiens
aacattaaatcaaca

SEQ ID NO: 1239537 - DNA, 15 bp, Homo sapiens
gaacattaaatcaac

SEQ ID NO: 1239538 - DNA, 15 bp, Homo sapiens
tgaacattaaatcaa

SEQ ID NO: 1239539 - DNA, 15 bp, Homo sapiens
atgaacattaaatca

SEQ ID NO: 1239540 - DNA, 15 bp, Homo sapiens
aatgaacattaaatc

SEQ ID NO: 1239541 - DNA, 15 bp, Homo sapiens
aaatgaacattaaat

SEQ ID NO: 1239542 - DNA, 15 bp, Homo sapiens
aaaatgaacattaaa

SEQ ID NO: 1239543 - DNA, 15 bp, Homo sapiens
aaaaatgaacattaa

SEQ ID NO: 1239544 - DNA, 15 bp, Homo sapiens
gaaaaatgaacatta

SEQ ID NO: 1239545 - DNA, 15 bp, Homo sapiens
agaaaaatgaacatt

SEQ ID NO: 1239546 - DNA, 15 bp, Homo sapiens
cagaaaaatgaacat

SEQ ID NO: 1239547 - DNA, 15 bp, Homo sapiens
tcagaaaaatgaaca

SEQ ID NO: 1239548 - DNA, 15 bp, Homo sapiens
gtcagaaaaatgaac

SEQ ID NO: 1239549 - DNA, 15 bp, Homo sapiens
agtcagaaaaatgaa

SEQ ID NO: 1239550 - DNA, 15 bp, Homo sapiens
tagtcagaaaaatga

SEQ ID NO: 1239551 - DNA, 15 bp, Homo sapiens
atagtcagaaaaatg

SEQ ID NO: 1239552 - DNA, 15 bp, Homo sapiens
aatagtcagaaaaat

SEQ ID NO: 1239553 - DNA, 15 bp, Homo sapiens
taatagtcagaaaaa

SEQ ID NO: 1239554 - DNA, 15 bp, Homo sapiens
ctaatagtcagaaaa

SEQ ID NO: 1239555 - DNA, 15 bp, Homo sapiens
actaatagtcagaaa

SEQ ID NO: 1239556 - DNA, 15 bp, Homo sapiens
cactaatagtcagaa

SEQ ID NO: 1239557 - DNA, 15 bp, Homo sapiens
tcactaatagtcaga

SEQ ID NO: 1239558 - DNA, 15 bp, Homo sapiens
ctcactaatagtcag

SEQ ID NO: 1239559 - DNA, 15 bp, Homo sapiens
tctcactaatagtca

SEQ ID NO: 1239560 - DNA, 15 bp, Homo sapiens
atctcactaatagtc

SEQ ID NO: 1239561 - DNA, 15 bp, Homo sapiens
catctcactaatagt

SEQ ID NO: 1239562 - DNA, 15 bp, Homo sapiens
acatctcactaatag

SEQ ID NO: 1239563 - DNA, 15 bp, Homo sapiens
tacatctcactaata

SEQ ID NO: 1239564 - DNA, 15 bp, Homo sapiens
ctacatctcactaat

SEQ ID NO: 1239565 - DNA, 15 bp, Homo sapiens
cctacatctcactaa

SEQ ID NO: 1239566 - DNA, 15 bp, Homo sapiens
acctacatctcacta

SEQ ID NO: 1239567 - DNA, 15 bp, Homo sapiens
gacctacatctcact

SEQ ID NO: 1239568 - DNA, 15 bp, Homo sapiens
tgacctacatctcac

SEQ ID NO: 1239569 - DNA, 15 bp, Homo sapiens
atgacctacatctca

SEQ ID NO: 1239570 - DNA, 15 bp, Homo sapiens
tatgacctacatctc

SEQ ID NO: 1239571 - DNA, 15 bp, Homo sapiens
atatgacctacatct

SEQ ID NO: 1239572 - DNA, 15 bp, Homo sapiens
aatatgacctacatc

SEQ ID NO: 1239573 - DNA, 15 bp, Homo sapiens
aaatatgacctacat

SEQ ID NO: 1239574 - DNA, 15 bp, Homo sapiens
gaaatatgacctaca

SEQ ID NO: 1239575 - DNA, 15 bp, Homo sapiens
tgaaatatgacctac

SEQ ID NO: 1239576 - DNA, 15 bp, Homo sapiens
atgaaatatgaccta

SEQ ID NO: 1239577 - DNA, 15 bp, Homo sapiens
tatgaaatatgacct

SEQ ID NO: 1239578 - DNA, 15 bp, Homo sapiens
ttatgaaatatgacc

SEQ ID NO: 1239579 - DNA, 15 bp, Homo sapiens
gttatgaaatatgac

SEQ ID NO: 1239580 - DNA, 15 bp, Homo sapiens
tgttatgaaatatga

SEQ ID NO: 1239581 - DNA, 15 bp, Homo sapiens
atgttatgaaatatg

SEQ ID NO: 1239582 - DNA, 15 bp, Homo sapiens
aatgttatgaaatat

SEQ ID NO: 1239583 - DNA, 15 bp, Homo sapiens
aaatgttatgaaata

SEQ ID NO: 1239584 - DNA, 15 bp, Homo sapiens
taaatgttatgaaat

SEQ ID NO: 1239585 - DNA, 15 bp, Homo sapiens
ataaatgttatgaaa

SEQ ID NO: 1239586 - DNA, 15 bp, Homo sapiens
tataaatgttatgaa

SEQ ID NO: 1239587 - DNA, 15 bp, Homo sapiens
ttataaatgttatga

SEQ ID NO: 1239588 - DNA, 15 bp, Homo sapiens
attataaatgttatg

SEQ ID NO: 1239589 - DNA, 15 bp, Homo sapiens
aattataaatgttat

SEQ ID NO: 1239590 - DNA, 15 bp, Homo sapiens
aaattataaatgtta

SEQ ID NO: 1239591 - DNA, 15 bp, Homo sapiens
caaattataaatgtt

SEQ ID NO: 1239592 - DNA, 15 bp, Homo sapiens
acaaattataaatgt

SEQ ID NO: 1239593 - DNA, 15 bp, Homo sapiens
gacaaattataaatg

SEQ ID NO: 1239594 - DNA, 15 bp, Homo sapiens
agacaaattataaat

SEQ ID NO: 1239595 - DNA, 15 bp, Homo sapiens
aagacaaattataaa

SEQ ID NO: 1239596 - DNA, 15 bp, Homo sapiens
aaagacaaattataa

SEQ ID NO: 1239597 - DNA, 15 bp, Homo sapiens
aaaagacaaattata

SEQ ID NO: 1239598 - DNA, 15 bp, Homo sapiens
aaaaagacaaattat

SEQ ID NO: 1239599 - DNA, 15 bp, Homo sapiens
caaaaagacaaatta

SEQ ID NO: 1239600 - DNA, 15 bp, Homo sapiens
acaaaaagacaaatt

SEQ ID NO: 1239601 - DNA, 15 bp, Homo sapiens
tacaaaaagacaaat

SEQ ID NO: 1239602 - DNA, 15 bp, Homo sapiens
ttacaaaaagacaaa

SEQ ID NO: 1239603 - DNA, 15 bp, Homo sapiens
tttacaaaaagacaa

SEQ ID NO: 1239604 - DNA, 15 bp, Homo sapiens
atttacaaaaagaca

SEQ ID NO: 1239605 - DNA, 15 bp, Homo sapiens
aatttacaaaaagac

SEQ ID NO: 1239606 - DNA, 15 bp, Homo sapiens
caatttacaaaaaga

SEQ ID NO: 1239607 - DNA, 15 bp, Homo sapiens
acaatttacaaaaag

SEQ ID NO: 1239608 - DNA, 15 bp, Homo sapiens
cacaatttacaaaaa

SEQ ID NO: 1239609 - DNA, 15 bp, Homo sapiens
tcacaatttacaaaa

SEQ ID NO: 1239610 - DNA, 15 bp, Homo sapiens
atcacaatttacaaa

SEQ ID NO: 1239611 - DNA, 15 bp, Homo sapiens
aatcacaatttacaa

SEQ ID NO: 1239612 - DNA, 15 bp, Homo sapiens
aaatcacaatttaca

SEQ ID NO: 1239613 - DNA, 15 bp, Homo sapiens
caaatcacaatttac

SEQ ID NO: 1239614 - DNA, 15 bp, Homo sapiens
acaaatcacaattta

SEQ ID NO: 1239615 - DNA, 15 bp, Homo sapiens
gacaaatcacaattt

SEQ ID NO: 1239616 - DNA, 15 bp, Homo sapiens
agacaaatcacaatt

SEQ ID NO: 1239617 - DNA, 15 bp, Homo sapiens
tagacaaatcacaat

SEQ ID NO: 1239618 - DNA, 15 bp, Homo sapiens
gtagacaaatcacaa

SEQ ID NO: 1239619 - DNA, 15 bp, Homo sapiens
tgtagacaaatcaca

SEQ ID NO: 1239620 - DNA, 15 bp, Homo sapiens
gtgtagacaaatcac

SEQ ID NO: 1239621 - DNA, 15 bp, Homo sapiens
tgtgtagacaaatca

SEQ ID NO: 1239622 - DNA, 15 bp, Homo sapiens
atgtgtagacaaatc

SEQ ID NO: 1239623 - DNA, 15 bp, Homo sapiens
aatgtgtagacaaat

SEQ ID NO: 1239624 - DNA, 15 bp, Homo sapiens
caatgtgtagacaaa

SEQ ID NO: 1239625 - DNA, 15 bp, Homo sapiens
acaatgtgtagacaa

SEQ ID NO: 1239626 - DNA, 15 bp, Homo sapiens
tacaatgtgtagaca

SEQ ID NO: 1239627 - DNA, 15 bp, Homo sapiens
atacaatgtgtagac

SEQ ID NO: 1239628 - DNA, 15 bp, Homo sapiens
aatacaatgtgtaga

SEQ ID NO: 1239629 - DNA, 15 bp, Homo sapiens
aaatacaatgtgtag

SEQ ID NO: 1239630 - DNA, 15 bp, Homo sapiens
aaaatacaatgtgta

SEQ ID NO: 1239631 - DNA, 15 bp, Homo sapiens
aaaaatacaatgtgt

SEQ ID NO: 1239632 - DNA, 15 bp, Homo sapiens
aaaaaatacaatgtg

SEQ ID NO: 1239633 - DNA, 15 bp, Homo sapiens
caaaaaatacaatgt

SEQ ID NO: 1239634 - DNA, 15 bp, Homo sapiens
acaaaaaatacaatg

SEQ ID NO: 1239635 - DNA, 15 bp, Homo sapiens
cacaaaaaatacaat

SEQ ID NO: 1239636 - DNA, 15 bp, Homo sapiens
ccacaaaaaatacaa

SEQ ID NO: 1239637 - DNA, 15 bp, Homo sapiens
gccacaaaaaataca

SEQ ID NO: 1239638 - DNA, 15 bp, Homo sapiens
tgccacaaaaaatac

SEQ ID NO: 1239639 - DNA, 15 bp, Homo sapiens
ttgccacaaaaaata

SEQ ID NO: 1239640 - DNA, 15 bp, Homo sapiens
tttgccacaaaaaat

SEQ ID NO: 1239641 - DNA, 15 bp, Homo sapiens
atttgccacaaaaaa

SEQ ID NO: 1239642 - DNA, 15 bp, Homo sapiens
catttgccacaaaaa

SEQ ID NO: 1239643 - DNA, 15 bp, Homo sapiens
acatttgccacaaaa

SEQ ID NO: 1239644 - DNA, 15 bp, Homo sapiens
cacatttgccacaaa

SEQ ID NO: 1239645 - DNA, 15 bp, Homo sapiens
gcacatttgccacaa

SEQ ID NO: 1239646 - DNA, 15 bp, Homo sapiens
ggcacatttgccaca

SEQ ID NO: 1239647 - DNA, 15 bp, Homo sapiens
aggcacatttgccac

SEQ ID NO: 1239648 - DNA, 15 bp, Homo sapiens
aaggcacatttgcca

SEQ ID NO: 1239649 - DNA, 15 bp, Homo sapiens
aaaggcacatttgcc

SEQ ID NO: 1239650 - DNA, 15 bp, Homo sapiens
aaaaggcacatttgc

SEQ ID NO: 1239651 - DNA, 15 bp, Homo sapiens
aaaaaggcacatttg

SEQ ID NO: 1239652 - DNA, 15 bp, Homo sapiens
gaaaaaggcacattt

SEQ ID NO: 1239653 - DNA, 15 bp, Homo sapiens
agaaaaaggcacatt

SEQ ID NO: 1239654 - DNA, 15 bp, Homo sapiens
aagaaaaaggcacat

SEQ ID NO: 1239655 - DNA, 15 bp, Homo sapiens
taagaaaaaggcaca

SEQ ID NO: 1239656 - DNA, 15 bp, Homo sapiens
gtaagaaaaaggcac

SEQ ID NO: 1239657 - DNA, 15 bp, Homo sapiens
ggtaagaaaaaggca

SEQ ID NO: 1239658 - DNA, 15 bp, Homo sapiens
cggtaagaaaaaggc

SEQ ID NO: 1239659 - DNA, 15 bp, Homo sapiens
tcggtaagaaaaagg

SEQ ID NO: 1239660 - DNA, 15 bp, Homo sapiens
atcggtaagaaaaag

SEQ ID NO: 1239661 - DNA, 15 bp, Homo sapiens
aatcggtaagaaaaa

SEQ ID NO: 1239662 - DNA, 15 bp, Homo sapiens
aaatcggtaagaaaa

SEQ ID NO: 1239663 - DNA, 15 bp, Homo sapiens
aaaatcggtaagaaa

SEQ ID NO: 1239664 - DNA, 15 bp, Homo sapiens
aaaaatcggtaagaa

SEQ ID NO: 1239665 - DNA, 15 bp, Homo sapiens
aaaaaatcggtaaga

SEQ ID NO: 1239666 - DNA, 15 bp, Homo sapiens
caaaaaatcggtaag

SEQ ID NO: 1239667 - DNA, 15 bp, Homo sapiens
tcaaaaaatcggtaa

SEQ ID NO: 1239668 - DNA, 15 bp, Homo sapiens
gtcaaaaaatcggta

SEQ ID NO: 1239669 - DNA, 15 bp, Homo sapiens
tgtcaaaaaatcggt

SEQ ID NO: 1239670 - DNA, 15 bp, Homo sapiens
atgtcaaaaaatcgg

SEQ ID NO: 1239671 - DNA, 15 bp, Homo sapiens
aatgtcaaaaaatcg

SEQ ID NO: 1239672 - DNA, 15 bp, Homo sapiens
aaatgtcaaaaaatc

SEQ ID NO: 1239673 - DNA, 15 bp, Homo sapiens
taaaatgtcaaaaaa

SEQ ID NO: 1239674 - DNA, 15 bp, Homo sapiens
ataaaatgtcaaaaa

SEQ ID NO: 1239675 - DNA, 15 bp, Homo sapiens
tataaaatgtcaaaa

SEQ ID NO: 1239676 - DNA, 15 bp, Homo sapiens
atataaaatgtcaaa

SEQ ID NO: 1239677 - DNA, 15 bp, Homo sapiens
tatataaaatgtcaa

SEQ ID NO: 1239678 - DNA, 15 bp, Homo sapiens
gtatataaaatgtca

SEQ ID NO: 1239679 - DNA, 15 bp, Homo sapiens
agtatataaaatgtc

SEQ ID NO: 1239680 - DNA, 15 bp, Homo sapiens
gagtatataaaatgt

SEQ ID NO: 1239681 - DNA, 15 bp, Homo sapiens
agagtatataaaatg

SEQ ID NO: 1239682 - DNA, 15 bp, Homo sapiens
cagagtatataaaat

SEQ ID NO: 1239683 - DNA, 15 bp, Homo sapiens
tcagagtatataaaa

SEQ ID NO: 1239684 - DNA, 15 bp, Homo sapiens
ttcagagtatataaa

SEQ ID NO: 1239685 - DNA, 15 bp, Homo sapiens
attcagagtatataa

SEQ ID NO: 1239686 - DNA, 15 bp, Homo sapiens
tattcagagtatata

SEQ ID NO: 1239687 - DNA, 15 bp, Homo sapiens
gtattcagagtatat

SEQ ID NO: 1239688 - DNA, 15 bp, Homo sapiens
agtattcagagtata

SEQ ID NO: 1239689 - DNA, 15 bp, Homo sapiens
cagtattcagagtat

SEQ ID NO: 1239690 - DNA, 15 bp, Homo sapiens
acagtattcagagta

SEQ ID NO: 1239691 - DNA, 15 bp, Homo sapiens
aacagtattcagagt

SEQ ID NO: 1239692 - DNA, 15 bp, Homo sapiens
taacagtattcagag

SEQ ID NO: 1239693 - DNA, 15 bp, Homo sapiens
ataacagtattcaga

SEQ ID NO: 1239694 - DNA, 15 bp, Homo sapiens
cataacagtattcag

SEQ ID NO: 1239695 - DNA, 15 bp, Homo sapiens
acataacagtattca

SEQ ID NO: 1239696 - DNA, 15 bp, Homo sapiens
cacataacagtattc

SEQ ID NO: 1239697 - DNA, 15 bp, Homo sapiens
acacataacagtatt

SEQ ID NO: 1239698 - DNA, 15 bp, Homo sapiens
cacacataacagtat

SEQ ID NO: 1239699 - DNA, 15 bp, Homo sapiens
acacacataacagta

SEQ ID NO: 1239700 - DNA, 15 bp, Homo sapiens
aacacacataacagt

SEQ ID NO: 1239701 - DNA, 15 bp, Homo sapiens
taacacacataacag

SEQ ID NO: 1239702 - DNA, 15 bp, Homo sapiens
gtaacacacataaca

SEQ ID NO: 1239703 - DNA, 15 bp, Homo sapiens
tgtaacacacataac

SEQ ID NO: 1239704 - DNA, 15 bp, Homo sapiens
ttgtaacacacataa

SEQ ID NO: 1239705 - DNA, 15 bp, Homo sapiens
tttgtaacacacata

SEQ ID NO: 1239706 - DNA, 15 bp, Homo sapiens
ctttgtaacacacat

SEQ ID NO: 1239707 - DNA, 15 bp, Homo sapiens
tctttgtaacacaca

SEQ ID NO: 1239708 - DNA, 15 bp, Homo sapiens
atctttgtaacacac

SEQ ID NO: 1239709 - DNA, 15 bp, Homo sapiens
aatctttgtaacaca

SEQ ID NO: 1239710 - DNA, 15 bp, Homo sapiens
aaatctttgtaacac

SEQ ID NO: 1239711 - DNA, 15 bp, Homo sapiens
aaaatctttgtaaca

SEQ ID NO: 1239712 - DNA, 15 bp, Homo sapiens
gaaaatctttgtaac

SEQ ID NO: 1239713 - DNA, 15 bp, Homo sapiens
agaaaatctttgtaa

SEQ ID NO: 1239714 - DNA, 15 bp, Homo sapiens
gagaaaatctttgta

SEQ ID NO: 1239715 - DNA, 15 bp, Homo sapiens
ggagaaaatctttgt

SEQ ID NO: 1239716 - DNA, 15 bp, Homo sapiens
gggagaaaatctttg

SEQ ID NO: 1239717 - DNA, 15 bp, Homo sapiens
tgggagaaaatcttt

SEQ ID NO: 1239718 - DNA, 15 bp, Homo sapiens
ctgggagaaaatctt

SEQ ID NO: 1239719 - DNA, 15 bp, Homo sapiens
actgggagaaaatct

SEQ ID NO: 1239720 - DNA, 15 bp, Homo sapiens
gactgggagaaaatc

SEQ ID NO: 1239721 - DNA, 15 bp, Homo sapiens
agactgggagaaaat

SEQ ID NO: 1239722 - DNA, 15 bp, Homo sapiens
aagactgggagaaaa

SEQ ID NO: 1239723 - DNA, 15 bp, Homo sapiens
aaagactgggagaaa

SEQ ID NO: 1239724 - DNA, 15 bp, Homo sapiens
gaaagactgggagaa

SEQ ID NO: 1239725 - DNA, 15 bp, Homo sapiens
agaaagactgggaga

SEQ ID NO: 1239726 - DNA, 15 bp, Homo sapiens
gagaaagactgggag

SEQ ID NO: 1239727 - DNA, 15 bp, Homo sapiens
tgagaaagactggga

SEQ ID NO: 1239728 - DNA, 15 bp, Homo sapiens
atgagaaagactggg

SEQ ID NO: 1239729 - DNA, 15 bp, Homo sapiens
aatgagaaagactgg

SEQ ID NO: 1239730 - DNA, 15 bp, Homo sapiens
aaatgagaaagactg

SEQ ID NO: 1239731 - DNA, 15 bp, Homo sapiens
aaaatgagaaagact

SEQ ID NO: 1239732 - DNA, 15 bp, Homo sapiens
taaaatgagaaagac

SEQ ID NO: 1239733 - DNA, 15 bp, Homo sapiens
gtaaaatgagaaaga

SEQ ID NO: 1239734 - DNA, 15 bp, Homo sapiens
agtaaaatgagaaag

SEQ ID NO: 1239735 - DNA, 15 bp, Homo sapiens
aagtaaaatgagaaa

SEQ ID NO: 1239736 - DNA, 15 bp, Homo sapiens
caagtaaaatgagaa

SEQ ID NO: 1239737 - DNA, 15 bp, Homo sapiens
ccaagtaaaatgaga

SEQ ID NO: 1239738 - DNA, 15 bp, Homo sapiens
cccaagtaaaatgag

SEQ ID NO: 1239739 - DNA, 15 bp, Homo sapiens
acccaagtaaaatga

SEQ ID NO: 1239740 - DNA, 15 bp, Homo sapiens
aacccaagtaaaatg

SEQ ID NO: 1239741 - DNA, 15 bp, Homo sapiens
aaacccaagtaaaat

SEQ ID NO: 1239742 - DNA, 15 bp, Homo sapiens
taaacccaagtaaaa

SEQ ID NO: 1239743 - DNA, 15 bp, Homo sapiens
ataaacccaagtaaa

SEQ ID NO: 1239744 - DNA, 15 bp, Homo sapiens
cataaacccaagtaa

SEQ ID NO: 1239745 - DNA, 15 bp, Homo sapiens
ccataaacccaagta

SEQ ID NO: 1239746 - DNA, 15 bp, Homo sapiens
accataaacccaagt

SEQ ID NO: 1239747 - DNA, 15 bp, Homo sapiens
taccataaacccaag

SEQ ID NO: 1239748 - DNA, 15 bp, Homo sapiens
ataccataaacccaa

SEQ ID NO: 1239749 - DNA, 15 bp, Homo sapiens
tataccataaaccca

SEQ ID NO: 1239750 - DNA, 15 bp, Homo sapiens
ttataccataaaccc

SEQ ID NO: 1239751 - DNA, 15 bp, Homo sapiens
attataccataaacc

SEQ ID NO: 1239752 - DNA, 15 bp, Homo sapiens
aattataccataaac

SEQ ID NO: 1239753 - DNA, 15 bp, Homo sapiens
aaattataccataaa

SEQ ID NO: 1239754 - DNA, 15 bp, Homo sapiens
caaattataccataa

SEQ ID NO: 1239755 - DNA, 15 bp, Homo sapiens
acaaattataccata

SEQ ID NO: 1239756 - DNA, 15 bp, Homo sapiens
gacaaattataccat

SEQ ID NO: 1239757 - DNA, 15 bp, Homo sapiens
tgacaaattatacca

SEQ ID NO: 1239758 - DNA, 15 bp, Homo sapiens
atgacaaattatacc

SEQ ID NO: 1239759 - DNA, 15 bp, Homo sapiens
tatgacaaattatac

SEQ ID NO: 1239760 - DNA, 15 bp, Homo sapiens
gtatgacaaattata

SEQ ID NO: 1239761 - DNA, 15 bp, Homo sapiens
agtatgacaaattat

SEQ ID NO: 1239762 - DNA, 15 bp, Homo sapiens
cagtatgacaaatta

SEQ ID NO: 1239763 - DNA, 15 bp, Homo sapiens
tcagtatgacaaatt

SEQ ID NO: 1239764 - DNA, 15 bp, Homo sapiens
ttcagtatgacaaat

SEQ ID NO: 1239765 - DNA, 15 bp, Homo sapiens
tttcagtatgacaaa

SEQ ID NO: 1239766 - DNA, 15 bp, Homo sapiens
atttcagtatgacaa

SEQ ID NO: 1239767 - DNA, 15 bp, Homo sapiens
aatttcagtatgaca

SEQ ID NO: 1239768 - DNA, 15 bp, Homo sapiens
aaatttcagtatgac

SEQ ID NO: 1239769 - DNA, 15 bp, Homo sapiens
taaatttcagtatga

SEQ ID NO: 1239770 - DNA, 15 bp, Homo sapiens
ttaaatttcagtatg

SEQ ID NO: 1239771 - DNA, 15 bp, Homo sapiens
tttaaatttcagtat

SEQ ID NO: 1239772 - DNA, 15 bp, Homo sapiens
ttttaaatttcagta

SEQ ID NO: 1239773 - DNA, 15 bp, Homo sapiens
attttaaatttcagt

SEQ ID NO: 1239774 - DNA, 15 bp, Homo sapiens
aattttaaatttcag

SEQ ID NO: 1239775 - DNA, 15 bp, Homo sapiens
gaattttaaatttca

SEQ ID NO: 1239776 - DNA, 15 bp, Homo sapiens
agaattttaaatttc

SEQ ID NO: 1239777 - DNA, 15 bp, Homo sapiens
cagaattttaaattt

SEQ ID NO: 1239778 - DNA, 15 bp, Homo sapiens
tcagaattttaaatt

SEQ ID NO: 1239779 - DNA, 15 bp, Homo sapiens
atcagaattttaaat

SEQ ID NO: 1239780 - DNA, 15 bp, Homo sapiens
tatcagaattttaaa

SEQ ID NO: 1239781 - DNA, 15 bp, Homo sapiens
atatcagaattttaa

SEQ ID NO: 1239782 - DNA, 15 bp, Homo sapiens
tatatcagaatttta

SEQ ID NO: 1239783 - DNA, 15 bp, Homo sapiens
ttatatcagaatttt

SEQ ID NO: 1239784 - DNA, 15 bp, Homo sapiens
attatatcagaattt

SEQ ID NO: 1239785 - DNA, 15 bp, Homo sapiens
gattatatcagaatt

SEQ ID NO: 1239786 - DNA, 15 bp, Homo sapiens
tgattatatcagaat

SEQ ID NO: 1239787 - DNA, 15 bp, Homo sapiens
ttgattatatcagaa

SEQ ID NO: 1239788 - DNA, 15 bp, Homo sapiens
attgattatatcaga

SEQ ID NO: 1239789 - DNA, 15 bp, Homo sapiens
tattgattatatcag

SEQ ID NO: 1239790 - DNA, 15 bp, Homo sapiens
gtattgattatatca

SEQ ID NO: 1239791 - DNA, 15 bp, Homo sapiens
agtattgattatatc

SEQ ID NO: 1239792 - DNA, 15 bp, Homo sapiens
aagtattgattatat

SEQ ID NO: 1239793 - DNA, 15 bp, Homo sapiens
aaagtattgattata

SEQ ID NO: 1239794 - DNA, 15 bp, Homo sapiens
gaaagtattgattat

SEQ ID NO: 1239795 - DNA, 15 bp, Homo sapiens
tgaaagtattgatta

SEQ ID NO: 1239796 - DNA, 15 bp, Homo sapiens
ctgaaagtattgatt

SEQ ID NO: 1239797 - DNA, 15 bp, Homo sapiens
actgaaagtattgat

SEQ ID NO: 1239798 - DNA, 15 bp, Homo sapiens
gactgaaagtattga

SEQ ID NO: 1239799 - DNA, 15 bp, Homo sapiens
tgactgaaagtattg

SEQ ID NO: 1239800 - DNA, 15 bp, Homo sapiens
atgactgaaagtatt

SEQ ID NO: 1239801 - DNA, 15 bp, Homo sapiens
aatgactgaaagtat

SEQ ID NO: 1239802 - DNA, 15 bp, Homo sapiens
aaatgactgaaagta

SEQ ID NO: 1239803 - DNA, 15 bp, Homo sapiens
aaaatgactgaaagt

SEQ ID NO: 1239804 - DNA, 15 bp, Homo sapiens
aaaaatgactgaaag

SEQ ID NO: 1239805 - DNA, 15 bp, Homo sapiens
aaaaaatgactgaaa

SEQ ID NO: 1239806 - DNA, 15 bp, Homo sapiens
gaaaaaatgactgaa

SEQ ID NO: 1239807 - DNA, 15 bp, Homo sapiens
tgaaaaaatgactga

SEQ ID NO: 1239808 - DNA, 15 bp, Homo sapiens
atgaaaaaatgactg

SEQ ID NO: 1239809 - DNA, 15 bp, Homo sapiens
catgaaaaaatgact

SEQ ID NO: 1239810 - DNA, 15 bp, Homo sapiens
acatgaaaaaatgac

SEQ ID NO: 1239811 - DNA, 15 bp, Homo sapiens
cacatgaaaaaatga

SEQ ID NO: 1239812 - DNA, 15 bp, Homo sapiens
aacacatgaaaaaat

SEQ ID NO: 1239813 - DNA, 15 bp, Homo sapiens
aaacacatgaaaaaa

SEQ ID NO: 1239814 - DNA, 15 bp, Homo sapiens
aaaacacatgaaaaa

SEQ ID NO: 1239815 - DNA, 15 bp, Homo sapiens
caaaacacatgaaaa

SEQ ID NO: 1239816 - DNA, 15 bp, Homo sapiens
ccaaaacacatgaaa

SEQ ID NO: 1239817 - DNA, 15 bp, Homo sapiens
tccaaaacacatgaa

SEQ ID NO: 1239818 - DNA, 15 bp, Homo sapiens
atccaaaacacatga

SEQ ID NO: 1239819 - DNA, 15 bp, Homo sapiens
aatccaaaacacatg

SEQ ID NO: 1239820 - DNA, 15 bp, Homo sapiens
aaatccaaaacacat

SEQ ID NO: 1239821 - DNA, 15 bp, Homo sapiens
aaaatccaaaacaca

SEQ ID NO: 1239822 - DNA, 15 bp, Homo sapiens
aaaaatccaaaacac

SEQ ID NO: 1239823 - DNA, 15 bp, Homo sapiens
caaaaatccaaaaca

SEQ ID NO: 1239824 - DNA, 15 bp, Homo sapiens
acaaaaatccaaaac

SEQ ID NO: 1239825 - DNA, 15 bp, Homo sapiens
aacaaaaatccaaaa

SEQ ID NO: 1239826 - DNA, 15 bp, Homo sapiens
aaacaaaaatccaaa

SEQ ID NO: 1239827 - DNA, 15 bp, Homo sapiens
taaacaaaaatccaa

SEQ ID NO: 1239828 - DNA, 15 bp, Homo sapiens
ataaacaaaaatcca

SEQ ID NO: 1239829 - DNA, 15 bp, Homo sapiens
aataaacaaaaatcc

SEQ ID NO: 1239830 - DNA, 15 bp, Homo sapiens
gaataaacaaaaatc

SEQ ID NO: 1239831 - DNA, 15 bp, Homo sapiens
agaataaacaaaaat

SEQ ID NO: 1239832 - DNA, 15 bp, Homo sapiens
aagaataaacaaaaa

SEQ ID NO: 1239833 - DNA, 15 bp, Homo sapiens
caagaataaacaaaa

SEQ ID NO: 1239834 - DNA, 15 bp, Homo sapiens
tcaagaataaacaaa

SEQ ID NO: 1239835 - DNA, 15 bp, Homo sapiens
ttcaagaataaacaa

SEQ ID NO: 1239836 - DNA, 15 bp, Homo sapiens
attcaagaataaaca

SEQ ID NO: 1239837 - DNA, 15 bp, Homo sapiens
aattcaagaataaac

SEQ ID NO: 1239838 - DNA, 15 bp, Homo sapiens
aaattcaagaataaa

SEQ ID NO: 1239839 - DNA, 15 bp, Homo sapiens
aaaattcaagaataa

SEQ ID NO: 1239840 - DNA, 15 bp, Homo sapiens
aaaaattcaagaata

SEQ ID NO: 1239841 - DNA, 15 bp, Homo sapiens
aaaaaattcaagaat

SEQ ID NO: 1239842 - DNA, 15 bp, Homo sapiens
aaaaaaattcaagaa

SEQ ID NO: 1239843 - DNA, 15 bp, Homo sapiens
aaaaaaaattcaaga

SEQ ID NO: 1239844 - DNA, 15 bp, Homo sapiens
aaaaaaaaattcaag

SEQ ID NO: 1239845 - DNA, 15 bp, Homo sapiens
gaatttaaaaaaaaa

SEQ ID NO: 1239846 - DNA, 15 bp, Homo sapiens
ggaatttaaaaaaaa

SEQ ID NO: 1239847 - DNA, 15 bp, Homo sapiens
tggaatttaaaaaaa

SEQ ID NO: 1239848 - DNA, 15 bp, Homo sapiens
gtggaatttaaaaaa

SEQ ID NO: 1239849 - DNA, 15 bp, Homo sapiens
agtggaatttaaaaa

SEQ ID NO: 1239850 - DNA, 15 bp, Homo sapiens
cagtggaatttaaaa

SEQ ID NO: 1239851 - DNA, 15 bp, Homo sapiens
ccagtggaatttaaa

SEQ ID NO: 1239852 - DNA, 15 bp, Homo sapiens
accagtggaatttaa

SEQ ID NO: 1239853 - DNA, 15 bp, Homo sapiens
caccagtggaattta

SEQ ID NO: 1239854 - DNA, 15 bp, Homo sapiens
tcaccagtggaattt

SEQ ID NO: 1239855 - DNA, 15 bp, Homo sapiens
gtcaccagtggaatt

SEQ ID NO: 1239856 - DNA, 15 bp, Homo sapiens
agtcaccagtggaat

SEQ ID NO: 1239857 - DNA, 15 bp, Homo sapiens
gagtcaccagtggaa

SEQ ID NO: 1239858 - DNA, 15 bp, Homo sapiens
agagtcaccagtgga

SEQ ID NO: 1239859 - DNA, 15 bp, Homo sapiens
cagagtcaccagtgg

SEQ ID NO: 1239860 - DNA, 15 bp, Homo sapiens
tcagagtcaccagtg

SEQ ID NO: 1239861 - DNA, 15 bp, Homo sapiens
atcagagtcaccagt

SEQ ID NO: 1239862 - DNA, 15 bp, Homo sapiens
catcagagtcaccag

SEQ ID NO: 1239863 - DNA, 15 bp, Homo sapiens
gcatcagagtcacca

SEQ ID NO: 1239864 - DNA, 15 bp, Homo sapiens
ggcatcagagtcacc

SEQ ID NO: 1239865 - DNA, 15 bp, Homo sapiens
tggcatcagagtcac

SEQ ID NO: 1239866 - DNA, 15 bp, Homo sapiens
ttggcatcagagtca

SEQ ID NO: 1239867 - DNA, 15 bp, Homo sapiens
cttggcatcagagtc

SEQ ID NO: 1239868 - DNA, 15 bp, Homo sapiens
acttggcatcagagt

SEQ ID NO: 1239869 - DNA, 15 bp, Homo sapiens
gacttggcatcagag

SEQ ID NO: 1239870 - DNA, 15 bp, Homo sapiens
cgacttggcatcaga

SEQ ID NO: 1239871 - DNA, 15 bp, Homo sapiens
ccgacttggcatcag

SEQ ID NO: 1239872 - DNA, 15 bp, Homo sapiens
cccgacttggcatca

SEQ ID NO: 1239873 - DNA, 15 bp, Homo sapiens
tcccgacttggcatc

SEQ ID NO: 1239874 - DNA, 15 bp, Homo sapiens
ttcccgacttggcat

SEQ ID NO: 1239875 - DNA, 15 bp, Homo sapiens
attcccgacttggca

SEQ ID NO: 1239876 - DNA, 15 bp, Homo sapiens
cattcccgacttggc

SEQ ID NO: 1239877 - DNA, 15 bp, Homo sapiens
tcattcccgacttgg

SEQ ID NO: 1239878 - DNA, 15 bp, Homo sapiens
ctcattcccgacttg

SEQ ID NO: 1239879 - DNA, 15 bp, Homo sapiens
tctcattcccgactt

SEQ ID NO: 1239880 - DNA, 15 bp, Homo sapiens
ttctcattcccgact

SEQ ID NO: 1239881 - DNA, 15 bp, Homo sapiens
gttctcattcccgac

SEQ ID NO: 1239882 - DNA, 15 bp, Homo sapiens
ggttctcattcccga

SEQ ID NO: 1239883 - DNA, 15 bp, Homo sapiens
tggttctcattcccg

SEQ ID NO: 1239884 - DNA, 15 bp, Homo sapiens
atggttctcattccc

SEQ ID NO: 1239885 - DNA, 15 bp, Homo sapiens
aatggttctcattcc

SEQ ID NO: 1239886 - DNA, 15 bp, Homo sapiens
caatggttctcattc

SEQ ID NO: 1239887 - DNA, 15 bp, Homo sapiens
acaatggttctcatt

SEQ ID NO: 1239888 - DNA, 15 bp, Homo sapiens
aacaatggttctcat

SEQ ID NO: 1239889 - DNA, 15 bp, Homo sapiens
gaacaatggttctca

SEQ ID NO: 1239890 - DNA, 15 bp, Homo sapiens
agaacaatggttctc

SEQ ID NO: 1239891 - DNA, 15 bp, Homo sapiens
tagaacaatggttct

SEQ ID NO: 1239892 - DNA, 15 bp, Homo sapiens
ttagaacaatggttc

SEQ ID NO: 1239893 - DNA, 15 bp, Homo sapiens
cttagaacaatggtt

SEQ ID NO: 1239894 - DNA, 15 bp, Homo sapiens
gcttagaacaatggt

SEQ ID NO: 1239895 - DNA, 15 bp, Homo sapiens
agcttagaacaatgg

SEQ ID NO: 1239896 - DNA, 15 bp, Homo sapiens
tagcttagaacaatg

SEQ ID NO: 1239897 - DNA, 15 bp, Homo sapiens
atagcttagaacaat

SEQ ID NO: 1239898 - DNA, 15 bp, Homo sapiens
aatagcttagaacaa

SEQ ID NO: 1239899 - DNA, 15 bp, Homo sapiens
caatagcttagaaca

SEQ ID NO: 1239900 - DNA, 15 bp, Homo sapiens
gcaatagcttagaac

SEQ ID NO: 1239901 - DNA, 15 bp, Homo sapiens
ggcaatagcttagaa

SEQ ID NO: 1239902 - DNA, 15 bp, Homo sapiens
gggcaatagcttaga

SEQ ID NO: 1239903 - DNA, 15 bp, Homo sapiens
cgggcaatagcttag

SEQ ID NO: 1239904 - DNA, 15 bp, Homo sapiens
ccgggcaatagctta

SEQ ID NO: 1239905 - DNA, 15 bp, Homo sapiens
cccgggcaatagctt

SEQ ID NO: 1239906 - DNA, 15 bp, Homo sapiens
tcccgggcaatagct

SEQ ID NO: 1239907 - DNA, 15 bp, Homo sapiens
ttcccgggcaatagc

SEQ ID NO: 1239908 - DNA, 15 bp, Homo sapiens
cttcccgggcaatag

SEQ ID NO: 1239909 - DNA, 15 bp, Homo sapiens
ccttcccgggcaata

SEQ ID NO: 1239910 - DNA, 15 bp, Homo sapiens
cccttcccgggcaat

SEQ ID NO: 1239911 - DNA, 15 bp, Homo sapiens
ccccttcccgggcaa

SEQ ID NO: 1239912 - DNA, 15 bp, Homo sapiens
accccttcccgggca

SEQ ID NO: 1239913 - DNA, 15 bp, Homo sapiens
aaccccttcccgggc

SEQ ID NO: 1239914 - DNA, 15 bp, Homo sapiens
gaaccccttcccggg

SEQ ID NO: 1239915 - DNA, 15 bp, Homo sapiens
agaaccccttcccgg

SEQ ID NO: 1239916 - DNA, 15 bp, Homo sapiens
aagaaccccttcccg

SEQ ID NO: 1239917 - DNA, 15 bp, Homo sapiens
caagaaccccttccc

SEQ ID NO: 1239918 - DNA, 15 bp, Homo sapiens
gcaagaaccccttcc

SEQ ID NO: 1239919 - DNA, 15 bp, Homo sapiens
agcaagaaccccttc

SEQ ID NO: 1239920 - DNA, 15 bp, Homo sapiens
cagcaagaacccctt

SEQ ID NO: 1239921 - DNA, 15 bp, Homo sapiens
acagcaagaacccct

SEQ ID NO: 1239922 - DNA, 15 bp, Homo sapiens
cacagcaagaacccc

SEQ ID NO: 1239923 - DNA, 15 bp, Homo sapiens
gcacagcaagaaccc

SEQ ID NO: 1239924 - DNA, 15 bp, Homo sapiens
tgcacagcaagaacc

SEQ ID NO: 1239925 - DNA, 15 bp, Homo sapiens
atgcacagcaagaac

SEQ ID NO: 1239926 - DNA, 15 bp, Homo sapiens
catgcacagcaagaa

SEQ ID NO: 1239927 - DNA, 15 bp, Homo sapiens
tcatgcacagcaaga

SEQ ID NO: 1239928 - DNA, 15 bp, Homo sapiens
ctcatgcacagcaag

SEQ ID NO: 1239929 - DNA, 15 bp, Homo sapiens
tctcatgcacagcaa

SEQ ID NO: 1239930 - DNA, 15 bp, Homo sapiens
ctctcatgcacagca

SEQ ID NO: 1239931 - DNA, 15 bp, Homo sapiens
tctctcatgcacagc

SEQ ID NO: 1239932 - DNA, 15 bp, Homo sapiens
gtctctcatgcacag

SEQ ID NO: 1239933 - DNA, 15 bp, Homo sapiens
agtctctcatgcaca

SEQ ID NO: 1239934 - DNA, 15 bp, Homo sapiens
cagtctctcatgcac

SEQ ID NO: 1239935 - DNA, 15 bp, Homo sapiens
acagtctctcatgca

SEQ ID NO: 1239936 - DNA, 15 bp, Homo sapiens
cacagtctctcatgc

SEQ ID NO: 1239937 - DNA, 15 bp, Homo sapiens
acacagtctctcatg

SEQ ID NO: 1239938 - DNA, 15 bp, Homo sapiens
aacacagtctctcat

SEQ ID NO: 1239939 - DNA, 15 bp, Homo sapiens
taacacagtctctca

SEQ ID NO: 1239940 - DNA, 15 bp, Homo sapiens
ataacacagtctctc

SEQ ID NO: 1239941 - DNA, 15 bp, Homo sapiens
gataacacagtctct

SEQ ID NO: 1239942 - DNA, 15 bp, Homo sapiens
tgataacacagtctc

SEQ ID NO: 1239943 - DNA, 15 bp, Homo sapiens
gtgataacacagtct

SEQ ID NO: 1239944 - DNA, 15 bp, Homo sapiens
agtgataacacagtc

SEQ ID NO: 1239945 - DNA, 15 bp, Homo sapiens
aagtgataacacagt

SEQ ID NO: 1239946 - DNA, 15 bp, Homo sapiens
gaagtgataacacag

SEQ ID NO: 1239947 - DNA, 15 bp, Homo sapiens
tgaagtgataacaca

SEQ ID NO: 1239948 - DNA, 15 bp, Homo sapiens
gtgaagtgataacac

SEQ ID NO: 1239949 - DNA, 15 bp, Homo sapiens
tgtgaagtgataaca

SEQ ID NO: 1239950 - DNA, 15 bp, Homo sapiens
atgtgaagtgataac

SEQ ID NO: 1239951 - DNA, 15 bp, Homo sapiens
catgtgaagtgataa

SEQ ID NO: 1239952 - DNA, 15 bp, Homo sapiens
tcatgtgaagtgata

SEQ ID NO: 1239953 - DNA, 15 bp, Homo sapiens
ttcatgtgaagtgat

SEQ ID NO: 1239954 - DNA, 15 bp, Homo sapiens
attcatgtgaagtga

SEQ ID NO: 1239955 - DNA, 15 bp, Homo sapiens
aattcatgtgaagtg

SEQ ID NO: 1239956 - DNA, 15 bp, Homo sapiens
taattcatgtgaagt

SEQ ID NO: 1239957 - DNA, 15 bp, Homo sapiens
ttaattcatgtgaag

SEQ ID NO: 1239958 - DNA, 15 bp, Homo sapiens
cttaattcatgtgaa

SEQ ID NO: 1239959 - DNA, 15 bp, Homo sapiens
acttaattcatgtga

SEQ ID NO: 1239960 - DNA, 15 bp, Homo sapiens
gacttaattcatgtg

SEQ ID NO: 1239961 - DNA, 15 bp, Homo sapiens
tgacttaattcatgt

SEQ ID NO: 1239962 - DNA, 15 bp, Homo sapiens
atgacttaattcatg

SEQ ID NO: 1239963 - DNA, 15 bp, Homo sapiens
tatgacttaattcat

SEQ ID NO: 1239964 - DNA, 15 bp, Homo sapiens
atatgacttaattca

SEQ ID NO: 1239965 - DNA, 15 bp, Homo sapiens
aatatgacttaattc

SEQ ID NO: 1239966 - DNA, 15 bp, Homo sapiens
aaatatgacttaatt

SEQ ID NO: 1239967 - DNA, 15 bp, Homo sapiens
taaatatgacttaat

SEQ ID NO: 1239968 - DNA, 15 bp, Homo sapiens
ttaaatatgacttaa

SEQ ID NO: 1239969 - DNA, 15 bp, Homo sapiens
attaaatatgactta

SEQ ID NO: 1239970 - DNA, 15 bp, Homo sapiens
tattaaatatgactt

SEQ ID NO: 1239971 - DNA, 15 bp, Homo sapiens
gtattaaatatgact

SEQ ID NO: 1239972 - DNA, 15 bp, Homo sapiens
agtattaaatatgac

SEQ ID NO: 1239973 - DNA, 15 bp, Homo sapiens
gagtattaaatatga

SEQ ID NO: 1239974 - DNA, 15 bp, Homo sapiens
tgagtattaaatatg

SEQ ID NO: 1239975 - DNA, 15 bp, Homo sapiens
atgagtattaaatat

SEQ ID NO: 1239976 - DNA, 15 bp, Homo sapiens
gatgagtattaaata

SEQ ID NO: 1239977 - DNA, 15 bp, Homo sapiens
tgatgagtattaaat

SEQ ID NO: 1239978 - DNA, 15 bp, Homo sapiens
gtgatgagtattaaa

SEQ ID NO: 1239979 - DNA, 15 bp, Homo sapiens
tgtgatgagtattaa

SEQ ID NO: 1239980 - DNA, 15 bp, Homo sapiens
ctgtgatgagtatta

SEQ ID NO: 1239981 - DNA, 15 bp, Homo sapiens
actgtgatgagtatt

SEQ ID NO: 1239982 - DNA, 15 bp, Homo sapiens
cactgtgatgagtat

SEQ ID NO: 1239983 - DNA, 15 bp, Homo sapiens
gcactgtgatgagta

SEQ ID NO: 1239984 - DNA, 15 bp, Homo sapiens
agcactgtgatgagt

SEQ ID NO: 1239985 - DNA, 15 bp, Homo sapiens
cagcactgtgatgag

SEQ ID NO: 1239986 - DNA, 15 bp, Homo sapiens
acagcactgtgatga

SEQ ID NO: 1239987 - DNA, 15 bp, Homo sapiens
cacagcactgtgatg

SEQ ID NO: 1239988 - DNA, 15 bp, Homo sapiens
ccacagcactgtgat

SEQ ID NO: 1239989 - DNA, 15 bp, Homo sapiens
cccacagcactgtga

SEQ ID NO: 1239990 - DNA, 15 bp, Homo sapiens
ccccacagcactgtg

SEQ ID NO: 1239991 - DNA, 15 bp, Homo sapiens
tccccacagcactgt

SEQ ID NO: 1239992 - DNA, 15 bp, Homo sapiens
ctccccacagcactg

SEQ ID NO: 1239993 - DNA, 15 bp, Homo sapiens
actccccacagcact

SEQ ID NO: 1239994 - DNA, 15 bp, Homo sapiens
gactccccacagcac

SEQ ID NO: 1239995 - DNA, 15 bp, Homo sapiens
tgactccccacagca

SEQ ID NO: 1239996 - DNA, 15 bp, Homo sapiens
ctgactccccacagc

SEQ ID NO: 1239997 - DNA, 15 bp, Homo sapiens
gctgactccccacag

SEQ ID NO: 1239998 - DNA, 15 bp, Homo sapiens
cgctgactccccaca

SEQ ID NO: 1239999 - DNA, 15 bp, Homo sapiens
tcgctgactccccac

SEQ ID NO: 1240000 - DNA, 15 bp, Homo sapiens
atcgctgactcccca

SEQ ID NO: 1240001 - DNA, 15 bp, Homo sapiens
catcgctgactcccc

SEQ ID NO: 1240002 - DNA, 15 bp, Homo sapiens
gcatcgctgactccc

SEQ ID NO: 1240003 - DNA, 15 bp, Homo sapiens
ggcatcgctgactcc

SEQ ID NO: 1240004 - DNA, 15 bp, Homo sapiens
tggcatcgctgactc

SEQ ID NO: 1240005 - DNA, 15 bp, Homo sapiens
atggcatcgctgact

SEQ ID NO: 1240006 - DNA, 15 bp, Homo sapiens
tatggcatcgctgac

SEQ ID NO: 1240007 - DNA, 15 bp, Homo sapiens
gtatggcatcgctga

SEQ ID NO: 1240008 - DNA, 15 bp, Homo sapiens
agtatggcatcgctg

SEQ ID NO: 1240009 - DNA, 15 bp, Homo sapiens
cagtatggcatcgct

SEQ ID NO: 1240010 - DNA, 15 bp, Homo sapiens
tcagtatggcatcgc

SEQ ID NO: 1240011 - DNA, 15 bp, Homo sapiens
atcagtatggcatcg

SEQ ID NO: 1240012 - DNA, 15 bp, Homo sapiens
gatcagtatggcatc

SEQ ID NO: 1240013 - DNA, 15 bp, Homo sapiens
agatcagtatggcat

SEQ ID NO: 1240014 - DNA, 15 bp, Homo sapiens
aagatcagtatggca

SEQ ID NO: 1240015 - DNA, 15 bp, Homo sapiens
taagatcagtatggc

SEQ ID NO: 1240016 - DNA, 15 bp, Homo sapiens
ctaagatcagtatgg

SEQ ID NO: 1240017 - DNA, 15 bp, Homo sapiens
tctaagatcagtatg

SEQ ID NO: 1240018 - DNA, 15 bp, Homo sapiens
ctctaagatcagtat

SEQ ID NO: 1240019 - DNA, 15 bp, Homo sapiens
tctctaagatcagta

SEQ ID NO: 1240020 - DNA, 15 bp, Homo sapiens
ctctctaagatcagt

SEQ ID NO: 1240021 - DNA, 15 bp, Homo sapiens
cctctctaagatcag

SEQ ID NO: 1240022 - DNA, 15 bp, Homo sapiens
tcctctctaagatca

SEQ ID NO: 1240023 - DNA, 15 bp, Homo sapiens
ctcctctctaagatc

SEQ ID NO: 1240024 - DNA, 15 bp, Homo sapiens
cctcctctctaagat

SEQ ID NO: 1240025 - DNA, 15 bp, Homo sapiens
tcctcctctctaaga

SEQ ID NO: 1240026 - DNA, 15 bp, Homo sapiens
ttcctcctctctaag

SEQ ID NO: 1240027 - DNA, 15 bp, Homo sapiens
tttcctcctctctaa

SEQ ID NO: 1240028 - DNA, 15 bp, Homo sapiens
gtttcctcctctcta

SEQ ID NO: 1240029 - DNA, 15 bp, Homo sapiens
agtttcctcctctct

SEQ ID NO: 1240030 - DNA, 15 bp, Homo sapiens
tagtttcctcctctc

SEQ ID NO: 1240031 - DNA, 15 bp, Homo sapiens
ttagtttcctcctct

SEQ ID NO: 1240032 - DNA, 15 bp, Homo sapiens
tttagtttcctcctc

SEQ ID NO: 1240033 - DNA, 15 bp, Homo sapiens
gtttagtttcctcct

SEQ ID NO: 1240034 - DNA, 15 bp, Homo sapiens
ggtttagtttcctcc

SEQ ID NO: 1240035 - DNA, 15 bp, Homo sapiens
aggtttagtttcctc

SEQ ID NO: 1240036 - DNA, 15 bp, Homo sapiens
gaggtttagtttcct

SEQ ID NO: 1240037 - DNA, 15 bp, Homo sapiens
tgaggtttagtttcc

SEQ ID NO: 1240038 - DNA, 15 bp, Homo sapiens
ctgaggtttagtttc

SEQ ID NO: 1240039 - DNA, 15 bp, Homo sapiens
tctgaggtttagttt

SEQ ID NO: 1240040 - DNA, 15 bp, Homo sapiens
ctctgaggtttagtt

SEQ ID NO: 1240041 - DNA, 15 bp, Homo sapiens
tctctgaggtttagt

SEQ ID NO: 1240042 - DNA, 15 bp, Homo sapiens
gtctctgaggtttag

SEQ ID NO: 1240043 - DNA, 15 bp, Homo sapiens
agtctctgaggttta

SEQ ID NO: 1240044 - DNA, 15 bp, Homo sapiens
gagtctctgaggttt

SEQ ID NO: 1240045 - DNA, 15 bp, Homo sapiens
tgagtctctgaggtt

SEQ ID NO: 1240046 - DNA, 15 bp, Homo sapiens
ctgagtctctgaggt

SEQ ID NO: 1240047 - DNA, 15 bp, Homo sapiens
actgagtctctgagg

SEQ ID NO: 1240048 - DNA, 15 bp, Homo sapiens
tactgagtctctgag

SEQ ID NO: 1240049 - DNA, 15 bp, Homo sapiens
ctactgagtctctga

SEQ ID NO: 1240050 - DNA, 15 bp, Homo sapiens
gctactgagtctctg

SEQ ID NO: 1240051 - DNA, 15 bp, Homo sapiens
agctactgagtctct

SEQ ID NO: 1240052 - DNA, 15 bp, Homo sapiens
aagctactgagtctc

SEQ ID NO: 1240053 - DNA, 15 bp, Homo sapiens
caagctactgagtct

SEQ ID NO: 1240054 - DNA, 15 bp, Homo sapiens
acaagctactgagtc

SEQ ID NO: 1240055 - DNA, 15 bp, Homo sapiens
gacaagctactgagt

SEQ ID NO: 1240056 - DNA, 15 bp, Homo sapiens
agacaagctactgag

SEQ ID NO: 1240057 - DNA, 15 bp, Homo sapiens
tagacaagctactga

SEQ ID NO: 1240058 - DNA, 15 bp, Homo sapiens
ttagacaagctactg

SEQ ID NO: 1240059 - DNA, 15 bp, Homo sapiens
cttagacaagctact

SEQ ID NO: 1240060 - DNA, 15 bp, Homo sapiens
ccttagacaagctac

SEQ ID NO: 1240061 - DNA, 15 bp, Homo sapiens
accttagacaagcta

SEQ ID NO: 1240062 - DNA, 15 bp, Homo sapiens
taccttagacaagct

SEQ ID NO: 1240063 - DNA, 15 bp, Homo sapiens
ctaccttagacaagc

SEQ ID NO: 1240064 - DNA, 15 bp, Homo sapiens
tctaccttagacaag

SEQ ID NO: 1240065 - DNA, 15 bp, Homo sapiens
gtctaccttagacaa

SEQ ID NO: 1240066 - DNA, 15 bp, Homo sapiens
tgtctaccttagaca

SEQ ID NO: 1240067 - DNA, 15 bp, Homo sapiens
ttgtctaccttagac

SEQ ID NO: 1240068 - DNA, 15 bp, Homo sapiens
cttgtctaccttaga

SEQ ID NO: 1240069 - DNA, 15 bp, Homo sapiens
ccttgtctaccttag

SEQ ID NO: 1240070 - DNA, 15 bp, Homo sapiens
accttgtctacctta

SEQ ID NO: 1240071 - DNA, 15 bp, Homo sapiens
caccttgtctacctt

SEQ ID NO: 1240072 - DNA, 15 bp, Homo sapiens
ccaccttgtctacct

SEQ ID NO: 1240073 - DNA, 15 bp, Homo sapiens
accaccttgtctacc

SEQ ID NO: 1240074 - DNA, 15 bp, Homo sapiens
taccaccttgtctac

SEQ ID NO: 1240075 - DNA, 15 bp, Homo sapiens
ctaccaccttgtcta

SEQ ID NO: 1240076 - DNA, 15 bp, Homo sapiens
cctaccaccttgtct

SEQ ID NO: 1240077 - DNA, 15 bp, Homo sapiens
tcctaccaccttgtc

SEQ ID NO: 1240078 - DNA, 15 bp, Homo sapiens
gtcctaccaccttgt

SEQ ID NO: 1240079 - DNA, 15 bp, Homo sapiens
agtcctaccaccttg

SEQ ID NO: 1240080 - DNA, 15 bp, Homo sapiens
aagtcctaccacctt

SEQ ID NO: 1240081 - DNA, 15 bp, Homo sapiens
gaagtcctaccacct

SEQ ID NO: 1240082 - DNA, 15 bp, Homo sapiens
tgaagtcctaccacc

SEQ ID NO: 1240083 - DNA, 15 bp, Homo sapiens
ctgaagtcctaccac

SEQ ID NO: 1240084 - DNA, 15 bp, Homo sapiens
tctgaagtcctacca

SEQ ID NO: 1240085 - DNA, 15 bp, Homo sapiens
ttctgaagtcctacc

SEQ ID NO: 1240086 - DNA, 15 bp, Homo sapiens
tttctgaagtcctac

SEQ ID NO: 1240087 - DNA, 15 bp, Homo sapiens
atttctgaagtccta

SEQ ID NO: 1240088 - DNA, 15 bp, Homo sapiens
aatttctgaagtcct

SEQ ID NO: 1240089 - DNA, 15 bp, Homo sapiens
caatttctgaagtcc

SEQ ID NO: 1240090 - DNA, 15 bp, Homo sapiens
tcaatttctgaagtc

SEQ ID NO: 1240091 - DNA, 15 bp, Homo sapiens
gtcaatttctgaagt

SEQ ID NO: 1240092 - DNA, 15 bp, Homo sapiens
ggtcaatttctgaag

SEQ ID NO: 1240093 - DNA, 15 bp, Homo sapiens
aggtcaatttctgaa

SEQ ID NO: 1240094 - DNA, 15 bp, Homo sapiens
taggtcaatttctga

SEQ ID NO: 1240095 - DNA, 15 bp, Homo sapiens
ctaggtcaatttctg

SEQ ID NO: 1240096 - DNA, 15 bp, Homo sapiens
cctaggtcaatttct

SEQ ID NO: 1240097 - DNA, 15 bp, Homo sapiens
acctaggtcaatttc

SEQ ID NO: 1240098 - DNA, 15 bp, Homo sapiens
gacctaggtcaattt

SEQ ID NO: 1240099 - DNA, 15 bp, Homo sapiens
agacctaggtcaatt

SEQ ID NO: 1240100 - DNA, 15 bp, Homo sapiens
tagacctaggtcaat

SEQ ID NO: 1240101 - DNA, 15 bp, Homo sapiens
atagacctaggtcaa

SEQ ID NO: 1240102 - DNA, 15 bp, Homo sapiens
aatagacctaggtca

SEQ ID NO: 1240103 - DNA, 15 bp, Homo sapiens
taatagacctaggtc

SEQ ID NO: 1240104 - DNA, 15 bp, Homo sapiens
ataatagacctaggt

SEQ ID NO: 1240105 - DNA, 15 bp, Homo sapiens
cataatagacctagg

SEQ ID NO: 1240106 - DNA, 15 bp, Homo sapiens
gcataatagacctag

SEQ ID NO: 1240107 - DNA, 15 bp, Homo sapiens
agcataatagaccta

SEQ ID NO: 1240108 - DNA, 15 bp, Homo sapiens
tagcataatagacct

SEQ ID NO: 1240109 - DNA, 15 bp, Homo sapiens
ttagcataatagacc

SEQ ID NO: 1240110 - DNA, 15 bp, Homo sapiens
tttagcataatagac

SEQ ID NO: 1240111 - DNA, 15 bp, Homo sapiens
ttttagcataataga

SEQ ID NO: 1240112 - DNA, 15 bp, Homo sapiens
gttttagcataatag

SEQ ID NO: 1240113 - DNA, 15 bp, Homo sapiens
ggttttagcataata

SEQ ID NO: 1240114 - DNA, 15 bp, Homo sapiens
aggttttagcataat

SEQ ID NO: 1240115 - DNA, 15 bp, Homo sapiens
gaggttttagcataa

SEQ ID NO: 1240116 - DNA, 15 bp, Homo sapiens
ggaggttttagcata

SEQ ID NO: 1240117 - DNA, 15 bp, Homo sapiens
cggaggttttagcat

SEQ ID NO: 1240118 - DNA, 15 bp, Homo sapiens
ccggaggttttagca

SEQ ID NO: 1240119 - DNA, 15 bp, Homo sapiens
gccggaggttttagc

SEQ ID NO: 1240120 - DNA, 15 bp, Homo sapiens
ggccggaggttttag

SEQ ID NO: 1240121 - DNA, 15 bp, Homo sapiens
aggccggaggtttta

SEQ ID NO: 1240122 - DNA, 15 bp, Homo sapiens
aaggccggaggtttt

SEQ ID NO: 1240123 - DNA, 15 bp, Homo sapiens
taaggccggaggttt

SEQ ID NO: 1240124 - DNA, 15 bp, Homo sapiens
ataaggccggaggtt

SEQ ID NO: 1240125 - DNA, 15 bp, Homo sapiens
tataaggccggaggt

SEQ ID NO: 1240126 - DNA, 15 bp, Homo sapiens
atataaggccggagg

SEQ ID NO: 1240127 - DNA, 15 bp, Homo sapiens
aatataaggccggag

SEQ ID NO: 1240128 - DNA, 15 bp, Homo sapiens
aaatataaggccgga

SEQ ID NO: 1240129 - DNA, 15 bp, Homo sapiens
aaaatataaggccgg

SEQ ID NO: 1240130 - DNA, 15 bp, Homo sapiens
aaaaatataaggccg

SEQ ID NO: 1240131 - DNA, 15 bp, Homo sapiens
aaaaaatataaggcc

SEQ ID NO: 1240132 - DNA, 15 bp, Homo sapiens
aaaaaaatataaggc

SEQ ID NO: 1240133 - DNA, 15 bp, Homo sapiens
aaaaaaaatataagg

SEQ ID NO: 1240134 - DNA, 15 bp, Homo sapiens
taaaaaaaatataag

SEQ ID NO: 1240135 - DNA, 15 bp, Homo sapiens
ttaaaaaaaatataa

SEQ ID NO: 1240136 - DNA, 15 bp, Homo sapiens
attaaaaaaaatata

SEQ ID NO: 1240137 - DNA, 15 bp, Homo sapiens
gattaaaaaaaatat

SEQ ID NO: 1240138 - DNA, 15 bp, Homo sapiens
tgattaaaaaaaata

SEQ ID NO: 1240139 - DNA, 15 bp, Homo sapiens
ctgattaaaaaaaat

SEQ ID NO: 1240140 - DNA, 15 bp, Homo sapiens
tctgattaaaaaaaa

SEQ ID NO: 1240141 - DNA, 15 bp, Homo sapiens
ctctgattaaaaaaa

SEQ ID NO: 1240142 - DNA, 15 bp, Homo sapiens
tctctgattaaaaaa

SEQ ID NO: 1240143 - DNA, 15 bp, Homo sapiens
ttctctgattaaaaa

SEQ ID NO: 1240144 - DNA, 15 bp, Homo sapiens
tttctctgattaaaa

SEQ ID NO: 1240145 - DNA, 15 bp, Homo sapiens
ttttctctgattaaa

SEQ ID NO: 1240146 - DNA, 15 bp, Homo sapiens
tttttctctgattaa

SEQ ID NO: 1240147 - DNA, 15 bp, Homo sapiens
gtttttctctgatta

SEQ ID NO: 1240148 - DNA, 15 bp, Homo sapiens
ggtttttctctgatt

SEQ ID NO: 1240149 - DNA, 15 bp, Homo sapiens
tggtttttctctgat

SEQ ID NO: 1240150 - DNA, 15 bp, Homo sapiens
ttggtttttctctga

SEQ ID NO: 1240151 - DNA, 15 bp, Homo sapiens
attggtttttctctg

SEQ ID NO: 1240152 - DNA, 15 bp, Homo sapiens
aattggtttttctct

SEQ ID NO: 1240153 - DNA, 15 bp, Homo sapiens
caattggtttttctc

SEQ ID NO: 1240154 - DNA, 15 bp, Homo sapiens
acaattggtttttct

SEQ ID NO: 1240155 - DNA, 15 bp, Homo sapiens
aacaattggtttttc

SEQ ID NO: 1240156 - DNA, 15 bp, Homo sapiens
taacaattggttttt

SEQ ID NO: 1240157 - DNA, 15 bp, Homo sapiens
ataacaattggtttt

SEQ ID NO: 1240158 - DNA, 15 bp, Homo sapiens
cataacaattggttt

SEQ ID NO: 1240159 - DNA, 15 bp, Homo sapiens
tcataacaattggtt

SEQ ID NO: 1240160 - DNA, 15 bp, Homo sapiens
ctcataacaattggt

SEQ ID NO: 1240161 - DNA, 15 bp, Homo sapiens
tctcataacaattgg

SEQ ID NO: 1240162 - DNA, 15 bp, Homo sapiens
ttctcataacaattg

SEQ ID NO: 1240163 - DNA, 15 bp, Homo sapiens
tttctcataacaatt

SEQ ID NO: 1240164 - DNA, 15 bp, Homo sapiens
ctttctcataacaat

SEQ ID NO: 1240165 - DNA, 15 bp, Homo sapiens
gctttctcataacaa

SEQ ID NO: 1240166 - DNA, 15 bp, Homo sapiens
tgctttctcataaca

SEQ ID NO: 1240167 - DNA, 15 bp, Homo sapiens
ctgctttctcataac

SEQ ID NO: 1240168 - DNA, 15 bp, Homo sapiens
tctgctttctcataa

SEQ ID NO: 1240169 - DNA, 15 bp, Homo sapiens
ttctgctttctcata

SEQ ID NO: 1240170 - DNA, 15 bp, Homo sapiens
attctgctttctcat

SEQ ID NO: 1240171 - DNA, 15 bp, Homo sapiens
cattctgctttctca

SEQ ID NO: 1240172 - DNA, 15 bp, Homo sapiens
tcattctgctttctc

SEQ ID NO: 1240173 - DNA, 15 bp, Homo sapiens
gtcattctgctttct

SEQ ID NO: 1240174 - DNA, 15 bp, Homo sapiens
tgtcattctgctttc

SEQ ID NO: 1240175 - DNA, 15 bp, Homo sapiens
gtgtcattctgcttt

SEQ ID NO: 1240176 - DNA, 15 bp, Homo sapiens
tgtgtcattctgctt

SEQ ID NO: 1240177 - DNA, 15 bp, Homo sapiens
ctgtgtcattctgct

SEQ ID NO: 1240178 - DNA, 15 bp, Homo sapiens
gctgtgtcattctgc

SEQ ID NO: 1240179 - DNA, 15 bp, Homo sapiens
tgctgtgtcattctg

SEQ ID NO: 1240180 - DNA, 15 bp, Homo sapiens
ctgctgtgtcattct

SEQ ID NO: 1240181 - DNA, 15 bp, Homo sapiens
actgctgtgtcattc

SEQ ID NO: 1240182 - DNA, 15 bp, Homo sapiens
aactgctgtgtcatt

SEQ ID NO: 1240183 - DNA, 15 bp, Homo sapiens
taactgctgtgtcat

SEQ ID NO: 1240184 - DNA, 15 bp, Homo sapiens
ataactgctgtgtca

SEQ ID NO: 1240185 - DNA, 15 bp, Homo sapiens
aataactgctgtgtc

SEQ ID NO: 1240186 - DNA, 15 bp, Homo sapiens
aaataactgctgtgt

SEQ ID NO: 1240187 - DNA, 15 bp, Homo sapiens
aaaataactgctgtg

SEQ ID NO: 1240188 - DNA, 15 bp, Homo sapiens
caaaataactgctgt

SEQ ID NO: 1240189 - DNA, 15 bp, Homo sapiens
gcaaaataactgctg

SEQ ID NO: 1240190 - DNA, 15 bp, Homo sapiens
tgcaaaataactgct

SEQ ID NO: 1240191 - DNA, 15 bp, Homo sapiens
atgcaaaataactgc

SEQ ID NO: 1240192 - DNA, 15 bp, Homo sapiens
gatgcaaaataactg

SEQ ID NO: 1240193 - DNA, 15 bp, Homo sapiens
agatgcaaaataact

SEQ ID NO: 1240194 - DNA, 15 bp, Homo sapiens
gagatgcaaaataac

SEQ ID NO: 1240195 - DNA, 15 bp, Homo sapiens
agagatgcaaaataa

SEQ ID NO: 1240196 - DNA, 15 bp, Homo sapiens
aagagatgcaaaata

SEQ ID NO: 1240197 - DNA, 15 bp, Homo sapiens
aaagagatgcaaaat

SEQ ID NO: 1240198 - DNA, 15 bp, Homo sapiens
aaaagagatgcaaaa

SEQ ID NO: 1240199 - DNA, 15 bp, Homo sapiens
aaaaagagatgcaaa

SEQ ID NO: 1240200 - DNA, 15 bp, Homo sapiens
caaaaagagatgcaa

SEQ ID NO: 1240201 - DNA, 15 bp, Homo sapiens
acaaaaagagatgca

SEQ ID NO: 1240202 - DNA, 15 bp, Homo sapiens
aacaaaaagagatgc

SEQ ID NO: 1240203 - DNA, 15 bp, Homo sapiens
caacaaaaagagatg

SEQ ID NO: 1240204 - DNA, 15 bp, Homo sapiens
acaacaaaaagagat

SEQ ID NO: 1240205 - DNA, 15 bp, Homo sapiens
tacaacaaaaagaga

SEQ ID NO: 1240206 - DNA, 15 bp, Homo sapiens
ttacaacaaaaagag

SEQ ID NO: 1240207 - DNA, 15 bp, Homo sapiens
tttacaacaaaaaga

SEQ ID NO: 1240208 - DNA, 15 bp, Homo sapiens
ctttacaacaaaaag

SEQ ID NO: 1240209 - DNA, 15 bp, Homo sapiens
tctttacaacaaaaa

SEQ ID NO: 1240210 - DNA, 15 bp, Homo sapiens
ctctttacaacaaaa

SEQ ID NO: 1240211 - DNA, 15 bp, Homo sapiens
tctctttacaacaaa

SEQ ID NO: 1240212 - DNA, 15 bp, Homo sapiens
ttctctttacaacaa

SEQ ID NO: 1240213 - DNA, 15 bp, Homo sapiens
gttctctttacaaca

SEQ ID NO: 1240214 - DNA, 15 bp, Homo sapiens
cgttctctttacaac

SEQ ID NO: 1240215 - DNA, 15 bp, Homo sapiens
tcgttctctttacaa

SEQ ID NO: 1240216 - DNA, 15 bp, Homo sapiens
atcgttctctttaca

SEQ ID NO: 1240217 - DNA, 15 bp, Homo sapiens
gatcgttctctttac

SEQ ID NO: 1240218 - DNA, 15 bp, Homo sapiens
agatcgttctcttta

SEQ ID NO: 1240219 - DNA, 15 bp, Homo sapiens
aagatcgttctcttt

SEQ ID NO: 1240220 - DNA, 15 bp, Homo sapiens
aaagatcgttctctt

SEQ ID NO: 1240221 - DNA, 15 bp, Homo sapiens
taaagatcgttctct

SEQ ID NO: 1240222 - DNA, 15 bp, Homo sapiens
ttaaagatcgttctc

SEQ ID NO: 1240223 - DNA, 15 bp, Homo sapiens
tttaaagatcgttct

SEQ ID NO: 1240224 - DNA, 15 bp, Homo sapiens
gtttaaagatcgttc

SEQ ID NO: 1240225 - DNA, 15 bp, Homo sapiens
agtttaaagatcgtt

SEQ ID NO: 1240226 - DNA, 15 bp, Homo sapiens
cagtttaaagatcgt

SEQ ID NO: 1240227 - DNA, 15 bp, Homo sapiens
ccagtttaaagatcg

SEQ ID NO: 1240228 - DNA, 15 bp, Homo sapiens
cccagtttaaagatc

SEQ ID NO: 1240229 - DNA, 15 bp, Homo sapiens
tcccagtttaaagat

SEQ ID NO: 1240230 - DNA, 15 bp, Homo sapiens
ttcccagtttaaaga

SEQ ID NO: 1240231 - DNA, 15 bp, Homo sapiens
attcccagtttaaag

SEQ ID NO: 1240232 - DNA, 15 bp, Homo sapiens
cattcccagtttaaa

SEQ ID NO: 1240233 - DNA, 15 bp, Homo sapiens
acattcccagtttaa

SEQ ID NO: 1240234 - DNA, 15 bp, Homo sapiens
aacattcccagttta

SEQ ID NO: 1240235 - DNA, 15 bp, Homo sapiens
caacattcccagttt

SEQ ID NO: 1240236 - DNA, 15 bp, Homo sapiens
tcaacattcccagtt

SEQ ID NO: 1240237 - DNA, 15 bp, Homo sapiens
ttcaacattcccagt

SEQ ID NO: 1240238 - DNA, 15 bp, Homo sapiens
tttcaacattcccag

SEQ ID NO: 1240239 - DNA, 15 bp, Homo sapiens
gtttcaacattccca

SEQ ID NO: 1240240 - DNA, 15 bp, Homo sapiens
tgtttcaacattccc

SEQ ID NO: 1240241 - DNA, 15 bp, Homo sapiens
ttgtttcaacattcc

SEQ ID NO: 1240242 - DNA, 15 bp, Homo sapiens
tttgtttcaacattc

SEQ ID NO: 1240243 - DNA, 15 bp, Homo sapiens
ttttgtttcaacatt

SEQ ID NO: 1240244 - DNA, 15 bp, Homo sapiens
attttgtttcaacat

SEQ ID NO: 1240245 - DNA, 15 bp, Homo sapiens
tattttgtttcaaca

SEQ ID NO: 1240246 - DNA, 15 bp, Homo sapiens
atattttgtttcaac

SEQ ID NO: 1240247 - DNA, 15 bp, Homo sapiens
aatattttgtttcaa

SEQ ID NO: 1240248 - DNA, 15 bp, Homo sapiens
caatattttgtttca

SEQ ID NO: 1240249 - DNA, 15 bp, Homo sapiens
tcaatattttgtttc

SEQ ID NO: 1240250 - DNA, 15 bp, Homo sapiens
ctcaatattttgttt

SEQ ID NO: 1240251 - DNA, 15 bp, Homo sapiens
tctcaatattttgtt

SEQ ID NO: 1240252 - DNA, 15 bp, Homo sapiens
ctctcaatattttgt

SEQ ID NO: 1240253 - DNA, 15 bp, Homo sapiens
gctctcaatattttg

SEQ ID NO: 1240254 - DNA, 15 bp, Homo sapiens
ggctctcaatatttt

SEQ ID NO: 1240255 - DNA, 15 bp, Homo sapiens
tggctctcaatattt

SEQ ID NO: 1240256 - DNA, 15 bp, Homo sapiens
ttggctctcaatatt

SEQ ID NO: 1240257 - DNA, 15 bp, Homo sapiens
cttggctctcaatat

SEQ ID NO: 1240258 - DNA, 15 bp, Homo sapiens
tcttggctctcaata

SEQ ID NO: 1240259 - DNA, 15 bp, Homo sapiens
ctcttggctctcaat

SEQ ID NO: 1240260 - DNA, 15 bp, Homo sapiens
tctcttggctctcaa

SEQ ID NO: 1240261 - DNA, 15 bp, Homo sapiens
ttctcttggctctca

SEQ ID NO: 1240262 - DNA, 15 bp, Homo sapiens
cttctcttggctctc

SEQ ID NO: 1240263 - DNA, 15 bp, Homo sapiens
gcttctcttggctct

SEQ ID NO: 1240264 - DNA, 15 bp, Homo sapiens
agcttctcttggctc

SEQ ID NO: 1240265 - DNA, 15 bp, Homo sapiens
aagcttctcttggct

SEQ ID NO: 1240266 - DNA, 15 bp, Homo sapiens
caagcttctcttggc

SEQ ID NO: 1240267 - DNA, 15 bp, Homo sapiens
ccaagcttctcttgg

SEQ ID NO: 1240268 - DNA, 15 bp, Homo sapiens
gccaagcttctcttg

SEQ ID NO: 1240269 - DNA, 15 bp, Homo sapiens
agccaagcttctctt

SEQ ID NO: 1240270 - DNA, 15 bp, Homo sapiens
cagccaagcttctct

SEQ ID NO: 1240271 - DNA, 15 bp, Homo sapiens
ccagccaagcttctc

SEQ ID NO: 1240272 - DNA, 15 bp, Homo sapiens
accagccaagcttct

SEQ ID NO: 1240273 - DNA, 15 bp, Homo sapiens
taccagccaagcttc

SEQ ID NO: 1240274 - DNA, 15 bp, Homo sapiens
ctaccagccaagctt

SEQ ID NO: 1240275 - DNA, 15 bp, Homo sapiens
tctaccagccaagct

SEQ ID NO: 1240276 - DNA, 15 bp, Homo sapiens
atctaccagccaagc

SEQ ID NO: 1240277 - DNA, 15 bp, Homo sapiens
gatctaccagccaag

SEQ ID NO: 1240278 - DNA, 15 bp, Homo sapiens
agatctaccagccaa

SEQ ID NO: 1240279 - DNA, 15 bp, Homo sapiens
aagatctaccagcca

SEQ ID NO: 1240280 - DNA, 15 bp, Homo sapiens
caagatctaccagcc

SEQ ID NO: 1240281 - DNA, 15 bp, Homo sapiens
ccaagatctaccagc

SEQ ID NO: 1240282 - DNA, 15 bp, Homo sapiens
accaagatctaccag

SEQ ID NO: 1240283 - DNA, 15 bp, Homo sapiens
taccaagatctacca

SEQ ID NO: 1240284 - DNA, 15 bp, Homo sapiens
gtaccaagatctacc

SEQ ID NO: 1240285 - DNA, 15 bp, Homo sapiens
ggtaccaagatctac

SEQ ID NO: 1240286 - DNA, 15 bp, Homo sapiens
gggtaccaagatcta

SEQ ID NO: 1240287 - DNA, 15 bp, Homo sapiens
agggtaccaagatct

SEQ ID NO: 1240288 - DNA, 15 bp, Homo sapiens
cagggtaccaagatc

SEQ ID NO: 1240289 - DNA, 15 bp, Homo sapiens
acagggtaccaagat

SEQ ID NO: 1240290 - DNA, 15 bp, Homo sapiens
gacagggtaccaaga

SEQ ID NO: 1240291 - DNA, 15 bp, Homo sapiens
ggacagggtaccaag

SEQ ID NO: 1240292 - DNA, 15 bp, Homo sapiens
aggacagggtaccaa

SEQ ID NO: 1240293 - DNA, 15 bp, Homo sapiens
aaggacagggtacca

SEQ ID NO: 1240294 - DNA, 15 bp, Homo sapiens
caaggacagggtacc

SEQ ID NO: 1240295 - DNA, 15 bp, Homo sapiens
ccaaggacagggtac

SEQ ID NO: 1240296 - DNA, 15 bp, Homo sapiens
tccaaggacagggta

SEQ ID NO: 1240297 - DNA, 15 bp, Homo sapiens
gtccaaggacagggt

SEQ ID NO: 1240298 - DNA, 15 bp, Homo sapiens
agtccaaggacaggg

SEQ ID NO: 1240299 - DNA, 15 bp, Homo sapiens
tagtccaaggacagg

SEQ ID NO: 1240300 - DNA, 15 bp, Homo sapiens
ctagtccaaggacag

SEQ ID NO: 1240301 - DNA, 15 bp, Homo sapiens
actagtccaaggaca

SEQ ID NO: 1240302 - DNA, 15 bp, Homo sapiens
cactagtccaaggac

SEQ ID NO: 1240303 - DNA, 15 bp, Homo sapiens
tcactagtccaagga

SEQ ID NO: 1240304 - DNA, 15 bp, Homo sapiens
gtcactagtccaagg

SEQ ID NO: 1240305 - DNA, 15 bp, Homo sapiens
agtcactagtccaag

SEQ ID NO: 1240306 - DNA, 15 bp, Homo sapiens
aagtcactagtccaa

SEQ ID NO: 1240307 - DNA, 15 bp, Homo sapiens
gaagtcactagtcca

SEQ ID NO: 1240308 - DNA, 15 bp, Homo sapiens
tgaagtcactagtcc

SEQ ID NO: 1240309 - DNA, 15 bp, Homo sapiens
gtgaagtcactagtc

SEQ ID NO: 1240310 - DNA, 15 bp, Homo sapiens
ggtgaagtcactagt

SEQ ID NO: 1240311 - DNA, 15 bp, Homo sapiens
gggtgaagtcactag

SEQ ID NO: 1240312 - DNA, 15 bp, Homo sapiens
ggggtgaagtcacta

SEQ ID NO: 1240313 - DNA, 15 bp, Homo sapiens
tggggtgaagtcact

SEQ ID NO: 1240314 - DNA, 15 bp, Homo sapiens
atggggtgaagtcac

SEQ ID NO: 1240315 - DNA, 15 bp, Homo sapiens
gatggggtgaagtca

SEQ ID NO: 1240316 - DNA, 15 bp, Homo sapiens
tgatggggtgaagtc

SEQ ID NO: 1240317 - DNA, 15 bp, Homo sapiens
gtgatggggtgaagt

SEQ ID NO: 1240318 - DNA, 15 bp, Homo sapiens
ggtgatggggtgaag

SEQ ID NO: 1240319 - DNA, 15 bp, Homo sapiens
aggtgatggggtgaa

SEQ ID NO: 1240320 - DNA, 15 bp, Homo sapiens
taggtgatggggtga

SEQ ID NO: 1240321 - DNA, 15 bp, Homo sapiens
ataggtgatggggtg

SEQ ID NO: 1240322 - DNA, 15 bp, Homo sapiens
gataggtgatggggt

SEQ ID NO: 1240323 - DNA, 15 bp, Homo sapiens
agataggtgatgggg

SEQ ID NO: 1240324 - DNA, 15 bp, Homo sapiens
cagataggtgatggg

SEQ ID NO: 1240325 - DNA, 15 bp, Homo sapiens
acagataggtgatgg

SEQ ID NO: 1240326 - DNA, 15 bp, Homo sapiens
aacagataggtgatg

SEQ ID NO: 1240327 - DNA, 15 bp, Homo sapiens
taacagataggtgat

SEQ ID NO: 1240328 - DNA, 15 bp, Homo sapiens
gtaacagataggtga

SEQ ID NO: 1240329 - DNA, 15 bp, Homo sapiens
agtaacagataggtg

SEQ ID NO: 1240330 - DNA, 15 bp, Homo sapiens
aagtaacagataggt

SEQ ID NO: 1240331 - DNA, 15 bp, Homo sapiens
taagtaacagatagg

SEQ ID NO: 1240332 - DNA, 15 bp, Homo sapiens
gtaagtaacagatag

SEQ ID NO: 1240333 - DNA, 15 bp, Homo sapiens
tgtaagtaacagata

SEQ ID NO: 1240334 - DNA, 15 bp, Homo sapiens
ttgtaagtaacagat

SEQ ID NO: 1240335 - DNA, 15 bp, Homo sapiens
cttgtaagtaacaga

SEQ ID NO: 1240336 - DNA, 15 bp, Homo sapiens
ccttgtaagtaacag

SEQ ID NO: 1240337 - DNA, 15 bp, Homo sapiens
cccttgtaagtaaca

SEQ ID NO: 1240338 - DNA, 15 bp, Homo sapiens
ccccttgtaagtaac

SEQ ID NO: 1240339 - DNA, 15 bp, Homo sapiens
cccccttgtaagtaa

SEQ ID NO: 1240340 - DNA, 15 bp, Homo sapiens
acccccttgtaagta

SEQ ID NO: 1240341 - DNA, 15 bp, Homo sapiens
cacccccttgtaagt

SEQ ID NO: 1240342 - DNA, 15 bp, Homo sapiens
tcacccccttgtaag

SEQ ID NO: 1240343 - DNA, 15 bp, Homo sapiens
ttcacccccttgtaa

SEQ ID NO: 1240344 - DNA, 15 bp, Homo sapiens
attcacccccttgta

SEQ ID NO: 1240345 - DNA, 15 bp, Homo sapiens
gattcacccccttgt

SEQ ID NO: 1240346 - DNA, 15 bp, Homo sapiens
tgattcacccccttg

SEQ ID NO: 1240347 - DNA, 15 bp, Homo sapiens
ctgattcaccccctt

SEQ ID NO: 1240348 - DNA, 15 bp, Homo sapiens
cctgattcaccccct

SEQ ID NO: 1240349 - DNA, 15 bp, Homo sapiens
ccctgattcaccccc

SEQ ID NO: 1240350 - DNA, 15 bp, Homo sapiens
tccctgattcacccc

SEQ ID NO: 1240351 - DNA, 15 bp, Homo sapiens
ctccctgattcaccc

SEQ ID NO: 1240352 - DNA, 15 bp, Homo sapiens
gctccctgattcacc

SEQ ID NO: 1240353 - DNA, 15 bp, Homo sapiens
agctccctgattcac

SEQ ID NO: 1240354 - DNA, 15 bp, Homo sapiens
tagctccctgattca

SEQ ID NO: 1240355 - DNA, 15 bp, Homo sapiens
atagctccctgattc

SEQ ID NO: 1240356 - DNA, 15 bp, Homo sapiens
aatagctccctgatt

SEQ ID NO: 1240357 - DNA, 15 bp, Homo sapiens
aaatagctccctgat

SEQ ID NO: 1240358 - DNA, 15 bp, Homo sapiens
caaatagctccctga

SEQ ID NO: 1240359 - DNA, 15 bp, Homo sapiens
ccaaatagctccctg

SEQ ID NO: 1240360 - DNA, 15 bp, Homo sapiens
cccaaatagctccct

SEQ ID NO: 1240361 - DNA, 15 bp, Homo sapiens
ccccaaatagctccc

SEQ ID NO: 1240362 - DNA, 15 bp, Homo sapiens
gccccaaatagctcc

SEQ ID NO: 1240363 - DNA, 15 bp, Homo sapiens
ggccccaaatagctc

SEQ ID NO: 1240364 - DNA, 15 bp, Homo sapiens
tggccccaaatagct

SEQ ID NO: 1240365 - DNA, 15 bp, Homo sapiens
ttggccccaaatagc

SEQ ID NO: 1240366 - DNA, 15 bp, Homo sapiens
cttggccccaaatag

SEQ ID NO: 1240367 - DNA, 15 bp, Homo sapiens
ccttggccccaaata

SEQ ID NO: 1240368 - DNA, 15 bp, Homo sapiens
accttggccccaaat

SEQ ID NO: 1240369 - DNA, 15 bp, Homo sapiens
aaccttggccccaaa

SEQ ID NO: 1240370 - DNA, 15 bp, Homo sapiens
aaaccttggccccaa

SEQ ID NO: 1240371 - DNA, 15 bp, Homo sapiens
aaaaccttggcccca

SEQ ID NO: 1240372 - DNA, 15 bp, Homo sapiens
taaaaccttggcccc

SEQ ID NO: 1240373 - DNA, 15 bp, Homo sapiens
ataaaaccttggccc

SEQ ID NO: 1240374 - DNA, 15 bp, Homo sapiens
cataaaaccttggcc

SEQ ID NO: 1240375 - DNA, 15 bp, Homo sapiens
tcataaaaccttggc

SEQ ID NO: 1240376 - DNA, 15 bp, Homo sapiens
ctcataaaaccttgg

SEQ ID NO: 1240377 - DNA, 15 bp, Homo sapiens
tctcataaaaccttg

SEQ ID NO: 1240378 - DNA, 15 bp, Homo sapiens
ttctcataaaacctt

SEQ ID NO: 1240379 - DNA, 15 bp, Homo sapiens
tttctcataaaacct

SEQ ID NO: 1240380 - DNA, 15 bp, Homo sapiens
atttctcataaaacc

SEQ ID NO: 1240381 - DNA, 15 bp, Homo sapiens
gatttctcataaaac

SEQ ID NO: 1240382 - DNA, 15 bp, Homo sapiens
tgatttctcataaaa

SEQ ID NO: 1240383 - DNA, 15 bp, Homo sapiens
ttgatttctcataaa

SEQ ID NO: 1240384 - DNA, 15 bp, Homo sapiens
cttgatttctcataa

SEQ ID NO: 1240385 - DNA, 15 bp, Homo sapiens
tcttgatttctcata

SEQ ID NO: 1240386 - DNA, 15 bp, Homo sapiens
ctcttgatttctcat

SEQ ID NO: 1240387 - DNA, 15 bp, Homo sapiens
tctcttgatttctca

SEQ ID NO: 1240388 - DNA, 15 bp, Homo sapiens
atctcttgatttctc

SEQ ID NO: 1240389 - DNA, 15 bp, Homo sapiens
gatctcttgatttct

SEQ ID NO: 1240390 - DNA, 15 bp, Homo sapiens
tgatctcttgatttc

SEQ ID NO: 1240391 - DNA, 15 bp, Homo sapiens
gtgatctcttgattt

SEQ ID NO: 1240392 - DNA, 15 bp, Homo sapiens
agtgatctcttgatt

SEQ ID NO: 1240393 - DNA, 15 bp, Homo sapiens
tagtgatctcttgat

SEQ ID NO: 1240394 - DNA, 15 bp, Homo sapiens
atagtgatctcttga

SEQ ID NO: 1240395 - DNA, 15 bp, Homo sapiens
aatagtgatctcttg

SEQ ID NO: 1240396 - DNA, 15 bp, Homo sapiens
aaatagtgatctctt

SEQ ID NO: 1240397 - DNA, 15 bp, Homo sapiens
caaatagtgatctct

SEQ ID NO: 1240398 - DNA, 15 bp, Homo sapiens
gcaaatagtgatctc

SEQ ID NO: 1240399 - DNA, 15 bp, Homo sapiens
ggcaaatagtgatct

SEQ ID NO: 1240400 - DNA, 15 bp, Homo sapiens
gggcaaatagtgatc

SEQ ID NO: 1240401 - DNA, 15 bp, Homo sapiens
cgggcaaatagtgat

SEQ ID NO: 1240402 - DNA, 15 bp, Homo sapiens
acgggcaaatagtga

SEQ ID NO: 1240403 - DNA, 15 bp, Homo sapiens
tacgggcaaatagtg

SEQ ID NO: 1240404 - DNA, 15 bp, Homo sapiens
ctacgggcaaatagt

SEQ ID NO: 1240405 - DNA, 15 bp, Homo sapiens
tctacgggcaaatag

SEQ ID NO: 1240406 - DNA, 15 bp, Homo sapiens
ttctacgggcaaata

SEQ ID NO: 1240407 - DNA, 15 bp, Homo sapiens
cttctacgggcaaat

SEQ ID NO: 1240408 - DNA, 15 bp, Homo sapiens
tcttctacgggcaaa

SEQ ID NO: 1240409 - DNA, 15 bp, Homo sapiens
ttcttctacgggcaa

SEQ ID NO: 1240410 - DNA, 15 bp, Homo sapiens
attcttctacgggca

SEQ ID NO: 1240411 - DNA, 15 bp, Homo sapiens
aattcttctacgggc

SEQ ID NO: 1240412 - DNA, 15 bp, Homo sapiens
gaattcttctacggg

SEQ ID NO: 1240413 - DNA, 15 bp, Homo sapiens
tgaattcttctacgg

SEQ ID NO: 1240414 - DNA, 15 bp, Homo sapiens
atgaattcttctacg

SEQ ID NO: 1240415 - DNA, 15 bp, Homo sapiens
tatgaattcttctac

SEQ ID NO: 1240416 - DNA, 15 bp, Homo sapiens
atatgaattcttcta

SEQ ID NO: 1240417 - DNA, 15 bp, Homo sapiens
gatatgaattcttct

SEQ ID NO: 1240418 - DNA, 15 bp, Homo sapiens
agatatgaattcttc

SEQ ID NO: 1240419 - DNA, 15 bp, Homo sapiens
aagatatgaattctt

SEQ ID NO: 1240420 - DNA, 15 bp, Homo sapiens
aaagatatgaattct

SEQ ID NO: 1240421 - DNA, 15 bp, Homo sapiens
caaagatatgaattc

SEQ ID NO: 1240422 - DNA, 15 bp, Homo sapiens
ccaaagatatgaatt

SEQ ID NO: 1240423 - DNA, 15 bp, Homo sapiens
accaaagatatgaat

SEQ ID NO: 1240424 - DNA, 15 bp, Homo sapiens
aaccaaagatatgaa

SEQ ID NO: 1240425 - DNA, 15 bp, Homo sapiens
gaaccaaagatatga

SEQ ID NO: 1240426 - DNA, 15 bp, Homo sapiens
ggaaccaaagatatg

SEQ ID NO: 1240427 - DNA, 15 bp, Homo sapiens
tggaaccaaagatat

SEQ ID NO: 1240428 - DNA, 15 bp, Homo sapiens
ttggaaccaaagata

SEQ ID NO: 1240429 - DNA, 15 bp, Homo sapiens
tttggaaccaaagat

SEQ ID NO: 1240430 - DNA, 15 bp, Homo sapiens
gtttggaaccaaaga

SEQ ID NO: 1240431 - DNA, 15 bp, Homo sapiens
tgtttggaaccaaag

SEQ ID NO: 1240432 - DNA, 15 bp, Homo sapiens
atgtttggaaccaaa

SEQ ID NO: 1240433 - DNA, 15 bp, Homo sapiens
aatgtttggaaccaa

SEQ ID NO: 1240434 - DNA, 15 bp, Homo sapiens
taatgtttggaacca

SEQ ID NO: 1240435 - DNA, 15 bp, Homo sapiens
ataatgtttggaacc

SEQ ID NO: 1240436 - DNA, 15 bp, Homo sapiens
tataatgtttggaac

SEQ ID NO: 1240437 - DNA, 15 bp, Homo sapiens
ctataatgtttggaa

SEQ ID NO: 1240438 - DNA, 15 bp, Homo sapiens
actataatgtttgga

SEQ ID NO: 1240439 - DNA, 15 bp, Homo sapiens
tactataatgtttgg

SEQ ID NO: 1240440 - DNA, 15 bp, Homo sapiens
ctactataatgtttg

SEQ ID NO: 1240441 - DNA, 15 bp, Homo sapiens
gctactataatgttt

SEQ ID NO: 1240442 - DNA, 15 bp, Homo sapiens
ggctactataatgtt

SEQ ID NO: 1240443 - DNA, 15 bp, Homo sapiens
gggctactataatgt

SEQ ID NO: 1240444 - DNA, 15 bp, Homo sapiens
ggggctactataatg

SEQ ID NO: 1240445 - DNA, 15 bp, Homo sapiens
tggggctactataat

SEQ ID NO: 1240446 - DNA, 15 bp, Homo sapiens
atggggctactataa

SEQ ID NO: 1240447 - DNA, 15 bp, Homo sapiens
catggggctactata

SEQ ID NO: 1240448 - DNA, 15 bp, Homo sapiens
acatggggctactat

SEQ ID NO: 1240449 - DNA, 15 bp, Homo sapiens
aacatggggctacta

SEQ ID NO: 1240450 - DNA, 15 bp, Homo sapiens
taacatggggctact

SEQ ID NO: 1240451 - DNA, 15 bp, Homo sapiens
ataacatggggctac

SEQ ID NO: 1240452 - DNA, 15 bp, Homo sapiens
cataacatggggcta

SEQ ID NO: 1240453 - DNA, 15 bp, Homo sapiens
tcataacatggggct

SEQ ID NO: 1240454 - DNA, 15 bp, Homo sapiens
gtcataacatggggc

SEQ ID NO: 1240455 - DNA, 15 bp, Homo sapiens
tgtcataacatgggg

SEQ ID NO: 1240456 - DNA, 15 bp, Homo sapiens
atgtcataacatggg

SEQ ID NO: 1240457 - DNA, 15 bp, Homo sapiens
tatgtcataacatgg

SEQ ID NO: 1240458 - DNA, 15 bp, Homo sapiens
ttatgtcataacatg

SEQ ID NO: 1240459 - DNA, 15 bp, Homo sapiens
tttatgtcataacat

SEQ ID NO: 1240460 - DNA, 15 bp, Homo sapiens
ctttatgtcataaca

SEQ ID NO: 1240461 - DNA, 15 bp, Homo sapiens
tctttatgtcataac

SEQ ID NO: 1240462 - DNA, 15 bp, Homo sapiens
ctctttatgtcataa

SEQ ID NO: 1240463 - DNA, 15 bp, Homo sapiens
actctttatgtcata

SEQ ID NO: 1240464 - DNA, 15 bp, Homo sapiens
tactctttatgtcat

SEQ ID NO: 1240465 - DNA, 15 bp, Homo sapiens
ctactctttatgtca

SEQ ID NO: 1240466 - DNA, 15 bp, Homo sapiens
cctactctttatgtc

SEQ ID NO: 1240467 - DNA, 15 bp, Homo sapiens
tcctactctttatgt

SEQ ID NO: 1240468 - DNA, 15 bp, Homo sapiens
ctcctactctttatg

SEQ ID NO: 1240469 - DNA, 15 bp, Homo sapiens
cctcctactctttat

SEQ ID NO: 1240470 - DNA, 15 bp, Homo sapiens
tcctcctactcttta

SEQ ID NO: 1240471 - DNA, 15 bp, Homo sapiens
ttcctcctactcttt

SEQ ID NO: 1240472 - DNA, 15 bp, Homo sapiens
attcctcctactctt

SEQ ID NO: 1240473 - DNA, 15 bp, Homo sapiens
tattcctcctactct

SEQ ID NO: 1240474 - DNA, 15 bp, Homo sapiens
atattcctcctactc

SEQ ID NO: 1240475 - DNA, 15 bp, Homo sapiens
tatattcctcctact

SEQ ID NO: 1240476 - DNA, 15 bp, Homo sapiens
ctatattcctcctac

SEQ ID NO: 1240477 - DNA, 15 bp, Homo sapiens
cctatattcctccta

SEQ ID NO: 1240478 - DNA, 15 bp, Homo sapiens
gcctatattcctcct

SEQ ID NO: 1240479 - DNA, 15 bp, Homo sapiens
agcctatattcctcc

SEQ ID NO: 1240480 - DNA, 15 bp, Homo sapiens
aagcctatattcctc

SEQ ID NO: 1240481 - DNA, 15 bp, Homo sapiens
caagcctatattcct

SEQ ID NO: 1240482 - DNA, 15 bp, Homo sapiens
tcaagcctatattcc

SEQ ID NO: 1240483 - DNA, 15 bp, Homo sapiens
atcaagcctatattc

SEQ ID NO: 1240484 - DNA, 15 bp, Homo sapiens
tatcaagcctatatt

SEQ ID NO: 1240485 - DNA, 15 bp, Homo sapiens
atatcaagcctatat

SEQ ID NO: 1240486 - DNA, 15 bp, Homo sapiens
aatatcaagcctata

SEQ ID NO: 1240487 - DNA, 15 bp, Homo sapiens
caatatcaagcctat

SEQ ID NO: 1240488 - DNA, 15 bp, Homo sapiens
ccaatatcaagccta

SEQ ID NO: 1240489 - DNA, 15 bp, Homo sapiens
cccaatatcaagcct

SEQ ID NO: 1240490 - DNA, 15 bp, Homo sapiens
gcccaatatcaagcc

SEQ ID NO: 1240491 - DNA, 15 bp, Homo sapiens
tgcccaatatcaagc

SEQ ID NO: 1240492 - DNA, 15 bp, Homo sapiens
atgcccaatatcaag

SEQ ID NO: 1240493 - DNA, 15 bp, Homo sapiens
gatgcccaatatcaa

SEQ ID NO: 1240494 - DNA, 15 bp, Homo sapiens
agatgcccaatatca

SEQ ID NO: 1240495 - DNA, 15 bp, Homo sapiens
tagatgcccaatatc

SEQ ID NO: 1240496 - DNA, 15 bp, Homo sapiens
ttagatgcccaatat

SEQ ID NO: 1240497 - DNA, 15 bp, Homo sapiens
tttagatgcccaata

SEQ ID NO: 1240498 - DNA, 15 bp, Homo sapiens
atttagatgcccaat

SEQ ID NO: 1240499 - DNA, 15 bp, Homo sapiens
gatttagatgcccaa

SEQ ID NO: 1240500 - DNA, 15 bp, Homo sapiens
ggatttagatgccca

SEQ ID NO: 1240501 - DNA, 15 bp, Homo sapiens
gggatttagatgccc

SEQ ID NO: 1240502 - DNA, 15 bp, Homo sapiens
tgggatttagatgcc

SEQ ID NO: 1240503 - DNA, 15 bp, Homo sapiens
ctgggatttagatgc

SEQ ID NO: 1240504 - DNA, 15 bp, Homo sapiens
tctgggatttagatg

SEQ ID NO: 1240505 - DNA, 15 bp, Homo sapiens
atctgggatttagat

SEQ ID NO: 1240506 - DNA, 15 bp, Homo sapiens
gatctgggatttaga

SEQ ID NO: 1240507 - DNA, 15 bp, Homo sapiens
agatctgggatttag

SEQ ID NO: 1240508 - DNA, 15 bp, Homo sapiens
tagatctgggattta

SEQ ID NO: 1240509 - DNA, 15 bp, Homo sapiens
gtagatctgggattt

SEQ ID NO: 1240510 - DNA, 15 bp, Homo sapiens
ggtagatctgggatt

SEQ ID NO: 1240511 - DNA, 15 bp, Homo sapiens
tggtagatctgggat

SEQ ID NO: 1240512 - DNA, 15 bp, Homo sapiens
ctggtagatctggga

SEQ ID NO: 1240513 - DNA, 15 bp, Homo sapiens
actggtagatctggg

SEQ ID NO: 1240514 - DNA, 15 bp, Homo sapiens
cactggtagatctgg

SEQ ID NO: 1240515 - DNA, 15 bp, Homo sapiens
tcactggtagatctg

SEQ ID NO: 1240516 - DNA, 15 bp, Homo sapiens
atcactggtagatct

SEQ ID NO: 1240517 - DNA, 15 bp, Homo sapiens
aatcactggtagatc

SEQ ID NO: 1240518 - DNA, 15 bp, Homo sapiens
caatcactggtagat

SEQ ID NO: 1240519 - DNA, 15 bp, Homo sapiens
tcaatcactggtaga

SEQ ID NO: 1240520 - DNA, 15 bp, Homo sapiens
gtcaatcactggtag

SEQ ID NO: 1240521 - DNA, 15 bp, Homo sapiens
agtcaatcactggta

SEQ ID NO: 1240522 - DNA, 15 bp, Homo sapiens
aagtcaatcactggt

SEQ ID NO: 1240523 - DNA, 15 bp, Homo sapiens
taagtcaatcactgg

SEQ ID NO: 1240524 - DNA, 15 bp, Homo sapiens
gtaagtcaatcactg

SEQ ID NO: 1240525 - DNA, 15 bp, Homo sapiens
agtaagtcaatcact

SEQ ID NO: 1240526 - DNA, 15 bp, Homo sapiens
cagtaagtcaatcac

SEQ ID NO: 1240527 - DNA, 15 bp, Homo sapiens
ccagtaagtcaatca

SEQ ID NO: 1240528 - DNA, 15 bp, Homo sapiens
accagtaagtcaatc

SEQ ID NO: 1240529 - DNA, 15 bp, Homo sapiens
gaccagtaagtcaat

SEQ ID NO: 1240530 - DNA, 15 bp, Homo sapiens
agaccagtaagtcaa

SEQ ID NO: 1240531 - DNA, 15 bp, Homo sapiens
aagaccagtaagtca

SEQ ID NO: 1240532 - DNA, 15 bp, Homo sapiens
caagaccagtaagtc

SEQ ID NO: 1240533 - DNA, 15 bp, Homo sapiens
gcaagaccagtaagt

SEQ ID NO: 1240534 - DNA, 15 bp, Homo sapiens
agcaagaccagtaag

SEQ ID NO: 1240535 - DNA, 15 bp, Homo sapiens
tagcaagaccagtaa

SEQ ID NO: 1240536 - DNA, 15 bp, Homo sapiens
atagcaagaccagta

SEQ ID NO: 1240537 - DNA, 15 bp, Homo sapiens
catagcaagaccagt

SEQ ID NO: 1240538 - DNA, 15 bp, Homo sapiens
gcatagcaagaccag

SEQ ID NO: 1240539 - DNA, 15 bp, Homo sapiens
ggcatagcaagacca

SEQ ID NO: 1240540 - DNA, 15 bp, Homo sapiens
aggcatagcaagacc

SEQ ID NO: 1240541 - DNA, 15 bp, Homo sapiens
caggcatagcaagac

SEQ ID NO: 1240542 - DNA, 15 bp, Homo sapiens
ccaggcatagcaaga

SEQ ID NO: 1240543 - DNA, 15 bp, Homo sapiens
accaggcatagcaag

SEQ ID NO: 1240544 - DNA, 15 bp, Homo sapiens
caccaggcatagcaa

SEQ ID NO: 1240545 - DNA, 15 bp, Homo sapiens
acaccaggcatagca

SEQ ID NO: 1240546 - DNA, 15 bp, Homo sapiens
cacaccaggcatagc

SEQ ID NO: 1240547 - DNA, 15 bp, Homo sapiens
tcacaccaggcatag

SEQ ID NO: 1240548 - DNA, 15 bp, Homo sapiens
gtcacaccaggcata

SEQ ID NO: 1240549 - DNA, 15 bp, Homo sapiens
agtcacaccaggcat

SEQ ID NO: 1240550 - DNA, 15 bp, Homo sapiens
gagtcacaccaggca

SEQ ID NO: 1240551 - DNA, 15 bp, Homo sapiens
agagtcacaccaggc

SEQ ID NO: 1240552 - DNA, 15 bp, Homo sapiens
cagagtcacaccagg

SEQ ID NO: 1240553 - DNA, 15 bp, Homo sapiens
tcagagtcacaccag

SEQ ID NO: 1240554 - DNA, 15 bp, Homo sapiens
ctcagagtcacacca

SEQ ID NO: 1240555 - DNA, 15 bp, Homo sapiens
cctcagagtcacacc

SEQ ID NO: 1240556 - DNA, 15 bp, Homo sapiens
gcctcagagtcacac

SEQ ID NO: 1240557 - DNA, 15 bp, Homo sapiens
ggcctcagagtcaca

SEQ ID NO: 1240558 - DNA, 15 bp, Homo sapiens
tggcctcagagtcac

SEQ ID NO: 1240559 - DNA, 15 bp, Homo sapiens
gtggcctcagagtca

SEQ ID NO: 1240560 - DNA, 15 bp, Homo sapiens
tgtggcctcagagtc

SEQ ID NO: 1240561 - DNA, 15 bp, Homo sapiens
ctgtggcctcagagt

SEQ ID NO: 1240562 - DNA, 15 bp, Homo sapiens
tctgtggcctcagag

SEQ ID NO: 1240563 - DNA, 15 bp, Homo sapiens
ttctgtggcctcaga

SEQ ID NO: 1240564 - DNA, 15 bp, Homo sapiens
cttctgtggcctcag

SEQ ID NO: 1240565 - DNA, 15 bp, Homo sapiens
tcttctgtggcctca

SEQ ID NO: 1240566 - DNA, 15 bp, Homo sapiens
atcttctgtggcctc

SEQ ID NO: 1240567 - DNA, 15 bp, Homo sapiens
catcttctgtggcct

SEQ ID NO: 1240568 - DNA, 15 bp, Homo sapiens
gcatcttctgtggcc

SEQ ID NO: 1240569 - DNA, 15 bp, Homo sapiens
agcatcttctgtggc

SEQ ID NO: 1240570 - DNA, 15 bp, Homo sapiens
gagcatcttctgtgg

SEQ ID NO: 1240571 - DNA, 15 bp, Homo sapiens
tgagcatcttctgtg

SEQ ID NO: 1240572 - DNA, 15 bp, Homo sapiens
gtgagcatcttctgt

SEQ ID NO: 1240573 - DNA, 15 bp, Homo sapiens
tgtgagcatcttctg

SEQ ID NO: 1240574 - DNA, 15 bp, Homo sapiens
gtgtgagcatcttct

SEQ ID NO: 1240575 - DNA, 15 bp, Homo sapiens
tgtgtgagcatcttc

SEQ ID NO: 1240576 - DNA, 15 bp, Homo sapiens
ttgtgtgagcatctt

SEQ ID NO: 1240577 - DNA, 15 bp, Homo sapiens
attgtgtgagcatct

SEQ ID NO: 1240578 - DNA, 15 bp, Homo sapiens
aattgtgtgagcatc

SEQ ID NO: 1240579 - DNA, 15 bp, Homo sapiens
aaattgtgtgagcat

SEQ ID NO: 1240580 - DNA, 15 bp, Homo sapiens
aaaattgtgtgagca

SEQ ID NO: 1240581 - DNA, 15 bp, Homo sapiens
aaaaattgtgtgagc

SEQ ID NO: 1240582 - DNA, 15 bp, Homo sapiens
taaaaattgtgtgag

SEQ ID NO: 1240583 - DNA, 15 bp, Homo sapiens
ataaaaattgtgtga

SEQ ID NO: 1240584 - DNA, 15 bp, Homo sapiens
aataaaaattgtgtg

SEQ ID NO: 1240585 - DNA, 15 bp, Homo sapiens
gaataaaaattgtgt

SEQ ID NO: 1240586 - DNA, 15 bp, Homo sapiens
ggaataaaaattgtg

SEQ ID NO: 1240587 - DNA, 15 bp, Homo sapiens
aggaataaaaattgt

SEQ ID NO: 1240588 - DNA, 15 bp, Homo sapiens
aaggaataaaaattg

SEQ ID NO: 1240589 - DNA, 15 bp, Homo sapiens
aaaggaataaaaatt

SEQ ID NO: 1240590 - DNA, 15 bp, Homo sapiens
taaaggaataaaaat

SEQ ID NO: 1240591 - DNA, 15 bp, Homo sapiens
gtaaaggaataaaaa

SEQ ID NO: 1240592 - DNA, 15 bp, Homo sapiens
ggtaaaggaataaaa

SEQ ID NO: 1240593 - DNA, 15 bp, Homo sapiens
gggtaaaggaataaa

SEQ ID NO: 1240594 - DNA, 15 bp, Homo sapiens
ggggtaaaggaataa

SEQ ID NO: 1240595 - DNA, 15 bp, Homo sapiens
aggggtaaaggaata

SEQ ID NO: 1240596 - DNA, 15 bp, Homo sapiens
aaggggtaaaggaat

SEQ ID NO: 1240597 - DNA, 15 bp, Homo sapiens
aaaggggtaaaggaa

SEQ ID NO: 1240598 - DNA, 15 bp, Homo sapiens
gaaaggggtaaagga

SEQ ID NO: 1240599 - DNA, 15 bp, Homo sapiens
tgaaaggggtaaagg

SEQ ID NO: 1240600 - DNA, 15 bp, Homo sapiens
gtgaaaggggtaaag

SEQ ID NO: 1240601 - DNA, 15 bp, Homo sapiens
cgtgaaaggggtaaa

SEQ ID NO: 1240602 - DNA, 15 bp, Homo sapiens
acgtgaaaggggtaa

SEQ ID NO: 1240603 - DNA, 15 bp, Homo sapiens
cacgtgaaaggggta

SEQ ID NO: 1240604 - DNA, 15 bp, Homo sapiens
acacgtgaaaggggt

SEQ ID NO: 1240605 - DNA, 15 bp, Homo sapiens
aacacgtgaaagggg

SEQ ID NO: 1240606 - DNA, 15 bp, Homo sapiens
aaacacgtgaaaggg

SEQ ID NO: 1240607 - DNA, 15 bp, Homo sapiens
aaaacacgtgaaagg

SEQ ID NO: 1240608 - DNA, 15 bp, Homo sapiens
taaaacacgtgaaag

SEQ ID NO: 1240609 - DNA, 15 bp, Homo sapiens
ataaaacacgtgaaa

SEQ ID NO: 1240610 - DNA, 15 bp, Homo sapiens
aataaaacacgtgaa

SEQ ID NO: 1240611 - DNA, 15 bp, Homo sapiens
aaataaaacacgtga

SEQ ID NO: 1240612 - DNA, 15 bp, Homo sapiens
aaaataaaacacgtg

SEQ ID NO: 1240613 - DNA, 15 bp, Homo sapiens
taaaataaaacacgt

SEQ ID NO: 1240614 - DNA, 15 bp, Homo sapiens
gtaaaataaaacacg

SEQ ID NO: 1240615 - DNA, 15 bp, Homo sapiens
ggtaaaataaaacac

SEQ ID NO: 1240616 - DNA, 15 bp, Homo sapiens
gggtaaaataaaaca

SEQ ID NO: 1240617 - DNA, 15 bp, Homo sapiens
ggggtaaaataaaac

SEQ ID NO: 1240618 - DNA, 15 bp, Homo sapiens
tggggtaaaataaaa

SEQ ID NO: 1240619 - DNA, 15 bp, Homo sapiens
atggggtaaaataaa

SEQ ID NO: 1240620 - DNA, 15 bp, Homo sapiens
gatggggtaaaataa

SEQ ID NO: 1240621 - DNA, 15 bp, Homo sapiens
tgatggggtaaaata

SEQ ID NO: 1240622 - DNA, 15 bp, Homo sapiens
ctgatggggtaaaat

SEQ ID NO: 1240623 - DNA, 15 bp, Homo sapiens
cctgatggggtaaaa

SEQ ID NO: 1240624 - DNA, 15 bp, Homo sapiens
tcctgatggggtaaa

SEQ ID NO: 1240625 - DNA, 15 bp, Homo sapiens
ttcctgatggggtaa

SEQ ID NO: 1240626 - DNA, 15 bp, Homo sapiens
attcctgatggggta

SEQ ID NO: 1240627 - DNA, 15 bp, Homo sapiens
gattcctgatggggt

SEQ ID NO: 1240628 - DNA, 15 bp, Homo sapiens
agattcctgatgggg

SEQ ID NO: 1240629 - DNA, 15 bp, Homo sapiens
aagattcctgatggg

SEQ ID NO: 1240630 - DNA, 15 bp, Homo sapiens
aaagattcctgatgg

SEQ ID NO: 1240631 - DNA, 15 bp, Homo sapiens
caaagattcctgatg

SEQ ID NO: 1240632 - DNA, 15 bp, Homo sapiens
tcaaagattcctgat

SEQ ID NO: 1240633 - DNA, 15 bp, Homo sapiens
ctcaaagattcctga

SEQ ID NO: 1240634 - DNA, 15 bp, Homo sapiens
tctcaaagattcctg

SEQ ID NO: 1240635 - DNA, 15 bp, Homo sapiens
ttctcaaagattcct

SEQ ID NO: 1240636 - DNA, 15 bp, Homo sapiens
tttctcaaagattcc

SEQ ID NO: 1240637 - DNA, 15 bp, Homo sapiens
ctttctcaaagattc

SEQ ID NO: 1240638 - DNA, 15 bp, Homo sapiens
gctttctcaaagatt

SEQ ID NO: 1240639 - DNA, 15 bp, Homo sapiens
cgctttctcaaagat

SEQ ID NO: 1240640 - DNA, 15 bp, Homo sapiens
acgctttctcaaaga

SEQ ID NO: 1240641 - DNA, 15 bp, Homo sapiens
cacgctttctcaaag

SEQ ID NO: 1240642 - DNA, 15 bp, Homo sapiens
tcacgctttctcaaa

SEQ ID NO: 1240643 - DNA, 15 bp, Homo sapiens
ttcacgctttctcaa

SEQ ID NO: 1240644 - DNA, 15 bp, Homo sapiens
cttcacgctttctca

SEQ ID NO: 1240645 - DNA, 15 bp, Homo sapiens
tcttcacgctttctc

SEQ ID NO: 1240646 - DNA, 15 bp, Homo sapiens
atcttcacgctttct

SEQ ID NO: 1240647 - DNA, 15 bp, Homo sapiens
catcttcacgctttc

SEQ ID NO: 1240648 - DNA, 15 bp, Homo sapiens
tcatcttcacgcttt

SEQ ID NO: 1240649 - DNA, 15 bp, Homo sapiens
ctcatcttcacgctt

SEQ ID NO: 1240650 - DNA, 15 bp, Homo sapiens
tctcatcttcacgct

SEQ ID NO: 1240651 - DNA, 15 bp, Homo sapiens
ttctcatcttcacgc

SEQ ID NO: 1240652 - DNA, 15 bp, Homo sapiens
tttctcatcttcacg

SEQ ID NO: 1240653 - DNA, 15 bp, Homo sapiens
ctttctcatcttcac

SEQ ID NO: 1240654 - DNA, 15 bp, Homo sapiens
tctttctcatcttca

SEQ ID NO: 1240655 - DNA, 15 bp, Homo sapiens
atctttctcatcttc

SEQ ID NO: 1240656 - DNA, 15 bp, Homo sapiens
catctttctcatctt

SEQ ID NO: 1240657 - DNA, 15 bp, Homo sapiens
acatctttctcatct

SEQ ID NO: 1240658 - DNA, 15 bp, Homo sapiens
aacatctttctcatc

SEQ ID NO: 1240659 - DNA, 15 bp, Homo sapiens
caacatctttctcat

SEQ ID NO: 1240660 - DNA, 15 bp, Homo sapiens
ccaacatctttctca

SEQ ID NO: 1240661 - DNA, 15 bp, Homo sapiens
tccaacatctttctc

SEQ ID NO: 1240662 - DNA, 15 bp, Homo sapiens
ttccaacatctttct

SEQ ID NO: 1240663 - DNA, 15 bp, Homo sapiens
cttccaacatctttc

SEQ ID NO: 1240664 - DNA, 15 bp, Homo sapiens
tcttccaacatcttt

SEQ ID NO: 1240665 - DNA, 15 bp, Homo sapiens
gtcttccaacatctt

SEQ ID NO: 1240666 - DNA, 15 bp, Homo sapiens
agtcttccaacatct

SEQ ID NO: 1240667 - DNA, 15 bp, Homo sapiens
tagtcttccaacatc

SEQ ID NO: 1240668 - DNA, 15 bp, Homo sapiens
ctagtcttccaacat

SEQ ID NO: 1240669 - DNA, 15 bp, Homo sapiens
cctagtcttccaaca

SEQ ID NO: 1240670 - DNA, 15 bp, Homo sapiens
ccctagtcttccaac

SEQ ID NO: 1240671 - DNA, 15 bp, Homo sapiens
tccctagtcttccaa

SEQ ID NO: 1240672 - DNA, 15 bp, Homo sapiens
ctccctagtcttcca

SEQ ID NO: 1240673 - DNA, 15 bp, Homo sapiens
tctccctagtcttcc

SEQ ID NO: 1240674 - DNA, 15 bp, Homo sapiens
ctctccctagtcttc

SEQ ID NO: 1240675 - DNA, 15 bp, Homo sapiens
actctccctagtctt

SEQ ID NO: 1240676 - DNA, 15 bp, Homo sapiens
tactctccctagtct

SEQ ID NO: 1240677 - DNA, 15 bp, Homo sapiens
ctactctccctagtc

SEQ ID NO: 1240678 - DNA, 15 bp, Homo sapiens
tctactctccctagt

SEQ ID NO: 1240679 - DNA, 15 bp, Homo sapiens
ttctactctccctag

SEQ ID NO: 1240680 - DNA, 15 bp, Homo sapiens
tttctactctcccta

SEQ ID NO: 1240681 - DNA, 15 bp, Homo sapiens
ctttctactctccct

SEQ ID NO: 1240682 - DNA, 15 bp, Homo sapiens
gctttctactctccc

SEQ ID NO: 1240683 - DNA, 15 bp, Homo sapiens
agctttctactctcc

SEQ ID NO: 1240684 - DNA, 15 bp, Homo sapiens
aagctttctactctc

SEQ ID NO: 1240685 - DNA, 15 bp, Homo sapiens
aaagctttctactct

SEQ ID NO: 1240686 - DNA, 15 bp, Homo sapiens
aaaagctttctactc

SEQ ID NO: 1240687 - DNA, 15 bp, Homo sapiens
taaaagctttctact

SEQ ID NO: 1240688 - DNA, 15 bp, Homo sapiens
ataaaagctttctac

SEQ ID NO: 1240689 - DNA, 15 bp, Homo sapiens
aataaaagctttcta

SEQ ID NO: 1240690 - DNA, 15 bp, Homo sapiens
aaataaaagctttct

SEQ ID NO: 1240691 - DNA, 15 bp, Homo sapiens
aaaataaaagctttc

SEQ ID NO: 1240692 - DNA, 15 bp, Homo sapiens
taaaataaaagcttt

SEQ ID NO: 1240693 - DNA, 15 bp, Homo sapiens
ttaaaataaaagctt

SEQ ID NO: 1240694 - DNA, 15 bp, Homo sapiens
tttaaaataaaagct

SEQ ID NO: 1240695 - DNA, 15 bp, Homo sapiens
ctttaaaataaaagc

SEQ ID NO: 1240696 - DNA, 15 bp, Homo sapiens
actttaaaataaaag

SEQ ID NO: 1240697 - DNA, 15 bp, Homo sapiens
cactttaaaataaaa

SEQ ID NO: 1240698 - DNA, 15 bp, Homo sapiens
acactttaaaataaa

SEQ ID NO: 1240699 - DNA, 15 bp, Homo sapiens
aacactttaaaataa

SEQ ID NO: 1240700 - DNA, 15 bp, Homo sapiens
caacactttaaaata

SEQ ID NO: 1240701 - DNA, 15 bp, Homo sapiens
acaacactttaaaat

SEQ ID NO: 1240702 - DNA, 15 bp, Homo sapiens
aacaacactttaaaa

SEQ ID NO: 1240703 - DNA, 15 bp, Homo sapiens
aaacaacactttaaa

SEQ ID NO: 1240704 - DNA, 15 bp, Homo sapiens
aaaacaacactttaa

SEQ ID NO: 1240705 - DNA, 15 bp, Homo sapiens
aaaaacaacacttta

SEQ ID NO: 1240706 - DNA, 15 bp, Homo sapiens
aaaaaacaacacttt

SEQ ID NO: 1240707 - DNA, 15 bp, Homo sapiens
caaaaaacaacactt

SEQ ID NO: 1240708 - DNA, 15 bp, Homo sapiens
acaaaaaacaacact

SEQ ID NO: 1240709 - DNA, 15 bp, Homo sapiens
aacaaaaaacaacac

SEQ ID NO: 1240710 - DNA, 15 bp, Homo sapiens
aaacaaaaaacaaca

SEQ ID NO: 1240711 - DNA, 15 bp, Homo sapiens
aaaacaaaaaacaac

SEQ ID NO: 1240712 - DNA, 15 bp, Homo sapiens
attaaaacaaaaaac

SEQ ID NO: 1240713 - DNA, 15 bp, Homo sapiens
cattaaaacaaaaaa

SEQ ID NO: 1240714 - DNA, 15 bp, Homo sapiens
tcattaaaacaaaaa

SEQ ID NO: 1240715 - DNA, 15 bp, Homo sapiens
ttcattaaaacaaaa

SEQ ID NO: 1240716 - DNA, 15 bp, Homo sapiens
tttcattaaaacaaa

SEQ ID NO: 1240717 - DNA, 15 bp, Homo sapiens
ttttcattaaaacaa

SEQ ID NO: 1240718 - DNA, 15 bp, Homo sapiens
attttcattaaaaca

SEQ ID NO: 1240719 - DNA, 15 bp, Homo sapiens
gattttcattaaaac

SEQ ID NO: 1240720 - DNA, 15 bp, Homo sapiens
agattttcattaaaa

SEQ ID NO: 1240721 - DNA, 15 bp, Homo sapiens
tagattttcattaaa

SEQ ID NO: 1240722 - DNA, 15 bp, Homo sapiens
ctagattttcattaa

SEQ ID NO: 1240723 - DNA, 15 bp, Homo sapiens
tctagattttcatta

SEQ ID NO: 1240724 - DNA, 15 bp, Homo sapiens
ttctagattttcatt

SEQ ID NO: 1240725 - DNA, 15 bp, Homo sapiens
attctagattttcat

SEQ ID NO: 1240726 - DNA, 15 bp, Homo sapiens
cattctagattttca

SEQ ID NO: 1240727 - DNA, 15 bp, Homo sapiens
tcattctagattttc

SEQ ID NO: 1240728 - DNA, 15 bp, Homo sapiens
ttcattctagatttt

SEQ ID NO: 1240729 - DNA, 15 bp, Homo sapiens
attcattctagattt

SEQ ID NO: 1240730 - DNA, 15 bp, Homo sapiens
cattcattctagatt

SEQ ID NO: 1240731 - DNA, 15 bp, Homo sapiens
tcattcattctagat

SEQ ID NO: 1240732 - DNA, 15 bp, Homo sapiens
gtcattcattctaga

SEQ ID NO: 1240733 - DNA, 15 bp, Homo sapiens
agtcattcattctag

SEQ ID NO: 1240734 - DNA, 15 bp, Homo sapiens
aagtcattcattcta

SEQ ID NO: 1240735 - DNA, 15 bp, Homo sapiens
caagtcattcattct

SEQ ID NO: 1240736 - DNA, 15 bp, Homo sapiens
acaagtcattcattc

SEQ ID NO: 1240737 - DNA, 15 bp, Homo sapiens
tacaagtcattcatt

SEQ ID NO: 1240738 - DNA, 15 bp, Homo sapiens
atacaagtcattcat

SEQ ID NO: 1240739 - DNA, 15 bp, Homo sapiens
aatacaagtcattca

SEQ ID NO: 1240740 - DNA, 15 bp, Homo sapiens
caatacaagtcattc

SEQ ID NO: 1240741 - DNA, 15 bp, Homo sapiens
acaatacaagtcatt

SEQ ID NO: 1240742 - DNA, 15 bp, Homo sapiens
aacaatacaagtcat

SEQ ID NO: 1240743 - DNA, 15 bp, Homo sapiens
aaacaatacaagtca

SEQ ID NO: 1240744 - DNA, 15 bp, Homo sapiens
caaacaatacaagtc

SEQ ID NO: 1240745 - DNA, 15 bp, Homo sapiens
acaaacaatacaagt

SEQ ID NO: 1240746 - DNA, 15 bp, Homo sapiens
cacaaacaatacaag

SEQ ID NO: 1240747 - DNA, 15 bp, Homo sapiens
tcacaaacaatacaa

SEQ ID NO: 1240748 - DNA, 15 bp, Homo sapiens
ttcacaaacaataca

SEQ ID NO: 1240749 - DNA, 15 bp, Homo sapiens
attcacaaacaatac

SEQ ID NO: 1240750 - DNA, 15 bp, Homo sapiens
tattcacaaacaata

SEQ ID NO: 1240751 - DNA, 15 bp, Homo sapiens
gtattcacaaacaat

SEQ ID NO: 1240752 - DNA, 15 bp, Homo sapiens
agtattcacaaacaa

SEQ ID NO: 1240753 - DNA, 15 bp, Homo sapiens
aagtattcacaaaca

SEQ ID NO: 1240754 - DNA, 15 bp, Homo sapiens
taagtattcacaaac

SEQ ID NO: 1240755 - DNA, 15 bp, Homo sapiens
gtaagtattcacaaa

SEQ ID NO: 1240756 - DNA, 15 bp, Homo sapiens
tgtaagtattcacaa

SEQ ID NO: 1240757 - DNA, 15 bp, Homo sapiens
ctgtaagtattcaca

SEQ ID NO: 1240758 - DNA, 15 bp, Homo sapiens
tctgtaagtattcac

SEQ ID NO: 1240759 - DNA, 15 bp, Homo sapiens
ttctgtaagtattca

SEQ ID NO: 1240760 - DNA, 15 bp, Homo sapiens
tttctgtaagtattc

SEQ ID NO: 1240761 - DNA, 15 bp, Homo sapiens
ttttctgtaagtatt

SEQ ID NO: 1240762 - DNA, 15 bp, Homo sapiens
tttttctgtaagtat

SEQ ID NO: 1240763 - DNA, 15 bp, Homo sapiens
atttttctgtaagta

SEQ ID NO: 1240764 - DNA, 15 bp, Homo sapiens
catttttctgtaagt

SEQ ID NO: 1240765 - DNA, 15 bp, Homo sapiens
ccatttttctgtaag

SEQ ID NO: 1240766 - DNA, 15 bp, Homo sapiens
gccatttttctgtaa

SEQ ID NO: 1240767 - DNA, 15 bp, Homo sapiens
tgccatttttctgta

SEQ ID NO: 1240768 - DNA, 15 bp, Homo sapiens
ttgccatttttctgt

SEQ ID NO: 1240769 - DNA, 15 bp, Homo sapiens
attgccatttttctg

SEQ ID NO: 1240770 - DNA, 15 bp, Homo sapiens
cattgccatttttct

SEQ ID NO: 1240771 - DNA, 15 bp, Homo sapiens
tcattgccatttttc

SEQ ID NO: 1240772 - DNA, 15 bp, Homo sapiens
ctcattgccattttt

SEQ ID NO: 1240773 - DNA, 15 bp, Homo sapiens
gctcattgccatttt

SEQ ID NO: 1240774 - DNA, 15 bp, Homo sapiens
tgctcattgccattt

SEQ ID NO: 1240775 - DNA, 15 bp, Homo sapiens
ttgctcattgccatt

SEQ ID NO: 1240776 - DNA, 15 bp, Homo sapiens
attgctcattgccat

SEQ ID NO: 1240777 - DNA, 15 bp, Homo sapiens
tattgctcattgcca

SEQ ID NO: 1240778 - DNA, 15 bp, Homo sapiens
ttattgctcattgcc

SEQ ID NO: 1240779 - DNA, 15 bp, Homo sapiens
cttattgctcattgc

SEQ ID NO: 1240780 - DNA, 15 bp, Homo sapiens
tcttattgctcattg

SEQ ID NO: 1240781 - DNA, 15 bp, Homo sapiens
ctcttattgctcatt

SEQ ID NO: 1240782 - DNA, 15 bp, Homo sapiens
gctcttattgctcat

SEQ ID NO: 1240783 - DNA, 15 bp, Homo sapiens
agctcttattgctca

SEQ ID NO: 1240784 - DNA, 15 bp, Homo sapiens
cagctcttattgctc

SEQ ID NO: 1240785 - DNA, 15 bp, Homo sapiens
ccagctcttattgct

SEQ ID NO: 1240786 - DNA, 15 bp, Homo sapiens
cccagctcttattgc

SEQ ID NO: 1240787 - DNA, 15 bp, Homo sapiens
ccccagctcttattg

SEQ ID NO: 1240788 - DNA, 15 bp, Homo sapiens
accccagctcttatt

SEQ ID NO: 1240789 - DNA, 15 bp, Homo sapiens
aaccccagctcttat

SEQ ID NO: 1240790 - DNA, 15 bp, Homo sapiens
caaccccagctctta

SEQ ID NO: 1240791 - DNA, 15 bp, Homo sapiens
tcaaccccagctctt

SEQ ID NO: 1240792 - DNA, 15 bp, Homo sapiens
ctcaaccccagctct

SEQ ID NO: 1240793 - DNA, 15 bp, Homo sapiens
gctcaaccccagctc

SEQ ID NO: 1240794 - DNA, 15 bp, Homo sapiens
ggctcaaccccagct

SEQ ID NO: 1240795 - DNA, 15 bp, Homo sapiens
tggctcaaccccagc

SEQ ID NO: 1240796 - DNA, 15 bp, Homo sapiens
atggctcaaccccag

SEQ ID NO: 1240797 - DNA, 15 bp, Homo sapiens
aatggctcaacccca

SEQ ID NO: 1240798 - DNA, 15 bp, Homo sapiens
gaatggctcaacccc

SEQ ID NO: 1240799 - DNA, 15 bp, Homo sapiens
cgaatggctcaaccc

SEQ ID NO: 1240800 - DNA, 15 bp, Homo sapiens
gcgaatggctcaacc

SEQ ID NO: 1240801 - DNA, 15 bp, Homo sapiens
ggcgaatggctcaac

SEQ ID NO: 1240802 - DNA, 15 bp, Homo sapiens
tggcgaatggctcaa

SEQ ID NO: 1240803 - DNA, 15 bp, Homo sapiens
ctggcgaatggctca

SEQ ID NO: 1240804 - DNA, 15 bp, Homo sapiens
tctggcgaatggctc

SEQ ID NO: 1240805 - DNA, 15 bp, Homo sapiens
ttctggcgaatggct

SEQ ID NO: 1240806 - DNA, 15 bp, Homo sapiens
cttctggcgaatggc

SEQ ID NO: 1240807 - DNA, 15 bp, Homo sapiens
tcttctggcgaatgg

SEQ ID NO: 1240808 - DNA, 15 bp, Homo sapiens
ttcttctggcgaatg

SEQ ID NO: 1240809 - DNA, 15 bp, Homo sapiens
tttcttctggcgaat

SEQ ID NO: 1240810 - DNA, 15 bp, Homo sapiens
ttttcttctggcgaa

SEQ ID NO: 1240811 - DNA, 15 bp, Homo sapiens
cttttcttctggcga

SEQ ID NO: 1240812 - DNA, 15 bp, Homo sapiens
acttttcttctggcg

SEQ ID NO: 1240813 - DNA, 15 bp, Homo sapiens
tacttttcttctggc

SEQ ID NO: 1240814 - DNA, 15 bp, Homo sapiens
ctacttttcttctgg

SEQ ID NO: 1240815 - DNA, 15 bp, Homo sapiens
gctacttttcttctg

SEQ ID NO: 1240816 - DNA, 15 bp, Homo sapiens
agctacttttcttct

SEQ ID NO: 1240817 - DNA, 15 bp, Homo sapiens
aagctacttttcttc

SEQ ID NO: 1240818 - DNA, 15 bp, Homo sapiens
caagctacttttctt

SEQ ID NO: 1240819 - DNA, 15 bp, Homo sapiens
ccaagctacttttct

SEQ ID NO: 1240820 - DNA, 15 bp, Homo sapiens
accaagctacttttc

SEQ ID NO: 1240821 - DNA, 15 bp, Homo sapiens
taccaagctactttt

SEQ ID NO: 1240822 - DNA, 15 bp, Homo sapiens
ctaccaagctacttt

SEQ ID NO: 1240823 - DNA, 15 bp, Homo sapiens
tctaccaagctactt

SEQ ID NO: 1240824 - DNA, 15 bp, Homo sapiens
ctctaccaagctact

SEQ ID NO: 1240825 - DNA, 15 bp, Homo sapiens
gctctaccaagctac

SEQ ID NO: 1240826 - DNA, 15 bp, Homo sapiens
tgctctaccaagcta

SEQ ID NO: 1240827 - DNA, 15 bp, Homo sapiens
ctgctctaccaagct

SEQ ID NO: 1240828 - DNA, 15 bp, Homo sapiens
cctgctctaccaagc

SEQ ID NO: 1240829 - DNA, 15 bp, Homo sapiens
ccctgctctaccaag

SEQ ID NO: 1240830 - DNA, 15 bp, Homo sapiens
cccctgctctaccaa

SEQ ID NO: 1240831 - DNA, 15 bp, Homo sapiens
ccccctgctctacca

SEQ ID NO: 1240832 - DNA, 15 bp, Homo sapiens
tccccctgctctacc

SEQ ID NO: 1240833 - DNA, 15 bp, Homo sapiens
gtccccctgctctac

SEQ ID NO: 1240834 - DNA, 15 bp, Homo sapiens
agtccccctgctcta

SEQ ID NO: 1240835 - DNA, 15 bp, Homo sapiens
cagtccccctgctct

SEQ ID NO: 1240836 - DNA, 15 bp, Homo sapiens
acagtccccctgctc

SEQ ID NO: 1240837 - DNA, 15 bp, Homo sapiens
cacagtccccctgct

SEQ ID NO: 1240838 - DNA, 15 bp, Homo sapiens
ccacagtccccctgc

SEQ ID NO: 1240839 - DNA, 15 bp, Homo sapiens
accacagtccccctg

SEQ ID NO: 1240840 - DNA, 15 bp, Homo sapiens
caccacagtccccct

SEQ ID NO: 1240841 - DNA, 15 bp, Homo sapiens
acaccacagtccccc

SEQ ID NO: 1240842 - DNA, 15 bp, Homo sapiens
cacaccacagtcccc

SEQ ID NO: 1240843 - DNA, 15 bp, Homo sapiens
gcacaccacagtccc

SEQ ID NO: 1240844 - DNA, 15 bp, Homo sapiens
tgcacaccacagtcc

SEQ ID NO: 1240845 - DNA, 15 bp, Homo sapiens
atgcacaccacagtc

SEQ ID NO: 1240846 - DNA, 15 bp, Homo sapiens
tatgcacaccacagt

SEQ ID NO: 1240847 - DNA, 15 bp, Homo sapiens
ctatgcacaccacag

SEQ ID NO: 1240848 - DNA, 15 bp, Homo sapiens
actatgcacaccaca

SEQ ID NO: 1240849 - DNA, 15 bp, Homo sapiens
gactatgcacaccac

SEQ ID NO: 1240850 - DNA, 15 bp, Homo sapiens
agactatgcacacca

SEQ ID NO: 1240851 - DNA, 15 bp, Homo sapiens
tagactatgcacacc

SEQ ID NO: 1240852 - DNA, 15 bp, Homo sapiens
gtagactatgcacac

SEQ ID NO: 1240853 - DNA, 15 bp, Homo sapiens
agtagactatgcaca

SEQ ID NO: 1240854 - DNA, 15 bp, Homo sapiens
gagtagactatgcac

SEQ ID NO: 1240855 - DNA, 15 bp, Homo sapiens
cgagtagactatgca

SEQ ID NO: 1240856 - DNA, 15 bp, Homo sapiens
ccgagtagactatgc

SEQ ID NO: 1240857 - DNA, 15 bp, Homo sapiens
cccgagtagactatg

SEQ ID NO: 1240858 - DNA, 15 bp, Homo sapiens
acccgagtagactat

SEQ ID NO: 1240859 - DNA, 15 bp, Homo sapiens
cacccgagtagacta

SEQ ID NO: 1240860 - DNA, 15 bp, Homo sapiens
acacccgagtagact

SEQ ID NO: 1240861 - DNA, 15 bp, Homo sapiens
aacacccgagtagac

SEQ ID NO: 1240862 - DNA, 15 bp, Homo sapiens
aaacacccgagtaga

SEQ ID NO: 1240863 - DNA, 15 bp, Homo sapiens
taaacacccgagtag

SEQ ID NO: 1240864 - DNA, 15 bp, Homo sapiens
gtaaacacccgagta

SEQ ID NO: 1240865 - DNA, 15 bp, Homo sapiens
tgtaaacacccgagt

SEQ ID NO: 1240866 - DNA, 15 bp, Homo sapiens
atgtaaacacccgag

SEQ ID NO: 1240867 - DNA, 15 bp, Homo sapiens
gatgtaaacacccga

SEQ ID NO: 1240868 - DNA, 15 bp, Homo sapiens
agatgtaaacacccg

SEQ ID NO: 1240869 - DNA, 15 bp, Homo sapiens
gagatgtaaacaccc

SEQ ID NO: 1240870 - DNA, 15 bp, Homo sapiens
agagatgtaaacacc

SEQ ID NO: 1240871 - DNA, 15 bp, Homo sapiens
gagagatgtaaacac

SEQ ID NO: 1240872 - DNA, 15 bp, Homo sapiens
ggagagatgtaaaca

SEQ ID NO: 1240873 - DNA, 15 bp, Homo sapiens
gggagagatgtaaac

SEQ ID NO: 1240874 - DNA, 15 bp, Homo sapiens
tgggagagatgtaaa

SEQ ID NO: 1240875 - DNA, 15 bp, Homo sapiens
ttgggagagatgtaa

SEQ ID NO: 1240876 - DNA, 15 bp, Homo sapiens
gttgggagagatgta

SEQ ID NO: 1240877 - DNA, 15 bp, Homo sapiens
tgttgggagagatgt

SEQ ID NO: 1240878 - DNA, 15 bp, Homo sapiens
atgttgggagagatg

SEQ ID NO: 1240879 - DNA, 15 bp, Homo sapiens
gatgttgggagagat

SEQ ID NO: 1240880 - DNA, 15 bp, Homo sapiens
agatgttgggagaga

SEQ ID NO: 1240881 - DNA, 15 bp, Homo sapiens
aagatgttgggagag

SEQ ID NO: 1240882 - DNA, 15 bp, Homo sapiens
aaagatgttgggaga

SEQ ID NO: 1240883 - DNA, 15 bp, Homo sapiens
caaagatgttgggag

SEQ ID NO: 1240884 - DNA, 15 bp, Homo sapiens
acaaagatgttggga

SEQ ID NO: 1240885 - DNA, 15 bp, Homo sapiens
cacaaagatgttggg

SEQ ID NO: 1240886 - DNA, 15 bp, Homo sapiens
tcacaaagatgttgg

SEQ ID NO: 1240887 - DNA, 15 bp, Homo sapiens
ttcacaaagatgttg

SEQ ID NO: 1240888 - DNA, 15 bp, Homo sapiens
attcacaaagatgtt

SEQ ID NO: 1240889 - DNA, 15 bp, Homo sapiens
cattcacaaagatgt

SEQ ID NO: 1240890 - DNA, 15 bp, Homo sapiens
tcattcacaaagatg

SEQ ID NO: 1240891 - DNA, 15 bp, Homo sapiens
ttcattcacaaagat

SEQ ID NO: 1240892 - DNA, 15 bp, Homo sapiens
tttcattcacaaaga

SEQ ID NO: 1240893 - DNA, 15 bp, Homo sapiens
atttcattcacaaag

SEQ ID NO: 1240894 - DNA, 15 bp, Homo sapiens
catttcattcacaaa

SEQ ID NO: 1240895 - DNA, 15 bp, Homo sapiens
ccatttcattcacaa

SEQ ID NO: 1240896 - DNA, 15 bp, Homo sapiens
tccatttcattcaca

SEQ ID NO: 1240897 - DNA, 15 bp, Homo sapiens
ctccatttcattcac

SEQ ID NO: 1240898 - DNA, 15 bp, Homo sapiens
tctccatttcattca

SEQ ID NO: 1240899 - DNA, 15 bp, Homo sapiens
ttctccatttcattc

SEQ ID NO: 1240900 - DNA, 15 bp, Homo sapiens
cttctccatttcatt

SEQ ID NO: 1240901 - DNA, 15 bp, Homo sapiens
gcttctccatttcat

SEQ ID NO: 1240902 - DNA, 15 bp, Homo sapiens
tgcttctccatttca

SEQ ID NO: 1240903 - DNA, 15 bp, Homo sapiens
ttgcttctccatttc

SEQ ID NO: 1240904 - DNA, 15 bp, Homo sapiens
cttgcttctccattt

SEQ ID NO: 1240905 - DNA, 15 bp, Homo sapiens
gcttgcttctccatt

SEQ ID NO: 1240906 - DNA, 15 bp, Homo sapiens
ggcttgcttctccat

SEQ ID NO: 1240907 - DNA, 15 bp, Homo sapiens
tggcttgcttctcca

SEQ ID NO: 1240908 - DNA, 15 bp, Homo sapiens
atggcttgcttctcc

SEQ ID NO: 1240909 - DNA, 15 bp, Homo sapiens
tatggcttgcttctc

SEQ ID NO: 1240910 - DNA, 15 bp, Homo sapiens
ctatggcttgcttct

SEQ ID NO: 1240911 - DNA, 15 bp, Homo sapiens
tctatggcttgcttc

SEQ ID NO: 1240912 - DNA, 15 bp, Homo sapiens
atctatggcttgctt

SEQ ID NO: 1240913 - DNA, 15 bp, Homo sapiens
catctatggcttgct

SEQ ID NO: 1240914 - DNA, 15 bp, Homo sapiens
tcatctatggcttgc

SEQ ID NO: 1240915 - DNA, 15 bp, Homo sapiens
ttcatctatggcttg

SEQ ID NO: 1240916 - DNA, 15 bp, Homo sapiens
tttcatctatggctt

SEQ ID NO: 1240917 - DNA, 15 bp, Homo sapiens
ttttcatctatggct

SEQ ID NO: 1240918 - DNA, 15 bp, Homo sapiens
attttcatctatggc

SEQ ID NO: 1240919 - DNA, 15 bp, Homo sapiens
tattttcatctatgg

SEQ ID NO: 1240920 - DNA, 15 bp, Homo sapiens
gtattttcatctatg

SEQ ID NO: 1240921 - DNA, 15 bp, Homo sapiens
cgtattttcatctat

SEQ ID NO: 1240922 - DNA, 15 bp, Homo sapiens
ccgtattttcatcta

SEQ ID NO: 1240923 - DNA, 15 bp, Homo sapiens
tccgtattttcatct

SEQ ID NO: 1240924 - DNA, 15 bp, Homo sapiens
atccgtattttcatc

SEQ ID NO: 1240925 - DNA, 15 bp, Homo sapiens
catccgtattttcat

SEQ ID NO: 1240926 - DNA, 15 bp, Homo sapiens
tcatccgtattttca

SEQ ID NO: 1240927 - DNA, 15 bp, Homo sapiens
ctcatccgtattttc

SEQ ID NO: 1240928 - DNA, 15 bp, Homo sapiens
tctcatccgtatttt

SEQ ID NO: 1240929 - DNA, 15 bp, Homo sapiens
gtctcatccgtattt

SEQ ID NO: 1240930 - DNA, 15 bp, Homo sapiens
ggtctcatccgtatt

SEQ ID NO: 1240931 - DNA, 15 bp, Homo sapiens
aggtctcatccgtat

SEQ ID NO: 1240932 - DNA, 15 bp, Homo sapiens
aaggtctcatccgta

SEQ ID NO: 1240933 - DNA, 15 bp, Homo sapiens
aaaggtctcatccgt

SEQ ID NO: 1240934 - DNA, 15 bp, Homo sapiens
taaaggtctcatccg

SEQ ID NO: 1240935 - DNA, 15 bp, Homo sapiens
ttaaaggtctcatcc

SEQ ID NO: 1240936 - DNA, 15 bp, Homo sapiens
cttaaaggtctcatc

SEQ ID NO: 1240937 - DNA, 15 bp, Homo sapiens
gcttaaaggtctcat

SEQ ID NO: 1240938 - DNA, 15 bp, Homo sapiens
agcttaaaggtctca

SEQ ID NO: 1240939 - DNA, 15 bp, Homo sapiens
cagcttaaaggtctc

SEQ ID NO: 1240940 - DNA, 15 bp, Homo sapiens
acagcttaaaggtct

SEQ ID NO: 1240941 - DNA, 15 bp, Homo sapiens
cacagcttaaaggtc

SEQ ID NO: 1240942 - DNA, 15 bp, Homo sapiens
gcacagcttaaaggt

SEQ ID NO: 1240943 - DNA, 15 bp, Homo sapiens
tgcacagcttaaagg

SEQ ID NO: 1240944 - DNA, 15 bp, Homo sapiens
ctgcacagcttaaag

SEQ ID NO: 1240945 - DNA, 15 bp, Homo sapiens
actgcacagcttaaa

SEQ ID NO: 1240946 - DNA, 15 bp, Homo sapiens
aactgcacagcttaa

SEQ ID NO: 1240947 - DNA, 15 bp, Homo sapiens
aaactgcacagctta

SEQ ID NO: 1240948 - DNA, 15 bp, Homo sapiens
taaactgcacagctt

SEQ ID NO: 1240949 - DNA, 15 bp, Homo sapiens
gtaaactgcacagct

SEQ ID NO: 1240950 - DNA, 15 bp, Homo sapiens
tgtaaactgcacagc

SEQ ID NO: 1240951 - DNA, 15 bp, Homo sapiens
ttgtaaactgcacag

SEQ ID NO: 1240952 - DNA, 15 bp, Homo sapiens
gttgtaaactgcaca

SEQ ID NO: 1240953 - DNA, 15 bp, Homo sapiens
tgttgtaaactgcac

SEQ ID NO: 1240954 - DNA, 15 bp, Homo sapiens
gtgttgtaaactgca

SEQ ID NO: 1240955 - DNA, 15 bp, Homo sapiens
tgtgttgtaaactgc

SEQ ID NO: 1240956 - DNA, 15 bp, Homo sapiens
atgtgttgtaaactg

SEQ ID NO: 1240957 - DNA, 15 bp, Homo sapiens
aatgtgttgtaaact

SEQ ID NO: 1240958 - DNA, 15 bp, Homo sapiens
aaatgtgttgtaaac

SEQ ID NO: 1240959 - DNA, 15 bp, Homo sapiens
gaaatgtgttgtaaa

SEQ ID NO: 1240960 - DNA, 15 bp, Homo sapiens
agaaatgtgttgtaa

SEQ ID NO: 1240961 - DNA, 15 bp, Homo sapiens
cagaaatgtgttgta

SEQ ID NO: 1240962 - DNA, 15 bp, Homo sapiens
ccagaaatgtgttgt

SEQ ID NO: 1240963 - DNA, 15 bp, Homo sapiens
tccagaaatgtgttg

SEQ ID NO: 1240964 - DNA, 15 bp, Homo sapiens
gtccagaaatgtgtt

SEQ ID NO: 1240965 - DNA, 15 bp, Homo sapiens
ggtccagaaatgtgt

SEQ ID NO: 1240966 - DNA, 15 bp, Homo sapiens
gggtccagaaatgtg

SEQ ID NO: 1240967 - DNA, 15 bp, Homo sapiens
agggtccagaaatgt

SEQ ID NO: 1240968 - DNA, 15 bp, Homo sapiens
tagggtccagaaatg

SEQ ID NO: 1240969 - DNA, 15 bp, Homo sapiens
atagggtccagaaat

SEQ ID NO: 1240970 - DNA, 15 bp, Homo sapiens
tatagggtccagaaa

SEQ ID NO: 1240971 - DNA, 15 bp, Homo sapiens
ttatagggtccagaa

SEQ ID NO: 1240972 - DNA, 15 bp, Homo sapiens
tttatagggtccaga

SEQ ID NO: 1240973 - DNA, 15 bp, Homo sapiens
ttttatagggtccag

SEQ ID NO: 1240974 - DNA, 15 bp, Homo sapiens
attttatagggtcca

SEQ ID NO: 1240975 - DNA, 15 bp, Homo sapiens
cattttatagggtcc

SEQ ID NO: 1240976 - DNA, 15 bp, Homo sapiens
tcattttatagggtc

SEQ ID NO: 1240977 - DNA, 15 bp, Homo sapiens
ttcattttatagggt

SEQ ID NO: 1240978 - DNA, 15 bp, Homo sapiens
tttcattttataggg

SEQ ID NO: 1240979 - DNA, 15 bp, Homo sapiens
atttcattttatagg

SEQ ID NO: 1240980 - DNA, 15 bp, Homo sapiens
aatttcattttatag

SEQ ID NO: 1240981 - DNA, 15 bp, Homo sapiens
taatttcattttata

SEQ ID NO: 1240982 - DNA, 15 bp, Homo sapiens
ttaatttcattttat

SEQ ID NO: 1240983 - DNA, 15 bp, Homo sapiens
tttaatttcatttta

SEQ ID NO: 1240984 - DNA, 15 bp, Homo sapiens
ctttaatttcatttt

SEQ ID NO: 1240985 - DNA, 15 bp, Homo sapiens
cctttaatttcattt

SEQ ID NO: 1240986 - DNA, 15 bp, Homo sapiens
tcctttaatttcatt

SEQ ID NO: 1240987 - DNA, 15 bp, Homo sapiens
ttcctttaatttcat

SEQ ID NO: 1240988 - DNA, 15 bp, Homo sapiens
tttcctttaatttca

SEQ ID NO: 1240989 - DNA, 15 bp, Homo sapiens
atttcctttaatttc

SEQ ID NO: 1240990 - DNA, 15 bp, Homo sapiens
tatttcctttaattt

SEQ ID NO: 1240991 - DNA, 15 bp, Homo sapiens
ttatttcctttaatt

SEQ ID NO: 1240992 - DNA, 15 bp, Homo sapiens
cttatttcctttaat

SEQ ID NO: 1240993 - DNA, 15 bp, Homo sapiens
acttatttcctttaa

SEQ ID NO: 1240994 - DNA, 15 bp, Homo sapiens
cacttatttccttta

SEQ ID NO: 1240995 - DNA, 15 bp, Homo sapiens
ccacttatttccttt

SEQ ID NO: 1240996 - DNA, 15 bp, Homo sapiens
gccacttatttcctt

SEQ ID NO: 1240997 - DNA, 15 bp, Homo sapiens
tgccacttatttcct

SEQ ID NO: 1240998 - DNA, 15 bp, Homo sapiens
ttgccacttatttcc

SEQ ID NO: 1240999 - DNA, 15 bp, Homo sapiens
tttgccacttatttc

SEQ ID NO: 1241000 - DNA, 15 bp, Homo sapiens
ttttgccacttattt

SEQ ID NO: 1241001 - DNA, 15 bp, Homo sapiens
gttttgccacttatt

SEQ ID NO: 1241002 - DNA, 15 bp, Homo sapiens
tgttttgccacttat

SEQ ID NO: 1241003 - DNA, 15 bp, Homo sapiens
ttgttttgccactta

SEQ ID NO: 1241004 - DNA, 15 bp, Homo sapiens
tttgttttgccactt

SEQ ID NO: 1241005 - DNA, 15 bp, Homo sapiens
atttgttttgccact

SEQ ID NO: 1241006 - DNA, 15 bp, Homo sapiens
catttgttttgccac

SEQ ID NO: 1241007 - DNA, 15 bp, Homo sapiens
tcatttgttttgcca

SEQ ID NO: 1241008 - DNA, 15 bp, Homo sapiens
ttcatttgttttgcc

SEQ ID NO: 1241009 - DNA, 15 bp, Homo sapiens
tttcatttgttttgc

SEQ ID NO: 1241010 - DNA, 15 bp, Homo sapiens
atttcatttgttttg

SEQ ID NO: 1241011 - DNA, 15 bp, Homo sapiens
tatttcatttgtttt

SEQ ID NO: 1241012 - DNA, 15 bp, Homo sapiens
ttatttcatttgttt

SEQ ID NO: 1241013 - DNA, 15 bp, Homo sapiens
attatttcatttgtt

SEQ ID NO: 1241014 - DNA, 15 bp, Homo sapiens
gattatttcatttgt

SEQ ID NO: 1241015 - DNA, 15 bp, Homo sapiens
agattatttcatttg

SEQ ID NO: 1241016 - DNA, 15 bp, Homo sapiens
tagattatttcattt

SEQ ID NO: 1241017 - DNA, 15 bp, Homo sapiens
ctagattatttcatt

SEQ ID NO: 1241018 - DNA, 15 bp, Homo sapiens
tctagattatttcat

SEQ ID NO: 1241019 - DNA, 15 bp, Homo sapiens
gtctagattatttca

SEQ ID NO: 1241020 - DNA, 15 bp, Homo sapiens
agtctagattatttc

SEQ ID NO: 1241021 - DNA, 15 bp, Homo sapiens
tagtctagattattt

SEQ ID NO: 1241022 - DNA, 15 bp, Homo sapiens
atagtctagattatt

SEQ ID NO: 1241023 - DNA, 15 bp, Homo sapiens
tatagtctagattat

SEQ ID NO: 1241024 - DNA, 15 bp, Homo sapiens
gtatagtctagatta

SEQ ID NO: 1241025 - DNA, 15 bp, Homo sapiens
agtatagtctagatt

SEQ ID NO: 1241026 - DNA, 15 bp, Homo sapiens
aagtatagtctagat

SEQ ID NO: 1241027 - DNA, 15 bp, Homo sapiens
aaagtatagtctaga

SEQ ID NO: 1241028 - DNA, 15 bp, Homo sapiens
taaagtatagtctag

SEQ ID NO: 1241029 - DNA, 15 bp, Homo sapiens
ctaaagtatagtcta

SEQ ID NO: 1241030 - DNA, 15 bp, Homo sapiens
tctaaagtatagtct

SEQ ID NO: 1241031 - DNA, 15 bp, Homo sapiens
ctctaaagtatagtc

SEQ ID NO: 1241032 - DNA, 15 bp, Homo sapiens
gctctaaagtatagt

SEQ ID NO: 1241033 - DNA, 15 bp, Homo sapiens
tgctctaaagtatag

SEQ ID NO: 1241034 - DNA, 15 bp, Homo sapiens
ctgctctaaagtata

SEQ ID NO: 1241035 - DNA, 15 bp, Homo sapiens
actgctctaaagtat

SEQ ID NO: 1241036 - DNA, 15 bp, Homo sapiens
cactgctctaaagta

SEQ ID NO: 1241037 - DNA, 15 bp, Homo sapiens
acactgctctaaagt

SEQ ID NO: 1241038 - DNA, 15 bp, Homo sapiens
aacactgctctaaag

SEQ ID NO: 1241039 - DNA, 15 bp, Homo sapiens
aaacactgctctaaa

SEQ ID NO: 1241040 - DNA, 15 bp, Homo sapiens
gaaacactgctctaa

SEQ ID NO: 1241041 - DNA, 15 bp, Homo sapiens
ggaaacactgctcta

SEQ ID NO: 1241042 - DNA, 15 bp, Homo sapiens
gggaaacactgctct

SEQ ID NO: 1241043 - DNA, 15 bp, Homo sapiens
tgggaaacactgctc

SEQ ID NO: 1241044 - DNA, 15 bp, Homo sapiens
ttgggaaacactgct

SEQ ID NO: 1241045 - DNA, 15 bp, Homo sapiens
tttgggaaacactgc

SEQ ID NO: 1241046 - DNA, 15 bp, Homo sapiens
atttgggaaacactg

SEQ ID NO: 1241047 - DNA, 15 bp, Homo sapiens
tatttgggaaacact

SEQ ID NO: 1241048 - DNA, 15 bp, Homo sapiens
ttatttgggaaacac

SEQ ID NO: 1241049 - DNA, 15 bp, Homo sapiens
attatttgggaaaca

SEQ ID NO: 1241050 - DNA, 15 bp, Homo sapiens
tattatttgggaaac

SEQ ID NO: 1241051 - DNA, 15 bp, Homo sapiens
atattatttgggaaa

SEQ ID NO: 1241052 - DNA, 15 bp, Homo sapiens
aatattatttgggaa

SEQ ID NO: 1241053 - DNA, 15 bp, Homo sapiens
gaatattatttggga

SEQ ID NO: 1241054 - DNA, 15 bp, Homo sapiens
agaatattatttggg

SEQ ID NO: 1241055 - DNA, 15 bp, Homo sapiens
cagaatattatttgg

SEQ ID NO: 1241056 - DNA, 15 bp, Homo sapiens
acagaatattatttg

SEQ ID NO: 1241057 - DNA, 15 bp, Homo sapiens
gacagaatattattt

SEQ ID NO: 1241058 - DNA, 15 bp, Homo sapiens
tgacagaatattatt

SEQ ID NO: 1241059 - DNA, 15 bp, Homo sapiens
ttgacagaatattat

SEQ ID NO: 1241060 - DNA, 15 bp, Homo sapiens
tttgacagaatatta

SEQ ID NO: 1241061 - DNA, 15 bp, Homo sapiens
ttttgacagaatatt

SEQ ID NO: 1241062 - DNA, 15 bp, Homo sapiens
attttgacagaatat

SEQ ID NO: 1241063 - DNA, 15 bp, Homo sapiens
gattttgacagaata

SEQ ID NO: 1241064 - DNA, 15 bp, Homo sapiens
agattttgacagaat

SEQ ID NO: 1241065 - DNA, 15 bp, Homo sapiens
cagattttgacagaa

SEQ ID NO: 1241066 - DNA, 15 bp, Homo sapiens
acagattttgacaga

SEQ ID NO: 1241067 - DNA, 15 bp, Homo sapiens
tacagattttgacag

SEQ ID NO: 1241068 - DNA, 15 bp, Homo sapiens
atacagattttgaca

SEQ ID NO: 1241069 - DNA, 15 bp, Homo sapiens
catacagattttgac

SEQ ID NO: 1241070 - DNA, 15 bp, Homo sapiens
tcatacagattttga

SEQ ID NO: 1241071 - DNA, 15 bp, Homo sapiens
atcatacagattttg

SEQ ID NO: 1241072 - DNA, 15 bp, Homo sapiens
tatcatacagatttt

SEQ ID NO: 1241073 - DNA, 15 bp, Homo sapiens
ctatcatacagattt

SEQ ID NO: 1241074 - DNA, 15 bp, Homo sapiens
actatcatacagatt

SEQ ID NO: 1241075 - DNA, 15 bp, Homo sapiens
tactatcatacagat

SEQ ID NO: 1241076 - DNA, 15 bp, Homo sapiens
ctactatcatacaga

SEQ ID NO: 1241077 - DNA, 15 bp, Homo sapiens
cctactatcatacag

SEQ ID NO: 1241078 - DNA, 15 bp, Homo sapiens
acctactatcataca

SEQ ID NO: 1241079 - DNA, 15 bp, Homo sapiens
tacctactatcatac

SEQ ID NO: 1241080 - DNA, 15 bp, Homo sapiens
atacctactatcata

SEQ ID NO: 1241081 - DNA, 15 bp, Homo sapiens
aatacctactatcat

SEQ ID NO: 1241082 - DNA, 15 bp, Homo sapiens
aaatacctactatca

SEQ ID NO: 1241083 - DNA, 15 bp, Homo sapiens
aaaatacctactatc

SEQ ID NO: 1241084 - DNA, 15 bp, Homo sapiens
taaaatacctactat

SEQ ID NO: 1241085 - DNA, 15 bp, Homo sapiens
ataaaatacctacta

SEQ ID NO: 1241086 - DNA, 15 bp, Homo sapiens
gataaaatacctact

SEQ ID NO: 1241087 - DNA, 15 bp, Homo sapiens
tgataaaatacctac

SEQ ID NO: 1241088 - DNA, 15 bp, Homo sapiens
ctgataaaataccta

SEQ ID NO: 1241089 - DNA, 15 bp, Homo sapiens
tctgataaaatacct

SEQ ID NO: 1241090 - DNA, 15 bp, Homo sapiens
ttctgataaaatacc

SEQ ID NO: 1241091 - DNA, 15 bp, Homo sapiens
tttctgataaaatac

SEQ ID NO: 1241092 - DNA, 15 bp, Homo sapiens
ttttctgataaaata

SEQ ID NO: 1241093 - DNA, 15 bp, Homo sapiens
cttttctgataaaat

SEQ ID NO: 1241094 - DNA, 15 bp, Homo sapiens
tcttttctgataaaa

SEQ ID NO: 1241095 - DNA, 15 bp, Homo sapiens
ttcttttctgataaa

SEQ ID NO: 1241096 - DNA, 15 bp, Homo sapiens
attcttttctgataa

SEQ ID NO: 1241097 - DNA, 15 bp, Homo sapiens
aattcttttctgata

SEQ ID NO: 1241098 - DNA, 15 bp, Homo sapiens
gaattcttttctgat

SEQ ID NO: 1241099 - DNA, 15 bp, Homo sapiens
ggaattcttttctga

SEQ ID NO: 1241100 - DNA, 15 bp, Homo sapiens
tggaattcttttctg

SEQ ID NO: 1241101 - DNA, 15 bp, Homo sapiens
ttggaattcttttct

SEQ ID NO: 1241102 - DNA, 15 bp, Homo sapiens
cttggaattcttttc

SEQ ID NO: 1241103 - DNA, 15 bp, Homo sapiens
ccttggaattctttt

SEQ ID NO: 1241104 - DNA, 15 bp, Homo sapiens
cccttggaattcttt

SEQ ID NO: 1241105 - DNA, 15 bp, Homo sapiens
acccttggaattctt

SEQ ID NO: 1241106 - DNA, 15 bp, Homo sapiens
gacccttggaattct

SEQ ID NO: 1241107 - DNA, 15 bp, Homo sapiens
tgacccttggaattc

SEQ ID NO: 1241108 - DNA, 15 bp, Homo sapiens
atgacccttggaatt

SEQ ID NO: 1241109 - DNA, 15 bp, Homo sapiens
aatgacccttggaat

SEQ ID NO: 1241110 - DNA, 15 bp, Homo sapiens
taatgacccttggaa

SEQ ID NO: 1241111 - DNA, 15 bp, Homo sapiens
ataatgacccttgga

SEQ ID NO: 1241112 - DNA, 15 bp, Homo sapiens
tataatgacccttgg

SEQ ID NO: 1241113 - DNA, 15 bp, Homo sapiens
atataatgacccttg

SEQ ID NO: 1241114 - DNA, 15 bp, Homo sapiens
gatataatgaccctt

SEQ ID NO: 1241115 - DNA, 15 bp, Homo sapiens
agatataatgaccct

SEQ ID NO: 1241116 - DNA, 15 bp, Homo sapiens
cagatataatgaccc

SEQ ID NO: 1241117 - DNA, 15 bp, Homo sapiens
tcagatataatgacc

SEQ ID NO: 1241118 - DNA, 15 bp, Homo sapiens
ttcagatataatgac

SEQ ID NO: 1241119 - DNA, 15 bp, Homo sapiens
tttcagatataatga

SEQ ID NO: 1241120 - DNA, 15 bp, Homo sapiens
ttttcagatataatg

SEQ ID NO: 1241121 - DNA, 15 bp, Homo sapiens
tttttcagatataat

SEQ ID NO: 1241122 - DNA, 15 bp, Homo sapiens
atttttcagatataa

SEQ ID NO: 1241123 - DNA, 15 bp, Homo sapiens
aatttttcagatata

SEQ ID NO: 1241124 - DNA, 15 bp, Homo sapiens
gaatttttcagatat

SEQ ID NO: 1241125 - DNA, 15 bp, Homo sapiens
ggaatttttcagata

SEQ ID NO: 1241126 - DNA, 15 bp, Homo sapiens
tggaatttttcagat

SEQ ID NO: 1241127 - DNA, 15 bp, Homo sapiens
gtggaatttttcaga

SEQ ID NO: 1241128 - DNA, 15 bp, Homo sapiens
tgtggaatttttcag

SEQ ID NO: 1241129 - DNA, 15 bp, Homo sapiens
atgtggaatttttca

SEQ ID NO: 1241130 - DNA, 15 bp, Homo sapiens
tagatgtggaatttt

SEQ ID NO: 1241131 - DNA, 15 bp, Homo sapiens
ctagatgtggaattt

SEQ ID NO: 1241132 - DNA, 15 bp, Homo sapiens
cctagatgtggaatt

SEQ ID NO: 1241133 - DNA, 15 bp, Homo sapiens
acctagatgtggaat

SEQ ID NO: 1241134 - DNA, 15 bp, Homo sapiens
aacctagatgtggaa

SEQ ID NO: 1241135 - DNA, 15 bp, Homo sapiens
aaacctagatgtgga

SEQ ID NO: 1241136 - DNA, 15 bp, Homo sapiens
aaaacctagatgtgg

SEQ ID NO: 1241137 - DNA, 15 bp, Homo sapiens
taaaacctagatgtg

SEQ ID NO: 1241138 - DNA, 15 bp, Homo sapiens
ctaaaacctagatgt

SEQ ID NO: 1241139 - DNA, 15 bp, Homo sapiens
tctaaaacctagatg

SEQ ID NO: 1241140 - DNA, 15 bp, Homo sapiens
ctctaaaacctagat

SEQ ID NO: 1241141 - DNA, 15 bp, Homo sapiens
tctctaaaacctaga

SEQ ID NO: 1241142 - DNA, 15 bp, Homo sapiens
ctctctaaaacctag

SEQ ID NO: 1241143 - DNA, 15 bp, Homo sapiens
gctctctaaaaccta

SEQ ID NO: 1241144 - DNA, 15 bp, Homo sapiens
ggctctctaaaacct

SEQ ID NO: 1241145 - DNA, 15 bp, Homo sapiens
tggctctctaaaacc

SEQ ID NO: 1241146 - DNA, 15 bp, Homo sapiens
atggctctctaaaac

SEQ ID NO: 1241147 - DNA, 15 bp, Homo sapiens
tatggctctctaaaa

SEQ ID NO: 1241148 - DNA, 15 bp, Homo sapiens
ctatggctctctaaa

SEQ ID NO: 1241149 - DNA, 15 bp, Homo sapiens
actatggctctctaa

SEQ ID NO: 1241150 - DNA, 15 bp, Homo sapiens
cactatggctctcta

SEQ ID NO: 1241151 - DNA, 15 bp, Homo sapiens
gcactatggctctct

SEQ ID NO: 1241152 - DNA, 15 bp, Homo sapiens
tgcactatggctctc

SEQ ID NO: 1241153 - DNA, 15 bp, Homo sapiens
gtgcactatggctct

SEQ ID NO: 1241154 - DNA, 15 bp, Homo sapiens
tgtgcactatggctc

SEQ ID NO: 1241155 - DNA, 15 bp, Homo sapiens
atgtgcactatggct

SEQ ID NO: 1241156 - DNA, 15 bp, Homo sapiens
catgtgcactatggc

SEQ ID NO: 1241157 - DNA, 15 bp, Homo sapiens
tcatgtgcactatgg

SEQ ID NO: 1241158 - DNA, 15 bp, Homo sapiens
ttcatgtgcactatg

SEQ ID NO: 1241159 - DNA, 15 bp, Homo sapiens
gttcatgtgcactat

SEQ ID NO: 1241160 - DNA, 15 bp, Homo sapiens
agttcatgtgcacta

SEQ ID NO: 1241161 - DNA, 15 bp, Homo sapiens
aagttcatgtgcact

SEQ ID NO: 1241162 - DNA, 15 bp, Homo sapiens
taagttcatgtgcac

SEQ ID NO: 1241163 - DNA, 15 bp, Homo sapiens
ataagttcatgtgca

SEQ ID NO: 1241164 - DNA, 15 bp, Homo sapiens
aataagttcatgtgc

SEQ ID NO: 1241165 - DNA, 15 bp, Homo sapiens
taataagttcatgtg

SEQ ID NO: 1241166 - DNA, 15 bp, Homo sapiens
ttaataagttcatgt

SEQ ID NO: 1241167 - DNA, 15 bp, Homo sapiens
tttaataagttcatg

SEQ ID NO: 1241168 - DNA, 15 bp, Homo sapiens
ctttaataagttcat

SEQ ID NO: 1241169 - DNA, 15 bp, Homo sapiens
tctttaataagttca

SEQ ID NO: 1241170 - DNA, 15 bp, Homo sapiens
gtctttaataagttc

SEQ ID NO: 1241171 - DNA, 15 bp, Homo sapiens
agtctttaataagtt

SEQ ID NO: 1241172 - DNA, 15 bp, Homo sapiens
gagtctttaataagt

SEQ ID NO: 1241173 - DNA, 15 bp, Homo sapiens
agagtctttaataag

SEQ ID NO: 1241174 - DNA, 15 bp, Homo sapiens
cagagtctttaataa

SEQ ID NO: 1241175 - DNA, 15 bp, Homo sapiens
tcagagtctttaata

SEQ ID NO: 1241176 - DNA, 15 bp, Homo sapiens
ctcagagtctttaat

SEQ ID NO: 1241177 - DNA, 15 bp, Homo sapiens
tctcagagtctttaa

SEQ ID NO: 1241178 - DNA, 15 bp, Homo sapiens
ttctcagagtcttta

SEQ ID NO: 1241179 - DNA, 15 bp, Homo sapiens
cttctcagagtcttt

SEQ ID NO: 1241180 - DNA, 15 bp, Homo sapiens
acttctcagagtctt

SEQ ID NO: 1241181 - DNA, 15 bp, Homo sapiens
aacttctcagagtct

SEQ ID NO: 1241182 - DNA, 15 bp, Homo sapiens
gaacttctcagagtc

SEQ ID NO: 1241183 - DNA, 15 bp, Homo sapiens
agaacttctcagagt

SEQ ID NO: 1241184 - DNA, 15 bp, Homo sapiens
cagaacttctcagag

SEQ ID NO: 1241185 - DNA, 15 bp, Homo sapiens
acagaacttctcaga

SEQ ID NO: 1241186 - DNA, 15 bp, Homo sapiens
tacagaacttctcag

SEQ ID NO: 1241187 - DNA, 15 bp, Homo sapiens
ctacagaacttctca

SEQ ID NO: 1241188 - DNA, 15 bp, Homo sapiens
cctacagaacttctc

SEQ ID NO: 1241189 - DNA, 15 bp, Homo sapiens
ccctacagaacttct

SEQ ID NO: 1241190 - DNA, 15 bp, Homo sapiens
tccctacagaacttc

SEQ ID NO: 1241191 - DNA, 15 bp, Homo sapiens
ctccctacagaactt

SEQ ID NO: 1241192 - DNA, 15 bp, Homo sapiens
cctccctacagaact

SEQ ID NO: 1241193 - DNA, 15 bp, Homo sapiens
tcctccctacagaac

SEQ ID NO: 1241194 - DNA, 15 bp, Homo sapiens
ttcctccctacagaa

SEQ ID NO: 1241195 - DNA, 15 bp, Homo sapiens
tttcctccctacaga

SEQ ID NO: 1241196 - DNA, 15 bp, Homo sapiens
gtttcctccctacag

SEQ ID NO: 1241197 - DNA, 15 bp, Homo sapiens
ggtttcctccctaca

SEQ ID NO: 1241198 - DNA, 15 bp, Homo sapiens
aggtttcctccctac

SEQ ID NO: 1241199 - DNA, 15 bp, Homo sapiens
caggtttcctcccta

SEQ ID NO: 1241200 - DNA, 15 bp, Homo sapiens
acaggtttcctccct

SEQ ID NO: 1241201 - DNA, 15 bp, Homo sapiens
aacaggtttcctccc

SEQ ID NO: 1241202 - DNA, 15 bp, Homo sapiens
gaacaggtttcctcc

SEQ ID NO: 1241203 - DNA, 15 bp, Homo sapiens
tgaacaggtttcctc

SEQ ID NO: 1241204 - DNA, 15 bp, Homo sapiens
ttgaacaggtttcct

SEQ ID NO: 1241205 - DNA, 15 bp, Homo sapiens
attgaacaggtttcc

SEQ ID NO: 1241206 - DNA, 15 bp, Homo sapiens
cattgaacaggtttc

SEQ ID NO: 1241207 - DNA, 15 bp, Homo sapiens
acattgaacaggttt

SEQ ID NO: 1241208 - DNA, 15 bp, Homo sapiens
tacattgaacaggtt

SEQ ID NO: 1241209 - DNA, 15 bp, Homo sapiens
ttacattgaacaggt

SEQ ID NO: 1241210 - DNA, 15 bp, Homo sapiens
attacattgaacagg

SEQ ID NO: 1241211 - DNA, 15 bp, Homo sapiens
gattacattgaacag

SEQ ID NO: 1241212 - DNA, 15 bp, Homo sapiens
agattacattgaaca

SEQ ID NO: 1241213 - DNA, 15 bp, Homo sapiens
gagattacattgaac

SEQ ID NO: 1241214 - DNA, 15 bp, Homo sapiens
tgagattacattgaa

SEQ ID NO: 1241215 - DNA, 15 bp, Homo sapiens
gtgagattacattga

SEQ ID NO: 1241216 - DNA, 15 bp, Homo sapiens
agtgagattacattg

SEQ ID NO: 1241217 - DNA, 15 bp, Homo sapiens
gagtgagattacatt

SEQ ID NO: 1241218 - DNA, 15 bp, Homo sapiens
tgagtgagattacat

SEQ ID NO: 1241219 - DNA, 15 bp, Homo sapiens
ctgagtgagattaca

SEQ ID NO: 1241220 - DNA, 15 bp, Homo sapiens
gctgagtgagattac

SEQ ID NO: 1241221 - DNA, 15 bp, Homo sapiens
tgctgagtgagatta

SEQ ID NO: 1241222 - DNA, 15 bp, Homo sapiens
atgctgagtgagatt

SEQ ID NO: 1241223 - DNA, 15 bp, Homo sapiens
aatgctgagtgagat

SEQ ID NO: 1241224 - DNA, 15 bp, Homo sapiens
aaatgctgagtgaga

SEQ ID NO: 1241225 - DNA, 15 bp, Homo sapiens
gaaatgctgagtgag

SEQ ID NO: 1241226 - DNA, 15 bp, Homo sapiens
ggaaatgctgagtga

SEQ ID NO: 1241227 - DNA, 15 bp, Homo sapiens
aggaaatgctgagtg

SEQ ID NO: 1241228 - DNA, 15 bp, Homo sapiens
taggaaatgctgagt

SEQ ID NO: 1241229 - DNA, 15 bp, Homo sapiens
ataggaaatgctgag

SEQ ID NO: 1241230 - DNA, 15 bp, Homo sapiens
tataggaaatgctga

SEQ ID NO: 1241231 - DNA, 15 bp, Homo sapiens
atataggaaatgctg

SEQ ID NO: 1241232 - DNA, 15 bp, Homo sapiens
catataggaaatgct

SEQ ID NO: 1241233 - DNA, 15 bp, Homo sapiens
acatataggaaatgc

SEQ ID NO: 1241234 - DNA, 15 bp, Homo sapiens
tacatataggaaatg

SEQ ID NO: 1241235 - DNA, 15 bp, Homo sapiens
atacatataggaaat

SEQ ID NO: 1241236 - DNA, 15 bp, Homo sapiens
aatacatataggaaa

SEQ ID NO: 1241237 - DNA, 15 bp, Homo sapiens
aaatacatataggaa

SEQ ID NO: 1241238 - DNA, 15 bp, Homo sapiens
taaatacatatagga

SEQ ID NO: 1241239 - DNA, 15 bp, Homo sapiens
gtaaatacatatagg

SEQ ID NO: 1241240 - DNA, 15 bp, Homo sapiens
ggtaaatacatatag

SEQ ID NO: 1241241 - DNA, 15 bp, Homo sapiens
tggtaaatacatata

SEQ ID NO: 1241242 - DNA, 15 bp, Homo sapiens
atggtaaatacatat

SEQ ID NO: 1241243 - DNA, 15 bp, Homo sapiens
catggtaaatacata

SEQ ID NO: 1241244 - DNA, 15 bp, Homo sapiens
ccatggtaaatacat

SEQ ID NO: 1241245 - DNA, 15 bp, Homo sapiens
cccatggtaaataca

SEQ ID NO: 1241246 - DNA, 15 bp, Homo sapiens
tcccatggtaaatac

SEQ ID NO: 1241247 - DNA, 15 bp, Homo sapiens
gtcccatggtaaata

SEQ ID NO: 1241248 - DNA, 15 bp, Homo sapiens
ggtcccatggtaaat

SEQ ID NO: 1241249 - DNA, 15 bp, Homo sapiens
gggtcccatggtaaa

SEQ ID NO: 1241250 - DNA, 15 bp, Homo sapiens
agggtcccatggtaa

SEQ ID NO: 1241251 - DNA, 15 bp, Homo sapiens
cagggtcccatggta

SEQ ID NO: 1241252 - DNA, 15 bp, Homo sapiens
acagggtcccatggt

SEQ ID NO: 1241253 - DNA, 15 bp, Homo sapiens
aacagggtcccatgg

SEQ ID NO: 1241254 - DNA, 15 bp, Homo sapiens
aaacagggtcccatg

SEQ ID NO: 1241255 - DNA, 15 bp, Homo sapiens
taaacagggtcccat

SEQ ID NO: 1241256 - DNA, 15 bp, Homo sapiens
ctaaacagggtccca

SEQ ID NO: 1241257 - DNA, 15 bp, Homo sapiens
cctaaacagggtccc

SEQ ID NO: 1241258 - DNA, 15 bp, Homo sapiens
ccctaaacagggtcc

SEQ ID NO: 1241259 - DNA, 15 bp, Homo sapiens
tccctaaacagggtc

SEQ ID NO: 1241260 - DNA, 15 bp, Homo sapiens
ttccctaaacagggt

SEQ ID NO: 1241261 - DNA, 15 bp, Homo sapiens
cttccctaaacaggg

SEQ ID NO: 1241262 - DNA, 15 bp, Homo sapiens
tcttccctaaacagg

SEQ ID NO: 1241263 - DNA, 15 bp, Homo sapiens
atcttccctaaacag

SEQ ID NO: 1241264 - DNA, 15 bp, Homo sapiens
gatcttccctaaaca

SEQ ID NO: 1241265 - DNA, 15 bp, Homo sapiens
agatcttccctaaac

SEQ ID NO: 1241266 - DNA, 15 bp, Homo sapiens
gagatcttccctaaa

SEQ ID NO: 1241267 - DNA, 15 bp, Homo sapiens
agagatcttccctaa

SEQ ID NO: 1241268 - DNA, 15 bp, Homo sapiens
aagagatcttcccta

SEQ ID NO: 1241269 - DNA, 15 bp, Homo sapiens
taagagatcttccct

SEQ ID NO: 1241270 - DNA, 15 bp, Homo sapiens
ttaagagatcttccc

SEQ ID NO: 1241271 - DNA, 15 bp, Homo sapiens
attaagagatcttcc

SEQ ID NO: 1241272 - DNA, 15 bp, Homo sapiens
tattaagagatcttc

SEQ ID NO: 1241273 - DNA, 15 bp, Homo sapiens
atattaagagatctt

SEQ ID NO: 1241274 - DNA, 15 bp, Homo sapiens
gatattaagagatct

SEQ ID NO: 1241275 - DNA, 15 bp, Homo sapiens
agatattaagagatc

SEQ ID NO: 1241276 - DNA, 15 bp, Homo sapiens
aagatattaagagat

SEQ ID NO: 1241277 - DNA, 15 bp, Homo sapiens
gaagatattaagaga

SEQ ID NO: 1241278 - DNA, 15 bp, Homo sapiens
ggaagatattaagag

SEQ ID NO: 1241279 - DNA, 15 bp, Homo sapiens
tggaagatattaaga

SEQ ID NO: 1241280 - DNA, 15 bp, Homo sapiens
ctggaagatattaag

SEQ ID NO: 1241281 - DNA, 15 bp, Homo sapiens
cctggaagatattaa

SEQ ID NO: 1241282 - DNA, 15 bp, Homo sapiens
gcctggaagatatta

SEQ ID NO: 1241283 - DNA, 15 bp, Homo sapiens
tgcctggaagatatt

SEQ ID NO: 1241284 - DNA, 15 bp, Homo sapiens
gtgcctggaagatat

SEQ ID NO: 1241285 - DNA, 15 bp, Homo sapiens
agtgcctggaagata

SEQ ID NO: 1241286 - DNA, 15 bp, Homo sapiens
tagtgcctggaagat

SEQ ID NO: 1241287 - DNA, 15 bp, Homo sapiens
ctagtgcctggaaga

SEQ ID NO: 1241288 - DNA, 15 bp, Homo sapiens
actagtgcctggaag

SEQ ID NO: 1241289 - DNA, 15 bp, Homo sapiens
cactagtgcctggaa

SEQ ID NO: 1241290 - DNA, 15 bp, Homo sapiens
acactagtgcctgga

SEQ ID NO: 1241291 - DNA, 15 bp, Homo sapiens
aacactagtgcctgg

SEQ ID NO: 1241292 - DNA, 15 bp, Homo sapiens
gaacactagtgcctg

SEQ ID NO: 1241293 - DNA, 15 bp, Homo sapiens
ggaacactagtgcct

SEQ ID NO: 1241294 - DNA, 15 bp, Homo sapiens
tggaacactagtgcc

SEQ ID NO: 1241295 - DNA, 15 bp, Homo sapiens
gtggaacactagtgc

SEQ ID NO: 1241296 - DNA, 15 bp, Homo sapiens
agtggaacactagtg

SEQ ID NO: 1241297 - DNA, 15 bp, Homo sapiens
tagtggaacactagt

SEQ ID NO: 1241298 - DNA, 15 bp, Homo sapiens
ttagtggaacactag

SEQ ID NO: 1241299 - DNA, 15 bp, Homo sapiens
tttagtggaacacta

SEQ ID NO: 1241300 - DNA, 15 bp, Homo sapiens
gtttagtggaacact

SEQ ID NO: 1241301 - DNA, 15 bp, Homo sapiens
agtttagtggaacac

SEQ ID NO: 1241302 - DNA, 15 bp, Homo sapiens
gagtttagtggaaca

SEQ ID NO: 1241303 - DNA, 15 bp, Homo sapiens
tgagtttagtggaac

SEQ ID NO: 1241304 - DNA, 15 bp, Homo sapiens
atgagtttagtggaa

SEQ ID NO: 1241305 - DNA, 15 bp, Homo sapiens
catgagtttagtgga

SEQ ID NO: 1241306 - DNA, 15 bp, Homo sapiens
gcatgagtttagtgg

SEQ ID NO: 1241307 - DNA, 15 bp, Homo sapiens
agcatgagtttagtg

SEQ ID NO: 1241308 - DNA, 15 bp, Homo sapiens
cagcatgagtttagt

SEQ ID NO: 1241309 - DNA, 15 bp, Homo sapiens
acagcatgagtttag

SEQ ID NO: 1241310 - DNA, 15 bp, Homo sapiens
aacagcatgagttta

SEQ ID NO: 1241311 - DNA, 15 bp, Homo sapiens
aaacagcatgagttt

SEQ ID NO: 1241312 - DNA, 15 bp, Homo sapiens
aaaacagcatgagtt

SEQ ID NO: 1241313 - DNA, 15 bp, Homo sapiens
taaaacagcatgagt

SEQ ID NO: 1241314 - DNA, 15 bp, Homo sapiens
ctaaaacagcatgag

SEQ ID NO: 1241315 - DNA, 15 bp, Homo sapiens
tctaaaacagcatga

SEQ ID NO: 1241316 - DNA, 15 bp, Homo sapiens
ctctaaaacagcatg

SEQ ID NO: 1241317 - DNA, 15 bp, Homo sapiens
actctaaaacagcat

SEQ ID NO: 1241318 - DNA, 15 bp, Homo sapiens
aactctaaaacagca

SEQ ID NO: 1241319 - DNA, 15 bp, Homo sapiens
taactctaaaacagc

SEQ ID NO: 1241320 - DNA, 15 bp, Homo sapiens
ataactctaaaacag

SEQ ID NO: 1241321 - DNA, 15 bp, Homo sapiens
cataactctaaaaca

SEQ ID NO: 1241322 - DNA, 15 bp, Homo sapiens
tcataactctaaaac

SEQ ID NO: 1241323 - DNA, 15 bp, Homo sapiens
ttcataactctaaaa

SEQ ID NO: 1241324 - DNA, 15 bp, Homo sapiens
gttcataactctaaa

SEQ ID NO: 1241325 - DNA, 15 bp, Homo sapiens
agttcataactctaa

SEQ ID NO: 1241326 - DNA, 15 bp, Homo sapiens
gagttcataactcta

SEQ ID NO: 1241327 - DNA, 15 bp, Homo sapiens
ggagttcataactct

SEQ ID NO: 1241328 - DNA, 15 bp, Homo sapiens
tggagttcataactc

SEQ ID NO: 1241329 - DNA, 15 bp, Homo sapiens
ttggagttcataact

SEQ ID NO: 1241330 - DNA, 15 bp, Homo sapiens
tttggagttcataac

SEQ ID NO: 1241331 - DNA, 15 bp, Homo sapiens
gtttggagttcataa

SEQ ID NO: 1241332 - DNA, 15 bp, Homo sapiens
agtttggagttcata

SEQ ID NO: 1241333 - DNA, 15 bp, Homo sapiens
tagtttggagttcat

SEQ ID NO: 1241334 - DNA, 15 bp, Homo sapiens
atagtttggagttca

SEQ ID NO: 1241335 - DNA, 15 bp, Homo sapiens
gatagtttggagttc

SEQ ID NO: 1241336 - DNA, 15 bp, Homo sapiens
tgatagtttggagtt

SEQ ID NO: 1241337 - DNA, 15 bp, Homo sapiens
ctgatagtttggagt

SEQ ID NO: 1241338 - DNA, 15 bp, Homo sapiens
actgatagtttggag

SEQ ID NO: 1241339 - DNA, 15 bp, Homo sapiens
cactgatagtttgga

SEQ ID NO: 1241340 - DNA, 15 bp, Homo sapiens
tcactgatagtttgg

SEQ ID NO: 1241341 - DNA, 15 bp, Homo sapiens
atcactgatagtttg

SEQ ID NO: 1241342 - DNA, 15 bp, Homo sapiens
tatcactgatagttt

SEQ ID NO: 1241343 - DNA, 15 bp, Homo sapiens
ttatcactgatagtt

SEQ ID NO: 1241344 - DNA, 15 bp, Homo sapiens
gttatcactgatagt

SEQ ID NO: 1241345 - DNA, 15 bp, Homo sapiens
ggttatcactgatag

SEQ ID NO: 1241346 - DNA, 15 bp, Homo sapiens
aggttatcactgata

SEQ ID NO: 1241347 - DNA, 15 bp, Homo sapiens
taggttatcactgat

SEQ ID NO: 1241348 - DNA, 15 bp, Homo sapiens
ctaggttatcactga

SEQ ID NO: 1241349 - DNA, 15 bp, Homo sapiens
cctaggttatcactg

SEQ ID NO: 1241350 - DNA, 15 bp, Homo sapiens
acctaggttatcact

SEQ ID NO: 1241351 - DNA, 15 bp, Homo sapiens
aacctaggttatcac

SEQ ID NO: 1241352 - DNA, 15 bp, Homo sapiens
aaacctaggttatca

SEQ ID NO: 1241353 - DNA, 15 bp, Homo sapiens
caaacctaggttatc

SEQ ID NO: 1241354 - DNA, 15 bp, Homo sapiens
ccaaacctaggttat

SEQ ID NO: 1241355 - DNA, 15 bp, Homo sapiens
cccaaacctaggtta

SEQ ID NO: 1241356 - DNA, 15 bp, Homo sapiens
ccccaaacctaggtt

SEQ ID NO: 1241357 - DNA, 15 bp, Homo sapiens
accccaaacctaggt

SEQ ID NO: 1241358 - DNA, 15 bp, Homo sapiens
gaccccaaacctagg

SEQ ID NO: 1241359 - DNA, 15 bp, Homo sapiens
ggaccccaaacctag

SEQ ID NO: 1241360 - DNA, 15 bp, Homo sapiens
aggaccccaaaccta

SEQ ID NO: 1241361 - DNA, 15 bp, Homo sapiens
caggaccccaaacct

SEQ ID NO: 1241362 - DNA, 15 bp, Homo sapiens
tcaggaccccaaacc

SEQ ID NO: 1241363 - DNA, 15 bp, Homo sapiens
ctcaggaccccaaac

SEQ ID NO: 1241364 - DNA, 15 bp, Homo sapiens
cctcaggaccccaaa

SEQ ID NO: 1241365 - DNA, 15 bp, Homo sapiens
ccctcaggaccccaa

SEQ ID NO: 1241366 - DNA, 15 bp, Homo sapiens
tccctcaggacccca

SEQ ID NO: 1241367 - DNA, 15 bp, Homo sapiens
atccctcaggacccc

SEQ ID NO: 1241368 - DNA, 15 bp, Homo sapiens
catccctcaggaccc

SEQ ID NO: 1241369 - DNA, 15 bp, Homo sapiens
ccatccctcaggacc

SEQ ID NO: 1241370 - DNA, 15 bp, Homo sapiens
tccatccctcaggac

SEQ ID NO: 1241371 - DNA, 15 bp, Homo sapiens
ttccatccctcagga

SEQ ID NO: 1241372 - DNA, 15 bp, Homo sapiens
attccatccctcagg

SEQ ID NO: 1241373 - DNA, 15 bp, Homo sapiens
cattccatccctcag

SEQ ID NO: 1241374 - DNA, 15 bp, Homo sapiens
ccattccatccctca

SEQ ID NO: 1241375 - DNA, 15 bp, Homo sapiens
gccattccatccctc

SEQ ID NO: 1241376 - DNA, 15 bp, Homo sapiens
tgccattccatccct

SEQ ID NO: 1241377 - DNA, 15 bp, Homo sapiens
atgccattccatccc

SEQ ID NO: 1241378 - DNA, 15 bp, Homo sapiens
aatgccattccatcc

SEQ ID NO: 1241379 - DNA, 15 bp, Homo sapiens
caatgccattccatc

SEQ ID NO: 1241380 - DNA, 15 bp, Homo sapiens
ccaatgccattccat

SEQ ID NO: 1241381 - DNA, 15 bp, Homo sapiens
cccaatgccattcca

SEQ ID NO: 1241382 - DNA, 15 bp, Homo sapiens
ccccaatgccattcc

SEQ ID NO: 1241383 - DNA, 15 bp, Homo sapiens
accccaatgccattc

SEQ ID NO: 1241384 - DNA, 15 bp, Homo sapiens
aaccccaatgccatt

SEQ ID NO: 1241385 - DNA, 15 bp, Homo sapiens
taaccccaatgccat

SEQ ID NO: 1241386 - DNA, 15 bp, Homo sapiens
ttaaccccaatgcca

SEQ ID NO: 1241387 - DNA, 15 bp, Homo sapiens
cttaaccccaatgcc

SEQ ID NO: 1241388 - DNA, 15 bp, Homo sapiens
ccttaaccccaatgc

SEQ ID NO: 1241389 - DNA, 15 bp, Homo sapiens
tccttaaccccaatg

SEQ ID NO: 1241390 - DNA, 15 bp, Homo sapiens
atccttaaccccaat

SEQ ID NO: 1241391 - DNA, 15 bp, Homo sapiens
tatccttaaccccaa

SEQ ID NO: 1241392 - DNA, 15 bp, Homo sapiens
atatccttaacccca

SEQ ID NO: 1241393 - DNA, 15 bp, Homo sapiens
tatatccttaacccc

SEQ ID NO: 1241394 - DNA, 15 bp, Homo sapiens
gtatatccttaaccc

SEQ ID NO: 1241395 - DNA, 15 bp, Homo sapiens
ggtatatccttaacc

SEQ ID NO: 1241396 - DNA, 15 bp, Homo sapiens
tggtatatccttaac

SEQ ID NO: 1241397 - DNA, 15 bp, Homo sapiens
atggtatatccttaa

SEQ ID NO: 1241398 - DNA, 15 bp, Homo sapiens
gatggtatatcctta

SEQ ID NO: 1241399 - DNA, 15 bp, Homo sapiens
agatggtatatcctt

SEQ ID NO: 1241400 - DNA, 15 bp, Homo sapiens
tagatggtatatcct

SEQ ID NO: 1241401 - DNA, 15 bp, Homo sapiens
ctagatggtatatcc

SEQ ID NO: 1241402 - DNA, 15 bp, Homo sapiens
tctagatggtatatc

SEQ ID NO: 1241403 - DNA, 15 bp, Homo sapiens
ctctagatggtatat

SEQ ID NO: 1241404 - DNA, 15 bp, Homo sapiens
actctagatggtata

SEQ ID NO: 1241405 - DNA, 15 bp, Homo sapiens
gactctagatggtat

SEQ ID NO: 1241406 - DNA, 15 bp, Homo sapiens
tgactctagatggta

SEQ ID NO: 1241407 - DNA, 15 bp, Homo sapiens
ttgactctagatggt

SEQ ID NO: 1241408 - DNA, 15 bp, Homo sapiens
tttgactctagatgg

SEQ ID NO: 1241409 - DNA, 15 bp, Homo sapiens
gtttgactctagatg

SEQ ID NO: 1241410 - DNA, 15 bp, Homo sapiens
ggtttgactctagat

SEQ ID NO: 1241411 - DNA, 15 bp, Homo sapiens
cggtttgactctaga

SEQ ID NO: 1241412 - DNA, 15 bp, Homo sapiens
acggtttgactctag

SEQ ID NO: 1241413 - DNA, 15 bp, Homo sapiens
aacggtttgactcta

SEQ ID NO: 1241414 - DNA, 15 bp, Homo sapiens
aaacggtttgactct

SEQ ID NO: 1241415 - DNA, 15 bp, Homo sapiens
caaacggtttgactc

SEQ ID NO: 1241416 - DNA, 15 bp, Homo sapiens
ccaaacggtttgact

SEQ ID NO: 1241417 - DNA, 15 bp, Homo sapiens
tccaaacggtttgac

SEQ ID NO: 1241418 - DNA, 15 bp, Homo sapiens
atccaaacggtttga

SEQ ID NO: 1241419 - DNA, 15 bp, Homo sapiens
aatccaaacggtttg

SEQ ID NO: 1241420 - DNA, 15 bp, Homo sapiens
gaatccaaacggttt

SEQ ID NO: 1241421 - DNA, 15 bp, Homo sapiens
tgaatccaaacggtt

SEQ ID NO: 1241422 - DNA, 15 bp, Homo sapiens
ctgaatccaaacggt

SEQ ID NO: 1241423 - DNA, 15 bp, Homo sapiens
tctgaatccaaacgg

SEQ ID NO: 1241424 - DNA, 15 bp, Homo sapiens
ttctgaatccaaacg

SEQ ID NO: 1241425 - DNA, 15 bp, Homo sapiens
gttctgaatccaaac

SEQ ID NO: 1241426 - DNA, 15 bp, Homo sapiens
ggttctgaatccaaa

SEQ ID NO: 1241427 - DNA, 15 bp, Homo sapiens
gggttctgaatccaa

SEQ ID NO: 1241428 - DNA, 15 bp, Homo sapiens
tgggttctgaatcca

SEQ ID NO: 1241429 - DNA, 15 bp, Homo sapiens
ctgggttctgaatcc

SEQ ID NO: 1241430 - DNA, 15 bp, Homo sapiens
actgggttctgaatc

SEQ ID NO: 1241431 - DNA, 15 bp, Homo sapiens
aactgggttctgaat

SEQ ID NO: 1241432 - DNA, 15 bp, Homo sapiens
caactgggttctgaa

SEQ ID NO: 1241433 - DNA, 15 bp, Homo sapiens
gcaactgggttctga

SEQ ID NO: 1241434 - DNA, 15 bp, Homo sapiens
tgcaactgggttctg

SEQ ID NO: 1241435 - DNA, 15 bp, Homo sapiens
gtgcaactgggttct

SEQ ID NO: 1241436 - DNA, 15 bp, Homo sapiens
tgtgcaactgggttc

SEQ ID NO: 1241437 - DNA, 15 bp, Homo sapiens
ttgtgcaactgggtt

SEQ ID NO: 1241438 - DNA, 15 bp, Homo sapiens
gttgtgcaactgggt

SEQ ID NO: 1241439 - DNA, 15 bp, Homo sapiens
ggttgtgcaactggg

SEQ ID NO: 1241440 - DNA, 15 bp, Homo sapiens
aggttgtgcaactgg

SEQ ID NO: 1241441 - DNA, 15 bp, Homo sapiens
caggttgtgcaactg

SEQ ID NO: 1241442 - DNA, 15 bp, Homo sapiens
acaggttgtgcaact

SEQ ID NO: 1241443 - DNA, 15 bp, Homo sapiens
cacaggttgtgcaac

SEQ ID NO: 1241444 - DNA, 15 bp, Homo sapiens
tcacaggttgtgcaa

SEQ ID NO: 1241445 - DNA, 15 bp, Homo sapiens
ctcacaggttgtgca

SEQ ID NO: 1241446 - DNA, 15 bp, Homo sapiens
gctcacaggttgtgc

SEQ ID NO: 1241447 - DNA, 15 bp, Homo sapiens
agctcacaggttgtg

SEQ ID NO: 1241448 - DNA, 15 bp, Homo sapiens
aagctcacaggttgt

SEQ ID NO: 1241449 - DNA, 15 bp, Homo sapiens
caagctcacaggttg

SEQ ID NO: 1241450 - DNA, 15 bp, Homo sapiens
tcaagctcacaggtt

SEQ ID NO: 1241451 - DNA, 15 bp, Homo sapiens
ttcaagctcacaggt

SEQ ID NO: 1241452 - DNA, 15 bp, Homo sapiens
cttcaagctcacagg

SEQ ID NO: 1241453 - DNA, 15 bp, Homo sapiens
tcttcaagctcacag

SEQ ID NO: 1241454 - DNA, 15 bp, Homo sapiens
gtcttcaagctcaca

SEQ ID NO: 1241455 - DNA, 15 bp, Homo sapiens
ggtcttcaagctcac

SEQ ID NO: 1241456 - DNA, 15 bp, Homo sapiens
aggtcttcaagctca

SEQ ID NO: 1241457 - DNA, 15 bp, Homo sapiens
gaggtcttcaagctc

SEQ ID NO: 1241458 - DNA, 15 bp, Homo sapiens
tgaggtcttcaagct

SEQ ID NO: 1241459 - DNA, 15 bp, Homo sapiens
ttgaggtcttcaagc

SEQ ID NO: 1241460 - DNA, 15 bp, Homo sapiens
cttgaggtcttcaag

SEQ ID NO: 1241461 - DNA, 15 bp, Homo sapiens
tcttgaggtcttcaa

SEQ ID NO: 1241462 - DNA, 15 bp, Homo sapiens
ttcttgaggtcttca

SEQ ID NO: 1241463 - DNA, 15 bp, Homo sapiens
tttcttgaggtcttc

SEQ ID NO: 1241464 - DNA, 15 bp, Homo sapiens
ttttcttgaggtctt

SEQ ID NO: 1241465 - DNA, 15 bp, Homo sapiens
cttttcttgaggtct

SEQ ID NO: 1241466 - DNA, 15 bp, Homo sapiens
acttttcttgaggtc

SEQ ID NO: 1241467 - DNA, 15 bp, Homo sapiens
tacttttcttgaggt

SEQ ID NO: 1241468 - DNA, 15 bp, Homo sapiens
atacttttcttgagg

SEQ ID NO: 1241469 - DNA, 15 bp, Homo sapiens
aatacttttcttgag

SEQ ID NO: 1241470 - DNA, 15 bp, Homo sapiens
aaatacttttcttga

SEQ ID NO: 1241471 - DNA, 15 bp, Homo sapiens
taaatacttttcttg

SEQ ID NO: 1241472 - DNA, 15 bp, Homo sapiens
ttaaatacttttctt

SEQ ID NO: 1241473 - DNA, 15 bp, Homo sapiens
gttaaatacttttct

SEQ ID NO: 1241474 - DNA, 15 bp, Homo sapiens
agttaaatacttttc

SEQ ID NO: 1241475 - DNA, 15 bp, Homo sapiens
aagttaaatactttt

SEQ ID NO: 1241476 - DNA, 15 bp, Homo sapiens
gaagttaaatacttt

SEQ ID NO: 1241477 - DNA, 15 bp, Homo sapiens
agaagttaaatactt

SEQ ID NO: 1241478 - DNA, 15 bp, Homo sapiens
aagaagttaaatact

SEQ ID NO: 1241479 - DNA, 15 bp, Homo sapiens
taagaagttaaatac

SEQ ID NO: 1241480 - DNA, 15 bp, Homo sapiens
ctaagaagttaaata

SEQ ID NO: 1241481 - DNA, 15 bp, Homo sapiens
actaagaagttaaat

SEQ ID NO: 1241482 - DNA, 15 bp, Homo sapiens
cactaagaagttaaa

SEQ ID NO: 1241483 - DNA, 15 bp, Homo sapiens
ccactaagaagttaa

SEQ ID NO: 1241484 - DNA, 15 bp, Homo sapiens
gccactaagaagtta

SEQ ID NO: 1241485 - DNA, 15 bp, Homo sapiens
agccactaagaagtt

SEQ ID NO: 1241486 - DNA, 15 bp, Homo sapiens
tagccactaagaagt

SEQ ID NO: 1241487 - DNA, 15 bp, Homo sapiens
ctagccactaagaag

SEQ ID NO: 1241488 - DNA, 15 bp, Homo sapiens
cctagccactaagaa

SEQ ID NO: 1241489 - DNA, 15 bp, Homo sapiens
acctagccactaaga

SEQ ID NO: 1241490 - DNA, 15 bp, Homo sapiens
aacctagccactaag

SEQ ID NO: 1241491 - DNA, 15 bp, Homo sapiens
aaacctagccactaa

SEQ ID NO: 1241492 - DNA, 15 bp, Homo sapiens
gaaacctagccacta

SEQ ID NO: 1241493 - DNA, 15 bp, Homo sapiens
ggaaacctagccact

SEQ ID NO: 1241494 - DNA, 15 bp, Homo sapiens
aggaaacctagccac

SEQ ID NO: 1241495 - DNA, 15 bp, Homo sapiens
gaggaaacctagcca

SEQ ID NO: 1241496 - DNA, 15 bp, Homo sapiens
tgaggaaacctagcc

SEQ ID NO: 1241497 - DNA, 15 bp, Homo sapiens
atgaggaaacctagc

SEQ ID NO: 1241498 - DNA, 15 bp, Homo sapiens
aatgaggaaacctag

SEQ ID NO: 1241499 - DNA, 15 bp, Homo sapiens
gaatgaggaaaccta

SEQ ID NO: 1241500 - DNA, 15 bp, Homo sapiens
agaatgaggaaacct

SEQ ID NO: 1241501 - DNA, 15 bp, Homo sapiens
tagaatgaggaaacc

SEQ ID NO: 1241502 - DNA, 15 bp, Homo sapiens
ttagaatgaggaaac

SEQ ID NO: 1241503 - DNA, 15 bp, Homo sapiens
tttagaatgaggaaa

SEQ ID NO: 1241504 - DNA, 15 bp, Homo sapiens
ttttagaatgaggaa

SEQ ID NO: 1241505 - DNA, 15 bp, Homo sapiens
tttttagaatgagga

SEQ ID NO: 1241506 - DNA, 15 bp, Homo sapiens
atttttagaatgagg

SEQ ID NO: 1241507 - DNA, 15 bp, Homo sapiens
aatttttagaatgag

SEQ ID NO: 1241508 - DNA, 15 bp, Homo sapiens
taatttttagaatga

SEQ ID NO: 1241509 - DNA, 15 bp, Homo sapiens
ttaatttttagaatg

SEQ ID NO: 1241510 - DNA, 15 bp, Homo sapiens
cttaatttttagaat

SEQ ID NO: 1241511 - DNA, 15 bp, Homo sapiens
tcttaatttttagaa

SEQ ID NO: 1241512 - DNA, 15 bp, Homo sapiens
atcttaatttttaga

SEQ ID NO: 1241513 - DNA, 15 bp, Homo sapiens
tatcttaatttttag

SEQ ID NO: 1241514 - DNA, 15 bp, Homo sapiens
ttatcttaattttta

SEQ ID NO: 1241515 - DNA, 15 bp, Homo sapiens
cttatcttaattttt

SEQ ID NO: 1241516 - DNA, 15 bp, Homo sapiens
tcttatcttaatttt

SEQ ID NO: 1241517 - DNA, 15 bp, Homo sapiens
ttcttatcttaattt

SEQ ID NO: 1241518 - DNA, 15 bp, Homo sapiens
cttcttatcttaatt

SEQ ID NO: 1241519 - DNA, 15 bp, Homo sapiens
acttcttatcttaat

SEQ ID NO: 1241520 - DNA, 15 bp, Homo sapiens
tacttcttatcttaa

SEQ ID NO: 1241521 - DNA, 15 bp, Homo sapiens
ctacttcttatctta

SEQ ID NO: 1241522 - DNA, 15 bp, Homo sapiens
tctacttcttatctt

SEQ ID NO: 1241523 - DNA, 15 bp, Homo sapiens
ttctacttcttatct

SEQ ID NO: 1241524 - DNA, 15 bp, Homo sapiens
cttctacttcttatc

SEQ ID NO: 1241525 - DNA, 15 bp, Homo sapiens
acttctacttcttat

SEQ ID NO: 1241526 - DNA, 15 bp, Homo sapiens
aacttctacttctta

SEQ ID NO: 1241527 - DNA, 15 bp, Homo sapiens
gaacttctacttctt

SEQ ID NO: 1241528 - DNA, 15 bp, Homo sapiens
agaacttctacttct

SEQ ID NO: 1241529 - DNA, 15 bp, Homo sapiens
tagaacttctacttc

SEQ ID NO: 1241530 - DNA, 15 bp, Homo sapiens
ctagaacttctactt

SEQ ID NO: 1241531 - DNA, 15 bp, Homo sapiens
actagaacttctact

SEQ ID NO: 1241532 - DNA, 15 bp, Homo sapiens
cactagaacttctac

SEQ ID NO: 1241533 - DNA, 15 bp, Homo sapiens
tcactagaacttcta

SEQ ID NO: 1241534 - DNA, 15 bp, Homo sapiens
ttcactagaacttct

SEQ ID NO: 1241535 - DNA, 15 bp, Homo sapiens
attcactagaacttc

SEQ ID NO: 1241536 - DNA, 15 bp, Homo sapiens
aattcactagaactt

SEQ ID NO: 1241537 - DNA, 15 bp, Homo sapiens
caattcactagaact

SEQ ID NO: 1241538 - DNA, 15 bp, Homo sapiens
ccaattcactagaac

SEQ ID NO: 1241539 - DNA, 15 bp, Homo sapiens
cccaattcactagaa

SEQ ID NO: 1241540 - DNA, 15 bp, Homo sapiens
ccccaattcactaga

SEQ ID NO: 1241541 - DNA, 15 bp, Homo sapiens
gccccaattcactag

SEQ ID NO: 1241542 - DNA, 15 bp, Homo sapiens
ggccccaattcacta

SEQ ID NO: 1241543 - DNA, 15 bp, Homo sapiens
tggccccaattcact

SEQ ID NO: 1241544 - DNA, 15 bp, Homo sapiens
ttggccccaattcac

SEQ ID NO: 1241545 - DNA, 15 bp, Homo sapiens
tttggccccaattca

SEQ ID NO: 1241546 - DNA, 15 bp, Homo sapiens
atttggccccaattc

SEQ ID NO: 1241547 - DNA, 15 bp, Homo sapiens
catttggccccaatt

SEQ ID NO: 1241548 - DNA, 15 bp, Homo sapiens
tcatttggccccaat

SEQ ID NO: 1241549 - DNA, 15 bp, Homo sapiens
atcatttggccccaa

SEQ ID NO: 1241550 - DNA, 15 bp, Homo sapiens
aatcatttggcccca

SEQ ID NO: 1241551 - DNA, 15 bp, Homo sapiens
taatcatttggcccc

SEQ ID NO: 1241552 - DNA, 15 bp, Homo sapiens
ctaatcatttggccc

SEQ ID NO: 1241553 - DNA, 15 bp, Homo sapiens
cctaatcatttggcc

SEQ ID NO: 1241554 - DNA, 15 bp, Homo sapiens
tcctaatcatttggc

SEQ ID NO: 1241555 - DNA, 15 bp, Homo sapiens
ctcctaatcatttgg

SEQ ID NO: 1241556 - DNA, 15 bp, Homo sapiens
actcctaatcatttg

SEQ ID NO: 1241557 - DNA, 15 bp, Homo sapiens
tactcctaatcattt

SEQ ID NO: 1241558 - DNA, 15 bp, Homo sapiens
atactcctaatcatt

SEQ ID NO: 1241559 - DNA, 15 bp, Homo sapiens
tatactcctaatcat

SEQ ID NO: 1241560 - DNA, 15 bp, Homo sapiens
gtatactcctaatca

SEQ ID NO: 1241561 - DNA, 15 bp, Homo sapiens
ggtatactcctaatc

SEQ ID NO: 1241562 - DNA, 15 bp, Homo sapiens
tggtatactcctaat

SEQ ID NO: 1241563 - DNA, 15 bp, Homo sapiens
ttggtatactcctaa

SEQ ID NO: 1241564 - DNA, 15 bp, Homo sapiens
tttggtatactccta

SEQ ID NO: 1241565 - DNA, 15 bp, Homo sapiens
ttttggtatactcct

SEQ ID NO: 1241566 - DNA, 15 bp, Homo sapiens
gttttggtatactcc

SEQ ID NO: 1241567 - DNA, 15 bp, Homo sapiens
ggttttggtatactc

SEQ ID NO: 1241568 - DNA, 15 bp, Homo sapiens
gggttttggtatact

SEQ ID NO: 1241569 - DNA, 15 bp, Homo sapiens
agggttttggtatac

SEQ ID NO: 1241570 - DNA, 15 bp, Homo sapiens
aagggttttggtata

SEQ ID NO: 1241571 - DNA, 15 bp, Homo sapiens
taagggttttggtat

SEQ ID NO: 1241572 - DNA, 15 bp, Homo sapiens
gtaagggttttggta

SEQ ID NO: 1241573 - DNA, 15 bp, Homo sapiens
ggtaagggttttggt

SEQ ID NO: 1241574 - DNA, 15 bp, Homo sapiens
aggtaagggttttgg

SEQ ID NO: 1241575 - DNA, 15 bp, Homo sapiens
caggtaagggttttg

SEQ ID NO: 1241576 - DNA, 15 bp, Homo sapiens
gcaggtaagggtttt

SEQ ID NO: 1241577 - DNA, 15 bp, Homo sapiens
agcaggtaagggttt

SEQ ID NO: 1241578 - DNA, 15 bp, Homo sapiens
tagcaggtaagggtt

SEQ ID NO: 1241579 - DNA, 15 bp, Homo sapiens
ttagcaggtaagggt

SEQ ID NO: 1241580 - DNA, 15 bp, Homo sapiens
gttagcaggtaaggg

SEQ ID NO: 1241581 - DNA, 15 bp, Homo sapiens
ggttagcaggtaagg

SEQ ID NO: 1241582 - DNA, 15 bp, Homo sapiens
aggttagcaggtaag

SEQ ID NO: 1241583 - DNA, 15 bp, Homo sapiens
taggttagcaggtaa

SEQ ID NO: 1241584 - DNA, 15 bp, Homo sapiens
gtaggttagcaggta

SEQ ID NO: 1241585 - DNA, 15 bp, Homo sapiens
tgtaggttagcaggt

SEQ ID NO: 1241586 - DNA, 15 bp, Homo sapiens
ttgtaggttagcagg

SEQ ID NO: 1241587 - DNA, 15 bp, Homo sapiens
gttgtaggttagcag

SEQ ID NO: 1241588 - DNA, 15 bp, Homo sapiens
tgttgtaggttagca

SEQ ID NO: 1241589 - DNA, 15 bp, Homo sapiens
atgttgtaggttagc

SEQ ID NO: 1241590 - DNA, 15 bp, Homo sapiens
gatgttgtaggttag

SEQ ID NO: 1241591 - DNA, 15 bp, Homo sapiens
ggatgttgtaggtta

SEQ ID NO: 1241592 - DNA, 15 bp, Homo sapiens
gggatgttgtaggtt

SEQ ID NO: 1241593 - DNA, 15 bp, Homo sapiens
tgggatgttgtaggt

SEQ ID NO: 1241594 - DNA, 15 bp, Homo sapiens
gtgggatgttgtagg

SEQ ID NO: 1241595 - DNA, 15 bp, Homo sapiens
agtgggatgttgtag

SEQ ID NO: 1241596 - DNA, 15 bp, Homo sapiens
cagtgggatgttgta

SEQ ID NO: 1241597 - DNA, 15 bp, Homo sapiens
tcagtgggatgttgt

SEQ ID NO: 1241598 - DNA, 15 bp, Homo sapiens
gtcagtgggatgttg

SEQ ID NO: 1241599 - DNA, 15 bp, Homo sapiens
ggtcagtgggatgtt

SEQ ID NO: 1241600 - DNA, 15 bp, Homo sapiens
aggtcagtgggatgt

SEQ ID NO: 1241601 - DNA, 15 bp, Homo sapiens
gaggtcagtgggatg

SEQ ID NO: 1241602 - DNA, 15 bp, Homo sapiens
tgaggtcagtgggat

SEQ ID NO: 1241603 - DNA, 15 bp, Homo sapiens
ctgaggtcagtggga

SEQ ID NO: 1241604 - DNA, 15 bp, Homo sapiens
actgaggtcagtggg

SEQ ID NO: 1241605 - DNA, 15 bp, Homo sapiens
tactgaggtcagtgg

SEQ ID NO: 1241606 - DNA, 15 bp, Homo sapiens
ctactgaggtcagtg

SEQ ID NO: 1241607 - DNA, 15 bp, Homo sapiens
tctactgaggtcagt

SEQ ID NO: 1241608 - DNA, 15 bp, Homo sapiens
atctactgaggtcag

SEQ ID NO: 1241609 - DNA, 15 bp, Homo sapiens
aatctactgaggtca

SEQ ID NO: 1241610 - DNA, 15 bp, Homo sapiens
caatctactgaggtc

SEQ ID NO: 1241611 - DNA, 15 bp, Homo sapiens
acaatctactgaggt

SEQ ID NO: 1241612 - DNA, 15 bp, Homo sapiens
aacaatctactgagg

SEQ ID NO: 1241613 - DNA, 15 bp, Homo sapiens
gaacaatctactgag

SEQ ID NO: 1241614 - DNA, 15 bp, Homo sapiens
ggaacaatctactga

SEQ ID NO: 1241615 - DNA, 15 bp, Homo sapiens
tggaacaatctactg

SEQ ID NO: 1241616 - DNA, 15 bp, Homo sapiens
ttggaacaatctact

SEQ ID NO: 1241617 - DNA, 15 bp, Homo sapiens
gttggaacaatctac

SEQ ID NO: 1241618 - DNA, 15 bp, Homo sapiens
agttggaacaatcta

SEQ ID NO: 1241619 - DNA, 15 bp, Homo sapiens
aagttggaacaatct

SEQ ID NO: 1241620 - DNA, 15 bp, Homo sapiens
aaagttggaacaatc

SEQ ID NO: 1241621 - DNA, 15 bp, Homo sapiens
gaaagttggaacaat

SEQ ID NO: 1241622 - DNA, 15 bp, Homo sapiens
tgaaagttggaacaa

SEQ ID NO: 1241623 - DNA, 15 bp, Homo sapiens
ttgaaagttggaaca

SEQ ID NO: 1241624 - DNA, 15 bp, Homo sapiens
attgaaagttggaac

SEQ ID NO: 1241625 - DNA, 15 bp, Homo sapiens
aattgaaagttggaa

SEQ ID NO: 1241626 - DNA, 15 bp, Homo sapiens
taattgaaagttgga

SEQ ID NO: 1241627 - DNA, 15 bp, Homo sapiens
ataattgaaagttgg

SEQ ID NO: 1241628 - DNA, 15 bp, Homo sapiens
aataattgaaagttg

SEQ ID NO: 1241629 - DNA, 15 bp, Homo sapiens
aaataattgaaagtt

SEQ ID NO: 1241630 - DNA, 15 bp, Homo sapiens
taaataattgaaagt

SEQ ID NO: 1241631 - DNA, 15 bp, Homo sapiens
ataaataattgaaag

SEQ ID NO: 1241632 - DNA, 15 bp, Homo sapiens
cataaataattgaaa

SEQ ID NO: 1241633 - DNA, 15 bp, Homo sapiens
gcataaataattgaa

SEQ ID NO: 1241634 - DNA, 15 bp, Homo sapiens
tgcataaataattga

SEQ ID NO: 1241635 - DNA, 15 bp, Homo sapiens
atgcataaataattg

SEQ ID NO: 1241636 - DNA, 15 bp, Homo sapiens
aatgcataaataatt

SEQ ID NO: 1241637 - DNA, 15 bp, Homo sapiens
caatgcataaataat

SEQ ID NO: 1241638 - DNA, 15 bp, Homo sapiens
ccaatgcataaataa

SEQ ID NO: 1241639 - DNA, 15 bp, Homo sapiens
accaatgcataaata

SEQ ID NO: 1241640 - DNA, 15 bp, Homo sapiens
aaccaatgcataaat

SEQ ID NO: 1241641 - DNA, 15 bp, Homo sapiens
aaaccaatgcataaa

SEQ ID NO: 1241642 - DNA, 15 bp, Homo sapiens
taaaccaatgcataa

SEQ ID NO: 1241643 - DNA, 15 bp, Homo sapiens
ttaaaccaatgcata

SEQ ID NO: 1241644 - DNA, 15 bp, Homo sapiens
tttaaaccaatgcat

SEQ ID NO: 1241645 - DNA, 15 bp, Homo sapiens
gtttaaaccaatgca

SEQ ID NO: 1241646 - DNA, 15 bp, Homo sapiens
tgtttaaaccaatgc

SEQ ID NO: 1241647 - DNA, 15 bp, Homo sapiens
atgtttaaaccaatg

SEQ ID NO: 1241648 - DNA, 15 bp, Homo sapiens
aatgtttaaaccaat

SEQ ID NO: 1241649 - DNA, 15 bp, Homo sapiens
aaatgtttaaaccaa

SEQ ID NO: 1241650 - DNA, 15 bp, Homo sapiens
aaaatgtttaaacca

SEQ ID NO: 1241651 - DNA, 15 bp, Homo sapiens
gaaaatgtttaaacc

SEQ ID NO: 1241652 - DNA, 15 bp, Homo sapiens
agaaaatgtttaaac

SEQ ID NO: 1241653 - DNA, 15 bp, Homo sapiens
cagaaaatgtttaaa

SEQ ID NO: 1241654 - DNA, 15 bp, Homo sapiens
acagaaaatgtttaa

SEQ ID NO: 1241655 - DNA, 15 bp, Homo sapiens
tacagaaaatgttta

SEQ ID NO: 1241656 - DNA, 15 bp, Homo sapiens
ctacagaaaatgttt

SEQ ID NO: 1241657 - DNA, 15 bp, Homo sapiens
actacagaaaatgtt

SEQ ID NO: 1241658 - DNA, 15 bp, Homo sapiens
cactacagaaaatgt

SEQ ID NO: 1241659 - DNA, 15 bp, Homo sapiens
gcactacagaaaatg

SEQ ID NO: 1241660 - DNA, 15 bp, Homo sapiens
agcactacagaaaat

SEQ ID NO: 1241661 - DNA, 15 bp, Homo sapiens
gagcactacagaaaa

SEQ ID NO: 1241662 - DNA, 15 bp, Homo sapiens
agagcactacagaaa

SEQ ID NO: 1241663 - DNA, 15 bp, Homo sapiens
tagagcactacagaa

SEQ ID NO: 1241664 - DNA, 15 bp, Homo sapiens
atagagcactacaga

SEQ ID NO: 1241665 - DNA, 15 bp, Homo sapiens
tatagagcactacag

SEQ ID NO: 1241666 - DNA, 15 bp, Homo sapiens
atatagagcactaca

SEQ ID NO: 1241667 - DNA, 15 bp, Homo sapiens
aatatagagcactac

SEQ ID NO: 1241668 - DNA, 15 bp, Homo sapiens
aaatatagagcacta

SEQ ID NO: 1241669 - DNA, 15 bp, Homo sapiens
aaaatatagagcact

SEQ ID NO: 1241670 - DNA, 15 bp, Homo sapiens
aaaaatatagagcac

SEQ ID NO: 1241671 - DNA, 15 bp, Homo sapiens
taaaaatatagagca

SEQ ID NO: 1241672 - DNA, 15 bp, Homo sapiens
ctaaaaatatagagc

SEQ ID NO: 1241673 - DNA, 15 bp, Homo sapiens
gctaaaaatatagag

SEQ ID NO: 1241674 - DNA, 15 bp, Homo sapiens
ggctaaaaatataga

SEQ ID NO: 1241675 - DNA, 15 bp, Homo sapiens
aggctaaaaatatag

SEQ ID NO: 1241676 - DNA, 15 bp, Homo sapiens
gaggctaaaaatata

SEQ ID NO: 1241677 - DNA, 15 bp, Homo sapiens
agaggctaaaaatat

SEQ ID NO: 1241678 - DNA, 15 bp, Homo sapiens
tagaggctaaaaata

SEQ ID NO: 1241679 - DNA, 15 bp, Homo sapiens
gtagaggctaaaaat

SEQ ID NO: 1241680 - DNA, 15 bp, Homo sapiens
agtagaggctaaaaa

SEQ ID NO: 1241681 - DNA, 15 bp, Homo sapiens
tagtagaggctaaaa

SEQ ID NO: 1241682 - DNA, 15 bp, Homo sapiens
ctagtagaggctaaa

SEQ ID NO: 1241683 - DNA, 15 bp, Homo sapiens
gctagtagaggctaa

SEQ ID NO: 1241684 - DNA, 15 bp, Homo sapiens
agctagtagaggcta

SEQ ID NO: 1241685 - DNA, 15 bp, Homo sapiens
gagctagtagaggct

SEQ ID NO: 1241686 - DNA, 15 bp, Homo sapiens
tgagctagtagaggc

SEQ ID NO: 1241687 - DNA, 15 bp, Homo sapiens
atgagctagtagagg

SEQ ID NO: 1241688 - DNA, 15 bp, Homo sapiens
catgagctagtagag

SEQ ID NO: 1241689 - DNA, 15 bp, Homo sapiens
acatgagctagtaga

SEQ ID NO: 1241690 - DNA, 15 bp, Homo sapiens
gacatgagctagtag

SEQ ID NO: 1241691 - DNA, 15 bp, Homo sapiens
ggacatgagctagta

SEQ ID NO: 1241692 - DNA, 15 bp, Homo sapiens
tggacatgagctagt

SEQ ID NO: 1241693 - DNA, 15 bp, Homo sapiens
atggacatgagctag

SEQ ID NO: 1241694 - DNA, 15 bp, Homo sapiens
catggacatgagcta

SEQ ID NO: 1241695 - DNA, 15 bp, Homo sapiens
gcatggacatgagct

SEQ ID NO: 1241696 - DNA, 15 bp, Homo sapiens
ggcatggacatgagc

SEQ ID NO: 1241697 - DNA, 15 bp, Homo sapiens
aggcatggacatgag

SEQ ID NO: 1241698 - DNA, 15 bp, Homo sapiens
aaggcatggacatga

SEQ ID NO: 1241699 - DNA, 15 bp, Homo sapiens
aaaggcatggacatg

SEQ ID NO: 1241700 - DNA, 15 bp, Homo sapiens
aaaaggcatggacat

SEQ ID NO: 1241701 - DNA, 15 bp, Homo sapiens
taaaaggcatggaca

SEQ ID NO: 1241702 - DNA, 15 bp, Homo sapiens
ctaaaaggcatggac

SEQ ID NO: 1241703 - DNA, 15 bp, Homo sapiens
cctaaaaggcatgga

SEQ ID NO: 1241704 - DNA, 15 bp, Homo sapiens
tcctaaaaggcatgg

SEQ ID NO: 1241705 - DNA, 15 bp, Homo sapiens
ttcctaaaaggcatg

SEQ ID NO: 1241706 - DNA, 15 bp, Homo sapiens
tttcctaaaaggcat

SEQ ID NO: 1241707 - DNA, 15 bp, Homo sapiens
ttttcctaaaaggca

SEQ ID NO: 1241708 - DNA, 15 bp, Homo sapiens
attttcctaaaaggc

SEQ ID NO: 1241709 - DNA, 15 bp, Homo sapiens
tattttcctaaaagg

SEQ ID NO: 1241710 - DNA, 15 bp, Homo sapiens
gtattttcctaaaag

SEQ ID NO: 1241711 - DNA, 15 bp, Homo sapiens
agtattttcctaaaa

SEQ ID NO: 1241712 - DNA, 15 bp, Homo sapiens
gagtattttcctaaa

SEQ ID NO: 1241713 - DNA, 15 bp, Homo sapiens
agagtattttcctaa

SEQ ID NO: 1241714 - DNA, 15 bp, Homo sapiens
gagagtattttccta

SEQ ID NO: 1241715 - DNA, 15 bp, Homo sapiens
ggagagtattttcct

SEQ ID NO: 1241716 - DNA, 15 bp, Homo sapiens
aggagagtattttcc

SEQ ID NO: 1241717 - DNA, 15 bp, Homo sapiens
caggagagtattttc

SEQ ID NO: 1241718 - DNA, 15 bp, Homo sapiens
tcaggagagtatttt

SEQ ID NO: 1241719 - DNA, 15 bp, Homo sapiens
ctcaggagagtattt

SEQ ID NO: 1241720 - DNA, 15 bp, Homo sapiens
tctcaggagagtatt

SEQ ID NO: 1241721 - DNA, 15 bp, Homo sapiens
ctctcaggagagtat

SEQ ID NO: 1241722 - DNA, 15 bp, Homo sapiens
actctcaggagagta

SEQ ID NO: 1241723 - DNA, 15 bp, Homo sapiens
gactctcaggagagt

SEQ ID NO: 1241724 - DNA, 15 bp, Homo sapiens
agactctcaggagag

SEQ ID NO: 1241725 - DNA, 15 bp, Homo sapiens
aagactctcaggaga

SEQ ID NO: 1241726 - DNA, 15 bp, Homo sapiens
aaagactctcaggag

SEQ ID NO: 1241727 - DNA, 15 bp, Homo sapiens
taaagactctcagga

SEQ ID NO: 1241728 - DNA, 15 bp, Homo sapiens
gtaaagactctcagg

SEQ ID NO: 1241729 - DNA, 15 bp, Homo sapiens
agtaaagactctcag

SEQ ID NO: 1241730 - DNA, 15 bp, Homo sapiens
cagtaaagactctca

SEQ ID NO: 1241731 - DNA, 15 bp, Homo sapiens
acagtaaagactctc

SEQ ID NO: 1241732 - DNA, 15 bp, Homo sapiens
tacagtaaagactct

SEQ ID NO: 1241733 - DNA, 15 bp, Homo sapiens
ttacagtaaagactc

SEQ ID NO: 1241734 - DNA, 15 bp, Homo sapiens
cttacagtaaagact

SEQ ID NO: 1241735 - DNA, 15 bp, Homo sapiens
acttacagtaaagac

SEQ ID NO: 1241736 - DNA, 15 bp, Homo sapiens
cacttacagtaaaga

SEQ ID NO: 1241737 - DNA, 15 bp, Homo sapiens
ccacttacagtaaag

SEQ ID NO: 1241738 - DNA, 15 bp, Homo sapiens
gccacttacagtaaa

SEQ ID NO: 1241739 - DNA, 15 bp, Homo sapiens
agccacttacagtaa

SEQ ID NO: 1241740 - DNA, 15 bp, Homo sapiens
aagccacttacagta

SEQ ID NO: 1241741 - DNA, 15 bp, Homo sapiens
taagccacttacagt

SEQ ID NO: 1241742 - DNA, 15 bp, Homo sapiens
ctaagccacttacag

SEQ ID NO: 1241743 - DNA, 15 bp, Homo sapiens
actaagccacttaca

SEQ ID NO: 1241744 - DNA, 15 bp, Homo sapiens
tactaagccacttac

SEQ ID NO: 1241745 - DNA, 15 bp, Homo sapiens
ttactaagccactta

SEQ ID NO: 1241746 - DNA, 15 bp, Homo sapiens
attactaagccactt

SEQ ID NO: 1241747 - DNA, 15 bp, Homo sapiens
cattactaagccact

SEQ ID NO: 1241748 - DNA, 15 bp, Homo sapiens
ccattactaagccac

SEQ ID NO: 1241749 - DNA, 15 bp, Homo sapiens
cccattactaagcca

SEQ ID NO: 1241750 - DNA, 15 bp, Homo sapiens
gcccattactaagcc

SEQ ID NO: 1241751 - DNA, 15 bp, Homo sapiens
agcccattactaagc

SEQ ID NO: 1241752 - DNA, 15 bp, Homo sapiens
tagcccattactaag

SEQ ID NO: 1241753 - DNA, 15 bp, Homo sapiens
gtagcccattactaa

SEQ ID NO: 1241754 - DNA, 15 bp, Homo sapiens
tgtagcccattacta

SEQ ID NO: 1241755 - DNA, 15 bp, Homo sapiens
ttgtagcccattact

SEQ ID NO: 1241756 - DNA, 15 bp, Homo sapiens
tttgtagcccattac

SEQ ID NO: 1241757 - DNA, 15 bp, Homo sapiens
ttttgtagcccatta

SEQ ID NO: 1241758 - DNA, 15 bp, Homo sapiens
attttgtagcccatt

SEQ ID NO: 1241759 - DNA, 15 bp, Homo sapiens
cattttgtagcccat

SEQ ID NO: 1241760 - DNA, 15 bp, Homo sapiens
tcattttgtagccca

SEQ ID NO: 1241761 - DNA, 15 bp, Homo sapiens
ctcattttgtagccc

SEQ ID NO: 1241762 - DNA, 15 bp, Homo sapiens
tctcattttgtagcc

SEQ ID NO: 1241763 - DNA, 15 bp, Homo sapiens
ttctcattttgtagc

SEQ ID NO: 1241764 - DNA, 15 bp, Homo sapiens
cttctcattttgtag

SEQ ID NO: 1241765 - DNA, 15 bp, Homo sapiens
gcttctcattttgta

SEQ ID NO: 1241766 - DNA, 15 bp, Homo sapiens
tgcttctcattttgt

SEQ ID NO: 1241767 - DNA, 15 bp, Homo sapiens
ctgcttctcattttg

SEQ ID NO: 1241768 - DNA, 15 bp, Homo sapiens
cctgcttctcatttt

SEQ ID NO: 1241769 - DNA, 15 bp, Homo sapiens
gcctgcttctcattt

SEQ ID NO: 1241770 - DNA, 15 bp, Homo sapiens
agcctgcttctcatt

SEQ ID NO: 1241771 - DNA, 15 bp, Homo sapiens
gagcctgcttctcat

SEQ ID NO: 1241772 - DNA, 15 bp, Homo sapiens
ggagcctgcttctca

SEQ ID NO: 1241773 - DNA, 15 bp, Homo sapiens
aggagcctgcttctc

SEQ ID NO: 1241774 - DNA, 15 bp, Homo sapiens
caggagcctgcttct

SEQ ID NO: 1241775 - DNA, 15 bp, Homo sapiens
ccaggagcctgcttc

SEQ ID NO: 1241776 - DNA, 15 bp, Homo sapiens
cccaggagcctgctt

SEQ ID NO: 1241777 - DNA, 15 bp, Homo sapiens
ccccaggagcctgct

SEQ ID NO: 1241778 - DNA, 15 bp, Homo sapiens
cccccaggagcctgc

SEQ ID NO: 1241779 - DNA, 15 bp, Homo sapiens
tcccccaggagcctg

SEQ ID NO: 1241780 - DNA, 15 bp, Homo sapiens
ttcccccaggagcct

SEQ ID NO: 1241781 - DNA, 15 bp, Homo sapiens
cttcccccaggagcc

SEQ ID NO: 1241782 - DNA, 15 bp, Homo sapiens
acttcccccaggagc

SEQ ID NO: 1241783 - DNA, 15 bp, Homo sapiens
tacttcccccaggag

SEQ ID NO: 1241784 - DNA, 15 bp, Homo sapiens
gtacttcccccagga

SEQ ID NO: 1241785 - DNA, 15 bp, Homo sapiens
tgtacttcccccagg

SEQ ID NO: 1241786 - DNA, 15 bp, Homo sapiens
gtgtacttcccccag

SEQ ID NO: 1241787 - DNA, 15 bp, Homo sapiens
agtgtacttccccca

SEQ ID NO: 1241788 - DNA, 15 bp, Homo sapiens
cagtgtacttccccc

SEQ ID NO: 1241789 - DNA, 15 bp, Homo sapiens
acagtgtacttcccc

SEQ ID NO: 1241790 - DNA, 15 bp, Homo sapiens
aacagtgtacttccc

SEQ ID NO: 1241791 - DNA, 15 bp, Homo sapiens
gaacagtgtacttcc

SEQ ID NO: 1241792 - DNA, 15 bp, Homo sapiens
tgaacagtgtacttc

SEQ ID NO: 1241793 - DNA, 15 bp, Homo sapiens
gtgaacagtgtactt

SEQ ID NO: 1241794 - DNA, 15 bp, Homo sapiens
ggtgaacagtgtact

SEQ ID NO: 1241795 - DNA, 15 bp, Homo sapiens
aggtgaacagtgtac

SEQ ID NO: 1241796 - DNA, 15 bp, Homo sapiens
aaggtgaacagtgta

SEQ ID NO: 1241797 - DNA, 15 bp, Homo sapiens
taaggtgaacagtgt

SEQ ID NO: 1241798 - DNA, 15 bp, Homo sapiens
gtaaggtgaacagtg

SEQ ID NO: 1241799 - DNA, 15 bp, Homo sapiens
ggtaaggtgaacagt

SEQ ID NO: 1241800 - DNA, 15 bp, Homo sapiens
tggtaaggtgaacag

SEQ ID NO: 1241801 - DNA, 15 bp, Homo sapiens
gtggtaaggtgaaca

SEQ ID NO: 1241802 - DNA, 15 bp, Homo sapiens
tgtggtaaggtgaac

SEQ ID NO: 1241803 - DNA, 15 bp, Homo sapiens
atgtggtaaggtgaa

SEQ ID NO: 1241804 - DNA, 15 bp, Homo sapiens
tatgtggtaaggtga

SEQ ID NO: 1241805 - DNA, 15 bp, Homo sapiens
atatgtggtaaggtg

SEQ ID NO: 1241806 - DNA, 15 bp, Homo sapiens
aatatgtggtaaggt

SEQ ID NO: 1241807 - DNA, 15 bp, Homo sapiens
gaatatgtggtaagg

SEQ ID NO: 1241808 - DNA, 15 bp, Homo sapiens
agaatatgtggtaag

SEQ ID NO: 1241809 - DNA, 15 bp, Homo sapiens
gagaatatgtggtaa

SEQ ID NO: 1241810 - DNA, 15 bp, Homo sapiens
agagaatatgtggta

SEQ ID NO: 1241811 - DNA, 15 bp, Homo sapiens
tagagaatatgtggt

SEQ ID NO: 1241812 - DNA, 15 bp, Homo sapiens
ctagagaatatgtgg

SEQ ID NO: 1241813 - DNA, 15 bp, Homo sapiens
cctagagaatatgtg

SEQ ID NO: 1241814 - DNA, 15 bp, Homo sapiens
ccctagagaatatgt

SEQ ID NO: 1241815 - DNA, 15 bp, Homo sapiens
tccctagagaatatg

SEQ ID NO: 1241816 - DNA, 15 bp, Homo sapiens
ttccctagagaatat

SEQ ID NO: 1241817 - DNA, 15 bp, Homo sapiens
cttccctagagaata

SEQ ID NO: 1241818 - DNA, 15 bp, Homo sapiens
ccttccctagagaat

SEQ ID NO: 1241819 - DNA, 15 bp, Homo sapiens
cccttccctagagaa

SEQ ID NO: 1241820 - DNA, 15 bp, Homo sapiens
tcccttccctagaga

SEQ ID NO: 1241821 - DNA, 15 bp, Homo sapiens
ttcccttccctagag

SEQ ID NO: 1241822 - DNA, 15 bp, Homo sapiens
gttcccttccctaga

SEQ ID NO: 1241823 - DNA, 15 bp, Homo sapiens
tgttcccttccctag

SEQ ID NO: 1241824 - DNA, 15 bp, Homo sapiens
ttgttcccttcccta

SEQ ID NO: 1241825 - DNA, 15 bp, Homo sapiens
cttgttcccttccct

SEQ ID NO: 1241826 - DNA, 15 bp, Homo sapiens
gcttgttcccttccc

SEQ ID NO: 1241827 - DNA, 15 bp, Homo sapiens
tgcttgttcccttcc

SEQ ID NO: 1241828 - DNA, 15 bp, Homo sapiens
ttgcttgttcccttc

SEQ ID NO: 1241829 - DNA, 15 bp, Homo sapiens
tttgcttgttccctt

SEQ ID NO: 1241830 - DNA, 15 bp, Homo sapiens
gtttgcttgttccct

SEQ ID NO: 1241831 - DNA, 15 bp, Homo sapiens
tgtttgcttgttccc

SEQ ID NO: 1241832 - DNA, 15 bp, Homo sapiens
ttgtttgcttgttcc

SEQ ID NO: 1241833 - DNA, 15 bp, Homo sapiens
cttgtttgcttgttc

SEQ ID NO: 1241834 - DNA, 15 bp, Homo sapiens
gcttgtttgcttgtt

SEQ ID NO: 1241835 - DNA, 15 bp, Homo sapiens
tgcttgtttgcttgt

SEQ ID NO: 1241836 - DNA, 15 bp, Homo sapiens
ctgcttgtttgcttg

SEQ ID NO: 1241837 - DNA, 15 bp, Homo sapiens
tctgcttgtttgctt

SEQ ID NO: 1241838 - DNA, 15 bp, Homo sapiens
atctgcttgtttgct

SEQ ID NO: 1241839 - DNA, 15 bp, Homo sapiens
catctgcttgtttgc

SEQ ID NO: 1241840 - DNA, 15 bp, Homo sapiens
acatctgcttgtttg

SEQ ID NO: 1241841 - DNA, 15 bp, Homo sapiens
tacatctgcttgttt

SEQ ID NO: 1241842 - DNA, 15 bp, Homo sapiens
gtacatctgcttgtt

SEQ ID NO: 1241843 - DNA, 15 bp, Homo sapiens
tgtacatctgcttgt

SEQ ID NO: 1241844 - DNA, 15 bp, Homo sapiens
ctgtacatctgcttg

SEQ ID NO: 1241845 - DNA, 15 bp, Homo sapiens
tctgtacatctgctt

SEQ ID NO: 1241846 - DNA, 15 bp, Homo sapiens
ctctgtacatctgct

SEQ ID NO: 1241847 - DNA, 15 bp, Homo sapiens
gctctgtacatctgc

SEQ ID NO: 1241848 - DNA, 15 bp, Homo sapiens
agctctgtacatctg

SEQ ID NO: 1241849 - DNA, 15 bp, Homo sapiens
gagctctgtacatct

SEQ ID NO: 1241850 - DNA, 15 bp, Homo sapiens
agagctctgtacatc

SEQ ID NO: 1241851 - DNA, 15 bp, Homo sapiens
cagagctctgtacat

SEQ ID NO: 1241852 - DNA, 15 bp, Homo sapiens
tcagagctctgtaca

SEQ ID NO: 1241853 - DNA, 15 bp, Homo sapiens
ctcagagctctgtac

SEQ ID NO: 1241854 - DNA, 15 bp, Homo sapiens
gctcagagctctgta

SEQ ID NO: 1241855 - DNA, 15 bp, Homo sapiens
agctcagagctctgt

SEQ ID NO: 1241856 - DNA, 15 bp, Homo sapiens
gagctcagagctctg

SEQ ID NO: 1241857 - DNA, 15 bp, Homo sapiens
ggagctcagagctct

SEQ ID NO: 1241858 - DNA, 15 bp, Homo sapiens
tggagctcagagctc

SEQ ID NO: 1241859 - DNA, 15 bp, Homo sapiens
ttggagctcagagct

SEQ ID NO: 1241860 - DNA, 15 bp, Homo sapiens
cttggagctcagagc

SEQ ID NO: 1241861 - DNA, 15 bp, Homo sapiens
ccttggagctcagag

SEQ ID NO: 1241862 - DNA, 15 bp, Homo sapiens
accttggagctcaga

SEQ ID NO: 1241863 - DNA, 15 bp, Homo sapiens
gaccttggagctcag

SEQ ID NO: 1241864 - DNA, 15 bp, Homo sapiens
tgaccttggagctca

SEQ ID NO: 1241865 - DNA, 15 bp, Homo sapiens
atgaccttggagctc

SEQ ID NO: 1241866 - DNA, 15 bp, Homo sapiens
gatgaccttggagct

SEQ ID NO: 1241867 - DNA, 15 bp, Homo sapiens
agatgaccttggagc

SEQ ID NO: 1241868 - DNA, 15 bp, Homo sapiens
gagatgaccttggag

SEQ ID NO: 1241869 - DNA, 15 bp, Homo sapiens
agagatgaccttgga

SEQ ID NO: 1241870 - DNA, 15 bp, Homo sapiens
cagagatgaccttgg

SEQ ID NO: 1241871 - DNA, 15 bp, Homo sapiens
tcagagatgaccttg

SEQ ID NO: 1241872 - DNA, 15 bp, Homo sapiens
gtcagagatgacctt

SEQ ID NO: 1241873 - DNA, 15 bp, Homo sapiens
cgtcagagatgacct

SEQ ID NO: 1241874 - DNA, 15 bp, Homo sapiens
acgtcagagatgacc

SEQ ID NO: 1241875 - DNA, 15 bp, Homo sapiens
tacgtcagagatgac

SEQ ID NO: 1241876 - DNA, 15 bp, Homo sapiens
atacgtcagagatga

SEQ ID NO: 1241877 - DNA, 15 bp, Homo sapiens
catacgtcagagatg

SEQ ID NO: 1241878 - DNA, 15 bp, Homo sapiens
acatacgtcagagat

SEQ ID NO: 1241879 - DNA, 15 bp, Homo sapiens
cacatacgtcagaga

SEQ ID NO: 1241880 - DNA, 15 bp, Homo sapiens
ccacatacgtcagag

SEQ ID NO: 1241881 - DNA, 15 bp, Homo sapiens
cccacatacgtcaga

SEQ ID NO: 1241882 - DNA, 15 bp, Homo sapiens
acccacatacgtcag

SEQ ID NO: 1241883 - DNA, 15 bp, Homo sapiens
tacccacatacgtca

SEQ ID NO: 1241884 - DNA, 15 bp, Homo sapiens
ctacccacatacgtc

SEQ ID NO: 1241885 - DNA, 15 bp, Homo sapiens
cctacccacatacgt

SEQ ID NO: 1241886 - DNA, 15 bp, Homo sapiens
acctacccacatacg

SEQ ID NO: 1241887 - DNA, 15 bp, Homo sapiens
aacctacccacatac

SEQ ID NO: 1241888 - DNA, 15 bp, Homo sapiens
gaacctacccacata

SEQ ID NO: 1241889 - DNA, 15 bp, Homo sapiens
tgaacctacccacat

SEQ ID NO: 1241890 - DNA, 15 bp, Homo sapiens
ttgaacctacccaca

SEQ ID NO: 1241891 - DNA, 15 bp, Homo sapiens
tttgaacctacccac

SEQ ID NO: 1241892 - DNA, 15 bp, Homo sapiens
ctttgaacctaccca

SEQ ID NO: 1241893 - DNA, 15 bp, Homo sapiens
tctttgaacctaccc

SEQ ID NO: 1241894 - DNA, 15 bp, Homo sapiens
gtctttgaacctacc

SEQ ID NO: 1241895 - DNA, 15 bp, Homo sapiens
tgtctttgaacctac

SEQ ID NO: 1241896 - DNA, 15 bp, Homo sapiens
ctgtctttgaaccta

SEQ ID NO: 1241897 - DNA, 15 bp, Homo sapiens
gctgtctttgaacct

SEQ ID NO: 1241898 - DNA, 15 bp, Homo sapiens
tgctgtctttgaacc

SEQ ID NO: 1241899 - DNA, 15 bp, Homo sapiens
atgctgtctttgaac

SEQ ID NO: 1241900 - DNA, 15 bp, Homo sapiens
gatgctgtctttgaa

SEQ ID NO: 1241901 - DNA, 15 bp, Homo sapiens
tgatgctgtctttga

SEQ ID NO: 1241902 - DNA, 15 bp, Homo sapiens
atgatgctgtctttg

SEQ ID NO: 1241903 - DNA, 15 bp, Homo sapiens
aatgatgctgtcttt

SEQ ID NO: 1241904 - DNA, 15 bp, Homo sapiens
gaatgatgctgtctt

SEQ ID NO: 1241905 - DNA, 15 bp, Homo sapiens
tgaatgatgctgtct

SEQ ID NO: 1241906 - DNA, 15 bp, Homo sapiens
ttgaatgatgctgtc

SEQ ID NO: 1241907 - DNA, 15 bp, Homo sapiens
attgaatgatgctgt

SEQ ID NO: 1241908 - DNA, 15 bp, Homo sapiens
aattgaatgatgctg

SEQ ID NO: 1241909 - DNA, 15 bp, Homo sapiens
caattgaatgatgct

SEQ ID NO: 1241910 - DNA, 15 bp, Homo sapiens
tcaattgaatgatgc

SEQ ID NO: 1241911 - DNA, 15 bp, Homo sapiens
atcaattgaatgatg

SEQ ID NO: 1241912 - DNA, 15 bp, Homo sapiens
catcaattgaatgat

SEQ ID NO: 1241913 - DNA, 15 bp, Homo sapiens
tcatcaattgaatga

SEQ ID NO: 1241914 - DNA, 15 bp, Homo sapiens
ttcatcaattgaatg

SEQ ID NO: 1241915 - DNA, 15 bp, Homo sapiens
cttcatcaattgaat

SEQ ID NO: 1241916 - DNA, 15 bp, Homo sapiens
tcttcatcaattgaa

SEQ ID NO: 1241917 - DNA, 15 bp, Homo sapiens
gtcttcatcaattga

SEQ ID NO: 1241918 - DNA, 15 bp, Homo sapiens
tgtcttcatcaattg

SEQ ID NO: 1241919 - DNA, 15 bp, Homo sapiens
gtgtcttcatcaatt

SEQ ID NO: 1241920 - DNA, 15 bp, Homo sapiens
tgtgtcttcatcaat

SEQ ID NO: 1241921 - DNA, 15 bp, Homo sapiens
ctgtgtcttcatcaa

SEQ ID NO: 1241922 - DNA, 15 bp, Homo sapiens
tctgtgtcttcatca

SEQ ID NO: 1241923 - DNA, 15 bp, Homo sapiens
ctctgtgtcttcatc

SEQ ID NO: 1241924 - DNA, 15 bp, Homo sapiens
cctctgtgtcttcat

SEQ ID NO: 1241925 - DNA, 15 bp, Homo sapiens
gcctctgtgtcttca

SEQ ID NO: 1241926 - DNA, 15 bp, Homo sapiens
agcctctgtgtcttc

SEQ ID NO: 1241927 - DNA, 15 bp, Homo sapiens
gagcctctgtgtctt

SEQ ID NO: 1241928 - DNA, 15 bp, Homo sapiens
tgagcctctgtgtct

SEQ ID NO: 1241929 - DNA, 15 bp, Homo sapiens
ctgagcctctgtgtc

SEQ ID NO: 1241930 - DNA, 15 bp, Homo sapiens
tctgagcctctgtgt

SEQ ID NO: 1241931 - DNA, 15 bp, Homo sapiens
gtctgagcctctgtg

SEQ ID NO: 1241932 - DNA, 15 bp, Homo sapiens
agtctgagcctctgt

SEQ ID NO: 1241933 - DNA, 15 bp, Homo sapiens
tagtctgagcctctg

SEQ ID NO: 1241934 - DNA, 15 bp, Homo sapiens
ttagtctgagcctct

SEQ ID NO: 1241935 - DNA, 15 bp, Homo sapiens
tttagtctgagcctc

SEQ ID NO: 1241936 - DNA, 15 bp, Homo sapiens
gtttagtctgagcct

SEQ ID NO: 1241937 - DNA, 15 bp, Homo sapiens
tgtttagtctgagcc

SEQ ID NO: 1241938 - DNA, 15 bp, Homo sapiens
ttgtttagtctgagc

SEQ ID NO: 1241939 - DNA, 15 bp, Homo sapiens
cttgtttagtctgag

SEQ ID NO: 1241940 - DNA, 15 bp, Homo sapiens
gcttgtttagtctga

SEQ ID NO: 1241941 - DNA, 15 bp, Homo sapiens
agcttgtttagtctg

SEQ ID NO: 1241942 - DNA, 15 bp, Homo sapiens
aagcttgtttagtct

SEQ ID NO: 1241943 - DNA, 15 bp, Homo sapiens
gaagcttgtttagtc

SEQ ID NO: 1241944 - DNA, 15 bp, Homo sapiens
ggaagcttgtttagt

SEQ ID NO: 1241945 - DNA, 15 bp, Homo sapiens
tggaagcttgtttag

SEQ ID NO: 1241946 - DNA, 15 bp, Homo sapiens
ctggaagcttgttta

SEQ ID NO: 1241947 - DNA, 15 bp, Homo sapiens
cctggaagcttgttt

SEQ ID NO: 1241948 - DNA, 15 bp, Homo sapiens
tcctggaagcttgtt

SEQ ID NO: 1241949 - DNA, 15 bp, Homo sapiens
ctcctggaagcttgt

SEQ ID NO: 1241950 - DNA, 15 bp, Homo sapiens
gctcctggaagcttg

SEQ ID NO: 1241951 - DNA, 15 bp, Homo sapiens
agctcctggaagctt

SEQ ID NO: 1241952 - DNA, 15 bp, Homo sapiens
tagctcctggaagct

SEQ ID NO: 1241953 - DNA, 15 bp, Homo sapiens
ctagctcctggaagc

SEQ ID NO: 1241954 - DNA, 15 bp, Homo sapiens
tctagctcctggaag

SEQ ID NO: 1241955 - DNA, 15 bp, Homo sapiens
gtctagctcctggaa

SEQ ID NO: 1241956 - DNA, 15 bp, Homo sapiens
tgtctagctcctgga

SEQ ID NO: 1241957 - DNA, 15 bp, Homo sapiens
gtgtctagctcctgg

SEQ ID NO: 1241958 - DNA, 15 bp, Homo sapiens
agtgtctagctcctg

SEQ ID NO: 1241959 - DNA, 15 bp, Homo sapiens
aagtgtctagctcct

SEQ ID NO: 1241960 - DNA, 15 bp, Homo sapiens
taagtgtctagctcc

SEQ ID NO: 1241961 - DNA, 15 bp, Homo sapiens
ctaagtgtctagctc

SEQ ID NO: 1241962 - DNA, 15 bp, Homo sapiens
tctaagtgtctagct

SEQ ID NO: 1241963 - DNA, 15 bp, Homo sapiens
ctctaagtgtctagc

SEQ ID NO: 1241964 - DNA, 15 bp, Homo sapiens
tctctaagtgtctag

SEQ ID NO: 1241965 - DNA, 15 bp, Homo sapiens
gtctctaagtgtcta

SEQ ID NO: 1241966 - DNA, 15 bp, Homo sapiens
tgtctctaagtgtct

SEQ ID NO: 1241967 - DNA, 15 bp, Homo sapiens
ttgtctctaagtgtc

SEQ ID NO: 1241968 - DNA, 15 bp, Homo sapiens
tttgtctctaagtgt

SEQ ID NO: 1241969 - DNA, 15 bp, Homo sapiens
ttttgtctctaagtg

SEQ ID NO: 1241970 - DNA, 15 bp, Homo sapiens
tttttgtctctaagt

SEQ ID NO: 1241971 - DNA, 15 bp, Homo sapiens
gtttttgtctctaag

SEQ ID NO: 1241972 - DNA, 15 bp, Homo sapiens
agtttttgtctctaa

SEQ ID NO: 1241973 - DNA, 15 bp, Homo sapiens
cagtttttgtctcta

SEQ ID NO: 1241974 - DNA, 15 bp, Homo sapiens
gcagtttttgtctct

SEQ ID NO: 1241975 - DNA, 15 bp, Homo sapiens
agcagtttttgtctc

SEQ ID NO: 1241976 - DNA, 15 bp, Homo sapiens
aagcagtttttgtct

SEQ ID NO: 1241977 - DNA, 15 bp, Homo sapiens
gaagcagtttttgtc

SEQ ID NO: 1241978 - DNA, 15 bp, Homo sapiens
tgaagcagtttttgt

SEQ ID NO: 1241979 - DNA, 15 bp, Homo sapiens
ctgaagcagtttttg

SEQ ID NO: 1241980 - DNA, 15 bp, Homo sapiens
tctgaagcagttttt

SEQ ID NO: 1241981 - DNA, 15 bp, Homo sapiens
ttctgaagcagtttt

SEQ ID NO: 1241982 - DNA, 15 bp, Homo sapiens
attctgaagcagttt

SEQ ID NO: 1241983 - DNA, 15 bp, Homo sapiens
aattctgaagcagtt

SEQ ID NO: 1241984 - DNA, 15 bp, Homo sapiens
aaattctgaagcagt

SEQ ID NO: 1241985 - DNA, 15 bp, Homo sapiens
taaattctgaagcag

SEQ ID NO: 1241986 - DNA, 15 bp, Homo sapiens
gtaaattctgaagca

SEQ ID NO: 1241987 - DNA, 15 bp, Homo sapiens
ggtaaattctgaagc

SEQ ID NO: 1241988 - DNA, 15 bp, Homo sapiens
aggtaaattctgaag

SEQ ID NO: 1241989 - DNA, 15 bp, Homo sapiens
aaggtaaattctgaa

SEQ ID NO: 1241990 - DNA, 15 bp, Homo sapiens
gaaggtaaattctga

SEQ ID NO: 1241991 - DNA, 15 bp, Homo sapiens
ggaaggtaaattctg

SEQ ID NO: 1241992 - DNA, 15 bp, Homo sapiens
tggaaggtaaattct

SEQ ID NO: 1241993 - DNA, 15 bp, Homo sapiens
atggaaggtaaattc

SEQ ID NO: 1241994 - DNA, 15 bp, Homo sapiens
aatggaaggtaaatt

SEQ ID NO: 1241995 - DNA, 15 bp, Homo sapiens
aaatggaaggtaaat

SEQ ID NO: 1241996 - DNA, 15 bp, Homo sapiens
aaaatggaaggtaaa

SEQ ID NO: 1241997 - DNA, 15 bp, Homo sapiens
aaaaatggaaggtaa

SEQ ID NO: 1241998 - DNA, 15 bp, Homo sapiens
taaaaatggaaggta

SEQ ID NO: 1241999 - DNA, 15 bp, Homo sapiens
gtaaaaatggaaggt

SEQ ID NO: 1242000 - DNA, 15 bp, Homo sapiens
tgtaaaaatggaagg

SEQ ID NO: 1242001 - DNA, 15 bp, Homo sapiens
ctgtaaaaatggaag

SEQ ID NO: 1242002 - DNA, 15 bp, Homo sapiens
actgtaaaaatggaa

SEQ ID NO: 1242003 - DNA, 15 bp, Homo sapiens
tactgtaaaaatgga

SEQ ID NO: 1242004 - DNA, 15 bp, Homo sapiens
ctactgtaaaaatgg

SEQ ID NO: 1242005 - DNA, 15 bp, Homo sapiens
tctactgtaaaaatg

SEQ ID NO: 1242006 - DNA, 15 bp, Homo sapiens
gtctactgtaaaaat

SEQ ID NO: 1242007 - DNA, 15 bp, Homo sapiens
tgtctactgtaaaaa

SEQ ID NO: 1242008 - DNA, 15 bp, Homo sapiens
ctgtctactgtaaaa

SEQ ID NO: 1242009 - DNA, 15 bp, Homo sapiens
tctgtctactgtaaa

SEQ ID NO: 1242010 - DNA, 15 bp, Homo sapiens
gtctgtctactgtaa

SEQ ID NO: 1242011 - DNA, 15 bp, Homo sapiens
ggtctgtctactgta

SEQ ID NO: 1242012 - DNA, 15 bp, Homo sapiens
aggtctgtctactgt

SEQ ID NO: 1242013 - DNA, 15 bp, Homo sapiens
aaggtctgtctactg

SEQ ID NO: 1242014 - DNA, 15 bp, Homo sapiens
aaaggtctgtctact

SEQ ID NO: 1242015 - DNA, 15 bp, Homo sapiens
aaaaggtctgtctac

SEQ ID NO: 1242016 - DNA, 15 bp, Homo sapiens
caaaaggtctgtcta

SEQ ID NO: 1242017 - DNA, 15 bp, Homo sapiens
ccaaaaggtctgtct

SEQ ID NO: 1242018 - DNA, 15 bp, Homo sapiens
tccaaaaggtctgtc

SEQ ID NO: 1242019 - DNA, 15 bp, Homo sapiens
ttccaaaaggtctgt

SEQ ID NO: 1242020 - DNA, 15 bp, Homo sapiens
cttccaaaaggtctg

SEQ ID NO: 1242021 - DNA, 15 bp, Homo sapiens
gcttccaaaaggtct

SEQ ID NO: 1242022 - DNA, 15 bp, Homo sapiens
tgcttccaaaaggtc

SEQ ID NO: 1242023 - DNA, 15 bp, Homo sapiens
ttgcttccaaaaggt

SEQ ID NO: 1242024 - DNA, 15 bp, Homo sapiens
tttgcttccaaaagg

SEQ ID NO: 1242025 - DNA, 15 bp, Homo sapiens
atttgcttccaaaag

SEQ ID NO: 1242026 - DNA, 15 bp, Homo sapiens
ccatttgcttccaaa

SEQ ID NO: 1242027 - DNA, 15 bp, Homo sapiens
cccatttgcttccaa

SEQ ID NO: 1242028 - DNA, 15 bp, Homo sapiens
tcccatttgcttcca

SEQ ID NO: 1242029 - DNA, 15 bp, Homo sapiens
ttcccatttgcttcc

SEQ ID NO: 1242030 - DNA, 15 bp, Homo sapiens
tttcccatttgcttc

SEQ ID NO: 1242031 - DNA, 15 bp, Homo sapiens
ctttcccatttgctt

SEQ ID NO: 1242032 - DNA, 15 bp, Homo sapiens
cctttcccatttgct

SEQ ID NO: 1242033 - DNA, 15 bp, Homo sapiens
gcctttcccatttgc

SEQ ID NO: 1242034 - DNA, 15 bp, Homo sapiens
tgcctttcccatttg

SEQ ID NO: 1242035 - DNA, 15 bp, Homo sapiens
gtgcctttcccattt

SEQ ID NO: 1242036 - DNA, 15 bp, Homo sapiens
tgtgcctttcccatt

SEQ ID NO: 1242037 - DNA, 15 bp, Homo sapiens
ctgtgcctttcccat

SEQ ID NO: 1242038 - DNA, 15 bp, Homo sapiens
actgtgcctttccca

SEQ ID NO: 1242039 - DNA, 15 bp, Homo sapiens
tactgtgcctttccc

SEQ ID NO: 1242040 - DNA, 15 bp, Homo sapiens
atactgtgcctttcc

SEQ ID NO: 1242041 - DNA, 15 bp, Homo sapiens
gatactgtgcctttc

SEQ ID NO: 1242042 - DNA, 15 bp, Homo sapiens
agatactgtgccttt

SEQ ID NO: 1242043 - DNA, 15 bp, Homo sapiens
tagatactgtgcctt

SEQ ID NO: 1242044 - DNA, 15 bp, Homo sapiens
atagatactgtgcct

SEQ ID NO: 1242045 - DNA, 15 bp, Homo sapiens
aatagatactgtgcc

SEQ ID NO: 1242046 - DNA, 15 bp, Homo sapiens
taatagatactgtgc

SEQ ID NO: 1242047 - DNA, 15 bp, Homo sapiens
ctaatagatactgtg

SEQ ID NO: 1242048 - DNA, 15 bp, Homo sapiens
actaatagatactgt

SEQ ID NO: 1242049 - DNA, 15 bp, Homo sapiens
gactaatagatactg

SEQ ID NO: 1242050 - DNA, 15 bp, Homo sapiens
tgactaatagatact

SEQ ID NO: 1242051 - DNA, 15 bp, Homo sapiens
atgactaatagatac

SEQ ID NO: 1242052 - DNA, 15 bp, Homo sapiens
tatgactaatagata

SEQ ID NO: 1242053 - DNA, 15 bp, Homo sapiens
gtatgactaatagat

SEQ ID NO: 1242054 - DNA, 15 bp, Homo sapiens
ggtatgactaataga

SEQ ID NO: 1242055 - DNA, 15 bp, Homo sapiens
gggtatgactaatag

SEQ ID NO: 1242056 - DNA, 15 bp, Homo sapiens
tgggtatgactaata

SEQ ID NO: 1242057 - DNA, 15 bp, Homo sapiens
gtgggtatgactaat

SEQ ID NO: 1242058 - DNA, 15 bp, Homo sapiens
agtgggtatgactaa

SEQ ID NO: 1242059 - DNA, 15 bp, Homo sapiens
aagtgggtatgacta

SEQ ID NO: 1242060 - DNA, 15 bp, Homo sapiens
aaagtgggtatgact

SEQ ID NO: 1242061 - DNA, 15 bp, Homo sapiens
aaaagtgggtatgac

SEQ ID NO: 1242062 - DNA, 15 bp, Homo sapiens
aaaaagtgggtatga

SEQ ID NO: 1242063 - DNA, 15 bp, Homo sapiens
aaaaaagtgggtatg

SEQ ID NO: 1242064 - DNA, 15 bp, Homo sapiens
caaaaaagtgggtat

SEQ ID NO: 1242065 - DNA, 15 bp, Homo sapiens
acaaaaaagtgggta

SEQ ID NO: 1242066 - DNA, 15 bp, Homo sapiens
cacaaaaaagtgggt

SEQ ID NO: 1242067 - DNA, 15 bp, Homo sapiens
gcacaaaaaagtggg

SEQ ID NO: 1242068 - DNA, 15 bp, Homo sapiens
ggcacaaaaaagtgg

SEQ ID NO: 1242069 - DNA, 15 bp, Homo sapiens
gggcacaaaaaagtg

SEQ ID NO: 1242070 - DNA, 15 bp, Homo sapiens
agggcacaaaaaagt

SEQ ID NO: 1242071 - DNA, 15 bp, Homo sapiens
tagggcacaaaaaag

SEQ ID NO: 1242072 - DNA, 15 bp, Homo sapiens
gtagggcacaaaaaa

SEQ ID NO: 1242073 - DNA, 15 bp, Homo sapiens
agtagggcacaaaaa

SEQ ID NO: 1242074 - DNA, 15 bp, Homo sapiens
gagtagggcacaaaa

SEQ ID NO: 1242075 - DNA, 15 bp, Homo sapiens
ggagtagggcacaaa

SEQ ID NO: 1242076 - DNA, 15 bp, Homo sapiens
aggagtagggcacaa

SEQ ID NO: 1242077 - DNA, 15 bp, Homo sapiens
caggagtagggcaca

SEQ ID NO: 1242078 - DNA, 15 bp, Homo sapiens
gcaggagtagggcac

SEQ ID NO: 1242079 - DNA, 15 bp, Homo sapiens
ggcaggagtagggca

SEQ ID NO: 1242080 - DNA, 15 bp, Homo sapiens
aggcaggagtagggc

SEQ ID NO: 1242081 - DNA, 15 bp, Homo sapiens
taggcaggagtaggg

SEQ ID NO: 1242082 - DNA, 15 bp, Homo sapiens
ctaggcaggagtagg

SEQ ID NO: 1242083 - DNA, 15 bp, Homo sapiens
cctaggcaggagtag

SEQ ID NO: 1242084 - DNA, 15 bp, Homo sapiens
ccctaggcaggagta

SEQ ID NO: 1242085 - DNA, 15 bp, Homo sapiens
cccctaggcaggagt

SEQ ID NO: 1242086 - DNA, 15 bp, Homo sapiens
tcccctaggcaggag

SEQ ID NO: 1242087 - DNA, 15 bp, Homo sapiens
atcccctaggcagga

SEQ ID NO: 1242088 - DNA, 15 bp, Homo sapiens
gatcccctaggcagg

SEQ ID NO: 1242089 - DNA, 15 bp, Homo sapiens
ggatcccctaggcag

SEQ ID NO: 1242090 - DNA, 15 bp, Homo sapiens
tggatcccctaggca

SEQ ID NO: 1242091 - DNA, 15 bp, Homo sapiens
gtggatcccctaggc

SEQ ID NO: 1242092 - DNA, 15 bp, Homo sapiens
agtggatcccctagg

SEQ ID NO: 1242093 - DNA, 15 bp, Homo sapiens
gagtggatcccctag

SEQ ID NO: 1242094 - DNA, 15 bp, Homo sapiens
ggagtggatccccta

SEQ ID NO: 1242095 - DNA, 15 bp, Homo sapiens
aggagtggatcccct

SEQ ID NO: 1242096 - DNA, 15 bp, Homo sapiens
gaggagtggatcccc

SEQ ID NO: 1242097 - DNA, 15 bp, Homo sapiens
ggaggagtggatccc

SEQ ID NO: 1242098 - DNA, 15 bp, Homo sapiens
gggaggagtggatcc

SEQ ID NO: 1242099 - DNA, 15 bp, Homo sapiens
ggggaggagtggatc

SEQ ID NO: 1242100 - DNA, 15 bp, Homo sapiens
gggggaggagtggat

SEQ ID NO: 1242101 - DNA, 15 bp, Homo sapiens
agggggaggagtgga

SEQ ID NO: 1242102 - DNA, 15 bp, Homo sapiens
gagggggaggagtgg

SEQ ID NO: 1242103 - DNA, 15 bp, Homo sapiens
tgagggggaggagtg

SEQ ID NO: 1242104 - DNA, 15 bp, Homo sapiens
atgagggggaggagt

SEQ ID NO: 1242105 - DNA, 15 bp, Homo sapiens
gatgagggggaggag

SEQ ID NO: 1242106 - DNA, 15 bp, Homo sapiens
tgatgagggggagga

SEQ ID NO: 1242107 - DNA, 15 bp, Homo sapiens
ctgatgagggggagg

SEQ ID NO: 1242108 - DNA, 15 bp, Homo sapiens
tctgatgagggggag

SEQ ID NO: 1242109 - DNA, 15 bp, Homo sapiens
atctgatgaggggga

SEQ ID NO: 1242110 - DNA, 15 bp, Homo sapiens
tatctgatgaggggg

SEQ ID NO: 1242111 - DNA, 15 bp, Homo sapiens
atatctgatgagggg

SEQ ID NO: 1242112 - DNA, 15 bp, Homo sapiens
aatatctgatgaggg

SEQ ID NO: 1242113 - DNA, 15 bp, Homo sapiens
gaatatctgatgagg

SEQ ID NO: 1242114 - DNA, 15 bp, Homo sapiens
tgaatatctgatgag

SEQ ID NO: 1242115 - DNA, 15 bp, Homo sapiens
ttgaatatctgatga

SEQ ID NO: 1242116 - DNA, 15 bp, Homo sapiens
attgaatatctgatg

SEQ ID NO: 1242117 - DNA, 15 bp, Homo sapiens
cattgaatatctgat

SEQ ID NO: 1242118 - DNA, 15 bp, Homo sapiens
tcattgaatatctga

SEQ ID NO: 1242119 - DNA, 15 bp, Homo sapiens
atcattgaatatctg

SEQ ID NO: 1242120 - DNA, 15 bp, Homo sapiens
gatcattgaatatct

SEQ ID NO: 1242121 - DNA, 15 bp, Homo sapiens
agatcattgaatatc

SEQ ID NO: 1242122 - DNA, 15 bp, Homo sapiens
gagatcattgaatat

SEQ ID NO: 1242123 - DNA, 15 bp, Homo sapiens
tgagatcattgaata

SEQ ID NO: 1242124 - DNA, 15 bp, Homo sapiens
atgagatcattgaat

SEQ ID NO: 1242125 - DNA, 15 bp, Homo sapiens
gatgagatcattgaa

SEQ ID NO: 1242126 - DNA, 15 bp, Homo sapiens
tgatgagatcattga

SEQ ID NO: 1242127 - DNA, 15 bp, Homo sapiens
ctgatgagatcattg

SEQ ID NO: 1242128 - DNA, 15 bp, Homo sapiens
tctgatgagatcatt

SEQ ID NO: 1242129 - DNA, 15 bp, Homo sapiens
atctgatgagatcat

SEQ ID NO: 1242130 - DNA, 15 bp, Homo sapiens
tatctgatgagatca

SEQ ID NO: 1242131 - DNA, 15 bp, Homo sapiens
gtatctgatgagatc

SEQ ID NO: 1242132 - DNA, 15 bp, Homo sapiens
ggtatctgatgagat

SEQ ID NO: 1242133 - DNA, 15 bp, Homo sapiens
gggtatctgatgaga

SEQ ID NO: 1242134 - DNA, 15 bp, Homo sapiens
tgggtatctgatgag

SEQ ID NO: 1242135 - DNA, 15 bp, Homo sapiens
ctgggtatctgatga

SEQ ID NO: 1242136 - DNA, 15 bp, Homo sapiens
actgggtatctgatg

SEQ ID NO: 1242137 - DNA, 15 bp, Homo sapiens
cactgggtatctgat

SEQ ID NO: 1242138 - DNA, 15 bp, Homo sapiens
tcactgggtatctga

SEQ ID NO: 1242139 - DNA, 15 bp, Homo sapiens
atcactgggtatctg

SEQ ID NO: 1242140 - DNA, 15 bp, Homo sapiens
gatcactgggtatct

SEQ ID NO: 1242141 - DNA, 15 bp, Homo sapiens
tgatcactgggtatc

SEQ ID NO: 1242142 - DNA, 15 bp, Homo sapiens
atgatcactgggtat

SEQ ID NO: 1242143 - DNA, 15 bp, Homo sapiens
catgatcactgggta

SEQ ID NO: 1242144 - DNA, 15 bp, Homo sapiens
tcatgatcactgggt

SEQ ID NO: 1242145 - DNA, 15 bp, Homo sapiens
gtcatgatcactggg

SEQ ID NO: 1242146 - DNA, 15 bp, Homo sapiens
ggtcatgatcactgg

SEQ ID NO: 1242147 - DNA, 15 bp, Homo sapiens
aggtcatgatcactg

SEQ ID NO: 1242148 - DNA, 15 bp, Homo sapiens
gaggtcatgatcact

SEQ ID NO: 1242149 - DNA, 15 bp, Homo sapiens
tgaggtcatgatcac

SEQ ID NO: 1242150 - DNA, 15 bp, Homo sapiens
atgaggtcatgatca

SEQ ID NO: 1242151 - DNA, 15 bp, Homo sapiens
gatgaggtcatgatc

SEQ ID NO: 1242152 - DNA, 15 bp, Homo sapiens
tgatgaggtcatgat

SEQ ID NO: 1242153 - DNA, 15 bp, Homo sapiens
ctgatgaggtcatga

SEQ ID NO: 1242154 - DNA, 15 bp, Homo sapiens
tctgatgaggtcatg

SEQ ID NO: 1242155 - DNA, 15 bp, Homo sapiens
atctgatgaggtcat

SEQ ID NO: 1242156 - DNA, 15 bp, Homo sapiens
tatctgatgaggtca

SEQ ID NO: 1242157 - DNA, 15 bp, Homo sapiens
atatctgatgaggtc

SEQ ID NO: 1242158 - DNA, 15 bp, Homo sapiens
aatatctgatgaggt

SEQ ID NO: 1242159 - DNA, 15 bp, Homo sapiens
ctgaatatctgatga

SEQ ID NO: 1242160 - DNA, 15 bp, Homo sapiens
tctgaatatctgatg

SEQ ID NO: 1242161 - DNA, 15 bp, Homo sapiens
ctctgaatatctgat

SEQ ID NO: 1242162 - DNA, 15 bp, Homo sapiens
tctctgaatatctga

SEQ ID NO: 1242163 - DNA, 15 bp, Homo sapiens
atctctgaatatctg

SEQ ID NO: 1242164 - DNA, 15 bp, Homo sapiens
gatctctgaatatct

SEQ ID NO: 1242165 - DNA, 15 bp, Homo sapiens
tgatctctgaatatc

SEQ ID NO: 1242166 - DNA, 15 bp, Homo sapiens
ttgatctctgaatat

SEQ ID NO: 1242167 - DNA, 15 bp, Homo sapiens
attgatctctgaata

SEQ ID NO: 1242168 - DNA, 15 bp, Homo sapiens
cattgatctctgaat

SEQ ID NO: 1242169 - DNA, 15 bp, Homo sapiens
tcattgatctctgaa

SEQ ID NO: 1242170 - DNA, 15 bp, Homo sapiens
gtcattgatctctga

SEQ ID NO: 1242171 - DNA, 15 bp, Homo sapiens
ggtcattgatctctg

SEQ ID NO: 1242172 - DNA, 15 bp, Homo sapiens
aggtcattgatctct

SEQ ID NO: 1242173 - DNA, 15 bp, Homo sapiens
gaggtcattgatctc

SEQ ID NO: 1242174 - DNA, 15 bp, Homo sapiens
tgaggtcattgatct

SEQ ID NO: 1242175 - DNA, 15 bp, Homo sapiens
atgaggtcattgatc

SEQ ID NO: 1242176 - DNA, 15 bp, Homo sapiens
gatgaggtcattgat

SEQ ID NO: 1242177 - DNA, 15 bp, Homo sapiens
tgatgaggtcattga

SEQ ID NO: 1242178 - DNA, 15 bp, Homo sapiens
ctgatgaggtcattg

SEQ ID NO: 1242179 - DNA, 15 bp, Homo sapiens
tctgatgaggtcatt

SEQ ID NO: 1242180 - DNA, 15 bp, Homo sapiens
tgatcattgaatatc

SEQ ID NO: 1242181 - DNA, 15 bp, Homo sapiens
gtgatcattgaatat

SEQ ID NO: 1242182 - DNA, 15 bp, Homo sapiens
tgtgatcattgaata

SEQ ID NO: 1242183 - DNA, 15 bp, Homo sapiens
ctgtgatcattgaat

SEQ ID NO: 1242184 - DNA, 15 bp, Homo sapiens
tctgtgatcattgaa

SEQ ID NO: 1242185 - DNA, 15 bp, Homo sapiens
ctctgtgatcattga

SEQ ID NO: 1242186 - DNA, 15 bp, Homo sapiens
cctctgtgatcattg

SEQ ID NO: 1242187 - DNA, 15 bp, Homo sapiens
acctctgtgatcatt

SEQ ID NO: 1242188 - DNA, 15 bp, Homo sapiens
aacctctgtgatcat

SEQ ID NO: 1242189 - DNA, 15 bp, Homo sapiens
caacctctgtgatca

SEQ ID NO: 1242190 - DNA, 15 bp, Homo sapiens
acaacctctgtgatc

SEQ ID NO: 1242191 - DNA, 15 bp, Homo sapiens
cacaacctctgtgat

SEQ ID NO: 1242192 - DNA, 15 bp, Homo sapiens
ccacaacctctgtga

SEQ ID NO: 1242193 - DNA, 15 bp, Homo sapiens
gccacaacctctgtg

SEQ ID NO: 1242194 - DNA, 15 bp, Homo sapiens
ggccacaacctctgt

SEQ ID NO: 1242195 - DNA, 15 bp, Homo sapiens
aggccacaacctctg

SEQ ID NO: 1242196 - DNA, 15 bp, Homo sapiens
taggccacaacctct

SEQ ID NO: 1242197 - DNA, 15 bp, Homo sapiens
ataggccacaacctc

SEQ ID NO: 1242198 - DNA, 15 bp, Homo sapiens
aataggccacaacct

SEQ ID NO: 1242199 - DNA, 15 bp, Homo sapiens
caataggccacaacc

SEQ ID NO: 1242200 - DNA, 15 bp, Homo sapiens
tcaataggccacaac

SEQ ID NO: 1242201 - DNA, 15 bp, Homo sapiens
atcaataggccacaa

SEQ ID NO: 1242202 - DNA, 15 bp, Homo sapiens
tatcaataggccaca

SEQ ID NO: 1242203 - DNA, 15 bp, Homo sapiens
ctatcaataggccac

SEQ ID NO: 1242204 - DNA, 15 bp, Homo sapiens
gctatcaataggcca

SEQ ID NO: 1242205 - DNA, 15 bp, Homo sapiens
tgctatcaataggcc

SEQ ID NO: 1242206 - DNA, 15 bp, Homo sapiens
atgctatcaataggc

SEQ ID NO: 1242207 - DNA, 15 bp, Homo sapiens
tatgctatcaatagg

SEQ ID NO: 1242208 - DNA, 15 bp, Homo sapiens
atatgctatcaatag

SEQ ID NO: 1242209 - DNA, 15 bp, Homo sapiens
catatgctatcaata

SEQ ID NO: 1242210 - DNA, 15 bp, Homo sapiens
tcatatgctatcaat

SEQ ID NO: 1242211 - DNA, 15 bp, Homo sapiens
ctcatatgctatcaa

SEQ ID NO: 1242212 - DNA, 15 bp, Homo sapiens
actcatatgctatca

SEQ ID NO: 1242213 - DNA, 15 bp, Homo sapiens
aactcatatgctatc

SEQ ID NO: 1242214 - DNA, 15 bp, Homo sapiens
caactcatatgctat

SEQ ID NO: 1242215 - DNA, 15 bp, Homo sapiens
acaactcatatgcta

SEQ ID NO: 1242216 - DNA, 15 bp, Homo sapiens
cacaactcatatgct

SEQ ID NO: 1242217 - DNA, 15 bp, Homo sapiens
tcacaactcatatgc

SEQ ID NO: 1242218 - DNA, 15 bp, Homo sapiens
atcacaactcatatg

SEQ ID NO: 1242219 - DNA, 15 bp, Homo sapiens
aatcacaactcatat

SEQ ID NO: 1242220 - DNA, 15 bp, Homo sapiens
taatcacaactcata

SEQ ID NO: 1242221 - DNA, 15 bp, Homo sapiens
ataatcacaactcat

SEQ ID NO: 1242222 - DNA, 15 bp, Homo sapiens
aataatcacaactca

SEQ ID NO: 1242223 - DNA, 15 bp, Homo sapiens
caataatcacaactc

SEQ ID NO: 1242224 - DNA, 15 bp, Homo sapiens
gcaataatcacaact

SEQ ID NO: 1242225 - DNA, 15 bp, Homo sapiens
agcaataatcacaac

SEQ ID NO: 1242226 - DNA, 15 bp, Homo sapiens
gagcaataatcacaa

SEQ ID NO: 1242227 - DNA, 15 bp, Homo sapiens
ggagcaataatcaca

SEQ ID NO: 1242228 - DNA, 15 bp, Homo sapiens
tggagcaataatcac

SEQ ID NO: 1242229 - DNA, 15 bp, Homo sapiens
atggagcaataatca

SEQ ID NO: 1242230 - DNA, 15 bp, Homo sapiens
tatggagcaataatc

SEQ ID NO: 1242231 - DNA, 15 bp, Homo sapiens
gtatggagcaataat

SEQ ID NO: 1242232 - DNA, 15 bp, Homo sapiens
tgtatggagcaataa

SEQ ID NO: 1242233 - DNA, 15 bp, Homo sapiens
atgtatggagcaata

SEQ ID NO: 1242234 - DNA, 15 bp, Homo sapiens
tatgtatggagcaat

SEQ ID NO: 1242235 - DNA, 15 bp, Homo sapiens
ttatgtatggagcaa

SEQ ID NO: 1242236 - DNA, 15 bp, Homo sapiens
cttatgtatggagca

SEQ ID NO: 1242237 - DNA, 15 bp, Homo sapiens
ccttatgtatggagc

SEQ ID NO: 1242238 - DNA, 15 bp, Homo sapiens
accttatgtatggag

SEQ ID NO: 1242239 - DNA, 15 bp, Homo sapiens
aaccttatgtatgga

SEQ ID NO: 1242240 - DNA, 15 bp, Homo sapiens
caaccttatgtatgg

SEQ ID NO: 1242241 - DNA, 15 bp, Homo sapiens
acaaccttatgtatg

SEQ ID NO: 1242242 - DNA, 15 bp, Homo sapiens
aacaaccttatgtat

SEQ ID NO: 1242243 - DNA, 15 bp, Homo sapiens
aaacaaccttatgta

SEQ ID NO: 1242244 - DNA, 15 bp, Homo sapiens
aaaacaaccttatgt

SEQ ID NO: 1242245 - DNA, 15 bp, Homo sapiens
aaaaacaaccttatg

SEQ ID NO: 1242246 - DNA, 15 bp, Homo sapiens
aaaaaacaaccttat

SEQ ID NO: 1242247 - DNA, 15 bp, Homo sapiens
aaaaaaacaacctta

SEQ ID NO: 1242248 - DNA, 15 bp, Homo sapiens
aaaaaaaacaacctt

SEQ ID NO: 1242249 - DNA, 15 bp, Homo sapiens
aaaaaaaaacaacct

SEQ ID NO: 1242250 - DNA, 15 bp, Homo sapiens
caaaaaaaaacaacc

SEQ ID NO: 1242251 - DNA, 15 bp, Homo sapiens
acaaaaaaaaacaac

SEQ ID NO: 1242252 - DNA, 15 bp, Homo sapiens
aacaaaaaaaaacaa

SEQ ID NO: 1242253 - DNA, 15 bp, Homo sapiens
aaacaaaaaaaaaca

SEQ ID NO: 1242254 - DNA, 15 bp, Homo sapiens
caaacaaaaaaaaac

SEQ ID NO: 1242255 - DNA, 15 bp, Homo sapiens
cacaaaaaacaaaca

SEQ ID NO: 1242256 - DNA, 15 bp, Homo sapiens
acacaaaaaacaaac

SEQ ID NO: 1242257 - DNA, 15 bp, Homo sapiens
cacacaaaaaacaaa

SEQ ID NO: 1242258 - DNA, 15 bp, Homo sapiens
acacacacaaaaaac

SEQ ID NO: 1242259 - DNA, 15 bp, Homo sapiens
caaaaaaaaaaaaca

SEQ ID NO: 1242260 - DNA, 15 bp, Homo sapiens
tcaaaaaaaaaaaac

SEQ ID NO: 1242261 - DNA, 15 bp, Homo sapiens
ttctgtctcaaaaaa

SEQ ID NO: 1242262 - DNA, 15 bp, Homo sapiens
attctgtctcaaaaa

SEQ ID NO: 1242263 - DNA, 15 bp, Homo sapiens
gattctgtctcaaaa

SEQ ID NO: 1242264 - DNA, 15 bp, Homo sapiens
tgagattctgtctca

SEQ ID NO: 1242265 - DNA, 15 bp, Homo sapiens
gtgagattctgtctc

SEQ ID NO: 1242266 - DNA, 15 bp, Homo sapiens
agtgagattctgtct

SEQ ID NO: 1242267 - DNA, 15 bp, Homo sapiens
gagtgagattctgtc

SEQ ID NO: 1242268 - DNA, 15 bp, Homo sapiens
agagtgagattctgt

SEQ ID NO: 1242269 - DNA, 15 bp, Homo sapiens
tagagtgagattctg

SEQ ID NO: 1242270 - DNA, 15 bp, Homo sapiens
atagagtgagattct

SEQ ID NO: 1242271 - DNA, 15 bp, Homo sapiens
gatagagtgagattc

SEQ ID NO: 1242272 - DNA, 15 bp, Homo sapiens
ggatagagtgagatt

SEQ ID NO: 1242273 - DNA, 15 bp, Homo sapiens
gggatagagtgagat

SEQ ID NO: 1242274 - DNA, 15 bp, Homo sapiens
ggggatagagtgaga

SEQ ID NO: 1242275 - DNA, 15 bp, Homo sapiens
gggggatagagtgag

SEQ ID NO: 1242276 - DNA, 15 bp, Homo sapiens
tgggggatagagtga

SEQ ID NO: 1242277 - DNA, 15 bp, Homo sapiens
ctgggggatagagtg

SEQ ID NO: 1242278 - DNA, 15 bp, Homo sapiens
cctgggggatagagt

SEQ ID NO: 1242279 - DNA, 15 bp, Homo sapiens
tagcctgggggatag

SEQ ID NO: 1242280 - DNA, 15 bp, Homo sapiens
gtagcctgggggata

SEQ ID NO: 1242281 - DNA, 15 bp, Homo sapiens
tgtagcctgggggat

SEQ ID NO: 1242282 - DNA, 15 bp, Homo sapiens
ctgtagcctggggga

SEQ ID NO: 1242283 - DNA, 15 bp, Homo sapiens
actgtagcctggggg

SEQ ID NO: 1242284 - DNA, 15 bp, Homo sapiens
cactgtagcctgggg

SEQ ID NO: 1242285 - DNA, 15 bp, Homo sapiens
atgcactgtagcctg

SEQ ID NO: 1242286 - DNA, 15 bp, Homo sapiens
aatgcactgtagcct

SEQ ID NO: 1242287 - DNA, 15 bp, Homo sapiens
caatgcactgtagcc

SEQ ID NO: 1242288 - DNA, 15 bp, Homo sapiens
ccaatgcactgtagc

SEQ ID NO: 1242289 - DNA, 15 bp, Homo sapiens
accaatgcactgtag

SEQ ID NO: 1242290 - DNA, 15 bp, Homo sapiens
taccaatgcactgta

SEQ ID NO: 1242291 - DNA, 15 bp, Homo sapiens
gtaccaatgcactgt

SEQ ID NO: 1242292 - DNA, 15 bp, Homo sapiens
cgtaccaatgcactg

SEQ ID NO: 1242293 - DNA, 15 bp, Homo sapiens
tcgtaccaatgcact

SEQ ID NO: 1242294 - DNA, 15 bp, Homo sapiens
atcgtaccaatgcac

SEQ ID NO: 1242295 - DNA, 15 bp, Homo sapiens
gatcgtaccaatgca

SEQ ID NO: 1242296 - DNA, 15 bp, Homo sapiens
agatcgtaccaatgc

SEQ ID NO: 1242297 - DNA, 15 bp, Homo sapiens
gagatcgtaccaatg

SEQ ID NO: 1242298 - DNA, 15 bp, Homo sapiens
tgagatcgtaccaat

SEQ ID NO: 1242299 - DNA, 15 bp, Homo sapiens
ctgagatcgtaccaa

SEQ ID NO: 1242300 - DNA, 15 bp, Homo sapiens
gctgagatcgtacca

SEQ ID NO: 1242301 - DNA, 15 bp, Homo sapiens
ggctgagatcgtacc

SEQ ID NO: 1242302 - DNA, 15 bp, Homo sapiens
gggctgagatcgtac

SEQ ID NO: 1242303 - DNA, 15 bp, Homo sapiens
tgggctgagatcgta

SEQ ID NO: 1242304 - DNA, 15 bp, Homo sapiens
gtgggctgagatcgt

SEQ ID NO: 1242305 - DNA, 15 bp, Homo sapiens
ggtgggctgagatcg

SEQ ID NO: 1242306 - DNA, 15 bp, Homo sapiens
aggtgggctgagatc

SEQ ID NO: 1242307 - DNA, 15 bp, Homo sapiens
gaggtgggctgagat

SEQ ID NO: 1242308 - DNA, 15 bp, Homo sapiens
ttgaggtgggctgag

SEQ ID NO: 1242309 - DNA, 15 bp, Homo sapiens
gttgaggtgggctga

SEQ ID NO: 1242310 - DNA, 15 bp, Homo sapiens
ggttgaggtgggctg

SEQ ID NO: 1242311 - DNA, 15 bp, Homo sapiens
aggttgaggtgggct

SEQ ID NO: 1242312 - DNA, 15 bp, Homo sapiens
gaggttgaggtgggc

SEQ ID NO: 1242313 - DNA, 15 bp, Homo sapiens
tggaggttgaggtgg

SEQ ID NO: 1242314 - DNA, 15 bp, Homo sapiens
gtggaggttgaggtg

SEQ ID NO: 1242315 - DNA, 15 bp, Homo sapiens
ggtggaggttgaggt

SEQ ID NO: 1242316 - DNA, 15 bp, Homo sapiens
aggtggaggttgagg

SEQ ID NO: 1242317 - DNA, 15 bp, Homo sapiens
gaggtggaggttgag

SEQ ID NO: 1242318 - DNA, 15 bp, Homo sapiens
ggaggtggaggttga

SEQ ID NO: 1242319 - DNA, 15 bp, Homo sapiens
tcttgaaccagggag

SEQ ID NO: 1242320 - DNA, 15 bp, Homo sapiens
ctcttgaaccaggga

SEQ ID NO: 1242321 - DNA, 15 bp, Homo sapiens
tctcttgaaccaggg

SEQ ID NO: 1242322 - DNA, 15 bp, Homo sapiens
gtctcttgaaccagg

SEQ ID NO: 1242323 - DNA, 15 bp, Homo sapiens
agtctcttgaaccag

SEQ ID NO: 1242324 - DNA, 15 bp, Homo sapiens
gagtctcttgaacca

SEQ ID NO: 1242325 - DNA, 15 bp, Homo sapiens
agagtctcttgaacc

SEQ ID NO: 1242326 - DNA, 15 bp, Homo sapiens
gagagtctcttgaac

SEQ ID NO: 1242327 - DNA, 15 bp, Homo sapiens
agagagtctcttgaa

SEQ ID NO: 1242328 - DNA, 15 bp, Homo sapiens
aagagagtctcttga

SEQ ID NO: 1242329 - DNA, 15 bp, Homo sapiens
caagagagtctcttg

SEQ ID NO: 1242330 - DNA, 15 bp, Homo sapiens
gcaagagagtctctt

SEQ ID NO: 1242331 - DNA, 15 bp, Homo sapiens
ggcaagagagtctct

SEQ ID NO: 1242332 - DNA, 15 bp, Homo sapiens
aggcaagagagtctc

SEQ ID NO: 1242333 - DNA, 15 bp, Homo sapiens
gaggcaagagagtct

SEQ ID NO: 1242334 - DNA, 15 bp, Homo sapiens
tgaggcaagagagtc

SEQ ID NO: 1242335 - DNA, 15 bp, Homo sapiens
ctgaggcaagagagt

SEQ ID NO: 1242336 - DNA, 15 bp, Homo sapiens
gctgaggcaagagag

SEQ ID NO: 1242337 - DNA, 15 bp, Homo sapiens
agctgaggcaagaga

SEQ ID NO: 1242338 - DNA, 15 bp, Homo sapiens
aagctgaggcaagag

SEQ ID NO: 1242339 - DNA, 15 bp, Homo sapiens
gaagctgaggcaaga

SEQ ID NO: 1242340 - DNA, 15 bp, Homo sapiens
ggaagctgaggcaag

SEQ ID NO: 1242341 - DNA, 15 bp, Homo sapiens
aggaagctgaggcaa

SEQ ID NO: 1242342 - DNA, 15 bp, Homo sapiens
caggaagctgaggca

SEQ ID NO: 1242343 - DNA, 15 bp, Homo sapiens
tcaggaagctgaggc

SEQ ID NO: 1242344 - DNA, 15 bp, Homo sapiens
ctcaggaagctgagg

SEQ ID NO: 1242345 - DNA, 15 bp, Homo sapiens
actcaggaagctgag

SEQ ID NO: 1242346 - DNA, 15 bp, Homo sapiens
tactcaggaagctga

SEQ ID NO: 1242347 - DNA, 15 bp, Homo sapiens
ctactcaggaagctg

SEQ ID NO: 1242348 - DNA, 15 bp, Homo sapiens
gctactcaggaagct

SEQ ID NO: 1242349 - DNA, 15 bp, Homo sapiens
agctactcaggaagc

SEQ ID NO: 1242350 - DNA, 15 bp, Homo sapiens
agtggcaggtgcctg

SEQ ID NO: 1242351 - DNA, 15 bp, Homo sapiens
tagtggcaggtgcct

SEQ ID NO: 1242352 - DNA, 15 bp, Homo sapiens
atagtggcaggtgcc

SEQ ID NO: 1242353 - DNA, 15 bp, Homo sapiens
catagtggcaggtgc

SEQ ID NO: 1242354 - DNA, 15 bp, Homo sapiens
gcatagtggcaggtg

SEQ ID NO: 1242355 - DNA, 15 bp, Homo sapiens
ggcatagtggcaggt

SEQ ID NO: 1242356 - DNA, 15 bp, Homo sapiens
aggcatagtggcagg

SEQ ID NO: 1242357 - DNA, 15 bp, Homo sapiens
caggcatagtggcag

SEQ ID NO: 1242358 - DNA, 15 bp, Homo sapiens
caactaaaaatacaa

SEQ ID NO: 1242359 - DNA, 15 bp, Homo sapiens
tcaactaaaaataca

SEQ ID NO: 1242360 - DNA, 15 bp, Homo sapiens
ctcaactaaaaatac

SEQ ID NO: 1242361 - DNA, 15 bp, Homo sapiens
tctcaactaaaaata

SEQ ID NO: 1242362 - DNA, 15 bp, Homo sapiens
gtctcaactaaaaat

SEQ ID NO: 1242363 - DNA, 15 bp, Homo sapiens
cgtctcaactaaaaa

SEQ ID NO: 1242364 - DNA, 15 bp, Homo sapiens
ccgtctcaactaaaa

SEQ ID NO: 1242365 - DNA, 15 bp, Homo sapiens
cccgtctcaactaaa

SEQ ID NO: 1242366 - DNA, 15 bp, Homo sapiens
ccccgtctcaactaa

SEQ ID NO: 1242367 - DNA, 15 bp, Homo sapiens
accccgtctcaacta

SEQ ID NO: 1242368 - DNA, 15 bp, Homo sapiens
aaccccgtctcaact

SEQ ID NO: 1242369 - DNA, 15 bp, Homo sapiens
aaaccccgtctcaac

SEQ ID NO: 1242370 - DNA, 15 bp, Homo sapiens
gaaaccccgtctcaa

SEQ ID NO: 1242371 - DNA, 15 bp, Homo sapiens
tgaaaccccgtctca

SEQ ID NO: 1242372 - DNA, 15 bp, Homo sapiens
tagtgaaaccccgtc

SEQ ID NO: 1242373 - DNA, 15 bp, Homo sapiens
acagcctggccaaca

SEQ ID NO: 1242374 - DNA, 15 bp, Homo sapiens
aacagcctggccaac

SEQ ID NO: 1242375 - DNA, 15 bp, Homo sapiens
gaacagcctggccaa

SEQ ID NO: 1242376 - DNA, 15 bp, Homo sapiens
caggagttcgagaac

SEQ ID NO: 1242377 - DNA, 15 bp, Homo sapiens
tcaggagttcgagaa

SEQ ID NO: 1242378 - DNA, 15 bp, Homo sapiens
agatggagcacatca

SEQ ID NO: 1242379 - DNA, 15 bp, Homo sapiens
aagatggagcacatc

SEQ ID NO: 1242380 - DNA, 15 bp, Homo sapiens
aaagatggagcacat

SEQ ID NO: 1242381 - DNA, 15 bp, Homo sapiens
gaaagatggagcaca

SEQ ID NO: 1242382 - DNA, 15 bp, Homo sapiens
tgaaagatggagcac

SEQ ID NO: 1242383 - DNA, 15 bp, Homo sapiens
ctgaaagatggagca

SEQ ID NO: 1242384 - DNA, 15 bp, Homo sapiens
tctgaaagatggagc

SEQ ID NO: 1242385 - DNA, 15 bp, Homo sapiens
ctctgaaagatggag

SEQ ID NO: 1242386 - DNA, 15 bp, Homo sapiens
tctctgaaagatgga

SEQ ID NO: 1242387 - DNA, 15 bp, Homo sapiens
ttctctgaaagatgg

SEQ ID NO: 1242388 - DNA, 15 bp, Homo sapiens
tttctctgaaagatg

SEQ ID NO: 1242389 - DNA, 15 bp, Homo sapiens
atttctctgaaagat

SEQ ID NO: 1242390 - DNA, 15 bp, Homo sapiens
catttctctgaaaga

SEQ ID NO: 1242391 - DNA, 15 bp, Homo sapiens
ccatttctctgaaag

SEQ ID NO: 1242392 - DNA, 15 bp, Homo sapiens
cccatttctctgaaa

SEQ ID NO: 1242393 - DNA, 15 bp, Homo sapiens
acccatttctctgaa

SEQ ID NO: 1242394 - DNA, 15 bp, Homo sapiens
tacccatttctctga

SEQ ID NO: 1242395 - DNA, 15 bp, Homo sapiens
atacccatttctctg

SEQ ID NO: 1242396 - DNA, 15 bp, Homo sapiens
gatacccatttctct

SEQ ID NO: 1242397 - DNA, 15 bp, Homo sapiens
agatacccatttctc

SEQ ID NO: 1242398 - DNA, 15 bp, Homo sapiens
tagatacccatttct

SEQ ID NO: 1242399 - DNA, 15 bp, Homo sapiens
atagatacccatttc

SEQ ID NO: 1242400 - DNA, 15 bp, Homo sapiens
tatagatacccattt

SEQ ID NO: 1242401 - DNA, 15 bp, Homo sapiens
gtatagatacccatt

SEQ ID NO: 1242402 - DNA, 15 bp, Homo sapiens
ggtatagatacccat

SEQ ID NO: 1242403 - DNA, 15 bp, Homo sapiens
tggtatagataccca

SEQ ID NO: 1242404 - DNA, 15 bp, Homo sapiens
ttggtatagataccc

SEQ ID NO: 1242405 - DNA, 15 bp, Homo sapiens
cttggtatagatacc

SEQ ID NO: 1242406 - DNA, 15 bp, Homo sapiens
acttggtatagatac

SEQ ID NO: 1242407 - DNA, 15 bp, Homo sapiens
aacttggtatagata

SEQ ID NO: 1242408 - DNA, 15 bp, Homo sapiens
caacttggtatagat

SEQ ID NO: 1242409 - DNA, 15 bp, Homo sapiens
tcaacttggtataga

SEQ ID NO: 1242410 - DNA, 15 bp, Homo sapiens
ctcaacttggtatag

SEQ ID NO: 1242411 - DNA, 15 bp, Homo sapiens
cctcaacttggtata

SEQ ID NO: 1242412 - DNA, 15 bp, Homo sapiens
tcctcaacttggtat

SEQ ID NO: 1242413 - DNA, 15 bp, Homo sapiens
ctcctcaacttggta

SEQ ID NO: 1242414 - DNA, 15 bp, Homo sapiens
cctcctcaacttggt

SEQ ID NO: 1242415 - DNA, 15 bp, Homo sapiens
gcctcctcaacttgg

SEQ ID NO: 1242416 - DNA, 15 bp, Homo sapiens
tgcctcctcaacttg

SEQ ID NO: 1242417 - DNA, 15 bp, Homo sapiens
ctgcctcctcaactt

SEQ ID NO: 1242418 - DNA, 15 bp, Homo sapiens
tctgcctcctcaact

SEQ ID NO: 1242419 - DNA, 15 bp, Homo sapiens
ctctgcctcctcaac

SEQ ID NO: 1242420 - DNA, 15 bp, Homo sapiens
actctgcctcctcaa

SEQ ID NO: 1242421 - DNA, 15 bp, Homo sapiens
tactctgcctcctca

SEQ ID NO: 1242422 - DNA, 15 bp, Homo sapiens
atactctgcctcctc

SEQ ID NO: 1242423 - DNA, 15 bp, Homo sapiens
tatactctgcctcct

SEQ ID NO: 1242424 - DNA, 15 bp, Homo sapiens
ttatactctgcctcc

SEQ ID NO: 1242425 - DNA, 15 bp, Homo sapiens
cttatactctgcctc

SEQ ID NO: 1242426 - DNA, 15 bp, Homo sapiens
ccttatactctgcct

SEQ ID NO: 1242427 - DNA, 15 bp, Homo sapiens
tccttatactctgcc

SEQ ID NO: 1242428 - DNA, 15 bp, Homo sapiens
ctccttatactctgc

SEQ ID NO: 1242429 - DNA, 15 bp, Homo sapiens
actccttatactctg

SEQ ID NO: 1242430 - DNA, 15 bp, Homo sapiens
tactccttatactct

SEQ ID NO: 1242431 - DNA, 15 bp, Homo sapiens
gtactccttatactc

SEQ ID NO: 1242432 - DNA, 15 bp, Homo sapiens
ggtactccttatact

SEQ ID NO: 1242433 - DNA, 15 bp, Homo sapiens
aggtactccttatac

SEQ ID NO: 1242434 - DNA, 15 bp, Homo sapiens
taggtactccttata

SEQ ID NO: 1242435 - DNA, 15 bp, Homo sapiens
gtaggtactccttat

SEQ ID NO: 1242436 - DNA, 15 bp, Homo sapiens
agtaggtactcctta

SEQ ID NO: 1242437 - DNA, 15 bp, Homo sapiens
cagtaggtactcctt

SEQ ID NO: 1242438 - DNA, 15 bp, Homo sapiens
tcagtaggtactcct

SEQ ID NO: 1242439 - DNA, 15 bp, Homo sapiens
ttcagtaggtactcc

SEQ ID NO: 1242440 - DNA, 15 bp, Homo sapiens
attcagtaggtactc

SEQ ID NO: 1242441 - DNA, 15 bp, Homo sapiens
tattcagtaggtact

SEQ ID NO: 1242442 - DNA, 15 bp, Homo sapiens
atattcagtaggtac

SEQ ID NO: 1242443 - DNA, 15 bp, Homo sapiens
tatattcagtaggta

SEQ ID NO: 1242444 - DNA, 15 bp, Homo sapiens
atatattcagtaggt

SEQ ID NO: 1242445 - DNA, 15 bp, Homo sapiens
tatatattcagtagg

SEQ ID NO: 1242446 - DNA, 15 bp, Homo sapiens
atatatattcagtag

SEQ ID NO: 1242447 - DNA, 15 bp, Homo sapiens
aatatatattcagta

SEQ ID NO: 1242448 - DNA, 15 bp, Homo sapiens
taatatatattcagt

SEQ ID NO: 1242449 - DNA, 15 bp, Homo sapiens
ttaatatatattcag

SEQ ID NO: 1242450 - DNA, 15 bp, Homo sapiens
cattaatatatattc

SEQ ID NO: 1242451 - DNA, 15 bp, Homo sapiens
tcattaatatatatt

SEQ ID NO: 1242452 - DNA, 15 bp, Homo sapiens
ttcattaatatatat

SEQ ID NO: 1242453 - DNA, 15 bp, Homo sapiens
cttcattaatatata

SEQ ID NO: 1242454 - DNA, 15 bp, Homo sapiens
tcttcattaatatat

SEQ ID NO: 1242455 - DNA, 15 bp, Homo sapiens
gtcttcattaatata

SEQ ID NO: 1242456 - DNA, 15 bp, Homo sapiens
tgtcttcattaatat

SEQ ID NO: 1242457 - DNA, 15 bp, Homo sapiens
ttgtcttcattaata

SEQ ID NO: 1242458 - DNA, 15 bp, Homo sapiens
tttgtcttcattaat

SEQ ID NO: 1242459 - DNA, 15 bp, Homo sapiens
ttttgtcttcattaa

SEQ ID NO: 1242460 - DNA, 15 bp, Homo sapiens
tttttgtcttcatta

SEQ ID NO: 1242461 - DNA, 15 bp, Homo sapiens
atttttgtcttcatt

SEQ ID NO: 1242462 - DNA, 15 bp, Homo sapiens
aatttttgtcttcat

SEQ ID NO: 1242463 - DNA, 15 bp, Homo sapiens
taatttttgtcttca

SEQ ID NO: 1242464 - DNA, 15 bp, Homo sapiens
ataatttttgtcttc

SEQ ID NO: 1242465 - DNA, 15 bp, Homo sapiens
aataatttttgtctt

SEQ ID NO: 1242466 - DNA, 15 bp, Homo sapiens
taataatttttgtct

SEQ ID NO: 1242467 - DNA, 15 bp, Homo sapiens
ctaataatttttgtc

SEQ ID NO: 1242468 - DNA, 15 bp, Homo sapiens
cctaataatttttgt

SEQ ID NO: 1242469 - DNA, 15 bp, Homo sapiens
acctaataatttttg

SEQ ID NO: 1242470 - DNA, 15 bp, Homo sapiens
cacctaataattttt

SEQ ID NO: 1242471 - DNA, 15 bp, Homo sapiens
gcacctaataatttt

SEQ ID NO: 1242472 - DNA, 15 bp, Homo sapiens
tgcacctaataattt

SEQ ID NO: 1242473 - DNA, 15 bp, Homo sapiens
ctgcacctaataatt

SEQ ID NO: 1242474 - DNA, 15 bp, Homo sapiens
tctgcacctaataat

SEQ ID NO: 1242475 - DNA, 15 bp, Homo sapiens
gtctgcacctaataa

SEQ ID NO: 1242476 - DNA, 15 bp, Homo sapiens
tgtctgcacctaata

SEQ ID NO: 1242477 - DNA, 15 bp, Homo sapiens
ttgtctgcacctaat

SEQ ID NO: 1242478 - DNA, 15 bp, Homo sapiens
tttgtctgcacctaa

SEQ ID NO: 1242479 - DNA, 15 bp, Homo sapiens
ttttgtctgcaccta

SEQ ID NO: 1242480 - DNA, 15 bp, Homo sapiens
tttttgtctgcacct

SEQ ID NO: 1242481 - DNA, 15 bp, Homo sapiens
atttttgtctgcacc

SEQ ID NO: 1242482 - DNA, 15 bp, Homo sapiens
aatttttgtctgcac

SEQ ID NO: 1242483 - DNA, 15 bp, Homo sapiens
caatttttgtctgca

SEQ ID NO: 1242484 - DNA, 15 bp, Homo sapiens
acaatttttgtctgc

SEQ ID NO: 1242485 - DNA, 15 bp, Homo sapiens
aacaatttttgtctg

SEQ ID NO: 1242486 - DNA, 15 bp, Homo sapiens
caacaatttttgtct

SEQ ID NO: 1242487 - DNA, 15 bp, Homo sapiens
ccaacaatttttgtc

SEQ ID NO: 1242488 - DNA, 15 bp, Homo sapiens
cccaacaatttttgt

SEQ ID NO: 1242489 - DNA, 15 bp, Homo sapiens
acccaacaatttttg

SEQ ID NO: 1242490 - DNA, 15 bp, Homo sapiens
cacccaacaattttt

SEQ ID NO: 1242491 - DNA, 15 bp, Homo sapiens
gcacccaacaatttt

SEQ ID NO: 1242492 - DNA, 15 bp, Homo sapiens
agcacccaacaattt

SEQ ID NO: 1242493 - DNA, 15 bp, Homo sapiens
aagcacccaacaatt

SEQ ID NO: 1242494 - DNA, 15 bp, Homo sapiens
aaagcacccaacaat

SEQ ID NO: 1242495 - DNA, 15 bp, Homo sapiens
aaaagcacccaacaa

SEQ ID NO: 1242496 - DNA, 15 bp, Homo sapiens
caaaagcacccaaca

SEQ ID NO: 1242497 - DNA, 15 bp, Homo sapiens
gcaaaagcacccaac

SEQ ID NO: 1242498 - DNA, 15 bp, Homo sapiens
agcaaaagcacccaa

SEQ ID NO: 1242499 - DNA, 15 bp, Homo sapiens
aagcaaaagcaccca

SEQ ID NO: 1242500 - DNA, 15 bp, Homo sapiens
aaagcaaaagcaccc

SEQ ID NO: 1242501 - DNA, 15 bp, Homo sapiens
aaaagcaaaagcacc

SEQ ID NO: 1242502 - DNA, 15 bp, Homo sapiens
aaaaagcaaaagcac

SEQ ID NO: 1242503 - DNA, 15 bp, Homo sapiens
aaaaaagcaaaagca

SEQ ID NO: 1242504 - DNA, 15 bp, Homo sapiens
taaaaaagcaaaagc

SEQ ID NO: 1242505 - DNA, 15 bp, Homo sapiens
ttaaaaaagcaaaag

SEQ ID NO: 1242506 - DNA, 15 bp, Homo sapiens
tttaaaaaagcaaaa

SEQ ID NO: 1242507 - DNA, 15 bp, Homo sapiens
gtttaaaaaagcaaa

SEQ ID NO: 1242508 - DNA, 15 bp, Homo sapiens
agtttaaaaaagcaa

SEQ ID NO: 1242509 - DNA, 15 bp, Homo sapiens
gagtttaaaaaagca

SEQ ID NO: 1242510 - DNA, 15 bp, Homo sapiens
agagtttaaaaaagc

SEQ ID NO: 1242511 - DNA, 15 bp, Homo sapiens
gagagtttaaaaaag

SEQ ID NO: 1242512 - DNA, 15 bp, Homo sapiens
tgagagtttaaaaaa

SEQ ID NO: 1242513 - DNA, 15 bp, Homo sapiens
atgagagtttaaaaa

SEQ ID NO: 1242514 - DNA, 15 bp, Homo sapiens
aatgagagtttaaaa

SEQ ID NO: 1242515 - DNA, 15 bp, Homo sapiens
taatgagagtttaaa

SEQ ID NO: 1242516 - DNA, 15 bp, Homo sapiens
ttaatgagagtttaa

SEQ ID NO: 1242517 - DNA, 15 bp, Homo sapiens
gcttaatgagagttt

SEQ ID NO: 1242518 - DNA, 15 bp, Homo sapiens
agcttaatgagagtt

SEQ ID NO: 1242519 - DNA, 15 bp, Homo sapiens
cagcttaatgagagt

SEQ ID NO: 1242520 - DNA, 15 bp, Homo sapiens
gcagcttaatgagag

SEQ ID NO: 1242521 - DNA, 15 bp, Homo sapiens
ggcagcttaatgaga

SEQ ID NO: 1242522 - DNA, 15 bp, Homo sapiens
tggcagcttaatgag

SEQ ID NO: 1242523 - DNA, 15 bp, Homo sapiens
ctggcagcttaatga

SEQ ID NO: 1242524 - DNA, 15 bp, Homo sapiens
cctggcagcttaatg

SEQ ID NO: 1242525 - DNA, 15 bp, Homo sapiens
acctggcagcttaat

SEQ ID NO: 1242526 - DNA, 15 bp, Homo sapiens
tacctggcagcttaa

SEQ ID NO: 1242527 - DNA, 15 bp, Homo sapiens
ttacctggcagctta

SEQ ID NO: 1242528 - DNA, 15 bp, Homo sapiens
tttacctggcagctt

SEQ ID NO: 1242529 - DNA, 15 bp, Homo sapiens
ttttacctggcagct

SEQ ID NO: 1242530 - DNA, 15 bp, Homo sapiens
attttacctggcagc

SEQ ID NO: 1242531 - DNA, 15 bp, Homo sapiens
aattttacctggcag

SEQ ID NO: 1242532 - DNA, 15 bp, Homo sapiens
taattttacctggca

SEQ ID NO: 1242533 - DNA, 15 bp, Homo sapiens
ataattttacctggc

SEQ ID NO: 1242534 - DNA, 15 bp, Homo sapiens
gataattttacctgg

SEQ ID NO: 1242535 - DNA, 15 bp, Homo sapiens
agataattttacctg

SEQ ID NO: 1242536 - DNA, 15 bp, Homo sapiens
aagataattttacct

SEQ ID NO: 1242537 - DNA, 15 bp, Homo sapiens
aaagataattttacc

SEQ ID NO: 1242538 - DNA, 15 bp, Homo sapiens
taaagataattttac

SEQ ID NO: 1242539 - DNA, 15 bp, Homo sapiens
ataaagataatttta

SEQ ID NO: 1242540 - DNA, 15 bp, Homo sapiens
aataaagataatttt

SEQ ID NO: 1242541 - DNA, 15 bp, Homo sapiens
aaataaagataattt

SEQ ID NO: 1242542 - DNA, 15 bp, Homo sapiens
aaaataaagataatt

SEQ ID NO: 1242543 - DNA, 15 bp, Homo sapiens
taaaataaagataat

SEQ ID NO: 1242544 - DNA, 15 bp, Homo sapiens
ttaaaataaagataa

SEQ ID NO: 1242545 - DNA, 15 bp, Homo sapiens
tttaaaataaagata

SEQ ID NO: 1242546 - DNA, 15 bp, Homo sapiens
gtttaaaataaagat

SEQ ID NO: 1242547 - DNA, 15 bp, Homo sapiens
tgtttaaaataaaga

SEQ ID NO: 1242548 - DNA, 15 bp, Homo sapiens
gtgtttaaaataaag

SEQ ID NO: 1242549 - DNA, 15 bp, Homo sapiens
tgtgtttaaaataaa

SEQ ID NO: 1242550 - DNA, 15 bp, Homo sapiens
ctgtgtttaaaataa

SEQ ID NO: 1242551 - DNA, 15 bp, Homo sapiens
tctgtgtttaaaata

SEQ ID NO: 1242552 - DNA, 15 bp, Homo sapiens
ttctgtgtttaaaat

SEQ ID NO: 1242553 - DNA, 15 bp, Homo sapiens
attctgtgtttaaaa

SEQ ID NO: 1242554 - DNA, 15 bp, Homo sapiens
tattctgtgtttaaa

SEQ ID NO: 1242555 - DNA, 15 bp, Homo sapiens
gtattctgtgtttaa

SEQ ID NO: 1242556 - DNA, 15 bp, Homo sapiens
ggtattctgtgttta

SEQ ID NO: 1242557 - DNA, 15 bp, Homo sapiens
tggtattctgtgttt

SEQ ID NO: 1242558 - DNA, 15 bp, Homo sapiens
ttggtattctgtgtt

SEQ ID NO: 1242559 - DNA, 15 bp, Homo sapiens
gttggtattctgtgt

SEQ ID NO: 1242560 - DNA, 15 bp, Homo sapiens
agttggtattctgtg

SEQ ID NO: 1242561 - DNA, 15 bp, Homo sapiens
aagttggtattctgt

SEQ ID NO: 1242562 - DNA, 15 bp, Homo sapiens
gaagttggtattctg

SEQ ID NO: 1242563 - DNA, 15 bp, Homo sapiens
tgaagttggtattct

SEQ ID NO: 1242564 - DNA, 15 bp, Homo sapiens
ctgaagttggtattc

SEQ ID NO: 1242565 - DNA, 15 bp, Homo sapiens
tctgaagttggtatt

SEQ ID NO: 1242566 - DNA, 15 bp, Homo sapiens
ttctgaagttggtat

SEQ ID NO: 1242567 - DNA, 15 bp, Homo sapiens
attctgaagttggta

SEQ ID NO: 1242568 - DNA, 15 bp, Homo sapiens
cattctgaagttggt

SEQ ID NO: 1242569 - DNA, 15 bp, Homo sapiens
ccattctgaagttgg

SEQ ID NO: 1242570 - DNA, 15 bp, Homo sapiens
gccattctgaagttg

SEQ ID NO: 1242571 - DNA, 15 bp, Homo sapiens
ggccattctgaagtt

SEQ ID NO: 1242572 - DNA, 15 bp, Homo sapiens
tggccattctgaagt

SEQ ID NO: 1242573 - DNA, 15 bp, Homo sapiens
ttggccattctgaag

SEQ ID NO: 1242574 - DNA, 15 bp, Homo sapiens
attggccattctgaa

SEQ ID NO: 1242575 - DNA, 15 bp, Homo sapiens
aattggccattctga

SEQ ID NO: 1242576 - DNA, 15 bp, Homo sapiens
taattggccattctg

SEQ ID NO: 1242577 - DNA, 15 bp, Homo sapiens
ttaattggccattct

SEQ ID NO: 1242578 - DNA, 15 bp, Homo sapiens
attaattggccattc

SEQ ID NO: 1242579 - DNA, 15 bp, Homo sapiens
tattaattggccatt

SEQ ID NO: 1242580 - DNA, 15 bp, Homo sapiens
atattaattggccat

SEQ ID NO: 1242581 - DNA, 15 bp, Homo sapiens
tatattaattggcca

SEQ ID NO: 1242582 - DNA, 15 bp, Homo sapiens
atatattaattggcc

SEQ ID NO: 1242583 - DNA, 15 bp, Homo sapiens
gatatattaattggc

SEQ ID NO: 1242584 - DNA, 15 bp, Homo sapiens
ggatatattaattgg

SEQ ID NO: 1242585 - DNA, 15 bp, Homo sapiens
tggatatattaattg

SEQ ID NO: 1242586 - DNA, 15 bp, Homo sapiens
ttggatatattaatt

SEQ ID NO: 1242587 - DNA, 15 bp, Homo sapiens
tttggatatattaat

SEQ ID NO: 1242588 - DNA, 15 bp, Homo sapiens
ctttggatatattaa

SEQ ID NO: 1242589 - DNA, 15 bp, Homo sapiens
cctttggatatatta

SEQ ID NO: 1242590 - DNA, 15 bp, Homo sapiens
acctttggatatatt

SEQ ID NO: 1242591 - DNA, 15 bp, Homo sapiens
tacctttggatatat

SEQ ID NO: 1242592 - DNA, 15 bp, Homo sapiens
ctacctttggatata

SEQ ID NO: 1242593 - DNA, 15 bp, Homo sapiens
actacctttggatat

SEQ ID NO: 1242594 - DNA, 15 bp, Homo sapiens
cactacctttggata

SEQ ID NO: 1242595 - DNA, 15 bp, Homo sapiens
tcactacctttggat

SEQ ID NO: 1242596 - DNA, 15 bp, Homo sapiens
ctcactacctttgga

SEQ ID NO: 1242597 - DNA, 15 bp, Homo sapiens
actcactacctttgg

SEQ ID NO: 1242598 - DNA, 15 bp, Homo sapiens
tactcactacctttg

SEQ ID NO: 1242599 - DNA, 15 bp, Homo sapiens
ctactcactaccttt

SEQ ID NO: 1242600 - DNA, 15 bp, Homo sapiens
gctactcactacctt

SEQ ID NO: 1242601 - DNA, 15 bp, Homo sapiens
tgctactcactacct

SEQ ID NO: 1242602 - DNA, 15 bp, Homo sapiens
ctgctactcactacc

SEQ ID NO: 1242603 - DNA, 15 bp, Homo sapiens
tctgctactcactac

SEQ ID NO: 1242604 - DNA, 15 bp, Homo sapiens
ttctgctactcacta

SEQ ID NO: 1242605 - DNA, 15 bp, Homo sapiens
gttctgctactcact

SEQ ID NO: 1242606 - DNA, 15 bp, Homo sapiens
ggttctgctactcac

SEQ ID NO: 1242607 - DNA, 15 bp, Homo sapiens
tggttctgctactca

SEQ ID NO: 1242608 - DNA, 15 bp, Homo sapiens
ctggttctgctactc

SEQ ID NO: 1242609 - DNA, 15 bp, Homo sapiens
tctggttctgctact

SEQ ID NO: 1242610 - DNA, 15 bp, Homo sapiens
ttctggttctgctac

SEQ ID NO: 1242611 - DNA, 15 bp, Homo sapiens
attctggttctgcta

SEQ ID NO: 1242612 - DNA, 15 bp, Homo sapiens
aattctggttctgct

SEQ ID NO: 1242613 - DNA, 15 bp, Homo sapiens
aaattctggttctgc

SEQ ID NO: 1242614 - DNA, 15 bp, Homo sapiens
caaattctggttctg

SEQ ID NO: 1242615 - DNA, 15 bp, Homo sapiens
tcaaattctggttct

SEQ ID NO: 1242616 - DNA, 15 bp, Homo sapiens
ttcaaattctggttc

SEQ ID NO: 1242617 - DNA, 15 bp, Homo sapiens
gttcaaattctggtt

SEQ ID NO: 1242618 - DNA, 15 bp, Homo sapiens
ggttcaaattctggt

SEQ ID NO: 1242619 - DNA, 15 bp, Homo sapiens
gggttcaaattctgg

SEQ ID NO: 1242620 - DNA, 15 bp, Homo sapiens
tgggttcaaattctg

SEQ ID NO: 1242621 - DNA, 15 bp, Homo sapiens
ctgggttcaaattct

SEQ ID NO: 1242622 - DNA, 15 bp, Homo sapiens
tctgggttcaaattc

SEQ ID NO: 1242623 - DNA, 15 bp, Homo sapiens
atctgggttcaaatt

SEQ ID NO: 1242624 - DNA, 15 bp, Homo sapiens
tatctgggttcaaat

SEQ ID NO: 1242625 - DNA, 15 bp, Homo sapiens
ctatctgggttcaaa

SEQ ID NO: 1242626 - DNA, 15 bp, Homo sapiens
gctatctgggttcaa

SEQ ID NO: 1242627 - DNA, 15 bp, Homo sapiens
ggctatctgggttca

SEQ ID NO: 1242628 - DNA, 15 bp, Homo sapiens
gggctatctgggttc

SEQ ID NO: 1242629 - DNA, 15 bp, Homo sapiens
tgggctatctgggtt

SEQ ID NO: 1242630 - DNA, 15 bp, Homo sapiens
gtgggctatctgggt

SEQ ID NO: 1242631 - DNA, 15 bp, Homo sapiens
tgtgggctatctggg

SEQ ID NO: 1242632 - DNA, 15 bp, Homo sapiens
atgtgggctatctgg

SEQ ID NO: 1242633 - DNA, 15 bp, Homo sapiens
tatgtgggctatctg

SEQ ID NO: 1242634 - DNA, 15 bp, Homo sapiens
gtatgtgggctatct

SEQ ID NO: 1242635 - DNA, 15 bp, Homo sapiens
agtatgtgggctatc

SEQ ID NO: 1242636 - DNA, 15 bp, Homo sapiens
aagtatgtgggctat

SEQ ID NO: 1242637 - DNA, 15 bp, Homo sapiens
caagtatgtgggcta

SEQ ID NO: 1242638 - DNA, 15 bp, Homo sapiens
gcaagtatgtgggct

SEQ ID NO: 1242639 - DNA, 15 bp, Homo sapiens
tgcaagtatgtgggc

SEQ ID NO: 1242640 - DNA, 15 bp, Homo sapiens
ttgcaagtatgtggg

SEQ ID NO: 1242641 - DNA, 15 bp, Homo sapiens
cttgcaagtatgtgg

SEQ ID NO: 1242642 - DNA, 15 bp, Homo sapiens
tcttgcaagtatgtg

SEQ ID NO: 1242643 - DNA, 15 bp, Homo sapiens
atcttgcaagtatgt

SEQ ID NO: 1242644 - DNA, 15 bp, Homo sapiens
tatcttgcaagtatg

SEQ ID NO: 1242645 - DNA, 15 bp, Homo sapiens
gtatcttgcaagtat

SEQ ID NO: 1242646 - DNA, 15 bp, Homo sapiens
ggtatcttgcaagta

SEQ ID NO: 1242647 - DNA, 15 bp, Homo sapiens
tggtatcttgcaagt

SEQ ID NO: 1242648 - DNA, 15 bp, Homo sapiens
atggtatcttgcaag

SEQ ID NO: 1242649 - DNA, 15 bp, Homo sapiens
aatggtatcttgcaa

SEQ ID NO: 1242650 - DNA, 15 bp, Homo sapiens
taatggtatcttgca

SEQ ID NO: 1242651 - DNA, 15 bp, Homo sapiens
ataatggtatcttgc

SEQ ID NO: 1242652 - DNA, 15 bp, Homo sapiens
gataatggtatcttg

SEQ ID NO: 1242653 - DNA, 15 bp, Homo sapiens
agataatggtatctt

SEQ ID NO: 1242654 - DNA, 15 bp, Homo sapiens
gagataatggtatct

SEQ ID NO: 1242655 - DNA, 15 bp, Homo sapiens
agagataatggtatc

SEQ ID NO: 1242656 - DNA, 15 bp, Homo sapiens
aagagataatggtat

SEQ ID NO: 1242657 - DNA, 15 bp, Homo sapiens
caagagataatggta

SEQ ID NO: 1242658 - DNA, 15 bp, Homo sapiens
acaagagataatggt

SEQ ID NO: 1242659 - DNA, 15 bp, Homo sapiens
gacaagagataatgg

SEQ ID NO: 1242660 - DNA, 15 bp, Homo sapiens
tgacaagagataatg

SEQ ID NO: 1242661 - DNA, 15 bp, Homo sapiens
ctgacaagagataat

SEQ ID NO: 1242662 - DNA, 15 bp, Homo sapiens
actgacaagagataa

SEQ ID NO: 1242663 - DNA, 15 bp, Homo sapiens
cactgacaagagata

SEQ ID NO: 1242664 - DNA, 15 bp, Homo sapiens
tcactgacaagagat

SEQ ID NO: 1242665 - DNA, 15 bp, Homo sapiens
ttcactgacaagaga

SEQ ID NO: 1242666 - DNA, 15 bp, Homo sapiens
attcactgacaagag

SEQ ID NO: 1242667 - DNA, 15 bp, Homo sapiens
tattcactgacaaga

SEQ ID NO: 1242668 - DNA, 15 bp, Homo sapiens
ttattcactgacaag

SEQ ID NO: 1242669 - DNA, 15 bp, Homo sapiens
cttattcactgacaa

SEQ ID NO: 1242670 - DNA, 15 bp, Homo sapiens
tcttattcactgaca

SEQ ID NO: 1242671 - DNA, 15 bp, Homo sapiens
atcttattcactgac

SEQ ID NO: 1242672 - DNA, 15 bp, Homo sapiens
tatcttattcactga

SEQ ID NO: 1242673 - DNA, 15 bp, Homo sapiens
ctatcttattcactg

SEQ ID NO: 1242674 - DNA, 15 bp, Homo sapiens
tctatcttattcact

SEQ ID NO: 1242675 - DNA, 15 bp, Homo sapiens
ctctatcttattcac

SEQ ID NO: 1242676 - DNA, 15 bp, Homo sapiens
cctctatcttattca

SEQ ID NO: 1242677 - DNA, 15 bp, Homo sapiens
tcctctatcttattc

SEQ ID NO: 1242678 - DNA, 15 bp, Homo sapiens
ctcctctatcttatt

SEQ ID NO: 1242679 - DNA, 15 bp, Homo sapiens
cctcctctatcttat

SEQ ID NO: 1242680 - DNA, 15 bp, Homo sapiens
tcctcctctatctta

SEQ ID NO: 1242681 - DNA, 15 bp, Homo sapiens
ctcctcctctatctt

SEQ ID NO: 1242682 - DNA, 15 bp, Homo sapiens
cctcctcctctatct

SEQ ID NO: 1242683 - DNA, 15 bp, Homo sapiens
tcctcctcctctatc

SEQ ID NO: 1242684 - DNA, 15 bp, Homo sapiens
ctcctcctcctctat

SEQ ID NO: 1242685 - DNA, 15 bp, Homo sapiens
cctcctcctcctcta

SEQ ID NO: 1242686 - DNA, 15 bp, Homo sapiens
tcctcctcctcctct

SEQ ID NO: 1242687 - DNA, 15 bp, Homo sapiens
tctcctcctcctcct

SEQ ID NO: 1242688 - DNA, 15 bp, Homo sapiens
gtctcctcctcctcc

SEQ ID NO: 1242689 - DNA, 15 bp, Homo sapiens
cgtctcctcctcctc

SEQ ID NO: 1242690 - DNA, 15 bp, Homo sapiens
ccgtctcctcctcct

SEQ ID NO: 1242691 - DNA, 15 bp, Homo sapiens
cccgtctcctcctcc

SEQ ID NO: 1242692 - DNA, 15 bp, Homo sapiens
ccccgtctcctcctc

SEQ ID NO: 1242693 - DNA, 15 bp, Homo sapiens
gccccgtctcctcct

SEQ ID NO: 1242694 - DNA, 15 bp, Homo sapiens
cgccccgtctcctcc

SEQ ID NO: 1242695 - DNA, 15 bp, Homo sapiens
gcgccccgtctcctc

SEQ ID NO: 1242696 - DNA, 15 bp, Homo sapiens
ggcgccccgtctcct

SEQ ID NO: 1242697 - DNA, 15 bp, Homo sapiens
gggcgccccgtctcc

SEQ ID NO: 1242698 - DNA, 15 bp, Homo sapiens
tgggcgccccgtctc

SEQ ID NO: 1242699 - DNA, 15 bp, Homo sapiens
ctgggcgccccgtct

SEQ ID NO: 1242700 - DNA, 15 bp, Homo sapiens
actgggcgccccgtc

SEQ ID NO: 1242701 - DNA, 15 bp, Homo sapiens
tactgggcgccccgt

SEQ ID NO: 1242702 - DNA, 15 bp, Homo sapiens
atactgggcgccccg

SEQ ID NO: 1242703 - DNA, 15 bp, Homo sapiens
catactgggcgcccc

SEQ ID NO: 1242704 - DNA, 15 bp, Homo sapiens
gcatactgggcgccc

SEQ ID NO: 1242705 - DNA, 15 bp, Homo sapiens
tgcatactgggcgcc

SEQ ID NO: 1242706 - DNA, 15 bp, Homo sapiens
ctgcatactgggcgc

SEQ ID NO: 1242707 - DNA, 15 bp, Homo sapiens
actgcatactgggcg

SEQ ID NO: 1242708 - DNA, 15 bp, Homo sapiens
gactgcatactgggc

SEQ ID NO: 1242709 - DNA, 15 bp, Homo sapiens
tgactgcatactggg

SEQ ID NO: 1242710 - DNA, 15 bp, Homo sapiens
ttgactgcatactgg

SEQ ID NO: 1242711 - DNA, 15 bp, Homo sapiens
tttgactgcatactg

SEQ ID NO: 1242712 - DNA, 15 bp, Homo sapiens
ttttgactgcatact

SEQ ID NO: 1242713 - DNA, 15 bp, Homo sapiens
cttttgactgcatac

SEQ ID NO: 1242714 - DNA, 15 bp, Homo sapiens
tcttttgactgcata

SEQ ID NO: 1242715 - DNA, 15 bp, Homo sapiens
ttcttttgactgcat

SEQ ID NO: 1242716 - DNA, 15 bp, Homo sapiens
cttcttttgactgca

SEQ ID NO: 1242717 - DNA, 15 bp, Homo sapiens
tcttcttttgactgc

SEQ ID NO: 1242718 - DNA, 15 bp, Homo sapiens
atcttcttttgactg

SEQ ID NO: 1242719 - DNA, 15 bp, Homo sapiens
gatcttcttttgact

SEQ ID NO: 1242720 - DNA, 15 bp, Homo sapiens
ggatcttcttttgac

SEQ ID NO: 1242721 - DNA, 15 bp, Homo sapiens
tggatcttcttttga

SEQ ID NO: 1242722 - DNA, 15 bp, Homo sapiens
ctggatcttcttttg

SEQ ID NO: 1242723 - DNA, 15 bp, Homo sapiens
tctggatcttctttt

SEQ ID NO: 1242724 - DNA, 15 bp, Homo sapiens
ttctggatcttcttt

SEQ ID NO: 1242725 - DNA, 15 bp, Homo sapiens
tttctggatcttctt

SEQ ID NO: 1242726 - DNA, 15 bp, Homo sapiens
ctttctggatcttct

SEQ ID NO: 1242727 - DNA, 15 bp, Homo sapiens
tctttctggatcttc

SEQ ID NO: 1242728 - DNA, 15 bp, Homo sapiens
gtctttctggatctt

SEQ ID NO: 1242729 - DNA, 15 bp, Homo sapiens
tgtctttctggatct

SEQ ID NO: 1242730 - DNA, 15 bp, Homo sapiens
ttgtctttctggatc

SEQ ID NO: 1242731 - DNA, 15 bp, Homo sapiens
cttgtctttctggat

SEQ ID NO: 1242732 - DNA, 15 bp, Homo sapiens
gcttgtctttctgga

SEQ ID NO: 1242733 - DNA, 15 bp, Homo sapiens
ggcttgtctttctgg

SEQ ID NO: 1242734 - DNA, 15 bp, Homo sapiens
tggcttgtctttctg

SEQ ID NO: 1242735 - DNA, 15 bp, Homo sapiens
ttggcttgtctttct

SEQ ID NO: 1242736 - DNA, 15 bp, Homo sapiens
gttggcttgtctttc

SEQ ID NO: 1242737 - DNA, 15 bp, Homo sapiens
agttggcttgtcttt

SEQ ID NO: 1242738 - DNA, 15 bp, Homo sapiens
aagttggcttgtctt

SEQ ID NO: 1242739 - DNA, 15 bp, Homo sapiens
aaagttggcttgtct

SEQ ID NO: 1242740 - DNA, 15 bp, Homo sapiens
aaaagttggcttgtc

SEQ ID NO: 1242741 - DNA, 15 bp, Homo sapiens
gaaaagttggcttgt

SEQ ID NO: 1242742 - DNA, 15 bp, Homo sapiens
tgaaaagttggcttg

SEQ ID NO: 1242743 - DNA, 15 bp, Homo sapiens
gtgaaaagttggctt

SEQ ID NO: 1242744 - DNA, 15 bp, Homo sapiens
ggtgaaaagttggct

SEQ ID NO: 1242745 - DNA, 15 bp, Homo sapiens
tggtgaaaagttggc

SEQ ID NO: 1242746 - DNA, 15 bp, Homo sapiens
atggtgaaaagttgg

SEQ ID NO: 1242747 - DNA, 15 bp, Homo sapiens
aatggtgaaaagttg

SEQ ID NO: 1242748 - DNA, 15 bp, Homo sapiens
taatggtgaaaagtt

SEQ ID NO: 1242749 - DNA, 15 bp, Homo sapiens
ataatggtgaaaagt

SEQ ID NO: 1242750 - DNA, 15 bp, Homo sapiens
cataatggtgaaaag

SEQ ID NO: 1242751 - DNA, 15 bp, Homo sapiens
tcataatggtgaaaa

SEQ ID NO: 1242752 - DNA, 15 bp, Homo sapiens
ttcataatggtgaaa

SEQ ID NO: 1242753 - DNA, 15 bp, Homo sapiens
gttcataatggtgaa

SEQ ID NO: 1242754 - DNA, 15 bp, Homo sapiens
agttcataatggtga

SEQ ID NO: 1242755 - DNA, 15 bp, Homo sapiens
gagttcataatggtg

SEQ ID NO: 1242756 - DNA, 15 bp, Homo sapiens
agagttcataatggt

SEQ ID NO: 1242757 - DNA, 15 bp, Homo sapiens
cagagttcataatgg

SEQ ID NO: 1242758 - DNA, 15 bp, Homo sapiens
acagagttcataatg

SEQ ID NO: 1242759 - DNA, 15 bp, Homo sapiens
aacagagttcataat

SEQ ID NO: 1242760 - DNA, 15 bp, Homo sapiens
aaacagagttcataa

SEQ ID NO: 1242761 - DNA, 15 bp, Homo sapiens
gaaacagagttcata

SEQ ID NO: 1242762 - DNA, 15 bp, Homo sapiens
agaaacagagttcat

SEQ ID NO: 1242763 - DNA, 15 bp, Homo sapiens
tagaaacagagttca

SEQ ID NO: 1242764 - DNA, 15 bp, Homo sapiens
atagaaacagagttc

SEQ ID NO: 1242765 - DNA, 15 bp, Homo sapiens
tatagaaacagagtt

SEQ ID NO: 1242766 - DNA, 15 bp, Homo sapiens
ctatagaaacagagt

SEQ ID NO: 1242767 - DNA, 15 bp, Homo sapiens
actatagaaacagag

SEQ ID NO: 1242768 - DNA, 15 bp, Homo sapiens
aactatagaaacaga

SEQ ID NO: 1242769 - DNA, 15 bp, Homo sapiens
aaactatagaaacag

SEQ ID NO: 1242770 - DNA, 15 bp, Homo sapiens
aaaactatagaaaca

SEQ ID NO: 1242771 - DNA, 15 bp, Homo sapiens
taaaactatagaaac

SEQ ID NO: 1242772 - DNA, 15 bp, Homo sapiens
ataaaactatagaaa

SEQ ID NO: 1242773 - DNA, 15 bp, Homo sapiens
aataaaactatagaa

SEQ ID NO: 1242774 - DNA, 15 bp, Homo sapiens
aaataaaactataga

SEQ ID NO: 1242775 - DNA, 15 bp, Homo sapiens
taaataaaactatag

SEQ ID NO: 1242776 - DNA, 15 bp, Homo sapiens
gtaaataaaactata

SEQ ID NO: 1242777 - DNA, 15 bp, Homo sapiens
agtaaataaaactat

SEQ ID NO: 1242778 - DNA, 15 bp, Homo sapiens
aagtaaataaaacta

SEQ ID NO: 1242779 - DNA, 15 bp, Homo sapiens
caagtaaataaaact

SEQ ID NO: 1242780 - DNA, 15 bp, Homo sapiens
acaagtaaataaaac

SEQ ID NO: 1242781 - DNA, 15 bp, Homo sapiens
cacaagtaaataaaa

SEQ ID NO: 1242782 - DNA, 15 bp, Homo sapiens
tcacaagtaaataaa

SEQ ID NO: 1242783 - DNA, 15 bp, Homo sapiens
gtcacaagtaaataa

SEQ ID NO: 1242784 - DNA, 15 bp, Homo sapiens
ggtcacaagtaaata

SEQ ID NO: 1242785 - DNA, 15 bp, Homo sapiens
tggtcacaagtaaat

SEQ ID NO: 1242786 - DNA, 15 bp, Homo sapiens
ttggtcacaagtaaa

SEQ ID NO: 1242787 - DNA, 15 bp, Homo sapiens
attggtcacaagtaa

SEQ ID NO: 1242788 - DNA, 15 bp, Homo sapiens
gattggtcacaagta

SEQ ID NO: 1242789 - DNA, 15 bp, Homo sapiens
ggattggtcacaagt

SEQ ID NO: 1242790 - DNA, 15 bp, Homo sapiens
gggattggtcacaag

SEQ ID NO: 1242791 - DNA, 15 bp, Homo sapiens
ggggattggtcacaa

SEQ ID NO: 1242792 - DNA, 15 bp, Homo sapiens
gggggattggtcaca

SEQ ID NO: 1242793 - DNA, 15 bp, Homo sapiens
agggggattggtcac

SEQ ID NO: 1242794 - DNA, 15 bp, Homo sapiens
aagggggattggtca

SEQ ID NO: 1242795 - DNA, 15 bp, Homo sapiens
aaagggggattggtc

SEQ ID NO: 1242796 - DNA, 15 bp, Homo sapiens
taaagggggattggt

SEQ ID NO: 1242797 - DNA, 15 bp, Homo sapiens
ctaaagggggattgg

SEQ ID NO: 1242798 - DNA, 15 bp, Homo sapiens
tctaaagggggattg

SEQ ID NO: 1242799 - DNA, 15 bp, Homo sapiens
ttctaaagggggatt

SEQ ID NO: 1242800 - DNA, 15 bp, Homo sapiens
tttctaaagggggat

SEQ ID NO: 1242801 - DNA, 15 bp, Homo sapiens
ctttctaaaggggga

SEQ ID NO: 1242802 - DNA, 15 bp, Homo sapiens
cctttctaaaggggg

SEQ ID NO: 1242803 - DNA, 15 bp, Homo sapiens
gcctttctaaagggg

SEQ ID NO: 1242804 - DNA, 15 bp, Homo sapiens
agcctttctaaaggg

SEQ ID NO: 1242805 - DNA, 15 bp, Homo sapiens
aagcctttctaaagg

SEQ ID NO: 1242806 - DNA, 15 bp, Homo sapiens
aaagcctttctaaag

SEQ ID NO: 1242807 - DNA, 15 bp, Homo sapiens
gaaagcctttctaaa

SEQ ID NO: 1242808 - DNA, 15 bp, Homo sapiens
agaaagcctttctaa

SEQ ID NO: 1242809 - DNA, 15 bp, Homo sapiens
aagaaagcctttcta

SEQ ID NO: 1242810 - DNA, 15 bp, Homo sapiens
taagaaagcctttct

SEQ ID NO: 1242811 - DNA, 15 bp, Homo sapiens
ttaagaaagcctttc

SEQ ID NO: 1242812 - DNA, 15 bp, Homo sapiens
tttaagaaagccttt

SEQ ID NO: 1242813 - DNA, 15 bp, Homo sapiens
ctttaagaaagcctt

SEQ ID NO: 1242814 - DNA, 15 bp, Homo sapiens
cctttaagaaagcct

SEQ ID NO: 1242815 - DNA, 15 bp, Homo sapiens
tcctttaagaaagcc

SEQ ID NO: 1242816 - DNA, 15 bp, Homo sapiens
atcctttaagaaagc

SEQ ID NO: 1242817 - DNA, 15 bp, Homo sapiens
tatcctttaagaaag

SEQ ID NO: 1242818 - DNA, 15 bp, Homo sapiens
ctatcctttaagaaa

SEQ ID NO: 1242819 - DNA, 15 bp, Homo sapiens
cctatcctttaagaa

SEQ ID NO: 1242820 - DNA, 15 bp, Homo sapiens
tcctatcctttaaga

SEQ ID NO: 1242821 - DNA, 15 bp, Homo sapiens
ctcctatcctttaag

SEQ ID NO: 1242822 - DNA, 15 bp, Homo sapiens
tctcctatcctttaa

SEQ ID NO: 1242823 - DNA, 15 bp, Homo sapiens
ttctcctatccttta

SEQ ID NO: 1242824 - DNA, 15 bp, Homo sapiens
cttctcctatccttt

SEQ ID NO: 1242825 - DNA, 15 bp, Homo sapiens
tcttctcctatcctt

SEQ ID NO: 1242826 - DNA, 15 bp, Homo sapiens
ttcttctcctatcct

SEQ ID NO: 1242827 - DNA, 15 bp, Homo sapiens
tttcttctcctatcc

SEQ ID NO: 1242828 - DNA, 15 bp, Homo sapiens
ctttcttctcctatc

SEQ ID NO: 1242829 - DNA, 15 bp, Homo sapiens
actttcttctcctat

SEQ ID NO: 1242830 - DNA, 15 bp, Homo sapiens
cactttcttctccta

SEQ ID NO: 1242831 - DNA, 15 bp, Homo sapiens
ccactttcttctcct

SEQ ID NO: 1242832 - DNA, 15 bp, Homo sapiens
accactttcttctcc

SEQ ID NO: 1242833 - DNA, 15 bp, Homo sapiens
aaccactttcttctc

SEQ ID NO: 1242834 - DNA, 15 bp, Homo sapiens
aaaccactttcttct

SEQ ID NO: 1242835 - DNA, 15 bp, Homo sapiens
gaaaccactttcttc

SEQ ID NO: 1242836 - DNA, 15 bp, Homo sapiens
agaaaccactttctt

SEQ ID NO: 1242837 - DNA, 15 bp, Homo sapiens
cagaaaccactttct

SEQ ID NO: 1242838 - DNA, 15 bp, Homo sapiens
ccagaaaccactttc

SEQ ID NO: 1242839 - DNA, 15 bp, Homo sapiens
accagaaaccacttt

SEQ ID NO: 1242840 - DNA, 15 bp, Homo sapiens
caccagaaaccactt

SEQ ID NO: 1242841 - DNA, 15 bp, Homo sapiens
tcaccagaaaccact

SEQ ID NO: 1242842 - DNA, 15 bp, Homo sapiens
ttcaccagaaaccac

SEQ ID NO: 1242843 - DNA, 15 bp, Homo sapiens
attcaccagaaacca

SEQ ID NO: 1242844 - DNA, 15 bp, Homo sapiens
gattcaccagaaacc

SEQ ID NO: 1242845 - DNA, 15 bp, Homo sapiens
ggattcaccagaaac

SEQ ID NO: 1242846 - DNA, 15 bp, Homo sapiens
aggattcaccagaaa

SEQ ID NO: 1242847 - DNA, 15 bp, Homo sapiens
aaggattcaccagaa

SEQ ID NO: 1242848 - DNA, 15 bp, Homo sapiens
taaggattcaccaga

SEQ ID NO: 1242849 - DNA, 15 bp, Homo sapiens
ctaaggattcaccag

SEQ ID NO: 1242850 - DNA, 15 bp, Homo sapiens
tctaaggattcacca

SEQ ID NO: 1242851 - DNA, 15 bp, Homo sapiens
ttctaaggattcacc

SEQ ID NO: 1242852 - DNA, 15 bp, Homo sapiens
tttctaaggattcac

SEQ ID NO: 1242853 - DNA, 15 bp, Homo sapiens
ttttctaaggattca

SEQ ID NO: 1242854 - DNA, 15 bp, Homo sapiens
tttttctaaggattc

SEQ ID NO: 1242855 - DNA, 15 bp, Homo sapiens
atttttctaaggatt

SEQ ID NO: 1242856 - DNA, 15 bp, Homo sapiens
aatttttctaaggat

SEQ ID NO: 1242857 - DNA, 15 bp, Homo sapiens
caatttttctaagga

SEQ ID NO: 1242858 - DNA, 15 bp, Homo sapiens
ccaatttttctaagg

SEQ ID NO: 1242859 - DNA, 15 bp, Homo sapiens
accaatttttctaag

SEQ ID NO: 1242860 - DNA, 15 bp, Homo sapiens
caccaatttttctaa

SEQ ID NO: 1242861 - DNA, 15 bp, Homo sapiens
tcaccaatttttcta

SEQ ID NO: 1242862 - DNA, 15 bp, Homo sapiens
atcaccaatttttct

SEQ ID NO: 1242863 - DNA, 15 bp, Homo sapiens
aatcaccaatttttc

SEQ ID NO: 1242864 - DNA, 15 bp, Homo sapiens
gaatcaccaattttt

SEQ ID NO: 1242865 - DNA, 15 bp, Homo sapiens
tgaatcaccaatttt

SEQ ID NO: 1242866 - DNA, 15 bp, Homo sapiens
atgaatcaccaattt

SEQ ID NO: 1242867 - DNA, 15 bp, Homo sapiens
aatgaatcaccaatt

SEQ ID NO: 1242868 - DNA, 15 bp, Homo sapiens
aaatgaatcaccaat

SEQ ID NO: 1242869 - DNA, 15 bp, Homo sapiens
gaaatgaatcaccaa

SEQ ID NO: 1242870 - DNA, 15 bp, Homo sapiens
tgaaatgaatcacca

SEQ ID NO: 1242871 - DNA, 15 bp, Homo sapiens
gtgaaatgaatcacc

SEQ ID NO: 1242872 - DNA, 15 bp, Homo sapiens
ggtgaaatgaatcac

SEQ ID NO: 1242873 - DNA, 15 bp, Homo sapiens
aggtgaaatgaatca

SEQ ID NO: 1242874 - DNA, 15 bp, Homo sapiens
aaggtgaaatgaatc

SEQ ID NO: 1242875 - DNA, 15 bp, Homo sapiens
caaggtgaaatgaat

SEQ ID NO: 1242876 - DNA, 15 bp, Homo sapiens
gcaaggtgaaatgaa

SEQ ID NO: 1242877 - DNA, 15 bp, Homo sapiens
ggcaaggtgaaatga

SEQ ID NO: 1242878 - DNA, 15 bp, Homo sapiens
aggcaaggtgaaatg

SEQ ID NO: 1242879 - DNA, 15 bp, Homo sapiens
taggcaaggtgaaat

SEQ ID NO: 1242880 - DNA, 15 bp, Homo sapiens
ataggcaaggtgaaa

SEQ ID NO: 1242881 - DNA, 15 bp, Homo sapiens
tataggcaaggtgaa

SEQ ID NO: 1242882 - DNA, 15 bp, Homo sapiens
atataggcaaggtga

SEQ ID NO: 1242883 - DNA, 15 bp, Homo sapiens
gatataggcaaggtg

SEQ ID NO: 1242884 - DNA, 15 bp, Homo sapiens
agatataggcaaggt

SEQ ID NO: 1242885 - DNA, 15 bp, Homo sapiens
aagatataggcaagg

SEQ ID NO: 1242886 - DNA, 15 bp, Homo sapiens
gaagatataggcaag

SEQ ID NO: 1242887 - DNA, 15 bp, Homo sapiens
agaagatataggcaa

SEQ ID NO: 1242888 - DNA, 15 bp, Homo sapiens
cagaagatataggca

SEQ ID NO: 1242889 - DNA, 15 bp, Homo sapiens
acagaagatataggc

SEQ ID NO: 1242890 - DNA, 15 bp, Homo sapiens
aacagaagatatagg

SEQ ID NO: 1242891 - DNA, 15 bp, Homo sapiens
aaacagaagatatag

SEQ ID NO: 1242892 - DNA, 15 bp, Homo sapiens
caaacagaagatata

SEQ ID NO: 1242893 - DNA, 15 bp, Homo sapiens
tcaaacagaagatat

SEQ ID NO: 1242894 - DNA, 15 bp, Homo sapiens
ttcaaacagaagata

SEQ ID NO: 1242895 - DNA, 15 bp, Homo sapiens
attcaaacagaagat

SEQ ID NO: 1242896 - DNA, 15 bp, Homo sapiens
gattcaaacagaaga

SEQ ID NO: 1242897 - DNA, 15 bp, Homo sapiens
ggattcaaacagaag

SEQ ID NO: 1242898 - DNA, 15 bp, Homo sapiens
aggattcaaacagaa

SEQ ID NO: 1242899 - DNA, 15 bp, Homo sapiens
caggattcaaacaga

SEQ ID NO: 1242900 - DNA, 15 bp, Homo sapiens
tcaggattcaaacag

SEQ ID NO: 1242901 - DNA, 15 bp, Homo sapiens
atcaggattcaaaca

SEQ ID NO: 1242902 - DNA, 15 bp, Homo sapiens
aatcaggattcaaac

SEQ ID NO: 1242903 - DNA, 15 bp, Homo sapiens
taatcaggattcaaa

SEQ ID NO: 1242904 - DNA, 15 bp, Homo sapiens
ctaatcaggattcaa

SEQ ID NO: 1242905 - DNA, 15 bp, Homo sapiens
gctaatcaggattca

SEQ ID NO: 1242906 - DNA, 15 bp, Homo sapiens
tgctaatcaggattc

SEQ ID NO: 1242907 - DNA, 15 bp, Homo sapiens
ttgctaatcaggatt

SEQ ID NO: 1242908 - DNA, 15 bp, Homo sapiens
cttgctaatcaggat

SEQ ID NO: 1242909 - DNA, 15 bp, Homo sapiens
ccttgctaatcagga

SEQ ID NO: 1242910 - DNA, 15 bp, Homo sapiens
accttgctaatcagg

SEQ ID NO: 1242911 - DNA, 15 bp, Homo sapiens
aaccttgctaatcag

SEQ ID NO: 1242912 - DNA, 15 bp, Homo sapiens
aaaccttgctaatca

SEQ ID NO: 1242913 - DNA, 15 bp, Homo sapiens
aaaaccttgctaatc

SEQ ID NO: 1242914 - DNA, 15 bp, Homo sapiens
taaaaccttgctaat

SEQ ID NO: 1242915 - DNA, 15 bp, Homo sapiens
ataaaaccttgctaa

SEQ ID NO: 1242916 - DNA, 15 bp, Homo sapiens
cataaaaccttgcta

SEQ ID NO: 1242917 - DNA, 15 bp, Homo sapiens
gcataaaaccttgct

SEQ ID NO: 1242918 - DNA, 15 bp, Homo sapiens
agcataaaaccttgc

SEQ ID NO: 1242919 - DNA, 15 bp, Homo sapiens
cagcataaaaccttg

SEQ ID NO: 1242920 - DNA, 15 bp, Homo sapiens
gcagcataaaacctt

SEQ ID NO: 1242921 - DNA, 15 bp, Homo sapiens
ggcagcataaaacct

SEQ ID NO: 1242922 - DNA, 15 bp, Homo sapiens
tggcagcataaaacc

SEQ ID NO: 1242923 - DNA, 15 bp, Homo sapiens
atggcagcataaaac

SEQ ID NO: 1242924 - DNA, 15 bp, Homo sapiens
gatggcagcataaaa

SEQ ID NO: 1242925 - DNA, 15 bp, Homo sapiens
agatggcagcataaa

SEQ ID NO: 1242926 - DNA, 15 bp, Homo sapiens
aagatggcagcataa

SEQ ID NO: 1242927 - DNA, 15 bp, Homo sapiens
aaagatggcagcata

SEQ ID NO: 1242928 - DNA, 15 bp, Homo sapiens
aaaagatggcagcat

SEQ ID NO: 1242929 - DNA, 15 bp, Homo sapiens
taaaagatggcagca

SEQ ID NO: 1242930 - DNA, 15 bp, Homo sapiens
ataaaagatggcagc

SEQ ID NO: 1242931 - DNA, 15 bp, Homo sapiens
cataaaagatggcag

SEQ ID NO: 1242932 - DNA, 15 bp, Homo sapiens
gcataaaagatggca

SEQ ID NO: 1242933 - DNA, 15 bp, Homo sapiens
tgcataaaagatggc

SEQ ID NO: 1242934 - DNA, 15 bp, Homo sapiens
atgcataaaagatgg

SEQ ID NO: 1242935 - DNA, 15 bp, Homo sapiens
tatgcataaaagatg

SEQ ID NO: 1242936 - DNA, 15 bp, Homo sapiens
ttatgcataaaagat

SEQ ID NO: 1242937 - DNA, 15 bp, Homo sapiens
tttatgcataaaaga

SEQ ID NO: 1242938 - DNA, 15 bp, Homo sapiens
atttatgcataaaag

SEQ ID NO: 1242939 - DNA, 15 bp, Homo sapiens
aatttatgcataaaa

SEQ ID NO: 1242940 - DNA, 15 bp, Homo sapiens
taatttatgcataaa

SEQ ID NO: 1242941 - DNA, 15 bp, Homo sapiens
ttaatttatgcataa

SEQ ID NO: 1242942 - DNA, 15 bp, Homo sapiens
tttaatttatgcata

SEQ ID NO: 1242943 - DNA, 15 bp, Homo sapiens
atttaatttatgcat

SEQ ID NO: 1242944 - DNA, 15 bp, Homo sapiens
tatttaatttatgca

SEQ ID NO: 1242945 - DNA, 15 bp, Homo sapiens
atatttaatttatgc

SEQ ID NO: 1242946 - DNA, 15 bp, Homo sapiens
aatatttaatttatg

SEQ ID NO: 1242947 - DNA, 15 bp, Homo sapiens
taatatttaatttat

SEQ ID NO: 1242948 - DNA, 15 bp, Homo sapiens
ctaatatttaattta

SEQ ID NO: 1242949 - DNA, 15 bp, Homo sapiens
tctaatatttaattt

SEQ ID NO: 1242950 - DNA, 15 bp, Homo sapiens
gtctaatatttaatt

SEQ ID NO: 1242951 - DNA, 15 bp, Homo sapiens
tgtctaatatttaat

SEQ ID NO: 1242952 - DNA, 15 bp, Homo sapiens
ttgtctaatatttaa

SEQ ID NO: 1242953 - DNA, 15 bp, Homo sapiens
tttgtctaatattta

SEQ ID NO: 1242954 - DNA, 15 bp, Homo sapiens
atttgtctaatattt

SEQ ID NO: 1242955 - DNA, 15 bp, Homo sapiens
gatttgtctaatatt

SEQ ID NO: 1242956 - DNA, 15 bp, Homo sapiens
cgatttgtctaatat

SEQ ID NO: 1242957 - DNA, 15 bp, Homo sapiens
acgatttgtctaata

SEQ ID NO: 1242958 - DNA, 15 bp, Homo sapiens
cacgatttgtctaat

SEQ ID NO: 1242959 - DNA, 15 bp, Homo sapiens
tcacgatttgtctaa

SEQ ID NO: 1242960 - DNA, 15 bp, Homo sapiens
ttcacgatttgtcta

SEQ ID NO: 1242961 - DNA, 15 bp, Homo sapiens
tttcacgatttgtct

SEQ ID NO: 1242962 - DNA, 15 bp, Homo sapiens
atttcacgatttgtc

SEQ ID NO: 1242963 - DNA, 15 bp, Homo sapiens
aatttcacgatttgt

SEQ ID NO: 1242964 - DNA, 15 bp, Homo sapiens
caatttcacgatttg

SEQ ID NO: 1242965 - DNA, 15 bp, Homo sapiens
acaatttcacgattt

SEQ ID NO: 1242966 - DNA, 15 bp, Homo sapiens
aacaatttcacgatt

SEQ ID NO: 1242967 - DNA, 15 bp, Homo sapiens
aaacaatttcacgat

SEQ ID NO: 1242968 - DNA, 15 bp, Homo sapiens
aaaacaatttcacga

SEQ ID NO: 1242969 - DNA, 15 bp, Homo sapiens
aaaaacaatttcacg

SEQ ID NO: 1242970 - DNA, 15 bp, Homo sapiens
caaaaacaatttcac

SEQ ID NO: 1242971 - DNA, 15 bp, Homo sapiens
tcaaaaacaatttca

SEQ ID NO: 1242972 - DNA, 15 bp, Homo sapiens
ttcaaaaacaatttc

SEQ ID NO: 1242973 - DNA, 15 bp, Homo sapiens
tttcaaaaacaattt

SEQ ID NO: 1242974 - DNA, 15 bp, Homo sapiens
ttttcaaaaacaatt

SEQ ID NO: 1242975 - DNA, 15 bp, Homo sapiens
cttttcaaaaacaat

SEQ ID NO: 1242976 - DNA, 15 bp, Homo sapiens
acttttcaaaaacaa

SEQ ID NO: 1242977 - DNA, 15 bp, Homo sapiens
aacttttcaaaaaca

SEQ ID NO: 1242978 - DNA, 15 bp, Homo sapiens
gaacttttcaaaaac

SEQ ID NO: 1242979 - DNA, 15 bp, Homo sapiens
tgaacttttcaaaaa

SEQ ID NO: 1242980 - DNA, 15 bp, Homo sapiens
ttgaacttttcaaaa

SEQ ID NO: 1242981 - DNA, 15 bp, Homo sapiens
cttgaacttttcaaa

SEQ ID NO: 1242982 - DNA, 15 bp, Homo sapiens
gcttgaacttttcaa

SEQ ID NO: 1242983 - DNA, 15 bp, Homo sapiens
ggcttgaacttttca

SEQ ID NO: 1242984 - DNA, 15 bp, Homo sapiens
aggcttgaacttttc

SEQ ID NO: 1242985 - DNA, 15 bp, Homo sapiens
aaggcttgaactttt

SEQ ID NO: 1242986 - DNA, 15 bp, Homo sapiens
aaaggcttgaacttt

SEQ ID NO: 1242987 - DNA, 15 bp, Homo sapiens
taaaggcttgaactt

SEQ ID NO: 1242988 - DNA, 15 bp, Homo sapiens
ataaaggcttgaact

SEQ ID NO: 1242989 - DNA, 15 bp, Homo sapiens
aataaaggcttgaac

SEQ ID NO: 1242990 - DNA, 15 bp, Homo sapiens
caataaaggcttgaa

SEQ ID NO: 1242991 - DNA, 15 bp, Homo sapiens
gcaataaaggcttga

SEQ ID NO: 1242992 - DNA, 15 bp, Homo sapiens
ggcaataaaggcttg

SEQ ID NO: 1242993 - DNA, 15 bp, Homo sapiens
aggcaataaaggctt

SEQ ID NO: 1242994 - DNA, 15 bp, Homo sapiens
aaggcaataaaggct

SEQ ID NO: 1242995 - DNA, 15 bp, Homo sapiens
gaaggcaataaaggc

SEQ ID NO: 1242996 - DNA, 15 bp, Homo sapiens
ggaaggcaataaagg

SEQ ID NO: 1242997 - DNA, 15 bp, Homo sapiens
gggaaggcaataaag

SEQ ID NO: 1242998 - DNA, 15 bp, Homo sapiens
ggggaaggcaataaa

SEQ ID NO: 1242999 - DNA, 15 bp, Homo sapiens
cggggaaggcaataa

SEQ ID NO: 1243000 - DNA, 15 bp, Homo sapiens
tcggggaaggcaata

SEQ ID NO: 1243001 - DNA, 15 bp, Homo sapiens
ctcggggaaggcaat

SEQ ID NO: 1243002 - DNA, 15 bp, Homo sapiens
tctcggggaaggcaa

SEQ ID NO: 1243003 - DNA, 15 bp, Homo sapiens
atctcggggaaggca

SEQ ID NO: 1243004 - DNA, 15 bp, Homo sapiens
catctcggggaaggc

SEQ ID NO: 1243005 - DNA, 15 bp, Homo sapiens
gcatctcggggaagg

SEQ ID NO: 1243006 - DNA, 15 bp, Homo sapiens
ggcatctcggggaag

SEQ ID NO: 1243007 - DNA, 15 bp, Homo sapiens
gggcatctcggggaa

SEQ ID NO: 1243008 - DNA, 15 bp, Homo sapiens
tgggcatctcgggga

SEQ ID NO: 1243009 - DNA, 15 bp, Homo sapiens
gtgggcatctcgggg

SEQ ID NO: 1243010 - DNA, 15 bp, Homo sapiens
agtgggcatctcggg

SEQ ID NO: 1243011 - DNA, 15 bp, Homo sapiens
aagtgggcatctcgg

SEQ ID NO: 1243012 - DNA, 15 bp, Homo sapiens
caagtgggcatctcg

SEQ ID NO: 1243013 - DNA, 15 bp, Homo sapiens
ccaagtgggcatctc

SEQ ID NO: 1243014 - DNA, 15 bp, Homo sapiens
tccaagtgggcatct

SEQ ID NO: 1243015 - DNA, 15 bp, Homo sapiens
ctccaagtgggcatc

SEQ ID NO: 1243016 - DNA, 15 bp, Homo sapiens
actccaagtgggcat

SEQ ID NO: 1243017 - DNA, 15 bp, Homo sapiens
tactccaagtgggca

SEQ ID NO: 1243018 - DNA, 15 bp, Homo sapiens
ttactccaagtgggc

SEQ ID NO: 1243019 - DNA, 15 bp, Homo sapiens
attactccaagtggg

SEQ ID NO: 1243020 - DNA, 15 bp, Homo sapiens
tattactccaagtgg

SEQ ID NO: 1243021 - DNA, 15 bp, Homo sapiens
atattactccaagtg

SEQ ID NO: 1243022 - DNA, 15 bp, Homo sapiens
gatattactccaagt

SEQ ID NO: 1243023 - DNA, 15 bp, Homo sapiens
tgatattactccaag

SEQ ID NO: 1243024 - DNA, 15 bp, Homo sapiens
ttgatattactccaa

SEQ ID NO: 1243025 - DNA, 15 bp, Homo sapiens
cttgatattactcca

SEQ ID NO: 1243026 - DNA, 15 bp, Homo sapiens
tcttgatattactcc

SEQ ID NO: 1243027 - DNA, 15 bp, Homo sapiens
ctcttgatattactc

SEQ ID NO: 1243028 - DNA, 15 bp, Homo sapiens
actcttgatattact

SEQ ID NO: 1243029 - DNA, 15 bp, Homo sapiens
cactcttgatattac

SEQ ID NO: 1243030 - DNA, 15 bp, Homo sapiens
gcactcttgatatta

SEQ ID NO: 1243031 - DNA, 15 bp, Homo sapiens
agcactcttgatatt

SEQ ID NO: 1243032 - DNA, 15 bp, Homo sapiens
aagcactcttgatat

SEQ ID NO: 1243033 - DNA, 15 bp, Homo sapiens
aaagcactcttgata

SEQ ID NO: 1243034 - DNA, 15 bp, Homo sapiens
gaaagcactcttgat

SEQ ID NO: 1243035 - DNA, 15 bp, Homo sapiens
agaaagcactcttga

SEQ ID NO: 1243036 - DNA, 15 bp, Homo sapiens
aagaaagcactcttg

SEQ ID NO: 1243037 - DNA, 15 bp, Homo sapiens
aaagaaagcactctt

SEQ ID NO: 1243038 - DNA, 15 bp, Homo sapiens
taaagaaagcactct

SEQ ID NO: 1243039 - DNA, 15 bp, Homo sapiens
ataaagaaagcactc

SEQ ID NO: 1243040 - DNA, 15 bp, Homo sapiens
gataaagaaagcact

SEQ ID NO: 1243041 - DNA, 15 bp, Homo sapiens
ggataaagaaagcac

SEQ ID NO: 1243042 - DNA, 15 bp, Homo sapiens
gggataaagaaagca

SEQ ID NO: 1243043 - DNA, 15 bp, Homo sapiens
agggataaagaaagc

SEQ ID NO: 1243044 - DNA, 15 bp, Homo sapiens
gagggataaagaaag

SEQ ID NO: 1243045 - DNA, 15 bp, Homo sapiens
tgagggataaagaaa

SEQ ID NO: 1243046 - DNA, 15 bp, Homo sapiens
ctgagggataaagaa

SEQ ID NO: 1243047 - DNA, 15 bp, Homo sapiens
gctgagggataaaga

SEQ ID NO: 1243048 - DNA, 15 bp, Homo sapiens
tgctgagggataaag

SEQ ID NO: 1243049 - DNA, 15 bp, Homo sapiens
ttgctgagggataaa

SEQ ID NO: 1243050 - DNA, 15 bp, Homo sapiens
tttgctgagggataa

SEQ ID NO: 1243051 - DNA, 15 bp, Homo sapiens
ctttgctgagggata

SEQ ID NO: 1243052 - DNA, 15 bp, Homo sapiens
tctttgctgagggat

SEQ ID NO: 1243053 - DNA, 15 bp, Homo sapiens
atctttgctgaggga

SEQ ID NO: 1243054 - DNA, 15 bp, Homo sapiens
catctttgctgaggg

SEQ ID NO: 1243055 - DNA, 15 bp, Homo sapiens
acatctttgctgagg

SEQ ID NO: 1243056 - DNA, 15 bp, Homo sapiens
cacatctttgctgag

SEQ ID NO: 1243057 - DNA, 15 bp, Homo sapiens
ccacatctttgctga

SEQ ID NO: 1243058 - DNA, 15 bp, Homo sapiens
accacatctttgctg

SEQ ID NO: 1243059 - DNA, 15 bp, Homo sapiens
caccacatctttgct

SEQ ID NO: 1243060 - DNA, 15 bp, Homo sapiens
tcaccacatctttgc

SEQ ID NO: 1243061 - DNA, 15 bp, Homo sapiens
ctcaccacatctttg

SEQ ID NO: 1243062 - DNA, 15 bp, Homo sapiens
gctcaccacatcttt

SEQ ID NO: 1243063 - DNA, 15 bp, Homo sapiens
cgctcaccacatctt

SEQ ID NO: 1243064 - DNA, 15 bp, Homo sapiens
acgctcaccacatct

SEQ ID NO: 1243065 - DNA, 15 bp, Homo sapiens
tacgctcaccacatc

SEQ ID NO: 1243066 - DNA, 15 bp, Homo sapiens
atacgctcaccacat

SEQ ID NO: 1243067 - DNA, 15 bp, Homo sapiens
tatacgctcaccaca

SEQ ID NO: 1243068 - DNA, 15 bp, Homo sapiens
atatacgctcaccac

SEQ ID NO: 1243069 - DNA, 15 bp, Homo sapiens
catatacgctcacca

SEQ ID NO: 1243070 - DNA, 15 bp, Homo sapiens
ccatatacgctcacc

SEQ ID NO: 1243071 - DNA, 15 bp, Homo sapiens
cccatatacgctcac

SEQ ID NO: 1243072 - DNA, 15 bp, Homo sapiens
acccatatacgctca

SEQ ID NO: 1243073 - DNA, 15 bp, Homo sapiens
gacccatatacgctc

SEQ ID NO: 1243074 - DNA, 15 bp, Homo sapiens
tgacccatatacgct

SEQ ID NO: 1243075 - DNA, 15 bp, Homo sapiens
ttgacccatatacgc

SEQ ID NO: 1243076 - DNA, 15 bp, Homo sapiens
attgacccatatacg

SEQ ID NO: 1243077 - DNA, 15 bp, Homo sapiens
aattgacccatatac

SEQ ID NO: 1243078 - DNA, 15 bp, Homo sapiens
aaattgacccatata

SEQ ID NO: 1243079 - DNA, 15 bp, Homo sapiens
caaattgacccatat

SEQ ID NO: 1243080 - DNA, 15 bp, Homo sapiens
acaaattgacccata

SEQ ID NO: 1243081 - DNA, 15 bp, Homo sapiens
tacaaattgacccat

SEQ ID NO: 1243082 - DNA, 15 bp, Homo sapiens
ttacaaattgaccca

SEQ ID NO: 1243083 - DNA, 15 bp, Homo sapiens
tttacaaattgaccc

SEQ ID NO: 1243084 - DNA, 15 bp, Homo sapiens
gtttacaaattgacc

SEQ ID NO: 1243085 - DNA, 15 bp, Homo sapiens
ggtttacaaattgac

SEQ ID NO: 1243086 - DNA, 15 bp, Homo sapiens
aggtttacaaattga

SEQ ID NO: 1243087 - DNA, 15 bp, Homo sapiens
taggtttacaaattg

SEQ ID NO: 1243088 - DNA, 15 bp, Homo sapiens
gtaggtttacaaatt

SEQ ID NO: 1243089 - DNA, 15 bp, Homo sapiens
tgtaggtttacaaat

SEQ ID NO: 1243090 - DNA, 15 bp, Homo sapiens
gtgtaggtttacaaa

SEQ ID NO: 1243091 - DNA, 15 bp, Homo sapiens
tgtgtaggtttacaa

SEQ ID NO: 1243092 - DNA, 15 bp, Homo sapiens
ttgtgtaggtttaca

SEQ ID NO: 1243093 - DNA, 15 bp, Homo sapiens
tttgtgtaggtttac

SEQ ID NO: 1243094 - DNA, 15 bp, Homo sapiens
gtttgtgtaggttta

SEQ ID NO: 1243095 - DNA, 15 bp, Homo sapiens
ggtttgtgtaggttt

SEQ ID NO: 1243096 - DNA, 15 bp, Homo sapiens
aggtttgtgtaggtt

SEQ ID NO: 1243097 - DNA, 15 bp, Homo sapiens
gaggtttgtgtaggt

SEQ ID NO: 1243098 - DNA, 15 bp, Homo sapiens
agaggtttgtgtagg

SEQ ID NO: 1243099 - DNA, 15 bp, Homo sapiens
aagaggtttgtgtag

SEQ ID NO: 1243100 - DNA, 15 bp, Homo sapiens
caagaggtttgtgta

SEQ ID NO: 1243101 - DNA, 15 bp, Homo sapiens
acaagaggtttgtgt

SEQ ID NO: 1243102 - DNA, 15 bp, Homo sapiens
aacaagaggtttgtg

SEQ ID NO: 1243103 - DNA, 15 bp, Homo sapiens
caacaagaggtttgt

SEQ ID NO: 1243104 - DNA, 15 bp, Homo sapiens
tcaacaagaggtttg

SEQ ID NO: 1243105 - DNA, 15 bp, Homo sapiens
ttcaacaagaggttt

SEQ ID NO: 1243106 - DNA, 15 bp, Homo sapiens
tttcaacaagaggtt

SEQ ID NO: 1243107 - DNA, 15 bp, Homo sapiens
ttttcaacaagaggt

SEQ ID NO: 1243108 - DNA, 15 bp, Homo sapiens
cttttcaacaagagg

SEQ ID NO: 1243109 - DNA, 15 bp, Homo sapiens
acttttcaacaagag

SEQ ID NO: 1243110 - DNA, 15 bp, Homo sapiens
tacttttcaacaaga

SEQ ID NO: 1243111 - DNA, 15 bp, Homo sapiens
ttacttttcaacaag

SEQ ID NO: 1243112 - DNA, 15 bp, Homo sapiens
tttacttttcaacaa

SEQ ID NO: 1243113 - DNA, 15 bp, Homo sapiens
ttttacttttcaaca

SEQ ID NO: 1243114 - DNA, 15 bp, Homo sapiens
tttttacttttcaac

SEQ ID NO: 1243115 - DNA, 15 bp, Homo sapiens
atttttacttttcaa

SEQ ID NO: 1243116 - DNA, 15 bp, Homo sapiens
aatttttacttttca

SEQ ID NO: 1243117 - DNA, 15 bp, Homo sapiens
gaatttttacttttc

SEQ ID NO: 1243118 - DNA, 15 bp, Homo sapiens
tgaatttttactttt

SEQ ID NO: 1243119 - DNA, 15 bp, Homo sapiens
atgaatttttacttt

SEQ ID NO: 1243120 - DNA, 15 bp, Homo sapiens
aatgaatttttactt

SEQ ID NO: 1243121 - DNA, 15 bp, Homo sapiens
aaatgaatttttact

SEQ ID NO: 1243122 - DNA, 15 bp, Homo sapiens
caaatgaatttttac

SEQ ID NO: 1243123 - DNA, 15 bp, Homo sapiens
acaaatgaattttta

SEQ ID NO: 1243124 - DNA, 15 bp, Homo sapiens
aacaaatgaattttt

SEQ ID NO: 1243125 - DNA, 15 bp, Homo sapiens
taacaaatgaatttt

SEQ ID NO: 1243126 - DNA, 15 bp, Homo sapiens
ttaacaaatgaattt

SEQ ID NO: 1243127 - DNA, 15 bp, Homo sapiens
tttaacaaatgaatt

SEQ ID NO: 1243128 - DNA, 15 bp, Homo sapiens
ttttaacaaatgaat

SEQ ID NO: 1243129 - DNA, 15 bp, Homo sapiens
cttttaacaaatgaa

SEQ ID NO: 1243130 - DNA, 15 bp, Homo sapiens
acttttaacaaatga

SEQ ID NO: 1243131 - DNA, 15 bp, Homo sapiens
tacttttaacaaatg

SEQ ID NO: 1243132 - DNA, 15 bp, Homo sapiens
atacttttaacaaat

SEQ ID NO: 1243133 - DNA, 15 bp, Homo sapiens
catacttttaacaaa

SEQ ID NO: 1243134 - DNA, 15 bp, Homo sapiens
tcatacttttaacaa

SEQ ID NO: 1243135 - DNA, 15 bp, Homo sapiens
atcatacttttaaca

SEQ ID NO: 1243136 - DNA, 15 bp, Homo sapiens
gatcatacttttaac

SEQ ID NO: 1243137 - DNA, 15 bp, Homo sapiens
ggatcatacttttaa

SEQ ID NO: 1243138 - DNA, 15 bp, Homo sapiens
aggatcatactttta

SEQ ID NO: 1243139 - DNA, 15 bp, Homo sapiens
taggatcatactttt

SEQ ID NO: 1243140 - DNA, 15 bp, Homo sapiens
ttaggatcatacttt

SEQ ID NO: 1243141 - DNA, 15 bp, Homo sapiens
attaggatcatactt

SEQ ID NO: 1243142 - DNA, 15 bp, Homo sapiens
gattaggatcatact

SEQ ID NO: 1243143 - DNA, 15 bp, Homo sapiens
tgattaggatcatac

SEQ ID NO: 1243144 - DNA, 15 bp, Homo sapiens
ctgattaggatcata

SEQ ID NO: 1243145 - DNA, 15 bp, Homo sapiens
cctgattaggatcat

SEQ ID NO: 1243146 - DNA, 15 bp, Homo sapiens
gcctgattaggatca

SEQ ID NO: 1243147 - DNA, 15 bp, Homo sapiens
agcctgattaggatc

SEQ ID NO: 1243148 - DNA, 15 bp, Homo sapiens
aagcctgattaggat

SEQ ID NO: 1243149 - DNA, 15 bp, Homo sapiens
caagcctgattagga

SEQ ID NO: 1243150 - DNA, 15 bp, Homo sapiens
acaagcctgattagg

SEQ ID NO: 1243151 - DNA, 15 bp, Homo sapiens
tacaagcctgattag

SEQ ID NO: 1243152 - DNA, 15 bp, Homo sapiens
ttacaagcctgatta

SEQ ID NO: 1243153 - DNA, 15 bp, Homo sapiens
tttacaagcctgatt

SEQ ID NO: 1243154 - DNA, 15 bp, Homo sapiens
atttacaagcctgat

SEQ ID NO: 1243155 - DNA, 15 bp, Homo sapiens
aatttacaagcctga

SEQ ID NO: 1243156 - DNA, 15 bp, Homo sapiens
taatttacaagcctg

SEQ ID NO: 1243157 - DNA, 15 bp, Homo sapiens
ttaatttacaagcct

SEQ ID NO: 1243158 - DNA, 15 bp, Homo sapiens
gttaatttacaagcc

SEQ ID NO: 1243159 - DNA, 15 bp, Homo sapiens
agttaatttacaagc

SEQ ID NO: 1243160 - DNA, 15 bp, Homo sapiens
aagttaatttacaag

SEQ ID NO: 1243161 - DNA, 15 bp, Homo sapiens
aaagttaatttacaa

SEQ ID NO: 1243162 - DNA, 15 bp, Homo sapiens
aaaagttaatttaca

SEQ ID NO: 1243163 - DNA, 15 bp, Homo sapiens
caaaagttaatttac

SEQ ID NO: 1243164 - DNA, 15 bp, Homo sapiens
tcaaaagttaattta

SEQ ID NO: 1243165 - DNA, 15 bp, Homo sapiens
ctcaaaagttaattt

SEQ ID NO: 1243166 - DNA, 15 bp, Homo sapiens
cctcaaaagttaatt

SEQ ID NO: 1243167 - DNA, 15 bp, Homo sapiens
gcctcaaaagttaat

SEQ ID NO: 1243168 - DNA, 15 bp, Homo sapiens
agcctcaaaagttaa

SEQ ID NO: 1243169 - DNA, 15 bp, Homo sapiens
gagcctcaaaagtta

SEQ ID NO: 1243170 - DNA, 15 bp, Homo sapiens
agagcctcaaaagtt

SEQ ID NO: 1243171 - DNA, 15 bp, Homo sapiens
gagagcctcaaaagt

SEQ ID NO: 1243172 - DNA, 15 bp, Homo sapiens
agagagcctcaaaag

SEQ ID NO: 1243173 - DNA, 15 bp, Homo sapiens
aagagagcctcaaaa

SEQ ID NO: 1243174 - DNA, 15 bp, Homo sapiens
taagagagcctcaaa

SEQ ID NO: 1243175 - DNA, 15 bp, Homo sapiens
ctaagagagcctcaa

SEQ ID NO: 1243176 - DNA, 15 bp, Homo sapiens
gctaagagagcctca

SEQ ID NO: 1243177 - DNA, 15 bp, Homo sapiens
tgctaagagagcctc

SEQ ID NO: 1243178 - DNA, 15 bp, Homo sapiens
ttgctaagagagcct

SEQ ID NO: 1243179 - DNA, 15 bp, Homo sapiens
attgctaagagagcc

SEQ ID NO: 1243180 - DNA, 15 bp, Homo sapiens
gattgctaagagagc

SEQ ID NO: 1243181 - DNA, 15 bp, Homo sapiens
tgattgctaagagag

SEQ ID NO: 1243182 - DNA, 15 bp, Homo sapiens
ttgattgctaagaga

SEQ ID NO: 1243183 - DNA, 15 bp, Homo sapiens
tttgattgctaagag

SEQ ID NO: 1243184 - DNA, 15 bp, Homo sapiens
ttttgattgctaaga

SEQ ID NO: 1243185 - DNA, 15 bp, Homo sapiens
attttgattgctaag

SEQ ID NO: 1243186 - DNA, 15 bp, Homo sapiens
aattttgattgctaa

SEQ ID NO: 1243187 - DNA, 15 bp, Homo sapiens
taattttgattgcta

SEQ ID NO: 1243188 - DNA, 15 bp, Homo sapiens
ataattttgattgct

SEQ ID NO: 1243189 - DNA, 15 bp, Homo sapiens
aataattttgattgc

SEQ ID NO: 1243190 - DNA, 15 bp, Homo sapiens
caataattttgattg

SEQ ID NO: 1243191 - DNA, 15 bp, Homo sapiens
ccaataattttgatt

SEQ ID NO: 1243192 - DNA, 15 bp, Homo sapiens
accaataattttgat

SEQ ID NO: 1243193 - DNA, 15 bp, Homo sapiens
aaccaataattttga

SEQ ID NO: 1243194 - DNA, 15 bp, Homo sapiens
aaaccaataattttg

SEQ ID NO: 1243195 - DNA, 15 bp, Homo sapiens
gaaaccaataatttt

SEQ ID NO: 1243196 - DNA, 15 bp, Homo sapiens
agaaaccaataattt

SEQ ID NO: 1243197 - DNA, 15 bp, Homo sapiens
tagaaaccaataatt

SEQ ID NO: 1243198 - DNA, 15 bp, Homo sapiens
ttagaaaccaataat

SEQ ID NO: 1243199 - DNA, 15 bp, Homo sapiens
cttagaaaccaataa

SEQ ID NO: 1243200 - DNA, 15 bp, Homo sapiens
ccttagaaaccaata

SEQ ID NO: 1243201 - DNA, 15 bp, Homo sapiens
tccttagaaaccaat

SEQ ID NO: 1243202 - DNA, 15 bp, Homo sapiens
atccttagaaaccaa

SEQ ID NO: 1243203 - DNA, 15 bp, Homo sapiens
gatccttagaaacca

SEQ ID NO: 1243204 - DNA, 15 bp, Homo sapiens
ggatccttagaaacc

SEQ ID NO: 1243205 - DNA, 15 bp, Homo sapiens
tggatccttagaaac

SEQ ID NO: 1243206 - DNA, 15 bp, Homo sapiens
atggatccttagaaa

SEQ ID NO: 1243207 - DNA, 15 bp, Homo sapiens
tatggatccttagaa

SEQ ID NO: 1243208 - DNA, 15 bp, Homo sapiens
gtatggatccttaga

SEQ ID NO: 1243209 - DNA, 15 bp, Homo sapiens
agtatggatccttag

SEQ ID NO: 1243210 - DNA, 15 bp, Homo sapiens
tagtatggatcctta

SEQ ID NO: 1243211 - DNA, 15 bp, Homo sapiens
ctagtatggatcctt

SEQ ID NO: 1243212 - DNA, 15 bp, Homo sapiens
actagtatggatcct

SEQ ID NO: 1243213 - DNA, 15 bp, Homo sapiens
tactagtatggatcc

SEQ ID NO: 1243214 - DNA, 15 bp, Homo sapiens
ttactagtatggatc

SEQ ID NO: 1243215 - DNA, 15 bp, Homo sapiens
tttactagtatggat

SEQ ID NO: 1243216 - DNA, 15 bp, Homo sapiens
atttactagtatgga

SEQ ID NO: 1243217 - DNA, 15 bp, Homo sapiens
aatttactagtatgg

SEQ ID NO: 1243218 - DNA, 15 bp, Homo sapiens
taatttactagtatg

SEQ ID NO: 1243219 - DNA, 15 bp, Homo sapiens
ctaatttactagtat

SEQ ID NO: 1243220 - DNA, 15 bp, Homo sapiens
tctaatttactagta

SEQ ID NO: 1243221 - DNA, 15 bp, Homo sapiens
ttctaatttactagt

SEQ ID NO: 1243222 - DNA, 15 bp, Homo sapiens
tttctaatttactag

SEQ ID NO: 1243223 - DNA, 15 bp, Homo sapiens
ctttctaatttacta

SEQ ID NO: 1243224 - DNA, 15 bp, Homo sapiens
tctttctaatttact

SEQ ID NO: 1243225 - DNA, 15 bp, Homo sapiens
gtctttctaatttac

SEQ ID NO: 1243226 - DNA, 15 bp, Homo sapiens
cgtctttctaattta

SEQ ID NO: 1243227 - DNA, 15 bp, Homo sapiens
gcgtctttctaattt

SEQ ID NO: 1243228 - DNA, 15 bp, Homo sapiens
ggcgtctttctaatt

SEQ ID NO: 1243229 - DNA, 15 bp, Homo sapiens
tggcgtctttctaat

SEQ ID NO: 1243230 - DNA, 15 bp, Homo sapiens
ttggcgtctttctaa

SEQ ID NO: 1243231 - DNA, 15 bp, Homo sapiens
attggcgtctttcta

SEQ ID NO: 1243232 - DNA, 15 bp, Homo sapiens
tattggcgtctttct

SEQ ID NO: 1243233 - DNA, 15 bp, Homo sapiens
ttattggcgtctttc

SEQ ID NO: 1243234 - DNA, 15 bp, Homo sapiens
cttattggcgtcttt

SEQ ID NO: 1243235 - DNA, 15 bp, Homo sapiens
ccttattggcgtctt

SEQ ID NO: 1243236 - DNA, 15 bp, Homo sapiens
tccttattggcgtct

SEQ ID NO: 1243237 - DNA, 15 bp, Homo sapiens
ttccttattggcgtc

SEQ ID NO: 1243238 - DNA, 15 bp, Homo sapiens
tttccttattggcgt

SEQ ID NO: 1243239 - DNA, 15 bp, Homo sapiens
atttccttattggcg

SEQ ID NO: 1243240 - DNA, 15 bp, Homo sapiens
aatttccttattggc

SEQ ID NO: 1243241 - DNA, 15 bp, Homo sapiens
taatttccttattgg

SEQ ID NO: 1243242 - DNA, 15 bp, Homo sapiens
gtaatttccttattg

SEQ ID NO: 1243243 - DNA, 15 bp, Homo sapiens
tgtaatttccttatt

SEQ ID NO: 1243244 - DNA, 15 bp, Homo sapiens
atgtaatttccttat

SEQ ID NO: 1243245 - DNA, 15 bp, Homo sapiens
catgtaatttcctta

SEQ ID NO: 1243246 - DNA, 15 bp, Homo sapiens
gcatgtaatttcctt

SEQ ID NO: 1243247 - DNA, 15 bp, Homo sapiens
ggcatgtaatttcct

SEQ ID NO: 1243248 - DNA, 15 bp, Homo sapiens
tggcatgtaatttcc

SEQ ID NO: 1243249 - DNA, 15 bp, Homo sapiens
ttggcatgtaatttc

SEQ ID NO: 1243250 - DNA, 15 bp, Homo sapiens
tttggcatgtaattt

SEQ ID NO: 1243251 - DNA, 15 bp, Homo sapiens
gtttggcatgtaatt

SEQ ID NO: 1243252 - DNA, 15 bp, Homo sapiens
agtttggcatgtaat

SEQ ID NO: 1243253 - DNA, 15 bp, Homo sapiens
cagtttggcatgtaa

SEQ ID NO: 1243254 - DNA, 15 bp, Homo sapiens
ccagtttggcatgta

SEQ ID NO: 1243255 - DNA, 15 bp, Homo sapiens
tccagtttggcatgt

SEQ ID NO: 1243256 - DNA, 15 bp, Homo sapiens
ctccagtttggcatg

SEQ ID NO: 1243257 - DNA, 15 bp, Homo sapiens
cctccagtttggcat

SEQ ID NO: 1243258 - DNA, 15 bp, Homo sapiens
ccctccagtttggca

SEQ ID NO: 1243259 - DNA, 15 bp, Homo sapiens
accctccagtttggc

SEQ ID NO: 1243260 - DNA, 15 bp, Homo sapiens
aaccctccagtttgg

SEQ ID NO: 1243261 - DNA, 15 bp, Homo sapiens
taaccctccagtttg

SEQ ID NO: 1243262 - DNA, 15 bp, Homo sapiens
ataaccctccagttt

SEQ ID NO: 1243263 - DNA, 15 bp, Homo sapiens
aataaccctccagtt

SEQ ID NO: 1243264 - DNA, 15 bp, Homo sapiens
aaataaccctccagt

SEQ ID NO: 1243265 - DNA, 15 bp, Homo sapiens
aaaataaccctccag

SEQ ID NO: 1243266 - DNA, 15 bp, Homo sapiens
aaaaataaccctcca

SEQ ID NO: 1243267 - DNA, 15 bp, Homo sapiens
aaaaaataaccctcc

SEQ ID NO: 1243268 - DNA, 15 bp, Homo sapiens
taaaaaataaccctc

SEQ ID NO: 1243269 - DNA, 15 bp, Homo sapiens
ttaaaaaataaccct

SEQ ID NO: 1243270 - DNA, 15 bp, Homo sapiens
gttaaaaaataaccc

SEQ ID NO: 1243271 - DNA, 15 bp, Homo sapiens
tgttaaaaaataacc

SEQ ID NO: 1243272 - DNA, 15 bp, Homo sapiens
ttgttaaaaaataac

SEQ ID NO: 1243273 - DNA, 15 bp, Homo sapiens
tttgttaaaaaataa

SEQ ID NO: 1243274 - DNA, 15 bp, Homo sapiens
atttgttaaaaaata

SEQ ID NO: 1243275 - DNA, 15 bp, Homo sapiens
aatttgttaaaaaat

SEQ ID NO: 1243276 - DNA, 15 bp, Homo sapiens
caatttgttaaaaaa

SEQ ID NO: 1243277 - DNA, 15 bp, Homo sapiens
tcaatttgttaaaaa

SEQ ID NO: 1243278 - DNA, 15 bp, Homo sapiens
gtcaatttgttaaaa

SEQ ID NO: 1243279 - DNA, 15 bp, Homo sapiens
agtcaatttgttaaa

SEQ ID NO: 1243280 - DNA, 15 bp, Homo sapiens
gagtcaatttgttaa

SEQ ID NO: 1243281 - DNA, 15 bp, Homo sapiens
tgagtcaatttgtta

SEQ ID NO: 1243282 - DNA, 15 bp, Homo sapiens
ttgagtcaatttgtt

SEQ ID NO: 1243283 - DNA, 15 bp, Homo sapiens
tttgagtcaatttgt

SEQ ID NO: 1243284 - DNA, 15 bp, Homo sapiens
ctttgagtcaatttg

SEQ ID NO: 1243285 - DNA, 15 bp, Homo sapiens
cctttgagtcaattt

SEQ ID NO: 1243286 - DNA, 15 bp, Homo sapiens
ccctttgagtcaatt

SEQ ID NO: 1243287 - DNA, 15 bp, Homo sapiens
tccctttgagtcaat

SEQ ID NO: 1243288 - DNA, 15 bp, Homo sapiens
ttccctttgagtcaa

SEQ ID NO: 1243289 - DNA, 15 bp, Homo sapiens
tttccctttgagtca

SEQ ID NO: 1243290 - DNA, 15 bp, Homo sapiens
tctttccctttgagt

SEQ ID NO: 1243291 - DNA, 15 bp, Homo sapiens
ttctttccctttgag

SEQ ID NO: 1243292 - DNA, 15 bp, Homo sapiens
tttctttccctttga

SEQ ID NO: 1243293 - DNA, 15 bp, Homo sapiens
atttctttccctttg

SEQ ID NO: 1243294 - DNA, 15 bp, Homo sapiens
catttctttcccttt

SEQ ID NO: 1243295 - DNA, 15 bp, Homo sapiens
tcatttctttccctt

SEQ ID NO: 1243296 - DNA, 15 bp, Homo sapiens
atcatttctttccct

SEQ ID NO: 1243297 - DNA, 15 bp, Homo sapiens
aatcatttctttccc

SEQ ID NO: 1243298 - DNA, 15 bp, Homo sapiens
aaatcatttctttcc

SEQ ID NO: 1243299 - DNA, 15 bp, Homo sapiens
taaatcatttctttc

SEQ ID NO: 1243300 - DNA, 15 bp, Homo sapiens
gtttaaatcatttct

SEQ ID NO: 1243301 - DNA, 15 bp, Homo sapiens
tgtttaaatcatttc

SEQ ID NO: 1243302 - DNA, 15 bp, Homo sapiens
ttgtttaaatcattt

SEQ ID NO: 1243303 - DNA, 15 bp, Homo sapiens
attgtttaaatcatt

SEQ ID NO: 1243304 - DNA, 15 bp, Homo sapiens
aattgtttaaatcat

SEQ ID NO: 1243305 - DNA, 15 bp, Homo sapiens
gaattgtttaaatca

SEQ ID NO: 1243306 - DNA, 15 bp, Homo sapiens
tgaattgtttaaatc

SEQ ID NO: 1243307 - DNA, 15 bp, Homo sapiens
ctgaattgtttaaat

SEQ ID NO: 1243308 - DNA, 15 bp, Homo sapiens
gctgaattgtttaaa

SEQ ID NO: 1243309 - DNA, 15 bp, Homo sapiens
agctgaattgtttaa

SEQ ID NO: 1243310 - DNA, 15 bp, Homo sapiens
gagctgaattgttta

SEQ ID NO: 1243311 - DNA, 15 bp, Homo sapiens
agagctgaattgttt

SEQ ID NO: 1243312 - DNA, 15 bp, Homo sapiens
tagagctgaattgtt

SEQ ID NO: 1243313 - DNA, 15 bp, Homo sapiens
atagagctgaattgt

SEQ ID NO: 1243314 - DNA, 15 bp, Homo sapiens
catagagctgaattg

SEQ ID NO: 1243315 - DNA, 15 bp, Homo sapiens
acatagagctgaatt

SEQ ID NO: 1243316 - DNA, 15 bp, Homo sapiens
aacatagagctgaat

SEQ ID NO: 1243317 - DNA, 15 bp, Homo sapiens
gaacatagagctgaa

SEQ ID NO: 1243318 - DNA, 15 bp, Homo sapiens
tgaacatagagctga

SEQ ID NO: 1243319 - DNA, 15 bp, Homo sapiens
ctgaacatagagctg

SEQ ID NO: 1243320 - DNA, 15 bp, Homo sapiens
actgaacatagagct

SEQ ID NO: 1243321 - DNA, 15 bp, Homo sapiens
cactgaacatagagc

SEQ ID NO: 1243322 - DNA, 15 bp, Homo sapiens
acactgaacatagag

SEQ ID NO: 1243323 - DNA, 15 bp, Homo sapiens
cacactgaacataga

SEQ ID NO: 1243324 - DNA, 15 bp, Homo sapiens
acacactgaacatag

SEQ ID NO: 1243325 - DNA, 15 bp, Homo sapiens
tacacactgaacata

SEQ ID NO: 1243326 - DNA, 15 bp, Homo sapiens
ttacacactgaacat

SEQ ID NO: 1243327 - DNA, 15 bp, Homo sapiens
attacacactgaaca

SEQ ID NO: 1243328 - DNA, 15 bp, Homo sapiens
aattacacactgaac

SEQ ID NO: 1243329 - DNA, 15 bp, Homo sapiens
taattacacactgaa

SEQ ID NO: 1243330 - DNA, 15 bp, Homo sapiens
ttaattacacactga

SEQ ID NO: 1243331 - DNA, 15 bp, Homo sapiens
gttaattacacactg

SEQ ID NO: 1243332 - DNA, 15 bp, Homo sapiens
ggttaattacacact

SEQ ID NO: 1243333 - DNA, 15 bp, Homo sapiens
tggttaattacacac

SEQ ID NO: 1243334 - DNA, 15 bp, Homo sapiens
ctggttaattacaca

SEQ ID NO: 1243335 - DNA, 15 bp, Homo sapiens
tctggttaattacac

SEQ ID NO: 1243336 - DNA, 15 bp, Homo sapiens
ttctggttaattaca

SEQ ID NO: 1243337 - DNA, 15 bp, Homo sapiens
tttctggttaattac

SEQ ID NO: 1243338 - DNA, 15 bp, Homo sapiens
gtttctggttaatta

SEQ ID NO: 1243339 - DNA, 15 bp, Homo sapiens
agtttctggttaatt

SEQ ID NO: 1243340 - DNA, 15 bp, Homo sapiens
aagtttctggttaat

SEQ ID NO: 1243341 - DNA, 15 bp, Homo sapiens
gaagtttctggttaa

SEQ ID NO: 1243342 - DNA, 15 bp, Homo sapiens
tgaagtttctggtta

SEQ ID NO: 1243343 - DNA, 15 bp, Homo sapiens
gtgaagtttctggtt

SEQ ID NO: 1243344 - DNA, 15 bp, Homo sapiens
agtgaagtttctggt

SEQ ID NO: 1243345 - DNA, 15 bp, Homo sapiens
gagtgaagtttctgg

SEQ ID NO: 1243346 - DNA, 15 bp, Homo sapiens
tgagtgaagtttctg

SEQ ID NO: 1243347 - DNA, 15 bp, Homo sapiens
atgagtgaagtttct

SEQ ID NO: 1243348 - DNA, 15 bp, Homo sapiens
tatgagtgaagtttc

SEQ ID NO: 1243349 - DNA, 15 bp, Homo sapiens
atatgagtgaagttt

SEQ ID NO: 1243350 - DNA, 15 bp, Homo sapiens
tatatgagtgaagtt

SEQ ID NO: 1243351 - DNA, 15 bp, Homo sapiens
ttatatgagtgaagt

SEQ ID NO: 1243352 - DNA, 15 bp, Homo sapiens
cttatatgagtgaag

SEQ ID NO: 1243353 - DNA, 15 bp, Homo sapiens
tcttatatgagtgaa

SEQ ID NO: 1243354 - DNA, 15 bp, Homo sapiens
gtcttatatgagtga

SEQ ID NO: 1243355 - DNA, 15 bp, Homo sapiens
agtcttatatgagtg

SEQ ID NO: 1243356 - DNA, 15 bp, Homo sapiens
aagtcttatatgagt

SEQ ID NO: 1243357 - DNA, 15 bp, Homo sapiens
aaagtcttatatgag

SEQ ID NO: 1243358 - DNA, 15 bp, Homo sapiens
aaaagtcttatatga

SEQ ID NO: 1243359 - DNA, 15 bp, Homo sapiens
caaaagtcttatatg

SEQ ID NO: 1243360 - DNA, 15 bp, Homo sapiens
gcaaaagtcttatat

SEQ ID NO: 1243361 - DNA, 15 bp, Homo sapiens
ggcaaaagtcttata

SEQ ID NO: 1243362 - DNA, 15 bp, Homo sapiens
tggcaaaagtcttat

SEQ ID NO: 1243363 - DNA, 15 bp, Homo sapiens
ttggcaaaagtctta

SEQ ID NO: 1243364 - DNA, 15 bp, Homo sapiens
cttggcaaaagtctt

SEQ ID NO: 1243365 - DNA, 15 bp, Homo sapiens
acttggcaaaagtct

SEQ ID NO: 1243366 - DNA, 15 bp, Homo sapiens
tacttggcaaaagtc

SEQ ID NO: 1243367 - DNA, 15 bp, Homo sapiens
ttacttggcaaaagt

SEQ ID NO: 1243368 - DNA, 15 bp, Homo sapiens
cttacttggcaaaag

SEQ ID NO: 1243369 - DNA, 15 bp, Homo sapiens
acttacttggcaaaa

SEQ ID NO: 1243370 - DNA, 15 bp, Homo sapiens
tacttacttggcaaa

SEQ ID NO: 1243371 - DNA, 15 bp, Homo sapiens
ctacttacttggcaa

SEQ ID NO: 1243372 - DNA, 15 bp, Homo sapiens
gctacttacttggca

SEQ ID NO: 1243373 - DNA, 15 bp, Homo sapiens
tgctacttacttggc

SEQ ID NO: 1243374 - DNA, 15 bp, Homo sapiens
ctgctacttacttgg

SEQ ID NO: 1243375 - DNA, 15 bp, Homo sapiens
actgctacttacttg

SEQ ID NO: 1243376 - DNA, 15 bp, Homo sapiens
aactgctacttactt

SEQ ID NO: 1243377 - DNA, 15 bp, Homo sapiens
taactgctacttact

SEQ ID NO: 1243378 - DNA, 15 bp, Homo sapiens
gtaactgctacttac

SEQ ID NO: 1243379 - DNA, 15 bp, Homo sapiens
tgtaactgctactta

SEQ ID NO: 1243380 - DNA, 15 bp, Homo sapiens
atgtaactgctactt

SEQ ID NO: 1243381 - DNA, 15 bp, Homo sapiens
tatgtaactgctact

SEQ ID NO: 1243382 - DNA, 15 bp, Homo sapiens
ttatgtaactgctac

SEQ ID NO: 1243383 - DNA, 15 bp, Homo sapiens
gttatgtaactgcta

SEQ ID NO: 1243384 - DNA, 15 bp, Homo sapiens
agttatgtaactgct

SEQ ID NO: 1243385 - DNA, 15 bp, Homo sapiens
gagttatgtaactgc

SEQ ID NO: 1243386 - DNA, 15 bp, Homo sapiens
ggagttatgtaactg

SEQ ID NO: 1243387 - DNA, 15 bp, Homo sapiens
gggagttatgtaact

SEQ ID NO: 1243388 - DNA, 15 bp, Homo sapiens
tgggagttatgtaac

SEQ ID NO: 1243389 - DNA, 15 bp, Homo sapiens
gtgggagttatgtaa

SEQ ID NO: 1243390 - DNA, 15 bp, Homo sapiens
tgtgggagttatgta

SEQ ID NO: 1243391 - DNA, 15 bp, Homo sapiens
gtgtgggagttatgt

SEQ ID NO: 1243392 - DNA, 15 bp, Homo sapiens
ggtgtgggagttatg

SEQ ID NO: 1243393 - DNA, 15 bp, Homo sapiens
gggtgtgggagttat

SEQ ID NO: 1243394 - DNA, 15 bp, Homo sapiens
ggggtgtgggagtta

SEQ ID NO: 1243395 - DNA, 15 bp, Homo sapiens
tggggtgtgggagtt

SEQ ID NO: 1243396 - DNA, 15 bp, Homo sapiens
gtggggtgtgggagt

SEQ ID NO: 1243397 - DNA, 15 bp, Homo sapiens
ggtggggtgtgggag

SEQ ID NO: 1243398 - DNA, 15 bp, Homo sapiens
gggtggggtgtggga

SEQ ID NO: 1243399 - DNA, 15 bp, Homo sapiens
ggggtggggtgtggg

SEQ ID NO: 1243400 - DNA, 15 bp, Homo sapiens
gggggtggggtgtgg

SEQ ID NO: 1243401 - DNA, 15 bp, Homo sapiens
ggggggtggggtgtg

SEQ ID NO: 1243402 - DNA, 15 bp, Homo sapiens
tggggggtggggtgt

SEQ ID NO: 1243403 - DNA, 15 bp, Homo sapiens
atggggggtggggtg

SEQ ID NO: 1243404 - DNA, 15 bp, Homo sapiens
aatggggggtggggt

SEQ ID NO: 1243405 - DNA, 15 bp, Homo sapiens
aaatggggggtgggg

SEQ ID NO: 1243406 - DNA, 15 bp, Homo sapiens
caaatggggggtggg

SEQ ID NO: 1243407 - DNA, 15 bp, Homo sapiens
acaaatggggggtgg

SEQ ID NO: 1243408 - DNA, 15 bp, Homo sapiens
gacaaatggggggtg

SEQ ID NO: 1243409 - DNA, 15 bp, Homo sapiens
tgacaaatggggggt

SEQ ID NO: 1243410 - DNA, 15 bp, Homo sapiens
ctgacaaatgggggg

SEQ ID NO: 1243411 - DNA, 15 bp, Homo sapiens
gctgacaaatggggg

SEQ ID NO: 1243412 - DNA, 15 bp, Homo sapiens
ggctgacaaatgggg

SEQ ID NO: 1243413 - DNA, 15 bp, Homo sapiens
gggctgacaaatggg

SEQ ID NO: 1243414 - DNA, 15 bp, Homo sapiens
cgggctgacaaatgg

SEQ ID NO: 1243415 - DNA, 15 bp, Homo sapiens
ccgggctgacaaatg

SEQ ID NO: 1243416 - DNA, 15 bp, Homo sapiens
cccgggctgacaaat

SEQ ID NO: 1243417 - DNA, 15 bp, Homo sapiens
gcccgggctgacaaa

SEQ ID NO: 1243418 - DNA, 15 bp, Homo sapiens
tgcccgggctgacaa

SEQ ID NO: 1243419 - DNA, 15 bp, Homo sapiens
atgcccgggctgaca

SEQ ID NO: 1243420 - DNA, 15 bp, Homo sapiens
tatgcccgggctgac

SEQ ID NO: 1243421 - DNA, 15 bp, Homo sapiens
ttatgcccgggctga

SEQ ID NO: 1243422 - DNA, 15 bp, Homo sapiens
attatgcccgggctg

SEQ ID NO: 1243423 - DNA, 15 bp, Homo sapiens
aattatgcccgggct

SEQ ID NO: 1243424 - DNA, 15 bp, Homo sapiens
aaattatgcccgggc

SEQ ID NO: 1243425 - DNA, 15 bp, Homo sapiens
aaaattatgcccggg

SEQ ID NO: 1243426 - DNA, 15 bp, Homo sapiens
aaaaattatgcccgg

SEQ ID NO: 1243427 - DNA, 15 bp, Homo sapiens
aaaaaattatgcccg

SEQ ID NO: 1243428 - DNA, 15 bp, Homo sapiens
taaaaaattatgccc

SEQ ID NO: 1243429 - DNA, 15 bp, Homo sapiens
ttaaaaaattatgcc

SEQ ID NO: 1243430 - DNA, 15 bp, Homo sapiens
tttaaaaaattatgc

SEQ ID NO: 1243431 - DNA, 15 bp, Homo sapiens
gtttaaaaaattatg

SEQ ID NO: 1243432 - DNA, 15 bp, Homo sapiens
tgtttaaaaaattat

SEQ ID NO: 1243433 - DNA, 15 bp, Homo sapiens
atgtttaaaaaatta

SEQ ID NO: 1243434 - DNA, 15 bp, Homo sapiens
aatgtttaaaaaatt

SEQ ID NO: 1243435 - DNA, 15 bp, Homo sapiens
aaatgtttaaaaaat

SEQ ID NO: 1243436 - DNA, 15 bp, Homo sapiens
aaaatgtttaaaaaa

SEQ ID NO: 1243437 - DNA, 15 bp, Homo sapiens
aaaaatgtttaaaaa

SEQ ID NO: 1243438 - DNA, 15 bp, Homo sapiens
aaaaaatgtttaaaa

SEQ ID NO: 1243439 - DNA, 15 bp, Homo sapiens
taaaaaatgtttaaa

SEQ ID NO: 1243440 - DNA, 15 bp, Homo sapiens
ttaaaaaatgtttaa

SEQ ID NO: 1243441 - DNA, 15 bp, Homo sapiens
attaaaaaatgttta

SEQ ID NO: 1243442 - DNA, 15 bp, Homo sapiens
tattaaaaaatgttt

SEQ ID NO: 1243443 - DNA, 15 bp, Homo sapiens
ttattaaaaaatgtt

SEQ ID NO: 1243444 - DNA, 15 bp, Homo sapiens
attattaaaaaatgt

SEQ ID NO: 1243445 - DNA, 15 bp, Homo sapiens
gattattaaaaaatg

SEQ ID NO: 1243446 - DNA, 15 bp, Homo sapiens
ggattattaaaaaat

SEQ ID NO: 1243447 - DNA, 15 bp, Homo sapiens
gggattattaaaaaa

SEQ ID NO: 1243448 - DNA, 15 bp, Homo sapiens
tgggattattaaaaa

SEQ ID NO: 1243449 - DNA, 15 bp, Homo sapiens
atgggattattaaaa

SEQ ID NO: 1243450 - DNA, 15 bp, Homo sapiens
tatgggattattaaa

SEQ ID NO: 1243451 - DNA, 15 bp, Homo sapiens
gtatgggattattaa

SEQ ID NO: 1243452 - DNA, 15 bp, Homo sapiens
ggtatgggattatta

SEQ ID NO: 1243453 - DNA, 15 bp, Homo sapiens
aggtatgggattatt

SEQ ID NO: 1243454 - DNA, 15 bp, Homo sapiens
taggtatgggattat

SEQ ID NO: 1243455 - DNA, 15 bp, Homo sapiens
ataggtatgggatta

SEQ ID NO: 1243456 - DNA, 15 bp, Homo sapiens
tataggtatgggatt

SEQ ID NO: 1243457 - DNA, 15 bp, Homo sapiens
atataggtatgggat

SEQ ID NO: 1243458 - DNA, 15 bp, Homo sapiens
gatataggtatggga

SEQ ID NO: 1243459 - DNA, 15 bp, Homo sapiens
agatataggtatggg

SEQ ID NO: 1243460 - DNA, 15 bp, Homo sapiens
tagatataggtatgg

SEQ ID NO: 1243461 - DNA, 15 bp, Homo sapiens
atagatataggtatg

SEQ ID NO: 1243462 - DNA, 15 bp, Homo sapiens
aatagatataggtat

SEQ ID NO: 1243463 - DNA, 15 bp, Homo sapiens
taatagatataggta

SEQ ID NO: 1243464 - DNA, 15 bp, Homo sapiens
ataatagatataggt

SEQ ID NO: 1243465 - DNA, 15 bp, Homo sapiens
tataatagatatagg

SEQ ID NO: 1243466 - DNA, 15 bp, Homo sapiens
ttataatagatatag

SEQ ID NO: 1243467 - DNA, 15 bp, Homo sapiens
cttataatagatata

SEQ ID NO: 1243468 - DNA, 15 bp, Homo sapiens
acttataatagatat

SEQ ID NO: 1243469 - DNA, 15 bp, Homo sapiens
tacttataatagata

SEQ ID NO: 1243470 - DNA, 15 bp, Homo sapiens
atacttataatagat

SEQ ID NO: 1243471 - DNA, 15 bp, Homo sapiens
aatacttataataga

SEQ ID NO: 1243472 - DNA, 15 bp, Homo sapiens
aaatacttataatag

SEQ ID NO: 1243473 - DNA, 15 bp, Homo sapiens
taaatacttataata

SEQ ID NO: 1243474 - DNA, 15 bp, Homo sapiens
gtaaatacttataat

SEQ ID NO: 1243475 - DNA, 15 bp, Homo sapiens
ggtaaatacttataa

SEQ ID NO: 1243476 - DNA, 15 bp, Homo sapiens
gggtaaatacttata

SEQ ID NO: 1243477 - DNA, 15 bp, Homo sapiens
ggggtaaatacttat

SEQ ID NO: 1243478 - DNA, 15 bp, Homo sapiens
tggggtaaatactta

SEQ ID NO: 1243479 - DNA, 15 bp, Homo sapiens
ttggggtaaatactt

SEQ ID NO: 1243480 - DNA, 15 bp, Homo sapiens
attggggtaaatact

SEQ ID NO: 1243481 - DNA, 15 bp, Homo sapiens
cattggggtaaatac

SEQ ID NO: 1243482 - DNA, 15 bp, Homo sapiens
ccattggggtaaata

SEQ ID NO: 1243483 - DNA, 15 bp, Homo sapiens
accattggggtaaat

SEQ ID NO: 1243484 - DNA, 15 bp, Homo sapiens
aaccattggggtaaa

SEQ ID NO: 1243485 - DNA, 15 bp, Homo sapiens
taaccattggggtaa

SEQ ID NO: 1243486 - DNA, 15 bp, Homo sapiens
ataaccattggggta

SEQ ID NO: 1243487 - DNA, 15 bp, Homo sapiens
gataaccattggggt

SEQ ID NO: 1243488 - DNA, 15 bp, Homo sapiens
tgataaccattgggg

SEQ ID NO: 1243489 - DNA, 15 bp, Homo sapiens
atgataaccattggg

SEQ ID NO: 1243490 - DNA, 15 bp, Homo sapiens
aatgataaccattgg

SEQ ID NO: 1243491 - DNA, 15 bp, Homo sapiens
taatgataaccattg

SEQ ID NO: 1243492 - DNA, 15 bp, Homo sapiens
ataatgataaccatt

SEQ ID NO: 1243493 - DNA, 15 bp, Homo sapiens
tataatgataaccat

SEQ ID NO: 1243494 - DNA, 15 bp, Homo sapiens
ttataatgataacca

SEQ ID NO: 1243495 - DNA, 15 bp, Homo sapiens
gttataatgataacc

SEQ ID NO: 1243496 - DNA, 15 bp, Homo sapiens
ggttataatgataac

SEQ ID NO: 1243497 - DNA, 15 bp, Homo sapiens
tggttataatgataa

SEQ ID NO: 1243498 - DNA, 15 bp, Homo sapiens
atggttataatgata

SEQ ID NO: 1243499 - DNA, 15 bp, Homo sapiens
aatggttataatgat

SEQ ID NO: 1243500 - DNA, 15 bp, Homo sapiens
aaatggttataatga

SEQ ID NO: 1243501 - DNA, 15 bp, Homo sapiens
taaatggttataatg

SEQ ID NO: 1243502 - DNA, 15 bp, Homo sapiens
ttaaatggttataat

SEQ ID NO: 1243503 - DNA, 15 bp, Homo sapiens
gttaaatggttataa

SEQ ID NO: 1243504 - DNA, 15 bp, Homo sapiens
tgttaaatggttata

SEQ ID NO: 1243505 - DNA, 15 bp, Homo sapiens
ctgttaaatggttat

SEQ ID NO: 1243506 - DNA, 15 bp, Homo sapiens
tctgttaaatggtta

SEQ ID NO: 1243507 - DNA, 15 bp, Homo sapiens
atctgttaaatggtt

SEQ ID NO: 1243508 - DNA, 15 bp, Homo sapiens
tatctgttaaatggt

SEQ ID NO: 1243509 - DNA, 15 bp, Homo sapiens
ttatctgttaaatgg

SEQ ID NO: 1243510 - DNA, 15 bp, Homo sapiens
tttatctgttaaatg

SEQ ID NO: 1243511 - DNA, 15 bp, Homo sapiens
ctttatctgttaaat

SEQ ID NO: 1243512 - DNA, 15 bp, Homo sapiens
actttatctgttaaa

SEQ ID NO: 1243513 - DNA, 15 bp, Homo sapiens
aactttatctgttaa

SEQ ID NO: 1243514 - DNA, 15 bp, Homo sapiens
taactttatctgtta

SEQ ID NO: 1243515 - DNA, 15 bp, Homo sapiens
ttaactttatctgtt

SEQ ID NO: 1243516 - DNA, 15 bp, Homo sapiens
cttaactttatctgt

SEQ ID NO: 1243517 - DNA, 15 bp, Homo sapiens
acttaactttatctg

SEQ ID NO: 1243518 - DNA, 15 bp, Homo sapiens
aacttaactttatct

SEQ ID NO: 1243519 - DNA, 15 bp, Homo sapiens
aaacttaactttatc

SEQ ID NO: 1243520 - DNA, 15 bp, Homo sapiens
aaaacttaactttat

SEQ ID NO: 1243521 - DNA, 15 bp, Homo sapiens
aaaaacttaacttta

SEQ ID NO: 1243522 - DNA, 15 bp, Homo sapiens
taaaaacttaacttt

SEQ ID NO: 1243523 - DNA, 15 bp, Homo sapiens
ataaaaacttaactt

SEQ ID NO: 1243524 - DNA, 15 bp, Homo sapiens
aataaaaacttaact

SEQ ID NO: 1243525 - DNA, 15 bp, Homo sapiens
taataaaaacttaac

SEQ ID NO: 1243526 - DNA, 15 bp, Homo sapiens
ataataaaaacttaa

SEQ ID NO: 1243527 - DNA, 15 bp, Homo sapiens
tataataaaaactta

SEQ ID NO: 1243528 - DNA, 15 bp, Homo sapiens
ttataataaaaactt

SEQ ID NO: 1243529 - DNA, 15 bp, Homo sapiens
tttataataaaaact

SEQ ID NO: 1243530 - DNA, 15 bp, Homo sapiens
ttttataataaaaac

SEQ ID NO: 1243531 - DNA, 15 bp, Homo sapiens
cttttataataaaaa

SEQ ID NO: 1243532 - DNA, 15 bp, Homo sapiens
acttttataataaaa

SEQ ID NO: 1243533 - DNA, 15 bp, Homo sapiens
tacttttataataaa

SEQ ID NO: 1243534 - DNA, 15 bp, Homo sapiens
ttacttttataataa

SEQ ID NO: 1243535 - DNA, 15 bp, Homo sapiens
attacttttataata

SEQ ID NO: 1243536 - DNA, 15 bp, Homo sapiens
ttattacttttataa

SEQ ID NO: 1243537 - DNA, 15 bp, Homo sapiens
tttattacttttata

SEQ ID NO: 1243538 - DNA, 15 bp, Homo sapiens
atttattacttttat

SEQ ID NO: 1243539 - DNA, 15 bp, Homo sapiens
catttattactttta

SEQ ID NO: 1243540 - DNA, 15 bp, Homo sapiens
acatttattactttt

SEQ ID NO: 1243541 - DNA, 15 bp, Homo sapiens
cacatttattacttt

SEQ ID NO: 1243542 - DNA, 15 bp, Homo sapiens
acacatttattactt

SEQ ID NO: 1243543 - DNA, 15 bp, Homo sapiens
gacacatttattact

SEQ ID NO: 1243544 - DNA, 15 bp, Homo sapiens
agacacatttattac

SEQ ID NO: 1243545 - DNA, 15 bp, Homo sapiens
cagacacatttatta

SEQ ID NO: 1243546 - DNA, 15 bp, Homo sapiens
ccagacacatttatt

SEQ ID NO: 1243547 - DNA, 15 bp, Homo sapiens
cccagacacatttat

SEQ ID NO: 1243548 - DNA, 15 bp, Homo sapiens
gcccagacacattta

SEQ ID NO: 1243549 - DNA, 15 bp, Homo sapiens
tgcccagacacattt

SEQ ID NO: 1243550 - DNA, 15 bp, Homo sapiens
gtgcccagacacatt

SEQ ID NO: 1243551 - DNA, 15 bp, Homo sapiens
tgtgcccagacacat

SEQ ID NO: 1243552 - DNA, 15 bp, Homo sapiens
ctgtgcccagacaca

SEQ ID NO: 1243553 - DNA, 15 bp, Homo sapiens
actgtgcccagacac

SEQ ID NO: 1243554 - DNA, 15 bp, Homo sapiens
cactgtgcccagaca

SEQ ID NO: 1243555 - DNA, 15 bp, Homo sapiens
ccactgtgcccagac

SEQ ID NO: 1243556 - DNA, 15 bp, Homo sapiens
gccactgtgcccaga

SEQ ID NO: 1243557 - DNA, 15 bp, Homo sapiens
cgtgagccactgtgc

SEQ ID NO: 1243558 - DNA, 15 bp, Homo sapiens
gcgtgagccactgtg

SEQ ID NO: 1243559 - DNA, 15 bp, Homo sapiens
ttcgtgatccgcctg

SEQ ID NO: 1243560 - DNA, 15 bp, Homo sapiens
cttcgtgatccgcct

SEQ ID NO: 1243561 - DNA, 15 bp, Homo sapiens
acttcgtgatccgcc

SEQ ID NO: 1243562 - DNA, 15 bp, Homo sapiens
gacttcgtgatccgc

SEQ ID NO: 1243563 - DNA, 15 bp, Homo sapiens
tgacttcgtgatccg

SEQ ID NO: 1243564 - DNA, 15 bp, Homo sapiens
ctgacttcgtgatcc

SEQ ID NO: 1243565 - DNA, 15 bp, Homo sapiens
cctgacttcgtgatc

SEQ ID NO: 1243566 - DNA, 15 bp, Homo sapiens
tcctgacttcgtgat

SEQ ID NO: 1243567 - DNA, 15 bp, Homo sapiens
ctcctgacttcgtga

SEQ ID NO: 1243568 - DNA, 15 bp, Homo sapiens
tctcctgacttcgtg

SEQ ID NO: 1243569 - DNA, 15 bp, Homo sapiens
atctcctgacttcgt

SEQ ID NO: 1243570 - DNA, 15 bp, Homo sapiens
gatctcctgacttcg

SEQ ID NO: 1243571 - DNA, 15 bp, Homo sapiens
tgatctcctgacttc

SEQ ID NO: 1243572 - DNA, 15 bp, Homo sapiens
ttgatctcctgactt

SEQ ID NO: 1243573 - DNA, 15 bp, Homo sapiens
cttgatctcctgact

SEQ ID NO: 1243574 - DNA, 15 bp, Homo sapiens
atggtcttgatctcc

SEQ ID NO: 1243575 - DNA, 15 bp, Homo sapiens
gatggtcttgatctc

SEQ ID NO: 1243576 - DNA, 15 bp, Homo sapiens
ggatggtcttgatct

SEQ ID NO: 1243577 - DNA, 15 bp, Homo sapiens
aggatggtcttgatc

SEQ ID NO: 1243578 - DNA, 15 bp, Homo sapiens
caggatggtcttgat

SEQ ID NO: 1243579 - DNA, 15 bp, Homo sapiens
ccaggatggtcttga

SEQ ID NO: 1243580 - DNA, 15 bp, Homo sapiens
accaggatggtcttg

SEQ ID NO: 1243581 - DNA, 15 bp, Homo sapiens
aaccaggatggtctt

SEQ ID NO: 1243582 - DNA, 15 bp, Homo sapiens
taaccaggatggtct

SEQ ID NO: 1243583 - DNA, 15 bp, Homo sapiens
ttaaccaggatggtc

SEQ ID NO: 1243584 - DNA, 15 bp, Homo sapiens
gttaaccaggatggt

SEQ ID NO: 1243585 - DNA, 15 bp, Homo sapiens
tgttaaccaggatgg

SEQ ID NO: 1243586 - DNA, 15 bp, Homo sapiens
gtgttaaccaggatg

SEQ ID NO: 1243587 - DNA, 15 bp, Homo sapiens
cgtgttaaccaggat

SEQ ID NO: 1243588 - DNA, 15 bp, Homo sapiens
ccgtgttaaccagga

SEQ ID NO: 1243589 - DNA, 15 bp, Homo sapiens
accgtgttaaccagg

SEQ ID NO: 1243590 - DNA, 15 bp, Homo sapiens
caccgtgttaaccag

SEQ ID NO: 1243591 - DNA, 15 bp, Homo sapiens
tcaccgtgttaacca

SEQ ID NO: 1243592 - DNA, 15 bp, Homo sapiens
ttcaccgtgttaacc

SEQ ID NO: 1243593 - DNA, 15 bp, Homo sapiens
tttcaccgtgttaac

SEQ ID NO: 1243594 - DNA, 15 bp, Homo sapiens
gtttcaccgtgttaa

SEQ ID NO: 1243595 - DNA, 15 bp, Homo sapiens
aggtttcaccgtgtt

SEQ ID NO: 1243596 - DNA, 15 bp, Homo sapiens
gaggtttcaccgtgt

SEQ ID NO: 1243597 - DNA, 15 bp, Homo sapiens
tgaggtttcaccgtg

SEQ ID NO: 1243598 - DNA, 15 bp, Homo sapiens
atgaggtttcaccgt

SEQ ID NO: 1243599 - DNA, 15 bp, Homo sapiens
gatgaggtttcaccg

SEQ ID NO: 1243600 - DNA, 15 bp, Homo sapiens
ttttctgtattttta

SEQ ID NO: 1243601 - DNA, 15 bp, Homo sapiens
attttctgtattttt

SEQ ID NO: 1243602 - DNA, 15 bp, Homo sapiens
aattttctgtatttt

SEQ ID NO: 1243603 - DNA, 15 bp, Homo sapiens
ctaattttctgtatt

SEQ ID NO: 1243604 - DNA, 15 bp, Homo sapiens
gctaattttctgtat

SEQ ID NO: 1243605 - DNA, 15 bp, Homo sapiens
ggctaattttctgta

SEQ ID NO: 1243606 - DNA, 15 bp, Homo sapiens
tggctaattttctgt

SEQ ID NO: 1243607 - DNA, 15 bp, Homo sapiens
ctggctaattttctg

SEQ ID NO: 1243608 - DNA, 15 bp, Homo sapiens
cctggctaattttct

SEQ ID NO: 1243609 - DNA, 15 bp, Homo sapiens
gcctggctaattttc

SEQ ID NO: 1243610 - DNA, 15 bp, Homo sapiens
tcaccacgcctggct

SEQ ID NO: 1243611 - DNA, 15 bp, Homo sapiens
gtcaccacgcctggc

SEQ ID NO: 1243612 - DNA, 15 bp, Homo sapiens
tgtcaccacgcctgg

SEQ ID NO: 1243613 - DNA, 15 bp, Homo sapiens
ctgtcaccacgcctg

SEQ ID NO: 1243614 - DNA, 15 bp, Homo sapiens
cctgtcaccacgcct

SEQ ID NO: 1243615 - DNA, 15 bp, Homo sapiens
acctgtcaccacgcc

SEQ ID NO: 1243616 - DNA, 15 bp, Homo sapiens
cacctgtcaccacgc

SEQ ID NO: 1243617 - DNA, 15 bp, Homo sapiens
gcacctgtcaccacg

SEQ ID NO: 1243618 - DNA, 15 bp, Homo sapiens
ggcacctgtcaccac

SEQ ID NO: 1243619 - DNA, 15 bp, Homo sapiens
tggcacctgtcacca

SEQ ID NO: 1243620 - DNA, 15 bp, Homo sapiens
ctggcacctgtcacc

SEQ ID NO: 1243621 - DNA, 15 bp, Homo sapiens
actggcacctgtcac

SEQ ID NO: 1243622 - DNA, 15 bp, Homo sapiens
tactggcacctgtca

SEQ ID NO: 1243623 - DNA, 15 bp, Homo sapiens
ctactggcacctgtc

SEQ ID NO: 1243624 - DNA, 15 bp, Homo sapiens
actactggcacctgt

SEQ ID NO: 1243625 - DNA, 15 bp, Homo sapiens
gactactggcacctg

SEQ ID NO: 1243626 - DNA, 15 bp, Homo sapiens
ggactactggcacct

SEQ ID NO: 1243627 - DNA, 15 bp, Homo sapiens
gggactactggcacc

SEQ ID NO: 1243628 - DNA, 15 bp, Homo sapiens
gctgggactactggc

SEQ ID NO: 1243629 - DNA, 15 bp, Homo sapiens
agctgggactactgg

SEQ ID NO: 1243630 - DNA, 15 bp, Homo sapiens
tagctgggactactg

SEQ ID NO: 1243631 - DNA, 15 bp, Homo sapiens
gtagctgggactact

SEQ ID NO: 1243632 - DNA, 15 bp, Homo sapiens
atgagtagctgggac

SEQ ID NO: 1243633 - DNA, 15 bp, Homo sapiens
catgagtagctggga

SEQ ID NO: 1243634 - DNA, 15 bp, Homo sapiens
tcatgagtagctggg

SEQ ID NO: 1243635 - DNA, 15 bp, Homo sapiens
ctcatgagtagctgg

SEQ ID NO: 1243636 - DNA, 15 bp, Homo sapiens
cctcatgagtagctg

SEQ ID NO: 1243637 - DNA, 15 bp, Homo sapiens
gcctcatgagtagct

SEQ ID NO: 1243638 - DNA, 15 bp, Homo sapiens
agcctcatgagtagc

SEQ ID NO: 1243639 - DNA, 15 bp, Homo sapiens
cagcctcatgagtag

SEQ ID NO: 1243640 - DNA, 15 bp, Homo sapiens
tcagcctcatgagta

SEQ ID NO: 1243641 - DNA, 15 bp, Homo sapiens
ctcagcctcatgagt

SEQ ID NO: 1243642 - DNA, 15 bp, Homo sapiens
cctcagcctcatgag

SEQ ID NO: 1243643 - DNA, 15 bp, Homo sapiens
gcctcagcctcatga

SEQ ID NO: 1243644 - DNA, 15 bp, Homo sapiens
tgcctcagcctcatg

SEQ ID NO: 1243645 - DNA, 15 bp, Homo sapiens
ctgcctcagcctcat

SEQ ID NO: 1243646 - DNA, 15 bp, Homo sapiens
gcctcccaggttcat

SEQ ID NO: 1243647 - DNA, 15 bp, Homo sapiens
attgctttttttttt

SEQ ID NO: 1243648 - DNA, 15 bp, Homo sapiens
tattgcttttttttt

SEQ ID NO: 1243649 - DNA, 15 bp, Homo sapiens
ttattgctttttttt

SEQ ID NO: 1243650 - DNA, 15 bp, Homo sapiens
tttattgcttttttt

SEQ ID NO: 1243651 - DNA, 15 bp, Homo sapiens
atttattgctttttt

SEQ ID NO: 1243652 - DNA, 15 bp, Homo sapiens
catttattgcttttt

SEQ ID NO: 1243653 - DNA, 15 bp, Homo sapiens
acatttattgctttt

SEQ ID NO: 1243654 - DNA, 15 bp, Homo sapiens
aacatttattgcttt

SEQ ID NO: 1243655 - DNA, 15 bp, Homo sapiens
aaacatttattgctt

SEQ ID NO: 1243656 - DNA, 15 bp, Homo sapiens
gaaacatttattgct

SEQ ID NO: 1243657 - DNA, 15 bp, Homo sapiens
agaaacatttattgc

SEQ ID NO: 1243658 - DNA, 15 bp, Homo sapiens
tagaaacatttattg

SEQ ID NO: 1243659 - DNA, 15 bp, Homo sapiens
ctagaaacatttatt

SEQ ID NO: 1243660 - DNA, 15 bp, Homo sapiens
cctagaaacatttat

SEQ ID NO: 1243661 - DNA, 15 bp, Homo sapiens
tcctagaaacattta

SEQ ID NO: 1243662 - DNA, 15 bp, Homo sapiens
ttcctagaaacattt

SEQ ID NO: 1243663 - DNA, 15 bp, Homo sapiens
tttcctagaaacatt

SEQ ID NO: 1243664 - DNA, 15 bp, Homo sapiens
gtttcctagaaacat

SEQ ID NO: 1243665 - DNA, 15 bp, Homo sapiens
agtttcctagaaaca

SEQ ID NO: 1243666 - DNA, 15 bp, Homo sapiens
aagtttcctagaaac

SEQ ID NO: 1243667 - DNA, 15 bp, Homo sapiens
caagtttcctagaaa

SEQ ID NO: 1243668 - DNA, 15 bp, Homo sapiens
tcaagtttcctagaa

SEQ ID NO: 1243669 - DNA, 15 bp, Homo sapiens
ttcaagtttcctaga

SEQ ID NO: 1243670 - DNA, 15 bp, Homo sapiens
gttcaagtttcctag

SEQ ID NO: 1243671 - DNA, 15 bp, Homo sapiens
agttcaagtttccta

SEQ ID NO: 1243672 - DNA, 15 bp, Homo sapiens
tagttcaagtttcct

SEQ ID NO: 1243673 - DNA, 15 bp, Homo sapiens
atagttcaagtttcc

SEQ ID NO: 1243674 - DNA, 15 bp, Homo sapiens
catagttcaagtttc

SEQ ID NO: 1243675 - DNA, 15 bp, Homo sapiens
tcatagttcaagttt

SEQ ID NO: 1243676 - DNA, 15 bp, Homo sapiens
atcatagttcaagtt

SEQ ID NO: 1243677 - DNA, 15 bp, Homo sapiens
aatcatagttcaagt

SEQ ID NO: 1243678 - DNA, 15 bp, Homo sapiens
aaatcatagttcaag

SEQ ID NO: 1243679 - DNA, 15 bp, Homo sapiens
aaaatcatagttcaa

SEQ ID NO: 1243680 - DNA, 15 bp, Homo sapiens
taaaatcatagttca

SEQ ID NO: 1243681 - DNA, 15 bp, Homo sapiens
ttaaaatcatagttc

SEQ ID NO: 1243682 - DNA, 15 bp, Homo sapiens
tttaaaatcatagtt

SEQ ID NO: 1243683 - DNA, 15 bp, Homo sapiens
ttttaaaatcatagt

SEQ ID NO: 1243684 - DNA, 15 bp, Homo sapiens
tttttaaaatcatag

SEQ ID NO: 1243685 - DNA, 15 bp, Homo sapiens
ttttttaaaatcata

SEQ ID NO: 1243686 - DNA, 15 bp, Homo sapiens
tttttttaaaatcat

SEQ ID NO: 1243687 - DNA, 15 bp, Homo sapiens
ctttttttaaaatca

SEQ ID NO: 1243688 - DNA, 15 bp, Homo sapiens
tctttttttaaaatc

SEQ ID NO: 1243689 - DNA, 15 bp, Homo sapiens
ctctttttttaaaat

SEQ ID NO: 1243690 - DNA, 15 bp, Homo sapiens
ttctctttttttaaa

SEQ ID NO: 1243691 - DNA, 15 bp, Homo sapiens
tttctctttttttaa

SEQ ID NO: 1243692 - DNA, 15 bp, Homo sapiens
ctttctcttttttta

SEQ ID NO: 1243693 - DNA, 15 bp, Homo sapiens
cttctttctcttttt

SEQ ID NO: 1243694 - DNA, 15 bp, Homo sapiens
ccttctttctctttt

SEQ ID NO: 1243695 - DNA, 15 bp, Homo sapiens
tccttctttctcttt

SEQ ID NO: 1243696 - DNA, 15 bp, Homo sapiens
ttccttctttctctt

SEQ ID NO: 1243697 - DNA, 15 bp, Homo sapiens
gtttccttctttctc

SEQ ID NO: 1243698 - DNA, 15 bp, Homo sapiens
tgtttccttctttct

SEQ ID NO: 1243699 - DNA, 15 bp, Homo sapiens
ttgtttccttctttc

SEQ ID NO: 1243700 - DNA, 15 bp, Homo sapiens
tttgtttccttcttt

SEQ ID NO: 1243701 - DNA, 15 bp, Homo sapiens
ttttgtttccttctt

SEQ ID NO: 1243702 - DNA, 15 bp, Homo sapiens
attttgtttccttct

SEQ ID NO: 1243703 - DNA, 15 bp, Homo sapiens
gattttgtttccttc

SEQ ID NO: 1243704 - DNA, 15 bp, Homo sapiens
tgattttgtttcctt

SEQ ID NO: 1243705 - DNA, 15 bp, Homo sapiens
atgattttgtttcct

SEQ ID NO: 1243706 - DNA, 15 bp, Homo sapiens
gatgattttgtttcc

SEQ ID NO: 1243707 - DNA, 15 bp, Homo sapiens
ggatgattttgtttc

SEQ ID NO: 1243708 - DNA, 15 bp, Homo sapiens
gggatgattttgttt

SEQ ID NO: 1243709 - DNA, 15 bp, Homo sapiens
agggatgattttgtt

SEQ ID NO: 1243710 - DNA, 15 bp, Homo sapiens
tagggatgattttgt

SEQ ID NO: 1243711 - DNA, 15 bp, Homo sapiens
ttagggatgattttg

SEQ ID NO: 1243712 - DNA, 15 bp, Homo sapiens
cttagggatgatttt

SEQ ID NO: 1243713 - DNA, 15 bp, Homo sapiens
gcttagggatgattt

SEQ ID NO: 1243714 - DNA, 15 bp, Homo sapiens
ggcttagggatgatt

SEQ ID NO: 1243715 - DNA, 15 bp, Homo sapiens
gggcttagggatgat

SEQ ID NO: 1243716 - DNA, 15 bp, Homo sapiens
agggcttagggatga

SEQ ID NO: 1243717 - DNA, 15 bp, Homo sapiens
aagggcttagggatg

SEQ ID NO: 1243718 - DNA, 15 bp, Homo sapiens
gaagggcttagggat

SEQ ID NO: 1243719 - DNA, 15 bp, Homo sapiens
tgaagggcttaggga

SEQ ID NO: 1243720 - DNA, 15 bp, Homo sapiens
atgaagggcttaggg

SEQ ID NO: 1243721 - DNA, 15 bp, Homo sapiens
gatgaagggcttagg

SEQ ID NO: 1243722 - DNA, 15 bp, Homo sapiens
agatgaagggcttag

SEQ ID NO: 1243723 - DNA, 15 bp, Homo sapiens
tagatgaagggctta

SEQ ID NO: 1243724 - DNA, 15 bp, Homo sapiens
ctagatgaagggctt

SEQ ID NO: 1243725 - DNA, 15 bp, Homo sapiens
tctagatgaagggct

SEQ ID NO: 1243726 - DNA, 15 bp, Homo sapiens
ctctagatgaagggc

SEQ ID NO: 1243727 - DNA, 15 bp, Homo sapiens
tctctagatgaaggg

SEQ ID NO: 1243728 - DNA, 15 bp, Homo sapiens
gtctctagatgaagg

SEQ ID NO: 1243729 - DNA, 15 bp, Homo sapiens
ggtctctagatgaag

SEQ ID NO: 1243730 - DNA, 15 bp, Homo sapiens
cggtctctagatgaa

SEQ ID NO: 1243731 - DNA, 15 bp, Homo sapiens
gcggtctctagatga

SEQ ID NO: 1243732 - DNA, 15 bp, Homo sapiens
ggcggtctctagatg

SEQ ID NO: 1243733 - DNA, 15 bp, Homo sapiens
tggcggtctctagat

SEQ ID NO: 1243734 - DNA, 15 bp, Homo sapiens
gtggcggtctctaga

SEQ ID NO: 1243735 - DNA, 15 bp, Homo sapiens
agtggcggtctctag

SEQ ID NO: 1243736 - DNA, 15 bp, Homo sapiens
cagtggcggtctcta

SEQ ID NO: 1243737 - DNA, 15 bp, Homo sapiens
gcagtggcggtctct

SEQ ID NO: 1243738 - DNA, 15 bp, Homo sapiens
tgcagtggcggtctc

SEQ ID NO: 1243739 - DNA, 15 bp, Homo sapiens
gtgcagtggcggtct

SEQ ID NO: 1243740 - DNA, 15 bp, Homo sapiens
agtgcagtggcggtc

SEQ ID NO: 1243741 - DNA, 15 bp, Homo sapiens
gagtgcagtggcggt

SEQ ID NO: 1243742 - DNA, 15 bp, Homo sapiens
tgagtgcagtggcgg

SEQ ID NO: 1243743 - DNA, 15 bp, Homo sapiens
atgagtgcagtggcg

SEQ ID NO: 1243744 - DNA, 15 bp, Homo sapiens
catgagtgcagtggc

SEQ ID NO: 1243745 - DNA, 15 bp, Homo sapiens
acatgagtgcagtgg

SEQ ID NO: 1243746 - DNA, 15 bp, Homo sapiens
gacatgagtgcagtg

SEQ ID NO: 1243747 - DNA, 15 bp, Homo sapiens
agacatgagtgcagt

SEQ ID NO: 1243748 - DNA, 15 bp, Homo sapiens
aagacatgagtgcag

SEQ ID NO: 1243749 - DNA, 15 bp, Homo sapiens
caagacatgagtgca

SEQ ID NO: 1243750 - DNA, 15 bp, Homo sapiens
tcaagacatgagtgc

SEQ ID NO: 1243751 - DNA, 15 bp, Homo sapiens
ttcaagacatgagtg

SEQ ID NO: 1243752 - DNA, 15 bp, Homo sapiens
cttcaagacatgagt

SEQ ID NO: 1243753 - DNA, 15 bp, Homo sapiens
acttcaagacatgag

SEQ ID NO: 1243754 - DNA, 15 bp, Homo sapiens
cacttcaagacatga

SEQ ID NO: 1243755 - DNA, 15 bp, Homo sapiens
gcacttcaagacatg

SEQ ID NO: 1243756 - DNA, 15 bp, Homo sapiens
agcacttcaagacat

SEQ ID NO: 1243757 - DNA, 15 bp, Homo sapiens
aagcacttcaagaca

SEQ ID NO: 1243758 - DNA, 15 bp, Homo sapiens
taagcacttcaagac

SEQ ID NO: 1243759 - DNA, 15 bp, Homo sapiens
gtaagcacttcaaga

SEQ ID NO: 1243760 - DNA, 15 bp, Homo sapiens
agtaagcacttcaag

SEQ ID NO: 1243761 - DNA, 15 bp, Homo sapiens
cagtaagcacttcaa

SEQ ID NO: 1243762 - DNA, 15 bp, Homo sapiens
tcagtaagcacttca

SEQ ID NO: 1243763 - DNA, 15 bp, Homo sapiens
gtcagtaagcacttc

SEQ ID NO: 1243764 - DNA, 15 bp, Homo sapiens
tgtcagtaagcactt

SEQ ID NO: 1243765 - DNA, 15 bp, Homo sapiens
gtgtcagtaagcact

SEQ ID NO: 1243766 - DNA, 15 bp, Homo sapiens
cgtgtcagtaagcac

SEQ ID NO: 1243767 - DNA, 15 bp, Homo sapiens
acgtgtcagtaagca

SEQ ID NO: 1243768 - DNA, 15 bp, Homo sapiens
aacgtgtcagtaagc

SEQ ID NO: 1243769 - DNA, 15 bp, Homo sapiens
aaacgtgtcagtaag

SEQ ID NO: 1243770 - DNA, 15 bp, Homo sapiens
aaaacgtgtcagtaa

SEQ ID NO: 1243771 - DNA, 15 bp, Homo sapiens
aaaaacgtgtcagta

SEQ ID NO: 1243772 - DNA, 15 bp, Homo sapiens
aaaaaacgtgtcagt

SEQ ID NO: 1243773 - DNA, 15 bp, Homo sapiens
taaaaaacgtgtcag

SEQ ID NO: 1243774 - DNA, 15 bp, Homo sapiens
ttaaaaaacgtgtca

SEQ ID NO: 1243775 - DNA, 15 bp, Homo sapiens
attaaaaaacgtgtc

SEQ ID NO: 1243776 - DNA, 15 bp, Homo sapiens
tattaaaaaacgtgt

SEQ ID NO: 1243777 - DNA, 15 bp, Homo sapiens
gtattaaaaaacgtg

SEQ ID NO: 1243778 - DNA, 15 bp, Homo sapiens
tgtattaaaaaacgt

SEQ ID NO: 1243779 - DNA, 15 bp, Homo sapiens
atgtattaaaaaacg

SEQ ID NO: 1243780 - DNA, 15 bp, Homo sapiens
catgtattaaaaaac

SEQ ID NO: 1243781 - DNA, 15 bp, Homo sapiens
acatgtattaaaaaa

SEQ ID NO: 1243782 - DNA, 15 bp, Homo sapiens
aacatgtattaaaaa

SEQ ID NO: 1243783 - DNA, 15 bp, Homo sapiens
caacatgtattaaaa

SEQ ID NO: 1243784 - DNA, 15 bp, Homo sapiens
acaacatgtattaaa

SEQ ID NO: 1243785 - DNA, 15 bp, Homo sapiens
aacaacatgtattaa

SEQ ID NO: 1243786 - DNA, 15 bp, Homo sapiens
caacaacatgtatta

SEQ ID NO: 1243787 - DNA, 15 bp, Homo sapiens
acaacaacatgtatt

SEQ ID NO: 1243788 - DNA, 15 bp, Homo sapiens
aacaacaacatgtat

SEQ ID NO: 1243789 - DNA, 15 bp, Homo sapiens
aaacaacaacatgta

SEQ ID NO: 1243790 - DNA, 15 bp, Homo sapiens
aaaacaacaacatgt

SEQ ID NO: 1243791 - DNA, 15 bp, Homo sapiens
aaaaacaacaacatg

SEQ ID NO: 1243792 - DNA, 15 bp, Homo sapiens
caaaaacaacaacat

SEQ ID NO: 1243793 - DNA, 15 bp, Homo sapiens
acaaaaacaacaaca

SEQ ID NO: 1243794 - DNA, 15 bp, Homo sapiens
aacaaaaacaacaac

SEQ ID NO: 1243795 - DNA, 15 bp, Homo sapiens
taacaaaaacaacaa

SEQ ID NO: 1243796 - DNA, 15 bp, Homo sapiens
gtaacaaaaacaaca

SEQ ID NO: 1243797 - DNA, 15 bp, Homo sapiens
agtaacaaaaacaac

SEQ ID NO: 1243798 - DNA, 15 bp, Homo sapiens
gagtaacaaaaacaa

SEQ ID NO: 1243799 - DNA, 15 bp, Homo sapiens
tgagtaacaaaaaca

SEQ ID NO: 1243800 - DNA, 15 bp, Homo sapiens
gtgagtaacaaaaac

SEQ ID NO: 1243801 - DNA, 15 bp, Homo sapiens
agtgagtaacaaaaa

SEQ ID NO: 1243802 - DNA, 15 bp, Homo sapiens
aagtgagtaacaaaa

SEQ ID NO: 1243803 - DNA, 15 bp, Homo sapiens
aaagtgagtaacaaa

SEQ ID NO: 1243804 - DNA, 15 bp, Homo sapiens
aaaagtgagtaacaa

SEQ ID NO: 1243805 - DNA, 15 bp, Homo sapiens
aaaaagtgagtaaca

SEQ ID NO: 1243806 - DNA, 15 bp, Homo sapiens
aaaaaagtgagtaac

SEQ ID NO: 1243807 - DNA, 15 bp, Homo sapiens
aaaaaaagtgagtaa

SEQ ID NO: 1243808 - DNA, 15 bp, Homo sapiens
aaaaaaaagtgagta

SEQ ID NO: 1243809 - DNA, 15 bp, Homo sapiens
aaaaaaaaagtgagt

SEQ ID NO: 1243810 - DNA, 15 bp, Homo sapiens
aaaaaaaaaagtgag

SEQ ID NO: 1243811 - DNA, 15 bp, Homo sapiens
aaaaaaaaaaagtga

SEQ ID NO: 1243812 - DNA, 15 bp, Homo sapiens
agctaaaacggtgaa

SEQ ID NO: 1243813 - DNA, 15 bp, Homo sapiens
cagctaaaacggtga

SEQ ID NO: 1243814 - DNA, 15 bp, Homo sapiens
ccagctaaaacggtg

SEQ ID NO: 1243815 - DNA, 15 bp, Homo sapiens
cccagctaaaacggt

SEQ ID NO: 1243816 - DNA, 15 bp, Homo sapiens
tcccagctaaaacgg

SEQ ID NO: 1243817 - DNA, 15 bp, Homo sapiens
atcccagctaaaacg

SEQ ID NO: 1243818 - DNA, 15 bp, Homo sapiens
catcccagctaaaac

SEQ ID NO: 1243819 - DNA, 15 bp, Homo sapiens
ccatcccagctaaaa

SEQ ID NO: 1243820 - DNA, 15 bp, Homo sapiens
accatcccagctaaa

SEQ ID NO: 1243821 - DNA, 15 bp, Homo sapiens
gaccatcccagctaa

SEQ ID NO: 1243822 - DNA, 15 bp, Homo sapiens
agaccatcccagcta

SEQ ID NO: 1243823 - DNA, 15 bp, Homo sapiens
gagaccatcccagct

SEQ ID NO: 1243824 - DNA, 15 bp, Homo sapiens
cgagaccatcccagc

SEQ ID NO: 1243825 - DNA, 15 bp, Homo sapiens
tcgagaccatcccag

SEQ ID NO: 1243826 - DNA, 15 bp, Homo sapiens
atcgagaccatccca

SEQ ID NO: 1243827 - DNA, 15 bp, Homo sapiens
acggccgggcgcggt

SEQ ID NO: 1243828 - DNA, 15 bp, Homo sapiens
aacggccgggcgcgg

SEQ ID NO: 1243829 - DNA, 15 bp, Homo sapiens
taacggccgggcgcg

SEQ ID NO: 1243830 - DNA, 15 bp, Homo sapiens
gtaacggccgggcgc

SEQ ID NO: 1243831 - DNA, 15 bp, Homo sapiens
agtaacggccgggcg

SEQ ID NO: 1243832 - DNA, 15 bp, Homo sapiens
gagtaacggccgggc

SEQ ID NO: 1243833 - DNA, 15 bp, Homo sapiens
tgagtaacggccggg

SEQ ID NO: 1243834 - DNA, 15 bp, Homo sapiens
gtgagtaacggccgg

SEQ ID NO: 1243835 - DNA, 15 bp, Homo sapiens
agtgagtaacggccg

SEQ ID NO: 1243836 - DNA, 15 bp, Homo sapiens
aagtgagtaacggcc

SEQ ID NO: 1243837 - DNA, 15 bp, Homo sapiens
aaagtgagtaacggc

SEQ ID NO: 1243838 - DNA, 15 bp, Homo sapiens
aaaagtgagtaacgg

SEQ ID NO: 1243839 - DNA, 15 bp, Homo sapiens
aaaaagtgagtaacg

SEQ ID NO: 1243840 - DNA, 15 bp, Homo sapiens
taaaaagtgagtaac

SEQ ID NO: 1243841 - DNA, 15 bp, Homo sapiens
ttaaaaagtgagtaa

SEQ ID NO: 1243842 - DNA, 15 bp, Homo sapiens
attaaaaagtgagta

SEQ ID NO: 1243843 - DNA, 15 bp, Homo sapiens
cattaaaaagtgagt

SEQ ID NO: 1243844 - DNA, 15 bp, Homo sapiens
tcattaaaaagtgag

SEQ ID NO: 1243845 - DNA, 15 bp, Homo sapiens
atcattaaaaagtga

SEQ ID NO: 1243846 - DNA, 15 bp, Homo sapiens
aatcattaaaaagtg

SEQ ID NO: 1243847 - DNA, 15 bp, Homo sapiens
caatcattaaaaagt

SEQ ID NO: 1243848 - DNA, 15 bp, Homo sapiens
gcaatcattaaaaag

SEQ ID NO: 1243849 - DNA, 15 bp, Homo sapiens
ggcaatcattaaaaa

SEQ ID NO: 1243850 - DNA, 15 bp, Homo sapiens
aggcaatcattaaaa

SEQ ID NO: 1243851 - DNA, 15 bp, Homo sapiens
taggcaatcattaaa

SEQ ID NO: 1243852 - DNA, 15 bp, Homo sapiens
ttaggcaatcattaa

SEQ ID NO: 1243853 - DNA, 15 bp, Homo sapiens
attaggcaatcatta

SEQ ID NO: 1243854 - DNA, 15 bp, Homo sapiens
gattaggcaatcatt

SEQ ID NO: 1243855 - DNA, 15 bp, Homo sapiens
agattaggcaatcat

SEQ ID NO: 1243856 - DNA, 15 bp, Homo sapiens
aagattaggcaatca

SEQ ID NO: 1243857 - DNA, 15 bp, Homo sapiens
gaagattaggcaatc

SEQ ID NO: 1243858 - DNA, 15 bp, Homo sapiens
ggaagattaggcaat

SEQ ID NO: 1243859 - DNA, 15 bp, Homo sapiens
tggaagattaggcaa

SEQ ID NO: 1243860 - DNA, 15 bp, Homo sapiens
atggaagattaggca

SEQ ID NO: 1243861 - DNA, 15 bp, Homo sapiens
aatggaagattaggc

SEQ ID NO: 1243862 - DNA, 15 bp, Homo sapiens
caatggaagattagg

SEQ ID NO: 1243863 - DNA, 15 bp, Homo sapiens
acaatggaagattag

SEQ ID NO: 1243864 - DNA, 15 bp, Homo sapiens
cacaatggaagatta

SEQ ID NO: 1243865 - DNA, 15 bp, Homo sapiens
acacaatggaagatt

SEQ ID NO: 1243866 - DNA, 15 bp, Homo sapiens
tacacaatggaagat

SEQ ID NO: 1243867 - DNA, 15 bp, Homo sapiens
ttacacaatggaaga

SEQ ID NO: 1243868 - DNA, 15 bp, Homo sapiens
attacacaatggaag

SEQ ID NO: 1243869 - DNA, 15 bp, Homo sapiens
aattacacaatggaa

SEQ ID NO: 1243870 - DNA, 15 bp, Homo sapiens
taattacacaatgga

SEQ ID NO: 1243871 - DNA, 15 bp, Homo sapiens
ataattacacaatgg

SEQ ID NO: 1243872 - DNA, 15 bp, Homo sapiens
tataattacacaatg

SEQ ID NO: 1243873 - DNA, 15 bp, Homo sapiens
gtataattacacaat

SEQ ID NO: 1243874 - DNA, 15 bp, Homo sapiens
ggtataattacacaa

SEQ ID NO: 1243875 - DNA, 15 bp, Homo sapiens
tggtataattacaca

SEQ ID NO: 1243876 - DNA, 15 bp, Homo sapiens
gtggtataattacac

SEQ ID NO: 1243877 - DNA, 15 bp, Homo sapiens
tgtggtataattaca

SEQ ID NO: 1243878 - DNA, 15 bp, Homo sapiens
ctgtggtataattac

SEQ ID NO: 1243879 - DNA, 15 bp, Homo sapiens
actgtggtataatta

SEQ ID NO: 1243880 - DNA, 15 bp, Homo sapiens
gactgtggtataatt

SEQ ID NO: 1243881 - DNA, 15 bp, Homo sapiens
ggactgtggtataat

SEQ ID NO: 1243882 - DNA, 15 bp, Homo sapiens
tggactgtggtataa

SEQ ID NO: 1243883 - DNA, 15 bp, Homo sapiens
gtggactgtggtata

SEQ ID NO: 1243884 - DNA, 15 bp, Homo sapiens
agtggactgtggtat

SEQ ID NO: 1243885 - DNA, 15 bp, Homo sapiens
aagtggactgtggta

SEQ ID NO: 1243886 - DNA, 15 bp, Homo sapiens
gaagtggactgtggt

SEQ ID NO: 1243887 - DNA, 15 bp, Homo sapiens
tgaagtggactgtgg

SEQ ID NO: 1243888 - DNA, 15 bp, Homo sapiens
atgaagtggactgtg

SEQ ID NO: 1243889 - DNA, 15 bp, Homo sapiens
gatgaagtggactgt

SEQ ID NO: 1243890 - DNA, 15 bp, Homo sapiens
tgatgaagtggactg

SEQ ID NO: 1243891 - DNA, 15 bp, Homo sapiens
atgatgaagtggact

SEQ ID NO: 1243892 - DNA, 15 bp, Homo sapiens
aatgatgaagtggac

SEQ ID NO: 1243893 - DNA, 15 bp, Homo sapiens
gaatgatgaagtgga

SEQ ID NO: 1243894 - DNA, 15 bp, Homo sapiens
ggaatgatgaagtgg

SEQ ID NO: 1243895 - DNA, 15 bp, Homo sapiens
aggaatgatgaagtg

SEQ ID NO: 1243896 - DNA, 15 bp, Homo sapiens
gaggaatgatgaagt

SEQ ID NO: 1243897 - DNA, 15 bp, Homo sapiens
agaggaatgatgaag

SEQ ID NO: 1243898 - DNA, 15 bp, Homo sapiens
tagaggaatgatgaa

SEQ ID NO: 1243899 - DNA, 15 bp, Homo sapiens
atagaggaatgatga

SEQ ID NO: 1243900 - DNA, 15 bp, Homo sapiens
aatagaggaatgatg

SEQ ID NO: 1243901 - DNA, 15 bp, Homo sapiens
taatagaggaatgat

SEQ ID NO: 1243902 - DNA, 15 bp, Homo sapiens
ataatagaggaatga

SEQ ID NO: 1243903 - DNA, 15 bp, Homo sapiens
cataatagaggaatg

SEQ ID NO: 1243904 - DNA, 15 bp, Homo sapiens
ccataatagaggaat

SEQ ID NO: 1243905 - DNA, 15 bp, Homo sapiens
cccataatagaggaa

SEQ ID NO: 1243906 - DNA, 15 bp, Homo sapiens
tcccataatagagga

SEQ ID NO: 1243907 - DNA, 15 bp, Homo sapiens
ctcccataatagagg

SEQ ID NO: 1243908 - DNA, 15 bp, Homo sapiens
actcccataatagag

SEQ ID NO: 1243909 - DNA, 15 bp, Homo sapiens
aactcccataataga

SEQ ID NO: 1243910 - DNA, 15 bp, Homo sapiens
aaactcccataatag

SEQ ID NO: 1243911 - DNA, 15 bp, Homo sapiens
taaactcccataata

SEQ ID NO: 1243912 - DNA, 15 bp, Homo sapiens
ctaaactcccataat

SEQ ID NO: 1243913 - DNA, 15 bp, Homo sapiens
actaaactcccataa

SEQ ID NO: 1243914 - DNA, 15 bp, Homo sapiens
aactaaactcccata

SEQ ID NO: 1243915 - DNA, 15 bp, Homo sapiens
taactaaactcccat

SEQ ID NO: 1243916 - DNA, 15 bp, Homo sapiens
ctaactaaactccca

SEQ ID NO: 1243917 - DNA, 15 bp, Homo sapiens
gctaactaaactccc

SEQ ID NO: 1243918 - DNA, 15 bp, Homo sapiens
agctaactaaactcc

SEQ ID NO: 1243919 - DNA, 15 bp, Homo sapiens
aagctaactaaactc

SEQ ID NO: 1243920 - DNA, 15 bp, Homo sapiens
taagctaactaaact

SEQ ID NO: 1243921 - DNA, 15 bp, Homo sapiens
ctaagctaactaaac

SEQ ID NO: 1243922 - DNA, 15 bp, Homo sapiens
tctaagctaactaaa

SEQ ID NO: 1243923 - DNA, 15 bp, Homo sapiens
ttctaagctaactaa

SEQ ID NO: 1243924 - DNA, 15 bp, Homo sapiens
cttctaagctaacta

SEQ ID NO: 1243925 - DNA, 15 bp, Homo sapiens
acttctaagctaact

SEQ ID NO: 1243926 - DNA, 15 bp, Homo sapiens
aacttctaagctaac

SEQ ID NO: 1243927 - DNA, 15 bp, Homo sapiens
aaacttctaagctaa

SEQ ID NO: 1243928 - DNA, 15 bp, Homo sapiens
aaaacttctaagcta

SEQ ID NO: 1243929 - DNA, 15 bp, Homo sapiens
caaaacttctaagct

SEQ ID NO: 1243930 - DNA, 15 bp, Homo sapiens
ccaaaacttctaagc

SEQ ID NO: 1243931 - DNA, 15 bp, Homo sapiens
accaaaacttctaag

SEQ ID NO: 1243932 - DNA, 15 bp, Homo sapiens
caccaaaacttctaa

SEQ ID NO: 1243933 - DNA, 15 bp, Homo sapiens
tcaccaaaacttcta

SEQ ID NO: 1243934 - DNA, 15 bp, Homo sapiens
ttcaccaaaacttct

SEQ ID NO: 1243935 - DNA, 15 bp, Homo sapiens
tttcaccaaaacttc

SEQ ID NO: 1243936 - DNA, 15 bp, Homo sapiens
atttcaccaaaactt

SEQ ID NO: 1243937 - DNA, 15 bp, Homo sapiens
catttcaccaaaact

SEQ ID NO: 1243938 - DNA, 15 bp, Homo sapiens
gcatttcaccaaaac

SEQ ID NO: 1243939 - DNA, 15 bp, Homo sapiens
agcatttcaccaaaa

SEQ ID NO: 1243940 - DNA, 15 bp, Homo sapiens
tagcatttcaccaaa

SEQ ID NO: 1243941 - DNA, 15 bp, Homo sapiens
atagcatttcaccaa

SEQ ID NO: 1243942 - DNA, 15 bp, Homo sapiens
catagcatttcacca

SEQ ID NO: 1243943 - DNA, 15 bp, Homo sapiens
acatagcatttcacc

SEQ ID NO: 1243944 - DNA, 15 bp, Homo sapiens
cacatagcatttcac

SEQ ID NO: 1243945 - DNA, 15 bp, Homo sapiens
tcacatagcatttca

SEQ ID NO: 1243946 - DNA, 15 bp, Homo sapiens
ttcacatagcatttc

SEQ ID NO: 1243947 - DNA, 15 bp, Homo sapiens
attcacatagcattt

SEQ ID NO: 1243948 - DNA, 15 bp, Homo sapiens
aattcacatagcatt

SEQ ID NO: 1243949 - DNA, 15 bp, Homo sapiens
aaattcacatagcat

SEQ ID NO: 1243950 - DNA, 15 bp, Homo sapiens
aaaattcacatagca

SEQ ID NO: 1243951 - DNA, 15 bp, Homo sapiens
gaaaattcacatagc

SEQ ID NO: 1243952 - DNA, 15 bp, Homo sapiens
ggaaaattcacatag

SEQ ID NO: 1243953 - DNA, 15 bp, Homo sapiens
gggaaaattcacata

SEQ ID NO: 1243954 - DNA, 15 bp, Homo sapiens
tgggaaaattcacat

SEQ ID NO: 1243955 - DNA, 15 bp, Homo sapiens
atgggaaaattcaca

SEQ ID NO: 1243956 - DNA, 15 bp, Homo sapiens
tatgggaaaattcac

SEQ ID NO: 1243957 - DNA, 15 bp, Homo sapiens
ttatgggaaaattca

SEQ ID NO: 1243958 - DNA, 15 bp, Homo sapiens
cttatgggaaaattc

SEQ ID NO: 1243959 - DNA, 15 bp, Homo sapiens
acttatgggaaaatt

SEQ ID NO: 1243960 - DNA, 15 bp, Homo sapiens
aacttatgggaaaat

SEQ ID NO: 1243961 - DNA, 15 bp, Homo sapiens
taacttatgggaaaa

SEQ ID NO: 1243962 - DNA, 15 bp, Homo sapiens
ttaacttatgggaaa

SEQ ID NO: 1243963 - DNA, 15 bp, Homo sapiens
tttaacttatgggaa

SEQ ID NO: 1243964 - DNA, 15 bp, Homo sapiens
atttaacttatggga

SEQ ID NO: 1243965 - DNA, 15 bp, Homo sapiens
gatttaacttatggg

SEQ ID NO: 1243966 - DNA, 15 bp, Homo sapiens
agatttaacttatgg

SEQ ID NO: 1243967 - DNA, 15 bp, Homo sapiens
gagatttaacttatg

SEQ ID NO: 1243968 - DNA, 15 bp, Homo sapiens
agagatttaacttat

SEQ ID NO: 1243969 - DNA, 15 bp, Homo sapiens
tagagatttaactta

SEQ ID NO: 1243970 - DNA, 15 bp, Homo sapiens
ctagagatttaactt

SEQ ID NO: 1243971 - DNA, 15 bp, Homo sapiens
gctagagatttaact

SEQ ID NO: 1243972 - DNA, 15 bp, Homo sapiens
tgctagagatttaac

SEQ ID NO: 1243973 - DNA, 15 bp, Homo sapiens
gtgctagagatttaa

SEQ ID NO: 1243974 - DNA, 15 bp, Homo sapiens
agtgctagagattta

SEQ ID NO: 1243975 - DNA, 15 bp, Homo sapiens
tagtgctagagattt

SEQ ID NO: 1243976 - DNA, 15 bp, Homo sapiens
ctagtgctagagatt

SEQ ID NO: 1243977 - DNA, 15 bp, Homo sapiens
tctagtgctagagat

SEQ ID NO: 1243978 - DNA, 15 bp, Homo sapiens
ttctagtgctagaga

SEQ ID NO: 1243979 - DNA, 15 bp, Homo sapiens
tttctagtgctagag

SEQ ID NO: 1243980 - DNA, 15 bp, Homo sapiens
ttttctagtgctaga

SEQ ID NO: 1243981 - DNA, 15 bp, Homo sapiens
tttttctagtgctag

SEQ ID NO: 1243982 - DNA, 15 bp, Homo sapiens
gtttttctagtgcta

SEQ ID NO: 1243983 - DNA, 15 bp, Homo sapiens
agtttttctagtgct

SEQ ID NO: 1243984 - DNA, 15 bp, Homo sapiens
cagtttttctagtgc

SEQ ID NO: 1243985 - DNA, 15 bp, Homo sapiens
tcagtttttctagtg

SEQ ID NO: 1243986 - DNA, 15 bp, Homo sapiens
ctcagtttttctagt

SEQ ID NO: 1243987 - DNA, 15 bp, Homo sapiens
actcagtttttctag

SEQ ID NO: 1243988 - DNA, 15 bp, Homo sapiens
gactcagtttttcta

SEQ ID NO: 1243989 - DNA, 15 bp, Homo sapiens
tgactcagtttttct

SEQ ID NO: 1243990 - DNA, 15 bp, Homo sapiens
atgactcagtttttc

SEQ ID NO: 1243991 - DNA, 15 bp, Homo sapiens
tatgactcagttttt

SEQ ID NO: 1243992 - DNA, 15 bp, Homo sapiens
ttatgactcagtttt

SEQ ID NO: 1243993 - DNA, 15 bp, Homo sapiens
tttatgactcagttt

SEQ ID NO: 1243994 - DNA, 15 bp, Homo sapiens
ttttatgactcagtt

SEQ ID NO: 1243995 - DNA, 15 bp, Homo sapiens
gttttatgactcagt

SEQ ID NO: 1243996 - DNA, 15 bp, Homo sapiens
tgttttatgactcag

SEQ ID NO: 1243997 - DNA, 15 bp, Homo sapiens
atgttttatgactca

SEQ ID NO: 1243998 - DNA, 15 bp, Homo sapiens
tatgttttatgactc

SEQ ID NO: 1243999 - DNA, 15 bp, Homo sapiens
ttatgttttatgact

SEQ ID NO: 1244000 - DNA, 15 bp, Homo sapiens
tttatgttttatgac

SEQ ID NO: 1244001 - DNA, 15 bp, Homo sapiens
atttatgttttatga

SEQ ID NO: 1244002 - DNA, 15 bp, Homo sapiens
aatttatgttttatg

SEQ ID NO: 1244003 - DNA, 15 bp, Homo sapiens
caatttatgttttat

SEQ ID NO: 1244004 - DNA, 15 bp, Homo sapiens
acaatttatgtttta

SEQ ID NO: 1244005 - DNA, 15 bp, Homo sapiens
aacaatttatgtttt

SEQ ID NO: 1244006 - DNA, 15 bp, Homo sapiens
aaacaatttatgttt

SEQ ID NO: 1244007 - DNA, 15 bp, Homo sapiens
aaaacaatttatgtt

SEQ ID NO: 1244008 - DNA, 15 bp, Homo sapiens
taaaacaatttatgt

SEQ ID NO: 1244009 - DNA, 15 bp, Homo sapiens
ataaaacaatttatg

SEQ ID NO: 1244010 - DNA, 15 bp, Homo sapiens
aataaaacaatttat

SEQ ID NO: 1244011 - DNA, 15 bp, Homo sapiens
caataaaacaattta

SEQ ID NO: 1244012 - DNA, 15 bp, Homo sapiens
acaataaaacaattt

SEQ ID NO: 1244013 - DNA, 15 bp, Homo sapiens
aacaataaaacaatt

SEQ ID NO: 1244014 - DNA, 15 bp, Homo sapiens
taacaataaaacaat

SEQ ID NO: 1244015 - DNA, 15 bp, Homo sapiens
ataacaataaaacaa

SEQ ID NO: 1244016 - DNA, 15 bp, Homo sapiens
gataacaataaaaca

SEQ ID NO: 1244017 - DNA, 15 bp, Homo sapiens
ggataacaataaaac

SEQ ID NO: 1244018 - DNA, 15 bp, Homo sapiens
aggataacaataaaa

SEQ ID NO: 1244019 - DNA, 15 bp, Homo sapiens
gaggataacaataaa

SEQ ID NO: 1244020 - DNA, 15 bp, Homo sapiens
tgaggataacaataa

SEQ ID NO: 1244021 - DNA, 15 bp, Homo sapiens
ttgaggataacaata

SEQ ID NO: 1244022 - DNA, 15 bp, Homo sapiens
tttgaggataacaat

SEQ ID NO: 1244023 - DNA, 15 bp, Homo sapiens
ctttgaggataacaa

SEQ ID NO: 1244024 - DNA, 15 bp, Homo sapiens
gctttgaggataaca

SEQ ID NO: 1244025 - DNA, 15 bp, Homo sapiens
agctttgaggataac

SEQ ID NO: 1244026 - DNA, 15 bp, Homo sapiens
cagctttgaggataa

SEQ ID NO: 1244027 - DNA, 15 bp, Homo sapiens
acagctttgaggata

SEQ ID NO: 1244028 - DNA, 15 bp, Homo sapiens
cacagctttgaggat

SEQ ID NO: 1244029 - DNA, 15 bp, Homo sapiens
ccacagctttgagga

SEQ ID NO: 1244030 - DNA, 15 bp, Homo sapiens
tccacagctttgagg

SEQ ID NO: 1244031 - DNA, 15 bp, Homo sapiens
ttccacagctttgag

SEQ ID NO: 1244032 - DNA, 15 bp, Homo sapiens
cttccacagctttga

SEQ ID NO: 1244033 - DNA, 15 bp, Homo sapiens
acttccacagctttg

SEQ ID NO: 1244034 - DNA, 15 bp, Homo sapiens
cacttccacagcttt

SEQ ID NO: 1244035 - DNA, 15 bp, Homo sapiens
ccacttccacagctt

SEQ ID NO: 1244036 - DNA, 15 bp, Homo sapiens
tccacttccacagct

SEQ ID NO: 1244037 - DNA, 15 bp, Homo sapiens
atccacttccacagc

SEQ ID NO: 1244038 - DNA, 15 bp, Homo sapiens
catccacttccacag

SEQ ID NO: 1244039 - DNA, 15 bp, Homo sapiens
gcatccacttccaca

SEQ ID NO: 1244040 - DNA, 15 bp, Homo sapiens
agcatccacttccac

SEQ ID NO: 1244041 - DNA, 15 bp, Homo sapiens
aagcatccacttcca

SEQ ID NO: 1244042 - DNA, 15 bp, Homo sapiens
gaagcatccacttcc

SEQ ID NO: 1244043 - DNA, 15 bp, Homo sapiens
ggaagcatccacttc

SEQ ID NO: 1244044 - DNA, 15 bp, Homo sapiens
tggaagcatccactt

SEQ ID NO: 1244045 - DNA, 15 bp, Homo sapiens
ctggaagcatccact

SEQ ID NO: 1244046 - DNA, 15 bp, Homo sapiens
cctggaagcatccac

SEQ ID NO: 1244047 - DNA, 15 bp, Homo sapiens
ccctggaagcatcca

SEQ ID NO: 1244048 - DNA, 15 bp, Homo sapiens
cccctggaagcatcc

SEQ ID NO: 1244049 - DNA, 15 bp, Homo sapiens
acccctggaagcatc

SEQ ID NO: 1244050 - DNA, 15 bp, Homo sapiens
cacccctggaagcat

SEQ ID NO: 1244051 - DNA, 15 bp, Homo sapiens
ccacccctggaagca

SEQ ID NO: 1244052 - DNA, 15 bp, Homo sapiens
cccacccctggaagc

SEQ ID NO: 1244053 - DNA, 15 bp, Homo sapiens
ccccacccctggaag

SEQ ID NO: 1244054 - DNA, 15 bp, Homo sapiens
accccacccctggaa

SEQ ID NO: 1244055 - DNA, 15 bp, Homo sapiens
taccccacccctgga

SEQ ID NO: 1244056 - DNA, 15 bp, Homo sapiens
ataccccacccctgg

SEQ ID NO: 1244057 - DNA, 15 bp, Homo sapiens
cataccccacccctg

SEQ ID NO: 1244058 - DNA, 15 bp, Homo sapiens
tcataccccacccct

SEQ ID NO: 1244059 - DNA, 15 bp, Homo sapiens
ctcataccccacccc

SEQ ID NO: 1244060 - DNA, 15 bp, Homo sapiens
actcataccccaccc

SEQ ID NO: 1244061 - DNA, 15 bp, Homo sapiens
cactcataccccacc

SEQ ID NO: 1244062 - DNA, 15 bp, Homo sapiens
tcactcataccccac

SEQ ID NO: 1244063 - DNA, 15 bp, Homo sapiens
atcactcatacccca

SEQ ID NO: 1244064 - DNA, 15 bp, Homo sapiens
catcactcatacccc

SEQ ID NO: 1244065 - DNA, 15 bp, Homo sapiens
tcatcactcataccc

SEQ ID NO: 1244066 - DNA, 15 bp, Homo sapiens
ctcatcactcatacc

SEQ ID NO: 1244067 - DNA, 15 bp, Homo sapiens
gctcatcactcatac

SEQ ID NO: 1244068 - DNA, 15 bp, Homo sapiens
tgctcatcactcata

SEQ ID NO: 1244069 - DNA, 15 bp, Homo sapiens
gtgctcatcactcat

SEQ ID NO: 1244070 - DNA, 15 bp, Homo sapiens
agtgctcatcactca

SEQ ID NO: 1244071 - DNA, 15 bp, Homo sapiens
cagtgctcatcactc

SEQ ID NO: 1244072 - DNA, 15 bp, Homo sapiens
acagtgctcatcact

SEQ ID NO: 1244073 - DNA, 15 bp, Homo sapiens
tacagtgctcatcac

SEQ ID NO: 1244074 - DNA, 15 bp, Homo sapiens
atacagtgctcatca

SEQ ID NO: 1244075 - DNA, 15 bp, Homo sapiens
gatacagtgctcatc

SEQ ID NO: 1244076 - DNA, 15 bp, Homo sapiens
ggatacagtgctcat

SEQ ID NO: 1244077 - DNA, 15 bp, Homo sapiens
aggatacagtgctca

SEQ ID NO: 1244078 - DNA, 15 bp, Homo sapiens
taggatacagtgctc

SEQ ID NO: 1244079 - DNA, 15 bp, Homo sapiens
ataggatacagtgct

SEQ ID NO: 1244080 - DNA, 15 bp, Homo sapiens
cataggatacagtgc

SEQ ID NO: 1244081 - DNA, 15 bp, Homo sapiens
ccataggatacagtg

SEQ ID NO: 1244082 - DNA, 15 bp, Homo sapiens
accataggatacagt

SEQ ID NO: 1244083 - DNA, 15 bp, Homo sapiens
gaccataggatacag

SEQ ID NO: 1244084 - DNA, 15 bp, Homo sapiens
agaccataggataca

SEQ ID NO: 1244085 - DNA, 15 bp, Homo sapiens
cagaccataggatac

SEQ ID NO: 1244086 - DNA, 15 bp, Homo sapiens
gcagaccataggata

SEQ ID NO: 1244087 - DNA, 15 bp, Homo sapiens
agcagaccataggat

SEQ ID NO: 1244088 - DNA, 15 bp, Homo sapiens
aagcagaccatagga

SEQ ID NO: 1244089 - DNA, 15 bp, Homo sapiens
gaagcagaccatagg

SEQ ID NO: 1244090 - DNA, 15 bp, Homo sapiens
ggaagcagaccatag

SEQ ID NO: 1244091 - DNA, 15 bp, Homo sapiens
gggaagcagaccata

SEQ ID NO: 1244092 - DNA, 15 bp, Homo sapiens
tgggaagcagaccat

SEQ ID NO: 1244093 - DNA, 15 bp, Homo sapiens
ctgggaagcagacca

SEQ ID NO: 1244094 - DNA, 15 bp, Homo sapiens
tctgggaagcagacc

SEQ ID NO: 1244095 - DNA, 15 bp, Homo sapiens
ttctgggaagcagac

SEQ ID NO: 1244096 - DNA, 15 bp, Homo sapiens
gttctgggaagcaga

SEQ ID NO: 1244097 - DNA, 15 bp, Homo sapiens
agttctgggaagcag

SEQ ID NO: 1244098 - DNA, 15 bp, Homo sapiens
aagttctgggaagca

SEQ ID NO: 1244099 - DNA, 15 bp, Homo sapiens
gaagttctgggaagc

SEQ ID NO: 1244100 - DNA, 15 bp, Homo sapiens
agaagttctgggaag

SEQ ID NO: 1244101 - DNA, 15 bp, Homo sapiens
aagaagttctgggaa

SEQ ID NO: 1244102 - DNA, 15 bp, Homo sapiens
gaagaagttctggga

SEQ ID NO: 1244103 - DNA, 15 bp, Homo sapiens
agaagaagttctggg

SEQ ID NO: 1244104 - DNA, 15 bp, Homo sapiens
aagaagaagttctgg

SEQ ID NO: 1244105 - DNA, 15 bp, Homo sapiens
aaagaagaagttctg

SEQ ID NO: 1244106 - DNA, 15 bp, Homo sapiens
caaagaagaagttct

SEQ ID NO: 1244107 - DNA, 15 bp, Homo sapiens
gcaaagaagaagttc

SEQ ID NO: 1244108 - DNA, 15 bp, Homo sapiens
agcaaagaagaagtt

SEQ ID NO: 1244109 - DNA, 15 bp, Homo sapiens
gagcaaagaagaagt

SEQ ID NO: 1244110 - DNA, 15 bp, Homo sapiens
ggagcaaagaagaag

SEQ ID NO: 1244111 - DNA, 15 bp, Homo sapiens
gggagcaaagaagaa

SEQ ID NO: 1244112 - DNA, 15 bp, Homo sapiens
ggggagcaaagaaga

SEQ ID NO: 1244113 - DNA, 15 bp, Homo sapiens
aggggagcaaagaag

SEQ ID NO: 1244114 - DNA, 15 bp, Homo sapiens
gaggggagcaaagaa

SEQ ID NO: 1244115 - DNA, 15 bp, Homo sapiens
ggaggggagcaaaga

SEQ ID NO: 1244116 - DNA, 15 bp, Homo sapiens
gggaggggagcaaag

SEQ ID NO: 1244117 - DNA, 15 bp, Homo sapiens
agggaggggagcaaa

SEQ ID NO: 1244118 - DNA, 15 bp, Homo sapiens
aagggaggggagcaa

SEQ ID NO: 1244119 - DNA, 15 bp, Homo sapiens
gaagggaggggagca

SEQ ID NO: 1244120 - DNA, 15 bp, Homo sapiens
ggaagggaggggagc

SEQ ID NO: 1244121 - DNA, 15 bp, Homo sapiens
tggaagggaggggag

SEQ ID NO: 1244122 - DNA, 15 bp, Homo sapiens
ttggaagggagggga

SEQ ID NO: 1244123 - DNA, 15 bp, Homo sapiens
tttggaagggagggg

SEQ ID NO: 1244124 - DNA, 15 bp, Homo sapiens
ttttggaagggaggg

SEQ ID NO: 1244125 - DNA, 15 bp, Homo sapiens
gttttggaagggagg

SEQ ID NO: 1244126 - DNA, 15 bp, Homo sapiens
agttttggaagggag

SEQ ID NO: 1244127 - DNA, 15 bp, Homo sapiens
gagttttggaaggga

SEQ ID NO: 1244128 - DNA, 15 bp, Homo sapiens
agagttttggaaggg

SEQ ID NO: 1244129 - DNA, 15 bp, Homo sapiens
gagagttttggaagg

SEQ ID NO: 1244130 - DNA, 15 bp, Homo sapiens
ggagagttttggaag

SEQ ID NO: 1244131 - DNA, 15 bp, Homo sapiens
gggagagttttggaa

SEQ ID NO: 1244132 - DNA, 15 bp, Homo sapiens
tgggagagttttgga

SEQ ID NO: 1244133 - DNA, 15 bp, Homo sapiens
gtgggagagttttgg

SEQ ID NO: 1244134 - DNA, 15 bp, Homo sapiens
tgtgggagagttttg

SEQ ID NO: 1244135 - DNA, 15 bp, Homo sapiens
ttgtgggagagtttt

SEQ ID NO: 1244136 - DNA, 15 bp, Homo sapiens
tttgtgggagagttt

SEQ ID NO: 1244137 - DNA, 15 bp, Homo sapiens
atttgtgggagagtt

SEQ ID NO: 1244138 - DNA, 15 bp, Homo sapiens
tatttgtgggagagt

SEQ ID NO: 1244139 - DNA, 15 bp, Homo sapiens
ttatttgtgggagag

SEQ ID NO: 1244140 - DNA, 15 bp, Homo sapiens
cttatttgtgggaga

SEQ ID NO: 1244141 - DNA, 15 bp, Homo sapiens
gcttatttgtgggag

SEQ ID NO: 1244142 - DNA, 15 bp, Homo sapiens
cgcttatttgtggga

SEQ ID NO: 1244143 - DNA, 15 bp, Homo sapiens
acgcttatttgtggg

SEQ ID NO: 1244144 - DNA, 15 bp, Homo sapiens
cacgcttatttgtgg

SEQ ID NO: 1244145 - DNA, 15 bp, Homo sapiens
gcacgcttatttgtg

SEQ ID NO: 1244146 - DNA, 15 bp, Homo sapiens
ggcacgcttatttgt

SEQ ID NO: 1244147 - DNA, 15 bp, Homo sapiens
tggcacgcttatttg

SEQ ID NO: 1244148 - DNA, 15 bp, Homo sapiens
ctggcacgcttattt

SEQ ID NO: 1244149 - DNA, 15 bp, Homo sapiens
tctggcacgcttatt

SEQ ID NO: 1244150 - DNA, 15 bp, Homo sapiens
ctctggcacgcttat

SEQ ID NO: 1244151 - DNA, 15 bp, Homo sapiens
cctctggcacgctta

SEQ ID NO: 1244152 - DNA, 15 bp, Homo sapiens
acctctggcacgctt

SEQ ID NO: 1244153 - DNA, 15 bp, Homo sapiens
cacctctggcacgct

SEQ ID NO: 1244154 - DNA, 15 bp, Homo sapiens
acacctctggcacgc

SEQ ID NO: 1244155 - DNA, 15 bp, Homo sapiens
cacacctctggcacg

SEQ ID NO: 1244156 - DNA, 15 bp, Homo sapiens
acacacctctggcac

SEQ ID NO: 1244157 - DNA, 15 bp, Homo sapiens
gacacacctctggca

SEQ ID NO: 1244158 - DNA, 15 bp, Homo sapiens
ggacacacctctggc

SEQ ID NO: 1244159 - DNA, 15 bp, Homo sapiens
tggacacacctctgg

SEQ ID NO: 1244160 - DNA, 15 bp, Homo sapiens
atggacacacctctg

SEQ ID NO: 1244161 - DNA, 15 bp, Homo sapiens
aatggacacacctct

SEQ ID NO: 1244162 - DNA, 15 bp, Homo sapiens
gaatggacacacctc

SEQ ID NO: 1244163 - DNA, 15 bp, Homo sapiens
agaatggacacacct

SEQ ID NO: 1244164 - DNA, 15 bp, Homo sapiens
gagaatggacacacc

SEQ ID NO: 1244165 - DNA, 15 bp, Homo sapiens
cgagaatggacacac

SEQ ID NO: 1244166 - DNA, 15 bp, Homo sapiens
ccgagaatggacaca

SEQ ID NO: 1244167 - DNA, 15 bp, Homo sapiens
accgagaatggacac

SEQ ID NO: 1244168 - DNA, 15 bp, Homo sapiens
aaccgagaatggaca

SEQ ID NO: 1244169 - DNA, 15 bp, Homo sapiens
gaaccgagaatggac

SEQ ID NO: 1244170 - DNA, 15 bp, Homo sapiens
agaaccgagaatgga

SEQ ID NO: 1244171 - DNA, 15 bp, Homo sapiens
aagaaccgagaatgg

SEQ ID NO: 1244172 - DNA, 15 bp, Homo sapiens
caagaaccgagaatg

SEQ ID NO: 1244173 - DNA, 15 bp, Homo sapiens
ccaagaaccgagaat

SEQ ID NO: 1244174 - DNA, 15 bp, Homo sapiens
tccaagaaccgagaa

SEQ ID NO: 1244175 - DNA, 15 bp, Homo sapiens
atccaagaaccgaga

SEQ ID NO: 1244176 - DNA, 15 bp, Homo sapiens
aatccaagaaccgag

SEQ ID NO: 1244177 - DNA, 15 bp, Homo sapiens
aaatccaagaaccga

SEQ ID NO: 1244178 - DNA, 15 bp, Homo sapiens
caaatccaagaaccg

SEQ ID NO: 1244179 - DNA, 15 bp, Homo sapiens
gcaaatccaagaacc

SEQ ID NO: 1244180 - DNA, 15 bp, Homo sapiens
agcaaatccaagaac

SEQ ID NO: 1244181 - DNA, 15 bp, Homo sapiens
cagcaaatccaagaa

SEQ ID NO: 1244182 - DNA, 15 bp, Homo sapiens
acagcaaatccaaga

SEQ ID NO: 1244183 - DNA, 15 bp, Homo sapiens
cacagcaaatccaag

SEQ ID NO: 1244184 - DNA, 15 bp, Homo sapiens
gcacagcaaatccaa

SEQ ID NO: 1244185 - DNA, 15 bp, Homo sapiens
agcacagcaaatcca

SEQ ID NO: 1244186 - DNA, 15 bp, Homo sapiens
gagcacagcaaatcc

SEQ ID NO: 1244187 - DNA, 15 bp, Homo sapiens
agagcacagcaaatc

SEQ ID NO: 1244188 - DNA, 15 bp, Homo sapiens
gagagcacagcaaat

SEQ ID NO: 1244189 - DNA, 15 bp, Homo sapiens
tgagagcacagcaaa

SEQ ID NO: 1244190 - DNA, 15 bp, Homo sapiens
ctgagagcacagcaa

SEQ ID NO: 1244191 - DNA, 15 bp, Homo sapiens
gctgagagcacagca

SEQ ID NO: 1244192 - DNA, 15 bp, Homo sapiens
agctgagagcacagc

SEQ ID NO: 1244193 - DNA, 15 bp, Homo sapiens
gagctgagagcacag

SEQ ID NO: 1244194 - DNA, 15 bp, Homo sapiens
agagctgagagcaca

SEQ ID NO: 1244195 - DNA, 15 bp, Homo sapiens
tagagctgagagcac

SEQ ID NO: 1244196 - DNA, 15 bp, Homo sapiens
gtagagctgagagca

SEQ ID NO: 1244197 - DNA, 15 bp, Homo sapiens
tgtagagctgagagc

SEQ ID NO: 1244198 - DNA, 15 bp, Homo sapiens
atgtagagctgagag

SEQ ID NO: 1244199 - DNA, 15 bp, Homo sapiens
tatgtagagctgaga

SEQ ID NO: 1244200 - DNA, 15 bp, Homo sapiens
ttatgtagagctgag

SEQ ID NO: 1244201 - DNA, 15 bp, Homo sapiens
cttatgtagagctga

SEQ ID NO: 1244202 - DNA, 15 bp, Homo sapiens
ccttatgtagagctg

SEQ ID NO: 1244203 - DNA, 15 bp, Homo sapiens
gccttatgtagagct

SEQ ID NO: 1244204 - DNA, 15 bp, Homo sapiens
tgccttatgtagagc

SEQ ID NO: 1244205 - DNA, 15 bp, Homo sapiens
ctgccttatgtagag

SEQ ID NO: 1244206 - DNA, 15 bp, Homo sapiens
cctgccttatgtaga

SEQ ID NO: 1244207 - DNA, 15 bp, Homo sapiens
ccctgccttatgtag

SEQ ID NO: 1244208 - DNA, 15 bp, Homo sapiens
tccctgccttatgta

SEQ ID NO: 1244209 - DNA, 15 bp, Homo sapiens
atccctgccttatgt

SEQ ID NO: 1244210 - DNA, 15 bp, Homo sapiens
aatccctgccttatg

SEQ ID NO: 1244211 - DNA, 15 bp, Homo sapiens
caatccctgccttat

SEQ ID NO: 1244212 - DNA, 15 bp, Homo sapiens
ccaatccctgcctta

SEQ ID NO: 1244213 - DNA, 15 bp, Homo sapiens
accaatccctgcctt

SEQ ID NO: 1244214 - DNA, 15 bp, Homo sapiens
aaccaatccctgcct

SEQ ID NO: 1244215 - DNA, 15 bp, Homo sapiens
taaccaatccctgcc

SEQ ID NO: 1244216 - DNA, 15 bp, Homo sapiens
ataaccaatccctgc

SEQ ID NO: 1244217 - DNA, 15 bp, Homo sapiens
cataaccaatccctg

SEQ ID NO: 1244218 - DNA, 15 bp, Homo sapiens
acataaccaatccct

SEQ ID NO: 1244219 - DNA, 15 bp, Homo sapiens
gacataaccaatccc

SEQ ID NO: 1244220 - DNA, 15 bp, Homo sapiens
agacataaccaatcc

SEQ ID NO: 1244221 - DNA, 15 bp, Homo sapiens
gagacataaccaatc

SEQ ID NO: 1244222 - DNA, 15 bp, Homo sapiens
ggagacataaccaat

SEQ ID NO: 1244223 - DNA, 15 bp, Homo sapiens
aggagacataaccaa

SEQ ID NO: 1244224 - DNA, 15 bp, Homo sapiens
aaggagacataacca

SEQ ID NO: 1244225 - DNA, 15 bp, Homo sapiens
aaaggagacataacc

SEQ ID NO: 1244226 - DNA, 15 bp, Homo sapiens
aaaaggagacataac

SEQ ID NO: 1244227 - DNA, 15 bp, Homo sapiens
caaaaggagacataa

SEQ ID NO: 1244228 - DNA, 15 bp, Homo sapiens
tcaaaaggagacata

SEQ ID NO: 1244229 - DNA, 15 bp, Homo sapiens
ttcaaaaggagacat

SEQ ID NO: 1244230 - DNA, 15 bp, Homo sapiens
cttcaaaaggagaca

SEQ ID NO: 1244231 - DNA, 15 bp, Homo sapiens
acttcaaaaggagac

SEQ ID NO: 1244232 - DNA, 15 bp, Homo sapiens
aacttcaaaaggaga

SEQ ID NO: 1244233 - DNA, 15 bp, Homo sapiens
aaacttcaaaaggag

SEQ ID NO: 1244234 - DNA, 15 bp, Homo sapiens
gaaacttcaaaagga

SEQ ID NO: 1244235 - DNA, 15 bp, Homo sapiens
tgaaacttcaaaagg

SEQ ID NO: 1244236 - DNA, 15 bp, Homo sapiens
atgaaacttcaaaag

SEQ ID NO: 1244237 - DNA, 15 bp, Homo sapiens
gatgaaacttcaaaa

SEQ ID NO: 1244238 - DNA, 15 bp, Homo sapiens
agatgaaacttcaaa

SEQ ID NO: 1244239 - DNA, 15 bp, Homo sapiens
aagatgaaacttcaa

SEQ ID NO: 1244240 - DNA, 15 bp, Homo sapiens
taagatgaaacttca

SEQ ID NO: 1244241 - DNA, 15 bp, Homo sapiens
ctaagatgaaacttc

SEQ ID NO: 1244242 - DNA, 15 bp, Homo sapiens
cctaagatgaaactt

SEQ ID NO: 1244243 - DNA, 15 bp, Homo sapiens
acctaagatgaaact

SEQ ID NO: 1244244 - DNA, 15 bp, Homo sapiens
tacctaagatgaaac

SEQ ID NO: 1244245 - DNA, 15 bp, Homo sapiens
ttacctaagatgaaa

SEQ ID NO: 1244246 - DNA, 15 bp, Homo sapiens
tttacctaagatgaa

SEQ ID NO: 1244247 - DNA, 15 bp, Homo sapiens
atttacctaagatga

SEQ ID NO: 1244248 - DNA, 15 bp, Homo sapiens
tatttacctaagatg

SEQ ID NO: 1244249 - DNA, 15 bp, Homo sapiens
ctatttacctaagat

SEQ ID NO: 1244250 - DNA, 15 bp, Homo sapiens
actatttacctaaga

SEQ ID NO: 1244251 - DNA, 15 bp, Homo sapiens
tactatttacctaag

SEQ ID NO: 1244252 - DNA, 15 bp, Homo sapiens
ctactatttacctaa

SEQ ID NO: 1244253 - DNA, 15 bp, Homo sapiens
cctactatttaccta

SEQ ID NO: 1244254 - DNA, 15 bp, Homo sapiens
acctactatttacct

SEQ ID NO: 1244255 - DNA, 15 bp, Homo sapiens
cacctactatttacc

SEQ ID NO: 1244256 - DNA, 15 bp, Homo sapiens
ccacctactatttac

SEQ ID NO: 1244257 - DNA, 15 bp, Homo sapiens
tccacctactattta

SEQ ID NO: 1244258 - DNA, 15 bp, Homo sapiens
ttccacctactattt

SEQ ID NO: 1244259 - DNA, 15 bp, Homo sapiens
gttccacctactatt

SEQ ID NO: 1244260 - DNA, 15 bp, Homo sapiens
ggttccacctactat

SEQ ID NO: 1244261 - DNA, 15 bp, Homo sapiens
aggttccacctacta

SEQ ID NO: 1244262 - DNA, 15 bp, Homo sapiens
taggttccacctact

SEQ ID NO: 1244263 - DNA, 15 bp, Homo sapiens
gtaggttccacctac

SEQ ID NO: 1244264 - DNA, 15 bp, Homo sapiens
ggtaggttccaccta

SEQ ID NO: 1244265 - DNA, 15 bp, Homo sapiens
gggtaggttccacct

SEQ ID NO: 1244266 - DNA, 15 bp, Homo sapiens
tgggtaggttccacc

SEQ ID NO: 1244267 - DNA, 15 bp, Homo sapiens
atgggtaggttccac

SEQ ID NO: 1244268 - DNA, 15 bp, Homo sapiens
aatgggtaggttcca

SEQ ID NO: 1244269 - DNA, 15 bp, Homo sapiens
gaatgggtaggttcc

SEQ ID NO: 1244270 - DNA, 15 bp, Homo sapiens
agaatgggtaggttc

SEQ ID NO: 1244271 - DNA, 15 bp, Homo sapiens
gagaatgggtaggtt

SEQ ID NO: 1244272 - DNA, 15 bp, Homo sapiens
agagaatgggtaggt

SEQ ID NO: 1244273 - DNA, 15 bp, Homo sapiens
aagagaatgggtagg

SEQ ID NO: 1244274 - DNA, 15 bp, Homo sapiens
aaagagaatgggtag

SEQ ID NO: 1244275 - DNA, 15 bp, Homo sapiens
taaagagaatgggta

SEQ ID NO: 1244276 - DNA, 15 bp, Homo sapiens
ataaagagaatgggt

SEQ ID NO: 1244277 - DNA, 15 bp, Homo sapiens
aataaagagaatggg

SEQ ID NO: 1244278 - DNA, 15 bp, Homo sapiens
gaataaagagaatgg

SEQ ID NO: 1244279 - DNA, 15 bp, Homo sapiens
ggaataaagagaatg

SEQ ID NO: 1244280 - DNA, 15 bp, Homo sapiens
aggaataaagagaat

SEQ ID NO: 1244281 - DNA, 15 bp, Homo sapiens
caggaataaagagaa

SEQ ID NO: 1244282 - DNA, 15 bp, Homo sapiens
tcaggaataaagaga

SEQ ID NO: 1244283 - DNA, 15 bp, Homo sapiens
ctcaggaataaagag

SEQ ID NO: 1244284 - DNA, 15 bp, Homo sapiens
gctcaggaataaaga

SEQ ID NO: 1244285 - DNA, 15 bp, Homo sapiens
ggctcaggaataaag

SEQ ID NO: 1244286 - DNA, 15 bp, Homo sapiens
tggctcaggaataaa

SEQ ID NO: 1244287 - DNA, 15 bp, Homo sapiens
ttggctcaggaataa

SEQ ID NO: 1244288 - DNA, 15 bp, Homo sapiens
cttggctcaggaata

SEQ ID NO: 1244289 - DNA, 15 bp, Homo sapiens
tcttggctcaggaat

SEQ ID NO: 1244290 - DNA, 15 bp, Homo sapiens
ttcttggctcaggaa

SEQ ID NO: 1244291 - DNA, 15 bp, Homo sapiens
cttcttggctcagga

SEQ ID NO: 1244292 - DNA, 15 bp, Homo sapiens
ccttcttggctcagg

SEQ ID NO: 1244293 - DNA, 15 bp, Homo sapiens
tccttcttggctcag

SEQ ID NO: 1244294 - DNA, 15 bp, Homo sapiens
atccttcttggctca

SEQ ID NO: 1244295 - DNA, 15 bp, Homo sapiens
catccttcttggctc

SEQ ID NO: 1244296 - DNA, 15 bp, Homo sapiens
tcatccttcttggct

SEQ ID NO: 1244297 - DNA, 15 bp, Homo sapiens
gtcatccttcttggc

SEQ ID NO: 1244298 - DNA, 15 bp, Homo sapiens
tgtcatccttcttgg

SEQ ID NO: 1244299 - DNA, 15 bp, Homo sapiens
atgtcatccttcttg

SEQ ID NO: 1244300 - DNA, 15 bp, Homo sapiens
aatgtcatccttctt

SEQ ID NO: 1244301 - DNA, 15 bp, Homo sapiens
caatgtcatccttct

SEQ ID NO: 1244302 - DNA, 15 bp, Homo sapiens
gcaatgtcatccttc

SEQ ID NO: 1244303 - DNA, 15 bp, Homo sapiens
agcaatgtcatcctt

SEQ ID NO: 1244304 - DNA, 15 bp, Homo sapiens
gagcaatgtcatcct

SEQ ID NO: 1244305 - DNA, 15 bp, Homo sapiens
agagcaatgtcatcc

SEQ ID NO: 1244306 - DNA, 15 bp, Homo sapiens
aagagcaatgtcatc

SEQ ID NO: 1244307 - DNA, 15 bp, Homo sapiens
aaagagcaatgtcat

SEQ ID NO: 1244308 - DNA, 15 bp, Homo sapiens
caaagagcaatgtca

SEQ ID NO: 1244309 - DNA, 15 bp, Homo sapiens
gcaaagagcaatgtc

SEQ ID NO: 1244310 - DNA, 15 bp, Homo sapiens
agcaaagagcaatgt

SEQ ID NO: 1244311 - DNA, 15 bp, Homo sapiens
aagcaaagagcaatg

SEQ ID NO: 1244312 - DNA, 15 bp, Homo sapiens
aaagcaaagagcaat

SEQ ID NO: 1244313 - DNA, 15 bp, Homo sapiens
caaagcaaagagcaa

SEQ ID NO: 1244314 - DNA, 15 bp, Homo sapiens
acaaagcaaagagca

SEQ ID NO: 1244315 - DNA, 15 bp, Homo sapiens
aacaaagcaaagagc

SEQ ID NO: 1244316 - DNA, 15 bp, Homo sapiens
aaacaaagcaaagag

SEQ ID NO: 1244317 - DNA, 15 bp, Homo sapiens
taaacaaagcaaaga

SEQ ID NO: 1244318 - DNA, 15 bp, Homo sapiens
ttaaacaaagcaaag

SEQ ID NO: 1244319 - DNA, 15 bp, Homo sapiens
gttaaacaaagcaaa

SEQ ID NO: 1244320 - DNA, 15 bp, Homo sapiens
tgttaaacaaagcaa

SEQ ID NO: 1244321 - DNA, 15 bp, Homo sapiens
ttgttaaacaaagca

SEQ ID NO: 1244322 - DNA, 15 bp, Homo sapiens
cttgttaaacaaagc

SEQ ID NO: 1244323 - DNA, 15 bp, Homo sapiens
acttgttaaacaaag

SEQ ID NO: 1244324 - DNA, 15 bp, Homo sapiens
tacttgttaaacaaa

SEQ ID NO: 1244325 - DNA, 15 bp, Homo sapiens
ttacttgttaaacaa

SEQ ID NO: 1244326 - DNA, 15 bp, Homo sapiens
attacttgttaaaca

SEQ ID NO: 1244327 - DNA, 15 bp, Homo sapiens
gattacttgttaaac

SEQ ID NO: 1244328 - DNA, 15 bp, Homo sapiens
agattacttgttaaa

SEQ ID NO: 1244329 - DNA, 15 bp, Homo sapiens
gagattacttgttaa

SEQ ID NO: 1244330 - DNA, 15 bp, Homo sapiens
agagattacttgtta

SEQ ID NO: 1244331 - DNA, 15 bp, Homo sapiens
cagagattacttgtt

SEQ ID NO: 1244332 - DNA, 15 bp, Homo sapiens
acagagattacttgt

SEQ ID NO: 1244333 - DNA, 15 bp, Homo sapiens
aacagagattacttg

SEQ ID NO: 1244334 - DNA, 15 bp, Homo sapiens
aaacagagattactt

SEQ ID NO: 1244335 - DNA, 15 bp, Homo sapiens
caaacagagattact

SEQ ID NO: 1244336 - DNA, 15 bp, Homo sapiens
gcaaacagagattac

SEQ ID NO: 1244337 - DNA, 15 bp, Homo sapiens
ggcaaacagagatta

SEQ ID NO: 1244338 - DNA, 15 bp, Homo sapiens
tggcaaacagagatt

SEQ ID NO: 1244339 - DNA, 15 bp, Homo sapiens
ctggcaaacagagat

SEQ ID NO: 1244340 - DNA, 15 bp, Homo sapiens
tctggcaaacagaga

SEQ ID NO: 1244341 - DNA, 15 bp, Homo sapiens
ctctggcaaacagag

SEQ ID NO: 1244342 - DNA, 15 bp, Homo sapiens
tctctggcaaacaga

SEQ ID NO: 1244343 - DNA, 15 bp, Homo sapiens
ttctctggcaaacag

SEQ ID NO: 1244344 - DNA, 15 bp, Homo sapiens
tttctctggcaaaca

SEQ ID NO: 1244345 - DNA, 15 bp, Homo sapiens
ctttctctggcaaac

SEQ ID NO: 1244346 - DNA, 15 bp, Homo sapiens
gctttctctggcaaa

SEQ ID NO: 1244347 - DNA, 15 bp, Homo sapiens
agctttctctggcaa

SEQ ID NO: 1244348 - DNA, 15 bp, Homo sapiens
aagctttctctggca

SEQ ID NO: 1244349 - DNA, 15 bp, Homo sapiens
gaagctttctctggc

SEQ ID NO: 1244350 - DNA, 15 bp, Homo sapiens
tgaagctttctctgg

SEQ ID NO: 1244351 - DNA, 15 bp, Homo sapiens
ctgaagctttctctg

SEQ ID NO: 1244352 - DNA, 15 bp, Homo sapiens
tctgaagctttctct

SEQ ID NO: 1244353 - DNA, 15 bp, Homo sapiens
atctgaagctttctc

SEQ ID NO: 1244354 - DNA, 15 bp, Homo sapiens
gatctgaagctttct

SEQ ID NO: 1244355 - DNA, 15 bp, Homo sapiens
agatctgaagctttc

SEQ ID NO: 1244356 - DNA, 15 bp, Homo sapiens
tagatctgaagcttt

SEQ ID NO: 1244357 - DNA, 15 bp, Homo sapiens
atagatctgaagctt

SEQ ID NO: 1244358 - DNA, 15 bp, Homo sapiens
gatagatctgaagct

SEQ ID NO: 1244359 - DNA, 15 bp, Homo sapiens
agatagatctgaagc

SEQ ID NO: 1244360 - DNA, 15 bp, Homo sapiens
tagatagatctgaag

SEQ ID NO: 1244361 - DNA, 15 bp, Homo sapiens
atagatagatctgaa

SEQ ID NO: 1244362 - DNA, 15 bp, Homo sapiens
tatagatagatctga

SEQ ID NO: 1244363 - DNA, 15 bp, Homo sapiens
atatagatagatctg

SEQ ID NO: 1244364 - DNA, 15 bp, Homo sapiens
gatatagatagatct

SEQ ID NO: 1244365 - DNA, 15 bp, Homo sapiens
agatatagatagatc

SEQ ID NO: 1244366 - DNA, 15 bp, Homo sapiens
gagatatagatagat

SEQ ID NO: 1244367 - DNA, 15 bp, Homo sapiens
agagatatagataga

SEQ ID NO: 1244368 - DNA, 15 bp, Homo sapiens
gagagatatagatag

SEQ ID NO: 1244369 - DNA, 15 bp, Homo sapiens
agagagatatagata

SEQ ID NO: 1244370 - DNA, 15 bp, Homo sapiens
cagagagatatagat

SEQ ID NO: 1244371 - DNA, 15 bp, Homo sapiens
ccagagagatataga

SEQ ID NO: 1244372 - DNA, 15 bp, Homo sapiens
gccagagagatatag

SEQ ID NO: 1244373 - DNA, 15 bp, Homo sapiens
tgccagagagatata

SEQ ID NO: 1244374 - DNA, 15 bp, Homo sapiens
atgccagagagatat

SEQ ID NO: 1244375 - DNA, 15 bp, Homo sapiens
aatgccagagagata

SEQ ID NO: 1244376 - DNA, 15 bp, Homo sapiens
taatgccagagagat

SEQ ID NO: 1244377 - DNA, 15 bp, Homo sapiens
gtaatgccagagaga

SEQ ID NO: 1244378 - DNA, 15 bp, Homo sapiens
ggtaatgccagagag

SEQ ID NO: 1244379 - DNA, 15 bp, Homo sapiens
aggtaatgccagaga

SEQ ID NO: 1244380 - DNA, 15 bp, Homo sapiens
gaggtaatgccagag

SEQ ID NO: 1244381 - DNA, 15 bp, Homo sapiens
ggaggtaatgccaga

SEQ ID NO: 1244382 - DNA, 15 bp, Homo sapiens
aggaggtaatgccag

SEQ ID NO: 1244383 - DNA, 15 bp, Homo sapiens
gaggaggtaatgcca

SEQ ID NO: 1244384 - DNA, 15 bp, Homo sapiens
tgaggaggtaatgcc

SEQ ID NO: 1244385 - DNA, 15 bp, Homo sapiens
gtgaggaggtaatgc

SEQ ID NO: 1244386 - DNA, 15 bp, Homo sapiens
agtgaggaggtaatg

SEQ ID NO: 1244387 - DNA, 15 bp, Homo sapiens
tagtgaggaggtaat

SEQ ID NO: 1244388 - DNA, 15 bp, Homo sapiens
atagtgaggaggtaa

SEQ ID NO: 1244389 - DNA, 15 bp, Homo sapiens
aatagtgaggaggta

SEQ ID NO: 1244390 - DNA, 15 bp, Homo sapiens
gaatagtgaggaggt

SEQ ID NO: 1244391 - DNA, 15 bp, Homo sapiens
agaatagtgaggagg

SEQ ID NO: 1244392 - DNA, 15 bp, Homo sapiens
gagaatagtgaggag

SEQ ID NO: 1244393 - DNA, 15 bp, Homo sapiens
agagaatagtgagga

SEQ ID NO: 1244394 - DNA, 15 bp, Homo sapiens
gagagaatagtgagg

SEQ ID NO: 1244395 - DNA, 15 bp, Homo sapiens
agagagaatagtgag

SEQ ID NO: 1244396 - DNA, 15 bp, Homo sapiens
gagagagaatagtga

SEQ ID NO: 1244397 - DNA, 15 bp, Homo sapiens
agagagagaatagtg

SEQ ID NO: 1244398 - DNA, 15 bp, Homo sapiens
gagagagagaatagt

SEQ ID NO: 1244399 - DNA, 15 bp, Homo sapiens
ggagagagagaatag

SEQ ID NO: 1244400 - DNA, 15 bp, Homo sapiens
gggagagagagaata

SEQ ID NO: 1244401 - DNA, 15 bp, Homo sapiens
agggagagagagaat

SEQ ID NO: 1244402 - DNA, 15 bp, Homo sapiens
tagggagagagagaa

SEQ ID NO: 1244403 - DNA, 15 bp, Homo sapiens
ctagggagagagaga

SEQ ID NO: 1244404 - DNA, 15 bp, Homo sapiens
actagggagagagag

SEQ ID NO: 1244405 - DNA, 15 bp, Homo sapiens
cactagggagagaga

SEQ ID NO: 1244406 - DNA, 15 bp, Homo sapiens
ccactagggagagag

SEQ ID NO: 1244407 - DNA, 15 bp, Homo sapiens
cccactagggagaga

SEQ ID NO: 1244408 - DNA, 15 bp, Homo sapiens
ccccactagggagag

SEQ ID NO: 1244409 - DNA, 15 bp, Homo sapiens
accccactagggaga

SEQ ID NO: 1244410 - DNA, 15 bp, Homo sapiens
gaccccactagggag

SEQ ID NO: 1244411 - DNA, 15 bp, Homo sapiens
ggaccccactaggga

SEQ ID NO: 1244412 - DNA, 15 bp, Homo sapiens
gggaccccactaggg

SEQ ID NO: 1244413 - DNA, 15 bp, Homo sapiens
ggggaccccactagg

SEQ ID NO: 1244414 - DNA, 15 bp, Homo sapiens
aggggaccccactag

SEQ ID NO: 1244415 - DNA, 15 bp, Homo sapiens
gaggggaccccacta

SEQ ID NO: 1244416 - DNA, 15 bp, Homo sapiens
agaggggaccccact

SEQ ID NO: 1244417 - DNA, 15 bp, Homo sapiens
cagaggggaccccac

SEQ ID NO: 1244418 - DNA, 15 bp, Homo sapiens
acagaggggacccca

SEQ ID NO: 1244419 - DNA, 15 bp, Homo sapiens
cacagaggggacccc

SEQ ID NO: 1244420 - DNA, 15 bp, Homo sapiens
ccacagaggggaccc

SEQ ID NO: 1244421 - DNA, 15 bp, Homo sapiens
cccacagaggggacc

SEQ ID NO: 1244422 - DNA, 15 bp, Homo sapiens
acccacagaggggac

SEQ ID NO: 1244423 - DNA, 15 bp, Homo sapiens
aacccacagagggga

SEQ ID NO: 1244424 - DNA, 15 bp, Homo sapiens
aaacccacagagggg

SEQ ID NO: 1244425 - DNA, 15 bp, Homo sapiens
gaaacccacagaggg

SEQ ID NO: 1244426 - DNA, 15 bp, Homo sapiens
ggaaacccacagagg

SEQ ID NO: 1244427 - DNA, 15 bp, Homo sapiens
gggaaacccacagag

SEQ ID NO: 1244428 - DNA, 15 bp, Homo sapiens
agggaaacccacaga

SEQ ID NO: 1244429 - DNA, 15 bp, Homo sapiens
tagggaaacccacag

SEQ ID NO: 1244430 - DNA, 15 bp, Homo sapiens
ctagggaaacccaca

SEQ ID NO: 1244431 - DNA, 15 bp, Homo sapiens
gctagggaaacccac

SEQ ID NO: 1244432 - DNA, 15 bp, Homo sapiens
ggctagggaaaccca

SEQ ID NO: 1244433 - DNA, 15 bp, Homo sapiens
tggctagggaaaccc

SEQ ID NO: 1244434 - DNA, 15 bp, Homo sapiens
gtggctagggaaacc

SEQ ID NO: 1244435 - DNA, 15 bp, Homo sapiens
tgtggctagggaaac

SEQ ID NO: 1244436 - DNA, 15 bp, Homo sapiens
ctgtggctagggaaa

SEQ ID NO: 1244437 - DNA, 15 bp, Homo sapiens
gctgtggctagggaa

SEQ ID NO: 1244438 - DNA, 15 bp, Homo sapiens
ggctgtggctaggga

SEQ ID NO: 1244439 - DNA, 15 bp, Homo sapiens
gggctgtggctaggg

SEQ ID NO: 1244440 - DNA, 15 bp, Homo sapiens
agggctgtggctagg

SEQ ID NO: 1244441 - DNA, 15 bp, Homo sapiens
gagggctgtggctag

SEQ ID NO: 1244442 - DNA, 15 bp, Homo sapiens
tgagggctgtggcta

SEQ ID NO: 1244443 - DNA, 15 bp, Homo sapiens
ctgagggctgtggct

SEQ ID NO: 1244444 - DNA, 15 bp, Homo sapiens
cctgagggctgtggc

SEQ ID NO: 1244445 - DNA, 15 bp, Homo sapiens
ccctgagggctgtgg

SEQ ID NO: 1244446 - DNA, 15 bp, Homo sapiens
cccctgagggctgtg

SEQ ID NO: 1244447 - DNA, 15 bp, Homo sapiens
acccctgagggctgt

SEQ ID NO: 1244448 - DNA, 15 bp, Homo sapiens
cacccctgagggctg

SEQ ID NO: 1244449 - DNA, 15 bp, Homo sapiens
acacccctgagggct

SEQ ID NO: 1244450 - DNA, 15 bp, Homo sapiens
cacacccctgagggc

SEQ ID NO: 1244451 - DNA, 15 bp, Homo sapiens
acacacccctgaggg

SEQ ID NO: 1244452 - DNA, 15 bp, Homo sapiens
aacacacccctgagg

SEQ ID NO: 1244453 - DNA, 15 bp, Homo sapiens
caacacacccctgag

SEQ ID NO: 1244454 - DNA, 15 bp, Homo sapiens
acaacacacccctga

SEQ ID NO: 1244455 - DNA, 15 bp, Homo sapiens
gacaacacacccctg

SEQ ID NO: 1244456 - DNA, 15 bp, Homo sapiens
agacaacacacccct

SEQ ID NO: 1244457 - DNA, 15 bp, Homo sapiens
cagacaacacacccc

SEQ ID NO: 1244458 - DNA, 15 bp, Homo sapiens
gcagacaacacaccc

SEQ ID NO: 1244459 - DNA, 15 bp, Homo sapiens
tgcagacaacacacc

SEQ ID NO: 1244460 - DNA, 15 bp, Homo sapiens
ctgcagacaacacac

SEQ ID NO: 1244461 - DNA, 15 bp, Homo sapiens
actgcagacaacaca

SEQ ID NO: 1244462 - DNA, 15 bp, Homo sapiens
aactgcagacaacac

SEQ ID NO: 1244463 - DNA, 15 bp, Homo sapiens
caactgcagacaaca

SEQ ID NO: 1244464 - DNA, 15 bp, Homo sapiens
ccaactgcagacaac

SEQ ID NO: 1244465 - DNA, 15 bp, Homo sapiens
tccaactgcagacaa

SEQ ID NO: 1244466 - DNA, 15 bp, Homo sapiens
ctccaactgcagaca

SEQ ID NO: 1244467 - DNA, 15 bp, Homo sapiens
gctccaactgcagac

SEQ ID NO: 1244468 - DNA, 15 bp, Homo sapiens
ggctccaactgcaga

SEQ ID NO: 1244469 - DNA, 15 bp, Homo sapiens
tggctccaactgcag

SEQ ID NO: 1244470 - DNA, 15 bp, Homo sapiens
atggctccaactgca

SEQ ID NO: 1244471 - DNA, 15 bp, Homo sapiens
tatggctccaactgc

SEQ ID NO: 1244472 - DNA, 15 bp, Homo sapiens
ttatggctccaactg

SEQ ID NO: 1244473 - DNA, 15 bp, Homo sapiens
tttatggctccaact

SEQ ID NO: 1244474 - DNA, 15 bp, Homo sapiens
atttatggctccaac

SEQ ID NO: 1244475 - DNA, 15 bp, Homo sapiens
tatttatggctccaa

SEQ ID NO: 1244476 - DNA, 15 bp, Homo sapiens
ttatttatggctcca

SEQ ID NO: 1244477 - DNA, 15 bp, Homo sapiens
attatttatggctcc

SEQ ID NO: 1244478 - DNA, 15 bp, Homo sapiens
cattatttatggctc

SEQ ID NO: 1244479 - DNA, 15 bp, Homo sapiens
ccattatttatggct

SEQ ID NO: 1244480 - DNA, 15 bp, Homo sapiens
gccattatttatggc

SEQ ID NO: 1244481 - DNA, 15 bp, Homo sapiens
agccattatttatgg

SEQ ID NO: 1244482 - DNA, 15 bp, Homo sapiens
cagccattatttatg

SEQ ID NO: 1244483 - DNA, 15 bp, Homo sapiens
gcagccattatttat

SEQ ID NO: 1244484 - DNA, 15 bp, Homo sapiens
tgcagccattattta

SEQ ID NO: 1244485 - DNA, 15 bp, Homo sapiens
gtgcagccattattt

SEQ ID NO: 1244486 - DNA, 15 bp, Homo sapiens
ggtgcagccattatt

SEQ ID NO: 1244487 - DNA, 15 bp, Homo sapiens
cggtgcagccattat

SEQ ID NO: 1244488 - DNA, 15 bp, Homo sapiens
acggtgcagccatta

SEQ ID NO: 1244489 - DNA, 15 bp, Homo sapiens
cacggtgcagccatt

SEQ ID NO: 1244490 - DNA, 15 bp, Homo sapiens
tcacggtgcagccat

SEQ ID NO: 1244491 - DNA, 15 bp, Homo sapiens
ctcacggtgcagcca

SEQ ID NO: 1244492 - DNA, 15 bp, Homo sapiens
gctcacggtgcagcc

SEQ ID NO: 1244493 - DNA, 15 bp, Homo sapiens
ggctcacggtgcagc

SEQ ID NO: 1244494 - DNA, 15 bp, Homo sapiens
aggctcacggtgcag

SEQ ID NO: 1244495 - DNA, 15 bp, Homo sapiens
caggctcacggtgca

SEQ ID NO: 1244496 - DNA, 15 bp, Homo sapiens
acaggctcacggtgc

SEQ ID NO: 1244497 - DNA, 15 bp, Homo sapiens
aacaggctcacggtg

SEQ ID NO: 1244498 - DNA, 15 bp, Homo sapiens
aaacaggctcacggt

SEQ ID NO: 1244499 - DNA, 15 bp, Homo sapiens
caaacaggctcacgg

SEQ ID NO: 1244500 - DNA, 15 bp, Homo sapiens
tcaaacaggctcacg

SEQ ID NO: 1244501 - DNA, 15 bp, Homo sapiens
ctcaaacaggctcac

SEQ ID NO: 1244502 - DNA, 15 bp, Homo sapiens
cctcaaacaggctca

SEQ ID NO: 1244503 - DNA, 15 bp, Homo sapiens
acctcaaacaggctc

SEQ ID NO: 1244504 - DNA, 15 bp, Homo sapiens
aacctcaaacaggct

SEQ ID NO: 1244505 - DNA, 15 bp, Homo sapiens
taacctcaaacaggc

SEQ ID NO: 1244506 - DNA, 15 bp, Homo sapiens
gtaacctcaaacagg

SEQ ID NO: 1244507 - DNA, 15 bp, Homo sapiens
agtaacctcaaacag

SEQ ID NO: 1244508 - DNA, 15 bp, Homo sapiens
aagtaacctcaaaca

SEQ ID NO: 1244509 - DNA, 15 bp, Homo sapiens
taagtaacctcaaac

SEQ ID NO: 1244510 - DNA, 15 bp, Homo sapiens
ataagtaacctcaaa

SEQ ID NO: 1244511 - DNA, 15 bp, Homo sapiens
aataagtaacctcaa

SEQ ID NO: 1244512 - DNA, 15 bp, Homo sapiens
taataagtaacctca

SEQ ID NO: 1244513 - DNA, 15 bp, Homo sapiens
ataataagtaacctc

SEQ ID NO: 1244514 - DNA, 15 bp, Homo sapiens
tataataagtaacct

SEQ ID NO: 1244515 - DNA, 15 bp, Homo sapiens
atataataagtaacc

SEQ ID NO: 1244516 - DNA, 15 bp, Homo sapiens
aatataataagtaac

SEQ ID NO: 1244517 - DNA, 15 bp, Homo sapiens
aaatataataagtaa

SEQ ID NO: 1244518 - DNA, 15 bp, Homo sapiens
taaatataataagta

SEQ ID NO: 1244519 - DNA, 15 bp, Homo sapiens
gtaaatataataagt

SEQ ID NO: 1244520 - DNA, 15 bp, Homo sapiens
agtaaatataataag

SEQ ID NO: 1244521 - DNA, 15 bp, Homo sapiens
tagtaaatataataa

SEQ ID NO: 1244522 - DNA, 15 bp, Homo sapiens
gtagtaaatataata

SEQ ID NO: 1244523 - DNA, 15 bp, Homo sapiens
tgtagtaaatataat

SEQ ID NO: 1244524 - DNA, 15 bp, Homo sapiens
gtgtagtaaatataa

SEQ ID NO: 1244525 - DNA, 15 bp, Homo sapiens
ggtgtagtaaatata

SEQ ID NO: 1244526 - DNA, 15 bp, Homo sapiens
gggtgtagtaaatat

SEQ ID NO: 1244527 - DNA, 15 bp, Homo sapiens
tgggtgtagtaaata

SEQ ID NO: 1244528 - DNA, 15 bp, Homo sapiens
ctgggtgtagtaaat

SEQ ID NO: 1244529 - DNA, 15 bp, Homo sapiens
tctgggtgtagtaaa

SEQ ID NO: 1244530 - DNA, 15 bp, Homo sapiens
ctctgggtgtagtaa

SEQ ID NO: 1244531 - DNA, 15 bp, Homo sapiens
cctctgggtgtagta

SEQ ID NO: 1244532 - DNA, 15 bp, Homo sapiens
acctctgggtgtagt

SEQ ID NO: 1244533 - DNA, 15 bp, Homo sapiens
aacctctgggtgtag

SEQ ID NO: 1244534 - DNA, 15 bp, Homo sapiens
aaacctctgggtgta

SEQ ID NO: 1244535 - DNA, 15 bp, Homo sapiens
aaaacctctgggtgt

SEQ ID NO: 1244536 - DNA, 15 bp, Homo sapiens
taaaacctctgggtg

SEQ ID NO: 1244537 - DNA, 15 bp, Homo sapiens
ttaaaacctctgggt

SEQ ID NO: 1244538 - DNA, 15 bp, Homo sapiens
attaaaacctctggg

SEQ ID NO: 1244539 - DNA, 15 bp, Homo sapiens
aattaaaacctctgg

SEQ ID NO: 1244540 - DNA, 15 bp, Homo sapiens
taattaaaacctctg

SEQ ID NO: 1244541 - DNA, 15 bp, Homo sapiens
ataattaaaacctct

SEQ ID NO: 1244542 - DNA, 15 bp, Homo sapiens
aataattaaaacctc

SEQ ID NO: 1244543 - DNA, 15 bp, Homo sapiens
aaataattaaaacct

SEQ ID NO: 1244544 - DNA, 15 bp, Homo sapiens
caaataattaaaacc

SEQ ID NO: 1244545 - DNA, 15 bp, Homo sapiens
acaaataattaaaac

SEQ ID NO: 1244546 - DNA, 15 bp, Homo sapiens
cacaaataattaaaa

SEQ ID NO: 1244547 - DNA, 15 bp, Homo sapiens
acacaaataattaaa

SEQ ID NO: 1244548 - DNA, 15 bp, Homo sapiens
aacacaaataattaa

SEQ ID NO: 1244549 - DNA, 15 bp, Homo sapiens
aaacacaaataatta

SEQ ID NO: 1244550 - DNA, 15 bp, Homo sapiens
caaacacaaataatt

SEQ ID NO: 1244551 - DNA, 15 bp, Homo sapiens
tcaaacacaaataat

SEQ ID NO: 1244552 - DNA, 15 bp, Homo sapiens
gtcaaacacaaataa

SEQ ID NO: 1244553 - DNA, 15 bp, Homo sapiens
tgtcaaacacaaata

SEQ ID NO: 1244554 - DNA, 15 bp, Homo sapiens
atgtcaaacacaaat

SEQ ID NO: 1244555 - DNA, 15 bp, Homo sapiens
tatgtcaaacacaaa

SEQ ID NO: 1244556 - DNA, 15 bp, Homo sapiens
ttatgtcaaacacaa

SEQ ID NO: 1244557 - DNA, 15 bp, Homo sapiens
attatgtcaaacaca

SEQ ID NO: 1244558 - DNA, 15 bp, Homo sapiens
cattatgtcaaacac

SEQ ID NO: 1244559 - DNA, 15 bp, Homo sapiens
ccattatgtcaaaca

SEQ ID NO: 1244560 - DNA, 15 bp, Homo sapiens
accattatgtcaaac

SEQ ID NO: 1244561 - DNA, 15 bp, Homo sapiens
taccattatgtcaaa

SEQ ID NO: 1244562 - DNA, 15 bp, Homo sapiens
ctaccattatgtcaa

SEQ ID NO: 1244563 - DNA, 15 bp, Homo sapiens
actaccattatgtca

SEQ ID NO: 1244564 - DNA, 15 bp, Homo sapiens
tactaccattatgtc

SEQ ID NO: 1244565 - DNA, 15 bp, Homo sapiens
ttactaccattatgt

SEQ ID NO: 1244566 - DNA, 15 bp, Homo sapiens
attactaccattatg

SEQ ID NO: 1244567 - DNA, 15 bp, Homo sapiens
tattactaccattat

SEQ ID NO: 1244568 - DNA, 15 bp, Homo sapiens
ttattactaccatta

SEQ ID NO: 1244569 - DNA, 15 bp, Homo sapiens
attattactaccatt

SEQ ID NO: 1244570 - DNA, 15 bp, Homo sapiens
tattattactaccat

SEQ ID NO: 1244571 - DNA, 15 bp, Homo sapiens
ttattattactacca

SEQ ID NO: 1244572 - DNA, 15 bp, Homo sapiens
attattattactacc

SEQ ID NO: 1244573 - DNA, 15 bp, Homo sapiens
gattattattactac

SEQ ID NO: 1244574 - DNA, 15 bp, Homo sapiens
tgattattattacta

SEQ ID NO: 1244575 - DNA, 15 bp, Homo sapiens
ttgattattattact

SEQ ID NO: 1244576 - DNA, 15 bp, Homo sapiens
tttgattattattac

SEQ ID NO: 1244577 - DNA, 15 bp, Homo sapiens
ctttgattattatta

SEQ ID NO: 1244578 - DNA, 15 bp, Homo sapiens
actttgattattatt

SEQ ID NO: 1244579 - DNA, 15 bp, Homo sapiens
aactttgattattat

SEQ ID NO: 1244580 - DNA, 15 bp, Homo sapiens
caactttgattatta

SEQ ID NO: 1244581 - DNA, 15 bp, Homo sapiens
tcaactttgattatt

SEQ ID NO: 1244582 - DNA, 15 bp, Homo sapiens
atcaactttgattat

SEQ ID NO: 1244583 - DNA, 15 bp, Homo sapiens
tatcaactttgatta

SEQ ID NO: 1244584 - DNA, 15 bp, Homo sapiens
atatcaactttgatt

SEQ ID NO: 1244585 - DNA, 15 bp, Homo sapiens
aatatcaactttgat

SEQ ID NO: 1244586 - DNA, 15 bp, Homo sapiens
aaatatcaactttga

SEQ ID NO: 1244587 - DNA, 15 bp, Homo sapiens
caaatatcaactttg

SEQ ID NO: 1244588 - DNA, 15 bp, Homo sapiens
acaaatatcaacttt

SEQ ID NO: 1244589 - DNA, 15 bp, Homo sapiens
cacaaatatcaactt

SEQ ID NO: 1244590 - DNA, 15 bp, Homo sapiens
ccacaaatatcaact

SEQ ID NO: 1244591 - DNA, 15 bp, Homo sapiens
tccacaaatatcaac

SEQ ID NO: 1244592 - DNA, 15 bp, Homo sapiens
ctccacaaatatcaa

SEQ ID NO: 1244593 - DNA, 15 bp, Homo sapiens
actccacaaatatca

SEQ ID NO: 1244594 - DNA, 15 bp, Homo sapiens
cactccacaaatatc

SEQ ID NO: 1244595 - DNA, 15 bp, Homo sapiens
gcactccacaaatat

SEQ ID NO: 1244596 - DNA, 15 bp, Homo sapiens
agcactccacaaata

SEQ ID NO: 1244597 - DNA, 15 bp, Homo sapiens
gagcactccacaaat

SEQ ID NO: 1244598 - DNA, 15 bp, Homo sapiens
tgagcactccacaaa

SEQ ID NO: 1244599 - DNA, 15 bp, Homo sapiens
gtgagcactccacaa

SEQ ID NO: 1244600 - DNA, 15 bp, Homo sapiens
agtgagcactccaca

SEQ ID NO: 1244601 - DNA, 15 bp, Homo sapiens
cagtgagcactccac

SEQ ID NO: 1244602 - DNA, 15 bp, Homo sapiens
acagtgagcactcca

SEQ ID NO: 1244603 - DNA, 15 bp, Homo sapiens
tacagtgagcactcc

SEQ ID NO: 1244604 - DNA, 15 bp, Homo sapiens
atacagtgagcactc

SEQ ID NO: 1244605 - DNA, 15 bp, Homo sapiens
catacagtgagcact

SEQ ID NO: 1244606 - DNA, 15 bp, Homo sapiens
acatacagtgagcac

SEQ ID NO: 1244607 - DNA, 15 bp, Homo sapiens
tacatacagtgagca

SEQ ID NO: 1244608 - DNA, 15 bp, Homo sapiens
atacatacagtgagc

SEQ ID NO: 1244609 - DNA, 15 bp, Homo sapiens
catacatacagtgag

SEQ ID NO: 1244610 - DNA, 15 bp, Homo sapiens
gcatacatacagtga

SEQ ID NO: 1244611 - DNA, 15 bp, Homo sapiens
ggcatacatacagtg

SEQ ID NO: 1244612 - DNA, 15 bp, Homo sapiens
aggcatacatacagt

SEQ ID NO: 1244613 - DNA, 15 bp, Homo sapiens
caggcatacatacag

SEQ ID NO: 1244614 - DNA, 15 bp, Homo sapiens
ccaggcatacataca

SEQ ID NO: 1244615 - DNA, 15 bp, Homo sapiens
gccaggcatacatac

SEQ ID NO: 1244616 - DNA, 15 bp, Homo sapiens
tgccaggcatacata

SEQ ID NO: 1244617 - DNA, 15 bp, Homo sapiens
ctgccaggcatacat

SEQ ID NO: 1244618 - DNA, 15 bp, Homo sapiens
cctgccaggcataca

SEQ ID NO: 1244619 - DNA, 15 bp, Homo sapiens
tcctgccaggcatac

SEQ ID NO: 1244620 - DNA, 15 bp, Homo sapiens
ttcctgccaggcata

SEQ ID NO: 1244621 - DNA, 15 bp, Homo sapiens
tttcctgccaggcat

SEQ ID NO: 1244622 - DNA, 15 bp, Homo sapiens
ctttcctgccaggca

SEQ ID NO: 1244623 - DNA, 15 bp, Homo sapiens
cctttcctgccaggc

SEQ ID NO: 1244624 - DNA, 15 bp, Homo sapiens
gcctttcctgccagg

SEQ ID NO: 1244625 - DNA, 15 bp, Homo sapiens
tgcctttcctgccag

SEQ ID NO: 1244626 - DNA, 15 bp, Homo sapiens
ctgcctttcctgcca

SEQ ID NO: 1244627 - DNA, 15 bp, Homo sapiens
actgcctttcctgcc

SEQ ID NO: 1244628 - DNA, 15 bp, Homo sapiens
cactgcctttcctgc

SEQ ID NO: 1244629 - DNA, 15 bp, Homo sapiens
acactgcctttcctg

SEQ ID NO: 1244630 - DNA, 15 bp, Homo sapiens
cacactgcctttcct

SEQ ID NO: 1244631 - DNA, 15 bp, Homo sapiens
ccacactgcctttcc

SEQ ID NO: 1244632 - DNA, 15 bp, Homo sapiens
accacactgcctttc

SEQ ID NO: 1244633 - DNA, 15 bp, Homo sapiens
aaccacactgccttt

SEQ ID NO: 1244634 - DNA, 15 bp, Homo sapiens
taaccacactgcctt

SEQ ID NO: 1244635 - DNA, 15 bp, Homo sapiens
ttaaccacactgcct

SEQ ID NO: 1244636 - DNA, 15 bp, Homo sapiens
tttaaccacactgcc

SEQ ID NO: 1244637 - DNA, 15 bp, Homo sapiens
ttttaaccacactgc

SEQ ID NO: 1244638 - DNA, 15 bp, Homo sapiens
tttttaaccacactg

SEQ ID NO: 1244639 - DNA, 15 bp, Homo sapiens
ttttttaaccacact

SEQ ID NO: 1244640 - DNA, 15 bp, Homo sapiens
gttttttaaccacac

SEQ ID NO: 1244641 - DNA, 15 bp, Homo sapiens
agttttttaaccaca

SEQ ID NO: 1244642 - DNA, 15 bp, Homo sapiens
tagttttttaaccac

SEQ ID NO: 1244643 - DNA, 15 bp, Homo sapiens
ttagttttttaacca

SEQ ID NO: 1244644 - DNA, 15 bp, Homo sapiens
attagttttttaacc

SEQ ID NO: 1244645 - DNA, 15 bp, Homo sapiens
cattagttttttaac

SEQ ID NO: 1244646 - DNA, 15 bp, Homo sapiens
tcattagttttttaa

SEQ ID NO: 1244647 - DNA, 15 bp, Homo sapiens
gtcattagtttttta

SEQ ID NO: 1244648 - DNA, 15 bp, Homo sapiens
agtcattagtttttt

SEQ ID NO: 1244649 - DNA, 15 bp, Homo sapiens
cagtcattagttttt

SEQ ID NO: 1244650 - DNA, 15 bp, Homo sapiens
tcagtcattagtttt

SEQ ID NO: 1244651 - DNA, 15 bp, Homo sapiens
ttcagtcattagttt

SEQ ID NO: 1244652 - DNA, 15 bp, Homo sapiens
tttcagtcattagtt

SEQ ID NO: 1244653 - DNA, 15 bp, Homo sapiens
atttcagtcattagt

SEQ ID NO: 1244654 - DNA, 15 bp, Homo sapiens
aatttcagtcattag

SEQ ID NO: 1244655 - DNA, 15 bp, Homo sapiens
taatttcagtcatta

SEQ ID NO: 1244656 - DNA, 15 bp, Homo sapiens
ctaatttcagtcatt

SEQ ID NO: 1244657 - DNA, 15 bp, Homo sapiens
tctaatttcagtcat

SEQ ID NO: 1244658 - DNA, 15 bp, Homo sapiens
ttctaatttcagtca

SEQ ID NO: 1244659 - DNA, 15 bp, Homo sapiens
tttctaatttcagtc

SEQ ID NO: 1244660 - DNA, 15 bp, Homo sapiens
ttttctaatttcagt

SEQ ID NO: 1244661 - DNA, 15 bp, Homo sapiens
tttttctaatttcag

SEQ ID NO: 1244662 - DNA, 15 bp, Homo sapiens
ttttttctaatttca

SEQ ID NO: 1244663 - DNA, 15 bp, Homo sapiens
ttttttttctaattt

SEQ ID NO: 1244664 - DNA, 15 bp, Homo sapiens
attttttttctaatt

SEQ ID NO: 1244665 - DNA, 15 bp, Homo sapiens
cattttttttctaat

SEQ ID NO: 1244666 - DNA, 15 bp, Homo sapiens
ccattttttttctaa

SEQ ID NO: 1244667 - DNA, 15 bp, Homo sapiens
cccattttttttcta

SEQ ID NO: 1244668 - DNA, 15 bp, Homo sapiens
gcccattttttttct

SEQ ID NO: 1244669 - DNA, 15 bp, Homo sapiens
ggcccattttttttc

SEQ ID NO: 1244670 - DNA, 15 bp, Homo sapiens
aggcccatttttttt

SEQ ID NO: 1244671 - DNA, 15 bp, Homo sapiens
gaggcccattttttt

SEQ ID NO: 1244672 - DNA, 15 bp, Homo sapiens
cgaggcccatttttt

SEQ ID NO: 1244673 - DNA, 15 bp, Homo sapiens
gcgaggcccattttt

SEQ ID NO: 1244674 - DNA, 15 bp, Homo sapiens
agcgaggcccatttt

SEQ ID NO: 1244675 - DNA, 15 bp, Homo sapiens
gagcgaggcccattt

SEQ ID NO: 1244676 - DNA, 15 bp, Homo sapiens
agagcgaggcccatt

SEQ ID NO: 1244677 - DNA, 15 bp, Homo sapiens
gagagcgaggcccat

SEQ ID NO: 1244678 - DNA, 15 bp, Homo sapiens
agagagcgaggccca

SEQ ID NO: 1244679 - DNA, 15 bp, Homo sapiens
tagagagcgaggccc

SEQ ID NO: 1244680 - DNA, 15 bp, Homo sapiens
ctagagagcgaggcc

SEQ ID NO: 1244681 - DNA, 15 bp, Homo sapiens
gctagagagcgaggc

SEQ ID NO: 1244682 - DNA, 15 bp, Homo sapiens
agctagagagcgagg

SEQ ID NO: 1244683 - DNA, 15 bp, Homo sapiens
tagctagagagcgag

SEQ ID NO: 1244684 - DNA, 15 bp, Homo sapiens
gtagctagagagcga

SEQ ID NO: 1244685 - DNA, 15 bp, Homo sapiens
agtagctagagagcg

SEQ ID NO: 1244686 - DNA, 15 bp, Homo sapiens
aagtagctagagagc

SEQ ID NO: 1244687 - DNA, 15 bp, Homo sapiens
caagtagctagagag

SEQ ID NO: 1244688 - DNA, 15 bp, Homo sapiens
gcaagtagctagaga

SEQ ID NO: 1244689 - DNA, 15 bp, Homo sapiens
cgcaagtagctagag

SEQ ID NO: 1244690 - DNA, 15 bp, Homo sapiens
ccgcaagtagctaga

SEQ ID NO: 1244691 - DNA, 15 bp, Homo sapiens
gccgcaagtagctag

SEQ ID NO: 1244692 - DNA, 15 bp, Homo sapiens
ggccgcaagtagcta

SEQ ID NO: 1244693 - DNA, 15 bp, Homo sapiens
tggccgcaagtagct

SEQ ID NO: 1244694 - DNA, 15 bp, Homo sapiens
ttggccgcaagtagc

SEQ ID NO: 1244695 - DNA, 15 bp, Homo sapiens
cttggccgcaagtag

SEQ ID NO: 1244696 - DNA, 15 bp, Homo sapiens
gcttggccgcaagta

SEQ ID NO: 1244697 - DNA, 15 bp, Homo sapiens
tgcttggccgcaagt

SEQ ID NO: 1244698 - DNA, 15 bp, Homo sapiens
gtgcttggccgcaag

SEQ ID NO: 1244699 - DNA, 15 bp, Homo sapiens
ggtgcttggccgcaa

SEQ ID NO: 1244700 - DNA, 15 bp, Homo sapiens
aggtgcttggccgca

SEQ ID NO: 1244701 - DNA, 15 bp, Homo sapiens
aaggtgcttggccgc

SEQ ID NO: 1244702 - DNA, 15 bp, Homo sapiens
gaaggtgcttggccg

SEQ ID NO: 1244703 - DNA, 15 bp, Homo sapiens
tgaaggtgcttggcc

SEQ ID NO: 1244704 - DNA, 15 bp, Homo sapiens
atgaaggtgcttggc

SEQ ID NO: 1244705 - DNA, 15 bp, Homo sapiens
gatgaaggtgcttgg

SEQ ID NO: 1244706 - DNA, 15 bp, Homo sapiens
agatgaaggtgcttg

SEQ ID NO: 1244707 - DNA, 15 bp, Homo sapiens
gagatgaaggtgctt

SEQ ID NO: 1244708 - DNA, 15 bp, Homo sapiens
agagatgaaggtgct

SEQ ID NO: 1244709 - DNA, 15 bp, Homo sapiens
cagagatgaaggtgc

SEQ ID NO: 1244710 - DNA, 15 bp, Homo sapiens
tcagagatgaaggtg

SEQ ID NO: 1244711 - DNA, 15 bp, Homo sapiens
atcagagatgaaggt

SEQ ID NO: 1244712 - DNA, 15 bp, Homo sapiens
aatcagagatgaagg

SEQ ID NO: 1244713 - DNA, 15 bp, Homo sapiens
aaatcagagatgaag

SEQ ID NO: 1244714 - DNA, 15 bp, Homo sapiens
aaaatcagagatgaa

SEQ ID NO: 1244715 - DNA, 15 bp, Homo sapiens
taaaatcagagatga

SEQ ID NO: 1244716 - DNA, 15 bp, Homo sapiens
ataaaatcagagatg

SEQ ID NO: 1244717 - DNA, 15 bp, Homo sapiens
aataaaatcagagat

SEQ ID NO: 1244718 - DNA, 15 bp, Homo sapiens
aaataaaatcagaga

SEQ ID NO: 1244719 - DNA, 15 bp, Homo sapiens
aaaataaaatcagag

SEQ ID NO: 1244720 - DNA, 15 bp, Homo sapiens
aaaaataaaatcaga

SEQ ID NO: 1244721 - DNA, 15 bp, Homo sapiens
aaaaaataaaatcag

SEQ ID NO: 1244722 - DNA, 15 bp, Homo sapiens
aaaaaaataaaatca

SEQ ID NO: 1244723 - DNA, 15 bp, Homo sapiens
taaaaaaataaaatc

SEQ ID NO: 1244724 - DNA, 15 bp, Homo sapiens
ataaaaaaataaaat

SEQ ID NO: 1244725 - DNA, 15 bp, Homo sapiens
cataaaaaaataaaa

SEQ ID NO: 1244726 - DNA, 15 bp, Homo sapiens
acataaaaaaataaa

SEQ ID NO: 1244727 - DNA, 15 bp, Homo sapiens
gacataaaaaaataa

SEQ ID NO: 1244728 - DNA, 15 bp, Homo sapiens
agacataaaaaaata

SEQ ID NO: 1244729 - DNA, 15 bp, Homo sapiens
gagacataaaaaaat

SEQ ID NO: 1244730 - DNA, 15 bp, Homo sapiens
ggagacataaaaaaa

SEQ ID NO: 1244731 - DNA, 15 bp, Homo sapiens
gggagacataaaaaa

SEQ ID NO: 1244732 - DNA, 15 bp, Homo sapiens
agggagacataaaaa

SEQ ID NO: 1244733 - DNA, 15 bp, Homo sapiens
aagggagacataaaa

SEQ ID NO: 1244734 - DNA, 15 bp, Homo sapiens
taagggagacataaa

SEQ ID NO: 1244735 - DNA, 15 bp, Homo sapiens
ttaagggagacataa

SEQ ID NO: 1244736 - DNA, 15 bp, Homo sapiens
gttaagggagacata

SEQ ID NO: 1244737 - DNA, 15 bp, Homo sapiens
ggttaagggagacat

SEQ ID NO: 1244738 - DNA, 15 bp, Homo sapiens
aggttaagggagaca

SEQ ID NO: 1244739 - DNA, 15 bp, Homo sapiens
aaggttaagggagac

SEQ ID NO: 1244740 - DNA, 15 bp, Homo sapiens
aaaggttaagggaga

SEQ ID NO: 1244741 - DNA, 15 bp, Homo sapiens
aaaaggttaagggag

SEQ ID NO: 1244742 - DNA, 15 bp, Homo sapiens
gaaaaggttaaggga

SEQ ID NO: 1244743 - DNA, 15 bp, Homo sapiens
tgaaaaggttaaggg

SEQ ID NO: 1244744 - DNA, 15 bp, Homo sapiens
ttgaaaaggttaagg

SEQ ID NO: 1244745 - DNA, 15 bp, Homo sapiens
tttgaaaaggttaag

SEQ ID NO: 1244746 - DNA, 15 bp, Homo sapiens
ctttgaaaaggttaa

SEQ ID NO: 1244747 - DNA, 15 bp, Homo sapiens
cctttgaaaaggtta

SEQ ID NO: 1244748 - DNA, 15 bp, Homo sapiens
tcctttgaaaaggtt

SEQ ID NO: 1244749 - DNA, 15 bp, Homo sapiens
atcctttgaaaaggt

SEQ ID NO: 1244750 - DNA, 15 bp, Homo sapiens
aatcctttgaaaagg

SEQ ID NO: 1244751 - DNA, 15 bp, Homo sapiens
caatcctttgaaaag

SEQ ID NO: 1244752 - DNA, 15 bp, Homo sapiens
acaatcctttgaaaa

SEQ ID NO: 1244753 - DNA, 15 bp, Homo sapiens
aacaatcctttgaaa

SEQ ID NO: 1244754 - DNA, 15 bp, Homo sapiens
caacaatcctttgaa

SEQ ID NO: 1244755 - DNA, 15 bp, Homo sapiens
ccaacaatcctttga

SEQ ID NO: 1244756 - DNA, 15 bp, Homo sapiens
cccaacaatcctttg

SEQ ID NO: 1244757 - DNA, 15 bp, Homo sapiens
tcccaacaatccttt

SEQ ID NO: 1244758 - DNA, 15 bp, Homo sapiens
atcccaacaatcctt

SEQ ID NO: 1244759 - DNA, 15 bp, Homo sapiens
catcccaacaatcct

SEQ ID NO: 1244760 - DNA, 15 bp, Homo sapiens
ccatcccaacaatcc

SEQ ID NO: 1244761 - DNA, 15 bp, Homo sapiens
accatcccaacaatc

SEQ ID NO: 1244762 - DNA, 15 bp, Homo sapiens
gaccatcccaacaat

SEQ ID NO: 1244763 - DNA, 15 bp, Homo sapiens
tgaccatcccaacaa

SEQ ID NO: 1244764 - DNA, 15 bp, Homo sapiens
gtgaccatcccaaca

SEQ ID NO: 1244765 - DNA, 15 bp, Homo sapiens
tgtgaccatcccaac

SEQ ID NO: 1244766 - DNA, 15 bp, Homo sapiens
ctgtgaccatcccaa

SEQ ID NO: 1244767 - DNA, 15 bp, Homo sapiens
tctgtgaccatccca

SEQ ID NO: 1244768 - DNA, 15 bp, Homo sapiens
ttctgtgaccatccc

SEQ ID NO: 1244769 - DNA, 15 bp, Homo sapiens
tttctgtgaccatcc

SEQ ID NO: 1244770 - DNA, 15 bp, Homo sapiens
ttttctgtgaccatc

SEQ ID NO: 1244771 - DNA, 15 bp, Homo sapiens
cttttctgtgaccat

SEQ ID NO: 1244772 - DNA, 15 bp, Homo sapiens
tcttttctgtgacca

SEQ ID NO: 1244773 - DNA, 15 bp, Homo sapiens
ttcttttctgtgacc

SEQ ID NO: 1244774 - DNA, 15 bp, Homo sapiens
attcttttctgtgac

SEQ ID NO: 1244775 - DNA, 15 bp, Homo sapiens
aattcttttctgtga

SEQ ID NO: 1244776 - DNA, 15 bp, Homo sapiens
gaattcttttctgtg

SEQ ID NO: 1244777 - DNA, 15 bp, Homo sapiens
agaattcttttctgt

SEQ ID NO: 1244778 - DNA, 15 bp, Homo sapiens
tagaattcttttctg

SEQ ID NO: 1244779 - DNA, 15 bp, Homo sapiens
atagaattcttttct

SEQ ID NO: 1244780 - DNA, 15 bp, Homo sapiens
tatagaattcttttc

SEQ ID NO: 1244781 - DNA, 15 bp, Homo sapiens
gtatagaattctttt

SEQ ID NO: 1244782 - DNA, 15 bp, Homo sapiens
agtatagaattcttt

SEQ ID NO: 1244783 - DNA, 15 bp, Homo sapiens
tagtatagaattctt

SEQ ID NO: 1244784 - DNA, 15 bp, Homo sapiens
atagtatagaattct

SEQ ID NO: 1244785 - DNA, 15 bp, Homo sapiens
tatagtatagaattc

SEQ ID NO: 1244786 - DNA, 15 bp, Homo sapiens
ttatagtatagaatt

SEQ ID NO: 1244787 - DNA, 15 bp, Homo sapiens
tttatagtatagaat

SEQ ID NO: 1244788 - DNA, 15 bp, Homo sapiens
ctttatagtatagaa

SEQ ID NO: 1244789 - DNA, 15 bp, Homo sapiens
actttatagtataga

SEQ ID NO: 1244790 - DNA, 15 bp, Homo sapiens
cactttatagtatag

SEQ ID NO: 1244791 - DNA, 15 bp, Homo sapiens
acactttatagtata

SEQ ID NO: 1244792 - DNA, 15 bp, Homo sapiens
aacactttatagtat

SEQ ID NO: 1244793 - DNA, 15 bp, Homo sapiens
taacactttatagta

SEQ ID NO: 1244794 - DNA, 15 bp, Homo sapiens
gtaacactttatagt

SEQ ID NO: 1244795 - DNA, 15 bp, Homo sapiens
agtaacactttatag

SEQ ID NO: 1244796 - DNA, 15 bp, Homo sapiens
aagtaacactttata

SEQ ID NO: 1244797 - DNA, 15 bp, Homo sapiens
taagtaacactttat

SEQ ID NO: 1244798 - DNA, 15 bp, Homo sapiens
ttaagtaacacttta

SEQ ID NO: 1244799 - DNA, 15 bp, Homo sapiens
cttaagtaacacttt

SEQ ID NO: 1244800 - DNA, 15 bp, Homo sapiens
acttaagtaacactt

SEQ ID NO: 1244801 - DNA, 15 bp, Homo sapiens
tacttaagtaacact

SEQ ID NO: 1244802 - DNA, 15 bp, Homo sapiens
atacttaagtaacac

SEQ ID NO: 1244803 - DNA, 15 bp, Homo sapiens
catacttaagtaaca

SEQ ID NO: 1244804 - DNA, 15 bp, Homo sapiens
tcatacttaagtaac

SEQ ID NO: 1244805 - DNA, 15 bp, Homo sapiens
ttcatacttaagtaa

SEQ ID NO: 1244806 - DNA, 15 bp, Homo sapiens
tttcatacttaagta

SEQ ID NO: 1244807 - DNA, 15 bp, Homo sapiens
ttttcatacttaagt

SEQ ID NO: 1244808 - DNA, 15 bp, Homo sapiens
cttttcatacttaag

SEQ ID NO: 1244809 - DNA, 15 bp, Homo sapiens
ccttttcatacttaa

SEQ ID NO: 1244810 - DNA, 15 bp, Homo sapiens
gccttttcatactta

SEQ ID NO: 1244811 - DNA, 15 bp, Homo sapiens
tgccttttcatactt

SEQ ID NO: 1244812 - DNA, 15 bp, Homo sapiens
atgccttttcatact

SEQ ID NO: 1244813 - DNA, 15 bp, Homo sapiens
gatgccttttcatac

SEQ ID NO: 1244814 - DNA, 15 bp, Homo sapiens
tgatgccttttcata

SEQ ID NO: 1244815 - DNA, 15 bp, Homo sapiens
gtgatgccttttcat

SEQ ID NO: 1244816 - DNA, 15 bp, Homo sapiens
agtgatgccttttca

SEQ ID NO: 1244817 - DNA, 15 bp, Homo sapiens
tagtgatgccttttc

SEQ ID NO: 1244818 - DNA, 15 bp, Homo sapiens
gtagtgatgcctttt

SEQ ID NO: 1244819 - DNA, 15 bp, Homo sapiens
tgtagtgatgccttt

SEQ ID NO: 1244820 - DNA, 15 bp, Homo sapiens
ctgtagtgatgcctt

SEQ ID NO: 1244821 - DNA, 15 bp, Homo sapiens
actgtagtgatgcct

SEQ ID NO: 1244822 - DNA, 15 bp, Homo sapiens
aactgtagtgatgcc

SEQ ID NO: 1244823 - DNA, 15 bp, Homo sapiens
gaactgtagtgatgc

SEQ ID NO: 1244824 - DNA, 15 bp, Homo sapiens
agaactgtagtgatg

SEQ ID NO: 1244825 - DNA, 15 bp, Homo sapiens
aagaactgtagtgat

SEQ ID NO: 1244826 - DNA, 15 bp, Homo sapiens
aaagaactgtagtga

SEQ ID NO: 1244827 - DNA, 15 bp, Homo sapiens
aaaagaactgtagtg

SEQ ID NO: 1244828 - DNA, 15 bp, Homo sapiens
caaaagaactgtagt

SEQ ID NO: 1244829 - DNA, 15 bp, Homo sapiens
tcaaaagaactgtag

SEQ ID NO: 1244830 - DNA, 15 bp, Homo sapiens
ttcaaaagaactgta

SEQ ID NO: 1244831 - DNA, 15 bp, Homo sapiens
gttcaaaagaactgt

SEQ ID NO: 1244832 - DNA, 15 bp, Homo sapiens
ggttcaaaagaactg

SEQ ID NO: 1244833 - DNA, 15 bp, Homo sapiens
aggttcaaaagaact

SEQ ID NO: 1244834 - DNA, 15 bp, Homo sapiens
aaggttcaaaagaac

SEQ ID NO: 1244835 - DNA, 15 bp, Homo sapiens
taaggttcaaaagaa

SEQ ID NO: 1244836 - DNA, 15 bp, Homo sapiens
ataaggttcaaaaga

SEQ ID NO: 1244837 - DNA, 15 bp, Homo sapiens
tataaggttcaaaag

SEQ ID NO: 1244838 - DNA, 15 bp, Homo sapiens
gtataaggttcaaaa

SEQ ID NO: 1244839 - DNA, 15 bp, Homo sapiens
ggtataaggttcaaa

SEQ ID NO: 1244840 - DNA, 15 bp, Homo sapiens
cggtataaggttcaa

SEQ ID NO: 1244841 - DNA, 15 bp, Homo sapiens
acggtataaggttca

SEQ ID NO: 1244842 - DNA, 15 bp, Homo sapiens
aacggtataaggttc

SEQ ID NO: 1244843 - DNA, 15 bp, Homo sapiens
taacggtataaggtt

SEQ ID NO: 1244844 - DNA, 15 bp, Homo sapiens
ttaacggtataaggt

SEQ ID NO: 1244845 - DNA, 15 bp, Homo sapiens
attaacggtataagg

SEQ ID NO: 1244846 - DNA, 15 bp, Homo sapiens
cattaacggtataag

SEQ ID NO: 1244847 - DNA, 15 bp, Homo sapiens
tcattaacggtataa

SEQ ID NO: 1244848 - DNA, 15 bp, Homo sapiens
atcattaacggtata

SEQ ID NO: 1244849 - DNA, 15 bp, Homo sapiens
gatcattaacggtat

SEQ ID NO: 1244850 - DNA, 15 bp, Homo sapiens
tgatcattaacggta

SEQ ID NO: 1244851 - DNA, 15 bp, Homo sapiens
ttgatcattaacggt

SEQ ID NO: 1244852 - DNA, 15 bp, Homo sapiens
cttgatcattaacgg

SEQ ID NO: 1244853 - DNA, 15 bp, Homo sapiens
ccttgatcattaacg

SEQ ID NO: 1244854 - DNA, 15 bp, Homo sapiens
gccttgatcattaac

SEQ ID NO: 1244855 - DNA, 15 bp, Homo sapiens
tgccttgatcattaa

SEQ ID NO: 1244856 - DNA, 15 bp, Homo sapiens
ttgccttgatcatta

SEQ ID NO: 1244857 - DNA, 15 bp, Homo sapiens
tttgccttgatcatt

SEQ ID NO: 1244858 - DNA, 15 bp, Homo sapiens
ttttgccttgatcat

SEQ ID NO: 1244859 - DNA, 15 bp, Homo sapiens
cttttgccttgatca

SEQ ID NO: 1244860 - DNA, 15 bp, Homo sapiens
tcttttgccttgatc

SEQ ID NO: 1244861 - DNA, 15 bp, Homo sapiens
atcttttgccttgat

SEQ ID NO: 1244862 - DNA, 15 bp, Homo sapiens
tatcttttgccttga

SEQ ID NO: 1244863 - DNA, 15 bp, Homo sapiens
gtatcttttgccttg

SEQ ID NO: 1244864 - DNA, 15 bp, Homo sapiens
tgtatcttttgcctt

SEQ ID NO: 1244865 - DNA, 15 bp, Homo sapiens
gtgtatcttttgcct

SEQ ID NO: 1244866 - DNA, 15 bp, Homo sapiens
ggtgtatcttttgcc

SEQ ID NO: 1244867 - DNA, 15 bp, Homo sapiens
aggtgtatcttttgc

SEQ ID NO: 1244868 - DNA, 15 bp, Homo sapiens
gaggtgtatcttttg

SEQ ID NO: 1244869 - DNA, 15 bp, Homo sapiens
agaggtgtatctttt

SEQ ID NO: 1244870 - DNA, 15 bp, Homo sapiens
aagaggtgtatcttt

SEQ ID NO: 1244871 - DNA, 15 bp, Homo sapiens
gaagaggtgtatctt

SEQ ID NO: 1244872 - DNA, 15 bp, Homo sapiens
tgaagaggtgtatct

SEQ ID NO: 1244873 - DNA, 15 bp, Homo sapiens
ttgaagaggtgtatc

SEQ ID NO: 1244874 - DNA, 15 bp, Homo sapiens
gttgaagaggtgtat

SEQ ID NO: 1244875 - DNA, 15 bp, Homo sapiens
agttgaagaggtgta

SEQ ID NO: 1244876 - DNA, 15 bp, Homo sapiens
tagttgaagaggtgt

SEQ ID NO: 1244877 - DNA, 15 bp, Homo sapiens
gtagttgaagaggtg

SEQ ID NO: 1244878 - DNA, 15 bp, Homo sapiens
tgtagttgaagaggt

SEQ ID NO: 1244879 - DNA, 15 bp, Homo sapiens
ttgtagttgaagagg

SEQ ID NO: 1244880 - DNA, 15 bp, Homo sapiens
cttgtagttgaagag

SEQ ID NO: 1244881 - DNA, 15 bp, Homo sapiens
acttgtagttgaaga

SEQ ID NO: 1244882 - DNA, 15 bp, Homo sapiens
aacttgtagttgaag

SEQ ID NO: 1244883 - DNA, 15 bp, Homo sapiens
gaacttgtagttgaa

SEQ ID NO: 1244884 - DNA, 15 bp, Homo sapiens
tgaacttgtagttga

SEQ ID NO: 1244885 - DNA, 15 bp, Homo sapiens
ctgaacttgtagttg

SEQ ID NO: 1244886 - DNA, 15 bp, Homo sapiens
actgaacttgtagtt

SEQ ID NO: 1244887 - DNA, 15 bp, Homo sapiens
cactgaacttgtagt

SEQ ID NO: 1244888 - DNA, 15 bp, Homo sapiens
tcactgaacttgtag

SEQ ID NO: 1244889 - DNA, 15 bp, Homo sapiens
ttcactgaacttgta

SEQ ID NO: 1244890 - DNA, 15 bp, Homo sapiens
attcactgaacttgt

SEQ ID NO: 1244891 - DNA, 15 bp, Homo sapiens
aattcactgaacttg

SEQ ID NO: 1244892 - DNA, 15 bp, Homo sapiens
aaattcactgaactt

SEQ ID NO: 1244893 - DNA, 15 bp, Homo sapiens
aaaattcactgaact

SEQ ID NO: 1244894 - DNA, 15 bp, Homo sapiens
taaaattcactgaac

SEQ ID NO: 1244895 - DNA, 15 bp, Homo sapiens
ttaaaattcactgaa

SEQ ID NO: 1244896 - DNA, 15 bp, Homo sapiens
attaaaattcactga

SEQ ID NO: 1244897 - DNA, 15 bp, Homo sapiens
aattaaaattcactg

SEQ ID NO: 1244898 - DNA, 15 bp, Homo sapiens
aaattaaaattcact

SEQ ID NO: 1244899 - DNA, 15 bp, Homo sapiens
aaaattaaaattcac

SEQ ID NO: 1244900 - DNA, 15 bp, Homo sapiens
aaaaattaaaattca

SEQ ID NO: 1244901 - DNA, 15 bp, Homo sapiens
aaaaaattaaaattc

SEQ ID NO: 1244902 - DNA, 15 bp, Homo sapiens
caaaaaattaaaatt

SEQ ID NO: 1244903 - DNA, 15 bp, Homo sapiens
tcaaaaaattaaaat

SEQ ID NO: 1244904 - DNA, 15 bp, Homo sapiens
ttcaaaaaattaaaa

SEQ ID NO: 1244905 - DNA, 15 bp, Homo sapiens
tttcaaaaaattaaa

SEQ ID NO: 1244906 - DNA, 15 bp, Homo sapiens
atttcaaaaaattaa

SEQ ID NO: 1244907 - DNA, 15 bp, Homo sapiens
aatttcaaaaaatta

SEQ ID NO: 1244908 - DNA, 15 bp, Homo sapiens
aaatttcaaaaaatt

SEQ ID NO: 1244909 - DNA, 15 bp, Homo sapiens
aaaatttcaaaaaat

SEQ ID NO: 1244910 - DNA, 15 bp, Homo sapiens
taaaatttcaaaaaa

SEQ ID NO: 1244911 - DNA, 15 bp, Homo sapiens
ctaaaatttcaaaaa

SEQ ID NO: 1244912 - DNA, 15 bp, Homo sapiens
tctaaaatttcaaaa

SEQ ID NO: 1244913 - DNA, 15 bp, Homo sapiens
ctctaaaatttcaaa

SEQ ID NO: 1244914 - DNA, 15 bp, Homo sapiens
actctaaaatttcaa

SEQ ID NO: 1244915 - DNA, 15 bp, Homo sapiens
aactctaaaatttca

SEQ ID NO: 1244916 - DNA, 15 bp, Homo sapiens
taactctaaaatttc

SEQ ID NO: 1244917 - DNA, 15 bp, Homo sapiens
ataactctaaaattt

SEQ ID NO: 1244918 - DNA, 15 bp, Homo sapiens
aataactctaaaatt

SEQ ID NO: 1244919 - DNA, 15 bp, Homo sapiens
aaataactctaaaat

SEQ ID NO: 1244920 - DNA, 15 bp, Homo sapiens
taaataactctaaaa

SEQ ID NO: 1244921 - DNA, 15 bp, Homo sapiens
ctaaataactctaaa

SEQ ID NO: 1244922 - DNA, 15 bp, Homo sapiens
actaaataactctaa

SEQ ID NO: 1244923 - DNA, 15 bp, Homo sapiens
aactaaataactcta

SEQ ID NO: 1244924 - DNA, 15 bp, Homo sapiens
taactaaataactct

SEQ ID NO: 1244925 - DNA, 15 bp, Homo sapiens
ataactaaataactc

SEQ ID NO: 1244926 - DNA, 15 bp, Homo sapiens
tataactaaataact

SEQ ID NO: 1244927 - DNA, 15 bp, Homo sapiens
atataactaaataac

SEQ ID NO: 1244928 - DNA, 15 bp, Homo sapiens
aatataactaaataa

SEQ ID NO: 1244929 - DNA, 15 bp, Homo sapiens
aaatataactaaata

SEQ ID NO: 1244930 - DNA, 15 bp, Homo sapiens
aaaatataactaaat

SEQ ID NO: 1244931 - DNA, 15 bp, Homo sapiens
gaaaatataactaaa

SEQ ID NO: 1244932 - DNA, 15 bp, Homo sapiens
tgaaaatataactaa

SEQ ID NO: 1244933 - DNA, 15 bp, Homo sapiens
ctgaaaatataacta

SEQ ID NO: 1244934 - DNA, 15 bp, Homo sapiens
tctgaaaatataact

SEQ ID NO: 1244935 - DNA, 15 bp, Homo sapiens
atctgaaaatataac

SEQ ID NO: 1244936 - DNA, 15 bp, Homo sapiens
tatctgaaaatataa

SEQ ID NO: 1244937 - DNA, 15 bp, Homo sapiens
gtatctgaaaatata

SEQ ID NO: 1244938 - DNA, 15 bp, Homo sapiens
agtatctgaaaatat

SEQ ID NO: 1244939 - DNA, 15 bp, Homo sapiens
aagtatctgaaaata

SEQ ID NO: 1244940 - DNA, 15 bp, Homo sapiens
aaagtatctgaaaat

SEQ ID NO: 1244941 - DNA, 15 bp, Homo sapiens
gaaagtatctgaaaa

SEQ ID NO: 1244942 - DNA, 15 bp, Homo sapiens
agaaagtatctgaaa

SEQ ID NO: 1244943 - DNA, 15 bp, Homo sapiens
cagaaagtatctgaa

SEQ ID NO: 1244944 - DNA, 15 bp, Homo sapiens
acagaaagtatctga

SEQ ID NO: 1244945 - DNA, 15 bp, Homo sapiens
gacagaaagtatctg

SEQ ID NO: 1244946 - DNA, 15 bp, Homo sapiens
ggacagaaagtatct

SEQ ID NO: 1244947 - DNA, 15 bp, Homo sapiens
tggacagaaagtatc

SEQ ID NO: 1244948 - DNA, 15 bp, Homo sapiens
atggacagaaagtat

SEQ ID NO: 1244949 - DNA, 15 bp, Homo sapiens
aatggacagaaagta

SEQ ID NO: 1244950 - DNA, 15 bp, Homo sapiens
aaatggacagaaagt

SEQ ID NO: 1244951 - DNA, 15 bp, Homo sapiens
taaatggacagaaag

SEQ ID NO: 1244952 - DNA, 15 bp, Homo sapiens
ttaaatggacagaaa

SEQ ID NO: 1244953 - DNA, 15 bp, Homo sapiens
tttaaatggacagaa

SEQ ID NO: 1244954 - DNA, 15 bp, Homo sapiens
atttaaatggacaga

SEQ ID NO: 1244955 - DNA, 15 bp, Homo sapiens
tatttaaatggacag

SEQ ID NO: 1244956 - DNA, 15 bp, Homo sapiens
atatttaaatggaca

SEQ ID NO: 1244957 - DNA, 15 bp, Homo sapiens
aatatttaaatggac

SEQ ID NO: 1244958 - DNA, 15 bp, Homo sapiens
caatatttaaatgga

SEQ ID NO: 1244959 - DNA, 15 bp, Homo sapiens
ccaatatttaaatgg

SEQ ID NO: 1244960 - DNA, 15 bp, Homo sapiens
tccaatatttaaatg

SEQ ID NO: 1244961 - DNA, 15 bp, Homo sapiens
ttccaatatttaaat

SEQ ID NO: 1244962 - DNA, 15 bp, Homo sapiens
attccaatatttaaa

SEQ ID NO: 1244963 - DNA, 15 bp, Homo sapiens
tattccaatatttaa

SEQ ID NO: 1244964 - DNA, 15 bp, Homo sapiens
ttattccaatattta

SEQ ID NO: 1244965 - DNA, 15 bp, Homo sapiens
gttattccaatattt

SEQ ID NO: 1244966 - DNA, 15 bp, Homo sapiens
ggttattccaatatt

SEQ ID NO: 1244967 - DNA, 15 bp, Homo sapiens
gggttattccaatat

SEQ ID NO: 1244968 - DNA, 15 bp, Homo sapiens
ggggttattccaata

SEQ ID NO: 1244969 - DNA, 15 bp, Homo sapiens
aggggttattccaat

SEQ ID NO: 1244970 - DNA, 15 bp, Homo sapiens
taggggttattccaa

SEQ ID NO: 1244971 - DNA, 15 bp, Homo sapiens
ataggggttattcca

SEQ ID NO: 1244972 - DNA, 15 bp, Homo sapiens
aataggggttattcc

SEQ ID NO: 1244973 - DNA, 15 bp, Homo sapiens
taataggggttattc

SEQ ID NO: 1244974 - DNA, 15 bp, Homo sapiens
ataataggggttatt

SEQ ID NO: 1244975 - DNA, 15 bp, Homo sapiens
cataataggggttat

SEQ ID NO: 1244976 - DNA, 15 bp, Homo sapiens
acataataggggtta

SEQ ID NO: 1244977 - DNA, 15 bp, Homo sapiens
cacataataggggtt

SEQ ID NO: 1244978 - DNA, 15 bp, Homo sapiens
acacataataggggt

SEQ ID NO: 1244979 - DNA, 15 bp, Homo sapiens
aacacataatagggg

SEQ ID NO: 1244980 - DNA, 15 bp, Homo sapiens
aaacacataataggg

SEQ ID NO: 1244981 - DNA, 15 bp, Homo sapiens
caaacacataatagg

SEQ ID NO: 1244982 - DNA, 15 bp, Homo sapiens
acaaacacataatag

SEQ ID NO: 1244983 - DNA, 15 bp, Homo sapiens
aacaaacacataata

SEQ ID NO: 1244984 - DNA, 15 bp, Homo sapiens
aaacaaacacataat

SEQ ID NO: 1244985 - DNA, 15 bp, Homo sapiens
caaacaaacacataa

SEQ ID NO: 1244986 - DNA, 15 bp, Homo sapiens
acaaacaaacacata

SEQ ID NO: 1244987 - DNA, 15 bp, Homo sapiens
aacaaacaaacacat

SEQ ID NO: 1244988 - DNA, 15 bp, Homo sapiens
aaacaaacaaacaca

SEQ ID NO: 1244989 - DNA, 15 bp, Homo sapiens
aaaacaaacaaacac

SEQ ID NO: 1244990 - DNA, 15 bp, Homo sapiens
tattaaaacaaacaa

SEQ ID NO: 1244991 - DNA, 15 bp, Homo sapiens
ttattaaaacaaaca

SEQ ID NO: 1244992 - DNA, 15 bp, Homo sapiens
tttattaaaacaaac

SEQ ID NO: 1244993 - DNA, 15 bp, Homo sapiens
actttattaaaacaa

SEQ ID NO: 1244994 - DNA, 15 bp, Homo sapiens
cactttattaaaaca

SEQ ID NO: 1244995 - DNA, 15 bp, Homo sapiens
acactttattaaaac

SEQ ID NO: 1244996 - DNA, 15 bp, Homo sapiens
tacactttattaaaa

SEQ ID NO: 1244997 - DNA, 15 bp, Homo sapiens
atacactttattaaa

SEQ ID NO: 1244998 - DNA, 15 bp, Homo sapiens
tatacactttattaa

SEQ ID NO: 1244999 - DNA, 15 bp, Homo sapiens
atatacactttatta

SEQ ID NO: 1245000 - DNA, 15 bp, Homo sapiens
catatacactttatt

SEQ ID NO: 1245001 - DNA, 15 bp, Homo sapiens
tcatatacactttat

SEQ ID NO: 1245002 - DNA, 15 bp, Homo sapiens
atcatatacacttta

SEQ ID NO: 1245003 - DNA, 15 bp, Homo sapiens
tatcatatacacttt

SEQ ID NO: 1245004 - DNA, 15 bp, Homo sapiens
gtatcatatacactt

SEQ ID NO: 1245005 - DNA, 15 bp, Homo sapiens
agtatcatatacact

SEQ ID NO: 1245006 - DNA, 15 bp, Homo sapiens
gagtatcatatacac

SEQ ID NO: 1245007 - DNA, 15 bp, Homo sapiens
ggagtatcatataca

SEQ ID NO: 1245008 - DNA, 15 bp, Homo sapiens
aggagtatcatatac

SEQ ID NO: 1245009 - DNA, 15 bp, Homo sapiens
aaggagtatcatata

SEQ ID NO: 1245010 - DNA, 15 bp, Homo sapiens
caaggagtatcatat

SEQ ID NO: 1245011 - DNA, 15 bp, Homo sapiens
ccaaggagtatcata

SEQ ID NO: 1245012 - DNA, 15 bp, Homo sapiens
accaaggagtatcat

SEQ ID NO: 1245013 - DNA, 15 bp, Homo sapiens
aaccaaggagtatca

SEQ ID NO: 1245014 - DNA, 15 bp, Homo sapiens
aaaccaaggagtatc

SEQ ID NO: 1245015 - DNA, 15 bp, Homo sapiens
aaaaccaaggagtat

SEQ ID NO: 1245016 - DNA, 15 bp, Homo sapiens
gaaaaccaaggagta

SEQ ID NO: 1245017 - DNA, 15 bp, Homo sapiens
agaaaaccaaggagt

SEQ ID NO: 1245018 - DNA, 15 bp, Homo sapiens
gagaaaaccaaggag

SEQ ID NO: 1245019 - DNA, 15 bp, Homo sapiens
ggagaaaaccaagga

SEQ ID NO: 1245020 - DNA, 15 bp, Homo sapiens
tggagaaaaccaagg

SEQ ID NO: 1245021 - DNA, 15 bp, Homo sapiens
ttggagaaaaccaag

SEQ ID NO: 1245022 - DNA, 15 bp, Homo sapiens
tttggagaaaaccaa

SEQ ID NO: 1245023 - DNA, 15 bp, Homo sapiens
ttttggagaaaacca

SEQ ID NO: 1245024 - DNA, 15 bp, Homo sapiens
attttggagaaaacc

SEQ ID NO: 1245025 - DNA, 15 bp, Homo sapiens
tattttggagaaaac

SEQ ID NO: 1245026 - DNA, 15 bp, Homo sapiens
ttattttggagaaaa

SEQ ID NO: 1245027 - DNA, 15 bp, Homo sapiens
tttattttggagaaa

SEQ ID NO: 1245028 - DNA, 15 bp, Homo sapiens
atttattttggagaa

SEQ ID NO: 1245029 - DNA, 15 bp, Homo sapiens
tatttattttggaga

SEQ ID NO: 1245030 - DNA, 15 bp, Homo sapiens
ctatttattttggag

SEQ ID NO: 1245031 - DNA, 15 bp, Homo sapiens
gctatttattttgga

SEQ ID NO: 1245032 - DNA, 15 bp, Homo sapiens
tgctatttattttgg

SEQ ID NO: 1245033 - DNA, 15 bp, Homo sapiens
atgctatttattttg

SEQ ID NO: 1245034 - DNA, 15 bp, Homo sapiens
aatgctatttatttt

SEQ ID NO: 1245035 - DNA, 15 bp, Homo sapiens
taatgctatttattt

SEQ ID NO: 1245036 - DNA, 15 bp, Homo sapiens
gtaatgctatttatt

SEQ ID NO: 1245037 - DNA, 15 bp, Homo sapiens
agtaatgctatttat

SEQ ID NO: 1245038 - DNA, 15 bp, Homo sapiens
tagtaatgctattta

SEQ ID NO: 1245039 - DNA, 15 bp, Homo sapiens
ttagtaatgctattt

SEQ ID NO: 1245040 - DNA, 15 bp, Homo sapiens
cttagtaatgctatt

SEQ ID NO: 1245041 - DNA, 15 bp, Homo sapiens
ccttagtaatgctat

SEQ ID NO: 1245042 - DNA, 15 bp, Homo sapiens
tccttagtaatgcta

SEQ ID NO: 1245043 - DNA, 15 bp, Homo sapiens
ttccttagtaatgct

SEQ ID NO: 1245044 - DNA, 15 bp, Homo sapiens
tttccttagtaatgc

SEQ ID NO: 1245045 - DNA, 15 bp, Homo sapiens
atttccttagtaatg

SEQ ID NO: 1245046 - DNA, 15 bp, Homo sapiens
gatttccttagtaat

SEQ ID NO: 1245047 - DNA, 15 bp, Homo sapiens
tgatttccttagtaa

SEQ ID NO: 1245048 - DNA, 15 bp, Homo sapiens
gtgatttccttagta

SEQ ID NO: 1245049 - DNA, 15 bp, Homo sapiens
tgtgatttccttagt

SEQ ID NO: 1245050 - DNA, 15 bp, Homo sapiens
atgtgatttccttag

SEQ ID NO: 1245051 - DNA, 15 bp, Homo sapiens
tatgtgatttcctta

SEQ ID NO: 1245052 - DNA, 15 bp, Homo sapiens
gtatgtgatttcctt

SEQ ID NO: 1245053 - DNA, 15 bp, Homo sapiens
agtatgtgatttcct

SEQ ID NO: 1245054 - DNA, 15 bp, Homo sapiens
aagtatgtgatttcc

SEQ ID NO: 1245055 - DNA, 15 bp, Homo sapiens
aaagtatgtgatttc

SEQ ID NO: 1245056 - DNA, 15 bp, Homo sapiens
gaaagtatgtgattt

SEQ ID NO: 1245057 - DNA, 15 bp, Homo sapiens
agaaagtatgtgatt

SEQ ID NO: 1245058 - DNA, 15 bp, Homo sapiens
cagaaagtatgtgat

SEQ ID NO: 1245059 - DNA, 15 bp, Homo sapiens
tcagaaagtatgtga

SEQ ID NO: 1245060 - DNA, 15 bp, Homo sapiens
gtcagaaagtatgtg

SEQ ID NO: 1245061 - DNA, 15 bp, Homo sapiens
agtcagaaagtatgt

SEQ ID NO: 1245062 - DNA, 15 bp, Homo sapiens
tagtcagaaagtatg

SEQ ID NO: 1245063 - DNA, 15 bp, Homo sapiens
ttagtcagaaagtat

SEQ ID NO: 1245064 - DNA, 15 bp, Homo sapiens
cttagtcagaaagta

SEQ ID NO: 1245065 - DNA, 15 bp, Homo sapiens
acttagtcagaaagt

SEQ ID NO: 1245066 - DNA, 15 bp, Homo sapiens
tacttagtcagaaag

SEQ ID NO: 1245067 - DNA, 15 bp, Homo sapiens
ctacttagtcagaaa

SEQ ID NO: 1245068 - DNA, 15 bp, Homo sapiens
gctacttagtcagaa

SEQ ID NO: 1245069 - DNA, 15 bp, Homo sapiens
tgctacttagtcaga

SEQ ID NO: 1245070 - DNA, 15 bp, Homo sapiens
ctgctacttagtcag

SEQ ID NO: 1245071 - DNA, 15 bp, Homo sapiens
tctgctacttagtca

SEQ ID NO: 1245072 - DNA, 15 bp, Homo sapiens
atctgctacttagtc

SEQ ID NO: 1245073 - DNA, 15 bp, Homo sapiens
catctgctacttagt

SEQ ID NO: 1245074 - DNA, 15 bp, Homo sapiens
tcatctgctacttag

SEQ ID NO: 1245075 - DNA, 15 bp, Homo sapiens
atcatctgctactta

SEQ ID NO: 1245076 - DNA, 15 bp, Homo sapiens
aatcatctgctactt

SEQ ID NO: 1245077 - DNA, 15 bp, Homo sapiens
aaatcatctgctact

SEQ ID NO: 1245078 - DNA, 15 bp, Homo sapiens
caaatcatctgctac

SEQ ID NO: 1245079 - DNA, 15 bp, Homo sapiens
gcaaatcatctgcta

SEQ ID NO: 1245080 - DNA, 15 bp, Homo sapiens
agcaaatcatctgct

SEQ ID NO: 1245081 - DNA, 15 bp, Homo sapiens
cagcaaatcatctgc

SEQ ID NO: 1245082 - DNA, 15 bp, Homo sapiens
ccagcaaatcatctg

SEQ ID NO: 1245083 - DNA, 15 bp, Homo sapiens
cccagcaaatcatct

SEQ ID NO: 1245084 - DNA, 15 bp, Homo sapiens
gcccagcaaatcatc

SEQ ID NO: 1245085 - DNA, 15 bp, Homo sapiens
tgcccagcaaatcat

SEQ ID NO: 1245086 - DNA, 15 bp, Homo sapiens
atgcccagcaaatca

SEQ ID NO: 1245087 - DNA, 15 bp, Homo sapiens
aatgcccagcaaatc

SEQ ID NO: 1245088 - DNA, 15 bp, Homo sapiens
aaatgcccagcaaat

SEQ ID NO: 1245089 - DNA, 15 bp, Homo sapiens
taaatgcccagcaaa

SEQ ID NO: 1245090 - DNA, 15 bp, Homo sapiens
ataaatgcccagcaa

SEQ ID NO: 1245091 - DNA, 15 bp, Homo sapiens
cataaatgcccagca

SEQ ID NO: 1245092 - DNA, 15 bp, Homo sapiens
acataaatgcccagc

SEQ ID NO: 1245093 - DNA, 15 bp, Homo sapiens
aacataaatgcccag

SEQ ID NO: 1245094 - DNA, 15 bp, Homo sapiens
taacataaatgccca

SEQ ID NO: 1245095 - DNA, 15 bp, Homo sapiens
ctaacataaatgccc

SEQ ID NO: 1245096 - DNA, 15 bp, Homo sapiens
tctaacataaatgcc

SEQ ID NO: 1245097 - DNA, 15 bp, Homo sapiens
ctctaacataaatgc

SEQ ID NO: 1245098 - DNA, 15 bp, Homo sapiens
cctctaacataaatg

SEQ ID NO: 1245099 - DNA, 15 bp, Homo sapiens
tcctctaacataaat

SEQ ID NO: 1245100 - DNA, 15 bp, Homo sapiens
gtcctctaacataaa

SEQ ID NO: 1245101 - DNA, 15 bp, Homo sapiens
ggtcctctaacataa

SEQ ID NO: 1245102 - DNA, 15 bp, Homo sapiens
tggtcctctaacata

SEQ ID NO: 1245103 - DNA, 15 bp, Homo sapiens
ttggtcctctaacat

SEQ ID NO: 1245104 - DNA, 15 bp, Homo sapiens
gttggtcctctaaca

SEQ ID NO: 1245105 - DNA, 15 bp, Homo sapiens
agttggtcctctaac

SEQ ID NO: 1245106 - DNA, 15 bp, Homo sapiens
tagttggtcctctaa

SEQ ID NO: 1245107 - DNA, 15 bp, Homo sapiens
ttagttggtcctcta

SEQ ID NO: 1245108 - DNA, 15 bp, Homo sapiens
tttagttggtcctct

SEQ ID NO: 1245109 - DNA, 15 bp, Homo sapiens
ttttagttggtcctc

SEQ ID NO: 1245110 - DNA, 15 bp, Homo sapiens
attttagttggtcct

SEQ ID NO: 1245111 - DNA, 15 bp, Homo sapiens
tattttagttggtcc

SEQ ID NO: 1245112 - DNA, 15 bp, Homo sapiens
ttattttagttggtc

SEQ ID NO: 1245113 - DNA, 15 bp, Homo sapiens
tttattttagttggt

SEQ ID NO: 1245114 - DNA, 15 bp, Homo sapiens
atttattttagttgg

SEQ ID NO: 1245115 - DNA, 15 bp, Homo sapiens
catttattttagttg

SEQ ID NO: 1245116 - DNA, 15 bp, Homo sapiens
tcatttattttagtt

SEQ ID NO: 1245117 - DNA, 15 bp, Homo sapiens
gtcatttattttagt

SEQ ID NO: 1245118 - DNA, 15 bp, Homo sapiens
agtcatttattttag

SEQ ID NO: 1245119 - DNA, 15 bp, Homo sapiens
aagtcatttatttta

SEQ ID NO: 1245120 - DNA, 15 bp, Homo sapiens
aaagtcatttatttt

SEQ ID NO: 1245121 - DNA, 15 bp, Homo sapiens
caaagtcatttattt

SEQ ID NO: 1245122 - DNA, 15 bp, Homo sapiens
acaaagtcatttatt

SEQ ID NO: 1245123 - DNA, 15 bp, Homo sapiens
aacaaagtcatttat

SEQ ID NO: 1245124 - DNA, 15 bp, Homo sapiens
aaacaaagtcattta

SEQ ID NO: 1245125 - DNA, 15 bp, Homo sapiens
aaaacaaagtcattt

SEQ ID NO: 1245126 - DNA, 15 bp, Homo sapiens
aaaaacaaagtcatt

SEQ ID NO: 1245127 - DNA, 15 bp, Homo sapiens
caaaaacaaagtcat

SEQ ID NO: 1245128 - DNA, 15 bp, Homo sapiens
acaaaaacaaagtca

SEQ ID NO: 1245129 - DNA, 15 bp, Homo sapiens
tacaaaaacaaagtc

SEQ ID NO: 1245130 - DNA, 15 bp, Homo sapiens
ttacaaaaacaaagt

SEQ ID NO: 1245131 - DNA, 15 bp, Homo sapiens
attacaaaaacaaag

SEQ ID NO: 1245132 - DNA, 15 bp, Homo sapiens
tattacaaaaacaaa

SEQ ID NO: 1245133 - DNA, 15 bp, Homo sapiens
ttattacaaaaacaa

SEQ ID NO: 1245134 - DNA, 15 bp, Homo sapiens
gttattacaaaaaca

SEQ ID NO: 1245135 - DNA, 15 bp, Homo sapiens
ggttattacaaaaac

SEQ ID NO: 1245136 - DNA, 15 bp, Homo sapiens
tggttattacaaaaa

SEQ ID NO: 1245137 - DNA, 15 bp, Homo sapiens
atggttattacaaaa

SEQ ID NO: 1245138 - DNA, 15 bp, Homo sapiens
tatggttattacaaa

SEQ ID NO: 1245139 - DNA, 15 bp, Homo sapiens
ttatggttattacaa

SEQ ID NO: 1245140 - DNA, 15 bp, Homo sapiens
cttatggttattaca

SEQ ID NO: 1245141 - DNA, 15 bp, Homo sapiens
tcttatggttattac

SEQ ID NO: 1245142 - DNA, 15 bp, Homo sapiens
ctcttatggttatta

SEQ ID NO: 1245143 - DNA, 15 bp, Homo sapiens
gctcttatggttatt

SEQ ID NO: 1245144 - DNA, 15 bp, Homo sapiens
agctcttatggttat

SEQ ID NO: 1245145 - DNA, 15 bp, Homo sapiens
tagctcttatggtta

SEQ ID NO: 1245146 - DNA, 15 bp, Homo sapiens
ttagctcttatggtt

SEQ ID NO: 1245147 - DNA, 15 bp, Homo sapiens
tttagctcttatggt

SEQ ID NO: 1245148 - DNA, 15 bp, Homo sapiens
ttttagctcttatgg

SEQ ID NO: 1245149 - DNA, 15 bp, Homo sapiens
attttagctcttatg

SEQ ID NO: 1245150 - DNA, 15 bp, Homo sapiens
tattttagctcttat

SEQ ID NO: 1245151 - DNA, 15 bp, Homo sapiens
atattttagctctta

SEQ ID NO: 1245152 - DNA, 15 bp, Homo sapiens
gatattttagctctt

SEQ ID NO: 1245153 - DNA, 15 bp, Homo sapiens
ggatattttagctct

SEQ ID NO: 1245154 - DNA, 15 bp, Homo sapiens
gggatattttagctc

SEQ ID NO: 1245155 - DNA, 15 bp, Homo sapiens
tgggatattttagct

SEQ ID NO: 1245156 - DNA, 15 bp, Homo sapiens
atgggatattttagc

SEQ ID NO: 1245157 - DNA, 15 bp, Homo sapiens
gatgggatattttag

SEQ ID NO: 1245158 - DNA, 15 bp, Homo sapiens
agatgggatatttta

SEQ ID NO: 1245159 - DNA, 15 bp, Homo sapiens
tagatgggatatttt

SEQ ID NO: 1245160 - DNA, 15 bp, Homo sapiens
ttagatgggatattt

SEQ ID NO: 1245161 - DNA, 15 bp, Homo sapiens
tttagatgggatatt

SEQ ID NO: 1245162 - DNA, 15 bp, Homo sapiens
ctttagatgggatat

SEQ ID NO: 1245163 - DNA, 15 bp, Homo sapiens
tctttagatgggata

SEQ ID NO: 1245164 - DNA, 15 bp, Homo sapiens
gtctttagatgggat

SEQ ID NO: 1245165 - DNA, 15 bp, Homo sapiens
tgtctttagatggga

SEQ ID NO: 1245166 - DNA, 15 bp, Homo sapiens
gtgtctttagatggg

SEQ ID NO: 1245167 - DNA, 15 bp, Homo sapiens
agtgtctttagatgg

SEQ ID NO: 1245168 - DNA, 15 bp, Homo sapiens
cagtgtctttagatg

SEQ ID NO: 1245169 - DNA, 15 bp, Homo sapiens
tcagtgtctttagat

SEQ ID NO: 1245170 - DNA, 15 bp, Homo sapiens
ttcagtgtctttaga

SEQ ID NO: 1245171 - DNA, 15 bp, Homo sapiens
tttcagtgtctttag

SEQ ID NO: 1245172 - DNA, 15 bp, Homo sapiens
atttcagtgtcttta

SEQ ID NO: 1245173 - DNA, 15 bp, Homo sapiens
aatttcagtgtcttt

SEQ ID NO: 1245174 - DNA, 15 bp, Homo sapiens
caatttcagtgtctt

SEQ ID NO: 1245175 - DNA, 15 bp, Homo sapiens
tcaatttcagtgtct

SEQ ID NO: 1245176 - DNA, 15 bp, Homo sapiens
ctcaatttcagtgtc

SEQ ID NO: 1245177 - DNA, 15 bp, Homo sapiens
tctcaatttcagtgt

SEQ ID NO: 1245178 - DNA, 15 bp, Homo sapiens
ttctcaatttcagtg

SEQ ID NO: 1245179 - DNA, 15 bp, Homo sapiens
cttctcaatttcagt

SEQ ID NO: 1245180 - DNA, 15 bp, Homo sapiens
gcttctcaatttcag

SEQ ID NO: 1245181 - DNA, 15 bp, Homo sapiens
agcttctcaatttca

SEQ ID NO: 1245182 - DNA, 15 bp, Homo sapiens
cagcttctcaatttc

SEQ ID NO: 1245183 - DNA, 15 bp, Homo sapiens
acagcttctcaattt

SEQ ID NO: 1245184 - DNA, 15 bp, Homo sapiens
tacagcttctcaatt

SEQ ID NO: 1245185 - DNA, 15 bp, Homo sapiens
ctacagcttctcaat

SEQ ID NO: 1245186 - DNA, 15 bp, Homo sapiens
actacagcttctcaa

SEQ ID NO: 1245187 - DNA, 15 bp, Homo sapiens
tactacagcttctca

SEQ ID NO: 1245188 - DNA, 15 bp, Homo sapiens
ttactacagcttctc

SEQ ID NO: 1245189 - DNA, 15 bp, Homo sapiens
tttactacagcttct

SEQ ID NO: 1245190 - DNA, 15 bp, Homo sapiens
atttactacagcttc

SEQ ID NO: 1245191 - DNA, 15 bp, Homo sapiens
tatttactacagctt

SEQ ID NO: 1245192 - DNA, 15 bp, Homo sapiens
ttatttactacagct

SEQ ID NO: 1245193 - DNA, 15 bp, Homo sapiens
attatttactacagc

SEQ ID NO: 1245194 - DNA, 15 bp, Homo sapiens
gattatttactacag

SEQ ID NO: 1245195 - DNA, 15 bp, Homo sapiens
tgattatttactaca

SEQ ID NO: 1245196 - DNA, 15 bp, Homo sapiens
atgattatttactac

SEQ ID NO: 1245197 - DNA, 15 bp, Homo sapiens
aatgattatttacta

SEQ ID NO: 1245198 - DNA, 15 bp, Homo sapiens
taatgattatttact

SEQ ID NO: 1245199 - DNA, 15 bp, Homo sapiens
ataatgattatttac

SEQ ID NO: 1245200 - DNA, 15 bp, Homo sapiens
aataatgattattta

SEQ ID NO: 1245201 - DNA, 15 bp, Homo sapiens
aaataatgattattt

SEQ ID NO: 1245202 - DNA, 15 bp, Homo sapiens
aaaataatgattatt

SEQ ID NO: 1245203 - DNA, 15 bp, Homo sapiens
gaaaataatgattat

SEQ ID NO: 1245204 - DNA, 15 bp, Homo sapiens
tgaaaataatgatta

SEQ ID NO: 1245205 - DNA, 15 bp, Homo sapiens
gtgaaaataatgatt

SEQ ID NO: 1245206 - DNA, 15 bp, Homo sapiens
tgtgaaaataatgat

SEQ ID NO: 1245207 - DNA, 15 bp, Homo sapiens
atgtgaaaataatga

SEQ ID NO: 1245208 - DNA, 15 bp, Homo sapiens
aatgtgaaaataatg

SEQ ID NO: 1245209 - DNA, 15 bp, Homo sapiens
aaatgtgaaaataat

SEQ ID NO: 1245210 - DNA, 15 bp, Homo sapiens
aaaatgtgaaaataa

SEQ ID NO: 1245211 - DNA, 15 bp, Homo sapiens
aaaaatgtgaaaata

SEQ ID NO: 1245212 - DNA, 15 bp, Homo sapiens
taaaaatgtgaaaat

SEQ ID NO: 1245213 - DNA, 15 bp, Homo sapiens
ataaaaatgtgaaaa

SEQ ID NO: 1245214 - DNA, 15 bp, Homo sapiens
cataaaaatgtgaaa

SEQ ID NO: 1245215 - DNA, 15 bp, Homo sapiens
ccataaaaatgtgaa

SEQ ID NO: 1245216 - DNA, 15 bp, Homo sapiens
gccataaaaatgtga

SEQ ID NO: 1245217 - DNA, 15 bp, Homo sapiens
tgccataaaaatgtg

SEQ ID NO: 1245218 - DNA, 15 bp, Homo sapiens
atgccataaaaatgt

SEQ ID NO: 1245219 - DNA, 15 bp, Homo sapiens
aatgccataaaaatg

SEQ ID NO: 1245220 - DNA, 15 bp, Homo sapiens
aaatgccataaaaat

SEQ ID NO: 1245221 - DNA, 15 bp, Homo sapiens
taaatgccataaaaa

SEQ ID NO: 1245222 - DNA, 15 bp, Homo sapiens
ttaaatgccataaaa

SEQ ID NO: 1245223 - DNA, 15 bp, Homo sapiens
attaaatgccataaa

SEQ ID NO: 1245224 - DNA, 15 bp, Homo sapiens
cattaaatgccataa

SEQ ID NO: 1245225 - DNA, 15 bp, Homo sapiens
tcattaaatgccata

SEQ ID NO: 1245226 - DNA, 15 bp, Homo sapiens
ttcattaaatgccat

SEQ ID NO: 1245227 - DNA, 15 bp, Homo sapiens
tttcattaaatgcca

SEQ ID NO: 1245228 - DNA, 15 bp, Homo sapiens
ctttcattaaatgcc

SEQ ID NO: 1245229 - DNA, 15 bp, Homo sapiens
gctttcattaaatgc

SEQ ID NO: 1245230 - DNA, 15 bp, Homo sapiens
tgctttcattaaatg

SEQ ID NO: 1245231 - DNA, 15 bp, Homo sapiens
ctgctttcattaaat

SEQ ID NO: 1245232 - DNA, 15 bp, Homo sapiens
gctgctttcattaaa

SEQ ID NO: 1245233 - DNA, 15 bp, Homo sapiens
agctgctttcattaa

SEQ ID NO: 1245234 - DNA, 15 bp, Homo sapiens
aagctgctttcatta

SEQ ID NO: 1245235 - DNA, 15 bp, Homo sapiens
gaagctgctttcatt

SEQ ID NO: 1245236 - DNA, 15 bp, Homo sapiens
ggaagctgctttcat

SEQ ID NO: 1245237 - DNA, 15 bp, Homo sapiens
gggaagctgctttca

SEQ ID NO: 1245238 - DNA, 15 bp, Homo sapiens
tgggaagctgctttc

SEQ ID NO: 1245239 - DNA, 15 bp, Homo sapiens
ctgggaagctgcttt

SEQ ID NO: 1245240 - DNA, 15 bp, Homo sapiens
gctgggaagctgctt

SEQ ID NO: 1245241 - DNA, 15 bp, Homo sapiens
agctgggaagctgct

SEQ ID NO: 1245242 - DNA, 15 bp, Homo sapiens
gagctgggaagctgc

SEQ ID NO: 1245243 - DNA, 15 bp, Homo sapiens
agagctgggaagctg

SEQ ID NO: 1245244 - DNA, 15 bp, Homo sapiens
aagagctgggaagct

SEQ ID NO: 1245245 - DNA, 15 bp, Homo sapiens
aaagagctgggaagc

SEQ ID NO: 1245246 - DNA, 15 bp, Homo sapiens
caaagagctgggaag

SEQ ID NO: 1245247 - DNA, 15 bp, Homo sapiens
gcaaagagctgggaa

SEQ ID NO: 1245248 - DNA, 15 bp, Homo sapiens
tgcaaagagctggga

SEQ ID NO: 1245249 - DNA, 15 bp, Homo sapiens
gtgcaaagagctggg

SEQ ID NO: 1245250 - DNA, 15 bp, Homo sapiens
cgtgcaaagagctgg

SEQ ID NO: 1245251 - DNA, 15 bp, Homo sapiens
tcgtgcaaagagctg

SEQ ID NO: 1245252 - DNA, 15 bp, Homo sapiens
ttcgtgcaaagagct

SEQ ID NO: 1245253 - DNA, 15 bp, Homo sapiens
attcgtgcaaagagc

SEQ ID NO: 1245254 - DNA, 15 bp, Homo sapiens
cattcgtgcaaagag

SEQ ID NO: 1245255 - DNA, 15 bp, Homo sapiens
acattcgtgcaaaga

SEQ ID NO: 1245256 - DNA, 15 bp, Homo sapiens
cacattcgtgcaaag

SEQ ID NO: 1245257 - DNA, 15 bp, Homo sapiens
ccacattcgtgcaaa

SEQ ID NO: 1245258 - DNA, 15 bp, Homo sapiens
cccacattcgtgcaa

SEQ ID NO: 1245259 - DNA, 15 bp, Homo sapiens
tcccacattcgtgca

SEQ ID NO: 1245260 - DNA, 15 bp, Homo sapiens
ctcccacattcgtgc

SEQ ID NO: 1245261 - DNA, 15 bp, Homo sapiens
actcccacattcgtg

SEQ ID NO: 1245262 - DNA, 15 bp, Homo sapiens
cactcccacattcgt

SEQ ID NO: 1245263 - DNA, 15 bp, Homo sapiens
ccactcccacattcg

SEQ ID NO: 1245264 - DNA, 15 bp, Homo sapiens
cccactcccacattc

SEQ ID NO: 1245265 - DNA, 15 bp, Homo sapiens
tcccactcccacatt

SEQ ID NO: 1245266 - DNA, 15 bp, Homo sapiens
atcccactcccacat

SEQ ID NO: 1245267 - DNA, 15 bp, Homo sapiens
catcccactcccaca

SEQ ID NO: 1245268 - DNA, 15 bp, Homo sapiens
gcatcccactcccac

SEQ ID NO: 1245269 - DNA, 15 bp, Homo sapiens
agcatcccactccca

SEQ ID NO: 1245270 - DNA, 15 bp, Homo sapiens
aagcatcccactccc

SEQ ID NO: 1245271 - DNA, 15 bp, Homo sapiens
gaagcatcccactcc

SEQ ID NO: 1245272 - DNA, 15 bp, Homo sapiens
ggaagcatcccactc

SEQ ID NO: 1245273 - DNA, 15 bp, Homo sapiens
tggaagcatcccact

SEQ ID NO: 1245274 - DNA, 15 bp, Homo sapiens
atggaagcatcccac

SEQ ID NO: 1245275 - DNA, 15 bp, Homo sapiens
catggaagcatccca

SEQ ID NO: 1245276 - DNA, 15 bp, Homo sapiens
gcatggaagcatccc

SEQ ID NO: 1245277 - DNA, 15 bp, Homo sapiens
agcatggaagcatcc

SEQ ID NO: 1245278 - DNA, 15 bp, Homo sapiens
aagcatggaagcatc

SEQ ID NO: 1245279 - DNA, 15 bp, Homo sapiens
taagcatggaagcat

SEQ ID NO: 1245280 - DNA, 15 bp, Homo sapiens
ctaagcatggaagca

SEQ ID NO: 1245281 - DNA, 15 bp, Homo sapiens
gctaagcatggaagc

SEQ ID NO: 1245282 - DNA, 15 bp, Homo sapiens
tgctaagcatggaag

SEQ ID NO: 1245283 - DNA, 15 bp, Homo sapiens
ttgctaagcatggaa

SEQ ID NO: 1245284 - DNA, 15 bp, Homo sapiens
cttgctaagcatgga

SEQ ID NO: 1245285 - DNA, 15 bp, Homo sapiens
acttgctaagcatgg

SEQ ID NO: 1245286 - DNA, 15 bp, Homo sapiens
cacttgctaagcatg

SEQ ID NO: 1245287 - DNA, 15 bp, Homo sapiens
gcacttgctaagcat

SEQ ID NO: 1245288 - DNA, 15 bp, Homo sapiens
agcacttgctaagca

SEQ ID NO: 1245289 - DNA, 15 bp, Homo sapiens
aagcacttgctaagc

SEQ ID NO: 1245290 - DNA, 15 bp, Homo sapiens
gaagcacttgctaag

SEQ ID NO: 1245291 - DNA, 15 bp, Homo sapiens
ggaagcacttgctaa

SEQ ID NO: 1245292 - DNA, 15 bp, Homo sapiens
tggaagcacttgcta

SEQ ID NO: 1245293 - DNA, 15 bp, Homo sapiens
ctggaagcacttgct

SEQ ID NO: 1245294 - DNA, 15 bp, Homo sapiens
gctggaagcacttgc

SEQ ID NO: 1245295 - DNA, 15 bp, Homo sapiens
tgctggaagcacttg

SEQ ID NO: 1245296 - DNA, 15 bp, Homo sapiens
ctgctggaagcactt

SEQ ID NO: 1245297 - DNA, 15 bp, Homo sapiens
cctgctggaagcact

SEQ ID NO: 1245298 - DNA, 15 bp, Homo sapiens
tcctgctggaagcac

SEQ ID NO: 1245299 - DNA, 15 bp, Homo sapiens
ttcctgctggaagca

SEQ ID NO: 1245300 - DNA, 15 bp, Homo sapiens
tttcctgctggaagc

SEQ ID NO: 1245301 - DNA, 15 bp, Homo sapiens
ttttcctgctggaag

SEQ ID NO: 1245302 - DNA, 15 bp, Homo sapiens
gttttcctgctggaa

SEQ ID NO: 1245303 - DNA, 15 bp, Homo sapiens
tgttttcctgctgga

SEQ ID NO: 1245304 - DNA, 15 bp, Homo sapiens
gtgttttcctgctgg

SEQ ID NO: 1245305 - DNA, 15 bp, Homo sapiens
agtgttttcctgctg

SEQ ID NO: 1245306 - DNA, 15 bp, Homo sapiens
cagtgttttcctgct

SEQ ID NO: 1245307 - DNA, 15 bp, Homo sapiens
tcagtgttttcctgc

SEQ ID NO: 1245308 - DNA, 15 bp, Homo sapiens
gtcagtgttttcctg

SEQ ID NO: 1245309 - DNA, 15 bp, Homo sapiens
agtcagtgttttcct

SEQ ID NO: 1245310 - DNA, 15 bp, Homo sapiens
cagtcagtgttttcc

SEQ ID NO: 1245311 - DNA, 15 bp, Homo sapiens
tcagtcagtgttttc

SEQ ID NO: 1245312 - DNA, 15 bp, Homo sapiens
atcagtcagtgtttt

SEQ ID NO: 1245313 - DNA, 15 bp, Homo sapiens
catcagtcagtgttt

SEQ ID NO: 1245314 - DNA, 15 bp, Homo sapiens
tcatcagtcagtgtt

SEQ ID NO: 1245315 - DNA, 15 bp, Homo sapiens
gtcatcagtcagtgt

SEQ ID NO: 1245316 - DNA, 15 bp, Homo sapiens
agtcatcagtcagtg

SEQ ID NO: 1245317 - DNA, 15 bp, Homo sapiens
cagtcatcagtcagt

SEQ ID NO: 1245318 - DNA, 15 bp, Homo sapiens
gcagtcatcagtcag

SEQ ID NO: 1245319 - DNA, 15 bp, Homo sapiens
tgcagtcatcagtca

SEQ ID NO: 1245320 - DNA, 15 bp, Homo sapiens
ctgcagtcatcagtc

SEQ ID NO: 1245321 - DNA, 15 bp, Homo sapiens
cctgcagtcatcagt

SEQ ID NO: 1245322 - DNA, 15 bp, Homo sapiens
acctgcagtcatcag

SEQ ID NO: 1245323 - DNA, 15 bp, Homo sapiens
aacctgcagtcatca

SEQ ID NO: 1245324 - DNA, 15 bp, Homo sapiens
caacctgcagtcatc

SEQ ID NO: 1245325 - DNA, 15 bp, Homo sapiens
tcaacctgcagtcat

SEQ ID NO: 1245326 - DNA, 15 bp, Homo sapiens
ttcaacctgcagtca

SEQ ID NO: 1245327 - DNA, 15 bp, Homo sapiens
tttcaacctgcagtc

SEQ ID NO: 1245328 - DNA, 15 bp, Homo sapiens
atttcaacctgcagt

SEQ ID NO: 1245329 - DNA, 15 bp, Homo sapiens
gatttcaacctgcag

SEQ ID NO: 1245330 - DNA, 15 bp, Homo sapiens
agatttcaacctgca

SEQ ID NO: 1245331 - DNA, 15 bp, Homo sapiens
aagatttcaacctgc

SEQ ID NO: 1245332 - DNA, 15 bp, Homo sapiens
aaagatttcaacctg

SEQ ID NO: 1245333 - DNA, 15 bp, Homo sapiens
caaagatttcaacct

SEQ ID NO: 1245334 - DNA, 15 bp, Homo sapiens
acaaagatttcaacc

SEQ ID NO: 1245335 - DNA, 15 bp, Homo sapiens
cacaaagatttcaac

SEQ ID NO: 1245336 - DNA, 15 bp, Homo sapiens
acacaaagatttcaa

SEQ ID NO: 1245337 - DNA, 15 bp, Homo sapiens
aacacaaagatttca

SEQ ID NO: 1245338 - DNA, 15 bp, Homo sapiens
caacacaaagatttc

SEQ ID NO: 1245339 - DNA, 15 bp, Homo sapiens
ccaacacaaagattt

SEQ ID NO: 1245340 - DNA, 15 bp, Homo sapiens
cccaacacaaagatt

SEQ ID NO: 1245341 - DNA, 15 bp, Homo sapiens
ccccaacacaaagat

SEQ ID NO: 1245342 - DNA, 15 bp, Homo sapiens
cccccaacacaaaga

SEQ ID NO: 1245343 - DNA, 15 bp, Homo sapiens
acccccaacacaaag

SEQ ID NO: 1245344 - DNA, 15 bp, Homo sapiens
aacccccaacacaaa

SEQ ID NO: 1245345 - DNA, 15 bp, Homo sapiens
gaacccccaacacaa

SEQ ID NO: 1245346 - DNA, 15 bp, Homo sapiens
tgaacccccaacaca

SEQ ID NO: 1245347 - DNA, 15 bp, Homo sapiens
ctgaacccccaacac

SEQ ID NO: 1245348 - DNA, 15 bp, Homo sapiens
actgaacccccaaca

SEQ ID NO: 1245349 - DNA, 15 bp, Homo sapiens
cactgaacccccaac

SEQ ID NO: 1245350 - DNA, 15 bp, Homo sapiens
acactgaacccccaa

SEQ ID NO: 1245351 - DNA, 15 bp, Homo sapiens
tacactgaaccccca

SEQ ID NO: 1245352 - DNA, 15 bp, Homo sapiens
atacactgaaccccc

SEQ ID NO: 1245353 - DNA, 15 bp, Homo sapiens
aatacactgaacccc

SEQ ID NO: 1245354 - DNA, 15 bp, Homo sapiens
aaatacactgaaccc

SEQ ID NO: 1245355 - DNA, 15 bp, Homo sapiens
aaaatacactgaacc

SEQ ID NO: 1245356 - DNA, 15 bp, Homo sapiens
taaaatacactgaac

SEQ ID NO: 1245357 - DNA, 15 bp, Homo sapiens
ctaaaatacactgaa

SEQ ID NO: 1245358 - DNA, 15 bp, Homo sapiens
actaaaatacactga

SEQ ID NO: 1245359 - DNA, 15 bp, Homo sapiens
tactaaaatacactg

SEQ ID NO: 1245360 - DNA, 15 bp, Homo sapiens
ctactaaaatacact

SEQ ID NO: 1245361 - DNA, 15 bp, Homo sapiens
tctactaaaatacac

SEQ ID NO: 1245362 - DNA, 15 bp, Homo sapiens
gtctactaaaataca

SEQ ID NO: 1245363 - DNA, 15 bp, Homo sapiens
agtctactaaaatac

SEQ ID NO: 1245364 - DNA, 15 bp, Homo sapiens
aagtctactaaaata

SEQ ID NO: 1245365 - DNA, 15 bp, Homo sapiens
aaagtctactaaaat

SEQ ID NO: 1245366 - DNA, 15 bp, Homo sapiens
caaagtctactaaaa

SEQ ID NO: 1245367 - DNA, 15 bp, Homo sapiens
gcaaagtctactaaa

SEQ ID NO: 1245368 - DNA, 15 bp, Homo sapiens
ggcaaagtctactaa

SEQ ID NO: 1245369 - DNA, 15 bp, Homo sapiens
tggcaaagtctacta

SEQ ID NO: 1245370 - DNA, 15 bp, Homo sapiens
ttggcaaagtctact

SEQ ID NO: 1245371 - DNA, 15 bp, Homo sapiens
cttggcaaagtctac

SEQ ID NO: 1245372 - DNA, 15 bp, Homo sapiens
acttggcaaagtcta

SEQ ID NO: 1245373 - DNA, 15 bp, Homo sapiens
cacttggcaaagtct

SEQ ID NO: 1245374 - DNA, 15 bp, Homo sapiens
acacttggcaaagtc

SEQ ID NO: 1245375 - DNA, 15 bp, Homo sapiens
aacacttggcaaagt

SEQ ID NO: 1245376 - DNA, 15 bp, Homo sapiens
caacacttggcaaag

SEQ ID NO: 1245377 - DNA, 15 bp, Homo sapiens
gcaacacttggcaaa

SEQ ID NO: 1245378 - DNA, 15 bp, Homo sapiens
agcaacacttggcaa

SEQ ID NO: 1245379 - DNA, 15 bp, Homo sapiens
cagcaacacttggca

SEQ ID NO: 1245380 - DNA, 15 bp, Homo sapiens
gcagcaacacttggc

SEQ ID NO: 1245381 - DNA, 15 bp, Homo sapiens
agcagcaacacttgg

SEQ ID NO: 1245382 - DNA, 15 bp, Homo sapiens
cagcagcaacacttg

SEQ ID NO: 1245383 - DNA, 15 bp, Homo sapiens
tcagcagcaacactt

SEQ ID NO: 1245384 - DNA, 15 bp, Homo sapiens
gtcagcagcaacact

SEQ ID NO: 1245385 - DNA, 15 bp, Homo sapiens
ggtcagcagcaacac

SEQ ID NO: 1245386 - DNA, 15 bp, Homo sapiens
tggtcagcagcaaca

SEQ ID NO: 1245387 - DNA, 15 bp, Homo sapiens
ttggtcagcagcaac

SEQ ID NO: 1245388 - DNA, 15 bp, Homo sapiens
gttggtcagcagcaa

SEQ ID NO: 1245389 - DNA, 15 bp, Homo sapiens
tgttggtcagcagca

SEQ ID NO: 1245390 - DNA, 15 bp, Homo sapiens
atgttggtcagcagc

SEQ ID NO: 1245391 - DNA, 15 bp, Homo sapiens
aatgttggtcagcag

SEQ ID NO: 1245392 - DNA, 15 bp, Homo sapiens
gaatgttggtcagca

SEQ ID NO: 1245393 - DNA, 15 bp, Homo sapiens
tgaatgttggtcagc

SEQ ID NO: 1245394 - DNA, 15 bp, Homo sapiens
atgaatgttggtcag

SEQ ID NO: 1245395 - DNA, 15 bp, Homo sapiens
aatgaatgttggtca

SEQ ID NO: 1245396 - DNA, 15 bp, Homo sapiens
aaatgaatgttggtc

SEQ ID NO: 1245397 - DNA, 15 bp, Homo sapiens
aaaatgaatgttggt

SEQ ID NO: 1245398 - DNA, 15 bp, Homo sapiens
aaaaatgaatgttgg

SEQ ID NO: 1245399 - DNA, 15 bp, Homo sapiens
aaaaaatgaatgttg

SEQ ID NO: 1245400 - DNA, 15 bp, Homo sapiens
taaaaaatgaatgtt

SEQ ID NO: 1245401 - DNA, 15 bp, Homo sapiens
ctaaaaaatgaatgt

SEQ ID NO: 1245402 - DNA, 15 bp, Homo sapiens
actaaaaaatgaatg

SEQ ID NO: 1245403 - DNA, 15 bp, Homo sapiens
aactaaaaaatgaat

SEQ ID NO: 1245404 - DNA, 15 bp, Homo sapiens
gaactaaaaaatgaa

SEQ ID NO: 1245405 - DNA, 15 bp, Homo sapiens
tgaactaaaaaatga

SEQ ID NO: 1245406 - DNA, 15 bp, Homo sapiens
atgaactaaaaaatg

SEQ ID NO: 1245407 - DNA, 15 bp, Homo sapiens
aatgaactaaaaaat

SEQ ID NO: 1245408 - DNA, 15 bp, Homo sapiens
aaatgaactaaaaaa

SEQ ID NO: 1245409 - DNA, 15 bp, Homo sapiens
gaaatgaactaaaaa

SEQ ID NO: 1245410 - DNA, 15 bp, Homo sapiens
agaaatgaactaaaa

SEQ ID NO: 1245411 - DNA, 15 bp, Homo sapiens
cagaaatgaactaaa

SEQ ID NO: 1245412 - DNA, 15 bp, Homo sapiens
gcagaaatgaactaa

SEQ ID NO: 1245413 - DNA, 15 bp, Homo sapiens
agcagaaatgaacta

SEQ ID NO: 1245414 - DNA, 15 bp, Homo sapiens
aagcagaaatgaact

SEQ ID NO: 1245415 - DNA, 15 bp, Homo sapiens
gaagcagaaatgaac

SEQ ID NO: 1245416 - DNA, 15 bp, Homo sapiens
tgaagcagaaatgaa

SEQ ID NO: 1245417 - DNA, 15 bp, Homo sapiens
ctgaagcagaaatga

SEQ ID NO: 1245418 - DNA, 15 bp, Homo sapiens
tctgaagcagaaatg

SEQ ID NO: 1245419 - DNA, 15 bp, Homo sapiens
ttctgaagcagaaat

SEQ ID NO: 1245420 - DNA, 15 bp, Homo sapiens
gttctgaagcagaaa

SEQ ID NO: 1245421 - DNA, 15 bp, Homo sapiens
ggttctgaagcagaa

SEQ ID NO: 1245422 - DNA, 15 bp, Homo sapiens
tggttctgaagcaga

SEQ ID NO: 1245423 - DNA, 15 bp, Homo sapiens
ctggttctgaagcag

SEQ ID NO: 1245424 - DNA, 15 bp, Homo sapiens
actggttctgaagca

SEQ ID NO: 1245425 - DNA, 15 bp, Homo sapiens
cactggttctgaagc

SEQ ID NO: 1245426 - DNA, 15 bp, Homo sapiens
acactggttctgaag

SEQ ID NO: 1245427 - DNA, 15 bp, Homo sapiens
tacactggttctgaa

SEQ ID NO: 1245428 - DNA, 15 bp, Homo sapiens
ttacactggttctga

SEQ ID NO: 1245429 - DNA, 15 bp, Homo sapiens
tttacactggttctg

SEQ ID NO: 1245430 - DNA, 15 bp, Homo sapiens
ctttacactggttct

SEQ ID NO: 1245431 - DNA, 15 bp, Homo sapiens
tctttacactggttc

SEQ ID NO: 1245432 - DNA, 15 bp, Homo sapiens
ctctttacactggtt

SEQ ID NO: 1245433 - DNA, 15 bp, Homo sapiens
actctttacactggt

SEQ ID NO: 1245434 - DNA, 15 bp, Homo sapiens
gactctttacactgg

SEQ ID NO: 1245435 - DNA, 15 bp, Homo sapiens
ggactctttacactg

SEQ ID NO: 1245436 - DNA, 15 bp, Homo sapiens
tggactctttacact

SEQ ID NO: 1245437 - DNA, 15 bp, Homo sapiens
ctggactctttacac

SEQ ID NO: 1245438 - DNA, 15 bp, Homo sapiens
cctggactctttaca

SEQ ID NO: 1245439 - DNA, 15 bp, Homo sapiens
acctggactctttac

SEQ ID NO: 1245440 - DNA, 15 bp, Homo sapiens
aacctggactcttta

SEQ ID NO: 1245441 - DNA, 15 bp, Homo sapiens
aaacctggactcttt

SEQ ID NO: 1245442 - DNA, 15 bp, Homo sapiens
aaaacctggactctt

SEQ ID NO: 1245443 - DNA, 15 bp, Homo sapiens
taaaacctggactct

SEQ ID NO: 1245444 - DNA, 15 bp, Homo sapiens
gtaaaacctggactc

SEQ ID NO: 1245445 - DNA, 15 bp, Homo sapiens
tgtaaaacctggact

SEQ ID NO: 1245446 - DNA, 15 bp, Homo sapiens
ttgtaaaacctggac

SEQ ID NO: 1245447 - DNA, 15 bp, Homo sapiens
cttgtaaaacctgga

SEQ ID NO: 1245448 - DNA, 15 bp, Homo sapiens
tcttgtaaaacctgg

SEQ ID NO: 1245449 - DNA, 15 bp, Homo sapiens
ttcttgtaaaacctg

SEQ ID NO: 1245450 - DNA, 15 bp, Homo sapiens
tttcttgtaaaacct

SEQ ID NO: 1245451 - DNA, 15 bp, Homo sapiens
ttttcttgtaaaacc

SEQ ID NO: 1245452 - DNA, 15 bp, Homo sapiens
gttttcttgtaaaac

SEQ ID NO: 1245453 - DNA, 15 bp, Homo sapiens
agttttcttgtaaaa

SEQ ID NO: 1245454 - DNA, 15 bp, Homo sapiens
acagttttcttgtaa

SEQ ID NO: 1245455 - DNA, 15 bp, Homo sapiens
cacagttttcttgta

SEQ ID NO: 1245456 - DNA, 15 bp, Homo sapiens
ccacagttttcttgt

SEQ ID NO: 1245457 - DNA, 15 bp, Homo sapiens
gccacagttttcttg

SEQ ID NO: 1245458 - DNA, 15 bp, Homo sapiens
tgccacagttttctt

SEQ ID NO: 1245459 - DNA, 15 bp, Homo sapiens
atgccacagttttct

SEQ ID NO: 1245460 - DNA, 15 bp, Homo sapiens
tatgccacagttttc

SEQ ID NO: 1245461 - DNA, 15 bp, Homo sapiens
ttatgccacagtttt

SEQ ID NO: 1245462 - DNA, 15 bp, Homo sapiens
attatgccacagttt

SEQ ID NO: 1245463 - DNA, 15 bp, Homo sapiens
aattatgccacagtt

SEQ ID NO: 1245464 - DNA, 15 bp, Homo sapiens
taattatgccacagt

SEQ ID NO: 1245465 - DNA, 15 bp, Homo sapiens
gtaattatgccacag

SEQ ID NO: 1245466 - DNA, 15 bp, Homo sapiens
tgtaattatgccaca

SEQ ID NO: 1245467 - DNA, 15 bp, Homo sapiens
ctgtaattatgccac

SEQ ID NO: 1245468 - DNA, 15 bp, Homo sapiens
tctgtaattatgcca

SEQ ID NO: 1245469 - DNA, 15 bp, Homo sapiens
atctgtaattatgcc

SEQ ID NO: 1245470 - DNA, 15 bp, Homo sapiens
catctgtaattatgc

SEQ ID NO: 1245471 - DNA, 15 bp, Homo sapiens
tcatctgtaattatg

SEQ ID NO: 1245472 - DNA, 15 bp, Homo sapiens
ctcatctgtaattat

SEQ ID NO: 1245473 - DNA, 15 bp, Homo sapiens
gctcatctgtaatta

SEQ ID NO: 1245474 - DNA, 15 bp, Homo sapiens
agctcatctgtaatt

SEQ ID NO: 1245475 - DNA, 15 bp, Homo sapiens
gagctcatctgtaat

SEQ ID NO: 1245476 - DNA, 15 bp, Homo sapiens
tggagctcatctgta

SEQ ID NO: 1245477 - DNA, 15 bp, Homo sapiens
ctggagctcatctgt

SEQ ID NO: 1245478 - DNA, 15 bp, Homo sapiens
actggagctcatctg

SEQ ID NO: 1245479 - DNA, 15 bp, Homo sapiens
gactggagctcatct

SEQ ID NO: 1245480 - DNA, 15 bp, Homo sapiens
ggactggagctcatc

SEQ ID NO: 1245481 - DNA, 15 bp, Homo sapiens
gggactggagctcat

SEQ ID NO: 1245482 - DNA, 15 bp, Homo sapiens
ggggactggagctca

SEQ ID NO: 1245483 - DNA, 15 bp, Homo sapiens
gggggactggagctc

SEQ ID NO: 1245484 - DNA, 15 bp, Homo sapiens
tgggggactggagct

SEQ ID NO: 1245485 - DNA, 15 bp, Homo sapiens
gtgggggactggagc

SEQ ID NO: 1245486 - DNA, 15 bp, Homo sapiens
tgtgggggactggag

SEQ ID NO: 1245487 - DNA, 15 bp, Homo sapiens
ctgtgggggactgga

SEQ ID NO: 1245488 - DNA, 15 bp, Homo sapiens
gctgtgggggactgg

SEQ ID NO: 1245489 - DNA, 15 bp, Homo sapiens
ggctgtgggggactg

SEQ ID NO: 1245490 - DNA, 15 bp, Homo sapiens
gggctgtgggggact

SEQ ID NO: 1245491 - DNA, 15 bp, Homo sapiens
tgggctgtgggggac

SEQ ID NO: 1245492 - DNA, 15 bp, Homo sapiens
atgggctgtggggga

SEQ ID NO: 1245493 - DNA, 15 bp, Homo sapiens
aatgggctgtggggg

SEQ ID NO: 1245494 - DNA, 15 bp, Homo sapiens
gaatgggctgtgggg

SEQ ID NO: 1245495 - DNA, 15 bp, Homo sapiens
agaatgggctgtggg

SEQ ID NO: 1245496 - DNA, 15 bp, Homo sapiens
aagaatgggctgtgg

SEQ ID NO: 1245497 - DNA, 15 bp, Homo sapiens
caagaatgggctgtg

SEQ ID NO: 1245498 - DNA, 15 bp, Homo sapiens
ccaagaatgggctgt

SEQ ID NO: 1245499 - DNA, 15 bp, Homo sapiens
tccaagaatgggctg

SEQ ID NO: 1245500 - DNA, 15 bp, Homo sapiens
ttccaagaatgggct

SEQ ID NO: 1245501 - DNA, 15 bp, Homo sapiens
tttccaagaatgggc

SEQ ID NO: 1245502 - DNA, 15 bp, Homo sapiens
ctttccaagaatggg

SEQ ID NO: 1245503 - DNA, 15 bp, Homo sapiens
cctttccaagaatgg

SEQ ID NO: 1245504 - DNA, 15 bp, Homo sapiens
ccctttccaagaatg

SEQ ID NO: 1245505 - DNA, 15 bp, Homo sapiens
tccctttccaagaat

SEQ ID NO: 1245506 - DNA, 15 bp, Homo sapiens
gtccctttccaagaa

SEQ ID NO: 1245507 - DNA, 15 bp, Homo sapiens
tgtccctttccaaga

SEQ ID NO: 1245508 - DNA, 15 bp, Homo sapiens
ttgtccctttccaag

SEQ ID NO: 1245509 - DNA, 15 bp, Homo sapiens
cttgtccctttccaa

SEQ ID NO: 1245510 - DNA, 15 bp, Homo sapiens
tcttgtccctttcca

SEQ ID NO: 1245511 - DNA, 15 bp, Homo sapiens
ctcttgtccctttcc

SEQ ID NO: 1245512 - DNA, 15 bp, Homo sapiens
tctcttgtccctttc

SEQ ID NO: 1245513 - DNA, 15 bp, Homo sapiens
ctctcttgtcccttt

SEQ ID NO: 1245514 - DNA, 15 bp, Homo sapiens
actctcttgtccctt

SEQ ID NO: 1245515 - DNA, 15 bp, Homo sapiens
aactctcttgtccct

SEQ ID NO: 1245516 - DNA, 15 bp, Homo sapiens
caactctcttgtccc

SEQ ID NO: 1245517 - DNA, 15 bp, Homo sapiens
acaactctcttgtcc

SEQ ID NO: 1245518 - DNA, 15 bp, Homo sapiens
tacaactctcttgtc

SEQ ID NO: 1245519 - DNA, 15 bp, Homo sapiens
ttacaactctcttgt

SEQ ID NO: 1245520 - DNA, 15 bp, Homo sapiens
tttacaactctcttg

SEQ ID NO: 1245521 - DNA, 15 bp, Homo sapiens
atttacaactctctt

SEQ ID NO: 1245522 - DNA, 15 bp, Homo sapiens
tatttacaactctct

SEQ ID NO: 1245523 - DNA, 15 bp, Homo sapiens
ttatttacaactctc

SEQ ID NO: 1245524 - DNA, 15 bp, Homo sapiens
tttatttacaactct

SEQ ID NO: 1245525 - DNA, 15 bp, Homo sapiens
ttttatttacaactc

SEQ ID NO: 1245526 - DNA, 15 bp, Homo sapiens
gttttatttacaact

SEQ ID NO: 1245527 - DNA, 15 bp, Homo sapiens
agttttatttacaac

SEQ ID NO: 1245528 - DNA, 15 bp, Homo sapiens
gagttttatttacaa

SEQ ID NO: 1245529 - DNA, 15 bp, Homo sapiens
agagttttatttaca

SEQ ID NO: 1245530 - DNA, 15 bp, Homo sapiens
aagagttttatttac

SEQ ID NO: 1245531 - DNA, 15 bp, Homo sapiens
caagagttttattta

SEQ ID NO: 1245532 - DNA, 15 bp, Homo sapiens
tcaagagttttattt

SEQ ID NO: 1245533 - DNA, 15 bp, Homo sapiens
ctcaagagttttatt

SEQ ID NO: 1245534 - DNA, 15 bp, Homo sapiens
actcaagagttttat

SEQ ID NO: 1245535 - DNA, 15 bp, Homo sapiens
gactcaagagtttta

SEQ ID NO: 1245536 - DNA, 15 bp, Homo sapiens
tgactcaagagtttt

SEQ ID NO: 1245537 - DNA, 15 bp, Homo sapiens
atgactcaagagttt

SEQ ID NO: 1245538 - DNA, 15 bp, Homo sapiens
gatgactcaagagtt

SEQ ID NO: 1245539 - DNA, 15 bp, Homo sapiens
ggatgactcaagagt

SEQ ID NO: 1245540 - DNA, 15 bp, Homo sapiens
ctggatgactcaaga

SEQ ID NO: 1245541 - DNA, 15 bp, Homo sapiens
gctggatgactcaag

SEQ ID NO: 1245542 - DNA, 15 bp, Homo sapiens
ggctggatgactcaa

SEQ ID NO: 1245543 - DNA, 15 bp, Homo sapiens
aggctggatgactca

SEQ ID NO: 1245544 - DNA, 15 bp, Homo sapiens
taggctggatgactc

SEQ ID NO: 1245545 - DNA, 15 bp, Homo sapiens
ttaggctggatgact

SEQ ID NO: 1245546 - DNA, 15 bp, Homo sapiens
attaggctggatgac

SEQ ID NO: 1245547 - DNA, 15 bp, Homo sapiens
tattaggctggatga

SEQ ID NO: 1245548 - DNA, 15 bp, Homo sapiens
atattaggctggatg

SEQ ID NO: 1245549 - DNA, 15 bp, Homo sapiens
aatattaggctggat

SEQ ID NO: 1245550 - DNA, 15 bp, Homo sapiens
aaatattaggctgga

SEQ ID NO: 1245551 - DNA, 15 bp, Homo sapiens
aaaatattaggctgg

SEQ ID NO: 1245552 - DNA, 15 bp, Homo sapiens
aaaaatattaggctg

SEQ ID NO: 1245553 - DNA, 15 bp, Homo sapiens
aaaaaatattaggct

SEQ ID NO: 1245554 - DNA, 15 bp, Homo sapiens
taaaaaatattaggc

SEQ ID NO: 1245555 - DNA, 15 bp, Homo sapiens
ctaaaaaatattagg

SEQ ID NO: 1245556 - DNA, 15 bp, Homo sapiens
tctaaaaaatattag

SEQ ID NO: 1245557 - DNA, 15 bp, Homo sapiens
ctctaaaaaatatta

SEQ ID NO: 1245558 - DNA, 15 bp, Homo sapiens
cctctaaaaaatatt

SEQ ID NO: 1245559 - DNA, 15 bp, Homo sapiens
tcctctaaaaaatat

SEQ ID NO: 1245560 - DNA, 15 bp, Homo sapiens
atcctctaaaaaata

SEQ ID NO: 1245561 - DNA, 15 bp, Homo sapiens
catcctctaaaaaat

SEQ ID NO: 1245562 - DNA, 15 bp, Homo sapiens
gcatcctctaaaaaa

SEQ ID NO: 1245563 - DNA, 15 bp, Homo sapiens
tgcatcctctaaaaa

SEQ ID NO: 1245564 - DNA, 15 bp, Homo sapiens
atgcatcctctaaaa

SEQ ID NO: 1245565 - DNA, 15 bp, Homo sapiens
aatgcatcctctaaa

SEQ ID NO: 1245566 - DNA, 15 bp, Homo sapiens
aaatgcatcctctaa

SEQ ID NO: 1245567 - DNA, 15 bp, Homo sapiens
caaatgcatcctcta

SEQ ID NO: 1245568 - DNA, 15 bp, Homo sapiens
ccaaatgcatcctct

SEQ ID NO: 1245569 - DNA, 15 bp, Homo sapiens
tccaaatgcatcctc

SEQ ID NO: 1245570 - DNA, 15 bp, Homo sapiens
gtccaaatgcatcct

SEQ ID NO: 1245571 - DNA, 15 bp, Homo sapiens
tgtccaaatgcatcc

SEQ ID NO: 1245572 - DNA, 15 bp, Homo sapiens
ttgtccaaatgcatc

SEQ ID NO: 1245573 - DNA, 15 bp, Homo sapiens
tttgtccaaatgcat

SEQ ID NO: 1245574 - DNA, 15 bp, Homo sapiens
atttgtccaaatgca

SEQ ID NO: 1245575 - DNA, 15 bp, Homo sapiens
aatttgtccaaatgc

SEQ ID NO: 1245576 - DNA, 15 bp, Homo sapiens
taatttgtccaaatg

SEQ ID NO: 1245577 - DNA, 15 bp, Homo sapiens
ataatttgtccaaat

SEQ ID NO: 1245578 - DNA, 15 bp, Homo sapiens
tataatttgtccaaa

SEQ ID NO: 1245579 - DNA, 15 bp, Homo sapiens
gtataatttgtccaa

SEQ ID NO: 1245580 - DNA, 15 bp, Homo sapiens
tgtataatttgtcca

SEQ ID NO: 1245581 - DNA, 15 bp, Homo sapiens
ttgtataatttgtcc

SEQ ID NO: 1245582 - DNA, 15 bp, Homo sapiens
gttgtataatttgtc

SEQ ID NO: 1245583 - DNA, 15 bp, Homo sapiens
ggttgtataatttgt

SEQ ID NO: 1245584 - DNA, 15 bp, Homo sapiens
gggttgtataatttg

SEQ ID NO: 1245585 - DNA, 15 bp, Homo sapiens
tgggttgtataattt

SEQ ID NO: 1245586 - DNA, 15 bp, Homo sapiens
gtgggttgtataatt

SEQ ID NO: 1245587 - DNA, 15 bp, Homo sapiens
ggtgggttgtataat

SEQ ID NO: 1245588 - DNA, 15 bp, Homo sapiens
aggtgggttgtataa

SEQ ID NO: 1245589 - DNA, 15 bp, Homo sapiens
aaggtgggttgtata

SEQ ID NO: 1245590 - DNA, 15 bp, Homo sapiens
caaggtgggttgtat

SEQ ID NO: 1245591 - DNA, 15 bp, Homo sapiens
acaaggtgggttgta

SEQ ID NO: 1245592 - DNA, 15 bp, Homo sapiens
cacaaggtgggttgt

SEQ ID NO: 1245593 - DNA, 15 bp, Homo sapiens
gcacaaggtgggttg

SEQ ID NO: 1245594 - DNA, 15 bp, Homo sapiens
agcacaaggtgggtt

SEQ ID NO: 1245595 - DNA, 15 bp, Homo sapiens
aagcacaaggtgggt

SEQ ID NO: 1245596 - DNA, 15 bp, Homo sapiens
gaagcacaaggtggg

SEQ ID NO: 1245597 - DNA, 15 bp, Homo sapiens
agaagcacaaggtgg

SEQ ID NO: 1245598 - DNA, 15 bp, Homo sapiens
aagaagcacaaggtg

SEQ ID NO: 1245599 - DNA, 15 bp, Homo sapiens
taagaagcacaaggt

SEQ ID NO: 1245600 - DNA, 15 bp, Homo sapiens
ataagaagcacaagg

SEQ ID NO: 1245601 - DNA, 15 bp, Homo sapiens
aataagaagcacaag

SEQ ID NO: 1245602 - DNA, 15 bp, Homo sapiens
aaataagaagcacaa

SEQ ID NO: 1245603 - DNA, 15 bp, Homo sapiens
taaataagaagcaca

SEQ ID NO: 1245604 - DNA, 15 bp, Homo sapiens
ataaataagaagcac

SEQ ID NO: 1245605 - DNA, 15 bp, Homo sapiens
cataaataagaagca

SEQ ID NO: 1245606 - DNA, 15 bp, Homo sapiens
acataaataagaagc

SEQ ID NO: 1245607 - DNA, 15 bp, Homo sapiens
gacataaataagaag

SEQ ID NO: 1245608 - DNA, 15 bp, Homo sapiens
agacataaataagaa

SEQ ID NO: 1245609 - DNA, 15 bp, Homo sapiens
cagacataaataaga

SEQ ID NO: 1245610 - DNA, 15 bp, Homo sapiens
ccagacataaataag

SEQ ID NO: 1245611 - DNA, 15 bp, Homo sapiens
accagacataaataa

SEQ ID NO: 1245612 - DNA, 15 bp, Homo sapiens
caccagacataaata

SEQ ID NO: 1245613 - DNA, 15 bp, Homo sapiens
tcaccagacataaat

SEQ ID NO: 1245614 - DNA, 15 bp, Homo sapiens
atcaccagacataaa

SEQ ID NO: 1245615 - DNA, 15 bp, Homo sapiens
aatcaccagacataa

SEQ ID NO: 1245616 - DNA, 15 bp, Homo sapiens
aaatcaccagacata

SEQ ID NO: 1245617 - DNA, 15 bp, Homo sapiens
aaaatcaccagacat

SEQ ID NO: 1245618 - DNA, 15 bp, Homo sapiens
caaaatcaccagaca

SEQ ID NO: 1245619 - DNA, 15 bp, Homo sapiens
gcaaaatcaccagac

SEQ ID NO: 1245620 - DNA, 15 bp, Homo sapiens
tgcaaaatcaccaga

SEQ ID NO: 1245621 - DNA, 15 bp, Homo sapiens
gtgcaaaatcaccag

SEQ ID NO: 1245622 - DNA, 15 bp, Homo sapiens
ggtgcaaaatcacca

SEQ ID NO: 1245623 - DNA, 15 bp, Homo sapiens
aggtgcaaaatcacc

SEQ ID NO: 1245624 - DNA, 15 bp, Homo sapiens
taggtgcaaaatcac

SEQ ID NO: 1245625 - DNA, 15 bp, Homo sapiens
ctaggtgcaaaatca

SEQ ID NO: 1245626 - DNA, 15 bp, Homo sapiens
gctaggtgcaaaatc

SEQ ID NO: 1245627 - DNA, 15 bp, Homo sapiens
tgctaggtgcaaaat

SEQ ID NO: 1245628 - DNA, 15 bp, Homo sapiens
gtgctaggtgcaaaa

SEQ ID NO: 1245629 - DNA, 15 bp, Homo sapiens
agtgctaggtgcaaa

SEQ ID NO: 1245630 - DNA, 15 bp, Homo sapiens
gagtgctaggtgcaa

SEQ ID NO: 1245631 - DNA, 15 bp, Homo sapiens
tgagtgctaggtgca

SEQ ID NO: 1245632 - DNA, 15 bp, Homo sapiens
ctgagtgctaggtgc

SEQ ID NO: 1245633 - DNA, 15 bp, Homo sapiens
gctgagtgctaggtg

SEQ ID NO: 1245634 - DNA, 15 bp, Homo sapiens
tgctgagtgctaggt

SEQ ID NO: 1245635 - DNA, 15 bp, Homo sapiens
ctgctgagtgctagg

SEQ ID NO: 1245636 - DNA, 15 bp, Homo sapiens
tctgctgagtgctag

SEQ ID NO: 1245637 - DNA, 15 bp, Homo sapiens
atctgctgagtgcta

SEQ ID NO: 1245638 - DNA, 15 bp, Homo sapiens
catctgctgagtgct

SEQ ID NO: 1245639 - DNA, 15 bp, Homo sapiens
gcatctgctgagtgc

SEQ ID NO: 1245640 - DNA, 15 bp, Homo sapiens
ggcatctgctgagtg

SEQ ID NO: 1245641 - DNA, 15 bp, Homo sapiens
tggcatctgctgagt

SEQ ID NO: 1245642 - DNA, 15 bp, Homo sapiens
atggcatctgctgag

SEQ ID NO: 1245643 - DNA, 15 bp, Homo sapiens
tatggcatctgctga

SEQ ID NO: 1245644 - DNA, 15 bp, Homo sapiens
ctatggcatctgctg

SEQ ID NO: 1245645 - DNA, 15 bp, Homo sapiens
actatggcatctgct

SEQ ID NO: 1245646 - DNA, 15 bp, Homo sapiens
tactatggcatctgc

SEQ ID NO: 1245647 - DNA, 15 bp, Homo sapiens
ttactatggcatctg

SEQ ID NO: 1245648 - DNA, 15 bp, Homo sapiens
attactatggcatct

SEQ ID NO: 1245649 - DNA, 15 bp, Homo sapiens
gattactatggcatc

SEQ ID NO: 1245650 - DNA, 15 bp, Homo sapiens
ggattactatggcat

SEQ ID NO: 1245651 - DNA, 15 bp, Homo sapiens
tggattactatggca

SEQ ID NO: 1245652 - DNA, 15 bp, Homo sapiens
ctggattactatggc

SEQ ID NO: 1245653 - DNA, 15 bp, Homo sapiens
tctggattactatgg

SEQ ID NO: 1245654 - DNA, 15 bp, Homo sapiens
ctctggattactatg

SEQ ID NO: 1245655 - DNA, 15 bp, Homo sapiens
cctctggattactat

SEQ ID NO: 1245656 - DNA, 15 bp, Homo sapiens
tcctctggattacta

SEQ ID NO: 1245657 - DNA, 15 bp, Homo sapiens
ctcctctggattact

SEQ ID NO: 1245658 - DNA, 15 bp, Homo sapiens
actcctctggattac

SEQ ID NO: 1245659 - DNA, 15 bp, Homo sapiens
gactcctctggatta

SEQ ID NO: 1245660 - DNA, 15 bp, Homo sapiens
ggactcctctggatt

SEQ ID NO: 1245661 - DNA, 15 bp, Homo sapiens
tggactcctctggat

SEQ ID NO: 1245662 - DNA, 15 bp, Homo sapiens
ttggactcctctgga

SEQ ID NO: 1245663 - DNA, 15 bp, Homo sapiens
cttggactcctctgg

SEQ ID NO: 1245664 - DNA, 15 bp, Homo sapiens
ccttggactcctctg

SEQ ID NO: 1245665 - DNA, 15 bp, Homo sapiens
tccttggactcctct

SEQ ID NO: 1245666 - DNA, 15 bp, Homo sapiens
ttccttggactcctc

SEQ ID NO: 1245667 - DNA, 15 bp, Homo sapiens
attccttggactcct

SEQ ID NO: 1245668 - DNA, 15 bp, Homo sapiens
aattccttggactcc

SEQ ID NO: 1245669 - DNA, 15 bp, Homo sapiens
aaattccttggactc

SEQ ID NO: 1245670 - DNA, 15 bp, Homo sapiens
caaattccttggact

SEQ ID NO: 1245671 - DNA, 15 bp, Homo sapiens
ccaaattccttggac

SEQ ID NO: 1245672 - DNA, 15 bp, Homo sapiens
accaaattccttgga

SEQ ID NO: 1245673 - DNA, 15 bp, Homo sapiens
aaccaaattccttgg

SEQ ID NO: 1245674 - DNA, 15 bp, Homo sapiens
gaaccaaattccttg

SEQ ID NO: 1245675 - DNA, 15 bp, Homo sapiens
agaaccaaattcctt

SEQ ID NO: 1245676 - DNA, 15 bp, Homo sapiens
tagaaccaaattcct

SEQ ID NO: 1245677 - DNA, 15 bp, Homo sapiens
gtagaaccaaattcc

SEQ ID NO: 1245678 - DNA, 15 bp, Homo sapiens
tgtagaaccaaattc

SEQ ID NO: 1245679 - DNA, 15 bp, Homo sapiens
ttgtagaaccaaatt

SEQ ID NO: 1245680 - DNA, 15 bp, Homo sapiens
attgtagaaccaaat

SEQ ID NO: 1245681 - DNA, 15 bp, Homo sapiens
aattgtagaaccaaa

SEQ ID NO: 1245682 - DNA, 15 bp, Homo sapiens
taattgtagaaccaa

SEQ ID NO: 1245683 - DNA, 15 bp, Homo sapiens
ctaattgtagaacca

SEQ ID NO: 1245684 - DNA, 15 bp, Homo sapiens
cctaattgtagaacc

SEQ ID NO: 1245685 - DNA, 15 bp, Homo sapiens
ccctaattgtagaac

SEQ ID NO: 1245686 - DNA, 15 bp, Homo sapiens
tccctaattgtagaa

SEQ ID NO: 1245687 - DNA, 15 bp, Homo sapiens
gtccctaattgtaga

SEQ ID NO: 1245688 - DNA, 15 bp, Homo sapiens
tgtccctaattgtag

SEQ ID NO: 1245689 - DNA, 15 bp, Homo sapiens
atgtccctaattgta

SEQ ID NO: 1245690 - DNA, 15 bp, Homo sapiens
aatgtccctaattgt

SEQ ID NO: 1245691 - DNA, 15 bp, Homo sapiens
aaatgtccctaattg

SEQ ID NO: 1245692 - DNA, 15 bp, Homo sapiens
caaatgtccctaatt

SEQ ID NO: 1245693 - DNA, 15 bp, Homo sapiens
tcaaatgtccctaat

SEQ ID NO: 1245694 - DNA, 15 bp, Homo sapiens
ctcaaatgtccctaa

SEQ ID NO: 1245695 - DNA, 15 bp, Homo sapiens
tctcaaatgtcccta

SEQ ID NO: 1245696 - DNA, 15 bp, Homo sapiens
gtctcaaatgtccct

SEQ ID NO: 1245697 - DNA, 15 bp, Homo sapiens
tgtctcaaatgtccc

SEQ ID NO: 1245698 - DNA, 15 bp, Homo sapiens
atgtctcaaatgtcc

SEQ ID NO: 1245699 - DNA, 15 bp, Homo sapiens
gatgtctcaaatgtc

SEQ ID NO: 1245700 - DNA, 15 bp, Homo sapiens
tgatgtctcaaatgt

SEQ ID NO: 1245701 - DNA, 15 bp, Homo sapiens
ttgatgtctcaaatg

SEQ ID NO: 1245702 - DNA, 15 bp, Homo sapiens
cttgatgtctcaaat

SEQ ID NO: 1245703 - DNA, 15 bp, Homo sapiens
gcttgatgtctcaaa

SEQ ID NO: 1245704 - DNA, 15 bp, Homo sapiens
tgcttgatgtctcaa

SEQ ID NO: 1245705 - DNA, 15 bp, Homo sapiens
ttgcttgatgtctca

SEQ ID NO: 1245706 - DNA, 15 bp, Homo sapiens
tttgcttgatgtctc

SEQ ID NO: 1245707 - DNA, 15 bp, Homo sapiens
gtttgcttgatgtct

SEQ ID NO: 1245708 - DNA, 15 bp, Homo sapiens
agtttgcttgatgtc

SEQ ID NO: 1245709 - DNA, 15 bp, Homo sapiens
gagtttgcttgatgt

SEQ ID NO: 1245710 - DNA, 15 bp, Homo sapiens
agagtttgcttgatg

SEQ ID NO: 1245711 - DNA, 15 bp, Homo sapiens
cagagtttgcttgat

SEQ ID NO: 1245712 - DNA, 15 bp, Homo sapiens
tcagagtttgcttga

SEQ ID NO: 1245713 - DNA, 15 bp, Homo sapiens
atcagagtttgcttg

SEQ ID NO: 1245714 - DNA, 15 bp, Homo sapiens
tatcagagtttgctt

SEQ ID NO: 1245715 - DNA, 15 bp, Homo sapiens
gtatcagagtttgct

SEQ ID NO: 1245716 - DNA, 15 bp, Homo sapiens
agtatcagagtttgc

SEQ ID NO: 1245717 - DNA, 15 bp, Homo sapiens
gagtatcagagtttg

SEQ ID NO: 1245718 - DNA, 15 bp, Homo sapiens
tgagtatcagagttt

SEQ ID NO: 1245719 - DNA, 15 bp, Homo sapiens
ctgagtatcagagtt

SEQ ID NO: 1245720 - DNA, 15 bp, Homo sapiens
cctgagtatcagagt

SEQ ID NO: 1245721 - DNA, 15 bp, Homo sapiens
gcctgagtatcagag

SEQ ID NO: 1245722 - DNA, 15 bp, Homo sapiens
tgcctgagtatcaga

SEQ ID NO: 1245723 - DNA, 15 bp, Homo sapiens
ctgcctgagtatcag

SEQ ID NO: 1245724 - DNA, 15 bp, Homo sapiens
actgcctgagtatca

SEQ ID NO: 1245725 - DNA, 15 bp, Homo sapiens
aactgcctgagtatc

SEQ ID NO: 1245726 - DNA, 15 bp, Homo sapiens
taactgcctgagtat

SEQ ID NO: 1245727 - DNA, 15 bp, Homo sapiens
ataactgcctgagta

SEQ ID NO: 1245728 - DNA, 15 bp, Homo sapiens
aataactgcctgagt

SEQ ID NO: 1245729 - DNA, 15 bp, Homo sapiens
caataactgcctgag

SEQ ID NO: 1245730 - DNA, 15 bp, Homo sapiens
gcaataactgcctga

SEQ ID NO: 1245731 - DNA, 15 bp, Homo sapiens
ggcaataactgcctg

SEQ ID NO: 1245732 - DNA, 15 bp, Homo sapiens
aggcaataactgcct

SEQ ID NO: 1245733 - DNA, 15 bp, Homo sapiens
aaggcaataactgcc

SEQ ID NO: 1245734 - DNA, 15 bp, Homo sapiens
aaaggcaataactgc

SEQ ID NO: 1245735 - DNA, 15 bp, Homo sapiens
caaaggcaataactg

SEQ ID NO: 1245736 - DNA, 15 bp, Homo sapiens
tcaaaggcaataact

SEQ ID NO: 1245737 - DNA, 15 bp, Homo sapiens
ctcaaaggcaataac

SEQ ID NO: 1245738 - DNA, 15 bp, Homo sapiens
tctcaaaggcaataa

SEQ ID NO: 1245739 - DNA, 15 bp, Homo sapiens
ttctcaaaggcaata

SEQ ID NO: 1245740 - DNA, 15 bp, Homo sapiens
tttctcaaaggcaat

SEQ ID NO: 1245741 - DNA, 15 bp, Homo sapiens
ctttctcaaaggcaa

SEQ ID NO: 1245742 - DNA, 15 bp, Homo sapiens
tctttctcaaaggca

SEQ ID NO: 1245743 - DNA, 15 bp, Homo sapiens
ttctttctcaaaggc

SEQ ID NO: 1245744 - DNA, 15 bp, Homo sapiens
cttctttctcaaagg

SEQ ID NO: 1245745 - DNA, 15 bp, Homo sapiens
acttctttctcaaag

SEQ ID NO: 1245746 - DNA, 15 bp, Homo sapiens
aacttctttctcaaa

SEQ ID NO: 1245747 - DNA, 15 bp, Homo sapiens
taacttctttctcaa

SEQ ID NO: 1245748 - DNA, 15 bp, Homo sapiens
ataacttctttctca

SEQ ID NO: 1245749 - DNA, 15 bp, Homo sapiens
aataacttctttctc

SEQ ID NO: 1245750 - DNA, 15 bp, Homo sapiens
caataacttctttct

SEQ ID NO: 1245751 - DNA, 15 bp, Homo sapiens
gcaataacttctttc

SEQ ID NO: 1245752 - DNA, 15 bp, Homo sapiens
ggcaataacttcttt

SEQ ID NO: 1245753 - DNA, 15 bp, Homo sapiens
aggcaataacttctt

SEQ ID NO: 1245754 - DNA, 15 bp, Homo sapiens
aaggcaataacttct

SEQ ID NO: 1245755 - DNA, 15 bp, Homo sapiens
aaaggcaataacttc

SEQ ID NO: 1245756 - DNA, 15 bp, Homo sapiens
aaaaggcaataactt

SEQ ID NO: 1245757 - DNA, 15 bp, Homo sapiens
aaaaaggcaataact

SEQ ID NO: 1245758 - DNA, 15 bp, Homo sapiens
aaaaaaggcaataac

SEQ ID NO: 1245759 - DNA, 15 bp, Homo sapiens
gaaaaaaggcaataa

SEQ ID NO: 1245760 - DNA, 15 bp, Homo sapiens
agaaaaaaggcaata

SEQ ID NO: 1245761 - DNA, 15 bp, Homo sapiens
cagaaaaaaggcaat

SEQ ID NO: 1245762 - DNA, 15 bp, Homo sapiens
tcagaaaaaaggcaa

SEQ ID NO: 1245763 - DNA, 15 bp, Homo sapiens
atcagaaaaaaggca

SEQ ID NO: 1245764 - DNA, 15 bp, Homo sapiens
tatcagaaaaaaggc

SEQ ID NO: 1245765 - DNA, 15 bp, Homo sapiens
ttatcagaaaaaagg

SEQ ID NO: 1245766 - DNA, 15 bp, Homo sapiens
attatcagaaaaaag

SEQ ID NO: 1245767 - DNA, 15 bp, Homo sapiens
cattatcagaaaaaa

SEQ ID NO: 1245768 - DNA, 15 bp, Homo sapiens
gcattatcagaaaaa

SEQ ID NO: 1245769 - DNA, 15 bp, Homo sapiens
tgcattatcagaaaa

SEQ ID NO: 1245770 - DNA, 15 bp, Homo sapiens
atgcattatcagaaa

SEQ ID NO: 1245771 - DNA, 15 bp, Homo sapiens
gatgcattatcagaa

SEQ ID NO: 1245772 - DNA, 15 bp, Homo sapiens
tgatgcattatcaga

SEQ ID NO: 1245773 - DNA, 15 bp, Homo sapiens
gtgatgcattatcag

SEQ ID NO: 1245774 - DNA, 15 bp, Homo sapiens
tgtgatgcattatca

SEQ ID NO: 1245775 - DNA, 15 bp, Homo sapiens
ctgtgatgcattatc

SEQ ID NO: 1245776 - DNA, 15 bp, Homo sapiens
gctgtgatgcattat

SEQ ID NO: 1245777 - DNA, 15 bp, Homo sapiens
agctgtgatgcatta

SEQ ID NO: 1245778 - DNA, 15 bp, Homo sapiens
tagctgtgatgcatt

SEQ ID NO: 1245779 - DNA, 15 bp, Homo sapiens
gtagctgtgatgcat

SEQ ID NO: 1245780 - DNA, 15 bp, Homo sapiens
tgtagctgtgatgca

SEQ ID NO: 1245781 - DNA, 15 bp, Homo sapiens
atgtagctgtgatgc

SEQ ID NO: 1245782 - DNA, 15 bp, Homo sapiens
aatgtagctgtgatg

SEQ ID NO: 1245783 - DNA, 15 bp, Homo sapiens
gaatgtagctgtgat

SEQ ID NO: 1245784 - DNA, 15 bp, Homo sapiens
ggaatgtagctgtga

SEQ ID NO: 1245785 - DNA, 15 bp, Homo sapiens
aggaatgtagctgtg

SEQ ID NO: 1245786 - DNA, 15 bp, Homo sapiens
aaggaatgtagctgt

SEQ ID NO: 1245787 - DNA, 15 bp, Homo sapiens
taaggaatgtagctg

SEQ ID NO: 1245788 - DNA, 15 bp, Homo sapiens
ttaaggaatgtagct

SEQ ID NO: 1245789 - DNA, 15 bp, Homo sapiens
tttaaggaatgtagc

SEQ ID NO: 1245790 - DNA, 15 bp, Homo sapiens
ttttaaggaatgtag

SEQ ID NO: 1245791 - DNA, 15 bp, Homo sapiens
tttttaaggaatgta

SEQ ID NO: 1245792 - DNA, 15 bp, Homo sapiens
gtttttaaggaatgt

SEQ ID NO: 1245793 - DNA, 15 bp, Homo sapiens
agtttttaaggaatg

SEQ ID NO: 1245794 - DNA, 15 bp, Homo sapiens
gagtttttaaggaat

SEQ ID NO: 1245795 - DNA, 15 bp, Homo sapiens
agagtttttaaggaa

SEQ ID NO: 1245796 - DNA, 15 bp, Homo sapiens
tagagtttttaagga

SEQ ID NO: 1245797 - DNA, 15 bp, Homo sapiens
ttagagtttttaagg

SEQ ID NO: 1245798 - DNA, 15 bp, Homo sapiens
cttagagtttttaag

SEQ ID NO: 1245799 - DNA, 15 bp, Homo sapiens
tcttagagtttttaa

SEQ ID NO: 1245800 - DNA, 15 bp, Homo sapiens
gtcttagagttttta

SEQ ID NO: 1245801 - DNA, 15 bp, Homo sapiens
agtcttagagttttt

SEQ ID NO: 1245802 - DNA, 15 bp, Homo sapiens
tagtcttagagtttt

SEQ ID NO: 1245803 - DNA, 15 bp, Homo sapiens
atagtcttagagttt

SEQ ID NO: 1245804 - DNA, 15 bp, Homo sapiens
aatagtcttagagtt

SEQ ID NO: 1245805 - DNA, 15 bp, Homo sapiens
aaatagtcttagagt

SEQ ID NO: 1245806 - DNA, 15 bp, Homo sapiens
taaatagtcttagag

SEQ ID NO: 1245807 - DNA, 15 bp, Homo sapiens
ataaatagtcttaga

SEQ ID NO: 1245808 - DNA, 15 bp, Homo sapiens
tataaatagtcttag

SEQ ID NO: 1245809 - DNA, 15 bp, Homo sapiens
gtataaatagtctta

SEQ ID NO: 1245810 - DNA, 15 bp, Homo sapiens
agtataaatagtctt

SEQ ID NO: 1245811 - DNA, 15 bp, Homo sapiens
aagtataaatagtct

SEQ ID NO: 1245812 - DNA, 15 bp, Homo sapiens
caagtataaatagtc

SEQ ID NO: 1245813 - DNA, 15 bp, Homo sapiens
acaagtataaatagt

SEQ ID NO: 1245814 - DNA, 15 bp, Homo sapiens
cacaagtataaatag

SEQ ID NO: 1245815 - DNA, 15 bp, Homo sapiens
tcacaagtataaata

SEQ ID NO: 1245816 - DNA, 15 bp, Homo sapiens
atcacaagtataaat

SEQ ID NO: 1245817 - DNA, 15 bp, Homo sapiens
catcacaagtataaa

SEQ ID NO: 1245818 - DNA, 15 bp, Homo sapiens
acatcacaagtataa

SEQ ID NO: 1245819 - DNA, 15 bp, Homo sapiens
aacatcacaagtata

SEQ ID NO: 1245820 - DNA, 15 bp, Homo sapiens
gaacatcacaagtat

SEQ ID NO: 1245821 - DNA, 15 bp, Homo sapiens
ggaacatcacaagta

SEQ ID NO: 1245822 - DNA, 15 bp, Homo sapiens
tggaacatcacaagt

SEQ ID NO: 1245823 - DNA, 15 bp, Homo sapiens
ttggaacatcacaag

SEQ ID NO: 1245824 - DNA, 15 bp, Homo sapiens
gttggaacatcacaa

SEQ ID NO: 1245825 - DNA, 15 bp, Homo sapiens
tgttggaacatcaca

SEQ ID NO: 1245826 - DNA, 15 bp, Homo sapiens
atgttggaacatcac

SEQ ID NO: 1245827 - DNA, 15 bp, Homo sapiens
aatgttggaacatca

SEQ ID NO: 1245828 - DNA, 15 bp, Homo sapiens
aaatgttggaacatc

SEQ ID NO: 1245829 - DNA, 15 bp, Homo sapiens
aaaatgttggaacat

SEQ ID NO: 1245830 - DNA, 15 bp, Homo sapiens
aaaaatgttggaaca

SEQ ID NO: 1245831 - DNA, 15 bp, Homo sapiens
aaaaaatgttggaac

SEQ ID NO: 1245832 - DNA, 15 bp, Homo sapiens
caaaaaatgttggaa

SEQ ID NO: 1245833 - DNA, 15 bp, Homo sapiens
tcaaaaaatgttgga

SEQ ID NO: 1245834 - DNA, 15 bp, Homo sapiens
ctcaaaaaatgttgg

SEQ ID NO: 1245835 - DNA, 15 bp, Homo sapiens
tctcaaaaaatgttg

SEQ ID NO: 1245836 - DNA, 15 bp, Homo sapiens
ctctcaaaaaatgtt

SEQ ID NO: 1245837 - DNA, 15 bp, Homo sapiens
gctctcaaaaaatgt

SEQ ID NO: 1245838 - DNA, 15 bp, Homo sapiens
tgctctcaaaaaatg

SEQ ID NO: 1245839 - DNA, 15 bp, Homo sapiens
atgctctcaaaaaat

SEQ ID NO: 1245840 - DNA, 15 bp, Homo sapiens
aatgctctcaaaaaa

SEQ ID NO: 1245841 - DNA, 15 bp, Homo sapiens
aaatgctctcaaaaa

SEQ ID NO: 1245842 - DNA, 15 bp, Homo sapiens
aaaatgctctcaaaa

SEQ ID NO: 1245843 - DNA, 15 bp, Homo sapiens
taaaatgctctcaaa

SEQ ID NO: 1245844 - DNA, 15 bp, Homo sapiens
ttaaaatgctctcaa

SEQ ID NO: 1245845 - DNA, 15 bp, Homo sapiens
tttaaaatgctctca

SEQ ID NO: 1245846 - DNA, 15 bp, Homo sapiens
ttttaaaatgctctc

SEQ ID NO: 1245847 - DNA, 15 bp, Homo sapiens
tttttaaaatgctct

SEQ ID NO: 1245848 - DNA, 15 bp, Homo sapiens
atttttaaaatgctc

SEQ ID NO: 1245849 - DNA, 15 bp, Homo sapiens
caatttttaaaatgc

SEQ ID NO: 1245850 - DNA, 15 bp, Homo sapiens
acaatttttaaaatg

SEQ ID NO: 1245851 - DNA, 15 bp, Homo sapiens
aacaatttttaaaat

SEQ ID NO: 1245852 - DNA, 15 bp, Homo sapiens
aaaacaatttttaaa

SEQ ID NO: 1245853 - DNA, 15 bp, Homo sapiens
aaaaacaatttttaa

SEQ ID NO: 1245854 - DNA, 15 bp, Homo sapiens
aaaaaacaattttta

SEQ ID NO: 1245855 - DNA, 15 bp, Homo sapiens
gaaaaaacaattttt

SEQ ID NO: 1245856 - DNA, 15 bp, Homo sapiens
tgaaaaaacaatttt

SEQ ID NO: 1245857 - DNA, 15 bp, Homo sapiens
gtgaaaaaacaattt

SEQ ID NO: 1245858 - DNA, 15 bp, Homo sapiens
agtgaaaaaacaatt

SEQ ID NO: 1245859 - DNA, 15 bp, Homo sapiens
cagtgaaaaaacaat

SEQ ID NO: 1245860 - DNA, 15 bp, Homo sapiens
tcagtgaaaaaacaa

SEQ ID NO: 1245861 - DNA, 15 bp, Homo sapiens
ctcagtgaaaaaaca

SEQ ID NO: 1245862 - DNA, 15 bp, Homo sapiens
cctcagtgaaaaaac

SEQ ID NO: 1245863 - DNA, 15 bp, Homo sapiens
acctcagtgaaaaaa

SEQ ID NO: 1245864 - DNA, 15 bp, Homo sapiens
cacctcagtgaaaaa

SEQ ID NO: 1245865 - DNA, 15 bp, Homo sapiens
acacctcagtgaaaa

SEQ ID NO: 1245866 - DNA, 15 bp, Homo sapiens
aacacctcagtgaaa

SEQ ID NO: 1245867 - DNA, 15 bp, Homo sapiens
aaacacctcagtgaa

SEQ ID NO: 1245868 - DNA, 15 bp, Homo sapiens
taaacacctcagtga

SEQ ID NO: 1245869 - DNA, 15 bp, Homo sapiens
ttaaacacctcagtg

SEQ ID NO: 1245870 - DNA, 15 bp, Homo sapiens
cttaaacacctcagt

SEQ ID NO: 1245871 - DNA, 15 bp, Homo sapiens
tcttaaacacctcag

SEQ ID NO: 1245872 - DNA, 15 bp, Homo sapiens
ttcttaaacacctca

SEQ ID NO: 1245873 - DNA, 15 bp, Homo sapiens
attcttaaacacctc

SEQ ID NO: 1245874 - DNA, 15 bp, Homo sapiens
tattcttaaacacct

SEQ ID NO: 1245875 - DNA, 15 bp, Homo sapiens
ctattcttaaacacc

SEQ ID NO: 1245876 - DNA, 15 bp, Homo sapiens
gctattcttaaacac

SEQ ID NO: 1245877 - DNA, 15 bp, Homo sapiens
ggctattcttaaaca

SEQ ID NO: 1245878 - DNA, 15 bp, Homo sapiens
tggctattcttaaac

SEQ ID NO: 1245879 - DNA, 15 bp, Homo sapiens
ttggctattcttaaa

SEQ ID NO: 1245880 - DNA, 15 bp, Homo sapiens
cttggctattcttaa

SEQ ID NO: 1245881 - DNA, 15 bp, Homo sapiens
tcttggctattctta

SEQ ID NO: 1245882 - DNA, 15 bp, Homo sapiens
ttcttggctattctt

SEQ ID NO: 1245883 - DNA, 15 bp, Homo sapiens
attcttggctattct

SEQ ID NO: 1245884 - DNA, 15 bp, Homo sapiens
tattcttggctattc

SEQ ID NO: 1245885 - DNA, 15 bp, Homo sapiens
ttattcttggctatt

SEQ ID NO: 1245886 - DNA, 15 bp, Homo sapiens
tttattcttggctat

SEQ ID NO: 1245887 - DNA, 15 bp, Homo sapiens
atttattcttggcta

SEQ ID NO: 1245888 - DNA, 15 bp, Homo sapiens
catttattcttggct

SEQ ID NO: 1245889 - DNA, 15 bp, Homo sapiens
acatttattcttggc

SEQ ID NO: 1245890 - DNA, 15 bp, Homo sapiens
gacatttattcttgg

SEQ ID NO: 1245891 - DNA, 15 bp, Homo sapiens
tgacatttattcttg

SEQ ID NO: 1245892 - DNA, 15 bp, Homo sapiens
ctgacatttattctt

SEQ ID NO: 1245893 - DNA, 15 bp, Homo sapiens
actgacatttattct

SEQ ID NO: 1245894 - DNA, 15 bp, Homo sapiens
aactgacatttattc

SEQ ID NO: 1245895 - DNA, 15 bp, Homo sapiens
aaactgacatttatt

SEQ ID NO: 1245896 - DNA, 15 bp, Homo sapiens
caaactgacatttat

SEQ ID NO: 1245897 - DNA, 15 bp, Homo sapiens
tcaaactgacattta

SEQ ID NO: 1245898 - DNA, 15 bp, Homo sapiens
ttcaaactgacattt

SEQ ID NO: 1245899 - DNA, 15 bp, Homo sapiens
attcaaactgacatt

SEQ ID NO: 1245900 - DNA, 15 bp, Homo sapiens
aattcaaactgacat

SEQ ID NO: 1245901 - DNA, 15 bp, Homo sapiens
taattcaaactgaca

SEQ ID NO: 1245902 - DNA, 15 bp, Homo sapiens
ataattcaaactgac

SEQ ID NO: 1245903 - DNA, 15 bp, Homo sapiens
tataattcaaactga

SEQ ID NO: 1245904 - DNA, 15 bp, Homo sapiens
atataattcaaactg

SEQ ID NO: 1245905 - DNA, 15 bp, Homo sapiens
tatataattcaaact

SEQ ID NO: 1245906 - DNA, 15 bp, Homo sapiens
atatataattcaaac

SEQ ID NO: 1245907 - DNA, 15 bp, Homo sapiens
tatatataattcaaa

SEQ ID NO: 1245908 - DNA, 15 bp, Homo sapiens
atatatataattcaa

SEQ ID NO: 1245909 - DNA, 15 bp, Homo sapiens
tatatatataattca

SEQ ID NO: 1245910 - DNA, 15 bp, Homo sapiens
atatatatataattc

SEQ ID NO: 1245911 - DNA, 15 bp, Homo sapiens
tatatatatataatt

SEQ ID NO: 1245912 - DNA, 15 bp, Homo sapiens
tcatatatatgtgtg

SEQ ID NO: 1245913 - DNA, 15 bp, Homo sapiens
ctcatatatatgtgt

SEQ ID NO: 1245914 - DNA, 15 bp, Homo sapiens
tctcatatatatgtg

SEQ ID NO: 1245915 - DNA, 15 bp, Homo sapiens
ctctcatatatatgt

SEQ ID NO: 1245916 - DNA, 15 bp, Homo sapiens
actctcatatatatg

SEQ ID NO: 1245917 - DNA, 15 bp, Homo sapiens
aactctcatatatat

SEQ ID NO: 1245918 - DNA, 15 bp, Homo sapiens
taactctcatatata

SEQ ID NO: 1245919 - DNA, 15 bp, Homo sapiens
ttaactctcatatat

SEQ ID NO: 1245920 - DNA, 15 bp, Homo sapiens
attaactctcatata

SEQ ID NO: 1245921 - DNA, 15 bp, Homo sapiens
tattaactctcatat

SEQ ID NO: 1245922 - DNA, 15 bp, Homo sapiens
atattaactctcata

SEQ ID NO: 1245923 - DNA, 15 bp, Homo sapiens
catattaactctcat

SEQ ID NO: 1245924 - DNA, 15 bp, Homo sapiens
tcatattaactctca

SEQ ID NO: 1245925 - DNA, 15 bp, Homo sapiens
ttcatattaactctc

SEQ ID NO: 1245926 - DNA, 15 bp, Homo sapiens
tttcatattaactct

SEQ ID NO: 1245927 - DNA, 15 bp, Homo sapiens
ttttcatattaactc

SEQ ID NO: 1245928 - DNA, 15 bp, Homo sapiens
attttcatattaact

SEQ ID NO: 1245929 - DNA, 15 bp, Homo sapiens
tattttcatattaac

SEQ ID NO: 1245930 - DNA, 15 bp, Homo sapiens
atattttcatattaa

SEQ ID NO: 1245931 - DNA, 15 bp, Homo sapiens
tatattttcatatta

SEQ ID NO: 1245932 - DNA, 15 bp, Homo sapiens
ttatattttcatatt

SEQ ID NO: 1245933 - DNA, 15 bp, Homo sapiens
tttatattttcatat

SEQ ID NO: 1245934 - DNA, 15 bp, Homo sapiens
ttttatattttcata

SEQ ID NO: 1245935 - DNA, 15 bp, Homo sapiens
tttttatattttcat

SEQ ID NO: 1245936 - DNA, 15 bp, Homo sapiens
ttttttatattttca

SEQ ID NO: 1245937 - DNA, 15 bp, Homo sapiens
attttttatattttc

SEQ ID NO: 1245938 - DNA, 15 bp, Homo sapiens
aattttttatatttt

SEQ ID NO: 1245939 - DNA, 15 bp, Homo sapiens
taattttttatattt

SEQ ID NO: 1245940 - DNA, 15 bp, Homo sapiens
ataattttttatatt

SEQ ID NO: 1245941 - DNA, 15 bp, Homo sapiens
aataattttttatat

SEQ ID NO: 1245942 - DNA, 15 bp, Homo sapiens
taataattttttata

SEQ ID NO: 1245943 - DNA, 15 bp, Homo sapiens
gtaataattttttat

SEQ ID NO: 1245944 - DNA, 15 bp, Homo sapiens
tgtaataatttttta

SEQ ID NO: 1245945 - DNA, 15 bp, Homo sapiens
ttgtaataatttttt

SEQ ID NO: 1245946 - DNA, 15 bp, Homo sapiens
tttgtaataattttt

SEQ ID NO: 1245947 - DNA, 15 bp, Homo sapiens
atttgtaataatttt

SEQ ID NO: 1245948 - DNA, 15 bp, Homo sapiens
gatttgtaataattt

SEQ ID NO: 1245949 - DNA, 15 bp, Homo sapiens
tgatttgtaataatt

SEQ ID NO: 1245950 - DNA, 15 bp, Homo sapiens
ctgatttgtaataat

SEQ ID NO: 1245951 - DNA, 15 bp, Homo sapiens
actgatttgtaataa

SEQ ID NO: 1245952 - DNA, 15 bp, Homo sapiens
tactgatttgtaata

SEQ ID NO: 1245953 - DNA, 15 bp, Homo sapiens
ttactgatttgtaat

SEQ ID NO: 1245954 - DNA, 15 bp, Homo sapiens
tttactgatttgtaa

SEQ ID NO: 1245955 - DNA, 15 bp, Homo sapiens
ttttactgatttgta

SEQ ID NO: 1245956 - DNA, 15 bp, Homo sapiens
tttttactgatttgt

SEQ ID NO: 1245957 - DNA, 15 bp, Homo sapiens
ttttttactgatttg

SEQ ID NO: 1245958 - DNA, 15 bp, Homo sapiens
attttttactgattt

SEQ ID NO: 1245959 - DNA, 15 bp, Homo sapiens
gattttttactgatt

SEQ ID NO: 1245960 - DNA, 15 bp, Homo sapiens
agattttttactgat

SEQ ID NO: 1245961 - DNA, 15 bp, Homo sapiens
gagattttttactga

SEQ ID NO: 1245962 - DNA, 15 bp, Homo sapiens
agagattttttactg

SEQ ID NO: 1245963 - DNA, 15 bp, Homo sapiens
tagagattttttact

SEQ ID NO: 1245964 - DNA, 15 bp, Homo sapiens
atagagattttttac

SEQ ID NO: 1245965 - DNA, 15 bp, Homo sapiens
tatagagatttttta

SEQ ID NO: 1245966 - DNA, 15 bp, Homo sapiens
ttatagagatttttt

SEQ ID NO: 1245967 - DNA, 15 bp, Homo sapiens
attatagagattttt

SEQ ID NO: 1245968 - DNA, 15 bp, Homo sapiens
tattatagagatttt

SEQ ID NO: 1245969 - DNA, 15 bp, Homo sapiens
ttattatagagattt

SEQ ID NO: 1245970 - DNA, 15 bp, Homo sapiens
cttattatagagatt

SEQ ID NO: 1245971 - DNA, 15 bp, Homo sapiens
tcttattatagagat

SEQ ID NO: 1245972 - DNA, 15 bp, Homo sapiens
ttcttattatagaga

SEQ ID NO: 1245973 - DNA, 15 bp, Homo sapiens
tttcttattatagag

SEQ ID NO: 1245974 - DNA, 15 bp, Homo sapiens
ttttcttattataga

SEQ ID NO: 1245975 - DNA, 15 bp, Homo sapiens
attttcttattatag

SEQ ID NO: 1245976 - DNA, 15 bp, Homo sapiens
cattttcttattata

SEQ ID NO: 1245977 - DNA, 15 bp, Homo sapiens
ccattttcttattat

SEQ ID NO: 1245978 - DNA, 15 bp, Homo sapiens
accattttcttatta

SEQ ID NO: 1245979 - DNA, 15 bp, Homo sapiens
taccattttcttatt

SEQ ID NO: 1245980 - DNA, 15 bp, Homo sapiens
ataccattttcttat

SEQ ID NO: 1245981 - DNA, 15 bp, Homo sapiens
tataccattttctta

SEQ ID NO: 1245982 - DNA, 15 bp, Homo sapiens
ttataccattttctt

SEQ ID NO: 1245983 - DNA, 15 bp, Homo sapiens
tttataccattttct

SEQ ID NO: 1245984 - DNA, 15 bp, Homo sapiens
gtttataccattttc

SEQ ID NO: 1245985 - DNA, 15 bp, Homo sapiens
agtttataccatttt

SEQ ID NO: 1245986 - DNA, 15 bp, Homo sapiens
cagtttataccattt

SEQ ID NO: 1245987 - DNA, 15 bp, Homo sapiens
tcagtttataccatt

SEQ ID NO: 1245988 - DNA, 15 bp, Homo sapiens
atcagtttataccat

SEQ ID NO: 1245989 - DNA, 15 bp, Homo sapiens
tatcagtttatacca

SEQ ID NO: 1245990 - DNA, 15 bp, Homo sapiens
ttatcagtttatacc

SEQ ID NO: 1245991 - DNA, 15 bp, Homo sapiens
attatcagtttatac

SEQ ID NO: 1245992 - DNA, 15 bp, Homo sapiens
aattatcagtttata

SEQ ID NO: 1245993 - DNA, 15 bp, Homo sapiens
gaattatcagtttat

SEQ ID NO: 1245994 - DNA, 15 bp, Homo sapiens
tgaattatcagttta

SEQ ID NO: 1245995 - DNA, 15 bp, Homo sapiens
atgaattatcagttt

SEQ ID NO: 1245996 - DNA, 15 bp, Homo sapiens
tatgaattatcagtt

SEQ ID NO: 1245997 - DNA, 15 bp, Homo sapiens
ttatgaattatcagt

SEQ ID NO: 1245998 - DNA, 15 bp, Homo sapiens
tttatgaattatcag

SEQ ID NO: 1245999 - DNA, 15 bp, Homo sapiens
ttttatgaattatca

SEQ ID NO: 1246000 - DNA, 15 bp, Homo sapiens
cttttatgaattatc

SEQ ID NO: 1246001 - DNA, 15 bp, Homo sapiens
tcttttatgaattat

SEQ ID NO: 1246002 - DNA, 15 bp, Homo sapiens
ttcttttatgaatta

SEQ ID NO: 1246003 - DNA, 15 bp, Homo sapiens
tttcttttatgaatt

SEQ ID NO: 1246004 - DNA, 15 bp, Homo sapiens
atttcttttatgaat

SEQ ID NO: 1246005 - DNA, 15 bp, Homo sapiens
catttcttttatgaa

SEQ ID NO: 1246006 - DNA, 15 bp, Homo sapiens
gcatttcttttatga

SEQ ID NO: 1246007 - DNA, 15 bp, Homo sapiens
tgcatttcttttatg

SEQ ID NO: 1246008 - DNA, 15 bp, Homo sapiens
ttgcatttcttttat

SEQ ID NO: 1246009 - DNA, 15 bp, Homo sapiens
tttgcatttctttta

SEQ ID NO: 1246010 - DNA, 15 bp, Homo sapiens
atttgcatttctttt

SEQ ID NO: 1246011 - DNA, 15 bp, Homo sapiens
catttgcatttcttt

SEQ ID NO: 1246012 - DNA, 15 bp, Homo sapiens
ccatttgcatttctt

SEQ ID NO: 1246013 - DNA, 15 bp, Homo sapiens
gccatttgcatttct

SEQ ID NO: 1246014 - DNA, 15 bp, Homo sapiens
ggccatttgcatttc

SEQ ID NO: 1246015 - DNA, 15 bp, Homo sapiens
tggccatttgcattt

SEQ ID NO: 1246016 - DNA, 15 bp, Homo sapiens
gtggccatttgcatt

SEQ ID NO: 1246017 - DNA, 15 bp, Homo sapiens
agtggccatttgcat

SEQ ID NO: 1246018 - DNA, 15 bp, Homo sapiens
tagtggccatttgca

SEQ ID NO: 1246019 - DNA, 15 bp, Homo sapiens
ttagtggccatttgc

SEQ ID NO: 1246020 - DNA, 15 bp, Homo sapiens
tttagtggccatttg

SEQ ID NO: 1246021 - DNA, 15 bp, Homo sapiens
gtttagtggccattt

SEQ ID NO: 1246022 - DNA, 15 bp, Homo sapiens
ggtttagtggccatt

SEQ ID NO: 1246023 - DNA, 15 bp, Homo sapiens
aggtttagtggccat

SEQ ID NO: 1246024 - DNA, 15 bp, Homo sapiens
taggtttagtggcca

SEQ ID NO: 1246025 - DNA, 15 bp, Homo sapiens
ctaggtttagtggcc

SEQ ID NO: 1246026 - DNA, 15 bp, Homo sapiens
cctaggtttagtggc

SEQ ID NO: 1246027 - DNA, 15 bp, Homo sapiens
tcctaggtttagtgg

SEQ ID NO: 1246028 - DNA, 15 bp, Homo sapiens
ttcctaggtttagtg

SEQ ID NO: 1246029 - DNA, 15 bp, Homo sapiens
tttcctaggtttagt

SEQ ID NO: 1246030 - DNA, 15 bp, Homo sapiens
ttttcctaggtttag

SEQ ID NO: 1246031 - DNA, 15 bp, Homo sapiens
tttttcctaggttta

SEQ ID NO: 1246032 - DNA, 15 bp, Homo sapiens
atttttcctaggttt

SEQ ID NO: 1246033 - DNA, 15 bp, Homo sapiens
catttttcctaggtt

SEQ ID NO: 1246034 - DNA, 15 bp, Homo sapiens
acatttttcctaggt

SEQ ID NO: 1246035 - DNA, 15 bp, Homo sapiens
aacatttttcctagg

SEQ ID NO: 1246036 - DNA, 15 bp, Homo sapiens
ctgaaaaacttttat

SEQ ID NO: 1246037 - DNA, 15 bp, Homo sapiens
actgaaaaactttta

SEQ ID NO: 1246038 - DNA, 15 bp, Homo sapiens
aactgaaaaactttt

SEQ ID NO: 1246039 - DNA, 15 bp, Homo sapiens
aaactgaaaaacttt

SEQ ID NO: 1246040 - DNA, 15 bp, Homo sapiens
gaaactgaaaaactt

SEQ ID NO: 1246041 - DNA, 15 bp, Homo sapiens
agaaactgaaaaact

SEQ ID NO: 1246042 - DNA, 15 bp, Homo sapiens
aagaaactgaaaaac

SEQ ID NO: 1246043 - DNA, 15 bp, Homo sapiens
taagaaactgaaaaa

SEQ ID NO: 1246044 - DNA, 15 bp, Homo sapiens
ttaagaaactgaaaa

SEQ ID NO: 1246045 - DNA, 15 bp, Homo sapiens
attaagaaactgaaa

SEQ ID NO: 1246046 - DNA, 15 bp, Homo sapiens
aattaagaaactgaa

SEQ ID NO: 1246047 - DNA, 15 bp, Homo sapiens
caattaagaaactga

SEQ ID NO: 1246048 - DNA, 15 bp, Homo sapiens
gcaattaagaaactg

SEQ ID NO: 1246049 - DNA, 15 bp, Homo sapiens
cgcaattaagaaact

SEQ ID NO: 1246050 - DNA, 15 bp, Homo sapiens
tcgcaattaagaaac

SEQ ID NO: 1246051 - DNA, 15 bp, Homo sapiens
ttcgcaattaagaaa

SEQ ID NO: 1246052 - DNA, 15 bp, Homo sapiens
tttcgcaattaagaa

SEQ ID NO: 1246053 - DNA, 15 bp, Homo sapiens
ctttcgcaattaaga

SEQ ID NO: 1246054 - DNA, 15 bp, Homo sapiens
actttcgcaattaag

SEQ ID NO: 1246055 - DNA, 15 bp, Homo sapiens
aactttcgcaattaa

SEQ ID NO: 1246056 - DNA, 15 bp, Homo sapiens
gaactttcgcaatta

SEQ ID NO: 1246057 - DNA, 15 bp, Homo sapiens
ggaactttcgcaatt

SEQ ID NO: 1246058 - DNA, 15 bp, Homo sapiens
gggaactttcgcaat

SEQ ID NO: 1246059 - DNA, 15 bp, Homo sapiens
ggggaactttcgcaa

SEQ ID NO: 1246060 - DNA, 15 bp, Homo sapiens
tggggaactttcgca

SEQ ID NO: 1246061 - DNA, 15 bp, Homo sapiens
gtggggaactttcgc

SEQ ID NO: 1246062 - DNA, 15 bp, Homo sapiens
ggtggggaactttcg

SEQ ID NO: 1246063 - DNA, 15 bp, Homo sapiens
gggtggggaactttc

SEQ ID NO: 1246064 - DNA, 15 bp, Homo sapiens
tgggtggggaacttt

SEQ ID NO: 1246065 - DNA, 15 bp, Homo sapiens
ttgggtggggaactt

SEQ ID NO: 1246066 - DNA, 15 bp, Homo sapiens
tttgggtggggaact

SEQ ID NO: 1246067 - DNA, 15 bp, Homo sapiens
ttttgggtggggaac

SEQ ID NO: 1246068 - DNA, 15 bp, Homo sapiens
gttttgggtggggaa

SEQ ID NO: 1246069 - DNA, 15 bp, Homo sapiens
tgttttgggtgggga

SEQ ID NO: 1246070 - DNA, 15 bp, Homo sapiens
ctgttttgggtgggg

SEQ ID NO: 1246071 - DNA, 15 bp, Homo sapiens
gctgttttgggtggg

SEQ ID NO: 1246072 - DNA, 15 bp, Homo sapiens
agctgttttgggtgg

SEQ ID NO: 1246073 - DNA, 15 bp, Homo sapiens
aagctgttttgggtg

SEQ ID NO: 1246074 - DNA, 15 bp, Homo sapiens
taagctgttttgggt

SEQ ID NO: 1246075 - DNA, 15 bp, Homo sapiens
ttaagctgttttggg

SEQ ID NO: 1246076 - DNA, 15 bp, Homo sapiens
cttaagctgttttgg

SEQ ID NO: 1246077 - DNA, 15 bp, Homo sapiens
tcttaagctgttttg

SEQ ID NO: 1246078 - DNA, 15 bp, Homo sapiens
ctcttaagctgtttt

SEQ ID NO: 1246079 - DNA, 15 bp, Homo sapiens
tctcttaagctgttt

SEQ ID NO: 1246080 - DNA, 15 bp, Homo sapiens
ttctcttaagctgtt

SEQ ID NO: 1246081 - DNA, 15 bp, Homo sapiens
cttctcttaagctgt

SEQ ID NO: 1246082 - DNA, 15 bp, Homo sapiens
ccttctcttaagctg

SEQ ID NO: 1246083 - DNA, 15 bp, Homo sapiens
accttctcttaagct

SEQ ID NO: 1246084 - DNA, 15 bp, Homo sapiens
aaccttctcttaagc

SEQ ID NO: 1246085 - DNA, 15 bp, Homo sapiens
taaccttctcttaag

SEQ ID NO: 1246086 - DNA, 15 bp, Homo sapiens
ttaaccttctcttaa

SEQ ID NO: 1246087 - DNA, 15 bp, Homo sapiens
attaaccttctctta

SEQ ID NO: 1246088 - DNA, 15 bp, Homo sapiens
aattaaccttctctt

SEQ ID NO: 1246089 - DNA, 15 bp, Homo sapiens
taattaaccttctct

SEQ ID NO: 1246090 - DNA, 15 bp, Homo sapiens
gtaattaaccttctc

SEQ ID NO: 1246091 - DNA, 15 bp, Homo sapiens
tgtaattaaccttct

SEQ ID NO: 1246092 - DNA, 15 bp, Homo sapiens
ctgtaattaaccttc

SEQ ID NO: 1246093 - DNA, 15 bp, Homo sapiens
gctgtaattaacctt

SEQ ID NO: 1246094 - DNA, 15 bp, Homo sapiens
cgctgtaattaacct

SEQ ID NO: 1246095 - DNA, 15 bp, Homo sapiens
tcgctgtaattaacc

SEQ ID NO: 1246096 - DNA, 15 bp, Homo sapiens
gtcgctgtaattaac

SEQ ID NO: 1246097 - DNA, 15 bp, Homo sapiens
tgtcgctgtaattaa

SEQ ID NO: 1246098 - DNA, 15 bp, Homo sapiens
atgtcgctgtaatta

SEQ ID NO: 1246099 - DNA, 15 bp, Homo sapiens
catgtcgctgtaatt

SEQ ID NO: 1246100 - DNA, 15 bp, Homo sapiens
ccatgtcgctgtaat

SEQ ID NO: 1246101 - DNA, 15 bp, Homo sapiens
accatgtcgctgtaa

SEQ ID NO: 1246102 - DNA, 15 bp, Homo sapiens
taccatgtcgctgta

SEQ ID NO: 1246103 - DNA, 15 bp, Homo sapiens
ttaccatgtcgctgt

SEQ ID NO: 1246104 - DNA, 15 bp, Homo sapiens
tttaccatgtcgctg

SEQ ID NO: 1246105 - DNA, 15 bp, Homo sapiens
ctttaccatgtcgct

SEQ ID NO: 1246106 - DNA, 15 bp, Homo sapiens
tctttaccatgtcgc

SEQ ID NO: 1246107 - DNA, 15 bp, Homo sapiens
ttctttaccatgtcg

SEQ ID NO: 1246108 - DNA, 15 bp, Homo sapiens
tttctttaccatgtc

SEQ ID NO: 1246109 - DNA, 15 bp, Homo sapiens
gtttctttaccatgt

SEQ ID NO: 1246110 - DNA, 15 bp, Homo sapiens
ggtttctttaccatg

SEQ ID NO: 1246111 - DNA, 15 bp, Homo sapiens
gggtttctttaccat

SEQ ID NO: 1246112 - DNA, 15 bp, Homo sapiens
ggggtttctttacca

SEQ ID NO: 1246113 - DNA, 15 bp, Homo sapiens
tggggtttctttacc

SEQ ID NO: 1246114 - DNA, 15 bp, Homo sapiens
ttggggtttctttac

SEQ ID NO: 1246115 - DNA, 15 bp, Homo sapiens
gttggggtttcttta

SEQ ID NO: 1246116 - DNA, 15 bp, Homo sapiens
ggttggggtttcttt

SEQ ID NO: 1246117 - DNA, 15 bp, Homo sapiens
aggttggggtttctt

SEQ ID NO: 1246118 - DNA, 15 bp, Homo sapiens
aaggttggggtttct

SEQ ID NO: 1246119 - DNA, 15 bp, Homo sapiens
gaaggttggggtttc

SEQ ID NO: 1246120 - DNA, 15 bp, Homo sapiens
agaaggttggggttt

SEQ ID NO: 1246121 - DNA, 15 bp, Homo sapiens
gagaaggttggggtt

SEQ ID NO: 1246122 - DNA, 15 bp, Homo sapiens
tgagaaggttggggt

SEQ ID NO: 1246123 - DNA, 15 bp, Homo sapiens
ttgagaaggttgggg

SEQ ID NO: 1246124 - DNA, 15 bp, Homo sapiens
tttgagaaggttggg

SEQ ID NO: 1246125 - DNA, 15 bp, Homo sapiens
atttgagaaggttgg

SEQ ID NO: 1246126 - DNA, 15 bp, Homo sapiens
catttgagaaggttg

SEQ ID NO: 1246127 - DNA, 15 bp, Homo sapiens
gcatttgagaaggtt

SEQ ID NO: 1246128 - DNA, 15 bp, Homo sapiens
ggcatttgagaaggt

SEQ ID NO: 1246129 - DNA, 15 bp, Homo sapiens
aggcatttgagaagg

SEQ ID NO: 1246130 - DNA, 15 bp, Homo sapiens
gaggcatttgagaag

SEQ ID NO: 1246131 - DNA, 15 bp, Homo sapiens
ggaggcatttgagaa

SEQ ID NO: 1246132 - DNA, 15 bp, Homo sapiens
aggaggcatttgaga

SEQ ID NO: 1246133 - DNA, 15 bp, Homo sapiens
caggaggcatttgag

SEQ ID NO: 1246134 - DNA, 15 bp, Homo sapiens
ccaggaggcatttga

SEQ ID NO: 1246135 - DNA, 15 bp, Homo sapiens
tccaggaggcatttg

SEQ ID NO: 1246136 - DNA, 15 bp, Homo sapiens
ctccaggaggcattt

SEQ ID NO: 1246137 - DNA, 15 bp, Homo sapiens
tctccaggaggcatt

SEQ ID NO: 1246138 - DNA, 15 bp, Homo sapiens
ttctccaggaggcat

SEQ ID NO: 1246139 - DNA, 15 bp, Homo sapiens
cttctccaggaggca

SEQ ID NO: 1246140 - DNA, 15 bp, Homo sapiens
gcttctccaggaggc

SEQ ID NO: 1246141 - DNA, 15 bp, Homo sapiens
agcttctccaggagg

SEQ ID NO: 1246142 - DNA, 15 bp, Homo sapiens
cagcttctccaggag

SEQ ID NO: 1246143 - DNA, 15 bp, Homo sapiens
tcagcttctccagga

SEQ ID NO: 1246144 - DNA, 15 bp, Homo sapiens
atcagcttctccagg

SEQ ID NO: 1246145 - DNA, 15 bp, Homo sapiens
catcagcttctccag

SEQ ID NO: 1246146 - DNA, 15 bp, Homo sapiens
acatcagcttctcca

SEQ ID NO: 1246147 - DNA, 15 bp, Homo sapiens
cacatcagcttctcc

SEQ ID NO: 1246148 - DNA, 15 bp, Homo sapiens
tcacatcagcttctc

SEQ ID NO: 1246149 - DNA, 15 bp, Homo sapiens
ttcacatcagcttct

SEQ ID NO: 1246150 - DNA, 15 bp, Homo sapiens
attcacatcagcttc

SEQ ID NO: 1246151 - DNA, 15 bp, Homo sapiens
aattcacatcagctt

SEQ ID NO: 1246152 - DNA, 15 bp, Homo sapiens
aaattcacatcagct

SEQ ID NO: 1246153 - DNA, 15 bp, Homo sapiens
taaattcacatcagc

SEQ ID NO: 1246154 - DNA, 15 bp, Homo sapiens
ttaaattcacatcag

SEQ ID NO: 1246155 - DNA, 15 bp, Homo sapiens
attaaattcacatca

SEQ ID NO: 1246156 - DNA, 15 bp, Homo sapiens
tattaaattcacatc

SEQ ID NO: 1246157 - DNA, 15 bp, Homo sapiens
ctattaaattcacat

SEQ ID NO: 1246158 - DNA, 15 bp, Homo sapiens
cctattaaattcaca

SEQ ID NO: 1246159 - DNA, 15 bp, Homo sapiens
tcctattaaattcac

SEQ ID NO: 1246160 - DNA, 15 bp, Homo sapiens
atcctattaaattca

SEQ ID NO: 1246161 - DNA, 15 bp, Homo sapiens
aatcctattaaattc

SEQ ID NO: 1246162 - DNA, 15 bp, Homo sapiens
aaatcctattaaatt

SEQ ID NO: 1246163 - DNA, 15 bp, Homo sapiens
aaaatcctattaaat

SEQ ID NO: 1246164 - DNA, 15 bp, Homo sapiens
taaaatcctattaaa

SEQ ID NO: 1246165 - DNA, 15 bp, Homo sapiens
ttaaaatcctattaa

SEQ ID NO: 1246166 - DNA, 15 bp, Homo sapiens
attaaaatcctatta

SEQ ID NO: 1246167 - DNA, 15 bp, Homo sapiens
gattaaaatcctatt

SEQ ID NO: 1246168 - DNA, 15 bp, Homo sapiens
ggattaaaatcctat

SEQ ID NO: 1246169 - DNA, 15 bp, Homo sapiens
tggattaaaatccta

SEQ ID NO: 1246170 - DNA, 15 bp, Homo sapiens
ctggattaaaatcct

SEQ ID NO: 1246171 - DNA, 15 bp, Homo sapiens
tctggattaaaatcc

SEQ ID NO: 1246172 - DNA, 15 bp, Homo sapiens
ctctggattaaaatc

SEQ ID NO: 1246173 - DNA, 15 bp, Homo sapiens
tctctggattaaaat

SEQ ID NO: 1246174 - DNA, 15 bp, Homo sapiens
ctctctggattaaaa

SEQ ID NO: 1246175 - DNA, 15 bp, Homo sapiens
actctctggattaaa

SEQ ID NO: 1246176 - DNA, 15 bp, Homo sapiens
gactctctggattaa

SEQ ID NO: 1246177 - DNA, 15 bp, Homo sapiens
agactctctggatta

SEQ ID NO: 1246178 - DNA, 15 bp, Homo sapiens
aagactctctggatt

SEQ ID NO: 1246179 - DNA, 15 bp, Homo sapiens
aaagactctctggat

SEQ ID NO: 1246180 - DNA, 15 bp, Homo sapiens
aaaagactctctgga

SEQ ID NO: 1246181 - DNA, 15 bp, Homo sapiens
caaaagactctctgg

SEQ ID NO: 1246182 - DNA, 15 bp, Homo sapiens
tcaaaagactctctg

SEQ ID NO: 1246183 - DNA, 15 bp, Homo sapiens
ttcaaaagactctct

SEQ ID NO: 1246184 - DNA, 15 bp, Homo sapiens
attcaaaagactctc

SEQ ID NO: 1246185 - DNA, 15 bp, Homo sapiens
tattcaaaagactct

SEQ ID NO: 1246186 - DNA, 15 bp, Homo sapiens
gtattcaaaagactc

SEQ ID NO: 1246187 - DNA, 15 bp, Homo sapiens
agtattcaaaagact

SEQ ID NO: 1246188 - DNA, 15 bp, Homo sapiens
aagtattcaaaagac

SEQ ID NO: 1246189 - DNA, 15 bp, Homo sapiens
caagtattcaaaaga

SEQ ID NO: 1246190 - DNA, 15 bp, Homo sapiens
tcaagtattcaaaag

SEQ ID NO: 1246191 - DNA, 15 bp, Homo sapiens
ctcaagtattcaaaa

SEQ ID NO: 1246192 - DNA, 15 bp, Homo sapiens
cctcaagtattcaaa

SEQ ID NO: 1246193 - DNA, 15 bp, Homo sapiens
acctcaagtattcaa

SEQ ID NO: 1246194 - DNA, 15 bp, Homo sapiens
gacctcaagtattca

SEQ ID NO: 1246195 - DNA, 15 bp, Homo sapiens
agacctcaagtattc

SEQ ID NO: 1246196 - DNA, 15 bp, Homo sapiens
tagacctcaagtatt

SEQ ID NO: 1246197 - DNA, 15 bp, Homo sapiens
atagacctcaagtat

SEQ ID NO: 1246198 - DNA, 15 bp, Homo sapiens
aatagacctcaagta

SEQ ID NO: 1246199 - DNA, 15 bp, Homo sapiens
gaatagacctcaagt

SEQ ID NO: 1246200 - DNA, 15 bp, Homo sapiens
agaatagacctcaag

SEQ ID NO: 1246201 - DNA, 15 bp, Homo sapiens
gagaatagacctcaa

SEQ ID NO: 1246202 - DNA, 15 bp, Homo sapiens
ggagaatagacctca

SEQ ID NO: 1246203 - DNA, 15 bp, Homo sapiens
aggagaatagacctc

SEQ ID NO: 1246204 - DNA, 15 bp, Homo sapiens
caggagaatagacct

SEQ ID NO: 1246205 - DNA, 15 bp, Homo sapiens
gcaggagaatagacc

SEQ ID NO: 1246206 - DNA, 15 bp, Homo sapiens
agcaggagaatagac

SEQ ID NO: 1246207 - DNA, 15 bp, Homo sapiens
tagcaggagaataga

SEQ ID NO: 1246208 - DNA, 15 bp, Homo sapiens
gtagcaggagaatag

SEQ ID NO: 1246209 - DNA, 15 bp, Homo sapiens
ggtagcaggagaata

SEQ ID NO: 1246210 - DNA, 15 bp, Homo sapiens
gggtagcaggagaat

SEQ ID NO: 1246211 - DNA, 15 bp, Homo sapiens
agggtagcaggagaa

SEQ ID NO: 1246212 - DNA, 15 bp, Homo sapiens
gagggtagcaggaga

SEQ ID NO: 1246213 - DNA, 15 bp, Homo sapiens
agagggtagcaggag

SEQ ID NO: 1246214 - DNA, 15 bp, Homo sapiens
aagagggtagcagga

SEQ ID NO: 1246215 - DNA, 15 bp, Homo sapiens
aaagagggtagcagg

SEQ ID NO: 1246216 - DNA, 15 bp, Homo sapiens
gaaagagggtagcag

SEQ ID NO: 1246217 - DNA, 15 bp, Homo sapiens
ggaaagagggtagca

SEQ ID NO: 1246218 - DNA, 15 bp, Homo sapiens
aggaaagagggtagc

SEQ ID NO: 1246219 - DNA, 15 bp, Homo sapiens
caggaaagagggtag

SEQ ID NO: 1246220 - DNA, 15 bp, Homo sapiens
tcaggaaagagggta

SEQ ID NO: 1246221 - DNA, 15 bp, Homo sapiens
atcaggaaagagggt

SEQ ID NO: 1246222 - DNA, 15 bp, Homo sapiens
catcaggaaagaggg

SEQ ID NO: 1246223 - DNA, 15 bp, Homo sapiens
tcatcaggaaagagg

SEQ ID NO: 1246224 - DNA, 15 bp, Homo sapiens
gtcatcaggaaagag

SEQ ID NO: 1246225 - DNA, 15 bp, Homo sapiens
agtcatcaggaaaga

SEQ ID NO: 1246226 - DNA, 15 bp, Homo sapiens
aagtcatcaggaaag

SEQ ID NO: 1246227 - DNA, 15 bp, Homo sapiens
gaagtcatcaggaaa

SEQ ID NO: 1246228 - DNA, 15 bp, Homo sapiens
tgaagtcatcaggaa

SEQ ID NO: 1246229 - DNA, 15 bp, Homo sapiens
ttgaagtcatcagga

SEQ ID NO: 1246230 - DNA, 15 bp, Homo sapiens
tttgaagtcatcagg

SEQ ID NO: 1246231 - DNA, 15 bp, Homo sapiens
atttgaagtcatcag

SEQ ID NO: 1246232 - DNA, 15 bp, Homo sapiens
gatttgaagtcatca

SEQ ID NO: 1246233 - DNA, 15 bp, Homo sapiens
ggatttgaagtcatc

SEQ ID NO: 1246234 - DNA, 15 bp, Homo sapiens
aggatttgaagtcat

SEQ ID NO: 1246235 - DNA, 15 bp, Homo sapiens
aaggatttgaagtca

SEQ ID NO: 1246236 - DNA, 15 bp, Homo sapiens
gaaggatttgaagtc

SEQ ID NO: 1246237 - DNA, 15 bp, Homo sapiens
agaaggatttgaagt

SEQ ID NO: 1246238 - DNA, 15 bp, Homo sapiens
aagaaggatttgaag

SEQ ID NO: 1246239 - DNA, 15 bp, Homo sapiens
gaagaaggatttgaa

SEQ ID NO: 1246240 - DNA, 15 bp, Homo sapiens
tgaagaaggatttga

SEQ ID NO: 1246241 - DNA, 15 bp, Homo sapiens
ttgaagaaggatttg

SEQ ID NO: 1246242 - DNA, 15 bp, Homo sapiens
gttgaagaaggattt

SEQ ID NO: 1246243 - DNA, 15 bp, Homo sapiens
ggttgaagaaggatt

SEQ ID NO: 1246244 - DNA, 15 bp, Homo sapiens
gggttgaagaaggat

SEQ ID NO: 1246245 - DNA, 15 bp, Homo sapiens
tgggttgaagaagga

SEQ ID NO: 1246246 - DNA, 15 bp, Homo sapiens
ttgggttgaagaagg

SEQ ID NO: 1246247 - DNA, 15 bp, Homo sapiens
gttgggttgaagaag

SEQ ID NO: 1246248 - DNA, 15 bp, Homo sapiens
tgttgggttgaagaa

SEQ ID NO: 1246249 - DNA, 15 bp, Homo sapiens
atgttgggttgaaga

SEQ ID NO: 1246250 - DNA, 15 bp, Homo sapiens
catgttgggttgaag

SEQ ID NO: 1246251 - DNA, 15 bp, Homo sapiens
tcatgttgggttgaa

SEQ ID NO: 1246252 - DNA, 15 bp, Homo sapiens
ttcatgttgggttga

SEQ ID NO: 1246253 - DNA, 15 bp, Homo sapiens
tttcatgttgggttg

SEQ ID NO: 1246254 - DNA, 15 bp, Homo sapiens
ctttcatgttgggtt

SEQ ID NO: 1246255 - DNA, 15 bp, Homo sapiens
tctttcatgttgggt

SEQ ID NO: 1246256 - DNA, 15 bp, Homo sapiens
ctctttcatgttggg

SEQ ID NO: 1246257 - DNA, 15 bp, Homo sapiens
gctctttcatgttgg

SEQ ID NO: 1246258 - DNA, 15 bp, Homo sapiens
tgctctttcatgttg

SEQ ID NO: 1246259 - DNA, 15 bp, Homo sapiens
atgctctttcatgtt

SEQ ID NO: 1246260 - DNA, 15 bp, Homo sapiens
aatgctctttcatgt

SEQ ID NO: 1246261 - DNA, 15 bp, Homo sapiens
taatgctctttcatg

SEQ ID NO: 1246262 - DNA, 15 bp, Homo sapiens
ttaatgctctttcat

SEQ ID NO: 1246263 - DNA, 15 bp, Homo sapiens
attaatgctctttca

SEQ ID NO: 1246264 - DNA, 15 bp, Homo sapiens
tattaatgctctttc

SEQ ID NO: 1246265 - DNA, 15 bp, Homo sapiens
atattaatgctcttt

SEQ ID NO: 1246266 - DNA, 15 bp, Homo sapiens
gatattaatgctctt

SEQ ID NO: 1246267 - DNA, 15 bp, Homo sapiens
agatattaatgctct

SEQ ID NO: 1246268 - DNA, 15 bp, Homo sapiens
aagatattaatgctc

SEQ ID NO: 1246269 - DNA, 15 bp, Homo sapiens
aaagatattaatgct

SEQ ID NO: 1246270 - DNA, 15 bp, Homo sapiens
gaaagatattaatgc

SEQ ID NO: 1246271 - DNA, 15 bp, Homo sapiens
tgaaagatattaatg

SEQ ID NO: 1246272 - DNA, 15 bp, Homo sapiens
atgaaagatattaat

SEQ ID NO: 1246273 - DNA, 15 bp, Homo sapiens
gatgaaagatattaa

SEQ ID NO: 1246274 - DNA, 15 bp, Homo sapiens
cgatgaaagatatta

SEQ ID NO: 1246275 - DNA, 15 bp, Homo sapiens
tcgatgaaagatatt

SEQ ID NO: 1246276 - DNA, 15 bp, Homo sapiens
atcgatgaaagatat

SEQ ID NO: 1246277 - DNA, 15 bp, Homo sapiens
gatcgatgaaagata

SEQ ID NO: 1246278 - DNA, 15 bp, Homo sapiens
tgatcgatgaaagat

SEQ ID NO: 1246279 - DNA, 15 bp, Homo sapiens
ttgatcgatgaaaga

SEQ ID NO: 1246280 - DNA, 15 bp, Homo sapiens
attgatcgatgaaag

SEQ ID NO: 1246281 - DNA, 15 bp, Homo sapiens
gattgatcgatgaaa

SEQ ID NO: 1246282 - DNA, 15 bp, Homo sapiens
agattgatcgatgaa

SEQ ID NO: 1246283 - DNA, 15 bp, Homo sapiens
tagattgatcgatga

SEQ ID NO: 1246284 - DNA, 15 bp, Homo sapiens
gtagattgatcgatg

SEQ ID NO: 1246285 - DNA, 15 bp, Homo sapiens
agtagattgatcgat

SEQ ID NO: 1246286 - DNA, 15 bp, Homo sapiens
tagtagattgatcga

SEQ ID NO: 1246287 - DNA, 15 bp, Homo sapiens
ttagtagattgatcg

SEQ ID NO: 1246288 - DNA, 15 bp, Homo sapiens
attagtagattgatc

SEQ ID NO: 1246289 - DNA, 15 bp, Homo sapiens
gattagtagattgat

SEQ ID NO: 1246290 - DNA, 15 bp, Homo sapiens
ggattagtagattga

SEQ ID NO: 1246291 - DNA, 15 bp, Homo sapiens
aggattagtagattg

SEQ ID NO: 1246292 - DNA, 15 bp, Homo sapiens
aaggattagtagatt

SEQ ID NO: 1246293 - DNA, 15 bp, Homo sapiens
aaaggattagtagat

SEQ ID NO: 1246294 - DNA, 15 bp, Homo sapiens
aaaaggattagtaga

SEQ ID NO: 1246295 - DNA, 15 bp, Homo sapiens
taaaaggattagtag

SEQ ID NO: 1246296 - DNA, 15 bp, Homo sapiens
gtaaaaggattagta

SEQ ID NO: 1246297 - DNA, 15 bp, Homo sapiens
ggtaaaaggattagt

SEQ ID NO: 1246298 - DNA, 15 bp, Homo sapiens
aggtaaaaggattag

SEQ ID NO: 1246299 - DNA, 15 bp, Homo sapiens
aaggtaaaaggatta

SEQ ID NO: 1246300 - DNA, 15 bp, Homo sapiens
aaaggtaaaaggatt

SEQ ID NO: 1246301 - DNA, 15 bp, Homo sapiens
gaaaggtaaaaggat

SEQ ID NO: 1246302 - DNA, 15 bp, Homo sapiens
ggaaaggtaaaagga

SEQ ID NO: 1246303 - DNA, 15 bp, Homo sapiens
gggaaaggtaaaagg

SEQ ID NO: 1246304 - DNA, 15 bp, Homo sapiens
agggaaaggtaaaag

SEQ ID NO: 1246305 - DNA, 15 bp, Homo sapiens
aagggaaaggtaaaa

SEQ ID NO: 1246306 - DNA, 15 bp, Homo sapiens
aaagggaaaggtaaa

SEQ ID NO: 1246307 - DNA, 15 bp, Homo sapiens
caaagggaaaggtaa

SEQ ID NO: 1246308 - DNA, 15 bp, Homo sapiens
tcaaagggaaaggta

SEQ ID NO: 1246309 - DNA, 15 bp, Homo sapiens
ctcaaagggaaaggt

SEQ ID NO: 1246310 - DNA, 15 bp, Homo sapiens
actcaaagggaaagg

SEQ ID NO: 1246311 - DNA, 15 bp, Homo sapiens
gactcaaagggaaag

SEQ ID NO: 1246312 - DNA, 15 bp, Homo sapiens
cgactcaaagggaaa

SEQ ID NO: 1246313 - DNA, 15 bp, Homo sapiens
tcgactcaaagggaa

SEQ ID NO: 1246314 - DNA, 15 bp, Homo sapiens
gtcgactcaaaggga

SEQ ID NO: 1246315 - DNA, 15 bp, Homo sapiens
agtcgactcaaaggg

SEQ ID NO: 1246316 - DNA, 15 bp, Homo sapiens
cagtcgactcaaagg

SEQ ID NO: 1246317 - DNA, 15 bp, Homo sapiens
gcagtcgactcaaag

SEQ ID NO: 1246318 - DNA, 15 bp, Homo sapiens
tgcagtcgactcaaa

SEQ ID NO: 1246319 - DNA, 15 bp, Homo sapiens
atgcagtcgactcaa

SEQ ID NO: 1246320 - DNA, 15 bp, Homo sapiens
catgcagtcgactca

SEQ ID NO: 1246321 - DNA, 15 bp, Homo sapiens
tcatgcagtcgactc

SEQ ID NO: 1246322 - DNA, 15 bp, Homo sapiens
gtcatgcagtcgact

SEQ ID NO: 1246323 - DNA, 15 bp, Homo sapiens
tgtcatgcagtcgac

SEQ ID NO: 1246324 - DNA, 15 bp, Homo sapiens
atgtcatgcagtcga

SEQ ID NO: 1246325 - DNA, 15 bp, Homo sapiens
aatgtcatgcagtcg

SEQ ID NO: 1246326 - DNA, 15 bp, Homo sapiens
taatgtcatgcagtc

SEQ ID NO: 1246327 - DNA, 15 bp, Homo sapiens
gtaatgtcatgcagt

SEQ ID NO: 1246328 - DNA, 15 bp, Homo sapiens
tgtaatgtcatgcag

SEQ ID NO: 1246329 - DNA, 15 bp, Homo sapiens
atgtaatgtcatgca

SEQ ID NO: 1246330 - DNA, 15 bp, Homo sapiens
aatgtaatgtcatgc

SEQ ID NO: 1246331 - DNA, 15 bp, Homo sapiens
aaatgtaatgtcatg

SEQ ID NO: 1246332 - DNA, 15 bp, Homo sapiens
taaatgtaatgtcat

SEQ ID NO: 1246333 - DNA, 15 bp, Homo sapiens
ctaaatgtaatgtca

SEQ ID NO: 1246334 - DNA, 15 bp, Homo sapiens
actaaatgtaatgtc

SEQ ID NO: 1246335 - DNA, 15 bp, Homo sapiens
cactaaatgtaatgt

SEQ ID NO: 1246336 - DNA, 15 bp, Homo sapiens
ccactaaatgtaatg

SEQ ID NO: 1246337 - DNA, 15 bp, Homo sapiens
cccactaaatgtaat

SEQ ID NO: 1246338 - DNA, 15 bp, Homo sapiens
ccccactaaatgtaa

SEQ ID NO: 1246339 - DNA, 15 bp, Homo sapiens
cccccactaaatgta

SEQ ID NO: 1246340 - DNA, 15 bp, Homo sapiens
gcccccactaaatgt

SEQ ID NO: 1246341 - DNA, 15 bp, Homo sapiens
agcccccactaaatg

SEQ ID NO: 1246342 - DNA, 15 bp, Homo sapiens
tagcccccactaaat

SEQ ID NO: 1246343 - DNA, 15 bp, Homo sapiens
ctagcccccactaaa

SEQ ID NO: 1246344 - DNA, 15 bp, Homo sapiens
tctagcccccactaa

SEQ ID NO: 1246345 - DNA, 15 bp, Homo sapiens
ttctagcccccacta

SEQ ID NO: 1246346 - DNA, 15 bp, Homo sapiens
attttctagccccca

SEQ ID NO: 1246347 - DNA, 15 bp, Homo sapiens
aattttctagccccc

SEQ ID NO: 1246348 - DNA, 15 bp, Homo sapiens
gaattttctagcccc

SEQ ID NO: 1246349 - DNA, 15 bp, Homo sapiens
ggaattttctagccc

SEQ ID NO: 1246350 - DNA, 15 bp, Homo sapiens
aggaattttctagcc

SEQ ID NO: 1246351 - DNA, 15 bp, Homo sapiens
taggaattttctagc

SEQ ID NO: 1246352 - DNA, 15 bp, Homo sapiens
gtaggaattttctag

SEQ ID NO: 1246353 - DNA, 15 bp, Homo sapiens
cgtaggaattttcta

SEQ ID NO: 1246354 - DNA, 15 bp, Homo sapiens
acgtaggaattttct

SEQ ID NO: 1246355 - DNA, 15 bp, Homo sapiens
cacgtaggaattttc

SEQ ID NO: 1246356 - DNA, 15 bp, Homo sapiens
ccacgtaggaatttt

SEQ ID NO: 1246357 - DNA, 15 bp, Homo sapiens
tccacgtaggaattt

SEQ ID NO: 1246358 - DNA, 15 bp, Homo sapiens
ctccacgtaggaatt

SEQ ID NO: 1246359 - DNA, 15 bp, Homo sapiens
tctccacgtaggaat

SEQ ID NO: 1246360 - DNA, 15 bp, Homo sapiens
ctctccacgtaggaa

SEQ ID NO: 1246361 - DNA, 15 bp, Homo sapiens
tctctccacgtagga

SEQ ID NO: 1246362 - DNA, 15 bp, Homo sapiens
ctctctccacgtagg

SEQ ID NO: 1246363 - DNA, 15 bp, Homo sapiens
tctctctccacgtag

SEQ ID NO: 1246364 - DNA, 15 bp, Homo sapiens
atctctctccacgta

SEQ ID NO: 1246365 - DNA, 15 bp, Homo sapiens
aatctctctccacgt

SEQ ID NO: 1246366 - DNA, 15 bp, Homo sapiens
caatctctctccacg

SEQ ID NO: 1246367 - DNA, 15 bp, Homo sapiens
gcaatctctctccac

SEQ ID NO: 1246368 - DNA, 15 bp, Homo sapiens
tgcaatctctctcca

SEQ ID NO: 1246369 - DNA, 15 bp, Homo sapiens
ctgcaatctctctcc

SEQ ID NO: 1246370 - DNA, 15 bp, Homo sapiens
gctgcaatctctctc

SEQ ID NO: 1246371 - DNA, 15 bp, Homo sapiens
ggctgcaatctctct

SEQ ID NO: 1246372 - DNA, 15 bp, Homo sapiens
tggctgcaatctctc

SEQ ID NO: 1246373 - DNA, 15 bp, Homo sapiens
ctggctgcaatctct

SEQ ID NO: 1246374 - DNA, 15 bp, Homo sapiens
cctggctgcaatctc

SEQ ID NO: 1246375 - DNA, 15 bp, Homo sapiens
tcctggctgcaatct

SEQ ID NO: 1246376 - DNA, 15 bp, Homo sapiens
ctcctggctgcaatc

SEQ ID NO: 1246377 - DNA, 15 bp, Homo sapiens
tctcctggctgcaat

SEQ ID NO: 1246378 - DNA, 15 bp, Homo sapiens
ttctcctggctgcaa

SEQ ID NO: 1246379 - DNA, 15 bp, Homo sapiens
cttctcctggctgca

SEQ ID NO: 1246380 - DNA, 15 bp, Homo sapiens
gcttctcctggctgc

SEQ ID NO: 1246381 - DNA, 15 bp, Homo sapiens
tgcttctcctggctg

SEQ ID NO: 1246382 - DNA, 15 bp, Homo sapiens
ctgcttctcctggct

SEQ ID NO: 1246383 - DNA, 15 bp, Homo sapiens
tctgcttctcctggc

SEQ ID NO: 1246384 - DNA, 15 bp, Homo sapiens
gtctgcttctcctgg

SEQ ID NO: 1246385 - DNA, 15 bp, Homo sapiens
tgtctgcttctcctg

SEQ ID NO: 1246386 - DNA, 15 bp, Homo sapiens
ctgtctgcttctcct

SEQ ID NO: 1246387 - DNA, 15 bp, Homo sapiens
tctgtctgcttctcc

SEQ ID NO: 1246388 - DNA, 15 bp, Homo sapiens
gtctgtctgcttctc

SEQ ID NO: 1246389 - DNA, 15 bp, Homo sapiens
tgtctgtctgcttct

SEQ ID NO: 1246390 - DNA, 15 bp, Homo sapiens
gtgtctgtctgcttc

SEQ ID NO: 1246391 - DNA, 15 bp, Homo sapiens
tgtgtctgtctgctt

SEQ ID NO: 1246392 - DNA, 15 bp, Homo sapiens
ttgtgtctgtctgct

SEQ ID NO: 1246393 - DNA, 15 bp, Homo sapiens
attgtgtctgtctgc

SEQ ID NO: 1246394 - DNA, 15 bp, Homo sapiens
cattgtgtctgtctg

SEQ ID NO: 1246395 - DNA, 15 bp, Homo sapiens
acattgtgtctgtct

SEQ ID NO: 1246396 - DNA, 15 bp, Homo sapiens
gacattgtgtctgtc

SEQ ID NO: 1246397 - DNA, 15 bp, Homo sapiens
agacattgtgtctgt

SEQ ID NO: 1246398 - DNA, 15 bp, Homo sapiens
aagacattgtgtctg

SEQ ID NO: 1246399 - DNA, 15 bp, Homo sapiens
caagacattgtgtct

SEQ ID NO: 1246400 - DNA, 15 bp, Homo sapiens
ccaagacattgtgtc

SEQ ID NO: 1246401 - DNA, 15 bp, Homo sapiens
cccaagacattgtgt

SEQ ID NO: 1246402 - DNA, 15 bp, Homo sapiens
acccaagacattgtg

SEQ ID NO: 1246403 - DNA, 15 bp, Homo sapiens
tacccaagacattgt

SEQ ID NO: 1246404 - DNA, 15 bp, Homo sapiens
ctacccaagacattg

SEQ ID NO: 1246405 - DNA, 15 bp, Homo sapiens
tctacccaagacatt

SEQ ID NO: 1246406 - DNA, 15 bp, Homo sapiens
gtctacccaagacat

SEQ ID NO: 1246407 - DNA, 15 bp, Homo sapiens
tgtctacccaagaca

SEQ ID NO: 1246408 - DNA, 15 bp, Homo sapiens
ctgtctacccaagac

SEQ ID NO: 1246409 - DNA, 15 bp, Homo sapiens
tctgtctacccaaga

SEQ ID NO: 1246410 - DNA, 15 bp, Homo sapiens
ttctgtctacccaag

SEQ ID NO: 1246411 - DNA, 15 bp, Homo sapiens
cttctgtctacccaa

SEQ ID NO: 1246412 - DNA, 15 bp, Homo sapiens
acttctgtctaccca

SEQ ID NO: 1246413 - DNA, 15 bp, Homo sapiens
aacttctgtctaccc

SEQ ID NO: 1246414 - DNA, 15 bp, Homo sapiens
taacttctgtctacc

SEQ ID NO: 1246415 - DNA, 15 bp, Homo sapiens
ctaacttctgtctac

SEQ ID NO: 1246416 - DNA, 15 bp, Homo sapiens
cctaacttctgtcta

SEQ ID NO: 1246417 - DNA, 15 bp, Homo sapiens
tcctaacttctgtct

SEQ ID NO: 1246418 - DNA, 15 bp, Homo sapiens
ttcctaacttctgtc

SEQ ID NO: 1246419 - DNA, 15 bp, Homo sapiens
gttcctaacttctgt

SEQ ID NO: 1246420 - DNA, 15 bp, Homo sapiens
tgttcctaacttctg

SEQ ID NO: 1246421 - DNA, 15 bp, Homo sapiens
atgttcctaacttct

SEQ ID NO: 1246422 - DNA, 15 bp, Homo sapiens
gatgttcctaacttc

SEQ ID NO: 1246423 - DNA, 15 bp, Homo sapiens
tgatgttcctaactt

SEQ ID NO: 1246424 - DNA, 15 bp, Homo sapiens
gtgatgttcctaact

SEQ ID NO: 1246425 - DNA, 15 bp, Homo sapiens
ggtgatgttcctaac

SEQ ID NO: 1246426 - DNA, 15 bp, Homo sapiens
tggtgatgttcctaa

SEQ ID NO: 1246427 - DNA, 15 bp, Homo sapiens
atggtgatgttccta

SEQ ID NO: 1246428 - DNA, 15 bp, Homo sapiens
aatggtgatgttcct

SEQ ID NO: 1246429 - DNA, 15 bp, Homo sapiens
aaatggtgatgttcc

SEQ ID NO: 1246430 - DNA, 15 bp, Homo sapiens
caaatggtgatgttc

SEQ ID NO: 1246431 - DNA, 15 bp, Homo sapiens
tcaaatggtgatgtt

SEQ ID NO: 1246432 - DNA, 15 bp, Homo sapiens
ctcaaatggtgatgt

SEQ ID NO: 1246433 - DNA, 15 bp, Homo sapiens
tctcaaatggtgatg

SEQ ID NO: 1246434 - DNA, 15 bp, Homo sapiens
ttctcaaatggtgat

SEQ ID NO: 1246435 - DNA, 15 bp, Homo sapiens
tttctcaaatggtga

SEQ ID NO: 1246436 - DNA, 15 bp, Homo sapiens
atttctcaaatggtg

SEQ ID NO: 1246437 - DNA, 15 bp, Homo sapiens
tatttctcaaatggt

SEQ ID NO: 1246438 - DNA, 15 bp, Homo sapiens
atatttctcaaatgg

SEQ ID NO: 1246439 - DNA, 15 bp, Homo sapiens
catatttctcaaatg

SEQ ID NO: 1246440 - DNA, 15 bp, Homo sapiens
acatatttctcaaat

SEQ ID NO: 1246441 - DNA, 15 bp, Homo sapiens
aacatatttctcaaa

SEQ ID NO: 1246442 - DNA, 15 bp, Homo sapiens
aaacatatttctcaa

SEQ ID NO: 1246443 - DNA, 15 bp, Homo sapiens
caaacatatttctca

SEQ ID NO: 1246444 - DNA, 15 bp, Homo sapiens
gcaaacatatttctc

SEQ ID NO: 1246445 - DNA, 15 bp, Homo sapiens
tgcaaacatatttct

SEQ ID NO: 1246446 - DNA, 15 bp, Homo sapiens
ctgcaaacatatttc

SEQ ID NO: 1246447 - DNA, 15 bp, Homo sapiens
actgcaaacatattt

SEQ ID NO: 1246448 - DNA, 15 bp, Homo sapiens
aactgcaaacatatt

SEQ ID NO: 1246449 - DNA, 15 bp, Homo sapiens
taactgcaaacatat

SEQ ID NO: 1246450 - DNA, 15 bp, Homo sapiens
ataactgcaaacata

SEQ ID NO: 1246451 - DNA, 15 bp, Homo sapiens
aataactgcaaacat

SEQ ID NO: 1246452 - DNA, 15 bp, Homo sapiens
aaataactgcaaaca

SEQ ID NO: 1246453 - DNA, 15 bp, Homo sapiens
aaaataactgcaaac

SEQ ID NO: 1246454 - DNA, 15 bp, Homo sapiens
gaaaataactgcaaa

SEQ ID NO: 1246455 - DNA, 15 bp, Homo sapiens
ggaaaataactgcaa

SEQ ID NO: 1246456 - DNA, 15 bp, Homo sapiens
tggaaaataactgca

SEQ ID NO: 1246457 - DNA, 15 bp, Homo sapiens
ttggaaaataactgc

SEQ ID NO: 1246458 - DNA, 15 bp, Homo sapiens
cttggaaaataactg

SEQ ID NO: 1246459 - DNA, 15 bp, Homo sapiens
tcttggaaaataact

SEQ ID NO: 1246460 - DNA, 15 bp, Homo sapiens
ctcttggaaaataac

SEQ ID NO: 1246461 - DNA, 15 bp, Homo sapiens
gctcttggaaaataa

SEQ ID NO: 1246462 - DNA, 15 bp, Homo sapiens
tgctcttggaaaata

SEQ ID NO: 1246463 - DNA, 15 bp, Homo sapiens
ctgctcttggaaaat

SEQ ID NO: 1246464 - DNA, 15 bp, Homo sapiens
tctgctcttggaaaa

SEQ ID NO: 1246465 - DNA, 15 bp, Homo sapiens
atctgctcttggaaa

SEQ ID NO: 1246466 - DNA, 15 bp, Homo sapiens
tatctgctcttggaa

SEQ ID NO: 1246467 - DNA, 15 bp, Homo sapiens
ttatctgctcttgga

SEQ ID NO: 1246468 - DNA, 15 bp, Homo sapiens
tttatctgctcttgg

SEQ ID NO: 1246469 - DNA, 15 bp, Homo sapiens
atttatctgctcttg

SEQ ID NO: 1246470 - DNA, 15 bp, Homo sapiens
tatttatctgctctt

SEQ ID NO: 1246471 - DNA, 15 bp, Homo sapiens
atatttatctgctct

SEQ ID NO: 1246472 - DNA, 15 bp, Homo sapiens
gatatttatctgctc

SEQ ID NO: 1246473 - DNA, 15 bp, Homo sapiens
agatatttatctgct

SEQ ID NO: 1246474 - DNA, 15 bp, Homo sapiens
cagatatttatctgc

SEQ ID NO: 1246475 - DNA, 15 bp, Homo sapiens
acagatatttatctg

SEQ ID NO: 1246476 - DNA, 15 bp, Homo sapiens
aacagatatttatct

SEQ ID NO: 1246477 - DNA, 15 bp, Homo sapiens
caacagatatttatc

SEQ ID NO: 1246478 - DNA, 15 bp, Homo sapiens
ccaacagatatttat

SEQ ID NO: 1246479 - DNA, 15 bp, Homo sapiens
cccaacagatattta

SEQ ID NO: 1246480 - DNA, 15 bp, Homo sapiens
acccaacagatattt

SEQ ID NO: 1246481 - DNA, 15 bp, Homo sapiens
aacccaacagatatt

SEQ ID NO: 1246482 - DNA, 15 bp, Homo sapiens
aaacccaacagatat

SEQ ID NO: 1246483 - DNA, 15 bp, Homo sapiens
aaaacccaacagata

SEQ ID NO: 1246484 - DNA, 15 bp, Homo sapiens
caaaacccaacagat

SEQ ID NO: 1246485 - DNA, 15 bp, Homo sapiens
acaaaacccaacaga

SEQ ID NO: 1246486 - DNA, 15 bp, Homo sapiens
aacaaaacccaacag

SEQ ID NO: 1246487 - DNA, 15 bp, Homo sapiens
aaacaaaacccaaca

SEQ ID NO: 1246488 - DNA, 15 bp, Homo sapiens
taaacaaaacccaac

SEQ ID NO: 1246489 - DNA, 15 bp, Homo sapiens
ttaaacaaaacccaa

SEQ ID NO: 1246490 - DNA, 15 bp, Homo sapiens
attaaacaaaaccca

SEQ ID NO: 1246491 - DNA, 15 bp, Homo sapiens
gattaaacaaaaccc

SEQ ID NO: 1246492 - DNA, 15 bp, Homo sapiens
agattaaacaaaacc

SEQ ID NO: 1246493 - DNA, 15 bp, Homo sapiens
tagattaaacaaaac

SEQ ID NO: 1246494 - DNA, 15 bp, Homo sapiens
atagattaaacaaaa

SEQ ID NO: 1246495 - DNA, 15 bp, Homo sapiens
catagattaaacaaa

SEQ ID NO: 1246496 - DNA, 15 bp, Homo sapiens
ccatagattaaacaa

SEQ ID NO: 1246497 - DNA, 15 bp, Homo sapiens
accatagattaaaca

SEQ ID NO: 1246498 - DNA, 15 bp, Homo sapiens
caccatagattaaac

SEQ ID NO: 1246499 - DNA, 15 bp, Homo sapiens
tcaccatagattaaa

SEQ ID NO: 1246500 - DNA, 15 bp, Homo sapiens
atcaccatagattaa

SEQ ID NO: 1246501 - DNA, 15 bp, Homo sapiens
aatcaccatagatta

SEQ ID NO: 1246502 - DNA, 15 bp, Homo sapiens
taatcaccatagatt

SEQ ID NO: 1246503 - DNA, 15 bp, Homo sapiens
ataatcaccatagat

SEQ ID NO: 1246504 - DNA, 15 bp, Homo sapiens
tataatcaccataga

SEQ ID NO: 1246505 - DNA, 15 bp, Homo sapiens
ttataatcaccatag

SEQ ID NO: 1246506 - DNA, 15 bp, Homo sapiens
cttataatcaccata

SEQ ID NO: 1246507 - DNA, 15 bp, Homo sapiens
ccttataatcaccat

SEQ ID NO: 1246508 - DNA, 15 bp, Homo sapiens
cccttataatcacca

SEQ ID NO: 1246509 - DNA, 15 bp, Homo sapiens
acccttataatcacc

SEQ ID NO: 1246510 - DNA, 15 bp, Homo sapiens
gacccttataatcac

SEQ ID NO: 1246511 - DNA, 15 bp, Homo sapiens
ggacccttataatca

SEQ ID NO: 1246512 - DNA, 15 bp, Homo sapiens
aggacccttataatc

SEQ ID NO: 1246513 - DNA, 15 bp, Homo sapiens
caggacccttataat

SEQ ID NO: 1246514 - DNA, 15 bp, Homo sapiens
ccaggacccttataa

SEQ ID NO: 1246515 - DNA, 15 bp, Homo sapiens
accaggacccttata

SEQ ID NO: 1246516 - DNA, 15 bp, Homo sapiens
caccaggacccttat

SEQ ID NO: 1246517 - DNA, 15 bp, Homo sapiens
ccaccaggaccctta

SEQ ID NO: 1246518 - DNA, 15 bp, Homo sapiens
cccaccaggaccctt

SEQ ID NO: 1246519 - DNA, 15 bp, Homo sapiens
ccccaccaggaccct

SEQ ID NO: 1246520 - DNA, 15 bp, Homo sapiens
tccccaccaggaccc

SEQ ID NO: 1246521 - DNA, 15 bp, Homo sapiens
ttccccaccaggacc

SEQ ID NO: 1246522 - DNA, 15 bp, Homo sapiens
cttccccaccaggac

SEQ ID NO: 1246523 - DNA, 15 bp, Homo sapiens
tcttccccaccagga

SEQ ID NO: 1246524 - DNA, 15 bp, Homo sapiens
ttcttccccaccagg

SEQ ID NO: 1246525 - DNA, 15 bp, Homo sapiens
tttcttccccaccag

SEQ ID NO: 1246526 - DNA, 15 bp, Homo sapiens
ttttcttccccacca

SEQ ID NO: 1246527 - DNA, 15 bp, Homo sapiens
cttttcttccccacc

SEQ ID NO: 1246528 - DNA, 15 bp, Homo sapiens
acttttcttccccac

SEQ ID NO: 1246529 - DNA, 15 bp, Homo sapiens
cacttttcttcccca

SEQ ID NO: 1246530 - DNA, 15 bp, Homo sapiens
tcacttttcttcccc

SEQ ID NO: 1246531 - DNA, 15 bp, Homo sapiens
ctcacttttcttccc

SEQ ID NO: 1246532 - DNA, 15 bp, Homo sapiens
actcacttttcttcc

SEQ ID NO: 1246533 - DNA, 15 bp, Homo sapiens
aactcacttttcttc

SEQ ID NO: 1246534 - DNA, 15 bp, Homo sapiens
gaactcacttttctt

SEQ ID NO: 1246535 - DNA, 15 bp, Homo sapiens
tgaactcacttttct

SEQ ID NO: 1246536 - DNA, 15 bp, Homo sapiens
ttgaactcacttttc

SEQ ID NO: 1246537 - DNA, 15 bp, Homo sapiens
tttgaactcactttt

SEQ ID NO: 1246538 - DNA, 15 bp, Homo sapiens
atttgaactcacttt

SEQ ID NO: 1246539 - DNA, 15 bp, Homo sapiens
aatttgaactcactt

SEQ ID NO: 1246540 - DNA, 15 bp, Homo sapiens
caatttgaactcact

SEQ ID NO: 1246541 - DNA, 15 bp, Homo sapiens
gcaatttgaactcac

SEQ ID NO: 1246542 - DNA, 15 bp, Homo sapiens
ggcaatttgaactca

SEQ ID NO: 1246543 - DNA, 15 bp, Homo sapiens
tggcaatttgaactc

SEQ ID NO: 1246544 - DNA, 15 bp, Homo sapiens
ctggcaatttgaact

SEQ ID NO: 1246545 - DNA, 15 bp, Homo sapiens
tctggcaatttgaac

SEQ ID NO: 1246546 - DNA, 15 bp, Homo sapiens
ttctggcaatttgaa

SEQ ID NO: 1246547 - DNA, 15 bp, Homo sapiens
gttctggcaatttga

SEQ ID NO: 1246548 - DNA, 15 bp, Homo sapiens
tgttctggcaatttg

SEQ ID NO: 1246549 - DNA, 15 bp, Homo sapiens
ttgttctggcaattt

SEQ ID NO: 1246550 - DNA, 15 bp, Homo sapiens
gttgttctggcaatt

SEQ ID NO: 1246551 - DNA, 15 bp, Homo sapiens
agttgttctggcaat

SEQ ID NO: 1246552 - DNA, 15 bp, Homo sapiens
tagttgttctggcaa

SEQ ID NO: 1246553 - DNA, 15 bp, Homo sapiens
gtagttgttctggca

SEQ ID NO: 1246554 - DNA, 15 bp, Homo sapiens
agtagttgttctggc

SEQ ID NO: 1246555 - DNA, 15 bp, Homo sapiens
cagtagttgttctgg

SEQ ID NO: 1246556 - DNA, 15 bp, Homo sapiens
ccagtagttgttctg

SEQ ID NO: 1246557 - DNA, 15 bp, Homo sapiens
accagtagttgttct

SEQ ID NO: 1246558 - DNA, 15 bp, Homo sapiens
aaccagtagttgttc

SEQ ID NO: 1246559 - DNA, 15 bp, Homo sapiens
gaaccagtagttgtt

SEQ ID NO: 1246560 - DNA, 15 bp, Homo sapiens
agaaccagtagttgt

SEQ ID NO: 1246561 - DNA, 15 bp, Homo sapiens
cagaaccagtagttg

SEQ ID NO: 1246562 - DNA, 15 bp, Homo sapiens
acagaaccagtagtt

SEQ ID NO: 1246563 - DNA, 15 bp, Homo sapiens
cacagaaccagtagt

SEQ ID NO: 1246564 - DNA, 15 bp, Homo sapiens
ccacagaaccagtag

SEQ ID NO: 1246565 - DNA, 15 bp, Homo sapiens
tccacagaaccagta

SEQ ID NO: 1246566 - DNA, 15 bp, Homo sapiens
ttccacagaaccagt

SEQ ID NO: 1246567 - DNA, 15 bp, Homo sapiens
tttccacagaaccag

SEQ ID NO: 1246568 - DNA, 15 bp, Homo sapiens
ctttccacagaacca

SEQ ID NO: 1246569 - DNA, 15 bp, Homo sapiens
gctttccacagaacc

SEQ ID NO: 1246570 - DNA, 15 bp, Homo sapiens
tgctttccacagaac

SEQ ID NO: 1246571 - DNA, 15 bp, Homo sapiens
ctgctttccacagaa

SEQ ID NO: 1246572 - DNA, 15 bp, Homo sapiens
tctgctttccacaga

SEQ ID NO: 1246573 - DNA, 15 bp, Homo sapiens
ttctgctttccacag

SEQ ID NO: 1246574 - DNA, 15 bp, Homo sapiens
tttctgctttccaca

SEQ ID NO: 1246575 - DNA, 15 bp, Homo sapiens
ctttctgctttccac

SEQ ID NO: 1246576 - DNA, 15 bp, Homo sapiens
tctttctgctttcca

SEQ ID NO: 1246577 - DNA, 15 bp, Homo sapiens
gtctttctgctttcc

SEQ ID NO: 1246578 - DNA, 15 bp, Homo sapiens
ggtctttctgctttc

SEQ ID NO: 1246579 - DNA, 15 bp, Homo sapiens
aggtctttctgcttt

SEQ ID NO: 1246580 - DNA, 15 bp, Homo sapiens
taggtctttctgctt

SEQ ID NO: 1246581 - DNA, 15 bp, Homo sapiens
ataggtctttctgct

SEQ ID NO: 1246582 - DNA, 15 bp, Homo sapiens
gataggtctttctgc

SEQ ID NO: 1246583 - DNA, 15 bp, Homo sapiens
agataggtctttctg

SEQ ID NO: 1246584 - DNA, 15 bp, Homo sapiens
cagataggtctttct

SEQ ID NO: 1246585 - DNA, 15 bp, Homo sapiens
gcagataggtctttc

SEQ ID NO: 1246586 - DNA, 15 bp, Homo sapiens
ggcagataggtcttt

SEQ ID NO: 1246587 - DNA, 15 bp, Homo sapiens
aggcagataggtctt

SEQ ID NO: 1246588 - DNA, 15 bp, Homo sapiens
caggcagataggtct

SEQ ID NO: 1246589 - DNA, 15 bp, Homo sapiens
acaggcagataggtc

SEQ ID NO: 1246590 - DNA, 15 bp, Homo sapiens
gacaggcagataggt

SEQ ID NO: 1246591 - DNA, 15 bp, Homo sapiens
agacaggcagatagg

SEQ ID NO: 1246592 - DNA, 15 bp, Homo sapiens
tagacaggcagatag

SEQ ID NO: 1246593 - DNA, 15 bp, Homo sapiens
atagacaggcagata

SEQ ID NO: 1246594 - DNA, 15 bp, Homo sapiens
gatagacaggcagat

SEQ ID NO: 1246595 - DNA, 15 bp, Homo sapiens
agatagacaggcaga

SEQ ID NO: 1246596 - DNA, 15 bp, Homo sapiens
tagatagacaggcag

SEQ ID NO: 1246597 - DNA, 15 bp, Homo sapiens
atagatagacaggca

SEQ ID NO: 1246598 - DNA, 15 bp, Homo sapiens
gatagatagacaggc

SEQ ID NO: 1246599 - DNA, 15 bp, Homo sapiens
agatagatagacagg

SEQ ID NO: 1246600 - DNA, 15 bp, Homo sapiens
tagatagatagacag

SEQ ID NO: 1246601 - DNA, 15 bp, Homo sapiens
atagatagatagaca

SEQ ID NO: 1246602 - DNA, 15 bp, Homo sapiens
gatagatagatagac

SEQ ID NO: 1246603 - DNA, 15 bp, Homo sapiens
agatagatagataga

SEQ ID NO: 1246604 - DNA, 15 bp, Homo sapiens
tagatagatagatag

SEQ ID NO: 1246605 - DNA, 15 bp, Homo sapiens
atagatagatagata

SEQ ID NO: 1246606 - DNA, 15 bp, Homo sapiens
gatagatagatagat

SEQ ID NO: 1246607 - DNA, 15 bp, Homo sapiens
cagatagatagatag

SEQ ID NO: 1246608 - DNA, 15 bp, Homo sapiens
acagatagatagata

SEQ ID NO: 1246609 - DNA, 15 bp, Homo sapiens
gacagatagatagat

SEQ ID NO: 1246610 - DNA, 15 bp, Homo sapiens
agacagatagataga

SEQ ID NO: 1246611 - DNA, 15 bp, Homo sapiens
tagacagatagatag

SEQ ID NO: 1246612 - DNA, 15 bp, Homo sapiens
atagacagatagata

SEQ ID NO: 1246613 - DNA, 15 bp, Homo sapiens
gatagacagatagat

SEQ ID NO: 1246614 - DNA, 15 bp, Homo sapiens
agatagacagataga

SEQ ID NO: 1246615 - DNA, 15 bp, Homo sapiens
tagatagacagatag

SEQ ID NO: 1246616 - DNA, 15 bp, Homo sapiens
atagatagacagata

SEQ ID NO: 1246617 - DNA, 15 bp, Homo sapiens
gatagatagacagat

SEQ ID NO: 1246618 - DNA, 15 bp, Homo sapiens
agatagatagacaga

SEQ ID NO: 1246619 - DNA, 15 bp, Homo sapiens
ggatagatagataga

SEQ ID NO: 1246620 - DNA, 15 bp, Homo sapiens
cggatagatagatag

SEQ ID NO: 1246621 - DNA, 15 bp, Homo sapiens
acggatagatagata

SEQ ID NO: 1246622 - DNA, 15 bp, Homo sapiens
gacggatagatagat

SEQ ID NO: 1246623 - DNA, 15 bp, Homo sapiens
agacggatagataga

SEQ ID NO: 1246624 - DNA, 15 bp, Homo sapiens
tagacggatagatag

SEQ ID NO: 1246625 - DNA, 15 bp, Homo sapiens
atagacggatagata

SEQ ID NO: 1246626 - DNA, 15 bp, Homo sapiens
gatagacggatagat

SEQ ID NO: 1246627 - DNA, 15 bp, Homo sapiens
agatagacggataga

SEQ ID NO: 1246628 - DNA, 15 bp, Homo sapiens
tagatagacggatag

SEQ ID NO: 1246629 - DNA, 15 bp, Homo sapiens
atagatagacggata

SEQ ID NO: 1246630 - DNA, 15 bp, Homo sapiens
gatagatagacggat

SEQ ID NO: 1246631 - DNA, 15 bp, Homo sapiens
ggatagatagacgga

SEQ ID NO: 1246632 - DNA, 15 bp, Homo sapiens
tggatagatagacgg

SEQ ID NO: 1246633 - DNA, 15 bp, Homo sapiens
atggatagatagacg

SEQ ID NO: 1246634 - DNA, 15 bp, Homo sapiens
gatggatagatagac

SEQ ID NO: 1246635 - DNA, 15 bp, Homo sapiens
tgatggatagataga

SEQ ID NO: 1246636 - DNA, 15 bp, Homo sapiens
atgatggatagatag

SEQ ID NO: 1246637 - DNA, 15 bp, Homo sapiens
gatgatggatagata

SEQ ID NO: 1246638 - DNA, 15 bp, Homo sapiens
agatgatggatagat

SEQ ID NO: 1246639 - DNA, 15 bp, Homo sapiens
tagatgatggataga

SEQ ID NO: 1246640 - DNA, 15 bp, Homo sapiens
atagatgatggatag

SEQ ID NO: 1246641 - DNA, 15 bp, Homo sapiens
gatagatgatggata

SEQ ID NO: 1246642 - DNA, 15 bp, Homo sapiens
tgatagatgatggat

SEQ ID NO: 1246643 - DNA, 15 bp, Homo sapiens
atgatagatgatgga

SEQ ID NO: 1246644 - DNA, 15 bp, Homo sapiens
gatgatagatgatgg

SEQ ID NO: 1246645 - DNA, 15 bp, Homo sapiens
agatgatagatgatg

SEQ ID NO: 1246646 - DNA, 15 bp, Homo sapiens
tagatgatagatgat

SEQ ID NO: 1246647 - DNA, 15 bp, Homo sapiens
gtagatgatagatga

SEQ ID NO: 1246648 - DNA, 15 bp, Homo sapiens
tgtagatgatagatg

SEQ ID NO: 1246649 - DNA, 15 bp, Homo sapiens
gtgtagatgatagat

SEQ ID NO: 1246650 - DNA, 15 bp, Homo sapiens
ggtgtagatgataga

SEQ ID NO: 1246651 - DNA, 15 bp, Homo sapiens
aggtgtagatgatag

SEQ ID NO: 1246652 - DNA, 15 bp, Homo sapiens
caggtgtagatgata

SEQ ID NO: 1246653 - DNA, 15 bp, Homo sapiens
acaggtgtagatgat

SEQ ID NO: 1246654 - DNA, 15 bp, Homo sapiens
gacaggtgtagatga

SEQ ID NO: 1246655 - DNA, 15 bp, Homo sapiens
agacaggtgtagatg

SEQ ID NO: 1246656 - DNA, 15 bp, Homo sapiens
tagacaggtgtagat

SEQ ID NO: 1246657 - DNA, 15 bp, Homo sapiens
atagacaggtgtaga

SEQ ID NO: 1246658 - DNA, 15 bp, Homo sapiens
gatagacaggtgtag

SEQ ID NO: 1246659 - DNA, 15 bp, Homo sapiens
agatagacaggtgta

SEQ ID NO: 1246660 - DNA, 15 bp, Homo sapiens
tagatagacaggtgt

SEQ ID NO: 1246661 - DNA, 15 bp, Homo sapiens
atagatagacaggtg

SEQ ID NO: 1246662 - DNA, 15 bp, Homo sapiens
gatagatagacaggt

SEQ ID NO: 1246663 - DNA, 15 bp, Homo sapiens
tgatagatagacagg

SEQ ID NO: 1246664 - DNA, 15 bp, Homo sapiens
atgatagatagacag

SEQ ID NO: 1246665 - DNA, 15 bp, Homo sapiens
gatgatagatagaca

SEQ ID NO: 1246666 - DNA, 15 bp, Homo sapiens
agatgatagatagac

SEQ ID NO: 1246667 - DNA, 15 bp, Homo sapiens
tagatgatagataga

SEQ ID NO: 1246668 - DNA, 15 bp, Homo sapiens
atagatgatagatag

SEQ ID NO: 1246669 - DNA, 15 bp, Homo sapiens
gatagatgatagata

SEQ ID NO: 1246670 - DNA, 15 bp, Homo sapiens
agatagatgatagat

SEQ ID NO: 1246671 - DNA, 15 bp, Homo sapiens
tagatagatgataga

SEQ ID NO: 1246672 - DNA, 15 bp, Homo sapiens
gtagatagatgatag

SEQ ID NO: 1246673 - DNA, 15 bp, Homo sapiens
ggtagatagatgata

SEQ ID NO: 1246674 - DNA, 15 bp, Homo sapiens
aggtagatagatgat

SEQ ID NO: 1246675 - DNA, 15 bp, Homo sapiens
taggtagatagatga

SEQ ID NO: 1246676 - DNA, 15 bp, Homo sapiens
ataggtagatagatg

SEQ ID NO: 1246677 - DNA, 15 bp, Homo sapiens
gataggtagatagat

SEQ ID NO: 1246678 - DNA, 15 bp, Homo sapiens
agataggtagataga

SEQ ID NO: 1246679 - DNA, 15 bp, Homo sapiens
tagataggtagatag

SEQ ID NO: 1246680 - DNA, 15 bp, Homo sapiens
atagataggtagata

SEQ ID NO: 1246681 - DNA, 15 bp, Homo sapiens
gatagataggtagat

SEQ ID NO: 1246682 - DNA, 15 bp, Homo sapiens
agatagataggtaga

SEQ ID NO: 1246683 - DNA, 15 bp, Homo sapiens
cagatagataggtag

SEQ ID NO: 1246684 - DNA, 15 bp, Homo sapiens
acagatagataggta

SEQ ID NO: 1246685 - DNA, 15 bp, Homo sapiens
gacagatagataggt

SEQ ID NO: 1246686 - DNA, 15 bp, Homo sapiens
ggacagatagatagg

SEQ ID NO: 1246687 - DNA, 15 bp, Homo sapiens
tggacagatagatag

SEQ ID NO: 1246688 - DNA, 15 bp, Homo sapiens
atggacagatagata

SEQ ID NO: 1246689 - DNA, 15 bp, Homo sapiens
gatggacagatagat

SEQ ID NO: 1246690 - DNA, 15 bp, Homo sapiens
tgatggacagataga

SEQ ID NO: 1246691 - DNA, 15 bp, Homo sapiens
ttgatggacagatag

SEQ ID NO: 1246692 - DNA, 15 bp, Homo sapiens
attgatggacagata

SEQ ID NO: 1246693 - DNA, 15 bp, Homo sapiens
gattgatggacagat

SEQ ID NO: 1246694 - DNA, 15 bp, Homo sapiens
tgattgatggacaga

SEQ ID NO: 1246695 - DNA, 15 bp, Homo sapiens
atgattgatggacag

SEQ ID NO: 1246696 - DNA, 15 bp, Homo sapiens
gatgattgatggaca

SEQ ID NO: 1246697 - DNA, 15 bp, Homo sapiens
agatgattgatggac

SEQ ID NO: 1246698 - DNA, 15 bp, Homo sapiens
tagatgattgatgga

SEQ ID NO: 1246699 - DNA, 15 bp, Homo sapiens
atagatgattgatgg

SEQ ID NO: 1246700 - DNA, 15 bp, Homo sapiens
gatagatgattgatg

SEQ ID NO: 1246701 - DNA, 15 bp, Homo sapiens
tgatagatgattgat

SEQ ID NO: 1246702 - DNA, 15 bp, Homo sapiens
atgatagatgattga

SEQ ID NO: 1246703 - DNA, 15 bp, Homo sapiens
gatgatagatgattg

SEQ ID NO: 1246704 - DNA, 15 bp, Homo sapiens
agatgatagatgatt

SEQ ID NO: 1246705 - DNA, 15 bp, Homo sapiens
atagatgatagatga

SEQ ID NO: 1246706 - DNA, 15 bp, Homo sapiens
gatagatgatagatg

SEQ ID NO: 1246707 - DNA, 15 bp, Homo sapiens
atagatagatgatag

SEQ ID NO: 1246708 - DNA, 15 bp, Homo sapiens
gatagatagatgata

SEQ ID NO: 1246709 - DNA, 15 bp, Homo sapiens
agatagatagatgat

SEQ ID NO: 1246710 - DNA, 15 bp, Homo sapiens
tagatagatagatga

SEQ ID NO: 1246711 - DNA, 15 bp, Homo sapiens
atagatagatagatg

SEQ ID NO: 1246712 - DNA, 15 bp, Homo sapiens
catagatagatagat

SEQ ID NO: 1246713 - DNA, 15 bp, Homo sapiens
acatagatagataga

SEQ ID NO: 1246714 - DNA, 15 bp, Homo sapiens
aacatagatagatag

SEQ ID NO: 1246715 - DNA, 15 bp, Homo sapiens
caacatagatagata

SEQ ID NO: 1246716 - DNA, 15 bp, Homo sapiens
acaacatagatagat

SEQ ID NO: 1246717 - DNA, 15 bp, Homo sapiens
gacaacatagataga

SEQ ID NO: 1246718 - DNA, 15 bp, Homo sapiens
agacaacatagatag

SEQ ID NO: 1246719 - DNA, 15 bp, Homo sapiens
cagacaacatagata

SEQ ID NO: 1246720 - DNA, 15 bp, Homo sapiens
ccagacaacatagat

SEQ ID NO: 1246721 - DNA, 15 bp, Homo sapiens
cccagacaacataga

SEQ ID NO: 1246722 - DNA, 15 bp, Homo sapiens
tcccagacaacatag

SEQ ID NO: 1246723 - DNA, 15 bp, Homo sapiens
ttcccagacaacata

SEQ ID NO: 1246724 - DNA, 15 bp, Homo sapiens
gttcccagacaacat

SEQ ID NO: 1246725 - DNA, 15 bp, Homo sapiens
tgttcccagacaaca

SEQ ID NO: 1246726 - DNA, 15 bp, Homo sapiens
gtgttcccagacaac

SEQ ID NO: 1246727 - DNA, 15 bp, Homo sapiens
agtgttcccagacaa

SEQ ID NO: 1246728 - DNA, 15 bp, Homo sapiens
aagtgttcccagaca

SEQ ID NO: 1246729 - DNA, 15 bp, Homo sapiens
taagtgttcccagac

SEQ ID NO: 1246730 - DNA, 15 bp, Homo sapiens
ataagtgttcccaga

SEQ ID NO: 1246731 - DNA, 15 bp, Homo sapiens
cataagtgttcccag

SEQ ID NO: 1246732 - DNA, 15 bp, Homo sapiens
tcataagtgttccca

SEQ ID NO: 1246733 - DNA, 15 bp, Homo sapiens
atcataagtgttccc

SEQ ID NO: 1246734 - DNA, 15 bp, Homo sapiens
aatcataagtgttcc

SEQ ID NO: 1246735 - DNA, 15 bp, Homo sapiens
taatcataagtgttc

SEQ ID NO: 1246736 - DNA, 15 bp, Homo sapiens
gtaatcataagtgtt

SEQ ID NO: 1246737 - DNA, 15 bp, Homo sapiens
agtaatcataagtgt

SEQ ID NO: 1246738 - DNA, 15 bp, Homo sapiens
cagtaatcataagtg

SEQ ID NO: 1246739 - DNA, 15 bp, Homo sapiens
acagtaatcataagt

SEQ ID NO: 1246740 - DNA, 15 bp, Homo sapiens
cacagtaatcataag

SEQ ID NO: 1246741 - DNA, 15 bp, Homo sapiens
tcacagtaatcataa

SEQ ID NO: 1246742 - DNA, 15 bp, Homo sapiens
ctcacagtaatcata

SEQ ID NO: 1246743 - DNA, 15 bp, Homo sapiens
tctcacagtaatcat

SEQ ID NO: 1246744 - DNA, 15 bp, Homo sapiens
ttctcacagtaatca

SEQ ID NO: 1246745 - DNA, 15 bp, Homo sapiens
cttctcacagtaatc

SEQ ID NO: 1246746 - DNA, 15 bp, Homo sapiens
tcttctcacagtaat

SEQ ID NO: 1246747 - DNA, 15 bp, Homo sapiens
gtcttctcacagtaa

SEQ ID NO: 1246748 - DNA, 15 bp, Homo sapiens
tgtcttctcacagta

SEQ ID NO: 1246749 - DNA, 15 bp, Homo sapiens
ttgtcttctcacagt

SEQ ID NO: 1246750 - DNA, 15 bp, Homo sapiens
tttgtcttctcacag

SEQ ID NO: 1246751 - DNA, 15 bp, Homo sapiens
ttttgtcttctcaca

SEQ ID NO: 1246752 - DNA, 15 bp, Homo sapiens
cttttgtcttctcac

SEQ ID NO: 1246753 - DNA, 15 bp, Homo sapiens
gcttttgtcttctca

SEQ ID NO: 1246754 - DNA, 15 bp, Homo sapiens
tgcttttgtcttctc

SEQ ID NO: 1246755 - DNA, 15 bp, Homo sapiens
ttgcttttgtcttct

SEQ ID NO: 1246756 - DNA, 15 bp, Homo sapiens
gttgcttttgtcttc

SEQ ID NO: 1246757 - DNA, 15 bp, Homo sapiens
tgttgcttttgtctt

SEQ ID NO: 1246758 - DNA, 15 bp, Homo sapiens
atgttgcttttgtct

SEQ ID NO: 1246759 - DNA, 15 bp, Homo sapiens
gatgttgcttttgtc

SEQ ID NO: 1246760 - DNA, 15 bp, Homo sapiens
tgatgttgcttttgt

SEQ ID NO: 1246761 - DNA, 15 bp, Homo sapiens
atgatgttgcttttg

SEQ ID NO: 1246762 - DNA, 15 bp, Homo sapiens
aatgatgttgctttt

SEQ ID NO: 1246763 - DNA, 15 bp, Homo sapiens
taatgatgttgcttt

SEQ ID NO: 1246764 - DNA, 15 bp, Homo sapiens
ataatgatgttgctt

SEQ ID NO: 1246765 - DNA, 15 bp, Homo sapiens
tataatgatgttgct

SEQ ID NO: 1246766 - DNA, 15 bp, Homo sapiens
ctataatgatgttgc

SEQ ID NO: 1246767 - DNA, 15 bp, Homo sapiens
actataatgatgttg

SEQ ID NO: 1246768 - DNA, 15 bp, Homo sapiens
gactataatgatgtt

SEQ ID NO: 1246769 - DNA, 15 bp, Homo sapiens
tgactataatgatgt

SEQ ID NO: 1246770 - DNA, 15 bp, Homo sapiens
atgactataatgatg

SEQ ID NO: 1246771 - DNA, 15 bp, Homo sapiens
aatgactataatgat

SEQ ID NO: 1246772 - DNA, 15 bp, Homo sapiens
gaatgactataatga

SEQ ID NO: 1246773 - DNA, 15 bp, Homo sapiens
ggaatgactataatg

SEQ ID NO: 1246774 - DNA, 15 bp, Homo sapiens
aggaatgactataat

SEQ ID NO: 1246775 - DNA, 15 bp, Homo sapiens
gaggccctctgtgga

SEQ ID NO: 1246776 - DNA, 15 bp, Homo sapiens
agaggccctctgtgg

SEQ ID NO: 1246777 - DNA, 15 bp, Homo sapiens
cagaggccctctgtg

SEQ ID NO: 1246778 - DNA, 15 bp, Homo sapiens
acagaggccctctgt

SEQ ID NO: 1246779 - DNA, 15 bp, Homo sapiens
aacagaggccctctg

SEQ ID NO: 1246780 - DNA, 15 bp, Homo sapiens
caacagaggccctct

SEQ ID NO: 1246781 - DNA, 15 bp, Homo sapiens
gcaacagaggccctc

SEQ ID NO: 1246782 - DNA, 15 bp, Homo sapiens
ggcaacagaggccct

SEQ ID NO: 1246783 - DNA, 15 bp, Homo sapiens
gggcaacagaggccc

SEQ ID NO: 1246784 - DNA, 15 bp, Homo sapiens
ggggcaacagaggcc

SEQ ID NO: 1246785 - DNA, 15 bp, Homo sapiens
tggggcaacagaggc

SEQ ID NO: 1246786 - DNA, 15 bp, Homo sapiens
ctggggcaacagagg

SEQ ID NO: 1246787 - DNA, 15 bp, Homo sapiens
gctggggcaacagag

SEQ ID NO: 1246788 - DNA, 15 bp, Homo sapiens
ggctggggcaacaga

SEQ ID NO: 1246789 - DNA, 15 bp, Homo sapiens
aggctggggcaacag

SEQ ID NO: 1246790 - DNA, 15 bp, Homo sapiens
caggctggggcaaca

SEQ ID NO: 1246791 - DNA, 15 bp, Homo sapiens
gcaggctggggcaac

SEQ ID NO: 1246792 - DNA, 15 bp, Homo sapiens
ggcaggctggggcaa

SEQ ID NO: 1246793 - DNA, 15 bp, Homo sapiens
gggcaggctggggca

SEQ ID NO: 1246794 - DNA, 15 bp, Homo sapiens
tgggcaggctggggc

SEQ ID NO: 1246795 - DNA, 15 bp, Homo sapiens
ttgggcaggctgggg

SEQ ID NO: 1246796 - DNA, 15 bp, Homo sapiens
cttgggcaggctggg

SEQ ID NO: 1246797 - DNA, 15 bp, Homo sapiens
acttgggcaggctgg

SEQ ID NO: 1246798 - DNA, 15 bp, Homo sapiens
gacttgggcaggctg

SEQ ID NO: 1246799 - DNA, 15 bp, Homo sapiens
tgacttgggcaggct

SEQ ID NO: 1246800 - DNA, 15 bp, Homo sapiens
atgacttgggcaggc

SEQ ID NO: 1246801 - DNA, 15 bp, Homo sapiens
aatgacttgggcagg

SEQ ID NO: 1246802 - DNA, 15 bp, Homo sapiens
gaatgacttgggcag

SEQ ID NO: 1246803 - DNA, 15 bp, Homo sapiens
tgaatgacttgggca

SEQ ID NO: 1246804 - DNA, 15 bp, Homo sapiens
atgaatgacttgggc

SEQ ID NO: 1246805 - DNA, 15 bp, Homo sapiens
aatgaatgacttggg

SEQ ID NO: 1246806 - DNA, 15 bp, Homo sapiens
taatgaatgacttgg

SEQ ID NO: 1246807 - DNA, 15 bp, Homo sapiens
ttaatgaatgacttg

SEQ ID NO: 1246808 - DNA, 15 bp, Homo sapiens
gttaatgaatgactt

SEQ ID NO: 1246809 - DNA, 15 bp, Homo sapiens
ggttaatgaatgact

SEQ ID NO: 1246810 - DNA, 15 bp, Homo sapiens
cggttaatgaatgac

SEQ ID NO: 1246811 - DNA, 15 bp, Homo sapiens
gcggttaatgaatga

SEQ ID NO: 1246812 - DNA, 15 bp, Homo sapiens
cgcggttaatgaatg

SEQ ID NO: 1246813 - DNA, 15 bp, Homo sapiens
ccgcggttaatgaat

SEQ ID NO: 1246814 - DNA, 15 bp, Homo sapiens
tccgcggttaatgaa

SEQ ID NO: 1246815 - DNA, 15 bp, Homo sapiens
ctccgcggttaatga

SEQ ID NO: 1246816 - DNA, 15 bp, Homo sapiens
gctccgcggttaatg

SEQ ID NO: 1246817 - DNA, 15 bp, Homo sapiens
ggctccgcggttaat

SEQ ID NO: 1246818 - DNA, 15 bp, Homo sapiens
gggctccgcggttaa

SEQ ID NO: 1246819 - DNA, 15 bp, Homo sapiens
tgggctccgcggtta

SEQ ID NO: 1246820 - DNA, 15 bp, Homo sapiens
ctgggctccgcggtt

SEQ ID NO: 1246821 - DNA, 15 bp, Homo sapiens
gctgggctccgcggt

SEQ ID NO: 1246822 - DNA, 15 bp, Homo sapiens
ggctgggctccgcgg

SEQ ID NO: 1246823 - DNA, 15 bp, Homo sapiens
cggctgggctccgcg

SEQ ID NO: 1246824 - DNA, 15 bp, Homo sapiens
gcggctgggctccgc

SEQ ID NO: 1246825 - DNA, 15 bp, Homo sapiens
ggcggctgggctccg

SEQ ID NO: 1246826 - DNA, 15 bp, Homo sapiens
gggcggctgggctcc

SEQ ID NO: 1246827 - DNA, 15 bp, Homo sapiens
cgggcggctgggctc

SEQ ID NO: 1246828 - DNA, 15 bp, Homo sapiens
gcgggcggctgggct

SEQ ID NO: 1246829 - DNA, 15 bp, Homo sapiens
ggcgggcggctgggc

SEQ ID NO: 1246830 - DNA, 15 bp, Homo sapiens
cggcgggcggctggg

SEQ ID NO: 1246831 - DNA, 15 bp, Homo sapiens
ccggcgggcggctgg

SEQ ID NO: 1246832 - DNA, 15 bp, Homo sapiens
tccggcgggcggctg

SEQ ID NO: 1246833 - DNA, 15 bp, Homo sapiens
ctccggcgggcggct

SEQ ID NO: 1246834 - DNA, 15 bp, Homo sapiens
tctccggcgggcggc

SEQ ID NO: 1246835 - DNA, 15 bp, Homo sapiens
ctctccggcgggcgg

SEQ ID NO: 1246836 - DNA, 15 bp, Homo sapiens
cctctccggcgggcg

SEQ ID NO: 1246837 - DNA, 15 bp, Homo sapiens
gcctctccggcgggc

SEQ ID NO: 1246838 - DNA, 15 bp, Homo sapiens
agcctctccggcggg

SEQ ID NO: 1246839 - DNA, 15 bp, Homo sapiens
cagcctctccggcgg

SEQ ID NO: 1246840 - DNA, 15 bp, Homo sapiens
acagcctctccggcg

SEQ ID NO: 1246841 - DNA, 15 bp, Homo sapiens
aacagcctctccggc

SEQ ID NO: 1246842 - DNA, 15 bp, Homo sapiens
taacagcctctccgg

SEQ ID NO: 1246843 - DNA, 15 bp, Homo sapiens
ttaacagcctctccg

SEQ ID NO: 1246844 - DNA, 15 bp, Homo sapiens
cttaacagcctctcc

SEQ ID NO: 1246845 - DNA, 15 bp, Homo sapiens
ccttaacagcctctc

SEQ ID NO: 1246846 - DNA, 15 bp, Homo sapiens
cccttaacagcctct

SEQ ID NO: 1246847 - DNA, 15 bp, Homo sapiens
ccccttaacagcctc

SEQ ID NO: 1246848 - DNA, 15 bp, Homo sapiens
gccccttaacagcct

SEQ ID NO: 1246849 - DNA, 15 bp, Homo sapiens
agccccttaacagcc

SEQ ID NO: 1246850 - DNA, 15 bp, Homo sapiens
gagccccttaacagc

SEQ ID NO: 1246851 - DNA, 15 bp, Homo sapiens
tgagccccttaacag

SEQ ID NO: 1246852 - DNA, 15 bp, Homo sapiens
gtgagccccttaaca

SEQ ID NO: 1246853 - DNA, 15 bp, Homo sapiens
tgtgagccccttaac

SEQ ID NO: 1246854 - DNA, 15 bp, Homo sapiens
ctgtgagccccttaa

SEQ ID NO: 1246855 - DNA, 15 bp, Homo sapiens
tctgtgagcccctta

SEQ ID NO: 1246856 - DNA, 15 bp, Homo sapiens
ctctgtgagcccctt

SEQ ID NO: 1246857 - DNA, 15 bp, Homo sapiens
cctctgtgagcccct

SEQ ID NO: 1246858 - DNA, 15 bp, Homo sapiens
gcctctgtgagcccc

SEQ ID NO: 1246859 - DNA, 15 bp, Homo sapiens
ggcctctgtgagccc

SEQ ID NO: 1246860 - DNA, 15 bp, Homo sapiens
tggcctctgtgagcc

SEQ ID NO: 1246861 - DNA, 15 bp, Homo sapiens
ctggcctctgtgagc

SEQ ID NO: 1246862 - DNA, 15 bp, Homo sapiens
gctggcctctgtgag

SEQ ID NO: 1246863 - DNA, 15 bp, Homo sapiens
ggctggcctctgtga

SEQ ID NO: 1246864 - DNA, 15 bp, Homo sapiens
gggctggcctctgtg

SEQ ID NO: 1246865 - DNA, 15 bp, Homo sapiens
tgggctggcctctgt

SEQ ID NO: 1246866 - DNA, 15 bp, Homo sapiens
gtgggctggcctctg

SEQ ID NO: 1246867 - DNA, 15 bp, Homo sapiens
ggtgggctggcctct

SEQ ID NO: 1246868 - DNA, 15 bp, Homo sapiens
cggtgggctggcctc

SEQ ID NO: 1246869 - DNA, 15 bp, Homo sapiens
ccggtgggctggcct

SEQ ID NO: 1246870 - DNA, 15 bp, Homo sapiens
gccggtgggctggcc

SEQ ID NO: 1246871 - DNA, 15 bp, Homo sapiens
ggccggtgggctggc

SEQ ID NO: 1246872 - DNA, 15 bp, Homo sapiens
cggccggtgggctgg

SEQ ID NO: 1246873 - DNA, 15 bp, Homo sapiens
tcggccggtgggctg

SEQ ID NO: 1246874 - DNA, 15 bp, Homo sapiens
ctcggccggtgggct

SEQ ID NO: 1246875 - DNA, 15 bp, Homo sapiens
cctcggccggtgggc

SEQ ID NO: 1246876 - DNA, 15 bp, Homo sapiens
acctcggccggtggg

SEQ ID NO: 1246877 - DNA, 15 bp, Homo sapiens
tacctcggccggtgg

SEQ ID NO: 1246878 - DNA, 15 bp, Homo sapiens
atacctcggccggtg

SEQ ID NO: 1246879 - DNA, 15 bp, Homo sapiens
aatacctcggccggt

SEQ ID NO: 1246880 - DNA, 15 bp, Homo sapiens
aaatacctcggccgg

SEQ ID NO: 1246881 - DNA, 15 bp, Homo sapiens
caaatacctcggccg

SEQ ID NO: 1246882 - DNA, 15 bp, Homo sapiens
ccaaatacctcggcc

SEQ ID NO: 1246883 - DNA, 15 bp, Homo sapiens
gccaaatacctcggc

SEQ ID NO: 1246884 - DNA, 15 bp, Homo sapiens
tgccaaatacctcgg

SEQ ID NO: 1246885 - DNA, 15 bp, Homo sapiens
ttgccaaatacctcg

SEQ ID NO: 1246886 - DNA, 15 bp, Homo sapiens
cttgccaaatacctc

SEQ ID NO: 1246887 - DNA, 15 bp, Homo sapiens
ccttgccaaatacct

SEQ ID NO: 1246888 - DNA, 15 bp, Homo sapiens
gccttgccaaatacc

SEQ ID NO: 1246889 - DNA, 15 bp, Homo sapiens
ggccttgccaaatac

SEQ ID NO: 1246890 - DNA, 15 bp, Homo sapiens
tggccttgccaaata

SEQ ID NO: 1246891 - DNA, 15 bp, Homo sapiens
atggccttgccaaat

SEQ ID NO: 1246892 - DNA, 15 bp, Homo sapiens
aatggccttgccaaa

SEQ ID NO: 1246893 - DNA, 15 bp, Homo sapiens
taatggccttgccaa

SEQ ID NO: 1246894 - DNA, 15 bp, Homo sapiens
ttaatggccttgcca

SEQ ID NO: 1246895 - DNA, 15 bp, Homo sapiens
attaatggccttgcc

SEQ ID NO: 1246896 - DNA, 15 bp, Homo sapiens
cattaatggccttgc

SEQ ID NO: 1246897 - DNA, 15 bp, Homo sapiens
tcattaatggccttg

SEQ ID NO: 1246898 - DNA, 15 bp, Homo sapiens
ctcattaatggcctt

SEQ ID NO: 1246899 - DNA, 15 bp, Homo sapiens
gctcattaatggcct

SEQ ID NO: 1246900 - DNA, 15 bp, Homo sapiens
agctcattaatggcc

SEQ ID NO: 1246901 - DNA, 15 bp, Homo sapiens
tagctcattaatggc

SEQ ID NO: 1246902 - DNA, 15 bp, Homo sapiens
ttagctcattaatgg

SEQ ID NO: 1246903 - DNA, 15 bp, Homo sapiens
attagctcattaatg

SEQ ID NO: 1246904 - DNA, 15 bp, Homo sapiens
gattagctcattaat

SEQ ID NO: 1246905 - DNA, 15 bp, Homo sapiens
agattagctcattaa

SEQ ID NO: 1246906 - DNA, 15 bp, Homo sapiens
cagattagctcatta

SEQ ID NO: 1246907 - DNA, 15 bp, Homo sapiens
tcagattagctcatt

SEQ ID NO: 1246908 - DNA, 15 bp, Homo sapiens
atcagattagctcat

SEQ ID NO: 1246909 - DNA, 15 bp, Homo sapiens
aatcagattagctca

SEQ ID NO: 1246910 - DNA, 15 bp, Homo sapiens
aaatcagattagctc

SEQ ID NO: 1246911 - DNA, 15 bp, Homo sapiens
taaatcagattagct

SEQ ID NO: 1246912 - DNA, 15 bp, Homo sapiens
ttaaatcagattagc

SEQ ID NO: 1246913 - DNA, 15 bp, Homo sapiens
gttaaatcagattag

SEQ ID NO: 1246914 - DNA, 15 bp, Homo sapiens
agttaaatcagatta

SEQ ID NO: 1246915 - DNA, 15 bp, Homo sapiens
aagttaaatcagatt

SEQ ID NO: 1246916 - DNA, 15 bp, Homo sapiens
aaagttaaatcagat

SEQ ID NO: 1246917 - DNA, 15 bp, Homo sapiens
aaaagttaaatcaga

SEQ ID NO: 1246918 - DNA, 15 bp, Homo sapiens
gaaaagttaaatcag

SEQ ID NO: 1246919 - DNA, 15 bp, Homo sapiens
tgaaaagttaaatca

SEQ ID NO: 1246920 - DNA, 15 bp, Homo sapiens
ttgaaaagttaaatc

SEQ ID NO: 1246921 - DNA, 15 bp, Homo sapiens
tttgaaaagttaaat

SEQ ID NO: 1246922 - DNA, 15 bp, Homo sapiens
ttttgaaaagttaaa

SEQ ID NO: 1246923 - DNA, 15 bp, Homo sapiens
gttttgaaaagttaa

SEQ ID NO: 1246924 - DNA, 15 bp, Homo sapiens
cgttttgaaaagtta

SEQ ID NO: 1246925 - DNA, 15 bp, Homo sapiens
ccgttttgaaaagtt

SEQ ID NO: 1246926 - DNA, 15 bp, Homo sapiens
tccgttttgaaaagt

SEQ ID NO: 1246927 - DNA, 15 bp, Homo sapiens
ctccgttttgaaaag

SEQ ID NO: 1246928 - DNA, 15 bp, Homo sapiens
cctccgttttgaaaa

SEQ ID NO: 1246929 - DNA, 15 bp, Homo sapiens
gcctccgttttgaaa

SEQ ID NO: 1246930 - DNA, 15 bp, Homo sapiens
ggcctccgttttgaa

SEQ ID NO: 1246931 - DNA, 15 bp, Homo sapiens
aggcctccgttttga

SEQ ID NO: 1246932 - DNA, 15 bp, Homo sapiens
caggcctccgttttg

SEQ ID NO: 1246933 - DNA, 15 bp, Homo sapiens
ccaggcctccgtttt

SEQ ID NO: 1246934 - DNA, 15 bp, Homo sapiens
cccaggcctccgttt

SEQ ID NO: 1246935 - DNA, 15 bp, Homo sapiens
acccaggcctccgtt

SEQ ID NO: 1246936 - DNA, 15 bp, Homo sapiens
gacccaggcctccgt

SEQ ID NO: 1246937 - DNA, 15 bp, Homo sapiens
cgacccaggcctccg

SEQ ID NO: 1246938 - DNA, 15 bp, Homo sapiens
gcgacccaggcctcc

SEQ ID NO: 1246939 - DNA, 15 bp, Homo sapiens
agcgacccaggcctc

SEQ ID NO: 1246940 - DNA, 15 bp, Homo sapiens
cagcgacccaggcct

SEQ ID NO: 1246941 - DNA, 15 bp, Homo sapiens
ccagcgacccaggcc

SEQ ID NO: 1246942 - DNA, 15 bp, Homo sapiens
cccagcgacccaggc

SEQ ID NO: 1246943 - DNA, 15 bp, Homo sapiens
ccccagcgacccagg

SEQ ID NO: 1246944 - DNA, 15 bp, Homo sapiens
accccagcgacccag

SEQ ID NO: 1246945 - DNA, 15 bp, Homo sapiens
gaccccagcgaccca

SEQ ID NO: 1246946 - DNA, 15 bp, Homo sapiens
tgaccccagcgaccc

SEQ ID NO: 1246947 - DNA, 15 bp, Homo sapiens
ctgaccccagcgacc

SEQ ID NO: 1246948 - DNA, 15 bp, Homo sapiens
actgaccccagcgac

SEQ ID NO: 1246949 - DNA, 15 bp, Homo sapiens
gactgaccccagcga

SEQ ID NO: 1246950 - DNA, 15 bp, Homo sapiens
agactgaccccagcg

SEQ ID NO: 1246951 - DNA, 15 bp, Homo sapiens
gagactgaccccagc

SEQ ID NO: 1246952 - DNA, 15 bp, Homo sapiens
agagactgaccccag

SEQ ID NO: 1246953 - DNA, 15 bp, Homo sapiens
tagagactgacccca

SEQ ID NO: 1246954 - DNA, 15 bp, Homo sapiens
atagagactgacccc

SEQ ID NO: 1246955 - DNA, 15 bp, Homo sapiens
aatagagactgaccc

SEQ ID NO: 1246956 - DNA, 15 bp, Homo sapiens
aaatagagactgacc

SEQ ID NO: 1246957 - DNA, 15 bp, Homo sapiens
gaaatagagactgac

SEQ ID NO: 1246958 - DNA, 15 bp, Homo sapiens
ggaaatagagactga

SEQ ID NO: 1246959 - DNA, 15 bp, Homo sapiens
tggaaatagagactg

SEQ ID NO: 1246960 - DNA, 15 bp, Homo sapiens
ctggaaatagagact

SEQ ID NO: 1246961 - DNA, 15 bp, Homo sapiens
gctggaaatagagac

SEQ ID NO: 1246962 - DNA, 15 bp, Homo sapiens
agctggaaatagaga

SEQ ID NO: 1246963 - DNA, 15 bp, Homo sapiens
aagctggaaatagag

SEQ ID NO: 1246964 - DNA, 15 bp, Homo sapiens
aaagctggaaataga

SEQ ID NO: 1246965 - DNA, 15 bp, Homo sapiens
caaagctggaaatag

SEQ ID NO: 1246966 - DNA, 15 bp, Homo sapiens
acaaagctggaaata

SEQ ID NO: 1246967 - DNA, 15 bp, Homo sapiens
cacaaagctggaaat

SEQ ID NO: 1246968 - DNA, 15 bp, Homo sapiens
tcacaaagctggaaa

SEQ ID NO: 1246969 - DNA, 15 bp, Homo sapiens
ctcacaaagctggaa

SEQ ID NO: 1246970 - DNA, 15 bp, Homo sapiens
tctcacaaagctgga

SEQ ID NO: 1246971 - DNA, 15 bp, Homo sapiens
ctctcacaaagctgg

SEQ ID NO: 1246972 - DNA, 15 bp, Homo sapiens
tctctcacaaagctg

SEQ ID NO: 1246973 - DNA, 15 bp, Homo sapiens
ctctctcacaaagct

SEQ ID NO: 1246974 - DNA, 15 bp, Homo sapiens
tctctctcacaaagc

SEQ ID NO: 1246975 - DNA, 15 bp, Homo sapiens
gtctctctcacaaag

SEQ ID NO: 1246976 - DNA, 15 bp, Homo sapiens
ggtctctctcacaaa

SEQ ID NO: 1246977 - DNA, 15 bp, Homo sapiens
cggtctctctcacaa

SEQ ID NO: 1246978 - DNA, 15 bp, Homo sapiens
ccggtctctctcaca

SEQ ID NO: 1246979 - DNA, 15 bp, Homo sapiens
cccggtctctctcac

SEQ ID NO: 1246980 - DNA, 15 bp, Homo sapiens
acccggtctctctca

SEQ ID NO: 1246981 - DNA, 15 bp, Homo sapiens
tacccggtctctctc

SEQ ID NO: 1246982 - DNA, 15 bp, Homo sapiens
ctacccggtctctct

SEQ ID NO: 1246983 - DNA, 15 bp, Homo sapiens
cctacccggtctctc

SEQ ID NO: 1246984 - DNA, 15 bp, Homo sapiens
ccctacccggtctct

SEQ ID NO: 1246985 - DNA, 15 bp, Homo sapiens
cccctacccggtctc

SEQ ID NO: 1246986 - DNA, 15 bp, Homo sapiens
ccccctacccggtct

SEQ ID NO: 1246987 - DNA, 15 bp, Homo sapiens
tccccctacccggtc

SEQ ID NO: 1246988 - DNA, 15 bp, Homo sapiens
ttccccctacccggt

SEQ ID NO: 1246989 - DNA, 15 bp, Homo sapiens
cttccccctacccgg

SEQ ID NO: 1246990 - DNA, 15 bp, Homo sapiens
ccttccccctacccg

SEQ ID NO: 1246991 - DNA, 15 bp, Homo sapiens
cccttccccctaccc

SEQ ID NO: 1246992 - DNA, 15 bp, Homo sapiens
tcccttccccctacc

SEQ ID NO: 1246993 - DNA, 15 bp, Homo sapiens
gtcccttccccctac

SEQ ID NO: 1246994 - DNA, 15 bp, Homo sapiens
ggtcccttcccccta

SEQ ID NO: 1246995 - DNA, 15 bp, Homo sapiens
aggtcccttccccct

SEQ ID NO: 1246996 - DNA, 15 bp, Homo sapiens
caggtcccttccccc

SEQ ID NO: 1246997 - DNA, 15 bp, Homo sapiens
gcaggtcccttcccc

SEQ ID NO: 1246998 - DNA, 15 bp, Homo sapiens
tgcaggtcccttccc

SEQ ID NO: 1246999 - DNA, 15 bp, Homo sapiens
ctgcaggtcccttcc

SEQ ID NO: 1247000 - DNA, 15 bp, Homo sapiens
gctgcaggtcccttc

SEQ ID NO: 1247001 - DNA, 15 bp, Homo sapiens
ggctgcaggtccctt

SEQ ID NO: 1247002 - DNA, 15 bp, Homo sapiens
aggctgcaggtccct

SEQ ID NO: 1247003 - DNA, 15 bp, Homo sapiens
aaggctgcaggtccc

SEQ ID NO: 1247004 - DNA, 15 bp, Homo sapiens
gaaggctgcaggtcc

SEQ ID NO: 1247005 - DNA, 15 bp, Homo sapiens
tgaaggctgcaggtc

SEQ ID NO: 1247006 - DNA, 15 bp, Homo sapiens
gtgaaggctgcaggt

SEQ ID NO: 1247007 - DNA, 15 bp, Homo sapiens
agtgaaggctgcagg

SEQ ID NO: 1247008 - DNA, 15 bp, Homo sapiens
tagtgaaggctgcag

SEQ ID NO: 1247009 - DNA, 15 bp, Homo sapiens
ttagtgaaggctgca

SEQ ID NO: 1247010 - DNA, 15 bp, Homo sapiens
tttagtgaaggctgc

SEQ ID NO: 1247011 - DNA, 15 bp, Homo sapiens
ctttagtgaaggctg

SEQ ID NO: 1247012 - DNA, 15 bp, Homo sapiens
tctttagtgaaggct

SEQ ID NO: 1247013 - DNA, 15 bp, Homo sapiens
ttctttagtgaaggc

SEQ ID NO: 1247014 - DNA, 15 bp, Homo sapiens
tttctttagtgaagg

SEQ ID NO: 1247015 - DNA, 15 bp, Homo sapiens
ttttctttagtgaag

SEQ ID NO: 1247016 - DNA, 15 bp, Homo sapiens
attttctttagtgaa

SEQ ID NO: 1247017 - DNA, 15 bp, Homo sapiens
tattttctttagtga

SEQ ID NO: 1247018 - DNA, 15 bp, Homo sapiens
ttattttctttagtg

SEQ ID NO: 1247019 - DNA, 15 bp, Homo sapiens
cttattttctttagt

SEQ ID NO: 1247020 - DNA, 15 bp, Homo sapiens
ccttattttctttag

SEQ ID NO: 1247021 - DNA, 15 bp, Homo sapiens
cccttattttcttta

SEQ ID NO: 1247022 - DNA, 15 bp, Homo sapiens
ccccttattttcttt

SEQ ID NO: 1247023 - DNA, 15 bp, Homo sapiens
accccttattttctt

SEQ ID NO: 1247024 - DNA, 15 bp, Homo sapiens
taccccttattttct

SEQ ID NO: 1247025 - DNA, 15 bp, Homo sapiens
ataccccttattttc

SEQ ID NO: 1247026 - DNA, 15 bp, Homo sapiens
cataccccttatttt

SEQ ID NO: 1247027 - DNA, 15 bp, Homo sapiens
acataccccttattt

SEQ ID NO: 1247028 - DNA, 15 bp, Homo sapiens
cacataccccttatt

SEQ ID NO: 1247029 - DNA, 15 bp, Homo sapiens
tcacataccccttat

SEQ ID NO: 1247030 - DNA, 15 bp, Homo sapiens
ttcacatacccctta

SEQ ID NO: 1247031 - DNA, 15 bp, Homo sapiens
cttcacatacccctt

SEQ ID NO: 1247032 - DNA, 15 bp, Homo sapiens
tcttcacatacccct

SEQ ID NO: 1247033 - DNA, 15 bp, Homo sapiens
ctcttcacatacccc

SEQ ID NO: 1247034 - DNA, 15 bp, Homo sapiens
tctcttcacataccc

SEQ ID NO: 1247035 - DNA, 15 bp, Homo sapiens
ttctcttcacatacc

SEQ ID NO: 1247036 - DNA, 15 bp, Homo sapiens
gttctcttcacatac

SEQ ID NO: 1247037 - DNA, 15 bp, Homo sapiens
agttctcttcacata

SEQ ID NO: 1247038 - DNA, 15 bp, Homo sapiens
aagttctcttcacat

SEQ ID NO: 1247039 - DNA, 15 bp, Homo sapiens
taagttctcttcaca

SEQ ID NO: 1247040 - DNA, 15 bp, Homo sapiens
ctaagttctcttcac

SEQ ID NO: 1247041 - DNA, 15 bp, Homo sapiens
cctaagttctcttca

SEQ ID NO: 1247042 - DNA, 15 bp, Homo sapiens
acctaagttctcttc

SEQ ID NO: 1247043 - DNA, 15 bp, Homo sapiens
aacctaagttctctt

SEQ ID NO: 1247044 - DNA, 15 bp, Homo sapiens
taacctaagttctct

SEQ ID NO: 1247045 - DNA, 15 bp, Homo sapiens
ttaacctaagttctc

SEQ ID NO: 1247046 - DNA, 15 bp, Homo sapiens
tttaacctaagttct

SEQ ID NO: 1247047 - DNA, 15 bp, Homo sapiens
ttttaacctaagttc

SEQ ID NO: 1247048 - DNA, 15 bp, Homo sapiens
tttttaacctaagtt

SEQ ID NO: 1247049 - DNA, 15 bp, Homo sapiens
ctttttaacctaagt

SEQ ID NO: 1247050 - DNA, 15 bp, Homo sapiens
actttttaacctaag

SEQ ID NO: 1247051 - DNA, 15 bp, Homo sapiens
cactttttaacctaa

SEQ ID NO: 1247052 - DNA, 15 bp, Homo sapiens
tcactttttaaccta

SEQ ID NO: 1247053 - DNA, 15 bp, Homo sapiens
gtcactttttaacct

SEQ ID NO: 1247054 - DNA, 15 bp, Homo sapiens
agtcactttttaacc

SEQ ID NO: 1247055 - DNA, 15 bp, Homo sapiens
tagtcactttttaac

SEQ ID NO: 1247056 - DNA, 15 bp, Homo sapiens
atagtcactttttaa

SEQ ID NO: 1247057 - DNA, 15 bp, Homo sapiens
gatagtcacttttta

SEQ ID NO: 1247058 - DNA, 15 bp, Homo sapiens
ggatagtcacttttt

SEQ ID NO: 1247059 - DNA, 15 bp, Homo sapiens
gggatagtcactttt

SEQ ID NO: 1247060 - DNA, 15 bp, Homo sapiens
agggatagtcacttt

SEQ ID NO: 1247061 - DNA, 15 bp, Homo sapiens
tagggatagtcactt

SEQ ID NO: 1247062 - DNA, 15 bp, Homo sapiens
ttagggatagtcact

SEQ ID NO: 1247063 - DNA, 15 bp, Homo sapiens
tttagggatagtcac

SEQ ID NO: 1247064 - DNA, 15 bp, Homo sapiens
atttagggatagtca

SEQ ID NO: 1247065 - DNA, 15 bp, Homo sapiens
gatttagggatagtc

SEQ ID NO: 1247066 - DNA, 15 bp, Homo sapiens
ggatttagggatagt

SEQ ID NO: 1247067 - DNA, 15 bp, Homo sapiens
tggatttagggatag

SEQ ID NO: 1247068 - DNA, 15 bp, Homo sapiens
ctggatttagggata

SEQ ID NO: 1247069 - DNA, 15 bp, Homo sapiens
cctggatttagggat

SEQ ID NO: 1247070 - DNA, 15 bp, Homo sapiens
ccctggatttaggga

SEQ ID NO: 1247071 - DNA, 15 bp, Homo sapiens
tccctggatttaggg

SEQ ID NO: 1247072 - DNA, 15 bp, Homo sapiens
atccctggatttagg

SEQ ID NO: 1247073 - DNA, 15 bp, Homo sapiens
catccctggatttag

SEQ ID NO: 1247074 - DNA, 15 bp, Homo sapiens
gcatccctggattta

SEQ ID NO: 1247075 - DNA, 15 bp, Homo sapiens
agcatccctggattt

SEQ ID NO: 1247076 - DNA, 15 bp, Homo sapiens
gagcatccctggatt

SEQ ID NO: 1247077 - DNA, 15 bp, Homo sapiens
tgagcatccctggat

SEQ ID NO: 1247078 - DNA, 15 bp, Homo sapiens
ctgagcatccctgga

SEQ ID NO: 1247079 - DNA, 15 bp, Homo sapiens
cctgagcatccctgg

SEQ ID NO: 1247080 - DNA, 15 bp, Homo sapiens
tcctgagcatccctg

SEQ ID NO: 1247081 - DNA, 15 bp, Homo sapiens
atcctgagcatccct

SEQ ID NO: 1247082 - DNA, 15 bp, Homo sapiens
catcctgagcatccc

SEQ ID NO: 1247083 - DNA, 15 bp, Homo sapiens
ccatcctgagcatcc

SEQ ID NO: 1247084 - DNA, 15 bp, Homo sapiens
cccatcctgagcatc

SEQ ID NO: 1247085 - DNA, 15 bp, Homo sapiens
ccccatcctgagcat

SEQ ID NO: 1247086 - DNA, 15 bp, Homo sapiens
gccccatcctgagca

SEQ ID NO: 1247087 - DNA, 15 bp, Homo sapiens
tgccccatcctgagc

SEQ ID NO: 1247088 - DNA, 15 bp, Homo sapiens
ctgccccatcctgag

SEQ ID NO: 1247089 - DNA, 15 bp, Homo sapiens
tctgccccatcctga

SEQ ID NO: 1247090 - DNA, 15 bp, Homo sapiens
gtctgccccatcctg

SEQ ID NO: 1247091 - DNA, 15 bp, Homo sapiens
agtctgccccatcct

SEQ ID NO: 1247092 - DNA, 15 bp, Homo sapiens
gagtctgccccatcc

SEQ ID NO: 1247093 - DNA, 15 bp, Homo sapiens
tgagtctgccccatc

SEQ ID NO: 1247094 - DNA, 15 bp, Homo sapiens
ttgagtctgccccat

SEQ ID NO: 1247095 - DNA, 15 bp, Homo sapiens
cttgagtctgcccca

SEQ ID NO: 1247096 - DNA, 15 bp, Homo sapiens
ccttgagtctgcccc

SEQ ID NO: 1247097 - DNA, 15 bp, Homo sapiens
gccttgagtctgccc

SEQ ID NO: 1247098 - DNA, 15 bp, Homo sapiens
agccttgagtctgcc

SEQ ID NO: 1247099 - DNA, 15 bp, Homo sapiens
cagccttgagtctgc

SEQ ID NO: 1247100 - DNA, 15 bp, Homo sapiens
acagccttgagtctg

SEQ ID NO: 1247101 - DNA, 15 bp, Homo sapiens
gacagccttgagtct

SEQ ID NO: 1247102 - DNA, 15 bp, Homo sapiens
ggacagccttgagtc

SEQ ID NO: 1247103 - DNA, 15 bp, Homo sapiens
aggacagccttgagt

SEQ ID NO: 1247104 - DNA, 15 bp, Homo sapiens
taggacagccttgag

SEQ ID NO: 1247105 - DNA, 15 bp, Homo sapiens
ctaggacagccttga

SEQ ID NO: 1247106 - DNA, 15 bp, Homo sapiens
cctaggacagccttg

SEQ ID NO: 1247107 - DNA, 15 bp, Homo sapiens
ccctaggacagcctt

SEQ ID NO: 1247108 - DNA, 15 bp, Homo sapiens
tccctaggacagcct

SEQ ID NO: 1247109 - DNA, 15 bp, Homo sapiens
atccctaggacagcc

SEQ ID NO: 1247110 - DNA, 15 bp, Homo sapiens
gatccctaggacagc

SEQ ID NO: 1247111 - DNA, 15 bp, Homo sapiens
agatccctaggacag

SEQ ID NO: 1247112 - DNA, 15 bp, Homo sapiens
aagatccctaggaca

SEQ ID NO: 1247113 - DNA, 15 bp, Homo sapiens
gaagatccctaggac

SEQ ID NO: 1247114 - DNA, 15 bp, Homo sapiens
agaagatccctagga

SEQ ID NO: 1247115 - DNA, 15 bp, Homo sapiens
aagaagatccctagg

SEQ ID NO: 1247116 - DNA, 15 bp, Homo sapiens
gaagaagatccctag

SEQ ID NO: 1247117 - DNA, 15 bp, Homo sapiens
tgaagaagatcccta

SEQ ID NO: 1247118 - DNA, 15 bp, Homo sapiens
ttgaagaagatccct

SEQ ID NO: 1247119 - DNA, 15 bp, Homo sapiens
cttgaagaagatccc

SEQ ID NO: 1247120 - DNA, 15 bp, Homo sapiens
gcttgaagaagatcc

SEQ ID NO: 1247121 - DNA, 15 bp, Homo sapiens
tgcttgaagaagatc

SEQ ID NO: 1247122 - DNA, 15 bp, Homo sapiens
gtgcttgaagaagat

SEQ ID NO: 1247123 - DNA, 15 bp, Homo sapiens
ggtgcttgaagaaga

SEQ ID NO: 1247124 - DNA, 15 bp, Homo sapiens
aggtgcttgaagaag

SEQ ID NO: 1247125 - DNA, 15 bp, Homo sapiens
aaggtgcttgaagaa

SEQ ID NO: 1247126 - DNA, 15 bp, Homo sapiens
aaaggtgcttgaaga

SEQ ID NO: 1247127 - DNA, 15 bp, Homo sapiens
taaaggtgcttgaag

SEQ ID NO: 1247128 - DNA, 15 bp, Homo sapiens
ctaaaggtgcttgaa

SEQ ID NO: 1247129 - DNA, 15 bp, Homo sapiens
tctaaaggtgcttga

SEQ ID NO: 1247130 - DNA, 15 bp, Homo sapiens
ctctaaaggtgcttg

SEQ ID NO: 1247131 - DNA, 15 bp, Homo sapiens
gctctaaaggtgctt

SEQ ID NO: 1247132 - DNA, 15 bp, Homo sapiens
ggctctaaaggtgct

SEQ ID NO: 1247133 - DNA, 15 bp, Homo sapiens
aggctctaaaggtgc

SEQ ID NO: 1247134 - DNA, 15 bp, Homo sapiens
aaggctctaaaggtg

SEQ ID NO: 1247135 - DNA, 15 bp, Homo sapiens
taaggctctaaaggt

SEQ ID NO: 1247136 - DNA, 15 bp, Homo sapiens
ctaaggctctaaagg

SEQ ID NO: 1247137 - DNA, 15 bp, Homo sapiens
actaaggctctaaag

SEQ ID NO: 1247138 - DNA, 15 bp, Homo sapiens
aactaaggctctaaa

SEQ ID NO: 1247139 - DNA, 15 bp, Homo sapiens
aaactaaggctctaa

SEQ ID NO: 1247140 - DNA, 15 bp, Homo sapiens
caaactaaggctcta

SEQ ID NO: 1247141 - DNA, 15 bp, Homo sapiens
acaaactaaggctct

SEQ ID NO: 1247142 - DNA, 15 bp, Homo sapiens
gacaaactaaggctc

SEQ ID NO: 1247143 - DNA, 15 bp, Homo sapiens
tgacaaactaaggct

SEQ ID NO: 1247144 - DNA, 15 bp, Homo sapiens
gtgacaaactaaggc

SEQ ID NO: 1247145 - DNA, 15 bp, Homo sapiens
cgtgacaaactaagg

SEQ ID NO: 1247146 - DNA, 15 bp, Homo sapiens
gcgtgacaaactaag

SEQ ID NO: 1247147 - DNA, 15 bp, Homo sapiens
agcgtgacaaactaa

SEQ ID NO: 1247148 - DNA, 15 bp, Homo sapiens
aagcgtgacaaacta

SEQ ID NO: 1247149 - DNA, 15 bp, Homo sapiens
gaagcgtgacaaact

SEQ ID NO: 1247150 - DNA, 15 bp, Homo sapiens
ggaagcgtgacaaac

SEQ ID NO: 1247151 - DNA, 15 bp, Homo sapiens
aggaagcgtgacaaa

SEQ ID NO: 1247152 - DNA, 15 bp, Homo sapiens
aaggaagcgtgacaa

SEQ ID NO: 1247153 - DNA, 15 bp, Homo sapiens
aaaggaagcgtgaca

SEQ ID NO: 1247154 - DNA, 15 bp, Homo sapiens
gaaaggaagcgtgac

SEQ ID NO: 1247155 - DNA, 15 bp, Homo sapiens
ggaaaggaagcgtga

SEQ ID NO: 1247156 - DNA, 15 bp, Homo sapiens
aggaaaggaagcgtg

SEQ ID NO: 1247157 - DNA, 15 bp, Homo sapiens
aaggaaaggaagcgt

SEQ ID NO: 1247158 - DNA, 15 bp, Homo sapiens
gaaggaaaggaagcg

SEQ ID NO: 1247159 - DNA, 15 bp, Homo sapiens
agaaggaaaggaagc

SEQ ID NO: 1247160 - DNA, 15 bp, Homo sapiens
gagaaggaaaggaag

SEQ ID NO: 1247161 - DNA, 15 bp, Homo sapiens
tgagaaggaaaggaa

SEQ ID NO: 1247162 - DNA, 15 bp, Homo sapiens
ttgagaaggaaagga

SEQ ID NO: 1247163 - DNA, 15 bp, Homo sapiens
cttgagaaggaaagg

SEQ ID NO: 1247164 - DNA, 15 bp, Homo sapiens
ccttgagaaggaaag

SEQ ID NO: 1247165 - DNA, 15 bp, Homo sapiens
accttgagaaggaaa

SEQ ID NO: 1247166 - DNA, 15 bp, Homo sapiens
caccttgagaaggaa

SEQ ID NO: 1247167 - DNA, 15 bp, Homo sapiens
ccaccttgagaagga

SEQ ID NO: 1247168 - DNA, 15 bp, Homo sapiens
cccaccttgagaagg

SEQ ID NO: 1247169 - DNA, 15 bp, Homo sapiens
tcccaccttgagaag

SEQ ID NO: 1247170 - DNA, 15 bp, Homo sapiens
ctcccaccttgagaa

SEQ ID NO: 1247171 - DNA, 15 bp, Homo sapiens
tctcccaccttgaga

SEQ ID NO: 1247172 - DNA, 15 bp, Homo sapiens
ttctcccaccttgag

SEQ ID NO: 1247173 - DNA, 15 bp, Homo sapiens
tttctcccaccttga

SEQ ID NO: 1247174 - DNA, 15 bp, Homo sapiens
ttttctcccaccttg

SEQ ID NO: 1247175 - DNA, 15 bp, Homo sapiens
cttttctcccacctt

SEQ ID NO: 1247176 - DNA, 15 bp, Homo sapiens
ccttttctcccacct

SEQ ID NO: 1247177 - DNA, 15 bp, Homo sapiens
tccttttctcccacc

SEQ ID NO: 1247178 - DNA, 15 bp, Homo sapiens
ttccttttctcccac

SEQ ID NO: 1247179 - DNA, 15 bp, Homo sapiens
attccttttctccca

SEQ ID NO: 1247180 - DNA, 15 bp, Homo sapiens
gattccttttctccc

SEQ ID NO: 1247181 - DNA, 15 bp, Homo sapiens
agattccttttctcc

SEQ ID NO: 1247182 - DNA, 15 bp, Homo sapiens
tagattccttttctc

SEQ ID NO: 1247183 - DNA, 15 bp, Homo sapiens
ttagattccttttct

SEQ ID NO: 1247184 - DNA, 15 bp, Homo sapiens
tttagattccttttc

SEQ ID NO: 1247185 - DNA, 15 bp, Homo sapiens
ttttagattcctttt

SEQ ID NO: 1247186 - DNA, 15 bp, Homo sapiens
attttagattccttt

SEQ ID NO: 1247187 - DNA, 15 bp, Homo sapiens
aattttagattcctt

SEQ ID NO: 1247188 - DNA, 15 bp, Homo sapiens
aaattttagattcct

SEQ ID NO: 1247189 - DNA, 15 bp, Homo sapiens
taaattttagattcc

SEQ ID NO: 1247190 - DNA, 15 bp, Homo sapiens
ttaaattttagattc

SEQ ID NO: 1247191 - DNA, 15 bp, Homo sapiens
tttaaattttagatt

SEQ ID NO: 1247192 - DNA, 15 bp, Homo sapiens
ttttaaattttagat

SEQ ID NO: 1247193 - DNA, 15 bp, Homo sapiens
cttttaaattttaga

SEQ ID NO: 1247194 - DNA, 15 bp, Homo sapiens
gcttttaaattttag

SEQ ID NO: 1247195 - DNA, 15 bp, Homo sapiens
tgcttttaaatttta

SEQ ID NO: 1247196 - DNA, 15 bp, Homo sapiens
gtgcttttaaatttt

SEQ ID NO: 1247197 - DNA, 15 bp, Homo sapiens
ggtgcttttaaattt

SEQ ID NO: 1247198 - DNA, 15 bp, Homo sapiens
gggtgcttttaaatt

SEQ ID NO: 1247199 - DNA, 15 bp, Homo sapiens
ggggtgcttttaaat

SEQ ID NO: 1247200 - DNA, 15 bp, Homo sapiens
aggggtgcttttaaa

SEQ ID NO: 1247201 - DNA, 15 bp, Homo sapiens
aaggggtgcttttaa

SEQ ID NO: 1247202 - DNA, 15 bp, Homo sapiens
gaaggggtgctttta

SEQ ID NO: 1247203 - DNA, 15 bp, Homo sapiens
tgaaggggtgctttt

SEQ ID NO: 1247204 - DNA, 15 bp, Homo sapiens
gtgaaggggtgcttt

SEQ ID NO: 1247205 - DNA, 15 bp, Homo sapiens
ggtgaaggggtgctt

SEQ ID NO: 1247206 - DNA, 15 bp, Homo sapiens
tggtgaaggggtgct

SEQ ID NO: 1247207 - DNA, 15 bp, Homo sapiens
gtggtgaaggggtgc

SEQ ID NO: 1247208 - DNA, 15 bp, Homo sapiens
ggtggtgaaggggtg

SEQ ID NO: 1247209 - DNA, 15 bp, Homo sapiens
tggtggtgaaggggt

SEQ ID NO: 1247210 - DNA, 15 bp, Homo sapiens
gtggtggtgaagggg

SEQ ID NO: 1247211 - DNA, 15 bp, Homo sapiens
ggtggtggtgaaggg

SEQ ID NO: 1247212 - DNA, 15 bp, Homo sapiens
tggtggtggtgaagg

SEQ ID NO: 1247213 - DNA, 15 bp, Homo sapiens
gtggtggtggtgaag

SEQ ID NO: 1247214 - DNA, 15 bp, Homo sapiens
tgtggtggtggtgaa

SEQ ID NO: 1247215 - DNA, 15 bp, Homo sapiens
gtgtggtggtggtga

SEQ ID NO: 1247216 - DNA, 15 bp, Homo sapiens
ggtgtggtggtggtg

SEQ ID NO: 1247217 - DNA, 15 bp, Homo sapiens
aggtgtggtggtggt

SEQ ID NO: 1247218 - DNA, 15 bp, Homo sapiens
aaggtgtggtggtgg

SEQ ID NO: 1247219 - DNA, 15 bp, Homo sapiens
aaaggtgtggtggtg

SEQ ID NO: 1247220 - DNA, 15 bp, Homo sapiens
taaaggtgtggtggt

SEQ ID NO: 1247221 - DNA, 15 bp, Homo sapiens
ataaaggtgtggtgg

SEQ ID NO: 1247222 - DNA, 15 bp, Homo sapiens
aataaaggtgtggtg

SEQ ID NO: 1247223 - DNA, 15 bp, Homo sapiens
gaataaaggtgtggt

SEQ ID NO: 1247224 - DNA, 15 bp, Homo sapiens
agaataaaggtgtgg

SEQ ID NO: 1247225 - DNA, 15 bp, Homo sapiens
tagaataaaggtgtg

SEQ ID NO: 1247226 - DNA, 15 bp, Homo sapiens
ttagaataaaggtgt

SEQ ID NO: 1247227 - DNA, 15 bp, Homo sapiens
cttagaataaaggtg

SEQ ID NO: 1247228 - DNA, 15 bp, Homo sapiens
gcttagaataaaggt

SEQ ID NO: 1247229 - DNA, 15 bp, Homo sapiens
ggcttagaataaagg

SEQ ID NO: 1247230 - DNA, 15 bp, Homo sapiens
gggcttagaataaag

SEQ ID NO: 1247231 - DNA, 15 bp, Homo sapiens
tgggcttagaataaa

SEQ ID NO: 1247232 - DNA, 15 bp, Homo sapiens
ctgggcttagaataa

SEQ ID NO: 1247233 - DNA, 15 bp, Homo sapiens
gctgggcttagaata

SEQ ID NO: 1247234 - DNA, 15 bp, Homo sapiens
tgctgggcttagaat

SEQ ID NO: 1247235 - DNA, 15 bp, Homo sapiens
atgctgggcttagaa

SEQ ID NO: 1247236 - DNA, 15 bp, Homo sapiens
aatgctgggcttaga

SEQ ID NO: 1247237 - DNA, 15 bp, Homo sapiens
caatgctgggcttag

SEQ ID NO: 1247238 - DNA, 15 bp, Homo sapiens
gcaatgctgggctta

SEQ ID NO: 1247239 - DNA, 15 bp, Homo sapiens
agcaatgctgggctt

SEQ ID NO: 1247240 - DNA, 15 bp, Homo sapiens
aagcaatgctgggct

SEQ ID NO: 1247241 - DNA, 15 bp, Homo sapiens
aaagcaatgctgggc

SEQ ID NO: 1247242 - DNA, 15 bp, Homo sapiens
aaaagcaatgctggg

SEQ ID NO: 1247243 - DNA, 15 bp, Homo sapiens
aaaaagcaatgctgg

SEQ ID NO: 1247244 - DNA, 15 bp, Homo sapiens
caaaaagcaatgctg

SEQ ID NO: 1247245 - DNA, 15 bp, Homo sapiens
ccaaaaagcaatgct

SEQ ID NO: 1247246 - DNA, 15 bp, Homo sapiens
accaaaaagcaatgc

SEQ ID NO: 1247247 - DNA, 15 bp, Homo sapiens
caccaaaaagcaatg

SEQ ID NO: 1247248 - DNA, 15 bp, Homo sapiens
tcaccaaaaagcaat

SEQ ID NO: 1247249 - DNA, 15 bp, Homo sapiens
ttcaccaaaaagcaa

SEQ ID NO: 1247250 - DNA, 15 bp, Homo sapiens
cttcaccaaaaagca

SEQ ID NO: 1247251 - DNA, 15 bp, Homo sapiens
acttcaccaaaaagc

SEQ ID NO: 1247252 - DNA, 15 bp, Homo sapiens
cacttcaccaaaaag

SEQ ID NO: 1247253 - DNA, 15 bp, Homo sapiens
gcacttcaccaaaaa

SEQ ID NO: 1247254 - DNA, 15 bp, Homo sapiens
tgcacttcaccaaaa

SEQ ID NO: 1247255 - DNA, 15 bp, Homo sapiens
atgcacttcaccaaa

SEQ ID NO: 1247256 - DNA, 15 bp, Homo sapiens
gatgcacttcaccaa

SEQ ID NO: 1247257 - DNA, 15 bp, Homo sapiens
cgatgcacttcacca

SEQ ID NO: 1247258 - DNA, 15 bp, Homo sapiens
ccgatgcacttcacc

SEQ ID NO: 1247259 - DNA, 15 bp, Homo sapiens
gccgatgcacttcac

SEQ ID NO: 1247260 - DNA, 15 bp, Homo sapiens
agccgatgcacttca

SEQ ID NO: 1247261 - DNA, 15 bp, Homo sapiens
cagccgatgcacttc

SEQ ID NO: 1247262 - DNA, 15 bp, Homo sapiens
gcagccgatgcactt

SEQ ID NO: 1247263 - DNA, 15 bp, Homo sapiens
tgcagccgatgcact

SEQ ID NO: 1247264 - DNA, 15 bp, Homo sapiens
ttgcagccgatgcac

SEQ ID NO: 1247265 - DNA, 15 bp, Homo sapiens
tttgcagccgatgca

SEQ ID NO: 1247266 - DNA, 15 bp, Homo sapiens
ttttgcagccgatgc

SEQ ID NO: 1247267 - DNA, 15 bp, Homo sapiens
attttgcagccgatg

SEQ ID NO: 1247268 - DNA, 15 bp, Homo sapiens
aattttgcagccgat

SEQ ID NO: 1247269 - DNA, 15 bp, Homo sapiens
caattttgcagccga

SEQ ID NO: 1247270 - DNA, 15 bp, Homo sapiens
acaattttgcagccg

SEQ ID NO: 1247271 - DNA, 15 bp, Homo sapiens
aacaattttgcagcc

SEQ ID NO: 1247272 - DNA, 15 bp, Homo sapiens
gaacaattttgcagc

SEQ ID NO: 1247273 - DNA, 15 bp, Homo sapiens
agaacaattttgcag

SEQ ID NO: 1247274 - DNA, 15 bp, Homo sapiens
aagaacaattttgca

SEQ ID NO: 1247275 - DNA, 15 bp, Homo sapiens
aaagaacaattttgc

SEQ ID NO: 1247276 - DNA, 15 bp, Homo sapiens
gaaagaacaattttg

SEQ ID NO: 1247277 - DNA, 15 bp, Homo sapiens
cgaaagaacaatttt

SEQ ID NO: 1247278 - DNA, 15 bp, Homo sapiens
ccgaaagaacaattt

SEQ ID NO: 1247279 - DNA, 15 bp, Homo sapiens
gccgaaagaacaatt

SEQ ID NO: 1247280 - DNA, 15 bp, Homo sapiens
agccgaaagaacaat

SEQ ID NO: 1247281 - DNA, 15 bp, Homo sapiens
gagccgaaagaacaa

SEQ ID NO: 1247282 - DNA, 15 bp, Homo sapiens
tgagccgaaagaaca

SEQ ID NO: 1247283 - DNA, 15 bp, Homo sapiens
ctgagccgaaagaac

SEQ ID NO: 1247284 - DNA, 15 bp, Homo sapiens
gctgagccgaaagaa

SEQ ID NO: 1247285 - DNA, 15 bp, Homo sapiens
agctgagccgaaaga

SEQ ID NO: 1247286 - DNA, 15 bp, Homo sapiens
tagctgagccgaaag

SEQ ID NO: 1247287 - DNA, 15 bp, Homo sapiens
ctagctgagccgaaa

SEQ ID NO: 1247288 - DNA, 15 bp, Homo sapiens
gctagctgagccgaa

SEQ ID NO: 1247289 - DNA, 15 bp, Homo sapiens
agctagctgagccga

SEQ ID NO: 1247290 - DNA, 15 bp, Homo sapiens
gagctagctgagccg

SEQ ID NO: 1247291 - DNA, 15 bp, Homo sapiens
tgagctagctgagcc

SEQ ID NO: 1247292 - DNA, 15 bp, Homo sapiens
ctgagctagctgagc

SEQ ID NO: 1247293 - DNA, 15 bp, Homo sapiens
actgagctagctgag

SEQ ID NO: 1247294 - DNA, 15 bp, Homo sapiens
cactgagctagctga

SEQ ID NO: 1247295 - DNA, 15 bp, Homo sapiens
tcactgagctagctg

SEQ ID NO: 1247296 - DNA, 15 bp, Homo sapiens
atcactgagctagct

SEQ ID NO: 1247297 - DNA, 15 bp, Homo sapiens
gatcactgagctagc

SEQ ID NO: 1247298 - DNA, 15 bp, Homo sapiens
agatcactgagctag

SEQ ID NO: 1247299 - DNA, 15 bp, Homo sapiens
aagatcactgagcta

SEQ ID NO: 1247300 - DNA, 15 bp, Homo sapiens
caagatcactgagct

SEQ ID NO: 1247301 - DNA, 15 bp, Homo sapiens
tcaagatcactgagc

SEQ ID NO: 1247302 - DNA, 15 bp, Homo sapiens
ctcaagatcactgag

SEQ ID NO: 1247303 - DNA, 15 bp, Homo sapiens
gctcaagatcactga

SEQ ID NO: 1247304 - DNA, 15 bp, Homo sapiens
tgctcaagatcactg

SEQ ID NO: 1247305 - DNA, 15 bp, Homo sapiens
ttgctcaagatcact

SEQ ID NO: 1247306 - DNA, 15 bp, Homo sapiens
tttgctcaagatcac

SEQ ID NO: 1247307 - DNA, 15 bp, Homo sapiens
atttgctcaagatca

SEQ ID NO: 1247308 - DNA, 15 bp, Homo sapiens
gatttgctcaagatc

SEQ ID NO: 1247309 - DNA, 15 bp, Homo sapiens
tgatttgctcaagat

SEQ ID NO: 1247310 - DNA, 15 bp, Homo sapiens
gtgatttgctcaaga

SEQ ID NO: 1247311 - DNA, 15 bp, Homo sapiens
agtgatttgctcaag

SEQ ID NO: 1247312 - DNA, 15 bp, Homo sapiens
aagtgatttgctcaa

SEQ ID NO: 1247313 - DNA, 15 bp, Homo sapiens
aaagtgatttgctca

SEQ ID NO: 1247314 - DNA, 15 bp, Homo sapiens
caaagtgatttgctc

SEQ ID NO: 1247315 - DNA, 15 bp, Homo sapiens
acaaagtgatttgct

SEQ ID NO: 1247316 - DNA, 15 bp, Homo sapiens
gacaaagtgatttgc

SEQ ID NO: 1247317 - DNA, 15 bp, Homo sapiens
agacaaagtgatttg

SEQ ID NO: 1247318 - DNA, 15 bp, Homo sapiens
gagacaaagtgattt

SEQ ID NO: 1247319 - DNA, 15 bp, Homo sapiens
agagacaaagtgatt

SEQ ID NO: 1247320 - DNA, 15 bp, Homo sapiens
aagagacaaagtgat

SEQ ID NO: 1247321 - DNA, 15 bp, Homo sapiens
aaagagacaaagtga

SEQ ID NO: 1247322 - DNA, 15 bp, Homo sapiens
caaagagacaaagtg

SEQ ID NO: 1247323 - DNA, 15 bp, Homo sapiens
tcaaagagacaaagt

SEQ ID NO: 1247324 - DNA, 15 bp, Homo sapiens
ctcaaagagacaaag

SEQ ID NO: 1247325 - DNA, 15 bp, Homo sapiens
gctcaaagagacaaa

SEQ ID NO: 1247326 - DNA, 15 bp, Homo sapiens
ggctcaaagagacaa

SEQ ID NO: 1247327 - DNA, 15 bp, Homo sapiens
aggctcaaagagaca

SEQ ID NO: 1247328 - DNA, 15 bp, Homo sapiens
taggctcaaagagac

SEQ ID NO: 1247329 - DNA, 15 bp, Homo sapiens
ataggctcaaagaga

SEQ ID NO: 1247330 - DNA, 15 bp, Homo sapiens
aataggctcaaagag

SEQ ID NO: 1247331 - DNA, 15 bp, Homo sapiens
aaataggctcaaaga

SEQ ID NO: 1247332 - DNA, 15 bp, Homo sapiens
caaataggctcaaag

SEQ ID NO: 1247333 - DNA, 15 bp, Homo sapiens
gcaaataggctcaaa

SEQ ID NO: 1247334 - DNA, 15 bp, Homo sapiens
agcaaataggctcaa

SEQ ID NO: 1247335 - DNA, 15 bp, Homo sapiens
gagcaaataggctca

SEQ ID NO: 1247336 - DNA, 15 bp, Homo sapiens
tgagcaaataggctc

SEQ ID NO: 1247337 - DNA, 15 bp, Homo sapiens
atgagcaaataggct

SEQ ID NO: 1247338 - DNA, 15 bp, Homo sapiens
gatgagcaaataggc

SEQ ID NO: 1247339 - DNA, 15 bp, Homo sapiens
tgatgagcaaatagg

SEQ ID NO: 1247340 - DNA, 15 bp, Homo sapiens
ctgatgagcaaatag

SEQ ID NO: 1247341 - DNA, 15 bp, Homo sapiens
actgatgagcaaata

SEQ ID NO: 1247342 - DNA, 15 bp, Homo sapiens
cactgatgagcaaat

SEQ ID NO: 1247343 - DNA, 15 bp, Homo sapiens
tcactgatgagcaaa

SEQ ID NO: 1247344 - DNA, 15 bp, Homo sapiens
ttcactgatgagcaa

SEQ ID NO: 1247345 - DNA, 15 bp, Homo sapiens
gttcactgatgagca

SEQ ID NO: 1247346 - DNA, 15 bp, Homo sapiens
tgttcactgatgagc

SEQ ID NO: 1247347 - DNA, 15 bp, Homo sapiens
ctgttcactgatgag

SEQ ID NO: 1247348 - DNA, 15 bp, Homo sapiens
gctgttcactgatga

SEQ ID NO: 1247349 - DNA, 15 bp, Homo sapiens
tgctgttcactgatg

SEQ ID NO: 1247350 - DNA, 15 bp, Homo sapiens
ttgctgttcactgat

SEQ ID NO: 1247351 - DNA, 15 bp, Homo sapiens
attgctgttcactga

SEQ ID NO: 1247352 - DNA, 15 bp, Homo sapiens
tattgctgttcactg

SEQ ID NO: 1247353 - DNA, 15 bp, Homo sapiens
ttattgctgttcact

SEQ ID NO: 1247354 - DNA, 15 bp, Homo sapiens
attattgctgttcac

SEQ ID NO: 1247355 - DNA, 15 bp, Homo sapiens
cattattgctgttca

SEQ ID NO: 1247356 - DNA, 15 bp, Homo sapiens
acattattgctgttc

SEQ ID NO: 1247357 - DNA, 15 bp, Homo sapiens
gacattattgctgtt

SEQ ID NO: 1247358 - DNA, 15 bp, Homo sapiens
agacattattgctgt

SEQ ID NO: 1247359 - DNA, 15 bp, Homo sapiens
tagacattattgctg

SEQ ID NO: 1247360 - DNA, 15 bp, Homo sapiens
gtagacattattgct

SEQ ID NO: 1247361 - DNA, 15 bp, Homo sapiens
ggtagacattattgc

SEQ ID NO: 1247362 - DNA, 15 bp, Homo sapiens
tggtagacattattg

SEQ ID NO: 1247363 - DNA, 15 bp, Homo sapiens
gtggtagacattatt

SEQ ID NO: 1247364 - DNA, 15 bp, Homo sapiens
ggtggtagacattat

SEQ ID NO: 1247365 - DNA, 15 bp, Homo sapiens
aggtggtagacatta

SEQ ID NO: 1247366 - DNA, 15 bp, Homo sapiens
caggtggtagacatt

SEQ ID NO: 1247367 - DNA, 15 bp, Homo sapiens
ccaggtggtagacat

SEQ ID NO: 1247368 - DNA, 15 bp, Homo sapiens
cccaggtggtagaca

SEQ ID NO: 1247369 - DNA, 15 bp, Homo sapiens
tcccaggtggtagac

SEQ ID NO: 1247370 - DNA, 15 bp, Homo sapiens
gtcccaggtggtaga

SEQ ID NO: 1247371 - DNA, 15 bp, Homo sapiens
agtcccaggtggtag

SEQ ID NO: 1247372 - DNA, 15 bp, Homo sapiens
cagtcccaggtggta

SEQ ID NO: 1247373 - DNA, 15 bp, Homo sapiens
acagtcccaggtggt

SEQ ID NO: 1247374 - DNA, 15 bp, Homo sapiens
aacagtcccaggtgg

SEQ ID NO: 1247375 - DNA, 15 bp, Homo sapiens
aaacagtcccaggtg

SEQ ID NO: 1247376 - DNA, 15 bp, Homo sapiens
aaaacagtcccaggt

SEQ ID NO: 1247377 - DNA, 15 bp, Homo sapiens
caaaacagtcccagg

SEQ ID NO: 1247378 - DNA, 15 bp, Homo sapiens
gcaaaacagtcccag

SEQ ID NO: 1247379 - DNA, 15 bp, Homo sapiens
cgcaaaacagtccca

SEQ ID NO: 1247380 - DNA, 15 bp, Homo sapiens
tcgcaaaacagtccc

SEQ ID NO: 1247381 - DNA, 15 bp, Homo sapiens
ttcgcaaaacagtcc

SEQ ID NO: 1247382 - DNA, 15 bp, Homo sapiens
attcgcaaaacagtc

SEQ ID NO: 1247383 - DNA, 15 bp, Homo sapiens
aattcgcaaaacagt

SEQ ID NO: 1247384 - DNA, 15 bp, Homo sapiens
taattcgcaaaacag

SEQ ID NO: 1247385 - DNA, 15 bp, Homo sapiens
ttaattcgcaaaaca

SEQ ID NO: 1247386 - DNA, 15 bp, Homo sapiens
tttaattcgcaaaac

SEQ ID NO: 1247387 - DNA, 15 bp, Homo sapiens
ctttaattcgcaaaa

SEQ ID NO: 1247388 - DNA, 15 bp, Homo sapiens
cctttaattcgcaaa

SEQ ID NO: 1247389 - DNA, 15 bp, Homo sapiens
tcctttaattcgcaa

SEQ ID NO: 1247390 - DNA, 15 bp, Homo sapiens
ctcctttaattcgca

SEQ ID NO: 1247391 - DNA, 15 bp, Homo sapiens
tctcctttaattcgc

SEQ ID NO: 1247392 - DNA, 15 bp, Homo sapiens
atctcctttaattcg

SEQ ID NO: 1247393 - DNA, 15 bp, Homo sapiens
catctcctttaattc

SEQ ID NO: 1247394 - DNA, 15 bp, Homo sapiens
tcatctcctttaatt

SEQ ID NO: 1247395 - DNA, 15 bp, Homo sapiens
atcatctcctttaat

SEQ ID NO: 1247396 - DNA, 15 bp, Homo sapiens
catcatctcctttaa

SEQ ID NO: 1247397 - DNA, 15 bp, Homo sapiens
tcatcatctccttta

SEQ ID NO: 1247398 - DNA, 15 bp, Homo sapiens
ttcatcatctccttt

SEQ ID NO: 1247399 - DNA, 15 bp, Homo sapiens
tttcatcatctcctt

SEQ ID NO: 1247400 - DNA, 15 bp, Homo sapiens
ctttcatcatctcct

SEQ ID NO: 1247401 - DNA, 15 bp, Homo sapiens
actttcatcatctcc

SEQ ID NO: 1247402 - DNA, 15 bp, Homo sapiens
tactttcatcatctc

SEQ ID NO: 1247403 - DNA, 15 bp, Homo sapiens
ttactttcatcatct

SEQ ID NO: 1247404 - DNA, 15 bp, Homo sapiens
tttactttcatcatc

SEQ ID NO: 1247405 - DNA, 15 bp, Homo sapiens
ctttactttcatcat

SEQ ID NO: 1247406 - DNA, 15 bp, Homo sapiens
gctttactttcatca

SEQ ID NO: 1247407 - DNA, 15 bp, Homo sapiens
tgctttactttcatc

SEQ ID NO: 1247408 - DNA, 15 bp, Homo sapiens
gtgctttactttcat

SEQ ID NO: 1247409 - DNA, 15 bp, Homo sapiens
agtgctttactttca

SEQ ID NO: 1247410 - DNA, 15 bp, Homo sapiens
aagtgctttactttc

SEQ ID NO: 1247411 - DNA, 15 bp, Homo sapiens
taagtgctttacttt

SEQ ID NO: 1247412 - DNA, 15 bp, Homo sapiens
ctaagtgctttactt

SEQ ID NO: 1247413 - DNA, 15 bp, Homo sapiens
gctaagtgctttact

SEQ ID NO: 1247414 - DNA, 15 bp, Homo sapiens
tgctaagtgctttac

SEQ ID NO: 1247415 - DNA, 15 bp, Homo sapiens
gtgctaagtgcttta

SEQ ID NO: 1247416 - DNA, 15 bp, Homo sapiens
tgtgctaagtgcttt

SEQ ID NO: 1247417 - DNA, 15 bp, Homo sapiens
ctgtgctaagtgctt

SEQ ID NO: 1247418 - DNA, 15 bp, Homo sapiens
actgtgctaagtgct

SEQ ID NO: 1247419 - DNA, 15 bp, Homo sapiens
tactgtgctaagtgc

SEQ ID NO: 1247420 - DNA, 15 bp, Homo sapiens
atactgtgctaagtg

SEQ ID NO: 1247421 - DNA, 15 bp, Homo sapiens
gatactgtgctaagt

SEQ ID NO: 1247422 - DNA, 15 bp, Homo sapiens
agatactgtgctaag

SEQ ID NO: 1247423 - DNA, 15 bp, Homo sapiens
cagatactgtgctaa

SEQ ID NO: 1247424 - DNA, 15 bp, Homo sapiens
ccagatactgtgcta

SEQ ID NO: 1247425 - DNA, 15 bp, Homo sapiens
accagatactgtgct

SEQ ID NO: 1247426 - DNA, 15 bp, Homo sapiens
caccagatactgtgc

SEQ ID NO: 1247427 - DNA, 15 bp, Homo sapiens
gcaccagatactgtg

SEQ ID NO: 1247428 - DNA, 15 bp, Homo sapiens
tgcaccagatactgt

SEQ ID NO: 1247429 - DNA, 15 bp, Homo sapiens
atgcaccagatactg

SEQ ID NO: 1247430 - DNA, 15 bp, Homo sapiens
tatgcaccagatact

SEQ ID NO: 1247431 - DNA, 15 bp, Homo sapiens
ttatgcaccagatac

SEQ ID NO: 1247432 - DNA, 15 bp, Homo sapiens
attatgcaccagata

SEQ ID NO: 1247433 - DNA, 15 bp, Homo sapiens
tattatgcaccagat

SEQ ID NO: 1247434 - DNA, 15 bp, Homo sapiens
ttattatgcaccaga

SEQ ID NO: 1247435 - DNA, 15 bp, Homo sapiens
cttattatgcaccag

SEQ ID NO: 1247436 - DNA, 15 bp, Homo sapiens
gcttattatgcacca

SEQ ID NO: 1247437 - DNA, 15 bp, Homo sapiens
cgcttattatgcacc

SEQ ID NO: 1247438 - DNA, 15 bp, Homo sapiens
gcgcttattatgcac

SEQ ID NO: 1247439 - DNA, 15 bp, Homo sapiens
agcgcttattatgca

SEQ ID NO: 1247440 - DNA, 15 bp, Homo sapiens
gagcgcttattatgc

SEQ ID NO: 1247441 - DNA, 15 bp, Homo sapiens
tgagcgcttattatg

SEQ ID NO: 1247442 - DNA, 15 bp, Homo sapiens
ttgagcgcttattat

SEQ ID NO: 1247443 - DNA, 15 bp, Homo sapiens
cttgagcgcttatta

SEQ ID NO: 1247444 - DNA, 15 bp, Homo sapiens
tcttgagcgcttatt

SEQ ID NO: 1247445 - DNA, 15 bp, Homo sapiens
ttcttgagcgcttat

SEQ ID NO: 1247446 - DNA, 15 bp, Homo sapiens
tttcttgagcgctta

SEQ ID NO: 1247447 - DNA, 15 bp, Homo sapiens
ttttcttgagcgctt

SEQ ID NO: 1247448 - DNA, 15 bp, Homo sapiens
attttcttgagcgct

SEQ ID NO: 1247449 - DNA, 15 bp, Homo sapiens
cattttcttgagcgc

SEQ ID NO: 1247450 - DNA, 15 bp, Homo sapiens
acattttcttgagcg

SEQ ID NO: 1247451 - DNA, 15 bp, Homo sapiens
tacattttcttgagc

SEQ ID NO: 1247452 - DNA, 15 bp, Homo sapiens
ttacattttcttgag

SEQ ID NO: 1247453 - DNA, 15 bp, Homo sapiens
gttacattttcttga

SEQ ID NO: 1247454 - DNA, 15 bp, Homo sapiens
agttacattttcttg

SEQ ID NO: 1247455 - DNA, 15 bp, Homo sapiens
aagttacattttctt

SEQ ID NO: 1247456 - DNA, 15 bp, Homo sapiens
aaagttacattttct

SEQ ID NO: 1247457 - DNA, 15 bp, Homo sapiens
taaagttacattttc

SEQ ID NO: 1247458 - DNA, 15 bp, Homo sapiens
ctaaagttacatttt

SEQ ID NO: 1247459 - DNA, 15 bp, Homo sapiens
tctaaagttacattt

SEQ ID NO: 1247460 - DNA, 15 bp, Homo sapiens
ctctaaagttacatt

SEQ ID NO: 1247461 - DNA, 15 bp, Homo sapiens
cctctaaagttacat

SEQ ID NO: 1247462 - DNA, 15 bp, Homo sapiens
tcctctaaagttaca

SEQ ID NO: 1247463 - DNA, 15 bp, Homo sapiens
ttcctctaaagttac

SEQ ID NO: 1247464 - DNA, 15 bp, Homo sapiens
tttcctctaaagtta

SEQ ID NO: 1247465 - DNA, 15 bp, Homo sapiens
ttttcctctaaagtt

SEQ ID NO: 1247466 - DNA, 15 bp, Homo sapiens
tttttcctctaaagt

SEQ ID NO: 1247467 - DNA, 15 bp, Homo sapiens
ctttttcctctaaag

SEQ ID NO: 1247468 - DNA, 15 bp, Homo sapiens
cctttttcctctaaa

SEQ ID NO: 1247469 - DNA, 15 bp, Homo sapiens
ccctttttcctctaa

SEQ ID NO: 1247470 - DNA, 15 bp, Homo sapiens
accctttttcctcta

SEQ ID NO: 1247471 - DNA, 15 bp, Homo sapiens
taccctttttcctct

SEQ ID NO: 1247472 - DNA, 15 bp, Homo sapiens
ctaccctttttcctc

SEQ ID NO: 1247473 - DNA, 15 bp, Homo sapiens
actaccctttttcct

SEQ ID NO: 1247474 - DNA, 15 bp, Homo sapiens
gactaccctttttcc

SEQ ID NO: 1247475 - DNA, 15 bp, Homo sapiens
ggactaccctttttc

SEQ ID NO: 1247476 - DNA, 15 bp, Homo sapiens
aggactacccttttt

SEQ ID NO: 1247477 - DNA, 15 bp, Homo sapiens
taggactaccctttt

SEQ ID NO: 1247478 - DNA, 15 bp, Homo sapiens
gtaggactacccttt

SEQ ID NO: 1247479 - DNA, 15 bp, Homo sapiens
ggtaggactaccctt

SEQ ID NO: 1247480 - DNA, 15 bp, Homo sapiens
aggtaggactaccct

SEQ ID NO: 1247481 - DNA, 15 bp, Homo sapiens
aaggtaggactaccc

SEQ ID NO: 1247482 - DNA, 15 bp, Homo sapiens
aaaggtaggactacc

SEQ ID NO: 1247483 - DNA, 15 bp, Homo sapiens
aaaaggtaggactac

SEQ ID NO: 1247484 - DNA, 15 bp, Homo sapiens
aaaaaggtaggacta

SEQ ID NO: 1247485 - DNA, 15 bp, Homo sapiens
caaaaaggtaggact

SEQ ID NO: 1247486 - DNA, 15 bp, Homo sapiens
gcaaaaaggtaggac

SEQ ID NO: 1247487 - DNA, 15 bp, Homo sapiens
ggcaaaaaggtagga

SEQ ID NO: 1247488 - DNA, 15 bp, Homo sapiens
aggcaaaaaggtagg

SEQ ID NO: 1247489 - DNA, 15 bp, Homo sapiens
caggcaaaaaggtag

SEQ ID NO: 1247490 - DNA, 15 bp, Homo sapiens
ccaggcaaaaaggta

SEQ ID NO: 1247491 - DNA, 15 bp, Homo sapiens
cccaggcaaaaaggt

SEQ ID NO: 1247492 - DNA, 15 bp, Homo sapiens
tcccaggcaaaaagg

SEQ ID NO: 1247493 - DNA, 15 bp, Homo sapiens
ttcccaggcaaaaag

SEQ ID NO: 1247494 - DNA, 15 bp, Homo sapiens
tttcccaggcaaaaa

SEQ ID NO: 1247495 - DNA, 15 bp, Homo sapiens
ttttcccaggcaaaa

SEQ ID NO: 1247496 - DNA, 15 bp, Homo sapiens
tttttcccaggcaaa

SEQ ID NO: 1247497 - DNA, 15 bp, Homo sapiens
atttttcccaggcaa

SEQ ID NO: 1247498 - DNA, 15 bp, Homo sapiens
gatttttcccaggca

SEQ ID NO: 1247499 - DNA, 15 bp, Homo sapiens
tgatttttcccaggc

SEQ ID NO: 1247500 - DNA, 15 bp, Homo sapiens
ctgatttttcccagg

SEQ ID NO: 1247501 - DNA, 15 bp, Homo sapiens
tctgatttttcccag

SEQ ID NO: 1247502 - DNA, 15 bp, Homo sapiens
ttctgatttttccca

SEQ ID NO: 1247503 - DNA, 15 bp, Homo sapiens
cttctgatttttccc

SEQ ID NO: 1247504 - DNA, 15 bp, Homo sapiens
tcttctgatttttcc

SEQ ID NO: 1247505 - DNA, 15 bp, Homo sapiens
ctcttctgatttttc

SEQ ID NO: 1247506 - DNA, 15 bp, Homo sapiens
gctcttctgattttt

SEQ ID NO: 1247507 - DNA, 15 bp, Homo sapiens
ggctcttctgatttt

SEQ ID NO: 1247508 - DNA, 15 bp, Homo sapiens
gggctcttctgattt

SEQ ID NO: 1247509 - DNA, 15 bp, Homo sapiens
tgggctcttctgatt

SEQ ID NO: 1247510 - DNA, 15 bp, Homo sapiens
ctgggctcttctgat

SEQ ID NO: 1247511 - DNA, 15 bp, Homo sapiens
cctgggctcttctga

SEQ ID NO: 1247512 - DNA, 15 bp, Homo sapiens
acctgggctcttctg

SEQ ID NO: 1247513 - DNA, 15 bp, Homo sapiens
cacctgggctcttct

SEQ ID NO: 1247514 - DNA, 15 bp, Homo sapiens
gcacctgggctcttc

SEQ ID NO: 1247515 - DNA, 15 bp, Homo sapiens
tgcacctgggctctt

SEQ ID NO: 1247516 - DNA, 15 bp, Homo sapiens
ctgcacctgggctct

SEQ ID NO: 1247517 - DNA, 15 bp, Homo sapiens
tctgcacctgggctc

SEQ ID NO: 1247518 - DNA, 15 bp, Homo sapiens
ctctgcacctgggct

SEQ ID NO: 1247519 - DNA, 15 bp, Homo sapiens
cctctgcacctgggc

SEQ ID NO: 1247520 - DNA, 15 bp, Homo sapiens
acctctgcacctggg

SEQ ID NO: 1247521 - DNA, 15 bp, Homo sapiens
aacctctgcacctgg

SEQ ID NO: 1247522 - DNA, 15 bp, Homo sapiens
taacctctgcacctg

SEQ ID NO: 1247523 - DNA, 15 bp, Homo sapiens
ctaacctctgcacct

SEQ ID NO: 1247524 - DNA, 15 bp, Homo sapiens
tctaacctctgcacc

SEQ ID NO: 1247525 - DNA, 15 bp, Homo sapiens
ctctaacctctgcac

SEQ ID NO: 1247526 - DNA, 15 bp, Homo sapiens
tctctaacctctgca

SEQ ID NO: 1247527 - DNA, 15 bp, Homo sapiens
gtctctaacctctgc

SEQ ID NO: 1247528 - DNA, 15 bp, Homo sapiens
tgtctctaacctctg

SEQ ID NO: 1247529 - DNA, 15 bp, Homo sapiens
atgtctctaacctct

SEQ ID NO: 1247530 - DNA, 15 bp, Homo sapiens
tatgtctctaacctc

SEQ ID NO: 1247531 - DNA, 15 bp, Homo sapiens
ttatgtctctaacct

SEQ ID NO: 1247532 - DNA, 15 bp, Homo sapiens
cttatgtctctaacc

SEQ ID NO: 1247533 - DNA, 15 bp, Homo sapiens
gcttatgtctctaac

SEQ ID NO: 1247534 - DNA, 15 bp, Homo sapiens
tgcttatgtctctaa

SEQ ID NO: 1247535 - DNA, 15 bp, Homo sapiens
atgcttatgtctcta

SEQ ID NO: 1247536 - DNA, 15 bp, Homo sapiens
catgcttatgtctct

SEQ ID NO: 1247537 - DNA, 15 bp, Homo sapiens
ccatgcttatgtctc

SEQ ID NO: 1247538 - DNA, 15 bp, Homo sapiens
tccatgcttatgtct

SEQ ID NO: 1247539 - DNA, 15 bp, Homo sapiens
gtccatgcttatgtc

SEQ ID NO: 1247540 - DNA, 15 bp, Homo sapiens
agtccatgcttatgt

SEQ ID NO: 1247541 - DNA, 15 bp, Homo sapiens
cagtccatgcttatg

SEQ ID NO: 1247542 - DNA, 15 bp, Homo sapiens
ccagtccatgcttat

SEQ ID NO: 1247543 - DNA, 15 bp, Homo sapiens
gccagtccatgctta

SEQ ID NO: 1247544 - DNA, 15 bp, Homo sapiens
agccagtccatgctt

SEQ ID NO: 1247545 - DNA, 15 bp, Homo sapiens
aagccagtccatgct

SEQ ID NO: 1247546 - DNA, 15 bp, Homo sapiens
caagccagtccatgc

SEQ ID NO: 1247547 - DNA, 15 bp, Homo sapiens
ccaagccagtccatg

SEQ ID NO: 1247548 - DNA, 15 bp, Homo sapiens
gccaagccagtccat

SEQ ID NO: 1247549 - DNA, 15 bp, Homo sapiens
ggccaagccagtcca

SEQ ID NO: 1247550 - DNA, 15 bp, Homo sapiens
aggccaagccagtcc

SEQ ID NO: 1247551 - DNA, 15 bp, Homo sapiens
gaggccaagccagtc

SEQ ID NO: 1247552 - DNA, 15 bp, Homo sapiens
agaggccaagccagt

SEQ ID NO: 1247553 - DNA, 15 bp, Homo sapiens
tagaggccaagccag

SEQ ID NO: 1247554 - DNA, 15 bp, Homo sapiens
ctagaggccaagcca

SEQ ID NO: 1247555 - DNA, 15 bp, Homo sapiens
actagaggccaagcc

SEQ ID NO: 1247556 - DNA, 15 bp, Homo sapiens
cactagaggccaagc

SEQ ID NO: 1247557 - DNA, 15 bp, Homo sapiens
ccactagaggccaag

SEQ ID NO: 1247558 - DNA, 15 bp, Homo sapiens
gccactagaggccaa

SEQ ID NO: 1247559 - DNA, 15 bp, Homo sapiens
ggccactagaggcca

SEQ ID NO: 1247560 - DNA, 15 bp, Homo sapiens
aggccactagaggcc

SEQ ID NO: 1247561 - DNA, 15 bp, Homo sapiens
gaggccactagaggc

SEQ ID NO: 1247562 - DNA, 15 bp, Homo sapiens
agaggccactagagg

SEQ ID NO: 1247563 - DNA, 15 bp, Homo sapiens
cagaggccactagag

SEQ ID NO: 1247564 - DNA, 15 bp, Homo sapiens
ccagaggccactaga

SEQ ID NO: 1247565 - DNA, 15 bp, Homo sapiens
cccagaggccactag

SEQ ID NO: 1247566 - DNA, 15 bp, Homo sapiens
tcccagaggccacta

SEQ ID NO: 1247567 - DNA, 15 bp, Homo sapiens
gtcccagaggccact

SEQ ID NO: 1247568 - DNA, 15 bp, Homo sapiens
ggtcccagaggccac

SEQ ID NO: 1247569 - DNA, 15 bp, Homo sapiens
tggtcccagaggcca

SEQ ID NO: 1247570 - DNA, 15 bp, Homo sapiens
gtggtcccagaggcc

SEQ ID NO: 1247571 - DNA, 15 bp, Homo sapiens
agtggtcccagaggc

SEQ ID NO: 1247572 - DNA, 15 bp, Homo sapiens
tagtggtcccagagg

SEQ ID NO: 1247573 - DNA, 15 bp, Homo sapiens
atagtggtcccagag

SEQ ID NO: 1247574 - DNA, 15 bp, Homo sapiens
gatagtggtcccaga

SEQ ID NO: 1247575 - DNA, 15 bp, Homo sapiens
agatagtggtcccag

SEQ ID NO: 1247576 - DNA, 15 bp, Homo sapiens
aagatagtggtccca

SEQ ID NO: 1247577 - DNA, 15 bp, Homo sapiens
taagatagtggtccc

SEQ ID NO: 1247578 - DNA, 15 bp, Homo sapiens
ctaagatagtggtcc

SEQ ID NO: 1247579 - DNA, 15 bp, Homo sapiens
actaagatagtggtc

SEQ ID NO: 1247580 - DNA, 15 bp, Homo sapiens
gactaagatagtggt

SEQ ID NO: 1247581 - DNA, 15 bp, Homo sapiens
tgactaagatagtgg

SEQ ID NO: 1247582 - DNA, 15 bp, Homo sapiens
ctgactaagatagtg

SEQ ID NO: 1247583 - DNA, 15 bp, Homo sapiens
tctgactaagatagt

SEQ ID NO: 1247584 - DNA, 15 bp, Homo sapiens
gtctgactaagatag

SEQ ID NO: 1247585 - DNA, 15 bp, Homo sapiens
tgtctgactaagata

SEQ ID NO: 1247586 - DNA, 15 bp, Homo sapiens
ttgtctgactaagat

SEQ ID NO: 1247587 - DNA, 15 bp, Homo sapiens
cttgtctgactaaga

SEQ ID NO: 1247588 - DNA, 15 bp, Homo sapiens
gcttgtctgactaag

SEQ ID NO: 1247589 - DNA, 15 bp, Homo sapiens
tgcttgtctgactaa

SEQ ID NO: 1247590 - DNA, 15 bp, Homo sapiens
ttgcttgtctgacta

SEQ ID NO: 1247591 - DNA, 15 bp, Homo sapiens
gttgcttgtctgact

SEQ ID NO: 1247592 - DNA, 15 bp, Homo sapiens
agttgcttgtctgac

SEQ ID NO: 1247593 - DNA, 15 bp, Homo sapiens
gagttgcttgtctga

SEQ ID NO: 1247594 - DNA, 15 bp, Homo sapiens
agagttgcttgtctg

SEQ ID NO: 1247595 - DNA, 15 bp, Homo sapiens
cagagttgcttgtct

SEQ ID NO: 1247596 - DNA, 15 bp, Homo sapiens
ccagagttgcttgtc

SEQ ID NO: 1247597 - DNA, 15 bp, Homo sapiens
tccagagttgcttgt

SEQ ID NO: 1247598 - DNA, 15 bp, Homo sapiens
ctccagagttgcttg

SEQ ID NO: 1247599 - DNA, 15 bp, Homo sapiens
actccagagttgctt

SEQ ID NO: 1247600 - DNA, 15 bp, Homo sapiens
aactccagagttgct

SEQ ID NO: 1247601 - DNA, 15 bp, Homo sapiens
aaactccagagttgc

SEQ ID NO: 1247602 - DNA, 15 bp, Homo sapiens
taaactccagagttg

SEQ ID NO: 1247603 - DNA, 15 bp, Homo sapiens
ataaactccagagtt

SEQ ID NO: 1247604 - DNA, 15 bp, Homo sapiens
aataaactccagagt

SEQ ID NO: 1247605 - DNA, 15 bp, Homo sapiens
taataaactccagag

SEQ ID NO: 1247606 - DNA, 15 bp, Homo sapiens
ataataaactccaga

SEQ ID NO: 1247607 - DNA, 15 bp, Homo sapiens
cataataaactccag

SEQ ID NO: 1247608 - DNA, 15 bp, Homo sapiens
tcataataaactcca

SEQ ID NO: 1247609 - DNA, 15 bp, Homo sapiens
ctcataataaactcc

SEQ ID NO: 1247610 - DNA, 15 bp, Homo sapiens
cctcataataaactc

SEQ ID NO: 1247611 - DNA, 15 bp, Homo sapiens
gcctcataataaact

SEQ ID NO: 1247612 - DNA, 15 bp, Homo sapiens
agcctcataataaac

SEQ ID NO: 1247613 - DNA, 15 bp, Homo sapiens
gagcctcataataaa

SEQ ID NO: 1247614 - DNA, 15 bp, Homo sapiens
tgagcctcataataa

SEQ ID NO: 1247615 - DNA, 15 bp, Homo sapiens
ctgagcctcataata

SEQ ID NO: 1247616 - DNA, 15 bp, Homo sapiens
cctgagcctcataat

SEQ ID NO: 1247617 - DNA, 15 bp, Homo sapiens
acctgagcctcataa

SEQ ID NO: 1247618 - DNA, 15 bp, Homo sapiens
cacctgagcctcata

SEQ ID NO: 1247619 - DNA, 15 bp, Homo sapiens
gcacctgagcctcat

SEQ ID NO: 1247620 - DNA, 15 bp, Homo sapiens
tgcacctgagcctca

SEQ ID NO: 1247621 - DNA, 15 bp, Homo sapiens
ttgcacctgagcctc

SEQ ID NO: 1247622 - DNA, 15 bp, Homo sapiens
cttgcacctgagcct

SEQ ID NO: 1247623 - DNA, 15 bp, Homo sapiens
ccttgcacctgagcc

SEQ ID NO: 1247624 - DNA, 15 bp, Homo sapiens
tccttgcacctgagc

SEQ ID NO: 1247625 - DNA, 15 bp, Homo sapiens
gtccttgcacctgag

SEQ ID NO: 1247626 - DNA, 15 bp, Homo sapiens
agtccttgcacctga

SEQ ID NO: 1247627 - DNA, 15 bp, Homo sapiens
cagtccttgcacctg

SEQ ID NO: 1247628 - DNA, 15 bp, Homo sapiens
tcagtccttgcacct

SEQ ID NO: 1247629 - DNA, 15 bp, Homo sapiens
atcagtccttgcacc

SEQ ID NO: 1247630 - DNA, 15 bp, Homo sapiens
catcagtccttgcac

SEQ ID NO: 1247631 - DNA, 15 bp, Homo sapiens
gcatcagtccttgca

SEQ ID NO: 1247632 - DNA, 15 bp, Homo sapiens
ggcatcagtccttgc

SEQ ID NO: 1247633 - DNA, 15 bp, Homo sapiens
tggcatcagtccttg

SEQ ID NO: 1247634 - DNA, 15 bp, Homo sapiens
gtggcatcagtcctt

SEQ ID NO: 1247635 - DNA, 15 bp, Homo sapiens
tgtggcatcagtcct

SEQ ID NO: 1247636 - DNA, 15 bp, Homo sapiens
ctgtggcatcagtcc

SEQ ID NO: 1247637 - DNA, 15 bp, Homo sapiens
tctgtggcatcagtc

SEQ ID NO: 1247638 - DNA, 15 bp, Homo sapiens
atctgtggcatcagt

SEQ ID NO: 1247639 - DNA, 15 bp, Homo sapiens
catctgtggcatcag

SEQ ID NO: 1247640 - DNA, 15 bp, Homo sapiens
gcatctgtggcatca

SEQ ID NO: 1247641 - DNA, 15 bp, Homo sapiens
tgcatctgtggcatc

SEQ ID NO: 1247642 - DNA, 15 bp, Homo sapiens
gtgcatctgtggcat

SEQ ID NO: 1247643 - DNA, 15 bp, Homo sapiens
ggtgcatctgtggca

SEQ ID NO: 1247644 - DNA, 15 bp, Homo sapiens
aggtgcatctgtggc

SEQ ID NO: 1247645 - DNA, 15 bp, Homo sapiens
caggtgcatctgtgg

SEQ ID NO: 1247646 - DNA, 15 bp, Homo sapiens
acaggtgcatctgtg

SEQ ID NO: 1247647 - DNA, 15 bp, Homo sapiens
aacaggtgcatctgt

SEQ ID NO: 1247648 - DNA, 15 bp, Homo sapiens
aaacaggtgcatctg

SEQ ID NO: 1247649 - DNA, 15 bp, Homo sapiens
aaaacaggtgcatct

SEQ ID NO: 1247650 - DNA, 15 bp, Homo sapiens
caaaacaggtgcatc

SEQ ID NO: 1247651 - DNA, 15 bp, Homo sapiens
ccaaaacaggtgcat

SEQ ID NO: 1247652 - DNA, 15 bp, Homo sapiens
cccaaaacaggtgca

SEQ ID NO: 1247653 - DNA, 15 bp, Homo sapiens
acccaaaacaggtgc

SEQ ID NO: 1247654 - DNA, 15 bp, Homo sapiens
gacccaaaacaggtg

SEQ ID NO: 1247655 - DNA, 15 bp, Homo sapiens
tgacccaaaacaggt

SEQ ID NO: 1247656 - DNA, 15 bp, Homo sapiens
ctgacccaaaacagg

SEQ ID NO: 1247657 - DNA, 15 bp, Homo sapiens
actgacccaaaacag

SEQ ID NO: 1247658 - DNA, 15 bp, Homo sapiens
aactgacccaaaaca

SEQ ID NO: 1247659 - DNA, 15 bp, Homo sapiens
aaactgacccaaaac

SEQ ID NO: 1247660 - DNA, 15 bp, Homo sapiens
gaaactgacccaaaa

SEQ ID NO: 1247661 - DNA, 15 bp, Homo sapiens
agaaactgacccaaa

SEQ ID NO: 1247662 - DNA, 15 bp, Homo sapiens
aagaaactgacccaa

SEQ ID NO: 1247663 - DNA, 15 bp, Homo sapiens
gaagaaactgaccca

SEQ ID NO: 1247664 - DNA, 15 bp, Homo sapiens
ggaagaaactgaccc

SEQ ID NO: 1247665 - DNA, 15 bp, Homo sapiens
gggaagaaactgacc

SEQ ID NO: 1247666 - DNA, 15 bp, Homo sapiens
tgggaagaaactgac

SEQ ID NO: 1247667 - DNA, 15 bp, Homo sapiens
gtgggaagaaactga

SEQ ID NO: 1247668 - DNA, 15 bp, Homo sapiens
ggtgggaagaaactg

SEQ ID NO: 1247669 - DNA, 15 bp, Homo sapiens
gggtgggaagaaact

SEQ ID NO: 1247670 - DNA, 15 bp, Homo sapiens
ggggtgggaagaaac

SEQ ID NO: 1247671 - DNA, 15 bp, Homo sapiens
tggggtgggaagaaa

SEQ ID NO: 1247672 - DNA, 15 bp, Homo sapiens
ttggggtgggaagaa

SEQ ID NO: 1247673 - DNA, 15 bp, Homo sapiens
tttggggtgggaaga

SEQ ID NO: 1247674 - DNA, 15 bp, Homo sapiens
ctttggggtgggaag

SEQ ID NO: 1247675 - DNA, 15 bp, Homo sapiens
tctttggggtgggaa

SEQ ID NO: 1247676 - DNA, 15 bp, Homo sapiens
ttctttggggtggga

SEQ ID NO: 1247677 - DNA, 15 bp, Homo sapiens
cttctttggggtggg

SEQ ID NO: 1247678 - DNA, 15 bp, Homo sapiens
ccttctttggggtgg

SEQ ID NO: 1247679 - DNA, 15 bp, Homo sapiens
tccttctttggggtg

SEQ ID NO: 1247680 - DNA, 15 bp, Homo sapiens
ctccttctttggggt

SEQ ID NO: 1247681 - DNA, 15 bp, Homo sapiens
cctccttctttgggg

SEQ ID NO: 1247682 - DNA, 15 bp, Homo sapiens
gcctccttctttggg

SEQ ID NO: 1247683 - DNA, 15 bp, Homo sapiens
tgcctccttctttgg

SEQ ID NO: 1247684 - DNA, 15 bp, Homo sapiens
ctgcctccttctttg

SEQ ID NO: 1247685 - DNA, 15 bp, Homo sapiens
cctgcctccttcttt

SEQ ID NO: 1247686 - DNA, 15 bp, Homo sapiens
gcctgcctccttctt

SEQ ID NO: 1247687 - DNA, 15 bp, Homo sapiens
tgcctgcctccttct

SEQ ID NO: 1247688 - DNA, 15 bp, Homo sapiens
ttgcctgcctccttc

SEQ ID NO: 1247689 - DNA, 15 bp, Homo sapiens
cttgcctgcctcctt

SEQ ID NO: 1247690 - DNA, 15 bp, Homo sapiens
acttgcctgcctcct

SEQ ID NO: 1247691 - DNA, 15 bp, Homo sapiens
cacttgcctgcctcc

SEQ ID NO: 1247692 - DNA, 15 bp, Homo sapiens
gcacttgcctgcctc

SEQ ID NO: 1247693 - DNA, 15 bp, Homo sapiens
agcacttgcctgcct

SEQ ID NO: 1247694 - DNA, 15 bp, Homo sapiens
gagcacttgcctgcc

SEQ ID NO: 1247695 - DNA, 15 bp, Homo sapiens
tgagcacttgcctgc

SEQ ID NO: 1247696 - DNA, 15 bp, Homo sapiens
ctgagcacttgcctg

SEQ ID NO: 1247697 - DNA, 15 bp, Homo sapiens
gctgagcacttgcct

SEQ ID NO: 1247698 - DNA, 15 bp, Homo sapiens
tgctgagcacttgcc

SEQ ID NO: 1247699 - DNA, 15 bp, Homo sapiens
gtgctgagcacttgc

SEQ ID NO: 1247700 - DNA, 15 bp, Homo sapiens
ggtgctgagcacttg

SEQ ID NO: 1247701 - DNA, 15 bp, Homo sapiens
aggtgctgagcactt

SEQ ID NO: 1247702 - DNA, 15 bp, Homo sapiens
aaggtgctgagcact

SEQ ID NO: 1247703 - DNA, 15 bp, Homo sapiens
caaggtgctgagcac

SEQ ID NO: 1247704 - DNA, 15 bp, Homo sapiens
gcaaggtgctgagca

SEQ ID NO: 1247705 - DNA, 15 bp, Homo sapiens
ggcaaggtgctgagc

SEQ ID NO: 1247706 - DNA, 15 bp, Homo sapiens
gggcaaggtgctgag

SEQ ID NO: 1247707 - DNA, 15 bp, Homo sapiens
tgggcaaggtgctga

SEQ ID NO: 1247708 - DNA, 15 bp, Homo sapiens
atgggcaaggtgctg

SEQ ID NO: 1247709 - DNA, 15 bp, Homo sapiens
aatgggcaaggtgct

SEQ ID NO: 1247710 - DNA, 15 bp, Homo sapiens
aaatgggcaaggtgc

SEQ ID NO: 1247711 - DNA, 15 bp, Homo sapiens
gaaatgggcaaggtg

SEQ ID NO: 1247712 - DNA, 15 bp, Homo sapiens
tgaaatgggcaaggt

SEQ ID NO: 1247713 - DNA, 15 bp, Homo sapiens
gtgaaatgggcaagg

SEQ ID NO: 1247714 - DNA, 15 bp, Homo sapiens
tgtgaaatgggcaag

SEQ ID NO: 1247715 - DNA, 15 bp, Homo sapiens
ctgtgaaatgggcaa

SEQ ID NO: 1247716 - DNA, 15 bp, Homo sapiens
tctgtgaaatgggca

SEQ ID NO: 1247717 - DNA, 15 bp, Homo sapiens
atctgtgaaatgggc

SEQ ID NO: 1247718 - DNA, 15 bp, Homo sapiens
catctgtgaaatggg

SEQ ID NO: 1247719 - DNA, 15 bp, Homo sapiens
gcatctgtgaaatgg

SEQ ID NO: 1247720 - DNA, 15 bp, Homo sapiens
tgcatctgtgaaatg

SEQ ID NO: 1247721 - DNA, 15 bp, Homo sapiens
ttgcatctgtgaaat

SEQ ID NO: 1247722 - DNA, 15 bp, Homo sapiens
tttgcatctgtgaaa

SEQ ID NO: 1247723 - DNA, 15 bp, Homo sapiens
ctttgcatctgtgaa

SEQ ID NO: 1247724 - DNA, 15 bp, Homo sapiens
gctttgcatctgtga

SEQ ID NO: 1247725 - DNA, 15 bp, Homo sapiens
ggctttgcatctgtg

SEQ ID NO: 1247726 - DNA, 15 bp, Homo sapiens
tggctttgcatctgt

SEQ ID NO: 1247727 - DNA, 15 bp, Homo sapiens
ctggctttgcatctg

SEQ ID NO: 1247728 - DNA, 15 bp, Homo sapiens
tctggctttgcatct

SEQ ID NO: 1247729 - DNA, 15 bp, Homo sapiens
ctctggctttgcatc

SEQ ID NO: 1247730 - DNA, 15 bp, Homo sapiens
tctctggctttgcat

SEQ ID NO: 1247731 - DNA, 15 bp, Homo sapiens
gtctctggctttgca

SEQ ID NO: 1247732 - DNA, 15 bp, Homo sapiens
cgtctctggctttgc

SEQ ID NO: 1247733 - DNA, 15 bp, Homo sapiens
gcgtctctggctttg

SEQ ID NO: 1247734 - DNA, 15 bp, Homo sapiens
tgcgtctctggcttt

SEQ ID NO: 1247735 - DNA, 15 bp, Homo sapiens
ctgcgtctctggctt

SEQ ID NO: 1247736 - DNA, 15 bp, Homo sapiens
cctgcgtctctggct

SEQ ID NO: 1247737 - DNA, 15 bp, Homo sapiens
tcctgcgtctctggc

SEQ ID NO: 1247738 - DNA, 15 bp, Homo sapiens
ttcctgcgtctctgg

SEQ ID NO: 1247739 - DNA, 15 bp, Homo sapiens
attcctgcgtctctg

SEQ ID NO: 1247740 - DNA, 15 bp, Homo sapiens
aattcctgcgtctct

SEQ ID NO: 1247741 - DNA, 15 bp, Homo sapiens
taattcctgcgtctc

SEQ ID NO: 1247742 - DNA, 15 bp, Homo sapiens
ttaattcctgcgtct

SEQ ID NO: 1247743 - DNA, 15 bp, Homo sapiens
cttaattcctgcgtc

SEQ ID NO: 1247744 - DNA, 15 bp, Homo sapiens
acttaattcctgcgt

SEQ ID NO: 1247745 - DNA, 15 bp, Homo sapiens
tacttaattcctgcg

SEQ ID NO: 1247746 - DNA, 15 bp, Homo sapiens
ctacttaattcctgc

SEQ ID NO: 1247747 - DNA, 15 bp, Homo sapiens
actacttaattcctg

SEQ ID NO: 1247748 - DNA, 15 bp, Homo sapiens
aactacttaattcct

SEQ ID NO: 1247749 - DNA, 15 bp, Homo sapiens
aaactacttaattcc

SEQ ID NO: 1247750 - DNA, 15 bp, Homo sapiens
caaactacttaattc

SEQ ID NO: 1247751 - DNA, 15 bp, Homo sapiens
gcaaactacttaatt

SEQ ID NO: 1247752 - DNA, 15 bp, Homo sapiens
agcaaactacttaat

SEQ ID NO: 1247753 - DNA, 15 bp, Homo sapiens
gagcaaactacttaa

SEQ ID NO: 1247754 - DNA, 15 bp, Homo sapiens
tgagcaaactactta

SEQ ID NO: 1247755 - DNA, 15 bp, Homo sapiens
ctgagcaaactactt

SEQ ID NO: 1247756 - DNA, 15 bp, Homo sapiens
tctgagcaaactact

SEQ ID NO: 1247757 - DNA, 15 bp, Homo sapiens
gtctgagcaaactac

SEQ ID NO: 1247758 - DNA, 15 bp, Homo sapiens
agtctgagcaaacta

SEQ ID NO: 1247759 - DNA, 15 bp, Homo sapiens
aagtctgagcaaact

SEQ ID NO: 1247760 - DNA, 15 bp, Homo sapiens
gaagtctgagcaaac

SEQ ID NO: 1247761 - DNA, 15 bp, Homo sapiens
ggaagtctgagcaaa

SEQ ID NO: 1247762 - DNA, 15 bp, Homo sapiens
tggaagtctgagcaa

SEQ ID NO: 1247763 - DNA, 15 bp, Homo sapiens
atggaagtctgagca

SEQ ID NO: 1247764 - DNA, 15 bp, Homo sapiens
catggaagtctgagc

SEQ ID NO: 1247765 - DNA, 15 bp, Homo sapiens
acatggaagtctgag

SEQ ID NO: 1247766 - DNA, 15 bp, Homo sapiens
aacatggaagtctga

SEQ ID NO: 1247767 - DNA, 15 bp, Homo sapiens
caacatggaagtctg

SEQ ID NO: 1247768 - DNA, 15 bp, Homo sapiens
acaacatggaagtct

SEQ ID NO: 1247769 - DNA, 15 bp, Homo sapiens
cacaacatggaagtc

SEQ ID NO: 1247770 - DNA, 15 bp, Homo sapiens
acacaacatggaagt

SEQ ID NO: 1247771 - DNA, 15 bp, Homo sapiens
cacacaacatggaag

SEQ ID NO: 1247772 - DNA, 15 bp, Homo sapiens
ccacacaacatggaa

SEQ ID NO: 1247773 - DNA, 15 bp, Homo sapiens
cccacacaacatgga

SEQ ID NO: 1247774 - DNA, 15 bp, Homo sapiens
acccacacaacatgg

SEQ ID NO: 1247775 - DNA, 15 bp, Homo sapiens
cacccacacaacatg

SEQ ID NO: 1247776 - DNA, 15 bp, Homo sapiens
ccacccacacaacat

SEQ ID NO: 1247777 - DNA, 15 bp, Homo sapiens
cccacccacacaaca

SEQ ID NO: 1247778 - DNA, 15 bp, Homo sapiens
tcccacccacacaac

SEQ ID NO: 1247779 - DNA, 15 bp, Homo sapiens
ttcccacccacacaa

SEQ ID NO: 1247780 - DNA, 15 bp, Homo sapiens
tttcccacccacaca

SEQ ID NO: 1247781 - DNA, 15 bp, Homo sapiens
ctttcccacccacac

SEQ ID NO: 1247782 - DNA, 15 bp, Homo sapiens
tctttcccacccaca

SEQ ID NO: 1247783 - DNA, 15 bp, Homo sapiens
atctttcccacccac

SEQ ID NO: 1247784 - DNA, 15 bp, Homo sapiens
catctttcccaccca

SEQ ID NO: 1247785 - DNA, 15 bp, Homo sapiens
tcatctttcccaccc

SEQ ID NO: 1247786 - DNA, 15 bp, Homo sapiens
ctcatctttcccacc

SEQ ID NO: 1247787 - DNA, 15 bp, Homo sapiens
tctcatctttcccac

SEQ ID NO: 1247788 - DNA, 15 bp, Homo sapiens
gtctcatctttccca

SEQ ID NO: 1247789 - DNA, 15 bp, Homo sapiens
agtctcatctttccc

SEQ ID NO: 1247790 - DNA, 15 bp, Homo sapiens
aagtctcatctttcc

SEQ ID NO: 1247791 - DNA, 15 bp, Homo sapiens
caagtctcatctttc

SEQ ID NO: 1247792 - DNA, 15 bp, Homo sapiens
tcaagtctcatcttt

SEQ ID NO: 1247793 - DNA, 15 bp, Homo sapiens
ttcaagtctcatctt

SEQ ID NO: 1247794 - DNA, 15 bp, Homo sapiens
gttcaagtctcatct

SEQ ID NO: 1247795 - DNA, 15 bp, Homo sapiens
agttcaagtctcatc

SEQ ID NO: 1247796 - DNA, 15 bp, Homo sapiens
gagttcaagtctcat

SEQ ID NO: 1247797 - DNA, 15 bp, Homo sapiens
tgagttcaagtctca

SEQ ID NO: 1247798 - DNA, 15 bp, Homo sapiens
ctgagttcaagtctc

SEQ ID NO: 1247799 - DNA, 15 bp, Homo sapiens
tctgagttcaagtct

SEQ ID NO: 1247800 - DNA, 15 bp, Homo sapiens
gtctgagttcaagtc

SEQ ID NO: 1247801 - DNA, 15 bp, Homo sapiens
ggtctgagttcaagt

SEQ ID NO: 1247802 - DNA, 15 bp, Homo sapiens
aggtctgagttcaag

SEQ ID NO: 1247803 - DNA, 15 bp, Homo sapiens
caggtctgagttcaa

SEQ ID NO: 1247804 - DNA, 15 bp, Homo sapiens
gcaggtctgagttca

SEQ ID NO: 1247805 - DNA, 15 bp, Homo sapiens
agcaggtctgagttc

SEQ ID NO: 1247806 - DNA, 15 bp, Homo sapiens
cagcaggtctgagtt

SEQ ID NO: 1247807 - DNA, 15 bp, Homo sapiens
ccagcaggtctgagt

SEQ ID NO: 1247808 - DNA, 15 bp, Homo sapiens
gccagcaggtctgag

SEQ ID NO: 1247809 - DNA, 15 bp, Homo sapiens
agccagcaggtctga

SEQ ID NO: 1247810 - DNA, 15 bp, Homo sapiens
aagccagcaggtctg

SEQ ID NO: 1247811 - DNA, 15 bp, Homo sapiens
gaagccagcaggtct

SEQ ID NO: 1247812 - DNA, 15 bp, Homo sapiens
tgaagccagcaggtc

SEQ ID NO: 1247813 - DNA, 15 bp, Homo sapiens
ttgaagccagcaggt

SEQ ID NO: 1247814 - DNA, 15 bp, Homo sapiens
tttgaagccagcagg

SEQ ID NO: 1247815 - DNA, 15 bp, Homo sapiens
gtttgaagccagcag

SEQ ID NO: 1247816 - DNA, 15 bp, Homo sapiens
ggtttgaagccagca

SEQ ID NO: 1247817 - DNA, 15 bp, Homo sapiens
gggtttgaagccagc

SEQ ID NO: 1247818 - DNA, 15 bp, Homo sapiens
tgggtttgaagccag

SEQ ID NO: 1247819 - DNA, 15 bp, Homo sapiens
ctgggtttgaagcca

SEQ ID NO: 1247820 - DNA, 15 bp, Homo sapiens
cctgggtttgaagcc

SEQ ID NO: 1247821 - DNA, 15 bp, Homo sapiens
tcctgggtttgaagc

SEQ ID NO: 1247822 - DNA, 15 bp, Homo sapiens
atcctgggtttgaag

SEQ ID NO: 1247823 - DNA, 15 bp, Homo sapiens
catcctgggtttgaa

SEQ ID NO: 1247824 - DNA, 15 bp, Homo sapiens
acatcctgggtttga

SEQ ID NO: 1247825 - DNA, 15 bp, Homo sapiens
cacatcctgggtttg

SEQ ID NO: 1247826 - DNA, 15 bp, Homo sapiens
gcacatcctgggttt

SEQ ID NO: 1247827 - DNA, 15 bp, Homo sapiens
tgcacatcctgggtt

SEQ ID NO: 1247828 - DNA, 15 bp, Homo sapiens
gtgcacatcctgggt

SEQ ID NO: 1247829 - DNA, 15 bp, Homo sapiens
tgtgcacatcctggg

SEQ ID NO: 1247830 - DNA, 15 bp, Homo sapiens
gtgtgcacatcctgg

SEQ ID NO: 1247831 - DNA, 15 bp, Homo sapiens
ggtgtgcacatcctg

SEQ ID NO: 1247832 - DNA, 15 bp, Homo sapiens
gggtgtgcacatcct

SEQ ID NO: 1247833 - DNA, 15 bp, Homo sapiens
agggtgtgcacatcc

SEQ ID NO: 1247834 - DNA, 15 bp, Homo sapiens
aagggtgtgcacatc

SEQ ID NO: 1247835 - DNA, 15 bp, Homo sapiens
aaagggtgtgcacat

SEQ ID NO: 1247836 - DNA, 15 bp, Homo sapiens
caaagggtgtgcaca

SEQ ID NO: 1247837 - DNA, 15 bp, Homo sapiens
gcaaagggtgtgcac

SEQ ID NO: 1247838 - DNA, 15 bp, Homo sapiens
tgcaaagggtgtgca

SEQ ID NO: 1247839 - DNA, 15 bp, Homo sapiens
gtgcaaagggtgtgc

SEQ ID NO: 1247840 - DNA, 15 bp, Homo sapiens
tgtgcaaagggtgtg

SEQ ID NO: 1247841 - DNA, 15 bp, Homo sapiens
ttgtgcaaagggtgt

SEQ ID NO: 1247842 - DNA, 15 bp, Homo sapiens
attgtgcaaagggtg

SEQ ID NO: 1247843 - DNA, 15 bp, Homo sapiens
cattgtgcaaagggt

SEQ ID NO: 1247844 - DNA, 15 bp, Homo sapiens
acattgtgcaaaggg

SEQ ID NO: 1247845 - DNA, 15 bp, Homo sapiens
tacattgtgcaaagg

SEQ ID NO: 1247846 - DNA, 15 bp, Homo sapiens
ttacattgtgcaaag

SEQ ID NO: 1247847 - DNA, 15 bp, Homo sapiens
tttacattgtgcaaa

SEQ ID NO: 1247848 - DNA, 15 bp, Homo sapiens
ctttacattgtgcaa

SEQ ID NO: 1247849 - DNA, 15 bp, Homo sapiens
tctttacattgtgca

SEQ ID NO: 1247850 - DNA, 15 bp, Homo sapiens
ctctttacattgtgc

SEQ ID NO: 1247851 - DNA, 15 bp, Homo sapiens
actctttacattgtg

SEQ ID NO: 1247852 - DNA, 15 bp, Homo sapiens
gactctttacattgt

SEQ ID NO: 1247853 - DNA, 15 bp, Homo sapiens
tgactctttacattg

SEQ ID NO: 1247854 - DNA, 15 bp, Homo sapiens
ctgactctttacatt

SEQ ID NO: 1247855 - DNA, 15 bp, Homo sapiens
gctgactctttacat

SEQ ID NO: 1247856 - DNA, 15 bp, Homo sapiens
tgctgactctttaca

SEQ ID NO: 1247857 - DNA, 15 bp, Homo sapiens
gtgctgactctttac

SEQ ID NO: 1247858 - DNA, 15 bp, Homo sapiens
tgtgctgactcttta

SEQ ID NO: 1247859 - DNA, 15 bp, Homo sapiens
atgtgctgactcttt

SEQ ID NO: 1247860 - DNA, 15 bp, Homo sapiens
catgtgctgactctt

SEQ ID NO: 1247861 - DNA, 15 bp, Homo sapiens
acatgtgctgactct

SEQ ID NO: 1247862 - DNA, 15 bp, Homo sapiens
cacatgtgctgactc

SEQ ID NO: 1247863 - DNA, 15 bp, Homo sapiens
acacatgtgctgact

SEQ ID NO: 1247864 - DNA, 15 bp, Homo sapiens
gacacatgtgctgac

SEQ ID NO: 1247865 - DNA, 15 bp, Homo sapiens
tgacacatgtgctga

SEQ ID NO: 1247866 - DNA, 15 bp, Homo sapiens
ttgacacatgtgctg

SEQ ID NO: 1247867 - DNA, 15 bp, Homo sapiens
cttgacacatgtgct

SEQ ID NO: 1247868 - DNA, 15 bp, Homo sapiens
ccttgacacatgtgc

SEQ ID NO: 1247869 - DNA, 15 bp, Homo sapiens
gccttgacacatgtg

SEQ ID NO: 1247870 - DNA, 15 bp, Homo sapiens
agccttgacacatgt

SEQ ID NO: 1247871 - DNA, 15 bp, Homo sapiens
gagccttgacacatg

SEQ ID NO: 1247872 - DNA, 15 bp, Homo sapiens
cgagccttgacacat

SEQ ID NO: 1247873 - DNA, 15 bp, Homo sapiens
ccgagccttgacaca

SEQ ID NO: 1247874 - DNA, 15 bp, Homo sapiens
gccgagccttgacac

SEQ ID NO: 1247875 - DNA, 15 bp, Homo sapiens
tgccgagccttgaca

SEQ ID NO: 1247876 - DNA, 15 bp, Homo sapiens
gtgccgagccttgac

SEQ ID NO: 1247877 - DNA, 15 bp, Homo sapiens
agtgccgagccttga

SEQ ID NO: 1247878 - DNA, 15 bp, Homo sapiens
cagtgccgagccttg

SEQ ID NO: 1247879 - DNA, 15 bp, Homo sapiens
tcagtgccgagcctt

SEQ ID NO: 1247880 - DNA, 15 bp, Homo sapiens
ctcagtgccgagcct

SEQ ID NO: 1247881 - DNA, 15 bp, Homo sapiens
actcagtgccgagcc

SEQ ID NO: 1247882 - DNA, 15 bp, Homo sapiens
aactcagtgccgagc

SEQ ID NO: 1247883 - DNA, 15 bp, Homo sapiens
aaactcagtgccgag

SEQ ID NO: 1247884 - DNA, 15 bp, Homo sapiens
caaactcagtgccga

SEQ ID NO: 1247885 - DNA, 15 bp, Homo sapiens
acaaactcagtgccg

SEQ ID NO: 1247886 - DNA, 15 bp, Homo sapiens
gacaaactcagtgcc

SEQ ID NO: 1247887 - DNA, 15 bp, Homo sapiens
agacaaactcagtgc

SEQ ID NO: 1247888 - DNA, 15 bp, Homo sapiens
cagacaaactcagtg

SEQ ID NO: 1247889 - DNA, 15 bp, Homo sapiens
ccagacaaactcagt

SEQ ID NO: 1247890 - DNA, 15 bp, Homo sapiens
cccagacaaactcag

SEQ ID NO: 1247891 - DNA, 15 bp, Homo sapiens
ccccagacaaactca

SEQ ID NO: 1247892 - DNA, 15 bp, Homo sapiens
accccagacaaactc

SEQ ID NO: 1247893 - DNA, 15 bp, Homo sapiens
gaccccagacaaact

SEQ ID NO: 1247894 - DNA, 15 bp, Homo sapiens
ggaccccagacaaac

SEQ ID NO: 1247895 - DNA, 15 bp, Homo sapiens
aggaccccagacaaa

SEQ ID NO: 1247896 - DNA, 15 bp, Homo sapiens
gaggaccccagacaa

SEQ ID NO: 1247897 - DNA, 15 bp, Homo sapiens
agaggaccccagaca

SEQ ID NO: 1247898 - DNA, 15 bp, Homo sapiens
cagaggaccccagac

SEQ ID NO: 1247899 - DNA, 15 bp, Homo sapiens
acagaggaccccaga

SEQ ID NO: 1247900 - DNA, 15 bp, Homo sapiens
cacagaggaccccag

SEQ ID NO: 1247901 - DNA, 15 bp, Homo sapiens
ccacagaggacccca

SEQ ID NO: 1247902 - DNA, 15 bp, Homo sapiens
accacagaggacccc

SEQ ID NO: 1247903 - DNA, 15 bp, Homo sapiens
gaccacagaggaccc

SEQ ID NO: 1247904 - DNA, 15 bp, Homo sapiens
agaccacagaggacc

SEQ ID NO: 1247905 - DNA, 15 bp, Homo sapiens
gagaccacagaggac

SEQ ID NO: 1247906 - DNA, 15 bp, Homo sapiens
agagaccacagagga

SEQ ID NO: 1247907 - DNA, 15 bp, Homo sapiens
gagagaccacagagg

SEQ ID NO: 1247908 - DNA, 15 bp, Homo sapiens
ggagagaccacagag

SEQ ID NO: 1247909 - DNA, 15 bp, Homo sapiens
aggagagaccacaga

SEQ ID NO: 1247910 - DNA, 15 bp, Homo sapiens
caggagagaccacag

SEQ ID NO: 1247911 - DNA, 15 bp, Homo sapiens
tcaggagagaccaca

SEQ ID NO: 1247912 - DNA, 15 bp, Homo sapiens
ctcaggagagaccac

SEQ ID NO: 1247913 - DNA, 15 bp, Homo sapiens
cctcaggagagacca

SEQ ID NO: 1247914 - DNA, 15 bp, Homo sapiens
acctcaggagagacc

SEQ ID NO: 1247915 - DNA, 15 bp, Homo sapiens
gacctcaggagagac

SEQ ID NO: 1247916 - DNA, 15 bp, Homo sapiens
ggacctcaggagaga

SEQ ID NO: 1247917 - DNA, 15 bp, Homo sapiens
aggacctcaggagag

SEQ ID NO: 1247918 - DNA, 15 bp, Homo sapiens
gaggacctcaggaga

SEQ ID NO: 1247919 - DNA, 15 bp, Homo sapiens
tgaggacctcaggag

SEQ ID NO: 1247920 - DNA, 15 bp, Homo sapiens
gtgaggacctcagga

SEQ ID NO: 1247921 - DNA, 15 bp, Homo sapiens
tgtgaggacctcagg

SEQ ID NO: 1247922 - DNA, 15 bp, Homo sapiens
atgtgaggacctcag

SEQ ID NO: 1247923 - DNA, 15 bp, Homo sapiens
aatgtgaggacctca

SEQ ID NO: 1247924 - DNA, 15 bp, Homo sapiens
caatgtgaggacctc

SEQ ID NO: 1247925 - DNA, 15 bp, Homo sapiens
gcaatgtgaggacct

SEQ ID NO: 1247926 - DNA, 15 bp, Homo sapiens
ggcaatgtgaggacc

SEQ ID NO: 1247927 - DNA, 15 bp, Homo sapiens
aggcaatgtgaggac

SEQ ID NO: 1247928 - DNA, 15 bp, Homo sapiens
caggcaatgtgagga

SEQ ID NO: 1247929 - DNA, 15 bp, Homo sapiens
gcaggcaatgtgagg

SEQ ID NO: 1247930 - DNA, 15 bp, Homo sapiens
agcaggcaatgtgag

SEQ ID NO: 1247931 - DNA, 15 bp, Homo sapiens
aagcaggcaatgtga

SEQ ID NO: 1247932 - DNA, 15 bp, Homo sapiens
gaagcaggcaatgtg

SEQ ID NO: 1247933 - DNA, 15 bp, Homo sapiens
tgaagcaggcaatgt

SEQ ID NO: 1247934 - DNA, 15 bp, Homo sapiens
gtgaagcaggcaatg

SEQ ID NO: 1247935 - DNA, 15 bp, Homo sapiens
tgtgaagcaggcaat

SEQ ID NO: 1247936 - DNA, 15 bp, Homo sapiens
ttgtgaagcaggcaa

SEQ ID NO: 1247937 - DNA, 15 bp, Homo sapiens
gttgtgaagcaggca

SEQ ID NO: 1247938 - DNA, 15 bp, Homo sapiens
agttgtgaagcaggc

SEQ ID NO: 1247939 - DNA, 15 bp, Homo sapiens
gagttgtgaagcagg

SEQ ID NO: 1247940 - DNA, 15 bp, Homo sapiens
agagttgtgaagcag

SEQ ID NO: 1247941 - DNA, 15 bp, Homo sapiens
cagagttgtgaagca

SEQ ID NO: 1247942 - DNA, 15 bp, Homo sapiens
gcagagttgtgaagc

SEQ ID NO: 1247943 - DNA, 15 bp, Homo sapiens
tgcagagttgtgaag

SEQ ID NO: 1247944 - DNA, 15 bp, Homo sapiens
ttgcagagttgtgaa

SEQ ID NO: 1247945 - DNA, 15 bp, Homo sapiens
cttgcagagttgtga

SEQ ID NO: 1247946 - DNA, 15 bp, Homo sapiens
gcttgcagagttgtg

SEQ ID NO: 1247947 - DNA, 15 bp, Homo sapiens
agcttgcagagttgt

SEQ ID NO: 1247948 - DNA, 15 bp, Homo sapiens
cagcttgcagagttg

SEQ ID NO: 1247949 - DNA, 15 bp, Homo sapiens
ccagcttgcagagtt

SEQ ID NO: 1247950 - DNA, 15 bp, Homo sapiens
cccagcttgcagagt

SEQ ID NO: 1247951 - DNA, 15 bp, Homo sapiens
tcccagcttgcagag

SEQ ID NO: 1247952 - DNA, 15 bp, Homo sapiens
ttcccagcttgcaga

SEQ ID NO: 1247953 - DNA, 15 bp, Homo sapiens
cttcccagcttgcag

SEQ ID NO: 1247954 - DNA, 15 bp, Homo sapiens
acttcccagcttgca

SEQ ID NO: 1247955 - DNA, 15 bp, Homo sapiens
cacttcccagcttgc

SEQ ID NO: 1247956 - DNA, 15 bp, Homo sapiens
tcacttcccagcttg

SEQ ID NO: 1247957 - DNA, 15 bp, Homo sapiens
ctcacttcccagctt

SEQ ID NO: 1247958 - DNA, 15 bp, Homo sapiens
gctcacttcccagct

SEQ ID NO: 1247959 - DNA, 15 bp, Homo sapiens
ggctcacttcccagc

SEQ ID NO: 1247960 - DNA, 15 bp, Homo sapiens
tggctcacttcccag

SEQ ID NO: 1247961 - DNA, 15 bp, Homo sapiens
gtggctcacttccca

SEQ ID NO: 1247962 - DNA, 15 bp, Homo sapiens
tgtggctcacttccc

SEQ ID NO: 1247963 - DNA, 15 bp, Homo sapiens
atgtggctcacttcc

SEQ ID NO: 1247964 - DNA, 15 bp, Homo sapiens
gatgtggctcacttc

SEQ ID NO: 1247965 - DNA, 15 bp, Homo sapiens
tgatgtggctcactt

SEQ ID NO: 1247966 - DNA, 15 bp, Homo sapiens
ctgatgtggctcact

SEQ ID NO: 1247967 - DNA, 15 bp, Homo sapiens
cctgatgtggctcac

SEQ ID NO: 1247968 - DNA, 15 bp, Homo sapiens
ccctgatgtggctca

SEQ ID NO: 1247969 - DNA, 15 bp, Homo sapiens
tccctgatgtggctc

SEQ ID NO: 1247970 - DNA, 15 bp, Homo sapiens
atccctgatgtggct

SEQ ID NO: 1247971 - DNA, 15 bp, Homo sapiens
gatccctgatgtggc

SEQ ID NO: 1247972 - DNA, 15 bp, Homo sapiens
cgatccctgatgtgg

SEQ ID NO: 1247973 - DNA, 15 bp, Homo sapiens
tcgatccctgatgtg

SEQ ID NO: 1247974 - DNA, 15 bp, Homo sapiens
gtcgatccctgatgt

SEQ ID NO: 1247975 - DNA, 15 bp, Homo sapiens
ggtcgatccctgatg

SEQ ID NO: 1247976 - DNA, 15 bp, Homo sapiens
gggtcgatccctgat

SEQ ID NO: 1247977 - DNA, 15 bp, Homo sapiens
ggggtcgatccctga

SEQ ID NO: 1247978 - DNA, 15 bp, Homo sapiens
gggggtcgatccctg

SEQ ID NO: 1247979 - DNA, 15 bp, Homo sapiens
tgggggtcgatccct

SEQ ID NO: 1247980 - DNA, 15 bp, Homo sapiens
ctgggggtcgatccc

SEQ ID NO: 1247981 - DNA, 15 bp, Homo sapiens
actgggggtcgatcc

SEQ ID NO: 1247982 - DNA, 15 bp, Homo sapiens
gactgggggtcgatc

SEQ ID NO: 1247983 - DNA, 15 bp, Homo sapiens
ggactgggggtcgat

SEQ ID NO: 1247984 - DNA, 15 bp, Homo sapiens
gggactgggggtcga

SEQ ID NO: 1247985 - DNA, 15 bp, Homo sapiens
ggggactgggggtcg

SEQ ID NO: 1247986 - DNA, 15 bp, Homo sapiens
tggggactgggggtc

SEQ ID NO: 1247987 - DNA, 15 bp, Homo sapiens
ttggggactgggggt

SEQ ID NO: 1247988 - DNA, 15 bp, Homo sapiens
gttggggactggggg

SEQ ID NO: 1247989 - DNA, 15 bp, Homo sapiens
tgttggggactgggg

SEQ ID NO: 1247990 - DNA, 15 bp, Homo sapiens
gtgttggggactggg

SEQ ID NO: 1247991 - DNA, 15 bp, Homo sapiens
ggtgttggggactgg

SEQ ID NO: 1247992 - DNA, 15 bp, Homo sapiens
gggtgttggggactg

SEQ ID NO: 1247993 - DNA, 15 bp, Homo sapiens
tgggtgttggggact

SEQ ID NO: 1247994 - DNA, 15 bp, Homo sapiens
ctgggtgttggggac

SEQ ID NO: 1247995 - DNA, 15 bp, Homo sapiens
gctgggtgttgggga

SEQ ID NO: 1247996 - DNA, 15 bp, Homo sapiens
tgctgggtgttgggg

SEQ ID NO: 1247997 - DNA, 15 bp, Homo sapiens
gtgctgggtgttggg

SEQ ID NO: 1247998 - DNA, 15 bp, Homo sapiens
ggtgctgggtgttgg

SEQ ID NO: 1247999 - DNA, 15 bp, Homo sapiens
gggtgctgggtgttg

SEQ ID NO: 1248000 - DNA, 15 bp, Homo sapiens
tgggtgctgggtgtt

SEQ ID NO: 1248001 - DNA, 15 bp, Homo sapiens
ctgggtgctgggtgt

SEQ ID NO: 1248002 - DNA, 15 bp, Homo sapiens
cctgggtgctgggtg

SEQ ID NO: 1248003 - DNA, 15 bp, Homo sapiens
acctgggtgctgggt

SEQ ID NO: 1248004 - DNA, 15 bp, Homo sapiens
cacctgggtgctggg

SEQ ID NO: 1248005 - DNA, 15 bp, Homo sapiens
gcacctgggtgctgg

SEQ ID NO: 1248006 - DNA, 15 bp, Homo sapiens
ggcacctgggtgctg

SEQ ID NO: 1248007 - DNA, 15 bp, Homo sapiens
aggcacctgggtgct

SEQ ID NO: 1248008 - DNA, 15 bp, Homo sapiens
gaggcacctgggtgc

SEQ ID NO: 1248009 - DNA, 15 bp, Homo sapiens
agaggcacctgggtg

SEQ ID NO: 1248010 - DNA, 15 bp, Homo sapiens
gagaggcacctgggt

SEQ ID NO: 1248011 - DNA, 15 bp, Homo sapiens
ggagaggcacctggg

SEQ ID NO: 1248012 - DNA, 15 bp, Homo sapiens
gggagaggcacctgg

SEQ ID NO: 1248013 - DNA, 15 bp, Homo sapiens
agggagaggcacctg

SEQ ID NO: 1248014 - DNA, 15 bp, Homo sapiens
cagggagaggcacct

SEQ ID NO: 1248015 - DNA, 15 bp, Homo sapiens
ccagggagaggcacc

SEQ ID NO: 1248016 - DNA, 15 bp, Homo sapiens
accagggagaggcac

SEQ ID NO: 1248017 - DNA, 15 bp, Homo sapiens
gaccagggagaggca

SEQ ID NO: 1248018 - DNA, 15 bp, Homo sapiens
agaccagggagaggc

SEQ ID NO: 1248019 - DNA, 15 bp, Homo sapiens
aagaccagggagagg

SEQ ID NO: 1248020 - DNA, 15 bp, Homo sapiens
caagaccagggagag

SEQ ID NO: 1248021 - DNA, 15 bp, Homo sapiens
acaagaccagggaga

SEQ ID NO: 1248022 - DNA, 15 bp, Homo sapiens
aacaagaccagggag

SEQ ID NO: 1248023 - DNA, 15 bp, Homo sapiens
gaacaagaccaggga

SEQ ID NO: 1248024 - DNA, 15 bp, Homo sapiens
ggaacaagaccaggg

SEQ ID NO: 1248025 - DNA, 15 bp, Homo sapiens
aggaacaagaccagg

SEQ ID NO: 1248026 - DNA, 15 bp, Homo sapiens
gaggaacaagaccag

SEQ ID NO: 1248027 - DNA, 15 bp, Homo sapiens
tgaggaacaagacca

SEQ ID NO: 1248028 - DNA, 15 bp, Homo sapiens
ctgaggaacaagacc

SEQ ID NO: 1248029 - DNA, 15 bp, Homo sapiens
cctgaggaacaagac

SEQ ID NO: 1248030 - DNA, 15 bp, Homo sapiens
gcctgaggaacaaga

SEQ ID NO: 1248031 - DNA, 15 bp, Homo sapiens
agcctgaggaacaag

SEQ ID NO: 1248032 - DNA, 15 bp, Homo sapiens
aagcctgaggaacaa

SEQ ID NO: 1248033 - DNA, 15 bp, Homo sapiens
aaagcctgaggaaca

SEQ ID NO: 1248034 - DNA, 15 bp, Homo sapiens
caaagcctgaggaac

SEQ ID NO: 1248035 - DNA, 15 bp, Homo sapiens
acaaagcctgaggaa

SEQ ID NO: 1248036 - DNA, 15 bp, Homo sapiens
gacaaagcctgagga

SEQ ID NO: 1248037 - DNA, 15 bp, Homo sapiens
ggacaaagcctgagg

SEQ ID NO: 1248038 - DNA, 15 bp, Homo sapiens
gggacaaagcctgag

SEQ ID NO: 1248039 - DNA, 15 bp, Homo sapiens
agggacaaagcctga

SEQ ID NO: 1248040 - DNA, 15 bp, Homo sapiens
cagggacaaagcctg

SEQ ID NO: 1248041 - DNA, 15 bp, Homo sapiens
gcagggacaaagcct

SEQ ID NO: 1248042 - DNA, 15 bp, Homo sapiens
agcagggacaaagcc

SEQ ID NO: 1248043 - DNA, 15 bp, Homo sapiens
gagcagggacaaagc

SEQ ID NO: 1248044 - DNA, 15 bp, Homo sapiens
agagcagggacaaag

SEQ ID NO: 1248045 - DNA, 15 bp, Homo sapiens
gagagcagggacaaa

SEQ ID NO: 1248046 - DNA, 15 bp, Homo sapiens
ggagagcagggacaa

SEQ ID NO: 1248047 - DNA, 15 bp, Homo sapiens
tggagagcagggaca

SEQ ID NO: 1248048 - DNA, 15 bp, Homo sapiens
ttggagagcagggac

SEQ ID NO: 1248049 - DNA, 15 bp, Homo sapiens
gttggagagcaggga

SEQ ID NO: 1248050 - DNA, 15 bp, Homo sapiens
tgttggagagcaggg

SEQ ID NO: 1248051 - DNA, 15 bp, Homo sapiens
atgttggagagcagg

SEQ ID NO: 1248052 - DNA, 15 bp, Homo sapiens
catgttggagagcag

SEQ ID NO: 1248053 - DNA, 15 bp, Homo sapiens
tcatgttggagagca

SEQ ID NO: 1248054 - DNA, 15 bp, Homo sapiens
gtcatgttggagagc

SEQ ID NO: 1248055 - DNA, 15 bp, Homo sapiens
tgtcatgttggagag

SEQ ID NO: 1248056 - DNA, 15 bp, Homo sapiens
ctgtcatgttggaga

SEQ ID NO: 1248057 - DNA, 15 bp, Homo sapiens
gctgtcatgttggag

SEQ ID NO: 1248058 - DNA, 15 bp, Homo sapiens
agctgtcatgttgga

SEQ ID NO: 1248059 - DNA, 15 bp, Homo sapiens
cagctgtcatgttgg

SEQ ID NO: 1248060 - DNA, 15 bp, Homo sapiens
ccagctgtcatgttg

SEQ ID NO: 1248061 - DNA, 15 bp, Homo sapiens
accagctgtcatgtt

SEQ ID NO: 1248062 - DNA, 15 bp, Homo sapiens
caccagctgtcatgt

SEQ ID NO: 1248063 - DNA, 15 bp, Homo sapiens
tcaccagctgtcatg

SEQ ID NO: 1248064 - DNA, 15 bp, Homo sapiens
ttcaccagctgtcat

SEQ ID NO: 1248065 - DNA, 15 bp, Homo sapiens
attcaccagctgtca

SEQ ID NO: 1248066 - DNA, 15 bp, Homo sapiens
aattcaccagctgtc

SEQ ID NO: 1248067 - DNA, 15 bp, Homo sapiens
aaattcaccagctgt

SEQ ID NO: 1248068 - DNA, 15 bp, Homo sapiens
gaaattcaccagctg

SEQ ID NO: 1248069 - DNA, 15 bp, Homo sapiens
agaaattcaccagct

SEQ ID NO: 1248070 - DNA, 15 bp, Homo sapiens
gagaaattcaccagc

SEQ ID NO: 1248071 - DNA, 15 bp, Homo sapiens
aagagaaattcacca

SEQ ID NO: 1248072 - DNA, 15 bp, Homo sapiens
taagagaaattcacc

SEQ ID NO: 1248073 - DNA, 15 bp, Homo sapiens
ttaagagaaattcac

SEQ ID NO: 1248074 - DNA, 15 bp, Homo sapiens
attaagagaaattca

SEQ ID NO: 1248075 - DNA, 15 bp, Homo sapiens
cattaagagaaattc

SEQ ID NO: 1248076 - DNA, 15 bp, Homo sapiens
ccattaagagaaatt

SEQ ID NO: 1248077 - DNA, 15 bp, Homo sapiens
accattaagagaaat

SEQ ID NO: 1248078 - DNA, 15 bp, Homo sapiens
aaccattaagagaaa

SEQ ID NO: 1248079 - DNA, 15 bp, Homo sapiens
taaccattaagagaa

SEQ ID NO: 1248080 - DNA, 15 bp, Homo sapiens
ctaaccattaagaga

SEQ ID NO: 1248081 - DNA, 15 bp, Homo sapiens
cctaaccattaagag

SEQ ID NO: 1248082 - DNA, 15 bp, Homo sapiens
acctaaccattaaga

SEQ ID NO: 1248083 - DNA, 15 bp, Homo sapiens
gacctaaccattaag

SEQ ID NO: 1248084 - DNA, 15 bp, Homo sapiens
agacctaaccattaa

SEQ ID NO: 1248085 - DNA, 15 bp, Homo sapiens
cagacctaaccatta

SEQ ID NO: 1248086 - DNA, 15 bp, Homo sapiens
tcagacctaaccatt

SEQ ID NO: 1248087 - DNA, 15 bp, Homo sapiens
gtcagacctaaccat

SEQ ID NO: 1248088 - DNA, 15 bp, Homo sapiens
ggtcagacctaacca

SEQ ID NO: 1248089 - DNA, 15 bp, Homo sapiens
aggtcagacctaacc

SEQ ID NO: 1248090 - DNA, 15 bp, Homo sapiens
caggtcagacctaac

SEQ ID NO: 1248091 - DNA, 15 bp, Homo sapiens
ccaggtcagacctaa

SEQ ID NO: 1248092 - DNA, 15 bp, Homo sapiens
cccaggtcagaccta

SEQ ID NO: 1248093 - DNA, 15 bp, Homo sapiens
acccaggtcagacct

SEQ ID NO: 1248094 - DNA, 15 bp, Homo sapiens
gacccaggtcagacc

SEQ ID NO: 1248095 - DNA, 15 bp, Homo sapiens
ggacccaggtcagac

SEQ ID NO: 1248096 - DNA, 15 bp, Homo sapiens
aggacccaggtcaga

SEQ ID NO: 1248097 - DNA, 15 bp, Homo sapiens
gaggacccaggtcag

SEQ ID NO: 1248098 - DNA, 15 bp, Homo sapiens
tgaggacccaggtca

SEQ ID NO: 1248099 - DNA, 15 bp, Homo sapiens
atgaggacccaggtc

SEQ ID NO: 1248100 - DNA, 15 bp, Homo sapiens
gatgaggacccaggt

SEQ ID NO: 1248101 - DNA, 15 bp, Homo sapiens
ggatgaggacccagg

SEQ ID NO: 1248102 - DNA, 15 bp, Homo sapiens
aggatgaggacccag

SEQ ID NO: 1248103 - DNA, 15 bp, Homo sapiens
taggatgaggaccca

SEQ ID NO: 1248104 - DNA, 15 bp, Homo sapiens
gtaggatgaggaccc

SEQ ID NO: 1248105 - DNA, 15 bp, Homo sapiens
ggtaggatgaggacc

SEQ ID NO: 1248106 - DNA, 15 bp, Homo sapiens
gggtaggatgaggac

SEQ ID NO: 1248107 - DNA, 15 bp, Homo sapiens
agggtaggatgagga

SEQ ID NO: 1248108 - DNA, 15 bp, Homo sapiens
tagggtaggatgagg

SEQ ID NO: 1248109 - DNA, 15 bp, Homo sapiens
ctagggtaggatgag

SEQ ID NO: 1248110 - DNA, 15 bp, Homo sapiens
tctagggtaggatga

SEQ ID NO: 1248111 - DNA, 15 bp, Homo sapiens
ttctagggtaggatg

SEQ ID NO: 1248112 - DNA, 15 bp, Homo sapiens
cttctagggtaggat

SEQ ID NO: 1248113 - DNA, 15 bp, Homo sapiens
tcttctagggtagga

SEQ ID NO: 1248114 - DNA, 15 bp, Homo sapiens
gtcttctagggtagg

SEQ ID NO: 1248115 - DNA, 15 bp, Homo sapiens
tgtcttctagggtag

SEQ ID NO: 1248116 - DNA, 15 bp, Homo sapiens
ttgtcttctagggta

SEQ ID NO: 1248117 - DNA, 15 bp, Homo sapiens
tttgtcttctagggt

SEQ ID NO: 1248118 - DNA, 15 bp, Homo sapiens
atttgtcttctaggg

SEQ ID NO: 1248119 - DNA, 15 bp, Homo sapiens
tatttgtcttctagg

SEQ ID NO: 1248120 - DNA, 15 bp, Homo sapiens
ctatttgtcttctag

SEQ ID NO: 1248121 - DNA, 15 bp, Homo sapiens
cctatttgtcttcta

SEQ ID NO: 1248122 - DNA, 15 bp, Homo sapiens
gcctatttgtcttct

SEQ ID NO: 1248123 - DNA, 15 bp, Homo sapiens
agcctatttgtcttc

SEQ ID NO: 1248124 - DNA, 15 bp, Homo sapiens
cagcctatttgtctt

SEQ ID NO: 1248125 - DNA, 15 bp, Homo sapiens
gcagcctatttgtct

SEQ ID NO: 1248126 - DNA, 15 bp, Homo sapiens
tgcagcctatttgtc

SEQ ID NO: 1248127 - DNA, 15 bp, Homo sapiens
gtgcagcctatttgt

SEQ ID NO: 1248128 - DNA, 15 bp, Homo sapiens
ggtgcagcctatttg

SEQ ID NO: 1248129 - DNA, 15 bp, Homo sapiens
gggtgcagcctattt

SEQ ID NO: 1248130 - DNA, 15 bp, Homo sapiens
tgggtgcagcctatt

SEQ ID NO: 1248131 - DNA, 15 bp, Homo sapiens
ttgggtgcagcctat

SEQ ID NO: 1248132 - DNA, 15 bp, Homo sapiens
cttgggtgcagccta

SEQ ID NO: 1248133 - DNA, 15 bp, Homo sapiens
ccttgggtgcagcct

SEQ ID NO: 1248134 - DNA, 15 bp, Homo sapiens
cccttgggtgcagcc

SEQ ID NO: 1248135 - DNA, 15 bp, Homo sapiens
gcccttgggtgcagc

SEQ ID NO: 1248136 - DNA, 15 bp, Homo sapiens
tgcccttgggtgcag

SEQ ID NO: 1248137 - DNA, 15 bp, Homo sapiens
atgcccttgggtgca

SEQ ID NO: 1248138 - DNA, 15 bp, Homo sapiens
aatgcccttgggtgc

SEQ ID NO: 1248139 - DNA, 15 bp, Homo sapiens
taatgcccttgggtg

SEQ ID NO: 1248140 - DNA, 15 bp, Homo sapiens
ttaatgcccttgggt

SEQ ID NO: 1248141 - DNA, 15 bp, Homo sapiens
gttaatgcccttggg

SEQ ID NO: 1248142 - DNA, 15 bp, Homo sapiens
agttaatgcccttgg

SEQ ID NO: 1248143 - DNA, 15 bp, Homo sapiens
aagttaatgcccttg

SEQ ID NO: 1248144 - DNA, 15 bp, Homo sapiens
aaagttaatgccctt

SEQ ID NO: 1248145 - DNA, 15 bp, Homo sapiens
taaagttaatgccct

SEQ ID NO: 1248146 - DNA, 15 bp, Homo sapiens
ataaagttaatgccc

SEQ ID NO: 1248147 - DNA, 15 bp, Homo sapiens
cataaagttaatgcc

SEQ ID NO: 1248148 - DNA, 15 bp, Homo sapiens
acataaagttaatgc

SEQ ID NO: 1248149 - DNA, 15 bp, Homo sapiens
tacataaagttaatg

SEQ ID NO: 1248150 - DNA, 15 bp, Homo sapiens
ttacataaagttaat

SEQ ID NO: 1248151 - DNA, 15 bp, Homo sapiens
cttacataaagttaa

SEQ ID NO: 1248152 - DNA, 15 bp, Homo sapiens
ccttacataaagtta

SEQ ID NO: 1248153 - DNA, 15 bp, Homo sapiens
cccttacataaagtt

SEQ ID NO: 1248154 - DNA, 15 bp, Homo sapiens
tcccttacataaagt

SEQ ID NO: 1248155 - DNA, 15 bp, Homo sapiens
ttcccttacataaag

SEQ ID NO: 1248156 - DNA, 15 bp, Homo sapiens
attcccttacataaa

SEQ ID NO: 1248157 - DNA, 15 bp, Homo sapiens
tattcccttacataa

SEQ ID NO: 1248158 - DNA, 15 bp, Homo sapiens
ctattcccttacata

SEQ ID NO: 1248159 - DNA, 15 bp, Homo sapiens
tctattcccttacat

SEQ ID NO: 1248160 - DNA, 15 bp, Homo sapiens
atctattcccttaca

SEQ ID NO: 1248161 - DNA, 15 bp, Homo sapiens
gatctattcccttac

SEQ ID NO: 1248162 - DNA, 15 bp, Homo sapiens
tgatctattccctta

SEQ ID NO: 1248163 - DNA, 15 bp, Homo sapiens
ttgatctattccctt

SEQ ID NO: 1248164 - DNA, 15 bp, Homo sapiens
tttgatctattccct

SEQ ID NO: 1248165 - DNA, 15 bp, Homo sapiens
atttgatctattccc

SEQ ID NO: 1248166 - DNA, 15 bp, Homo sapiens
catttgatctattcc

SEQ ID NO: 1248167 - DNA, 15 bp, Homo sapiens
acatttgatctattc

SEQ ID NO: 1248168 - DNA, 15 bp, Homo sapiens
cacatttgatctatt

SEQ ID NO: 1248169 - DNA, 15 bp, Homo sapiens
ccacatttgatctat

SEQ ID NO: 1248170 - DNA, 15 bp, Homo sapiens
tccacatttgatcta

SEQ ID NO: 1248171 - DNA, 15 bp, Homo sapiens
ctccacatttgatct

SEQ ID NO: 1248172 - DNA, 15 bp, Homo sapiens
gctccacatttgatc

SEQ ID NO: 1248173 - DNA, 15 bp, Homo sapiens
agctccacatttgat

SEQ ID NO: 1248174 - DNA, 15 bp, Homo sapiens
cagctccacatttga

SEQ ID NO: 1248175 - DNA, 15 bp, Homo sapiens
ccagctccacatttg

SEQ ID NO: 1248176 - DNA, 15 bp, Homo sapiens
cccagctccacattt

SEQ ID NO: 1248177 - DNA, 15 bp, Homo sapiens
gcccagctccacatt

SEQ ID NO: 1248178 - DNA, 15 bp, Homo sapiens
agcccagctccacat

SEQ ID NO: 1248179 - DNA, 15 bp, Homo sapiens
cagcccagctccaca

SEQ ID NO: 1248180 - DNA, 15 bp, Homo sapiens
gcagcccagctccac

SEQ ID NO: 1248181 - DNA, 15 bp, Homo sapiens
agcagcccagctcca

SEQ ID NO: 1248182 - DNA, 15 bp, Homo sapiens
cagcagcccagctcc

SEQ ID NO: 1248183 - DNA, 15 bp, Homo sapiens
gcagcagcccagctc

SEQ ID NO: 1248184 - DNA, 15 bp, Homo sapiens
ggcagcagcccagct

SEQ ID NO: 1248185 - DNA, 15 bp, Homo sapiens
aggcagcagcccagc

SEQ ID NO: 1248186 - DNA, 15 bp, Homo sapiens
caggcagcagcccag

SEQ ID NO: 1248187 - DNA, 15 bp, Homo sapiens
ccaggcagcagccca

SEQ ID NO: 1248188 - DNA, 15 bp, Homo sapiens
tccaggcagcagccc

SEQ ID NO: 1248189 - DNA, 15 bp, Homo sapiens
ctccaggcagcagcc

SEQ ID NO: 1248190 - DNA, 15 bp, Homo sapiens
cctccaggcagcagc

SEQ ID NO: 1248191 - DNA, 15 bp, Homo sapiens
tcctccaggcagcag

SEQ ID NO: 1248192 - DNA, 15 bp, Homo sapiens
ttcctccaggcagca

SEQ ID NO: 1248193 - DNA, 15 bp, Homo sapiens
cttcctccaggcagc

SEQ ID NO: 1248194 - DNA, 15 bp, Homo sapiens
acttcctccaggcag

SEQ ID NO: 1248195 - DNA, 15 bp, Homo sapiens
cacttcctccaggca

SEQ ID NO: 1248196 - DNA, 15 bp, Homo sapiens
tcacttcctccaggc

SEQ ID NO: 1248197 - DNA, 15 bp, Homo sapiens
ctcacttcctccagg

SEQ ID NO: 1248198 - DNA, 15 bp, Homo sapiens
gctcacttcctccag

SEQ ID NO: 1248199 - DNA, 15 bp, Homo sapiens
tgctcacttcctcca

SEQ ID NO: 1248200 - DNA, 15 bp, Homo sapiens
gtgctcacttcctcc

SEQ ID NO: 1248201 - DNA, 15 bp, Homo sapiens
ggtgctcacttcctc

SEQ ID NO: 1248202 - DNA, 15 bp, Homo sapiens
tggtgctcacttcct

SEQ ID NO: 1248203 - DNA, 15 bp, Homo sapiens
ctggtgctcacttcc

SEQ ID NO: 1248204 - DNA, 15 bp, Homo sapiens
tctggtgctcacttc

SEQ ID NO: 1248205 - DNA, 15 bp, Homo sapiens
ctctggtgctcactt

SEQ ID NO: 1248206 - DNA, 15 bp, Homo sapiens
gctctggtgctcact

SEQ ID NO: 1248207 - DNA, 15 bp, Homo sapiens
agctctggtgctcac

SEQ ID NO: 1248208 - DNA, 15 bp, Homo sapiens
aagctctggtgctca

SEQ ID NO: 1248209 - DNA, 15 bp, Homo sapiens
gaagctctggtgctc

SEQ ID NO: 1248210 - DNA, 15 bp, Homo sapiens
agaagctctggtgct

SEQ ID NO: 1248211 - DNA, 15 bp, Homo sapiens
gagaagctctggtgc

SEQ ID NO: 1248212 - DNA, 15 bp, Homo sapiens
tgagaagctctggtg

SEQ ID NO: 1248213 - DNA, 15 bp, Homo sapiens
gtgagaagctctggt

SEQ ID NO: 1248214 - DNA, 15 bp, Homo sapiens
ggtgagaagctctgg

SEQ ID NO: 1248215 - DNA, 15 bp, Homo sapiens
gggtgagaagctctg

SEQ ID NO: 1248216 - DNA, 15 bp, Homo sapiens
agggtgagaagctct

SEQ ID NO: 1248217 - DNA, 15 bp, Homo sapiens
aagggtgagaagctc

SEQ ID NO: 1248218 - DNA, 15 bp, Homo sapiens
aaagggtgagaagct

SEQ ID NO: 1248219 - DNA, 15 bp, Homo sapiens
gaaagggtgagaagc

SEQ ID NO: 1248220 - DNA, 15 bp, Homo sapiens
agaaagggtgagaag

SEQ ID NO: 1248221 - DNA, 15 bp, Homo sapiens
gagaaagggtgagaa

SEQ ID NO: 1248222 - DNA, 15 bp, Homo sapiens
tgagaaagggtgaga

SEQ ID NO: 1248223 - DNA, 15 bp, Homo sapiens
gtgagaaagggtgag

SEQ ID NO: 1248224 - DNA, 15 bp, Homo sapiens
agtgagaaagggtga

SEQ ID NO: 1248225 - DNA, 15 bp, Homo sapiens
aagtgagaaagggtg

SEQ ID NO: 1248226 - DNA, 15 bp, Homo sapiens
caagtgagaaagggt

SEQ ID NO: 1248227 - DNA, 15 bp, Homo sapiens
acaagtgagaaaggg

SEQ ID NO: 1248228 - DNA, 15 bp, Homo sapiens
gacaagtgagaaagg

SEQ ID NO: 1248229 - DNA, 15 bp, Homo sapiens
ggacaagtgagaaag

SEQ ID NO: 1248230 - DNA, 15 bp, Homo sapiens
aggacaagtgagaaa

SEQ ID NO: 1248231 - DNA, 15 bp, Homo sapiens
aaggacaagtgagaa

SEQ ID NO: 1248232 - DNA, 15 bp, Homo sapiens
gaaggacaagtgaga

SEQ ID NO: 1248233 - DNA, 15 bp, Homo sapiens
agaaggacaagtgag

SEQ ID NO: 1248234 - DNA, 15 bp, Homo sapiens
tagaaggacaagtga

SEQ ID NO: 1248235 - DNA, 15 bp, Homo sapiens
atagaaggacaagtg

SEQ ID NO: 1248236 - DNA, 15 bp, Homo sapiens
tatagaaggacaagt

SEQ ID NO: 1248237 - DNA, 15 bp, Homo sapiens
ttatagaaggacaag

SEQ ID NO: 1248238 - DNA, 15 bp, Homo sapiens
attatagaaggacaa

SEQ ID NO: 1248239 - DNA, 15 bp, Homo sapiens
cattatagaaggaca

SEQ ID NO: 1248240 - DNA, 15 bp, Homo sapiens
tcattatagaaggac

SEQ ID NO: 1248241 - DNA, 15 bp, Homo sapiens
atcattatagaagga

SEQ ID NO: 1248242 - DNA, 15 bp, Homo sapiens
tatcattatagaagg

SEQ ID NO: 1248243 - DNA, 15 bp, Homo sapiens
ttatcattatagaag

SEQ ID NO: 1248244 - DNA, 15 bp, Homo sapiens
attatcattatagaa

SEQ ID NO: 1248245 - DNA, 15 bp, Homo sapiens
tattatcattataga

SEQ ID NO: 1248246 - DNA, 15 bp, Homo sapiens
gtattatcattatag

SEQ ID NO: 1248247 - DNA, 15 bp, Homo sapiens
ggtattatcattata

SEQ ID NO: 1248248 - DNA, 15 bp, Homo sapiens
tggtattatcattat

SEQ ID NO: 1248249 - DNA, 15 bp, Homo sapiens
gtggtattatcatta

SEQ ID NO: 1248250 - DNA, 15 bp, Homo sapiens
agtggtattatcatt

SEQ ID NO: 1248251 - DNA, 15 bp, Homo sapiens
tagtggtattatcat

SEQ ID NO: 1248252 - DNA, 15 bp, Homo sapiens
atagtggtattatca

SEQ ID NO: 1248253 - DNA, 15 bp, Homo sapiens
gatagtggtattatc

SEQ ID NO: 1248254 - DNA, 15 bp, Homo sapiens
tgatagtggtattat

SEQ ID NO: 1248255 - DNA, 15 bp, Homo sapiens
ctgatagtggtatta

SEQ ID NO: 1248256 - DNA, 15 bp, Homo sapiens
tctgatagtggtatt

SEQ ID NO: 1248257 - DNA, 15 bp, Homo sapiens
atctgatagtggtat

SEQ ID NO: 1248258 - DNA, 15 bp, Homo sapiens
tatctgatagtggta

SEQ ID NO: 1248259 - DNA, 15 bp, Homo sapiens
gtatctgatagtggt

SEQ ID NO: 1248260 - DNA, 15 bp, Homo sapiens
agtatctgatagtgg

SEQ ID NO: 1248261 - DNA, 15 bp, Homo sapiens
aagtatctgatagtg

SEQ ID NO: 1248262 - DNA, 15 bp, Homo sapiens
taagtatctgatagt

SEQ ID NO: 1248263 - DNA, 15 bp, Homo sapiens
ctaagtatctgatag

SEQ ID NO: 1248264 - DNA, 15 bp, Homo sapiens
tctaagtatctgata

SEQ ID NO: 1248265 - DNA, 15 bp, Homo sapiens
ttctaagtatctgat

SEQ ID NO: 1248266 - DNA, 15 bp, Homo sapiens
cttctaagtatctga

SEQ ID NO: 1248267 - DNA, 15 bp, Homo sapiens
gcttctaagtatctg

SEQ ID NO: 1248268 - DNA, 15 bp, Homo sapiens
tgcttctaagtatct

SEQ ID NO: 1248269 - DNA, 15 bp, Homo sapiens
gtgcttctaagtatc

SEQ ID NO: 1248270 - DNA, 15 bp, Homo sapiens
agtgcttctaagtat

SEQ ID NO: 1248271 - DNA, 15 bp, Homo sapiens
aagtgcttctaagta

SEQ ID NO: 1248272 - DNA, 15 bp, Homo sapiens
caagtgcttctaagt

SEQ ID NO: 1248273 - DNA, 15 bp, Homo sapiens
acaagtgcttctaag

SEQ ID NO: 1248274 - DNA, 15 bp, Homo sapiens
cacaagtgcttctaa

SEQ ID NO: 1248275 - DNA, 15 bp, Homo sapiens
acacaagtgcttcta

SEQ ID NO: 1248276 - DNA, 15 bp, Homo sapiens
cacacaagtgcttct

SEQ ID NO: 1248277 - DNA, 15 bp, Homo sapiens
gcacacaagtgcttc

SEQ ID NO: 1248278 - DNA, 15 bp, Homo sapiens
ggcacacaagtgctt

SEQ ID NO: 1248279 - DNA, 15 bp, Homo sapiens
tggcacacaagtgct

SEQ ID NO: 1248280 - DNA, 15 bp, Homo sapiens
ctggcacacaagtgc

SEQ ID NO: 1248281 - DNA, 15 bp, Homo sapiens
tctggcacacaagtg

SEQ ID NO: 1248282 - DNA, 15 bp, Homo sapiens
gtctggcacacaagt

SEQ ID NO: 1248283 - DNA, 15 bp, Homo sapiens
tgtctggcacacaag

SEQ ID NO: 1248284 - DNA, 15 bp, Homo sapiens
gtgtctggcacacaa

SEQ ID NO: 1248285 - DNA, 15 bp, Homo sapiens
ggtgtctggcacaca

SEQ ID NO: 1248286 - DNA, 15 bp, Homo sapiens
tggtgtctggcacac

SEQ ID NO: 1248287 - DNA, 15 bp, Homo sapiens
tcttagaatggtgtc

SEQ ID NO: 1248288 - DNA, 15 bp, Homo sapiens
ttcttagaatggtgt

SEQ ID NO: 1248289 - DNA, 15 bp, Homo sapiens
gttcttagaatggtg

SEQ ID NO: 1248290 - DNA, 15 bp, Homo sapiens
agttcttagaatggt

SEQ ID NO: 1248291 - DNA, 15 bp, Homo sapiens
gagttcttagaatgg

SEQ ID NO: 1248292 - DNA, 15 bp, Homo sapiens
agagttcttagaatg

SEQ ID NO: 1248293 - DNA, 15 bp, Homo sapiens
aagagttcttagaat

SEQ ID NO: 1248294 - DNA, 15 bp, Homo sapiens
gaagagttcttagaa

SEQ ID NO: 1248295 - DNA, 15 bp, Homo sapiens
tgaagagttcttaga

SEQ ID NO: 1248296 - DNA, 15 bp, Homo sapiens
atgaagagttcttag

SEQ ID NO: 1248297 - DNA, 15 bp, Homo sapiens
tatgaagagttctta

SEQ ID NO: 1248298 - DNA, 15 bp, Homo sapiens
gtatgaagagttctt

SEQ ID NO: 1248299 - DNA, 15 bp, Homo sapiens
tgtatgaagagttct

SEQ ID NO: 1248300 - DNA, 15 bp, Homo sapiens
atgtatgaagagttc

SEQ ID NO: 1248301 - DNA, 15 bp, Homo sapiens
catgtatgaagagtt

SEQ ID NO: 1248302 - DNA, 15 bp, Homo sapiens
tcatgtatgaagagt

SEQ ID NO: 1248303 - DNA, 15 bp, Homo sapiens
ctcatgtatgaagag

SEQ ID NO: 1248304 - DNA, 15 bp, Homo sapiens
actcatgtatgaaga

SEQ ID NO: 1248305 - DNA, 15 bp, Homo sapiens
aactcatgtatgaag

SEQ ID NO: 1248306 - DNA, 15 bp, Homo sapiens
gaactcatgtatgaa

SEQ ID NO: 1248307 - DNA, 15 bp, Homo sapiens
tgaactcatgtatga

SEQ ID NO: 1248308 - DNA, 15 bp, Homo sapiens
atgaactcatgtatg

SEQ ID NO: 1248309 - DNA, 15 bp, Homo sapiens
aatgaactcatgtat

SEQ ID NO: 1248310 - DNA, 15 bp, Homo sapiens
aaatgaactcatgta

SEQ ID NO: 1248311 - DNA, 15 bp, Homo sapiens
aaaatgaactcatgt

SEQ ID NO: 1248312 - DNA, 15 bp, Homo sapiens
taaaatgaactcatg

SEQ ID NO: 1248313 - DNA, 15 bp, Homo sapiens
ttaaaatgaactcat

SEQ ID NO: 1248314 - DNA, 15 bp, Homo sapiens
attaaaatgaactca

SEQ ID NO: 1248315 - DNA, 15 bp, Homo sapiens
gattaaaatgaactc

SEQ ID NO: 1248316 - DNA, 15 bp, Homo sapiens
ggattaaaatgaact

SEQ ID NO: 1248317 - DNA, 15 bp, Homo sapiens
aggattaaaatgaac

SEQ ID NO: 1248318 - DNA, 15 bp, Homo sapiens
gaggattaaaatgaa

SEQ ID NO: 1248319 - DNA, 15 bp, Homo sapiens
ggaggattaaaatga

SEQ ID NO: 1248320 - DNA, 15 bp, Homo sapiens
gggaggattaaaatg

SEQ ID NO: 1248321 - DNA, 15 bp, Homo sapiens
tgggaggattaaaat

SEQ ID NO: 1248322 - DNA, 15 bp, Homo sapiens
atgggaggattaaaa

SEQ ID NO: 1248323 - DNA, 15 bp, Homo sapiens
gatgggaggattaaa

SEQ ID NO: 1248324 - DNA, 15 bp, Homo sapiens
tgatgggaggattaa

SEQ ID NO: 1248325 - DNA, 15 bp, Homo sapiens
ttgatgggaggatta

SEQ ID NO: 1248326 - DNA, 15 bp, Homo sapiens
gttgatgggaggatt

SEQ ID NO: 1248327 - DNA, 15 bp, Homo sapiens
ggttgatgggaggat

SEQ ID NO: 1248328 - DNA, 15 bp, Homo sapiens
gggttgatgggagga

SEQ ID NO: 1248329 - DNA, 15 bp, Homo sapiens
agggttgatgggagg

SEQ ID NO: 1248330 - DNA, 15 bp, Homo sapiens
gagggttgatgggag

SEQ ID NO: 1248331 - DNA, 15 bp, Homo sapiens
agagggttgatggga

SEQ ID NO: 1248332 - DNA, 15 bp, Homo sapiens
cagagggttgatggg

SEQ ID NO: 1248333 - DNA, 15 bp, Homo sapiens
tcagagggttgatgg

SEQ ID NO: 1248334 - DNA, 15 bp, Homo sapiens
ttcagagggttgatg

SEQ ID NO: 1248335 - DNA, 15 bp, Homo sapiens
cttcagagggttgat

SEQ ID NO: 1248336 - DNA, 15 bp, Homo sapiens
ccttcagagggttga

SEQ ID NO: 1248337 - DNA, 15 bp, Homo sapiens
tccttcagagggttg

SEQ ID NO: 1248338 - DNA, 15 bp, Homo sapiens
gtccttcagagggtt

SEQ ID NO: 1248339 - DNA, 15 bp, Homo sapiens
cgtccttcagagggt

SEQ ID NO: 1248340 - DNA, 15 bp, Homo sapiens
acgtccttcagaggg

SEQ ID NO: 1248341 - DNA, 15 bp, Homo sapiens
tacgtccttcagagg

SEQ ID NO: 1248342 - DNA, 15 bp, Homo sapiens
gtacgtccttcagag

SEQ ID NO: 1248343 - DNA, 15 bp, Homo sapiens
agtacgtccttcaga

SEQ ID NO: 1248344 - DNA, 15 bp, Homo sapiens
tagtacgtccttcag

SEQ ID NO: 1248345 - DNA, 15 bp, Homo sapiens
atagtacgtccttca

SEQ ID NO: 1248346 - DNA, 15 bp, Homo sapiens
aatagtacgtccttc

SEQ ID NO: 1248347 - DNA, 15 bp, Homo sapiens
taatagtacgtcctt

SEQ ID NO: 1248348 - DNA, 15 bp, Homo sapiens
ctaatagtacgtcct

SEQ ID NO: 1248349 - DNA, 15 bp, Homo sapiens
actaatagtacgtcc

SEQ ID NO: 1248350 - DNA, 15 bp, Homo sapiens
tactaatagtacgtc

SEQ ID NO: 1248351 - DNA, 15 bp, Homo sapiens
atactaatagtacgt

SEQ ID NO: 1248352 - DNA, 15 bp, Homo sapiens
tatactaatagtacg

SEQ ID NO: 1248353 - DNA, 15 bp, Homo sapiens
ctatactaatagtac

SEQ ID NO: 1248354 - DNA, 15 bp, Homo sapiens
gctatactaatagta

SEQ ID NO: 1248355 - DNA, 15 bp, Homo sapiens
agctatactaatagt

SEQ ID NO: 1248356 - DNA, 15 bp, Homo sapiens
tagctatactaatag

SEQ ID NO: 1248357 - DNA, 15 bp, Homo sapiens
atagctatactaata

SEQ ID NO: 1248358 - DNA, 15 bp, Homo sapiens
aatagctatactaat

SEQ ID NO: 1248359 - DNA, 15 bp, Homo sapiens
aaatagctatactaa

SEQ ID NO: 1248360 - DNA, 15 bp, Homo sapiens
aaaatagctatacta

SEQ ID NO: 1248361 - DNA, 15 bp, Homo sapiens
caaaatagctatact

SEQ ID NO: 1248362 - DNA, 15 bp, Homo sapiens
acaaaatagctatac

SEQ ID NO: 1248363 - DNA, 15 bp, Homo sapiens
tacaaaatagctata

SEQ ID NO: 1248364 - DNA, 15 bp, Homo sapiens
ttacaaaatagctat

SEQ ID NO: 1248365 - DNA, 15 bp, Homo sapiens
tttacaaaatagcta

SEQ ID NO: 1248366 - DNA, 15 bp, Homo sapiens
atttacaaaatagct

SEQ ID NO: 1248367 - DNA, 15 bp, Homo sapiens
catttacaaaatagc

SEQ ID NO: 1248368 - DNA, 15 bp, Homo sapiens
ccatttacaaaatag

SEQ ID NO: 1248369 - DNA, 15 bp, Homo sapiens
cccatttacaaaata

SEQ ID NO: 1248370 - DNA, 15 bp, Homo sapiens
tcccatttacaaaat

SEQ ID NO: 1248371 - DNA, 15 bp, Homo sapiens
ttcccatttacaaaa

SEQ ID NO: 1248372 - DNA, 15 bp, Homo sapiens
tttcccatttacaaa

SEQ ID NO: 1248373 - DNA, 15 bp, Homo sapiens
gtttcccatttacaa

SEQ ID NO: 1248374 - DNA, 15 bp, Homo sapiens
agtttcccatttaca

SEQ ID NO: 1248375 - DNA, 15 bp, Homo sapiens
tagtttcccatttac

SEQ ID NO: 1248376 - DNA, 15 bp, Homo sapiens
ctagtttcccattta

SEQ ID NO: 1248377 - DNA, 15 bp, Homo sapiens
cctagtttcccattt

SEQ ID NO: 1248378 - DNA, 15 bp, Homo sapiens
ccctagtttcccatt

SEQ ID NO: 1248379 - DNA, 15 bp, Homo sapiens
tccctagtttcccat

SEQ ID NO: 1248380 - DNA, 15 bp, Homo sapiens
ttccctagtttccca

SEQ ID NO: 1248381 - DNA, 15 bp, Homo sapiens
gttccctagtttccc

SEQ ID NO: 1248382 - DNA, 15 bp, Homo sapiens
tgttccctagtttcc

SEQ ID NO: 1248383 - DNA, 15 bp, Homo sapiens
ctgttccctagtttc

SEQ ID NO: 1248384 - DNA, 15 bp, Homo sapiens
tctgttccctagttt

SEQ ID NO: 1248385 - DNA, 15 bp, Homo sapiens
ctctgttccctagtt

SEQ ID NO: 1248386 - DNA, 15 bp, Homo sapiens
cctctgttccctagt

SEQ ID NO: 1248387 - DNA, 15 bp, Homo sapiens
ccctctgttccctag

SEQ ID NO: 1248388 - DNA, 15 bp, Homo sapiens
gccctctgttcccta

SEQ ID NO: 1248389 - DNA, 15 bp, Homo sapiens
agccctctgttccct

SEQ ID NO: 1248390 - DNA, 15 bp, Homo sapiens
aagccctctgttccc

SEQ ID NO: 1248391 - DNA, 15 bp, Homo sapiens
taagccctctgttcc

SEQ ID NO: 1248392 - DNA, 15 bp, Homo sapiens
ttaagccctctgttc

SEQ ID NO: 1248393 - DNA, 15 bp, Homo sapiens
cttaagccctctgtt

SEQ ID NO: 1248394 - DNA, 15 bp, Homo sapiens
acttaagccctctgt

SEQ ID NO: 1248395 - DNA, 15 bp, Homo sapiens
tacttaagccctctg

SEQ ID NO: 1248396 - DNA, 15 bp, Homo sapiens
ttacttaagccctct

SEQ ID NO: 1248397 - DNA, 15 bp, Homo sapiens
attacttaagccctc

SEQ ID NO: 1248398 - DNA, 15 bp, Homo sapiens
aattacttaagccct

SEQ ID NO: 1248399 - DNA, 15 bp, Homo sapiens
aaattacttaagccc

SEQ ID NO: 1248400 - DNA, 15 bp, Homo sapiens
caaattacttaagcc

SEQ ID NO: 1248401 - DNA, 15 bp, Homo sapiens
gcaaattacttaagc

SEQ ID NO: 1248402 - DNA, 15 bp, Homo sapiens
tgcaaattacttaag

SEQ ID NO: 1248403 - DNA, 15 bp, Homo sapiens
gtgcaaattacttaa

SEQ ID NO: 1248404 - DNA, 15 bp, Homo sapiens
tgtgcaaattactta

SEQ ID NO: 1248405 - DNA, 15 bp, Homo sapiens
ttgtgcaaattactt

SEQ ID NO: 1248406 - DNA, 15 bp, Homo sapiens
tttgtgcaaattact

SEQ ID NO: 1248407 - DNA, 15 bp, Homo sapiens
ctttgtgcaaattac

SEQ ID NO: 1248408 - DNA, 15 bp, Homo sapiens
actttgtgcaaatta

SEQ ID NO: 1248409 - DNA, 15 bp, Homo sapiens
aactttgtgcaaatt

SEQ ID NO: 1248410 - DNA, 15 bp, Homo sapiens
gaactttgtgcaaat

SEQ ID NO: 1248411 - DNA, 15 bp, Homo sapiens
ggaactttgtgcaaa

SEQ ID NO: 1248412 - DNA, 15 bp, Homo sapiens
tggaactttgtgcaa

SEQ ID NO: 1248413 - DNA, 15 bp, Homo sapiens
ttggaactttgtgca

SEQ ID NO: 1248414 - DNA, 15 bp, Homo sapiens
tttggaactttgtgc

SEQ ID NO: 1248415 - DNA, 15 bp, Homo sapiens
ctttggaactttgtg

SEQ ID NO: 1248416 - DNA, 15 bp, Homo sapiens
actttggaactttgt

SEQ ID NO: 1248417 - DNA, 15 bp, Homo sapiens
tactttggaactttg

SEQ ID NO: 1248418 - DNA, 15 bp, Homo sapiens
ctactttggaacttt

SEQ ID NO: 1248419 - DNA, 15 bp, Homo sapiens
tctactttggaactt

SEQ ID NO: 1248420 - DNA, 15 bp, Homo sapiens
ctctactttggaact

SEQ ID NO: 1248421 - DNA, 15 bp, Homo sapiens
tctctactttggaac

SEQ ID NO: 1248422 - DNA, 15 bp, Homo sapiens
atctctactttggaa

SEQ ID NO: 1248423 - DNA, 15 bp, Homo sapiens
aatctctactttgga

SEQ ID NO: 1248424 - DNA, 15 bp, Homo sapiens
caatctctactttgg

SEQ ID NO: 1248425 - DNA, 15 bp, Homo sapiens
ccaatctctactttg

SEQ ID NO: 1248426 - DNA, 15 bp, Homo sapiens
tccaatctctacttt

SEQ ID NO: 1248427 - DNA, 15 bp, Homo sapiens
ctccaatctctactt

SEQ ID NO: 1248428 - DNA, 15 bp, Homo sapiens
gctccaatctctact

SEQ ID NO: 1248429 - DNA, 15 bp, Homo sapiens
agctccaatctctac

SEQ ID NO: 1248430 - DNA, 15 bp, Homo sapiens
tagctccaatctcta

SEQ ID NO: 1248431 - DNA, 15 bp, Homo sapiens
ctagctccaatctct

SEQ ID NO: 1248432 - DNA, 15 bp, Homo sapiens
cctagctccaatctc

SEQ ID NO: 1248433 - DNA, 15 bp, Homo sapiens
acctagctccaatct

SEQ ID NO: 1248434 - DNA, 15 bp, Homo sapiens
cacctagctccaatc

SEQ ID NO: 1248435 - DNA, 15 bp, Homo sapiens
ccacctagctccaat

SEQ ID NO: 1248436 - DNA, 15 bp, Homo sapiens
accacctagctccaa

SEQ ID NO: 1248437 - DNA, 15 bp, Homo sapiens
gaccacctagctcca

SEQ ID NO: 1248438 - DNA, 15 bp, Homo sapiens
agaccacctagctcc

SEQ ID NO: 1248439 - DNA, 15 bp, Homo sapiens
cagaccacctagctc

SEQ ID NO: 1248440 - DNA, 15 bp, Homo sapiens
ccagaccacctagct

SEQ ID NO: 1248441 - DNA, 15 bp, Homo sapiens
gccagaccacctagc

SEQ ID NO: 1248442 - DNA, 15 bp, Homo sapiens
agccagaccacctag

SEQ ID NO: 1248443 - DNA, 15 bp, Homo sapiens
gagccagaccaccta

SEQ ID NO: 1248444 - DNA, 15 bp, Homo sapiens
ggagccagaccacct

SEQ ID NO: 1248445 - DNA, 15 bp, Homo sapiens
tggagccagaccacc

SEQ ID NO: 1248446 - DNA, 15 bp, Homo sapiens
ttggagccagaccac

SEQ ID NO: 1248447 - DNA, 15 bp, Homo sapiens
tttggagccagacca

SEQ ID NO: 1248448 - DNA, 15 bp, Homo sapiens
ctttggagccagacc

SEQ ID NO: 1248449 - DNA, 15 bp, Homo sapiens
actttggagccagac

SEQ ID NO: 1248450 - DNA, 15 bp, Homo sapiens
cactttggagccaga

SEQ ID NO: 1248451 - DNA, 15 bp, Homo sapiens
acactttggagccag

SEQ ID NO: 1248452 - DNA, 15 bp, Homo sapiens
cacactttggagcca

SEQ ID NO: 1248453 - DNA, 15 bp, Homo sapiens
acacactttggagcc

SEQ ID NO: 1248454 - DNA, 15 bp, Homo sapiens
tacacactttggagc

SEQ ID NO: 1248455 - DNA, 15 bp, Homo sapiens
atacacactttggag

SEQ ID NO: 1248456 - DNA, 15 bp, Homo sapiens
catacacactttgga

SEQ ID NO: 1248457 - DNA, 15 bp, Homo sapiens
tcatacacactttgg

SEQ ID NO: 1248458 - DNA, 15 bp, Homo sapiens
atcatacacactttg

SEQ ID NO: 1248459 - DNA, 15 bp, Homo sapiens
catcatacacacttt

SEQ ID NO: 1248460 - DNA, 15 bp, Homo sapiens
tcatcatacacactt

SEQ ID NO: 1248461 - DNA, 15 bp, Homo sapiens
ctcatcatacacact

SEQ ID NO: 1248462 - DNA, 15 bp, Homo sapiens
actcatcatacacac

SEQ ID NO: 1248463 - DNA, 15 bp, Homo sapiens
gactcatcatacaca

SEQ ID NO: 1248464 - DNA, 15 bp, Homo sapiens
ggactcatcatacac

SEQ ID NO: 1248465 - DNA, 15 bp, Homo sapiens
gggactcatcataca

SEQ ID NO: 1248466 - DNA, 15 bp, Homo sapiens
ggggactcatcatac

SEQ ID NO: 1248467 - DNA, 15 bp, Homo sapiens
tggggactcatcata

SEQ ID NO: 1248468 - DNA, 15 bp, Homo sapiens
ctggggactcatcat

SEQ ID NO: 1248469 - DNA, 15 bp, Homo sapiens
cctggggactcatca

SEQ ID NO: 1248470 - DNA, 15 bp, Homo sapiens
gcctggggactcatc

SEQ ID NO: 1248471 - DNA, 15 bp, Homo sapiens
agcctggggactcat

SEQ ID NO: 1248472 - DNA, 15 bp, Homo sapiens
aagcctggggactca

SEQ ID NO: 1248473 - DNA, 15 bp, Homo sapiens
aaagcctggggactc

SEQ ID NO: 1248474 - DNA, 15 bp, Homo sapiens
caaagcctggggact

SEQ ID NO: 1248475 - DNA, 15 bp, Homo sapiens
gcaaagcctggggac

SEQ ID NO: 1248476 - DNA, 15 bp, Homo sapiens
ggcaaagcctgggga

SEQ ID NO: 1248477 - DNA, 15 bp, Homo sapiens
tggcaaagcctgggg

SEQ ID NO: 1248478 - DNA, 15 bp, Homo sapiens
gtggcaaagcctggg

SEQ ID NO: 1248479 - DNA, 15 bp, Homo sapiens
agtggcaaagcctgg

SEQ ID NO: 1248480 - DNA, 15 bp, Homo sapiens
aagtggcaaagcctg

SEQ ID NO: 1248481 - DNA, 15 bp, Homo sapiens
gaagtggcaaagcct

SEQ ID NO: 1248482 - DNA, 15 bp, Homo sapiens
agaagtggcaaagcc

SEQ ID NO: 1248483 - DNA, 15 bp, Homo sapiens
gagaagtggcaaagc

SEQ ID NO: 1248484 - DNA, 15 bp, Homo sapiens
agagaagtggcaaag

SEQ ID NO: 1248485 - DNA, 15 bp, Homo sapiens
cagagaagtggcaaa

SEQ ID NO: 1248486 - DNA, 15 bp, Homo sapiens
ccagagaagtggcaa

SEQ ID NO: 1248487 - DNA, 15 bp, Homo sapiens
gccagagaagtggca

SEQ ID NO: 1248488 - DNA, 15 bp, Homo sapiens
ggccagagaagtggc

SEQ ID NO: 1248489 - DNA, 15 bp, Homo sapiens
aggccagagaagtgg

SEQ ID NO: 1248490 - DNA, 15 bp, Homo sapiens
caggccagagaagtg

SEQ ID NO: 1248491 - DNA, 15 bp, Homo sapiens
ccaggccagagaagt

SEQ ID NO: 1248492 - DNA, 15 bp, Homo sapiens
gccaggccagagaag

SEQ ID NO: 1248493 - DNA, 15 bp, Homo sapiens
agccaggccagagaa

SEQ ID NO: 1248494 - DNA, 15 bp, Homo sapiens
cagccaggccagaga

SEQ ID NO: 1248495 - DNA, 15 bp, Homo sapiens
acagccaggccagag

SEQ ID NO: 1248496 - DNA, 15 bp, Homo sapiens
cacagccaggccaga

SEQ ID NO: 1248497 - DNA, 15 bp, Homo sapiens
acacagccaggccag

SEQ ID NO: 1248498 - DNA, 15 bp, Homo sapiens
aacacagccaggcca

SEQ ID NO: 1248499 - DNA, 15 bp, Homo sapiens
aaacacagccaggcc

SEQ ID NO: 1248500 - DNA, 15 bp, Homo sapiens
aaaacacagccaggc

SEQ ID NO: 1248501 - DNA, 15 bp, Homo sapiens
caaaacacagccagg

SEQ ID NO: 1248502 - DNA, 15 bp, Homo sapiens
ccaaaacacagccag

SEQ ID NO: 1248503 - DNA, 15 bp, Homo sapiens
tccaaaacacagcca

SEQ ID NO: 1248504 - DNA, 15 bp, Homo sapiens
gtccaaaacacagcc

SEQ ID NO: 1248505 - DNA, 15 bp, Homo sapiens
ggtccaaaacacagc

SEQ ID NO: 1248506 - DNA, 15 bp, Homo sapiens
aggtccaaaacacag

SEQ ID NO: 1248507 - DNA, 15 bp, Homo sapiens
aaggtccaaaacaca

SEQ ID NO: 1248508 - DNA, 15 bp, Homo sapiens
aaaggtccaaaacac

SEQ ID NO: 1248509 - DNA, 15 bp, Homo sapiens
aaaaggtccaaaaca

SEQ ID NO: 1248510 - DNA, 15 bp, Homo sapiens
gaaaaggtccaaaac

SEQ ID NO: 1248511 - DNA, 15 bp, Homo sapiens
agaaaaggtccaaaa

SEQ ID NO: 1248512 - DNA, 15 bp, Homo sapiens
aagaaaaggtccaaa

SEQ ID NO: 1248513 - DNA, 15 bp, Homo sapiens
caagaaaaggtccaa

SEQ ID NO: 1248514 - DNA, 15 bp, Homo sapiens
tcaagaaaaggtcca

SEQ ID NO: 1248515 - DNA, 15 bp, Homo sapiens
ttcaagaaaaggtcc

SEQ ID NO: 1248516 - DNA, 15 bp, Homo sapiens
cttcaagaaaaggtc

SEQ ID NO: 1248517 - DNA, 15 bp, Homo sapiens
tcttcaagaaaaggt

SEQ ID NO: 1248518 - DNA, 15 bp, Homo sapiens
atcttcaagaaaagg

SEQ ID NO: 1248519 - DNA, 15 bp, Homo sapiens
catcttcaagaaaag

SEQ ID NO: 1248520 - DNA, 15 bp, Homo sapiens
tcatcttcaagaaaa

SEQ ID NO: 1248521 - DNA, 15 bp, Homo sapiens
atcatcttcaagaaa

SEQ ID NO: 1248522 - DNA, 15 bp, Homo sapiens
catcatcttcaagaa

SEQ ID NO: 1248523 - DNA, 15 bp, Homo sapiens
ccatcatcttcaaga

SEQ ID NO: 1248524 - DNA, 15 bp, Homo sapiens
cccatcatcttcaag

SEQ ID NO: 1248525 - DNA, 15 bp, Homo sapiens
ccccatcatcttcaa

SEQ ID NO: 1248526 - DNA, 15 bp, Homo sapiens
accccatcatcttca

SEQ ID NO: 1248527 - DNA, 15 bp, Homo sapiens
gaccccatcatcttc

SEQ ID NO: 1248528 - DNA, 15 bp, Homo sapiens
ggaccccatcatctt

SEQ ID NO: 1248529 - DNA, 15 bp, Homo sapiens
aggaccccatcatct

SEQ ID NO: 1248530 - DNA, 15 bp, Homo sapiens
caggaccccatcatc

SEQ ID NO: 1248531 - DNA, 15 bp, Homo sapiens
tcaggaccccatcat

SEQ ID NO: 1248532 - DNA, 15 bp, Homo sapiens
ttcaggaccccatca

SEQ ID NO: 1248533 - DNA, 15 bp, Homo sapiens
cttcaggaccccatc

SEQ ID NO: 1248534 - DNA, 15 bp, Homo sapiens
gcttcaggaccccat

SEQ ID NO: 1248535 - DNA, 15 bp, Homo sapiens
ggcttcaggacccca

SEQ ID NO: 1248536 - DNA, 15 bp, Homo sapiens
tggcttcaggacccc

SEQ ID NO: 1248537 - DNA, 15 bp, Homo sapiens
gtggcttcaggaccc

SEQ ID NO: 1248538 - DNA, 15 bp, Homo sapiens
ggtggcttcaggacc

SEQ ID NO: 1248539 - DNA, 15 bp, Homo sapiens
tggtggcttcaggac

SEQ ID NO: 1248540 - DNA, 15 bp, Homo sapiens
ttggtggcttcagga

SEQ ID NO: 1248541 - DNA, 15 bp, Homo sapiens
tttggtggcttcagg

SEQ ID NO: 1248542 - DNA, 15 bp, Homo sapiens
ctttggtggcttcag

SEQ ID NO: 1248543 - DNA, 15 bp, Homo sapiens
cctttggtggcttca

SEQ ID NO: 1248544 - DNA, 15 bp, Homo sapiens
gcctttggtggcttc

SEQ ID NO: 1248545 - DNA, 15 bp, Homo sapiens
ggcctttggtggctt

SEQ ID NO: 1248546 - DNA, 15 bp, Homo sapiens
gggcctttggtggct

SEQ ID NO: 1248547 - DNA, 15 bp, Homo sapiens
ggggcctttggtggc

SEQ ID NO: 1248548 - DNA, 15 bp, Homo sapiens
aggggcctttggtgg

SEQ ID NO: 1248549 - DNA, 15 bp, Homo sapiens
caggggcctttggtg

SEQ ID NO: 1248550 - DNA, 15 bp, Homo sapiens
ccaggggcctttggt

SEQ ID NO: 1248551 - DNA, 15 bp, Homo sapiens
tccaggggcctttgg

SEQ ID NO: 1248552 - DNA, 15 bp, Homo sapiens
gtccaggggcctttg

SEQ ID NO: 1248553 - DNA, 15 bp, Homo sapiens
agtccaggggccttt

SEQ ID NO: 1248554 - DNA, 15 bp, Homo sapiens
gagtccaggggcctt

SEQ ID NO: 1248555 - DNA, 15 bp, Homo sapiens
tgagtccaggggcct

SEQ ID NO: 1248556 - DNA, 15 bp, Homo sapiens
ctgagtccaggggcc

SEQ ID NO: 1248557 - DNA, 15 bp, Homo sapiens
cctgagtccaggggc

SEQ ID NO: 1248558 - DNA, 15 bp, Homo sapiens
acctgagtccagggg

SEQ ID NO: 1248559 - DNA, 15 bp, Homo sapiens
cacctgagtccaggg

SEQ ID NO: 1248560 - DNA, 15 bp, Homo sapiens
tcacctgagtccagg

SEQ ID NO: 1248561 - DNA, 15 bp, Homo sapiens
ctcacctgagtccag

SEQ ID NO: 1248562 - DNA, 15 bp, Homo sapiens
gctcacctgagtcca

SEQ ID NO: 1248563 - DNA, 15 bp, Homo sapiens
tgctcacctgagtcc

SEQ ID NO: 1248564 - DNA, 15 bp, Homo sapiens
gtgctcacctgagtc

SEQ ID NO: 1248565 - DNA, 15 bp, Homo sapiens
ggtgctcacctgagt

SEQ ID NO: 1248566 - DNA, 15 bp, Homo sapiens
gggtgctcacctgag

SEQ ID NO: 1248567 - DNA, 15 bp, Homo sapiens
agggtgctcacctga

SEQ ID NO: 1248568 - DNA, 15 bp, Homo sapiens
cagggtgctcacctg

SEQ ID NO: 1248569 - DNA, 15 bp, Homo sapiens
gcagggtgctcacct

SEQ ID NO: 1248570 - DNA, 15 bp, Homo sapiens
tgcagggtgctcacc

SEQ ID NO: 1248571 - DNA, 15 bp, Homo sapiens
ctgcagggtgctcac

SEQ ID NO: 1248572 - DNA, 15 bp, Homo sapiens
gctgcagggtgctca

SEQ ID NO: 1248573 - DNA, 15 bp, Homo sapiens
ggctgcagggtgctc

SEQ ID NO: 1248574 - DNA, 15 bp, Homo sapiens
aggctgcagggtgct

SEQ ID NO: 1248575 - DNA, 15 bp, Homo sapiens
gaggctgcagggtgc

SEQ ID NO: 1248576 - DNA, 15 bp, Homo sapiens
cgaggctgcagggtg

SEQ ID NO: 1248577 - DNA, 15 bp, Homo sapiens
gcgaggctgcagggt

SEQ ID NO: 1248578 - DNA, 15 bp, Homo sapiens
tgcgaggctgcaggg

SEQ ID NO: 1248579 - DNA, 15 bp, Homo sapiens
ctgcgaggctgcagg

SEQ ID NO: 1248580 - DNA, 15 bp, Homo sapiens
actgcgaggctgcag

SEQ ID NO: 1248581 - DNA, 15 bp, Homo sapiens
cactgcgaggctgca

SEQ ID NO: 1248582 - DNA, 15 bp, Homo sapiens
gcactgcgaggctgc

SEQ ID NO: 1248583 - DNA, 15 bp, Homo sapiens
agcactgcgaggctg

SEQ ID NO: 1248584 - DNA, 15 bp, Homo sapiens
tagcactgcgaggct

SEQ ID NO: 1248585 - DNA, 15 bp, Homo sapiens
gtagcactgcgaggc

SEQ ID NO: 1248586 - DNA, 15 bp, Homo sapiens
ggtagcactgcgagg

SEQ ID NO: 1248587 - DNA, 15 bp, Homo sapiens
aggtagcactgcgag

SEQ ID NO: 1248588 - DNA, 15 bp, Homo sapiens
gaggtagcactgcga

SEQ ID NO: 1248589 - DNA, 15 bp, Homo sapiens
cgaggtagcactgcg

SEQ ID NO: 1248590 - DNA, 15 bp, Homo sapiens
ccgaggtagcactgc

SEQ ID NO: 1248591 - DNA, 15 bp, Homo sapiens
cccgaggtagcactg

SEQ ID NO: 1248592 - DNA, 15 bp, Homo sapiens
ccccgaggtagcact

SEQ ID NO: 1248593 - DNA, 15 bp, Homo sapiens
accccgaggtagcac

SEQ ID NO: 1248594 - DNA, 15 bp, Homo sapiens
gaccccgaggtagca

SEQ ID NO: 1248595 - DNA, 15 bp, Homo sapiens
ggaccccgaggtagc

SEQ ID NO: 1248596 - DNA, 15 bp, Homo sapiens
gggaccccgaggtag

SEQ ID NO: 1248597 - DNA, 15 bp, Homo sapiens
agggaccccgaggta

SEQ ID NO: 1248598 - DNA, 15 bp, Homo sapiens
gagggaccccgaggt

SEQ ID NO: 1248599 - DNA, 15 bp, Homo sapiens
tgagggaccccgagg

SEQ ID NO: 1248600 - DNA, 15 bp, Homo sapiens
gtgagggaccccgag

SEQ ID NO: 1248601 - DNA, 15 bp, Homo sapiens
tgtgagggaccccga

SEQ ID NO: 1248602 - DNA, 15 bp, Homo sapiens
ctgtgagggaccccg

SEQ ID NO: 1248603 - DNA, 15 bp, Homo sapiens
gctgtgagggacccc

SEQ ID NO: 1248604 - DNA, 15 bp, Homo sapiens
ggctgtgagggaccc

SEQ ID NO: 1248605 - DNA, 15 bp, Homo sapiens
aggctgtgagggacc

SEQ ID NO: 1248606 - DNA, 15 bp, Homo sapiens
gaggctgtgagggac

SEQ ID NO: 1248607 - DNA, 15 bp, Homo sapiens
agaggctgtgaggga

SEQ ID NO: 1248608 - DNA, 15 bp, Homo sapiens
cagaggctgtgaggg

SEQ ID NO: 1248609 - DNA, 15 bp, Homo sapiens
gcagaggctgtgagg

SEQ ID NO: 1248610 - DNA, 15 bp, Homo sapiens
cgcagaggctgtgag

SEQ ID NO: 1248611 - DNA, 15 bp, Homo sapiens
tcgcagaggctgtga

SEQ ID NO: 1248612 - DNA, 15 bp, Homo sapiens
gtcgcagaggctgtg

SEQ ID NO: 1248613 - DNA, 15 bp, Homo sapiens
tgtcgcagaggctgt

SEQ ID NO: 1248614 - DNA, 15 bp, Homo sapiens
ttgtcgcagaggctg

SEQ ID NO: 1248615 - DNA, 15 bp, Homo sapiens
cttgtcgcagaggct

SEQ ID NO: 1248616 - DNA, 15 bp, Homo sapiens
ccttgtcgcagaggc

SEQ ID NO: 1248617 - DNA, 15 bp, Homo sapiens
accttgtcgcagagg

SEQ ID NO: 1248618 - DNA, 15 bp, Homo sapiens
caccttgtcgcagag

SEQ ID NO: 1248619 - DNA, 15 bp, Homo sapiens
gcaccttgtcgcaga

SEQ ID NO: 1248620 - DNA, 15 bp, Homo sapiens
tgcaccttgtcgcag

SEQ ID NO: 1248621 - DNA, 15 bp, Homo sapiens
ctgcaccttgtcgca

SEQ ID NO: 1248622 - DNA, 15 bp, Homo sapiens
tctgcaccttgtcgc

SEQ ID NO: 1248623 - DNA, 15 bp, Homo sapiens
ctctgcaccttgtcg

SEQ ID NO: 1248624 - DNA, 15 bp, Homo sapiens
gctctgcaccttgtc

SEQ ID NO: 1248625 - DNA, 15 bp, Homo sapiens
agctctgcaccttgt

SEQ ID NO: 1248626 - DNA, 15 bp, Homo sapiens
gagctctgcaccttg

SEQ ID NO: 1248627 - DNA, 15 bp, Homo sapiens
tgagctctgcacctt

SEQ ID NO: 1248628 - DNA, 15 bp, Homo sapiens
ctgagctctgcacct

SEQ ID NO: 1248629 - DNA, 15 bp, Homo sapiens
tctgagctctgcacc

SEQ ID NO: 1248630 - DNA, 15 bp, Homo sapiens
ctctgagctctgcac

SEQ ID NO: 1248631 - DNA, 15 bp, Homo sapiens
cctctgagctctgca

SEQ ID NO: 1248632 - DNA, 15 bp, Homo sapiens
acctctgagctctgc

SEQ ID NO: 1248633 - DNA, 15 bp, Homo sapiens
gacctctgagctctg

SEQ ID NO: 1248634 - DNA, 15 bp, Homo sapiens
agacctctgagctct

SEQ ID NO: 1248635 - DNA, 15 bp, Homo sapiens
cagacctctgagctc

SEQ ID NO: 1248636 - DNA, 15 bp, Homo sapiens
ccagacctctgagct

SEQ ID NO: 1248637 - DNA, 15 bp, Homo sapiens
cccagacctctgagc

SEQ ID NO: 1248638 - DNA, 15 bp, Homo sapiens
tcccagacctctgag

SEQ ID NO: 1248639 - DNA, 15 bp, Homo sapiens
atcccagacctctga

SEQ ID NO: 1248640 - DNA, 15 bp, Homo sapiens
catcccagacctctg

SEQ ID NO: 1248641 - DNA, 15 bp, Homo sapiens
acatcccagacctct

SEQ ID NO: 1248642 - DNA, 15 bp, Homo sapiens
cacatcccagacctc

SEQ ID NO: 1248643 - DNA, 15 bp, Homo sapiens
ccacatcccagacct

SEQ ID NO: 1248644 - DNA, 15 bp, Homo sapiens
accacatcccagacc

SEQ ID NO: 1248645 - DNA, 15 bp, Homo sapiens
caccacatcccagac

SEQ ID NO: 1248646 - DNA, 15 bp, Homo sapiens
tcaccacatcccaga

SEQ ID NO: 1248647 - DNA, 15 bp, Homo sapiens
ctcaccacatcccag

SEQ ID NO: 1248648 - DNA, 15 bp, Homo sapiens
gctcaccacatccca

SEQ ID NO: 1248649 - DNA, 15 bp, Homo sapiens
agctcaccacatccc

SEQ ID NO: 1248650 - DNA, 15 bp, Homo sapiens
cagctcaccacatcc

SEQ ID NO: 1248651 - DNA, 15 bp, Homo sapiens
acagctcaccacatc

SEQ ID NO: 1248652 - DNA, 15 bp, Homo sapiens
aacagctcaccacat

SEQ ID NO: 1248653 - DNA, 15 bp, Homo sapiens
aaacagctcaccaca

SEQ ID NO: 1248654 - DNA, 15 bp, Homo sapiens
aaaacagctcaccac

SEQ ID NO: 1248655 - DNA, 15 bp, Homo sapiens
caaaacagctcacca

SEQ ID NO: 1248656 - DNA, 15 bp, Homo sapiens
tcaaaacagctcacc

SEQ ID NO: 1248657 - DNA, 15 bp, Homo sapiens
atcaaaacagctcac

SEQ ID NO: 1248658 - DNA, 15 bp, Homo sapiens
gatcaaaacagctca

SEQ ID NO: 1248659 - DNA, 15 bp, Homo sapiens
agatcaaaacagctc

SEQ ID NO: 1248660 - DNA, 15 bp, Homo sapiens
aagatcaaaacagct

SEQ ID NO: 1248661 - DNA, 15 bp, Homo sapiens
aaagatcaaaacagc

SEQ ID NO: 1248662 - DNA, 15 bp, Homo sapiens
caaagatcaaaacag

SEQ ID NO: 1248663 - DNA, 15 bp, Homo sapiens
acaaagatcaaaaca

SEQ ID NO: 1248664 - DNA, 15 bp, Homo sapiens
gacaaagatcaaaac

SEQ ID NO: 1248665 - DNA, 15 bp, Homo sapiens
agacaaagatcaaaa

SEQ ID NO: 1248666 - DNA, 15 bp, Homo sapiens
aagacaaagatcaaa

SEQ ID NO: 1248667 - DNA, 15 bp, Homo sapiens
gaagacaaagatcaa

SEQ ID NO: 1248668 - DNA, 15 bp, Homo sapiens
agaagacaaagatca

SEQ ID NO: 1248669 - DNA, 15 bp, Homo sapiens
aagaagacaaagatc

SEQ ID NO: 1248670 - DNA, 15 bp, Homo sapiens
aaagaagacaaagat

SEQ ID NO: 1248671 - DNA, 15 bp, Homo sapiens
aaaagaagacaaaga

SEQ ID NO: 1248672 - DNA, 15 bp, Homo sapiens
aaaaagaagacaaag

SEQ ID NO: 1248673 - DNA, 15 bp, Homo sapiens
taaaaagaagacaaa

SEQ ID NO: 1248674 - DNA, 15 bp, Homo sapiens
gtaaaaagaagacaa

SEQ ID NO: 1248675 - DNA, 15 bp, Homo sapiens
tgtaaaaagaagaca

SEQ ID NO: 1248676 - DNA, 15 bp, Homo sapiens
ttgtaaaaagaagac

SEQ ID NO: 1248677 - DNA, 15 bp, Homo sapiens
tttgtaaaaagaaga

SEQ ID NO: 1248678 - DNA, 15 bp, Homo sapiens
ctttgtaaaaagaag

SEQ ID NO: 1248679 - DNA, 15 bp, Homo sapiens
tctttgtaaaaagaa

SEQ ID NO: 1248680 - DNA, 15 bp, Homo sapiens
gtctttgtaaaaaga

SEQ ID NO: 1248681 - DNA, 15 bp, Homo sapiens
agtctttgtaaaaag

SEQ ID NO: 1248682 - DNA, 15 bp, Homo sapiens
aagtctttgtaaaaa

SEQ ID NO: 1248683 - DNA, 15 bp, Homo sapiens
caagtctttgtaaaa

SEQ ID NO: 1248684 - DNA, 15 bp, Homo sapiens
tcaagtctttgtaaa

SEQ ID NO: 1248685 - DNA, 15 bp, Homo sapiens
ttcaagtctttgtaa

SEQ ID NO: 1248686 - DNA, 15 bp, Homo sapiens
attcaagtctttgta

SEQ ID NO: 1248687 - DNA, 15 bp, Homo sapiens
gattcaagtctttgt

SEQ ID NO: 1248688 - DNA, 15 bp, Homo sapiens
ggattcaagtctttg

SEQ ID NO: 1248689 - DNA, 15 bp, Homo sapiens
aggattcaagtcttt

SEQ ID NO: 1248690 - DNA, 15 bp, Homo sapiens
gaggattcaagtctt

SEQ ID NO: 1248691 - DNA, 15 bp, Homo sapiens
agaggattcaagtct

SEQ ID NO: 1248692 - DNA, 15 bp, Homo sapiens
cagaggattcaagtc

SEQ ID NO: 1248693 - DNA, 15 bp, Homo sapiens
tcagaggattcaagt

SEQ ID NO: 1248694 - DNA, 15 bp, Homo sapiens
ctcagaggattcaag

SEQ ID NO: 1248695 - DNA, 15 bp, Homo sapiens
actcagaggattcaa

SEQ ID NO: 1248696 - DNA, 15 bp, Homo sapiens
gactcagaggattca

SEQ ID NO: 1248697 - DNA, 15 bp, Homo sapiens
agactcagaggattc

SEQ ID NO: 1248698 - DNA, 15 bp, Homo sapiens
aagactcagaggatt

SEQ ID NO: 1248699 - DNA, 15 bp, Homo sapiens
caagactcagaggat

SEQ ID NO: 1248700 - DNA, 15 bp, Homo sapiens
ccaagactcagagga

SEQ ID NO: 1248701 - DNA, 15 bp, Homo sapiens
gccaagactcagagg

SEQ ID NO: 1248702 - DNA, 15 bp, Homo sapiens
tgccaagactcagag

SEQ ID NO: 1248703 - DNA, 15 bp, Homo sapiens
ttgccaagactcaga

SEQ ID NO: 1248704 - DNA, 15 bp, Homo sapiens
gttgccaagactcag

SEQ ID NO: 1248705 - DNA, 15 bp, Homo sapiens
agttgccaagactca

SEQ ID NO: 1248706 - DNA, 15 bp, Homo sapiens
aagttgccaagactc

SEQ ID NO: 1248707 - DNA, 15 bp, Homo sapiens
aaagttgccaagact

SEQ ID NO: 1248708 - DNA, 15 bp, Homo sapiens
gaaagttgccaagac

SEQ ID NO: 1248709 - DNA, 15 bp, Homo sapiens
agaaagttgccaaga

SEQ ID NO: 1248710 - DNA, 15 bp, Homo sapiens
gagaaagttgccaag

SEQ ID NO: 1248711 - DNA, 15 bp, Homo sapiens
tgagaaagttgccaa

SEQ ID NO: 1248712 - DNA, 15 bp, Homo sapiens
ttgagaaagttgcca

SEQ ID NO: 1248713 - DNA, 15 bp, Homo sapiens
cttgagaaagttgcc

SEQ ID NO: 1248714 - DNA, 15 bp, Homo sapiens
acttgagaaagttgc

SEQ ID NO: 1248715 - DNA, 15 bp, Homo sapiens
aacttgagaaagttg

SEQ ID NO: 1248716 - DNA, 15 bp, Homo sapiens
gaacttgagaaagtt

SEQ ID NO: 1248717 - DNA, 15 bp, Homo sapiens
agaacttgagaaagt

SEQ ID NO: 1248718 - DNA, 15 bp, Homo sapiens
aagaacttgagaaag

SEQ ID NO: 1248719 - DNA, 15 bp, Homo sapiens
gaagaacttgagaaa

SEQ ID NO: 1248720 - DNA, 15 bp, Homo sapiens
tgaagaacttgagaa

SEQ ID NO: 1248721 - DNA, 15 bp, Homo sapiens
ttgaagaacttgaga

SEQ ID NO: 1248722 - DNA, 15 bp, Homo sapiens
tttgaagaacttgag

SEQ ID NO: 1248723 - DNA, 15 bp, Homo sapiens
atttgaagaacttga

SEQ ID NO: 1248724 - DNA, 15 bp, Homo sapiens
aatttgaagaacttg

SEQ ID NO: 1248725 - DNA, 15 bp, Homo sapiens
aaatttgaagaactt

SEQ ID NO: 1248726 - DNA, 15 bp, Homo sapiens
aaaatttgaagaact

SEQ ID NO: 1248727 - DNA, 15 bp, Homo sapiens
aaaaatttgaagaac

SEQ ID NO: 1248728 - DNA, 15 bp, Homo sapiens
caaaaaatttgaaga

SEQ ID NO: 1248729 - DNA, 15 bp, Homo sapiens
acaaaaaatttgaag

SEQ ID NO: 1248730 - DNA, 15 bp, Homo sapiens
aacaaaaaatttgaa

SEQ ID NO: 1248731 - DNA, 15 bp, Homo sapiens
aaacaaaaaatttga

SEQ ID NO: 1248732 - DNA, 15 bp, Homo sapiens
aaaacaaaaaatttg

SEQ ID NO: 1248733 - DNA, 15 bp, Homo sapiens
gaaaacaaaaaattt

SEQ ID NO: 1248734 - DNA, 15 bp, Homo sapiens
cgaaaacaaaaaatt

SEQ ID NO: 1248735 - DNA, 15 bp, Homo sapiens
acgaaaacaaaaaat

SEQ ID NO: 1248736 - DNA, 15 bp, Homo sapiens
aacgaaaacaaaaaa

SEQ ID NO: 1248737 - DNA, 15 bp, Homo sapiens
aaacgaaaacaaaaa

SEQ ID NO: 1248738 - DNA, 15 bp, Homo sapiens
aaaacgaaaacaaaa

SEQ ID NO: 1248739 - DNA, 15 bp, Homo sapiens
taaaacaaaacgaaa

SEQ ID NO: 1248740 - DNA, 15 bp, Homo sapiens
ataaaacaaaacgaa

SEQ ID NO: 1248741 - DNA, 15 bp, Homo sapiens
aataaaacaaaacga

SEQ ID NO: 1248742 - DNA, 15 bp, Homo sapiens
aaataaaacaaaacg

SEQ ID NO: 1248743 - DNA, 15 bp, Homo sapiens
aaaataaaacaaaac

SEQ ID NO: 1248744 - DNA, 15 bp, Homo sapiens
gacaaaataaaacaa

SEQ ID NO: 1248745 - DNA, 15 bp, Homo sapiens
agacaaaataaaaca

SEQ ID NO: 1248746 - DNA, 15 bp, Homo sapiens
aagacaaaataaaac

SEQ ID NO: 1248747 - DNA, 15 bp, Homo sapiens
caagacaaaataaaa

SEQ ID NO: 1248748 - DNA, 15 bp, Homo sapiens
acaagacaaaataaa

SEQ ID NO: 1248749 - DNA, 15 bp, Homo sapiens
aacaagacaaaataa

SEQ ID NO: 1248750 - DNA, 15 bp, Homo sapiens
aaacaagacaaaata

SEQ ID NO: 1248751 - DNA, 15 bp, Homo sapiens
gaaacaagacaaaat

SEQ ID NO: 1248752 - DNA, 15 bp, Homo sapiens
agaaacaagacaaaa

SEQ ID NO: 1248753 - DNA, 15 bp, Homo sapiens
gagaaacaagacaaa

SEQ ID NO: 1248754 - DNA, 15 bp, Homo sapiens
ggagaaacaagacaa

SEQ ID NO: 1248755 - DNA, 15 bp, Homo sapiens
aggagaaacaagaca

SEQ ID NO: 1248756 - DNA, 15 bp, Homo sapiens
taggagaaacaagac

SEQ ID NO: 1248757 - DNA, 15 bp, Homo sapiens
gtaggagaaacaaga

SEQ ID NO: 1248758 - DNA, 15 bp, Homo sapiens
ggtaggagaaacaag

SEQ ID NO: 1248759 - DNA, 15 bp, Homo sapiens
tggtaggagaaacaa

SEQ ID NO: 1248760 - DNA, 15 bp, Homo sapiens
ttggtaggagaaaca

SEQ ID NO: 1248761 - DNA, 15 bp, Homo sapiens
cttggtaggagaaac

SEQ ID NO: 1248762 - DNA, 15 bp, Homo sapiens
tcttggtaggagaaa

SEQ ID NO: 1248763 - DNA, 15 bp, Homo sapiens
ctcttggtaggagaa

SEQ ID NO: 1248764 - DNA, 15 bp, Homo sapiens
cctcttggtaggaga

SEQ ID NO: 1248765 - DNA, 15 bp, Homo sapiens
ccctcttggtaggag

SEQ ID NO: 1248766 - DNA, 15 bp, Homo sapiens
gccctcttggtagga

SEQ ID NO: 1248767 - DNA, 15 bp, Homo sapiens
agccctcttggtagg

SEQ ID NO: 1248768 - DNA, 15 bp, Homo sapiens
cagccctcttggtag

SEQ ID NO: 1248769 - DNA, 15 bp, Homo sapiens
tcagccctcttggta

SEQ ID NO: 1248770 - DNA, 15 bp, Homo sapiens
ttcagccctcttggt

SEQ ID NO: 1248771 - DNA, 15 bp, Homo sapiens
attcagccctcttgg

SEQ ID NO: 1248772 - DNA, 15 bp, Homo sapiens
cattcagccctcttg

SEQ ID NO: 1248773 - DNA, 15 bp, Homo sapiens
tcattcagccctctt

SEQ ID NO: 1248774 - DNA, 15 bp, Homo sapiens
ttcattcagccctct

SEQ ID NO: 1248775 - DNA, 15 bp, Homo sapiens
cttcattcagccctc

SEQ ID NO: 1248776 - DNA, 15 bp, Homo sapiens
gcttcattcagccct

SEQ ID NO: 1248777 - DNA, 15 bp, Homo sapiens
ggcttcattcagccc

SEQ ID NO: 1248778 - DNA, 15 bp, Homo sapiens
tggcttcattcagcc

SEQ ID NO: 1248779 - DNA, 15 bp, Homo sapiens
ctggcttcattcagc

SEQ ID NO: 1248780 - DNA, 15 bp, Homo sapiens
cctggcttcattcag

SEQ ID NO: 1248781 - DNA, 15 bp, Homo sapiens
acctggcttcattca

SEQ ID NO: 1248782 - DNA, 15 bp, Homo sapiens
cacctggcttcattc

SEQ ID NO: 1248783 - DNA, 15 bp, Homo sapiens
ccacctggcttcatt

SEQ ID NO: 1248784 - DNA, 15 bp, Homo sapiens
gccacctggcttcat

SEQ ID NO: 1248785 - DNA, 15 bp, Homo sapiens
ggccacctggcttca

SEQ ID NO: 1248786 - DNA, 15 bp, Homo sapiens
gggccacctggcttc

SEQ ID NO: 1248787 - DNA, 15 bp, Homo sapiens
cgggccacctggctt

SEQ ID NO: 1248788 - DNA, 15 bp, Homo sapiens
tcgggccacctggct

SEQ ID NO: 1248789 - DNA, 15 bp, Homo sapiens
atcgggccacctggc

SEQ ID NO: 1248790 - DNA, 15 bp, Homo sapiens
tatcgggccacctgg

SEQ ID NO: 1248791 - DNA, 15 bp, Homo sapiens
ttatcgggccacctg

SEQ ID NO: 1248792 - DNA, 15 bp, Homo sapiens
cttatcgggccacct

SEQ ID NO: 1248793 - DNA, 15 bp, Homo sapiens
tcttatcgggccacc

SEQ ID NO: 1248794 - DNA, 15 bp, Homo sapiens
ttcttatcgggccac

SEQ ID NO: 1248795 - DNA, 15 bp, Homo sapiens
attcttatcgggcca

SEQ ID NO: 1248796 - DNA, 15 bp, Homo sapiens
aattcttatcgggcc

SEQ ID NO: 1248797 - DNA, 15 bp, Homo sapiens
aaattcttatcgggc

SEQ ID NO: 1248798 - DNA, 15 bp, Homo sapiens
aaaattcttatcggg

SEQ ID NO: 1248799 - DNA, 15 bp, Homo sapiens
gaaaattcttatcgg

SEQ ID NO: 1248800 - DNA, 15 bp, Homo sapiens
ggaaaattcttatcg

SEQ ID NO: 1248801 - DNA, 15 bp, Homo sapiens
aggaaaattcttatc

SEQ ID NO: 1248802 - DNA, 15 bp, Homo sapiens
gaggaaaattcttat

SEQ ID NO: 1248803 - DNA, 15 bp, Homo sapiens
agaggaaaattctta

SEQ ID NO: 1248804 - DNA, 15 bp, Homo sapiens
cagaggaaaattctt

SEQ ID NO: 1248805 - DNA, 15 bp, Homo sapiens
ccagaggaaaattct

SEQ ID NO: 1248806 - DNA, 15 bp, Homo sapiens
tccagaggaaaattc

SEQ ID NO: 1248807 - DNA, 15 bp, Homo sapiens
ctccagaggaaaatt

SEQ ID NO: 1248808 - DNA, 15 bp, Homo sapiens
tctccagaggaaaat

SEQ ID NO: 1248809 - DNA, 15 bp, Homo sapiens
ttctccagaggaaaa

SEQ ID NO: 1248810 - DNA, 15 bp, Homo sapiens
cttctccagaggaaa

SEQ ID NO: 1248811 - DNA, 15 bp, Homo sapiens
ccttctccagaggaa

SEQ ID NO: 1248812 - DNA, 15 bp, Homo sapiens
tccttctccagagga

SEQ ID NO: 1248813 - DNA, 15 bp, Homo sapiens
ttccttctccagagg

SEQ ID NO: 1248814 - DNA, 15 bp, Homo sapiens
tttccttctccagag

SEQ ID NO: 1248815 - DNA, 15 bp, Homo sapiens
ttttccttctccaga

SEQ ID NO: 1248816 - DNA, 15 bp, Homo sapiens
tttttccttctccag

SEQ ID NO: 1248817 - DNA, 15 bp, Homo sapiens
ctttttccttctcca

SEQ ID NO: 1248818 - DNA, 15 bp, Homo sapiens
actttttccttctcc

SEQ ID NO: 1248819 - DNA, 15 bp, Homo sapiens
gactttttccttctc

SEQ ID NO: 1248820 - DNA, 15 bp, Homo sapiens
tgactttttccttct

SEQ ID NO: 1248821 - DNA, 15 bp, Homo sapiens
gtgactttttccttc

SEQ ID NO: 1248822 - DNA, 15 bp, Homo sapiens
ggtgactttttcctt

SEQ ID NO: 1248823 - DNA, 15 bp, Homo sapiens
gggtgactttttcct

SEQ ID NO: 1248824 - DNA, 15 bp, Homo sapiens
tgggtgactttttcc

SEQ ID NO: 1248825 - DNA, 15 bp, Homo sapiens
ctgggtgactttttc

SEQ ID NO: 1248826 - DNA, 15 bp, Homo sapiens
tctgggtgacttttt

SEQ ID NO: 1248827 - DNA, 15 bp, Homo sapiens
ctctgggtgactttt

SEQ ID NO: 1248828 - DNA, 15 bp, Homo sapiens
gctctgggtgacttt

SEQ ID NO: 1248829 - DNA, 15 bp, Homo sapiens
agctctgggtgactt

SEQ ID NO: 1248830 - DNA, 15 bp, Homo sapiens
tagctctgggtgact

SEQ ID NO: 1248831 - DNA, 15 bp, Homo sapiens
ctagctctgggtgac

SEQ ID NO: 1248832 - DNA, 15 bp, Homo sapiens
tctagctctgggtga

SEQ ID NO: 1248833 - DNA, 15 bp, Homo sapiens
ttctagctctgggtg

SEQ ID NO: 1248834 - DNA, 15 bp, Homo sapiens
tttctagctctgggt

SEQ ID NO: 1248835 - DNA, 15 bp, Homo sapiens
atttctagctctggg

SEQ ID NO: 1248836 - DNA, 15 bp, Homo sapiens
tatttctagctctgg

SEQ ID NO: 1248837 - DNA, 15 bp, Homo sapiens
atatttctagctctg

SEQ ID NO: 1248838 - DNA, 15 bp, Homo sapiens
catatttctagctct

SEQ ID NO: 1248839 - DNA, 15 bp, Homo sapiens
gcatatttctagctc

SEQ ID NO: 1248840 - DNA, 15 bp, Homo sapiens
agcatatttctagct

SEQ ID NO: 1248841 - DNA, 15 bp, Homo sapiens
cagcatatttctagc

SEQ ID NO: 1248842 - DNA, 15 bp, Homo sapiens
ccagcatatttctag

SEQ ID NO: 1248843 - DNA, 15 bp, Homo sapiens
accagcatatttcta

SEQ ID NO: 1248844 - DNA, 15 bp, Homo sapiens
aaccagcatatttct

SEQ ID NO: 1248845 - DNA, 15 bp, Homo sapiens
gaaccagcatatttc

SEQ ID NO: 1248846 - DNA, 15 bp, Homo sapiens
agaaccagcatattt

SEQ ID NO: 1248847 - DNA, 15 bp, Homo sapiens
cagaaccagcatatt

SEQ ID NO: 1248848 - DNA, 15 bp, Homo sapiens
gcagaaccagcatat

SEQ ID NO: 1248849 - DNA, 15 bp, Homo sapiens
agcagaaccagcata

SEQ ID NO: 1248850 - DNA, 15 bp, Homo sapiens
cagcagaaccagcat

SEQ ID NO: 1248851 - DNA, 15 bp, Homo sapiens
gcagcagaaccagca

SEQ ID NO: 1248852 - DNA, 15 bp, Homo sapiens
ggcagcagaaccagc

SEQ ID NO: 1248853 - DNA, 15 bp, Homo sapiens
gggcagcagaaccag

SEQ ID NO: 1248854 - DNA, 15 bp, Homo sapiens
agggcagcagaacca

SEQ ID NO: 1248855 - DNA, 15 bp, Homo sapiens
gagggcagcagaacc

SEQ ID NO: 1248856 - DNA, 15 bp, Homo sapiens
agagggcagcagaac

SEQ ID NO: 1248857 - DNA, 15 bp, Homo sapiens
cagagggcagcagaa

SEQ ID NO: 1248858 - DNA, 15 bp, Homo sapiens
ccagagggcagcaga

SEQ ID NO: 1248859 - DNA, 15 bp, Homo sapiens
gccagagggcagcag

SEQ ID NO: 1248860 - DNA, 15 bp, Homo sapiens
cgccagagggcagca

SEQ ID NO: 1248861 - DNA, 15 bp, Homo sapiens
acgccagagggcagc

SEQ ID NO: 1248862 - DNA, 15 bp, Homo sapiens
aacgccagagggcag

SEQ ID NO: 1248863 - DNA, 15 bp, Homo sapiens
gaacgccagagggca

SEQ ID NO: 1248864 - DNA, 15 bp, Homo sapiens
cgaacgccagagggc

SEQ ID NO: 1248865 - DNA, 15 bp, Homo sapiens
gcgaacgccagaggg

SEQ ID NO: 1248866 - DNA, 15 bp, Homo sapiens
agcgaacgccagagg

SEQ ID NO: 1248867 - DNA, 15 bp, Homo sapiens
cagcgaacgccagag

SEQ ID NO: 1248868 - DNA, 15 bp, Homo sapiens
tcagcgaacgccaga

SEQ ID NO: 1248869 - DNA, 15 bp, Homo sapiens
ctcagcgaacgccag

SEQ ID NO: 1248870 - DNA, 15 bp, Homo sapiens
gctcagcgaacgcca

SEQ ID NO: 1248871 - DNA, 15 bp, Homo sapiens
cgctcagcgaacgcc

SEQ ID NO: 1248872 - DNA, 15 bp, Homo sapiens
gcgctcagcgaacgc

SEQ ID NO: 1248873 - DNA, 15 bp, Homo sapiens
ggcgctcagcgaacg

SEQ ID NO: 1248874 - DNA, 15 bp, Homo sapiens
tggcgctcagcgaac

SEQ ID NO: 1248875 - DNA, 15 bp, Homo sapiens
ctggcgctcagcgaa

SEQ ID NO: 1248876 - DNA, 15 bp, Homo sapiens
gctggcgctcagcga

SEQ ID NO: 1248877 - DNA, 15 bp, Homo sapiens
ggctggcgctcagcg

SEQ ID NO: 1248878 - DNA, 15 bp, Homo sapiens
tggctggcgctcagc

SEQ ID NO: 1248879 - DNA, 15 bp, Homo sapiens
ctggctggcgctcag

SEQ ID NO: 1248880 - DNA, 15 bp, Homo sapiens
gctggctggcgctca

SEQ ID NO: 1248881 - DNA, 15 bp, Homo sapiens
ggctggctggcgctc

SEQ ID NO: 1248882 - DNA, 15 bp, Homo sapiens
aggctggctggcgct

SEQ ID NO: 1248883 - DNA, 15 bp, Homo sapiens
caggctggctggcgc

SEQ ID NO: 1248884 - DNA, 15 bp, Homo sapiens
gcaggctggctggcg

SEQ ID NO: 1248885 - DNA, 15 bp, Homo sapiens
tgcaggctggctggc

SEQ ID NO: 1248886 - DNA, 15 bp, Homo sapiens
gtgcaggctggctgg

SEQ ID NO: 1248887 - DNA, 15 bp, Homo sapiens
tgtgcaggctggctg

SEQ ID NO: 1248888 - DNA, 15 bp, Homo sapiens
ctgtgcaggctggct

SEQ ID NO: 1248889 - DNA, 15 bp, Homo sapiens
gctgtgcaggctggc

SEQ ID NO: 1248890 - DNA, 15 bp, Homo sapiens
ggctgtgcaggctgg

SEQ ID NO: 1248891 - DNA, 15 bp, Homo sapiens
gggctgtgcaggctg

SEQ ID NO: 1248892 - DNA, 15 bp, Homo sapiens
agggctgtgcaggct

SEQ ID NO: 1248893 - DNA, 15 bp, Homo sapiens
cagggctgtgcaggc

SEQ ID NO: 1248894 - DNA, 15 bp, Homo sapiens
tcagggctgtgcagg

SEQ ID NO: 1248895 - DNA, 15 bp, Homo sapiens
ctcagggctgtgcag

SEQ ID NO: 1248896 - DNA, 15 bp, Homo sapiens
actcagggctgtgca

SEQ ID NO: 1248897 - DNA, 15 bp, Homo sapiens
gactcagggctgtgc

SEQ ID NO: 1248898 - DNA, 15 bp, Homo sapiens
tgactcagggctgtg

SEQ ID NO: 1248899 - DNA, 15 bp, Homo sapiens
ttgactcagggctgt

SEQ ID NO: 1248900 - DNA, 15 bp, Homo sapiens
cttgactcagggctg

SEQ ID NO: 1248901 - DNA, 15 bp, Homo sapiens
ccttgactcagggct

SEQ ID NO: 1248902 - DNA, 15 bp, Homo sapiens
accttgactcagggc

SEQ ID NO: 1248903 - DNA, 15 bp, Homo sapiens
caccttgactcaggg

SEQ ID NO: 1248904 - DNA, 15 bp, Homo sapiens
ccaccttgactcagg

SEQ ID NO: 1248905 - DNA, 15 bp, Homo sapiens
accaccttgactcag

SEQ ID NO: 1248906 - DNA, 15 bp, Homo sapiens
caccaccttgactca

SEQ ID NO: 1248907 - DNA, 15 bp, Homo sapiens
gcaccaccttgactc

SEQ ID NO: 1248908 - DNA, 15 bp, Homo sapiens
tgcaccaccttgact

SEQ ID NO: 1248909 - DNA, 15 bp, Homo sapiens
gtgcaccaccttgac

SEQ ID NO: 1248910 - DNA, 15 bp, Homo sapiens
ggtgcaccaccttga

SEQ ID NO: 1248911 - DNA, 15 bp, Homo sapiens
gggtgcaccaccttg

SEQ ID NO: 1248912 - DNA, 15 bp, Homo sapiens
agggtgcaccacctt

SEQ ID NO: 1248913 - DNA, 15 bp, Homo sapiens
cagggtgcaccacct

SEQ ID NO: 1248914 - DNA, 15 bp, Homo sapiens
tcagggtgcaccacc

SEQ ID NO: 1248915 - DNA, 15 bp, Homo sapiens
gtcagggtgcaccac

SEQ ID NO: 1248916 - DNA, 15 bp, Homo sapiens
agtcagggtgcacca

SEQ ID NO: 1248917 - DNA, 15 bp, Homo sapiens
cagtcagggtgcacc

SEQ ID NO: 1248918 - DNA, 15 bp, Homo sapiens
tcagtcagggtgcac

SEQ ID NO: 1248919 - DNA, 15 bp, Homo sapiens
ctcagtcagggtgca

SEQ ID NO: 1248920 - DNA, 15 bp, Homo sapiens
cctcagtcagggtgc

SEQ ID NO: 1248921 - DNA, 15 bp, Homo sapiens
acctcagtcagggtg

SEQ ID NO: 1248922 - DNA, 15 bp, Homo sapiens
gacctcagtcagggt

SEQ ID NO: 1248923 - DNA, 15 bp, Homo sapiens
agacctcagtcaggg

SEQ ID NO: 1248924 - DNA, 15 bp, Homo sapiens
cagacctcagtcagg

SEQ ID NO: 1248925 - DNA, 15 bp, Homo sapiens
acagacctcagtcag

SEQ ID NO: 1248926 - DNA, 15 bp, Homo sapiens
cacagacctcagtca

SEQ ID NO: 1248927 - DNA, 15 bp, Homo sapiens
ccacagacctcagtc

SEQ ID NO: 1248928 - DNA, 15 bp, Homo sapiens
cccacagacctcagt

SEQ ID NO: 1248929 - DNA, 15 bp, Homo sapiens
ccccacagacctcag

SEQ ID NO: 1248930 - DNA, 15 bp, Homo sapiens
tccccacagacctca

SEQ ID NO: 1248931 - DNA, 15 bp, Homo sapiens
ttccccacagacctc

SEQ ID NO: 1248932 - DNA, 15 bp, Homo sapiens
cttccccacagacct

SEQ ID NO: 1248933 - DNA, 15 bp, Homo sapiens
tcttccccacagacc

SEQ ID NO: 1248934 - DNA, 15 bp, Homo sapiens
ttcttccccacagac

SEQ ID NO: 1248935 - DNA, 15 bp, Homo sapiens
attcttccccacaga

SEQ ID NO: 1248936 - DNA, 15 bp, Homo sapiens
cattcttccccacag

SEQ ID NO: 1248937 - DNA, 15 bp, Homo sapiens
acattcttccccaca

SEQ ID NO: 1248938 - DNA, 15 bp, Homo sapiens
aacattcttccccac

SEQ ID NO: 1248939 - DNA, 15 bp, Homo sapiens
caacattcttcccca

SEQ ID NO: 1248940 - DNA, 15 bp, Homo sapiens
acaacattcttcccc

SEQ ID NO: 1248941 - DNA, 15 bp, Homo sapiens
aacaacattcttccc

SEQ ID NO: 1248942 - DNA, 15 bp, Homo sapiens
aaacaacattcttcc

SEQ ID NO: 1248943 - DNA, 15 bp, Homo sapiens
gaaacaacattcttc

SEQ ID NO: 1248944 - DNA, 15 bp, Homo sapiens
agaaacaacattctt

SEQ ID NO: 1248945 - DNA, 15 bp, Homo sapiens
gagaaacaacattct

SEQ ID NO: 1248946 - DNA, 15 bp, Homo sapiens
agagaaacaacattc

SEQ ID NO: 1248947 - DNA, 15 bp, Homo sapiens
cagagaaacaacatt

SEQ ID NO: 1248948 - DNA, 15 bp, Homo sapiens
ccagagaaacaacat

SEQ ID NO: 1248949 - DNA, 15 bp, Homo sapiens
accagagaaacaaca

SEQ ID NO: 1248950 - DNA, 15 bp, Homo sapiens
caccagagaaacaac

SEQ ID NO: 1248951 - DNA, 15 bp, Homo sapiens
ccaccagagaaacaa

SEQ ID NO: 1248952 - DNA, 15 bp, Homo sapiens
cccaccagagaaaca

SEQ ID NO: 1248953 - DNA, 15 bp, Homo sapiens
tcccaccagagaaac

SEQ ID NO: 1248954 - DNA, 15 bp, Homo sapiens
ctcccaccagagaaa

SEQ ID NO: 1248955 - DNA, 15 bp, Homo sapiens
cctcccaccagagaa

SEQ ID NO: 1248956 - DNA, 15 bp, Homo sapiens
tcctcccaccagaga

SEQ ID NO: 1248957 - DNA, 15 bp, Homo sapiens
ctcctcccaccagag

SEQ ID NO: 1248958 - DNA, 15 bp, Homo sapiens
tctcctcccaccaga

SEQ ID NO: 1248959 - DNA, 15 bp, Homo sapiens
ttctcctcccaccag

SEQ ID NO: 1248960 - DNA, 15 bp, Homo sapiens
tttctcctcccacca

SEQ ID NO: 1248961 - DNA, 15 bp, Homo sapiens
ctttctcctcccacc

SEQ ID NO: 1248962 - DNA, 15 bp, Homo sapiens
cctttctcctcccac

SEQ ID NO: 1248963 - DNA, 15 bp, Homo sapiens
tcctttctcctccca

SEQ ID NO: 1248964 - DNA, 15 bp, Homo sapiens
ttcctttctcctccc

SEQ ID NO: 1248965 - DNA, 15 bp, Homo sapiens
tttcctttctcctcc

SEQ ID NO: 1248966 - DNA, 15 bp, Homo sapiens
ttttcctttctcctc

SEQ ID NO: 1248967 - DNA, 15 bp, Homo sapiens
attttcctttctcct

SEQ ID NO: 1248968 - DNA, 15 bp, Homo sapiens
cattttcctttctcc

SEQ ID NO: 1248969 - DNA, 15 bp, Homo sapiens
tcattttcctttctc

SEQ ID NO: 1248970 - DNA, 15 bp, Homo sapiens
ctcattttcctttct

SEQ ID NO: 1248971 - DNA, 15 bp, Homo sapiens
cctcattttcctttc

SEQ ID NO: 1248972 - DNA, 15 bp, Homo sapiens
gcctcattttccttt

SEQ ID NO: 1248973 - DNA, 15 bp, Homo sapiens
agcctcattttcctt

SEQ ID NO: 1248974 - DNA, 15 bp, Homo sapiens
cagcctcattttcct

SEQ ID NO: 1248975 - DNA, 15 bp, Homo sapiens
acagcctcattttcc

SEQ ID NO: 1248976 - DNA, 15 bp, Homo sapiens
cacagcctcattttc

SEQ ID NO: 1248977 - DNA, 15 bp, Homo sapiens
gcacagcctcatttt

SEQ ID NO: 1248978 - DNA, 15 bp, Homo sapiens
tgcacagcctcattt

SEQ ID NO: 1248979 - DNA, 15 bp, Homo sapiens
atgcacagcctcatt

SEQ ID NO: 1248980 - DNA, 15 bp, Homo sapiens
aatgcacagcctcat

SEQ ID NO: 1248981 - DNA, 15 bp, Homo sapiens
aaatgcacagcctca

SEQ ID NO: 1248982 - DNA, 15 bp, Homo sapiens
caaatgcacagcctc

SEQ ID NO: 1248983 - DNA, 15 bp, Homo sapiens
ccaaatgcacagcct

SEQ ID NO: 1248984 - DNA, 15 bp, Homo sapiens
cccaaatgcacagcc

SEQ ID NO: 1248985 - DNA, 15 bp, Homo sapiens
tcccaaatgcacagc

SEQ ID NO: 1248986 - DNA, 15 bp, Homo sapiens
ctcccaaatgcacag

SEQ ID NO: 1248987 - DNA, 15 bp, Homo sapiens
gctcccaaatgcaca

SEQ ID NO: 1248988 - DNA, 15 bp, Homo sapiens
agctcccaaatgcac

SEQ ID NO: 1248989 - DNA, 15 bp, Homo sapiens
cagctcccaaatgca

SEQ ID NO: 1248990 - DNA, 15 bp, Homo sapiens
tcagctcccaaatgc

SEQ ID NO: 1248991 - DNA, 15 bp, Homo sapiens
ttcagctcccaaatg

SEQ ID NO: 1248992 - DNA, 15 bp, Homo sapiens
gttcagctcccaaat

SEQ ID NO: 1248993 - DNA, 15 bp, Homo sapiens
tgttcagctcccaaa

SEQ ID NO: 1248994 - DNA, 15 bp, Homo sapiens
ttgttcagctcccaa

SEQ ID NO: 1248995 - DNA, 15 bp, Homo sapiens
tttgttcagctccca

SEQ ID NO: 1248996 - DNA, 15 bp, Homo sapiens
atttgttcagctccc

SEQ ID NO: 1248997 - DNA, 15 bp, Homo sapiens
catttgttcagctcc

SEQ ID NO: 1248998 - DNA, 15 bp, Homo sapiens
acatttgttcagctc

SEQ ID NO: 1248999 - DNA, 15 bp, Homo sapiens
tacatttgttcagct

SEQ ID NO: 1249000 - DNA, 15 bp, Homo sapiens
ctacatttgttcagc

SEQ ID NO: 1249001 - DNA, 15 bp, Homo sapiens
actacatttgttcag

SEQ ID NO: 1249002 - DNA, 15 bp, Homo sapiens
cactacatttgttca

SEQ ID NO: 1249003 - DNA, 15 bp, Homo sapiens
tcactacatttgttc

SEQ ID NO: 1249004 - DNA, 15 bp, Homo sapiens
gtcactacatttgtt

SEQ ID NO: 1249005 - DNA, 15 bp, Homo sapiens
agtcactacatttgt

SEQ ID NO: 1249006 - DNA, 15 bp, Homo sapiens
cagtcactacatttg

SEQ ID NO: 1249007 - DNA, 15 bp, Homo sapiens
acagtcactacattt

SEQ ID NO: 1249008 - DNA, 15 bp, Homo sapiens
tacagtcactacatt

SEQ ID NO: 1249009 - DNA, 15 bp, Homo sapiens
gtacagtcactacat

SEQ ID NO: 1249010 - DNA, 15 bp, Homo sapiens
agtacagtcactaca

SEQ ID NO: 1249011 - DNA, 15 bp, Homo sapiens
aagtacagtcactac

SEQ ID NO: 1249012 - DNA, 15 bp, Homo sapiens
gaagtacagtcacta

SEQ ID NO: 1249013 - DNA, 15 bp, Homo sapiens
agaagtacagtcact

SEQ ID NO: 1249014 - DNA, 15 bp, Homo sapiens
cagaagtacagtcac

SEQ ID NO: 1249015 - DNA, 15 bp, Homo sapiens
tcagaagtacagtca

SEQ ID NO: 1249016 - DNA, 15 bp, Homo sapiens
ttcagaagtacagtc

SEQ ID NO: 1249017 - DNA, 15 bp, Homo sapiens
tttcagaagtacagt

SEQ ID NO: 1249018 - DNA, 15 bp, Homo sapiens
ttttcagaagtacag

SEQ ID NO: 1249019 - DNA, 15 bp, Homo sapiens
tttttcagaagtaca

SEQ ID NO: 1249020 - DNA, 15 bp, Homo sapiens
atttttcagaagtac

SEQ ID NO: 1249021 - DNA, 15 bp, Homo sapiens
tatttttcagaagta

SEQ ID NO: 1249022 - DNA, 15 bp, Homo sapiens
ttatttttcagaagt

SEQ ID NO: 1249023 - DNA, 15 bp, Homo sapiens
tttatttttcagaag

SEQ ID NO: 1249024 - DNA, 15 bp, Homo sapiens
atttatttttcagaa

SEQ ID NO: 1249025 - DNA, 15 bp, Homo sapiens
catttatttttcaga

SEQ ID NO: 1249026 - DNA, 15 bp, Homo sapiens
tcatttatttttcag

SEQ ID NO: 1249027 - DNA, 15 bp, Homo sapiens
ctcatttatttttca

SEQ ID NO: 1249028 - DNA, 15 bp, Homo sapiens
cctcatttatttttc

SEQ ID NO: 1249029 - DNA, 15 bp, Homo sapiens
acctcatttattttt

SEQ ID NO: 1249030 - DNA, 15 bp, Homo sapiens
aacctcatttatttt

SEQ ID NO: 1249031 - DNA, 15 bp, Homo sapiens
caacctcatttattt

SEQ ID NO: 1249032 - DNA, 15 bp, Homo sapiens
tcaacctcatttatt

SEQ ID NO: 1249033 - DNA, 15 bp, Homo sapiens
gtcaacctcatttat

SEQ ID NO: 1249034 - DNA, 15 bp, Homo sapiens
tgtcaacctcattta

SEQ ID NO: 1249035 - DNA, 15 bp, Homo sapiens
gtgtcaacctcattt

SEQ ID NO: 1249036 - DNA, 15 bp, Homo sapiens
tgtgtcaacctcatt

SEQ ID NO: 1249037 - DNA, 15 bp, Homo sapiens
atgtgtcaacctcat

SEQ ID NO: 1249038 - DNA, 15 bp, Homo sapiens
aatgtgtcaacctca

SEQ ID NO: 1249039 - DNA, 15 bp, Homo sapiens
caatgtgtcaacctc

SEQ ID NO: 1249040 - DNA, 15 bp, Homo sapiens
tcaatgtgtcaacct

SEQ ID NO: 1249041 - DNA, 15 bp, Homo sapiens
atcaatgtgtcaacc

SEQ ID NO: 1249042 - DNA, 15 bp, Homo sapiens
aatcaatgtgtcaac

SEQ ID NO: 1249043 - DNA, 15 bp, Homo sapiens
caatcaatgtgtcaa

SEQ ID NO: 1249044 - DNA, 15 bp, Homo sapiens
tcaatcaatgtgtca

SEQ ID NO: 1249045 - DNA, 15 bp, Homo sapiens
ttcaatcaatgtgtc

SEQ ID NO: 1249046 - DNA, 15 bp, Homo sapiens
cttcaatcaatgtgt

SEQ ID NO: 1249047 - DNA, 15 bp, Homo sapiens
acttcaatcaatgtg

SEQ ID NO: 1249048 - DNA, 15 bp, Homo sapiens
cacttcaatcaatgt

SEQ ID NO: 1249049 - DNA, 15 bp, Homo sapiens
ccacttcaatcaatg

SEQ ID NO: 1249050 - DNA, 15 bp, Homo sapiens
tccacttcaatcaat

SEQ ID NO: 1249051 - DNA, 15 bp, Homo sapiens
ctccacttcaatcaa

SEQ ID NO: 1249052 - DNA, 15 bp, Homo sapiens
gctccacttcaatca

SEQ ID NO: 1249053 - DNA, 15 bp, Homo sapiens
agctccacttcaatc

SEQ ID NO: 1249054 - DNA, 15 bp, Homo sapiens
cagctccacttcaat

SEQ ID NO: 1249055 - DNA, 15 bp, Homo sapiens
tcagctccacttcaa

SEQ ID NO: 1249056 - DNA, 15 bp, Homo sapiens
gtcagctccacttca

SEQ ID NO: 1249057 - DNA, 15 bp, Homo sapiens
agtcagctccacttc

SEQ ID NO: 1249058 - DNA, 15 bp, Homo sapiens
aagtcagctccactt

SEQ ID NO: 1249059 - DNA, 15 bp, Homo sapiens
aaagtcagctccact

SEQ ID NO: 1249060 - DNA, 15 bp, Homo sapiens
aaaagtcagctccac

SEQ ID NO: 1249061 - DNA, 15 bp, Homo sapiens
gaaaagtcagctcca

SEQ ID NO: 1249062 - DNA, 15 bp, Homo sapiens
tgaaaagtcagctcc

SEQ ID NO: 1249063 - DNA, 15 bp, Homo sapiens
ttgaaaagtcagctc

SEQ ID NO: 1249064 - DNA, 15 bp, Homo sapiens
cttgaaaagtcagct

SEQ ID NO: 1249065 - DNA, 15 bp, Homo sapiens
acttgaaaagtcagc

SEQ ID NO: 1249066 - DNA, 15 bp, Homo sapiens
tacttgaaaagtcag

SEQ ID NO: 1249067 - DNA, 15 bp, Homo sapiens
atacttgaaaagtca

SEQ ID NO: 1249068 - DNA, 15 bp, Homo sapiens
gatacttgaaaagtc

SEQ ID NO: 1249069 - DNA, 15 bp, Homo sapiens
tgatacttgaaaagt

SEQ ID NO: 1249070 - DNA, 15 bp, Homo sapiens
atgatacttgaaaag

SEQ ID NO: 1249071 - DNA, 15 bp, Homo sapiens
gatgatacttgaaaa

SEQ ID NO: 1249072 - DNA, 15 bp, Homo sapiens
agatgatacttgaaa

SEQ ID NO: 1249073 - DNA, 15 bp, Homo sapiens
cagatgatacttgaa

SEQ ID NO: 1249074 - DNA, 15 bp, Homo sapiens
ccagatgatacttga

SEQ ID NO: 1249075 - DNA, 15 bp, Homo sapiens
gccagatgatacttg

SEQ ID NO: 1249076 - DNA, 15 bp, Homo sapiens
ggccagatgatactt

SEQ ID NO: 1249077 - DNA, 15 bp, Homo sapiens
tggccagatgatact

SEQ ID NO: 1249078 - DNA, 15 bp, Homo sapiens
ctggccagatgatac

SEQ ID NO: 1249079 - DNA, 15 bp, Homo sapiens
gctggccagatgata

SEQ ID NO: 1249080 - DNA, 15 bp, Homo sapiens
ggctggccagatgat

SEQ ID NO: 1249081 - DNA, 15 bp, Homo sapiens
aggctggccagatga

SEQ ID NO: 1249082 - DNA, 15 bp, Homo sapiens
gaggctggccagatg

SEQ ID NO: 1249083 - DNA, 15 bp, Homo sapiens
tgaggctggccagat

SEQ ID NO: 1249084 - DNA, 15 bp, Homo sapiens
ctgaggctggccaga

SEQ ID NO: 1249085 - DNA, 15 bp, Homo sapiens
gctgaggctggccag

SEQ ID NO: 1249086 - DNA, 15 bp, Homo sapiens
ggctgaggctggcca

SEQ ID NO: 1249087 - DNA, 15 bp, Homo sapiens
gggctgaggctggcc

SEQ ID NO: 1249088 - DNA, 15 bp, Homo sapiens
agggctgaggctggc

SEQ ID NO: 1249089 - DNA, 15 bp, Homo sapiens
aagggctgaggctgg

SEQ ID NO: 1249090 - DNA, 15 bp, Homo sapiens
gaagggctgaggctg

SEQ ID NO: 1249091 - DNA, 15 bp, Homo sapiens
tgaagggctgaggct

SEQ ID NO: 1249092 - DNA, 15 bp, Homo sapiens
ctgaagggctgaggc

SEQ ID NO: 1249093 - DNA, 15 bp, Homo sapiens
tctgaagggctgagg

SEQ ID NO: 1249094 - DNA, 15 bp, Homo sapiens
ctctgaagggctgag

SEQ ID NO: 1249095 - DNA, 15 bp, Homo sapiens
cctctgaagggctga

SEQ ID NO: 1249096 - DNA, 15 bp, Homo sapiens
tcctctgaagggctg

SEQ ID NO: 1249097 - DNA, 15 bp, Homo sapiens
atcctctgaagggct

SEQ ID NO: 1249098 - DNA, 15 bp, Homo sapiens
gatcctctgaagggc

SEQ ID NO: 1249099 - DNA, 15 bp, Homo sapiens
ggatcctctgaaggg

SEQ ID NO: 1249100 - DNA, 15 bp, Homo sapiens
gggatcctctgaagg

SEQ ID NO: 1249101 - DNA, 15 bp, Homo sapiens
tgggatcctctgaag

SEQ ID NO: 1249102 - DNA, 15 bp, Homo sapiens
gtgggatcctctgaa

SEQ ID NO: 1249103 - DNA, 15 bp, Homo sapiens
tgtgggatcctctga

SEQ ID NO: 1249104 - DNA, 15 bp, Homo sapiens
ctgtgggatcctctg

SEQ ID NO: 1249105 - DNA, 15 bp, Homo sapiens
cctgtgggatcctct

SEQ ID NO: 1249106 - DNA, 15 bp, Homo sapiens
acctgtgggatcctc

SEQ ID NO: 1249107 - DNA, 15 bp, Homo sapiens
gacctgtgggatcct

SEQ ID NO: 1249108 - DNA, 15 bp, Homo sapiens
agacctgtgggatcc

SEQ ID NO: 1249109 - DNA, 15 bp, Homo sapiens
gagacctgtgggatc

SEQ ID NO: 1249110 - DNA, 15 bp, Homo sapiens
agagacctgtgggat

SEQ ID NO: 1249111 - DNA, 15 bp, Homo sapiens
cagagacctgtggga

SEQ ID NO: 1249112 - DNA, 15 bp, Homo sapiens
tcagagacctgtggg

SEQ ID NO: 1249113 - DNA, 15 bp, Homo sapiens
ttcagagacctgtgg

SEQ ID NO: 1249114 - DNA, 15 bp, Homo sapiens
attcagagacctgtg

SEQ ID NO: 1249115 - DNA, 15 bp, Homo sapiens
tattcagagacctgt

SEQ ID NO: 1249116 - DNA, 15 bp, Homo sapiens
atattcagagacctg

SEQ ID NO: 1249117 - DNA, 15 bp, Homo sapiens
catattcagagacct

SEQ ID NO: 1249118 - DNA, 15 bp, Homo sapiens
tcatattcagagacc

SEQ ID NO: 1249119 - DNA, 15 bp, Homo sapiens
ttcatattcagagac

SEQ ID NO: 1249120 - DNA, 15 bp, Homo sapiens
tttcatattcagaga

SEQ ID NO: 1249121 - DNA, 15 bp, Homo sapiens
gtttcatattcagag

SEQ ID NO: 1249122 - DNA, 15 bp, Homo sapiens
agtttcatattcaga

SEQ ID NO: 1249123 - DNA, 15 bp, Homo sapiens
gagtttcatattcag

SEQ ID NO: 1249124 - DNA, 15 bp, Homo sapiens
tgagtttcatattca

SEQ ID NO: 1249125 - DNA, 15 bp, Homo sapiens
ttgagtttcatattc

SEQ ID NO: 1249126 - DNA, 15 bp, Homo sapiens
tttgagtttcatatt

SEQ ID NO: 1249127 - DNA, 15 bp, Homo sapiens
ttttgagtttcatat

SEQ ID NO: 1249128 - DNA, 15 bp, Homo sapiens
cttttgagtttcata

SEQ ID NO: 1249129 - DNA, 15 bp, Homo sapiens
ccttttgagtttcat

SEQ ID NO: 1249130 - DNA, 15 bp, Homo sapiens
cccttttgagtttca

SEQ ID NO: 1249131 - DNA, 15 bp, Homo sapiens
acccttttgagtttc

SEQ ID NO: 1249132 - DNA, 15 bp, Homo sapiens
aacccttttgagttt

SEQ ID NO: 1249133 - DNA, 15 bp, Homo sapiens
aaacccttttgagtt

SEQ ID NO: 1249134 - DNA, 15 bp, Homo sapiens
caaacccttttgagt

SEQ ID NO: 1249135 - DNA, 15 bp, Homo sapiens
gcaaacccttttgag

SEQ ID NO: 1249136 - DNA, 15 bp, Homo sapiens
agcaaacccttttga

SEQ ID NO: 1249137 - DNA, 15 bp, Homo sapiens
cagcaaacccttttg

SEQ ID NO: 1249138 - DNA, 15 bp, Homo sapiens
gcagcaaaccctttt

SEQ ID NO: 1249139 - DNA, 15 bp, Homo sapiens
cgcagcaaacccttt

SEQ ID NO: 1249140 - DNA, 15 bp, Homo sapiens
gcgcagcaaaccctt

SEQ ID NO: 1249141 - DNA, 15 bp, Homo sapiens
ggcgcagcaaaccct

SEQ ID NO: 1249142 - DNA, 15 bp, Homo sapiens
cggcgcagcaaaccc

SEQ ID NO: 1249143 - DNA, 15 bp, Homo sapiens
tcggcgcagcaaacc

SEQ ID NO: 1249144 - DNA, 15 bp, Homo sapiens
atcggcgcagcaaac

SEQ ID NO: 1249145 - DNA, 15 bp, Homo sapiens
tatcggcgcagcaaa

SEQ ID NO: 1249146 - DNA, 15 bp, Homo sapiens
ttatcggcgcagcaa

SEQ ID NO: 1249147 - DNA, 15 bp, Homo sapiens
tttatcggcgcagca

SEQ ID NO: 1249148 - DNA, 15 bp, Homo sapiens
atttatcggcgcagc

SEQ ID NO: 1249149 - DNA, 15 bp, Homo sapiens
gatttatcggcgcag

SEQ ID NO: 1249150 - DNA, 15 bp, Homo sapiens
agatttatcggcgca

SEQ ID NO: 1249151 - DNA, 15 bp, Homo sapiens
tagatttatcggcgc

SEQ ID NO: 1249152 - DNA, 15 bp, Homo sapiens
ttagatttatcggcg

SEQ ID NO: 1249153 - DNA, 15 bp, Homo sapiens
attagatttatcggc

SEQ ID NO: 1249154 - DNA, 15 bp, Homo sapiens
tattagatttatcgg

SEQ ID NO: 1249155 - DNA, 15 bp, Homo sapiens
gtattagatttatcg

SEQ ID NO: 1249156 - DNA, 15 bp, Homo sapiens
ggtattagatttatc

SEQ ID NO: 1249157 - DNA, 15 bp, Homo sapiens
gggtattagatttat

SEQ ID NO: 1249158 - DNA, 15 bp, Homo sapiens
tgggtattagattta

SEQ ID NO: 1249159 - DNA, 15 bp, Homo sapiens
gtgggtattagattt

SEQ ID NO: 1249160 - DNA, 15 bp, Homo sapiens
tgtgggtattagatt

SEQ ID NO: 1249161 - DNA, 15 bp, Homo sapiens
atgtgggtattagat

SEQ ID NO: 1249162 - DNA, 15 bp, Homo sapiens
catgtgggtattaga

SEQ ID NO: 1249163 - DNA, 15 bp, Homo sapiens
acatgtgggtattag

SEQ ID NO: 1249164 - DNA, 15 bp, Homo sapiens
aacatgtgggtatta

SEQ ID NO: 1249165 - DNA, 15 bp, Homo sapiens
taacatgtgggtatt

SEQ ID NO: 1249166 - DNA, 15 bp, Homo sapiens
gtaacatgtgggtat

SEQ ID NO: 1249167 - DNA, 15 bp, Homo sapiens
tgtaacatgtgggta

SEQ ID NO: 1249168 - DNA, 15 bp, Homo sapiens
ctgtaacatgtgggt

SEQ ID NO: 1249169 - DNA, 15 bp, Homo sapiens
tctgtaacatgtggg

SEQ ID NO: 1249170 - DNA, 15 bp, Homo sapiens
ttctgtaacatgtgg

SEQ ID NO: 1249171 - DNA, 15 bp, Homo sapiens
tttctgtaacatgtg

SEQ ID NO: 1249172 - DNA, 15 bp, Homo sapiens
tagtttctgtaacat

SEQ ID NO: 1249173 - DNA, 15 bp, Homo sapiens
ttagtttctgtaaca

SEQ ID NO: 1249174 - DNA, 15 bp, Homo sapiens
tttagtttctgtaac

SEQ ID NO: 1249175 - DNA, 15 bp, Homo sapiens
ctttagtttctgtaa

SEQ ID NO: 1249176 - DNA, 15 bp, Homo sapiens
gctttagtttctgta

SEQ ID NO: 1249177 - DNA, 15 bp, Homo sapiens
ggctttagtttctgt

SEQ ID NO: 1249178 - DNA, 15 bp, Homo sapiens
gggctttagtttctg

SEQ ID NO: 1249179 - DNA, 15 bp, Homo sapiens
tgggctttagtttct

SEQ ID NO: 1249180 - DNA, 15 bp, Homo sapiens
ttgggctttagtttc

SEQ ID NO: 1249181 - DNA, 15 bp, Homo sapiens
cttgggctttagttt

SEQ ID NO: 1249182 - DNA, 15 bp, Homo sapiens
tcttgggctttagtt

SEQ ID NO: 1249183 - DNA, 15 bp, Homo sapiens
atcttgggctttagt

SEQ ID NO: 1249184 - DNA, 15 bp, Homo sapiens
aatcttgggctttag

SEQ ID NO: 1249185 - DNA, 15 bp, Homo sapiens
taatcttgggcttta

SEQ ID NO: 1249186 - DNA, 15 bp, Homo sapiens
ctaatcttgggcttt

SEQ ID NO: 1249187 - DNA, 15 bp, Homo sapiens
tctaatcttgggctt

SEQ ID NO: 1249188 - DNA, 15 bp, Homo sapiens
ttctaatcttgggct

SEQ ID NO: 1249189 - DNA, 15 bp, Homo sapiens
tttctaatcttgggc

SEQ ID NO: 1249190 - DNA, 15 bp, Homo sapiens
gtttctaatcttggg

SEQ ID NO: 1249191 - DNA, 15 bp, Homo sapiens
ggtttctaatcttgg

SEQ ID NO: 1249192 - DNA, 15 bp, Homo sapiens
aggtttctaatcttg

SEQ ID NO: 1249193 - DNA, 15 bp, Homo sapiens
gaggtttctaatctt

SEQ ID NO: 1249194 - DNA, 15 bp, Homo sapiens
agaggtttctaatct

SEQ ID NO: 1249195 - DNA, 15 bp, Homo sapiens
aagaggtttctaatc

SEQ ID NO: 1249196 - DNA, 15 bp, Homo sapiens
taagaggtttctaat

SEQ ID NO: 1249197 - DNA, 15 bp, Homo sapiens
ttaagaggtttctaa

SEQ ID NO: 1249198 - DNA, 15 bp, Homo sapiens
attaagaggtttcta

SEQ ID NO: 1249199 - DNA, 15 bp, Homo sapiens
tattaagaggtttct

SEQ ID NO: 1249200 - DNA, 15 bp, Homo sapiens
gtattaagaggtttc

SEQ ID NO: 1249201 - DNA, 15 bp, Homo sapiens
ggtattaagaggttt

SEQ ID NO: 1249202 - DNA, 15 bp, Homo sapiens
gggtattaagaggtt

SEQ ID NO: 1249203 - DNA, 15 bp, Homo sapiens
tgggtattaagaggt

SEQ ID NO: 1249204 - DNA, 15 bp, Homo sapiens
ttgggtattaagagg

SEQ ID NO: 1249205 - DNA, 15 bp, Homo sapiens
cttgggtattaagag

SEQ ID NO: 1249206 - DNA, 15 bp, Homo sapiens
gcttgggtattaaga

SEQ ID NO: 1249207 - DNA, 15 bp, Homo sapiens
agcttgggtattaag

SEQ ID NO: 1249208 - DNA, 15 bp, Homo sapiens
cagcttgggtattaa

SEQ ID NO: 1249209 - DNA, 15 bp, Homo sapiens
ccagcttgggtatta

SEQ ID NO: 1249210 - DNA, 15 bp, Homo sapiens
tccagcttgggtatt

SEQ ID NO: 1249211 - DNA, 15 bp, Homo sapiens
gtccagcttgggtat

SEQ ID NO: 1249212 - DNA, 15 bp, Homo sapiens
tgtccagcttgggta

SEQ ID NO: 1249213 - DNA, 15 bp, Homo sapiens
ctgtccagcttgggt

SEQ ID NO: 1249214 - DNA, 15 bp, Homo sapiens
tctgtccagcttggg

SEQ ID NO: 1249215 - DNA, 15 bp, Homo sapiens
ctctgtccagcttgg

SEQ ID NO: 1249216 - DNA, 15 bp, Homo sapiens
tctctgtccagcttg

SEQ ID NO: 1249217 - DNA, 15 bp, Homo sapiens
ttctctgtccagctt

SEQ ID NO: 1249218 - DNA, 15 bp, Homo sapiens
gttctctgtccagct

SEQ ID NO: 1249219 - DNA, 15 bp, Homo sapiens
ggttctctgtccagc

SEQ ID NO: 1249220 - DNA, 15 bp, Homo sapiens
tggttctctgtccag

SEQ ID NO: 1249221 - DNA, 15 bp, Homo sapiens
ctggttctctgtcca

SEQ ID NO: 1249222 - DNA, 15 bp, Homo sapiens
gctggttctctgtcc

SEQ ID NO: 1249223 - DNA, 15 bp, Homo sapiens
agctggttctctgtc

SEQ ID NO: 1249224 - DNA, 15 bp, Homo sapiens
aagctggttctctgt

SEQ ID NO: 1249225 - DNA, 15 bp, Homo sapiens
gaagctggttctctg

SEQ ID NO: 1249226 - DNA, 15 bp, Homo sapiens
ggaagctggttctct

SEQ ID NO: 1249227 - DNA, 15 bp, Homo sapiens
aggaagctggttctc

SEQ ID NO: 1249228 - DNA, 15 bp, Homo sapiens
caggaagctggttct

SEQ ID NO: 1249229 - DNA, 15 bp, Homo sapiens
tcaggaagctggttc

SEQ ID NO: 1249230 - DNA, 15 bp, Homo sapiens
atcaggaagctggtt

SEQ ID NO: 1249231 - DNA, 15 bp, Homo sapiens
gatcaggaagctggt

SEQ ID NO: 1249232 - DNA, 15 bp, Homo sapiens
ggatcaggaagctgg

SEQ ID NO: 1249233 - DNA, 15 bp, Homo sapiens
gggatcaggaagctg

SEQ ID NO: 1249234 - DNA, 15 bp, Homo sapiens
tgggatcaggaagct

SEQ ID NO: 1249235 - DNA, 15 bp, Homo sapiens
ttgggatcaggaagc

SEQ ID NO: 1249236 - DNA, 15 bp, Homo sapiens
attgggatcaggaag

SEQ ID NO: 1249237 - DNA, 15 bp, Homo sapiens
gattgggatcaggaa

SEQ ID NO: 1249238 - DNA, 15 bp, Homo sapiens
agattgggatcagga

SEQ ID NO: 1249239 - DNA, 15 bp, Homo sapiens
gagattgggatcagg

SEQ ID NO: 1249240 - DNA, 15 bp, Homo sapiens
agagattgggatcag

SEQ ID NO: 1249241 - DNA, 15 bp, Homo sapiens
cagagattgggatca

SEQ ID NO: 1249242 - DNA, 15 bp, Homo sapiens
acagagattgggatc

SEQ ID NO: 1249243 - DNA, 15 bp, Homo sapiens
aacagagattgggat

SEQ ID NO: 1249244 - DNA, 15 bp, Homo sapiens
gaacagagattggga

SEQ ID NO: 1249245 - DNA, 15 bp, Homo sapiens
agaacagagattggg

SEQ ID NO: 1249246 - DNA, 15 bp, Homo sapiens
aagaacagagattgg

SEQ ID NO: 1249247 - DNA, 15 bp, Homo sapiens
aaagaacagagattg

SEQ ID NO: 1249248 - DNA, 15 bp, Homo sapiens
gaaagaacagagatt

SEQ ID NO: 1249249 - DNA, 15 bp, Homo sapiens
ggaaagaacagagat

SEQ ID NO: 1249250 - DNA, 15 bp, Homo sapiens
aggaaagaacagaga

SEQ ID NO: 1249251 - DNA, 15 bp, Homo sapiens
gaggaaagaacagag

SEQ ID NO: 1249252 - DNA, 15 bp, Homo sapiens
ggaggaaagaacaga

SEQ ID NO: 1249253 - DNA, 15 bp, Homo sapiens
aggaggaaagaacag

SEQ ID NO: 1249254 - DNA, 15 bp, Homo sapiens
gaggaggaaagaaca

SEQ ID NO: 1249255 - DNA, 15 bp, Homo sapiens
ggaggaggaaagaac

SEQ ID NO: 1249256 - DNA, 15 bp, Homo sapiens
gggaggaggaaagaa

SEQ ID NO: 1249257 - DNA, 15 bp, Homo sapiens
agggaggaggaaaga

SEQ ID NO: 1249258 - DNA, 15 bp, Homo sapiens
gagggaggaggaaag

SEQ ID NO: 1249259 - DNA, 15 bp, Homo sapiens
ggagggaggaggaaa

SEQ ID NO: 1249260 - DNA, 15 bp, Homo sapiens
aggagggaggaggaa

SEQ ID NO: 1249261 - DNA, 15 bp, Homo sapiens
gaggagggaggagga

SEQ ID NO: 1249262 - DNA, 15 bp, Homo sapiens
ggaggagggaggagg

SEQ ID NO: 1249263 - DNA, 15 bp, Homo sapiens
aggaggagggaggag

SEQ ID NO: 1249264 - DNA, 15 bp, Homo sapiens
gaggaggagggagga

SEQ ID NO: 1249265 - DNA, 15 bp, Homo sapiens
agaggaggagggagg

SEQ ID NO: 1249266 - DNA, 15 bp, Homo sapiens
aagaggaggagggag

SEQ ID NO: 1249267 - DNA, 15 bp, Homo sapiens
gaagaggaggaggga

SEQ ID NO: 1249268 - DNA, 15 bp, Homo sapiens
agaagaggaggaggg

SEQ ID NO: 1249269 - DNA, 15 bp, Homo sapiens
aagaagaggaggagg

SEQ ID NO: 1249270 - DNA, 15 bp, Homo sapiens
gaagaagaggaggag

SEQ ID NO: 1249271 - DNA, 15 bp, Homo sapiens
ggaagaagaggagga

SEQ ID NO: 1249272 - DNA, 15 bp, Homo sapiens
aggaagaagaggagg

SEQ ID NO: 1249273 - DNA, 15 bp, Homo sapiens
gaggaagaagaggag

SEQ ID NO: 1249274 - DNA, 15 bp, Homo sapiens
ggaggaagaagagga

SEQ ID NO: 1249275 - DNA, 15 bp, Homo sapiens
aggaggaagaagagg

SEQ ID NO: 1249276 - DNA, 15 bp, Homo sapiens
gaggaggaagaagag

SEQ ID NO: 1249277 - DNA, 15 bp, Homo sapiens
ggaggaggaagaaga

SEQ ID NO: 1249278 - DNA, 15 bp, Homo sapiens
aggaggaggaagaag

SEQ ID NO: 1249279 - DNA, 15 bp, Homo sapiens
gaggaggaggaagaa

SEQ ID NO: 1249280 - DNA, 15 bp, Homo sapiens
ggaggaggaggaaga

SEQ ID NO: 1249281 - DNA, 15 bp, Homo sapiens
aggaggaggaggaag

SEQ ID NO: 1249282 - DNA, 15 bp, Homo sapiens
gaggaggaggaggaa

SEQ ID NO: 1249283 - DNA, 15 bp, Homo sapiens
aaggaggaggaggag

SEQ ID NO: 1249284 - DNA, 15 bp, Homo sapiens
aaaggaggaggagga

SEQ ID NO: 1249285 - DNA, 15 bp, Homo sapiens
taaaggaggaggagg

SEQ ID NO: 1249286 - DNA, 15 bp, Homo sapiens
ttaaaggaggaggag

SEQ ID NO: 1249287 - DNA, 15 bp, Homo sapiens
attaaaggaggagga

SEQ ID NO: 1249288 - DNA, 15 bp, Homo sapiens
gattaaaggaggagg

SEQ ID NO: 1249289 - DNA, 15 bp, Homo sapiens
tgattaaaggaggag

SEQ ID NO: 1249290 - DNA, 15 bp, Homo sapiens
atgattaaaggagga

SEQ ID NO: 1249291 - DNA, 15 bp, Homo sapiens
gatgattaaaggagg

SEQ ID NO: 1249292 - DNA, 15 bp, Homo sapiens
tgatgattaaaggag

SEQ ID NO: 1249293 - DNA, 15 bp, Homo sapiens
atgatgattaaagga

SEQ ID NO: 1249294 - DNA, 15 bp, Homo sapiens
gatgatgattaaagg

SEQ ID NO: 1249295 - DNA, 15 bp, Homo sapiens
tgatgatgattaaag

SEQ ID NO: 1249296 - DNA, 15 bp, Homo sapiens
atgatgatgattaaa

SEQ ID NO: 1249297 - DNA, 15 bp, Homo sapiens
aatgatgatgattaa

SEQ ID NO: 1249298 - DNA, 15 bp, Homo sapiens
taatgatgatgatta

SEQ ID NO: 1249299 - DNA, 15 bp, Homo sapiens
ttaatgatgatgatt

SEQ ID NO: 1249300 - DNA, 15 bp, Homo sapiens
tttaatgatgatgat

SEQ ID NO: 1249301 - DNA, 15 bp, Homo sapiens
ttttaatgatgatga

SEQ ID NO: 1249302 - DNA, 15 bp, Homo sapiens
attttaatgatgatg

SEQ ID NO: 1249303 - DNA, 15 bp, Homo sapiens
gattttaatgatgat

SEQ ID NO: 1249304 - DNA, 15 bp, Homo sapiens
agattttaatgatga

SEQ ID NO: 1249305 - DNA, 15 bp, Homo sapiens
aagattttaatgatg

SEQ ID NO: 1249306 - DNA, 15 bp, Homo sapiens
aaagattttaatgat

SEQ ID NO: 1249307 - DNA, 15 bp, Homo sapiens
caaagattttaatga

SEQ ID NO: 1249308 - DNA, 15 bp, Homo sapiens
acaaagattttaatg

SEQ ID NO: 1249309 - DNA, 15 bp, Homo sapiens
gacaaagattttaat

SEQ ID NO: 1249310 - DNA, 15 bp, Homo sapiens
tgacaaagattttaa

SEQ ID NO: 1249311 - DNA, 15 bp, Homo sapiens
atgacaaagatttta

SEQ ID NO: 1249312 - DNA, 15 bp, Homo sapiens
tatgacaaagatttt

SEQ ID NO: 1249313 - DNA, 15 bp, Homo sapiens
atatgacaaagattt

SEQ ID NO: 1249314 - DNA, 15 bp, Homo sapiens
aatatgacaaagatt

SEQ ID NO: 1249315 - DNA, 15 bp, Homo sapiens
taatatgacaaagat

SEQ ID NO: 1249316 - DNA, 15 bp, Homo sapiens
ttaatatgacaaaga

SEQ ID NO: 1249317 - DNA, 15 bp, Homo sapiens
attaatatgacaaag

SEQ ID NO: 1249318 - DNA, 15 bp, Homo sapiens
cattaatatgacaaa

SEQ ID NO: 1249319 - DNA, 15 bp, Homo sapiens
ccattaatatgacaa

SEQ ID NO: 1249320 - DNA, 15 bp, Homo sapiens
accattaatatgaca

SEQ ID NO: 1249321 - DNA, 15 bp, Homo sapiens
aaccattaatatgac

SEQ ID NO: 1249322 - DNA, 15 bp, Homo sapiens
taaccattaatatga

SEQ ID NO: 1249323 - DNA, 15 bp, Homo sapiens
ttaaccattaatatg

SEQ ID NO: 1249324 - DNA, 15 bp, Homo sapiens
gttaaccattaatat

SEQ ID NO: 1249325 - DNA, 15 bp, Homo sapiens
tgttaaccattaata

SEQ ID NO: 1249326 - DNA, 15 bp, Homo sapiens
atgttaaccattaat

SEQ ID NO: 1249327 - DNA, 15 bp, Homo sapiens
aatgttaaccattaa

SEQ ID NO: 1249328 - DNA, 15 bp, Homo sapiens
caatgttaaccatta

SEQ ID NO: 1249329 - DNA, 15 bp, Homo sapiens
tcaatgttaaccatt

SEQ ID NO: 1249330 - DNA, 15 bp, Homo sapiens
atcaatgttaaccat

SEQ ID NO: 1249331 - DNA, 15 bp, Homo sapiens
tatcaatgttaacca

SEQ ID NO: 1249332 - DNA, 15 bp, Homo sapiens
ttatcaatgttaacc

SEQ ID NO: 1249333 - DNA, 15 bp, Homo sapiens
tttatcaatgttaac

SEQ ID NO: 1249334 - DNA, 15 bp, Homo sapiens
ttttatcaatgttaa

SEQ ID NO: 1249335 - DNA, 15 bp, Homo sapiens
gttttatcaatgtta

SEQ ID NO: 1249336 - DNA, 15 bp, Homo sapiens
tgttttatcaatgtt

SEQ ID NO: 1249337 - DNA, 15 bp, Homo sapiens
atgtgttttatcaat

SEQ ID NO: 1249338 - DNA, 15 bp, Homo sapiens
tatgtgttttatcaa

SEQ ID NO: 1249339 - DNA, 15 bp, Homo sapiens
atatgtgttttatca

SEQ ID NO: 1249340 - DNA, 15 bp, Homo sapiens
aatatgtgttttatc

SEQ ID NO: 1249341 - DNA, 15 bp, Homo sapiens
taatatgtgttttat

SEQ ID NO: 1249342 - DNA, 15 bp, Homo sapiens
ataatatgtgtttta

SEQ ID NO: 1249343 - DNA, 15 bp, Homo sapiens
cataatatgtgtttt

SEQ ID NO: 1249344 - DNA, 15 bp, Homo sapiens
ccataatatgtgttt

SEQ ID NO: 1249345 - DNA, 15 bp, Homo sapiens
cccataatatgtgtt

SEQ ID NO: 1249346 - DNA, 15 bp, Homo sapiens
gcccataatatgtgt

SEQ ID NO: 1249347 - DNA, 15 bp, Homo sapiens
ggcccataatatgtg

SEQ ID NO: 1249348 - DNA, 15 bp, Homo sapiens
tggcccataatatgt

SEQ ID NO: 1249349 - DNA, 15 bp, Homo sapiens
gtggcccataatatg

SEQ ID NO: 1249350 - DNA, 15 bp, Homo sapiens
agtggcccataatat

SEQ ID NO: 1249351 - DNA, 15 bp, Homo sapiens
cagtggcccataata

SEQ ID NO: 1249352 - DNA, 15 bp, Homo sapiens
acagtggcccataat

SEQ ID NO: 1249353 - DNA, 15 bp, Homo sapiens
cacagtggcccataa

SEQ ID NO: 1249354 - DNA, 15 bp, Homo sapiens
gcacagtggcccata

SEQ ID NO: 1249355 - DNA, 15 bp, Homo sapiens
agcacagtggcccat

SEQ ID NO: 1249356 - DNA, 15 bp, Homo sapiens
tagcacagtggccca

SEQ ID NO: 1249357 - DNA, 15 bp, Homo sapiens
ttagcacagtggccc

SEQ ID NO: 1249358 - DNA, 15 bp, Homo sapiens
cttagcacagtggcc

SEQ ID NO: 1249359 - DNA, 15 bp, Homo sapiens
tcttagcacagtggc

SEQ ID NO: 1249360 - DNA, 15 bp, Homo sapiens
atcttagcacagtgg

SEQ ID NO: 1249361 - DNA, 15 bp, Homo sapiens
catcttagcacagtg

SEQ ID NO: 1249362 - DNA, 15 bp, Homo sapiens
acatcttagcacagt

SEQ ID NO: 1249363 - DNA, 15 bp, Homo sapiens
cacatcttagcacag

SEQ ID NO: 1249364 - DNA, 15 bp, Homo sapiens
acacatcttagcaca

SEQ ID NO: 1249365 - DNA, 15 bp, Homo sapiens
gacacatcttagcac

SEQ ID NO: 1249366 - DNA, 15 bp, Homo sapiens
tgacacatcttagca

SEQ ID NO: 1249367 - DNA, 15 bp, Homo sapiens
atgacacatcttagc

SEQ ID NO: 1249368 - DNA, 15 bp, Homo sapiens
tatgacacatcttag

SEQ ID NO: 1249369 - DNA, 15 bp, Homo sapiens
atatgacacatctta

SEQ ID NO: 1249370 - DNA, 15 bp, Homo sapiens
aatatgacacatctt

SEQ ID NO: 1249371 - DNA, 15 bp, Homo sapiens
caatatgacacatct

SEQ ID NO: 1249372 - DNA, 15 bp, Homo sapiens
gcaatatgacacatc

SEQ ID NO: 1249373 - DNA, 15 bp, Homo sapiens
agcaatatgacacat

SEQ ID NO: 1249374 - DNA, 15 bp, Homo sapiens
cagcaatatgacaca

SEQ ID NO: 1249375 - DNA, 15 bp, Homo sapiens
gcagcaatatgacac

SEQ ID NO: 1249376 - DNA, 15 bp, Homo sapiens
tgcagcaatatgaca

SEQ ID NO: 1249377 - DNA, 15 bp, Homo sapiens
ctgcagcaatatgac

SEQ ID NO: 1249378 - DNA, 15 bp, Homo sapiens
gctgcagcaatatga

SEQ ID NO: 1249379 - DNA, 15 bp, Homo sapiens
tgctgcagcaatatg

SEQ ID NO: 1249380 - DNA, 15 bp, Homo sapiens
atgctgcagcaatat

SEQ ID NO: 1249381 - DNA, 15 bp, Homo sapiens
aatgctgcagcaata

SEQ ID NO: 1249382 - DNA, 15 bp, Homo sapiens
aaatgctgcagcaat

SEQ ID NO: 1249383 - DNA, 15 bp, Homo sapiens
taaatgctgcagcaa

SEQ ID NO: 1249384 - DNA, 15 bp, Homo sapiens
ttaaatgctgcagca

SEQ ID NO: 1249385 - DNA, 15 bp, Homo sapiens
attaaatgctgcagc

SEQ ID NO: 1249386 - DNA, 15 bp, Homo sapiens
aattaaatgctgcag

SEQ ID NO: 1249387 - DNA, 15 bp, Homo sapiens
gaattaaatgctgca

SEQ ID NO: 1249388 - DNA, 15 bp, Homo sapiens
tgaattaaatgctgc

SEQ ID NO: 1249389 - DNA, 15 bp, Homo sapiens
atgaattaaatgctg

SEQ ID NO: 1249390 - DNA, 15 bp, Homo sapiens
gatgaattaaatgct

SEQ ID NO: 1249391 - DNA, 15 bp, Homo sapiens
ggatgaattaaatgc

SEQ ID NO: 1249392 - DNA, 15 bp, Homo sapiens
tggatgaattaaatg

SEQ ID NO: 1249393 - DNA, 15 bp, Homo sapiens
ttggatgaattaaat

SEQ ID NO: 1249394 - DNA, 15 bp, Homo sapiens
attggatgaattaaa

SEQ ID NO: 1249395 - DNA, 15 bp, Homo sapiens
tattggatgaattaa

SEQ ID NO: 1249396 - DNA, 15 bp, Homo sapiens
ttattggatgaatta

SEQ ID NO: 1249397 - DNA, 15 bp, Homo sapiens
attattggatgaatt

SEQ ID NO: 1249398 - DNA, 15 bp, Homo sapiens
tattattggatgaat

SEQ ID NO: 1249399 - DNA, 15 bp, Homo sapiens
gtattattggatgaa

SEQ ID NO: 1249400 - DNA, 15 bp, Homo sapiens
cgtattattggatga

SEQ ID NO: 1249401 - DNA, 15 bp, Homo sapiens
ccgtattattggatg

SEQ ID NO: 1249402 - DNA, 15 bp, Homo sapiens
tccgtattattggat

SEQ ID NO: 1249403 - DNA, 15 bp, Homo sapiens
ttccgtattattgga

SEQ ID NO: 1249404 - DNA, 15 bp, Homo sapiens
tttccgtattattgg

SEQ ID NO: 1249405 - DNA, 15 bp, Homo sapiens
ctttccgtattattg

SEQ ID NO: 1249406 - DNA, 15 bp, Homo sapiens
tctttccgtattatt

SEQ ID NO: 1249407 - DNA, 15 bp, Homo sapiens
ctctttccgtattat

SEQ ID NO: 1249408 - DNA, 15 bp, Homo sapiens
gctctttccgtatta

SEQ ID NO: 1249409 - DNA, 15 bp, Homo sapiens
tgctctttccgtatt

SEQ ID NO: 1249410 - DNA, 15 bp, Homo sapiens
atgctctttccgtat

SEQ ID NO: 1249411 - DNA, 15 bp, Homo sapiens
aatgctctttccgta

SEQ ID NO: 1249412 - DNA, 15 bp, Homo sapiens
aaatgctctttccgt

SEQ ID NO: 1249413 - DNA, 15 bp, Homo sapiens
aaaatgctctttccg

SEQ ID NO: 1249414 - DNA, 15 bp, Homo sapiens
taaaatgctctttcc

SEQ ID NO: 1249415 - DNA, 15 bp, Homo sapiens
ttaaaatgctctttc

SEQ ID NO: 1249416 - DNA, 15 bp, Homo sapiens
attaaaatgctcttt

SEQ ID NO: 1249417 - DNA, 15 bp, Homo sapiens
aattaaaatgctctt

SEQ ID NO: 1249418 - DNA, 15 bp, Homo sapiens
gaattaaaatgctct

SEQ ID NO: 1249419 - DNA, 15 bp, Homo sapiens
tgaattaaaatgctc

SEQ ID NO: 1249420 - DNA, 15 bp, Homo sapiens
atgaattaaaatgct

SEQ ID NO: 1249421 - DNA, 15 bp, Homo sapiens
aatgaattaaaatgc

SEQ ID NO: 1249422 - DNA, 15 bp, Homo sapiens
aaatgaattaaaatg

SEQ ID NO: 1249423 - DNA, 15 bp, Homo sapiens
aaaatgaattaaaat

SEQ ID NO: 1249424 - DNA, 15 bp, Homo sapiens
caaaatgaattaaaa

SEQ ID NO: 1249425 - DNA, 15 bp, Homo sapiens
acaaaatgaattaaa

SEQ ID NO: 1249426 - DNA, 15 bp, Homo sapiens
cacaaaatgaattaa

SEQ ID NO: 1249427 - DNA, 15 bp, Homo sapiens
tcacaaaatgaatta

SEQ ID NO: 1249428 - DNA, 15 bp, Homo sapiens
ttcacaaaatgaatt

SEQ ID NO: 1249429 - DNA, 15 bp, Homo sapiens
attcacaaaatgaat

SEQ ID NO: 1249430 - DNA, 15 bp, Homo sapiens
tattcacaaaatgaa

SEQ ID NO: 1249431 - DNA, 15 bp, Homo sapiens
ttattcacaaaatga

SEQ ID NO: 1249432 - DNA, 15 bp, Homo sapiens
cttattcacaaaatg

SEQ ID NO: 1249433 - DNA, 15 bp, Homo sapiens
ccttattcacaaaat

SEQ ID NO: 1249434 - DNA, 15 bp, Homo sapiens
tccttattcacaaaa

SEQ ID NO: 1249435 - DNA, 15 bp, Homo sapiens
ttccttattcacaaa

SEQ ID NO: 1249436 - DNA, 15 bp, Homo sapiens
tttccttattcacaa

SEQ ID NO: 1249437 - DNA, 15 bp, Homo sapiens
gtttccttattcaca

SEQ ID NO: 1249438 - DNA, 15 bp, Homo sapiens
agtttccttattcac

SEQ ID NO: 1249439 - DNA, 15 bp, Homo sapiens
tagtttccttattca

SEQ ID NO: 1249440 - DNA, 15 bp, Homo sapiens
ttagtttccttattc

SEQ ID NO: 1249441 - DNA, 15 bp, Homo sapiens
cttagtttccttatt

SEQ ID NO: 1249442 - DNA, 15 bp, Homo sapiens
ccttagtttccttat

SEQ ID NO: 1249443 - DNA, 15 bp, Homo sapiens
gccttagtttcctta

SEQ ID NO: 1249444 - DNA, 15 bp, Homo sapiens
agccttagtttcctt

SEQ ID NO: 1249445 - DNA, 15 bp, Homo sapiens
gagccttagtttcct

SEQ ID NO: 1249446 - DNA, 15 bp, Homo sapiens
ggagccttagtttcc

SEQ ID NO: 1249447 - DNA, 15 bp, Homo sapiens
tggagccttagtttc

SEQ ID NO: 1249448 - DNA, 15 bp, Homo sapiens
ctggagccttagttt

SEQ ID NO: 1249449 - DNA, 15 bp, Homo sapiens
cctggagccttagtt

SEQ ID NO: 1249450 - DNA, 15 bp, Homo sapiens
tcctggagccttagt

SEQ ID NO: 1249451 - DNA, 15 bp, Homo sapiens
ctcctggagccttag

SEQ ID NO: 1249452 - DNA, 15 bp, Homo sapiens
tctcctggagcctta

SEQ ID NO: 1249453 - DNA, 15 bp, Homo sapiens
atctcctggagcctt

SEQ ID NO: 1249454 - DNA, 15 bp, Homo sapiens
tatctcctggagcct

SEQ ID NO: 1249455 - DNA, 15 bp, Homo sapiens
ttatctcctggagcc

SEQ ID NO: 1249456 - DNA, 15 bp, Homo sapiens
cttatctcctggagc

SEQ ID NO: 1249457 - DNA, 15 bp, Homo sapiens
tcttatctcctggag

SEQ ID NO: 1249458 - DNA, 15 bp, Homo sapiens
gtcttatctcctgga

SEQ ID NO: 1249459 - DNA, 15 bp, Homo sapiens
tgtcttatctcctgg

SEQ ID NO: 1249460 - DNA, 15 bp, Homo sapiens
gtgtcttatctcctg

SEQ ID NO: 1249461 - DNA, 15 bp, Homo sapiens
agtgtcttatctcct

SEQ ID NO: 1249462 - DNA, 15 bp, Homo sapiens
aagtgtcttatctcc

SEQ ID NO: 1249463 - DNA, 15 bp, Homo sapiens
caagtgtcttatctc

SEQ ID NO: 1249464 - DNA, 15 bp, Homo sapiens
gcaagtgtcttatct

SEQ ID NO: 1249465 - DNA, 15 bp, Homo sapiens
ggcaagtgtcttatc

SEQ ID NO: 1249466 - DNA, 15 bp, Homo sapiens
tggcaagtgtcttat

SEQ ID NO: 1249467 - DNA, 15 bp, Homo sapiens
ctggcaagtgtctta

SEQ ID NO: 1249468 - DNA, 15 bp, Homo sapiens
actggcaagtgtctt

SEQ ID NO: 1249469 - DNA, 15 bp, Homo sapiens
aactggcaagtgtct

SEQ ID NO: 1249470 - DNA, 15 bp, Homo sapiens
taactggcaagtgtc

SEQ ID NO: 1249471 - DNA, 15 bp, Homo sapiens
gtaactggcaagtgt

SEQ ID NO: 1249472 - DNA, 15 bp, Homo sapiens
tgtaactggcaagtg

SEQ ID NO: 1249473 - DNA, 15 bp, Homo sapiens
gtgtaactggcaagt

SEQ ID NO: 1249474 - DNA, 15 bp, Homo sapiens
tgtgtaactggcaag

SEQ ID NO: 1249475 - DNA, 15 bp, Homo sapiens
ttgtgtaactggcaa

SEQ ID NO: 1249476 - DNA, 15 bp, Homo sapiens
gttgtgtaactggca

SEQ ID NO: 1249477 - DNA, 15 bp, Homo sapiens
cgttgtgtaactggc

SEQ ID NO: 1249478 - DNA, 15 bp, Homo sapiens
tcgttgtgtaactgg

SEQ ID NO: 1249479 - DNA, 15 bp, Homo sapiens
ttcgttgtgtaactg

SEQ ID NO: 1249480 - DNA, 15 bp, Homo sapiens
tttcgttgtgtaact

SEQ ID NO: 1249481 - DNA, 15 bp, Homo sapiens
atttcgttgtgtaac

SEQ ID NO: 1249482 - DNA, 15 bp, Homo sapiens
tatttcgttgtgtaa

SEQ ID NO: 1249483 - DNA, 15 bp, Homo sapiens
ttatttcgttgtgta

SEQ ID NO: 1249484 - DNA, 15 bp, Homo sapiens
cttatttcgttgtgt

SEQ ID NO: 1249485 - DNA, 15 bp, Homo sapiens
acttatttcgttgtg

SEQ ID NO: 1249486 - DNA, 15 bp, Homo sapiens
cacttatttcgttgt

SEQ ID NO: 1249487 - DNA, 15 bp, Homo sapiens
ccacttatttcgttg

SEQ ID NO: 1249488 - DNA, 15 bp, Homo sapiens
accacttatttcgtt

SEQ ID NO: 1249489 - DNA, 15 bp, Homo sapiens
taccacttatttcgt

SEQ ID NO: 1249490 - DNA, 15 bp, Homo sapiens
ctaccacttatttcg

SEQ ID NO: 1249491 - DNA, 15 bp, Homo sapiens
tctaccacttatttc

SEQ ID NO: 1249492 - DNA, 15 bp, Homo sapiens
ctctaccacttattt

SEQ ID NO: 1249493 - DNA, 15 bp, Homo sapiens
tctctaccacttatt

SEQ ID NO: 1249494 - DNA, 15 bp, Homo sapiens
gtctctaccacttat

SEQ ID NO: 1249495 - DNA, 15 bp, Homo sapiens
agtctctaccactta

SEQ ID NO: 1249496 - DNA, 15 bp, Homo sapiens
aagtctctaccactt

SEQ ID NO: 1249497 - DNA, 15 bp, Homo sapiens
aaagtctctaccact

SEQ ID NO: 1249498 - DNA, 15 bp, Homo sapiens
gaaagtctctaccac

SEQ ID NO: 1249499 - DNA, 15 bp, Homo sapiens
agaaagtctctacca

SEQ ID NO: 1249500 - DNA, 15 bp, Homo sapiens
tagaaagtctctacc

SEQ ID NO: 1249501 - DNA, 15 bp, Homo sapiens
ctagaaagtctctac

SEQ ID NO: 1249502 - DNA, 15 bp, Homo sapiens
cctagaaagtctcta

SEQ ID NO: 1249503 - DNA, 15 bp, Homo sapiens
gcctagaaagtctct

SEQ ID NO: 1249504 - DNA, 15 bp, Homo sapiens
agcctagaaagtctc

SEQ ID NO: 1249505 - DNA, 15 bp, Homo sapiens
aagcctagaaagtct

SEQ ID NO: 1249506 - DNA, 15 bp, Homo sapiens
caagcctagaaagtc

SEQ ID NO: 1249507 - DNA, 15 bp, Homo sapiens
gcaagcctagaaagt

SEQ ID NO: 1249508 - DNA, 15 bp, Homo sapiens
agcaagcctagaaag

SEQ ID NO: 1249509 - DNA, 15 bp, Homo sapiens
cagcaagcctagaaa

SEQ ID NO: 1249510 - DNA, 15 bp, Homo sapiens
ccagcaagcctagaa

SEQ ID NO: 1249511 - DNA, 15 bp, Homo sapiens
tccagcaagcctaga

SEQ ID NO: 1249512 - DNA, 15 bp, Homo sapiens
ttccagcaagcctag

SEQ ID NO: 1249513 - DNA, 15 bp, Homo sapiens
tttccagcaagccta

SEQ ID NO: 1249514 - DNA, 15 bp, Homo sapiens
ttttccagcaagcct

SEQ ID NO: 1249515 - DNA, 15 bp, Homo sapiens
gttttccagcaagcc

SEQ ID NO: 1249516 - DNA, 15 bp, Homo sapiens
agttttccagcaagc

SEQ ID NO: 1249517 - DNA, 15 bp, Homo sapiens
aagttttccagcaag

SEQ ID NO: 1249518 - DNA, 15 bp, Homo sapiens
aaagttttccagcaa

SEQ ID NO: 1249519 - DNA, 15 bp, Homo sapiens
gaaagttttccagca

SEQ ID NO: 1249520 - DNA, 15 bp, Homo sapiens
ggaaagttttccagc

SEQ ID NO: 1249521 - DNA, 15 bp, Homo sapiens
tggaaagttttccag

SEQ ID NO: 1249522 - DNA, 15 bp, Homo sapiens
gtggaaagttttcca

SEQ ID NO: 1249523 - DNA, 15 bp, Homo sapiens
agtggaaagttttcc

SEQ ID NO: 1249524 - DNA, 15 bp, Homo sapiens
gagtggaaagttttc

SEQ ID NO: 1249525 - DNA, 15 bp, Homo sapiens
agagtggaaagtttt

SEQ ID NO: 1249526 - DNA, 15 bp, Homo sapiens
cagagtggaaagttt

SEQ ID NO: 1249527 - DNA, 15 bp, Homo sapiens
gcagagtggaaagtt

SEQ ID NO: 1249528 - DNA, 15 bp, Homo sapiens
agcagagtggaaagt

SEQ ID NO: 1249529 - DNA, 15 bp, Homo sapiens
gagcagagtggaaag

SEQ ID NO: 1249530 - DNA, 15 bp, Homo sapiens
agagcagagtggaaa

SEQ ID NO: 1249531 - DNA, 15 bp, Homo sapiens
gagagcagagtggaa

SEQ ID NO: 1249532 - DNA, 15 bp, Homo sapiens
agagagcagagtgga

SEQ ID NO: 1249533 - DNA, 15 bp, Homo sapiens
cagagagcagagtgg

SEQ ID NO: 1249534 - DNA, 15 bp, Homo sapiens
gcagagagcagagtg

SEQ ID NO: 1249535 - DNA, 15 bp, Homo sapiens
agcagagagcagagt

SEQ ID NO: 1249536 - DNA, 15 bp, Homo sapiens
tagcagagagcagag

SEQ ID NO: 1249537 - DNA, 15 bp, Homo sapiens
atagcagagagcaga

SEQ ID NO: 1249538 - DNA, 15 bp, Homo sapiens
catagcagagagcag

SEQ ID NO: 1249539 - DNA, 15 bp, Homo sapiens
tcatagcagagagca

SEQ ID NO: 1249540 - DNA, 15 bp, Homo sapiens
atcatagcagagagc

SEQ ID NO: 1249541 - DNA, 15 bp, Homo sapiens
tatcatagcagagag

SEQ ID NO: 1249542 - DNA, 15 bp, Homo sapiens
ttatcatagcagaga

SEQ ID NO: 1249543 - DNA, 15 bp, Homo sapiens
cttatcatagcagag

SEQ ID NO: 1249544 - DNA, 15 bp, Homo sapiens
gcttatcatagcaga

SEQ ID NO: 1249545 - DNA, 15 bp, Homo sapiens
agcttatcatagcag

SEQ ID NO: 1249546 - DNA, 15 bp, Homo sapiens
tagcttatcatagca

SEQ ID NO: 1249547 - DNA, 15 bp, Homo sapiens
ttagcttatcatagc

SEQ ID NO: 1249548 - DNA, 15 bp, Homo sapiens
cttagcttatcatag

SEQ ID NO: 1249549 - DNA, 15 bp, Homo sapiens
ccttagcttatcata

SEQ ID NO: 1249550 - DNA, 15 bp, Homo sapiens
tccttagcttatcat

SEQ ID NO: 1249551 - DNA, 15 bp, Homo sapiens
atccttagcttatca

SEQ ID NO: 1249552 - DNA, 15 bp, Homo sapiens
tatccttagcttatc

SEQ ID NO: 1249553 - DNA, 15 bp, Homo sapiens
gtatccttagcttat

SEQ ID NO: 1249554 - DNA, 15 bp, Homo sapiens
tgtatccttagctta

SEQ ID NO: 1249555 - DNA, 15 bp, Homo sapiens
ctgtatccttagctt

SEQ ID NO: 1249556 - DNA, 15 bp, Homo sapiens
actgtatccttagct

SEQ ID NO: 1249557 - DNA, 15 bp, Homo sapiens
tactgtatccttagc

SEQ ID NO: 1249558 - DNA, 15 bp, Homo sapiens
ctactgtatccttag

SEQ ID NO: 1249559 - DNA, 15 bp, Homo sapiens
tctactgtatcctta

SEQ ID NO: 1249560 - DNA, 15 bp, Homo sapiens
ttctactgtatcctt

SEQ ID NO: 1249561 - DNA, 15 bp, Homo sapiens
tttctactgtatcct

SEQ ID NO: 1249562 - DNA, 15 bp, Homo sapiens
ttttctactgtatcc

SEQ ID NO: 1249563 - DNA, 15 bp, Homo sapiens
tttttctactgtatc

SEQ ID NO: 1249564 - DNA, 15 bp, Homo sapiens
ttttttctactgtat

SEQ ID NO: 1249565 - DNA, 15 bp, Homo sapiens
tttttttctactgta

SEQ ID NO: 1249566 - DNA, 15 bp, Homo sapiens
atttttttctactgt

SEQ ID NO: 1249567 - DNA, 15 bp, Homo sapiens
aatttttttctactg

SEQ ID NO: 1249568 - DNA, 15 bp, Homo sapiens
aaatttttttctact

SEQ ID NO: 1249569 - DNA, 15 bp, Homo sapiens
aaaatttttttctac

SEQ ID NO: 1249570 - DNA, 15 bp, Homo sapiens
taaaatttttttcta

SEQ ID NO: 1249571 - DNA, 15 bp, Homo sapiens
ataaaatttttttct

SEQ ID NO: 1249572 - DNA, 15 bp, Homo sapiens
tataaaatttttttc

SEQ ID NO: 1249573 - DNA, 15 bp, Homo sapiens
atataaaattttttt

SEQ ID NO: 1249574 - DNA, 15 bp, Homo sapiens
tatataaaatttttt

SEQ ID NO: 1249575 - DNA, 15 bp, Homo sapiens
atatataaaattttt

SEQ ID NO: 1249576 - DNA, 15 bp, Homo sapiens
tatatataaaatttt

SEQ ID NO: 1249577 - DNA, 15 bp, Homo sapiens
atatatataaaattt

SEQ ID NO: 1249578 - DNA, 15 bp, Homo sapiens
cactatatatatata

SEQ ID NO: 1249579 - DNA, 15 bp, Homo sapiens
acactatatatatat

SEQ ID NO: 1249580 - DNA, 15 bp, Homo sapiens
tacactatatatata

SEQ ID NO: 1249581 - DNA, 15 bp, Homo sapiens
atacactatatatat

SEQ ID NO: 1249582 - DNA, 15 bp, Homo sapiens
tatacactatatata

SEQ ID NO: 1249583 - DNA, 15 bp, Homo sapiens
atatacactatatat

SEQ ID NO: 1249584 - DNA, 15 bp, Homo sapiens
tatatacactatata

SEQ ID NO: 1249585 - DNA, 15 bp, Homo sapiens
atatatacactatat

SEQ ID NO: 1249586 - DNA, 15 bp, Homo sapiens
tatatatacactata

SEQ ID NO: 1249587 - DNA, 15 bp, Homo sapiens
atatatatacactat

SEQ ID NO: 1249588 - DNA, 15 bp, Homo sapiens
catatatatacacta

SEQ ID NO: 1249589 - DNA, 15 bp, Homo sapiens
gcatatatatacact

SEQ ID NO: 1249590 - DNA, 15 bp, Homo sapiens
tgcatatatatacac

SEQ ID NO: 1249591 - DNA, 15 bp, Homo sapiens
atgcatatatataca

SEQ ID NO: 1249592 - DNA, 15 bp, Homo sapiens
tatgcatatatatac

SEQ ID NO: 1249593 - DNA, 15 bp, Homo sapiens
atatgcatatatata

SEQ ID NO: 1249594 - DNA, 15 bp, Homo sapiens
tatatgcatatatat

SEQ ID NO: 1249595 - DNA, 15 bp, Homo sapiens
atatatgcatatata

SEQ ID NO: 1249596 - DNA, 15 bp, Homo sapiens
tatatatgcatatat

SEQ ID NO: 1249597 - DNA, 15 bp, Homo sapiens
atatatatgcatata

SEQ ID NO: 1249598 - DNA, 15 bp, Homo sapiens
tatatatatgcatat

SEQ ID NO: 1249599 - DNA, 15 bp, Homo sapiens
gtatatatatgcata

SEQ ID NO: 1249600 - DNA, 15 bp, Homo sapiens
tgtatatatatgcat

SEQ ID NO: 1249601 - DNA, 15 bp, Homo sapiens
ctgtatatatatgca

SEQ ID NO: 1249602 - DNA, 15 bp, Homo sapiens
tctgtatatatatgc

SEQ ID NO: 1249603 - DNA, 15 bp, Homo sapiens
atctgtatatatatg

SEQ ID NO: 1249604 - DNA, 15 bp, Homo sapiens
tatctgtatatatat

SEQ ID NO: 1249605 - DNA, 15 bp, Homo sapiens
atatctgtatatata

SEQ ID NO: 1249606 - DNA, 15 bp, Homo sapiens
tatatctgtatatat

SEQ ID NO: 1249607 - DNA, 15 bp, Homo sapiens
atatatctgtatata

SEQ ID NO: 1249608 - DNA, 15 bp, Homo sapiens
tatatatctgtatat

SEQ ID NO: 1249609 - DNA, 15 bp, Homo sapiens
tatatatatctgtat

SEQ ID NO: 1249610 - DNA, 15 bp, Homo sapiens
ctatatatatctgta

SEQ ID NO: 1249611 - DNA, 15 bp, Homo sapiens
actatatatatctgt

SEQ ID NO: 1249612 - DNA, 15 bp, Homo sapiens
tactatatatatctg

SEQ ID NO: 1249613 - DNA, 15 bp, Homo sapiens
atactatatatatct

SEQ ID NO: 1249614 - DNA, 15 bp, Homo sapiens
catactatatatatc

SEQ ID NO: 1249615 - DNA, 15 bp, Homo sapiens
acatactatatatat

SEQ ID NO: 1249616 - DNA, 15 bp, Homo sapiens
cacatactatatata

SEQ ID NO: 1249617 - DNA, 15 bp, Homo sapiens
acacatactatatat

SEQ ID NO: 1249618 - DNA, 15 bp, Homo sapiens
cacacatactatata

SEQ ID NO: 1249619 - DNA, 15 bp, Homo sapiens
acacacatactatat

SEQ ID NO: 1249620 - DNA, 15 bp, Homo sapiens
tacacacatactata

SEQ ID NO: 1249621 - DNA, 15 bp, Homo sapiens
atacacacatactat

SEQ ID NO: 1249622 - DNA, 15 bp, Homo sapiens
tatacacacatacta

SEQ ID NO: 1249623 - DNA, 15 bp, Homo sapiens
gtatacacacatact

SEQ ID NO: 1249624 - DNA, 15 bp, Homo sapiens
cgtatacacacatac

SEQ ID NO: 1249625 - DNA, 15 bp, Homo sapiens
acgtatacacacata

SEQ ID NO: 1249626 - DNA, 15 bp, Homo sapiens
cacgtatacacacat

SEQ ID NO: 1249627 - DNA, 15 bp, Homo sapiens
acacgtatacacaca

SEQ ID NO: 1249628 - DNA, 15 bp, Homo sapiens
tacacgtatacacac

SEQ ID NO: 1249629 - DNA, 15 bp, Homo sapiens
atacacgtatacaca

SEQ ID NO: 1249630 - DNA, 15 bp, Homo sapiens
catacacgtatacac

SEQ ID NO: 1249631 - DNA, 15 bp, Homo sapiens
acatacacgtataca

SEQ ID NO: 1249632 - DNA, 15 bp, Homo sapiens
cacatacacgtatac

SEQ ID NO: 1249633 - DNA, 15 bp, Homo sapiens
acacatacacgtata

SEQ ID NO: 1249634 - DNA, 15 bp, Homo sapiens
tacacatacacgtat

SEQ ID NO: 1249635 - DNA, 15 bp, Homo sapiens
atacacatacacgta

SEQ ID NO: 1249636 - DNA, 15 bp, Homo sapiens
tatacacatacacgt

SEQ ID NO: 1249637 - DNA, 15 bp, Homo sapiens
atatacacatacacg

SEQ ID NO: 1249638 - DNA, 15 bp, Homo sapiens
tatatacacatacac

SEQ ID NO: 1249639 - DNA, 15 bp, Homo sapiens
gtgtatgtatatata

SEQ ID NO: 1249640 - DNA, 15 bp, Homo sapiens
tgtgtatgtatatat

SEQ ID NO: 1249641 - DNA, 15 bp, Homo sapiens
gtgtgtatgtatata

SEQ ID NO: 1249642 - DNA, 15 bp, Homo sapiens
tgtgtgtatgtatat

SEQ ID NO: 1249643 - DNA, 15 bp, Homo sapiens
atgtgtgtatgtata

SEQ ID NO: 1249644 - DNA, 15 bp, Homo sapiens
tatgtgtgtatgtat

SEQ ID NO: 1249645 - DNA, 15 bp, Homo sapiens
atatgtgtgtatgta

SEQ ID NO: 1249646 - DNA, 15 bp, Homo sapiens
catatgtgtgtatgt

SEQ ID NO: 1249647 - DNA, 15 bp, Homo sapiens
acatatgtgtgtatg

SEQ ID NO: 1249648 - DNA, 15 bp, Homo sapiens
tacatatgtgtgtat

SEQ ID NO: 1249649 - DNA, 15 bp, Homo sapiens
ttacatatgtgtgta

SEQ ID NO: 1249650 - DNA, 15 bp, Homo sapiens
gttacatatgtgtgt

SEQ ID NO: 1249651 - DNA, 15 bp, Homo sapiens
agttacatatgtgtg

SEQ ID NO: 1249652 - DNA, 15 bp, Homo sapiens
gagttacatatgtgt

SEQ ID NO: 1249653 - DNA, 15 bp, Homo sapiens
tgagttacatatgtg

SEQ ID NO: 1249654 - DNA, 15 bp, Homo sapiens
gtgagttacatatgt

SEQ ID NO: 1249655 - DNA, 15 bp, Homo sapiens
tgtgagttacatatg

SEQ ID NO: 1249656 - DNA, 15 bp, Homo sapiens
ctgtgagttacatat

SEQ ID NO: 1249657 - DNA, 15 bp, Homo sapiens
gctgtgagttacata

SEQ ID NO: 1249658 - DNA, 15 bp, Homo sapiens
agctgtgagttacat

SEQ ID NO: 1249659 - DNA, 15 bp, Homo sapiens
cagctgtgagttaca

SEQ ID NO: 1249660 - DNA, 15 bp, Homo sapiens
tcagctgtgagttac

SEQ ID NO: 1249661 - DNA, 15 bp, Homo sapiens
ctcagctgtgagtta

SEQ ID NO: 1249662 - DNA, 15 bp, Homo sapiens
gctcagctgtgagtt

SEQ ID NO: 1249663 - DNA, 15 bp, Homo sapiens
tgctcagctgtgagt

SEQ ID NO: 1249664 - DNA, 15 bp, Homo sapiens
ctgctcagctgtgag

SEQ ID NO: 1249665 - DNA, 15 bp, Homo sapiens
actgctcagctgtga

SEQ ID NO: 1249666 - DNA, 15 bp, Homo sapiens
tactgctcagctgtg

SEQ ID NO: 1249667 - DNA, 15 bp, Homo sapiens
ttactgctcagctgt

SEQ ID NO: 1249668 - DNA, 15 bp, Homo sapiens
attactgctcagctg

SEQ ID NO: 1249669 - DNA, 15 bp, Homo sapiens
tattactgctcagct

SEQ ID NO: 1249670 - DNA, 15 bp, Homo sapiens
gtattactgctcagc

SEQ ID NO: 1249671 - DNA, 15 bp, Homo sapiens
agtattactgctcag

SEQ ID NO: 1249672 - DNA, 15 bp, Homo sapiens
cagtattactgctca

SEQ ID NO: 1249673 - DNA, 15 bp, Homo sapiens
acagtattactgctc

SEQ ID NO: 1249674 - DNA, 15 bp, Homo sapiens
gacagtattactgct

SEQ ID NO: 1249675 - DNA, 15 bp, Homo sapiens
agacagtattactgc

SEQ ID NO: 1249676 - DNA, 15 bp, Homo sapiens
tagacagtattactg

SEQ ID NO: 1249677 - DNA, 15 bp, Homo sapiens
gtagacagtattact

SEQ ID NO: 1249678 - DNA, 15 bp, Homo sapiens
agtagacagtattac

SEQ ID NO: 1249679 - DNA, 15 bp, Homo sapiens
tagtagacagtatta

SEQ ID NO: 1249680 - DNA, 15 bp, Homo sapiens
atagtagacagtatt

SEQ ID NO: 1249681 - DNA, 15 bp, Homo sapiens
catagtagacagtat

SEQ ID NO: 1249682 - DNA, 15 bp, Homo sapiens
actggcacatagtag

SEQ ID NO: 1249683 - DNA, 15 bp, Homo sapiens
tactggcacatagta

SEQ ID NO: 1249684 - DNA, 15 bp, Homo sapiens
atactggcacatagt

SEQ ID NO: 1249685 - DNA, 15 bp, Homo sapiens
aatactggcacatag

SEQ ID NO: 1249686 - DNA, 15 bp, Homo sapiens
caatactggcacata

SEQ ID NO: 1249687 - DNA, 15 bp, Homo sapiens
acaatactggcacat

SEQ ID NO: 1249688 - DNA, 15 bp, Homo sapiens
aacaatactggcaca

SEQ ID NO: 1249689 - DNA, 15 bp, Homo sapiens
aaacaatactggcac

SEQ ID NO: 1249690 - DNA, 15 bp, Homo sapiens
aaaacaatactggca

SEQ ID NO: 1249691 - DNA, 15 bp, Homo sapiens
gaaaacaatactggc

SEQ ID NO: 1249692 - DNA, 15 bp, Homo sapiens
ggaaaacaatactgg

SEQ ID NO: 1249693 - DNA, 15 bp, Homo sapiens
tggaaaacaatactg

SEQ ID NO: 1249694 - DNA, 15 bp, Homo sapiens
atggaaaacaatact

SEQ ID NO: 1249695 - DNA, 15 bp, Homo sapiens
tatggaaaacaatac

SEQ ID NO: 1249696 - DNA, 15 bp, Homo sapiens
ttatggaaaacaata

SEQ ID NO: 1249697 - DNA, 15 bp, Homo sapiens
tttatggaaaacaat

SEQ ID NO: 1249698 - DNA, 15 bp, Homo sapiens
atttatggaaaacaa

SEQ ID NO: 1249699 - DNA, 15 bp, Homo sapiens
gatttatggaaaaca

SEQ ID NO: 1249700 - DNA, 15 bp, Homo sapiens
tgatttatggaaaac

SEQ ID NO: 1249701 - DNA, 15 bp, Homo sapiens
gtgatttatggaaaa

SEQ ID NO: 1249702 - DNA, 15 bp, Homo sapiens
cgtgatttatggaaa

SEQ ID NO: 1249703 - DNA, 15 bp, Homo sapiens
gcgtgatttatggaa

SEQ ID NO: 1249704 - DNA, 15 bp, Homo sapiens
tgcgtgatttatgga

SEQ ID NO: 1249705 - DNA, 15 bp, Homo sapiens
atgcgtgatttatgg

SEQ ID NO: 1249706 - DNA, 15 bp, Homo sapiens
tatgcgtgatttatg

SEQ ID NO: 1249707 - DNA, 15 bp, Homo sapiens
atatgcgtgatttat

SEQ ID NO: 1249708 - DNA, 15 bp, Homo sapiens
aatatgcgtgattta

SEQ ID NO: 1249709 - DNA, 15 bp, Homo sapiens
taatatgcgtgattt

SEQ ID NO: 1249710 - DNA, 15 bp, Homo sapiens
ttaatatgcgtgatt

SEQ ID NO: 1249711 - DNA, 15 bp, Homo sapiens
gttaatatgcgtgat

SEQ ID NO: 1249712 - DNA, 15 bp, Homo sapiens
agttaatatgcgtga

SEQ ID NO: 1249713 - DNA, 15 bp, Homo sapiens
gagttaatatgcgtg

SEQ ID NO: 1249714 - DNA, 15 bp, Homo sapiens
tgagttaatatgcgt

SEQ ID NO: 1249715 - DNA, 15 bp, Homo sapiens
atgagttaatatgcg

SEQ ID NO: 1249716 - DNA, 15 bp, Homo sapiens
aatgagttaatatgc

SEQ ID NO: 1249717 - DNA, 15 bp, Homo sapiens
aaatgagttaatatg

SEQ ID NO: 1249718 - DNA, 15 bp, Homo sapiens
taaatgagttaatat

SEQ ID NO: 1249719 - DNA, 15 bp, Homo sapiens
ttaaatgagttaata

SEQ ID NO: 1249720 - DNA, 15 bp, Homo sapiens
gttaaatgagttaat

SEQ ID NO: 1249721 - DNA, 15 bp, Homo sapiens
tgttaaatgagttaa

SEQ ID NO: 1249722 - DNA, 15 bp, Homo sapiens
atgttaaatgagtta

SEQ ID NO: 1249723 - DNA, 15 bp, Homo sapiens
gatgttaaatgagtt

SEQ ID NO: 1249724 - DNA, 15 bp, Homo sapiens
tgatgttaaatgagt

SEQ ID NO: 1249725 - DNA, 15 bp, Homo sapiens
atgatgttaaatgag

SEQ ID NO: 1249726 - DNA, 15 bp, Homo sapiens
catgatgttaaatga

SEQ ID NO: 1249727 - DNA, 15 bp, Homo sapiens
acatgatgttaaatg

SEQ ID NO: 1249728 - DNA, 15 bp, Homo sapiens
aacatgatgttaaat

SEQ ID NO: 1249729 - DNA, 15 bp, Homo sapiens
caacatgatgttaaa

SEQ ID NO: 1249730 - DNA, 15 bp, Homo sapiens
acaacatgatgttaa

SEQ ID NO: 1249731 - DNA, 15 bp, Homo sapiens
aacaacatgatgtta

SEQ ID NO: 1249732 - DNA, 15 bp, Homo sapiens
gaacaacatgatgtt

SEQ ID NO: 1249733 - DNA, 15 bp, Homo sapiens
agaacaacatgatgt

SEQ ID NO: 1249734 - DNA, 15 bp, Homo sapiens
aagaacaacatgatg

SEQ ID NO: 1249735 - DNA, 15 bp, Homo sapiens
taagaacaacatgat

SEQ ID NO: 1249736 - DNA, 15 bp, Homo sapiens
ataagaacaacatga

SEQ ID NO: 1249737 - DNA, 15 bp, Homo sapiens
tataagaacaacatg

SEQ ID NO: 1249738 - DNA, 15 bp, Homo sapiens
ttataagaacaacat

SEQ ID NO: 1249739 - DNA, 15 bp, Homo sapiens
tttataagaacaaca

SEQ ID NO: 1249740 - DNA, 15 bp, Homo sapiens
ctttataagaacaac

SEQ ID NO: 1249741 - DNA, 15 bp, Homo sapiens
gctttataagaacaa

SEQ ID NO: 1249742 - DNA, 15 bp, Homo sapiens
tgctttataagaaca

SEQ ID NO: 1249743 - DNA, 15 bp, Homo sapiens
ttgctttataagaac

SEQ ID NO: 1249744 - DNA, 15 bp, Homo sapiens
attgctttataagaa

SEQ ID NO: 1249745 - DNA, 15 bp, Homo sapiens
tattgctttataaga

SEQ ID NO: 1249746 - DNA, 15 bp, Homo sapiens
gtattgctttataag

SEQ ID NO: 1249747 - DNA, 15 bp, Homo sapiens
agtattgctttataa

SEQ ID NO: 1249748 - DNA, 15 bp, Homo sapiens
aagtattgctttata

SEQ ID NO: 1249749 - DNA, 15 bp, Homo sapiens
gaaagtattgcttta

SEQ ID NO: 1249750 - DNA, 15 bp, Homo sapiens
agaaagtattgcttt

SEQ ID NO: 1249751 - DNA, 15 bp, Homo sapiens
tagaaagtattgctt

SEQ ID NO: 1249752 - DNA, 15 bp, Homo sapiens
ctagaaagtattgct

SEQ ID NO: 1249753 - DNA, 15 bp, Homo sapiens
actagaaagtattgc

SEQ ID NO: 1249754 - DNA, 15 bp, Homo sapiens
tactagaaagtattg

SEQ ID NO: 1249755 - DNA, 15 bp, Homo sapiens
gtactagaaagtatt

SEQ ID NO: 1249756 - DNA, 15 bp, Homo sapiens
agtactagaaagtat

SEQ ID NO: 1249757 - DNA, 15 bp, Homo sapiens
tagtactagaaagta

SEQ ID NO: 1249758 - DNA, 15 bp, Homo sapiens
gtagtactagaaagt

SEQ ID NO: 1249759 - DNA, 15 bp, Homo sapiens
agtagtactagaaag

SEQ ID NO: 1249760 - DNA, 15 bp, Homo sapiens
tagtagtactagaaa

SEQ ID NO: 1249761 - DNA, 15 bp, Homo sapiens
atagtagtactagaa

SEQ ID NO: 1249762 - DNA, 15 bp, Homo sapiens
aatagtagtactaga

SEQ ID NO: 1249763 - DNA, 15 bp, Homo sapiens
taatagtagtactag

SEQ ID NO: 1249764 - DNA, 15 bp, Homo sapiens
ataatagtagtacta

SEQ ID NO: 1249765 - DNA, 15 bp, Homo sapiens
gataatagtagtact

SEQ ID NO: 1249766 - DNA, 15 bp, Homo sapiens
tgataatagtagtac

SEQ ID NO: 1249767 - DNA, 15 bp, Homo sapiens
gtgataatagtagta

SEQ ID NO: 1249768 - DNA, 15 bp, Homo sapiens
ggtgataatagtagt

SEQ ID NO: 1249769 - DNA, 15 bp, Homo sapiens
tggtgataatagtag

SEQ ID NO: 1249770 - DNA, 15 bp, Homo sapiens
atggtgataatagta

SEQ ID NO: 1249771 - DNA, 15 bp, Homo sapiens
aatggtgataatagt

SEQ ID NO: 1249772 - DNA, 15 bp, Homo sapiens
aaatggtgataatag

SEQ ID NO: 1249773 - DNA, 15 bp, Homo sapiens
gaaatggtgataata

SEQ ID NO: 1249774 - DNA, 15 bp, Homo sapiens
tgaaatggtgataat

SEQ ID NO: 1249775 - DNA, 15 bp, Homo sapiens
ttgaaatggtgataa

SEQ ID NO: 1249776 - DNA, 15 bp, Homo sapiens
tttgaaatggtgata

SEQ ID NO: 1249777 - DNA, 15 bp, Homo sapiens
ctttgaaatggtgat

SEQ ID NO: 1249778 - DNA, 15 bp, Homo sapiens
tctttgaaatggtga

SEQ ID NO: 1249779 - DNA, 15 bp, Homo sapiens
atctttgaaatggtg

SEQ ID NO: 1249780 - DNA, 15 bp, Homo sapiens
tatctttgaaatggt

SEQ ID NO: 1249781 - DNA, 15 bp, Homo sapiens
ctatctttgaaatgg

SEQ ID NO: 1249782 - DNA, 15 bp, Homo sapiens
cctatctttgaaatg

SEQ ID NO: 1249783 - DNA, 15 bp, Homo sapiens
tcctatctttgaaat

SEQ ID NO: 1249784 - DNA, 15 bp, Homo sapiens
ttcctatctttgaaa

SEQ ID NO: 1249785 - DNA, 15 bp, Homo sapiens
cttcctatctttgaa

SEQ ID NO: 1249786 - DNA, 15 bp, Homo sapiens
tcttcctatctttga

SEQ ID NO: 1249787 - DNA, 15 bp, Homo sapiens
ctcttcctatctttg

SEQ ID NO: 1249788 - DNA, 15 bp, Homo sapiens
actcttcctatcttt

SEQ ID NO: 1249789 - DNA, 15 bp, Homo sapiens
cactcttcctatctt

SEQ ID NO: 1249790 - DNA, 15 bp, Homo sapiens
tcactcttcctatct

SEQ ID NO: 1249791 - DNA, 15 bp, Homo sapiens
ctcactcttcctatc

SEQ ID NO: 1249792 - DNA, 15 bp, Homo sapiens
cctcactcttcctat

SEQ ID NO: 1249793 - DNA, 15 bp, Homo sapiens
gcctcactcttccta

SEQ ID NO: 1249794 - DNA, 15 bp, Homo sapiens
tgcctcactcttcct

SEQ ID NO: 1249795 - DNA, 15 bp, Homo sapiens
gtgcctcactcttcc

SEQ ID NO: 1249796 - DNA, 15 bp, Homo sapiens
tgtgcctcactcttc

SEQ ID NO: 1249797 - DNA, 15 bp, Homo sapiens
ttgtgcctcactctt

SEQ ID NO: 1249798 - DNA, 15 bp, Homo sapiens
tttgtgcctcactct

SEQ ID NO: 1249799 - DNA, 15 bp, Homo sapiens
ctttgtgcctcactc

SEQ ID NO: 1249800 - DNA, 15 bp, Homo sapiens
tctttgtgcctcact

SEQ ID NO: 1249801 - DNA, 15 bp, Homo sapiens
ctctttgtgcctcac

SEQ ID NO: 1249802 - DNA, 15 bp, Homo sapiens
tctctttgtgcctca

SEQ ID NO: 1249803 - DNA, 15 bp, Homo sapiens
atctctttgtgcctc

SEQ ID NO: 1249804 - DNA, 15 bp, Homo sapiens
catctctttgtgcct

SEQ ID NO: 1249805 - DNA, 15 bp, Homo sapiens
acatctctttgtgcc

SEQ ID NO: 1249806 - DNA, 15 bp, Homo sapiens
tacatctctttgtgc

SEQ ID NO: 1249807 - DNA, 15 bp, Homo sapiens
ttacatctctttgtg

SEQ ID NO: 1249808 - DNA, 15 bp, Homo sapiens
attacatctctttgt

SEQ ID NO: 1249809 - DNA, 15 bp, Homo sapiens
tattacatctctttg

SEQ ID NO: 1249810 - DNA, 15 bp, Homo sapiens
ttattacatctcttt

SEQ ID NO: 1249811 - DNA, 15 bp, Homo sapiens
gttattacatctctt

SEQ ID NO: 1249812 - DNA, 15 bp, Homo sapiens
agttattacatctct

SEQ ID NO: 1249813 - DNA, 15 bp, Homo sapiens
aagttattacatctc

SEQ ID NO: 1249814 - DNA, 15 bp, Homo sapiens
aaagttattacatct

SEQ ID NO: 1249815 - DNA, 15 bp, Homo sapiens
aaaagttattacatc

SEQ ID NO: 1249816 - DNA, 15 bp, Homo sapiens
gaaaagttattacat

SEQ ID NO: 1249817 - DNA, 15 bp, Homo sapiens
ggaaaagttattaca

SEQ ID NO: 1249818 - DNA, 15 bp, Homo sapiens
aggaaaagttattac

SEQ ID NO: 1249819 - DNA, 15 bp, Homo sapiens
caggaaaagttatta

SEQ ID NO: 1249820 - DNA, 15 bp, Homo sapiens
ccaggaaaagttatt

SEQ ID NO: 1249821 - DNA, 15 bp, Homo sapiens
cccaggaaaagttat

SEQ ID NO: 1249822 - DNA, 15 bp, Homo sapiens
gcccaggaaaagtta

SEQ ID NO: 1249823 - DNA, 15 bp, Homo sapiens
agcccaggaaaagtt

SEQ ID NO: 1249824 - DNA, 15 bp, Homo sapiens
gagcccaggaaaagt

SEQ ID NO: 1249825 - DNA, 15 bp, Homo sapiens
tgagcccaggaaaag

SEQ ID NO: 1249826 - DNA, 15 bp, Homo sapiens
atgagcccaggaaaa

SEQ ID NO: 1249827 - DNA, 15 bp, Homo sapiens
tatgagcccaggaaa

SEQ ID NO: 1249828 - DNA, 15 bp, Homo sapiens
ctatgagcccaggaa

SEQ ID NO: 1249829 - DNA, 15 bp, Homo sapiens
tctatgagcccagga

SEQ ID NO: 1249830 - DNA, 15 bp, Homo sapiens
atctatgagcccagg

SEQ ID NO: 1249831 - DNA, 15 bp, Homo sapiens
tatctatgagcccag

SEQ ID NO: 1249832 - DNA, 15 bp, Homo sapiens
ctatctatgagccca

SEQ ID NO: 1249833 - DNA, 15 bp, Homo sapiens
actatctatgagccc

SEQ ID NO: 1249834 - DNA, 15 bp, Homo sapiens
tactatctatgagcc

SEQ ID NO: 1249835 - DNA, 15 bp, Homo sapiens
ttactatctatgagc

SEQ ID NO: 1249836 - DNA, 15 bp, Homo sapiens
tttactatctatgag

SEQ ID NO: 1249837 - DNA, 15 bp, Homo sapiens
atttactatctatga

SEQ ID NO: 1249838 - DNA, 15 bp, Homo sapiens
catttactatctatg

SEQ ID NO: 1249839 - DNA, 15 bp, Homo sapiens
gcatttactatctat

SEQ ID NO: 1249840 - DNA, 15 bp, Homo sapiens
tgcatttactatcta

SEQ ID NO: 1249841 - DNA, 15 bp, Homo sapiens
ctgcatttactatct

SEQ ID NO: 1249842 - DNA, 15 bp, Homo sapiens
tctgcatttactatc

SEQ ID NO: 1249843 - DNA, 15 bp, Homo sapiens
ctctgcatttactat

SEQ ID NO: 1249844 - DNA, 15 bp, Homo sapiens
tctctgcatttacta

SEQ ID NO: 1249845 - DNA, 15 bp, Homo sapiens
atctctgcatttact

SEQ ID NO: 1249846 - DNA, 15 bp, Homo sapiens
tatctctgcatttac

SEQ ID NO: 1249847 - DNA, 15 bp, Homo sapiens
ttatctctgcattta

SEQ ID NO: 1249848 - DNA, 15 bp, Homo sapiens
cttatctctgcattt

SEQ ID NO: 1249849 - DNA, 15 bp, Homo sapiens
tcttatctctgcatt

SEQ ID NO: 1249850 - DNA, 15 bp, Homo sapiens
atcttatctctgcat

SEQ ID NO: 1249851 - DNA, 15 bp, Homo sapiens
aatcttatctctgca

SEQ ID NO: 1249852 - DNA, 15 bp, Homo sapiens
gaatcttatctctgc

SEQ ID NO: 1249853 - DNA, 15 bp, Homo sapiens
tgaatcttatctctg

SEQ ID NO: 1249854 - DNA, 15 bp, Homo sapiens
ttgaatcttatctct

SEQ ID NO: 1249855 - DNA, 15 bp, Homo sapiens
tttgaatcttatctc

SEQ ID NO: 1249856 - DNA, 15 bp, Homo sapiens
gtttgaatcttatct

SEQ ID NO: 1249857 - DNA, 15 bp, Homo sapiens
ggtttgaatcttatc

SEQ ID NO: 1249858 - DNA, 15 bp, Homo sapiens
aggtttgaatcttat

SEQ ID NO: 1249859 - DNA, 15 bp, Homo sapiens
caggtttgaatctta

SEQ ID NO: 1249860 - DNA, 15 bp, Homo sapiens
ccaggtttgaatctt

SEQ ID NO: 1249861 - DNA, 15 bp, Homo sapiens
cccaggtttgaatct

SEQ ID NO: 1249862 - DNA, 15 bp, Homo sapiens
gcccaggtttgaatc

SEQ ID NO: 1249863 - DNA, 15 bp, Homo sapiens
agcccaggtttgaat

SEQ ID NO: 1249864 - DNA, 15 bp, Homo sapiens
cagcccaggtttgaa

SEQ ID NO: 1249865 - DNA, 15 bp, Homo sapiens
acagcccaggtttga

SEQ ID NO: 1249866 - DNA, 15 bp, Homo sapiens
gacagcccaggtttg

SEQ ID NO: 1249867 - DNA, 15 bp, Homo sapiens
agacagcccaggttt

SEQ ID NO: 1249868 - DNA, 15 bp, Homo sapiens
cagacagcccaggtt

SEQ ID NO: 1249869 - DNA, 15 bp, Homo sapiens
ccagacagcccaggt

SEQ ID NO: 1249870 - DNA, 15 bp, Homo sapiens
gccagacagcccagg

SEQ ID NO: 1249871 - DNA, 15 bp, Homo sapiens
agccagacagcccag

SEQ ID NO: 1249872 - DNA, 15 bp, Homo sapiens
cagccagacagccca

SEQ ID NO: 1249873 - DNA, 15 bp, Homo sapiens
acagccagacagccc

SEQ ID NO: 1249874 - DNA, 15 bp, Homo sapiens
aacagccagacagcc

SEQ ID NO: 1249875 - DNA, 15 bp, Homo sapiens
aaacagccagacagc

SEQ ID NO: 1249876 - DNA, 15 bp, Homo sapiens
aaaacagccagacag

SEQ ID NO: 1249877 - DNA, 15 bp, Homo sapiens
taaaacagccagaca

SEQ ID NO: 1249878 - DNA, 15 bp, Homo sapiens
ttaaaacagccagac

SEQ ID NO: 1249879 - DNA, 15 bp, Homo sapiens
cttaaaacagccaga

SEQ ID NO: 1249880 - DNA, 15 bp, Homo sapiens
tcttaaaacagccag

SEQ ID NO: 1249881 - DNA, 15 bp, Homo sapiens
gtcttaaaacagcca

SEQ ID NO: 1249882 - DNA, 15 bp, Homo sapiens
agtcttaaaacagcc

SEQ ID NO: 1249883 - DNA, 15 bp, Homo sapiens
gagtcttaaaacagc

SEQ ID NO: 1249884 - DNA, 15 bp, Homo sapiens
agagtcttaaaacag

SEQ ID NO: 1249885 - DNA, 15 bp, Homo sapiens
aagagtcttaaaaca

SEQ ID NO: 1249886 - DNA, 15 bp, Homo sapiens
taagagtcttaaaac

SEQ ID NO: 1249887 - DNA, 15 bp, Homo sapiens
ttaagagtcttaaaa

SEQ ID NO: 1249888 - DNA, 15 bp, Homo sapiens
gttaagagtcttaaa

SEQ ID NO: 1249889 - DNA, 15 bp, Homo sapiens
ggttaagagtcttaa

SEQ ID NO: 1249890 - DNA, 15 bp, Homo sapiens
tggttaagagtctta

SEQ ID NO: 1249891 - DNA, 15 bp, Homo sapiens
atggttaagagtctt

SEQ ID NO: 1249892 - DNA, 15 bp, Homo sapiens
aatggttaagagtct

SEQ ID NO: 1249893 - DNA, 15 bp, Homo sapiens
caatggttaagagtc

SEQ ID NO: 1249894 - DNA, 15 bp, Homo sapiens
gcaatggttaagagt

SEQ ID NO: 1249895 - DNA, 15 bp, Homo sapiens
agcaatggttaagag

SEQ ID NO: 1249896 - DNA, 15 bp, Homo sapiens
cagcaatggttaaga

SEQ ID NO: 1249897 - DNA, 15 bp, Homo sapiens
ccagcaatggttaag

SEQ ID NO: 1249898 - DNA, 15 bp, Homo sapiens
tccagcaatggttaa

SEQ ID NO: 1249899 - DNA, 15 bp, Homo sapiens
gtccagcaatggtta

SEQ ID NO: 1249900 - DNA, 15 bp, Homo sapiens
agtccagcaatggtt

SEQ ID NO: 1249901 - DNA, 15 bp, Homo sapiens
cagtccagcaatggt

SEQ ID NO: 1249902 - DNA, 15 bp, Homo sapiens
tcagtccagcaatgg

SEQ ID NO: 1249903 - DNA, 15 bp, Homo sapiens
gtcagtccagcaatg

SEQ ID NO: 1249904 - DNA, 15 bp, Homo sapiens
agtcagtccagcaat

SEQ ID NO: 1249905 - DNA, 15 bp, Homo sapiens
tagtcagtccagcaa

SEQ ID NO: 1249906 - DNA, 15 bp, Homo sapiens
atagtcagtccagca

SEQ ID NO: 1249907 - DNA, 15 bp, Homo sapiens
aatagtcagtccagc

SEQ ID NO: 1249908 - DNA, 15 bp, Homo sapiens
gaatagtcagtccag

SEQ ID NO: 1249909 - DNA, 15 bp, Homo sapiens
tgaatagtcagtcca

SEQ ID NO: 1249910 - DNA, 15 bp, Homo sapiens
atgaatagtcagtcc

SEQ ID NO: 1249911 - DNA, 15 bp, Homo sapiens
catgaatagtcagtc

SEQ ID NO: 1249912 - DNA, 15 bp, Homo sapiens
tcatgaatagtcagt

SEQ ID NO: 1249913 - DNA, 15 bp, Homo sapiens
gtcatgaatagtcag

SEQ ID NO: 1249914 - DNA, 15 bp, Homo sapiens
tgtcatgaatagtca

SEQ ID NO: 1249915 - DNA, 15 bp, Homo sapiens
gtgtcatgaatagtc

SEQ ID NO: 1249916 - DNA, 15 bp, Homo sapiens
tgtgtcatgaatagt

SEQ ID NO: 1249917 - DNA, 15 bp, Homo sapiens
ttgtgtcatgaatag

SEQ ID NO: 1249918 - DNA, 15 bp, Homo sapiens
tttgtgtcatgaata

SEQ ID NO: 1249919 - DNA, 15 bp, Homo sapiens
atttgtgtcatgaat

SEQ ID NO: 1249920 - DNA, 15 bp, Homo sapiens
tatttgtgtcatgaa

SEQ ID NO: 1249921 - DNA, 15 bp, Homo sapiens
ctatttgtgtcatga

SEQ ID NO: 1249922 - DNA, 15 bp, Homo sapiens
cctatttgtgtcatg

SEQ ID NO: 1249923 - DNA, 15 bp, Homo sapiens
tcctatttgtgtcat

SEQ ID NO: 1249924 - DNA, 15 bp, Homo sapiens
ttcctatttgtgtca

SEQ ID NO: 1249925 - DNA, 15 bp, Homo sapiens
tttcctatttgtgtc

SEQ ID NO: 1249926 - DNA, 15 bp, Homo sapiens
gtttcctatttgtgt

SEQ ID NO: 1249927 - DNA, 15 bp, Homo sapiens
ggtttcctatttgtg

SEQ ID NO: 1249928 - DNA, 15 bp, Homo sapiens
tggtttcctatttgt

SEQ ID NO: 1249929 - DNA, 15 bp, Homo sapiens
ttggtttcctatttg

SEQ ID NO: 1249930 - DNA, 15 bp, Homo sapiens
gttggtttcctattt

SEQ ID NO: 1249931 - DNA, 15 bp, Homo sapiens
agttggtttcctatt

SEQ ID NO: 1249932 - DNA, 15 bp, Homo sapiens
gagttggtttcctat

SEQ ID NO: 1249933 - DNA, 15 bp, Homo sapiens
agagttggtttccta

SEQ ID NO: 1249934 - DNA, 15 bp, Homo sapiens
cagagttggtttcct

SEQ ID NO: 1249935 - DNA, 15 bp, Homo sapiens
ccagagttggtttcc

SEQ ID NO: 1249936 - DNA, 15 bp, Homo sapiens
tccagagttggtttc

SEQ ID NO: 1249937 - DNA, 15 bp, Homo sapiens
gtccagagttggttt

SEQ ID NO: 1249938 - DNA, 15 bp, Homo sapiens
agtccagagttggtt

SEQ ID NO: 1249939 - DNA, 15 bp, Homo sapiens
tagtccagagttggt

SEQ ID NO: 1249940 - DNA, 15 bp, Homo sapiens
ctagtccagagttgg

SEQ ID NO: 1249941 - DNA, 15 bp, Homo sapiens
cctagtccagagttg

SEQ ID NO: 1249942 - DNA, 15 bp, Homo sapiens
ccctagtccagagtt

SEQ ID NO: 1249943 - DNA, 15 bp, Homo sapiens
gccctagtccagagt

SEQ ID NO: 1249944 - DNA, 15 bp, Homo sapiens
ggccctagtccagag

SEQ ID NO: 1249945 - DNA, 15 bp, Homo sapiens
tggccctagtccaga

SEQ ID NO: 1249946 - DNA, 15 bp, Homo sapiens
ctggccctagtccag

SEQ ID NO: 1249947 - DNA, 15 bp, Homo sapiens
tctggccctagtcca

SEQ ID NO: 1249948 - DNA, 15 bp, Homo sapiens
atctggccctagtcc

SEQ ID NO: 1249949 - DNA, 15 bp, Homo sapiens
gatctggccctagtc

SEQ ID NO: 1249950 - DNA, 15 bp, Homo sapiens
ggatctggccctagt

SEQ ID NO: 1249951 - DNA, 15 bp, Homo sapiens
aggatctggccctag

SEQ ID NO: 1249952 - DNA, 15 bp, Homo sapiens
caggatctggcccta

SEQ ID NO: 1249953 - DNA, 15 bp, Homo sapiens
tcaggatctggccct

SEQ ID NO: 1249954 - DNA, 15 bp, Homo sapiens
ctcaggatctggccc

SEQ ID NO: 1249955 - DNA, 15 bp, Homo sapiens
actcaggatctggcc

SEQ ID NO: 1249956 - DNA, 15 bp, Homo sapiens
tactcaggatctggc

SEQ ID NO: 1249957 - DNA, 15 bp, Homo sapiens
atactcaggatctgg

SEQ ID NO: 1249958 - DNA, 15 bp, Homo sapiens
gatactcaggatctg

SEQ ID NO: 1249959 - DNA, 15 bp, Homo sapiens
ggatactcaggatct

SEQ ID NO: 1249960 - DNA, 15 bp, Homo sapiens
gggatactcaggatc

SEQ ID NO: 1249961 - DNA, 15 bp, Homo sapiens
tgggatactcaggat

SEQ ID NO: 1249962 - DNA, 15 bp, Homo sapiens
ctgggatactcagga

SEQ ID NO: 1249963 - DNA, 15 bp, Homo sapiens
tctgggatactcagg

SEQ ID NO: 1249964 - DNA, 15 bp, Homo sapiens
atctgggatactcag

SEQ ID NO: 1249965 - DNA, 15 bp, Homo sapiens
aatctgggatactca

SEQ ID NO: 1249966 - DNA, 15 bp, Homo sapiens
aaatctgggatactc

SEQ ID NO: 1249967 - DNA, 15 bp, Homo sapiens
gaaatctgggatact

SEQ ID NO: 1249968 - DNA, 15 bp, Homo sapiens
tgaaatctgggatac

SEQ ID NO: 1249969 - DNA, 15 bp, Homo sapiens
atgaaatctgggata

SEQ ID NO: 1249970 - DNA, 15 bp, Homo sapiens
aatgaaatctgggat

SEQ ID NO: 1249971 - DNA, 15 bp, Homo sapiens
caatgaaatctggga

SEQ ID NO: 1249972 - DNA, 15 bp, Homo sapiens
tcaatgaaatctggg

SEQ ID NO: 1249973 - DNA, 15 bp, Homo sapiens
ctcaatgaaatctgg

SEQ ID NO: 1249974 - DNA, 15 bp, Homo sapiens
gctcaatgaaatctg

SEQ ID NO: 1249975 - DNA, 15 bp, Homo sapiens
ggctcaatgaaatct

SEQ ID NO: 1249976 - DNA, 15 bp, Homo sapiens
tggctcaatgaaatc

SEQ ID NO: 1249977 - DNA, 15 bp, Homo sapiens
atggctcaatgaaat

SEQ ID NO: 1249978 - DNA, 15 bp, Homo sapiens
catggctcaatgaaa

SEQ ID NO: 1249979 - DNA, 15 bp, Homo sapiens
gcatggctcaatgaa

SEQ ID NO: 1249980 - DNA, 15 bp, Homo sapiens
ggcatggctcaatga

SEQ ID NO: 1249981 - DNA, 15 bp, Homo sapiens
tggcatggctcaatg

SEQ ID NO: 1249982 - DNA, 15 bp, Homo sapiens
ttggcatggctcaat

SEQ ID NO: 1249983 - DNA, 15 bp, Homo sapiens
cttggcatggctcaa

SEQ ID NO: 1249984 - DNA, 15 bp, Homo sapiens
ccttggcatggctca

SEQ ID NO: 1249985 - DNA, 15 bp, Homo sapiens
gccttggcatggctc

SEQ ID NO: 1249986 - DNA, 15 bp, Homo sapiens
tgccttggcatggct

SEQ ID NO: 1249987 - DNA, 15 bp, Homo sapiens
ttgccttggcatggc

SEQ ID NO: 1249988 - DNA, 15 bp, Homo sapiens
attgccttggcatgg

SEQ ID NO: 1249989 - DNA, 15 bp, Homo sapiens
aattgccttggcatg

SEQ ID NO: 1249990 - DNA, 15 bp, Homo sapiens
aaattgccttggcat

SEQ ID NO: 1249991 - DNA, 15 bp, Homo sapiens
gaaattgccttggca

SEQ ID NO: 1249992 - DNA, 15 bp, Homo sapiens
tgaaattgccttggc

SEQ ID NO: 1249993 - DNA, 15 bp, Homo sapiens
ttgaaattgccttgg

SEQ ID NO: 1249994 - DNA, 15 bp, Homo sapiens
cttgaaattgccttg

SEQ ID NO: 1249995 - DNA, 15 bp, Homo sapiens
acttgaaattgcctt

SEQ ID NO: 1249996 - DNA, 15 bp, Homo sapiens
gacttgaaattgcct

SEQ ID NO: 1249997 - DNA, 15 bp, Homo sapiens
tgacttgaaattgcc

SEQ ID NO: 1249998 - DNA, 15 bp, Homo sapiens
gtgacttgaaattgc

SEQ ID NO: 1249999 - DNA, 15 bp, Homo sapiens
ggtgacttgaaattg

SEQ ID NO: 1250000 - DNA, 15 bp, Homo sapiens
tggtgacttgaaatt

SEQ ID NO: 1250001 - DNA, 15 bp, Homo sapiens
ctggtgacttgaaat

SEQ ID NO: 1250002 - DNA, 15 bp, Homo sapiens
cctggtgacttgaaa

SEQ ID NO: 1250003 - DNA, 15 bp, Homo sapiens
ccctggtgacttgaa

SEQ ID NO: 1250004 - DNA, 15 bp, Homo sapiens
accctggtgacttga

SEQ ID NO: 1250005 - DNA, 15 bp, Homo sapiens
gaccctggtgacttg

SEQ ID NO: 1250006 - DNA, 15 bp, Homo sapiens
agaccctggtgactt

SEQ ID NO: 1250007 - DNA, 15 bp, Homo sapiens
aagaccctggtgact

SEQ ID NO: 1250008 - DNA, 15 bp, Homo sapiens
gaagaccctggtgac

SEQ ID NO: 1250009 - DNA, 15 bp, Homo sapiens
ggaagaccctggtga

SEQ ID NO: 1250010 - DNA, 15 bp, Homo sapiens
gggaagaccctggtg

SEQ ID NO: 1250011 - DNA, 15 bp, Homo sapiens
agggaagaccctggt

SEQ ID NO: 1250012 - DNA, 15 bp, Homo sapiens
gagggaagaccctgg

SEQ ID NO: 1250013 - DNA, 15 bp, Homo sapiens
agagggaagaccctg

SEQ ID NO: 1250014 - DNA, 15 bp, Homo sapiens
cagagggaagaccct

SEQ ID NO: 1250015 - DNA, 15 bp, Homo sapiens
ccagagggaagaccc

SEQ ID NO: 1250016 - DNA, 15 bp, Homo sapiens
cccagagggaagacc

SEQ ID NO: 1250017 - DNA, 15 bp, Homo sapiens
ccccagagggaagac

SEQ ID NO: 1250018 - DNA, 15 bp, Homo sapiens
accccagagggaaga

SEQ ID NO: 1250019 - DNA, 15 bp, Homo sapiens
gaccccagagggaag

SEQ ID NO: 1250020 - DNA, 15 bp, Homo sapiens
agaccccagagggaa

SEQ ID NO: 1250021 - DNA, 15 bp, Homo sapiens
tagaccccagaggga

SEQ ID NO: 1250022 - DNA, 15 bp, Homo sapiens
ctagaccccagaggg

SEQ ID NO: 1250023 - DNA, 15 bp, Homo sapiens
tctagaccccagagg

SEQ ID NO: 1250024 - DNA, 15 bp, Homo sapiens
ctctagaccccagag

SEQ ID NO: 1250025 - DNA, 15 bp, Homo sapiens
cctctagaccccaga

SEQ ID NO: 1250026 - DNA, 15 bp, Homo sapiens
tgcctctagacccca

SEQ ID NO: 1250027 - DNA, 15 bp, Homo sapiens
ctgcctctagacccc

SEQ ID NO: 1250028 - DNA, 15 bp, Homo sapiens
tctgcctctagaccc

SEQ ID NO: 1250029 - DNA, 15 bp, Homo sapiens
ctctgcctctagacc

SEQ ID NO: 1250030 - DNA, 15 bp, Homo sapiens
cctctgcctctagac

SEQ ID NO: 1250031 - DNA, 15 bp, Homo sapiens
tcctctgcctctaga

SEQ ID NO: 1250032 - DNA, 15 bp, Homo sapiens
atcctctgcctctag

SEQ ID NO: 1250033 - DNA, 15 bp, Homo sapiens
aatcctctgcctcta

SEQ ID NO: 1250034 - DNA, 15 bp, Homo sapiens
aaatcctctgcctct

SEQ ID NO: 1250035 - DNA, 15 bp, Homo sapiens
gaaatcctctgcctc

SEQ ID NO: 1250036 - DNA, 15 bp, Homo sapiens
tgaaatcctctgcct

SEQ ID NO: 1250037 - DNA, 15 bp, Homo sapiens
atgaaatcctctgcc

SEQ ID NO: 1250038 - DNA, 15 bp, Homo sapiens
tatgaaatcctctgc

SEQ ID NO: 1250039 - DNA, 15 bp, Homo sapiens
ctatgaaatcctctg

SEQ ID NO: 1250040 - DNA, 15 bp, Homo sapiens
actatgaaatcctct

SEQ ID NO: 1250041 - DNA, 15 bp, Homo sapiens
tactatgaaatcctc

SEQ ID NO: 1250042 - DNA, 15 bp, Homo sapiens
ttactatgaaatcct

SEQ ID NO: 1250043 - DNA, 15 bp, Homo sapiens
tttactatgaaatcc

SEQ ID NO: 1250044 - DNA, 15 bp, Homo sapiens
atttactatgaaatc

SEQ ID NO: 1250045 - DNA, 15 bp, Homo sapiens
tatttactatgaaat

SEQ ID NO: 1250046 - DNA, 15 bp, Homo sapiens
ctatttactatgaaa

SEQ ID NO: 1250047 - DNA, 15 bp, Homo sapiens
gctatttactatgaa

SEQ ID NO: 1250048 - DNA, 15 bp, Homo sapiens
tgctatttactatga

SEQ ID NO: 1250049 - DNA, 15 bp, Homo sapiens
atgctatttactatg

SEQ ID NO: 1250050 - DNA, 15 bp, Homo sapiens
catgctatttactat

SEQ ID NO: 1250051 - DNA, 15 bp, Homo sapiens
acatgctatttacta

SEQ ID NO: 1250052 - DNA, 15 bp, Homo sapiens
aacatgctatttact

SEQ ID NO: 1250053 - DNA, 15 bp, Homo sapiens
caacatgctatttac

SEQ ID NO: 1250054 - DNA, 15 bp, Homo sapiens
acaacatgctattta

SEQ ID NO: 1250055 - DNA, 15 bp, Homo sapiens
gacaacatgctattt

SEQ ID NO: 1250056 - DNA, 15 bp, Homo sapiens
agacaacatgctatt

SEQ ID NO: 1250057 - DNA, 15 bp, Homo sapiens
aagacaacatgctat

SEQ ID NO: 1250058 - DNA, 15 bp, Homo sapiens
aaagacaacatgcta

SEQ ID NO: 1250059 - DNA, 15 bp, Homo sapiens
taaagacaacatgct

SEQ ID NO: 1250060 - DNA, 15 bp, Homo sapiens
ttaaagacaacatgc

SEQ ID NO: 1250061 - DNA, 15 bp, Homo sapiens
gttaaagacaacatg

SEQ ID NO: 1250062 - DNA, 15 bp, Homo sapiens
tgttaaagacaacat

SEQ ID NO: 1250063 - DNA, 15 bp, Homo sapiens
atgttaaagacaaca

SEQ ID NO: 1250064 - DNA, 15 bp, Homo sapiens
gatgttaaagacaac

SEQ ID NO: 1250065 - DNA, 15 bp, Homo sapiens
tgatgttaaagacaa

SEQ ID NO: 1250066 - DNA, 15 bp, Homo sapiens
ttgatgttaaagaca

SEQ ID NO: 1250067 - DNA, 15 bp, Homo sapiens
tttgatgttaaagac

SEQ ID NO: 1250068 - DNA, 15 bp, Homo sapiens
ttttgatgttaaaga

SEQ ID NO: 1250069 - DNA, 15 bp, Homo sapiens
cttttgatgttaaag

SEQ ID NO: 1250070 - DNA, 15 bp, Homo sapiens
ccttttgatgttaaa

SEQ ID NO: 1250071 - DNA, 15 bp, Homo sapiens
tccttttgatgttaa

SEQ ID NO: 1250072 - DNA, 15 bp, Homo sapiens
gtccttttgatgtta

SEQ ID NO: 1250073 - DNA, 15 bp, Homo sapiens
tgtccttttgatgtt

SEQ ID NO: 1250074 - DNA, 15 bp, Homo sapiens
ttgtccttttgatgt

SEQ ID NO: 1250075 - DNA, 15 bp, Homo sapiens
cttgtccttttgatg

SEQ ID NO: 1250076 - DNA, 15 bp, Homo sapiens
tcttgtccttttgat

SEQ ID NO: 1250077 - DNA, 15 bp, Homo sapiens
ctcttgtccttttga

SEQ ID NO: 1250078 - DNA, 15 bp, Homo sapiens
cctcttgtccttttg

SEQ ID NO: 1250079 - DNA, 15 bp, Homo sapiens
acctcttgtcctttt

SEQ ID NO: 1250080 - DNA, 15 bp, Homo sapiens
tacctcttgtccttt

SEQ ID NO: 1250081 - DNA, 15 bp, Homo sapiens
ttacctcttgtcctt

SEQ ID NO: 1250082 - DNA, 15 bp, Homo sapiens
cttacctcttgtcct

SEQ ID NO: 1250083 - DNA, 15 bp, Homo sapiens
tcttacctcttgtcc

SEQ ID NO: 1250084 - DNA, 15 bp, Homo sapiens
ctcttacctcttgtc

SEQ ID NO: 1250085 - DNA, 15 bp, Homo sapiens
actcttacctcttgt

SEQ ID NO: 1250086 - DNA, 15 bp, Homo sapiens
aactcttacctcttg

SEQ ID NO: 1250087 - DNA, 15 bp, Homo sapiens
caactcttacctctt

SEQ ID NO: 1250088 - DNA, 15 bp, Homo sapiens
ccaactcttacctct

SEQ ID NO: 1250089 - DNA, 15 bp, Homo sapiens
gccaactcttacctc

SEQ ID NO: 1250090 - DNA, 15 bp, Homo sapiens
tgccaactcttacct

SEQ ID NO: 1250091 - DNA, 15 bp, Homo sapiens
ttgccaactcttacc

SEQ ID NO: 1250092 - DNA, 15 bp, Homo sapiens
cttgccaactcttac

SEQ ID NO: 1250093 - DNA, 15 bp, Homo sapiens
ccttgccaactctta

SEQ ID NO: 1250094 - DNA, 15 bp, Homo sapiens
tccttgccaactctt

SEQ ID NO: 1250095 - DNA, 15 bp, Homo sapiens
atccttgccaactct

SEQ ID NO: 1250096 - DNA, 15 bp, Homo sapiens
catccttgccaactc

SEQ ID NO: 1250097 - DNA, 15 bp, Homo sapiens
gcatccttgccaact

SEQ ID NO: 1250098 - DNA, 15 bp, Homo sapiens
cgcatccttgccaac

SEQ ID NO: 1250099 - DNA, 15 bp, Homo sapiens
ccgcatccttgccaa

SEQ ID NO: 1250100 - DNA, 15 bp, Homo sapiens
tccgcatccttgcca

SEQ ID NO: 1250101 - DNA, 15 bp, Homo sapiens
ctccgcatccttgcc

SEQ ID NO: 1250102 - DNA, 15 bp, Homo sapiens
tctccgcatccttgc

SEQ ID NO: 1250103 - DNA, 15 bp, Homo sapiens
ttctccgcatccttg

SEQ ID NO: 1250104 - DNA, 15 bp, Homo sapiens
cttctccgcatcctt

SEQ ID NO: 1250105 - DNA, 15 bp, Homo sapiens
tcttctccgcatcct

SEQ ID NO: 1250106 - DNA, 15 bp, Homo sapiens
ctcttctccgcatcc

SEQ ID NO: 1250107 - DNA, 15 bp, Homo sapiens
tctcttctccgcatc

SEQ ID NO: 1250108 - DNA, 15 bp, Homo sapiens
ctctcttctccgcat

SEQ ID NO: 1250109 - DNA, 15 bp, Homo sapiens
tctctcttctccgca

SEQ ID NO: 1250110 - DNA, 15 bp, Homo sapiens
ttctctcttctccgc

SEQ ID NO: 1250111 - DNA, 15 bp, Homo sapiens
gttctctcttctccg

SEQ ID NO: 1250112 - DNA, 15 bp, Homo sapiens
ggttctctcttctcc

SEQ ID NO: 1250113 - DNA, 15 bp, Homo sapiens
gggttctctcttctc

SEQ ID NO: 1250114 - DNA, 15 bp, Homo sapiens
agggttctctcttct

SEQ ID NO: 1250115 - DNA, 15 bp, Homo sapiens
aagggttctctcttc

SEQ ID NO: 1250116 - DNA, 15 bp, Homo sapiens
caagggttctctctt

SEQ ID NO: 1250117 - DNA, 15 bp, Homo sapiens
acaagggttctctct

SEQ ID NO: 1250118 - DNA, 15 bp, Homo sapiens
tacaagggttctctc

SEQ ID NO: 1250119 - DNA, 15 bp, Homo sapiens
gtacaagggttctct

SEQ ID NO: 1250120 - DNA, 15 bp, Homo sapiens
agtacaagggttctc

SEQ ID NO: 1250121 - DNA, 15 bp, Homo sapiens
gagtacaagggttct

SEQ ID NO: 1250122 - DNA, 15 bp, Homo sapiens
agagtacaagggttc

SEQ ID NO: 1250123 - DNA, 15 bp, Homo sapiens
cagagtacaagggtt

SEQ ID NO: 1250124 - DNA, 15 bp, Homo sapiens
gcagagtacaagggt

SEQ ID NO: 1250125 - DNA, 15 bp, Homo sapiens
agcagagtacaaggg

SEQ ID NO: 1250126 - DNA, 15 bp, Homo sapiens
cagcagagtacaagg

SEQ ID NO: 1250127 - DNA, 15 bp, Homo sapiens
ccagcagagtacaag

SEQ ID NO: 1250128 - DNA, 15 bp, Homo sapiens
accagcagagtacaa

SEQ ID NO: 1250129 - DNA, 15 bp, Homo sapiens
caccagcagagtaca

SEQ ID NO: 1250130 - DNA, 15 bp, Homo sapiens
ccaccagcagagtac

SEQ ID NO: 1250131 - DNA, 15 bp, Homo sapiens
cccaccagcagagta

SEQ ID NO: 1250132 - DNA, 15 bp, Homo sapiens
ccccaccagcagagt

SEQ ID NO: 1250133 - DNA, 15 bp, Homo sapiens
tccccaccagcagag

SEQ ID NO: 1250134 - DNA, 15 bp, Homo sapiens
atccccaccagcaga

SEQ ID NO: 1250135 - DNA, 15 bp, Homo sapiens
catccccaccagcag

SEQ ID NO: 1250136 - DNA, 15 bp, Homo sapiens
acatccccaccagca

SEQ ID NO: 1250137 - DNA, 15 bp, Homo sapiens
gacatccccaccagc

SEQ ID NO: 1250138 - DNA, 15 bp, Homo sapiens
tgacatccccaccag

SEQ ID NO: 1250139 - DNA, 15 bp, Homo sapiens
ctgacatccccacca

SEQ ID NO: 1250140 - DNA, 15 bp, Homo sapiens
actgacatccccacc

SEQ ID NO: 1250141 - DNA, 15 bp, Homo sapiens
aactgacatccccac

SEQ ID NO: 1250142 - DNA, 15 bp, Homo sapiens
caactgacatcccca

SEQ ID NO: 1250143 - DNA, 15 bp, Homo sapiens
ccaactgacatcccc

SEQ ID NO: 1250144 - DNA, 15 bp, Homo sapiens
gccaactgacatccc

SEQ ID NO: 1250145 - DNA, 15 bp, Homo sapiens
tgccaactgacatcc

SEQ ID NO: 1250146 - DNA, 15 bp, Homo sapiens
gtgccaactgacatc

SEQ ID NO: 1250147 - DNA, 15 bp, Homo sapiens
tgtgccaactgacat

SEQ ID NO: 1250148 - DNA, 15 bp, Homo sapiens
ctgtgccaactgaca

SEQ ID NO: 1250149 - DNA, 15 bp, Homo sapiens
gctgtgccaactgac

SEQ ID NO: 1250150 - DNA, 15 bp, Homo sapiens
ggctgtgccaactga

SEQ ID NO: 1250151 - DNA, 15 bp, Homo sapiens
tggctgtgccaactg

SEQ ID NO: 1250152 - DNA, 15 bp, Homo sapiens
atggctgtgccaact

SEQ ID NO: 1250153 - DNA, 15 bp, Homo sapiens
aatggctgtgccaac

SEQ ID NO: 1250154 - DNA, 15 bp, Homo sapiens
taatggctgtgccaa

SEQ ID NO: 1250155 - DNA, 15 bp, Homo sapiens
ataatggctgtgcca

SEQ ID NO: 1250156 - DNA, 15 bp, Homo sapiens
cataatggctgtgcc

SEQ ID NO: 1250157 - DNA, 15 bp, Homo sapiens
ccataatggctgtgc

SEQ ID NO: 1250158 - DNA, 15 bp, Homo sapiens
tccataatggctgtg

SEQ ID NO: 1250159 - DNA, 15 bp, Homo sapiens
ttccataatggctgt

SEQ ID NO: 1250160 - DNA, 15 bp, Homo sapiens
tttccataatggctg

SEQ ID NO: 1250161 - DNA, 15 bp, Homo sapiens
ttttccataatggct

SEQ ID NO: 1250162 - DNA, 15 bp, Homo sapiens
gttttccataatggc

SEQ ID NO: 1250163 - DNA, 15 bp, Homo sapiens
tgttttccataatgg

SEQ ID NO: 1250164 - DNA, 15 bp, Homo sapiens
ctgttttccataatg

SEQ ID NO: 1250165 - DNA, 15 bp, Homo sapiens
gctgttttccataat

SEQ ID NO: 1250166 - DNA, 15 bp, Homo sapiens
tgctgttttccataa

SEQ ID NO: 1250167 - DNA, 15 bp, Homo sapiens
atgctgttttccata

SEQ ID NO: 1250168 - DNA, 15 bp, Homo sapiens
catgctgttttccat

SEQ ID NO: 1250169 - DNA, 15 bp, Homo sapiens
tcatgctgttttcca

SEQ ID NO: 1250170 - DNA, 15 bp, Homo sapiens
ttcatgctgttttcc

SEQ ID NO: 1250171 - DNA, 15 bp, Homo sapiens
tttcatgctgttttc

SEQ ID NO: 1250172 - DNA, 15 bp, Homo sapiens
ctttcatgctgtttt

SEQ ID NO: 1250173 - DNA, 15 bp, Homo sapiens
actttcatgctgttt

SEQ ID NO: 1250174 - DNA, 15 bp, Homo sapiens
aactttcatgctgtt

SEQ ID NO: 1250175 - DNA, 15 bp, Homo sapiens
aaactttcatgctgt

SEQ ID NO: 1250176 - DNA, 15 bp, Homo sapiens
gaaactttcatgctg

SEQ ID NO: 1250177 - DNA, 15 bp, Homo sapiens
agaaactttcatgct

SEQ ID NO: 1250178 - DNA, 15 bp, Homo sapiens
tgagaaactttcatg

SEQ ID NO: 1250179 - DNA, 15 bp, Homo sapiens
ttgagaaactttcat

SEQ ID NO: 1250180 - DNA, 15 bp, Homo sapiens
tttgagaaactttca

SEQ ID NO: 1250181 - DNA, 15 bp, Homo sapiens
gtttgagaaactttc

SEQ ID NO: 1250182 - DNA, 15 bp, Homo sapiens
tgtttgagaaacttt

SEQ ID NO: 1250183 - DNA, 15 bp, Homo sapiens
ttgtttgagaaactt

SEQ ID NO: 1250184 - DNA, 15 bp, Homo sapiens
attgtttgagaaact

SEQ ID NO: 1250185 - DNA, 15 bp, Homo sapiens
aattgtttgagaaac

SEQ ID NO: 1250186 - DNA, 15 bp, Homo sapiens
taattgtttgagaaa

SEQ ID NO: 1250187 - DNA, 15 bp, Homo sapiens
ttaattgtttgagaa

SEQ ID NO: 1250188 - DNA, 15 bp, Homo sapiens
tttaattgtttgaga

SEQ ID NO: 1250189 - DNA, 15 bp, Homo sapiens
ttttaattgtttgag

SEQ ID NO: 1250190 - DNA, 15 bp, Homo sapiens
attttaattgtttga

SEQ ID NO: 1250191 - DNA, 15 bp, Homo sapiens
tattttaattgtttg

SEQ ID NO: 1250192 - DNA, 15 bp, Homo sapiens
atattttaattgttt

SEQ ID NO: 1250193 - DNA, 15 bp, Homo sapiens
tatattttaattgtt

SEQ ID NO: 1250194 - DNA, 15 bp, Homo sapiens
ctatattttaattgt

SEQ ID NO: 1250195 - DNA, 15 bp, Homo sapiens
gctatattttaattg

SEQ ID NO: 1250196 - DNA, 15 bp, Homo sapiens
agctatattttaatt

SEQ ID NO: 1250197 - DNA, 15 bp, Homo sapiens
tagctatattttaat

SEQ ID NO: 1250198 - DNA, 15 bp, Homo sapiens
gtagctatattttaa

SEQ ID NO: 1250199 - DNA, 15 bp, Homo sapiens
ggtagctatatttta

SEQ ID NO: 1250200 - DNA, 15 bp, Homo sapiens
tggtagctatatttt

SEQ ID NO: 1250201 - DNA, 15 bp, Homo sapiens
atggtagctatattt

SEQ ID NO: 1250202 - DNA, 15 bp, Homo sapiens
tatggtagctatatt

SEQ ID NO: 1250203 - DNA, 15 bp, Homo sapiens
gtatggtagctatat

SEQ ID NO: 1250204 - DNA, 15 bp, Homo sapiens
agtatggtagctata

SEQ ID NO: 1250205 - DNA, 15 bp, Homo sapiens
aagtatggtagctat

SEQ ID NO: 1250206 - DNA, 15 bp, Homo sapiens
aaagtatggtagcta

SEQ ID NO: 1250207 - DNA, 15 bp, Homo sapiens
gaaagtatggtagct

SEQ ID NO: 1250208 - DNA, 15 bp, Homo sapiens
ggaaagtatggtagc

SEQ ID NO: 1250209 - DNA, 15 bp, Homo sapiens
tggaaagtatggtag

SEQ ID NO: 1250210 - DNA, 15 bp, Homo sapiens
ctggaaagtatggta

SEQ ID NO: 1250211 - DNA, 15 bp, Homo sapiens
tctggaaagtatggt

SEQ ID NO: 1250212 - DNA, 15 bp, Homo sapiens
ttctggaaagtatgg

SEQ ID NO: 1250213 - DNA, 15 bp, Homo sapiens
tttctggaaagtatg

SEQ ID NO: 1250214 - DNA, 15 bp, Homo sapiens
atttctggaaagtat

SEQ ID NO: 1250215 - DNA, 15 bp, Homo sapiens
gatttctggaaagta

SEQ ID NO: 1250216 - DNA, 15 bp, Homo sapiens
agatttctggaaagt

SEQ ID NO: 1250217 - DNA, 15 bp, Homo sapiens
gagatttctggaaag

SEQ ID NO: 1250218 - DNA, 15 bp, Homo sapiens
tgagatttctggaaa

SEQ ID NO: 1250219 - DNA, 15 bp, Homo sapiens
atgagatttctggaa

SEQ ID NO: 1250220 - DNA, 15 bp, Homo sapiens
catgagatttctgga

SEQ ID NO: 1250221 - DNA, 15 bp, Homo sapiens
acatgagatttctgg

SEQ ID NO: 1250222 - DNA, 15 bp, Homo sapiens
gacatgagatttctg

SEQ ID NO: 1250223 - DNA, 15 bp, Homo sapiens
agacatgagatttct

SEQ ID NO: 1250224 - DNA, 15 bp, Homo sapiens
cagacatgagatttc

SEQ ID NO: 1250225 - DNA, 15 bp, Homo sapiens
tcagacatgagattt

SEQ ID NO: 1250226 - DNA, 15 bp, Homo sapiens
ctcagacatgagatt

SEQ ID NO: 1250227 - DNA, 15 bp, Homo sapiens
actcagacatgagat

SEQ ID NO: 1250228 - DNA, 15 bp, Homo sapiens
tactcagacatgaga

SEQ ID NO: 1250229 - DNA, 15 bp, Homo sapiens
atactcagacatgag

SEQ ID NO: 1250230 - DNA, 15 bp, Homo sapiens
tatactcagacatga

SEQ ID NO: 1250231 - DNA, 15 bp, Homo sapiens
atatactcagacatg

SEQ ID NO: 1250232 - DNA, 15 bp, Homo sapiens
tatatactcagacat

SEQ ID NO: 1250233 - DNA, 15 bp, Homo sapiens
gtatatactcagaca

SEQ ID NO: 1250234 - DNA, 15 bp, Homo sapiens
agtatatactcagac

SEQ ID NO: 1250235 - DNA, 15 bp, Homo sapiens
gagtatatactcaga

SEQ ID NO: 1250236 - DNA, 15 bp, Homo sapiens
tgagtatatactcag

SEQ ID NO: 1250237 - DNA, 15 bp, Homo sapiens
ttgagtatatactca

SEQ ID NO: 1250238 - DNA, 15 bp, Homo sapiens
tttgagtatatactc

SEQ ID NO: 1250239 - DNA, 15 bp, Homo sapiens
ctttgagtatatact

SEQ ID NO: 1250240 - DNA, 15 bp, Homo sapiens
cctttgagtatatac

SEQ ID NO: 1250241 - DNA, 15 bp, Homo sapiens
tcctttgagtatata

SEQ ID NO: 1250242 - DNA, 15 bp, Homo sapiens
ttcctttgagtatat

SEQ ID NO: 1250243 - DNA, 15 bp, Homo sapiens
tttcctttgagtata

SEQ ID NO: 1250244 - DNA, 15 bp, Homo sapiens
atttcctttgagtat

SEQ ID NO: 1250245 - DNA, 15 bp, Homo sapiens
catttcctttgagta

SEQ ID NO: 1250246 - DNA, 15 bp, Homo sapiens
tcatttcctttgagt

SEQ ID NO: 1250247 - DNA, 15 bp, Homo sapiens
ttcatttcctttgag

SEQ ID NO: 1250248 - DNA, 15 bp, Homo sapiens
tttcatttcctttga

SEQ ID NO: 1250249 - DNA, 15 bp, Homo sapiens
atttcatttcctttg

SEQ ID NO: 1250250 - DNA, 15 bp, Homo sapiens
gatttcatttccttt

SEQ ID NO: 1250251 - DNA, 15 bp, Homo sapiens
tgatttcatttcctt

SEQ ID NO: 1250252 - DNA, 15 bp, Homo sapiens
ctgatttcatttcct

SEQ ID NO: 1250253 - DNA, 15 bp, Homo sapiens
actgatttcatttcc

SEQ ID NO: 1250254 - DNA, 15 bp, Homo sapiens
tactgatttcatttc

SEQ ID NO: 1250255 - DNA, 15 bp, Homo sapiens
atactgatttcattt

SEQ ID NO: 1250256 - DNA, 15 bp, Homo sapiens
catactgatttcatt

SEQ ID NO: 1250257 - DNA, 15 bp, Homo sapiens
acatactgatttcat

SEQ ID NO: 1250258 - DNA, 15 bp, Homo sapiens
gacatactgatttca

SEQ ID NO: 1250259 - DNA, 15 bp, Homo sapiens
tgacatactgatttc

SEQ ID NO: 1250260 - DNA, 15 bp, Homo sapiens
ttgacatactgattt

SEQ ID NO: 1250261 - DNA, 15 bp, Homo sapiens
tttgacatactgatt

SEQ ID NO: 1250262 - DNA, 15 bp, Homo sapiens
ctttgacatactgat

SEQ ID NO: 1250263 - DNA, 15 bp, Homo sapiens
tctttgacatactga

SEQ ID NO: 1250264 - DNA, 15 bp, Homo sapiens
ctctttgacatactg

SEQ ID NO: 1250265 - DNA, 15 bp, Homo sapiens
tctctttgacatact

SEQ ID NO: 1250266 - DNA, 15 bp, Homo sapiens
atctctttgacatac

SEQ ID NO: 1250267 - DNA, 15 bp, Homo sapiens
tatctctttgacata

SEQ ID NO: 1250268 - DNA, 15 bp, Homo sapiens
atatctctttgacat

SEQ ID NO: 1250269 - DNA, 15 bp, Homo sapiens
gatatctctttgaca

SEQ ID NO: 1250270 - DNA, 15 bp, Homo sapiens
agatatctctttgac

SEQ ID NO: 1250271 - DNA, 15 bp, Homo sapiens
gtgcagatatctctt

SEQ ID NO: 1250272 - DNA, 15 bp, Homo sapiens
ggtgcagatatctct

SEQ ID NO: 1250273 - DNA, 15 bp, Homo sapiens
gggtgcagatatctc

SEQ ID NO: 1250274 - DNA, 15 bp, Homo sapiens
ggggtgcagatatct

SEQ ID NO: 1250275 - DNA, 15 bp, Homo sapiens
gggggtgcagatatc

SEQ ID NO: 1250276 - DNA, 15 bp, Homo sapiens
agggggtgcagatat

SEQ ID NO: 1250277 - DNA, 15 bp, Homo sapiens
cagggggtgcagata

SEQ ID NO: 1250278 - DNA, 15 bp, Homo sapiens
acagggggtgcagat

SEQ ID NO: 1250279 - DNA, 15 bp, Homo sapiens
aacagggggtgcaga

SEQ ID NO: 1250280 - DNA, 15 bp, Homo sapiens
gaacagggggtgcag

SEQ ID NO: 1250281 - DNA, 15 bp, Homo sapiens
tgaacagggggtgca

SEQ ID NO: 1250282 - DNA, 15 bp, Homo sapiens
atgaacagggggtgc

SEQ ID NO: 1250283 - DNA, 15 bp, Homo sapiens
aatgaacagggggtg

SEQ ID NO: 1250284 - DNA, 15 bp, Homo sapiens
caatgaacagggggt

SEQ ID NO: 1250285 - DNA, 15 bp, Homo sapiens
gcaatgaacaggggg

SEQ ID NO: 1250286 - DNA, 15 bp, Homo sapiens
tgcaatgaacagggg

SEQ ID NO: 1250287 - DNA, 15 bp, Homo sapiens
ctgcaatgaacaggg

SEQ ID NO: 1250288 - DNA, 15 bp, Homo sapiens
actgcaatgaacagg

SEQ ID NO: 1250289 - DNA, 15 bp, Homo sapiens
tactgcaatgaacag

SEQ ID NO: 1250290 - DNA, 15 bp, Homo sapiens
atactgcaatgaaca

SEQ ID NO: 1250291 - DNA, 15 bp, Homo sapiens
aatactgcaatgaac

SEQ ID NO: 1250292 - DNA, 15 bp, Homo sapiens
taatactgcaatgaa

SEQ ID NO: 1250293 - DNA, 15 bp, Homo sapiens
ataatactgcaatga

SEQ ID NO: 1250294 - DNA, 15 bp, Homo sapiens
aataatactgcaatg

SEQ ID NO: 1250295 - DNA, 15 bp, Homo sapiens
gaataatactgcaat

SEQ ID NO: 1250296 - DNA, 15 bp, Homo sapiens
tgaataatactgcaa

SEQ ID NO: 1250297 - DNA, 15 bp, Homo sapiens
gtgaataatactgca

SEQ ID NO: 1250298 - DNA, 15 bp, Homo sapiens
tgtgaataatactgc

SEQ ID NO: 1250299 - DNA, 15 bp, Homo sapiens
ttgtgaataatactg

SEQ ID NO: 1250300 - DNA, 15 bp, Homo sapiens
gttgtgaataatact

SEQ ID NO: 1250301 - DNA, 15 bp, Homo sapiens
tgttgtgaataatac

SEQ ID NO: 1250302 - DNA, 15 bp, Homo sapiens
ctgttgtgaataata

SEQ ID NO: 1250303 - DNA, 15 bp, Homo sapiens
gctgttgtgaataat

SEQ ID NO: 1250304 - DNA, 15 bp, Homo sapiens
ggctgttgtgaataa

SEQ ID NO: 1250305 - DNA, 15 bp, Homo sapiens
tggctgttgtgaata

SEQ ID NO: 1250306 - DNA, 15 bp, Homo sapiens
ttggctgttgtgaat

SEQ ID NO: 1250307 - DNA, 15 bp, Homo sapiens
cttggctgttgtgaa

SEQ ID NO: 1250308 - DNA, 15 bp, Homo sapiens
ccttggctgttgtga

SEQ ID NO: 1250309 - DNA, 15 bp, Homo sapiens
cccttggctgttgtg

SEQ ID NO: 1250310 - DNA, 15 bp, Homo sapiens
tcccttggctgttgt

SEQ ID NO: 1250311 - DNA, 15 bp, Homo sapiens
ttcccttggctgttg

SEQ ID NO: 1250312 - DNA, 15 bp, Homo sapiens
tttcccttggctgtt

SEQ ID NO: 1250313 - DNA, 15 bp, Homo sapiens
gtttcccttggctgt

SEQ ID NO: 1250314 - DNA, 15 bp, Homo sapiens
tgtttcccttggctg

SEQ ID NO: 1250315 - DNA, 15 bp, Homo sapiens
ttgtttcccttggct

SEQ ID NO: 1250316 - DNA, 15 bp, Homo sapiens
gttgtttcccttggc

SEQ ID NO: 1250317 - DNA, 15 bp, Homo sapiens
ggttgtttcccttgg

SEQ ID NO: 1250318 - DNA, 15 bp, Homo sapiens
aggttgtttcccttg

SEQ ID NO: 1250319 - DNA, 15 bp, Homo sapiens
taggttgtttccctt

SEQ ID NO: 1250320 - DNA, 15 bp, Homo sapiens
gtaggttgtttccct

SEQ ID NO: 1250321 - DNA, 15 bp, Homo sapiens
tgtaggttgtttccc

SEQ ID NO: 1250322 - DNA, 15 bp, Homo sapiens
atgtaggttgtttcc

SEQ ID NO: 1250323 - DNA, 15 bp, Homo sapiens
tatgtaggttgtttc

SEQ ID NO: 1250324 - DNA, 15 bp, Homo sapiens
atatgtaggttgttt

SEQ ID NO: 1250325 - DNA, 15 bp, Homo sapiens
gatatgtaggttgtt

SEQ ID NO: 1250326 - DNA, 15 bp, Homo sapiens
agatatgtaggttgt

SEQ ID NO: 1250327 - DNA, 15 bp, Homo sapiens
tagatatgtaggttg

SEQ ID NO: 1250328 - DNA, 15 bp, Homo sapiens
atagatatgtaggtt

SEQ ID NO: 1250329 - DNA, 15 bp, Homo sapiens
gatagatatgtaggt

SEQ ID NO: 1250330 - DNA, 15 bp, Homo sapiens
tgatagatatgtagg

SEQ ID NO: 1250331 - DNA, 15 bp, Homo sapiens
ttgatagatatgtag

SEQ ID NO: 1250332 - DNA, 15 bp, Homo sapiens
gttgatagatatgta

SEQ ID NO: 1250333 - DNA, 15 bp, Homo sapiens
tgttgatagatatgt

SEQ ID NO: 1250334 - DNA, 15 bp, Homo sapiens
ctgttgatagatatg

SEQ ID NO: 1250335 - DNA, 15 bp, Homo sapiens
cctgttgatagatat

SEQ ID NO: 1250336 - DNA, 15 bp, Homo sapiens
acctgttgatagata

SEQ ID NO: 1250337 - DNA, 15 bp, Homo sapiens
cacctgttgatagat

SEQ ID NO: 1250338 - DNA, 15 bp, Homo sapiens
ccacctgttgataga

SEQ ID NO: 1250339 - DNA, 15 bp, Homo sapiens
tccacctgttgatag

SEQ ID NO: 1250340 - DNA, 15 bp, Homo sapiens
atccacctgttgata

SEQ ID NO: 1250341 - DNA, 15 bp, Homo sapiens
catccacctgttgat

SEQ ID NO: 1250342 - DNA, 15 bp, Homo sapiens
tcatccacctgttga

SEQ ID NO: 1250343 - DNA, 15 bp, Homo sapiens
ttcatccacctgttg

SEQ ID NO: 1250344 - DNA, 15 bp, Homo sapiens
attcatccacctgtt

SEQ ID NO: 1250345 - DNA, 15 bp, Homo sapiens
cattcatccacctgt

SEQ ID NO: 1250346 - DNA, 15 bp, Homo sapiens
tcattcatccacctg

SEQ ID NO: 1250347 - DNA, 15 bp, Homo sapiens
ttcattcatccacct

SEQ ID NO: 1250348 - DNA, 15 bp, Homo sapiens
cttcattcatccacc

SEQ ID NO: 1250349 - DNA, 15 bp, Homo sapiens
tcttcattcatccac

SEQ ID NO: 1250350 - DNA, 15 bp, Homo sapiens
ttcttcattcatcca

SEQ ID NO: 1250351 - DNA, 15 bp, Homo sapiens
tttcttcattcatcc

SEQ ID NO: 1250352 - DNA, 15 bp, Homo sapiens
ttttcttcattcatc

SEQ ID NO: 1250353 - DNA, 15 bp, Homo sapiens
attttcttcattcat

SEQ ID NO: 1250354 - DNA, 15 bp, Homo sapiens
cattttcttcattca

SEQ ID NO: 1250355 - DNA, 15 bp, Homo sapiens
gcattttcttcattc

SEQ ID NO: 1250356 - DNA, 15 bp, Homo sapiens
cgcattttcttcatt

SEQ ID NO: 1250357 - DNA, 15 bp, Homo sapiens
tcgcattttcttcat

SEQ ID NO: 1250358 - DNA, 15 bp, Homo sapiens
atcgcattttcttca

SEQ ID NO: 1250359 - DNA, 15 bp, Homo sapiens
tatcgcattttcttc

SEQ ID NO: 1250360 - DNA, 15 bp, Homo sapiens
gtatcgcattttctt

SEQ ID NO: 1250361 - DNA, 15 bp, Homo sapiens
ggtatcgcattttct

SEQ ID NO: 1250362 - DNA, 15 bp, Homo sapiens
gggtatcgcattttc

SEQ ID NO: 1250363 - DNA, 15 bp, Homo sapiens
agggtatcgcatttt

SEQ ID NO: 1250364 - DNA, 15 bp, Homo sapiens
gagggtatcgcattt

SEQ ID NO: 1250365 - DNA, 15 bp, Homo sapiens
ggagggtatcgcatt

SEQ ID NO: 1250366 - DNA, 15 bp, Homo sapiens
aggagggtatcgcat

SEQ ID NO: 1250367 - DNA, 15 bp, Homo sapiens
caggagggtatcgca

SEQ ID NO: 1250368 - DNA, 15 bp, Homo sapiens
tcaggagggtatcgc

SEQ ID NO: 1250369 - DNA, 15 bp, Homo sapiens
gtcaggagggtatcg

SEQ ID NO: 1250370 - DNA, 15 bp, Homo sapiens
tgtcaggagggtatc

SEQ ID NO: 1250371 - DNA, 15 bp, Homo sapiens
gtgtcaggagggtat

SEQ ID NO: 1250372 - DNA, 15 bp, Homo sapiens
tgtgtcaggagggta

SEQ ID NO: 1250373 - DNA, 15 bp, Homo sapiens
gtgtgtcaggagggt

SEQ ID NO: 1250374 - DNA, 15 bp, Homo sapiens
tgtgtgtcaggaggg

SEQ ID NO: 1250375 - DNA, 15 bp, Homo sapiens
gtgtgtgtcaggagg

SEQ ID NO: 1250376 - DNA, 15 bp, Homo sapiens
tgtgtgtgtcaggag

SEQ ID NO: 1250377 - DNA, 15 bp, Homo sapiens
gtgtgtgtgtcagga

SEQ ID NO: 1250378 - DNA, 15 bp, Homo sapiens
tgtgtgtgtgtcagg

SEQ ID NO: 1250379 - DNA, 15 bp, Homo sapiens
ttgtgtgtgtgtcag

SEQ ID NO: 1250380 - DNA, 15 bp, Homo sapiens
attgtgtgtgtgtca

SEQ ID NO: 1250381 - DNA, 15 bp, Homo sapiens
cattgtgtgtgtgtc

SEQ ID NO: 1250382 - DNA, 15 bp, Homo sapiens
ccattgtgtgtgtgt

SEQ ID NO: 1250383 - DNA, 15 bp, Homo sapiens
tccattgtgtgtgtg

SEQ ID NO: 1250384 - DNA, 15 bp, Homo sapiens
ttccattgtgtgtgt

SEQ ID NO: 1250385 - DNA, 15 bp, Homo sapiens
attccattgtgtgtg

SEQ ID NO: 1250386 - DNA, 15 bp, Homo sapiens
tattccattgtgtgt

SEQ ID NO: 1250387 - DNA, 15 bp, Homo sapiens
atattccattgtgtg

SEQ ID NO: 1250388 - DNA, 15 bp, Homo sapiens
aatattccattgtgt

SEQ ID NO: 1250389 - DNA, 15 bp, Homo sapiens
taatattccattgtg

SEQ ID NO: 1250390 - DNA, 15 bp, Homo sapiens
ataatattccattgt

SEQ ID NO: 1250391 - DNA, 15 bp, Homo sapiens
aataatattccattg

SEQ ID NO: 1250392 - DNA, 15 bp, Homo sapiens
gaataatattccatt

SEQ ID NO: 1250393 - DNA, 15 bp, Homo sapiens
tgaataatattccat

SEQ ID NO: 1250394 - DNA, 15 bp, Homo sapiens
ctgaataatattcca

SEQ ID NO: 1250395 - DNA, 15 bp, Homo sapiens
gctgaataatattcc

SEQ ID NO: 1250396 - DNA, 15 bp, Homo sapiens
ggctgaataatattc

SEQ ID NO: 1250397 - DNA, 15 bp, Homo sapiens
tggctgaataatatt

SEQ ID NO: 1250398 - DNA, 15 bp, Homo sapiens
atggctgaataatat

SEQ ID NO: 1250399 - DNA, 15 bp, Homo sapiens
catggctgaataata

SEQ ID NO: 1250400 - DNA, 15 bp, Homo sapiens
tcatggctgaataat

SEQ ID NO: 1250401 - DNA, 15 bp, Homo sapiens
ttcatggctgaataa

SEQ ID NO: 1250402 - DNA, 15 bp, Homo sapiens
tttcatggctgaata

SEQ ID NO: 1250403 - DNA, 15 bp, Homo sapiens
ttttcatggctgaat

SEQ ID NO: 1250404 - DNA, 15 bp, Homo sapiens
tttttcatggctgaa

SEQ ID NO: 1250405 - DNA, 15 bp, Homo sapiens
ttttttcatggctga

SEQ ID NO: 1250406 - DNA, 15 bp, Homo sapiens
cttttttcatggctg

SEQ ID NO: 1250407 - DNA, 15 bp, Homo sapiens
tcttttttcatggct

SEQ ID NO: 1250408 - DNA, 15 bp, Homo sapiens
ttcttttttcatggc

SEQ ID NO: 1250409 - DNA, 15 bp, Homo sapiens
tttcttttttcatgg

SEQ ID NO: 1250410 - DNA, 15 bp, Homo sapiens
atttcttttttcatg

SEQ ID NO: 1250411 - DNA, 15 bp, Homo sapiens
tatttcttttttcat

SEQ ID NO: 1250412 - DNA, 15 bp, Homo sapiens
atatttcttttttca

SEQ ID NO: 1250413 - DNA, 15 bp, Homo sapiens
aatatttcttttttc

SEQ ID NO: 1250414 - DNA, 15 bp, Homo sapiens
caatatttctttttt

SEQ ID NO: 1250415 - DNA, 15 bp, Homo sapiens
acaatatttcttttt

SEQ ID NO: 1250416 - DNA, 15 bp, Homo sapiens
gacaatatttctttt

SEQ ID NO: 1250417 - DNA, 15 bp, Homo sapiens
tgacaatatttcttt

SEQ ID NO: 1250418 - DNA, 15 bp, Homo sapiens
atgacaatatttctt

SEQ ID NO: 1250419 - DNA, 15 bp, Homo sapiens
aatgacaatatttct

SEQ ID NO: 1250420 - DNA, 15 bp, Homo sapiens
aaatgacaatatttc

SEQ ID NO: 1250421 - DNA, 15 bp, Homo sapiens
caaatgacaatattt

SEQ ID NO: 1250422 - DNA, 15 bp, Homo sapiens
ccaaatgacaatatt

SEQ ID NO: 1250423 - DNA, 15 bp, Homo sapiens
cccaaatgacaatat

SEQ ID NO: 1250424 - DNA, 15 bp, Homo sapiens
tcccaaatgacaata

SEQ ID NO: 1250425 - DNA, 15 bp, Homo sapiens
ctcccaaatgacaat

SEQ ID NO: 1250426 - DNA, 15 bp, Homo sapiens
tctcccaaatgacaa

SEQ ID NO: 1250427 - DNA, 15 bp, Homo sapiens
ttctcccaaatgaca

SEQ ID NO: 1250428 - DNA, 15 bp, Homo sapiens
gttctcccaaatgac

SEQ ID NO: 1250429 - DNA, 15 bp, Homo sapiens
tgttctcccaaatga

SEQ ID NO: 1250430 - DNA, 15 bp, Homo sapiens
atgttctcccaaatg

SEQ ID NO: 1250431 - DNA, 15 bp, Homo sapiens
catgttctcccaaat

SEQ ID NO: 1250432 - DNA, 15 bp, Homo sapiens
ccatgttctcccaaa

SEQ ID NO: 1250433 - DNA, 15 bp, Homo sapiens
cccatgttctcccaa

SEQ ID NO: 1250434 - DNA, 15 bp, Homo sapiens
acccatgttctccca

SEQ ID NO: 1250435 - DNA, 15 bp, Homo sapiens
cacccatgttctccc

SEQ ID NO: 1250436 - DNA, 15 bp, Homo sapiens
tcacccatgttctcc

SEQ ID NO: 1250437 - DNA, 15 bp, Homo sapiens
ttcacccatgttctc

SEQ ID NO: 1250438 - DNA, 15 bp, Homo sapiens
gttcacccatgttct

SEQ ID NO: 1250439 - DNA, 15 bp, Homo sapiens
ggttcacccatgttc

SEQ ID NO: 1250440 - DNA, 15 bp, Homo sapiens
gggttcacccatgtt

SEQ ID NO: 1250441 - DNA, 15 bp, Homo sapiens
agggttcacccatgt

SEQ ID NO: 1250442 - DNA, 15 bp, Homo sapiens
tagggttcacccatg

SEQ ID NO: 1250443 - DNA, 15 bp, Homo sapiens
ttagggttcacccat

SEQ ID NO: 1250444 - DNA, 15 bp, Homo sapiens
cttagggttcaccca

SEQ ID NO: 1250445 - DNA, 15 bp, Homo sapiens
tcttagggttcaccc

SEQ ID NO: 1250446 - DNA, 15 bp, Homo sapiens
ctcttagggttcacc

SEQ ID NO: 1250447 - DNA, 15 bp, Homo sapiens
gctcttagggttcac

SEQ ID NO: 1250448 - DNA, 15 bp, Homo sapiens
tgctcttagggttca

SEQ ID NO: 1250449 - DNA, 15 bp, Homo sapiens
atgctcttagggttc

SEQ ID NO: 1250450 - DNA, 15 bp, Homo sapiens
aatgctcttagggtt

SEQ ID NO: 1250451 - DNA, 15 bp, Homo sapiens
taatgctcttagggt

SEQ ID NO: 1250452 - DNA, 15 bp, Homo sapiens
ataatgctcttaggg

SEQ ID NO: 1250453 - DNA, 15 bp, Homo sapiens
cataatgctcttagg

SEQ ID NO: 1250454 - DNA, 15 bp, Homo sapiens
gcataatgctcttag

SEQ ID NO: 1250455 - DNA, 15 bp, Homo sapiens
ggcataatgctctta

SEQ ID NO: 1250456 - DNA, 15 bp, Homo sapiens
tggcataatgctctt

SEQ ID NO: 1250457 - DNA, 15 bp, Homo sapiens
ttggcataatgctct

SEQ ID NO: 1250458 - DNA, 15 bp, Homo sapiens
cttggcataatgctc

SEQ ID NO: 1250459 - DNA, 15 bp, Homo sapiens
acttggcataatgct

SEQ ID NO: 1250460 - DNA, 15 bp, Homo sapiens
cacttggcataatgc

SEQ ID NO: 1250461 - DNA, 15 bp, Homo sapiens
tcacttggcataatg

SEQ ID NO: 1250462 - DNA, 15 bp, Homo sapiens
ttcacttggcataat

SEQ ID NO: 1250463 - DNA, 15 bp, Homo sapiens
tttcacttggcataa

SEQ ID NO: 1250464 - DNA, 15 bp, Homo sapiens
atttcacttggcata

SEQ ID NO: 1250465 - DNA, 15 bp, Homo sapiens
tatttcacttggcat

SEQ ID NO: 1250466 - DNA, 15 bp, Homo sapiens
ttatttcacttggca

SEQ ID NO: 1250467 - DNA, 15 bp, Homo sapiens
cttatttcacttggc

SEQ ID NO: 1250468 - DNA, 15 bp, Homo sapiens
gcttatttcacttgg

SEQ ID NO: 1250469 - DNA, 15 bp, Homo sapiens
ggcttatttcacttg

SEQ ID NO: 1250470 - DNA, 15 bp, Homo sapiens
tctggcttatttcac

SEQ ID NO: 1250471 - DNA, 15 bp, Homo sapiens
gtctggcttatttca

SEQ ID NO: 1250472 - DNA, 15 bp, Homo sapiens
tgtctggcttatttc

SEQ ID NO: 1250473 - DNA, 15 bp, Homo sapiens
gtgtctggcttattt

SEQ ID NO: 1250474 - DNA, 15 bp, Homo sapiens
tgtgtctggcttatt

SEQ ID NO: 1250475 - DNA, 15 bp, Homo sapiens
ctgtgtctggcttat

SEQ ID NO: 1250476 - DNA, 15 bp, Homo sapiens
tctgtgtctggctta

SEQ ID NO: 1250477 - DNA, 15 bp, Homo sapiens
ttctgtgtctggctt

SEQ ID NO: 1250478 - DNA, 15 bp, Homo sapiens
tttctgtgtctggct

SEQ ID NO: 1250479 - DNA, 15 bp, Homo sapiens
ctttctgtgtctggc

SEQ ID NO: 1250480 - DNA, 15 bp, Homo sapiens
tctttctgtgtctgg

SEQ ID NO: 1250481 - DNA, 15 bp, Homo sapiens
gtctttctgtgtctg

SEQ ID NO: 1250482 - DNA, 15 bp, Homo sapiens
tgtctttctgtgtct

SEQ ID NO: 1250483 - DNA, 15 bp, Homo sapiens
ttgtctttctgtgtc

SEQ ID NO: 1250484 - DNA, 15 bp, Homo sapiens
tttgtctttctgtgt

SEQ ID NO: 1250485 - DNA, 15 bp, Homo sapiens
atttgtctttctgtg

SEQ ID NO: 1250486 - DNA, 15 bp, Homo sapiens
tatttgtctttctgt

SEQ ID NO: 1250487 - DNA, 15 bp, Homo sapiens
gtatttgtctttctg

SEQ ID NO: 1250488 - DNA, 15 bp, Homo sapiens
agtatttgtctttct

SEQ ID NO: 1250489 - DNA, 15 bp, Homo sapiens
cagtatttgtctttc

SEQ ID NO: 1250490 - DNA, 15 bp, Homo sapiens
gcagtatttgtcttt

SEQ ID NO: 1250491 - DNA, 15 bp, Homo sapiens
agcagtatttgtctt

SEQ ID NO: 1250492 - DNA, 15 bp, Homo sapiens
aagcagtatttgtct

SEQ ID NO: 1250493 - DNA, 15 bp, Homo sapiens
caagcagtatttgtc

SEQ ID NO: 1250494 - DNA, 15 bp, Homo sapiens
tcaagcagtatttgt

SEQ ID NO: 1250495 - DNA, 15 bp, Homo sapiens
atcaagcagtatttg

SEQ ID NO: 1250496 - DNA, 15 bp, Homo sapiens
gatcaagcagtattt

SEQ ID NO: 1250497 - DNA, 15 bp, Homo sapiens
agatcaagcagtatt

SEQ ID NO: 1250498 - DNA, 15 bp, Homo sapiens
gagatcaagcagtat

SEQ ID NO: 1250499 - DNA, 15 bp, Homo sapiens
tgagatcaagcagta

SEQ ID NO: 1250500 - DNA, 15 bp, Homo sapiens
gtgagatcaagcagt

SEQ ID NO: 1250501 - DNA, 15 bp, Homo sapiens
agtgagatcaagcag

SEQ ID NO: 1250502 - DNA, 15 bp, Homo sapiens
aagtgagatcaagca

SEQ ID NO: 1250503 - DNA, 15 bp, Homo sapiens
taagtgagatcaagc

SEQ ID NO: 1250504 - DNA, 15 bp, Homo sapiens
ataagtgagatcaag

SEQ ID NO: 1250505 - DNA, 15 bp, Homo sapiens
tataagtgagatcaa

SEQ ID NO: 1250506 - DNA, 15 bp, Homo sapiens
atataagtgagatca

SEQ ID NO: 1250507 - DNA, 15 bp, Homo sapiens
gatataagtgagatc

SEQ ID NO: 1250508 - DNA, 15 bp, Homo sapiens
ggatataagtgagat

SEQ ID NO: 1250509 - DNA, 15 bp, Homo sapiens
tggatataagtgaga

SEQ ID NO: 1250510 - DNA, 15 bp, Homo sapiens
ttggatataagtgag

SEQ ID NO: 1250511 - DNA, 15 bp, Homo sapiens
attggatataagtga

SEQ ID NO: 1250512 - DNA, 15 bp, Homo sapiens
aattggatataagtg

SEQ ID NO: 1250513 - DNA, 15 bp, Homo sapiens
gaattggatataagt

SEQ ID NO: 1250514 - DNA, 15 bp, Homo sapiens
tgaattggatataag

SEQ ID NO: 1250515 - DNA, 15 bp, Homo sapiens
ttgaattggatataa

SEQ ID NO: 1250516 - DNA, 15 bp, Homo sapiens
tttgaattggatata

SEQ ID NO: 1250517 - DNA, 15 bp, Homo sapiens
ttttgaattggatat

SEQ ID NO: 1250518 - DNA, 15 bp, Homo sapiens
attttgaattggata

SEQ ID NO: 1250519 - DNA, 15 bp, Homo sapiens
cattttgaattggat

SEQ ID NO: 1250520 - DNA, 15 bp, Homo sapiens
acattttgaattgga

SEQ ID NO: 1250521 - DNA, 15 bp, Homo sapiens
cacattttgaattgg

SEQ ID NO: 1250522 - DNA, 15 bp, Homo sapiens
acacattttgaattg

SEQ ID NO: 1250523 - DNA, 15 bp, Homo sapiens
aacacattttgaatt

SEQ ID NO: 1250524 - DNA, 15 bp, Homo sapiens
caacacattttgaat

SEQ ID NO: 1250525 - DNA, 15 bp, Homo sapiens
tcaacacattttgaa

SEQ ID NO: 1250526 - DNA, 15 bp, Homo sapiens
ttcaacacattttga

SEQ ID NO: 1250527 - DNA, 15 bp, Homo sapiens
attcaacacattttg

SEQ ID NO: 1250528 - DNA, 15 bp, Homo sapiens
aattcaacacatttt

SEQ ID NO: 1250529 - DNA, 15 bp, Homo sapiens
aaattcaacacattt

SEQ ID NO: 1250530 - DNA, 15 bp, Homo sapiens
taaattcaacacatt

SEQ ID NO: 1250531 - DNA, 15 bp, Homo sapiens
ataaattcaacacat

SEQ ID NO: 1250532 - DNA, 15 bp, Homo sapiens
tataaattcaacaca

SEQ ID NO: 1250533 - DNA, 15 bp, Homo sapiens
ctataaattcaacac

SEQ ID NO: 1250534 - DNA, 15 bp, Homo sapiens
tctataaattcaaca

SEQ ID NO: 1250535 - DNA, 15 bp, Homo sapiens
ttctataaattcaac

SEQ ID NO: 1250536 - DNA, 15 bp, Homo sapiens
cttctataaattcaa

SEQ ID NO: 1250537 - DNA, 15 bp, Homo sapiens
gcttctataaattca

SEQ ID NO: 1250538 - DNA, 15 bp, Homo sapiens
tgcttctataaattc

SEQ ID NO: 1250539 - DNA, 15 bp, Homo sapiens
ctgcttctataaatt

SEQ ID NO: 1250540 - DNA, 15 bp, Homo sapiens
tctgcttctataaat

SEQ ID NO: 1250541 - DNA, 15 bp, Homo sapiens
ctctgcttctataaa

SEQ ID NO: 1250542 - DNA, 15 bp, Homo sapiens
tctctgcttctataa

SEQ ID NO: 1250543 - DNA, 15 bp, Homo sapiens
ctctctgcttctata

SEQ ID NO: 1250544 - DNA, 15 bp, Homo sapiens
actctctgcttctat

SEQ ID NO: 1250545 - DNA, 15 bp, Homo sapiens
tactctctgcttcta

SEQ ID NO: 1250546 - DNA, 15 bp, Homo sapiens
ctactctctgcttct

SEQ ID NO: 1250547 - DNA, 15 bp, Homo sapiens
tctactctctgcttc

SEQ ID NO: 1250548 - DNA, 15 bp, Homo sapiens
ttctactctctgctt

SEQ ID NO: 1250549 - DNA, 15 bp, Homo sapiens
attctactctctgct

SEQ ID NO: 1250550 - DNA, 15 bp, Homo sapiens
cattctactctctgc

SEQ ID NO: 1250551 - DNA, 15 bp, Homo sapiens
ccattctactctctg

SEQ ID NO: 1250552 - DNA, 15 bp, Homo sapiens
accattctactctct

SEQ ID NO: 1250553 - DNA, 15 bp, Homo sapiens
caccattctactctc

SEQ ID NO: 1250554 - DNA, 15 bp, Homo sapiens
ccaccattctactct

SEQ ID NO: 1250555 - DNA, 15 bp, Homo sapiens
accaccattctactc

SEQ ID NO: 1250556 - DNA, 15 bp, Homo sapiens
aaccaccattctact

SEQ ID NO: 1250557 - DNA, 15 bp, Homo sapiens
caaccaccattctac

SEQ ID NO: 1250558 - DNA, 15 bp, Homo sapiens
gcaaccaccattcta

SEQ ID NO: 1250559 - DNA, 15 bp, Homo sapiens
ggcaaccaccattct

SEQ ID NO: 1250560 - DNA, 15 bp, Homo sapiens
tggcaaccaccattc

SEQ ID NO: 1250561 - DNA, 15 bp, Homo sapiens
ctggcaaccaccatt

SEQ ID NO: 1250562 - DNA, 15 bp, Homo sapiens
cctggcaaccaccat

SEQ ID NO: 1250563 - DNA, 15 bp, Homo sapiens
ccctggcaaccacca

SEQ ID NO: 1250564 - DNA, 15 bp, Homo sapiens
cccctggcaaccacc

SEQ ID NO: 1250565 - DNA, 15 bp, Homo sapiens
ccccctggcaaccac

SEQ ID NO: 1250566 - DNA, 15 bp, Homo sapiens
accccctggcaacca

SEQ ID NO: 1250567 - DNA, 15 bp, Homo sapiens
taccccctggcaacc

SEQ ID NO: 1250568 - DNA, 15 bp, Homo sapiens
ctaccccctggcaac

SEQ ID NO: 1250569 - DNA, 15 bp, Homo sapiens
cctaccccctggcaa

SEQ ID NO: 1250570 - DNA, 15 bp, Homo sapiens
ccctaccccctggca

SEQ ID NO: 1250571 - DNA, 15 bp, Homo sapiens
accctaccccctggc

SEQ ID NO: 1250572 - DNA, 15 bp, Homo sapiens
caccctaccccctgg

SEQ ID NO: 1250573 - DNA, 15 bp, Homo sapiens
tcaccctaccccctg

SEQ ID NO: 1250574 - DNA, 15 bp, Homo sapiens
atcaccctaccccct

SEQ ID NO: 1250575 - DNA, 15 bp, Homo sapiens
catcaccctaccccc

SEQ ID NO: 1250576 - DNA, 15 bp, Homo sapiens
tcatcaccctacccc

SEQ ID NO: 1250577 - DNA, 15 bp, Homo sapiens
ctcatcaccctaccc

SEQ ID NO: 1250578 - DNA, 15 bp, Homo sapiens
tctcatcaccctacc

SEQ ID NO: 1250579 - DNA, 15 bp, Homo sapiens
ctctcatcaccctac

SEQ ID NO: 1250580 - DNA, 15 bp, Homo sapiens
tctctcatcacccta

SEQ ID NO: 1250581 - DNA, 15 bp, Homo sapiens
ttctctcatcaccct

SEQ ID NO: 1250582 - DNA, 15 bp, Homo sapiens
tttctctcatcaccc

SEQ ID NO: 1250583 - DNA, 15 bp, Homo sapiens
atttctctcatcacc

SEQ ID NO: 1250584 - DNA, 15 bp, Homo sapiens
aatttctctcatcac

SEQ ID NO: 1250585 - DNA, 15 bp, Homo sapiens
caatttctctcatca

SEQ ID NO: 1250586 - DNA, 15 bp, Homo sapiens
ccaatttctctcatc

SEQ ID NO: 1250587 - DNA, 15 bp, Homo sapiens
cccaatttctctcat

SEQ ID NO: 1250588 - DNA, 15 bp, Homo sapiens
tcccaatttctctca

SEQ ID NO: 1250589 - DNA, 15 bp, Homo sapiens
ctcccaatttctctc

SEQ ID NO: 1250590 - DNA, 15 bp, Homo sapiens
tctcccaatttctct

SEQ ID NO: 1250591 - DNA, 15 bp, Homo sapiens
atctcccaatttctc

SEQ ID NO: 1250592 - DNA, 15 bp, Homo sapiens
catctcccaatttct

SEQ ID NO: 1250593 - DNA, 15 bp, Homo sapiens
ccatctcccaatttc

SEQ ID NO: 1250594 - DNA, 15 bp, Homo sapiens
accatctcccaattt

SEQ ID NO: 1250595 - DNA, 15 bp, Homo sapiens
gaccatctcccaatt

SEQ ID NO: 1250596 - DNA, 15 bp, Homo sapiens
tgaccatctcccaat

SEQ ID NO: 1250597 - DNA, 15 bp, Homo sapiens
ttgaccatctcccaa

SEQ ID NO: 1250598 - DNA, 15 bp, Homo sapiens
cttgaccatctccca

SEQ ID NO: 1250599 - DNA, 15 bp, Homo sapiens
ccttgaccatctccc

SEQ ID NO: 1250600 - DNA, 15 bp, Homo sapiens
cccttgaccatctcc

SEQ ID NO: 1250601 - DNA, 15 bp, Homo sapiens
acccttgaccatctc

SEQ ID NO: 1250602 - DNA, 15 bp, Homo sapiens
tacccttgaccatct

SEQ ID NO: 1250603 - DNA, 15 bp, Homo sapiens
gtacccttgaccatc

SEQ ID NO: 1250604 - DNA, 15 bp, Homo sapiens
tgtacccttgaccat

SEQ ID NO: 1250605 - DNA, 15 bp, Homo sapiens
ttgtacccttgacca

SEQ ID NO: 1250606 - DNA, 15 bp, Homo sapiens
tttgtacccttgacc

SEQ ID NO: 1250607 - DNA, 15 bp, Homo sapiens
ctttgtacccttgac

SEQ ID NO: 1250608 - DNA, 15 bp, Homo sapiens
actttgtacccttga

SEQ ID NO: 1250609 - DNA, 15 bp, Homo sapiens
aactttgtacccttg

SEQ ID NO: 1250610 - DNA, 15 bp, Homo sapiens
aaactttgtaccctt

SEQ ID NO: 1250611 - DNA, 15 bp, Homo sapiens
gaaactttgtaccct

SEQ ID NO: 1250612 - DNA, 15 bp, Homo sapiens
tgaaactttgtaccc

SEQ ID NO: 1250613 - DNA, 15 bp, Homo sapiens
ctgaaactttgtacc

SEQ ID NO: 1250614 - DNA, 15 bp, Homo sapiens
actgaaactttgtac

SEQ ID NO: 1250615 - DNA, 15 bp, Homo sapiens
gactgaaactttgta

SEQ ID NO: 1250616 - DNA, 15 bp, Homo sapiens
tgactgaaactttgt

SEQ ID NO: 1250617 - DNA, 15 bp, Homo sapiens
atgactgaaactttg

SEQ ID NO: 1250618 - DNA, 15 bp, Homo sapiens
tatgactgaaacttt

SEQ ID NO: 1250619 - DNA, 15 bp, Homo sapiens
ttatgactgaaactt

SEQ ID NO: 1250620 - DNA, 15 bp, Homo sapiens
cttatgactgaaact

SEQ ID NO: 1250621 - DNA, 15 bp, Homo sapiens
tcttatgactgaaac

SEQ ID NO: 1250622 - DNA, 15 bp, Homo sapiens
atcttatgactgaaa

SEQ ID NO: 1250623 - DNA, 15 bp, Homo sapiens
catcttatgactgaa

SEQ ID NO: 1250624 - DNA, 15 bp, Homo sapiens
tcatcttatgactga

SEQ ID NO: 1250625 - DNA, 15 bp, Homo sapiens
ctcatcttatgactg

SEQ ID NO: 1250626 - DNA, 15 bp, Homo sapiens
gctcatcttatgact

SEQ ID NO: 1250627 - DNA, 15 bp, Homo sapiens
tgctcatcttatgac

SEQ ID NO: 1250628 - DNA, 15 bp, Homo sapiens
ttgctcatcttatga

SEQ ID NO: 1250629 - DNA, 15 bp, Homo sapiens
cttgctcatcttatg

SEQ ID NO: 1250630 - DNA, 15 bp, Homo sapiens
acttgctcatcttat

SEQ ID NO: 1250631 - DNA, 15 bp, Homo sapiens
tacttgctcatctta

SEQ ID NO: 1250632 - DNA, 15 bp, Homo sapiens
gtacttgctcatctt

SEQ ID NO: 1250633 - DNA, 15 bp, Homo sapiens
agtacttgctcatct

SEQ ID NO: 1250634 - DNA, 15 bp, Homo sapiens
cagtacttgctcatc

SEQ ID NO: 1250635 - DNA, 15 bp, Homo sapiens
ccagtacttgctcat

SEQ ID NO: 1250636 - DNA, 15 bp, Homo sapiens
cccagtacttgctca

SEQ ID NO: 1250637 - DNA, 15 bp, Homo sapiens
ccccagtacttgctc

SEQ ID NO: 1250638 - DNA, 15 bp, Homo sapiens
cccccagtacttgct

SEQ ID NO: 1250639 - DNA, 15 bp, Homo sapiens
ccccccagtacttgc

SEQ ID NO: 1250640 - DNA, 15 bp, Homo sapiens
accccccagtacttg

SEQ ID NO: 1250641 - DNA, 15 bp, Homo sapiens
gaccccccagtactt

SEQ ID NO: 1250642 - DNA, 15 bp, Homo sapiens
tgaccccccagtact

SEQ ID NO: 1250643 - DNA, 15 bp, Homo sapiens
ttgaccccccagtac

SEQ ID NO: 1250644 - DNA, 15 bp, Homo sapiens
tttgaccccccagta

SEQ ID NO: 1250645 - DNA, 15 bp, Homo sapiens
atttgaccccccagt

SEQ ID NO: 1250646 - DNA, 15 bp, Homo sapiens
catttgaccccccag

SEQ ID NO: 1250647 - DNA, 15 bp, Homo sapiens
acatttgacccccca

SEQ ID NO: 1250648 - DNA, 15 bp, Homo sapiens
tacatttgacccccc

SEQ ID NO: 1250649 - DNA, 15 bp, Homo sapiens
gtacatttgaccccc

SEQ ID NO: 1250650 - DNA, 15 bp, Homo sapiens
agtacatttgacccc

SEQ ID NO: 1250651 - DNA, 15 bp, Homo sapiens
cagtacatttgaccc

SEQ ID NO: 1250652 - DNA, 15 bp, Homo sapiens
gcagtacatttgacc

SEQ ID NO: 1250653 - DNA, 15 bp, Homo sapiens
tgcagtacatttgac

SEQ ID NO: 1250654 - DNA, 15 bp, Homo sapiens
atgcagtacatttga

SEQ ID NO: 1250655 - DNA, 15 bp, Homo sapiens
catgcagtacatttg

SEQ ID NO: 1250656 - DNA, 15 bp, Homo sapiens
ccatgcagtacattt

SEQ ID NO: 1250657 - DNA, 15 bp, Homo sapiens
accatgcagtacatt

SEQ ID NO: 1250658 - DNA, 15 bp, Homo sapiens
caccatgcagtacat

SEQ ID NO: 1250659 - DNA, 15 bp, Homo sapiens
tcaccatgcagtaca

SEQ ID NO: 1250660 - DNA, 15 bp, Homo sapiens
gtcaccatgcagtac

SEQ ID NO: 1250661 - DNA, 15 bp, Homo sapiens
agtcaccatgcagta

SEQ ID NO: 1250662 - DNA, 15 bp, Homo sapiens
tagtcaccatgcagt

SEQ ID NO: 1250663 - DNA, 15 bp, Homo sapiens
atagtcaccatgcag

SEQ ID NO: 1250664 - DNA, 15 bp, Homo sapiens
aatagtcaccatgca

SEQ ID NO: 1250665 - DNA, 15 bp, Homo sapiens
caatagtcaccatgc

SEQ ID NO: 1250666 - DNA, 15 bp, Homo sapiens
acaatagtcaccatg

SEQ ID NO: 1250667 - DNA, 15 bp, Homo sapiens
aacaatagtcaccat

SEQ ID NO: 1250668 - DNA, 15 bp, Homo sapiens
taacaatagtcacca

SEQ ID NO: 1250669 - DNA, 15 bp, Homo sapiens
ttaacaatagtcacc

SEQ ID NO: 1250670 - DNA, 15 bp, Homo sapiens
attaacaatagtcac

SEQ ID NO: 1250671 - DNA, 15 bp, Homo sapiens
gattaacaatagtca

SEQ ID NO: 1250672 - DNA, 15 bp, Homo sapiens
tgattaacaatagtc

SEQ ID NO: 1250673 - DNA, 15 bp, Homo sapiens
gtgattaacaatagt

SEQ ID NO: 1250674 - DNA, 15 bp, Homo sapiens
tgtgattaacaatag

SEQ ID NO: 1250675 - DNA, 15 bp, Homo sapiens
gtgtgattaacaata

SEQ ID NO: 1250676 - DNA, 15 bp, Homo sapiens
agtgtgattaacaat

SEQ ID NO: 1250677 - DNA, 15 bp, Homo sapiens
aagtgtgattaacaa

SEQ ID NO: 1250678 - DNA, 15 bp, Homo sapiens
aaagtgtgattaaca

SEQ ID NO: 1250679 - DNA, 15 bp, Homo sapiens
taaagtgtgattaac

SEQ ID NO: 1250680 - DNA, 15 bp, Homo sapiens
gtaaagtgtgattaa

SEQ ID NO: 1250681 - DNA, 15 bp, Homo sapiens
agtaaagtgtgatta

SEQ ID NO: 1250682 - DNA, 15 bp, Homo sapiens
cagtaaagtgtgatt

SEQ ID NO: 1250683 - DNA, 15 bp, Homo sapiens
acagtaaagtgtgat

SEQ ID NO: 1250684 - DNA, 15 bp, Homo sapiens
cacagtaaagtgtga

SEQ ID NO: 1250685 - DNA, 15 bp, Homo sapiens
acacagtaaagtgtg

SEQ ID NO: 1250686 - DNA, 15 bp, Homo sapiens
tacacagtaaagtgt

SEQ ID NO: 1250687 - DNA, 15 bp, Homo sapiens
gtacacagtaaagtg

SEQ ID NO: 1250688 - DNA, 15 bp, Homo sapiens
agtacacagtaaagt

SEQ ID NO: 1250689 - DNA, 15 bp, Homo sapiens
aagtacacagtaaag

SEQ ID NO: 1250690 - DNA, 15 bp, Homo sapiens
caagtacacagtaaa

SEQ ID NO: 1250691 - DNA, 15 bp, Homo sapiens
tcaagtacacagtaa

SEQ ID NO: 1250692 - DNA, 15 bp, Homo sapiens
ttcaagtacacagta

SEQ ID NO: 1250693 - DNA, 15 bp, Homo sapiens
tttcaagtacacagt

SEQ ID NO: 1250694 - DNA, 15 bp, Homo sapiens
atttcaagtacacag

SEQ ID NO: 1250695 - DNA, 15 bp, Homo sapiens
aatttcaagtacaca

SEQ ID NO: 1250696 - DNA, 15 bp, Homo sapiens
aaatttcaagtacac

SEQ ID NO: 1250697 - DNA, 15 bp, Homo sapiens
caaatttcaagtaca

SEQ ID NO: 1250698 - DNA, 15 bp, Homo sapiens
gcaaatttcaagtac

SEQ ID NO: 1250699 - DNA, 15 bp, Homo sapiens
agcaaatttcaagta

SEQ ID NO: 1250700 - DNA, 15 bp, Homo sapiens
gagcaaatttcaagt

SEQ ID NO: 1250701 - DNA, 15 bp, Homo sapiens
tgagcaaatttcaag

SEQ ID NO: 1250702 - DNA, 15 bp, Homo sapiens
ctgagcaaatttcaa

SEQ ID NO: 1250703 - DNA, 15 bp, Homo sapiens
tctgagcaaatttca

SEQ ID NO: 1250704 - DNA, 15 bp, Homo sapiens
ctctgagcaaatttc

SEQ ID NO: 1250705 - DNA, 15 bp, Homo sapiens
tctctgagcaaattt

SEQ ID NO: 1250706 - DNA, 15 bp, Homo sapiens
ctctctgagcaaatt

SEQ ID NO: 1250707 - DNA, 15 bp, Homo sapiens
tctctctgagcaaat

SEQ ID NO: 1250708 - DNA, 15 bp, Homo sapiens
atctctctgagcaaa

SEQ ID NO: 1250709 - DNA, 15 bp, Homo sapiens
gatctctctgagcaa

SEQ ID NO: 1250710 - DNA, 15 bp, Homo sapiens
agatctctctgagca

SEQ ID NO: 1250711 - DNA, 15 bp, Homo sapiens
gagatctctctgagc

SEQ ID NO: 1250712 - DNA, 15 bp, Homo sapiens
tgagatctctctgag

SEQ ID NO: 1250713 - DNA, 15 bp, Homo sapiens
ttgagatctctctga

SEQ ID NO: 1250714 - DNA, 15 bp, Homo sapiens
cttgagatctctctg

SEQ ID NO: 1250715 - DNA, 15 bp, Homo sapiens
acttgagatctctct

SEQ ID NO: 1250716 - DNA, 15 bp, Homo sapiens
cacttgagatctctc

SEQ ID NO: 1250717 - DNA, 15 bp, Homo sapiens
acacttgagatctct

SEQ ID NO: 1250718 - DNA, 15 bp, Homo sapiens
gacacttgagatctc

SEQ ID NO: 1250719 - DNA, 15 bp, Homo sapiens
ggacacttgagatct

SEQ ID NO: 1250720 - DNA, 15 bp, Homo sapiens
aggacacttgagatc

SEQ ID NO: 1250721 - DNA, 15 bp, Homo sapiens
aaggacacttgagat

SEQ ID NO: 1250722 - DNA, 15 bp, Homo sapiens
caaggacacttgaga

SEQ ID NO: 1250723 - DNA, 15 bp, Homo sapiens
acaaggacacttgag

SEQ ID NO: 1250724 - DNA, 15 bp, Homo sapiens
gacaaggacacttga

SEQ ID NO: 1250725 - DNA, 15 bp, Homo sapiens
ggacaaggacacttg

SEQ ID NO: 1250726 - DNA, 15 bp, Homo sapiens
gggacaaggacactt

SEQ ID NO: 1250727 - DNA, 15 bp, Homo sapiens
tgggacaaggacact

SEQ ID NO: 1250728 - DNA, 15 bp, Homo sapiens
gtgggacaaggacac

SEQ ID NO: 1250729 - DNA, 15 bp, Homo sapiens
agtgggacaaggaca

SEQ ID NO: 1250730 - DNA, 15 bp, Homo sapiens
gagtgggacaaggac

SEQ ID NO: 1250731 - DNA, 15 bp, Homo sapiens
ggagtgggacaagga

SEQ ID NO: 1250732 - DNA, 15 bp, Homo sapiens
tggagtgggacaagg

SEQ ID NO: 1250733 - DNA, 15 bp, Homo sapiens
atggagtgggacaag

SEQ ID NO: 1250734 - DNA, 15 bp, Homo sapiens
tatggagtgggacaa

SEQ ID NO: 1250735 - DNA, 15 bp, Homo sapiens
gtatggagtgggaca

SEQ ID NO: 1250736 - DNA, 15 bp, Homo sapiens
ggtatggagtgggac

SEQ ID NO: 1250737 - DNA, 15 bp, Homo sapiens
gggtatggagtggga

SEQ ID NO: 1250738 - DNA, 15 bp, Homo sapiens
cgggtatggagtggg

SEQ ID NO: 1250739 - DNA, 15 bp, Homo sapiens
gcgggtatggagtgg

SEQ ID NO: 1250740 - DNA, 15 bp, Homo sapiens
tgcgggtatggagtg

SEQ ID NO: 1250741 - DNA, 15 bp, Homo sapiens
gtgcgggtatggagt

SEQ ID NO: 1250742 - DNA, 15 bp, Homo sapiens
tgtgcgggtatggag

SEQ ID NO: 1250743 - DNA, 15 bp, Homo sapiens
ctgtgcgggtatgga

SEQ ID NO: 1250744 - DNA, 15 bp, Homo sapiens
cctgtgcgggtatgg

SEQ ID NO: 1250745 - DNA, 15 bp, Homo sapiens
tcctgtgcgggtatg

SEQ ID NO: 1250746 - DNA, 15 bp, Homo sapiens
ttcctgtgcgggtat

SEQ ID NO: 1250747 - DNA, 15 bp, Homo sapiens
tttcctgtgcgggta

SEQ ID NO: 1250748 - DNA, 15 bp, Homo sapiens
ttttcctgtgcgggt

SEQ ID NO: 1250749 - DNA, 15 bp, Homo sapiens
tttttcctgtgcggg

SEQ ID NO: 1250750 - DNA, 15 bp, Homo sapiens
atttttcctgtgcgg

SEQ ID NO: 1250751 - DNA, 15 bp, Homo sapiens
catttttcctgtgcg

SEQ ID NO: 1250752 - DNA, 15 bp, Homo sapiens
tcatttttcctgtgc

SEQ ID NO: 1250753 - DNA, 15 bp, Homo sapiens
gtcatttttcctgtg

SEQ ID NO: 1250754 - DNA, 15 bp, Homo sapiens
agtcatttttcctgt

SEQ ID NO: 1250755 - DNA, 15 bp, Homo sapiens
tagtcatttttcctg

SEQ ID NO: 1250756 - DNA, 15 bp, Homo sapiens
gtagtcatttttcct

SEQ ID NO: 1250757 - DNA, 15 bp, Homo sapiens
tgtagtcatttttcc

SEQ ID NO: 1250758 - DNA, 15 bp, Homo sapiens
atgtagtcatttttc

SEQ ID NO: 1250759 - DNA, 15 bp, Homo sapiens
tcatgtagtcatttt

SEQ ID NO: 1250760 - DNA, 15 bp, Homo sapiens
ctcatgtagtcattt

SEQ ID NO: 1250761 - DNA, 15 bp, Homo sapiens
tctcatgtagtcatt

SEQ ID NO: 1250762 - DNA, 15 bp, Homo sapiens
atctcatgtagtcat

SEQ ID NO: 1250763 - DNA, 15 bp, Homo sapiens
catctcatgtagtca

SEQ ID NO: 1250764 - DNA, 15 bp, Homo sapiens
tcatctcatgtagtc

SEQ ID NO: 1250765 - DNA, 15 bp, Homo sapiens
atcatctcatgtagt

SEQ ID NO: 1250766 - DNA, 15 bp, Homo sapiens
catcatctcatgtag

SEQ ID NO: 1250767 - DNA, 15 bp, Homo sapiens
tcatcatctcatgta

SEQ ID NO: 1250768 - DNA, 15 bp, Homo sapiens
ttcatcatctcatgt

SEQ ID NO: 1250769 - DNA, 15 bp, Homo sapiens
attcatcatctcatg

SEQ ID NO: 1250770 - DNA, 15 bp, Homo sapiens
tattcatcatctcat

SEQ ID NO: 1250771 - DNA, 15 bp, Homo sapiens
atattcatcatctca

SEQ ID NO: 1250772 - DNA, 15 bp, Homo sapiens
tgggaaagcacgctg

SEQ ID NO: 1250773 - DNA, 15 bp, Homo sapiens
ctgggaaagcacgct

SEQ ID NO: 1250774 - DNA, 15 bp, Homo sapiens
tctgggaaagcacgc

SEQ ID NO: 1250775 - DNA, 15 bp, Homo sapiens
ctctgggaaagcacg

SEQ ID NO: 1250776 - DNA, 15 bp, Homo sapiens
tctctgggaaagcac

SEQ ID NO: 1250777 - DNA, 15 bp, Homo sapiens
gtctctgggaaagca

SEQ ID NO: 1250778 - DNA, 15 bp, Homo sapiens
ggtctctgggaaagc

SEQ ID NO: 1250779 - DNA, 15 bp, Homo sapiens
gggtctctgggaaag

SEQ ID NO: 1250780 - DNA, 15 bp, Homo sapiens
ggggtctctgggaaa

SEQ ID NO: 1250781 - DNA, 15 bp, Homo sapiens
cggggtctctgggaa

SEQ ID NO: 1250782 - DNA, 15 bp, Homo sapiens
ccggggtctctggga

SEQ ID NO: 1250783 - DNA, 15 bp, Homo sapiens
cccggggtctctggg

SEQ ID NO: 1250784 - DNA, 15 bp, Homo sapiens
ccccggggtctctgg

SEQ ID NO: 1250785 - DNA, 15 bp, Homo sapiens
gccccggggtctctg

SEQ ID NO: 1250786 - DNA, 15 bp, Homo sapiens
ggccccggggtctct

SEQ ID NO: 1250787 - DNA, 15 bp, Homo sapiens
gggccccggggtctc

SEQ ID NO: 1250788 - DNA, 15 bp, Homo sapiens
tgggccccggggtct

SEQ ID NO: 1250789 - DNA, 15 bp, Homo sapiens
gtgggccccggggtc

SEQ ID NO: 1250790 - DNA, 15 bp, Homo sapiens
tgtgggccccggggt

SEQ ID NO: 1250791 - DNA, 15 bp, Homo sapiens
ctgtgggccccgggg

SEQ ID NO: 1250792 - DNA, 15 bp, Homo sapiens
cctgtgggccccggg

SEQ ID NO: 1250793 - DNA, 15 bp, Homo sapiens
gcctgtgggccccgg

SEQ ID NO: 1250794 - DNA, 15 bp, Homo sapiens
ggcctgtgggccccg

SEQ ID NO: 1250795 - DNA, 15 bp, Homo sapiens
aggcctgtgggcccc

SEQ ID NO: 1250796 - DNA, 15 bp, Homo sapiens
caggcctgtgggccc

SEQ ID NO: 1250797 - DNA, 15 bp, Homo sapiens
ccaggcctgtgggcc

SEQ ID NO: 1250798 - DNA, 15 bp, Homo sapiens
gccaggcctgtgggc

SEQ ID NO: 1250799 - DNA, 15 bp, Homo sapiens
ggccaggcctgtggg

SEQ ID NO: 1250800 - DNA, 15 bp, Homo sapiens
aggccaggcctgtgg

SEQ ID NO: 1250801 - DNA, 15 bp, Homo sapiens
gaggccaggcctgtg

SEQ ID NO: 1250802 - DNA, 15 bp, Homo sapiens
tgaggccaggcctgt

SEQ ID NO: 1250803 - DNA, 15 bp, Homo sapiens
ctgaggccaggcctg

SEQ ID NO: 1250804 - DNA, 15 bp, Homo sapiens
actgaggccaggcct

SEQ ID NO: 1250805 - DNA, 15 bp, Homo sapiens
cactgaggccaggcc

SEQ ID NO: 1250806 - DNA, 15 bp, Homo sapiens
acactgaggccaggc

SEQ ID NO: 1250807 - DNA, 15 bp, Homo sapiens
cacactgaggccagg

SEQ ID NO: 1250808 - DNA, 15 bp, Homo sapiens
acacactgaggccag

SEQ ID NO: 1250809 - DNA, 15 bp, Homo sapiens
cacacactgaggcca

SEQ ID NO: 1250810 - DNA, 15 bp, Homo sapiens
tcacacactgaggcc

SEQ ID NO: 1250811 - DNA, 15 bp, Homo sapiens
ctcacacactgaggc

SEQ ID NO: 1250812 - DNA, 15 bp, Homo sapiens
actcacacactgagg

SEQ ID NO: 1250813 - DNA, 15 bp, Homo sapiens
cactcacacactgag

SEQ ID NO: 1250814 - DNA, 15 bp, Homo sapiens
gcactcacacactga

SEQ ID NO: 1250815 - DNA, 15 bp, Homo sapiens
tgcactcacacactg

SEQ ID NO: 1250816 - DNA, 15 bp, Homo sapiens
ttgcactcacacact

SEQ ID NO: 1250817 - DNA, 15 bp, Homo sapiens
tttgcactcacacac

SEQ ID NO: 1250818 - DNA, 15 bp, Homo sapiens
gtttgcactcacaca

SEQ ID NO: 1250819 - DNA, 15 bp, Homo sapiens
tgtttgcactcacac

SEQ ID NO: 1250820 - DNA, 15 bp, Homo sapiens
ctgtttgcactcaca

SEQ ID NO: 1250821 - DNA, 15 bp, Homo sapiens
tctgtttgcactcac

SEQ ID NO: 1250822 - DNA, 15 bp, Homo sapiens
gtctgtttgcactca

SEQ ID NO: 1250823 - DNA, 15 bp, Homo sapiens
tgtctgtttgcactc

SEQ ID NO: 1250824 - DNA, 15 bp, Homo sapiens
gtgtctgtttgcact

SEQ ID NO: 1250825 - DNA, 15 bp, Homo sapiens
ggtgtctgtttgcac

SEQ ID NO: 1250826 - DNA, 15 bp, Homo sapiens
tggtgtctgtttgca

SEQ ID NO: 1250827 - DNA, 15 bp, Homo sapiens
ctggtgtctgtttgc

SEQ ID NO: 1250828 - DNA, 15 bp, Homo sapiens
gctggtgtctgtttg

SEQ ID NO: 1250829 - DNA, 15 bp, Homo sapiens
tgctggtgtctgttt

SEQ ID NO: 1250830 - DNA, 15 bp, Homo sapiens
gtgctggtgtctgtt

SEQ ID NO: 1250831 - DNA, 15 bp, Homo sapiens
tgtgctggtgtctgt

SEQ ID NO: 1250832 - DNA, 15 bp, Homo sapiens
ttgtgctggtgtctg

SEQ ID NO: 1250833 - DNA, 15 bp, Homo sapiens
cttgtgctggtgtct

SEQ ID NO: 1250834 - DNA, 15 bp, Homo sapiens
ccttgtgctggtgtc

SEQ ID NO: 1250835 - DNA, 15 bp, Homo sapiens
tccttgtgctggtgt

SEQ ID NO: 1250836 - DNA, 15 bp, Homo sapiens
ctccttgtgctggtg

SEQ ID NO: 1250837 - DNA, 15 bp, Homo sapiens
actccttgtgctggt

SEQ ID NO: 1250838 - DNA, 15 bp, Homo sapiens
cactccttgtgctgg

SEQ ID NO: 1250839 - DNA, 15 bp, Homo sapiens
ccactccttgtgctg

SEQ ID NO: 1250840 - DNA, 15 bp, Homo sapiens
accactccttgtgct

SEQ ID NO: 1250841 - DNA, 15 bp, Homo sapiens
caccactccttgtgc

SEQ ID NO: 1250842 - DNA, 15 bp, Homo sapiens
gcaccactccttgtg

SEQ ID NO: 1250843 - DNA, 15 bp, Homo sapiens
tgcaccactccttgt

SEQ ID NO: 1250844 - DNA, 15 bp, Homo sapiens
ctgcaccactccttg

SEQ ID NO: 1250845 - DNA, 15 bp, Homo sapiens
actgcaccactcctt

SEQ ID NO: 1250846 - DNA, 15 bp, Homo sapiens
gactgcaccactcct

SEQ ID NO: 1250847 - DNA, 15 bp, Homo sapiens
tgactgcaccactcc

SEQ ID NO: 1250848 - DNA, 15 bp, Homo sapiens
ctgactgcaccactc

SEQ ID NO: 1250849 - DNA, 15 bp, Homo sapiens
gctgactgcaccact

SEQ ID NO: 1250850 - DNA, 15 bp, Homo sapiens
cgctgactgcaccac

SEQ ID NO: 1250851 - DNA, 15 bp, Homo sapiens
ccgctgactgcacca

SEQ ID NO: 1250852 - DNA, 15 bp, Homo sapiens
cccgctgactgcacc

SEQ ID NO: 1250853 - DNA, 15 bp, Homo sapiens
acccgctgactgcac

SEQ ID NO: 1250854 - DNA, 15 bp, Homo sapiens
cacccgctgactgca

SEQ ID NO: 1250855 - DNA, 15 bp, Homo sapiens
acacccgctgactgc

SEQ ID NO: 1250856 - DNA, 15 bp, Homo sapiens
aacacccgctgactg

SEQ ID NO: 1250857 - DNA, 15 bp, Homo sapiens
gaacacccgctgact

SEQ ID NO: 1250858 - DNA, 15 bp, Homo sapiens
agaacacccgctgac

SEQ ID NO: 1250859 - DNA, 15 bp, Homo sapiens
aagaacacccgctga

SEQ ID NO: 1250860 - DNA, 15 bp, Homo sapiens
gaagaacacccgctg

SEQ ID NO: 1250861 - DNA, 15 bp, Homo sapiens
agaagaacacccgct

SEQ ID NO: 1250862 - DNA, 15 bp, Homo sapiens
gagaagaacacccgc

SEQ ID NO: 1250863 - DNA, 15 bp, Homo sapiens
cgagaagaacacccg

SEQ ID NO: 1250864 - DNA, 15 bp, Homo sapiens
tcgagaagaacaccc

SEQ ID NO: 1250865 - DNA, 15 bp, Homo sapiens
ttcgagaagaacacc

SEQ ID NO: 1250866 - DNA, 15 bp, Homo sapiens
tttcgagaagaacac

SEQ ID NO: 1250867 - DNA, 15 bp, Homo sapiens
ctttcgagaagaaca

SEQ ID NO: 1250868 - DNA, 15 bp, Homo sapiens
cctttcgagaagaac

SEQ ID NO: 1250869 - DNA, 15 bp, Homo sapiens
tcctttcgagaagaa

SEQ ID NO: 1250870 - DNA, 15 bp, Homo sapiens
gtcctttcgagaaga

SEQ ID NO: 1250871 - DNA, 15 bp, Homo sapiens
ggtcctttcgagaag

SEQ ID NO: 1250872 - DNA, 15 bp, Homo sapiens
gggtcctttcgagaa

SEQ ID NO: 1250873 - DNA, 15 bp, Homo sapiens
agggtcctttcgaga

SEQ ID NO: 1250874 - DNA, 15 bp, Homo sapiens
gagggtcctttcgag

SEQ ID NO: 1250875 - DNA, 15 bp, Homo sapiens
agagggtcctttcga

SEQ ID NO: 1250876 - DNA, 15 bp, Homo sapiens
cagagggtcctttcg

SEQ ID NO: 1250877 - DNA, 15 bp, Homo sapiens
acagagggtcctttc

SEQ ID NO: 1250878 - DNA, 15 bp, Homo sapiens
aacagagggtccttt

SEQ ID NO: 1250879 - DNA, 15 bp, Homo sapiens
gaacagagggtcctt

SEQ ID NO: 1250880 - DNA, 15 bp, Homo sapiens
agaacagagggtcct

SEQ ID NO: 1250881 - DNA, 15 bp, Homo sapiens
gagaacagagggtcc

SEQ ID NO: 1250882 - DNA, 15 bp, Homo sapiens
agagaacagagggtc

SEQ ID NO: 1250883 - DNA, 15 bp, Homo sapiens
gagagaacagagggt

SEQ ID NO: 1250884 - DNA, 15 bp, Homo sapiens
agagagaacagaggg

SEQ ID NO: 1250885 - DNA, 15 bp, Homo sapiens
cagagagaacagagg

SEQ ID NO: 1250886 - DNA, 15 bp, Homo sapiens
acagagagaacagag

SEQ ID NO: 1250887 - DNA, 15 bp, Homo sapiens
gacagagagaacaga

SEQ ID NO: 1250888 - DNA, 15 bp, Homo sapiens
ggacagagagaacag

SEQ ID NO: 1250889 - DNA, 15 bp, Homo sapiens
gggacagagagaaca

SEQ ID NO: 1250890 - DNA, 15 bp, Homo sapiens
cgggacagagagaac

SEQ ID NO: 1250891 - DNA, 15 bp, Homo sapiens
acgggacagagagaa

SEQ ID NO: 1250892 - DNA, 15 bp, Homo sapiens
aacgggacagagaga

SEQ ID NO: 1250893 - DNA, 15 bp, Homo sapiens
caacgggacagagag

SEQ ID NO: 1250894 - DNA, 15 bp, Homo sapiens
gcaacgggacagaga

SEQ ID NO: 1250895 - DNA, 15 bp, Homo sapiens
tgcaacgggacagag

SEQ ID NO: 1250896 - DNA, 15 bp, Homo sapiens
atgcaacgggacaga

SEQ ID NO: 1250897 - DNA, 15 bp, Homo sapiens
gatgcaacgggacag

SEQ ID NO: 1250898 - DNA, 15 bp, Homo sapiens
ggatgcaacgggaca

SEQ ID NO: 1250899 - DNA, 15 bp, Homo sapiens
aggatgcaacgggac

SEQ ID NO: 1250900 - DNA, 15 bp, Homo sapiens
caggatgcaacggga

SEQ ID NO: 1250901 - DNA, 15 bp, Homo sapiens
acaggatgcaacggg

SEQ ID NO: 1250902 - DNA, 15 bp, Homo sapiens
cacaggatgcaacgg

SEQ ID NO: 1250903 - DNA, 15 bp, Homo sapiens
acacaggatgcaacg

SEQ ID NO: 1250904 - DNA, 15 bp, Homo sapiens
cacacaggatgcaac

SEQ ID NO: 1250905 - DNA, 15 bp, Homo sapiens
tcacacaggatgcaa

SEQ ID NO: 1250906 - DNA, 15 bp, Homo sapiens
atcacacaggatgca

SEQ ID NO: 1250907 - DNA, 15 bp, Homo sapiens
gatcacacaggatgc

SEQ ID NO: 1250908 - DNA, 15 bp, Homo sapiens
agatcacacaggatg

SEQ ID NO: 1250909 - DNA, 15 bp, Homo sapiens
gagatcacacaggat

SEQ ID NO: 1250910 - DNA, 15 bp, Homo sapiens
agagatcacacagga

SEQ ID NO: 1250911 - DNA, 15 bp, Homo sapiens
aagagatcacacagg

SEQ ID NO: 1250912 - DNA, 15 bp, Homo sapiens
aaagagatcacacag

SEQ ID NO: 1250913 - DNA, 15 bp, Homo sapiens
caaagagatcacaca

SEQ ID NO: 1250914 - DNA, 15 bp, Homo sapiens
acaaagagatcacac

SEQ ID NO: 1250915 - DNA, 15 bp, Homo sapiens
gacaaagagatcaca

SEQ ID NO: 1250916 - DNA, 15 bp, Homo sapiens
ggacaaagagatcac

SEQ ID NO: 1250917 - DNA, 15 bp, Homo sapiens
gggacaaagagatca

SEQ ID NO: 1250918 - DNA, 15 bp, Homo sapiens
agggacaaagagatc

SEQ ID NO: 1250919 - DNA, 15 bp, Homo sapiens
cagggacaaagagat

SEQ ID NO: 1250920 - DNA, 15 bp, Homo sapiens
tcagggacaaagaga

SEQ ID NO: 1250921 - DNA, 15 bp, Homo sapiens
ttcagggacaaagag

SEQ ID NO: 1250922 - DNA, 15 bp, Homo sapiens
gttcagggacaaaga

SEQ ID NO: 1250923 - DNA, 15 bp, Homo sapiens
ggttcagggacaaag

SEQ ID NO: 1250924 - DNA, 15 bp, Homo sapiens
gggttcagggacaaa

SEQ ID NO: 1250925 - DNA, 15 bp, Homo sapiens
cgggttcagggacaa

SEQ ID NO: 1250926 - DNA, 15 bp, Homo sapiens
ccgggttcagggaca

SEQ ID NO: 1250927 - DNA, 15 bp, Homo sapiens
gccgggttcagggac

SEQ ID NO: 1250928 - DNA, 15 bp, Homo sapiens
ggccgggttcaggga

SEQ ID NO: 1250929 - DNA, 15 bp, Homo sapiens
gggccgggttcaggg

SEQ ID NO: 1250930 - DNA, 15 bp, Homo sapiens
agggccgggttcagg

SEQ ID NO: 1250931 - DNA, 15 bp, Homo sapiens
aagggccgggttcag

SEQ ID NO: 1250932 - DNA, 15 bp, Homo sapiens
caagggccgggttca

SEQ ID NO: 1250933 - DNA, 15 bp, Homo sapiens
ccaagggccgggttc

SEQ ID NO: 1250934 - DNA, 15 bp, Homo sapiens
gccaagggccgggtt

SEQ ID NO: 1250935 - DNA, 15 bp, Homo sapiens
tgccaagggccgggt

SEQ ID NO: 1250936 - DNA, 15 bp, Homo sapiens
ctgccaagggccggg

SEQ ID NO: 1250937 - DNA, 15 bp, Homo sapiens
actgccaagggccgg

SEQ ID NO: 1250938 - DNA, 15 bp, Homo sapiens
tactgccaagggccg

SEQ ID NO: 1250939 - DNA, 15 bp, Homo sapiens
atactgccaagggcc

SEQ ID NO: 1250940 - DNA, 15 bp, Homo sapiens
catactgccaagggc

SEQ ID NO: 1250941 - DNA, 15 bp, Homo sapiens
gcatactgccaaggg

SEQ ID NO: 1250942 - DNA, 15 bp, Homo sapiens
tgcatactgccaagg

SEQ ID NO: 1250943 - DNA, 15 bp, Homo sapiens
atgcatactgccaag

SEQ ID NO: 1250944 - DNA, 15 bp, Homo sapiens
catgcatactgccaa

SEQ ID NO: 1250945 - DNA, 15 bp, Homo sapiens
ccatgcatactgcca

SEQ ID NO: 1250946 - DNA, 15 bp, Homo sapiens
tccatgcatactgcc

SEQ ID NO: 1250947 - DNA, 15 bp, Homo sapiens
atccatgcatactgc

SEQ ID NO: 1250948 - DNA, 15 bp, Homo sapiens
catccatgcatactg

SEQ ID NO: 1250949 - DNA, 15 bp, Homo sapiens
acatccatgcatact

SEQ ID NO: 1250950 - DNA, 15 bp, Homo sapiens
cacatccatgcatac

SEQ ID NO: 1250951 - DNA, 15 bp, Homo sapiens
acacatccatgcata

SEQ ID NO: 1250952 - DNA, 15 bp, Homo sapiens
cacacatccatgcat

SEQ ID NO: 1250953 - DNA, 15 bp, Homo sapiens
tcacacatccatgca

SEQ ID NO: 1250954 - DNA, 15 bp, Homo sapiens
gtcacacatccatgc

SEQ ID NO: 1250955 - DNA, 15 bp, Homo sapiens
ggtcacacatccatg

SEQ ID NO: 1250956 - DNA, 15 bp, Homo sapiens
gggtcacacatccat

SEQ ID NO: 1250957 - DNA, 15 bp, Homo sapiens
tgggtcacacatcca

SEQ ID NO: 1250958 - DNA, 15 bp, Homo sapiens
ttgggtcacacatcc

SEQ ID NO: 1250959 - DNA, 15 bp, Homo sapiens
attgggtcacacatc

SEQ ID NO: 1250960 - DNA, 15 bp, Homo sapiens
tattgggtcacacat

SEQ ID NO: 1250961 - DNA, 15 bp, Homo sapiens
atattgggtcacaca

SEQ ID NO: 1250962 - DNA, 15 bp, Homo sapiens
gatattgggtcacac

SEQ ID NO: 1250963 - DNA, 15 bp, Homo sapiens
agatattgggtcaca

SEQ ID NO: 1250964 - DNA, 15 bp, Homo sapiens
gagatattgggtcac

SEQ ID NO: 1250965 - DNA, 15 bp, Homo sapiens
agagatattgggtca

SEQ ID NO: 1250966 - DNA, 15 bp, Homo sapiens
gagagatattgggtc

SEQ ID NO: 1250967 - DNA, 15 bp, Homo sapiens
tgagagatattgggt

SEQ ID NO: 1250968 - DNA, 15 bp, Homo sapiens
atgagagatattggg

SEQ ID NO: 1250969 - DNA, 15 bp, Homo sapiens
gatgagagatattgg

SEQ ID NO: 1250970 - DNA, 15 bp, Homo sapiens
tgatgagagatattg

SEQ ID NO: 1250971 - DNA, 15 bp, Homo sapiens
ctgatgagagatatt

SEQ ID NO: 1250972 - DNA, 15 bp, Homo sapiens
cctgatgagagatat

SEQ ID NO: 1250973 - DNA, 15 bp, Homo sapiens
acctgatgagagata

SEQ ID NO: 1250974 - DNA, 15 bp, Homo sapiens
gacctgatgagagat

SEQ ID NO: 1250975 - DNA, 15 bp, Homo sapiens
ggacctgatgagaga

SEQ ID NO: 1250976 - DNA, 15 bp, Homo sapiens
aggacctgatgagag

SEQ ID NO: 1250977 - DNA, 15 bp, Homo sapiens
gaggacctgatgaga

SEQ ID NO: 1250978 - DNA, 15 bp, Homo sapiens
ggaggacctgatgag

SEQ ID NO: 1250979 - DNA, 15 bp, Homo sapiens
tggaggacctgatga

SEQ ID NO: 1250980 - DNA, 15 bp, Homo sapiens
ttggaggacctgatg

SEQ ID NO: 1250981 - DNA, 15 bp, Homo sapiens
tttggaggacctgat

SEQ ID NO: 1250982 - DNA, 15 bp, Homo sapiens
ctttggaggacctga

SEQ ID NO: 1250983 - DNA, 15 bp, Homo sapiens
gctttggaggacctg

SEQ ID NO: 1250984 - DNA, 15 bp, Homo sapiens
tgctttggaggacct

SEQ ID NO: 1250985 - DNA, 15 bp, Homo sapiens
ctgctttggaggacc

SEQ ID NO: 1250986 - DNA, 15 bp, Homo sapiens
actgctttggaggac

SEQ ID NO: 1250987 - DNA, 15 bp, Homo sapiens
gactgctttggagga

SEQ ID NO: 1250988 - DNA, 15 bp, Homo sapiens
tgactgctttggagg

SEQ ID NO: 1250989 - DNA, 15 bp, Homo sapiens
gtgactgctttggag

SEQ ID NO: 1250990 - DNA, 15 bp, Homo sapiens
agtgactgctttgga

SEQ ID NO: 1250991 - DNA, 15 bp, Homo sapiens
aagtgactgctttgg

SEQ ID NO: 1250992 - DNA, 15 bp, Homo sapiens
aaagtgactgctttg

SEQ ID NO: 1250993 - DNA, 15 bp, Homo sapiens
caaagtgactgcttt

SEQ ID NO: 1250994 - DNA, 15 bp, Homo sapiens
tcaaagtgactgctt

SEQ ID NO: 1250995 - DNA, 15 bp, Homo sapiens
ttcaaagtgactgct

SEQ ID NO: 1250996 - DNA, 15 bp, Homo sapiens
tttcaaagtgactgc

SEQ ID NO: 1250997 - DNA, 15 bp, Homo sapiens
ttttcaaagtgactg

SEQ ID NO: 1250998 - DNA, 15 bp, Homo sapiens
tttttcaaagtgact

SEQ ID NO: 1250999 - DNA, 15 bp, Homo sapiens
atttttcaaagtgac

SEQ ID NO: 1251000 - DNA, 15 bp, Homo sapiens
catttttcaaagtga

SEQ ID NO: 1251001 - DNA, 15 bp, Homo sapiens
tcatttttcaaagtg

SEQ ID NO: 1251002 - DNA, 15 bp, Homo sapiens
ttcatttttcaaagt

SEQ ID NO: 1251003 - DNA, 15 bp, Homo sapiens
cttcatttttcaaag

SEQ ID NO: 1251004 - DNA, 15 bp, Homo sapiens
acttcatttttcaaa

SEQ ID NO: 1251005 - DNA, 15 bp, Homo sapiens
tacttcatttttcaa

SEQ ID NO: 1251006 - DNA, 15 bp, Homo sapiens
ctttacttcattttt

SEQ ID NO: 1251007 - DNA, 15 bp, Homo sapiens
cctttacttcatttt

SEQ ID NO: 1251008 - DNA, 15 bp, Homo sapiens
tcctttacttcattt

SEQ ID NO: 1251009 - DNA, 15 bp, Homo sapiens
ttcctttacttcatt

SEQ ID NO: 1251010 - DNA, 15 bp, Homo sapiens
cttcctttacttcat

SEQ ID NO: 1251011 - DNA, 15 bp, Homo sapiens
ccttcctttacttca

SEQ ID NO: 1251012 - DNA, 15 bp, Homo sapiens
tccttcctttacttc

SEQ ID NO: 1251013 - DNA, 15 bp, Homo sapiens
gtccttcctttactt

SEQ ID NO: 1251014 - DNA, 15 bp, Homo sapiens
agtccttcctttact

SEQ ID NO: 1251015 - DNA, 15 bp, Homo sapiens
cagtccttcctttac

SEQ ID NO: 1251016 - DNA, 15 bp, Homo sapiens
acagtccttccttta

SEQ ID NO: 1251017 - DNA, 15 bp, Homo sapiens
aacagtccttccttt

SEQ ID NO: 1251018 - DNA, 15 bp, Homo sapiens
aaacagtccttcctt

SEQ ID NO: 1251019 - DNA, 15 bp, Homo sapiens
gaaacagtccttcct

SEQ ID NO: 1251020 - DNA, 15 bp, Homo sapiens
ggaaacagtccttcc

SEQ ID NO: 1251021 - DNA, 15 bp, Homo sapiens
tggaaacagtccttc

SEQ ID NO: 1251022 - DNA, 15 bp, Homo sapiens
ttggaaacagtcctt

SEQ ID NO: 1251023 - DNA, 15 bp, Homo sapiens
cttggaaacagtcct

SEQ ID NO: 1251024 - DNA, 15 bp, Homo sapiens
tcttggaaacagtcc

SEQ ID NO: 1251025 - DNA, 15 bp, Homo sapiens
gtcttggaaacagtc

SEQ ID NO: 1251026 - DNA, 15 bp, Homo sapiens
tgtcttggaaacagt

SEQ ID NO: 1251027 - DNA, 15 bp, Homo sapiens
ctgtcttggaaacag

SEQ ID NO: 1251028 - DNA, 15 bp, Homo sapiens
tctgtcttggaaaca

SEQ ID NO: 1251029 - DNA, 15 bp, Homo sapiens
ctctgtcttggaaac

SEQ ID NO: 1251030 - DNA, 15 bp, Homo sapiens
cctctgtcttggaaa

SEQ ID NO: 1251031 - DNA, 15 bp, Homo sapiens
ccctctgtcttggaa

SEQ ID NO: 1251032 - DNA, 15 bp, Homo sapiens
tccctctgtcttgga

SEQ ID NO: 1251033 - DNA, 15 bp, Homo sapiens
ttccctctgtcttgg

SEQ ID NO: 1251034 - DNA, 15 bp, Homo sapiens
tttccctctgtcttg

SEQ ID NO: 1251035 - DNA, 15 bp, Homo sapiens
ttttccctctgtctt

SEQ ID NO: 1251036 - DNA, 15 bp, Homo sapiens
attttccctctgtct

SEQ ID NO: 1251037 - DNA, 15 bp, Homo sapiens
ccattttccctctgt

SEQ ID NO: 1251038 - DNA, 15 bp, Homo sapiens
gccattttccctctg

SEQ ID NO: 1251039 - DNA, 15 bp, Homo sapiens
ggccattttccctct

SEQ ID NO: 1251040 - DNA, 15 bp, Homo sapiens
aggccattttccctc

SEQ ID NO: 1251041 - DNA, 15 bp, Homo sapiens
gaggccattttccct

SEQ ID NO: 1251042 - DNA, 15 bp, Homo sapiens
agaggccattttccc

SEQ ID NO: 1251043 - DNA, 15 bp, Homo sapiens
cagaggccattttcc

SEQ ID NO: 1251044 - DNA, 15 bp, Homo sapiens
gcagaggccattttc

SEQ ID NO: 1251045 - DNA, 15 bp, Homo sapiens
ggcagaggccatttt

SEQ ID NO: 1251046 - DNA, 15 bp, Homo sapiens
aggcagaggccattt

SEQ ID NO: 1251047 - DNA, 15 bp, Homo sapiens
aaggcagaggccatt

SEQ ID NO: 1251048 - DNA, 15 bp, Homo sapiens
aaaggcagaggccat

SEQ ID NO: 1251049 - DNA, 15 bp, Homo sapiens
gaaaggcagaggcca

SEQ ID NO: 1251050 - DNA, 15 bp, Homo sapiens
tgaaaggcagaggcc

SEQ ID NO: 1251051 - DNA, 15 bp, Homo sapiens
ctgaaaggcagaggc

SEQ ID NO: 1251052 - DNA, 15 bp, Homo sapiens
actgaaaggcagagg

SEQ ID NO: 1251053 - DNA, 15 bp, Homo sapiens
aactgaaaggcagag

SEQ ID NO: 1251054 - DNA, 15 bp, Homo sapiens
aaactgaaaggcaga

SEQ ID NO: 1251055 - DNA, 15 bp, Homo sapiens
aaaactgaaaggcag

SEQ ID NO: 1251056 - DNA, 15 bp, Homo sapiens
taaaactgaaaggca

SEQ ID NO: 1251057 - DNA, 15 bp, Homo sapiens
ctaaaactgaaaggc

SEQ ID NO: 1251058 - DNA, 15 bp, Homo sapiens
gctaaaactgaaagg

SEQ ID NO: 1251059 - DNA, 15 bp, Homo sapiens
agctaaaactgaaag

SEQ ID NO: 1251060 - DNA, 15 bp, Homo sapiens
tagctaaaactgaaa

SEQ ID NO: 1251061 - DNA, 15 bp, Homo sapiens
ttagctaaaactgaa

SEQ ID NO: 1251062 - DNA, 15 bp, Homo sapiens
cttagctaaaactga

SEQ ID NO: 1251063 - DNA, 15 bp, Homo sapiens
acttagctaaaactg

SEQ ID NO: 1251064 - DNA, 15 bp, Homo sapiens
cacttagctaaaact

SEQ ID NO: 1251065 - DNA, 15 bp, Homo sapiens
ccacttagctaaaac

SEQ ID NO: 1251066 - DNA, 15 bp, Homo sapiens
cccacttagctaaaa

SEQ ID NO: 1251067 - DNA, 15 bp, Homo sapiens
tcccacttagctaaa

SEQ ID NO: 1251068 - DNA, 15 bp, Homo sapiens
ttcccacttagctaa

SEQ ID NO: 1251069 - DNA, 15 bp, Homo sapiens
tttcccacttagcta

SEQ ID NO: 1251070 - DNA, 15 bp, Homo sapiens
ttttcccacttagct

SEQ ID NO: 1251071 - DNA, 15 bp, Homo sapiens
attttcccacttagc

SEQ ID NO: 1251072 - DNA, 15 bp, Homo sapiens
cattttcccacttag

SEQ ID NO: 1251073 - DNA, 15 bp, Homo sapiens
tcattttcccactta

SEQ ID NO: 1251074 - DNA, 15 bp, Homo sapiens
ttcattttcccactt

SEQ ID NO: 1251075 - DNA, 15 bp, Homo sapiens
tttcattttcccact

SEQ ID NO: 1251076 - DNA, 15 bp, Homo sapiens
atttcattttcccac

SEQ ID NO: 1251077 - DNA, 15 bp, Homo sapiens
tatttcattttccca

SEQ ID NO: 1251078 - DNA, 15 bp, Homo sapiens
ctatttcattttccc

SEQ ID NO: 1251079 - DNA, 15 bp, Homo sapiens
cctatttcattttcc

SEQ ID NO: 1251080 - DNA, 15 bp, Homo sapiens
ccctatttcattttc

SEQ ID NO: 1251081 - DNA, 15 bp, Homo sapiens
tccctatttcatttt

SEQ ID NO: 1251082 - DNA, 15 bp, Homo sapiens
ttccctatttcattt

SEQ ID NO: 1251083 - DNA, 15 bp, Homo sapiens
cttccctatttcatt

SEQ ID NO: 1251084 - DNA, 15 bp, Homo sapiens
gcttccctatttcat

SEQ ID NO: 1251085 - DNA, 15 bp, Homo sapiens
agcttccctatttca

SEQ ID NO: 1251086 - DNA, 15 bp, Homo sapiens
tagcttccctatttc

SEQ ID NO: 1251087 - DNA, 15 bp, Homo sapiens
ctagcttccctattt

SEQ ID NO: 1251088 - DNA, 15 bp, Homo sapiens
tctagcttccctatt

SEQ ID NO: 1251089 - DNA, 15 bp, Homo sapiens
atctagcttccctat

SEQ ID NO: 1251090 - DNA, 15 bp, Homo sapiens
aatctagcttcccta

SEQ ID NO: 1251091 - DNA, 15 bp, Homo sapiens
aaatctagcttccct

SEQ ID NO: 1251092 - DNA, 15 bp, Homo sapiens
gaaatctagcttccc

SEQ ID NO: 1251093 - DNA, 15 bp, Homo sapiens
ggaaatctagcttcc

SEQ ID NO: 1251094 - DNA, 15 bp, Homo sapiens
aggaaatctagcttc

SEQ ID NO: 1251095 - DNA, 15 bp, Homo sapiens
caggaaatctagctt

SEQ ID NO: 1251096 - DNA, 15 bp, Homo sapiens
ccaggaaatctagct

SEQ ID NO: 1251097 - DNA, 15 bp, Homo sapiens
accaggaaatctagc

SEQ ID NO: 1251098 - DNA, 15 bp, Homo sapiens
caccaggaaatctag

SEQ ID NO: 1251099 - DNA, 15 bp, Homo sapiens
tcaccaggaaatcta

SEQ ID NO: 1251100 - DNA, 15 bp, Homo sapiens
gtcaccaggaaatct

SEQ ID NO: 1251101 - DNA, 15 bp, Homo sapiens
ggtcaccaggaaatc

SEQ ID NO: 1251102 - DNA, 15 bp, Homo sapiens
tggtcaccaggaaat

SEQ ID NO: 1251103 - DNA, 15 bp, Homo sapiens
atggtcaccaggaaa

SEQ ID NO: 1251104 - DNA, 15 bp, Homo sapiens
gatggtcaccaggaa

SEQ ID NO: 1251105 - DNA, 15 bp, Homo sapiens
agatggtcaccagga

SEQ ID NO: 1251106 - DNA, 15 bp, Homo sapiens
aagatggtcaccagg

SEQ ID NO: 1251107 - DNA, 15 bp, Homo sapiens
caagatggtcaccag

SEQ ID NO: 1251108 - DNA, 15 bp, Homo sapiens
gcaagatggtcacca

SEQ ID NO: 1251109 - DNA, 15 bp, Homo sapiens
ggcaagatggtcacc

SEQ ID NO: 1251110 - DNA, 15 bp, Homo sapiens
aggcaagatggtcac

SEQ ID NO: 1251111 - DNA, 15 bp, Homo sapiens
gaggcaagatggtca

SEQ ID NO: 1251112 - DNA, 15 bp, Homo sapiens
ggaggcaagatggtc

SEQ ID NO: 1251113 - DNA, 15 bp, Homo sapiens
aggaggcaagatggt

SEQ ID NO: 1251114 - DNA, 15 bp, Homo sapiens
aaggaggcaagatgg

SEQ ID NO: 1251115 - DNA, 15 bp, Homo sapiens
aaaggaggcaagatg

SEQ ID NO: 1251116 - DNA, 15 bp, Homo sapiens
gaaaggaggcaagat

SEQ ID NO: 1251117 - DNA, 15 bp, Homo sapiens
ggaaaggaggcaaga

SEQ ID NO: 1251118 - DNA, 15 bp, Homo sapiens
gggaaaggaggcaag

SEQ ID NO: 1251119 - DNA, 15 bp, Homo sapiens
ggggaaaggaggcaa

SEQ ID NO: 1251120 - DNA, 15 bp, Homo sapiens
aggggaaaggaggca

SEQ ID NO: 1251121 - DNA, 15 bp, Homo sapiens
aaggggaaaggaggc

SEQ ID NO: 1251122 - DNA, 15 bp, Homo sapiens
gaaggggaaaggagg

SEQ ID NO: 1251123 - DNA, 15 bp, Homo sapiens
agaaggggaaaggag

SEQ ID NO: 1251124 - DNA, 15 bp, Homo sapiens
aagaaggggaaagga

SEQ ID NO: 1251125 - DNA, 15 bp, Homo sapiens
aaagaaggggaaagg

SEQ ID NO: 1251126 - DNA, 15 bp, Homo sapiens
gaaagaaggggaaag

SEQ ID NO: 1251127 - DNA, 15 bp, Homo sapiens
ggaaagaaggggaaa

SEQ ID NO: 1251128 - DNA, 15 bp, Homo sapiens
gggaaagaaggggaa

SEQ ID NO: 1251129 - DNA, 15 bp, Homo sapiens
tgggaaagaagggga

SEQ ID NO: 1251130 - DNA, 15 bp, Homo sapiens
ctgggaaagaagggg

SEQ ID NO: 1251131 - DNA, 15 bp, Homo sapiens
actgggaaagaaggg

SEQ ID NO: 1251132 - DNA, 15 bp, Homo sapiens
gactgggaaagaagg

SEQ ID NO: 1251133 - DNA, 15 bp, Homo sapiens
agactgggaaagaag

SEQ ID NO: 1251134 - DNA, 15 bp, Homo sapiens
gagactgggaaagaa

SEQ ID NO: 1251135 - DNA, 15 bp, Homo sapiens
ggagactgggaaaga

SEQ ID NO: 1251136 - DNA, 15 bp, Homo sapiens
aggagactgggaaag

SEQ ID NO: 1251137 - DNA, 15 bp, Homo sapiens
aaggagactgggaaa

SEQ ID NO: 1251138 - DNA, 15 bp, Homo sapiens
gaaggagactgggaa

SEQ ID NO: 1251139 - DNA, 15 bp, Homo sapiens
ggaaggagactggga

SEQ ID NO: 1251140 - DNA, 15 bp, Homo sapiens
aggaaggagactggg

SEQ ID NO: 1251141 - DNA, 15 bp, Homo sapiens
aaggaaggagactgg

SEQ ID NO: 1251142 - DNA, 15 bp, Homo sapiens
aaaggaaggagactg

SEQ ID NO: 1251143 - DNA, 15 bp, Homo sapiens
gaaaggaaggagact

SEQ ID NO: 1251144 - DNA, 15 bp, Homo sapiens
ggaaaggaaggagac

SEQ ID NO: 1251145 - DNA, 15 bp, Homo sapiens
aggaaaggaaggaga

SEQ ID NO: 1251146 - DNA, 15 bp, Homo sapiens
aaggaaaggaaggag

SEQ ID NO: 1251147 - DNA, 15 bp, Homo sapiens
aaaggaaaggaagga

SEQ ID NO: 1251148 - DNA, 15 bp, Homo sapiens
gaaaggaaaggaagg

SEQ ID NO: 1251149 - DNA, 15 bp, Homo sapiens
ggaaaggaaaggaag

SEQ ID NO: 1251150 - DNA, 15 bp, Homo sapiens
ggggaaaggaaagga

SEQ ID NO: 1251151 - DNA, 15 bp, Homo sapiens
aggggaaaggaaagg

SEQ ID NO: 1251152 - DNA, 15 bp, Homo sapiens
aaggggaaaggaaag

SEQ ID NO: 1251153 - DNA, 15 bp, Homo sapiens
aaaggggaaaggaaa

SEQ ID NO: 1251154 - DNA, 15 bp, Homo sapiens
gaaaggggaaaggaa

SEQ ID NO: 1251155 - DNA, 15 bp, Homo sapiens
ggaaaggggaaagga

SEQ ID NO: 1251156 - DNA, 15 bp, Homo sapiens
gggaaaggggaaagg

SEQ ID NO: 1251157 - DNA, 15 bp, Homo sapiens
tgggaaaggggaaag

SEQ ID NO: 1251158 - DNA, 15 bp, Homo sapiens
gtgggaaaggggaaa

SEQ ID NO: 1251159 - DNA, 15 bp, Homo sapiens
ggtgggaaaggggaa

SEQ ID NO: 1251160 - DNA, 15 bp, Homo sapiens
aggtgggaaagggga

SEQ ID NO: 1251161 - DNA, 15 bp, Homo sapiens
aaggtgggaaagggg

SEQ ID NO: 1251162 - DNA, 15 bp, Homo sapiens
caaggtgggaaaggg

SEQ ID NO: 1251163 - DNA, 15 bp, Homo sapiens
gcaaggtgggaaagg

SEQ ID NO: 1251164 - DNA, 15 bp, Homo sapiens
agcaaggtgggaaag

SEQ ID NO: 1251165 - DNA, 15 bp, Homo sapiens
aagcaaggtgggaaa

SEQ ID NO: 1251166 - DNA, 15 bp, Homo sapiens
aaagcaaggtgggaa

SEQ ID NO: 1251167 - DNA, 15 bp, Homo sapiens
gaaagcaaggtggga

SEQ ID NO: 1251168 - DNA, 15 bp, Homo sapiens
agaaagcaaggtggg

SEQ ID NO: 1251169 - DNA, 15 bp, Homo sapiens
aagaaagcaaggtgg

SEQ ID NO: 1251170 - DNA, 15 bp, Homo sapiens
aaagaaagcaaggtg

SEQ ID NO: 1251171 - DNA, 15 bp, Homo sapiens
aaaagaaagcaaggt

SEQ ID NO: 1251172 - DNA, 15 bp, Homo sapiens
aaaaagaaagcaagg

SEQ ID NO: 1251173 - DNA, 15 bp, Homo sapiens
aaaaaagaaagcaag

SEQ ID NO: 1251174 - DNA, 15 bp, Homo sapiens
aaaaaaagaaagcaa

SEQ ID NO: 1251175 - DNA, 15 bp, Homo sapiens
gaaaaaaagaaagca

SEQ ID NO: 1251176 - DNA, 15 bp, Homo sapiens
ggaaaaaaagaaagc

SEQ ID NO: 1251177 - DNA, 15 bp, Homo sapiens
tggaaaaaaagaaag

SEQ ID NO: 1251178 - DNA, 15 bp, Homo sapiens
ttggaaaaaaagaaa

SEQ ID NO: 1251179 - DNA, 15 bp, Homo sapiens
tttggaaaaaaagaa

SEQ ID NO: 1251180 - DNA, 15 bp, Homo sapiens
ttttggaaaaaaaga

SEQ ID NO: 1251181 - DNA, 15 bp, Homo sapiens
attttggaaaaaaag

SEQ ID NO: 1251182 - DNA, 15 bp, Homo sapiens
gattttggaaaaaaa

SEQ ID NO: 1251183 - DNA, 15 bp, Homo sapiens
agattttggaaaaaa

SEQ ID NO: 1251184 - DNA, 15 bp, Homo sapiens
aagattttggaaaaa

SEQ ID NO: 1251185 - DNA, 15 bp, Homo sapiens
aaagattttggaaaa

SEQ ID NO: 1251186 - DNA, 15 bp, Homo sapiens
aaaagattttggaaa

SEQ ID NO: 1251187 - DNA, 15 bp, Homo sapiens
taaaagattttggaa

SEQ ID NO: 1251188 - DNA, 15 bp, Homo sapiens
ctaaaagattttgga

SEQ ID NO: 1251189 - DNA, 15 bp, Homo sapiens
actaaaagattttgg

SEQ ID NO: 1251190 - DNA, 15 bp, Homo sapiens
aactaaaagattttg

SEQ ID NO: 1251191 - DNA, 15 bp, Homo sapiens
taactaaaagatttt

SEQ ID NO: 1251192 - DNA, 15 bp, Homo sapiens
ttaactaaaagattt

SEQ ID NO: 1251193 - DNA, 15 bp, Homo sapiens
gttaactaaaagatt

SEQ ID NO: 1251194 - DNA, 15 bp, Homo sapiens
agttaactaaaagat

SEQ ID NO: 1251195 - DNA, 15 bp, Homo sapiens
tagttaactaaaaga

SEQ ID NO: 1251196 - DNA, 15 bp, Homo sapiens
ttagttaactaaaag

SEQ ID NO: 1251197 - DNA, 15 bp, Homo sapiens
attagttaactaaaa

SEQ ID NO: 1251198 - DNA, 15 bp, Homo sapiens
cattagttaactaaa

SEQ ID NO: 1251199 - DNA, 15 bp, Homo sapiens
tcattagttaactaa

SEQ ID NO: 1251200 - DNA, 15 bp, Homo sapiens
atcattagttaacta

SEQ ID NO: 1251201 - DNA, 15 bp, Homo sapiens
tatcattagttaact

SEQ ID NO: 1251202 - DNA, 15 bp, Homo sapiens
atatcattagttaac

SEQ ID NO: 1251203 - DNA, 15 bp, Homo sapiens
aatatcattagttaa

SEQ ID NO: 1251204 - DNA, 15 bp, Homo sapiens
taatatcattagtta

SEQ ID NO: 1251205 - DNA, 15 bp, Homo sapiens
ctaatatcattagtt

SEQ ID NO: 1251206 - DNA, 15 bp, Homo sapiens
cctaatatcattagt

SEQ ID NO: 1251207 - DNA, 15 bp, Homo sapiens
tcctaatatcattag

SEQ ID NO: 1251208 - DNA, 15 bp, Homo sapiens
ctcctaatatcatta

SEQ ID NO: 1251209 - DNA, 15 bp, Homo sapiens
gctcctaatatcatt

SEQ ID NO: 1251210 - DNA, 15 bp, Homo sapiens
agctcctaatatcat

SEQ ID NO: 1251211 - DNA, 15 bp, Homo sapiens
tagctcctaatatca

SEQ ID NO: 1251212 - DNA, 15 bp, Homo sapiens
ttagctcctaatatc

SEQ ID NO: 1251213 - DNA, 15 bp, Homo sapiens
attagctcctaatat

SEQ ID NO: 1251214 - DNA, 15 bp, Homo sapiens
cattagctcctaata

SEQ ID NO: 1251215 - DNA, 15 bp, Homo sapiens
gcattagctcctaat

SEQ ID NO: 1251216 - DNA, 15 bp, Homo sapiens
agcattagctcctaa

SEQ ID NO: 1251217 - DNA, 15 bp, Homo sapiens
aagcattagctccta

SEQ ID NO: 1251218 - DNA, 15 bp, Homo sapiens
gaagcattagctcct

SEQ ID NO: 1251219 - DNA, 15 bp, Homo sapiens
agaagcattagctcc

SEQ ID NO: 1251220 - DNA, 15 bp, Homo sapiens
aagaagcattagctc

SEQ ID NO: 1251221 - DNA, 15 bp, Homo sapiens
caagaagcattagct

SEQ ID NO: 1251222 - DNA, 15 bp, Homo sapiens
tcaagaagcattagc

SEQ ID NO: 1251223 - DNA, 15 bp, Homo sapiens
ctcaagaagcattag

SEQ ID NO: 1251224 - DNA, 15 bp, Homo sapiens
gctcaagaagcatta

SEQ ID NO: 1251225 - DNA, 15 bp, Homo sapiens
tgctcaagaagcatt

SEQ ID NO: 1251226 - DNA, 15 bp, Homo sapiens
ctgctcaagaagcat

SEQ ID NO: 1251227 - DNA, 15 bp, Homo sapiens
cctgctcaagaagca

SEQ ID NO: 1251228 - DNA, 15 bp, Homo sapiens
ccctgctcaagaagc

SEQ ID NO: 1251229 - DNA, 15 bp, Homo sapiens
cccctgctcaagaag

SEQ ID NO: 1251230 - DNA, 15 bp, Homo sapiens
agcccctgctcaaga

SEQ ID NO: 1251231 - DNA, 15 bp, Homo sapiens
cagcccctgctcaag

SEQ ID NO: 1251232 - DNA, 15 bp, Homo sapiens
acagcccctgctcaa

SEQ ID NO: 1251233 - DNA, 15 bp, Homo sapiens
cacagcccctgctca

SEQ ID NO: 1251234 - DNA, 15 bp, Homo sapiens
acacagcccctgctc

SEQ ID NO: 1251235 - DNA, 15 bp, Homo sapiens
cacacagcccctgct

SEQ ID NO: 1251236 - DNA, 15 bp, Homo sapiens
gcacacagcccctgc

SEQ ID NO: 1251237 - DNA, 15 bp, Homo sapiens
ggcacacagcccctg

SEQ ID NO: 1251238 - DNA, 15 bp, Homo sapiens
tggcacacagcccct

SEQ ID NO: 1251239 - DNA, 15 bp, Homo sapiens
ctggcacacagcccc

SEQ ID NO: 1251240 - DNA, 15 bp, Homo sapiens
cctggcacacagccc

SEQ ID NO: 1251241 - DNA, 15 bp, Homo sapiens
gcctggcacacagcc

SEQ ID NO: 1251242 - DNA, 15 bp, Homo sapiens
tgcctggcacacagc

SEQ ID NO: 1251243 - DNA, 15 bp, Homo sapiens
gtgcctggcacacag

SEQ ID NO: 1251244 - DNA, 15 bp, Homo sapiens
tgtgcctggcacaca

SEQ ID NO: 1251245 - DNA, 15 bp, Homo sapiens
ttgtgcctggcacac

SEQ ID NO: 1251246 - DNA, 15 bp, Homo sapiens
attgtgcctggcaca

SEQ ID NO: 1251247 - DNA, 15 bp, Homo sapiens
cattgtgcctggcac

SEQ ID NO: 1251248 - DNA, 15 bp, Homo sapiens
gcattgtgcctggca

SEQ ID NO: 1251249 - DNA, 15 bp, Homo sapiens
agcattgtgcctggc

SEQ ID NO: 1251250 - DNA, 15 bp, Homo sapiens
tagcattgtgcctgg

SEQ ID NO: 1251251 - DNA, 15 bp, Homo sapiens
ttagcattgtgcctg

SEQ ID NO: 1251252 - DNA, 15 bp, Homo sapiens
tttagcattgtgcct

SEQ ID NO: 1251253 - DNA, 15 bp, Homo sapiens
atttagcattgtgcc

SEQ ID NO: 1251254 - DNA, 15 bp, Homo sapiens
catttagcattgtgc

SEQ ID NO: 1251255 - DNA, 15 bp, Homo sapiens
gcatttagcattgtg

SEQ ID NO: 1251256 - DNA, 15 bp, Homo sapiens
agcatttagcattgt

SEQ ID NO: 1251257 - DNA, 15 bp, Homo sapiens
aagcatttagcattg

SEQ ID NO: 1251258 - DNA, 15 bp, Homo sapiens
caagcatttagcatt

SEQ ID NO: 1251259 - DNA, 15 bp, Homo sapiens
ccaagcatttagcat

SEQ ID NO: 1251260 - DNA, 15 bp, Homo sapiens
gccaagcatttagca

SEQ ID NO: 1251261 - DNA, 15 bp, Homo sapiens
tgccaagcatttagc

SEQ ID NO: 1251262 - DNA, 15 bp, Homo sapiens
atgccaagcatttag

SEQ ID NO: 1251263 - DNA, 15 bp, Homo sapiens
aatgccaagcattta

SEQ ID NO: 1251264 - DNA, 15 bp, Homo sapiens
gaatgccaagcattt

SEQ ID NO: 1251265 - DNA, 15 bp, Homo sapiens
ggaatgccaagcatt

SEQ ID NO: 1251266 - DNA, 15 bp, Homo sapiens
aggaatgccaagcat

SEQ ID NO: 1251267 - DNA, 15 bp, Homo sapiens
aaggaatgccaagca

SEQ ID NO: 1251268 - DNA, 15 bp, Homo sapiens
aaaggaatgccaagc

SEQ ID NO: 1251269 - DNA, 15 bp, Homo sapiens
aaaaggaatgccaag

SEQ ID NO: 1251270 - DNA, 15 bp, Homo sapiens
aaaaaggaatgccaa

SEQ ID NO: 1251271 - DNA, 15 bp, Homo sapiens
aaaaaaggaatgcca

SEQ ID NO: 1251272 - DNA, 15 bp, Homo sapiens
taaaaaaggaatgcc

SEQ ID NO: 1251273 - DNA, 15 bp, Homo sapiens
ttaaaaaaggaatgc

SEQ ID NO: 1251274 - DNA, 15 bp, Homo sapiens
attaaaaaaggaatg

SEQ ID NO: 1251275 - DNA, 15 bp, Homo sapiens
aattaaaaaaggaat

SEQ ID NO: 1251276 - DNA, 15 bp, Homo sapiens
aaattaaaaaaggaa

SEQ ID NO: 1251277 - DNA, 15 bp, Homo sapiens
caaattaaaaaagga

SEQ ID NO: 1251278 - DNA, 15 bp, Homo sapiens
tcaaattaaaaaagg

SEQ ID NO: 1251279 - DNA, 15 bp, Homo sapiens
ttcaaattaaaaaag

SEQ ID NO: 1251280 - DNA, 15 bp, Homo sapiens
attcaaattaaaaaa

SEQ ID NO: 1251281 - DNA, 15 bp, Homo sapiens
tattcaaattaaaaa

SEQ ID NO: 1251282 - DNA, 15 bp, Homo sapiens
atattcaaattaaaa

SEQ ID NO: 1251283 - DNA, 15 bp, Homo sapiens
aatattcaaattaaa

SEQ ID NO: 1251284 - DNA, 15 bp, Homo sapiens
taatattcaaattaa

SEQ ID NO: 1251285 - DNA, 15 bp, Homo sapiens
ataatattcaaatta

SEQ ID NO: 1251286 - DNA, 15 bp, Homo sapiens
gataatattcaaatt

SEQ ID NO: 1251287 - DNA, 15 bp, Homo sapiens
tgataatattcaaat

SEQ ID NO: 1251288 - DNA, 15 bp, Homo sapiens
gtgataatattcaaa

SEQ ID NO: 1251289 - DNA, 15 bp, Homo sapiens
ggtgataatattcaa

SEQ ID NO: 1251290 - DNA, 15 bp, Homo sapiens
tggtgataatattca

SEQ ID NO: 1251291 - DNA, 15 bp, Homo sapiens
gtggtgataatattc

SEQ ID NO: 1251292 - DNA, 15 bp, Homo sapiens
ggtggtgataatatt

SEQ ID NO: 1251293 - DNA, 15 bp, Homo sapiens
cggtggtgataatat

SEQ ID NO: 1251294 - DNA, 15 bp, Homo sapiens
acggtggtgataata

SEQ ID NO: 1251295 - DNA, 15 bp, Homo sapiens
tacggtggtgataat

SEQ ID NO: 1251296 - DNA, 15 bp, Homo sapiens
atacggtggtgataa

SEQ ID NO: 1251297 - DNA, 15 bp, Homo sapiens
catacggtggtgata

SEQ ID NO: 1251298 - DNA, 15 bp, Homo sapiens
tcatacggtggtgat

SEQ ID NO: 1251299 - DNA, 15 bp, Homo sapiens
ctcatacggtggtga

SEQ ID NO: 1251300 - DNA, 15 bp, Homo sapiens
cctcatacggtggtg

SEQ ID NO: 1251301 - DNA, 15 bp, Homo sapiens
ccctcatacggtggt

SEQ ID NO: 1251302 - DNA, 15 bp, Homo sapiens
gccctcatacggtgg

SEQ ID NO: 1251303 - DNA, 15 bp, Homo sapiens
agccctcatacggtg

SEQ ID NO: 1251304 - DNA, 15 bp, Homo sapiens
cagccctcatacggt

SEQ ID NO: 1251305 - DNA, 15 bp, Homo sapiens
acagccctcatacgg

SEQ ID NO: 1251306 - DNA, 15 bp, Homo sapiens
tacagccctcatacg

SEQ ID NO: 1251307 - DNA, 15 bp, Homo sapiens
gtacagccctcatac

SEQ ID NO: 1251308 - DNA, 15 bp, Homo sapiens
tgtacagccctcata

SEQ ID NO: 1251309 - DNA, 15 bp, Homo sapiens
atgtacagccctcat

SEQ ID NO: 1251310 - DNA, 15 bp, Homo sapiens
gatgtacagccctca

SEQ ID NO: 1251311 - DNA, 15 bp, Homo sapiens
agatgtacagccctc

SEQ ID NO: 1251312 - DNA, 15 bp, Homo sapiens
gagatgtacagccct

SEQ ID NO: 1251313 - DNA, 15 bp, Homo sapiens
tgagatgtacagccc

SEQ ID NO: 1251314 - DNA, 15 bp, Homo sapiens
atgagatgtacagcc

SEQ ID NO: 1251315 - DNA, 15 bp, Homo sapiens
aatgagatgtacagc

SEQ ID NO: 1251316 - DNA, 15 bp, Homo sapiens
aaatgagatgtacag

SEQ ID NO: 1251317 - DNA, 15 bp, Homo sapiens
aaaatgagatgtaca

SEQ ID NO: 1251318 - DNA, 15 bp, Homo sapiens
gaaaatgagatgtac

SEQ ID NO: 1251319 - DNA, 15 bp, Homo sapiens
tgaaaatgagatgta

SEQ ID NO: 1251320 - DNA, 15 bp, Homo sapiens
ctgaaaatgagatgt

SEQ ID NO: 1251321 - DNA, 15 bp, Homo sapiens
tctgaaaatgagatg

SEQ ID NO: 1251322 - DNA, 15 bp, Homo sapiens
atctgaaaatgagat

SEQ ID NO: 1251323 - DNA, 15 bp, Homo sapiens
tatctgaaaatgaga

SEQ ID NO: 1251324 - DNA, 15 bp, Homo sapiens
ttatctgaaaatgag

SEQ ID NO: 1251325 - DNA, 15 bp, Homo sapiens
cttatctgaaaatga

SEQ ID NO: 1251326 - DNA, 15 bp, Homo sapiens
tcttatctgaaaatg

SEQ ID NO: 1251327 - DNA, 15 bp, Homo sapiens
ttcttatctgaaaat

SEQ ID NO: 1251328 - DNA, 15 bp, Homo sapiens
tttcttatctgaaaa

SEQ ID NO: 1251329 - DNA, 15 bp, Homo sapiens
atttcttatctgaaa

SEQ ID NO: 1251330 - DNA, 15 bp, Homo sapiens
gatttcttatctgaa

SEQ ID NO: 1251331 - DNA, 15 bp, Homo sapiens
agatttcttatctga

SEQ ID NO: 1251332 - DNA, 15 bp, Homo sapiens
gagatttcttatctg

SEQ ID NO: 1251333 - DNA, 15 bp, Homo sapiens
tgagatttcttatct

SEQ ID NO: 1251334 - DNA, 15 bp, Homo sapiens
ctgagatttcttatc

SEQ ID NO: 1251335 - DNA, 15 bp, Homo sapiens
tctgagatttcttat

SEQ ID NO: 1251336 - DNA, 15 bp, Homo sapiens
ctctgagatttctta

SEQ ID NO: 1251337 - DNA, 15 bp, Homo sapiens
cctctgagatttctt

SEQ ID NO: 1251338 - DNA, 15 bp, Homo sapiens
ccctctgagatttct

SEQ ID NO: 1251339 - DNA, 15 bp, Homo sapiens
tccctctgagatttc

SEQ ID NO: 1251340 - DNA, 15 bp, Homo sapiens
ctccctctgagattt

SEQ ID NO: 1251341 - DNA, 15 bp, Homo sapiens
tctccctctgagatt

SEQ ID NO: 1251342 - DNA, 15 bp, Homo sapiens
ctctccctctgagat

SEQ ID NO: 1251343 - DNA, 15 bp, Homo sapiens
cctctccctctgaga

SEQ ID NO: 1251344 - DNA, 15 bp, Homo sapiens
ccctctccctctgag

SEQ ID NO: 1251345 - DNA, 15 bp, Homo sapiens
gccctctccctctga

SEQ ID NO: 1251346 - DNA, 15 bp, Homo sapiens
ggccctctccctctg

SEQ ID NO: 1251347 - DNA, 15 bp, Homo sapiens
cggccctctccctct

SEQ ID NO: 1251348 - DNA, 15 bp, Homo sapiens
acggccctctccctc

SEQ ID NO: 1251349 - DNA, 15 bp, Homo sapiens
cacggccctctccct

SEQ ID NO: 1251350 - DNA, 15 bp, Homo sapiens
acacggccctctccc

SEQ ID NO: 1251351 - DNA, 15 bp, Homo sapiens
tacacggccctctcc

SEQ ID NO: 1251352 - DNA, 15 bp, Homo sapiens
ttacacggccctctc

SEQ ID NO: 1251353 - DNA, 15 bp, Homo sapiens
gttacacggccctct

SEQ ID NO: 1251354 - DNA, 15 bp, Homo sapiens
tgttacacggccctc

SEQ ID NO: 1251355 - DNA, 15 bp, Homo sapiens
atgttacacggccct

SEQ ID NO: 1251356 - DNA, 15 bp, Homo sapiens
gatgttacacggccc

SEQ ID NO: 1251357 - DNA, 15 bp, Homo sapiens
tgatgttacacggcc

SEQ ID NO: 1251358 - DNA, 15 bp, Homo sapiens
atgatgttacacggc

SEQ ID NO: 1251359 - DNA, 15 bp, Homo sapiens
gatgatgttacacgg

SEQ ID NO: 1251360 - DNA, 15 bp, Homo sapiens
agatgatgttacacg

SEQ ID NO: 1251361 - DNA, 15 bp, Homo sapiens
cagatgatgttacac

SEQ ID NO: 1251362 - DNA, 15 bp, Homo sapiens
acagatgatgttaca

SEQ ID NO: 1251363 - DNA, 15 bp, Homo sapiens
cacagatgatgttac

SEQ ID NO: 1251364 - DNA, 15 bp, Homo sapiens
acacagatgatgtta

SEQ ID NO: 1251365 - DNA, 15 bp, Homo sapiens
cacacagatgatgtt

SEQ ID NO: 1251366 - DNA, 15 bp, Homo sapiens
acacacagatgatgt

SEQ ID NO: 1251367 - DNA, 15 bp, Homo sapiens
cacacacagatgatg

SEQ ID NO: 1251368 - DNA, 15 bp, Homo sapiens
tcacacacagatgat

SEQ ID NO: 1251369 - DNA, 15 bp, Homo sapiens
ttcacacacagatga

SEQ ID NO: 1251370 - DNA, 15 bp, Homo sapiens
gttcacacacagatg

SEQ ID NO: 1251371 - DNA, 15 bp, Homo sapiens
agttcacacacagat

SEQ ID NO: 1251372 - DNA, 15 bp, Homo sapiens
tagttcacacacaga

SEQ ID NO: 1251373 - DNA, 15 bp, Homo sapiens
atagttcacacacag

SEQ ID NO: 1251374 - DNA, 15 bp, Homo sapiens
catagttcacacaca

SEQ ID NO: 1251375 - DNA, 15 bp, Homo sapiens
acatagttcacacac

SEQ ID NO: 1251376 - DNA, 15 bp, Homo sapiens
gacatagttcacaca

SEQ ID NO: 1251377 - DNA, 15 bp, Homo sapiens
agacatagttcacac

SEQ ID NO: 1251378 - DNA, 15 bp, Homo sapiens
gagacatagttcaca

SEQ ID NO: 1251379 - DNA, 15 bp, Homo sapiens
tgagacatagttcac

SEQ ID NO: 1251380 - DNA, 15 bp, Homo sapiens
ctgagacatagttca

SEQ ID NO: 1251381 - DNA, 15 bp, Homo sapiens
cctgagacatagttc

SEQ ID NO: 1251382 - DNA, 15 bp, Homo sapiens
gcctgagacatagtt

SEQ ID NO: 1251383 - DNA, 15 bp, Homo sapiens
ggcctgagacatagt

SEQ ID NO: 1251384 - DNA, 15 bp, Homo sapiens
tggcctgagacatag

SEQ ID NO: 1251385 - DNA, 15 bp, Homo sapiens
atggcctgagacata

SEQ ID NO: 1251386 - DNA, 15 bp, Homo sapiens
tatggcctgagacat

SEQ ID NO: 1251387 - DNA, 15 bp, Homo sapiens
atatggcctgagaca

SEQ ID NO: 1251388 - DNA, 15 bp, Homo sapiens
tatatggcctgagac

SEQ ID NO: 1251389 - DNA, 15 bp, Homo sapiens
ttatatggcctgaga

SEQ ID NO: 1251390 - DNA, 15 bp, Homo sapiens
tttatatggcctgag

SEQ ID NO: 1251391 - DNA, 15 bp, Homo sapiens
ttttatatggcctga

SEQ ID NO: 1251392 - DNA, 15 bp, Homo sapiens
cttttatatggcctg

SEQ ID NO: 1251393 - DNA, 15 bp, Homo sapiens
tcttttatatggcct

SEQ ID NO: 1251394 - DNA, 15 bp, Homo sapiens
ttcttttatatggcc

SEQ ID NO: 1251395 - DNA, 15 bp, Homo sapiens
tttcttttatatggc

SEQ ID NO: 1251396 - DNA, 15 bp, Homo sapiens
ctttcttttatatgg

SEQ ID NO: 1251397 - DNA, 15 bp, Homo sapiens
cctttcttttatatg

SEQ ID NO: 1251398 - DNA, 15 bp, Homo sapiens
tcctttcttttatat

SEQ ID NO: 1251399 - DNA, 15 bp, Homo sapiens
ctcctttcttttata

SEQ ID NO: 1251400 - DNA, 15 bp, Homo sapiens
cctcctttcttttat

SEQ ID NO: 1251401 - DNA, 15 bp, Homo sapiens
acctcctttctttta

SEQ ID NO: 1251402 - DNA, 15 bp, Homo sapiens
aacctcctttctttt

SEQ ID NO: 1251403 - DNA, 15 bp, Homo sapiens
caacctcctttcttt

SEQ ID NO: 1251404 - DNA, 15 bp, Homo sapiens
tcaacctcctttctt

SEQ ID NO: 1251405 - DNA, 15 bp, Homo sapiens
ttcaacctcctttct

SEQ ID NO: 1251406 - DNA, 15 bp, Homo sapiens
cttcaacctcctttc

SEQ ID NO: 1251407 - DNA, 15 bp, Homo sapiens
acttcaacctccttt

SEQ ID NO: 1251408 - DNA, 15 bp, Homo sapiens
cacttcaacctcctt

SEQ ID NO: 1251409 - DNA, 15 bp, Homo sapiens
tcacttcaacctcct

SEQ ID NO: 1251410 - DNA, 15 bp, Homo sapiens
gtcacttcaacctcc

SEQ ID NO: 1251411 - DNA, 15 bp, Homo sapiens
tgtcacttcaacctc

SEQ ID NO: 1251412 - DNA, 15 bp, Homo sapiens
ctgtcacttcaacct

SEQ ID NO: 1251413 - DNA, 15 bp, Homo sapiens
tctgtcacttcaacc

SEQ ID NO: 1251414 - DNA, 15 bp, Homo sapiens
atctgtcacttcaac

SEQ ID NO: 1251415 - DNA, 15 bp, Homo sapiens
catctgtcacttcaa

SEQ ID NO: 1251416 - DNA, 15 bp, Homo sapiens
tcatctgtcacttca

SEQ ID NO: 1251417 - DNA, 15 bp, Homo sapiens
gtcatctgtcacttc

SEQ ID NO: 1251418 - DNA, 15 bp, Homo sapiens
tgtcatctgtcactt

SEQ ID NO: 1251419 - DNA, 15 bp, Homo sapiens
atgtcatctgtcact

SEQ ID NO: 1251420 - DNA, 15 bp, Homo sapiens
catgtcatctgtcac

SEQ ID NO: 1251421 - DNA, 15 bp, Homo sapiens
tcatgtcatctgtca

SEQ ID NO: 1251422 - DNA, 15 bp, Homo sapiens
atcatgtcatctgtc

SEQ ID NO: 1251423 - DNA, 15 bp, Homo sapiens
gatcatgtcatctgt

SEQ ID NO: 1251424 - DNA, 15 bp, Homo sapiens
ggatcatgtcatctg

SEQ ID NO: 1251425 - DNA, 15 bp, Homo sapiens
gggatcatgtcatct

SEQ ID NO: 1251426 - DNA, 15 bp, Homo sapiens
agggatcatgtcatc

SEQ ID NO: 1251427 - DNA, 15 bp, Homo sapiens
cagggatcatgtcat

SEQ ID NO: 1251428 - DNA, 15 bp, Homo sapiens
gcagggatcatgtca

SEQ ID NO: 1251429 - DNA, 15 bp, Homo sapiens
ggcagggatcatgtc

SEQ ID NO: 1251430 - DNA, 15 bp, Homo sapiens
gggcagggatcatgt

SEQ ID NO: 1251431 - DNA, 15 bp, Homo sapiens
agggcagggatcatg

SEQ ID NO: 1251432 - DNA, 15 bp, Homo sapiens
gagggcagggatcat

SEQ ID NO: 1251433 - DNA, 15 bp, Homo sapiens
ggagggcagggatca

SEQ ID NO: 1251434 - DNA, 15 bp, Homo sapiens
tggagggcagggatc

SEQ ID NO: 1251435 - DNA, 15 bp, Homo sapiens
ctggagggcagggat

SEQ ID NO: 1251436 - DNA, 15 bp, Homo sapiens
cctggagggcaggga

SEQ ID NO: 1251437 - DNA, 15 bp, Homo sapiens
ccctggagggcaggg

SEQ ID NO: 1251438 - DNA, 15 bp, Homo sapiens
cccctggagggcagg

SEQ ID NO: 1251439 - DNA, 15 bp, Homo sapiens
gcccctggagggcag

SEQ ID NO: 1251440 - DNA, 15 bp, Homo sapiens
ggcccctggagggca

SEQ ID NO: 1251441 - DNA, 15 bp, Homo sapiens
aggcccctggagggc

SEQ ID NO: 1251442 - DNA, 15 bp, Homo sapiens
caggcccctggaggg

SEQ ID NO: 1251443 - DNA, 15 bp, Homo sapiens
acaggcccctggagg

SEQ ID NO: 1251444 - DNA, 15 bp, Homo sapiens
cacaggcccctggag

SEQ ID NO: 1251445 - DNA, 15 bp, Homo sapiens
ccacaggcccctgga

SEQ ID NO: 1251446 - DNA, 15 bp, Homo sapiens
accacaggcccctgg

SEQ ID NO: 1251447 - DNA, 15 bp, Homo sapiens
aaccacaggcccctg

SEQ ID NO: 1251448 - DNA, 15 bp, Homo sapiens
caaccacaggcccct

SEQ ID NO: 1251449 - DNA, 15 bp, Homo sapiens
acaaccacaggcccc

SEQ ID NO: 1251450 - DNA, 15 bp, Homo sapiens
tacaaccacaggccc

SEQ ID NO: 1251451 - DNA, 15 bp, Homo sapiens
gtacaaccacaggcc

SEQ ID NO: 1251452 - DNA, 15 bp, Homo sapiens
tgtacaaccacaggc

SEQ ID NO: 1251453 - DNA, 15 bp, Homo sapiens
ctgtacaaccacagg

SEQ ID NO: 1251454 - DNA, 15 bp, Homo sapiens
actgtacaaccacag

SEQ ID NO: 1251455 - DNA, 15 bp, Homo sapiens
tactgtacaaccaca

SEQ ID NO: 1251456 - DNA, 15 bp, Homo sapiens
ctactgtacaaccac

SEQ ID NO: 1251457 - DNA, 15 bp, Homo sapiens
tctactgtacaacca

SEQ ID NO: 1251458 - DNA, 15 bp, Homo sapiens
ctctactgtacaacc

SEQ ID NO: 1251459 - DNA, 15 bp, Homo sapiens
tctctactgtacaac

SEQ ID NO: 1251460 - DNA, 15 bp, Homo sapiens
ctctctactgtacaa

SEQ ID NO: 1251461 - DNA, 15 bp, Homo sapiens
tctctctactgtaca

SEQ ID NO: 1251462 - DNA, 15 bp, Homo sapiens
ctctctctactgtac

SEQ ID NO: 1251463 - DNA, 15 bp, Homo sapiens
tctctctctactgta

SEQ ID NO: 1251464 - DNA, 15 bp, Homo sapiens
ttctctctctactgt

SEQ ID NO: 1251465 - DNA, 15 bp, Homo sapiens
cttctctctctactg

SEQ ID NO: 1251466 - DNA, 15 bp, Homo sapiens
ccttctctctctact

SEQ ID NO: 1251467 - DNA, 15 bp, Homo sapiens
cccttctctctctac

SEQ ID NO: 1251468 - DNA, 15 bp, Homo sapiens
ccccttctctctcta

SEQ ID NO: 1251469 - DNA, 15 bp, Homo sapiens
accccttctctctct

SEQ ID NO: 1251470 - DNA, 15 bp, Homo sapiens
aacaccccttctctc

SEQ ID NO: 1251471 - DNA, 15 bp, Homo sapiens
caacaccccttctct

SEQ ID NO: 1251472 - DNA, 15 bp, Homo sapiens
tcaacaccccttctc

SEQ ID NO: 1251473 - DNA, 15 bp, Homo sapiens
gtcaacaccccttct

SEQ ID NO: 1251474 - DNA, 15 bp, Homo sapiens
agtcaacaccccttc

SEQ ID NO: 1251475 - DNA, 15 bp, Homo sapiens
cagtcaacacccctt

SEQ ID NO: 1251476 - DNA, 15 bp, Homo sapiens
acagtcaacacccct

SEQ ID NO: 1251477 - DNA, 15 bp, Homo sapiens
aacagtcaacacccc

SEQ ID NO: 1251478 - DNA, 15 bp, Homo sapiens
gaacagtcaacaccc

SEQ ID NO: 1251479 - DNA, 15 bp, Homo sapiens
agaacagtcaacacc

SEQ ID NO: 1251480 - DNA, 15 bp, Homo sapiens
gagaacagtcaacac

SEQ ID NO: 1251481 - DNA, 15 bp, Homo sapiens
tgagaacagtcaaca

SEQ ID NO: 1251482 - DNA, 15 bp, Homo sapiens
ttgagaacagtcaac

SEQ ID NO: 1251483 - DNA, 15 bp, Homo sapiens
tttgagaacagtcaa

SEQ ID NO: 1251484 - DNA, 15 bp, Homo sapiens
ctttgagaacagtca

SEQ ID NO: 1251485 - DNA, 15 bp, Homo sapiens
gctttgagaacagtc

SEQ ID NO: 1251486 - DNA, 15 bp, Homo sapiens
tgctttgagaacagt

SEQ ID NO: 1251487 - DNA, 15 bp, Homo sapiens
ctgctttgagaacag

SEQ ID NO: 1251488 - DNA, 15 bp, Homo sapiens
actgctttgagaaca

SEQ ID NO: 1251489 - DNA, 15 bp, Homo sapiens
cactgctttgagaac

SEQ ID NO: 1251490 - DNA, 15 bp, Homo sapiens
gcactgctttgagaa

SEQ ID NO: 1251491 - DNA, 15 bp, Homo sapiens
tgcactgctttgaga

SEQ ID NO: 1251492 - DNA, 15 bp, Homo sapiens
ctgcactgctttgag

SEQ ID NO: 1251493 - DNA, 15 bp, Homo sapiens
cctgcactgctttga

SEQ ID NO: 1251494 - DNA, 15 bp, Homo sapiens
tcctgcactgctttg

SEQ ID NO: 1251495 - DNA, 15 bp, Homo sapiens
ctcctgcactgcttt

SEQ ID NO: 1251496 - DNA, 15 bp, Homo sapiens
cctcctgcactgctt

SEQ ID NO: 1251497 - DNA, 15 bp, Homo sapiens
ccctcctgcactgct

SEQ ID NO: 1251498 - DNA, 15 bp, Homo sapiens
tccctcctgcactgc

SEQ ID NO: 1251499 - DNA, 15 bp, Homo sapiens
ctccctcctgcactg

SEQ ID NO: 1251500 - DNA, 15 bp, Homo sapiens
gctccctcctgcact

SEQ ID NO: 1251501 - DNA, 15 bp, Homo sapiens
agctccctcctgcac

SEQ ID NO: 1251502 - DNA, 15 bp, Homo sapiens
cagctccctcctgca

SEQ ID NO: 1251503 - DNA, 15 bp, Homo sapiens
ccagctccctcctgc

SEQ ID NO: 1251504 - DNA, 15 bp, Homo sapiens
tccagctccctcctg

SEQ ID NO: 1251505 - DNA, 15 bp, Homo sapiens
ttccagctccctcct

SEQ ID NO: 1251506 - DNA, 15 bp, Homo sapiens
attccagctccctcc

SEQ ID NO: 1251507 - DNA, 15 bp, Homo sapiens
tattccagctccctc

SEQ ID NO: 1251508 - DNA, 15 bp, Homo sapiens
ctattccagctccct

SEQ ID NO: 1251509 - DNA, 15 bp, Homo sapiens
actattccagctccc

SEQ ID NO: 1251510 - DNA, 15 bp, Homo sapiens
tactattccagctcc

SEQ ID NO: 1251511 - DNA, 15 bp, Homo sapiens
ttactattccagctc

SEQ ID NO: 1251512 - DNA, 15 bp, Homo sapiens
gttactattccagct

SEQ ID NO: 1251513 - DNA, 15 bp, Homo sapiens
agttactattccagc

SEQ ID NO: 1251514 - DNA, 15 bp, Homo sapiens
cagttactattccag

SEQ ID NO: 1251515 - DNA, 15 bp, Homo sapiens
gcagttactattcca

SEQ ID NO: 1251516 - DNA, 15 bp, Homo sapiens
tgcagttactattcc

SEQ ID NO: 1251517 - DNA, 15 bp, Homo sapiens
ttgcagttactattc

SEQ ID NO: 1251518 - DNA, 15 bp, Homo sapiens
tttgcagttactatt

SEQ ID NO: 1251519 - DNA, 15 bp, Homo sapiens
gtttgcagttactat

SEQ ID NO: 1251520 - DNA, 15 bp, Homo sapiens
agtttgcagttacta

SEQ ID NO: 1251521 - DNA, 15 bp, Homo sapiens
aagtttgcagttact

SEQ ID NO: 1251522 - DNA, 15 bp, Homo sapiens
caagtttgcagttac

SEQ ID NO: 1251523 - DNA, 15 bp, Homo sapiens
ccaagtttgcagtta

SEQ ID NO: 1251524 - DNA, 15 bp, Homo sapiens
gccaagtttgcagtt

SEQ ID NO: 1251525 - DNA, 15 bp, Homo sapiens
tgccaagtttgcagt

SEQ ID NO: 1251526 - DNA, 15 bp, Homo sapiens
ctgccaagtttgcag

SEQ ID NO: 1251527 - DNA, 15 bp, Homo sapiens
cctgccaagtttgca

SEQ ID NO: 1251528 - DNA, 15 bp, Homo sapiens
gcctgccaagtttgc

SEQ ID NO: 1251529 - DNA, 15 bp, Homo sapiens
tgcctgccaagtttg

SEQ ID NO: 1251530 - DNA, 15 bp, Homo sapiens
ctgcctgccaagttt

SEQ ID NO: 1251531 - DNA, 15 bp, Homo sapiens
tctgcctgccaagtt

SEQ ID NO: 1251532 - DNA, 15 bp, Homo sapiens
ttctgcctgccaagt

SEQ ID NO: 1251533 - DNA, 15 bp, Homo sapiens
attctgcctgccaag

SEQ ID NO: 1251534 - DNA, 15 bp, Homo sapiens
gattctgcctgccaa

SEQ ID NO: 1251535 - DNA, 15 bp, Homo sapiens
ggattctgcctgcca

SEQ ID NO: 1251536 - DNA, 15 bp, Homo sapiens
tggattctgcctgcc

SEQ ID NO: 1251537 - DNA, 15 bp, Homo sapiens
ttggattctgcctgc

SEQ ID NO: 1251538 - DNA, 15 bp, Homo sapiens
gttggattctgcctg

SEQ ID NO: 1251539 - DNA, 15 bp, Homo sapiens
agttggattctgcct

SEQ ID NO: 1251540 - DNA, 15 bp, Homo sapiens
cagttggattctgcc

SEQ ID NO: 1251541 - DNA, 15 bp, Homo sapiens
ccagttggattctgc

SEQ ID NO: 1251542 - DNA, 15 bp, Homo sapiens
accagttggattctg

SEQ ID NO: 1251543 - DNA, 15 bp, Homo sapiens
aaccagttggattct

SEQ ID NO: 1251544 - DNA, 15 bp, Homo sapiens
gaaccagttggattc

SEQ ID NO: 1251545 - DNA, 15 bp, Homo sapiens
agaaccagttggatt

SEQ ID NO: 1251546 - DNA, 15 bp, Homo sapiens
tagaaccagttggat

SEQ ID NO: 1251547 - DNA, 15 bp, Homo sapiens
atagaaccagttgga

SEQ ID NO: 1251548 - DNA, 15 bp, Homo sapiens
aatagaaccagttgg

SEQ ID NO: 1251549 - DNA, 15 bp, Homo sapiens
aaatagaaccagttg

SEQ ID NO: 1251550 - DNA, 15 bp, Homo sapiens
taaatagaaccagtt

SEQ ID NO: 1251551 - DNA, 15 bp, Homo sapiens
ttaaatagaaccagt

SEQ ID NO: 1251552 - DNA, 15 bp, Homo sapiens
attaaatagaaccag

SEQ ID NO: 1251553 - DNA, 15 bp, Homo sapiens
aattaaatagaacca

SEQ ID NO: 1251554 - DNA, 15 bp, Homo sapiens
aaattaaatagaacc

SEQ ID NO: 1251555 - DNA, 15 bp, Homo sapiens
gaaattaaatagaac

SEQ ID NO: 1251556 - DNA, 15 bp, Homo sapiens
ggaaattaaatagaa

SEQ ID NO: 1251557 - DNA, 15 bp, Homo sapiens
tggaaattaaataga

SEQ ID NO: 1251558 - DNA, 15 bp, Homo sapiens
atggaaattaaatag

SEQ ID NO: 1251559 - DNA, 15 bp, Homo sapiens
aatggaaattaaata

SEQ ID NO: 1251560 - DNA, 15 bp, Homo sapiens
aaatggaaattaaat

SEQ ID NO: 1251561 - DNA, 15 bp, Homo sapiens
gaaatggaaattaaa

SEQ ID NO: 1251562 - DNA, 15 bp, Homo sapiens
ggaaatggaaattaa

SEQ ID NO: 1251563 - DNA, 15 bp, Homo sapiens
tggaaatggaaatta

SEQ ID NO: 1251564 - DNA, 15 bp, Homo sapiens
ttggaaatggaaatt

SEQ ID NO: 1251565 - DNA, 15 bp, Homo sapiens
tttggaaatggaaat

SEQ ID NO: 1251566 - DNA, 15 bp, Homo sapiens
ttttggaaatggaaa

SEQ ID NO: 1251567 - DNA, 15 bp, Homo sapiens
attttggaaatggaa

SEQ ID NO: 1251568 - DNA, 15 bp, Homo sapiens
aattttggaaatgga

SEQ ID NO: 1251569 - DNA, 15 bp, Homo sapiens
aaattttggaaatgg

SEQ ID NO: 1251570 - DNA, 15 bp, Homo sapiens
taaattttggaaatg

SEQ ID NO: 1251571 - DNA, 15 bp, Homo sapiens
gtaaattttggaaat

SEQ ID NO: 1251572 - DNA, 15 bp, Homo sapiens
agtaaattttggaaa

SEQ ID NO: 1251573 - DNA, 15 bp, Homo sapiens
gagtaaattttggaa

SEQ ID NO: 1251574 - DNA, 15 bp, Homo sapiens
ggagtaaattttgga

SEQ ID NO: 1251575 - DNA, 15 bp, Homo sapiens
gggagtaaattttgg

SEQ ID NO: 1251576 - DNA, 15 bp, Homo sapiens
ggggagtaaattttg

SEQ ID NO: 1251577 - DNA, 15 bp, Homo sapiens
aggggagtaaatttt

SEQ ID NO: 1251578 - DNA, 15 bp, Homo sapiens
aaggggagtaaattt

SEQ ID NO: 1251579 - DNA, 15 bp, Homo sapiens
aaaggggagtaaatt

SEQ ID NO: 1251580 - DNA, 15 bp, Homo sapiens
gaaaggggagtaaat

SEQ ID NO: 1251581 - DNA, 15 bp, Homo sapiens
agaaaggggagtaaa

SEQ ID NO: 1251582 - DNA, 15 bp, Homo sapiens
cagaaaggggagtaa

SEQ ID NO: 1251583 - DNA, 15 bp, Homo sapiens
acagaaaggggagta

SEQ ID NO: 1251584 - DNA, 15 bp, Homo sapiens
gacagaaaggggagt

SEQ ID NO: 1251585 - DNA, 15 bp, Homo sapiens
ggacagaaaggggag

SEQ ID NO: 1251586 - DNA, 15 bp, Homo sapiens
tggacagaaagggga

SEQ ID NO: 1251587 - DNA, 15 bp, Homo sapiens
atggacagaaagggg

SEQ ID NO: 1251588 - DNA, 15 bp, Homo sapiens
catggacagaaaggg

SEQ ID NO: 1251589 - DNA, 15 bp, Homo sapiens
acatggacagaaagg

SEQ ID NO: 1251590 - DNA, 15 bp, Homo sapiens
aacatggacagaaag

SEQ ID NO: 1251591 - DNA, 15 bp, Homo sapiens
caacatggacagaaa

SEQ ID NO: 1251592 - DNA, 15 bp, Homo sapiens
acaacatggacagaa

SEQ ID NO: 1251593 - DNA, 15 bp, Homo sapiens
aacaacatggacaga

SEQ ID NO: 1251594 - DNA, 15 bp, Homo sapiens
gaacaacatggacag

SEQ ID NO: 1251595 - DNA, 15 bp, Homo sapiens
ggaacaacatggaca

SEQ ID NO: 1251596 - DNA, 15 bp, Homo sapiens
gggaacaacatggac

SEQ ID NO: 1251597 - DNA, 15 bp, Homo sapiens
agggaacaacatgga

SEQ ID NO: 1251598 - DNA, 15 bp, Homo sapiens
aagggaacaacatgg

SEQ ID NO: 1251599 - DNA, 15 bp, Homo sapiens
aaagggaacaacatg

SEQ ID NO: 1251600 - DNA, 15 bp, Homo sapiens
taaagggaacaacat

SEQ ID NO: 1251601 - DNA, 15 bp, Homo sapiens
gtaaagggaacaaca

SEQ ID NO: 1251602 - DNA, 15 bp, Homo sapiens
ggtaaagggaacaac

SEQ ID NO: 1251603 - DNA, 15 bp, Homo sapiens
aggtaaagggaacaa

SEQ ID NO: 1251604 - DNA, 15 bp, Homo sapiens
caggtaaagggaaca

SEQ ID NO: 1251605 - DNA, 15 bp, Homo sapiens
tcaggtaaagggaac

SEQ ID NO: 1251606 - DNA, 15 bp, Homo sapiens
gtcaggtaaagggaa

SEQ ID NO: 1251607 - DNA, 15 bp, Homo sapiens
tgtcaggtaaaggga

SEQ ID NO: 1251608 - DNA, 15 bp, Homo sapiens
atgtcaggtaaaggg

SEQ ID NO: 1251609 - DNA, 15 bp, Homo sapiens
catgtcaggtaaagg

SEQ ID NO: 1251610 - DNA, 15 bp, Homo sapiens
acatgtcaggtaaag

SEQ ID NO: 1251611 - DNA, 15 bp, Homo sapiens
aacatgtcaggtaaa

SEQ ID NO: 1251612 - DNA, 15 bp, Homo sapiens
aaacatgtcaggtaa

SEQ ID NO: 1251613 - DNA, 15 bp, Homo sapiens
aaaacatgtcaggta

SEQ ID NO: 1251614 - DNA, 15 bp, Homo sapiens
aaaaacatgtcaggt

SEQ ID NO: 1251615 - DNA, 15 bp, Homo sapiens
aaaaaacatgtcagg

SEQ ID NO: 1251616 - DNA, 15 bp, Homo sapiens
gaaaaaacatgtcag

SEQ ID NO: 1251617 - DNA, 15 bp, Homo sapiens
agaaaaaacatgtca

SEQ ID NO: 1251618 - DNA, 15 bp, Homo sapiens
aagaaaaaacatgtc

SEQ ID NO: 1251619 - DNA, 15 bp, Homo sapiens
caagaaaaaacatgt

SEQ ID NO: 1251620 - DNA, 15 bp, Homo sapiens
gcaagaaaaaacatg

SEQ ID NO: 1251621 - DNA, 15 bp, Homo sapiens
ggcaagaaaaaacat

SEQ ID NO: 1251622 - DNA, 15 bp, Homo sapiens
tggcaagaaaaaaca

SEQ ID NO: 1251623 - DNA, 15 bp, Homo sapiens
ttggcaagaaaaaac

SEQ ID NO: 1251624 - DNA, 15 bp, Homo sapiens
gttggcaagaaaaaa

SEQ ID NO: 1251625 - DNA, 15 bp, Homo sapiens
ggttggcaagaaaaa

SEQ ID NO: 1251626 - DNA, 15 bp, Homo sapiens
gggttggcaagaaaa

SEQ ID NO: 1251627 - DNA, 15 bp, Homo sapiens
tgggttggcaagaaa

SEQ ID NO: 1251628 - DNA, 15 bp, Homo sapiens
gtgggttggcaagaa

SEQ ID NO: 1251629 - DNA, 15 bp, Homo sapiens
ggtgggttggcaaga

SEQ ID NO: 1251630 - DNA, 15 bp, Homo sapiens
aggtgggttggcaag

SEQ ID NO: 1251631 - DNA, 15 bp, Homo sapiens
caggtgggttggcaa

SEQ ID NO: 1251632 - DNA, 15 bp, Homo sapiens
acaggtgggttggca

SEQ ID NO: 1251633 - DNA, 15 bp, Homo sapiens
aacaggtgggttggc

SEQ ID NO: 1251634 - DNA, 15 bp, Homo sapiens
taacaggtgggttgg

SEQ ID NO: 1251635 - DNA, 15 bp, Homo sapiens
ataacaggtgggttg

SEQ ID NO: 1251636 - DNA, 15 bp, Homo sapiens
aataacaggtgggtt

SEQ ID NO: 1251637 - DNA, 15 bp, Homo sapiens
aaataacaggtgggt

SEQ ID NO: 1251638 - DNA, 15 bp, Homo sapiens
gaaataacaggtggg

SEQ ID NO: 1251639 - DNA, 15 bp, Homo sapiens
ggaaataacaggtgg

SEQ ID NO: 1251640 - DNA, 15 bp, Homo sapiens
gggaaataacaggtg

SEQ ID NO: 1251641 - DNA, 15 bp, Homo sapiens
ggggaaataacaggt

SEQ ID NO: 1251642 - DNA, 15 bp, Homo sapiens
tggggaaataacagg

SEQ ID NO: 1251643 - DNA, 15 bp, Homo sapiens
gtggggaaataacag

SEQ ID NO: 1251644 - DNA, 15 bp, Homo sapiens
agtggggaaataaca

SEQ ID NO: 1251645 - DNA, 15 bp, Homo sapiens
aagtggggaaataac

SEQ ID NO: 1251646 - DNA, 15 bp, Homo sapiens
caagtggggaaataa

SEQ ID NO: 1251647 - DNA, 15 bp, Homo sapiens
ccaagtggggaaata

SEQ ID NO: 1251648 - DNA, 15 bp, Homo sapiens
tccaagtggggaaat

SEQ ID NO: 1251649 - DNA, 15 bp, Homo sapiens
ttccaagtggggaaa

SEQ ID NO: 1251650 - DNA, 15 bp, Homo sapiens
tttccaagtggggaa

SEQ ID NO: 1251651 - DNA, 15 bp, Homo sapiens
gtttccaagtgggga

SEQ ID NO: 1251652 - DNA, 15 bp, Homo sapiens
ggtttccaagtgggg

SEQ ID NO: 1251653 - DNA, 15 bp, Homo sapiens
aggtttccaagtggg

SEQ ID NO: 1251654 - DNA, 15 bp, Homo sapiens
gaggtttccaagtgg

SEQ ID NO: 1251655 - DNA, 15 bp, Homo sapiens
agaggtttccaagtg

SEQ ID NO: 1251656 - DNA, 15 bp, Homo sapiens
tagaggtttccaagt

SEQ ID NO: 1251657 - DNA, 15 bp, Homo sapiens
atagaggtttccaag

SEQ ID NO: 1251658 - DNA, 15 bp, Homo sapiens
aatagaggtttccaa

SEQ ID NO: 1251659 - DNA, 15 bp, Homo sapiens
gaatagaggtttcca

SEQ ID NO: 1251660 - DNA, 15 bp, Homo sapiens
tgaatagaggtttcc

SEQ ID NO: 1251661 - DNA, 15 bp, Homo sapiens
atgaatagaggtttc

SEQ ID NO: 1251662 - DNA, 15 bp, Homo sapiens
gatgaatagaggttt

SEQ ID NO: 1251663 - DNA, 15 bp, Homo sapiens
agatgaatagaggtt

SEQ ID NO: 1251664 - DNA, 15 bp, Homo sapiens
tagatgaatagaggt

SEQ ID NO: 1251665 - DNA, 15 bp, Homo sapiens
ttagatgaatagagg

SEQ ID NO: 1251666 - DNA, 15 bp, Homo sapiens
cttagatgaatagag

SEQ ID NO: 1251667 - DNA, 15 bp, Homo sapiens
ccttagatgaataga

SEQ ID NO: 1251668 - DNA, 15 bp, Homo sapiens
accttagatgaatag

SEQ ID NO: 1251669 - DNA, 15 bp, Homo sapiens
gaccttagatgaata

SEQ ID NO: 1251670 - DNA, 15 bp, Homo sapiens
agaccttagatgaat

SEQ ID NO: 1251671 - DNA, 15 bp, Homo sapiens
tagaccttagatgaa

SEQ ID NO: 1251672 - DNA, 15 bp, Homo sapiens
ttagaccttagatga

SEQ ID NO: 1251673 - DNA, 15 bp, Homo sapiens
tttagaccttagatg

SEQ ID NO: 1251674 - DNA, 15 bp, Homo sapiens
atttagaccttagat

SEQ ID NO: 1251675 - DNA, 15 bp, Homo sapiens
gatttagaccttaga

SEQ ID NO: 1251676 - DNA, 15 bp, Homo sapiens
tgatttagaccttag

SEQ ID NO: 1251677 - DNA, 15 bp, Homo sapiens
atgatttagacctta

SEQ ID NO: 1251678 - DNA, 15 bp, Homo sapiens
tatgatttagacctt

SEQ ID NO: 1251679 - DNA, 15 bp, Homo sapiens
atatgatttagacct

SEQ ID NO: 1251680 - DNA, 15 bp, Homo sapiens
tatatgatttagacc

SEQ ID NO: 1251681 - DNA, 15 bp, Homo sapiens
atatatgatttagac

SEQ ID NO: 1251682 - DNA, 15 bp, Homo sapiens
catatatgatttaga

SEQ ID NO: 1251683 - DNA, 15 bp, Homo sapiens
acatatatgatttag

SEQ ID NO: 1251684 - DNA, 15 bp, Homo sapiens
aacatatatgattta

SEQ ID NO: 1251685 - DNA, 15 bp, Homo sapiens
caacatatatgattt

SEQ ID NO: 1251686 - DNA, 15 bp, Homo sapiens
gcaacatatatgatt

SEQ ID NO: 1251687 - DNA, 15 bp, Homo sapiens
ggcaacatatatgat

SEQ ID NO: 1251688 - DNA, 15 bp, Homo sapiens
aggcaacatatatga

SEQ ID NO: 1251689 - DNA, 15 bp, Homo sapiens
gaggcaacatatatg

SEQ ID NO: 1251690 - DNA, 15 bp, Homo sapiens
ggaggcaacatatat

SEQ ID NO: 1251691 - DNA, 15 bp, Homo sapiens
gggaggcaacatata

SEQ ID NO: 1251692 - DNA, 15 bp, Homo sapiens
agggaggcaacatat

SEQ ID NO: 1251693 - DNA, 15 bp, Homo sapiens
tagggaggcaacata

SEQ ID NO: 1251694 - DNA, 15 bp, Homo sapiens
ttagggaggcaacat

SEQ ID NO: 1251695 - DNA, 15 bp, Homo sapiens
tttagggaggcaaca

SEQ ID NO: 1251696 - DNA, 15 bp, Homo sapiens
ctttagggaggcaac

SEQ ID NO: 1251697 - DNA, 15 bp, Homo sapiens
gctttagggaggcaa

SEQ ID NO: 1251698 - DNA, 15 bp, Homo sapiens
ggctttagggaggca

SEQ ID NO: 1251699 - DNA, 15 bp, Homo sapiens
aggctttagggaggc

SEQ ID NO: 1251700 - DNA, 15 bp, Homo sapiens
aaggctttagggagg

SEQ ID NO: 1251701 - DNA, 15 bp, Homo sapiens
gaaggctttagggag

SEQ ID NO: 1251702 - DNA, 15 bp, Homo sapiens
ggaaggctttaggga

SEQ ID NO: 1251703 - DNA, 15 bp, Homo sapiens
aggaaggctttaggg

SEQ ID NO: 1251704 - DNA, 15 bp, Homo sapiens
gaggaaggctttagg

SEQ ID NO: 1251705 - DNA, 15 bp, Homo sapiens
ggaggaaggctttag

SEQ ID NO: 1251706 - DNA, 15 bp, Homo sapiens
aggaggaaggcttta

SEQ ID NO: 1251707 - DNA, 15 bp, Homo sapiens
caggaggaaggcttt

SEQ ID NO: 1251708 - DNA, 15 bp, Homo sapiens
acaggaggaaggctt

SEQ ID NO: 1251709 - DNA, 15 bp, Homo sapiens
gacaggaggaaggct

SEQ ID NO: 1251710 - DNA, 15 bp, Homo sapiens
agacaggaggaaggc

SEQ ID NO: 1251711 - DNA, 15 bp, Homo sapiens
gagacaggaggaagg

SEQ ID NO: 1251712 - DNA, 15 bp, Homo sapiens
agagacaggaggaag

SEQ ID NO: 1251713 - DNA, 15 bp, Homo sapiens
aagagacaggaggaa

SEQ ID NO: 1251714 - DNA, 15 bp, Homo sapiens
gaagagacaggagga

SEQ ID NO: 1251715 - DNA, 15 bp, Homo sapiens
ggaagagacaggagg

SEQ ID NO: 1251716 - DNA, 15 bp, Homo sapiens
tggaagagacaggag

SEQ ID NO: 1251717 - DNA, 15 bp, Homo sapiens
ttggaagagacagga

SEQ ID NO: 1251718 - DNA, 15 bp, Homo sapiens
cttggaagagacagg

SEQ ID NO: 1251719 - DNA, 15 bp, Homo sapiens
tcttggaagagacag

SEQ ID NO: 1251720 - DNA, 15 bp, Homo sapiens
gtcttggaagagaca

SEQ ID NO: 1251721 - DNA, 15 bp, Homo sapiens
agtcttggaagagac

SEQ ID NO: 1251722 - DNA, 15 bp, Homo sapiens
aagtcttggaagaga

SEQ ID NO: 1251723 - DNA, 15 bp, Homo sapiens
taagtcttggaagag

SEQ ID NO: 1251724 - DNA, 15 bp, Homo sapiens
ttaagtcttggaaga

SEQ ID NO: 1251725 - DNA, 15 bp, Homo sapiens
cttaagtcttggaag

SEQ ID NO: 1251726 - DNA, 15 bp, Homo sapiens
acttaagtcttggaa

SEQ ID NO: 1251727 - DNA, 15 bp, Homo sapiens
aacttaagtcttgga

SEQ ID NO: 1251728 - DNA, 15 bp, Homo sapiens
aaacttaagtcttgg

SEQ ID NO: 1251729 - DNA, 15 bp, Homo sapiens
gaaacttaagtcttg

SEQ ID NO: 1251730 - DNA, 15 bp, Homo sapiens
agaaacttaagtctt

SEQ ID NO: 1251731 - DNA, 15 bp, Homo sapiens
gagaaacttaagtct

SEQ ID NO: 1251732 - DNA, 15 bp, Homo sapiens
tgagaaacttaagtc

SEQ ID NO: 1251733 - DNA, 15 bp, Homo sapiens
gtgagaaacttaagt

SEQ ID NO: 1251734 - DNA, 15 bp, Homo sapiens
tgtgagaaacttaag

SEQ ID NO: 1251735 - DNA, 15 bp, Homo sapiens
gtgtgagaaacttaa

SEQ ID NO: 1251736 - DNA, 15 bp, Homo sapiens
agtgtgagaaactta

SEQ ID NO: 1251737 - DNA, 15 bp, Homo sapiens
cagtgtgagaaactt

SEQ ID NO: 1251738 - DNA, 15 bp, Homo sapiens
acagtgtgagaaact

SEQ ID NO: 1251739 - DNA, 15 bp, Homo sapiens
aacagtgtgagaaac

SEQ ID NO: 1251740 - DNA, 15 bp, Homo sapiens
taacagtgtgagaaa

SEQ ID NO: 1251741 - DNA, 15 bp, Homo sapiens
gtaacagtgtgagaa

SEQ ID NO: 1251742 - DNA, 15 bp, Homo sapiens
agtaacagtgtgaga

SEQ ID NO: 1251743 - DNA, 15 bp, Homo sapiens
tagtaacagtgtgag

SEQ ID NO: 1251744 - DNA, 15 bp, Homo sapiens
atagtaacagtgtga

SEQ ID NO: 1251745 - DNA, 15 bp, Homo sapiens
gatagtaacagtgtg

SEQ ID NO: 1251746 - DNA, 15 bp, Homo sapiens
agatagtaacagtgt

SEQ ID NO: 1251747 - DNA, 15 bp, Homo sapiens
gagatagtaacagtg

SEQ ID NO: 1251748 - DNA, 15 bp, Homo sapiens
tgagatagtaacagt

SEQ ID NO: 1251749 - DNA, 15 bp, Homo sapiens
ctgagatagtaacag

SEQ ID NO: 1251750 - DNA, 15 bp, Homo sapiens
tctgagatagtaaca

SEQ ID NO: 1251751 - DNA, 15 bp, Homo sapiens
ctctgagatagtaac

SEQ ID NO: 1251752 - DNA, 15 bp, Homo sapiens
tctctgagatagtaa

SEQ ID NO: 1251753 - DNA, 15 bp, Homo sapiens
atctctgagatagta

SEQ ID NO: 1251754 - DNA, 15 bp, Homo sapiens
catctctgagatagt

SEQ ID NO: 1251755 - DNA, 15 bp, Homo sapiens
ccatctctgagatag

SEQ ID NO: 1251756 - DNA, 15 bp, Homo sapiens
gccatctctgagata

SEQ ID NO: 1251757 - DNA, 15 bp, Homo sapiens
tgccatctctgagat

SEQ ID NO: 1251758 - DNA, 15 bp, Homo sapiens
ttgccatctctgaga

SEQ ID NO: 1251759 - DNA, 15 bp, Homo sapiens
gttgccatctctgag

SEQ ID NO: 1251760 - DNA, 15 bp, Homo sapiens
tgttgccatctctga

SEQ ID NO: 1251761 - DNA, 15 bp, Homo sapiens
ttgttgccatctctg

SEQ ID NO: 1251762 - DNA, 15 bp, Homo sapiens
attgttgccatctct

SEQ ID NO: 1251763 - DNA, 15 bp, Homo sapiens
gattgttgccatctc

SEQ ID NO: 1251764 - DNA, 15 bp, Homo sapiens
tgattgttgccatct

SEQ ID NO: 1251765 - DNA, 15 bp, Homo sapiens
gtgattgttgccatc

SEQ ID NO: 1251766 - DNA, 15 bp, Homo sapiens
tgtgattgttgccat

SEQ ID NO: 1251767 - DNA, 15 bp, Homo sapiens
atgtgattgttgcca

SEQ ID NO: 1251768 - DNA, 15 bp, Homo sapiens
aatgtgattgttgcc

SEQ ID NO: 1251769 - DNA, 15 bp, Homo sapiens
caatgtgattgttgc

SEQ ID NO: 1251770 - DNA, 15 bp, Homo sapiens
acaatgtgattgttg

SEQ ID NO: 1251771 - DNA, 15 bp, Homo sapiens
cacaatgtgattgtt

SEQ ID NO: 1251772 - DNA, 15 bp, Homo sapiens
acacaatgtgattgt

SEQ ID NO: 1251773 - DNA, 15 bp, Homo sapiens
aacacaatgtgattg

SEQ ID NO: 1251774 - DNA, 15 bp, Homo sapiens
aaacacaatgtgatt

SEQ ID NO: 1251775 - DNA, 15 bp, Homo sapiens
taaacacaatgtgat

SEQ ID NO: 1251776 - DNA, 15 bp, Homo sapiens
ataaacacaatgtga

SEQ ID NO: 1251777 - DNA, 15 bp, Homo sapiens
tataaacacaatgtg

SEQ ID NO: 1251778 - DNA, 15 bp, Homo sapiens
gtataaacacaatgt

SEQ ID NO: 1251779 - DNA, 15 bp, Homo sapiens
agtataaacacaatg

SEQ ID NO: 1251780 - DNA, 15 bp, Homo sapiens
aagtataaacacaat

SEQ ID NO: 1251781 - DNA, 15 bp, Homo sapiens
aaagtataaacacaa

SEQ ID NO: 1251782 - DNA, 15 bp, Homo sapiens
caaagtataaacaca

SEQ ID NO: 1251783 - DNA, 15 bp, Homo sapiens
ccaaagtataaacac

SEQ ID NO: 1251784 - DNA, 15 bp, Homo sapiens
cccaaagtataaaca

SEQ ID NO: 1251785 - DNA, 15 bp, Homo sapiens
acccaaagtataaac

SEQ ID NO: 1251786 - DNA, 15 bp, Homo sapiens
tacccaaagtataaa

SEQ ID NO: 1251787 - DNA, 15 bp, Homo sapiens
gtacccaaagtataa

SEQ ID NO: 1251788 - DNA, 15 bp, Homo sapiens
tgtacccaaagtata

SEQ ID NO: 1251789 - DNA, 15 bp, Homo sapiens
ctgtacccaaagtat

SEQ ID NO: 1251790 - DNA, 15 bp, Homo sapiens
tctgtacccaaagta

SEQ ID NO: 1251791 - DNA, 15 bp, Homo sapiens
ctctgtacccaaagt

SEQ ID NO: 1251792 - DNA, 15 bp, Homo sapiens
actctgtacccaaag

SEQ ID NO: 1251793 - DNA, 15 bp, Homo sapiens
tactctgtacccaaa

SEQ ID NO: 1251794 - DNA, 15 bp, Homo sapiens
atactctgtacccaa

SEQ ID NO: 1251795 - DNA, 15 bp, Homo sapiens
gatactctgtaccca

SEQ ID NO: 1251796 - DNA, 15 bp, Homo sapiens
tgatactctgtaccc

SEQ ID NO: 1251797 - DNA, 15 bp, Homo sapiens
ctgatactctgtacc

SEQ ID NO: 1251798 - DNA, 15 bp, Homo sapiens
tctgatactctgtac

SEQ ID NO: 1251799 - DNA, 15 bp, Homo sapiens
atctgatactctgta

SEQ ID NO: 1251800 - DNA, 15 bp, Homo sapiens
gatctgatactctgt

SEQ ID NO: 1251801 - DNA, 15 bp, Homo sapiens
tgatctgatactctg

SEQ ID NO: 1251802 - DNA, 15 bp, Homo sapiens
gtgatctgatactct

SEQ ID NO: 1251803 - DNA, 15 bp, Homo sapiens
tgtgatctgatactc

SEQ ID NO: 1251804 - DNA, 15 bp, Homo sapiens
ttgtgatctgatact

SEQ ID NO: 1251805 - DNA, 15 bp, Homo sapiens
attgtgatctgatac

SEQ ID NO: 1251806 - DNA, 15 bp, Homo sapiens
tattgtgatctgata

SEQ ID NO: 1251807 - DNA, 15 bp, Homo sapiens
ttattgtgatctgat

SEQ ID NO: 1251808 - DNA, 15 bp, Homo sapiens
cttattgtgatctga

SEQ ID NO: 1251809 - DNA, 15 bp, Homo sapiens
acttattgtgatctg

SEQ ID NO: 1251810 - DNA, 15 bp, Homo sapiens
aacttattgtgatct

SEQ ID NO: 1251811 - DNA, 15 bp, Homo sapiens
aaacttattgtgatc

SEQ ID NO: 1251812 - DNA, 15 bp, Homo sapiens
taaacttattgtgat

SEQ ID NO: 1251813 - DNA, 15 bp, Homo sapiens
gtaaacttattgtga

SEQ ID NO: 1251814 - DNA, 15 bp, Homo sapiens
agtaaacttattgtg

SEQ ID NO: 1251815 - DNA, 15 bp, Homo sapiens
aagtaaacttattgt

SEQ ID NO: 1251816 - DNA, 15 bp, Homo sapiens
gaagtaaacttattg

SEQ ID NO: 1251817 - DNA, 15 bp, Homo sapiens
agaagtaaacttatt

SEQ ID NO: 1251818 - DNA, 15 bp, Homo sapiens
aagaagtaaacttat

SEQ ID NO: 1251819 - DNA, 15 bp, Homo sapiens
gaagaagtaaactta

SEQ ID NO: 1251820 - DNA, 15 bp, Homo sapiens
tgaagaagtaaactt

SEQ ID NO: 1251821 - DNA, 15 bp, Homo sapiens
atgaagaagtaaact

SEQ ID NO: 1251822 - DNA, 15 bp, Homo sapiens
catgaagaagtaaac

SEQ ID NO: 1251823 - DNA, 15 bp, Homo sapiens
tcatgaagaagtaaa

SEQ ID NO: 1251824 - DNA, 15 bp, Homo sapiens
gtcatgaagaagtaa

SEQ ID NO: 1251825 - DNA, 15 bp, Homo sapiens
agtcatgaagaagta

SEQ ID NO: 1251826 - DNA, 15 bp, Homo sapiens
aagtcatgaagaagt

SEQ ID NO: 1251827 - DNA, 15 bp, Homo sapiens
taagtcatgaagaag

SEQ ID NO: 1251828 - DNA, 15 bp, Homo sapiens
ataagtcatgaagaa

SEQ ID NO: 1251829 - DNA, 15 bp, Homo sapiens
tataagtcatgaaga

SEQ ID NO: 1251830 - DNA, 15 bp, Homo sapiens
ttataagtcatgaag

SEQ ID NO: 1251831 - DNA, 15 bp, Homo sapiens
gttataagtcatgaa

SEQ ID NO: 1251832 - DNA, 15 bp, Homo sapiens
ggttataagtcatga

SEQ ID NO: 1251833 - DNA, 15 bp, Homo sapiens
aggttataagtcatg

SEQ ID NO: 1251834 - DNA, 15 bp, Homo sapiens
gaggttataagtcat

SEQ ID NO: 1251835 - DNA, 15 bp, Homo sapiens
tgaggttataagtca

SEQ ID NO: 1251836 - DNA, 15 bp, Homo sapiens
atgaggttataagtc

SEQ ID NO: 1251837 - DNA, 15 bp, Homo sapiens
catgaggttataagt

SEQ ID NO: 1251838 - DNA, 15 bp, Homo sapiens
ccatgaggttataag

SEQ ID NO: 1251839 - DNA, 15 bp, Homo sapiens
cccatgaggttataa

SEQ ID NO: 1251840 - DNA, 15 bp, Homo sapiens
tcccatgaggttata

SEQ ID NO: 1251841 - DNA, 15 bp, Homo sapiens
ctcccatgaggttat

SEQ ID NO: 1251842 - DNA, 15 bp, Homo sapiens
cctcccatgaggtta

SEQ ID NO: 1251843 - DNA, 15 bp, Homo sapiens
gcctcccatgaggtt

SEQ ID NO: 1251844 - DNA, 15 bp, Homo sapiens
tgcctcccatgaggt

SEQ ID NO: 1251845 - DNA, 15 bp, Homo sapiens
gtgcctcccatgagg

SEQ ID NO: 1251846 - DNA, 15 bp, Homo sapiens
tgtgcctcccatgag

SEQ ID NO: 1251847 - DNA, 15 bp, Homo sapiens
ttgtgcctcccatga

SEQ ID NO: 1251848 - DNA, 15 bp, Homo sapiens
cttgtgcctcccatg

SEQ ID NO: 1251849 - DNA, 15 bp, Homo sapiens
tcttgtgcctcccat

SEQ ID NO: 1251850 - DNA, 15 bp, Homo sapiens
atcttgtgcctccca

SEQ ID NO: 1251851 - DNA, 15 bp, Homo sapiens
tatcttgtgcctccc

SEQ ID NO: 1251852 - DNA, 15 bp, Homo sapiens
atatcttgtgcctcc

SEQ ID NO: 1251853 - DNA, 15 bp, Homo sapiens
tatatcttgtgcctc

SEQ ID NO: 1251854 - DNA, 15 bp, Homo sapiens
atatatcttgtgcct

SEQ ID NO: 1251855 - DNA, 15 bp, Homo sapiens
tatatatcttgtgcc

SEQ ID NO: 1251856 - DNA, 15 bp, Homo sapiens
atatatatcttgtgc

SEQ ID NO: 1251857 - DNA, 15 bp, Homo sapiens
tatatatatcttgtg

SEQ ID NO: 1251858 - DNA, 15 bp, Homo sapiens
atatatatatcttgt

SEQ ID NO: 1251859 - DNA, 15 bp, Homo sapiens
catatatatatcttg

SEQ ID NO: 1251860 - DNA, 15 bp, Homo sapiens
gcatatatatatctt

SEQ ID NO: 1251861 - DNA, 15 bp, Homo sapiens
tgcatatatatatct

SEQ ID NO: 1251862 - DNA, 15 bp, Homo sapiens
ttgcatatatatatc

SEQ ID NO: 1251863 - DNA, 15 bp, Homo sapiens
cttgcatatatatat

SEQ ID NO: 1251864 - DNA, 15 bp, Homo sapiens
acttgcatatatata

SEQ ID NO: 1251865 - DNA, 15 bp, Homo sapiens
cacttgcatatatat

SEQ ID NO: 1251866 - DNA, 15 bp, Homo sapiens
tcacttgcatatata

SEQ ID NO: 1251867 - DNA, 15 bp, Homo sapiens
ttcacttgcatatat

SEQ ID NO: 1251868 - DNA, 15 bp, Homo sapiens
tttcacttgcatata

SEQ ID NO: 1251869 - DNA, 15 bp, Homo sapiens
ctttcacttgcatat

SEQ ID NO: 1251870 - DNA, 15 bp, Homo sapiens
cctttcacttgcata

SEQ ID NO: 1251871 - DNA, 15 bp, Homo sapiens
ccctttcacttgcat

SEQ ID NO: 1251872 - DNA, 15 bp, Homo sapiens
gccctttcacttgca

SEQ ID NO: 1251873 - DNA, 15 bp, Homo sapiens
ggccctttcacttgc

SEQ ID NO: 1251874 - DNA, 15 bp, Homo sapiens
tggccctttcacttg

SEQ ID NO: 1251875 - DNA, 15 bp, Homo sapiens
atggccctttcactt

SEQ ID NO: 1251876 - DNA, 15 bp, Homo sapiens
tatggccctttcact

SEQ ID NO: 1251877 - DNA, 15 bp, Homo sapiens
atatggccctttcac

SEQ ID NO: 1251878 - DNA, 15 bp, Homo sapiens
catatggccctttca

SEQ ID NO: 1251879 - DNA, 15 bp, Homo sapiens
gcatatggccctttc

SEQ ID NO: 1251880 - DNA, 15 bp, Homo sapiens
tgcatatggcccttt

SEQ ID NO: 1251881 - DNA, 15 bp, Homo sapiens
atgcatatggccctt

SEQ ID NO: 1251882 - DNA, 15 bp, Homo sapiens
catgcatatggccct

SEQ ID NO: 1251883 - DNA, 15 bp, Homo sapiens
acatgcatatggccc

SEQ ID NO: 1251884 - DNA, 15 bp, Homo sapiens
aacatgcatatggcc

SEQ ID NO: 1251885 - DNA, 15 bp, Homo sapiens
aaacatgcatatggc

SEQ ID NO: 1251886 - DNA, 15 bp, Homo sapiens
cggaaacatgcatat

SEQ ID NO: 1251887 - DNA, 15 bp, Homo sapiens
tcggaaacatgcata

SEQ ID NO: 1251888 - DNA, 15 bp, Homo sapiens
ttcggaaacatgcat

SEQ ID NO: 1251889 - DNA, 15 bp, Homo sapiens
tttcggaaacatgca

SEQ ID NO: 1251890 - DNA, 15 bp, Homo sapiens
gtttcggaaacatgc

SEQ ID NO: 1251891 - DNA, 15 bp, Homo sapiens
agtttcggaaacatg

SEQ ID NO: 1251892 - DNA, 15 bp, Homo sapiens
cagtttcggaaacat

SEQ ID NO: 1251893 - DNA, 15 bp, Homo sapiens
acagtttcggaaaca

SEQ ID NO: 1251894 - DNA, 15 bp, Homo sapiens
tacagtttcggaaac

SEQ ID NO: 1251895 - DNA, 15 bp, Homo sapiens
ctacagtttcggaaa

SEQ ID NO: 1251896 - DNA, 15 bp, Homo sapiens
actacagtttcggaa

SEQ ID NO: 1251897 - DNA, 15 bp, Homo sapiens
aactacagtttcgga

SEQ ID NO: 1251898 - DNA, 15 bp, Homo sapiens
aaactacagtttcgg

SEQ ID NO: 1251899 - DNA, 15 bp, Homo sapiens
taaactacagtttcg

SEQ ID NO: 1251900 - DNA, 15 bp, Homo sapiens
ataaactacagtttc

SEQ ID NO: 1251901 - DNA, 15 bp, Homo sapiens
cataaactacagttt

SEQ ID NO: 1251902 - DNA, 15 bp, Homo sapiens
tcataaactacagtt

SEQ ID NO: 1251903 - DNA, 15 bp, Homo sapiens
ttcataaactacagt

SEQ ID NO: 1251904 - DNA, 15 bp, Homo sapiens
tttcataaactacag

SEQ ID NO: 1251905 - DNA, 15 bp, Homo sapiens
ttttcataaactaca

SEQ ID NO: 1251906 - DNA, 15 bp, Homo sapiens
tttttcataaactac

SEQ ID NO: 1251907 - DNA, 15 bp, Homo sapiens
atttttcataaacta

SEQ ID NO: 1251908 - DNA, 15 bp, Homo sapiens
tatttttcataaact

SEQ ID NO: 1251909 - DNA, 15 bp, Homo sapiens
atatttttcataaac

SEQ ID NO: 1251910 - DNA, 15 bp, Homo sapiens
gatatttttcataaa

SEQ ID NO: 1251911 - DNA, 15 bp, Homo sapiens
ggatatttttcataa

SEQ ID NO: 1251912 - DNA, 15 bp, Homo sapiens
gggatatttttcata

SEQ ID NO: 1251913 - DNA, 15 bp, Homo sapiens
tgggatatttttcat

SEQ ID NO: 1251914 - DNA, 15 bp, Homo sapiens
atgggatatttttca

SEQ ID NO: 1251915 - DNA, 15 bp, Homo sapiens
catgggatatttttc

SEQ ID NO: 1251916 - DNA, 15 bp, Homo sapiens
tcatgggatattttt

SEQ ID NO: 1251917 - DNA, 15 bp, Homo sapiens
atcatgggatatttt

SEQ ID NO: 1251918 - DNA, 15 bp, Homo sapiens
gatcatgggatattt

SEQ ID NO: 1251919 - DNA, 15 bp, Homo sapiens
tgatcatgggatatt

SEQ ID NO: 1251920 - DNA, 15 bp, Homo sapiens
ttgatcatgggatat

SEQ ID NO: 1251921 - DNA, 15 bp, Homo sapiens
tttgatcatgggata

SEQ ID NO: 1251922 - DNA, 15 bp, Homo sapiens
ctttgatcatgggat

SEQ ID NO: 1251923 - DNA, 15 bp, Homo sapiens
tctttgatcatggga

SEQ ID NO: 1251924 - DNA, 15 bp, Homo sapiens
ctctttgatcatggg

SEQ ID NO: 1251925 - DNA, 15 bp, Homo sapiens
tctctttgatcatgg

SEQ ID NO: 1251926 - DNA, 15 bp, Homo sapiens
ctctctttgatcatg

SEQ ID NO: 1251927 - DNA, 15 bp, Homo sapiens
tctctctttgatcat

SEQ ID NO: 1251928 - DNA, 15 bp, Homo sapiens
ttctctctttgatca

SEQ ID NO: 1251929 - DNA, 15 bp, Homo sapiens
tttctctctttgatc

SEQ ID NO: 1251930 - DNA, 15 bp, Homo sapiens
gtttctctctttgat

SEQ ID NO: 1251931 - DNA, 15 bp, Homo sapiens
agtttctctctttga

SEQ ID NO: 1251932 - DNA, 15 bp, Homo sapiens
gagtttctctctttg

SEQ ID NO: 1251933 - DNA, 15 bp, Homo sapiens
agagtttctctcttt

SEQ ID NO: 1251934 - DNA, 15 bp, Homo sapiens
cagagtttctctctt

SEQ ID NO: 1251935 - DNA, 15 bp, Homo sapiens
acagagtttctctct

SEQ ID NO: 1251936 - DNA, 15 bp, Homo sapiens
tacagagtttctctc

SEQ ID NO: 1251937 - DNA, 15 bp, Homo sapiens
atacagagtttctct

SEQ ID NO: 1251938 - DNA, 15 bp, Homo sapiens
aatacagagtttctc

SEQ ID NO: 1251939 - DNA, 15 bp, Homo sapiens
gaatacagagtttct

SEQ ID NO: 1251940 - DNA, 15 bp, Homo sapiens
agaatacagagtttc

SEQ ID NO: 1251941 - DNA, 15 bp, Homo sapiens
tagaatacagagttt

SEQ ID NO: 1251942 - DNA, 15 bp, Homo sapiens
atagaatacagagtt

SEQ ID NO: 1251943 - DNA, 15 bp, Homo sapiens
tatagaatacagagt

SEQ ID NO: 1251944 - DNA, 15 bp, Homo sapiens
ttatagaatacagag

SEQ ID NO: 1251945 - DNA, 15 bp, Homo sapiens
gttatagaatacaga

SEQ ID NO: 1251946 - DNA, 15 bp, Homo sapiens
ggttatagaatacag

SEQ ID NO: 1251947 - DNA, 15 bp, Homo sapiens
gggttatagaataca

SEQ ID NO: 1251948 - DNA, 15 bp, Homo sapiens
agggttatagaatac

SEQ ID NO: 1251949 - DNA, 15 bp, Homo sapiens
tagggttatagaata

SEQ ID NO: 1251950 - DNA, 15 bp, Homo sapiens
gtagggttatagaat

SEQ ID NO: 1251951 - DNA, 15 bp, Homo sapiens
agtagggttatagaa

SEQ ID NO: 1251952 - DNA, 15 bp, Homo sapiens
aagtagggttataga

SEQ ID NO: 1251953 - DNA, 15 bp, Homo sapiens
aaagtagggttatag

SEQ ID NO: 1251954 - DNA, 15 bp, Homo sapiens
taaagtagggttata

SEQ ID NO: 1251955 - DNA, 15 bp, Homo sapiens
ttaaagtagggttat

SEQ ID NO: 1251956 - DNA, 15 bp, Homo sapiens
cttaaagtagggtta

SEQ ID NO: 1251957 - DNA, 15 bp, Homo sapiens
acttaaagtagggtt

SEQ ID NO: 1251958 - DNA, 15 bp, Homo sapiens
tacttaaagtagggt

SEQ ID NO: 1251959 - DNA, 15 bp, Homo sapiens
atacttaaagtaggg

SEQ ID NO: 1251960 - DNA, 15 bp, Homo sapiens
catacttaaagtagg

SEQ ID NO: 1251961 - DNA, 15 bp, Homo sapiens
gcatacttaaagtag

SEQ ID NO: 1251962 - DNA, 15 bp, Homo sapiens
tgcatacttaaagta

SEQ ID NO: 1251963 - DNA, 15 bp, Homo sapiens
ttgcatacttaaagt

SEQ ID NO: 1251964 - DNA, 15 bp, Homo sapiens
tttgcatacttaaag

SEQ ID NO: 1251965 - DNA, 15 bp, Homo sapiens
atttgcatacttaaa

SEQ ID NO: 1251966 - DNA, 15 bp, Homo sapiens
aatttgcatacttaa

SEQ ID NO: 1251967 - DNA, 15 bp, Homo sapiens
gaatttgcatactta

SEQ ID NO: 1251968 - DNA, 15 bp, Homo sapiens
ggaatttgcatactt

SEQ ID NO: 1251969 - DNA, 15 bp, Homo sapiens
tggaatttgcatact

SEQ ID NO: 1251970 - DNA, 15 bp, Homo sapiens
atggaatttgcatac

SEQ ID NO: 1251971 - DNA, 15 bp, Homo sapiens
aatggaatttgcata

SEQ ID NO: 1251972 - DNA, 15 bp, Homo sapiens
taatggaatttgcat

SEQ ID NO: 1251973 - DNA, 15 bp, Homo sapiens
ataatggaatttgca

SEQ ID NO: 1251974 - DNA, 15 bp, Homo sapiens
gataatggaatttgc

SEQ ID NO: 1251975 - DNA, 15 bp, Homo sapiens
agataatggaatttg

SEQ ID NO: 1251976 - DNA, 15 bp, Homo sapiens
gagataatggaattt

SEQ ID NO: 1251977 - DNA, 15 bp, Homo sapiens
tgagataatggaatt

SEQ ID NO: 1251978 - DNA, 15 bp, Homo sapiens
atgagataatggaat

SEQ ID NO: 1251979 - DNA, 15 bp, Homo sapiens
aatgagataatggaa

SEQ ID NO: 1251980 - DNA, 15 bp, Homo sapiens
taatgagataatgga

SEQ ID NO: 1251981 - DNA, 15 bp, Homo sapiens
ctaatgagataatgg

SEQ ID NO: 1251982 - DNA, 15 bp, Homo sapiens
tctaatgagataatg

SEQ ID NO: 1251983 - DNA, 15 bp, Homo sapiens
ttctaatgagataat

SEQ ID NO: 1251984 - DNA, 15 bp, Homo sapiens
tttctaatgagataa

SEQ ID NO: 1251985 - DNA, 15 bp, Homo sapiens
gtttctaatgagata

SEQ ID NO: 1251986 - DNA, 15 bp, Homo sapiens
agtttctaatgagat

SEQ ID NO: 1251987 - DNA, 15 bp, Homo sapiens
aagtttctaatgaga

SEQ ID NO: 1251988 - DNA, 15 bp, Homo sapiens
aaagtttctaatgag

SEQ ID NO: 1251989 - DNA, 15 bp, Homo sapiens
caaagtttctaatga

SEQ ID NO: 1251990 - DNA, 15 bp, Homo sapiens
ccaaagtttctaatg

SEQ ID NO: 1251991 - DNA, 15 bp, Homo sapiens
tccaaagtttctaat

SEQ ID NO: 1251992 - DNA, 15 bp, Homo sapiens
ttccaaagtttctaa

SEQ ID NO: 1251993 - DNA, 15 bp, Homo sapiens
tttccaaagtttcta

SEQ ID NO: 1251994 - DNA, 15 bp, Homo sapiens
ttttccaaagtttct

SEQ ID NO: 1251995 - DNA, 15 bp, Homo sapiens
attttccaaagtttc

SEQ ID NO: 1251996 - DNA, 15 bp, Homo sapiens
gattttccaaagttt

SEQ ID NO: 1251997 - DNA, 15 bp, Homo sapiens
ggattttccaaagtt

SEQ ID NO: 1251998 - DNA, 15 bp, Homo sapiens
aggattttccaaagt

SEQ ID NO: 1251999 - DNA, 15 bp, Homo sapiens
caggattttccaaag

SEQ ID NO: 1252000 - DNA, 15 bp, Homo sapiens
gcaggattttccaaa

SEQ ID NO: 1252001 - DNA, 15 bp, Homo sapiens
tgcaggattttccaa

SEQ ID NO: 1252002 - DNA, 15 bp, Homo sapiens
ttgcaggattttcca

SEQ ID NO: 1252003 - DNA, 15 bp, Homo sapiens
tttgcaggattttcc

SEQ ID NO: 1252004 - DNA, 15 bp, Homo sapiens
ttttgcaggattttc

SEQ ID NO: 1252005 - DNA, 15 bp, Homo sapiens
tttttgcaggatttt

SEQ ID NO: 1252006 - DNA, 15 bp, Homo sapiens
atttttgcaggattt

SEQ ID NO: 1252007 - DNA, 15 bp, Homo sapiens
catttttgcaggatt

SEQ ID NO: 1252008 - DNA, 15 bp, Homo sapiens
tcatttttgcaggat

SEQ ID NO: 1252009 - DNA, 15 bp, Homo sapiens
ttcatttttgcagga

SEQ ID NO: 1252010 - DNA, 15 bp, Homo sapiens
tttcatttttgcagg

SEQ ID NO: 1252011 - DNA, 15 bp, Homo sapiens
gtttcatttttgcag

SEQ ID NO: 1252012 - DNA, 15 bp, Homo sapiens
ggtttcatttttgca

SEQ ID NO: 1252013 - DNA, 15 bp, Homo sapiens
gggtttcatttttgc

SEQ ID NO: 1252014 - DNA, 15 bp, Homo sapiens
tgggtttcatttttg

SEQ ID NO: 1252015 - DNA, 15 bp, Homo sapiens
ctgggtttcattttt

SEQ ID NO: 1252016 - DNA, 15 bp, Homo sapiens
actgggtttcatttt

SEQ ID NO: 1252017 - DNA, 15 bp, Homo sapiens
gactgggtttcattt

SEQ ID NO: 1252018 - DNA, 15 bp, Homo sapiens
tgactgggtttcatt

SEQ ID NO: 1252019 - DNA, 15 bp, Homo sapiens
ttgactgggtttcat

SEQ ID NO: 1252020 - DNA, 15 bp, Homo sapiens
attgactgggtttca

SEQ ID NO: 1252021 - DNA, 15 bp, Homo sapiens
cattgactgggtttc

SEQ ID NO: 1252022 - DNA, 15 bp, Homo sapiens
gcattgactgggttt

SEQ ID NO: 1252023 - DNA, 15 bp, Homo sapiens
tgcattgactgggtt

SEQ ID NO: 1252024 - DNA, 15 bp, Homo sapiens
ttgcattgactgggt

SEQ ID NO: 1252025 - DNA, 15 bp, Homo sapiens
attgcattgactggg

SEQ ID NO: 1252026 - DNA, 15 bp, Homo sapiens
cattgcattgactgg

SEQ ID NO: 1252027 - DNA, 15 bp, Homo sapiens
acattgcattgactg

SEQ ID NO: 1252028 - DNA, 15 bp, Homo sapiens
aacattgcattgact

SEQ ID NO: 1252029 - DNA, 15 bp, Homo sapiens
aaacattgcattgac

SEQ ID NO: 1252030 - DNA, 15 bp, Homo sapiens
gaaacattgcattga

SEQ ID NO: 1252031 - DNA, 15 bp, Homo sapiens
ggaaacattgcattg

SEQ ID NO: 1252032 - DNA, 15 bp, Homo sapiens
aggaaacattgcatt

SEQ ID NO: 1252033 - DNA, 15 bp, Homo sapiens
taggaaacattgcat

SEQ ID NO: 1252034 - DNA, 15 bp, Homo sapiens
ttaggaaacattgca

SEQ ID NO: 1252035 - DNA, 15 bp, Homo sapiens
tttaggaaacattgc

SEQ ID NO: 1252036 - DNA, 15 bp, Homo sapiens
ttttaggaaacattg

SEQ ID NO: 1252037 - DNA, 15 bp, Homo sapiens
gttttaggaaacatt

SEQ ID NO: 1252038 - DNA, 15 bp, Homo sapiens
agttttaggaaacat

SEQ ID NO: 1252039 - DNA, 15 bp, Homo sapiens
aagttttaggaaaca

SEQ ID NO: 1252040 - DNA, 15 bp, Homo sapiens
taagttttaggaaac

SEQ ID NO: 1252041 - DNA, 15 bp, Homo sapiens
gtaagttttaggaaa

SEQ ID NO: 1252042 - DNA, 15 bp, Homo sapiens
agtaagttttaggaa

SEQ ID NO: 1252043 - DNA, 15 bp, Homo sapiens
aagtaagttttagga

SEQ ID NO: 1252044 - DNA, 15 bp, Homo sapiens
taagtaagttttagg

SEQ ID NO: 1252045 - DNA, 15 bp, Homo sapiens
gtaagtaagttttag

SEQ ID NO: 1252046 - DNA, 15 bp, Homo sapiens
ggtaagtaagtttta

SEQ ID NO: 1252047 - DNA, 15 bp, Homo sapiens
gggtaagtaagtttt

SEQ ID NO: 1252048 - DNA, 15 bp, Homo sapiens
tgggtaagtaagttt

SEQ ID NO: 1252049 - DNA, 15 bp, Homo sapiens
gtgggtaagtaagtt

SEQ ID NO: 1252050 - DNA, 15 bp, Homo sapiens
cgtgggtaagtaagt

SEQ ID NO: 1252051 - DNA, 15 bp, Homo sapiens
ccgtgggtaagtaag

SEQ ID NO: 1252052 - DNA, 15 bp, Homo sapiens
tccgtgggtaagtaa

SEQ ID NO: 1252053 - DNA, 15 bp, Homo sapiens
ttccgtgggtaagta

SEQ ID NO: 1252054 - DNA, 15 bp, Homo sapiens
gttccgtgggtaagt

SEQ ID NO: 1252055 - DNA, 15 bp, Homo sapiens
agttccgtgggtaag

SEQ ID NO: 1252056 - DNA, 15 bp, Homo sapiens
gagttccgtgggtaa

SEQ ID NO: 1252057 - DNA, 15 bp, Homo sapiens
agagttccgtgggta

SEQ ID NO: 1252058 - DNA, 15 bp, Homo sapiens
aagagttccgtgggt

SEQ ID NO: 1252059 - DNA, 15 bp, Homo sapiens
aaagagttccgtggg

SEQ ID NO: 1252060 - DNA, 15 bp, Homo sapiens
aaaagagttccgtgg

SEQ ID NO: 1252061 - DNA, 15 bp, Homo sapiens
aaaaagagttccgtg

SEQ ID NO: 1252062 - DNA, 15 bp, Homo sapiens
taaaaagagttccgt

SEQ ID NO: 1252063 - DNA, 15 bp, Homo sapiens
ttaaaaagagttccg

SEQ ID NO: 1252064 - DNA, 15 bp, Homo sapiens
attaaaaagagttcc

SEQ ID NO: 1252065 - DNA, 15 bp, Homo sapiens
cattaaaaagagttc

SEQ ID NO: 1252066 - DNA, 15 bp, Homo sapiens
tcattaaaaagagtt

SEQ ID NO: 1252067 - DNA, 15 bp, Homo sapiens
ttcattaaaaagagt

SEQ ID NO: 1252068 - DNA, 15 bp, Homo sapiens
tttcattaaaaagag

SEQ ID NO: 1252069 - DNA, 15 bp, Homo sapiens
atttcattaaaaaga

SEQ ID NO: 1252070 - DNA, 15 bp, Homo sapiens
tatttcattaaaaag

SEQ ID NO: 1252071 - DNA, 15 bp, Homo sapiens
gtatttcattaaaaa

SEQ ID NO: 1252072 - DNA, 15 bp, Homo sapiens
ggtatttcattaaaa

SEQ ID NO: 1252073 - DNA, 15 bp, Homo sapiens
aggtatttcattaaa

SEQ ID NO: 1252074 - DNA, 15 bp, Homo sapiens
taggtatttcattaa

SEQ ID NO: 1252075 - DNA, 15 bp, Homo sapiens
ctaggtatttcatta

SEQ ID NO: 1252076 - DNA, 15 bp, Homo sapiens
gctaggtatttcatt

SEQ ID NO: 1252077 - DNA, 15 bp, Homo sapiens
tgctaggtatttcat

SEQ ID NO: 1252078 - DNA, 15 bp, Homo sapiens
ttgctaggtatttca

SEQ ID NO: 1252079 - DNA, 15 bp, Homo sapiens
gttgctaggtatttc

SEQ ID NO: 1252080 - DNA, 15 bp, Homo sapiens
tgttgctaggtattt

SEQ ID NO: 1252081 - DNA, 15 bp, Homo sapiens
atgttgctaggtatt

SEQ ID NO: 1252082 - DNA, 15 bp, Homo sapiens
aatgttgctaggtat

SEQ ID NO: 1252083 - DNA, 15 bp, Homo sapiens
taatgttgctaggta

SEQ ID NO: 1252084 - DNA, 15 bp, Homo sapiens
ataatgttgctaggt

SEQ ID NO: 1252085 - DNA, 15 bp, Homo sapiens
gataatgttgctagg

SEQ ID NO: 1252086 - DNA, 15 bp, Homo sapiens
agataatgttgctag

SEQ ID NO: 1252087 - DNA, 15 bp, Homo sapiens
aagataatgttgcta

SEQ ID NO: 1252088 - DNA, 15 bp, Homo sapiens
taagataatgttgct

SEQ ID NO: 1252089 - DNA, 15 bp, Homo sapiens
ataagataatgttgc

SEQ ID NO: 1252090 - DNA, 15 bp, Homo sapiens
gataagataatgttg

SEQ ID NO: 1252091 - DNA, 15 bp, Homo sapiens
cgataagataatgtt

SEQ ID NO: 1252092 - DNA, 15 bp, Homo sapiens
acgataagataatgt

SEQ ID NO: 1252093 - DNA, 15 bp, Homo sapiens
cacgataagataatg

SEQ ID NO: 1252094 - DNA, 15 bp, Homo sapiens
tcacgataagataat

SEQ ID NO: 1252095 - DNA, 15 bp, Homo sapiens
ctcacgataagataa

SEQ ID NO: 1252096 - DNA, 15 bp, Homo sapiens
actcacgataagata

SEQ ID NO: 1252097 - DNA, 15 bp, Homo sapiens
cactcacgataagat

SEQ ID NO: 1252098 - DNA, 15 bp, Homo sapiens
ccactcacgataaga

SEQ ID NO: 1252099 - DNA, 15 bp, Homo sapiens
accactcacgataag

SEQ ID NO: 1252100 - DNA, 15 bp, Homo sapiens
taccactcacgataa

SEQ ID NO: 1252101 - DNA, 15 bp, Homo sapiens
ctaccactcacgata

SEQ ID NO: 1252102 - DNA, 15 bp, Homo sapiens
actaccactcacgat

SEQ ID NO: 1252103 - DNA, 15 bp, Homo sapiens
aactaccactcacga

SEQ ID NO: 1252104 - DNA, 15 bp, Homo sapiens
aaactaccactcacg

SEQ ID NO: 1252105 - DNA, 15 bp, Homo sapiens
aaaactaccactcac

SEQ ID NO: 1252106 - DNA, 15 bp, Homo sapiens
gaaaactaccactca

SEQ ID NO: 1252107 - DNA, 15 bp, Homo sapiens
ggaaaactaccactc

SEQ ID NO: 1252108 - DNA, 15 bp, Homo sapiens
tggaaaactaccact

SEQ ID NO: 1252109 - DNA, 15 bp, Homo sapiens
atggaaaactaccac

SEQ ID NO: 1252110 - DNA, 15 bp, Homo sapiens
catggaaaactacca

SEQ ID NO: 1252111 - DNA, 15 bp, Homo sapiens
ccatggaaaactacc

SEQ ID NO: 1252112 - DNA, 15 bp, Homo sapiens
tccatggaaaactac

SEQ ID NO: 1252113 - DNA, 15 bp, Homo sapiens
ttccatggaaaacta

SEQ ID NO: 1252114 - DNA, 15 bp, Homo sapiens
attccatggaaaact

SEQ ID NO: 1252115 - DNA, 15 bp, Homo sapiens
tattccatggaaaac

SEQ ID NO: 1252116 - DNA, 15 bp, Homo sapiens
gtattccatggaaaa

SEQ ID NO: 1252117 - DNA, 15 bp, Homo sapiens
tgtattccatggaaa

SEQ ID NO: 1252118 - DNA, 15 bp, Homo sapiens
ctgtattccatggaa

SEQ ID NO: 1252119 - DNA, 15 bp, Homo sapiens
actgtattccatgga

SEQ ID NO: 1252120 - DNA, 15 bp, Homo sapiens
aactgtattccatgg

SEQ ID NO: 1252121 - DNA, 15 bp, Homo sapiens
caactgtattccatg

SEQ ID NO: 1252122 - DNA, 15 bp, Homo sapiens
ccaactgtattccat

SEQ ID NO: 1252123 - DNA, 15 bp, Homo sapiens
cccaactgtattcca

SEQ ID NO: 1252124 - DNA, 15 bp, Homo sapiens
tcccaactgtattcc

SEQ ID NO: 1252125 - DNA, 15 bp, Homo sapiens
atcccaactgtattc

SEQ ID NO: 1252126 - DNA, 15 bp, Homo sapiens
tatcccaactgtatt

SEQ ID NO: 1252127 - DNA, 15 bp, Homo sapiens
ttatcccaactgtat

SEQ ID NO: 1252128 - DNA, 15 bp, Homo sapiens
attatcccaactgta

SEQ ID NO: 1252129 - DNA, 15 bp, Homo sapiens
tattatcccaactgt

SEQ ID NO: 1252130 - DNA, 15 bp, Homo sapiens
ttattatcccaactg

SEQ ID NO: 1252131 - DNA, 15 bp, Homo sapiens
gttattatcccaact

SEQ ID NO: 1252132 - DNA, 15 bp, Homo sapiens
agttattatcccaac

SEQ ID NO: 1252133 - DNA, 15 bp, Homo sapiens
tagttattatcccaa

SEQ ID NO: 1252134 - DNA, 15 bp, Homo sapiens
ctagttattatccca

SEQ ID NO: 1252135 - DNA, 15 bp, Homo sapiens
actagttattatccc

SEQ ID NO: 1252136 - DNA, 15 bp, Homo sapiens
tactagttattatcc

SEQ ID NO: 1252137 - DNA, 15 bp, Homo sapiens
atactagttattatc

SEQ ID NO: 1252138 - DNA, 15 bp, Homo sapiens
tatactagttattat

SEQ ID NO: 1252139 - DNA, 15 bp, Homo sapiens
atatactagttatta

SEQ ID NO: 1252140 - DNA, 15 bp, Homo sapiens
tatatactagttatt

SEQ ID NO: 1252141 - DNA, 15 bp, Homo sapiens
ttatatactagttat

SEQ ID NO: 1252142 - DNA, 15 bp, Homo sapiens
attatatactagtta

SEQ ID NO: 1252143 - DNA, 15 bp, Homo sapiens
aattatatactagtt

SEQ ID NO: 1252144 - DNA, 15 bp, Homo sapiens
taattatatactagt

SEQ ID NO: 1252145 - DNA, 15 bp, Homo sapiens
ataattatatactag

SEQ ID NO: 1252146 - DNA, 15 bp, Homo sapiens
tataattatatacta

SEQ ID NO: 1252147 - DNA, 15 bp, Homo sapiens
atataattatatact

SEQ ID NO: 1252148 - DNA, 15 bp, Homo sapiens
tatataattatatac

SEQ ID NO: 1252149 - DNA, 15 bp, Homo sapiens
ttatataattatata

SEQ ID NO: 1252150 - DNA, 15 bp, Homo sapiens
attatataattatat

SEQ ID NO: 1252151 - DNA, 15 bp, Homo sapiens
tattatataattata

SEQ ID NO: 1252152 - DNA, 15 bp, Homo sapiens
ttattatataattat

SEQ ID NO: 1252153 - DNA, 15 bp, Homo sapiens
attattatataatta

SEQ ID NO: 1252154 - DNA, 15 bp, Homo sapiens
tattattatataatt

SEQ ID NO: 1252155 - DNA, 15 bp, Homo sapiens
ttattattatataat

SEQ ID NO: 1252156 - DNA, 15 bp, Homo sapiens
gttattattatataa

SEQ ID NO: 1252157 - DNA, 15 bp, Homo sapiens
agttattattatata

SEQ ID NO: 1252158 - DNA, 15 bp, Homo sapiens
gagttattattatat

SEQ ID NO: 1252159 - DNA, 15 bp, Homo sapiens
tgagttattattata

SEQ ID NO: 1252160 - DNA, 15 bp, Homo sapiens
ttgagttattattat

SEQ ID NO: 1252161 - DNA, 15 bp, Homo sapiens
tttgagttattatta

SEQ ID NO: 1252162 - DNA, 15 bp, Homo sapiens
ttttgagttattatt

SEQ ID NO: 1252163 - DNA, 15 bp, Homo sapiens
tttttgagttattat

SEQ ID NO: 1252164 - DNA, 15 bp, Homo sapiens
ttttttgagttatta

SEQ ID NO: 1252165 - DNA, 15 bp, Homo sapiens
cttttttgagttatt

SEQ ID NO: 1252166 - DNA, 15 bp, Homo sapiens
acttttttgagttat

SEQ ID NO: 1252167 - DNA, 15 bp, Homo sapiens
cacttttttgagtta

SEQ ID NO: 1252168 - DNA, 15 bp, Homo sapiens
gcacttttttgagtt

SEQ ID NO: 1252169 - DNA, 15 bp, Homo sapiens
tgcacttttttgagt

SEQ ID NO: 1252170 - DNA, 15 bp, Homo sapiens
atgcacttttttgag

SEQ ID NO: 1252171 - DNA, 15 bp, Homo sapiens
tatgcacttttttga

SEQ ID NO: 1252172 - DNA, 15 bp, Homo sapiens
ttatgcacttttttg

SEQ ID NO: 1252173 - DNA, 15 bp, Homo sapiens
tttatgcactttttt

SEQ ID NO: 1252174 - DNA, 15 bp, Homo sapiens
atttatgcacttttt

SEQ ID NO: 1252175 - DNA, 15 bp, Homo sapiens
catttatgcactttt

SEQ ID NO: 1252176 - DNA, 15 bp, Homo sapiens
gcatttatgcacttt

SEQ ID NO: 1252177 - DNA, 15 bp, Homo sapiens
ggcatttatgcactt

SEQ ID NO: 1252178 - DNA, 15 bp, Homo sapiens
attccttacctggga

SEQ ID NO: 1252179 - DNA, 15 bp, Homo sapiens
cattccttacctggg

SEQ ID NO: 1252180 - DNA, 15 bp, Homo sapiens
ccattccttacctgg

SEQ ID NO: 1252181 - DNA, 15 bp, Homo sapiens
tccattccttacctg

SEQ ID NO: 1252182 - DNA, 15 bp, Homo sapiens
atccattccttacct

SEQ ID NO: 1252183 - DNA, 15 bp, Homo sapiens
aatccattccttacc

SEQ ID NO: 1252184 - DNA, 15 bp, Homo sapiens
aaatccattccttac

SEQ ID NO: 1252185 - DNA, 15 bp, Homo sapiens
aaaatccattcctta

SEQ ID NO: 1252186 - DNA, 15 bp, Homo sapiens
aaaaatccattcctt

SEQ ID NO: 1252187 - DNA, 15 bp, Homo sapiens
aaaaaatccattcct

SEQ ID NO: 1252188 - DNA, 15 bp, Homo sapiens
taaaaaatccattcc

SEQ ID NO: 1252189 - DNA, 15 bp, Homo sapiens
ctaaaaaatccattc

SEQ ID NO: 1252190 - DNA, 15 bp, Homo sapiens
gctaaaaaatccatt

SEQ ID NO: 1252191 - DNA, 15 bp, Homo sapiens
ggctaaaaaatccat

SEQ ID NO: 1252192 - DNA, 15 bp, Homo sapiens
aggctaaaaaatcca

SEQ ID NO: 1252193 - DNA, 15 bp, Homo sapiens
aaggctaaaaaatcc

SEQ ID NO: 1252194 - DNA, 15 bp, Homo sapiens
gaaggctaaaaaatc

SEQ ID NO: 1252195 - DNA, 15 bp, Homo sapiens
agaaggctaaaaaat

SEQ ID NO: 1252196 - DNA, 15 bp, Homo sapiens
tagaaggctaaaaaa

SEQ ID NO: 1252197 - DNA, 15 bp, Homo sapiens
ctagaaggctaaaaa

SEQ ID NO: 1252198 - DNA, 15 bp, Homo sapiens
actagaaggctaaaa

SEQ ID NO: 1252199 - DNA, 15 bp, Homo sapiens
aactagaaggctaaa

SEQ ID NO: 1252200 - DNA, 15 bp, Homo sapiens
taactagaaggctaa

SEQ ID NO: 1252201 - DNA, 15 bp, Homo sapiens
ataactagaaggcta

SEQ ID NO: 1252202 - DNA, 15 bp, Homo sapiens
tataactagaaggct

SEQ ID NO: 1252203 - DNA, 15 bp, Homo sapiens
ctataactagaaggc

SEQ ID NO: 1252204 - DNA, 15 bp, Homo sapiens
cctataactagaagg

SEQ ID NO: 1252205 - DNA, 15 bp, Homo sapiens
acctataactagaag

SEQ ID NO: 1252206 - DNA, 15 bp, Homo sapiens
gacctataactagaa

SEQ ID NO: 1252207 - DNA, 15 bp, Homo sapiens
agacctataactaga

SEQ ID NO: 1252208 - DNA, 15 bp, Homo sapiens
cagacctataactag

SEQ ID NO: 1252209 - DNA, 15 bp, Homo sapiens
acagacctataacta

SEQ ID NO: 1252210 - DNA, 15 bp, Homo sapiens
cacagacctataact

SEQ ID NO: 1252211 - DNA, 15 bp, Homo sapiens
tcacagacctataac

SEQ ID NO: 1252212 - DNA, 15 bp, Homo sapiens
gtcacagacctataa

SEQ ID NO: 1252213 - DNA, 15 bp, Homo sapiens
ggtcacagacctata

SEQ ID NO: 1252214 - DNA, 15 bp, Homo sapiens
aggtcacagacctat

SEQ ID NO: 1252215 - DNA, 15 bp, Homo sapiens
caggtcacagaccta

SEQ ID NO: 1252216 - DNA, 15 bp, Homo sapiens
tcaggtcacagacct

SEQ ID NO: 1252217 - DNA, 15 bp, Homo sapiens
ttcaggtcacagacc

SEQ ID NO: 1252218 - DNA, 15 bp, Homo sapiens
attcaggtcacagac

SEQ ID NO: 1252219 - DNA, 15 bp, Homo sapiens
aattcaggtcacaga

SEQ ID NO: 1252220 - DNA, 15 bp, Homo sapiens
aaattcaggtcacag

SEQ ID NO: 1252221 - DNA, 15 bp, Homo sapiens
gaaattcaggtcaca

SEQ ID NO: 1252222 - DNA, 15 bp, Homo sapiens
agaaattcaggtcac

SEQ ID NO: 1252223 - DNA, 15 bp, Homo sapiens
gagaaattcaggtca

SEQ ID NO: 1252224 - DNA, 15 bp, Homo sapiens
tgagaaattcaggtc

SEQ ID NO: 1252225 - DNA, 15 bp, Homo sapiens
ttgagaaattcaggt

SEQ ID NO: 1252226 - DNA, 15 bp, Homo sapiens
tttgagaaattcagg

SEQ ID NO: 1252227 - DNA, 15 bp, Homo sapiens
atttgagaaattcag

SEQ ID NO: 1252228 - DNA, 15 bp, Homo sapiens
catttgagaaattca

SEQ ID NO: 1252229 - DNA, 15 bp, Homo sapiens
tcatttgagaaattc

SEQ ID NO: 1252230 - DNA, 15 bp, Homo sapiens
ctcatttgagaaatt

SEQ ID NO: 1252231 - DNA, 15 bp, Homo sapiens
actcatttgagaaat

SEQ ID NO: 1252232 - DNA, 15 bp, Homo sapiens
aactcatttgagaaa

SEQ ID NO: 1252233 - DNA, 15 bp, Homo sapiens
caactcatttgagaa

SEQ ID NO: 1252234 - DNA, 15 bp, Homo sapiens
tcaactcatttgaga

SEQ ID NO: 1252235 - DNA, 15 bp, Homo sapiens
ctcaactcatttgag

SEQ ID NO: 1252236 - DNA, 15 bp, Homo sapiens
gctcaactcatttga

SEQ ID NO: 1252237 - DNA, 15 bp, Homo sapiens
ggctcaactcatttg

SEQ ID NO: 1252238 - DNA, 15 bp, Homo sapiens
gggctcaactcattt

SEQ ID NO: 1252239 - DNA, 15 bp, Homo sapiens
tgggctcaactcatt

SEQ ID NO: 1252240 - DNA, 15 bp, Homo sapiens
ctgggctcaactcat

SEQ ID NO: 1252241 - DNA, 15 bp, Homo sapiens
cctgggctcaactca

SEQ ID NO: 1252242 - DNA, 15 bp, Homo sapiens
ccctgggctcaactc

SEQ ID NO: 1252243 - DNA, 15 bp, Homo sapiens
tccctgggctcaact

SEQ ID NO: 1252244 - DNA, 15 bp, Homo sapiens
ctccctgggctcaac

SEQ ID NO: 1252245 - DNA, 15 bp, Homo sapiens
cctccctgggctcaa

SEQ ID NO: 1252246 - DNA, 15 bp, Homo sapiens
ccctccctgggctca

SEQ ID NO: 1252247 - DNA, 15 bp, Homo sapiens
cccctccctgggctc

SEQ ID NO: 1252248 - DNA, 15 bp, Homo sapiens
acccctccctgggct

SEQ ID NO: 1252249 - DNA, 15 bp, Homo sapiens
gacccctccctgggc

SEQ ID NO: 1252250 - DNA, 15 bp, Homo sapiens
ggacccctccctggg

SEQ ID NO: 1252251 - DNA, 15 bp, Homo sapiens
aggacccctccctgg

SEQ ID NO: 1252252 - DNA, 15 bp, Homo sapiens
gaggacccctccctg

SEQ ID NO: 1252253 - DNA, 15 bp, Homo sapiens
tgaggacccctccct

SEQ ID NO: 1252254 - DNA, 15 bp, Homo sapiens
atgaggacccctccc

SEQ ID NO: 1252255 - DNA, 15 bp, Homo sapiens
catgaggacccctcc

SEQ ID NO: 1252256 - DNA, 15 bp, Homo sapiens
gcatgaggacccctc

SEQ ID NO: 1252257 - DNA, 15 bp, Homo sapiens
ggcatgaggacccct

SEQ ID NO: 1252258 - DNA, 15 bp, Homo sapiens
gggcatgaggacccc

SEQ ID NO: 1252259 - DNA, 15 bp, Homo sapiens
agggcatgaggaccc

SEQ ID NO: 1252260 - DNA, 15 bp, Homo sapiens
gagggcatgaggacc

SEQ ID NO: 1252261 - DNA, 15 bp, Homo sapiens
agagggcatgaggac

SEQ ID NO: 1252262 - DNA, 15 bp, Homo sapiens
cagagggcatgagga

SEQ ID NO: 1252263 - DNA, 15 bp, Homo sapiens
gcagagggcatgagg

SEQ ID NO: 1252264 - DNA, 15 bp, Homo sapiens
tgcagagggcatgag

SEQ ID NO: 1252265 - DNA, 15 bp, Homo sapiens
ttgcagagggcatga

SEQ ID NO: 1252266 - DNA, 15 bp, Homo sapiens
cttgcagagggcatg

SEQ ID NO: 1252267 - DNA, 15 bp, Homo sapiens
tcttgcagagggcat

SEQ ID NO: 1252268 - DNA, 15 bp, Homo sapiens
ctcttgcagagggca

SEQ ID NO: 1252269 - DNA, 15 bp, Homo sapiens
gctcttgcagagggc

SEQ ID NO: 1252270 - DNA, 15 bp, Homo sapiens
cgctcttgcagaggg

SEQ ID NO: 1252271 - DNA, 15 bp, Homo sapiens
ccgctcttgcagagg

SEQ ID NO: 1252272 - DNA, 15 bp, Homo sapiens
tccgctcttgcagag

SEQ ID NO: 1252273 - DNA, 15 bp, Homo sapiens
ttccgctcttgcaga

SEQ ID NO: 1252274 - DNA, 15 bp, Homo sapiens
tttccgctcttgcag

SEQ ID NO: 1252275 - DNA, 15 bp, Homo sapiens
gtttccgctcttgca

SEQ ID NO: 1252276 - DNA, 15 bp, Homo sapiens
ggtttccgctcttgc

SEQ ID NO: 1252277 - DNA, 15 bp, Homo sapiens
tggtttccgctcttg

SEQ ID NO: 1252278 - DNA, 15 bp, Homo sapiens
ctggtttccgctctt

SEQ ID NO: 1252279 - DNA, 15 bp, Homo sapiens
cctggtttccgctct

SEQ ID NO: 1252280 - DNA, 15 bp, Homo sapiens
acctggtttccgctc

SEQ ID NO: 1252281 - DNA, 15 bp, Homo sapiens
tacctggtttccgct

SEQ ID NO: 1252282 - DNA, 15 bp, Homo sapiens
gtacctggtttccgc

SEQ ID NO: 1252283 - DNA, 15 bp, Homo sapiens
tgtacctggtttccg

SEQ ID NO: 1252284 - DNA, 15 bp, Homo sapiens
ctgtacctggtttcc

SEQ ID NO: 1252285 - DNA, 15 bp, Homo sapiens
actgtacctggtttc

SEQ ID NO: 1252286 - DNA, 15 bp, Homo sapiens
aactgtacctggttt

SEQ ID NO: 1252287 - DNA, 15 bp, Homo sapiens
gaactgtacctggtt

SEQ ID NO: 1252288 - DNA, 15 bp, Homo sapiens
agaactgtacctggt

SEQ ID NO: 1252289 - DNA, 15 bp, Homo sapiens
tagaactgtacctgg

SEQ ID NO: 1252290 - DNA, 15 bp, Homo sapiens
atagaactgtacctg

SEQ ID NO: 1252291 - DNA, 15 bp, Homo sapiens
catagaactgtacct

SEQ ID NO: 1252292 - DNA, 15 bp, Homo sapiens
tcatagaactgtacc

SEQ ID NO: 1252293 - DNA, 15 bp, Homo sapiens
atcatagaactgtac

SEQ ID NO: 1252294 - DNA, 15 bp, Homo sapiens
gatcatagaactgta

SEQ ID NO: 1252295 - DNA, 15 bp, Homo sapiens
ggatcatagaactgt

SEQ ID NO: 1252296 - DNA, 15 bp, Homo sapiens
gggatcatagaactg

SEQ ID NO: 1252297 - DNA, 15 bp, Homo sapiens
tgggatcatagaact

SEQ ID NO: 1252298 - DNA, 15 bp, Homo sapiens
gtgggatcatagaac

SEQ ID NO: 1252299 - DNA, 15 bp, Homo sapiens
ggtgggatcatagaa

SEQ ID NO: 1252300 - DNA, 15 bp, Homo sapiens
aggtgggatcataga

SEQ ID NO: 1252301 - DNA, 15 bp, Homo sapiens
caggtgggatcatag

SEQ ID NO: 1252302 - DNA, 15 bp, Homo sapiens
tcaggtgggatcata

SEQ ID NO: 1252303 - DNA, 15 bp, Homo sapiens
ttcaggtgggatcat

SEQ ID NO: 1252304 - DNA, 15 bp, Homo sapiens
tttcaggtgggatca

SEQ ID NO: 1252305 - DNA, 15 bp, Homo sapiens
atttcaggtgggatc

SEQ ID NO: 1252306 - DNA, 15 bp, Homo sapiens
catttcaggtgggat

SEQ ID NO: 1252307 - DNA, 15 bp, Homo sapiens
ccatttcaggtggga

SEQ ID NO: 1252308 - DNA, 15 bp, Homo sapiens
cccatttcaggtggg

SEQ ID NO: 1252309 - DNA, 15 bp, Homo sapiens
acccatttcaggtgg

SEQ ID NO: 1252310 - DNA, 15 bp, Homo sapiens
cacccatttcaggtg

SEQ ID NO: 1252311 - DNA, 15 bp, Homo sapiens
acacccatttcaggt

SEQ ID NO: 1252312 - DNA, 15 bp, Homo sapiens
cacacccatttcagg

SEQ ID NO: 1252313 - DNA, 15 bp, Homo sapiens
acacacccatttcag

SEQ ID NO: 1252314 - DNA, 15 bp, Homo sapiens
cacacacccatttca

SEQ ID NO: 1252315 - DNA, 15 bp, Homo sapiens
ccacacacccatttc

SEQ ID NO: 1252316 - DNA, 15 bp, Homo sapiens
accacacacccattt

SEQ ID NO: 1252317 - DNA, 15 bp, Homo sapiens
aaccacacacccatt

SEQ ID NO: 1252318 - DNA, 15 bp, Homo sapiens
gaaccacacacccat

SEQ ID NO: 1252319 - DNA, 15 bp, Homo sapiens
agaaccacacaccca

SEQ ID NO: 1252320 - DNA, 15 bp, Homo sapiens
cagaaccacacaccc

SEQ ID NO: 1252321 - DNA, 15 bp, Homo sapiens
ccagaaccacacacc

SEQ ID NO: 1252322 - DNA, 15 bp, Homo sapiens
cccagaaccacacac

SEQ ID NO: 1252323 - DNA, 15 bp, Homo sapiens
tcccagaaccacaca

SEQ ID NO: 1252324 - DNA, 15 bp, Homo sapiens
ttcccagaaccacac

SEQ ID NO: 1252325 - DNA, 15 bp, Homo sapiens
cttcccagaaccaca

SEQ ID NO: 1252326 - DNA, 15 bp, Homo sapiens
gcttcccagaaccac

SEQ ID NO: 1252327 - DNA, 15 bp, Homo sapiens
agcttcccagaacca

SEQ ID NO: 1252328 - DNA, 15 bp, Homo sapiens
tagcttcccagaacc

SEQ ID NO: 1252329 - DNA, 15 bp, Homo sapiens
ttagcttcccagaac

SEQ ID NO: 1252330 - DNA, 15 bp, Homo sapiens
tttagcttcccagaa

SEQ ID NO: 1252331 - DNA, 15 bp, Homo sapiens
atttagcttcccaga

SEQ ID NO: 1252332 - DNA, 15 bp, Homo sapiens
tatttagcttcccag

SEQ ID NO: 1252333 - DNA, 15 bp, Homo sapiens
gtatttagcttccca

SEQ ID NO: 1252334 - DNA, 15 bp, Homo sapiens
ggtatttagcttccc

SEQ ID NO: 1252335 - DNA, 15 bp, Homo sapiens
gggtatttagcttcc

SEQ ID NO: 1252336 - DNA, 15 bp, Homo sapiens
tgggtatttagcttc

SEQ ID NO: 1252337 - DNA, 15 bp, Homo sapiens
atgggtatttagctt

SEQ ID NO: 1252338 - DNA, 15 bp, Homo sapiens
aatgggtatttagct

SEQ ID NO: 1252339 - DNA, 15 bp, Homo sapiens
aaatgggtatttagc

SEQ ID NO: 1252340 - DNA, 15 bp, Homo sapiens
gaaatgggtatttag

SEQ ID NO: 1252341 - DNA, 15 bp, Homo sapiens
cgaaatgggtattta

SEQ ID NO: 1252342 - DNA, 15 bp, Homo sapiens
ccgaaatgggtattt

SEQ ID NO: 1252343 - DNA, 15 bp, Homo sapiens
tccgaaatgggtatt

SEQ ID NO: 1252344 - DNA, 15 bp, Homo sapiens
ctccgaaatgggtat

SEQ ID NO: 1252345 - DNA, 15 bp, Homo sapiens
tctccgaaatgggta

SEQ ID NO: 1252346 - DNA, 15 bp, Homo sapiens
atctccgaaatgggt

SEQ ID NO: 1252347 - DNA, 15 bp, Homo sapiens
gatctccgaaatggg

SEQ ID NO: 1252348 - DNA, 15 bp, Homo sapiens
tgatctccgaaatgg

SEQ ID NO: 1252349 - DNA, 15 bp, Homo sapiens
ttgatctccgaaatg

SEQ ID NO: 1252350 - DNA, 15 bp, Homo sapiens
cttgatctccgaaat

SEQ ID NO: 1252351 - DNA, 15 bp, Homo sapiens
gcttgatctccgaaa

SEQ ID NO: 1252352 - DNA, 15 bp, Homo sapiens
tgcttgatctccgaa

SEQ ID NO: 1252353 - DNA, 15 bp, Homo sapiens
atgcttgatctccga

SEQ ID NO: 1252354 - DNA, 15 bp, Homo sapiens
catgcttgatctccg

SEQ ID NO: 1252355 - DNA, 15 bp, Homo sapiens
ccatgcttgatctcc

SEQ ID NO: 1252356 - DNA, 15 bp, Homo sapiens
cccatgcttgatctc

SEQ ID NO: 1252357 - DNA, 15 bp, Homo sapiens
ccccatgcttgatct

SEQ ID NO: 1252358 - DNA, 15 bp, Homo sapiens
accccatgcttgatc

SEQ ID NO: 1252359 - DNA, 15 bp, Homo sapiens
aaccccatgcttgat

SEQ ID NO: 1252360 - DNA, 15 bp, Homo sapiens
caaccccatgcttga

SEQ ID NO: 1252361 - DNA, 15 bp, Homo sapiens
ccaaccccatgcttg

SEQ ID NO: 1252362 - DNA, 15 bp, Homo sapiens
accaaccccatgctt

SEQ ID NO: 1252363 - DNA, 15 bp, Homo sapiens
caccaaccccatgct

SEQ ID NO: 1252364 - DNA, 15 bp, Homo sapiens
tcaccaaccccatgc

SEQ ID NO: 1252365 - DNA, 15 bp, Homo sapiens
ttcaccaaccccatg

SEQ ID NO: 1252366 - DNA, 15 bp, Homo sapiens
attcaccaaccccat

SEQ ID NO: 1252367 - DNA, 15 bp, Homo sapiens
gattcaccaacccca

SEQ ID NO: 1252368 - DNA, 15 bp, Homo sapiens
tgattcaccaacccc

SEQ ID NO: 1252369 - DNA, 15 bp, Homo sapiens
gtgattcaccaaccc

SEQ ID NO: 1252370 - DNA, 15 bp, Homo sapiens
agtgattcaccaacc

SEQ ID NO: 1252371 - DNA, 15 bp, Homo sapiens
gagtgattcaccaac

SEQ ID NO: 1252372 - DNA, 15 bp, Homo sapiens
tgagtgattcaccaa

SEQ ID NO: 1252373 - DNA, 15 bp, Homo sapiens
atgagtgattcacca

SEQ ID NO: 1252374 - DNA, 15 bp, Homo sapiens
gatgagtgattcacc

SEQ ID NO: 1252375 - DNA, 15 bp, Homo sapiens
ggatgagtgattcac

SEQ ID NO: 1252376 - DNA, 15 bp, Homo sapiens
aggatgagtgattca

SEQ ID NO: 1252377 - DNA, 15 bp, Homo sapiens
gaggatgagtgattc

SEQ ID NO: 1252378 - DNA, 15 bp, Homo sapiens
agaggatgagtgatt

SEQ ID NO: 1252379 - DNA, 15 bp, Homo sapiens
cagaggatgagtgat

SEQ ID NO: 1252380 - DNA, 15 bp, Homo sapiens
tcagaggatgagtga

SEQ ID NO: 1252381 - DNA, 15 bp, Homo sapiens
ttcagaggatgagtg

SEQ ID NO: 1252382 - DNA, 15 bp, Homo sapiens
attcagaggatgagt

SEQ ID NO: 1252383 - DNA, 15 bp, Homo sapiens
gattcagaggatgag

SEQ ID NO: 1252384 - DNA, 15 bp, Homo sapiens
tgattcagaggatga

SEQ ID NO: 1252385 - DNA, 15 bp, Homo sapiens
atgattcagaggatg

SEQ ID NO: 1252386 - DNA, 15 bp, Homo sapiens
tatgattcagaggat

SEQ ID NO: 1252387 - DNA, 15 bp, Homo sapiens
atatgattcagagga

SEQ ID NO: 1252388 - DNA, 15 bp, Homo sapiens
catatgattcagagg

SEQ ID NO: 1252389 - DNA, 15 bp, Homo sapiens
acatatgattcagag

SEQ ID NO: 1252390 - DNA, 15 bp, Homo sapiens
cacatatgattcaga

SEQ ID NO: 1252391 - DNA, 15 bp, Homo sapiens
acacatatgattcag

SEQ ID NO: 1252392 - DNA, 15 bp, Homo sapiens
cacacatatgattca

SEQ ID NO: 1252393 - DNA, 15 bp, Homo sapiens
acacacatatgattc

SEQ ID NO: 1252394 - DNA, 15 bp, Homo sapiens
aacacacatatgatt

SEQ ID NO: 1252395 - DNA, 15 bp, Homo sapiens
gaacacacatatgat

SEQ ID NO: 1252396 - DNA, 15 bp, Homo sapiens
agaacacacatatga

SEQ ID NO: 1252397 - DNA, 15 bp, Homo sapiens
aagaacacacatatg

SEQ ID NO: 1252398 - DNA, 15 bp, Homo sapiens
gaagaacacacatat

SEQ ID NO: 1252399 - DNA, 15 bp, Homo sapiens
tgaagaacacacata

SEQ ID NO: 1252400 - DNA, 15 bp, Homo sapiens
ctgaagaacacacat

SEQ ID NO: 1252401 - DNA, 15 bp, Homo sapiens
actgaagaacacaca

SEQ ID NO: 1252402 - DNA, 15 bp, Homo sapiens
cactgaagaacacac

SEQ ID NO: 1252403 - DNA, 15 bp, Homo sapiens
acactgaagaacaca

SEQ ID NO: 1252404 - DNA, 15 bp, Homo sapiens
tacactgaagaacac

SEQ ID NO: 1252405 - DNA, 15 bp, Homo sapiens
gtacactgaagaaca

SEQ ID NO: 1252406 - DNA, 15 bp, Homo sapiens
agtacactgaagaac

SEQ ID NO: 1252407 - DNA, 15 bp, Homo sapiens
tagtacactgaagaa

SEQ ID NO: 1252408 - DNA, 15 bp, Homo sapiens
ttagtacactgaaga

SEQ ID NO: 1252409 - DNA, 15 bp, Homo sapiens
attagtacactgaag

SEQ ID NO: 1252410 - DNA, 15 bp, Homo sapiens
gattagtacactgaa

SEQ ID NO: 1252411 - DNA, 15 bp, Homo sapiens
agattagtacactga

SEQ ID NO: 1252412 - DNA, 15 bp, Homo sapiens
gagattagtacactg

SEQ ID NO: 1252413 - DNA, 15 bp, Homo sapiens
tgagattagtacact

SEQ ID NO: 1252414 - DNA, 15 bp, Homo sapiens
atgagattagtacac

SEQ ID NO: 1252415 - DNA, 15 bp, Homo sapiens
aatgagattagtaca

SEQ ID NO: 1252416 - DNA, 15 bp, Homo sapiens
aaatgagattagtac

SEQ ID NO: 1252417 - DNA, 15 bp, Homo sapiens
aaaatgagattagta

SEQ ID NO: 1252418 - DNA, 15 bp, Homo sapiens
aaaaatgagattagt

SEQ ID NO: 1252419 - DNA, 15 bp, Homo sapiens
gaaaaatgagattag

SEQ ID NO: 1252420 - DNA, 15 bp, Homo sapiens
ggaaaaatgagatta

SEQ ID NO: 1252421 - DNA, 15 bp, Homo sapiens
aggaaaaatgagatt

SEQ ID NO: 1252422 - DNA, 15 bp, Homo sapiens
caggaaaaatgagat

SEQ ID NO: 1252423 - DNA, 15 bp, Homo sapiens
gcaggaaaaatgaga

SEQ ID NO: 1252424 - DNA, 15 bp, Homo sapiens
agcaggaaaaatgag

SEQ ID NO: 1252425 - DNA, 15 bp, Homo sapiens
tagcaggaaaaatga

SEQ ID NO: 1252426 - DNA, 15 bp, Homo sapiens
ctagcaggaaaaatg

SEQ ID NO: 1252427 - DNA, 15 bp, Homo sapiens
tctagcaggaaaaat

SEQ ID NO: 1252428 - DNA, 15 bp, Homo sapiens
ctctagcaggaaaaa

SEQ ID NO: 1252429 - DNA, 15 bp, Homo sapiens
gctctagcaggaaaa

SEQ ID NO: 1252430 - DNA, 15 bp, Homo sapiens
ggctctagcaggaaa

SEQ ID NO: 1252431 - DNA, 15 bp, Homo sapiens
aggctctagcaggaa

SEQ ID NO: 1252432 - DNA, 15 bp, Homo sapiens
aaggctctagcagga

SEQ ID NO: 1252433 - DNA, 15 bp, Homo sapiens
aaaggctctagcagg

SEQ ID NO: 1252434 - DNA, 15 bp, Homo sapiens
gaaaggctctagcag

SEQ ID NO: 1252435 - DNA, 15 bp, Homo sapiens
tgaaaggctctagca

SEQ ID NO: 1252436 - DNA, 15 bp, Homo sapiens
atgaaaggctctagc

SEQ ID NO: 1252437 - DNA, 15 bp, Homo sapiens
gatgaaaggctctag

SEQ ID NO: 1252438 - DNA, 15 bp, Homo sapiens
ggatgaaaggctcta

SEQ ID NO: 1252439 - DNA, 15 bp, Homo sapiens
tggatgaaaggctct

SEQ ID NO: 1252440 - DNA, 15 bp, Homo sapiens
atggatgaaaggctc

SEQ ID NO: 1252441 - DNA, 15 bp, Homo sapiens
catggatgaaaggct

SEQ ID NO: 1252442 - DNA, 15 bp, Homo sapiens
tcatggatgaaaggc

SEQ ID NO: 1252443 - DNA, 15 bp, Homo sapiens
ttcatggatgaaagg

SEQ ID NO: 1252444 - DNA, 15 bp, Homo sapiens
tttcatggatgaaag

SEQ ID NO: 1252445 - DNA, 15 bp, Homo sapiens
ctttcatggatgaaa

SEQ ID NO: 1252446 - DNA, 15 bp, Homo sapiens
gctttcatggatgaa

SEQ ID NO: 1252447 - DNA, 15 bp, Homo sapiens
ggctttcatggatga

SEQ ID NO: 1252448 - DNA, 15 bp, Homo sapiens
aggctttcatggatg

SEQ ID NO: 1252449 - DNA, 15 bp, Homo sapiens
gaggctttcatggat

SEQ ID NO: 1252450 - DNA, 15 bp, Homo sapiens
ggaggctttcatgga

SEQ ID NO: 1252451 - DNA, 15 bp, Homo sapiens
gggaggctttcatgg

SEQ ID NO: 1252452 - DNA, 15 bp, Homo sapiens
agggaggctttcatg

SEQ ID NO: 1252453 - DNA, 15 bp, Homo sapiens
cagggaggctttcat

SEQ ID NO: 1252454 - DNA, 15 bp, Homo sapiens
tcagggaggctttca

SEQ ID NO: 1252455 - DNA, 15 bp, Homo sapiens
atcagggaggctttc

SEQ ID NO: 1252456 - DNA, 15 bp, Homo sapiens
aatcagggaggcttt

SEQ ID NO: 1252457 - DNA, 15 bp, Homo sapiens
gaatcagggaggctt

SEQ ID NO: 1252458 - DNA, 15 bp, Homo sapiens
ggaatcagggaggct

SEQ ID NO: 1252459 - DNA, 15 bp, Homo sapiens
gggaatcagggaggc

SEQ ID NO: 1252460 - DNA, 15 bp, Homo sapiens
tgggaatcagggagg

SEQ ID NO: 1252461 - DNA, 15 bp, Homo sapiens
atgggaatcagggag

SEQ ID NO: 1252462 - DNA, 15 bp, Homo sapiens
catgggaatcaggga

SEQ ID NO: 1252463 - DNA, 15 bp, Homo sapiens
gcatgggaatcaggg

SEQ ID NO: 1252464 - DNA, 15 bp, Homo sapiens
tgcatgggaatcagg

SEQ ID NO: 1252465 - DNA, 15 bp, Homo sapiens
ctgcatgggaatcag

SEQ ID NO: 1252466 - DNA, 15 bp, Homo sapiens
cctgcatgggaatca

SEQ ID NO: 1252467 - DNA, 15 bp, Homo sapiens
tcctgcatgggaatc

SEQ ID NO: 1252468 - DNA, 15 bp, Homo sapiens
ttcctgcatgggaat

SEQ ID NO: 1252469 - DNA, 15 bp, Homo sapiens
gttcctgcatgggaa

SEQ ID NO: 1252470 - DNA, 15 bp, Homo sapiens
agttcctgcatggga

SEQ ID NO: 1252471 - DNA, 15 bp, Homo sapiens
tagttcctgcatggg

SEQ ID NO: 1252472 - DNA, 15 bp, Homo sapiens
gtagttcctgcatgg

SEQ ID NO: 1252473 - DNA, 15 bp, Homo sapiens
ggtagttcctgcatg

SEQ ID NO: 1252474 - DNA, 15 bp, Homo sapiens
aggtagttcctgcat

SEQ ID NO: 1252475 - DNA, 15 bp, Homo sapiens
gaggtagttcctgca

SEQ ID NO: 1252476 - DNA, 15 bp, Homo sapiens
tgaggtagttcctgc

SEQ ID NO: 1252477 - DNA, 15 bp, Homo sapiens
gtgaggtagttcctg

SEQ ID NO: 1252478 - DNA, 15 bp, Homo sapiens
ggtgaggtagttcct

SEQ ID NO: 1252479 - DNA, 15 bp, Homo sapiens
aggtgaggtagttcc

SEQ ID NO: 1252480 - DNA, 15 bp, Homo sapiens
aaggtgaggtagttc

SEQ ID NO: 1252481 - DNA, 15 bp, Homo sapiens
gaaggtgaggtagtt

SEQ ID NO: 1252482 - DNA, 15 bp, Homo sapiens
agaaggtgaggtagt

SEQ ID NO: 1252483 - DNA, 15 bp, Homo sapiens
aagaaggtgaggtag

SEQ ID NO: 1252484 - DNA, 15 bp, Homo sapiens
gaagaaggtgaggta

SEQ ID NO: 1252485 - DNA, 15 bp, Homo sapiens
ggaagaaggtgaggt

SEQ ID NO: 1252486 - DNA, 15 bp, Homo sapiens
tggaagaaggtgagg

SEQ ID NO: 1252487 - DNA, 15 bp, Homo sapiens
ttggaagaaggtgag

SEQ ID NO: 1252488 - DNA, 15 bp, Homo sapiens
attggaagaaggtga

SEQ ID NO: 1252489 - DNA, 15 bp, Homo sapiens
gattggaagaaggtg

SEQ ID NO: 1252490 - DNA, 15 bp, Homo sapiens
agattggaagaaggt

SEQ ID NO: 1252491 - DNA, 15 bp, Homo sapiens
gagattggaagaagg

SEQ ID NO: 1252492 - DNA, 15 bp, Homo sapiens
agagattggaagaag

SEQ ID NO: 1252493 - DNA, 15 bp, Homo sapiens
aagagattggaagaa

SEQ ID NO: 1252494 - DNA, 15 bp, Homo sapiens
taagagattggaaga

SEQ ID NO: 1252495 - DNA, 15 bp, Homo sapiens
ctaagagattggaag

SEQ ID NO: 1252496 - DNA, 15 bp, Homo sapiens
actaagagattggaa

SEQ ID NO: 1252497 - DNA, 15 bp, Homo sapiens
tactaagagattgga

SEQ ID NO: 1252498 - DNA, 15 bp, Homo sapiens
gtactaagagattgg

SEQ ID NO: 1252499 - DNA, 15 bp, Homo sapiens
tgtactaagagattg

SEQ ID NO: 1252500 - DNA, 15 bp, Homo sapiens
atgtactaagagatt

SEQ ID NO: 1252501 - DNA, 15 bp, Homo sapiens
aatgtactaagagat

SEQ ID NO: 1252502 - DNA, 15 bp, Homo sapiens
gaatgtactaagaga

SEQ ID NO: 1252503 - DNA, 15 bp, Homo sapiens
ggaatgtactaagag

SEQ ID NO: 1252504 - DNA, 15 bp, Homo sapiens
gggaatgtactaaga

SEQ ID NO: 1252505 - DNA, 15 bp, Homo sapiens
ggggaatgtactaag

SEQ ID NO: 1252506 - DNA, 15 bp, Homo sapiens
aggggaatgtactaa

SEQ ID NO: 1252507 - DNA, 15 bp, Homo sapiens
aaggggaatgtacta

SEQ ID NO: 1252508 - DNA, 15 bp, Homo sapiens
taaggggaatgtact

SEQ ID NO: 1252509 - DNA, 15 bp, Homo sapiens
gtaaggggaatgtac

SEQ ID NO: 1252510 - DNA, 15 bp, Homo sapiens
ggtaaggggaatgta

SEQ ID NO: 1252511 - DNA, 15 bp, Homo sapiens
aggtaaggggaatgt

SEQ ID NO: 1252512 - DNA, 15 bp, Homo sapiens
aaggtaaggggaatg

SEQ ID NO: 1252513 - DNA, 15 bp, Homo sapiens
aaaggtaaggggaat

SEQ ID NO: 1252514 - DNA, 15 bp, Homo sapiens
aaaaggtaaggggaa

SEQ ID NO: 1252515 - DNA, 15 bp, Homo sapiens
gaaaaggtaagggga

SEQ ID NO: 1252516 - DNA, 15 bp, Homo sapiens
tgaaaaggtaagggg

SEQ ID NO: 1252517 - DNA, 15 bp, Homo sapiens
ctgaaaaggtaaggg

SEQ ID NO: 1252518 - DNA, 15 bp, Homo sapiens
cctgaaaaggtaagg

SEQ ID NO: 1252519 - DNA, 15 bp, Homo sapiens
ccctgaaaaggtaag

SEQ ID NO: 1252520 - DNA, 15 bp, Homo sapiens
gccctgaaaaggtaa

SEQ ID NO: 1252521 - DNA, 15 bp, Homo sapiens
agccctgaaaaggta

SEQ ID NO: 1252522 - DNA, 15 bp, Homo sapiens
cagccctgaaaaggt

SEQ ID NO: 1252523 - DNA, 15 bp, Homo sapiens
acagccctgaaaagg

SEQ ID NO: 1252524 - DNA, 15 bp, Homo sapiens
aacagccctgaaaag

SEQ ID NO: 1252525 - DNA, 15 bp, Homo sapiens
caacagccctgaaaa

SEQ ID NO: 1252526 - DNA, 15 bp, Homo sapiens
gcaacagccctgaaa

SEQ ID NO: 1252527 - DNA, 15 bp, Homo sapiens
tgcaacagccctgaa

SEQ ID NO: 1252528 - DNA, 15 bp, Homo sapiens
ttgcaacagccctga

SEQ ID NO: 1252529 - DNA, 15 bp, Homo sapiens
gttgcaacagccctg

SEQ ID NO: 1252530 - DNA, 15 bp, Homo sapiens
agttgcaacagccct

SEQ ID NO: 1252531 - DNA, 15 bp, Homo sapiens
aagttgcaacagccc

SEQ ID NO: 1252532 - DNA, 15 bp, Homo sapiens
aaagttgcaacagcc

SEQ ID NO: 1252533 - DNA, 15 bp, Homo sapiens
gaaagttgcaacagc

SEQ ID NO: 1252534 - DNA, 15 bp, Homo sapiens
agaaagttgcaacag

SEQ ID NO: 1252535 - DNA, 15 bp, Homo sapiens
tagaaagttgcaaca

SEQ ID NO: 1252536 - DNA, 15 bp, Homo sapiens
gtagaaagttgcaac

SEQ ID NO: 1252537 - DNA, 15 bp, Homo sapiens
ggtagaaagttgcaa

SEQ ID NO: 1252538 - DNA, 15 bp, Homo sapiens
aggtagaaagttgca

SEQ ID NO: 1252539 - DNA, 15 bp, Homo sapiens
aaggtagaaagttgc

SEQ ID NO: 1252540 - DNA, 15 bp, Homo sapiens
caaggtagaaagttg

SEQ ID NO: 1252541 - DNA, 15 bp, Homo sapiens
acaaggtagaaagtt

SEQ ID NO: 1252542 - DNA, 15 bp, Homo sapiens
gacaaggtagaaagt

SEQ ID NO: 1252543 - DNA, 15 bp, Homo sapiens
tgacaaggtagaaag

SEQ ID NO: 1252544 - DNA, 15 bp, Homo sapiens
ctgacaaggtagaaa

SEQ ID NO: 1252545 - DNA, 15 bp, Homo sapiens
cctgacaaggtagaa

SEQ ID NO: 1252546 - DNA, 15 bp, Homo sapiens
gcctgacaaggtaga

SEQ ID NO: 1252547 - DNA, 15 bp, Homo sapiens
tgcctgacaaggtag

SEQ ID NO: 1252548 - DNA, 15 bp, Homo sapiens
ctgcctgacaaggta

SEQ ID NO: 1252549 - DNA, 15 bp, Homo sapiens
actgcctgacaaggt

SEQ ID NO: 1252550 - DNA, 15 bp, Homo sapiens
aactgcctgacaagg

SEQ ID NO: 1252551 - DNA, 15 bp, Homo sapiens
taactgcctgacaag

SEQ ID NO: 1252552 - DNA, 15 bp, Homo sapiens
ataactgcctgacaa

SEQ ID NO: 1252553 - DNA, 15 bp, Homo sapiens
aataactgcctgaca

SEQ ID NO: 1252554 - DNA, 15 bp, Homo sapiens
aaataactgcctgac

SEQ ID NO: 1252555 - DNA, 15 bp, Homo sapiens
caaataactgcctga

SEQ ID NO: 1252556 - DNA, 15 bp, Homo sapiens
acaaataactgcctg

SEQ ID NO: 1252557 - DNA, 15 bp, Homo sapiens
cacaaataactgcct

SEQ ID NO: 1252558 - DNA, 15 bp, Homo sapiens
acacaaataactgcc

SEQ ID NO: 1252559 - DNA, 15 bp, Homo sapiens
tacacaaataactgc

SEQ ID NO: 1252560 - DNA, 15 bp, Homo sapiens
atacacaaataactg

SEQ ID NO: 1252561 - DNA, 15 bp, Homo sapiens
tatacacaaataact

SEQ ID NO: 1252562 - DNA, 15 bp, Homo sapiens
atatacacaaataac

SEQ ID NO: 1252563 - DNA, 15 bp, Homo sapiens
catatacacaaataa

SEQ ID NO: 1252564 - DNA, 15 bp, Homo sapiens
gcatatacacaaata

SEQ ID NO: 1252565 - DNA, 15 bp, Homo sapiens
agcatatacacaaat

SEQ ID NO: 1252566 - DNA, 15 bp, Homo sapiens
aagcatatacacaaa

SEQ ID NO: 1252567 - DNA, 15 bp, Homo sapiens
caagcatatacacaa

SEQ ID NO: 1252568 - DNA, 15 bp, Homo sapiens
tcaagcatatacaca

SEQ ID NO: 1252569 - DNA, 15 bp, Homo sapiens
ttcaagcatatacac

SEQ ID NO: 1252570 - DNA, 15 bp, Homo sapiens
attcaagcatataca

SEQ ID NO: 1252571 - DNA, 15 bp, Homo sapiens
aattcaagcatatac

SEQ ID NO: 1252572 - DNA, 15 bp, Homo sapiens
taattcaagcatata

SEQ ID NO: 1252573 - DNA, 15 bp, Homo sapiens
ttaattcaagcatat

SEQ ID NO: 1252574 - DNA, 15 bp, Homo sapiens
cttaattcaagcata

SEQ ID NO: 1252575 - DNA, 15 bp, Homo sapiens
acttaattcaagcat

SEQ ID NO: 1252576 - DNA, 15 bp, Homo sapiens
cacttaattcaagca

SEQ ID NO: 1252577 - DNA, 15 bp, Homo sapiens
tcacttaattcaagc

SEQ ID NO: 1252578 - DNA, 15 bp, Homo sapiens
ctcacttaattcaag

SEQ ID NO: 1252579 - DNA, 15 bp, Homo sapiens
cctcacttaattcaa

SEQ ID NO: 1252580 - DNA, 15 bp, Homo sapiens
acctcacttaattca

SEQ ID NO: 1252581 - DNA, 15 bp, Homo sapiens
cacctcacttaattc

SEQ ID NO: 1252582 - DNA, 15 bp, Homo sapiens
tcacctcacttaatt

SEQ ID NO: 1252583 - DNA, 15 bp, Homo sapiens
gtcacctcacttaat

SEQ ID NO: 1252584 - DNA, 15 bp, Homo sapiens
tgtcacctcacttaa

SEQ ID NO: 1252585 - DNA, 15 bp, Homo sapiens
atgtcacctcactta

SEQ ID NO: 1252586 - DNA, 15 bp, Homo sapiens
aatgtcacctcactt

SEQ ID NO: 1252587 - DNA, 15 bp, Homo sapiens
aaatgtcacctcact

SEQ ID NO: 1252588 - DNA, 15 bp, Homo sapiens
caaatgtcacctcac

SEQ ID NO: 1252589 - DNA, 15 bp, Homo sapiens
gcaaatgtcacctca

SEQ ID NO: 1252590 - DNA, 15 bp, Homo sapiens
ggcaaatgtcacctc

SEQ ID NO: 1252591 - DNA, 15 bp, Homo sapiens
tggcaaatgtcacct

SEQ ID NO: 1252592 - DNA, 15 bp, Homo sapiens
ttggcaaatgtcacc

SEQ ID NO: 1252593 - DNA, 15 bp, Homo sapiens
cttggcaaatgtcac

SEQ ID NO: 1252594 - DNA, 15 bp, Homo sapiens
tcttggcaaatgtca

SEQ ID NO: 1252595 - DNA, 15 bp, Homo sapiens
ttcttggcaaatgtc

SEQ ID NO: 1252596 - DNA, 15 bp, Homo sapiens
attcttggcaaatgt

SEQ ID NO: 1252597 - DNA, 15 bp, Homo sapiens
gattcttggcaaatg

SEQ ID NO: 1252598 - DNA, 15 bp, Homo sapiens
ggattcttggcaaat

SEQ ID NO: 1252599 - DNA, 15 bp, Homo sapiens
tggattcttggcaaa

SEQ ID NO: 1252600 - DNA, 15 bp, Homo sapiens
ttggattcttggcaa

SEQ ID NO: 1252601 - DNA, 15 bp, Homo sapiens
attggattcttggca

SEQ ID NO: 1252602 - DNA, 15 bp, Homo sapiens
cattggattcttggc

SEQ ID NO: 1252603 - DNA, 15 bp, Homo sapiens
gcattggattcttgg

SEQ ID NO: 1252604 - DNA, 15 bp, Homo sapiens
agcattggattcttg

SEQ ID NO: 1252605 - DNA, 15 bp, Homo sapiens
cagcattggattctt

SEQ ID NO: 1252606 - DNA, 15 bp, Homo sapiens
tcagcattggattct

SEQ ID NO: 1252607 - DNA, 15 bp, Homo sapiens
atcagcattggattc

SEQ ID NO: 1252608 - DNA, 15 bp, Homo sapiens
tatcagcattggatt

SEQ ID NO: 1252609 - DNA, 15 bp, Homo sapiens
gtatcagcattggat

SEQ ID NO: 1252610 - DNA, 15 bp, Homo sapiens
ggtatcagcattgga

SEQ ID NO: 1252611 - DNA, 15 bp, Homo sapiens
gggtatcagcattgg

SEQ ID NO: 1252612 - DNA, 15 bp, Homo sapiens
agggtatcagcattg

SEQ ID NO: 1252613 - DNA, 15 bp, Homo sapiens
cagggtatcagcatt

SEQ ID NO: 1252614 - DNA, 15 bp, Homo sapiens
tcagggtatcagcat

SEQ ID NO: 1252615 - DNA, 15 bp, Homo sapiens
gtcagggtatcagca

SEQ ID NO: 1252616 - DNA, 15 bp, Homo sapiens
agtcagggtatcagc

SEQ ID NO: 1252617 - DNA, 15 bp, Homo sapiens
aagtcagggtatcag

SEQ ID NO: 1252618 - DNA, 15 bp, Homo sapiens
taagtcagggtatca

SEQ ID NO: 1252619 - DNA, 15 bp, Homo sapiens
ctaagtcagggtatc

SEQ ID NO: 1252620 - DNA, 15 bp, Homo sapiens
tctaagtcagggtat

SEQ ID NO: 1252621 - DNA, 15 bp, Homo sapiens
ctctaagtcagggta

SEQ ID NO: 1252622 - DNA, 15 bp, Homo sapiens
actctaagtcagggt

SEQ ID NO: 1252623 - DNA, 15 bp, Homo sapiens
aactctaagtcaggg

SEQ ID NO: 1252624 - DNA, 15 bp, Homo sapiens
taactctaagtcagg

SEQ ID NO: 1252625 - DNA, 15 bp, Homo sapiens
ttaactctaagtcag

SEQ ID NO: 1252626 - DNA, 15 bp, Homo sapiens
gttaactctaagtca

SEQ ID NO: 1252627 - DNA, 15 bp, Homo sapiens
tgttaactctaagtc

SEQ ID NO: 1252628 - DNA, 15 bp, Homo sapiens
ttgttaactctaagt

SEQ ID NO: 1252629 - DNA, 15 bp, Homo sapiens
tttgttaactctaag

SEQ ID NO: 1252630 - DNA, 15 bp, Homo sapiens
ctttgttaactctaa

SEQ ID NO: 1252631 - DNA, 15 bp, Homo sapiens
tctttgttaactcta

SEQ ID NO: 1252632 - DNA, 15 bp, Homo sapiens
ttctttgttaactct

SEQ ID NO: 1252633 - DNA, 15 bp, Homo sapiens
tttctttgttaactc

SEQ ID NO: 1252634 - DNA, 15 bp, Homo sapiens
ttttctttgttaact

SEQ ID NO: 1252635 - DNA, 15 bp, Homo sapiens
tttttctttgttaac

SEQ ID NO: 1252636 - DNA, 15 bp, Homo sapiens
ttttttctttgttaa

SEQ ID NO: 1252637 - DNA, 15 bp, Homo sapiens
tttttttctttgtta

SEQ ID NO: 1252638 - DNA, 15 bp, Homo sapiens
atttttttctttgtt

SEQ ID NO: 1252639 - DNA, 15 bp, Homo sapiens
catttttttctttgt

SEQ ID NO: 1252640 - DNA, 15 bp, Homo sapiens
tcatttttttctttg

SEQ ID NO: 1252641 - DNA, 15 bp, Homo sapiens
ctcatttttttcttt

SEQ ID NO: 1252642 - DNA, 15 bp, Homo sapiens
gctcatttttttctt

SEQ ID NO: 1252643 - DNA, 15 bp, Homo sapiens
agctcatttttttct

SEQ ID NO: 1252644 - DNA, 15 bp, Homo sapiens
cagctcatttttttc

SEQ ID NO: 1252645 - DNA, 15 bp, Homo sapiens
tcagctcattttttt

SEQ ID NO: 1252646 - DNA, 15 bp, Homo sapiens
ttcagctcatttttt

SEQ ID NO: 1252647 - DNA, 15 bp, Homo sapiens
attcagctcattttt

SEQ ID NO: 1252648 - DNA, 15 bp, Homo sapiens
tattcagctcatttt

SEQ ID NO: 1252649 - DNA, 15 bp, Homo sapiens
atattcagctcattt

SEQ ID NO: 1252650 - DNA, 15 bp, Homo sapiens
gatattcagctcatt

SEQ ID NO: 1252651 - DNA, 15 bp, Homo sapiens
agatattcagctcat

SEQ ID NO: 1252652 - DNA, 15 bp, Homo sapiens
aagatattcagctca

SEQ ID NO: 1252653 - DNA, 15 bp, Homo sapiens
taagatattcagctc

SEQ ID NO: 1252654 - DNA, 15 bp, Homo sapiens
ataagatattcagct

SEQ ID NO: 1252655 - DNA, 15 bp, Homo sapiens
gataagatattcagc

SEQ ID NO: 1252656 - DNA, 15 bp, Homo sapiens
tgataagatattcag

SEQ ID NO: 1252657 - DNA, 15 bp, Homo sapiens
gtgataagatattca

SEQ ID NO: 1252658 - DNA, 15 bp, Homo sapiens
ggtgataagatattc

SEQ ID NO: 1252659 - DNA, 15 bp, Homo sapiens
tggtgataagatatt

SEQ ID NO: 1252660 - DNA, 15 bp, Homo sapiens
atggtgataagatat

SEQ ID NO: 1252661 - DNA, 15 bp, Homo sapiens
gatggtgataagata

SEQ ID NO: 1252662 - DNA, 15 bp, Homo sapiens
tgatggtgataagat

SEQ ID NO: 1252663 - DNA, 15 bp, Homo sapiens
atgatggtgataaga

SEQ ID NO: 1252664 - DNA, 15 bp, Homo sapiens
gatgatggtgataag

SEQ ID NO: 1252665 - DNA, 15 bp, Homo sapiens
tgatgatggtgataa

SEQ ID NO: 1252666 - DNA, 15 bp, Homo sapiens
ttgatgatggtgata

SEQ ID NO: 1252667 - DNA, 15 bp, Homo sapiens
tttgatgatggtgat

SEQ ID NO: 1252668 - DNA, 15 bp, Homo sapiens
ctttgatgatggtga

SEQ ID NO: 1252669 - DNA, 15 bp, Homo sapiens
gctttgatgatggtg

SEQ ID NO: 1252670 - DNA, 15 bp, Homo sapiens
agctttgatgatggt

SEQ ID NO: 1252671 - DNA, 15 bp, Homo sapiens
cagctttgatgatgg

SEQ ID NO: 1252672 - DNA, 15 bp, Homo sapiens
gcagctttgatgatg

SEQ ID NO: 1252673 - DNA, 15 bp, Homo sapiens
tgcagctttgatgat

SEQ ID NO: 1252674 - DNA, 15 bp, Homo sapiens
ttgcagctttgatga

SEQ ID NO: 1252675 - DNA, 15 bp, Homo sapiens
gttgcagctttgatg

SEQ ID NO: 1252676 - DNA, 15 bp, Homo sapiens
ggttgcagctttgat

SEQ ID NO: 1252677 - DNA, 15 bp, Homo sapiens
gggttgcagctttga

SEQ ID NO: 1252678 - DNA, 15 bp, Homo sapiens
agggttgcagctttg

SEQ ID NO: 1252679 - DNA, 15 bp, Homo sapiens
cagggttgcagcttt

SEQ ID NO: 1252680 - DNA, 15 bp, Homo sapiens
gcagggttgcagctt

SEQ ID NO: 1252681 - DNA, 15 bp, Homo sapiens
tgcagggttgcagct

SEQ ID NO: 1252682 - DNA, 15 bp, Homo sapiens
ttgcagggttgcagc

SEQ ID NO: 1252683 - DNA, 15 bp, Homo sapiens
gttgcagggttgcag

SEQ ID NO: 1252684 - DNA, 15 bp, Homo sapiens
ggttgcagggttgca

SEQ ID NO: 1252685 - DNA, 15 bp, Homo sapiens
aggttgcagggttgc

SEQ ID NO: 1252686 - DNA, 15 bp, Homo sapiens
taggttgcagggttg

SEQ ID NO: 1252687 - DNA, 15 bp, Homo sapiens
ctaggttgcagggtt

SEQ ID NO: 1252688 - DNA, 15 bp, Homo sapiens
tctaggttgcagggt

SEQ ID NO: 1252689 - DNA, 15 bp, Homo sapiens
ttctaggttgcaggg

SEQ ID NO: 1252690 - DNA, 15 bp, Homo sapiens
attctaggttgcagg

SEQ ID NO: 1252691 - DNA, 15 bp, Homo sapiens
aattctaggttgcag

SEQ ID NO: 1252692 - DNA, 15 bp, Homo sapiens
aaattctaggttgca

SEQ ID NO: 1252693 - DNA, 15 bp, Homo sapiens
gaaattctaggttgc

SEQ ID NO: 1252694 - DNA, 15 bp, Homo sapiens
tgaaattctaggttg

SEQ ID NO: 1252695 - DNA, 15 bp, Homo sapiens
atgaaattctaggtt

SEQ ID NO: 1252696 - DNA, 15 bp, Homo sapiens
aatgaaattctaggt

SEQ ID NO: 1252697 - DNA, 15 bp, Homo sapiens
gaatgaaattctagg

SEQ ID NO: 1252698 - DNA, 15 bp, Homo sapiens
tgaatgaaattctag

SEQ ID NO: 1252699 - DNA, 15 bp, Homo sapiens
atgaatgaaattcta

SEQ ID NO: 1252700 - DNA, 15 bp, Homo sapiens
gatgaatgaaattct

SEQ ID NO: 1252701 - DNA, 15 bp, Homo sapiens
agatgaatgaaattc

SEQ ID NO: 1252702 - DNA, 15 bp, Homo sapiens
aagatgaatgaaatt

SEQ ID NO: 1252703 - DNA, 15 bp, Homo sapiens
gaaagatgaatgaaa

SEQ ID NO: 1252704 - DNA, 15 bp, Homo sapiens
tgaaagatgaatgaa

SEQ ID NO: 1252705 - DNA, 15 bp, Homo sapiens
gtgaaagatgaatga

SEQ ID NO: 1252706 - DNA, 15 bp, Homo sapiens
tgtgaaagatgaatg

SEQ ID NO: 1252707 - DNA, 15 bp, Homo sapiens
ctgtgaaagatgaat

SEQ ID NO: 1252708 - DNA, 15 bp, Homo sapiens
actgtgaaagatgaa

SEQ ID NO: 1252709 - DNA, 15 bp, Homo sapiens
cactgtgaaagatga

SEQ ID NO: 1252710 - DNA, 15 bp, Homo sapiens
ccactgtgaaagatg

SEQ ID NO: 1252711 - DNA, 15 bp, Homo sapiens
accactgtgaaagat

SEQ ID NO: 1252712 - DNA, 15 bp, Homo sapiens
aaccactgtgaaaga

SEQ ID NO: 1252713 - DNA, 15 bp, Homo sapiens
taaccactgtgaaag

SEQ ID NO: 1252714 - DNA, 15 bp, Homo sapiens
ttaaccactgtgaaa

SEQ ID NO: 1252715 - DNA, 15 bp, Homo sapiens
gttaaccactgtgaa

SEQ ID NO: 1252716 - DNA, 15 bp, Homo sapiens
tgttaaccactgtga

SEQ ID NO: 1252717 - DNA, 15 bp, Homo sapiens
ttgttaaccactgtg

SEQ ID NO: 1252718 - DNA, 15 bp, Homo sapiens
cttgttaaccactgt

SEQ ID NO: 1252719 - DNA, 15 bp, Homo sapiens
gcttgttaaccactg

SEQ ID NO: 1252720 - DNA, 15 bp, Homo sapiens
agcttgttaaccact

SEQ ID NO: 1252721 - DNA, 15 bp, Homo sapiens
gagcttgttaaccac

SEQ ID NO: 1252722 - DNA, 15 bp, Homo sapiens
tgagcttgttaacca

SEQ ID NO: 1252723 - DNA, 15 bp, Homo sapiens
ttgagcttgttaacc

SEQ ID NO: 1252724 - DNA, 15 bp, Homo sapiens
tttgagcttgttaac

SEQ ID NO: 1252725 - DNA, 15 bp, Homo sapiens
ttttgagcttgttaa

SEQ ID NO: 1252726 - DNA, 15 bp, Homo sapiens
tttttgagcttgtta

SEQ ID NO: 1252727 - DNA, 15 bp, Homo sapiens
ttttttgagcttgtt

SEQ ID NO: 1252728 - DNA, 15 bp, Homo sapiens
tttttttgagcttgt

SEQ ID NO: 1252729 - DNA, 15 bp, Homo sapiens
ttttttttgagcttg

SEQ ID NO: 1252730 - DNA, 15 bp, Homo sapiens
cttttttttgagctt

SEQ ID NO: 1252731 - DNA, 15 bp, Homo sapiens
gcttttttttgagct

SEQ ID NO: 1252732 - DNA, 15 bp, Homo sapiens
agcttttttttgagc

SEQ ID NO: 1252733 - DNA, 15 bp, Homo sapiens
aagcttttttttgag

SEQ ID NO: 1252734 - DNA, 15 bp, Homo sapiens
aaagcttttttttga

SEQ ID NO: 1252735 - DNA, 15 bp, Homo sapiens
gaaagcttttttttg

SEQ ID NO: 1252736 - DNA, 15 bp, Homo sapiens
agaaagctttttttt

SEQ ID NO: 1252737 - DNA, 15 bp, Homo sapiens
aagaaagcttttttt

SEQ ID NO: 1252738 - DNA, 15 bp, Homo sapiens
aaagaaagctttttt

SEQ ID NO: 1252739 - DNA, 15 bp, Homo sapiens
aaaagaaagcttttt

SEQ ID NO: 1252740 - DNA, 15 bp, Homo sapiens
aaaaagaaagctttt

SEQ ID NO: 1252741 - DNA, 15 bp, Homo sapiens
gaaaaagaaagcttt

SEQ ID NO: 1252742 - DNA, 15 bp, Homo sapiens
agaaaaagaaagctt

SEQ ID NO: 1252743 - DNA, 15 bp, Homo sapiens
aagaaaaagaaagct

SEQ ID NO: 1252744 - DNA, 15 bp, Homo sapiens
aaagaaaaagaaagc

SEQ ID NO: 1252745 - DNA, 15 bp, Homo sapiens
aaaagaaaaagaaag

SEQ ID NO: 1252746 - DNA, 15 bp, Homo sapiens
aaaagaaagaaaaag

SEQ ID NO: 1252747 - DNA, 15 bp, Homo sapiens
taaaagaaaaaaaaa

SEQ ID NO: 1252748 - DNA, 15 bp, Homo sapiens
ttaaaagaaaaaaaa

SEQ ID NO: 1252749 - DNA, 15 bp, Homo sapiens
cttaaaagaaaaaaa

SEQ ID NO: 1252750 - DNA, 15 bp, Homo sapiens
ccttaaaagaaaaaa

SEQ ID NO: 1252751 - DNA, 15 bp, Homo sapiens
gccttaaaagaaaaa

SEQ ID NO: 1252752 - DNA, 15 bp, Homo sapiens
tgccttaaaagaaaa

SEQ ID NO: 1252753 - DNA, 15 bp, Homo sapiens
ttgccttaaaagaaa

SEQ ID NO: 1252754 - DNA, 15 bp, Homo sapiens
cttgccttaaaagaa

SEQ ID NO: 1252755 - DNA, 15 bp, Homo sapiens
ccttgccttaaaaga

SEQ ID NO: 1252756 - DNA, 15 bp, Homo sapiens
accttgccttaaaag

SEQ ID NO: 1252757 - DNA, 15 bp, Homo sapiens
gaccttgccttaaaa

SEQ ID NO: 1252758 - DNA, 15 bp, Homo sapiens
agaccttgccttaaa

SEQ ID NO: 1252759 - DNA, 15 bp, Homo sapiens
gagaccttgccttaa

SEQ ID NO: 1252760 - DNA, 15 bp, Homo sapiens
tgagaccttgcctta

SEQ ID NO: 1252761 - DNA, 15 bp, Homo sapiens
gtgagaccttgcctt

SEQ ID NO: 1252762 - DNA, 15 bp, Homo sapiens
agtgagaccttgcct

SEQ ID NO: 1252763 - DNA, 15 bp, Homo sapiens
gagtgagaccttgcc

SEQ ID NO: 1252764 - DNA, 15 bp, Homo sapiens
agagtgagaccttgc

SEQ ID NO: 1252765 - DNA, 15 bp, Homo sapiens
cagagtgagaccttg

SEQ ID NO: 1252766 - DNA, 15 bp, Homo sapiens
acagagtgagacctt

SEQ ID NO: 1252767 - DNA, 15 bp, Homo sapiens
gacagagtgagacct

SEQ ID NO: 1252768 - DNA, 15 bp, Homo sapiens
gtccagcctgggtga

SEQ ID NO: 1252769 - DNA, 15 bp, Homo sapiens
agtccagcctgggtg

SEQ ID NO: 1252770 - DNA, 15 bp, Homo sapiens
cagtccagcctgggt

SEQ ID NO: 1252771 - DNA, 15 bp, Homo sapiens
ccagtccagcctggg

SEQ ID NO: 1252772 - DNA, 15 bp, Homo sapiens
tccagtccagcctgg

SEQ ID NO: 1252773 - DNA, 15 bp, Homo sapiens
ctccagtccagcctg

SEQ ID NO: 1252774 - DNA, 15 bp, Homo sapiens
actccagtccagcct

SEQ ID NO: 1252775 - DNA, 15 bp, Homo sapiens
cactccagtccagcc

SEQ ID NO: 1252776 - DNA, 15 bp, Homo sapiens
gcactccagtccagc

SEQ ID NO: 1252777 - DNA, 15 bp, Homo sapiens
tgcactccagtccag

SEQ ID NO: 1252778 - DNA, 15 bp, Homo sapiens
ctgcactccagtcca

SEQ ID NO: 1252779 - DNA, 15 bp, Homo sapiens
actgcactccagtcc

SEQ ID NO: 1252780 - DNA, 15 bp, Homo sapiens
tataccactgcactc

SEQ ID NO: 1252781 - DNA, 15 bp, Homo sapiens
ttataccactgcact

SEQ ID NO: 1252782 - DNA, 15 bp, Homo sapiens
attataccactgcac

SEQ ID NO: 1252783 - DNA, 15 bp, Homo sapiens
gattataccactgca

SEQ ID NO: 1252784 - DNA, 15 bp, Homo sapiens
tgattataccactgc

SEQ ID NO: 1252785 - DNA, 15 bp, Homo sapiens
gtgattataccactg

SEQ ID NO: 1252786 - DNA, 15 bp, Homo sapiens
cgtgattataccact

SEQ ID NO: 1252787 - DNA, 15 bp, Homo sapiens
ccgtgattataccac

SEQ ID NO: 1252788 - DNA, 15 bp, Homo sapiens
accgtgattatacca

SEQ ID NO: 1252789 - DNA, 15 bp, Homo sapiens
aaccgtgattatacc

SEQ ID NO: 1252790 - DNA, 15 bp, Homo sapiens
gaaccgtgattatac

SEQ ID NO: 1252791 - DNA, 15 bp, Homo sapiens
tgaaccgtgattata

SEQ ID NO: 1252792 - DNA, 15 bp, Homo sapiens
gtgaaccgtgattat

SEQ ID NO: 1252793 - DNA, 15 bp, Homo sapiens
agtgaaccgtgatta

SEQ ID NO: 1252794 - DNA, 15 bp, Homo sapiens
cagtgaaccgtgatt

SEQ ID NO: 1252795 - DNA, 15 bp, Homo sapiens
gcagtgaaccgtgat

SEQ ID NO: 1252796 - DNA, 15 bp, Homo sapiens
tgcagtgaaccgtga

SEQ ID NO: 1252797 - DNA, 15 bp, Homo sapiens
ctgcagtgaaccgtg

SEQ ID NO: 1252798 - DNA, 15 bp, Homo sapiens
gctgcagtgaaccgt

SEQ ID NO: 1252799 - DNA, 15 bp, Homo sapiens
ggctgcagtgaaccg

SEQ ID NO: 1252800 - DNA, 15 bp, Homo sapiens
ccagaagtctgaggc

SEQ ID NO: 1252801 - DNA, 15 bp, Homo sapiens
cccagaagtctgagg

SEQ ID NO: 1252802 - DNA, 15 bp, Homo sapiens
gcccagaagtctgag

SEQ ID NO: 1252803 - DNA, 15 bp, Homo sapiens
agcccagaagtctga

SEQ ID NO: 1252804 - DNA, 15 bp, Homo sapiens
gagcccagaagtctg

SEQ ID NO: 1252805 - DNA, 15 bp, Homo sapiens
tgagcccagaagtct

SEQ ID NO: 1252806 - DNA, 15 bp, Homo sapiens
ttgagcccagaagtc

SEQ ID NO: 1252807 - DNA, 15 bp, Homo sapiens
tttgagcccagaagt

SEQ ID NO: 1252808 - DNA, 15 bp, Homo sapiens
gtttgagcccagaag

SEQ ID NO: 1252809 - DNA, 15 bp, Homo sapiens
tgtttgagcccagaa

SEQ ID NO: 1252810 - DNA, 15 bp, Homo sapiens
ggattgtttgagccc

SEQ ID NO: 1252811 - DNA, 15 bp, Homo sapiens
aggattgtttgagcc

SEQ ID NO: 1252812 - DNA, 15 bp, Homo sapiens
gaggattgtttgagc

SEQ ID NO: 1252813 - DNA, 15 bp, Homo sapiens
ggaggattgtttgag

SEQ ID NO: 1252814 - DNA, 15 bp, Homo sapiens
gggaggattgtttga

SEQ ID NO: 1252815 - DNA, 15 bp, Homo sapiens
tgggaggattgtttg

SEQ ID NO: 1252816 - DNA, 15 bp, Homo sapiens
gtgggaggattgttt

SEQ ID NO: 1252817 - DNA, 15 bp, Homo sapiens
ggtgggaggattgtt

SEQ ID NO: 1252818 - DNA, 15 bp, Homo sapiens
aggtgggaggattgt

SEQ ID NO: 1252819 - DNA, 15 bp, Homo sapiens
ataatgaacatatac

SEQ ID NO: 1252820 - DNA, 15 bp, Homo sapiens
aataatgaacatata

SEQ ID NO: 1252821 - DNA, 15 bp, Homo sapiens
aaataatgaacatat

SEQ ID NO: 1252822 - DNA, 15 bp, Homo sapiens
taaataatgaacata

SEQ ID NO: 1252823 - DNA, 15 bp, Homo sapiens
ataaataatgaacat

SEQ ID NO: 1252824 - DNA, 15 bp, Homo sapiens
aataaataatgaaca

SEQ ID NO: 1252825 - DNA, 15 bp, Homo sapiens
caataaataatgaac

SEQ ID NO: 1252826 - DNA, 15 bp, Homo sapiens
acaataaataatgaa

SEQ ID NO: 1252827 - DNA, 15 bp, Homo sapiens
gacaataaataatga

SEQ ID NO: 1252828 - DNA, 15 bp, Homo sapiens
agacaataaataatg

SEQ ID NO: 1252829 - DNA, 15 bp, Homo sapiens
cagacaataaataat

SEQ ID NO: 1252830 - DNA, 15 bp, Homo sapiens
acagacaataaataa

SEQ ID NO: 1252831 - DNA, 15 bp, Homo sapiens
gacagacaataaata

SEQ ID NO: 1252832 - DNA, 15 bp, Homo sapiens
agacagacaataaat

SEQ ID NO: 1252833 - DNA, 15 bp, Homo sapiens
gagacagacaataaa

SEQ ID NO: 1252834 - DNA, 15 bp, Homo sapiens
ggagacagacaataa

SEQ ID NO: 1252835 - DNA, 15 bp, Homo sapiens
tggagacagacaata

SEQ ID NO: 1252836 - DNA, 15 bp, Homo sapiens
gtggagacagacaat

SEQ ID NO: 1252837 - DNA, 15 bp, Homo sapiens
agtggagacagacaa

SEQ ID NO: 1252838 - DNA, 15 bp, Homo sapiens
tagtggagacagaca

SEQ ID NO: 1252839 - DNA, 15 bp, Homo sapiens
ttagtggagacagac

SEQ ID NO: 1252840 - DNA, 15 bp, Homo sapiens
tttagtggagacaga

SEQ ID NO: 1252841 - DNA, 15 bp, Homo sapiens
ttttagtggagacag

SEQ ID NO: 1252842 - DNA, 15 bp, Homo sapiens
gttttagtggagaca

SEQ ID NO: 1252843 - DNA, 15 bp, Homo sapiens
agttttagtggagac

SEQ ID NO: 1252844 - DNA, 15 bp, Homo sapiens
gagttttagtggaga

SEQ ID NO: 1252845 - DNA, 15 bp, Homo sapiens
tgagttttagtggag

SEQ ID NO: 1252846 - DNA, 15 bp, Homo sapiens
gtgagttttagtgga

SEQ ID NO: 1252847 - DNA, 15 bp, Homo sapiens
tgtgagttttagtgg

SEQ ID NO: 1252848 - DNA, 15 bp, Homo sapiens
ttgtgagttttagtg

SEQ ID NO: 1252849 - DNA, 15 bp, Homo sapiens
cttgtgagttttagt

SEQ ID NO: 1252850 - DNA, 15 bp, Homo sapiens
tcttgtgagttttag

SEQ ID NO: 1252851 - DNA, 15 bp, Homo sapiens
atcttgtgagtttta

SEQ ID NO: 1252852 - DNA, 15 bp, Homo sapiens
catcttgtgagtttt

SEQ ID NO: 1252853 - DNA, 15 bp, Homo sapiens
acatcttgtgagttt

SEQ ID NO: 1252854 - DNA, 15 bp, Homo sapiens
gacatcttgtgagtt

SEQ ID NO: 1252855 - DNA, 15 bp, Homo sapiens
agacatcttgtgagt

SEQ ID NO: 1252856 - DNA, 15 bp, Homo sapiens
aagacatcttgtgag

SEQ ID NO: 1252857 - DNA, 15 bp, Homo sapiens
aaagacatcttgtga

SEQ ID NO: 1252858 - DNA, 15 bp, Homo sapiens
taaagacatcttgtg

SEQ ID NO: 1252859 - DNA, 15 bp, Homo sapiens
gtaaagacatcttgt

SEQ ID NO: 1252860 - DNA, 15 bp, Homo sapiens
agtaaagacatcttg

SEQ ID NO: 1252861 - DNA, 15 bp, Homo sapiens
cagtaaagacatctt

SEQ ID NO: 1252862 - DNA, 15 bp, Homo sapiens
tcagtaaagacatct

SEQ ID NO: 1252863 - DNA, 15 bp, Homo sapiens
atcagtaaagacatc

SEQ ID NO: 1252864 - DNA, 15 bp, Homo sapiens
aatcagtaaagacat

SEQ ID NO: 1252865 - DNA, 15 bp, Homo sapiens
aaatcagtaaagaca

SEQ ID NO: 1252866 - DNA, 15 bp, Homo sapiens
aaaatcagtaaagac

SEQ ID NO: 1252867 - DNA, 15 bp, Homo sapiens
taaaatcagtaaaga

SEQ ID NO: 1252868 - DNA, 15 bp, Homo sapiens
ataaaatcagtaaag

SEQ ID NO: 1252869 - DNA, 15 bp, Homo sapiens
tataaaatcagtaaa

SEQ ID NO: 1252870 - DNA, 15 bp, Homo sapiens
gtataaaatcagtaa

SEQ ID NO: 1252871 - DNA, 15 bp, Homo sapiens
tgtataaaatcagta

SEQ ID NO: 1252872 - DNA, 15 bp, Homo sapiens
gtgtataaaatcagt

SEQ ID NO: 1252873 - DNA, 15 bp, Homo sapiens
agtgtataaaatcag

SEQ ID NO: 1252874 - DNA, 15 bp, Homo sapiens
cagtgtataaaatca

SEQ ID NO: 1252875 - DNA, 15 bp, Homo sapiens
gcagtgtataaaatc

SEQ ID NO: 1252876 - DNA, 15 bp, Homo sapiens
ggcagtgtataaaat

SEQ ID NO: 1252877 - DNA, 15 bp, Homo sapiens
atcactgttaaatca

SEQ ID NO: 1252878 - DNA, 15 bp, Homo sapiens
tatcactgttaaatc

SEQ ID NO: 1252879 - DNA, 15 bp, Homo sapiens
ttatcactgttaaat

SEQ ID NO: 1252880 - DNA, 15 bp, Homo sapiens
attatcactgttaaa

SEQ ID NO: 1252881 - DNA, 15 bp, Homo sapiens
tattatcactgttaa

SEQ ID NO: 1252882 - DNA, 15 bp, Homo sapiens
ttattatcactgtta

SEQ ID NO: 1252883 - DNA, 15 bp, Homo sapiens
gttattatcactgtt

SEQ ID NO: 1252884 - DNA, 15 bp, Homo sapiens
agttattatcactgt

SEQ ID NO: 1252885 - DNA, 15 bp, Homo sapiens
aagttattatcactg

SEQ ID NO: 1252886 - DNA, 15 bp, Homo sapiens
aaagttattatcact

SEQ ID NO: 1252887 - DNA, 15 bp, Homo sapiens
aaaagttattatcac

SEQ ID NO: 1252888 - DNA, 15 bp, Homo sapiens
gaaaagttattatca

SEQ ID NO: 1252889 - DNA, 15 bp, Homo sapiens
tgaaaagttattatc

SEQ ID NO: 1252890 - DNA, 15 bp, Homo sapiens
gtgaaaagttattat

SEQ ID NO: 1252891 - DNA, 15 bp, Homo sapiens
agtgaaaagttatta

SEQ ID NO: 1252892 - DNA, 15 bp, Homo sapiens
aagtgaaaagttatt

SEQ ID NO: 1252893 - DNA, 15 bp, Homo sapiens
caagtgaaaagttat

SEQ ID NO: 1252894 - DNA, 15 bp, Homo sapiens
ccaagtgaaaagtta

SEQ ID NO: 1252895 - DNA, 15 bp, Homo sapiens
cccaagtgaaaagtt

SEQ ID NO: 1252896 - DNA, 15 bp, Homo sapiens
ccccaagtgaaaagt

SEQ ID NO: 1252897 - DNA, 15 bp, Homo sapiens
gccccaagtgaaaag

SEQ ID NO: 1252898 - DNA, 15 bp, Homo sapiens
ggccccaagtgaaaa

SEQ ID NO: 1252899 - DNA, 15 bp, Homo sapiens
aggccccaagtgaaa

SEQ ID NO: 1252900 - DNA, 15 bp, Homo sapiens
taggccccaagtgaa

SEQ ID NO: 1252901 - DNA, 15 bp, Homo sapiens
gtaggccccaagtga

SEQ ID NO: 1252902 - DNA, 15 bp, Homo sapiens
tgtaggccccaagtg

SEQ ID NO: 1252903 - DNA, 15 bp, Homo sapiens
ctgtaggccccaagt

SEQ ID NO: 1252904 - DNA, 15 bp, Homo sapiens
actgtaggccccaag

SEQ ID NO: 1252905 - DNA, 15 bp, Homo sapiens
tactgtaggccccaa

SEQ ID NO: 1252906 - DNA, 15 bp, Homo sapiens
gtactgtaggcccca

SEQ ID NO: 1252907 - DNA, 15 bp, Homo sapiens
agtactgtaggcccc

SEQ ID NO: 1252908 - DNA, 15 bp, Homo sapiens
cagtactgtaggccc

SEQ ID NO: 1252909 - DNA, 15 bp, Homo sapiens
gcagtactgtaggcc

SEQ ID NO: 1252910 - DNA, 15 bp, Homo sapiens
agcagtactgtaggc

SEQ ID NO: 1252911 - DNA, 15 bp, Homo sapiens
aagcagtactgtagg

SEQ ID NO: 1252912 - DNA, 15 bp, Homo sapiens
taagcagtactgtag

SEQ ID NO: 1252913 - DNA, 15 bp, Homo sapiens
ataagcagtactgta

SEQ ID NO: 1252914 - DNA, 15 bp, Homo sapiens
gataagcagtactgt

SEQ ID NO: 1252915 - DNA, 15 bp, Homo sapiens
tgataagcagtactg

SEQ ID NO: 1252916 - DNA, 15 bp, Homo sapiens
ctgataagcagtact

SEQ ID NO: 1252917 - DNA, 15 bp, Homo sapiens
tctgataagcagtac

SEQ ID NO: 1252918 - DNA, 15 bp, Homo sapiens
ctctgataagcagta

SEQ ID NO: 1252919 - DNA, 15 bp, Homo sapiens
tctctgataagcagt

SEQ ID NO: 1252920 - DNA, 15 bp, Homo sapiens
ttctctgataagcag

SEQ ID NO: 1252921 - DNA, 15 bp, Homo sapiens
cttctctgataagca

SEQ ID NO: 1252922 - DNA, 15 bp, Homo sapiens
gcttctctgataagc

SEQ ID NO: 1252923 - DNA, 15 bp, Homo sapiens
ggcttctctgataag

SEQ ID NO: 1252924 - DNA, 15 bp, Homo sapiens
tggcttctctgataa

SEQ ID NO: 1252925 - DNA, 15 bp, Homo sapiens
ttggcttctctgata

SEQ ID NO: 1252926 - DNA, 15 bp, Homo sapiens
tttggcttctctgat

SEQ ID NO: 1252927 - DNA, 15 bp, Homo sapiens
ctttggcttctctga

SEQ ID NO: 1252928 - DNA, 15 bp, Homo sapiens
gctttggcttctctg

SEQ ID NO: 1252929 - DNA, 15 bp, Homo sapiens
agctttggcttctct

SEQ ID NO: 1252930 - DNA, 15 bp, Homo sapiens
aagctttggcttctc

SEQ ID NO: 1252931 - DNA, 15 bp, Homo sapiens
gaagctttggcttct

SEQ ID NO: 1252932 - DNA, 15 bp, Homo sapiens
agaagctttggcttc

SEQ ID NO: 1252933 - DNA, 15 bp, Homo sapiens
gagaagctttggctt

SEQ ID NO: 1252934 - DNA, 15 bp, Homo sapiens
ggagaagctttggct

SEQ ID NO: 1252935 - DNA, 15 bp, Homo sapiens
gggagaagctttggc

SEQ ID NO: 1252936 - DNA, 15 bp, Homo sapiens
ggggagaagctttgg

SEQ ID NO: 1252937 - DNA, 15 bp, Homo sapiens
gggggagaagctttg

SEQ ID NO: 1252938 - DNA, 15 bp, Homo sapiens
agggggagaagcttt

SEQ ID NO: 1252939 - DNA, 15 bp, Homo sapiens
cagggggagaagctt

SEQ ID NO: 1252940 - DNA, 15 bp, Homo sapiens
ccagggggagaagct

SEQ ID NO: 1252941 - DNA, 15 bp, Homo sapiens
tccagggggagaagc

SEQ ID NO: 1252942 - DNA, 15 bp, Homo sapiens
ctccagggggagaag

SEQ ID NO: 1252943 - DNA, 15 bp, Homo sapiens
gctccagggggagaa

SEQ ID NO: 1252944 - DNA, 15 bp, Homo sapiens
agctccagggggaga

SEQ ID NO: 1252945 - DNA, 15 bp, Homo sapiens
cagctccagggggag

SEQ ID NO: 1252946 - DNA, 15 bp, Homo sapiens
ccagctccaggggga

SEQ ID NO: 1252947 - DNA, 15 bp, Homo sapiens
tccagctccaggggg

SEQ ID NO: 1252948 - DNA, 15 bp, Homo sapiens
ctccagctccagggg

SEQ ID NO: 1252949 - DNA, 15 bp, Homo sapiens
tctccagctccaggg

SEQ ID NO: 1252950 - DNA, 15 bp, Homo sapiens
ttctccagctccagg

SEQ ID NO: 1252951 - DNA, 15 bp, Homo sapiens
cttctccagctccag

SEQ ID NO: 1252952 - DNA, 15 bp, Homo sapiens
tcttctccagctcca

SEQ ID NO: 1252953 - DNA, 15 bp, Homo sapiens
gtcttctccagctcc

SEQ ID NO: 1252954 - DNA, 15 bp, Homo sapiens
tgtcttctccagctc

SEQ ID NO: 1252955 - DNA, 15 bp, Homo sapiens
ctgtcttctccagct

SEQ ID NO: 1252956 - DNA, 15 bp, Homo sapiens
gctgtcttctccagc

SEQ ID NO: 1252957 - DNA, 15 bp, Homo sapiens
ggctgtcttctccag

SEQ ID NO: 1252958 - DNA, 15 bp, Homo sapiens
tggctgtcttctcca

SEQ ID NO: 1252959 - DNA, 15 bp, Homo sapiens
atggctgtcttctcc

SEQ ID NO: 1252960 - DNA, 15 bp, Homo sapiens
gatggctgtcttctc

SEQ ID NO: 1252961 - DNA, 15 bp, Homo sapiens
ggatggctgtcttct

SEQ ID NO: 1252962 - DNA, 15 bp, Homo sapiens
tggatggctgtcttc

SEQ ID NO: 1252963 - DNA, 15 bp, Homo sapiens
ttggatggctgtctt

SEQ ID NO: 1252964 - DNA, 15 bp, Homo sapiens
tttggatggctgtct

SEQ ID NO: 1252965 - DNA, 15 bp, Homo sapiens
ttttggatggctgtc

SEQ ID NO: 1252966 - DNA, 15 bp, Homo sapiens
attttggatggctgt

SEQ ID NO: 1252967 - DNA, 15 bp, Homo sapiens
aattttggatggctg

SEQ ID NO: 1252968 - DNA, 15 bp, Homo sapiens
taattttggatggct

SEQ ID NO: 1252969 - DNA, 15 bp, Homo sapiens
gtaattttggatggc

SEQ ID NO: 1252970 - DNA, 15 bp, Homo sapiens
tgtaattttggatgg

SEQ ID NO: 1252971 - DNA, 15 bp, Homo sapiens
gtgtaattttggatg

SEQ ID NO: 1252972 - DNA, 15 bp, Homo sapiens
agtgtaattttggat

SEQ ID NO: 1252973 - DNA, 15 bp, Homo sapiens
cagtgtaattttgga

SEQ ID NO: 1252974 - DNA, 15 bp, Homo sapiens
acagtgtaattttgg

SEQ ID NO: 1252975 - DNA, 15 bp, Homo sapiens
gacagtgtaattttg

SEQ ID NO: 1252976 - DNA, 15 bp, Homo sapiens
tgacagtgtaatttt

SEQ ID NO: 1252977 - DNA, 15 bp, Homo sapiens
gtgacagtgtaattt

SEQ ID NO: 1252978 - DNA, 15 bp, Homo sapiens
cgtgacagtgtaatt

SEQ ID NO: 1252979 - DNA, 15 bp, Homo sapiens
ccgtgacagtgtaat

SEQ ID NO: 1252980 - DNA, 15 bp, Homo sapiens
tccgtgacagtgtaa

SEQ ID NO: 1252981 - DNA, 15 bp, Homo sapiens
ctccgtgacagtgta

SEQ ID NO: 1252982 - DNA, 15 bp, Homo sapiens
actccgtgacagtgt

SEQ ID NO: 1252983 - DNA, 15 bp, Homo sapiens
aactccgtgacagtg

SEQ ID NO: 1252984 - DNA, 15 bp, Homo sapiens
gaactccgtgacagt

SEQ ID NO: 1252985 - DNA, 15 bp, Homo sapiens
ggaactccgtgacag

SEQ ID NO: 1252986 - DNA, 15 bp, Homo sapiens
tggaactccgtgaca

SEQ ID NO: 1252987 - DNA, 15 bp, Homo sapiens
ctggaactccgtgac

SEQ ID NO: 1252988 - DNA, 15 bp, Homo sapiens
gctggaactccgtga

SEQ ID NO: 1252989 - DNA, 15 bp, Homo sapiens
ggctggaactccgtg

SEQ ID NO: 1252990 - DNA, 15 bp, Homo sapiens
gggctggaactccgt

SEQ ID NO: 1252991 - DNA, 15 bp, Homo sapiens
ggggctggaactccg

SEQ ID NO: 1252992 - DNA, 15 bp, Homo sapiens
aggggctggaactcc

SEQ ID NO: 1252993 - DNA, 15 bp, Homo sapiens
gaggggctggaactc

SEQ ID NO: 1252994 - DNA, 15 bp, Homo sapiens
agaggggctggaact

SEQ ID NO: 1252995 - DNA, 15 bp, Homo sapiens
tagaggggctggaac

SEQ ID NO: 1252996 - DNA, 15 bp, Homo sapiens
atagaggggctggaa

SEQ ID NO: 1252997 - DNA, 15 bp, Homo sapiens
aatagaggggctgga

SEQ ID NO: 1252998 - DNA, 15 bp, Homo sapiens
taatagaggggctgg

SEQ ID NO: 1252999 - DNA, 15 bp, Homo sapiens
gtaatagaggggctg

SEQ ID NO: 1253000 - DNA, 15 bp, Homo sapiens
cgtaatagaggggct

SEQ ID NO: 1253001 - DNA, 15 bp, Homo sapiens
acgtaatagaggggc

SEQ ID NO: 1253002 - DNA, 15 bp, Homo sapiens
cacgtaatagagggg

SEQ ID NO: 1253003 - DNA, 15 bp, Homo sapiens
ccacgtaatagaggg

SEQ ID NO: 1253004 - DNA, 15 bp, Homo sapiens
gccacgtaatagagg

SEQ ID NO: 1253005 - DNA, 15 bp, Homo sapiens
tgccacgtaatagag

SEQ ID NO: 1253006 - DNA, 15 bp, Homo sapiens
ctgccacgtaataga

SEQ ID NO: 1253007 - DNA, 15 bp, Homo sapiens
tctgccacgtaatag

SEQ ID NO: 1253008 - DNA, 15 bp, Homo sapiens
ctctgccacgtaata

SEQ ID NO: 1253009 - DNA, 15 bp, Homo sapiens
tctctgccacgtaat

SEQ ID NO: 1253010 - DNA, 15 bp, Homo sapiens
ctctctgccacgtaa

SEQ ID NO: 1253011 - DNA, 15 bp, Homo sapiens
actctctgccacgta

SEQ ID NO: 1253012 - DNA, 15 bp, Homo sapiens
aactctctgccacgt

SEQ ID NO: 1253013 - DNA, 15 bp, Homo sapiens
aaactctctgccacg

SEQ ID NO: 1253014 - DNA, 15 bp, Homo sapiens
aaaactctctgccac

SEQ ID NO: 1253015 - DNA, 15 bp, Homo sapiens
taaaactctctgcca

SEQ ID NO: 1253016 - DNA, 15 bp, Homo sapiens
ttaaaactctctgcc

SEQ ID NO: 1253017 - DNA, 15 bp, Homo sapiens
attaaaactctctgc

SEQ ID NO: 1253018 - DNA, 15 bp, Homo sapiens
cattaaaactctctg

SEQ ID NO: 1253019 - DNA, 15 bp, Homo sapiens
tcattaaaactctct

SEQ ID NO: 1253020 - DNA, 15 bp, Homo sapiens
atcattaaaactctc

SEQ ID NO: 1253021 - DNA, 15 bp, Homo sapiens
catcattaaaactct

SEQ ID NO: 1253022 - DNA, 15 bp, Homo sapiens
gcatcattaaaactc

SEQ ID NO: 1253023 - DNA, 15 bp, Homo sapiens
ggcatcattaaaact

SEQ ID NO: 1253024 - DNA, 15 bp, Homo sapiens
tggcatcattaaaac

SEQ ID NO: 1253025 - DNA, 15 bp, Homo sapiens
ttggcatcattaaaa

SEQ ID NO: 1253026 - DNA, 15 bp, Homo sapiens
cttggcatcattaaa

SEQ ID NO: 1253027 - DNA, 15 bp, Homo sapiens
ccttggcatcattaa

SEQ ID NO: 1253028 - DNA, 15 bp, Homo sapiens
tccttggcatcatta

SEQ ID NO: 1253029 - DNA, 15 bp, Homo sapiens
ctccttggcatcatt

SEQ ID NO: 1253030 - DNA, 15 bp, Homo sapiens
tctccttggcatcat

SEQ ID NO: 1253031 - DNA, 15 bp, Homo sapiens
ttctccttggcatca

SEQ ID NO: 1253032 - DNA, 15 bp, Homo sapiens
tttctccttggcatc

SEQ ID NO: 1253033 - DNA, 15 bp, Homo sapiens
ctttctccttggcat

SEQ ID NO: 1253034 - DNA, 15 bp, Homo sapiens
actttctccttggca

SEQ ID NO: 1253035 - DNA, 15 bp, Homo sapiens
tactttctccttggc

SEQ ID NO: 1253036 - DNA, 15 bp, Homo sapiens
ttactttctccttgg

SEQ ID NO: 1253037 - DNA, 15 bp, Homo sapiens
cttactttctccttg

SEQ ID NO: 1253038 - DNA, 15 bp, Homo sapiens
ccttactttctcctt

SEQ ID NO: 1253039 - DNA, 15 bp, Homo sapiens
accttactttctcct

SEQ ID NO: 1253040 - DNA, 15 bp, Homo sapiens
caccttactttctcc

SEQ ID NO: 1253041 - DNA, 15 bp, Homo sapiens
tcaccttactttctc

SEQ ID NO: 1253042 - DNA, 15 bp, Homo sapiens
ctcaccttactttct

SEQ ID NO: 1253043 - DNA, 15 bp, Homo sapiens
cctcaccttactttc

SEQ ID NO: 1253044 - DNA, 15 bp, Homo sapiens
acctcaccttacttt

SEQ ID NO: 1253045 - DNA, 15 bp, Homo sapiens
cacctcaccttactt

SEQ ID NO: 1253046 - DNA, 15 bp, Homo sapiens
ccacctcaccttact

SEQ ID NO: 1253047 - DNA, 15 bp, Homo sapiens
accacctcaccttac

SEQ ID NO: 1253048 - DNA, 15 bp, Homo sapiens
caccacctcacctta

SEQ ID NO: 1253049 - DNA, 15 bp, Homo sapiens
tcaccacctcacctt

SEQ ID NO: 1253050 - DNA, 15 bp, Homo sapiens
gtcaccacctcacct

SEQ ID NO: 1253051 - DNA, 15 bp, Homo sapiens
tgtcaccacctcacc

SEQ ID NO: 1253052 - DNA, 15 bp, Homo sapiens
ttgtcaccacctcac

SEQ ID NO: 1253053 - DNA, 15 bp, Homo sapiens
tttgtcaccacctca

SEQ ID NO: 1253054 - DNA, 15 bp, Homo sapiens
ctttgtcaccacctc

SEQ ID NO: 1253055 - DNA, 15 bp, Homo sapiens
cctttgtcaccacct

SEQ ID NO: 1253056 - DNA, 15 bp, Homo sapiens
acctttgtcaccacc

SEQ ID NO: 1253057 - DNA, 15 bp, Homo sapiens
cacctttgtcaccac

SEQ ID NO: 1253058 - DNA, 15 bp, Homo sapiens
tcacctttgtcacca

SEQ ID NO: 1253059 - DNA, 15 bp, Homo sapiens
ctcacctttgtcacc

SEQ ID NO: 1253060 - DNA, 15 bp, Homo sapiens
gctcacctttgtcac

SEQ ID NO: 1253061 - DNA, 15 bp, Homo sapiens
ggctcacctttgtca

SEQ ID NO: 1253062 - DNA, 15 bp, Homo sapiens
tggctcacctttgtc

SEQ ID NO: 1253063 - DNA, 15 bp, Homo sapiens
gtggctcacctttgt

SEQ ID NO: 1253064 - DNA, 15 bp, Homo sapiens
agtggctcacctttg

SEQ ID NO: 1253065 - DNA, 15 bp, Homo sapiens
tagtggctcaccttt

SEQ ID NO: 1253066 - DNA, 15 bp, Homo sapiens
ctagtggctcacctt

SEQ ID NO: 1253067 - DNA, 15 bp, Homo sapiens
gctagtggctcacct

SEQ ID NO: 1253068 - DNA, 15 bp, Homo sapiens
agctagtggctcacc

SEQ ID NO: 1253069 - DNA, 15 bp, Homo sapiens
gagctagtggctcac

SEQ ID NO: 1253070 - DNA, 15 bp, Homo sapiens
agagctagtggctca

SEQ ID NO: 1253071 - DNA, 15 bp, Homo sapiens
cagagctagtggctc

SEQ ID NO: 1253072 - DNA, 15 bp, Homo sapiens
ccagagctagtggct

SEQ ID NO: 1253073 - DNA, 15 bp, Homo sapiens
cccagagctagtggc

SEQ ID NO: 1253074 - DNA, 15 bp, Homo sapiens
ccccagagctagtgg

SEQ ID NO: 1253075 - DNA, 15 bp, Homo sapiens
cccccagagctagtg

SEQ ID NO: 1253076 - DNA, 15 bp, Homo sapiens
gcccccagagctagt

SEQ ID NO: 1253077 - DNA, 15 bp, Homo sapiens
ggcccccagagctag

SEQ ID NO: 1253078 - DNA, 15 bp, Homo sapiens
aggcccccagagcta

SEQ ID NO: 1253079 - DNA, 15 bp, Homo sapiens
gaggcccccagagct

SEQ ID NO: 1253080 - DNA, 15 bp, Homo sapiens
ggaggcccccagagc

SEQ ID NO: 1253081 - DNA, 15 bp, Homo sapiens
aggaggcccccagag

SEQ ID NO: 1253082 - DNA, 15 bp, Homo sapiens
caggaggcccccaga

SEQ ID NO: 1253083 - DNA, 15 bp, Homo sapiens
tcaggaggcccccag

SEQ ID NO: 1253084 - DNA, 15 bp, Homo sapiens
gtcaggaggccccca

SEQ ID NO: 1253085 - DNA, 15 bp, Homo sapiens
agtcaggaggccccc

SEQ ID NO: 1253086 - DNA, 15 bp, Homo sapiens
cagtcaggaggcccc

SEQ ID NO: 1253087 - DNA, 15 bp, Homo sapiens
ccagtcaggaggccc

SEQ ID NO: 1253088 - DNA, 15 bp, Homo sapiens
accagtcaggaggcc

SEQ ID NO: 1253089 - DNA, 15 bp, Homo sapiens
caccagtcaggaggc

SEQ ID NO: 1253090 - DNA, 15 bp, Homo sapiens
gcaccagtcaggagg

SEQ ID NO: 1253091 - DNA, 15 bp, Homo sapiens
ggcaccagtcaggag

SEQ ID NO: 1253092 - DNA, 15 bp, Homo sapiens
tggcaccagtcagga

SEQ ID NO: 1253093 - DNA, 15 bp, Homo sapiens
gtggcaccagtcagg

SEQ ID NO: 1253094 - DNA, 15 bp, Homo sapiens
agtggcaccagtcag

SEQ ID NO: 1253095 - DNA, 15 bp, Homo sapiens
gagtggcaccagtca

SEQ ID NO: 1253096 - DNA, 15 bp, Homo sapiens
tgagtggcaccagtc

SEQ ID NO: 1253097 - DNA, 15 bp, Homo sapiens
atgagtggcaccagt

SEQ ID NO: 1253098 - DNA, 15 bp, Homo sapiens
gatgagtggcaccag

SEQ ID NO: 1253099 - DNA, 15 bp, Homo sapiens
agatgagtggcacca

SEQ ID NO: 1253100 - DNA, 15 bp, Homo sapiens
cagatgagtggcacc

SEQ ID NO: 1253101 - DNA, 15 bp, Homo sapiens
acagatgagtggcac

SEQ ID NO: 1253102 - DNA, 15 bp, Homo sapiens
cacagatgagtggca

SEQ ID NO: 1253103 - DNA, 15 bp, Homo sapiens
ccacagatgagtggc

SEQ ID NO: 1253104 - DNA, 15 bp, Homo sapiens
cccacagatgagtgg

SEQ ID NO: 1253105 - DNA, 15 bp, Homo sapiens
acccacagatgagtg

SEQ ID NO: 1253106 - DNA, 15 bp, Homo sapiens
cacccacagatgagt

SEQ ID NO: 1253107 - DNA, 15 bp, Homo sapiens
ccacccacagatgag

SEQ ID NO: 1253108 - DNA, 15 bp, Homo sapiens
accacccacagatga

SEQ ID NO: 1253109 - DNA, 15 bp, Homo sapiens
aaccacccacagatg

SEQ ID NO: 1253110 - DNA, 15 bp, Homo sapiens
caaccacccacagat

SEQ ID NO: 1253111 - DNA, 15 bp, Homo sapiens
ccaaccacccacaga

SEQ ID NO: 1253112 - DNA, 15 bp, Homo sapiens
gccaaccacccacag

SEQ ID NO: 1253113 - DNA, 15 bp, Homo sapiens
ggccaaccacccaca

SEQ ID NO: 1253114 - DNA, 15 bp, Homo sapiens
tggccaaccacccac

SEQ ID NO: 1253115 - DNA, 15 bp, Homo sapiens
ctggccaaccaccca

SEQ ID NO: 1253116 - DNA, 15 bp, Homo sapiens
cctggccaaccaccc

SEQ ID NO: 1253117 - DNA, 15 bp, Homo sapiens
tcctggccaaccacc

SEQ ID NO: 1253118 - DNA, 15 bp, Homo sapiens
ctcctggccaaccac

SEQ ID NO: 1253119 - DNA, 15 bp, Homo sapiens
tctcctggccaacca

SEQ ID NO: 1253120 - DNA, 15 bp, Homo sapiens
ctctcctggccaacc

SEQ ID NO: 1253121 - DNA, 15 bp, Homo sapiens
actctcctggccaac

SEQ ID NO: 1253122 - DNA, 15 bp, Homo sapiens
cactctcctggccaa

SEQ ID NO: 1253123 - DNA, 15 bp, Homo sapiens
ccactctcctggcca

SEQ ID NO: 1253124 - DNA, 15 bp, Homo sapiens
tccactctcctggcc

SEQ ID NO: 1253125 - DNA, 15 bp, Homo sapiens
gtccactctcctggc

SEQ ID NO: 1253126 - DNA, 15 bp, Homo sapiens
agtccactctcctgg

SEQ ID NO: 1253127 - DNA, 15 bp, Homo sapiens
gagtccactctcctg

SEQ ID NO: 1253128 - DNA, 15 bp, Homo sapiens
ggagtccactctcct

SEQ ID NO: 1253129 - DNA, 15 bp, Homo sapiens
tggagtccactctcc

SEQ ID NO: 1253130 - DNA, 15 bp, Homo sapiens
ttggagtccactctc

SEQ ID NO: 1253131 - DNA, 15 bp, Homo sapiens
attggagtccactct

SEQ ID NO: 1253132 - DNA, 15 bp, Homo sapiens
cattggagtccactc

SEQ ID NO: 1253133 - DNA, 15 bp, Homo sapiens
acattggagtccact

SEQ ID NO: 1253134 - DNA, 15 bp, Homo sapiens
gacattggagtccac

SEQ ID NO: 1253135 - DNA, 15 bp, Homo sapiens
agacattggagtcca

SEQ ID NO: 1253136 - DNA, 15 bp, Homo sapiens
tagacattggagtcc

SEQ ID NO: 1253137 - DNA, 15 bp, Homo sapiens
gtagacattggagtc

SEQ ID NO: 1253138 - DNA, 15 bp, Homo sapiens
tgtagacattggagt

SEQ ID NO: 1253139 - DNA, 15 bp, Homo sapiens
ctgtagacattggag

SEQ ID NO: 1253140 - DNA, 15 bp, Homo sapiens
gctgtagacattgga

SEQ ID NO: 1253141 - DNA, 15 bp, Homo sapiens
tgctgtagacattgg

SEQ ID NO: 1253142 - DNA, 15 bp, Homo sapiens
ttgctgtagacattg

SEQ ID NO: 1253143 - DNA, 15 bp, Homo sapiens
gttgctgtagacatt

SEQ ID NO: 1253144 - DNA, 15 bp, Homo sapiens
agttgctgtagacat

SEQ ID NO: 1253145 - DNA, 15 bp, Homo sapiens
aagttgctgtagaca

SEQ ID NO: 1253146 - DNA, 15 bp, Homo sapiens
aaagttgctgtagac

SEQ ID NO: 1253147 - DNA, 15 bp, Homo sapiens
caaagttgctgtaga

SEQ ID NO: 1253148 - DNA, 15 bp, Homo sapiens
acaaagttgctgtag

SEQ ID NO: 1253149 - DNA, 15 bp, Homo sapiens
tacaaagttgctgta

SEQ ID NO: 1253150 - DNA, 15 bp, Homo sapiens
gtacaaagttgctgt

SEQ ID NO: 1253151 - DNA, 15 bp, Homo sapiens
ggtacaaagttgctg

SEQ ID NO: 1253152 - DNA, 15 bp, Homo sapiens
tggtacaaagttgct

SEQ ID NO: 1253153 - DNA, 15 bp, Homo sapiens
atggtacaaagttgc

SEQ ID NO: 1253154 - DNA, 15 bp, Homo sapiens
tatggtacaaagttg

SEQ ID NO: 1253155 - DNA, 15 bp, Homo sapiens
ctatggtacaaagtt

SEQ ID NO: 1253156 - DNA, 15 bp, Homo sapiens
tctatggtacaaagt

SEQ ID NO: 1253157 - DNA, 15 bp, Homo sapiens
gtctatggtacaaag

SEQ ID NO: 1253158 - DNA, 15 bp, Homo sapiens
tgtctatggtacaaa

SEQ ID NO: 1253159 - DNA, 15 bp, Homo sapiens
ctgtctatggtacaa

SEQ ID NO: 1253160 - DNA, 15 bp, Homo sapiens
actgtctatggtaca

SEQ ID NO: 1253161 - DNA, 15 bp, Homo sapiens
aactgtctatggtac

SEQ ID NO: 1253162 - DNA, 15 bp, Homo sapiens
aaactgtctatggta

SEQ ID NO: 1253163 - DNA, 15 bp, Homo sapiens
gaaactgtctatggt

SEQ ID NO: 1253164 - DNA, 15 bp, Homo sapiens
agaaactgtctatgg

SEQ ID NO: 1253165 - DNA, 15 bp, Homo sapiens
gagaaactgtctatg

SEQ ID NO: 1253166 - DNA, 15 bp, Homo sapiens
agagaaactgtctat

SEQ ID NO: 1253167 - DNA, 15 bp, Homo sapiens
gagagaaactgtcta

SEQ ID NO: 1253168 - DNA, 15 bp, Homo sapiens
ggagagaaactgtct

SEQ ID NO: 1253169 - DNA, 15 bp, Homo sapiens
gggagagaaactgtc

SEQ ID NO: 1253170 - DNA, 15 bp, Homo sapiens
tgggagagaaactgt

SEQ ID NO: 1253171 - DNA, 15 bp, Homo sapiens
atgggagagaaactg

SEQ ID NO: 1253172 - DNA, 15 bp, Homo sapiens
catgggagagaaact

SEQ ID NO: 1253173 - DNA, 15 bp, Homo sapiens
acatgggagagaaac

SEQ ID NO: 1253174 - DNA, 15 bp, Homo sapiens
aacatgggagagaaa

SEQ ID NO: 1253175 - DNA, 15 bp, Homo sapiens
gaacatgggagagaa

SEQ ID NO: 1253176 - DNA, 15 bp, Homo sapiens
agaacatgggagaga

SEQ ID NO: 1253177 - DNA, 15 bp, Homo sapiens
gagaacatgggagag

SEQ ID NO: 1253178 - DNA, 15 bp, Homo sapiens
ggagaacatgggaga

SEQ ID NO: 1253179 - DNA, 15 bp, Homo sapiens
tggagaacatgggag

SEQ ID NO: 1253180 - DNA, 15 bp, Homo sapiens
gtggagaacatggga

SEQ ID NO: 1253181 - DNA, 15 bp, Homo sapiens
ggtggagaacatggg

SEQ ID NO: 1253182 - DNA, 15 bp, Homo sapiens
gggtggagaacatgg

SEQ ID NO: 1253183 - DNA, 15 bp, Homo sapiens
agggtggagaacatg

SEQ ID NO: 1253184 - DNA, 15 bp, Homo sapiens
gagggtggagaacat

SEQ ID NO: 1253185 - DNA, 15 bp, Homo sapiens
ggagggtggagaaca

SEQ ID NO: 1253186 - DNA, 15 bp, Homo sapiens
aggagggtggagaac

SEQ ID NO: 1253187 - DNA, 15 bp, Homo sapiens
aaggagggtggagaa

SEQ ID NO: 1253188 - DNA, 15 bp, Homo sapiens
aaaggagggtggaga

SEQ ID NO: 1253189 - DNA, 15 bp, Homo sapiens
aaaaggagggtggag

SEQ ID NO: 1253190 - DNA, 15 bp, Homo sapiens
gaaaaggagggtgga

SEQ ID NO: 1253191 - DNA, 15 bp, Homo sapiens
agaaaaggagggtgg

SEQ ID NO: 1253192 - DNA, 15 bp, Homo sapiens
aagaaaaggagggtg

SEQ ID NO: 1253193 - DNA, 15 bp, Homo sapiens
gaagaaaaggagggt

SEQ ID NO: 1253194 - DNA, 15 bp, Homo sapiens
ggaagaaaaggaggg

SEQ ID NO: 1253195 - DNA, 15 bp, Homo sapiens
cggaagaaaaggagg

SEQ ID NO: 1253196 - DNA, 15 bp, Homo sapiens
acggaagaaaaggag

SEQ ID NO: 1253197 - DNA, 15 bp, Homo sapiens
aacggaagaaaagga

SEQ ID NO: 1253198 - DNA, 15 bp, Homo sapiens
gaacggaagaaaagg

SEQ ID NO: 1253199 - DNA, 15 bp, Homo sapiens
agaacggaagaaaag

SEQ ID NO: 1253200 - DNA, 15 bp, Homo sapiens
gagaacggaagaaaa

SEQ ID NO: 1253201 - DNA, 15 bp, Homo sapiens
agagaacggaagaaa

SEQ ID NO: 1253202 - DNA, 15 bp, Homo sapiens
cagagaacggaagaa

SEQ ID NO: 1253203 - DNA, 15 bp, Homo sapiens
acagagaacggaaga

SEQ ID NO: 1253204 - DNA, 15 bp, Homo sapiens
aacagagaacggaag

SEQ ID NO: 1253205 - DNA, 15 bp, Homo sapiens
caacagagaacggaa

SEQ ID NO: 1253206 - DNA, 15 bp, Homo sapiens
ccaacagagaacgga

SEQ ID NO: 1253207 - DNA, 15 bp, Homo sapiens
tccaacagagaacgg

SEQ ID NO: 1253208 - DNA, 15 bp, Homo sapiens
ttccaacagagaacg

SEQ ID NO: 1253209 - DNA, 15 bp, Homo sapiens
cttccaacagagaac

SEQ ID NO: 1253210 - DNA, 15 bp, Homo sapiens
ccttccaacagagaa

SEQ ID NO: 1253211 - DNA, 15 bp, Homo sapiens
accttccaacagaga

SEQ ID NO: 1253212 - DNA, 15 bp, Homo sapiens
aaccttccaacagag

SEQ ID NO: 1253213 - DNA, 15 bp, Homo sapiens
caaccttccaacaga

SEQ ID NO: 1253214 - DNA, 15 bp, Homo sapiens
ccaaccttccaacag

SEQ ID NO: 1253215 - DNA, 15 bp, Homo sapiens
cccaaccttccaaca

SEQ ID NO: 1253216 - DNA, 15 bp, Homo sapiens
gcccaaccttccaac

SEQ ID NO: 1253217 - DNA, 15 bp, Homo sapiens
tgcccaaccttccaa

SEQ ID NO: 1253218 - DNA, 15 bp, Homo sapiens
atgcccaaccttcca

SEQ ID NO: 1253219 - DNA, 15 bp, Homo sapiens
catgcccaaccttcc

SEQ ID NO: 1253220 - DNA, 15 bp, Homo sapiens
gcatgcccaaccttc

SEQ ID NO: 1253221 - DNA, 15 bp, Homo sapiens
agcatgcccaacctt

SEQ ID NO: 1253222 - DNA, 15 bp, Homo sapiens
cagcatgcccaacct

SEQ ID NO: 1253223 - DNA, 15 bp, Homo sapiens
tcagcatgcccaacc

SEQ ID NO: 1253224 - DNA, 15 bp, Homo sapiens
gtcagcatgcccaac

SEQ ID NO: 1253225 - DNA, 15 bp, Homo sapiens
ggtcagcatgcccaa

SEQ ID NO: 1253226 - DNA, 15 bp, Homo sapiens
aggtcagcatgccca

SEQ ID NO: 1253227 - DNA, 15 bp, Homo sapiens
aaggtcagcatgccc

SEQ ID NO: 1253228 - DNA, 15 bp, Homo sapiens
aaaggtcagcatgcc

SEQ ID NO: 1253229 - DNA, 15 bp, Homo sapiens
caaaggtcagcatgc

SEQ ID NO: 1253230 - DNA, 15 bp, Homo sapiens
gcaaaggtcagcatg

SEQ ID NO: 1253231 - DNA, 15 bp, Homo sapiens
tgcaaaggtcagcat

SEQ ID NO: 1253232 - DNA, 15 bp, Homo sapiens
gtgcaaaggtcagca

SEQ ID NO: 1253233 - DNA, 15 bp, Homo sapiens
tgtgcaaaggtcagc

SEQ ID NO: 1253234 - DNA, 15 bp, Homo sapiens
gtgtgcaaaggtcag

SEQ ID NO: 1253235 - DNA, 15 bp, Homo sapiens
tgtgtgcaaaggtca

SEQ ID NO: 1253236 - DNA, 15 bp, Homo sapiens
gtgtgtgcaaaggtc

SEQ ID NO: 1253237 - DNA, 15 bp, Homo sapiens
ggtgtgtgcaaaggt

SEQ ID NO: 1253238 - DNA, 15 bp, Homo sapiens
gggtgtgtgcaaagg

SEQ ID NO: 1253239 - DNA, 15 bp, Homo sapiens
ggggtgtgtgcaaag

SEQ ID NO: 1253240 - DNA, 15 bp, Homo sapiens
aggggtgtgtgcaaa

SEQ ID NO: 1253241 - DNA, 15 bp, Homo sapiens
caggggtgtgtgcaa

SEQ ID NO: 1253242 - DNA, 15 bp, Homo sapiens
gcaggggtgtgtgca

SEQ ID NO: 1253243 - DNA, 15 bp, Homo sapiens
ggcaggggtgtgtgc

SEQ ID NO: 1253244 - DNA, 15 bp, Homo sapiens
tggcaggggtgtgtg

SEQ ID NO: 1253245 - DNA, 15 bp, Homo sapiens
gtggcaggggtgtgt

SEQ ID NO: 1253246 - DNA, 15 bp, Homo sapiens
ggtggcaggggtgtg

SEQ ID NO: 1253247 - DNA, 15 bp, Homo sapiens
aggtggcaggggtgt

SEQ ID NO: 1253248 - DNA, 15 bp, Homo sapiens
caggtggcaggggtg

SEQ ID NO: 1253249 - DNA, 15 bp, Homo sapiens
ccaggtggcaggggt

SEQ ID NO: 1253250 - DNA, 15 bp, Homo sapiens
accaggtggcagggg

SEQ ID NO: 1253251 - DNA, 15 bp, Homo sapiens
gaccaggtggcaggg

SEQ ID NO: 1253252 - DNA, 15 bp, Homo sapiens
ggaccaggtggcagg

SEQ ID NO: 1253253 - DNA, 15 bp, Homo sapiens
gggaccaggtggcag

SEQ ID NO: 1253254 - DNA, 15 bp, Homo sapiens
agggaccaggtggca

SEQ ID NO: 1253255 - DNA, 15 bp, Homo sapiens
cagggaccaggtggc

SEQ ID NO: 1253256 - DNA, 15 bp, Homo sapiens
acagggaccaggtgg

SEQ ID NO: 1253257 - DNA, 15 bp, Homo sapiens
aacagggaccaggtg

SEQ ID NO: 1253258 - DNA, 15 bp, Homo sapiens
gaacagggaccaggt

SEQ ID NO: 1253259 - DNA, 15 bp, Homo sapiens
tgaacagggaccagg

SEQ ID NO: 1253260 - DNA, 15 bp, Homo sapiens
ttgaacagggaccag

SEQ ID NO: 1253261 - DNA, 15 bp, Homo sapiens
gttgaacagggacca

SEQ ID NO: 1253262 - DNA, 15 bp, Homo sapiens
cgttgaacagggacc

SEQ ID NO: 1253263 - DNA, 15 bp, Homo sapiens
gcgttgaacagggac

SEQ ID NO: 1253264 - DNA, 15 bp, Homo sapiens
tgcgttgaacaggga

SEQ ID NO: 1253265 - DNA, 15 bp, Homo sapiens
ttgcgttgaacaggg

SEQ ID NO: 1253266 - DNA, 15 bp, Homo sapiens
gttgcgttgaacagg

SEQ ID NO: 1253267 - DNA, 15 bp, Homo sapiens
ggttgcgttgaacag

SEQ ID NO: 1253268 - DNA, 15 bp, Homo sapiens
tggttgcgttgaaca

SEQ ID NO: 1253269 - DNA, 15 bp, Homo sapiens
gtggttgcgttgaac

SEQ ID NO: 1253270 - DNA, 15 bp, Homo sapiens
ggtggttgcgttgaa

SEQ ID NO: 1253271 - DNA, 15 bp, Homo sapiens
tggtggttgcgttga

SEQ ID NO: 1253272 - DNA, 15 bp, Homo sapiens
ttggtggttgcgttg

SEQ ID NO: 1253273 - DNA, 15 bp, Homo sapiens
cttggtggttgcgtt

SEQ ID NO: 1253274 - DNA, 15 bp, Homo sapiens
acttggtggttgcgt

SEQ ID NO: 1253275 - DNA, 15 bp, Homo sapiens
gacttggtggttgcg

SEQ ID NO: 1253276 - DNA, 15 bp, Homo sapiens
tgacttggtggttgc

SEQ ID NO: 1253277 - DNA, 15 bp, Homo sapiens
ttgacttggtggttg

SEQ ID NO: 1253278 - DNA, 15 bp, Homo sapiens
cttgacttggtggtt

SEQ ID NO: 1253279 - DNA, 15 bp, Homo sapiens
tcttgacttggtggt

SEQ ID NO: 1253280 - DNA, 15 bp, Homo sapiens
gtcttgacttggtgg

SEQ ID NO: 1253281 - DNA, 15 bp, Homo sapiens
tgtcttgacttggtg

SEQ ID NO: 1253282 - DNA, 15 bp, Homo sapiens
gtgtcttgacttggt

SEQ ID NO: 1253283 - DNA, 15 bp, Homo sapiens
agtgtcttgacttgg

SEQ ID NO: 1253284 - DNA, 15 bp, Homo sapiens
cagtgtcttgacttg

SEQ ID NO: 1253285 - DNA, 15 bp, Homo sapiens
tcagtgtcttgactt

SEQ ID NO: 1253286 - DNA, 15 bp, Homo sapiens
ttcagtgtcttgact

SEQ ID NO: 1253287 - DNA, 15 bp, Homo sapiens
gttcagtgtcttgac

SEQ ID NO: 1253288 - DNA, 15 bp, Homo sapiens
ggttcagtgtcttga

SEQ ID NO: 1253289 - DNA, 15 bp, Homo sapiens
gggttcagtgtcttg

SEQ ID NO: 1253290 - DNA, 15 bp, Homo sapiens
agggttcagtgtctt

SEQ ID NO: 1253291 - DNA, 15 bp, Homo sapiens
gagggttcagtgtct

SEQ ID NO: 1253292 - DNA, 15 bp, Homo sapiens
ggagggttcagtgtc

SEQ ID NO: 1253293 - DNA, 15 bp, Homo sapiens
aggagggttcagtgt

SEQ ID NO: 1253294 - DNA, 15 bp, Homo sapiens
caggagggttcagtg

SEQ ID NO: 1253295 - DNA, 15 bp, Homo sapiens
gcaggagggttcagt

SEQ ID NO: 1253296 - DNA, 15 bp, Homo sapiens
tgcaggagggttcag

SEQ ID NO: 1253297 - DNA, 15 bp, Homo sapiens
atgcaggagggttca

SEQ ID NO: 1253298 - DNA, 15 bp, Homo sapiens
tatgcaggagggttc

SEQ ID NO: 1253299 - DNA, 15 bp, Homo sapiens
gtatgcaggagggtt

SEQ ID NO: 1253300 - DNA, 15 bp, Homo sapiens
tgtatgcaggagggt

SEQ ID NO: 1253301 - DNA, 15 bp, Homo sapiens
ctgtatgcaggaggg

SEQ ID NO: 1253302 - DNA, 15 bp, Homo sapiens
tctgtatgcaggagg

SEQ ID NO: 1253303 - DNA, 15 bp, Homo sapiens
ctctgtatgcaggag

SEQ ID NO: 1253304 - DNA, 15 bp, Homo sapiens
actctgtatgcagga

SEQ ID NO: 1253305 - DNA, 15 bp, Homo sapiens
cactctgtatgcagg

SEQ ID NO: 1253306 - DNA, 15 bp, Homo sapiens
ccactctgtatgcag

SEQ ID NO: 1253307 - DNA, 15 bp, Homo sapiens
gccactctgtatgca

SEQ ID NO: 1253308 - DNA, 15 bp, Homo sapiens
ggccactctgtatgc

SEQ ID NO: 1253309 - DNA, 15 bp, Homo sapiens
tggccactctgtatg

SEQ ID NO: 1253310 - DNA, 15 bp, Homo sapiens
gtggccactctgtat

SEQ ID NO: 1253311 - DNA, 15 bp, Homo sapiens
tgtggccactctgta

SEQ ID NO: 1253312 - DNA, 15 bp, Homo sapiens
ctgtggccactctgt

SEQ ID NO: 1253313 - DNA, 15 bp, Homo sapiens
tctgtggccactctg

SEQ ID NO: 1253314 - DNA, 15 bp, Homo sapiens
ttctgtggccactct

SEQ ID NO: 1253315 - DNA, 15 bp, Homo sapiens
cttctgtggccactc

SEQ ID NO: 1253316 - DNA, 15 bp, Homo sapiens
acttctgtggccact

SEQ ID NO: 1253317 - DNA, 15 bp, Homo sapiens
gacttctgtggccac

SEQ ID NO: 1253318 - DNA, 15 bp, Homo sapiens
agacttctgtggcca

SEQ ID NO: 1253319 - DNA, 15 bp, Homo sapiens
gagacttctgtggcc

SEQ ID NO: 1253320 - DNA, 15 bp, Homo sapiens
ggagacttctgtggc

SEQ ID NO: 1253321 - DNA, 15 bp, Homo sapiens
gggagacttctgtgg

SEQ ID NO: 1253322 - DNA, 15 bp, Homo sapiens
ggggagacttctgtg

SEQ ID NO: 1253323 - DNA, 15 bp, Homo sapiens
tggggagacttctgt

SEQ ID NO: 1253324 - DNA, 15 bp, Homo sapiens
gtggggagacttctg

SEQ ID NO: 1253325 - DNA, 15 bp, Homo sapiens
tgtggggagacttct

SEQ ID NO: 1253326 - DNA, 15 bp, Homo sapiens
ttgtggggagacttc

SEQ ID NO: 1253327 - DNA, 15 bp, Homo sapiens
tttgtggggagactt

SEQ ID NO: 1253328 - DNA, 15 bp, Homo sapiens
ttttgtggggagact

SEQ ID NO: 1253329 - DNA, 15 bp, Homo sapiens
attttgtggggagac

SEQ ID NO: 1253330 - DNA, 15 bp, Homo sapiens
gattttgtggggaga

SEQ ID NO: 1253331 - DNA, 15 bp, Homo sapiens
tgattttgtggggag

SEQ ID NO: 1253332 - DNA, 15 bp, Homo sapiens
ttgattttgtgggga

SEQ ID NO: 1253333 - DNA, 15 bp, Homo sapiens
tttgattttgtgggg

SEQ ID NO: 1253334 - DNA, 15 bp, Homo sapiens
ctttgattttgtggg

SEQ ID NO: 1253335 - DNA, 15 bp, Homo sapiens
tctttgattttgtgg

SEQ ID NO: 1253336 - DNA, 15 bp, Homo sapiens
ttctttgattttgtg

SEQ ID NO: 1253337 - DNA, 15 bp, Homo sapiens
cttctttgattttgt

SEQ ID NO: 1253338 - DNA, 15 bp, Homo sapiens
acttctttgattttg

SEQ ID NO: 1253339 - DNA, 15 bp, Homo sapiens
gacttctttgatttt

SEQ ID NO: 1253340 - DNA, 15 bp, Homo sapiens
agacttctttgattt

SEQ ID NO: 1253341 - DNA, 15 bp, Homo sapiens
aagacttctttgatt

SEQ ID NO: 1253342 - DNA, 15 bp, Homo sapiens
taagacttctttgat

SEQ ID NO: 1253343 - DNA, 15 bp, Homo sapiens
ataagacttctttga

SEQ ID NO: 1253344 - DNA, 15 bp, Homo sapiens
tataagacttctttg

SEQ ID NO: 1253345 - DNA, 15 bp, Homo sapiens
ttataagacttcttt

SEQ ID NO: 1253346 - DNA, 15 bp, Homo sapiens
gttataagacttctt

SEQ ID NO: 1253347 - DNA, 15 bp, Homo sapiens
ggttataagacttct

SEQ ID NO: 1253348 - DNA, 15 bp, Homo sapiens
aggttataagacttc

SEQ ID NO: 1253349 - DNA, 15 bp, Homo sapiens
taggttataagactt

SEQ ID NO: 1253350 - DNA, 15 bp, Homo sapiens
ctaggttataagact

SEQ ID NO: 1253351 - DNA, 15 bp, Homo sapiens
cctaggttataagac

SEQ ID NO: 1253352 - DNA, 15 bp, Homo sapiens
tcctaggttataaga

SEQ ID NO: 1253353 - DNA, 15 bp, Homo sapiens
ttcctaggttataag

SEQ ID NO: 1253354 - DNA, 15 bp, Homo sapiens
cttcctaggttataa

SEQ ID NO: 1253355 - DNA, 15 bp, Homo sapiens
acttcctaggttata

SEQ ID NO: 1253356 - DNA, 15 bp, Homo sapiens
gacttcctaggttat

SEQ ID NO: 1253357 - DNA, 15 bp, Homo sapiens
ggacttcctaggtta

SEQ ID NO: 1253358 - DNA, 15 bp, Homo sapiens
aggacttcctaggtt

SEQ ID NO: 1253359 - DNA, 15 bp, Homo sapiens
aaggacttcctaggt

SEQ ID NO: 1253360 - DNA, 15 bp, Homo sapiens
aaaggacttcctagg

SEQ ID NO: 1253361 - DNA, 15 bp, Homo sapiens
gaaaggacttcctag

SEQ ID NO: 1253362 - DNA, 15 bp, Homo sapiens
agaaaggacttccta

SEQ ID NO: 1253363 - DNA, 15 bp, Homo sapiens
aagaaaggacttcct

SEQ ID NO: 1253364 - DNA, 15 bp, Homo sapiens
gaagaaaggacttcc

SEQ ID NO: 1253365 - DNA, 15 bp, Homo sapiens
tgaagaaaggacttc

SEQ ID NO: 1253366 - DNA, 15 bp, Homo sapiens
gtgaagaaaggactt

SEQ ID NO: 1253367 - DNA, 15 bp, Homo sapiens
agtgaagaaaggact

SEQ ID NO: 1253368 - DNA, 15 bp, Homo sapiens
aagtgaagaaaggac

SEQ ID NO: 1253369 - DNA, 15 bp, Homo sapiens
aaagtgaagaaagga

SEQ ID NO: 1253370 - DNA, 15 bp, Homo sapiens
gaaagtgaagaaagg

SEQ ID NO: 1253371 - DNA, 15 bp, Homo sapiens
agaaagtgaagaaag

SEQ ID NO: 1253372 - DNA, 15 bp, Homo sapiens
aagaaagtgaagaaa

SEQ ID NO: 1253373 - DNA, 15 bp, Homo sapiens
gaagaaagtgaagaa

SEQ ID NO: 1253374 - DNA, 15 bp, Homo sapiens
agaagaaagtgaaga

SEQ ID NO: 1253375 - DNA, 15 bp, Homo sapiens
gagaagaaagtgaag

SEQ ID NO: 1253376 - DNA, 15 bp, Homo sapiens
ggagaagaaagtgaa

SEQ ID NO: 1253377 - DNA, 15 bp, Homo sapiens
gggagaagaaagtga

SEQ ID NO: 1253378 - DNA, 15 bp, Homo sapiens
tgggagaagaaagtg

SEQ ID NO: 1253379 - DNA, 15 bp, Homo sapiens
ttgggagaagaaagt

SEQ ID NO: 1253380 - DNA, 15 bp, Homo sapiens
tttgggagaagaaag

SEQ ID NO: 1253381 - DNA, 15 bp, Homo sapiens
gtttgggagaagaaa

SEQ ID NO: 1253382 - DNA, 15 bp, Homo sapiens
tgtttgggagaagaa

SEQ ID NO: 1253383 - DNA, 15 bp, Homo sapiens
gtgtttgggagaaga

SEQ ID NO: 1253384 - DNA, 15 bp, Homo sapiens
ggtgtttgggagaag

SEQ ID NO: 1253385 - DNA, 15 bp, Homo sapiens
aggtgtttgggagaa

SEQ ID NO: 1253386 - DNA, 15 bp, Homo sapiens
taggtgtttgggaga

SEQ ID NO: 1253387 - DNA, 15 bp, Homo sapiens
gtaggtgtttgggag

SEQ ID NO: 1253388 - DNA, 15 bp, Homo sapiens
tgtaggtgtttggga

SEQ ID NO: 1253389 - DNA, 15 bp, Homo sapiens
ttgtaggtgtttggg

SEQ ID NO: 1253390 - DNA, 15 bp, Homo sapiens
tttgtaggtgtttgg

SEQ ID NO: 1253391 - DNA, 15 bp, Homo sapiens
ttttgtaggtgtttg

SEQ ID NO: 1253392 - DNA, 15 bp, Homo sapiens
attttgtaggtgttt

SEQ ID NO: 1253393 - DNA, 15 bp, Homo sapiens
aattttgtaggtgtt

SEQ ID NO: 1253394 - DNA, 15 bp, Homo sapiens
aaattttgtaggtgt

SEQ ID NO: 1253395 - DNA, 15 bp, Homo sapiens
caaattttgtaggtg

SEQ ID NO: 1253396 - DNA, 15 bp, Homo sapiens
gcaaattttgtaggt

SEQ ID NO: 1253397 - DNA, 15 bp, Homo sapiens
agcaaattttgtagg

SEQ ID NO: 1253398 - DNA, 15 bp, Homo sapiens
aagcaaattttgtag

SEQ ID NO: 1253399 - DNA, 15 bp, Homo sapiens
gaagcaaattttgta

SEQ ID NO: 1253400 - DNA, 15 bp, Homo sapiens
ggaagcaaattttgt

SEQ ID NO: 1253401 - DNA, 15 bp, Homo sapiens
aggaagcaaattttg

SEQ ID NO: 1253402 - DNA, 15 bp, Homo sapiens
gaggaagcaaatttt

SEQ ID NO: 1253403 - DNA, 15 bp, Homo sapiens
ggaggaagcaaattt

SEQ ID NO: 1253404 - DNA, 15 bp, Homo sapiens
aggaggaagcaaatt

SEQ ID NO: 1253405 - DNA, 15 bp, Homo sapiens
aaggaggaagcaaat

SEQ ID NO: 1253406 - DNA, 15 bp, Homo sapiens
aaaggaggaagcaaa

SEQ ID NO: 1253407 - DNA, 15 bp, Homo sapiens
caaaggaggaagcaa

SEQ ID NO: 1253408 - DNA, 15 bp, Homo sapiens
acaaaggaggaagca

SEQ ID NO: 1253409 - DNA, 15 bp, Homo sapiens
cacaaaggaggaagc

SEQ ID NO: 1253410 - DNA, 15 bp, Homo sapiens
acacaaaggaggaag

SEQ ID NO: 1253411 - DNA, 15 bp, Homo sapiens
gacacaaaggaggaa

SEQ ID NO: 1253412 - DNA, 15 bp, Homo sapiens
agacacaaaggagga

SEQ ID NO: 1253413 - DNA, 15 bp, Homo sapiens
aagacacaaaggagg

SEQ ID NO: 1253414 - DNA, 15 bp, Homo sapiens
aaagacacaaaggag

SEQ ID NO: 1253415 - DNA, 15 bp, Homo sapiens
taaagacacaaagga

SEQ ID NO: 1253416 - DNA, 15 bp, Homo sapiens
gtaaagacacaaagg

SEQ ID NO: 1253417 - DNA, 15 bp, Homo sapiens
ggtaaagacacaaag

SEQ ID NO: 1253418 - DNA, 15 bp, Homo sapiens
gggtaaagacacaaa

SEQ ID NO: 1253419 - DNA, 15 bp, Homo sapiens
tgggtaaagacacaa

SEQ ID NO: 1253420 - DNA, 15 bp, Homo sapiens
ttgggtaaagacaca

SEQ ID NO: 1253421 - DNA, 15 bp, Homo sapiens
tttgggtaaagacac

SEQ ID NO: 1253422 - DNA, 15 bp, Homo sapiens
atttgggtaaagaca

SEQ ID NO: 1253423 - DNA, 15 bp, Homo sapiens
aatttgggtaaagac

SEQ ID NO: 1253424 - DNA, 15 bp, Homo sapiens
aaatttgggtaaaga

SEQ ID NO: 1253425 - DNA, 15 bp, Homo sapiens
taaatttgggtaaag

SEQ ID NO: 1253426 - DNA, 15 bp, Homo sapiens
ttaaatttgggtaaa

SEQ ID NO: 1253427 - DNA, 15 bp, Homo sapiens
attaaatttgggtaa

SEQ ID NO: 1253428 - DNA, 15 bp, Homo sapiens
gattaaatttgggta

SEQ ID NO: 1253429 - DNA, 15 bp, Homo sapiens
agattaaatttgggt

SEQ ID NO: 1253430 - DNA, 15 bp, Homo sapiens
gagattaaatttggg

SEQ ID NO: 1253431 - DNA, 15 bp, Homo sapiens
agagattaaatttgg

SEQ ID NO: 1253432 - DNA, 15 bp, Homo sapiens
tagagattaaatttg

SEQ ID NO: 1253433 - DNA, 15 bp, Homo sapiens
atagagattaaattt

SEQ ID NO: 1253434 - DNA, 15 bp, Homo sapiens
tatagagattaaatt

SEQ ID NO: 1253435 - DNA, 15 bp, Homo sapiens
atatagagattaaat

SEQ ID NO: 1253436 - DNA, 15 bp, Homo sapiens
catatagagattaaa

SEQ ID NO: 1253437 - DNA, 15 bp, Homo sapiens
acatatagagattaa

SEQ ID NO: 1253438 - DNA, 15 bp, Homo sapiens
gacatatagagatta

SEQ ID NO: 1253439 - DNA, 15 bp, Homo sapiens
agacatatagagatt

SEQ ID NO: 1253440 - DNA, 15 bp, Homo sapiens
aagacatatagagat

SEQ ID NO: 1253441 - DNA, 15 bp, Homo sapiens
aaagacatatagaga

SEQ ID NO: 1253442 - DNA, 15 bp, Homo sapiens
gaaagacatatagag

SEQ ID NO: 1253443 - DNA, 15 bp, Homo sapiens
agaaagacatataga

SEQ ID NO: 1253444 - DNA, 15 bp, Homo sapiens
gagaaagacatatag

SEQ ID NO: 1253445 - DNA, 15 bp, Homo sapiens
agagaaagacatata

SEQ ID NO: 1253446 - DNA, 15 bp, Homo sapiens
tagagaaagacatat

SEQ ID NO: 1253447 - DNA, 15 bp, Homo sapiens
ttagagaaagacata

SEQ ID NO: 1253448 - DNA, 15 bp, Homo sapiens
gttagagaaagacat

SEQ ID NO: 1253449 - DNA, 15 bp, Homo sapiens
ggttagagaaagaca

SEQ ID NO: 1253450 - DNA, 15 bp, Homo sapiens
tggttagagaaagac

SEQ ID NO: 1253451 - DNA, 15 bp, Homo sapiens
ttggttagagaaaga

SEQ ID NO: 1253452 - DNA, 15 bp, Homo sapiens
gttggttagagaaag

SEQ ID NO: 1253453 - DNA, 15 bp, Homo sapiens
agttggttagagaaa

SEQ ID NO: 1253454 - DNA, 15 bp, Homo sapiens
aagttggttagagaa

SEQ ID NO: 1253455 - DNA, 15 bp, Homo sapiens
taagttggttagaga

SEQ ID NO: 1253456 - DNA, 15 bp, Homo sapiens
ataagttggttagag

SEQ ID NO: 1253457 - DNA, 15 bp, Homo sapiens
aataagttggttaga

SEQ ID NO: 1253458 - DNA, 15 bp, Homo sapiens
aaataagttggttag

SEQ ID NO: 1253459 - DNA, 15 bp, Homo sapiens
gaaataagttggtta

SEQ ID NO: 1253460 - DNA, 15 bp, Homo sapiens
agaaataagttggtt

SEQ ID NO: 1253461 - DNA, 15 bp, Homo sapiens
tagaaataagttggt

SEQ ID NO: 1253462 - DNA, 15 bp, Homo sapiens
gtagaaataagttgg

SEQ ID NO: 1253463 - DNA, 15 bp, Homo sapiens
agtagaaataagttg

SEQ ID NO: 1253464 - DNA, 15 bp, Homo sapiens
gagtagaaataagtt

SEQ ID NO: 1253465 - DNA, 15 bp, Homo sapiens
tgagtagaaataagt

SEQ ID NO: 1253466 - DNA, 15 bp, Homo sapiens
atgagtagaaataag

SEQ ID NO: 1253467 - DNA, 15 bp, Homo sapiens
gatgagtagaaataa

SEQ ID NO: 1253468 - DNA, 15 bp, Homo sapiens
ggatgagtagaaata

SEQ ID NO: 1253469 - DNA, 15 bp, Homo sapiens
gggatgagtagaaat

SEQ ID NO: 1253470 - DNA, 15 bp, Homo sapiens
agggatgagtagaaa

SEQ ID NO: 1253471 - DNA, 15 bp, Homo sapiens
cagggatgagtagaa

SEQ ID NO: 1253472 - DNA, 15 bp, Homo sapiens
gcagggatgagtaga

SEQ ID NO: 1253473 - DNA, 15 bp, Homo sapiens
ggcagggatgagtag

SEQ ID NO: 1253474 - DNA, 15 bp, Homo sapiens
tggcagggatgagta

SEQ ID NO: 1253475 - DNA, 15 bp, Homo sapiens
gtggcagggatgagt

SEQ ID NO: 1253476 - DNA, 15 bp, Homo sapiens
ggtggcagggatgag

SEQ ID NO: 1253477 - DNA, 15 bp, Homo sapiens
tggtggcagggatga

SEQ ID NO: 1253478 - DNA, 15 bp, Homo sapiens
ctggtggcagggatg

SEQ ID NO: 1253479 - DNA, 15 bp, Homo sapiens
actggtggcagggat

SEQ ID NO: 1253480 - DNA, 15 bp, Homo sapiens
cactggtggcaggga

SEQ ID NO: 1253481 - DNA, 15 bp, Homo sapiens
gcactggtggcaggg

SEQ ID NO: 1253482 - DNA, 15 bp, Homo sapiens
cgcactggtggcagg

SEQ ID NO: 1253483 - DNA, 15 bp, Homo sapiens
acgcactggtggcag

SEQ ID NO: 1253484 - DNA, 15 bp, Homo sapiens
gacgcactggtggca

SEQ ID NO: 1253485 - DNA, 15 bp, Homo sapiens
agacgcactggtggc

SEQ ID NO: 1253486 - DNA, 15 bp, Homo sapiens
cagacgcactggtgg

SEQ ID NO: 1253487 - DNA, 15 bp, Homo sapiens
acagacgcactggtg

SEQ ID NO: 1253488 - DNA, 15 bp, Homo sapiens
tacagacgcactggt

SEQ ID NO: 1253489 - DNA, 15 bp, Homo sapiens
ttacagacgcactgg

SEQ ID NO: 1253490 - DNA, 15 bp, Homo sapiens
attacagacgcactg

SEQ ID NO: 1253491 - DNA, 15 bp, Homo sapiens
tattacagacgcact

SEQ ID NO: 1253492 - DNA, 15 bp, Homo sapiens
gtattacagacgcac

SEQ ID NO: 1253493 - DNA, 15 bp, Homo sapiens
agtattacagacgca

SEQ ID NO: 1253494 - DNA, 15 bp, Homo sapiens
aagtattacagacgc

SEQ ID NO: 1253495 - DNA, 15 bp, Homo sapiens
taagtattacagacg

SEQ ID NO: 1253496 - DNA, 15 bp, Homo sapiens
ataagtattacagac

SEQ ID NO: 1253497 - DNA, 15 bp, Homo sapiens
aataagtattacaga

SEQ ID NO: 1253498 - DNA, 15 bp, Homo sapiens
taataagtattacag

SEQ ID NO: 1253499 - DNA, 15 bp, Homo sapiens
ttaataagtattaca

SEQ ID NO: 1253500 - DNA, 15 bp, Homo sapiens
gttaataagtattac

SEQ ID NO: 1253501 - DNA, 15 bp, Homo sapiens
agttaataagtatta

SEQ ID NO: 1253502 - DNA, 15 bp, Homo sapiens
aagttaataagtatt

SEQ ID NO: 1253503 - DNA, 15 bp, Homo sapiens
caagttaataagtat

SEQ ID NO: 1253504 - DNA, 15 bp, Homo sapiens
acaagttaataagta

SEQ ID NO: 1253505 - DNA, 15 bp, Homo sapiens
tacaagttaataagt

SEQ ID NO: 1253506 - DNA, 15 bp, Homo sapiens
ttacaagttaataag

SEQ ID NO: 1253507 - DNA, 15 bp, Homo sapiens
attacaagttaataa

SEQ ID NO: 1253508 - DNA, 15 bp, Homo sapiens
tattacaagttaata

SEQ ID NO: 1253509 - DNA, 15 bp, Homo sapiens
atattacaagttaat

SEQ ID NO: 1253510 - DNA, 15 bp, Homo sapiens
tatattacaagttaa

SEQ ID NO: 1253511 - DNA, 15 bp, Homo sapiens
atatattacaagtta

SEQ ID NO: 1253512 - DNA, 15 bp, Homo sapiens
aatatattacaagtt

SEQ ID NO: 1253513 - DNA, 15 bp, Homo sapiens
taatatattacaagt

SEQ ID NO: 1253514 - DNA, 15 bp, Homo sapiens
gtaatatattacaag

SEQ ID NO: 1253515 - DNA, 15 bp, Homo sapiens
tgtaatatattacaa

SEQ ID NO: 1253516 - DNA, 15 bp, Homo sapiens
atgtaatatattaca

SEQ ID NO: 1253517 - DNA, 15 bp, Homo sapiens
tatgtaatatattac

SEQ ID NO: 1253518 - DNA, 15 bp, Homo sapiens
ttatgtaatatatta

SEQ ID NO: 1253519 - DNA, 15 bp, Homo sapiens
cttatgtaatatatt

SEQ ID NO: 1253520 - DNA, 15 bp, Homo sapiens
ccttatgtaatatat

SEQ ID NO: 1253521 - DNA, 15 bp, Homo sapiens
accttatgtaatata

SEQ ID NO: 1253522 - DNA, 15 bp, Homo sapiens
taccttatgtaatat

SEQ ID NO: 1253523 - DNA, 15 bp, Homo sapiens
ttaccttatgtaata

SEQ ID NO: 1253524 - DNA, 15 bp, Homo sapiens
cttaccttatgtaat

SEQ ID NO: 1253525 - DNA, 15 bp, Homo sapiens
gcttaccttatgtaa

SEQ ID NO: 1253526 - DNA, 15 bp, Homo sapiens
agcttaccttatgta

SEQ ID NO: 1253527 - DNA, 15 bp, Homo sapiens
gagcttaccttatgt

SEQ ID NO: 1253528 - DNA, 15 bp, Homo sapiens
ggagcttaccttatg

SEQ ID NO: 1253529 - DNA, 15 bp, Homo sapiens
tggagcttaccttat

SEQ ID NO: 1253530 - DNA, 15 bp, Homo sapiens
atggagcttacctta

SEQ ID NO: 1253531 - DNA, 15 bp, Homo sapiens
catggagcttacctt

SEQ ID NO: 1253532 - DNA, 15 bp, Homo sapiens
tcatggagcttacct

SEQ ID NO: 1253533 - DNA, 15 bp, Homo sapiens
ctcatggagcttacc

SEQ ID NO: 1253534 - DNA, 15 bp, Homo sapiens
cctcatggagcttac

SEQ ID NO: 1253535 - DNA, 15 bp, Homo sapiens
ccctcatggagctta

SEQ ID NO: 1253536 - DNA, 15 bp, Homo sapiens
accctcatggagctt

SEQ ID NO: 1253537 - DNA, 15 bp, Homo sapiens
taccctcatggagct

SEQ ID NO: 1253538 - DNA, 15 bp, Homo sapiens
ctaccctcatggagc

SEQ ID NO: 1253539 - DNA, 15 bp, Homo sapiens
tctaccctcatggag

SEQ ID NO: 1253540 - DNA, 15 bp, Homo sapiens
ttctaccctcatgga

SEQ ID NO: 1253541 - DNA, 15 bp, Homo sapiens
tttctaccctcatgg

SEQ ID NO: 1253542 - DNA, 15 bp, Homo sapiens
atttctaccctcatg

SEQ ID NO: 1253543 - DNA, 15 bp, Homo sapiens
aatttctaccctcat

SEQ ID NO: 1253544 - DNA, 15 bp, Homo sapiens
aaatttctaccctca

SEQ ID NO: 1253545 - DNA, 15 bp, Homo sapiens
aaaatttctaccctc

SEQ ID NO: 1253546 - DNA, 15 bp, Homo sapiens
caaaatttctaccct

SEQ ID NO: 1253547 - DNA, 15 bp, Homo sapiens
acaaaatttctaccc

SEQ ID NO: 1253548 - DNA, 15 bp, Homo sapiens
aacaaaatttctacc

SEQ ID NO: 1253549 - DNA, 15 bp, Homo sapiens
gaacaaaatttctac

SEQ ID NO: 1253550 - DNA, 15 bp, Homo sapiens
agaacaaaatttcta

SEQ ID NO: 1253551 - DNA, 15 bp, Homo sapiens
aagaacaaaatttct

SEQ ID NO: 1253552 - DNA, 15 bp, Homo sapiens
aaagaacaaaatttc

SEQ ID NO: 1253553 - DNA, 15 bp, Homo sapiens
gaaagaacaaaattt

SEQ ID NO: 1253554 - DNA, 15 bp, Homo sapiens
agaaagaacaaaatt

SEQ ID NO: 1253555 - DNA, 15 bp, Homo sapiens
tagaaagaacaaaat

SEQ ID NO: 1253556 - DNA, 15 bp, Homo sapiens
atagaaagaacaaaa

SEQ ID NO: 1253557 - DNA, 15 bp, Homo sapiens
aatagaaagaacaaa

SEQ ID NO: 1253558 - DNA, 15 bp, Homo sapiens
aaatagaaagaacaa

SEQ ID NO: 1253559 - DNA, 15 bp, Homo sapiens
aaaatagaaagaaca

SEQ ID NO: 1253560 - DNA, 15 bp, Homo sapiens
gaaaatagaaagaac

SEQ ID NO: 1253561 - DNA, 15 bp, Homo sapiens
agaaaatagaaagaa

SEQ ID NO: 1253562 - DNA, 15 bp, Homo sapiens
cagaaaatagaaaga

SEQ ID NO: 1253563 - DNA, 15 bp, Homo sapiens
acagaaaatagaaag

SEQ ID NO: 1253564 - DNA, 15 bp, Homo sapiens
aacagaaaatagaaa

SEQ ID NO: 1253565 - DNA, 15 bp, Homo sapiens
aaacagaaaatagaa

SEQ ID NO: 1253566 - DNA, 15 bp, Homo sapiens
aaaacagaaaataga

SEQ ID NO: 1253567 - DNA, 15 bp, Homo sapiens
aaaaacagaaaatag

SEQ ID NO: 1253568 - DNA, 15 bp, Homo sapiens
gaaaaacagaaaata

SEQ ID NO: 1253569 - DNA, 15 bp, Homo sapiens
ggaaaaacagaaaat

SEQ ID NO: 1253570 - DNA, 15 bp, Homo sapiens
aggaaaaacagaaaa

SEQ ID NO: 1253571 - DNA, 15 bp, Homo sapiens
gaggaaaaacagaaa

SEQ ID NO: 1253572 - DNA, 15 bp, Homo sapiens
ggaggaaaaacagaa

SEQ ID NO: 1253573 - DNA, 15 bp, Homo sapiens
tggaggaaaaacaga

SEQ ID NO: 1253574 - DNA, 15 bp, Homo sapiens
ctggaggaaaaacag

SEQ ID NO: 1253575 - DNA, 15 bp, Homo sapiens
gctggaggaaaaaca

SEQ ID NO: 1253576 - DNA, 15 bp, Homo sapiens
ggctggaggaaaaac

SEQ ID NO: 1253577 - DNA, 15 bp, Homo sapiens
gggctggaggaaaaa

SEQ ID NO: 1253578 - DNA, 15 bp, Homo sapiens
ggggctggaggaaaa

SEQ ID NO: 1253579 - DNA, 15 bp, Homo sapiens
aggggctggaggaaa

SEQ ID NO: 1253580 - DNA, 15 bp, Homo sapiens
caggggctggaggaa

SEQ ID NO: 1253581 - DNA, 15 bp, Homo sapiens
ccaggggctggagga

SEQ ID NO: 1253582 - DNA, 15 bp, Homo sapiens
tccaggggctggagg

SEQ ID NO: 1253583 - DNA, 15 bp, Homo sapiens
ttccaggggctggag

SEQ ID NO: 1253584 - DNA, 15 bp, Homo sapiens
gttccaggggctgga

SEQ ID NO: 1253585 - DNA, 15 bp, Homo sapiens
tgttccaggggctgg

SEQ ID NO: 1253586 - DNA, 15 bp, Homo sapiens
ttgttccaggggctg

SEQ ID NO: 1253587 - DNA, 15 bp, Homo sapiens
attgttccaggggct

SEQ ID NO: 1253588 - DNA, 15 bp, Homo sapiens
tattgttccaggggc

SEQ ID NO: 1253589 - DNA, 15 bp, Homo sapiens
gtattgttccagggg

SEQ ID NO: 1253590 - DNA, 15 bp, Homo sapiens
ggtattgttccaggg

SEQ ID NO: 1253591 - DNA, 15 bp, Homo sapiens
aggtattgttccagg

SEQ ID NO: 1253592 - DNA, 15 bp, Homo sapiens
caggtattgttccag

SEQ ID NO: 1253593 - DNA, 15 bp, Homo sapiens
tcaggtattgttcca

SEQ ID NO: 1253594 - DNA, 15 bp, Homo sapiens
gtcaggtattgttcc

SEQ ID NO: 1253595 - DNA, 15 bp, Homo sapiens
tgtcaggtattgttc

SEQ ID NO: 1253596 - DNA, 15 bp, Homo sapiens
gtgtcaggtattgtt

SEQ ID NO: 1253597 - DNA, 15 bp, Homo sapiens
tgtgtcaggtattgt

SEQ ID NO: 1253598 - DNA, 15 bp, Homo sapiens
ctgtgtcaggtattg

SEQ ID NO: 1253599 - DNA, 15 bp, Homo sapiens
tctgtgtcaggtatt

SEQ ID NO: 1253600 - DNA, 15 bp, Homo sapiens
ctctgtgtcaggtat

SEQ ID NO: 1253601 - DNA, 15 bp, Homo sapiens
actctgtgtcaggta

SEQ ID NO: 1253602 - DNA, 15 bp, Homo sapiens
tactctgtgtcaggt

SEQ ID NO: 1253603 - DNA, 15 bp, Homo sapiens
ttactctgtgtcagg

SEQ ID NO: 1253604 - DNA, 15 bp, Homo sapiens
cttactctgtgtcag

SEQ ID NO: 1253605 - DNA, 15 bp, Homo sapiens
gcttactctgtgtca

SEQ ID NO: 1253606 - DNA, 15 bp, Homo sapiens
tgcttactctgtgtc

SEQ ID NO: 1253607 - DNA, 15 bp, Homo sapiens
gtgcttactctgtgt

SEQ ID NO: 1253608 - DNA, 15 bp, Homo sapiens
agtgcttactctgtg

SEQ ID NO: 1253609 - DNA, 15 bp, Homo sapiens
gagtgcttactctgt

SEQ ID NO: 1253610 - DNA, 15 bp, Homo sapiens
tgagtgcttactctg

SEQ ID NO: 1253611 - DNA, 15 bp, Homo sapiens
ttgagtgcttactct

SEQ ID NO: 1253612 - DNA, 15 bp, Homo sapiens
attgagtgcttactc

SEQ ID NO: 1253613 - DNA, 15 bp, Homo sapiens
tattgagtgcttact

SEQ ID NO: 1253614 - DNA, 15 bp, Homo sapiens
ttattgagtgcttac

SEQ ID NO: 1253615 - DNA, 15 bp, Homo sapiens
tttattgagtgctta

SEQ ID NO: 1253616 - DNA, 15 bp, Homo sapiens
tatttattgagtgct

SEQ ID NO: 1253617 - DNA, 15 bp, Homo sapiens
ttatttattgagtgc

SEQ ID NO: 1253618 - DNA, 15 bp, Homo sapiens
attatttattgagtg

SEQ ID NO: 1253619 - DNA, 15 bp, Homo sapiens
aattatttattgagt

SEQ ID NO: 1253620 - DNA, 15 bp, Homo sapiens
caattatttattgag

SEQ ID NO: 1253621 - DNA, 15 bp, Homo sapiens
ccaattatttattga

SEQ ID NO: 1253622 - DNA, 15 bp, Homo sapiens
accaattatttattg

SEQ ID NO: 1253623 - DNA, 15 bp, Homo sapiens
caccaattatttatt

SEQ ID NO: 1253624 - DNA, 15 bp, Homo sapiens
tcaccaattatttat

SEQ ID NO: 1253625 - DNA, 15 bp, Homo sapiens
ttcaccaattattta

SEQ ID NO: 1253626 - DNA, 15 bp, Homo sapiens
cttcaccaattattt

SEQ ID NO: 1253627 - DNA, 15 bp, Homo sapiens
ccttcaccaattatt

SEQ ID NO: 1253628 - DNA, 15 bp, Homo sapiens
gccttcaccaattat

SEQ ID NO: 1253629 - DNA, 15 bp, Homo sapiens
tgccttcaccaatta

SEQ ID NO: 1253630 - DNA, 15 bp, Homo sapiens
atgccttcaccaatt

SEQ ID NO: 1253631 - DNA, 15 bp, Homo sapiens
aatgccttcaccaat

SEQ ID NO: 1253632 - DNA, 15 bp, Homo sapiens
taatgccttcaccaa

SEQ ID NO: 1253633 - DNA, 15 bp, Homo sapiens
ttaatgccttcacca

SEQ ID NO: 1253634 - DNA, 15 bp, Homo sapiens
attaatgccttcacc

SEQ ID NO: 1253635 - DNA, 15 bp, Homo sapiens
gattaatgccttcac

SEQ ID NO: 1253636 - DNA, 15 bp, Homo sapiens
ggattaatgccttca

SEQ ID NO: 1253637 - DNA, 15 bp, Homo sapiens
gggattaatgccttc

SEQ ID NO: 1253638 - DNA, 15 bp, Homo sapiens
tgggattaatgcctt

SEQ ID NO: 1253639 - DNA, 15 bp, Homo sapiens
ctgggattaatgcct

SEQ ID NO: 1253640 - DNA, 15 bp, Homo sapiens
tctgggattaatgcc

SEQ ID NO: 1253641 - DNA, 15 bp, Homo sapiens
ctctgggattaatgc

SEQ ID NO: 1253642 - DNA, 15 bp, Homo sapiens
cctctgggattaatg

SEQ ID NO: 1253643 - DNA, 15 bp, Homo sapiens
gcctctgggattaat

SEQ ID NO: 1253644 - DNA, 15 bp, Homo sapiens
tgcctctgggattaa

SEQ ID NO: 1253645 - DNA, 15 bp, Homo sapiens
ctgcctctgggatta

SEQ ID NO: 1253646 - DNA, 15 bp, Homo sapiens
actgcctctgggatt

SEQ ID NO: 1253647 - DNA, 15 bp, Homo sapiens
aactgcctctgggat

SEQ ID NO: 1253648 - DNA, 15 bp, Homo sapiens
gaactgcctctggga

SEQ ID NO: 1253649 - DNA, 15 bp, Homo sapiens
tgaactgcctctggg

SEQ ID NO: 1253650 - DNA, 15 bp, Homo sapiens
ctgaactgcctctgg

SEQ ID NO: 1253651 - DNA, 15 bp, Homo sapiens
gctgaactgcctctg

SEQ ID NO: 1253652 - DNA, 15 bp, Homo sapiens
tgctgaactgcctct

SEQ ID NO: 1253653 - DNA, 15 bp, Homo sapiens
ttgctgaactgcctc

SEQ ID NO: 1253654 - DNA, 15 bp, Homo sapiens
cttgctgaactgcct

SEQ ID NO: 1253655 - DNA, 15 bp, Homo sapiens
tcttgctgaactgcc

SEQ ID NO: 1253656 - DNA, 15 bp, Homo sapiens
ctcttgctgaactgc

SEQ ID NO: 1253657 - DNA, 15 bp, Homo sapiens
cctcttgctgaactg

SEQ ID NO: 1253658 - DNA, 15 bp, Homo sapiens
gcctcttgctgaact

SEQ ID NO: 1253659 - DNA, 15 bp, Homo sapiens
agcctcttgctgaac

SEQ ID NO: 1253660 - DNA, 15 bp, Homo sapiens
cagcctcttgctgaa

SEQ ID NO: 1253661 - DNA, 15 bp, Homo sapiens
tcagcctcttgctga

SEQ ID NO: 1253662 - DNA, 15 bp, Homo sapiens
atcagcctcttgctg

SEQ ID NO: 1253663 - DNA, 15 bp, Homo sapiens
catcagcctcttgct

SEQ ID NO: 1253664 - DNA, 15 bp, Homo sapiens
ccatcagcctcttgc

SEQ ID NO: 1253665 - DNA, 15 bp, Homo sapiens
tccatcagcctcttg

SEQ ID NO: 1253666 - DNA, 15 bp, Homo sapiens
ctccatcagcctctt

SEQ ID NO: 1253667 - DNA, 15 bp, Homo sapiens
actccatcagcctct

SEQ ID NO: 1253668 - DNA, 15 bp, Homo sapiens
cactccatcagcctc

SEQ ID NO: 1253669 - DNA, 15 bp, Homo sapiens
ccactccatcagcct

SEQ ID NO: 1253670 - DNA, 15 bp, Homo sapiens
accactccatcagcc

SEQ ID NO: 1253671 - DNA, 15 bp, Homo sapiens
aaccactccatcagc

SEQ ID NO: 1253672 - DNA, 15 bp, Homo sapiens
gaaccactccatcag

SEQ ID NO: 1253673 - DNA, 15 bp, Homo sapiens
agaaccactccatca

SEQ ID NO: 1253674 - DNA, 15 bp, Homo sapiens
cagaaccactccatc

SEQ ID NO: 1253675 - DNA, 15 bp, Homo sapiens
ccagaaccactccat

SEQ ID NO: 1253676 - DNA, 15 bp, Homo sapiens
cccagaaccactcca

SEQ ID NO: 1253677 - DNA, 15 bp, Homo sapiens
tcccagaaccactcc

SEQ ID NO: 1253678 - DNA, 15 bp, Homo sapiens
gtcccagaaccactc

SEQ ID NO: 1253679 - DNA, 15 bp, Homo sapiens
agtcccagaaccact

SEQ ID NO: 1253680 - DNA, 15 bp, Homo sapiens
gagtcccagaaccac

SEQ ID NO: 1253681 - DNA, 15 bp, Homo sapiens
agagtcccagaacca

SEQ ID NO: 1253682 - DNA, 15 bp, Homo sapiens
cagagtcccagaacc

SEQ ID NO: 1253683 - DNA, 15 bp, Homo sapiens
tcagagtcccagaac

SEQ ID NO: 1253684 - DNA, 15 bp, Homo sapiens
ctcagagtcccagaa

SEQ ID NO: 1253685 - DNA, 15 bp, Homo sapiens
tctcagagtcccaga

SEQ ID NO: 1253686 - DNA, 15 bp, Homo sapiens
gtctcagagtcccag

SEQ ID NO: 1253687 - DNA, 15 bp, Homo sapiens
agtctcagagtccca

SEQ ID NO: 1253688 - DNA, 15 bp, Homo sapiens
cagtctcagagtccc

SEQ ID NO: 1253689 - DNA, 15 bp, Homo sapiens
acagtctcagagtcc

SEQ ID NO: 1253690 - DNA, 15 bp, Homo sapiens
aacagtctcagagtc

SEQ ID NO: 1253691 - DNA, 15 bp, Homo sapiens
caacagtctcagagt

SEQ ID NO: 1253692 - DNA, 15 bp, Homo sapiens
ccaacagtctcagag

SEQ ID NO: 1253693 - DNA, 15 bp, Homo sapiens
gccaacagtctcaga

SEQ ID NO: 1253694 - DNA, 15 bp, Homo sapiens
ggccaacagtctcag

SEQ ID NO: 1253695 - DNA, 15 bp, Homo sapiens
gggccaacagtctca

SEQ ID NO: 1253696 - DNA, 15 bp, Homo sapiens
agggccaacagtctc

SEQ ID NO: 1253697 - DNA, 15 bp, Homo sapiens
gagggccaacagtct

SEQ ID NO: 1253698 - DNA, 15 bp, Homo sapiens
agagggccaacagtc

SEQ ID NO: 1253699 - DNA, 15 bp, Homo sapiens
cagagggccaacagt

SEQ ID NO: 1253700 - DNA, 15 bp, Homo sapiens
tcagagggccaacag

SEQ ID NO: 1253701 - DNA, 15 bp, Homo sapiens
ctcagagggccaaca

SEQ ID NO: 1253702 - DNA, 15 bp, Homo sapiens
actcagagggccaac

SEQ ID NO: 1253703 - DNA, 15 bp, Homo sapiens
cactcagagggccaa

SEQ ID NO: 1253704 - DNA, 15 bp, Homo sapiens
gcactcagagggcca

SEQ ID NO: 1253705 - DNA, 15 bp, Homo sapiens
tgcactcagagggcc

SEQ ID NO: 1253706 - DNA, 15 bp, Homo sapiens
gtgcactcagagggc

SEQ ID NO: 1253707 - DNA, 15 bp, Homo sapiens
tgtgcactcagaggg

SEQ ID NO: 1253708 - DNA, 15 bp, Homo sapiens
ctgtgcactcagagg

SEQ ID NO: 1253709 - DNA, 15 bp, Homo sapiens
actgtgcactcagag

SEQ ID NO: 1253710 - DNA, 15 bp, Homo sapiens
aactgtgcactcaga

SEQ ID NO: 1253711 - DNA, 15 bp, Homo sapiens
gaactgtgcactcag

SEQ ID NO: 1253712 - DNA, 15 bp, Homo sapiens
ggaactgtgcactca

SEQ ID NO: 1253713 - DNA, 15 bp, Homo sapiens
aggaactgtgcactc

SEQ ID NO: 1253714 - DNA, 15 bp, Homo sapiens
caggaactgtgcact

SEQ ID NO: 1253715 - DNA, 15 bp, Homo sapiens
gcaggaactgtgcac

SEQ ID NO: 1253716 - DNA, 15 bp, Homo sapiens
tgcaggaactgtgca

SEQ ID NO: 1253717 - DNA, 15 bp, Homo sapiens
gtgcaggaactgtgc

SEQ ID NO: 1253718 - DNA, 15 bp, Homo sapiens
ggtgcaggaactgtg

SEQ ID NO: 1253719 - DNA, 15 bp, Homo sapiens
gggtgcaggaactgt

SEQ ID NO: 1253720 - DNA, 15 bp, Homo sapiens
tgggtgcaggaactg

SEQ ID NO: 1253721 - DNA, 15 bp, Homo sapiens
ttgggtgcaggaact

SEQ ID NO: 1253722 - DNA, 15 bp, Homo sapiens
cttgggtgcaggaac

SEQ ID NO: 1253723 - DNA, 15 bp, Homo sapiens
gcttgggtgcaggaa

SEQ ID NO: 1253724 - DNA, 15 bp, Homo sapiens
tgcttgggtgcagga

SEQ ID NO: 1253725 - DNA, 15 bp, Homo sapiens
ctgcttgggtgcagg

SEQ ID NO: 1253726 - DNA, 15 bp, Homo sapiens
cctgcttgggtgcag

SEQ ID NO: 1253727 - DNA, 15 bp, Homo sapiens
tcctgcttgggtgca

SEQ ID NO: 1253728 - DNA, 15 bp, Homo sapiens
ctcctgcttgggtgc

SEQ ID NO: 1253729 - DNA, 15 bp, Homo sapiens
tctcctgcttgggtg

SEQ ID NO: 1253730 - DNA, 15 bp, Homo sapiens
gtctcctgcttgggt

SEQ ID NO: 1253731 - DNA, 15 bp, Homo sapiens
tgtctcctgcttggg

SEQ ID NO: 1253732 - DNA, 15 bp, Homo sapiens
ctgtctcctgcttgg

SEQ ID NO: 1253733 - DNA, 15 bp, Homo sapiens
tctgtctcctgcttg

SEQ ID NO: 1253734 - DNA, 15 bp, Homo sapiens
gtctgtctcctgctt

SEQ ID NO: 1253735 - DNA, 15 bp, Homo sapiens
agtctgtctcctgct

SEQ ID NO: 1253736 - DNA, 15 bp, Homo sapiens
cagtctgtctcctgc

SEQ ID NO: 1253737 - DNA, 15 bp, Homo sapiens
ccagtctgtctcctg

SEQ ID NO: 1253738 - DNA, 15 bp, Homo sapiens
cccagtctgtctcct

SEQ ID NO: 1253739 - DNA, 15 bp, Homo sapiens
gcccagtctgtctcc

SEQ ID NO: 1253740 - DNA, 15 bp, Homo sapiens
tgcccagtctgtctc

SEQ ID NO: 1253741 - DNA, 15 bp, Homo sapiens
ctgcccagtctgtct

SEQ ID NO: 1253742 - DNA, 15 bp, Homo sapiens
tctgcccagtctgtc

SEQ ID NO: 1253743 - DNA, 15 bp, Homo sapiens
ctctgcccagtctgt

SEQ ID NO: 1253744 - DNA, 15 bp, Homo sapiens
cctctgcccagtctg

SEQ ID NO: 1253745 - DNA, 15 bp, Homo sapiens
ccctctgcccagtct

SEQ ID NO: 1253746 - DNA, 15 bp, Homo sapiens
accctctgcccagtc

SEQ ID NO: 1253747 - DNA, 15 bp, Homo sapiens
gaccctctgcccagt

SEQ ID NO: 1253748 - DNA, 15 bp, Homo sapiens
ggaccctctgcccag

SEQ ID NO: 1253749 - DNA, 15 bp, Homo sapiens
tggaccctctgccca

SEQ ID NO: 1253750 - DNA, 15 bp, Homo sapiens
gtggaccctctgccc

SEQ ID NO: 1253751 - DNA, 15 bp, Homo sapiens
ggtggaccctctgcc

SEQ ID NO: 1253752 - DNA, 15 bp, Homo sapiens
aggtggaccctctgc

SEQ ID NO: 1253753 - DNA, 15 bp, Homo sapiens
caggtggaccctctg

SEQ ID NO: 1253754 - DNA, 15 bp, Homo sapiens
ccaggtggaccctct

SEQ ID NO: 1253755 - DNA, 15 bp, Homo sapiens
tccaggtggaccctc

SEQ ID NO: 1253756 - DNA, 15 bp, Homo sapiens
gtccaggtggaccct

SEQ ID NO: 1253757 - DNA, 15 bp, Homo sapiens
tgtccaggtggaccc

SEQ ID NO: 1253758 - DNA, 15 bp, Homo sapiens
atgtccaggtggacc

SEQ ID NO: 1253759 - DNA, 15 bp, Homo sapiens
catgtccaggtggac

SEQ ID NO: 1253760 - DNA, 15 bp, Homo sapiens
tcatgtccaggtgga

SEQ ID NO: 1253761 - DNA, 15 bp, Homo sapiens
ttcatgtccaggtgg

SEQ ID NO: 1253762 - DNA, 15 bp, Homo sapiens
attcatgtccaggtg

SEQ ID NO: 1253763 - DNA, 15 bp, Homo sapiens
tattcatgtccaggt

SEQ ID NO: 1253764 - DNA, 15 bp, Homo sapiens
atattcatgtccagg

SEQ ID NO: 1253765 - DNA, 15 bp, Homo sapiens
gatattcatgtccag

SEQ ID NO: 1253766 - DNA, 15 bp, Homo sapiens
ggatattcatgtcca

SEQ ID NO: 1253767 - DNA, 15 bp, Homo sapiens
aggatattcatgtcc

SEQ ID NO: 1253768 - DNA, 15 bp, Homo sapiens
taggatattcatgtc

SEQ ID NO: 1253769 - DNA, 15 bp, Homo sapiens
ttaggatattcatgt

SEQ ID NO: 1253770 - DNA, 15 bp, Homo sapiens
attaggatattcatg

SEQ ID NO: 1253771 - DNA, 15 bp, Homo sapiens
tattaggatattcat

SEQ ID NO: 1253772 - DNA, 15 bp, Homo sapiens
gtattaggatattca

SEQ ID NO: 1253773 - DNA, 15 bp, Homo sapiens
agtattaggatattc

SEQ ID NO: 1253774 - DNA, 15 bp, Homo sapiens
gagtattaggatatt

SEQ ID NO: 1253775 - DNA, 15 bp, Homo sapiens
tgagtattaggatat

SEQ ID NO: 1253776 - DNA, 15 bp, Homo sapiens
gtgagtattaggata

SEQ ID NO: 1253777 - DNA, 15 bp, Homo sapiens
agtgagtattaggat

SEQ ID NO: 1253778 - DNA, 15 bp, Homo sapiens
cagtgagtattagga

SEQ ID NO: 1253779 - DNA, 15 bp, Homo sapiens
acagtgagtattagg

SEQ ID NO: 1253780 - DNA, 15 bp, Homo sapiens
tacagtgagtattag

SEQ ID NO: 1253781 - DNA, 15 bp, Homo sapiens
atacagtgagtatta

SEQ ID NO: 1253782 - DNA, 15 bp, Homo sapiens
catacagtgagtatt

SEQ ID NO: 1253783 - DNA, 15 bp, Homo sapiens
acatacagtgagtat

SEQ ID NO: 1253784 - DNA, 15 bp, Homo sapiens
aacatacagtgagta

SEQ ID NO: 1253785 - DNA, 15 bp, Homo sapiens
taacatacagtgagt

SEQ ID NO: 1253786 - DNA, 15 bp, Homo sapiens
gtaacatacagtgag

SEQ ID NO: 1253787 - DNA, 15 bp, Homo sapiens
ggtaacatacagtga

SEQ ID NO: 1253788 - DNA, 15 bp, Homo sapiens
tggtaacatacagtg

SEQ ID NO: 1253789 - DNA, 15 bp, Homo sapiens
gtggtaacatacagt

SEQ ID NO: 1253790 - DNA, 15 bp, Homo sapiens
agtggtaacatacag

SEQ ID NO: 1253791 - DNA, 15 bp, Homo sapiens
aagtggtaacataca

SEQ ID NO: 1253792 - DNA, 15 bp, Homo sapiens
taagtggtaacatac

SEQ ID NO: 1253793 - DNA, 15 bp, Homo sapiens
ttaagtggtaacata

SEQ ID NO: 1253794 - DNA, 15 bp, Homo sapiens
tttaagtggtaacat

SEQ ID NO: 1253795 - DNA, 15 bp, Homo sapiens
ttttaagtggtaaca

SEQ ID NO: 1253796 - DNA, 15 bp, Homo sapiens
tttttaagtggtaac

SEQ ID NO: 1253797 - DNA, 15 bp, Homo sapiens
ttttttaagtggtaa

SEQ ID NO: 1253798 - DNA, 15 bp, Homo sapiens
tttttttaagtggta

SEQ ID NO: 1253799 - DNA, 15 bp, Homo sapiens
atttttttaagtggt

SEQ ID NO: 1253800 - DNA, 15 bp, Homo sapiens
gatttttttaagtgg

SEQ ID NO: 1253801 - DNA, 15 bp, Homo sapiens
agatttttttaagtg

SEQ ID NO: 1253802 - DNA, 15 bp, Homo sapiens
aagatttttttaagt

SEQ ID NO: 1253803 - DNA, 15 bp, Homo sapiens
taagatttttttaag

SEQ ID NO: 1253804 - DNA, 15 bp, Homo sapiens
ataagatttttttaa

SEQ ID NO: 1253805 - DNA, 15 bp, Homo sapiens
gataagattttttta

SEQ ID NO: 1253806 - DNA, 15 bp, Homo sapiens
tgataagattttttt

SEQ ID NO: 1253807 - DNA, 15 bp, Homo sapiens
ctgataagatttttt

SEQ ID NO: 1253808 - DNA, 15 bp, Homo sapiens
actgataagattttt

SEQ ID NO: 1253809 - DNA, 15 bp, Homo sapiens
cactgataagatttt

SEQ ID NO: 1253810 - DNA, 15 bp, Homo sapiens
tcactgataagattt

SEQ ID NO: 1253811 - DNA, 15 bp, Homo sapiens
atcactgataagatt

SEQ ID NO: 1253812 - DNA, 15 bp, Homo sapiens
catcactgataagat

SEQ ID NO: 1253813 - DNA, 15 bp, Homo sapiens
ccatcactgataaga

SEQ ID NO: 1253814 - DNA, 15 bp, Homo sapiens
tccatcactgataag

SEQ ID NO: 1253815 - DNA, 15 bp, Homo sapiens
atccatcactgataa

SEQ ID NO: 1253816 - DNA, 15 bp, Homo sapiens
catccatcactgata

SEQ ID NO: 1253817 - DNA, 15 bp, Homo sapiens
tcatccatcactgat

SEQ ID NO: 1253818 - DNA, 15 bp, Homo sapiens
gtcatccatcactga

SEQ ID NO: 1253819 - DNA, 15 bp, Homo sapiens
tgtcatccatcactg

SEQ ID NO: 1253820 - DNA, 15 bp, Homo sapiens
ctgtcatccatcact

SEQ ID NO: 1253821 - DNA, 15 bp, Homo sapiens
cctgtcatccatcac

SEQ ID NO: 1253822 - DNA, 15 bp, Homo sapiens
gcctgtcatccatca

SEQ ID NO: 1253823 - DNA, 15 bp, Homo sapiens
tgcctgtcatccatc

SEQ ID NO: 1253824 - DNA, 15 bp, Homo sapiens
atgcctgtcatccat

SEQ ID NO: 1253825 - DNA, 15 bp, Homo sapiens
catgcctgtcatcca

SEQ ID NO: 1253826 - DNA, 15 bp, Homo sapiens
ccatgcctgtcatcc

SEQ ID NO: 1253827 - DNA, 15 bp, Homo sapiens
tccatgcctgtcatc

SEQ ID NO: 1253828 - DNA, 15 bp, Homo sapiens
ttccatgcctgtcat

SEQ ID NO: 1253829 - DNA, 15 bp, Homo sapiens
gttccatgcctgtca

SEQ ID NO: 1253830 - DNA, 15 bp, Homo sapiens
tgttccatgcctgtc

SEQ ID NO: 1253831 - DNA, 15 bp, Homo sapiens
atgttccatgcctgt

SEQ ID NO: 1253832 - DNA, 15 bp, Homo sapiens
tatgttccatgcctg

SEQ ID NO: 1253833 - DNA, 15 bp, Homo sapiens
gtatgttccatgcct

SEQ ID NO: 1253834 - DNA, 15 bp, Homo sapiens
tgtatgttccatgcc

SEQ ID NO: 1253835 - DNA, 15 bp, Homo sapiens
ctgtatgttccatgc

SEQ ID NO: 1253836 - DNA, 15 bp, Homo sapiens
cctgtatgttccatg

SEQ ID NO: 1253837 - DNA, 15 bp, Homo sapiens
gcctgtatgttccat

SEQ ID NO: 1253838 - DNA, 15 bp, Homo sapiens
ggcctgtatgttcca

SEQ ID NO: 1253839 - DNA, 15 bp, Homo sapiens
aggcctgtatgttcc

SEQ ID NO: 1253840 - DNA, 15 bp, Homo sapiens
aaggcctgtatgttc

SEQ ID NO: 1253841 - DNA, 15 bp, Homo sapiens
aaaggcctgtatgtt

SEQ ID NO: 1253842 - DNA, 15 bp, Homo sapiens
caaaggcctgtatgt

SEQ ID NO: 1253843 - DNA, 15 bp, Homo sapiens
ccaaaggcctgtatg

SEQ ID NO: 1253844 - DNA, 15 bp, Homo sapiens
cccaaaggcctgtat

SEQ ID NO: 1253845 - DNA, 15 bp, Homo sapiens
tcccaaaggcctgta

SEQ ID NO: 1253846 - DNA, 15 bp, Homo sapiens
ctcccaaaggcctgt

SEQ ID NO: 1253847 - DNA, 15 bp, Homo sapiens
actcccaaaggcctg

SEQ ID NO: 1253848 - DNA, 15 bp, Homo sapiens
gactcccaaaggcct

SEQ ID NO: 1253849 - DNA, 15 bp, Homo sapiens
agactcccaaaggcc

SEQ ID NO: 1253850 - DNA, 15 bp, Homo sapiens
tagactcccaaaggc

SEQ ID NO: 1253851 - DNA, 15 bp, Homo sapiens
atagactcccaaagg

SEQ ID NO: 1253852 - DNA, 15 bp, Homo sapiens
catagactcccaaag

SEQ ID NO: 1253853 - DNA, 15 bp, Homo sapiens
tcatagactcccaaa

SEQ ID NO: 1253854 - DNA, 15 bp, Homo sapiens
gtcatagactcccaa

SEQ ID NO: 1253855 - DNA, 15 bp, Homo sapiens
tgtcatagactccca

SEQ ID NO: 1253856 - DNA, 15 bp, Homo sapiens
gtgtcatagactccc

SEQ ID NO: 1253857 - DNA, 15 bp, Homo sapiens
agtgtcatagactcc

SEQ ID NO: 1253858 - DNA, 15 bp, Homo sapiens
cagtgtcatagactc

SEQ ID NO: 1253859 - DNA, 15 bp, Homo sapiens
ccagtgtcatagact

SEQ ID NO: 1253860 - DNA, 15 bp, Homo sapiens
cccagtgtcatagac

SEQ ID NO: 1253861 - DNA, 15 bp, Homo sapiens
acccagtgtcataga

SEQ ID NO: 1253862 - DNA, 15 bp, Homo sapiens
tacccagtgtcatag

SEQ ID NO: 1253863 - DNA, 15 bp, Homo sapiens
atacccagtgtcata

SEQ ID NO: 1253864 - DNA, 15 bp, Homo sapiens
catacccagtgtcat

SEQ ID NO: 1253865 - DNA, 15 bp, Homo sapiens
acatacccagtgtca

SEQ ID NO: 1253866 - DNA, 15 bp, Homo sapiens
aacatacccagtgtc

SEQ ID NO: 1253867 - DNA, 15 bp, Homo sapiens
taacatacccagtgt

SEQ ID NO: 1253868 - DNA, 15 bp, Homo sapiens
ctaacatacccagtg

SEQ ID NO: 1253869 - DNA, 15 bp, Homo sapiens
gctaacatacccagt

SEQ ID NO: 1253870 - DNA, 15 bp, Homo sapiens
agctaacatacccag

SEQ ID NO: 1253871 - DNA, 15 bp, Homo sapiens
aagctaacataccca

SEQ ID NO: 1253872 - DNA, 15 bp, Homo sapiens
aaagctaacataccc

SEQ ID NO: 1253873 - DNA, 15 bp, Homo sapiens
gaaagctaacatacc

SEQ ID NO: 1253874 - DNA, 15 bp, Homo sapiens
tgaaagctaacatac

SEQ ID NO: 1253875 - DNA, 15 bp, Homo sapiens
ttgaaagctaacata

SEQ ID NO: 1253876 - DNA, 15 bp, Homo sapiens
gttgaaagctaacat

SEQ ID NO: 1253877 - DNA, 15 bp, Homo sapiens
ggttgaaagctaaca

SEQ ID NO: 1253878 - DNA, 15 bp, Homo sapiens
gggttgaaagctaac

SEQ ID NO: 1253879 - DNA, 15 bp, Homo sapiens
agggttgaaagctaa

SEQ ID NO: 1253880 - DNA, 15 bp, Homo sapiens
tagggttgaaagcta

SEQ ID NO: 1253881 - DNA, 15 bp, Homo sapiens
atagggttgaaagct

SEQ ID NO: 1253882 - DNA, 15 bp, Homo sapiens
gatagggttgaaagc

SEQ ID NO: 1253883 - DNA, 15 bp, Homo sapiens
agatagggttgaaag

SEQ ID NO: 1253884 - DNA, 15 bp, Homo sapiens
tagatagggttgaaa

SEQ ID NO: 1253885 - DNA, 15 bp, Homo sapiens
atagatagggttgaa

SEQ ID NO: 1253886 - DNA, 15 bp, Homo sapiens
catagatagggttga

SEQ ID NO: 1253887 - DNA, 15 bp, Homo sapiens
ccatagatagggttg

SEQ ID NO: 1253888 - DNA, 15 bp, Homo sapiens
gccatagatagggtt

SEQ ID NO: 1253889 - DNA, 15 bp, Homo sapiens
ggccatagatagggt

SEQ ID NO: 1253890 - DNA, 15 bp, Homo sapiens
aggccatagataggg

SEQ ID NO: 1253891 - DNA, 15 bp, Homo sapiens
gaggccatagatagg

SEQ ID NO: 1253892 - DNA, 15 bp, Homo sapiens
agaggccatagatag

SEQ ID NO: 1253893 - DNA, 15 bp, Homo sapiens
cagaggccatagata

SEQ ID NO: 1253894 - DNA, 15 bp, Homo sapiens
tcagaggccatagat

SEQ ID NO: 1253895 - DNA, 15 bp, Homo sapiens
ctcagaggccataga

SEQ ID NO: 1253896 - DNA, 15 bp, Homo sapiens
tctcagaggccatag

SEQ ID NO: 1253897 - DNA, 15 bp, Homo sapiens
ctctcagaggccata

SEQ ID NO: 1253898 - DNA, 15 bp, Homo sapiens
cctctcagaggccat

SEQ ID NO: 1253899 - DNA, 15 bp, Homo sapiens
acctctcagaggcca

SEQ ID NO: 1253900 - DNA, 15 bp, Homo sapiens
gacctctcagaggcc

SEQ ID NO: 1253901 - DNA, 15 bp, Homo sapiens
tgacctctcagaggc

SEQ ID NO: 1253902 - DNA, 15 bp, Homo sapiens
ctgacctctcagagg

SEQ ID NO: 1253903 - DNA, 15 bp, Homo sapiens
tctgacctctcagag

SEQ ID NO: 1253904 - DNA, 15 bp, Homo sapiens
ctctgacctctcaga

SEQ ID NO: 1253905 - DNA, 15 bp, Homo sapiens
cctctgacctctcag

SEQ ID NO: 1253906 - DNA, 15 bp, Homo sapiens
tcctctgacctctca

SEQ ID NO: 1253907 - DNA, 15 bp, Homo sapiens
ttcctctgacctctc

SEQ ID NO: 1253908 - DNA, 15 bp, Homo sapiens
attcctctgacctct

SEQ ID NO: 1253909 - DNA, 15 bp, Homo sapiens
cattcctctgacctc

SEQ ID NO: 1253910 - DNA, 15 bp, Homo sapiens
ccattcctctgacct

SEQ ID NO: 1253911 - DNA, 15 bp, Homo sapiens
tccattcctctgacc

SEQ ID NO: 1253912 - DNA, 15 bp, Homo sapiens
ctccattcctctgac

SEQ ID NO: 1253913 - DNA, 15 bp, Homo sapiens
cctccattcctctga

SEQ ID NO: 1253914 - DNA, 15 bp, Homo sapiens
ccctccattcctctg

SEQ ID NO: 1253915 - DNA, 15 bp, Homo sapiens
cccctccattcctct

SEQ ID NO: 1253916 - DNA, 15 bp, Homo sapiens
tcccctccattcctc

SEQ ID NO: 1253917 - DNA, 15 bp, Homo sapiens
ctcccctccattcct

SEQ ID NO: 1253918 - DNA, 15 bp, Homo sapiens
actcccctccattcc

SEQ ID NO: 1253919 - DNA, 15 bp, Homo sapiens
cactcccctccattc

SEQ ID NO: 1253920 - DNA, 15 bp, Homo sapiens
ccactcccctccatt

SEQ ID NO: 1253921 - DNA, 15 bp, Homo sapiens
accactcccctccat

SEQ ID NO: 1253922 - DNA, 15 bp, Homo sapiens
caccactcccctcca

SEQ ID NO: 1253923 - DNA, 15 bp, Homo sapiens
tcaccactcccctcc

SEQ ID NO: 1253924 - DNA, 15 bp, Homo sapiens
atcaccactcccctc

SEQ ID NO: 1253925 - DNA, 15 bp, Homo sapiens
tatcaccactcccct

SEQ ID NO: 1253926 - DNA, 15 bp, Homo sapiens
ctatcaccactcccc

SEQ ID NO: 1253927 - DNA, 15 bp, Homo sapiens
tctatcaccactccc

SEQ ID NO: 1253928 - DNA, 15 bp, Homo sapiens
ttctatcaccactcc

SEQ ID NO: 1253929 - DNA, 15 bp, Homo sapiens
attctatcaccactc

SEQ ID NO: 1253930 - DNA, 15 bp, Homo sapiens
tattctatcaccact

SEQ ID NO: 1253931 - DNA, 15 bp, Homo sapiens
ttattctatcaccac

SEQ ID NO: 1253932 - DNA, 15 bp, Homo sapiens
tttattctatcacca

SEQ ID NO: 1253933 - DNA, 15 bp, Homo sapiens
atttattctatcacc

SEQ ID NO: 1253934 - DNA, 15 bp, Homo sapiens
catttattctatcac

SEQ ID NO: 1253935 - DNA, 15 bp, Homo sapiens
tcatttattctatca

SEQ ID NO: 1253936 - DNA, 15 bp, Homo sapiens
gtcatttattctatc

SEQ ID NO: 1253937 - DNA, 15 bp, Homo sapiens
agtcatttattctat

SEQ ID NO: 1253938 - DNA, 15 bp, Homo sapiens
aagtcatttattcta

SEQ ID NO: 1253939 - DNA, 15 bp, Homo sapiens
gaagtcatttattct

SEQ ID NO: 1253940 - DNA, 15 bp, Homo sapiens
agaagtcatttattc

SEQ ID NO: 1253941 - DNA, 15 bp, Homo sapiens
gagaagtcatttatt

SEQ ID NO: 1253942 - DNA, 15 bp, Homo sapiens
tgagaagtcatttat

SEQ ID NO: 1253943 - DNA, 15 bp, Homo sapiens
ttgagaagtcattta

SEQ ID NO: 1253944 - DNA, 15 bp, Homo sapiens
tttgagaagtcattt

SEQ ID NO: 1253945 - DNA, 15 bp, Homo sapiens
ctttgagaagtcatt

SEQ ID NO: 1253946 - DNA, 15 bp, Homo sapiens
tctttgagaagtcat

SEQ ID NO: 1253947 - DNA, 15 bp, Homo sapiens
ttctttgagaagtca

SEQ ID NO: 1253948 - DNA, 15 bp, Homo sapiens
tttctttgagaagtc

SEQ ID NO: 1253949 - DNA, 15 bp, Homo sapiens
atttctttgagaagt

SEQ ID NO: 1253950 - DNA, 15 bp, Homo sapiens
gatttctttgagaag

SEQ ID NO: 1253951 - DNA, 15 bp, Homo sapiens
ggatttctttgagaa

SEQ ID NO: 1253952 - DNA, 15 bp, Homo sapiens
cggatttctttgaga

SEQ ID NO: 1253953 - DNA, 15 bp, Homo sapiens
gcggatttctttgag

SEQ ID NO: 1253954 - DNA, 15 bp, Homo sapiens
tgcggatttctttga

SEQ ID NO: 1253955 - DNA, 15 bp, Homo sapiens
gtgcggatttctttg

SEQ ID NO: 1253956 - DNA, 15 bp, Homo sapiens
agtgcggatttcttt

SEQ ID NO: 1253957 - DNA, 15 bp, Homo sapiens
aagtgcggatttctt

SEQ ID NO: 1253958 - DNA, 15 bp, Homo sapiens
aaagtgcggatttct

SEQ ID NO: 1253959 - DNA, 15 bp, Homo sapiens
aaaagtgcggatttc

SEQ ID NO: 1253960 - DNA, 15 bp, Homo sapiens
caaaagtgcggattt

SEQ ID NO: 1253961 - DNA, 15 bp, Homo sapiens
tcaaaagtgcggatt

SEQ ID NO: 1253962 - DNA, 15 bp, Homo sapiens
ttcaaaagtgcggat

SEQ ID NO: 1253963 - DNA, 15 bp, Homo sapiens
tttcaaaagtgcgga

SEQ ID NO: 1253964 - DNA, 15 bp, Homo sapiens
ttttcaaaagtgcgg

SEQ ID NO: 1253965 - DNA, 15 bp, Homo sapiens
cttttcaaaagtgcg

SEQ ID NO: 1253966 - DNA, 15 bp, Homo sapiens
tcttttcaaaagtgc

SEQ ID NO: 1253967 - DNA, 15 bp, Homo sapiens
ctcttttcaaaagtg

SEQ ID NO: 1253968 - DNA, 15 bp, Homo sapiens
tctcttttcaaaagt

SEQ ID NO: 1253969 - DNA, 15 bp, Homo sapiens
ctctcttttcaaaag

SEQ ID NO: 1253970 - DNA, 15 bp, Homo sapiens
tctctcttttcaaaa

SEQ ID NO: 1253971 - DNA, 15 bp, Homo sapiens
gtctctcttttcaaa

SEQ ID NO: 1253972 - DNA, 15 bp, Homo sapiens
tgtctctcttttcaa

SEQ ID NO: 1253973 - DNA, 15 bp, Homo sapiens
atgtctctcttttca

SEQ ID NO: 1253974 - DNA, 15 bp, Homo sapiens
catgtctctcttttc

SEQ ID NO: 1253975 - DNA, 15 bp, Homo sapiens
tcatgtctctctttt

SEQ ID NO: 1253976 - DNA, 15 bp, Homo sapiens
ctcatgtctctcttt

SEQ ID NO: 1253977 - DNA, 15 bp, Homo sapiens
cctcatgtctctctt

SEQ ID NO: 1253978 - DNA, 15 bp, Homo sapiens
ccctcatgtctctct

SEQ ID NO: 1253979 - DNA, 15 bp, Homo sapiens
tccctcatgtctctc

SEQ ID NO: 1253980 - DNA, 15 bp, Homo sapiens
ctccctcatgtctct

SEQ ID NO: 1253981 - DNA, 15 bp, Homo sapiens
cctccctcatgtctc

SEQ ID NO: 1253982 - DNA, 15 bp, Homo sapiens
tcctccctcatgtct

SEQ ID NO: 1253983 - DNA, 15 bp, Homo sapiens
ttcctccctcatgtc

SEQ ID NO: 1253984 - DNA, 15 bp, Homo sapiens
tttcctccctcatgt

SEQ ID NO: 1253985 - DNA, 15 bp, Homo sapiens
ctttcctccctcatg

SEQ ID NO: 1253986 - DNA, 15 bp, Homo sapiens
tctttcctccctcat

SEQ ID NO: 1253987 - DNA, 15 bp, Homo sapiens
ctctttcctccctca

SEQ ID NO: 1253988 - DNA, 15 bp, Homo sapiens
tctctttcctccctc

SEQ ID NO: 1253989 - DNA, 15 bp, Homo sapiens
ctctctttcctccct

SEQ ID NO: 1253990 - DNA, 15 bp, Homo sapiens
tctctctttcctccc

SEQ ID NO: 1253991 - DNA, 15 bp, Homo sapiens
gtctctctttcctcc

SEQ ID NO: 1253992 - DNA, 15 bp, Homo sapiens
tgtctctctttcctc

SEQ ID NO: 1253993 - DNA, 15 bp, Homo sapiens
atgtctctctttcct

SEQ ID NO: 1253994 - DNA, 15 bp, Homo sapiens
tatgtctctctttcc

SEQ ID NO: 1253995 - DNA, 15 bp, Homo sapiens
ttatgtctctctttc

SEQ ID NO: 1253996 - DNA, 15 bp, Homo sapiens
cttatgtctctcttt

SEQ ID NO: 1253997 - DNA, 15 bp, Homo sapiens
ccttatgtctctctt

SEQ ID NO: 1253998 - DNA, 15 bp, Homo sapiens
cccttatgtctctct

SEQ ID NO: 1253999 - DNA, 15 bp, Homo sapiens
tcccttatgtctctc

SEQ ID NO: 1254000 - DNA, 15 bp, Homo sapiens
ctcccttatgtctct

SEQ ID NO: 1254001 - DNA, 15 bp, Homo sapiens
tctcccttatgtctc

SEQ ID NO: 1254002 - DNA, 15 bp, Homo sapiens
ttctcccttatgtct

SEQ ID NO: 1254003 - DNA, 15 bp, Homo sapiens
tttctcccttatgtc

SEQ ID NO: 1254004 - DNA, 15 bp, Homo sapiens
ctttctcccttatgt

SEQ ID NO: 1254005 - DNA, 15 bp, Homo sapiens
actttctcccttatg

SEQ ID NO: 1254006 - DNA, 15 bp, Homo sapiens
gactttctcccttat

SEQ ID NO: 1254007 - DNA, 15 bp, Homo sapiens
tgactttctccctta

SEQ ID NO: 1254008 - DNA, 15 bp, Homo sapiens
ttgactttctccctt

SEQ ID NO: 1254009 - DNA, 15 bp, Homo sapiens
tttgactttctccct

SEQ ID NO: 1254010 - DNA, 15 bp, Homo sapiens
ctttgactttctccc

SEQ ID NO: 1254011 - DNA, 15 bp, Homo sapiens
tctttgactttctcc

SEQ ID NO: 1254012 - DNA, 15 bp, Homo sapiens
gtctttgactttctc

SEQ ID NO: 1254013 - DNA, 15 bp, Homo sapiens
tgtctttgactttct

SEQ ID NO: 1254014 - DNA, 15 bp, Homo sapiens
ttgtctttgactttc

SEQ ID NO: 1254015 - DNA, 15 bp, Homo sapiens
tttgtctttgacttt

SEQ ID NO: 1254016 - DNA, 15 bp, Homo sapiens
atttgtctttgactt

SEQ ID NO: 1254017 - DNA, 15 bp, Homo sapiens
catttgtctttgact

SEQ ID NO: 1254018 - DNA, 15 bp, Homo sapiens
tcatttgtctttgac

SEQ ID NO: 1254019 - DNA, 15 bp, Homo sapiens
ttcatttgtctttga

SEQ ID NO: 1254020 - DNA, 15 bp, Homo sapiens
gttcatttgtctttg

SEQ ID NO: 1254021 - DNA, 15 bp, Homo sapiens
tgttcatttgtcttt

SEQ ID NO: 1254022 - DNA, 15 bp, Homo sapiens
atgttcatttgtctt

SEQ ID NO: 1254023 - DNA, 15 bp, Homo sapiens
tatgttcatttgtct

SEQ ID NO: 1254024 - DNA, 15 bp, Homo sapiens
gtatgttcatttgtc

SEQ ID NO: 1254025 - DNA, 15 bp, Homo sapiens
tgtatgttcatttgt

SEQ ID NO: 1254026 - DNA, 15 bp, Homo sapiens
atgtatgttcatttg

SEQ ID NO: 1254027 - DNA, 15 bp, Homo sapiens
gatgtatgttcattt

SEQ ID NO: 1254028 - DNA, 15 bp, Homo sapiens
agatgtatgttcatt

SEQ ID NO: 1254029 - DNA, 15 bp, Homo sapiens
aagatgtatgttcat

SEQ ID NO: 1254030 - DNA, 15 bp, Homo sapiens
taagatgtatgttca

SEQ ID NO: 1254031 - DNA, 15 bp, Homo sapiens
ctaagatgtatgttc

SEQ ID NO: 1254032 - DNA, 15 bp, Homo sapiens
actaagatgtatgtt

SEQ ID NO: 1254033 - DNA, 15 bp, Homo sapiens
gactaagatgtatgt

SEQ ID NO: 1254034 - DNA, 15 bp, Homo sapiens
ggactaagatgtatg

SEQ ID NO: 1254035 - DNA, 15 bp, Homo sapiens
aggactaagatgtat

SEQ ID NO: 1254036 - DNA, 15 bp, Homo sapiens
aaggactaagatgta

SEQ ID NO: 1254037 - DNA, 15 bp, Homo sapiens
gaaggactaagatgt

SEQ ID NO: 1254038 - DNA, 15 bp, Homo sapiens
ggaaggactaagatg

SEQ ID NO: 1254039 - DNA, 15 bp, Homo sapiens
aggaaggactaagat

SEQ ID NO: 1254040 - DNA, 15 bp, Homo sapiens
aaggaaggactaaga

SEQ ID NO: 1254041 - DNA, 15 bp, Homo sapiens
aaaggaaggactaag

SEQ ID NO: 1254042 - DNA, 15 bp, Homo sapiens
gaaaggaaggactaa

SEQ ID NO: 1254043 - DNA, 15 bp, Homo sapiens
agaaaggaaggacta

SEQ ID NO: 1254044 - DNA, 15 bp, Homo sapiens
tagaaaggaaggact

SEQ ID NO: 1254045 - DNA, 15 bp, Homo sapiens
ttagaaaggaaggac

SEQ ID NO: 1254046 - DNA, 15 bp, Homo sapiens
tttagaaaggaagga

SEQ ID NO: 1254047 - DNA, 15 bp, Homo sapiens
atttagaaaggaagg

SEQ ID NO: 1254048 - DNA, 15 bp, Homo sapiens
gatttagaaaggaag

SEQ ID NO: 1254049 - DNA, 15 bp, Homo sapiens
ggatttagaaaggaa

SEQ ID NO: 1254050 - DNA, 15 bp, Homo sapiens
tggatttagaaagga

SEQ ID NO: 1254051 - DNA, 15 bp, Homo sapiens
ttggatttagaaagg

SEQ ID NO: 1254052 - DNA, 15 bp, Homo sapiens
tttggatttagaaag

SEQ ID NO: 1254053 - DNA, 15 bp, Homo sapiens
atttggatttagaaa

SEQ ID NO: 1254054 - DNA, 15 bp, Homo sapiens
gaatttggatttaga

SEQ ID NO: 1254055 - DNA, 15 bp, Homo sapiens
ggaatttggatttag

SEQ ID NO: 1254056 - DNA, 15 bp, Homo sapiens
tggaatttggattta

SEQ ID NO: 1254057 - DNA, 15 bp, Homo sapiens
atggaatttggattt

SEQ ID NO: 1254058 - DNA, 15 bp, Homo sapiens
gatggaatttggatt

SEQ ID NO: 1254059 - DNA, 15 bp, Homo sapiens
ggatggaatttggat

SEQ ID NO: 1254060 - DNA, 15 bp, Homo sapiens
gggatggaatttgga

SEQ ID NO: 1254061 - DNA, 15 bp, Homo sapiens
ggggatggaatttgg

SEQ ID NO: 1254062 - DNA, 15 bp, Homo sapiens
gggggatggaatttg

SEQ ID NO: 1254063 - DNA, 15 bp, Homo sapiens
ggggggatggaattt

SEQ ID NO: 1254064 - DNA, 15 bp, Homo sapiens
gggggggatggaatt

SEQ ID NO: 1254065 - DNA, 15 bp, Homo sapiens
tgggggggatggaat

SEQ ID NO: 1254066 - DNA, 15 bp, Homo sapiens
ctgggggggatggaa

SEQ ID NO: 1254067 - DNA, 15 bp, Homo sapiens
tctgggggggatgga

SEQ ID NO: 1254068 - DNA, 15 bp, Homo sapiens
gtctgggggggatgg

SEQ ID NO: 1254069 - DNA, 15 bp, Homo sapiens
ggtctgggggggatg

SEQ ID NO: 1254070 - DNA, 15 bp, Homo sapiens
gggtctgggggggat

SEQ ID NO: 1254071 - DNA, 15 bp, Homo sapiens
ggggtctggggggga

SEQ ID NO: 1254072 - DNA, 15 bp, Homo sapiens
aggggtctggggggg

SEQ ID NO: 1254073 - DNA, 15 bp, Homo sapiens
gaggggtctgggggg

SEQ ID NO: 1254074 - DNA, 15 bp, Homo sapiens
tgaggggtctggggg

SEQ ID NO: 1254075 - DNA, 15 bp, Homo sapiens
gtgaggggtctgggg

SEQ ID NO: 1254076 - DNA, 15 bp, Homo sapiens
tgtgaggggtctggg

SEQ ID NO: 1254077 - DNA, 15 bp, Homo sapiens
ttgtgaggggtctgg

SEQ ID NO: 1254078 - DNA, 15 bp, Homo sapiens
tttgtgaggggtctg

SEQ ID NO: 1254079 - DNA, 15 bp, Homo sapiens
ctttgtgaggggtct

SEQ ID NO: 1254080 - DNA, 15 bp, Homo sapiens
tctttgtgaggggtc

SEQ ID NO: 1254081 - DNA, 15 bp, Homo sapiens
ttctttgtgaggggt

SEQ ID NO: 1254082 - DNA, 15 bp, Homo sapiens
tttctttgtgagggg

SEQ ID NO: 1254083 - DNA, 15 bp, Homo sapiens
ctttctttgtgaggg

SEQ ID NO: 1254084 - DNA, 15 bp, Homo sapiens
cctttctttgtgagg

SEQ ID NO: 1254085 - DNA, 15 bp, Homo sapiens
acctttctttgtgag

SEQ ID NO: 1254086 - DNA, 15 bp, Homo sapiens
tacctttctttgtga

SEQ ID NO: 1254087 - DNA, 15 bp, Homo sapiens
ttacctttctttgtg

SEQ ID NO: 1254088 - DNA, 15 bp, Homo sapiens
tttacctttctttgt

SEQ ID NO: 1254089 - DNA, 15 bp, Homo sapiens
ttttacctttctttg

SEQ ID NO: 1254090 - DNA, 15 bp, Homo sapiens
tttttacctttcttt

SEQ ID NO: 1254091 - DNA, 15 bp, Homo sapiens
atttttacctttctt

SEQ ID NO: 1254092 - DNA, 15 bp, Homo sapiens
aatttttacctttct

SEQ ID NO: 1254093 - DNA, 15 bp, Homo sapiens
taatttttacctttc

SEQ ID NO: 1254094 - DNA, 15 bp, Homo sapiens
ataatttttaccttt

SEQ ID NO: 1254095 - DNA, 15 bp, Homo sapiens
gataatttttacctt

SEQ ID NO: 1254096 - DNA, 15 bp, Homo sapiens
ggataatttttacct

SEQ ID NO: 1254097 - DNA, 15 bp, Homo sapiens
aggataatttttacc

SEQ ID NO: 1254098 - DNA, 15 bp, Homo sapiens
aaggataatttttac

SEQ ID NO: 1254099 - DNA, 15 bp, Homo sapiens
aaaggataattttta

SEQ ID NO: 1254100 - DNA, 15 bp, Homo sapiens
aaaaggataattttt

SEQ ID NO: 1254101 - DNA, 15 bp, Homo sapiens
caaaaggataatttt

SEQ ID NO: 1254102 - DNA, 15 bp, Homo sapiens
gcaaaaggataattt

SEQ ID NO: 1254103 - DNA, 15 bp, Homo sapiens
ggcaaaaggataatt

SEQ ID NO: 1254104 - DNA, 15 bp, Homo sapiens
tggcaaaaggataat

SEQ ID NO: 1254105 - DNA, 15 bp, Homo sapiens
ctggcaaaaggataa

SEQ ID NO: 1254106 - DNA, 15 bp, Homo sapiens
gctggcaaaaggata

SEQ ID NO: 1254107 - DNA, 15 bp, Homo sapiens
agctggcaaaaggat

SEQ ID NO: 1254108 - DNA, 15 bp, Homo sapiens
gagctggcaaaagga

SEQ ID NO: 1254109 - DNA, 15 bp, Homo sapiens
tgagctggcaaaagg

SEQ ID NO: 1254110 - DNA, 15 bp, Homo sapiens
atgagctggcaaaag

SEQ ID NO: 1254111 - DNA, 15 bp, Homo sapiens
aatgagctggcaaaa

SEQ ID NO: 1254112 - DNA, 15 bp, Homo sapiens
gaatgagctggcaaa

SEQ ID NO: 1254113 - DNA, 15 bp, Homo sapiens
tgaatgagctggcaa

SEQ ID NO: 1254114 - DNA, 15 bp, Homo sapiens
gtgaatgagctggca

SEQ ID NO: 1254115 - DNA, 15 bp, Homo sapiens
agtgaatgagctggc

SEQ ID NO: 1254116 - DNA, 15 bp, Homo sapiens
aagtgaatgagctgg

SEQ ID NO: 1254117 - DNA, 15 bp, Homo sapiens
taagtgaatgagctg

SEQ ID NO: 1254118 - DNA, 15 bp, Homo sapiens
gtaagtgaatgagct

SEQ ID NO: 1254119 - DNA, 15 bp, Homo sapiens
ggtaagtgaatgagc

SEQ ID NO: 1254120 - DNA, 15 bp, Homo sapiens
aggtaagtgaatgag

SEQ ID NO: 1254121 - DNA, 15 bp, Homo sapiens
aaggtaagtgaatga

SEQ ID NO: 1254122 - DNA, 15 bp, Homo sapiens
taaggtaagtgaatg

SEQ ID NO: 1254123 - DNA, 15 bp, Homo sapiens
gtaaggtaagtgaat

SEQ ID NO: 1254124 - DNA, 15 bp, Homo sapiens
tgtaaggtaagtgaa

SEQ ID NO: 1254125 - DNA, 15 bp, Homo sapiens
atgtaaggtaagtga

SEQ ID NO: 1254126 - DNA, 15 bp, Homo sapiens
aatgtaaggtaagtg

SEQ ID NO: 1254127 - DNA, 15 bp, Homo sapiens
aaatgtaaggtaagt

SEQ ID NO: 1254128 - DNA, 15 bp, Homo sapiens
caaatgtaaggtaag

SEQ ID NO: 1254129 - DNA, 15 bp, Homo sapiens
gcaaatgtaaggtaa

SEQ ID NO: 1254130 - DNA, 15 bp, Homo sapiens
tgcaaatgtaaggta

SEQ ID NO: 1254131 - DNA, 15 bp, Homo sapiens
ttgcaaatgtaaggt

SEQ ID NO: 1254132 - DNA, 15 bp, Homo sapiens
cttgcaaatgtaagg

SEQ ID NO: 1254133 - DNA, 15 bp, Homo sapiens
ccttgcaaatgtaag

SEQ ID NO: 1254134 - DNA, 15 bp, Homo sapiens
accttgcaaatgtaa

SEQ ID NO: 1254135 - DNA, 15 bp, Homo sapiens
taccttgcaaatgta

SEQ ID NO: 1254136 - DNA, 15 bp, Homo sapiens
ttaccttgcaaatgt

SEQ ID NO: 1254137 - DNA, 15 bp, Homo sapiens
cttaccttgcaaatg

SEQ ID NO: 1254138 - DNA, 15 bp, Homo sapiens
tcttaccttgcaaat

SEQ ID NO: 1254139 - DNA, 15 bp, Homo sapiens
atcttaccttgcaaa

SEQ ID NO: 1254140 - DNA, 15 bp, Homo sapiens
aatcttaccttgcaa

SEQ ID NO: 1254141 - DNA, 15 bp, Homo sapiens
caatcttaccttgca

SEQ ID NO: 1254142 - DNA, 15 bp, Homo sapiens
acaatcttaccttgc

SEQ ID NO: 1254143 - DNA, 15 bp, Homo sapiens
cacaatcttaccttg

SEQ ID NO: 1254144 - DNA, 15 bp, Homo sapiens
ccacaatcttacctt

SEQ ID NO: 1254145 - DNA, 15 bp, Homo sapiens
cccacaatcttacct

SEQ ID NO: 1254146 - DNA, 15 bp, Homo sapiens
tcccacaatcttacc

SEQ ID NO: 1254147 - DNA, 15 bp, Homo sapiens
gtcccacaatcttac

SEQ ID NO: 1254148 - DNA, 15 bp, Homo sapiens
tgtcccacaatctta

SEQ ID NO: 1254149 - DNA, 15 bp, Homo sapiens
ttgtcccacaatctt

SEQ ID NO: 1254150 - DNA, 15 bp, Homo sapiens
cttgtcccacaatct

SEQ ID NO: 1254151 - DNA, 15 bp, Homo sapiens
tcttgtcccacaatc

SEQ ID NO: 1254152 - DNA, 15 bp, Homo sapiens
gtcttgtcccacaat

SEQ ID NO: 1254153 - DNA, 15 bp, Homo sapiens
tgtcttgtcccacaa

SEQ ID NO: 1254154 - DNA, 15 bp, Homo sapiens
ctgtcttgtcccaca

SEQ ID NO: 1254155 - DNA, 15 bp, Homo sapiens
cctgtcttgtcccac

SEQ ID NO: 1254156 - DNA, 15 bp, Homo sapiens
acctgtcttgtccca

SEQ ID NO: 1254157 - DNA, 15 bp, Homo sapiens
gacctgtcttgtccc

SEQ ID NO: 1254158 - DNA, 15 bp, Homo sapiens
ggacctgtcttgtcc

SEQ ID NO: 1254159 - DNA, 15 bp, Homo sapiens
tggacctgtcttgtc

SEQ ID NO: 1254160 - DNA, 15 bp, Homo sapiens
ctggacctgtcttgt

SEQ ID NO: 1254161 - DNA, 15 bp, Homo sapiens
gctggacctgtcttg

SEQ ID NO: 1254162 - DNA, 15 bp, Homo sapiens
agctggacctgtctt

SEQ ID NO: 1254163 - DNA, 15 bp, Homo sapiens
tagctggacctgtct

SEQ ID NO: 1254164 - DNA, 15 bp, Homo sapiens
ttagctggacctgtc

SEQ ID NO: 1254165 - DNA, 15 bp, Homo sapiens
gttagctggacctgt

SEQ ID NO: 1254166 - DNA, 15 bp, Homo sapiens
tgttagctggacctg

SEQ ID NO: 1254167 - DNA, 15 bp, Homo sapiens
atgttagctggacct

SEQ ID NO: 1254168 - DNA, 15 bp, Homo sapiens
aatgttagctggacc

SEQ ID NO: 1254169 - DNA, 15 bp, Homo sapiens
aaatgttagctggac

SEQ ID NO: 1254170 - DNA, 15 bp, Homo sapiens
caaatgttagctgga

SEQ ID NO: 1254171 - DNA, 15 bp, Homo sapiens
acaaatgttagctgg

SEQ ID NO: 1254172 - DNA, 15 bp, Homo sapiens
aacaaatgttagctg

SEQ ID NO: 1254173 - DNA, 15 bp, Homo sapiens
aaacaaatgttagct

SEQ ID NO: 1254174 - DNA, 15 bp, Homo sapiens
caaacaaatgttagc

SEQ ID NO: 1254175 - DNA, 15 bp, Homo sapiens
tcaaacaaatgttag

SEQ ID NO: 1254176 - DNA, 15 bp, Homo sapiens
ctcaaacaaatgtta

SEQ ID NO: 1254177 - DNA, 15 bp, Homo sapiens
tctcaaacaaatgtt

SEQ ID NO: 1254178 - DNA, 15 bp, Homo sapiens
ttctcaaacaaatgt

SEQ ID NO: 1254179 - DNA, 15 bp, Homo sapiens
gttctcaaacaaatg

SEQ ID NO: 1254180 - DNA, 15 bp, Homo sapiens
ggttctcaaacaaat

SEQ ID NO: 1254181 - DNA, 15 bp, Homo sapiens
gggttctcaaacaaa

SEQ ID NO: 1254182 - DNA, 15 bp, Homo sapiens
agggttctcaaacaa

SEQ ID NO: 1254183 - DNA, 15 bp, Homo sapiens
aagggttctcaaaca

SEQ ID NO: 1254184 - DNA, 15 bp, Homo sapiens
aaagggttctcaaac

SEQ ID NO: 1254185 - DNA, 15 bp, Homo sapiens
caaagggttctcaaa

SEQ ID NO: 1254186 - DNA, 15 bp, Homo sapiens
ccaaagggttctcaa

SEQ ID NO: 1254187 - DNA, 15 bp, Homo sapiens
tccaaagggttctca

SEQ ID NO: 1254188 - DNA, 15 bp, Homo sapiens
ttccaaagggttctc

SEQ ID NO: 1254189 - DNA, 15 bp, Homo sapiens
attccaaagggttct

SEQ ID NO: 1254190 - DNA, 15 bp, Homo sapiens
tattccaaagggttc

SEQ ID NO: 1254191 - DNA, 15 bp, Homo sapiens
ttattccaaagggtt

SEQ ID NO: 1254192 - DNA, 15 bp, Homo sapiens
tttattccaaagggt

SEQ ID NO: 1254193 - DNA, 15 bp, Homo sapiens
ctttattccaaaggg

SEQ ID NO: 1254194 - DNA, 15 bp, Homo sapiens
tctttattccaaagg

SEQ ID NO: 1254195 - DNA, 15 bp, Homo sapiens
ctctttattccaaag

SEQ ID NO: 1254196 - DNA, 15 bp, Homo sapiens
tctctttattccaaa

SEQ ID NO: 1254197 - DNA, 15 bp, Homo sapiens
gtctctttattccaa

SEQ ID NO: 1254198 - DNA, 15 bp, Homo sapiens
agtctctttattcca

SEQ ID NO: 1254199 - DNA, 15 bp, Homo sapiens
aagtctctttattcc

SEQ ID NO: 1254200 - DNA, 15 bp, Homo sapiens
gaagtctctttattc

SEQ ID NO: 1254201 - DNA, 15 bp, Homo sapiens
tgaagtctctttatt

SEQ ID NO: 1254202 - DNA, 15 bp, Homo sapiens
ttgaagtctctttat

SEQ ID NO: 1254203 - DNA, 15 bp, Homo sapiens
tttgaagtctcttta

SEQ ID NO: 1254204 - DNA, 15 bp, Homo sapiens
ctttgaagtctcttt

SEQ ID NO: 1254205 - DNA, 15 bp, Homo sapiens
tctttgaagtctctt

SEQ ID NO: 1254206 - DNA, 15 bp, Homo sapiens
ctctttgaagtctct

SEQ ID NO: 1254207 - DNA, 15 bp, Homo sapiens
cctctttgaagtctc

SEQ ID NO: 1254208 - DNA, 15 bp, Homo sapiens
tcctctttgaagtct

SEQ ID NO: 1254209 - DNA, 15 bp, Homo sapiens
gtcctctttgaagtc

SEQ ID NO: 1254210 - DNA, 15 bp, Homo sapiens
agtcctctttgaagt

SEQ ID NO: 1254211 - DNA, 15 bp, Homo sapiens
tagtcctctttgaag

SEQ ID NO: 1254212 - DNA, 15 bp, Homo sapiens
ttagtcctctttgaa

SEQ ID NO: 1254213 - DNA, 15 bp, Homo sapiens
gttagtcctctttga

SEQ ID NO: 1254214 - DNA, 15 bp, Homo sapiens
agttagtcctctttg

SEQ ID NO: 1254215 - DNA, 15 bp, Homo sapiens
aagttagtcctcttt

SEQ ID NO: 1254216 - DNA, 15 bp, Homo sapiens
aaagttagtcctctt

SEQ ID NO: 1254217 - DNA, 15 bp, Homo sapiens
gaaagttagtcctct

SEQ ID NO: 1254218 - DNA, 15 bp, Homo sapiens
agaaagttagtcctc

SEQ ID NO: 1254219 - DNA, 15 bp, Homo sapiens
aagaaagttagtcct

SEQ ID NO: 1254220 - DNA, 15 bp, Homo sapiens
aaagaaagttagtcc

SEQ ID NO: 1254221 - DNA, 15 bp, Homo sapiens
gaaagaaagttagtc

SEQ ID NO: 1254222 - DNA, 15 bp, Homo sapiens
agaaagaaagttagt

SEQ ID NO: 1254223 - DNA, 15 bp, Homo sapiens
aagaaagaaagttag

SEQ ID NO: 1254224 - DNA, 15 bp, Homo sapiens
aaagaaagaaagtta

SEQ ID NO: 1254225 - DNA, 15 bp, Homo sapiens
aaaagaaagaaagtt

SEQ ID NO: 1254226 - DNA, 15 bp, Homo sapiens
taaaagaaagaaagt

SEQ ID NO: 1254227 - DNA, 15 bp, Homo sapiens
ttaaaagaaagaaag

SEQ ID NO: 1254228 - DNA, 15 bp, Homo sapiens
tttaaaagaaagaaa

SEQ ID NO: 1254229 - DNA, 15 bp, Homo sapiens
ttttaaaagaaagaa

SEQ ID NO: 1254230 - DNA, 15 bp, Homo sapiens
attttaaaagaaaga

SEQ ID NO: 1254231 - DNA, 15 bp, Homo sapiens
ccattttaaaagaaa

SEQ ID NO: 1254232 - DNA, 15 bp, Homo sapiens
tccattttaaaagaa

SEQ ID NO: 1254233 - DNA, 15 bp, Homo sapiens
atccattttaaaaga

SEQ ID NO: 1254234 - DNA, 15 bp, Homo sapiens
tatccattttaaaag

SEQ ID NO: 1254235 - DNA, 15 bp, Homo sapiens
atatccattttaaaa

SEQ ID NO: 1254236 - DNA, 15 bp, Homo sapiens
aatatccattttaaa

SEQ ID NO: 1254237 - DNA, 15 bp, Homo sapiens
gaatatccattttaa

SEQ ID NO: 1254238 - DNA, 15 bp, Homo sapiens
ggaatatccatttta

SEQ ID NO: 1254239 - DNA, 15 bp, Homo sapiens
aggaatatccatttt

SEQ ID NO: 1254240 - DNA, 15 bp, Homo sapiens
aaggaatatccattt

SEQ ID NO: 1254241 - DNA, 15 bp, Homo sapiens
taaggaatatccatt

SEQ ID NO: 1254242 - DNA, 15 bp, Homo sapiens
ttaaggaatatccat

SEQ ID NO: 1254243 - DNA, 15 bp, Homo sapiens
attaaggaatatcca

SEQ ID NO: 1254244 - DNA, 15 bp, Homo sapiens
aattaaggaatatcc

SEQ ID NO: 1254245 - DNA, 15 bp, Homo sapiens
aaattaaggaatatc

SEQ ID NO: 1254246 - DNA, 15 bp, Homo sapiens
taaattaaggaatat

SEQ ID NO: 1254247 - DNA, 15 bp, Homo sapiens
ataaattaaggaata

SEQ ID NO: 1254248 - DNA, 15 bp, Homo sapiens
cataaattaaggaat

SEQ ID NO: 1254249 - DNA, 15 bp, Homo sapiens
acataaattaaggaa

SEQ ID NO: 1254250 - DNA, 15 bp, Homo sapiens
gacataaattaagga

SEQ ID NO: 1254251 - DNA, 15 bp, Homo sapiens
agacataaattaagg

SEQ ID NO: 1254252 - DNA, 15 bp, Homo sapiens
tagacataaattaag

SEQ ID NO: 1254253 - DNA, 15 bp, Homo sapiens
gtagacataaattaa

SEQ ID NO: 1254254 - DNA, 15 bp, Homo sapiens
agtagacataaatta

SEQ ID NO: 1254255 - DNA, 15 bp, Homo sapiens
tagtagacataaatt

SEQ ID NO: 1254256 - DNA, 15 bp, Homo sapiens
atagtagacataaat

SEQ ID NO: 1254257 - DNA, 15 bp, Homo sapiens
gatagtagacataaa

SEQ ID NO: 1254258 - DNA, 15 bp, Homo sapiens
agatagtagacataa

SEQ ID NO: 1254259 - DNA, 15 bp, Homo sapiens
aagatagtagacata

SEQ ID NO: 1254260 - DNA, 15 bp, Homo sapiens
aaagatagtagacat

SEQ ID NO: 1254261 - DNA, 15 bp, Homo sapiens
taaagatagtagaca

SEQ ID NO: 1254262 - DNA, 15 bp, Homo sapiens
ctaaagatagtagac

SEQ ID NO: 1254263 - DNA, 15 bp, Homo sapiens
tctaaagatagtaga

SEQ ID NO: 1254264 - DNA, 15 bp, Homo sapiens
atctaaagatagtag

SEQ ID NO: 1254265 - DNA, 15 bp, Homo sapiens
tatctaaagatagta

SEQ ID NO: 1254266 - DNA, 15 bp, Homo sapiens
ttatctaaagatagt

SEQ ID NO: 1254267 - DNA, 15 bp, Homo sapiens
attatctaaagatag

SEQ ID NO: 1254268 - DNA, 15 bp, Homo sapiens
aattatctaaagata

SEQ ID NO: 1254269 - DNA, 15 bp, Homo sapiens
taattatctaaagat

SEQ ID NO: 1254270 - DNA, 15 bp, Homo sapiens
ttaattatctaaaga

SEQ ID NO: 1254271 - DNA, 15 bp, Homo sapiens
tttaattatctaaag

SEQ ID NO: 1254272 - DNA, 15 bp, Homo sapiens
ctttaattatctaaa

SEQ ID NO: 1254273 - DNA, 15 bp, Homo sapiens
cctttaattatctaa

SEQ ID NO: 1254274 - DNA, 15 bp, Homo sapiens
acctttaattatcta

SEQ ID NO: 1254275 - DNA, 15 bp, Homo sapiens
tacctttaattatct

SEQ ID NO: 1254276 - DNA, 15 bp, Homo sapiens
ttacctttaattatc

SEQ ID NO: 1254277 - DNA, 15 bp, Homo sapiens
tttacctttaattat

SEQ ID NO: 1254278 - DNA, 15 bp, Homo sapiens
ttttacctttaatta

SEQ ID NO: 1254279 - DNA, 15 bp, Homo sapiens
attttacctttaatt

SEQ ID NO: 1254280 - DNA, 15 bp, Homo sapiens
cattttacctttaat

SEQ ID NO: 1254281 - DNA, 15 bp, Homo sapiens
gcattttacctttaa

SEQ ID NO: 1254282 - DNA, 15 bp, Homo sapiens
agcattttaccttta

SEQ ID NO: 1254283 - DNA, 15 bp, Homo sapiens
cagcattttaccttt

SEQ ID NO: 1254284 - DNA, 15 bp, Homo sapiens
ccagcattttacctt

SEQ ID NO: 1254285 - DNA, 15 bp, Homo sapiens
gccagcattttacct

SEQ ID NO: 1254286 - DNA, 15 bp, Homo sapiens
ggccagcattttacc

SEQ ID NO: 1254287 - DNA, 15 bp, Homo sapiens
gggccagcattttac

SEQ ID NO: 1254288 - DNA, 15 bp, Homo sapiens
tgggccagcatttta

SEQ ID NO: 1254289 - DNA, 15 bp, Homo sapiens
gtgggccagcatttt

SEQ ID NO: 1254290 - DNA, 15 bp, Homo sapiens
tgtgggccagcattt

SEQ ID NO: 1254291 - DNA, 15 bp, Homo sapiens
ttgtgggccagcatt

SEQ ID NO: 1254292 - DNA, 15 bp, Homo sapiens
tttgtgggccagcat

SEQ ID NO: 1254293 - DNA, 15 bp, Homo sapiens
atttgtgggccagca

SEQ ID NO: 1254294 - DNA, 15 bp, Homo sapiens
gatttgtgggccagc

SEQ ID NO: 1254295 - DNA, 15 bp, Homo sapiens
ggatttgtgggccag

SEQ ID NO: 1254296 - DNA, 15 bp, Homo sapiens
tggatttgtgggcca

SEQ ID NO: 1254297 - DNA, 15 bp, Homo sapiens
gtggatttgtgggcc

SEQ ID NO: 1254298 - DNA, 15 bp, Homo sapiens
agtggatttgtgggc

SEQ ID NO: 1254299 - DNA, 15 bp, Homo sapiens
aagtggatttgtggg

SEQ ID NO: 1254300 - DNA, 15 bp, Homo sapiens
caagtggatttgtgg

SEQ ID NO: 1254301 - DNA, 15 bp, Homo sapiens
ccaagtggatttgtg

SEQ ID NO: 1254302 - DNA, 15 bp, Homo sapiens
accaagtggatttgt

SEQ ID NO: 1254303 - DNA, 15 bp, Homo sapiens
caccaagtggatttg

SEQ ID NO: 1254304 - DNA, 15 bp, Homo sapiens
acaccaagtggattt

SEQ ID NO: 1254305 - DNA, 15 bp, Homo sapiens
cacaccaagtggatt

SEQ ID NO: 1254306 - DNA, 15 bp, Homo sapiens
ccacaccaagtggat

SEQ ID NO: 1254307 - DNA, 15 bp, Homo sapiens
gccacaccaagtgga

SEQ ID NO: 1254308 - DNA, 15 bp, Homo sapiens
ggccacaccaagtgg

SEQ ID NO: 1254309 - DNA, 15 bp, Homo sapiens
aggccacaccaagtg

SEQ ID NO: 1254310 - DNA, 15 bp, Homo sapiens
taggccacaccaagt

SEQ ID NO: 1254311 - DNA, 15 bp, Homo sapiens
ttaggccacaccaag

SEQ ID NO: 1254312 - DNA, 15 bp, Homo sapiens
tttaggccacaccaa

SEQ ID NO: 1254313 - DNA, 15 bp, Homo sapiens
ttttaggccacacca

SEQ ID NO: 1254314 - DNA, 15 bp, Homo sapiens
attttaggccacacc

SEQ ID NO: 1254315 - DNA, 15 bp, Homo sapiens
cattttaggccacac

SEQ ID NO: 1254316 - DNA, 15 bp, Homo sapiens
tcattttaggccaca

SEQ ID NO: 1254317 - DNA, 15 bp, Homo sapiens
gtcattttaggccac

SEQ ID NO: 1254318 - DNA, 15 bp, Homo sapiens
agtcattttaggcca

SEQ ID NO: 1254319 - DNA, 15 bp, Homo sapiens
tagtcattttaggcc

SEQ ID NO: 1254320 - DNA, 15 bp, Homo sapiens
atagtcattttaggc

SEQ ID NO: 1254321 - DNA, 15 bp, Homo sapiens
aatagtcattttagg

SEQ ID NO: 1254322 - DNA, 15 bp, Homo sapiens
aaatagtcattttag

SEQ ID NO: 1254323 - DNA, 15 bp, Homo sapiens
gaaatagtcatttta

SEQ ID NO: 1254324 - DNA, 15 bp, Homo sapiens
agaaatagtcatttt

SEQ ID NO: 1254325 - DNA, 15 bp, Homo sapiens
gagaaatagtcattt

SEQ ID NO: 1254326 - DNA, 15 bp, Homo sapiens
ggagaaatagtcatt

SEQ ID NO: 1254327 - DNA, 15 bp, Homo sapiens
tggagaaatagtcat

SEQ ID NO: 1254328 - DNA, 15 bp, Homo sapiens
ctggagaaatagtca

SEQ ID NO: 1254329 - DNA, 15 bp, Homo sapiens
gctggagaaatagtc

SEQ ID NO: 1254330 - DNA, 15 bp, Homo sapiens
agctggagaaatagt

SEQ ID NO: 1254331 - DNA, 15 bp, Homo sapiens
gagctggagaaatag

SEQ ID NO: 1254332 - DNA, 15 bp, Homo sapiens
agagctggagaaata

SEQ ID NO: 1254333 - DNA, 15 bp, Homo sapiens
cagagctggagaaat

SEQ ID NO: 1254334 - DNA, 15 bp, Homo sapiens
acagagctggagaaa

SEQ ID NO: 1254335 - DNA, 15 bp, Homo sapiens
gacagagctggagaa

SEQ ID NO: 1254336 - DNA, 15 bp, Homo sapiens
ggacagagctggaga

SEQ ID NO: 1254337 - DNA, 15 bp, Homo sapiens
tggacagagctggag

SEQ ID NO: 1254338 - DNA, 15 bp, Homo sapiens
ctggacagagctgga

SEQ ID NO: 1254339 - DNA, 15 bp, Homo sapiens
tctggacagagctgg

SEQ ID NO: 1254340 - DNA, 15 bp, Homo sapiens
ctctggacagagctg

SEQ ID NO: 1254341 - DNA, 15 bp, Homo sapiens
gctctggacagagct

SEQ ID NO: 1254342 - DNA, 15 bp, Homo sapiens
agctctggacagagc

SEQ ID NO: 1254343 - DNA, 15 bp, Homo sapiens
gagctctggacagag

SEQ ID NO: 1254344 - DNA, 15 bp, Homo sapiens
agagctctggacaga

SEQ ID NO: 1254345 - DNA, 15 bp, Homo sapiens
gagagctctggacag

SEQ ID NO: 1254346 - DNA, 15 bp, Homo sapiens
tgagagctctggaca

SEQ ID NO: 1254347 - DNA, 15 bp, Homo sapiens
ttgagagctctggac

SEQ ID NO: 1254348 - DNA, 15 bp, Homo sapiens
cttgagagctctgga

SEQ ID NO: 1254349 - DNA, 15 bp, Homo sapiens
acttgagagctctgg

SEQ ID NO: 1254350 - DNA, 15 bp, Homo sapiens
gacttgagagctctg

SEQ ID NO: 1254351 - DNA, 15 bp, Homo sapiens
ggacttgagagctct

SEQ ID NO: 1254352 - DNA, 15 bp, Homo sapiens
aggacttgagagctc

SEQ ID NO: 1254353 - DNA, 15 bp, Homo sapiens
aaggacttgagagct

SEQ ID NO: 1254354 - DNA, 15 bp, Homo sapiens
gaaggacttgagagc

SEQ ID NO: 1254355 - DNA, 15 bp, Homo sapiens
agaaggacttgagag

SEQ ID NO: 1254356 - DNA, 15 bp, Homo sapiens
cagaaggacttgaga

SEQ ID NO: 1254357 - DNA, 15 bp, Homo sapiens
ccagaaggacttgag

SEQ ID NO: 1254358 - DNA, 15 bp, Homo sapiens
gccagaaggacttga

SEQ ID NO: 1254359 - DNA, 15 bp, Homo sapiens
agccagaaggacttg

SEQ ID NO: 1254360 - DNA, 15 bp, Homo sapiens
gagccagaaggactt

SEQ ID NO: 1254361 - DNA, 15 bp, Homo sapiens
agagccagaaggact

SEQ ID NO: 1254362 - DNA, 15 bp, Homo sapiens
cagagccagaaggac

SEQ ID NO: 1254363 - DNA, 15 bp, Homo sapiens
gcagagccagaagga

SEQ ID NO: 1254364 - DNA, 15 bp, Homo sapiens
agcagagccagaagg

SEQ ID NO: 1254365 - DNA, 15 bp, Homo sapiens
aagcagagccagaag

SEQ ID NO: 1254366 - DNA, 15 bp, Homo sapiens
aaagcagagccagaa

SEQ ID NO: 1254367 - DNA, 15 bp, Homo sapiens
aaaagcagagccaga

SEQ ID NO: 1254368 - DNA, 15 bp, Homo sapiens
aaaaagcagagccag

SEQ ID NO: 1254369 - DNA, 15 bp, Homo sapiens
aaaaaagcagagcca

SEQ ID NO: 1254370 - DNA, 15 bp, Homo sapiens
taaaaaagcagagcc

SEQ ID NO: 1254371 - DNA, 15 bp, Homo sapiens
ttaaaaaagcagagc

SEQ ID NO: 1254372 - DNA, 15 bp, Homo sapiens
attaaaaaagcagag

SEQ ID NO: 1254373 - DNA, 15 bp, Homo sapiens
aattaaaaaagcaga

SEQ ID NO: 1254374 - DNA, 15 bp, Homo sapiens
gaattaaaaaagcag

SEQ ID NO: 1254375 - DNA, 15 bp, Homo sapiens
agaattaaaaaagca

SEQ ID NO: 1254376 - DNA, 15 bp, Homo sapiens
gagaattaaaaaagc

SEQ ID NO: 1254377 - DNA, 15 bp, Homo sapiens
agagaattaaaaaag

SEQ ID NO: 1254378 - DNA, 15 bp, Homo sapiens
gagagaattaaaaaa

SEQ ID NO: 1254379 - DNA, 15 bp, Homo sapiens
ggagagaattaaaaa

SEQ ID NO: 1254380 - DNA, 15 bp, Homo sapiens
aggagagaattaaaa

SEQ ID NO: 1254381 - DNA, 15 bp, Homo sapiens
taggagagaattaaa

SEQ ID NO: 1254382 - DNA, 15 bp, Homo sapiens
ttaggagagaattaa

SEQ ID NO: 1254383 - DNA, 15 bp, Homo sapiens
tttaggagagaatta

SEQ ID NO: 1254384 - DNA, 15 bp, Homo sapiens
gtttaggagagaatt

SEQ ID NO: 1254385 - DNA, 15 bp, Homo sapiens
agtttaggagagaat

SEQ ID NO: 1254386 - DNA, 15 bp, Homo sapiens
cagtttaggagagaa

SEQ ID NO: 1254387 - DNA, 15 bp, Homo sapiens
ccagtttaggagaga

SEQ ID NO: 1254388 - DNA, 15 bp, Homo sapiens
cccagtttaggagag

SEQ ID NO: 1254389 - DNA, 15 bp, Homo sapiens
tcccagtttaggaga

SEQ ID NO: 1254390 - DNA, 15 bp, Homo sapiens
ctcccagtttaggag

SEQ ID NO: 1254391 - DNA, 15 bp, Homo sapiens
gctcccagtttagga

SEQ ID NO: 1254392 - DNA, 15 bp, Homo sapiens
ggctcccagtttagg

SEQ ID NO: 1254393 - DNA, 15 bp, Homo sapiens
aggctcccagtttag

SEQ ID NO: 1254394 - DNA, 15 bp, Homo sapiens
taggctcccagttta

SEQ ID NO: 1254395 - DNA, 15 bp, Homo sapiens
ctaggctcccagttt

SEQ ID NO: 1254396 - DNA, 15 bp, Homo sapiens
gctaggctcccagtt

SEQ ID NO: 1254397 - DNA, 15 bp, Homo sapiens
ggctaggctcccagt

SEQ ID NO: 1254398 - DNA, 15 bp, Homo sapiens
aggctaggctcccag

SEQ ID NO: 1254399 - DNA, 15 bp, Homo sapiens
gaggctaggctccca

SEQ ID NO: 1254400 - DNA, 15 bp, Homo sapiens
ggaggctaggctccc

SEQ ID NO: 1254401 - DNA, 15 bp, Homo sapiens
aggaggctaggctcc

SEQ ID NO: 1254402 - DNA, 15 bp, Homo sapiens
aaggaggctaggctc

SEQ ID NO: 1254403 - DNA, 15 bp, Homo sapiens
gaaggaggctaggct

SEQ ID NO: 1254404 - DNA, 15 bp, Homo sapiens
ggaaggaggctaggc

SEQ ID NO: 1254405 - DNA, 15 bp, Homo sapiens
tggaaggaggctagg

SEQ ID NO: 1254406 - DNA, 15 bp, Homo sapiens
ctggaaggaggctag

SEQ ID NO: 1254407 - DNA, 15 bp, Homo sapiens
gctggaaggaggcta

SEQ ID NO: 1254408 - DNA, 15 bp, Homo sapiens
tgctggaaggaggct

SEQ ID NO: 1254409 - DNA, 15 bp, Homo sapiens
atgctggaaggaggc

SEQ ID NO: 1254410 - DNA, 15 bp, Homo sapiens
gatgctggaaggagg

SEQ ID NO: 1254411 - DNA, 15 bp, Homo sapiens
tgatgctggaaggag

SEQ ID NO: 1254412 - DNA, 15 bp, Homo sapiens
atgatgctggaagga

SEQ ID NO: 1254413 - DNA, 15 bp, Homo sapiens
gatgatgctggaagg

SEQ ID NO: 1254414 - DNA, 15 bp, Homo sapiens
ggatgatgctggaag

SEQ ID NO: 1254415 - DNA, 15 bp, Homo sapiens
gggatgatgctggaa

SEQ ID NO: 1254416 - DNA, 15 bp, Homo sapiens
ggggatgatgctgga

SEQ ID NO: 1254417 - DNA, 15 bp, Homo sapiens
gggggatgatgctgg

SEQ ID NO: 1254418 - DNA, 15 bp, Homo sapiens
agggggatgatgctg

SEQ ID NO: 1254419 - DNA, 15 bp, Homo sapiens
gagggggatgatgct

SEQ ID NO: 1254420 - DNA, 15 bp, Homo sapiens
agagggggatgatgc

SEQ ID NO: 1254421 - DNA, 15 bp, Homo sapiens
gagagggggatgatg

SEQ ID NO: 1254422 - DNA, 15 bp, Homo sapiens
ggagagggggatgat

SEQ ID NO: 1254423 - DNA, 15 bp, Homo sapiens
gggagagggggatga

SEQ ID NO: 1254424 - DNA, 15 bp, Homo sapiens
agggagagggggatg

SEQ ID NO: 1254425 - DNA, 15 bp, Homo sapiens
gagggagagggggat

SEQ ID NO: 1254426 - DNA, 15 bp, Homo sapiens
ggagggagaggggga

SEQ ID NO: 1254427 - DNA, 15 bp, Homo sapiens
tggagggagaggggg

SEQ ID NO: 1254428 - DNA, 15 bp, Homo sapiens
ttggagggagagggg

SEQ ID NO: 1254429 - DNA, 15 bp, Homo sapiens
cttggagggagaggg

SEQ ID NO: 1254430 - DNA, 15 bp, Homo sapiens
ccttggagggagagg

SEQ ID NO: 1254431 - DNA, 15 bp, Homo sapiens
gccttggagggagag

SEQ ID NO: 1254432 - DNA, 15 bp, Homo sapiens
ggccttggagggaga

SEQ ID NO: 1254433 - DNA, 15 bp, Homo sapiens
gggccttggagggag

SEQ ID NO: 1254434 - DNA, 15 bp, Homo sapiens
tgggccttggaggga

SEQ ID NO: 1254435 - DNA, 15 bp, Homo sapiens
ttgggccttggaggg

SEQ ID NO: 1254436 - DNA, 15 bp, Homo sapiens
cttgggccttggagg

SEQ ID NO: 1254437 - DNA, 15 bp, Homo sapiens
ccttgggccttggag

SEQ ID NO: 1254438 - DNA, 15 bp, Homo sapiens
accttgggccttgga

SEQ ID NO: 1254439 - DNA, 15 bp, Homo sapiens
aaccttgggccttgg

SEQ ID NO: 1254440 - DNA, 15 bp, Homo sapiens
aaaccttgggccttg

SEQ ID NO: 1254441 - DNA, 15 bp, Homo sapiens
caaaccttgggcctt

SEQ ID NO: 1254442 - DNA, 15 bp, Homo sapiens
ccaaaccttgggcct

SEQ ID NO: 1254443 - DNA, 15 bp, Homo sapiens
tccaaaccttgggcc

SEQ ID NO: 1254444 - DNA, 15 bp, Homo sapiens
gtccaaaccttgggc

SEQ ID NO: 1254445 - DNA, 15 bp, Homo sapiens
ggtccaaaccttggg

SEQ ID NO: 1254446 - DNA, 15 bp, Homo sapiens
gggtccaaaccttgg

SEQ ID NO: 1254447 - DNA, 15 bp, Homo sapiens
tgggtccaaaccttg

SEQ ID NO: 1254448 - DNA, 15 bp, Homo sapiens
ctgggtccaaacctt

SEQ ID NO: 1254449 - DNA, 15 bp, Homo sapiens
cctgggtccaaacct

SEQ ID NO: 1254450 - DNA, 15 bp, Homo sapiens
gcctgggtccaaacc

SEQ ID NO: 1254451 - DNA, 15 bp, Homo sapiens
tgcctgggtccaaac

SEQ ID NO: 1254452 - DNA, 15 bp, Homo sapiens
atgcctgggtccaaa

SEQ ID NO: 1254453 - DNA, 15 bp, Homo sapiens
aatgcctgggtccaa

SEQ ID NO: 1254454 - DNA, 15 bp, Homo sapiens
caatgcctgggtcca

SEQ ID NO: 1254455 - DNA, 15 bp, Homo sapiens
ccaatgcctgggtcc

SEQ ID NO: 1254456 - DNA, 15 bp, Homo sapiens
tccaatgcctgggtc

SEQ ID NO: 1254457 - DNA, 15 bp, Homo sapiens
ctccaatgcctgggt

SEQ ID NO: 1254458 - DNA, 15 bp, Homo sapiens
gctccaatgcctggg

SEQ ID NO: 1254459 - DNA, 15 bp, Homo sapiens
agctccaatgcctgg

SEQ ID NO: 1254460 - DNA, 15 bp, Homo sapiens
aagctccaatgcctg

SEQ ID NO: 1254461 - DNA, 15 bp, Homo sapiens
taagctccaatgcct

SEQ ID NO: 1254462 - DNA, 15 bp, Homo sapiens
ctaagctccaatgcc

SEQ ID NO: 1254463 - DNA, 15 bp, Homo sapiens
tctaagctccaatgc

SEQ ID NO: 1254464 - DNA, 15 bp, Homo sapiens
ctctaagctccaatg

SEQ ID NO: 1254465 - DNA, 15 bp, Homo sapiens
cctctaagctccaat

SEQ ID NO: 1254466 - DNA, 15 bp, Homo sapiens
gcctctaagctccaa

SEQ ID NO: 1254467 - DNA, 15 bp, Homo sapiens
tgcctctaagctcca

SEQ ID NO: 1254468 - DNA, 15 bp, Homo sapiens
ctgcctctaagctcc

SEQ ID NO: 1254469 - DNA, 15 bp, Homo sapiens
actgcctctaagctc

SEQ ID NO: 1254470 - DNA, 15 bp, Homo sapiens
cactgcctctaagct

SEQ ID NO: 1254471 - DNA, 15 bp, Homo sapiens
gcactgcctctaagc

SEQ ID NO: 1254472 - DNA, 15 bp, Homo sapiens
agcactgcctctaag

SEQ ID NO: 1254473 - DNA, 15 bp, Homo sapiens
cagcactgcctctaa

SEQ ID NO: 1254474 - DNA, 15 bp, Homo sapiens
tcagcactgcctcta

SEQ ID NO: 1254475 - DNA, 15 bp, Homo sapiens
atcagcactgcctct

SEQ ID NO: 1254476 - DNA, 15 bp, Homo sapiens
catcagcactgcctc

SEQ ID NO: 1254477 - DNA, 15 bp, Homo sapiens
tcatcagcactgcct

SEQ ID NO: 1254478 - DNA, 15 bp, Homo sapiens
ctcatcagcactgcc

SEQ ID NO: 1254479 - DNA, 15 bp, Homo sapiens
gctcatcagcactgc

SEQ ID NO: 1254480 - DNA, 15 bp, Homo sapiens
tgctcatcagcactg

SEQ ID NO: 1254481 - DNA, 15 bp, Homo sapiens
gtgctcatcagcact

SEQ ID NO: 1254482 - DNA, 15 bp, Homo sapiens
ggtgctcatcagcac

SEQ ID NO: 1254483 - DNA, 15 bp, Homo sapiens
gggtgctcatcagca

SEQ ID NO: 1254484 - DNA, 15 bp, Homo sapiens
agggtgctcatcagc

SEQ ID NO: 1254485 - DNA, 15 bp, Homo sapiens
cagggtgctcatcag

SEQ ID NO: 1254486 - DNA, 15 bp, Homo sapiens
acagggtgctcatca

SEQ ID NO: 1254487 - DNA, 15 bp, Homo sapiens
gacagggtgctcatc

SEQ ID NO: 1254488 - DNA, 15 bp, Homo sapiens
tgacagggtgctcat

SEQ ID NO: 1254489 - DNA, 15 bp, Homo sapiens
atgacagggtgctca

SEQ ID NO: 1254490 - DNA, 15 bp, Homo sapiens
catgacagggtgctc

SEQ ID NO: 1254491 - DNA, 15 bp, Homo sapiens
gcatgacagggtgct

SEQ ID NO: 1254492 - DNA, 15 bp, Homo sapiens
ggcatgacagggtgc

SEQ ID NO: 1254493 - DNA, 15 bp, Homo sapiens
tggcatgacagggtg

SEQ ID NO: 1254494 - DNA, 15 bp, Homo sapiens
ttggcatgacagggt

SEQ ID NO: 1254495 - DNA, 15 bp, Homo sapiens
cttggcatgacaggg

SEQ ID NO: 1254496 - DNA, 15 bp, Homo sapiens
tcttggcatgacagg

SEQ ID NO: 1254497 - DNA, 15 bp, Homo sapiens
atcttggcatgacag

SEQ ID NO: 1254498 - DNA, 15 bp, Homo sapiens
gatcttggcatgaca

SEQ ID NO: 1254499 - DNA, 15 bp, Homo sapiens
tgatcttggcatgac

SEQ ID NO: 1254500 - DNA, 15 bp, Homo sapiens
gtgatcttggcatga

SEQ ID NO: 1254501 - DNA, 15 bp, Homo sapiens
tgtgatcttggcatg

SEQ ID NO: 1254502 - DNA, 15 bp, Homo sapiens
atgtgatcttggcat

SEQ ID NO: 1254503 - DNA, 15 bp, Homo sapiens
aatgtgatcttggca

SEQ ID NO: 1254504 - DNA, 15 bp, Homo sapiens
aaatgtgatcttggc

SEQ ID NO: 1254505 - DNA, 15 bp, Homo sapiens
caaatgtgatcttgg

SEQ ID NO: 1254506 - DNA, 15 bp, Homo sapiens
ccaaatgtgatcttg

SEQ ID NO: 1254507 - DNA, 15 bp, Homo sapiens
tccaaatgtgatctt

SEQ ID NO: 1254508 - DNA, 15 bp, Homo sapiens
atccaaatgtgatct

SEQ ID NO: 1254509 - DNA, 15 bp, Homo sapiens
catccaaatgtgatc

SEQ ID NO: 1254510 - DNA, 15 bp, Homo sapiens
ccatccaaatgtgat

SEQ ID NO: 1254511 - DNA, 15 bp, Homo sapiens
cccatccaaatgtga

SEQ ID NO: 1254512 - DNA, 15 bp, Homo sapiens
gcccatccaaatgtg

SEQ ID NO: 1254513 - DNA, 15 bp, Homo sapiens
ggcccatccaaatgt

SEQ ID NO: 1254514 - DNA, 15 bp, Homo sapiens
gggcccatccaaatg

SEQ ID NO: 1254515 - DNA, 15 bp, Homo sapiens
agggcccatccaaat

SEQ ID NO: 1254516 - DNA, 15 bp, Homo sapiens
gagggcccatccaaa

SEQ ID NO: 1254517 - DNA, 15 bp, Homo sapiens
ggagggcccatccaa

SEQ ID NO: 1254518 - DNA, 15 bp, Homo sapiens
aggagggcccatcca

SEQ ID NO: 1254519 - DNA, 15 bp, Homo sapiens
caggagggcccatcc

SEQ ID NO: 1254520 - DNA, 15 bp, Homo sapiens
ccaggagggcccatc

SEQ ID NO: 1254521 - DNA, 15 bp, Homo sapiens
tccaggagggcccat

SEQ ID NO: 1254522 - DNA, 15 bp, Homo sapiens
ctccaggagggccca

SEQ ID NO: 1254523 - DNA, 15 bp, Homo sapiens
tctccaggagggccc

SEQ ID NO: 1254524 - DNA, 15 bp, Homo sapiens
gtctccaggagggcc

SEQ ID NO: 1254525 - DNA, 15 bp, Homo sapiens
tgtctccaggagggc

SEQ ID NO: 1254526 - DNA, 15 bp, Homo sapiens
ttgtctccaggaggg

SEQ ID NO: 1254527 - DNA, 15 bp, Homo sapiens
gttgtctccaggagg

SEQ ID NO: 1254528 - DNA, 15 bp, Homo sapiens
agttgtctccaggag

SEQ ID NO: 1254529 - DNA, 15 bp, Homo sapiens
gagttgtctccagga

SEQ ID NO: 1254530 - DNA, 15 bp, Homo sapiens
agagttgtctccagg

SEQ ID NO: 1254531 - DNA, 15 bp, Homo sapiens
gagagttgtctccag

SEQ ID NO: 1254532 - DNA, 15 bp, Homo sapiens
agagagttgtctcca

SEQ ID NO: 1254533 - DNA, 15 bp, Homo sapiens
tagagagttgtctcc

SEQ ID NO: 1254534 - DNA, 15 bp, Homo sapiens
ttagagagttgtctc

SEQ ID NO: 1254535 - DNA, 15 bp, Homo sapiens
gttagagagttgtct

SEQ ID NO: 1254536 - DNA, 15 bp, Homo sapiens
ggttagagagttgtc

SEQ ID NO: 1254537 - DNA, 15 bp, Homo sapiens
tggttagagagttgt

SEQ ID NO: 1254538 - DNA, 15 bp, Homo sapiens
ctggttagagagttg

SEQ ID NO: 1254539 - DNA, 15 bp, Homo sapiens
gctggttagagagtt

SEQ ID NO: 1254540 - DNA, 15 bp, Homo sapiens
tgctggttagagagt

SEQ ID NO: 1254541 - DNA, 15 bp, Homo sapiens
ttgctggttagagag

SEQ ID NO: 1254542 - DNA, 15 bp, Homo sapiens
cttgctggttagaga

SEQ ID NO: 1254543 - DNA, 15 bp, Homo sapiens
acttgctggttagag

SEQ ID NO: 1254544 - DNA, 15 bp, Homo sapiens
cacttgctggttaga

SEQ ID NO: 1254545 - DNA, 15 bp, Homo sapiens
tcacttgctggttag

SEQ ID NO: 1254546 - DNA, 15 bp, Homo sapiens
atcacttgctggtta

SEQ ID NO: 1254547 - DNA, 15 bp, Homo sapiens
gatcacttgctggtt

SEQ ID NO: 1254548 - DNA, 15 bp, Homo sapiens
tgatcacttgctggt

SEQ ID NO: 1254549 - DNA, 15 bp, Homo sapiens
ctgatcacttgctgg

SEQ ID NO: 1254550 - DNA, 15 bp, Homo sapiens
actgatcacttgctg

SEQ ID NO: 1254551 - DNA, 15 bp, Homo sapiens
gactgatcacttgct

SEQ ID NO: 1254552 - DNA, 15 bp, Homo sapiens
ggactgatcacttgc

SEQ ID NO: 1254553 - DNA, 15 bp, Homo sapiens
gggactgatcacttg

SEQ ID NO: 1254554 - DNA, 15 bp, Homo sapiens
tgggactgatcactt

SEQ ID NO: 1254555 - DNA, 15 bp, Homo sapiens
ctgggactgatcact

SEQ ID NO: 1254556 - DNA, 15 bp, Homo sapiens
tctgggactgatcac

SEQ ID NO: 1254557 - DNA, 15 bp, Homo sapiens
gtctgggactgatca

SEQ ID NO: 1254558 - DNA, 15 bp, Homo sapiens
ggtctgggactgatc

SEQ ID NO: 1254559 - DNA, 15 bp, Homo sapiens
tggtctgggactgat

SEQ ID NO: 1254560 - DNA, 15 bp, Homo sapiens
ctggtctgggactga

SEQ ID NO: 1254561 - DNA, 15 bp, Homo sapiens
gctggtctgggactg

SEQ ID NO: 1254562 - DNA, 15 bp, Homo sapiens
tgctggtctgggact

SEQ ID NO: 1254563 - DNA, 15 bp, Homo sapiens
ctgctggtctgggac

SEQ ID NO: 1254564 - DNA, 15 bp, Homo sapiens
cctgctggtctggga

SEQ ID NO: 1254565 - DNA, 15 bp, Homo sapiens
ccctgctggtctggg

SEQ ID NO: 1254566 - DNA, 15 bp, Homo sapiens
tccctgctggtctgg

SEQ ID NO: 1254567 - DNA, 15 bp, Homo sapiens
ttccctgctggtctg

SEQ ID NO: 1254568 - DNA, 15 bp, Homo sapiens
cttccctgctggtct

SEQ ID NO: 1254569 - DNA, 15 bp, Homo sapiens
tcttccctgctggtc

SEQ ID NO: 1254570 - DNA, 15 bp, Homo sapiens
ctcttccctgctggt

SEQ ID NO: 1254571 - DNA, 15 bp, Homo sapiens
gctcttccctgctgg

SEQ ID NO: 1254572 - DNA, 15 bp, Homo sapiens
agctcttccctgctg

SEQ ID NO: 1254573 - DNA, 15 bp, Homo sapiens
cactgcaagtcgtat

SEQ ID NO: 1254574 - DNA, 15 bp, Homo sapiens
tcactgcaagtcgta

SEQ ID NO: 1254575 - DNA, 15 bp, Homo sapiens
ctcactgcaagtcgt

SEQ ID NO: 1254576 - DNA, 15 bp, Homo sapiens
gctcactgcaagtcg

SEQ ID NO: 1254577 - DNA, 15 bp, Homo sapiens
cgctcactgcaagtc

SEQ ID NO: 1254578 - DNA, 15 bp, Homo sapiens
acgctcactgcaagt

SEQ ID NO: 1254579 - DNA, 15 bp, Homo sapiens
gacgctcactgcaag

SEQ ID NO: 1254580 - DNA, 15 bp, Homo sapiens
tgacgctcactgcaa

SEQ ID NO: 1254581 - DNA, 15 bp, Homo sapiens
ctgacgctcactgca

SEQ ID NO: 1254582 - DNA, 15 bp, Homo sapiens
cctgacgctcactgc

SEQ ID NO: 1254583 - DNA, 15 bp, Homo sapiens
tcctgacgctcactg

SEQ ID NO: 1254584 - DNA, 15 bp, Homo sapiens
ctcctgacgctcact

SEQ ID NO: 1254585 - DNA, 15 bp, Homo sapiens
gctcctgacgctcac

SEQ ID NO: 1254586 - DNA, 15 bp, Homo sapiens
tgctcctgacgctca

SEQ ID NO: 1254587 - DNA, 15 bp, Homo sapiens
gtgctcctgacgctc

SEQ ID NO: 1254588 - DNA, 15 bp, Homo sapiens
cgtgctcctgacgct

SEQ ID NO: 1254589 - DNA, 15 bp, Homo sapiens
acgtgctcctgacgc

SEQ ID NO: 1254590 - DNA, 15 bp, Homo sapiens
gacgtgctcctgacg

SEQ ID NO: 1254591 - DNA, 15 bp, Homo sapiens
ggacgtgctcctgac

SEQ ID NO: 1254592 - DNA, 15 bp, Homo sapiens
tggacgtgctcctga

SEQ ID NO: 1254593 - DNA, 15 bp, Homo sapiens
ctggacgtgctcctg

SEQ ID NO: 1254594 - DNA, 15 bp, Homo sapiens
cctggacgtgctcct

SEQ ID NO: 1254595 - DNA, 15 bp, Homo sapiens
tcctggacgtgctcc

SEQ ID NO: 1254596 - DNA, 15 bp, Homo sapiens
ttcctggacgtgctc

SEQ ID NO: 1254597 - DNA, 15 bp, Homo sapiens
gttcctggacgtgct

SEQ ID NO: 1254598 - DNA, 15 bp, Homo sapiens
agttcctggacgtgc

SEQ ID NO: 1254599 - DNA, 15 bp, Homo sapiens
gagttcctggacgtg

SEQ ID NO: 1254600 - DNA, 15 bp, Homo sapiens
ggagttcctggacgt

SEQ ID NO: 1254601 - DNA, 15 bp, Homo sapiens
aggagttcctggacg

SEQ ID NO: 1254602 - DNA, 15 bp, Homo sapiens
gaggagttcctggac

SEQ ID NO: 1254603 - DNA, 15 bp, Homo sapiens
tgaggagttcctgga

SEQ ID NO: 1254604 - DNA, 15 bp, Homo sapiens
ctgaggagttcctgg

SEQ ID NO: 1254605 - DNA, 15 bp, Homo sapiens
gctgaggagttcctg

SEQ ID NO: 1254606 - DNA, 15 bp, Homo sapiens
tgctgaggagttcct

SEQ ID NO: 1254607 - DNA, 15 bp, Homo sapiens
ctgctgaggagttcc

SEQ ID NO: 1254608 - DNA, 15 bp, Homo sapiens
gctgctgaggagttc

SEQ ID NO: 1254609 - DNA, 15 bp, Homo sapiens
cgctgctgaggagtt

SEQ ID NO: 1254610 - DNA, 15 bp, Homo sapiens
gcgctgctgaggagt

SEQ ID NO: 1254611 - DNA, 15 bp, Homo sapiens
ggcgctgctgaggag

SEQ ID NO: 1254612 - DNA, 15 bp, Homo sapiens
aggcgctgctgagga

SEQ ID NO: 1254613 - DNA, 15 bp, Homo sapiens
gaggcgctgctgagg

SEQ ID NO: 1254614 - DNA, 15 bp, Homo sapiens
ggaggcgctgctgag

SEQ ID NO: 1254615 - DNA, 15 bp, Homo sapiens
aggaggcgctgctga

SEQ ID NO: 1254616 - DNA, 15 bp, Homo sapiens
aaggaggcgctgctg

SEQ ID NO: 1254617 - DNA, 15 bp, Homo sapiens
gaaggaggcgctgct

SEQ ID NO: 1254618 - DNA, 15 bp, Homo sapiens
tgaaggaggcgctgc

SEQ ID NO: 1254619 - DNA, 15 bp, Homo sapiens
ctgaaggaggcgctg

SEQ ID NO: 1254620 - DNA, 15 bp, Homo sapiens
gctgaaggaggcgct

SEQ ID NO: 1254621 - DNA, 15 bp, Homo sapiens
agctgaaggaggcgc

SEQ ID NO: 1254622 - DNA, 15 bp, Homo sapiens
gagctgaaggaggcg

SEQ ID NO: 1254623 - DNA, 15 bp, Homo sapiens
ggagctgaaggaggc

SEQ ID NO: 1254624 - DNA, 15 bp, Homo sapiens
tggagctgaaggagg

SEQ ID NO: 1254625 - DNA, 15 bp, Homo sapiens
gtggagctgaaggag

SEQ ID NO: 1254626 - DNA, 15 bp, Homo sapiens
tgtggagctgaagga

SEQ ID NO: 1254627 - DNA, 15 bp, Homo sapiens
ctgtggagctgaagg

SEQ ID NO: 1254628 - DNA, 15 bp, Homo sapiens
gctgtggagctgaag

SEQ ID NO: 1254629 - DNA, 15 bp, Homo sapiens
ggctgtggagctgaa

SEQ ID NO: 1254630 - DNA, 15 bp, Homo sapiens
tggctgtggagctga

SEQ ID NO: 1254631 - DNA, 15 bp, Homo sapiens
ctggctgtggagctg

SEQ ID NO: 1254632 - DNA, 15 bp, Homo sapiens
tctggctgtggagct

SEQ ID NO: 1254633 - DNA, 15 bp, Homo sapiens
gtctggctgtggagc

SEQ ID NO: 1254634 - DNA, 15 bp, Homo sapiens
cgtctggctgtggag

SEQ ID NO: 1254635 - DNA, 15 bp, Homo sapiens
gcgtctggctgtgga

SEQ ID NO: 1254636 - DNA, 15 bp, Homo sapiens
ggcgtctggctgtgg

SEQ ID NO: 1254637 - DNA, 15 bp, Homo sapiens
gggcgtctggctgtg

SEQ ID NO: 1254638 - DNA, 15 bp, Homo sapiens
agggcgtctggctgt

SEQ ID NO: 1254639 - DNA, 15 bp, Homo sapiens
gagggcgtctggctg

SEQ ID NO: 1254640 - DNA, 15 bp, Homo sapiens
tgagggcgtctggct

SEQ ID NO: 1254641 - DNA, 15 bp, Homo sapiens
ctgagggcgtctggc

SEQ ID NO: 1254642 - DNA, 15 bp, Homo sapiens
tctgagggcgtctgg

SEQ ID NO: 1254643 - DNA, 15 bp, Homo sapiens
gtctgagggcgtctg

SEQ ID NO: 1254644 - DNA, 15 bp, Homo sapiens
tgtctgagggcgtct

SEQ ID NO: 1254645 - DNA, 15 bp, Homo sapiens
ctgtctgagggcgtc

SEQ ID NO: 1254646 - DNA, 15 bp, Homo sapiens
gctgtctgagggcgt

SEQ ID NO: 1254647 - DNA, 15 bp, Homo sapiens
tgctgtctgagggcg

SEQ ID NO: 1254648 - DNA, 15 bp, Homo sapiens
ttgctgtctgagggc

SEQ ID NO: 1254649 - DNA, 15 bp, Homo sapiens
tttgctgtctgaggg

SEQ ID NO: 1254650 - DNA, 15 bp, Homo sapiens
ctttgctgtctgagg

SEQ ID NO: 1254651 - DNA, 15 bp, Homo sapiens
gctttgctgtctgag

SEQ ID NO: 1254652 - DNA, 15 bp, Homo sapiens
ggctttgctgtctga

SEQ ID NO: 1254653 - DNA, 15 bp, Homo sapiens
aggctttgctgtctg

SEQ ID NO: 1254654 - DNA, 15 bp, Homo sapiens
taggctttgctgtct

SEQ ID NO: 1254655 - DNA, 15 bp, Homo sapiens
gtaggctttgctgtc

SEQ ID NO: 1254656 - DNA, 15 bp, Homo sapiens
ggtaggctttgctgt

SEQ ID NO: 1254657 - DNA, 15 bp, Homo sapiens
gggtaggctttgctg

SEQ ID NO: 1254658 - DNA, 15 bp, Homo sapiens
ggggtaggctttgct

SEQ ID NO: 1254659 - DNA, 15 bp, Homo sapiens
gggggtaggctttgc

SEQ ID NO: 1254660 - DNA, 15 bp, Homo sapiens
cgggggtaggctttg

SEQ ID NO: 1254661 - DNA, 15 bp, Homo sapiens
gcgggggtaggcttt

SEQ ID NO: 1254662 - DNA, 15 bp, Homo sapiens
cgcgggggtaggctt

SEQ ID NO: 1254663 - DNA, 15 bp, Homo sapiens
gcgcgggggtaggct

SEQ ID NO: 1254664 - DNA, 15 bp, Homo sapiens
ggcgcgggggtaggc

SEQ ID NO: 1254665 - DNA, 15 bp, Homo sapiens
cggcgcgggggtagg

SEQ ID NO: 1254666 - DNA, 15 bp, Homo sapiens
gcggcgcgggggtag

SEQ ID NO: 1254667 - DNA, 15 bp, Homo sapiens
cgcggcgcgggggta

SEQ ID NO: 1254668 - DNA, 15 bp, Homo sapiens
gcgcggcgcgggggt

SEQ ID NO: 1254669 - DNA, 15 bp, Homo sapiens
ggcgcggcgcggggg

SEQ ID NO: 1254670 - DNA, 15 bp, Homo sapiens
gggcgcggcgcgggg

SEQ ID NO: 1254671 - DNA, 15 bp, Homo sapiens
agggcgcggcgcggg

SEQ ID NO: 1254672 - DNA, 15 bp, Homo sapiens
cagggcgcggcgcgg

SEQ ID NO: 1254673 - DNA, 15 bp, Homo sapiens
gcagggcgcggcgcg

SEQ ID NO: 1254674 - DNA, 15 bp, Homo sapiens
ggcagggcgcggcgc

SEQ ID NO: 1254675 - DNA, 15 bp, Homo sapiens
gggcagggcgcggcg

SEQ ID NO: 1254676 - DNA, 15 bp, Homo sapiens
cgggcagggcgcggc

SEQ ID NO: 1254677 - DNA, 15 bp, Homo sapiens
gcgggcagggcgcgg

SEQ ID NO: 1254678 - DNA, 15 bp, Homo sapiens
ggcgggcagggcgcg

SEQ ID NO: 1254679 - DNA, 15 bp, Homo sapiens
cggcgggcagggcgc

SEQ ID NO: 1254680 - DNA, 15 bp, Homo sapiens
gcggcgggcagggcg

SEQ ID NO: 1254681 - DNA, 15 bp, Homo sapiens
agcggcgggcagggc

SEQ ID NO: 1254682 - DNA, 15 bp, Homo sapiens
cagcggcgggcaggg

SEQ ID NO: 1254683 - DNA, 15 bp, Homo sapiens
gcagcggcgggcagg

SEQ ID NO: 1254684 - DNA, 15 bp, Homo sapiens
cgcagcggcgggcag

SEQ ID NO: 1254685 - DNA, 15 bp, Homo sapiens
tcgcagcggcgggca

SEQ ID NO: 1254686 - DNA, 15 bp, Homo sapiens
atcgcagcggcgggc

SEQ ID NO: 1254687 - DNA, 15 bp, Homo sapiens
catcgcagcggcggg

SEQ ID NO: 1254688 - DNA, 15 bp, Homo sapiens
gcatcgcagcggcgg

SEQ ID NO: 1254689 - DNA, 15 bp, Homo sapiens
agcatcgcagcggcg

SEQ ID NO: 1254690 - DNA, 15 bp, Homo sapiens
gagcatcgcagcggc

SEQ ID NO: 1254691 - DNA, 15 bp, Homo sapiens
cgagcatcgcagcgg

SEQ ID NO: 1254692 - DNA, 15 bp, Homo sapiens
gcgagcatcgcagcg

SEQ ID NO: 1254693 - DNA, 15 bp, Homo sapiens
ggcgagcatcgcagc

SEQ ID NO: 1254694 - DNA, 15 bp, Homo sapiens
gggcgagcatcgcag

SEQ ID NO: 1254695 - DNA, 15 bp, Homo sapiens
cgggcgagcatcgca

SEQ ID NO: 1254696 - DNA, 15 bp, Homo sapiens
gcgggcgagcatcgc

SEQ ID NO: 1254697 - DNA, 15 bp, Homo sapiens
cgcgggcgagcatcg

SEQ ID NO: 1254698 - DNA, 15 bp, Homo sapiens
gcgcgggcgagcatc

SEQ ID NO: 1254699 - DNA, 15 bp, Homo sapiens
ggcgcgggcgagcat

SEQ ID NO: 1254700 - DNA, 15 bp, Homo sapiens
gggcgcgggcgagca

SEQ ID NO: 1254701 - DNA, 15 bp, Homo sapiens
agggcgcgggcgagc

SEQ ID NO: 1254702 - DNA, 15 bp, Homo sapiens
cagggcgcgggcgag

SEQ ID NO: 1254703 - DNA, 15 bp, Homo sapiens
gcagggcgcgggcga

SEQ ID NO: 1254704 - DNA, 15 bp, Homo sapiens
agcagggcgcgggcg

SEQ ID NO: 1254705 - DNA, 15 bp, Homo sapiens
cagcagggcgcgggc

SEQ ID NO: 1254706 - DNA, 15 bp, Homo sapiens
gcagcagggcgcggg

SEQ ID NO: 1254707 - DNA, 15 bp, Homo sapiens
agcagcagggcgcgg

SEQ ID NO: 1254708 - DNA, 15 bp, Homo sapiens
cagcagcagggcgcg

SEQ ID NO: 1254709 - DNA, 15 bp, Homo sapiens
acagcagcagggcgc

SEQ ID NO: 1254710 - DNA, 15 bp, Homo sapiens
cacagcagcagggcg

SEQ ID NO: 1254711 - DNA, 15 bp, Homo sapiens
gcacagcagcagggc

SEQ ID NO: 1254712 - DNA, 15 bp, Homo sapiens
cgcacagcagcaggg

SEQ ID NO: 1254713 - DNA, 15 bp, Homo sapiens
gcgcacagcagcagg

SEQ ID NO: 1254714 - DNA, 15 bp, Homo sapiens
cgcgcacagcagcag

SEQ ID NO: 1254715 - DNA, 15 bp, Homo sapiens
ccgcgcacagcagca

SEQ ID NO: 1254716 - DNA, 15 bp, Homo sapiens
accgcgcacagcagc

SEQ ID NO: 1254717 - DNA, 15 bp, Homo sapiens
gaccgcgcacagcag

SEQ ID NO: 1254718 - DNA, 15 bp, Homo sapiens
ggaccgcgcacagca

SEQ ID NO: 1254719 - DNA, 15 bp, Homo sapiens
aggaccgcgcacagc

SEQ ID NO: 1254720 - DNA, 15 bp, Homo sapiens
caggaccgcgcacag

SEQ ID NO: 1254721 - DNA, 15 bp, Homo sapiens
ccaggaccgcgcaca

SEQ ID NO: 1254722 - DNA, 15 bp, Homo sapiens
gccaggaccgcgcac

SEQ ID NO: 1254723 - DNA, 15 bp, Homo sapiens
cgccaggaccgcgca

SEQ ID NO: 1254724 - DNA, 15 bp, Homo sapiens
gcgccaggaccgcgc

SEQ ID NO: 1254725 - DNA, 15 bp, Homo sapiens
agcgccaggaccgcg

SEQ ID NO: 1254726 - DNA, 15 bp, Homo sapiens
gagcgccaggaccgc

SEQ ID NO: 1254727 - DNA, 15 bp, Homo sapiens
tgagcgccaggaccg

SEQ ID NO: 1254728 - DNA, 15 bp, Homo sapiens
ctgagcgccaggacc

SEQ ID NO: 1254729 - DNA, 15 bp, Homo sapiens
gctgagcgccaggac

SEQ ID NO: 1254730 - DNA, 15 bp, Homo sapiens
ggctgagcgccagga

SEQ ID NO: 1254731 - DNA, 15 bp, Homo sapiens
tggctgagcgccagg

SEQ ID NO: 1254732 - DNA, 15 bp, Homo sapiens
atggctgagcgccag

SEQ ID NO: 1254733 - DNA, 15 bp, Homo sapiens
tatggctgagcgcca

SEQ ID NO: 1254734 - DNA, 15 bp, Homo sapiens
gtatggctgagcgcc

SEQ ID NO: 1254735 - DNA, 15 bp, Homo sapiens
tgtatggctgagcgc

SEQ ID NO: 1254736 - DNA, 15 bp, Homo sapiens
ctgtatggctgagcg

SEQ ID NO: 1254737 - DNA, 15 bp, Homo sapiens
cctgtatggctgagc

SEQ ID NO: 1254738 - DNA, 15 bp, Homo sapiens
acctgtatggctgag

SEQ ID NO: 1254739 - DNA, 15 bp, Homo sapiens
cacctgtatggctga

SEQ ID NO: 1254740 - DNA, 15 bp, Homo sapiens
tcacctgtatggctg

SEQ ID NO: 1254741 - DNA, 15 bp, Homo sapiens
ctcacctgtatggct

SEQ ID NO: 1254742 - DNA, 15 bp, Homo sapiens
actcacctgtatggc

SEQ ID NO: 1254743 - DNA, 15 bp, Homo sapiens
tactcacctgtatgg

SEQ ID NO: 1254744 - DNA, 15 bp, Homo sapiens
gtactcacctgtatg

SEQ ID NO: 1254745 - DNA, 15 bp, Homo sapiens
ggtactcacctgtat

SEQ ID NO: 1254746 - DNA, 15 bp, Homo sapiens
aggtactcacctgta

SEQ ID NO: 1254747 - DNA, 15 bp, Homo sapiens
caggtactcacctgt

SEQ ID NO: 1254748 - DNA, 15 bp, Homo sapiens
ccaggtactcacctg

SEQ ID NO: 1254749 - DNA, 15 bp, Homo sapiens
gccaggtactcacct

SEQ ID NO: 1254750 - DNA, 15 bp, Homo sapiens
cgccaggtactcacc

SEQ ID NO: 1254751 - DNA, 15 bp, Homo sapiens
gcgccaggtactcac

SEQ ID NO: 1254752 - DNA, 15 bp, Homo sapiens
ggcgccaggtactca

SEQ ID NO: 1254753 - DNA, 15 bp, Homo sapiens
cggcgccaggtactc

SEQ ID NO: 1254754 - DNA, 15 bp, Homo sapiens
gcggcgccaggtact

SEQ ID NO: 1254755 - DNA, 15 bp, Homo sapiens
cgcggcgccaggtac

SEQ ID NO: 1254756 - DNA, 15 bp, Homo sapiens
gcgcggcgccaggta

SEQ ID NO: 1254757 - DNA, 15 bp, Homo sapiens
tgcgcggcgccaggt

SEQ ID NO: 1254758 - DNA, 15 bp, Homo sapiens
gtgcgcggcgccagg

SEQ ID NO: 1254759 - DNA, 15 bp, Homo sapiens
ggtgcgcggcgccag

SEQ ID NO: 1254760 - DNA, 15 bp, Homo sapiens
cggtgcgcggcgcca

SEQ ID NO: 1254761 - DNA, 15 bp, Homo sapiens
ccggtgcgcggcgcc

SEQ ID NO: 1254762 - DNA, 15 bp, Homo sapiens
cccggtgcgcggcgc

SEQ ID NO: 1254763 - DNA, 15 bp, Homo sapiens
ccccggtgcgcggcg

SEQ ID NO: 1254764 - DNA, 15 bp, Homo sapiens
tccccggtgcgcggc

SEQ ID NO: 1254765 - DNA, 15 bp, Homo sapiens
gtccccggtgcgcgg

SEQ ID NO: 1254766 - DNA, 15 bp, Homo sapiens
agtccccggtgcgcg

SEQ ID NO: 1254767 - DNA, 15 bp, Homo sapiens
gagtccccggtgcgc

SEQ ID NO: 1254768 - DNA, 15 bp, Homo sapiens
ggagtccccggtgcg

SEQ ID NO: 1254769 - DNA, 15 bp, Homo sapiens
cggagtccccggtgc

SEQ ID NO: 1254770 - DNA, 15 bp, Homo sapiens
ccggagtccccggtg

SEQ ID NO: 1254771 - DNA, 15 bp, Homo sapiens
accggagtccccggt

SEQ ID NO: 1254772 - DNA, 15 bp, Homo sapiens
aaccggagtccccgg

SEQ ID NO: 1254773 - DNA, 15 bp, Homo sapiens
gaaccggagtccccg

SEQ ID NO: 1254774 - DNA, 15 bp, Homo sapiens
ggaaccggagtcccc

SEQ ID NO: 1254775 - DNA, 15 bp, Homo sapiens
tggaaccggagtccc

SEQ ID NO: 1254776 - DNA, 15 bp, Homo sapiens
gtggaaccggagtcc

SEQ ID NO: 1254777 - DNA, 15 bp, Homo sapiens
cgtggaaccggagtc

SEQ ID NO: 1254778 - DNA, 15 bp, Homo sapiens
gcgtggaaccggagt

SEQ ID NO: 1254779 - DNA, 15 bp, Homo sapiens
tgcgtggaaccggag

SEQ ID NO: 1254780 - DNA, 15 bp, Homo sapiens
gtgcgtggaaccgga

SEQ ID NO: 1254781 - DNA, 15 bp, Homo sapiens
ggtgcgtggaaccgg

SEQ ID NO: 1254782 - DNA, 15 bp, Homo sapiens
gggtgcgtggaaccg

SEQ ID NO: 1254783 - DNA, 15 bp, Homo sapiens
cgggtgcgtggaacc

SEQ ID NO: 1254784 - DNA, 15 bp, Homo sapiens
ccgggtgcgtggaac

SEQ ID NO: 1254785 - DNA, 15 bp, Homo sapiens
cccgggtgcgtggaa

SEQ ID NO: 1254786 - DNA, 15 bp, Homo sapiens
gcccgggtgcgtgga

SEQ ID NO: 1254787 - DNA, 15 bp, Homo sapiens
tgcccgggtgcgtgg

SEQ ID NO: 1254788 - DNA, 15 bp, Homo sapiens
ctgcccgggtgcgtg

SEQ ID NO: 1254789 - DNA, 15 bp, Homo sapiens
tctgcccgggtgcgt

SEQ ID NO: 1254790 - DNA, 15 bp, Homo sapiens
ctctgcccgggtgcg

SEQ ID NO: 1254791 - DNA, 15 bp, Homo sapiens
actctgcccgggtgc

SEQ ID NO: 1254792 - DNA, 15 bp, Homo sapiens
aactctgcccgggtg

SEQ ID NO: 1254793 - DNA, 15 bp, Homo sapiens
aaactctgcccgggt

SEQ ID NO: 1254794 - DNA, 15 bp, Homo sapiens
gaaactctgcccggg

SEQ ID NO: 1254795 - DNA, 15 bp, Homo sapiens
ggaaactctgcccgg

SEQ ID NO: 1254796 - DNA, 15 bp, Homo sapiens
cggaaactctgcccg

SEQ ID NO: 1254797 - DNA, 15 bp, Homo sapiens
gcggaaactctgccc

SEQ ID NO: 1254798 - DNA, 15 bp, Homo sapiens
agcggaaactctgcc

SEQ ID NO: 1254799 - DNA, 15 bp, Homo sapiens
gagcggaaactctgc

SEQ ID NO: 1254800 - DNA, 15 bp, Homo sapiens
agagcggaaactctg

SEQ ID NO: 1254801 - DNA, 15 bp, Homo sapiens
cagagcggaaactct

SEQ ID NO: 1254802 - DNA, 15 bp, Homo sapiens
tcagagcggaaactc

SEQ ID NO: 1254803 - DNA, 15 bp, Homo sapiens
gtcagagcggaaact

SEQ ID NO: 1254804 - DNA, 15 bp, Homo sapiens
ggtcagagcggaaac

SEQ ID NO: 1254805 - DNA, 15 bp, Homo sapiens
aggtcagagcggaaa

SEQ ID NO: 1254806 - DNA, 15 bp, Homo sapiens
gaggtcagagcggaa

SEQ ID NO: 1254807 - DNA, 15 bp, Homo sapiens
ggaggtcagagcgga

SEQ ID NO: 1254808 - DNA, 15 bp, Homo sapiens
aggaggtcagagcgg

SEQ ID NO: 1254809 - DNA, 15 bp, Homo sapiens
caggaggtcagagcg

SEQ ID NO: 1254810 - DNA, 15 bp, Homo sapiens
ccaggaggtcagagc

SEQ ID NO: 1254811 - DNA, 15 bp, Homo sapiens
cccaggaggtcagag

SEQ ID NO: 1254812 - DNA, 15 bp, Homo sapiens
acccaggaggtcaga

SEQ ID NO: 1254813 - DNA, 15 bp, Homo sapiens
gacccaggaggtcag

SEQ ID NO: 1254814 - DNA, 15 bp, Homo sapiens
agacccaggaggtca

SEQ ID NO: 1254815 - DNA, 15 bp, Homo sapiens
tagacccaggaggtc

SEQ ID NO: 1254816 - DNA, 15 bp, Homo sapiens
atagacccaggaggt

SEQ ID NO: 1254817 - DNA, 15 bp, Homo sapiens
gatagacccaggagg

SEQ ID NO: 1254818 - DNA, 15 bp, Homo sapiens
ggatagacccaggag

SEQ ID NO: 1254819 - DNA, 15 bp, Homo sapiens
gggatagacccagga

SEQ ID NO: 1254820 - DNA, 15 bp, Homo sapiens
tgggatagacccagg

SEQ ID NO: 1254821 - DNA, 15 bp, Homo sapiens
ctgggatagacccag

SEQ ID NO: 1254822 - DNA, 15 bp, Homo sapiens
actgggatagaccca

SEQ ID NO: 1254823 - DNA, 15 bp, Homo sapiens
tactgggatagaccc

SEQ ID NO: 1254824 - DNA, 15 bp, Homo sapiens
gtactgggatagacc

SEQ ID NO: 1254825 - DNA, 15 bp, Homo sapiens
agtactgggatagac

SEQ ID NO: 1254826 - DNA, 15 bp, Homo sapiens
gagtactgggataga

SEQ ID NO: 1254827 - DNA, 15 bp, Homo sapiens
ggagtactgggatag

SEQ ID NO: 1254828 - DNA, 15 bp, Homo sapiens
cggagtactgggata

SEQ ID NO: 1254829 - DNA, 15 bp, Homo sapiens
tcggagtactgggat

SEQ ID NO: 1254830 - DNA, 15 bp, Homo sapiens
gtcggagtactggga

SEQ ID NO: 1254831 - DNA, 15 bp, Homo sapiens
agtcggagtactggg

SEQ ID NO: 1254832 - DNA, 15 bp, Homo sapiens
aagtcggagtactgg

SEQ ID NO: 1254833 - DNA, 15 bp, Homo sapiens
gaagtcggagtactg

SEQ ID NO: 1254834 - DNA, 15 bp, Homo sapiens
agaagtcggagtact

SEQ ID NO: 1254835 - DNA, 15 bp, Homo sapiens
gagaagtcggagtac

SEQ ID NO: 1254836 - DNA, 15 bp, Homo sapiens
agagaagtcggagta

SEQ ID NO: 1254837 - DNA, 15 bp, Homo sapiens
gagagaagtcggagt

SEQ ID NO: 1254838 - DNA, 15 bp, Homo sapiens
ggagagaagtcggag

SEQ ID NO: 1254839 - DNA, 15 bp, Homo sapiens
cggagagaagtcgga

SEQ ID NO: 1254840 - DNA, 15 bp, Homo sapiens
tcggagagaagtcgg

SEQ ID NO: 1254841 - DNA, 15 bp, Homo sapiens
ttcggagagaagtcg

SEQ ID NO: 1254842 - DNA, 15 bp, Homo sapiens
attcggagagaagtc

SEQ ID NO: 1254843 - DNA, 15 bp, Homo sapiens
tattcggagagaagt

SEQ ID NO: 1254844 - DNA, 15 bp, Homo sapiens
ctattcggagagaag

SEQ ID NO: 1254845 - DNA, 15 bp, Homo sapiens
tctattcggagagaa

SEQ ID NO: 1254846 - DNA, 15 bp, Homo sapiens
ctctattcggagaga

SEQ ID NO: 1254847 - DNA, 15 bp, Homo sapiens
tctctattcggagag

SEQ ID NO: 1254848 - DNA, 15 bp, Homo sapiens
ttctctattcggaga

SEQ ID NO: 1254849 - DNA, 15 bp, Homo sapiens
cttctctattcggag

SEQ ID NO: 1254850 - DNA, 15 bp, Homo sapiens
gcttctctattcgga

SEQ ID NO: 1254851 - DNA, 15 bp, Homo sapiens
agcttctctattcgg

SEQ ID NO: 1254852 - DNA, 15 bp, Homo sapiens
tagcttctctattcg

SEQ ID NO: 1254853 - DNA, 15 bp, Homo sapiens
gtagcttctctattc

SEQ ID NO: 1254854 - DNA, 15 bp, Homo sapiens
cgtagcttctctatt

SEQ ID NO: 1254855 - DNA, 15 bp, Homo sapiens
acgtagcttctctat

SEQ ID NO: 1254856 - DNA, 15 bp, Homo sapiens
cacgtagcttctcta

SEQ ID NO: 1254857 - DNA, 15 bp, Homo sapiens
tcacgtagcttctct

SEQ ID NO: 1254858 - DNA, 15 bp, Homo sapiens
gtcacgtagcttctc

SEQ ID NO: 1254859 - DNA, 15 bp, Homo sapiens
agtcacgtagcttct

SEQ ID NO: 1254860 - DNA, 15 bp, Homo sapiens
aagtcacgtagcttc

SEQ ID NO: 1254861 - DNA, 15 bp, Homo sapiens
caagtcacgtagctt

SEQ ID NO: 1254862 - DNA, 15 bp, Homo sapiens
ccaagtcacgtagct

SEQ ID NO: 1254863 - DNA, 15 bp, Homo sapiens
cccaagtcacgtagc

SEQ ID NO: 1254864 - DNA, 15 bp, Homo sapiens
tcccaagtcacgtag

SEQ ID NO: 1254865 - DNA, 15 bp, Homo sapiens
ttcccaagtcacgta

SEQ ID NO: 1254866 - DNA, 15 bp, Homo sapiens
tttcccaagtcacgt

SEQ ID NO: 1254867 - DNA, 15 bp, Homo sapiens
ctttcccaagtcacg

SEQ ID NO: 1254868 - DNA, 15 bp, Homo sapiens
tctttcccaagtcac

SEQ ID NO: 1254869 - DNA, 15 bp, Homo sapiens
ctctttcccaagtca

SEQ ID NO: 1254870 - DNA, 15 bp, Homo sapiens
gctctttcccaagtc

SEQ ID NO: 1254871 - DNA, 15 bp, Homo sapiens
agctctttcccaagt

SEQ ID NO: 1254872 - DNA, 15 bp, Homo sapiens
aagctctttcccaag

SEQ ID NO: 1254873 - DNA, 15 bp, Homo sapiens
caagctctttcccaa

SEQ ID NO: 1254874 - DNA, 15 bp, Homo sapiens
ccaagctctttccca

SEQ ID NO: 1254875 - DNA, 15 bp, Homo sapiens
tccaagctctttccc

SEQ ID NO: 1254876 - DNA, 15 bp, Homo sapiens
gtccaagctctttcc

SEQ ID NO: 1254877 - DNA, 15 bp, Homo sapiens
ggtccaagctctttc

SEQ ID NO: 1254878 - DNA, 15 bp, Homo sapiens
cggtccaagctcttt

SEQ ID NO: 1254879 - DNA, 15 bp, Homo sapiens
gcggtccaagctctt

SEQ ID NO: 1254880 - DNA, 15 bp, Homo sapiens
agcggtccaagctct

SEQ ID NO: 1254881 - DNA, 15 bp, Homo sapiens
tagcggtccaagctc

SEQ ID NO: 1254882 - DNA, 15 bp, Homo sapiens
ctagcggtccaagct

SEQ ID NO: 1254883 - DNA, 15 bp, Homo sapiens
tctagcggtccaagc

SEQ ID NO: 1254884 - DNA, 15 bp, Homo sapiens
ctctagcggtccaag

SEQ ID NO: 1254885 - DNA, 15 bp, Homo sapiens
actctagcggtccaa

SEQ ID NO: 1254886 - DNA, 15 bp, Homo sapiens
aactctagcggtcca

SEQ ID NO: 1254887 - DNA, 15 bp, Homo sapiens
gaactctagcggtcc

SEQ ID NO: 1254888 - DNA, 15 bp, Homo sapiens
cgaactctagcggtc

SEQ ID NO: 1254889 - DNA, 15 bp, Homo sapiens
tcgaactctagcggt

SEQ ID NO: 1254890 - DNA, 15 bp, Homo sapiens
ttcgaactctagcgg

SEQ ID NO: 1254891 - DNA, 15 bp, Homo sapiens
tttcgaactctagcg

SEQ ID NO: 1254892 - DNA, 15 bp, Homo sapiens
ctttcgaactctagc

SEQ ID NO: 1254893 - DNA, 15 bp, Homo sapiens
tctttcgaactctag

SEQ ID NO: 1254894 - DNA, 15 bp, Homo sapiens
ttctttcgaactcta

SEQ ID NO: 1254895 - DNA, 15 bp, Homo sapiens
gttctttcgaactct

SEQ ID NO: 1254896 - DNA, 15 bp, Homo sapiens
agttctttcgaactc

SEQ ID NO: 1254897 - DNA, 15 bp, Homo sapiens
gagttctttcgaact

SEQ ID NO: 1254898 - DNA, 15 bp, Homo sapiens
ggagttctttcgaac

SEQ ID NO: 1254899 - DNA, 15 bp, Homo sapiens
cggagttctttcgaa

SEQ ID NO: 1254900 - DNA, 15 bp, Homo sapiens
acggagttctttcga

SEQ ID NO: 1254901 - DNA, 15 bp, Homo sapiens
cacggagttctttcg

SEQ ID NO: 1254902 - DNA, 15 bp, Homo sapiens
ccacggagttctttc

SEQ ID NO: 1254903 - DNA, 15 bp, Homo sapiens
tccacggagttcttt

SEQ ID NO: 1254904 - DNA, 15 bp, Homo sapiens
atccacggagttctt

SEQ ID NO: 1254905 - DNA, 15 bp, Homo sapiens
tatccacggagttct

SEQ ID NO: 1254906 - DNA, 15 bp, Homo sapiens
atatccacggagttc

SEQ ID NO: 1254907 - DNA, 15 bp, Homo sapiens
aatatccacggagtt

SEQ ID NO: 1254908 - DNA, 15 bp, Homo sapiens
gaatatccacggagt

SEQ ID NO: 1254909 - DNA, 15 bp, Homo sapiens
ggaatatccacggag

SEQ ID NO: 1254910 - DNA, 15 bp, Homo sapiens
tggaatatccacgga

SEQ ID NO: 1254911 - DNA, 15 bp, Homo sapiens
ctggaatatccacgg

SEQ ID NO: 1254912 - DNA, 15 bp, Homo sapiens
gctggaatatccacg

SEQ ID NO: 1254913 - DNA, 15 bp, Homo sapiens
agctggaatatccac

SEQ ID NO: 1254914 - DNA, 15 bp, Homo sapiens
aagctggaatatcca

SEQ ID NO: 1254915 - DNA, 15 bp, Homo sapiens
aaagctggaatatcc

SEQ ID NO: 1254916 - DNA, 15 bp, Homo sapiens
gaaagctggaatatc

SEQ ID NO: 1254917 - DNA, 15 bp, Homo sapiens
ggaaagctggaatat

SEQ ID NO: 1254918 - DNA, 15 bp, Homo sapiens
gggaaagctggaata

SEQ ID NO: 1254919 - DNA, 15 bp, Homo sapiens
tgggaaagctggaat

SEQ ID NO: 1254920 - DNA, 15 bp, Homo sapiens
gtgggaaagctggaa

SEQ ID NO: 1254921 - DNA, 15 bp, Homo sapiens
tgtgggaaagctgga

SEQ ID NO: 1254922 - DNA, 15 bp, Homo sapiens
ttgtgggaaagctgg

SEQ ID NO: 1254923 - DNA, 15 bp, Homo sapiens
cttgtgggaaagctg

SEQ ID NO: 1254924 - DNA, 15 bp, Homo sapiens
gcttgtgggaaagct

SEQ ID NO: 1254925 - DNA, 15 bp, Homo sapiens
tgcttgtgggaaagc

SEQ ID NO: 1254926 - DNA, 15 bp, Homo sapiens
gtgcttgtgggaaag

SEQ ID NO: 1254927 - DNA, 15 bp, Homo sapiens
agtgcttgtgggaaa

SEQ ID NO: 1254928 - DNA, 15 bp, Homo sapiens
cagtgcttgtgggaa

SEQ ID NO: 1254929 - DNA, 15 bp, Homo sapiens
tcagtgcttgtggga

SEQ ID NO: 1254930 - DNA, 15 bp, Homo sapiens
atcagtgcttgtggg

SEQ ID NO: 1254931 - DNA, 15 bp, Homo sapiens
gatcagtgcttgtgg

SEQ ID NO: 1254932 - DNA, 15 bp, Homo sapiens
tgatcagtgcttgtg

SEQ ID NO: 1254933 - DNA, 15 bp, Homo sapiens
atgatcagtgcttgt

SEQ ID NO: 1254934 - DNA, 15 bp, Homo sapiens
aatgatcagtgcttg

SEQ ID NO: 1254935 - DNA, 15 bp, Homo sapiens
taatgatcagtgctt

SEQ ID NO: 1254936 - DNA, 15 bp, Homo sapiens
ataatgatcagtgct

SEQ ID NO: 1254937 - DNA, 15 bp, Homo sapiens
cataatgatcagtgc

SEQ ID NO: 1254938 - DNA, 15 bp, Homo sapiens
tcataatgatcagtg

SEQ ID NO: 1254939 - DNA, 15 bp, Homo sapiens
ctcataatgatcagt

SEQ ID NO: 1254940 - DNA, 15 bp, Homo sapiens
gctcataatgatcag

SEQ ID NO: 1254941 - DNA, 15 bp, Homo sapiens
ggctcataatgatca

SEQ ID NO: 1254942 - DNA, 15 bp, Homo sapiens
tggctcataatgatc

SEQ ID NO: 1254943 - DNA, 15 bp, Homo sapiens
ctggctcataatgat

SEQ ID NO: 1254944 - DNA, 15 bp, Homo sapiens
actggctcataatga

SEQ ID NO: 1254945 - DNA, 15 bp, Homo sapiens
aactggctcataatg

SEQ ID NO: 1254946 - DNA, 15 bp, Homo sapiens
taactggctcataat

SEQ ID NO: 1254947 - DNA, 15 bp, Homo sapiens
gtaactggctcataa

SEQ ID NO: 1254948 - DNA, 15 bp, Homo sapiens
agtaactggctcata

SEQ ID NO: 1254949 - DNA, 15 bp, Homo sapiens
aagtaactggctcat

SEQ ID NO: 1254950 - DNA, 15 bp, Homo sapiens
taagtaactggctca

SEQ ID NO: 1254951 - DNA, 15 bp, Homo sapiens
ttaagtaactggctc

SEQ ID NO: 1254952 - DNA, 15 bp, Homo sapiens
gttaagtaactggct

SEQ ID NO: 1254953 - DNA, 15 bp, Homo sapiens
ggttaagtaactggc

SEQ ID NO: 1254954 - DNA, 15 bp, Homo sapiens
cggttaagtaactgg

SEQ ID NO: 1254955 - DNA, 15 bp, Homo sapiens
tcggttaagtaactg

SEQ ID NO: 1254956 - DNA, 15 bp, Homo sapiens
atcggttaagtaact

SEQ ID NO: 1254957 - DNA, 15 bp, Homo sapiens
gatcggttaagtaac

SEQ ID NO: 1254958 - DNA, 15 bp, Homo sapiens
agatcggttaagtaa

SEQ ID NO: 1254959 - DNA, 15 bp, Homo sapiens
cagatcggttaagta

SEQ ID NO: 1254960 - DNA, 15 bp, Homo sapiens
tcagatcggttaagt

SEQ ID NO: 1254961 - DNA, 15 bp, Homo sapiens
ctcagatcggttaag

SEQ ID NO: 1254962 - DNA, 15 bp, Homo sapiens
tctcagatcggttaa

SEQ ID NO: 1254963 - DNA, 15 bp, Homo sapiens
gtctcagatcggtta

SEQ ID NO: 1254964 - DNA, 15 bp, Homo sapiens
tgtctcagatcggtt

SEQ ID NO: 1254965 - DNA, 15 bp, Homo sapiens
gtgtctcagatcggt

SEQ ID NO: 1254966 - DNA, 15 bp, Homo sapiens
agtgtctcagatcgg

SEQ ID NO: 1254967 - DNA, 15 bp, Homo sapiens
gagtgtctcagatcg

SEQ ID NO: 1254968 - DNA, 15 bp, Homo sapiens
agagtgtctcagatc

SEQ ID NO: 1254969 - DNA, 15 bp, Homo sapiens
gagagtgtctcagat

SEQ ID NO: 1254970 - DNA, 15 bp, Homo sapiens
tgagagtgtctcaga

SEQ ID NO: 1254971 - DNA, 15 bp, Homo sapiens
gtgagagtgtctcag

SEQ ID NO: 1254972 - DNA, 15 bp, Homo sapiens
ggtgagagtgtctca

SEQ ID NO: 1254973 - DNA, 15 bp, Homo sapiens
aggtgagagtgtctc

SEQ ID NO: 1254974 - DNA, 15 bp, Homo sapiens
gaggtgagagtgtct

SEQ ID NO: 1254975 - DNA, 15 bp, Homo sapiens
ggaggtgagagtgtc

SEQ ID NO: 1254976 - DNA, 15 bp, Homo sapiens
aggaggtgagagtgt

SEQ ID NO: 1254977 - DNA, 15 bp, Homo sapiens
taggaggtgagagtg

SEQ ID NO: 1254978 - DNA, 15 bp, Homo sapiens
ttaggaggtgagagt

SEQ ID NO: 1254979 - DNA, 15 bp, Homo sapiens
tttaggaggtgagag

SEQ ID NO: 1254980 - DNA, 15 bp, Homo sapiens
atttaggaggtgaga

SEQ ID NO: 1254981 - DNA, 15 bp, Homo sapiens
tatttaggaggtgag

SEQ ID NO: 1254982 - DNA, 15 bp, Homo sapiens
ctatttaggaggtga

SEQ ID NO: 1254983 - DNA, 15 bp, Homo sapiens
cctatttaggaggtg

SEQ ID NO: 1254984 - DNA, 15 bp, Homo sapiens
ccctatttaggaggt

SEQ ID NO: 1254985 - DNA, 15 bp, Homo sapiens
tccctatttaggagg

SEQ ID NO: 1254986 - DNA, 15 bp, Homo sapiens
atccctatttaggag

SEQ ID NO: 1254987 - DNA, 15 bp, Homo sapiens
tatccctatttagga

SEQ ID NO: 1254988 - DNA, 15 bp, Homo sapiens
ctatccctatttagg

SEQ ID NO: 1254989 - DNA, 15 bp, Homo sapiens
tctatccctatttag

SEQ ID NO: 1254990 - DNA, 15 bp, Homo sapiens
atctatccctattta

SEQ ID NO: 1254991 - DNA, 15 bp, Homo sapiens
catctatccctattt

SEQ ID NO: 1254992 - DNA, 15 bp, Homo sapiens
tcatctatccctatt

SEQ ID NO: 1254993 - DNA, 15 bp, Homo sapiens
atcatctatccctat

SEQ ID NO: 1254994 - DNA, 15 bp, Homo sapiens
tatcatctatcccta

SEQ ID NO: 1254995 - DNA, 15 bp, Homo sapiens
gtatcatctatccct

SEQ ID NO: 1254996 - DNA, 15 bp, Homo sapiens
agtatcatctatccc

SEQ ID NO: 1254997 - DNA, 15 bp, Homo sapiens
tagtatcatctatcc

SEQ ID NO: 1254998 - DNA, 15 bp, Homo sapiens
ttagtatcatctatc

SEQ ID NO: 1254999 - DNA, 15 bp, Homo sapiens
attagtatcatctat

SEQ ID NO: 1255000 - DNA, 15 bp, Homo sapiens
aattagtatcatcta

SEQ ID NO: 1255001 - DNA, 15 bp, Homo sapiens
aaattagtatcatct

SEQ ID NO: 1255002 - DNA, 15 bp, Homo sapiens
caaattagtatcatc

SEQ ID NO: 1255003 - DNA, 15 bp, Homo sapiens
gcaaattagtatcat

SEQ ID NO: 1255004 - DNA, 15 bp, Homo sapiens
tgcaaattagtatca

SEQ ID NO: 1255005 - DNA, 15 bp, Homo sapiens
ctgcaaattagtatc

SEQ ID NO: 1255006 - DNA, 15 bp, Homo sapiens
cctgcaaattagtat

SEQ ID NO: 1255007 - DNA, 15 bp, Homo sapiens
acctgcaaattagta

SEQ ID NO: 1255008 - DNA, 15 bp, Homo sapiens
aacctgcaaattagt

SEQ ID NO: 1255009 - DNA, 15 bp, Homo sapiens
caacctgcaaattag

SEQ ID NO: 1255010 - DNA, 15 bp, Homo sapiens
acaacctgcaaatta

SEQ ID NO: 1255011 - DNA, 15 bp, Homo sapiens
gacaacctgcaaatt

SEQ ID NO: 1255012 - DNA, 15 bp, Homo sapiens
tgacaacctgcaaat

SEQ ID NO: 1255013 - DNA, 15 bp, Homo sapiens
atgacaacctgcaaa

SEQ ID NO: 1255014 - DNA, 15 bp, Homo sapiens
aatgacaacctgcaa

SEQ ID NO: 1255015 - DNA, 15 bp, Homo sapiens
taatgacaacctgca

SEQ ID NO: 1255016 - DNA, 15 bp, Homo sapiens
ataatgacaacctgc

SEQ ID NO: 1255017 - DNA, 15 bp, Homo sapiens
cataatgacaacctg

SEQ ID NO: 1255018 - DNA, 15 bp, Homo sapiens
tcataatgacaacct

SEQ ID NO: 1255019 - DNA, 15 bp, Homo sapiens
atcataatgacaacc

SEQ ID NO: 1255020 - DNA, 15 bp, Homo sapiens
tatcataatgacaac

SEQ ID NO: 1255021 - DNA, 15 bp, Homo sapiens
ttatcataatgacaa

SEQ ID NO: 1255022 - DNA, 15 bp, Homo sapiens
cttatcataatgaca

SEQ ID NO: 1255023 - DNA, 15 bp, Homo sapiens
tcttatcataatgac

SEQ ID NO: 1255024 - DNA, 15 bp, Homo sapiens
gtcttatcataatga

SEQ ID NO: 1255025 - DNA, 15 bp, Homo sapiens
tgtcttatcataatg

SEQ ID NO: 1255026 - DNA, 15 bp, Homo sapiens
ctgtcttatcataat

SEQ ID NO: 1255027 - DNA, 15 bp, Homo sapiens
cctgtcttatcataa

SEQ ID NO: 1255028 - DNA, 15 bp, Homo sapiens
tcctgtcttatcata

SEQ ID NO: 1255029 - DNA, 15 bp, Homo sapiens
atcctgtcttatcat

SEQ ID NO: 1255030 - DNA, 15 bp, Homo sapiens
gatcctgtcttatca

SEQ ID NO: 1255031 - DNA, 15 bp, Homo sapiens
agatcctgtcttatc

SEQ ID NO: 1255032 - DNA, 15 bp, Homo sapiens
cagatcctgtcttat

SEQ ID NO: 1255033 - DNA, 15 bp, Homo sapiens
tcagatcctgtctta

SEQ ID NO: 1255034 - DNA, 15 bp, Homo sapiens
atcagatcctgtctt

SEQ ID NO: 1255035 - DNA, 15 bp, Homo sapiens
gatcagatcctgtct

SEQ ID NO: 1255036 - DNA, 15 bp, Homo sapiens
tgatcagatcctgtc

SEQ ID NO: 1255037 - DNA, 15 bp, Homo sapiens
ttgatcagatcctgt

SEQ ID NO: 1255038 - DNA, 15 bp, Homo sapiens
attgatcagatcctg

SEQ ID NO: 1255039 - DNA, 15 bp, Homo sapiens
tattgatcagatcct

SEQ ID NO: 1255040 - DNA, 15 bp, Homo sapiens
atattgatcagatcc

SEQ ID NO: 1255041 - DNA, 15 bp, Homo sapiens
tatattgatcagatc

SEQ ID NO: 1255042 - DNA, 15 bp, Homo sapiens
atatattgatcagat

SEQ ID NO: 1255043 - DNA, 15 bp, Homo sapiens
catatattgatcaga

SEQ ID NO: 1255044 - DNA, 15 bp, Homo sapiens
acatatattgatcag

SEQ ID NO: 1255045 - DNA, 15 bp, Homo sapiens
cacatatattgatca

SEQ ID NO: 1255046 - DNA, 15 bp, Homo sapiens
tcacatatattgatc

SEQ ID NO: 1255047 - DNA, 15 bp, Homo sapiens
ttcacatatattgat

SEQ ID NO: 1255048 - DNA, 15 bp, Homo sapiens
attcacatatattga

SEQ ID NO: 1255049 - DNA, 15 bp, Homo sapiens
aattcacatatattg

SEQ ID NO: 1255050 - DNA, 15 bp, Homo sapiens
caattcacatatatt

SEQ ID NO: 1255051 - DNA, 15 bp, Homo sapiens
acaattcacatatat

SEQ ID NO: 1255052 - DNA, 15 bp, Homo sapiens
aacaattcacatata

SEQ ID NO: 1255053 - DNA, 15 bp, Homo sapiens
aaacaattcacatat

SEQ ID NO: 1255054 - DNA, 15 bp, Homo sapiens
taaacaattcacata

SEQ ID NO: 1255055 - DNA, 15 bp, Homo sapiens
ataaacaattcacat

SEQ ID NO: 1255056 - DNA, 15 bp, Homo sapiens
tataaacaattcaca

SEQ ID NO: 1255057 - DNA, 15 bp, Homo sapiens
atataaacaattcac

SEQ ID NO: 1255058 - DNA, 15 bp, Homo sapiens
aatataaacaattca

SEQ ID NO: 1255059 - DNA, 15 bp, Homo sapiens
aaatataaacaattc

SEQ ID NO: 1255060 - DNA, 15 bp, Homo sapiens
caaatataaacaatt

SEQ ID NO: 1255061 - DNA, 15 bp, Homo sapiens
ccaaatataaacaat

SEQ ID NO: 1255062 - DNA, 15 bp, Homo sapiens
tccaaatataaacaa

SEQ ID NO: 1255063 - DNA, 15 bp, Homo sapiens
ttccaaatataaaca

SEQ ID NO: 1255064 - DNA, 15 bp, Homo sapiens
gttccaaatataaac

SEQ ID NO: 1255065 - DNA, 15 bp, Homo sapiens
ggttccaaatataaa

SEQ ID NO: 1255066 - DNA, 15 bp, Homo sapiens
aggttccaaatataa

SEQ ID NO: 1255067 - DNA, 15 bp, Homo sapiens
aaggttccaaatata

SEQ ID NO: 1255068 - DNA, 15 bp, Homo sapiens
aaaggttccaaatat

SEQ ID NO: 1255069 - DNA, 15 bp, Homo sapiens
aaaaggttccaaata

SEQ ID NO: 1255070 - DNA, 15 bp, Homo sapiens
aaaaaggttccaaat

SEQ ID NO: 1255071 - DNA, 15 bp, Homo sapiens
taaaaaggttccaaa

SEQ ID NO: 1255072 - DNA, 15 bp, Homo sapiens
ataaaaaggttccaa

SEQ ID NO: 1255073 - DNA, 15 bp, Homo sapiens
aataaaaaggttcca

SEQ ID NO: 1255074 - DNA, 15 bp, Homo sapiens
caataaaaaggttcc

SEQ ID NO: 1255075 - DNA, 15 bp, Homo sapiens
tcaataaaaaggttc

SEQ ID NO: 1255076 - DNA, 15 bp, Homo sapiens
ctcaataaaaaggtt

SEQ ID NO: 1255077 - DNA, 15 bp, Homo sapiens
actcaataaaaaggt

SEQ ID NO: 1255078 - DNA, 15 bp, Homo sapiens
cactcaataaaaagg

SEQ ID NO: 1255079 - DNA, 15 bp, Homo sapiens
ccactcaataaaaag

SEQ ID NO: 1255080 - DNA, 15 bp, Homo sapiens
tccactcaataaaaa

SEQ ID NO: 1255081 - DNA, 15 bp, Homo sapiens
ttccactcaataaaa

SEQ ID NO: 1255082 - DNA, 15 bp, Homo sapiens
cttccactcaataaa

SEQ ID NO: 1255083 - DNA, 15 bp, Homo sapiens
tcttccactcaataa

SEQ ID NO: 1255084 - DNA, 15 bp, Homo sapiens
ttcttccactcaata

SEQ ID NO: 1255085 - DNA, 15 bp, Homo sapiens
cttcttccactcaat

SEQ ID NO: 1255086 - DNA, 15 bp, Homo sapiens
acttcttccactcaa

SEQ ID NO: 1255087 - DNA, 15 bp, Homo sapiens
aacttcttccactca

SEQ ID NO: 1255088 - DNA, 15 bp, Homo sapiens
caacttcttccactc

SEQ ID NO: 1255089 - DNA, 15 bp, Homo sapiens
acaacttcttccact

SEQ ID NO: 1255090 - DNA, 15 bp, Homo sapiens
aacaacttcttccac

SEQ ID NO: 1255091 - DNA, 15 bp, Homo sapiens
aaacaacttcttcca

SEQ ID NO: 1255092 - DNA, 15 bp, Homo sapiens
aaaacaacttcttcc

SEQ ID NO: 1255093 - DNA, 15 bp, Homo sapiens
taaaacaacttcttc

SEQ ID NO: 1255094 - DNA, 15 bp, Homo sapiens
ttaaaacaacttctt

SEQ ID NO: 1255095 - DNA, 15 bp, Homo sapiens
tttaaaacaacttct

SEQ ID NO: 1255096 - DNA, 15 bp, Homo sapiens
atttaaaacaacttc

SEQ ID NO: 1255097 - DNA, 15 bp, Homo sapiens
tatttaaaacaactt

SEQ ID NO: 1255098 - DNA, 15 bp, Homo sapiens
atatttaaaacaact

SEQ ID NO: 1255099 - DNA, 15 bp, Homo sapiens
aatatttaaaacaac

SEQ ID NO: 1255100 - DNA, 15 bp, Homo sapiens
gaatatttaaaacaa

SEQ ID NO: 1255101 - DNA, 15 bp, Homo sapiens
agaatatttaaaaca

SEQ ID NO: 1255102 - DNA, 15 bp, Homo sapiens
tagaatatttaaaac

SEQ ID NO: 1255103 - DNA, 15 bp, Homo sapiens
ctagaatatttaaaa

SEQ ID NO: 1255104 - DNA, 15 bp, Homo sapiens
actagaatatttaaa

SEQ ID NO: 1255105 - DNA, 15 bp, Homo sapiens
gactagaatatttaa

SEQ ID NO: 1255106 - DNA, 15 bp, Homo sapiens
tgactagaatattta

SEQ ID NO: 1255107 - DNA, 15 bp, Homo sapiens
ctgactagaatattt

SEQ ID NO: 1255108 - DNA, 15 bp, Homo sapiens
actgactagaatatt

SEQ ID NO: 1255109 - DNA, 15 bp, Homo sapiens
aactgactagaatat

SEQ ID NO: 1255110 - DNA, 15 bp, Homo sapiens
gaactgactagaata

SEQ ID NO: 1255111 - DNA, 15 bp, Homo sapiens
agaactgactagaat

SEQ ID NO: 1255112 - DNA, 15 bp, Homo sapiens
aagaactgactagaa

SEQ ID NO: 1255113 - DNA, 15 bp, Homo sapiens
aaagaactgactaga

SEQ ID NO: 1255114 - DNA, 15 bp, Homo sapiens
gaaagaactgactag

SEQ ID NO: 1255115 - DNA, 15 bp, Homo sapiens
ggaaagaactgacta

SEQ ID NO: 1255116 - DNA, 15 bp, Homo sapiens
aggaaagaactgact

SEQ ID NO: 1255117 - DNA, 15 bp, Homo sapiens
caggaaagaactgac

SEQ ID NO: 1255118 - DNA, 15 bp, Homo sapiens
gcaggaaagaactga

SEQ ID NO: 1255119 - DNA, 15 bp, Homo sapiens
agcaggaaagaactg

SEQ ID NO: 1255120 - DNA, 15 bp, Homo sapiens
gagcaggaaagaact

SEQ ID NO: 1255121 - DNA, 15 bp, Homo sapiens
ggagcaggaaagaac

SEQ ID NO: 1255122 - DNA, 15 bp, Homo sapiens
gggagcaggaaagaa

SEQ ID NO: 1255123 - DNA, 15 bp, Homo sapiens
tgggagcaggaaaga

SEQ ID NO: 1255124 - DNA, 15 bp, Homo sapiens
ctgggagcaggaaag

SEQ ID NO: 1255125 - DNA, 15 bp, Homo sapiens
cctgggagcaggaaa

SEQ ID NO: 1255126 - DNA, 15 bp, Homo sapiens
tcctgggagcaggaa

SEQ ID NO: 1255127 - DNA, 15 bp, Homo sapiens
ttcctgggagcagga

SEQ ID NO: 1255128 - DNA, 15 bp, Homo sapiens
tttcctgggagcagg

SEQ ID NO: 1255129 - DNA, 15 bp, Homo sapiens
ctttcctgggagcag

SEQ ID NO: 1255130 - DNA, 15 bp, Homo sapiens
gctttcctgggagca

SEQ ID NO: 1255131 - DNA, 15 bp, Homo sapiens
ggctttcctgggagc

SEQ ID NO: 1255132 - DNA, 15 bp, Homo sapiens
gggctttcctgggag

SEQ ID NO: 1255133 - DNA, 15 bp, Homo sapiens
cgggctttcctggga

SEQ ID NO: 1255134 - DNA, 15 bp, Homo sapiens
ccgggctttcctggg

SEQ ID NO: 1255135 - DNA, 15 bp, Homo sapiens
tccgggctttcctgg

SEQ ID NO: 1255136 - DNA, 15 bp, Homo sapiens
atccgggctttcctg

SEQ ID NO: 1255137 - DNA, 15 bp, Homo sapiens
aatccgggctttcct

SEQ ID NO: 1255138 - DNA, 15 bp, Homo sapiens
taatccgggctttcc

SEQ ID NO: 1255139 - DNA, 15 bp, Homo sapiens
ataatccgggctttc

SEQ ID NO: 1255140 - DNA, 15 bp, Homo sapiens
cataatccgggcttt

SEQ ID NO: 1255141 - DNA, 15 bp, Homo sapiens
acataatccgggctt

SEQ ID NO: 1255142 - DNA, 15 bp, Homo sapiens
aacataatccgggct

SEQ ID NO: 1255143 - DNA, 15 bp, Homo sapiens
aaacataatccgggc

SEQ ID NO: 1255144 - DNA, 15 bp, Homo sapiens
aaaacataatccggg

SEQ ID NO: 1255145 - DNA, 15 bp, Homo sapiens
taaaacataatccgg

SEQ ID NO: 1255146 - DNA, 15 bp, Homo sapiens
ttaaaacataatccg

SEQ ID NO: 1255147 - DNA, 15 bp, Homo sapiens
cttaaaacataatcc

SEQ ID NO: 1255148 - DNA, 15 bp, Homo sapiens
tcttaaaacataatc

SEQ ID NO: 1255149 - DNA, 15 bp, Homo sapiens
atcttaaaacataat

SEQ ID NO: 1255150 - DNA, 15 bp, Homo sapiens
tatcttaaaacataa

SEQ ID NO: 1255151 - DNA, 15 bp, Homo sapiens
ttatcttaaaacata

SEQ ID NO: 1255152 - DNA, 15 bp, Homo sapiens
cttatcttaaaacat

SEQ ID NO: 1255153 - DNA, 15 bp, Homo sapiens
gcttatcttaaaaca

SEQ ID NO: 1255154 - DNA, 15 bp, Homo sapiens
tgcttatcttaaaac

SEQ ID NO: 1255155 - DNA, 15 bp, Homo sapiens
ttgcttatcttaaaa

SEQ ID NO: 1255156 - DNA, 15 bp, Homo sapiens
tttgcttatcttaaa

SEQ ID NO: 1255157 - DNA, 15 bp, Homo sapiens
ttttgcttatcttaa

SEQ ID NO: 1255158 - DNA, 15 bp, Homo sapiens
attttgcttatctta

SEQ ID NO: 1255159 - DNA, 15 bp, Homo sapiens
cattttgcttatctt

SEQ ID NO: 1255160 - DNA, 15 bp, Homo sapiens
acattttgcttatct

SEQ ID NO: 1255161 - DNA, 15 bp, Homo sapiens
gacattttgcttatc

SEQ ID NO: 1255162 - DNA, 15 bp, Homo sapiens
agacattttgcttat

SEQ ID NO: 1255163 - DNA, 15 bp, Homo sapiens
aagacattttgctta

SEQ ID NO: 1255164 - DNA, 15 bp, Homo sapiens
taagacattttgctt

SEQ ID NO: 1255165 - DNA, 15 bp, Homo sapiens
ttaagacattttgct

SEQ ID NO: 1255166 - DNA, 15 bp, Homo sapiens
tttaagacattttgc

SEQ ID NO: 1255167 - DNA, 15 bp, Homo sapiens
ttttaagacattttg

SEQ ID NO: 1255168 - DNA, 15 bp, Homo sapiens
cttttaagacatttt

SEQ ID NO: 1255169 - DNA, 15 bp, Homo sapiens
acttttaagacattt

SEQ ID NO: 1255170 - DNA, 15 bp, Homo sapiens
tacttttaagacatt

SEQ ID NO: 1255171 - DNA, 15 bp, Homo sapiens
ttacttttaagacat

SEQ ID NO: 1255172 - DNA, 15 bp, Homo sapiens
cttacttttaagaca

SEQ ID NO: 1255173 - DNA, 15 bp, Homo sapiens
gcttacttttaagac

SEQ ID NO: 1255174 - DNA, 15 bp, Homo sapiens
agcttacttttaaga

SEQ ID NO: 1255175 - DNA, 15 bp, Homo sapiens
cagcttacttttaag

SEQ ID NO: 1255176 - DNA, 15 bp, Homo sapiens
acagcttacttttaa

SEQ ID NO: 1255177 - DNA, 15 bp, Homo sapiens
aacagcttactttta

SEQ ID NO: 1255178 - DNA, 15 bp, Homo sapiens
aaacagcttactttt

SEQ ID NO: 1255179 - DNA, 15 bp, Homo sapiens
aaaacagcttacttt

SEQ ID NO: 1255180 - DNA, 15 bp, Homo sapiens
taaaacagcttactt

SEQ ID NO: 1255181 - DNA, 15 bp, Homo sapiens
gtaaaacagcttact

SEQ ID NO: 1255182 - DNA, 15 bp, Homo sapiens
agtaaaacagcttac

SEQ ID NO: 1255183 - DNA, 15 bp, Homo sapiens
aagtaaaacagctta

SEQ ID NO: 1255184 - DNA, 15 bp, Homo sapiens
aaagtaaaacagctt

SEQ ID NO: 1255185 - DNA, 15 bp, Homo sapiens
caaagtaaaacagct

SEQ ID NO: 1255186 - DNA, 15 bp, Homo sapiens
tcaaagtaaaacagc

SEQ ID NO: 1255187 - DNA, 15 bp, Homo sapiens
ttcaaagtaaaacag

SEQ ID NO: 1255188 - DNA, 15 bp, Homo sapiens
attcaaagtaaaaca

SEQ ID NO: 1255189 - DNA, 15 bp, Homo sapiens
aattcaaagtaaaac

SEQ ID NO: 1255190 - DNA, 15 bp, Homo sapiens
aaattcaaagtaaaa

SEQ ID NO: 1255191 - DNA, 15 bp, Homo sapiens
aaaattcaaagtaaa

SEQ ID NO: 1255192 - DNA, 15 bp, Homo sapiens
aaaaattcaaagtaa

SEQ ID NO: 1255193 - DNA, 15 bp, Homo sapiens
gaaaaattcaaagta

SEQ ID NO: 1255194 - DNA, 15 bp, Homo sapiens
ggaaaaattcaaagt

SEQ ID NO: 1255195 - DNA, 15 bp, Homo sapiens
gggaaaaattcaaag

SEQ ID NO: 1255196 - DNA, 15 bp, Homo sapiens
agggaaaaattcaaa

SEQ ID NO: 1255197 - DNA, 15 bp, Homo sapiens
tagggaaaaattcaa

SEQ ID NO: 1255198 - DNA, 15 bp, Homo sapiens
ttagggaaaaattca

SEQ ID NO: 1255199 - DNA, 15 bp, Homo sapiens
tttagggaaaaattc

SEQ ID NO: 1255200 - DNA, 15 bp, Homo sapiens
atttagggaaaaatt

SEQ ID NO: 1255201 - DNA, 15 bp, Homo sapiens
catttagggaaaaat

SEQ ID NO: 1255202 - DNA, 15 bp, Homo sapiens
acatttagggaaaaa

SEQ ID NO: 1255203 - DNA, 15 bp, Homo sapiens
aacatttagggaaaa

SEQ ID NO: 1255204 - DNA, 15 bp, Homo sapiens
caacatttagggaaa

SEQ ID NO: 1255205 - DNA, 15 bp, Homo sapiens
tcaacatttagggaa

SEQ ID NO: 1255206 - DNA, 15 bp, Homo sapiens
atcaacatttaggga

SEQ ID NO: 1255207 - DNA, 15 bp, Homo sapiens
aatcaacatttaggg

SEQ ID NO: 1255208 - DNA, 15 bp, Homo sapiens
taatcaacatttagg

SEQ ID NO: 1255209 - DNA, 15 bp, Homo sapiens
ctaatcaacatttag

SEQ ID NO: 1255210 - DNA, 15 bp, Homo sapiens
actaatcaacattta

SEQ ID NO: 1255211 - DNA, 15 bp, Homo sapiens
cactaatcaacattt

SEQ ID NO: 1255212 - DNA, 15 bp, Homo sapiens
acactaatcaacatt

SEQ ID NO: 1255213 - DNA, 15 bp, Homo sapiens
tacactaatcaacat

SEQ ID NO: 1255214 - DNA, 15 bp, Homo sapiens
gtacactaatcaaca

SEQ ID NO: 1255215 - DNA, 15 bp, Homo sapiens
agtacactaatcaac

SEQ ID NO: 1255216 - DNA, 15 bp, Homo sapiens
tagtacactaatcaa

SEQ ID NO: 1255217 - DNA, 15 bp, Homo sapiens
ctagtacactaatca

SEQ ID NO: 1255218 - DNA, 15 bp, Homo sapiens
tctagtacactaatc

SEQ ID NO: 1255219 - DNA, 15 bp, Homo sapiens
atctagtacactaat

SEQ ID NO: 1255220 - DNA, 15 bp, Homo sapiens
gatctagtacactaa

SEQ ID NO: 1255221 - DNA, 15 bp, Homo sapiens
ggatctagtacacta

SEQ ID NO: 1255222 - DNA, 15 bp, Homo sapiens
tggatctagtacact

SEQ ID NO: 1255223 - DNA, 15 bp, Homo sapiens
atggatctagtacac

SEQ ID NO: 1255224 - DNA, 15 bp, Homo sapiens
aatggatctagtaca

SEQ ID NO: 1255225 - DNA, 15 bp, Homo sapiens
aaatggatctagtac

SEQ ID NO: 1255226 - DNA, 15 bp, Homo sapiens
aaaatggatctagta

SEQ ID NO: 1255227 - DNA, 15 bp, Homo sapiens
taaaatggatctagt

SEQ ID NO: 1255228 - DNA, 15 bp, Homo sapiens
ttaaaatggatctag

SEQ ID NO: 1255229 - DNA, 15 bp, Homo sapiens
attaaaatggatcta

SEQ ID NO: 1255230 - DNA, 15 bp, Homo sapiens
aattaaaatggatct

SEQ ID NO: 1255231 - DNA, 15 bp, Homo sapiens
aaattaaaatggatc

SEQ ID NO: 1255232 - DNA, 15 bp, Homo sapiens
caaattaaaatggat

SEQ ID NO: 1255233 - DNA, 15 bp, Homo sapiens
ccaaattaaaatgga

SEQ ID NO: 1255234 - DNA, 15 bp, Homo sapiens
tccaaattaaaatgg

SEQ ID NO: 1255235 - DNA, 15 bp, Homo sapiens
ttccaaattaaaatg

SEQ ID NO: 1255236 - DNA, 15 bp, Homo sapiens
tttccaaattaaaat

SEQ ID NO: 1255237 - DNA, 15 bp, Homo sapiens
ctttccaaattaaaa

SEQ ID NO: 1255238 - DNA, 15 bp, Homo sapiens
actttccaaattaaa

SEQ ID NO: 1255239 - DNA, 15 bp, Homo sapiens
cactttccaaattaa

SEQ ID NO: 1255240 - DNA, 15 bp, Homo sapiens
tcactttccaaatta

SEQ ID NO: 1255241 - DNA, 15 bp, Homo sapiens
ttcactttccaaatt

SEQ ID NO: 1255242 - DNA, 15 bp, Homo sapiens
cttcactttccaaat

SEQ ID NO: 1255243 - DNA, 15 bp, Homo sapiens
acttcactttccaaa

SEQ ID NO: 1255244 - DNA, 15 bp, Homo sapiens
cacttcactttccaa

SEQ ID NO: 1255245 - DNA, 15 bp, Homo sapiens
gcacttcactttcca

SEQ ID NO: 1255246 - DNA, 15 bp, Homo sapiens
agcacttcactttcc

SEQ ID NO: 1255247 - DNA, 15 bp, Homo sapiens
tagcacttcactttc

SEQ ID NO: 1255248 - DNA, 15 bp, Homo sapiens
gtagcacttcacttt

SEQ ID NO: 1255249 - DNA, 15 bp, Homo sapiens
agtagcacttcactt

SEQ ID NO: 1255250 - DNA, 15 bp, Homo sapiens
aagtagcacttcact

SEQ ID NO: 1255251 - DNA, 15 bp, Homo sapiens
taagtagcacttcac

SEQ ID NO: 1255252 - DNA, 15 bp, Homo sapiens
ataagtagcacttca

SEQ ID NO: 1255253 - DNA, 15 bp, Homo sapiens
aataagtagcacttc

SEQ ID NO: 1255254 - DNA, 15 bp, Homo sapiens
aaataagtagcactt

SEQ ID NO: 1255255 - DNA, 15 bp, Homo sapiens
caaataagtagcact

SEQ ID NO: 1255256 - DNA, 15 bp, Homo sapiens
tcaaataagtagcac

SEQ ID NO: 1255257 - DNA, 15 bp, Homo sapiens
ttcaaataagtagca

SEQ ID NO: 1255258 - DNA, 15 bp, Homo sapiens
gttcaaataagtagc

SEQ ID NO: 1255259 - DNA, 15 bp, Homo sapiens
agttcaaataagtag

SEQ ID NO: 1255260 - DNA, 15 bp, Homo sapiens
aagttcaaataagta

SEQ ID NO: 1255261 - DNA, 15 bp, Homo sapiens
gaagttcaaataagt

SEQ ID NO: 1255262 - DNA, 15 bp, Homo sapiens
agaagttcaaataag

SEQ ID NO: 1255263 - DNA, 15 bp, Homo sapiens
aagaagttcaaataa

SEQ ID NO: 1255264 - DNA, 15 bp, Homo sapiens
taagaagttcaaata

SEQ ID NO: 1255265 - DNA, 15 bp, Homo sapiens
ttaagaagttcaaat

SEQ ID NO: 1255266 - DNA, 15 bp, Homo sapiens
tttaagaagttcaaa

SEQ ID NO: 1255267 - DNA, 15 bp, Homo sapiens
ttttaagaagttcaa

SEQ ID NO: 1255268 - DNA, 15 bp, Homo sapiens
tttttaagaagttca

SEQ ID NO: 1255269 - DNA, 15 bp, Homo sapiens
atttttaagaagttc

SEQ ID NO: 1255270 - DNA, 15 bp, Homo sapiens
catttttaagaagtt

SEQ ID NO: 1255271 - DNA, 15 bp, Homo sapiens
gcatttttaagaagt

SEQ ID NO: 1255272 - DNA, 15 bp, Homo sapiens
agcatttttaagaag

SEQ ID NO: 1255273 - DNA, 15 bp, Homo sapiens
tagcatttttaagaa

SEQ ID NO: 1255274 - DNA, 15 bp, Homo sapiens
ttagcatttttaaga

SEQ ID NO: 1255275 - DNA, 15 bp, Homo sapiens
attagcatttttaag

SEQ ID NO: 1255276 - DNA, 15 bp, Homo sapiens
aattagcatttttaa

SEQ ID NO: 1255277 - DNA, 15 bp, Homo sapiens
aaattagcattttta

SEQ ID NO: 1255278 - DNA, 15 bp, Homo sapiens
aaaattagcattttt

SEQ ID NO: 1255279 - DNA, 15 bp, Homo sapiens
taaaattagcatttt

SEQ ID NO: 1255280 - DNA, 15 bp, Homo sapiens
ttaaaattagcattt

SEQ ID NO: 1255281 - DNA, 15 bp, Homo sapiens
gttaaaattagcatt

SEQ ID NO: 1255282 - DNA, 15 bp, Homo sapiens
tgttaaaattagcat

SEQ ID NO: 1255283 - DNA, 15 bp, Homo sapiens
atgttaaaattagca

SEQ ID NO: 1255284 - DNA, 15 bp, Homo sapiens
gatgttaaaattagc

SEQ ID NO: 1255285 - DNA, 15 bp, Homo sapiens
agatgttaaaattag

SEQ ID NO: 1255286 - DNA, 15 bp, Homo sapiens
tagatgttaaaatta

SEQ ID NO: 1255287 - DNA, 15 bp, Homo sapiens
ttagatgttaaaatt

SEQ ID NO: 1255288 - DNA, 15 bp, Homo sapiens
tttagatgttaaaat

SEQ ID NO: 1255289 - DNA, 15 bp, Homo sapiens
ctttagatgttaaaa

SEQ ID NO: 1255290 - DNA, 15 bp, Homo sapiens
tctttagatgttaaa

SEQ ID NO: 1255291 - DNA, 15 bp, Homo sapiens
ctctttagatgttaa

SEQ ID NO: 1255292 - DNA, 15 bp, Homo sapiens
actctttagatgtta

SEQ ID NO: 1255293 - DNA, 15 bp, Homo sapiens
aactctttagatgtt

SEQ ID NO: 1255294 - DNA, 15 bp, Homo sapiens
taactctttagatgt

SEQ ID NO: 1255295 - DNA, 15 bp, Homo sapiens
ttaactctttagatg

SEQ ID NO: 1255296 - DNA, 15 bp, Homo sapiens
gttaactctttagat

SEQ ID NO: 1255297 - DNA, 15 bp, Homo sapiens
agttaactctttaga

SEQ ID NO: 1255298 - DNA, 15 bp, Homo sapiens
tagttaactctttag

SEQ ID NO: 1255299 - DNA, 15 bp, Homo sapiens
ttagttaactcttta

SEQ ID NO: 1255300 - DNA, 15 bp, Homo sapiens
cttagttaactcttt

SEQ ID NO: 1255301 - DNA, 15 bp, Homo sapiens
tcttagttaactctt

SEQ ID NO: 1255302 - DNA, 15 bp, Homo sapiens
ttcttagttaactct

SEQ ID NO: 1255303 - DNA, 15 bp, Homo sapiens
tttcttagttaactc

SEQ ID NO: 1255304 - DNA, 15 bp, Homo sapiens
ttttcttagttaact

SEQ ID NO: 1255305 - DNA, 15 bp, Homo sapiens
cttttcttagttaac

SEQ ID NO: 1255306 - DNA, 15 bp, Homo sapiens
gcttttcttagttaa

SEQ ID NO: 1255307 - DNA, 15 bp, Homo sapiens
agcttttcttagtta

SEQ ID NO: 1255308 - DNA, 15 bp, Homo sapiens
aagcttttcttagtt

SEQ ID NO: 1255309 - DNA, 15 bp, Homo sapiens
taagcttttcttagt

SEQ ID NO: 1255310 - DNA, 15 bp, Homo sapiens
ctaagcttttcttag

SEQ ID NO: 1255311 - DNA, 15 bp, Homo sapiens
actaagcttttctta

SEQ ID NO: 1255312 - DNA, 15 bp, Homo sapiens
tactaagcttttctt

SEQ ID NO: 1255313 - DNA, 15 bp, Homo sapiens
ttactaagcttttct

SEQ ID NO: 1255314 - DNA, 15 bp, Homo sapiens
gttactaagcttttc

SEQ ID NO: 1255315 - DNA, 15 bp, Homo sapiens
tgttactaagctttt

SEQ ID NO: 1255316 - DNA, 15 bp, Homo sapiens
atgttactaagcttt

SEQ ID NO: 1255317 - DNA, 15 bp, Homo sapiens
catgttactaagctt

SEQ ID NO: 1255318 - DNA, 15 bp, Homo sapiens
tcatgttactaagct

SEQ ID NO: 1255319 - DNA, 15 bp, Homo sapiens
atcatgttactaagc

SEQ ID NO: 1255320 - DNA, 15 bp, Homo sapiens
catcatgttactaag

SEQ ID NO: 1255321 - DNA, 15 bp, Homo sapiens
acatcatgttactaa

SEQ ID NO: 1255322 - DNA, 15 bp, Homo sapiens
tacatcatgttacta

SEQ ID NO: 1255323 - DNA, 15 bp, Homo sapiens
gtacatcatgttact

SEQ ID NO: 1255324 - DNA, 15 bp, Homo sapiens
ggtacatcatgttac

SEQ ID NO: 1255325 - DNA, 15 bp, Homo sapiens
tggtacatcatgtta

SEQ ID NO: 1255326 - DNA, 15 bp, Homo sapiens
ttggtacatcatgtt

SEQ ID NO: 1255327 - DNA, 15 bp, Homo sapiens
cttggtacatcatgt

SEQ ID NO: 1255328 - DNA, 15 bp, Homo sapiens
acttggtacatcatg

SEQ ID NO: 1255329 - DNA, 15 bp, Homo sapiens
aacttggtacatcat

SEQ ID NO: 1255330 - DNA, 15 bp, Homo sapiens
caacttggtacatca

SEQ ID NO: 1255331 - DNA, 15 bp, Homo sapiens
tcaacttggtacatc

SEQ ID NO: 1255332 - DNA, 15 bp, Homo sapiens
ttcaacttggtacat

SEQ ID NO: 1255333 - DNA, 15 bp, Homo sapiens
attcaacttggtaca

SEQ ID NO: 1255334 - DNA, 15 bp, Homo sapiens
tattcaacttggtac

SEQ ID NO: 1255335 - DNA, 15 bp, Homo sapiens
atattcaacttggta

SEQ ID NO: 1255336 - DNA, 15 bp, Homo sapiens
catattcaacttggt

SEQ ID NO: 1255337 - DNA, 15 bp, Homo sapiens
gcatattcaacttgg

SEQ ID NO: 1255338 - DNA, 15 bp, Homo sapiens
agcatattcaacttg

SEQ ID NO: 1255339 - DNA, 15 bp, Homo sapiens
cagcatattcaactt

SEQ ID NO: 1255340 - DNA, 15 bp, Homo sapiens
acagcatattcaact

SEQ ID NO: 1255341 - DNA, 15 bp, Homo sapiens
aacagcatattcaac

SEQ ID NO: 1255342 - DNA, 15 bp, Homo sapiens
taacagcatattcaa

SEQ ID NO: 1255343 - DNA, 15 bp, Homo sapiens
ataacagcatattca

SEQ ID NO: 1255344 - DNA, 15 bp, Homo sapiens
gataacagcatattc

SEQ ID NO: 1255345 - DNA, 15 bp, Homo sapiens
ggataacagcatatt

SEQ ID NO: 1255346 - DNA, 15 bp, Homo sapiens
aggataacagcatat

SEQ ID NO: 1255347 - DNA, 15 bp, Homo sapiens
aaggataacagcata

SEQ ID NO: 1255348 - DNA, 15 bp, Homo sapiens
taaggataacagcat

SEQ ID NO: 1255349 - DNA, 15 bp, Homo sapiens
ataaggataacagca

SEQ ID NO: 1255350 - DNA, 15 bp, Homo sapiens
aataaggataacagc

SEQ ID NO: 1255351 - DNA, 15 bp, Homo sapiens
aaataaggataacag

SEQ ID NO: 1255352 - DNA, 15 bp, Homo sapiens
taaataaggataaca

SEQ ID NO: 1255353 - DNA, 15 bp, Homo sapiens
ctaaataaggataac

SEQ ID NO: 1255354 - DNA, 15 bp, Homo sapiens
tctaaataaggataa

SEQ ID NO: 1255355 - DNA, 15 bp, Homo sapiens
ttctaaataaggata

SEQ ID NO: 1255356 - DNA, 15 bp, Homo sapiens
attctaaataaggat

SEQ ID NO: 1255357 - DNA, 15 bp, Homo sapiens
tattctaaataagga

SEQ ID NO: 1255358 - DNA, 15 bp, Homo sapiens
ctattctaaataagg

SEQ ID NO: 1255359 - DNA, 15 bp, Homo sapiens
tctattctaaataag

SEQ ID NO: 1255360 - DNA, 15 bp, Homo sapiens
ttctattctaaataa

SEQ ID NO: 1255361 - DNA, 15 bp, Homo sapiens
tttctattctaaata

SEQ ID NO: 1255362 - DNA, 15 bp, Homo sapiens
ttttctattctaaat

SEQ ID NO: 1255363 - DNA, 15 bp, Homo sapiens
attttctattctaaa

SEQ ID NO: 1255364 - DNA, 15 bp, Homo sapiens
aattttctattctaa

SEQ ID NO: 1255365 - DNA, 15 bp, Homo sapiens
caattttctattcta

SEQ ID NO: 1255366 - DNA, 15 bp, Homo sapiens
ccaattttctattct

SEQ ID NO: 1255367 - DNA, 15 bp, Homo sapiens
accaattttctattc

SEQ ID NO: 1255368 - DNA, 15 bp, Homo sapiens
taccaattttctatt

SEQ ID NO: 1255369 - DNA, 15 bp, Homo sapiens
ataccaattttctat

SEQ ID NO: 1255370 - DNA, 15 bp, Homo sapiens
aataccaattttcta

SEQ ID NO: 1255371 - DNA, 15 bp, Homo sapiens
aaataccaattttct

SEQ ID NO: 1255372 - DNA, 15 bp, Homo sapiens
gaaataccaattttc

SEQ ID NO: 1255373 - DNA, 15 bp, Homo sapiens
agaaataccaatttt

SEQ ID NO: 1255374 - DNA, 15 bp, Homo sapiens
tagaaataccaattt

SEQ ID NO: 1255375 - DNA, 15 bp, Homo sapiens
gtagaaataccaatt

SEQ ID NO: 1255376 - DNA, 15 bp, Homo sapiens
cgtagaaataccaat

SEQ ID NO: 1255377 - DNA, 15 bp, Homo sapiens
acgtagaaataccaa

SEQ ID NO: 1255378 - DNA, 15 bp, Homo sapiens
aacgtagaaatacca

SEQ ID NO: 1255379 - DNA, 15 bp, Homo sapiens
aaacgtagaaatacc

SEQ ID NO: 1255380 - DNA, 15 bp, Homo sapiens
aaaacgtagaaatac

SEQ ID NO: 1255381 - DNA, 15 bp, Homo sapiens
taaaacgtagaaata

SEQ ID NO: 1255382 - DNA, 15 bp, Homo sapiens
ataaaacgtagaaat

SEQ ID NO: 1255383 - DNA, 15 bp, Homo sapiens
gataaaacgtagaaa

SEQ ID NO: 1255384 - DNA, 15 bp, Homo sapiens
ggataaaacgtagaa

SEQ ID NO: 1255385 - DNA, 15 bp, Homo sapiens
tggataaaacgtaga

SEQ ID NO: 1255386 - DNA, 15 bp, Homo sapiens
atggataaaacgtag

SEQ ID NO: 1255387 - DNA, 15 bp, Homo sapiens
aatggataaaacgta

SEQ ID NO: 1255388 - DNA, 15 bp, Homo sapiens
gaatggataaaacgt

SEQ ID NO: 1255389 - DNA, 15 bp, Homo sapiens
agaatggataaaacg

SEQ ID NO: 1255390 - DNA, 15 bp, Homo sapiens
tagaatggataaaac

SEQ ID NO: 1255391 - DNA, 15 bp, Homo sapiens
ttagaatggataaaa

SEQ ID NO: 1255392 - DNA, 15 bp, Homo sapiens
cttagaatggataaa

SEQ ID NO: 1255393 - DNA, 15 bp, Homo sapiens
ccttagaatggataa

SEQ ID NO: 1255394 - DNA, 15 bp, Homo sapiens
gccttagaatggata

SEQ ID NO: 1255395 - DNA, 15 bp, Homo sapiens
tgccttagaatggat

SEQ ID NO: 1255396 - DNA, 15 bp, Homo sapiens
ctgccttagaatgga

SEQ ID NO: 1255397 - DNA, 15 bp, Homo sapiens
cctgccttagaatgg

SEQ ID NO: 1255398 - DNA, 15 bp, Homo sapiens
acctgccttagaatg

SEQ ID NO: 1255399 - DNA, 15 bp, Homo sapiens
aacctgccttagaat

SEQ ID NO: 1255400 - DNA, 15 bp, Homo sapiens
taacctgccttagaa

SEQ ID NO: 1255401 - DNA, 15 bp, Homo sapiens
ttaacctgccttaga

SEQ ID NO: 1255402 - DNA, 15 bp, Homo sapiens
tttaacctgccttag

SEQ ID NO: 1255403 - DNA, 15 bp, Homo sapiens
ttttaacctgcctta

SEQ ID NO: 1255404 - DNA, 15 bp, Homo sapiens
tttttaacctgcctt

SEQ ID NO: 1255405 - DNA, 15 bp, Homo sapiens
ttttttaacctgcct

SEQ ID NO: 1255406 - DNA, 15 bp, Homo sapiens
attttttaacctgcc

SEQ ID NO: 1255407 - DNA, 15 bp, Homo sapiens
aattttttaacctgc

SEQ ID NO: 1255408 - DNA, 15 bp, Homo sapiens
caattttttaacctg

SEQ ID NO: 1255409 - DNA, 15 bp, Homo sapiens
acaattttttaacct

SEQ ID NO: 1255410 - DNA, 15 bp, Homo sapiens
tacaattttttaacc

SEQ ID NO: 1255411 - DNA, 15 bp, Homo sapiens
atacaattttttaac

SEQ ID NO: 1255412 - DNA, 15 bp, Homo sapiens
aatacaattttttaa

SEQ ID NO: 1255413 - DNA, 15 bp, Homo sapiens
aaatacaatttttta

SEQ ID NO: 1255414 - DNA, 15 bp, Homo sapiens
gaaatacaatttttt

SEQ ID NO: 1255415 - DNA, 15 bp, Homo sapiens
ggaaatacaattttt

SEQ ID NO: 1255416 - DNA, 15 bp, Homo sapiens
tggaaatacaatttt

SEQ ID NO: 1255417 - DNA, 15 bp, Homo sapiens
atggaaatacaattt

SEQ ID NO: 1255418 - DNA, 15 bp, Homo sapiens
catggaaatacaatt

SEQ ID NO: 1255419 - DNA, 15 bp, Homo sapiens
tcatggaaatacaat

SEQ ID NO: 1255420 - DNA, 15 bp, Homo sapiens
gtcatggaaatacaa

SEQ ID NO: 1255421 - DNA, 15 bp, Homo sapiens
agtcatggaaataca

SEQ ID NO: 1255422 - DNA, 15 bp, Homo sapiens
tagtcatggaaatac

SEQ ID NO: 1255423 - DNA, 15 bp, Homo sapiens
gtagtcatggaaata

SEQ ID NO: 1255424 - DNA, 15 bp, Homo sapiens
ggtagtcatggaaat

SEQ ID NO: 1255425 - DNA, 15 bp, Homo sapiens
aggtagtcatggaaa

SEQ ID NO: 1255426 - DNA, 15 bp, Homo sapiens
taggtagtcatggaa

SEQ ID NO: 1255427 - DNA, 15 bp, Homo sapiens
ataggtagtcatgga

SEQ ID NO: 1255428 - DNA, 15 bp, Homo sapiens
tataggtagtcatgg

SEQ ID NO: 1255429 - DNA, 15 bp, Homo sapiens
atataggtagtcatg

SEQ ID NO: 1255430 - DNA, 15 bp, Homo sapiens
tatataggtagtcat

SEQ ID NO: 1255431 - DNA, 15 bp, Homo sapiens
atatataggtagtca

SEQ ID NO: 1255432 - DNA, 15 bp, Homo sapiens
aatatataggtagtc

SEQ ID NO: 1255433 - DNA, 15 bp, Homo sapiens
aaatatataggtagt

SEQ ID NO: 1255434 - DNA, 15 bp, Homo sapiens
gaaatatataggtag

SEQ ID NO: 1255435 - DNA, 15 bp, Homo sapiens
agaaatatataggta

SEQ ID NO: 1255436 - DNA, 15 bp, Homo sapiens
aagaaatatataggt

SEQ ID NO: 1255437 - DNA, 15 bp, Homo sapiens
caagaaatatatagg

SEQ ID NO: 1255438 - DNA, 15 bp, Homo sapiens
tcaagaaatatatag

SEQ ID NO: 1255439 - DNA, 15 bp, Homo sapiens
ttcaagaaatatata

SEQ ID NO: 1255440 - DNA, 15 bp, Homo sapiens
attcaagaaatatat

SEQ ID NO: 1255441 - DNA, 15 bp, Homo sapiens
aattcaagaaatata

SEQ ID NO: 1255442 - DNA, 15 bp, Homo sapiens
aaattcaagaaatat

SEQ ID NO: 1255443 - DNA, 15 bp, Homo sapiens
taaattcaagaaata

SEQ ID NO: 1255444 - DNA, 15 bp, Homo sapiens
ataaattcaagaaat

SEQ ID NO: 1255445 - DNA, 15 bp, Homo sapiens
aataaattcaagaaa

SEQ ID NO: 1255446 - DNA, 15 bp, Homo sapiens
taataaattcaagaa

SEQ ID NO: 1255447 - DNA, 15 bp, Homo sapiens
ataataaattcaaga

SEQ ID NO: 1255448 - DNA, 15 bp, Homo sapiens
aataataaattcaag

SEQ ID NO: 1255449 - DNA, 15 bp, Homo sapiens
caataataaattcaa

SEQ ID NO: 1255450 - DNA, 15 bp, Homo sapiens
acaataataaattca

SEQ ID NO: 1255451 - DNA, 15 bp, Homo sapiens
tacaataataaattc

SEQ ID NO: 1255452 - DNA, 15 bp, Homo sapiens
ttacaataataaatt

SEQ ID NO: 1255453 - DNA, 15 bp, Homo sapiens
tttacaataataaat

SEQ ID NO: 1255454 - DNA, 15 bp, Homo sapiens
ctttacaataataaa

SEQ ID NO: 1255455 - DNA, 15 bp, Homo sapiens
actttacaataataa

SEQ ID NO: 1255456 - DNA, 15 bp, Homo sapiens
aactttacaataata

SEQ ID NO: 1255457 - DNA, 15 bp, Homo sapiens
caactttacaataat

SEQ ID NO: 1255458 - DNA, 15 bp, Homo sapiens
tcaactttacaataa

SEQ ID NO: 1255459 - DNA, 15 bp, Homo sapiens
atcaactttacaata

SEQ ID NO: 1255460 - DNA, 15 bp, Homo sapiens
aatcaactttacaat

SEQ ID NO: 1255461 - DNA, 15 bp, Homo sapiens
gaatcaactttacaa

SEQ ID NO: 1255462 - DNA, 15 bp, Homo sapiens
tgaatcaactttaca

SEQ ID NO: 1255463 - DNA, 15 bp, Homo sapiens
atgaatcaactttac

SEQ ID NO: 1255464 - DNA, 15 bp, Homo sapiens
tatgaatcaacttta

SEQ ID NO: 1255465 - DNA, 15 bp, Homo sapiens
ctatgaatcaacttt

SEQ ID NO: 1255466 - DNA, 15 bp, Homo sapiens
actatgaatcaactt

SEQ ID NO: 1255467 - DNA, 15 bp, Homo sapiens
gactatgaatcaact

SEQ ID NO: 1255468 - DNA, 15 bp, Homo sapiens
tgactatgaatcaac

SEQ ID NO: 1255469 - DNA, 15 bp, Homo sapiens
ttgactatgaatcaa

SEQ ID NO: 1255470 - DNA, 15 bp, Homo sapiens
tttgactatgaatca

SEQ ID NO: 1255471 - DNA, 15 bp, Homo sapiens
gtttgactatgaatc

SEQ ID NO: 1255472 - DNA, 15 bp, Homo sapiens
tgtttgactatgaat

SEQ ID NO: 1255473 - DNA, 15 bp, Homo sapiens
ttgtttgactatgaa

SEQ ID NO: 1255474 - DNA, 15 bp, Homo sapiens
attgtttgactatga

SEQ ID NO: 1255475 - DNA, 15 bp, Homo sapiens
aattgtttgactatg

SEQ ID NO: 1255476 - DNA, 15 bp, Homo sapiens
taattgtttgactat

SEQ ID NO: 1255477 - DNA, 15 bp, Homo sapiens
ttaattgtttgacta

SEQ ID NO: 1255478 - DNA, 15 bp, Homo sapiens
tttaattgtttgact

SEQ ID NO: 1255479 - DNA, 15 bp, Homo sapiens
atttaattgtttgac

SEQ ID NO: 1255480 - DNA, 15 bp, Homo sapiens
catttaattgtttga

SEQ ID NO: 1255481 - DNA, 15 bp, Homo sapiens
acatttaattgtttg

SEQ ID NO: 1255482 - DNA, 15 bp, Homo sapiens
aacatttaattgttt

SEQ ID NO: 1255483 - DNA, 15 bp, Homo sapiens
aaacatttaattgtt

SEQ ID NO: 1255484 - DNA, 15 bp, Homo sapiens
taaacatttaattgt

SEQ ID NO: 1255485 - DNA, 15 bp, Homo sapiens
tttaaacatttaatt

SEQ ID NO: 1255486 - DNA, 15 bp, Homo sapiens
atttaaacatttaat

SEQ ID NO: 1255487 - DNA, 15 bp, Homo sapiens
aatttaaacatttaa

SEQ ID NO: 1255488 - DNA, 15 bp, Homo sapiens
taatttaaacattta

SEQ ID NO: 1255489 - DNA, 15 bp, Homo sapiens
ttaatttaaacattt

SEQ ID NO: 1255490 - DNA, 15 bp, Homo sapiens
cttaatttaaacatt

SEQ ID NO: 1255491 - DNA, 15 bp, Homo sapiens
tcttaatttaaacat

SEQ ID NO: 1255492 - DNA, 15 bp, Homo sapiens
atcttaatttaaaca

SEQ ID NO: 1255493 - DNA, 15 bp, Homo sapiens
aatcttaatttaaac

SEQ ID NO: 1255494 - DNA, 15 bp, Homo sapiens
taatcttaatttaaa

SEQ ID NO: 1255495 - DNA, 15 bp, Homo sapiens
ttaatcttaatttaa

SEQ ID NO: 1255496 - DNA, 15 bp, Homo sapiens
cttaatcttaattta

SEQ ID NO: 1255497 - DNA, 15 bp, Homo sapiens
tcttaatcttaattt

SEQ ID NO: 1255498 - DNA, 15 bp, Homo sapiens
gtcttaatcttaatt

SEQ ID NO: 1255499 - DNA, 15 bp, Homo sapiens
tgtcttaatcttaat

SEQ ID NO: 1255500 - DNA, 15 bp, Homo sapiens
gtgtcttaatcttaa

SEQ ID NO: 1255501 - DNA, 15 bp, Homo sapiens
agtgtcttaatctta

SEQ ID NO: 1255502 - DNA, 15 bp, Homo sapiens
tagtgtcttaatctt

SEQ ID NO: 1255503 - DNA, 15 bp, Homo sapiens
ctagtgtcttaatct

SEQ ID NO: 1255504 - DNA, 15 bp, Homo sapiens
tctagtgtcttaatc

SEQ ID NO: 1255505 - DNA, 15 bp, Homo sapiens
ctctagtgtcttaat

SEQ ID NO: 1255506 - DNA, 15 bp, Homo sapiens
tctctagtgtcttaa

SEQ ID NO: 1255507 - DNA, 15 bp, Homo sapiens
ttctctagtgtctta

SEQ ID NO: 1255508 - DNA, 15 bp, Homo sapiens
attctctagtgtctt

SEQ ID NO: 1255509 - DNA, 15 bp, Homo sapiens
cattctctagtgtct

SEQ ID NO: 1255510 - DNA, 15 bp, Homo sapiens
tcattctctagtgtc

SEQ ID NO: 1255511 - DNA, 15 bp, Homo sapiens
atcattctctagtgt

SEQ ID NO: 1255512 - DNA, 15 bp, Homo sapiens
aatcattctctagtg

SEQ ID NO: 1255513 - DNA, 15 bp, Homo sapiens
aaatcattctctagt

SEQ ID NO: 1255514 - DNA, 15 bp, Homo sapiens
taaatcattctctag

SEQ ID NO: 1255515 - DNA, 15 bp, Homo sapiens
ataaatcattctcta

SEQ ID NO: 1255516 - DNA, 15 bp, Homo sapiens
aataaatcattctct

SEQ ID NO: 1255517 - DNA, 15 bp, Homo sapiens
aaataaatcattctc

SEQ ID NO: 1255518 - DNA, 15 bp, Homo sapiens
caaataaatcattct

SEQ ID NO: 1255519 - DNA, 15 bp, Homo sapiens
gcaaataaatcattc

SEQ ID NO: 1255520 - DNA, 15 bp, Homo sapiens
agcaaataaatcatt

SEQ ID NO: 1255521 - DNA, 15 bp, Homo sapiens
cagcaaataaatcat

SEQ ID NO: 1255522 - DNA, 15 bp, Homo sapiens
acagcaaataaatca

SEQ ID NO: 1255523 - DNA, 15 bp, Homo sapiens
gacagcaaataaatc

SEQ ID NO: 1255524 - DNA, 15 bp, Homo sapiens
ggacagcaaataaat

SEQ ID NO: 1255525 - DNA, 15 bp, Homo sapiens
aggacagcaaataaa

SEQ ID NO: 1255526 - DNA, 15 bp, Homo sapiens
aaggacagcaaataa

SEQ ID NO: 1255527 - DNA, 15 bp, Homo sapiens
aaaggacagcaaata

SEQ ID NO: 1255528 - DNA, 15 bp, Homo sapiens
taaaggacagcaaat

SEQ ID NO: 1255529 - DNA, 15 bp, Homo sapiens
ttaaaggacagcaaa

SEQ ID NO: 1255530 - DNA, 15 bp, Homo sapiens
attaaaggacagcaa

SEQ ID NO: 1255531 - DNA, 15 bp, Homo sapiens
aattaaaggacagca

SEQ ID NO: 1255532 - DNA, 15 bp, Homo sapiens
caattaaaggacagc

SEQ ID NO: 1255533 - DNA, 15 bp, Homo sapiens
gcaattaaaggacag

SEQ ID NO: 1255534 - DNA, 15 bp, Homo sapiens
tgcaattaaaggaca

SEQ ID NO: 1255535 - DNA, 15 bp, Homo sapiens
ctgcaattaaaggac

SEQ ID NO: 1255536 - DNA, 15 bp, Homo sapiens
gctgcaattaaagga

SEQ ID NO: 1255537 - DNA, 15 bp, Homo sapiens
tgctgcaattaaagg

SEQ ID NO: 1255538 - DNA, 15 bp, Homo sapiens
ttgctgcaattaaag

SEQ ID NO: 1255539 - DNA, 15 bp, Homo sapiens
tttgctgcaattaaa

SEQ ID NO: 1255540 - DNA, 15 bp, Homo sapiens
atttgctgcaattaa

SEQ ID NO: 1255541 - DNA, 15 bp, Homo sapiens
gatttgctgcaatta

SEQ ID NO: 1255542 - DNA, 15 bp, Homo sapiens
ggatttgctgcaatt

SEQ ID NO: 1255543 - DNA, 15 bp, Homo sapiens
aggatttgctgcaat

SEQ ID NO: 1255544 - DNA, 15 bp, Homo sapiens
aaggatttgctgcaa

SEQ ID NO: 1255545 - DNA, 15 bp, Homo sapiens
caaggatttgctgca

SEQ ID NO: 1255546 - DNA, 15 bp, Homo sapiens
gcaaggatttgctgc

SEQ ID NO: 1255547 - DNA, 15 bp, Homo sapiens
agcaaggatttgctg

SEQ ID NO: 1255548 - DNA, 15 bp, Homo sapiens
cagcaaggatttgct

SEQ ID NO: 1255549 - DNA, 15 bp, Homo sapiens
acagcaaggatttgc

SEQ ID NO: 1255550 - DNA, 15 bp, Homo sapiens
aacagcaaggatttg

SEQ ID NO: 1255551 - DNA, 15 bp, Homo sapiens
gaacagcaaggattt

SEQ ID NO: 1255552 - DNA, 15 bp, Homo sapiens
ggaacagcaaggatt

SEQ ID NO: 1255553 - DNA, 15 bp, Homo sapiens
gggaacagcaaggat

SEQ ID NO: 1255554 - DNA, 15 bp, Homo sapiens
tgggaacagcaagga

SEQ ID NO: 1255555 - DNA, 15 bp, Homo sapiens
gtgggaacagcaagg

SEQ ID NO: 1255556 - DNA, 15 bp, Homo sapiens
ggtgggaacagcaag

SEQ ID NO: 1255557 - DNA, 15 bp, Homo sapiens
gggtgggaacagcaa

SEQ ID NO: 1255558 - DNA, 15 bp, Homo sapiens
tgggtgggaacagca

SEQ ID NO: 1255559 - DNA, 15 bp, Homo sapiens
atgggtgggaacagc

SEQ ID NO: 1255560 - DNA, 15 bp, Homo sapiens
catgggtgggaacag

SEQ ID NO: 1255561 - DNA, 15 bp, Homo sapiens
acatgggtgggaaca

SEQ ID NO: 1255562 - DNA, 15 bp, Homo sapiens
gacatgggtgggaac

SEQ ID NO: 1255563 - DNA, 15 bp, Homo sapiens
tgacatgggtgggaa

SEQ ID NO: 1255564 - DNA, 15 bp, Homo sapiens
ttgacatgggtggga

SEQ ID NO: 1255565 - DNA, 15 bp, Homo sapiens
tttgacatgggtggg

SEQ ID NO: 1255566 - DNA, 15 bp, Homo sapiens
ttttgacatgggtgg

SEQ ID NO: 1255567 - DNA, 15 bp, Homo sapiens
gttttgacatgggtg

SEQ ID NO: 1255568 - DNA, 15 bp, Homo sapiens
ggttttgacatgggt

SEQ ID NO: 1255569 - DNA, 15 bp, Homo sapiens
cggttttgacatggg

SEQ ID NO: 1255570 - DNA, 15 bp, Homo sapiens
tcggttttgacatgg

SEQ ID NO: 1255571 - DNA, 15 bp, Homo sapiens
ctcggttttgacatg

SEQ ID NO: 1255572 - DNA, 15 bp, Homo sapiens
cctcggttttgacat

SEQ ID NO: 1255573 - DNA, 15 bp, Homo sapiens
acctcggttttgaca

SEQ ID NO: 1255574 - DNA, 15 bp, Homo sapiens
cacctcggttttgac

SEQ ID NO: 1255575 - DNA, 15 bp, Homo sapiens
acacctcggttttga

SEQ ID NO: 1255576 - DNA, 15 bp, Homo sapiens
tacacctcggttttg

SEQ ID NO: 1255577 - DNA, 15 bp, Homo sapiens
atacacctcggtttt

SEQ ID NO: 1255578 - DNA, 15 bp, Homo sapiens
catacacctcggttt

SEQ ID NO: 1255579 - DNA, 15 bp, Homo sapiens
acatacacctcggtt

SEQ ID NO: 1255580 - DNA, 15 bp, Homo sapiens
tacatacacctcggt

SEQ ID NO: 1255581 - DNA, 15 bp, Homo sapiens
atacatacacctcgg

SEQ ID NO: 1255582 - DNA, 15 bp, Homo sapiens
catacatacacctcg

SEQ ID NO: 1255583 - DNA, 15 bp, Homo sapiens
tcatacatacacctc

SEQ ID NO: 1255584 - DNA, 15 bp, Homo sapiens
ctcatacatacacct

SEQ ID NO: 1255585 - DNA, 15 bp, Homo sapiens
actcatacatacacc

SEQ ID NO: 1255586 - DNA, 15 bp, Homo sapiens
cactcatacatacac

SEQ ID NO: 1255587 - DNA, 15 bp, Homo sapiens
acactcatacataca

SEQ ID NO: 1255588 - DNA, 15 bp, Homo sapiens
cacactcatacatac

SEQ ID NO: 1255589 - DNA, 15 bp, Homo sapiens
ccacactcatacata

SEQ ID NO: 1255590 - DNA, 15 bp, Homo sapiens
cccacactcatacat

SEQ ID NO: 1255591 - DNA, 15 bp, Homo sapiens
tcccacactcataca

SEQ ID NO: 1255592 - DNA, 15 bp, Homo sapiens
atcccacactcatac

SEQ ID NO: 1255593 - DNA, 15 bp, Homo sapiens
aatcccacactcata

SEQ ID NO: 1255594 - DNA, 15 bp, Homo sapiens
aaatcccacactcat

SEQ ID NO: 1255595 - DNA, 15 bp, Homo sapiens
caaatcccacactca

SEQ ID NO: 1255596 - DNA, 15 bp, Homo sapiens
tcaaatcccacactc

SEQ ID NO: 1255597 - DNA, 15 bp, Homo sapiens
gtcaaatcccacact

SEQ ID NO: 1255598 - DNA, 15 bp, Homo sapiens
ggtcaaatcccacac

SEQ ID NO: 1255599 - DNA, 15 bp, Homo sapiens
tggtcaaatcccaca

SEQ ID NO: 1255600 - DNA, 15 bp, Homo sapiens
ctggtcaaatcccac

SEQ ID NO: 1255601 - DNA, 15 bp, Homo sapiens
actggtcaaatccca

SEQ ID NO: 1255602 - DNA, 15 bp, Homo sapiens
tactggtcaaatccc

SEQ ID NO: 1255603 - DNA, 15 bp, Homo sapiens
atactggtcaaatcc

SEQ ID NO: 1255604 - DNA, 15 bp, Homo sapiens
tatactggtcaaatc

SEQ ID NO: 1255605 - DNA, 15 bp, Homo sapiens
ttatactggtcaaat

SEQ ID NO: 1255606 - DNA, 15 bp, Homo sapiens
cttatactggtcaaa

SEQ ID NO: 1255607 - DNA, 15 bp, Homo sapiens
acttatactggtcaa

SEQ ID NO: 1255608 - DNA, 15 bp, Homo sapiens
cacttatactggtca

SEQ ID NO: 1255609 - DNA, 15 bp, Homo sapiens
gcacttatactggtc

SEQ ID NO: 1255610 - DNA, 15 bp, Homo sapiens
cgcacttatactggt

SEQ ID NO: 1255611 - DNA, 15 bp, Homo sapiens
tcgcacttatactgg

SEQ ID NO: 1255612 - DNA, 15 bp, Homo sapiens
atcgcacttatactg

SEQ ID NO: 1255613 - DNA, 15 bp, Homo sapiens
aatcgcacttatact

SEQ ID NO: 1255614 - DNA, 15 bp, Homo sapiens
caatcgcacttatac

SEQ ID NO: 1255615 - DNA, 15 bp, Homo sapiens
acaatcgcacttata

SEQ ID NO: 1255616 - DNA, 15 bp, Homo sapiens
tacaatcgcacttat

SEQ ID NO: 1255617 - DNA, 15 bp, Homo sapiens
gtacaatcgcactta

SEQ ID NO: 1255618 - DNA, 15 bp, Homo sapiens
ggtacaatcgcactt

SEQ ID NO: 1255619 - DNA, 15 bp, Homo sapiens
gggtacaatcgcact

SEQ ID NO: 1255620 - DNA, 15 bp, Homo sapiens
cgggtacaatcgcac

SEQ ID NO: 1255621 - DNA, 15 bp, Homo sapiens
ccgggtacaatcgca

SEQ ID NO: 1255622 - DNA, 15 bp, Homo sapiens
tccgggtacaatcgc

SEQ ID NO: 1255623 - DNA, 15 bp, Homo sapiens
gtccgggtacaatcg

SEQ ID NO: 1255624 - DNA, 15 bp, Homo sapiens
tgtccgggtacaatc

SEQ ID NO: 1255625 - DNA, 15 bp, Homo sapiens
ctgtccgggtacaat

SEQ ID NO: 1255626 - DNA, 15 bp, Homo sapiens
cctgtccgggtacaa

SEQ ID NO: 1255627 - DNA, 15 bp, Homo sapiens
tcctgtccgggtaca

SEQ ID NO: 1255628 - DNA, 15 bp, Homo sapiens
atcctgtccgggtac

SEQ ID NO: 1255629 - DNA, 15 bp, Homo sapiens
aatcctgtccgggta

SEQ ID NO: 1255630 - DNA, 15 bp, Homo sapiens
gaatcctgtccgggt

SEQ ID NO: 1255631 - DNA, 15 bp, Homo sapiens
agaatcctgtccggg

SEQ ID NO: 1255632 - DNA, 15 bp, Homo sapiens
tagaatcctgtccgg

SEQ ID NO: 1255633 - DNA, 15 bp, Homo sapiens
atagaatcctgtccg

SEQ ID NO: 1255634 - DNA, 15 bp, Homo sapiens
catagaatcctgtcc

SEQ ID NO: 1255635 - DNA, 15 bp, Homo sapiens
ccatagaatcctgtc

SEQ ID NO: 1255636 - DNA, 15 bp, Homo sapiens
tccatagaatcctgt

SEQ ID NO: 1255637 - DNA, 15 bp, Homo sapiens
ctccatagaatcctg

SEQ ID NO: 1255638 - DNA, 15 bp, Homo sapiens
tctccatagaatcct

SEQ ID NO: 1255639 - DNA, 15 bp, Homo sapiens
ttctccatagaatcc

SEQ ID NO: 1255640 - DNA, 15 bp, Homo sapiens
tttctccatagaatc

SEQ ID NO: 1255641 - DNA, 15 bp, Homo sapiens
ttttctccatagaat

SEQ ID NO: 1255642 - DNA, 15 bp, Homo sapiens
gttttctccatagaa

SEQ ID NO: 1255643 - DNA, 15 bp, Homo sapiens
agttttctccataga

SEQ ID NO: 1255644 - DNA, 15 bp, Homo sapiens
cagttttctccatag

SEQ ID NO: 1255645 - DNA, 15 bp, Homo sapiens
gcagttttctccata

SEQ ID NO: 1255646 - DNA, 15 bp, Homo sapiens
agcagttttctccat

SEQ ID NO: 1255647 - DNA, 15 bp, Homo sapiens
gagcagttttctcca

SEQ ID NO: 1255648 - DNA, 15 bp, Homo sapiens
tgagcagttttctcc

SEQ ID NO: 1255649 - DNA, 15 bp, Homo sapiens
ttgagcagttttctc

SEQ ID NO: 1255650 - DNA, 15 bp, Homo sapiens
gttgagcagttttct

SEQ ID NO: 1255651 - DNA, 15 bp, Homo sapiens
tgttgagcagttttc

SEQ ID NO: 1255652 - DNA, 15 bp, Homo sapiens
gtgttgagcagtttt

SEQ ID NO: 1255653 - DNA, 15 bp, Homo sapiens
cgtgttgagcagttt

SEQ ID NO: 1255654 - DNA, 15 bp, Homo sapiens
acgtgttgagcagtt

SEQ ID NO: 1255655 - DNA, 15 bp, Homo sapiens
tacgtgttgagcagt

SEQ ID NO: 1255656 - DNA, 15 bp, Homo sapiens
ttacgtgttgagcag

SEQ ID NO: 1255657 - DNA, 15 bp, Homo sapiens
cttacgtgttgagca

SEQ ID NO: 1255658 - DNA, 15 bp, Homo sapiens
acttacgtgttgagc

SEQ ID NO: 1255659 - DNA, 15 bp, Homo sapiens
aacttacgtgttgag

SEQ ID NO: 1255660 - DNA, 15 bp, Homo sapiens
aaacttacgtgttga

SEQ ID NO: 1255661 - DNA, 15 bp, Homo sapiens
caaacttacgtgttg

SEQ ID NO: 1255662 - DNA, 15 bp, Homo sapiens
taaacatcagttaaa

SEQ ID NO: 1255663 - DNA, 15 bp, Homo sapiens
ataaacatcagttaa

SEQ ID NO: 1255664 - DNA, 15 bp, Homo sapiens
aataaacatcagtta

SEQ ID NO: 1255665 - DNA, 15 bp, Homo sapiens
aaataaacatcagtt

SEQ ID NO: 1255666 - DNA, 15 bp, Homo sapiens
taaataaacatcagt

SEQ ID NO: 1255667 - DNA, 15 bp, Homo sapiens
ataaataaacatcag

SEQ ID NO: 1255668 - DNA, 15 bp, Homo sapiens
aataaataaacatca

SEQ ID NO: 1255669 - DNA, 15 bp, Homo sapiens
aaataaataaacatc

SEQ ID NO: 1255670 - DNA, 15 bp, Homo sapiens
taaataaataaacat

SEQ ID NO: 1255671 - DNA, 15 bp, Homo sapiens
taaaaaaataaataa

SEQ ID NO: 1255672 - DNA, 15 bp, Homo sapiens
ctaaaaaaataaata

SEQ ID NO: 1255673 - DNA, 15 bp, Homo sapiens
tctaaaaaaataaat

SEQ ID NO: 1255674 - DNA, 15 bp, Homo sapiens
atctaaaaaaataaa

SEQ ID NO: 1255675 - DNA, 15 bp, Homo sapiens
tatctaaaaaaataa

SEQ ID NO: 1255676 - DNA, 15 bp, Homo sapiens
ttatctaaaaaaata

SEQ ID NO: 1255677 - DNA, 15 bp, Homo sapiens
attatctaaaaaaat

SEQ ID NO: 1255678 - DNA, 15 bp, Homo sapiens
aattatctaaaaaaa

SEQ ID NO: 1255679 - DNA, 15 bp, Homo sapiens
caattatctaaaaaa

SEQ ID NO: 1255680 - DNA, 15 bp, Homo sapiens
tcaattatctaaaaa

SEQ ID NO: 1255681 - DNA, 15 bp, Homo sapiens
atcaattatctaaaa

SEQ ID NO: 1255682 - DNA, 15 bp, Homo sapiens
catcaattatctaaa

SEQ ID NO: 1255683 - DNA, 15 bp, Homo sapiens
ccatcaattatctaa

SEQ ID NO: 1255684 - DNA, 15 bp, Homo sapiens
tccatcaattatcta

SEQ ID NO: 1255685 - DNA, 15 bp, Homo sapiens
ctccatcaattatct

SEQ ID NO: 1255686 - DNA, 15 bp, Homo sapiens
tctccatcaattatc

SEQ ID NO: 1255687 - DNA, 15 bp, Homo sapiens
ctctccatcaattat

SEQ ID NO: 1255688 - DNA, 15 bp, Homo sapiens
tctctccatcaatta

SEQ ID NO: 1255689 - DNA, 15 bp, Homo sapiens
atctctccatcaatt

SEQ ID NO: 1255690 - DNA, 15 bp, Homo sapiens
catctctccatcaat

SEQ ID NO: 1255691 - DNA, 15 bp, Homo sapiens
acatctctccatcaa

SEQ ID NO: 1255692 - DNA, 15 bp, Homo sapiens
tacatctctccatca

SEQ ID NO: 1255693 - DNA, 15 bp, Homo sapiens
atacatctctccatc

SEQ ID NO: 1255694 - DNA, 15 bp, Homo sapiens
gatacatctctccat

SEQ ID NO: 1255695 - DNA, 15 bp, Homo sapiens
ggatacatctctcca

SEQ ID NO: 1255696 - DNA, 15 bp, Homo sapiens
aggatacatctctcc

SEQ ID NO: 1255697 - DNA, 15 bp, Homo sapiens
gaggatacatctctc

SEQ ID NO: 1255698 - DNA, 15 bp, Homo sapiens
ggaggatacatctct

SEQ ID NO: 1255699 - DNA, 15 bp, Homo sapiens
gggaggatacatctc

SEQ ID NO: 1255700 - DNA, 15 bp, Homo sapiens
tgggaggatacatct

SEQ ID NO: 1255701 - DNA, 15 bp, Homo sapiens
gtgggaggatacatc

SEQ ID NO: 1255702 - DNA, 15 bp, Homo sapiens
tgtgggaggatacat

SEQ ID NO: 1255703 - DNA, 15 bp, Homo sapiens
ctgtgggaggataca

SEQ ID NO: 1255704 - DNA, 15 bp, Homo sapiens
actgtgggaggatac

SEQ ID NO: 1255705 - DNA, 15 bp, Homo sapiens
gactgtgggaggata

SEQ ID NO: 1255706 - DNA, 15 bp, Homo sapiens
tgactgtgggaggat

SEQ ID NO: 1255707 - DNA, 15 bp, Homo sapiens
ttgactgtgggagga

SEQ ID NO: 1255708 - DNA, 15 bp, Homo sapiens
tttgactgtgggagg

SEQ ID NO: 1255709 - DNA, 15 bp, Homo sapiens
ctttgactgtgggag

SEQ ID NO: 1255710 - DNA, 15 bp, Homo sapiens
tctttgactgtggga

SEQ ID NO: 1255711 - DNA, 15 bp, Homo sapiens
atctttgactgtggg

SEQ ID NO: 1255712 - DNA, 15 bp, Homo sapiens
tatctttgactgtgg

SEQ ID NO: 1255713 - DNA, 15 bp, Homo sapiens
gtatctttgactgtg

SEQ ID NO: 1255714 - DNA, 15 bp, Homo sapiens
agtatctttgactgt

SEQ ID NO: 1255715 - DNA, 15 bp, Homo sapiens
gagtatctttgactg

SEQ ID NO: 1255716 - DNA, 15 bp, Homo sapiens
tgagtatctttgact

SEQ ID NO: 1255717 - DNA, 15 bp, Homo sapiens
ctgagtatctttgac

SEQ ID NO: 1255718 - DNA, 15 bp, Homo sapiens
cctgagtatctttga

SEQ ID NO: 1255719 - DNA, 15 bp, Homo sapiens
gcctgagtatctttg

SEQ ID NO: 1255720 - DNA, 15 bp, Homo sapiens
tgcctgagtatcttt

SEQ ID NO: 1255721 - DNA, 15 bp, Homo sapiens
ctgcctgagtatctt

SEQ ID NO: 1255722 - DNA, 15 bp, Homo sapiens
tctgcctgagtatct

SEQ ID NO: 1255723 - DNA, 15 bp, Homo sapiens
ctctgcctgagtatc

SEQ ID NO: 1255724 - DNA, 15 bp, Homo sapiens
tctctgcctgagtat

SEQ ID NO: 1255725 - DNA, 15 bp, Homo sapiens
atctctgcctgagta

SEQ ID NO: 1255726 - DNA, 15 bp, Homo sapiens
catctctgcctgagt

SEQ ID NO: 1255727 - DNA, 15 bp, Homo sapiens
tcatctctgcctgag

SEQ ID NO: 1255728 - DNA, 15 bp, Homo sapiens
atcatctctgcctga

SEQ ID NO: 1255729 - DNA, 15 bp, Homo sapiens
gatcatctctgcctg

SEQ ID NO: 1255730 - DNA, 15 bp, Homo sapiens
agatcatctctgcct

SEQ ID NO: 1255731 - DNA, 15 bp, Homo sapiens
tagatcatctctgcc

SEQ ID NO: 1255732 - DNA, 15 bp, Homo sapiens
gtagatcatctctgc

SEQ ID NO: 1255733 - DNA, 15 bp, Homo sapiens
ggtagatcatctctg

SEQ ID NO: 1255734 - DNA, 15 bp, Homo sapiens
gggtagatcatctct

SEQ ID NO: 1255735 - DNA, 15 bp, Homo sapiens
agggtagatcatctc

SEQ ID NO: 1255736 - DNA, 15 bp, Homo sapiens
gagggtagatcatct

SEQ ID NO: 1255737 - DNA, 15 bp, Homo sapiens
ggagggtagatcatc

SEQ ID NO: 1255738 - DNA, 15 bp, Homo sapiens
aggagggtagatcat

SEQ ID NO: 1255739 - DNA, 15 bp, Homo sapiens
gaggagggtagatca

SEQ ID NO: 1255740 - DNA, 15 bp, Homo sapiens
tgaggagggtagatc

SEQ ID NO: 1255741 - DNA, 15 bp, Homo sapiens
ttgaggagggtagat

SEQ ID NO: 1255742 - DNA, 15 bp, Homo sapiens
cttgaggagggtaga

SEQ ID NO: 1255743 - DNA, 15 bp, Homo sapiens
acttgaggagggtag

SEQ ID NO: 1255744 - DNA, 15 bp, Homo sapiens
gacttgaggagggta

SEQ ID NO: 1255745 - DNA, 15 bp, Homo sapiens
ggacttgaggagggt

SEQ ID NO: 1255746 - DNA, 15 bp, Homo sapiens
gggacttgaggaggg

SEQ ID NO: 1255747 - DNA, 15 bp, Homo sapiens
agggacttgaggagg

SEQ ID NO: 1255748 - DNA, 15 bp, Homo sapiens
cagggacttgaggag

SEQ ID NO: 1255749 - DNA, 15 bp, Homo sapiens
tcagggacttgagga

SEQ ID NO: 1255750 - DNA, 15 bp, Homo sapiens
ctcagggacttgagg

SEQ ID NO: 1255751 - DNA, 15 bp, Homo sapiens
gctcagggacttgag

SEQ ID NO: 1255752 - DNA, 15 bp, Homo sapiens
tgctcagggacttga

SEQ ID NO: 1255753 - DNA, 15 bp, Homo sapiens
atgctcagggacttg

SEQ ID NO: 1255754 - DNA, 15 bp, Homo sapiens
gatgctcagggactt

SEQ ID NO: 1255755 - DNA, 15 bp, Homo sapiens
agatgctcagggact

SEQ ID NO: 1255756 - DNA, 15 bp, Homo sapiens
tagatgctcagggac

SEQ ID NO: 1255757 - DNA, 15 bp, Homo sapiens
gtagatgctcaggga

SEQ ID NO: 1255758 - DNA, 15 bp, Homo sapiens
cgtagatgctcaggg

SEQ ID NO: 1255759 - DNA, 15 bp, Homo sapiens
ccgtagatgctcagg

SEQ ID NO: 1255760 - DNA, 15 bp, Homo sapiens
accgtagatgctcag

SEQ ID NO: 1255761 - DNA, 15 bp, Homo sapiens
aaccgtagatgctca

SEQ ID NO: 1255762 - DNA, 15 bp, Homo sapiens
aaaccgtagatgctc

SEQ ID NO: 1255763 - DNA, 15 bp, Homo sapiens
caaaccgtagatgct

SEQ ID NO: 1255764 - DNA, 15 bp, Homo sapiens
gcaaaccgtagatgc

SEQ ID NO: 1255765 - DNA, 15 bp, Homo sapiens
agcaaaccgtagatg

SEQ ID NO: 1255766 - DNA, 15 bp, Homo sapiens
cagcaaaccgtagat

SEQ ID NO: 1255767 - DNA, 15 bp, Homo sapiens
acagcaaaccgtaga

SEQ ID NO: 1255768 - DNA, 15 bp, Homo sapiens
cacagcaaaccgtag

SEQ ID NO: 1255769 - DNA, 15 bp, Homo sapiens
ccacagcaaaccgta

SEQ ID NO: 1255770 - DNA, 15 bp, Homo sapiens
cccacagcaaaccgt

SEQ ID NO: 1255771 - DNA, 15 bp, Homo sapiens
ccccacagcaaaccg

SEQ ID NO: 1255772 - DNA, 15 bp, Homo sapiens
gccccacagcaaacc

SEQ ID NO: 1255773 - DNA, 15 bp, Homo sapiens
tgccccacagcaaac

SEQ ID NO: 1255774 - DNA, 15 bp, Homo sapiens
ctgccccacagcaaa

SEQ ID NO: 1255775 - DNA, 15 bp, Homo sapiens
cctgccccacagcaa

SEQ ID NO: 1255776 - DNA, 15 bp, Homo sapiens
tcctgccccacagca

SEQ ID NO: 1255777 - DNA, 15 bp, Homo sapiens
ctcctgccccacagc

SEQ ID NO: 1255778 - DNA, 15 bp, Homo sapiens
cctcctgccccacag

SEQ ID NO: 1255779 - DNA, 15 bp, Homo sapiens
acctcctgccccaca

SEQ ID NO: 1255780 - DNA, 15 bp, Homo sapiens
gacctcctgccccac

SEQ ID NO: 1255781 - DNA, 15 bp, Homo sapiens
agacctcctgcccca

SEQ ID NO: 1255782 - DNA, 15 bp, Homo sapiens
aagacctcctgcccc

SEQ ID NO: 1255783 - DNA, 15 bp, Homo sapiens
aaagacctcctgccc

SEQ ID NO: 1255784 - DNA, 15 bp, Homo sapiens
caaagacctcctgcc

SEQ ID NO: 1255785 - DNA, 15 bp, Homo sapiens
ccaaagacctcctgc

SEQ ID NO: 1255786 - DNA, 15 bp, Homo sapiens
accaaagacctcctg

SEQ ID NO: 1255787 - DNA, 15 bp, Homo sapiens
gaccaaagacctcct

SEQ ID NO: 1255788 - DNA, 15 bp, Homo sapiens
agaccaaagacctcc

SEQ ID NO: 1255789 - DNA, 15 bp, Homo sapiens
cagaccaaagacctc

SEQ ID NO: 1255790 - DNA, 15 bp, Homo sapiens
ccagaccaaagacct

SEQ ID NO: 1255791 - DNA, 15 bp, Homo sapiens
accagaccaaagacc

SEQ ID NO: 1255792 - DNA, 15 bp, Homo sapiens
caccagaccaaagac

SEQ ID NO: 1255793 - DNA, 15 bp, Homo sapiens
gcaccagaccaaaga

SEQ ID NO: 1255794 - DNA, 15 bp, Homo sapiens
ggcaccagaccaaag

SEQ ID NO: 1255795 - DNA, 15 bp, Homo sapiens
aggcaccagaccaaa

SEQ ID NO: 1255796 - DNA, 15 bp, Homo sapiens
caggcaccagaccaa

SEQ ID NO: 1255797 - DNA, 15 bp, Homo sapiens
ccaggcaccagacca

SEQ ID NO: 1255798 - DNA, 15 bp, Homo sapiens
accaggcaccagacc

SEQ ID NO: 1255799 - DNA, 15 bp, Homo sapiens
gaccaggcaccagac

SEQ ID NO: 1255800 - DNA, 15 bp, Homo sapiens
agaccaggcaccaga

SEQ ID NO: 1255801 - DNA, 15 bp, Homo sapiens
cagaccaggcaccag

SEQ ID NO: 1255802 - DNA, 15 bp, Homo sapiens
tcagaccaggcacca

SEQ ID NO: 1255803 - DNA, 15 bp, Homo sapiens
atcagaccaggcacc

SEQ ID NO: 1255804 - DNA, 15 bp, Homo sapiens
catcagaccaggcac

SEQ ID NO: 1255805 - DNA, 15 bp, Homo sapiens
tcatcagaccaggca

SEQ ID NO: 1255806 - DNA, 15 bp, Homo sapiens
atcatcagaccaggc

SEQ ID NO: 1255807 - DNA, 15 bp, Homo sapiens
catcatcagaccagg

SEQ ID NO: 1255808 - DNA, 15 bp, Homo sapiens
acatcatcagaccag

SEQ ID NO: 1255809 - DNA, 15 bp, Homo sapiens
tacatcatcagacca

SEQ ID NO: 1255810 - DNA, 15 bp, Homo sapiens
atacatcatcagacc

SEQ ID NO: 1255811 - DNA, 15 bp, Homo sapiens
catacatcatcagac

SEQ ID NO: 1255812 - DNA, 15 bp, Homo sapiens
gcatacatcatcaga

SEQ ID NO: 1255813 - DNA, 15 bp, Homo sapiens
ggcatacatcatcag

SEQ ID NO: 1255814 - DNA, 15 bp, Homo sapiens
tggcatacatcatca

SEQ ID NO: 1255815 - DNA, 15 bp, Homo sapiens
gtggcatacatcatc

SEQ ID NO: 1255816 - DNA, 15 bp, Homo sapiens
tgtggcatacatcat

SEQ ID NO: 1255817 - DNA, 15 bp, Homo sapiens
ttgtggcatacatca

SEQ ID NO: 1255818 - DNA, 15 bp, Homo sapiens
attgtggcatacatc

SEQ ID NO: 1255819 - DNA, 15 bp, Homo sapiens
gattgtggcatacat

SEQ ID NO: 1255820 - DNA, 15 bp, Homo sapiens
agattgtggcataca

SEQ ID NO: 1255821 - DNA, 15 bp, Homo sapiens
cagattgtggcatac

SEQ ID NO: 1255822 - DNA, 15 bp, Homo sapiens
ccagattgtggcata

SEQ ID NO: 1255823 - DNA, 15 bp, Homo sapiens
gccagattgtggcat

SEQ ID NO: 1255824 - DNA, 15 bp, Homo sapiens
agccagattgtggca

SEQ ID NO: 1255825 - DNA, 15 bp, Homo sapiens
cagccagattgtggc

SEQ ID NO: 1255826 - DNA, 15 bp, Homo sapiens
gcagccagattgtgg

SEQ ID NO: 1255827 - DNA, 15 bp, Homo sapiens
cgcagccagattgtg

SEQ ID NO: 1255828 - DNA, 15 bp, Homo sapiens
ccgcagccagattgt

SEQ ID NO: 1255829 - DNA, 15 bp, Homo sapiens
cccgcagccagattg

SEQ ID NO: 1255830 - DNA, 15 bp, Homo sapiens
tcccgcagccagatt

SEQ ID NO: 1255831 - DNA, 15 bp, Homo sapiens
ttcccgcagccagat

SEQ ID NO: 1255832 - DNA, 15 bp, Homo sapiens
gttcccgcagccaga

SEQ ID NO: 1255833 - DNA, 15 bp, Homo sapiens
tgttcccgcagccag

SEQ ID NO: 1255834 - DNA, 15 bp, Homo sapiens
gtgttcccgcagcca

SEQ ID NO: 1255835 - DNA, 15 bp, Homo sapiens
tgtgttcccgcagcc

SEQ ID NO: 1255836 - DNA, 15 bp, Homo sapiens
ttgtgttcccgcagc

SEQ ID NO: 1255837 - DNA, 15 bp, Homo sapiens
gttgtgttcccgcag

SEQ ID NO: 1255838 - DNA, 15 bp, Homo sapiens
tgttgtgttcccgca

SEQ ID NO: 1255839 - DNA, 15 bp, Homo sapiens
ctgttgtgttcccgc

SEQ ID NO: 1255840 - DNA, 15 bp, Homo sapiens
tctgttgtgttcccg

SEQ ID NO: 1255841 - DNA, 15 bp, Homo sapiens
ctctgttgtgttccc

SEQ ID NO: 1255842 - DNA, 15 bp, Homo sapiens
actctgttgtgttcc

SEQ ID NO: 1255843 - DNA, 15 bp, Homo sapiens
tactctgttgtgttc

SEQ ID NO: 1255844 - DNA, 15 bp, Homo sapiens
atactctgttgtgtt

SEQ ID NO: 1255845 - DNA, 15 bp, Homo sapiens
catactctgttgtgt

SEQ ID NO: 1255846 - DNA, 15 bp, Homo sapiens
gcatactctgttgtg

SEQ ID NO: 1255847 - DNA, 15 bp, Homo sapiens
cgcatactctgttgt

SEQ ID NO: 1255848 - DNA, 15 bp, Homo sapiens
tcgcatactctgttg

SEQ ID NO: 1255849 - DNA, 15 bp, Homo sapiens
atcgcatactctgtt

SEQ ID NO: 1255850 - DNA, 15 bp, Homo sapiens
catcgcatactctgt

SEQ ID NO: 1255851 - DNA, 15 bp, Homo sapiens
acatcgcatactctg

SEQ ID NO: 1255852 - DNA, 15 bp, Homo sapiens
cacatcgcatactct

SEQ ID NO: 1255853 - DNA, 15 bp, Homo sapiens
gcacatcgcatactc

SEQ ID NO: 1255854 - DNA, 15 bp, Homo sapiens
agcacatcgcatact

SEQ ID NO: 1255855 - DNA, 15 bp, Homo sapiens
aagcacatcgcatac

SEQ ID NO: 1255856 - DNA, 15 bp, Homo sapiens
taagcacatcgcata

SEQ ID NO: 1255857 - DNA, 15 bp, Homo sapiens
ttaagcacatcgcat

SEQ ID NO: 1255858 - DNA, 15 bp, Homo sapiens
tttaagcacatcgca

SEQ ID NO: 1255859 - DNA, 15 bp, Homo sapiens
gtttaagcacatcgc

SEQ ID NO: 1255860 - DNA, 15 bp, Homo sapiens
tgtttaagcacatcg

SEQ ID NO: 1255861 - DNA, 15 bp, Homo sapiens
ctgtttaagcacatc

SEQ ID NO: 1255862 - DNA, 15 bp, Homo sapiens
cctgtttaagcacat

SEQ ID NO: 1255863 - DNA, 15 bp, Homo sapiens
tcctgtttaagcaca

SEQ ID NO: 1255864 - DNA, 15 bp, Homo sapiens
ctcctgtttaagcac

SEQ ID NO: 1255865 - DNA, 15 bp, Homo sapiens
gctcctgtttaagca

SEQ ID NO: 1255866 - DNA, 15 bp, Homo sapiens
tgctcctgtttaagc

SEQ ID NO: 1255867 - DNA, 15 bp, Homo sapiens
atgctcctgtttaag

SEQ ID NO: 1255868 - DNA, 15 bp, Homo sapiens
gatgctcctgtttaa

SEQ ID NO: 1255869 - DNA, 15 bp, Homo sapiens
ggatgctcctgttta

SEQ ID NO: 1255870 - DNA, 15 bp, Homo sapiens
aggatgctcctgttt

SEQ ID NO: 1255871 - DNA, 15 bp, Homo sapiens
caggatgctcctgtt

SEQ ID NO: 1255872 - DNA, 15 bp, Homo sapiens
tcaggatgctcctgt

SEQ ID NO: 1255873 - DNA, 15 bp, Homo sapiens
attcaggatgctcct

SEQ ID NO: 1255874 - DNA, 15 bp, Homo sapiens
cattcaggatgctcc

SEQ ID NO: 1255875 - DNA, 15 bp, Homo sapiens
ccattcaggatgctc

SEQ ID NO: 1255876 - DNA, 15 bp, Homo sapiens
cccattcaggatgct

SEQ ID NO: 1255877 - DNA, 15 bp, Homo sapiens
ccccattcaggatgc

SEQ ID NO: 1255878 - DNA, 15 bp, Homo sapiens
accccattcaggatg

SEQ ID NO: 1255879 - DNA, 15 bp, Homo sapiens
caccccattcaggat

SEQ ID NO: 1255880 - DNA, 15 bp, Homo sapiens
tcaccccattcagga

SEQ ID NO: 1255881 - DNA, 15 bp, Homo sapiens
atcaccccattcagg

SEQ ID NO: 1255882 - DNA, 15 bp, Homo sapiens
catcaccccattcag

SEQ ID NO: 1255883 - DNA, 15 bp, Homo sapiens
tcatcaccccattca

SEQ ID NO: 1255884 - DNA, 15 bp, Homo sapiens
ctcatcaccccattc

SEQ ID NO: 1255885 - DNA, 15 bp, Homo sapiens
gctcatcaccccatt

SEQ ID NO: 1255886 - DNA, 15 bp, Homo sapiens
tgctcatcaccccat

SEQ ID NO: 1255887 - DNA, 15 bp, Homo sapiens
ctgctcatcacccca

SEQ ID NO: 1255888 - DNA, 15 bp, Homo sapiens
actgctcatcacccc

SEQ ID NO: 1255889 - DNA, 15 bp, Homo sapiens
aactgctcatcaccc

SEQ ID NO: 1255890 - DNA, 15 bp, Homo sapiens
caactgctcatcacc

SEQ ID NO: 1255891 - DNA, 15 bp, Homo sapiens
acaactgctcatcac

SEQ ID NO: 1255892 - DNA, 15 bp, Homo sapiens
aacaactgctcatca

SEQ ID NO: 1255893 - DNA, 15 bp, Homo sapiens
gaacaactgctcatc

SEQ ID NO: 1255894 - DNA, 15 bp, Homo sapiens
ggaacaactgctcat

SEQ ID NO: 1255895 - DNA, 15 bp, Homo sapiens
tggaacaactgctca

SEQ ID NO: 1255896 - DNA, 15 bp, Homo sapiens
ctggaacaactgctc

SEQ ID NO: 1255897 - DNA, 15 bp, Homo sapiens
tctggaacaactgct

SEQ ID NO: 1255898 - DNA, 15 bp, Homo sapiens
gtctggaacaactgc

SEQ ID NO: 1255899 - DNA, 15 bp, Homo sapiens
tgtctggaacaactg

SEQ ID NO: 1255900 - DNA, 15 bp, Homo sapiens
ttgtctggaacaact

SEQ ID NO: 1255901 - DNA, 15 bp, Homo sapiens
cttgtctggaacaac

SEQ ID NO: 1255902 - DNA, 15 bp, Homo sapiens
gcttgtctggaacaa

SEQ ID NO: 1255903 - DNA, 15 bp, Homo sapiens
tgcttgtctggaaca

SEQ ID NO: 1255904 - DNA, 15 bp, Homo sapiens
ctgcttgtctggaac

SEQ ID NO: 1255905 - DNA, 15 bp, Homo sapiens
cctgcttgtctggaa

SEQ ID NO: 1255906 - DNA, 15 bp, Homo sapiens
gcctgcttgtctgga

SEQ ID NO: 1255907 - DNA, 15 bp, Homo sapiens
agcctgcttgtctgg

SEQ ID NO: 1255908 - DNA, 15 bp, Homo sapiens
tagcctgcttgtctg

SEQ ID NO: 1255909 - DNA, 15 bp, Homo sapiens
ttagcctgcttgtct

SEQ ID NO: 1255910 - DNA, 15 bp, Homo sapiens
attagcctgcttgtc

SEQ ID NO: 1255911 - DNA, 15 bp, Homo sapiens
tattagcctgcttgt

SEQ ID NO: 1255912 - DNA, 15 bp, Homo sapiens
gtattagcctgcttg

SEQ ID NO: 1255913 - DNA, 15 bp, Homo sapiens
agtattagcctgctt

SEQ ID NO: 1255914 - DNA, 15 bp, Homo sapiens
cagtattagcctgct

SEQ ID NO: 1255915 - DNA, 15 bp, Homo sapiens
tcagtattagcctgc

SEQ ID NO: 1255916 - DNA, 15 bp, Homo sapiens
atcagtattagcctg

SEQ ID NO: 1255917 - DNA, 15 bp, Homo sapiens
tatcagtattagcct

SEQ ID NO: 1255918 - DNA, 15 bp, Homo sapiens
ctatcagtattagcc

SEQ ID NO: 1255919 - DNA, 15 bp, Homo sapiens
cctatcagtattagc

SEQ ID NO: 1255920 - DNA, 15 bp, Homo sapiens
acctatcagtattag

SEQ ID NO: 1255921 - DNA, 15 bp, Homo sapiens
tacctatcagtatta

SEQ ID NO: 1255922 - DNA, 15 bp, Homo sapiens
ttacctatcagtatt

SEQ ID NO: 1255923 - DNA, 15 bp, Homo sapiens
tttacctatcagtat

SEQ ID NO: 1255924 - DNA, 15 bp, Homo sapiens
gtttacctatcagta

SEQ ID NO: 1255925 - DNA, 15 bp, Homo sapiens
tgtttacctatcagt

SEQ ID NO: 1255926 - DNA, 15 bp, Homo sapiens
ttgtttacctatcag

SEQ ID NO: 1255927 - DNA, 15 bp, Homo sapiens
cttgtttacctatca

SEQ ID NO: 1255928 - DNA, 15 bp, Homo sapiens
tcttgtttacctatc

SEQ ID NO: 1255929 - DNA, 15 bp, Homo sapiens
ttcttgtttacctat

SEQ ID NO: 1255930 - DNA, 15 bp, Homo sapiens
tttcttgtttaccta

SEQ ID NO: 1255931 - DNA, 15 bp, Homo sapiens
ttttcttgtttacct

SEQ ID NO: 1255932 - DNA, 15 bp, Homo sapiens
attttcttgtttacc

SEQ ID NO: 1255933 - DNA, 15 bp, Homo sapiens
cattttcttgtttac

SEQ ID NO: 1255934 - DNA, 15 bp, Homo sapiens
tcattttcttgttta

SEQ ID NO: 1255935 - DNA, 15 bp, Homo sapiens
atcattttcttgttt

SEQ ID NO: 1255936 - DNA, 15 bp, Homo sapiens
aatcattttcttgtt

SEQ ID NO: 1255937 - DNA, 15 bp, Homo sapiens
aaatcattttcttgt

SEQ ID NO: 1255938 - DNA, 15 bp, Homo sapiens
taaatcattttcttg

SEQ ID NO: 1255939 - DNA, 15 bp, Homo sapiens
ataaatcattttctt

SEQ ID NO: 1255940 - DNA, 15 bp, Homo sapiens
tataaatcattttct

SEQ ID NO: 1255941 - DNA, 15 bp, Homo sapiens
atataaatcattttc

SEQ ID NO: 1255942 - DNA, 15 bp, Homo sapiens
tatataaatcatttt

SEQ ID NO: 1255943 - DNA, 15 bp, Homo sapiens
ttatataaatcattt

SEQ ID NO: 1255944 - DNA, 15 bp, Homo sapiens
tttatataaatcatt

SEQ ID NO: 1255945 - DNA, 15 bp, Homo sapiens
ttttatataaatcat

SEQ ID NO: 1255946 - DNA, 15 bp, Homo sapiens
gttttatataaatca

SEQ ID NO: 1255947 - DNA, 15 bp, Homo sapiens
ggttttatataaatc

SEQ ID NO: 1255948 - DNA, 15 bp, Homo sapiens
gggttttatataaat

SEQ ID NO: 1255949 - DNA, 15 bp, Homo sapiens
agggttttatataaa

SEQ ID NO: 1255950 - DNA, 15 bp, Homo sapiens
gagggttttatataa

SEQ ID NO: 1255951 - DNA, 15 bp, Homo sapiens
agagggttttatata

SEQ ID NO: 1255952 - DNA, 15 bp, Homo sapiens
aagagggttttatat

SEQ ID NO: 1255953 - DNA, 15 bp, Homo sapiens
gaagagggttttata

SEQ ID NO: 1255954 - DNA, 15 bp, Homo sapiens
ggaagagggttttat

SEQ ID NO: 1255955 - DNA, 15 bp, Homo sapiens
gggaagagggtttta

SEQ ID NO: 1255956 - DNA, 15 bp, Homo sapiens
ggggaagagggtttt

SEQ ID NO: 1255957 - DNA, 15 bp, Homo sapiens
tggggaagagggttt

SEQ ID NO: 1255958 - DNA, 15 bp, Homo sapiens
ctggggaagagggtt

SEQ ID NO: 1255959 - DNA, 15 bp, Homo sapiens
cctggggaagagggt

SEQ ID NO: 1255960 - DNA, 15 bp, Homo sapiens
ccctggggaagaggg

SEQ ID NO: 1255961 - DNA, 15 bp, Homo sapiens
tccctggggaagagg

SEQ ID NO: 1255962 - DNA, 15 bp, Homo sapiens
ttccctggggaagag

SEQ ID NO: 1255963 - DNA, 15 bp, Homo sapiens
tttccctggggaaga

SEQ ID NO: 1255964 - DNA, 15 bp, Homo sapiens
ttttccctggggaag

SEQ ID NO: 1255965 - DNA, 15 bp, Homo sapiens
attttccctggggaa

SEQ ID NO: 1255966 - DNA, 15 bp, Homo sapiens
aattttccctgggga

SEQ ID NO: 1255967 - DNA, 15 bp, Homo sapiens
taattttccctgggg

SEQ ID NO: 1255968 - DNA, 15 bp, Homo sapiens
ctaattttccctggg

SEQ ID NO: 1255969 - DNA, 15 bp, Homo sapiens
actaattttccctgg

SEQ ID NO: 1255970 - DNA, 15 bp, Homo sapiens
cactaattttccctg

SEQ ID NO: 1255971 - DNA, 15 bp, Homo sapiens
acactaattttccct

SEQ ID NO: 1255972 - DNA, 15 bp, Homo sapiens
cacactaattttccc

SEQ ID NO: 1255973 - DNA, 15 bp, Homo sapiens
gcacactaattttcc

SEQ ID NO: 1255974 - DNA, 15 bp, Homo sapiens
agcacactaattttc

SEQ ID NO: 1255975 - DNA, 15 bp, Homo sapiens
tagcacactaatttt

SEQ ID NO: 1255976 - DNA, 15 bp, Homo sapiens
atagcacactaattt

SEQ ID NO: 1255977 - DNA, 15 bp, Homo sapiens
gatagcacactaatt

SEQ ID NO: 1255978 - DNA, 15 bp, Homo sapiens
agatagcacactaat

SEQ ID NO: 1255979 - DNA, 15 bp, Homo sapiens
aagatagcacactaa

SEQ ID NO: 1255980 - DNA, 15 bp, Homo sapiens
aaagatagcacacta

SEQ ID NO: 1255981 - DNA, 15 bp, Homo sapiens
caaagatagcacact

SEQ ID NO: 1255982 - DNA, 15 bp, Homo sapiens
acaaagatagcacac

SEQ ID NO: 1255983 - DNA, 15 bp, Homo sapiens
aacaaagatagcaca

SEQ ID NO: 1255984 - DNA, 15 bp, Homo sapiens
taacaaagatagcac

SEQ ID NO: 1255985 - DNA, 15 bp, Homo sapiens
ataacaaagatagca

SEQ ID NO: 1255986 - DNA, 15 bp, Homo sapiens
cataacaaagatagc

SEQ ID NO: 1255987 - DNA, 15 bp, Homo sapiens
acataacaaagatag

SEQ ID NO: 1255988 - DNA, 15 bp, Homo sapiens
aacataacaaagata

SEQ ID NO: 1255989 - DNA, 15 bp, Homo sapiens
aaacataacaaagat

SEQ ID NO: 1255990 - DNA, 15 bp, Homo sapiens
aaaacataacaaaga

SEQ ID NO: 1255991 - DNA, 15 bp, Homo sapiens
caaaacataacaaag

SEQ ID NO: 1255992 - DNA, 15 bp, Homo sapiens
tcaaaacataacaaa

SEQ ID NO: 1255993 - DNA, 15 bp, Homo sapiens
ctcaaaacataacaa

SEQ ID NO: 1255994 - DNA, 15 bp, Homo sapiens
actcaaaacataaca

SEQ ID NO: 1255995 - DNA, 15 bp, Homo sapiens
tactcaaaacataac

SEQ ID NO: 1255996 - DNA, 15 bp, Homo sapiens
ttactcaaaacataa

SEQ ID NO: 1255997 - DNA, 15 bp, Homo sapiens
tttactcaaaacata

SEQ ID NO: 1255998 - DNA, 15 bp, Homo sapiens
atttactcaaaacat

SEQ ID NO: 1255999 - DNA, 15 bp, Homo sapiens
catttactcaaaaca

SEQ ID NO: 1256000 - DNA, 15 bp, Homo sapiens
tcatttactcaaaac

SEQ ID NO: 1256001 - DNA, 15 bp, Homo sapiens
gtcatttactcaaaa

SEQ ID NO: 1256002 - DNA, 15 bp, Homo sapiens
tgtcatttactcaaa

SEQ ID NO: 1256003 - DNA, 15 bp, Homo sapiens
ttgtcatttactcaa

SEQ ID NO: 1256004 - DNA, 15 bp, Homo sapiens
cttgtcatttactca

SEQ ID NO: 1256005 - DNA, 15 bp, Homo sapiens
tcttgtcatttactc

SEQ ID NO: 1256006 - DNA, 15 bp, Homo sapiens
atcttgtcatttact

SEQ ID NO: 1256007 - DNA, 15 bp, Homo sapiens
catcttgtcatttac

SEQ ID NO: 1256008 - DNA, 15 bp, Homo sapiens
acatcttgtcattta

SEQ ID NO: 1256009 - DNA, 15 bp, Homo sapiens
cagaaggggatgcca

SEQ ID NO: 1256010 - DNA, 15 bp, Homo sapiens
gcagaaggggatgcc

SEQ ID NO: 1256011 - DNA, 15 bp, Homo sapiens
ggcagaaggggatgc

SEQ ID NO: 1256012 - DNA, 15 bp, Homo sapiens
aggcagaaggggatg

SEQ ID NO: 1256013 - DNA, 15 bp, Homo sapiens
caggcagaaggggat

SEQ ID NO: 1256014 - DNA, 15 bp, Homo sapiens
tcaggcagaagggga

SEQ ID NO: 1256015 - DNA, 15 bp, Homo sapiens
gtcaggcagaagggg

SEQ ID NO: 1256016 - DNA, 15 bp, Homo sapiens
tgtcaggcagaaggg

SEQ ID NO: 1256017 - DNA, 15 bp, Homo sapiens
gtgtcaggcagaagg

SEQ ID NO: 1256018 - DNA, 15 bp, Homo sapiens
ggtgtcaggcagaag

SEQ ID NO: 1256019 - DNA, 15 bp, Homo sapiens
aggtgtcaggcagaa

SEQ ID NO: 1256020 - DNA, 15 bp, Homo sapiens
aaggtgtcaggcaga

SEQ ID NO: 1256021 - DNA, 15 bp, Homo sapiens
aaaggtgtcaggcag

SEQ ID NO: 1256022 - DNA, 15 bp, Homo sapiens
gaaaggtgtcaggca

SEQ ID NO: 1256023 - DNA, 15 bp, Homo sapiens
tgaaaggtgtcaggc

SEQ ID NO: 1256024 - DNA, 15 bp, Homo sapiens
ttgaaaggtgtcagg

SEQ ID NO: 1256025 - DNA, 15 bp, Homo sapiens
tttgaaaggtgtcag

SEQ ID NO: 1256026 - DNA, 15 bp, Homo sapiens
atttgaaaggtgtca

SEQ ID NO: 1256027 - DNA, 15 bp, Homo sapiens
aatttgaaaggtgtc

SEQ ID NO: 1256028 - DNA, 15 bp, Homo sapiens
gaatttgaaaggtgt

SEQ ID NO: 1256029 - DNA, 15 bp, Homo sapiens
tgaatttgaaaggtg

SEQ ID NO: 1256030 - DNA, 15 bp, Homo sapiens
atgaatttgaaaggt

SEQ ID NO: 1256031 - DNA, 15 bp, Homo sapiens
catgaatttgaaagg

SEQ ID NO: 1256032 - DNA, 15 bp, Homo sapiens
tcatgaatttgaaag

SEQ ID NO: 1256033 - DNA, 15 bp, Homo sapiens
gtcatgaatttgaaa

SEQ ID NO: 1256034 - DNA, 15 bp, Homo sapiens
ggtcatgaatttgaa

SEQ ID NO: 1256035 - DNA, 15 bp, Homo sapiens
tggtcatgaatttga

SEQ ID NO: 1256036 - DNA, 15 bp, Homo sapiens
ctggtcatgaatttg

SEQ ID NO: 1256037 - DNA, 15 bp, Homo sapiens
tctggtcatgaattt

SEQ ID NO: 1256038 - DNA, 15 bp, Homo sapiens
ttctggtcatgaatt

SEQ ID NO: 1256039 - DNA, 15 bp, Homo sapiens
tttctggtcatgaat

SEQ ID NO: 1256040 - DNA, 15 bp, Homo sapiens
atttctggtcatgaa

SEQ ID NO: 1256041 - DNA, 15 bp, Homo sapiens
tatttctggtcatga

SEQ ID NO: 1256042 - DNA, 15 bp, Homo sapiens
gtatttctggtcatg

SEQ ID NO: 1256043 - DNA, 15 bp, Homo sapiens
tgtatttctggtcat

SEQ ID NO: 1256044 - DNA, 15 bp, Homo sapiens
ttgtatttctggtca

SEQ ID NO: 1256045 - DNA, 15 bp, Homo sapiens
agttgtatttctggt

SEQ ID NO: 1256046 - DNA, 15 bp, Homo sapiens
tagttgtatttctgg

SEQ ID NO: 1256047 - DNA, 15 bp, Homo sapiens
gatagttgtatttct

SEQ ID NO: 1256048 - DNA, 15 bp, Homo sapiens
tgatagttgtatttc

SEQ ID NO: 1256049 - DNA, 15 bp, Homo sapiens
ttgatagttgtattt

SEQ ID NO: 1256050 - DNA, 15 bp, Homo sapiens
gttgatagttgtatt

SEQ ID NO: 1256051 - DNA, 15 bp, Homo sapiens
tgttgatagttgtat

SEQ ID NO: 1256052 - DNA, 15 bp, Homo sapiens
ctgttgatagttgta

SEQ ID NO: 1256053 - DNA, 15 bp, Homo sapiens
actgttgatagttgt

SEQ ID NO: 1256054 - DNA, 15 bp, Homo sapiens
aactgttgatagttg

SEQ ID NO: 1256055 - DNA, 15 bp, Homo sapiens
aaactgttgatagtt

SEQ ID NO: 1256056 - DNA, 15 bp, Homo sapiens
taaactgttgatagt

SEQ ID NO: 1256057 - DNA, 15 bp, Homo sapiens
ataaactgttgatag

SEQ ID NO: 1256058 - DNA, 15 bp, Homo sapiens
gataaactgttgata

SEQ ID NO: 1256059 - DNA, 15 bp, Homo sapiens
agataaactgttgat

SEQ ID NO: 1256060 - DNA, 15 bp, Homo sapiens
tagataaactgttga

SEQ ID NO: 1256061 - DNA, 15 bp, Homo sapiens
gtagataaactgttg

SEQ ID NO: 1256062 - DNA, 15 bp, Homo sapiens
tgtagataaactgtt

SEQ ID NO: 1256063 - DNA, 15 bp, Homo sapiens
ttgtagataaactgt

SEQ ID NO: 1256064 - DNA, 15 bp, Homo sapiens
gttgtagataaactg

SEQ ID NO: 1256065 - DNA, 15 bp, Homo sapiens
tgttgtagataaact

SEQ ID NO: 1256066 - DNA, 15 bp, Homo sapiens
ttgttgtagataaac

SEQ ID NO: 1256067 - DNA, 15 bp, Homo sapiens
gttgttgtagataaa

SEQ ID NO: 1256068 - DNA, 15 bp, Homo sapiens
agttgttgtagataa

SEQ ID NO: 1256069 - DNA, 15 bp, Homo sapiens
gagttgttgtagata

SEQ ID NO: 1256070 - DNA, 15 bp, Homo sapiens
agagttgttgtagat

SEQ ID NO: 1256071 - DNA, 15 bp, Homo sapiens
tagagttgttgtaga

SEQ ID NO: 1256072 - DNA, 15 bp, Homo sapiens
atagagttgttgtag

SEQ ID NO: 1256073 - DNA, 15 bp, Homo sapiens
tatagagttgttgta

SEQ ID NO: 1256074 - DNA, 15 bp, Homo sapiens
atatagagttgttgt

SEQ ID NO: 1256075 - DNA, 15 bp, Homo sapiens
aatatagagttgttg

SEQ ID NO: 1256076 - DNA, 15 bp, Homo sapiens
caatatagagttgtt

SEQ ID NO: 1256077 - DNA, 15 bp, Homo sapiens
gcaatatagagttgt

SEQ ID NO: 1256078 - DNA, 15 bp, Homo sapiens
agcaatatagagttg

SEQ ID NO: 1256079 - DNA, 15 bp, Homo sapiens
cagcaatatagagtt

SEQ ID NO: 1256080 - DNA, 15 bp, Homo sapiens
ccagcaatatagagt

SEQ ID NO: 1256081 - DNA, 15 bp, Homo sapiens
tccagcaatatagag

SEQ ID NO: 1256082 - DNA, 15 bp, Homo sapiens
ttccagcaatataga

SEQ ID NO: 1256083 - DNA, 15 bp, Homo sapiens
gttccagcaatatag

SEQ ID NO: 1256084 - DNA, 15 bp, Homo sapiens
tgttccagcaatata

SEQ ID NO: 1256085 - DNA, 15 bp, Homo sapiens
atgttccagcaatat

SEQ ID NO: 1256086 - DNA, 15 bp, Homo sapiens
catgttccagcaata

SEQ ID NO: 1256087 - DNA, 15 bp, Homo sapiens
ccatgttccagcaat

SEQ ID NO: 1256088 - DNA, 15 bp, Homo sapiens
tccatgttccagcaa

SEQ ID NO: 1256089 - DNA, 15 bp, Homo sapiens
ttccatgttccagca

SEQ ID NO: 1256090 - DNA, 15 bp, Homo sapiens
attccatgttccagc

SEQ ID NO: 1256091 - DNA, 15 bp, Homo sapiens
aattccatgttccag

SEQ ID NO: 1256092 - DNA, 15 bp, Homo sapiens
taattccatgttcca

SEQ ID NO: 1256093 - DNA, 15 bp, Homo sapiens
gtaattccatgttcc

SEQ ID NO: 1256094 - DNA, 15 bp, Homo sapiens
ggtaattccatgttc

SEQ ID NO: 1256095 - DNA, 15 bp, Homo sapiens
gggtaattccatgtt

SEQ ID NO: 1256096 - DNA, 15 bp, Homo sapiens
tgggtaattccatgt

SEQ ID NO: 1256097 - DNA, 15 bp, Homo sapiens
ctgggtaattccatg

SEQ ID NO: 1256098 - DNA, 15 bp, Homo sapiens
actgggtaattccat

SEQ ID NO: 1256099 - DNA, 15 bp, Homo sapiens
aactgggtaattcca

SEQ ID NO: 1256100 - DNA, 15 bp, Homo sapiens
aaactgggtaattcc

SEQ ID NO: 1256101 - DNA, 15 bp, Homo sapiens
caaactgggtaattc

SEQ ID NO: 1256102 - DNA, 15 bp, Homo sapiens
acaaactgggtaatt

SEQ ID NO: 1256103 - DNA, 15 bp, Homo sapiens
aacaaactgggtaat

SEQ ID NO: 1256104 - DNA, 15 bp, Homo sapiens
caacaaactgggtaa

SEQ ID NO: 1256105 - DNA, 15 bp, Homo sapiens
tcaacaaactgggta

SEQ ID NO: 1256106 - DNA, 15 bp, Homo sapiens
ttcaacaaactgggt

SEQ ID NO: 1256107 - DNA, 15 bp, Homo sapiens
attcaacaaactggg

SEQ ID NO: 1256108 - DNA, 15 bp, Homo sapiens
gattcaacaaactgg

SEQ ID NO: 1256109 - DNA, 15 bp, Homo sapiens
tgattcaacaaactg

SEQ ID NO: 1256110 - DNA, 15 bp, Homo sapiens
atgattcaacaaact

SEQ ID NO: 1256111 - DNA, 15 bp, Homo sapiens
aatgattcaacaaac

SEQ ID NO: 1256112 - DNA, 15 bp, Homo sapiens
gaatgattcaacaaa

SEQ ID NO: 1256113 - DNA, 15 bp, Homo sapiens
tgaatgattcaacaa

SEQ ID NO: 1256114 - DNA, 15 bp, Homo sapiens
gtgaatgattcaaca

SEQ ID NO: 1256115 - DNA, 15 bp, Homo sapiens
ggtgaatgattcaac

SEQ ID NO: 1256116 - DNA, 15 bp, Homo sapiens
tggtgaatgattcaa

SEQ ID NO: 1256117 - DNA, 15 bp, Homo sapiens
ctggtgaatgattca

SEQ ID NO: 1256118 - DNA, 15 bp, Homo sapiens
cctggtgaatgattc

SEQ ID NO: 1256119 - DNA, 15 bp, Homo sapiens
gcctggtgaatgatt

SEQ ID NO: 1256120 - DNA, 15 bp, Homo sapiens
tgcctggtgaatgat

SEQ ID NO: 1256121 - DNA, 15 bp, Homo sapiens
ttgcctggtgaatga

SEQ ID NO: 1256122 - DNA, 15 bp, Homo sapiens
tttgcctggtgaatg

SEQ ID NO: 1256123 - DNA, 15 bp, Homo sapiens
atttgcctggtgaat

SEQ ID NO: 1256124 - DNA, 15 bp, Homo sapiens
aatttgcctggtgaa

SEQ ID NO: 1256125 - DNA, 15 bp, Homo sapiens
caatttgcctggtga

SEQ ID NO: 1256126 - DNA, 15 bp, Homo sapiens
gcaatttgcctggtg

SEQ ID NO: 1256127 - DNA, 15 bp, Homo sapiens
agcaatttgcctggt

SEQ ID NO: 1256128 - DNA, 15 bp, Homo sapiens
cagcaatttgcctgg

SEQ ID NO: 1256129 - DNA, 15 bp, Homo sapiens
ccagcaatttgcctg

SEQ ID NO: 1256130 - DNA, 15 bp, Homo sapiens
gccagcaatttgcct

SEQ ID NO: 1256131 - DNA, 15 bp, Homo sapiens
tgccagcaatttgcc

SEQ ID NO: 1256132 - DNA, 15 bp, Homo sapiens
ctgccagcaatttgc

SEQ ID NO: 1256133 - DNA, 15 bp, Homo sapiens
cctgccagcaatttg

SEQ ID NO: 1256134 - DNA, 15 bp, Homo sapiens
ccctgccagcaattt

SEQ ID NO: 1256135 - DNA, 15 bp, Homo sapiens
accctgccagcaatt

SEQ ID NO: 1256136 - DNA, 15 bp, Homo sapiens
taccctgccagcaat

SEQ ID NO: 1256137 - DNA, 15 bp, Homo sapiens
ttaccctgccagcaa

SEQ ID NO: 1256138 - DNA, 15 bp, Homo sapiens
cttaccctgccagca

SEQ ID NO: 1256139 - DNA, 15 bp, Homo sapiens
gcttaccctgccagc

SEQ ID NO: 1256140 - DNA, 15 bp, Homo sapiens
tgcttaccctgccag

SEQ ID NO: 1256141 - DNA, 15 bp, Homo sapiens
atgcttaccctgcca

SEQ ID NO: 1256142 - DNA, 15 bp, Homo sapiens
aatgcttaccctgcc

SEQ ID NO: 1256143 - DNA, 15 bp, Homo sapiens
taatgcttaccctgc

SEQ ID NO: 1256144 - DNA, 15 bp, Homo sapiens
ataatgcttaccctg

SEQ ID NO: 1256145 - DNA, 15 bp, Homo sapiens
aataatgcttaccct

SEQ ID NO: 1256146 - DNA, 15 bp, Homo sapiens
taataatgcttaccc

SEQ ID NO: 1256147 - DNA, 15 bp, Homo sapiens
ataataatgcttacc

SEQ ID NO: 1256148 - DNA, 15 bp, Homo sapiens
aataataatgcttac

SEQ ID NO: 1256149 - DNA, 15 bp, Homo sapiens
caataataatgctta

SEQ ID NO: 1256150 - DNA, 15 bp, Homo sapiens
tcaataataatgctt

SEQ ID NO: 1256151 - DNA, 15 bp, Homo sapiens
ttcaataataatgct

SEQ ID NO: 1256152 - DNA, 15 bp, Homo sapiens
tttcaataataatgc

SEQ ID NO: 1256153 - DNA, 15 bp, Homo sapiens
ttttcaataataatg

SEQ ID NO: 1256154 - DNA, 15 bp, Homo sapiens
gttttcaataataat

SEQ ID NO: 1256155 - DNA, 15 bp, Homo sapiens
ggttttcaataataa

SEQ ID NO: 1256156 - DNA, 15 bp, Homo sapiens
tggttttcaataata

SEQ ID NO: 1256157 - DNA, 15 bp, Homo sapiens
ttggttttcaataat

SEQ ID NO: 1256158 - DNA, 15 bp, Homo sapiens
tttggttttcaataa

SEQ ID NO: 1256159 - DNA, 15 bp, Homo sapiens
ttttggttttcaata

SEQ ID NO: 1256160 - DNA, 15 bp, Homo sapiens
gttttggttttcaat

SEQ ID NO: 1256161 - DNA, 15 bp, Homo sapiens
tgttttggttttcaa

SEQ ID NO: 1256162 - DNA, 15 bp, Homo sapiens
ttgttttggttttca

SEQ ID NO: 1256163 - DNA, 15 bp, Homo sapiens
tttgttttggttttc

SEQ ID NO: 1256164 - DNA, 15 bp, Homo sapiens
cttttgttttggttt

SEQ ID NO: 1256165 - DNA, 15 bp, Homo sapiens
tcttttgttttggtt

SEQ ID NO: 1256166 - DNA, 15 bp, Homo sapiens
gtcttttgttttggt

SEQ ID NO: 1256167 - DNA, 15 bp, Homo sapiens
agtcttttgttttgg

SEQ ID NO: 1256168 - DNA, 15 bp, Homo sapiens
tagtcttttgttttg

SEQ ID NO: 1256169 - DNA, 15 bp, Homo sapiens
ctagtcttttgtttt

SEQ ID NO: 1256170 - DNA, 15 bp, Homo sapiens
actagtcttttgttt

SEQ ID NO: 1256171 - DNA, 15 bp, Homo sapiens
gactagtcttttgtt

SEQ ID NO: 1256172 - DNA, 15 bp, Homo sapiens
tgactagtcttttgt

SEQ ID NO: 1256173 - DNA, 15 bp, Homo sapiens
ctgactagtcttttg

SEQ ID NO: 1256174 - DNA, 15 bp, Homo sapiens
actgactagtctttt

SEQ ID NO: 1256175 - DNA, 15 bp, Homo sapiens
tactgactagtcttt

SEQ ID NO: 1256176 - DNA, 15 bp, Homo sapiens
ttactgactagtctt

SEQ ID NO: 1256177 - DNA, 15 bp, Homo sapiens
gttactgactagtct

SEQ ID NO: 1256178 - DNA, 15 bp, Homo sapiens
agttactgactagtc

SEQ ID NO: 1256179 - DNA, 15 bp, Homo sapiens
aagttactgactagt

SEQ ID NO: 1256180 - DNA, 15 bp, Homo sapiens
aaagttactgactag

SEQ ID NO: 1256181 - DNA, 15 bp, Homo sapiens
taaagttactgacta

SEQ ID NO: 1256182 - DNA, 15 bp, Homo sapiens
ctaaagttactgact

SEQ ID NO: 1256183 - DNA, 15 bp, Homo sapiens
tctaaagttactgac

SEQ ID NO: 1256184 - DNA, 15 bp, Homo sapiens
ttctaaagttactga

SEQ ID NO: 1256185 - DNA, 15 bp, Homo sapiens
attctaaagttactg

SEQ ID NO: 1256186 - DNA, 15 bp, Homo sapiens
aattctaaagttact

SEQ ID NO: 1256187 - DNA, 15 bp, Homo sapiens
aaattctaaagttac

SEQ ID NO: 1256188 - DNA, 15 bp, Homo sapiens
gaaattctaaagtta

SEQ ID NO: 1256189 - DNA, 15 bp, Homo sapiens
agaaattctaaagtt

SEQ ID NO: 1256190 - DNA, 15 bp, Homo sapiens
cagaaattctaaagt

SEQ ID NO: 1256191 - DNA, 15 bp, Homo sapiens
gcagaaattctaaag

SEQ ID NO: 1256192 - DNA, 15 bp, Homo sapiens
ggcagaaattctaaa

SEQ ID NO: 1256193 - DNA, 15 bp, Homo sapiens
tggcagaaattctaa

SEQ ID NO: 1256194 - DNA, 15 bp, Homo sapiens
gtggcagaaattcta

SEQ ID NO: 1256195 - DNA, 15 bp, Homo sapiens
cgtggcagaaattct

SEQ ID NO: 1256196 - DNA, 15 bp, Homo sapiens
ccgtggcagaaattc

SEQ ID NO: 1256197 - DNA, 15 bp, Homo sapiens
tccgtggcagaaatt

SEQ ID NO: 1256198 - DNA, 15 bp, Homo sapiens
ttccgtggcagaaat

SEQ ID NO: 1256199 - DNA, 15 bp, Homo sapiens
tttccgtggcagaaa

SEQ ID NO: 1256200 - DNA, 15 bp, Homo sapiens
atttccgtggcagaa

SEQ ID NO: 1256201 - DNA, 15 bp, Homo sapiens
aatttccgtggcaga

SEQ ID NO: 1256202 - DNA, 15 bp, Homo sapiens
taatttccgtggcag

SEQ ID NO: 1256203 - DNA, 15 bp, Homo sapiens
ataatttccgtggca

SEQ ID NO: 1256204 - DNA, 15 bp, Homo sapiens
aataatttccgtggc

SEQ ID NO: 1256205 - DNA, 15 bp, Homo sapiens
aaataatttccgtgg

SEQ ID NO: 1256206 - DNA, 15 bp, Homo sapiens
aaaataatttccgtg

SEQ ID NO: 1256207 - DNA, 15 bp, Homo sapiens
aaaaataatttccgt

SEQ ID NO: 1256208 - DNA, 15 bp, Homo sapiens
gaaaaataatttccg

SEQ ID NO: 1256209 - DNA, 15 bp, Homo sapiens
agaaaaataatttcc

SEQ ID NO: 1256210 - DNA, 15 bp, Homo sapiens
aagaaaaataatttc

SEQ ID NO: 1256211 - DNA, 15 bp, Homo sapiens
taagaaaaataattt

SEQ ID NO: 1256212 - DNA, 15 bp, Homo sapiens
ttaagaaaaataatt

SEQ ID NO: 1256213 - DNA, 15 bp, Homo sapiens
tttaagaaaaataat

SEQ ID NO: 1256214 - DNA, 15 bp, Homo sapiens
gtttaagaaaaataa

SEQ ID NO: 1256215 - DNA, 15 bp, Homo sapiens
agtttaagaaaaata

SEQ ID NO: 1256216 - DNA, 15 bp, Homo sapiens
aagtttaagaaaaat

SEQ ID NO: 1256217 - DNA, 15 bp, Homo sapiens
taagtttaagaaaaa

SEQ ID NO: 1256218 - DNA, 15 bp, Homo sapiens
gtaagtttaagaaaa

SEQ ID NO: 1256219 - DNA, 15 bp, Homo sapiens
agtaagtttaagaaa

SEQ ID NO: 1256220 - DNA, 15 bp, Homo sapiens
tagtaagtttaagaa

SEQ ID NO: 1256221 - DNA, 15 bp, Homo sapiens
ttagtaagtttaaga

SEQ ID NO: 1256222 - DNA, 15 bp, Homo sapiens
tttagtaagtttaag

SEQ ID NO: 1256223 - DNA, 15 bp, Homo sapiens
ttttagtaagtttaa

SEQ ID NO: 1256224 - DNA, 15 bp, Homo sapiens
cttttagtaagttta

SEQ ID NO: 1256225 - DNA, 15 bp, Homo sapiens
tcttttagtaagttt

SEQ ID NO: 1256226 - DNA, 15 bp, Homo sapiens
ctcttttagtaagtt

SEQ ID NO: 1256227 - DNA, 15 bp, Homo sapiens
actcttttagtaagt

SEQ ID NO: 1256228 - DNA, 15 bp, Homo sapiens
tactcttttagtaag

SEQ ID NO: 1256229 - DNA, 15 bp, Homo sapiens
ctactcttttagtaa

SEQ ID NO: 1256230 - DNA, 15 bp, Homo sapiens
actactcttttagta

SEQ ID NO: 1256231 - DNA, 15 bp, Homo sapiens
aactactcttttagt

SEQ ID NO: 1256232 - DNA, 15 bp, Homo sapiens
taactactcttttag

SEQ ID NO: 1256233 - DNA, 15 bp, Homo sapiens
ctaactactctttta

SEQ ID NO: 1256234 - DNA, 15 bp, Homo sapiens
actaactactctttt

SEQ ID NO: 1256235 - DNA, 15 bp, Homo sapiens
aactaactactcttt

SEQ ID NO: 1256236 - DNA, 15 bp, Homo sapiens
taactaactactctt

SEQ ID NO: 1256237 - DNA, 15 bp, Homo sapiens
ataactaactactct

SEQ ID NO: 1256238 - DNA, 15 bp, Homo sapiens
tataactaactactc

SEQ ID NO: 1256239 - DNA, 15 bp, Homo sapiens
atataactaactact

SEQ ID NO: 1256240 - DNA, 15 bp, Homo sapiens
aatataactaactac

SEQ ID NO: 1256241 - DNA, 15 bp, Homo sapiens
caatataactaacta

SEQ ID NO: 1256242 - DNA, 15 bp, Homo sapiens
gcaatataactaact

SEQ ID NO: 1256243 - DNA, 15 bp, Homo sapiens
agcaatataactaac

SEQ ID NO: 1256244 - DNA, 15 bp, Homo sapiens
tagcaatataactaa

SEQ ID NO: 1256245 - DNA, 15 bp, Homo sapiens
ctagcaatataacta

SEQ ID NO: 1256246 - DNA, 15 bp, Homo sapiens
actagcaatataact

SEQ ID NO: 1256247 - DNA, 15 bp, Homo sapiens
tactagcaatataac

SEQ ID NO: 1256248 - DNA, 15 bp, Homo sapiens
ttactagcaatataa

SEQ ID NO: 1256249 - DNA, 15 bp, Homo sapiens
tttactagcaatata

SEQ ID NO: 1256250 - DNA, 15 bp, Homo sapiens
ttttactagcaatat

SEQ ID NO: 1256251 - DNA, 15 bp, Homo sapiens
attttactagcaata

SEQ ID NO: 1256252 - DNA, 15 bp, Homo sapiens
aattttactagcaat

SEQ ID NO: 1256253 - DNA, 15 bp, Homo sapiens
taattttactagcaa

SEQ ID NO: 1256254 - DNA, 15 bp, Homo sapiens
ataattttactagca

SEQ ID NO: 1256255 - DNA, 15 bp, Homo sapiens
aataattttactagc

SEQ ID NO: 1256256 - DNA, 15 bp, Homo sapiens
aaataattttactag

SEQ ID NO: 1256257 - DNA, 15 bp, Homo sapiens
aaaataattttacta

SEQ ID NO: 1256258 - DNA, 15 bp, Homo sapiens
taaaataattttact

SEQ ID NO: 1256259 - DNA, 15 bp, Homo sapiens
ataaaataattttac

SEQ ID NO: 1256260 - DNA, 15 bp, Homo sapiens
caataaaataatttt

SEQ ID NO: 1256261 - DNA, 15 bp, Homo sapiens
tcaataaaataattt

SEQ ID NO: 1256262 - DNA, 15 bp, Homo sapiens
atcaataaaataatt

SEQ ID NO: 1256263 - DNA, 15 bp, Homo sapiens
tatcaataaaataat

SEQ ID NO: 1256264 - DNA, 15 bp, Homo sapiens
atatcaataaaataa

SEQ ID NO: 1256265 - DNA, 15 bp, Homo sapiens
tatatcaataaaata

SEQ ID NO: 1256266 - DNA, 15 bp, Homo sapiens
ttatatcaataaaat

SEQ ID NO: 1256267 - DNA, 15 bp, Homo sapiens
cttatatcaataaaa

SEQ ID NO: 1256268 - DNA, 15 bp, Homo sapiens
tcttatatcaataaa

SEQ ID NO: 1256269 - DNA, 15 bp, Homo sapiens
ttcttatatcaataa

SEQ ID NO: 1256270 - DNA, 15 bp, Homo sapiens
cttcttatatcaata

SEQ ID NO: 1256271 - DNA, 15 bp, Homo sapiens
gcttcttatatcaat

SEQ ID NO: 1256272 - DNA, 15 bp, Homo sapiens
ggcttcttatatcaa

SEQ ID NO: 1256273 - DNA, 15 bp, Homo sapiens
aggcttcttatatca

SEQ ID NO: 1256274 - DNA, 15 bp, Homo sapiens
taggcttcttatatc

SEQ ID NO: 1256275 - DNA, 15 bp, Homo sapiens
ttaggcttcttatat

SEQ ID NO: 1256276 - DNA, 15 bp, Homo sapiens
gttaggcttcttata

SEQ ID NO: 1256277 - DNA, 15 bp, Homo sapiens
agttaggcttcttat

SEQ ID NO: 1256278 - DNA, 15 bp, Homo sapiens
aagttaggcttctta

SEQ ID NO: 1256279 - DNA, 15 bp, Homo sapiens
aaagttaggcttctt

SEQ ID NO: 1256280 - DNA, 15 bp, Homo sapiens
caaagttaggcttct

SEQ ID NO: 1256281 - DNA, 15 bp, Homo sapiens
acaaagttaggcttc

SEQ ID NO: 1256282 - DNA, 15 bp, Homo sapiens
aacaaagttaggctt

SEQ ID NO: 1256283 - DNA, 15 bp, Homo sapiens
aaacaaagttaggct

SEQ ID NO: 1256284 - DNA, 15 bp, Homo sapiens
caaacaaagttaggc

SEQ ID NO: 1256285 - DNA, 15 bp, Homo sapiens
tcaaacaaagttagg

SEQ ID NO: 1256286 - DNA, 15 bp, Homo sapiens
ttcaaacaaagttag

SEQ ID NO: 1256287 - DNA, 15 bp, Homo sapiens
tttcaaacaaagtta

SEQ ID NO: 1256288 - DNA, 15 bp, Homo sapiens
ttttcaaacaaagtt

SEQ ID NO: 1256289 - DNA, 15 bp, Homo sapiens
cttttcaaacaaagt

SEQ ID NO: 1256290 - DNA, 15 bp, Homo sapiens
acttttcaaacaaag

SEQ ID NO: 1256291 - DNA, 15 bp, Homo sapiens
gacttttcaaacaaa

SEQ ID NO: 1256292 - DNA, 15 bp, Homo sapiens
agacttttcaaacaa

SEQ ID NO: 1256293 - DNA, 15 bp, Homo sapiens
tagacttttcaaaca

SEQ ID NO: 1256294 - DNA, 15 bp, Homo sapiens
ttagacttttcaaac

SEQ ID NO: 1256295 - DNA, 15 bp, Homo sapiens
tttagacttttcaaa

SEQ ID NO: 1256296 - DNA, 15 bp, Homo sapiens
gtttagacttttcaa

SEQ ID NO: 1256297 - DNA, 15 bp, Homo sapiens
agtttagacttttca

SEQ ID NO: 1256298 - DNA, 15 bp, Homo sapiens
aagtttagacttttc

SEQ ID NO: 1256299 - DNA, 15 bp, Homo sapiens
aaagtttagactttt

SEQ ID NO: 1256300 - DNA, 15 bp, Homo sapiens
aaaagtttagacttt

SEQ ID NO: 1256301 - DNA, 15 bp, Homo sapiens
taaaagtttagactt

SEQ ID NO: 1256302 - DNA, 15 bp, Homo sapiens
ctaaaagtttagact

SEQ ID NO: 1256303 - DNA, 15 bp, Homo sapiens
actaaaagtttagac

SEQ ID NO: 1256304 - DNA, 15 bp, Homo sapiens
gactaaaagtttaga

SEQ ID NO: 1256305 - DNA, 15 bp, Homo sapiens
agactaaaagtttag

SEQ ID NO: 1256306 - DNA, 15 bp, Homo sapiens
tagactaaaagttta

SEQ ID NO: 1256307 - DNA, 15 bp, Homo sapiens
ctagactaaaagttt

SEQ ID NO: 1256308 - DNA, 15 bp, Homo sapiens
actagactaaaagtt

SEQ ID NO: 1256309 - DNA, 15 bp, Homo sapiens
gactagactaaaagt

SEQ ID NO: 1256310 - DNA, 15 bp, Homo sapiens
agactagactaaaag

SEQ ID NO: 1256311 - DNA, 15 bp, Homo sapiens
tagactagactaaaa

SEQ ID NO: 1256312 - DNA, 15 bp, Homo sapiens
gtagactagactaaa

SEQ ID NO: 1256313 - DNA, 15 bp, Homo sapiens
tgtagactagactaa

SEQ ID NO: 1256314 - DNA, 15 bp, Homo sapiens
ctgtagactagacta

SEQ ID NO: 1256315 - DNA, 15 bp, Homo sapiens
actgtagactagact

SEQ ID NO: 1256316 - DNA, 15 bp, Homo sapiens
aactgtagactagac

SEQ ID NO: 1256317 - DNA, 15 bp, Homo sapiens
caactgtagactaga

SEQ ID NO: 1256318 - DNA, 15 bp, Homo sapiens
acaactgtagactag

SEQ ID NO: 1256319 - DNA, 15 bp, Homo sapiens
gacaactgtagacta

SEQ ID NO: 1256320 - DNA, 15 bp, Homo sapiens
tgacaactgtagact

SEQ ID NO: 1256321 - DNA, 15 bp, Homo sapiens
ctgacaactgtagac

SEQ ID NO: 1256322 - DNA, 15 bp, Homo sapiens
tctgacaactgtaga

SEQ ID NO: 1256323 - DNA, 15 bp, Homo sapiens
gtctgacaactgtag

SEQ ID NO: 1256324 - DNA, 15 bp, Homo sapiens
tgtctgacaactgta

SEQ ID NO: 1256325 - DNA, 15 bp, Homo sapiens
ttgtctgacaactgt

SEQ ID NO: 1256326 - DNA, 15 bp, Homo sapiens
tttgtctgacaactg

SEQ ID NO: 1256327 - DNA, 15 bp, Homo sapiens
atttgtctgacaact

SEQ ID NO: 1256328 - DNA, 15 bp, Homo sapiens
tatttgtctgacaac

SEQ ID NO: 1256329 - DNA, 15 bp, Homo sapiens
ctatttgtctgacaa

SEQ ID NO: 1256330 - DNA, 15 bp, Homo sapiens
gctatttgtctgaca

SEQ ID NO: 1256331 - DNA, 15 bp, Homo sapiens
tgctatttgtctgac

SEQ ID NO: 1256332 - DNA, 15 bp, Homo sapiens
ttgctatttgtctga

SEQ ID NO: 1256333 - DNA, 15 bp, Homo sapiens
tttgctatttgtctg

SEQ ID NO: 1256334 - DNA, 15 bp, Homo sapiens
atttgctatttgtct

SEQ ID NO: 1256335 - DNA, 15 bp, Homo sapiens
aatttgctatttgtc

SEQ ID NO: 1256336 - DNA, 15 bp, Homo sapiens
caatttgctatttgt

SEQ ID NO: 1256337 - DNA, 15 bp, Homo sapiens
acaatttgctatttg

SEQ ID NO: 1256338 - DNA, 15 bp, Homo sapiens
tacaatttgctattt

SEQ ID NO: 1256339 - DNA, 15 bp, Homo sapiens
gtacaatttgctatt

SEQ ID NO: 1256340 - DNA, 15 bp, Homo sapiens
ggtacaatttgctat

SEQ ID NO: 1256341 - DNA, 15 bp, Homo sapiens
gggtacaatttgcta

SEQ ID NO: 1256342 - DNA, 15 bp, Homo sapiens
ggggtacaatttgct

SEQ ID NO: 1256343 - DNA, 15 bp, Homo sapiens
aggggtacaatttgc

SEQ ID NO: 1256344 - DNA, 15 bp, Homo sapiens
taggggtacaatttg

SEQ ID NO: 1256345 - DNA, 15 bp, Homo sapiens
gtaggggtacaattt

SEQ ID NO: 1256346 - DNA, 15 bp, Homo sapiens
ggtaggggtacaatt

SEQ ID NO: 1256347 - DNA, 15 bp, Homo sapiens
aggtaggggtacaat

SEQ ID NO: 1256348 - DNA, 15 bp, Homo sapiens
aaggtaggggtacaa

SEQ ID NO: 1256349 - DNA, 15 bp, Homo sapiens
taaggtaggggtaca

SEQ ID NO: 1256350 - DNA, 15 bp, Homo sapiens
ttaaggtaggggtac

SEQ ID NO: 1256351 - DNA, 15 bp, Homo sapiens
tttaaggtaggggta

SEQ ID NO: 1256352 - DNA, 15 bp, Homo sapiens
ttttaaggtaggggt

SEQ ID NO: 1256353 - DNA, 15 bp, Homo sapiens
tttttaaggtagggg

SEQ ID NO: 1256354 - DNA, 15 bp, Homo sapiens
atttttaaggtaggg

SEQ ID NO: 1256355 - DNA, 15 bp, Homo sapiens
tatttttaaggtagg

SEQ ID NO: 1256356 - DNA, 15 bp, Homo sapiens
atatttttaaggtag

SEQ ID NO: 1256357 - DNA, 15 bp, Homo sapiens
aatatttttaaggta

SEQ ID NO: 1256358 - DNA, 15 bp, Homo sapiens
aaatatttttaaggt

SEQ ID NO: 1256359 - DNA, 15 bp, Homo sapiens
aaaatatttttaagg

SEQ ID NO: 1256360 - DNA, 15 bp, Homo sapiens
gaaaatatttttaag

SEQ ID NO: 1256361 - DNA, 15 bp, Homo sapiens
tgaaaatatttttaa

SEQ ID NO: 1256362 - DNA, 15 bp, Homo sapiens
ttgaaaatattttta

SEQ ID NO: 1256363 - DNA, 15 bp, Homo sapiens
tttgaaaatattttt

SEQ ID NO: 1256364 - DNA, 15 bp, Homo sapiens
ttttgaaaatatttt

SEQ ID NO: 1256365 - DNA, 15 bp, Homo sapiens
tttttgaaaatattt

SEQ ID NO: 1256366 - DNA, 15 bp, Homo sapiens
ctttttgaaaatatt

SEQ ID NO: 1256367 - DNA, 15 bp, Homo sapiens
actttttgaaaatat

SEQ ID NO: 1256368 - DNA, 15 bp, Homo sapiens
tactttttgaaaata

SEQ ID NO: 1256369 - DNA, 15 bp, Homo sapiens
atactttttgaaaat

SEQ ID NO: 1256370 - DNA, 15 bp, Homo sapiens
gatactttttgaaaa

SEQ ID NO: 1256371 - DNA, 15 bp, Homo sapiens
agatactttttgaaa

SEQ ID NO: 1256372 - DNA, 15 bp, Homo sapiens
atagatactttttga

SEQ ID NO: 1256373 - DNA, 15 bp, Homo sapiens
tatagatactttttg

SEQ ID NO: 1256374 - DNA, 15 bp, Homo sapiens
ttatagatacttttt

SEQ ID NO: 1256375 - DNA, 15 bp, Homo sapiens
attatagatactttt

SEQ ID NO: 1256376 - DNA, 15 bp, Homo sapiens
gattatagatacttt

SEQ ID NO: 1256377 - DNA, 15 bp, Homo sapiens
agattatagatactt

SEQ ID NO: 1256378 - DNA, 15 bp, Homo sapiens
aagattatagatact

SEQ ID NO: 1256379 - DNA, 15 bp, Homo sapiens
taagattatagatac

SEQ ID NO: 1256380 - DNA, 15 bp, Homo sapiens
ataagattatagata

SEQ ID NO: 1256381 - DNA, 15 bp, Homo sapiens
tataagattatagat

SEQ ID NO: 1256382 - DNA, 15 bp, Homo sapiens
ctataagattataga

SEQ ID NO: 1256383 - DNA, 15 bp, Homo sapiens
cctataagattatag

SEQ ID NO: 1256384 - DNA, 15 bp, Homo sapiens
tcctataagattata

SEQ ID NO: 1256385 - DNA, 15 bp, Homo sapiens
ttcctataagattat

SEQ ID NO: 1256386 - DNA, 15 bp, Homo sapiens
attcctataagatta

SEQ ID NO: 1256387 - DNA, 15 bp, Homo sapiens
tattcctataagatt

SEQ ID NO: 1256388 - DNA, 15 bp, Homo sapiens
ttattcctataagat

SEQ ID NO: 1256389 - DNA, 15 bp, Homo sapiens
tttattcctataaga

SEQ ID NO: 1256390 - DNA, 15 bp, Homo sapiens
atttattcctataag

SEQ ID NO: 1256391 - DNA, 15 bp, Homo sapiens
tatttattcctataa

SEQ ID NO: 1256392 - DNA, 15 bp, Homo sapiens
atatttattcctata

SEQ ID NO: 1256393 - DNA, 15 bp, Homo sapiens
aatatttattcctat

SEQ ID NO: 1256394 - DNA, 15 bp, Homo sapiens
aaatatttattccta

SEQ ID NO: 1256395 - DNA, 15 bp, Homo sapiens
aaaatatttattcct

SEQ ID NO: 1256396 - DNA, 15 bp, Homo sapiens
taaaatatttattcc

SEQ ID NO: 1256397 - DNA, 15 bp, Homo sapiens
ctaaaatatttattc

SEQ ID NO: 1256398 - DNA, 15 bp, Homo sapiens
actaccatctgaaaa

SEQ ID NO: 1256399 - DNA, 15 bp, Homo sapiens
aactaccatctgaaa

SEQ ID NO: 1256400 - DNA, 15 bp, Homo sapiens
gaactaccatctgaa

SEQ ID NO: 1256401 - DNA, 15 bp, Homo sapiens
tgaactaccatctga

SEQ ID NO: 1256402 - DNA, 15 bp, Homo sapiens
ttgaactaccatctg

SEQ ID NO: 1256403 - DNA, 15 bp, Homo sapiens
gttgaactaccatct

SEQ ID NO: 1256404 - DNA, 15 bp, Homo sapiens
agttgaactaccatc

SEQ ID NO: 1256405 - DNA, 15 bp, Homo sapiens
cagttgaactaccat

SEQ ID NO: 1256406 - DNA, 15 bp, Homo sapiens
ccagttgaactacca

SEQ ID NO: 1256407 - DNA, 15 bp, Homo sapiens
cccagttgaactacc

SEQ ID NO: 1256408 - DNA, 15 bp, Homo sapiens
ccccagttgaactac

SEQ ID NO: 1256409 - DNA, 15 bp, Homo sapiens
tccccagttgaacta

SEQ ID NO: 1256410 - DNA, 15 bp, Homo sapiens
ttccccagttgaact

SEQ ID NO: 1256411 - DNA, 15 bp, Homo sapiens
cttccccagttgaac

SEQ ID NO: 1256412 - DNA, 15 bp, Homo sapiens
tcttccccagttgaa

SEQ ID NO: 1256413 - DNA, 15 bp, Homo sapiens
ttcttccccagttga

SEQ ID NO: 1256414 - DNA, 15 bp, Homo sapiens
attcttccccagttg

SEQ ID NO: 1256415 - DNA, 15 bp, Homo sapiens
gattcttccccagtt

SEQ ID NO: 1256416 - DNA, 15 bp, Homo sapiens
agattcttccccagt

SEQ ID NO: 1256417 - DNA, 15 bp, Homo sapiens
cagattcttccccag

SEQ ID NO: 1256418 - DNA, 15 bp, Homo sapiens
gcagattcttcccca

SEQ ID NO: 1256419 - DNA, 15 bp, Homo sapiens
agcagattcttcccc

SEQ ID NO: 1256420 - DNA, 15 bp, Homo sapiens
aagcagattcttccc

SEQ ID NO: 1256421 - DNA, 15 bp, Homo sapiens
aaagcagattcttcc

SEQ ID NO: 1256422 - DNA, 15 bp, Homo sapiens
gaaagcagattcttc

SEQ ID NO: 1256423 - DNA, 15 bp, Homo sapiens
tgaaagcagattctt

SEQ ID NO: 1256424 - DNA, 15 bp, Homo sapiens
ttgaaagcagattct

SEQ ID NO: 1256425 - DNA, 15 bp, Homo sapiens
tttgaaagcagattc

SEQ ID NO: 1256426 - DNA, 15 bp, Homo sapiens
gtttgaaagcagatt

SEQ ID NO: 1256427 - DNA, 15 bp, Homo sapiens
agtttgaaagcagat

SEQ ID NO: 1256428 - DNA, 15 bp, Homo sapiens
gagtttgaaagcaga

SEQ ID NO: 1256429 - DNA, 15 bp, Homo sapiens
tgagtttgaaagcag

SEQ ID NO: 1256430 - DNA, 15 bp, Homo sapiens
gtgagtttgaaagca

SEQ ID NO: 1256431 - DNA, 15 bp, Homo sapiens
tgtgagtttgaaagc

SEQ ID NO: 1256432 - DNA, 15 bp, Homo sapiens
atgtgagtttgaaag

SEQ ID NO: 1256433 - DNA, 15 bp, Homo sapiens
aatgtgagtttgaaa

SEQ ID NO: 1256434 - DNA, 15 bp, Homo sapiens
taatgtgagtttgaa

SEQ ID NO: 1256435 - DNA, 15 bp, Homo sapiens
ataatgtgagtttga

SEQ ID NO: 1256436 - DNA, 15 bp, Homo sapiens
cataatgtgagtttg

SEQ ID NO: 1256437 - DNA, 15 bp, Homo sapiens
acataatgtgagttt

SEQ ID NO: 1256438 - DNA, 15 bp, Homo sapiens
cacataatgtgagtt

SEQ ID NO: 1256439 - DNA, 15 bp, Homo sapiens
acacataatgtgagt

SEQ ID NO: 1256440 - DNA, 15 bp, Homo sapiens
aacacataatgtgag

SEQ ID NO: 1256441 - DNA, 15 bp, Homo sapiens
caacacataatgtga

SEQ ID NO: 1256442 - DNA, 15 bp, Homo sapiens
ccaacacataatgtg

SEQ ID NO: 1256443 - DNA, 15 bp, Homo sapiens
gccaacacataatgt

SEQ ID NO: 1256444 - DNA, 15 bp, Homo sapiens
tgccaacacataatg

SEQ ID NO: 1256445 - DNA, 15 bp, Homo sapiens
ctgccaacacataat

SEQ ID NO: 1256446 - DNA, 15 bp, Homo sapiens
tctgccaacacataa

SEQ ID NO: 1256447 - DNA, 15 bp, Homo sapiens
ttctgccaacacata

SEQ ID NO: 1256448 - DNA, 15 bp, Homo sapiens
attctgccaacacat

SEQ ID NO: 1256449 - DNA, 15 bp, Homo sapiens
aattctgccaacaca

SEQ ID NO: 1256450 - DNA, 15 bp, Homo sapiens
gaattctgccaacac

SEQ ID NO: 1256451 - DNA, 15 bp, Homo sapiens
tgaattctgccaaca

SEQ ID NO: 1256452 - DNA, 15 bp, Homo sapiens
gtgaattctgccaac

SEQ ID NO: 1256453 - DNA, 15 bp, Homo sapiens
cgtgaattctgccaa

SEQ ID NO: 1256454 - DNA, 15 bp, Homo sapiens
acgtgaattctgcca

SEQ ID NO: 1256455 - DNA, 15 bp, Homo sapiens
gacgtgaattctgcc

SEQ ID NO: 1256456 - DNA, 15 bp, Homo sapiens
ggacgtgaattctgc

SEQ ID NO: 1256457 - DNA, 15 bp, Homo sapiens
aggacgtgaattctg

SEQ ID NO: 1256458 - DNA, 15 bp, Homo sapiens
aaggacgtgaattct

SEQ ID NO: 1256459 - DNA, 15 bp, Homo sapiens
caaggacgtgaattc

SEQ ID NO: 1256460 - DNA, 15 bp, Homo sapiens
acaaggacgtgaatt

SEQ ID NO: 1256461 - DNA, 15 bp, Homo sapiens
cacaaggacgtgaat

SEQ ID NO: 1256462 - DNA, 15 bp, Homo sapiens
ccacaaggacgtgaa

SEQ ID NO: 1256463 - DNA, 15 bp, Homo sapiens
accacaaggacgtga

SEQ ID NO: 1256464 - DNA, 15 bp, Homo sapiens
aaccacaaggacgtg

SEQ ID NO: 1256465 - DNA, 15 bp, Homo sapiens
aaaccacaaggacgt

SEQ ID NO: 1256466 - DNA, 15 bp, Homo sapiens
gaaaccacaaggacg

SEQ ID NO: 1256467 - DNA, 15 bp, Homo sapiens
tgaaaccacaaggac

SEQ ID NO: 1256468 - DNA, 15 bp, Homo sapiens
gtgaaaccacaagga

SEQ ID NO: 1256469 - DNA, 15 bp, Homo sapiens
tgtgaaaccacaagg

SEQ ID NO: 1256470 - DNA, 15 bp, Homo sapiens
ttgtgaaaccacaag

SEQ ID NO: 1256471 - DNA, 15 bp, Homo sapiens
gttgtgaaaccacaa

SEQ ID NO: 1256472 - DNA, 15 bp, Homo sapiens
ggttgtgaaaccaca

SEQ ID NO: 1256473 - DNA, 15 bp, Homo sapiens
aggttgtgaaaccac

SEQ ID NO: 1256474 - DNA, 15 bp, Homo sapiens
taggttgtgaaacca

SEQ ID NO: 1256475 - DNA, 15 bp, Homo sapiens
ctaggttgtgaaacc

SEQ ID NO: 1256476 - DNA, 15 bp, Homo sapiens
cctaggttgtgaaac

SEQ ID NO: 1256477 - DNA, 15 bp, Homo sapiens
ccctaggttgtgaaa

SEQ ID NO: 1256478 - DNA, 15 bp, Homo sapiens
gccctaggttgtgaa

SEQ ID NO: 1256479 - DNA, 15 bp, Homo sapiens
agccctaggttgtga

SEQ ID NO: 1256480 - DNA, 15 bp, Homo sapiens
aagccctaggttgtg

SEQ ID NO: 1256481 - DNA, 15 bp, Homo sapiens
gaagccctaggttgt

SEQ ID NO: 1256482 - DNA, 15 bp, Homo sapiens
tgaagccctaggttg

SEQ ID NO: 1256483 - DNA, 15 bp, Homo sapiens
ttgaagccctaggtt

SEQ ID NO: 1256484 - DNA, 15 bp, Homo sapiens
attgaagccctaggt

SEQ ID NO: 1256485 - DNA, 15 bp, Homo sapiens
aattgaagccctagg

SEQ ID NO: 1256486 - DNA, 15 bp, Homo sapiens
aaattgaagccctag

SEQ ID NO: 1256487 - DNA, 15 bp, Homo sapiens
gaaattgaagcccta

SEQ ID NO: 1256488 - DNA, 15 bp, Homo sapiens
agaaattgaagccct

SEQ ID NO: 1256489 - DNA, 15 bp, Homo sapiens
aagaaattgaagccc

SEQ ID NO: 1256490 - DNA, 15 bp, Homo sapiens
aaagaaattgaagcc

SEQ ID NO: 1256491 - DNA, 15 bp, Homo sapiens
gaaagaaattgaagc

SEQ ID NO: 1256492 - DNA, 15 bp, Homo sapiens
agaaagaaattgaag

SEQ ID NO: 1256493 - DNA, 15 bp, Homo sapiens
cagaaagaaattgaa

SEQ ID NO: 1256494 - DNA, 15 bp, Homo sapiens
ccagaaagaaattga

SEQ ID NO: 1256495 - DNA, 15 bp, Homo sapiens
tccagaaagaaattg

SEQ ID NO: 1256496 - DNA, 15 bp, Homo sapiens
atccagaaagaaatt

SEQ ID NO: 1256497 - DNA, 15 bp, Homo sapiens
catccagaaagaaat

SEQ ID NO: 1256498 - DNA, 15 bp, Homo sapiens
acatccagaaagaaa

SEQ ID NO: 1256499 - DNA, 15 bp, Homo sapiens
gacatccagaaagaa

SEQ ID NO: 1256500 - DNA, 15 bp, Homo sapiens
tgacatccagaaaga

SEQ ID NO: 1256501 - DNA, 15 bp, Homo sapiens
ctgacatccagaaag

SEQ ID NO: 1256502 - DNA, 15 bp, Homo sapiens
gctgacatccagaaa

SEQ ID NO: 1256503 - DNA, 15 bp, Homo sapiens
agctgacatccagaa

SEQ ID NO: 1256504 - DNA, 15 bp, Homo sapiens
cagctgacatccaga

SEQ ID NO: 1256505 - DNA, 15 bp, Homo sapiens
ccagctgacatccag

SEQ ID NO: 1256506 - DNA, 15 bp, Homo sapiens
tccagctgacatcca

SEQ ID NO: 1256507 - DNA, 15 bp, Homo sapiens
ctccagctgacatcc

SEQ ID NO: 1256508 - DNA, 15 bp, Homo sapiens
cctccagctgacatc

SEQ ID NO: 1256509 - DNA, 15 bp, Homo sapiens
ccctccagctgacat

SEQ ID NO: 1256510 - DNA, 15 bp, Homo sapiens
gccctccagctgaca

SEQ ID NO: 1256511 - DNA, 15 bp, Homo sapiens
tgccctccagctgac

SEQ ID NO: 1256512 - DNA, 15 bp, Homo sapiens
gtgccctccagctga

SEQ ID NO: 1256513 - DNA, 15 bp, Homo sapiens
ggtgccctccagctg

SEQ ID NO: 1256514 - DNA, 15 bp, Homo sapiens
gggtgccctccagct

SEQ ID NO: 1256515 - DNA, 15 bp, Homo sapiens
agggtgccctccagc

SEQ ID NO: 1256516 - DNA, 15 bp, Homo sapiens
gagggtgccctccag

SEQ ID NO: 1256517 - DNA, 15 bp, Homo sapiens
tgagggtgccctcca

SEQ ID NO: 1256518 - DNA, 15 bp, Homo sapiens
ctgagggtgccctcc

SEQ ID NO: 1256519 - DNA, 15 bp, Homo sapiens
gctgagggtgccctc

SEQ ID NO: 1256520 - DNA, 15 bp, Homo sapiens
agctgagggtgccct

SEQ ID NO: 1256521 - DNA, 15 bp, Homo sapiens
gagctgagggtgccc

SEQ ID NO: 1256522 - DNA, 15 bp, Homo sapiens
ggagctgagggtgcc

SEQ ID NO: 1256523 - DNA, 15 bp, Homo sapiens
aggagctgagggtgc

SEQ ID NO: 1256524 - DNA, 15 bp, Homo sapiens
taggagctgagggtg

SEQ ID NO: 1256525 - DNA, 15 bp, Homo sapiens
ctaggagctgagggt

SEQ ID NO: 1256526 - DNA, 15 bp, Homo sapiens
tctaggagctgaggg

SEQ ID NO: 1256527 - DNA, 15 bp, Homo sapiens
ctctaggagctgagg

SEQ ID NO: 1256528 - DNA, 15 bp, Homo sapiens
cctctaggagctgag

SEQ ID NO: 1256529 - DNA, 15 bp, Homo sapiens
gcctctaggagctga

SEQ ID NO: 1256530 - DNA, 15 bp, Homo sapiens
agcctctaggagctg

SEQ ID NO: 1256531 - DNA, 15 bp, Homo sapiens
cagcctctaggagct

SEQ ID NO: 1256532 - DNA, 15 bp, Homo sapiens
gcagcctctaggagc

SEQ ID NO: 1256533 - DNA, 15 bp, Homo sapiens
ggcagcctctaggag

SEQ ID NO: 1256534 - DNA, 15 bp, Homo sapiens
aggcagcctctagga

SEQ ID NO: 1256535 - DNA, 15 bp, Homo sapiens
tgcaggcagcctcta

SEQ ID NO: 1256536 - DNA, 15 bp, Homo sapiens
ctgcaggcagcctct

SEQ ID NO: 1256537 - DNA, 15 bp, Homo sapiens
actgcaggcagcctc

SEQ ID NO: 1256538 - DNA, 15 bp, Homo sapiens
aactgcaggcagcct

SEQ ID NO: 1256539 - DNA, 15 bp, Homo sapiens
gaactgcaggcagcc

SEQ ID NO: 1256540 - DNA, 15 bp, Homo sapiens
tgaactgcaggcagc

SEQ ID NO: 1256541 - DNA, 15 bp, Homo sapiens
ttgaactgcaggcag

SEQ ID NO: 1256542 - DNA, 15 bp, Homo sapiens
tttgaactgcaggca

SEQ ID NO: 1256543 - DNA, 15 bp, Homo sapiens
atttgaactgcaggc

SEQ ID NO: 1256544 - DNA, 15 bp, Homo sapiens
tatttgaactgcagg

SEQ ID NO: 1256545 - DNA, 15 bp, Homo sapiens
ctatttgaactgcag

SEQ ID NO: 1256546 - DNA, 15 bp, Homo sapiens
tctatttgaactgca

SEQ ID NO: 1256547 - DNA, 15 bp, Homo sapiens
ttctatttgaactgc

SEQ ID NO: 1256548 - DNA, 15 bp, Homo sapiens
tttctatttgaactg

SEQ ID NO: 1256549 - DNA, 15 bp, Homo sapiens
ttttctatttgaact

SEQ ID NO: 1256550 - DNA, 15 bp, Homo sapiens
attttctatttgaac

SEQ ID NO: 1256551 - DNA, 15 bp, Homo sapiens
tattttctatttgaa

SEQ ID NO: 1256552 - DNA, 15 bp, Homo sapiens
ttattttctatttga

SEQ ID NO: 1256553 - DNA, 15 bp, Homo sapiens
attattttctatttg

SEQ ID NO: 1256554 - DNA, 15 bp, Homo sapiens
aattattttctattt

SEQ ID NO: 1256555 - DNA, 15 bp, Homo sapiens
gaattattttctatt

SEQ ID NO: 1256556 - DNA, 15 bp, Homo sapiens
agaattattttctat

SEQ ID NO: 1256557 - DNA, 15 bp, Homo sapiens
gagaattattttcta

SEQ ID NO: 1256558 - DNA, 15 bp, Homo sapiens
agagaattattttct

SEQ ID NO: 1256559 - DNA, 15 bp, Homo sapiens
cagagaattattttc

SEQ ID NO: 1256560 - DNA, 15 bp, Homo sapiens
acagagaattatttt

SEQ ID NO: 1256561 - DNA, 15 bp, Homo sapiens
aacagagaattattt

SEQ ID NO: 1256562 - DNA, 15 bp, Homo sapiens
caacagagaattatt

SEQ ID NO: 1256563 - DNA, 15 bp, Homo sapiens
gcaacagagaattat

SEQ ID NO: 1256564 - DNA, 15 bp, Homo sapiens
tgcaacagagaatta

SEQ ID NO: 1256565 - DNA, 15 bp, Homo sapiens
ctgcaacagagaatt

SEQ ID NO: 1256566 - DNA, 15 bp, Homo sapiens
tctgcaacagagaat

SEQ ID NO: 1256567 - DNA, 15 bp, Homo sapiens
ttctgcaacagagaa

SEQ ID NO: 1256568 - DNA, 15 bp, Homo sapiens
cttctgcaacagaga

SEQ ID NO: 1256569 - DNA, 15 bp, Homo sapiens
acttctgcaacagag

SEQ ID NO: 1256570 - DNA, 15 bp, Homo sapiens
aacttctgcaacaga

SEQ ID NO: 1256571 - DNA, 15 bp, Homo sapiens
taacttctgcaacag

SEQ ID NO: 1256572 - DNA, 15 bp, Homo sapiens
ataacttctgcaaca

SEQ ID NO: 1256573 - DNA, 15 bp, Homo sapiens
cataacttctgcaac

SEQ ID NO: 1256574 - DNA, 15 bp, Homo sapiens
ccataacttctgcaa

SEQ ID NO: 1256575 - DNA, 15 bp, Homo sapiens
gccataacttctgca

SEQ ID NO: 1256576 - DNA, 15 bp, Homo sapiens
ggccataacttctgc

SEQ ID NO: 1256577 - DNA, 15 bp, Homo sapiens
aggccataacttctg

SEQ ID NO: 1256578 - DNA, 15 bp, Homo sapiens
aaggccataacttct

SEQ ID NO: 1256579 - DNA, 15 bp, Homo sapiens
caaggccataacttc

SEQ ID NO: 1256580 - DNA, 15 bp, Homo sapiens
gcaaggccataactt

SEQ ID NO: 1256581 - DNA, 15 bp, Homo sapiens
agcaaggccataact

SEQ ID NO: 1256582 - DNA, 15 bp, Homo sapiens
gagcaaggccataac

SEQ ID NO: 1256583 - DNA, 15 bp, Homo sapiens
ggagcaaggccataa

SEQ ID NO: 1256584 - DNA, 15 bp, Homo sapiens
tggagcaaggccata

SEQ ID NO: 1256585 - DNA, 15 bp, Homo sapiens
ctggagcaaggccat

SEQ ID NO: 1256586 - DNA, 15 bp, Homo sapiens
tctggagcaaggcca

SEQ ID NO: 1256587 - DNA, 15 bp, Homo sapiens
ttctggagcaaggcc

SEQ ID NO: 1256588 - DNA, 15 bp, Homo sapiens
gttctggagcaaggc

SEQ ID NO: 1256589 - DNA, 15 bp, Homo sapiens
ggttctggagcaagg

SEQ ID NO: 1256590 - DNA, 15 bp, Homo sapiens
aggttctggagcaag

SEQ ID NO: 1256591 - DNA, 15 bp, Homo sapiens
gaggttctggagcaa

SEQ ID NO: 1256592 - DNA, 15 bp, Homo sapiens
tgaggttctggagca

SEQ ID NO: 1256593 - DNA, 15 bp, Homo sapiens
ctgaggttctggagc

SEQ ID NO: 1256594 - DNA, 15 bp, Homo sapiens
cctgaggttctggag

SEQ ID NO: 1256595 - DNA, 15 bp, Homo sapiens
ccctgaggttctgga

SEQ ID NO: 1256596 - DNA, 15 bp, Homo sapiens
cccctgaggttctgg

SEQ ID NO: 1256597 - DNA, 15 bp, Homo sapiens
acccctgaggttctg

SEQ ID NO: 1256598 - DNA, 15 bp, Homo sapiens
cacccctgaggttct

SEQ ID NO: 1256599 - DNA, 15 bp, Homo sapiens
acacccctgaggttc

SEQ ID NO: 1256600 - DNA, 15 bp, Homo sapiens
cacacccctgaggtt

SEQ ID NO: 1256601 - DNA, 15 bp, Homo sapiens
gcacacccctgaggt

SEQ ID NO: 1256602 - DNA, 15 bp, Homo sapiens
ggcacacccctgagg

SEQ ID NO: 1256603 - DNA, 15 bp, Homo sapiens
aggcacacccctgag

SEQ ID NO: 1256604 - DNA, 15 bp, Homo sapiens
gaggcacacccctga

SEQ ID NO: 1256605 - DNA, 15 bp, Homo sapiens
ggaggcacacccctg

SEQ ID NO: 1256606 - DNA, 15 bp, Homo sapiens
aggaggcacacccct

SEQ ID NO: 1256607 - DNA, 15 bp, Homo sapiens
taggaggcacacccc

SEQ ID NO: 1256608 - DNA, 15 bp, Homo sapiens
ataggaggcacaccc

SEQ ID NO: 1256609 - DNA, 15 bp, Homo sapiens
aataggaggcacacc

SEQ ID NO: 1256610 - DNA, 15 bp, Homo sapiens
caataggaggcacac

SEQ ID NO: 1256611 - DNA, 15 bp, Homo sapiens
ccaataggaggcaca

SEQ ID NO: 1256612 - DNA, 15 bp, Homo sapiens
cccaataggaggcac

SEQ ID NO: 1256613 - DNA, 15 bp, Homo sapiens
tcccaataggaggca

SEQ ID NO: 1256614 - DNA, 15 bp, Homo sapiens
gtcccaataggaggc

SEQ ID NO: 1256615 - DNA, 15 bp, Homo sapiens
agtcccaataggagg

SEQ ID NO: 1256616 - DNA, 15 bp, Homo sapiens
aagtcccaataggag

SEQ ID NO: 1256617 - DNA, 15 bp, Homo sapiens
gaaagtcccaatagg

SEQ ID NO: 1256618 - DNA, 15 bp, Homo sapiens
ggaaagtcccaatag

SEQ ID NO: 1256619 - DNA, 15 bp, Homo sapiens
tggaaagtcccaata

SEQ ID NO: 1256620 - DNA, 15 bp, Homo sapiens
ctggaaagtcccaat

SEQ ID NO: 1256621 - DNA, 15 bp, Homo sapiens
cctggaaagtcccaa

SEQ ID NO: 1256622 - DNA, 15 bp, Homo sapiens
ccctggaaagtccca

SEQ ID NO: 1256623 - DNA, 15 bp, Homo sapiens
tccctggaaagtccc

SEQ ID NO: 1256624 - DNA, 15 bp, Homo sapiens
gtccctggaaagtcc

SEQ ID NO: 1256625 - DNA, 15 bp, Homo sapiens
tgtccctggaaagtc

SEQ ID NO: 1256626 - DNA, 15 bp, Homo sapiens
gtgtccctggaaagt

SEQ ID NO: 1256627 - DNA, 15 bp, Homo sapiens
ggtgtccctggaaag

SEQ ID NO: 1256628 - DNA, 15 bp, Homo sapiens
tggtgtccctggaaa

SEQ ID NO: 1256629 - DNA, 15 bp, Homo sapiens
ctggtgtccctggaa

SEQ ID NO: 1256630 - DNA, 15 bp, Homo sapiens
tctggtgtccctgga

SEQ ID NO: 1256631 - DNA, 15 bp, Homo sapiens
atctggtgtccctgg

SEQ ID NO: 1256632 - DNA, 15 bp, Homo sapiens
tatctggtgtccctg

SEQ ID NO: 1256633 - DNA, 15 bp, Homo sapiens
ctatctggtgtccct

SEQ ID NO: 1256634 - DNA, 15 bp, Homo sapiens
gctatctggtgtccc

SEQ ID NO: 1256635 - DNA, 15 bp, Homo sapiens
tgctatctggtgtcc

SEQ ID NO: 1256636 - DNA, 15 bp, Homo sapiens
atgctatctggtgtc

SEQ ID NO: 1256637 - DNA, 15 bp, Homo sapiens
aatgctatctggtgt

SEQ ID NO: 1256638 - DNA, 15 bp, Homo sapiens
aaatgctatctggtg

SEQ ID NO: 1256639 - DNA, 15 bp, Homo sapiens
taaatgctatctggt

SEQ ID NO: 1256640 - DNA, 15 bp, Homo sapiens
ataaatgctatctgg

SEQ ID NO: 1256641 - DNA, 15 bp, Homo sapiens
gataaatgctatctg

SEQ ID NO: 1256642 - DNA, 15 bp, Homo sapiens
agataaatgctatct

SEQ ID NO: 1256643 - DNA, 15 bp, Homo sapiens
tagataaatgctatc

SEQ ID NO: 1256644 - DNA, 15 bp, Homo sapiens
gtagataaatgctat

SEQ ID NO: 1256645 - DNA, 15 bp, Homo sapiens
tgtagataaatgcta

SEQ ID NO: 1256646 - DNA, 15 bp, Homo sapiens
ctgtagataaatgct

SEQ ID NO: 1256647 - DNA, 15 bp, Homo sapiens
gctgtagataaatgc

SEQ ID NO: 1256648 - DNA, 15 bp, Homo sapiens
tgctgtagataaatg

SEQ ID NO: 1256649 - DNA, 15 bp, Homo sapiens
ttgctgtagataaat

SEQ ID NO: 1256650 - DNA, 15 bp, Homo sapiens
tttgctgtagataaa

SEQ ID NO: 1256651 - DNA, 15 bp, Homo sapiens
atttgctgtagataa

SEQ ID NO: 1256652 - DNA, 15 bp, Homo sapiens
tatttgctgtagata

SEQ ID NO: 1256653 - DNA, 15 bp, Homo sapiens
gtatttgctgtagat

SEQ ID NO: 1256654 - DNA, 15 bp, Homo sapiens
ggtatttgctgtaga

SEQ ID NO: 1256655 - DNA, 15 bp, Homo sapiens
aggtatttgctgtag

SEQ ID NO: 1256656 - DNA, 15 bp, Homo sapiens
gaggtatttgctgta

SEQ ID NO: 1256657 - DNA, 15 bp, Homo sapiens
agaggtatttgctgt

SEQ ID NO: 1256658 - DNA, 15 bp, Homo sapiens
cagaggtatttgctg

SEQ ID NO: 1256659 - DNA, 15 bp, Homo sapiens
tcagaggtatttgct

SEQ ID NO: 1256660 - DNA, 15 bp, Homo sapiens
gtcagaggtatttgc

SEQ ID NO: 1256661 - DNA, 15 bp, Homo sapiens
tgtcagaggtatttg

SEQ ID NO: 1256662 - DNA, 15 bp, Homo sapiens
gtgtcagaggtattt

SEQ ID NO: 1256663 - DNA, 15 bp, Homo sapiens
ggtgtcagaggtatt

SEQ ID NO: 1256664 - DNA, 15 bp, Homo sapiens
tggtgtcagaggtat

SEQ ID NO: 1256665 - DNA, 15 bp, Homo sapiens
gtggtgtcagaggta

SEQ ID NO: 1256666 - DNA, 15 bp, Homo sapiens
agtggtgtcagaggt

SEQ ID NO: 1256667 - DNA, 15 bp, Homo sapiens
cagtggtgtcagagg

SEQ ID NO: 1256668 - DNA, 15 bp, Homo sapiens
ccagtggtgtcagag

SEQ ID NO: 1256669 - DNA, 15 bp, Homo sapiens
tccagtggtgtcaga

SEQ ID NO: 1256670 - DNA, 15 bp, Homo sapiens
atccagtggtgtcag

SEQ ID NO: 1256671 - DNA, 15 bp, Homo sapiens
gatccagtggtgtca

SEQ ID NO: 1256672 - DNA, 15 bp, Homo sapiens
agatccagtggtgtc

SEQ ID NO: 1256673 - DNA, 15 bp, Homo sapiens
cagatccagtggtgt

SEQ ID NO: 1256674 - DNA, 15 bp, Homo sapiens
gcagatccagtggtg

SEQ ID NO: 1256675 - DNA, 15 bp, Homo sapiens
agcagatccagtggt

SEQ ID NO: 1256676 - DNA, 15 bp, Homo sapiens
cagcagatccagtgg

SEQ ID NO: 1256677 - DNA, 15 bp, Homo sapiens
ccagcagatccagtg

SEQ ID NO: 1256678 - DNA, 15 bp, Homo sapiens
tccagcagatccagt

SEQ ID NO: 1256679 - DNA, 15 bp, Homo sapiens
atccagcagatccag

SEQ ID NO: 1256680 - DNA, 15 bp, Homo sapiens
aatccagcagatcca

SEQ ID NO: 1256681 - DNA, 15 bp, Homo sapiens
taatccagcagatcc

SEQ ID NO: 1256682 - DNA, 15 bp, Homo sapiens
ataatccagcagatc

SEQ ID NO: 1256683 - DNA, 15 bp, Homo sapiens
tataatccagcagat

SEQ ID NO: 1256684 - DNA, 15 bp, Homo sapiens
atataatccagcaga

SEQ ID NO: 1256685 - DNA, 15 bp, Homo sapiens
tatataatccagcag

SEQ ID NO: 1256686 - DNA, 15 bp, Homo sapiens
ctatataatccagca

SEQ ID NO: 1256687 - DNA, 15 bp, Homo sapiens
actatataatccagc

SEQ ID NO: 1256688 - DNA, 15 bp, Homo sapiens
aactatataatccag

SEQ ID NO: 1256689 - DNA, 15 bp, Homo sapiens
gaactatataatcca

SEQ ID NO: 1256690 - DNA, 15 bp, Homo sapiens
tgaactatataatcc

SEQ ID NO: 1256691 - DNA, 15 bp, Homo sapiens
ttgaactatataatc

SEQ ID NO: 1256692 - DNA, 15 bp, Homo sapiens
cttgaactatataat

SEQ ID NO: 1256693 - DNA, 15 bp, Homo sapiens
acttgaactatataa

SEQ ID NO: 1256694 - DNA, 15 bp, Homo sapiens
tacttgaactatata

SEQ ID NO: 1256695 - DNA, 15 bp, Homo sapiens
ctacttgaactatat

SEQ ID NO: 1256696 - DNA, 15 bp, Homo sapiens
gctacttgaactata

SEQ ID NO: 1256697 - DNA, 15 bp, Homo sapiens
tgctacttgaactat

SEQ ID NO: 1256698 - DNA, 15 bp, Homo sapiens
ctgctacttgaacta

SEQ ID NO: 1256699 - DNA, 15 bp, Homo sapiens
gctgctacttgaact

SEQ ID NO: 1256700 - DNA, 15 bp, Homo sapiens
agctgctacttgaac

SEQ ID NO: 1256701 - DNA, 15 bp, Homo sapiens
aagctgctacttgaa

SEQ ID NO: 1256702 - DNA, 15 bp, Homo sapiens
aaagctgctacttga

SEQ ID NO: 1256703 - DNA, 15 bp, Homo sapiens
gaaagctgctacttg

SEQ ID NO: 1256704 - DNA, 15 bp, Homo sapiens
tgaaagctgctactt

SEQ ID NO: 1256705 - DNA, 15 bp, Homo sapiens
gtgaaagctgctact

SEQ ID NO: 1256706 - DNA, 15 bp, Homo sapiens
ggtgaaagctgctac

SEQ ID NO: 1256707 - DNA, 15 bp, Homo sapiens
tggtgaaagctgcta

SEQ ID NO: 1256708 - DNA, 15 bp, Homo sapiens
gtggtgaaagctgct

SEQ ID NO: 1256709 - DNA, 15 bp, Homo sapiens
tgtggtgaaagctgc

SEQ ID NO: 1256710 - DNA, 15 bp, Homo sapiens
ctgtggtgaaagctg

SEQ ID NO: 1256711 - DNA, 15 bp, Homo sapiens
gctgtggtgaaagct

SEQ ID NO: 1256712 - DNA, 15 bp, Homo sapiens
ggctgtggtgaaagc

SEQ ID NO: 1256713 - DNA, 15 bp, Homo sapiens
aggctgtggtgaaag

SEQ ID NO: 1256714 - DNA, 15 bp, Homo sapiens
caggctgtggtgaaa

SEQ ID NO: 1256715 - DNA, 15 bp, Homo sapiens
ccaggctgtggtgaa

SEQ ID NO: 1256716 - DNA, 15 bp, Homo sapiens
tccaggctgtggtga

SEQ ID NO: 1256717 - DNA, 15 bp, Homo sapiens
ctccaggctgtggtg

SEQ ID NO: 1256718 - DNA, 15 bp, Homo sapiens
gctccaggctgtggt

SEQ ID NO: 1256719 - DNA, 15 bp, Homo sapiens
agctccaggctgtgg

SEQ ID NO: 1256720 - DNA, 15 bp, Homo sapiens
tagctccaggctgtg

SEQ ID NO: 1256721 - DNA, 15 bp, Homo sapiens
ttagctccaggctgt

SEQ ID NO: 1256722 - DNA, 15 bp, Homo sapiens
attagctccaggctg

SEQ ID NO: 1256723 - DNA, 15 bp, Homo sapiens
gattagctccaggct

SEQ ID NO: 1256724 - DNA, 15 bp, Homo sapiens
ggattagctccaggc

SEQ ID NO: 1256725 - DNA, 15 bp, Homo sapiens
aggattagctccagg

SEQ ID NO: 1256726 - DNA, 15 bp, Homo sapiens
caggattagctccag

SEQ ID NO: 1256727 - DNA, 15 bp, Homo sapiens
tcaggattagctcca

SEQ ID NO: 1256728 - DNA, 15 bp, Homo sapiens
ctcaggattagctcc

SEQ ID NO: 1256729 - DNA, 15 bp, Homo sapiens
tctcaggattagctc

SEQ ID NO: 1256730 - DNA, 15 bp, Homo sapiens
atctcaggattagct

SEQ ID NO: 1256731 - DNA, 15 bp, Homo sapiens
catctcaggattagc

SEQ ID NO: 1256732 - DNA, 15 bp, Homo sapiens
acatctcaggattag

SEQ ID NO: 1256733 - DNA, 15 bp, Homo sapiens
gacatctcaggatta

SEQ ID NO: 1256734 - DNA, 15 bp, Homo sapiens
agacatctcaggatt

SEQ ID NO: 1256735 - DNA, 15 bp, Homo sapiens
gagacatctcaggat

SEQ ID NO: 1256736 - DNA, 15 bp, Homo sapiens
agagacatctcagga

SEQ ID NO: 1256737 - DNA, 15 bp, Homo sapiens
cagagacatctcagg

SEQ ID NO: 1256738 - DNA, 15 bp, Homo sapiens
tcagagacatctcag

SEQ ID NO: 1256739 - DNA, 15 bp, Homo sapiens
gtcagagacatctca

SEQ ID NO: 1256740 - DNA, 15 bp, Homo sapiens
agtcagagacatctc

SEQ ID NO: 1256741 - DNA, 15 bp, Homo sapiens
tagtcagagacatct

SEQ ID NO: 1256742 - DNA, 15 bp, Homo sapiens
gtagtcagagacatc

SEQ ID NO: 1256743 - DNA, 15 bp, Homo sapiens
cgtagtcagagacat

SEQ ID NO: 1256744 - DNA, 15 bp, Homo sapiens
ccgtagtcagagaca

SEQ ID NO: 1256745 - DNA, 15 bp, Homo sapiens
accgtagtcagagac

SEQ ID NO: 1256746 - DNA, 15 bp, Homo sapiens
taccgtagtcagaga

SEQ ID NO: 1256747 - DNA, 15 bp, Homo sapiens
gtaccgtagtcagag

SEQ ID NO: 1256748 - DNA, 15 bp, Homo sapiens
ggtaccgtagtcaga

SEQ ID NO: 1256749 - DNA, 15 bp, Homo sapiens
gggtaccgtagtcag

SEQ ID NO: 1256750 - DNA, 15 bp, Homo sapiens
tgggtaccgtagtca

SEQ ID NO: 1256751 - DNA, 15 bp, Homo sapiens
gtgggtaccgtagtc

SEQ ID NO: 1256752 - DNA, 15 bp, Homo sapiens
agtgggtaccgtagt

SEQ ID NO: 1256753 - DNA, 15 bp, Homo sapiens
tagtgggtaccgtag

SEQ ID NO: 1256754 - DNA, 15 bp, Homo sapiens
ctagtgggtaccgta

SEQ ID NO: 1256755 - DNA, 15 bp, Homo sapiens
gctagtgggtaccgt

SEQ ID NO: 1256756 - DNA, 15 bp, Homo sapiens
tgctagtgggtaccg

SEQ ID NO: 1256757 - DNA, 15 bp, Homo sapiens
ttgctagtgggtacc

SEQ ID NO: 1256758 - DNA, 15 bp, Homo sapiens
gttgctagtgggtac

SEQ ID NO: 1256759 - DNA, 15 bp, Homo sapiens
agttgctagtgggta

SEQ ID NO: 1256760 - DNA, 15 bp, Homo sapiens
cagttgctagtgggt

SEQ ID NO: 1256761 - DNA, 15 bp, Homo sapiens
ccagttgctagtggg

SEQ ID NO: 1256762 - DNA, 15 bp, Homo sapiens
tccagttgctagtgg

SEQ ID NO: 1256763 - DNA, 15 bp, Homo sapiens
gtccagttgctagtg

SEQ ID NO: 1256764 - DNA, 15 bp, Homo sapiens
tgtccagttgctagt

SEQ ID NO: 1256765 - DNA, 15 bp, Homo sapiens
atgtccagttgctag

SEQ ID NO: 1256766 - DNA, 15 bp, Homo sapiens
aatgtccagttgcta

SEQ ID NO: 1256767 - DNA, 15 bp, Homo sapiens
aaatgtccagttgct

SEQ ID NO: 1256768 - DNA, 15 bp, Homo sapiens
aaaatgtccagttgc

SEQ ID NO: 1256769 - DNA, 15 bp, Homo sapiens
gaaaatgtccagttg

SEQ ID NO: 1256770 - DNA, 15 bp, Homo sapiens
agaaaatgtccagtt

SEQ ID NO: 1256771 - DNA, 15 bp, Homo sapiens
tagaaaatgtccagt

SEQ ID NO: 1256772 - DNA, 15 bp, Homo sapiens
ttagaaaatgtccag

SEQ ID NO: 1256773 - DNA, 15 bp, Homo sapiens
cttagaaaatgtcca

SEQ ID NO: 1256774 - DNA, 15 bp, Homo sapiens
acttagaaaatgtcc

SEQ ID NO: 1256775 - DNA, 15 bp, Homo sapiens
gacttagaaaatgtc

SEQ ID NO: 1256776 - DNA, 15 bp, Homo sapiens
agacttagaaaatgt

SEQ ID NO: 1256777 - DNA, 15 bp, Homo sapiens
gagacttagaaaatg

SEQ ID NO: 1256778 - DNA, 15 bp, Homo sapiens
ggagacttagaaaat

SEQ ID NO: 1256779 - DNA, 15 bp, Homo sapiens
aggagacttagaaaa

SEQ ID NO: 1256780 - DNA, 15 bp, Homo sapiens
caggagacttagaaa

SEQ ID NO: 1256781 - DNA, 15 bp, Homo sapiens
tcaggagacttagaa

SEQ ID NO: 1256782 - DNA, 15 bp, Homo sapiens
atcaggagacttaga

SEQ ID NO: 1256783 - DNA, 15 bp, Homo sapiens
tatcaggagacttag

SEQ ID NO: 1256784 - DNA, 15 bp, Homo sapiens
ttatcaggagactta

SEQ ID NO: 1256785 - DNA, 15 bp, Homo sapiens
tttatcaggagactt

SEQ ID NO: 1256786 - DNA, 15 bp, Homo sapiens
atttatcaggagact

SEQ ID NO: 1256787 - DNA, 15 bp, Homo sapiens
catttatcaggagac

SEQ ID NO: 1256788 - DNA, 15 bp, Homo sapiens
ccatttatcaggaga

SEQ ID NO: 1256789 - DNA, 15 bp, Homo sapiens
cccatttatcaggag

SEQ ID NO: 1256790 - DNA, 15 bp, Homo sapiens
acccatttatcagga

SEQ ID NO: 1256791 - DNA, 15 bp, Homo sapiens
aacccatttatcagg

SEQ ID NO: 1256792 - DNA, 15 bp, Homo sapiens
caacccatttatcag

SEQ ID NO: 1256793 - DNA, 15 bp, Homo sapiens
tcaacccatttatca

SEQ ID NO: 1256794 - DNA, 15 bp, Homo sapiens
ttcaacccatttatc

SEQ ID NO: 1256795 - DNA, 15 bp, Homo sapiens
cttcaacccatttat

SEQ ID NO: 1256796 - DNA, 15 bp, Homo sapiens
gcttcaacccattta

SEQ ID NO: 1256797 - DNA, 15 bp, Homo sapiens
agcttcaacccattt

SEQ ID NO: 1256798 - DNA, 15 bp, Homo sapiens
cagcttcaacccatt

SEQ ID NO: 1256799 - DNA, 15 bp, Homo sapiens
acagcttcaacccat

SEQ ID NO: 1256800 - DNA, 15 bp, Homo sapiens
tacagcttcaaccca

SEQ ID NO: 1256801 - DNA, 15 bp, Homo sapiens
atacagcttcaaccc

SEQ ID NO: 1256802 - DNA, 15 bp, Homo sapiens
aatacagcttcaacc

SEQ ID NO: 1256803 - DNA, 15 bp, Homo sapiens
gaatacagcttcaac

SEQ ID NO: 1256804 - DNA, 15 bp, Homo sapiens
ggaatacagcttcaa

SEQ ID NO: 1256805 - DNA, 15 bp, Homo sapiens
gggaatacagcttca

SEQ ID NO: 1256806 - DNA, 15 bp, Homo sapiens
tgggaatacagcttc

SEQ ID NO: 1256807 - DNA, 15 bp, Homo sapiens
ttgggaatacagctt

SEQ ID NO: 1256808 - DNA, 15 bp, Homo sapiens
tttgggaatacagct

SEQ ID NO: 1256809 - DNA, 15 bp, Homo sapiens
tgtctttgggaatac

SEQ ID NO: 1256810 - DNA, 15 bp, Homo sapiens
ctgtctttgggaata

SEQ ID NO: 1256811 - DNA, 15 bp, Homo sapiens
actgtctttgggaat

SEQ ID NO: 1256812 - DNA, 15 bp, Homo sapiens
tactgtctttgggaa

SEQ ID NO: 1256813 - DNA, 15 bp, Homo sapiens
gtactgtctttggga

SEQ ID NO: 1256814 - DNA, 15 bp, Homo sapiens
tgtactgtctttggg

SEQ ID NO: 1256815 - DNA, 15 bp, Homo sapiens
atgtactgtctttgg

SEQ ID NO: 1256816 - DNA, 15 bp, Homo sapiens
catgtactgtctttg

SEQ ID NO: 1256817 - DNA, 15 bp, Homo sapiens
gcatgtactgtcttt

SEQ ID NO: 1256818 - DNA, 15 bp, Homo sapiens
agcatgtactgtctt

SEQ ID NO: 1256819 - DNA, 15 bp, Homo sapiens
cagcatgtactgtct

SEQ ID NO: 1256820 - DNA, 15 bp, Homo sapiens
gcagcatgtactgtc

SEQ ID NO: 1256821 - DNA, 15 bp, Homo sapiens
ggcagcatgtactgt

SEQ ID NO: 1256822 - DNA, 15 bp, Homo sapiens
aggcagcatgtactg

SEQ ID NO: 1256823 - DNA, 15 bp, Homo sapiens
aaggcagcatgtact

SEQ ID NO: 1256824 - DNA, 15 bp, Homo sapiens
gaaggcagcatgtac

SEQ ID NO: 1256825 - DNA, 15 bp, Homo sapiens
tgaaggcagcatgta

SEQ ID NO: 1256826 - DNA, 15 bp, Homo sapiens
ttgaaggcagcatgt

SEQ ID NO: 1256827 - DNA, 15 bp, Homo sapiens
tttgaaggcagcatg

SEQ ID NO: 1256828 - DNA, 15 bp, Homo sapiens
ttttgaaggcagcat

SEQ ID NO: 1256829 - DNA, 15 bp, Homo sapiens
attttgaaggcagca

SEQ ID NO: 1256830 - DNA, 15 bp, Homo sapiens
gattttgaaggcagc

SEQ ID NO: 1256831 - DNA, 15 bp, Homo sapiens
tgattttgaaggcag

SEQ ID NO: 1256832 - DNA, 15 bp, Homo sapiens
ctgattttgaaggca

SEQ ID NO: 1256833 - DNA, 15 bp, Homo sapiens
tctgattttgaaggc

SEQ ID NO: 1256834 - DNA, 15 bp, Homo sapiens
ctctgattttgaagg

SEQ ID NO: 1256835 - DNA, 15 bp, Homo sapiens
cctctgattttgaag

SEQ ID NO: 1256836 - DNA, 15 bp, Homo sapiens
tcctctgattttgaa

SEQ ID NO: 1256837 - DNA, 15 bp, Homo sapiens
ctcctctgattttga

SEQ ID NO: 1256838 - DNA, 15 bp, Homo sapiens
cctcctctgattttg

SEQ ID NO: 1256839 - DNA, 15 bp, Homo sapiens
gcctcctctgatttt

SEQ ID NO: 1256840 - DNA, 15 bp, Homo sapiens
ggcctcctctgattt

SEQ ID NO: 1256841 - DNA, 15 bp, Homo sapiens
gggcctcctctgatt

SEQ ID NO: 1256842 - DNA, 15 bp, Homo sapiens
tgggcctcctctgat

SEQ ID NO: 1256843 - DNA, 15 bp, Homo sapiens
gtgggcctcctctga

SEQ ID NO: 1256844 - DNA, 15 bp, Homo sapiens
agtgggcctcctctg

SEQ ID NO: 1256845 - DNA, 15 bp, Homo sapiens
tagtgggcctcctct

SEQ ID NO: 1256846 - DNA, 15 bp, Homo sapiens
ttagtgggcctcctc

SEQ ID NO: 1256847 - DNA, 15 bp, Homo sapiens
cttagtgggcctcct

SEQ ID NO: 1256848 - DNA, 15 bp, Homo sapiens
acttagtgggcctcc

SEQ ID NO: 1256849 - DNA, 15 bp, Homo sapiens
cacttagtgggcctc

SEQ ID NO: 1256850 - DNA, 15 bp, Homo sapiens
tcacttagtgggcct

SEQ ID NO: 1256851 - DNA, 15 bp, Homo sapiens
atcacttagtgggcc

SEQ ID NO: 1256852 - DNA, 15 bp, Homo sapiens
tatcacttagtgggc

SEQ ID NO: 1256853 - DNA, 15 bp, Homo sapiens
ttatcacttagtggg

SEQ ID NO: 1256854 - DNA, 15 bp, Homo sapiens
cttatcacttagtgg

SEQ ID NO: 1256855 - DNA, 15 bp, Homo sapiens
gcttatcacttagtg

SEQ ID NO: 1256856 - DNA, 15 bp, Homo sapiens
ggcttatcacttagt

SEQ ID NO: 1256857 - DNA, 15 bp, Homo sapiens
tggcttatcacttag

SEQ ID NO: 1256858 - DNA, 15 bp, Homo sapiens
gtggcttatcactta

SEQ ID NO: 1256859 - DNA, 15 bp, Homo sapiens
agtggcttatcactt

SEQ ID NO: 1256860 - DNA, 15 bp, Homo sapiens
aagtggcttatcact

SEQ ID NO: 1256861 - DNA, 15 bp, Homo sapiens
aaagtggcttatcac

SEQ ID NO: 1256862 - DNA, 15 bp, Homo sapiens
gaaagtggcttatca

SEQ ID NO: 1256863 - DNA, 15 bp, Homo sapiens
agaaagtggcttatc

SEQ ID NO: 1256864 - DNA, 15 bp, Homo sapiens
aagaaagtggcttat

SEQ ID NO: 1256865 - DNA, 15 bp, Homo sapiens
taagaaagtggctta

SEQ ID NO: 1256866 - DNA, 15 bp, Homo sapiens
ctaagaaagtggctt

SEQ ID NO: 1256867 - DNA, 15 bp, Homo sapiens
actaagaaagtggct

SEQ ID NO: 1256868 - DNA, 15 bp, Homo sapiens
cactaagaaagtggc

SEQ ID NO: 1256869 - DNA, 15 bp, Homo sapiens
ccactaagaaagtgg

SEQ ID NO: 1256870 - DNA, 15 bp, Homo sapiens
gccactaagaaagtg

SEQ ID NO: 1256871 - DNA, 15 bp, Homo sapiens
tgccactaagaaagt

SEQ ID NO: 1256872 - DNA, 15 bp, Homo sapiens
ctgccactaagaaag

SEQ ID NO: 1256873 - DNA, 15 bp, Homo sapiens
cctgccactaagaaa

SEQ ID NO: 1256874 - DNA, 15 bp, Homo sapiens
ccctgccactaagaa

SEQ ID NO: 1256875 - DNA, 15 bp, Homo sapiens
cccctgccactaaga

SEQ ID NO: 1256876 - DNA, 15 bp, Homo sapiens
ccccctgccactaag

SEQ ID NO: 1256877 - DNA, 15 bp, Homo sapiens
accccctgccactaa

SEQ ID NO: 1256878 - DNA, 15 bp, Homo sapiens
caccccctgccacta

SEQ ID NO: 1256879 - DNA, 15 bp, Homo sapiens
tcaccccctgccact

SEQ ID NO: 1256880 - DNA, 15 bp, Homo sapiens
ctcaccccctgccac

SEQ ID NO: 1256881 - DNA, 15 bp, Homo sapiens
tctcaccccctgcca

SEQ ID NO: 1256882 - DNA, 15 bp, Homo sapiens
ttctcaccccctgcc

SEQ ID NO: 1256883 - DNA, 15 bp, Homo sapiens
cttctcaccccctgc

SEQ ID NO: 1256884 - DNA, 15 bp, Homo sapiens
acttctcaccccctg

SEQ ID NO: 1256885 - DNA, 15 bp, Homo sapiens
cacttctcaccccct

SEQ ID NO: 1256886 - DNA, 15 bp, Homo sapiens
gcacttctcaccccc

SEQ ID NO: 1256887 - DNA, 15 bp, Homo sapiens
tgcacttctcacccc

SEQ ID NO: 1256888 - DNA, 15 bp, Homo sapiens
ttgcacttctcaccc

SEQ ID NO: 1256889 - DNA, 15 bp, Homo sapiens
attgcacttctcacc

SEQ ID NO: 1256890 - DNA, 15 bp, Homo sapiens
tattgcacttctcac

SEQ ID NO: 1256891 - DNA, 15 bp, Homo sapiens
ttattgcacttctca

SEQ ID NO: 1256892 - DNA, 15 bp, Homo sapiens
tttattgcacttctc

SEQ ID NO: 1256893 - DNA, 15 bp, Homo sapiens
atttattgcacttct

SEQ ID NO: 1256894 - DNA, 15 bp, Homo sapiens
aatttattgcacttc

SEQ ID NO: 1256895 - DNA, 15 bp, Homo sapiens
caatttattgcactt

SEQ ID NO: 1256896 - DNA, 15 bp, Homo sapiens
acaatttattgcact

SEQ ID NO: 1256897 - DNA, 15 bp, Homo sapiens
gacaatttattgcac

SEQ ID NO: 1256898 - DNA, 15 bp, Homo sapiens
tgacaatttattgca

SEQ ID NO: 1256899 - DNA, 15 bp, Homo sapiens
atgacaatttattgc

SEQ ID NO: 1256900 - DNA, 15 bp, Homo sapiens
aatgacaatttattg

SEQ ID NO: 1256901 - DNA, 15 bp, Homo sapiens
aaatgacaatttatt

SEQ ID NO: 1256902 - DNA, 15 bp, Homo sapiens
taaatgacaatttat

SEQ ID NO: 1256903 - DNA, 15 bp, Homo sapiens
gtaaatgacaattta

SEQ ID NO: 1256904 - DNA, 15 bp, Homo sapiens
tgtaaatgacaattt

SEQ ID NO: 1256905 - DNA, 15 bp, Homo sapiens
atgtaaatgacaatt

SEQ ID NO: 1256906 - DNA, 15 bp, Homo sapiens
aatgtaaatgacaat

SEQ ID NO: 1256907 - DNA, 15 bp, Homo sapiens
taatgtaaatgacaa

SEQ ID NO: 1256908 - DNA, 15 bp, Homo sapiens
ttaatgtaaatgaca

SEQ ID NO: 1256909 - DNA, 15 bp, Homo sapiens
tttaatgtaaatgac

SEQ ID NO: 1256910 - DNA, 15 bp, Homo sapiens
ctttaatgtaaatga

SEQ ID NO: 1256911 - DNA, 15 bp, Homo sapiens
cctttaatgtaaatg

SEQ ID NO: 1256912 - DNA, 15 bp, Homo sapiens
acctttaatgtaaat

SEQ ID NO: 1256913 - DNA, 15 bp, Homo sapiens
cacctttaatgtaaa

SEQ ID NO: 1256914 - DNA, 15 bp, Homo sapiens
tcacctttaatgtaa

SEQ ID NO: 1256915 - DNA, 15 bp, Homo sapiens
atcacctttaatgta

SEQ ID NO: 1256916 - DNA, 15 bp, Homo sapiens
catcacctttaatgt

SEQ ID NO: 1256917 - DNA, 15 bp, Homo sapiens
gcatcacctttaatg

SEQ ID NO: 1256918 - DNA, 15 bp, Homo sapiens
agcatcacctttaat

SEQ ID NO: 1256919 - DNA, 15 bp, Homo sapiens
gagcatcacctttaa

SEQ ID NO: 1256920 - DNA, 15 bp, Homo sapiens
ggagcatcaccttta

SEQ ID NO: 1256921 - DNA, 15 bp, Homo sapiens
gggagcatcaccttt

SEQ ID NO: 1256922 - DNA, 15 bp, Homo sapiens
tgggagcatcacctt

SEQ ID NO: 1256923 - DNA, 15 bp, Homo sapiens
ctgggagcatcacct

SEQ ID NO: 1256924 - DNA, 15 bp, Homo sapiens
gctgggagcatcacc

SEQ ID NO: 1256925 - DNA, 15 bp, Homo sapiens
tgctgggagcatcac

SEQ ID NO: 1256926 - DNA, 15 bp, Homo sapiens
atgctgggagcatca

SEQ ID NO: 1256927 - DNA, 15 bp, Homo sapiens
tatgctgggagcatc

SEQ ID NO: 1256928 - DNA, 15 bp, Homo sapiens
gtatgctgggagcat

SEQ ID NO: 1256929 - DNA, 15 bp, Homo sapiens
ggtatgctgggagca

SEQ ID NO: 1256930 - DNA, 15 bp, Homo sapiens
gggtatgctgggagc

SEQ ID NO: 1256931 - DNA, 15 bp, Homo sapiens
tgggtatgctgggag

SEQ ID NO: 1256932 - DNA, 15 bp, Homo sapiens
ctgggtatgctggga

SEQ ID NO: 1256933 - DNA, 15 bp, Homo sapiens
tctgggtatgctggg

SEQ ID NO: 1256934 - DNA, 15 bp, Homo sapiens
ctctgggtatgctgg

SEQ ID NO: 1256935 - DNA, 15 bp, Homo sapiens
gctctgggtatgctg

SEQ ID NO: 1256936 - DNA, 15 bp, Homo sapiens
tgctctgggtatgct

SEQ ID NO: 1256937 - DNA, 15 bp, Homo sapiens
gtgctctgggtatgc

SEQ ID NO: 1256938 - DNA, 15 bp, Homo sapiens
agtgctctgggtatg

SEQ ID NO: 1256939 - DNA, 15 bp, Homo sapiens
cagtgctctgggtat

SEQ ID NO: 1256940 - DNA, 15 bp, Homo sapiens
tcagtgctctgggta

SEQ ID NO: 1256941 - DNA, 15 bp, Homo sapiens
ttcagtgctctgggt

SEQ ID NO: 1256942 - DNA, 15 bp, Homo sapiens
attcagtgctctggg

SEQ ID NO: 1256943 - DNA, 15 bp, Homo sapiens
gattcagtgctctgg

SEQ ID NO: 1256944 - DNA, 15 bp, Homo sapiens
agattcagtgctctg

SEQ ID NO: 1256945 - DNA, 15 bp, Homo sapiens
aagattcagtgctct

SEQ ID NO: 1256946 - DNA, 15 bp, Homo sapiens
taagattcagtgctc

SEQ ID NO: 1256947 - DNA, 15 bp, Homo sapiens
ttaagattcagtgct

SEQ ID NO: 1256948 - DNA, 15 bp, Homo sapiens
gttaagattcagtgc

SEQ ID NO: 1256949 - DNA, 15 bp, Homo sapiens
tgttaagattcagtg

SEQ ID NO: 1256950 - DNA, 15 bp, Homo sapiens
ttgttaagattcagt

SEQ ID NO: 1256951 - DNA, 15 bp, Homo sapiens
gttgttaagattcag

SEQ ID NO: 1256952 - DNA, 15 bp, Homo sapiens
agttgttaagattca

SEQ ID NO: 1256953 - DNA, 15 bp, Homo sapiens
aagttgttaagattc

SEQ ID NO: 1256954 - DNA, 15 bp, Homo sapiens
caagttgttaagatt

SEQ ID NO: 1256955 - DNA, 15 bp, Homo sapiens
tcaagttgttaagat

SEQ ID NO: 1256956 - DNA, 15 bp, Homo sapiens
atcaagttgttaaga

SEQ ID NO: 1256957 - DNA, 15 bp, Homo sapiens
gatcaagttgttaag

SEQ ID NO: 1256958 - DNA, 15 bp, Homo sapiens
tgatcaagttgttaa

SEQ ID NO: 1256959 - DNA, 15 bp, Homo sapiens
ttgatcaagttgtta

SEQ ID NO: 1256960 - DNA, 15 bp, Homo sapiens
attgatcaagttgtt

SEQ ID NO: 1256961 - DNA, 15 bp, Homo sapiens
cattgatcaagttgt

SEQ ID NO: 1256962 - DNA, 15 bp, Homo sapiens
acattgatcaagttg

SEQ ID NO: 1256963 - DNA, 15 bp, Homo sapiens
cacattgatcaagtt

SEQ ID NO: 1256964 - DNA, 15 bp, Homo sapiens
ccacattgatcaagt

SEQ ID NO: 1256965 - DNA, 15 bp, Homo sapiens
gccacattgatcaag

SEQ ID NO: 1256966 - DNA, 15 bp, Homo sapiens
tgccacattgatcaa

SEQ ID NO: 1256967 - DNA, 15 bp, Homo sapiens
ttgccacattgatca

SEQ ID NO: 1256968 - DNA, 15 bp, Homo sapiens
cttgccacattgatc

SEQ ID NO: 1256969 - DNA, 15 bp, Homo sapiens
gcttgccacattgat

SEQ ID NO: 1256970 - DNA, 15 bp, Homo sapiens
ggcttgccacattga

SEQ ID NO: 1256971 - DNA, 15 bp, Homo sapiens
gggcttgccacattg

SEQ ID NO: 1256972 - DNA, 15 bp, Homo sapiens
agggcttgccacatt

SEQ ID NO: 1256973 - DNA, 15 bp, Homo sapiens
gagggcttgccacat

SEQ ID NO: 1256974 - DNA, 15 bp, Homo sapiens
tgagggcttgccaca

SEQ ID NO: 1256975 - DNA, 15 bp, Homo sapiens
ttgagggcttgccac

SEQ ID NO: 1256976 - DNA, 15 bp, Homo sapiens
attgagggcttgcca

SEQ ID NO: 1256977 - DNA, 15 bp, Homo sapiens
aattgagggcttgcc

SEQ ID NO: 1256978 - DNA, 15 bp, Homo sapiens
taattgagggcttgc

SEQ ID NO: 1256979 - DNA, 15 bp, Homo sapiens
ataattgagggcttg

SEQ ID NO: 1256980 - DNA, 15 bp, Homo sapiens
gataattgagggctt

SEQ ID NO: 1256981 - DNA, 15 bp, Homo sapiens
agataattgagggct

SEQ ID NO: 1256982 - DNA, 15 bp, Homo sapiens
aagataattgagggc

SEQ ID NO: 1256983 - DNA, 15 bp, Homo sapiens
caagataattgaggg

SEQ ID NO: 1256984 - DNA, 15 bp, Homo sapiens
ccaagataattgagg

SEQ ID NO: 1256985 - DNA, 15 bp, Homo sapiens
tccaagataattgag

SEQ ID NO: 1256986 - DNA, 15 bp, Homo sapiens
ctccaagataattga

SEQ ID NO: 1256987 - DNA, 15 bp, Homo sapiens
actccaagataattg

SEQ ID NO: 1256988 - DNA, 15 bp, Homo sapiens
aactccaagataatt

SEQ ID NO: 1256989 - DNA, 15 bp, Homo sapiens
aaactccaagataat

SEQ ID NO: 1256990 - DNA, 15 bp, Homo sapiens
taaactccaagataa

SEQ ID NO: 1256991 - DNA, 15 bp, Homo sapiens
ataaactccaagata

SEQ ID NO: 1256992 - DNA, 15 bp, Homo sapiens
gataaactccaagat

SEQ ID NO: 1256993 - DNA, 15 bp, Homo sapiens
agataaactccaaga

SEQ ID NO: 1256994 - DNA, 15 bp, Homo sapiens
gagataaactccaag

SEQ ID NO: 1256995 - DNA, 15 bp, Homo sapiens
ggagataaactccaa

SEQ ID NO: 1256996 - DNA, 15 bp, Homo sapiens
gggagataaactcca

SEQ ID NO: 1256997 - DNA, 15 bp, Homo sapiens
tgggagataaactcc

SEQ ID NO: 1256998 - DNA, 15 bp, Homo sapiens
atgggagataaactc

SEQ ID NO: 1256999 - DNA, 15 bp, Homo sapiens
aatgggagataaact

SEQ ID NO: 1257000 - DNA, 15 bp, Homo sapiens
gaatgggagataaac

SEQ ID NO: 1257001 - DNA, 15 bp, Homo sapiens
agaatgggagataaa

SEQ ID NO: 1257002 - DNA, 15 bp, Homo sapiens
aagaatgggagataa

SEQ ID NO: 1257003 - DNA, 15 bp, Homo sapiens
aaagaatgggagata

SEQ ID NO: 1257004 - DNA, 15 bp, Homo sapiens
caaagaatgggagat

SEQ ID NO: 1257005 - DNA, 15 bp, Homo sapiens
ccaaagaatgggaga

SEQ ID NO: 1257006 - DNA, 15 bp, Homo sapiens
cccaaagaatgggag

SEQ ID NO: 1257007 - DNA, 15 bp, Homo sapiens
acccaaagaatggga

SEQ ID NO: 1257008 - DNA, 15 bp, Homo sapiens
aacccaaagaatggg

SEQ ID NO: 1257009 - DNA, 15 bp, Homo sapiens
taacccaaagaatgg

SEQ ID NO: 1257010 - DNA, 15 bp, Homo sapiens
gtaacccaaagaatg

SEQ ID NO: 1257011 - DNA, 15 bp, Homo sapiens
tgtaacccaaagaat

SEQ ID NO: 1257012 - DNA, 15 bp, Homo sapiens
atgtaacccaaagaa

SEQ ID NO: 1257013 - DNA, 15 bp, Homo sapiens
catgtaacccaaaga

SEQ ID NO: 1257014 - DNA, 15 bp, Homo sapiens
acatgtaacccaaag

SEQ ID NO: 1257015 - DNA, 15 bp, Homo sapiens
tacatgtaacccaaa

SEQ ID NO: 1257016 - DNA, 15 bp, Homo sapiens
atacatgtaacccaa

SEQ ID NO: 1257017 - DNA, 15 bp, Homo sapiens
aatacatgtaaccca

SEQ ID NO: 1257018 - DNA, 15 bp, Homo sapiens
aaatacatgtaaccc

SEQ ID NO: 1257019 - DNA, 15 bp, Homo sapiens
aaaatacatgtaacc

SEQ ID NO: 1257020 - DNA, 15 bp, Homo sapiens
taaaatacatgtaac

SEQ ID NO: 1257021 - DNA, 15 bp, Homo sapiens
gtaaaatacatgtaa

SEQ ID NO: 1257022 - DNA, 15 bp, Homo sapiens
agtaaaatacatgta

SEQ ID NO: 1257023 - DNA, 15 bp, Homo sapiens
cagtaaaatacatgt

SEQ ID NO: 1257024 - DNA, 15 bp, Homo sapiens
ccagtaaaatacatg

SEQ ID NO: 1257025 - DNA, 15 bp, Homo sapiens
gccagtaaaatacat

SEQ ID NO: 1257026 - DNA, 15 bp, Homo sapiens
ggccagtaaaataca

SEQ ID NO: 1257027 - DNA, 15 bp, Homo sapiens
tggccagtaaaatac

SEQ ID NO: 1257028 - DNA, 15 bp, Homo sapiens
gtggccagtaaaata

SEQ ID NO: 1257029 - DNA, 15 bp, Homo sapiens
agtggccagtaaaat

SEQ ID NO: 1257030 - DNA, 15 bp, Homo sapiens
aagtggccagtaaaa

SEQ ID NO: 1257031 - DNA, 15 bp, Homo sapiens
taagtggccagtaaa

SEQ ID NO: 1257032 - DNA, 15 bp, Homo sapiens
ctaagtggccagtaa

SEQ ID NO: 1257033 - DNA, 15 bp, Homo sapiens
gctaagtggccagta

SEQ ID NO: 1257034 - DNA, 15 bp, Homo sapiens
ggctaagtggccagt

SEQ ID NO: 1257035 - DNA, 15 bp, Homo sapiens
aggctaagtggccag

SEQ ID NO: 1257036 - DNA, 15 bp, Homo sapiens
caggctaagtggcca

SEQ ID NO: 1257037 - DNA, 15 bp, Homo sapiens
acaggctaagtggcc

SEQ ID NO: 1257038 - DNA, 15 bp, Homo sapiens
gacaggctaagtggc

SEQ ID NO: 1257039 - DNA, 15 bp, Homo sapiens
agacaggctaagtgg

SEQ ID NO: 1257040 - DNA, 15 bp, Homo sapiens
tagacaggctaagtg

SEQ ID NO: 1257041 - DNA, 15 bp, Homo sapiens
gtagacaggctaagt

SEQ ID NO: 1257042 - DNA, 15 bp, Homo sapiens
agtagacaggctaag

SEQ ID NO: 1257043 - DNA, 15 bp, Homo sapiens
gagtagacaggctaa

SEQ ID NO: 1257044 - DNA, 15 bp, Homo sapiens
tgagtagacaggcta

SEQ ID NO: 1257045 - DNA, 15 bp, Homo sapiens
ttgagtagacaggct

SEQ ID NO: 1257046 - DNA, 15 bp, Homo sapiens
tttgagtagacaggc

SEQ ID NO: 1257047 - DNA, 15 bp, Homo sapiens
ctttgagtagacagg

SEQ ID NO: 1257048 - DNA, 15 bp, Homo sapiens
actttgagtagacag

SEQ ID NO: 1257049 - DNA, 15 bp, Homo sapiens
cactttgagtagaca

SEQ ID NO: 1257050 - DNA, 15 bp, Homo sapiens
acactttgagtagac

SEQ ID NO: 1257051 - DNA, 15 bp, Homo sapiens
tacactttgagtaga

SEQ ID NO: 1257052 - DNA, 15 bp, Homo sapiens
ctacactttgagtag

SEQ ID NO: 1257053 - DNA, 15 bp, Homo sapiens
actacactttgagta

SEQ ID NO: 1257054 - DNA, 15 bp, Homo sapiens
gactacactttgagt

SEQ ID NO: 1257055 - DNA, 15 bp, Homo sapiens
agactacactttgag

SEQ ID NO: 1257056 - DNA, 15 bp, Homo sapiens
tagactacactttga

SEQ ID NO: 1257057 - DNA, 15 bp, Homo sapiens
gtagactacactttg

SEQ ID NO: 1257058 - DNA, 15 bp, Homo sapiens
tgtagactacacttt

SEQ ID NO: 1257059 - DNA, 15 bp, Homo sapiens
ctgtagactacactt

SEQ ID NO: 1257060 - DNA, 15 bp, Homo sapiens
tctgtagactacact

SEQ ID NO: 1257061 - DNA, 15 bp, Homo sapiens
gtctgtagactacac

SEQ ID NO: 1257062 - DNA, 15 bp, Homo sapiens
tgtctgtagactaca

SEQ ID NO: 1257063 - DNA, 15 bp, Homo sapiens
ctgtctgtagactac

SEQ ID NO: 1257064 - DNA, 15 bp, Homo sapiens
tctgtctgtagacta

SEQ ID NO: 1257065 - DNA, 15 bp, Homo sapiens
atctgtctgtagact

SEQ ID NO: 1257066 - DNA, 15 bp, Homo sapiens
catctgtctgtagac

SEQ ID NO: 1257067 - DNA, 15 bp, Homo sapiens
acatctgtctgtaga

SEQ ID NO: 1257068 - DNA, 15 bp, Homo sapiens
aacatctgtctgtag

SEQ ID NO: 1257069 - DNA, 15 bp, Homo sapiens
caacatctgtctgta

SEQ ID NO: 1257070 - DNA, 15 bp, Homo sapiens
ccaacatctgtctgt

SEQ ID NO: 1257071 - DNA, 15 bp, Homo sapiens
gccaacatctgtctg

SEQ ID NO: 1257072 - DNA, 15 bp, Homo sapiens
agccaacatctgtct

SEQ ID NO: 1257073 - DNA, 15 bp, Homo sapiens
cagccaacatctgtc

SEQ ID NO: 1257074 - DNA, 15 bp, Homo sapiens
ccagccaacatctgt

SEQ ID NO: 1257075 - DNA, 15 bp, Homo sapiens
accagccaacatctg

SEQ ID NO: 1257076 - DNA, 15 bp, Homo sapiens
caccagccaacatct

SEQ ID NO: 1257077 - DNA, 15 bp, Homo sapiens
tcaccagccaacatc

SEQ ID NO: 1257078 - DNA, 15 bp, Homo sapiens
ttcaccagccaacat

SEQ ID NO: 1257079 - DNA, 15 bp, Homo sapiens
gttcaccagccaaca

SEQ ID NO: 1257080 - DNA, 15 bp, Homo sapiens
tgttcaccagccaac

SEQ ID NO: 1257081 - DNA, 15 bp, Homo sapiens
gtgttcaccagccaa

SEQ ID NO: 1257082 - DNA, 15 bp, Homo sapiens
agtgttcaccagcca

SEQ ID NO: 1257083 - DNA, 15 bp, Homo sapiens
aagtgttcaccagcc

SEQ ID NO: 1257084 - DNA, 15 bp, Homo sapiens
caagtgttcaccagc

SEQ ID NO: 1257085 - DNA, 15 bp, Homo sapiens
ccaagtgttcaccag

SEQ ID NO: 1257086 - DNA, 15 bp, Homo sapiens
accaagtgttcacca

SEQ ID NO: 1257087 - DNA, 15 bp, Homo sapiens
aaccaagtgttcacc

SEQ ID NO: 1257088 - DNA, 15 bp, Homo sapiens
taaccaagtgttcac

SEQ ID NO: 1257089 - DNA, 15 bp, Homo sapiens
gtaaccaagtgttca

SEQ ID NO: 1257090 - DNA, 15 bp, Homo sapiens
agtaaccaagtgttc

SEQ ID NO: 1257091 - DNA, 15 bp, Homo sapiens
tagtaaccaagtgtt

SEQ ID NO: 1257092 - DNA, 15 bp, Homo sapiens
ctagtaaccaagtgt

SEQ ID NO: 1257093 - DNA, 15 bp, Homo sapiens
gctagtaaccaagtg

SEQ ID NO: 1257094 - DNA, 15 bp, Homo sapiens
ggctagtaaccaagt

SEQ ID NO: 1257095 - DNA, 15 bp, Homo sapiens
aggctagtaaccaag

SEQ ID NO: 1257096 - DNA, 15 bp, Homo sapiens
caggctagtaaccaa

SEQ ID NO: 1257097 - DNA, 15 bp, Homo sapiens
acaggctagtaacca

SEQ ID NO: 1257098 - DNA, 15 bp, Homo sapiens
cacaggctagtaacc

SEQ ID NO: 1257099 - DNA, 15 bp, Homo sapiens
ccacaggctagtaac

SEQ ID NO: 1257100 - DNA, 15 bp, Homo sapiens
tccacaggctagtaa

SEQ ID NO: 1257101 - DNA, 15 bp, Homo sapiens
ttccacaggctagta

SEQ ID NO: 1257102 - DNA, 15 bp, Homo sapiens
tttccacaggctagt

SEQ ID NO: 1257103 - DNA, 15 bp, Homo sapiens
ctttccacaggctag

SEQ ID NO: 1257104 - DNA, 15 bp, Homo sapiens
tctttccacaggcta

SEQ ID NO: 1257105 - DNA, 15 bp, Homo sapiens
atctttccacaggct

SEQ ID NO: 1257106 - DNA, 15 bp, Homo sapiens
tatctttccacaggc

SEQ ID NO: 1257107 - DNA, 15 bp, Homo sapiens
ttatctttccacagg

SEQ ID NO: 1257108 - DNA, 15 bp, Homo sapiens
tttatctttccacag

SEQ ID NO: 1257109 - DNA, 15 bp, Homo sapiens
atttatctttccaca

SEQ ID NO: 1257110 - DNA, 15 bp, Homo sapiens
aatttatctttccac

SEQ ID NO: 1257111 - DNA, 15 bp, Homo sapiens
gaatttatctttcca

SEQ ID NO: 1257112 - DNA, 15 bp, Homo sapiens
tgaatttatctttcc

SEQ ID NO: 1257113 - DNA, 15 bp, Homo sapiens
atgaatttatctttc

SEQ ID NO: 1257114 - DNA, 15 bp, Homo sapiens
tatgaatttatcttt

SEQ ID NO: 1257115 - DNA, 15 bp, Homo sapiens
ttatgaatttatctt

SEQ ID NO: 1257116 - DNA, 15 bp, Homo sapiens
tttatgaatttatct

SEQ ID NO: 1257117 - DNA, 15 bp, Homo sapiens
atttatgaatttatc

SEQ ID NO: 1257118 - DNA, 15 bp, Homo sapiens
aatttatgaatttat

SEQ ID NO: 1257119 - DNA, 15 bp, Homo sapiens
caatttatgaattta

SEQ ID NO: 1257120 - DNA, 15 bp, Homo sapiens
tcaatttatgaattt

SEQ ID NO: 1257121 - DNA, 15 bp, Homo sapiens
ttcaatttatgaatt

SEQ ID NO: 1257122 - DNA, 15 bp, Homo sapiens
tttcaatttatgaat

SEQ ID NO: 1257123 - DNA, 15 bp, Homo sapiens
ttttcaatttatgaa

SEQ ID NO: 1257124 - DNA, 15 bp, Homo sapiens
attttcaatttatga

SEQ ID NO: 1257125 - DNA, 15 bp, Homo sapiens
gattttcaatttatg

SEQ ID NO: 1257126 - DNA, 15 bp, Homo sapiens
agattttcaatttat

SEQ ID NO: 1257127 - DNA, 15 bp, Homo sapiens
tagattttcaattta

SEQ ID NO: 1257128 - DNA, 15 bp, Homo sapiens
atagattttcaattt

SEQ ID NO: 1257129 - DNA, 15 bp, Homo sapiens
tatagattttcaatt

SEQ ID NO: 1257130 - DNA, 15 bp, Homo sapiens
atatagattttcaat

SEQ ID NO: 1257131 - DNA, 15 bp, Homo sapiens
aatatagattttcaa

SEQ ID NO: 1257132 - DNA, 15 bp, Homo sapiens
aaatatagattttca

SEQ ID NO: 1257133 - DNA, 15 bp, Homo sapiens
taaatatagattttc

SEQ ID NO: 1257134 - DNA, 15 bp, Homo sapiens
ctaaatatagatttt

SEQ ID NO: 1257135 - DNA, 15 bp, Homo sapiens
tctaaatatagattt

SEQ ID NO: 1257136 - DNA, 15 bp, Homo sapiens
ttctaaatatagatt

SEQ ID NO: 1257137 - DNA, 15 bp, Homo sapiens
tttctaaatatagat

SEQ ID NO: 1257138 - DNA, 15 bp, Homo sapiens
atttctaaatataga

SEQ ID NO: 1257139 - DNA, 15 bp, Homo sapiens
aatttctaaatatag

SEQ ID NO: 1257140 - DNA, 15 bp, Homo sapiens
aaatttctaaatata

SEQ ID NO: 1257141 - DNA, 15 bp, Homo sapiens
aaaatttctaaatat

SEQ ID NO: 1257142 - DNA, 15 bp, Homo sapiens
taaaatttctaaata

SEQ ID NO: 1257143 - DNA, 15 bp, Homo sapiens
ataaaatttctaaat

SEQ ID NO: 1257144 - DNA, 15 bp, Homo sapiens
ctataaaatttctaa

SEQ ID NO: 1257145 - DNA, 15 bp, Homo sapiens
gctataaaatttcta

SEQ ID NO: 1257146 - DNA, 15 bp, Homo sapiens
tgctataaaatttct

SEQ ID NO: 1257147 - DNA, 15 bp, Homo sapiens
ttgctataaaatttc

SEQ ID NO: 1257148 - DNA, 15 bp, Homo sapiens
attgctataaaattt

SEQ ID NO: 1257149 - DNA, 15 bp, Homo sapiens
aattgctataaaatt

SEQ ID NO: 1257150 - DNA, 15 bp, Homo sapiens
aaattgctataaaat

SEQ ID NO: 1257151 - DNA, 15 bp, Homo sapiens
caaattgctataaaa

SEQ ID NO: 1257152 - DNA, 15 bp, Homo sapiens
gcaaattgctataaa

SEQ ID NO: 1257153 - DNA, 15 bp, Homo sapiens
ggcaaattgctataa

SEQ ID NO: 1257154 - DNA, 15 bp, Homo sapiens
tggcaaattgctata

SEQ ID NO: 1257155 - DNA, 15 bp, Homo sapiens
atggcaaattgctat

SEQ ID NO: 1257156 - DNA, 15 bp, Homo sapiens
aatggcaaattgcta

SEQ ID NO: 1257157 - DNA, 15 bp, Homo sapiens
caatggcaaattgct

SEQ ID NO: 1257158 - DNA, 15 bp, Homo sapiens
gcaatggcaaattgc

SEQ ID NO: 1257159 - DNA, 15 bp, Homo sapiens
agcaatggcaaattg

SEQ ID NO: 1257160 - DNA, 15 bp, Homo sapiens
cagcaatggcaaatt

SEQ ID NO: 1257161 - DNA, 15 bp, Homo sapiens
acagcaatggcaaat

SEQ ID NO: 1257162 - DNA, 15 bp, Homo sapiens
cacagcaatggcaaa

SEQ ID NO: 1257163 - DNA, 15 bp, Homo sapiens
tcacagcaatggcaa

SEQ ID NO: 1257164 - DNA, 15 bp, Homo sapiens
gtcacagcaatggca

SEQ ID NO: 1257165 - DNA, 15 bp, Homo sapiens
agtcacagcaatggc

SEQ ID NO: 1257166 - DNA, 15 bp, Homo sapiens
aagtcacagcaatgg

SEQ ID NO: 1257167 - DNA, 15 bp, Homo sapiens
gaagtcacagcaatg

SEQ ID NO: 1257168 - DNA, 15 bp, Homo sapiens
ggaagtcacagcaat

SEQ ID NO: 1257169 - DNA, 15 bp, Homo sapiens
tggaagtcacagcaa

SEQ ID NO: 1257170 - DNA, 15 bp, Homo sapiens
ttggaagtcacagca

SEQ ID NO: 1257171 - DNA, 15 bp, Homo sapiens
cttggaagtcacagc

SEQ ID NO: 1257172 - DNA, 15 bp, Homo sapiens
gcttggaagtcacag

SEQ ID NO: 1257173 - DNA, 15 bp, Homo sapiens
tgcttggaagtcaca

SEQ ID NO: 1257174 - DNA, 15 bp, Homo sapiens
gtgcttggaagtcac

SEQ ID NO: 1257175 - DNA, 15 bp, Homo sapiens
tgtgcttggaagtca

SEQ ID NO: 1257176 - DNA, 15 bp, Homo sapiens
atgtgcttggaagtc

SEQ ID NO: 1257177 - DNA, 15 bp, Homo sapiens
catgtgcttggaagt

SEQ ID NO: 1257178 - DNA, 15 bp, Homo sapiens
tcatgtgcttggaag

SEQ ID NO: 1257179 - DNA, 15 bp, Homo sapiens
atcatgtgcttggaa

SEQ ID NO: 1257180 - DNA, 15 bp, Homo sapiens
gatcatgtgcttgga

SEQ ID NO: 1257181 - DNA, 15 bp, Homo sapiens
tgatcatgtgcttgg

SEQ ID NO: 1257182 - DNA, 15 bp, Homo sapiens
ctgatcatgtgcttg

SEQ ID NO: 1257183 - DNA, 15 bp, Homo sapiens
tctgatcatgtgctt

SEQ ID NO: 1257184 - DNA, 15 bp, Homo sapiens
ttctgatcatgtgct

SEQ ID NO: 1257185 - DNA, 15 bp, Homo sapiens
cttctgatcatgtgc

SEQ ID NO: 1257186 - DNA, 15 bp, Homo sapiens
tcttctgatcatgtg

SEQ ID NO: 1257187 - DNA, 15 bp, Homo sapiens
gtcttctgatcatgt

SEQ ID NO: 1257188 - DNA, 15 bp, Homo sapiens
agtcttctgatcatg

SEQ ID NO: 1257189 - DNA, 15 bp, Homo sapiens
tagtcttctgatcat

SEQ ID NO: 1257190 - DNA, 15 bp, Homo sapiens
ttagtcttctgatca

SEQ ID NO: 1257191 - DNA, 15 bp, Homo sapiens
attagtcttctgatc

SEQ ID NO: 1257192 - DNA, 15 bp, Homo sapiens
gattagtcttctgat

SEQ ID NO: 1257193 - DNA, 15 bp, Homo sapiens
agattagtcttctga

SEQ ID NO: 1257194 - DNA, 15 bp, Homo sapiens
gagattagtcttctg

SEQ ID NO: 1257195 - DNA, 15 bp, Homo sapiens
tgagattagtcttct

SEQ ID NO: 1257196 - DNA, 15 bp, Homo sapiens
atgagattagtcttc

SEQ ID NO: 1257197 - DNA, 15 bp, Homo sapiens
aatgagattagtctt

SEQ ID NO: 1257198 - DNA, 15 bp, Homo sapiens
caatgagattagtct

SEQ ID NO: 1257199 - DNA, 15 bp, Homo sapiens
tcaatgagattagtc

SEQ ID NO: 1257200 - DNA, 15 bp, Homo sapiens
ttcaatgagattagt

SEQ ID NO: 1257201 - DNA, 15 bp, Homo sapiens
gttcaatgagattag

SEQ ID NO: 1257202 - DNA, 15 bp, Homo sapiens
tgttcaatgagatta

SEQ ID NO: 1257203 - DNA, 15 bp, Homo sapiens
ttgttcaatgagatt

SEQ ID NO: 1257204 - DNA, 15 bp, Homo sapiens
tttgttcaatgagat

SEQ ID NO: 1257205 - DNA, 15 bp, Homo sapiens
ctttgttcaatgaga

SEQ ID NO: 1257206 - DNA, 15 bp, Homo sapiens
actttgttcaatgag

SEQ ID NO: 1257207 - DNA, 15 bp, Homo sapiens
tactttgttcaatga

SEQ ID NO: 1257208 - DNA, 15 bp, Homo sapiens
atactttgttcaatg

SEQ ID NO: 1257209 - DNA, 15 bp, Homo sapiens
tatactttgttcaat

SEQ ID NO: 1257210 - DNA, 15 bp, Homo sapiens
ctatactttgttcaa

SEQ ID NO: 1257211 - DNA, 15 bp, Homo sapiens
tctatactttgttca

SEQ ID NO: 1257212 - DNA, 15 bp, Homo sapiens
atctatactttgttc

SEQ ID NO: 1257213 - DNA, 15 bp, Homo sapiens
gatctatactttgtt

SEQ ID NO: 1257214 - DNA, 15 bp, Homo sapiens
tgatctatactttgt

SEQ ID NO: 1257215 - DNA, 15 bp, Homo sapiens
atgatctatactttg

SEQ ID NO: 1257216 - DNA, 15 bp, Homo sapiens
aatgatctatacttt

SEQ ID NO: 1257217 - DNA, 15 bp, Homo sapiens
caatgatctatactt

SEQ ID NO: 1257218 - DNA, 15 bp, Homo sapiens
acaatgatctatact

SEQ ID NO: 1257219 - DNA, 15 bp, Homo sapiens
cacaatgatctatac

SEQ ID NO: 1257220 - DNA, 15 bp, Homo sapiens
tcacaatgatctata

SEQ ID NO: 1257221 - DNA, 15 bp, Homo sapiens
atcacaatgatctat

SEQ ID NO: 1257222 - DNA, 15 bp, Homo sapiens
aatcacaatgatcta

SEQ ID NO: 1257223 - DNA, 15 bp, Homo sapiens
taatcacaatgatct

SEQ ID NO: 1257224 - DNA, 15 bp, Homo sapiens
ataatcacaatgatc

SEQ ID NO: 1257225 - DNA, 15 bp, Homo sapiens
aataatcacaatgat

SEQ ID NO: 1257226 - DNA, 15 bp, Homo sapiens
caataatcacaatga

SEQ ID NO: 1257227 - DNA, 15 bp, Homo sapiens
acaataatcacaatg

SEQ ID NO: 1257228 - DNA, 15 bp, Homo sapiens
gacaataatcacaat

SEQ ID NO: 1257229 - DNA, 15 bp, Homo sapiens
tgacaataatcacaa

SEQ ID NO: 1257230 - DNA, 15 bp, Homo sapiens
ttgacaataatcaca

SEQ ID NO: 1257231 - DNA, 15 bp, Homo sapiens
tttgacaataatcac

SEQ ID NO: 1257232 - DNA, 15 bp, Homo sapiens
gtttgacaataatca

SEQ ID NO: 1257233 - DNA, 15 bp, Homo sapiens
agtttgacaataatc

SEQ ID NO: 1257234 - DNA, 15 bp, Homo sapiens
gagtttgacaataat

SEQ ID NO: 1257235 - DNA, 15 bp, Homo sapiens
tgagtttgacaataa

SEQ ID NO: 1257236 - DNA, 15 bp, Homo sapiens
atgagtttgacaata

SEQ ID NO: 1257237 - DNA, 15 bp, Homo sapiens
tatgagtttgacaat

SEQ ID NO: 1257238 - DNA, 15 bp, Homo sapiens
atatgagtttgacaa

SEQ ID NO: 1257239 - DNA, 15 bp, Homo sapiens
catatgagtttgaca

SEQ ID NO: 1257240 - DNA, 15 bp, Homo sapiens
ccatatgagtttgac

SEQ ID NO: 1257241 - DNA, 15 bp, Homo sapiens
accatatgagtttga

SEQ ID NO: 1257242 - DNA, 15 bp, Homo sapiens
caccatatgagtttg

SEQ ID NO: 1257243 - DNA, 15 bp, Homo sapiens
tcaccatatgagttt

SEQ ID NO: 1257244 - DNA, 15 bp, Homo sapiens
atcaccatatgagtt

SEQ ID NO: 1257245 - DNA, 15 bp, Homo sapiens
aatcaccatatgagt

SEQ ID NO: 1257246 - DNA, 15 bp, Homo sapiens
aaatcaccatatgag

SEQ ID NO: 1257247 - DNA, 15 bp, Homo sapiens
caaatcaccatatga

SEQ ID NO: 1257248 - DNA, 15 bp, Homo sapiens
gcaaatcaccatatg

SEQ ID NO: 1257249 - DNA, 15 bp, Homo sapiens
tgcaaatcaccatat

SEQ ID NO: 1257250 - DNA, 15 bp, Homo sapiens
gtgcaaatcaccata

SEQ ID NO: 1257251 - DNA, 15 bp, Homo sapiens
tgtgcaaatcaccat

SEQ ID NO: 1257252 - DNA, 15 bp, Homo sapiens
atgtgcaaatcacca

SEQ ID NO: 1257253 - DNA, 15 bp, Homo sapiens
catgtgcaaatcacc

SEQ ID NO: 1257254 - DNA, 15 bp, Homo sapiens
gcatgtgcaaatcac

SEQ ID NO: 1257255 - DNA, 15 bp, Homo sapiens
tgcatgtgcaaatca

SEQ ID NO: 1257256 - DNA, 15 bp, Homo sapiens
ctgcatgtgcaaatc

SEQ ID NO: 1257257 - DNA, 15 bp, Homo sapiens
gctgcatgtgcaaat

SEQ ID NO: 1257258 - DNA, 15 bp, Homo sapiens
tgctgcatgtgcaaa

SEQ ID NO: 1257259 - DNA, 15 bp, Homo sapiens
ttgctgcatgtgcaa

SEQ ID NO: 1257260 - DNA, 15 bp, Homo sapiens
cttgctgcatgtgca

SEQ ID NO: 1257261 - DNA, 15 bp, Homo sapiens
tcttgctgcatgtgc

SEQ ID NO: 1257262 - DNA, 15 bp, Homo sapiens
atcttgctgcatgtg

SEQ ID NO: 1257263 - DNA, 15 bp, Homo sapiens
tatcttgctgcatgt

SEQ ID NO: 1257264 - DNA, 15 bp, Homo sapiens
gtatcttgctgcatg

SEQ ID NO: 1257265 - DNA, 15 bp, Homo sapiens
ggtatcttgctgcat

SEQ ID NO: 1257266 - DNA, 15 bp, Homo sapiens
aggtatcttgctgca

SEQ ID NO: 1257267 - DNA, 15 bp, Homo sapiens
taggtatcttgctgc

SEQ ID NO: 1257268 - DNA, 15 bp, Homo sapiens
gtaggtatcttgctg

SEQ ID NO: 1257269 - DNA, 15 bp, Homo sapiens
agtaggtatcttgct

SEQ ID NO: 1257270 - DNA, 15 bp, Homo sapiens
cagtaggtatcttgc

SEQ ID NO: 1257271 - DNA, 15 bp, Homo sapiens
acagtaggtatcttg

SEQ ID NO: 1257272 - DNA, 15 bp, Homo sapiens
aacagtaggtatctt

SEQ ID NO: 1257273 - DNA, 15 bp, Homo sapiens
gaacagtaggtatct

SEQ ID NO: 1257274 - DNA, 15 bp, Homo sapiens
tgaacagtaggtatc

SEQ ID NO: 1257275 - DNA, 15 bp, Homo sapiens
ttgaacagtaggtat

SEQ ID NO: 1257276 - DNA, 15 bp, Homo sapiens
cttgaacagtaggta

SEQ ID NO: 1257277 - DNA, 15 bp, Homo sapiens
acttgaacagtaggt

SEQ ID NO: 1257278 - DNA, 15 bp, Homo sapiens
aacttgaacagtagg

SEQ ID NO: 1257279 - DNA, 15 bp, Homo sapiens
gaacttgaacagtag

SEQ ID NO: 1257280 - DNA, 15 bp, Homo sapiens
tgaacttgaacagta

SEQ ID NO: 1257281 - DNA, 15 bp, Homo sapiens
ctgaacttgaacagt

SEQ ID NO: 1257282 - DNA, 15 bp, Homo sapiens
actgaacttgaacag

SEQ ID NO: 1257283 - DNA, 15 bp, Homo sapiens
aactgaacttgaaca

SEQ ID NO: 1257284 - DNA, 15 bp, Homo sapiens
taactgaacttgaac

SEQ ID NO: 1257285 - DNA, 15 bp, Homo sapiens
ataactgaacttgaa

SEQ ID NO: 1257286 - DNA, 15 bp, Homo sapiens
aataactgaacttga

SEQ ID NO: 1257287 - DNA, 15 bp, Homo sapiens
aaataactgaacttg

SEQ ID NO: 1257288 - DNA, 15 bp, Homo sapiens
gaaataactgaactt

SEQ ID NO: 1257289 - DNA, 15 bp, Homo sapiens
ggaaataactgaact

SEQ ID NO: 1257290 - DNA, 15 bp, Homo sapiens
tggaaataactgaac

SEQ ID NO: 1257291 - DNA, 15 bp, Homo sapiens
ttggaaataactgaa

SEQ ID NO: 1257292 - DNA, 15 bp, Homo sapiens
tttggaaataactga

SEQ ID NO: 1257293 - DNA, 15 bp, Homo sapiens
ttttggaaataactg

SEQ ID NO: 1257294 - DNA, 15 bp, Homo sapiens
cttttggaaataact

SEQ ID NO: 1257295 - DNA, 15 bp, Homo sapiens
acttttggaaataac

SEQ ID NO: 1257296 - DNA, 15 bp, Homo sapiens
tacttttggaaataa

SEQ ID NO: 1257297 - DNA, 15 bp, Homo sapiens
atacttttggaaata

SEQ ID NO: 1257298 - DNA, 15 bp, Homo sapiens
aatacttttggaaat

SEQ ID NO: 1257299 - DNA, 15 bp, Homo sapiens
caatacttttggaaa

SEQ ID NO: 1257300 - DNA, 15 bp, Homo sapiens
gcaatacttttggaa

SEQ ID NO: 1257301 - DNA, 15 bp, Homo sapiens
agcaatacttttgga

SEQ ID NO: 1257302 - DNA, 15 bp, Homo sapiens
gagcaatacttttgg

SEQ ID NO: 1257303 - DNA, 15 bp, Homo sapiens
ggagcaatacttttg

SEQ ID NO: 1257304 - DNA, 15 bp, Homo sapiens
tggagcaatactttt

SEQ ID NO: 1257305 - DNA, 15 bp, Homo sapiens
ttggagcaatacttt

SEQ ID NO: 1257306 - DNA, 15 bp, Homo sapiens
cttggagcaatactt

SEQ ID NO: 1257307 - DNA, 15 bp, Homo sapiens
tcttggagcaatact

SEQ ID NO: 1257308 - DNA, 15 bp, Homo sapiens
gtcttggagcaatac

SEQ ID NO: 1257309 - DNA, 15 bp, Homo sapiens
tgtcttggagcaata

SEQ ID NO: 1257310 - DNA, 15 bp, Homo sapiens
ctgtcttggagcaat

SEQ ID NO: 1257311 - DNA, 15 bp, Homo sapiens
actgtcttggagcaa

SEQ ID NO: 1257312 - DNA, 15 bp, Homo sapiens
aactgtcttggagca

SEQ ID NO: 1257313 - DNA, 15 bp, Homo sapiens
aaactgtcttggagc

SEQ ID NO: 1257314 - DNA, 15 bp, Homo sapiens
caaactgtcttggag

SEQ ID NO: 1257315 - DNA, 15 bp, Homo sapiens
ccaaactgtcttgga

SEQ ID NO: 1257316 - DNA, 15 bp, Homo sapiens
tccaaactgtcttgg

SEQ ID NO: 1257317 - DNA, 15 bp, Homo sapiens
ttccaaactgtcttg

SEQ ID NO: 1257318 - DNA, 15 bp, Homo sapiens
tttccaaactgtctt

SEQ ID NO: 1257319 - DNA, 15 bp, Homo sapiens
ttttccaaactgtct

SEQ ID NO: 1257320 - DNA, 15 bp, Homo sapiens
tttttccaaactgtc

SEQ ID NO: 1257321 - DNA, 15 bp, Homo sapiens
ttttttccaaactgt

SEQ ID NO: 1257322 - DNA, 15 bp, Homo sapiens
attttttccaaactg

SEQ ID NO: 1257323 - DNA, 15 bp, Homo sapiens
tattttttccaaact

SEQ ID NO: 1257324 - DNA, 15 bp, Homo sapiens
ttattttttccaaac

SEQ ID NO: 1257325 - DNA, 15 bp, Homo sapiens
tttattttttccaaa

SEQ ID NO: 1257326 - DNA, 15 bp, Homo sapiens
ttttattttttccaa

SEQ ID NO: 1257327 - DNA, 15 bp, Homo sapiens
tttttattttttcca

SEQ ID NO: 1257328 - DNA, 15 bp, Homo sapiens
ttttttattttttcc

SEQ ID NO: 1257329 - DNA, 15 bp, Homo sapiens
tttttttattttttc

SEQ ID NO: 1257330 - DNA, 15 bp, Homo sapiens
ctttttttatttttt

SEQ ID NO: 1257331 - DNA, 15 bp, Homo sapiens
tctttttttattttt

SEQ ID NO: 1257332 - DNA, 15 bp, Homo sapiens
ttctttttttatttt

SEQ ID NO: 1257333 - DNA, 15 bp, Homo sapiens
attctttttttattt

SEQ ID NO: 1257334 - DNA, 15 bp, Homo sapiens
aattctttttttatt

SEQ ID NO: 1257335 - DNA, 15 bp, Homo sapiens
caattctttttttat

SEQ ID NO: 1257336 - DNA, 15 bp, Homo sapiens
ccaattcttttttta

SEQ ID NO: 1257337 - DNA, 15 bp, Homo sapiens
ctccaattctttttt

SEQ ID NO: 1257338 - DNA, 15 bp, Homo sapiens
tctccaattcttttt

SEQ ID NO: 1257339 - DNA, 15 bp, Homo sapiens
ctctccaattctttt

SEQ ID NO: 1257340 - DNA, 15 bp, Homo sapiens
actctccaattcttt

SEQ ID NO: 1257341 - DNA, 15 bp, Homo sapiens
aactctccaattctt

SEQ ID NO: 1257342 - DNA, 15 bp, Homo sapiens
aaactctccaattct

SEQ ID NO: 1257343 - DNA, 15 bp, Homo sapiens
gaaactctccaattc

SEQ ID NO: 1257344 - DNA, 15 bp, Homo sapiens
tgaaactctccaatt

SEQ ID NO: 1257345 - DNA, 15 bp, Homo sapiens
ctgaaactctccaat

SEQ ID NO: 1257346 - DNA, 15 bp, Homo sapiens
tctgaaactctccaa

SEQ ID NO: 1257347 - DNA, 15 bp, Homo sapiens
ttctgaaactctcca

SEQ ID NO: 1257348 - DNA, 15 bp, Homo sapiens
cttctgaaactctcc

SEQ ID NO: 1257349 - DNA, 15 bp, Homo sapiens
gcttctgaaactctc

SEQ ID NO: 1257350 - DNA, 15 bp, Homo sapiens
tgcttctgaaactct

SEQ ID NO: 1257351 - DNA, 15 bp, Homo sapiens
gtgcttctgaaactc

SEQ ID NO: 1257352 - DNA, 15 bp, Homo sapiens
agtgcttctgaaact

SEQ ID NO: 1257353 - DNA, 15 bp, Homo sapiens
cagtgcttctgaaac

SEQ ID NO: 1257354 - DNA, 15 bp, Homo sapiens
tcagtgcttctgaaa

SEQ ID NO: 1257355 - DNA, 15 bp, Homo sapiens
atcagtgcttctgaa

SEQ ID NO: 1257356 - DNA, 15 bp, Homo sapiens
gatcagtgcttctga

SEQ ID NO: 1257357 - DNA, 15 bp, Homo sapiens
ggatcagtgcttctg

SEQ ID NO: 1257358 - DNA, 15 bp, Homo sapiens
tggatcagtgcttct

SEQ ID NO: 1257359 - DNA, 15 bp, Homo sapiens
ctggatcagtgcttc

SEQ ID NO: 1257360 - DNA, 15 bp, Homo sapiens
tctggatcagtgctt

SEQ ID NO: 1257361 - DNA, 15 bp, Homo sapiens
ctctggatcagtgct

SEQ ID NO: 1257362 - DNA, 15 bp, Homo sapiens
actctggatcagtgc

SEQ ID NO: 1257363 - DNA, 15 bp, Homo sapiens
tactctggatcagtg

SEQ ID NO: 1257364 - DNA, 15 bp, Homo sapiens
atactctggatcagt

SEQ ID NO: 1257365 - DNA, 15 bp, Homo sapiens
aatactctggatcag

SEQ ID NO: 1257366 - DNA, 15 bp, Homo sapiens
aaatactctggatca

SEQ ID NO: 1257367 - DNA, 15 bp, Homo sapiens
caaatactctggatc

SEQ ID NO: 1257368 - DNA, 15 bp, Homo sapiens
gcaaatactctggat

SEQ ID NO: 1257369 - DNA, 15 bp, Homo sapiens
ggcaaatactctgga

SEQ ID NO: 1257370 - DNA, 15 bp, Homo sapiens
gggcaaatactctgg

SEQ ID NO: 1257371 - DNA, 15 bp, Homo sapiens
ggggcaaatactctg

SEQ ID NO: 1257372 - DNA, 15 bp, Homo sapiens
aggggcaaatactct

SEQ ID NO: 1257373 - DNA, 15 bp, Homo sapiens
aaggggcaaatactc

SEQ ID NO: 1257374 - DNA, 15 bp, Homo sapiens
aaaggggcaaatact

SEQ ID NO: 1257375 - DNA, 15 bp, Homo sapiens
caaaggggcaaatac

SEQ ID NO: 1257376 - DNA, 15 bp, Homo sapiens
acaaaggggcaaata

SEQ ID NO: 1257377 - DNA, 15 bp, Homo sapiens
tacaaaggggcaaat

SEQ ID NO: 1257378 - DNA, 15 bp, Homo sapiens
gtacaaaggggcaaa

SEQ ID NO: 1257379 - DNA, 15 bp, Homo sapiens
agtacaaaggggcaa

SEQ ID NO: 1257380 - DNA, 15 bp, Homo sapiens
aagtacaaaggggca

SEQ ID NO: 1257381 - DNA, 15 bp, Homo sapiens
aaagtacaaaggggc

SEQ ID NO: 1257382 - DNA, 15 bp, Homo sapiens
caaagtacaaagggg

SEQ ID NO: 1257383 - DNA, 15 bp, Homo sapiens
acaaagtacaaaggg

SEQ ID NO: 1257384 - DNA, 15 bp, Homo sapiens
tacaaagtacaaagg

SEQ ID NO: 1257385 - DNA, 15 bp, Homo sapiens
gtacaaagtacaaag

SEQ ID NO: 1257386 - DNA, 15 bp, Homo sapiens
agtacaaagtacaaa

SEQ ID NO: 1257387 - DNA, 15 bp, Homo sapiens
gagtacaaagtacaa

SEQ ID NO: 1257388 - DNA, 15 bp, Homo sapiens
ggagtacaaagtaca

SEQ ID NO: 1257389 - DNA, 15 bp, Homo sapiens
gggagtacaaagtac

SEQ ID NO: 1257390 - DNA, 15 bp, Homo sapiens
agggagtacaaagta

SEQ ID NO: 1257391 - DNA, 15 bp, Homo sapiens
gagggagtacaaagt

SEQ ID NO: 1257392 - DNA, 15 bp, Homo sapiens
ggagggagtacaaag

SEQ ID NO: 1257393 - DNA, 15 bp, Homo sapiens
gggagggagtacaaa

SEQ ID NO: 1257394 - DNA, 15 bp, Homo sapiens
cgggagggagtacaa

SEQ ID NO: 1257395 - DNA, 15 bp, Homo sapiens
ccgggagggagtaca

SEQ ID NO: 1257396 - DNA, 15 bp, Homo sapiens
tccgggagggagtac

SEQ ID NO: 1257397 - DNA, 15 bp, Homo sapiens
gtccgggagggagta

SEQ ID NO: 1257398 - DNA, 15 bp, Homo sapiens
tgtccgggagggagt

SEQ ID NO: 1257399 - DNA, 15 bp, Homo sapiens
ctgtccgggagggag

SEQ ID NO: 1257400 - DNA, 15 bp, Homo sapiens
tctgtccgggaggga

SEQ ID NO: 1257401 - DNA, 15 bp, Homo sapiens
ctctgtccgggaggg

SEQ ID NO: 1257402 - DNA, 15 bp, Homo sapiens
tctctgtccgggagg

SEQ ID NO: 1257403 - DNA, 15 bp, Homo sapiens
ctctctgtccgggag

SEQ ID NO: 1257404 - DNA, 15 bp, Homo sapiens
gctctctgtccggga

SEQ ID NO: 1257405 - DNA, 15 bp, Homo sapiens
tgctctctgtccggg

SEQ ID NO: 1257406 - DNA, 15 bp, Homo sapiens
ctgctctctgtccgg

SEQ ID NO: 1257407 - DNA, 15 bp, Homo sapiens
cctgctctctgtccg

SEQ ID NO: 1257408 - DNA, 15 bp, Homo sapiens
tcctgctctctgtcc

SEQ ID NO: 1257409 - DNA, 15 bp, Homo sapiens
ctcctgctctctgtc

SEQ ID NO: 1257410 - DNA, 15 bp, Homo sapiens
tctcctgctctctgt

SEQ ID NO: 1257411 - DNA, 15 bp, Homo sapiens
ttctcctgctctctg

SEQ ID NO: 1257412 - DNA, 15 bp, Homo sapiens
attctcctgctctct

SEQ ID NO: 1257413 - DNA, 15 bp, Homo sapiens
aattctcctgctctc

SEQ ID NO: 1257414 - DNA, 15 bp, Homo sapiens
taattctcctgctct

SEQ ID NO: 1257415 - DNA, 15 bp, Homo sapiens
ttaattctcctgctc

SEQ ID NO: 1257416 - DNA, 15 bp, Homo sapiens
tttaattctcctgct

SEQ ID NO: 1257417 - DNA, 15 bp, Homo sapiens
ttttaattctcctgc

SEQ ID NO: 1257418 - DNA, 15 bp, Homo sapiens
attttaattctcctg

SEQ ID NO: 1257419 - DNA, 15 bp, Homo sapiens
tattttaattctcct

SEQ ID NO: 1257420 - DNA, 15 bp, Homo sapiens
ctattttaattctcc

SEQ ID NO: 1257421 - DNA, 15 bp, Homo sapiens
gctattttaattctc

SEQ ID NO: 1257422 - DNA, 15 bp, Homo sapiens
ggctattttaattct

SEQ ID NO: 1257423 - DNA, 15 bp, Homo sapiens
gggctattttaattc

SEQ ID NO: 1257424 - DNA, 15 bp, Homo sapiens
agggctattttaatt

SEQ ID NO: 1257425 - DNA, 15 bp, Homo sapiens
cagggctattttaat

SEQ ID NO: 1257426 - DNA, 15 bp, Homo sapiens
ccagggctattttaa

SEQ ID NO: 1257427 - DNA, 15 bp, Homo sapiens
cccagggctatttta

SEQ ID NO: 1257428 - DNA, 15 bp, Homo sapiens
gcccagggctatttt

SEQ ID NO: 1257429 - DNA, 15 bp, Homo sapiens
ggcccagggctattt

SEQ ID NO: 1257430 - DNA, 15 bp, Homo sapiens
tggcccagggctatt

SEQ ID NO: 1257431 - DNA, 15 bp, Homo sapiens
ctggcccagggctat

SEQ ID NO: 1257432 - DNA, 15 bp, Homo sapiens
tctggcccagggcta

SEQ ID NO: 1257433 - DNA, 15 bp, Homo sapiens
ttctggcccagggct

SEQ ID NO: 1257434 - DNA, 15 bp, Homo sapiens
tttctggcccagggc

SEQ ID NO: 1257435 - DNA, 15 bp, Homo sapiens
ctttctggcccaggg

SEQ ID NO: 1257436 - DNA, 15 bp, Homo sapiens
actttctggcccagg

SEQ ID NO: 1257437 - DNA, 15 bp, Homo sapiens
tactttctggcccag

SEQ ID NO: 1257438 - DNA, 15 bp, Homo sapiens
ttactttctggccca

SEQ ID NO: 1257439 - DNA, 15 bp, Homo sapiens
tttactttctggccc

SEQ ID NO: 1257440 - DNA, 15 bp, Homo sapiens
gtttactttctggcc

SEQ ID NO: 1257441 - DNA, 15 bp, Homo sapiens
cgtttactttctggc

SEQ ID NO: 1257442 - DNA, 15 bp, Homo sapiens
acgtttactttctgg

SEQ ID NO: 1257443 - DNA, 15 bp, Homo sapiens
cacgtttactttctg

SEQ ID NO: 1257444 - DNA, 15 bp, Homo sapiens
acacgtttactttct

SEQ ID NO: 1257445 - DNA, 15 bp, Homo sapiens
tacacgtttactttc

SEQ ID NO: 1257446 - DNA, 15 bp, Homo sapiens
atacacgtttacttt

SEQ ID NO: 1257447 - DNA, 15 bp, Homo sapiens
aatacacgtttactt

SEQ ID NO: 1257448 - DNA, 15 bp, Homo sapiens
gaatacacgtttact

SEQ ID NO: 1257449 - DNA, 15 bp, Homo sapiens
agaatacacgtttac

SEQ ID NO: 1257450 - DNA, 15 bp, Homo sapiens
aagaatacacgttta

SEQ ID NO: 1257451 - DNA, 15 bp, Homo sapiens
taagaatacacgttt

SEQ ID NO: 1257452 - DNA, 15 bp, Homo sapiens
ataagaatacacgtt

SEQ ID NO: 1257453 - DNA, 15 bp, Homo sapiens
gataagaatacacgt

SEQ ID NO: 1257454 - DNA, 15 bp, Homo sapiens
agataagaatacacg

SEQ ID NO: 1257455 - DNA, 15 bp, Homo sapiens
aagataagaatacac

SEQ ID NO: 1257456 - DNA, 15 bp, Homo sapiens
aaagataagaataca

SEQ ID NO: 1257457 - DNA, 15 bp, Homo sapiens
aaaagataagaatac

SEQ ID NO: 1257458 - DNA, 15 bp, Homo sapiens
caaaagataagaata

SEQ ID NO: 1257459 - DNA, 15 bp, Homo sapiens
acaaaagataagaat

SEQ ID NO: 1257460 - DNA, 15 bp, Homo sapiens
tacaaaagataagaa

SEQ ID NO: 1257461 - DNA, 15 bp, Homo sapiens
atacaaaagataaga

SEQ ID NO: 1257462 - DNA, 15 bp, Homo sapiens
tatacaaaagataag

SEQ ID NO: 1257463 - DNA, 15 bp, Homo sapiens
atatacaaaagataa

SEQ ID NO: 1257464 - DNA, 15 bp, Homo sapiens
catatacaaaagata

SEQ ID NO: 1257465 - DNA, 15 bp, Homo sapiens
tcatatacaaaagat

SEQ ID NO: 1257466 - DNA, 15 bp, Homo sapiens
ctcatatacaaaaga

SEQ ID NO: 1257467 - DNA, 15 bp, Homo sapiens
cctcatatacaaaag

SEQ ID NO: 1257468 - DNA, 15 bp, Homo sapiens
ccctcatatacaaaa

SEQ ID NO: 1257469 - DNA, 15 bp, Homo sapiens
gccctcatatacaaa

SEQ ID NO: 1257470 - DNA, 15 bp, Homo sapiens
tgccctcatatacaa

SEQ ID NO: 1257471 - DNA, 15 bp, Homo sapiens
ttgccctcatataca

SEQ ID NO: 1257472 - DNA, 15 bp, Homo sapiens
tttgccctcatatac

SEQ ID NO: 1257473 - DNA, 15 bp, Homo sapiens
gtttgccctcatata

SEQ ID NO: 1257474 - DNA, 15 bp, Homo sapiens
agtttgccctcatat

SEQ ID NO: 1257475 - DNA, 15 bp, Homo sapiens
cagtttgccctcata

SEQ ID NO: 1257476 - DNA, 15 bp, Homo sapiens
gcagtttgccctcat

SEQ ID NO: 1257477 - DNA, 15 bp, Homo sapiens
agcagtttgccctca

SEQ ID NO: 1257478 - DNA, 15 bp, Homo sapiens
aagcagtttgccctc

SEQ ID NO: 1257479 - DNA, 15 bp, Homo sapiens
aaagcagtttgccct

SEQ ID NO: 1257480 - DNA, 15 bp, Homo sapiens
aaaagcagtttgccc

SEQ ID NO: 1257481 - DNA, 15 bp, Homo sapiens
caaaagcagtttgcc

SEQ ID NO: 1257482 - DNA, 15 bp, Homo sapiens
tcaaaagcagtttgc

SEQ ID NO: 1257483 - DNA, 15 bp, Homo sapiens
atcaaaagcagtttg

SEQ ID NO: 1257484 - DNA, 15 bp, Homo sapiens
gatcaaaagcagttt

SEQ ID NO: 1257485 - DNA, 15 bp, Homo sapiens
ggatcaaaagcagtt

SEQ ID NO: 1257486 - DNA, 15 bp, Homo sapiens
aggatcaaaagcagt

SEQ ID NO: 1257487 - DNA, 15 bp, Homo sapiens
aaggatcaaaagcag

SEQ ID NO: 1257488 - DNA, 15 bp, Homo sapiens
gaaggatcaaaagca

SEQ ID NO: 1257489 - DNA, 15 bp, Homo sapiens
ggaaggatcaaaagc

SEQ ID NO: 1257490 - DNA, 15 bp, Homo sapiens
aggaaggatcaaaag

SEQ ID NO: 1257491 - DNA, 15 bp, Homo sapiens
caggaaggatcaaaa

SEQ ID NO: 1257492 - DNA, 15 bp, Homo sapiens
gcaggaaggatcaaa

SEQ ID NO: 1257493 - DNA, 15 bp, Homo sapiens
agcaggaaggatcaa

SEQ ID NO: 1257494 - DNA, 15 bp, Homo sapiens
cagcaggaaggatca

SEQ ID NO: 1257495 - DNA, 15 bp, Homo sapiens
tcagcaggaaggatc

SEQ ID NO: 1257496 - DNA, 15 bp, Homo sapiens
atcagcaggaaggat

SEQ ID NO: 1257497 - DNA, 15 bp, Homo sapiens
catcagcaggaagga

SEQ ID NO: 1257498 - DNA, 15 bp, Homo sapiens
ccatcagcaggaagg

SEQ ID NO: 1257499 - DNA, 15 bp, Homo sapiens
cccatcagcaggaag

SEQ ID NO: 1257500 - DNA, 15 bp, Homo sapiens
tcccatcagcaggaa

SEQ ID NO: 1257501 - DNA, 15 bp, Homo sapiens
ttcccatcagcagga

SEQ ID NO: 1257502 - DNA, 15 bp, Homo sapiens
attcccatcagcagg

SEQ ID NO: 1257503 - DNA, 15 bp, Homo sapiens
gattcccatcagcag

SEQ ID NO: 1257504 - DNA, 15 bp, Homo sapiens
tgattcccatcagca

SEQ ID NO: 1257505 - DNA, 15 bp, Homo sapiens
ttgattcccatcagc

SEQ ID NO: 1257506 - DNA, 15 bp, Homo sapiens
cttgattcccatcag

SEQ ID NO: 1257507 - DNA, 15 bp, Homo sapiens
tcttgattcccatca

SEQ ID NO: 1257508 - DNA, 15 bp, Homo sapiens
ttcttgattcccatc

SEQ ID NO: 1257509 - DNA, 15 bp, Homo sapiens
tttcttgattcccat

SEQ ID NO: 1257510 - DNA, 15 bp, Homo sapiens
ctttcttgattccca

SEQ ID NO: 1257511 - DNA, 15 bp, Homo sapiens
cctttcttgattccc

SEQ ID NO: 1257512 - DNA, 15 bp, Homo sapiens
gcctttcttgattcc

SEQ ID NO: 1257513 - DNA, 15 bp, Homo sapiens
tgcctttcttgattc

SEQ ID NO: 1257514 - DNA, 15 bp, Homo sapiens
gtgcctttcttgatt

SEQ ID NO: 1257515 - DNA, 15 bp, Homo sapiens
tgtgcctttcttgat

SEQ ID NO: 1257516 - DNA, 15 bp, Homo sapiens
atgtgcctttcttga

SEQ ID NO: 1257517 - DNA, 15 bp, Homo sapiens
aatgtgcctttcttg

SEQ ID NO: 1257518 - DNA, 15 bp, Homo sapiens
aaatgtgcctttctt

SEQ ID NO: 1257519 - DNA, 15 bp, Homo sapiens
taaatgtgcctttct

SEQ ID NO: 1257520 - DNA, 15 bp, Homo sapiens
gtaaatgtgcctttc

SEQ ID NO: 1257521 - DNA, 15 bp, Homo sapiens
ggtaaatgtgccttt

SEQ ID NO: 1257522 - DNA, 15 bp, Homo sapiens
tggtaaatgtgcctt

SEQ ID NO: 1257523 - DNA, 15 bp, Homo sapiens
ttggtaaatgtgcct

SEQ ID NO: 1257524 - DNA, 15 bp, Homo sapiens
cttggtaaatgtgcc

SEQ ID NO: 1257525 - DNA, 15 bp, Homo sapiens
acttggtaaatgtgc

SEQ ID NO: 1257526 - DNA, 15 bp, Homo sapiens
aacttggtaaatgtg

SEQ ID NO: 1257527 - DNA, 15 bp, Homo sapiens
taacttggtaaatgt

SEQ ID NO: 1257528 - DNA, 15 bp, Homo sapiens
ctaacttggtaaatg

SEQ ID NO: 1257529 - DNA, 15 bp, Homo sapiens
actaacttggtaaat

SEQ ID NO: 1257530 - DNA, 15 bp, Homo sapiens
tactaacttggtaaa

SEQ ID NO: 1257531 - DNA, 15 bp, Homo sapiens
ttactaacttggtaa

SEQ ID NO: 1257532 - DNA, 15 bp, Homo sapiens
gttactaacttggta

SEQ ID NO: 1257533 - DNA, 15 bp, Homo sapiens
agttactaacttggt

SEQ ID NO: 1257534 - DNA, 15 bp, Homo sapiens
cagttactaacttgg

SEQ ID NO: 1257535 - DNA, 15 bp, Homo sapiens
gcagttactaacttg

SEQ ID NO: 1257536 - DNA, 15 bp, Homo sapiens
tgcagttactaactt

SEQ ID NO: 1257537 - DNA, 15 bp, Homo sapiens
atgcagttactaact

SEQ ID NO: 1257538 - DNA, 15 bp, Homo sapiens
tatgcagttactaac

SEQ ID NO: 1257539 - DNA, 15 bp, Homo sapiens
gtatgcagttactaa

SEQ ID NO: 1257540 - DNA, 15 bp, Homo sapiens
ggtatgcagttacta

SEQ ID NO: 1257541 - DNA, 15 bp, Homo sapiens
tggtatgcagttact

SEQ ID NO: 1257542 - DNA, 15 bp, Homo sapiens
ttggtatgcagttac

SEQ ID NO: 1257543 - DNA, 15 bp, Homo sapiens
cttggtatgcagtta

SEQ ID NO: 1257544 - DNA, 15 bp, Homo sapiens
ccttggtatgcagtt

SEQ ID NO: 1257545 - DNA, 15 bp, Homo sapiens
accttggtatgcagt

SEQ ID NO: 1257546 - DNA, 15 bp, Homo sapiens
gaccttggtatgcag

SEQ ID NO: 1257547 - DNA, 15 bp, Homo sapiens
tgaccttggtatgca

SEQ ID NO: 1257548 - DNA, 15 bp, Homo sapiens
ttgaccttggtatgc

SEQ ID NO: 1257549 - DNA, 15 bp, Homo sapiens
attgaccttggtatg

SEQ ID NO: 1257550 - DNA, 15 bp, Homo sapiens
cattgaccttggtat

SEQ ID NO: 1257551 - DNA, 15 bp, Homo sapiens
acattgaccttggta

SEQ ID NO: 1257552 - DNA, 15 bp, Homo sapiens
aacattgaccttggt

SEQ ID NO: 1257553 - DNA, 15 bp, Homo sapiens
caacattgaccttgg

SEQ ID NO: 1257554 - DNA, 15 bp, Homo sapiens
tcaacattgaccttg

SEQ ID NO: 1257555 - DNA, 15 bp, Homo sapiens
atcaacattgacctt

SEQ ID NO: 1257556 - DNA, 15 bp, Homo sapiens
aatcaacattgacct

SEQ ID NO: 1257557 - DNA, 15 bp, Homo sapiens
aaatcaacattgacc

SEQ ID NO: 1257558 - DNA, 15 bp, Homo sapiens
aaaatcaacattgac

SEQ ID NO: 1257559 - DNA, 15 bp, Homo sapiens
gaaaatcaacattga

SEQ ID NO: 1257560 - DNA, 15 bp, Homo sapiens
agaaaatcaacattg

SEQ ID NO: 1257561 - DNA, 15 bp, Homo sapiens
gagaaaatcaacatt

SEQ ID NO: 1257562 - DNA, 15 bp, Homo sapiens
tgagaaaatcaacat

SEQ ID NO: 1257563 - DNA, 15 bp, Homo sapiens
ctgagaaaatcaaca

SEQ ID NO: 1257564 - DNA, 15 bp, Homo sapiens
cctgagaaaatcaac

SEQ ID NO: 1257565 - DNA, 15 bp, Homo sapiens
ccctgagaaaatcaa

SEQ ID NO: 1257566 - DNA, 15 bp, Homo sapiens
cccctgagaaaatca

SEQ ID NO: 1257567 - DNA, 15 bp, Homo sapiens
tcccctgagaaaatc

SEQ ID NO: 1257568 - DNA, 15 bp, Homo sapiens
ttcccctgagaaaat

SEQ ID NO: 1257569 - DNA, 15 bp, Homo sapiens
cttcccctgagaaaa

SEQ ID NO: 1257570 - DNA, 15 bp, Homo sapiens
tcttcccctgagaaa

SEQ ID NO: 1257571 - DNA, 15 bp, Homo sapiens
atcttcccctgagaa

SEQ ID NO: 1257572 - DNA, 15 bp, Homo sapiens
tatcttcccctgaga

SEQ ID NO: 1257573 - DNA, 15 bp, Homo sapiens
gtatcttcccctgag

SEQ ID NO: 1257574 - DNA, 15 bp, Homo sapiens
ggtatcttcccctga

SEQ ID NO: 1257575 - DNA, 15 bp, Homo sapiens
tggtatcttcccctg

SEQ ID NO: 1257576 - DNA, 15 bp, Homo sapiens
gtggtatcttcccct

SEQ ID NO: 1257577 - DNA, 15 bp, Homo sapiens
tgtggtatcttcccc

SEQ ID NO: 1257578 - DNA, 15 bp, Homo sapiens
atgtggtatcttccc

SEQ ID NO: 1257579 - DNA, 15 bp, Homo sapiens
catgtggtatcttcc

SEQ ID NO: 1257580 - DNA, 15 bp, Homo sapiens
gcatgtggtatcttc

SEQ ID NO: 1257581 - DNA, 15 bp, Homo sapiens
agcatgtggtatctt

SEQ ID NO: 1257582 - DNA, 15 bp, Homo sapiens
cagcatgtggtatct

SEQ ID NO: 1257583 - DNA, 15 bp, Homo sapiens
acagcatgtggtatc

SEQ ID NO: 1257584 - DNA, 15 bp, Homo sapiens
tacagcatgtggtat

SEQ ID NO: 1257585 - DNA, 15 bp, Homo sapiens
atacagcatgtggta

SEQ ID NO: 1257586 - DNA, 15 bp, Homo sapiens
catacagcatgtggt

SEQ ID NO: 1257587 - DNA, 15 bp, Homo sapiens
ccatacagcatgtgg

SEQ ID NO: 1257588 - DNA, 15 bp, Homo sapiens
gccatacagcatgtg

SEQ ID NO: 1257589 - DNA, 15 bp, Homo sapiens
tgccatacagcatgt

SEQ ID NO: 1257590 - DNA, 15 bp, Homo sapiens
ctgccatacagcatg

SEQ ID NO: 1257591 - DNA, 15 bp, Homo sapiens
gctgccatacagcat

SEQ ID NO: 1257592 - DNA, 15 bp, Homo sapiens
cgctgccatacagca

SEQ ID NO: 1257593 - DNA, 15 bp, Homo sapiens
gcgctgccatacagc

SEQ ID NO: 1257594 - DNA, 15 bp, Homo sapiens
ggcgctgccatacag

SEQ ID NO: 1257595 - DNA, 15 bp, Homo sapiens
aggcgctgccataca

SEQ ID NO: 1257596 - DNA, 15 bp, Homo sapiens
gaggcgctgccatac

SEQ ID NO: 1257597 - DNA, 15 bp, Homo sapiens
agaggcgctgccata

SEQ ID NO: 1257598 - DNA, 15 bp, Homo sapiens
aagaggcgctgccat

SEQ ID NO: 1257599 - DNA, 15 bp, Homo sapiens
caagaggcgctgcca

SEQ ID NO: 1257600 - DNA, 15 bp, Homo sapiens
ccaagaggcgctgcc

SEQ ID NO: 1257601 - DNA, 15 bp, Homo sapiens
tccaagaggcgctgc

SEQ ID NO: 1257602 - DNA, 15 bp, Homo sapiens
ctccaagaggcgctg

SEQ ID NO: 1257603 - DNA, 15 bp, Homo sapiens
gctccaagaggcgct

SEQ ID NO: 1257604 - DNA, 15 bp, Homo sapiens
agctccaagaggcgc

SEQ ID NO: 1257605 - DNA, 15 bp, Homo sapiens
tagctccaagaggcg

SEQ ID NO: 1257606 - DNA, 15 bp, Homo sapiens
ttagctccaagaggc

SEQ ID NO: 1257607 - DNA, 15 bp, Homo sapiens
attagctccaagagg

SEQ ID NO: 1257608 - DNA, 15 bp, Homo sapiens
tattagctccaagag

SEQ ID NO: 1257609 - DNA, 15 bp, Homo sapiens
gtattagctccaaga

SEQ ID NO: 1257610 - DNA, 15 bp, Homo sapiens
ggtattagctccaag

SEQ ID NO: 1257611 - DNA, 15 bp, Homo sapiens
aggtattagctccaa

SEQ ID NO: 1257612 - DNA, 15 bp, Homo sapiens
caggtattagctcca

SEQ ID NO: 1257613 - DNA, 15 bp, Homo sapiens
ccaggtattagctcc

SEQ ID NO: 1257614 - DNA, 15 bp, Homo sapiens
accaggtattagctc

SEQ ID NO: 1257615 - DNA, 15 bp, Homo sapiens
aaccaggtattagct

SEQ ID NO: 1257616 - DNA, 15 bp, Homo sapiens
taaccaggtattagc

SEQ ID NO: 1257617 - DNA, 15 bp, Homo sapiens
ttaaccaggtattag

SEQ ID NO: 1257618 - DNA, 15 bp, Homo sapiens
cttaaccaggtatta

SEQ ID NO: 1257619 - DNA, 15 bp, Homo sapiens
tcttaaccaggtatt

SEQ ID NO: 1257620 - DNA, 15 bp, Homo sapiens
ctcttaaccaggtat

SEQ ID NO: 1257621 - DNA, 15 bp, Homo sapiens
actcttaaccaggta

SEQ ID NO: 1257622 - DNA, 15 bp, Homo sapiens
tactcttaaccaggt

SEQ ID NO: 1257623 - DNA, 15 bp, Homo sapiens
atactcttaaccagg

SEQ ID NO: 1257624 - DNA, 15 bp, Homo sapiens
tatactcttaaccag

SEQ ID NO: 1257625 - DNA, 15 bp, Homo sapiens
ctatactcttaacca

SEQ ID NO: 1257626 - DNA, 15 bp, Homo sapiens
actatactcttaacc

SEQ ID NO: 1257627 - DNA, 15 bp, Homo sapiens
aactatactcttaac

SEQ ID NO: 1257628 - DNA, 15 bp, Homo sapiens
caactatactcttaa

SEQ ID NO: 1257629 - DNA, 15 bp, Homo sapiens
acaactatactctta

SEQ ID NO: 1257630 - DNA, 15 bp, Homo sapiens
gacaactatactctt

SEQ ID NO: 1257631 - DNA, 15 bp, Homo sapiens
agacaactatactct

SEQ ID NO: 1257632 - DNA, 15 bp, Homo sapiens
tagacaactatactc

SEQ ID NO: 1257633 - DNA, 15 bp, Homo sapiens
gtagacaactatact

SEQ ID NO: 1257634 - DNA, 15 bp, Homo sapiens
agtagacaactatac

SEQ ID NO: 1257635 - DNA, 15 bp, Homo sapiens
cagtagacaactata

SEQ ID NO: 1257636 - DNA, 15 bp, Homo sapiens
acagtagacaactat

SEQ ID NO: 1257637 - DNA, 15 bp, Homo sapiens
gacagtagacaacta

SEQ ID NO: 1257638 - DNA, 15 bp, Homo sapiens
tgacagtagacaact

SEQ ID NO: 1257639 - DNA, 15 bp, Homo sapiens
atgacagtagacaac

SEQ ID NO: 1257640 - DNA, 15 bp, Homo sapiens
gatgacagtagacaa

SEQ ID NO: 1257641 - DNA, 15 bp, Homo sapiens
agatgacagtagaca

SEQ ID NO: 1257642 - DNA, 15 bp, Homo sapiens
cagatgacagtagac

SEQ ID NO: 1257643 - DNA, 15 bp, Homo sapiens
gcagatgacagtaga

SEQ ID NO: 1257644 - DNA, 15 bp, Homo sapiens
ggcagatgacagtag

SEQ ID NO: 1257645 - DNA, 15 bp, Homo sapiens
tggcagatgacagta

SEQ ID NO: 1257646 - DNA, 15 bp, Homo sapiens
atggcagatgacagt

SEQ ID NO: 1257647 - DNA, 15 bp, Homo sapiens
catggcagatgacag

SEQ ID NO: 1257648 - DNA, 15 bp, Homo sapiens
tcatggcagatgaca

SEQ ID NO: 1257649 - DNA, 15 bp, Homo sapiens
atcatggcagatgac

SEQ ID NO: 1257650 - DNA, 15 bp, Homo sapiens
gatcatggcagatga

SEQ ID NO: 1257651 - DNA, 15 bp, Homo sapiens
ggatcatggcagatg

SEQ ID NO: 1257652 - DNA, 15 bp, Homo sapiens
gggatcatggcagat

SEQ ID NO: 1257653 - DNA, 15 bp, Homo sapiens
tgggatcatggcaga

SEQ ID NO: 1257654 - DNA, 15 bp, Homo sapiens
atgggatcatggcag

SEQ ID NO: 1257655 - DNA, 15 bp, Homo sapiens
aatgggatcatggca

SEQ ID NO: 1257656 - DNA, 15 bp, Homo sapiens
aaatgggatcatggc

SEQ ID NO: 1257657 - DNA, 15 bp, Homo sapiens
aaaatgggatcatgg

SEQ ID NO: 1257658 - DNA, 15 bp, Homo sapiens
aaaaatgggatcatg

SEQ ID NO: 1257659 - DNA, 15 bp, Homo sapiens
aaaaaatgggatcat

SEQ ID NO: 1257660 - DNA, 15 bp, Homo sapiens
caaaaaatgggatca

SEQ ID NO: 1257661 - DNA, 15 bp, Homo sapiens
gcaaaaaatgggatc

SEQ ID NO: 1257662 - DNA, 15 bp, Homo sapiens
tgcaaaaaatgggat

SEQ ID NO: 1257663 - DNA, 15 bp, Homo sapiens
ctgcaaaaaatggga

SEQ ID NO: 1257664 - DNA, 15 bp, Homo sapiens
cctgcaaaaaatggg

SEQ ID NO: 1257665 - DNA, 15 bp, Homo sapiens
ccctgcaaaaaatgg

SEQ ID NO: 1257666 - DNA, 15 bp, Homo sapiens
cccctgcaaaaaatg

SEQ ID NO: 1257667 - DNA, 15 bp, Homo sapiens
acccctgcaaaaaat

SEQ ID NO: 1257668 - DNA, 15 bp, Homo sapiens
gacccctgcaaaaaa

SEQ ID NO: 1257669 - DNA, 15 bp, Homo sapiens
tgacccctgcaaaaa

SEQ ID NO: 1257670 - DNA, 15 bp, Homo sapiens
ctgacccctgcaaaa

SEQ ID NO: 1257671 - DNA, 15 bp, Homo sapiens
tctgacccctgcaaa

SEQ ID NO: 1257672 - DNA, 15 bp, Homo sapiens
gtctgacccctgcaa

SEQ ID NO: 1257673 - DNA, 15 bp, Homo sapiens
cgtctgacccctgca

SEQ ID NO: 1257674 - DNA, 15 bp, Homo sapiens
ccgtctgacccctgc

SEQ ID NO: 1257675 - DNA, 15 bp, Homo sapiens
cccgtctgacccctg

SEQ ID NO: 1257676 - DNA, 15 bp, Homo sapiens
tcccgtctgacccct

SEQ ID NO: 1257677 - DNA, 15 bp, Homo sapiens
ctcccgtctgacccc

SEQ ID NO: 1257678 - DNA, 15 bp, Homo sapiens
tctcccgtctgaccc

SEQ ID NO: 1257679 - DNA, 15 bp, Homo sapiens
ttctcccgtctgacc

SEQ ID NO: 1257680 - DNA, 15 bp, Homo sapiens
attctcccgtctgac

SEQ ID NO: 1257681 - DNA, 15 bp, Homo sapiens
aattctcccgtctga

SEQ ID NO: 1257682 - DNA, 15 bp, Homo sapiens
caattctcccgtctg

SEQ ID NO: 1257683 - DNA, 15 bp, Homo sapiens
tcaattctcccgtct

SEQ ID NO: 1257684 - DNA, 15 bp, Homo sapiens
ttcaattctcccgtc

SEQ ID NO: 1257685 - DNA, 15 bp, Homo sapiens
attcaattctcccgt

SEQ ID NO: 1257686 - DNA, 15 bp, Homo sapiens
cattcaattctcccg

SEQ ID NO: 1257687 - DNA, 15 bp, Homo sapiens
ccattcaattctccc

SEQ ID NO: 1257688 - DNA, 15 bp, Homo sapiens
accattcaattctcc

SEQ ID NO: 1257689 - DNA, 15 bp, Homo sapiens
taccattcaattctc

SEQ ID NO: 1257690 - DNA, 15 bp, Homo sapiens
ttaccattcaattct

SEQ ID NO: 1257691 - DNA, 15 bp, Homo sapiens
attaccattcaattc

SEQ ID NO: 1257692 - DNA, 15 bp, Homo sapiens
tattaccattcaatt

SEQ ID NO: 1257693 - DNA, 15 bp, Homo sapiens
atattaccattcaat

SEQ ID NO: 1257694 - DNA, 15 bp, Homo sapiens
tatattaccattcaa

SEQ ID NO: 1257695 - DNA, 15 bp, Homo sapiens
ttatattaccattca

SEQ ID NO: 1257696 - DNA, 15 bp, Homo sapiens
cttatattaccattc

SEQ ID NO: 1257697 - DNA, 15 bp, Homo sapiens
ccttatattaccatt

SEQ ID NO: 1257698 - DNA, 15 bp, Homo sapiens
cccttatattaccat

SEQ ID NO: 1257699 - DNA, 15 bp, Homo sapiens
tcccttatattacca

SEQ ID NO: 1257700 - DNA, 15 bp, Homo sapiens
ttcccttatattacc

SEQ ID NO: 1257701 - DNA, 15 bp, Homo sapiens
tttcccttatattac

SEQ ID NO: 1257702 - DNA, 15 bp, Homo sapiens
gtttcccttatatta

SEQ ID NO: 1257703 - DNA, 15 bp, Homo sapiens
agtttcccttatatt

SEQ ID NO: 1257704 - DNA, 15 bp, Homo sapiens
tagtttcccttatat

SEQ ID NO: 1257705 - DNA, 15 bp, Homo sapiens
gtagtttcccttata

SEQ ID NO: 1257706 - DNA, 15 bp, Homo sapiens
tgtagtttcccttat

SEQ ID NO: 1257707 - DNA, 15 bp, Homo sapiens
ttgtagtttccctta

SEQ ID NO: 1257708 - DNA, 15 bp, Homo sapiens
gttgtagtttccctt

SEQ ID NO: 1257709 - DNA, 15 bp, Homo sapiens
ggttgtagtttccct

SEQ ID NO: 1257710 - DNA, 15 bp, Homo sapiens
gggttgtagtttccc

SEQ ID NO: 1257711 - DNA, 15 bp, Homo sapiens
ggggttgtagtttcc

SEQ ID NO: 1257712 - DNA, 15 bp, Homo sapiens
aggggttgtagtttc

SEQ ID NO: 1257713 - DNA, 15 bp, Homo sapiens
caggggttgtagttt

SEQ ID NO: 1257714 - DNA, 15 bp, Homo sapiens
gcaggggttgtagtt

SEQ ID NO: 1257715 - DNA, 15 bp, Homo sapiens
tgcaggggttgtagt

SEQ ID NO: 1257716 - DNA, 15 bp, Homo sapiens
atgcaggggttgtag

SEQ ID NO: 1257717 - DNA, 15 bp, Homo sapiens
aatgcaggggttgta

SEQ ID NO: 1257718 - DNA, 15 bp, Homo sapiens
gaatgcaggggttgt

SEQ ID NO: 1257719 - DNA, 15 bp, Homo sapiens
agaatgcaggggttg

SEQ ID NO: 1257720 - DNA, 15 bp, Homo sapiens
aagaatgcaggggtt

SEQ ID NO: 1257721 - DNA, 15 bp, Homo sapiens
aaagaatgcaggggt

SEQ ID NO: 1257722 - DNA, 15 bp, Homo sapiens
taaagaatgcagggg

SEQ ID NO: 1257723 - DNA, 15 bp, Homo sapiens
ttaaagaatgcaggg

SEQ ID NO: 1257724 - DNA, 15 bp, Homo sapiens
tttaaagaatgcagg

SEQ ID NO: 1257725 - DNA, 15 bp, Homo sapiens
atttaaagaatgcag

SEQ ID NO: 1257726 - DNA, 15 bp, Homo sapiens
gatttaaagaatgca

SEQ ID NO: 1257727 - DNA, 15 bp, Homo sapiens
agatttaaagaatgc

SEQ ID NO: 1257728 - DNA, 15 bp, Homo sapiens
aagatttaaagaatg

SEQ ID NO: 1257729 - DNA, 15 bp, Homo sapiens
aaagatttaaagaat

SEQ ID NO: 1257730 - DNA, 15 bp, Homo sapiens
caaagatttaaagaa

SEQ ID NO: 1257731 - DNA, 15 bp, Homo sapiens
tcaaagatttaaaga

SEQ ID NO: 1257732 - DNA, 15 bp, Homo sapiens
atcaaagatttaaag

SEQ ID NO: 1257733 - DNA, 15 bp, Homo sapiens
catcaaagatttaaa

SEQ ID NO: 1257734 - DNA, 15 bp, Homo sapiens
ccatcaaagatttaa

SEQ ID NO: 1257735 - DNA, 15 bp, Homo sapiens
accatcaaagattta

SEQ ID NO: 1257736 - DNA, 15 bp, Homo sapiens
caccatcaaagattt

SEQ ID NO: 1257737 - DNA, 15 bp, Homo sapiens
tcaccatcaaagatt

SEQ ID NO: 1257738 - DNA, 15 bp, Homo sapiens
atcaccatcaaagat

SEQ ID NO: 1257739 - DNA, 15 bp, Homo sapiens
catcaccatcaaaga

SEQ ID NO: 1257740 - DNA, 15 bp, Homo sapiens
acatcaccatcaaag

SEQ ID NO: 1257741 - DNA, 15 bp, Homo sapiens
tacatcaccatcaaa

SEQ ID NO: 1257742 - DNA, 15 bp, Homo sapiens
ttacatcaccatcaa

SEQ ID NO: 1257743 - DNA, 15 bp, Homo sapiens
tttacatcaccatca

SEQ ID NO: 1257744 - DNA, 15 bp, Homo sapiens
atttacatcaccatc

SEQ ID NO: 1257745 - DNA, 15 bp, Homo sapiens
gatttacatcaccat

SEQ ID NO: 1257746 - DNA, 15 bp, Homo sapiens
agatttacatcacca

SEQ ID NO: 1257747 - DNA, 15 bp, Homo sapiens
aagatttacatcacc

SEQ ID NO: 1257748 - DNA, 15 bp, Homo sapiens
aaagatttacatcac

SEQ ID NO: 1257749 - DNA, 15 bp, Homo sapiens
caaagatttacatca

SEQ ID NO: 1257750 - DNA, 15 bp, Homo sapiens
gcaaagatttacatc

SEQ ID NO: 1257751 - DNA, 15 bp, Homo sapiens
tgcaaagatttacat

SEQ ID NO: 1257752 - DNA, 15 bp, Homo sapiens
ttgcaaagatttaca

SEQ ID NO: 1257753 - DNA, 15 bp, Homo sapiens
attgcaaagatttac

SEQ ID NO: 1257754 - DNA, 15 bp, Homo sapiens
aattgcaaagattta

SEQ ID NO: 1257755 - DNA, 15 bp, Homo sapiens
gaattgcaaagattt

SEQ ID NO: 1257756 - DNA, 15 bp, Homo sapiens
agaattgcaaagatt

SEQ ID NO: 1257757 - DNA, 15 bp, Homo sapiens
aagaattgcaaagat

SEQ ID NO: 1257758 - DNA, 15 bp, Homo sapiens
gaagaattgcaaaga

SEQ ID NO: 1257759 - DNA, 15 bp, Homo sapiens
ggaagaattgcaaag

SEQ ID NO: 1257760 - DNA, 15 bp, Homo sapiens
aggaagaattgcaaa

SEQ ID NO: 1257761 - DNA, 15 bp, Homo sapiens
taggaagaattgcaa

SEQ ID NO: 1257762 - DNA, 15 bp, Homo sapiens
ctaggaagaattgca

SEQ ID NO: 1257763 - DNA, 15 bp, Homo sapiens
tctaggaagaattgc

SEQ ID NO: 1257764 - DNA, 15 bp, Homo sapiens
ttctaggaagaattg

SEQ ID NO: 1257765 - DNA, 15 bp, Homo sapiens
attctaggaagaatt

SEQ ID NO: 1257766 - DNA, 15 bp, Homo sapiens
cattctaggaagaat

SEQ ID NO: 1257767 - DNA, 15 bp, Homo sapiens
gcattctaggaagaa

SEQ ID NO: 1257768 - DNA, 15 bp, Homo sapiens
agcattctaggaaga

SEQ ID NO: 1257769 - DNA, 15 bp, Homo sapiens
cagcattctaggaag

SEQ ID NO: 1257770 - DNA, 15 bp, Homo sapiens
acagcattctaggaa

SEQ ID NO: 1257771 - DNA, 15 bp, Homo sapiens
gacagcattctagga

SEQ ID NO: 1257772 - DNA, 15 bp, Homo sapiens
agacagcattctagg

SEQ ID NO: 1257773 - DNA, 15 bp, Homo sapiens
aagacagcattctag

SEQ ID NO: 1257774 - DNA, 15 bp, Homo sapiens
caagacagcattcta

SEQ ID NO: 1257775 - DNA, 15 bp, Homo sapiens
gcaagacagcattct

SEQ ID NO: 1257776 - DNA, 15 bp, Homo sapiens
agcaagacagcattc

SEQ ID NO: 1257777 - DNA, 15 bp, Homo sapiens
aagcaagacagcatt

SEQ ID NO: 1257778 - DNA, 15 bp, Homo sapiens
gaagcaagacagcat

SEQ ID NO: 1257779 - DNA, 15 bp, Homo sapiens
agaagcaagacagca

SEQ ID NO: 1257780 - DNA, 15 bp, Homo sapiens
cagaagcaagacagc

SEQ ID NO: 1257781 - DNA, 15 bp, Homo sapiens
tcagaagcaagacag

SEQ ID NO: 1257782 - DNA, 15 bp, Homo sapiens
atcagaagcaagaca

SEQ ID NO: 1257783 - DNA, 15 bp, Homo sapiens
aatcagaagcaagac

SEQ ID NO: 1257784 - DNA, 15 bp, Homo sapiens
aaatcagaagcaaga

SEQ ID NO: 1257785 - DNA, 15 bp, Homo sapiens
taaatcagaagcaag

SEQ ID NO: 1257786 - DNA, 15 bp, Homo sapiens
gtaaatcagaagcaa

SEQ ID NO: 1257787 - DNA, 15 bp, Homo sapiens
agtaaatcagaagca

SEQ ID NO: 1257788 - DNA, 15 bp, Homo sapiens
tagtaaatcagaagc

SEQ ID NO: 1257789 - DNA, 15 bp, Homo sapiens
atagtaaatcagaag

SEQ ID NO: 1257790 - DNA, 15 bp, Homo sapiens
gatagtaaatcagaa

SEQ ID NO: 1257791 - DNA, 15 bp, Homo sapiens
ggatagtaaatcaga

SEQ ID NO: 1257792 - DNA, 15 bp, Homo sapiens
aggatagtaaatcag

SEQ ID NO: 1257793 - DNA, 15 bp, Homo sapiens
caggatagtaaatca

SEQ ID NO: 1257794 - DNA, 15 bp, Homo sapiens
tcaggatagtaaatc

SEQ ID NO: 1257795 - DNA, 15 bp, Homo sapiens
gtcaggatagtaaat

SEQ ID NO: 1257796 - DNA, 15 bp, Homo sapiens
agtcaggatagtaaa

SEQ ID NO: 1257797 - DNA, 15 bp, Homo sapiens
aagtcaggatagtaa

SEQ ID NO: 1257798 - DNA, 15 bp, Homo sapiens
caagtcaggatagta

SEQ ID NO: 1257799 - DNA, 15 bp, Homo sapiens
ccaagtcaggatagt

SEQ ID NO: 1257800 - DNA, 15 bp, Homo sapiens
cccaagtcaggatag

SEQ ID NO: 1257801 - DNA, 15 bp, Homo sapiens
ccccaagtcaggata

SEQ ID NO: 1257802 - DNA, 15 bp, Homo sapiens
accccaagtcaggat

SEQ ID NO: 1257803 - DNA, 15 bp, Homo sapiens
caccccaagtcagga

SEQ ID NO: 1257804 - DNA, 15 bp, Homo sapiens
tcaccccaagtcagg

SEQ ID NO: 1257805 - DNA, 15 bp, Homo sapiens
gtcaccccaagtcag

SEQ ID NO: 1257806 - DNA, 15 bp, Homo sapiens
tgtcaccccaagtca

SEQ ID NO: 1257807 - DNA, 15 bp, Homo sapiens
ctgtcaccccaagtc

SEQ ID NO: 1257808 - DNA, 15 bp, Homo sapiens
actgtcaccccaagt

SEQ ID NO: 1257809 - DNA, 15 bp, Homo sapiens
cactgtcaccccaag

SEQ ID NO: 1257810 - DNA, 15 bp, Homo sapiens
ccactgtcaccccaa

SEQ ID NO: 1257811 - DNA, 15 bp, Homo sapiens
gccactgtcacccca

SEQ ID NO: 1257812 - DNA, 15 bp, Homo sapiens
tgccactgtcacccc

SEQ ID NO: 1257813 - DNA, 15 bp, Homo sapiens
ctgccactgtcaccc

SEQ ID NO: 1257814 - DNA, 15 bp, Homo sapiens
actgccactgtcacc

SEQ ID NO: 1257815 - DNA, 15 bp, Homo sapiens
aactgccactgtcac

SEQ ID NO: 1257816 - DNA, 15 bp, Homo sapiens
aaactgccactgtca

SEQ ID NO: 1257817 - DNA, 15 bp, Homo sapiens
gaaactgccactgtc

SEQ ID NO: 1257818 - DNA, 15 bp, Homo sapiens
tgaaactgccactgt

SEQ ID NO: 1257819 - DNA, 15 bp, Homo sapiens
ttgaaactgccactg

SEQ ID NO: 1257820 - DNA, 15 bp, Homo sapiens
tttgaaactgccact

SEQ ID NO: 1257821 - DNA, 15 bp, Homo sapiens
ctttgaaactgccac

SEQ ID NO: 1257822 - DNA, 15 bp, Homo sapiens
cctttgaaactgcca

SEQ ID NO: 1257823 - DNA, 15 bp, Homo sapiens
gcctttgaaactgcc

SEQ ID NO: 1257824 - DNA, 15 bp, Homo sapiens
agcctttgaaactgc

SEQ ID NO: 1257825 - DNA, 15 bp, Homo sapiens
aagcctttgaaactg

SEQ ID NO: 1257826 - DNA, 15 bp, Homo sapiens
gaagcctttgaaact

SEQ ID NO: 1257827 - DNA, 15 bp, Homo sapiens
agaagcctttgaaac

SEQ ID NO: 1257828 - DNA, 15 bp, Homo sapiens
tagaagcctttgaaa

SEQ ID NO: 1257829 - DNA, 15 bp, Homo sapiens
gtagaagcctttgaa

SEQ ID NO: 1257830 - DNA, 15 bp, Homo sapiens
agtagaagcctttga

SEQ ID NO: 1257831 - DNA, 15 bp, Homo sapiens
aagtagaagcctttg

SEQ ID NO: 1257832 - DNA, 15 bp, Homo sapiens
caagtagaagccttt

SEQ ID NO: 1257833 - DNA, 15 bp, Homo sapiens
ccaagtagaagcctt

SEQ ID NO: 1257834 - DNA, 15 bp, Homo sapiens
accaagtagaagcct

SEQ ID NO: 1257835 - DNA, 15 bp, Homo sapiens
gaccaagtagaagcc

SEQ ID NO: 1257836 - DNA, 15 bp, Homo sapiens
ggaccaagtagaagc

SEQ ID NO: 1257837 - DNA, 15 bp, Homo sapiens
aggaccaagtagaag

SEQ ID NO: 1257838 - DNA, 15 bp, Homo sapiens
gaggaccaagtagaa

SEQ ID NO: 1257839 - DNA, 15 bp, Homo sapiens
ggaggaccaagtaga

SEQ ID NO: 1257840 - DNA, 15 bp, Homo sapiens
aggaggaccaagtag

SEQ ID NO: 1257841 - DNA, 15 bp, Homo sapiens
taggaggaccaagta

SEQ ID NO: 1257842 - DNA, 15 bp, Homo sapiens
gtaggaggaccaagt

SEQ ID NO: 1257843 - DNA, 15 bp, Homo sapiens
tgtaggaggaccaag

SEQ ID NO: 1257844 - DNA, 15 bp, Homo sapiens
atgtaggaggaccaa

SEQ ID NO: 1257845 - DNA, 15 bp, Homo sapiens
tatgtaggaggacca

SEQ ID NO: 1257846 - DNA, 15 bp, Homo sapiens
ttatgtaggaggacc

SEQ ID NO: 1257847 - DNA, 15 bp, Homo sapiens
attatgtaggaggac

SEQ ID NO: 1257848 - DNA, 15 bp, Homo sapiens
cattatgtaggagga

SEQ ID NO: 1257849 - DNA, 15 bp, Homo sapiens
tcattatgtaggagg

SEQ ID NO: 1257850 - DNA, 15 bp, Homo sapiens
gtcattatgtaggag

SEQ ID NO: 1257851 - DNA, 15 bp, Homo sapiens
agtcattatgtagga

SEQ ID NO: 1257852 - DNA, 15 bp, Homo sapiens
tagtcattatgtagg

SEQ ID NO: 1257853 - DNA, 15 bp, Homo sapiens
atagtcattatgtag

SEQ ID NO: 1257854 - DNA, 15 bp, Homo sapiens
aatagtcattatgta

SEQ ID NO: 1257855 - DNA, 15 bp, Homo sapiens
taatagtcattatgt

SEQ ID NO: 1257856 - DNA, 15 bp, Homo sapiens
ttaatagtcattatg

SEQ ID NO: 1257857 - DNA, 15 bp, Homo sapiens
attaatagtcattat

SEQ ID NO: 1257858 - DNA, 15 bp, Homo sapiens
gattaatagtcatta

SEQ ID NO: 1257859 - DNA, 15 bp, Homo sapiens
ggattaatagtcatt

SEQ ID NO: 1257860 - DNA, 15 bp, Homo sapiens
tggattaatagtcat

SEQ ID NO: 1257861 - DNA, 15 bp, Homo sapiens
atggattaatagtca

SEQ ID NO: 1257862 - DNA, 15 bp, Homo sapiens
catggattaatagtc

SEQ ID NO: 1257863 - DNA, 15 bp, Homo sapiens
ccatggattaatagt

SEQ ID NO: 1257864 - DNA, 15 bp, Homo sapiens
cccatggattaatag

SEQ ID NO: 1257865 - DNA, 15 bp, Homo sapiens
acccatggattaata

SEQ ID NO: 1257866 - DNA, 15 bp, Homo sapiens
gacccatggattaat

SEQ ID NO: 1257867 - DNA, 15 bp, Homo sapiens
tgacccatggattaa

SEQ ID NO: 1257868 - DNA, 15 bp, Homo sapiens
ctgacccatggatta

SEQ ID NO: 1257869 - DNA, 15 bp, Homo sapiens
cctgacccatggatt

SEQ ID NO: 1257870 - DNA, 15 bp, Homo sapiens
ccctgacccatggat

SEQ ID NO: 1257871 - DNA, 15 bp, Homo sapiens
tccctgacccatgga

SEQ ID NO: 1257872 - DNA, 15 bp, Homo sapiens
ctccctgacccatgg

SEQ ID NO: 1257873 - DNA, 15 bp, Homo sapiens
gctccctgacccatg

SEQ ID NO: 1257874 - DNA, 15 bp, Homo sapiens
ggctccctgacccat

SEQ ID NO: 1257875 - DNA, 15 bp, Homo sapiens
tggctccctgaccca

SEQ ID NO: 1257876 - DNA, 15 bp, Homo sapiens
ttggctccctgaccc

SEQ ID NO: 1257877 - DNA, 15 bp, Homo sapiens
attggctccctgacc

SEQ ID NO: 1257878 - DNA, 15 bp, Homo sapiens
cattggctccctgac

SEQ ID NO: 1257879 - DNA, 15 bp, Homo sapiens
acattggctccctga

SEQ ID NO: 1257880 - DNA, 15 bp, Homo sapiens
cacattggctccctg

SEQ ID NO: 1257881 - DNA, 15 bp, Homo sapiens
tcacattggctccct

SEQ ID NO: 1257882 - DNA, 15 bp, Homo sapiens
ttcacattggctccc

SEQ ID NO: 1257883 - DNA, 15 bp, Homo sapiens
cttcacattggctcc

SEQ ID NO: 1257884 - DNA, 15 bp, Homo sapiens
ccttcacattggctc

SEQ ID NO: 1257885 - DNA, 15 bp, Homo sapiens
accttcacattggct

SEQ ID NO: 1257886 - DNA, 15 bp, Homo sapiens
aaccttcacattggc

SEQ ID NO: 1257887 - DNA, 15 bp, Homo sapiens
aaaccttcacattgg

SEQ ID NO: 1257888 - DNA, 15 bp, Homo sapiens
aaaaccttcacattg

SEQ ID NO: 1257889 - DNA, 15 bp, Homo sapiens
caaaaccttcacatt

SEQ ID NO: 1257890 - DNA, 15 bp, Homo sapiens
gcaaaaccttcacat

SEQ ID NO: 1257891 - DNA, 15 bp, Homo sapiens
ggcaaaaccttcaca

SEQ ID NO: 1257892 - DNA, 15 bp, Homo sapiens
tggcaaaaccttcac

SEQ ID NO: 1257893 - DNA, 15 bp, Homo sapiens
ctggcaaaaccttca

SEQ ID NO: 1257894 - DNA, 15 bp, Homo sapiens
gctggcaaaaccttc

SEQ ID NO: 1257895 - DNA, 15 bp, Homo sapiens
agctggcaaaacctt

SEQ ID NO: 1257896 - DNA, 15 bp, Homo sapiens
tagctggcaaaacct

SEQ ID NO: 1257897 - DNA, 15 bp, Homo sapiens
ttagctggcaaaacc

SEQ ID NO: 1257898 - DNA, 15 bp, Homo sapiens
cttagctggcaaaac

SEQ ID NO: 1257899 - DNA, 15 bp, Homo sapiens
tcttagctggcaaaa

SEQ ID NO: 1257900 - DNA, 15 bp, Homo sapiens
atcttagctggcaaa

SEQ ID NO: 1257901 - DNA, 15 bp, Homo sapiens
aatcttagctggcaa

SEQ ID NO: 1257902 - DNA, 15 bp, Homo sapiens
caatcttagctggca

SEQ ID NO: 1257903 - DNA, 15 bp, Homo sapiens
tcaatcttagctggc

SEQ ID NO: 1257904 - DNA, 15 bp, Homo sapiens
gtcaatcttagctgg

SEQ ID NO: 1257905 - DNA, 15 bp, Homo sapiens
agtcaatcttagctg

SEQ ID NO: 1257906 - DNA, 15 bp, Homo sapiens
tagtcaatcttagct

SEQ ID NO: 1257907 - DNA, 15 bp, Homo sapiens
gtagtcaatcttagc

SEQ ID NO: 1257908 - DNA, 15 bp, Homo sapiens
ggtagtcaatcttag

SEQ ID NO: 1257909 - DNA, 15 bp, Homo sapiens
aggtagtcaatctta

SEQ ID NO: 1257910 - DNA, 15 bp, Homo sapiens
aaggtagtcaatctt

SEQ ID NO: 1257911 - DNA, 15 bp, Homo sapiens
taaggtagtcaatct

SEQ ID NO: 1257912 - DNA, 15 bp, Homo sapiens
ttaaggtagtcaatc

SEQ ID NO: 1257913 - DNA, 15 bp, Homo sapiens
attaaggtagtcaat

SEQ ID NO: 1257914 - DNA, 15 bp, Homo sapiens
aattaaggtagtcaa

SEQ ID NO: 1257915 - DNA, 15 bp, Homo sapiens
taattaaggtagtca

SEQ ID NO: 1257916 - DNA, 15 bp, Homo sapiens
ctaattaaggtagtc

SEQ ID NO: 1257917 - DNA, 15 bp, Homo sapiens
tctaattaaggtagt

SEQ ID NO: 1257918 - DNA, 15 bp, Homo sapiens
gtctaattaaggtag

SEQ ID NO: 1257919 - DNA, 15 bp, Homo sapiens
tgtctaattaaggta

SEQ ID NO: 1257920 - DNA, 15 bp, Homo sapiens
atgtctaattaaggt

SEQ ID NO: 1257921 - DNA, 15 bp, Homo sapiens
aatgtctaattaagg

SEQ ID NO: 1257922 - DNA, 15 bp, Homo sapiens
gaatgtctaattaag

SEQ ID NO: 1257923 - DNA, 15 bp, Homo sapiens
tgaatgtctaattaa

SEQ ID NO: 1257924 - DNA, 15 bp, Homo sapiens
ctgaatgtctaatta

SEQ ID NO: 1257925 - DNA, 15 bp, Homo sapiens
actgaatgtctaatt

SEQ ID NO: 1257926 - DNA, 15 bp, Homo sapiens
cactgaatgtctaat

SEQ ID NO: 1257927 - DNA, 15 bp, Homo sapiens
tcactgaatgtctaa

SEQ ID NO: 1257928 - DNA, 15 bp, Homo sapiens
atcactgaatgtcta

SEQ ID NO: 1257929 - DNA, 15 bp, Homo sapiens
aatcactgaatgtct

SEQ ID NO: 1257930 - DNA, 15 bp, Homo sapiens
aaatcactgaatgtc

SEQ ID NO: 1257931 - DNA, 15 bp, Homo sapiens
taaatcactgaatgt

SEQ ID NO: 1257932 - DNA, 15 bp, Homo sapiens
ttaaatcactgaatg

SEQ ID NO: 1257933 - DNA, 15 bp, Homo sapiens
tttaaatcactgaat

SEQ ID NO: 1257934 - DNA, 15 bp, Homo sapiens
gtttaaatcactgaa

SEQ ID NO: 1257935 - DNA, 15 bp, Homo sapiens
tgtttaaatcactga

SEQ ID NO: 1257936 - DNA, 15 bp, Homo sapiens
atgtttaaatcactg

SEQ ID NO: 1257937 - DNA, 15 bp, Homo sapiens
tatgtttaaatcact

SEQ ID NO: 1257938 - DNA, 15 bp, Homo sapiens
ttatgtttaaatcac

SEQ ID NO: 1257939 - DNA, 15 bp, Homo sapiens
tttatgtttaaatca

SEQ ID NO: 1257940 - DNA, 15 bp, Homo sapiens
ttttatgtttaaatc

SEQ ID NO: 1257941 - DNA, 15 bp, Homo sapiens
attttatgtttaaat

SEQ ID NO: 1257942 - DNA, 15 bp, Homo sapiens
cattttatgtttaaa

SEQ ID NO: 1257943 - DNA, 15 bp, Homo sapiens
gcattttatgtttaa

SEQ ID NO: 1257944 - DNA, 15 bp, Homo sapiens
tgcattttatgttta

SEQ ID NO: 1257945 - DNA, 15 bp, Homo sapiens
atgcattttatgttt

SEQ ID NO: 1257946 - DNA, 15 bp, Homo sapiens
aatgcattttatgtt

SEQ ID NO: 1257947 - DNA, 15 bp, Homo sapiens
gaatgcattttatgt

SEQ ID NO: 1257948 - DNA, 15 bp, Homo sapiens
tgaatgcattttatg

SEQ ID NO: 1257949 - DNA, 15 bp, Homo sapiens
atgaatgcattttat

SEQ ID NO: 1257950 - DNA, 15 bp, Homo sapiens
catgaatgcatttta

SEQ ID NO: 1257951 - DNA, 15 bp, Homo sapiens
ccatgaatgcatttt

SEQ ID NO: 1257952 - DNA, 15 bp, Homo sapiens
cccatgaatgcattt

SEQ ID NO: 1257953 - DNA, 15 bp, Homo sapiens
gcccatgaatgcatt

SEQ ID NO: 1257954 - DNA, 15 bp, Homo sapiens
tgcccatgaatgcat

SEQ ID NO: 1257955 - DNA, 15 bp, Homo sapiens
ttgcccatgaatgca

SEQ ID NO: 1257956 - DNA, 15 bp, Homo sapiens
attgcccatgaatgc

SEQ ID NO: 1257957 - DNA, 15 bp, Homo sapiens
gattgcccatgaatg

SEQ ID NO: 1257958 - DNA, 15 bp, Homo sapiens
tgattgcccatgaat

SEQ ID NO: 1257959 - DNA, 15 bp, Homo sapiens
ctgattgcccatgaa

SEQ ID NO: 1257960 - DNA, 15 bp, Homo sapiens
tctgattgcccatga

SEQ ID NO: 1257961 - DNA, 15 bp, Homo sapiens
atctgattgcccatg

SEQ ID NO: 1257962 - DNA, 15 bp, Homo sapiens
gatctgattgcccat

SEQ ID NO: 1257963 - DNA, 15 bp, Homo sapiens
ggatctgattgccca

SEQ ID NO: 1257964 - DNA, 15 bp, Homo sapiens
tggatctgattgccc

SEQ ID NO: 1257965 - DNA, 15 bp, Homo sapiens
gtggatctgattgcc

SEQ ID NO: 1257966 - DNA, 15 bp, Homo sapiens
agtggatctgattgc

SEQ ID NO: 1257967 - DNA, 15 bp, Homo sapiens
cagtggatctgattg

SEQ ID NO: 1257968 - DNA, 15 bp, Homo sapiens
acagtggatctgatt

SEQ ID NO: 1257969 - DNA, 15 bp, Homo sapiens
cacagtggatctgat

SEQ ID NO: 1257970 - DNA, 15 bp, Homo sapiens
tcacagtggatctga

SEQ ID NO: 1257971 - DNA, 15 bp, Homo sapiens
ctcacagtggatctg

SEQ ID NO: 1257972 - DNA, 15 bp, Homo sapiens
actcacagtggatct

SEQ ID NO: 1257973 - DNA, 15 bp, Homo sapiens
aactcacagtggatc

SEQ ID NO: 1257974 - DNA, 15 bp, Homo sapiens
caactcacagtggat

SEQ ID NO: 1257975 - DNA, 15 bp, Homo sapiens
ccaactcacagtgga

SEQ ID NO: 1257976 - DNA, 15 bp, Homo sapiens
tccaactcacagtgg

SEQ ID NO: 1257977 - DNA, 15 bp, Homo sapiens
ttccaactcacagtg

SEQ ID NO: 1257978 - DNA, 15 bp, Homo sapiens
attccaactcacagt

SEQ ID NO: 1257979 - DNA, 15 bp, Homo sapiens
aattccaactcacag

SEQ ID NO: 1257980 - DNA, 15 bp, Homo sapiens
caattccaactcaca

SEQ ID NO: 1257981 - DNA, 15 bp, Homo sapiens
tcaattccaactcac

SEQ ID NO: 1257982 - DNA, 15 bp, Homo sapiens
ctcaattccaactca

SEQ ID NO: 1257983 - DNA, 15 bp, Homo sapiens
gctcaattccaactc

SEQ ID NO: 1257984 - DNA, 15 bp, Homo sapiens
ggctcaattccaact

SEQ ID NO: 1257985 - DNA, 15 bp, Homo sapiens
gggctcaattccaac

SEQ ID NO: 1257986 - DNA, 15 bp, Homo sapiens
tgggctcaattccaa

SEQ ID NO: 1257987 - DNA, 15 bp, Homo sapiens
ttgggctcaattcca

SEQ ID NO: 1257988 - DNA, 15 bp, Homo sapiens
tttgggctcaattcc

SEQ ID NO: 1257989 - DNA, 15 bp, Homo sapiens
gtttgggctcaattc

SEQ ID NO: 1257990 - DNA, 15 bp, Homo sapiens
agtttgggctcaatt

SEQ ID NO: 1257991 - DNA, 15 bp, Homo sapiens
gagtttgggctcaat

SEQ ID NO: 1257992 - DNA, 15 bp, Homo sapiens
ggagtttgggctcaa

SEQ ID NO: 1257993 - DNA, 15 bp, Homo sapiens
tggagtttgggctca

SEQ ID NO: 1257994 - DNA, 15 bp, Homo sapiens
gtggagtttgggctc

SEQ ID NO: 1257995 - DNA, 15 bp, Homo sapiens
agtggagtttgggct

SEQ ID NO: 1257996 - DNA, 15 bp, Homo sapiens
cagtggagtttgggc

SEQ ID NO: 1257997 - DNA, 15 bp, Homo sapiens
ccagtggagtttggg

SEQ ID NO: 1257998 - DNA, 15 bp, Homo sapiens
accagtggagtttgg

SEQ ID NO: 1257999 - DNA, 15 bp, Homo sapiens
gaccagtggagtttg

SEQ ID NO: 1258000 - DNA, 15 bp, Homo sapiens
ggaccagtggagttt

SEQ ID NO: 1258001 - DNA, 15 bp, Homo sapiens
gggaccagtggagtt

SEQ ID NO: 1258002 - DNA, 15 bp, Homo sapiens
agggaccagtggagt

SEQ ID NO: 1258003 - DNA, 15 bp, Homo sapiens
tagggaccagtggag

SEQ ID NO: 1258004 - DNA, 15 bp, Homo sapiens
atagggaccagtgga

SEQ ID NO: 1258005 - DNA, 15 bp, Homo sapiens
aatagggaccagtgg

SEQ ID NO: 1258006 - DNA, 15 bp, Homo sapiens
gaatagggaccagtg

SEQ ID NO: 1258007 - DNA, 15 bp, Homo sapiens
agaatagggaccagt

SEQ ID NO: 1258008 - DNA, 15 bp, Homo sapiens
tagaatagggaccag

SEQ ID NO: 1258009 - DNA, 15 bp, Homo sapiens
ttagaatagggacca

SEQ ID NO: 1258010 - DNA, 15 bp, Homo sapiens
gttagaatagggacc

SEQ ID NO: 1258011 - DNA, 15 bp, Homo sapiens
agttagaatagggac

SEQ ID NO: 1258012 - DNA, 15 bp, Homo sapiens
cagttagaataggga

SEQ ID NO: 1258013 - DNA, 15 bp, Homo sapiens
ccagttagaataggg

SEQ ID NO: 1258014 - DNA, 15 bp, Homo sapiens
tccagttagaatagg

SEQ ID NO: 1258015 - DNA, 15 bp, Homo sapiens
ctccagttagaatag

SEQ ID NO: 1258016 - DNA, 15 bp, Homo sapiens
tctccagttagaata

SEQ ID NO: 1258017 - DNA, 15 bp, Homo sapiens
ttctccagttagaat

SEQ ID NO: 1258018 - DNA, 15 bp, Homo sapiens
attctccagttagaa

SEQ ID NO: 1258019 - DNA, 15 bp, Homo sapiens
aattctccagttaga

SEQ ID NO: 1258020 - DNA, 15 bp, Homo sapiens
taattctccagttag

SEQ ID NO: 1258021 - DNA, 15 bp, Homo sapiens
gtaattctccagtta

SEQ ID NO: 1258022 - DNA, 15 bp, Homo sapiens
tgtaattctccagtt

SEQ ID NO: 1258023 - DNA, 15 bp, Homo sapiens
atgtaattctccagt

SEQ ID NO: 1258024 - DNA, 15 bp, Homo sapiens
aatgtaattctccag

SEQ ID NO: 1258025 - DNA, 15 bp, Homo sapiens
caatgtaattctcca

SEQ ID NO: 1258026 - DNA, 15 bp, Homo sapiens
ccaatgtaattctcc

SEQ ID NO: 1258027 - DNA, 15 bp, Homo sapiens
accaatgtaattctc

SEQ ID NO: 1258028 - DNA, 15 bp, Homo sapiens
taccaatgtaattct

SEQ ID NO: 1258029 - DNA, 15 bp, Homo sapiens
ataccaatgtaattc

SEQ ID NO: 1258030 - DNA, 15 bp, Homo sapiens
gataccaatgtaatt

SEQ ID NO: 1258031 - DNA, 15 bp, Homo sapiens
tgataccaatgtaat

SEQ ID NO: 1258032 - DNA, 15 bp, Homo sapiens
ctgataccaatgtaa

SEQ ID NO: 1258033 - DNA, 15 bp, Homo sapiens
cctgataccaatgta

SEQ ID NO: 1258034 - DNA, 15 bp, Homo sapiens
ccctgataccaatgt

SEQ ID NO: 1258035 - DNA, 15 bp, Homo sapiens
accctgataccaatg

SEQ ID NO: 1258036 - DNA, 15 bp, Homo sapiens
gaccctgataccaat

SEQ ID NO: 1258037 - DNA, 15 bp, Homo sapiens
tgaccctgataccaa

SEQ ID NO: 1258038 - DNA, 15 bp, Homo sapiens
ctgaccctgatacca

SEQ ID NO: 1258039 - DNA, 15 bp, Homo sapiens
gctgaccctgatacc

SEQ ID NO: 1258040 - DNA, 15 bp, Homo sapiens
agctgaccctgatac

SEQ ID NO: 1258041 - DNA, 15 bp, Homo sapiens
gagctgaccctgata

SEQ ID NO: 1258042 - DNA, 15 bp, Homo sapiens
tgagctgaccctgat

SEQ ID NO: 1258043 - DNA, 15 bp, Homo sapiens
ctgagctgaccctga

SEQ ID NO: 1258044 - DNA, 15 bp, Homo sapiens
tctgagctgaccctg

SEQ ID NO: 1258045 - DNA, 15 bp, Homo sapiens
gtctgagctgaccct

SEQ ID NO: 1258046 - DNA, 15 bp, Homo sapiens
agtctgagctgaccc

SEQ ID NO: 1258047 - DNA, 15 bp, Homo sapiens
aagtctgagctgacc

SEQ ID NO: 1258048 - DNA, 15 bp, Homo sapiens
aaagtctgagctgac

SEQ ID NO: 1258049 - DNA, 15 bp, Homo sapiens
caaagtctgagctga

SEQ ID NO: 1258050 - DNA, 15 bp, Homo sapiens
acaaagtctgagctg

SEQ ID NO: 1258051 - DNA, 15 bp, Homo sapiens
tacaaagtctgagct

SEQ ID NO: 1258052 - DNA, 15 bp, Homo sapiens
atacaaagtctgagc

SEQ ID NO: 1258053 - DNA, 15 bp, Homo sapiens
gatacaaagtctgag

SEQ ID NO: 1258054 - DNA, 15 bp, Homo sapiens
agatacaaagtctga

SEQ ID NO: 1258055 - DNA, 15 bp, Homo sapiens
tagatacaaagtctg

SEQ ID NO: 1258056 - DNA, 15 bp, Homo sapiens
ttagatacaaagtct

SEQ ID NO: 1258057 - DNA, 15 bp, Homo sapiens
gttagatacaaagtc

SEQ ID NO: 1258058 - DNA, 15 bp, Homo sapiens
tgttagatacaaagt

SEQ ID NO: 1258059 - DNA, 15 bp, Homo sapiens
ctgttagatacaaag

SEQ ID NO: 1258060 - DNA, 15 bp, Homo sapiens
actgttagatacaaa

SEQ ID NO: 1258061 - DNA, 15 bp, Homo sapiens
aactgttagatacaa

SEQ ID NO: 1258062 - DNA, 15 bp, Homo sapiens
gaactgttagataca

SEQ ID NO: 1258063 - DNA, 15 bp, Homo sapiens
agaactgttagatac

SEQ ID NO: 1258064 - DNA, 15 bp, Homo sapiens
aagaactgttagata

SEQ ID NO: 1258065 - DNA, 15 bp, Homo sapiens
caagaactgttagat

SEQ ID NO: 1258066 - DNA, 15 bp, Homo sapiens
tcaagaactgttaga

SEQ ID NO: 1258067 - DNA, 15 bp, Homo sapiens
ttcaagaactgttag

SEQ ID NO: 1258068 - DNA, 15 bp, Homo sapiens
attcaagaactgtta

SEQ ID NO: 1258069 - DNA, 15 bp, Homo sapiens
tattcaagaactgtt

SEQ ID NO: 1258070 - DNA, 15 bp, Homo sapiens
gtattcaagaactgt

SEQ ID NO: 1258071 - DNA, 15 bp, Homo sapiens
agtattcaagaactg

SEQ ID NO: 1258072 - DNA, 15 bp, Homo sapiens
aagtattcaagaact

SEQ ID NO: 1258073 - DNA, 15 bp, Homo sapiens
caagtattcaagaac

SEQ ID NO: 1258074 - DNA, 15 bp, Homo sapiens
tcaagtattcaagaa

SEQ ID NO: 1258075 - DNA, 15 bp, Homo sapiens
atcaagtattcaaga

SEQ ID NO: 1258076 - DNA, 15 bp, Homo sapiens
tatcaagtattcaag

SEQ ID NO: 1258077 - DNA, 15 bp, Homo sapiens
atatcaagtattcaa

SEQ ID NO: 1258078 - DNA, 15 bp, Homo sapiens
aatatcaagtattca

SEQ ID NO: 1258079 - DNA, 15 bp, Homo sapiens
gaatatcaagtattc

SEQ ID NO: 1258080 - DNA, 15 bp, Homo sapiens
ggaatatcaagtatt

SEQ ID NO: 1258081 - DNA, 15 bp, Homo sapiens
aggaatatcaagtat

SEQ ID NO: 1258082 - DNA, 15 bp, Homo sapiens
gaggaatatcaagta

SEQ ID NO: 1258083 - DNA, 15 bp, Homo sapiens
agaggaatatcaagt

SEQ ID NO: 1258084 - DNA, 15 bp, Homo sapiens
aagaggaatatcaag

SEQ ID NO: 1258085 - DNA, 15 bp, Homo sapiens
aaagaggaatatcaa

SEQ ID NO: 1258086 - DNA, 15 bp, Homo sapiens
gaaagaggaatatca

SEQ ID NO: 1258087 - DNA, 15 bp, Homo sapiens
agaaagaggaatatc

SEQ ID NO: 1258088 - DNA, 15 bp, Homo sapiens
aagaaagaggaatat

SEQ ID NO: 1258089 - DNA, 15 bp, Homo sapiens
gaagaaagaggaata

SEQ ID NO: 1258090 - DNA, 15 bp, Homo sapiens
ggaagaaagaggaat

SEQ ID NO: 1258091 - DNA, 15 bp, Homo sapiens
tggaagaaagaggaa

SEQ ID NO: 1258092 - DNA, 15 bp, Homo sapiens
gtggaagaaagagga

SEQ ID NO: 1258093 - DNA, 15 bp, Homo sapiens
agtggaagaaagagg

SEQ ID NO: 1258094 - DNA, 15 bp, Homo sapiens
cagtggaagaaagag

SEQ ID NO: 1258095 - DNA, 15 bp, Homo sapiens
gcagtggaagaaaga

SEQ ID NO: 1258096 - DNA, 15 bp, Homo sapiens
tgcagtggaagaaag

SEQ ID NO: 1258097 - DNA, 15 bp, Homo sapiens
atgcagtggaagaaa

SEQ ID NO: 1258098 - DNA, 15 bp, Homo sapiens
catgcagtggaagaa

SEQ ID NO: 1258099 - DNA, 15 bp, Homo sapiens
gcatgcagtggaaga

SEQ ID NO: 1258100 - DNA, 15 bp, Homo sapiens
agcatgcagtggaag

SEQ ID NO: 1258101 - DNA, 15 bp, Homo sapiens
gagcatgcagtggaa

SEQ ID NO: 1258102 - DNA, 15 bp, Homo sapiens
agagcatgcagtgga

SEQ ID NO: 1258103 - DNA, 15 bp, Homo sapiens
gagagcatgcagtgg

SEQ ID NO: 1258104 - DNA, 15 bp, Homo sapiens
tgagagcatgcagtg

SEQ ID NO: 1258105 - DNA, 15 bp, Homo sapiens
gtgagagcatgcagt

SEQ ID NO: 1258106 - DNA, 15 bp, Homo sapiens
ggtgagagcatgcag

SEQ ID NO: 1258107 - DNA, 15 bp, Homo sapiens
aggtgagagcatgca

SEQ ID NO: 1258108 - DNA, 15 bp, Homo sapiens
taggtgagagcatgc

SEQ ID NO: 1258109 - DNA, 15 bp, Homo sapiens
ctaggtgagagcatg

SEQ ID NO: 1258110 - DNA, 15 bp, Homo sapiens
gctaggtgagagcat

SEQ ID NO: 1258111 - DNA, 15 bp, Homo sapiens
tgctaggtgagagca

SEQ ID NO: 1258112 - DNA, 15 bp, Homo sapiens
ttgctaggtgagagc

SEQ ID NO: 1258113 - DNA, 15 bp, Homo sapiens
tttgctaggtgagag

SEQ ID NO: 1258114 - DNA, 15 bp, Homo sapiens
atttgctaggtgaga

SEQ ID NO: 1258115 - DNA, 15 bp, Homo sapiens
catttgctaggtgag

SEQ ID NO: 1258116 - DNA, 15 bp, Homo sapiens
ccatttgctaggtga

SEQ ID NO: 1258117 - DNA, 15 bp, Homo sapiens
gccatttgctaggtg

SEQ ID NO: 1258118 - DNA, 15 bp, Homo sapiens
ggccatttgctaggt

SEQ ID NO: 1258119 - DNA, 15 bp, Homo sapiens
tggccatttgctagg

SEQ ID NO: 1258120 - DNA, 15 bp, Homo sapiens
gtggccatttgctag

SEQ ID NO: 1258121 - DNA, 15 bp, Homo sapiens
cgtggccatttgcta

SEQ ID NO: 1258122 - DNA, 15 bp, Homo sapiens
tcgtggccatttgct

SEQ ID NO: 1258123 - DNA, 15 bp, Homo sapiens
ctcgtggccatttgc

SEQ ID NO: 1258124 - DNA, 15 bp, Homo sapiens
actcgtggccatttg

SEQ ID NO: 1258125 - DNA, 15 bp, Homo sapiens
gactcgtggccattt

SEQ ID NO: 1258126 - DNA, 15 bp, Homo sapiens
tgactcgtggccatt

SEQ ID NO: 1258127 - DNA, 15 bp, Homo sapiens
atgactcgtggccat

SEQ ID NO: 1258128 - DNA, 15 bp, Homo sapiens
aatgactcgtggcca

SEQ ID NO: 1258129 - DNA, 15 bp, Homo sapiens
aaatgactcgtggcc

SEQ ID NO: 1258130 - DNA, 15 bp, Homo sapiens
aaaatgactcgtggc

SEQ ID NO: 1258131 - DNA, 15 bp, Homo sapiens
caaaatgactcgtgg

SEQ ID NO: 1258132 - DNA, 15 bp, Homo sapiens
ccaaaatgactcgtg

SEQ ID NO: 1258133 - DNA, 15 bp, Homo sapiens
cccaaaatgactcgt

SEQ ID NO: 1258134 - DNA, 15 bp, Homo sapiens
ccccaaaatgactcg

SEQ ID NO: 1258135 - DNA, 15 bp, Homo sapiens
tccccaaaatgactc

SEQ ID NO: 1258136 - DNA, 15 bp, Homo sapiens
ctccccaaaatgact

SEQ ID NO: 1258137 - DNA, 15 bp, Homo sapiens
gctccccaaaatgac

SEQ ID NO: 1258138 - DNA, 15 bp, Homo sapiens
ggctccccaaaatga

SEQ ID NO: 1258139 - DNA, 15 bp, Homo sapiens
tggctccccaaaatg

SEQ ID NO: 1258140 - DNA, 15 bp, Homo sapiens
gtggctccccaaaat

SEQ ID NO: 1258141 - DNA, 15 bp, Homo sapiens
ggtggctccccaaaa

SEQ ID NO: 1258142 - DNA, 15 bp, Homo sapiens
aggtggctccccaaa

SEQ ID NO: 1258143 - DNA, 15 bp, Homo sapiens
taggtggctccccaa

SEQ ID NO: 1258144 - DNA, 15 bp, Homo sapiens
ataggtggctcccca

SEQ ID NO: 1258145 - DNA, 15 bp, Homo sapiens
gataggtggctcccc

SEQ ID NO: 1258146 - DNA, 15 bp, Homo sapiens
tgataggtggctccc

SEQ ID NO: 1258147 - DNA, 15 bp, Homo sapiens
ttgataggtggctcc

SEQ ID NO: 1258148 - DNA, 15 bp, Homo sapiens
tttgataggtggctc

SEQ ID NO: 1258149 - DNA, 15 bp, Homo sapiens
ttttgataggtggct

SEQ ID NO: 1258150 - DNA, 15 bp, Homo sapiens
cttttgataggtggc

SEQ ID NO: 1258151 - DNA, 15 bp, Homo sapiens
ccttttgataggtgg

SEQ ID NO: 1258152 - DNA, 15 bp, Homo sapiens
tccttttgataggtg

SEQ ID NO: 1258153 - DNA, 15 bp, Homo sapiens
ctccttttgataggt

SEQ ID NO: 1258154 - DNA, 15 bp, Homo sapiens
actccttttgatagg

SEQ ID NO: 1258155 - DNA, 15 bp, Homo sapiens
gactccttttgatag

SEQ ID NO: 1258156 - DNA, 15 bp, Homo sapiens
tgactccttttgata

SEQ ID NO: 1258157 - DNA, 15 bp, Homo sapiens
atgactccttttgat

SEQ ID NO: 1258158 - DNA, 15 bp, Homo sapiens
aatgactccttttga

SEQ ID NO: 1258159 - DNA, 15 bp, Homo sapiens
taatgactccttttg

SEQ ID NO: 1258160 - DNA, 15 bp, Homo sapiens
gtaatgactcctttt

SEQ ID NO: 1258161 - DNA, 15 bp, Homo sapiens
tgtaatgactccttt

SEQ ID NO: 1258162 - DNA, 15 bp, Homo sapiens
atgtaatgactcctt

SEQ ID NO: 1258163 - DNA, 15 bp, Homo sapiens
tatgtaatgactcct

SEQ ID NO: 1258164 - DNA, 15 bp, Homo sapiens
ttatgtaatgactcc

SEQ ID NO: 1258165 - DNA, 15 bp, Homo sapiens
gttatgtaatgactc

SEQ ID NO: 1258166 - DNA, 15 bp, Homo sapiens
agttatgtaatgact

SEQ ID NO: 1258167 - DNA, 15 bp, Homo sapiens
aagttatgtaatgac

SEQ ID NO: 1258168 - DNA, 15 bp, Homo sapiens
taagttatgtaatga

SEQ ID NO: 1258169 - DNA, 15 bp, Homo sapiens
ataagttatgtaatg

SEQ ID NO: 1258170 - DNA, 15 bp, Homo sapiens
tataagttatgtaat

SEQ ID NO: 1258171 - DNA, 15 bp, Homo sapiens
ctataagttatgtaa

SEQ ID NO: 1258172 - DNA, 15 bp, Homo sapiens
cctataagttatgta

SEQ ID NO: 1258173 - DNA, 15 bp, Homo sapiens
gcctataagttatgt

SEQ ID NO: 1258174 - DNA, 15 bp, Homo sapiens
tgcctataagttatg

SEQ ID NO: 1258175 - DNA, 15 bp, Homo sapiens
ttgcctataagttat

SEQ ID NO: 1258176 - DNA, 15 bp, Homo sapiens
cttgcctataagtta

SEQ ID NO: 1258177 - DNA, 15 bp, Homo sapiens
tcttgcctataagtt

SEQ ID NO: 1258178 - DNA, 15 bp, Homo sapiens
ctcttgcctataagt

SEQ ID NO: 1258179 - DNA, 15 bp, Homo sapiens
tctcttgcctataag

SEQ ID NO: 1258180 - DNA, 15 bp, Homo sapiens
ttctcttgcctataa

SEQ ID NO: 1258181 - DNA, 15 bp, Homo sapiens
cttctcttgcctata

SEQ ID NO: 1258182 - DNA, 15 bp, Homo sapiens
tcttctcttgcctat

SEQ ID NO: 1258183 - DNA, 15 bp, Homo sapiens
gtcttctcttgccta

SEQ ID NO: 1258184 - DNA, 15 bp, Homo sapiens
agtcttctcttgcct

SEQ ID NO: 1258185 - DNA, 15 bp, Homo sapiens
aagtcttctcttgcc

SEQ ID NO: 1258186 - DNA, 15 bp, Homo sapiens
gaagtcttctcttgc

SEQ ID NO: 1258187 - DNA, 15 bp, Homo sapiens
agaagtcttctcttg

SEQ ID NO: 1258188 - DNA, 15 bp, Homo sapiens
gagaagtcttctctt

SEQ ID NO: 1258189 - DNA, 15 bp, Homo sapiens
tgagaagtcttctct

SEQ ID NO: 1258190 - DNA, 15 bp, Homo sapiens
ttgagaagtcttctc

SEQ ID NO: 1258191 - DNA, 15 bp, Homo sapiens
cttgagaagtcttct

SEQ ID NO: 1258192 - DNA, 15 bp, Homo sapiens
gcttgagaagtcttc

SEQ ID NO: 1258193 - DNA, 15 bp, Homo sapiens
agcttgagaagtctt

SEQ ID NO: 1258194 - DNA, 15 bp, Homo sapiens
aagcttgagaagtct

SEQ ID NO: 1258195 - DNA, 15 bp, Homo sapiens
caagcttgagaagtc

SEQ ID NO: 1258196 - DNA, 15 bp, Homo sapiens
tcaagcttgagaagt

SEQ ID NO: 1258197 - DNA, 15 bp, Homo sapiens
ctcaagcttgagaag

SEQ ID NO: 1258198 - DNA, 15 bp, Homo sapiens
cctcaagcttgagaa

SEQ ID NO: 1258199 - DNA, 15 bp, Homo sapiens
acctcaagcttgaga

SEQ ID NO: 1258200 - DNA, 15 bp, Homo sapiens
cacctcaagcttgag

SEQ ID NO: 1258201 - DNA, 15 bp, Homo sapiens
ccacctcaagcttga

SEQ ID NO: 1258202 - DNA, 15 bp, Homo sapiens
accacctcaagcttg

SEQ ID NO: 1258203 - DNA, 15 bp, Homo sapiens
caccacctcaagctt

SEQ ID NO: 1258204 - DNA, 15 bp, Homo sapiens
gcaccacctcaagct

SEQ ID NO: 1258205 - DNA, 15 bp, Homo sapiens
agcaccacctcaagc

SEQ ID NO: 1258206 - DNA, 15 bp, Homo sapiens
aagcaccacctcaag

SEQ ID NO: 1258207 - DNA, 15 bp, Homo sapiens
gaagcaccacctcaa

SEQ ID NO: 1258208 - DNA, 15 bp, Homo sapiens
agaagcaccacctca

SEQ ID NO: 1258209 - DNA, 15 bp, Homo sapiens
cagaagcaccacctc

SEQ ID NO: 1258210 - DNA, 15 bp, Homo sapiens
gcagaagcaccacct

SEQ ID NO: 1258211 - DNA, 15 bp, Homo sapiens
ggcagaagcaccacc

SEQ ID NO: 1258212 - DNA, 15 bp, Homo sapiens
tggcagaagcaccac

SEQ ID NO: 1258213 - DNA, 15 bp, Homo sapiens
ctggcagaagcacca

SEQ ID NO: 1258214 - DNA, 15 bp, Homo sapiens
gctggcagaagcacc

SEQ ID NO: 1258215 - DNA, 15 bp, Homo sapiens
ggctggcagaagcac

SEQ ID NO: 1258216 - DNA, 15 bp, Homo sapiens
tggctggcagaagca

SEQ ID NO: 1258217 - DNA, 15 bp, Homo sapiens
ctggctggcagaagc

SEQ ID NO: 1258218 - DNA, 15 bp, Homo sapiens
tctggctggcagaag

SEQ ID NO: 1258219 - DNA, 15 bp, Homo sapiens
ctctggctggcagaa

SEQ ID NO: 1258220 - DNA, 15 bp, Homo sapiens
cctctggctggcaga

SEQ ID NO: 1258221 - DNA, 15 bp, Homo sapiens
ccctctggctggcag

SEQ ID NO: 1258222 - DNA, 15 bp, Homo sapiens
accctctggctggca

SEQ ID NO: 1258223 - DNA, 15 bp, Homo sapiens
aaccctctggctggc

SEQ ID NO: 1258224 - DNA, 15 bp, Homo sapiens
gaaccctctggctgg

SEQ ID NO: 1258225 - DNA, 15 bp, Homo sapiens
tgaaccctctggctg

SEQ ID NO: 1258226 - DNA, 15 bp, Homo sapiens
ctgaaccctctggct

SEQ ID NO: 1258227 - DNA, 15 bp, Homo sapiens
tctgaaccctctggc

SEQ ID NO: 1258228 - DNA, 15 bp, Homo sapiens
ctctgaaccctctgg

SEQ ID NO: 1258229 - DNA, 15 bp, Homo sapiens
gctctgaaccctctg

SEQ ID NO: 1258230 - DNA, 15 bp, Homo sapiens
tgctctgaaccctct

SEQ ID NO: 1258231 - DNA, 15 bp, Homo sapiens
gtgctctgaaccctc

SEQ ID NO: 1258232 - DNA, 15 bp, Homo sapiens
agtgctctgaaccct

SEQ ID NO: 1258233 - DNA, 15 bp, Homo sapiens
tagtgctctgaaccc

SEQ ID NO: 1258234 - DNA, 15 bp, Homo sapiens
ctagtgctctgaacc

SEQ ID NO: 1258235 - DNA, 15 bp, Homo sapiens
actagtgctctgaac

SEQ ID NO: 1258236 - DNA, 15 bp, Homo sapiens
cactagtgctctgaa

SEQ ID NO: 1258237 - DNA, 15 bp, Homo sapiens
ccactagtgctctga

SEQ ID NO: 1258238 - DNA, 15 bp, Homo sapiens
cccactagtgctctg

SEQ ID NO: 1258239 - DNA, 15 bp, Homo sapiens
gcccactagtgctct

SEQ ID NO: 1258240 - DNA, 15 bp, Homo sapiens
agcccactagtgctc

SEQ ID NO: 1258241 - DNA, 15 bp, Homo sapiens
cagcccactagtgct

SEQ ID NO: 1258242 - DNA, 15 bp, Homo sapiens
gcagcccactagtgc

SEQ ID NO: 1258243 - DNA, 15 bp, Homo sapiens
tgcagcccactagtg

SEQ ID NO: 1258244 - DNA, 15 bp, Homo sapiens
ctgcagcccactagt

SEQ ID NO: 1258245 - DNA, 15 bp, Homo sapiens
actgcagcccactag

SEQ ID NO: 1258246 - DNA, 15 bp, Homo sapiens
cactgcagcccacta

SEQ ID NO: 1258247 - DNA, 15 bp, Homo sapiens
tcactgcagcccact

SEQ ID NO: 1258248 - DNA, 15 bp, Homo sapiens
ctcactgcagcccac

SEQ ID NO: 1258249 - DNA, 15 bp, Homo sapiens
gctcactgcagccca

SEQ ID NO: 1258250 - DNA, 15 bp, Homo sapiens
tgctcactgcagccc

SEQ ID NO: 1258251 - DNA, 15 bp, Homo sapiens
gtgctcactgcagcc

SEQ ID NO: 1258252 - DNA, 15 bp, Homo sapiens
tgtgctcactgcagc

SEQ ID NO: 1258253 - DNA, 15 bp, Homo sapiens
atgtgctcactgcag

SEQ ID NO: 1258254 - DNA, 15 bp, Homo sapiens
aatgtgctcactgca

SEQ ID NO: 1258255 - DNA, 15 bp, Homo sapiens
gaatgtgctcactgc

SEQ ID NO: 1258256 - DNA, 15 bp, Homo sapiens
ggaatgtgctcactg

SEQ ID NO: 1258257 - DNA, 15 bp, Homo sapiens
tggaatgtgctcact

SEQ ID NO: 1258258 - DNA, 15 bp, Homo sapiens
gtggaatgtgctcac

SEQ ID NO: 1258259 - DNA, 15 bp, Homo sapiens
ggtggaatgtgctca

SEQ ID NO: 1258260 - DNA, 15 bp, Homo sapiens
aggtggaatgtgctc

SEQ ID NO: 1258261 - DNA, 15 bp, Homo sapiens
aaggtggaatgtgct

SEQ ID NO: 1258262 - DNA, 15 bp, Homo sapiens
caaggtggaatgtgc

SEQ ID NO: 1258263 - DNA, 15 bp, Homo sapiens
gcaaggtggaatgtg

SEQ ID NO: 1258264 - DNA, 15 bp, Homo sapiens
tgcaaggtggaatgt

SEQ ID NO: 1258265 - DNA, 15 bp, Homo sapiens
ctgcaaggtggaatg

SEQ ID NO: 1258266 - DNA, 15 bp, Homo sapiens
tctgcaaggtggaat

SEQ ID NO: 1258267 - DNA, 15 bp, Homo sapiens
ttctgcaaggtggaa

SEQ ID NO: 1258268 - DNA, 15 bp, Homo sapiens
cttctgcaaggtgga

SEQ ID NO: 1258269 - DNA, 15 bp, Homo sapiens
gcttctgcaaggtgg

SEQ ID NO: 1258270 - DNA, 15 bp, Homo sapiens
ggcttctgcaaggtg

SEQ ID NO: 1258271 - DNA, 15 bp, Homo sapiens
tggcttctgcaaggt

SEQ ID NO: 1258272 - DNA, 15 bp, Homo sapiens
atggcttctgcaagg

SEQ ID NO: 1258273 - DNA, 15 bp, Homo sapiens
aatggcttctgcaag

SEQ ID NO: 1258274 - DNA, 15 bp, Homo sapiens
aaatggcttctgcaa

SEQ ID NO: 1258275 - DNA, 15 bp, Homo sapiens
caaatggcttctgca

SEQ ID NO: 1258276 - DNA, 15 bp, Homo sapiens
acaaatggcttctgc

SEQ ID NO: 1258277 - DNA, 15 bp, Homo sapiens
cacaaatggcttctg

SEQ ID NO: 1258278 - DNA, 15 bp, Homo sapiens
acacaaatggcttct

SEQ ID NO: 1258279 - DNA, 15 bp, Homo sapiens
cacacaaatggcttc

SEQ ID NO: 1258280 - DNA, 15 bp, Homo sapiens
gcacacaaatggctt

SEQ ID NO: 1258281 - DNA, 15 bp, Homo sapiens
tgcacacaaatggct

SEQ ID NO: 1258282 - DNA, 15 bp, Homo sapiens
atgcacacaaatggc

SEQ ID NO: 1258283 - DNA, 15 bp, Homo sapiens
aatgcacacaaatgg

SEQ ID NO: 1258284 - DNA, 15 bp, Homo sapiens
aaatgcacacaaatg

SEQ ID NO: 1258285 - DNA, 15 bp, Homo sapiens
gaaatgcacacaaat

SEQ ID NO: 1258286 - DNA, 15 bp, Homo sapiens
agaaatgcacacaaa

SEQ ID NO: 1258287 - DNA, 15 bp, Homo sapiens
aagaaatgcacacaa

SEQ ID NO: 1258288 - DNA, 15 bp, Homo sapiens
aaagaaatgcacaca

SEQ ID NO: 1258289 - DNA, 15 bp, Homo sapiens
aaaagaaatgcacac

SEQ ID NO: 1258290 - DNA, 15 bp, Homo sapiens
aaaaagaaatgcaca

SEQ ID NO: 1258291 - DNA, 15 bp, Homo sapiens
taaaaagaaatgcac

SEQ ID NO: 1258292 - DNA, 15 bp, Homo sapiens
ttaaaaagaaatgca

SEQ ID NO: 1258293 - DNA, 15 bp, Homo sapiens
attaaaaagaaatgc

SEQ ID NO: 1258294 - DNA, 15 bp, Homo sapiens
aattaaaaagaaatg

SEQ ID NO: 1258295 - DNA, 15 bp, Homo sapiens
gaattaaaaagaaat

SEQ ID NO: 1258296 - DNA, 15 bp, Homo sapiens
agaattaaaaagaaa

SEQ ID NO: 1258297 - DNA, 15 bp, Homo sapiens
cagaattaaaaagaa

SEQ ID NO: 1258298 - DNA, 15 bp, Homo sapiens
acagaattaaaaaga

SEQ ID NO: 1258299 - DNA, 15 bp, Homo sapiens
cacagaattaaaaag

SEQ ID NO: 1258300 - DNA, 15 bp, Homo sapiens
acacagaattaaaaa

SEQ ID NO: 1258301 - DNA, 15 bp, Homo sapiens
aacacagaattaaaa

SEQ ID NO: 1258302 - DNA, 15 bp, Homo sapiens
aaacacagaattaaa

SEQ ID NO: 1258303 - DNA, 15 bp, Homo sapiens
caaacacagaattaa

SEQ ID NO: 1258304 - DNA, 15 bp, Homo sapiens
ccaaacacagaatta

SEQ ID NO: 1258305 - DNA, 15 bp, Homo sapiens
accaaacacagaatt

SEQ ID NO: 1258306 - DNA, 15 bp, Homo sapiens
caccaaacacagaat

SEQ ID NO: 1258307 - DNA, 15 bp, Homo sapiens
tcaccaaacacagaa

SEQ ID NO: 1258308 - DNA, 15 bp, Homo sapiens
gtcaccaaacacaga

SEQ ID NO: 1258309 - DNA, 15 bp, Homo sapiens
tgtcaccaaacacag

SEQ ID NO: 1258310 - DNA, 15 bp, Homo sapiens
atgtcaccaaacaca

SEQ ID NO: 1258311 - DNA, 15 bp, Homo sapiens
aatgtcaccaaacac

SEQ ID NO: 1258312 - DNA, 15 bp, Homo sapiens
taatgtcaccaaaca

SEQ ID NO: 1258313 - DNA, 15 bp, Homo sapiens
ataatgtcaccaaac

SEQ ID NO: 1258314 - DNA, 15 bp, Homo sapiens
cataatgtcaccaaa

SEQ ID NO: 1258315 - DNA, 15 bp, Homo sapiens
gcataatgtcaccaa

SEQ ID NO: 1258316 - DNA, 15 bp, Homo sapiens
agcataatgtcacca

SEQ ID NO: 1258317 - DNA, 15 bp, Homo sapiens
cagcataatgtcacc

SEQ ID NO: 1258318 - DNA, 15 bp, Homo sapiens
ccagcataatgtcac

SEQ ID NO: 1258319 - DNA, 15 bp, Homo sapiens
accagcataatgtca

SEQ ID NO: 1258320 - DNA, 15 bp, Homo sapiens
taccagcataatgtc

SEQ ID NO: 1258321 - DNA, 15 bp, Homo sapiens
ctaccagcataatgt

SEQ ID NO: 1258322 - DNA, 15 bp, Homo sapiens
gctaccagcataatg

SEQ ID NO: 1258323 - DNA, 15 bp, Homo sapiens
agctaccagcataat

SEQ ID NO: 1258324 - DNA, 15 bp, Homo sapiens
aagctaccagcataa

SEQ ID NO: 1258325 - DNA, 15 bp, Homo sapiens
caagctaccagcata

SEQ ID NO: 1258326 - DNA, 15 bp, Homo sapiens
tcaagctaccagcat

SEQ ID NO: 1258327 - DNA, 15 bp, Homo sapiens
ttcaagctaccagca

SEQ ID NO: 1258328 - DNA, 15 bp, Homo sapiens
tttcaagctaccagc

SEQ ID NO: 1258329 - DNA, 15 bp, Homo sapiens
atttcaagctaccag

SEQ ID NO: 1258330 - DNA, 15 bp, Homo sapiens
aatttcaagctacca

SEQ ID NO: 1258331 - DNA, 15 bp, Homo sapiens
caatttcaagctacc

SEQ ID NO: 1258332 - DNA, 15 bp, Homo sapiens
tcaatttcaagctac

SEQ ID NO: 1258333 - DNA, 15 bp, Homo sapiens
gtcaatttcaagcta

SEQ ID NO: 1258334 - DNA, 15 bp, Homo sapiens
ggtcaatttcaagct

SEQ ID NO: 1258335 - DNA, 15 bp, Homo sapiens
tggtcaatttcaagc

SEQ ID NO: 1258336 - DNA, 15 bp, Homo sapiens
ttggtcaatttcaag

SEQ ID NO: 1258337 - DNA, 15 bp, Homo sapiens
cttggtcaatttcaa

SEQ ID NO: 1258338 - DNA, 15 bp, Homo sapiens
ccttggtcaatttca

SEQ ID NO: 1258339 - DNA, 15 bp, Homo sapiens
accttggtcaatttc

SEQ ID NO: 1258340 - DNA, 15 bp, Homo sapiens
caccttggtcaattt

SEQ ID NO: 1258341 - DNA, 15 bp, Homo sapiens
ccaccttggtcaatt

SEQ ID NO: 1258342 - DNA, 15 bp, Homo sapiens
cccaccttggtcaat

SEQ ID NO: 1258343 - DNA, 15 bp, Homo sapiens
tcccaccttggtcaa

SEQ ID NO: 1258344 - DNA, 15 bp, Homo sapiens
ctcccaccttggtca

SEQ ID NO: 1258345 - DNA, 15 bp, Homo sapiens
actcccaccttggtc

SEQ ID NO: 1258346 - DNA, 15 bp, Homo sapiens
cactcccaccttggt

SEQ ID NO: 1258347 - DNA, 15 bp, Homo sapiens
acactcccaccttgg

SEQ ID NO: 1258348 - DNA, 15 bp, Homo sapiens
aacactcccaccttg

SEQ ID NO: 1258349 - DNA, 15 bp, Homo sapiens
aaacactcccacctt

SEQ ID NO: 1258350 - DNA, 15 bp, Homo sapiens
taaacactcccacct

SEQ ID NO: 1258351 - DNA, 15 bp, Homo sapiens
gtaaacactcccacc

SEQ ID NO: 1258352 - DNA, 15 bp, Homo sapiens
tgtaaacactcccac

SEQ ID NO: 1258353 - DNA, 15 bp, Homo sapiens
atgtaaacactccca

SEQ ID NO: 1258354 - DNA, 15 bp, Homo sapiens
tatgtaaacactccc

SEQ ID NO: 1258355 - DNA, 15 bp, Homo sapiens
ttatgtaaacactcc

SEQ ID NO: 1258356 - DNA, 15 bp, Homo sapiens
gttatgtaaacactc

SEQ ID NO: 1258357 - DNA, 15 bp, Homo sapiens
tgttatgtaaacact

SEQ ID NO: 1258358 - DNA, 15 bp, Homo sapiens
ctgttatgtaaacac

SEQ ID NO: 1258359 - DNA, 15 bp, Homo sapiens
tctgttatgtaaaca

SEQ ID NO: 1258360 - DNA, 15 bp, Homo sapiens
ttctgttatgtaaac

SEQ ID NO: 1258361 - DNA, 15 bp, Homo sapiens
tttctgttatgtaaa

SEQ ID NO: 1258362 - DNA, 15 bp, Homo sapiens
atttctgttatgtaa

SEQ ID NO: 1258363 - DNA, 15 bp, Homo sapiens
aatttctgttatgta

SEQ ID NO: 1258364 - DNA, 15 bp, Homo sapiens
caatttctgttatgt

SEQ ID NO: 1258365 - DNA, 15 bp, Homo sapiens
ccaatttctgttatg

SEQ ID NO: 1258366 - DNA, 15 bp, Homo sapiens
gccaatttctgttat

SEQ ID NO: 1258367 - DNA, 15 bp, Homo sapiens
tgccaatttctgtta

SEQ ID NO: 1258368 - DNA, 15 bp, Homo sapiens
ttgccaatttctgtt

SEQ ID NO: 1258369 - DNA, 15 bp, Homo sapiens
tttgccaatttctgt

SEQ ID NO: 1258370 - DNA, 15 bp, Homo sapiens
atttgccaatttctg

SEQ ID NO: 1258371 - DNA, 15 bp, Homo sapiens
tatttgccaatttct

SEQ ID NO: 1258372 - DNA, 15 bp, Homo sapiens
atatttgccaatttc

SEQ ID NO: 1258373 - DNA, 15 bp, Homo sapiens
aatatttgccaattt

SEQ ID NO: 1258374 - DNA, 15 bp, Homo sapiens
taatatttgccaatt

SEQ ID NO: 1258375 - DNA, 15 bp, Homo sapiens
ttaatatttgccaat

SEQ ID NO: 1258376 - DNA, 15 bp, Homo sapiens
tttaatatttgccaa

SEQ ID NO: 1258377 - DNA, 15 bp, Homo sapiens
ttttaatatttgcca

SEQ ID NO: 1258378 - DNA, 15 bp, Homo sapiens
attttaatatttgcc

SEQ ID NO: 1258379 - DNA, 15 bp, Homo sapiens
cattttaatatttgc

SEQ ID NO: 1258380 - DNA, 15 bp, Homo sapiens
acattttaatatttg

SEQ ID NO: 1258381 - DNA, 15 bp, Homo sapiens
gacattttaatattt

SEQ ID NO: 1258382 - DNA, 15 bp, Homo sapiens
ggacattttaatatt

SEQ ID NO: 1258383 - DNA, 15 bp, Homo sapiens
aggacattttaatat

SEQ ID NO: 1258384 - DNA, 15 bp, Homo sapiens
aaggacattttaata

SEQ ID NO: 1258385 - DNA, 15 bp, Homo sapiens
gaaggacattttaat

SEQ ID NO: 1258386 - DNA, 15 bp, Homo sapiens
ggaaggacattttaa

SEQ ID NO: 1258387 - DNA, 15 bp, Homo sapiens
gggaaggacatttta

SEQ ID NO: 1258388 - DNA, 15 bp, Homo sapiens
ggggaaggacatttt

SEQ ID NO: 1258389 - DNA, 15 bp, Homo sapiens
tggggaaggacattt

SEQ ID NO: 1258390 - DNA, 15 bp, Homo sapiens
gtggggaaggacatt

SEQ ID NO: 1258391 - DNA, 15 bp, Homo sapiens
ggtggggaaggacat

SEQ ID NO: 1258392 - DNA, 15 bp, Homo sapiens
tggtggggaaggaca

SEQ ID NO: 1258393 - DNA, 15 bp, Homo sapiens
gtggtggggaaggac

SEQ ID NO: 1258394 - DNA, 15 bp, Homo sapiens
ggtggtggggaagga

SEQ ID NO: 1258395 - DNA, 15 bp, Homo sapiens
gggtggtggggaagg

SEQ ID NO: 1258396 - DNA, 15 bp, Homo sapiens
agggtggtggggaag

SEQ ID NO: 1258397 - DNA, 15 bp, Homo sapiens
gagggtggtggggaa

SEQ ID NO: 1258398 - DNA, 15 bp, Homo sapiens
agagggtggtgggga

SEQ ID NO: 1258399 - DNA, 15 bp, Homo sapiens
gagagggtggtgggg

SEQ ID NO: 1258400 - DNA, 15 bp, Homo sapiens
ggagagggtggtggg

SEQ ID NO: 1258401 - DNA, 15 bp, Homo sapiens
gggagagggtggtgg

SEQ ID NO: 1258402 - DNA, 15 bp, Homo sapiens
ggggagagggtggtg

SEQ ID NO: 1258403 - DNA, 15 bp, Homo sapiens
aggggagagggtggt

SEQ ID NO: 1258404 - DNA, 15 bp, Homo sapiens
caggggagagggtgg

SEQ ID NO: 1258405 - DNA, 15 bp, Homo sapiens
tcaggggagagggtg

SEQ ID NO: 1258406 - DNA, 15 bp, Homo sapiens
ctcaggggagagggt

SEQ ID NO: 1258407 - DNA, 15 bp, Homo sapiens
tctcaggggagaggg

SEQ ID NO: 1258408 - DNA, 15 bp, Homo sapiens
ttctcaggggagagg

SEQ ID NO: 1258409 - DNA, 15 bp, Homo sapiens
gttctcaggggagag

SEQ ID NO: 1258410 - DNA, 15 bp, Homo sapiens
agttctcaggggaga

SEQ ID NO: 1258411 - DNA, 15 bp, Homo sapiens
cagttctcaggggag

SEQ ID NO: 1258412 - DNA, 15 bp, Homo sapiens
ccagttctcagggga

SEQ ID NO: 1258413 - DNA, 15 bp, Homo sapiens
accagttctcagggg

SEQ ID NO: 1258414 - DNA, 15 bp, Homo sapiens
aaccagttctcaggg

SEQ ID NO: 1258415 - DNA, 15 bp, Homo sapiens
caaccagttctcagg

SEQ ID NO: 1258416 - DNA, 15 bp, Homo sapiens
acaaccagttctcag

SEQ ID NO: 1258417 - DNA, 15 bp, Homo sapiens
aacaaccagttctca

SEQ ID NO: 1258418 - DNA, 15 bp, Homo sapiens
taacaaccagttctc

SEQ ID NO: 1258419 - DNA, 15 bp, Homo sapiens
ttaacaaccagttct

SEQ ID NO: 1258420 - DNA, 15 bp, Homo sapiens
tttaacaaccagttc

SEQ ID NO: 1258421 - DNA, 15 bp, Homo sapiens
atttaacaaccagtt

SEQ ID NO: 1258422 - DNA, 15 bp, Homo sapiens
aatttaacaaccagt

SEQ ID NO: 1258423 - DNA, 15 bp, Homo sapiens
aaatttaacaaccag

SEQ ID NO: 1258424 - DNA, 15 bp, Homo sapiens
gaaatttaacaacca

SEQ ID NO: 1258425 - DNA, 15 bp, Homo sapiens
agaaatttaacaacc

SEQ ID NO: 1258426 - DNA, 15 bp, Homo sapiens
aagaaatttaacaac

SEQ ID NO: 1258427 - DNA, 15 bp, Homo sapiens
aaagaaatttaacaa

SEQ ID NO: 1258428 - DNA, 15 bp, Homo sapiens
gaaagaaatttaaca

SEQ ID NO: 1258429 - DNA, 15 bp, Homo sapiens
ggaaagaaatttaac

SEQ ID NO: 1258430 - DNA, 15 bp, Homo sapiens
tggaaagaaatttaa

SEQ ID NO: 1258431 - DNA, 15 bp, Homo sapiens
ctggaaagaaattta

SEQ ID NO: 1258432 - DNA, 15 bp, Homo sapiens
actggaaagaaattt

SEQ ID NO: 1258433 - DNA, 15 bp, Homo sapiens
tactggaaagaaatt

SEQ ID NO: 1258434 - DNA, 15 bp, Homo sapiens
gtactggaaagaaat

SEQ ID NO: 1258435 - DNA, 15 bp, Homo sapiens
tgtactggaaagaaa

SEQ ID NO: 1258436 - DNA, 15 bp, Homo sapiens
atgtactggaaagaa

SEQ ID NO: 1258437 - DNA, 15 bp, Homo sapiens
aatgtactggaaaga

SEQ ID NO: 1258438 - DNA, 15 bp, Homo sapiens
taatgtactggaaag

SEQ ID NO: 1258439 - DNA, 15 bp, Homo sapiens
gtaatgtactggaaa

SEQ ID NO: 1258440 - DNA, 15 bp, Homo sapiens
tgtaatgtactggaa

SEQ ID NO: 1258441 - DNA, 15 bp, Homo sapiens
ctgtaatgtactgga

SEQ ID NO: 1258442 - DNA, 15 bp, Homo sapiens
tctgtaatgtactgg

SEQ ID NO: 1258443 - DNA, 15 bp, Homo sapiens
ctctgtaatgtactg

SEQ ID NO: 1258444 - DNA, 15 bp, Homo sapiens
actctgtaatgtact

SEQ ID NO: 1258445 - DNA, 15 bp, Homo sapiens
gactctgtaatgtac

SEQ ID NO: 1258446 - DNA, 15 bp, Homo sapiens
tgactctgtaatgta

SEQ ID NO: 1258447 - DNA, 15 bp, Homo sapiens
ctgactctgtaatgt

SEQ ID NO: 1258448 - DNA, 15 bp, Homo sapiens
cctgactctgtaatg

SEQ ID NO: 1258449 - DNA, 15 bp, Homo sapiens
ccctgactctgtaat

SEQ ID NO: 1258450 - DNA, 15 bp, Homo sapiens
cccctgactctgtaa

SEQ ID NO: 1258451 - DNA, 15 bp, Homo sapiens
acccctgactctgta

SEQ ID NO: 1258452 - DNA, 15 bp, Homo sapiens
tacccctgactctgt

SEQ ID NO: 1258453 - DNA, 15 bp, Homo sapiens
ttacccctgactctg

SEQ ID NO: 1258454 - DNA, 15 bp, Homo sapiens
gttacccctgactct

SEQ ID NO: 1258455 - DNA, 15 bp, Homo sapiens
tgttacccctgactc

SEQ ID NO: 1258456 - DNA, 15 bp, Homo sapiens
atgttacccctgact

SEQ ID NO: 1258457 - DNA, 15 bp, Homo sapiens
tatgttacccctgac

SEQ ID NO: 1258458 - DNA, 15 bp, Homo sapiens
ctatgttacccctga

SEQ ID NO: 1258459 - DNA, 15 bp, Homo sapiens
tctatgttacccctg

SEQ ID NO: 1258460 - DNA, 15 bp, Homo sapiens
ttctatgttacccct

SEQ ID NO: 1258461 - DNA, 15 bp, Homo sapiens
cttctatgttacccc

SEQ ID NO: 1258462 - DNA, 15 bp, Homo sapiens
tcttctatgttaccc

SEQ ID NO: 1258463 - DNA, 15 bp, Homo sapiens
atcttctatgttacc

SEQ ID NO: 1258464 - DNA, 15 bp, Homo sapiens
aatcttctatgttac

SEQ ID NO: 1258465 - DNA, 15 bp, Homo sapiens
gaatcttctatgtta

SEQ ID NO: 1258466 - DNA, 15 bp, Homo sapiens
tgaatcttctatgtt

SEQ ID NO: 1258467 - DNA, 15 bp, Homo sapiens
ttgaatcttctatgt

SEQ ID NO: 1258468 - DNA, 15 bp, Homo sapiens
attgaatcttctatg

SEQ ID NO: 1258469 - DNA, 15 bp, Homo sapiens
tattgaatcttctat

SEQ ID NO: 1258470 - DNA, 15 bp, Homo sapiens
atattgaatcttcta

SEQ ID NO: 1258471 - DNA, 15 bp, Homo sapiens
aatattgaatcttct

SEQ ID NO: 1258472 - DNA, 15 bp, Homo sapiens
gaatattgaatcttc

SEQ ID NO: 1258473 - DNA, 15 bp, Homo sapiens
agaatattgaatctt

SEQ ID NO: 1258474 - DNA, 15 bp, Homo sapiens
gagaatattgaatct

SEQ ID NO: 1258475 - DNA, 15 bp, Homo sapiens
tgagaatattgaatc

SEQ ID NO: 1258476 - DNA, 15 bp, Homo sapiens
ctgagaatattgaat

SEQ ID NO: 1258477 - DNA, 15 bp, Homo sapiens
cctgagaatattgaa

SEQ ID NO: 1258478 - DNA, 15 bp, Homo sapiens
gcctgagaatattga

SEQ ID NO: 1258479 - DNA, 15 bp, Homo sapiens
agcctgagaatattg

SEQ ID NO: 1258480 - DNA, 15 bp, Homo sapiens
gagcctgagaatatt

SEQ ID NO: 1258481 - DNA, 15 bp, Homo sapiens
tgagcctgagaatat

SEQ ID NO: 1258482 - DNA, 15 bp, Homo sapiens
atgagcctgagaata

SEQ ID NO: 1258483 - DNA, 15 bp, Homo sapiens
gatgagcctgagaat

SEQ ID NO: 1258484 - DNA, 15 bp, Homo sapiens
agatgagcctgagaa

SEQ ID NO: 1258485 - DNA, 15 bp, Homo sapiens
tagatgagcctgaga

SEQ ID NO: 1258486 - DNA, 15 bp, Homo sapiens
atagatgagcctgag

SEQ ID NO: 1258487 - DNA, 15 bp, Homo sapiens
gatagatgagcctga

SEQ ID NO: 1258488 - DNA, 15 bp, Homo sapiens
ggatagatgagcctg

SEQ ID NO: 1258489 - DNA, 15 bp, Homo sapiens
tggatagatgagcct

SEQ ID NO: 1258490 - DNA, 15 bp, Homo sapiens
ttggatagatgagcc

SEQ ID NO: 1258491 - DNA, 15 bp, Homo sapiens
tttggatagatgagc

SEQ ID NO: 1258492 - DNA, 15 bp, Homo sapiens
atttggatagatgag

SEQ ID NO: 1258493 - DNA, 15 bp, Homo sapiens
catttggatagatga

SEQ ID NO: 1258494 - DNA, 15 bp, Homo sapiens
gcatttggatagatg

SEQ ID NO: 1258495 - DNA, 15 bp, Homo sapiens
ggcatttggatagat

SEQ ID NO: 1258496 - DNA, 15 bp, Homo sapiens
gggcatttggataga

SEQ ID NO: 1258497 - DNA, 15 bp, Homo sapiens
agggcatttggatag

SEQ ID NO: 1258498 - DNA, 15 bp, Homo sapiens
tagggcatttggata

SEQ ID NO: 1258499 - DNA, 15 bp, Homo sapiens
atagggcatttggat

SEQ ID NO: 1258500 - DNA, 15 bp, Homo sapiens
gatagggcatttgga

SEQ ID NO: 1258501 - DNA, 15 bp, Homo sapiens
ggatagggcatttgg

SEQ ID NO: 1258502 - DNA, 15 bp, Homo sapiens
aggatagggcatttg

SEQ ID NO: 1258503 - DNA, 15 bp, Homo sapiens
taggatagggcattt

SEQ ID NO: 1258504 - DNA, 15 bp, Homo sapiens
ctaggatagggcatt

SEQ ID NO: 1258505 - DNA, 15 bp, Homo sapiens
cctaggatagggcat

SEQ ID NO: 1258506 - DNA, 15 bp, Homo sapiens
acctaggatagggca

SEQ ID NO: 1258507 - DNA, 15 bp, Homo sapiens
gacctaggatagggc

SEQ ID NO: 1258508 - DNA, 15 bp, Homo sapiens
agacctaggataggg

SEQ ID NO: 1258509 - DNA, 15 bp, Homo sapiens
aagacctaggatagg

SEQ ID NO: 1258510 - DNA, 15 bp, Homo sapiens
taagacctaggatag

SEQ ID NO: 1258511 - DNA, 15 bp, Homo sapiens
ctaagacctaggata

SEQ ID NO: 1258512 - DNA, 15 bp, Homo sapiens
cctaagacctaggat

SEQ ID NO: 1258513 - DNA, 15 bp, Homo sapiens
ccctaagacctagga

SEQ ID NO: 1258514 - DNA, 15 bp, Homo sapiens
accctaagacctagg

SEQ ID NO: 1258515 - DNA, 15 bp, Homo sapiens
taccctaagacctag

SEQ ID NO: 1258516 - DNA, 15 bp, Homo sapiens
ttaccctaagaccta

SEQ ID NO: 1258517 - DNA, 15 bp, Homo sapiens
attaccctaagacct

SEQ ID NO: 1258518 - DNA, 15 bp, Homo sapiens
tattaccctaagacc

SEQ ID NO: 1258519 - DNA, 15 bp, Homo sapiens
gtattaccctaagac

SEQ ID NO: 1258520 - DNA, 15 bp, Homo sapiens
agtattaccctaaga

SEQ ID NO: 1258521 - DNA, 15 bp, Homo sapiens
gagtattaccctaag

SEQ ID NO: 1258522 - DNA, 15 bp, Homo sapiens
agagtattaccctaa

SEQ ID NO: 1258523 - DNA, 15 bp, Homo sapiens
aagagtattacccta

SEQ ID NO: 1258524 - DNA, 15 bp, Homo sapiens
aaagagtattaccct

SEQ ID NO: 1258525 - DNA, 15 bp, Homo sapiens
aaaagagtattaccc

SEQ ID NO: 1258526 - DNA, 15 bp, Homo sapiens
aaaaagagtattacc

SEQ ID NO: 1258527 - DNA, 15 bp, Homo sapiens
gaaaaagagtattac

SEQ ID NO: 1258528 - DNA, 15 bp, Homo sapiens
ggaaaaagagtatta

SEQ ID NO: 1258529 - DNA, 15 bp, Homo sapiens
aggaaaaagagtatt

SEQ ID NO: 1258530 - DNA, 15 bp, Homo sapiens
aaggaaaaagagtat

SEQ ID NO: 1258531 - DNA, 15 bp, Homo sapiens
aaaggaaaaagagta

SEQ ID NO: 1258532 - DNA, 15 bp, Homo sapiens
gaaaggaaaaagagt

SEQ ID NO: 1258533 - DNA, 15 bp, Homo sapiens
tgaaaggaaaaagag

SEQ ID NO: 1258534 - DNA, 15 bp, Homo sapiens
ttgaaaggaaaaaga

SEQ ID NO: 1258535 - DNA, 15 bp, Homo sapiens
cttgaaaggaaaaag

SEQ ID NO: 1258536 - DNA, 15 bp, Homo sapiens
tcttgaaaggaaaaa

SEQ ID NO: 1258537 - DNA, 15 bp, Homo sapiens
ttcttgaaaggaaaa

SEQ ID NO: 1258538 - DNA, 15 bp, Homo sapiens
gttcttgaaaggaaa

SEQ ID NO: 1258539 - DNA, 15 bp, Homo sapiens
tgttcttgaaaggaa

SEQ ID NO: 1258540 - DNA, 15 bp, Homo sapiens
ttgttcttgaaagga

SEQ ID NO: 1258541 - DNA, 15 bp, Homo sapiens
cttgttcttgaaagg

SEQ ID NO: 1258542 - DNA, 15 bp, Homo sapiens
tcttgttcttgaaag

SEQ ID NO: 1258543 - DNA, 15 bp, Homo sapiens
atcttgttcttgaaa

SEQ ID NO: 1258544 - DNA, 15 bp, Homo sapiens
catcttgttcttgaa

SEQ ID NO: 1258545 - DNA, 15 bp, Homo sapiens
acatcttgttcttga

SEQ ID NO: 1258546 - DNA, 15 bp, Homo sapiens
cacatcttgttcttg

SEQ ID NO: 1258547 - DNA, 15 bp, Homo sapiens
ccacatcttgttctt

SEQ ID NO: 1258548 - DNA, 15 bp, Homo sapiens
cccacatcttgttct

SEQ ID NO: 1258549 - DNA, 15 bp, Homo sapiens
gcccacatcttgttc

SEQ ID NO: 1258550 - DNA, 15 bp, Homo sapiens
agcccacatcttgtt

SEQ ID NO: 1258551 - DNA, 15 bp, Homo sapiens
tagcccacatcttgt

SEQ ID NO: 1258552 - DNA, 15 bp, Homo sapiens
ctagcccacatcttg

SEQ ID NO: 1258553 - DNA, 15 bp, Homo sapiens
cctagcccacatctt

SEQ ID NO: 1258554 - DNA, 15 bp, Homo sapiens
tcctagcccacatct

SEQ ID NO: 1258555 - DNA, 15 bp, Homo sapiens
ctcctagcccacatc

SEQ ID NO: 1258556 - DNA, 15 bp, Homo sapiens
tctcctagcccacat

SEQ ID NO: 1258557 - DNA, 15 bp, Homo sapiens
gtctcctagcccaca

SEQ ID NO: 1258558 - DNA, 15 bp, Homo sapiens
ggtctcctagcccac

SEQ ID NO: 1258559 - DNA, 15 bp, Homo sapiens
gggtctcctagccca

SEQ ID NO: 1258560 - DNA, 15 bp, Homo sapiens
agggtctcctagccc

SEQ ID NO: 1258561 - DNA, 15 bp, Homo sapiens
cagggtctcctagcc

SEQ ID NO: 1258562 - DNA, 15 bp, Homo sapiens
tcagggtctcctagc

SEQ ID NO: 1258563 - DNA, 15 bp, Homo sapiens
ttcagggtctcctag

SEQ ID NO: 1258564 - DNA, 15 bp, Homo sapiens
tttcagggtctccta

SEQ ID NO: 1258565 - DNA, 15 bp, Homo sapiens
ctttcagggtctcct

SEQ ID NO: 1258566 - DNA, 15 bp, Homo sapiens
actttcagggtctcc

SEQ ID NO: 1258567 - DNA, 15 bp, Homo sapiens
gactttcagggtctc

SEQ ID NO: 1258568 - DNA, 15 bp, Homo sapiens
ggactttcagggtct

SEQ ID NO: 1258569 - DNA, 15 bp, Homo sapiens
tggactttcagggtc

SEQ ID NO: 1258570 - DNA, 15 bp, Homo sapiens
atggactttcagggt

SEQ ID NO: 1258571 - DNA, 15 bp, Homo sapiens
catggactttcaggg

SEQ ID NO: 1258572 - DNA, 15 bp, Homo sapiens
gcatggactttcagg

SEQ ID NO: 1258573 - DNA, 15 bp, Homo sapiens
tgcatggactttcag

SEQ ID NO: 1258574 - DNA, 15 bp, Homo sapiens
atgcatggactttca

SEQ ID NO: 1258575 - DNA, 15 bp, Homo sapiens
aatgcatggactttc

SEQ ID NO: 1258576 - DNA, 15 bp, Homo sapiens
aaatgcatggacttt

SEQ ID NO: 1258577 - DNA, 15 bp, Homo sapiens
caaatgcatggactt

SEQ ID NO: 1258578 - DNA, 15 bp, Homo sapiens
ccaaatgcatggact

SEQ ID NO: 1258579 - DNA, 15 bp, Homo sapiens
accaaatgcatggac

SEQ ID NO: 1258580 - DNA, 15 bp, Homo sapiens
aaccaaatgcatgga

SEQ ID NO: 1258581 - DNA, 15 bp, Homo sapiens
caaccaaatgcatgg

SEQ ID NO: 1258582 - DNA, 15 bp, Homo sapiens
gcaaccaaatgcatg

SEQ ID NO: 1258583 - DNA, 15 bp, Homo sapiens
ggcaaccaaatgcat

SEQ ID NO: 1258584 - DNA, 15 bp, Homo sapiens
aggcaaccaaatgca

SEQ ID NO: 1258585 - DNA, 15 bp, Homo sapiens
aaggcaaccaaatgc

SEQ ID NO: 1258586 - DNA, 15 bp, Homo sapiens
aaaggcaaccaaatg

SEQ ID NO: 1258587 - DNA, 15 bp, Homo sapiens
aaaaggcaaccaaat

SEQ ID NO: 1258588 - DNA, 15 bp, Homo sapiens
gaaaaggcaaccaaa

SEQ ID NO: 1258589 - DNA, 15 bp, Homo sapiens
tgaaaaggcaaccaa

SEQ ID NO: 1258590 - DNA, 15 bp, Homo sapiens
ttgaaaaggcaacca

SEQ ID NO: 1258591 - DNA, 15 bp, Homo sapiens
gttgaaaaggcaacc

SEQ ID NO: 1258592 - DNA, 15 bp, Homo sapiens
agttgaaaaggcaac

SEQ ID NO: 1258593 - DNA, 15 bp, Homo sapiens
gagttgaaaaggcaa

SEQ ID NO: 1258594 - DNA, 15 bp, Homo sapiens
agagttgaaaaggca

SEQ ID NO: 1258595 - DNA, 15 bp, Homo sapiens
aagagttgaaaaggc

SEQ ID NO: 1258596 - DNA, 15 bp, Homo sapiens
gaagagttgaaaagg

SEQ ID NO: 1258597 - DNA, 15 bp, Homo sapiens
agaagagttgaaaag

SEQ ID NO: 1258598 - DNA, 15 bp, Homo sapiens
cagaagagttgaaaa

SEQ ID NO: 1258599 - DNA, 15 bp, Homo sapiens
gcagaagagttgaaa

SEQ ID NO: 1258600 - DNA, 15 bp, Homo sapiens
ggcagaagagttgaa

SEQ ID NO: 1258601 - DNA, 15 bp, Homo sapiens
gggcagaagagttga

SEQ ID NO: 1258602 - DNA, 15 bp, Homo sapiens
agggcagaagagttg

SEQ ID NO: 1258603 - DNA, 15 bp, Homo sapiens
aagggcagaagagtt

SEQ ID NO: 1258604 - DNA, 15 bp, Homo sapiens
taagggcagaagagt

SEQ ID NO: 1258605 - DNA, 15 bp, Homo sapiens
gtaagggcagaagag

SEQ ID NO: 1258606 - DNA, 15 bp, Homo sapiens
tgtaagggcagaaga

SEQ ID NO: 1258607 - DNA, 15 bp, Homo sapiens
ttgtaagggcagaag

SEQ ID NO: 1258608 - DNA, 15 bp, Homo sapiens
attgtaagggcagaa

SEQ ID NO: 1258609 - DNA, 15 bp, Homo sapiens
gattgtaagggcaga

SEQ ID NO: 1258610 - DNA, 15 bp, Homo sapiens
tgattgtaagggcag

SEQ ID NO: 1258611 - DNA, 15 bp, Homo sapiens
ctgattgtaagggca

SEQ ID NO: 1258612 - DNA, 15 bp, Homo sapiens
gctgattgtaagggc

SEQ ID NO: 1258613 - DNA, 15 bp, Homo sapiens
agctgattgtaaggg

SEQ ID NO: 1258614 - DNA, 15 bp, Homo sapiens
aagctgattgtaagg

SEQ ID NO: 1258615 - DNA, 15 bp, Homo sapiens
gaagctgattgtaag

SEQ ID NO: 1258616 - DNA, 15 bp, Homo sapiens
ggaagctgattgtaa

SEQ ID NO: 1258617 - DNA, 15 bp, Homo sapiens
cggaagctgattgta

SEQ ID NO: 1258618 - DNA, 15 bp, Homo sapiens
acggaagctgattgt

SEQ ID NO: 1258619 - DNA, 15 bp, Homo sapiens
cacggaagctgattg

SEQ ID NO: 1258620 - DNA, 15 bp, Homo sapiens
tcacggaagctgatt

SEQ ID NO: 1258621 - DNA, 15 bp, Homo sapiens
gtcacggaagctgat

SEQ ID NO: 1258622 - DNA, 15 bp, Homo sapiens
agtcacggaagctga

SEQ ID NO: 1258623 - DNA, 15 bp, Homo sapiens
aagtcacggaagctg

SEQ ID NO: 1258624 - DNA, 15 bp, Homo sapiens
gaagtcacggaagct

SEQ ID NO: 1258625 - DNA, 15 bp, Homo sapiens
ggaagtcacggaagc

SEQ ID NO: 1258626 - DNA, 15 bp, Homo sapiens
aggaagtcacggaag

SEQ ID NO: 1258627 - DNA, 15 bp, Homo sapiens
caggaagtcacggaa

SEQ ID NO: 1258628 - DNA, 15 bp, Homo sapiens
acaggaagtcacgga

SEQ ID NO: 1258629 - DNA, 15 bp, Homo sapiens
tacaggaagtcacgg

SEQ ID NO: 1258630 - DNA, 15 bp, Homo sapiens
ctacaggaagtcacg

SEQ ID NO: 1258631 - DNA, 15 bp, Homo sapiens
gctacaggaagtcac

SEQ ID NO: 1258632 - DNA, 15 bp, Homo sapiens
ggctacaggaagtca

SEQ ID NO: 1258633 - DNA, 15 bp, Homo sapiens
aggctacaggaagtc

SEQ ID NO: 1258634 - DNA, 15 bp, Homo sapiens
taggctacaggaagt

SEQ ID NO: 1258635 - DNA, 15 bp, Homo sapiens
ttaggctacaggaag

SEQ ID NO: 1258636 - DNA, 15 bp, Homo sapiens
tttaggctacaggaa

SEQ ID NO: 1258637 - DNA, 15 bp, Homo sapiens
ctttaggctacagga

SEQ ID NO: 1258638 - DNA, 15 bp, Homo sapiens
gctttaggctacagg

SEQ ID NO: 1258639 - DNA, 15 bp, Homo sapiens
tgctttaggctacag

SEQ ID NO: 1258640 - DNA, 15 bp, Homo sapiens
ttgctttaggctaca

SEQ ID NO: 1258641 - DNA, 15 bp, Homo sapiens
tttgctttaggctac

SEQ ID NO: 1258642 - DNA, 15 bp, Homo sapiens
gtttgctttaggcta

SEQ ID NO: 1258643 - DNA, 15 bp, Homo sapiens
agtttgctttaggct

SEQ ID NO: 1258644 - DNA, 15 bp, Homo sapiens
tagtttgctttaggc

SEQ ID NO: 1258645 - DNA, 15 bp, Homo sapiens
gtagtttgctttagg

SEQ ID NO: 1258646 - DNA, 15 bp, Homo sapiens
tgtagtttgctttag

SEQ ID NO: 1258647 - DNA, 15 bp, Homo sapiens
gtgtagtttgcttta

SEQ ID NO: 1258648 - DNA, 15 bp, Homo sapiens
agtgtagtttgcttt

SEQ ID NO: 1258649 - DNA, 15 bp, Homo sapiens
tagtgtagtttgctt

SEQ ID NO: 1258650 - DNA, 15 bp, Homo sapiens
ttagtgtagtttgct

SEQ ID NO: 1258651 - DNA, 15 bp, Homo sapiens
tttagtgtagtttgc

SEQ ID NO: 1258652 - DNA, 15 bp, Homo sapiens
atttagtgtagtttg

SEQ ID NO: 1258653 - DNA, 15 bp, Homo sapiens
tatttagtgtagttt

SEQ ID NO: 1258654 - DNA, 15 bp, Homo sapiens
atatttagtgtagtt

SEQ ID NO: 1258655 - DNA, 15 bp, Homo sapiens
aatatttagtgtagt

SEQ ID NO: 1258656 - DNA, 15 bp, Homo sapiens
taatatttagtgtag

SEQ ID NO: 1258657 - DNA, 15 bp, Homo sapiens
gtaatatttagtgta

SEQ ID NO: 1258658 - DNA, 15 bp, Homo sapiens
agtaatatttagtgt

SEQ ID NO: 1258659 - DNA, 15 bp, Homo sapiens
tagtaatatttagtg

SEQ ID NO: 1258660 - DNA, 15 bp, Homo sapiens
ttagtaatatttagt

SEQ ID NO: 1258661 - DNA, 15 bp, Homo sapiens
tttagtaatatttag

SEQ ID NO: 1258662 - DNA, 15 bp, Homo sapiens
ttttagtaatattta

SEQ ID NO: 1258663 - DNA, 15 bp, Homo sapiens
tttttagtaatattt

SEQ ID NO: 1258664 - DNA, 15 bp, Homo sapiens
atttttagtaatatt

SEQ ID NO: 1258665 - DNA, 15 bp, Homo sapiens
aatttttagtaatat

SEQ ID NO: 1258666 - DNA, 15 bp, Homo sapiens
caatttttagtaata

SEQ ID NO: 1258667 - DNA, 15 bp, Homo sapiens
gcaatttttagtaat

SEQ ID NO: 1258668 - DNA, 15 bp, Homo sapiens
ggcaatttttagtaa

SEQ ID NO: 1258669 - DNA, 15 bp, Homo sapiens
tggcaatttttagta

SEQ ID NO: 1258670 - DNA, 15 bp, Homo sapiens
ctggcaatttttagt

SEQ ID NO: 1258671 - DNA, 15 bp, Homo sapiens
actggcaatttttag

SEQ ID NO: 1258672 - DNA, 15 bp, Homo sapiens
tactggcaattttta

SEQ ID NO: 1258673 - DNA, 15 bp, Homo sapiens
ctactggcaattttt

SEQ ID NO: 1258674 - DNA, 15 bp, Homo sapiens
tctactggcaatttt

SEQ ID NO: 1258675 - DNA, 15 bp, Homo sapiens
ctctactggcaattt

SEQ ID NO: 1258676 - DNA, 15 bp, Homo sapiens
cctctactggcaatt

SEQ ID NO: 1258677 - DNA, 15 bp, Homo sapiens
gcctctactggcaat

SEQ ID NO: 1258678 - DNA, 15 bp, Homo sapiens
ggcctctactggcaa

SEQ ID NO: 1258679 - DNA, 15 bp, Homo sapiens
gggcctctactggca

SEQ ID NO: 1258680 - DNA, 15 bp, Homo sapiens
agggcctctactggc

SEQ ID NO: 1258681 - DNA, 15 bp, Homo sapiens
gagggcctctactgg

SEQ ID NO: 1258682 - DNA, 15 bp, Homo sapiens
agagggcctctactg

SEQ ID NO: 1258683 - DNA, 15 bp, Homo sapiens
cagagggcctctact

SEQ ID NO: 1258684 - DNA, 15 bp, Homo sapiens
ccagagggcctctac

SEQ ID NO: 1258685 - DNA, 15 bp, Homo sapiens
gccagagggcctcta

SEQ ID NO: 1258686 - DNA, 15 bp, Homo sapiens
ggccagagggcctct

SEQ ID NO: 1258687 - DNA, 15 bp, Homo sapiens
aggccagagggcctc

SEQ ID NO: 1258688 - DNA, 15 bp, Homo sapiens
aaggccagagggcct

SEQ ID NO: 1258689 - DNA, 15 bp, Homo sapiens
gaaggccagagggcc

SEQ ID NO: 1258690 - DNA, 15 bp, Homo sapiens
tgaaggccagagggc

SEQ ID NO: 1258691 - DNA, 15 bp, Homo sapiens
gtgaaggccagaggg

SEQ ID NO: 1258692 - DNA, 15 bp, Homo sapiens
cgtgaaggccagagg

SEQ ID NO: 1258693 - DNA, 15 bp, Homo sapiens
ccgtgaaggccagag

SEQ ID NO: 1258694 - DNA, 15 bp, Homo sapiens
accgtgaaggccaga

SEQ ID NO: 1258695 - DNA, 15 bp, Homo sapiens
caccgtgaaggccag

SEQ ID NO: 1258696 - DNA, 15 bp, Homo sapiens
acaccgtgaaggcca

SEQ ID NO: 1258697 - DNA, 15 bp, Homo sapiens
cacaccgtgaaggcc

SEQ ID NO: 1258698 - DNA, 15 bp, Homo sapiens
tcacaccgtgaaggc

SEQ ID NO: 1258699 - DNA, 15 bp, Homo sapiens
gtcacaccgtgaagg

SEQ ID NO: 1258700 - DNA, 15 bp, Homo sapiens
agtcacaccgtgaag

SEQ ID NO: 1258701 - DNA, 15 bp, Homo sapiens
aagtcacaccgtgaa

SEQ ID NO: 1258702 - DNA, 15 bp, Homo sapiens
taagtcacaccgtga

SEQ ID NO: 1258703 - DNA, 15 bp, Homo sapiens
ttaagtcacaccgtg

SEQ ID NO: 1258704 - DNA, 15 bp, Homo sapiens
cttaagtcacaccgt

SEQ ID NO: 1258705 - DNA, 15 bp, Homo sapiens
ccttaagtcacaccg

SEQ ID NO: 1258706 - DNA, 15 bp, Homo sapiens
accttaagtcacacc

SEQ ID NO: 1258707 - DNA, 15 bp, Homo sapiens
caccttaagtcacac

SEQ ID NO: 1258708 - DNA, 15 bp, Homo sapiens
tcaccttaagtcaca

SEQ ID NO: 1258709 - DNA, 15 bp, Homo sapiens
gtcaccttaagtcac

SEQ ID NO: 1258710 - DNA, 15 bp, Homo sapiens
tgtcaccttaagtca

SEQ ID NO: 1258711 - DNA, 15 bp, Homo sapiens
ctgtcaccttaagtc

SEQ ID NO: 1258712 - DNA, 15 bp, Homo sapiens
cctgtcaccttaagt

SEQ ID NO: 1258713 - DNA, 15 bp, Homo sapiens
acctgtcaccttaag

SEQ ID NO: 1258714 - DNA, 15 bp, Homo sapiens
cacctgtcaccttaa

SEQ ID NO: 1258715 - DNA, 15 bp, Homo sapiens
ccacctgtcacctta

SEQ ID NO: 1258716 - DNA, 15 bp, Homo sapiens
gccacctgtcacctt

SEQ ID NO: 1258717 - DNA, 15 bp, Homo sapiens
agccacctgtcacct

SEQ ID NO: 1258718 - DNA, 15 bp, Homo sapiens
cagccacctgtcacc

SEQ ID NO: 1258719 - DNA, 15 bp, Homo sapiens
gcagccacctgtcac

SEQ ID NO: 1258720 - DNA, 15 bp, Homo sapiens
ggcagccacctgtca

SEQ ID NO: 1258721 - DNA, 15 bp, Homo sapiens
gggcagccacctgtc

SEQ ID NO: 1258722 - DNA, 15 bp, Homo sapiens
agggcagccacctgt

SEQ ID NO: 1258723 - DNA, 15 bp, Homo sapiens
cagggcagccacctg

SEQ ID NO: 1258724 - DNA, 15 bp, Homo sapiens
tcagggcagccacct

SEQ ID NO: 1258725 - DNA, 15 bp, Homo sapiens
ctcagggcagccacc

SEQ ID NO: 1258726 - DNA, 15 bp, Homo sapiens
cctcagggcagccac

SEQ ID NO: 1258727 - DNA, 15 bp, Homo sapiens
gcctcagggcagcca

SEQ ID NO: 1258728 - DNA, 15 bp, Homo sapiens
tgcctcagggcagcc

SEQ ID NO: 1258729 - DNA, 15 bp, Homo sapiens
atgcctcagggcagc

SEQ ID NO: 1258730 - DNA, 15 bp, Homo sapiens
gatgcctcagggcag

SEQ ID NO: 1258731 - DNA, 15 bp, Homo sapiens
tgatgcctcagggca

SEQ ID NO: 1258732 - DNA, 15 bp, Homo sapiens
atgatgcctcagggc

SEQ ID NO: 1258733 - DNA, 15 bp, Homo sapiens
aatgatgcctcaggg

SEQ ID NO: 1258734 - DNA, 15 bp, Homo sapiens
aaatgatgcctcagg

SEQ ID NO: 1258735 - DNA, 15 bp, Homo sapiens
aaaatgatgcctcag

SEQ ID NO: 1258736 - DNA, 15 bp, Homo sapiens
caaaatgatgcctca

SEQ ID NO: 1258737 - DNA, 15 bp, Homo sapiens
acaaaatgatgcctc

SEQ ID NO: 1258738 - DNA, 15 bp, Homo sapiens
aacaaaatgatgcct

SEQ ID NO: 1258739 - DNA, 15 bp, Homo sapiens
aaacaaaatgatgcc

SEQ ID NO: 1258740 - DNA, 15 bp, Homo sapiens
aaaacaaaatgatgc

SEQ ID NO: 1258741 - DNA, 15 bp, Homo sapiens
taaaacaaaatgatg

SEQ ID NO: 1258742 - DNA, 15 bp, Homo sapiens
gtaaaacaaaatgat

SEQ ID NO: 1258743 - DNA, 15 bp, Homo sapiens
tgtaaaacaaaatga

SEQ ID NO: 1258744 - DNA, 15 bp, Homo sapiens
ttgtaaaacaaaatg

SEQ ID NO: 1258745 - DNA, 15 bp, Homo sapiens
cttgtaaaacaaaat

SEQ ID NO: 1258746 - DNA, 15 bp, Homo sapiens
ccttgtaaaacaaaa

SEQ ID NO: 1258747 - DNA, 15 bp, Homo sapiens
accttgtaaaacaaa

SEQ ID NO: 1258748 - DNA, 15 bp, Homo sapiens
taccttgtaaaacaa

SEQ ID NO: 1258749 - DNA, 15 bp, Homo sapiens
ataccttgtaaaaca

SEQ ID NO: 1258750 - DNA, 15 bp, Homo sapiens
tataccttgtaaaac

SEQ ID NO: 1258751 - DNA, 15 bp, Homo sapiens
gtataccttgtaaaa

SEQ ID NO: 1258752 - DNA, 15 bp, Homo sapiens
tgtataccttgtaaa

SEQ ID NO: 1258753 - DNA, 15 bp, Homo sapiens
ttgtataccttgtaa

SEQ ID NO: 1258754 - DNA, 15 bp, Homo sapiens
attgtataccttgta

SEQ ID NO: 1258755 - DNA, 15 bp, Homo sapiens
aattgtataccttgt

SEQ ID NO: 1258756 - DNA, 15 bp, Homo sapiens
gaattgtataccttg

SEQ ID NO: 1258757 - DNA, 15 bp, Homo sapiens
ggaattgtatacctt

SEQ ID NO: 1258758 - DNA, 15 bp, Homo sapiens
tggaattgtatacct

SEQ ID NO: 1258759 - DNA, 15 bp, Homo sapiens
atggaattgtatacc

SEQ ID NO: 1258760 - DNA, 15 bp, Homo sapiens
gatggaattgtatac

SEQ ID NO: 1258761 - DNA, 15 bp, Homo sapiens
tgatggaattgtata

SEQ ID NO: 1258762 - DNA, 15 bp, Homo sapiens
ttgatggaattgtat

SEQ ID NO: 1258763 - DNA, 15 bp, Homo sapiens
gttgatggaattgta

SEQ ID NO: 1258764 - DNA, 15 bp, Homo sapiens
tgttgatggaattgt

SEQ ID NO: 1258765 - DNA, 15 bp, Homo sapiens
ctgttgatggaattg

SEQ ID NO: 1258766 - DNA, 15 bp, Homo sapiens
tctgttgatggaatt

SEQ ID NO: 1258767 - DNA, 15 bp, Homo sapiens
ttctgttgatggaat

SEQ ID NO: 1258768 - DNA, 15 bp, Homo sapiens
attctgttgatggaa

SEQ ID NO: 1258769 - DNA, 15 bp, Homo sapiens
gattctgttgatgga

SEQ ID NO: 1258770 - DNA, 15 bp, Homo sapiens
tgattctgttgatgg

SEQ ID NO: 1258771 - DNA, 15 bp, Homo sapiens
ttgattctgttgatg

SEQ ID NO: 1258772 - DNA, 15 bp, Homo sapiens
cttgattctgttgat

SEQ ID NO: 1258773 - DNA, 15 bp, Homo sapiens
gcttgattctgttga

SEQ ID NO: 1258774 - DNA, 15 bp, Homo sapiens
ggcttgattctgttg

SEQ ID NO: 1258775 - DNA, 15 bp, Homo sapiens
gggcttgattctgtt

SEQ ID NO: 1258776 - DNA, 15 bp, Homo sapiens
ggggcttgattctgt

SEQ ID NO: 1258777 - DNA, 15 bp, Homo sapiens
aggggcttgattctg

SEQ ID NO: 1258778 - DNA, 15 bp, Homo sapiens
gaggggcttgattct

SEQ ID NO: 1258779 - DNA, 15 bp, Homo sapiens
agaggggcttgattc

SEQ ID NO: 1258780 - DNA, 15 bp, Homo sapiens
tagaggggcttgatt

SEQ ID NO: 1258781 - DNA, 15 bp, Homo sapiens
atagaggggcttgat

SEQ ID NO: 1258782 - DNA, 15 bp, Homo sapiens
tatagaggggcttga

SEQ ID NO: 1258783 - DNA, 15 bp, Homo sapiens
ctatagaggggcttg

SEQ ID NO: 1258784 - DNA, 15 bp, Homo sapiens
actatagaggggctt

SEQ ID NO: 1258785 - DNA, 15 bp, Homo sapiens
gactatagaggggct

SEQ ID NO: 1258786 - DNA, 15 bp, Homo sapiens
ggactatagaggggc

SEQ ID NO: 1258787 - DNA, 15 bp, Homo sapiens
aggactatagagggg

SEQ ID NO: 1258788 - DNA, 15 bp, Homo sapiens
aaggactatagaggg

SEQ ID NO: 1258789 - DNA, 15 bp, Homo sapiens
taaggactatagagg

SEQ ID NO: 1258790 - DNA, 15 bp, Homo sapiens
gtaaggactatagag

SEQ ID NO: 1258791 - DNA, 15 bp, Homo sapiens
tgtaaggactataga

SEQ ID NO: 1258792 - DNA, 15 bp, Homo sapiens
ctgtaaggactatag

SEQ ID NO: 1258793 - DNA, 15 bp, Homo sapiens
actgtaaggactata

SEQ ID NO: 1258794 - DNA, 15 bp, Homo sapiens
aactgtaaggactat

SEQ ID NO: 1258795 - DNA, 15 bp, Homo sapiens
taactgtaaggacta

SEQ ID NO: 1258796 - DNA, 15 bp, Homo sapiens
ataactgtaaggact

SEQ ID NO: 1258797 - DNA, 15 bp, Homo sapiens
aataactgtaaggac

SEQ ID NO: 1258798 - DNA, 15 bp, Homo sapiens
caataactgtaagga

SEQ ID NO: 1258799 - DNA, 15 bp, Homo sapiens
acaataactgtaagg

SEQ ID NO: 1258800 - DNA, 15 bp, Homo sapiens
gacaataactgtaag

SEQ ID NO: 1258801 - DNA, 15 bp, Homo sapiens
ggacaataactgtaa

SEQ ID NO: 1258802 - DNA, 15 bp, Homo sapiens
gggacaataactgta

SEQ ID NO: 1258803 - DNA, 15 bp, Homo sapiens
ggggacaataactgt

SEQ ID NO: 1258804 - DNA, 15 bp, Homo sapiens
tggggacaataactg

SEQ ID NO: 1258805 - DNA, 15 bp, Homo sapiens
gtggggacaataact

SEQ ID NO: 1258806 - DNA, 15 bp, Homo sapiens
tgtggggacaataac

SEQ ID NO: 1258807 - DNA, 15 bp, Homo sapiens
gtgtggggacaataa

SEQ ID NO: 1258808 - DNA, 15 bp, Homo sapiens
agtgtggggacaata

SEQ ID NO: 1258809 - DNA, 15 bp, Homo sapiens
cagtgtggggacaat

SEQ ID NO: 1258810 - DNA, 15 bp, Homo sapiens
acagtgtggggacaa

SEQ ID NO: 1258811 - DNA, 15 bp, Homo sapiens
aacagtgtggggaca

SEQ ID NO: 1258812 - DNA, 15 bp, Homo sapiens
gaacagtgtggggac

SEQ ID NO: 1258813 - DNA, 15 bp, Homo sapiens
tgaacagtgtgggga

SEQ ID NO: 1258814 - DNA, 15 bp, Homo sapiens
ttgaacagtgtgggg

SEQ ID NO: 1258815 - DNA, 15 bp, Homo sapiens
tttgaacagtgtggg

SEQ ID NO: 1258816 - DNA, 15 bp, Homo sapiens
gtttgaacagtgtgg

SEQ ID NO: 1258817 - DNA, 15 bp, Homo sapiens
tgtttgaacagtgtg

SEQ ID NO: 1258818 - DNA, 15 bp, Homo sapiens
ctgtttgaacagtgt

SEQ ID NO: 1258819 - DNA, 15 bp, Homo sapiens
actgtttgaacagtg

SEQ ID NO: 1258820 - DNA, 15 bp, Homo sapiens
tactgtttgaacagt

SEQ ID NO: 1258821 - DNA, 15 bp, Homo sapiens
atactgtttgaacag

SEQ ID NO: 1258822 - DNA, 15 bp, Homo sapiens
catactgtttgaaca

SEQ ID NO: 1258823 - DNA, 15 bp, Homo sapiens
ccatactgtttgaac

SEQ ID NO: 1258824 - DNA, 15 bp, Homo sapiens
gccatactgtttgaa

SEQ ID NO: 1258825 - DNA, 15 bp, Homo sapiens
agccatactgtttga

SEQ ID NO: 1258826 - DNA, 15 bp, Homo sapiens
tagccatactgtttg

SEQ ID NO: 1258827 - DNA, 15 bp, Homo sapiens
gtagccatactgttt

SEQ ID NO: 1258828 - DNA, 15 bp, Homo sapiens
agtagccatactgtt

SEQ ID NO: 1258829 - DNA, 15 bp, Homo sapiens
tagtagccatactgt

SEQ ID NO: 1258830 - DNA, 15 bp, Homo sapiens
gtagtagccatactg

SEQ ID NO: 1258831 - DNA, 15 bp, Homo sapiens
ggtagtagccatact

SEQ ID NO: 1258832 - DNA, 15 bp, Homo sapiens
aggtagtagccatac

SEQ ID NO: 1258833 - DNA, 15 bp, Homo sapiens
taggtagtagccata

SEQ ID NO: 1258834 - DNA, 15 bp, Homo sapiens
ataggtagtagccat

SEQ ID NO: 1258835 - DNA, 15 bp, Homo sapiens
gataggtagtagcca

SEQ ID NO: 1258836 - DNA, 15 bp, Homo sapiens
ggataggtagtagcc

SEQ ID NO: 1258837 - DNA, 15 bp, Homo sapiens
gggataggtagtagc

SEQ ID NO: 1258838 - DNA, 15 bp, Homo sapiens
tgggataggtagtag

SEQ ID NO: 1258839 - DNA, 15 bp, Homo sapiens
ttgggataggtagta

SEQ ID NO: 1258840 - DNA, 15 bp, Homo sapiens
attgggataggtagt

SEQ ID NO: 1258841 - DNA, 15 bp, Homo sapiens
cattgggataggtag

SEQ ID NO: 1258842 - DNA, 15 bp, Homo sapiens
gcattgggataggta

SEQ ID NO: 1258843 - DNA, 15 bp, Homo sapiens
ggcattgggataggt

SEQ ID NO: 1258844 - DNA, 15 bp, Homo sapiens
gggcattgggatagg

SEQ ID NO: 1258845 - DNA, 15 bp, Homo sapiens
ggggcattgggatag

SEQ ID NO: 1258846 - DNA, 15 bp, Homo sapiens
tggggcattgggata

SEQ ID NO: 1258847 - DNA, 15 bp, Homo sapiens
gtggggcattgggat

SEQ ID NO: 1258848 - DNA, 15 bp, Homo sapiens
ggtggggcattggga

SEQ ID NO: 1258849 - DNA, 15 bp, Homo sapiens
aggtggggcattggg

SEQ ID NO: 1258850 - DNA, 15 bp, Homo sapiens
aaggtggggcattgg

SEQ ID NO: 1258851 - DNA, 15 bp, Homo sapiens
gaaggtggggcattg

SEQ ID NO: 1258852 - DNA, 15 bp, Homo sapiens
agaaggtggggcatt

SEQ ID NO: 1258853 - DNA, 15 bp, Homo sapiens
tagaaggtggggcat

SEQ ID NO: 1258854 - DNA, 15 bp, Homo sapiens
atagaaggtggggca

SEQ ID NO: 1258855 - DNA, 15 bp, Homo sapiens
gatagaaggtggggc

SEQ ID NO: 1258856 - DNA, 15 bp, Homo sapiens
agatagaaggtgggg

SEQ ID NO: 1258857 - DNA, 15 bp, Homo sapiens
cagatagaaggtggg

SEQ ID NO: 1258858 - DNA, 15 bp, Homo sapiens
gcagatagaaggtgg

SEQ ID NO: 1258859 - DNA, 15 bp, Homo sapiens
tgcagatagaaggtg

SEQ ID NO: 1258860 - DNA, 15 bp, Homo sapiens
gtgcagatagaaggt

SEQ ID NO: 1258861 - DNA, 15 bp, Homo sapiens
agtgcagatagaagg

SEQ ID NO: 1258862 - DNA, 15 bp, Homo sapiens
cagtgcagatagaag

SEQ ID NO: 1258863 - DNA, 15 bp, Homo sapiens
gcagtgcagatagaa

SEQ ID NO: 1258864 - DNA, 15 bp, Homo sapiens
tgcagtgcagataga

SEQ ID NO: 1258865 - DNA, 15 bp, Homo sapiens
atgcagtgcagatag

SEQ ID NO: 1258866 - DNA, 15 bp, Homo sapiens
gatgcagtgcagata

SEQ ID NO: 1258867 - DNA, 15 bp, Homo sapiens
agatgcagtgcagat

SEQ ID NO: 1258868 - DNA, 15 bp, Homo sapiens
gagatgcagtgcaga

SEQ ID NO: 1258869 - DNA, 15 bp, Homo sapiens
tgagatgcagtgcag

SEQ ID NO: 1258870 - DNA, 15 bp, Homo sapiens
ttgagatgcagtgca

SEQ ID NO: 1258871 - DNA, 15 bp, Homo sapiens
attgagatgcagtgc

SEQ ID NO: 1258872 - DNA, 15 bp, Homo sapiens
aattgagatgcagtg

SEQ ID NO: 1258873 - DNA, 15 bp, Homo sapiens
taattgagatgcagt

SEQ ID NO: 1258874 - DNA, 15 bp, Homo sapiens
ctaattgagatgcag

SEQ ID NO: 1258875 - DNA, 15 bp, Homo sapiens
gctaattgagatgca

SEQ ID NO: 1258876 - DNA, 15 bp, Homo sapiens
agctaattgagatgc

SEQ ID NO: 1258877 - DNA, 15 bp, Homo sapiens
tagctaattgagatg

SEQ ID NO: 1258878 - DNA, 15 bp, Homo sapiens
gtagctaattgagat

SEQ ID NO: 1258879 - DNA, 15 bp, Homo sapiens
tgtagctaattgaga

SEQ ID NO: 1258880 - DNA, 15 bp, Homo sapiens
ctgtagctaattgag

SEQ ID NO: 1258881 - DNA, 15 bp, Homo sapiens
cctgtagctaattga

SEQ ID NO: 1258882 - DNA, 15 bp, Homo sapiens
acctgtagctaattg

SEQ ID NO: 1258883 - DNA, 15 bp, Homo sapiens
cacctgtagctaatt

SEQ ID NO: 1258884 - DNA, 15 bp, Homo sapiens
ccacctgtagctaat

SEQ ID NO: 1258885 - DNA, 15 bp, Homo sapiens
cccacctgtagctaa

SEQ ID NO: 1258886 - DNA, 15 bp, Homo sapiens
tcccacctgtagcta

SEQ ID NO: 1258887 - DNA, 15 bp, Homo sapiens
ttcccacctgtagct

SEQ ID NO: 1258888 - DNA, 15 bp, Homo sapiens
cttcccacctgtagc

SEQ ID NO: 1258889 - DNA, 15 bp, Homo sapiens
gcttcccacctgtag

SEQ ID NO: 1258890 - DNA, 15 bp, Homo sapiens
ggcttcccacctgta

SEQ ID NO: 1258891 - DNA, 15 bp, Homo sapiens
aggcttcccacctgt

SEQ ID NO: 1258892 - DNA, 15 bp, Homo sapiens
aaggcttcccacctg

SEQ ID NO: 1258893 - DNA, 15 bp, Homo sapiens
aaaggcttcccacct

SEQ ID NO: 1258894 - DNA, 15 bp, Homo sapiens
caaaggcttcccacc

SEQ ID NO: 1258895 - DNA, 15 bp, Homo sapiens
acaaaggcttcccac

SEQ ID NO: 1258896 - DNA, 15 bp, Homo sapiens
tacaaaggcttccca

SEQ ID NO: 1258897 - DNA, 15 bp, Homo sapiens
ttacaaaggcttccc

SEQ ID NO: 1258898 - DNA, 15 bp, Homo sapiens
attacaaaggcttcc

SEQ ID NO: 1258899 - DNA, 15 bp, Homo sapiens
gattacaaaggcttc

SEQ ID NO: 1258900 - DNA, 15 bp, Homo sapiens
tgattacaaaggctt

SEQ ID NO: 1258901 - DNA, 15 bp, Homo sapiens
atgattacaaaggct

SEQ ID NO: 1258902 - DNA, 15 bp, Homo sapiens
catgattacaaaggc

SEQ ID NO: 1258903 - DNA, 15 bp, Homo sapiens
ccatgattacaaagg

SEQ ID NO: 1258904 - DNA, 15 bp, Homo sapiens
accatgattacaaag

SEQ ID NO: 1258905 - DNA, 15 bp, Homo sapiens
taccatgattacaaa

SEQ ID NO: 1258906 - DNA, 15 bp, Homo sapiens
ataccatgattacaa

SEQ ID NO: 1258907 - DNA, 15 bp, Homo sapiens
gataccatgattaca

SEQ ID NO: 1258908 - DNA, 15 bp, Homo sapiens
tgataccatgattac

SEQ ID NO: 1258909 - DNA, 15 bp, Homo sapiens
gtgataccatgatta

SEQ ID NO: 1258910 - DNA, 15 bp, Homo sapiens
agtgataccatgatt

SEQ ID NO: 1258911 - DNA, 15 bp, Homo sapiens
cagtgataccatgat

SEQ ID NO: 1258912 - DNA, 15 bp, Homo sapiens
acagtgataccatga

SEQ ID NO: 1258913 - DNA, 15 bp, Homo sapiens
cacagtgataccatg

SEQ ID NO: 1258914 - DNA, 15 bp, Homo sapiens
acacagtgataccat

SEQ ID NO: 1258915 - DNA, 15 bp, Homo sapiens
aacacagtgatacca

SEQ ID NO: 1258916 - DNA, 15 bp, Homo sapiens
caacacagtgatacc

SEQ ID NO: 1258917 - DNA, 15 bp, Homo sapiens
gcaacacagtgatac

SEQ ID NO: 1258918 - DNA, 15 bp, Homo sapiens
agcaacacagtgata

SEQ ID NO: 1258919 - DNA, 15 bp, Homo sapiens
aagcaacacagtgat

SEQ ID NO: 1258920 - DNA, 15 bp, Homo sapiens
gaagcaacacagtga

SEQ ID NO: 1258921 - DNA, 15 bp, Homo sapiens
tgaagcaacacagtg

SEQ ID NO: 1258922 - DNA, 15 bp, Homo sapiens
atgaagcaacacagt

SEQ ID NO: 1258923 - DNA, 15 bp, Homo sapiens
tatgaagcaacacag

SEQ ID NO: 1258924 - DNA, 15 bp, Homo sapiens
ttatgaagcaacaca

SEQ ID NO: 1258925 - DNA, 15 bp, Homo sapiens
gttatgaagcaacac

SEQ ID NO: 1258926 - DNA, 15 bp, Homo sapiens
agttatgaagcaaca

SEQ ID NO: 1258927 - DNA, 15 bp, Homo sapiens
tagttatgaagcaac

SEQ ID NO: 1258928 - DNA, 15 bp, Homo sapiens
gtagttatgaagcaa

SEQ ID NO: 1258929 - DNA, 15 bp, Homo sapiens
ggtagttatgaagca

SEQ ID NO: 1258930 - DNA, 15 bp, Homo sapiens
gggtagttatgaagc

SEQ ID NO: 1258931 - DNA, 15 bp, Homo sapiens
tgggtagttatgaag

SEQ ID NO: 1258932 - DNA, 15 bp, Homo sapiens
gtgggtagttatgaa

SEQ ID NO: 1258933 - DNA, 15 bp, Homo sapiens
agtgggtagttatga

SEQ ID NO: 1258934 - DNA, 15 bp, Homo sapiens
gagtgggtagttatg

SEQ ID NO: 1258935 - DNA, 15 bp, Homo sapiens
tgagtgggtagttat

SEQ ID NO: 1258936 - DNA, 15 bp, Homo sapiens
gtgagtgggtagtta

SEQ ID NO: 1258937 - DNA, 15 bp, Homo sapiens
agtgagtgggtagtt

SEQ ID NO: 1258938 - DNA, 15 bp, Homo sapiens
cagtgagtgggtagt

SEQ ID NO: 1258939 - DNA, 15 bp, Homo sapiens
acagtgagtgggtag

SEQ ID NO: 1258940 - DNA, 15 bp, Homo sapiens
cacagtgagtgggta

SEQ ID NO: 1258941 - DNA, 15 bp, Homo sapiens
gcacagtgagtgggt

SEQ ID NO: 1258942 - DNA, 15 bp, Homo sapiens
ggcacagtgagtggg

SEQ ID NO: 1258943 - DNA, 15 bp, Homo sapiens
tggcacagtgagtgg

SEQ ID NO: 1258944 - DNA, 15 bp, Homo sapiens
atggcacagtgagtg

SEQ ID NO: 1258945 - DNA, 15 bp, Homo sapiens
catggcacagtgagt

SEQ ID NO: 1258946 - DNA, 15 bp, Homo sapiens
ccatggcacagtgag

SEQ ID NO: 1258947 - DNA, 15 bp, Homo sapiens
cccatggcacagtga

SEQ ID NO: 1258948 - DNA, 15 bp, Homo sapiens
acccatggcacagtg

SEQ ID NO: 1258949 - DNA, 15 bp, Homo sapiens
gacccatggcacagt

SEQ ID NO: 1258950 - DNA, 15 bp, Homo sapiens
agacccatggcacag

SEQ ID NO: 1258951 - DNA, 15 bp, Homo sapiens
aagacccatggcaca

SEQ ID NO: 1258952 - DNA, 15 bp, Homo sapiens
aaagacccatggcac

SEQ ID NO: 1258953 - DNA, 15 bp, Homo sapiens
taaagacccatggca

SEQ ID NO: 1258954 - DNA, 15 bp, Homo sapiens
ataaagacccatggc

SEQ ID NO: 1258955 - DNA, 15 bp, Homo sapiens
aataaagacccatgg

SEQ ID NO: 1258956 - DNA, 15 bp, Homo sapiens
caataaagacccatg

SEQ ID NO: 1258957 - DNA, 15 bp, Homo sapiens
gcaataaagacccat

SEQ ID NO: 1258958 - DNA, 15 bp, Homo sapiens
ggcaataaagaccca

SEQ ID NO: 1258959 - DNA, 15 bp, Homo sapiens
tggcaataaagaccc

SEQ ID NO: 1258960 - DNA, 15 bp, Homo sapiens
gtggcaataaagacc

SEQ ID NO: 1258961 - DNA, 15 bp, Homo sapiens
tgtggcaataaagac

SEQ ID NO: 1258962 - DNA, 15 bp, Homo sapiens
gtgtggcaataaaga

SEQ ID NO: 1258963 - DNA, 15 bp, Homo sapiens
cgtgtggcaataaag

SEQ ID NO: 1258964 - DNA, 15 bp, Homo sapiens
ccgtgtggcaataaa

SEQ ID NO: 1258965 - DNA, 15 bp, Homo sapiens
accgtgtggcaataa

SEQ ID NO: 1258966 - DNA, 15 bp, Homo sapiens
gaccgtgtggcaata

SEQ ID NO: 1258967 - DNA, 15 bp, Homo sapiens
cgaccgtgtggcaat

SEQ ID NO: 1258968 - DNA, 15 bp, Homo sapiens
ccgaccgtgtggcaa

SEQ ID NO: 1258969 - DNA, 15 bp, Homo sapiens
accgaccgtgtggca

SEQ ID NO: 1258970 - DNA, 15 bp, Homo sapiens
taccgaccgtgtggc

SEQ ID NO: 1258971 - DNA, 15 bp, Homo sapiens
ttaccgaccgtgtgg

SEQ ID NO: 1258972 - DNA, 15 bp, Homo sapiens
cttaccgaccgtgtg

SEQ ID NO: 1258973 - DNA, 15 bp, Homo sapiens
acttaccgaccgtgt

SEQ ID NO: 1258974 - DNA, 15 bp, Homo sapiens
tacttaccgaccgtg

SEQ ID NO: 1258975 - DNA, 15 bp, Homo sapiens
ttacttaccgaccgt

SEQ ID NO: 1258976 - DNA, 15 bp, Homo sapiens
gttacttaccgaccg

SEQ ID NO: 1258977 - DNA, 15 bp, Homo sapiens
ggttacttaccgacc

SEQ ID NO: 1258978 - DNA, 15 bp, Homo sapiens
gggttacttaccgac

SEQ ID NO: 1258979 - DNA, 15 bp, Homo sapiens
tgggttacttaccga

SEQ ID NO: 1258980 - DNA, 15 bp, Homo sapiens
ttgggttacttaccg

SEQ ID NO: 1258981 - DNA, 15 bp, Homo sapiens
gttgggttacttacc

SEQ ID NO: 1258982 - DNA, 15 bp, Homo sapiens
agttgggttacttac

SEQ ID NO: 1258983 - DNA, 15 bp, Homo sapiens
gagttgggttactta

SEQ ID NO: 1258984 - DNA, 15 bp, Homo sapiens
agagttgggttactt

SEQ ID NO: 1258985 - DNA, 15 bp, Homo sapiens
tagagttgggttact

SEQ ID NO: 1258986 - DNA, 15 bp, Homo sapiens
ctagagttgggttac

SEQ ID NO: 1258987 - DNA, 15 bp, Homo sapiens
gctagagttgggtta

SEQ ID NO: 1258988 - DNA, 15 bp, Homo sapiens
tgctagagttgggtt

SEQ ID NO: 1258989 - DNA, 15 bp, Homo sapiens
atgctagagttgggt

SEQ ID NO: 1258990 - DNA, 15 bp, Homo sapiens
aatgctagagttggg

SEQ ID NO: 1258991 - DNA, 15 bp, Homo sapiens
gaatgctagagttgg

SEQ ID NO: 1258992 - DNA, 15 bp, Homo sapiens
ggaatgctagagttg

SEQ ID NO: 1258993 - DNA, 15 bp, Homo sapiens
tggaatgctagagtt

SEQ ID NO: 1258994 - DNA, 15 bp, Homo sapiens
atggaatgctagagt

SEQ ID NO: 1258995 - DNA, 15 bp, Homo sapiens
gatggaatgctagag

SEQ ID NO: 1258996 - DNA, 15 bp, Homo sapiens
ggatggaatgctaga

SEQ ID NO: 1258997 - DNA, 15 bp, Homo sapiens
aggatggaatgctag

SEQ ID NO: 1258998 - DNA, 15 bp, Homo sapiens
caggatggaatgcta

SEQ ID NO: 1258999 - DNA, 15 bp, Homo sapiens
tcaggatggaatgct

SEQ ID NO: 1259000 - DNA, 15 bp, Homo sapiens
ctcaggatggaatgc

SEQ ID NO: 1259001 - DNA, 15 bp, Homo sapiens
actcaggatggaatg

SEQ ID NO: 1259002 - DNA, 15 bp, Homo sapiens
cactcaggatggaat

SEQ ID NO: 1259003 - DNA, 15 bp, Homo sapiens
acactcaggatggaa

SEQ ID NO: 1259004 - DNA, 15 bp, Homo sapiens
gacactcaggatgga

SEQ ID NO: 1259005 - DNA, 15 bp, Homo sapiens
agacactcaggatgg

SEQ ID NO: 1259006 - DNA, 15 bp, Homo sapiens
cagacactcaggatg

SEQ ID NO: 1259007 - DNA, 15 bp, Homo sapiens
gcagacactcaggat

SEQ ID NO: 1259008 - DNA, 15 bp, Homo sapiens
tgcagacactcagga

SEQ ID NO: 1259009 - DNA, 15 bp, Homo sapiens
ctgcagacactcagg

SEQ ID NO: 1259010 - DNA, 15 bp, Homo sapiens
cctgcagacactcag

SEQ ID NO: 1259011 - DNA, 15 bp, Homo sapiens
tcctgcagacactca

SEQ ID NO: 1259012 - DNA, 15 bp, Homo sapiens
gtcctgcagacactc

SEQ ID NO: 1259013 - DNA, 15 bp, Homo sapiens
cgtcctgcagacact

SEQ ID NO: 1259014 - DNA, 15 bp, Homo sapiens
gcgtcctgcagacac

SEQ ID NO: 1259015 - DNA, 15 bp, Homo sapiens
agcgtcctgcagaca

SEQ ID NO: 1259016 - DNA, 15 bp, Homo sapiens
gagcgtcctgcagac

SEQ ID NO: 1259017 - DNA, 15 bp, Homo sapiens
ggagcgtcctgcaga

SEQ ID NO: 1259018 - DNA, 15 bp, Homo sapiens
aggagcgtcctgcag

SEQ ID NO: 1259019 - DNA, 15 bp, Homo sapiens
caggagcgtcctgca

SEQ ID NO: 1259020 - DNA, 15 bp, Homo sapiens
ccaggagcgtcctgc

SEQ ID NO: 1259021 - DNA, 15 bp, Homo sapiens
accaggagcgtcctg

SEQ ID NO: 1259022 - DNA, 15 bp, Homo sapiens
caccaggagcgtcct

SEQ ID NO: 1259023 - DNA, 15 bp, Homo sapiens
gcaccaggagcgtcc

SEQ ID NO: 1259024 - DNA, 15 bp, Homo sapiens
ggcaccaggagcgtc

SEQ ID NO: 1259025 - DNA, 15 bp, Homo sapiens
tggcaccaggagcgt

SEQ ID NO: 1259026 - DNA, 15 bp, Homo sapiens
ttggcaccaggagcg

SEQ ID NO: 1259027 - DNA, 15 bp, Homo sapiens
cttggcaccaggagc

SEQ ID NO: 1259028 - DNA, 15 bp, Homo sapiens
acttggcaccaggag

SEQ ID NO: 1259029 - DNA, 15 bp, Homo sapiens
gacttggcaccagga

SEQ ID NO: 1259030 - DNA, 15 bp, Homo sapiens
agacttggcaccagg

SEQ ID NO: 1259031 - DNA, 15 bp, Homo sapiens
aagacttggcaccag

SEQ ID NO: 1259032 - DNA, 15 bp, Homo sapiens
aaagacttggcacca

SEQ ID NO: 1259033 - DNA, 15 bp, Homo sapiens
aaaagacttggcacc

SEQ ID NO: 1259034 - DNA, 15 bp, Homo sapiens
taaaagacttggcac

SEQ ID NO: 1259035 - DNA, 15 bp, Homo sapiens
ctaaaagacttggca

SEQ ID NO: 1259036 - DNA, 15 bp, Homo sapiens
gctaaaagacttggc

SEQ ID NO: 1259037 - DNA, 15 bp, Homo sapiens
ggctaaaagacttgg

SEQ ID NO: 1259038 - DNA, 15 bp, Homo sapiens
aggctaaaagacttg

SEQ ID NO: 1259039 - DNA, 15 bp, Homo sapiens
caggctaaaagactt

SEQ ID NO: 1259040 - DNA, 15 bp, Homo sapiens
ccaggctaaaagact

SEQ ID NO: 1259041 - DNA, 15 bp, Homo sapiens
cccaggctaaaagac

SEQ ID NO: 1259042 - DNA, 15 bp, Homo sapiens
acccaggctaaaaga

SEQ ID NO: 1259043 - DNA, 15 bp, Homo sapiens
aacccaggctaaaag

SEQ ID NO: 1259044 - DNA, 15 bp, Homo sapiens
gaacccaggctaaaa

SEQ ID NO: 1259045 - DNA, 15 bp, Homo sapiens
agaacccaggctaaa

SEQ ID NO: 1259046 - DNA, 15 bp, Homo sapiens
cagaacccaggctaa

SEQ ID NO: 1259047 - DNA, 15 bp, Homo sapiens
acagaacccaggcta

SEQ ID NO: 1259048 - DNA, 15 bp, Homo sapiens
tacagaacccaggct

SEQ ID NO: 1259049 - DNA, 15 bp, Homo sapiens
ctacagaacccaggc

SEQ ID NO: 1259050 - DNA, 15 bp, Homo sapiens
tctacagaacccagg

SEQ ID NO: 1259051 - DNA, 15 bp, Homo sapiens
ttctacagaacccag

SEQ ID NO: 1259052 - DNA, 15 bp, Homo sapiens
tttctacagaaccca

SEQ ID NO: 1259053 - DNA, 15 bp, Homo sapiens
ttttctacagaaccc

SEQ ID NO: 1259054 - DNA, 15 bp, Homo sapiens
gttttctacagaacc

SEQ ID NO: 1259055 - DNA, 15 bp, Homo sapiens
tgttttctacagaac

SEQ ID NO: 1259056 - DNA, 15 bp, Homo sapiens
ctgttttctacagaa

SEQ ID NO: 1259057 - DNA, 15 bp, Homo sapiens
tctgttttctacaga

SEQ ID NO: 1259058 - DNA, 15 bp, Homo sapiens
ctctgttttctacag

SEQ ID NO: 1259059 - DNA, 15 bp, Homo sapiens
gctctgttttctaca

SEQ ID NO: 1259060 - DNA, 15 bp, Homo sapiens
ggctctgttttctac

SEQ ID NO: 1259061 - DNA, 15 bp, Homo sapiens
aggctctgttttcta

SEQ ID NO: 1259062 - DNA, 15 bp, Homo sapiens
caggctctgttttct

SEQ ID NO: 1259063 - DNA, 15 bp, Homo sapiens
tcaggctctgttttc

SEQ ID NO: 1259064 - DNA, 15 bp, Homo sapiens
ctcaggctctgtttt

SEQ ID NO: 1259065 - DNA, 15 bp, Homo sapiens
actcaggctctgttt

SEQ ID NO: 1259066 - DNA, 15 bp, Homo sapiens
cactcaggctctgtt

SEQ ID NO: 1259067 - DNA, 15 bp, Homo sapiens
acactcaggctctgt

SEQ ID NO: 1259068 - DNA, 15 bp, Homo sapiens
tacactcaggctctg

SEQ ID NO: 1259069 - DNA, 15 bp, Homo sapiens
ctacactcaggctct

SEQ ID NO: 1259070 - DNA, 15 bp, Homo sapiens
actacactcaggctc

SEQ ID NO: 1259071 - DNA, 15 bp, Homo sapiens
aactacactcaggct

SEQ ID NO: 1259072 - DNA, 15 bp, Homo sapiens
aaactacactcaggc

SEQ ID NO: 1259073 - DNA, 15 bp, Homo sapiens
caaactacactcagg

SEQ ID NO: 1259074 - DNA, 15 bp, Homo sapiens
tcaaactacactcag

SEQ ID NO: 1259075 - DNA, 15 bp, Homo sapiens
ctcaaactacactca

SEQ ID NO: 1259076 - DNA, 15 bp, Homo sapiens
tctcaaactacactc

SEQ ID NO: 1259077 - DNA, 15 bp, Homo sapiens
ctctcaaactacact

SEQ ID NO: 1259078 - DNA, 15 bp, Homo sapiens
tctctcaaactacac

SEQ ID NO: 1259079 - DNA, 15 bp, Homo sapiens
ttctctcaaactaca

SEQ ID NO: 1259080 - DNA, 15 bp, Homo sapiens
tttctctcaaactac

SEQ ID NO: 1259081 - DNA, 15 bp, Homo sapiens
gtttctctcaaacta

SEQ ID NO: 1259082 - DNA, 15 bp, Homo sapiens
agtttctctcaaact

SEQ ID NO: 1259083 - DNA, 15 bp, Homo sapiens
cagtttctctcaaac

SEQ ID NO: 1259084 - DNA, 15 bp, Homo sapiens
ccagtttctctcaaa

SEQ ID NO: 1259085 - DNA, 15 bp, Homo sapiens
tccagtttctctcaa

SEQ ID NO: 1259086 - DNA, 15 bp, Homo sapiens
ctccagtttctctca

SEQ ID NO: 1259087 - DNA, 15 bp, Homo sapiens
actccagtttctctc

SEQ ID NO: 1259088 - DNA, 15 bp, Homo sapiens
cactccagtttctct

SEQ ID NO: 1259089 - DNA, 15 bp, Homo sapiens
tcactccagtttctc

SEQ ID NO: 1259090 - DNA, 15 bp, Homo sapiens
ttcactccagtttct

SEQ ID NO: 1259091 - DNA, 15 bp, Homo sapiens
cttcactccagtttc

SEQ ID NO: 1259092 - DNA, 15 bp, Homo sapiens
tcttcactccagttt

SEQ ID NO: 1259093 - DNA, 15 bp, Homo sapiens
gtcttcactccagtt

SEQ ID NO: 1259094 - DNA, 15 bp, Homo sapiens
cgtcttcactccagt

SEQ ID NO: 1259095 - DNA, 15 bp, Homo sapiens
tcgtcttcactccag

SEQ ID NO: 1259096 - DNA, 15 bp, Homo sapiens
ttcgtcttcactcca

SEQ ID NO: 1259097 - DNA, 15 bp, Homo sapiens
gttcgtcttcactcc

SEQ ID NO: 1259098 - DNA, 15 bp, Homo sapiens
cgttcgtcttcactc

SEQ ID NO: 1259099 - DNA, 15 bp, Homo sapiens
ccgttcgtcttcact

SEQ ID NO: 1259100 - DNA, 15 bp, Homo sapiens
cccgttcgtcttcac

SEQ ID NO: 1259101 - DNA, 15 bp, Homo sapiens
gcccgttcgtcttca

SEQ ID NO: 1259102 - DNA, 15 bp, Homo sapiens
agcccgttcgtcttc

SEQ ID NO: 1259103 - DNA, 15 bp, Homo sapiens
cagcccgttcgtctt

SEQ ID NO: 1259104 - DNA, 15 bp, Homo sapiens
ccagcccgttcgtct

SEQ ID NO: 1259105 - DNA, 15 bp, Homo sapiens
cccagcccgttcgtc

SEQ ID NO: 1259106 - DNA, 15 bp, Homo sapiens
gcccagcccgttcgt

SEQ ID NO: 1259107 - DNA, 15 bp, Homo sapiens
tgcccagcccgttcg

SEQ ID NO: 1259108 - DNA, 15 bp, Homo sapiens
ttgcccagcccgttc

SEQ ID NO: 1259109 - DNA, 15 bp, Homo sapiens
tttgcccagcccgtt

SEQ ID NO: 1259110 - DNA, 15 bp, Homo sapiens
ctttgcccagcccgt

SEQ ID NO: 1259111 - DNA, 15 bp, Homo sapiens
tctttgcccagcccg

SEQ ID NO: 1259112 - DNA, 15 bp, Homo sapiens
ttctttgcccagccc

SEQ ID NO: 1259113 - DNA, 15 bp, Homo sapiens
cttctttgcccagcc

SEQ ID NO: 1259114 - DNA, 15 bp, Homo sapiens
ccttctttgcccagc

SEQ ID NO: 1259115 - DNA, 15 bp, Homo sapiens
tccttctttgcccag

SEQ ID NO: 1259116 - DNA, 15 bp, Homo sapiens
ttccttctttgccca

SEQ ID NO: 1259117 - DNA, 15 bp, Homo sapiens
cttccttctttgccc

SEQ ID NO: 1259118 - DNA, 15 bp, Homo sapiens
tcttccttctttgcc

SEQ ID NO: 1259119 - DNA, 15 bp, Homo sapiens
ctcttccttctttgc

SEQ ID NO: 1259120 - DNA, 15 bp, Homo sapiens
tctcttccttctttg

SEQ ID NO: 1259121 - DNA, 15 bp, Homo sapiens
ttctcttccttcttt

SEQ ID NO: 1259122 - DNA, 15 bp, Homo sapiens
tttctcttccttctt

SEQ ID NO: 1259123 - DNA, 15 bp, Homo sapiens
gtttctcttccttct

SEQ ID NO: 1259124 - DNA, 15 bp, Homo sapiens
agtttctcttccttc

SEQ ID NO: 1259125 - DNA, 15 bp, Homo sapiens
tagtttctcttcctt

SEQ ID NO: 1259126 - DNA, 15 bp, Homo sapiens
atagtttctcttcct

SEQ ID NO: 1259127 - DNA, 15 bp, Homo sapiens
aatagtttctcttcc

SEQ ID NO: 1259128 - DNA, 15 bp, Homo sapiens
taatagtttctcttc

SEQ ID NO: 1259129 - DNA, 15 bp, Homo sapiens
ttaatagtttctctt

SEQ ID NO: 1259130 - DNA, 15 bp, Homo sapiens
attaatagtttctct

SEQ ID NO: 1259131 - DNA, 15 bp, Homo sapiens
tattaatagtttctc

SEQ ID NO: 1259132 - DNA, 15 bp, Homo sapiens
ttattaatagtttct

SEQ ID NO: 1259133 - DNA, 15 bp, Homo sapiens
attattaatagtttc

SEQ ID NO: 1259134 - DNA, 15 bp, Homo sapiens
tattattaatagttt

SEQ ID NO: 1259135 - DNA, 15 bp, Homo sapiens
ttattattaatagtt

SEQ ID NO: 1259136 - DNA, 15 bp, Homo sapiens
tttattattaatagt

SEQ ID NO: 1259137 - DNA, 15 bp, Homo sapiens
ttttattattaatag

SEQ ID NO: 1259138 - DNA, 15 bp, Homo sapiens
attttattattaata

SEQ ID NO: 1259139 - DNA, 15 bp, Homo sapiens
tattttattattaat

SEQ ID NO: 1259140 - DNA, 15 bp, Homo sapiens
ctattttattattaa

SEQ ID NO: 1259141 - DNA, 15 bp, Homo sapiens
actattttattatta

SEQ ID NO: 1259142 - DNA, 15 bp, Homo sapiens
cactattttattatt

SEQ ID NO: 1259143 - DNA, 15 bp, Homo sapiens
acactattttattat

SEQ ID NO: 1259144 - DNA, 15 bp, Homo sapiens
tacactattttatta

SEQ ID NO: 1259145 - DNA, 15 bp, Homo sapiens
atacactattttatt

SEQ ID NO: 1259146 - DNA, 15 bp, Homo sapiens
aatacactattttat

SEQ ID NO: 1259147 - DNA, 15 bp, Homo sapiens
taatacactatttta

SEQ ID NO: 1259148 - DNA, 15 bp, Homo sapiens
gtaatacactatttt

SEQ ID NO: 1259149 - DNA, 15 bp, Homo sapiens
ggtaatacactattt

SEQ ID NO: 1259150 - DNA, 15 bp, Homo sapiens
cggtaatacactatt

SEQ ID NO: 1259151 - DNA, 15 bp, Homo sapiens
tcggtaatacactat

SEQ ID NO: 1259152 - DNA, 15 bp, Homo sapiens
ttcggtaatacacta

SEQ ID NO: 1259153 - DNA, 15 bp, Homo sapiens
gttcggtaatacact

SEQ ID NO: 1259154 - DNA, 15 bp, Homo sapiens
agttcggtaatacac

SEQ ID NO: 1259155 - DNA, 15 bp, Homo sapiens
tagttcggtaataca

SEQ ID NO: 1259156 - DNA, 15 bp, Homo sapiens
ctagttcggtaatac

SEQ ID NO: 1259157 - DNA, 15 bp, Homo sapiens
gctagttcggtaata

SEQ ID NO: 1259158 - DNA, 15 bp, Homo sapiens
agctagttcggtaat

SEQ ID NO: 1259159 - DNA, 15 bp, Homo sapiens
tagctagttcggtaa

SEQ ID NO: 1259160 - DNA, 15 bp, Homo sapiens
gtagctagttcggta

SEQ ID NO: 1259161 - DNA, 15 bp, Homo sapiens
ggtagctagttcggt

SEQ ID NO: 1259162 - DNA, 15 bp, Homo sapiens
aggtagctagttcgg

SEQ ID NO: 1259163 - DNA, 15 bp, Homo sapiens
gaggtagctagttcg

SEQ ID NO: 1259164 - DNA, 15 bp, Homo sapiens
agaggtagctagttc

SEQ ID NO: 1259165 - DNA, 15 bp, Homo sapiens
aagaggtagctagtt

SEQ ID NO: 1259166 - DNA, 15 bp, Homo sapiens
caagaggtagctagt

SEQ ID NO: 1259167 - DNA, 15 bp, Homo sapiens
ccaagaggtagctag

SEQ ID NO: 1259168 - DNA, 15 bp, Homo sapiens
accaagaggtagcta

SEQ ID NO: 1259169 - DNA, 15 bp, Homo sapiens
taccaagaggtagct

SEQ ID NO: 1259170 - DNA, 15 bp, Homo sapiens
ataccaagaggtagc

SEQ ID NO: 1259171 - DNA, 15 bp, Homo sapiens
gataccaagaggtag

SEQ ID NO: 1259172 - DNA, 15 bp, Homo sapiens
tgataccaagaggta

SEQ ID NO: 1259173 - DNA, 15 bp, Homo sapiens
ttgataccaagaggt

SEQ ID NO: 1259174 - DNA, 15 bp, Homo sapiens
cttgataccaagagg

SEQ ID NO: 1259175 - DNA, 15 bp, Homo sapiens
gcttgataccaagag

SEQ ID NO: 1259176 - DNA, 15 bp, Homo sapiens
ggcttgataccaaga

SEQ ID NO: 1259177 - DNA, 15 bp, Homo sapiens
gggcttgataccaag

SEQ ID NO: 1259178 - DNA, 15 bp, Homo sapiens
cgggcttgataccaa

SEQ ID NO: 1259179 - DNA, 15 bp, Homo sapiens
ccgggcttgatacca

SEQ ID NO: 1259180 - DNA, 15 bp, Homo sapiens
cccgggcttgatacc

SEQ ID NO: 1259181 - DNA, 15 bp, Homo sapiens
acccgggcttgatac

SEQ ID NO: 1259182 - DNA, 15 bp, Homo sapiens
cacccgggcttgata

SEQ ID NO: 1259183 - DNA, 15 bp, Homo sapiens
tcacccgggcttgat

SEQ ID NO: 1259184 - DNA, 15 bp, Homo sapiens
atcacccgggcttga

SEQ ID NO: 1259185 - DNA, 15 bp, Homo sapiens
aatcacccgggcttg

SEQ ID NO: 1259186 - DNA, 15 bp, Homo sapiens
caatcacccgggctt

SEQ ID NO: 1259187 - DNA, 15 bp, Homo sapiens
ccaatcacccgggct

SEQ ID NO: 1259188 - DNA, 15 bp, Homo sapiens
accaatcacccgggc

SEQ ID NO: 1259189 - DNA, 15 bp, Homo sapiens
gaccaatcacccggg

SEQ ID NO: 1259190 - DNA, 15 bp, Homo sapiens
tgaccaatcacccgg

SEQ ID NO: 1259191 - DNA, 15 bp, Homo sapiens
ctgaccaatcacccg

SEQ ID NO: 1259192 - DNA, 15 bp, Homo sapiens
actgaccaatcaccc

SEQ ID NO: 1259193 - DNA, 15 bp, Homo sapiens
tactgaccaatcacc

SEQ ID NO: 1259194 - DNA, 15 bp, Homo sapiens
atactgaccaatcac

SEQ ID NO: 1259195 - DNA, 15 bp, Homo sapiens
gatactgaccaatca

SEQ ID NO: 1259196 - DNA, 15 bp, Homo sapiens
tgatactgaccaatc

SEQ ID NO: 1259197 - DNA, 15 bp, Homo sapiens
atgatactgaccaat

SEQ ID NO: 1259198 - DNA, 15 bp, Homo sapiens
catgatactgaccaa

SEQ ID NO: 1259199 - DNA, 15 bp, Homo sapiens
tcatgatactgacca

SEQ ID NO: 1259200 - DNA, 15 bp, Homo sapiens
ctcatgatactgacc

SEQ ID NO: 1259201 - DNA, 15 bp, Homo sapiens
cctcatgatactgac

SEQ ID NO: 1259202 - DNA, 15 bp, Homo sapiens
ccctcatgatactga

SEQ ID NO: 1259203 - DNA, 15 bp, Homo sapiens
accctcatgatactg

SEQ ID NO: 1259204 - DNA, 15 bp, Homo sapiens
gaccctcatgatact

SEQ ID NO: 1259205 - DNA, 15 bp, Homo sapiens
tgaccctcatgatac

SEQ ID NO: 1259206 - DNA, 15 bp, Homo sapiens
atgaccctcatgata

SEQ ID NO: 1259207 - DNA, 15 bp, Homo sapiens
tatgaccctcatgat

SEQ ID NO: 1259208 - DNA, 15 bp, Homo sapiens
atatgaccctcatga

SEQ ID NO: 1259209 - DNA, 15 bp, Homo sapiens
aatatgaccctcatg

SEQ ID NO: 1259210 - DNA, 15 bp, Homo sapiens
aaatatgaccctcat

SEQ ID NO: 1259211 - DNA, 15 bp, Homo sapiens
aaaatatgaccctca

SEQ ID NO: 1259212 - DNA, 15 bp, Homo sapiens
caaaatatgaccctc

SEQ ID NO: 1259213 - DNA, 15 bp, Homo sapiens
tcaaaatatgaccct

SEQ ID NO: 1259214 - DNA, 15 bp, Homo sapiens
ctcaaaatatgaccc

SEQ ID NO: 1259215 - DNA, 15 bp, Homo sapiens
tctcaaaatatgacc

SEQ ID NO: 1259216 - DNA, 15 bp, Homo sapiens
ctctcaaaatatgac

SEQ ID NO: 1259217 - DNA, 15 bp, Homo sapiens
cctctcaaaatatga

SEQ ID NO: 1259218 - DNA, 15 bp, Homo sapiens
acctctcaaaatatg

SEQ ID NO: 1259219 - DNA, 15 bp, Homo sapiens
tacctctcaaaatat

SEQ ID NO: 1259220 - DNA, 15 bp, Homo sapiens
ctacctctcaaaata

SEQ ID NO: 1259221 - DNA, 15 bp, Homo sapiens
actacctctcaaaat

SEQ ID NO: 1259222 - DNA, 15 bp, Homo sapiens
tactacctctcaaaa

SEQ ID NO: 1259223 - DNA, 15 bp, Homo sapiens
atactacctctcaaa

SEQ ID NO: 1259224 - DNA, 15 bp, Homo sapiens
catactacctctcaa

SEQ ID NO: 1259225 - DNA, 15 bp, Homo sapiens
ccatactacctctca

SEQ ID NO: 1259226 - DNA, 15 bp, Homo sapiens
tccatactacctctc

SEQ ID NO: 1259227 - DNA, 15 bp, Homo sapiens
gtccatactacctct

SEQ ID NO: 1259228 - DNA, 15 bp, Homo sapiens
agtccatactacctc

SEQ ID NO: 1259229 - DNA, 15 bp, Homo sapiens
tagtccatactacct

SEQ ID NO: 1259230 - DNA, 15 bp, Homo sapiens
gtagtccatactacc

SEQ ID NO: 1259231 - DNA, 15 bp, Homo sapiens
agtagtccatactac

SEQ ID NO: 1259232 - DNA, 15 bp, Homo sapiens
cagtagtccatacta

SEQ ID NO: 1259233 - DNA, 15 bp, Homo sapiens
acagtagtccatact

SEQ ID NO: 1259234 - DNA, 15 bp, Homo sapiens
cacagtagtccatac

SEQ ID NO: 1259235 - DNA, 15 bp, Homo sapiens
acacagtagtccata

SEQ ID NO: 1259236 - DNA, 15 bp, Homo sapiens
aacacagtagtccat

SEQ ID NO: 1259237 - DNA, 15 bp, Homo sapiens
aaacacagtagtcca

SEQ ID NO: 1259238 - DNA, 15 bp, Homo sapiens
gaaacacagtagtcc

SEQ ID NO: 1259239 - DNA, 15 bp, Homo sapiens
tgaaacacagtagtc

SEQ ID NO: 1259240 - DNA, 15 bp, Homo sapiens
ctgaaacacagtagt

SEQ ID NO: 1259241 - DNA, 15 bp, Homo sapiens
cctgaaacacagtag

SEQ ID NO: 1259242 - DNA, 15 bp, Homo sapiens
tcctgaaacacagta

SEQ ID NO: 1259243 - DNA, 15 bp, Homo sapiens
gtcctgaaacacagt

SEQ ID NO: 1259244 - DNA, 15 bp, Homo sapiens
tgtcctgaaacacag

SEQ ID NO: 1259245 - DNA, 15 bp, Homo sapiens
ttgtcctgaaacaca

SEQ ID NO: 1259246 - DNA, 15 bp, Homo sapiens
attgtcctgaaacac

SEQ ID NO: 1259247 - DNA, 15 bp, Homo sapiens
gattgtcctgaaaca

SEQ ID NO: 1259248 - DNA, 15 bp, Homo sapiens
agattgtcctgaaac

SEQ ID NO: 1259249 - DNA, 15 bp, Homo sapiens
cagattgtcctgaaa

SEQ ID NO: 1259250 - DNA, 15 bp, Homo sapiens
acagattgtcctgaa

SEQ ID NO: 1259251 - DNA, 15 bp, Homo sapiens
gacagattgtcctga

SEQ ID NO: 1259252 - DNA, 15 bp, Homo sapiens
agacagattgtcctg

SEQ ID NO: 1259253 - DNA, 15 bp, Homo sapiens
cagacagattgtcct

SEQ ID NO: 1259254 - DNA, 15 bp, Homo sapiens
ccagacagattgtcc

SEQ ID NO: 1259255 - DNA, 15 bp, Homo sapiens
cccagacagattgtc

SEQ ID NO: 1259256 - DNA, 15 bp, Homo sapiens
acccagacagattgt

SEQ ID NO: 1259257 - DNA, 15 bp, Homo sapiens
cacccagacagattg

SEQ ID NO: 1259258 - DNA, 15 bp, Homo sapiens
ccacccagacagatt

SEQ ID NO: 1259259 - DNA, 15 bp, Homo sapiens
tccacccagacagat

SEQ ID NO: 1259260 - DNA, 15 bp, Homo sapiens
ctccacccagacaga

SEQ ID NO: 1259261 - DNA, 15 bp, Homo sapiens
cctccacccagacag

SEQ ID NO: 1259262 - DNA, 15 bp, Homo sapiens
tcctccacccagaca

SEQ ID NO: 1259263 - DNA, 15 bp, Homo sapiens
ttcctccacccagac

SEQ ID NO: 1259264 - DNA, 15 bp, Homo sapiens
cttcctccacccaga

SEQ ID NO: 1259265 - DNA, 15 bp, Homo sapiens
ccttcctccacccag

SEQ ID NO: 1259266 - DNA, 15 bp, Homo sapiens
tccttcctccaccca

SEQ ID NO: 1259267 - DNA, 15 bp, Homo sapiens
ctccttcctccaccc

SEQ ID NO: 1259268 - DNA, 15 bp, Homo sapiens
tctccttcctccacc

SEQ ID NO: 1259269 - DNA, 15 bp, Homo sapiens
ctctccttcctccac

SEQ ID NO: 1259270 - DNA, 15 bp, Homo sapiens
cctctccttcctcca

SEQ ID NO: 1259271 - DNA, 15 bp, Homo sapiens
tcctctccttcctcc

SEQ ID NO: 1259272 - DNA, 15 bp, Homo sapiens
ctcctctccttcctc

SEQ ID NO: 1259273 - DNA, 15 bp, Homo sapiens
actcctctccttcct

SEQ ID NO: 1259274 - DNA, 15 bp, Homo sapiens
aactcctctccttcc

SEQ ID NO: 1259275 - DNA, 15 bp, Homo sapiens
aaactcctctccttc

SEQ ID NO: 1259276 - DNA, 15 bp, Homo sapiens
taaactcctctcctt

SEQ ID NO: 1259277 - DNA, 15 bp, Homo sapiens
ataaactcctctcct

SEQ ID NO: 1259278 - DNA, 15 bp, Homo sapiens
tataaactcctctcc

SEQ ID NO: 1259279 - DNA, 15 bp, Homo sapiens
atataaactcctctc

SEQ ID NO: 1259280 - DNA, 15 bp, Homo sapiens
catataaactcctct

SEQ ID NO: 1259281 - DNA, 15 bp, Homo sapiens
gcatataaactcctc

SEQ ID NO: 1259282 - DNA, 15 bp, Homo sapiens
agcatataaactcct

SEQ ID NO: 1259283 - DNA, 15 bp, Homo sapiens
cagcatataaactcc

SEQ ID NO: 1259284 - DNA, 15 bp, Homo sapiens
ccagcatataaactc

SEQ ID NO: 1259285 - DNA, 15 bp, Homo sapiens
tccagcatataaact

SEQ ID NO: 1259286 - DNA, 15 bp, Homo sapiens
gtccagcatataaac

SEQ ID NO: 1259287 - DNA, 15 bp, Homo sapiens
ggtccagcatataaa

SEQ ID NO: 1259288 - DNA, 15 bp, Homo sapiens
gggtccagcatataa

SEQ ID NO: 1259289 - DNA, 15 bp, Homo sapiens
tgggtccagcatata

SEQ ID NO: 1259290 - DNA, 15 bp, Homo sapiens
atgggtccagcatat

SEQ ID NO: 1259291 - DNA, 15 bp, Homo sapiens
gatgggtccagcata

SEQ ID NO: 1259292 - DNA, 15 bp, Homo sapiens
agatgggtccagcat

SEQ ID NO: 1259293 - DNA, 15 bp, Homo sapiens
aagatgggtccagca

SEQ ID NO: 1259294 - DNA, 15 bp, Homo sapiens
caagatgggtccagc

SEQ ID NO: 1259295 - DNA, 15 bp, Homo sapiens
acaagatgggtccag

SEQ ID NO: 1259296 - DNA, 15 bp, Homo sapiens
aacaagatgggtcca

SEQ ID NO: 1259297 - DNA, 15 bp, Homo sapiens
aaacaagatgggtcc

SEQ ID NO: 1259298 - DNA, 15 bp, Homo sapiens
aaaacaagatgggtc

SEQ ID NO: 1259299 - DNA, 15 bp, Homo sapiens
caaaacaagatgggt

SEQ ID NO: 1259300 - DNA, 15 bp, Homo sapiens
tcaaaacaagatggg

SEQ ID NO: 1259301 - DNA, 15 bp, Homo sapiens
atcaaaacaagatgg

SEQ ID NO: 1259302 - DNA, 15 bp, Homo sapiens
aatcaaaacaagatg

SEQ ID NO: 1259303 - DNA, 15 bp, Homo sapiens
taatcaaaacaagat

SEQ ID NO: 1259304 - DNA, 15 bp, Homo sapiens
ctaatcaaaacaaga

SEQ ID NO: 1259305 - DNA, 15 bp, Homo sapiens
tctaatcaaaacaag

SEQ ID NO: 1259306 - DNA, 15 bp, Homo sapiens
atctaatcaaaacaa

SEQ ID NO: 1259307 - DNA, 15 bp, Homo sapiens
aatctaatcaaaaca

SEQ ID NO: 1259308 - DNA, 15 bp, Homo sapiens
aaatctaatcaaaac

SEQ ID NO: 1259309 - DNA, 15 bp, Homo sapiens
taaatctaatcaaaa

SEQ ID NO: 1259310 - DNA, 15 bp, Homo sapiens
gtaaatctaatcaaa

SEQ ID NO: 1259311 - DNA, 15 bp, Homo sapiens
ggtaaatctaatcaa

SEQ ID NO: 1259312 - DNA, 15 bp, Homo sapiens
gggtaaatctaatca

SEQ ID NO: 1259313 - DNA, 15 bp, Homo sapiens
ggggtaaatctaatc

SEQ ID NO: 1259314 - DNA, 15 bp, Homo sapiens
tggggtaaatctaat

SEQ ID NO: 1259315 - DNA, 15 bp, Homo sapiens
ttggggtaaatctaa

SEQ ID NO: 1259316 - DNA, 15 bp, Homo sapiens
cttggggtaaatcta

SEQ ID NO: 1259317 - DNA, 15 bp, Homo sapiens
ccttggggtaaatct

SEQ ID NO: 1259318 - DNA, 15 bp, Homo sapiens
tccttggggtaaatc

SEQ ID NO: 1259319 - DNA, 15 bp, Homo sapiens
gtccttggggtaaat

SEQ ID NO: 1259320 - DNA, 15 bp, Homo sapiens
tgtccttggggtaaa

SEQ ID NO: 1259321 - DNA, 15 bp, Homo sapiens
atgtccttggggtaa

SEQ ID NO: 1259322 - DNA, 15 bp, Homo sapiens
aatgtccttggggta

SEQ ID NO: 1259323 - DNA, 15 bp, Homo sapiens
taatgtccttggggt

SEQ ID NO: 1259324 - DNA, 15 bp, Homo sapiens
ttaatgtccttgggg

SEQ ID NO: 1259325 - DNA, 15 bp, Homo sapiens
gttaatgtccttggg

SEQ ID NO: 1259326 - DNA, 15 bp, Homo sapiens
agttaatgtccttgg

SEQ ID NO: 1259327 - DNA, 15 bp, Homo sapiens
gagttaatgtccttg

SEQ ID NO: 1259328 - DNA, 15 bp, Homo sapiens
ggagttaatgtcctt

SEQ ID NO: 1259329 - DNA, 15 bp, Homo sapiens
tggagttaatgtcct

SEQ ID NO: 1259330 - DNA, 15 bp, Homo sapiens
gtggagttaatgtcc

SEQ ID NO: 1259331 - DNA, 15 bp, Homo sapiens
agtggagttaatgtc

SEQ ID NO: 1259332 - DNA, 15 bp, Homo sapiens
cagtggagttaatgt

SEQ ID NO: 1259333 - DNA, 15 bp, Homo sapiens
gcagtggagttaatg

SEQ ID NO: 1259334 - DNA, 15 bp, Homo sapiens
tgcagtggagttaat

SEQ ID NO: 1259335 - DNA, 15 bp, Homo sapiens
gtgcagtggagttaa

SEQ ID NO: 1259336 - DNA, 15 bp, Homo sapiens
agtgcagtggagtta

SEQ ID NO: 1259337 - DNA, 15 bp, Homo sapiens
aagtgcagtggagtt

SEQ ID NO: 1259338 - DNA, 15 bp, Homo sapiens
taagtgcagtggagt

SEQ ID NO: 1259339 - DNA, 15 bp, Homo sapiens
gtaagtgcagtggag

SEQ ID NO: 1259340 - DNA, 15 bp, Homo sapiens
cgtaagtgcagtgga

SEQ ID NO: 1259341 - DNA, 15 bp, Homo sapiens
ccgtaagtgcagtgg

SEQ ID NO: 1259342 - DNA, 15 bp, Homo sapiens
gccgtaagtgcagtg

SEQ ID NO: 1259343 - DNA, 15 bp, Homo sapiens
agccgtaagtgcagt

SEQ ID NO: 1259344 - DNA, 15 bp, Homo sapiens
tagccgtaagtgcag

SEQ ID NO: 1259345 - DNA, 15 bp, Homo sapiens
gtagccgtaagtgca

SEQ ID NO: 1259346 - DNA, 15 bp, Homo sapiens
tgtagccgtaagtgc

SEQ ID NO: 1259347 - DNA, 15 bp, Homo sapiens
gtgtagccgtaagtg

SEQ ID NO: 1259348 - DNA, 15 bp, Homo sapiens
agtgtagccgtaagt

SEQ ID NO: 1259349 - DNA, 15 bp, Homo sapiens
aagtgtagccgtaag

SEQ ID NO: 1259350 - DNA, 15 bp, Homo sapiens
aaagtgtagccgtaa

SEQ ID NO: 1259351 - DNA, 15 bp, Homo sapiens
caaagtgtagccgta

SEQ ID NO: 1259352 - DNA, 15 bp, Homo sapiens
acaaagtgtagccgt

SEQ ID NO: 1259353 - DNA, 15 bp, Homo sapiens
aacaaagtgtagccg

SEQ ID NO: 1259354 - DNA, 15 bp, Homo sapiens
taacaaagtgtagcc

SEQ ID NO: 1259355 - DNA, 15 bp, Homo sapiens
ctaacaaagtgtagc

SEQ ID NO: 1259356 - DNA, 15 bp, Homo sapiens
tctaacaaagtgtag

SEQ ID NO: 1259357 - DNA, 15 bp, Homo sapiens
ttctaacaaagtgta

SEQ ID NO: 1259358 - DNA, 15 bp, Homo sapiens
cttctaacaaagtgt

SEQ ID NO: 1259359 - DNA, 15 bp, Homo sapiens
gcttctaacaaagtg

SEQ ID NO: 1259360 - DNA, 15 bp, Homo sapiens
ggcttctaacaaagt

SEQ ID NO: 1259361 - DNA, 15 bp, Homo sapiens
gggcttctaacaaag

SEQ ID NO: 1259362 - DNA, 15 bp, Homo sapiens
tgggcttctaacaaa

SEQ ID NO: 1259363 - DNA, 15 bp, Homo sapiens
ttgggcttctaacaa

SEQ ID NO: 1259364 - DNA, 15 bp, Homo sapiens
gttgggcttctaaca

SEQ ID NO: 1259365 - DNA, 15 bp, Homo sapiens
tgttgggcttctaac

SEQ ID NO: 1259366 - DNA, 15 bp, Homo sapiens
ctgttgggcttctaa

SEQ ID NO: 1259367 - DNA, 15 bp, Homo sapiens
actgttgggcttcta

SEQ ID NO: 1259368 - DNA, 15 bp, Homo sapiens
aactgttgggcttct

SEQ ID NO: 1259369 - DNA, 15 bp, Homo sapiens
taactgttgggcttc

SEQ ID NO: 1259370 - DNA, 15 bp, Homo sapiens
ctaactgttgggctt

SEQ ID NO: 1259371 - DNA, 15 bp, Homo sapiens
cctaactgttgggct

SEQ ID NO: 1259372 - DNA, 15 bp, Homo sapiens
gcctaactgttgggc

SEQ ID NO: 1259373 - DNA, 15 bp, Homo sapiens
tgcctaactgttggg

SEQ ID NO: 1259374 - DNA, 15 bp, Homo sapiens
gtgcctaactgttgg

SEQ ID NO: 1259375 - DNA, 15 bp, Homo sapiens
agtgcctaactgttg

SEQ ID NO: 1259376 - DNA, 15 bp, Homo sapiens
tagtgcctaactgtt

SEQ ID NO: 1259377 - DNA, 15 bp, Homo sapiens
atagtgcctaactgt

SEQ ID NO: 1259378 - DNA, 15 bp, Homo sapiens
gatagtgcctaactg

SEQ ID NO: 1259379 - DNA, 15 bp, Homo sapiens
agatagtgcctaact

SEQ ID NO: 1259380 - DNA, 15 bp, Homo sapiens
gagatagtgcctaac

SEQ ID NO: 1259381 - DNA, 15 bp, Homo sapiens
tgagatagtgcctaa

SEQ ID NO: 1259382 - DNA, 15 bp, Homo sapiens
ctgagatagtgccta

SEQ ID NO: 1259383 - DNA, 15 bp, Homo sapiens
gctgagatagtgcct

SEQ ID NO: 1259384 - DNA, 15 bp, Homo sapiens
ggctgagatagtgcc

SEQ ID NO: 1259385 - DNA, 15 bp, Homo sapiens
gggctgagatagtgc

SEQ ID NO: 1259386 - DNA, 15 bp, Homo sapiens
agggctgagatagtg

SEQ ID NO: 1259387 - DNA, 15 bp, Homo sapiens
gagggctgagatagt

SEQ ID NO: 1259388 - DNA, 15 bp, Homo sapiens
agagggctgagatag

SEQ ID NO: 1259389 - DNA, 15 bp, Homo sapiens
aagagggctgagata

SEQ ID NO: 1259390 - DNA, 15 bp, Homo sapiens
caagagggctgagat

SEQ ID NO: 1259391 - DNA, 15 bp, Homo sapiens
ccaagagggctgaga

SEQ ID NO: 1259392 - DNA, 15 bp, Homo sapiens
cccaagagggctgag

SEQ ID NO: 1259393 - DNA, 15 bp, Homo sapiens
ccccaagagggctga

SEQ ID NO: 1259394 - DNA, 15 bp, Homo sapiens
accccaagagggctg

SEQ ID NO: 1259395 - DNA, 15 bp, Homo sapiens
caccccaagagggct

SEQ ID NO: 1259396 - DNA, 15 bp, Homo sapiens
ccaccccaagagggc

SEQ ID NO: 1259397 - DNA, 15 bp, Homo sapiens
cccaccccaagaggg

SEQ ID NO: 1259398 - DNA, 15 bp, Homo sapiens
tcccaccccaagagg

SEQ ID NO: 1259399 - DNA, 15 bp, Homo sapiens
ctcccaccccaagag

SEQ ID NO: 1259400 - DNA, 15 bp, Homo sapiens
cctcccaccccaaga

SEQ ID NO: 1259401 - DNA, 15 bp, Homo sapiens
acctcccaccccaag

SEQ ID NO: 1259402 - DNA, 15 bp, Homo sapiens
cacctcccaccccaa

SEQ ID NO: 1259403 - DNA, 15 bp, Homo sapiens
tcacctcccacccca

SEQ ID NO: 1259404 - DNA, 15 bp, Homo sapiens
ctcacctcccacccc

SEQ ID NO: 1259405 - DNA, 15 bp, Homo sapiens
tctcacctcccaccc

SEQ ID NO: 1259406 - DNA, 15 bp, Homo sapiens
atctcacctcccacc

SEQ ID NO: 1259407 - DNA, 15 bp, Homo sapiens
catctcacctcccac

SEQ ID NO: 1259408 - DNA, 15 bp, Homo sapiens
acatctcacctccca

SEQ ID NO: 1259409 - DNA, 15 bp, Homo sapiens
cacatctcacctccc

SEQ ID NO: 1259410 - DNA, 15 bp, Homo sapiens
acacatctcacctcc

SEQ ID NO: 1259411 - DNA, 15 bp, Homo sapiens
cacacatctcacctc

SEQ ID NO: 1259412 - DNA, 15 bp, Homo sapiens
acacacatctcacct

SEQ ID NO: 1259413 - DNA, 15 bp, Homo sapiens
cacacacatctcacc

SEQ ID NO: 1259414 - DNA, 15 bp, Homo sapiens
ccacacacatctcac

SEQ ID NO: 1259415 - DNA, 15 bp, Homo sapiens
gccacacacatctca

SEQ ID NO: 1259416 - DNA, 15 bp, Homo sapiens
agccacacacatctc

SEQ ID NO: 1259417 - DNA, 15 bp, Homo sapiens
aagccacacacatct

SEQ ID NO: 1259418 - DNA, 15 bp, Homo sapiens
caagccacacacatc

SEQ ID NO: 1259419 - DNA, 15 bp, Homo sapiens
ccaagccacacacat

SEQ ID NO: 1259420 - DNA, 15 bp, Homo sapiens
cccaagccacacaca

SEQ ID NO: 1259421 - DNA, 15 bp, Homo sapiens
ccccaagccacacac

SEQ ID NO: 1259422 - DNA, 15 bp, Homo sapiens
tccccaagccacaca

SEQ ID NO: 1259423 - DNA, 15 bp, Homo sapiens
ttccccaagccacac

SEQ ID NO: 1259424 - DNA, 15 bp, Homo sapiens
tttccccaagccaca

SEQ ID NO: 1259425 - DNA, 15 bp, Homo sapiens
ctttccccaagccac

SEQ ID NO: 1259426 - DNA, 15 bp, Homo sapiens
cctttccccaagcca

SEQ ID NO: 1259427 - DNA, 15 bp, Homo sapiens
ccctttccccaagcc

SEQ ID NO: 1259428 - DNA, 15 bp, Homo sapiens
tccctttccccaagc

SEQ ID NO: 1259429 - DNA, 15 bp, Homo sapiens
ctccctttccccaag

SEQ ID NO: 1259430 - DNA, 15 bp, Homo sapiens
cctccctttccccaa

SEQ ID NO: 1259431 - DNA, 15 bp, Homo sapiens
ccctccctttcccca

SEQ ID NO: 1259432 - DNA, 15 bp, Homo sapiens
cccctccctttcccc

SEQ ID NO: 1259433 - DNA, 15 bp, Homo sapiens
tcccctccctttccc

SEQ ID NO: 1259434 - DNA, 15 bp, Homo sapiens
ttcccctccctttcc

SEQ ID NO: 1259435 - DNA, 15 bp, Homo sapiens
gttcccctccctttc

SEQ ID NO: 1259436 - DNA, 15 bp, Homo sapiens
ggttcccctcccttt

SEQ ID NO: 1259437 - DNA, 15 bp, Homo sapiens
tggttcccctccctt

SEQ ID NO: 1259438 - DNA, 15 bp, Homo sapiens
gtggttcccctccct

SEQ ID NO: 1259439 - DNA, 15 bp, Homo sapiens
agtggttcccctccc

SEQ ID NO: 1259440 - DNA, 15 bp, Homo sapiens
cagtggttcccctcc

SEQ ID NO: 1259441 - DNA, 15 bp, Homo sapiens
ccagtggttcccctc

SEQ ID NO: 1259442 - DNA, 15 bp, Homo sapiens
cccagtggttcccct

SEQ ID NO: 1259443 - DNA, 15 bp, Homo sapiens
tcccagtggttcccc

SEQ ID NO: 1259444 - DNA, 15 bp, Homo sapiens
atcccagtggttccc

SEQ ID NO: 1259445 - DNA, 15 bp, Homo sapiens
catcccagtggttcc

SEQ ID NO: 1259446 - DNA, 15 bp, Homo sapiens
acatcccagtggttc

SEQ ID NO: 1259447 - DNA, 15 bp, Homo sapiens
cacatcccagtggtt

SEQ ID NO: 1259448 - DNA, 15 bp, Homo sapiens
gcacatcccagtggt

SEQ ID NO: 1259449 - DNA, 15 bp, Homo sapiens
ggcacatcccagtgg

SEQ ID NO: 1259450 - DNA, 15 bp, Homo sapiens
tggcacatcccagtg

SEQ ID NO: 1259451 - DNA, 15 bp, Homo sapiens
ttggcacatcccagt

SEQ ID NO: 1259452 - DNA, 15 bp, Homo sapiens
attggcacatcccag

SEQ ID NO: 1259453 - DNA, 15 bp, Homo sapiens
cattggcacatccca

SEQ ID NO: 1259454 - DNA, 15 bp, Homo sapiens
acattggcacatccc

SEQ ID NO: 1259455 - DNA, 15 bp, Homo sapiens
tacattggcacatcc

SEQ ID NO: 1259456 - DNA, 15 bp, Homo sapiens
ttacattggcacatc

SEQ ID NO: 1259457 - DNA, 15 bp, Homo sapiens
tttacattggcacat

SEQ ID NO: 1259458 - DNA, 15 bp, Homo sapiens
ctttacattggcaca

SEQ ID NO: 1259459 - DNA, 15 bp, Homo sapiens
actttacattggcac

SEQ ID NO: 1259460 - DNA, 15 bp, Homo sapiens
gactttacattggca

SEQ ID NO: 1259461 - DNA, 15 bp, Homo sapiens
agactttacattggc

SEQ ID NO: 1259462 - DNA, 15 bp, Homo sapiens
cagactttacattgg

SEQ ID NO: 1259463 - DNA, 15 bp, Homo sapiens
acagactttacattg

SEQ ID NO: 1259464 - DNA, 15 bp, Homo sapiens
aacagactttacatt

SEQ ID NO: 1259465 - DNA, 15 bp, Homo sapiens
caacagactttacat

SEQ ID NO: 1259466 - DNA, 15 bp, Homo sapiens
gcaacagactttaca

SEQ ID NO: 1259467 - DNA, 15 bp, Homo sapiens
agcaacagactttac

SEQ ID NO: 1259468 - DNA, 15 bp, Homo sapiens
aagcaacagacttta

SEQ ID NO: 1259469 - DNA, 15 bp, Homo sapiens
gaagcaacagacttt

SEQ ID NO: 1259470 - DNA, 15 bp, Homo sapiens
tgaagcaacagactt

SEQ ID NO: 1259471 - DNA, 15 bp, Homo sapiens
ctgaagcaacagact

SEQ ID NO: 1259472 - DNA, 15 bp, Homo sapiens
actgaagcaacagac

SEQ ID NO: 1259473 - DNA, 15 bp, Homo sapiens
tactgaagcaacaga

SEQ ID NO: 1259474 - DNA, 15 bp, Homo sapiens
ctactgaagcaacag

SEQ ID NO: 1259475 - DNA, 15 bp, Homo sapiens
actactgaagcaaca

SEQ ID NO: 1259476 - DNA, 15 bp, Homo sapiens
gactactgaagcaac

SEQ ID NO: 1259477 - DNA, 15 bp, Homo sapiens
agactactgaagcaa

SEQ ID NO: 1259478 - DNA, 15 bp, Homo sapiens
gagactactgaagca

SEQ ID NO: 1259479 - DNA, 15 bp, Homo sapiens
agagactactgaagc

SEQ ID NO: 1259480 - DNA, 15 bp, Homo sapiens
cagagactactgaag

SEQ ID NO: 1259481 - DNA, 15 bp, Homo sapiens
ccagagactactgaa

SEQ ID NO: 1259482 - DNA, 15 bp, Homo sapiens
cccagagactactga

SEQ ID NO: 1259483 - DNA, 15 bp, Homo sapiens
gcccagagactactg

SEQ ID NO: 1259484 - DNA, 15 bp, Homo sapiens
tgcccagagactact

SEQ ID NO: 1259485 - DNA, 15 bp, Homo sapiens
ctgcccagagactac

SEQ ID NO: 1259486 - DNA, 15 bp, Homo sapiens
cctgcccagagacta

SEQ ID NO: 1259487 - DNA, 15 bp, Homo sapiens
ccctgcccagagact

SEQ ID NO: 1259488 - DNA, 15 bp, Homo sapiens
gccctgcccagagac

SEQ ID NO: 1259489 - DNA, 15 bp, Homo sapiens
ggccctgcccagaga

SEQ ID NO: 1259490 - DNA, 15 bp, Homo sapiens
gggccctgcccagag

SEQ ID NO: 1259491 - DNA, 15 bp, Homo sapiens
tgggccctgcccaga

SEQ ID NO: 1259492 - DNA, 15 bp, Homo sapiens
atgggccctgcccag

SEQ ID NO: 1259493 - DNA, 15 bp, Homo sapiens
tatgggccctgccca

SEQ ID NO: 1259494 - DNA, 15 bp, Homo sapiens
gtatgggccctgccc

SEQ ID NO: 1259495 - DNA, 15 bp, Homo sapiens
tgtatgggccctgcc

SEQ ID NO: 1259496 - DNA, 15 bp, Homo sapiens
ctgtatgggccctgc

SEQ ID NO: 1259497 - DNA, 15 bp, Homo sapiens
actgtatgggccctg

SEQ ID NO: 1259498 - DNA, 15 bp, Homo sapiens
aactgtatgggccct

SEQ ID NO: 1259499 - DNA, 15 bp, Homo sapiens
caactgtatgggccc

SEQ ID NO: 1259500 - DNA, 15 bp, Homo sapiens
ccaactgtatgggcc

SEQ ID NO: 1259501 - DNA, 15 bp, Homo sapiens
accaactgtatgggc

SEQ ID NO: 1259502 - DNA, 15 bp, Homo sapiens
aaccaactgtatggg

SEQ ID NO: 1259503 - DNA, 15 bp, Homo sapiens
caaccaactgtatgg

SEQ ID NO: 1259504 - DNA, 15 bp, Homo sapiens
gcaaccaactgtatg

SEQ ID NO: 1259505 - DNA, 15 bp, Homo sapiens
agcaaccaactgtat

SEQ ID NO: 1259506 - DNA, 15 bp, Homo sapiens
tagcaaccaactgta

SEQ ID NO: 1259507 - DNA, 15 bp, Homo sapiens
atagcaaccaactgt

SEQ ID NO: 1259508 - DNA, 15 bp, Homo sapiens
catagcaaccaactg

SEQ ID NO: 1259509 - DNA, 15 bp, Homo sapiens
ccatagcaaccaact

SEQ ID NO: 1259510 - DNA, 15 bp, Homo sapiens
accatagcaaccaac

SEQ ID NO: 1259511 - DNA, 15 bp, Homo sapiens
caccatagcaaccaa

SEQ ID NO: 1259512 - DNA, 15 bp, Homo sapiens
ccaccatagcaacca

SEQ ID NO: 1259513 - DNA, 15 bp, Homo sapiens
gccaccatagcaacc

SEQ ID NO: 1259514 - DNA, 15 bp, Homo sapiens
tgccaccatagcaac

SEQ ID NO: 1259515 - DNA, 15 bp, Homo sapiens
ctgccaccatagcaa

SEQ ID NO: 1259516 - DNA, 15 bp, Homo sapiens
actgccaccatagca

SEQ ID NO: 1259517 - DNA, 15 bp, Homo sapiens
aactgccaccatagc

SEQ ID NO: 1259518 - DNA, 15 bp, Homo sapiens
caactgccaccatag

SEQ ID NO: 1259519 - DNA, 15 bp, Homo sapiens
ccaactgccaccata

SEQ ID NO: 1259520 - DNA, 15 bp, Homo sapiens
cccaactgccaccat

SEQ ID NO: 1259521 - DNA, 15 bp, Homo sapiens
ccccaactgccacca

SEQ ID NO: 1259522 - DNA, 15 bp, Homo sapiens
tccccaactgccacc

SEQ ID NO: 1259523 - DNA, 15 bp, Homo sapiens
ttccccaactgccac

SEQ ID NO: 1259524 - DNA, 15 bp, Homo sapiens
tttccccaactgcca

SEQ ID NO: 1259525 - DNA, 15 bp, Homo sapiens
ttttccccaactgcc

SEQ ID NO: 1259526 - DNA, 15 bp, Homo sapiens
gttttccccaactgc

SEQ ID NO: 1259527 - DNA, 15 bp, Homo sapiens
tgttttccccaactg

SEQ ID NO: 1259528 - DNA, 15 bp, Homo sapiens
ttgttttccccaact

SEQ ID NO: 1259529 - DNA, 15 bp, Homo sapiens
cttgttttccccaac

SEQ ID NO: 1259530 - DNA, 15 bp, Homo sapiens
acttgttttccccaa

SEQ ID NO: 1259531 - DNA, 15 bp, Homo sapiens
cacttgttttcccca

SEQ ID NO: 1259532 - DNA, 15 bp, Homo sapiens
ccacttgttttcccc

SEQ ID NO: 1259533 - DNA, 15 bp, Homo sapiens
accacttgttttccc

SEQ ID NO: 1259534 - DNA, 15 bp, Homo sapiens
gaccacttgttttcc

SEQ ID NO: 1259535 - DNA, 15 bp, Homo sapiens
tgaccacttgttttc

SEQ ID NO: 1259536 - DNA, 15 bp, Homo sapiens
ttgaccacttgtttt

SEQ ID NO: 1259537 - DNA, 15 bp, Homo sapiens
attgaccacttgttt

SEQ ID NO: 1259538 - DNA, 15 bp, Homo sapiens
cattgaccacttgtt

SEQ ID NO: 1259539 - DNA, 15 bp, Homo sapiens
tcattgaccacttgt

SEQ ID NO: 1259540 - DNA, 15 bp, Homo sapiens
gtcattgaccacttg

SEQ ID NO: 1259541 - DNA, 15 bp, Homo sapiens
ggtcattgaccactt

SEQ ID NO: 1259542 - DNA, 15 bp, Homo sapiens
gggtcattgaccact

SEQ ID NO: 1259543 - DNA, 15 bp, Homo sapiens
agggtcattgaccac

SEQ ID NO: 1259544 - DNA, 15 bp, Homo sapiens
cagggtcattgacca

SEQ ID NO: 1259545 - DNA, 15 bp, Homo sapiens
ccagggtcattgacc

SEQ ID NO: 1259546 - DNA, 15 bp, Homo sapiens
tccagggtcattgac

SEQ ID NO: 1259547 - DNA, 15 bp, Homo sapiens
ctccagggtcattga

SEQ ID NO: 1259548 - DNA, 15 bp, Homo sapiens
actccagggtcattg

SEQ ID NO: 1259549 - DNA, 15 bp, Homo sapiens
aactccagggtcatt

SEQ ID NO: 1259550 - DNA, 15 bp, Homo sapiens
taactccagggtcat

SEQ ID NO: 1259551 - DNA, 15 bp, Homo sapiens
ctaactccagggtca

SEQ ID NO: 1259552 - DNA, 15 bp, Homo sapiens
cctaactccagggtc

SEQ ID NO: 1259553 - DNA, 15 bp, Homo sapiens
gcctaactccagggt

SEQ ID NO: 1259554 - DNA, 15 bp, Homo sapiens
ggcctaactccaggg

SEQ ID NO: 1259555 - DNA, 15 bp, Homo sapiens
tggcctaactccagg

SEQ ID NO: 1259556 - DNA, 15 bp, Homo sapiens
ctggcctaactccag

SEQ ID NO: 1259557 - DNA, 15 bp, Homo sapiens
cctggcctaactcca

SEQ ID NO: 1259558 - DNA, 15 bp, Homo sapiens
gcctggcctaactcc

SEQ ID NO: 1259559 - DNA, 15 bp, Homo sapiens
agcctggcctaactc

SEQ ID NO: 1259560 - DNA, 15 bp, Homo sapiens
cagcctggcctaact

SEQ ID NO: 1259561 - DNA, 15 bp, Homo sapiens
acagcctggcctaac

SEQ ID NO: 1259562 - DNA, 15 bp, Homo sapiens
aacagcctggcctaa

SEQ ID NO: 1259563 - DNA, 15 bp, Homo sapiens
aaacagcctggccta

SEQ ID NO: 1259564 - DNA, 15 bp, Homo sapiens
caaacagcctggcct

SEQ ID NO: 1259565 - DNA, 15 bp, Homo sapiens
ccaaacagcctggcc

SEQ ID NO: 1259566 - DNA, 15 bp, Homo sapiens
gccaaacagcctggc

SEQ ID NO: 1259567 - DNA, 15 bp, Homo sapiens
agccaaacagcctgg

SEQ ID NO: 1259568 - DNA, 15 bp, Homo sapiens
aagccaaacagcctg

SEQ ID NO: 1259569 - DNA, 15 bp, Homo sapiens
taagccaaacagcct

SEQ ID NO: 1259570 - DNA, 15 bp, Homo sapiens
ataagccaaacagcc

SEQ ID NO: 1259571 - DNA, 15 bp, Homo sapiens
tataagccaaacagc

SEQ ID NO: 1259572 - DNA, 15 bp, Homo sapiens
ctataagccaaacag

SEQ ID NO: 1259573 - DNA, 15 bp, Homo sapiens
cctataagccaaaca

SEQ ID NO: 1259574 - DNA, 15 bp, Homo sapiens
acctataagccaaac

SEQ ID NO: 1259575 - DNA, 15 bp, Homo sapiens
cacctataagccaaa

SEQ ID NO: 1259576 - DNA, 15 bp, Homo sapiens
tcacctataagccaa

SEQ ID NO: 1259577 - DNA, 15 bp, Homo sapiens
gtcacctataagcca

SEQ ID NO: 1259578 - DNA, 15 bp, Homo sapiens
tgtcacctataagcc

SEQ ID NO: 1259579 - DNA, 15 bp, Homo sapiens
atgtcacctataagc

SEQ ID NO: 1259580 - DNA, 15 bp, Homo sapiens
tatgtcacctataag

SEQ ID NO: 1259581 - DNA, 15 bp, Homo sapiens
atatgtcacctataa

SEQ ID NO: 1259582 - DNA, 15 bp, Homo sapiens
tatatgtcacctata

SEQ ID NO: 1259583 - DNA, 15 bp, Homo sapiens
gtatatgtcacctat

SEQ ID NO: 1259584 - DNA, 15 bp, Homo sapiens
tgtatatgtcaccta

SEQ ID NO: 1259585 - DNA, 15 bp, Homo sapiens
gtgtatatgtcacct

SEQ ID NO: 1259586 - DNA, 15 bp, Homo sapiens
agtgtatatgtcacc

SEQ ID NO: 1259587 - DNA, 15 bp, Homo sapiens
cagtgtatatgtcac

SEQ ID NO: 1259588 - DNA, 15 bp, Homo sapiens
gcagtgtatatgtca

SEQ ID NO: 1259589 - DNA, 15 bp, Homo sapiens
agcagtgtatatgtc

SEQ ID NO: 1259590 - DNA, 15 bp, Homo sapiens
aagcagtgtatatgt

SEQ ID NO: 1259591 - DNA, 15 bp, Homo sapiens
caagcagtgtatatg

SEQ ID NO: 1259592 - DNA, 15 bp, Homo sapiens
tcaagcagtgtatat

SEQ ID NO: 1259593 - DNA, 15 bp, Homo sapiens
atcaagcagtgtata

SEQ ID NO: 1259594 - DNA, 15 bp, Homo sapiens
tatcaagcagtgtat

SEQ ID NO: 1259595 - DNA, 15 bp, Homo sapiens
atatcaagcagtgta

SEQ ID NO: 1259596 - DNA, 15 bp, Homo sapiens
catatcaagcagtgt

SEQ ID NO: 1259597 - DNA, 15 bp, Homo sapiens
acatatcaagcagtg

SEQ ID NO: 1259598 - DNA, 15 bp, Homo sapiens
gacatatcaagcagt

SEQ ID NO: 1259599 - DNA, 15 bp, Homo sapiens
agacatatcaagcag

SEQ ID NO: 1259600 - DNA, 15 bp, Homo sapiens
tagacatatcaagca

SEQ ID NO: 1259601 - DNA, 15 bp, Homo sapiens
gtagacatatcaagc

SEQ ID NO: 1259602 - DNA, 15 bp, Homo sapiens
ggtagacatatcaag

SEQ ID NO: 1259603 - DNA, 15 bp, Homo sapiens
tggtagacatatcaa

SEQ ID NO: 1259604 - DNA, 15 bp, Homo sapiens
gtggtagacatatca

SEQ ID NO: 1259605 - DNA, 15 bp, Homo sapiens
tgtggtagacatatc

SEQ ID NO: 1259606 - DNA, 15 bp, Homo sapiens
gtgtggtagacatat

SEQ ID NO: 1259607 - DNA, 15 bp, Homo sapiens
agtgtggtagacata

SEQ ID NO: 1259608 - DNA, 15 bp, Homo sapiens
cagtgtggtagacat

SEQ ID NO: 1259609 - DNA, 15 bp, Homo sapiens
gcagtgtggtagaca

SEQ ID NO: 1259610 - DNA, 15 bp, Homo sapiens
ggcagtgtggtagac

SEQ ID NO: 1259611 - DNA, 15 bp, Homo sapiens
gggcagtgtggtaga

SEQ ID NO: 1259612 - DNA, 15 bp, Homo sapiens
agggcagtgtggtag

SEQ ID NO: 1259613 - DNA, 15 bp, Homo sapiens
aagggcagtgtggta

SEQ ID NO: 1259614 - DNA, 15 bp, Homo sapiens
gaagggcagtgtggt

SEQ ID NO: 1259615 - DNA, 15 bp, Homo sapiens
agaagggcagtgtgg

SEQ ID NO: 1259616 - DNA, 15 bp, Homo sapiens
aagaagggcagtgtg

SEQ ID NO: 1259617 - DNA, 15 bp, Homo sapiens
caagaagggcagtgt

SEQ ID NO: 1259618 - DNA, 15 bp, Homo sapiens
tcaagaagggcagtg

SEQ ID NO: 1259619 - DNA, 15 bp, Homo sapiens
ttcaagaagggcagt

SEQ ID NO: 1259620 - DNA, 15 bp, Homo sapiens
attcaagaagggcag

SEQ ID NO: 1259621 - DNA, 15 bp, Homo sapiens
gattcaagaagggca

SEQ ID NO: 1259622 - DNA, 15 bp, Homo sapiens
agattcaagaagggc

SEQ ID NO: 1259623 - DNA, 15 bp, Homo sapiens
aagattcaagaaggg

SEQ ID NO: 1259624 - DNA, 15 bp, Homo sapiens
caagattcaagaagg

SEQ ID NO: 1259625 - DNA, 15 bp, Homo sapiens
ccaagattcaagaag

SEQ ID NO: 1259626 - DNA, 15 bp, Homo sapiens
accaagattcaagaa

SEQ ID NO: 1259627 - DNA, 15 bp, Homo sapiens
aaccaagattcaaga

SEQ ID NO: 1259628 - DNA, 15 bp, Homo sapiens
aaaccaagattcaag

SEQ ID NO: 1259629 - DNA, 15 bp, Homo sapiens
aaaaccaagattcaa

SEQ ID NO: 1259630 - DNA, 15 bp, Homo sapiens
gaaaaccaagattca

SEQ ID NO: 1259631 - DNA, 15 bp, Homo sapiens
cgaaaaccaagattc

SEQ ID NO: 1259632 - DNA, 15 bp, Homo sapiens
ccgaaaaccaagatt

SEQ ID NO: 1259633 - DNA, 15 bp, Homo sapiens
gccgaaaaccaagat

SEQ ID NO: 1259634 - DNA, 15 bp, Homo sapiens
tgccgaaaaccaaga

SEQ ID NO: 1259635 - DNA, 15 bp, Homo sapiens
atgccgaaaaccaag

SEQ ID NO: 1259636 - DNA, 15 bp, Homo sapiens
aatgccgaaaaccaa

SEQ ID NO: 1259637 - DNA, 15 bp, Homo sapiens
aaatgccgaaaacca

SEQ ID NO: 1259638 - DNA, 15 bp, Homo sapiens
gaaatgccgaaaacc

SEQ ID NO: 1259639 - DNA, 15 bp, Homo sapiens
agaaatgccgaaaac

SEQ ID NO: 1259640 - DNA, 15 bp, Homo sapiens
aagaaatgccgaaaa

SEQ ID NO: 1259641 - DNA, 15 bp, Homo sapiens
aaagaaatgccgaaa

SEQ ID NO: 1259642 - DNA, 15 bp, Homo sapiens
taaagaaatgccgaa

SEQ ID NO: 1259643 - DNA, 15 bp, Homo sapiens
ttaaagaaatgccga

SEQ ID NO: 1259644 - DNA, 15 bp, Homo sapiens
attaaagaaatgccg

SEQ ID NO: 1259645 - DNA, 15 bp, Homo sapiens
aattaaagaaatgcc

SEQ ID NO: 1259646 - DNA, 15 bp, Homo sapiens
gaattaaagaaatgc

SEQ ID NO: 1259647 - DNA, 15 bp, Homo sapiens
agaattaaagaaatg

SEQ ID NO: 1259648 - DNA, 15 bp, Homo sapiens
tagaattaaagaaat

SEQ ID NO: 1259649 - DNA, 15 bp, Homo sapiens
atagaattaaagaaa

SEQ ID NO: 1259650 - DNA, 15 bp, Homo sapiens
aatagaattaaagaa

SEQ ID NO: 1259651 - DNA, 15 bp, Homo sapiens
aaatagaattaaaga

SEQ ID NO: 1259652 - DNA, 15 bp, Homo sapiens
taaatagaattaaag

SEQ ID NO: 1259653 - DNA, 15 bp, Homo sapiens
ctaaatagaattaaa

SEQ ID NO: 1259654 - DNA, 15 bp, Homo sapiens
actaaatagaattaa

SEQ ID NO: 1259655 - DNA, 15 bp, Homo sapiens
cactaaatagaatta

SEQ ID NO: 1259656 - DNA, 15 bp, Homo sapiens
acactaaatagaatt

SEQ ID NO: 1259657 - DNA, 15 bp, Homo sapiens
aacactaaatagaat

SEQ ID NO: 1259658 - DNA, 15 bp, Homo sapiens
gaacactaaatagaa

SEQ ID NO: 1259659 - DNA, 15 bp, Homo sapiens
agaacactaaataga

SEQ ID NO: 1259660 - DNA, 15 bp, Homo sapiens
aagaacactaaatag

SEQ ID NO: 1259661 - DNA, 15 bp, Homo sapiens
gaagaacactaaata

SEQ ID NO: 1259662 - DNA, 15 bp, Homo sapiens
ggaagaacactaaat

SEQ ID NO: 1259663 - DNA, 15 bp, Homo sapiens
tggaagaacactaaa

SEQ ID NO: 1259664 - DNA, 15 bp, Homo sapiens
ttggaagaacactaa

SEQ ID NO: 1259665 - DNA, 15 bp, Homo sapiens
attggaagaacacta

SEQ ID NO: 1259666 - DNA, 15 bp, Homo sapiens
tattggaagaacact

SEQ ID NO: 1259667 - DNA, 15 bp, Homo sapiens
ttattggaagaacac

SEQ ID NO: 1259668 - DNA, 15 bp, Homo sapiens
tttattggaagaaca

SEQ ID NO: 1259669 - DNA, 15 bp, Homo sapiens
atttattggaagaac

SEQ ID NO: 1259670 - DNA, 15 bp, Homo sapiens
aatttattggaagaa

SEQ ID NO: 1259671 - DNA, 15 bp, Homo sapiens
gaatttattggaaga

SEQ ID NO: 1259672 - DNA, 15 bp, Homo sapiens
agaatttattggaag

SEQ ID NO: 1259673 - DNA, 15 bp, Homo sapiens
gagaatttattggaa

SEQ ID NO: 1259674 - DNA, 15 bp, Homo sapiens
tgagaatttattgga

SEQ ID NO: 1259675 - DNA, 15 bp, Homo sapiens
atgagaatttattgg

SEQ ID NO: 1259676 - DNA, 15 bp, Homo sapiens
aatgagaatttattg

SEQ ID NO: 1259677 - DNA, 15 bp, Homo sapiens
aaatgagaatttatt

SEQ ID NO: 1259678 - DNA, 15 bp, Homo sapiens
aaaatgagaatttat

SEQ ID NO: 1259679 - DNA, 15 bp, Homo sapiens
aaaaatgagaattta

SEQ ID NO: 1259680 - DNA, 15 bp, Homo sapiens
aaaaaatgagaattt

SEQ ID NO: 1259681 - DNA, 15 bp, Homo sapiens
caaaaaatgagaatt

SEQ ID NO: 1259682 - DNA, 15 bp, Homo sapiens
ccaaaaaatgagaat

SEQ ID NO: 1259683 - DNA, 15 bp, Homo sapiens
accaaaaaatgagaa

SEQ ID NO: 1259684 - DNA, 15 bp, Homo sapiens
aaccaaaaaatgaga

SEQ ID NO: 1259685 - DNA, 15 bp, Homo sapiens
caaccaaaaaatgag

SEQ ID NO: 1259686 - DNA, 15 bp, Homo sapiens
gcaaccaaaaaatga

SEQ ID NO: 1259687 - DNA, 15 bp, Homo sapiens
agcaaccaaaaaatg

SEQ ID NO: 1259688 - DNA, 15 bp, Homo sapiens
tagcaaccaaaaaat

SEQ ID NO: 1259689 - DNA, 15 bp, Homo sapiens
ttagcaaccaaaaaa

SEQ ID NO: 1259690 - DNA, 15 bp, Homo sapiens
attagcaaccaaaaa

SEQ ID NO: 1259691 - DNA, 15 bp, Homo sapiens
gattagcaaccaaaa

SEQ ID NO: 1259692 - DNA, 15 bp, Homo sapiens
tgattagcaaccaaa

SEQ ID NO: 1259693 - DNA, 15 bp, Homo sapiens
ctgattagcaaccaa

SEQ ID NO: 1259694 - DNA, 15 bp, Homo sapiens
tctgattagcaacca

SEQ ID NO: 1259695 - DNA, 15 bp, Homo sapiens
ctctgattagcaacc

SEQ ID NO: 1259696 - DNA, 15 bp, Homo sapiens
gctctgattagcaac

SEQ ID NO: 1259697 - DNA, 15 bp, Homo sapiens
ggctctgattagcaa

SEQ ID NO: 1259698 - DNA, 15 bp, Homo sapiens
cggctctgattagca

SEQ ID NO: 1259699 - DNA, 15 bp, Homo sapiens
tcggctctgattagc

SEQ ID NO: 1259700 - DNA, 15 bp, Homo sapiens
atcggctctgattag

SEQ ID NO: 1259701 - DNA, 15 bp, Homo sapiens
aatcggctctgatta

SEQ ID NO: 1259702 - DNA, 15 bp, Homo sapiens
aaatcggctctgatt

SEQ ID NO: 1259703 - DNA, 15 bp, Homo sapiens
gaaatcggctctgat

SEQ ID NO: 1259704 - DNA, 15 bp, Homo sapiens
agaaatcggctctga

SEQ ID NO: 1259705 - DNA, 15 bp, Homo sapiens
cagaaatcggctctg

SEQ ID NO: 1259706 - DNA, 15 bp, Homo sapiens
acagaaatcggctct

SEQ ID NO: 1259707 - DNA, 15 bp, Homo sapiens
aacagaaatcggctc

SEQ ID NO: 1259708 - DNA, 15 bp, Homo sapiens
aaacagaaatcggct

SEQ ID NO: 1259709 - DNA, 15 bp, Homo sapiens
gaaacagaaatcggc

SEQ ID NO: 1259710 - DNA, 15 bp, Homo sapiens
tgaaacagaaatcgg

SEQ ID NO: 1259711 - DNA, 15 bp, Homo sapiens
atgaaacagaaatcg

SEQ ID NO: 1259712 - DNA, 15 bp, Homo sapiens
catgaaacagaaatc

SEQ ID NO: 1259713 - DNA, 15 bp, Homo sapiens
tcatgaaacagaaat

SEQ ID NO: 1259714 - DNA, 15 bp, Homo sapiens
ctcatgaaacagaaa

SEQ ID NO: 1259715 - DNA, 15 bp, Homo sapiens
cctcatgaaacagaa

SEQ ID NO: 1259716 - DNA, 15 bp, Homo sapiens
gcctcatgaaacaga

SEQ ID NO: 1259717 - DNA, 15 bp, Homo sapiens
ggcctcatgaaacag

SEQ ID NO: 1259718 - DNA, 15 bp, Homo sapiens
tggcctcatgaaaca

SEQ ID NO: 1259719 - DNA, 15 bp, Homo sapiens
ccttggcctcatgaa

SEQ ID NO: 1259720 - DNA, 15 bp, Homo sapiens
tccttggcctcatga

SEQ ID NO: 1259721 - DNA, 15 bp, Homo sapiens
ttccttggcctcatg

SEQ ID NO: 1259722 - DNA, 15 bp, Homo sapiens
tttccttggcctcat

SEQ ID NO: 1259723 - DNA, 15 bp, Homo sapiens
gtttccttggcctca

SEQ ID NO: 1259724 - DNA, 15 bp, Homo sapiens
tgtttccttggcctc

SEQ ID NO: 1259725 - DNA, 15 bp, Homo sapiens
ttgtttccttggcct

SEQ ID NO: 1259726 - DNA, 15 bp, Homo sapiens
attgtttccttggcc

SEQ ID NO: 1259727 - DNA, 15 bp, Homo sapiens
aattgtttccttggc

SEQ ID NO: 1259728 - DNA, 15 bp, Homo sapiens
aaattgtttccttgg

SEQ ID NO: 1259729 - DNA, 15 bp, Homo sapiens
aaaattgtttccttg

SEQ ID NO: 1259730 - DNA, 15 bp, Homo sapiens
taaaattgtttcctt

SEQ ID NO: 1259731 - DNA, 15 bp, Homo sapiens
ttaaaattgtttcct

SEQ ID NO: 1259732 - DNA, 15 bp, Homo sapiens
cttaaaattgtttcc

SEQ ID NO: 1259733 - DNA, 15 bp, Homo sapiens
gcttaaaattgtttc

SEQ ID NO: 1259734 - DNA, 15 bp, Homo sapiens
tgcttaaaattgttt

SEQ ID NO: 1259735 - DNA, 15 bp, Homo sapiens
ttgcttaaaattgtt

SEQ ID NO: 1259736 - DNA, 15 bp, Homo sapiens
attgcttaaaattgt

SEQ ID NO: 1259737 - DNA, 15 bp, Homo sapiens
tattgcttaaaattg

SEQ ID NO: 1259738 - DNA, 15 bp, Homo sapiens
atattgcttaaaatt

SEQ ID NO: 1259739 - DNA, 15 bp, Homo sapiens
aatattgcttaaaat

SEQ ID NO: 1259740 - DNA, 15 bp, Homo sapiens
aaatattgcttaaaa

SEQ ID NO: 1259741 - DNA, 15 bp, Homo sapiens
aaaatattgcttaaa

SEQ ID NO: 1259742 - DNA, 15 bp, Homo sapiens
taaaatattgcttaa

SEQ ID NO: 1259743 - DNA, 15 bp, Homo sapiens
ataaaatattgctta

SEQ ID NO: 1259744 - DNA, 15 bp, Homo sapiens
tataaaatattgctt

SEQ ID NO: 1259745 - DNA, 15 bp, Homo sapiens
gtataaaatattgct

SEQ ID NO: 1259746 - DNA, 15 bp, Homo sapiens
agtataaaatattgc

SEQ ID NO: 1259747 - DNA, 15 bp, Homo sapiens
gagtataaaatattg

SEQ ID NO: 1259748 - DNA, 15 bp, Homo sapiens
agagtataaaatatt

SEQ ID NO: 1259749 - DNA, 15 bp, Homo sapiens
gagagtataaaatat

SEQ ID NO: 1259750 - DNA, 15 bp, Homo sapiens
agagagtataaaata

SEQ ID NO: 1259751 - DNA, 15 bp, Homo sapiens
aagagagtataaaat

SEQ ID NO: 1259752 - DNA, 15 bp, Homo sapiens
aaagagagtataaaa

SEQ ID NO: 1259753 - DNA, 15 bp, Homo sapiens
taaagagagtataaa

SEQ ID NO: 1259754 - DNA, 15 bp, Homo sapiens
ctaaagagagtataa

SEQ ID NO: 1259755 - DNA, 15 bp, Homo sapiens
actaaagagagtata

SEQ ID NO: 1259756 - DNA, 15 bp, Homo sapiens
cactaaagagagtat

SEQ ID NO: 1259757 - DNA, 15 bp, Homo sapiens
gcactaaagagagta

SEQ ID NO: 1259758 - DNA, 15 bp, Homo sapiens
agcactaaagagagt

SEQ ID NO: 1259759 - DNA, 15 bp, Homo sapiens
gagcactaaagagag

SEQ ID NO: 1259760 - DNA, 15 bp, Homo sapiens
ggagcactaaagaga

SEQ ID NO: 1259761 - DNA, 15 bp, Homo sapiens
tggagcactaaagag

SEQ ID NO: 1259762 - DNA, 15 bp, Homo sapiens
ttggagcactaaaga

SEQ ID NO: 1259763 - DNA, 15 bp, Homo sapiens
tttggagcactaaag

SEQ ID NO: 1259764 - DNA, 15 bp, Homo sapiens
gtttggagcactaaa

SEQ ID NO: 1259765 - DNA, 15 bp, Homo sapiens
tgtttggagcactaa

SEQ ID NO: 1259766 - DNA, 15 bp, Homo sapiens
gtgtttggagcacta

SEQ ID NO: 1259767 - DNA, 15 bp, Homo sapiens
agtgtttggagcact

SEQ ID NO: 1259768 - DNA, 15 bp, Homo sapiens
cagtgtttggagcac

SEQ ID NO: 1259769 - DNA, 15 bp, Homo sapiens
acagtgtttggagca

SEQ ID NO: 1259770 - DNA, 15 bp, Homo sapiens
aacagtgtttggagc

SEQ ID NO: 1259771 - DNA, 15 bp, Homo sapiens
caacagtgtttggag

SEQ ID NO: 1259772 - DNA, 15 bp, Homo sapiens
acaacagtgtttgga

SEQ ID NO: 1259773 - DNA, 15 bp, Homo sapiens
tacaacagtgtttgg

SEQ ID NO: 1259774 - DNA, 15 bp, Homo sapiens
atacaacagtgtttg

SEQ ID NO: 1259775 - DNA, 15 bp, Homo sapiens
tatacaacagtgttt

SEQ ID NO: 1259776 - DNA, 15 bp, Homo sapiens
gtatacaacagtgtt

SEQ ID NO: 1259777 - DNA, 15 bp, Homo sapiens
agtatacaacagtgt

SEQ ID NO: 1259778 - DNA, 15 bp, Homo sapiens
aagtatacaacagtg

SEQ ID NO: 1259779 - DNA, 15 bp, Homo sapiens
taagtatacaacagt

SEQ ID NO: 1259780 - DNA, 15 bp, Homo sapiens
ataagtatacaacag

SEQ ID NO: 1259781 - DNA, 15 bp, Homo sapiens
aataagtatacaaca

SEQ ID NO: 1259782 - DNA, 15 bp, Homo sapiens
aaataagtatacaac

SEQ ID NO: 1259783 - DNA, 15 bp, Homo sapiens
caaataagtatacaa

SEQ ID NO: 1259784 - DNA, 15 bp, Homo sapiens
ccaaataagtataca

SEQ ID NO: 1259785 - DNA, 15 bp, Homo sapiens
accaaataagtatac

SEQ ID NO: 1259786 - DNA, 15 bp, Homo sapiens
caccaaataagtata

SEQ ID NO: 1259787 - DNA, 15 bp, Homo sapiens
gcaccaaataagtat

SEQ ID NO: 1259788 - DNA, 15 bp, Homo sapiens
agcaccaaataagta

SEQ ID NO: 1259789 - DNA, 15 bp, Homo sapiens
tagcaccaaataagt

SEQ ID NO: 1259790 - DNA, 15 bp, Homo sapiens
ttagcaccaaataag

SEQ ID NO: 1259791 - DNA, 15 bp, Homo sapiens
attagcaccaaataa

SEQ ID NO: 1259792 - DNA, 15 bp, Homo sapiens
cattagcaccaaata

SEQ ID NO: 1259793 - DNA, 15 bp, Homo sapiens
gcattagcaccaaat

SEQ ID NO: 1259794 - DNA, 15 bp, Homo sapiens
agcattagcaccaaa

SEQ ID NO: 1259795 - DNA, 15 bp, Homo sapiens
gagcattagcaccaa

SEQ ID NO: 1259796 - DNA, 15 bp, Homo sapiens
cgagcattagcacca

SEQ ID NO: 1259797 - DNA, 15 bp, Homo sapiens
tcgagcattagcacc

SEQ ID NO: 1259798 - DNA, 15 bp, Homo sapiens
atcgagcattagcac

SEQ ID NO: 1259799 - DNA, 15 bp, Homo sapiens
catcgagcattagca

SEQ ID NO: 1259800 - DNA, 15 bp, Homo sapiens
tcatcgagcattagc

SEQ ID NO: 1259801 - DNA, 15 bp, Homo sapiens
ttcatcgagcattag

SEQ ID NO: 1259802 - DNA, 15 bp, Homo sapiens
gttcatcgagcatta

SEQ ID NO: 1259803 - DNA, 15 bp, Homo sapiens
agttcatcgagcatt

SEQ ID NO: 1259804 - DNA, 15 bp, Homo sapiens
cagttcatcgagcat

SEQ ID NO: 1259805 - DNA, 15 bp, Homo sapiens
gcagttcatcgagca

SEQ ID NO: 1259806 - DNA, 15 bp, Homo sapiens
tgcagttcatcgagc

SEQ ID NO: 1259807 - DNA, 15 bp, Homo sapiens
ctgcagttcatcgag

SEQ ID NO: 1259808 - DNA, 15 bp, Homo sapiens
tctgcagttcatcga

SEQ ID NO: 1259809 - DNA, 15 bp, Homo sapiens
ttctgcagttcatcg

SEQ ID NO: 1259810 - DNA, 15 bp, Homo sapiens
tttctgcagttcatc

SEQ ID NO: 1259811 - DNA, 15 bp, Homo sapiens
atttctgcagttcat

SEQ ID NO: 1259812 - DNA, 15 bp, Homo sapiens
aatttctgcagttca

SEQ ID NO: 1259813 - DNA, 15 bp, Homo sapiens
aaatttctgcagttc

SEQ ID NO: 1259814 - DNA, 15 bp, Homo sapiens
caaatttctgcagtt

SEQ ID NO: 1259815 - DNA, 15 bp, Homo sapiens
acaaatttctgcagt

SEQ ID NO: 1259816 - DNA, 15 bp, Homo sapiens
gacaaatttctgcag

SEQ ID NO: 1259817 - DNA, 15 bp, Homo sapiens
agacaaatttctgca

SEQ ID NO: 1259818 - DNA, 15 bp, Homo sapiens
tagacaaatttctgc

SEQ ID NO: 1259819 - DNA, 15 bp, Homo sapiens
atagacaaatttctg

SEQ ID NO: 1259820 - DNA, 15 bp, Homo sapiens
catagacaaatttct

SEQ ID NO: 1259821 - DNA, 15 bp, Homo sapiens
acatagacaaatttc

SEQ ID NO: 1259822 - DNA, 15 bp, Homo sapiens
tacatagacaaattt

SEQ ID NO: 1259823 - DNA, 15 bp, Homo sapiens
gtacatagacaaatt

SEQ ID NO: 1259824 - DNA, 15 bp, Homo sapiens
agtacatagacaaat

SEQ ID NO: 1259825 - DNA, 15 bp, Homo sapiens
cagtacatagacaaa

SEQ ID NO: 1259826 - DNA, 15 bp, Homo sapiens
acagtacatagacaa

SEQ ID NO: 1259827 - DNA, 15 bp, Homo sapiens
tacagtacatagaca

SEQ ID NO: 1259828 - DNA, 15 bp, Homo sapiens
gtacagtacatagac

SEQ ID NO: 1259829 - DNA, 15 bp, Homo sapiens
ggtacagtacataga

SEQ ID NO: 1259830 - DNA, 15 bp, Homo sapiens
tggtacagtacatag

SEQ ID NO: 1259831 - DNA, 15 bp, Homo sapiens
gtggtacagtacata

SEQ ID NO: 1259832 - DNA, 15 bp, Homo sapiens
agtggtacagtacat

SEQ ID NO: 1259833 - DNA, 15 bp, Homo sapiens
aagtggtacagtaca

SEQ ID NO: 1259834 - DNA, 15 bp, Homo sapiens
taagtggtacagtac

SEQ ID NO: 1259835 - DNA, 15 bp, Homo sapiens
ataagtggtacagta

SEQ ID NO: 1259836 - DNA, 15 bp, Homo sapiens
gataagtggtacagt

SEQ ID NO: 1259837 - DNA, 15 bp, Homo sapiens
agataagtggtacag

SEQ ID NO: 1259838 - DNA, 15 bp, Homo sapiens
tagataagtggtaca

SEQ ID NO: 1259839 - DNA, 15 bp, Homo sapiens
atagataagtggtac

SEQ ID NO: 1259840 - DNA, 15 bp, Homo sapiens
gatagataagtggta

SEQ ID NO: 1259841 - DNA, 15 bp, Homo sapiens
cgatagataagtggt

SEQ ID NO: 1259842 - DNA, 15 bp, Homo sapiens
gcgatagataagtgg

SEQ ID NO: 1259843 - DNA, 15 bp, Homo sapiens
agcgatagataagtg

SEQ ID NO: 1259844 - DNA, 15 bp, Homo sapiens
cagcgatagataagt

SEQ ID NO: 1259845 - DNA, 15 bp, Homo sapiens
acagcgatagataag

SEQ ID NO: 1259846 - DNA, 15 bp, Homo sapiens
tacagcgatagataa

SEQ ID NO: 1259847 - DNA, 15 bp, Homo sapiens
atacagcgatagata

SEQ ID NO: 1259848 - DNA, 15 bp, Homo sapiens
tatacagcgatagat

SEQ ID NO: 1259849 - DNA, 15 bp, Homo sapiens
ttatacagcgataga

SEQ ID NO: 1259850 - DNA, 15 bp, Homo sapiens
gttatacagcgatag

SEQ ID NO: 1259851 - DNA, 15 bp, Homo sapiens
tgttatacagcgata

SEQ ID NO: 1259852 - DNA, 15 bp, Homo sapiens
ttgttatacagcgat

SEQ ID NO: 1259853 - DNA, 15 bp, Homo sapiens
tttgttatacagcga

SEQ ID NO: 1259854 - DNA, 15 bp, Homo sapiens
atttgttatacagcg

SEQ ID NO: 1259855 - DNA, 15 bp, Homo sapiens
aatttgttatacagc

SEQ ID NO: 1259856 - DNA, 15 bp, Homo sapiens
caatttgttatacag

SEQ ID NO: 1259857 - DNA, 15 bp, Homo sapiens
gcaatttgttataca

SEQ ID NO: 1259858 - DNA, 15 bp, Homo sapiens
ggcaatttgttatac

SEQ ID NO: 1259859 - DNA, 15 bp, Homo sapiens
gggcaatttgttata

SEQ ID NO: 1259860 - DNA, 15 bp, Homo sapiens
ggggcaatttgttat

SEQ ID NO: 1259861 - DNA, 15 bp, Homo sapiens
gggggcaatttgtta

SEQ ID NO: 1259862 - DNA, 15 bp, Homo sapiens
tgggggcaatttgtt

SEQ ID NO: 1259863 - DNA, 15 bp, Homo sapiens
ttgggggcaatttgt

SEQ ID NO: 1259864 - DNA, 15 bp, Homo sapiens
tttgggggcaatttg

SEQ ID NO: 1259865 - DNA, 15 bp, Homo sapiens
atttgggggcaattt

SEQ ID NO: 1259866 - DNA, 15 bp, Homo sapiens
aatttgggggcaatt

SEQ ID NO: 1259867 - DNA, 15 bp, Homo sapiens
taatttgggggcaat

SEQ ID NO: 1259868 - DNA, 15 bp, Homo sapiens
ttaatttgggggcaa

SEQ ID NO: 1259869 - DNA, 15 bp, Homo sapiens
attaatttgggggca

SEQ ID NO: 1259870 - DNA, 15 bp, Homo sapiens
cattaatttgggggc

SEQ ID NO: 1259871 - DNA, 15 bp, Homo sapiens
tcattaatttggggg

SEQ ID NO: 1259872 - DNA, 15 bp, Homo sapiens
gtcattaatttgggg

SEQ ID NO: 1259873 - DNA, 15 bp, Homo sapiens
agtcattaatttggg

SEQ ID NO: 1259874 - DNA, 15 bp, Homo sapiens
tagtcattaatttgg

SEQ ID NO: 1259875 - DNA, 15 bp, Homo sapiens
ttagtcattaatttg

SEQ ID NO: 1259876 - DNA, 15 bp, Homo sapiens
tttagtcattaattt

SEQ ID NO: 1259877 - DNA, 15 bp, Homo sapiens
ctttagtcattaatt

SEQ ID NO: 1259878 - DNA, 15 bp, Homo sapiens
gctttagtcattaat

SEQ ID NO: 1259879 - DNA, 15 bp, Homo sapiens
tgctttagtcattaa

SEQ ID NO: 1259880 - DNA, 15 bp, Homo sapiens
ttgctttagtcatta

SEQ ID NO: 1259881 - DNA, 15 bp, Homo sapiens
attgctttagtcatt

SEQ ID NO: 1259882 - DNA, 15 bp, Homo sapiens
tattgctttagtcat

SEQ ID NO: 1259883 - DNA, 15 bp, Homo sapiens
ttattgctttagtca

SEQ ID NO: 1259884 - DNA, 15 bp, Homo sapiens
attattgctttagtc

SEQ ID NO: 1259885 - DNA, 15 bp, Homo sapiens
cattattgctttagt

SEQ ID NO: 1259886 - DNA, 15 bp, Homo sapiens
tcattattgctttag

SEQ ID NO: 1259887 - DNA, 15 bp, Homo sapiens
atcattattgcttta

SEQ ID NO: 1259888 - DNA, 15 bp, Homo sapiens
aatcattattgcttt

SEQ ID NO: 1259889 - DNA, 15 bp, Homo sapiens
gaatcattattgctt

SEQ ID NO: 1259890 - DNA, 15 bp, Homo sapiens
tgaatcattattgct

SEQ ID NO: 1259891 - DNA, 15 bp, Homo sapiens
gtgaatcattattgc

SEQ ID NO: 1259892 - DNA, 15 bp, Homo sapiens
agtgaatcattattg

SEQ ID NO: 1259893 - DNA, 15 bp, Homo sapiens
cagtgaatcattatt

SEQ ID NO: 1259894 - DNA, 15 bp, Homo sapiens
ccagtgaatcattat

SEQ ID NO: 1259895 - DNA, 15 bp, Homo sapiens
accagtgaatcatta

SEQ ID NO: 1259896 - DNA, 15 bp, Homo sapiens
aaccagtgaatcatt

SEQ ID NO: 1259897 - DNA, 15 bp, Homo sapiens
gaaccagtgaatcat

SEQ ID NO: 1259898 - DNA, 15 bp, Homo sapiens
agaaccagtgaatca

SEQ ID NO: 1259899 - DNA, 15 bp, Homo sapiens
aagaaccagtgaatc

SEQ ID NO: 1259900 - DNA, 15 bp, Homo sapiens
gaagaaccagtgaat

SEQ ID NO: 1259901 - DNA, 15 bp, Homo sapiens
agaagaaccagtgaa

SEQ ID NO: 1259902 - DNA, 15 bp, Homo sapiens
cagaagaaccagtga

SEQ ID NO: 1259903 - DNA, 15 bp, Homo sapiens
gcagaagaaccagtg

SEQ ID NO: 1259904 - DNA, 15 bp, Homo sapiens
agcagaagaaccagt

SEQ ID NO: 1259905 - DNA, 15 bp, Homo sapiens
cagcagaagaaccag

SEQ ID NO: 1259906 - DNA, 15 bp, Homo sapiens
tcagcagaagaacca

SEQ ID NO: 1259907 - DNA, 15 bp, Homo sapiens
atcagcagaagaacc

SEQ ID NO: 1259908 - DNA, 15 bp, Homo sapiens
gatcagcagaagaac

SEQ ID NO: 1259909 - DNA, 15 bp, Homo sapiens
agatcagcagaagaa

SEQ ID NO: 1259910 - DNA, 15 bp, Homo sapiens
aagatcagcagaaga

SEQ ID NO: 1259911 - DNA, 15 bp, Homo sapiens
gaagatcagcagaag

SEQ ID NO: 1259912 - DNA, 15 bp, Homo sapiens
agaagatcagcagaa

SEQ ID NO: 1259913 - DNA, 15 bp, Homo sapiens
gagaagatcagcaga

SEQ ID NO: 1259914 - DNA, 15 bp, Homo sapiens
agagaagatcagcag

SEQ ID NO: 1259915 - DNA, 15 bp, Homo sapiens
cagagaagatcagca

SEQ ID NO: 1259916 - DNA, 15 bp, Homo sapiens
ccagagaagatcagc

SEQ ID NO: 1259917 - DNA, 15 bp, Homo sapiens
accagagaagatcag

SEQ ID NO: 1259918 - DNA, 15 bp, Homo sapiens
taccagagaagatca

SEQ ID NO: 1259919 - DNA, 15 bp, Homo sapiens
ctaccagagaagatc

SEQ ID NO: 1259920 - DNA, 15 bp, Homo sapiens
cctaccagagaagat

SEQ ID NO: 1259921 - DNA, 15 bp, Homo sapiens
acctaccagagaaga

SEQ ID NO: 1259922 - DNA, 15 bp, Homo sapiens
cacctaccagagaag

SEQ ID NO: 1259923 - DNA, 15 bp, Homo sapiens
ccacctaccagagaa

SEQ ID NO: 1259924 - DNA, 15 bp, Homo sapiens
cccacctaccagaga

SEQ ID NO: 1259925 - DNA, 15 bp, Homo sapiens
acccacctaccagag

SEQ ID NO: 1259926 - DNA, 15 bp, Homo sapiens
cacccacctaccaga

SEQ ID NO: 1259927 - DNA, 15 bp, Homo sapiens
ccacccacctaccag

SEQ ID NO: 1259928 - DNA, 15 bp, Homo sapiens
cccacccacctacca

SEQ ID NO: 1259929 - DNA, 15 bp, Homo sapiens
acccacccacctacc

SEQ ID NO: 1259930 - DNA, 15 bp, Homo sapiens
tacccacccacctac

SEQ ID NO: 1259931 - DNA, 15 bp, Homo sapiens
atacccacccaccta

SEQ ID NO: 1259932 - DNA, 15 bp, Homo sapiens
tatacccacccacct

SEQ ID NO: 1259933 - DNA, 15 bp, Homo sapiens
ctatacccacccacc

SEQ ID NO: 1259934 - DNA, 15 bp, Homo sapiens
cctatacccacccac

SEQ ID NO: 1259935 - DNA, 15 bp, Homo sapiens
gcctatacccaccca

SEQ ID NO: 1259936 - DNA, 15 bp, Homo sapiens
agcctatacccaccc

SEQ ID NO: 1259937 - DNA, 15 bp, Homo sapiens
gagcctatacccacc

SEQ ID NO: 1259938 - DNA, 15 bp, Homo sapiens
tgagcctatacccac

SEQ ID NO: 1259939 - DNA, 15 bp, Homo sapiens
ctgagcctataccca

SEQ ID NO: 1259940 - DNA, 15 bp, Homo sapiens
gctgagcctataccc

SEQ ID NO: 1259941 - DNA, 15 bp, Homo sapiens
ggctgagcctatacc

SEQ ID NO: 1259942 - DNA, 15 bp, Homo sapiens
aggctgagcctatac

SEQ ID NO: 1259943 - DNA, 15 bp, Homo sapiens
gaggctgagcctata

SEQ ID NO: 1259944 - DNA, 15 bp, Homo sapiens
agaggctgagcctat

SEQ ID NO: 1259945 - DNA, 15 bp, Homo sapiens
aagaggctgagccta

SEQ ID NO: 1259946 - DNA, 15 bp, Homo sapiens
aaagaggctgagcct

SEQ ID NO: 1259947 - DNA, 15 bp, Homo sapiens
gaaagaggctgagcc

SEQ ID NO: 1259948 - DNA, 15 bp, Homo sapiens
agaaagaggctgagc

SEQ ID NO: 1259949 - DNA, 15 bp, Homo sapiens
gagaaagaggctgag

SEQ ID NO: 1259950 - DNA, 15 bp, Homo sapiens
ggagaaagaggctga

SEQ ID NO: 1259951 - DNA, 15 bp, Homo sapiens
tggagaaagaggctg

SEQ ID NO: 1259952 - DNA, 15 bp, Homo sapiens
atggagaaagaggct

SEQ ID NO: 1259953 - DNA, 15 bp, Homo sapiens
catggagaaagaggc

SEQ ID NO: 1259954 - DNA, 15 bp, Homo sapiens
acatggagaaagagg

SEQ ID NO: 1259955 - DNA, 15 bp, Homo sapiens
cacatggagaaagag

SEQ ID NO: 1259956 - DNA, 15 bp, Homo sapiens
ccacatggagaaaga

SEQ ID NO: 1259957 - DNA, 15 bp, Homo sapiens
accacatggagaaag

SEQ ID NO: 1259958 - DNA, 15 bp, Homo sapiens
gaccacatggagaaa

SEQ ID NO: 1259959 - DNA, 15 bp, Homo sapiens
agaccacatggagaa

SEQ ID NO: 1259960 - DNA, 15 bp, Homo sapiens
cagaccacatggaga

SEQ ID NO: 1259961 - DNA, 15 bp, Homo sapiens
acagaccacatggag

SEQ ID NO: 1259962 - DNA, 15 bp, Homo sapiens
gacagaccacatgga

SEQ ID NO: 1259963 - DNA, 15 bp, Homo sapiens
tgacagaccacatgg

SEQ ID NO: 1259964 - DNA, 15 bp, Homo sapiens
atgacagaccacatg

SEQ ID NO: 1259965 - DNA, 15 bp, Homo sapiens
gatgacagaccacat

SEQ ID NO: 1259966 - DNA, 15 bp, Homo sapiens
agatgacagaccaca

SEQ ID NO: 1259967 - DNA, 15 bp, Homo sapiens
aagatgacagaccac

SEQ ID NO: 1259968 - DNA, 15 bp, Homo sapiens
gaagatgacagacca

SEQ ID NO: 1259969 - DNA, 15 bp, Homo sapiens
tgaagatgacagacc

SEQ ID NO: 1259970 - DNA, 15 bp, Homo sapiens
atgaagatgacagac

SEQ ID NO: 1259971 - DNA, 15 bp, Homo sapiens
tatgaagatgacaga

SEQ ID NO: 1259972 - DNA, 15 bp, Homo sapiens
ctatgaagatgacag

SEQ ID NO: 1259973 - DNA, 15 bp, Homo sapiens
cctatgaagatgaca

SEQ ID NO: 1259974 - DNA, 15 bp, Homo sapiens
ccctatgaagatgac

SEQ ID NO: 1259975 - DNA, 15 bp, Homo sapiens
tccctatgaagatga

SEQ ID NO: 1259976 - DNA, 15 bp, Homo sapiens
gtccctatgaagatg

SEQ ID NO: 1259977 - DNA, 15 bp, Homo sapiens
agtccctatgaagat

SEQ ID NO: 1259978 - DNA, 15 bp, Homo sapiens
tagtccctatgaaga

SEQ ID NO: 1259979 - DNA, 15 bp, Homo sapiens
ttagtccctatgaag

SEQ ID NO: 1259980 - DNA, 15 bp, Homo sapiens
gttagtccctatgaa

SEQ ID NO: 1259981 - DNA, 15 bp, Homo sapiens
ggttagtccctatga

SEQ ID NO: 1259982 - DNA, 15 bp, Homo sapiens
gggttagtccctatg

SEQ ID NO: 1259983 - DNA, 15 bp, Homo sapiens
tgggttagtccctat

SEQ ID NO: 1259984 - DNA, 15 bp, Homo sapiens
gtgggttagtcccta

SEQ ID NO: 1259985 - DNA, 15 bp, Homo sapiens
tgtgggttagtccct

SEQ ID NO: 1259986 - DNA, 15 bp, Homo sapiens
gtgtgggttagtccc

SEQ ID NO: 1259987 - DNA, 15 bp, Homo sapiens
agtgtgggttagtcc

SEQ ID NO: 1259988 - DNA, 15 bp, Homo sapiens
aagtgtgggttagtc

SEQ ID NO: 1259989 - DNA, 15 bp, Homo sapiens
gaagtgtgggttagt

SEQ ID NO: 1259990 - DNA, 15 bp, Homo sapiens
agaagtgtgggttag

SEQ ID NO: 1259991 - DNA, 15 bp, Homo sapiens
aagaagtgtgggtta

SEQ ID NO: 1259992 - DNA, 15 bp, Homo sapiens
taagaagtgtgggtt

SEQ ID NO: 1259993 - DNA, 15 bp, Homo sapiens
gtaagaagtgtgggt

SEQ ID NO: 1259994 - DNA, 15 bp, Homo sapiens
tgtaagaagtgtggg

SEQ ID NO: 1259995 - DNA, 15 bp, Homo sapiens
atgtaagaagtgtgg

SEQ ID NO: 1259996 - DNA, 15 bp, Homo sapiens
catgtaagaagtgtg

SEQ ID NO: 1259997 - DNA, 15 bp, Homo sapiens
ccatgtaagaagtgt

SEQ ID NO: 1259998 - DNA, 15 bp, Homo sapiens
gccatgtaagaagtg

SEQ ID NO: 1259999 - DNA, 15 bp, Homo sapiens
tgccatgtaagaagt

SEQ ID NO: 1260000 - DNA, 15 bp, Homo sapiens
gtgccatgtaagaag

SEQ ID NO: 1260001 - DNA, 15 bp, Homo sapiens
ggtgccatgtaagaa

SEQ ID NO: 1260002 - DNA, 15 bp, Homo sapiens
aggtgccatgtaaga

SEQ ID NO: 1260003 - DNA, 15 bp, Homo sapiens
caggtgccatgtaag

SEQ ID NO: 1260004 - DNA, 15 bp, Homo sapiens
ccaggtgccatgtaa

SEQ ID NO: 1260005 - DNA, 15 bp, Homo sapiens
tccaggtgccatgta

SEQ ID NO: 1260006 - DNA, 15 bp, Homo sapiens
atccaggtgccatgt

SEQ ID NO: 1260007 - DNA, 15 bp, Homo sapiens
aatccaggtgccatg

SEQ ID NO: 1260008 - DNA, 15 bp, Homo sapiens
aaatccaggtgccat

SEQ ID NO: 1260009 - DNA, 15 bp, Homo sapiens
gaaatccaggtgcca

SEQ ID NO: 1260010 - DNA, 15 bp, Homo sapiens
tgaaatccaggtgcc

SEQ ID NO: 1260011 - DNA, 15 bp, Homo sapiens
ctgaaatccaggtgc

SEQ ID NO: 1260012 - DNA, 15 bp, Homo sapiens
cctgaaatccaggtg

SEQ ID NO: 1260013 - DNA, 15 bp, Homo sapiens
tcctgaaatccaggt

SEQ ID NO: 1260014 - DNA, 15 bp, Homo sapiens
gtcctgaaatccagg

SEQ ID NO: 1260015 - DNA, 15 bp, Homo sapiens
tgtcctgaaatccag

SEQ ID NO: 1260016 - DNA, 15 bp, Homo sapiens
ctgtcctgaaatcca

SEQ ID NO: 1260017 - DNA, 15 bp, Homo sapiens
gctgtcctgaaatcc

SEQ ID NO: 1260018 - DNA, 15 bp, Homo sapiens
tgctgtcctgaaatc

SEQ ID NO: 1260019 - DNA, 15 bp, Homo sapiens
ttgctgtcctgaaat

SEQ ID NO: 1260020 - DNA, 15 bp, Homo sapiens
cttgctgtcctgaaa

SEQ ID NO: 1260021 - DNA, 15 bp, Homo sapiens
gcttgctgtcctgaa

SEQ ID NO: 1260022 - DNA, 15 bp, Homo sapiens
ggcttgctgtcctga

SEQ ID NO: 1260023 - DNA, 15 bp, Homo sapiens
gggcttgctgtcctg

SEQ ID NO: 1260024 - DNA, 15 bp, Homo sapiens
agggcttgctgtcct

SEQ ID NO: 1260025 - DNA, 15 bp, Homo sapiens
tagggcttgctgtcc

SEQ ID NO: 1260026 - DNA, 15 bp, Homo sapiens
ttagggcttgctgtc

SEQ ID NO: 1260027 - DNA, 15 bp, Homo sapiens
attagggcttgctgt

SEQ ID NO: 1260028 - DNA, 15 bp, Homo sapiens
cattagggcttgctg

SEQ ID NO: 1260029 - DNA, 15 bp, Homo sapiens
gcattagggcttgct

SEQ ID NO: 1260030 - DNA, 15 bp, Homo sapiens
tgcattagggcttgc

SEQ ID NO: 1260031 - DNA, 15 bp, Homo sapiens
gtgcattagggcttg

SEQ ID NO: 1260032 - DNA, 15 bp, Homo sapiens
tgtgcattagggctt

SEQ ID NO: 1260033 - DNA, 15 bp, Homo sapiens
ttgtgcattagggct

SEQ ID NO: 1260034 - DNA, 15 bp, Homo sapiens
cttgtgcattagggc

SEQ ID NO: 1260035 - DNA, 15 bp, Homo sapiens
gcttgtgcattaggg

SEQ ID NO: 1260036 - DNA, 15 bp, Homo sapiens
tgcttgtgcattagg

SEQ ID NO: 1260037 - DNA, 15 bp, Homo sapiens
gtgcttgtgcattag

SEQ ID NO: 1260038 - DNA, 15 bp, Homo sapiens
agtgcttgtgcatta

SEQ ID NO: 1260039 - DNA, 15 bp, Homo sapiens
aagtgcttgtgcatt

SEQ ID NO: 1260040 - DNA, 15 bp, Homo sapiens
taagtgcttgtgcat

SEQ ID NO: 1260041 - DNA, 15 bp, Homo sapiens
ataagtgcttgtgca

SEQ ID NO: 1260042 - DNA, 15 bp, Homo sapiens
gataagtgcttgtgc

SEQ ID NO: 1260043 - DNA, 15 bp, Homo sapiens
tgataagtgcttgtg

SEQ ID NO: 1260044 - DNA, 15 bp, Homo sapiens
ttgataagtgcttgt

SEQ ID NO: 1260045 - DNA, 15 bp, Homo sapiens
cttgataagtgcttg

SEQ ID NO: 1260046 - DNA, 15 bp, Homo sapiens
ccttgataagtgctt

SEQ ID NO: 1260047 - DNA, 15 bp, Homo sapiens
accttgataagtgct

SEQ ID NO: 1260048 - DNA, 15 bp, Homo sapiens
caccttgataagtgc

SEQ ID NO: 1260049 - DNA, 15 bp, Homo sapiens
gcaccttgataagtg

SEQ ID NO: 1260050 - DNA, 15 bp, Homo sapiens
agcaccttgataagt

SEQ ID NO: 1260051 - DNA, 15 bp, Homo sapiens
aagcaccttgataag

SEQ ID NO: 1260052 - DNA, 15 bp, Homo sapiens
caagcaccttgataa

SEQ ID NO: 1260053 - DNA, 15 bp, Homo sapiens
gcaagcaccttgata

SEQ ID NO: 1260054 - DNA, 15 bp, Homo sapiens
agcaagcaccttgat

SEQ ID NO: 1260055 - DNA, 15 bp, Homo sapiens
cagcaagcaccttga

SEQ ID NO: 1260056 - DNA, 15 bp, Homo sapiens
tcagcaagcaccttg

SEQ ID NO: 1260057 - DNA, 15 bp, Homo sapiens
ctcagcaagcacctt

SEQ ID NO: 1260058 - DNA, 15 bp, Homo sapiens
tctcagcaagcacct

SEQ ID NO: 1260059 - DNA, 15 bp, Homo sapiens
atctcagcaagcacc

SEQ ID NO: 1260060 - DNA, 15 bp, Homo sapiens
gatctcagcaagcac

SEQ ID NO: 1260061 - DNA, 15 bp, Homo sapiens
ggatctcagcaagca

SEQ ID NO: 1260062 - DNA, 15 bp, Homo sapiens
aggatctcagcaagc

SEQ ID NO: 1260063 - DNA, 15 bp, Homo sapiens
taggatctcagcaag

SEQ ID NO: 1260064 - DNA, 15 bp, Homo sapiens
ataggatctcagcaa

SEQ ID NO: 1260065 - DNA, 15 bp, Homo sapiens
aataggatctcagca

SEQ ID NO: 1260066 - DNA, 15 bp, Homo sapiens
caataggatctcagc

SEQ ID NO: 1260067 - DNA, 15 bp, Homo sapiens
ccaataggatctcag

SEQ ID NO: 1260068 - DNA, 15 bp, Homo sapiens
gccaataggatctca

SEQ ID NO: 1260069 - DNA, 15 bp, Homo sapiens
ggccaataggatctc

SEQ ID NO: 1260070 - DNA, 15 bp, Homo sapiens
tggccaataggatct

SEQ ID NO: 1260071 - DNA, 15 bp, Homo sapiens
ttggccaataggatc

SEQ ID NO: 1260072 - DNA, 15 bp, Homo sapiens
tttggccaataggat

SEQ ID NO: 1260073 - DNA, 15 bp, Homo sapiens
gtttggccaatagga

SEQ ID NO: 1260074 - DNA, 15 bp, Homo sapiens
tgtttggccaatagg

SEQ ID NO: 1260075 - DNA, 15 bp, Homo sapiens
ttgtttggccaatag

SEQ ID NO: 1260076 - DNA, 15 bp, Homo sapiens
cttgtttggccaata

SEQ ID NO: 1260077 - DNA, 15 bp, Homo sapiens
acttgtttggccaat

SEQ ID NO: 1260078 - DNA, 15 bp, Homo sapiens
gacttgtttggccaa

SEQ ID NO: 1260079 - DNA, 15 bp, Homo sapiens
tgacttgtttggcca

SEQ ID NO: 1260080 - DNA, 15 bp, Homo sapiens
gtgacttgtttggcc

SEQ ID NO: 1260081 - DNA, 15 bp, Homo sapiens
tgtgacttgtttggc

SEQ ID NO: 1260082 - DNA, 15 bp, Homo sapiens
ttgtgacttgtttgg

SEQ ID NO: 1260083 - DNA, 15 bp, Homo sapiens
cttgtgacttgtttg

SEQ ID NO: 1260084 - DNA, 15 bp, Homo sapiens
ccttgtgacttgttt

SEQ ID NO: 1260085 - DNA, 15 bp, Homo sapiens
gccttgtgacttgtt

SEQ ID NO: 1260086 - DNA, 15 bp, Homo sapiens
ggccttgtgacttgt

SEQ ID NO: 1260087 - DNA, 15 bp, Homo sapiens
tggccttgtgacttg

SEQ ID NO: 1260088 - DNA, 15 bp, Homo sapiens
ttggccttgtgactt

SEQ ID NO: 1260089 - DNA, 15 bp, Homo sapiens
cttggccttgtgact

SEQ ID NO: 1260090 - DNA, 15 bp, Homo sapiens
gcttggccttgtgac

SEQ ID NO: 1260091 - DNA, 15 bp, Homo sapiens
ggcttggccttgtga

SEQ ID NO: 1260092 - DNA, 15 bp, Homo sapiens
gggcttggccttgtg

SEQ ID NO: 1260093 - DNA, 15 bp, Homo sapiens
tgggcttggccttgt

SEQ ID NO: 1260094 - DNA, 15 bp, Homo sapiens
ctgggcttggccttg

SEQ ID NO: 1260095 - DNA, 15 bp, Homo sapiens
gctgggcttggcctt

SEQ ID NO: 1260096 - DNA, 15 bp, Homo sapiens
tgctgggcttggcct

SEQ ID NO: 1260097 - DNA, 15 bp, Homo sapiens
atgctgggcttggcc

SEQ ID NO: 1260098 - DNA, 15 bp, Homo sapiens
gatgctgggcttggc

SEQ ID NO: 1260099 - DNA, 15 bp, Homo sapiens
tgatgctgggcttgg

SEQ ID NO: 1260100 - DNA, 15 bp, Homo sapiens
ctgatgctgggcttg

SEQ ID NO: 1260101 - DNA, 15 bp, Homo sapiens
actgatgctgggctt

SEQ ID NO: 1260102 - DNA, 15 bp, Homo sapiens
cactgatgctgggct

SEQ ID NO: 1260103 - DNA, 15 bp, Homo sapiens
acactgatgctgggc

SEQ ID NO: 1260104 - DNA, 15 bp, Homo sapiens
cacactgatgctggg

SEQ ID NO: 1260105 - DNA, 15 bp, Homo sapiens
ccacactgatgctgg

SEQ ID NO: 1260106 - DNA, 15 bp, Homo sapiens
tccacactgatgctg

SEQ ID NO: 1260107 - DNA, 15 bp, Homo sapiens
ttccacactgatgct

SEQ ID NO: 1260108 - DNA, 15 bp, Homo sapiens
gttccacactgatgc

SEQ ID NO: 1260109 - DNA, 15 bp, Homo sapiens
agttccacactgatg

SEQ ID NO: 1260110 - DNA, 15 bp, Homo sapiens
gagttccacactgat

SEQ ID NO: 1260111 - DNA, 15 bp, Homo sapiens
agagttccacactga

SEQ ID NO: 1260112 - DNA, 15 bp, Homo sapiens
cagagttccacactg

SEQ ID NO: 1260113 - DNA, 15 bp, Homo sapiens
gcagagttccacact

SEQ ID NO: 1260114 - DNA, 15 bp, Homo sapiens
tgcagagttccacac

SEQ ID NO: 1260115 - DNA, 15 bp, Homo sapiens
gtgcagagttccaca

SEQ ID NO: 1260116 - DNA, 15 bp, Homo sapiens
tgtgcagagttccac

SEQ ID NO: 1260117 - DNA, 15 bp, Homo sapiens
ttgtgcagagttcca

SEQ ID NO: 1260118 - DNA, 15 bp, Homo sapiens
tttgtgcagagttcc

SEQ ID NO: 1260119 - DNA, 15 bp, Homo sapiens
ctttgtgcagagttc

SEQ ID NO: 1260120 - DNA, 15 bp, Homo sapiens
cctttgtgcagagtt

SEQ ID NO: 1260121 - DNA, 15 bp, Homo sapiens
gcctttgtgcagagt

SEQ ID NO: 1260122 - DNA, 15 bp, Homo sapiens
tgcctttgtgcagag

SEQ ID NO: 1260123 - DNA, 15 bp, Homo sapiens
atgcctttgtgcaga

SEQ ID NO: 1260124 - DNA, 15 bp, Homo sapiens
catgcctttgtgcag

SEQ ID NO: 1260125 - DNA, 15 bp, Homo sapiens
tcatgcctttgtgca

SEQ ID NO: 1260126 - DNA, 15 bp, Homo sapiens
ttcatgcctttgtgc

SEQ ID NO: 1260127 - DNA, 15 bp, Homo sapiens
attcatgcctttgtg

SEQ ID NO: 1260128 - DNA, 15 bp, Homo sapiens
cattcatgcctttgt

SEQ ID NO: 1260129 - DNA, 15 bp, Homo sapiens
acattcatgcctttg

SEQ ID NO: 1260130 - DNA, 15 bp, Homo sapiens
gacattcatgccttt

SEQ ID NO: 1260131 - DNA, 15 bp, Homo sapiens
tgacattcatgcctt

SEQ ID NO: 1260132 - DNA, 15 bp, Homo sapiens
ctgacattcatgcct

SEQ ID NO: 1260133 - DNA, 15 bp, Homo sapiens
actgacattcatgcc

SEQ ID NO: 1260134 - DNA, 15 bp, Homo sapiens
tactgacattcatgc

SEQ ID NO: 1260135 - DNA, 15 bp, Homo sapiens
ctactgacattcatg

SEQ ID NO: 1260136 - DNA, 15 bp, Homo sapiens
cctactgacattcat

SEQ ID NO: 1260137 - DNA, 15 bp, Homo sapiens
acctactgacattca

SEQ ID NO: 1260138 - DNA, 15 bp, Homo sapiens
cacctactgacattc

SEQ ID NO: 1260139 - DNA, 15 bp, Homo sapiens
acacctactgacatt

SEQ ID NO: 1260140 - DNA, 15 bp, Homo sapiens
cacacctactgacat

SEQ ID NO: 1260141 - DNA, 15 bp, Homo sapiens
tcacacctactgaca

SEQ ID NO: 1260142 - DNA, 15 bp, Homo sapiens
atcacacctactgac

SEQ ID NO: 1260143 - DNA, 15 bp, Homo sapiens
aatcacacctactga

SEQ ID NO: 1260144 - DNA, 15 bp, Homo sapiens
gaatcacacctactg

SEQ ID NO: 1260145 - DNA, 15 bp, Homo sapiens
tgaatcacacctact

SEQ ID NO: 1260146 - DNA, 15 bp, Homo sapiens
atgaatcacacctac

SEQ ID NO: 1260147 - DNA, 15 bp, Homo sapiens
aatgaatcacaccta

SEQ ID NO: 1260148 - DNA, 15 bp, Homo sapiens
caatgaatcacacct

SEQ ID NO: 1260149 - DNA, 15 bp, Homo sapiens
acaatgaatcacacc

SEQ ID NO: 1260150 - DNA, 15 bp, Homo sapiens
tacaatgaatcacac

SEQ ID NO: 1260151 - DNA, 15 bp, Homo sapiens
ctacaatgaatcaca

SEQ ID NO: 1260152 - DNA, 15 bp, Homo sapiens
cctacaatgaatcac

SEQ ID NO: 1260153 - DNA, 15 bp, Homo sapiens
gcctacaatgaatca

SEQ ID NO: 1260154 - DNA, 15 bp, Homo sapiens
ggcctacaatgaatc

SEQ ID NO: 1260155 - DNA, 15 bp, Homo sapiens
tggcctacaatgaat

SEQ ID NO: 1260156 - DNA, 15 bp, Homo sapiens
atggcctacaatgaa

SEQ ID NO: 1260157 - DNA, 15 bp, Homo sapiens
gatggcctacaatga

SEQ ID NO: 1260158 - DNA, 15 bp, Homo sapiens
tgatggcctacaatg

SEQ ID NO: 1260159 - DNA, 15 bp, Homo sapiens
ctgatggcctacaat

SEQ ID NO: 1260160 - DNA, 15 bp, Homo sapiens
actgatggcctacaa

SEQ ID NO: 1260161 - DNA, 15 bp, Homo sapiens
cactgatggcctaca

SEQ ID NO: 1260162 - DNA, 15 bp, Homo sapiens
acactgatggcctac

SEQ ID NO: 1260163 - DNA, 15 bp, Homo sapiens
aacactgatggccta

SEQ ID NO: 1260164 - DNA, 15 bp, Homo sapiens
taacactgatggcct

SEQ ID NO: 1260165 - DNA, 15 bp, Homo sapiens
ctaacactgatggcc

SEQ ID NO: 1260166 - DNA, 15 bp, Homo sapiens
actaacactgatggc

SEQ ID NO: 1260167 - DNA, 15 bp, Homo sapiens
gactaacactgatgg

SEQ ID NO: 1260168 - DNA, 15 bp, Homo sapiens
agactaacactgatg

SEQ ID NO: 1260169 - DNA, 15 bp, Homo sapiens
tagactaacactgat

SEQ ID NO: 1260170 - DNA, 15 bp, Homo sapiens
gtagactaacactga

SEQ ID NO: 1260171 - DNA, 15 bp, Homo sapiens
ggtagactaacactg

SEQ ID NO: 1260172 - DNA, 15 bp, Homo sapiens
tggtagactaacact

SEQ ID NO: 1260173 - DNA, 15 bp, Homo sapiens
gtggtagactaacac

SEQ ID NO: 1260174 - DNA, 15 bp, Homo sapiens
ggtggtagactaaca

SEQ ID NO: 1260175 - DNA, 15 bp, Homo sapiens
tggtggtagactaac

SEQ ID NO: 1260176 - DNA, 15 bp, Homo sapiens
ctggtggtagactaa

SEQ ID NO: 1260177 - DNA, 15 bp, Homo sapiens
cctggtggtagacta

SEQ ID NO: 1260178 - DNA, 15 bp, Homo sapiens
acctggtggtagact

SEQ ID NO: 1260179 - DNA, 15 bp, Homo sapiens
tacctggtggtagac

SEQ ID NO: 1260180 - DNA, 15 bp, Homo sapiens
atacctggtggtaga

SEQ ID NO: 1260181 - DNA, 15 bp, Homo sapiens
aatacctggtggtag

SEQ ID NO: 1260182 - DNA, 15 bp, Homo sapiens
aaatacctggtggta

SEQ ID NO: 1260183 - DNA, 15 bp, Homo sapiens
taaatacctggtggt

SEQ ID NO: 1260184 - DNA, 15 bp, Homo sapiens
gtaaatacctggtgg

SEQ ID NO: 1260185 - DNA, 15 bp, Homo sapiens
tgtaaatacctggtg

SEQ ID NO: 1260186 - DNA, 15 bp, Homo sapiens
atgtaaatacctggt

SEQ ID NO: 1260187 - DNA, 15 bp, Homo sapiens
aatgtaaatacctgg

SEQ ID NO: 1260188 - DNA, 15 bp, Homo sapiens
caatgtaaatacctg

SEQ ID NO: 1260189 - DNA, 15 bp, Homo sapiens
acaatgtaaatacct

SEQ ID NO: 1260190 - DNA, 15 bp, Homo sapiens
aacaatgtaaatacc

SEQ ID NO: 1260191 - DNA, 15 bp, Homo sapiens
gaacaatgtaaatac

SEQ ID NO: 1260192 - DNA, 15 bp, Homo sapiens
agaacaatgtaaata

SEQ ID NO: 1260193 - DNA, 15 bp, Homo sapiens
aagaacaatgtaaat

SEQ ID NO: 1260194 - DNA, 15 bp, Homo sapiens
aaagaacaatgtaaa

SEQ ID NO: 1260195 - DNA, 15 bp, Homo sapiens
taaagaacaatgtaa

SEQ ID NO: 1260196 - DNA, 15 bp, Homo sapiens
ctaaagaacaatgta

SEQ ID NO: 1260197 - DNA, 15 bp, Homo sapiens
tctaaagaacaatgt

SEQ ID NO: 1260198 - DNA, 15 bp, Homo sapiens
ctctaaagaacaatg

SEQ ID NO: 1260199 - DNA, 15 bp, Homo sapiens
gctctaaagaacaat

SEQ ID NO: 1260200 - DNA, 15 bp, Homo sapiens
tgctctaaagaacaa

SEQ ID NO: 1260201 - DNA, 15 bp, Homo sapiens
ctgctctaaagaaca

SEQ ID NO: 1260202 - DNA, 15 bp, Homo sapiens
tctgctctaaagaac

SEQ ID NO: 1260203 - DNA, 15 bp, Homo sapiens
ctctgctctaaagaa

SEQ ID NO: 1260204 - DNA, 15 bp, Homo sapiens
tctctgctctaaaga

SEQ ID NO: 1260205 - DNA, 15 bp, Homo sapiens
gtctctgctctaaag

SEQ ID NO: 1260206 - DNA, 15 bp, Homo sapiens
agtctctgctctaaa

SEQ ID NO: 1260207 - DNA, 15 bp, Homo sapiens
aagtctctgctctaa

SEQ ID NO: 1260208 - DNA, 15 bp, Homo sapiens
gaagtctctgctcta

SEQ ID NO: 1260209 - DNA, 15 bp, Homo sapiens
ggaagtctctgctct

SEQ ID NO: 1260210 - DNA, 15 bp, Homo sapiens
cggaagtctctgctc

SEQ ID NO: 1260211 - DNA, 15 bp, Homo sapiens
ccggaagtctctgct

SEQ ID NO: 1260212 - DNA, 15 bp, Homo sapiens
accggaagtctctgc

SEQ ID NO: 1260213 - DNA, 15 bp, Homo sapiens
caccggaagtctctg

SEQ ID NO: 1260214 - DNA, 15 bp, Homo sapiens
ccaccggaagtctct

SEQ ID NO: 1260215 - DNA, 15 bp, Homo sapiens
accaccggaagtctc

SEQ ID NO: 1260216 - DNA, 15 bp, Homo sapiens
gaccaccggaagtct

SEQ ID NO: 1260217 - DNA, 15 bp, Homo sapiens
ggaccaccggaagtc

SEQ ID NO: 1260218 - DNA, 15 bp, Homo sapiens
gggaccaccggaagt

SEQ ID NO: 1260219 - DNA, 15 bp, Homo sapiens
ggggaccaccggaag

SEQ ID NO: 1260220 - DNA, 15 bp, Homo sapiens
gggggaccaccggaa

SEQ ID NO: 1260221 - DNA, 15 bp, Homo sapiens
tgggggaccaccgga

SEQ ID NO: 1260222 - DNA, 15 bp, Homo sapiens
ttgggggaccaccgg

SEQ ID NO: 1260223 - DNA, 15 bp, Homo sapiens
gttgggggaccaccg

SEQ ID NO: 1260224 - DNA, 15 bp, Homo sapiens
tgttgggggaccacc

SEQ ID NO: 1260225 - DNA, 15 bp, Homo sapiens
ctgttgggggaccac

SEQ ID NO: 1260226 - DNA, 15 bp, Homo sapiens
gctgttgggggacca

SEQ ID NO: 1260227 - DNA, 15 bp, Homo sapiens
agctgttgggggacc

SEQ ID NO: 1260228 - DNA, 15 bp, Homo sapiens
cagctgttgggggac

SEQ ID NO: 1260229 - DNA, 15 bp, Homo sapiens
acagctgttggggga

SEQ ID NO: 1260230 - DNA, 15 bp, Homo sapiens
aacagctgttggggg

SEQ ID NO: 1260231 - DNA, 15 bp, Homo sapiens
gaacagctgttgggg

SEQ ID NO: 1260232 - DNA, 15 bp, Homo sapiens
agaacagctgttggg

SEQ ID NO: 1260233 - DNA, 15 bp, Homo sapiens
gagaacagctgttgg

SEQ ID NO: 1260234 - DNA, 15 bp, Homo sapiens
ggagaacagctgttg

SEQ ID NO: 1260235 - DNA, 15 bp, Homo sapiens
agggagaacagctgt

SEQ ID NO: 1260236 - DNA, 15 bp, Homo sapiens
aagggagaacagctg

SEQ ID NO: 1260237 - DNA, 15 bp, Homo sapiens
caagggagaacagct

SEQ ID NO: 1260238 - DNA, 15 bp, Homo sapiens
gcaagggagaacagc

SEQ ID NO: 1260239 - DNA, 15 bp, Homo sapiens
agcaagggagaacag

SEQ ID NO: 1260240 - DNA, 15 bp, Homo sapiens
aagcaagggagaaca

SEQ ID NO: 1260241 - DNA, 15 bp, Homo sapiens
gaagcaagggagaac

SEQ ID NO: 1260242 - DNA, 15 bp, Homo sapiens
agaagcaagggagaa

SEQ ID NO: 1260243 - DNA, 15 bp, Homo sapiens
cagaagcaagggaga

SEQ ID NO: 1260244 - DNA, 15 bp, Homo sapiens
acagaagcaagggag

SEQ ID NO: 1260245 - DNA, 15 bp, Homo sapiens
tacagaagcaaggga

SEQ ID NO: 1260246 - DNA, 15 bp, Homo sapiens
atacagaagcaaggg

SEQ ID NO: 1260247 - DNA, 15 bp, Homo sapiens
aatacagaagcaagg

SEQ ID NO: 1260248 - DNA, 15 bp, Homo sapiens
taatacagaagcaag

SEQ ID NO: 1260249 - DNA, 15 bp, Homo sapiens
ttaatacagaagcaa

SEQ ID NO: 1260250 - DNA, 15 bp, Homo sapiens
cttaatacagaagca

SEQ ID NO: 1260251 - DNA, 15 bp, Homo sapiens
tcttaatacagaagc

SEQ ID NO: 1260252 - DNA, 15 bp, Homo sapiens
ctcttaatacagaag

SEQ ID NO: 1260253 - DNA, 15 bp, Homo sapiens
tctcttaatacagaa

SEQ ID NO: 1260254 - DNA, 15 bp, Homo sapiens
atctcttaatacaga

SEQ ID NO: 1260255 - DNA, 15 bp, Homo sapiens
gatctcttaatacag

SEQ ID NO: 1260256 - DNA, 15 bp, Homo sapiens
ggatctcttaataca

SEQ ID NO: 1260257 - DNA, 15 bp, Homo sapiens
gggatctcttaatac

SEQ ID NO: 1260258 - DNA, 15 bp, Homo sapiens
agggatctcttaata

SEQ ID NO: 1260259 - DNA, 15 bp, Homo sapiens
cagggatctcttaat

SEQ ID NO: 1260260 - DNA, 15 bp, Homo sapiens
tcagggatctcttaa

SEQ ID NO: 1260261 - DNA, 15 bp, Homo sapiens
ttcagggatctctta

SEQ ID NO: 1260262 - DNA, 15 bp, Homo sapiens
attcagggatctctt

SEQ ID NO: 1260263 - DNA, 15 bp, Homo sapiens
aattcagggatctct

SEQ ID NO: 1260264 - DNA, 15 bp, Homo sapiens
gaattcagggatctc

SEQ ID NO: 1260265 - DNA, 15 bp, Homo sapiens
agaattcagggatct

SEQ ID NO: 1260266 - DNA, 15 bp, Homo sapiens
cagaattcagggatc

SEQ ID NO: 1260267 - DNA, 15 bp, Homo sapiens
acagaattcagggat

SEQ ID NO: 1260268 - DNA, 15 bp, Homo sapiens
aacagaattcaggga

SEQ ID NO: 1260269 - DNA, 15 bp, Homo sapiens
taacagaattcaggg

SEQ ID NO: 1260270 - DNA, 15 bp, Homo sapiens
ttaacagaattcagg

SEQ ID NO: 1260271 - DNA, 15 bp, Homo sapiens
attaacagaattcag

SEQ ID NO: 1260272 - DNA, 15 bp, Homo sapiens
cattaacagaattca

SEQ ID NO: 1260273 - DNA, 15 bp, Homo sapiens
tcattaacagaattc

SEQ ID NO: 1260274 - DNA, 15 bp, Homo sapiens
ttcattaacagaatt

SEQ ID NO: 1260275 - DNA, 15 bp, Homo sapiens
gttcattaacagaat

SEQ ID NO: 1260276 - DNA, 15 bp, Homo sapiens
agttcattaacagaa

SEQ ID NO: 1260277 - DNA, 15 bp, Homo sapiens
gagttcattaacaga

SEQ ID NO: 1260278 - DNA, 15 bp, Homo sapiens
tgagttcattaacag

SEQ ID NO: 1260279 - DNA, 15 bp, Homo sapiens
atgagttcattaaca

SEQ ID NO: 1260280 - DNA, 15 bp, Homo sapiens
catgagttcattaac

SEQ ID NO: 1260281 - DNA, 15 bp, Homo sapiens
tcatgagttcattaa

SEQ ID NO: 1260282 - DNA, 15 bp, Homo sapiens
atcatgagttcatta

SEQ ID NO: 1260283 - DNA, 15 bp, Homo sapiens
aatcatgagttcatt

SEQ ID NO: 1260284 - DNA, 15 bp, Homo sapiens
caatcatgagttcat

SEQ ID NO: 1260285 - DNA, 15 bp, Homo sapiens
acaatcatgagttca

SEQ ID NO: 1260286 - DNA, 15 bp, Homo sapiens
gacaatcatgagttc

SEQ ID NO: 1260287 - DNA, 15 bp, Homo sapiens
tgacaatcatgagtt

SEQ ID NO: 1260288 - DNA, 15 bp, Homo sapiens
ttgacaatcatgagt

SEQ ID NO: 1260289 - DNA, 15 bp, Homo sapiens
tttgacaatcatgag

SEQ ID NO: 1260290 - DNA, 15 bp, Homo sapiens
ttttgacaatcatga

SEQ ID NO: 1260291 - DNA, 15 bp, Homo sapiens
tttttgacaatcatg

SEQ ID NO: 1260292 - DNA, 15 bp, Homo sapiens
ttttttgacaatcat

SEQ ID NO: 1260293 - DNA, 15 bp, Homo sapiens
tttttttgacaatca

SEQ ID NO: 1260294 - DNA, 15 bp, Homo sapiens
ctttttttgacaatc

SEQ ID NO: 1260295 - DNA, 15 bp, Homo sapiens
actttttttgacaat

SEQ ID NO: 1260296 - DNA, 15 bp, Homo sapiens
aactttttttgacaa

SEQ ID NO: 1260297 - DNA, 15 bp, Homo sapiens
aaactttttttgaca

SEQ ID NO: 1260298 - DNA, 15 bp, Homo sapiens
aaaactttttttgac

SEQ ID NO: 1260299 - DNA, 15 bp, Homo sapiens
aaaaactttttttga

SEQ ID NO: 1260300 - DNA, 15 bp, Homo sapiens
aaaaaactttttttg

SEQ ID NO: 1260301 - DNA, 15 bp, Homo sapiens
aaaaaaacttttttt

SEQ ID NO: 1260302 - DNA, 15 bp, Homo sapiens
aaaaaaaactttttt

SEQ ID NO: 1260303 - DNA, 15 bp, Homo sapiens
gaaaaaaaacttttt

SEQ ID NO: 1260304 - DNA, 15 bp, Homo sapiens
ggaaaaaaaactttt

SEQ ID NO: 1260305 - DNA, 15 bp, Homo sapiens
gggaaaaaaaacttt

SEQ ID NO: 1260306 - DNA, 15 bp, Homo sapiens
agggaaaaaaaactt

SEQ ID NO: 1260307 - DNA, 15 bp, Homo sapiens
cagggaaaaaaaact

SEQ ID NO: 1260308 - DNA, 15 bp, Homo sapiens
acagggaaaaaaaac

SEQ ID NO: 1260309 - DNA, 15 bp, Homo sapiens
tacagggaaaaaaaa

SEQ ID NO: 1260310 - DNA, 15 bp, Homo sapiens
gtacagggaaaaaaa

SEQ ID NO: 1260311 - DNA, 15 bp, Homo sapiens
ggtacagggaaaaaa

SEQ ID NO: 1260312 - DNA, 15 bp, Homo sapiens
gggtacagggaaaaa

SEQ ID NO: 1260313 - DNA, 15 bp, Homo sapiens
ggggtacagggaaaa

SEQ ID NO: 1260314 - DNA, 15 bp, Homo sapiens
tggggtacagggaaa

SEQ ID NO: 1260315 - DNA, 15 bp, Homo sapiens
gtggggtacagggaa

SEQ ID NO: 1260316 - DNA, 15 bp, Homo sapiens
tgtggggtacaggga

SEQ ID NO: 1260317 - DNA, 15 bp, Homo sapiens
ctgtggggtacaggg

SEQ ID NO: 1260318 - DNA, 15 bp, Homo sapiens
actgtggggtacagg

SEQ ID NO: 1260319 - DNA, 15 bp, Homo sapiens
tactgtggggtacag

SEQ ID NO: 1260320 - DNA, 15 bp, Homo sapiens
ttactgtggggtaca

SEQ ID NO: 1260321 - DNA, 15 bp, Homo sapiens
cttactgtggggtac

SEQ ID NO: 1260322 - DNA, 15 bp, Homo sapiens
ccttactgtggggta

SEQ ID NO: 1260323 - DNA, 15 bp, Homo sapiens
accttactgtggggt

SEQ ID NO: 1260324 - DNA, 15 bp, Homo sapiens
caccttactgtgggg

SEQ ID NO: 1260325 - DNA, 15 bp, Homo sapiens
acaccttactgtggg

SEQ ID NO: 1260326 - DNA, 15 bp, Homo sapiens
cacaccttactgtgg

SEQ ID NO: 1260327 - DNA, 15 bp, Homo sapiens
ccacaccttactgtg

SEQ ID NO: 1260328 - DNA, 15 bp, Homo sapiens
gccacaccttactgt

SEQ ID NO: 1260329 - DNA, 15 bp, Homo sapiens
agccacaccttactg

SEQ ID NO: 1260330 - DNA, 15 bp, Homo sapiens
aagccacaccttact

SEQ ID NO: 1260331 - DNA, 15 bp, Homo sapiens
aaagccacaccttac

SEQ ID NO: 1260332 - DNA, 15 bp, Homo sapiens
caaagccacacctta

SEQ ID NO: 1260333 - DNA, 15 bp, Homo sapiens
gcaaagccacacctt

SEQ ID NO: 1260334 - DNA, 15 bp, Homo sapiens
tgcaaagccacacct

SEQ ID NO: 1260335 - DNA, 15 bp, Homo sapiens
atgcaaagccacacc

SEQ ID NO: 1260336 - DNA, 15 bp, Homo sapiens
gatgcaaagccacac

SEQ ID NO: 1260337 - DNA, 15 bp, Homo sapiens
ggatgcaaagccaca

SEQ ID NO: 1260338 - DNA, 15 bp, Homo sapiens
tggatgcaaagccac

SEQ ID NO: 1260339 - DNA, 15 bp, Homo sapiens
gtggatgcaaagcca

SEQ ID NO: 1260340 - DNA, 15 bp, Homo sapiens
cgtggatgcaaagcc

SEQ ID NO: 1260341 - DNA, 15 bp, Homo sapiens
acgtggatgcaaagc

SEQ ID NO: 1260342 - DNA, 15 bp, Homo sapiens
aacgtggatgcaaag

SEQ ID NO: 1260343 - DNA, 15 bp, Homo sapiens
aaacgtggatgcaaa

SEQ ID NO: 1260344 - DNA, 15 bp, Homo sapiens
aaaacgtggatgcaa

SEQ ID NO: 1260345 - DNA, 15 bp, Homo sapiens
caaaacgtggatgca

SEQ ID NO: 1260346 - DNA, 15 bp, Homo sapiens
tcaaaacgtggatgc

SEQ ID NO: 1260347 - DNA, 15 bp, Homo sapiens
atcaaaacgtggatg

SEQ ID NO: 1260348 - DNA, 15 bp, Homo sapiens
gatcaaaacgtggat

SEQ ID NO: 1260349 - DNA, 15 bp, Homo sapiens
tgatcaaaacgtgga

SEQ ID NO: 1260350 - DNA, 15 bp, Homo sapiens
ttgatcaaaacgtgg

SEQ ID NO: 1260351 - DNA, 15 bp, Homo sapiens
attgatcaaaacgtg

SEQ ID NO: 1260352 - DNA, 15 bp, Homo sapiens
cattgatcaaaacgt

SEQ ID NO: 1260353 - DNA, 15 bp, Homo sapiens
ccattgatcaaaacg

SEQ ID NO: 1260354 - DNA, 15 bp, Homo sapiens
cccattgatcaaaac

SEQ ID NO: 1260355 - DNA, 15 bp, Homo sapiens
tcccattgatcaaaa

SEQ ID NO: 1260356 - DNA, 15 bp, Homo sapiens
atcccattgatcaaa

SEQ ID NO: 1260357 - DNA, 15 bp, Homo sapiens
catcccattgatcaa

SEQ ID NO: 1260358 - DNA, 15 bp, Homo sapiens
acatcccattgatca

SEQ ID NO: 1260359 - DNA, 15 bp, Homo sapiens
tacatcccattgatc

SEQ ID NO: 1260360 - DNA, 15 bp, Homo sapiens
ttacatcccattgat

SEQ ID NO: 1260361 - DNA, 15 bp, Homo sapiens
cttacatcccattga

SEQ ID NO: 1260362 - DNA, 15 bp, Homo sapiens
gcttacatcccattg

SEQ ID NO: 1260363 - DNA, 15 bp, Homo sapiens
cgcttacatcccatt

SEQ ID NO: 1260364 - DNA, 15 bp, Homo sapiens
tcgcttacatcccat

SEQ ID NO: 1260365 - DNA, 15 bp, Homo sapiens
ttcgcttacatccca

SEQ ID NO: 1260366 - DNA, 15 bp, Homo sapiens
cttcgcttacatccc

SEQ ID NO: 1260367 - DNA, 15 bp, Homo sapiens
ccttcgcttacatcc

SEQ ID NO: 1260368 - DNA, 15 bp, Homo sapiens
accttcgcttacatc

SEQ ID NO: 1260369 - DNA, 15 bp, Homo sapiens
caccttcgcttacat

SEQ ID NO: 1260370 - DNA, 15 bp, Homo sapiens
acaccttcgcttaca

SEQ ID NO: 1260371 - DNA, 15 bp, Homo sapiens
tacaccttcgcttac

SEQ ID NO: 1260372 - DNA, 15 bp, Homo sapiens
atacaccttcgctta

SEQ ID NO: 1260373 - DNA, 15 bp, Homo sapiens
aatacaccttcgctt

SEQ ID NO: 1260374 - DNA, 15 bp, Homo sapiens
caatacaccttcgct

SEQ ID NO: 1260375 - DNA, 15 bp, Homo sapiens
acaatacaccttcgc

SEQ ID NO: 1260376 - DNA, 15 bp, Homo sapiens
cacaatacaccttcg

SEQ ID NO: 1260377 - DNA, 15 bp, Homo sapiens
ccacaatacaccttc

SEQ ID NO: 1260378 - DNA, 15 bp, Homo sapiens
gccacaatacacctt

SEQ ID NO: 1260379 - DNA, 15 bp, Homo sapiens
tgccacaatacacct

SEQ ID NO: 1260380 - DNA, 15 bp, Homo sapiens
ctgccacaatacacc

SEQ ID NO: 1260381 - DNA, 15 bp, Homo sapiens
actgccacaatacac

SEQ ID NO: 1260382 - DNA, 15 bp, Homo sapiens
aactgccacaataca

SEQ ID NO: 1260383 - DNA, 15 bp, Homo sapiens
aaactgccacaatac

SEQ ID NO: 1260384 - DNA, 15 bp, Homo sapiens
gaaactgccacaata

SEQ ID NO: 1260385 - DNA, 15 bp, Homo sapiens
ggaaactgccacaat

SEQ ID NO: 1260386 - DNA, 15 bp, Homo sapiens
tggaaactgccacaa

SEQ ID NO: 1260387 - DNA, 15 bp, Homo sapiens
ctggaaactgccaca

SEQ ID NO: 1260388 - DNA, 15 bp, Homo sapiens
cctggaaactgccac

SEQ ID NO: 1260389 - DNA, 15 bp, Homo sapiens
tcctggaaactgcca

SEQ ID NO: 1260390 - DNA, 15 bp, Homo sapiens
ttcctggaaactgcc

SEQ ID NO: 1260391 - DNA, 15 bp, Homo sapiens
attcctggaaactgc

SEQ ID NO: 1260392 - DNA, 15 bp, Homo sapiens
aattcctggaaactg

SEQ ID NO: 1260393 - DNA, 15 bp, Homo sapiens
aaattcctggaaact

SEQ ID NO: 1260394 - DNA, 15 bp, Homo sapiens
aaaattcctggaaac

SEQ ID NO: 1260395 - DNA, 15 bp, Homo sapiens
gaaaattcctggaaa

SEQ ID NO: 1260396 - DNA, 15 bp, Homo sapiens
ggaaaattcctggaa

SEQ ID NO: 1260397 - DNA, 15 bp, Homo sapiens
aggaaaattcctgga

SEQ ID NO: 1260398 - DNA, 15 bp, Homo sapiens
aaggaaaattcctgg

SEQ ID NO: 1260399 - DNA, 15 bp, Homo sapiens
taaggaaaattcctg

SEQ ID NO: 1260400 - DNA, 15 bp, Homo sapiens
ttaaggaaaattcct

SEQ ID NO: 1260401 - DNA, 15 bp, Homo sapiens
cttaaggaaaattcc

SEQ ID NO: 1260402 - DNA, 15 bp, Homo sapiens
acttaaggaaaattc

SEQ ID NO: 1260403 - DNA, 15 bp, Homo sapiens
cacttaaggaaaatt

SEQ ID NO: 1260404 - DNA, 15 bp, Homo sapiens
tcacttaaggaaaat

SEQ ID NO: 1260405 - DNA, 15 bp, Homo sapiens
ctcacttaaggaaaa

SEQ ID NO: 1260406 - DNA, 15 bp, Homo sapiens
tctcacttaaggaaa

SEQ ID NO: 1260407 - DNA, 15 bp, Homo sapiens
ttctcacttaaggaa

SEQ ID NO: 1260408 - DNA, 15 bp, Homo sapiens
gttctcacttaagga

SEQ ID NO: 1260409 - DNA, 15 bp, Homo sapiens
tgttctcacttaagg

SEQ ID NO: 1260410 - DNA, 15 bp, Homo sapiens
ctgttctcacttaag

SEQ ID NO: 1260411 - DNA, 15 bp, Homo sapiens
cctgttctcacttaa

SEQ ID NO: 1260412 - DNA, 15 bp, Homo sapiens
acgcctgttctcact

SEQ ID NO: 1260413 - DNA, 15 bp, Homo sapiens
cacgcctgttctcac

SEQ ID NO: 1260414 - DNA, 15 bp, Homo sapiens
acacgcctgttctca

SEQ ID NO: 1260415 - DNA, 15 bp, Homo sapiens
cacacgcctgttctc

SEQ ID NO: 1260416 - DNA, 15 bp, Homo sapiens
gcacacgcctgttct

SEQ ID NO: 1260417 - DNA, 15 bp, Homo sapiens
ggcacacgcctgttc

SEQ ID NO: 1260418 - DNA, 15 bp, Homo sapiens
aggcacacgcctgtt

SEQ ID NO: 1260419 - DNA, 15 bp, Homo sapiens
gaggcacacgcctgt

SEQ ID NO: 1260420 - DNA, 15 bp, Homo sapiens
agaggcacacgcctg

SEQ ID NO: 1260421 - DNA, 15 bp, Homo sapiens
cagaggcacacgcct

SEQ ID NO: 1260422 - DNA, 15 bp, Homo sapiens
ccagaggcacacgcc

SEQ ID NO: 1260423 - DNA, 15 bp, Homo sapiens
gccagaggcacacgc

SEQ ID NO: 1260424 - DNA, 15 bp, Homo sapiens
agccagaggcacacg

SEQ ID NO: 1260425 - DNA, 15 bp, Homo sapiens
aagccagaggcacac

SEQ ID NO: 1260426 - DNA, 15 bp, Homo sapiens
aaagccagaggcaca

SEQ ID NO: 1260427 - DNA, 15 bp, Homo sapiens
aaaagccagaggcac

SEQ ID NO: 1260428 - DNA, 15 bp, Homo sapiens
aaaaagccagaggca

SEQ ID NO: 1260429 - DNA, 15 bp, Homo sapiens
gaaaaagccagaggc

SEQ ID NO: 1260430 - DNA, 15 bp, Homo sapiens
agaaaaagccagagg

SEQ ID NO: 1260431 - DNA, 15 bp, Homo sapiens
aagaaaaagccagag

SEQ ID NO: 1260432 - DNA, 15 bp, Homo sapiens
aaagaaaaagccaga

SEQ ID NO: 1260433 - DNA, 15 bp, Homo sapiens
taaagaaaaagccag

SEQ ID NO: 1260434 - DNA, 15 bp, Homo sapiens
ataaagaaaaagcca

SEQ ID NO: 1260435 - DNA, 15 bp, Homo sapiens
cataaagaaaaagcc

SEQ ID NO: 1260436 - DNA, 15 bp, Homo sapiens
gcataaagaaaaagc

SEQ ID NO: 1260437 - DNA, 15 bp, Homo sapiens
ggcataaagaaaaag

SEQ ID NO: 1260438 - DNA, 15 bp, Homo sapiens
aggcataaagaaaaa

SEQ ID NO: 1260439 - DNA, 15 bp, Homo sapiens
aaggcataaagaaaa

SEQ ID NO: 1260440 - DNA, 15 bp, Homo sapiens
gaaggcataaagaaa

SEQ ID NO: 1260441 - DNA, 15 bp, Homo sapiens
ggaaggcataaagaa

SEQ ID NO: 1260442 - DNA, 15 bp, Homo sapiens
tggaaggcataaaga

SEQ ID NO: 1260443 - DNA, 15 bp, Homo sapiens
ctggaaggcataaag

SEQ ID NO: 1260444 - DNA, 15 bp, Homo sapiens
gctggaaggcataaa

SEQ ID NO: 1260445 - DNA, 15 bp, Homo sapiens
tgctggaaggcataa

SEQ ID NO: 1260446 - DNA, 15 bp, Homo sapiens
gtgctggaaggcata

SEQ ID NO: 1260447 - DNA, 15 bp, Homo sapiens
ggtgctggaaggcat

SEQ ID NO: 1260448 - DNA, 15 bp, Homo sapiens
gggtgctggaaggca

SEQ ID NO: 1260449 - DNA, 15 bp, Homo sapiens
agggtgctggaaggc

SEQ ID NO: 1260450 - DNA, 15 bp, Homo sapiens
cagggtgctggaagg

SEQ ID NO: 1260451 - DNA, 15 bp, Homo sapiens
gcagggtgctggaag

SEQ ID NO: 1260452 - DNA, 15 bp, Homo sapiens
agcagggtgctggaa

SEQ ID NO: 1260453 - DNA, 15 bp, Homo sapiens
cagcagggtgctgga

SEQ ID NO: 1260454 - DNA, 15 bp, Homo sapiens
acagcagggtgctgg

SEQ ID NO: 1260455 - DNA, 15 bp, Homo sapiens
aacagcagggtgctg

SEQ ID NO: 1260456 - DNA, 15 bp, Homo sapiens
aaacagcagggtgct

SEQ ID NO: 1260457 - DNA, 15 bp, Homo sapiens
taaacagcagggtgc

SEQ ID NO: 1260458 - DNA, 15 bp, Homo sapiens
ttaaacagcagggtg

SEQ ID NO: 1260459 - DNA, 15 bp, Homo sapiens
tttaaacagcagggt

SEQ ID NO: 1260460 - DNA, 15 bp, Homo sapiens
ttttaaacagcaggg

SEQ ID NO: 1260461 - DNA, 15 bp, Homo sapiens
gttttaaacagcagg

SEQ ID NO: 1260462 - DNA, 15 bp, Homo sapiens
cgttttaaacagcag

SEQ ID NO: 1260463 - DNA, 15 bp, Homo sapiens
acgttttaaacagca

SEQ ID NO: 1260464 - DNA, 15 bp, Homo sapiens
tacgttttaaacagc

SEQ ID NO: 1260465 - DNA, 15 bp, Homo sapiens
ctacgttttaaacag

SEQ ID NO: 1260466 - DNA, 15 bp, Homo sapiens
cctacgttttaaaca

SEQ ID NO: 1260467 - DNA, 15 bp, Homo sapiens
acctacgttttaaac

SEQ ID NO: 1260468 - DNA, 15 bp, Homo sapiens
tacctacgttttaaa

SEQ ID NO: 1260469 - DNA, 15 bp, Homo sapiens
gtacctacgttttaa

SEQ ID NO: 1260470 - DNA, 15 bp, Homo sapiens
cgtacctacgtttta

SEQ ID NO: 1260471 - DNA, 15 bp, Homo sapiens
tcgtacctacgtttt

SEQ ID NO: 1260472 - DNA, 15 bp, Homo sapiens
gtcgtacctacgttt

SEQ ID NO: 1260473 - DNA, 15 bp, Homo sapiens
agtcgtacctacgtt

SEQ ID NO: 1260474 - DNA, 15 bp, Homo sapiens
aagtcgtacctacgt

SEQ ID NO: 1260475 - DNA, 15 bp, Homo sapiens
aaagtcgtacctacg

SEQ ID NO: 1260476 - DNA, 15 bp, Homo sapiens
aaaagtcgtacctac

SEQ ID NO: 1260477 - DNA, 15 bp, Homo sapiens
caaaagtcgtaccta

SEQ ID NO: 1260478 - DNA, 15 bp, Homo sapiens
ccaaaagtcgtacct

SEQ ID NO: 1260479 - DNA, 15 bp, Homo sapiens
gccaaaagtcgtacc

SEQ ID NO: 1260480 - DNA, 15 bp, Homo sapiens
agccaaaagtcgtac

SEQ ID NO: 1260481 - DNA, 15 bp, Homo sapiens
cagccaaaagtcgta

SEQ ID NO: 1260482 - DNA, 15 bp, Homo sapiens
gcagccaaaagtcgt

SEQ ID NO: 1260483 - DNA, 15 bp, Homo sapiens
ggcagccaaaagtcg

SEQ ID NO: 1260484 - DNA, 15 bp, Homo sapiens
tggcagccaaaagtc

SEQ ID NO: 1260485 - DNA, 15 bp, Homo sapiens
atggcagccaaaagt

SEQ ID NO: 1260486 - DNA, 15 bp, Homo sapiens
gatggcagccaaaag

SEQ ID NO: 1260487 - DNA, 15 bp, Homo sapiens
ggatggcagccaaaa

SEQ ID NO: 1260488 - DNA, 15 bp, Homo sapiens
aggatggcagccaaa

SEQ ID NO: 1260489 - DNA, 15 bp, Homo sapiens
caggatggcagccaa

SEQ ID NO: 1260490 - DNA, 15 bp, Homo sapiens
ccaggatggcagcca

SEQ ID NO: 1260491 - DNA, 15 bp, Homo sapiens
tccaggatggcagcc

SEQ ID NO: 1260492 - DNA, 15 bp, Homo sapiens
gtccaggatggcagc

SEQ ID NO: 1260493 - DNA, 15 bp, Homo sapiens
ggtccaggatggcag

SEQ ID NO: 1260494 - DNA, 15 bp, Homo sapiens
gggtccaggatggca

SEQ ID NO: 1260495 - DNA, 15 bp, Homo sapiens
agggtccaggatggc

SEQ ID NO: 1260496 - DNA, 15 bp, Homo sapiens
aagggtccaggatgg

SEQ ID NO: 1260497 - DNA, 15 bp, Homo sapiens
taagggtccaggatg

SEQ ID NO: 1260498 - DNA, 15 bp, Homo sapiens
ttaagggtccaggat

SEQ ID NO: 1260499 - DNA, 15 bp, Homo sapiens
cttaagggtccagga

SEQ ID NO: 1260500 - DNA, 15 bp, Homo sapiens
acttaagggtccagg

SEQ ID NO: 1260501 - DNA, 15 bp, Homo sapiens
tacttaagggtccag

SEQ ID NO: 1260502 - DNA, 15 bp, Homo sapiens
gtacttaagggtcca

SEQ ID NO: 1260503 - DNA, 15 bp, Homo sapiens
ggtacttaagggtcc

SEQ ID NO: 1260504 - DNA, 15 bp, Homo sapiens
gggtacttaagggtc

SEQ ID NO: 1260505 - DNA, 15 bp, Homo sapiens
agggtacttaagggt

SEQ ID NO: 1260506 - DNA, 15 bp, Homo sapiens
gagggtacttaaggg

SEQ ID NO: 1260507 - DNA, 15 bp, Homo sapiens
ggagggtacttaagg

SEQ ID NO: 1260508 - DNA, 15 bp, Homo sapiens
tggagggtacttaag

SEQ ID NO: 1260509 - DNA, 15 bp, Homo sapiens
ctggagggtacttaa

SEQ ID NO: 1260510 - DNA, 15 bp, Homo sapiens
cctggagggtactta

SEQ ID NO: 1260511 - DNA, 15 bp, Homo sapiens
ccctggagggtactt

SEQ ID NO: 1260512 - DNA, 15 bp, Homo sapiens
tccctggagggtact

SEQ ID NO: 1260513 - DNA, 15 bp, Homo sapiens
atccctggagggtac

SEQ ID NO: 1260514 - DNA, 15 bp, Homo sapiens
catccctggagggta

SEQ ID NO: 1260515 - DNA, 15 bp, Homo sapiens
tcatccctggagggt

SEQ ID NO: 1260516 - DNA, 15 bp, Homo sapiens
atcatccctggaggg

SEQ ID NO: 1260517 - DNA, 15 bp, Homo sapiens
tatcatccctggagg

SEQ ID NO: 1260518 - DNA, 15 bp, Homo sapiens
ctatcatccctggag

SEQ ID NO: 1260519 - DNA, 15 bp, Homo sapiens
tctatcatccctgga

SEQ ID NO: 1260520 - DNA, 15 bp, Homo sapiens
ctctatcatccctgg

SEQ ID NO: 1260521 - DNA, 15 bp, Homo sapiens
actctatcatccctg

SEQ ID NO: 1260522 - DNA, 15 bp, Homo sapiens
aactctatcatccct

SEQ ID NO: 1260523 - DNA, 15 bp, Homo sapiens
taactctatcatccc

SEQ ID NO: 1260524 - DNA, 15 bp, Homo sapiens
ataactctatcatcc

SEQ ID NO: 1260525 - DNA, 15 bp, Homo sapiens
cataactctatcatc

SEQ ID NO: 1260526 - DNA, 15 bp, Homo sapiens
tcataactctatcat

SEQ ID NO: 1260527 - DNA, 15 bp, Homo sapiens
ctcataactctatca

SEQ ID NO: 1260528 - DNA, 15 bp, Homo sapiens
gctcataactctatc

SEQ ID NO: 1260529 - DNA, 15 bp, Homo sapiens
agctcataactctat

SEQ ID NO: 1260530 - DNA, 15 bp, Homo sapiens
cagctcataactcta

SEQ ID NO: 1260531 - DNA, 15 bp, Homo sapiens
tcagctcataactct

SEQ ID NO: 1260532 - DNA, 15 bp, Homo sapiens
ttcagctcataactc

SEQ ID NO: 1260533 - DNA, 15 bp, Homo sapiens
cttcagctcataact

SEQ ID NO: 1260534 - DNA, 15 bp, Homo sapiens
ccttcagctcataac

SEQ ID NO: 1260535 - DNA, 15 bp, Homo sapiens
accttcagctcataa

SEQ ID NO: 1260536 - DNA, 15 bp, Homo sapiens
caccttcagctcata

SEQ ID NO: 1260537 - DNA, 15 bp, Homo sapiens
gcaccttcagctcat

SEQ ID NO: 1260538 - DNA, 15 bp, Homo sapiens
ggcaccttcagctca

SEQ ID NO: 1260539 - DNA, 15 bp, Homo sapiens
aggcaccttcagctc

SEQ ID NO: 1260540 - DNA, 15 bp, Homo sapiens
caggcaccttcagct

SEQ ID NO: 1260541 - DNA, 15 bp, Homo sapiens
acaggcaccttcagc

SEQ ID NO: 1260542 - DNA, 15 bp, Homo sapiens
cacaggcaccttcag

SEQ ID NO: 1260543 - DNA, 15 bp, Homo sapiens
acacaggcaccttca

SEQ ID NO: 1260544 - DNA, 15 bp, Homo sapiens
gacacaggcaccttc

SEQ ID NO: 1260545 - DNA, 15 bp, Homo sapiens
ggacacaggcacctt

SEQ ID NO: 1260546 - DNA, 15 bp, Homo sapiens
gggacacaggcacct

SEQ ID NO: 1260547 - DNA, 15 bp, Homo sapiens
agggacacaggcacc

SEQ ID NO: 1260548 - DNA, 15 bp, Homo sapiens
cagggacacaggcac

SEQ ID NO: 1260549 - DNA, 15 bp, Homo sapiens
tcagggacacaggca

SEQ ID NO: 1260550 - DNA, 15 bp, Homo sapiens
ctcagggacacaggc

SEQ ID NO: 1260551 - DNA, 15 bp, Homo sapiens
cctcagggacacagg

SEQ ID NO: 1260552 - DNA, 15 bp, Homo sapiens
tcctcagggacacag

SEQ ID NO: 1260553 - DNA, 15 bp, Homo sapiens
gtcctcagggacaca

SEQ ID NO: 1260554 - DNA, 15 bp, Homo sapiens
agtcctcagggacac

SEQ ID NO: 1260555 - DNA, 15 bp, Homo sapiens
aagtcctcagggaca

SEQ ID NO: 1260556 - DNA, 15 bp, Homo sapiens
gaagtcctcagggac

SEQ ID NO: 1260557 - DNA, 15 bp, Homo sapiens
tgaagtcctcaggga

SEQ ID NO: 1260558 - DNA, 15 bp, Homo sapiens
gtgaagtcctcaggg

SEQ ID NO: 1260559 - DNA, 15 bp, Homo sapiens
agtgaagtcctcagg

SEQ ID NO: 1260560 - DNA, 15 bp, Homo sapiens
cagtgaagtcctcag

SEQ ID NO: 1260561 - DNA, 15 bp, Homo sapiens
tcagtgaagtcctca

SEQ ID NO: 1260562 - DNA, 15 bp, Homo sapiens
ctcagtgaagtcctc

SEQ ID NO: 1260563 - DNA, 15 bp, Homo sapiens
gctcagtgaagtcct

SEQ ID NO: 1260564 - DNA, 15 bp, Homo sapiens
tgctcagtgaagtcc

SEQ ID NO: 1260565 - DNA, 15 bp, Homo sapiens
ctgctcagtgaagtc

SEQ ID NO: 1260566 - DNA, 15 bp, Homo sapiens
tctgctcagtgaagt

SEQ ID NO: 1260567 - DNA, 15 bp, Homo sapiens
ttctgctcagtgaag

SEQ ID NO: 1260568 - DNA, 15 bp, Homo sapiens
gttctgctcagtgaa

SEQ ID NO: 1260569 - DNA, 15 bp, Homo sapiens
ggttctgctcagtga

SEQ ID NO: 1260570 - DNA, 15 bp, Homo sapiens
aggttctgctcagtg

SEQ ID NO: 1260571 - DNA, 15 bp, Homo sapiens
aaggttctgctcagt

SEQ ID NO: 1260572 - DNA, 15 bp, Homo sapiens
gaaggttctgctcag

SEQ ID NO: 1260573 - DNA, 15 bp, Homo sapiens
tgaaggttctgctca

SEQ ID NO: 1260574 - DNA, 15 bp, Homo sapiens
gtgaaggttctgctc

SEQ ID NO: 1260575 - DNA, 15 bp, Homo sapiens
agtgaaggttctgct

SEQ ID NO: 1260576 - DNA, 15 bp, Homo sapiens
aagtgaaggttctgc

SEQ ID NO: 1260577 - DNA, 15 bp, Homo sapiens
taagtgaaggttctg

SEQ ID NO: 1260578 - DNA, 15 bp, Homo sapiens
ctaagtgaaggttct

SEQ ID NO: 1260579 - DNA, 15 bp, Homo sapiens
actaagtgaaggttc

SEQ ID NO: 1260580 - DNA, 15 bp, Homo sapiens
gactaagtgaaggtt

SEQ ID NO: 1260581 - DNA, 15 bp, Homo sapiens
ggactaagtgaaggt

SEQ ID NO: 1260582 - DNA, 15 bp, Homo sapiens
aggactaagtgaagg

SEQ ID NO: 1260583 - DNA, 15 bp, Homo sapiens
taggactaagtgaag

SEQ ID NO: 1260584 - DNA, 15 bp, Homo sapiens
ctaggactaagtgaa

SEQ ID NO: 1260585 - DNA, 15 bp, Homo sapiens
tctaggactaagtga

SEQ ID NO: 1260586 - DNA, 15 bp, Homo sapiens
ttctaggactaagtg

SEQ ID NO: 1260587 - DNA, 15 bp, Homo sapiens
attctaggactaagt

SEQ ID NO: 1260588 - DNA, 15 bp, Homo sapiens
aattctaggactaag

SEQ ID NO: 1260589 - DNA, 15 bp, Homo sapiens
gaattctaggactaa

SEQ ID NO: 1260590 - DNA, 15 bp, Homo sapiens
ggaattctaggacta

SEQ ID NO: 1260591 - DNA, 15 bp, Homo sapiens
aggaattctaggact

SEQ ID NO: 1260592 - DNA, 15 bp, Homo sapiens
taggaattctaggac

SEQ ID NO: 1260593 - DNA, 15 bp, Homo sapiens
gtaggaattctagga

SEQ ID NO: 1260594 - DNA, 15 bp, Homo sapiens
ggtaggaattctagg

SEQ ID NO: 1260595 - DNA, 15 bp, Homo sapiens
aggtaggaattctag

SEQ ID NO: 1260596 - DNA, 15 bp, Homo sapiens
gaggtaggaattcta

SEQ ID NO: 1260597 - DNA, 15 bp, Homo sapiens
agaggtaggaattct

SEQ ID NO: 1260598 - DNA, 15 bp, Homo sapiens
tagaggtaggaattc

SEQ ID NO: 1260599 - DNA, 15 bp, Homo sapiens
ctagaggtaggaatt

SEQ ID NO: 1260600 - DNA, 15 bp, Homo sapiens
tctagaggtaggaat

SEQ ID NO: 1260601 - DNA, 15 bp, Homo sapiens
gtctagaggtaggaa

SEQ ID NO: 1260602 - DNA, 15 bp, Homo sapiens
agtctagaggtagga

SEQ ID NO: 1260603 - DNA, 15 bp, Homo sapiens
aagtctagaggtagg

SEQ ID NO: 1260604 - DNA, 15 bp, Homo sapiens
aaagtctagaggtag

SEQ ID NO: 1260605 - DNA, 15 bp, Homo sapiens
aaaagtctagaggta

SEQ ID NO: 1260606 - DNA, 15 bp, Homo sapiens
taaaagtctagaggt

SEQ ID NO: 1260607 - DNA, 15 bp, Homo sapiens
gtaaaagtctagagg

SEQ ID NO: 1260608 - DNA, 15 bp, Homo sapiens
ggtaaaagtctagag

SEQ ID NO: 1260609 - DNA, 15 bp, Homo sapiens
aggtaaaagtctaga

SEQ ID NO: 1260610 - DNA, 15 bp, Homo sapiens
caggtaaaagtctag

SEQ ID NO: 1260611 - DNA, 15 bp, Homo sapiens
ccaggtaaaagtcta

SEQ ID NO: 1260612 - DNA, 15 bp, Homo sapiens
cccaggtaaaagtct

SEQ ID NO: 1260613 - DNA, 15 bp, Homo sapiens
tcccaggtaaaagtc

SEQ ID NO: 1260614 - DNA, 15 bp, Homo sapiens
atcccaggtaaaagt

SEQ ID NO: 1260615 - DNA, 15 bp, Homo sapiens
tatcccaggtaaaag

SEQ ID NO: 1260616 - DNA, 15 bp, Homo sapiens
gtatcccaggtaaaa

SEQ ID NO: 1260617 - DNA, 15 bp, Homo sapiens
agtatcccaggtaaa

SEQ ID NO: 1260618 - DNA, 15 bp, Homo sapiens
tagtatcccaggtaa

SEQ ID NO: 1260619 - DNA, 15 bp, Homo sapiens
ttagtatcccaggta

SEQ ID NO: 1260620 - DNA, 15 bp, Homo sapiens
attagtatcccaggt

SEQ ID NO: 1260621 - DNA, 15 bp, Homo sapiens
gattagtatcccagg

SEQ ID NO: 1260622 - DNA, 15 bp, Homo sapiens
agattagtatcccag

SEQ ID NO: 1260623 - DNA, 15 bp, Homo sapiens
aagattagtatccca

SEQ ID NO: 1260624 - DNA, 15 bp, Homo sapiens
aaagattagtatccc

SEQ ID NO: 1260625 - DNA, 15 bp, Homo sapiens
aaaagattagtatcc

SEQ ID NO: 1260626 - DNA, 15 bp, Homo sapiens
taaaagattagtatc

SEQ ID NO: 1260627 - DNA, 15 bp, Homo sapiens
ataaaagattagtat

SEQ ID NO: 1260628 - DNA, 15 bp, Homo sapiens
aataaaagattagta

SEQ ID NO: 1260629 - DNA, 15 bp, Homo sapiens
aaataaaagattagt

SEQ ID NO: 1260630 - DNA, 15 bp, Homo sapiens
taaataaaagattag

SEQ ID NO: 1260631 - DNA, 15 bp, Homo sapiens
ttaaataaaagatta

SEQ ID NO: 1260632 - DNA, 15 bp, Homo sapiens
attaaataaaagatt

SEQ ID NO: 1260633 - DNA, 15 bp, Homo sapiens
gattaaataaaagat

SEQ ID NO: 1260634 - DNA, 15 bp, Homo sapiens
agattaaataaaaga

SEQ ID NO: 1260635 - DNA, 15 bp, Homo sapiens
tagattaaataaaag

SEQ ID NO: 1260636 - DNA, 15 bp, Homo sapiens
atagattaaataaaa

SEQ ID NO: 1260637 - DNA, 15 bp, Homo sapiens
aatagattaaataaa

SEQ ID NO: 1260638 - DNA, 15 bp, Homo sapiens
caatagattaaataa

SEQ ID NO: 1260639 - DNA, 15 bp, Homo sapiens
acaatagattaaata

SEQ ID NO: 1260640 - DNA, 15 bp, Homo sapiens
aacaatagattaaat

SEQ ID NO: 1260641 - DNA, 15 bp, Homo sapiens
taacaatagattaaa

SEQ ID NO: 1260642 - DNA, 15 bp, Homo sapiens
ataacaatagattaa

SEQ ID NO: 1260643 - DNA, 15 bp, Homo sapiens
aataacaatagatta

SEQ ID NO: 1260644 - DNA, 15 bp, Homo sapiens
aaataacaatagatt

SEQ ID NO: 1260645 - DNA, 15 bp, Homo sapiens
aaaataacaatagat

SEQ ID NO: 1260646 - DNA, 15 bp, Homo sapiens
caaaataacaataga

SEQ ID NO: 1260647 - DNA, 15 bp, Homo sapiens
ccaaaataacaatag

SEQ ID NO: 1260648 - DNA, 15 bp, Homo sapiens
cccaaaataacaata

SEQ ID NO: 1260649 - DNA, 15 bp, Homo sapiens
acccaaaataacaat

SEQ ID NO: 1260650 - DNA, 15 bp, Homo sapiens
aacccaaaataacaa

SEQ ID NO: 1260651 - DNA, 15 bp, Homo sapiens
gaacccaaaataaca

SEQ ID NO: 1260652 - DNA, 15 bp, Homo sapiens
agaacccaaaataac

SEQ ID NO: 1260653 - DNA, 15 bp, Homo sapiens
cagaacccaaaataa

SEQ ID NO: 1260654 - DNA, 15 bp, Homo sapiens
acagaacccaaaata

SEQ ID NO: 1260655 - DNA, 15 bp, Homo sapiens
aacagaacccaaaat

SEQ ID NO: 1260656 - DNA, 15 bp, Homo sapiens
taacagaacccaaaa

SEQ ID NO: 1260657 - DNA, 15 bp, Homo sapiens
ataacagaacccaaa

SEQ ID NO: 1260658 - DNA, 15 bp, Homo sapiens
aataacagaacccaa

SEQ ID NO: 1260659 - DNA, 15 bp, Homo sapiens
taataacagaaccca

SEQ ID NO: 1260660 - DNA, 15 bp, Homo sapiens
ctaataacagaaccc

SEQ ID NO: 1260661 - DNA, 15 bp, Homo sapiens
gctaataacagaacc

SEQ ID NO: 1260662 - DNA, 15 bp, Homo sapiens
tgctaataacagaac

SEQ ID NO: 1260663 - DNA, 15 bp, Homo sapiens
ctgctaataacagaa

SEQ ID NO: 1260664 - DNA, 15 bp, Homo sapiens
gctgctaataacaga

SEQ ID NO: 1260665 - DNA, 15 bp, Homo sapiens
agctgctaataacag

SEQ ID NO: 1260666 - DNA, 15 bp, Homo sapiens
tagctgctaataaca

SEQ ID NO: 1260667 - DNA, 15 bp, Homo sapiens
ttagctgctaataac

SEQ ID NO: 1260668 - DNA, 15 bp, Homo sapiens
gttagctgctaataa

SEQ ID NO: 1260669 - DNA, 15 bp, Homo sapiens
tgttagctgctaata

SEQ ID NO: 1260670 - DNA, 15 bp, Homo sapiens
atgttagctgctaat

SEQ ID NO: 1260671 - DNA, 15 bp, Homo sapiens
tatgttagctgctaa

SEQ ID NO: 1260672 - DNA, 15 bp, Homo sapiens
ttatgttagctgcta

SEQ ID NO: 1260673 - DNA, 15 bp, Homo sapiens
attatgttagctgct

SEQ ID NO: 1260674 - DNA, 15 bp, Homo sapiens
gattatgttagctgc

SEQ ID NO: 1260675 - DNA, 15 bp, Homo sapiens
ggattatgttagctg

SEQ ID NO: 1260676 - DNA, 15 bp, Homo sapiens
aggattatgttagct

SEQ ID NO: 1260677 - DNA, 15 bp, Homo sapiens
caggattatgttagc

SEQ ID NO: 1260678 - DNA, 15 bp, Homo sapiens
acaggattatgttag

SEQ ID NO: 1260679 - DNA, 15 bp, Homo sapiens
gacaggattatgtta

SEQ ID NO: 1260680 - DNA, 15 bp, Homo sapiens
tgacaggattatgtt

SEQ ID NO: 1260681 - DNA, 15 bp, Homo sapiens
atgacaggattatgt

SEQ ID NO: 1260682 - DNA, 15 bp, Homo sapiens
tatgacaggattatg

SEQ ID NO: 1260683 - DNA, 15 bp, Homo sapiens
gtatgacaggattat

SEQ ID NO: 1260684 - DNA, 15 bp, Homo sapiens
agtatgacaggatta

SEQ ID NO: 1260685 - DNA, 15 bp, Homo sapiens
tagtatgacaggatt

SEQ ID NO: 1260686 - DNA, 15 bp, Homo sapiens
atagtatgacaggat

SEQ ID NO: 1260687 - DNA, 15 bp, Homo sapiens
aatagtatgacagga

SEQ ID NO: 1260688 - DNA, 15 bp, Homo sapiens
caatagtatgacagg

SEQ ID NO: 1260689 - DNA, 15 bp, Homo sapiens
tcaatagtatgacag

SEQ ID NO: 1260690 - DNA, 15 bp, Homo sapiens
ttcaatagtatgaca

SEQ ID NO: 1260691 - DNA, 15 bp, Homo sapiens
tttcaatagtatgac

SEQ ID NO: 1260692 - DNA, 15 bp, Homo sapiens
atttcaatagtatga

SEQ ID NO: 1260693 - DNA, 15 bp, Homo sapiens
tatttcaatagtatg

SEQ ID NO: 1260694 - DNA, 15 bp, Homo sapiens
atatttcaatagtat

SEQ ID NO: 1260695 - DNA, 15 bp, Homo sapiens
tatatttcaatagta

SEQ ID NO: 1260696 - DNA, 15 bp, Homo sapiens
ctatatttcaatagt

SEQ ID NO: 1260697 - DNA, 15 bp, Homo sapiens
actatatttcaatag

SEQ ID NO: 1260698 - DNA, 15 bp, Homo sapiens
gactatatttcaata

SEQ ID NO: 1260699 - DNA, 15 bp, Homo sapiens
agactatatttcaat

SEQ ID NO: 1260700 - DNA, 15 bp, Homo sapiens
gagactatatttcaa

SEQ ID NO: 1260701 - DNA, 15 bp, Homo sapiens
gagagactatatttc

SEQ ID NO: 1260702 - DNA, 15 bp, Homo sapiens
agagagactatattt

SEQ ID NO: 1260703 - DNA, 15 bp, Homo sapiens
tagagagactatatt

SEQ ID NO: 1260704 - DNA, 15 bp, Homo sapiens
atagagagactatat

SEQ ID NO: 1260705 - DNA, 15 bp, Homo sapiens
catagagagactata

SEQ ID NO: 1260706 - DNA, 15 bp, Homo sapiens
acatagagagactat

SEQ ID NO: 1260707 - DNA, 15 bp, Homo sapiens
aacatagagagacta

SEQ ID NO: 1260708 - DNA, 15 bp, Homo sapiens
aaacatagagagact

SEQ ID NO: 1260709 - DNA, 15 bp, Homo sapiens
aaaacatagagagac

SEQ ID NO: 1260710 - DNA, 15 bp, Homo sapiens
aaaaacatagagaga

SEQ ID NO: 1260711 - DNA, 15 bp, Homo sapiens
taaaaacatagagag

SEQ ID NO: 1260712 - DNA, 15 bp, Homo sapiens
ctaaaaacatagaga

SEQ ID NO: 1260713 - DNA, 15 bp, Homo sapiens
cctaaaaacatagag

SEQ ID NO: 1260714 - DNA, 15 bp, Homo sapiens
acctaaaaacataga

SEQ ID NO: 1260715 - DNA, 15 bp, Homo sapiens
gacctaaaaacatag

SEQ ID NO: 1260716 - DNA, 15 bp, Homo sapiens
tgacctaaaaacata

SEQ ID NO: 1260717 - DNA, 15 bp, Homo sapiens
atgacctaaaaacat

SEQ ID NO: 1260718 - DNA, 15 bp, Homo sapiens
tatgacctaaaaaca

SEQ ID NO: 1260719 - DNA, 15 bp, Homo sapiens
gtatgacctaaaaac

SEQ ID NO: 1260720 - DNA, 15 bp, Homo sapiens
agtatgacctaaaaa

SEQ ID NO: 1260721 - DNA, 15 bp, Homo sapiens
gagtatgacctaaaa

SEQ ID NO: 1260722 - DNA, 15 bp, Homo sapiens
cgagtatgacctaaa

SEQ ID NO: 1260723 - DNA, 15 bp, Homo sapiens
tcgagtatgacctaa

SEQ ID NO: 1260724 - DNA, 15 bp, Homo sapiens
gtcgagtatgaccta

SEQ ID NO: 1260725 - DNA, 15 bp, Homo sapiens
tgtcgagtatgacct

SEQ ID NO: 1260726 - DNA, 15 bp, Homo sapiens
ctgtcgagtatgacc

SEQ ID NO: 1260727 - DNA, 15 bp, Homo sapiens
actgtcgagtatgac

SEQ ID NO: 1260728 - DNA, 15 bp, Homo sapiens
tactgtcgagtatga

SEQ ID NO: 1260729 - DNA, 15 bp, Homo sapiens
atactgtcgagtatg

SEQ ID NO: 1260730 - DNA, 15 bp, Homo sapiens
catactgtcgagtat

SEQ ID NO: 1260731 - DNA, 15 bp, Homo sapiens
acatactgtcgagta

SEQ ID NO: 1260732 - DNA, 15 bp, Homo sapiens
tacatactgtcgagt

SEQ ID NO: 1260733 - DNA, 15 bp, Homo sapiens
ttacatactgtcgag

SEQ ID NO: 1260734 - DNA, 15 bp, Homo sapiens
attacatactgtcga

SEQ ID NO: 1260735 - DNA, 15 bp, Homo sapiens
aattacatactgtcg

SEQ ID NO: 1260736 - DNA, 15 bp, Homo sapiens
aaattacatactgtc

SEQ ID NO: 1260737 - DNA, 15 bp, Homo sapiens
aaaattacatactgt

SEQ ID NO: 1260738 - DNA, 15 bp, Homo sapiens
aaaaattacatactg

SEQ ID NO: 1260739 - DNA, 15 bp, Homo sapiens
aaaaaattacatact

SEQ ID NO: 1260740 - DNA, 15 bp, Homo sapiens
aaaaaaattacatac

SEQ ID NO: 1260741 - DNA, 15 bp, Homo sapiens
aaaaaaaattacata

SEQ ID NO: 1260742 - DNA, 15 bp, Homo sapiens
aaaaaaaaattacat

SEQ ID NO: 1260743 - DNA, 15 bp, Homo sapiens
gccactggactccag

SEQ ID NO: 1260744 - DNA, 15 bp, Homo sapiens
cgccactggactcca

SEQ ID NO: 1260745 - DNA, 15 bp, Homo sapiens
acgccactggactcc

SEQ ID NO: 1260746 - DNA, 15 bp, Homo sapiens
cacgccactggactc

SEQ ID NO: 1260747 - DNA, 15 bp, Homo sapiens
tcacgccactggact

SEQ ID NO: 1260748 - DNA, 15 bp, Homo sapiens
atcacgccactggac

SEQ ID NO: 1260749 - DNA, 15 bp, Homo sapiens
gatcacgccactgga

SEQ ID NO: 1260750 - DNA, 15 bp, Homo sapiens
agatcacgccactgg

SEQ ID NO: 1260751 - DNA, 15 bp, Homo sapiens
gtttgcagtgagctg

SEQ ID NO: 1260752 - DNA, 15 bp, Homo sapiens
agtttgcagtgagct

SEQ ID NO: 1260753 - DNA, 15 bp, Homo sapiens
gagtttgcagtgagc

SEQ ID NO: 1260754 - DNA, 15 bp, Homo sapiens
agtggagtttgcagt

SEQ ID NO: 1260755 - DNA, 15 bp, Homo sapiens
aagtggagtttgcag

SEQ ID NO: 1260756 - DNA, 15 bp, Homo sapiens
gaagtggagtttgca

SEQ ID NO: 1260757 - DNA, 15 bp, Homo sapiens
ggaagtggagtttgc

SEQ ID NO: 1260758 - DNA, 15 bp, Homo sapiens
aggaagtggagtttg

SEQ ID NO: 1260759 - DNA, 15 bp, Homo sapiens
caggaagtggagttt

SEQ ID NO: 1260760 - DNA, 15 bp, Homo sapiens
ccaggaagtggagtt

SEQ ID NO: 1260761 - DNA, 15 bp, Homo sapiens
cccaggaagtggagt

SEQ ID NO: 1260762 - DNA, 15 bp, Homo sapiens
acccaggaagtggag

SEQ ID NO: 1260763 - DNA, 15 bp, Homo sapiens
aacccaggaagtgga

SEQ ID NO: 1260764 - DNA, 15 bp, Homo sapiens
gaacccaggaagtgg

SEQ ID NO: 1260765 - DNA, 15 bp, Homo sapiens
tgaacccaggaagtg

SEQ ID NO: 1260766 - DNA, 15 bp, Homo sapiens
ctgaacccaggaagt

SEQ ID NO: 1260767 - DNA, 15 bp, Homo sapiens
cctgaacccaggaag

SEQ ID NO: 1260768 - DNA, 15 bp, Homo sapiens
acctgaacccaggaa

SEQ ID NO: 1260769 - DNA, 15 bp, Homo sapiens
tcacctgaacccagg

SEQ ID NO: 1260770 - DNA, 15 bp, Homo sapiens
atcacctgaacccag

SEQ ID NO: 1260771 - DNA, 15 bp, Homo sapiens
aatcacctgaaccca

SEQ ID NO: 1260772 - DNA, 15 bp, Homo sapiens
gaatcacctgaaccc

SEQ ID NO: 1260773 - DNA, 15 bp, Homo sapiens
agaatcacctgaacc

SEQ ID NO: 1260774 - DNA, 15 bp, Homo sapiens
gagaatcacctgaac

SEQ ID NO: 1260775 - DNA, 15 bp, Homo sapiens
agagaatcacctgaa

SEQ ID NO: 1260776 - DNA, 15 bp, Homo sapiens
aagagaatcacctga

SEQ ID NO: 1260777 - DNA, 15 bp, Homo sapiens
caagagaatcacctg

SEQ ID NO: 1260778 - DNA, 15 bp, Homo sapiens
gcaagagaatcacct

SEQ ID NO: 1260779 - DNA, 15 bp, Homo sapiens
ggcaagagaatcacc

SEQ ID NO: 1260780 - DNA, 15 bp, Homo sapiens
aaggcaagagaatca

SEQ ID NO: 1260781 - DNA, 15 bp, Homo sapiens
taaggcaagagaatc

SEQ ID NO: 1260782 - DNA, 15 bp, Homo sapiens
ctaaggcaagagaat

SEQ ID NO: 1260783 - DNA, 15 bp, Homo sapiens
gctaaggcaagagaa

SEQ ID NO: 1260784 - DNA, 15 bp, Homo sapiens
ggctaaggcaagaga

SEQ ID NO: 1260785 - DNA, 15 bp, Homo sapiens
aggctaaggcaagag

SEQ ID NO: 1260786 - DNA, 15 bp, Homo sapiens
gaggctaaggcaaga

SEQ ID NO: 1260787 - DNA, 15 bp, Homo sapiens
ggaggctaaggcaag

SEQ ID NO: 1260788 - DNA, 15 bp, Homo sapiens
aggaggctaaggcaa

SEQ ID NO: 1260789 - DNA, 15 bp, Homo sapiens
cactcaggaggctaa

SEQ ID NO: 1260790 - DNA, 15 bp, Homo sapiens
ccactcaggaggcta

SEQ ID NO: 1260791 - DNA, 15 bp, Homo sapiens
ctgtagtcccagcca

SEQ ID NO: 1260792 - DNA, 15 bp, Homo sapiens
tcatgcctgtagtcc

SEQ ID NO: 1260793 - DNA, 15 bp, Homo sapiens
ctcatgcctgtagtc

SEQ ID NO: 1260794 - DNA, 15 bp, Homo sapiens
gctcatgcctgtagt

SEQ ID NO: 1260795 - DNA, 15 bp, Homo sapiens
ggctcatgcctgtag

SEQ ID NO: 1260796 - DNA, 15 bp, Homo sapiens
atggctcatgcctgt

SEQ ID NO: 1260797 - DNA, 15 bp, Homo sapiens
gatggctcatgcctg

SEQ ID NO: 1260798 - DNA, 15 bp, Homo sapiens
tgatggctcatgcct

SEQ ID NO: 1260799 - DNA, 15 bp, Homo sapiens
gtgatggctcatgcc

SEQ ID NO: 1260800 - DNA, 15 bp, Homo sapiens
cgtgatggctcatgc

SEQ ID NO: 1260801 - DNA, 15 bp, Homo sapiens
gcgtgatggctcatg

SEQ ID NO: 1260802 - DNA, 15 bp, Homo sapiens
ggcgtgatggctcat

SEQ ID NO: 1260803 - DNA, 15 bp, Homo sapiens
aggcgtgatggctca

SEQ ID NO: 1260804 - DNA, 15 bp, Homo sapiens
caggcgtgatggctc

SEQ ID NO: 1260805 - DNA, 15 bp, Homo sapiens
ccaggcgtgatggct

SEQ ID NO: 1260806 - DNA, 15 bp, Homo sapiens
cccaggcgtgatggc

SEQ ID NO: 1260807 - DNA, 15 bp, Homo sapiens
acccaggcgtgatgg

SEQ ID NO: 1260808 - DNA, 15 bp, Homo sapiens
tacccaggcgtgatg

SEQ ID NO: 1260809 - DNA, 15 bp, Homo sapiens
ttacccaggcgtgat

SEQ ID NO: 1260810 - DNA, 15 bp, Homo sapiens
attacccaggcgtga

SEQ ID NO: 1260811 - DNA, 15 bp, Homo sapiens
aattacccaggcgtg

SEQ ID NO: 1260812 - DNA, 15 bp, Homo sapiens
aaattacccaggcgt

SEQ ID NO: 1260813 - DNA, 15 bp, Homo sapiens
aaaattacccaggcg

SEQ ID NO: 1260814 - DNA, 15 bp, Homo sapiens
caaaaattacccagg

SEQ ID NO: 1260815 - DNA, 15 bp, Homo sapiens
acaaaaattacccag

SEQ ID NO: 1260816 - DNA, 15 bp, Homo sapiens
tacaaaaattaccca

SEQ ID NO: 1260817 - DNA, 15 bp, Homo sapiens
tatctgtactaaaaa

SEQ ID NO: 1260818 - DNA, 15 bp, Homo sapiens
ctatctgtactaaaa

SEQ ID NO: 1260819 - DNA, 15 bp, Homo sapiens
cctatctgtactaaa

SEQ ID NO: 1260820 - DNA, 15 bp, Homo sapiens
tcctatctgtactaa

SEQ ID NO: 1260821 - DNA, 15 bp, Homo sapiens
atcctatctgtacta

SEQ ID NO: 1260822 - DNA, 15 bp, Homo sapiens
aatcctatctgtact

SEQ ID NO: 1260823 - DNA, 15 bp, Homo sapiens
aaatcctatctgtac

SEQ ID NO: 1260824 - DNA, 15 bp, Homo sapiens
gaaatcctatctgta

SEQ ID NO: 1260825 - DNA, 15 bp, Homo sapiens
cgaaatcctatctgt

SEQ ID NO: 1260826 - DNA, 15 bp, Homo sapiens
gcgaaatcctatctg

SEQ ID NO: 1260827 - DNA, 15 bp, Homo sapiens
ggcgaaatcctatct

SEQ ID NO: 1260828 - DNA, 15 bp, Homo sapiens
tggcgaaatcctatc

SEQ ID NO: 1260829 - DNA, 15 bp, Homo sapiens
atggcgaaatcctat

SEQ ID NO: 1260830 - DNA, 15 bp, Homo sapiens
catggcgaaatccta

SEQ ID NO: 1260831 - DNA, 15 bp, Homo sapiens
acatggcgaaatcct

SEQ ID NO: 1260832 - DNA, 15 bp, Homo sapiens
aacatggcgaaatcc

SEQ ID NO: 1260833 - DNA, 15 bp, Homo sapiens
caacatggcgaaatc

SEQ ID NO: 1260834 - DNA, 15 bp, Homo sapiens
ccaacatggcgaaat

SEQ ID NO: 1260835 - DNA, 15 bp, Homo sapiens
agatcgcttgaggcc

SEQ ID NO: 1260836 - DNA, 15 bp, Homo sapiens
cagatcgcttgaggc

SEQ ID NO: 1260837 - DNA, 15 bp, Homo sapiens
gcagatcgcttgagg

SEQ ID NO: 1260838 - DNA, 15 bp, Homo sapiens
tgcagatcgcttgag

SEQ ID NO: 1260839 - DNA, 15 bp, Homo sapiens
atgcagatcgcttga

SEQ ID NO: 1260840 - DNA, 15 bp, Homo sapiens
catgcagatcgcttg

SEQ ID NO: 1260841 - DNA, 15 bp, Homo sapiens
gcatgcagatcgctt

SEQ ID NO: 1260842 - DNA, 15 bp, Homo sapiens
ggcatgcagatcgct

SEQ ID NO: 1260843 - DNA, 15 bp, Homo sapiens
aggcatgcagatcgc

SEQ ID NO: 1260844 - DNA, 15 bp, Homo sapiens
aaggcatgcagatcg

SEQ ID NO: 1260845 - DNA, 15 bp, Homo sapiens
caaggcatgcagatc

SEQ ID NO: 1260846 - DNA, 15 bp, Homo sapiens
ccaaggcatgcagat

SEQ ID NO: 1260847 - DNA, 15 bp, Homo sapiens
accaaggcatgcaga

SEQ ID NO: 1260848 - DNA, 15 bp, Homo sapiens
gaccaaggcatgcag

SEQ ID NO: 1260849 - DNA, 15 bp, Homo sapiens
agaccaaggcatgca

SEQ ID NO: 1260850 - DNA, 15 bp, Homo sapiens
gagaccaaggcatgc

SEQ ID NO: 1260851 - DNA, 15 bp, Homo sapiens
agagaccaaggcatg

SEQ ID NO: 1260852 - DNA, 15 bp, Homo sapiens
gagagaccaaggcat

SEQ ID NO: 1260853 - DNA, 15 bp, Homo sapiens
tgagagaccaaggca

SEQ ID NO: 1260854 - DNA, 15 bp, Homo sapiens
ttgagagaccaaggc

SEQ ID NO: 1260855 - DNA, 15 bp, Homo sapiens
tttgagagaccaagg

SEQ ID NO: 1260856 - DNA, 15 bp, Homo sapiens
ctttgagagaccaag

SEQ ID NO: 1260857 - DNA, 15 bp, Homo sapiens
actttgagagaccaa

SEQ ID NO: 1260858 - DNA, 15 bp, Homo sapiens
cactttgagagacca

SEQ ID NO: 1260859 - DNA, 15 bp, Homo sapiens
gcactttgagagacc

SEQ ID NO: 1260860 - DNA, 15 bp, Homo sapiens
agcactttgagagac

SEQ ID NO: 1260861 - DNA, 15 bp, Homo sapiens
cagcactttgagaga

SEQ ID NO: 1260862 - DNA, 15 bp, Homo sapiens
ccccagcactttgag

SEQ ID NO: 1260863 - DNA, 15 bp, Homo sapiens
accccagcactttga

SEQ ID NO: 1260864 - DNA, 15 bp, Homo sapiens
tctgtaaccccagca

SEQ ID NO: 1260865 - DNA, 15 bp, Homo sapiens
atctgtaaccccagc

SEQ ID NO: 1260866 - DNA, 15 bp, Homo sapiens
catctgtaaccccag

SEQ ID NO: 1260867 - DNA, 15 bp, Homo sapiens
acatctgtaacccca

SEQ ID NO: 1260868 - DNA, 15 bp, Homo sapiens
cacatctgtaacccc

SEQ ID NO: 1260869 - DNA, 15 bp, Homo sapiens
tcacatctgtaaccc

SEQ ID NO: 1260870 - DNA, 15 bp, Homo sapiens
ctcacatctgtaacc

SEQ ID NO: 1260871 - DNA, 15 bp, Homo sapiens
actcacatctgtaac

SEQ ID NO: 1260872 - DNA, 15 bp, Homo sapiens
gactcacatctgtaa

SEQ ID NO: 1260873 - DNA, 15 bp, Homo sapiens
tgactcacatctgta

SEQ ID NO: 1260874 - DNA, 15 bp, Homo sapiens
gtgactcacatctgt

SEQ ID NO: 1260875 - DNA, 15 bp, Homo sapiens
ggtgactcacatctg

SEQ ID NO: 1260876 - DNA, 15 bp, Homo sapiens
tggtgactcacatct

SEQ ID NO: 1260877 - DNA, 15 bp, Homo sapiens
ttggtgactcacatc

SEQ ID NO: 1260878 - DNA, 15 bp, Homo sapiens
tttggtgactcacat

SEQ ID NO: 1260879 - DNA, 15 bp, Homo sapiens
gtttggtgactcaca

SEQ ID NO: 1260880 - DNA, 15 bp, Homo sapiens
ggtttggtgactcac

SEQ ID NO: 1260881 - DNA, 15 bp, Homo sapiens
aggtttggtgactca

SEQ ID NO: 1260882 - DNA, 15 bp, Homo sapiens
caggtttggtgactc

SEQ ID NO: 1260883 - DNA, 15 bp, Homo sapiens
ccaggtttggtgact

SEQ ID NO: 1260884 - DNA, 15 bp, Homo sapiens
gccaggtttggtgac

SEQ ID NO: 1260885 - DNA, 15 bp, Homo sapiens
ggccaggtttggtga

SEQ ID NO: 1260886 - DNA, 15 bp, Homo sapiens
gggccaggtttggtg

SEQ ID NO: 1260887 - DNA, 15 bp, Homo sapiens
tgggccaggtttggt

SEQ ID NO: 1260888 - DNA, 15 bp, Homo sapiens
gtgggccaggtttgg

SEQ ID NO: 1260889 - DNA, 15 bp, Homo sapiens
tgtgggccaggtttg

SEQ ID NO: 1260890 - DNA, 15 bp, Homo sapiens
ctgtgggccaggttt

SEQ ID NO: 1260891 - DNA, 15 bp, Homo sapiens
actgtgggccaggtt

SEQ ID NO: 1260892 - DNA, 15 bp, Homo sapiens
tactgtgggccaggt

SEQ ID NO: 1260893 - DNA, 15 bp, Homo sapiens
atactgtgggccagg

SEQ ID NO: 1260894 - DNA, 15 bp, Homo sapiens
catactgtgggccag

SEQ ID NO: 1260895 - DNA, 15 bp, Homo sapiens
acatactgtgggcca

SEQ ID NO: 1260896 - DNA, 15 bp, Homo sapiens
tacatactgtgggcc

SEQ ID NO: 1260897 - DNA, 15 bp, Homo sapiens
ttacatactgtgggc

SEQ ID NO: 1260898 - DNA, 15 bp, Homo sapiens
attacatactgtggg

SEQ ID NO: 1260899 - DNA, 15 bp, Homo sapiens
aattacatactgtgg

SEQ ID NO: 1260900 - DNA, 15 bp, Homo sapiens
aaattacatactgtg

SEQ ID NO: 1260901 - DNA, 15 bp, Homo sapiens
gaaattacatactgt

SEQ ID NO: 1260902 - DNA, 15 bp, Homo sapiens
agaaattacatactg

SEQ ID NO: 1260903 - DNA, 15 bp, Homo sapiens
aagaaattacatact

SEQ ID NO: 1260904 - DNA, 15 bp, Homo sapiens
taagaaattacatac

SEQ ID NO: 1260905 - DNA, 15 bp, Homo sapiens
gtaagaaattacata

SEQ ID NO: 1260906 - DNA, 15 bp, Homo sapiens
ggtaagaaattacat

SEQ ID NO: 1260907 - DNA, 15 bp, Homo sapiens
aggtaagaaattaca

SEQ ID NO: 1260908 - DNA, 15 bp, Homo sapiens
aaggtaagaaattac

SEQ ID NO: 1260909 - DNA, 15 bp, Homo sapiens
gaaggtaagaaatta

SEQ ID NO: 1260910 - DNA, 15 bp, Homo sapiens
ggaaggtaagaaatt

SEQ ID NO: 1260911 - DNA, 15 bp, Homo sapiens
cggaaggtaagaaat

SEQ ID NO: 1260912 - DNA, 15 bp, Homo sapiens
gcggaaggtaagaaa

SEQ ID NO: 1260913 - DNA, 15 bp, Homo sapiens
agcggaaggtaagaa

SEQ ID NO: 1260914 - DNA, 15 bp, Homo sapiens
gagcggaaggtaaga

SEQ ID NO: 1260915 - DNA, 15 bp, Homo sapiens
tgagcggaaggtaag

SEQ ID NO: 1260916 - DNA, 15 bp, Homo sapiens
atgagcggaaggtaa

SEQ ID NO: 1260917 - DNA, 15 bp, Homo sapiens
gatgagcggaaggta

SEQ ID NO: 1260918 - DNA, 15 bp, Homo sapiens
agatgagcggaaggt

SEQ ID NO: 1260919 - DNA, 15 bp, Homo sapiens
aagatgagcggaagg

SEQ ID NO: 1260920 - DNA, 15 bp, Homo sapiens
gaagatgagcggaag

SEQ ID NO: 1260921 - DNA, 15 bp, Homo sapiens
tgaagatgagcggaa

SEQ ID NO: 1260922 - DNA, 15 bp, Homo sapiens
gtgaagatgagcgga

SEQ ID NO: 1260923 - DNA, 15 bp, Homo sapiens
ggtgaagatgagcgg

SEQ ID NO: 1260924 - DNA, 15 bp, Homo sapiens
gggtgaagatgagcg

SEQ ID NO: 1260925 - DNA, 15 bp, Homo sapiens
tgggtgaagatgagc

SEQ ID NO: 1260926 - DNA, 15 bp, Homo sapiens
ttgggtgaagatgag

SEQ ID NO: 1260927 - DNA, 15 bp, Homo sapiens
tttgggtgaagatga

SEQ ID NO: 1260928 - DNA, 15 bp, Homo sapiens
ttttgggtgaagatg

SEQ ID NO: 1260929 - DNA, 15 bp, Homo sapiens
gttttgggtgaagat

SEQ ID NO: 1260930 - DNA, 15 bp, Homo sapiens
tgttttgggtgaaga

SEQ ID NO: 1260931 - DNA, 15 bp, Homo sapiens
atgttttgggtgaag

SEQ ID NO: 1260932 - DNA, 15 bp, Homo sapiens
aatgttttgggtgaa

SEQ ID NO: 1260933 - DNA, 15 bp, Homo sapiens
gaatgttttgggtga

SEQ ID NO: 1260934 - DNA, 15 bp, Homo sapiens
agaatgttttgggtg

SEQ ID NO: 1260935 - DNA, 15 bp, Homo sapiens
cagaatgttttgggt

SEQ ID NO: 1260936 - DNA, 15 bp, Homo sapiens
tcagaatgttttggg

SEQ ID NO: 1260937 - DNA, 15 bp, Homo sapiens
atcagaatgttttgg

SEQ ID NO: 1260938 - DNA, 15 bp, Homo sapiens
tatcagaatgttttg

SEQ ID NO: 1260939 - DNA, 15 bp, Homo sapiens
ctatcagaatgtttt

SEQ ID NO: 1260940 - DNA, 15 bp, Homo sapiens
gctatcagaatgttt

SEQ ID NO: 1260941 - DNA, 15 bp, Homo sapiens
ggctatcagaatgtt

SEQ ID NO: 1260942 - DNA, 15 bp, Homo sapiens
gggctatcagaatgt

SEQ ID NO: 1260943 - DNA, 15 bp, Homo sapiens
agggctatcagaatg

SEQ ID NO: 1260944 - DNA, 15 bp, Homo sapiens
aagggctatcagaat

SEQ ID NO: 1260945 - DNA, 15 bp, Homo sapiens
taagggctatcagaa

SEQ ID NO: 1260946 - DNA, 15 bp, Homo sapiens
ataagggctatcaga

SEQ ID NO: 1260947 - DNA, 15 bp, Homo sapiens
aataagggctatcag

SEQ ID NO: 1260948 - DNA, 15 bp, Homo sapiens
caataagggctatca

SEQ ID NO: 1260949 - DNA, 15 bp, Homo sapiens
tcaataagggctatc

SEQ ID NO: 1260950 - DNA, 15 bp, Homo sapiens
atcaataagggctat

SEQ ID NO: 1260951 - DNA, 15 bp, Homo sapiens
aatcaataagggcta

SEQ ID NO: 1260952 - DNA, 15 bp, Homo sapiens
ctaatcaataagggc

SEQ ID NO: 1260953 - DNA, 15 bp, Homo sapiens
tctaatcaataaggg

SEQ ID NO: 1260954 - DNA, 15 bp, Homo sapiens
ttctaatcaataagg

SEQ ID NO: 1260955 - DNA, 15 bp, Homo sapiens
cttctaatcaataag

SEQ ID NO: 1260956 - DNA, 15 bp, Homo sapiens
tcttctaatcaataa

SEQ ID NO: 1260957 - DNA, 15 bp, Homo sapiens
ctcttctaatcaata

SEQ ID NO: 1260958 - DNA, 15 bp, Homo sapiens
cctcttctaatcaat

SEQ ID NO: 1260959 - DNA, 15 bp, Homo sapiens
tcctcttctaatcaa

SEQ ID NO: 1260960 - DNA, 15 bp, Homo sapiens
ctcctcttctaatca

SEQ ID NO: 1260961 - DNA, 15 bp, Homo sapiens
cctcctcttctaatc

SEQ ID NO: 1260962 - DNA, 15 bp, Homo sapiens
tcctcctcttctaat

SEQ ID NO: 1260963 - DNA, 15 bp, Homo sapiens
ctcctcctcttctaa

SEQ ID NO: 1260964 - DNA, 15 bp, Homo sapiens
tctcctcctcttcta

SEQ ID NO: 1260965 - DNA, 15 bp, Homo sapiens
ttctcctcctcttct

SEQ ID NO: 1260966 - DNA, 15 bp, Homo sapiens
attctcctcctcttc

SEQ ID NO: 1260967 - DNA, 15 bp, Homo sapiens
cattctcctcctctt

SEQ ID NO: 1260968 - DNA, 15 bp, Homo sapiens
gcattctcctcctct

SEQ ID NO: 1260969 - DNA, 15 bp, Homo sapiens
tgcattctcctcctc

SEQ ID NO: 1260970 - DNA, 15 bp, Homo sapiens
atgcattctcctcct

SEQ ID NO: 1260971 - DNA, 15 bp, Homo sapiens
aatgcattctcctcc

SEQ ID NO: 1260972 - DNA, 15 bp, Homo sapiens
taatgcattctcctc

SEQ ID NO: 1260973 - DNA, 15 bp, Homo sapiens
ttaatgcattctcct

SEQ ID NO: 1260974 - DNA, 15 bp, Homo sapiens
cttaatgcattctcc

SEQ ID NO: 1260975 - DNA, 15 bp, Homo sapiens
acttaatgcattctc

SEQ ID NO: 1260976 - DNA, 15 bp, Homo sapiens
aacttaatgcattct

SEQ ID NO: 1260977 - DNA, 15 bp, Homo sapiens
aaacttaatgcattc

SEQ ID NO: 1260978 - DNA, 15 bp, Homo sapiens
taaacttaatgcatt

SEQ ID NO: 1260979 - DNA, 15 bp, Homo sapiens
ctaaacttaatgcat

SEQ ID NO: 1260980 - DNA, 15 bp, Homo sapiens
actaaacttaatgca

SEQ ID NO: 1260981 - DNA, 15 bp, Homo sapiens
aactaaacttaatgc

SEQ ID NO: 1260982 - DNA, 15 bp, Homo sapiens
caactaaacttaatg

SEQ ID NO: 1260983 - DNA, 15 bp, Homo sapiens
ccaactaaacttaat

SEQ ID NO: 1260984 - DNA, 15 bp, Homo sapiens
gccaactaaacttaa

SEQ ID NO: 1260985 - DNA, 15 bp, Homo sapiens
tgccaactaaactta

SEQ ID NO: 1260986 - DNA, 15 bp, Homo sapiens
ctgccaactaaactt

SEQ ID NO: 1260987 - DNA, 15 bp, Homo sapiens
tctgccaactaaact

SEQ ID NO: 1260988 - DNA, 15 bp, Homo sapiens
ttctgccaactaaac

SEQ ID NO: 1260989 - DNA, 15 bp, Homo sapiens
tttctgccaactaaa

SEQ ID NO: 1260990 - DNA, 15 bp, Homo sapiens
atttctgccaactaa

SEQ ID NO: 1260991 - DNA, 15 bp, Homo sapiens
aatttctgccaacta

SEQ ID NO: 1260992 - DNA, 15 bp, Homo sapiens
caatttctgccaact

SEQ ID NO: 1260993 - DNA, 15 bp, Homo sapiens
acaatttctgccaac

SEQ ID NO: 1260994 - DNA, 15 bp, Homo sapiens
cacaatttctgccaa

SEQ ID NO: 1260995 - DNA, 15 bp, Homo sapiens
acacaatttctgcca

SEQ ID NO: 1260996 - DNA, 15 bp, Homo sapiens
cacacaatttctgcc

SEQ ID NO: 1260997 - DNA, 15 bp, Homo sapiens
tcacacaatttctgc

SEQ ID NO: 1260998 - DNA, 15 bp, Homo sapiens
ttcacacaatttctg

SEQ ID NO: 1260999 - DNA, 15 bp, Homo sapiens
attcacacaatttct

SEQ ID NO: 1261000 - DNA, 15 bp, Homo sapiens
aattcacacaatttc

SEQ ID NO: 1261001 - DNA, 15 bp, Homo sapiens
aaattcacacaattt

SEQ ID NO: 1261002 - DNA, 15 bp, Homo sapiens
taaattcacacaatt

SEQ ID NO: 1261003 - DNA, 15 bp, Homo sapiens
ttaaattcacacaat

SEQ ID NO: 1261004 - DNA, 15 bp, Homo sapiens
tttaaattcacacaa

SEQ ID NO: 1261005 - DNA, 15 bp, Homo sapiens
ttttaaattcacaca

SEQ ID NO: 1261006 - DNA, 15 bp, Homo sapiens
attttaaattcacac

SEQ ID NO: 1261007 - DNA, 15 bp, Homo sapiens
gattttaaattcaca

SEQ ID NO: 1261008 - DNA, 15 bp, Homo sapiens
tgattttaaattcac

SEQ ID NO: 1261009 - DNA, 15 bp, Homo sapiens
catgattttaaattc

SEQ ID NO: 1261010 - DNA, 15 bp, Homo sapiens
gcatgattttaaatt

SEQ ID NO: 1261011 - DNA, 15 bp, Homo sapiens
tgcatgattttaaat

SEQ ID NO: 1261012 - DNA, 15 bp, Homo sapiens
atgcatgattttaaa

SEQ ID NO: 1261013 - DNA, 15 bp, Homo sapiens
aatgcatgattttaa

SEQ ID NO: 1261014 - DNA, 15 bp, Homo sapiens
aaatgcatgatttta

SEQ ID NO: 1261015 - DNA, 15 bp, Homo sapiens
taaatgcatgatttt

SEQ ID NO: 1261016 - DNA, 15 bp, Homo sapiens
ctaaatgcatgattt

SEQ ID NO: 1261017 - DNA, 15 bp, Homo sapiens
tctaaatgcatgatt

SEQ ID NO: 1261018 - DNA, 15 bp, Homo sapiens
ctctaaatgcatgat

SEQ ID NO: 1261019 - DNA, 15 bp, Homo sapiens
tctctaaatgcatga

SEQ ID NO: 1261020 - DNA, 15 bp, Homo sapiens
ttctctaaatgcatg

SEQ ID NO: 1261021 - DNA, 15 bp, Homo sapiens
tttctctaaatgcat

SEQ ID NO: 1261022 - DNA, 15 bp, Homo sapiens
gtttctctaaatgca

SEQ ID NO: 1261023 - DNA, 15 bp, Homo sapiens
tgtttctctaaatgc

SEQ ID NO: 1261024 - DNA, 15 bp, Homo sapiens
atgtttctctaaatg

SEQ ID NO: 1261025 - DNA, 15 bp, Homo sapiens
catgtttctctaaat

SEQ ID NO: 1261026 - DNA, 15 bp, Homo sapiens
acatgtttctctaaa

SEQ ID NO: 1261027 - DNA, 15 bp, Homo sapiens
cacatgtttctctaa

SEQ ID NO: 1261028 - DNA, 15 bp, Homo sapiens
acacatgtttctcta

SEQ ID NO: 1261029 - DNA, 15 bp, Homo sapiens
cacacatgtttctct

SEQ ID NO: 1261030 - DNA, 15 bp, Homo sapiens
ccacacatgtttctc

SEQ ID NO: 1261031 - DNA, 15 bp, Homo sapiens
gccacacatgtttct

SEQ ID NO: 1261032 - DNA, 15 bp, Homo sapiens
agccacacatgtttc

SEQ ID NO: 1261033 - DNA, 15 bp, Homo sapiens
gagccacacatgttt

SEQ ID NO: 1261034 - DNA, 15 bp, Homo sapiens
tgagccacacatgtt

SEQ ID NO: 1261035 - DNA, 15 bp, Homo sapiens
atgagccacacatgt

SEQ ID NO: 1261036 - DNA, 15 bp, Homo sapiens
gatgagccacacatg

SEQ ID NO: 1261037 - DNA, 15 bp, Homo sapiens
tgatgagccacacat

SEQ ID NO: 1261038 - DNA, 15 bp, Homo sapiens
ttgatgagccacaca

SEQ ID NO: 1261039 - DNA, 15 bp, Homo sapiens
cttgatgagccacac

SEQ ID NO: 1261040 - DNA, 15 bp, Homo sapiens
gcttgatgagccaca

SEQ ID NO: 1261041 - DNA, 15 bp, Homo sapiens
ggcttgatgagccac

SEQ ID NO: 1261042 - DNA, 15 bp, Homo sapiens
tggcttgatgagcca

SEQ ID NO: 1261043 - DNA, 15 bp, Homo sapiens
atggcttgatgagcc

SEQ ID NO: 1261044 - DNA, 15 bp, Homo sapiens
aatggcttgatgagc

SEQ ID NO: 1261045 - DNA, 15 bp, Homo sapiens
taatggcttgatgag

SEQ ID NO: 1261046 - DNA, 15 bp, Homo sapiens
ttaatggcttgatga

SEQ ID NO: 1261047 - DNA, 15 bp, Homo sapiens
cttaatggcttgatg

SEQ ID NO: 1261048 - DNA, 15 bp, Homo sapiens
tcttaatggcttgat

SEQ ID NO: 1261049 - DNA, 15 bp, Homo sapiens
ttcttaatggcttga

SEQ ID NO: 1261050 - DNA, 15 bp, Homo sapiens
tttcttaatggcttg

SEQ ID NO: 1261051 - DNA, 15 bp, Homo sapiens
ttttcttaatggctt

SEQ ID NO: 1261052 - DNA, 15 bp, Homo sapiens
gttttcttaatggct

SEQ ID NO: 1261053 - DNA, 15 bp, Homo sapiens
tgttttcttaatggc

SEQ ID NO: 1261054 - DNA, 15 bp, Homo sapiens
ttgttttcttaatgg

SEQ ID NO: 1261055 - DNA, 15 bp, Homo sapiens
tttgttttcttaatg

SEQ ID NO: 1261056 - DNA, 15 bp, Homo sapiens
ttttgttttcttaat

SEQ ID NO: 1261057 - DNA, 15 bp, Homo sapiens
tttttgttttcttaa

SEQ ID NO: 1261058 - DNA, 15 bp, Homo sapiens
ttttttgttttctta

SEQ ID NO: 1261059 - DNA, 15 bp, Homo sapiens
cttttttgttttctt

SEQ ID NO: 1261060 - DNA, 15 bp, Homo sapiens
tcttttttgttttct

SEQ ID NO: 1261061 - DNA, 15 bp, Homo sapiens
ctcttttttgttttc

SEQ ID NO: 1261062 - DNA, 15 bp, Homo sapiens
cctcttttttgtttt

SEQ ID NO: 1261063 - DNA, 15 bp, Homo sapiens
tcctcttttttgttt

SEQ ID NO: 1261064 - DNA, 15 bp, Homo sapiens
ttcctcttttttgtt

SEQ ID NO: 1261065 - DNA, 15 bp, Homo sapiens
tttcctcttttttgt

SEQ ID NO: 1261066 - DNA, 15 bp, Homo sapiens
gtttcctcttttttg

SEQ ID NO: 1261067 - DNA, 15 bp, Homo sapiens
agtttcctctttttt

SEQ ID NO: 1261068 - DNA, 15 bp, Homo sapiens
tagtttcctcttttt

SEQ ID NO: 1261069 - DNA, 15 bp, Homo sapiens
gtagtttcctctttt

SEQ ID NO: 1261070 - DNA, 15 bp, Homo sapiens
tgtagtttcctcttt

SEQ ID NO: 1261071 - DNA, 15 bp, Homo sapiens
ttgtagtttcctctt

SEQ ID NO: 1261072 - DNA, 15 bp, Homo sapiens
tttgtagtttcctct

SEQ ID NO: 1261073 - DNA, 15 bp, Homo sapiens
ttttgtagtttcctc

SEQ ID NO: 1261074 - DNA, 15 bp, Homo sapiens
attttgtagtttcct

SEQ ID NO: 1261075 - DNA, 15 bp, Homo sapiens
cattttgtagtttcc

SEQ ID NO: 1261076 - DNA, 15 bp, Homo sapiens
acattttgtagtttc

SEQ ID NO: 1261077 - DNA, 15 bp, Homo sapiens
aacattttgtagttt

SEQ ID NO: 1261078 - DNA, 15 bp, Homo sapiens
aaacattttgtagtt

SEQ ID NO: 1261079 - DNA, 15 bp, Homo sapiens
caaacattttgtagt

SEQ ID NO: 1261080 - DNA, 15 bp, Homo sapiens
gcaaacattttgtag

SEQ ID NO: 1261081 - DNA, 15 bp, Homo sapiens
tgcaaacattttgta

SEQ ID NO: 1261082 - DNA, 15 bp, Homo sapiens
atgcaaacattttgt

SEQ ID NO: 1261083 - DNA, 15 bp, Homo sapiens
gaatgcaaacatttt

SEQ ID NO: 1261084 - DNA, 15 bp, Homo sapiens
ggaatgcaaacattt

SEQ ID NO: 1261085 - DNA, 15 bp, Homo sapiens
aggaatgcaaacatt

SEQ ID NO: 1261086 - DNA, 15 bp, Homo sapiens
caggaatgcaaacat

SEQ ID NO: 1261087 - DNA, 15 bp, Homo sapiens
acaggaatgcaaaca

SEQ ID NO: 1261088 - DNA, 15 bp, Homo sapiens
tacaggaatgcaaac

SEQ ID NO: 1261089 - DNA, 15 bp, Homo sapiens
ctacaggaatgcaaa

SEQ ID NO: 1261090 - DNA, 15 bp, Homo sapiens
gctacaggaatgcaa

SEQ ID NO: 1261091 - DNA, 15 bp, Homo sapiens
ggctacaggaatgca

SEQ ID NO: 1261092 - DNA, 15 bp, Homo sapiens
gggctacaggaatgc

SEQ ID NO: 1261093 - DNA, 15 bp, Homo sapiens
tgggctacaggaatg

SEQ ID NO: 1261094 - DNA, 15 bp, Homo sapiens
gtgggctacaggaat

SEQ ID NO: 1261095 - DNA, 15 bp, Homo sapiens
tgtgggctacaggaa

SEQ ID NO: 1261096 - DNA, 15 bp, Homo sapiens
ttgtgggctacagga

SEQ ID NO: 1261097 - DNA, 15 bp, Homo sapiens
cttgtgggctacagg

SEQ ID NO: 1261098 - DNA, 15 bp, Homo sapiens
tcttgtgggctacag

SEQ ID NO: 1261099 - DNA, 15 bp, Homo sapiens
ctcttgtgggctaca

SEQ ID NO: 1261100 - DNA, 15 bp, Homo sapiens
tctcttgtgggctac

SEQ ID NO: 1261101 - DNA, 15 bp, Homo sapiens
gtctcttgtgggcta

SEQ ID NO: 1261102 - DNA, 15 bp, Homo sapiens
tgtctcttgtgggct

SEQ ID NO: 1261103 - DNA, 15 bp, Homo sapiens
ttgtctcttgtgggc

SEQ ID NO: 1261104 - DNA, 15 bp, Homo sapiens
tttgtctcttgtggg

SEQ ID NO: 1261105 - DNA, 15 bp, Homo sapiens
atttgtctcttgtgg

SEQ ID NO: 1261106 - DNA, 15 bp, Homo sapiens
gatttgtctcttgtg

SEQ ID NO: 1261107 - DNA, 15 bp, Homo sapiens
agatttgtctcttgt

SEQ ID NO: 1261108 - DNA, 15 bp, Homo sapiens
tagatttgtctcttg

SEQ ID NO: 1261109 - DNA, 15 bp, Homo sapiens
ctagatttgtctctt

SEQ ID NO: 1261110 - DNA, 15 bp, Homo sapiens
tctagatttgtctct

SEQ ID NO: 1261111 - DNA, 15 bp, Homo sapiens
ttctagatttgtctc

SEQ ID NO: 1261112 - DNA, 15 bp, Homo sapiens
gttctagatttgtct

SEQ ID NO: 1261113 - DNA, 15 bp, Homo sapiens
tgttctagatttgtc

SEQ ID NO: 1261114 - DNA, 15 bp, Homo sapiens
ttgttctagatttgt

SEQ ID NO: 1261115 - DNA, 15 bp, Homo sapiens
attgttctagatttg

SEQ ID NO: 1261116 - DNA, 15 bp, Homo sapiens
cattgttctagattt

SEQ ID NO: 1261117 - DNA, 15 bp, Homo sapiens
gcattgttctagatt

SEQ ID NO: 1261118 - DNA, 15 bp, Homo sapiens
agcattgttctagat

SEQ ID NO: 1261119 - DNA, 15 bp, Homo sapiens
cagcattgttctaga

SEQ ID NO: 1261120 - DNA, 15 bp, Homo sapiens
ccagcattgttctag

SEQ ID NO: 1261121 - DNA, 15 bp, Homo sapiens
cccagcattgttcta

SEQ ID NO: 1261122 - DNA, 15 bp, Homo sapiens
ccccagcattgttct

SEQ ID NO: 1261123 - DNA, 15 bp, Homo sapiens
accccagcattgttc

SEQ ID NO: 1261124 - DNA, 15 bp, Homo sapiens
gaccccagcattgtt

SEQ ID NO: 1261125 - DNA, 15 bp, Homo sapiens
agaccccagcattgt

SEQ ID NO: 1261126 - DNA, 15 bp, Homo sapiens
cagaccccagcattg

SEQ ID NO: 1261127 - DNA, 15 bp, Homo sapiens
ccagaccccagcatt

SEQ ID NO: 1261128 - DNA, 15 bp, Homo sapiens
accagaccccagcat

SEQ ID NO: 1261129 - DNA, 15 bp, Homo sapiens
gaccagaccccagca

SEQ ID NO: 1261130 - DNA, 15 bp, Homo sapiens
tgaccagaccccagc

SEQ ID NO: 1261131 - DNA, 15 bp, Homo sapiens
ttgaccagaccccag

SEQ ID NO: 1261132 - DNA, 15 bp, Homo sapiens
cttgaccagacccca

SEQ ID NO: 1261133 - DNA, 15 bp, Homo sapiens
acttgaccagacccc

SEQ ID NO: 1261134 - DNA, 15 bp, Homo sapiens
tacttgaccagaccc

SEQ ID NO: 1261135 - DNA, 15 bp, Homo sapiens
ctacttgaccagacc

SEQ ID NO: 1261136 - DNA, 15 bp, Homo sapiens
cctacttgaccagac

SEQ ID NO: 1261137 - DNA, 15 bp, Homo sapiens
ccctacttgaccaga

SEQ ID NO: 1261138 - DNA, 15 bp, Homo sapiens
tccctacttgaccag

SEQ ID NO: 1261139 - DNA, 15 bp, Homo sapiens
ttccctacttgacca

SEQ ID NO: 1261140 - DNA, 15 bp, Homo sapiens
tttccctacttgacc

SEQ ID NO: 1261141 - DNA, 15 bp, Homo sapiens
ctttccctacttgac

SEQ ID NO: 1261142 - DNA, 15 bp, Homo sapiens
gctttccctacttga

SEQ ID NO: 1261143 - DNA, 15 bp, Homo sapiens
agctttccctacttg

SEQ ID NO: 1261144 - DNA, 15 bp, Homo sapiens
gagctttccctactt

SEQ ID NO: 1261145 - DNA, 15 bp, Homo sapiens
agagctttccctact

SEQ ID NO: 1261146 - DNA, 15 bp, Homo sapiens
gagagctttccctac

SEQ ID NO: 1261147 - DNA, 15 bp, Homo sapiens
tgagagctttcccta

SEQ ID NO: 1261148 - DNA, 15 bp, Homo sapiens
ctgagagctttccct

SEQ ID NO: 1261149 - DNA, 15 bp, Homo sapiens
actgagagctttccc

SEQ ID NO: 1261150 - DNA, 15 bp, Homo sapiens
tactgagagctttcc

SEQ ID NO: 1261151 - DNA, 15 bp, Homo sapiens
ttactgagagctttc

SEQ ID NO: 1261152 - DNA, 15 bp, Homo sapiens
cttactgagagcttt

SEQ ID NO: 1261153 - DNA, 15 bp, Homo sapiens
tcttactgagagctt

SEQ ID NO: 1261154 - DNA, 15 bp, Homo sapiens
gtcttactgagagct

SEQ ID NO: 1261155 - DNA, 15 bp, Homo sapiens
ggtcttactgagagc

SEQ ID NO: 1261156 - DNA, 15 bp, Homo sapiens
tggtcttactgagag

SEQ ID NO: 1261157 - DNA, 15 bp, Homo sapiens
ttggtcttactgaga

SEQ ID NO: 1261158 - DNA, 15 bp, Homo sapiens
cttggtcttactgag

SEQ ID NO: 1261159 - DNA, 15 bp, Homo sapiens
gcttggtcttactga

SEQ ID NO: 1261160 - DNA, 15 bp, Homo sapiens
tgcttggtcttactg

SEQ ID NO: 1261161 - DNA, 15 bp, Homo sapiens
gtgcttggtcttact

SEQ ID NO: 1261162 - DNA, 15 bp, Homo sapiens
tgtgcttggtcttac

SEQ ID NO: 1261163 - DNA, 15 bp, Homo sapiens
ttgtgcttggtctta

SEQ ID NO: 1261164 - DNA, 15 bp, Homo sapiens
tttgtgcttggtctt

SEQ ID NO: 1261165 - DNA, 15 bp, Homo sapiens
gtttgtgcttggtct

SEQ ID NO: 1261166 - DNA, 15 bp, Homo sapiens
ggtttgtgcttggtc

SEQ ID NO: 1261167 - DNA, 15 bp, Homo sapiens
gggtttgtgcttggt

SEQ ID NO: 1261168 - DNA, 15 bp, Homo sapiens
ggggtttgtgcttgg

SEQ ID NO: 1261169 - DNA, 15 bp, Homo sapiens
tggggtttgtgcttg

SEQ ID NO: 1261170 - DNA, 15 bp, Homo sapiens
gtggggtttgtgctt

SEQ ID NO: 1261171 - DNA, 15 bp, Homo sapiens
agtggggtttgtgct

SEQ ID NO: 1261172 - DNA, 15 bp, Homo sapiens
aagtggggtttgtgc

SEQ ID NO: 1261173 - DNA, 15 bp, Homo sapiens
gaagtggggtttgtg

SEQ ID NO: 1261174 - DNA, 15 bp, Homo sapiens
agaagtggggtttgt

SEQ ID NO: 1261175 - DNA, 15 bp, Homo sapiens
cagaagtggggtttg

SEQ ID NO: 1261176 - DNA, 15 bp, Homo sapiens
ccagaagtggggttt

SEQ ID NO: 1261177 - DNA, 15 bp, Homo sapiens
accagaagtggggtt

SEQ ID NO: 1261178 - DNA, 15 bp, Homo sapiens
aaccagaagtggggt

SEQ ID NO: 1261179 - DNA, 15 bp, Homo sapiens
aaaccagaagtgggg

SEQ ID NO: 1261180 - DNA, 15 bp, Homo sapiens
gaaaccagaagtggg

SEQ ID NO: 1261181 - DNA, 15 bp, Homo sapiens
ggaaaccagaagtgg

SEQ ID NO: 1261182 - DNA, 15 bp, Homo sapiens
aggaaaccagaagtg

SEQ ID NO: 1261183 - DNA, 15 bp, Homo sapiens
aaggaaaccagaagt

SEQ ID NO: 1261184 - DNA, 15 bp, Homo sapiens
caaggaaaccagaag

SEQ ID NO: 1261185 - DNA, 15 bp, Homo sapiens
ccaaggaaaccagaa

SEQ ID NO: 1261186 - DNA, 15 bp, Homo sapiens
accaaggaaaccaga

SEQ ID NO: 1261187 - DNA, 15 bp, Homo sapiens
aaccaaggaaaccag

SEQ ID NO: 1261188 - DNA, 15 bp, Homo sapiens
aaaccaaggaaacca

SEQ ID NO: 1261189 - DNA, 15 bp, Homo sapiens
caaaccaaggaaacc

SEQ ID NO: 1261190 - DNA, 15 bp, Homo sapiens
ccaaaccaaggaaac

SEQ ID NO: 1261191 - DNA, 15 bp, Homo sapiens
cccaaaccaaggaaa

SEQ ID NO: 1261192 - DNA, 15 bp, Homo sapiens
ccccaaaccaaggaa

SEQ ID NO: 1261193 - DNA, 15 bp, Homo sapiens
gccccaaaccaagga

SEQ ID NO: 1261194 - DNA, 15 bp, Homo sapiens
agccccaaaccaagg

SEQ ID NO: 1261195 - DNA, 15 bp, Homo sapiens
cagccccaaaccaag

SEQ ID NO: 1261196 - DNA, 15 bp, Homo sapiens
acagccccaaaccaa

SEQ ID NO: 1261197 - DNA, 15 bp, Homo sapiens
gacagccccaaacca

SEQ ID NO: 1261198 - DNA, 15 bp, Homo sapiens
agacagccccaaacc

SEQ ID NO: 1261199 - DNA, 15 bp, Homo sapiens
gagacagccccaaac

SEQ ID NO: 1261200 - DNA, 15 bp, Homo sapiens
tgagacagccccaaa

SEQ ID NO: 1261201 - DNA, 15 bp, Homo sapiens
atgagacagccccaa

SEQ ID NO: 1261202 - DNA, 15 bp, Homo sapiens
catgagacagcccca

SEQ ID NO: 1261203 - DNA, 15 bp, Homo sapiens
acatgagacagcccc

SEQ ID NO: 1261204 - DNA, 15 bp, Homo sapiens
aacatgagacagccc

SEQ ID NO: 1261205 - DNA, 15 bp, Homo sapiens
taacatgagacagcc

SEQ ID NO: 1261206 - DNA, 15 bp, Homo sapiens
ttaacatgagacagc

SEQ ID NO: 1261207 - DNA, 15 bp, Homo sapiens
attaacatgagacag

SEQ ID NO: 1261208 - DNA, 15 bp, Homo sapiens
cattaacatgagaca

SEQ ID NO: 1261209 - DNA, 15 bp, Homo sapiens
tcattaacatgagac

SEQ ID NO: 1261210 - DNA, 15 bp, Homo sapiens
atcattaacatgaga

SEQ ID NO: 1261211 - DNA, 15 bp, Homo sapiens
tatcattaacatgag

SEQ ID NO: 1261212 - DNA, 15 bp, Homo sapiens
atatcattaacatga

SEQ ID NO: 1261213 - DNA, 15 bp, Homo sapiens
aatatcattaacatg

SEQ ID NO: 1261214 - DNA, 15 bp, Homo sapiens
aaatatcattaacat

SEQ ID NO: 1261215 - DNA, 15 bp, Homo sapiens
aaaatatcattaaca

SEQ ID NO: 1261216 - DNA, 15 bp, Homo sapiens
aaaaatatcattaac

SEQ ID NO: 1261217 - DNA, 15 bp, Homo sapiens
gaaaaatatcattaa

SEQ ID NO: 1261218 - DNA, 15 bp, Homo sapiens
tgaaaaatatcatta

SEQ ID NO: 1261219 - DNA, 15 bp, Homo sapiens
atgaaaaatatcatt

SEQ ID NO: 1261220 - DNA, 15 bp, Homo sapiens
catgaaaaatatcat

SEQ ID NO: 1261221 - DNA, 15 bp, Homo sapiens
tcatgaaaaatatca

SEQ ID NO: 1261222 - DNA, 15 bp, Homo sapiens
ctcatgaaaaatatc

SEQ ID NO: 1261223 - DNA, 15 bp, Homo sapiens
tctcatgaaaaatat

SEQ ID NO: 1261224 - DNA, 15 bp, Homo sapiens
ttctcatgaaaaata

SEQ ID NO: 1261225 - DNA, 15 bp, Homo sapiens
tttctcatgaaaaat

SEQ ID NO: 1261226 - DNA, 15 bp, Homo sapiens
ttttctcatgaaaaa

SEQ ID NO: 1261227 - DNA, 15 bp, Homo sapiens
tttttctcatgaaaa

SEQ ID NO: 1261228 - DNA, 15 bp, Homo sapiens
gtttttctcatgaaa

SEQ ID NO: 1261229 - DNA, 15 bp, Homo sapiens
ggtttttctcatgaa

SEQ ID NO: 1261230 - DNA, 15 bp, Homo sapiens
tggtttttctcatga

SEQ ID NO: 1261231 - DNA, 15 bp, Homo sapiens
gtggtttttctcatg

SEQ ID NO: 1261232 - DNA, 15 bp, Homo sapiens
tgtggtttttctcat

SEQ ID NO: 1261233 - DNA, 15 bp, Homo sapiens
atgtggtttttctca

SEQ ID NO: 1261234 - DNA, 15 bp, Homo sapiens
catgtggtttttctc

SEQ ID NO: 1261235 - DNA, 15 bp, Homo sapiens
gcatgtggtttttct

SEQ ID NO: 1261236 - DNA, 15 bp, Homo sapiens
tgcatgtggtttttc

SEQ ID NO: 1261237 - DNA, 15 bp, Homo sapiens
ttgcatgtggttttt

SEQ ID NO: 1261238 - DNA, 15 bp, Homo sapiens
tttgcatgtggtttt

SEQ ID NO: 1261239 - DNA, 15 bp, Homo sapiens
atttgcatgtggttt

SEQ ID NO: 1261240 - DNA, 15 bp, Homo sapiens
catttgcatgtggtt

SEQ ID NO: 1261241 - DNA, 15 bp, Homo sapiens
tcatttgcatgtggt

SEQ ID NO: 1261242 - DNA, 15 bp, Homo sapiens
ttcatttgcatgtgg

SEQ ID NO: 1261243 - DNA, 15 bp, Homo sapiens
tttcatttgcatgtg

SEQ ID NO: 1261244 - DNA, 15 bp, Homo sapiens
gtttcatttgcatgt

SEQ ID NO: 1261245 - DNA, 15 bp, Homo sapiens
tgtttcatttgcatg

SEQ ID NO: 1261246 - DNA, 15 bp, Homo sapiens
ttgtttcatttgcat

SEQ ID NO: 1261247 - DNA, 15 bp, Homo sapiens
attgtttcatttgca

SEQ ID NO: 1261248 - DNA, 15 bp, Homo sapiens
aattgtttcatttgc

SEQ ID NO: 1261249 - DNA, 15 bp, Homo sapiens
gaattgtttcatttg

SEQ ID NO: 1261250 - DNA, 15 bp, Homo sapiens
cgaattgtttcattt

SEQ ID NO: 1261251 - DNA, 15 bp, Homo sapiens
acgaattgtttcatt

SEQ ID NO: 1261252 - DNA, 15 bp, Homo sapiens
aacgaattgtttcat

SEQ ID NO: 1261253 - DNA, 15 bp, Homo sapiens
caacgaattgtttca

SEQ ID NO: 1261254 - DNA, 15 bp, Homo sapiens
acaacgaattgtttc

SEQ ID NO: 1261255 - DNA, 15 bp, Homo sapiens
gacaacgaattgttt

SEQ ID NO: 1261256 - DNA, 15 bp, Homo sapiens
ggacaacgaattgtt

SEQ ID NO: 1261257 - DNA, 15 bp, Homo sapiens
gggacaacgaattgt

SEQ ID NO: 1261258 - DNA, 15 bp, Homo sapiens
ggggacaacgaattg

SEQ ID NO: 1261259 - DNA, 15 bp, Homo sapiens
tggggacaacgaatt

SEQ ID NO: 1261260 - DNA, 15 bp, Homo sapiens
gtggggacaacgaat

SEQ ID NO: 1261261 - DNA, 15 bp, Homo sapiens
agtggggacaacgaa

SEQ ID NO: 1261262 - DNA, 15 bp, Homo sapiens
aagtggggacaacga

SEQ ID NO: 1261263 - DNA, 15 bp, Homo sapiens
caagtggggacaacg

SEQ ID NO: 1261264 - DNA, 15 bp, Homo sapiens
ccaagtggggacaac

SEQ ID NO: 1261265 - DNA, 15 bp, Homo sapiens
tccaagtggggacaa

SEQ ID NO: 1261266 - DNA, 15 bp, Homo sapiens
ctccaagtggggaca

SEQ ID NO: 1261267 - DNA, 15 bp, Homo sapiens
cctccaagtggggac

SEQ ID NO: 1261268 - DNA, 15 bp, Homo sapiens
acctccaagtgggga

SEQ ID NO: 1261269 - DNA, 15 bp, Homo sapiens
cacctccaagtgggg

SEQ ID NO: 1261270 - DNA, 15 bp, Homo sapiens
gcacctccaagtggg

SEQ ID NO: 1261271 - DNA, 15 bp, Homo sapiens
tgcacctccaagtgg

SEQ ID NO: 1261272 - DNA, 15 bp, Homo sapiens
ctgcacctccaagtg

SEQ ID NO: 1261273 - DNA, 15 bp, Homo sapiens
actgcacctccaagt

SEQ ID NO: 1261274 - DNA, 15 bp, Homo sapiens
cactgcacctccaag

SEQ ID NO: 1261275 - DNA, 15 bp, Homo sapiens
ccactgcacctccaa

SEQ ID NO: 1261276 - DNA, 15 bp, Homo sapiens
accactgcacctcca

SEQ ID NO: 1261277 - DNA, 15 bp, Homo sapiens
caccactgcacctcc

SEQ ID NO: 1261278 - DNA, 15 bp, Homo sapiens
ccaccactgcacctc

SEQ ID NO: 1261279 - DNA, 15 bp, Homo sapiens
accaccactgcacct

SEQ ID NO: 1261280 - DNA, 15 bp, Homo sapiens
caccaccactgcacc

SEQ ID NO: 1261281 - DNA, 15 bp, Homo sapiens
ccaccaccactgcac

SEQ ID NO: 1261282 - DNA, 15 bp, Homo sapiens
accaccaccactgca

SEQ ID NO: 1261283 - DNA, 15 bp, Homo sapiens
caccaccaccactgc

SEQ ID NO: 1261284 - DNA, 15 bp, Homo sapiens
ccaccaccaccactg

SEQ ID NO: 1261285 - DNA, 15 bp, Homo sapiens
cccaccaccaccact

SEQ ID NO: 1261286 - DNA, 15 bp, Homo sapiens
tccccaccaccacca

SEQ ID NO: 1261287 - DNA, 15 bp, Homo sapiens
ctccccaccaccacc

SEQ ID NO: 1261288 - DNA, 15 bp, Homo sapiens
tctccccaccaccac

SEQ ID NO: 1261289 - DNA, 15 bp, Homo sapiens
ttctccccaccacca

SEQ ID NO: 1261290 - DNA, 15 bp, Homo sapiens
gttctccccaccacc

SEQ ID NO: 1261291 - DNA, 15 bp, Homo sapiens
agttctccccaccac

SEQ ID NO: 1261292 - DNA, 15 bp, Homo sapiens
tagttctccccacca

SEQ ID NO: 1261293 - DNA, 15 bp, Homo sapiens
ctagttctccccacc

SEQ ID NO: 1261294 - DNA, 15 bp, Homo sapiens
cctagttctccccac

SEQ ID NO: 1261295 - DNA, 15 bp, Homo sapiens
ccctagttctcccca

SEQ ID NO: 1261296 - DNA, 15 bp, Homo sapiens
tccctagttctcccc

SEQ ID NO: 1261297 - DNA, 15 bp, Homo sapiens
ttccctagttctccc

SEQ ID NO: 1261298 - DNA, 15 bp, Homo sapiens
cttccctagttctcc

SEQ ID NO: 1261299 - DNA, 15 bp, Homo sapiens
ccttccctagttctc

SEQ ID NO: 1261300 - DNA, 15 bp, Homo sapiens
cccttccctagttct

SEQ ID NO: 1261301 - DNA, 15 bp, Homo sapiens
acccttccctagttc

SEQ ID NO: 1261302 - DNA, 15 bp, Homo sapiens
aacccttccctagtt

SEQ ID NO: 1261303 - DNA, 15 bp, Homo sapiens
aaacccttccctagt

SEQ ID NO: 1261304 - DNA, 15 bp, Homo sapiens
caaacccttccctag

SEQ ID NO: 1261305 - DNA, 15 bp, Homo sapiens
acaaacccttcccta

SEQ ID NO: 1261306 - DNA, 15 bp, Homo sapiens
cacaaacccttccct

SEQ ID NO: 1261307 - DNA, 15 bp, Homo sapiens
gcacaaacccttccc

SEQ ID NO: 1261308 - DNA, 15 bp, Homo sapiens
tgcacaaacccttcc

SEQ ID NO: 1261309 - DNA, 15 bp, Homo sapiens
atgcacaaacccttc

SEQ ID NO: 1261310 - DNA, 15 bp, Homo sapiens
gatgcacaaaccctt

SEQ ID NO: 1261311 - DNA, 15 bp, Homo sapiens
tgatgcacaaaccct

SEQ ID NO: 1261312 - DNA, 15 bp, Homo sapiens
ctgatgcacaaaccc

SEQ ID NO: 1261313 - DNA, 15 bp, Homo sapiens
tctgatgcacaaacc

SEQ ID NO: 1261314 - DNA, 15 bp, Homo sapiens
gtctgatgcacaaac

SEQ ID NO: 1261315 - DNA, 15 bp, Homo sapiens
tgtctgatgcacaaa

SEQ ID NO: 1261316 - DNA, 15 bp, Homo sapiens
ttgtctgatgcacaa

SEQ ID NO: 1261317 - DNA, 15 bp, Homo sapiens
tttgtctgatgcaca

SEQ ID NO: 1261318 - DNA, 15 bp, Homo sapiens
ctttgtctgatgcac

SEQ ID NO: 1261319 - DNA, 15 bp, Homo sapiens
cctttgtctgatgca

SEQ ID NO: 1261320 - DNA, 15 bp, Homo sapiens
acctttgtctgatgc

SEQ ID NO: 1261321 - DNA, 15 bp, Homo sapiens
aacctttgtctgatg

SEQ ID NO: 1261322 - DNA, 15 bp, Homo sapiens
caacctttgtctgat

SEQ ID NO: 1261323 - DNA, 15 bp, Homo sapiens
ccaacctttgtctga

SEQ ID NO: 1261324 - DNA, 15 bp, Homo sapiens
cccaacctttgtctg

SEQ ID NO: 1261325 - DNA, 15 bp, Homo sapiens
tcccaacctttgtct

SEQ ID NO: 1261326 - DNA, 15 bp, Homo sapiens
atcccaacctttgtc

SEQ ID NO: 1261327 - DNA, 15 bp, Homo sapiens
aatcccaacctttgt

SEQ ID NO: 1261328 - DNA, 15 bp, Homo sapiens
taatcccaacctttg

SEQ ID NO: 1261329 - DNA, 15 bp, Homo sapiens
gtaatcccaaccttt

SEQ ID NO: 1261330 - DNA, 15 bp, Homo sapiens
tgtaatcccaacctt

SEQ ID NO: 1261331 - DNA, 15 bp, Homo sapiens
ttgtaatcccaacct

SEQ ID NO: 1261332 - DNA, 15 bp, Homo sapiens
cttgtaatcccaacc

SEQ ID NO: 1261333 - DNA, 15 bp, Homo sapiens
ccttgtaatcccaac

SEQ ID NO: 1261334 - DNA, 15 bp, Homo sapiens
cccttgtaatcccaa

SEQ ID NO: 1261335 - DNA, 15 bp, Homo sapiens
acccttgtaatccca

SEQ ID NO: 1261336 - DNA, 15 bp, Homo sapiens
aacccttgtaatccc

SEQ ID NO: 1261337 - DNA, 15 bp, Homo sapiens
caacccttgtaatcc

SEQ ID NO: 1261338 - DNA, 15 bp, Homo sapiens
acaacccttgtaatc

SEQ ID NO: 1261339 - DNA, 15 bp, Homo sapiens
tacaacccttgtaat

SEQ ID NO: 1261340 - DNA, 15 bp, Homo sapiens
ctacaacccttgtaa

SEQ ID NO: 1261341 - DNA, 15 bp, Homo sapiens
tctacaacccttgta

SEQ ID NO: 1261342 - DNA, 15 bp, Homo sapiens
atctacaacccttgt

SEQ ID NO: 1261343 - DNA, 15 bp, Homo sapiens
catctacaacccttg

SEQ ID NO: 1261344 - DNA, 15 bp, Homo sapiens
tcatctacaaccctt

SEQ ID NO: 1261345 - DNA, 15 bp, Homo sapiens
ttcatctacaaccct

SEQ ID NO: 1261346 - DNA, 15 bp, Homo sapiens
gttcatctacaaccc

SEQ ID NO: 1261347 - DNA, 15 bp, Homo sapiens
cgttcatctacaacc

SEQ ID NO: 1261348 - DNA, 15 bp, Homo sapiens
tcgttcatctacaac

SEQ ID NO: 1261349 - DNA, 15 bp, Homo sapiens
ctcgttcatctacaa

SEQ ID NO: 1261350 - DNA, 15 bp, Homo sapiens
tctcgttcatctaca

SEQ ID NO: 1261351 - DNA, 15 bp, Homo sapiens
atctcgttcatctac

SEQ ID NO: 1261352 - DNA, 15 bp, Homo sapiens
catctcgttcatcta

SEQ ID NO: 1261353 - DNA, 15 bp, Homo sapiens
acatctcgttcatct

SEQ ID NO: 1261354 - DNA, 15 bp, Homo sapiens
cacatctcgttcatc

SEQ ID NO: 1261355 - DNA, 15 bp, Homo sapiens
gcacatctcgttcat

SEQ ID NO: 1261356 - DNA, 15 bp, Homo sapiens
ggcacatctcgttca

SEQ ID NO: 1261357 - DNA, 15 bp, Homo sapiens
aggcacatctcgttc

SEQ ID NO: 1261358 - DNA, 15 bp, Homo sapiens
aaggcacatctcgtt

SEQ ID NO: 1261359 - DNA, 15 bp, Homo sapiens
aaaggcacatctcgt

SEQ ID NO: 1261360 - DNA, 15 bp, Homo sapiens
taaaggcacatctcg

SEQ ID NO: 1261361 - DNA, 15 bp, Homo sapiens
ctaaaggcacatctc

SEQ ID NO: 1261362 - DNA, 15 bp, Homo sapiens
actaaaggcacatct

SEQ ID NO: 1261363 - DNA, 15 bp, Homo sapiens
aactaaaggcacatc

SEQ ID NO: 1261364 - DNA, 15 bp, Homo sapiens
taactaaaggcacat

SEQ ID NO: 1261365 - DNA, 15 bp, Homo sapiens
gtaactaaaggcaca

SEQ ID NO: 1261366 - DNA, 15 bp, Homo sapiens
tgtaactaaaggcac

SEQ ID NO: 1261367 - DNA, 15 bp, Homo sapiens
ctgtaactaaaggca

SEQ ID NO: 1261368 - DNA, 15 bp, Homo sapiens
gctgtaactaaaggc

SEQ ID NO: 1261369 - DNA, 15 bp, Homo sapiens
ggctgtaactaaagg

SEQ ID NO: 1261370 - DNA, 15 bp, Homo sapiens
tggctgtaactaaag

SEQ ID NO: 1261371 - DNA, 15 bp, Homo sapiens
gtggctgtaactaaa

SEQ ID NO: 1261372 - DNA, 15 bp, Homo sapiens
agtggctgtaactaa

SEQ ID NO: 1261373 - DNA, 15 bp, Homo sapiens
aagtggctgtaacta

SEQ ID NO: 1261374 - DNA, 15 bp, Homo sapiens
gaagtggctgtaact

SEQ ID NO: 1261375 - DNA, 15 bp, Homo sapiens
agaagtggctgtaac

SEQ ID NO: 1261376 - DNA, 15 bp, Homo sapiens
aagaagtggctgtaa

SEQ ID NO: 1261377 - DNA, 15 bp, Homo sapiens
caagaagtggctgta

SEQ ID NO: 1261378 - DNA, 15 bp, Homo sapiens
tcaagaagtggctgt

SEQ ID NO: 1261379 - DNA, 15 bp, Homo sapiens
ctcaagaagtggctg

SEQ ID NO: 1261380 - DNA, 15 bp, Homo sapiens
actcaagaagtggct

SEQ ID NO: 1261381 - DNA, 15 bp, Homo sapiens
cactcaagaagtggc

SEQ ID NO: 1261382 - DNA, 15 bp, Homo sapiens
gcactcaagaagtgg

SEQ ID NO: 1261383 - DNA, 15 bp, Homo sapiens
agcactcaagaagtg

SEQ ID NO: 1261384 - DNA, 15 bp, Homo sapiens
cagcactcaagaagt

SEQ ID NO: 1261385 - DNA, 15 bp, Homo sapiens
acagcactcaagaag

SEQ ID NO: 1261386 - DNA, 15 bp, Homo sapiens
tacagcactcaagaa

SEQ ID NO: 1261387 - DNA, 15 bp, Homo sapiens
atacagcactcaaga

SEQ ID NO: 1261388 - DNA, 15 bp, Homo sapiens
catacagcactcaag

SEQ ID NO: 1261389 - DNA, 15 bp, Homo sapiens
acatacagcactcaa

SEQ ID NO: 1261390 - DNA, 15 bp, Homo sapiens
gacatacagcactca

SEQ ID NO: 1261391 - DNA, 15 bp, Homo sapiens
agacatacagcactc

SEQ ID NO: 1261392 - DNA, 15 bp, Homo sapiens
tagacatacagcact

SEQ ID NO: 1261393 - DNA, 15 bp, Homo sapiens
atagacatacagcac

SEQ ID NO: 1261394 - DNA, 15 bp, Homo sapiens
catagacatacagca

SEQ ID NO: 1261395 - DNA, 15 bp, Homo sapiens
acatagacatacagc

SEQ ID NO: 1261396 - DNA, 15 bp, Homo sapiens
cacatagacatacag

SEQ ID NO: 1261397 - DNA, 15 bp, Homo sapiens
tcacatagacataca

SEQ ID NO: 1261398 - DNA, 15 bp, Homo sapiens
gtcacatagacatac

SEQ ID NO: 1261399 - DNA, 15 bp, Homo sapiens
agtcacatagacata

SEQ ID NO: 1261400 - DNA, 15 bp, Homo sapiens
gagtcacatagacat

SEQ ID NO: 1261401 - DNA, 15 bp, Homo sapiens
ggagtcacatagaca

SEQ ID NO: 1261402 - DNA, 15 bp, Homo sapiens
aggagtcacatagac

SEQ ID NO: 1261403 - DNA, 15 bp, Homo sapiens
caggagtcacataga

SEQ ID NO: 1261404 - DNA, 15 bp, Homo sapiens
tcaggagtcacatag

SEQ ID NO: 1261405 - DNA, 15 bp, Homo sapiens
atcaggagtcacata

SEQ ID NO: 1261406 - DNA, 15 bp, Homo sapiens
catcaggagtcacat

SEQ ID NO: 1261407 - DNA, 15 bp, Homo sapiens
tcatcaggagtcaca

SEQ ID NO: 1261408 - DNA, 15 bp, Homo sapiens
gtcatcaggagtcac

SEQ ID NO: 1261409 - DNA, 15 bp, Homo sapiens
agtcatcaggagtca

SEQ ID NO: 1261410 - DNA, 15 bp, Homo sapiens
aagtcatcaggagtc

SEQ ID NO: 1261411 - DNA, 15 bp, Homo sapiens
caagtcatcaggagt

SEQ ID NO: 1261412 - DNA, 15 bp, Homo sapiens
ccaagtcatcaggag

SEQ ID NO: 1261413 - DNA, 15 bp, Homo sapiens
accaagtcatcagga

SEQ ID NO: 1261414 - DNA, 15 bp, Homo sapiens
gaccaagtcatcagg

SEQ ID NO: 1261415 - DNA, 15 bp, Homo sapiens
tgaccaagtcatcag

SEQ ID NO: 1261416 - DNA, 15 bp, Homo sapiens
ttgaccaagtcatca

SEQ ID NO: 1261417 - DNA, 15 bp, Homo sapiens
tttgaccaagtcatc

SEQ ID NO: 1261418 - DNA, 15 bp, Homo sapiens
ctttgaccaagtcat

SEQ ID NO: 1261419 - DNA, 15 bp, Homo sapiens
tctttgaccaagtca

SEQ ID NO: 1261420 - DNA, 15 bp, Homo sapiens
ttctttgaccaagtc

SEQ ID NO: 1261421 - DNA, 15 bp, Homo sapiens
tttctttgaccaagt

SEQ ID NO: 1261422 - DNA, 15 bp, Homo sapiens
ttttctttgaccaag

SEQ ID NO: 1261423 - DNA, 15 bp, Homo sapiens
attttctttgaccaa

SEQ ID NO: 1261424 - DNA, 15 bp, Homo sapiens
tattttctttgacca

SEQ ID NO: 1261425 - DNA, 15 bp, Homo sapiens
atattttctttgacc

SEQ ID NO: 1261426 - DNA, 15 bp, Homo sapiens
gatattttctttgac

SEQ ID NO: 1261427 - DNA, 15 bp, Homo sapiens
tgatattttctttga

SEQ ID NO: 1261428 - DNA, 15 bp, Homo sapiens
ttgatattttctttg

SEQ ID NO: 1261429 - DNA, 15 bp, Homo sapiens
gttgatattttcttt

SEQ ID NO: 1261430 - DNA, 15 bp, Homo sapiens
tgttgatattttctt

SEQ ID NO: 1261431 - DNA, 15 bp, Homo sapiens
gtgttgatattttct

SEQ ID NO: 1261432 - DNA, 15 bp, Homo sapiens
tgtgttgatattttc

SEQ ID NO: 1261433 - DNA, 15 bp, Homo sapiens
atgtgttgatatttt

SEQ ID NO: 1261434 - DNA, 15 bp, Homo sapiens
aatgtgttgatattt

SEQ ID NO: 1261435 - DNA, 15 bp, Homo sapiens
caatgtgttgatatt

SEQ ID NO: 1261436 - DNA, 15 bp, Homo sapiens
gcaatgtgttgatat

SEQ ID NO: 1261437 - DNA, 15 bp, Homo sapiens
ggcaatgtgttgata

SEQ ID NO: 1261438 - DNA, 15 bp, Homo sapiens
aggcaatgtgttgat

SEQ ID NO: 1261439 - DNA, 15 bp, Homo sapiens
aaggcaatgtgttga

SEQ ID NO: 1261440 - DNA, 15 bp, Homo sapiens
taaggcaatgtgttg

SEQ ID NO: 1261441 - DNA, 15 bp, Homo sapiens
ctaaggcaatgtgtt

SEQ ID NO: 1261442 - DNA, 15 bp, Homo sapiens
gctaaggcaatgtgt

SEQ ID NO: 1261443 - DNA, 15 bp, Homo sapiens
agctaaggcaatgtg

SEQ ID NO: 1261444 - DNA, 15 bp, Homo sapiens
cagctaaggcaatgt

SEQ ID NO: 1261445 - DNA, 15 bp, Homo sapiens
acagctaaggcaatg

SEQ ID NO: 1261446 - DNA, 15 bp, Homo sapiens
aacagctaaggcaat

SEQ ID NO: 1261447 - DNA, 15 bp, Homo sapiens
aaacagctaaggcaa

SEQ ID NO: 1261448 - DNA, 15 bp, Homo sapiens
aaaacagctaaggca

SEQ ID NO: 1261449 - DNA, 15 bp, Homo sapiens
gaaaacagctaaggc

SEQ ID NO: 1261450 - DNA, 15 bp, Homo sapiens
ggaaaacagctaagg

SEQ ID NO: 1261451 - DNA, 15 bp, Homo sapiens
aggaaaacagctaag

SEQ ID NO: 1261452 - DNA, 15 bp, Homo sapiens
aaggaaaacagctaa

SEQ ID NO: 1261453 - DNA, 15 bp, Homo sapiens
caaggaaaacagcta

SEQ ID NO: 1261454 - DNA, 15 bp, Homo sapiens
tcaaggaaaacagct

SEQ ID NO: 1261455 - DNA, 15 bp, Homo sapiens
atcaaggaaaacagc

SEQ ID NO: 1261456 - DNA, 15 bp, Homo sapiens
catcaaggaaaacag

SEQ ID NO: 1261457 - DNA, 15 bp, Homo sapiens
ccatcaaggaaaaca

SEQ ID NO: 1261458 - DNA, 15 bp, Homo sapiens
cccatcaaggaaaac

SEQ ID NO: 1261459 - DNA, 15 bp, Homo sapiens
ccccatcaaggaaaa

SEQ ID NO: 1261460 - DNA, 15 bp, Homo sapiens
tccccatcaaggaaa

SEQ ID NO: 1261461 - DNA, 15 bp, Homo sapiens
ctccccatcaaggaa

SEQ ID NO: 1261462 - DNA, 15 bp, Homo sapiens
tctccccatcaagga

SEQ ID NO: 1261463 - DNA, 15 bp, Homo sapiens
ttctccccatcaagg

SEQ ID NO: 1261464 - DNA, 15 bp, Homo sapiens
tttctccccatcaag

SEQ ID NO: 1261465 - DNA, 15 bp, Homo sapiens
atttctccccatcaa

SEQ ID NO: 1261466 - DNA, 15 bp, Homo sapiens
gatttctccccatca

SEQ ID NO: 1261467 - DNA, 15 bp, Homo sapiens
cgatttctccccatc

SEQ ID NO: 1261468 - DNA, 15 bp, Homo sapiens
tcgatttctccccat

SEQ ID NO: 1261469 - DNA, 15 bp, Homo sapiens
gtcgatttctcccca

SEQ ID NO: 1261470 - DNA, 15 bp, Homo sapiens
tgtcgatttctcccc

SEQ ID NO: 1261471 - DNA, 15 bp, Homo sapiens
gtgtcgatttctccc

SEQ ID NO: 1261472 - DNA, 15 bp, Homo sapiens
tgtgtcgatttctcc

SEQ ID NO: 1261473 - DNA, 15 bp, Homo sapiens
gtgtgtcgatttctc

SEQ ID NO: 1261474 - DNA, 15 bp, Homo sapiens
agtgtgtcgatttct

SEQ ID NO: 1261475 - DNA, 15 bp, Homo sapiens
aagtgtgtcgatttc

SEQ ID NO: 1261476 - DNA, 15 bp, Homo sapiens
caagtgtgtcgattt

SEQ ID NO: 1261477 - DNA, 15 bp, Homo sapiens
ccaagtgtgtcgatt

SEQ ID NO: 1261478 - DNA, 15 bp, Homo sapiens
tccaagtgtgtcgat

SEQ ID NO: 1261479 - DNA, 15 bp, Homo sapiens
ttccaagtgtgtcga

SEQ ID NO: 1261480 - DNA, 15 bp, Homo sapiens
tttccaagtgtgtcg

SEQ ID NO: 1261481 - DNA, 15 bp, Homo sapiens
atttccaagtgtgtc

SEQ ID NO: 1261482 - DNA, 15 bp, Homo sapiens
catttccaagtgtgt

SEQ ID NO: 1261483 - DNA, 15 bp, Homo sapiens
ccatttccaagtgtg

SEQ ID NO: 1261484 - DNA, 15 bp, Homo sapiens
tccatttccaagtgt

SEQ ID NO: 1261485 - DNA, 15 bp, Homo sapiens
ttccatttccaagtg

SEQ ID NO: 1261486 - DNA, 15 bp, Homo sapiens
cttccatttccaagt

SEQ ID NO: 1261487 - DNA, 15 bp, Homo sapiens
tcttccatttccaag

SEQ ID NO: 1261488 - DNA, 15 bp, Homo sapiens
ttcttccatttccaa

SEQ ID NO: 1261489 - DNA, 15 bp, Homo sapiens
attcttccatttcca

SEQ ID NO: 1261490 - DNA, 15 bp, Homo sapiens
aattcttccatttcc

SEQ ID NO: 1261491 - DNA, 15 bp, Homo sapiens
aaattcttccatttc

SEQ ID NO: 1261492 - DNA, 15 bp, Homo sapiens
gaaattcttccattt

SEQ ID NO: 1261493 - DNA, 15 bp, Homo sapiens
ggaaattcttccatt

SEQ ID NO: 1261494 - DNA, 15 bp, Homo sapiens
aggaaattcttccat

SEQ ID NO: 1261495 - DNA, 15 bp, Homo sapiens
gaggaaattcttcca

SEQ ID NO: 1261496 - DNA, 15 bp, Homo sapiens
agaggaaattcttcc

SEQ ID NO: 1261497 - DNA, 15 bp, Homo sapiens
gagaggaaattcttc

SEQ ID NO: 1261498 - DNA, 15 bp, Homo sapiens
agagaggaaattctt

SEQ ID NO: 1261499 - DNA, 15 bp, Homo sapiens
aagagaggaaattct

SEQ ID NO: 1261500 - DNA, 15 bp, Homo sapiens
caagagaggaaattc

SEQ ID NO: 1261501 - DNA, 15 bp, Homo sapiens
acaagagaggaaatt

SEQ ID NO: 1261502 - DNA, 15 bp, Homo sapiens
aacaagagaggaaat

SEQ ID NO: 1261503 - DNA, 15 bp, Homo sapiens
caacaagagaggaaa

SEQ ID NO: 1261504 - DNA, 15 bp, Homo sapiens
gcaacaagagaggaa

SEQ ID NO: 1261505 - DNA, 15 bp, Homo sapiens
tgcaacaagagagga

SEQ ID NO: 1261506 - DNA, 15 bp, Homo sapiens
ctgcaacaagagagg

SEQ ID NO: 1261507 - DNA, 15 bp, Homo sapiens
actgcaacaagagag

SEQ ID NO: 1261508 - DNA, 15 bp, Homo sapiens
cactgcaacaagaga

SEQ ID NO: 1261509 - DNA, 15 bp, Homo sapiens
ccactgcaacaagag

SEQ ID NO: 1261510 - DNA, 15 bp, Homo sapiens
gccactgcaacaaga

SEQ ID NO: 1261511 - DNA, 15 bp, Homo sapiens
agccactgcaacaag

SEQ ID NO: 1261512 - DNA, 15 bp, Homo sapiens
aagccactgcaacaa

SEQ ID NO: 1261513 - DNA, 15 bp, Homo sapiens
aaagccactgcaaca

SEQ ID NO: 1261514 - DNA, 15 bp, Homo sapiens
caaagccactgcaac

SEQ ID NO: 1261515 - DNA, 15 bp, Homo sapiens
acaaagccactgcaa

SEQ ID NO: 1261516 - DNA, 15 bp, Homo sapiens
cacaaagccactgca

SEQ ID NO: 1261517 - DNA, 15 bp, Homo sapiens
gcacaaagccactgc

SEQ ID NO: 1261518 - DNA, 15 bp, Homo sapiens
tgcacaaagccactg

SEQ ID NO: 1261519 - DNA, 15 bp, Homo sapiens
atgcacaaagccact

SEQ ID NO: 1261520 - DNA, 15 bp, Homo sapiens
aatgcacaaagccac

SEQ ID NO: 1261521 - DNA, 15 bp, Homo sapiens
caatgcacaaagcca

SEQ ID NO: 1261522 - DNA, 15 bp, Homo sapiens
ccaatgcacaaagcc

SEQ ID NO: 1261523 - DNA, 15 bp, Homo sapiens
gccaatgcacaaagc

SEQ ID NO: 1261524 - DNA, 15 bp, Homo sapiens
agccaatgcacaaag

SEQ ID NO: 1261525 - DNA, 15 bp, Homo sapiens
aagccaatgcacaaa

SEQ ID NO: 1261526 - DNA, 15 bp, Homo sapiens
caagccaatgcacaa

SEQ ID NO: 1261527 - DNA, 15 bp, Homo sapiens
tcaagccaatgcaca

SEQ ID NO: 1261528 - DNA, 15 bp, Homo sapiens
ctcaagccaatgcac

SEQ ID NO: 1261529 - DNA, 15 bp, Homo sapiens
gctcaagccaatgca

SEQ ID NO: 1261530 - DNA, 15 bp, Homo sapiens
agctcaagccaatgc

SEQ ID NO: 1261531 - DNA, 15 bp, Homo sapiens
cagctcaagccaatg

SEQ ID NO: 1261532 - DNA, 15 bp, Homo sapiens
gcagctcaagccaat

SEQ ID NO: 1261533 - DNA, 15 bp, Homo sapiens
tgcagctcaagccaa

SEQ ID NO: 1261534 - DNA, 15 bp, Homo sapiens
ctgcagctcaagcca

SEQ ID NO: 1261535 - DNA, 15 bp, Homo sapiens
actgcagctcaagcc

SEQ ID NO: 1261536 - DNA, 15 bp, Homo sapiens
gactgcagctcaagc

SEQ ID NO: 1261537 - DNA, 15 bp, Homo sapiens
tgactgcagctcaag

SEQ ID NO: 1261538 - DNA, 15 bp, Homo sapiens
atgactgcagctcaa

SEQ ID NO: 1261539 - DNA, 15 bp, Homo sapiens
gatgactgcagctca

SEQ ID NO: 1261540 - DNA, 15 bp, Homo sapiens
agatgactgcagctc

SEQ ID NO: 1261541 - DNA, 15 bp, Homo sapiens
cagatgactgcagct

SEQ ID NO: 1261542 - DNA, 15 bp, Homo sapiens
ccagatgactgcagc

SEQ ID NO: 1261543 - DNA, 15 bp, Homo sapiens
gccagatgactgcag

SEQ ID NO: 1261544 - DNA, 15 bp, Homo sapiens
tgccagatgactgca

SEQ ID NO: 1261545 - DNA, 15 bp, Homo sapiens
ctgccagatgactgc

SEQ ID NO: 1261546 - DNA, 15 bp, Homo sapiens
actgccagatgactg

SEQ ID NO: 1261547 - DNA, 15 bp, Homo sapiens
aactgccagatgact

SEQ ID NO: 1261548 - DNA, 15 bp, Homo sapiens
aaactgccagatgac

SEQ ID NO: 1261549 - DNA, 15 bp, Homo sapiens
caaactgccagatga

SEQ ID NO: 1261550 - DNA, 15 bp, Homo sapiens
acaaactgccagatg

SEQ ID NO: 1261551 - DNA, 15 bp, Homo sapiens
aacaaactgccagat

SEQ ID NO: 1261552 - DNA, 15 bp, Homo sapiens
caacaaactgccaga

SEQ ID NO: 1261553 - DNA, 15 bp, Homo sapiens
gcaacaaactgccag

SEQ ID NO: 1261554 - DNA, 15 bp, Homo sapiens
agcaacaaactgcca

SEQ ID NO: 1261555 - DNA, 15 bp, Homo sapiens
aagcaacaaactgcc

SEQ ID NO: 1261556 - DNA, 15 bp, Homo sapiens
gaagcaacaaactgc

SEQ ID NO: 1261557 - DNA, 15 bp, Homo sapiens
tgaagcaacaaactg

SEQ ID NO: 1261558 - DNA, 15 bp, Homo sapiens
ctgaagcaacaaact

SEQ ID NO: 1261559 - DNA, 15 bp, Homo sapiens
actgaagcaacaaac

SEQ ID NO: 1261560 - DNA, 15 bp, Homo sapiens
gactgaagcaacaaa

SEQ ID NO: 1261561 - DNA, 15 bp, Homo sapiens
tgactgaagcaacaa

SEQ ID NO: 1261562 - DNA, 15 bp, Homo sapiens
gtgactgaagcaaca

SEQ ID NO: 1261563 - DNA, 15 bp, Homo sapiens
agtgactgaagcaac

SEQ ID NO: 1261564 - DNA, 15 bp, Homo sapiens
cagtgactgaagcaa

SEQ ID NO: 1261565 - DNA, 15 bp, Homo sapiens
ccagtgactgaagca

SEQ ID NO: 1261566 - DNA, 15 bp, Homo sapiens
gccagtgactgaagc

SEQ ID NO: 1261567 - DNA, 15 bp, Homo sapiens
ggccagtgactgaag

SEQ ID NO: 1261568 - DNA, 15 bp, Homo sapiens
gggccagtgactgaa

SEQ ID NO: 1261569 - DNA, 15 bp, Homo sapiens
agggccagtgactga

SEQ ID NO: 1261570 - DNA, 15 bp, Homo sapiens
cagggccagtgactg

SEQ ID NO: 1261571 - DNA, 15 bp, Homo sapiens
ccagggccagtgact

SEQ ID NO: 1261572 - DNA, 15 bp, Homo sapiens
gccagggccagtgac

SEQ ID NO: 1261573 - DNA, 15 bp, Homo sapiens
ggccagggccagtga

SEQ ID NO: 1261574 - DNA, 15 bp, Homo sapiens
gggccagggccagtg

SEQ ID NO: 1261575 - DNA, 15 bp, Homo sapiens
agggccagggccagt

SEQ ID NO: 1261576 - DNA, 15 bp, Homo sapiens
aagggccagggccag

SEQ ID NO: 1261577 - DNA, 15 bp, Homo sapiens
caagggccagggcca

SEQ ID NO: 1261578 - DNA, 15 bp, Homo sapiens
gcaagggccagggcc

SEQ ID NO: 1261579 - DNA, 15 bp, Homo sapiens
ggcaagggccagggc

SEQ ID NO: 1261580 - DNA, 15 bp, Homo sapiens
tggcaagggccaggg

SEQ ID NO: 1261581 - DNA, 15 bp, Homo sapiens
gtggcaagggccagg

SEQ ID NO: 1261582 - DNA, 15 bp, Homo sapiens
agtggcaagggccag

SEQ ID NO: 1261583 - DNA, 15 bp, Homo sapiens
cagtggcaagggcca

SEQ ID NO: 1261584 - DNA, 15 bp, Homo sapiens
gcagtggcaagggcc

SEQ ID NO: 1261585 - DNA, 15 bp, Homo sapiens
ggcagtggcaagggc

SEQ ID NO: 1261586 - DNA, 15 bp, Homo sapiens
tggcagtggcaaggg

SEQ ID NO: 1261587 - DNA, 15 bp, Homo sapiens
ctggcagtggcaagg

SEQ ID NO: 1261588 - DNA, 15 bp, Homo sapiens
cctggcagtggcaag

SEQ ID NO: 1261589 - DNA, 15 bp, Homo sapiens
gcctggcagtggcaa

SEQ ID NO: 1261590 - DNA, 15 bp, Homo sapiens
tgcctggcagtggca

SEQ ID NO: 1261591 - DNA, 15 bp, Homo sapiens
ctgcctggcagtggc

SEQ ID NO: 1261592 - DNA, 15 bp, Homo sapiens
tctgcctggcagtgg

SEQ ID NO: 1261593 - DNA, 15 bp, Homo sapiens
ctctgcctggcagtg

SEQ ID NO: 1261594 - DNA, 15 bp, Homo sapiens
actctgcctggcagt

SEQ ID NO: 1261595 - DNA, 15 bp, Homo sapiens
aactctgcctggcag

SEQ ID NO: 1261596 - DNA, 15 bp, Homo sapiens
caactctgcctggca

SEQ ID NO: 1261597 - DNA, 15 bp, Homo sapiens
tcaactctgcctggc

SEQ ID NO: 1261598 - DNA, 15 bp, Homo sapiens
ctcaactctgcctgg

SEQ ID NO: 1261599 - DNA, 15 bp, Homo sapiens
gctcaactctgcctg

SEQ ID NO: 1261600 - DNA, 15 bp, Homo sapiens
ggctcaactctgcct

SEQ ID NO: 1261601 - DNA, 15 bp, Homo sapiens
aggctcaactctgcc

SEQ ID NO: 1261602 - DNA, 15 bp, Homo sapiens
caggctcaactctgc

SEQ ID NO: 1261603 - DNA, 15 bp, Homo sapiens
gcaggctcaactctg

SEQ ID NO: 1261604 - DNA, 15 bp, Homo sapiens
tgcaggctcaactct

SEQ ID NO: 1261605 - DNA, 15 bp, Homo sapiens
gtgcaggctcaactc

SEQ ID NO: 1261606 - DNA, 15 bp, Homo sapiens
agtgcaggctcaact

SEQ ID NO: 1261607 - DNA, 15 bp, Homo sapiens
cagtgcaggctcaac

SEQ ID NO: 1261608 - DNA, 15 bp, Homo sapiens
tcagtgcaggctcaa

SEQ ID NO: 1261609 - DNA, 15 bp, Homo sapiens
ttcagtgcaggctca

SEQ ID NO: 1261610 - DNA, 15 bp, Homo sapiens
cttcagtgcaggctc

SEQ ID NO: 1261611 - DNA, 15 bp, Homo sapiens
tcttcagtgcaggct

SEQ ID NO: 1261612 - DNA, 15 bp, Homo sapiens
gtcttcagtgcaggc

SEQ ID NO: 1261613 - DNA, 15 bp, Homo sapiens
tgtcttcagtgcagg

SEQ ID NO: 1261614 - DNA, 15 bp, Homo sapiens
atgtcttcagtgcag

SEQ ID NO: 1261615 - DNA, 15 bp, Homo sapiens
catgtcttcagtgca

SEQ ID NO: 1261616 - DNA, 15 bp, Homo sapiens
tcatgtcttcagtgc

SEQ ID NO: 1261617 - DNA, 15 bp, Homo sapiens
ctcatgtcttcagtg

SEQ ID NO: 1261618 - DNA, 15 bp, Homo sapiens
tctcatgtcttcagt

SEQ ID NO: 1261619 - DNA, 15 bp, Homo sapiens
ttctcatgtcttcag

SEQ ID NO: 1261620 - DNA, 15 bp, Homo sapiens
attctcatgtcttca

SEQ ID NO: 1261621 - DNA, 15 bp, Homo sapiens
tattctcatgtcttc

SEQ ID NO: 1261622 - DNA, 15 bp, Homo sapiens
gtattctcatgtctt

SEQ ID NO: 1261623 - DNA, 15 bp, Homo sapiens
agtattctcatgtct

SEQ ID NO: 1261624 - DNA, 15 bp, Homo sapiens
cagtattctcatgtc

SEQ ID NO: 1261625 - DNA, 15 bp, Homo sapiens
ccagtattctcatgt

SEQ ID NO: 1261626 - DNA, 15 bp, Homo sapiens
tccagtattctcatg

SEQ ID NO: 1261627 - DNA, 15 bp, Homo sapiens
atccagtattctcat

SEQ ID NO: 1261628 - DNA, 15 bp, Homo sapiens
gatccagtattctca

SEQ ID NO: 1261629 - DNA, 15 bp, Homo sapiens
tgatccagtattctc

SEQ ID NO: 1261630 - DNA, 15 bp, Homo sapiens
ttgatccagtattct

SEQ ID NO: 1261631 - DNA, 15 bp, Homo sapiens
attgatccagtattc

SEQ ID NO: 1261632 - DNA, 15 bp, Homo sapiens
tattgatccagtatt

SEQ ID NO: 1261633 - DNA, 15 bp, Homo sapiens
gtattgatccagtat

SEQ ID NO: 1261634 - DNA, 15 bp, Homo sapiens
tgtattgatccagta

SEQ ID NO: 1261635 - DNA, 15 bp, Homo sapiens
ttgtattgatccagt

SEQ ID NO: 1261636 - DNA, 15 bp, Homo sapiens
tttgtattgatccag

SEQ ID NO: 1261637 - DNA, 15 bp, Homo sapiens
gtttgtattgatcca

SEQ ID NO: 1261638 - DNA, 15 bp, Homo sapiens
cgtttgtattgatcc

SEQ ID NO: 1261639 - DNA, 15 bp, Homo sapiens
acgtttgtattgatc

SEQ ID NO: 1261640 - DNA, 15 bp, Homo sapiens
aacgtttgtattgat

SEQ ID NO: 1261641 - DNA, 15 bp, Homo sapiens
taacgtttgtattga

SEQ ID NO: 1261642 - DNA, 15 bp, Homo sapiens
ataacgtttgtattg

SEQ ID NO: 1261643 - DNA, 15 bp, Homo sapiens
cataacgtttgtatt

SEQ ID NO: 1261644 - DNA, 15 bp, Homo sapiens
ccataacgtttgtat

SEQ ID NO: 1261645 - DNA, 15 bp, Homo sapiens
tccataacgtttgta

SEQ ID NO: 1261646 - DNA, 15 bp, Homo sapiens
ttccataacgtttgt

SEQ ID NO: 1261647 - DNA, 15 bp, Homo sapiens
tttccataacgtttg

SEQ ID NO: 1261648 - DNA, 15 bp, Homo sapiens
ttttccataacgttt

SEQ ID NO: 1261649 - DNA, 15 bp, Homo sapiens
attttccataacgtt

SEQ ID NO: 1261650 - DNA, 15 bp, Homo sapiens
cattttccataacgt

SEQ ID NO: 1261651 - DNA, 15 bp, Homo sapiens
acattttccataacg

SEQ ID NO: 1261652 - DNA, 15 bp, Homo sapiens
aacattttccataac

SEQ ID NO: 1261653 - DNA, 15 bp, Homo sapiens
aaacattttccataa

SEQ ID NO: 1261654 - DNA, 15 bp, Homo sapiens
aaaacattttccata

SEQ ID NO: 1261655 - DNA, 15 bp, Homo sapiens
taaaacattttccat

SEQ ID NO: 1261656 - DNA, 15 bp, Homo sapiens
ttaaaacattttcca

SEQ ID NO: 1261657 - DNA, 15 bp, Homo sapiens
gttaaaacattttcc

SEQ ID NO: 1261658 - DNA, 15 bp, Homo sapiens
agttaaaacattttc

SEQ ID NO: 1261659 - DNA, 15 bp, Homo sapiens
aagttaaaacatttt

SEQ ID NO: 1261660 - DNA, 15 bp, Homo sapiens
aaagttaaaacattt

SEQ ID NO: 1261661 - DNA, 15 bp, Homo sapiens
aaaagttaaaacatt

SEQ ID NO: 1261662 - DNA, 15 bp, Homo sapiens
aaaaagttaaaacat

SEQ ID NO: 1261663 - DNA, 15 bp, Homo sapiens
gaaaaagttaaaaca

SEQ ID NO: 1261664 - DNA, 15 bp, Homo sapiens
agaaaaagttaaaac

SEQ ID NO: 1261665 - DNA, 15 bp, Homo sapiens
aagaaaaagttaaaa

SEQ ID NO: 1261666 - DNA, 15 bp, Homo sapiens
aaagaaaaagttaaa

SEQ ID NO: 1261667 - DNA, 15 bp, Homo sapiens
aaaagaaaaagttaa

SEQ ID NO: 1261668 - DNA, 15 bp, Homo sapiens
aaaaaagaaaaagtt

SEQ ID NO: 1261669 - DNA, 15 bp, Homo sapiens
aaaaaaagaaaaagt

SEQ ID NO: 1261670 - DNA, 15 bp, Homo sapiens
taaaaaaagaaaaag

SEQ ID NO: 1261671 - DNA, 15 bp, Homo sapiens
ttaaaaaaagaaaaa

SEQ ID NO: 1261672 - DNA, 15 bp, Homo sapiens
ttttaaaaaaagaaa

SEQ ID NO: 1261673 - DNA, 15 bp, Homo sapiens
cttttaaaaaaagaa

SEQ ID NO: 1261674 - DNA, 15 bp, Homo sapiens
ccttttaaaaaaaga

SEQ ID NO: 1261675 - DNA, 15 bp, Homo sapiens
gccttttaaaaaaag

SEQ ID NO: 1261676 - DNA, 15 bp, Homo sapiens
ggccttttaaaaaaa

SEQ ID NO: 1261677 - DNA, 15 bp, Homo sapiens
aggccttttaaaaaa

SEQ ID NO: 1261678 - DNA, 15 bp, Homo sapiens
caggccttttaaaaa

SEQ ID NO: 1261679 - DNA, 15 bp, Homo sapiens
gcaggccttttaaaa

SEQ ID NO: 1261680 - DNA, 15 bp, Homo sapiens
ggcaggccttttaaa

SEQ ID NO: 1261681 - DNA, 15 bp, Homo sapiens
aggcaggccttttaa

SEQ ID NO: 1261682 - DNA, 15 bp, Homo sapiens
caggcaggcctttta

SEQ ID NO: 1261683 - DNA, 15 bp, Homo sapiens
acaggcaggcctttt

SEQ ID NO: 1261684 - DNA, 15 bp, Homo sapiens
aacaggcaggccttt

SEQ ID NO: 1261685 - DNA, 15 bp, Homo sapiens
taacaggcaggcctt

SEQ ID NO: 1261686 - DNA, 15 bp, Homo sapiens
ataacaggcaggcct

SEQ ID NO: 1261687 - DNA, 15 bp, Homo sapiens
gataacaggcaggcc

SEQ ID NO: 1261688 - DNA, 15 bp, Homo sapiens
agataacaggcaggc

SEQ ID NO: 1261689 - DNA, 15 bp, Homo sapiens
aagataacaggcagg

SEQ ID NO: 1261690 - DNA, 15 bp, Homo sapiens
aaagataacaggcag

SEQ ID NO: 1261691 - DNA, 15 bp, Homo sapiens
taaagataacaggca

SEQ ID NO: 1261692 - DNA, 15 bp, Homo sapiens
ataaagataacaggc

SEQ ID NO: 1261693 - DNA, 15 bp, Homo sapiens
tataaagataacagg

SEQ ID NO: 1261694 - DNA, 15 bp, Homo sapiens
gtataaagataacag

SEQ ID NO: 1261695 - DNA, 15 bp, Homo sapiens
ggtataaagataaca

SEQ ID NO: 1261696 - DNA, 15 bp, Homo sapiens
aggtataaagataac

SEQ ID NO: 1261697 - DNA, 15 bp, Homo sapiens
gaggtataaagataa

SEQ ID NO: 1261698 - DNA, 15 bp, Homo sapiens
agaggtataaagata

SEQ ID NO: 1261699 - DNA, 15 bp, Homo sapiens
cagaggtataaagat

SEQ ID NO: 1261700 - DNA, 15 bp, Homo sapiens
acagaggtataaaga

SEQ ID NO: 1261701 - DNA, 15 bp, Homo sapiens
aacagaggtataaag

SEQ ID NO: 1261702 - DNA, 15 bp, Homo sapiens
taacagaggtataaa

SEQ ID NO: 1261703 - DNA, 15 bp, Homo sapiens
gtaacagaggtataa

SEQ ID NO: 1261704 - DNA, 15 bp, Homo sapiens
ggtaacagaggtata

SEQ ID NO: 1261705 - DNA, 15 bp, Homo sapiens
gggtaacagaggtat

SEQ ID NO: 1261706 - DNA, 15 bp, Homo sapiens
cgggtaacagaggta

SEQ ID NO: 1261707 - DNA, 15 bp, Homo sapiens
gcgggtaacagaggt

SEQ ID NO: 1261708 - DNA, 15 bp, Homo sapiens
ggcgggtaacagagg

SEQ ID NO: 1261709 - DNA, 15 bp, Homo sapiens
gggcgggtaacagag

SEQ ID NO: 1261710 - DNA, 15 bp, Homo sapiens
ggggcgggtaacaga

SEQ ID NO: 1261711 - DNA, 15 bp, Homo sapiens
tggggcgggtaacag

SEQ ID NO: 1261712 - DNA, 15 bp, Homo sapiens
gtggggcgggtaaca

SEQ ID NO: 1261713 - DNA, 15 bp, Homo sapiens
ggtggggcgggtaac

SEQ ID NO: 1261714 - DNA, 15 bp, Homo sapiens
tggtggggcgggtaa

SEQ ID NO: 1261715 - DNA, 15 bp, Homo sapiens
gtggtggggcgggta

SEQ ID NO: 1261716 - DNA, 15 bp, Homo sapiens
ggtggtggggcgggt

SEQ ID NO: 1261717 - DNA, 15 bp, Homo sapiens
gggtggtggggcggg

SEQ ID NO: 1261718 - DNA, 15 bp, Homo sapiens
ggggtggtggggcgg

SEQ ID NO: 1261719 - DNA, 15 bp, Homo sapiens
tggggtggtggggcg

SEQ ID NO: 1261720 - DNA, 15 bp, Homo sapiens
ctggggtggtggggc

SEQ ID NO: 1261721 - DNA, 15 bp, Homo sapiens
tctggggtggtgggg

SEQ ID NO: 1261722 - DNA, 15 bp, Homo sapiens
ttctggggtggtggg

SEQ ID NO: 1261723 - DNA, 15 bp, Homo sapiens
tttctggggtggtgg

SEQ ID NO: 1261724 - DNA, 15 bp, Homo sapiens
atttctggggtggtg

SEQ ID NO: 1261725 - DNA, 15 bp, Homo sapiens
catttctggggtggt

SEQ ID NO: 1261726 - DNA, 15 bp, Homo sapiens
tcatttctggggtgg

SEQ ID NO: 1261727 - DNA, 15 bp, Homo sapiens
ctcatttctggggtg

SEQ ID NO: 1261728 - DNA, 15 bp, Homo sapiens
gctcatttctggggt

SEQ ID NO: 1261729 - DNA, 15 bp, Homo sapiens
ggctcatttctgggg

SEQ ID NO: 1261730 - DNA, 15 bp, Homo sapiens
tggctcatttctggg

SEQ ID NO: 1261731 - DNA, 15 bp, Homo sapiens
ctggctcatttctgg

SEQ ID NO: 1261732 - DNA, 15 bp, Homo sapiens
tctggctcatttctg

SEQ ID NO: 1261733 - DNA, 15 bp, Homo sapiens
ctctggctcatttct

SEQ ID NO: 1261734 - DNA, 15 bp, Homo sapiens
gctctggctcatttc

SEQ ID NO: 1261735 - DNA, 15 bp, Homo sapiens
ggctctggctcattt

SEQ ID NO: 1261736 - DNA, 15 bp, Homo sapiens
aggctctggctcatt

SEQ ID NO: 1261737 - DNA, 15 bp, Homo sapiens
aaggctctggctcat

SEQ ID NO: 1261738 - DNA, 15 bp, Homo sapiens
aaaggctctggctca

SEQ ID NO: 1261739 - DNA, 15 bp, Homo sapiens
caaaggctctggctc

SEQ ID NO: 1261740 - DNA, 15 bp, Homo sapiens
acaaaggctctggct

SEQ ID NO: 1261741 - DNA, 15 bp, Homo sapiens
cacaaaggctctggc

SEQ ID NO: 1261742 - DNA, 15 bp, Homo sapiens
tcacaaaggctctgg

SEQ ID NO: 1261743 - DNA, 15 bp, Homo sapiens
atcacaaaggctctg

SEQ ID NO: 1261744 - DNA, 15 bp, Homo sapiens
catcacaaaggctct

SEQ ID NO: 1261745 - DNA, 15 bp, Homo sapiens
ccatcacaaaggctc

SEQ ID NO: 1261746 - DNA, 15 bp, Homo sapiens
gccatcacaaaggct

SEQ ID NO: 1261747 - DNA, 15 bp, Homo sapiens
agccatcacaaaggc

SEQ ID NO: 1261748 - DNA, 15 bp, Homo sapiens
tagccatcacaaagg

SEQ ID NO: 1261749 - DNA, 15 bp, Homo sapiens
ctagccatcacaaag

SEQ ID NO: 1261750 - DNA, 15 bp, Homo sapiens
tctagccatcacaaa

SEQ ID NO: 1261751 - DNA, 15 bp, Homo sapiens
atctagccatcacaa

SEQ ID NO: 1261752 - DNA, 15 bp, Homo sapiens
aatctagccatcaca

SEQ ID NO: 1261753 - DNA, 15 bp, Homo sapiens
aaatctagccatcac

SEQ ID NO: 1261754 - DNA, 15 bp, Homo sapiens
caaatctagccatca

SEQ ID NO: 1261755 - DNA, 15 bp, Homo sapiens
acaaatctagccatc

SEQ ID NO: 1261756 - DNA, 15 bp, Homo sapiens
aacaaatctagccat

SEQ ID NO: 1261757 - DNA, 15 bp, Homo sapiens
aaacaaatctagcca

SEQ ID NO: 1261758 - DNA, 15 bp, Homo sapiens
caaacaaatctagcc

SEQ ID NO: 1261759 - DNA, 15 bp, Homo sapiens
tcaaacaaatctagc

SEQ ID NO: 1261760 - DNA, 15 bp, Homo sapiens
ttcaaacaaatctag

SEQ ID NO: 1261761 - DNA, 15 bp, Homo sapiens
gttcaaacaaatcta

SEQ ID NO: 1261762 - DNA, 15 bp, Homo sapiens
tgttcaaacaaatct

SEQ ID NO: 1261763 - DNA, 15 bp, Homo sapiens
atgttcaaacaaatc

SEQ ID NO: 1261764 - DNA, 15 bp, Homo sapiens
aatgttcaaacaaat

SEQ ID NO: 1261765 - DNA, 15 bp, Homo sapiens
aaatgttcaaacaaa

SEQ ID NO: 1261766 - DNA, 15 bp, Homo sapiens
taaatgttcaaacaa

SEQ ID NO: 1261767 - DNA, 15 bp, Homo sapiens
ttaaatgttcaaaca

SEQ ID NO: 1261768 - DNA, 15 bp, Homo sapiens
attaaatgttcaaac

SEQ ID NO: 1261769 - DNA, 15 bp, Homo sapiens
gattaaatgttcaaa

SEQ ID NO: 1261770 - DNA, 15 bp, Homo sapiens
agattaaatgttcaa

SEQ ID NO: 1261771 - DNA, 15 bp, Homo sapiens
gagattaaatgttca

SEQ ID NO: 1261772 - DNA, 15 bp, Homo sapiens
ggagattaaatgttc

SEQ ID NO: 1261773 - DNA, 15 bp, Homo sapiens
aggagattaaatgtt

SEQ ID NO: 1261774 - DNA, 15 bp, Homo sapiens
aaggagattaaatgt

SEQ ID NO: 1261775 - DNA, 15 bp, Homo sapiens
gaaggagattaaatg

SEQ ID NO: 1261776 - DNA, 15 bp, Homo sapiens
ggaaggagattaaat

SEQ ID NO: 1261777 - DNA, 15 bp, Homo sapiens
gggaaggagattaaa

SEQ ID NO: 1261778 - DNA, 15 bp, Homo sapiens
ggggaaggagattaa

SEQ ID NO: 1261779 - DNA, 15 bp, Homo sapiens
tggggaaggagatta

SEQ ID NO: 1261780 - DNA, 15 bp, Homo sapiens
atggggaaggagatt

SEQ ID NO: 1261781 - DNA, 15 bp, Homo sapiens
gatggggaaggagat

SEQ ID NO: 1261782 - DNA, 15 bp, Homo sapiens
agatggggaaggaga

SEQ ID NO: 1261783 - DNA, 15 bp, Homo sapiens
cagatggggaaggag

SEQ ID NO: 1261784 - DNA, 15 bp, Homo sapiens
acagatggggaagga

SEQ ID NO: 1261785 - DNA, 15 bp, Homo sapiens
aacagatggggaagg

SEQ ID NO: 1261786 - DNA, 15 bp, Homo sapiens
aaacagatggggaag

SEQ ID NO: 1261787 - DNA, 15 bp, Homo sapiens
aaaacagatggggaa

SEQ ID NO: 1261788 - DNA, 15 bp, Homo sapiens
caaaacagatgggga

SEQ ID NO: 1261789 - DNA, 15 bp, Homo sapiens
tcaaaacagatgggg

SEQ ID NO: 1261790 - DNA, 15 bp, Homo sapiens
ctcaaaacagatggg

SEQ ID NO: 1261791 - DNA, 15 bp, Homo sapiens
tctcaaaacagatgg

SEQ ID NO: 1261792 - DNA, 15 bp, Homo sapiens
ttctcaaaacagatg

SEQ ID NO: 1261793 - DNA, 15 bp, Homo sapiens
tttctcaaaacagat

SEQ ID NO: 1261794 - DNA, 15 bp, Homo sapiens
atttctcaaaacaga

SEQ ID NO: 1261795 - DNA, 15 bp, Homo sapiens
tatttctcaaaacag

SEQ ID NO: 1261796 - DNA, 15 bp, Homo sapiens
atatttctcaaaaca

SEQ ID NO: 1261797 - DNA, 15 bp, Homo sapiens
gatatttctcaaaac

SEQ ID NO: 1261798 - DNA, 15 bp, Homo sapiens
agatatttctcaaaa

SEQ ID NO: 1261799 - DNA, 15 bp, Homo sapiens
tagatatttctcaaa

SEQ ID NO: 1261800 - DNA, 15 bp, Homo sapiens
ctagatatttctcaa

SEQ ID NO: 1261801 - DNA, 15 bp, Homo sapiens
gctagatatttctca

SEQ ID NO: 1261802 - DNA, 15 bp, Homo sapiens
ggctagatatttctc

SEQ ID NO: 1261803 - DNA, 15 bp, Homo sapiens
aggctagatatttct

SEQ ID NO: 1261804 - DNA, 15 bp, Homo sapiens
gaggctagatatttc

SEQ ID NO: 1261805 - DNA, 15 bp, Homo sapiens
agaggctagatattt

SEQ ID NO: 1261806 - DNA, 15 bp, Homo sapiens
aagaggctagatatt

SEQ ID NO: 1261807 - DNA, 15 bp, Homo sapiens
aaagaggctagatat

SEQ ID NO: 1261808 - DNA, 15 bp, Homo sapiens
taaagaggctagata

SEQ ID NO: 1261809 - DNA, 15 bp, Homo sapiens
ataaagaggctagat

SEQ ID NO: 1261810 - DNA, 15 bp, Homo sapiens
gataaagaggctaga

SEQ ID NO: 1261811 - DNA, 15 bp, Homo sapiens
tgataaagaggctag

SEQ ID NO: 1261812 - DNA, 15 bp, Homo sapiens
ctgataaagaggcta

SEQ ID NO: 1261813 - DNA, 15 bp, Homo sapiens
tctgataaagaggct

SEQ ID NO: 1261814 - DNA, 15 bp, Homo sapiens
ttctgataaagaggc

SEQ ID NO: 1261815 - DNA, 15 bp, Homo sapiens
cttctgataaagagg

SEQ ID NO: 1261816 - DNA, 15 bp, Homo sapiens
tcttctgataaagag

SEQ ID NO: 1261817 - DNA, 15 bp, Homo sapiens
ctcttctgataaaga

SEQ ID NO: 1261818 - DNA, 15 bp, Homo sapiens
tctcttctgataaag

SEQ ID NO: 1261819 - DNA, 15 bp, Homo sapiens
ctctcttctgataaa

SEQ ID NO: 1261820 - DNA, 15 bp, Homo sapiens
gctctcttctgataa

SEQ ID NO: 1261821 - DNA, 15 bp, Homo sapiens
agctctcttctgata

SEQ ID NO: 1261822 - DNA, 15 bp, Homo sapiens
aagctctcttctgat

SEQ ID NO: 1261823 - DNA, 15 bp, Homo sapiens
taagctctcttctga

SEQ ID NO: 1261824 - DNA, 15 bp, Homo sapiens
ttaagctctcttctg

SEQ ID NO: 1261825 - DNA, 15 bp, Homo sapiens
tttaagctctcttct

SEQ ID NO: 1261826 - DNA, 15 bp, Homo sapiens
ctttaagctctcttc

SEQ ID NO: 1261827 - DNA, 15 bp, Homo sapiens
actttaagctctctt

SEQ ID NO: 1261828 - DNA, 15 bp, Homo sapiens
gactttaagctctct

SEQ ID NO: 1261829 - DNA, 15 bp, Homo sapiens
agactttaagctctc

SEQ ID NO: 1261830 - DNA, 15 bp, Homo sapiens
gagactttaagctct

SEQ ID NO: 1261831 - DNA, 15 bp, Homo sapiens
tgagactttaagctc

SEQ ID NO: 1261832 - DNA, 15 bp, Homo sapiens
gtgagactttaagct

SEQ ID NO: 1261833 - DNA, 15 bp, Homo sapiens
ggtgagactttaagc

SEQ ID NO: 1261834 - DNA, 15 bp, Homo sapiens
tggtgagactttaag

SEQ ID NO: 1261835 - DNA, 15 bp, Homo sapiens
ttggtgagactttaa

SEQ ID NO: 1261836 - DNA, 15 bp, Homo sapiens
gttggtgagacttta

SEQ ID NO: 1261837 - DNA, 15 bp, Homo sapiens
tgttggtgagacttt

SEQ ID NO: 1261838 - DNA, 15 bp, Homo sapiens
atgttggtgagactt

SEQ ID NO: 1261839 - DNA, 15 bp, Homo sapiens
aatgttggtgagact

SEQ ID NO: 1261840 - DNA, 15 bp, Homo sapiens
gaatgttggtgagac

SEQ ID NO: 1261841 - DNA, 15 bp, Homo sapiens
agaatgttggtgaga

SEQ ID NO: 1261842 - DNA, 15 bp, Homo sapiens
aagaatgttggtgag

SEQ ID NO: 1261843 - DNA, 15 bp, Homo sapiens
caagaatgttggtga

SEQ ID NO: 1261844 - DNA, 15 bp, Homo sapiens
gcaagaatgttggtg

SEQ ID NO: 1261845 - DNA, 15 bp, Homo sapiens
ggcaagaatgttggt

SEQ ID NO: 1261846 - DNA, 15 bp, Homo sapiens
gggcaagaatgttgg

SEQ ID NO: 1261847 - DNA, 15 bp, Homo sapiens
ggggcaagaatgttg

SEQ ID NO: 1261848 - DNA, 15 bp, Homo sapiens
tggggcaagaatgtt

SEQ ID NO: 1261849 - DNA, 15 bp, Homo sapiens
ctggggcaagaatgt

SEQ ID NO: 1261850 - DNA, 15 bp, Homo sapiens
cctggggcaagaatg

SEQ ID NO: 1261851 - DNA, 15 bp, Homo sapiens
acctggggcaagaat

SEQ ID NO: 1261852 - DNA, 15 bp, Homo sapiens
cacctggggcaagaa

SEQ ID NO: 1261853 - DNA, 15 bp, Homo sapiens
acacctggggcaaga

SEQ ID NO: 1261854 - DNA, 15 bp, Homo sapiens
gacacctggggcaag

SEQ ID NO: 1261855 - DNA, 15 bp, Homo sapiens
tgacacctggggcaa

SEQ ID NO: 1261856 - DNA, 15 bp, Homo sapiens
atgacacctggggca

SEQ ID NO: 1261857 - DNA, 15 bp, Homo sapiens
catgacacctggggc

SEQ ID NO: 1261858 - DNA, 15 bp, Homo sapiens
ccatgacacctgggg

SEQ ID NO: 1261859 - DNA, 15 bp, Homo sapiens
cccatgacacctggg

SEQ ID NO: 1261860 - DNA, 15 bp, Homo sapiens
gcccatgacacctgg

SEQ ID NO: 1261861 - DNA, 15 bp, Homo sapiens
agcccatgacacctg

SEQ ID NO: 1261862 - DNA, 15 bp, Homo sapiens
cagcccatgacacct

SEQ ID NO: 1261863 - DNA, 15 bp, Homo sapiens
tcagcccatgacacc

SEQ ID NO: 1261864 - DNA, 15 bp, Homo sapiens
ttcagcccatgacac

SEQ ID NO: 1261865 - DNA, 15 bp, Homo sapiens
gttcagcccatgaca

SEQ ID NO: 1261866 - DNA, 15 bp, Homo sapiens
agttcagcccatgac

SEQ ID NO: 1261867 - DNA, 15 bp, Homo sapiens
cagttcagcccatga

SEQ ID NO: 1261868 - DNA, 15 bp, Homo sapiens
acagttcagcccatg

SEQ ID NO: 1261869 - DNA, 15 bp, Homo sapiens
aacagttcagcccat

SEQ ID NO: 1261870 - DNA, 15 bp, Homo sapiens
aaacagttcagccca

SEQ ID NO: 1261871 - DNA, 15 bp, Homo sapiens
gaaacagttcagccc

SEQ ID NO: 1261872 - DNA, 15 bp, Homo sapiens
ggaaacagttcagcc

SEQ ID NO: 1261873 - DNA, 15 bp, Homo sapiens
gggaaacagttcagc

SEQ ID NO: 1261874 - DNA, 15 bp, Homo sapiens
agggaaacagttcag

SEQ ID NO: 1261875 - DNA, 15 bp, Homo sapiens
gagggaaacagttca

SEQ ID NO: 1261876 - DNA, 15 bp, Homo sapiens
tgagggaaacagttc

SEQ ID NO: 1261877 - DNA, 15 bp, Homo sapiens
ttgagggaaacagtt

SEQ ID NO: 1261878 - DNA, 15 bp, Homo sapiens
tttgagggaaacagt

SEQ ID NO: 1261879 - DNA, 15 bp, Homo sapiens
atttgagggaaacag

SEQ ID NO: 1261880 - DNA, 15 bp, Homo sapiens
aatttgagggaaaca

SEQ ID NO: 1261881 - DNA, 15 bp, Homo sapiens
aaatttgagggaaac

SEQ ID NO: 1261882 - DNA, 15 bp, Homo sapiens
taaatttgagggaaa

SEQ ID NO: 1261883 - DNA, 15 bp, Homo sapiens
ataaatttgagggaa

SEQ ID NO: 1261884 - DNA, 15 bp, Homo sapiens
tataaatttgaggga

SEQ ID NO: 1261885 - DNA, 15 bp, Homo sapiens
atataaatttgaggg

SEQ ID NO: 1261886 - DNA, 15 bp, Homo sapiens
aatataaatttgagg

SEQ ID NO: 1261887 - DNA, 15 bp, Homo sapiens
aaatataaatttgag

SEQ ID NO: 1261888 - DNA, 15 bp, Homo sapiens
aaaatataaatttga

SEQ ID NO: 1261889 - DNA, 15 bp, Homo sapiens
caaaatataaatttg

SEQ ID NO: 1261890 - DNA, 15 bp, Homo sapiens
tcaaaatataaattt

SEQ ID NO: 1261891 - DNA, 15 bp, Homo sapiens
ttcaaaatataaatt

SEQ ID NO: 1261892 - DNA, 15 bp, Homo sapiens
cttcaaaatataaat

SEQ ID NO: 1261893 - DNA, 15 bp, Homo sapiens
acttcaaaatataaa

SEQ ID NO: 1261894 - DNA, 15 bp, Homo sapiens
gacttcaaaatataa

SEQ ID NO: 1261895 - DNA, 15 bp, Homo sapiens
agacttcaaaatata

SEQ ID NO: 1261896 - DNA, 15 bp, Homo sapiens
aagacttcaaaatat

SEQ ID NO: 1261897 - DNA, 15 bp, Homo sapiens
taagacttcaaaata

SEQ ID NO: 1261898 - DNA, 15 bp, Homo sapiens
ttaagacttcaaaat

SEQ ID NO: 1261899 - DNA, 15 bp, Homo sapiens
gttaagacttcaaaa

SEQ ID NO: 1261900 - DNA, 15 bp, Homo sapiens
agttaagacttcaaa

SEQ ID NO: 1261901 - DNA, 15 bp, Homo sapiens
gagttaagacttcaa

SEQ ID NO: 1261902 - DNA, 15 bp, Homo sapiens
ggagttaagacttca

SEQ ID NO: 1261903 - DNA, 15 bp, Homo sapiens
gggagttaagacttc

SEQ ID NO: 1261904 - DNA, 15 bp, Homo sapiens
tgggagttaagactt

SEQ ID NO: 1261905 - DNA, 15 bp, Homo sapiens
ctgggagttaagact

SEQ ID NO: 1261906 - DNA, 15 bp, Homo sapiens
actgggagttaagac

SEQ ID NO: 1261907 - DNA, 15 bp, Homo sapiens
tactgggagttaaga

SEQ ID NO: 1261908 - DNA, 15 bp, Homo sapiens
gtactgggagttaag

SEQ ID NO: 1261909 - DNA, 15 bp, Homo sapiens
ggtactgggagttaa

SEQ ID NO: 1261910 - DNA, 15 bp, Homo sapiens
aggtactgggagtta

SEQ ID NO: 1261911 - DNA, 15 bp, Homo sapiens
gaggtactgggagtt

SEQ ID NO: 1261912 - DNA, 15 bp, Homo sapiens
tgaggtactgggagt

SEQ ID NO: 1261913 - DNA, 15 bp, Homo sapiens
ctgaggtactgggag

SEQ ID NO: 1261914 - DNA, 15 bp, Homo sapiens
tctgaggtactggga

SEQ ID NO: 1261915 - DNA, 15 bp, Homo sapiens
ttctgaggtactggg

SEQ ID NO: 1261916 - DNA, 15 bp, Homo sapiens
attctgaggtactgg

SEQ ID NO: 1261917 - DNA, 15 bp, Homo sapiens
cattctgaggtactg

SEQ ID NO: 1261918 - DNA, 15 bp, Homo sapiens
tcattctgaggtact

SEQ ID NO: 1261919 - DNA, 15 bp, Homo sapiens
ttcattctgaggtac

SEQ ID NO: 1261920 - DNA, 15 bp, Homo sapiens
tttcattctgaggta

SEQ ID NO: 1261921 - DNA, 15 bp, Homo sapiens
gtttcattctgaggt

SEQ ID NO: 1261922 - DNA, 15 bp, Homo sapiens
agtttcattctgagg

SEQ ID NO: 1261923 - DNA, 15 bp, Homo sapiens
cagtttcattctgag

SEQ ID NO: 1261924 - DNA, 15 bp, Homo sapiens
gcagtttcattctga

SEQ ID NO: 1261925 - DNA, 15 bp, Homo sapiens
tgcagtttcattctg

SEQ ID NO: 1261926 - DNA, 15 bp, Homo sapiens
atgcagtttcattct

SEQ ID NO: 1261927 - DNA, 15 bp, Homo sapiens
aatgcagtttcattc

SEQ ID NO: 1261928 - DNA, 15 bp, Homo sapiens
aaatgcagtttcatt

SEQ ID NO: 1261929 - DNA, 15 bp, Homo sapiens
caaatgcagtttcat

SEQ ID NO: 1261930 - DNA, 15 bp, Homo sapiens
ccaaatgcagtttca

SEQ ID NO: 1261931 - DNA, 15 bp, Homo sapiens
tccaaatgcagtttc

SEQ ID NO: 1261932 - DNA, 15 bp, Homo sapiens
ctccaaatgcagttt

SEQ ID NO: 1261933 - DNA, 15 bp, Homo sapiens
tctccaaatgcagtt

SEQ ID NO: 1261934 - DNA, 15 bp, Homo sapiens
atctccaaatgcagt

SEQ ID NO: 1261935 - DNA, 15 bp, Homo sapiens
tatctccaaatgcag

SEQ ID NO: 1261936 - DNA, 15 bp, Homo sapiens
ctatctccaaatgca

SEQ ID NO: 1261937 - DNA, 15 bp, Homo sapiens
cctatctccaaatgc

SEQ ID NO: 1261938 - DNA, 15 bp, Homo sapiens
ccctatctccaaatg

SEQ ID NO: 1261939 - DNA, 15 bp, Homo sapiens
accctatctccaaat

SEQ ID NO: 1261940 - DNA, 15 bp, Homo sapiens
gaccctatctccaaa

SEQ ID NO: 1261941 - DNA, 15 bp, Homo sapiens
agaccctatctccaa

SEQ ID NO: 1261942 - DNA, 15 bp, Homo sapiens
aagaccctatctcca

SEQ ID NO: 1261943 - DNA, 15 bp, Homo sapiens
aaagaccctatctcc

SEQ ID NO: 1261944 - DNA, 15 bp, Homo sapiens
taaagaccctatctc

SEQ ID NO: 1261945 - DNA, 15 bp, Homo sapiens
gtaaagaccctatct

SEQ ID NO: 1261946 - DNA, 15 bp, Homo sapiens
cgtaaagaccctatc

SEQ ID NO: 1261947 - DNA, 15 bp, Homo sapiens
ccgtaaagaccctat

SEQ ID NO: 1261948 - DNA, 15 bp, Homo sapiens
tccgtaaagacccta

SEQ ID NO: 1261949 - DNA, 15 bp, Homo sapiens
ctccgtaaagaccct

SEQ ID NO: 1261950 - DNA, 15 bp, Homo sapiens
cctccgtaaagaccc

SEQ ID NO: 1261951 - DNA, 15 bp, Homo sapiens
acctccgtaaagacc

SEQ ID NO: 1261952 - DNA, 15 bp, Homo sapiens
tacctccgtaaagac

SEQ ID NO: 1261953 - DNA, 15 bp, Homo sapiens
ttacctccgtaaaga

SEQ ID NO: 1261954 - DNA, 15 bp, Homo sapiens
attacctccgtaaag

SEQ ID NO: 1261955 - DNA, 15 bp, Homo sapiens
aattacctccgtaaa

SEQ ID NO: 1261956 - DNA, 15 bp, Homo sapiens
taattacctccgtaa

SEQ ID NO: 1261957 - DNA, 15 bp, Homo sapiens
ttaattacctccgta

SEQ ID NO: 1261958 - DNA, 15 bp, Homo sapiens
cttaattacctccgt

SEQ ID NO: 1261959 - DNA, 15 bp, Homo sapiens
acttaattacctccg

SEQ ID NO: 1261960 - DNA, 15 bp, Homo sapiens
aacttaattacctcc

SEQ ID NO: 1261961 - DNA, 15 bp, Homo sapiens
taacttaattacctc

SEQ ID NO: 1261962 - DNA, 15 bp, Homo sapiens
ttaacttaattacct

SEQ ID NO: 1261963 - DNA, 15 bp, Homo sapiens
tttaacttaattacc

SEQ ID NO: 1261964 - DNA, 15 bp, Homo sapiens
ttttaacttaattac

SEQ ID NO: 1261965 - DNA, 15 bp, Homo sapiens
attttaacttaatta

SEQ ID NO: 1261966 - DNA, 15 bp, Homo sapiens
cattttaacttaatt

SEQ ID NO: 1261967 - DNA, 15 bp, Homo sapiens
tcattttaacttaat

SEQ ID NO: 1261968 - DNA, 15 bp, Homo sapiens
ctcattttaacttaa

SEQ ID NO: 1261969 - DNA, 15 bp, Homo sapiens
cctcattttaactta

SEQ ID NO: 1261970 - DNA, 15 bp, Homo sapiens
acctcattttaactt

SEQ ID NO: 1261971 - DNA, 15 bp, Homo sapiens
aacctcattttaact

SEQ ID NO: 1261972 - DNA, 15 bp, Homo sapiens
caacctcattttaac

SEQ ID NO: 1261973 - DNA, 15 bp, Homo sapiens
acaacctcattttaa

SEQ ID NO: 1261974 - DNA, 15 bp, Homo sapiens
aacaacctcatttta

SEQ ID NO: 1261975 - DNA, 15 bp, Homo sapiens
taacaacctcatttt

SEQ ID NO: 1261976 - DNA, 15 bp, Homo sapiens
ctaacaacctcattt

SEQ ID NO: 1261977 - DNA, 15 bp, Homo sapiens
tctaacaacctcatt

SEQ ID NO: 1261978 - DNA, 15 bp, Homo sapiens
ctctaacaacctcat

SEQ ID NO: 1261979 - DNA, 15 bp, Homo sapiens
actctaacaacctca

SEQ ID NO: 1261980 - DNA, 15 bp, Homo sapiens
gactctaacaacctc

SEQ ID NO: 1261981 - DNA, 15 bp, Homo sapiens
tgactctaacaacct

SEQ ID NO: 1261982 - DNA, 15 bp, Homo sapiens
atgactctaacaacc

SEQ ID NO: 1261983 - DNA, 15 bp, Homo sapiens
aatgactctaacaac

SEQ ID NO: 1261984 - DNA, 15 bp, Homo sapiens
gaatgactctaacaa

SEQ ID NO: 1261985 - DNA, 15 bp, Homo sapiens
tgaatgactctaaca

SEQ ID NO: 1261986 - DNA, 15 bp, Homo sapiens
atgaatgactctaac

SEQ ID NO: 1261987 - DNA, 15 bp, Homo sapiens
aatgaatgactctaa

SEQ ID NO: 1261988 - DNA, 15 bp, Homo sapiens
caatgaatgactcta

SEQ ID NO: 1261989 - DNA, 15 bp, Homo sapiens
ccaatgaatgactct

SEQ ID NO: 1261990 - DNA, 15 bp, Homo sapiens
tccaatgaatgactc

SEQ ID NO: 1261991 - DNA, 15 bp, Homo sapiens
ttccaatgaatgact

SEQ ID NO: 1261992 - DNA, 15 bp, Homo sapiens
tttccaatgaatgac

SEQ ID NO: 1261993 - DNA, 15 bp, Homo sapiens
ttttccaatgaatga

SEQ ID NO: 1261994 - DNA, 15 bp, Homo sapiens
cttttccaatgaatg

SEQ ID NO: 1261995 - DNA, 15 bp, Homo sapiens
acttttccaatgaat

SEQ ID NO: 1261996 - DNA, 15 bp, Homo sapiens
tacttttccaatgaa

SEQ ID NO: 1261997 - DNA, 15 bp, Homo sapiens
atacttttccaatga

SEQ ID NO: 1261998 - DNA, 15 bp, Homo sapiens
aatacttttccaatg

SEQ ID NO: 1261999 - DNA, 15 bp, Homo sapiens
aaatacttttccaat

SEQ ID NO: 1262000 - DNA, 15 bp, Homo sapiens
caaatacttttccaa

SEQ ID NO: 1262001 - DNA, 15 bp, Homo sapiens
acaaatacttttcca

SEQ ID NO: 1262002 - DNA, 15 bp, Homo sapiens
gacaaatacttttcc

SEQ ID NO: 1262003 - DNA, 15 bp, Homo sapiens
tgacaaatacttttc

SEQ ID NO: 1262004 - DNA, 15 bp, Homo sapiens
ttgacaaatactttt

SEQ ID NO: 1262005 - DNA, 15 bp, Homo sapiens
tttgacaaatacttt

SEQ ID NO: 1262006 - DNA, 15 bp, Homo sapiens
atttgacaaatactt

SEQ ID NO: 1262007 - DNA, 15 bp, Homo sapiens
catttgacaaatact

SEQ ID NO: 1262008 - DNA, 15 bp, Homo sapiens
acatttgacaaatac

SEQ ID NO: 1262009 - DNA, 15 bp, Homo sapiens
gacatttgacaaata

SEQ ID NO: 1262010 - DNA, 15 bp, Homo sapiens
agacatttgacaaat

SEQ ID NO: 1262011 - DNA, 15 bp, Homo sapiens
tagacatttgacaaa

SEQ ID NO: 1262012 - DNA, 15 bp, Homo sapiens
gtagacatttgacaa

SEQ ID NO: 1262013 - DNA, 15 bp, Homo sapiens
agtagacatttgaca

SEQ ID NO: 1262014 - DNA, 15 bp, Homo sapiens
tagtagacatttgac

SEQ ID NO: 1262015 - DNA, 15 bp, Homo sapiens
atagtagacatttga

SEQ ID NO: 1262016 - DNA, 15 bp, Homo sapiens
catagtagacatttg

SEQ ID NO: 1262017 - DNA, 15 bp, Homo sapiens
acatagtagacattt

SEQ ID NO: 1262018 - DNA, 15 bp, Homo sapiens
cacatagtagacatt

SEQ ID NO: 1262019 - DNA, 15 bp, Homo sapiens
gcacatagtagacat

SEQ ID NO: 1262020 - DNA, 15 bp, Homo sapiens
tgtgcctggcacata

SEQ ID NO: 1262021 - DNA, 15 bp, Homo sapiens
atgtgcctggcacat

SEQ ID NO: 1262022 - DNA, 15 bp, Homo sapiens
catgtgcctggcaca

SEQ ID NO: 1262023 - DNA, 15 bp, Homo sapiens
acatgtgcctggcac

SEQ ID NO: 1262024 - DNA, 15 bp, Homo sapiens
aacatgtgcctggca

SEQ ID NO: 1262025 - DNA, 15 bp, Homo sapiens
taacatgtgcctggc

SEQ ID NO: 1262026 - DNA, 15 bp, Homo sapiens
ctaacatgtgcctgg

SEQ ID NO: 1262027 - DNA, 15 bp, Homo sapiens
cctaacatgtgcctg

SEQ ID NO: 1262028 - DNA, 15 bp, Homo sapiens
gcctaacatgtgcct

SEQ ID NO: 1262029 - DNA, 15 bp, Homo sapiens
tgcctaacatgtgcc

SEQ ID NO: 1262030 - DNA, 15 bp, Homo sapiens
atgcctaacatgtgc

SEQ ID NO: 1262031 - DNA, 15 bp, Homo sapiens
catgcctaacatgtg

SEQ ID NO: 1262032 - DNA, 15 bp, Homo sapiens
gcatgcctaacatgt

SEQ ID NO: 1262033 - DNA, 15 bp, Homo sapiens
tgcatgcctaacatg

SEQ ID NO: 1262034 - DNA, 15 bp, Homo sapiens
ctgcatgcctaacat

SEQ ID NO: 1262035 - DNA, 15 bp, Homo sapiens
gctgcatgcctaaca

SEQ ID NO: 1262036 - DNA, 15 bp, Homo sapiens
ggctgcatgcctaac

SEQ ID NO: 1262037 - DNA, 15 bp, Homo sapiens
gggctgcatgcctaa

SEQ ID NO: 1262038 - DNA, 15 bp, Homo sapiens
ggggctgcatgccta

SEQ ID NO: 1262039 - DNA, 15 bp, Homo sapiens
tggggctgcatgcct

SEQ ID NO: 1262040 - DNA, 15 bp, Homo sapiens
gtggggctgcatgcc

SEQ ID NO: 1262041 - DNA, 15 bp, Homo sapiens
agtggggctgcatgc

SEQ ID NO: 1262042 - DNA, 15 bp, Homo sapiens
cagtggggctgcatg

SEQ ID NO: 1262043 - DNA, 15 bp, Homo sapiens
ccagtggggctgcat

SEQ ID NO: 1262044 - DNA, 15 bp, Homo sapiens
accagtggggctgca

SEQ ID NO: 1262045 - DNA, 15 bp, Homo sapiens
aaccagtggggctgc

SEQ ID NO: 1262046 - DNA, 15 bp, Homo sapiens
taaccagtggggctg

SEQ ID NO: 1262047 - DNA, 15 bp, Homo sapiens
ctaaccagtggggct

SEQ ID NO: 1262048 - DNA, 15 bp, Homo sapiens
cctaaccagtggggc

SEQ ID NO: 1262049 - DNA, 15 bp, Homo sapiens
tcctaaccagtgggg

SEQ ID NO: 1262050 - DNA, 15 bp, Homo sapiens
ctcctaaccagtggg

SEQ ID NO: 1262051 - DNA, 15 bp, Homo sapiens
tctcctaaccagtgg

SEQ ID NO: 1262052 - DNA, 15 bp, Homo sapiens
ttctcctaaccagtg

SEQ ID NO: 1262053 - DNA, 15 bp, Homo sapiens
gttctcctaaccagt

SEQ ID NO: 1262054 - DNA, 15 bp, Homo sapiens
tgttctcctaaccag

SEQ ID NO: 1262055 - DNA, 15 bp, Homo sapiens
ctgttctcctaacca

SEQ ID NO: 1262056 - DNA, 15 bp, Homo sapiens
tctgttctcctaacc

SEQ ID NO: 1262057 - DNA, 15 bp, Homo sapiens
atctgttctcctaac

SEQ ID NO: 1262058 - DNA, 15 bp, Homo sapiens
tatctgttctcctaa

SEQ ID NO: 1262059 - DNA, 15 bp, Homo sapiens
atatctgttctccta

SEQ ID NO: 1262060 - DNA, 15 bp, Homo sapiens
tatatctgttctcct

SEQ ID NO: 1262061 - DNA, 15 bp, Homo sapiens
ctatatctgttctcc

SEQ ID NO: 1262062 - DNA, 15 bp, Homo sapiens
tctatatctgttctc

SEQ ID NO: 1262063 - DNA, 15 bp, Homo sapiens
gtctatatctgttct

SEQ ID NO: 1262064 - DNA, 15 bp, Homo sapiens
ggtctatatctgttc

SEQ ID NO: 1262065 - DNA, 15 bp, Homo sapiens
aggtctatatctgtt

SEQ ID NO: 1262066 - DNA, 15 bp, Homo sapiens
taggtctatatctgt

SEQ ID NO: 1262067 - DNA, 15 bp, Homo sapiens
gtaggtctatatctg

SEQ ID NO: 1262068 - DNA, 15 bp, Homo sapiens
ggtaggtctatatct

SEQ ID NO: 1262069 - DNA, 15 bp, Homo sapiens
aggtaggtctatatc

SEQ ID NO: 1262070 - DNA, 15 bp, Homo sapiens
aaggtaggtctatat

SEQ ID NO: 1262071 - DNA, 15 bp, Homo sapiens
gaaggtaggtctata

SEQ ID NO: 1262072 - DNA, 15 bp, Homo sapiens
tgaaggtaggtctat

SEQ ID NO: 1262073 - DNA, 15 bp, Homo sapiens
ctgaaggtaggtcta

SEQ ID NO: 1262074 - DNA, 15 bp, Homo sapiens
tctgaaggtaggtct

SEQ ID NO: 1262075 - DNA, 15 bp, Homo sapiens
ctctgaaggtaggtc

SEQ ID NO: 1262076 - DNA, 15 bp, Homo sapiens
tctctgaaggtaggt

SEQ ID NO: 1262077 - DNA, 15 bp, Homo sapiens
gtctctgaaggtagg

SEQ ID NO: 1262078 - DNA, 15 bp, Homo sapiens
agtctctgaaggtag

SEQ ID NO: 1262079 - DNA, 15 bp, Homo sapiens
cagtctctgaaggta

SEQ ID NO: 1262080 - DNA, 15 bp, Homo sapiens
acagtctctgaaggt

SEQ ID NO: 1262081 - DNA, 15 bp, Homo sapiens
gacagtctctgaagg

SEQ ID NO: 1262082 - DNA, 15 bp, Homo sapiens
agacagtctctgaag

SEQ ID NO: 1262083 - DNA, 15 bp, Homo sapiens
cagacagtctctgaa

SEQ ID NO: 1262084 - DNA, 15 bp, Homo sapiens
ccagacagtctctga

SEQ ID NO: 1262085 - DNA, 15 bp, Homo sapiens
gccagacagtctctg

SEQ ID NO: 1262086 - DNA, 15 bp, Homo sapiens
agccagacagtctct

SEQ ID NO: 1262087 - DNA, 15 bp, Homo sapiens
aagccagacagtctc

SEQ ID NO: 1262088 - DNA, 15 bp, Homo sapiens
gaagccagacagtct

SEQ ID NO: 1262089 - DNA, 15 bp, Homo sapiens
cgaagccagacagtc

SEQ ID NO: 1262090 - DNA, 15 bp, Homo sapiens
acgaagccagacagt

SEQ ID NO: 1262091 - DNA, 15 bp, Homo sapiens
cacgaagccagacag

SEQ ID NO: 1262092 - DNA, 15 bp, Homo sapiens
ccacgaagccagaca

SEQ ID NO: 1262093 - DNA, 15 bp, Homo sapiens
tccacgaagccagac

SEQ ID NO: 1262094 - DNA, 15 bp, Homo sapiens
gtccacgaagccaga

SEQ ID NO: 1262095 - DNA, 15 bp, Homo sapiens
tgtccacgaagccag

SEQ ID NO: 1262096 - DNA, 15 bp, Homo sapiens
atgtccacgaagcca

SEQ ID NO: 1262097 - DNA, 15 bp, Homo sapiens
catgtccacgaagcc

SEQ ID NO: 1262098 - DNA, 15 bp, Homo sapiens
acatgtccacgaagc

SEQ ID NO: 1262099 - DNA, 15 bp, Homo sapiens
tacatgtccacgaag

SEQ ID NO: 1262100 - DNA, 15 bp, Homo sapiens
ctacatgtccacgaa

SEQ ID NO: 1262101 - DNA, 15 bp, Homo sapiens
gctacatgtccacga

SEQ ID NO: 1262102 - DNA, 15 bp, Homo sapiens
ggctacatgtccacg

SEQ ID NO: 1262103 - DNA, 15 bp, Homo sapiens
aggctacatgtccac

SEQ ID NO: 1262104 - DNA, 15 bp, Homo sapiens
caggctacatgtcca

SEQ ID NO: 1262105 - DNA, 15 bp, Homo sapiens
acaggctacatgtcc

SEQ ID NO: 1262106 - DNA, 15 bp, Homo sapiens
cacaggctacatgtc

SEQ ID NO: 1262107 - DNA, 15 bp, Homo sapiens
acacaggctacatgt

SEQ ID NO: 1262108 - DNA, 15 bp, Homo sapiens
tacacaggctacatg

SEQ ID NO: 1262109 - DNA, 15 bp, Homo sapiens
ctacacaggctacat

SEQ ID NO: 1262110 - DNA, 15 bp, Homo sapiens
actacacaggctaca

SEQ ID NO: 1262111 - DNA, 15 bp, Homo sapiens
gactacacaggctac

SEQ ID NO: 1262112 - DNA, 15 bp, Homo sapiens
tgactacacaggcta

SEQ ID NO: 1262113 - DNA, 15 bp, Homo sapiens
gtgactacacaggct

SEQ ID NO: 1262114 - DNA, 15 bp, Homo sapiens
agtgactacacaggc

SEQ ID NO: 1262115 - DNA, 15 bp, Homo sapiens
aagtgactacacagg

SEQ ID NO: 1262116 - DNA, 15 bp, Homo sapiens
taagtgactacacag

SEQ ID NO: 1262117 - DNA, 15 bp, Homo sapiens
ctaagtgactacaca

SEQ ID NO: 1262118 - DNA, 15 bp, Homo sapiens
actaagtgactacac

SEQ ID NO: 1262119 - DNA, 15 bp, Homo sapiens
aactaagtgactaca

SEQ ID NO: 1262120 - DNA, 15 bp, Homo sapiens
gaactaagtgactac

SEQ ID NO: 1262121 - DNA, 15 bp, Homo sapiens
agaactaagtgacta

SEQ ID NO: 1262122 - DNA, 15 bp, Homo sapiens
gagaactaagtgact

SEQ ID NO: 1262123 - DNA, 15 bp, Homo sapiens
ggagaactaagtgac

SEQ ID NO: 1262124 - DNA, 15 bp, Homo sapiens
tggagaactaagtga

SEQ ID NO: 1262125 - DNA, 15 bp, Homo sapiens
atggagaactaagtg

SEQ ID NO: 1262126 - DNA, 15 bp, Homo sapiens
catggagaactaagt

SEQ ID NO: 1262127 - DNA, 15 bp, Homo sapiens
acatggagaactaag

SEQ ID NO: 1262128 - DNA, 15 bp, Homo sapiens
aacatggagaactaa

SEQ ID NO: 1262129 - DNA, 15 bp, Homo sapiens
taacatggagaacta

SEQ ID NO: 1262130 - DNA, 15 bp, Homo sapiens
ctaacatggagaact

SEQ ID NO: 1262131 - DNA, 15 bp, Homo sapiens
tctaacatggagaac

SEQ ID NO: 1262132 - DNA, 15 bp, Homo sapiens
ttctaacatggagaa

SEQ ID NO: 1262133 - DNA, 15 bp, Homo sapiens
tttctaacatggaga

SEQ ID NO: 1262134 - DNA, 15 bp, Homo sapiens
ctttctaacatggag

SEQ ID NO: 1262135 - DNA, 15 bp, Homo sapiens
tctttctaacatgga

SEQ ID NO: 1262136 - DNA, 15 bp, Homo sapiens
gtctttctaacatgg

SEQ ID NO: 1262137 - DNA, 15 bp, Homo sapiens
ggtctttctaacatg

SEQ ID NO: 1262138 - DNA, 15 bp, Homo sapiens
gggtctttctaacat

SEQ ID NO: 1262139 - DNA, 15 bp, Homo sapiens
agggtctttctaaca

SEQ ID NO: 1262140 - DNA, 15 bp, Homo sapiens
cagggtctttctaac

SEQ ID NO: 1262141 - DNA, 15 bp, Homo sapiens
acagggtctttctaa

SEQ ID NO: 1262142 - DNA, 15 bp, Homo sapiens
cacagggtctttcta

SEQ ID NO: 1262143 - DNA, 15 bp, Homo sapiens
ccacagggtctttct

SEQ ID NO: 1262144 - DNA, 15 bp, Homo sapiens
accacagggtctttc

SEQ ID NO: 1262145 - DNA, 15 bp, Homo sapiens
caaccacagggtctt

SEQ ID NO: 1262146 - DNA, 15 bp, Homo sapiens
ccaaccacagggtct

SEQ ID NO: 1262147 - DNA, 15 bp, Homo sapiens
accaaccacagggtc

SEQ ID NO: 1262148 - DNA, 15 bp, Homo sapiens
aaccaaccacagggt

SEQ ID NO: 1262149 - DNA, 15 bp, Homo sapiens
aaaccaaccacaggg

SEQ ID NO: 1262150 - DNA, 15 bp, Homo sapiens
taaaccaaccacagg

SEQ ID NO: 1262151 - DNA, 15 bp, Homo sapiens
attaaaccaaccaca

SEQ ID NO: 1262152 - DNA, 15 bp, Homo sapiens
cattaaaccaaccac

SEQ ID NO: 1262153 - DNA, 15 bp, Homo sapiens
gcattaaaccaacca

SEQ ID NO: 1262154 - DNA, 15 bp, Homo sapiens
agcattaaaccaacc

SEQ ID NO: 1262155 - DNA, 15 bp, Homo sapiens
gagcattaaaccaac

SEQ ID NO: 1262156 - DNA, 15 bp, Homo sapiens
agagcattaaaccaa

SEQ ID NO: 1262157 - DNA, 15 bp, Homo sapiens
cagagcattaaacca

SEQ ID NO: 1262158 - DNA, 15 bp, Homo sapiens
acagagcattaaacc

SEQ ID NO: 1262159 - DNA, 15 bp, Homo sapiens
aacagagcattaaac

SEQ ID NO: 1262160 - DNA, 15 bp, Homo sapiens
caacagagcattaaa

SEQ ID NO: 1262161 - DNA, 15 bp, Homo sapiens
gcaacagagcattaa

SEQ ID NO: 1262162 - DNA, 15 bp, Homo sapiens
ggcaacagagcatta

SEQ ID NO: 1262163 - DNA, 15 bp, Homo sapiens
tggcaacagagcatt

SEQ ID NO: 1262164 - DNA, 15 bp, Homo sapiens
gtggcaacagagcat

SEQ ID NO: 1262165 - DNA, 15 bp, Homo sapiens
ggtggcaacagagca

SEQ ID NO: 1262166 - DNA, 15 bp, Homo sapiens
tggtggcaacagagc

SEQ ID NO: 1262167 - DNA, 15 bp, Homo sapiens
atggtggcaacagag

SEQ ID NO: 1262168 - DNA, 15 bp, Homo sapiens
gatggtggcaacaga

SEQ ID NO: 1262169 - DNA, 15 bp, Homo sapiens
agatggtggcaacag

SEQ ID NO: 1262170 - DNA, 15 bp, Homo sapiens
aagatggtggcaaca

SEQ ID NO: 1262171 - DNA, 15 bp, Homo sapiens
caagatggtggcaac

SEQ ID NO: 1262172 - DNA, 15 bp, Homo sapiens
tcaagatggtggcaa

SEQ ID NO: 1262173 - DNA, 15 bp, Homo sapiens
ttcaagatggtggca

SEQ ID NO: 1262174 - DNA, 15 bp, Homo sapiens
tttcaagatggtggc

SEQ ID NO: 1262175 - DNA, 15 bp, Homo sapiens
atttcaagatggtgg

SEQ ID NO: 1262176 - DNA, 15 bp, Homo sapiens
aatttcaagatggtg

SEQ ID NO: 1262177 - DNA, 15 bp, Homo sapiens
gaatttcaagatggt

SEQ ID NO: 1262178 - DNA, 15 bp, Homo sapiens
agaatttcaagatgg

SEQ ID NO: 1262179 - DNA, 15 bp, Homo sapiens
aagaatttcaagatg

SEQ ID NO: 1262180 - DNA, 15 bp, Homo sapiens
taagaatttcaagat

SEQ ID NO: 1262181 - DNA, 15 bp, Homo sapiens
ctaagaatttcaaga

SEQ ID NO: 1262182 - DNA, 15 bp, Homo sapiens
actaagaatttcaag

SEQ ID NO: 1262183 - DNA, 15 bp, Homo sapiens
tactaagaatttcaa

SEQ ID NO: 1262184 - DNA, 15 bp, Homo sapiens
ttactaagaatttca

SEQ ID NO: 1262185 - DNA, 15 bp, Homo sapiens
attactaagaatttc

SEQ ID NO: 1262186 - DNA, 15 bp, Homo sapiens
aattactaagaattt

SEQ ID NO: 1262187 - DNA, 15 bp, Homo sapiens
aaattactaagaatt

SEQ ID NO: 1262188 - DNA, 15 bp, Homo sapiens
aaaattactaagaat

SEQ ID NO: 1262189 - DNA, 15 bp, Homo sapiens
aaaaattactaagaa

SEQ ID NO: 1262190 - DNA, 15 bp, Homo sapiens
gaaaaattactaaga

SEQ ID NO: 1262191 - DNA, 15 bp, Homo sapiens
tgaaaaattactaag

SEQ ID NO: 1262192 - DNA, 15 bp, Homo sapiens
ttgaaaaattactaa

SEQ ID NO: 1262193 - DNA, 15 bp, Homo sapiens
attgaaaaattacta

SEQ ID NO: 1262194 - DNA, 15 bp, Homo sapiens
cattgaaaaattact

SEQ ID NO: 1262195 - DNA, 15 bp, Homo sapiens
tcattgaaaaattac

SEQ ID NO: 1262196 - DNA, 15 bp, Homo sapiens
ctcattgaaaaatta

SEQ ID NO: 1262197 - DNA, 15 bp, Homo sapiens
cctcattgaaaaatt

SEQ ID NO: 1262198 - DNA, 15 bp, Homo sapiens
tcctcattgaaaaat

SEQ ID NO: 1262199 - DNA, 15 bp, Homo sapiens
ctcctcattgaaaaa

SEQ ID NO: 1262200 - DNA, 15 bp, Homo sapiens
actcctcattgaaaa

SEQ ID NO: 1262201 - DNA, 15 bp, Homo sapiens
aactcctcattgaaa

SEQ ID NO: 1262202 - DNA, 15 bp, Homo sapiens
gaactcctcattgaa

SEQ ID NO: 1262203 - DNA, 15 bp, Homo sapiens
agaactcctcattga

SEQ ID NO: 1262204 - DNA, 15 bp, Homo sapiens
cagaactcctcattg

SEQ ID NO: 1262205 - DNA, 15 bp, Homo sapiens
gcagaactcctcatt

SEQ ID NO: 1262206 - DNA, 15 bp, Homo sapiens
tgcagaactcctcat

SEQ ID NO: 1262207 - DNA, 15 bp, Homo sapiens
atgcagaactcctca

SEQ ID NO: 1262208 - DNA, 15 bp, Homo sapiens
aatgcagaactcctc

SEQ ID NO: 1262209 - DNA, 15 bp, Homo sapiens
aaatgcagaactcct

SEQ ID NO: 1262210 - DNA, 15 bp, Homo sapiens
aaaatgcagaactcc

SEQ ID NO: 1262211 - DNA, 15 bp, Homo sapiens
aaaaatgcagaactc

SEQ ID NO: 1262212 - DNA, 15 bp, Homo sapiens
aaaaaatgcagaact

SEQ ID NO: 1262213 - DNA, 15 bp, Homo sapiens
aaaaaaatgcagaac

SEQ ID NO: 1262214 - DNA, 15 bp, Homo sapiens
aaaaaaaatgcagaa

SEQ ID NO: 1262215 - DNA, 15 bp, Homo sapiens
gaaaaaaaatgcaga

SEQ ID NO: 1262216 - DNA, 15 bp, Homo sapiens
ggaaaaaaaatgcag

SEQ ID NO: 1262217 - DNA, 15 bp, Homo sapiens
aggaaaaaaaatgca

SEQ ID NO: 1262218 - DNA, 15 bp, Homo sapiens
gaggaaaaaaaatgc

SEQ ID NO: 1262219 - DNA, 15 bp, Homo sapiens
agaggaaaaaaaatg

SEQ ID NO: 1262220 - DNA, 15 bp, Homo sapiens
cagaggaaaaaaaat

SEQ ID NO: 1262221 - DNA, 15 bp, Homo sapiens
ccagaggaaaaaaaa

SEQ ID NO: 1262222 - DNA, 15 bp, Homo sapiens
tccagaggaaaaaaa

SEQ ID NO: 1262223 - DNA, 15 bp, Homo sapiens
gtccagaggaaaaaa

SEQ ID NO: 1262224 - DNA, 15 bp, Homo sapiens
ggtccagaggaaaaa

SEQ ID NO: 1262225 - DNA, 15 bp, Homo sapiens
gggtccagaggaaaa

SEQ ID NO: 1262226 - DNA, 15 bp, Homo sapiens
agggtccagaggaaa

SEQ ID NO: 1262227 - DNA, 15 bp, Homo sapiens
cagggtccagaggaa

SEQ ID NO: 1262228 - DNA, 15 bp, Homo sapiens
gcagggtccagagga

SEQ ID NO: 1262229 - DNA, 15 bp, Homo sapiens
tgcagggtccagagg

SEQ ID NO: 1262230 - DNA, 15 bp, Homo sapiens
ttgcagggtccagag

SEQ ID NO: 1262231 - DNA, 15 bp, Homo sapiens
tttgcagggtccaga

SEQ ID NO: 1262232 - DNA, 15 bp, Homo sapiens
atttgcagggtccag

SEQ ID NO: 1262233 - DNA, 15 bp, Homo sapiens
aatttgcagggtcca

SEQ ID NO: 1262234 - DNA, 15 bp, Homo sapiens
taatttgcagggtcc

SEQ ID NO: 1262235 - DNA, 15 bp, Homo sapiens
ataatttgcagggtc

SEQ ID NO: 1262236 - DNA, 15 bp, Homo sapiens
cataatttgcagggt

SEQ ID NO: 1262237 - DNA, 15 bp, Homo sapiens
acataatttgcaggg

SEQ ID NO: 1262238 - DNA, 15 bp, Homo sapiens
tacataatttgcagg

SEQ ID NO: 1262239 - DNA, 15 bp, Homo sapiens
ttacataatttgcag

SEQ ID NO: 1262240 - DNA, 15 bp, Homo sapiens
attacataatttgca

SEQ ID NO: 1262241 - DNA, 15 bp, Homo sapiens
aattacataatttgc

SEQ ID NO: 1262242 - DNA, 15 bp, Homo sapiens
caattacataatttg

SEQ ID NO: 1262243 - DNA, 15 bp, Homo sapiens
ccaattacataattt

SEQ ID NO: 1262244 - DNA, 15 bp, Homo sapiens
accaattacataatt

SEQ ID NO: 1262245 - DNA, 15 bp, Homo sapiens
gaccaattacataat

SEQ ID NO: 1262246 - DNA, 15 bp, Homo sapiens
ggaccaattacataa

SEQ ID NO: 1262247 - DNA, 15 bp, Homo sapiens
aggaccaattacata

SEQ ID NO: 1262248 - DNA, 15 bp, Homo sapiens
caggaccaattacat

SEQ ID NO: 1262249 - DNA, 15 bp, Homo sapiens
gcaggaccaattaca

SEQ ID NO: 1262250 - DNA, 15 bp, Homo sapiens
agcaggaccaattac

SEQ ID NO: 1262251 - DNA, 15 bp, Homo sapiens
gagcaggaccaatta

SEQ ID NO: 1262252 - DNA, 15 bp, Homo sapiens
tgagcaggaccaatt

SEQ ID NO: 1262253 - DNA, 15 bp, Homo sapiens
atgagcaggaccaat

SEQ ID NO: 1262254 - DNA, 15 bp, Homo sapiens
catgagcaggaccaa

SEQ ID NO: 1262255 - DNA, 15 bp, Homo sapiens
ccatgagcaggacca

SEQ ID NO: 1262256 - DNA, 15 bp, Homo sapiens
tccatgagcaggacc

SEQ ID NO: 1262257 - DNA, 15 bp, Homo sapiens
ttccatgagcaggac

SEQ ID NO: 1262258 - DNA, 15 bp, Homo sapiens
tttccatgagcagga

SEQ ID NO: 1262259 - DNA, 15 bp, Homo sapiens
atttccatgagcagg

SEQ ID NO: 1262260 - DNA, 15 bp, Homo sapiens
aatttccatgagcag

SEQ ID NO: 1262261 - DNA, 15 bp, Homo sapiens
caatttccatgagca

SEQ ID NO: 1262262 - DNA, 15 bp, Homo sapiens
ccaatttccatgagc

SEQ ID NO: 1262263 - DNA, 15 bp, Homo sapiens
accaatttccatgag

SEQ ID NO: 1262264 - DNA, 15 bp, Homo sapiens
taccaatttccatga

SEQ ID NO: 1262265 - DNA, 15 bp, Homo sapiens
ataccaatttccatg

SEQ ID NO: 1262266 - DNA, 15 bp, Homo sapiens
tataccaatttccat

SEQ ID NO: 1262267 - DNA, 15 bp, Homo sapiens
ctataccaatttcca

SEQ ID NO: 1262268 - DNA, 15 bp, Homo sapiens
actataccaatttcc

SEQ ID NO: 1262269 - DNA, 15 bp, Homo sapiens
tactataccaatttc

SEQ ID NO: 1262270 - DNA, 15 bp, Homo sapiens
ctactataccaattt

SEQ ID NO: 1262271 - DNA, 15 bp, Homo sapiens
cctactataccaatt

SEQ ID NO: 1262272 - DNA, 15 bp, Homo sapiens
tcctactataccaat

SEQ ID NO: 1262273 - DNA, 15 bp, Homo sapiens
ctcctactataccaa

SEQ ID NO: 1262274 - DNA, 15 bp, Homo sapiens
tctcctactatacca

SEQ ID NO: 1262275 - DNA, 15 bp, Homo sapiens
ttctcctactatacc

SEQ ID NO: 1262276 - DNA, 15 bp, Homo sapiens
attctcctactatac

SEQ ID NO: 1262277 - DNA, 15 bp, Homo sapiens
gattctcctactata

SEQ ID NO: 1262278 - DNA, 15 bp, Homo sapiens
tgattctcctactat

SEQ ID NO: 1262279 - DNA, 15 bp, Homo sapiens
ttgattctcctacta

SEQ ID NO: 1262280 - DNA, 15 bp, Homo sapiens
attgattctcctact

SEQ ID NO: 1262281 - DNA, 15 bp, Homo sapiens
gattgattctcctac

SEQ ID NO: 1262282 - DNA, 15 bp, Homo sapiens
tgattgattctccta

SEQ ID NO: 1262283 - DNA, 15 bp, Homo sapiens
atatgattgattctc

SEQ ID NO: 1262284 - DNA, 15 bp, Homo sapiens
aatatgattgattct

SEQ ID NO: 1262285 - DNA, 15 bp, Homo sapiens
gaatatgattgattc

SEQ ID NO: 1262286 - DNA, 15 bp, Homo sapiens
agaatatgattgatt

SEQ ID NO: 1262287 - DNA, 15 bp, Homo sapiens
gagaatatgattgat

SEQ ID NO: 1262288 - DNA, 15 bp, Homo sapiens
agagaatatgattga

SEQ ID NO: 1262289 - DNA, 15 bp, Homo sapiens
cagagaatatgattg

SEQ ID NO: 1262290 - DNA, 15 bp, Homo sapiens
gcagagaatatgatt

SEQ ID NO: 1262291 - DNA, 15 bp, Homo sapiens
tgcagagaatatgat

SEQ ID NO: 1262292 - DNA, 15 bp, Homo sapiens
gtgcagagaatatga

SEQ ID NO: 1262293 - DNA, 15 bp, Homo sapiens
agtgcagagaatatg

SEQ ID NO: 1262294 - DNA, 15 bp, Homo sapiens
aagtgcagagaatat

SEQ ID NO: 1262295 - DNA, 15 bp, Homo sapiens
taagtgcagagaata

SEQ ID NO: 1262296 - DNA, 15 bp, Homo sapiens
ctaagtgcagagaat

SEQ ID NO: 1262297 - DNA, 15 bp, Homo sapiens
cctaagtgcagagaa

SEQ ID NO: 1262298 - DNA, 15 bp, Homo sapiens
tcctaagtgcagaga

SEQ ID NO: 1262299 - DNA, 15 bp, Homo sapiens
ctcctaagtgcagag

SEQ ID NO: 1262300 - DNA, 15 bp, Homo sapiens
actcctaagtgcaga

SEQ ID NO: 1262301 - DNA, 15 bp, Homo sapiens
cactcctaagtgcag

SEQ ID NO: 1262302 - DNA, 15 bp, Homo sapiens
acactcctaagtgca

SEQ ID NO: 1262303 - DNA, 15 bp, Homo sapiens
cacactcctaagtgc

SEQ ID NO: 1262304 - DNA, 15 bp, Homo sapiens
ccacactcctaagtg

SEQ ID NO: 1262305 - DNA, 15 bp, Homo sapiens
accacactcctaagt

SEQ ID NO: 1262306 - DNA, 15 bp, Homo sapiens
aaccacactcctaag

SEQ ID NO: 1262307 - DNA, 15 bp, Homo sapiens
aaaccacactcctaa

SEQ ID NO: 1262308 - DNA, 15 bp, Homo sapiens
caaaccacactccta

SEQ ID NO: 1262309 - DNA, 15 bp, Homo sapiens
ccaaaccacactcct

SEQ ID NO: 1262310 - DNA, 15 bp, Homo sapiens
accaaaccacactcc

SEQ ID NO: 1262311 - DNA, 15 bp, Homo sapiens
caccaaaccacactc

SEQ ID NO: 1262312 - DNA, 15 bp, Homo sapiens
ccaccaaaccacact

SEQ ID NO: 1262313 - DNA, 15 bp, Homo sapiens
gccaccaaaccacac

SEQ ID NO: 1262314 - DNA, 15 bp, Homo sapiens
tgccaccaaaccaca

SEQ ID NO: 1262315 - DNA, 15 bp, Homo sapiens
atgccaccaaaccac

SEQ ID NO: 1262316 - DNA, 15 bp, Homo sapiens
catgccaccaaacca

SEQ ID NO: 1262317 - DNA, 15 bp, Homo sapiens
ccatgccaccaaacc

SEQ ID NO: 1262318 - DNA, 15 bp, Homo sapiens
tccatgccaccaaac

SEQ ID NO: 1262319 - DNA, 15 bp, Homo sapiens
ctccatgccaccaaa

SEQ ID NO: 1262320 - DNA, 15 bp, Homo sapiens
tctccatgccaccaa

SEQ ID NO: 1262321 - DNA, 15 bp, Homo sapiens
ctctccatgccacca

SEQ ID NO: 1262322 - DNA, 15 bp, Homo sapiens
tctctccatgccacc

SEQ ID NO: 1262323 - DNA, 15 bp, Homo sapiens
ttctctccatgccac

SEQ ID NO: 1262324 - DNA, 15 bp, Homo sapiens
cttctctccatgcca

SEQ ID NO: 1262325 - DNA, 15 bp, Homo sapiens
ccttctctccatgcc

SEQ ID NO: 1262326 - DNA, 15 bp, Homo sapiens
accttctctccatgc

SEQ ID NO: 1262327 - DNA, 15 bp, Homo sapiens
gaccttctctccatg

SEQ ID NO: 1262328 - DNA, 15 bp, Homo sapiens
tgaccttctctccat

SEQ ID NO: 1262329 - DNA, 15 bp, Homo sapiens
ctgaccttctctcca

SEQ ID NO: 1262330 - DNA, 15 bp, Homo sapiens
actgaccttctctcc

SEQ ID NO: 1262331 - DNA, 15 bp, Homo sapiens
cactgaccttctctc

SEQ ID NO: 1262332 - DNA, 15 bp, Homo sapiens
acactgaccttctct

SEQ ID NO: 1262333 - DNA, 15 bp, Homo sapiens
tacactgaccttctc

SEQ ID NO: 1262334 - DNA, 15 bp, Homo sapiens
ctacactgaccttct

SEQ ID NO: 1262335 - DNA, 15 bp, Homo sapiens
gctacactgaccttc

SEQ ID NO: 1262336 - DNA, 15 bp, Homo sapiens
tgctacactgacctt

SEQ ID NO: 1262337 - DNA, 15 bp, Homo sapiens
ctgctacactgacct

SEQ ID NO: 1262338 - DNA, 15 bp, Homo sapiens
tctgctacactgacc

SEQ ID NO: 1262339 - DNA, 15 bp, Homo sapiens
ttctgctacactgac

SEQ ID NO: 1262340 - DNA, 15 bp, Homo sapiens
cttctgctacactga

SEQ ID NO: 1262341 - DNA, 15 bp, Homo sapiens
acttctgctacactg

SEQ ID NO: 1262342 - DNA, 15 bp, Homo sapiens
tacttctgctacact

SEQ ID NO: 1262343 - DNA, 15 bp, Homo sapiens
ctacttctgctacac

SEQ ID NO: 1262344 - DNA, 15 bp, Homo sapiens
actacttctgctaca

SEQ ID NO: 1262345 - DNA, 15 bp, Homo sapiens
tactacttctgctac

SEQ ID NO: 1262346 - DNA, 15 bp, Homo sapiens
gtactacttctgcta

SEQ ID NO: 1262347 - DNA, 15 bp, Homo sapiens
tgtactacttctgct

SEQ ID NO: 1262348 - DNA, 15 bp, Homo sapiens
ctgtactacttctgc

SEQ ID NO: 1262349 - DNA, 15 bp, Homo sapiens
actgtactacttctg

SEQ ID NO: 1262350 - DNA, 15 bp, Homo sapiens
tactgtactacttct

SEQ ID NO: 1262351 - DNA, 15 bp, Homo sapiens
atactgtactacttc

SEQ ID NO: 1262352 - DNA, 15 bp, Homo sapiens
tatactgtactactt

SEQ ID NO: 1262353 - DNA, 15 bp, Homo sapiens
ttatactgtactact

SEQ ID NO: 1262354 - DNA, 15 bp, Homo sapiens
tttatactgtactac

SEQ ID NO: 1262355 - DNA, 15 bp, Homo sapiens
ttttatactgtacta

SEQ ID NO: 1262356 - DNA, 15 bp, Homo sapiens
tttttatactgtact

SEQ ID NO: 1262357 - DNA, 15 bp, Homo sapiens
ctttttatactgtac

SEQ ID NO: 1262358 - DNA, 15 bp, Homo sapiens
tctttttatactgta

SEQ ID NO: 1262359 - DNA, 15 bp, Homo sapiens
atctttttatactgt

SEQ ID NO: 1262360 - DNA, 15 bp, Homo sapiens
catctttttatactg

SEQ ID NO: 1262361 - DNA, 15 bp, Homo sapiens
tcatctttttatact

SEQ ID NO: 1262362 - DNA, 15 bp, Homo sapiens
ttcatctttttatac

SEQ ID NO: 1262363 - DNA, 15 bp, Homo sapiens
cttcatctttttata

SEQ ID NO: 1262364 - DNA, 15 bp, Homo sapiens
tcttcatctttttat

SEQ ID NO: 1262365 - DNA, 15 bp, Homo sapiens
atcttcatcttttta

SEQ ID NO: 1262366 - DNA, 15 bp, Homo sapiens
catcttcatcttttt

SEQ ID NO: 1262367 - DNA, 15 bp, Homo sapiens
tcatcttcatctttt

SEQ ID NO: 1262368 - DNA, 15 bp, Homo sapiens
atcatcttcatcttt

SEQ ID NO: 1262369 - DNA, 15 bp, Homo sapiens
tatcatcttcatctt

SEQ ID NO: 1262370 - DNA, 15 bp, Homo sapiens
ttatcatcttcatct

SEQ ID NO: 1262371 - DNA, 15 bp, Homo sapiens
attatcatcttcatc

SEQ ID NO: 1262372 - DNA, 15 bp, Homo sapiens
tattatcatcttcat

SEQ ID NO: 1262373 - DNA, 15 bp, Homo sapiens
atattatcatcttca

SEQ ID NO: 1262374 - DNA, 15 bp, Homo sapiens
aatattatcatcttc

SEQ ID NO: 1262375 - DNA, 15 bp, Homo sapiens
gaatattatcatctt

SEQ ID NO: 1262376 - DNA, 15 bp, Homo sapiens
tgaatattatcatct

SEQ ID NO: 1262377 - DNA, 15 bp, Homo sapiens
gtgaatattatcatc

SEQ ID NO: 1262378 - DNA, 15 bp, Homo sapiens
tgtgaatattatcat

SEQ ID NO: 1262379 - DNA, 15 bp, Homo sapiens
ttgtgaatattatca

SEQ ID NO: 1262380 - DNA, 15 bp, Homo sapiens
attgtgaatattatc

SEQ ID NO: 1262381 - DNA, 15 bp, Homo sapiens
cattgtgaatattat

SEQ ID NO: 1262382 - DNA, 15 bp, Homo sapiens
ccattgtgaatatta

SEQ ID NO: 1262383 - DNA, 15 bp, Homo sapiens
gccattgtgaatatt

SEQ ID NO: 1262384 - DNA, 15 bp, Homo sapiens
cgccattgtgaatat

SEQ ID NO: 1262385 - DNA, 15 bp, Homo sapiens
ccgccattgtgaata

SEQ ID NO: 1262386 - DNA, 15 bp, Homo sapiens
cccgccattgtgaat

SEQ ID NO: 1262387 - DNA, 15 bp, Homo sapiens
tcccgccattgtgaa

SEQ ID NO: 1262388 - DNA, 15 bp, Homo sapiens
ttcccgccattgtga

SEQ ID NO: 1262389 - DNA, 15 bp, Homo sapiens
cttcccgccattgtg

SEQ ID NO: 1262390 - DNA, 15 bp, Homo sapiens
ccttcccgccattgt

SEQ ID NO: 1262391 - DNA, 15 bp, Homo sapiens
tccttcccgccattg

SEQ ID NO: 1262392 - DNA, 15 bp, Homo sapiens
ctccttcccgccatt

SEQ ID NO: 1262393 - DNA, 15 bp, Homo sapiens
actccttcccgccat

SEQ ID NO: 1262394 - DNA, 15 bp, Homo sapiens
cactccttcccgcca

SEQ ID NO: 1262395 - DNA, 15 bp, Homo sapiens
ccactccttcccgcc

SEQ ID NO: 1262396 - DNA, 15 bp, Homo sapiens
tccactccttcccgc

SEQ ID NO: 1262397 - DNA, 15 bp, Homo sapiens
ctccactccttcccg

SEQ ID NO: 1262398 - DNA, 15 bp, Homo sapiens
actccactccttccc

SEQ ID NO: 1262399 - DNA, 15 bp, Homo sapiens
gactccactccttcc

SEQ ID NO: 1262400 - DNA, 15 bp, Homo sapiens
agactccactccttc

SEQ ID NO: 1262401 - DNA, 15 bp, Homo sapiens
cagactccactcctt

SEQ ID NO: 1262402 - DNA, 15 bp, Homo sapiens
gcagactccactcct

SEQ ID NO: 1262403 - DNA, 15 bp, Homo sapiens
agcagactccactcc

SEQ ID NO: 1262404 - DNA, 15 bp, Homo sapiens
cagcagactccactc

SEQ ID NO: 1262405 - DNA, 15 bp, Homo sapiens
gcagcagactccact

SEQ ID NO: 1262406 - DNA, 15 bp, Homo sapiens
agcagcagactccac

SEQ ID NO: 1262407 - DNA, 15 bp, Homo sapiens
cagcagcagactcca

SEQ ID NO: 1262408 - DNA, 15 bp, Homo sapiens
ccagcagcagactcc

SEQ ID NO: 1262409 - DNA, 15 bp, Homo sapiens
cccagcagcagactc

SEQ ID NO: 1262410 - DNA, 15 bp, Homo sapiens
ccccagcagcagact

SEQ ID NO: 1262411 - DNA, 15 bp, Homo sapiens
cccccagcagcagac

SEQ ID NO: 1262412 - DNA, 15 bp, Homo sapiens
tcccccagcagcaga

SEQ ID NO: 1262413 - DNA, 15 bp, Homo sapiens
atcccccagcagcag

SEQ ID NO: 1262414 - DNA, 15 bp, Homo sapiens
catcccccagcagca

SEQ ID NO: 1262415 - DNA, 15 bp, Homo sapiens
tcatcccccagcagc

SEQ ID NO: 1262416 - DNA, 15 bp, Homo sapiens
ttcatcccccagcag

SEQ ID NO: 1262417 - DNA, 15 bp, Homo sapiens
tttcatcccccagca

SEQ ID NO: 1262418 - DNA, 15 bp, Homo sapiens
ttttcatcccccagc

SEQ ID NO: 1262419 - DNA, 15 bp, Homo sapiens
cttttcatcccccag

SEQ ID NO: 1262420 - DNA, 15 bp, Homo sapiens
tcttttcatccccca

SEQ ID NO: 1262421 - DNA, 15 bp, Homo sapiens
atcttttcatccccc

SEQ ID NO: 1262422 - DNA, 15 bp, Homo sapiens
tatcttttcatcccc

SEQ ID NO: 1262423 - DNA, 15 bp, Homo sapiens
gtatcttttcatccc

SEQ ID NO: 1262424 - DNA, 15 bp, Homo sapiens
tgtatcttttcatcc

SEQ ID NO: 1262425 - DNA, 15 bp, Homo sapiens
atgtatcttttcatc

SEQ ID NO: 1262426 - DNA, 15 bp, Homo sapiens
catgtatcttttcat

SEQ ID NO: 1262427 - DNA, 15 bp, Homo sapiens
tcatgtatcttttca

SEQ ID NO: 1262428 - DNA, 15 bp, Homo sapiens
ctcatgtatcttttc

SEQ ID NO: 1262429 - DNA, 15 bp, Homo sapiens
actcatgtatctttt

SEQ ID NO: 1262430 - DNA, 15 bp, Homo sapiens
cactcatgtatcttt

SEQ ID NO: 1262431 - DNA, 15 bp, Homo sapiens
ccactcatgtatctt

SEQ ID NO: 1262432 - DNA, 15 bp, Homo sapiens
tccactcatgtatct

SEQ ID NO: 1262433 - DNA, 15 bp, Homo sapiens
ttccactcatgtatc

SEQ ID NO: 1262434 - DNA, 15 bp, Homo sapiens
gttccactcatgtat

SEQ ID NO: 1262435 - DNA, 15 bp, Homo sapiens
tgttccactcatgta

SEQ ID NO: 1262436 - DNA, 15 bp, Homo sapiens
ctgttccactcatgt

SEQ ID NO: 1262437 - DNA, 15 bp, Homo sapiens
gctgttccactcatg

SEQ ID NO: 1262438 - DNA, 15 bp, Homo sapiens
tgctgttccactcat

SEQ ID NO: 1262439 - DNA, 15 bp, Homo sapiens
ctgctgttccactca

SEQ ID NO: 1262440 - DNA, 15 bp, Homo sapiens
cctgctgttccactc

SEQ ID NO: 1262441 - DNA, 15 bp, Homo sapiens
ccctgctgttccact

SEQ ID NO: 1262442 - DNA, 15 bp, Homo sapiens
cccctgctgttccac

SEQ ID NO: 1262443 - DNA, 15 bp, Homo sapiens
acccctgctgttcca

SEQ ID NO: 1262444 - DNA, 15 bp, Homo sapiens
aacccctgctgttcc

SEQ ID NO: 1262445 - DNA, 15 bp, Homo sapiens
gaacccctgctgttc

SEQ ID NO: 1262446 - DNA, 15 bp, Homo sapiens
agaacccctgctgtt

SEQ ID NO: 1262447 - DNA, 15 bp, Homo sapiens
aagaacccctgctgt

SEQ ID NO: 1262448 - DNA, 15 bp, Homo sapiens
aaagaacccctgctg

SEQ ID NO: 1262449 - DNA, 15 bp, Homo sapiens
aaaagaacccctgct

SEQ ID NO: 1262450 - DNA, 15 bp, Homo sapiens
aaaaagaacccctgc

SEQ ID NO: 1262451 - DNA, 15 bp, Homo sapiens
aaaaaagaacccctg

SEQ ID NO: 1262452 - DNA, 15 bp, Homo sapiens
caaaaaagaacccct

SEQ ID NO: 1262453 - DNA, 15 bp, Homo sapiens
acaaaaaagaacccc

SEQ ID NO: 1262454 - DNA, 15 bp, Homo sapiens
aacaaaaaagaaccc

SEQ ID NO: 1262455 - DNA, 15 bp, Homo sapiens
aaacaaaaaagaacc

SEQ ID NO: 1262456 - DNA, 15 bp, Homo sapiens
aaaacaaaaaagaac

SEQ ID NO: 1262457 - DNA, 15 bp, Homo sapiens
gaaaacaaaaaagaa

SEQ ID NO: 1262458 - DNA, 15 bp, Homo sapiens
agaaaacaaaaaaga

SEQ ID NO: 1262459 - DNA, 15 bp, Homo sapiens
aagaaaacaaaaaag

SEQ ID NO: 1262460 - DNA, 15 bp, Homo sapiens
gtaaagaaaacaaaa

SEQ ID NO: 1262461 - DNA, 15 bp, Homo sapiens
agtaaagaaaacaaa

SEQ ID NO: 1262462 - DNA, 15 bp, Homo sapiens
aagtaaagaaaacaa

SEQ ID NO: 1262463 - DNA, 15 bp, Homo sapiens
aaagtaaagaaaaca

SEQ ID NO: 1262464 - DNA, 15 bp, Homo sapiens
aaaagtaaagaaaac

SEQ ID NO: 1262465 - DNA, 15 bp, Homo sapiens
gaaaagtaaagaaaa

SEQ ID NO: 1262466 - DNA, 15 bp, Homo sapiens
ggaaaagtaaagaaa

SEQ ID NO: 1262467 - DNA, 15 bp, Homo sapiens
aggaaaagtaaagaa

SEQ ID NO: 1262468 - DNA, 15 bp, Homo sapiens
gaggaaaagtaaaga

SEQ ID NO: 1262469 - DNA, 15 bp, Homo sapiens
ggaggaaaagtaaag

SEQ ID NO: 1262470 - DNA, 15 bp, Homo sapiens
gggaggaaaagtaaa

SEQ ID NO: 1262471 - DNA, 15 bp, Homo sapiens
tgggaggaaaagtaa

SEQ ID NO: 1262472 - DNA, 15 bp, Homo sapiens
ctgggaggaaaagta

SEQ ID NO: 1262473 - DNA, 15 bp, Homo sapiens
tctgggaggaaaagt

SEQ ID NO: 1262474 - DNA, 15 bp, Homo sapiens
gtctgggaggaaaag

SEQ ID NO: 1262475 - DNA, 15 bp, Homo sapiens
ggtctgggaggaaaa

SEQ ID NO: 1262476 - DNA, 15 bp, Homo sapiens
aggtctgggaggaaa

SEQ ID NO: 1262477 - DNA, 15 bp, Homo sapiens
aaggtctgggaggaa

SEQ ID NO: 1262478 - DNA, 15 bp, Homo sapiens
taaggtctgggagga

SEQ ID NO: 1262479 - DNA, 15 bp, Homo sapiens
ataaggtctgggagg

SEQ ID NO: 1262480 - DNA, 15 bp, Homo sapiens
aataaggtctgggag

SEQ ID NO: 1262481 - DNA, 15 bp, Homo sapiens
taataaggtctggga

SEQ ID NO: 1262482 - DNA, 15 bp, Homo sapiens
ataataaggtctggg

SEQ ID NO: 1262483 - DNA, 15 bp, Homo sapiens
aataataaggtctgg

SEQ ID NO: 1262484 - DNA, 15 bp, Homo sapiens
taataataaggtctg

SEQ ID NO: 1262485 - DNA, 15 bp, Homo sapiens
ttaataataaggtct

SEQ ID NO: 1262486 - DNA, 15 bp, Homo sapiens
gttaataataaggtc

SEQ ID NO: 1262487 - DNA, 15 bp, Homo sapiens
ggttaataataaggt

SEQ ID NO: 1262488 - DNA, 15 bp, Homo sapiens
aggttaataataagg

SEQ ID NO: 1262489 - DNA, 15 bp, Homo sapiens
aaggttaataataag

SEQ ID NO: 1262490 - DNA, 15 bp, Homo sapiens
caaggttaataataa

SEQ ID NO: 1262491 - DNA, 15 bp, Homo sapiens
tcaaggttaataata

SEQ ID NO: 1262492 - DNA, 15 bp, Homo sapiens
ttcaaggttaataat

SEQ ID NO: 1262493 - DNA, 15 bp, Homo sapiens
attcaaggttaataa

SEQ ID NO: 1262494 - DNA, 15 bp, Homo sapiens
tattcaaggttaata

SEQ ID NO: 1262495 - DNA, 15 bp, Homo sapiens
ttattcaaggttaat

SEQ ID NO: 1262496 - DNA, 15 bp, Homo sapiens
attattcaaggttaa

SEQ ID NO: 1262497 - DNA, 15 bp, Homo sapiens
aattattcaaggtta

SEQ ID NO: 1262498 - DNA, 15 bp, Homo sapiens
gaattattcaaggtt

SEQ ID NO: 1262499 - DNA, 15 bp, Homo sapiens
tgaattattcaaggt

SEQ ID NO: 1262500 - DNA, 15 bp, Homo sapiens
ctgaattattcaagg

SEQ ID NO: 1262501 - DNA, 15 bp, Homo sapiens
tctgaattattcaag

SEQ ID NO: 1262502 - DNA, 15 bp, Homo sapiens
atctgaattattcaa

SEQ ID NO: 1262503 - DNA, 15 bp, Homo sapiens
tatctgaattattca

SEQ ID NO: 1262504 - DNA, 15 bp, Homo sapiens
ttatctgaattattc

SEQ ID NO: 1262505 - DNA, 15 bp, Homo sapiens
tttatctgaattatt

SEQ ID NO: 1262506 - DNA, 15 bp, Homo sapiens
gtttatctgaattat

SEQ ID NO: 1262507 - DNA, 15 bp, Homo sapiens
agtttatctgaatta

SEQ ID NO: 1262508 - DNA, 15 bp, Homo sapiens
cagtttatctgaatt

SEQ ID NO: 1262509 - DNA, 15 bp, Homo sapiens
tcagtttatctgaat

SEQ ID NO: 1262510 - DNA, 15 bp, Homo sapiens
ttcagtttatctgaa

SEQ ID NO: 1262511 - DNA, 15 bp, Homo sapiens
gttcagtttatctga

SEQ ID NO: 1262512 - DNA, 15 bp, Homo sapiens
tgttcagtttatctg

SEQ ID NO: 1262513 - DNA, 15 bp, Homo sapiens
ctgttcagtttatct

SEQ ID NO: 1262514 - DNA, 15 bp, Homo sapiens
cctgttcagtttatc

SEQ ID NO: 1262515 - DNA, 15 bp, Homo sapiens
acctgttcagtttat

SEQ ID NO: 1262516 - DNA, 15 bp, Homo sapiens
gacctgttcagttta

SEQ ID NO: 1262517 - DNA, 15 bp, Homo sapiens
agacctgttcagttt

SEQ ID NO: 1262518 - DNA, 15 bp, Homo sapiens
gagacctgttcagtt

SEQ ID NO: 1262519 - DNA, 15 bp, Homo sapiens
agagacctgttcagt

SEQ ID NO: 1262520 - DNA, 15 bp, Homo sapiens
cagagacctgttcag

SEQ ID NO: 1262521 - DNA, 15 bp, Homo sapiens
acagagacctgttca

SEQ ID NO: 1262522 - DNA, 15 bp, Homo sapiens
aacagagacctgttc

SEQ ID NO: 1262523 - DNA, 15 bp, Homo sapiens
gaacagagacctgtt

SEQ ID NO: 1262524 - DNA, 15 bp, Homo sapiens
ggaacagagacctgt

SEQ ID NO: 1262525 - DNA, 15 bp, Homo sapiens
aggaacagagacctg

SEQ ID NO: 1262526 - DNA, 15 bp, Homo sapiens
aaggaacagagacct

SEQ ID NO: 1262527 - DNA, 15 bp, Homo sapiens
caaggaacagagacc

SEQ ID NO: 1262528 - DNA, 15 bp, Homo sapiens
tcaaggaacagagac

SEQ ID NO: 1262529 - DNA, 15 bp, Homo sapiens
ttcaaggaacagaga

SEQ ID NO: 1262530 - DNA, 15 bp, Homo sapiens
tttcaaggaacagag

SEQ ID NO: 1262531 - DNA, 15 bp, Homo sapiens
gtttcaaggaacaga

SEQ ID NO: 1262532 - DNA, 15 bp, Homo sapiens
ggtttcaaggaacag

SEQ ID NO: 1262533 - DNA, 15 bp, Homo sapiens
aggtttcaaggaaca

SEQ ID NO: 1262534 - DNA, 15 bp, Homo sapiens
caggtttcaaggaac

SEQ ID NO: 1262535 - DNA, 15 bp, Homo sapiens
tcaggtttcaaggaa

SEQ ID NO: 1262536 - DNA, 15 bp, Homo sapiens
ttcaggtttcaagga

SEQ ID NO: 1262537 - DNA, 15 bp, Homo sapiens
tttcaggtttcaagg

SEQ ID NO: 1262538 - DNA, 15 bp, Homo sapiens
ctttcaggtttcaag

SEQ ID NO: 1262539 - DNA, 15 bp, Homo sapiens
tctttcaggtttcaa

SEQ ID NO: 1262540 - DNA, 15 bp, Homo sapiens
ttctttcaggtttca

SEQ ID NO: 1262541 - DNA, 15 bp, Homo sapiens
attctttcaggtttc

SEQ ID NO: 1262542 - DNA, 15 bp, Homo sapiens
gattctttcaggttt

SEQ ID NO: 1262543 - DNA, 15 bp, Homo sapiens
agattctttcaggtt

SEQ ID NO: 1262544 - DNA, 15 bp, Homo sapiens
tagattctttcaggt

SEQ ID NO: 1262545 - DNA, 15 bp, Homo sapiens
ttagattctttcagg

SEQ ID NO: 1262546 - DNA, 15 bp, Homo sapiens
gttagattctttcag

SEQ ID NO: 1262547 - DNA, 15 bp, Homo sapiens
tgttagattctttca

SEQ ID NO: 1262548 - DNA, 15 bp, Homo sapiens
atgttagattctttc

SEQ ID NO: 1262549 - DNA, 15 bp, Homo sapiens
catgttagattcttt

SEQ ID NO: 1262550 - DNA, 15 bp, Homo sapiens
gcatgttagattctt

SEQ ID NO: 1262551 - DNA, 15 bp, Homo sapiens
tgcatgttagattct

SEQ ID NO: 1262552 - DNA, 15 bp, Homo sapiens
gtgcatgttagattc

SEQ ID NO: 1262553 - DNA, 15 bp, Homo sapiens
tgtgcatgttagatt

SEQ ID NO: 1262554 - DNA, 15 bp, Homo sapiens
atgtgcatgttagat

SEQ ID NO: 1262555 - DNA, 15 bp, Homo sapiens
tatgtgcatgttaga

SEQ ID NO: 1262556 - DNA, 15 bp, Homo sapiens
atatgtgcatgttag

SEQ ID NO: 1262557 - DNA, 15 bp, Homo sapiens
catatgtgcatgtta

SEQ ID NO: 1262558 - DNA, 15 bp, Homo sapiens
ccatatgtgcatgtt

SEQ ID NO: 1262559 - DNA, 15 bp, Homo sapiens
cccatatgtgcatgt

SEQ ID NO: 1262560 - DNA, 15 bp, Homo sapiens
tcccatatgtgcatg

SEQ ID NO: 1262561 - DNA, 15 bp, Homo sapiens
ttcccatatgtgcat

SEQ ID NO: 1262562 - DNA, 15 bp, Homo sapiens
cttcccatatgtgca

SEQ ID NO: 1262563 - DNA, 15 bp, Homo sapiens
acttcccatatgtgc

SEQ ID NO: 1262564 - DNA, 15 bp, Homo sapiens
aacttcccatatgtg

SEQ ID NO: 1262565 - DNA, 15 bp, Homo sapiens
taacttcccatatgt

SEQ ID NO: 1262566 - DNA, 15 bp, Homo sapiens
ataacttcccatatg

SEQ ID NO: 1262567 - DNA, 15 bp, Homo sapiens
aataacttcccatat

SEQ ID NO: 1262568 - DNA, 15 bp, Homo sapiens
aaataacttcccata

SEQ ID NO: 1262569 - DNA, 15 bp, Homo sapiens
taaataacttcccat

SEQ ID NO: 1262570 - DNA, 15 bp, Homo sapiens
ttaaataacttccca

SEQ ID NO: 1262571 - DNA, 15 bp, Homo sapiens
cttaaataacttccc

SEQ ID NO: 1262572 - DNA, 15 bp, Homo sapiens
acttaaataacttcc

SEQ ID NO: 1262573 - DNA, 15 bp, Homo sapiens
gacttaaataacttc

SEQ ID NO: 1262574 - DNA, 15 bp, Homo sapiens
tgacttaaataactt

SEQ ID NO: 1262575 - DNA, 15 bp, Homo sapiens
atgacttaaataact

SEQ ID NO: 1262576 - DNA, 15 bp, Homo sapiens
catgacttaaataac

SEQ ID NO: 1262577 - DNA, 15 bp, Homo sapiens
ccatgacttaaataa

SEQ ID NO: 1262578 - DNA, 15 bp, Homo sapiens
cccatgacttaaata

SEQ ID NO: 1262579 - DNA, 15 bp, Homo sapiens
tcccatgacttaaat

SEQ ID NO: 1262580 - DNA, 15 bp, Homo sapiens
atcccatgacttaaa

SEQ ID NO: 1262581 - DNA, 15 bp, Homo sapiens
aatcccatgacttaa

SEQ ID NO: 1262582 - DNA, 15 bp, Homo sapiens
caatcccatgactta

SEQ ID NO: 1262583 - DNA, 15 bp, Homo sapiens
tcaatcccatgactt

SEQ ID NO: 1262584 - DNA, 15 bp, Homo sapiens
ttcaatcccatgact

SEQ ID NO: 1262585 - DNA, 15 bp, Homo sapiens
tttcaatcccatgac

SEQ ID NO: 1262586 - DNA, 15 bp, Homo sapiens
atttcaatcccatga

SEQ ID NO: 1262587 - DNA, 15 bp, Homo sapiens
tatttcaatcccatg

SEQ ID NO: 1262588 - DNA, 15 bp, Homo sapiens
ctatttcaatcccat

SEQ ID NO: 1262589 - DNA, 15 bp, Homo sapiens
tctatttcaatccca

SEQ ID NO: 1262590 - DNA, 15 bp, Homo sapiens
ctctatttcaatccc

SEQ ID NO: 1262591 - DNA, 15 bp, Homo sapiens
gctctatttcaatcc

SEQ ID NO: 1262592 - DNA, 15 bp, Homo sapiens
tgctctatttcaatc

SEQ ID NO: 1262593 - DNA, 15 bp, Homo sapiens
ttgctctatttcaat

SEQ ID NO: 1262594 - DNA, 15 bp, Homo sapiens
cttgctctatttcaa

SEQ ID NO: 1262595 - DNA, 15 bp, Homo sapiens
tcttgctctatttca

SEQ ID NO: 1262596 - DNA, 15 bp, Homo sapiens
ttcttgctctatttc

SEQ ID NO: 1262597 - DNA, 15 bp, Homo sapiens
cttcttgctctattt

SEQ ID NO: 1262598 - DNA, 15 bp, Homo sapiens
tcttcttgctctatt

SEQ ID NO: 1262599 - DNA, 15 bp, Homo sapiens
ctcttcttgctctat

SEQ ID NO: 1262600 - DNA, 15 bp, Homo sapiens
tctcttcttgctcta

SEQ ID NO: 1262601 - DNA, 15 bp, Homo sapiens
ctctcttcttgctct

SEQ ID NO: 1262602 - DNA, 15 bp, Homo sapiens
cctctcttcttgctc

SEQ ID NO: 1262603 - DNA, 15 bp, Homo sapiens
tcctctcttcttgct

SEQ ID NO: 1262604 - DNA, 15 bp, Homo sapiens
ctcctctcttcttgc

SEQ ID NO: 1262605 - DNA, 15 bp, Homo sapiens
cctcctctcttcttg

SEQ ID NO: 1262606 - DNA, 15 bp, Homo sapiens
tcctcctctcttctt

SEQ ID NO: 1262607 - DNA, 15 bp, Homo sapiens
atcctcctctcttct

SEQ ID NO: 1262608 - DNA, 15 bp, Homo sapiens
aatcctcctctcttc

SEQ ID NO: 1262609 - DNA, 15 bp, Homo sapiens
caatcctcctctctt

SEQ ID NO: 1262610 - DNA, 15 bp, Homo sapiens
tcaatcctcctctct

SEQ ID NO: 1262611 - DNA, 15 bp, Homo sapiens
ttcaatcctcctctc

SEQ ID NO: 1262612 - DNA, 15 bp, Homo sapiens
cttcaatcctcctct

SEQ ID NO: 1262613 - DNA, 15 bp, Homo sapiens
tcttcaatcctcctc

SEQ ID NO: 1262614 - DNA, 15 bp, Homo sapiens
gtcttcaatcctcct

SEQ ID NO: 1262615 - DNA, 15 bp, Homo sapiens
cgtcttcaatcctcc

SEQ ID NO: 1262616 - DNA, 15 bp, Homo sapiens
gcgtcttcaatcctc

SEQ ID NO: 1262617 - DNA, 15 bp, Homo sapiens
agcgtcttcaatcct

SEQ ID NO: 1262618 - DNA, 15 bp, Homo sapiens
aagcgtcttcaatcc

SEQ ID NO: 1262619 - DNA, 15 bp, Homo sapiens
caagcgtcttcaatc

SEQ ID NO: 1262620 - DNA, 15 bp, Homo sapiens
tcaagcgtcttcaat

SEQ ID NO: 1262621 - DNA, 15 bp, Homo sapiens
ttcaagcgtcttcaa

SEQ ID NO: 1262622 - DNA, 15 bp, Homo sapiens
cttcaagcgtcttca

SEQ ID NO: 1262623 - DNA, 15 bp, Homo sapiens
tcttcaagcgtcttc

SEQ ID NO: 1262624 - DNA, 15 bp, Homo sapiens
gtcttcaagcgtctt

SEQ ID NO: 1262625 - DNA, 15 bp, Homo sapiens
ggtcttcaagcgtct

SEQ ID NO: 1262626 - DNA, 15 bp, Homo sapiens
tggtcttcaagcgtc

SEQ ID NO: 1262627 - DNA, 15 bp, Homo sapiens
ctggtcttcaagcgt

SEQ ID NO: 1262628 - DNA, 15 bp, Homo sapiens
actggtcttcaagcg

SEQ ID NO: 1262629 - DNA, 15 bp, Homo sapiens
cactggtcttcaagc

SEQ ID NO: 1262630 - DNA, 15 bp, Homo sapiens
acactggtcttcaag

SEQ ID NO: 1262631 - DNA, 15 bp, Homo sapiens
aacactggtcttcaa

SEQ ID NO: 1262632 - DNA, 15 bp, Homo sapiens
aaacactggtcttca

SEQ ID NO: 1262633 - DNA, 15 bp, Homo sapiens
gaaacactggtcttc

SEQ ID NO: 1262634 - DNA, 15 bp, Homo sapiens
ggaaacactggtctt

SEQ ID NO: 1262635 - DNA, 15 bp, Homo sapiens
gggaaacactggtct

SEQ ID NO: 1262636 - DNA, 15 bp, Homo sapiens
tgggaaacactggtc

SEQ ID NO: 1262637 - DNA, 15 bp, Homo sapiens
gtgggaaacactggt

SEQ ID NO: 1262638 - DNA, 15 bp, Homo sapiens
tgtgggaaacactgg

SEQ ID NO: 1262639 - DNA, 15 bp, Homo sapiens
gtgtgggaaacactg

SEQ ID NO: 1262640 - DNA, 15 bp, Homo sapiens
agtgtgggaaacact

SEQ ID NO: 1262641 - DNA, 15 bp, Homo sapiens
tagtgtgggaaacac

SEQ ID NO: 1262642 - DNA, 15 bp, Homo sapiens
atagtgtgggaaaca

SEQ ID NO: 1262643 - DNA, 15 bp, Homo sapiens
gatagtgtgggaaac

SEQ ID NO: 1262644 - DNA, 15 bp, Homo sapiens
agatagtgtgggaaa

SEQ ID NO: 1262645 - DNA, 15 bp, Homo sapiens
cagatagtgtgggaa

SEQ ID NO: 1262646 - DNA, 15 bp, Homo sapiens
acagatagtgtggga

SEQ ID NO: 1262647 - DNA, 15 bp, Homo sapiens
cacagatagtgtggg

SEQ ID NO: 1262648 - DNA, 15 bp, Homo sapiens
tcacagatagtgtgg

SEQ ID NO: 1262649 - DNA, 15 bp, Homo sapiens
ttcacagatagtgtg

SEQ ID NO: 1262650 - DNA, 15 bp, Homo sapiens
cttcacagatagtgt

SEQ ID NO: 1262651 - DNA, 15 bp, Homo sapiens
ccttcacagatagtg

SEQ ID NO: 1262652 - DNA, 15 bp, Homo sapiens
tccttcacagatagt

SEQ ID NO: 1262653 - DNA, 15 bp, Homo sapiens
ttccttcacagatag

SEQ ID NO: 1262654 - DNA, 15 bp, Homo sapiens
gttccttcacagata

SEQ ID NO: 1262655 - DNA, 15 bp, Homo sapiens
agttccttcacagat

SEQ ID NO: 1262656 - DNA, 15 bp, Homo sapiens
aagttccttcacaga

SEQ ID NO: 1262657 - DNA, 15 bp, Homo sapiens
aaagttccttcacag

SEQ ID NO: 1262658 - DNA, 15 bp, Homo sapiens
aaaagttccttcaca

SEQ ID NO: 1262659 - DNA, 15 bp, Homo sapiens
gaaaagttccttcac

SEQ ID NO: 1262660 - DNA, 15 bp, Homo sapiens
tgaaaagttccttca

SEQ ID NO: 1262661 - DNA, 15 bp, Homo sapiens
atgaaaagttccttc

SEQ ID NO: 1262662 - DNA, 15 bp, Homo sapiens
aatgaaaagttcctt

SEQ ID NO: 1262663 - DNA, 15 bp, Homo sapiens
gaatgaaaagttcct

SEQ ID NO: 1262664 - DNA, 15 bp, Homo sapiens
agaatgaaaagttcc

SEQ ID NO: 1262665 - DNA, 15 bp, Homo sapiens
aagaatgaaaagttc

SEQ ID NO: 1262666 - DNA, 15 bp, Homo sapiens
aaagaatgaaaagtt

SEQ ID NO: 1262667 - DNA, 15 bp, Homo sapiens
aaaagaatgaaaagt

SEQ ID NO: 1262668 - DNA, 15 bp, Homo sapiens
aaaaagaatgaaaag

SEQ ID NO: 1262669 - DNA, 15 bp, Homo sapiens
gaaaaagaatgaaaa

SEQ ID NO: 1262670 - DNA, 15 bp, Homo sapiens
tgaaaaagaatgaaa

SEQ ID NO: 1262671 - DNA, 15 bp, Homo sapiens
atgaaaaagaatgaa

SEQ ID NO: 1262672 - DNA, 15 bp, Homo sapiens
aatgaaaaagaatga

SEQ ID NO: 1262673 - DNA, 15 bp, Homo sapiens
taatgaaaaagaatg

SEQ ID NO: 1262674 - DNA, 15 bp, Homo sapiens
ttaatgaaaaagaat

SEQ ID NO: 1262675 - DNA, 15 bp, Homo sapiens
gttaatgaaaaagaa

SEQ ID NO: 1262676 - DNA, 15 bp, Homo sapiens
agttaatgaaaaaga

SEQ ID NO: 1262677 - DNA, 15 bp, Homo sapiens
cagttaatgaaaaag

SEQ ID NO: 1262678 - DNA, 15 bp, Homo sapiens
acagttaatgaaaaa

SEQ ID NO: 1262679 - DNA, 15 bp, Homo sapiens
aacagttaatgaaaa

SEQ ID NO: 1262680 - DNA, 15 bp, Homo sapiens
aaacagttaatgaaa

SEQ ID NO: 1262681 - DNA, 15 bp, Homo sapiens
caaacagttaatgaa

SEQ ID NO: 1262682 - DNA, 15 bp, Homo sapiens
acaaacagttaatga

SEQ ID NO: 1262683 - DNA, 15 bp, Homo sapiens
gacaaacagttaatg

SEQ ID NO: 1262684 - DNA, 15 bp, Homo sapiens
tgacaaacagttaat

SEQ ID NO: 1262685 - DNA, 15 bp, Homo sapiens
atgacaaacagttaa

SEQ ID NO: 1262686 - DNA, 15 bp, Homo sapiens
catgacaaacagtta

SEQ ID NO: 1262687 - DNA, 15 bp, Homo sapiens
tcatgacaaacagtt

SEQ ID NO: 1262688 - DNA, 15 bp, Homo sapiens
ttcatgacaaacagt

SEQ ID NO: 1262689 - DNA, 15 bp, Homo sapiens
cttcatgacaaacag

SEQ ID NO: 1262690 - DNA, 15 bp, Homo sapiens
acttcatgacaaaca

SEQ ID NO: 1262691 - DNA, 15 bp, Homo sapiens
cacttcatgacaaac

SEQ ID NO: 1262692 - DNA, 15 bp, Homo sapiens
tcacttcatgacaaa

SEQ ID NO: 1262693 - DNA, 15 bp, Homo sapiens
atcacttcatgacaa

SEQ ID NO: 1262694 - DNA, 15 bp, Homo sapiens
tatcacttcatgaca

SEQ ID NO: 1262695 - DNA, 15 bp, Homo sapiens
atatcacttcatgac

SEQ ID NO: 1262696 - DNA, 15 bp, Homo sapiens
aatatcacttcatga

SEQ ID NO: 1262697 - DNA, 15 bp, Homo sapiens
taatatcacttcatg

SEQ ID NO: 1262698 - DNA, 15 bp, Homo sapiens
ttaatatcacttcat

SEQ ID NO: 1262699 - DNA, 15 bp, Homo sapiens
gttaatatcacttca

SEQ ID NO: 1262700 - DNA, 15 bp, Homo sapiens
tgttaatatcacttc

SEQ ID NO: 1262701 - DNA, 15 bp, Homo sapiens
gtgttaatatcactt

SEQ ID NO: 1262702 - DNA, 15 bp, Homo sapiens
agtgttaatatcact

SEQ ID NO: 1262703 - DNA, 15 bp, Homo sapiens
aagtgttaatatcac

SEQ ID NO: 1262704 - DNA, 15 bp, Homo sapiens
aaagtgttaatatca

SEQ ID NO: 1262705 - DNA, 15 bp, Homo sapiens
caaagtgttaatatc

SEQ ID NO: 1262706 - DNA, 15 bp, Homo sapiens
ccaaagtgttaatat

SEQ ID NO: 1262707 - DNA, 15 bp, Homo sapiens
tccaaagtgttaata

SEQ ID NO: 1262708 - DNA, 15 bp, Homo sapiens
ttccaaagtgttaat

SEQ ID NO: 1262709 - DNA, 15 bp, Homo sapiens
attccaaagtgttaa

SEQ ID NO: 1262710 - DNA, 15 bp, Homo sapiens
cattccaaagtgtta

SEQ ID NO: 1262711 - DNA, 15 bp, Homo sapiens
acattccaaagtgtt

SEQ ID NO: 1262712 - DNA, 15 bp, Homo sapiens
tacattccaaagtgt

SEQ ID NO: 1262713 - DNA, 15 bp, Homo sapiens
ttacattccaaagtg

SEQ ID NO: 1262714 - DNA, 15 bp, Homo sapiens
tttacattccaaagt

SEQ ID NO: 1262715 - DNA, 15 bp, Homo sapiens
ttttacattccaaag

SEQ ID NO: 1262716 - DNA, 15 bp, Homo sapiens
attttacattccaaa

SEQ ID NO: 1262717 - DNA, 15 bp, Homo sapiens
tattttacattccaa

SEQ ID NO: 1262718 - DNA, 15 bp, Homo sapiens
ctattttacattcca

SEQ ID NO: 1262719 - DNA, 15 bp, Homo sapiens
tctattttacattcc

SEQ ID NO: 1262720 - DNA, 15 bp, Homo sapiens
ttctattttacattc

SEQ ID NO: 1262721 - DNA, 15 bp, Homo sapiens
tttctattttacatt

SEQ ID NO: 1262722 - DNA, 15 bp, Homo sapiens
gtttctattttacat

SEQ ID NO: 1262723 - DNA, 15 bp, Homo sapiens
tgtttctattttaca

SEQ ID NO: 1262724 - DNA, 15 bp, Homo sapiens
ttgtttctattttac

SEQ ID NO: 1262725 - DNA, 15 bp, Homo sapiens
tttgtttctatttta

SEQ ID NO: 1262726 - DNA, 15 bp, Homo sapiens
atttgtttctatttt

SEQ ID NO: 1262727 - DNA, 15 bp, Homo sapiens
aatttgtttctattt

SEQ ID NO: 1262728 - DNA, 15 bp, Homo sapiens
caatttgtttctatt

SEQ ID NO: 1262729 - DNA, 15 bp, Homo sapiens
gcaatttgtttctat

SEQ ID NO: 1262730 - DNA, 15 bp, Homo sapiens
tgcaatttgtttcta

SEQ ID NO: 1262731 - DNA, 15 bp, Homo sapiens
ttgcaatttgtttct

SEQ ID NO: 1262732 - DNA, 15 bp, Homo sapiens
tttgcaatttgtttc

SEQ ID NO: 1262733 - DNA, 15 bp, Homo sapiens
ttttgcaatttgttt

SEQ ID NO: 1262734 - DNA, 15 bp, Homo sapiens
tttttgcaatttgtt

SEQ ID NO: 1262735 - DNA, 15 bp, Homo sapiens
ttttttgcaatttgt

SEQ ID NO: 1262736 - DNA, 15 bp, Homo sapiens
attttttgcaatttg

SEQ ID NO: 1262737 - DNA, 15 bp, Homo sapiens
aattttttgcaattt

SEQ ID NO: 1262738 - DNA, 15 bp, Homo sapiens
taattttttgcaatt

SEQ ID NO: 1262739 - DNA, 15 bp, Homo sapiens
ataattttttgcaat

SEQ ID NO: 1262740 - DNA, 15 bp, Homo sapiens
tataattttttgcaa

SEQ ID NO: 1262741 - DNA, 15 bp, Homo sapiens
ttataattttttgca

SEQ ID NO: 1262742 - DNA, 15 bp, Homo sapiens
attataattttttgc

SEQ ID NO: 1262743 - DNA, 15 bp, Homo sapiens
cattataattttttg

SEQ ID NO: 1262744 - DNA, 15 bp, Homo sapiens
tcattataatttttt

SEQ ID NO: 1262745 - DNA, 15 bp, Homo sapiens
ttcattataattttt

SEQ ID NO: 1262746 - DNA, 15 bp, Homo sapiens
tttcattataatttt

SEQ ID NO: 1262747 - DNA, 15 bp, Homo sapiens
ttttcattataattt

SEQ ID NO: 1262748 - DNA, 15 bp, Homo sapiens
gttttcattataatt

SEQ ID NO: 1262749 - DNA, 15 bp, Homo sapiens
tgttttcattataat

SEQ ID NO: 1262750 - DNA, 15 bp, Homo sapiens
ctgttttcattataa

SEQ ID NO: 1262751 - DNA, 15 bp, Homo sapiens
tctgttttcattata

SEQ ID NO: 1262752 - DNA, 15 bp, Homo sapiens
ctctgttttcattat

SEQ ID NO: 1262753 - DNA, 15 bp, Homo sapiens
cctctgttttcatta

SEQ ID NO: 1262754 - DNA, 15 bp, Homo sapiens
gcctctgttttcatt

SEQ ID NO: 1262755 - DNA, 15 bp, Homo sapiens
tgcctctgttttcat

SEQ ID NO: 1262756 - DNA, 15 bp, Homo sapiens
gtgcctctgttttca

SEQ ID NO: 1262757 - DNA, 15 bp, Homo sapiens
tgtgcctctgttttc

SEQ ID NO: 1262758 - DNA, 15 bp, Homo sapiens
gtgtgcctctgtttt

SEQ ID NO: 1262759 - DNA, 15 bp, Homo sapiens
ggtgtgcctctgttt

SEQ ID NO: 1262760 - DNA, 15 bp, Homo sapiens
tggtgtgcctctgtt

SEQ ID NO: 1262761 - DNA, 15 bp, Homo sapiens
ttggtgtgcctctgt

SEQ ID NO: 1262762 - DNA, 15 bp, Homo sapiens
tttggtgtgcctctg

SEQ ID NO: 1262763 - DNA, 15 bp, Homo sapiens
atttggtgtgcctct

SEQ ID NO: 1262764 - DNA, 15 bp, Homo sapiens
tatttggtgtgcctc

SEQ ID NO: 1262765 - DNA, 15 bp, Homo sapiens
atatttggtgtgcct

SEQ ID NO: 1262766 - DNA, 15 bp, Homo sapiens
aatatttggtgtgcc

SEQ ID NO: 1262767 - DNA, 15 bp, Homo sapiens
caatatttggtgtgc

SEQ ID NO: 1262768 - DNA, 15 bp, Homo sapiens
acaatatttggtgtg

SEQ ID NO: 1262769 - DNA, 15 bp, Homo sapiens
tacaatatttggtgt

SEQ ID NO: 1262770 - DNA, 15 bp, Homo sapiens
gtacaatatttggtg

SEQ ID NO: 1262771 - DNA, 15 bp, Homo sapiens
tgtacaatatttggt

SEQ ID NO: 1262772 - DNA, 15 bp, Homo sapiens
ttgtacaatatttgg

SEQ ID NO: 1262773 - DNA, 15 bp, Homo sapiens
cttgtacaatatttg

SEQ ID NO: 1262774 - DNA, 15 bp, Homo sapiens
gcttgtacaatattt

SEQ ID NO: 1262775 - DNA, 15 bp, Homo sapiens
agcttgtacaatatt

SEQ ID NO: 1262776 - DNA, 15 bp, Homo sapiens
gagcttgtacaatat

SEQ ID NO: 1262777 - DNA, 15 bp, Homo sapiens
tgagcttgtacaata

SEQ ID NO: 1262778 - DNA, 15 bp, Homo sapiens
gtgagcttgtacaat

SEQ ID NO: 1262779 - DNA, 15 bp, Homo sapiens
tgtgagcttgtacaa

SEQ ID NO: 1262780 - DNA, 15 bp, Homo sapiens
atgtgagcttgtaca

SEQ ID NO: 1262781 - DNA, 15 bp, Homo sapiens
aatgtgagcttgtac

SEQ ID NO: 1262782 - DNA, 15 bp, Homo sapiens
aaatgtgagcttgta

SEQ ID NO: 1262783 - DNA, 15 bp, Homo sapiens
aaaatgtgagcttgt

SEQ ID NO: 1262784 - DNA, 15 bp, Homo sapiens
aaaaatgtgagcttg

SEQ ID NO: 1262785 - DNA, 15 bp, Homo sapiens
aaaaaatgtgagctt

SEQ ID NO: 1262786 - DNA, 15 bp, Homo sapiens
taaaaaatgtgagct

SEQ ID NO: 1262787 - DNA, 15 bp, Homo sapiens
ctaaaaaatgtgagc

SEQ ID NO: 1262788 - DNA, 15 bp, Homo sapiens
tctaaaaaatgtgag

SEQ ID NO: 1262789 - DNA, 15 bp, Homo sapiens
atctaaaaaatgtga

SEQ ID NO: 1262790 - DNA, 15 bp, Homo sapiens
aatctaaaaaatgtg

SEQ ID NO: 1262791 - DNA, 15 bp, Homo sapiens
taatctaaaaaatgt

SEQ ID NO: 1262792 - DNA, 15 bp, Homo sapiens
ttaatctaaaaaatg

SEQ ID NO: 1262793 - DNA, 15 bp, Homo sapiens
tttaatctaaaaaat

SEQ ID NO: 1262794 - DNA, 15 bp, Homo sapiens
gtttaatctaaaaaa

SEQ ID NO: 1262795 - DNA, 15 bp, Homo sapiens
tgtttaatctaaaaa

SEQ ID NO: 1262796 - DNA, 15 bp, Homo sapiens
ctgtttaatctaaaa

SEQ ID NO: 1262797 - DNA, 15 bp, Homo sapiens
ttctgtttaatctaa

SEQ ID NO: 1262798 - DNA, 15 bp, Homo sapiens
tttctgtttaatcta

SEQ ID NO: 1262799 - DNA, 15 bp, Homo sapiens
atttctgtttaatct

SEQ ID NO: 1262800 - DNA, 15 bp, Homo sapiens
tatttctgtttaatc

SEQ ID NO: 1262801 - DNA, 15 bp, Homo sapiens
ctatttctgtttaat

SEQ ID NO: 1262802 - DNA, 15 bp, Homo sapiens
tctatttctgtttaa

SEQ ID NO: 1262803 - DNA, 15 bp, Homo sapiens
ttctatttctgttta

SEQ ID NO: 1262804 - DNA, 15 bp, Homo sapiens
attctatttctgttt

SEQ ID NO: 1262805 - DNA, 15 bp, Homo sapiens
aattctatttctgtt

SEQ ID NO: 1262806 - DNA, 15 bp, Homo sapiens
taattctatttctgt

SEQ ID NO: 1262807 - DNA, 15 bp, Homo sapiens
gtaattctatttctg

SEQ ID NO: 1262808 - DNA, 15 bp, Homo sapiens
tgtaattctatttct

SEQ ID NO: 1262809 - DNA, 15 bp, Homo sapiens
atgtaattctatttc

SEQ ID NO: 1262810 - DNA, 15 bp, Homo sapiens
aatgtaattctattt

SEQ ID NO: 1262811 - DNA, 15 bp, Homo sapiens
aaatgtaattctatt

SEQ ID NO: 1262812 - DNA, 15 bp, Homo sapiens
gaaatgtaattctat

SEQ ID NO: 1262813 - DNA, 15 bp, Homo sapiens
tgaaatgtaattcta

SEQ ID NO: 1262814 - DNA, 15 bp, Homo sapiens
ttgaaatgtaattct

SEQ ID NO: 1262815 - DNA, 15 bp, Homo sapiens
attgaaatgtaattc

SEQ ID NO: 1262816 - DNA, 15 bp, Homo sapiens
tattgaaatgtaatt

SEQ ID NO: 1262817 - DNA, 15 bp, Homo sapiens
ttattgaaatgtaat

SEQ ID NO: 1262818 - DNA, 15 bp, Homo sapiens
tttattgaaatgtaa

SEQ ID NO: 1262819 - DNA, 15 bp, Homo sapiens
ttttattgaaatgta

SEQ ID NO: 1262820 - DNA, 15 bp, Homo sapiens
tttttattgaaatgt

SEQ ID NO: 1262821 - DNA, 15 bp, Homo sapiens
atttttattgaaatg

SEQ ID NO: 1262822 - DNA, 15 bp, Homo sapiens
aatttttattgaaat

SEQ ID NO: 1262823 - DNA, 15 bp, Homo sapiens
taatttttattgaaa

SEQ ID NO: 1262824 - DNA, 15 bp, Homo sapiens
ataatttttattgaa

SEQ ID NO: 1262825 - DNA, 15 bp, Homo sapiens
gataatttttattga

SEQ ID NO: 1262826 - DNA, 15 bp, Homo sapiens
tgataatttttattg

SEQ ID NO: 1262827 - DNA, 15 bp, Homo sapiens
ctgataatttttatt

SEQ ID NO: 1262828 - DNA, 15 bp, Homo sapiens
tctgataatttttat

SEQ ID NO: 1262829 - DNA, 15 bp, Homo sapiens
ttctgataattttta

SEQ ID NO: 1262830 - DNA, 15 bp, Homo sapiens
gttctgataattttt

SEQ ID NO: 1262831 - DNA, 15 bp, Homo sapiens
tgttctgataatttt

SEQ ID NO: 1262832 - DNA, 15 bp, Homo sapiens
ttgttctgataattt

SEQ ID NO: 1262833 - DNA, 15 bp, Homo sapiens
tttgttctgataatt

SEQ ID NO: 1262834 - DNA, 15 bp, Homo sapiens
gtttgttctgataat

SEQ ID NO: 1262835 - DNA, 15 bp, Homo sapiens
tgtttgttctgataa

SEQ ID NO: 1262836 - DNA, 15 bp, Homo sapiens
atgtttgttctgata

SEQ ID NO: 1262837 - DNA, 15 bp, Homo sapiens
tatgtttgttctgat

SEQ ID NO: 1262838 - DNA, 15 bp, Homo sapiens
ttatgtttgttctga

SEQ ID NO: 1262839 - DNA, 15 bp, Homo sapiens
tttatgtttgttctg

SEQ ID NO: 1262840 - DNA, 15 bp, Homo sapiens
atttatgtttgttct

SEQ ID NO: 1262841 - DNA, 15 bp, Homo sapiens
tatttatgtttgttc

SEQ ID NO: 1262842 - DNA, 15 bp, Homo sapiens
ttatttatgtttgtt

SEQ ID NO: 1262843 - DNA, 15 bp, Homo sapiens
tttatttatgtttgt

SEQ ID NO: 1262844 - DNA, 15 bp, Homo sapiens
ttttatttatgtttg

SEQ ID NO: 1262845 - DNA, 15 bp, Homo sapiens
cttttatttatgttt

SEQ ID NO: 1262846 - DNA, 15 bp, Homo sapiens
tcttttatttatgtt

SEQ ID NO: 1262847 - DNA, 15 bp, Homo sapiens
ttcttttatttatgt

SEQ ID NO: 1262848 - DNA, 15 bp, Homo sapiens
tttcttttatttatg

SEQ ID NO: 1262849 - DNA, 15 bp, Homo sapiens
ttttcttttatttat

SEQ ID NO: 1262850 - DNA, 15 bp, Homo sapiens
tttttcttttattta

SEQ ID NO: 1262851 - DNA, 15 bp, Homo sapiens
ttttttcttttattt

SEQ ID NO: 1262852 - DNA, 15 bp, Homo sapiens
attttttcttttatt

SEQ ID NO: 1262853 - DNA, 15 bp, Homo sapiens
aattttttcttttat

SEQ ID NO: 1262854 - DNA, 15 bp, Homo sapiens
taattttttctttta

SEQ ID NO: 1262855 - DNA, 15 bp, Homo sapiens
gtaattttttctttt

SEQ ID NO: 1262856 - DNA, 15 bp, Homo sapiens
tgtaattttttcttt

SEQ ID NO: 1262857 - DNA, 15 bp, Homo sapiens
ttgtaattttttctt

SEQ ID NO: 1262858 - DNA, 15 bp, Homo sapiens
tttgtaattttttct

SEQ ID NO: 1262859 - DNA, 15 bp, Homo sapiens
ttttgtaattttttc

SEQ ID NO: 1262860 - DNA, 15 bp, Homo sapiens
attttgtaatttttt

SEQ ID NO: 1262861 - DNA, 15 bp, Homo sapiens
cattttgtaattttt

SEQ ID NO: 1262862 - DNA, 15 bp, Homo sapiens
acattttgtaatttt

SEQ ID NO: 1262863 - DNA, 15 bp, Homo sapiens
tacattttgtaattt

SEQ ID NO: 1262864 - DNA, 15 bp, Homo sapiens
gtacattttgtaatt

SEQ ID NO: 1262865 - DNA, 15 bp, Homo sapiens
tgtacattttgtaat

SEQ ID NO: 1262866 - DNA, 15 bp, Homo sapiens
atgtacattttgtaa

SEQ ID NO: 1262867 - DNA, 15 bp, Homo sapiens
aatgtacattttgta

SEQ ID NO: 1262868 - DNA, 15 bp, Homo sapiens
caatgtacattttgt

SEQ ID NO: 1262869 - DNA, 15 bp, Homo sapiens
gcaatgtacattttg

SEQ ID NO: 1262870 - DNA, 15 bp, Homo sapiens
agcaatgtacatttt

SEQ ID NO: 1262871 - DNA, 15 bp, Homo sapiens
aagcaatgtacattt

SEQ ID NO: 1262872 - DNA, 15 bp, Homo sapiens
taagcaatgtacatt

SEQ ID NO: 1262873 - DNA, 15 bp, Homo sapiens
ataagcaatgtacat

SEQ ID NO: 1262874 - DNA, 15 bp, Homo sapiens
aataagcaatgtaca

SEQ ID NO: 1262875 - DNA, 15 bp, Homo sapiens
caataagcaatgtac

SEQ ID NO: 1262876 - DNA, 15 bp, Homo sapiens
tcaataagcaatgta

SEQ ID NO: 1262877 - DNA, 15 bp, Homo sapiens
ttcaataagcaatgt

SEQ ID NO: 1262878 - DNA, 15 bp, Homo sapiens
tttcaataagcaatg

SEQ ID NO: 1262879 - DNA, 15 bp, Homo sapiens
ctttcaataagcaat

SEQ ID NO: 1262880 - DNA, 15 bp, Homo sapiens
actttcaataagcaa

SEQ ID NO: 1262881 - DNA, 15 bp, Homo sapiens
cactttcaataagca

SEQ ID NO: 1262882 - DNA, 15 bp, Homo sapiens
acactttcaataagc

SEQ ID NO: 1262883 - DNA, 15 bp, Homo sapiens
gacactttcaataag

SEQ ID NO: 1262884 - DNA, 15 bp, Homo sapiens
ggacactttcaataa

SEQ ID NO: 1262885 - DNA, 15 bp, Homo sapiens
tggacactttcaata

SEQ ID NO: 1262886 - DNA, 15 bp, Homo sapiens
ctggacactttcaat

SEQ ID NO: 1262887 - DNA, 15 bp, Homo sapiens
tctggacactttcaa

SEQ ID NO: 1262888 - DNA, 15 bp, Homo sapiens
atctggacactttca

SEQ ID NO: 1262889 - DNA, 15 bp, Homo sapiens
tatctggacactttc

SEQ ID NO: 1262890 - DNA, 15 bp, Homo sapiens
ctatctggacacttt

SEQ ID NO: 1262891 - DNA, 15 bp, Homo sapiens
tctatctggacactt

SEQ ID NO: 1262892 - DNA, 15 bp, Homo sapiens
atctatctggacact

SEQ ID NO: 1262893 - DNA, 15 bp, Homo sapiens
tatctatctggacac

SEQ ID NO: 1262894 - DNA, 15 bp, Homo sapiens
ttatctatctggaca

SEQ ID NO: 1262895 - DNA, 15 bp, Homo sapiens
attatctatctggac

SEQ ID NO: 1262896 - DNA, 15 bp, Homo sapiens
aattatctatctgga

SEQ ID NO: 1262897 - DNA, 15 bp, Homo sapiens
taattatctatctgg

SEQ ID NO: 1262898 - DNA, 15 bp, Homo sapiens
ttaattatctatctg

SEQ ID NO: 1262899 - DNA, 15 bp, Homo sapiens
attaattatctatct

SEQ ID NO: 1262900 - DNA, 15 bp, Homo sapiens
tattaattatctatc

SEQ ID NO: 1262901 - DNA, 15 bp, Homo sapiens
ttattaattatctat

SEQ ID NO: 1262902 - DNA, 15 bp, Homo sapiens
tttattaattatcta

SEQ ID NO: 1262903 - DNA, 15 bp, Homo sapiens
ctttattaattatct

SEQ ID NO: 1262904 - DNA, 15 bp, Homo sapiens
tctttattaattatc

SEQ ID NO: 1262905 - DNA, 15 bp, Homo sapiens
ctctttattaattat

SEQ ID NO: 1262906 - DNA, 15 bp, Homo sapiens
tctctttattaatta

SEQ ID NO: 1262907 - DNA, 15 bp, Homo sapiens
ttctctttattaatt

SEQ ID NO: 1262908 - DNA, 15 bp, Homo sapiens
attctctttattaat

SEQ ID NO: 1262909 - DNA, 15 bp, Homo sapiens
aattctctttattaa

SEQ ID NO: 1262910 - DNA, 15 bp, Homo sapiens
caattctctttatta

SEQ ID NO: 1262911 - DNA, 15 bp, Homo sapiens
gcaattctctttatt

SEQ ID NO: 1262912 - DNA, 15 bp, Homo sapiens
ggcaattctctttat

SEQ ID NO: 1262913 - DNA, 15 bp, Homo sapiens
tggcaattctcttta

SEQ ID NO: 1262914 - DNA, 15 bp, Homo sapiens
atggcaattctcttt

SEQ ID NO: 1262915 - DNA, 15 bp, Homo sapiens
aatggcaattctctt

SEQ ID NO: 1262916 - DNA, 15 bp, Homo sapiens
taatggcaattctct

SEQ ID NO: 1262917 - DNA, 15 bp, Homo sapiens
ataatggcaattctc

SEQ ID NO: 1262918 - DNA, 15 bp, Homo sapiens
gataatggcaattct

SEQ ID NO: 1262919 - DNA, 15 bp, Homo sapiens
ggataatggcaattc

SEQ ID NO: 1262920 - DNA, 15 bp, Homo sapiens
aggataatggcaatt

SEQ ID NO: 1262921 - DNA, 15 bp, Homo sapiens
gaggataatggcaat

SEQ ID NO: 1262922 - DNA, 15 bp, Homo sapiens
ggaggataatggcaa

SEQ ID NO: 1262923 - DNA, 15 bp, Homo sapiens
aggaggataatggca

SEQ ID NO: 1262924 - DNA, 15 bp, Homo sapiens
taggaggataatggc

SEQ ID NO: 1262925 - DNA, 15 bp, Homo sapiens
ttaggaggataatgg

SEQ ID NO: 1262926 - DNA, 15 bp, Homo sapiens
attaggaggataatg

SEQ ID NO: 1262927 - DNA, 15 bp, Homo sapiens
tattaggaggataat

SEQ ID NO: 1262928 - DNA, 15 bp, Homo sapiens
atattaggaggataa

SEQ ID NO: 1262929 - DNA, 15 bp, Homo sapiens
aatattaggaggata

SEQ ID NO: 1262930 - DNA, 15 bp, Homo sapiens
aaatattaggaggat

SEQ ID NO: 1262931 - DNA, 15 bp, Homo sapiens
taaatattaggagga

SEQ ID NO: 1262932 - DNA, 15 bp, Homo sapiens
ataaatattaggagg

SEQ ID NO: 1262933 - DNA, 15 bp, Homo sapiens
gataaatattaggag

SEQ ID NO: 1262934 - DNA, 15 bp, Homo sapiens
tgataaatattagga

SEQ ID NO: 1262935 - DNA, 15 bp, Homo sapiens
gtgataaatattagg

SEQ ID NO: 1262936 - DNA, 15 bp, Homo sapiens
ggtgataaatattag

SEQ ID NO: 1262937 - DNA, 15 bp, Homo sapiens
aggtgataaatatta

SEQ ID NO: 1262938 - DNA, 15 bp, Homo sapiens
gaggtgataaatatt

SEQ ID NO: 1262939 - DNA, 15 bp, Homo sapiens
tgaggtgataaatat

SEQ ID NO: 1262940 - DNA, 15 bp, Homo sapiens
gtgaggtgataaata

SEQ ID NO: 1262941 - DNA, 15 bp, Homo sapiens
tgtgaggtgataaat

SEQ ID NO: 1262942 - DNA, 15 bp, Homo sapiens
ctgtgaggtgataaa

SEQ ID NO: 1262943 - DNA, 15 bp, Homo sapiens
gctgtgaggtgataa

SEQ ID NO: 1262944 - DNA, 15 bp, Homo sapiens
ggctgtgaggtgata

SEQ ID NO: 1262945 - DNA, 15 bp, Homo sapiens
cggctgtgaggtgat

SEQ ID NO: 1262946 - DNA, 15 bp, Homo sapiens
acggctgtgaggtga

SEQ ID NO: 1262947 - DNA, 15 bp, Homo sapiens
tacggctgtgaggtg

SEQ ID NO: 1262948 - DNA, 15 bp, Homo sapiens
ttacggctgtgaggt

SEQ ID NO: 1262949 - DNA, 15 bp, Homo sapiens
gttacggctgtgagg

SEQ ID NO: 1262950 - DNA, 15 bp, Homo sapiens
tgttacggctgtgag

SEQ ID NO: 1262951 - DNA, 15 bp, Homo sapiens
ttgttacggctgtga

SEQ ID NO: 1262952 - DNA, 15 bp, Homo sapiens
gttgttacggctgtg

SEQ ID NO: 1262953 - DNA, 15 bp, Homo sapiens
agttgttacggctgt

SEQ ID NO: 1262954 - DNA, 15 bp, Homo sapiens
tagttgttacggctg

SEQ ID NO: 1262955 - DNA, 15 bp, Homo sapiens
ttagttgttacggct

SEQ ID NO: 1262956 - DNA, 15 bp, Homo sapiens
gttagttgttacggc

SEQ ID NO: 1262957 - DNA, 15 bp, Homo sapiens
tgttagttgttacgg

SEQ ID NO: 1262958 - DNA, 15 bp, Homo sapiens
ttgttagttgttacg

SEQ ID NO: 1262959 - DNA, 15 bp, Homo sapiens
tttgttagttgttac

SEQ ID NO: 1262960 - DNA, 15 bp, Homo sapiens
ttttgttagttgtta

SEQ ID NO: 1262961 - DNA, 15 bp, Homo sapiens
tttttgttagttgtt

SEQ ID NO: 1262962 - DNA, 15 bp, Homo sapiens
ctttttgttagttgt

SEQ ID NO: 1262963 - DNA, 15 bp, Homo sapiens
actttttgttagttg

SEQ ID NO: 1262964 - DNA, 15 bp, Homo sapiens
aactttttgttagtt

SEQ ID NO: 1262965 - DNA, 15 bp, Homo sapiens
caactttttgttagt

SEQ ID NO: 1262966 - DNA, 15 bp, Homo sapiens
ccaactttttgttag

SEQ ID NO: 1262967 - DNA, 15 bp, Homo sapiens
cccaactttttgtta

SEQ ID NO: 1262968 - DNA, 15 bp, Homo sapiens
tcccaactttttgtt

SEQ ID NO: 1262969 - DNA, 15 bp, Homo sapiens
ctcccaactttttgt

SEQ ID NO: 1262970 - DNA, 15 bp, Homo sapiens
actcccaactttttg

SEQ ID NO: 1262971 - DNA, 15 bp, Homo sapiens
cactcccaacttttt

SEQ ID NO: 1262972 - DNA, 15 bp, Homo sapiens
tcactcccaactttt

SEQ ID NO: 1262973 - DNA, 15 bp, Homo sapiens
ttcactcccaacttt

SEQ ID NO: 1262974 - DNA, 15 bp, Homo sapiens
cttcactcccaactt

SEQ ID NO: 1262975 - DNA, 15 bp, Homo sapiens
acttcactcccaact

SEQ ID NO: 1262976 - DNA, 15 bp, Homo sapiens
tacttcactcccaac

SEQ ID NO: 1262977 - DNA, 15 bp, Homo sapiens
ctacttcactcccaa

SEQ ID NO: 1262978 - DNA, 15 bp, Homo sapiens
actacttcactccca

SEQ ID NO: 1262979 - DNA, 15 bp, Homo sapiens
tactacttcactccc

SEQ ID NO: 1262980 - DNA, 15 bp, Homo sapiens
ttactacttcactcc

SEQ ID NO: 1262981 - DNA, 15 bp, Homo sapiens
attactacttcactc

SEQ ID NO: 1262982 - DNA, 15 bp, Homo sapiens
aattactacttcact

SEQ ID NO: 1262983 - DNA, 15 bp, Homo sapiens
aaattactacttcac

SEQ ID NO: 1262984 - DNA, 15 bp, Homo sapiens
gaaattactacttca

SEQ ID NO: 1262985 - DNA, 15 bp, Homo sapiens
ggaaattactacttc

SEQ ID NO: 1262986 - DNA, 15 bp, Homo sapiens
gggaaattactactt

SEQ ID NO: 1262987 - DNA, 15 bp, Homo sapiens
tgggaaattactact

SEQ ID NO: 1262988 - DNA, 15 bp, Homo sapiens
gtgggaaattactac

SEQ ID NO: 1262989 - DNA, 15 bp, Homo sapiens
agtgggaaattacta

SEQ ID NO: 1262990 - DNA, 15 bp, Homo sapiens
tagtgggaaattact

SEQ ID NO: 1262991 - DNA, 15 bp, Homo sapiens
ttagtgggaaattac

SEQ ID NO: 1262992 - DNA, 15 bp, Homo sapiens
tttagtgggaaatta

SEQ ID NO: 1262993 - DNA, 15 bp, Homo sapiens
gtttagtgggaaatt

SEQ ID NO: 1262994 - DNA, 15 bp, Homo sapiens
tgtttagtgggaaat

SEQ ID NO: 1262995 - DNA, 15 bp, Homo sapiens
ttgtttagtgggaaa

SEQ ID NO: 1262996 - DNA, 15 bp, Homo sapiens
gttgtttagtgggaa

SEQ ID NO: 1262997 - DNA, 15 bp, Homo sapiens
tgttgtttagtggga

SEQ ID NO: 1262998 - DNA, 15 bp, Homo sapiens
atgttgtttagtggg

SEQ ID NO: 1262999 - DNA, 15 bp, Homo sapiens
catgttgtttagtgg

SEQ ID NO: 1263000 - DNA, 15 bp, Homo sapiens
tcatgttgtttagtg

SEQ ID NO: 1263001 - DNA, 15 bp, Homo sapiens
ttcatgttgtttagt

SEQ ID NO: 1263002 - DNA, 15 bp, Homo sapiens
attcatgttgtttag

SEQ ID NO: 1263003 - DNA, 15 bp, Homo sapiens
cattcatgttgttta

SEQ ID NO: 1263004 - DNA, 15 bp, Homo sapiens
acattcatgttgttt

SEQ ID NO: 1263005 - DNA, 15 bp, Homo sapiens
aacattcatgttgtt

SEQ ID NO: 1263006 - DNA, 15 bp, Homo sapiens
taacattcatgttgt

SEQ ID NO: 1263007 - DNA, 15 bp, Homo sapiens
ttaacattcatgttg

SEQ ID NO: 1263008 - DNA, 15 bp, Homo sapiens
attaacattcatgtt

SEQ ID NO: 1263009 - DNA, 15 bp, Homo sapiens
tattaacattcatgt

SEQ ID NO: 1263010 - DNA, 15 bp, Homo sapiens
atattaacattcatg

SEQ ID NO: 1263011 - DNA, 15 bp, Homo sapiens
aatattaacattcat

SEQ ID NO: 1263012 - DNA, 15 bp, Homo sapiens
aaatattaacattca

SEQ ID NO: 1263013 - DNA, 15 bp, Homo sapiens
caaatattaacattc

SEQ ID NO: 1263014 - DNA, 15 bp, Homo sapiens
tcaaatattaacatt

SEQ ID NO: 1263015 - DNA, 15 bp, Homo sapiens
ttcaaatattaacat

SEQ ID NO: 1263016 - DNA, 15 bp, Homo sapiens
cttcaaatattaaca

SEQ ID NO: 1263017 - DNA, 15 bp, Homo sapiens
acttcaaatattaac

SEQ ID NO: 1263018 - DNA, 15 bp, Homo sapiens
aacttcaaatattaa

SEQ ID NO: 1263019 - DNA, 15 bp, Homo sapiens
aaacttcaaatatta

SEQ ID NO: 1263020 - DNA, 15 bp, Homo sapiens
aaaacttcaaatatt

SEQ ID NO: 1263021 - DNA, 15 bp, Homo sapiens
taaaacttcaaatat

SEQ ID NO: 1263022 - DNA, 15 bp, Homo sapiens
ttaaaacttcaaata

SEQ ID NO: 1263023 - DNA, 15 bp, Homo sapiens
attaaaacttcaaat

SEQ ID NO: 1263024 - DNA, 15 bp, Homo sapiens
cattaaaacttcaaa

SEQ ID NO: 1263025 - DNA, 15 bp, Homo sapiens
acattaaaacttcaa

SEQ ID NO: 1263026 - DNA, 15 bp, Homo sapiens
cacattaaaacttca

SEQ ID NO: 1263027 - DNA, 15 bp, Homo sapiens
tcacattaaaacttc

SEQ ID NO: 1263028 - DNA, 15 bp, Homo sapiens
ctcacattaaaactt

SEQ ID NO: 1263029 - DNA, 15 bp, Homo sapiens
tctcacattaaaact

SEQ ID NO: 1263030 - DNA, 15 bp, Homo sapiens
ttctcacattaaaac

SEQ ID NO: 1263031 - DNA, 15 bp, Homo sapiens
tttctcacattaaaa

SEQ ID NO: 1263032 - DNA, 15 bp, Homo sapiens
atttctcacattaaa

SEQ ID NO: 1263033 - DNA, 15 bp, Homo sapiens
catttctcacattaa

SEQ ID NO: 1263034 - DNA, 15 bp, Homo sapiens
tcatttctcacatta

SEQ ID NO: 1263035 - DNA, 15 bp, Homo sapiens
ctcatttctcacatt

SEQ ID NO: 1263036 - DNA, 15 bp, Homo sapiens
actcatttctcacat

SEQ ID NO: 1263037 - DNA, 15 bp, Homo sapiens
cactcatttctcaca

SEQ ID NO: 1263038 - DNA, 15 bp, Homo sapiens
ccactcatttctcac

SEQ ID NO: 1263039 - DNA, 15 bp, Homo sapiens
cccactcatttctca

SEQ ID NO: 1263040 - DNA, 15 bp, Homo sapiens
gcccactcatttctc

SEQ ID NO: 1263041 - DNA, 15 bp, Homo sapiens
agcccactcatttct

SEQ ID NO: 1263042 - DNA, 15 bp, Homo sapiens
gagcccactcatttc

SEQ ID NO: 1263043 - DNA, 15 bp, Homo sapiens
agagcccactcattt

SEQ ID NO: 1263044 - DNA, 15 bp, Homo sapiens
aagagcccactcatt

SEQ ID NO: 1263045 - DNA, 15 bp, Homo sapiens
aaagagcccactcat

SEQ ID NO: 1263046 - DNA, 15 bp, Homo sapiens
caaagagcccactca

SEQ ID NO: 1263047 - DNA, 15 bp, Homo sapiens
gcaaagagcccactc

SEQ ID NO: 1263048 - DNA, 15 bp, Homo sapiens
agcaaagagcccact

SEQ ID NO: 1263049 - DNA, 15 bp, Homo sapiens
aagcaaagagcccac

SEQ ID NO: 1263050 - DNA, 15 bp, Homo sapiens
caagcaaagagccca

SEQ ID NO: 1263051 - DNA, 15 bp, Homo sapiens
acaagcaaagagccc

SEQ ID NO: 1263052 - DNA, 15 bp, Homo sapiens
aacaagcaaagagcc

SEQ ID NO: 1263053 - DNA, 15 bp, Homo sapiens
taacaagcaaagagc

SEQ ID NO: 1263054 - DNA, 15 bp, Homo sapiens
ttaacaagcaaagag

SEQ ID NO: 1263055 - DNA, 15 bp, Homo sapiens
tttaacaagcaaaga

SEQ ID NO: 1263056 - DNA, 15 bp, Homo sapiens
atttaacaagcaaag

SEQ ID NO: 1263057 - DNA, 15 bp, Homo sapiens
aatttaacaagcaaa

SEQ ID NO: 1263058 - DNA, 15 bp, Homo sapiens
taatttaacaagcaa

SEQ ID NO: 1263059 - DNA, 15 bp, Homo sapiens
ataatttaacaagca

SEQ ID NO: 1263060 - DNA, 15 bp, Homo sapiens
gataatttaacaagc

SEQ ID NO: 1263061 - DNA, 15 bp, Homo sapiens
agataatttaacaag

SEQ ID NO: 1263062 - DNA, 15 bp, Homo sapiens
tagataatttaacaa

SEQ ID NO: 1263063 - DNA, 15 bp, Homo sapiens
ttagataatttaaca

SEQ ID NO: 1263064 - DNA, 15 bp, Homo sapiens
attagataatttaac

SEQ ID NO: 1263065 - DNA, 15 bp, Homo sapiens
gattagataatttaa

SEQ ID NO: 1263066 - DNA, 15 bp, Homo sapiens
agattagataattta

SEQ ID NO: 1263067 - DNA, 15 bp, Homo sapiens
tagattagataattt

SEQ ID NO: 1263068 - DNA, 15 bp, Homo sapiens
ctagattagataatt

SEQ ID NO: 1263069 - DNA, 15 bp, Homo sapiens
cctagattagataat

SEQ ID NO: 1263070 - DNA, 15 bp, Homo sapiens
acctagattagataa

SEQ ID NO: 1263071 - DNA, 15 bp, Homo sapiens
aacctagattagata

SEQ ID NO: 1263072 - DNA, 15 bp, Homo sapiens
caacctagattagat

SEQ ID NO: 1263073 - DNA, 15 bp, Homo sapiens
ccaacctagattaga

SEQ ID NO: 1263074 - DNA, 15 bp, Homo sapiens
tccaacctagattag

SEQ ID NO: 1263075 - DNA, 15 bp, Homo sapiens
atccaacctagatta

SEQ ID NO: 1263076 - DNA, 15 bp, Homo sapiens
aatccaacctagatt

SEQ ID NO: 1263077 - DNA, 15 bp, Homo sapiens
caatccaacctagat

SEQ ID NO: 1263078 - DNA, 15 bp, Homo sapiens
ccaatccaacctaga

SEQ ID NO: 1263079 - DNA, 15 bp, Homo sapiens
accaatccaacctag

SEQ ID NO: 1263080 - DNA, 15 bp, Homo sapiens
caccaatccaaccta

SEQ ID NO: 1263081 - DNA, 15 bp, Homo sapiens
tcaccaatccaacct

SEQ ID NO: 1263082 - DNA, 15 bp, Homo sapiens
gtcaccaatccaacc

SEQ ID NO: 1263083 - DNA, 15 bp, Homo sapiens
tgtcaccaatccaac

SEQ ID NO: 1263084 - DNA, 15 bp, Homo sapiens
atgtcaccaatccaa

SEQ ID NO: 1263085 - DNA, 15 bp, Homo sapiens
catgtcaccaatcca

SEQ ID NO: 1263086 - DNA, 15 bp, Homo sapiens
gcatgtcaccaatcc

SEQ ID NO: 1263087 - DNA, 15 bp, Homo sapiens
agcatgtcaccaatc

SEQ ID NO: 1263088 - DNA, 15 bp, Homo sapiens
tagcatgtcaccaat

SEQ ID NO: 1263089 - DNA, 15 bp, Homo sapiens
gtagcatgtcaccaa

SEQ ID NO: 1263090 - DNA, 15 bp, Homo sapiens
agtagcatgtcacca

SEQ ID NO: 1263091 - DNA, 15 bp, Homo sapiens
aagtagcatgtcacc

SEQ ID NO: 1263092 - DNA, 15 bp, Homo sapiens
caagtagcatgtcac

SEQ ID NO: 1263093 - DNA, 15 bp, Homo sapiens
gcaagtagcatgtca

SEQ ID NO: 1263094 - DNA, 15 bp, Homo sapiens
tgcaagtagcatgtc

SEQ ID NO: 1263095 - DNA, 15 bp, Homo sapiens
ctgcaagtagcatgt

SEQ ID NO: 1263096 - DNA, 15 bp, Homo sapiens
cctgcaagtagcatg

SEQ ID NO: 1263097 - DNA, 15 bp, Homo sapiens
tcctgcaagtagcat

SEQ ID NO: 1263098 - DNA, 15 bp, Homo sapiens
ctcctgcaagtagca

SEQ ID NO: 1263099 - DNA, 15 bp, Homo sapiens
tctcctgcaagtagc

SEQ ID NO: 1263100 - DNA, 15 bp, Homo sapiens
atctcctgcaagtag

SEQ ID NO: 1263101 - DNA, 15 bp, Homo sapiens
catctcctgcaagta

SEQ ID NO: 1263102 - DNA, 15 bp, Homo sapiens
tcatctcctgcaagt

SEQ ID NO: 1263103 - DNA, 15 bp, Homo sapiens
atcatctcctgcaag

SEQ ID NO: 1263104 - DNA, 15 bp, Homo sapiens
catcatctcctgcaa

SEQ ID NO: 1263105 - DNA, 15 bp, Homo sapiens
acatcatctcctgca

SEQ ID NO: 1263106 - DNA, 15 bp, Homo sapiens
tacatcatctcctgc

SEQ ID NO: 1263107 - DNA, 15 bp, Homo sapiens
atacatcatctcctg

SEQ ID NO: 1263108 - DNA, 15 bp, Homo sapiens
tatacatcatctcct

SEQ ID NO: 1263109 - DNA, 15 bp, Homo sapiens
atatacatcatctcc

SEQ ID NO: 1263110 - DNA, 15 bp, Homo sapiens
gatatacatcatctc

SEQ ID NO: 1263111 - DNA, 15 bp, Homo sapiens
agatatacatcatct

SEQ ID NO: 1263112 - DNA, 15 bp, Homo sapiens
tagatatacatcatc

SEQ ID NO: 1263113 - DNA, 15 bp, Homo sapiens
ttagatatacatcat

SEQ ID NO: 1263114 - DNA, 15 bp, Homo sapiens
tttagatatacatca

SEQ ID NO: 1263115 - DNA, 15 bp, Homo sapiens
atttagatatacatc

SEQ ID NO: 1263116 - DNA, 15 bp, Homo sapiens
aatttagatatacat

SEQ ID NO: 1263117 - DNA, 15 bp, Homo sapiens
caatttagatataca

SEQ ID NO: 1263118 - DNA, 15 bp, Homo sapiens
acaatttagatatac

SEQ ID NO: 1263119 - DNA, 15 bp, Homo sapiens
aacaatttagatata

SEQ ID NO: 1263120 - DNA, 15 bp, Homo sapiens
aaacaatttagatat

SEQ ID NO: 1263121 - DNA, 15 bp, Homo sapiens
aaaacaatttagata

SEQ ID NO: 1263122 - DNA, 15 bp, Homo sapiens
aaaaacaatttagat

SEQ ID NO: 1263123 - DNA, 15 bp, Homo sapiens
taaaaacaatttaga

SEQ ID NO: 1263124 - DNA, 15 bp, Homo sapiens
ataaaaacaatttag

SEQ ID NO: 1263125 - DNA, 15 bp, Homo sapiens
tataaaaacaattta

SEQ ID NO: 1263126 - DNA, 15 bp, Homo sapiens
atataaaaacaattt

SEQ ID NO: 1263127 - DNA, 15 bp, Homo sapiens
aatataaaaacaatt

SEQ ID NO: 1263128 - DNA, 15 bp, Homo sapiens
aaatataaaaacaat

SEQ ID NO: 1263129 - DNA, 15 bp, Homo sapiens
aaaatataaaaacaa

SEQ ID NO: 1263130 - DNA, 15 bp, Homo sapiens
taaaatataaaaaca

SEQ ID NO: 1263131 - DNA, 15 bp, Homo sapiens
ataaaatataaaaac

SEQ ID NO: 1263132 - DNA, 15 bp, Homo sapiens
aataaaatataaaaa

SEQ ID NO: 1263133 - DNA, 15 bp, Homo sapiens
aaataaaatataaaa

SEQ ID NO: 1263134 - DNA, 15 bp, Homo sapiens
aaaataaaatataaa

SEQ ID NO: 1263135 - DNA, 15 bp, Homo sapiens
taaaataaaatataa

SEQ ID NO: 1263136 - DNA, 15 bp, Homo sapiens
ttaaaataaaatata

SEQ ID NO: 1263137 - DNA, 15 bp, Homo sapiens
gttaaaataaaatat

SEQ ID NO: 1263138 - DNA, 15 bp, Homo sapiens
tgttaaaataaaata

SEQ ID NO: 1263139 - DNA, 15 bp, Homo sapiens
ttgttaaaataaaat

SEQ ID NO: 1263140 - DNA, 15 bp, Homo sapiens
gttgttaaaataaaa

SEQ ID NO: 1263141 - DNA, 15 bp, Homo sapiens
tgttgttaaaataaa

SEQ ID NO: 1263142 - DNA, 15 bp, Homo sapiens
gtgttgttaaaataa

SEQ ID NO: 1263143 - DNA, 15 bp, Homo sapiens
agtgttgttaaaata

SEQ ID NO: 1263144 - DNA, 15 bp, Homo sapiens
tagtgttgttaaaat

SEQ ID NO: 1263145 - DNA, 15 bp, Homo sapiens
ctagtgttgttaaaa

SEQ ID NO: 1263146 - DNA, 15 bp, Homo sapiens
actagtgttgttaaa

SEQ ID NO: 1263147 - DNA, 15 bp, Homo sapiens
tactagtgttgttaa

SEQ ID NO: 1263148 - DNA, 15 bp, Homo sapiens
ctactagtgttgtta

SEQ ID NO: 1263149 - DNA, 15 bp, Homo sapiens
actactagtgttgtt

SEQ ID NO: 1263150 - DNA, 15 bp, Homo sapiens
tactactagtgttgt

SEQ ID NO: 1263151 - DNA, 15 bp, Homo sapiens
ctactactagtgttg

SEQ ID NO: 1263152 - DNA, 15 bp, Homo sapiens
tctactactagtgtt

SEQ ID NO: 1263153 - DNA, 15 bp, Homo sapiens
ttctactactagtgt

SEQ ID NO: 1263154 - DNA, 15 bp, Homo sapiens
tttctactactagtg

SEQ ID NO: 1263155 - DNA, 15 bp, Homo sapiens
ttttctactactagt

SEQ ID NO: 1263156 - DNA, 15 bp, Homo sapiens
tttttctactactag

SEQ ID NO: 1263157 - DNA, 15 bp, Homo sapiens
gtttttctactacta

SEQ ID NO: 1263158 - DNA, 15 bp, Homo sapiens
agtttttctactact

SEQ ID NO: 1263159 - DNA, 15 bp, Homo sapiens
tagtttttctactac

SEQ ID NO: 1263160 - DNA, 15 bp, Homo sapiens
ctagtttttctacta

SEQ ID NO: 1263161 - DNA, 15 bp, Homo sapiens
actagtttttctact

SEQ ID NO: 1263162 - DNA, 15 bp, Homo sapiens
gactagtttttctac

SEQ ID NO: 1263163 - DNA, 15 bp, Homo sapiens
agactagtttttcta

SEQ ID NO: 1263164 - DNA, 15 bp, Homo sapiens
gagactagtttttct

SEQ ID NO: 1263165 - DNA, 15 bp, Homo sapiens
agagactagtttttc

SEQ ID NO: 1263166 - DNA, 15 bp, Homo sapiens
gagagactagttttt

SEQ ID NO: 1263167 - DNA, 15 bp, Homo sapiens
tgagagactagtttt

SEQ ID NO: 1263168 - DNA, 15 bp, Homo sapiens
ttgagagactagttt

SEQ ID NO: 1263169 - DNA, 15 bp, Homo sapiens
tttgagagactagtt

SEQ ID NO: 1263170 - DNA, 15 bp, Homo sapiens
ttttgagagactagt

SEQ ID NO: 1263171 - DNA, 15 bp, Homo sapiens
tttttgagagactag

SEQ ID NO: 1263172 - DNA, 15 bp, Homo sapiens
atttttgagagacta

SEQ ID NO: 1263173 - DNA, 15 bp, Homo sapiens
tatttttgagagact

SEQ ID NO: 1263174 - DNA, 15 bp, Homo sapiens
atatttttgagagac

SEQ ID NO: 1263175 - DNA, 15 bp, Homo sapiens
catatttttgagaga

SEQ ID NO: 1263176 - DNA, 15 bp, Homo sapiens
acatatttttgagag

SEQ ID NO: 1263177 - DNA, 15 bp, Homo sapiens
aacatatttttgaga

SEQ ID NO: 1263178 - DNA, 15 bp, Homo sapiens
caacatatttttgag

SEQ ID NO: 1263179 - DNA, 15 bp, Homo sapiens
tcaacatatttttga

SEQ ID NO: 1263180 - DNA, 15 bp, Homo sapiens
ttcaacatatttttg

SEQ ID NO: 1263181 - DNA, 15 bp, Homo sapiens
cttcaacatattttt

SEQ ID NO: 1263182 - DNA, 15 bp, Homo sapiens
ccttcaacatatttt

SEQ ID NO: 1263183 - DNA, 15 bp, Homo sapiens
cccttcaacatattt

SEQ ID NO: 1263184 - DNA, 15 bp, Homo sapiens
tcccttcaacatatt

SEQ ID NO: 1263185 - DNA, 15 bp, Homo sapiens
ttcccttcaacatat

SEQ ID NO: 1263186 - DNA, 15 bp, Homo sapiens
gttcccttcaacata

SEQ ID NO: 1263187 - DNA, 15 bp, Homo sapiens
tgttcccttcaacat

SEQ ID NO: 1263188 - DNA, 15 bp, Homo sapiens
ctgttcccttcaaca

SEQ ID NO: 1263189 - DNA, 15 bp, Homo sapiens
tctgttcccttcaac

SEQ ID NO: 1263190 - DNA, 15 bp, Homo sapiens
ttctgttcccttcaa

SEQ ID NO: 1263191 - DNA, 15 bp, Homo sapiens
cttctgttcccttca

SEQ ID NO: 1263192 - DNA, 15 bp, Homo sapiens
tcttctgttcccttc

SEQ ID NO: 1263193 - DNA, 15 bp, Homo sapiens
ttcttctgttccctt

SEQ ID NO: 1263194 - DNA, 15 bp, Homo sapiens
cttcttctgttccct

SEQ ID NO: 1263195 - DNA, 15 bp, Homo sapiens
tcttcttctgttccc

SEQ ID NO: 1263196 - DNA, 15 bp, Homo sapiens
gtcttcttctgttcc

SEQ ID NO: 1263197 - DNA, 15 bp, Homo sapiens
agtcttcttctgttc

SEQ ID NO: 1263198 - DNA, 15 bp, Homo sapiens
aagtcttcttctgtt

SEQ ID NO: 1263199 - DNA, 15 bp, Homo sapiens
taagtcttcttctgt

SEQ ID NO: 1263200 - DNA, 15 bp, Homo sapiens
ttaagtcttcttctg

SEQ ID NO: 1263201 - DNA, 15 bp, Homo sapiens
tttaagtcttcttct

SEQ ID NO: 1263202 - DNA, 15 bp, Homo sapiens
ctttaagtcttcttc

SEQ ID NO: 1263203 - DNA, 15 bp, Homo sapiens
gctttaagtcttctt

SEQ ID NO: 1263204 - DNA, 15 bp, Homo sapiens
tgctttaagtcttct

SEQ ID NO: 1263205 - DNA, 15 bp, Homo sapiens
ttgctttaagtcttc

SEQ ID NO: 1263206 - DNA, 15 bp, Homo sapiens
attgctttaagtctt

SEQ ID NO: 1263207 - DNA, 15 bp, Homo sapiens
aattgctttaagtct

SEQ ID NO: 1263208 - DNA, 15 bp, Homo sapiens
aaattgctttaagtc

SEQ ID NO: 1263209 - DNA, 15 bp, Homo sapiens
taaattgctttaagt

SEQ ID NO: 1263210 - DNA, 15 bp, Homo sapiens
ttaaattgctttaag

SEQ ID NO: 1263211 - DNA, 15 bp, Homo sapiens
gttaaattgctttaa

SEQ ID NO: 1263212 - DNA, 15 bp, Homo sapiens
tgttaaattgcttta

SEQ ID NO: 1263213 - DNA, 15 bp, Homo sapiens
ttgttaaattgcttt

SEQ ID NO: 1263214 - DNA, 15 bp, Homo sapiens
attgttaaattgctt

SEQ ID NO: 1263215 - DNA, 15 bp, Homo sapiens
tattgttaaattgct

SEQ ID NO: 1263216 - DNA, 15 bp, Homo sapiens
atattgttaaattgc

SEQ ID NO: 1263217 - DNA, 15 bp, Homo sapiens
gatattgttaaattg

SEQ ID NO: 1263218 - DNA, 15 bp, Homo sapiens
tgatattgttaaatt

SEQ ID NO: 1263219 - DNA, 15 bp, Homo sapiens
ctgatattgttaaat

SEQ ID NO: 1263220 - DNA, 15 bp, Homo sapiens
cctgatattgttaaa

SEQ ID NO: 1263221 - DNA, 15 bp, Homo sapiens
tcctgatattgttaa

SEQ ID NO: 1263222 - DNA, 15 bp, Homo sapiens
atcctgatattgtta

SEQ ID NO: 1263223 - DNA, 15 bp, Homo sapiens
tatcctgatattgtt

SEQ ID NO: 1263224 - DNA, 15 bp, Homo sapiens
ttatcctgatattgt

SEQ ID NO: 1263225 - DNA, 15 bp, Homo sapiens
attatcctgatattg

SEQ ID NO: 1263226 - DNA, 15 bp, Homo sapiens
gattatcctgatatt

SEQ ID NO: 1263227 - DNA, 15 bp, Homo sapiens
tgattatcctgatat

SEQ ID NO: 1263228 - DNA, 15 bp, Homo sapiens
gtgattatcctgata

SEQ ID NO: 1263229 - DNA, 15 bp, Homo sapiens
agtgattatcctgat

SEQ ID NO: 1263230 - DNA, 15 bp, Homo sapiens
aagtgattatcctga

SEQ ID NO: 1263231 - DNA, 15 bp, Homo sapiens
aaagtgattatcctg

SEQ ID NO: 1263232 - DNA, 15 bp, Homo sapiens
aaaagtgattatcct

SEQ ID NO: 1263233 - DNA, 15 bp, Homo sapiens
taaaagtgattatcc

SEQ ID NO: 1263234 - DNA, 15 bp, Homo sapiens
ttaaaagtgattatc

SEQ ID NO: 1263235 - DNA, 15 bp, Homo sapiens
gttaaaagtgattat

SEQ ID NO: 1263236 - DNA, 15 bp, Homo sapiens
agttaaaagtgatta

SEQ ID NO: 1263237 - DNA, 15 bp, Homo sapiens
aagttaaaagtgatt

SEQ ID NO: 1263238 - DNA, 15 bp, Homo sapiens
aaagttaaaagtgat

SEQ ID NO: 1263239 - DNA, 15 bp, Homo sapiens
aaaagttaaaagtga

SEQ ID NO: 1263240 - DNA, 15 bp, Homo sapiens
taaaagttaaaagtg

SEQ ID NO: 1263241 - DNA, 15 bp, Homo sapiens
ataaaagttaaaagt

SEQ ID NO: 1263242 - DNA, 15 bp, Homo sapiens
gataaaagttaaaag

SEQ ID NO: 1263243 - DNA, 15 bp, Homo sapiens
ggataaaagttaaaa

SEQ ID NO: 1263244 - DNA, 15 bp, Homo sapiens
aggataaaagttaaa

SEQ ID NO: 1263245 - DNA, 15 bp, Homo sapiens
aaggataaaagttaa

SEQ ID NO: 1263246 - DNA, 15 bp, Homo sapiens
taaggataaaagtta

SEQ ID NO: 1263247 - DNA, 15 bp, Homo sapiens
ttaaggataaaagtt

SEQ ID NO: 1263248 - DNA, 15 bp, Homo sapiens
attaaggataaaagt

SEQ ID NO: 1263249 - DNA, 15 bp, Homo sapiens
ttcttagattttcta

SEQ ID NO: 1263250 - DNA, 15 bp, Homo sapiens
tttcttagattttct

SEQ ID NO: 1263251 - DNA, 15 bp, Homo sapiens
atttcttagattttc

SEQ ID NO: 1263252 - DNA, 15 bp, Homo sapiens
tatttcttagatttt

SEQ ID NO: 1263253 - DNA, 15 bp, Homo sapiens
gtatttcttagattt

SEQ ID NO: 1263254 - DNA, 15 bp, Homo sapiens
tgtatttcttagatt

SEQ ID NO: 1263255 - DNA, 15 bp, Homo sapiens
atgtatttcttagat

SEQ ID NO: 1263256 - DNA, 15 bp, Homo sapiens
tatgtatttcttaga

SEQ ID NO: 1263257 - DNA, 15 bp, Homo sapiens
atatgtatttcttag

SEQ ID NO: 1263258 - DNA, 15 bp, Homo sapiens
tatatgtatttctta

SEQ ID NO: 1263259 - DNA, 15 bp, Homo sapiens
atatatgtatttctt

SEQ ID NO: 1263260 - DNA, 15 bp, Homo sapiens
aatatatgtatttct

SEQ ID NO: 1263261 - DNA, 15 bp, Homo sapiens
aaatatatgtatttc

SEQ ID NO: 1263262 - DNA, 15 bp, Homo sapiens
aaaatatatgtattt

SEQ ID NO: 1263263 - DNA, 15 bp, Homo sapiens
aaaaatatatgtatt

SEQ ID NO: 1263264 - DNA, 15 bp, Homo sapiens
aaaaaatatatgtat

SEQ ID NO: 1263265 - DNA, 15 bp, Homo sapiens
caaaaaatatatgta

SEQ ID NO: 1263266 - DNA, 15 bp, Homo sapiens
acaaaaaatatatgt

SEQ ID NO: 1263267 - DNA, 15 bp, Homo sapiens
tacaaaaaatatatg

SEQ ID NO: 1263268 - DNA, 15 bp, Homo sapiens
ctacaaaaaatatat

SEQ ID NO: 1263269 - DNA, 15 bp, Homo sapiens
cctacaaaaaatata

SEQ ID NO: 1263270 - DNA, 15 bp, Homo sapiens
tcctacaaaaaatat

SEQ ID NO: 1263271 - DNA, 15 bp, Homo sapiens
ctcctacaaaaaata

SEQ ID NO: 1263272 - DNA, 15 bp, Homo sapiens
actcctacaaaaaat

SEQ ID NO: 1263273 - DNA, 15 bp, Homo sapiens
gactcctacaaaaaa

SEQ ID NO: 1263274 - DNA, 15 bp, Homo sapiens
agactcctacaaaaa

SEQ ID NO: 1263275 - DNA, 15 bp, Homo sapiens
aagactcctacaaaa

SEQ ID NO: 1263276 - DNA, 15 bp, Homo sapiens
taagactcctacaaa

SEQ ID NO: 1263277 - DNA, 15 bp, Homo sapiens
gtaagactcctacaa

SEQ ID NO: 1263278 - DNA, 15 bp, Homo sapiens
tgtaagactcctaca

SEQ ID NO: 1263279 - DNA, 15 bp, Homo sapiens
ctgtaagactcctac

SEQ ID NO: 1263280 - DNA, 15 bp, Homo sapiens
gctgtaagactccta

SEQ ID NO: 1263281 - DNA, 15 bp, Homo sapiens
tgctgtaagactcct

SEQ ID NO: 1263282 - DNA, 15 bp, Homo sapiens
ttgctgtaagactcc

SEQ ID NO: 1263283 - DNA, 15 bp, Homo sapiens
attgctgtaagactc

SEQ ID NO: 1263284 - DNA, 15 bp, Homo sapiens
gattgctgtaagact

SEQ ID NO: 1263285 - DNA, 15 bp, Homo sapiens
agattgctgtaagac

SEQ ID NO: 1263286 - DNA, 15 bp, Homo sapiens
aagattgctgtaaga

SEQ ID NO: 1263287 - DNA, 15 bp, Homo sapiens
gaagattgctgtaag

SEQ ID NO: 1263288 - DNA, 15 bp, Homo sapiens
agaagattgctgtaa

SEQ ID NO: 1263289 - DNA, 15 bp, Homo sapiens
aagaagattgctgta

SEQ ID NO: 1263290 - DNA, 15 bp, Homo sapiens
taagaagattgctgt

SEQ ID NO: 1263291 - DNA, 15 bp, Homo sapiens
ttaagaagattgctg

SEQ ID NO: 1263292 - DNA, 15 bp, Homo sapiens
tttaagaagattgct

SEQ ID NO: 1263293 - DNA, 15 bp, Homo sapiens
ttttaagaagattgc

SEQ ID NO: 1263294 - DNA, 15 bp, Homo sapiens
attttaagaagattg

SEQ ID NO: 1263295 - DNA, 15 bp, Homo sapiens
aattttaagaagatt

SEQ ID NO: 1263296 - DNA, 15 bp, Homo sapiens
taattttaagaagat

SEQ ID NO: 1263297 - DNA, 15 bp, Homo sapiens
gtaattttaagaaga

SEQ ID NO: 1263298 - DNA, 15 bp, Homo sapiens
ggtaattttaagaag

SEQ ID NO: 1263299 - DNA, 15 bp, Homo sapiens
tggtaattttaagaa

SEQ ID NO: 1263300 - DNA, 15 bp, Homo sapiens
ttggtaattttaaga

SEQ ID NO: 1263301 - DNA, 15 bp, Homo sapiens
cttggtaattttaag

SEQ ID NO: 1263302 - DNA, 15 bp, Homo sapiens
gcttggtaattttaa

SEQ ID NO: 1263303 - DNA, 15 bp, Homo sapiens
tgcttggtaatttta

SEQ ID NO: 1263304 - DNA, 15 bp, Homo sapiens
ctgcttggtaatttt

SEQ ID NO: 1263305 - DNA, 15 bp, Homo sapiens
cctgcttggtaattt

SEQ ID NO: 1263306 - DNA, 15 bp, Homo sapiens
acctgcttggtaatt

SEQ ID NO: 1263307 - DNA, 15 bp, Homo sapiens
aacctgcttggtaat

SEQ ID NO: 1263308 - DNA, 15 bp, Homo sapiens
caacctgcttggtaa

SEQ ID NO: 1263309 - DNA, 15 bp, Homo sapiens
ccaacctgcttggta

SEQ ID NO: 1263310 - DNA, 15 bp, Homo sapiens
tccaacctgcttggt

SEQ ID NO: 1263311 - DNA, 15 bp, Homo sapiens
ttccaacctgcttgg

SEQ ID NO: 1263312 - DNA, 15 bp, Homo sapiens
cttccaacctgcttg

SEQ ID NO: 1263313 - DNA, 15 bp, Homo sapiens
tcttccaacctgctt

SEQ ID NO: 1263314 - DNA, 15 bp, Homo sapiens
ctcttccaacctgct

SEQ ID NO: 1263315 - DNA, 15 bp, Homo sapiens
tctcttccaacctgc

SEQ ID NO: 1263316 - DNA, 15 bp, Homo sapiens
atctcttccaacctg

SEQ ID NO: 1263317 - DNA, 15 bp, Homo sapiens
gatctcttccaacct

SEQ ID NO: 1263318 - DNA, 15 bp, Homo sapiens
ggatctcttccaacc

SEQ ID NO: 1263319 - DNA, 15 bp, Homo sapiens
tggatctcttccaac

SEQ ID NO: 1263320 - DNA, 15 bp, Homo sapiens
atggatctcttccaa

SEQ ID NO: 1263321 - DNA, 15 bp, Homo sapiens
catggatctcttcca

SEQ ID NO: 1263322 - DNA, 15 bp, Homo sapiens
tcatggatctcttcc

SEQ ID NO: 1263323 - DNA, 15 bp, Homo sapiens
ttcatggatctcttc

SEQ ID NO: 1263324 - DNA, 15 bp, Homo sapiens
attcatggatctctt

SEQ ID NO: 1263325 - DNA, 15 bp, Homo sapiens
aattcatggatctct

SEQ ID NO: 1263326 - DNA, 15 bp, Homo sapiens
aaattcatggatctc

SEQ ID NO: 1263327 - DNA, 15 bp, Homo sapiens
gaaattcatggatct

SEQ ID NO: 1263328 - DNA, 15 bp, Homo sapiens
tgaaattcatggatc

SEQ ID NO: 1263329 - DNA, 15 bp, Homo sapiens
ttgaaattcatggat

SEQ ID NO: 1263330 - DNA, 15 bp, Homo sapiens
cttgaaattcatgga

SEQ ID NO: 1263331 - DNA, 15 bp, Homo sapiens
tcttgaaattcatgg

SEQ ID NO: 1263332 - DNA, 15 bp, Homo sapiens
ttcttgaaattcatg

SEQ ID NO: 1263333 - DNA, 15 bp, Homo sapiens
cttcttgaaattcat

SEQ ID NO: 1263334 - DNA, 15 bp, Homo sapiens
acttcttgaaattca

SEQ ID NO: 1263335 - DNA, 15 bp, Homo sapiens
aacttcttgaaattc

SEQ ID NO: 1263336 - DNA, 15 bp, Homo sapiens
gaacttcttgaaatt

SEQ ID NO: 1263337 - DNA, 15 bp, Homo sapiens
tgaacttcttgaaat

SEQ ID NO: 1263338 - DNA, 15 bp, Homo sapiens
ctgaacttcttgaaa

SEQ ID NO: 1263339 - DNA, 15 bp, Homo sapiens
cctgaacttcttgaa

SEQ ID NO: 1263340 - DNA, 15 bp, Homo sapiens
ccctgaacttcttga

SEQ ID NO: 1263341 - DNA, 15 bp, Homo sapiens
cccctgaacttcttg

SEQ ID NO: 1263342 - DNA, 15 bp, Homo sapiens
ccccctgaacttctt

SEQ ID NO: 1263343 - DNA, 15 bp, Homo sapiens
tccccctgaacttct

SEQ ID NO: 1263344 - DNA, 15 bp, Homo sapiens
ttccccctgaacttc

SEQ ID NO: 1263345 - DNA, 15 bp, Homo sapiens
attccccctgaactt

SEQ ID NO: 1263346 - DNA, 15 bp, Homo sapiens
aattccccctgaact

SEQ ID NO: 1263347 - DNA, 15 bp, Homo sapiens
aaattccccctgaac

SEQ ID NO: 1263348 - DNA, 15 bp, Homo sapiens
aaaattccccctgaa

SEQ ID NO: 1263349 - DNA, 15 bp, Homo sapiens
aaaaattccccctga

SEQ ID NO: 1263350 - DNA, 15 bp, Homo sapiens
aaaaaattccccctg

SEQ ID NO: 1263351 - DNA, 15 bp, Homo sapiens
aaaaaaattccccct

SEQ ID NO: 1263352 - DNA, 15 bp, Homo sapiens
taaaaaaattccccc

SEQ ID NO: 1263353 - DNA, 15 bp, Homo sapiens
ttaaaaaaattcccc

SEQ ID NO: 1263354 - DNA, 15 bp, Homo sapiens
cttaaaaaaattccc

SEQ ID NO: 1263355 - DNA, 15 bp, Homo sapiens
tcttaaaaaaattcc

SEQ ID NO: 1263356 - DNA, 15 bp, Homo sapiens
gtcttaaaaaaattc

SEQ ID NO: 1263357 - DNA, 15 bp, Homo sapiens
agtcttaaaaaaatt

SEQ ID NO: 1263358 - DNA, 15 bp, Homo sapiens
gagtcttaaaaaaat

SEQ ID NO: 1263359 - DNA, 15 bp, Homo sapiens
agagtcttaaaaaaa

SEQ ID NO: 1263360 - DNA, 15 bp, Homo sapiens
cagagtcttaaaaaa

SEQ ID NO: 1263361 - DNA, 15 bp, Homo sapiens
gcagagtcttaaaaa

SEQ ID NO: 1263362 - DNA, 15 bp, Homo sapiens
agcagagtcttaaaa

SEQ ID NO: 1263363 - DNA, 15 bp, Homo sapiens
cagcagagtcttaaa

SEQ ID NO: 1263364 - DNA, 15 bp, Homo sapiens
tcagcagagtcttaa

SEQ ID NO: 1263365 - DNA, 15 bp, Homo sapiens
ttcagcagagtctta

SEQ ID NO: 1263366 - DNA, 15 bp, Homo sapiens
tttcagcagagtctt

SEQ ID NO: 1263367 - DNA, 15 bp, Homo sapiens
atttcagcagagtct

SEQ ID NO: 1263368 - DNA, 15 bp, Homo sapiens
tatttcagcagagtc

SEQ ID NO: 1263369 - DNA, 15 bp, Homo sapiens
atatttcagcagagt

SEQ ID NO: 1263370 - DNA, 15 bp, Homo sapiens
tatatttcagcagag

SEQ ID NO: 1263371 - DNA, 15 bp, Homo sapiens
atatatttcagcaga

SEQ ID NO: 1263372 - DNA, 15 bp, Homo sapiens
tatatatttcagcag

SEQ ID NO: 1263373 - DNA, 15 bp, Homo sapiens
atatatatttcagca

SEQ ID NO: 1263374 - DNA, 15 bp, Homo sapiens
tatatatatttcagc

SEQ ID NO: 1263375 - DNA, 15 bp, Homo sapiens
atatatatatttcag

SEQ ID NO: 1263376 - DNA, 15 bp, Homo sapiens
tatatatatatttca

SEQ ID NO: 1263377 - DNA, 15 bp, Homo sapiens
atatatatatatttc

SEQ ID NO: 1263378 - DNA, 15 bp, Homo sapiens
caaaaaatatatata

SEQ ID NO: 1263379 - DNA, 15 bp, Homo sapiens
tcaaaaaatatatat

SEQ ID NO: 1263380 - DNA, 15 bp, Homo sapiens
ctcaaaaaatatata

SEQ ID NO: 1263381 - DNA, 15 bp, Homo sapiens
tctcaaaaaatatat

SEQ ID NO: 1263382 - DNA, 15 bp, Homo sapiens
atctcaaaaaatata

SEQ ID NO: 1263383 - DNA, 15 bp, Homo sapiens
catctcaaaaaatat

SEQ ID NO: 1263384 - DNA, 15 bp, Homo sapiens
cccatctcaaaaaat

SEQ ID NO: 1263385 - DNA, 15 bp, Homo sapiens
aagaccccatctcaa

SEQ ID NO: 1263386 - DNA, 15 bp, Homo sapiens
caagaccccatctca

SEQ ID NO: 1263387 - DNA, 15 bp, Homo sapiens
gagcaagaccccatc

SEQ ID NO: 1263388 - DNA, 15 bp, Homo sapiens
agagcaagaccccat

SEQ ID NO: 1263389 - DNA, 15 bp, Homo sapiens
aagagcaagacccca

SEQ ID NO: 1263390 - DNA, 15 bp, Homo sapiens
caagagcaagacccc

SEQ ID NO: 1263391 - DNA, 15 bp, Homo sapiens
acaagagcaagaccc

SEQ ID NO: 1263392 - DNA, 15 bp, Homo sapiens
gacaagagcaagacc

SEQ ID NO: 1263393 - DNA, 15 bp, Homo sapiens
cgacaagagcaagac

SEQ ID NO: 1263394 - DNA, 15 bp, Homo sapiens
gcgacaagagcaaga

SEQ ID NO: 1263395 - DNA, 15 bp, Homo sapiens
ggcgacaagagcaag

SEQ ID NO: 1263396 - DNA, 15 bp, Homo sapiens
aggcgacaagagcaa

SEQ ID NO: 1263397 - DNA, 15 bp, Homo sapiens
taggcgacaagagca

SEQ ID NO: 1263398 - DNA, 15 bp, Homo sapiens
ctaggcgacaagagc

SEQ ID NO: 1263399 - DNA, 15 bp, Homo sapiens
cctaggcgacaagag

SEQ ID NO: 1263400 - DNA, 15 bp, Homo sapiens
gcctaggcgacaaga

SEQ ID NO: 1263401 - DNA, 15 bp, Homo sapiens
agcctaggcgacaag

SEQ ID NO: 1263402 - DNA, 15 bp, Homo sapiens
cagcctaggcgacaa

SEQ ID NO: 1263403 - DNA, 15 bp, Homo sapiens
ccagcctaggcgaca

SEQ ID NO: 1263404 - DNA, 15 bp, Homo sapiens
tccagcctaggcgac

SEQ ID NO: 1263405 - DNA, 15 bp, Homo sapiens
ctccagcctaggcga

SEQ ID NO: 1263406 - DNA, 15 bp, Homo sapiens
actccagcctaggcg

SEQ ID NO: 1263407 - DNA, 15 bp, Homo sapiens
tgtggtggcaggtgc

SEQ ID NO: 1263408 - DNA, 15 bp, Homo sapiens
gtgtggtggcaggtg

SEQ ID NO: 1263409 - DNA, 15 bp, Homo sapiens
agtgtggtggcaggt

SEQ ID NO: 1263410 - DNA, 15 bp, Homo sapiens
gagtgtggtggcagg

SEQ ID NO: 1263411 - DNA, 15 bp, Homo sapiens
tgagtgtggtggcag

SEQ ID NO: 1263412 - DNA, 15 bp, Homo sapiens
ctgagtgtggtggca

SEQ ID NO: 1263413 - DNA, 15 bp, Homo sapiens
gctgagtgtggtggc

SEQ ID NO: 1263414 - DNA, 15 bp, Homo sapiens
agctgagtgtggtgg

SEQ ID NO: 1263415 - DNA, 15 bp, Homo sapiens
tagctgagtgtggtg

SEQ ID NO: 1263416 - DNA, 15 bp, Homo sapiens
ttagctgagtgtggt

SEQ ID NO: 1263417 - DNA, 15 bp, Homo sapiens
attagctgagtgtgg

SEQ ID NO: 1263418 - DNA, 15 bp, Homo sapiens
aattagctgagtgtg

SEQ ID NO: 1263419 - DNA, 15 bp, Homo sapiens
aaattagctgagtgt

SEQ ID NO: 1263420 - DNA, 15 bp, Homo sapiens
gaaattagctgagtg

SEQ ID NO: 1263421 - DNA, 15 bp, Homo sapiens
cgaaattagctgagt

SEQ ID NO: 1263422 - DNA, 15 bp, Homo sapiens
acgaaattagctgag

SEQ ID NO: 1263423 - DNA, 15 bp, Homo sapiens
tacgaaattagctga

SEQ ID NO: 1263424 - DNA, 15 bp, Homo sapiens
atacgaaattagctg

SEQ ID NO: 1263425 - DNA, 15 bp, Homo sapiens
aatacgaaattagct

SEQ ID NO: 1263426 - DNA, 15 bp, Homo sapiens
aaatacgaaattagc

SEQ ID NO: 1263427 - DNA, 15 bp, Homo sapiens
aaaatacgaaattag

SEQ ID NO: 1263428 - DNA, 15 bp, Homo sapiens
aaaaatacgaaatta

SEQ ID NO: 1263429 - DNA, 15 bp, Homo sapiens
caaaaatacgaaatt

SEQ ID NO: 1263430 - DNA, 15 bp, Homo sapiens
ccaaaaatacgaaat

SEQ ID NO: 1263431 - DNA, 15 bp, Homo sapiens
accaaaaatacgaaa

SEQ ID NO: 1263432 - DNA, 15 bp, Homo sapiens
taccaaaaatacgaa

SEQ ID NO: 1263433 - DNA, 15 bp, Homo sapiens
ctaccaaaaatacga

SEQ ID NO: 1263434 - DNA, 15 bp, Homo sapiens
tctaccaaaaatacg

SEQ ID NO: 1263435 - DNA, 15 bp, Homo sapiens
acatctctaccaaaa

SEQ ID NO: 1263436 - DNA, 15 bp, Homo sapiens
cacatctctaccaaa

SEQ ID NO: 1263437 - DNA, 15 bp, Homo sapiens
ccacatctctaccaa

SEQ ID NO: 1263438 - DNA, 15 bp, Homo sapiens
accacatctctacca

SEQ ID NO: 1263439 - DNA, 15 bp, Homo sapiens
aaccacatctctacc

SEQ ID NO: 1263440 - DNA, 15 bp, Homo sapiens
aaaccacatctctac

SEQ ID NO: 1263441 - DNA, 15 bp, Homo sapiens
gaaaccacatctcta

SEQ ID NO: 1263442 - DNA, 15 bp, Homo sapiens
tgaaaccacatctct

SEQ ID NO: 1263443 - DNA, 15 bp, Homo sapiens
gtgaaaccacatctc

SEQ ID NO: 1263444 - DNA, 15 bp, Homo sapiens
ggtgaaaccacatct

SEQ ID NO: 1263445 - DNA, 15 bp, Homo sapiens
tggtgaaaccacatc

SEQ ID NO: 1263446 - DNA, 15 bp, Homo sapiens
atggtgaaaccacat

SEQ ID NO: 1263447 - DNA, 15 bp, Homo sapiens
catggtgaaaccaca

SEQ ID NO: 1263448 - DNA, 15 bp, Homo sapiens
aaacatggtgaaacc

SEQ ID NO: 1263449 - DNA, 15 bp, Homo sapiens
caaacatggtgaaac

SEQ ID NO: 1263450 - DNA, 15 bp, Homo sapiens
gcaaacatggtgaaa

SEQ ID NO: 1263451 - DNA, 15 bp, Homo sapiens
ggcaaacatggtgaa

SEQ ID NO: 1263452 - DNA, 15 bp, Homo sapiens
tggcaaacatggtga

SEQ ID NO: 1263453 - DNA, 15 bp, Homo sapiens
ctggcaaacatggtg

SEQ ID NO: 1263454 - DNA, 15 bp, Homo sapiens
gctggcaaacatggt

SEQ ID NO: 1263455 - DNA, 15 bp, Homo sapiens
ggctggcaaacatgg

SEQ ID NO: 1263456 - DNA, 15 bp, Homo sapiens
aggctggcaaacatg

SEQ ID NO: 1263457 - DNA, 15 bp, Homo sapiens
tgagaccaggctggc

SEQ ID NO: 1263458 - DNA, 15 bp, Homo sapiens
ttgagaccaggctgg

SEQ ID NO: 1263459 - DNA, 15 bp, Homo sapiens
tttgagaccaggctg

SEQ ID NO: 1263460 - DNA, 15 bp, Homo sapiens
gtttgagaccaggct

SEQ ID NO: 1263461 - DNA, 15 bp, Homo sapiens
agtttgagaccaggc

SEQ ID NO: 1263462 - DNA, 15 bp, Homo sapiens
gagtttgagaccagg

SEQ ID NO: 1263463 - DNA, 15 bp, Homo sapiens
gtttgggaggccaag

SEQ ID NO: 1263464 - DNA, 15 bp, Homo sapiens
agtttgggaggccaa

SEQ ID NO: 1263465 - DNA, 15 bp, Homo sapiens
cagtttgggaggcca

SEQ ID NO: 1263466 - DNA, 15 bp, Homo sapiens
gcagtttgggaggcc

SEQ ID NO: 1263467 - DNA, 15 bp, Homo sapiens
agcagtttgggaggc

SEQ ID NO: 1263468 - DNA, 15 bp, Homo sapiens
cagcagtttgggagg

SEQ ID NO: 1263469 - DNA, 15 bp, Homo sapiens
ccagcagtttgggag

SEQ ID NO: 1263470 - DNA, 15 bp, Homo sapiens
cccagcagtttggga

SEQ ID NO: 1263471 - DNA, 15 bp, Homo sapiens
tcccagcagtttggg

SEQ ID NO: 1263472 - DNA, 15 bp, Homo sapiens
atcccagcagtttgg

SEQ ID NO: 1263473 - DNA, 15 bp, Homo sapiens
aatcccagcagtttg

SEQ ID NO: 1263474 - DNA, 15 bp, Homo sapiens
tacggtggctcacgc

SEQ ID NO: 1263475 - DNA, 15 bp, Homo sapiens
gtacggtggctcacg

SEQ ID NO: 1263476 - DNA, 15 bp, Homo sapiens
ggtacggtggctcac

SEQ ID NO: 1263477 - DNA, 15 bp, Homo sapiens
aggtacggtggctca

SEQ ID NO: 1263478 - DNA, 15 bp, Homo sapiens
caggtacggtggctc

SEQ ID NO: 1263479 - DNA, 15 bp, Homo sapiens
ccaggtacggtggct

SEQ ID NO: 1263480 - DNA, 15 bp, Homo sapiens
accaggtacggtggc

SEQ ID NO: 1263481 - DNA, 15 bp, Homo sapiens
gaccaggtacggtgg

SEQ ID NO: 1263482 - DNA, 15 bp, Homo sapiens
agaccaggtacggtg

SEQ ID NO: 1263483 - DNA, 15 bp, Homo sapiens
tagaccaggtacggt

SEQ ID NO: 1263484 - DNA, 15 bp, Homo sapiens
ctagaccaggtacgg

SEQ ID NO: 1263485 - DNA, 15 bp, Homo sapiens
tctagaccaggtacg

SEQ ID NO: 1263486 - DNA, 15 bp, Homo sapiens
gtctagaccaggtac

SEQ ID NO: 1263487 - DNA, 15 bp, Homo sapiens
agtctagaccaggta

SEQ ID NO: 1263488 - DNA, 15 bp, Homo sapiens
gagtctagaccaggt

SEQ ID NO: 1263489 - DNA, 15 bp, Homo sapiens
agagtctagaccagg

SEQ ID NO: 1263490 - DNA, 15 bp, Homo sapiens
cagagtctagaccag

SEQ ID NO: 1263491 - DNA, 15 bp, Homo sapiens
gcagagtctagacca

SEQ ID NO: 1263492 - DNA, 15 bp, Homo sapiens
ggcagagtctagacc

SEQ ID NO: 1263493 - DNA, 15 bp, Homo sapiens
cggcagagtctagac

SEQ ID NO: 1263494 - DNA, 15 bp, Homo sapiens
tcggcagagtctaga

SEQ ID NO: 1263495 - DNA, 15 bp, Homo sapiens
ttcggcagagtctag

SEQ ID NO: 1263496 - DNA, 15 bp, Homo sapiens
tttcggcagagtcta

SEQ ID NO: 1263497 - DNA, 15 bp, Homo sapiens
atttcggcagagtct

SEQ ID NO: 1263498 - DNA, 15 bp, Homo sapiens
aatttcggcagagtc

SEQ ID NO: 1263499 - DNA, 15 bp, Homo sapiens
gaatttcggcagagt

SEQ ID NO: 1263500 - DNA, 15 bp, Homo sapiens
agaatttcggcagag

SEQ ID NO: 1263501 - DNA, 15 bp, Homo sapiens
tagaatttcggcaga

SEQ ID NO: 1263502 - DNA, 15 bp, Homo sapiens
ttagaatttcggcag

SEQ ID NO: 1263503 - DNA, 15 bp, Homo sapiens
attagaatttcggca

SEQ ID NO: 1263504 - DNA, 15 bp, Homo sapiens
tattagaatttcggc

SEQ ID NO: 1263505 - DNA, 15 bp, Homo sapiens
gtattagaatttcgg

SEQ ID NO: 1263506 - DNA, 15 bp, Homo sapiens
agtattagaatttcg

SEQ ID NO: 1263507 - DNA, 15 bp, Homo sapiens
aagtattagaatttc

SEQ ID NO: 1263508 - DNA, 15 bp, Homo sapiens
gaagtattagaattt

SEQ ID NO: 1263509 - DNA, 15 bp, Homo sapiens
agaagtattagaatt

SEQ ID NO: 1263510 - DNA, 15 bp, Homo sapiens
aagaagtattagaat

SEQ ID NO: 1263511 - DNA, 15 bp, Homo sapiens
aaagaagtattagaa

SEQ ID NO: 1263512 - DNA, 15 bp, Homo sapiens
caaagaagtattaga

SEQ ID NO: 1263513 - DNA, 15 bp, Homo sapiens
ccaaagaagtattag

SEQ ID NO: 1263514 - DNA, 15 bp, Homo sapiens
accaaagaagtatta

SEQ ID NO: 1263515 - DNA, 15 bp, Homo sapiens
taccaaagaagtatt

SEQ ID NO: 1263516 - DNA, 15 bp, Homo sapiens
ttaccaaagaagtat

SEQ ID NO: 1263517 - DNA, 15 bp, Homo sapiens
attaccaaagaagta

SEQ ID NO: 1263518 - DNA, 15 bp, Homo sapiens
cattaccaaagaagt

SEQ ID NO: 1263519 - DNA, 15 bp, Homo sapiens
gcattaccaaagaag

SEQ ID NO: 1263520 - DNA, 15 bp, Homo sapiens
tgcattaccaaagaa

SEQ ID NO: 1263521 - DNA, 15 bp, Homo sapiens
ttgcattaccaaaga

SEQ ID NO: 1263522 - DNA, 15 bp, Homo sapiens
gttgcattaccaaag

SEQ ID NO: 1263523 - DNA, 15 bp, Homo sapiens
tgttgcattaccaaa

SEQ ID NO: 1263524 - DNA, 15 bp, Homo sapiens
ctgttgcattaccaa

SEQ ID NO: 1263525 - DNA, 15 bp, Homo sapiens
tctgttgcattacca

SEQ ID NO: 1263526 - DNA, 15 bp, Homo sapiens
ttctgttgcattacc

SEQ ID NO: 1263527 - DNA, 15 bp, Homo sapiens
tttctgttgcattac

SEQ ID NO: 1263528 - DNA, 15 bp, Homo sapiens
ttttctgttgcatta

SEQ ID NO: 1263529 - DNA, 15 bp, Homo sapiens
gttttctgttgcatt

SEQ ID NO: 1263530 - DNA, 15 bp, Homo sapiens
agttttctgttgcat

SEQ ID NO: 1263531 - DNA, 15 bp, Homo sapiens
tagttttctgttgca

SEQ ID NO: 1263532 - DNA, 15 bp, Homo sapiens
ttagttttctgttgc

SEQ ID NO: 1263533 - DNA, 15 bp, Homo sapiens
tttagttttctgttg

SEQ ID NO: 1263534 - DNA, 15 bp, Homo sapiens
ctttagttttctgtt

SEQ ID NO: 1263535 - DNA, 15 bp, Homo sapiens
tctttagttttctgt

SEQ ID NO: 1263536 - DNA, 15 bp, Homo sapiens
atctttagttttctg

SEQ ID NO: 1263537 - DNA, 15 bp, Homo sapiens
aatctttagttttct

SEQ ID NO: 1263538 - DNA, 15 bp, Homo sapiens
aaatctttagttttc

SEQ ID NO: 1263539 - DNA, 15 bp, Homo sapiens
aaaatctttagtttt

SEQ ID NO: 1263540 - DNA, 15 bp, Homo sapiens
caaaatctttagttt

SEQ ID NO: 1263541 - DNA, 15 bp, Homo sapiens
tcaaaatctttagtt

SEQ ID NO: 1263542 - DNA, 15 bp, Homo sapiens
atcaaaatctttagt

SEQ ID NO: 1263543 - DNA, 15 bp, Homo sapiens
catcaaaatctttag

SEQ ID NO: 1263544 - DNA, 15 bp, Homo sapiens
ccatcaaaatcttta

SEQ ID NO: 1263545 - DNA, 15 bp, Homo sapiens
accatcaaaatcttt

SEQ ID NO: 1263546 - DNA, 15 bp, Homo sapiens
caccatcaaaatctt

SEQ ID NO: 1263547 - DNA, 15 bp, Homo sapiens
tcaccatcaaaatct

SEQ ID NO: 1263548 - DNA, 15 bp, Homo sapiens
ttcaccatcaaaatc

SEQ ID NO: 1263549 - DNA, 15 bp, Homo sapiens
gttcaccatcaaaat

SEQ ID NO: 1263550 - DNA, 15 bp, Homo sapiens
agttcaccatcaaaa

SEQ ID NO: 1263551 - DNA, 15 bp, Homo sapiens
gagttcaccatcaaa

SEQ ID NO: 1263552 - DNA, 15 bp, Homo sapiens
tgagttcaccatcaa

SEQ ID NO: 1263553 - DNA, 15 bp, Homo sapiens
ttgagttcaccatca

SEQ ID NO: 1263554 - DNA, 15 bp, Homo sapiens
attgagttcaccatc

SEQ ID NO: 1263555 - DNA, 15 bp, Homo sapiens
aattgagttcaccat

SEQ ID NO: 1263556 - DNA, 15 bp, Homo sapiens
caattgagttcacca

SEQ ID NO: 1263557 - DNA, 15 bp, Homo sapiens
gcaattgagttcacc

SEQ ID NO: 1263558 - DNA, 15 bp, Homo sapiens
agcaattgagttcac

SEQ ID NO: 1263559 - DNA, 15 bp, Homo sapiens
aagcaattgagttca

SEQ ID NO: 1263560 - DNA, 15 bp, Homo sapiens
gaagcaattgagttc

SEQ ID NO: 1263561 - DNA, 15 bp, Homo sapiens
agaagcaattgagtt

SEQ ID NO: 1263562 - DNA, 15 bp, Homo sapiens
cagaagcaattgagt

SEQ ID NO: 1263563 - DNA, 15 bp, Homo sapiens
tcagaagcaattgag

SEQ ID NO: 1263564 - DNA, 15 bp, Homo sapiens
ctcagaagcaattga

SEQ ID NO: 1263565 - DNA, 15 bp, Homo sapiens
actcagaagcaattg

SEQ ID NO: 1263566 - DNA, 15 bp, Homo sapiens
aactcagaagcaatt

SEQ ID NO: 1263567 - DNA, 15 bp, Homo sapiens
caactcagaagcaat

SEQ ID NO: 1263568 - DNA, 15 bp, Homo sapiens
acaactcagaagcaa

SEQ ID NO: 1263569 - DNA, 15 bp, Homo sapiens
cacaactcagaagca

SEQ ID NO: 1263570 - DNA, 15 bp, Homo sapiens
acacaactcagaagc

SEQ ID NO: 1263571 - DNA, 15 bp, Homo sapiens
cacacaactcagaag

SEQ ID NO: 1263572 - DNA, 15 bp, Homo sapiens
ccacacaactcagaa

SEQ ID NO: 1263573 - DNA, 15 bp, Homo sapiens
tccacacaactcaga

SEQ ID NO: 1263574 - DNA, 15 bp, Homo sapiens
atccacacaactcag

SEQ ID NO: 1263575 - DNA, 15 bp, Homo sapiens
catccacacaactca

SEQ ID NO: 1263576 - DNA, 15 bp, Homo sapiens
tcatccacacaactc

SEQ ID NO: 1263577 - DNA, 15 bp, Homo sapiens
ttcatccacacaact

SEQ ID NO: 1263578 - DNA, 15 bp, Homo sapiens
tttcatccacacaac

SEQ ID NO: 1263579 - DNA, 15 bp, Homo sapiens
ttttcatccacacaa

SEQ ID NO: 1263580 - DNA, 15 bp, Homo sapiens
attttcatccacaca

SEQ ID NO: 1263581 - DNA, 15 bp, Homo sapiens
tattttcatccacac

SEQ ID NO: 1263582 - DNA, 15 bp, Homo sapiens
atattttcatccaca

SEQ ID NO: 1263583 - DNA, 15 bp, Homo sapiens
tatattttcatccac

SEQ ID NO: 1263584 - DNA, 15 bp, Homo sapiens
atatattttcatcca

SEQ ID NO: 1263585 - DNA, 15 bp, Homo sapiens
aatatattttcatcc

SEQ ID NO: 1263586 - DNA, 15 bp, Homo sapiens
aaatatattttcatc

SEQ ID NO: 1263587 - DNA, 15 bp, Homo sapiens
aaaatatattttcat

SEQ ID NO: 1263588 - DNA, 15 bp, Homo sapiens
taaaatatattttca

SEQ ID NO: 1263589 - DNA, 15 bp, Homo sapiens
ataaaatatattttc

SEQ ID NO: 1263590 - DNA, 15 bp, Homo sapiens
aataaaatatatttt

SEQ ID NO: 1263591 - DNA, 15 bp, Homo sapiens
taataaaatatattt

SEQ ID NO: 1263592 - DNA, 15 bp, Homo sapiens
ataataaaatatatt

SEQ ID NO: 1263593 - DNA, 15 bp, Homo sapiens
aataataaaatatat

SEQ ID NO: 1263594 - DNA, 15 bp, Homo sapiens
aaataataaaatata

SEQ ID NO: 1263595 - DNA, 15 bp, Homo sapiens
aaaataataaaatat

SEQ ID NO: 1263596 - DNA, 15 bp, Homo sapiens
aaaaaataataaaat

SEQ ID NO: 1263597 - DNA, 15 bp, Homo sapiens
gaaaaaataataaaa

SEQ ID NO: 1263598 - DNA, 15 bp, Homo sapiens
ggaaaaaataataaa

SEQ ID NO: 1263599 - DNA, 15 bp, Homo sapiens
aggaaaaaataataa

SEQ ID NO: 1263600 - DNA, 15 bp, Homo sapiens
aaggaaaaaataata

SEQ ID NO: 1263601 - DNA, 15 bp, Homo sapiens
gaaggaaaaaataat

SEQ ID NO: 1263602 - DNA, 15 bp, Homo sapiens
tgaaggaaaaaataa

SEQ ID NO: 1263603 - DNA, 15 bp, Homo sapiens
ttgaaggaaaaaata

SEQ ID NO: 1263604 - DNA, 15 bp, Homo sapiens
gttgaaggaaaaaat

SEQ ID NO: 1263605 - DNA, 15 bp, Homo sapiens
agttgaaggaaaaaa

SEQ ID NO: 1263606 - DNA, 15 bp, Homo sapiens
aagttgaaggaaaaa

SEQ ID NO: 1263607 - DNA, 15 bp, Homo sapiens
aaagttgaaggaaaa

SEQ ID NO: 1263608 - DNA, 15 bp, Homo sapiens
aaaagttgaaggaaa

SEQ ID NO: 1263609 - DNA, 15 bp, Homo sapiens
taaaagttgaaggaa

SEQ ID NO: 1263610 - DNA, 15 bp, Homo sapiens
ttaaaagttgaagga

SEQ ID NO: 1263611 - DNA, 15 bp, Homo sapiens
cttaaaagttgaagg

SEQ ID NO: 1263612 - DNA, 15 bp, Homo sapiens
gcttaaaagttgaag

SEQ ID NO: 1263613 - DNA, 15 bp, Homo sapiens
agcttaaaagttgaa

SEQ ID NO: 1263614 - DNA, 15 bp, Homo sapiens
gagcttaaaagttga

SEQ ID NO: 1263615 - DNA, 15 bp, Homo sapiens
ggagcttaaaagttg

SEQ ID NO: 1263616 - DNA, 15 bp, Homo sapiens
gggagcttaaaagtt

SEQ ID NO: 1263617 - DNA, 15 bp, Homo sapiens
tgggagcttaaaagt

SEQ ID NO: 1263618 - DNA, 15 bp, Homo sapiens
ctgggagcttaaaag

SEQ ID NO: 1263619 - DNA, 15 bp, Homo sapiens
cctgggagcttaaaa

SEQ ID NO: 1263620 - DNA, 15 bp, Homo sapiens
acctgggagcttaaa

SEQ ID NO: 1263621 - DNA, 15 bp, Homo sapiens
tacctgggagcttaa

SEQ ID NO: 1263622 - DNA, 15 bp, Homo sapiens
atacctgggagctta

SEQ ID NO: 1263623 - DNA, 15 bp, Homo sapiens
tatacctgggagctt

SEQ ID NO: 1263624 - DNA, 15 bp, Homo sapiens
atatacctgggagct

SEQ ID NO: 1263625 - DNA, 15 bp, Homo sapiens
catatacctgggagc

SEQ ID NO: 1263626 - DNA, 15 bp, Homo sapiens
acatatacctgggag

SEQ ID NO: 1263627 - DNA, 15 bp, Homo sapiens
cacatatacctggga

SEQ ID NO: 1263628 - DNA, 15 bp, Homo sapiens
acacatatacctggg

SEQ ID NO: 1263629 - DNA, 15 bp, Homo sapiens
tacacatatacctgg

SEQ ID NO: 1263630 - DNA, 15 bp, Homo sapiens
ctacacatatacctg

SEQ ID NO: 1263631 - DNA, 15 bp, Homo sapiens
cctacacatatacct

SEQ ID NO: 1263632 - DNA, 15 bp, Homo sapiens
tcctacacatatacc

SEQ ID NO: 1263633 - DNA, 15 bp, Homo sapiens
atcctacacatatac

SEQ ID NO: 1263634 - DNA, 15 bp, Homo sapiens
catcctacacatata

SEQ ID NO: 1263635 - DNA, 15 bp, Homo sapiens
acatcctacacatat

SEQ ID NO: 1263636 - DNA, 15 bp, Homo sapiens
cacatcctacacata

SEQ ID NO: 1263637 - DNA, 15 bp, Homo sapiens
gcacatcctacacat

SEQ ID NO: 1263638 - DNA, 15 bp, Homo sapiens
tgcacatcctacaca

SEQ ID NO: 1263639 - DNA, 15 bp, Homo sapiens
ctgcacatcctacac

SEQ ID NO: 1263640 - DNA, 15 bp, Homo sapiens
cctgcacatcctaca

SEQ ID NO: 1263641 - DNA, 15 bp, Homo sapiens
acctgcacatcctac

SEQ ID NO: 1263642 - DNA, 15 bp, Homo sapiens
aacctgcacatccta

SEQ ID NO: 1263643 - DNA, 15 bp, Homo sapiens
aaacctgcacatcct

SEQ ID NO: 1263644 - DNA, 15 bp, Homo sapiens
caaacctgcacatcc

SEQ ID NO: 1263645 - DNA, 15 bp, Homo sapiens
acaaacctgcacatc

SEQ ID NO: 1263646 - DNA, 15 bp, Homo sapiens
aacaaacctgcacat

SEQ ID NO: 1263647 - DNA, 15 bp, Homo sapiens
taacaaacctgcaca

SEQ ID NO: 1263648 - DNA, 15 bp, Homo sapiens
gtgtaacaaacctgc

SEQ ID NO: 1263649 - DNA, 15 bp, Homo sapiens
tgtgtaacaaacctg

SEQ ID NO: 1263650 - DNA, 15 bp, Homo sapiens
ctgtgtaacaaacct

SEQ ID NO: 1263651 - DNA, 15 bp, Homo sapiens
cctgtgtaacaaacc

SEQ ID NO: 1263652 - DNA, 15 bp, Homo sapiens
acctgtgtaacaaac

SEQ ID NO: 1263653 - DNA, 15 bp, Homo sapiens
tacctgtgtaacaaa

SEQ ID NO: 1263654 - DNA, 15 bp, Homo sapiens
ttacctgtgtaacaa

SEQ ID NO: 1263655 - DNA, 15 bp, Homo sapiens
tttacctgtgtaaca

SEQ ID NO: 1263656 - DNA, 15 bp, Homo sapiens
atttacctgtgtaac

SEQ ID NO: 1263657 - DNA, 15 bp, Homo sapiens
catttacctgtgtaa

SEQ ID NO: 1263658 - DNA, 15 bp, Homo sapiens
acatttacctgtgta

SEQ ID NO: 1263659 - DNA, 15 bp, Homo sapiens
cacatttacctgtgt

SEQ ID NO: 1263660 - DNA, 15 bp, Homo sapiens
acacatttacctgtg

SEQ ID NO: 1263661 - DNA, 15 bp, Homo sapiens
cacacatttacctgt

SEQ ID NO: 1263662 - DNA, 15 bp, Homo sapiens
gcacacatttacctg

SEQ ID NO: 1263663 - DNA, 15 bp, Homo sapiens
agcacacatttacct

SEQ ID NO: 1263664 - DNA, 15 bp, Homo sapiens
tagcacacatttacc

SEQ ID NO: 1263665 - DNA, 15 bp, Homo sapiens
atagcacacatttac

SEQ ID NO: 1263666 - DNA, 15 bp, Homo sapiens
catagcacacattta

SEQ ID NO: 1263667 - DNA, 15 bp, Homo sapiens
ccatagcacacattt

SEQ ID NO: 1263668 - DNA, 15 bp, Homo sapiens
accatagcacacatt

SEQ ID NO: 1263669 - DNA, 15 bp, Homo sapiens
caccatagcacacat

SEQ ID NO: 1263670 - DNA, 15 bp, Homo sapiens
ccaccatagcacaca

SEQ ID NO: 1263671 - DNA, 15 bp, Homo sapiens
accaccatagcacac

SEQ ID NO: 1263672 - DNA, 15 bp, Homo sapiens
caccaccatagcaca

SEQ ID NO: 1263673 - DNA, 15 bp, Homo sapiens
acaccaccatagcac

SEQ ID NO: 1263674 - DNA, 15 bp, Homo sapiens
cacaccaccatagca

SEQ ID NO: 1263675 - DNA, 15 bp, Homo sapiens
gcacaccaccatagc

SEQ ID NO: 1263676 - DNA, 15 bp, Homo sapiens
agcacaccaccatag

SEQ ID NO: 1263677 - DNA, 15 bp, Homo sapiens
cagcacaccaccata

SEQ ID NO: 1263678 - DNA, 15 bp, Homo sapiens
gcagcacaccaccat

SEQ ID NO: 1263679 - DNA, 15 bp, Homo sapiens
tgcagcacaccacca

SEQ ID NO: 1263680 - DNA, 15 bp, Homo sapiens
gtgcagcacaccacc

SEQ ID NO: 1263681 - DNA, 15 bp, Homo sapiens
tgtgcagcacaccac

SEQ ID NO: 1263682 - DNA, 15 bp, Homo sapiens
ctgtgcagcacacca

SEQ ID NO: 1263683 - DNA, 15 bp, Homo sapiens
tctgtgcagcacacc

SEQ ID NO: 1263684 - DNA, 15 bp, Homo sapiens
atctgtgcagcacac

SEQ ID NO: 1263685 - DNA, 15 bp, Homo sapiens
gatctgtgcagcaca

SEQ ID NO: 1263686 - DNA, 15 bp, Homo sapiens
tgatctgtgcagcac

SEQ ID NO: 1263687 - DNA, 15 bp, Homo sapiens
ttgatctgtgcagca

SEQ ID NO: 1263688 - DNA, 15 bp, Homo sapiens
gttgatctgtgcagc

SEQ ID NO: 1263689 - DNA, 15 bp, Homo sapiens
ggttgatctgtgcag

SEQ ID NO: 1263690 - DNA, 15 bp, Homo sapiens
gggttgatctgtgca

SEQ ID NO: 1263691 - DNA, 15 bp, Homo sapiens
tgggttgatctgtgc

SEQ ID NO: 1263692 - DNA, 15 bp, Homo sapiens
atgggttgatctgtg

SEQ ID NO: 1263693 - DNA, 15 bp, Homo sapiens
gatgggttgatctgt

SEQ ID NO: 1263694 - DNA, 15 bp, Homo sapiens
tgatgggttgatctg

SEQ ID NO: 1263695 - DNA, 15 bp, Homo sapiens
gtgatgggttgatct

SEQ ID NO: 1263696 - DNA, 15 bp, Homo sapiens
ggtgatgggttgatc

SEQ ID NO: 1263697 - DNA, 15 bp, Homo sapiens
tggtgatgggttgat

SEQ ID NO: 1263698 - DNA, 15 bp, Homo sapiens
atggtgatgggttga

SEQ ID NO: 1263699 - DNA, 15 bp, Homo sapiens
catggtgatgggttg

SEQ ID NO: 1263700 - DNA, 15 bp, Homo sapiens
ccatggtgatgggtt

SEQ ID NO: 1263701 - DNA, 15 bp, Homo sapiens
accatggtgatgggt

SEQ ID NO: 1263702 - DNA, 15 bp, Homo sapiens
taccatggtgatggg

SEQ ID NO: 1263703 - DNA, 15 bp, Homo sapiens
ataccatggtgatgg

SEQ ID NO: 1263704 - DNA, 15 bp, Homo sapiens
aataccatggtgatg

SEQ ID NO: 1263705 - DNA, 15 bp, Homo sapiens
taataccatggtgat

SEQ ID NO: 1263706 - DNA, 15 bp, Homo sapiens
ttaataccatggtga

SEQ ID NO: 1263707 - DNA, 15 bp, Homo sapiens
cttaataccatggtg

SEQ ID NO: 1263708 - DNA, 15 bp, Homo sapiens
gcttaataccatggt

SEQ ID NO: 1263709 - DNA, 15 bp, Homo sapiens
ggcttaataccatgg

SEQ ID NO: 1263710 - DNA, 15 bp, Homo sapiens
gggcttaataccatg

SEQ ID NO: 1263711 - DNA, 15 bp, Homo sapiens
tgggcttaataccat

SEQ ID NO: 1263712 - DNA, 15 bp, Homo sapiens
ctgggcttaatacca

SEQ ID NO: 1263713 - DNA, 15 bp, Homo sapiens
gctgggcttaatacc

SEQ ID NO: 1263714 - DNA, 15 bp, Homo sapiens
tgctgggcttaatac

SEQ ID NO: 1263715 - DNA, 15 bp, Homo sapiens
atgctgggcttaata

SEQ ID NO: 1263716 - DNA, 15 bp, Homo sapiens
gatgctgggcttaat

SEQ ID NO: 1263717 - DNA, 15 bp, Homo sapiens
ggatgctgggcttaa

SEQ ID NO: 1263718 - DNA, 15 bp, Homo sapiens
tggatgctgggctta

SEQ ID NO: 1263719 - DNA, 15 bp, Homo sapiens
atggatgctgggctt

SEQ ID NO: 1263720 - DNA, 15 bp, Homo sapiens
aatggatgctgggct

SEQ ID NO: 1263721 - DNA, 15 bp, Homo sapiens
taatggatgctgggc

SEQ ID NO: 1263722 - DNA, 15 bp, Homo sapiens
ctaatggatgctggg

SEQ ID NO: 1263723 - DNA, 15 bp, Homo sapiens
gctaatggatgctgg

SEQ ID NO: 1263724 - DNA, 15 bp, Homo sapiens
agctaatggatgctg

SEQ ID NO: 1263725 - DNA, 15 bp, Homo sapiens
gagctaatggatgct

SEQ ID NO: 1263726 - DNA, 15 bp, Homo sapiens
agagctaatggatgc

SEQ ID NO: 1263727 - DNA, 15 bp, Homo sapiens
gagagctaatggatg

SEQ ID NO: 1263728 - DNA, 15 bp, Homo sapiens
ggagagctaatggat

SEQ ID NO: 1263729 - DNA, 15 bp, Homo sapiens
aggagagctaatgga

SEQ ID NO: 1263730 - DNA, 15 bp, Homo sapiens
caggagagctaatgg

SEQ ID NO: 1263731 - DNA, 15 bp, Homo sapiens
tcaggagagctaatg

SEQ ID NO: 1263732 - DNA, 15 bp, Homo sapiens
atcaggagagctaat

SEQ ID NO: 1263733 - DNA, 15 bp, Homo sapiens
catcaggagagctaa

SEQ ID NO: 1263734 - DNA, 15 bp, Homo sapiens
gcatcaggagagcta

SEQ ID NO: 1263735 - DNA, 15 bp, Homo sapiens
agcatcaggagagct

SEQ ID NO: 1263736 - DNA, 15 bp, Homo sapiens
gagcatcaggagagc

SEQ ID NO: 1263737 - DNA, 15 bp, Homo sapiens
agagcatcaggagag

SEQ ID NO: 1263738 - DNA, 15 bp, Homo sapiens
gagagcatcaggaga

SEQ ID NO: 1263739 - DNA, 15 bp, Homo sapiens
ggagagcatcaggag

SEQ ID NO: 1263740 - DNA, 15 bp, Homo sapiens
gggagagcatcagga

SEQ ID NO: 1263741 - DNA, 15 bp, Homo sapiens
agggagagcatcagg

SEQ ID NO: 1263742 - DNA, 15 bp, Homo sapiens
gagggagagcatcag

SEQ ID NO: 1263743 - DNA, 15 bp, Homo sapiens
agagggagagcatca

SEQ ID NO: 1263744 - DNA, 15 bp, Homo sapiens
gagagggagagcatc

SEQ ID NO: 1263745 - DNA, 15 bp, Homo sapiens
ggagagggagagcat

SEQ ID NO: 1263746 - DNA, 15 bp, Homo sapiens
gggagagggagagca

SEQ ID NO: 1263747 - DNA, 15 bp, Homo sapiens
ggggagagggagagc

SEQ ID NO: 1263748 - DNA, 15 bp, Homo sapiens
tggggagagggagag

SEQ ID NO: 1263749 - DNA, 15 bp, Homo sapiens
gtggggagagggaga

SEQ ID NO: 1263750 - DNA, 15 bp, Homo sapiens
ggtggggagagggag

SEQ ID NO: 1263751 - DNA, 15 bp, Homo sapiens
gggtggggagaggga

SEQ ID NO: 1263752 - DNA, 15 bp, Homo sapiens
agggtggggagaggg

SEQ ID NO: 1263753 - DNA, 15 bp, Homo sapiens
aagggtggggagagg

SEQ ID NO: 1263754 - DNA, 15 bp, Homo sapiens
gaagggtggggagag

SEQ ID NO: 1263755 - DNA, 15 bp, Homo sapiens
ggaagggtggggaga

SEQ ID NO: 1263756 - DNA, 15 bp, Homo sapiens
gggaagggtggggag

SEQ ID NO: 1263757 - DNA, 15 bp, Homo sapiens
ggggaagggtgggga

SEQ ID NO: 1263758 - DNA, 15 bp, Homo sapiens
cggggaagggtgggg

SEQ ID NO: 1263759 - DNA, 15 bp, Homo sapiens
gcggggaagggtggg

SEQ ID NO: 1263760 - DNA, 15 bp, Homo sapiens
agcggggaagggtgg

SEQ ID NO: 1263761 - DNA, 15 bp, Homo sapiens
tagcggggaagggtg

SEQ ID NO: 1263762 - DNA, 15 bp, Homo sapiens
gtagcggggaagggt

SEQ ID NO: 1263763 - DNA, 15 bp, Homo sapiens
tgtagcggggaaggg

SEQ ID NO: 1263764 - DNA, 15 bp, Homo sapiens
ctgtagcggggaagg

SEQ ID NO: 1263765 - DNA, 15 bp, Homo sapiens
cctgtagcggggaag

SEQ ID NO: 1263766 - DNA, 15 bp, Homo sapiens
gcctgtagcggggaa

SEQ ID NO: 1263767 - DNA, 15 bp, Homo sapiens
ggcctgtagcgggga

SEQ ID NO: 1263768 - DNA, 15 bp, Homo sapiens
gggcctgtagcgggg

SEQ ID NO: 1263769 - DNA, 15 bp, Homo sapiens
ggggcctgtagcggg

SEQ ID NO: 1263770 - DNA, 15 bp, Homo sapiens
tggggcctgtagcgg

SEQ ID NO: 1263771 - DNA, 15 bp, Homo sapiens
ctggggcctgtagcg

SEQ ID NO: 1263772 - DNA, 15 bp, Homo sapiens
actggggcctgtagc

SEQ ID NO: 1263773 - DNA, 15 bp, Homo sapiens
cactggggcctgtag

SEQ ID NO: 1263774 - DNA, 15 bp, Homo sapiens
acactggggcctgta

SEQ ID NO: 1263775 - DNA, 15 bp, Homo sapiens
cacactggggcctgt

SEQ ID NO: 1263776 - DNA, 15 bp, Homo sapiens
acacactggggcctg

SEQ ID NO: 1263777 - DNA, 15 bp, Homo sapiens
cacacactggggcct

SEQ ID NO: 1263778 - DNA, 15 bp, Homo sapiens
acacacactggggcc

SEQ ID NO: 1263779 - DNA, 15 bp, Homo sapiens
aacacacactggggc

SEQ ID NO: 1263780 - DNA, 15 bp, Homo sapiens
caacacacactgggg

SEQ ID NO: 1263781 - DNA, 15 bp, Homo sapiens
acaacacacactggg

SEQ ID NO: 1263782 - DNA, 15 bp, Homo sapiens
aacaacacacactgg

SEQ ID NO: 1263783 - DNA, 15 bp, Homo sapiens
gaacaacacacactg

SEQ ID NO: 1263784 - DNA, 15 bp, Homo sapiens
ggaacaacacacact

SEQ ID NO: 1263785 - DNA, 15 bp, Homo sapiens
gggaacaacacacac

SEQ ID NO: 1263786 - DNA, 15 bp, Homo sapiens
ggggaacaacacaca

SEQ ID NO: 1263787 - DNA, 15 bp, Homo sapiens
aggggaacaacacac

SEQ ID NO: 1263788 - DNA, 15 bp, Homo sapiens
aaggggaacaacaca

SEQ ID NO: 1263789 - DNA, 15 bp, Homo sapiens
gaaggggaacaacac

SEQ ID NO: 1263790 - DNA, 15 bp, Homo sapiens
ggaaggggaacaaca

SEQ ID NO: 1263791 - DNA, 15 bp, Homo sapiens
aggaaggggaacaac

SEQ ID NO: 1263792 - DNA, 15 bp, Homo sapiens
caggaaggggaacaa

SEQ ID NO: 1263793 - DNA, 15 bp, Homo sapiens
ccaggaaggggaaca

SEQ ID NO: 1263794 - DNA, 15 bp, Homo sapiens
cccaggaaggggaac

SEQ ID NO: 1263795 - DNA, 15 bp, Homo sapiens
acccaggaaggggaa

SEQ ID NO: 1263796 - DNA, 15 bp, Homo sapiens
gacccaggaagggga

SEQ ID NO: 1263797 - DNA, 15 bp, Homo sapiens
agacccaggaagggg

SEQ ID NO: 1263798 - DNA, 15 bp, Homo sapiens
tagacccaggaaggg

SEQ ID NO: 1263799 - DNA, 15 bp, Homo sapiens
atagacccaggaagg

SEQ ID NO: 1263800 - DNA, 15 bp, Homo sapiens
aatagacccaggaag

SEQ ID NO: 1263801 - DNA, 15 bp, Homo sapiens
aaatagacccaggaa

SEQ ID NO: 1263802 - DNA, 15 bp, Homo sapiens
aaaatagacccagga

SEQ ID NO: 1263803 - DNA, 15 bp, Homo sapiens
taaaatagacccagg

SEQ ID NO: 1263804 - DNA, 15 bp, Homo sapiens
ataaaatagacccag

SEQ ID NO: 1263805 - DNA, 15 bp, Homo sapiens
cataaaatagaccca

SEQ ID NO: 1263806 - DNA, 15 bp, Homo sapiens
ccataaaatagaccc

SEQ ID NO: 1263807 - DNA, 15 bp, Homo sapiens
accataaaatagacc

SEQ ID NO: 1263808 - DNA, 15 bp, Homo sapiens
taccataaaatagac

SEQ ID NO: 1263809 - DNA, 15 bp, Homo sapiens
ataccataaaataga

SEQ ID NO: 1263810 - DNA, 15 bp, Homo sapiens
cataccataaaatag

SEQ ID NO: 1263811 - DNA, 15 bp, Homo sapiens
acataccataaaata

SEQ ID NO: 1263812 - DNA, 15 bp, Homo sapiens
tacataccataaaat

SEQ ID NO: 1263813 - DNA, 15 bp, Homo sapiens
atacataccataaaa

SEQ ID NO: 1263814 - DNA, 15 bp, Homo sapiens
catacataccataaa

SEQ ID NO: 1263815 - DNA, 15 bp, Homo sapiens
acatacataccataa

SEQ ID NO: 1263816 - DNA, 15 bp, Homo sapiens
cacatacataccata

SEQ ID NO: 1263817 - DNA, 15 bp, Homo sapiens
acacatacataccat

SEQ ID NO: 1263818 - DNA, 15 bp, Homo sapiens
cacacatacatacca

SEQ ID NO: 1263819 - DNA, 15 bp, Homo sapiens
acacacatacatacc

SEQ ID NO: 1263820 - DNA, 15 bp, Homo sapiens
tacacacatacatac

SEQ ID NO: 1263821 - DNA, 15 bp, Homo sapiens
atacacacatacata

SEQ ID NO: 1263822 - DNA, 15 bp, Homo sapiens
catacacacatacat

SEQ ID NO: 1263823 - DNA, 15 bp, Homo sapiens
acatacacacataca

SEQ ID NO: 1263824 - DNA, 15 bp, Homo sapiens
cacatacacacatac

SEQ ID NO: 1263825 - DNA, 15 bp, Homo sapiens
acacatacacacata

SEQ ID NO: 1263826 - DNA, 15 bp, Homo sapiens
cacacatacacacat

SEQ ID NO: 1263827 - DNA, 15 bp, Homo sapiens
tagatacacacacac

SEQ ID NO: 1263828 - DNA, 15 bp, Homo sapiens
atagatacacacaca

SEQ ID NO: 1263829 - DNA, 15 bp, Homo sapiens
aatagatacacacac

SEQ ID NO: 1263830 - DNA, 15 bp, Homo sapiens
aaatagatacacaca

SEQ ID NO: 1263831 - DNA, 15 bp, Homo sapiens
taaatagatacacac

SEQ ID NO: 1263832 - DNA, 15 bp, Homo sapiens
ataaatagatacaca

SEQ ID NO: 1263833 - DNA, 15 bp, Homo sapiens
cataaatagatacac

SEQ ID NO: 1263834 - DNA, 15 bp, Homo sapiens
acataaatagataca

SEQ ID NO: 1263835 - DNA, 15 bp, Homo sapiens
cacataaatagatac

SEQ ID NO: 1263836 - DNA, 15 bp, Homo sapiens
acacataaatagata

SEQ ID NO: 1263837 - DNA, 15 bp, Homo sapiens
tacacataaatagat

SEQ ID NO: 1263838 - DNA, 15 bp, Homo sapiens
atacacataaataga

SEQ ID NO: 1263839 - DNA, 15 bp, Homo sapiens
tatacacataaatag

SEQ ID NO: 1263840 - DNA, 15 bp, Homo sapiens
atatacacataaata

SEQ ID NO: 1263841 - DNA, 15 bp, Homo sapiens
tatatacacataaat

SEQ ID NO: 1263842 - DNA, 15 bp, Homo sapiens
atatatacacataaa

SEQ ID NO: 1263843 - DNA, 15 bp, Homo sapiens
aatatatacacataa

SEQ ID NO: 1263844 - DNA, 15 bp, Homo sapiens
taatatatacacata

SEQ ID NO: 1263845 - DNA, 15 bp, Homo sapiens
ataatatatacacat

SEQ ID NO: 1263846 - DNA, 15 bp, Homo sapiens
cataatatatacaca

SEQ ID NO: 1263847 - DNA, 15 bp, Homo sapiens
tcataatatatacac

SEQ ID NO: 1263848 - DNA, 15 bp, Homo sapiens
atcataatatataca

SEQ ID NO: 1263849 - DNA, 15 bp, Homo sapiens
tatcataatatatac

SEQ ID NO: 1263850 - DNA, 15 bp, Homo sapiens
atatcataatatata

SEQ ID NO: 1263851 - DNA, 15 bp, Homo sapiens
tatatcataatatat

SEQ ID NO: 1263852 - DNA, 15 bp, Homo sapiens
atatatcataatata

SEQ ID NO: 1263853 - DNA, 15 bp, Homo sapiens
gtatatatcataata

SEQ ID NO: 1263854 - DNA, 15 bp, Homo sapiens
tgtatatatcataat

SEQ ID NO: 1263855 - DNA, 15 bp, Homo sapiens
gtgtatatatcataa

SEQ ID NO: 1263856 - DNA, 15 bp, Homo sapiens
ggtgtatatatcata

SEQ ID NO: 1263857 - DNA, 15 bp, Homo sapiens
tggtgtatatatcat

SEQ ID NO: 1263858 - DNA, 15 bp, Homo sapiens
gtggtgtatatatca

SEQ ID NO: 1263859 - DNA, 15 bp, Homo sapiens
tgtggtgtatatatc

SEQ ID NO: 1263860 - DNA, 15 bp, Homo sapiens
gtgtggtgtatatat

SEQ ID NO: 1263861 - DNA, 15 bp, Homo sapiens
agtgtggtgtatata

SEQ ID NO: 1263862 - DNA, 15 bp, Homo sapiens
aagtgtggtgtatat

SEQ ID NO: 1263863 - DNA, 15 bp, Homo sapiens
aaagtgtggtgtata

SEQ ID NO: 1263864 - DNA, 15 bp, Homo sapiens
aaaagtgtggtgtat

SEQ ID NO: 1263865 - DNA, 15 bp, Homo sapiens
aaaaagtgtggtgta

SEQ ID NO: 1263866 - DNA, 15 bp, Homo sapiens
aaaaaagtgtggtgt

SEQ ID NO: 1263867 - DNA, 15 bp, Homo sapiens
gaaaaaagtgtggtg

SEQ ID NO: 1263868 - DNA, 15 bp, Homo sapiens
tgaaaaaagtgtggt

SEQ ID NO: 1263869 - DNA, 15 bp, Homo sapiens
ttgaaaaaagtgtgg

SEQ ID NO: 1263870 - DNA, 15 bp, Homo sapiens
tttgaaaaaagtgtg

SEQ ID NO: 1263871 - DNA, 15 bp, Homo sapiens
gtttgaaaaaagtgt

SEQ ID NO: 1263872 - DNA, 15 bp, Homo sapiens
agtttgaaaaaagtg

SEQ ID NO: 1263873 - DNA, 15 bp, Homo sapiens
tagtttgaaaaaagt

SEQ ID NO: 1263874 - DNA, 15 bp, Homo sapiens
atagtttgaaaaaag

SEQ ID NO: 1263875 - DNA, 15 bp, Homo sapiens
aatagtttgaaaaaa

SEQ ID NO: 1263876 - DNA, 15 bp, Homo sapiens
taatagtttgaaaaa

SEQ ID NO: 1263877 - DNA, 15 bp, Homo sapiens
ataatagtttgaaaa

SEQ ID NO: 1263878 - DNA, 15 bp, Homo sapiens
aataatagtttgaaa

SEQ ID NO: 1263879 - DNA, 15 bp, Homo sapiens
aaataatagtttgaa

SEQ ID NO: 1263880 - DNA, 15 bp, Homo sapiens
aaaataatagtttga

SEQ ID NO: 1263881 - DNA, 15 bp, Homo sapiens
taaaataatagtttg

SEQ ID NO: 1263882 - DNA, 15 bp, Homo sapiens
ctaaaataatagttt

SEQ ID NO: 1263883 - DNA, 15 bp, Homo sapiens
cctaaaataatagtt

SEQ ID NO: 1263884 - DNA, 15 bp, Homo sapiens
acctaaaataatagt

SEQ ID NO: 1263885 - DNA, 15 bp, Homo sapiens
aacctaaaataatag

SEQ ID NO: 1263886 - DNA, 15 bp, Homo sapiens
aaacctaaaataata

SEQ ID NO: 1263887 - DNA, 15 bp, Homo sapiens
taaacctaaaataat

SEQ ID NO: 1263888 - DNA, 15 bp, Homo sapiens
ctaaacctaaaataa

SEQ ID NO: 1263889 - DNA, 15 bp, Homo sapiens
cctaaacctaaaata

SEQ ID NO: 1263890 - DNA, 15 bp, Homo sapiens
ccctaaacctaaaat

SEQ ID NO: 1263891 - DNA, 15 bp, Homo sapiens
tccctaaacctaaaa

SEQ ID NO: 1263892 - DNA, 15 bp, Homo sapiens
atccctaaacctaaa

SEQ ID NO: 1263893 - DNA, 15 bp, Homo sapiens
tatccctaaacctaa

SEQ ID NO: 1263894 - DNA, 15 bp, Homo sapiens
gtatccctaaaccta

SEQ ID NO: 1263895 - DNA, 15 bp, Homo sapiens
tgtatccctaaacct

SEQ ID NO: 1263896 - DNA, 15 bp, Homo sapiens
atgtatccctaaacc

SEQ ID NO: 1263897 - DNA, 15 bp, Homo sapiens
catgtatccctaaac

SEQ ID NO: 1263898 - DNA, 15 bp, Homo sapiens
acatgtatccctaaa

SEQ ID NO: 1263899 - DNA, 15 bp, Homo sapiens
cacatgtatccctaa

SEQ ID NO: 1263900 - DNA, 15 bp, Homo sapiens
gcacatgtatcccta

SEQ ID NO: 1263901 - DNA, 15 bp, Homo sapiens
tgcacatgtatccct

SEQ ID NO: 1263902 - DNA, 15 bp, Homo sapiens
ttgcacatgtatccc

SEQ ID NO: 1263903 - DNA, 15 bp, Homo sapiens
cttgcacatgtatcc

SEQ ID NO: 1263904 - DNA, 15 bp, Homo sapiens
acttgcacatgtatc

SEQ ID NO: 1263905 - DNA, 15 bp, Homo sapiens
aacttgcacatgtat

SEQ ID NO: 1263906 - DNA, 15 bp, Homo sapiens
aaacttgcacatgta

SEQ ID NO: 1263907 - DNA, 15 bp, Homo sapiens
caaacttgcacatgt

SEQ ID NO: 1263908 - DNA, 15 bp, Homo sapiens
acaaacttgcacatg

SEQ ID NO: 1263909 - DNA, 15 bp, Homo sapiens
aacaaacttgcacat

SEQ ID NO: 1263910 - DNA, 15 bp, Homo sapiens
taacaaacttgcaca

SEQ ID NO: 1263911 - DNA, 15 bp, Homo sapiens
ataacaaacttgcac

SEQ ID NO: 1263912 - DNA, 15 bp, Homo sapiens
tataacaaacttgca

SEQ ID NO: 1263913 - DNA, 15 bp, Homo sapiens
atataacaaacttgc

SEQ ID NO: 1263914 - DNA, 15 bp, Homo sapiens
tatataacaaacttg

SEQ ID NO: 1263915 - DNA, 15 bp, Homo sapiens
ctatataacaaactt

SEQ ID NO: 1263916 - DNA, 15 bp, Homo sapiens
cctatataacaaact

SEQ ID NO: 1263917 - DNA, 15 bp, Homo sapiens
acctatataacaaac

SEQ ID NO: 1263918 - DNA, 15 bp, Homo sapiens
tacctatataacaaa

SEQ ID NO: 1263919 - DNA, 15 bp, Homo sapiens
ttacctatataacaa

SEQ ID NO: 1263920 - DNA, 15 bp, Homo sapiens
tttacctatataaca

SEQ ID NO: 1263921 - DNA, 15 bp, Homo sapiens
gtttacctatataac

SEQ ID NO: 1263922 - DNA, 15 bp, Homo sapiens
agtttacctatataa

SEQ ID NO: 1263923 - DNA, 15 bp, Homo sapiens
cagtttacctatata

SEQ ID NO: 1263924 - DNA, 15 bp, Homo sapiens
acagtttacctatat

SEQ ID NO: 1263925 - DNA, 15 bp, Homo sapiens
cacagtttacctata

SEQ ID NO: 1263926 - DNA, 15 bp, Homo sapiens
acacagtttacctat

SEQ ID NO: 1263927 - DNA, 15 bp, Homo sapiens
cacacagtttaccta

SEQ ID NO: 1263928 - DNA, 15 bp, Homo sapiens
acacacagtttacct

SEQ ID NO: 1263929 - DNA, 15 bp, Homo sapiens
gacacacagtttacc

SEQ ID NO: 1263930 - DNA, 15 bp, Homo sapiens
agacacacagtttac

SEQ ID NO: 1263931 - DNA, 15 bp, Homo sapiens
gagacacacagttta

SEQ ID NO: 1263932 - DNA, 15 bp, Homo sapiens
agagacacacagttt

SEQ ID NO: 1263933 - DNA, 15 bp, Homo sapiens
cagagacacacagtt

SEQ ID NO: 1263934 - DNA, 15 bp, Homo sapiens
ccagagacacacagt

SEQ ID NO: 1263935 - DNA, 15 bp, Homo sapiens
cccagagacacacag

SEQ ID NO: 1263936 - DNA, 15 bp, Homo sapiens
ccccagagacacaca

SEQ ID NO: 1263937 - DNA, 15 bp, Homo sapiens
accccagagacacac

SEQ ID NO: 1263938 - DNA, 15 bp, Homo sapiens
aaccccagagacaca

SEQ ID NO: 1263939 - DNA, 15 bp, Homo sapiens
aaaccccagagacac

SEQ ID NO: 1263940 - DNA, 15 bp, Homo sapiens
caaaccccagagaca

SEQ ID NO: 1263941 - DNA, 15 bp, Homo sapiens
ccaaaccccagagac

SEQ ID NO: 1263942 - DNA, 15 bp, Homo sapiens
accaaaccccagaga

SEQ ID NO: 1263943 - DNA, 15 bp, Homo sapiens
caccaaaccccagag

SEQ ID NO: 1263944 - DNA, 15 bp, Homo sapiens
acaccaaaccccaga

SEQ ID NO: 1263945 - DNA, 15 bp, Homo sapiens
cacaccaaaccccag

SEQ ID NO: 1263946 - DNA, 15 bp, Homo sapiens
acacaccaaacccca

SEQ ID NO: 1263947 - DNA, 15 bp, Homo sapiens
tacacaccaaacccc

SEQ ID NO: 1263948 - DNA, 15 bp, Homo sapiens
gtacacaccaaaccc

SEQ ID NO: 1263949 - DNA, 15 bp, Homo sapiens
tgtacacaccaaacc

SEQ ID NO: 1263950 - DNA, 15 bp, Homo sapiens
ctgtacacaccaaac

SEQ ID NO: 1263951 - DNA, 15 bp, Homo sapiens
tctgtacacaccaaa

SEQ ID NO: 1263952 - DNA, 15 bp, Homo sapiens
atctgtacacaccaa

SEQ ID NO: 1263953 - DNA, 15 bp, Homo sapiens
aatctgtacacacca

SEQ ID NO: 1263954 - DNA, 15 bp, Homo sapiens
aaatctgtacacacc

SEQ ID NO: 1263955 - DNA, 15 bp, Homo sapiens
aaaatctgtacacac

SEQ ID NO: 1263956 - DNA, 15 bp, Homo sapiens
aaaaatctgtacaca

SEQ ID NO: 1263957 - DNA, 15 bp, Homo sapiens
aaaaaatctgtacac

SEQ ID NO: 1263958 - DNA, 15 bp, Homo sapiens
gaaaaaatctgtaca

SEQ ID NO: 1263959 - DNA, 15 bp, Homo sapiens
tgaaaaaatctgtac

SEQ ID NO: 1263960 - DNA, 15 bp, Homo sapiens
gtgaaaaaatctgta

SEQ ID NO: 1263961 - DNA, 15 bp, Homo sapiens
ggtgaaaaaatctgt

SEQ ID NO: 1263962 - DNA, 15 bp, Homo sapiens
tggtgaaaaaatctg

SEQ ID NO: 1263963 - DNA, 15 bp, Homo sapiens
gtggtgaaaaaatct

SEQ ID NO: 1263964 - DNA, 15 bp, Homo sapiens
ggtggtgaaaaaatc

SEQ ID NO: 1263965 - DNA, 15 bp, Homo sapiens
gggtggtgaaaaaat

SEQ ID NO: 1263966 - DNA, 15 bp, Homo sapiens
tgggtggtgaaaaaa

SEQ ID NO: 1263967 - DNA, 15 bp, Homo sapiens
ctgggtggtgaaaaa

SEQ ID NO: 1263968 - DNA, 15 bp, Homo sapiens
cctgggtggtgaaaa

SEQ ID NO: 1263969 - DNA, 15 bp, Homo sapiens
acctgggtggtgaaa

SEQ ID NO: 1263970 - DNA, 15 bp, Homo sapiens
tacctgggtggtgaa

SEQ ID NO: 1263971 - DNA, 15 bp, Homo sapiens
ttacctgggtggtga

SEQ ID NO: 1263972 - DNA, 15 bp, Homo sapiens
gttacctgggtggtg

SEQ ID NO: 1263973 - DNA, 15 bp, Homo sapiens
tgttacctgggtggt

SEQ ID NO: 1263974 - DNA, 15 bp, Homo sapiens
ttgttacctgggtgg

SEQ ID NO: 1263975 - DNA, 15 bp, Homo sapiens
cttgttacctgggtg

SEQ ID NO: 1263976 - DNA, 15 bp, Homo sapiens
acttgttacctgggt

SEQ ID NO: 1263977 - DNA, 15 bp, Homo sapiens
cacttgttacctggg

SEQ ID NO: 1263978 - DNA, 15 bp, Homo sapiens
acacttgttacctgg

SEQ ID NO: 1263979 - DNA, 15 bp, Homo sapiens
tacacttgttacctg

SEQ ID NO: 1263980 - DNA, 15 bp, Homo sapiens
ctacacttgttacct

SEQ ID NO: 1263981 - DNA, 15 bp, Homo sapiens
actacacttgttacc

SEQ ID NO: 1263982 - DNA, 15 bp, Homo sapiens
tactacacttgttac

SEQ ID NO: 1263983 - DNA, 15 bp, Homo sapiens
gtactacacttgtta

SEQ ID NO: 1263984 - DNA, 15 bp, Homo sapiens
ggtactacacttgtt

SEQ ID NO: 1263985 - DNA, 15 bp, Homo sapiens
aggtactacacttgt

SEQ ID NO: 1263986 - DNA, 15 bp, Homo sapiens
caggtactacacttg

SEQ ID NO: 1263987 - DNA, 15 bp, Homo sapiens
tcaggtactacactt

SEQ ID NO: 1263988 - DNA, 15 bp, Homo sapiens
atcaggtactacact

SEQ ID NO: 1263989 - DNA, 15 bp, Homo sapiens
tatcaggtactacac

SEQ ID NO: 1263990 - DNA, 15 bp, Homo sapiens
ctatcaggtactaca

SEQ ID NO: 1263991 - DNA, 15 bp, Homo sapiens
cctatcaggtactac

SEQ ID NO: 1263992 - DNA, 15 bp, Homo sapiens
acctatcaggtacta

SEQ ID NO: 1263993 - DNA, 15 bp, Homo sapiens
tacctatcaggtact

SEQ ID NO: 1263994 - DNA, 15 bp, Homo sapiens
ctacctatcaggtac

SEQ ID NO: 1263995 - DNA, 15 bp, Homo sapiens
actacctatcaggta

SEQ ID NO: 1263996 - DNA, 15 bp, Homo sapiens
aactacctatcaggt

SEQ ID NO: 1263997 - DNA, 15 bp, Homo sapiens
aaactacctatcagg

SEQ ID NO: 1263998 - DNA, 15 bp, Homo sapiens
aaaactacctatcag

SEQ ID NO: 1263999 - DNA, 15 bp, Homo sapiens
aaaaactacctatca

SEQ ID NO: 1264000 - DNA, 15 bp, Homo sapiens
aaaaaactacctatc

SEQ ID NO: 1264001 - DNA, 15 bp, Homo sapiens
caaaaaactacctat

SEQ ID NO: 1264002 - DNA, 15 bp, Homo sapiens
tcaaaaaactaccta

SEQ ID NO: 1264003 - DNA, 15 bp, Homo sapiens
atcaaaaaactacct

SEQ ID NO: 1264004 - DNA, 15 bp, Homo sapiens
gatcaaaaaactacc

SEQ ID NO: 1264005 - DNA, 15 bp, Homo sapiens
agatcaaaaaactac

SEQ ID NO: 1264006 - DNA, 15 bp, Homo sapiens
aagatcaaaaaacta

SEQ ID NO: 1264007 - DNA, 15 bp, Homo sapiens
gaagatcaaaaaact

SEQ ID NO: 1264008 - DNA, 15 bp, Homo sapiens
agaagatcaaaaaac

SEQ ID NO: 1264009 - DNA, 15 bp, Homo sapiens
cagaagatcaaaaaa

SEQ ID NO: 1264010 - DNA, 15 bp, Homo sapiens
acagaagatcaaaaa

SEQ ID NO: 1264011 - DNA, 15 bp, Homo sapiens
gacagaagatcaaaa

SEQ ID NO: 1264012 - DNA, 15 bp, Homo sapiens
ggacagaagatcaaa

SEQ ID NO: 1264013 - DNA, 15 bp, Homo sapiens
aggacagaagatcaa

SEQ ID NO: 1264014 - DNA, 15 bp, Homo sapiens
gaggacagaagatca

SEQ ID NO: 1264015 - DNA, 15 bp, Homo sapiens
agaggacagaagatc

SEQ ID NO: 1264016 - DNA, 15 bp, Homo sapiens
gagaggacagaagat

SEQ ID NO: 1264017 - DNA, 15 bp, Homo sapiens
tgagaggacagaaga

SEQ ID NO: 1264018 - DNA, 15 bp, Homo sapiens
gtgagaggacagaag

SEQ ID NO: 1264019 - DNA, 15 bp, Homo sapiens
ggtgagaggacagaa

SEQ ID NO: 1264020 - DNA, 15 bp, Homo sapiens
gggtgagaggacaga

SEQ ID NO: 1264021 - DNA, 15 bp, Homo sapiens
agggtgagaggacag

SEQ ID NO: 1264022 - DNA, 15 bp, Homo sapiens
tagggtgagaggaca

SEQ ID NO: 1264023 - DNA, 15 bp, Homo sapiens
gtagggtgagaggac

SEQ ID NO: 1264024 - DNA, 15 bp, Homo sapiens
tgtagggtgagagga

SEQ ID NO: 1264025 - DNA, 15 bp, Homo sapiens
gtgtagggtgagagg

SEQ ID NO: 1264026 - DNA, 15 bp, Homo sapiens
ggtgtagggtgagag

SEQ ID NO: 1264027 - DNA, 15 bp, Homo sapiens
gggtgtagggtgaga

SEQ ID NO: 1264028 - DNA, 15 bp, Homo sapiens
agggtgtagggtgag

SEQ ID NO: 1264029 - DNA, 15 bp, Homo sapiens
gagggtgtagggtga

SEQ ID NO: 1264030 - DNA, 15 bp, Homo sapiens
tgagggtgtagggtg

SEQ ID NO: 1264031 - DNA, 15 bp, Homo sapiens
ttgagggtgtagggt

SEQ ID NO: 1264032 - DNA, 15 bp, Homo sapiens
cttgagggtgtaggg

SEQ ID NO: 1264033 - DNA, 15 bp, Homo sapiens
acttgagggtgtagg

SEQ ID NO: 1264034 - DNA, 15 bp, Homo sapiens
tacttgagggtgtag

SEQ ID NO: 1264035 - DNA, 15 bp, Homo sapiens
ttacttgagggtgta

SEQ ID NO: 1264036 - DNA, 15 bp, Homo sapiens
attacttgagggtgt

SEQ ID NO: 1264037 - DNA, 15 bp, Homo sapiens
gattacttgagggtg

SEQ ID NO: 1264038 - DNA, 15 bp, Homo sapiens
ggattacttgagggt

SEQ ID NO: 1264039 - DNA, 15 bp, Homo sapiens
gggattacttgaggg

SEQ ID NO: 1264040 - DNA, 15 bp, Homo sapiens
tgggggattacttga

SEQ ID NO: 1264041 - DNA, 15 bp, Homo sapiens
ctgggggattacttg

SEQ ID NO: 1264042 - DNA, 15 bp, Homo sapiens
actgggggattactt

SEQ ID NO: 1264043 - DNA, 15 bp, Homo sapiens
cactgggggattact

SEQ ID NO: 1264044 - DNA, 15 bp, Homo sapiens
acactgggggattac

SEQ ID NO: 1264045 - DNA, 15 bp, Homo sapiens
cacactgggggatta

SEQ ID NO: 1264046 - DNA, 15 bp, Homo sapiens
acacactgggggatt

SEQ ID NO: 1264047 - DNA, 15 bp, Homo sapiens
cacacactgggggat

SEQ ID NO: 1264048 - DNA, 15 bp, Homo sapiens
acacacactggggga

SEQ ID NO: 1264049 - DNA, 15 bp, Homo sapiens
aacacacactggggg

SEQ ID NO: 1264050 - DNA, 15 bp, Homo sapiens
gaggggaacaacaca

SEQ ID NO: 1264051 - DNA, 15 bp, Homo sapiens
agaggggaacaacac

SEQ ID NO: 1264052 - DNA, 15 bp, Homo sapiens
aagaggggaacaaca

SEQ ID NO: 1264053 - DNA, 15 bp, Homo sapiens
gaagaggggaacaac

SEQ ID NO: 1264054 - DNA, 15 bp, Homo sapiens
tgaagaggggaacaa

SEQ ID NO: 1264055 - DNA, 15 bp, Homo sapiens
atgaagaggggaaca

SEQ ID NO: 1264056 - DNA, 15 bp, Homo sapiens
catgaagaggggaac

SEQ ID NO: 1264057 - DNA, 15 bp, Homo sapiens
acatgaagaggggaa

SEQ ID NO: 1264058 - DNA, 15 bp, Homo sapiens
gacatgaagagggga

SEQ ID NO: 1264059 - DNA, 15 bp, Homo sapiens
ggacatgaagagggg

SEQ ID NO: 1264060 - DNA, 15 bp, Homo sapiens
tggacatgaagaggg

SEQ ID NO: 1264061 - DNA, 15 bp, Homo sapiens
atggacatgaagagg

SEQ ID NO: 1264062 - DNA, 15 bp, Homo sapiens
catggacatgaagag

SEQ ID NO: 1264063 - DNA, 15 bp, Homo sapiens
acatggacatgaaga

SEQ ID NO: 1264064 - DNA, 15 bp, Homo sapiens
cacatggacatgaag

SEQ ID NO: 1264065 - DNA, 15 bp, Homo sapiens
acacatggacatgaa

SEQ ID NO: 1264066 - DNA, 15 bp, Homo sapiens
aacacatggacatga

SEQ ID NO: 1264067 - DNA, 15 bp, Homo sapiens
gaacacatggacatg

SEQ ID NO: 1264068 - DNA, 15 bp, Homo sapiens
agaacacatggacat

SEQ ID NO: 1264069 - DNA, 15 bp, Homo sapiens
aaacaatgagaacac

SEQ ID NO: 1264070 - DNA, 15 bp, Homo sapiens
ctaaacaatgagaac

SEQ ID NO: 1264071 - DNA, 15 bp, Homo sapiens
gctaaacaatgagaa

SEQ ID NO: 1264072 - DNA, 15 bp, Homo sapiens
agctaaacaatgaga

SEQ ID NO: 1264073 - DNA, 15 bp, Homo sapiens
gagctaaacaatgag

SEQ ID NO: 1264074 - DNA, 15 bp, Homo sapiens
ggagctaaacaatga

SEQ ID NO: 1264075 - DNA, 15 bp, Homo sapiens
gggagctaaacaatg

SEQ ID NO: 1264076 - DNA, 15 bp, Homo sapiens
tgggagctaaacaat

SEQ ID NO: 1264077 - DNA, 15 bp, Homo sapiens
gtgggagctaaacaa

SEQ ID NO: 1264078 - DNA, 15 bp, Homo sapiens
agtgggagctaaaca

SEQ ID NO: 1264079 - DNA, 15 bp, Homo sapiens
aagtgggagctaaac

SEQ ID NO: 1264080 - DNA, 15 bp, Homo sapiens
taagtgggagctaaa

SEQ ID NO: 1264081 - DNA, 15 bp, Homo sapiens
ataagtgggagctaa

SEQ ID NO: 1264082 - DNA, 15 bp, Homo sapiens
tataagtgggagcta

SEQ ID NO: 1264083 - DNA, 15 bp, Homo sapiens
ttataagtgggagct

SEQ ID NO: 1264084 - DNA, 15 bp, Homo sapiens
cttataagtgggagc

SEQ ID NO: 1264085 - DNA, 15 bp, Homo sapiens
acttataagtgggag

SEQ ID NO: 1264086 - DNA, 15 bp, Homo sapiens
cacttataagtggga

SEQ ID NO: 1264087 - DNA, 15 bp, Homo sapiens
tcacttataagtggg

SEQ ID NO: 1264088 - DNA, 15 bp, Homo sapiens
ctcacttataagtgg

SEQ ID NO: 1264089 - DNA, 15 bp, Homo sapiens
tctcacttataagtg

SEQ ID NO: 1264090 - DNA, 15 bp, Homo sapiens
ttctcacttataagt

SEQ ID NO: 1264091 - DNA, 15 bp, Homo sapiens
gttctcacttataag

SEQ ID NO: 1264092 - DNA, 15 bp, Homo sapiens
tgttctcacttataa

SEQ ID NO: 1264093 - DNA, 15 bp, Homo sapiens
atgttctcacttata

SEQ ID NO: 1264094 - DNA, 15 bp, Homo sapiens
catgttctcacttat

SEQ ID NO: 1264095 - DNA, 15 bp, Homo sapiens
gcatgttctcactta

SEQ ID NO: 1264096 - DNA, 15 bp, Homo sapiens
tgcatgttctcactt

SEQ ID NO: 1264097 - DNA, 15 bp, Homo sapiens
ctgcatgttctcact

SEQ ID NO: 1264098 - DNA, 15 bp, Homo sapiens
actgcatgttctcac

SEQ ID NO: 1264099 - DNA, 15 bp, Homo sapiens
cactgcatgttctca

SEQ ID NO: 1264100 - DNA, 15 bp, Homo sapiens
acactgcatgttctc

SEQ ID NO: 1264101 - DNA, 15 bp, Homo sapiens
aacactgcatgttct

SEQ ID NO: 1264102 - DNA, 15 bp, Homo sapiens
aaacactgcatgttc

SEQ ID NO: 1264103 - DNA, 15 bp, Homo sapiens
caaacactgcatgtt

SEQ ID NO: 1264104 - DNA, 15 bp, Homo sapiens
ccaaacactgcatgt

SEQ ID NO: 1264105 - DNA, 15 bp, Homo sapiens
accaaacactgcatg

SEQ ID NO: 1264106 - DNA, 15 bp, Homo sapiens
aaccaaacactgcat

SEQ ID NO: 1264107 - DNA, 15 bp, Homo sapiens
aaaccaaacactgca

SEQ ID NO: 1264108 - DNA, 15 bp, Homo sapiens
aaaaccaaacactgc

SEQ ID NO: 1264109 - DNA, 15 bp, Homo sapiens
gaaaaccaaacactg

SEQ ID NO: 1264110 - DNA, 15 bp, Homo sapiens
agaaaaccaaacact

SEQ ID NO: 1264111 - DNA, 15 bp, Homo sapiens
cagaaaaccaaacac

SEQ ID NO: 1264112 - DNA, 15 bp, Homo sapiens
acagaaaaccaaaca

SEQ ID NO: 1264113 - DNA, 15 bp, Homo sapiens
gcaggaacagaaaac

SEQ ID NO: 1264114 - DNA, 15 bp, Homo sapiens
cgcaggaacagaaaa

SEQ ID NO: 1264115 - DNA, 15 bp, Homo sapiens
acgcaggaacagaaa

SEQ ID NO: 1264116 - DNA, 15 bp, Homo sapiens
aacgcaggaacagaa

SEQ ID NO: 1264117 - DNA, 15 bp, Homo sapiens
taacgcaggaacaga

SEQ ID NO: 1264118 - DNA, 15 bp, Homo sapiens
ctaacgcaggaacag

SEQ ID NO: 1264119 - DNA, 15 bp, Homo sapiens
actaacgcaggaaca

SEQ ID NO: 1264120 - DNA, 15 bp, Homo sapiens
aactaacgcaggaac

SEQ ID NO: 1264121 - DNA, 15 bp, Homo sapiens
aaactaacgcaggaa

SEQ ID NO: 1264122 - DNA, 15 bp, Homo sapiens
caaactaacgcagga

SEQ ID NO: 1264123 - DNA, 15 bp, Homo sapiens
gcaaactaacgcagg

SEQ ID NO: 1264124 - DNA, 15 bp, Homo sapiens
agcaaactaacgcag

SEQ ID NO: 1264125 - DNA, 15 bp, Homo sapiens
cagcaaactaacgca

SEQ ID NO: 1264126 - DNA, 15 bp, Homo sapiens
tcagcaaactaacgc

SEQ ID NO: 1264127 - DNA, 15 bp, Homo sapiens
ctcagcaaactaacg

SEQ ID NO: 1264128 - DNA, 15 bp, Homo sapiens
cctcagcaaactaac

SEQ ID NO: 1264129 - DNA, 15 bp, Homo sapiens
tcctcagcaaactaa

SEQ ID NO: 1264130 - DNA, 15 bp, Homo sapiens
atcctcagcaaacta

SEQ ID NO: 1264131 - DNA, 15 bp, Homo sapiens
tatcctcagcaaact

SEQ ID NO: 1264132 - DNA, 15 bp, Homo sapiens
ttatcctcagcaaac

SEQ ID NO: 1264133 - DNA, 15 bp, Homo sapiens
tttatcctcagcaaa

SEQ ID NO: 1264134 - DNA, 15 bp, Homo sapiens
ctttatcctcagcaa

SEQ ID NO: 1264135 - DNA, 15 bp, Homo sapiens
cctttatcctcagca

SEQ ID NO: 1264136 - DNA, 15 bp, Homo sapiens
gcctttatcctcagc

SEQ ID NO: 1264137 - DNA, 15 bp, Homo sapiens
agcctttatcctcag

SEQ ID NO: 1264138 - DNA, 15 bp, Homo sapiens
aagcctttatcctca

SEQ ID NO: 1264139 - DNA, 15 bp, Homo sapiens
gaagcctttatcctc

SEQ ID NO: 1264140 - DNA, 15 bp, Homo sapiens
agaagcctttatcct

SEQ ID NO: 1264141 - DNA, 15 bp, Homo sapiens
cagaagcctttatcc

SEQ ID NO: 1264142 - DNA, 15 bp, Homo sapiens
ccagaagcctttatc

SEQ ID NO: 1264143 - DNA, 15 bp, Homo sapiens
gccagaagcctttat

SEQ ID NO: 1264144 - DNA, 15 bp, Homo sapiens
agccagaagccttta

SEQ ID NO: 1264145 - DNA, 15 bp, Homo sapiens
gagccagaagccttt

SEQ ID NO: 1264146 - DNA, 15 bp, Homo sapiens
ggagccagaagcctt

SEQ ID NO: 1264147 - DNA, 15 bp, Homo sapiens
tggagccagaagcct

SEQ ID NO: 1264148 - DNA, 15 bp, Homo sapiens
atggagccagaagcc

SEQ ID NO: 1264149 - DNA, 15 bp, Homo sapiens
gatggagccagaagc

SEQ ID NO: 1264150 - DNA, 15 bp, Homo sapiens
ggatggagccagaag

SEQ ID NO: 1264151 - DNA, 15 bp, Homo sapiens
tggatggagccagaa

SEQ ID NO: 1264152 - DNA, 15 bp, Homo sapiens
atggatggagccaga

SEQ ID NO: 1264153 - DNA, 15 bp, Homo sapiens
catggatggagccag

SEQ ID NO: 1264154 - DNA, 15 bp, Homo sapiens
acatggatggagcca

SEQ ID NO: 1264155 - DNA, 15 bp, Homo sapiens
aacatggatggagcc

SEQ ID NO: 1264156 - DNA, 15 bp, Homo sapiens
gaacatggatggagc

SEQ ID NO: 1264157 - DNA, 15 bp, Homo sapiens
ggaacatggatggag

SEQ ID NO: 1264158 - DNA, 15 bp, Homo sapiens
aggaacatggatgga

SEQ ID NO: 1264159 - DNA, 15 bp, Homo sapiens
caggaacatggatgg

SEQ ID NO: 1264160 - DNA, 15 bp, Homo sapiens
gcaggaacatggatg

SEQ ID NO: 1264161 - DNA, 15 bp, Homo sapiens
tgcaggaacatggat

SEQ ID NO: 1264162 - DNA, 15 bp, Homo sapiens
ttgcaggaacatgga

SEQ ID NO: 1264163 - DNA, 15 bp, Homo sapiens
tttgcaggaacatgg

SEQ ID NO: 1264164 - DNA, 15 bp, Homo sapiens
ctttgcaggaacatg

SEQ ID NO: 1264165 - DNA, 15 bp, Homo sapiens
cctttgcaggaacat

SEQ ID NO: 1264166 - DNA, 15 bp, Homo sapiens
tcctttgcaggaaca

SEQ ID NO: 1264167 - DNA, 15 bp, Homo sapiens
gtcctttgcaggaac

SEQ ID NO: 1264168 - DNA, 15 bp, Homo sapiens
tgtcctttgcaggaa

SEQ ID NO: 1264169 - DNA, 15 bp, Homo sapiens
atgtcctttgcagga

SEQ ID NO: 1264170 - DNA, 15 bp, Homo sapiens
catgtcctttgcagg

SEQ ID NO: 1264171 - DNA, 15 bp, Homo sapiens
tcatgtcctttgcag

SEQ ID NO: 1264172 - DNA, 15 bp, Homo sapiens
atcatgtcctttgca

SEQ ID NO: 1264173 - DNA, 15 bp, Homo sapiens
gatcatgtcctttgc

SEQ ID NO: 1264174 - DNA, 15 bp, Homo sapiens
agatcatgtcctttg

SEQ ID NO: 1264175 - DNA, 15 bp, Homo sapiens
gagatcatgtccttt

SEQ ID NO: 1264176 - DNA, 15 bp, Homo sapiens
tgagatcatgtcctt

SEQ ID NO: 1264177 - DNA, 15 bp, Homo sapiens
atgagatcatgtcct

SEQ ID NO: 1264178 - DNA, 15 bp, Homo sapiens
aatgagatcatgtcc

SEQ ID NO: 1264179 - DNA, 15 bp, Homo sapiens
gaatgagatcatgtc

SEQ ID NO: 1264180 - DNA, 15 bp, Homo sapiens
ggaatgagatcatgt

SEQ ID NO: 1264181 - DNA, 15 bp, Homo sapiens
aggaatgagatcatg

SEQ ID NO: 1264182 - DNA, 15 bp, Homo sapiens
aaggaatgagatcat

SEQ ID NO: 1264183 - DNA, 15 bp, Homo sapiens
aaaggaatgagatca

SEQ ID NO: 1264184 - DNA, 15 bp, Homo sapiens
aaaaggaatgagatc

SEQ ID NO: 1264185 - DNA, 15 bp, Homo sapiens
aaaaaggaatgagat

SEQ ID NO: 1264186 - DNA, 15 bp, Homo sapiens
taaaaaggaatgaga

SEQ ID NO: 1264187 - DNA, 15 bp, Homo sapiens
ataaaaaggaatgag

SEQ ID NO: 1264188 - DNA, 15 bp, Homo sapiens
cataaaaaggaatga

SEQ ID NO: 1264189 - DNA, 15 bp, Homo sapiens
ccataaaaaggaatg

SEQ ID NO: 1264190 - DNA, 15 bp, Homo sapiens
gccataaaaaggaat

SEQ ID NO: 1264191 - DNA, 15 bp, Homo sapiens
agccataaaaaggaa

SEQ ID NO: 1264192 - DNA, 15 bp, Homo sapiens
cagccataaaaagga

SEQ ID NO: 1264193 - DNA, 15 bp, Homo sapiens
gcagccataaaaagg

SEQ ID NO: 1264194 - DNA, 15 bp, Homo sapiens
tgcagccataaaaag

SEQ ID NO: 1264195 - DNA, 15 bp, Homo sapiens
tcctgcagccataaa

SEQ ID NO: 1264196 - DNA, 15 bp, Homo sapiens
ttcctgcagccataa

SEQ ID NO: 1264197 - DNA, 15 bp, Homo sapiens
tttcctgcagccata

SEQ ID NO: 1264198 - DNA, 15 bp, Homo sapiens
ttttcctgcagccat

SEQ ID NO: 1264199 - DNA, 15 bp, Homo sapiens
attttcctgcagcca

SEQ ID NO: 1264200 - DNA, 15 bp, Homo sapiens
tattttcctgcagcc

SEQ ID NO: 1264201 - DNA, 15 bp, Homo sapiens
atattttcctgcagc

SEQ ID NO: 1264202 - DNA, 15 bp, Homo sapiens
tatattttcctgcag

SEQ ID NO: 1264203 - DNA, 15 bp, Homo sapiens
atatattttcctgca

SEQ ID NO: 1264204 - DNA, 15 bp, Homo sapiens
aatatattttcctgc

SEQ ID NO: 1264205 - DNA, 15 bp, Homo sapiens
aaatatattttcctg

SEQ ID NO: 1264206 - DNA, 15 bp, Homo sapiens
aaaatatattttcct

SEQ ID NO: 1264207 - DNA, 15 bp, Homo sapiens
taaaatatattttcc

SEQ ID NO: 1264208 - DNA, 15 bp, Homo sapiens
gtaaaatatattttc

SEQ ID NO: 1264209 - DNA, 15 bp, Homo sapiens
tgtaaaatatatttt

SEQ ID NO: 1264210 - DNA, 15 bp, Homo sapiens
atgtaaaatatattt

SEQ ID NO: 1264211 - DNA, 15 bp, Homo sapiens
tatgtaaaatatatt

SEQ ID NO: 1264212 - DNA, 15 bp, Homo sapiens
gtatgtaaaatatat

SEQ ID NO: 1264213 - DNA, 15 bp, Homo sapiens
agtatgtaaaatata

SEQ ID NO: 1264214 - DNA, 15 bp, Homo sapiens
tagtatgtaaaatat

SEQ ID NO: 1264215 - DNA, 15 bp, Homo sapiens
ctagtatgtaaaata

SEQ ID NO: 1264216 - DNA, 15 bp, Homo sapiens
actagtatgtaaaat

SEQ ID NO: 1264217 - DNA, 15 bp, Homo sapiens
cactagtatgtaaaa

SEQ ID NO: 1264218 - DNA, 15 bp, Homo sapiens
tcactagtatgtaaa

SEQ ID NO: 1264219 - DNA, 15 bp, Homo sapiens
ttcactagtatgtaa

SEQ ID NO: 1264220 - DNA, 15 bp, Homo sapiens
gttcactagtatgta

SEQ ID NO: 1264221 - DNA, 15 bp, Homo sapiens
tgttcactagtatgt

SEQ ID NO: 1264222 - DNA, 15 bp, Homo sapiens
atgttcactagtatg

SEQ ID NO: 1264223 - DNA, 15 bp, Homo sapiens
tatgttcactagtat

SEQ ID NO: 1264224 - DNA, 15 bp, Homo sapiens
ctatgttcactagta

SEQ ID NO: 1264225 - DNA, 15 bp, Homo sapiens
actatgttcactagt

SEQ ID NO: 1264226 - DNA, 15 bp, Homo sapiens
aactatgttcactag

SEQ ID NO: 1264227 - DNA, 15 bp, Homo sapiens
taactatgttcacta

SEQ ID NO: 1264228 - DNA, 15 bp, Homo sapiens
ttaactatgttcact

SEQ ID NO: 1264229 - DNA, 15 bp, Homo sapiens
tttaactatgttcac

SEQ ID NO: 1264230 - DNA, 15 bp, Homo sapiens
atttaactatgttca

SEQ ID NO: 1264231 - DNA, 15 bp, Homo sapiens
aatttaactatgttc

SEQ ID NO: 1264232 - DNA, 15 bp, Homo sapiens
taatttaactatgtt

SEQ ID NO: 1264233 - DNA, 15 bp, Homo sapiens
ttaatttaactatgt

SEQ ID NO: 1264234 - DNA, 15 bp, Homo sapiens
attaatttaactatg

SEQ ID NO: 1264235 - DNA, 15 bp, Homo sapiens
gattaatttaactat

SEQ ID NO: 1264236 - DNA, 15 bp, Homo sapiens
ggattaatttaacta

SEQ ID NO: 1264237 - DNA, 15 bp, Homo sapiens
tggattaatttaact

SEQ ID NO: 1264238 - DNA, 15 bp, Homo sapiens
atggattaatttaac

SEQ ID NO: 1264239 - DNA, 15 bp, Homo sapiens
catggattaatttaa

SEQ ID NO: 1264240 - DNA, 15 bp, Homo sapiens
ccatggattaattta

SEQ ID NO: 1264241 - DNA, 15 bp, Homo sapiens
accatggattaattt

SEQ ID NO: 1264242 - DNA, 15 bp, Homo sapiens
gaccatggattaatt

SEQ ID NO: 1264243 - DNA, 15 bp, Homo sapiens
tgaccatggattaat

SEQ ID NO: 1264244 - DNA, 15 bp, Homo sapiens
ttgaccatggattaa

SEQ ID NO: 1264245 - DNA, 15 bp, Homo sapiens
cttgaccatggatta

SEQ ID NO: 1264246 - DNA, 15 bp, Homo sapiens
tcttgaccatggatt

SEQ ID NO: 1264247 - DNA, 15 bp, Homo sapiens
gtcttgaccatggat

SEQ ID NO: 1264248 - DNA, 15 bp, Homo sapiens
tgtcttgaccatgga

SEQ ID NO: 1264249 - DNA, 15 bp, Homo sapiens
atgtcttgaccatgg

SEQ ID NO: 1264250 - DNA, 15 bp, Homo sapiens
tatgtcttgaccatg

SEQ ID NO: 1264251 - DNA, 15 bp, Homo sapiens
atatgtcttgaccat

SEQ ID NO: 1264252 - DNA, 15 bp, Homo sapiens
tatatgtcttgacca

SEQ ID NO: 1264253 - DNA, 15 bp, Homo sapiens
atatatgtcttgacc

SEQ ID NO: 1264254 - DNA, 15 bp, Homo sapiens
aatatatgtcttgac

SEQ ID NO: 1264255 - DNA, 15 bp, Homo sapiens
gaatatatgtcttga

SEQ ID NO: 1264256 - DNA, 15 bp, Homo sapiens
agaatatatgtcttg

SEQ ID NO: 1264257 - DNA, 15 bp, Homo sapiens
aagaatatatgtctt

SEQ ID NO: 1264258 - DNA, 15 bp, Homo sapiens
aaagaatatatgtct

SEQ ID NO: 1264259 - DNA, 15 bp, Homo sapiens
aaaagaatatatgtc

SEQ ID NO: 1264260 - DNA, 15 bp, Homo sapiens
caaaagaatatatgt

SEQ ID NO: 1264261 - DNA, 15 bp, Homo sapiens
acaaaagaatatatg

SEQ ID NO: 1264262 - DNA, 15 bp, Homo sapiens
tacaaaagaatatat

SEQ ID NO: 1264263 - DNA, 15 bp, Homo sapiens
ttacaaaagaatata

SEQ ID NO: 1264264 - DNA, 15 bp, Homo sapiens
tttacaaaagaatat

SEQ ID NO: 1264265 - DNA, 15 bp, Homo sapiens
atttacaaaagaata

SEQ ID NO: 1264266 - DNA, 15 bp, Homo sapiens
aatttacaaaagaat

SEQ ID NO: 1264267 - DNA, 15 bp, Homo sapiens
caatttacaaaagaa

SEQ ID NO: 1264268 - DNA, 15 bp, Homo sapiens
tcaatttacaaaaga

SEQ ID NO: 1264269 - DNA, 15 bp, Homo sapiens
ctcaatttacaaaag

SEQ ID NO: 1264270 - DNA, 15 bp, Homo sapiens
tctcaatttacaaaa

SEQ ID NO: 1264271 - DNA, 15 bp, Homo sapiens
ttctcaatttacaaa

SEQ ID NO: 1264272 - DNA, 15 bp, Homo sapiens
tttctcaatttacaa

SEQ ID NO: 1264273 - DNA, 15 bp, Homo sapiens
atttctcaatttaca

SEQ ID NO: 1264274 - DNA, 15 bp, Homo sapiens
gatttctcaatttac

SEQ ID NO: 1264275 - DNA, 15 bp, Homo sapiens
agatttctcaattta

SEQ ID NO: 1264276 - DNA, 15 bp, Homo sapiens
gagatttctcaattt

SEQ ID NO: 1264277 - DNA, 15 bp, Homo sapiens
agagatttctcaatt

SEQ ID NO: 1264278 - DNA, 15 bp, Homo sapiens
aagagatttctcaat

SEQ ID NO: 1264279 - DNA, 15 bp, Homo sapiens
aaagagatttctcaa

SEQ ID NO: 1264280 - DNA, 15 bp, Homo sapiens
taaagagatttctca

SEQ ID NO: 1264281 - DNA, 15 bp, Homo sapiens
ataaagagatttctc

SEQ ID NO: 1264282 - DNA, 15 bp, Homo sapiens
gataaagagatttct

SEQ ID NO: 1264283 - DNA, 15 bp, Homo sapiens
tgataaagagatttc

SEQ ID NO: 1264284 - DNA, 15 bp, Homo sapiens
atgataaagagattt

SEQ ID NO: 1264285 - DNA, 15 bp, Homo sapiens
tatgataaagagatt

SEQ ID NO: 1264286 - DNA, 15 bp, Homo sapiens
ttatgataaagagat

SEQ ID NO: 1264287 - DNA, 15 bp, Homo sapiens
attatgataaagaga

SEQ ID NO: 1264288 - DNA, 15 bp, Homo sapiens
aattatgataaagag

SEQ ID NO: 1264289 - DNA, 15 bp, Homo sapiens
caattatgataaaga

SEQ ID NO: 1264290 - DNA, 15 bp, Homo sapiens
acaattatgataaag

SEQ ID NO: 1264291 - DNA, 15 bp, Homo sapiens
tacaattatgataaa

SEQ ID NO: 1264292 - DNA, 15 bp, Homo sapiens
ttacaattatgataa

SEQ ID NO: 1264293 - DNA, 15 bp, Homo sapiens
attacaattatgata

SEQ ID NO: 1264294 - DNA, 15 bp, Homo sapiens
tattacaattatgat

SEQ ID NO: 1264295 - DNA, 15 bp, Homo sapiens
atattacaattatga

SEQ ID NO: 1264296 - DNA, 15 bp, Homo sapiens
catattacaattatg

SEQ ID NO: 1264297 - DNA, 15 bp, Homo sapiens
ccatattacaattat

SEQ ID NO: 1264298 - DNA, 15 bp, Homo sapiens
accatattacaatta

SEQ ID NO: 1264299 - DNA, 15 bp, Homo sapiens
taccatattacaatt

SEQ ID NO: 1264300 - DNA, 15 bp, Homo sapiens
ttaccatattacaat

SEQ ID NO: 1264301 - DNA, 15 bp, Homo sapiens
attaccatattacaa

SEQ ID NO: 1264302 - DNA, 15 bp, Homo sapiens
tattaccatattaca

SEQ ID NO: 1264303 - DNA, 15 bp, Homo sapiens
ttattaccatattac

SEQ ID NO: 1264304 - DNA, 15 bp, Homo sapiens
tttattaccatatta

SEQ ID NO: 1264305 - DNA, 15 bp, Homo sapiens
atttattaccatatt

SEQ ID NO: 1264306 - DNA, 15 bp, Homo sapiens
tatttattaccatat

SEQ ID NO: 1264307 - DNA, 15 bp, Homo sapiens
ttatttattaccata

SEQ ID NO: 1264308 - DNA, 15 bp, Homo sapiens
tttatttattaccat

SEQ ID NO: 1264309 - DNA, 15 bp, Homo sapiens
atttatttattacca

SEQ ID NO: 1264310 - DNA, 15 bp, Homo sapiens
gatttatttattacc

SEQ ID NO: 1264311 - DNA, 15 bp, Homo sapiens
agatttatttattac

SEQ ID NO: 1264312 - DNA, 15 bp, Homo sapiens
tagatttatttatta

SEQ ID NO: 1264313 - DNA, 15 bp, Homo sapiens
ctagatttatttatt

SEQ ID NO: 1264314 - DNA, 15 bp, Homo sapiens
tctagatttatttat

SEQ ID NO: 1264315 - DNA, 15 bp, Homo sapiens
atctagatttattta

SEQ ID NO: 1264316 - DNA, 15 bp, Homo sapiens
aatctagatttattt

SEQ ID NO: 1264317 - DNA, 15 bp, Homo sapiens
taatctagatttatt

SEQ ID NO: 1264318 - DNA, 15 bp, Homo sapiens
gtaatctagatttat

SEQ ID NO: 1264319 - DNA, 15 bp, Homo sapiens
tgtaatctagattta

SEQ ID NO: 1264320 - DNA, 15 bp, Homo sapiens
atgtaatctagattt

SEQ ID NO: 1264321 - DNA, 15 bp, Homo sapiens
tatgtaatctagatt

SEQ ID NO: 1264322 - DNA, 15 bp, Homo sapiens
ttatgtaatctagat

SEQ ID NO: 1264323 - DNA, 15 bp, Homo sapiens
tttatgtaatctaga

SEQ ID NO: 1264324 - DNA, 15 bp, Homo sapiens
atttatgtaatctag

SEQ ID NO: 1264325 - DNA, 15 bp, Homo sapiens
catttatgtaatcta

SEQ ID NO: 1264326 - DNA, 15 bp, Homo sapiens
acatttatgtaatct

SEQ ID NO: 1264327 - DNA, 15 bp, Homo sapiens
tacatttatgtaatc

SEQ ID NO: 1264328 - DNA, 15 bp, Homo sapiens
ttacatttatgtaat

SEQ ID NO: 1264329 - DNA, 15 bp, Homo sapiens
attacatttatgtaa

SEQ ID NO: 1264330 - DNA, 15 bp, Homo sapiens
gattacatttatgta

SEQ ID NO: 1264331 - DNA, 15 bp, Homo sapiens
agattacatttatgt

SEQ ID NO: 1264332 - DNA, 15 bp, Homo sapiens
tagattacatttatg

SEQ ID NO: 1264333 - DNA, 15 bp, Homo sapiens
ctagattacatttat

SEQ ID NO: 1264334 - DNA, 15 bp, Homo sapiens
tctagattacattta

SEQ ID NO: 1264335 - DNA, 15 bp, Homo sapiens
atctagattacattt

SEQ ID NO: 1264336 - DNA, 15 bp, Homo sapiens
catctagattacatt

SEQ ID NO: 1264337 - DNA, 15 bp, Homo sapiens
acatctagattacat

SEQ ID NO: 1264338 - DNA, 15 bp, Homo sapiens
aacatctagattaca

SEQ ID NO: 1264339 - DNA, 15 bp, Homo sapiens
caacatctagattac

SEQ ID NO: 1264340 - DNA, 15 bp, Homo sapiens
tcaacatctagatta

SEQ ID NO: 1264341 - DNA, 15 bp, Homo sapiens
atcaacatctagatt

SEQ ID NO: 1264342 - DNA, 15 bp, Homo sapiens
tatcaacatctagat

SEQ ID NO: 1264343 - DNA, 15 bp, Homo sapiens
ttatcaacatctaga

SEQ ID NO: 1264344 - DNA, 15 bp, Homo sapiens
tttatcaacatctag

SEQ ID NO: 1264345 - DNA, 15 bp, Homo sapiens
gtttatcaacatcta

SEQ ID NO: 1264346 - DNA, 15 bp, Homo sapiens
agtttatcaacatct

SEQ ID NO: 1264347 - DNA, 15 bp, Homo sapiens
cagtttatcaacatc

SEQ ID NO: 1264348 - DNA, 15 bp, Homo sapiens
ccagtttatcaacat

SEQ ID NO: 1264349 - DNA, 15 bp, Homo sapiens
accagtttatcaaca

SEQ ID NO: 1264350 - DNA, 15 bp, Homo sapiens
aaccagtttatcaac

SEQ ID NO: 1264351 - DNA, 15 bp, Homo sapiens
aaaccagtttatcaa

SEQ ID NO: 1264352 - DNA, 15 bp, Homo sapiens
aaaaccagtttatca

SEQ ID NO: 1264353 - DNA, 15 bp, Homo sapiens
taaaaccagtttatc

SEQ ID NO: 1264354 - DNA, 15 bp, Homo sapiens
ttaaaaccagtttat

SEQ ID NO: 1264355 - DNA, 15 bp, Homo sapiens
tttaaaaccagttta

SEQ ID NO: 1264356 - DNA, 15 bp, Homo sapiens
atttaaaaccagttt

SEQ ID NO: 1264357 - DNA, 15 bp, Homo sapiens
tatttaaaaccagtt

SEQ ID NO: 1264358 - DNA, 15 bp, Homo sapiens
ttatttaaaaccagt

SEQ ID NO: 1264359 - DNA, 15 bp, Homo sapiens
tttatttaaaaccag

SEQ ID NO: 1264360 - DNA, 15 bp, Homo sapiens
ctttatttaaaacca

SEQ ID NO: 1264361 - DNA, 15 bp, Homo sapiens
gctttatttaaaacc

SEQ ID NO: 1264362 - DNA, 15 bp, Homo sapiens
tgctttatttaaaac

SEQ ID NO: 1264363 - DNA, 15 bp, Homo sapiens
ttgctttatttaaaa

SEQ ID NO: 1264364 - DNA, 15 bp, Homo sapiens
cttgctttatttaaa

SEQ ID NO: 1264365 - DNA, 15 bp, Homo sapiens
acttgctttatttaa

SEQ ID NO: 1264366 - DNA, 15 bp, Homo sapiens
cacttgctttattta

SEQ ID NO: 1264367 - DNA, 15 bp, Homo sapiens
tcacttgctttattt

SEQ ID NO: 1264368 - DNA, 15 bp, Homo sapiens
atcacttgctttatt

SEQ ID NO: 1264369 - DNA, 15 bp, Homo sapiens
tatcacttgctttat

SEQ ID NO: 1264370 - DNA, 15 bp, Homo sapiens
atatcacttgcttta

SEQ ID NO: 1264371 - DNA, 15 bp, Homo sapiens
gatatcacttgcttt

SEQ ID NO: 1264372 - DNA, 15 bp, Homo sapiens
agatatcacttgctt

SEQ ID NO: 1264373 - DNA, 15 bp, Homo sapiens
tagatatcacttgct

SEQ ID NO: 1264374 - DNA, 15 bp, Homo sapiens
gtagatatcacttgc

SEQ ID NO: 1264375 - DNA, 15 bp, Homo sapiens
cgtagatatcacttg

SEQ ID NO: 1264376 - DNA, 15 bp, Homo sapiens
acgtagatatcactt

SEQ ID NO: 1264377 - DNA, 15 bp, Homo sapiens
tacgtagatatcact

SEQ ID NO: 1264378 - DNA, 15 bp, Homo sapiens
atacgtagatatcac

SEQ ID NO: 1264379 - DNA, 15 bp, Homo sapiens
catacgtagatatca

SEQ ID NO: 1264380 - DNA, 15 bp, Homo sapiens
tcatacgtagatatc

SEQ ID NO: 1264381 - DNA, 15 bp, Homo sapiens
ttcatacgtagatat

SEQ ID NO: 1264382 - DNA, 15 bp, Homo sapiens
cttcatacgtagata

SEQ ID NO: 1264383 - DNA, 15 bp, Homo sapiens
tcttcatacgtagat

SEQ ID NO: 1264384 - DNA, 15 bp, Homo sapiens
ctcttcatacgtaga

SEQ ID NO: 1264385 - DNA, 15 bp, Homo sapiens
tctcttcatacgtag

SEQ ID NO: 1264386 - DNA, 15 bp, Homo sapiens
ctctcttcatacgta

SEQ ID NO: 1264387 - DNA, 15 bp, Homo sapiens
actctcttcatacgt

SEQ ID NO: 1264388 - DNA, 15 bp, Homo sapiens
aactctcttcatacg

SEQ ID NO: 1264389 - DNA, 15 bp, Homo sapiens
aaactctcttcatac

SEQ ID NO: 1264390 - DNA, 15 bp, Homo sapiens
taaactctcttcata

SEQ ID NO: 1264391 - DNA, 15 bp, Homo sapiens
gtaaactctcttcat

SEQ ID NO: 1264392 - DNA, 15 bp, Homo sapiens
agtaaactctcttca

SEQ ID NO: 1264393 - DNA, 15 bp, Homo sapiens
aagtaaactctcttc

SEQ ID NO: 1264394 - DNA, 15 bp, Homo sapiens
gaagtaaactctctt

SEQ ID NO: 1264395 - DNA, 15 bp, Homo sapiens
tgaagtaaactctct

SEQ ID NO: 1264396 - DNA, 15 bp, Homo sapiens
ctgaagtaaactctc

SEQ ID NO: 1264397 - DNA, 15 bp, Homo sapiens
actgaagtaaactct

SEQ ID NO: 1264398 - DNA, 15 bp, Homo sapiens
aactgaagtaaactc

SEQ ID NO: 1264399 - DNA, 15 bp, Homo sapiens
gaactgaagtaaact

SEQ ID NO: 1264400 - DNA, 15 bp, Homo sapiens
ggaactgaagtaaac

SEQ ID NO: 1264401 - DNA, 15 bp, Homo sapiens
aggaactgaagtaaa

SEQ ID NO: 1264402 - DNA, 15 bp, Homo sapiens
taggaactgaagtaa

SEQ ID NO: 1264403 - DNA, 15 bp, Homo sapiens
ctaggaactgaagta

SEQ ID NO: 1264404 - DNA, 15 bp, Homo sapiens
tctaggaactgaagt

SEQ ID NO: 1264405 - DNA, 15 bp, Homo sapiens
ttctaggaactgaag

SEQ ID NO: 1264406 - DNA, 15 bp, Homo sapiens
gttctaggaactgaa

SEQ ID NO: 1264407 - DNA, 15 bp, Homo sapiens
agttctaggaactga

SEQ ID NO: 1264408 - DNA, 15 bp, Homo sapiens
aagttctaggaactg

SEQ ID NO: 1264409 - DNA, 15 bp, Homo sapiens
aaagttctaggaact

SEQ ID NO: 1264410 - DNA, 15 bp, Homo sapiens
gaaagttctaggaac

SEQ ID NO: 1264411 - DNA, 15 bp, Homo sapiens
ggaaagttctaggaa

SEQ ID NO: 1264412 - DNA, 15 bp, Homo sapiens
aggaaagttctagga

SEQ ID NO: 1264413 - DNA, 15 bp, Homo sapiens
aaggaaagttctagg

SEQ ID NO: 1264414 - DNA, 15 bp, Homo sapiens
gaaggaaagttctag

SEQ ID NO: 1264415 - DNA, 15 bp, Homo sapiens
tgaaggaaagttcta

SEQ ID NO: 1264416 - DNA, 15 bp, Homo sapiens
gtgaaggaaagttct

SEQ ID NO: 1264417 - DNA, 15 bp, Homo sapiens
agtgaaggaaagttc

SEQ ID NO: 1264418 - DNA, 15 bp, Homo sapiens
aagtgaaggaaagtt

SEQ ID NO: 1264419 - DNA, 15 bp, Homo sapiens
aaagtgaaggaaagt

SEQ ID NO: 1264420 - DNA, 15 bp, Homo sapiens
gaaagtgaaggaaag

SEQ ID NO: 1264421 - DNA, 15 bp, Homo sapiens
ggaaagtgaaggaaa

SEQ ID NO: 1264422 - DNA, 15 bp, Homo sapiens
aggaaagtgaaggaa

SEQ ID NO: 1264423 - DNA, 15 bp, Homo sapiens
caggaaagtgaagga

SEQ ID NO: 1264424 - DNA, 15 bp, Homo sapiens
gcaggaaagtgaagg

SEQ ID NO: 1264425 - DNA, 15 bp, Homo sapiens
ggcaggaaagtgaag

SEQ ID NO: 1264426 - DNA, 15 bp, Homo sapiens
tggcaggaaagtgaa

SEQ ID NO: 1264427 - DNA, 15 bp, Homo sapiens
atggcaggaaagtga

SEQ ID NO: 1264428 - DNA, 15 bp, Homo sapiens
gatggcaggaaagtg

SEQ ID NO: 1264429 - DNA, 15 bp, Homo sapiens
ggatggcaggaaagt

SEQ ID NO: 1264430 - DNA, 15 bp, Homo sapiens
gggatggcaggaaag

SEQ ID NO: 1264431 - DNA, 15 bp, Homo sapiens
agggatggcaggaaa

SEQ ID NO: 1264432 - DNA, 15 bp, Homo sapiens
tagggatggcaggaa

SEQ ID NO: 1264433 - DNA, 15 bp, Homo sapiens
gtagggatggcagga

SEQ ID NO: 1264434 - DNA, 15 bp, Homo sapiens
agtagggatggcagg

SEQ ID NO: 1264435 - DNA, 15 bp, Homo sapiens
aagtagggatggcag

SEQ ID NO: 1264436 - DNA, 15 bp, Homo sapiens
aaagtagggatggca

SEQ ID NO: 1264437 - DNA, 15 bp, Homo sapiens
aaaagtagggatggc

SEQ ID NO: 1264438 - DNA, 15 bp, Homo sapiens
taaaagtagggatgg

SEQ ID NO: 1264439 - DNA, 15 bp, Homo sapiens
ctaaaagtagggatg

SEQ ID NO: 1264440 - DNA, 15 bp, Homo sapiens
actaaaagtagggat

SEQ ID NO: 1264441 - DNA, 15 bp, Homo sapiens
tactaaaagtaggga

SEQ ID NO: 1264442 - DNA, 15 bp, Homo sapiens
ttactaaaagtaggg

SEQ ID NO: 1264443 - DNA, 15 bp, Homo sapiens
cttactaaaagtagg

SEQ ID NO: 1264444 - DNA, 15 bp, Homo sapiens
gcttactaaaagtag

SEQ ID NO: 1264445 - DNA, 15 bp, Homo sapiens
tgcttactaaaagta

SEQ ID NO: 1264446 - DNA, 15 bp, Homo sapiens
ttgcttactaaaagt

SEQ ID NO: 1264447 - DNA, 15 bp, Homo sapiens
cttgcttactaaaag

SEQ ID NO: 1264448 - DNA, 15 bp, Homo sapiens
gcttgcttactaaaa

SEQ ID NO: 1264449 - DNA, 15 bp, Homo sapiens
tgcttgcttactaaa

SEQ ID NO: 1264450 - DNA, 15 bp, Homo sapiens
atgcttgcttactaa

SEQ ID NO: 1264451 - DNA, 15 bp, Homo sapiens
aatgcttgcttacta

SEQ ID NO: 1264452 - DNA, 15 bp, Homo sapiens
aaatgcttgcttact

SEQ ID NO: 1264453 - DNA, 15 bp, Homo sapiens
taaatgcttgcttac

SEQ ID NO: 1264454 - DNA, 15 bp, Homo sapiens
gtaaatgcttgctta

SEQ ID NO: 1264455 - DNA, 15 bp, Homo sapiens
agtaaatgcttgctt

SEQ ID NO: 1264456 - DNA, 15 bp, Homo sapiens
cagtaaatgcttgct

SEQ ID NO: 1264457 - DNA, 15 bp, Homo sapiens
acagtaaatgcttgc

SEQ ID NO: 1264458 - DNA, 15 bp, Homo sapiens
cacagtaaatgcttg

SEQ ID NO: 1264459 - DNA, 15 bp, Homo sapiens
acacagtaaatgctt

SEQ ID NO: 1264460 - DNA, 15 bp, Homo sapiens
cacacagtaaatgct

SEQ ID NO: 1264461 - DNA, 15 bp, Homo sapiens
acacacagtaaatgc

SEQ ID NO: 1264462 - DNA, 15 bp, Homo sapiens
cacacacagtaaatg

SEQ ID NO: 1264463 - DNA, 15 bp, Homo sapiens
acacacacagtaaat

SEQ ID NO: 1264464 - DNA, 15 bp, Homo sapiens
tacacacacagtaaa

SEQ ID NO: 1264465 - DNA, 15 bp, Homo sapiens
ttacacacacagtaa

SEQ ID NO: 1264466 - DNA, 15 bp, Homo sapiens
gttacacacacagta

SEQ ID NO: 1264467 - DNA, 15 bp, Homo sapiens
tgttacacacacagt

SEQ ID NO: 1264468 - DNA, 15 bp, Homo sapiens
gtgttacacacacag

SEQ ID NO: 1264469 - DNA, 15 bp, Homo sapiens
agtgttacacacaca

SEQ ID NO: 1264470 - DNA, 15 bp, Homo sapiens
cagtgttacacacac

SEQ ID NO: 1264471 - DNA, 15 bp, Homo sapiens
acagtgttacacaca

SEQ ID NO: 1264472 - DNA, 15 bp, Homo sapiens
cacagtgttacacac

SEQ ID NO: 1264473 - DNA, 15 bp, Homo sapiens
gcacagtgttacaca

SEQ ID NO: 1264474 - DNA, 15 bp, Homo sapiens
agcacagtgttacac

SEQ ID NO: 1264475 - DNA, 15 bp, Homo sapiens
tagcacagtgttaca

SEQ ID NO: 1264476 - DNA, 15 bp, Homo sapiens
ctagcacagtgttac

SEQ ID NO: 1264477 - DNA, 15 bp, Homo sapiens
cctagcacagtgtta

SEQ ID NO: 1264478 - DNA, 15 bp, Homo sapiens
tacctagcacagtgt

SEQ ID NO: 1264479 - DNA, 15 bp, Homo sapiens
gtacctagcacagtg

SEQ ID NO: 1264480 - DNA, 15 bp, Homo sapiens
agtacctagcacagt

SEQ ID NO: 1264481 - DNA, 15 bp, Homo sapiens
tagtacctagcacag

SEQ ID NO: 1264482 - DNA, 15 bp, Homo sapiens
ttagtacctagcaca

SEQ ID NO: 1264483 - DNA, 15 bp, Homo sapiens
cttagtacctagcac

SEQ ID NO: 1264484 - DNA, 15 bp, Homo sapiens
ccttagtacctagca

SEQ ID NO: 1264485 - DNA, 15 bp, Homo sapiens
gccttagtacctagc

SEQ ID NO: 1264486 - DNA, 15 bp, Homo sapiens
tgccttagtacctag

SEQ ID NO: 1264487 - DNA, 15 bp, Homo sapiens
ttgccttagtaccta

SEQ ID NO: 1264488 - DNA, 15 bp, Homo sapiens
attgccttagtacct

SEQ ID NO: 1264489 - DNA, 15 bp, Homo sapiens
cattgccttagtacc

SEQ ID NO: 1264490 - DNA, 15 bp, Homo sapiens
tcattgccttagtac

SEQ ID NO: 1264491 - DNA, 15 bp, Homo sapiens
atcattgccttagta

SEQ ID NO: 1264492 - DNA, 15 bp, Homo sapiens
catcattgccttagt

SEQ ID NO: 1264493 - DNA, 15 bp, Homo sapiens
tcatcattgccttag

SEQ ID NO: 1264494 - DNA, 15 bp, Homo sapiens
atcatcattgcctta

SEQ ID NO: 1264495 - DNA, 15 bp, Homo sapiens
tatcatcattgcctt

SEQ ID NO: 1264496 - DNA, 15 bp, Homo sapiens
gtatcatcattgcct

SEQ ID NO: 1264497 - DNA, 15 bp, Homo sapiens
ggtatcatcattgcc

SEQ ID NO: 1264498 - DNA, 15 bp, Homo sapiens
gggtatcatcattgc

SEQ ID NO: 1264499 - DNA, 15 bp, Homo sapiens
tgggtatcatcattg

SEQ ID NO: 1264500 - DNA, 15 bp, Homo sapiens
ttgggtatcatcatt

SEQ ID NO: 1264501 - DNA, 15 bp, Homo sapiens
cttgggtatcatcat

SEQ ID NO: 1264502 - DNA, 15 bp, Homo sapiens
tcttgggtatcatca

SEQ ID NO: 1264503 - DNA, 15 bp, Homo sapiens
atcttgggtatcatc

SEQ ID NO: 1264504 - DNA, 15 bp, Homo sapiens
aatcttgggtatcat

SEQ ID NO: 1264505 - DNA, 15 bp, Homo sapiens
aaatcttgggtatca

SEQ ID NO: 1264506 - DNA, 15 bp, Homo sapiens
caaatcttgggtatc

SEQ ID NO: 1264507 - DNA, 15 bp, Homo sapiens
ccaaatcttgggtat

SEQ ID NO: 1264508 - DNA, 15 bp, Homo sapiens
accaaatcttgggta

SEQ ID NO: 1264509 - DNA, 15 bp, Homo sapiens
gaccaaatcttgggt

SEQ ID NO: 1264510 - DNA, 15 bp, Homo sapiens
agaccaaatcttggg

SEQ ID NO: 1264511 - DNA, 15 bp, Homo sapiens
gagaccaaatcttgg

SEQ ID NO: 1264512 - DNA, 15 bp, Homo sapiens
agagaccaaatcttg

SEQ ID NO: 1264513 - DNA, 15 bp, Homo sapiens
tagagaccaaatctt

SEQ ID NO: 1264514 - DNA, 15 bp, Homo sapiens
atagagaccaaatct

SEQ ID NO: 1264515 - DNA, 15 bp, Homo sapiens
gatagagaccaaatc

SEQ ID NO: 1264516 - DNA, 15 bp, Homo sapiens
ggatagagaccaaat

SEQ ID NO: 1264517 - DNA, 15 bp, Homo sapiens
aggatagagaccaaa

SEQ ID NO: 1264518 - DNA, 15 bp, Homo sapiens
caggatagagaccaa

SEQ ID NO: 1264519 - DNA, 15 bp, Homo sapiens
tcaggatagagacca

SEQ ID NO: 1264520 - DNA, 15 bp, Homo sapiens
ttcaggatagagacc

SEQ ID NO: 1264521 - DNA, 15 bp, Homo sapiens
cttcaggatagagac

SEQ ID NO: 1264522 - DNA, 15 bp, Homo sapiens
tcttcaggatagaga

SEQ ID NO: 1264523 - DNA, 15 bp, Homo sapiens
atcttcaggatagag

SEQ ID NO: 1264524 - DNA, 15 bp, Homo sapiens
tatcttcaggataga

SEQ ID NO: 1264525 - DNA, 15 bp, Homo sapiens
ttatcttcaggatag

SEQ ID NO: 1264526 - DNA, 15 bp, Homo sapiens
cttatcttcaggata

SEQ ID NO: 1264527 - DNA, 15 bp, Homo sapiens
gcttatcttcaggat

SEQ ID NO: 1264528 - DNA, 15 bp, Homo sapiens
tgcttatcttcagga

SEQ ID NO: 1264529 - DNA, 15 bp, Homo sapiens
gtgcttatcttcagg

SEQ ID NO: 1264530 - DNA, 15 bp, Homo sapiens
tgtgcttatcttcag

SEQ ID NO: 1264531 - DNA, 15 bp, Homo sapiens
ctgtgcttatcttca

SEQ ID NO: 1264532 - DNA, 15 bp, Homo sapiens
cctgtgcttatcttc

SEQ ID NO: 1264533 - DNA, 15 bp, Homo sapiens
tcctgtgcttatctt

SEQ ID NO: 1264534 - DNA, 15 bp, Homo sapiens
ctcctgtgcttatct

SEQ ID NO: 1264535 - DNA, 15 bp, Homo sapiens
tctcctgtgcttatc

SEQ ID NO: 1264536 - DNA, 15 bp, Homo sapiens
ttctcctgtgcttat

SEQ ID NO: 1264537 - DNA, 15 bp, Homo sapiens
tttctcctgtgctta

SEQ ID NO: 1264538 - DNA, 15 bp, Homo sapiens
gtttctcctgtgctt

SEQ ID NO: 1264539 - DNA, 15 bp, Homo sapiens
tgtttctcctgtgct

SEQ ID NO: 1264540 - DNA, 15 bp, Homo sapiens
atgtttctcctgtgc

SEQ ID NO: 1264541 - DNA, 15 bp, Homo sapiens
aatgtttctcctgtg

SEQ ID NO: 1264542 - DNA, 15 bp, Homo sapiens
taatgtttctcctgt

SEQ ID NO: 1264543 - DNA, 15 bp, Homo sapiens
ataatgtttctcctg

SEQ ID NO: 1264544 - DNA, 15 bp, Homo sapiens
gataatgtttctcct

SEQ ID NO: 1264545 - DNA, 15 bp, Homo sapiens
tgataatgtttctcc

SEQ ID NO: 1264546 - DNA, 15 bp, Homo sapiens
ctgataatgtttctc

SEQ ID NO: 1264547 - DNA, 15 bp, Homo sapiens
actgataatgtttct

SEQ ID NO: 1264548 - DNA, 15 bp, Homo sapiens
gactgataatgtttc

SEQ ID NO: 1264549 - DNA, 15 bp, Homo sapiens
tgactgataatgttt

SEQ ID NO: 1264550 - DNA, 15 bp, Homo sapiens
atgactgataatgtt

SEQ ID NO: 1264551 - DNA, 15 bp, Homo sapiens
catgactgataatgt

SEQ ID NO: 1264552 - DNA, 15 bp, Homo sapiens
tcatgactgataatg

SEQ ID NO: 1264553 - DNA, 15 bp, Homo sapiens
atcatgactgataat

SEQ ID NO: 1264554 - DNA, 15 bp, Homo sapiens
catcatgactgataa

SEQ ID NO: 1264555 - DNA, 15 bp, Homo sapiens
gcatcatgactgata

SEQ ID NO: 1264556 - DNA, 15 bp, Homo sapiens
agcatcatgactgat

SEQ ID NO: 1264557 - DNA, 15 bp, Homo sapiens
aagcatcatgactga

SEQ ID NO: 1264558 - DNA, 15 bp, Homo sapiens
aaagcatcatgactg

SEQ ID NO: 1264559 - DNA, 15 bp, Homo sapiens
gaaagcatcatgact

SEQ ID NO: 1264560 - DNA, 15 bp, Homo sapiens
agaaagcatcatgac

SEQ ID NO: 1264561 - DNA, 15 bp, Homo sapiens
cagaaagcatcatga

SEQ ID NO: 1264562 - DNA, 15 bp, Homo sapiens
acagaaagcatcatg

SEQ ID NO: 1264563 - DNA, 15 bp, Homo sapiens
aacagaaagcatcat

SEQ ID NO: 1264564 - DNA, 15 bp, Homo sapiens
caacagaaagcatca

SEQ ID NO: 1264565 - DNA, 15 bp, Homo sapiens
gcaacagaaagcatc

SEQ ID NO: 1264566 - DNA, 15 bp, Homo sapiens
tgcaacagaaagcat

SEQ ID NO: 1264567 - DNA, 15 bp, Homo sapiens
ttgcaacagaaagca

SEQ ID NO: 1264568 - DNA, 15 bp, Homo sapiens
tttgcaacagaaagc

SEQ ID NO: 1264569 - DNA, 15 bp, Homo sapiens
gtttgcaacagaaag

SEQ ID NO: 1264570 - DNA, 15 bp, Homo sapiens
tgtttgcaacagaaa

SEQ ID NO: 1264571 - DNA, 15 bp, Homo sapiens
ttgtttgcaacagaa

SEQ ID NO: 1264572 - DNA, 15 bp, Homo sapiens
cttgtttgcaacaga

SEQ ID NO: 1264573 - DNA, 15 bp, Homo sapiens
acttgtttgcaacag

SEQ ID NO: 1264574 - DNA, 15 bp, Homo sapiens
cacttgtttgcaaca

SEQ ID NO: 1264575 - DNA, 15 bp, Homo sapiens
tcacttgtttgcaac

SEQ ID NO: 1264576 - DNA, 15 bp, Homo sapiens
ttcacttgtttgcaa

SEQ ID NO: 1264577 - DNA, 15 bp, Homo sapiens
tttcacttgtttgca

SEQ ID NO: 1264578 - DNA, 15 bp, Homo sapiens
ttttcacttgtttgc

SEQ ID NO: 1264579 - DNA, 15 bp, Homo sapiens
gttttcacttgtttg

SEQ ID NO: 1264580 - DNA, 15 bp, Homo sapiens
ggttttcacttgttt

SEQ ID NO: 1264581 - DNA, 15 bp, Homo sapiens
aggttttcacttgtt

SEQ ID NO: 1264582 - DNA, 15 bp, Homo sapiens
gaggttttcacttgt

SEQ ID NO: 1264583 - DNA, 15 bp, Homo sapiens
tgaggttttcacttg

SEQ ID NO: 1264584 - DNA, 15 bp, Homo sapiens
ctgaggttttcactt

SEQ ID NO: 1264585 - DNA, 15 bp, Homo sapiens
gctgaggttttcact

SEQ ID NO: 1264586 - DNA, 15 bp, Homo sapiens
agctgaggttttcac

SEQ ID NO: 1264587 - DNA, 15 bp, Homo sapiens
gagctgaggttttca

SEQ ID NO: 1264588 - DNA, 15 bp, Homo sapiens
tgagctgaggttttc

SEQ ID NO: 1264589 - DNA, 15 bp, Homo sapiens
ctgagctgaggtttt

SEQ ID NO: 1264590 - DNA, 15 bp, Homo sapiens
gctgagctgaggttt

SEQ ID NO: 1264591 - DNA, 15 bp, Homo sapiens
agctgagctgaggtt

SEQ ID NO: 1264592 - DNA, 15 bp, Homo sapiens
aagctgagctgaggt

SEQ ID NO: 1264593 - DNA, 15 bp, Homo sapiens
taagctgagctgagg

SEQ ID NO: 1264594 - DNA, 15 bp, Homo sapiens
ctaagctgagctgag

SEQ ID NO: 1264595 - DNA, 15 bp, Homo sapiens
cctaagctgagctga

SEQ ID NO: 1264596 - DNA, 15 bp, Homo sapiens
acctaagctgagctg

SEQ ID NO: 1264597 - DNA, 15 bp, Homo sapiens
gacctaagctgagct

SEQ ID NO: 1264598 - DNA, 15 bp, Homo sapiens
tgacctaagctgagc

SEQ ID NO: 1264599 - DNA, 15 bp, Homo sapiens
ctgacctaagctgag

SEQ ID NO: 1264600 - DNA, 15 bp, Homo sapiens
gctgacctaagctga

SEQ ID NO: 1264601 - DNA, 15 bp, Homo sapiens
agctgacctaagctg

SEQ ID NO: 1264602 - DNA, 15 bp, Homo sapiens
gagctgacctaagct

SEQ ID NO: 1264603 - DNA, 15 bp, Homo sapiens
ggagctgacctaagc

SEQ ID NO: 1264604 - DNA, 15 bp, Homo sapiens
tggagctgacctaag

SEQ ID NO: 1264605 - DNA, 15 bp, Homo sapiens
ctggagctgacctaa

SEQ ID NO: 1264606 - DNA, 15 bp, Homo sapiens
cctggagctgaccta

SEQ ID NO: 1264607 - DNA, 15 bp, Homo sapiens
ccctggagctgacct

SEQ ID NO: 1264608 - DNA, 15 bp, Homo sapiens
gccctggagctgacc

SEQ ID NO: 1264609 - DNA, 15 bp, Homo sapiens
agccctggagctgac

SEQ ID NO: 1264610 - DNA, 15 bp, Homo sapiens
cagccctggagctga

SEQ ID NO: 1264611 - DNA, 15 bp, Homo sapiens
ccagccctggagctg

SEQ ID NO: 1264612 - DNA, 15 bp, Homo sapiens
gccagccctggagct

SEQ ID NO: 1264613 - DNA, 15 bp, Homo sapiens
ggccagccctggagc

SEQ ID NO: 1264614 - DNA, 15 bp, Homo sapiens
tggccagccctggag

SEQ ID NO: 1264615 - DNA, 15 bp, Homo sapiens
ttggccagccctgga

SEQ ID NO: 1264616 - DNA, 15 bp, Homo sapiens
tttggccagccctgg

SEQ ID NO: 1264617 - DNA, 15 bp, Homo sapiens
atttggccagccctg

SEQ ID NO: 1264618 - DNA, 15 bp, Homo sapiens
gatttggccagccct

SEQ ID NO: 1264619 - DNA, 15 bp, Homo sapiens
tgatttggccagccc

SEQ ID NO: 1264620 - DNA, 15 bp, Homo sapiens
ctgatttggccagcc

SEQ ID NO: 1264621 - DNA, 15 bp, Homo sapiens
ctctgatttggccag

SEQ ID NO: 1264622 - DNA, 15 bp, Homo sapiens
cctctgatttggcca

SEQ ID NO: 1264623 - DNA, 15 bp, Homo sapiens
gcctctgatttggcc

SEQ ID NO: 1264624 - DNA, 15 bp, Homo sapiens
agcctctgatttggc

SEQ ID NO: 1264625 - DNA, 15 bp, Homo sapiens
gagcctctgatttgg

SEQ ID NO: 1264626 - DNA, 15 bp, Homo sapiens
tgagcctctgatttg

SEQ ID NO: 1264627 - DNA, 15 bp, Homo sapiens
atgagcctctgattt

SEQ ID NO: 1264628 - DNA, 15 bp, Homo sapiens
aatgagcctctgatt

SEQ ID NO: 1264629 - DNA, 15 bp, Homo sapiens
aaatgagcctctgat

SEQ ID NO: 1264630 - DNA, 15 bp, Homo sapiens
taaatgagcctctga

SEQ ID NO: 1264631 - DNA, 15 bp, Homo sapiens
ataaatgagcctctg

SEQ ID NO: 1264632 - DNA, 15 bp, Homo sapiens
tataaatgagcctct

SEQ ID NO: 1264633 - DNA, 15 bp, Homo sapiens
ttataaatgagcctc

SEQ ID NO: 1264634 - DNA, 15 bp, Homo sapiens
gttataaatgagcct

SEQ ID NO: 1264635 - DNA, 15 bp, Homo sapiens
tgttataaatgagcc

SEQ ID NO: 1264636 - DNA, 15 bp, Homo sapiens
gtgttataaatgagc

SEQ ID NO: 1264637 - DNA, 15 bp, Homo sapiens
agtgttataaatgag

SEQ ID NO: 1264638 - DNA, 15 bp, Homo sapiens
cagtgttataaatga

SEQ ID NO: 1264639 - DNA, 15 bp, Homo sapiens
tcagtgttataaatg

SEQ ID NO: 1264640 - DNA, 15 bp, Homo sapiens
ctcagtgttataaat

SEQ ID NO: 1264641 - DNA, 15 bp, Homo sapiens
cctcagtgttataaa

SEQ ID NO: 1264642 - DNA, 15 bp, Homo sapiens
tcctcagtgttataa

SEQ ID NO: 1264643 - DNA, 15 bp, Homo sapiens
atcctcagtgttata

SEQ ID NO: 1264644 - DNA, 15 bp, Homo sapiens
gatcctcagtgttat

SEQ ID NO: 1264645 - DNA, 15 bp, Homo sapiens
ggatcctcagtgtta

SEQ ID NO: 1264646 - DNA, 15 bp, Homo sapiens
tggatcctcagtgtt

SEQ ID NO: 1264647 - DNA, 15 bp, Homo sapiens
ctggatcctcagtgt

SEQ ID NO: 1264648 - DNA, 15 bp, Homo sapiens
tctggatcctcagtg

SEQ ID NO: 1264649 - DNA, 15 bp, Homo sapiens
atctggatcctcagt

SEQ ID NO: 1264650 - DNA, 15 bp, Homo sapiens
aatctggatcctcag

SEQ ID NO: 1264651 - DNA, 15 bp, Homo sapiens
gaatctggatcctca

SEQ ID NO: 1264652 - DNA, 15 bp, Homo sapiens
agaatctggatcctc

SEQ ID NO: 1264653 - DNA, 15 bp, Homo sapiens
aagaatctggatcct

SEQ ID NO: 1264654 - DNA, 15 bp, Homo sapiens
aaagaatctggatcc

SEQ ID NO: 1264655 - DNA, 15 bp, Homo sapiens
aaaagaatctggatc

SEQ ID NO: 1264656 - DNA, 15 bp, Homo sapiens
caaaagaatctggat

SEQ ID NO: 1264657 - DNA, 15 bp, Homo sapiens
tcaaaagaatctgga

SEQ ID NO: 1264658 - DNA, 15 bp, Homo sapiens
atttcaaaagaatct

SEQ ID NO: 1264659 - DNA, 15 bp, Homo sapiens
aatttcaaaagaatc

SEQ ID NO: 1264660 - DNA, 15 bp, Homo sapiens
gaatttcaaaagaat

SEQ ID NO: 1264661 - DNA, 15 bp, Homo sapiens
ggaatttcaaaagaa

SEQ ID NO: 1264662 - DNA, 15 bp, Homo sapiens
aggaatttcaaaaga

SEQ ID NO: 1264663 - DNA, 15 bp, Homo sapiens
gaggaatttcaaaag

SEQ ID NO: 1264664 - DNA, 15 bp, Homo sapiens
ggaggaatttcaaaa

SEQ ID NO: 1264665 - DNA, 15 bp, Homo sapiens
aggaggaatttcaaa

SEQ ID NO: 1264666 - DNA, 15 bp, Homo sapiens
caggaggaatttcaa

SEQ ID NO: 1264667 - DNA, 15 bp, Homo sapiens
gcaggaggaatttca

SEQ ID NO: 1264668 - DNA, 15 bp, Homo sapiens
tgcaggaggaatttc

SEQ ID NO: 1264669 - DNA, 15 bp, Homo sapiens
gtgcaggaggaattt

SEQ ID NO: 1264670 - DNA, 15 bp, Homo sapiens
ggtgcaggaggaatt

SEQ ID NO: 1264671 - DNA, 15 bp, Homo sapiens
tggtgcaggaggaat

SEQ ID NO: 1264672 - DNA, 15 bp, Homo sapiens
ttggtgcaggaggaa

SEQ ID NO: 1264673 - DNA, 15 bp, Homo sapiens
attggtgcaggagga

SEQ ID NO: 1264674 - DNA, 15 bp, Homo sapiens
tattggtgcaggagg

SEQ ID NO: 1264675 - DNA, 15 bp, Homo sapiens
atattggtgcaggag

SEQ ID NO: 1264676 - DNA, 15 bp, Homo sapiens
gatattggtgcagga

SEQ ID NO: 1264677 - DNA, 15 bp, Homo sapiens
tgatattggtgcagg

SEQ ID NO: 1264678 - DNA, 15 bp, Homo sapiens
ctgatattggtgcag

SEQ ID NO: 1264679 - DNA, 15 bp, Homo sapiens
gctgatattggtgca

SEQ ID NO: 1264680 - DNA, 15 bp, Homo sapiens
tgctgatattggtgc

SEQ ID NO: 1264681 - DNA, 15 bp, Homo sapiens
atgctgatattggtg

SEQ ID NO: 1264682 - DNA, 15 bp, Homo sapiens
aatgctgatattggt

SEQ ID NO: 1264683 - DNA, 15 bp, Homo sapiens
aaatgctgatattgg

SEQ ID NO: 1264684 - DNA, 15 bp, Homo sapiens
gaaatgctgatattg

SEQ ID NO: 1264685 - DNA, 15 bp, Homo sapiens
agaaatgctgatatt

SEQ ID NO: 1264686 - DNA, 15 bp, Homo sapiens
tagaaatgctgatat

SEQ ID NO: 1264687 - DNA, 15 bp, Homo sapiens
gtagaaatgctgata

SEQ ID NO: 1264688 - DNA, 15 bp, Homo sapiens
ggtagaaatgctgat

SEQ ID NO: 1264689 - DNA, 15 bp, Homo sapiens
aggtagaaatgctga

SEQ ID NO: 1264690 - DNA, 15 bp, Homo sapiens
gagaaggtagaaatg

SEQ ID NO: 1264691 - DNA, 15 bp, Homo sapiens
agagaaggtagaaat

SEQ ID NO: 1264692 - DNA, 15 bp, Homo sapiens
cagagaaggtagaaa

SEQ ID NO: 1264693 - DNA, 15 bp, Homo sapiens
acagagaaggtagaa

SEQ ID NO: 1264694 - DNA, 15 bp, Homo sapiens
tacagagaaggtaga

SEQ ID NO: 1264695 - DNA, 15 bp, Homo sapiens
ctacagagaaggtag

SEQ ID NO: 1264696 - DNA, 15 bp, Homo sapiens
cctacagagaaggta

SEQ ID NO: 1264697 - DNA, 15 bp, Homo sapiens
acctacagagaaggt

SEQ ID NO: 1264698 - DNA, 15 bp, Homo sapiens
aacctacagagaagg

SEQ ID NO: 1264699 - DNA, 15 bp, Homo sapiens
caacctacagagaag

SEQ ID NO: 1264700 - DNA, 15 bp, Homo sapiens
ccaacctacagagaa

SEQ ID NO: 1264701 - DNA, 15 bp, Homo sapiens
gccaacctacagaga

SEQ ID NO: 1264702 - DNA, 15 bp, Homo sapiens
agccaacctacagag

SEQ ID NO: 1264703 - DNA, 15 bp, Homo sapiens
aagccaacctacaga

SEQ ID NO: 1264704 - DNA, 15 bp, Homo sapiens
caagccaacctacag

SEQ ID NO: 1264705 - DNA, 15 bp, Homo sapiens
gcaagccaacctaca

SEQ ID NO: 1264706 - DNA, 15 bp, Homo sapiens
ggcaagccaacctac

SEQ ID NO: 1264707 - DNA, 15 bp, Homo sapiens
aggcaagccaaccta

SEQ ID NO: 1264708 - DNA, 15 bp, Homo sapiens
gaggcaagccaacct

SEQ ID NO: 1264709 - DNA, 15 bp, Homo sapiens
tgaggcaagccaacc

SEQ ID NO: 1264710 - DNA, 15 bp, Homo sapiens
gtgaggcaagccaac

SEQ ID NO: 1264711 - DNA, 15 bp, Homo sapiens
cgtgaggcaagccaa

SEQ ID NO: 1264712 - DNA, 15 bp, Homo sapiens
acgtgaggcaagcca

SEQ ID NO: 1264713 - DNA, 15 bp, Homo sapiens
aacgtgaggcaagcc

SEQ ID NO: 1264714 - DNA, 15 bp, Homo sapiens
taacgtgaggcaagc

SEQ ID NO: 1264715 - DNA, 15 bp, Homo sapiens
gtaacgtgaggcaag

SEQ ID NO: 1264716 - DNA, 15 bp, Homo sapiens
tgtaacgtgaggcaa

SEQ ID NO: 1264717 - DNA, 15 bp, Homo sapiens
ttgtaacgtgaggca

SEQ ID NO: 1264718 - DNA, 15 bp, Homo sapiens
attgtaacgtgaggc

SEQ ID NO: 1264719 - DNA, 15 bp, Homo sapiens
cattgtaacgtgagg

SEQ ID NO: 1264720 - DNA, 15 bp, Homo sapiens
ccattgtaacgtgag

SEQ ID NO: 1264721 - DNA, 15 bp, Homo sapiens
gccattgtaacgtga

SEQ ID NO: 1264722 - DNA, 15 bp, Homo sapiens
agccattgtaacgtg

SEQ ID NO: 1264723 - DNA, 15 bp, Homo sapiens
cagccattgtaacgt

SEQ ID NO: 1264724 - DNA, 15 bp, Homo sapiens
gcagccattgtaacg

SEQ ID NO: 1264725 - DNA, 15 bp, Homo sapiens
tgcagccattgtaac

SEQ ID NO: 1264726 - DNA, 15 bp, Homo sapiens
ctgcagccattgtaa

SEQ ID NO: 1264727 - DNA, 15 bp, Homo sapiens
gctgcagccattgta

SEQ ID NO: 1264728 - DNA, 15 bp, Homo sapiens
tgctgcagccattgt

SEQ ID NO: 1264729 - DNA, 15 bp, Homo sapiens
ttgctgcagccattg

SEQ ID NO: 1264730 - DNA, 15 bp, Homo sapiens
attgctgcagccatt

SEQ ID NO: 1264731 - DNA, 15 bp, Homo sapiens
gattgctgcagccat

SEQ ID NO: 1264732 - DNA, 15 bp, Homo sapiens
tgattgctgcagcca

SEQ ID NO: 1264733 - DNA, 15 bp, Homo sapiens
ctgattgctgcagcc

SEQ ID NO: 1264734 - DNA, 15 bp, Homo sapiens
tctgattgctgcagc

SEQ ID NO: 1264735 - DNA, 15 bp, Homo sapiens
ttctgattgctgcag

SEQ ID NO: 1264736 - DNA, 15 bp, Homo sapiens
cttctgattgctgca

SEQ ID NO: 1264737 - DNA, 15 bp, Homo sapiens
acttctgattgctgc

SEQ ID NO: 1264738 - DNA, 15 bp, Homo sapiens
cacttctgattgctg

SEQ ID NO: 1264739 - DNA, 15 bp, Homo sapiens
acacttctgattgct

SEQ ID NO: 1264740 - DNA, 15 bp, Homo sapiens
gacacttctgattgc

SEQ ID NO: 1264741 - DNA, 15 bp, Homo sapiens
tgacacttctgattg

SEQ ID NO: 1264742 - DNA, 15 bp, Homo sapiens
gtgacacttctgatt

SEQ ID NO: 1264743 - DNA, 15 bp, Homo sapiens
tgtgacacttctgat

SEQ ID NO: 1264744 - DNA, 15 bp, Homo sapiens
atgtgacacttctga

SEQ ID NO: 1264745 - DNA, 15 bp, Homo sapiens
gatgtgacacttctg

SEQ ID NO: 1264746 - DNA, 15 bp, Homo sapiens
ggatgtgacacttct

SEQ ID NO: 1264747 - DNA, 15 bp, Homo sapiens
aggatgtgacacttc

SEQ ID NO: 1264748 - DNA, 15 bp, Homo sapiens
gaggatgtgacactt

SEQ ID NO: 1264749 - DNA, 15 bp, Homo sapiens
tgaggatgtgacact

SEQ ID NO: 1264750 - DNA, 15 bp, Homo sapiens
ctgaggatgtgacac

SEQ ID NO: 1264751 - DNA, 15 bp, Homo sapiens
actgaggatgtgaca

SEQ ID NO: 1264752 - DNA, 15 bp, Homo sapiens
tactgaggatgtgac

SEQ ID NO: 1264753 - DNA, 15 bp, Homo sapiens
ttactgaggatgtga

SEQ ID NO: 1264754 - DNA, 15 bp, Homo sapiens
attactgaggatgtg

SEQ ID NO: 1264755 - DNA, 15 bp, Homo sapiens
tattactgaggatgt

SEQ ID NO: 1264756 - DNA, 15 bp, Homo sapiens
gtattactgaggatg

SEQ ID NO: 1264757 - DNA, 15 bp, Homo sapiens
agtattactgaggat

SEQ ID NO: 1264758 - DNA, 15 bp, Homo sapiens
aagtattactgagga

SEQ ID NO: 1264759 - DNA, 15 bp, Homo sapiens
taagtattactgagg

SEQ ID NO: 1264760 - DNA, 15 bp, Homo sapiens
ttaagtattactgag

SEQ ID NO: 1264761 - DNA, 15 bp, Homo sapiens
attaagtattactga

SEQ ID NO: 1264762 - DNA, 15 bp, Homo sapiens
tattaagtattactg

SEQ ID NO: 1264763 - DNA, 15 bp, Homo sapiens
atattaagtattact

SEQ ID NO: 1264764 - DNA, 15 bp, Homo sapiens
aatattaagtattac

SEQ ID NO: 1264765 - DNA, 15 bp, Homo sapiens
taatattaagtatta

SEQ ID NO: 1264766 - DNA, 15 bp, Homo sapiens
ataatattaagtatt

SEQ ID NO: 1264767 - DNA, 15 bp, Homo sapiens
aataatattaagtat

SEQ ID NO: 1264768 - DNA, 15 bp, Homo sapiens
taataatattaagta

SEQ ID NO: 1264769 - DNA, 15 bp, Homo sapiens
gtaataatattaagt

SEQ ID NO: 1264770 - DNA, 15 bp, Homo sapiens
agtaataatattaag

SEQ ID NO: 1264771 - DNA, 15 bp, Homo sapiens
tagtaataatattaa

SEQ ID NO: 1264772 - DNA, 15 bp, Homo sapiens
atagtaataatatta

SEQ ID NO: 1264773 - DNA, 15 bp, Homo sapiens
aatagtaataatatt

SEQ ID NO: 1264774 - DNA, 15 bp, Homo sapiens
taatagtaataatat

SEQ ID NO: 1264775 - DNA, 15 bp, Homo sapiens
ataatagtaataata

SEQ ID NO: 1264776 - DNA, 15 bp, Homo sapiens
aataatagtaataat

SEQ ID NO: 1264777 - DNA, 15 bp, Homo sapiens
aaataatagtaataa

SEQ ID NO: 1264778 - DNA, 15 bp, Homo sapiens
taaataatagtaata

SEQ ID NO: 1264779 - DNA, 15 bp, Homo sapiens
ttaaataatagtaat

SEQ ID NO: 1264780 - DNA, 15 bp, Homo sapiens
attaaataatagtaa

SEQ ID NO: 1264781 - DNA, 15 bp, Homo sapiens
tattaaataatagta

SEQ ID NO: 1264782 - DNA, 15 bp, Homo sapiens
ttattaaataatagt

SEQ ID NO: 1264783 - DNA, 15 bp, Homo sapiens
attattaaataatag

SEQ ID NO: 1264784 - DNA, 15 bp, Homo sapiens
tattattaaataata

SEQ ID NO: 1264785 - DNA, 15 bp, Homo sapiens
ctaaatattattaaa

SEQ ID NO: 1264786 - DNA, 15 bp, Homo sapiens
tctaaatattattaa

SEQ ID NO: 1264787 - DNA, 15 bp, Homo sapiens
ttctaaatattatta

SEQ ID NO: 1264788 - DNA, 15 bp, Homo sapiens
gttctaaatattatt

SEQ ID NO: 1264789 - DNA, 15 bp, Homo sapiens
agttctaaatattat

SEQ ID NO: 1264790 - DNA, 15 bp, Homo sapiens
cagttctaaatatta

SEQ ID NO: 1264791 - DNA, 15 bp, Homo sapiens
acagttctaaatatt

SEQ ID NO: 1264792 - DNA, 15 bp, Homo sapiens
cacagttctaaatat

SEQ ID NO: 1264793 - DNA, 15 bp, Homo sapiens
gcacagttctaaata

SEQ ID NO: 1264794 - DNA, 15 bp, Homo sapiens
ggcacagttctaaat

SEQ ID NO: 1264795 - DNA, 15 bp, Homo sapiens
tggcacagttctaaa

SEQ ID NO: 1264796 - DNA, 15 bp, Homo sapiens
atggcacagttctaa

SEQ ID NO: 1264797 - DNA, 15 bp, Homo sapiens
gatggcacagttcta

SEQ ID NO: 1264798 - DNA, 15 bp, Homo sapiens
ggatggcacagttct

SEQ ID NO: 1264799 - DNA, 15 bp, Homo sapiens
gggatggcacagttc

SEQ ID NO: 1264800 - DNA, 15 bp, Homo sapiens
agggatggcacagtt

SEQ ID NO: 1264801 - DNA, 15 bp, Homo sapiens
cagggatggcacagt

SEQ ID NO: 1264802 - DNA, 15 bp, Homo sapiens
acagggatggcacag

SEQ ID NO: 1264803 - DNA, 15 bp, Homo sapiens
aacagggatggcaca

SEQ ID NO: 1264804 - DNA, 15 bp, Homo sapiens
aaacagggatggcac

SEQ ID NO: 1264805 - DNA, 15 bp, Homo sapiens
gaaacagggatggca

SEQ ID NO: 1264806 - DNA, 15 bp, Homo sapiens
tgaaacagggatggc

SEQ ID NO: 1264807 - DNA, 15 bp, Homo sapiens
ttgaaacagggatgg

SEQ ID NO: 1264808 - DNA, 15 bp, Homo sapiens
attgaaacagggatg

SEQ ID NO: 1264809 - DNA, 15 bp, Homo sapiens
aattgaaacagggat

SEQ ID NO: 1264810 - DNA, 15 bp, Homo sapiens
aaattgaaacaggga

SEQ ID NO: 1264811 - DNA, 15 bp, Homo sapiens
taaattgaaacaggg

SEQ ID NO: 1264812 - DNA, 15 bp, Homo sapiens
ataaattgaaacagg

SEQ ID NO: 1264813 - DNA, 15 bp, Homo sapiens
gataaattgaaacag

SEQ ID NO: 1264814 - DNA, 15 bp, Homo sapiens
tgataaattgaaaca

SEQ ID NO: 1264815 - DNA, 15 bp, Homo sapiens
ctgataaattgaaac

SEQ ID NO: 1264816 - DNA, 15 bp, Homo sapiens
cctgataaattgaaa

SEQ ID NO: 1264817 - DNA, 15 bp, Homo sapiens
gcctgataaattgaa

SEQ ID NO: 1264818 - DNA, 15 bp, Homo sapiens
agcctgataaattga

SEQ ID NO: 1264819 - DNA, 15 bp, Homo sapiens
gagcctgataaattg

SEQ ID NO: 1264820 - DNA, 15 bp, Homo sapiens
ggagcctgataaatt

SEQ ID NO: 1264821 - DNA, 15 bp, Homo sapiens
gggagcctgataaat

SEQ ID NO: 1264822 - DNA, 15 bp, Homo sapiens
tgggagcctgataaa

SEQ ID NO: 1264823 - DNA, 15 bp, Homo sapiens
ctgggagcctgataa

SEQ ID NO: 1264824 - DNA, 15 bp, Homo sapiens
gctgggagcctgata

SEQ ID NO: 1264825 - DNA, 15 bp, Homo sapiens
tgctgggagcctgat

SEQ ID NO: 1264826 - DNA, 15 bp, Homo sapiens
ctgctgggagcctga

SEQ ID NO: 1264827 - DNA, 15 bp, Homo sapiens
tctgctgggagcctg

SEQ ID NO: 1264828 - DNA, 15 bp, Homo sapiens
gtctgctgggagcct

SEQ ID NO: 1264829 - DNA, 15 bp, Homo sapiens
agtctgctgggagcc

SEQ ID NO: 1264830 - DNA, 15 bp, Homo sapiens
tagtctgctgggagc

SEQ ID NO: 1264831 - DNA, 15 bp, Homo sapiens
gtagtctgctgggag

SEQ ID NO: 1264832 - DNA, 15 bp, Homo sapiens
agtagtctgctggga

SEQ ID NO: 1264833 - DNA, 15 bp, Homo sapiens
gagtagtctgctggg

SEQ ID NO: 1264834 - DNA, 15 bp, Homo sapiens
ggagtagtctgctgg

SEQ ID NO: 1264835 - DNA, 15 bp, Homo sapiens
aggagtagtctgctg

SEQ ID NO: 1264836 - DNA, 15 bp, Homo sapiens
aaggagtagtctgct

SEQ ID NO: 1264837 - DNA, 15 bp, Homo sapiens
taaggagtagtctgc

SEQ ID NO: 1264838 - DNA, 15 bp, Homo sapiens
ataaggagtagtctg

SEQ ID NO: 1264839 - DNA, 15 bp, Homo sapiens
gataaggagtagtct

SEQ ID NO: 1264840 - DNA, 15 bp, Homo sapiens
agataaggagtagtc

SEQ ID NO: 1264841 - DNA, 15 bp, Homo sapiens
aagataaggagtagt

SEQ ID NO: 1264842 - DNA, 15 bp, Homo sapiens
aaagataaggagtag

SEQ ID NO: 1264843 - DNA, 15 bp, Homo sapiens
gaaagataaggagta

SEQ ID NO: 1264844 - DNA, 15 bp, Homo sapiens
tgaaagataaggagt

SEQ ID NO: 1264845 - DNA, 15 bp, Homo sapiens
ttgaaagataaggag

SEQ ID NO: 1264846 - DNA, 15 bp, Homo sapiens
tttgaaagataagga

SEQ ID NO: 1264847 - DNA, 15 bp, Homo sapiens
atttgaaagataagg

SEQ ID NO: 1264848 - DNA, 15 bp, Homo sapiens
catttgaaagataag

SEQ ID NO: 1264849 - DNA, 15 bp, Homo sapiens
acatttgaaagataa

SEQ ID NO: 1264850 - DNA, 15 bp, Homo sapiens
gacatttgaaagata

SEQ ID NO: 1264851 - DNA, 15 bp, Homo sapiens
tgacatttgaaagat

SEQ ID NO: 1264852 - DNA, 15 bp, Homo sapiens
ttgacatttgaaaga

SEQ ID NO: 1264853 - DNA, 15 bp, Homo sapiens
tttgacatttgaaag

SEQ ID NO: 1264854 - DNA, 15 bp, Homo sapiens
ttttgacatttgaaa

SEQ ID NO: 1264855 - DNA, 15 bp, Homo sapiens
gttttgacatttgaa

SEQ ID NO: 1264856 - DNA, 15 bp, Homo sapiens
agttttgacatttga

SEQ ID NO: 1264857 - DNA, 15 bp, Homo sapiens
cagttttgacatttg

SEQ ID NO: 1264858 - DNA, 15 bp, Homo sapiens
gcagttttgacattt

SEQ ID NO: 1264859 - DNA, 15 bp, Homo sapiens
tgcagttttgacatt

SEQ ID NO: 1264860 - DNA, 15 bp, Homo sapiens
atgcagttttgacat

SEQ ID NO: 1264861 - DNA, 15 bp, Homo sapiens
gatgcagttttgaca

SEQ ID NO: 1264862 - DNA, 15 bp, Homo sapiens
ggatgcagttttgac

SEQ ID NO: 1264863 - DNA, 15 bp, Homo sapiens
aggatgcagttttga

SEQ ID NO: 1264864 - DNA, 15 bp, Homo sapiens
caggatgcagttttg

SEQ ID NO: 1264865 - DNA, 15 bp, Homo sapiens
tcaggatgcagtttt

SEQ ID NO: 1264866 - DNA, 15 bp, Homo sapiens
ctcaggatgcagttt

SEQ ID NO: 1264867 - DNA, 15 bp, Homo sapiens
gctcaggatgcagtt

SEQ ID NO: 1264868 - DNA, 15 bp, Homo sapiens
agctcaggatgcagt

SEQ ID NO: 1264869 - DNA, 15 bp, Homo sapiens
gagctcaggatgcag

SEQ ID NO: 1264870 - DNA, 15 bp, Homo sapiens
agagctcaggatgca

SEQ ID NO: 1264871 - DNA, 15 bp, Homo sapiens
aagagctcaggatgc

SEQ ID NO: 1264872 - DNA, 15 bp, Homo sapiens
caagagctcaggatg

SEQ ID NO: 1264873 - DNA, 15 bp, Homo sapiens
gcaagagctcaggat

SEQ ID NO: 1264874 - DNA, 15 bp, Homo sapiens
ggcaagagctcagga

SEQ ID NO: 1264875 - DNA, 15 bp, Homo sapiens
aggcaagagctcagg

SEQ ID NO: 1264876 - DNA, 15 bp, Homo sapiens
taggcaagagctcag

SEQ ID NO: 1264877 - DNA, 15 bp, Homo sapiens
ttaggcaagagctca

SEQ ID NO: 1264878 - DNA, 15 bp, Homo sapiens
tttaggcaagagctc

SEQ ID NO: 1264879 - DNA, 15 bp, Homo sapiens
gtttaggcaagagct

SEQ ID NO: 1264880 - DNA, 15 bp, Homo sapiens
agtttaggcaagagc

SEQ ID NO: 1264881 - DNA, 15 bp, Homo sapiens
tagtttaggcaagag

SEQ ID NO: 1264882 - DNA, 15 bp, Homo sapiens
ttagtttaggcaaga

SEQ ID NO: 1264883 - DNA, 15 bp, Homo sapiens
attagtttaggcaag

SEQ ID NO: 1264884 - DNA, 15 bp, Homo sapiens
gattagtttaggcaa

SEQ ID NO: 1264885 - DNA, 15 bp, Homo sapiens
agattagtttaggca

SEQ ID NO: 1264886 - DNA, 15 bp, Homo sapiens
cagattagtttaggc

SEQ ID NO: 1264887 - DNA, 15 bp, Homo sapiens
ccagattagtttagg

SEQ ID NO: 1264888 - DNA, 15 bp, Homo sapiens
cccagattagtttag

SEQ ID NO: 1264889 - DNA, 15 bp, Homo sapiens
ccccagattagttta

SEQ ID NO: 1264890 - DNA, 15 bp, Homo sapiens
accccagattagttt

SEQ ID NO: 1264891 - DNA, 15 bp, Homo sapiens
caccccagattagtt

SEQ ID NO: 1264892 - DNA, 15 bp, Homo sapiens
tcaccccagattagt

SEQ ID NO: 1264893 - DNA, 15 bp, Homo sapiens
ctcaccccagattag

SEQ ID NO: 1264894 - DNA, 15 bp, Homo sapiens
cctcaccccagatta

SEQ ID NO: 1264895 - DNA, 15 bp, Homo sapiens
acctcaccccagatt

SEQ ID NO: 1264896 - DNA, 15 bp, Homo sapiens
cacctcaccccagat

SEQ ID NO: 1264897 - DNA, 15 bp, Homo sapiens
tcacctcaccccaga

SEQ ID NO: 1264898 - DNA, 15 bp, Homo sapiens
ttcacctcaccccag

SEQ ID NO: 1264899 - DNA, 15 bp, Homo sapiens
attcacctcacccca

SEQ ID NO: 1264900 - DNA, 15 bp, Homo sapiens
cattcacctcacccc

SEQ ID NO: 1264901 - DNA, 15 bp, Homo sapiens
ccattcacctcaccc

SEQ ID NO: 1264902 - DNA, 15 bp, Homo sapiens
tccattcacctcacc

SEQ ID NO: 1264903 - DNA, 15 bp, Homo sapiens
ttccattcacctcac

SEQ ID NO: 1264904 - DNA, 15 bp, Homo sapiens
cttccattcacctca

SEQ ID NO: 1264905 - DNA, 15 bp, Homo sapiens
acttccattcacctc

SEQ ID NO: 1264906 - DNA, 15 bp, Homo sapiens
tacttccattcacct

SEQ ID NO: 1264907 - DNA, 15 bp, Homo sapiens
ctacttccattcacc

SEQ ID NO: 1264908 - DNA, 15 bp, Homo sapiens
gctacttccattcac

SEQ ID NO: 1264909 - DNA, 15 bp, Homo sapiens
tgctacttccattca

SEQ ID NO: 1264910 - DNA, 15 bp, Homo sapiens
gtgctacttccattc

SEQ ID NO: 1264911 - DNA, 15 bp, Homo sapiens
agtgctacttccatt

SEQ ID NO: 1264912 - DNA, 15 bp, Homo sapiens
aagtgctacttccat

SEQ ID NO: 1264913 - DNA, 15 bp, Homo sapiens
aaagtgctacttcca

SEQ ID NO: 1264914 - DNA, 15 bp, Homo sapiens
taaagtgctacttcc

SEQ ID NO: 1264915 - DNA, 15 bp, Homo sapiens
ttaaagtgctacttc

SEQ ID NO: 1264916 - DNA, 15 bp, Homo sapiens
aattaaagtgctact

SEQ ID NO: 1264917 - DNA, 15 bp, Homo sapiens
caattaaagtgctac

SEQ ID NO: 1264918 - DNA, 15 bp, Homo sapiens
acaattaaagtgcta

SEQ ID NO: 1264919 - DNA, 15 bp, Homo sapiens
tacaattaaagtgct

SEQ ID NO: 1264920 - DNA, 15 bp, Homo sapiens
atacaattaaagtgc

SEQ ID NO: 1264921 - DNA, 15 bp, Homo sapiens
aatacaattaaagtg

SEQ ID NO: 1264922 - DNA, 15 bp, Homo sapiens
gaatacaattaaagt

SEQ ID NO: 1264923 - DNA, 15 bp, Homo sapiens
tgaatacaattaaag

SEQ ID NO: 1264924 - DNA, 15 bp, Homo sapiens
atgaatacaattaaa

SEQ ID NO: 1264925 - DNA, 15 bp, Homo sapiens
aatgaatacaattaa

SEQ ID NO: 1264926 - DNA, 15 bp, Homo sapiens
gaatgaatacaatta

SEQ ID NO: 1264927 - DNA, 15 bp, Homo sapiens
agaatgaatacaatt

SEQ ID NO: 1264928 - DNA, 15 bp, Homo sapiens
aagaatgaatacaat

SEQ ID NO: 1264929 - DNA, 15 bp, Homo sapiens
aaagaatgaatacaa

SEQ ID NO: 1264930 - DNA, 15 bp, Homo sapiens
caaagaatgaataca

SEQ ID NO: 1264931 - DNA, 15 bp, Homo sapiens
acaaagaatgaatac

SEQ ID NO: 1264932 - DNA, 15 bp, Homo sapiens
tacaaagaatgaata

SEQ ID NO: 1264933 - DNA, 15 bp, Homo sapiens
ctacaaagaatgaat

SEQ ID NO: 1264934 - DNA, 15 bp, Homo sapiens
gctacaaagaatgaa

SEQ ID NO: 1264935 - DNA, 15 bp, Homo sapiens
agctacaaagaatga

SEQ ID NO: 1264936 - DNA, 15 bp, Homo sapiens
cagctacaaagaatg

SEQ ID NO: 1264937 - DNA, 15 bp, Homo sapiens
ccagctacaaagaat

SEQ ID NO: 1264938 - DNA, 15 bp, Homo sapiens
tccagctacaaagaa

SEQ ID NO: 1264939 - DNA, 15 bp, Homo sapiens
gtccagctacaaaga

SEQ ID NO: 1264940 - DNA, 15 bp, Homo sapiens
ggtccagctacaaag

SEQ ID NO: 1264941 - DNA, 15 bp, Homo sapiens
aggtccagctacaaa

SEQ ID NO: 1264942 - DNA, 15 bp, Homo sapiens
caggtccagctacaa

SEQ ID NO: 1264943 - DNA, 15 bp, Homo sapiens
ccaggtccagctaca

SEQ ID NO: 1264944 - DNA, 15 bp, Homo sapiens
cccaggtccagctac

SEQ ID NO: 1264945 - DNA, 15 bp, Homo sapiens
gcccaggtccagcta

SEQ ID NO: 1264946 - DNA, 15 bp, Homo sapiens
ggcccaggtccagct

SEQ ID NO: 1264947 - DNA, 15 bp, Homo sapiens
aggcccaggtccagc

SEQ ID NO: 1264948 - DNA, 15 bp, Homo sapiens
caggcccaggtccag

SEQ ID NO: 1264949 - DNA, 15 bp, Homo sapiens
ccaggcccaggtcca

SEQ ID NO: 1264950 - DNA, 15 bp, Homo sapiens
cccaggcccaggtcc

SEQ ID NO: 1264951 - DNA, 15 bp, Homo sapiens
gcccaggcccaggtc

SEQ ID NO: 1264952 - DNA, 15 bp, Homo sapiens
ggcccaggcccaggt

SEQ ID NO: 1264953 - DNA, 15 bp, Homo sapiens
gggcccaggcccagg

SEQ ID NO: 1264954 - DNA, 15 bp, Homo sapiens
agggcccaggcccag

SEQ ID NO: 1264955 - DNA, 15 bp, Homo sapiens
tagggcccaggccca

SEQ ID NO: 1264956 - DNA, 15 bp, Homo sapiens
atagggcccaggccc

SEQ ID NO: 1264957 - DNA, 15 bp, Homo sapiens
gatagggcccaggcc

SEQ ID NO: 1264958 - DNA, 15 bp, Homo sapiens
agatagggcccaggc

SEQ ID NO: 1264959 - DNA, 15 bp, Homo sapiens
gagatagggcccagg

SEQ ID NO: 1264960 - DNA, 15 bp, Homo sapiens
ggagatagggcccag

SEQ ID NO: 1264961 - DNA, 15 bp, Homo sapiens
aggagatagggccca

SEQ ID NO: 1264962 - DNA, 15 bp, Homo sapiens
caggagatagggccc

SEQ ID NO: 1264963 - DNA, 15 bp, Homo sapiens
tcaggagatagggcc

SEQ ID NO: 1264964 - DNA, 15 bp, Homo sapiens
gtcaggagatagggc

SEQ ID NO: 1264965 - DNA, 15 bp, Homo sapiens
tgtcaggagataggg

SEQ ID NO: 1264966 - DNA, 15 bp, Homo sapiens
atgtcaggagatagg

SEQ ID NO: 1264967 - DNA, 15 bp, Homo sapiens
aatgtcaggagatag

SEQ ID NO: 1264968 - DNA, 15 bp, Homo sapiens
aaatgtcaggagata

SEQ ID NO: 1264969 - DNA, 15 bp, Homo sapiens
caaatgtcaggagat

SEQ ID NO: 1264970 - DNA, 15 bp, Homo sapiens
gcaaatgtcaggaga

SEQ ID NO: 1264971 - DNA, 15 bp, Homo sapiens
ggcaaatgtcaggag

SEQ ID NO: 1264972 - DNA, 15 bp, Homo sapiens
gggcaaatgtcagga

SEQ ID NO: 1264973 - DNA, 15 bp, Homo sapiens
tgggcaaatgtcagg

SEQ ID NO: 1264974 - DNA, 15 bp, Homo sapiens
gtgggcaaatgtcag

SEQ ID NO: 1264975 - DNA, 15 bp, Homo sapiens
tgtgggcaaatgtca

SEQ ID NO: 1264976 - DNA, 15 bp, Homo sapiens
ttgtgggcaaatgtc

SEQ ID NO: 1264977 - DNA, 15 bp, Homo sapiens
cttgtgggcaaatgt

SEQ ID NO: 1264978 - DNA, 15 bp, Homo sapiens
tcttgtgggcaaatg

SEQ ID NO: 1264979 - DNA, 15 bp, Homo sapiens
ttcttgtgggcaaat

SEQ ID NO: 1264980 - DNA, 15 bp, Homo sapiens
tttcttgtgggcaaa

SEQ ID NO: 1264981 - DNA, 15 bp, Homo sapiens
ctttcttgtgggcaa

SEQ ID NO: 1264982 - DNA, 15 bp, Homo sapiens
tctttcttgtgggca

SEQ ID NO: 1264983 - DNA, 15 bp, Homo sapiens
atctttcttgtgggc

SEQ ID NO: 1264984 - DNA, 15 bp, Homo sapiens
aatctttcttgtggg

SEQ ID NO: 1264985 - DNA, 15 bp, Homo sapiens
aaatctttcttgtgg

SEQ ID NO: 1264986 - DNA, 15 bp, Homo sapiens
gaaatctttcttgtg

SEQ ID NO: 1264987 - DNA, 15 bp, Homo sapiens
agaaatctttcttgt

SEQ ID NO: 1264988 - DNA, 15 bp, Homo sapiens
cagaaatctttcttg

SEQ ID NO: 1264989 - DNA, 15 bp, Homo sapiens
tcagaaatctttctt

SEQ ID NO: 1264990 - DNA, 15 bp, Homo sapiens
ttcagaaatctttct

SEQ ID NO: 1264991 - DNA, 15 bp, Homo sapiens
cttcagaaatctttc

SEQ ID NO: 1264992 - DNA, 15 bp, Homo sapiens
acttcagaaatcttt

SEQ ID NO: 1264993 - DNA, 15 bp, Homo sapiens
aacttcagaaatctt

SEQ ID NO: 1264994 - DNA, 15 bp, Homo sapiens
taacttcagaaatct

SEQ ID NO: 1264995 - DNA, 15 bp, Homo sapiens
ctaacttcagaaatc

SEQ ID NO: 1264996 - DNA, 15 bp, Homo sapiens
cctaacttcagaaat

SEQ ID NO: 1264997 - DNA, 15 bp, Homo sapiens
acctaacttcagaaa

SEQ ID NO: 1264998 - DNA, 15 bp, Homo sapiens
tacctaacttcagaa

SEQ ID NO: 1264999 - DNA, 15 bp, Homo sapiens
ctacctaacttcaga

SEQ ID NO: 1265000 - DNA, 15 bp, Homo sapiens
cctacctaacttcag

SEQ ID NO: 1265001 - DNA, 15 bp, Homo sapiens
tcctacctaacttca

SEQ ID NO: 1265002 - DNA, 15 bp, Homo sapiens
gtcctacctaacttc

SEQ ID NO: 1265003 - DNA, 15 bp, Homo sapiens
agtcctacctaactt

SEQ ID NO: 1265004 - DNA, 15 bp, Homo sapiens
cagtcctacctaact

SEQ ID NO: 1265005 - DNA, 15 bp, Homo sapiens
ccagtcctacctaac

SEQ ID NO: 1265006 - DNA, 15 bp, Homo sapiens
gccagtcctacctaa

SEQ ID NO: 1265007 - DNA, 15 bp, Homo sapiens
agccagtcctaccta

SEQ ID NO: 1265008 - DNA, 15 bp, Homo sapiens
cagccagtcctacct

SEQ ID NO: 1265009 - DNA, 15 bp, Homo sapiens
acagccagtcctacc

SEQ ID NO: 1265010 - DNA, 15 bp, Homo sapiens
aacagccagtcctac

SEQ ID NO: 1265011 - DNA, 15 bp, Homo sapiens
caacagccagtccta

SEQ ID NO: 1265012 - DNA, 15 bp, Homo sapiens
tcaacagccagtcct

SEQ ID NO: 1265013 - DNA, 15 bp, Homo sapiens
ctcaacagccagtcc

SEQ ID NO: 1265014 - DNA, 15 bp, Homo sapiens
actcaacagccagtc

SEQ ID NO: 1265015 - DNA, 15 bp, Homo sapiens
tactcaacagccagt

SEQ ID NO: 1265016 - DNA, 15 bp, Homo sapiens
ctactcaacagccag

SEQ ID NO: 1265017 - DNA, 15 bp, Homo sapiens
cctactcaacagcca

SEQ ID NO: 1265018 - DNA, 15 bp, Homo sapiens
gcctactcaacagcc

SEQ ID NO: 1265019 - DNA, 15 bp, Homo sapiens
ggcctactcaacagc

SEQ ID NO: 1265020 - DNA, 15 bp, Homo sapiens
tggcctactcaacag

SEQ ID NO: 1265021 - DNA, 15 bp, Homo sapiens
ctggcctactcaaca

SEQ ID NO: 1265022 - DNA, 15 bp, Homo sapiens
actggcctactcaac

SEQ ID NO: 1265023 - DNA, 15 bp, Homo sapiens
cactggcctactcaa

SEQ ID NO: 1265024 - DNA, 15 bp, Homo sapiens
gcactggcctactca

SEQ ID NO: 1265025 - DNA, 15 bp, Homo sapiens
agcactggcctactc

SEQ ID NO: 1265026 - DNA, 15 bp, Homo sapiens
aagcactggcctact

SEQ ID NO: 1265027 - DNA, 15 bp, Homo sapiens
caagcactggcctac

SEQ ID NO: 1265028 - DNA, 15 bp, Homo sapiens
gcaagcactggccta

SEQ ID NO: 1265029 - DNA, 15 bp, Homo sapiens
ggcaagcactggcct

SEQ ID NO: 1265030 - DNA, 15 bp, Homo sapiens
tggcaagcactggcc

SEQ ID NO: 1265031 - DNA, 15 bp, Homo sapiens
ttggcaagcactggc

SEQ ID NO: 1265032 - DNA, 15 bp, Homo sapiens
tttggcaagcactgg

SEQ ID NO: 1265033 - DNA, 15 bp, Homo sapiens
gtttggcaagcactg

SEQ ID NO: 1265034 - DNA, 15 bp, Homo sapiens
ggtttggcaagcact

SEQ ID NO: 1265035 - DNA, 15 bp, Homo sapiens
aggtttggcaagcac

SEQ ID NO: 1265036 - DNA, 15 bp, Homo sapiens
aaggtttggcaagca

SEQ ID NO: 1265037 - DNA, 15 bp, Homo sapiens
aaaggtttggcaagc

SEQ ID NO: 1265038 - DNA, 15 bp, Homo sapiens
taaaggtttggcaag

SEQ ID NO: 1265039 - DNA, 15 bp, Homo sapiens
gtaaaggtttggcaa

SEQ ID NO: 1265040 - DNA, 15 bp, Homo sapiens
tgtaaaggtttggca

SEQ ID NO: 1265041 - DNA, 15 bp, Homo sapiens
gtgtaaaggtttggc

SEQ ID NO: 1265042 - DNA, 15 bp, Homo sapiens
tgtgtaaaggtttgg

SEQ ID NO: 1265043 - DNA, 15 bp, Homo sapiens
atgtgtaaaggtttg

SEQ ID NO: 1265044 - DNA, 15 bp, Homo sapiens
gatgtgtaaaggttt

SEQ ID NO: 1265045 - DNA, 15 bp, Homo sapiens
ggatgtgtaaaggtt

SEQ ID NO: 1265046 - DNA, 15 bp, Homo sapiens
aggatgtgtaaaggt

SEQ ID NO: 1265047 - DNA, 15 bp, Homo sapiens
gaggatgtgtaaagg

SEQ ID NO: 1265048 - DNA, 15 bp, Homo sapiens
tgaggatgtgtaaag

SEQ ID NO: 1265049 - DNA, 15 bp, Homo sapiens
gtgaggatgtgtaaa

SEQ ID NO: 1265050 - DNA, 15 bp, Homo sapiens
tgtgaggatgtgtaa

SEQ ID NO: 1265051 - DNA, 15 bp, Homo sapiens
atgtgaggatgtgta

SEQ ID NO: 1265052 - DNA, 15 bp, Homo sapiens
tatgtgaggatgtgt

SEQ ID NO: 1265053 - DNA, 15 bp, Homo sapiens
atatgtgaggatgtg

SEQ ID NO: 1265054 - DNA, 15 bp, Homo sapiens
catatgtgaggatgt

SEQ ID NO: 1265055 - DNA, 15 bp, Homo sapiens
acatatgtgaggatg

SEQ ID NO: 1265056 - DNA, 15 bp, Homo sapiens
gacatatgtgaggat

SEQ ID NO: 1265057 - DNA, 15 bp, Homo sapiens
tgacatatgtgagga

SEQ ID NO: 1265058 - DNA, 15 bp, Homo sapiens
atgacatatgtgagg

SEQ ID NO: 1265059 - DNA, 15 bp, Homo sapiens
tatgacatatgtgag

SEQ ID NO: 1265060 - DNA, 15 bp, Homo sapiens
ttatgacatatgtga

SEQ ID NO: 1265061 - DNA, 15 bp, Homo sapiens
attatgacatatgtg

SEQ ID NO: 1265062 - DNA, 15 bp, Homo sapiens
tattatgacatatgt

SEQ ID NO: 1265063 - DNA, 15 bp, Homo sapiens
atattatgacatatg

SEQ ID NO: 1265064 - DNA, 15 bp, Homo sapiens
catattatgacatat

SEQ ID NO: 1265065 - DNA, 15 bp, Homo sapiens
gcatattatgacata

SEQ ID NO: 1265066 - DNA, 15 bp, Homo sapiens
tgcatattatgacat

SEQ ID NO: 1265067 - DNA, 15 bp, Homo sapiens
ctgcatattatgaca

SEQ ID NO: 1265068 - DNA, 15 bp, Homo sapiens
tctgcatattatgac

SEQ ID NO: 1265069 - DNA, 15 bp, Homo sapiens
atctgcatattatga

SEQ ID NO: 1265070 - DNA, 15 bp, Homo sapiens
tatctgcatattatg

SEQ ID NO: 1265071 - DNA, 15 bp, Homo sapiens
ttatctgcatattat

SEQ ID NO: 1265072 - DNA, 15 bp, Homo sapiens
tttatctgcatatta

SEQ ID NO: 1265073 - DNA, 15 bp, Homo sapiens
ttttatctgcatatt

SEQ ID NO: 1265074 - DNA, 15 bp, Homo sapiens
tttttatctgcatat

SEQ ID NO: 1265075 - DNA, 15 bp, Homo sapiens
ctttttatctgcata

SEQ ID NO: 1265076 - DNA, 15 bp, Homo sapiens
tctttttatctgcat

SEQ ID NO: 1265077 - DNA, 15 bp, Homo sapiens
atctttttatctgca

SEQ ID NO: 1265078 - DNA, 15 bp, Homo sapiens
tatctttttatctgc

SEQ ID NO: 1265079 - DNA, 15 bp, Homo sapiens
ttatctttttatctg

SEQ ID NO: 1265080 - DNA, 15 bp, Homo sapiens
attatctttttatct

SEQ ID NO: 1265081 - DNA, 15 bp, Homo sapiens
gattatctttttatc

SEQ ID NO: 1265082 - DNA, 15 bp, Homo sapiens
ggattatctttttat

SEQ ID NO: 1265083 - DNA, 15 bp, Homo sapiens
gggattatcttttta

SEQ ID NO: 1265084 - DNA, 15 bp, Homo sapiens
agggattatcttttt

SEQ ID NO: 1265085 - DNA, 15 bp, Homo sapiens
aagggattatctttt

SEQ ID NO: 1265086 - DNA, 15 bp, Homo sapiens
taagggattatcttt

SEQ ID NO: 1265087 - DNA, 15 bp, Homo sapiens
ataagggattatctt

SEQ ID NO: 1265088 - DNA, 15 bp, Homo sapiens
tataagggattatct

SEQ ID NO: 1265089 - DNA, 15 bp, Homo sapiens
gtataagggattatc

SEQ ID NO: 1265090 - DNA, 15 bp, Homo sapiens
tgtataagggattat

SEQ ID NO: 1265091 - DNA, 15 bp, Homo sapiens
ttgtataagggatta

SEQ ID NO: 1265092 - DNA, 15 bp, Homo sapiens
gttgtataagggatt

SEQ ID NO: 1265093 - DNA, 15 bp, Homo sapiens
agttgtataagggat

SEQ ID NO: 1265094 - DNA, 15 bp, Homo sapiens
aagttgtataaggga

SEQ ID NO: 1265095 - DNA, 15 bp, Homo sapiens
caagttgtataaggg

SEQ ID NO: 1265096 - DNA, 15 bp, Homo sapiens
gcaagttgtataagg

SEQ ID NO: 1265097 - DNA, 15 bp, Homo sapiens
agcaagttgtataag

SEQ ID NO: 1265098 - DNA, 15 bp, Homo sapiens
cagcaagttgtataa

SEQ ID NO: 1265099 - DNA, 15 bp, Homo sapiens
ccagcaagttgtata

SEQ ID NO: 1265100 - DNA, 15 bp, Homo sapiens
cccagcaagttgtat

SEQ ID NO: 1265101 - DNA, 15 bp, Homo sapiens
tcccagcaagttgta

SEQ ID NO: 1265102 - DNA, 15 bp, Homo sapiens
atcccagcaagttgt

SEQ ID NO: 1265103 - DNA, 15 bp, Homo sapiens
tatcccagcaagttg

SEQ ID NO: 1265104 - DNA, 15 bp, Homo sapiens
ttatcccagcaagtt

SEQ ID NO: 1265105 - DNA, 15 bp, Homo sapiens
tttatcccagcaagt

SEQ ID NO: 1265106 - DNA, 15 bp, Homo sapiens
gtttatcccagcaag

SEQ ID NO: 1265107 - DNA, 15 bp, Homo sapiens
agtttatcccagcaa

SEQ ID NO: 1265108 - DNA, 15 bp, Homo sapiens
gagtttatcccagca

SEQ ID NO: 1265109 - DNA, 15 bp, Homo sapiens
tgagtttatcccagc

SEQ ID NO: 1265110 - DNA, 15 bp, Homo sapiens
ctgagtttatcccag

SEQ ID NO: 1265111 - DNA, 15 bp, Homo sapiens
cctgagtttatccca

SEQ ID NO: 1265112 - DNA, 15 bp, Homo sapiens
tcctgagtttatccc

SEQ ID NO: 1265113 - DNA, 15 bp, Homo sapiens
ctcctgagtttatcc

SEQ ID NO: 1265114 - DNA, 15 bp, Homo sapiens
cctcctgagtttatc

SEQ ID NO: 1265115 - DNA, 15 bp, Homo sapiens
gcctcctgagtttat

SEQ ID NO: 1265116 - DNA, 15 bp, Homo sapiens
agcctcctgagttta

SEQ ID NO: 1265117 - DNA, 15 bp, Homo sapiens
aagcctcctgagttt

SEQ ID NO: 1265118 - DNA, 15 bp, Homo sapiens
taagcctcctgagtt

SEQ ID NO: 1265119 - DNA, 15 bp, Homo sapiens
gtaagcctcctgagt

SEQ ID NO: 1265120 - DNA, 15 bp, Homo sapiens
tgtaagcctcctgag

SEQ ID NO: 1265121 - DNA, 15 bp, Homo sapiens
ctgtaagcctcctga

SEQ ID NO: 1265122 - DNA, 15 bp, Homo sapiens
gctgtaagcctcctg

SEQ ID NO: 1265123 - DNA, 15 bp, Homo sapiens
ggctgtaagcctcct

SEQ ID NO: 1265124 - DNA, 15 bp, Homo sapiens
tggctgtaagcctcc

SEQ ID NO: 1265125 - DNA, 15 bp, Homo sapiens
atggctgtaagcctc

SEQ ID NO: 1265126 - DNA, 15 bp, Homo sapiens
catggctgtaagcct

SEQ ID NO: 1265127 - DNA, 15 bp, Homo sapiens
tcatggctgtaagcc

SEQ ID NO: 1265128 - DNA, 15 bp, Homo sapiens
gtcatggctgtaagc

SEQ ID NO: 1265129 - DNA, 15 bp, Homo sapiens
ggtcatggctgtaag

SEQ ID NO: 1265130 - DNA, 15 bp, Homo sapiens
aggtcatggctgtaa

SEQ ID NO: 1265131 - DNA, 15 bp, Homo sapiens
caggtcatggctgta

SEQ ID NO: 1265132 - DNA, 15 bp, Homo sapiens
gcaggtcatggctgt

SEQ ID NO: 1265133 - DNA, 15 bp, Homo sapiens
agcaggtcatggctg

SEQ ID NO: 1265134 - DNA, 15 bp, Homo sapiens
aagcaggtcatggct

SEQ ID NO: 1265135 - DNA, 15 bp, Homo sapiens
caagcaggtcatggc

SEQ ID NO: 1265136 - DNA, 15 bp, Homo sapiens
tcaagcaggtcatgg

SEQ ID NO: 1265137 - DNA, 15 bp, Homo sapiens
ttcaagcaggtcatg

SEQ ID NO: 1265138 - DNA, 15 bp, Homo sapiens
cttcaagcaggtcat

SEQ ID NO: 1265139 - DNA, 15 bp, Homo sapiens
ccttcaagcaggtca

SEQ ID NO: 1265140 - DNA, 15 bp, Homo sapiens
accttcaagcaggtc

SEQ ID NO: 1265141 - DNA, 15 bp, Homo sapiens
aaccttcaagcaggt

SEQ ID NO: 1265142 - DNA, 15 bp, Homo sapiens
gaaccttcaagcagg

SEQ ID NO: 1265143 - DNA, 15 bp, Homo sapiens
agaaccttcaagcag

SEQ ID NO: 1265144 - DNA, 15 bp, Homo sapiens
aagaaccttcaagca

SEQ ID NO: 1265145 - DNA, 15 bp, Homo sapiens
gaagaaccttcaagc

SEQ ID NO: 1265146 - DNA, 15 bp, Homo sapiens
ggaagaaccttcaag

SEQ ID NO: 1265147 - DNA, 15 bp, Homo sapiens
aggaagaaccttcaa

SEQ ID NO: 1265148 - DNA, 15 bp, Homo sapiens
caggaagaaccttca

SEQ ID NO: 1265149 - DNA, 15 bp, Homo sapiens
gcaggaagaaccttc

SEQ ID NO: 1265150 - DNA, 15 bp, Homo sapiens
ggcaggaagaacctt

SEQ ID NO: 1265151 - DNA, 15 bp, Homo sapiens
aggcaggaagaacct

SEQ ID NO: 1265152 - DNA, 15 bp, Homo sapiens
aaggcaggaagaacc

SEQ ID NO: 1265153 - DNA, 15 bp, Homo sapiens
taaggcaggaagaac

SEQ ID NO: 1265154 - DNA, 15 bp, Homo sapiens
ctaaggcaggaagaa

SEQ ID NO: 1265155 - DNA, 15 bp, Homo sapiens
tctaaggcaggaaga

SEQ ID NO: 1265156 - DNA, 15 bp, Homo sapiens
gtctaaggcaggaag

SEQ ID NO: 1265157 - DNA, 15 bp, Homo sapiens
ggtctaaggcaggaa

SEQ ID NO: 1265158 - DNA, 15 bp, Homo sapiens
aggtctaaggcagga

SEQ ID NO: 1265159 - DNA, 15 bp, Homo sapiens
aaggtctaaggcagg

SEQ ID NO: 1265160 - DNA, 15 bp, Homo sapiens
caaggtctaaggcag

SEQ ID NO: 1265161 - DNA, 15 bp, Homo sapiens
gcaaggtctaaggca

SEQ ID NO: 1265162 - DNA, 15 bp, Homo sapiens
agcaaggtctaaggc

SEQ ID NO: 1265163 - DNA, 15 bp, Homo sapiens
gagcaaggtctaagg

SEQ ID NO: 1265164 - DNA, 15 bp, Homo sapiens
tgagcaaggtctaag

SEQ ID NO: 1265165 - DNA, 15 bp, Homo sapiens
ctgagcaaggtctaa

SEQ ID NO: 1265166 - DNA, 15 bp, Homo sapiens
gctgagcaaggtcta

SEQ ID NO: 1265167 - DNA, 15 bp, Homo sapiens
agctgagcaaggtct

SEQ ID NO: 1265168 - DNA, 15 bp, Homo sapiens
cagctgagcaaggtc

SEQ ID NO: 1265169 - DNA, 15 bp, Homo sapiens
gcagctgagcaaggt

SEQ ID NO: 1265170 - DNA, 15 bp, Homo sapiens
agcagctgagcaagg

SEQ ID NO: 1265171 - DNA, 15 bp, Homo sapiens
gagcagctgagcaag

SEQ ID NO: 1265172 - DNA, 15 bp, Homo sapiens
ggagcagctgagcaa

SEQ ID NO: 1265173 - DNA, 15 bp, Homo sapiens
tggagcagctgagca

SEQ ID NO: 1265174 - DNA, 15 bp, Homo sapiens
ctggagcagctgagc

SEQ ID NO: 1265175 - DNA, 15 bp, Homo sapiens
cctggagcagctgag

SEQ ID NO: 1265176 - DNA, 15 bp, Homo sapiens
tcctggagcagctga

SEQ ID NO: 1265177 - DNA, 15 bp, Homo sapiens
atcctggagcagctg

SEQ ID NO: 1265178 - DNA, 15 bp, Homo sapiens
catcctggagcagct

SEQ ID NO: 1265179 - DNA, 15 bp, Homo sapiens
tcatcctggagcagc

SEQ ID NO: 1265180 - DNA, 15 bp, Homo sapiens
ctcatcctggagcag

SEQ ID NO: 1265181 - DNA, 15 bp, Homo sapiens
cctcatcctggagca

SEQ ID NO: 1265182 - DNA, 15 bp, Homo sapiens
ccctcatcctggagc

SEQ ID NO: 1265183 - DNA, 15 bp, Homo sapiens
cccctcatcctggag

SEQ ID NO: 1265184 - DNA, 15 bp, Homo sapiens
tcccctcatcctgga

SEQ ID NO: 1265185 - DNA, 15 bp, Homo sapiens
atcccctcatcctgg

SEQ ID NO: 1265186 - DNA, 15 bp, Homo sapiens
aatcccctcatcctg

SEQ ID NO: 1265187 - DNA, 15 bp, Homo sapiens
aaatcccctcatcct

SEQ ID NO: 1265188 - DNA, 15 bp, Homo sapiens
taaatcccctcatcc

SEQ ID NO: 1265189 - DNA, 15 bp, Homo sapiens
gtaaatcccctcatc

SEQ ID NO: 1265190 - DNA, 15 bp, Homo sapiens
tgtaaatcccctcat

SEQ ID NO: 1265191 - DNA, 15 bp, Homo sapiens
atgtaaatcccctca

SEQ ID NO: 1265192 - DNA, 15 bp, Homo sapiens
gatgtaaatcccctc

SEQ ID NO: 1265193 - DNA, 15 bp, Homo sapiens
tgatgtaaatcccct

SEQ ID NO: 1265194 - DNA, 15 bp, Homo sapiens
gtgatgtaaatcccc

SEQ ID NO: 1265195 - DNA, 15 bp, Homo sapiens
tgtgatgtaaatccc

SEQ ID NO: 1265196 - DNA, 15 bp, Homo sapiens
ctgtgatgtaaatcc

SEQ ID NO: 1265197 - DNA, 15 bp, Homo sapiens
gctgtgatgtaaatc

SEQ ID NO: 1265198 - DNA, 15 bp, Homo sapiens
tgctgtgatgtaaat

SEQ ID NO: 1265199 - DNA, 15 bp, Homo sapiens
gtgctgtgatgtaaa

SEQ ID NO: 1265200 - DNA, 15 bp, Homo sapiens
tgtgctgtgatgtaa

SEQ ID NO: 1265201 - DNA, 15 bp, Homo sapiens
ttgtgctgtgatgta

SEQ ID NO: 1265202 - DNA, 15 bp, Homo sapiens
gttgtgctgtgatgt

SEQ ID NO: 1265203 - DNA, 15 bp, Homo sapiens
agttgtgctgtgatg

SEQ ID NO: 1265204 - DNA, 15 bp, Homo sapiens
cagttgtgctgtgat

SEQ ID NO: 1265205 - DNA, 15 bp, Homo sapiens
acagttgtgctgtga

SEQ ID NO: 1265206 - DNA, 15 bp, Homo sapiens
tacagttgtgctgtg

SEQ ID NO: 1265207 - DNA, 15 bp, Homo sapiens
atacagttgtgctgt

SEQ ID NO: 1265208 - DNA, 15 bp, Homo sapiens
aatacagttgtgctg

SEQ ID NO: 1265209 - DNA, 15 bp, Homo sapiens
aaatacagttgtgct

SEQ ID NO: 1265210 - DNA, 15 bp, Homo sapiens
aaaatacagttgtgc

SEQ ID NO: 1265211 - DNA, 15 bp, Homo sapiens
taaaatacagttgtg

SEQ ID NO: 1265212 - DNA, 15 bp, Homo sapiens
ataaaatacagttgt

SEQ ID NO: 1265213 - DNA, 15 bp, Homo sapiens
aataaaatacagttg

SEQ ID NO: 1265214 - DNA, 15 bp, Homo sapiens
gaataaaatacagtt

SEQ ID NO: 1265215 - DNA, 15 bp, Homo sapiens
tgaataaaatacagt

SEQ ID NO: 1265216 - DNA, 15 bp, Homo sapiens
gtgaataaaatacag

SEQ ID NO: 1265217 - DNA, 15 bp, Homo sapiens
tgtgaataaaataca

SEQ ID NO: 1265218 - DNA, 15 bp, Homo sapiens
ctgtgaataaaatac

SEQ ID NO: 1265219 - DNA, 15 bp, Homo sapiens
gctgtgaataaaata

SEQ ID NO: 1265220 - DNA, 15 bp, Homo sapiens
tgctgtgaataaaat

SEQ ID NO: 1265221 - DNA, 15 bp, Homo sapiens
atgctgtgaataaaa

SEQ ID NO: 1265222 - DNA, 15 bp, Homo sapiens
tatgctgtgaataaa

SEQ ID NO: 1265223 - DNA, 15 bp, Homo sapiens
ttatgctgtgaataa

SEQ ID NO: 1265224 - DNA, 15 bp, Homo sapiens
tttatgctgtgaata

SEQ ID NO: 1265225 - DNA, 15 bp, Homo sapiens
gtttatgctgtgaat

SEQ ID NO: 1265226 - DNA, 15 bp, Homo sapiens
ggtttatgctgtgaa

SEQ ID NO: 1265227 - DNA, 15 bp, Homo sapiens
tggtttatgctgtga

SEQ ID NO: 1265228 - DNA, 15 bp, Homo sapiens
atggtttatgctgtg

SEQ ID NO: 1265229 - DNA, 15 bp, Homo sapiens
gatggtttatgctgt

SEQ ID NO: 1265230 - DNA, 15 bp, Homo sapiens
agatggtttatgctg

SEQ ID NO: 1265231 - DNA, 15 bp, Homo sapiens
gagatggtttatgct

SEQ ID NO: 1265232 - DNA, 15 bp, Homo sapiens
agagatggtttatgc

SEQ ID NO: 1265233 - DNA, 15 bp, Homo sapiens
aagagatggtttatg

SEQ ID NO: 1265234 - DNA, 15 bp, Homo sapiens
aaagagatggtttat

SEQ ID NO: 1265235 - DNA, 15 bp, Homo sapiens
gaaagagatggttta

SEQ ID NO: 1265236 - DNA, 15 bp, Homo sapiens
ggaaagagatggttt

SEQ ID NO: 1265237 - DNA, 15 bp, Homo sapiens
aggaaagagatggtt

SEQ ID NO: 1265238 - DNA, 15 bp, Homo sapiens
aaggaaagagatggt

SEQ ID NO: 1265239 - DNA, 15 bp, Homo sapiens
gaaggaaagagatgg

SEQ ID NO: 1265240 - DNA, 15 bp, Homo sapiens
agaaggaaagagatg

SEQ ID NO: 1265241 - DNA, 15 bp, Homo sapiens
gagaaggaaagagat

SEQ ID NO: 1265242 - DNA, 15 bp, Homo sapiens
tgagaaggaaagaga

SEQ ID NO: 1265243 - DNA, 15 bp, Homo sapiens
ctgagaaggaaagag

SEQ ID NO: 1265244 - DNA, 15 bp, Homo sapiens
actgagaaggaaaga

SEQ ID NO: 1265245 - DNA, 15 bp, Homo sapiens
aactgagaaggaaag

SEQ ID NO: 1265246 - DNA, 15 bp, Homo sapiens
caactgagaaggaaa

SEQ ID NO: 1265247 - DNA, 15 bp, Homo sapiens
tcaactgagaaggaa

SEQ ID NO: 1265248 - DNA, 15 bp, Homo sapiens
gtcaactgagaagga

SEQ ID NO: 1265249 - DNA, 15 bp, Homo sapiens
cgtcaactgagaagg

SEQ ID NO: 1265250 - DNA, 15 bp, Homo sapiens
tcgtcaactgagaag

SEQ ID NO: 1265251 - DNA, 15 bp, Homo sapiens
ctcgtcaactgagaa

SEQ ID NO: 1265252 - DNA, 15 bp, Homo sapiens
actcgtcaactgaga

SEQ ID NO: 1265253 - DNA, 15 bp, Homo sapiens
aactcgtcaactgag

SEQ ID NO: 1265254 - DNA, 15 bp, Homo sapiens
gaactcgtcaactga

SEQ ID NO: 1265255 - DNA, 15 bp, Homo sapiens
tgaactcgtcaactg

SEQ ID NO: 1265256 - DNA, 15 bp, Homo sapiens
ctgaactcgtcaact

SEQ ID NO: 1265257 - DNA, 15 bp, Homo sapiens
tctgaactcgtcaac

SEQ ID NO: 1265258 - DNA, 15 bp, Homo sapiens
atctgaactcgtcaa

SEQ ID NO: 1265259 - DNA, 15 bp, Homo sapiens
catctgaactcgtca

SEQ ID NO: 1265260 - DNA, 15 bp, Homo sapiens
ccatctgaactcgtc

SEQ ID NO: 1265261 - DNA, 15 bp, Homo sapiens
cccatctgaactcgt

SEQ ID NO: 1265262 - DNA, 15 bp, Homo sapiens
gcccatctgaactcg

SEQ ID NO: 1265263 - DNA, 15 bp, Homo sapiens
tgcccatctgaactc

SEQ ID NO: 1265264 - DNA, 15 bp, Homo sapiens
ttgcccatctgaact

SEQ ID NO: 1265265 - DNA, 15 bp, Homo sapiens
attgcccatctgaac

SEQ ID NO: 1265266 - DNA, 15 bp, Homo sapiens
tattgcccatctgaa

SEQ ID NO: 1265267 - DNA, 15 bp, Homo sapiens
ttattgcccatctga

SEQ ID NO: 1265268 - DNA, 15 bp, Homo sapiens
gttattgcccatctg

SEQ ID NO: 1265269 - DNA, 15 bp, Homo sapiens
tgttattgcccatct

SEQ ID NO: 1265270 - DNA, 15 bp, Homo sapiens
ctgttattgcccatc

SEQ ID NO: 1265271 - DNA, 15 bp, Homo sapiens
actgttattgcccat

SEQ ID NO: 1265272 - DNA, 15 bp, Homo sapiens
cactgttattgccca

SEQ ID NO: 1265273 - DNA, 15 bp, Homo sapiens
acactgttattgccc

SEQ ID NO: 1265274 - DNA, 15 bp, Homo sapiens
gacactgttattgcc

SEQ ID NO: 1265275 - DNA, 15 bp, Homo sapiens
agacactgttattgc

SEQ ID NO: 1265276 - DNA, 15 bp, Homo sapiens
cagacactgttattg

SEQ ID NO: 1265277 - DNA, 15 bp, Homo sapiens
gcagacactgttatt

SEQ ID NO: 1265278 - DNA, 15 bp, Homo sapiens
ggcagacactgttat

SEQ ID NO: 1265279 - DNA, 15 bp, Homo sapiens
tggcagacactgtta

SEQ ID NO: 1265280 - DNA, 15 bp, Homo sapiens
ttggcagacactgtt

SEQ ID NO: 1265281 - DNA, 15 bp, Homo sapiens
tttggcagacactgt

SEQ ID NO: 1265282 - DNA, 15 bp, Homo sapiens
ctttggcagacactg

SEQ ID NO: 1265283 - DNA, 15 bp, Homo sapiens
tctttggcagacact

SEQ ID NO: 1265284 - DNA, 15 bp, Homo sapiens
ctctttggcagacac

SEQ ID NO: 1265285 - DNA, 15 bp, Homo sapiens
tctctttggcagaca

SEQ ID NO: 1265286 - DNA, 15 bp, Homo sapiens
ttctctttggcagac

SEQ ID NO: 1265287 - DNA, 15 bp, Homo sapiens
tttctctttggcaga

SEQ ID NO: 1265288 - DNA, 15 bp, Homo sapiens
ttttctctttggcag

SEQ ID NO: 1265289 - DNA, 15 bp, Homo sapiens
tttttctctttggca

SEQ ID NO: 1265290 - DNA, 15 bp, Homo sapiens
ttttttctctttggc

SEQ ID NO: 1265291 - DNA, 15 bp, Homo sapiens
tttttttctctttgg

SEQ ID NO: 1265292 - DNA, 15 bp, Homo sapiens
ttttttttctctttg

SEQ ID NO: 1265293 - DNA, 15 bp, Homo sapiens
atttttttttctctt

SEQ ID NO: 1265294 - DNA, 15 bp, Homo sapiens
catttttttttctct

SEQ ID NO: 1265295 - DNA, 15 bp, Homo sapiens
acatttttttttctc

SEQ ID NO: 1265296 - DNA, 15 bp, Homo sapiens
tacatttttttttct

SEQ ID NO: 1265297 - DNA, 15 bp, Homo sapiens
atacatttttttttc

SEQ ID NO: 1265298 - DNA, 15 bp, Homo sapiens
aatacattttttttt

SEQ ID NO: 1265299 - DNA, 15 bp, Homo sapiens
gaatacatttttttt

SEQ ID NO: 1265300 - DNA, 15 bp, Homo sapiens
tgaatacattttttt

SEQ ID NO: 1265301 - DNA, 15 bp, Homo sapiens
ttgaatacatttttt

SEQ ID NO: 1265302 - DNA, 15 bp, Homo sapiens
tttgaatacattttt

SEQ ID NO: 1265303 - DNA, 15 bp, Homo sapiens
gtttgaatacatttt

SEQ ID NO: 1265304 - DNA, 15 bp, Homo sapiens
agtttgaatacattt

SEQ ID NO: 1265305 - DNA, 15 bp, Homo sapiens
tagtttgaatacatt

SEQ ID NO: 1265306 - DNA, 15 bp, Homo sapiens
ctagtttgaatacat

SEQ ID NO: 1265307 - DNA, 15 bp, Homo sapiens
tctagtttgaataca

SEQ ID NO: 1265308 - DNA, 15 bp, Homo sapiens
atctagtttgaatac

SEQ ID NO: 1265309 - DNA, 15 bp, Homo sapiens
tatctagtttgaata

SEQ ID NO: 1265310 - DNA, 15 bp, Homo sapiens
ttatctagtttgaat

SEQ ID NO: 1265311 - DNA, 15 bp, Homo sapiens
attatctagtttgaa

SEQ ID NO: 1265312 - DNA, 15 bp, Homo sapiens
gattatctagtttga

SEQ ID NO: 1265313 - DNA, 15 bp, Homo sapiens
agattatctagtttg

SEQ ID NO: 1265314 - DNA, 15 bp, Homo sapiens
tagattatctagttt

SEQ ID NO: 1265315 - DNA, 15 bp, Homo sapiens
atagattatctagtt

SEQ ID NO: 1265316 - DNA, 15 bp, Homo sapiens
aatagattatctagt

SEQ ID NO: 1265317 - DNA, 15 bp, Homo sapiens
caatagattatctag

SEQ ID NO: 1265318 - DNA, 15 bp, Homo sapiens
ccaatagattatcta

SEQ ID NO: 1265319 - DNA, 15 bp, Homo sapiens
accaatagattatct

SEQ ID NO: 1265320 - DNA, 15 bp, Homo sapiens
taccaatagattatc

SEQ ID NO: 1265321 - DNA, 15 bp, Homo sapiens
gtaccaatagattat

SEQ ID NO: 1265322 - DNA, 15 bp, Homo sapiens
tgtaccaatagatta

SEQ ID NO: 1265323 - DNA, 15 bp, Homo sapiens
ttgtaccaatagatt

SEQ ID NO: 1265324 - DNA, 15 bp, Homo sapiens
tttgtaccaatagat

SEQ ID NO: 1265325 - DNA, 15 bp, Homo sapiens
atttgtaccaataga

SEQ ID NO: 1265326 - DNA, 15 bp, Homo sapiens
tatttgtaccaatag

SEQ ID NO: 1265327 - DNA, 15 bp, Homo sapiens
gtatttgtaccaata

SEQ ID NO: 1265328 - DNA, 15 bp, Homo sapiens
ggtatttgtaccaat

SEQ ID NO: 1265329 - DNA, 15 bp, Homo sapiens
cggtatttgtaccaa

SEQ ID NO: 1265330 - DNA, 15 bp, Homo sapiens
tcggtatttgtacca

SEQ ID NO: 1265331 - DNA, 15 bp, Homo sapiens
ctcggtatttgtacc

SEQ ID NO: 1265332 - DNA, 15 bp, Homo sapiens
tctcggtatttgtac

SEQ ID NO: 1265333 - DNA, 15 bp, Homo sapiens
gtctcggtatttgta

SEQ ID NO: 1265334 - DNA, 15 bp, Homo sapiens
tgtctcggtatttgt

SEQ ID NO: 1265335 - DNA, 15 bp, Homo sapiens
gtgtctcggtatttg

SEQ ID NO: 1265336 - DNA, 15 bp, Homo sapiens
tgtgtctcggtattt

SEQ ID NO: 1265337 - DNA, 15 bp, Homo sapiens
ctgtgtctcggtatt

SEQ ID NO: 1265338 - DNA, 15 bp, Homo sapiens
tctgtgtctcggtat

SEQ ID NO: 1265339 - DNA, 15 bp, Homo sapiens
ttctgtgtctcggta

SEQ ID NO: 1265340 - DNA, 15 bp, Homo sapiens
cttctgtgtctcggt

SEQ ID NO: 1265341 - DNA, 15 bp, Homo sapiens
acttctgtgtctcgg

SEQ ID NO: 1265342 - DNA, 15 bp, Homo sapiens
cacttctgtgtctcg

SEQ ID NO: 1265343 - DNA, 15 bp, Homo sapiens
tcacttctgtgtctc

SEQ ID NO: 1265344 - DNA, 15 bp, Homo sapiens
atcacttctgtgtct

SEQ ID NO: 1265345 - DNA, 15 bp, Homo sapiens
tatcacttctgtgtc

SEQ ID NO: 1265346 - DNA, 15 bp, Homo sapiens
ttatcacttctgtgt

SEQ ID NO: 1265347 - DNA, 15 bp, Homo sapiens
gttatcacttctgtg

SEQ ID NO: 1265348 - DNA, 15 bp, Homo sapiens
tgttatcacttctgt

SEQ ID NO: 1265349 - DNA, 15 bp, Homo sapiens
ctgttatcacttctg

SEQ ID NO: 1265350 - DNA, 15 bp, Homo sapiens
gctgttatcacttct

SEQ ID NO: 1265351 - DNA, 15 bp, Homo sapiens
agctgttatcacttc

SEQ ID NO: 1265352 - DNA, 15 bp, Homo sapiens
aagctgttatcactt

SEQ ID NO: 1265353 - DNA, 15 bp, Homo sapiens
aaagctgttatcact

SEQ ID NO: 1265354 - DNA, 15 bp, Homo sapiens
taaagctgttatcac

SEQ ID NO: 1265355 - DNA, 15 bp, Homo sapiens
ttaaagctgttatca

SEQ ID NO: 1265356 - DNA, 15 bp, Homo sapiens
cttaaagctgttatc

SEQ ID NO: 1265357 - DNA, 15 bp, Homo sapiens
gcttaaagctgttat

SEQ ID NO: 1265358 - DNA, 15 bp, Homo sapiens
ggcttaaagctgtta

SEQ ID NO: 1265359 - DNA, 15 bp, Homo sapiens
tggcttaaagctgtt

SEQ ID NO: 1265360 - DNA, 15 bp, Homo sapiens
ttggcttaaagctgt

SEQ ID NO: 1265361 - DNA, 15 bp, Homo sapiens
attggcttaaagctg

SEQ ID NO: 1265362 - DNA, 15 bp, Homo sapiens
cattggcttaaagct

SEQ ID NO: 1265363 - DNA, 15 bp, Homo sapiens
acattggcttaaagc

SEQ ID NO: 1265364 - DNA, 15 bp, Homo sapiens
aacattggcttaaag

SEQ ID NO: 1265365 - DNA, 15 bp, Homo sapiens
aaacattggcttaaa

SEQ ID NO: 1265366 - DNA, 15 bp, Homo sapiens
caaacattggcttaa

SEQ ID NO: 1265367 - DNA, 15 bp, Homo sapiens
tcaaacattggctta

SEQ ID NO: 1265368 - DNA, 15 bp, Homo sapiens
atcaaacattggctt

SEQ ID NO: 1265369 - DNA, 15 bp, Homo sapiens
catcaaacattggct

SEQ ID NO: 1265370 - DNA, 15 bp, Homo sapiens
ccatcaaacattggc

SEQ ID NO: 1265371 - DNA, 15 bp, Homo sapiens
accatcaaacattgg

SEQ ID NO: 1265372 - DNA, 15 bp, Homo sapiens
caccatcaaacattg

SEQ ID NO: 1265373 - DNA, 15 bp, Homo sapiens
ccaccatcaaacatt

SEQ ID NO: 1265374 - DNA, 15 bp, Homo sapiens
accaccatcaaacat

SEQ ID NO: 1265375 - DNA, 15 bp, Homo sapiens
taccaccatcaaaca

SEQ ID NO: 1265376 - DNA, 15 bp, Homo sapiens
ctaccaccatcaaac

SEQ ID NO: 1265377 - DNA, 15 bp, Homo sapiens
actaccaccatcaaa

SEQ ID NO: 1265378 - DNA, 15 bp, Homo sapiens
gactaccaccatcaa

SEQ ID NO: 1265379 - DNA, 15 bp, Homo sapiens
ggactaccaccatca

SEQ ID NO: 1265380 - DNA, 15 bp, Homo sapiens
gggactaccaccatc

SEQ ID NO: 1265381 - DNA, 15 bp, Homo sapiens
tgggactaccaccat

SEQ ID NO: 1265382 - DNA, 15 bp, Homo sapiens
ctgggactaccacca

SEQ ID NO: 1265383 - DNA, 15 bp, Homo sapiens
gctgggactaccacc

SEQ ID NO: 1265384 - DNA, 15 bp, Homo sapiens
tgctgggactaccac

SEQ ID NO: 1265385 - DNA, 15 bp, Homo sapiens
ttgctgggactacca

SEQ ID NO: 1265386 - DNA, 15 bp, Homo sapiens
cttgctgggactacc

SEQ ID NO: 1265387 - DNA, 15 bp, Homo sapiens
gcttgctgggactac

SEQ ID NO: 1265388 - DNA, 15 bp, Homo sapiens
agcttgctgggacta

SEQ ID NO: 1265389 - DNA, 15 bp, Homo sapiens
gagcttgctgggact

SEQ ID NO: 1265390 - DNA, 15 bp, Homo sapiens
agagcttgctgggac

SEQ ID NO: 1265391 - DNA, 15 bp, Homo sapiens
aagagcttgctggga

SEQ ID NO: 1265392 - DNA, 15 bp, Homo sapiens
aaagagcttgctggg

SEQ ID NO: 1265393 - DNA, 15 bp, Homo sapiens
aaaagagcttgctgg

SEQ ID NO: 1265394 - DNA, 15 bp, Homo sapiens
gaaaagagcttgctg

SEQ ID NO: 1265395 - DNA, 15 bp, Homo sapiens
agaaaagagcttgct

SEQ ID NO: 1265396 - DNA, 15 bp, Homo sapiens
cagaaaagagcttgc

SEQ ID NO: 1265397 - DNA, 15 bp, Homo sapiens
tcagaaaagagcttg

SEQ ID NO: 1265398 - DNA, 15 bp, Homo sapiens
atcagaaaagagctt

SEQ ID NO: 1265399 - DNA, 15 bp, Homo sapiens
catcagaaaagagct

SEQ ID NO: 1265400 - DNA, 15 bp, Homo sapiens
acatcagaaaagagc

SEQ ID NO: 1265401 - DNA, 15 bp, Homo sapiens
gacatcagaaaagag

SEQ ID NO: 1265402 - DNA, 15 bp, Homo sapiens
agacatcagaaaaga

SEQ ID NO: 1265403 - DNA, 15 bp, Homo sapiens
aagacatcagaaaag

SEQ ID NO: 1265404 - DNA, 15 bp, Homo sapiens
aaagacatcagaaaa

SEQ ID NO: 1265405 - DNA, 15 bp, Homo sapiens
caaagacatcagaaa

SEQ ID NO: 1265406 - DNA, 15 bp, Homo sapiens
acaaagacatcagaa

SEQ ID NO: 1265407 - DNA, 15 bp, Homo sapiens
cacaaagacatcaga

SEQ ID NO: 1265408 - DNA, 15 bp, Homo sapiens
gcacaaagacatcag

SEQ ID NO: 1265409 - DNA, 15 bp, Homo sapiens
ggcacaaagacatca

SEQ ID NO: 1265410 - DNA, 15 bp, Homo sapiens
aggcacaaagacatc

SEQ ID NO: 1265411 - DNA, 15 bp, Homo sapiens
aaggcacaaagacat

SEQ ID NO: 1265412 - DNA, 15 bp, Homo sapiens
aaaggcacaaagaca

SEQ ID NO: 1265413 - DNA, 15 bp, Homo sapiens
caaaggcacaaagac

SEQ ID NO: 1265414 - DNA, 15 bp, Homo sapiens
gcaaaggcacaaaga

SEQ ID NO: 1265415 - DNA, 15 bp, Homo sapiens
tgcaaaggcacaaag

SEQ ID NO: 1265416 - DNA, 15 bp, Homo sapiens
gtgcaaaggcacaaa

SEQ ID NO: 1265417 - DNA, 15 bp, Homo sapiens
tgtgcaaaggcacaa

SEQ ID NO: 1265418 - DNA, 15 bp, Homo sapiens
atgtgcaaaggcaca

SEQ ID NO: 1265419 - DNA, 15 bp, Homo sapiens
catgtgcaaaggcac

SEQ ID NO: 1265420 - DNA, 15 bp, Homo sapiens
gcatgtgcaaaggca

SEQ ID NO: 1265421 - DNA, 15 bp, Homo sapiens
agcatgtgcaaaggc

SEQ ID NO: 1265422 - DNA, 15 bp, Homo sapiens
gagcatgtgcaaagg

SEQ ID NO: 1265423 - DNA, 15 bp, Homo sapiens
ggagcatgtgcaaag

SEQ ID NO: 1265424 - DNA, 15 bp, Homo sapiens
aggagcatgtgcaaa

SEQ ID NO: 1265425 - DNA, 15 bp, Homo sapiens
aaggagcatgtgcaa

SEQ ID NO: 1265426 - DNA, 15 bp, Homo sapiens
gaaggagcatgtgca

SEQ ID NO: 1265427 - DNA, 15 bp, Homo sapiens
agaaggagcatgtgc

SEQ ID NO: 1265428 - DNA, 15 bp, Homo sapiens
gagaaggagcatgtg

SEQ ID NO: 1265429 - DNA, 15 bp, Homo sapiens
agagaaggagcatgt

SEQ ID NO: 1265430 - DNA, 15 bp, Homo sapiens
cagagaaggagcatg

SEQ ID NO: 1265431 - DNA, 15 bp, Homo sapiens
acagagaaggagcat

SEQ ID NO: 1265432 - DNA, 15 bp, Homo sapiens
gacagagaaggagca

SEQ ID NO: 1265433 - DNA, 15 bp, Homo sapiens
tgacagagaaggagc

SEQ ID NO: 1265434 - DNA, 15 bp, Homo sapiens
gtgacagagaaggag

SEQ ID NO: 1265435 - DNA, 15 bp, Homo sapiens
agtgacagagaagga

SEQ ID NO: 1265436 - DNA, 15 bp, Homo sapiens
cagtgacagagaagg

SEQ ID NO: 1265437 - DNA, 15 bp, Homo sapiens
acagtgacagagaag

SEQ ID NO: 1265438 - DNA, 15 bp, Homo sapiens
aacagtgacagagaa

SEQ ID NO: 1265439 - DNA, 15 bp, Homo sapiens
aaacagtgacagaga

SEQ ID NO: 1265440 - DNA, 15 bp, Homo sapiens
aaaacagtgacagag

SEQ ID NO: 1265441 - DNA, 15 bp, Homo sapiens
gaaaacagtgacaga

SEQ ID NO: 1265442 - DNA, 15 bp, Homo sapiens
agaaaacagtgacag

SEQ ID NO: 1265443 - DNA, 15 bp, Homo sapiens
aagaaaacagtgaca

SEQ ID NO: 1265444 - DNA, 15 bp, Homo sapiens
gaagaaaacagtgac

SEQ ID NO: 1265445 - DNA, 15 bp, Homo sapiens
tgaagaaaacagtga

SEQ ID NO: 1265446 - DNA, 15 bp, Homo sapiens
atgaagaaaacagtg

SEQ ID NO: 1265447 - DNA, 15 bp, Homo sapiens
gatgaagaaaacagt

SEQ ID NO: 1265448 - DNA, 15 bp, Homo sapiens
tgatgaagaaaacag

SEQ ID NO: 1265449 - DNA, 15 bp, Homo sapiens
ttgatgaagaaaaca

SEQ ID NO: 1265450 - DNA, 15 bp, Homo sapiens
tttgatgaagaaaac

SEQ ID NO: 1265451 - DNA, 15 bp, Homo sapiens
gtttgatgaagaaaa

SEQ ID NO: 1265452 - DNA, 15 bp, Homo sapiens
tgtttgatgaagaaa

SEQ ID NO: 1265453 - DNA, 15 bp, Homo sapiens
atgtttgatgaagaa

SEQ ID NO: 1265454 - DNA, 15 bp, Homo sapiens
tatgtttgatgaaga

SEQ ID NO: 1265455 - DNA, 15 bp, Homo sapiens
ttatgtttgatgaag

SEQ ID NO: 1265456 - DNA, 15 bp, Homo sapiens
attatgtttgatgaa

SEQ ID NO: 1265457 - DNA, 15 bp, Homo sapiens
tattatgtttgatga

SEQ ID NO: 1265458 - DNA, 15 bp, Homo sapiens
atattatgtttgatg

SEQ ID NO: 1265459 - DNA, 15 bp, Homo sapiens
tatattatgtttgat

SEQ ID NO: 1265460 - DNA, 15 bp, Homo sapiens
ttatattatgtttga

SEQ ID NO: 1265461 - DNA, 15 bp, Homo sapiens
attatattatgtttg

SEQ ID NO: 1265462 - DNA, 15 bp, Homo sapiens
cattatattatgttt

SEQ ID NO: 1265463 - DNA, 15 bp, Homo sapiens
ccattatattatgtt

SEQ ID NO: 1265464 - DNA, 15 bp, Homo sapiens
tccattatattatgt

SEQ ID NO: 1265465 - DNA, 15 bp, Homo sapiens
gtccattatattatg

SEQ ID NO: 1265466 - DNA, 15 bp, Homo sapiens
tgtccattatattat

SEQ ID NO: 1265467 - DNA, 15 bp, Homo sapiens
ttgtccattatatta

SEQ ID NO: 1265468 - DNA, 15 bp, Homo sapiens
cttgtccattatatt

SEQ ID NO: 1265469 - DNA, 15 bp, Homo sapiens
acttgtccattatat

SEQ ID NO: 1265470 - DNA, 15 bp, Homo sapiens
cacttgtccattata

SEQ ID NO: 1265471 - DNA, 15 bp, Homo sapiens
ccacttgtccattat

SEQ ID NO: 1265472 - DNA, 15 bp, Homo sapiens
tccacttgtccatta

SEQ ID NO: 1265473 - DNA, 15 bp, Homo sapiens
ttccacttgtccatt

SEQ ID NO: 1265474 - DNA, 15 bp, Homo sapiens
attccacttgtccat

SEQ ID NO: 1265475 - DNA, 15 bp, Homo sapiens
gattccacttgtcca

SEQ ID NO: 1265476 - DNA, 15 bp, Homo sapiens
tgattccacttgtcc

SEQ ID NO: 1265477 - DNA, 15 bp, Homo sapiens
ttgattccacttgtc

SEQ ID NO: 1265478 - DNA, 15 bp, Homo sapiens
tttgattccacttgt

SEQ ID NO: 1265479 - DNA, 15 bp, Homo sapiens
atttgattccacttg

SEQ ID NO: 1265480 - DNA, 15 bp, Homo sapiens
tatttgattccactt

SEQ ID NO: 1265481 - DNA, 15 bp, Homo sapiens
ctatttgattccact

SEQ ID NO: 1265482 - DNA, 15 bp, Homo sapiens
tctatttgattccac

SEQ ID NO: 1265483 - DNA, 15 bp, Homo sapiens
ttctatttgattcca

SEQ ID NO: 1265484 - DNA, 15 bp, Homo sapiens
attctatttgattcc

SEQ ID NO: 1265485 - DNA, 15 bp, Homo sapiens
aattctatttgattc

SEQ ID NO: 1265486 - DNA, 15 bp, Homo sapiens
caattctatttgatt

SEQ ID NO: 1265487 - DNA, 15 bp, Homo sapiens
tcaattctatttgat

SEQ ID NO: 1265488 - DNA, 15 bp, Homo sapiens
ctcaattctatttga

SEQ ID NO: 1265489 - DNA, 15 bp, Homo sapiens
actcaattctatttg

SEQ ID NO: 1265490 - DNA, 15 bp, Homo sapiens
aactcaattctattt

SEQ ID NO: 1265491 - DNA, 15 bp, Homo sapiens
gaactcaattctatt

SEQ ID NO: 1265492 - DNA, 15 bp, Homo sapiens
tgaactcaattctat

SEQ ID NO: 1265493 - DNA, 15 bp, Homo sapiens
ttgaactcaattcta

SEQ ID NO: 1265494 - DNA, 15 bp, Homo sapiens
tttgaactcaattct

SEQ ID NO: 1265495 - DNA, 15 bp, Homo sapiens
atttgaactcaattc

SEQ ID NO: 1265496 - DNA, 15 bp, Homo sapiens
aatttgaactcaatt

SEQ ID NO: 1265497 - DNA, 15 bp, Homo sapiens
gaatttgaactcaat

SEQ ID NO: 1265498 - DNA, 15 bp, Homo sapiens
agaatttgaactcaa

SEQ ID NO: 1265499 - DNA, 15 bp, Homo sapiens
gagaatttgaactca

SEQ ID NO: 1265500 - DNA, 15 bp, Homo sapiens
agagaatttgaactc

SEQ ID NO: 1265501 - DNA, 15 bp, Homo sapiens
cagagaatttgaact

SEQ ID NO: 1265502 - DNA, 15 bp, Homo sapiens
gcagagaatttgaac

SEQ ID NO: 1265503 - DNA, 15 bp, Homo sapiens
agcagagaatttgaa

SEQ ID NO: 1265504 - DNA, 15 bp, Homo sapiens
tagcagagaatttga

SEQ ID NO: 1265505 - DNA, 15 bp, Homo sapiens
gtagcagagaatttg

SEQ ID NO: 1265506 - DNA, 15 bp, Homo sapiens
ggtagcagagaattt

SEQ ID NO: 1265507 - DNA, 15 bp, Homo sapiens
gggtagcagagaatt

SEQ ID NO: 1265508 - DNA, 15 bp, Homo sapiens
tgggtagcagagaat

SEQ ID NO: 1265509 - DNA, 15 bp, Homo sapiens
atgggtagcagagaa

SEQ ID NO: 1265510 - DNA, 15 bp, Homo sapiens
gatgggtagcagaga

SEQ ID NO: 1265511 - DNA, 15 bp, Homo sapiens
cgatgggtagcagag

SEQ ID NO: 1265512 - DNA, 15 bp, Homo sapiens
ccgatgggtagcaga

SEQ ID NO: 1265513 - DNA, 15 bp, Homo sapiens
gccgatgggtagcag

SEQ ID NO: 1265514 - DNA, 15 bp, Homo sapiens
ggccgatgggtagca

SEQ ID NO: 1265515 - DNA, 15 bp, Homo sapiens
gggccgatgggtagc

SEQ ID NO: 1265516 - DNA, 15 bp, Homo sapiens
agggccgatgggtag

SEQ ID NO: 1265517 - DNA, 15 bp, Homo sapiens
cagggccgatgggta

SEQ ID NO: 1265518 - DNA, 15 bp, Homo sapiens
ccagggccgatgggt

SEQ ID NO: 1265519 - DNA, 15 bp, Homo sapiens
accagggccgatggg

SEQ ID NO: 1265520 - DNA, 15 bp, Homo sapiens
taccagggccgatgg

SEQ ID NO: 1265521 - DNA, 15 bp, Homo sapiens
ataccagggccgatg

SEQ ID NO: 1265522 - DNA, 15 bp, Homo sapiens
aataccagggccgat

SEQ ID NO: 1265523 - DNA, 15 bp, Homo sapiens
caataccagggccga

SEQ ID NO: 1265524 - DNA, 15 bp, Homo sapiens
ccaataccagggccg

SEQ ID NO: 1265525 - DNA, 15 bp, Homo sapiens
tccaataccagggcc

SEQ ID NO: 1265526 - DNA, 15 bp, Homo sapiens
gtccaataccagggc

SEQ ID NO: 1265527 - DNA, 15 bp, Homo sapiens
tgtccaataccaggg

SEQ ID NO: 1265528 - DNA, 15 bp, Homo sapiens
ttgtccaataccagg

SEQ ID NO: 1265529 - DNA, 15 bp, Homo sapiens
tttgtccaataccag

SEQ ID NO: 1265530 - DNA, 15 bp, Homo sapiens
atttgtccaatacca

SEQ ID NO: 1265531 - DNA, 15 bp, Homo sapiens
aatttgtccaatacc

SEQ ID NO: 1265532 - DNA, 15 bp, Homo sapiens
taatttgtccaatac

SEQ ID NO: 1265533 - DNA, 15 bp, Homo sapiens
ttaatttgtccaata

SEQ ID NO: 1265534 - DNA, 15 bp, Homo sapiens
gttaatttgtccaat

SEQ ID NO: 1265535 - DNA, 15 bp, Homo sapiens
agttaatttgtccaa

SEQ ID NO: 1265536 - DNA, 15 bp, Homo sapiens
gagttaatttgtcca

SEQ ID NO: 1265537 - DNA, 15 bp, Homo sapiens
ggagttaatttgtcc

SEQ ID NO: 1265538 - DNA, 15 bp, Homo sapiens
aggagttaatttgtc

SEQ ID NO: 1265539 - DNA, 15 bp, Homo sapiens
gaggagttaatttgt

SEQ ID NO: 1265540 - DNA, 15 bp, Homo sapiens
agaggagttaatttg

SEQ ID NO: 1265541 - DNA, 15 bp, Homo sapiens
cagaggagttaattt

SEQ ID NO: 1265542 - DNA, 15 bp, Homo sapiens
tcagaggagttaatt

SEQ ID NO: 1265543 - DNA, 15 bp, Homo sapiens
ctcagaggagttaat

SEQ ID NO: 1265544 - DNA, 15 bp, Homo sapiens
gctcagaggagttaa

SEQ ID NO: 1265545 - DNA, 15 bp, Homo sapiens
ggctcagaggagtta

SEQ ID NO: 1265546 - DNA, 15 bp, Homo sapiens
aggctcagaggagtt

SEQ ID NO: 1265547 - DNA, 15 bp, Homo sapiens
caggctcagaggagt

SEQ ID NO: 1265548 - DNA, 15 bp, Homo sapiens
acaggctcagaggag

SEQ ID NO: 1265549 - DNA, 15 bp, Homo sapiens
aacaggctcagagga

SEQ ID NO: 1265550 - DNA, 15 bp, Homo sapiens
atgaggaaacaggct

SEQ ID NO: 1265551 - DNA, 15 bp, Homo sapiens
gatgaggaaacaggc

SEQ ID NO: 1265552 - DNA, 15 bp, Homo sapiens
agatgaggaaacagg

SEQ ID NO: 1265553 - DNA, 15 bp, Homo sapiens
gcagatgaggaaaca

SEQ ID NO: 1265554 - DNA, 15 bp, Homo sapiens
cgttgcagatgagga

SEQ ID NO: 1265555 - DNA, 15 bp, Homo sapiens
acgttgcagatgagg

SEQ ID NO: 1265556 - DNA, 15 bp, Homo sapiens
tacgttgcagatgag

SEQ ID NO: 1265557 - DNA, 15 bp, Homo sapiens
ctacgttgcagatga

SEQ ID NO: 1265558 - DNA, 15 bp, Homo sapiens
tctacgttgcagatg

SEQ ID NO: 1265559 - DNA, 15 bp, Homo sapiens
gtctacgttgcagat

SEQ ID NO: 1265560 - DNA, 15 bp, Homo sapiens
agtctacgttgcaga

SEQ ID NO: 1265561 - DNA, 15 bp, Homo sapiens
tagtctacgttgcag

SEQ ID NO: 1265562 - DNA, 15 bp, Homo sapiens
ctagtctacgttgca

SEQ ID NO: 1265563 - DNA, 15 bp, Homo sapiens
gctagtctacgttgc

SEQ ID NO: 1265564 - DNA, 15 bp, Homo sapiens
agctagtctacgttg

SEQ ID NO: 1265565 - DNA, 15 bp, Homo sapiens
tagctagtctacgtt

SEQ ID NO: 1265566 - DNA, 15 bp, Homo sapiens
ttagctagtctacgt

SEQ ID NO: 1265567 - DNA, 15 bp, Homo sapiens
attagctagtctacg

SEQ ID NO: 1265568 - DNA, 15 bp, Homo sapiens
tattagctagtctac

SEQ ID NO: 1265569 - DNA, 15 bp, Homo sapiens
gtattagctagtcta

SEQ ID NO: 1265570 - DNA, 15 bp, Homo sapiens
agtattagctagtct

SEQ ID NO: 1265571 - DNA, 15 bp, Homo sapiens
tagtattagctagtc

SEQ ID NO: 1265572 - DNA, 15 bp, Homo sapiens
gtagtattagctagt

SEQ ID NO: 1265573 - DNA, 15 bp, Homo sapiens
ggtagtattagctag

SEQ ID NO: 1265574 - DNA, 15 bp, Homo sapiens
gggtagtattagcta

SEQ ID NO: 1265575 - DNA, 15 bp, Homo sapiens
tgggtagtattagct

SEQ ID NO: 1265576 - DNA, 15 bp, Homo sapiens
atgggtagtattagc

SEQ ID NO: 1265577 - DNA, 15 bp, Homo sapiens
aatgggtagtattag

SEQ ID NO: 1265578 - DNA, 15 bp, Homo sapiens
caatgggtagtatta

SEQ ID NO: 1265579 - DNA, 15 bp, Homo sapiens
ccaatgggtagtatt

SEQ ID NO: 1265580 - DNA, 15 bp, Homo sapiens
tccaatgggtagtat

SEQ ID NO: 1265581 - DNA, 15 bp, Homo sapiens
ttccaatgggtagta

SEQ ID NO: 1265582 - DNA, 15 bp, Homo sapiens
tttccaatgggtagt

SEQ ID NO: 1265583 - DNA, 15 bp, Homo sapiens
ctttccaatgggtag

SEQ ID NO: 1265584 - DNA, 15 bp, Homo sapiens
gctttccaatgggta

SEQ ID NO: 1265585 - DNA, 15 bp, Homo sapiens
cgctttccaatgggt

SEQ ID NO: 1265586 - DNA, 15 bp, Homo sapiens
acgctttccaatggg

SEQ ID NO: 1265587 - DNA, 15 bp, Homo sapiens
aacgctttccaatgg

SEQ ID NO: 1265588 - DNA, 15 bp, Homo sapiens
caacgctttccaatg

SEQ ID NO: 1265589 - DNA, 15 bp, Homo sapiens
acaacgctttccaat

SEQ ID NO: 1265590 - DNA, 15 bp, Homo sapiens
aacaacgctttccaa

SEQ ID NO: 1265591 - DNA, 15 bp, Homo sapiens
aaacaacgctttcca

SEQ ID NO: 1265592 - DNA, 15 bp, Homo sapiens
gaaacaacgctttcc

SEQ ID NO: 1265593 - DNA, 15 bp, Homo sapiens
agaaacaacgctttc

SEQ ID NO: 1265594 - DNA, 15 bp, Homo sapiens
aagaaacaacgcttt

SEQ ID NO: 1265595 - DNA, 15 bp, Homo sapiens
taagaaacaacgctt

SEQ ID NO: 1265596 - DNA, 15 bp, Homo sapiens
ctaagaaacaacgct

SEQ ID NO: 1265597 - DNA, 15 bp, Homo sapiens
gctaagaaacaacgc

SEQ ID NO: 1265598 - DNA, 15 bp, Homo sapiens
agctaagaaacaacg

SEQ ID NO: 1265599 - DNA, 15 bp, Homo sapiens
tagctaagaaacaac

SEQ ID NO: 1265600 - DNA, 15 bp, Homo sapiens
ttagctaagaaacaa

SEQ ID NO: 1265601 - DNA, 15 bp, Homo sapiens
attagctaagaaaca

SEQ ID NO: 1265602 - DNA, 15 bp, Homo sapiens
cattagctaagaaac

SEQ ID NO: 1265603 - DNA, 15 bp, Homo sapiens
gcattagctaagaaa

SEQ ID NO: 1265604 - DNA, 15 bp, Homo sapiens
tgcattagctaagaa

SEQ ID NO: 1265605 - DNA, 15 bp, Homo sapiens
atgcattagctaaga

SEQ ID NO: 1265606 - DNA, 15 bp, Homo sapiens
catgcattagctaag

SEQ ID NO: 1265607 - DNA, 15 bp, Homo sapiens
gcatgcattagctaa

SEQ ID NO: 1265608 - DNA, 15 bp, Homo sapiens
tgcatgcattagcta

SEQ ID NO: 1265609 - DNA, 15 bp, Homo sapiens
ttgcatgcattagct

SEQ ID NO: 1265610 - DNA, 15 bp, Homo sapiens
cttgcatgcattagc

SEQ ID NO: 1265611 - DNA, 15 bp, Homo sapiens
ccttgcatgcattag

SEQ ID NO: 1265612 - DNA, 15 bp, Homo sapiens
gccttgcatgcatta

SEQ ID NO: 1265613 - DNA, 15 bp, Homo sapiens
agccttgcatgcatt

SEQ ID NO: 1265614 - DNA, 15 bp, Homo sapiens
aagccttgcatgcat

SEQ ID NO: 1265615 - DNA, 15 bp, Homo sapiens
taagccttgcatgca

SEQ ID NO: 1265616 - DNA, 15 bp, Homo sapiens
ttaagccttgcatgc

SEQ ID NO: 1265617 - DNA, 15 bp, Homo sapiens
tttaagccttgcatg

SEQ ID NO: 1265618 - DNA, 15 bp, Homo sapiens
ttttaagccttgcat

SEQ ID NO: 1265619 - DNA, 15 bp, Homo sapiens
gttttaagccttgca

SEQ ID NO: 1265620 - DNA, 15 bp, Homo sapiens
ggttttaagccttgc

SEQ ID NO: 1265621 - DNA, 15 bp, Homo sapiens
aggttttaagccttg

SEQ ID NO: 1265622 - DNA, 15 bp, Homo sapiens
taggttttaagcctt

SEQ ID NO: 1265623 - DNA, 15 bp, Homo sapiens
ctaggttttaagcct

SEQ ID NO: 1265624 - DNA, 15 bp, Homo sapiens
tctaggttttaagcc

SEQ ID NO: 1265625 - DNA, 15 bp, Homo sapiens
atctaggttttaagc

SEQ ID NO: 1265626 - DNA, 15 bp, Homo sapiens
catctaggttttaag

SEQ ID NO: 1265627 - DNA, 15 bp, Homo sapiens
tcatctaggttttaa

SEQ ID NO: 1265628 - DNA, 15 bp, Homo sapiens
gtcatctaggtttta

SEQ ID NO: 1265629 - DNA, 15 bp, Homo sapiens
cgtcatctaggtttt

SEQ ID NO: 1265630 - DNA, 15 bp, Homo sapiens
ccgtcatctaggttt

SEQ ID NO: 1265631 - DNA, 15 bp, Homo sapiens
cccgtcatctaggtt

SEQ ID NO: 1265632 - DNA, 15 bp, Homo sapiens
acccgtcatctaggt

SEQ ID NO: 1265633 - DNA, 15 bp, Homo sapiens
aacccgtcatctagg

SEQ ID NO: 1265634 - DNA, 15 bp, Homo sapiens
caacccgtcatctag

SEQ ID NO: 1265635 - DNA, 15 bp, Homo sapiens
tcaacccgtcatcta

SEQ ID NO: 1265636 - DNA, 15 bp, Homo sapiens
atcaacccgtcatct

SEQ ID NO: 1265637 - DNA, 15 bp, Homo sapiens
tatcaacccgtcatc

SEQ ID NO: 1265638 - DNA, 15 bp, Homo sapiens
ctatcaacccgtcat

SEQ ID NO: 1265639 - DNA, 15 bp, Homo sapiens
cctatcaacccgtca

SEQ ID NO: 1265640 - DNA, 15 bp, Homo sapiens
acctatcaacccgtc

SEQ ID NO: 1265641 - DNA, 15 bp, Homo sapiens
cacctatcaacccgt

SEQ ID NO: 1265642 - DNA, 15 bp, Homo sapiens
gcacctatcaacccg

SEQ ID NO: 1265643 - DNA, 15 bp, Homo sapiens
tgcacctatcaaccc

SEQ ID NO: 1265644 - DNA, 15 bp, Homo sapiens
ctgcacctatcaacc

SEQ ID NO: 1265645 - DNA, 15 bp, Homo sapiens
gctgcacctatcaac

SEQ ID NO: 1265646 - DNA, 15 bp, Homo sapiens
tgctgcacctatcaa

SEQ ID NO: 1265647 - DNA, 15 bp, Homo sapiens
ttgctgcacctatca

SEQ ID NO: 1265648 - DNA, 15 bp, Homo sapiens
tttgctgcacctatc

SEQ ID NO: 1265649 - DNA, 15 bp, Homo sapiens
gtttgctgcacctat

SEQ ID NO: 1265650 - DNA, 15 bp, Homo sapiens
ggtttgctgcaccta

SEQ ID NO: 1265651 - DNA, 15 bp, Homo sapiens
aggtttgctgcacct

SEQ ID NO: 1265652 - DNA, 15 bp, Homo sapiens
gaggtttgctgcacc

SEQ ID NO: 1265653 - DNA, 15 bp, Homo sapiens
ggaggtttgctgcac

SEQ ID NO: 1265654 - DNA, 15 bp, Homo sapiens
tggaggtttgctgca

SEQ ID NO: 1265655 - DNA, 15 bp, Homo sapiens
atggaggtttgctgc

SEQ ID NO: 1265656 - DNA, 15 bp, Homo sapiens
catggaggtttgctg

SEQ ID NO: 1265657 - DNA, 15 bp, Homo sapiens
ccatggaggtttgct

SEQ ID NO: 1265658 - DNA, 15 bp, Homo sapiens
gccatggaggtttgc

SEQ ID NO: 1265659 - DNA, 15 bp, Homo sapiens
tgccatggaggtttg

SEQ ID NO: 1265660 - DNA, 15 bp, Homo sapiens
atgccatggaggttt

SEQ ID NO: 1265661 - DNA, 15 bp, Homo sapiens
tatgccatggaggtt

SEQ ID NO: 1265662 - DNA, 15 bp, Homo sapiens
gtatgccatggaggt

SEQ ID NO: 1265663 - DNA, 15 bp, Homo sapiens
cgtatgccatggagg

SEQ ID NO: 1265664 - DNA, 15 bp, Homo sapiens
acgtatgccatggag

SEQ ID NO: 1265665 - DNA, 15 bp, Homo sapiens
tacgtatgccatgga

SEQ ID NO: 1265666 - DNA, 15 bp, Homo sapiens
atacgtatgccatgg

SEQ ID NO: 1265667 - DNA, 15 bp, Homo sapiens
catacgtatgccatg

SEQ ID NO: 1265668 - DNA, 15 bp, Homo sapiens
gcatacgtatgccat

SEQ ID NO: 1265669 - DNA, 15 bp, Homo sapiens
ggcatacgtatgcca

SEQ ID NO: 1265670 - DNA, 15 bp, Homo sapiens
aggcatacgtatgcc

SEQ ID NO: 1265671 - DNA, 15 bp, Homo sapiens
taggcatacgtatgc

SEQ ID NO: 1265672 - DNA, 15 bp, Homo sapiens
ataggcatacgtatg

SEQ ID NO: 1265673 - DNA, 15 bp, Homo sapiens
cataggcatacgtat

SEQ ID NO: 1265674 - DNA, 15 bp, Homo sapiens
acataggcatacgta

SEQ ID NO: 1265675 - DNA, 15 bp, Homo sapiens
tacataggcatacgt

SEQ ID NO: 1265676 - DNA, 15 bp, Homo sapiens
ttacataggcatacg

SEQ ID NO: 1265677 - DNA, 15 bp, Homo sapiens
gttacataggcatac

SEQ ID NO: 1265678 - DNA, 15 bp, Homo sapiens
tgttacataggcata

SEQ ID NO: 1265679 - DNA, 15 bp, Homo sapiens
ttgttacataggcat

SEQ ID NO: 1265680 - DNA, 15 bp, Homo sapiens
tttgttacataggca

SEQ ID NO: 1265681 - DNA, 15 bp, Homo sapiens
gtttgttacataggc

SEQ ID NO: 1265682 - DNA, 15 bp, Homo sapiens
ggtttgttacatagg

SEQ ID NO: 1265683 - DNA, 15 bp, Homo sapiens
aggtttgttacatag

SEQ ID NO: 1265684 - DNA, 15 bp, Homo sapiens
taggtttgttacata

SEQ ID NO: 1265685 - DNA, 15 bp, Homo sapiens
gtaggtttgttacat

SEQ ID NO: 1265686 - DNA, 15 bp, Homo sapiens
tgtaggtttgttaca

SEQ ID NO: 1265687 - DNA, 15 bp, Homo sapiens
gtgtaggtttgttac

SEQ ID NO: 1265688 - DNA, 15 bp, Homo sapiens
cgtgtaggtttgtta

SEQ ID NO: 1265689 - DNA, 15 bp, Homo sapiens
acgtgtaggtttgtt

SEQ ID NO: 1265690 - DNA, 15 bp, Homo sapiens
aacgtgtaggtttgt

SEQ ID NO: 1265691 - DNA, 15 bp, Homo sapiens
gaacgtgtaggtttg

SEQ ID NO: 1265692 - DNA, 15 bp, Homo sapiens
agaacgtgtaggttt

SEQ ID NO: 1265693 - DNA, 15 bp, Homo sapiens
cagaacgtgtaggtt

SEQ ID NO: 1265694 - DNA, 15 bp, Homo sapiens
gcagaacgtgtaggt

SEQ ID NO: 1265695 - DNA, 15 bp, Homo sapiens
tgcagaacgtgtagg

SEQ ID NO: 1265696 - DNA, 15 bp, Homo sapiens
gtgcagaacgtgtag

SEQ ID NO: 1265697 - DNA, 15 bp, Homo sapiens
agtgcagaacgtgta

SEQ ID NO: 1265698 - DNA, 15 bp, Homo sapiens
aagtgcagaacgtgt

SEQ ID NO: 1265699 - DNA, 15 bp, Homo sapiens
caagtgcagaacgtg

SEQ ID NO: 1265700 - DNA, 15 bp, Homo sapiens
acaagtgcagaacgt

SEQ ID NO: 1265701 - DNA, 15 bp, Homo sapiens
tacaagtgcagaacg

SEQ ID NO: 1265702 - DNA, 15 bp, Homo sapiens
atacaagtgcagaac

SEQ ID NO: 1265703 - DNA, 15 bp, Homo sapiens
gatacaagtgcagaa

SEQ ID NO: 1265704 - DNA, 15 bp, Homo sapiens
ggatacaagtgcaga

SEQ ID NO: 1265705 - DNA, 15 bp, Homo sapiens
gggatacaagtgcag

SEQ ID NO: 1265706 - DNA, 15 bp, Homo sapiens
cgggatacaagtgca

SEQ ID NO: 1265707 - DNA, 15 bp, Homo sapiens
ccgggatacaagtgc

SEQ ID NO: 1265708 - DNA, 15 bp, Homo sapiens
tccgggatacaagtg

SEQ ID NO: 1265709 - DNA, 15 bp, Homo sapiens
ttccgggatacaagt

SEQ ID NO: 1265710 - DNA, 15 bp, Homo sapiens
gttccgggatacaag

SEQ ID NO: 1265711 - DNA, 15 bp, Homo sapiens
agttccgggatacaa

SEQ ID NO: 1265712 - DNA, 15 bp, Homo sapiens
aagttccgggataca

SEQ ID NO: 1265713 - DNA, 15 bp, Homo sapiens
taagttccgggatac

SEQ ID NO: 1265714 - DNA, 15 bp, Homo sapiens
ttaagttccgggata

SEQ ID NO: 1265715 - DNA, 15 bp, Homo sapiens
tttaagttccgggat

SEQ ID NO: 1265716 - DNA, 15 bp, Homo sapiens
ctttaagttccggga

SEQ ID NO: 1265717 - DNA, 15 bp, Homo sapiens
actttaagttccggg

SEQ ID NO: 1265718 - DNA, 15 bp, Homo sapiens
tactttaagttccgg

SEQ ID NO: 1265719 - DNA, 15 bp, Homo sapiens
ttactttaagttccg

SEQ ID NO: 1265720 - DNA, 15 bp, Homo sapiens
tttactttaagttcc

SEQ ID NO: 1265721 - DNA, 15 bp, Homo sapiens
ttttactttaagttc

SEQ ID NO: 1265722 - DNA, 15 bp, Homo sapiens
tttttactttaagtt

SEQ ID NO: 1265723 - DNA, 15 bp, Homo sapiens
ttttttactttaagt

SEQ ID NO: 1265724 - DNA, 15 bp, Homo sapiens
tttttttactttaag

SEQ ID NO: 1265725 - DNA, 15 bp, Homo sapiens
ttttttttactttaa

SEQ ID NO: 1265726 - DNA, 15 bp, Homo sapiens
tttttttttacttta

SEQ ID NO: 1265727 - DNA, 15 bp, Homo sapiens
ctttcttttcttttt

SEQ ID NO: 1265728 - DNA, 15 bp, Homo sapiens
tctttcttttctttt

SEQ ID NO: 1265729 - DNA, 15 bp, Homo sapiens
ctttttctttctttc

SEQ ID NO: 1265730 - DNA, 15 bp, Homo sapiens
gccttttttttcttt

SEQ ID NO: 1265731 - DNA, 15 bp, Homo sapiens
agccttttttttctt

SEQ ID NO: 1265732 - DNA, 15 bp, Homo sapiens
cagccttttttttct

SEQ ID NO: 1265733 - DNA, 15 bp, Homo sapiens
acagccttttttttc

SEQ ID NO: 1265734 - DNA, 15 bp, Homo sapiens
aacagcctttttttt

SEQ ID NO: 1265735 - DNA, 15 bp, Homo sapiens
aaacagccttttttt

SEQ ID NO: 1265736 - DNA, 15 bp, Homo sapiens
gaaacagcctttttt

SEQ ID NO: 1265737 - DNA, 15 bp, Homo sapiens
agaaacagccttttt

SEQ ID NO: 1265738 - DNA, 15 bp, Homo sapiens
cagaaacagcctttt

SEQ ID NO: 1265739 - DNA, 15 bp, Homo sapiens
ccagaaacagccttt

SEQ ID NO: 1265740 - DNA, 15 bp, Homo sapiens
cccagaaacagcctt

SEQ ID NO: 1265741 - DNA, 15 bp, Homo sapiens
ccccagaaacagcct

SEQ ID NO: 1265742 - DNA, 15 bp, Homo sapiens
tccccagaaacagcc

SEQ ID NO: 1265743 - DNA, 15 bp, Homo sapiens
atccccagaaacagc

SEQ ID NO: 1265744 - DNA, 15 bp, Homo sapiens
aatccccagaaacag

SEQ ID NO: 1265745 - DNA, 15 bp, Homo sapiens
taatccccagaaaca

SEQ ID NO: 1265746 - DNA, 15 bp, Homo sapiens
ttaatccccagaaac

SEQ ID NO: 1265747 - DNA, 15 bp, Homo sapiens
tttaatccccagaaa

SEQ ID NO: 1265748 - DNA, 15 bp, Homo sapiens
atttaatccccagaa

SEQ ID NO: 1265749 - DNA, 15 bp, Homo sapiens
tatttaatccccaga

SEQ ID NO: 1265750 - DNA, 15 bp, Homo sapiens
ttatttaatccccag

SEQ ID NO: 1265751 - DNA, 15 bp, Homo sapiens
cttatttaatcccca

SEQ ID NO: 1265752 - DNA, 15 bp, Homo sapiens
tcttatttaatcccc

SEQ ID NO: 1265753 - DNA, 15 bp, Homo sapiens
gtcttatttaatccc

SEQ ID NO: 1265754 - DNA, 15 bp, Homo sapiens
tgtcttatttaatcc

SEQ ID NO: 1265755 - DNA, 15 bp, Homo sapiens
ttgtcttatttaatc

SEQ ID NO: 1265756 - DNA, 15 bp, Homo sapiens
attgtcttatttaat

SEQ ID NO: 1265757 - DNA, 15 bp, Homo sapiens
aattgtcttatttaa

SEQ ID NO: 1265758 - DNA, 15 bp, Homo sapiens
taattgtcttattta

SEQ ID NO: 1265759 - DNA, 15 bp, Homo sapiens
ataattgtcttattt

SEQ ID NO: 1265760 - DNA, 15 bp, Homo sapiens
cataattgtcttatt

SEQ ID NO: 1265761 - DNA, 15 bp, Homo sapiens
acataattgtcttat

SEQ ID NO: 1265762 - DNA, 15 bp, Homo sapiens
tacataattgtctta

SEQ ID NO: 1265763 - DNA, 15 bp, Homo sapiens
ttacataattgtctt

SEQ ID NO: 1265764 - DNA, 15 bp, Homo sapiens
cttacataattgtct

SEQ ID NO: 1265765 - DNA, 15 bp, Homo sapiens
ccttacataattgtc

SEQ ID NO: 1265766 - DNA, 15 bp, Homo sapiens
accttacataattgt

SEQ ID NO: 1265767 - DNA, 15 bp, Homo sapiens
caccttacataattg

SEQ ID NO: 1265768 - DNA, 15 bp, Homo sapiens
ccaccttacataatt

SEQ ID NO: 1265769 - DNA, 15 bp, Homo sapiens
gccaccttacataat

SEQ ID NO: 1265770 - DNA, 15 bp, Homo sapiens
ggccaccttacataa

SEQ ID NO: 1265771 - DNA, 15 bp, Homo sapiens
tggccaccttacata

SEQ ID NO: 1265772 - DNA, 15 bp, Homo sapiens
ctggccaccttacat

SEQ ID NO: 1265773 - DNA, 15 bp, Homo sapiens
gctggccaccttaca

SEQ ID NO: 1265774 - DNA, 15 bp, Homo sapiens
tgctggccaccttac

SEQ ID NO: 1265775 - DNA, 15 bp, Homo sapiens
gtgctggccacctta

SEQ ID NO: 1265776 - DNA, 15 bp, Homo sapiens
tgtgctggccacctt

SEQ ID NO: 1265777 - DNA, 15 bp, Homo sapiens
ctgtgctggccacct

SEQ ID NO: 1265778 - DNA, 15 bp, Homo sapiens
actgtgctggccacc

SEQ ID NO: 1265779 - DNA, 15 bp, Homo sapiens
aactgtgctggccac

SEQ ID NO: 1265780 - DNA, 15 bp, Homo sapiens
gaactgtgctggcca

SEQ ID NO: 1265781 - DNA, 15 bp, Homo sapiens
ggaactgtgctggcc

SEQ ID NO: 1265782 - DNA, 15 bp, Homo sapiens
aggaactgtgctggc

SEQ ID NO: 1265783 - DNA, 15 bp, Homo sapiens
caggaactgtgctgg

SEQ ID NO: 1265784 - DNA, 15 bp, Homo sapiens
ccaggaactgtgctg

SEQ ID NO: 1265785 - DNA, 15 bp, Homo sapiens
accaggaactgtgct

SEQ ID NO: 1265786 - DNA, 15 bp, Homo sapiens
taccaggaactgtgc

SEQ ID NO: 1265787 - DNA, 15 bp, Homo sapiens
gtaccaggaactgtg

SEQ ID NO: 1265788 - DNA, 15 bp, Homo sapiens
tgtaccaggaactgt

SEQ ID NO: 1265789 - DNA, 15 bp, Homo sapiens
atgtaccaggaactg

SEQ ID NO: 1265790 - DNA, 15 bp, Homo sapiens
tatgtaccaggaact

SEQ ID NO: 1265791 - DNA, 15 bp, Homo sapiens
ctatgtaccaggaac

SEQ ID NO: 1265792 - DNA, 15 bp, Homo sapiens
actatgtaccaggaa

SEQ ID NO: 1265793 - DNA, 15 bp, Homo sapiens
tactatgtaccagga

SEQ ID NO: 1265794 - DNA, 15 bp, Homo sapiens
ttactatgtaccagg

SEQ ID NO: 1265795 - DNA, 15 bp, Homo sapiens
tttactatgtaccag

SEQ ID NO: 1265796 - DNA, 15 bp, Homo sapiens
atttactatgtacca

SEQ ID NO: 1265797 - DNA, 15 bp, Homo sapiens
catttactatgtacc

SEQ ID NO: 1265798 - DNA, 15 bp, Homo sapiens
acatttactatgtac

SEQ ID NO: 1265799 - DNA, 15 bp, Homo sapiens
gacatttactatgta

SEQ ID NO: 1265800 - DNA, 15 bp, Homo sapiens
tgacatttactatgt

SEQ ID NO: 1265801 - DNA, 15 bp, Homo sapiens
ctgacatttactatg

SEQ ID NO: 1265802 - DNA, 15 bp, Homo sapiens
cctgacatttactat

SEQ ID NO: 1265803 - DNA, 15 bp, Homo sapiens
gcctgacatttacta

SEQ ID NO: 1265804 - DNA, 15 bp, Homo sapiens
ggcctgacatttact

SEQ ID NO: 1265805 - DNA, 15 bp, Homo sapiens
aggcctgacatttac

SEQ ID NO: 1265806 - DNA, 15 bp, Homo sapiens
caggcctgacattta

SEQ ID NO: 1265807 - DNA, 15 bp, Homo sapiens
gcaggcctgacattt

SEQ ID NO: 1265808 - DNA, 15 bp, Homo sapiens
ggcaggcctgacatt

SEQ ID NO: 1265809 - DNA, 15 bp, Homo sapiens
aggcaggcctgacat

SEQ ID NO: 1265810 - DNA, 15 bp, Homo sapiens
caggcaggcctgaca

SEQ ID NO: 1265811 - DNA, 15 bp, Homo sapiens
tcaggcaggcctgac

SEQ ID NO: 1265812 - DNA, 15 bp, Homo sapiens
gtcaggcaggcctga

SEQ ID NO: 1265813 - DNA, 15 bp, Homo sapiens
tgtcaggcaggcctg

SEQ ID NO: 1265814 - DNA, 15 bp, Homo sapiens
ctgtcaggcaggcct

SEQ ID NO: 1265815 - DNA, 15 bp, Homo sapiens
tctgtcaggcaggcc

SEQ ID NO: 1265816 - DNA, 15 bp, Homo sapiens
gtctgtcaggcaggc

SEQ ID NO: 1265817 - DNA, 15 bp, Homo sapiens
agtctgtcaggcagg

SEQ ID NO: 1265818 - DNA, 15 bp, Homo sapiens
aagtctgtcaggcag

SEQ ID NO: 1265819 - DNA, 15 bp, Homo sapiens
gaagtctgtcaggca

SEQ ID NO: 1265820 - DNA, 15 bp, Homo sapiens
agaagtctgtcaggc

SEQ ID NO: 1265821 - DNA, 15 bp, Homo sapiens
tagaagtctgtcagg

SEQ ID NO: 1265822 - DNA, 15 bp, Homo sapiens
atagaagtctgtcag

SEQ ID NO: 1265823 - DNA, 15 bp, Homo sapiens
aatagaagtctgtca
